United States Patent Application Publication US 2022/0090207 A1 - sequence listing, part 18

SEQ ID NO: 234706 - DNA, 1110 bp, Homo sapiens
  chr10:43428364-43429474
  hyper
agggccctgctgaggaaagccggtgcctcctgctccccagccctgtgctcccgcgcccccagtctcagcgggttccggcttagtccggcaccctgggggaatgctgcgctctggctggcagcacgccctgcctgcgctcgccccgtctttgctcctggtcaccatgcgtcctgcacagttaccatccgtgcccacatgctgccccggggtcgccgtgtccagatgtggctgggtcttggtgtccccgctgcgctcgtccctcctgccaccaccgtttgcatatgggcctttccattaagaatcacgcgctccgggcagggccagcgcgctgcgggcagctccctaagaccccgacgggcgtaagcctctctgcctctctgtccagtctggcctgggacagacacctgtggacacctgaggcaaagggaagtcggggcccagggacatctcaggggaatagggtctcgggaaaaagggagaggctgggctacgaaggggagctggggtaggcaggggagcacagccctgcaggagggcaggatgcccgcccggggcggaagagccgagggcaggccctggggcggggcgctgggctatggagaccacgctcctccgcccagtcctgtctgtccgaagcgacgcggcagggcacaggcgtccgcagaacccgccaagcgcgggacgggcctctgctcctggctccgccggccttcccaggccccgggagccaggaaggtctgaatggagtgatgcgcctggacttttgttcggaaatcccgcgtggagggcggcctagcggggagaggctggaaacaggcgaggaggagcagggccgcggttgtacgggacaacgggaaccgggtcttccctcgctaagaaagggaagggtctcagccttactgagaggagcccctgtggaggaagcgggcctgcacctgcggcttccctgcaccccgcacgccgtgcccaggcacttcctccccaacacaagcaaaggtagcccagctgcagccggatcctccctgagcgcagcgcaggggtcacagcccccgacagctgcgcaagtctattcctcccccggccttttcagcggccgtccagagctcagca

SEQ ID NO: 234707 - DNA, 400 bp, Homo sapiens
  chr10:43572901-43573301
  hyper
ccacccggcctcggctgggagcgcagtggctgcggcgggcggcgggcgaagggcaggacgcctcgggccgggcgcctcgggccggggctgggcgggtctcgggcgggagcggagcgcgggccgggccgcgggggtcggtgctcagaaccctagccatagccgcaggtctcaatctggccgcgccctgcgccaaagccgcgtcctggagcaaacgggacagccgtttcggggccgacctggcggacgggtcagggagccccgaaagcccgcgattcgtgcggagagttctgtttcggcaggagacggctccgtcctggtttccttttcccgctcagcgtccgtgcgttcctcccccagctctgccgtcctggccagccgagggattcggaggctcttttga

SEQ ID NO: 234708 - DNA, 556 bp, Homo sapiens
  chr10:43697737-43698293
  hyper
ttagaggagagctcccgtctgccccctgtggttgaaagggcgacagcgctgaaaggggtgtgaccccgaggggaggcgacgcgctcccgcgccctagtccacaggcatgcacgaccccacccagcacagggcctagggcatggggactggccctcttggctgaaacgactccgaccctctcggaagatgcccgcgcggcctctgcccccggggagaggggactgtgcccgatgctcaggcgccgcgcccccatcctccaatcccccagaacgcaccacaggccaagcccctcctgcgccagccaagactccgcgccagcccacaccagccccactcagaccgctggaccccgcccccggcccccgcaccacccagcccgcaactctgcagctttcttcgcccacgccgcacagcctccaaaccagcggattccgcccacgttgccagcctaggccccccaccacccgctcccaccacgcccctaacccggacccaacccacagctccagcccagacctcaccccagcctggtgtggcgtcacgccccaactcagac

SEQ ID NO: 234709 - DNA, 454 bp, Homo sapiens
  chr10:43724713-43725167
  hyper
cacagaccacacaccgcggaccacccctcgcccggcacatcctcctcagagcaacaggtggttctgcgcccctcaagtcgtccgggctcctacacgcccgtccccaccccttccaggctcgcaggagccactgtgctctcggcgtccgcgggccgcgccgcgaagggcagggcaggagcagaggcaggctgggcgccgcccaccgggcagtaggtgctccagcggggacgcacagagggcggcgcgcgggtcctcagggcgggcaccctcccgcacgggtcgggatgcaggggaccgtcgcacccctcccgagcccgacagcgcaagaaccctgccccgcggccttgcgcctgggcccgccgcagccctacctggggctccaggaacattctggccgccggctccccgcgccgtcctgcccggtccggcgtccagcgagcggcggctcctctgc

SEQ ID NO: 234710 - DNA, 148 bp, Homo sapiens
  chr10:43725397-43725545
  hyper
gagctgcctgggccgggcgcgcgcctggcgctaggtgtgggggcgccgtaggtgccggggtgtgaggctggacggggcgtccgggatcggccgtgccgggggtcggtgctggcgcgcggggccggcgagggggcgcagcgtgggtcgg

SEQ ID NO: 234711 - DNA, 652 bp, Homo sapiens
  chr10:43761673-43762325
  hyper
cccgttcctggggccggcaaggcctggggcaaagagagcgtggtccttcaaatgacccttgcccagcagggagagggagacacctggcatggccctggacctctcccccaaatgcagagctcaagccccaattcctcgccaaacagcaagggcgtgagataccacggcggggcccagaatgcagaagagcaaatggaaacttccaactgcgcagccctgagctcctccgattccccagcccccacccccacgccaggccccgggcagcgaacctgcccgcagtgcccacgcccgcccgccgcgtgcgctcctgccacgcccggcccggcccggcccggcccgccaggtgccctgaaggggcggagggtgcagggggtcctggcgccgtccagcccggggcggagttctcagcaactccgcgcgccgggatcccggccgccctccccgcgcgcgtcccccgccccgcgcccggagcccgcgccccggccccacgacggccgcgccgggagggaccccgggcccgcgcacgccgcgccctgcccgcgccggcgaccggagggcacggccccaggcgcgggcgggggccccgaggcactgagggtccgcggccgctgcctacctcggtccgggccagcgtcgctcccgcgccgcc

SEQ ID NO: 234712 - DNA, 256 bp, Homo sapiens
  chr10:43800185-43800441
  hyper
gagagctgaggaggcgggtcctggggcagcggcagcgttaccgcttgcaaaggcgccccttttttctgtgctgattttcgcctgtgagacttcctcccacgggcgccgctggctagtcagactttcccgcgtgcctcctgccccgccctaacaggctaacttttccgcgccgggcctggctctttgctgcagctgccgccctcggtgcagagttcccgggagcacttgctggcttcggtttcgcgaacttcctggc

SEQ ID NO: 234713 - DNA, 250 bp, Homo sapiens
  chr10:43818308-43818558
  hyper
tactcagaccaagccggtttaccgtcaccatggcaacagcgcgtcctgggctggggcggggccagactgccagtgcctttgtggcgcattaggagctaagccagtgattggccatctgggcgcggggcgggctgagtcagttggagggggcggggctgaggctccggtgaacgccgtaggcccgggctgggccgagggagatgatggatgccgcttcttgccactccccgggggcaccacagagagcggg

SEQ ID NO: 234714 - DNA, 301 bp, Homo sapiens
  chr10:43857618-43857919
  hyper
gaccgccaccatcacgacatagcgcagcacatatgggtaaacaaatggactgagactcaagcaaagaagtaacccgagacgcgcgttacacggaaaacgactgcgcaagcgcggtagagcaggggcttgcaggtgagtgggagcagccaatccacgcgaagggggtcgggaccacttccgcggaggaaagccccgcccacacctcctgggccctcgcctcactggcggtttctcccgcgagccagcctcatagacattccttggtgctgattggctggcggccagcgcagtcctccttcct

SEQ ID NO: 234715 - DNA, 1108 bp, Homo sapiens
  chr10:43892054-43893162
  hyper
agtggtggtggggtcccttccgcaaggtgggaggcccgggcgcgcggtaaacgtgttttggcgggaagcagcgccgaggccccgagacaaggtgacggcgacgttcccgcggcctgctcacggcactccagcagcctcggaccgcccggcccggcaggaaggtcggccccagggcctgcgcgggctcgggcgggagcttccgggcggggggcggagcgagcggcgcagcggggagagtgggggcagggacgggagggttcccggagggaagggcgcctcgcgggagggggaggggaggggaggggaggggagggggcccctggcgggcttccggggccctgagggcgagagcgagggcgacggcaaggtggggtgggggctgctccccggcccgccaagctagcgctgcctaggcgggagctcggggacccgcgggccgagcgcggctgaagggagggaagggaagaggcgctcgtaggtctgcgtccgtctccgagcgaccggggcggcggaaagggacctggggggggcggccgggactggagtggcggggccggggcgcccgcgcggcggctcaccacgccagggactggcccgtcggccccgaggaggcgcggggtccggagtccgggaagcggaggcctcgtgatccaagaccggcagccggacgtgggtcacggggtgcagaggaggaagtgccattgccgggcccgccaagatgtcaccaatgggaaacgcgtgcctgcaggtgcggccccgtggcccgcgcgctgggcccaggcaggaagtgggggaaggagagagtcagggcggcgggaagacatttctccgagttctcccgaagggagccaggcgcgagcgcgacctggggaaagtccagagtgccagccacggggaagggcgggcagtgcagagtggaagagaagccagcaagttagacacagcccctctctgggaggccgcctctaaaatggaactagcggacgtaccttggtttgtacatttgaccatggacacacgtaaagattttgaaaaaaaatctttgaaaaaaaatttttttaacgcaattcctaaacttttaactaacgcaattttgtggacctctgaa

SEQ ID NO: 234716 - DNA, 73 bp, Homo sapiens
  chr10:43904392-43904465
  hyper
cccgtcgagcgcacgcggctttgccggaagccctcctgctcccggcgagccaggccccgactaggccctactg

SEQ ID NO: 234717 - DNA, 255 bp, Homo sapiens
  chr10:43932226-43932481
  hyper
gcctgccctccagcgcccggggtcctcggcccagccctgctccgagcgcgtcacaatggcgtcgcggccccgcccccggacgcccagccgcggtcccagcgaccttcgctttcgtggggaagccggactgcgccgtgtcttcctgaagaaggctggggtaagagtccggccagcggacaagagggcagctggtagcagggtgggatgcccgtggcatagggccgagcccccgctaggcacgcgggagcagcaagg

SEQ ID NO: 234718 - DNA, 1016 bp, Homo sapiens
  chr10:44185104-44186120
  hyper
tcttggtgaccactgtgagccggcgaggtccactgggccagaccctggcccgaggtggccccggagctgtgagcgggaggaagagggaagggcggagtctggagccctcacgccttccgccttgtgcgcggtgcaggctgccgagagcccggccgggcaagcctttccgccgtggtcagtgactcgtttgcacaaggactttttagggaagagagaagccaggccttcgctgtgggcctagcccctcaaaccgcaagctctcccccttggggtcctcgtcgtgaacgcccttctcgtctcccgccgggctcactctttcgcattttgctgcgaaagtttactggaaataggtccattcactggtcgattcagagggacactagaaacgcgatgcccatatctaacacatcctggccttttgaagagggataaaaaataatacccactagagccccgtgcctccggagagtggggcttcgcatttgcgcgtccgaggcccggcagggagagcttctgggtcctgggggcgcgcacatccggcgcgcgctgtgtcggggagcggcgctctgggctgggccggcagagggcgctgcggggcggccgtggaacaagcaggggagagcgtcaggggacccagcacagcctgcctgctgcgccctgctgccggccgcgccctcctccgtgctgcgttctcctgctcgacgctgcgtcctcatccaacactggcaccgcgcgctccttccagggtcggaggcccacagacccctcacgttcgcttctgtcaggagtagcggcagaatttcgataatttatgtctttgatggagactgggaaggtagcctggccgctgcgcaggagagctgcgcggggtccaggaggggagcgcggagtgggagcagtcgactcgggctgcgcagtgcgtgtcggctgtcacgggacaccggtgaggaccctgcacccagagtcgggggtccaggctgttgctggaacaggaggcagctcggtgtccacggttc

SEQ ID NO: 234719 - DNA, 386 bp, Homo sapiens
  chr10:44806416-44806802
  hyper
ccggctggtccagtgcactccggcgcggccccggcacccgtgggcaccgccatgtccttcgctcagctccgccgcggctacctgcggggtctgcgcggctgcggtggccaggtgaggacgtctctgcccttgcgcggcctgcgctgtatgcttcctgcctggcccgcgcttcccctgcctgcatcacccgctgcccgcgcggctcggagcgcgccctctgctggaccggccacggccggcgggcggctgcctccaggctccaccacaggagggggagcacgcgccctgctgaccgcacgcccacgtgatatcgccttctgccatcgcagaaagcagcggttcagcctctctgcctgcacacttgcgtgatggggagctcacaagca

SEQ ID NO: 234720 - DNA, 1722 bp, Homo sapiens
  chr10:44879273-44880995
  hyper
cccagccaagggctcgaggcgcgctgggcctgcacagcccgcggctgcaagagcactcagagtgtccttcaactctttgcaggaaacttcacagccaaggaagctcagcggcctgagccacagggttttgttttgtgtgttcagaggcaacagtttattttggtttgcatcggtgtcctgtgacagcgcagcgagtttctcttcagcgaaagaaaagaaaaaagccctctcccagtgaaacgggacaccacggttcccagtggcccagggccttggagattgaactttgctgcagctctcattctggggcaaagcgcttggccagctggtgacaaaagagcctgtctgcaggtgtgtttggggagctggggagggggcgtgtgaggctcggagggtccctgggcctctctcaggtgaacccgagaagagacaggaagacagcggctggacgcgcgcccaggtccgcgtcgctgcggaccgcggagctgtgcagaagcgcggcctggcgggtggcacaagcccgacagctgcgccgcgcagcccgcccgcgcctggccaagagccccgcgagggtgtggggagaggatcggcttcgcagggagcggaggctgcgcggctgcatcggacctcacagcctcaagtcgcggcatgaggcgaactttgcaaagcgcgctctcgccatgcaccgcccgacctccagcactgtgcgcagcaggacctcggagcccattcgcctgtggaaaccgagcccgcagcgggaaggcagtgggtggagggtgggcaggcaggggtctggggtccgcggctccccaccctcgcgccttcccgcgccagtcccgaacgctctcttggggcgttcctgcccagttgtcccggctgacctcgctctgcagccagcttgaggtcaggcggtcgctctctgcaggtcacaaaccctcggcgcaaaagtagggctttgaacgcgacaccgcaccagagcgcccagctaagcgagctgcctccacccccactgtgtcgggcggcgcaaactgcgggcgcaggcagaggagccgcggctctgcgccgggcgggagccgaagcccagagcctcgccagggcctccccgccgagcgcacttaccgtcgctgaggcagagcgcggtcagcacgaggaccagcacgaccacgaccttggcgttcatggcgcgggcgggcgggcgggcgggcggacgagcgcgggtcgggggccggacgccgagcgggcaatgcggctgacggagagtgaaagtgcggcggtgggaggcgcgcgccgggcgctttagaggggagagccaggcggggcggggcggggcgcgcggtgaggggcgggcccggagccgagtgctggccgtggccggggtctctgacgcgcgactccctcggcggcaccccccacccatccccttcgcccctcctccgctccctctgtgctcccgaggcgcagtgcgctccggcctttgaccttctcaggctccgctgggccccgcaccgctggcccggtctgcagtgaggtccgcagcctgagcgacgccggctggagggccgcttattgtccctgtgacagggccccactggagagactgaggaccttaggcgtaaagtggggcgcgcgtggaaagctgcgggacggggcctttcgatggcgggaactgaatgagaaccaatgaaaagcaaacaagttagtcccgggcggagggcctgctgg

SEQ ID NO: 234721 - DNA, 304 bp, Homo sapiens
  chr10:44882093-44882397
  hyper
aggcagccgtcgggcgtccccaggcctttgctgggctgggccggggagcctggccgctcaccggccgcagcgctggggctccggcgccctctggtggcggcgcctccctccccgctcccagagctctggccagctccattcctgcgcagctgatgaaacccgggagggcgaaggggtccgcgggaaatctacacccgggtggaggggcgccctggagctcggagatccgaccctgcgggagccgcgcgcagcctcgcttgcccttaaatctggccaaagcaaacgccatcgcctctcgcttctt

SEQ ID NO: 234722 - DNA, 281 bp, Homo sapiens
  chr10:45470472-45470753
  hyper
acaagcaagtgagccccaggcggcaggaccttttctggggactgtgtgccggccccgcccgcctggggcgcggcgccgaggctccggggcgccccctggtgaccgcgggcgcgctccacatccagtcccgctcctcggcccagggacccctcagcaatgagagaaacggaaggggcttcccctggtccgggggctccgtctctcccaggggtgcggaaaaccagcatcccgccttgagagagttgccccgtcccctctccgaaggcctggcagaccactgg

SEQ ID NO: 234723 - DNA, 1176 bp, Homo sapiens
  chr10:49731361-49732537
  hyper
tgagtttagggagcgctgcagtaaagggatgcaccactatgttcccaacgatcaacagggatcatttcagtcagtcaagggttaagtcggccgggccccagcccccgggaggccggacctccggcggccgccaacgtcctaagcgtgtttctgggctttgggccctctccaagactgctgcattcctcaagcagctctgctcgcaggttgccgccgcgagttttggaaaactctgagtcagggccccaccgtccaagtttgtgacagaggcgggcgagaatgaatggtccctctcccggcagttaagccgcaggggcggcgcagggcgcgcgccgggctcgcggtgcagagacctgcgagcgggtctgggcgccgggggttcctccgtcccggccgtggacttggcggacctgcagccggcgccgcggccagccccgggccctggagggcggaccctcccctccgctctacccactcccgcccaggggccggaccccacccccactcccacatggggaccgaggagccccaggatgcgcccccgcgccccgagtgaaggggagcctccccttccaaagttaggagactcagaggagcagcagccgcacctgagccctttccaaagctgaggcaggtgcgggcggccctggacaccccgtggcgagtccccgaggcggggctggcagcctctggcggcggccgcagggagcggggcgcacgtgcgcgccggagttacctttgggcgctcgcaggtgtcccctccagtccttgcagcagcacagccccatggcagccgcccgcggccccgccgctcggctcctctccccgcctgccgcctgcgccccggggcggcgcggccgaggtccggcccacgggcagtgcccagctgggcgcagggtgcgcgggaccgccggcccgcggctcccgggccctcacactccaccgcggccccgcgcagcgggcatgccggcctccgggcagaccctgctaatcaataggagaacgcgcagatcgcgaccgccgcgccactgcccgcttttatctccgcgcgccggggcggccccgcgctgctccctgccctcgccggcgccctccccacggcccgttactctcccggggtgccgggccgcgcgctctcccaggagccgccagggggcgccacggagccggggctgc

SEQ ID NO: 234724 - DNA, 589 bp, Homo sapiens
  chr10:50323149-50323738
  hyper
accaacttgggctgcgctcctgctgcatctcccctcggggcctgccgctgggaagatctcggctgctgcgagagtacccagccccaggcgaggtcgggacggggaccgcgctcacgggaggcgtcctctgaaccttggggaggcgccgctgcgcccgccagaccctcggcgagcccaccggagcgcgctggcgacagtgacagcgccgccccccgcccgcgcccggaggtggcagggcctccccaccaggcccggagccccggcctccccggcgcggccgcccggcccccacccttcccgctcccgcctggccccgccgcgcttacccggagccggagcccgcgccagcagcgcggccgccgccagtgccagcagccgcatctccccgccgccgcccggcgctgtgacgcgggagagcgccgccgcctggcccggccgccgccagcccgccccgggcccgcgctcgcgcccgcccccggcccgccccttgggccgcctgccacgcggggccggggctgctgggtcccgaggcccgcaccgggcgcgggagccgccgcgcgatcggttcgctccaggatctgtggcgtct

SEQ ID NO: 234725 - DNA, 1144 bp, Homo sapiens
  chr10:50603007-50604151
  hyper
gagcagcccagcgacgggcccttgtaggctcgtgcagctcgtgatctgggccaggacgcggcgggtccactcgcctttgctttctgggatgtttgcagaagcaccgtgaaagattgatgcggccccctgggttgcggagccccaattagaggcgtgacaccagcatctgtgctgggaggattcggccggtccccgcggcacgcctagcccggggcgtcctggcccaggcggggagggagctgggaggcaggtggcgacggggcggggagctggagcgggcctggagtggggtgtagggaggggtccagggaggcccctactcaccggcaggcggctgcgccccccgcagggcggggacccagccacccaccagccctgctgccgctccggccctttctggccggctctggcttcatggagaccctggggcgcagcgcttacttaccctctagctgtggcgggcagtggaaataaaacatcgccggctgtcagatcggctggacggccgagacctgggagggtggcagcagaacggacccgcgcgcgttgctcctgcctggctgcaaagcaaacagcgatagagcttcaagtctccctctgccagcgctcccgcccagccctagggcgcacccggcgctcccctcctggaaagtccctcccaacgccctcatctcactgcgggggacaggagggaaggcggcagccccgtcgcaagcagcaaccccacagggcagtccttcgggtgtgtccacctcccggacggccgtgccctcaccctggccccagcaccaaaccccgcagcgtagtttctggctctctggggtcccagccagaagccctgcacccgggccaccgcagccaggtccggctagcgcgcaaggccatctgcgagctgcagctcaggccaggaaggcagccgagccccaaggcccggcgctcggggcccggcgagtgggtcaggagccgagcatacctcggcgggcggcggtcgaggaggtcggagcgtgaccgcctccgatccgcaagccctgctcggctggcggcgggcggggctcggcgcggctggcgcccgcaggaccaaagaagtgactcgggaagtggccagatgtcttgctgtctgtctgcagcgcgcgccgccgctcag

SEQ ID NO: 234726 - DNA, 169 bp, Homo sapiens
  chr10:50604555-50604724
  hyper
ctttccaaacgatcgtacaaaaggaaagtttgattttgttctcagcaaggggtccctgaatttatgttcgcttctcgatgcaaatgatatgcggtgggaccctttgcaattacttttaaaatgcatccgaggcagacactcaacggagagagaccgcccttctctctgc

SEQ ID NO: 234727 - DNA, 848 bp, Homo sapiens
  chr10:50605144-50605992
  hyper
cattctaatgctgcgttagggagccttggcgaggtggtgggtcgggtccctgcacggcccgggatacagccttgatcttaaagacgcagcgctttggaaacaaaaggcctggcaggcccgccgctggacaccagcgctgggcaaggagcatcgagctgcaggacagagcgctgggtcccggccgccgttgacgcccctccgaaaacagccgggaggaagaccagtcccgctccggtcgaggcaagtcaggatctattccagtgaagcggcccttcctgggctcagtcgctccagagcagagtctgctctgcctcggggaaagaatcacaggaaacttccgctcgtttcagagcggagagagctcggggcgccatttccgccagggccaccgactccgagagtccaggcagccggcccgggaggagcggctagcaggtcccgaaggcgggtgaggtggcaggcaggggccggcagggcagccgagggcctttcctacgtcatgccaagagggctgggagcccctagagctgatcctcccttagcccaggtcaagagactggctcgcgcgcgctgtctctctccctgtctccctcagagggcccctgctctctggagctcttgacaagagcccgaggctcctcttgccgcctaggtctgccgaaagtcccctcgggttccctcctgccctaggcagcagttccctgcctgtgcgctttgggaacccggtggccgtgaagtgaggtgcggacagcttctgggccgcctcggccaagatgctcaggcgcacctgggggtgtgtgcgggaaccctcagcggcagcagcccagcccggggtgcagtgttggccc

SEQ ID NO: 234728 - DNA, 105 bp, Homo sapiens
  chr10:50606772-50606877
  hyper
cgttagtaacgaaaaggttatttttccttaatttttgtgcggtaaaatgtattttccaattaaccaaattcgccgatctgtctcgcttggacactctgataattt

SEQ ID NO: 234729 - DNA, 510 bp, Homo sapiens
  chr10:50814999-50815509
  hyper
agagaaaaatgcttccgttttctcctacaggattggacaggaagttctctgttgcctgcaagttatgctcagatagaggagtccggaaaggaatttaccaagcgttcaagtgaagaggaagccagaggggcggggcctccgtgggaggcttcttggttgcggtggggccggggccagcaccctggacagctcccggcggctggcggggagaagaggctttgccaggtcccatctcggctcagaccctcccgtagccttttgctgcaggggcctgacgcctccttgcaaccccggcactcccgtatttggagccacgatggattgggggggcgttgccctctgatctgaaagttagagaatgagggagtttagtgtctttggagcctccttagggagccagcccaggaccttcctcctcccatgggtcttgatctgctcctcacccctacactgccagcgtgcggccaccttggagatggagcagcaggagcacgacgccgtgccgggaat

SEQ ID NO: 234730 - DNA, 488 bp, Homo sapiens
  chr10:50817090-50817578
  hyper
tctcccgccagtccgcccactggaacacgggttccatgtgccatccagggtcaacgccgctctggggacgcgtcaggcccagcgcacagcctgggcagctcagcctgtcagctgagcacgggcgcctcaaggggtgcggccctctcagaaggaaggtgagtctccctggagcccctgacgacagcgaagcggctgggcgctctccggggagtgggcgcggcacccaagaagggtttcttacagttccaagagaggaccccagccacagtcactccagagcccacccggggcttggaggaggctctggaaaatgagggatgggggagtgtgcagaacagggggcggaggctggcaggagccgagggagggcttggtcgggtgcgaagagtgcctgggaggagttagagtggggagggggtgcggcggcggggagagaagaggcggagctgggggaccagaccgctaaaggagaaagggggattccaggc

SEQ ID NO: 234731 - DNA, 164 bp, Homo sapiens
  chr10:50817998-50818162
  hyper
cggctgccgcgcccccttccccaagaggagaagagcgggcgctgaccccgcgagtcctagaaccgcgggcggggggcaggcagggggcggggggcagagggccagctaccggcgcggaacgcccatcccaggggctggttcaagacttccacaccgagagccct

SEQ ID NO: 234732 - DNA, 818 bp, Homo sapiens
  chr10:50819122-50819940
  hyper
ccccgctaccctacggagagcgaagacgtgaagatcggggtgctgtttgcttccaaggctatcctgcagctgctagtgaaccccttgagcgggcccttcatcgaccgcatgagctacgacgtgccgctgctgatcggcctgggcgtcatgttcgcctctacagtcctgttcgccttcgccgaggactacgccacgctgttcgcggcgcgcagcctgcagggcctgggctcagccttcgccgacacgtctggcatagccatgatcgccgataagtacccggaggagccggagcgcagtcgtgcactgggcgtggcgctggccttcattagcttcggaagcctagtggccccgcccttcgggggcatcctctatgagttcgccggcaagcgcgtgcccttcttggtgctagctgccgtgtcgctctttgacgcgctgttgctgctggcagtggccaaacccttctcggcggctgcacgggctcgggccaacctgccagtgggcactcccatccaccgcctcatgctagacccctacattgccgtggtggccggcgcgctcaccacctgtaacattcccctcgccttcctcgaacccaccattgccacgtggatgaagcatacgatggcggcttccgagtgggagatgggcatggcctggctgccggccttcgtgcctcatgtgctgggcgtctacctcaccgtgcgcctggcggcgcgctacccacacctgcagtggctgtacggcgcgcttgggctggctgtgatcggcgccagctcgtgcatcgtgcccgcctgccgctccttcgcgccgctagtggt

SEQ ID NO: 234733 - DNA, 213 bp, Homo sapiens
  chr10:50821017-50821230
  hyper
agcccggggatgccgcccgggggagcctgaggacccgctccagctaggcacgccaggccccgccctttgaggacacgccccacaccagcctcagagctctgaggtgcctgggctgagcttcccttcagaccagaatcccgccccgttgaggctttgagaaaggagtaggagccgagcattccggcagaggaagaaaaacggcccatcttttag

SEQ ID NO: 234734 - DNA, 241 bp, Homo sapiens
  chr10:50821467-50821708
  hyper
ccctgagagcctcaagccagcgttcgcgcaacactccatgtcccgaagaccgtagtctgatgatcgaggcagagtcttcccatcatagcgtgaagaggcggctggtcagggtcgcctgtgtgttagctgcgcctgtgagggtctgctctgctgttgtgcgcatgtctgtcctcgatctgcgagtcgggctgtgtgtgcctgggcggagtctgcctttgtcggtctgtctgtgctatttctg

SEQ ID NO: 234735 - DNA, 103 bp, Homo sapiens
  chr10:50822144-50822247
  hyper
taaatttgttgcccgagttcctccgggaagcgctccgggtagattctgggggccgggagctgagatccctgggcggggagctggggaagggatggggctgagg

SEQ ID NO: 234736 - DNA, 188 bp, Homo sapiens
  chr10:50822667-50822855
  hyper
gggtcagctaggaagctgcaggattgcgttgcttcggtgcctgggcttggggaggcttaaccatcagggcttcgggactccaagcgcatgttctcacttcacttggcccagcatctgctaagtgaccaggtccgcgctttctgtgtctagtcggagggtccttgggtctgacccgactcgcctgaatt

SEQ ID NO: 234737 - DNA, 186 bp, Homo sapiens
  chr10:50887553-50887739
  hyper
caccagctcaaacgcgcgtatttgcggaccaggcgctgagggtcacgtgagcagcttggggccgggaggatcccctagcgccaccccggccccgcccggcgcgtagcgacgcccacgcgcccgggccggaagagaggttgcttagcagcgtgtgtttctcccttgcctctgcggcggcggaggcct

SEQ ID NO: 234738 - DNA, 162 bp, Homo sapiens
  chr10:50969672-50969834
  hyper
gggtctctccggttcggcgaatgcgtactgcagcctgctgtggcctcgggattaccccgtccccctcccacatctcccggggggcggaagaagcgcatcccatgcaagcagcgacctcaggccatgccgccctctctcaggcctcagttttctcatctgtaa

SEQ ID NO: 234739 - DNA, 196 bp, Homo sapiens
  chr10:50970134-50970330
  hyper
cctcctccccctccccccggcggggccagactcagggctgcgggcagcggcgccccaggacccaggagagaggagctgtggggccggtccccaggacggcaggagaagcagcggcgcagggaccgggagggggcgggccgccgcgctcaccgggcgggcgggccgggtccgcgctgcagcgaggtccggaggctgc

SEQ ID NO: 234740 - DNA, 575 bp, Homo sapiens
  chr10:50976497-50977072
  hyper
aggggcggggagcccgcgcctgcctagcccggctctcaggacacctctgtctgcgtctccttcgtcgccactccgggtttcgactccgcgtggccaggcaccccgggtcaccacctctcgacccagggcgagctcacgccgccgcctgcgcgctgaactgggagctgggagcagccgacatcggtctctgaaaccctgcgctgggaggccctcggctgggcgaggattcctgggcgctgaacaagttttcccggcggtgtctgtccgagcgcagacagaagccgcgcgagggaacgcggggtcgtgtcctggggcggcggggaggggctgggagggcgggtgtgcaggggcctgggctgcccgccggctaggggcggccaccttggccggagatccgacgcgcggggactcccggtccgcgctcctccagcaggccggatccgcgcggcagtcctgggctccgctcctcatcctcctgccgcggccgcgccccgctggggaaggtgcgaggtgcggcggacgaggacgattcttgacgctgagcctgtgggccaggcccgcgcccaccacaggaa

SEQ ID NO: 234741 - DNA, 665 bp, Homo sapiens
  chr10:52177818-52178483
  hyper
cttacggtctctcgtccccggaggcagtgtctcctggaaagttcctggggcaccaagtttgcgcgcggctcctcgcgctcagggtgcgcgcagccagccctggcgcgggcggaaaggcgagcgcgctgagcggcgcgcagaccccgggcgcggctcttgctgggcgcccgcgccttgatcggtcccggcggtcccgttcccctgcttgccgggccctggtgctaggacagcggcgctgcggagcccggcgtctggagctggcgggcggccggatgcgccgatcctctcccggggggtcaactgcgagctagacgcccagccggacctcagaggctccaagagcggggttggcgggtgtggcccggcagcagagggtttttggaatgcagggtgtggccctctaccacggcaaaaaagaaatgagtcagcccgttcagtcctaaccaataagcatgttcagtgtcggttaaggcggaactttcctttcttgatttataccaagcttagaagcctttcacagccttttctttacgcctttgacaacttcgacacaacttctagaaaagggtaggttgcctttgaaaacgcttgggaaacaaggattaatcttacgaaagatacttcagtggatgtacattagtttcgattagtaaaagtttttgagt

SEQ ID NO: 234742 - DNA, 53 bp, Homo sapiens
  chr10:52383839-52383892
  hyper
tcccgggaccgagcgggaccccgaaccaagggacagtcgcagtttgggcccct

SEQ ID NO: 234743 - DNA, 1304 bp, Homo sapiens
  chr10:52750721-52752025
  hyper
ctctgctagcaactcggctgtcggtggggtggcgcgcgcgtattctcacggagtgactaggagagggggacgagggagggggtctcaggggaggaagggcagctctaattggtttctcaatgaaagataatcacctactccccagagaggctggagattagcactctgcctctcctctccatcgcttttagacttctcatcctcccctcggtgcttttagtccattcagcagaagcggatcgaagcaggaggctccccgcgccgcattaggggcgcactccgccgcgctcgagtacttagcgcccattcactcgctcacccgcgctctccgctgccggctgccgtcccagccgccgccgccgccgccgccgccgccgccgcccgagaaaaagtttcgcggaggggctcagtgaaaaaatgagcgagctagaggaagactttgccaagattctcatgctcaaggaggagaggatcaaagagctggagaagcggctgtcagagaaggaggaagaaattcaggagctgaagaggaaactccacaaatgccagtcggtgctcccagtgccctcgacccacatcggcccccggaccacccgggcgcagggcatctcggccgagccgcagacgtacaggtccttccacgacctccgacaggcattccggaagttcaccaagtccgaaaggtaggcgcggaggccgtgggcccgggcgctcgtcccggcccgcggcgcagaggctgggggctctggccgcggcggcgggggcgggtcggcccagggcgccccctgctcgctgcggcgcgcggagtgggggtggccccgcggcccgggaatgggaagtgtttatttttatttctgcccatcacgtgctgtgcttgtctccgccgggctgggaaaggcgagctgcacggggagacgcgcccctgtggcgtgggggtggggaggaggaccgcggaaagtttactcgcgcgggctaacttgtgccctccacacatggctgcagtcgcgcggctgtccttcgtgcgccccgctgggagcgtccacgcagggacccaaccctgcccatccaggggcctggagagcttcccagcggcgaccccccggactcaggccactggacatgctcagtggggctgtccgagcctcctagggaggggcgactggaggctggacagggttgggctcaacttagggactgaacttgcccagaacccgagctctgctggcggatgcggggacagggagaggcgggacaggggcttgtctctagggcagggatccagcctggagcgtgggggcgaggag

SEQ ID NO: 234744 - DNA, 1111 bp, Homo sapiens
  chr10:52833754-52834865
  hyper
ggatcgtagctcaacattctccaggctggtctgctctggagtcagctgaggcctcccgagtttgcccggggtcctccctgtcccctccctcccacctccccacccccgaagtagcgctcccgcctcgctccacccgcacacccccggcgcgcctcggaggcttatcaggctccccgcacgccccgcaagcttccttgggcgcccggcgcgagggactctgagagcccagccgctgcctcggagcccccattcacgtcccctcctcccgctcccccgccaccgcgcctccgactcttctcccccgcgccgcggcgcccaccgcgtctcaggtttaatcccgggttggacctgctggtttgctctccccgctctgagcctcacagccagcccagagaagtggaatctgcactgaaactctgggtggctggagccggcggactgggcatgctcagaagccagggctggctttggtctcaagtaggaagctttggcactcgggaggcagcggcgactttggggaaagttgatcggagaggggaggaagcctcaagacgcggagcagcggcaggaaggagcccccggcagcccggaggagcatgggcaccttgcgggatttacagtacgcgctccaggagaagatcgaggagctgaggcagcgggatgctctcatcgacgagctggagctggagttggatcagaaggacgaactgatccagaagctgcagaacgagctggacaagtaccgctcggtgatccgaccagccacccagcaggcgcagaagcagagcgcgagcaccttgcagggcgagccgcgcaccaagcggcaggcgatctccgccgagcccaccgccttcgacatccaggatctcagccatgtgaccctgcccttctaccccaagagcccacagtaagcaggggtgacgcgccgggtccatgtggcgccctggcgatggggagctgcgggtctctgtattgtctgtcggcccccgcccctcccgcttgccatgtctgtcctcatcctcagaaatgtttcattttaacgggcacttcttgcggggctgtgcacgtttctcagagccagactcactgcacatacgttgccttcgtgtct

SEQ ID NO: 234745 - DNA, 450 bp, Homo sapiens
  chr10:53459323-53459773
  hyper
agacagccgatagcggattcttcgaggcgtctgtcctcttgcgaccgacacttccgctgagcaacggaagcggctttcaagatccgggcagaaactttactaattcgcttgaatcgttccgcttgcctgtggaacctgcatcccactaacaacttatctaatgctttcagtccctgatccttcatggttctgtcagcttcttattacagagtcgcatgattcctttcccatttcacgttccgctgactttctgtggggccccaacagccccactacgacacgcttggtacgagatgaccacagtaaagatggccgcatagacttcaccgtagtaactgggaggggactcttcccttgacgtcaaaggcggttttgcttccgttccgctggcgggaaaccgccaaccgaaagcggatttaaggcggcgtgtttttcgttctgacaaagtat

SEQ ID NO: 234746 - DNA, 444 bp, Homo sapiens
  chr10:54068165-54068609
  hyper
cgccggagacaccgcggagcctgatgtccctcagagctttaatcttcccctcagtcgcctttcccctcacccgcctctaattaagtcagaaaggccctgtatttatttgcccatgaactgacacagcaaaccaacagcagccattgtagtgtgaatggatttgcgaccaggcaaggggcttcagccgggattacccgccccgcagccggatgaatgtgctgagcacaaagtctgctcaaagccgagcaaacggactatttgtgaaaatgccatcctggctcaagtctgattaagaccgggggtccccaggccgtttgatcttcgctcatcaaagagagtctttaaacaagcttcattttacactactgtatgctagcgacgggttgtgacacccaagtgcagccaccgtgagcacccggcactgggagcgcgtgaacaataatg

SEQ ID NO: 234747 - DNA, 1733 bp, Homo sapiens
  chr10:54073087-54074820
  hyper
ccctaagggtttcttatttctccacattagcccaccactgagaagggagaaccggggaaaggcgactgacctggcacgttggaccctgtccgctttggtcccggccactttgatctcacgcgtctgcctaatcaagttcatctaccgccgcgattgccctgattcaaagaacaacattaaatggtttgattatcggatggtcatttccctcttccctccacccctgatctaatttctaaacgccagtctctcgcctccctctctaaacttcccatcaaaagagaattagctcttcttccttcttaccctcgtttgatgtgcaaatttccttctctttgcacatttttctcgcagtggcggggggaggtgggggaggagggcaactgaaggacctcaaagccggggatctaactcagatctgcaaactgcgactctaaagggttaatgagcaacttgcacccgccacctggccctctcagaggcgtcttgctagagccattgaattacagaccggtttgtatttaatactgaatatgacttgtgtgcacagtcagcgagtattggcataaaggagaggggcaaaaagtgcttttgcagagcctatcacccctcggctctgtaaagtatttcagatccggataattcaacccttactgccaggcaagggcacccaagttcccagagttcctgctgccgcctgcatttattaaagtcgtctgctataacgctcgctggtagccttcaccccgaaggtgagccgggccagccgagcgactaagcaagggaggggcggggtgaagagtgtcaaaggccccccttcatgtacacaaacacaccccctcccagcccctcccagcgctttgaaatcccatcccggctttgttgtctccctcccaaggggccggaatgctccgggcccgcggtataaaggcagccgcggtggcggtggcggcgcagagctctgtgctccctgcagtcaggactctgggaccgcagggggctcccggaccctgactctgcagccgaaccggcacggtttcgtggggacccaggcttgcaaagtgacggtcattttctctttctttctccctcttgagtccttctgagatgatggctctgggcgcagcgggagctacccgggtctttgtcgcgatggtagcggcggctctcggcggccaccctctgctgggagtgagcgccaccttgaactcggttctcaattccaacgctatcaagaacctgcccccaccgctgggcggcgctgcggggcacccaggctctgcagtcagcgccgcgccgggaatcctgtacccgggcgggaataagtaccagaccattgacaactaccaggtgagaggggtcgggcactcagaggatgctctgaccttgaaagggtcctatctggagacgagggagtagaacgtgctgaatgtgtgcggttcagggagcatttggtaaccctgcatttgggagcagtgggcagtaacaggttttggagaggtggacagataaggactgtgatcagcgcccgggtccaagagggcgggtacctggacgtctgggtgcctcaccctctccccgaacccttcccacagccgtacccgtgcgcagaggacgaggagtgcggcactgatgagtactgcgctagtcccacccgcggaggggacgcaggcgtgcaaatctgtctcgcctgcaggaagcgccgaaaacgctgcatgcgtcacgctatgtgc

SEQ ID NO: 234748 - DNA, 1113 bp, Homo sapiens
  chr10:57387397-57388510
  hyper
taagcaaccgctggcgtcctcccctctgctccttcagcagcagcggacgtagggatcccgagcagccacggagcttaggtcccgcagagagctcctgccaagcgcttctctctcgactagttaccaattgagaaaaaaaagggtcagagacacacaaggatggtgatcaaaatccagtgtcaggcaccagggtcccagaaggttccggctcctcttctgcgccttacccagctcttttcgtctggcaaagggtcacccagcgagcccccagcagcagatccttcccttttgctcctcctgatagcgccaatcttcgccgccactgccacactgcgcgcccgctatccactcaccgcacagcgagaaggcctggcggagatagcgcggggggaggagggtggattaaaaggatagatttttggaagggtaagggagaaaaactttgatgttgtaaccacacacaggactgagaagaaaccaaaacaagttgcagcttcaggagcggggaggacgcttttcggggtaaaaaaaaaatcaccccctaccaaaatcagggggaggaagctccctgctccttgagcgatcacccagagcacctcgcaatctctgatcttcgaacccactgaaaaagcacagggcatggggagtcctgttggttcatgcccagggtacgaataccaaaagcgcctcccgctggagaggctgcggggaactcgaggcaaagacagaggcaaacgcaacgctgggaagagtgaggggagtccgagctgccgcctgcaaaagcagagacgcgtcgcccttcgggcaaagtgactgctacaaagtccgttccctcctgcgcagggacagagacatttaaaggcctgaatggacgtcagcaccagtcgagctcgctgggtgagcgccaggtctccccgccccacggattgtagcgcgcacagggcgatctgctgctcgcgaggtagagtggcttacttggggagaaaacagagctggtggcgctgcggagtgtcaaaccctggagcccatcgtcaagacgttatactggtggcagttctgctgtgagtgcacttgccgaattaaaaagagccagagctgcgtggagaggggtct

SEQ ID NO: 234749 - DNA, 1507 bp, Homo sapiens
  chr10:57389860-57391367
  hyper
ggactgtcaaaaggcgttagaaacttcggaaactggcaacagttacggcatttttgctctgcgaagaatacgcccagaaggttcagaaagaagtcgggagtggggatggggagaaaaacattgaagggctatggaaaagcgtcaataacataaactgactttaatttttcttcatagaaatgtttccggtgaaattttctaagaaatcaggggacagttaatttgcttggttgacgctcacactccttgctctcactaagtctcaggtcttccaagcctagcactctgtcaaaatgctttcgggttgagggggagggctttcctggattccgcgaccacaacccaccaccccaaaccccacttcccatgtccttgatttttgaggctttttgggagggcatgatttcagggaacattactcttggccagctcaggggagcatagtcggaaatcttcggttgtattcctgactcagcctgggtgcggagcgagcgcggacaggaaccgagatgcaaaggcggacgcaaccagcgcacccgcagacggcgcgcggcaagaaccaccttctagccctgagcctgcggtgccgggcgggctcaggaggctagtggggtattgtgatcactgggacatcaggatgaaggggtcactccaatcccttggagatcagattctcggggactccatggccagacccgaacggcgcccttcacatggtgggtggagagggtactccttggccgaattgacccctccctgtcccgcagggtcagccccgcgcccacccacacatccagtctccgggaacaaaactctgtctggatctacactgacccgttgacgcgctttcccaaaggaggaacgacaccaacaaaagcagaatcgctcgtgggagattttctaccaagaactgttacctccctccccgtgtaatcggtttccactcaaaaggatgcggaaaggacctcatcctctgctgtccctttcgattggcccgggactgggcgaagccgggagctgcagggaggggagccccggcaccccagcctctgcccaacctcccccagcacggcggccctcggccctcgtcaccaattcctaggcagaaaagcgcgcggccggagcgcgcaagtcttggcgtccggaaacaagtgttttccgctcagtcatggcggcttcgccagtcgaacagagcgaaagggctctgggcgaccctgcgacttccaccagaccgcgagcccggagcaccggcggagggtggccaaacgcgggcctagggctcccccagcgcttccgggcgcgccgggaactgcagctggtgcgccactgccttccccgcgcggtgcccaagagcgccagtagaaggaggaggtcggcacacctgctgttcctgcttccttcccaggaggccgattctctccatcccaactcgctccgtggctcctgcttgctcctgttccccctcccgactccccgggtaacagtcgaccttagggtcacagcaggg

SEQ ID NO: 234750 - DNA, 57 bp, Homo sapiens
  chr10:58121111-58121168
  hyper
aaggaccattgtgcgctctaattggcaggcgcggattcgctcgttggcgggcctcgc

SEQ ID NO: 234751 - DNA, 109 bp, Homo sapiens
  chr10:60026209-60026318
  hyper
cgtgacttcaggcacgtcattcttaaccagggttggccttagtcacctcgtctaaaaatgtcagtattagcaacctaaacccgaatcgttttaccggcataaactaaat

SEQ ID NO: 234752 - DNA, 312 bp, Homo sapiens; identical to SEQ ID NO: 202083
  chr10:60028787-60029099
  hyper

SEQ ID NO: 234753 - DNA, 101 bp, Homo sapiens
  chr10:60272046-60272147
  hyper
ctacatgcgagccacgtccatggcgatgcctgcgaaagacgggcatgatttcttctccaagccttctttttcctcttcctcacgttcgagcttgtggaacc

SEQ ID NO: 234754 - DNA, 1258 bp, Homo sapiens
  chr10:60272365-60273623
  hyper
ggatactccatgtgcgttcaggagtgtgtgtgtttgaggagctatgaaagtgcatgtatggaaaggatttatacgtgtaagtgcagaaagtggcagtgtgtacgtggtgtgtgtgtgcgcgcgcgagtgtgtgagcgccaggggccgcccgcccgccgcggctccccgtgggctggccgggccaatgagcgcgcggctgtaggggcggcgggcggggagggggcgccgagccctgcggatggaggcgcgggcagcgcggcgcgctcattccgcgcgggcgttgctggcggggggcggcgcagccactggacccggaccggggccgcgacccggggtggcgggtggcgtgggcggcgcccggggctgggatgcgccgggggctcagtggcggcggcggcgttggcggtggcgtcggcggctgcagggggacgagctagcgccgcggcgctgggagccagttgagcccggccggcgagcggaggcggcagcgcaggcagagcggcggcggcagcgggagcccgagcgctgcgcgcccaccatggccgcccagggagagcccggctacctggcggcgcagtcggaccccggctccaacagcgagcgcagcaccgactccccagtgcccggctccgaggacgacttggtcgccggggcgaccctgcacagcccggagtggagcgaggagcgcttccgcgtggacaggaagaaacttgaggccatgttacaaggtaggcatccctcgtgttctcggactctccgactgagcctctaactccttttcggacatccccaccgcgcgctccggcgcccgctactccagcctacggccggccggtttagctccaggcccgctcccccgcggagccggaggacacccagggactggagacttcgcgggactccccacccttccacgcctctcagatttccaggcgctgggggccctgtgcgaacttgactggcttcagaaaagccgaaggccgagtttgtactggcgcgcccaagttgcgttctggactttggagatgccaactttagcccggacacctgggctgtgccatccggaccactcgggccgcacagagtatgcgtgaccctccccattccctggcagcctcgagttctgtctctctccgtctgtttcactctctccccttgtcagtatccacttcctccagctgaggggccttgtctcactattgggaaacgctctgcagatgtcaaggcttaagacaggagctcccgcccccacccctgt

SEQ ID NO: 234755 - DNA, 1231 bp, Homo sapiens
  chr10:60935879-60937110
  hyper
tgtccggccgagcccgcagggtgcgggcagcgagtatcctgggaccttcaggggaggaggtggctcccacaccccaataccgtacagagagtccgaagagtccgggcccttatttttccaattcttggtaaacaacaaacatgctcgccctcgcctccccgtgcagacgcctcagggccaactcgggcttcgccaggcaccgagagcagacagaagacgccaaatggctatcaccaggagagagggcgaggcagccgcgcggcgtatagcgctcgcccttcccgcgcgctcggtcgcccgacgcctcacgcgcgaggttgccttggcagtggctggagggcaggtgggggcgcgtgcgcgcagaagggcgggggagggaccaccgcgcgccagcaggtgggcgcgttctcccgcgcgcgtgcgcgcgtcgaagccctatacatcacgttccccgagagcagcgtcccctccccgccgggagcgcgcgcctcccatcctcgcgccgggtcctgctcggtctctcagagccgcacactccgcggagctcctgccacagccgtcgccttcgcggcggctctccagccccgcgcctcagcctcggcgccgcatcaccgcgtcccaggcctccttccctccctctgccactccccctccctttcccgctcttcttgcccacccggccggcagagagagcctggatacgaagcaggcgggcttcagagtgggttggaaaaatggaggtgccgcgcctggatcatgccctcaacagccccaccagcccctgtgaggaggtgatcaaaaacctcagcctggaggccattcagctgtgcgaccgggacggtaagagcggccgggaccgcgaggaaagggacagagttcgcgccgaggcgccggggccactctggctccgccgacgccgctcgccagggcggcagggtcttttgttgtcccctctgtgcaaataaatgcagatgtgggttaccctccgcccaccgccctcccctcaccccagaaacaaaaggaccccggggctcgcgccttggcgcggaaagtagccgtccacaaccgtggcgcccttcgccgccttcgcccgcctggcccggacgagggcgacgttcccgctcgcggctcctgccccgacgaggcgtttccgatctttgccgcagtccggatttcctgggtctctgggcactgaaggggaaatgccctcgggatgtttctagcaaccccc

SEQ ID NO: 234756 - DNA, 737 bp, Homo sapiens
  chr10:61121994-61122731
  hyper
ctgggccccaccagtcagcacgtctcacggtcttcacagccccagattccgggagacaatgcatctaaaacgaacagcggctgggaacggtggaggataccttcacgatagttgcttccagagaaaggcatgcaagtctaattttaatggtaagaatcacttactctgttacagtggtgctgctgaaggaattatcctgaaggctgaaacagaaacaagaaaacatcagccaagtctggccggggagccgtctccctgattgctctccgggagtgagcacatacacaaacatggcattgcaaggcaagtctccgggctcgcccggcacgctcgctctaccttgggctgctgtctgcacatgctcgtaacgacacccccagcaggggcccagcggcacgggcgaaccacaaagcccggcagcccgcgaggctgcggggacagagctgggcggggcgcggcggcggggctgggaccccgggatccagcgaggagcacctggagagttaccacacgaccccgacctcgccagcccaggcgccgcgtttaatcttgggctctttgtgccagccaccccccgaggctggcaatgagaatgccccagtgtttctgccgaagtgctgaaatacccgggagacttgctttcttccacatgtctcctaccaattttacagagctcaccccaaccccccacactcccaccccacccccagggatggaggctcgcagagattcatcca

SEQ ID NO: 234757 - DNA, 313 bp, Homo sapiens
  chr10:61468534-61468847
  hyper
aggttacctagggcgaaccaaagatggggcattaagcaccaagtcctcccaagtgctggctgagggtccaggtgggcgcggtgccggtgcctcctgcggcggtggcgaaggctgggctcccgcgctcgcccagggctgccgggtggtgctgaacctggcgccaacgtgcagaatccgccggccctgcgcgctgcgctccacgtaggtcaggagtacccgcggcgccccattcccaaccctccgggggcacctggttgctcgcgctccggaccaaggcagttggaggcctttcggtcctctgggaaatggaggc

SEQ ID NO: 234758 - DNA, 166 bp, Homo sapiens
  chr10:61469829-61469995
  hyper
gtgcgcacacacgcgcgtccccaggcgccgctgtgcccccgccgcccaccacgtgccctggccaagcccgccaagggccgtgcgcgtttggggggagccggggtgtacaaatgaatgcgagtgttccttggtctccctggctcccggggccgctggcgccctcctg

SEQ ID NO: 234759 - DNA, 269 bp, Homo sapiens
  chr10:62492575-62492844
  hyper
cagcctgcttcagtcgtgtccttaggaaaggttcagcctggcacggagttggaggggcgagccaagagcagagaagccccaagacgagagaccgaggtgagggcgtcctgagcccggggcccgcttttctttttccagacgaatgtttccaagcagaagccccaagtcctcgggcccccctctctcctggggatgctccagcactgggaccgagttcgagctctcgcctctgtcccgggccgcaacttccaggcgcaactggactccca

SEQ ID NO: 234760 - DNA, 85 bp, Homo sapiens; identical to SEQ ID NO: 202089
  chr10:62538165-62538250
  hyper

SEQ ID NO: 234761 - DNA, 435 bp, Homo sapiens
  chr10:62761013-62761448
  hyper
tgctccaagctctcgcgtccccatgagcctgcggatgtggggactgcgggtgggcagagagaccccccataatcccgcccaccctggcgcggctcctcccgggcgcgctcccgccccgccacgccccgcgacgcccgcgctacctggggacgctggaagctcccgcggcggctctgggtcccgccgggcggccgaggctggcgcgggctttgtaaagccgccgggacagcgccgaccccgccccgccccgccgaccccgccctctcccacctcggccgcctcccccgcctgcatcccgggccacagtccccgttccgccacctcgctcccggcccggcagccgccgccctgcggggcggggaccacgggtccctccacatcctcgcggcctgccggacagtcctgcgggcggggccccaacgcctaggcggtccc

SEQ ID NO: 234762 - DNA, 1358 bp, Homo sapiens
  chr10:63211995-63213353
  hyper
ggtcccttcaccagcgttacaacccgttccttgcaagataggcaggccgttagccaagccccaaagccagcaaacccagacacctgaagctggcgctgtgctagagaacgcgcgacgcgcgcggctggagggaagggaagcggatgaaaccacagacgtgcagcgagggtcttctcgtcttaggagggtggccagtgtgctcagctcttgcgaaggtcgctgatgcccagcgaaggacattcccacatgtgcacgcacgcagagtaacccgcgcacactcacacaccccagtttcagaaggcacactacatggcaacctccttgtcccaagactcccctatttgcgggcacattcagcaaaatagaccagcgcttcctctctttactcatcttccaagtttccaaacctgagactgggtgactcttgcctaggctcacagatcgagccttcccagtgttgcactgggaccctagggtggccctggggtgcccaagagatgcgcaagcatctcgcgccttccaagcgatcagcgaggaaaaacggggtccaaattcgagtagaatctgcgggttgcgggaagatggcctgcgagtgcggtgggggacaataccctagggccccgtgcgccctcgctttcccggggcactctcaccatttgtagcctctgccgcgcttgaacttgagggtgagcgcagtctccaggaagagcaagaggttgagcagcgcaagcagccagtaccgcggctccttcttcacctcggtcactcgccagaccccgaccagcgagtgcagcaggaacagcaaccgagtggccagggcgttaaggaagaccagtccctccatgctggccggagcactctgcctacgtccccttgcctgcgcccccaggaccctgccgggcgtgcccggagcccaccggtgagcaggaatatgacaagcactgagacctgctgctgcttgtggtcccttctcaccctcagcgcccgatgccggtagaactggtgcgcggctcgcccctcccccaaacttcctgagaactcttcaaagaggggtgagtccaaacccagcttttccagactgctgggttttccagggagtctggggctgcgctgccctgtctccagggcgttattctccagcgctgcccatccccctcccaatctcggggccagtctccatccctgtccggtatccccgcccccgggcctctgtgaggttcccaagaacttccccatcacgagggggcggaaagaggagggaggaggactgaaggtcaaggtgcagcacagccagaaaggcggaggaggagagcatctctggcagctccgccttacttttccaccgaagtactttaatt

SEQ ID NO: 234763 - DNA, 247 bp, Homo sapiens
  chr10:63656687-63656934
  hyper
gggatcacttgctccgagttccctgtgtctctcttggctccggctccaagttcatgagaaatctgtccccatacccatccttctgaagcttccagcctttaccacctggacctgggctggagtcccacccccaccacagctcttgagacaggcgacgaatagacccaaatttgagatgtagctcaacctttgaccactagaggtctcctggaaagcaatgacccgtataacccggttgatcctcctt

SEQ ID NO: 234764 - DNA, 624 bp, Homo sapiens
  chr10:64133781-64134405
  hyper
gcagaaagcgccgcgactgcgaggctgacacgcgtctttccttccctcccccggggaatgatcccagcatctctcgcagtgatgtcagtgtaatcctgagtcggatcgggctcccggctgggtggcgggggggcagatgatgctcccgccagctgggcagagcaagggtgttccccgcggaggtggcagccctgggccgcggcgttccggaacccccgcacccacggcgcggtgccccacggtgcccgcgagcgccgcccccgctggctagccgcgcctcgctccgccctggacgccgccggtcccggcgcggaggtgcggcggggagtgggagccggcccggctcagtctgatttacggctctgctgaaaaccgcttcgctcccgcagcatcagcaccggaggcggcggctgcagcagcagcagcaacaagtcgggtaagaggcggccgccggccatctgcgcccgcggctcggcggaggggacctgccggggtggccggggctggggagggggtccccgagcccgcagcatggcggggagttgggagagccggcttcccggcccccaccagcaggaactcatgtgcacacgaatccactctggcacccgtgggctggcacgc

SEQ ID NO: 234765 - DNA, 43 bp, Homo sapiens
  chr10:64564430-64564473
  hyper
tcaagcggaaggccggactacaagtcccggcatgctccgcagg

SEQ ID NO: 234766 - DNA, 238 bp, Homo sapiens
  chr10:64576165-64576403
  hyper
tcaatacccgtgacgtcgctgcccatatatggactgaggaacagggctgggccaggcggcttttgccgtcacatggctgatttgcatacacgggctcggccgcgcggactccgccgggctcgcgacttccagctcgcaggcggcggggatcgctggggtcccgggcgcgcggccctagctgcagcctgggtccggggcgcagggatcgcgggggagagggcgcgccatggacccagtc

SEQ ID NO: 234767 - DNA, 495 bp, Homo sapiens
  chr10:64578271-64578766
  hyper
aaagcaagaaaagatagctgcgttcttaccacgtgcgccagcccactccgcctgcgctctggcgggtcccgcggcccccgcgctgaccatgggcaagacgacgcctcggaagggagtccgactcgcatctcgggccctgagtccgaaagaacgggggaaagccgaattatgcaaatgcggatccctgcgatggggctcgggttacggcccccgccggccccttaggtgaggcacccaccggcagcaagcgcgggcgaggcgactgctcgcgcttcgctcctctctgcgcacgtgggcggaccggcaggcgggcgagttgcccgggccgccccgcgactggcgctgctgccaaacccgccggcggtcgccgcgcgccaccccgagggggagctcctggacgcccgagtgcccggccagcagggcgcggagggcaggaccggggctgggggcggggcggggtgcctgagcgagggaaaaccgcgaggtcttcggctg

SEQ ID NO: 234768 - DNA, 82 bp, Homo sapiens
  chr10:65029101-65029183
  hyper
actcatttggctgcggccatagagactggctcataattttaacaacagacaaagacagactagtggcgagactgaaagctca

SEQ ID NO: 234769 - DNA, 115 bp, Homo sapiens
  chr10:65225530-65225645
  hyper
ggacccgaaagagcgcagactcgggacgaaccggccgctctgccccggacacagcgacctcgggccctccccgcaaacactcctttggactcccagattcgcagccttgtgctgc

SEQ ID NO: 234770 - DNA, 115 bp, Homo sapiens
  chr10:65226225-65226340
  hyper
catgacttcaagggaaaacgagggggaaaatgtgatcctttcattcttctcatttgtggtgatactaattacatgtttaagctattcacagatttaaattcgtcactgctttatt

SEQ ID NO: 234771 - DNA, 70 bp, Homo sapiens
  chr10:68685828-68685898
  hyper
gaagtgagctgagcgtgtgcgcggtacggggctctcctgccttctgggctccaacgcagctctgtggctg

SEQ ID NO: 234772 - DNA, 396 bp, Homo sapiens
  chr10:68687786-68688182
  hyper
ggccagggctctcccaaagccgacgtttaagcccaagctccccaggccgaagcatgagagcaaaccccctttgcccccgacggtgggagccacagagcccggcccagagaccgatgctgacgccgagcacatctctttccataaaatcatcgcgggcagcgtggcgcttttcctgtccgtgctcgtcatcctgctggttatctacgtgtcatggaagcggtaccctgcgagcatgaagcagctgcagcagcgctccctcatgcgaaggcacaggaaaaagaaaagacagtccctaaagcaaatgactcccagcacccaggaattttatgtagattataaacccaccaacacggagaccagcgagatgctgctgaatgggacgggaccctgcaccta

SEQ ID NO: 234773 - DNA, 457 bp, Homo sapiens
  chr10:69523830-69524287
  hyper
agtgttctgaaggcgacgcccccagtcttggcgggaaacgccgcggaagacgcttctctcgcagaaatgccaaattttcgggagcgcgggctcgcagcacgtaacagaacagatctttttgtttcacggccctctcgtagacctaataagcgcgagggcgaaaaccaggtcagcgaccagaagccaggcaaggttgcgattttcggagcacagcgaaggggagagtttctaagttctgaatgtacctctatttagggtggtttctattatttcttcgcgtctaccctgtagttgccgcaccctgagccctcagccccgccgcttcgcacggagcggagctcagagggtgcgcgctccgccctttcgcgggcctggcatgagcgcagtggttgttacactaaagtgtctccgcctgtcgaatattctcgtggcagcgatggccgagtggttaaggcgt

SEQ ID NO: 234774 - DNA, 167 bp, Homo sapiens; identical to SEQ ID NO: 202095
  chr10:69834339-69834506
  hyper

SEQ ID NO: 234775 - DNA, 80 bp, Homo sapiens; identical to SEQ ID NO: 202096
  chr10:69834887-69834967
  hyper

SEQ ID NO: 234776 - DNA, 120 bp, Homo sapiens
  chr10:69835218-69835338
  hyper
gtgtgccgctttgcgttgctttaagagggaaaagccaaatacagaaagttggagtttgcgaagacaaacgaagaagatgtcaactgtttttgagaatgcttcggcgtgcacaaagccttt

SEQ ID NO: 234777 - DNA, 71 bp, Homo sapiens
  chr10:69991508-69991579
  hyper
agccgcttcccaacgtgcctcttctgagcaaataagtcataaacaaagcaactcacgtgcaatcaaatagt

SEQ ID NO: 234778 - DNA, 228 bp, Homo sapiens
  chr10:70091404-70091632
  hyper
ggggccctttccgcgccgtcgatgcctagccagggcggggccctcacagaatttgttcacggtgggggcagatcaccggagaacttctccagagcgctacggcacggttccttctacacactggcagaactgccattgccatcgccccgaggcggcagaatggtacgctctgaaaactggatggttctaacgtaagcaagaaaaacggtgcgcgctgcagctctttaa

SEQ ID NO: 234779 - DNA, 436 bp, Homo sapiens
  chr10:70092802-70093238
  hyper
gaggaataaaggacgcttagccggcccttatattccagatttggaacttcgaaaagagtacgtactgattttccaaagggttttttttttttcatgtttaaacgttaataaggacttcggggatgattttgtgagcagaaaagtgggtgatttatcaaataggaatgtgaaatgggcatgtttcaagtaggtcgtctgggcccagtgaactataattgttgctttttgaactttcggggtgggggtgggtgatgtagcaattgttttgcgtagtttggcgtatatatgttagaatttgtttttaagttttacttttgggaaacagttaaaacaacccagtgatggtagatgtgtgtgtattgaaattgagctttcgatgttaaatcttccaagagttgtattttgtgcagtttttttttccgatggcattaaggct

SEQ ID NO: 234780 - DNA, 139 bp, Homo sapiens
  chr10:70166193-70166332
  hyper
tcataattcctaacgtgcgatgcgacaaccacacaaagggtgttttgcagctgctgggaggcagatcggtgctgggcaccggcagttcccacgccgaggggcgttcacaccgcggccacgccccggctgcgctacagga

SEQ ID NO: 234781 - DNA, 32 bp, Homo sapiens
  chr10:70167001-70167033
  hyper
ccttccaggcgctcggcggccaccaccgcatc

SEQ ID NO: 234782 - DNA, 35 bp, Homo sapiens
  chr10:70167244-70167279
  hyper
agtgctgggccctcggtcccgtgtcccgggggctt

SEQ ID NO: 234783 - DNA, 65 bp, Homo sapiens
  chr10:70320023-70320088
  hyper
ggtaaatccagctcgcgttttgtctctcgctcaactgtgcagggtccagcgaaggcagagcccca

SEQ ID NO: 234784 - DNA, 493 bp, Homo sapiens
  chr10:70660994-70661487
  hyper
tatttttccccgccgtgcggtgcgtgtcccggaagtgacgcatggccaaggccgggcggccgccttgcccccgcttcctttcacgctgtcgctgcccgtaggtggttgtggccactgtgcccggagggaggcggcggtggccagtaatgcctgggaaactcctctggggggacattatggagctggaagcacccttggaggagtccgagagccagaagaaggagaggcaaaaggtgcgctgagcatgggccgcgcctccttttgggctgcgccggcttgggcggggaggggaactgtctgtccctgatgatggcctgtcagaaccgggccggagcatccgagggcctcccttcgcgccgccctcggccctctggggtcgctcagggaccgtttccacctccaccctcccgacctggagaaagatggccctgggctttgggcctctcctccgcgtggcccctcagcccttcccgttggcgcctgaatctcagat

SEQ ID NO: 234785 - DNA, 231 bp, Homo sapiens
  chr10:70715515-70715746
  hyper
tcctgagtctggtcgacactttcagagtagacgtttccaagagatgattaaggacacacatccgcgcgtctgtacgtgcaaactcgagcaatacaacataaagcactgaagatggcgccactcaaaagcaactagaagccttcatttatcaggctggggctagggaaaatctggccagtgttgaagaatacaaagctaacctttgcaattccttgcggttctaccgttccg

SEQ ID NO: 234786 - DNA, 352 bp, Homo sapiens
  chr10:70748247-70748599
  hyper
ttccgatatgcttcgttaaagtaagccgatattaaacatttatataaatccatcctcacagggtcaatctggagataaactcaccgctgcagggggcggggaaggaggtgggaacacgctcattgacaacttcatttccatgagaatggttgctgtggtgattgctgcgtcttcccattggtcattgccgagcgtattgcggttctccgggagggttatattggttcccattccacagcggccgcaacgtgtcgagagccgtaagtaaagtgtcgcaaagcagaaggaaggcgggagtcccgactgcaaacattgaggaaagccaggcagtagaggccgctatggcgaacgt

SEQ ID NO: 234787 - DNA, 324 bp, Homo sapiens
  chr10:70748846-70749170
  hyper
gtcgcccagcgagcggtgaggctggcagtcatcgagttccacctcggggtgaaccacatcgacacggaggagctgtcggcgggggaggagcacctggtgaaatgcctgcggctgctgcgcaggtaccggctctcgcacgactgcatctctctctgcatccaggcgcaggtgagagcgagcccggccaggccggcccctgttggcaaatggcgagggatggggaggagcccctgccaaggccaagggcagacgttgtaaggcgcaattcgtccccacgtttttgtagctctggactgagtcccaaagagcgtctgtggtcttcaa

SEQ ID NO: 234788 - DNA, 57 bp, Homo sapiens; identical to SEQ ID NO: 202101
  chr10:70883516-70883573
  hyper

SEQ ID NO: 234789 - DNA, 146 bp, Homo sapiens
  chr10:70939962-70940108
  hyper
tctggacagcaggcgctggaggtgcgcgtcactgtccgccgccgtgtccgcggctgcgccagacagtgtagaacctgcggcctcgatgtccttctcccgtgccctattgtgggctcggctcccggcggggcgccaggctggccacc

SEQ ID NO: 234790 - DNA, 41 bp, Homo sapiens
  chr10:71078346-71078387
  hyper
gatgatgcggggtcgggggggatttcgctgcgtcgcccgcc

SEQ ID NO: 234791 - DNA, 230 bp, Homo sapiens
  chr10:71079167-71079397
  hyper
gggggtgctggctggaggccaggcctcccatatttggggttcctggcggagggtgtcgggtgccccggagaagctgtcgccgggctctcccagttgtttgagctgctcgttaatctgaggacgaggtgacccgcccggcttcccggaacggggaggggcggcgaggccaccggaaactttgctcataggcctcgtgtctggagcggcacgtctgaatggaattttttatt

SEQ ID NO: 234792 - DNA, 112 bp, Homo sapiens; identical to SEQ ID NO: 202103
  chr10:71211454-71211566
  hyper

SEQ ID NO: 234793 - DNA, 186 bp, Homo sapiens
  chr10:71267678-71267864
  hyper
ggggtgggggaccagggaagcggagttgcccacaggtccacctaccgcgctccctgcagccctcagtgtgcctaatggctgccgcgcaacgcatgcagagcgtggtgtcggtcgacccctgctggagatgccgggacttgcgtgcgtcagtccactcaaaccttcgggccagaagacatgggatct

SEQ ID NO: 234794 - DNA, 140 bp, Homo sapiens
  chr10:71327735-71327875
  hyper
ccagacgcatctctcgcgctggatctacgtggtcatttcagcaccatggtcaggggcgcgcagctgcatttcgggatctcagagcaactgctagacagccttagctggacaggcgtccgctccgtcggccttggcccaca

SEQ ID NO: 234795 - DNA, 893 bp, Homo sapiens
  chr10:71328699-71329592
  hyper
cgcctgtggggtcgcgtgcgccccgggccccgcctacctttgtgccagcccagcggcctggctcccagacattagcattccaatggccccgggacgcttttgtcctccgactgaggccggctgggggtggggtgggatgggggcagggcaccataaatctacctgcttgtgtgccagcgcggcttgactggaaggaggagcaagattcatgtgcggtttttctggaagccagtcttgggctcagacaaaagcagaagaaggggggagagccattcgacgagagggtctttcctgcccgggtttcggacactgttggagtttcagggagcttgggcgcaggcggcgatctcaaagcgcagcaggctccgcagaagaggcgggctccgggcagagaccgctagcagcgcggtttaaaaagccccaggactcaaaacgccgcaagaagtggaaggcggggacggtggtgcagagctagttggacaggccacccctagaaatgtttccgagcccttcttgctcaggggttctttggaaagaggcatggacgaggtttcccactccagcgtgattccacacacttagacggagctcatccagcacggaaccctaaactttgcctccgtgattcaaagaaaccctaaaccctcctccgccttctcctgacttggagagtggggctgactgctccgggggtctaatccgccccaacccaaggtggcggcctagcagccgagttggttaacccgtacgtgtgtgttttaatttgtggggcggaggaccagtctgtgtgtgttgggtgactaatggctccttaatgagcgccctcaaaagcaggagagggactgggctgtgggggagaacgcagctcacccggttgccgcctggagaacgtt

SEQ ID NO: 234796 - DNA, 369 bp, Homo sapiens
  chr10:71331467-71331836
  hyper
tgcagcgcagctcacgtttcaggcgcagttcgcagggaggctggggagatgctccctggccgggctagcgctttcccagttcacagcctggtcttccgccccgggagggcaatggctccgaaaagtgcacgaggagaaggcagagggtcgccttcgtggctttaaggcagagtgaggcgccctgaaatcccggacctgattgggagtagagcagatcggcagcgtctttggagcaaggcaaggggagtaagcgctgagagaccaaacattggattgaatcacattggaggaggggtggtaagagactgagaggcagacagacttgagtgagggtagggcgacccaagacggtgggcggctccggccggg

SEQ ID NO: 234797 - DNA, 526 bp, Homo sapiens
  chr10:71332705-71333231
  hyper
ggcaggtcacttcgtcttccgaggctctggggaaggaccgctccgtctcacgggtcacttggacagtgggcgcacccgagggttgaggcgtcatcctacggcggggtcagagggaagggtaagtttgagtccgtcactgggcgcagtccgcgattccgaggctaggtgggaaaaaacaaaaacagccatcctcccagcccccgctgggtcagaggatccctctttcccctgcccgtccctcggaggcctccaaatattacctttctaccggcgcaaaagaatagagagcgatgagcagcgagggccgtggggagctcagcgggcttctggtcgccaagttcagctgagctgcaggcgcccccgcctgggagttgccccagccccaaaggagaaaagaagagagaatggggtccgaggcctctgtcacgctctctctcgaggcgcggcggtgagaccgcagggatttcctgagcagcaagtcgtgtgccccttggcacgctttatctgcttcgcccgggccaggagc

SEQ ID NO: 234798 - DNA, 403 bp, Homo sapiens
  chr10:71334639-71335042
  hyper
cctcctcttgtccccgcctgggacatcccgtggtcttctgcttccggtcactcagagtgaggggttgcagcttccgcttctctctcttgacccggtcgtgcctggaggaagacgccgaggcgggaggtttaagtatcccggtttaagtctccttaggcgaggaaggcttctctttctagcaggtccagatatcctgagtctcccggaaactgcaggaggggacaggacccgacttcgagactgtagggtggggtgaggggatgaggtaggtctgtgagtctgccctagtgatagcctcttaccgcctaggctgcttgggggcaaattttcctccaaggaagagggtggtatgctcaggaaccagcgagaggggggctctaggactgggcgggggtgtggcgcg

SEQ ID NO: 234799 - DNA, 817 bp, Homo sapiens
  chr10:71336167-71336984
  hyper
tggctgggggcagccgccttcttgagggatgcaaggatttcccgcagtcctcttccagccaggaggccagggccggaggtcaaggagtcttaggcgattagagattgaggatccatgccctctgtctcagctgcaggggacacatagacccctctccaaagttaattcctgtgcctttggctgcggaggcgcaggcggtaatgactccgtgcgcaccggcagtgtttgtgaaatggctcttcccgcagacagcagagtctgttcctgcagctcctggtcatccaccgcccctaagacctccaggactcccgcacccctacacctcctgagacctaagtttgcctggaggctgaggggtcccggagagaggcggtagccagacgcctggagaccgcgggcacattggaaaagaaggaaggcagcggcccgccttcctgccttcttgtcggcgggggtagttttagcattgcctgggggctctttgagaattgtgcagggagggaggggggccatgggaagctgaatagctaatggcttgccagaggagggggattctttctctcgccttcagctcagcagtgaaagaggggaagacaaaaatctggcgagcgagctgcccgggccgagactggccacttcaaacagcccttcaaacaaaaggagacgacgaaaagaaagccccacctgtctccagtgtttgctaaaataataataaatagatttcgtttaataaataattacaagagattgtaaagtggagtgctttggaaaacatctaccgcgggagtccgtgcagccagccgtcacctgctcctaa

SEQ ID NO: 234800 - DNA, 1267 bp, Homo sapiens
  chr10:71337422-71338689
  hyper
cagggtagggagagataagacgggctcctcacccactttcggagagaagccgttccctcagagactccccctccccaggctcagggacctcgtgcgctcttgaaagggtggccggttctttttcttgggtaggtgacagggcgccatatgccaccccccagggcgcacacgggagctccggcccagggagtcttcgaacaaagggaagagagggcccgggcgctcaggagagccggaggtctttatttccagatcccccctccctgctcagggccgcctcccctaggcgtccgcagctcgcgcgcggcgcctggaaacaaagtgtccacattatcctcgccggcggctgagaccgtcaatgcgtgaaaaggtgcattgcgcaccaagacacctgttgaagcggctcctcttctcagcgcccctctctgctctgcgctcggtcaggagccgcgcagggagcggggggtgggaggagggagagacactgtgatttgtggcgacatatgttgagcagatcgttgtgtactcttcacagggacacatgcaccctcgctcccatacacaccccgcgagaaggagcagctgctctcctcaccttctcccaacataatacctgggccaggcgctttggcctcgccttttgagagtttagctctcctccaccccccaccccccgtcttccacccccacctaccgccccaatcttagcagcttcgctgtaggactttattgtcaaatttaacacatgcacatttgttcccagcgcttggccccaaatacacacacacgtacaaacacgcaggcatccacagaaaacgcgactgatgacacagatgcggagcgcgagatgcccatatgtccggctctgcgcccatcccggctggggaaacgaataggctgtgtgattttccctccccaggaagaaataaacaacggaacccggcgggggaggggaggccacctccaggcggctccagtttggagctcttgccctttggcgcgttgcgccacctcacagtgctggcagccaggagagcgcagggcagcggaggaagagcgcggcttgccaaaaggcggctgggacaggggccgctggacggagcggagagggttggaaagtctgggggtgctcgctgggcatcgcctgacccctgggctcttgaactctcggatggtgaagactctcccgtcctcctgggattcccaggagttggcgtccacctgaggcgcactaggggcgggcgggtacaccgggaggattctgctt

SEQ ID NO: 234801 - DNA, 401 bp, Homo sapiens
  chr10:71389862-71390263
  hyper
cgccccatctccccgacccccagcaccccgcgccgcccccaaccctgggccgggcaggtgcaattcctcaggcggcctacagagggcgatgtgcgccgccactgggccgcgcccctccggcgcgcgcttcctgtgaggtcaggtgggaggaaaccgcctggagccgccgggagtggacgccgccgaggcccggagtcgcgcctgcaggtgagtcgccgcgccggggagggagcgcatccctcgctgcagcccgggccgggacttggagccggtgtcgggctccagaggctggggctggcggccggggcagcgtccctcccgcccccggcccggaatgtcaggtgcgccgcgggccgggcgcgcgggtggcccaccgggcgggggcgcgatgacaaagcaca

SEQ ID NO: 234802 - DNA, 1405 bp, Homo sapiens
  chr10:71561445-71562850
  hyper
acttcaaagaggacggggagcgcggcagaggggctcccgggccggcgggctggggccgccggacctgctcaccacgccccccaccctgggcgagtttgcataaataaacaaatccaagccgtcggccccgcgggaggtggaggaggagtgacgaggaggaggaggaggagggaggggggagggagagattagtttgggaagtagcacggattgctcatccgatccgtgccgccgcagggagtgtgtcaagttacagaggcgccggaatcggcccctgcgctcctcgccagccgccacgacccacctctgcccatggggccctccgtgtgcgccccttcgcccggggactgaaactgactggcccgggagacacgaggcgcccagaaggactgacagcgcggcaccaactgctctgcagacacttgaagggaaagactgggcggagagaaggagagccggtcagattcccctaactttcctggacttggaacgttcttcgaaataacttttttctcacctaggtgtaccccaattaccgctggttgtgctttttcggcacttcctctcctactgctaatttttccgtcctctttgccgggagcagcggaaagggacgttttccagcgatacaagccctttccccctgccccgcagtttggatagagccttttggcagcggctgtcgcctttatttattctatttatttatttattggttctcaagacgcgagaggatggtagcggagcgcacccacaaagcggcagccaccggtgcccgcggccctggggagttgggcgcgcccgggacggtggctctggtggcggcgcgggcggagcgcggcgcacggctgccgagtccagggtcgtgcgggctgctgacgctggccctctgctcgctggcactcagcctgctcgcccactttcggacggccgagctgcaggcccgggtgctgcgcctggaagcggagcgcggggagcagcaaatggagacggctattttgggacgagtcaatcaactgctggacgaggtctgtgctctttgttgctggcttttatccctccccgcggcgccccctcgcgcagcctccagactgttcagccggtgtccgcgggcgctcgctctctgcgagccccaggttcgcgcgagttgcctgcgggaggggtcggggacacggacagacgctgccctaccagggattcggaggacctggtgggcaagagcatgacccagcgactcccgcctcgggcaagcgcccccggcttccagcgctgggagcgccctgggcacgccgggcaggtggaggaaggctgggcgcgcggaggctcgcggaggcgggcaagctccactcctccctttcgggacccggccagggtggtgtgacagccgccccgcgcccgcgcagcg

SEQ ID NO: 234803 - DNA, 1484 bp, Homo sapiens
  chr10:71812306-71813790
  hyper
aggagactggatcgcgaccatagcgcgtttgtgcccagttctggggaaagcctcatgttagcgagtggccctcggctcgtctcgcagatcggccaagtacgcggaggccgcgcggtttcaccattaatactcctgaaggacaatagctcatcaagccccaccgaaagccccggacccgtcgcggagcctgggctggcgggggatgaggctgagcaactcctcctagaggtggttatgtggagaaggagcaatcccttctccctcctcctcctccccccgctactatccgcggcccagagaactgccgcttgccgccattgacacgcacagatagaacccaaagaaaggcaaagagtcctgcccggcaccggcgccgcgtgggccaaacctgcgcccgtggaggggcgcgcagagggcaccgggcgccgggagcaggcggcgcagcaccaggtgagcccgccatggcgatggcattattgtttagggtgctccggggtctggaaacaaaacgcgccgccggggcagtgcaggggccggagagaaccacctctgcctctcccccgagcccctgcgggcgcaccctcgatagccgacccaccctctgcaaaaacaaattcttaaatccagctgcccaacttgcttccttgggcgataaagggggggctgctaaagaagtggtcaaattcctgcggccagcgaggggccgggggcgtcgagggtactgagaggggaaggaggagggatgcgaggttcagcagcgggccccaggcgaggctggacccggaggaagcggaggtctcctgggaatgcggagtttcgggcgcaggagcgggaggacggaggcgcccggccgccgatgggcacggggcgatgggtggggggctgcgcagggcccgagggagcccggggagggccgctcgggggcctctgaaggtgcccgggcagggcgccggcggctccaggctgacaatggagggggcgcggagcagccgggcggaggttagggacccgagtccgggggcgggccgcgccggggaaggtcaggtcggggacgccgggtggcggggcgagggctgggggttgctgcgcggacacccgggcgccgcgggcgggcgtgcgccccggggccggcgcggaagagggcgcgaggccgggcactccccttcggttccctttccggggcgcccggtgccgacgcgcgctgcgctttcaccgggaaatggcggcccggccgtggctcgcctgggcagtctggctcccgctttgcgcgggaaaaaataataataataaaaatatcgaaaaagggaataaaagtaaactggctgcggcgcaggaaagggctctgccgggcgccggacgccgtgcgtatcgctcgcggggcgcggcggttggggaccagccctgcctcccccggctcccagcctccagccccggcgcacctcagccccagcccggccagccccccggatcgcccgtgggtgtcc

SEQ ID NO: 234804 - DNA, 114 bp, Homo sapiens
  chr10:71892265-71892379
  hyper
ctcggccaggagcacatctccctgttgcgttttttgggggagacagagaggggcgggcctgagtcgagtatccctctcctcgcagcgccacaactgcgcgcaccgacctcccca

SEQ ID NO: 234805 - DNA, 388 bp, Homo sapiens
  chr10:71906296-71906684
  hyper
ccgcctgctcggccgccctcatggcagacccccactgccttctcatggcctctaggccggacactcgggagcttctccgagaaacagcaagctagcgagcgaggacccctacccggtccggctgaagctgcctagcgccacccacagctggaagcgagaggcgcaagctctgactcacgtcttcctcatcgagcccgattggctaagccccaattgacccgacccgattggctgggcttgtaccgagctctgattggcttcctattctgattttttttttcctttccccgccctcgttagtttgtccaaccggtgggacataatctgccccattcccccggatgagccccggggagagtaagaggagtgcggcgtcacgaggaatcag

SEQ ID NO: 234806 - DNA, 195 bp, Homo sapiens
  chr10:71993193-71993388
  hyper
gcggggcggggagcgcctttaacgcggctctgctagtgttcccacccccgccgggccaaccccgtgcgcaggcgcactccgccaggcccgggtgtccgcactccccagccccgcccctcgggcccagcctccgcgatggcagctagggctcagaggctgggccacgtggctgccgccggcgctggttctgttcct

SEQ ID NO: 234807 - DNA, 313 bp, Homo sapiens
  chr10:72015069-72015382
  hyper
ggggaaggcgtagacggtgaccaggtgcagctgcggcgcgctgagctgcccgtagtcgatgagcagcagcagcgcccagagcggcagccaggacagcgtgaagaacagcgccaccatgaccagcatgtgcaccacgcgcgctctgcgccgcgatgctcgcgggtccgcagcctcctcgcccccgggggccgggcccggggcctggcagagcttgcgcgcgatgcgggcgtacatgaccacgatgagcgccagcggcgccaggtagatgtgcgagaagagcacagtggtgtagaccctgcgcatgcccttctcg

SEQ ID NO: 234808 - DNA, 282 bp, Homo sapiens
  chr10:72043537-72043819
  hyper
cgcccctgcctccgcgctccgcaggtccggtcggtccgggcagaggtgagcagggggcgtgcgctcccaggccccgggccctggccggtttccctcccctcgggctgactggctcccgcgcagcgctgctgcccgcagggctcagccgcccgccgcccctcgcctcccgaccaggggaaggagggggctcgtgaggcgcagtcgtcatggcacccgcgcacctgtgcccgccgagcgagggcgccccgggcccgcctcccgcatggcgctctctccacagag

SEQ ID NO: 234809 - DNA, 149 bp, Homo sapiens
  chr10:72142502-72142651
  hyper
agtgggggagcggcgcgcgcgggggtggcgcgcggaagggcagcccgcgcgctcccggccgcagggagtaaccgctttgtgtgctgcttctagagggagaacgcctgagggggcggagatacagagtgggacgcgcagtacatcccagg

SEQ ID NO: 234810 - DNA, 1202 bp, Homo sapiens
  chr10:72200229-72201431
  hyper
aaggggcgggcaggcggcaggtcggatcagattagcgtttgtggattgcgccccggccccagggagggccgtctggcccccgcaggcggagggaggcgtgggcggccgcggctgcccaggcggcagaatgtggattgaggcgcggaaggggctccctctccgcagcacccacctgctcgccgcgctgggtgcccagaacgcgctgccaggtcctcgagggcgataccctcagatccctgccgtccttgacacccactcccctgcaaatcatggccccgaacccggggttaagcgagacacttgacacttccccggcgcggctggaggacccaaggctgccacagttcgcgacttcgggacagcccatccctgatctccgggccgtgagcccgaatccccgatgttaccagctcagctgccgatactcccgacgtcacaccccgggacccattcaccctcactcgcagaaagaaaaaaaaatcgccaagaccaaaccattacagtaataccaacgaccgttgactgtggctgtgccgggtactgcgctgagcgtttcgcgcgcattgtcatctcgcgctttccacagtctgataggcgaggtgttatttattacacctatcctacagatgcgcagacccaggctccgggataagcaacttcacaagactggagattagaagctcccacccttccgcgctgcgctccgcgcaatcccaaaccaaaacccagagacaatggtccccgtcgaggacacaccctgaacgctagaatcccttcccgactcggccgtggatacgcccccagccaccaacgctgcaccccgagcctgctgacgcggagacacccgcagagctaggccctgggctcgggacgcccgggcggctgcaaacccggctcggagccgcagcccccaacccacagcacttcccgagtccgctggctggacgcggcggaggcgccccgggggtgcccagcagggcgcggcacgcggcactgcctaccttctgcctgtaggctgcggatgatgtctgccctcggcagcgggtcgcggtagaggctcagcatgtacgccagaggggatggcgacgagggctgcccccgcgtacgcaggagcgcagtggccaccgtcgcagcacccgcctggagtagggcccaccaggcgtgcagaaggaagggcaggcagtgggcgtgcatggtgggct

SEQ ID NO: 234811 - DNA, 120 bp, Homo sapiens
  chr10:72432468-72432588
  hyper
cgacagcccggggcgcaccctagcctcgccgccctcagcctgggacttggggatcgggcgcttgcccagcccgcgtcccagcgcggccacatggctccactccgcgcgctgctgtcctac

SEQ ID NO: 234812 - DNA, 1254 bp, Homo sapiens
  chr10:72972345-72973599
  hyper
gccggctagggcgccggagccgcacgcagccgcggggctccgagaggcgcgcactggggctgggactgcgcggcgccgccgctgcgagcgccactgagcggtcgcgcaacttcggaggcacagcgccggagccaggcgagcgctcagagacccggagccagaggggcgcgccggagcctcgttcgagagccggcgccaggcacccaccgcgctccgagtgccaggcggccctccgcgcagcgtggcttccgctgcccccacggaaggcacgggctggcgctgccgggcgccggggaggacggcgaggaggaggcggcggcggcggagacggcggcggcgagactggggccagggagacagccctgggggagaggcgcccgaaccaggccgcgggagcatgggggcccggagcggagctcggggcgcgctgctgctggcactgctgctctgctgggacccgaggctgagccaagcaggtaggaagcgatcgggtctgggggcgcggggctaggggacccttgcgcctcactctgtcctgaagttgaggtggtctttcgtcgcatcgatgcgcgcaggaaaagcggcaagggcgcccaagttagaatgtagattttactgcctcccaaagtgggcaatggcgcatccacatcgcgggagcggggagcagggaaggggcttcacagtaagctgaaaggtccctgctcgctcctgaaagggatcccttcttctccctggaaggggtgtaggagtcagggtctgagtctccgggaggatccgcctcctggggacgcccggctctccgcgcgcctggcatccgccccgaaaaagaacattggctacataagcaaggtgtgcgctcgctgccgtacgccggtaacttactagtctggtcccggctcgcctaggctcttacgcgctatagggacagcaatctgcagactagagggagagagcgaaaagacctgctgaacacaggaagcgcttcggtagcctcggcaggccggcttgcagggctcctgaagcggggagggctaagtcttgcacacatagctttccccgagatcgctgggcccgcaggtctggaagaattattattattattattattattattattattaattttctgagtgttggagagtgtgtgtgtgtgtgtgtgtgtgtgtgtgtgtgttggatgcgggtaggggttcttagcgatcctgcggagtttccttttaaattggtcactgacattctcgctgtccggggaac

SEQ ID NO: 234813 - DNA, 235 bp, Homo sapiens
  chr10:73156240-73156475
  hyper
cggggcggacgagacgctgggggccccatccccctgcgcgcccctctgcgggacggctggcggcctggcggggcactgctctgtctcgcacctggggcctcttccgcgggcttcctccctgcccctttgggggattcgtagagttgccacagcagccggtgccatgacatcggcagagggcagcttcgccagcactgaaatattcatgccctgagcgcccggcggggctcggcgc

SEQ ID NO: 234814 - DNA, 1199 bp, Homo sapiens
  chr10:73156698-73157897
  hyper
ggcggctcgggagagagggacgcgggctgcaggcgcgatgcttggctagaggacgcgtccgacggcggccggacgctgaggtggtcggggctagtcagcccggcctgggcatggagcgcggggtggcagagcctctggacgtttggggcgcgcccagtccgagcccccggcgcgcctgaagttgcgagcggcgagcggcgagcggcgagcggcccgcggagacccaggagctgccggcacgccgcggatgagccttcgcgccggcgggaagacgcggcggtggccagggccagagcaggcggcccgcgggggccgatccggcggagagcagagcccgaggcgaggcgaggcgcggcgccgctgcacacacgcacacggtacccggagccacgcaccgcctcttccctcctcgcttccctctccttcccctcgccgttcgcccgccgcgcggcggggaagttggtggtgaccgcggctgccgaaccacttgttcccagcgcggccatcgcccgtggcgggcgctcgcggcatccttcggtcccaggcccctggccctagcctcgcgccccgctccgagctccccgacgcgcggcaactttgattcctgggaactcgaattccattcgcgttggccttgggaggacaggcatcccatcccccatccccggtcctgggaccgcgaacatttgggggctttgctctcggcgctacggagagggtccaggtctggggtggagagattttcgagagtggagcgcgttgggatccaatcccctccccttctgagccctgggtccccatttggacagtggggatggggtggggcgcacccctactgcgggctgggcagaggcgctgaggggaactaaaggcacgtagttctcccctcccctcatcaagtccctgtgcccgcgggagaccccaggggacttacacatcctcccaaattcggtccagctatgggaagacgcgcccctcgaggagccgggagccttttgcggctctcgcttcgccttcctggccctggaactggtccgctacgagcggtgctggctgcccccaggagctggcacccgggagcactgcccctcatctccaccgtaggtcagcccaggactcgagcagagcccgcgtgttccaaggcagtgacggcgccagccggcggggactctgcctggctttctcggagcgggcaccta

SEQ ID NO: 234815 - DNA, 103 bp, Homo sapiens
  chr10:73610994-73611097
  hyper
gcagtctgcaatgcggagcgtcagctgatcccccgcagatataaatctgccctgccccaaagccgtccagagcgcaggcgctaaccccgccccatccgggcct

SEQ ID NO: 234816 - DNA, 1092 bp, Homo sapiens
  chr10:73723718-73724810
  hyper
gggggcggccgtaacggccccgggcgctccggcacggagaagccaagggggttctccaagcagcctccacccaccagcctcgccaggagagcgtggatacccgagcggccccaagcgagtccccggggactggagggccgaggggcagcgcccggaacaaaggcccgcagaggggtcctggagacagcggctccccgggggcggctcccctctctcccctctctcccctcctctcctctcccgccagctcctccttctcctccccttcctcccccagaggcccggccggctcgcggcccgagcagcgccaacttcgccaacggttcccaagttgccgggcgcgcaggggtgggagctgggtggggtgaggaagaggaggaggaggaggagaagggctcccggacgccttggacgcggttcaggaatccgccgccgctagccggctcgggcctgagcggggagggcgccaggcaggacctctcgcaggctcgctgcgcaggacggcgcccgcctggcgccgcttcccttccagcgtgccgaccggccccgcagcgcctccatccctccggcccgccccggagaagacgcacagctcgggccgcgcgggcgccggggccgcggaaccgcttctgccgggatcttccaggaggaaagcgaagttgcgagcggatgctgcccgcgccggaccccagccgcggagggtcggggccgccggtggagtctcggcggccggggtaagtggggcgccggcgtcctggaaccgccgcccagcccgggggaggccgcccagccgggagcccccgccttccgcgtccaggcgcgcgcgccagactttggagggagaagggggcgaagcggacggtgggaggtggagttcccagctcggggaaaagcccaggcaggcacccacaacccgctgcaaccggatcacacctgccaggtacacacagctcatcgccactcataccccgcacacggcgcaggctgatctgcgcacacccacaccggccaggcacatgccacacaccgaaatgcacattcctgggagcgcgggggatttggcctctacagcaggcacgtcctcacacccct

SEQ ID NO: 234817 - DNA, 885 bp, Homo sapiens
  chr10:73846837-73847722
  hyper
ggcgtcgcctctggcgcatccgggcccatcccccacagcacccccaacgatctcggggtccagccacaccctccgcccgccctgcctcacccctgcttccccagcccccaacccggcccggccgagaggaaggagccagccccgccgggccgccgcctgcgacttcccctctgatccacaggtgccggtaaacaaaagtgccgcagctacccccccgcccccaccccgcggagttcggcccaaggttacgccggggttcgggcggcgcccgccgggggcccccaaacccagcttctggactctccccggcttctcaagcccaccgggccgggagccttcctctggctccgagctgctcccctcgctccaggctggattcccccctgaaatgttggtccgggaaaaccagcctgggtcctcgcgcgcccttctgcacggggaccccagcccacccccgtacggacacgccttccaccatctcgcctagaaggctgctgggaccccagacccagagccccggtcacactcccgtcccatgctgtccccctcccgcaaagcccacggtgggaacagagggcaccgcgcgagccgatgccaccctcactgccggccccacccagacctgccggtgctgcagtgccccgtatgtgcagcctgcagcatcccagcggctggggcaggcccgggggcggctcgcacaacgcagctggggaccgggtcggggtccagcggcagccggggtccgggtccccccggccccgcaccccttcccactcccggcccgcaggggagaccccggagcgcgcgaccccggagcgtcgggcaggtgtggagctgggggtcccggggctggggggtcccagggccgccggcccgggccgcagg

SEQ ID NO: 234818 - DNA, 47 bp, Homo sapiens
  chr10:73848322-73848369
  hyper
cagcaggggctgtaactgtagcatcagcatcacgtttgacatcatca

SEQ ID NO: 234819 - DNA, 402 bp, Homo sapiens
  chr10:74020597-74020999
  hyper
tgcccccacccagccgccggggccccaaatgctgagctcagcatctctgtggcctggctgccctcctcccgggcagtgggaggagcctccttcctcccgagggtgggcggggccagggccagccccgccctcctccccgttccccctctccctccatccccctcccgttcctcagtcgcacgttctccaagtcacgtcccccgcttcccctagtagggggtcgacggagattggacccttcccccagtcagctgctctgcatctgtcacctcggcggcagcgctcccttgaggtcgcacctccgctgtggagggaggcgagagcgagctgagtggggggtcttcccttcccccatcccgctggccccagacaagccaccgcagaccgcggcgaaatcagtta

SEQ ID NO: 234820 - DNA, 67 bp, Homo sapiens
  chr10:74032540-74032607
  hyper
tcctcctgtcccagactgataaacctttagagcaataaaggtcgagtccgtctcaacctccacccac

SEQ ID NO: 234821 - DNA, 601 bp, Homo sapiens
  chr10:74057402-74058003
  hyper
aagtagatgttcgccgctcccctccctccttcccgctcccccgggcaggaaggctcgcgtgcgcgaggccacagcgcaagcgggtgcagagcaggattcgaacagggttccatgcaactccgtgcccagggtcctaccaccgcctgagctcagcggtcttcagccagcggggcccttccacccccttccttaatagttttcctcctccgcctcctgcacggcctccgcctccgcctgaccgtcctcggaaacctcccagccgcagcccggccctccccagcggcctgagtggcctcctcccgcggcgccccccagctccgcacctccccagccccgcccgaggcgcgcccagcgagcgtgaccccgacccagggccacggctgcgcccgtaggatcgcgggcgcgcgggtctccatgagggactgggagagatgcgtcacccgctaatccctcaactgggtcgcacccggtctgccttggttggtcccttctgatggcggaggcgggacctcgacttggtggccaatgaggagcctcgtgggggtgctctcggctgccatggcaacggaggggccgcccgcttccccgcggggcgaggccg

SEQ ID NO: 234822 - DNA, 224 bp, Homo sapiens
  chr10:74079275-74079499
  hyper
ttccctcgtttgtccgctcagaccagacggggcaaagggcagccatcaaaggtgtctgggacgagcccggcggggtaatgggccgctagggactcagtctggcccgggtctcagccggggcagaaggcagccgggcgagggccgcgggtggggggcagggggccggggacaagcagccccgcccaggccggcgcgctgtgtgcacaacgtgcagggctgcgaaa

SEQ ID NO: 234823 - DNA, 146 bp, Homo sapiens
  chr10:74079799-74079945
  hyper
taccaggagctggtgccaacccgcagacacacctgggcagccccacgtgggtatcgcacgcgcaggggcacatctgccctgccgggtttggagagcagttgcaagtcagcccctggaatgtggtcccgtgccggctggagcaagaa

SEQ ID NO: 234824 - DNA, 199 bp, Homo sapiens; identical to SEQ ID NO: 202127
  chr10:74114846-74115045
  hyper

SEQ ID NO: 234825 - DNA, 69 bp, Homo sapiens
  chr10:74386146-74386215
  hyper
cctcctcggtacccgttttcgtgttggctatgttggctaagcaaaaaggagttcgtgaaaagaaaactg

SEQ ID NO: 234826 - DNA, 116 bp, Homo sapiens; identical to SEQ ID NO: 202128
  chr10:74451757-74451873
  hyper

SEQ ID NO: 234827 - DNA, 147 bp, Homo sapiens
  chr10:74927731-74927878
  hyper
ggctctgtcccgacgcctgaccggaacctgaagccagcggaaatcctgagagaaagtctgaaacccactcagtccccgaaaccttgtgtgtcgtcactgctgtgcgtcggcgggagcattttgcgagtgtccgggggccttcgtcac

SEQ ID NO: 234828 - DNA, 33 bp, Homo sapiens
  chr10:75007237-75007270
  hyper
tctggaaatctggcgtccgtcttaccttttagt

SEQ ID NO: 234829 - DNA, 184 bp, Homo sapiens
  chr10:75012129-75012313
  hyper
gttgcctccatcgcgcctgggagagctctccccacccggccccgaactcccgagccccgtgaccgcccggaacgtctcgcggtggcccgatgactcactgaggtggaccatggtgccgccggcgtgcggctcctcggagagccccgctacccgcacgcaccagctctacggccttggcagggca

SEQ ID NO: 234830 - DNA, 84 bp, Homo sapiens
  chr10:75012575-75012659
  hyper
ggcgaatcccaggcgcgccaaggaaagtgctacaaaagccatccatcttgcaagcgttggtgccgaggcgcaacgctgagaacg

SEQ ID NO: 234831 - DNA, 224 bp, Homo sapiens
  chr10:75173165-75173389
  hyper
cttggtttccttgcgcagtgtttgcacaggatgagctaatttcaacacagatttgctgctggtcggggaacagcaatcaaatctggaatgctattctagaatagcttccaagaactgtaaacgagaaccagtgtacgaccttggcctggcgcattctgtcctacggttcactaaacacagtaaaaatttccccaagtttccctaaattcgctgtgtcaccggaa

SEQ ID NO: 234832 - DNA, 284 bp, Homo sapiens
  chr10:75173746-75174030
  hyper
gggaggggggcgccgctcctcacctgaccccagcagcagcgtcacagcccaacccggtctcccgcaagatggagccgggggcgggcccagggtgggcggggcgtctcgcgagcccgttaggatcgcggctgcagccgggaacacccccggagccggagagggcgctgcggggagcgggctgtccctcagtcccgcccctaggcgccacctgagggaaaaagactctcccttcgggtggcccagcggatttttaatcacatttatctgtcgcaaggaccctgcac

SEQ ID NO: 234833 - DNA, 179 bp, Homo sapiens; identical to SEQ ID NO: 202129
  chr10:75385748-75385927
  hyper

SEQ ID NO: 234834 - DNA, 443 bp, Homo sapiens
  chr10:75407358-75407801
  hyper
caggcttcagccccgaggctcagagcatcttcttcaggaccagattctgcacccccggcccgaggcttttcatccaggttctgtaccagcgatagcagctcggggttgggcgagttcttcgtctcctcctttcccggccggaacatctgcttccgggtcccccggcgccgggcctcctgcaggatacccgtgcgggcagctggcacagagatgcgctgctcgcgagcgctggggggctcaggagcccctgggcctggggcaggcgcctctgggcgcgcagagggtcgcaaaggcgcagataggaagatagaagcggtggaggtcatggcagctgcgctaggaggagcggggggctctggagctccacctggggtgacaggccgactaggggctgggatgtacagggagctggtggctgtcacagggcccgaggagcgtggggt

SEQ ID NO: 234835 - DNA, 145 bp, Homo sapiens
  chr10:75503717-75503862
  hyper
ccaccacacgttccgcaaatctcataaccagcaaacgccatgggtgagagcaacctagcggacggaaatcaacggggtcaggggtcaccaggaagtgactacaagactctagctcagaggtcactaatacgtcacaggcagagtg

SEQ ID NO: 234836 - DNA, 157 bp, Homo sapiens
  chr10:75504289-75504446
  hyper
aggagcctgggggcggggcctgggtagagaccctcacctcacgcatccaccatccaggagcaggtcctagaccatcccttcgtctcccggcccagattccggctcctgcttcctgccccgagcctgttaaaaggtgcaagacgtttggtctctgtgc

SEQ ID NO: 234837 - DNA, 227 bp, Homo sapiens
  chr10:75531957-75532184
  hyper
ttttagtcctggccgtcggctgagcgagctgcgcatgcgccacgtgcccccgtggcgtagggcctcgtccggtcacgactatccgctgggcggggtcggtgctggccgagggggcgccggctgccggagtggacatggcggccggccccattagggtggtgttggtccttctaggggtgctcagtgtctgtgcagccagcggccatgggtccgtagcggagagggag

SEQ ID NO: 234838 - DNA, 95 bp, Homo sapiens
  chr10:75542070-75542165
  hyper
gcccctccagaggcgacttgcatcacggagatgtcggtgatgatggcttgctggaagcagaatgaattccgcgacgatgcgtgcagaaaagagat

SEQ ID NO: 234839 - DNA, 39 bp, Homo sapiens; identical to SEQ ID NO: 202131
  chr10:75639673-75639712
  hyper

SEQ ID NO: 234840 - DNA, 169 bp, Homo sapiens
  chr10:75670639-75670808
  hyper
tggggcaggcccccggccaggtgcatgggaggaagcacggagaatttacaagcctctcgattcctcagtccagacgctgttgggtcccctccgctggagatcgcgcttcccccaaatctttgtgagcgttgcggaagcacgcggggtccgggtcgctgagcgctgcaag

SEQ ID NO: 234841 - DNA, 113 bp, Homo sapiens; identical to SEQ ID NO: 202134
  chr10:75671364-75671477
  hyper

SEQ ID NO: 234842 - DNA, 161 bp, Homo sapiens
  chr10:75910774-75910935
  hyper
atctagattcaggcggtcatctgctgcctaacgcagtctggggtccctcatggtaggggaggcggggtcaggaatgggcggggcattcgctgttggtgccgacggatagagccaatgattgtggatgacagcggcacagaatgggcggagtctggaggggc

SEQ ID NO: 234843 - DNA, 150 bp, Homo sapiens
  chr10:75936204-75936354
  hyper
tagacagtggccacgtgactgctaaaccggttgccagaggcgcggccatttttggggcgggcacccaatctctcgccctgtaaactgcggggtgacgggacgctgttactaggactcaagatggccaccgcgcccgctagtcatctcgct

SEQ ID NO: 234844 - DNA, 103 bp, Homo sapiens
  chr10:76586294-76586397
  hyper
aatggagcagcggcggggcgggaccgcgactcgggtttaatgagactccattgggctgtaatcagtgtcatgtcggattcatgtcaacgacaacaacaggggg

SEQ ID NO: 234845 - DNA, 206 bp, Homo sapiens; identical to SEQ ID NO: 202135
  chr10:76970482-76970688
  hyper

SEQ ID NO: 234846 - DNA, 95 bp, Homo sapiens
  chr10:77054807-77054902
  hyper
ccccgcgccagggatttgttatgacttgcgagccgcctgacagacagggctgcggcggccgggaggggacgcgcgggaggcgggctccgggccct

SEQ ID NO: 234847 - DNA, 444 bp, Homo sapiens
  chr10:77159568-77160012
  hyper
atccacattaatcccgccgccgcagctaatccggccgtgtgccagccccgtgggtcccccttcggccgaggcgcccccggtgcccttgccaccgccgcccacgtcggtgtctttcttgtcgtccttgccctccggggcacccccggccgaggacagcatacctcccggcgagcaggccgaggcgctggagctcgggctgcctgtcctgggcgtgaatggctggcaggtggcgctcggtacccggaatcccgacttctccgacgaaacacccccgccgccgcccccgccaccgccaccgcctccaccgccgcctcccggctccttcttatccgagccgggtttggagtacggcttgaaactcgacttgtcctccacgccgatgtcgctcagcttcagggggcccgatttggtgtccttgtcgcccgcagcaccgccgccggcacc

SEQ ID NO: 234848 - DNA, 3563 bp, Homo sapiens
  chr10:77160252-77163815
  hyper
ccaaggcgcaattctaggcggcaccccctcttcaacacccactcacaaacattctcgccgttgggaaaggcagcagattgctccccccgcccaaccaccacccccagcagcatctttcctgccctctctgagcgctaactagatttttaaagagcaaaatgttttggttttcggttcctagacccagaactgtaccccctccccacaaacactccttaattcttcagagtaagggctcgggcggctggcgcctcagaggctgtgtgcacacactggcttctgcggatacgaaggacggcgactttggaaccgtatttcagacctccgcctgccttcggtgccgagtgaaggggcctgggtcggggtaggggctttcatatcgaaaggagaaacaagtattggcagccttgctccctagcatgcacgccccattccacttcctcccccttttccgccctagttttgaggtacggaagcagtagcctcttcccccattcgggagctgaatcactccgacccccccacctccgcccagatcccgagaaaaagaaagccctagggtggcagccagggtagtggtcccagtgcgatccagagagagggtccttacctcgatggggctgaccggcgtggaaggcaggggctgcaggtactcggggtgcaaaatgtggccagttcgtgccgtcagcatcttcagcaccttgattggcaggcggttggcctggcgcagggggtcagaggggggcacggcgtgcacaaaaggcttggtgctgccggccggggacgagcctgggccggggccggagctatttccagagagcgcgctggtccaggcagggtctgcaccgccgcctccgcctccgccgccgccgccgccgctgtgcttactgcttcttagggcagaaagcgagggcgctgtgctcatgacccacccgcgcgcatgggagcagcgggggggagggctccgggaggcgcggggcgggctcggggctgcgcgctcgccccgggagcaggagcagcgggaggaggaggagctggcgcggcggccacgggcgcccagcgcgccttctcggcgcctggagccagacgcgagtaatcctgggtggcccgcagcggagccgtggccgggctagaggagccggctggactgcgggagtgccgggcggctcgcggtgtccgcctcgggctgctcccctgcgctgcgttctcgcggccccgcgccggcgctgcgctctgcgatgcgagccgctgcgtgtccagccggggctctggcgaggaaactcacttcaaaagcagctgcaccaagggggagattaaagcctttgccgccttccaatcaaatgggagcccgaggtgattggagggtcaaggggatgtgacgcgtcccgcgccgccgccgccgccgctgccaggactctcagtgccggttttaatgggcagctccctcttcgccgcccccctgtgtgtcccctccctcgatttcgctgggaggacgagatggacatttattctacgtttgccatccgccgcctccctcttttttcctcctcgtcgttcttcctttccccagctcgaaaataaactgaaaccttcttttgaaggggggtgcgcgtgaggaacagactgcggggggtgtccagaaggagcaccggtgggagtgtggacaccggccggactgtcaactccaggggcgaagggaacctgcacacccagtgttttttccttcgcagtaatcgagatcccgcgcggcgcagcgcagccaccagggtaagaaggcaaggtggggagccggagctggaagaagcccgcccgcccgctctaatttcctcagattccgcggcggagaaaccagaagctagatgggcagtcgcagcggcggcggctcaacaccgcgaggagcgctgggctctccgcccttcccggccacgtgacgcccggggacgcgtagattggggcagcagcgggggtcacatgtttcctctgtttcaccctcagtctgtcccccaaccccccattcttactctcccaccctgttttcctccctcccccccttctttgggcatctccacccctccatcaattgtcaatgttcctcgaccgcaatcaatcagttatttgtcagctcttgtcaatcctcccgtgatttatgtcagcttttgttgctgattacaaggcgggtgcgacttgaagggaaaaagagagagggagagagagacggagaggaaggaggagattgagagggaactggaggaggggaaaagaggagcggcctcctgggatgggggtggggtgggggctctaagaaaaagaatgaaagaggcgcacggtgtcaggaaaatgaatagcgagagtaaagtgcgcaggtgcgcccagggcgccgagaggggcgcgcaggcctggagtgtgcgcctgccctctcggtgtcggagagacgcccttccacctctgggagcctcggtctgttggggtcgcggagttcgggcgcggctccgggtacccgagaccagcggcggcaacttctaacacgggagatttcccgccaccccaccccgccgccgcgagtcctcgcggggcgtgttgcgtgcggaggtcaggctgccaccctctgtagttccctaaccccaaactcggagacttctaagagccacaccaccaaggaacttctagtcctggaggtcaatggtggggcaaacctcgcctcaattctttgaccccctcgggtcgtaagcagggctaagaggctgcgaagaagaggcctggccatgggtgtatgggggaagaaacatctcaggctcactcatgccccctccccgaccttctcccacctgccgccatccccgcaggctggggagccagggtaactcggggctgctctctcgaatttattggaacgccgagtcggaatgagctgcgctaggagagccgagggaaggagcgagagagggagggggcggctgcctgtgggaacgcgggttcttccagggaagcggagcgggactgccgcgttcccctcgatttgcaccgtcactcgggttgtttgggaagaaaaggggaggcgctgtgcgtgccaccgggtacctggacctggatgcccagtgtgtatgcatgcctgtggcgctgcgtgagttatcggggctctgatagcgtccggagcgggttcgagggtctcctccaggaactcgcagaaattagagggggtggggaggaggacacacccccttcctcggaacgacttagaagactttgaatctcccctcctccgcttttccgccccggctcttcttttgttgtcaagtccttttgataaatggtggggctgggagctctgggagtcgggagccagtctgtgcccgcgtggggggcgggggccgagcctggagacccggtttcgaccggcgcgcacctggggctgagccgggtgcgcgcgggggtcgggtctggaactgcccttggtatgctcgccctctcctcttggcccatctcactcccctcccccacctgactcccctccccggcttctttctctgtctcccactccgcacgggtaccgagaactttccggg

SEQ ID NO: 234849 - DNA, 808 bp, Homo sapiens
  chr10:77168771-77169579
  hyper
aacctgggaatgtgcgcgctcgggaggggaggctgtcaaaacccagtcatcgcggggactggatgggggacaattctccgacgccgcggcctggacccgcccccacccaaccggcgcaccacctcccaggcaccacggagcctgcgcaagctgcggggccgtaaaggaaccggcccccaatctccggggcttcagtcccgcccctctctccccccagtgccctgcagcgctcccagggtccgtgtctgccctccccaagcccccactgtcaatacaatccctgttaaaaaaaaaaaatctttttagagccaggcacgtgccgtcggcctctcccctgcccgcctggcccaggaggcgcccacacctgcgccctcacttgccgagacttttacctgtgcagtccccggcggcgcctgcagccgcgcaggtaaccgagaaatggaagggagggctggggagtgagaaggacagagagcaccgcccgacacaaccagacgcgcggacccggggcctcctctctggaccggtgctggggccctggtagaaccagctccgggagccgaaattgagccatgaagagtgggccgagggaggggcgaggggaacgggcctcaggagggaggggcgggcccggcggcacttccgttgggggtggggctgcgggctgccgcgccggtcccgcccctccgccgcgcgggcccgcccgctccaggccaggctccgcccccaccgactcggagctggatctcaggccacggcgcccccccagtcgcgcccccaaccccggaggcctcgggctgaaccgggt

SEQ ID NO: 234850 - DNA, 736 bp, Homo sapiens
  chr10:77190965-77191701
  hyper
ccagctttgatgaggaggggcgttcagccaagaggcccctcctcgctgcagttgaggtccattatgtaacccagcttgcgaaatgcaggaaaggcccggctggctacagcccggctaacggctcagaaagggcgcccctgataggaatacccccacctcaggcgtggcccagacaaacgcgataaagctgtgggcatggagttttgggcattgggacatccgggggagggaggggcgcgggcagtcggggtcaggccgccgtcggggcgcggggcgctgcgggccacctgttgcagcgggcggccagggctcacctgcgcggagaccgggccgaggggcggcggcggcgagcggcggagctgaggtccccgaggctagcccgcgcctccggcttccgccgggtcagctgactgcccagtgcggaactgtgcgcccgccgcgctcccctgccgcgctccccgctgctgccgccgcgcccccgcgctccgtcccgcgcgcccgcagcgtcctggccgccatggccgggctcgtggtgcgtggaactcaagtaagtcccggccagccccgcctccgcccggggcgcagtccgcgtggggagggacagcggggcacagaggctccccagggcctagacacccctgtccccgcctcagggggctgcgtctgcagggggtgagcttcaggtgctcaggctcgccctagtggggctaggacagacctcgtttcgggcctggca

SEQ ID NO: 234851 - DNA, 296 bp, Homo sapiens
  chr10:79396527-79396823
  hyper
ttcccttctttctgaccccacgaactcatctccccaacaggttcctaaagtatgggcggatgtgctccctctcgcccaccgccaggagccgagccccggcaggtgagcggtgcaaaacacgcacccagctgcccccagcttcctccgtccccgctgagttggctgtccccaccccgcaccacggcacccgagcctgtgagtccccgaccccggccccagccgcagccgccaacaaccctacaataaacaagaggacaggattgagcgtccgcgtcccggagcgcactggctggggg

SEQ ID NO: 234852 - DNA, 47 bp, Homo sapiens
  chr10:79398383-79398430
  hyper
agagcgcccccagcccaggcgcggggccaggcgcctctctccaaggt

SEQ ID NO: 234853 - DNA, 426 bp, Homo sapiens
  chr10:79470898-79471324
  hyper
ctaaggagaggtctacgttttattttttaagaaggcagagctcgagggggccttgaagtcacatcgccggctgctgagtctacgaacagggaagcagccgcagtccccgaaaggacccgtcccagcgagccagggcctggttttccttccgcagaaggcggagggaccggagcgggcgcgggcacccctgggctctgaggggcgcgctctgaagggcggcggacttcagggccatgctggctgtccccagaaagcaggagcccgaaaccgcggggccaacgaacgcccacattctctgctacaacctcgccactcccctgcgcctctccccttgccccctgcccccacaggtaacgcccagaacgagtgcttctcccggtggggtactgaggagcctgggctgcagctgccgagccgccacagcca

SEQ ID NO: 234854 - DNA, 73 bp, Homo sapiens; identical to SEQ ID NO: 202148
  chr10:79606676-79606749
  hyper

SEQ ID NO: 234855 - DNA, 220 bp, Homo sapiens; identical to SEQ ID NO: 202149
  chr10:79685704-79685924
  hyper

SEQ ID NO: 234856 - DNA, 34 bp, Homo sapiens
  chr10:79793411-79793445
  hyper
gcgtaaacctagtcggctcgagttgttctggttc

SEQ ID NO: 234857 - DNA, 197 bp, Homo sapiens
  chr10:80828742-80828939
  hyper
cgagttccttttcactgtctgtggacattaaaaaagcgagcggcggcggcgggcgccggggagagcgggcggccgggcggcaggcgggcgagcagcgatcgggcggccgagcgagcgagcaacgccggcgcagcgcggtgaccccagccccagccggcgcggagcaggagccggagccgagcggatctcggcgccct

SEQ ID NO: 234858 - DNA, 84 bp, Homo sapiens
  chr10:80830851-80830935
  hyper
gagagtagggcccagccccaaagatttaaaagggcagtgggcggccgcctgtggaagcccctggctccgcgccgggtgcagagc

SEQ ID NO: 234859 - DNA, 57 bp, Homo sapiens
  chr10:81107046-81107103
  hyper
ctgggcctggaggcgggagtgtttcaaagcacttcacgctccgcggccccaccggct

SEQ ID NO: 234860 - DNA, 250 bp, Homo sapiens
  chr10:81107654-81107904
  hyper
gaatgatttcttccggcctccctcggagcactggagcgggggagacgggagggagggcacgtgtggaggagaaagctcaaggtcagatcgcagagagggagggctcagcacctctgggccggcccgggcacgagggaggggctccaggagccttctggggctgagcctagatccggagctccgaggtgggtgtcgggggtcttggggtgagcgtcgtggcccagcgggtgctcacgtggcggcccttgca

SEQ ID NO: 234861 - DNA, 140 bp, Homo sapiens
  chr10:81204444-81204584
  hyper
gtgcctttcgggtcgggaaccgcagaggtcggagaaaagattttaggcccttccagaggagctccgagcagaatctgcactctcggtcccagcccgcggtggccaggacgaggataaggttgggcgtgagaaggacactt

SEQ ID NO: 234862 - DNA, 715 bp, Homo sapiens
  chr10:81664375-81665090
  hyper
agccatagtccattcgtccggagcacggtcactccggggtggccaggaccaaatgtgcctccttctggcttttgcaccgcaccaactaatccgcgccaggccgcacagctgctctggccttcggggaggactcctggagcgcggtgtacactgctccggagtccctccgcaggagttgaggcagcgagttccgagggcggggtggggcggaatccggaggcacgcggacccggtggaacgcactgcgcagacggcgccggcgcctgcactcagctgttgacgagtctttcttccagctctaccctgaaagtcctccaggcaccggtcttttttttctgccttttgtttccctcccggcgagtcggcgcgacagtgaatttccgtttcccgcggtgtccaagcggacctgaggagttgcagctgtgagcaggttcggtggtgccgcgggctggggtaggcggcggtggggtccctggctctggggcactgggaagatcgcgagtcgtgcgcgtgggaaggtcctccggctcatctttgctccccaggagcagcatatttcgcatctgccagaggtgtgcccgggggtcgttgggagagggacggggtgaatccctgcagagagccgggacggggagggaaggtgtcggggagacgtggtttcctggcgacgtggtcccggcaggcgacttagacctgagccgaatgtgttgacccc

SEQ ID NO: 234863 - DNA, 1021 bp, Homo sapiens
  chr10:81741259-81742280
  hyper
ccgcctgggcaccccgaccttcgcggcccagatcctcccgccagcccagcccagggggagcgaggcgacggttgccgggaagcgcgcagcacccctccctcccattcttcgtcctcccctggcgcaccgcccgtttttcctctttctccgttaaaaacaactgggtggctgtgggaagagggaaggtggcgccggcggagtctgggcaggcgcctcccactcagccgccagcagccctgggagccggaggatggctgcggtagcagccacagccccagaggaggcggtgcccgacgcccggggcgcccagcgcgcccagaccggcagtggccttcatggcgcaccagaacctaaaccagaggcagccacacggacacctgagccgcctcttcctgctagagccagcgaggtgtgcccgcagccgagaccccttcctctccacgtctcctcgtctccttgtctcccgtgcccgcgtcaggccgccagcctcgcccacctccccaggaagagcgcgccgggcgccgacttcccctggggcggcggccctggacgtgcggggggtctctctgggccggctgctgcgccttggccctgccctctagctcccgcgctcgctcccgccctcctggctctccgggcgcgcctggcggggcagggcggacatgggcaccaagcagaggagccgcacgcgcacgtactggggctcggatctaccttccagtagcaacggaggagccaatgggaccgcgggcggcggcgggggcgctcgggccaccgcggggcggttcccggctcaggtgcccagtgggcaccagcccagcgcctcgggcggcgctgctgcgaaggccctggcagccccgcgcagccgctcccgcggcggggccgtggggagcgtggctttgggggcccgcgcagcgcagtcctccttcagcatgccgaacagtagcagcggcctatagggcttacaggactcggtgcacagcagcgctgaggaaggtggcgcggccggtccaggccggtg

SEQ ID NO: 234864 - DNA, 322 bp, Homo sapiens
  chr10:81838726-81839048
  hyper
ggtcttgggcgggcgcccagggccctgagaaaccggctagccaggcttttcttatatgggggcggggacggctggggagctcccagccaactctgtgtctgggtttttcaagaggatggtgaagtcggaggccagcaatgcggctaccgcctatttccgtccagcaagacccttgccctctctggtcacagtcctggggctgggctacttcgcggtgaggcgtggggtggggcggggcgggcctctgttttggcccgccgggccctcgtagggcgaggggagctctgggaacggggcctgtgcgcacgcgcatctgacggtt

SEQ ID NO: 234865 - DNA, 378 bp, Homo sapiens
  chr10:81892276-81892654
  hyper
ccttcctcgggaggcgcccaggtggcacgtcggtgcctcagctcccggggtctctgggctccgcgctgcccacggggtgccgaggggcctctggagggggcgggttctctcgagccagaaagtccggagccgcccaggaattttggctcgaactgagtgcatttcctctcgggccggccgggtgcgatccgggaagggcggctgcgggcagacgcggcgctgcgctcggccaggccggcaccatgcggcccctgctctgcgcgctgaccggactggccctgctccgcgccgcgggctctttggccggtgagtggggcgcagggcgcggcaggggacctggagccggggagacccgcagatggcgaggaaggaatgagc

SEQ ID NO: 234866 - DNA, 98 bp, Homo sapiens
  chr10:81965474-81965572
  hyper
cggcgcccagtgccgcgcagagccgcattcgccctcctgcaggggtgggcatttcctaagtcctctccagccccgtgtgcgtcggttagtgactctct

SEQ ID NO: 234867 - DNA, 559 bp, Homo sapiens
  chr10:82116581-82117140
  hyper
gtgagcagagggcacgcggtgggcagcgaagggggaacgcgcagcagagaggagagggcgtgcaggagtaggagcaggcggcagagtagagggggcgcggcagagtagagggggcgcggcagagtggagggggcgtgcaggagtaggagcccgccgcagagtagagggggcgcggcagagaggagggggcgtgcaggcgcggggcgcccggcagagagaaggggtcgtgcggaagggggcgcgcgccaggggagggggccagagaggagggggcgttcaggagtcgggcctgcggcagagatgaggcggtgtgcaggagggagagcgcgcacgagggggcaacgggcagagaggagagggaatgaaagaaggggagcgtggcagagagaagcgggcgcgctccagggggcggggtccagggaggagggggagcgtaggatcggggcgggaggcagagaggagcgggcacgcgggacgggcgtgtgctcgtgaggggtcgaggaaaggcgtatgtggaggcgcgcggggtgggtgagccgaggagacttgctacacagaa

SEQ ID NO: 234868 - DNA, 63 bp, Homo sapiens
  chr10:82168029-82168092
  hyper
taggggtgtccagcgccttcttttgccctaggcagcgccctgaagaacgcgtcggggcctcgg

SEQ ID NO: 234869 - DNA, 2673 bp, Homo sapiens
  chr10:83633800-83636473
  hyper
aaggtggccttccatccagccgcaccgccatccggcaggggagggcacaggcaccctcccacccgcatccgcccccgccccctcgcccagcagcgtcagtctctgaccccactggatccgtacaggagacgactcacaatcggtcggaagctgcttttgcccccccaccccaccgcaaacgggggtttgcttggatcatttatctatcttgtgtgcattaagaaaccagcattagctgctagtgggaggcgctactctgcccgaatcccagcccgccgcggcgattctgcacacacacacgcaccagcctggcagccagagcccgtctggagacgccctcagcccggggtctgcgttccccgggacccccgacgcagtctcccgcttccgtcccccacgctcaaccgggcagggcgccggggcgtgatttccgatcctctgcctgcttgttgggtccctcggaggcgggtcagaccgcacccgccgcgggcgcccggtgcgcccccagcccctggctcgcggcggcgacagcggcgctgttcgctggagtttgactctccggcggcggcggcagcggcgcgcagcagcgaacggctggagcaaggcgagccgggccgctagccctccgcgctgcgctgggattggtctctccagaagagtgctggccgagggttggctgcgggccggctgaagaacaggtgcacctcaccgcccgggctcgcggagcagccgccgaagatcgcggcggccaggcaggccctctgtgtcggaatgcgggtggcgggcacccggcaccccgcgaccggccgccggggccactgaaggcggcgcgaggcccaggcgcggcgcgagcgggcgccccagggagcgggctgggcgcggtgccccgaggatgtcggcgctcctggagcgcacgcaggcggcgggcagcagcagcagcagcgggcgcggggacccggcgcgcaggaggcggcttggagggctgcagacgcgccccgccgctctctgaccgaccggaggcgccgggggcccgtctcgcccctcttccgagctccttaccgccccctccccggccccgtcccctcccccgctcctctcctccccgcccgccgcccgcctctcggggggaggggcgtgggggcagggagcggatttgcatgcggccgccgcggccgctgcctgcgcccgagcccgccgccgccgccggagcccgcgcccgcgcccgcgcccggcccgcgcggccccatgcctctgccgcggccctcgggggggcgaaggtgaagaccggctcctaggatgagtgaaggggcggccgctgcctcgccacctggtgccgcttcggcagccgccgcctcggccgaggagggcaccgcggcggctgcggcggcggcagcggcgggcgggggcccggacggcggcggcgaaggggcggccgagcccccccgggagttacgctgtagcgactgcatcgtgtggaaccggcagcagacgtggctgtgcgtggtacctctgttcatcggcttcatcggcctggggctcagcctcatgcttctcaaatggatcgtggtgggctccgtcaaggagtacgtgcccaccgacctagtggactccaaggggatgggccaggaccccttcttcctctccaagcccagctctttccccaaggccatggagaccaccaccactaccacttccaccacgtcccccgccaccccctccgccgggggtgccgcctcctccaggacgcccaaccggattagcactcgcctgaccaccatcacgcgggcgcccactcgcttccccgggcaccgggtgcccatccgggccagcccgcgctccaccacagcacggaacactgcggcccctgcgacggtcccgtccaccacggccccgttcttcagtagcagcacgctgggctcccgacccccggtgccaggaactccaagtacccaggcaatgccctcctggcctactgcggcatacgctacctcctcctaccttcacgattctactccctcctggaccctgtctccctttcaggatgctgcctcctcttcttcctcttcttcctcctccgctaccaccaccacaccagaaactagcaccagccccaaatttcgtaagtaaacactgtgtctcaactatgatttactactgagtttcccttctgccctcctgctgtctttttccctcgccgcctgttttctagcaagccccctcccccatcccaggtttggggcagagtgagagctgattaaaactggccaccagcggggaagaaggtgccagcctgctctggttctgggggggtgggggcgtgtaggaacgggagggagattgtcaggctccactggccccactttagcgggtcccaagtgagaacagatctcccaactcccttcaaagggttaacgcgagtgcgatccctcctcactgcagacctgctggcgagctgccggatcccgctccagtagagggccagggagggagagagggccttcccgaaggcactgagccccttctccgcccgccggtaggaaggaaagaaagcaaagcacatgcaaattgaccgacgataaaccacaaaaggaagttatgtccttgtgtggggtgacgagttgatggagataatggtagaatgttgctgaggacgcttccagcagccctgacctg

SEQ ID NO: 234870 - DNA, 130 bp, Homo sapiens; identical to SEQ ID NO: 202159
  chr10:85899676-85899806
  hyper

SEQ ID NO: 234871 - DNA, 944 bp, Homo sapiens
  chr10:85954179-85955123
  hyper
tcctgtccaggactgggggccgccggcaaagggggcgtggcgggcggggagtcctcttgtcacgccctcctgcccccgcccgcggctgggagcctgtcgctccgctctgcgccgctaattggtctcgtcaggcggccggcaggagcagatccgagccgtgtcatcctcttagcgccctcacgccacccgccgctcccgccccgtgccccctcccgccgcggctgcagtcgccgctacccccattgtggtctctgccctccccgcgggcccagggcatgctccgtgcccctgcgcccggtctcggcggcggcaggcgacactccgcgccggcggagacatgaggcgctgccggtgggccgccctggccctggggctgctgcgcctctgcttgggtgagtggccgctgggccgcgctggccgcgtggatggcgagggagatgggcgctggcgtcacccaggtggccagagggacatggtcctggaccacttccagagtgggactcgggctggtggacgggagcggagaagtccttccatcttcctggcccattcggtagtggggagtggggtagcggagtagtggggagctccggggcgcttctccagagctggcatcctagggccccagggtttggcgcccggacccccgctgctctccgcttgctgggaaccagagctgtaggcttggtggcagctccgatgctgcgtggggcaggagatagtgccctgactcgcggcttgaccttggctgggctggggcactgcccctctccgagcgcgggtgcaatctgcccattgatgaaggaggggttggattgctacctgggttctaagcgcccacatgctacgtgtccctgacaagcccgagcccaccgggggcggagtgggggtcaggggcatcctctgggcggcgccccagtggggtccctcggtgcacttgggtt

SEQ ID NO: 234872 - DNA, 58 bp, Homo sapiens; identical to SEQ ID NO: 202162
  chr10:88124922-88124980
  hyper

SEQ ID NO: 234873 - DNA, 954 bp, Homo sapiens
  chr10:88125562-88126516
  hyper
aacaccctctcacagtaacaccgacaccgtgccaggcgcacacagcgacacacgctgacaacacgcacccacacacattcacacacggttccggtccggcctctttgatcttgccctgccaacttggcgagccccccgctgtacctccccctgccccccgctgctctgagctgcgcagaagggccctcccgacccgccgacggccccgctaagggcgcgggtctcgacgcgcgtccatcccggtgttccccgaagcgtcggccctaagtgtcggtagaggccgcggggccccgcgcggagatcggagccccggggagcggcaagcagccagcgggagcgcggcgcggccggtgcacagctcctccgccgggcggcgcggcgcggcccttcgggggagcaccgcccgccgagcccctcggcccagggaaacgccaagtttggacgccgcgcaccccctgccccgttggggcccccgcccagcctcggcccggcctccagccgcgcttaccgatgtggatgatggagtcggcccgcaccgacacgcactggcatatccaggggagaagccacagcgtcagcgcttccatgtcccccgggcgcgcggctcatccacccgggcccggggcgaggccgagggcagcgcgaagcggggaggcgctggtcccggtgcagtcccgggccgctccccgggagagccgagcccgcccgtgcgtcttcccccgcgcgcccgcccctgcgccctgcgcccgccccagcccagcccagcccagcccagcgcggtcgggctcccgctccggctccggtggcggctgcggcggtgctggcagcttgagcccaggccggcgcggcgggggcggcccgcggctgtggcagcggcgcttcccgcggctagagcggcttcgggggaggctgaggcggtggcggcggcggccgggccggcgtggcggctctggg

SEQ ID NO: 234874 - DNA, 581 bp, Homo sapiens
  chr10:88126745-88127326
  hyper
gaccggcacagcggcggggaccggcctgggctgcggcgcgccgagctctgacggttcgggcctccttctccggttcgccaggggcgggagaatggaggagggccggccgctaactgccctcgaggggctcccgaagcgccctggcgacctcagcagccgcgcgtctcgggtcatgtccccggccgaaacagaccgttcctcgtggagtgggacctggggagcaagaagagagaccggggcggggcgccgggccaggccccaggacagctggggagccagagggggccggccgccgcaagcatctcagagtagagcccgggccgtgggctcgaaccctggctggccgcgcggacctcggcgggcgcccatcccccgctccatgggcagcgcgctcagccgggagtcgggcaagaggctcggactctgaagcccaattcatggccggaaaccagcgcagccgtgaccgcggcgcctggacgtgaggagccttccaagcggccggcgggctcagactccgaccctgcacggagctttcatgtgcgagcccgggcgaagagcccgctcctcgcggccacagcgga

SEQ ID NO: 234875 - DNA, 362 bp, Homo sapiens
  chr10:88149246-88149608
  hyper
gaatgagggtgacttgcacacgccgcatagtaaagcggcagagaacttgcatcaggcgtctctgaccaccgagcctgcgaagacctagctgattacgaccaggaaacaggaggggacatggcccaaggtgggcggggccagtgctgggaagccccgccccgcccccgatcctgtgctcccaggtctgggcgttaggattctctcagtcccggagccacgccggctgaccgcagggctcggggagcgcggctgggccccttttcccgggtccgggaagcgccgggccacgccgggtccgctggagagactgagggccagggtcgccgctgccgccgggaggcgacagagccagctgggcgcac

SEQ ID NO: 234876 - DNA, 316 bp, Homo sapiens
  chr10:88281851-88282167
  hyper
cagctgtatcaatcgcttcccctccagggacccgccggtgcctggggaccgcgggctgtgcagctgtgccgggcctgcggaggccgccgcccgggagctgggaggcagggggcgcgtggtcaagagccgccctcgacctggcctggtcggtcctggcccggcgtaggtgacgatggcggggaccgcgaggcgccggacacccgaggccacgagcagcgtcgcccctcgctttttcgcgcccctccagccctgcagtccttcctctaagtccgtctgcccctcaccgattgaaagtggccccgagaatattggatgg

SEQ ID NO: 234877 - DNA, 383 bp, Homo sapiens; identical to SEQ ID NO: 202164
  chr10:88515316-88515699
  hyper

SEQ ID NO: 234878 - DNA, 255 bp, Homo sapiens
  chr10:88731054-88731309
  hyper
gagtggggcgctgccgcccggcggggtcccgccccgccactccccggggaggggcttcggggcacggggccgtgcacgtgagaacgaagcacggttgtggggggggcatgcacgtgcgcgctcgcgtgcgggagacccctcccttccacaccacttcctttcgggacaaaccggtaacctccggccctggaaggttttgtctagtgggttccggatggactggtgttcccagcacccccccggcacgtgtccacg

SEQ ID NO: 234879 - DNA, 179 bp, Homo sapiens
  chr10:88853594-88853773
  hyper
cattttctatgttcggatatcatctgtcactattggaacaggagtgaacaaataccagaaaataatttgacagcttgcatttaggggagactcacaaaagcccaagaacactgacgaggcattatcacacgggcaggtcattccctttcctagaagtgcatttcggcaggacccgccgt

SEQ ID NO: 234880 - DNA, 113 bp, Homo sapiens
  chr10:89265586-89265699
  hyper
gaaaggggacagacgaggtctcccgcaatttttgcgctcccgttcccaaactgaattgccccttcgagcgccaacccatcccttcccccttccctggcgtctagtttcacaat

SEQ ID NO: 234881 - DNA, 469 bp, Homo sapiens
  chr10:89577722-89578191
  hyper
gcgaggcccgggacgcccttggaggttaatcctctagatactaagggctgcggggcgcttgggggcggcactgaggtagggcgtgggagaagaccggggtgacctttcctccgggggttcccaggtccgagacggtccttaaaggacctcagaaggatacgacaaccatcccatgaggccccacgggaaccagctactcacccaggggcagaaacagcaagagcaagtgccctcagccggcctcacacaggaaggaaacgcaacctgggagagaacgcttccggcgggaggcgcggcgcactccctcccacggagcatgcgcgacccgcggtcgccggcgcggagggggcgtgctcccaggcttagaaacagtgagggagagcaaattcgcgcacctgatgtctgcttaagctacctgctagactgagactttctgcgaagccggcgtgtctgcgagcagcactcgcta

SEQ ID NO: 234882 - DNA, 1524 bp, Homo sapiens
  chr10:89621328-89622852
  hyper
actctcagcatttccgaatcagctctctcacggtgacaggtcagcccaatcggggctgtaaacagacttgacaggtttgttctgggctgacggccattgactaggttctcagaccagataagtcacttggctgagtccacagtaggtggggcgcgctcaccagctcaggggtagtgactggacgtttgttgcaacatcggagaatgcacgctctgggctgcagcaggagataccctcaagcacagaaccaaaagggttcaccctaagcggcagggcatcagcgatggagaggcccgagagccctagcgcccagctccttttcccacgtttgggaaggcgcagaataggtcgatgtagagcaaggagtgagtctcaggtctcagtcctttggcttgctcttagggtagcaggcgaggagtggcaccagtttggggactctctccccgcgttctgtaagaatcggcggcagccagcaggcggggaggcgggggcacgtgtttggatgtgggtgcttgtgtaaccagttccccaagcgccagccccgacagcgctccttcgggaggctggtccgagcccctgtttccgccgcggcgcaggaagggttggggttccgctgcctgcaccaggcaagagcaccccgagcaaaggaagaagacgacttgcctccggagctatcactggggagtgggaatttggaaagttccccaactagggacacacgtgacctccttcggaaagtagttccgactgtggcccgtgtatccttccacctccttttgaaccctcctaggtctcctcgccccgcccactcgctgggctgcagcttcctaccgttccgtactttccactcaacccggtaaccccaaacgtgcacggtccggccggggcgcgcggagcctggccccgggcgatccatcctgccgggttttcacggcggccaagggggggcggggctaggtggtctctgagaaccgagcttgactccgacgccgcgaaccgacctggagcccgaggggaaagatgctcgactctcttgggggcaccggagcgggcgcaggagaggcctgcggggtgcgtcccactcacagggatcctctttcagttcatttagataggtgccctttgggcccttgaaattcaacggctatgtgttcacgttcagcacgctcggctgagagctttcatttttagggcaaacgagccgagttaccggggaagcgagaggtggggcgctgcaagggagccggatgaggtgatacacgctggcgacacaatagcaggttgctctttgtgctaagactgacaccatgaggacacagatttgggggaagggggaatctctaggcaaaggctgttacagtcaaatctctgcgaacgattgtgatccgacagcggtgcaaaaggaaagagcgaatgcagtccacgccgcggaaatctaggggtagaggcaaggggggagggtattccccttgcagggaccgtccctgcatttccctctacactgagcagcgtggtcacctggtc

SEQ ID NO: 234883 - DNA, 232 bp, Homo sapiens
  chr10:89623143-89623375
  hyper
cacccagagctaccgctctgccccctcctaccgccccctgccctgccctgccctcccctcgcccggcgcggtcccgtccgcctctcgctcgcctcccgcctcccctcggtcttccgaggcgcccgggctcccggcgcggcggcggagggggcgggcaggccggcgggcggtgatgtggcgggactctttatgcgctgcggcaggatacgcgctcggcgctgggacgcgactg

SEQ ID NO: 234884 - DNA, 668 bp, Homo sapiens
  chr10:90342573-90343241
  hyper
agagcgcggggtactcctgccgggcccccaccctcgcccccaccctcgccccttcttgggccttttcccgggcggcggaagtccccgatcacgtgacgaggcgcgccactcggcgcatgggccgcgctacacggccgctcagggagctgagggtatagcgttttcgccttagactttcttgggtgcaggcccacaccacctcagcagcctgcccggcagtcctcttttcccaggttttggcgtttagacaacccacctgagtcctcagccttgtcccacacagcaaggtacaagggaccggacgtctgcctcctcagcagcgcagcgcacaagcttcctgtcatcccggcgcccacgatcagcacctgcgccatggcgagagggagcagcgatccgcgctgagtctctgcggcggggccgttcggcccgggctttctggaaaggcggccgaaccggcgctagcgctctttggttccgtgctccctgggccgacctgggccctgagctttcctccggccggcctgcagggggcggaaaggaggcggccggagctgagaggcccctccgtccttgaggagcaaacctggggctgcggagaaccggggctgtctgtcttctcgctttgggggccgggcgccctgcccctcgcccagaaaagcctggaaatg

SEQ ID NO: 234885 - DNA, 174 bp, Homo sapiens
  chr10:90639670-90639844
  hyper
agtgacagtttaacggtcagctgcatcaaggcttgtgtactgtgcagtcttaaaaggcaccactcctgtccatctcggtgaaattgatggtggagcaaaagggagtttaggtggttccggtctggggagaagacgtgcagggtttcagatgcgaaagtcgcacccaaccgcttc

SEQ ID NO: 234886 - DNA, 53 bp, Homo sapiens
  chr10:90735036-90735089
  hyper
agataaatcagaggcggaagaaaccgtgtacagagcagcgtgtgcatttgaat

SEQ ID NO: 234887 - DNA, 156 bp, Homo sapiens
  chr10:90749778-90749934
  hyper
gaaataatgagtaacgaaggacaggaagtaattgtgaatgtttaatatagctggggctatgcgatttggcttaagttgttagctttgttttcctcttgagaaataaaaactaaggggccctcccttttcagagccctatggcgcaacatctgtact

SEQ ID NO: 234888 - DNA, 79 bp, Homo sapiens; identical to SEQ ID NO: 47395
  chr10:90750154-90750233
  hyper

SEQ ID NO: 234889 - DNA, 35 bp, Homo sapiens
  chr10:90750878-90750913
  hyper
cttttcttgggccttgatgcgaagtgctgaccccg

SEQ ID NO: 234890 - DNA, 1620 bp, Homo sapiens
  chr10:90966574-90968194
  hyper
ccttgtggaaggtgcggtacagccagggcaccttgtggtgcagcaggtgccacacgaagaactccatgtcgaagagtagcaggcagaacaggatgtggtgcagcagcaggagcagctcgggagcttcgtggggcaggagggccgggctgcgggcccaatgcagcagcgtcacggggaacacaaacatcacatgctggtagagggtctgccccaggcaaggtagcagctgctgcgcggatggcgagaagtcagggtggatcttgtagcgccgcagggcgggcacccaggagcacaggatatccaggaccacgaagggcaggcaaaagcccacgtatgtggtgatggagaagatgaccgggaagaagggcgactgtaggagggcctcccagctcctcaggtggtcccagaggggctgcaggaacagctgcccggagctgcaaaggacctgggggtcggagcagttgtggcagctcattgcgaggctgtgcaaggcagctgaggctgctgctcgagtcccatcgacttttcacaggactcacggccccgccccgagtgatgtcagctgcctttccatccctttcccggcgatgcgaagcttgaataagctagcaacccggcagagtggcccttcattgctgtaaatgtgctcatctatagccgcatcttaccggcttttagatatgcgtgtatgcagtggcacttcgtacttttcatgtaagttctgatttttcagttgacgtacaattaacacgggacacaatgtacagatctaccgtgtggagtttctatgagtttggcaactcagttcacgtgtgtcatcacgggtctcaaactagaccgtttacattgccaccagaaagcgctcctttgcaatcaatgcagaattgtttgtgttttttaatgcatacgtataactgcatccatgtgctttcataaagacgcaagcataatcgcattttaaaaactgtttaaagctacatgcggtctgtagctcgggtgttttctgagaacccggttgcggtctatccagcggcgatcgagaaacgagccctttgcacagggaaccgctggtccccgaacgccggcggtgaccgtcagctcaggaaatcagacgggaagggtggccggatgggaacctccgccagctccagcttgtccccagagttttcctggccggcgggcagcaagctagagagaccacgcacgcaggctctccgggagaggccgcagcccggccgcgtagctaccctcggcggcgcgtcccggggcgccgggcccgcgatcggagccggaggcaccgcacagcggaaagagggctccgcggcggccaggctcagctttgccgggaaaatgctggatttaactcccagtctgcgccaatctggctaaaaagcccgttgtatctcaatttggggcgggaacacttaattcagcaaaccacctgcgttgttcgtcaagggaaagagatgtgagttcctgaagcctcccgggaggctattgaaggaccaggtgatgtcgtcactaccctacccttccccttgttggctttgcggggccaacttgcagtcgccctctgccaccggtccttgaatccactccgggcccacggagcccggctag

SEQ ID NO: 234891 - DNA, 691 bp, Homo sapiens
  chr10:91294973-91295664
  hyper
aaactcggccgcagcgcagacccaacccagacagggcaagtgagcacgtgtctccctcccaacccaagctgcgcgccgacgcacccaagttagggtcccaggctcccggcgcgggatgggcgctagggcagcggagaatggagggtccccgtcctcctccagctccaacgacagcgccagcgccccgccgtcccgccgcccttccttgaaggatgcccgtgtcacctgagccaccgcgccctctgcacaaccgtgtcagggagagggaagagggggagccgaggaagcttcttggccagggcgctggggatccgggagcgggggccgccggcgagactgagcccgggacagcccagagctccagcgctccagcgctctgcagcccgcccagagcgcgcagaccacccccatgccccgcccgccctcctgccacacccgcccccagcccggccccgccgcctcctcacctcgccgggaccactgcagccctggcggtagcgcgcggacatgcccccggggcgcacccgccgagccgcgtccctgcgcagtggccccttcccgggccccaggctgcgcgatccgcgcttcggtggggcggggagcggactgggcggaggcgccggcgaggctggggccgggggcctagctggcaacgccgggagagggaagcgtagcgcggaaaatcccagtg

SEQ ID NO: 234892 - DNA, 250 bp, Homo sapiens
  chr10:91403631-91403881
  hyper
aaataatgcacttcggctttctccggtgtacattacaattacaaaccctcaactcaacctcccccttcgttgaaaaaaaaaatccacctccaatcctcattggtccacatagttccggcccacatggtatcagtgggtgtgtccctcccaaaaaaccctctcattggccgtgaagaaacagcttctaataggctgtgattttggggggtagttaaactccacgcctccagacttgcgctctccaatagac

SEQ ID NO: 234893 - DNA, 273 bp, Homo sapiens
  chr10:91461093-91461366
  hyper
tcccagtcaacagcgtggtacttatgacagccgcgagaaagcgcactactaaagcccggctagcagagctgggaggcaaaccagaccgtcagcaccagggcggcccacgcctgcttccgcccattggctgcccgcgtttcaagacccgcccccatattggagagcttcttccggtagccactggaaagcccgcagcgcgagccggctacgctccctggcggagctctggacgccccacctactcccagcgttcagtgcggtgccctggccgcc

SEQ ID NO: 234894 - DNA, 70 bp, Homo sapiens
  chr10:92616984-92617054
  hyper
ccacttgcccccgatgaggtcggtgacgctgacgaagggcatgaccgccacagccaccgagaggtcggcc

SEQ ID NO: 234895 - DNA, 130 bp, Homo sapiens
  chr10:92617774-92617904
  hyper
agcggcagaagttgcggagtgcgccccgcccctcgcgcccgccgccgccgccgccgccgccgccgctcccctgcggcagccgcgccgcgtccccgccgccgccgcctccggccgctgcccgctccctcgc

SEQ ID NO: 234896 - DNA, 72 bp, Homo sapiens
  chr10:92618084-92618156
  hyper
gtcagccacagttcagtgggggcatttttcttttgttaagaggcctaatgagccagcggatgtttgggctca

SEQ ID NO: 234897 - DNA, 219 bp, Homo sapiens
  chr10:92631512-92631731
  hyper
aaccaaacattgtcgttcagaagaagacaaagagagattgaaatgaagctgttgatttcaacacacaaattctggtggtagatgaaagcaaagcaagtaagtttctccgaatccctagtcaactggaggtagagacggactgcgcaggttaactacagctcccagcatgcctgaggggcgggctcagcggctgcgcagactggcgcgcgcggacggtca

SEQ ID NO: 234898 - DNA, 177 bp, Homo sapiens
  chr10:92979925-92980102
  hyper
ttatagttgtcaacgaccatgatctctggacccacactacagtaacaagtttgtcagtcattttcagataaggtgcaaatcaagggatggctttgtccccacttcggcgcaggtgggacagacttggggaagacgcagctgaagagacaaattctcagggtgcgtcagtctcatcac

SEQ ID NO: 234899 - DNA, 356 bp, Homo sapiens
  chr10:92980921-92981277
  hyper
tcctgccggagaacgcagaaaagttcccccttgcccccgccccgtcattgcaagttcttgcttcccttaactgtcttggtcacagggctctgtgccttaggatcttagtaccaccccaggtcgggaccgtgcatttcctcttccagaggactttctcttactttggagtttcatggcaaacctgtgggaaaggcaaggcagttaatcccaacttatagaggaggaagccgagacccaggctcagatatgaaacggtttgctgaaggtcatacaggggtaagggccagaaccctgattccctgtcttttaattatgcttgctttctgttacacgcacgaatacggtttcccaagagg

SEQ ID NO: 234900 - DNA, 49 bp, Homo sapiens; identical to SEQ ID NO: 202174
  chr10:93393014-93393063
  hyper

SEQ ID NO: 234901 - DNA, 33 bp, Homo sapiens; identical to SEQ ID NO: 202175
  chr10:93557957-93557990
  hyper

SEQ ID NO: 234902 - DNA, 39 bp, Homo sapiens
  chr10:93647701-93647740
  hyper
atttgtaagtggaggcgcgatccagttagcttttctcca

SEQ ID NO: 234903 - DNA, 66 bp, Homo sapiens
  chr10:93669233-93669299
  hyper
ccctgtgaatgaacgtggtatcaatggaacagaagaggcctacccttcttcgcccctccccgattt

SEQ ID NO: 234904 - DNA, 188 bp, Homo sapiens; identical to SEQ ID NO: 202177
  chr10:94000529-94000717
  hyper

SEQ ID NO: 234905 - DNA, 230 bp, Homo sapiens
  chr10:94051615-94051845
  hyper
aagtgtttgtcagcgatgtcactggcaagaaccgggttatctttcaggggaatgacccccttataattttaagtctctgtctgagaaccaatgataagcattcttttggaaagcctgataggctgatttcattctcccactttccctgaacccgcaccccccgtcccccccgccccatcccgtccccacctccgaactgtaaggtcagagtatccgcaagggagatttaa

SEQ ID NO: 234906 - DNA, 159 bp, Homo sapiens
  chr10:94180507-94180666
  hyper
tcagccccagatcccgggactcaggaggagctgggccgagctgcgggaggcgtggaagccccaggagagggttttgcactacgaaaaaaccatatgcaaattgcctgggaagagtttagattctgtggccaaactgcaagcggccgttgctaaaatggg

SEQ ID NO: 234907 - DNA, 319 bp, Homo sapiens
  chr10:94333923-94334242
  hyper
gatggggccaggacgcaggcgaggacggtgaagaccgcggacagccgaggcctgagcaggcggactggagggacaggggtttggccggggcgctttaggagccagcacccagactttcccaggcggggagggtcccagctagatcccaccggccgcacttgtgagggtggcgacgtgtgtctgactgtgagggggcgaggggccgctcataaatccagtgagggcacacggggctatgttttctgaggcacccccactgactagcgtgccggaccctgcaggtgttggaacaaggttcgtggtcgcggcggcctcacgt

SEQ ID NO: 234908 - DNA, 83 bp, Homo sapiens
  chr10:94352686-94352769
  hyper
cactcaattctagcgtctcggctctggactaccaagttccggagcaagcagacagaccacctctttacgttcccgtaggccac

SEQ ID NO: 234909 - DNA, 77 bp, Homo sapiens
  chr10:94448812-94448889
  hyper
ttcaatagaaaacacgtgcaaaaccagagagccagactgcgcacagctgcgaccctcaagagccagcagaaaagaca

SEQ ID NO: 234910 - DNA, 1169 bp, Homo sapiens
  chr10:94450566-94451735
  hyper
aaatctggtttcagaagctgttaagtgttttcctggctgcatgaagcagacccttcccccggagtagtgcacgctgctgattattttatcgacatcctcaatacagacaaattcaggaaacactcgacttctgatagccgggatccgtttttctgatattgttcatttcctctgtgtgggatgtgactttatggcagctaaaataaccagttgcttcctattttttttcgaggctgttttgcaccagtctgaagcctgacgcaagcaaaatctcgaaaaaacaatgctagctttcaaagcgttgaggtgcaggcctgcagacggacggacggaccgaccgacactactttgggagtaggaagcagcagctcctggtcgccagttaggaagggaagcagggacacatagggcatatattccagaacttcggggcttgtcccctcaatgtgcggcctaacaaataagccgcccgtggtccgcgctgtgggtgacccttggcgccttcgaggtctggagccctagggtaaataaggaaacggggcgcctctagagttttaaatgaactctgttattggaagcttcagtagggaccctgaaaacaattaacgtcttaattagcattttaatgtctccattattacggcgcgggctctagctcagccctttaccttaccttctcaccgttaacaggggagggggattgtatttttagttcatctttttatgtttttgagttgttatcctgtctgtctgattccagcctcgagggtttgatgatgcggcccgagcctggctgtggtcgcctgtcggggctggagcgggaccctcagccgggccgggcctgggggctaacgttttcacagtgcgccctgagtttccttgggttactgctgggaccgcgcaggaggaagcaaagagtttttcgagctagaccaacaggaaacacattgacggaaatgttgccatagcccatggggtggctttaactggccgcccccgcgggctgggtgtgaaatcagaggaggccgcggctcccccggccaggattggaggctcctcgcgcaacctaatgcgggtgtccgggcccgagcgcttcccgcgcagccaggccttgtcggtgcagcagccccgctcctccccaacacgcacacacccggtgttcgcaagtg

SEQ ID NO: 234911 - DNA, 155 bp, Homo sapiens
  chr10:94459542-94459697
  hyper
ttggagcatccggccgtcgccgcgagcggccgaacactttcctgcgtcgctgctttaaaaaaaaaaaaaaaaaaaagtcactgccaatatcaggcgactttccacatgaaagccaatgaggccgcttcccacttaaaaaacgtttgtttaaaacg

SEQ ID NO: 234912 - DNA, 340 bp, Homo sapiens
  chr10:94607752-94608092
  hyper
actgggatctttattcgttcctaaaataaatcttactatcacatgcaattttgcttttcgtgagtgcatgttttcctttctctgactccccacgacccagagtacatcaggcccttgttaaatgtccccgtggctcttattacagattcagggtgatgatctgagtgtccaccttgctgattactacggtacccccgcgtgtggcacagggtgtggcacacacagaagacaaggagatatgttaaagcccaaaggccaggcacaagacgcccaggagggactagtcgcgagagagggcaggaggccagctgggtacccggccgccgcccgtagccccagc

SEQ ID NO: 234913 - DNA, 751 bp, Homo sapiens
  chr10:94828014-94828765
  hyper
gttcagggcccccccgtttccaggtgcctcgtggtcaggctgatctcctcgcctctctgcagggctaccagatccccaagggctggagcgtgatgtatagcatccgggacacgcacgagacggctgcggtgtaccgcagccctcccgaaggcttcgatccagagcgcttcggcgcagcgcgcgaagattcccggggcgcctccagccgcttccattacatcccgttcggcggcggtgcgcgcagctgcctcggccaggagctggcgcaagccgtgctccagctgctagctgtggagctagtgcgcaccgcgcgctgggaactggccacacccgccttccccgccatgcagacggtgcccatcgtgcacccagtggacgggctgcggctctttttccaccccctcacgccttcggttgcggggaatgggctatgcctctgacatgcttgcgctctaggacacggcttggccggtggctatggcgcgcacgcagcgccacccatctgccgctccccattgtagcgtcgcgcgcccactctttcactcgttcaacaatctttcaacaaatgttcgccaaacgcggatgtgtgccggactcgaggaaggaggagggcgagccaccgctgccgcgccagagaagcatctaagcccatgggaagatgccttctgcgctccgcgcccagaggaaggaaaatgtcgtgggccaagcaggaatggagggaatagatagatccccacgaggtgctgcttgg

SEQ ID NO: 234914 - DNA, 1467 bp, Homo sapiens
  chr10:94831377-94832844
  hyper
ccacgaaagcttggcgagattcctagatcaaagttcctattggcctggtaatttattgaccccccaccccccgccctgcccccctacaagatgttctttaatgatcgttcactctcacatttaatcctttcctgccggacgcccccgccggcctcgatgtacagatagattaaaacgtttttttccctgcggcaatttccagcgtgcaggccccgctcatcttgtgacccggcttgagctgaacttggcgaggtggccccgcagagttcactcggatgtcacggtccggcctgcaggggtcacaggcgggtcaggcccgaggattgggaatgggccccaggtcacgtccccattcgtcggctttgcacaccggccggaggcgctgtccagaaaggggcggacccgggatttctgagaattacctccagcgcgattggcctggcttcctgcagtggccagaggttggttcgccgtgtttacagccaccaaatcgtttgccggagactgaaaccctgcccagagcctctgaaacactgggcaggttatggggaaacgctgaccccccgaaacactccctgtggcggcgactctggcttggagagtcgctaggattgtgcgggtccctccgacctctgcagatatttcctgatacctccgggtttggggactaccgcgagaagggcaacgcatttaaactctcaggagcagagttttccacctccaagggacgccttccaaggcgtgcggcgtgcttctgccagagacagtgttcagttttaaacaaatgcaggtcattctgtttcattttcggcgccgcaggtgcgttcagcgcccaaacccaggtagcgtgtgaccctgactggtcccgagccgggaagctccggcaggtggagagcagagagagcaggtgcgcgtcccgcagcgtctgagctccgggcattggcagctcagtagcagctgattgtagatgggcaaagtacagaagacttcccagtacggatcccttcacccctcccattaggggtcggtagagccctgagtttagggccgagcaccccctcacctggatgaggacagtggctttactctgggtgggacttgggagagaggaggaggactccagtgcccggtgtaccggacacccaggtaacgcagtctaccgtgcctggagctgggaagagtagttgcaaccggagcccccttttgggaactcactaccctgaggcttagacaggtcgggaatgatcgcctcccggttaaggaggaggaaacaggcacagtgatgtgtggtgacttgcccaaggtcacacgcagtacagatggagccgggcctcggagccaggactcctgggctccccttcctcttataccgtctctttatcctgccagggctaaggacccccttccctgctgtccagctggggcgccaagcagcagggccctccgaataggcgagctgtgcttgga

SEQ ID NO: 234915 - DNA, 489 bp, Homo sapiens
  chr10:94833094-94833583
  hyper
gatccttcggagacgtctggaggcctgctttatgcatctctcttggacctcagtttccccacacgtgggaggaggcagctggacgattcctgaaaggactttcccttgcttcctcatcacgtggaagagagcccacccggcacctggaaatggaaagccagtgaaggctgctttgggccggggcagcgggtgggaccgggcgggagggattccaaagagaccgccgggaaggctagagcttggaattccggctcctcggagtcctggccctcccccaccgccgcctcggagctcagcacaccttggatgggggaggcgggcagctcctagccccgcaccccaggaggcgcgctcggagggaagccgccaccgcgccgcctctgcctcggcgcggaacaaacggttaaagattttgggcagcgcctcgcggggggaggagccaggggcccaatccgcaattaaagatgaactttgggtgaactaattgtc

SEQ ID NO: 234916 - DNA, 236 bp, Homo sapiens
  chr10:94833763-94833999
  hyper
atcaagctctgggacctgtactgcgtgagcggccgcgaccgcagttgtgccctcccattgccccccgggactatgggcttccccttctttggggaaaccttgcagatggtactgcaggtaagggagggtggggcgggacaggctgcttccccggagcccggcgcggctctgggcttctgctgaagtcggggtaggcgcccccgggaggcatgctattgcggctaggagcagggctg

SEQ ID NO: 234917 - DNA, 57 bp, Homo sapiens
  chr10:94834179-94834236
  hyper
tcggagagcaccggctggtgtcggtccactggccagcgtcggtgcgcaccattctgg

SEQ ID NO: 234918 - DNA, 383 bp, Homo sapiens
  chr10:94834656-94835039
  hyper
ccgaggtgaagcgcctcatgttccgaatcgccatgcgcatcctactgggctgcgaaccccaactggcgggcgacggggactccgagcagcagcttgtggaggccttcgaggaaatgacccgcaatctcttctcgctgcccatcgacgtgcccttcagcgggctgtaccgggtaagggcggcaaacgggctgcggactaggggcgcgggacctgggcgtctgctcaccgccgcgcgctctctgcgctcagggcatgaaggcgcggaacctcattcacgcgcgcatcgagcagaacattcgcgccaagatctgcgggctgcgggcatccgaggcgggccagggctgcaaagacgcgctgcagctgttgatcgagcactcgtggga

SEQ ID NO: 234919 - DNA, 205 bp, Homo sapiens
  chr10:95242142-95242347
  hyper
accgaactccccgcgtctacgcagtgccgcaggcacagacttatgaattcgggaaatgtggaagtgaaaaggacaaaccctaaactaaaaataattccgtgcgacaaatgaaaccaacatgaatttggagctaagaaatacgggtaggtcaggaaaccactaaaatgttgctgccttttagcaatggttcgtgaaactgaattaa

SEQ ID NO: 234920 - DNA, 860 bp, Homo sapiens
  chr10:95326192-95327052
  hyper
ctggcttctggatacactttcaaagggccagagggcacgaggcttccgccttggccgccacctccccggccagctgcggtgttcgcggccagtgttgccgggcacttcctggttcccgcgcgccccgggtgcagctccctgcacccagtgctggcgctcctcagaagggagggggccagaggcgagatgtcgcaaccgcctccctccctctttccccgccttggcactcagtcgcctcccagatgagcactctctcagaccgctgcgggccgccaggcgccgggaatgtcccctgaatgcgcgcgggcagcgggcgacgcgcccttgcgcagcctggagcaagccaaccgcacccgctttcccttcttctccgacgtcaagggcgaccaccggctggtgctggccgcggtggagacaaccgtgctggtgctcatctttgcagtgtcgctgctgggcaacgtgtgcgccctggtgctggtggcgcgccgacgacgccgcggcgcgactgcctgcctggtactcaacctcttctgcgcggacctgctcttcatcagcgctatccctctggtgctggccgtgcgctggactgaggcctggctgctgggccccgttgcctgccacctgctcttctacgtgatgaccctgagcggcagcgtcaccatcctcacgctggccgcggtcagcctggagcgcatggtgtgcatcgtgcacctgcagcgcggcgtgcggggtcctgggcggcgggcgcgggcagtgctgctggcgctcatctggggctattcggcggtcgccgctctgcctctctgcgtcttcttccgagtcgtcccgcaacggctccccggcgccgaccaggtgagcgc

SEQ ID NO: 234921 - DNA, 826 bp, Homo sapiens
  chr10:95360575-95361401
  hyper
cagcaggggtttggcgtccgggggcgcacggcgggccgcggggagggcggggatggggtggggacctgggccgcctgggccccctgggccgatacctacgcgagccttgtcgaagttctccttgactcggaagctgctcactcggcagtcgcgctccgcgcggccgctgcccagcgccgccaacagcaagagcgcccacacccacttcatcttgcccaggaatccgccctgcgggagacgcgcctccgtcagtgcccggcagccgacccccgccgccgtatcccacctcaccccaccccaccccaccccggcccatcccgccgccggccccgaggccccggccgcgactcaccaccgggaggggaaccgcgcgcaagcctggccgccgagtccgggcgcgcgtggagcgagggaggcgagcgcgccgcggccgccccgctgctttatagcgccggggggagggggtcgcgctttcgtaaccgcgcggggtgaaagaccgaaggggaggcgccgggggcacttgcataacgcgccctgactcaccggagcccgggcacgggcagggtccctgtgggccggcctcacctccaggacagcctcgggcacagtggagcggccgcgcggggtggcctcggccaggccaaatgcgccagcggccctggctcagttaccctgcactcgtgccagcggccgccagctgcggtctagggtggcctccggggccagtggctctggcaggaggctcgagtcaacctggcgggaagaccgtggcctcacagagcgagagcggacccgcgaggctccctggtgcgtgagtgcccaggcc

SEQ ID NO: 234922 - DNA, 81 bp, Homo sapiens
  chr10:95753478-95753559
  hyper
agcagccagctccgggggaggcggccgggtcctcgctccgcgcccgccttccccgcgcggcaggagccgggggcgggcccg

SEQ ID NO: 234923 - DNA, 232 bp, Homo sapiens
  chr10:95754039-95754271
  hyper
gttcctgaggactggagaaagggaaggatgggctggttctctcccaaggcagtcgacccgcctaagggagcagcccgactccgcgtacctggcggaaaagtgtcctcgcgctcccgggggacccgaggcgggcggtcctccagggcatgcaggccgccctcgcaggggctaaaggacaccctgccagtgccttcactccagacgcctgcctcaggtcgccccttcgtgttgt

SEQ ID NO: 234924 - DNA, 257 bp, Homo sapiens
  chr10:96161937-96162194
  hyper
ggaaggacttacccacgctaacacctcccaaatatgggagtattttactaccataaatgaaatacatcaagtgaatttttgctaagcgagcaatacccgcgcttcggtaagaactgtcacgcttagagcgggccaaccagcttccaccatccagatggcggatcctagattggcagcctgcgtctctctagctaccgtctctatggttcggggaatctccaggtcggggcttgaccggtccgacttttgcgcgtgcg

SEQ ID NO: 234925 - DNA, 105 bp, Homo sapiens
  chr10:96162374-96162479
  hyper
tgggtccggaggatgccggagcctgctcgggaagaaaccccaagttgctcccggtgcctgcgccggaccccgtgggccaggacaggaaggtaatccgggccacgg

SEQ ID NO: 234926 - DNA, 267 bp, Homo sapiens; identical to SEQ ID NO: 202192
  chr10:97055029-97055296
  hyper

SEQ ID NO: 234927 - DNA, 42 bp, Homo sapiens
  chr10:97321201-97321243
  hyper
gggctgcggtgcccgccccctcattagcatgcctctggaacc

SEQ ID NO: 234928 - DNA, 144 bp, Homo sapiens
  chr10:97416708-97416852
  hyper
gacaccttcgaaacgccgccccactgggccttccagggaggtagaagaggtgcctggcaccctcagctgctggtagatttcataaggtgtgtttgtcaatgttaaccatttatatcccgggcacacctcggaaataggttggat

SEQ ID NO: 234929 - DNA, 1214 bp, Homo sapiens
  chr10:97802913-97804127
  hyper
tgaagacttttaaacgccaaactgaggcgtcggaactttgctccgcgggcatcgaggagccatcgaaggttctcagcaggtgagtggcctaactggattggtcactgcagtgatccaccttacaatttctccggcgctctctgccgacctcagccggcgatcaggccggcttcgcagtaggtggcggctgagcgccccggcaaccgaagcgccaggccagcccaggccacgccgcgccgtgcgggatgctgaccgtacccaggcgggagccgccgcgccgccgcctggcgctgcacctgggcccggcccggccgccaattggacggctcggggcgaccccgctgtatcgcgagacgagattggcagcggcggggcctcaagtgcccccgcgctggctttgtatgcggagccgcctgccggtcctttaacaatgggcggcgcgagcgtccaggcgctgggctctagctgaggccggcgcttagcggcccactgtccgcagcatgagcggggccggcgtccgccgcacgacggcggggctggggctgtgagggccgcggttccgggtaagggagccagcgtggggccgggcggcccggcaggcctggggtaggcgtggggcagcggaccctcccggggtgaggcgcagagcctggctggcccggccttttgttcccctttctgaggccgcgcggaacgtgcgtttctcggggctcccggggaggagcaggctcccgacgtccatgcggagacccgcggccaggcagacgctcacccccgggctttgccatgggagcgtttcccctcagcggggctatgagcgtgtcacctctccccgctcctcagggagggcgggagaactccagccccggacgcagggagccccagccgggcctcccccagctcttcccgagctcgcacctggctccgcgctttggcaactcagggcccgagtggatccccttttgcccgacacatagtcgagcagtgagtctcagagtccttcggctcttcctgcgggggcagacccggcttcgcgtgtggcgttgggggaaacgactcgggtcgggctgggttgaggaagagtcaagtgaagatgagcagccacaccgggtggcctgaggtcacaccccccggggagggggcgcagagggtcgcgggggagccggcagtgaccgcgcctggggtgtgtcttacagactcgagttgccgcgtcg

SEQ ID NO: 234930 - DNA, 104 bp, Homo sapiens
  chr10:98135071-98135175
  hyper
tggtagcgaaaagcgcgcaatcaatatagccaccatccgtttcccaagggaacgccttttggaaactaccacgtgagtctgtgagcctcgggcaaacgcttccc

SEQ ID NO: 234931 - DNA, 1083 bp, Homo sapiens
  chr10:98272408-98273491
  hyper
ctgggagcgtgagcgtgagcacccctctgtccgtgctggaactgccccacactcatcagcttgctggaacatgcgcttggcccttcggaggctaacgcttcaacgactccagctcggaagccgctcccctcaggactcacgagccgatcagtggccccgaggaagcgggagctgcagcgcccgggcggcgattgcgcccgaaaggcccgtacgtcctggggcgccgcttcctggagggattagagcacctgccggcttccatctccgcccgcccagagcgaccctcaggccggtaccgctacagggaagtttccggctattcgagtcttgctcattctccctcggcgacccctttccttttgcccgctgtgacgcttttctttttaaaatctcccaagagtaaccacagatcttgggaaactttgcgcgaaacttaaaaatgctgtgaaatcggagccaggaactccatctgagcctcggagcgccgcgcccagtccagctcttctgctccggcccggagcgtctggcggtggccagtgctgcccactcgctgtcaggcggccctggcacccaccccggcccctgggcgccctctcggcctctggcacccgctctgattcgctttgggaacgcgccagctgtcgccccccggtgcgcaccgcaaacctggggccgggacatcccagcctcggagtggtttttaagcaattcctcggaggcattgtcttccgggggagccggggatctcaggggaggggaggggagacccgccccatagacggtagtgcaggcttgcccaccacctcatttgcatttcaaaggcaaacttctgcgggacttccccagcggcggcacctaccggctttgcaagggtcgtggtaatgctccagctgctgctccgtgccctcctcgccgtccagctctgagtagtctgcggtggcgtccgggcgctccccgagtcccccggcgccgcgaggcagcggcagcagcagcagcagtgacaccagggccccaagtgcagtcgcccggggcatggtggcgcggggccggctggggcagagggagttgcgtgcacgaaagctc

SEQ ID NO: 234932 - DNA, 37 bp, Homo sapiens; identical to SEQ ID NO: 202196
  chr10:98273889-98273926
  hyper

SEQ ID NO: 234933 - DNA, 31 bp, Homo sapiens
  chr10:98347034-98347065
  hyper
gccgcctccgggccgcgtcccggtgtttcgg

SEQ ID NO: 234934 - DNA, 761 bp, Homo sapiens
  chr10:98479728-98480489
  hyper
cccctgtgggtccacggagcccaggagacgcgtttggccctgtagaccatccacatcgcccgccctccgcttctctcaactcgcctctcgcttcagagtcggagggacaggggaagcgacgctcagacactcctagggccagaggtggagggagcgaaggagaccctgaagaagtgggagggggtcgggccaggcaggggctgaagagaatcgcgccacaggctgggacgggaaacgtgggaaagttggagtgggaagtttgcgacagggaacatagaaaagagcagaaagagggcaagatccccgcacagaggacgcaaacagaagcaagcgggggagcgcgcctcaagggatgcggggtacgagagaggggccgggagcccggggacccgcggcgcctgcctacccacctgaggctgccatgccgcggggcgccgctcacatccctggctcgctgcgtgcccggggccgggaccggggccggcggcgtcctggctcgggctggaggggcgccgggctccgcgcgggaccggccgccgctctggcgcttcctccctcagggcagcccggcctcgccacgagggcgtgtccacagagtccgccccgcctgcgggactcggcccgcggcacctgcacccgcggccgttggggaggggaagtgagaaccccatgccggccgccggccagctccccccacggccccctgctcaggggcagcgagaaggcgggggcttcgcgccacgtgcgccccactcctcggg

SEQ ID NO: 234935 - DNA, 47 bp, Homo sapiens
  chr10:98841573-98841620
  hyper
tctggggagctgtccgtggtcctgaatccatccggcggctcttcctc

SEQ ID NO: 234936 - DNA, 1000 bp, Homo sapiens
  chr10:98945010-98946010
  hyper
gaagctgacaaccccgccgagggccctttgaatcccagggatggggaaaccacggcgctcctggctcctggctcgggaaagaccccggcaggcactgacccgtctgtgggctgcggagcccggacgggccccaatggtcctgcccccacccccaagtccggaattgcgtctgggtgggagggcaacctcggagccagggagccaggggcggggaccatactcacaggcgctcggtgttccgaggtatattcttgggaatggcctgcagccccgtgccgtggcagtccaccgtggttccggtgcaggtgcagagggcggggcacgccgaggcacccaggcgccacgcggctgcccacagcagcagccagagctccggccggaccggccccgccgaggacccccacccgggagtcagcgccatggtgccctcacagcgtcccgctcgcgagccagacggcagcagccgctgaccatccccgtccggggccgcctccaggtgcagtcccggggcagagccaccgaagagcccgcgggcttgcgcgcggcgcccctgcgggctgggaggcaccttgctcctccaagcgacggcgcctgtgcgcggacggagggagggcgccttgggcggagggggctcggctcctctgccgtttcgccgcctgcgtctccctctccctccctccagctcccaactgactgctgcgaggaggaaaatgggcaggccccgcgcgcgcacgcaccctgcgcacacaccacacacacacacacgatcacacacacacccgcgcgctcgctcccacccggcagtcatccatcaatcgaaaagcacacatccagggccaggctcctccccgccctcccccgccgcagcccccctctcccgacgaccactcagcggctgcaagccgcctacagtttcaaaggtggaacctccgaggcgccgtcagcgggcacggggctgcgggggatgggagaagagggaagggggtgtgactcgacccgc

SEQ ID NO: 234937 - DNA, 100 bp, Homo sapiens
  chr10:98946070-98946170
  hyper
cgaggatgcgcacatttagacgcacgcaccccggcacccgcggccccagctgctagtccagggtgggagggagatcttattttgccgcttggacgccttc

SEQ ID NO: 234938 - DNA, 153 bp, Homo sapiens
  chr10:98956254-98956407
  hyper
acgggaatgggggcggcgcagaggcccttcgggaggtttcaggcaccatctgtgaggggcgcacccagggaagctctgggtttgtccactctgaggcctgtccagttgtccaaccaccctgtcctcagcgtcgtttggcggggacagatgcat

SEQ ID NO: 234939 - DNA, 214 bp, Homo sapiens
  chr10:99052454-99052668
  hyper
ttttcacctcttccgtgcgattggatgactcgaccgcccctcctcaacctgaaccgtttaatatattattggtctattcaaatgactaaccgtcattggtcgttcccagccctggcggaaaaagagggaggggcggggaagaagacccagccccgaggcctgccgggagttgtagtttctcattttgatgaacccttccgattccacagacctt

SEQ ID NO: 234940 - DNA, 271 bp, Homo sapiens
  chr10:99080168-99080439
  hyper
taatgacgaggaaccgaaaaatcgcgagtgtttcgcgggtaactggggttgagggccaaaatatttggaatgaaggactttggccctatttaaggcagattttacagagcgcacctcaaacgtacaagtcagtaggactccttatttggcgtgacccgacctggccgcggagcctgcatttcctcgcagcctctcagtgccctccagccccgcgaccatgtggccacaatccacgcttctccggatcgcggtgcgccggaaccacggagga

SEQ ID NO: 234941 - DNA, 411 bp, Homo sapiens
  chr10:99080677-99081088
  hyper
gggggaaggctgtacgacacgggtggggaaaggaggtgggggcggggagtattgaatggtggtggaagggtagagaggcgcggagtgaaccccacgccctgtctaaagtgtattttcagagccggcccgcctctcctcggttcaaggtcactgtttcctgggcacgcactgggttgcgggacagagtagccaggttctgccggtgctcggagaagagcgcagtgttttgcaagtgctggagtctcctgaggacacgcgcgtcgccgccaccgcgggtgtgggaaagcgcggacgtgctgggcggctgtgcttcggtaggcgaccaccgcccctggccgcgctccgggctttcacggaaactcccgagaccgggccctgggttcctcctctcctactcggctctgcagtcct

SEQ ID NO: 234942 - DNA, 34 bp, Homo sapiens
  chr10:99093445-99093479
  hyper
tttctccgacggcctcgccgcggctggtaacttc

SEQ ID NO: 234943 - DNA, 49 bp, Homo sapiens
  chr10:99185972-99186021
  hyper
agcggtgcgagcgcgcaggcgcggccgacggggcgggctgctactccgg

SEQ ID NO: 234944 - DNA, 228 bp, Homo sapiens
  chr10:99258429-99258657
  hyper
gtggggagaggggcggtacgcaccacgggggaagccaatgagaaaatcaggcccagccctagggggcggtgctgtcggtcacatgcgcacctggggcgggtggtggcggcggcgcgggcaccgcgagccggcggaagggagaggggccggcctggggcggggttaggcaggtgagtgacaggctccagggggccggcccctgcctggtgccccgagcgagccgggagt

SEQ ID NO: 234945 - DNA, 84 bp, Homo sapiens
  chr10:99400380-99400464
  hyper
gccaaggaggcgtcgcgacctggttggccggccggggcctgggggatgtcacggattggtcgcggccgcgagcgcagtggtgtg

SEQ ID NO: 234946 - DNA, 231 bp, Homo sapiens
  chr10:99473543-99473774
  hyper
cgggcacctgggccgtgctgcccccgcgagcaaggcgccgccattccgctgctcggggcgccgccgccgccgccaccgcgcccaggggccatgctcccgccgcccccgcgccagccgccgccccaggcgcgtgcggcccgcggcgcggtgcgcctgcagcggcccttcctgcgcagcccgctgggcgtgttgcggctgctgcagctgctggccggcgctgccttctggatc

SEQ ID NO: 234947 - DNA, 71 bp, Homo sapiens; identical to SEQ ID NO: 202203
  chr10:99496833-99496904
  hyper

SEQ ID NO: 234948 - DNA, 80 bp, Homo sapiens
  chr10:99530902-99530982
  hyper
gcgggggataattccggggacgctgggctgagctaggacagcgtgtgtgtgtgtgtgtgggcggagggggggagctgcac

SEQ ID NO: 234949 - DNA, 53 bp, Homo sapiens
  chr10:99789241-99789294
  hyper
agcagcagcggcggcggcggcggcggcggcggcggcggcggcggcagcagcag

SEQ ID NO: 234950 - DNA, 624 bp, Homo sapiens
  chr10:99789563-99790187
  hyper
gaatgcctgaagccggcttgcctcaggcagcctgaagggaagaccacacctcgtccagcataaggcggctagcagctacgccgcgcgcggggctggctcccggagctctctgccacccagcgctgtgcccgggaactcggcttcccaggggaggaagagccagcccgcggggctcttccccagcctggaagcgtaggcactcggccgaggccagtggcttcccaggcccgggtctcagcctggctgactgggagactctcccgatagcccggcacatccctcctcacccgctccgccccctccaggccccagaggccccctcccctgacagctgacctccagtgcgcccccaacactttctctgccagctgctggctgtcgcccccacacatcagctcccacctctccgccacctccaacccggccgccgcctcacccccagcccgcgggggaggctccgcgcgccaatcgagtccagcgcctcccagcaagttaggagcgaagccgccgccttcgcgatcccagtcttcccgggttcccgggcggcgtccccgccacccttgcgggcggatccgggggggcgcgcagagctggagaaactttctccgccttagggtggggggc

SEQ ID NO: 234951 - DNA, 194 bp, Homo sapiens
  chr10:99798250-99798444
  hyper
actcaaaggcaaggcggggcggggctgggaggagagagcaggccccagggaggccagaggtcagaggggcagacagcacgaggagtcgcaacaggctgtcgagttcccggttcctggtggagagcccggcaggctgtttgttctcggacgtgtgcaaccgctgccggcggggctgtgggcgccgcagcgtggaa

SEQ ID NO: 234952 - DNA, 123 bp, Homo sapiens
  chr10:99894650-99894773
  hyper
acccctgcgggcccgcggttgagagggaccctcccggggctcttttgcactcactggggctcgtgctcgctttgggcgctcgccccaaatgatcctggcggaaaggacgtgctttttctgggt

SEQ ID NO: 234953 - DNA, 43 bp, Homo sapiens; identical to SEQ ID NO: 202204
  chr10:100206321-100206364
  hyper

SEQ ID NO: 234954 - DNA, 47 bp, Homo sapiens
  chr10:100206738-100206785
  hyper
gggccggagccgccgtcgccttccgcgggttcgagccccgcccctgc

SEQ ID NO: 234955 - DNA, 216 bp, Homo sapiens
  chr10:100991731-100991947
  hyper
tgcatctacaccccgcaggaacagcctgttaagcagtttgggctaccagctctcagcctccaagacagccgcccagcaaaaggccggcagctgggtgagaacaacctggagaaccccctttgcgcaatgaggtcaggagttccacactgcagtgtctcctcatctgaagcttccaacttttcattttcaggcgaggtgcaaccaggctctccaaat

SEQ ID NO: 234956 - DNA, 1115 bp, Homo sapiens
  chr10:100992007-100993122
  hyper
acacacgaacacacagacacacgaacacacagatacacaaacacagcgggtgcttgcttccgctccccaaataaagaatggtaatcaagtttctcaccatcctcatagtttttgagatagtaatccgggcccgggcccccgcggcttttcgccgggttcctcaggttctggaactgcaggaagtcggtccttttgcccccgaagcgcagaaaggcgggcgaaagtccccgggccagggtcaccaagcgcttggagctgcagaggaagagaataagagaggaaaggttcccaggacaggacgagagcgcgtggggcacggagaagggccctcttcctactccctgagggcgacctggccggggctagaggctctgtgcctgccccagccggcagtccacgctggcccttggccgctgccctgcgccccagcccgccctcaccgcccggctctgggggctgtgcctcccgcttccagacgcccgcagcggccccctcccgcagacacccagatcctgatctcctaaaggctacagatagtgtttgttcatagagtgtttgtatggggtgggtgtacgtgctacgagcacggcgctaaagcgcagttgcccggcttctgccactgccaggaaagcgctccgggcggagacgcgctaggcgcgcctacctctggcttccgaccgttgccaaaaacttgtatgctgaaagccggcattgcctccgcagccccaggggccccacaaacctccgtgcaggaggtgaaacctgccttgtttctctcagaccaggcccggcgcctgagcttaagtggattcctactttctttcttttaatgtccgagttgattttcctttttcactatattgtaaaaactgcattgtttcccaaatccccggacggagagatccccagggtaaaccctcgcctttccaagaacacttctccactcccgcaccaccaccaccaccaccacacacacacacagtaaaggcaaagtctctttggcccctgaaataattccgcctgatctcaggaaaggtaacatcctcctccccaccccacccccgagttaggctccatctttcttctttcccacttggggccgtttggaaccgcta

SEQ ID NO: 234957 - DNA, 1392 bp, Homo sapiens
  chr10:100993448-100994840
  hyper
gagagttttttgagaagagacgtggctaccccagggtcttgtaaccagaatggtcgtttggcagaagtctccgggaccgcactccaggacaggcacagtcagggcgtcgcgtgggcctactgtggcaaaggagacgtccgcgcgaatccggtcctggggaaagggcagttccaacaacctttcatccagaagcctgcacagccaatgcgaatgcgccccgccaggacttcttccccgaaaatctgccttccagactcttttctgaggcaggaaagcattaggcgaacaggcagattttttaaaaaaagaaagaaagctggtgggggaaagggggtctgcgcagctgaaggagttcaatgaaagtgggacaagcgttgcggaaaactccgttgcaccctacattcggacgagctcatagacgcgctctgctgcacgaaagagctttcgaagaggaagctgggccgcgcggagctggctgttccgccctcgcggcaaccgcaccaacaggaaccgaaacggcctcggcaagggcagctacagcctctcagtcctccggctacctttcctccacgtggaaggagcgctccacgtggcgcctcccgctacctgccgcgtccgcagacccgacccgggccagggggacaaccccaagagctgagaggcgggcgcacctcaagaagcaaaactcgaatttcgcaaggagtgaaaaatacgaaggacgcacaacggacctggcctcggggcaaagtgggactgagagcgctgagggctcttcgaggggaacccacagctgaggctccaacttgtagggaatttttaaaaactcaacacttggattcgacattgcagaggatttatttcttattttacactgcaactctgtccctgatgggaagggatcgcagttgcctaactgccaaactgcaacaacccgggaagagtgtgagcccaattagattacaagccctagagcaaaggggatcacaaacctccgggtttgctaatctgctggtgcggagttcagatctccgaagcctccctggagtatttctaggactcttaccgcttcccttataacgctgtgaccccagcgaggattttttttttcctttaaagaaaagctaaactgtgcagttaccgcaggagatttaaggaggaggaactggcggggggaggggggcattccgtctataaaaagcgccttacaaagtcctgaagtctggaaatgacagcggaggatataaaataaaaaattttaactccgatccaacttgcccaccactcaagcctctgcttaaattcgttttctgagagtgggagagaactgacgaaacgatctttccgtggaaaattccagtttcgtgcaatcccgcttgaacactcacacacaca

SEQ ID NO: 234958 - DNA, 464 bp, Homo sapiens
  chr10:100996056-100996520
  hyper
ggtctcgtttttacgtccttccctgagaggctctggagggcggttcaagctccgactccgacccgaaagccccagcgccaacccgggacgcgctgggatagagttcccaccgacagcacgcttgtttctcctgacagcgtcaggcacttcgtccgctcagggcccttttctggttgaagcagcaataccaagggcggttaagttgcagaggggtcttgaggcggtgattcctgtcaaagcatagagccctgaaggacattccccgaagaggagccctgatctctgtgacgcgttggatagccacaccgaagcatcctctgacctccatagggcaaagagtagcaagaaggaaaaacatagtgacctggtcaagcagcttttccgatccgagggccaaaagggacatgcgccctcgctctgctctgctcttcccgcaaccgaggaataagcgtcttgggagcgtc

SEQ ID NO: 234959 - DNA, 1292 bp, Homo sapiens
  chr10:101088990-101090282
  hyper
ggtggagtctgaatgcccaccgccaccagcccacgcgcgcagtgggcgtacacgtggtgacctgcctgcggctgggttcccagctccggctcctcctccctccagctctcgctcggcttcctgcagtatcacgtgcagctgcgctgggtgcaggatggcggcggccgcggcggcggcagcagcggtgggtgtcaggctccgggactgctgcagccgaggcgctgtgctcctgctcttcttttccctgtctcctcggcccccggccgccgccgcctggctgctgggcctgcggcccgaggacactgctggaggccgcgtgtccctggaggggggcaccctgcgcgccgccgaaggcaccagcttcctcctgcgtgtctatttccagccaggaccgccggccaccgccgcaccggtgccctcaccgaccctcaactcgggggagaatggcaccggcgactgggctccgcggctcgtgttcatcgaggagcccccgggcggtggcggcgtggcccccagcgcggtccccactcgccccccgggaccgcagcgctgcagggagcagagcgactgggcatcggacgtggaagtcctggggcccttgcgtcccgggggcgtggcaggctcggccctggtccaggtgcgagtgcgggagctgcgcaagggcgaagcggagcggggcggcgcgggcggtggcgggaagctcttttcactctgcgcctgggatgggcgcgcgtggcaccaccacggcgccgccggcggcttcctgctgcgcgttcgcccgcggttgtacggcccaggcggggacctgctgccccctgcgtggctgcgggcgctcggggcgctcctgctgctagccttgtcggccctgttcagcggcctgcgcctgagcctgctgtcgctggacccggtggagttacgggtgctgcggaacagcggctcggccgccgagcaggagcaggcgcgccgcgtgcaggccgttcgcggcagggggacccatctgctctgcaccctactcctgggccaagccggagccaacgcggccctggctggctggctgtacacctcgctgccgccgggcttcgggggcaccggggaagactacagcgaagaggggatccacttcccgtggctgccggcgctcgtgtgcaccggcgcggtattcctgggcgccgaaatctgcccctactcagtgtgttcgcggcacgggctggccatcgcctcgcacagcgtgtgcctgacccggcttctgatggcagccgccttccccgtgtgctacccgctgggccgcctgc

SEQ ID NO: 234960 - DNA, 93 bp, Homo sapiens; identical to SEQ ID NO: 202210
  chr10:101190597-101190690
  hyper

SEQ ID NO: 234961 - DNA, 652 bp, Homo sapiens
  chr10:101279840-101280492
  hyper
tgggatttcttagaaggttgcggggccaatcagcagccataaatcttagagaaccttcaccgttttacaagggagttcgcaggggctgcccttctccctcacgcggtctatttacaacgccgaaatctccgtgttaatggacctaggataatggtgtttactttaccgcgataaagcgctgggcttcctgggggagcggctgtaaaatgtcctggaggtagggatggaacgggcgccgtaaaagcgggcgctggaagggcgggggcaccaggttctccttcaggccggcgcccccgccctccaccctctaggccaggctgagcagcccaggcctggcgggcgagcaccgttcccacataaatcaccagcgccagagtctcgggaaaaggcgcatttttcattgctggctgcagggcgactccagaccgcgaacgagaaacagaagttgtctttagataaaccgttcaccggagcgcgcgttgtggcagcagggtccgcagagcacagggcaacctgggtctggcgctgcgcccccgccaccgatcacctcccagaggccccgcaagaaacccagatcctctcaagggctggtaccacgtcctcctgccagagaggagatagggagccaagcgggaaggaaaaggagaacttc

SEQ ID NO: 234962 - DNA, 357 bp, Homo sapiens
  chr10:101283150-101283507
  hyper
tcagaaggcggggacgagggctggcagccccatactgaatagaaagcgaaggacggaggtagggagaaaggaaactgctctggggggcggaggtgggggtacacgtaggagggaaggggagggggctagaggaggctccgccccaccgtccggcagtgtttattttcaaggcagcttcccgtcaatcctgtcaccggggcacattcttttcgggggctgtgaaccaccgtcagggctctgcaggaagatttgaggagggggagggctgtcgagtagggagcaggaattcgcagagtagagagaactgcgtctgggcaggcagtccctgcgtggcgcgggggaagagaggaagctgag

SEQ ID NO: 234963 - DNA, 996 bp, Homo sapiens
  chr10:101290162-101291158
  hyper
gggagcggctggggcggcggaatttggggtagaggggcacccgtgggccggctggtggggaggagacagccccctgcatgagctcacagaggcgccctggtgggctccggcggctgcagagcgtctgtgggcgtgtattggcgatcaggcgctggaggggcgctttgtcctggtcgcagttttaagacctggattgttgggctagatttatgaaaggcctaggagcgaagcgagatgggaagcaagggaatgtaacaaggagaaatgcaggcttcggttggaaactggggagagagagattgtttcgatagcctttctccttttctttttccagaatcatgaaatcaccgaggagaagaaaactggggactagaagagagcagaaacatttcccctgagacagttttgccccggaggtggggtggggaagtggcgctggagctcagcttcctgcttttatgctcggcggccaccgtgatgcacacacactcgaggtccgccaccccgcagtgccgtgcacccctctgcccccacctcggaatttttgtgcccgagcgctcgggatccacggcaaaaccaggcacattcctccctctgcagactcaccgcctggtttgtagacactggtctccgcctggggcgtcaatagtttcaggatttaaagcagaaagacaccgggcgcccctgtggctgaggaatggcggttccagcacaagaccctgcccacagagggtctctccctactgcctgcgggccgccgctaccctaagtactccggggcgcacgtggcccgcgcggcatcccagctccccgggcggacccaggggctgcctctccacaacagttccgctcccttctgcagagccccgcctctcccacctcccgacaggctgttctttctcccttcaaccttgggcacccactcctgtcgccgttgcgggacccgcgtggcagccctccaccctcgtacccactcccagccggtgtcttatgccg

SEQ ID NO: 234964 - DNA, 1640 bp, Homo sapiens
  chr10:101292287-101293927
  hyper
acactgcatctcctcgtggatccagcgcccagtatttacccgccaggaagttttcctgccccgcgcagcagctgaaaaaaacacactcctggggcatccttccctggcgttggttcgtggacagcaagcctcccagaactggcctaggtcgggaaggtgcagccacgcgggaatcaatggttcaggaaccggatctgtgcagcctcgcccgcagcgtctcggacttcaggactctatactagtccttgtctatttctggtagagccgcaacatcccactcgcagagagcagggggcgtggcccacatgagccagaacctatagggagggaggttggggcgccagccccgcccccccaacgtgacgcaaatctcccggacagaggcttaggagcccgggccccagtccctgcagtggctgtaacaaaacccagacccccaggtcccggccaatggaggcgatttagactggagtgggaccgcgtctgtcaaaagcccgactcggcagcagcggcggagtccaggaggagagctggagccgccgcgctgcctccccgcccccgccgggatttattatttggactggacaattaagtggccctgatgatgttaccaagcccggtcacctccacccctttctcagtcaaagacattttgaatctggagcagcagcaccagcacttccatggtgcgcacttgcaggcggacttggagcaccacttccactctgcgccctgcatgctggccgccgctgaggggacgcaattttctgacggaggggaggaggacgaggaagacgagggcgagaaattgtcctatttgaactcactagccgcagcagacggccacggggattcagggctgtgtccccagggctatgtccacacggtcctgcgagactcgtgcagcgagcccaaggaacatgaagaggagcccgaggtcgtgagggaccggagccaaagtgagtagagggggaaagaaaacgcacccgcacacctggagcaatggcagagcgcacacaaacagcccacagaccttgccagcgcagctgcccatccctttaccctttggctggggccatgcctccgccctggtcaccgacagctccacaaagcgcaggtacctgcaagggagccggggtggagagacaaggacgaggtgaccctgacaactactccccccaaaagggggaaatgagggaagggaaggtggttactgctgccctgatgctgagaggcgacgtgggctcagcgcctgggtcctcataactggcagtatttttgctcttccccccgccccaaaaggctcttcccccaaaaagggcaggagcctggacctttttcgttttccctctagggtgagatgagttctcttagcccagggcagccaccccttcttctccgaaaagacagcccaagcagcctgtgtctctcgcacccgcaggggcaggaactttggtggaggccagctgggcggtttcctcccttctctgcttggagctcagcgtccttgaacccgtggcactcggtagagagagaggagatgatcggaaagtgcgtgggaacaatgtctattccgcgcgaccatagctctcacatccctaaggcgccagccttttttgaaaatccgtaacgttttgctt

SEQ ID NO: 234965 - DNA, 735 bp, Homo sapiens
  chr10:101295027-101295762
  hyper
cgcacacgcgcccccgccgccgccgcgccgcgtggctgtcccggtgctggtgcgggacggcaagccgtgcgtcacgcccagcgcgcaggcctacggcgcgccctacagcgtgggcgccagcgcctactcctacaacagcttccccgcctacggctatgggaactcggccgcggccgccgccgccgccgccgccgccgccgcagcagcggcggcctacagcagcagctatggctgtgcgtacccggcgggcggcggcggcggcggcggcgggacctccgcggcgaccactgccatgcagcccgcctgcagcgcggccggaggcggcccctttgtgaacgtgagcaacctaggaggcttcggcagcggcggcagcgcacagccgttgcaccagggtactgcagccggggccgcgtgcgctcagggcaccttgcagggcatccgggcctggtagggacggggcgggtcacgcggcgggcaccccagcgcagcctggcgccgcgggactgaagctcgagaagggcctgacctaaaggtcaggtcccctcgttaaaaaaatatgtacgtctagctcctcagggcttcggatcgcagctcactcgaggcctggggaaggggactcaggggcgaggaggatgactgggtccggtcgccaggactgtctctgaggcagaaacgccggctgggcgccggggaggacgatggccccgaccctggcagcgagaggagaccaggagg

SEQ ID NO: 234966 - DNA, 219 bp, Homo sapiens
  chr10:101295810-101296029
  hyper
tccctctgcctttccgcggcctccgcgaagcgttggcggggagcccaaggacataacaaattaaaagcatgaaggagagaaaaatgggggtcgtggcttgagaaattccaggccctaccgatcctctgccccctttgcgggcctggagcgccatagcacagtcgatttcgtttcgcagctgtctcccctccgcagcagatacctcggtccagatctccg

SEQ ID NO: 234967 - DNA, 53 bp, Homo sapiens
  chr10:101296559-101296612
  hyper
ggactagctgtatagacctgcgttcggtcaagtcttgcactctgccccacctc

SEQ ID NO: 234968 - DNA, 34 bp, Homo sapiens
  chr10:101297332-101297366
  hyper
aggctgtggcggggccgcccggctggggagctgt

SEQ ID NO: 234969 - DNA, 111 bp, Homo sapiens; identical to SEQ ID NO: 202212
  chr10:101381346-101381457
  hyper

SEQ ID NO: 234970 - DNA, 55 bp, Homo sapiens
  chr10:101491584-101491639
  hyper
atctgaacctatgcgttgtgagtgcactgtaaggagctccggaaacgtgatgtgg

SEQ ID NO: 234971 - DNA, 501 bp, Homo sapiens
  chr10:101945663-101946164
  hyper
gaagaagcccagccgcaggctcgcgaggaaagccgacccctcggccgcgcctcaccgatcagtgacgcatcgcccccgcccgcacgtgcagccgactcccgcgccgagccaaccgccgccaacagccggccccgcccactcgcccagcactgcggctgcgcggggacgcacacggcgtagccccggcccgcggctagtgagacggggagcgcatgggacaaaattctcctagccgcgggccgcgcaggctcctttggaggcaagtcgctttctgtacactgctggttaactgcttcggaagaggacagcccgcagtctggagtgagcagcgaagcagagaaaaggagacgccctttcggacaagggactggttggtttgttcttgtgcagagaacccactcgctcactctcaaacggtagctgttcggtttatttgtccttttgcagtgtatgcggagccccactgtgtggcacgcacttgcttccggcagagatcctgcc

SEQ ID NO: 234972 - DNA, 388 bp, Homo sapiens
  chr10:102046129-102046517
  hyper
tgacacatcaactcgcctccctcgcaccgcccctcgcccatacccggcacccccgctcatcctggcaccatcccagtcaccctgacaggacaaacactcgcgcgcagcgacaagtgcactcctctcaccagcccgttcctgccaggtgagccaccacacactcaacctcgcccacccgagacggagccccaggccccccaccggacgcttcctccccatccattccgggtacctcgggcgggctcatcactccgggtcgccagtacgccctcggctgccgccgccatagcggaccccgcgctgtttccgggccggggtgctgcgcatgcgcactgggtgtgccccgcccacccggccggccctgcagtcctgcgcctagcggtccagt

SEQ ID NO: 234973 - DNA, 190 bp, Homo sapiens
  chr10:102106582-102106772
  hyper
gggctaggctccgcgccccagccccaaaccgggtccccagccccttccagagagaaagctcccgacgcgggatgccgggcagaggcccagcggcgggtggaagagaagctgagaaggagaaacagaggggagggggagcgaggagctggcggcagagggaacagcagattgcgccgagccaatggcaacg

SEQ ID NO: 234974 - DNA, 364 bp, Homo sapiens
  chr10:102132968-102133332
  hyper
tctggctcagccctgcgggtgagtgtttaactttcagcccagcttaagatctccgaagacacccatcgcctcgtcctgcccagtcccctccgctaaagggccggcctgcccgggcctggctggcagctgacatgaatggagaggaagcgcctccctctccacccactctcgccggggttactgccggtcacagacccgggccttcaagagctatttacacctacaacagcccaccagcgcctgaccacgccggagccaatcagcggcccccaagcttgtctgattctgtctgctccaatcaggaggcgcggtccttccagcctcttgctcctgtgaatcacaggtcggcgggagccttttttcc

SEQ ID NO: 234975 - DNA, 52 bp, Homo sapiens
  chr10:102133791-102133843
  hyper
caaagcgttcaggaacgttcgaggctgacgcaaccggcgcaggaaggtggtg

SEQ ID NO: 234976 - DNA, 386 bp, Homo sapiens
  chr10:102321812-102322198
  hyper
acctggaaattgggacctcacgcaccatatttcccgcgctctcccctgggacgtgccgtccctgctgcagtcgcagcgtggcgccctcgctccacgcagggatcctgagccaatggcggaagcggagtgcgcggcgaggtcgcagttgcgtttctcgcactccccactgcggggagcccgtgggccccgcactgcagggaagctgccggcccaggtctcctgggtggcaagaagacgcctgtggtgtggaagaacctcgcccgcagcccagcacgtgtagaatccagatgtggcttctgctggagccacgtgttccggcctgagcgacgtcgcacgtggcctcctggccgcagagcccatggcgcggggggccactcttctgacgc

SEQ ID NO: 234977 - DNA, 1281 bp, Homo sapiens
  chr10:102414412-102415693
  hyper
cataagattaagccgaggctctcagctgcgcagcgactcccctccggttcccatgttgtcgaggcatgctgggagtacaagttccgagcgcacggccaggtgaacgcgccgccgccgccgtcgccgcgcgactccccaccccccctagccccctcccgcgggtcccgactggcccaccccggcgggactggtgacgccggcgcggcctgcgcctcccggaaacccaggcagatagcccgggtggaagcggcccggccctggggtcaccatcgcccctcaccccggggttcgacggcggccctggacgtccccgggcccccgtcttcctcctgggccttctctctagtccctggcagctgggagcggccctcccgcccctgcactccttcctgtcgcgctgtggttctgccctctggttgtcgctcccctagccctcccctctttctctctgcagtgtttcttggggctgttgtctttctgtctgtcactctgcgtctcggtctctctggagtccttctgcctctgtcgccctcccccgcctcgctgtgtctccgtgcgggtgcccctgcagctccctggctcgcccggcctgcgtccgtcggtctgtctgcctctcgcggtctcctcggctcccccctccccctctctcccctctcccctctcccggcgctggcggccaccgcactgcagcgcggcaccagcagtctatgacaaaaacattatccttctgctgctaaacaatccaataaacctctccacagggagaaagttaacctcttgtctcttcggctgatgccttcccgcccacgtgactgctgccacagtaaattcaaatcattagtctcctcaccccatcaaaaaacttctattagtaatggagacctcgccggagaccttccgcggagagcgctgccttcccaattcccagtggaaaaattctgcgcgaaaaactaattctacttttaataatctgtcatcaggaccagaggcagtcataaattatatgggagcgcgtgcgagagcgcgccacaagagggaaatcagggcgaaaaatcaaagcccaagtttgacaaactttcctgaagataaataataacttacaaacaggattagttgtaaagtcacgctccggcgcgcagccaccgcggcaatcacgtctgccgagggccgccaccgcgaggcacctgtcaccggccgccaccgcttccgagccttcctcctcgtcctcctccttgcctgcctcccctcctcctcttcctcgccctccagccttcctcttcc

SEQ ID NO: 234978 - DNA, 705 bp, Homo sapiens
  chr10:102415928-102416633
  hyper
gcgggagtctcgttcgccggggctgtgacctcgagtgggggctcggcgtgtaaaggggtgtacgggagcggcccttggcttcctgcctctgcggcctcccctgcctcccggccccatcccgtctccctgtcctccgccctcacccacccggacagagggagactggcgcgggcagtgcgtgggttgggggcacagcccgacccctaagtttattcgttggcgtgggtgcagggtggcggcgggtccgctccgcccgcctcgggtcccagcccccaccccccggagcttccctcccccaccccaccccgccccgccctcgccccgcacaatctcggcgctgacagccgagcaggtgataaatgccggcgacgcggggaaggaattgcgcaaaataaagaagcatgttccaacaagtcctgtcaggattgtattgatttaatcatctgcagaaatacacattctggattactgtagcgtgcccgggccgggggaaggggcgggccggccggctagggccgcggcgggcggggcgcagcggcgggcgaaggggcgggcagaactggggccccgcccctcgccccaggccccgccccaccggccttctggcctggcgagaaactgcagggcgctggggctagggtttgggggttccctacctaagaggtgctgcggaagggctgttctgccctgcgggcacctcctcct

SEQ ID NO: 234979 - DNA, 165 bp, Homo sapiens
  chr10:102419181-102419346
  hyper
cccgcgggcctgcgcgtgactttagcgcgcgcggctccgcccggaaggtcacctccttcatcacggattctatttgcatccggaatcgcatgtacatgaaaaatgtgtccgcgtgcggccccgactgcagacgcagatgaaattctgtgccgagcctgatgcgcg

SEQ ID NO: 234980 - DNA, 102 bp, Homo sapiens
  chr10:102419579-102419681
  hyper
tctcagaggagccgcgtgcccgtgcgctcccgcctgtcggccccagagagcgcagccctgacacctcctcccggaagcccgccggcccgaccctggtttgga

SEQ ID NO: 234981 - DNA, 67 bp, Homo sapiens
  chr10:102440842-102440909
  hyper
gctctgcgtctggcggagacaattactcggatacgctccggctggccttcccgaggccccaggtcat

SEQ ID NO: 234982 - DNA, 98 bp, Homo sapiens; identical to SEQ ID NO: 202216
  chr10:102441134-102441232
  hyper

SEQ ID NO: 234983 - DNA, 500 bp, Homo sapiens
  chr10:102469792-102470292
  hyper
ggagacagtgacaccgggagaaacccgcgccccgcgcccccatcccccaggagcccctccctccgcggcgctccgggcagaagagggaagcagtgacccggccaggtggtgatgatgcggccggccgcgctggtcactcttggccgctccccgcgcgcagcccgacccccctcgtatgggtcacggcgcctgcaaaactccctgacacagaaacgccgcggggcctgcgcgtgtcgggaacaatcctgcgcctgatgggaagcgacagctccgccccgcctccctccactcctgccctcccgcggctcctcccgggcgccgcgtcccgcgctcctgctgccagcccagccggcctggggcgccctagccgctggtcctggcccaacaagtagccaccgacccctcccatgtggcctaggacgggaggagcttctgcccggcagttgggggtgacaaggatggggtaaagaggggcgccgggcaggcgcagggcgggggga

SEQ ID NO: 234984 - DNA, 851 bp, Homo sapiens
  chr10:102473073-102473924
  hyper
cttttcgccatagccggaaataccactgttggatccaccttctgcgccccaggcctccccagcctccgtacccaggaggcagccagcttagcagggtaggcatgtgggtggcccaccagctcctggaatggagcgtactccgtttctggggaggttccccgcgtcctgcctggagtctagaagggagcggggaagtgaccagcactagattagaggcgggaactccggatgagaaagagacgagggggccaggatcccagggctggcagcgacaggaaggatgggaagaggtccgcaggcccgacgggtgcgggccagcctggccgcgcagggggagctgggagctgggtgggcggggtggggcggacgccaccaggcgtggcgcggggaacagagcagaatgaaatgcagatgcaaaacgtgctcataagagtttcctctctctccccatctgccaaagccgagattttaatctttaatccatgagcaatcagcgagcagcggcgaatggcacattacagatgttttactgtcgcgggcgctcgcagctttcgcgctcggcacaggcgcgccgggcgcccccgctccgcccgccccctcttctccccctctggttcttcttcctctcccctccccaggtccccgtttaacactatccccctcacctgcacgctcctggcccgcagcggaggtgggactggggagcagggcctgggactccgctggtgggggtacacgcaggggcactggcgggggcggggggcgacggcactcagaattgcgctgaggcaaattccccgccaggtccagattggggggcgcgaggacaggagcatcgagtgcccggatag

SEQ ID NO: 234985 - DNA, 430 bp, Homo sapiens
  chr10:102475169-102475599
  hyper
agatccacaacagagaaaggcgtggagaagggcagagacagagaccaacgaagtggggtcgggtagaaagaggcggatataaaggcaggccagagagagtgaatggccgcgtcagccgcaaagaggcccagacagatggacgcaggcaggaagacggacaggagagagagagagacaacgtgcgcccgaggctgaagagctgggtcaagaagagattcggcttccgggagcaggggcgtccgggagggactgcccagggcgccccgctgcccgaagcccagccccgccccagccgccgccggcgccgtctgtcggcagccgccctgggcctaggccgcagggtccacaggcggccctgacaggcggcggcggcggtgagggaagccggagcgagaggcagcggagccgcgtgtgtgtttttattattatt

SEQ ID NO: 234986 - DNA, 72 bp, Homo sapiens
  chr10:102475882-102475954
  hyper
agacaggaatacgcgccggggctggtcacacctcttccgcgggaggggcggggtcggcggccacggcctagc

SEQ ID NO: 234987 - DNA, 248 bp, Homo sapiens
  chr10:102484313-102484561
  hyper
gcggcgaccaggctcgcttcccacttgggctgcgggcggcatggtccctctgcgcccatccggctctcctcacccctgccagtctccgacccggccgtccaacgtccctccctggccggctcgcctgcgcagccgagcatcaggctccgcgccggggtaggcgagcaggtccccagccccaggcccgcagctgtaggccggtgaggaacagctctgctagagaaagcgcaccccacccccacccccag

SEQ ID NO: 234988 - DNA, 1845 bp, Homo sapiens
  chr10:102489299-102491144
  hyper
accctctggcctggggacaccggtgctggagaagaccctgggaacgggcagaatctgagccgcgtctctgagtcgcagtgggaaggcggctcaggaaatgcgccctccgctggcgctgggtcgcggttctggctgcgttactttttccttgcatctgtggcccggcgcgccagcctggacactagatccgcaagaagggagttttcccagggccggctgaagaatgagaagtccgagctgcggggacgttgggggtctgtgcttagcggccacagcctgcccaccacgggttcccgccaccccgcctccccacctcccttcgcgccagggctgaaagtcccaggcgcccaatgcgtgcccaagaacgagccgtgaaccttttatctacccgtccccttccccgccatggacccaggacgacaccccacacccagacaccactctttccaggggcagatgctccggcgcgccccgcgccctgaagttcaacttggaatccaggtccgcgcgggaccccgcctagcgccccaagcgcacaggctgagcgccccgccctggcctcctgggcctgcggcctcagcgcgagagccctggcccccttcccgccgcgggtcgcggtcgggaaagcgcgccctgcaagggggttttgtagataaacaaaagcgtttgctcttctggttttcttttattttctttattcgcctgtcccttccttcttaatctccctcttcgctcttgtttctttaacttatttcccttcctcattttccctttcttttcgttcgcttttccttgtcactctccttcttgttctcttctgtctctttctgtatctccctcttccattttggccccttctctgcctctgggtttccctttcccgggcccctcactcttcctgggctaggattgcgccgtctccctgcatcatttttcctggctccgctgcctctttctcactttttcgttctcccggcggccaccgtctggcgggcttgggtccggctcccccgccgccgcagtgatttattcgcttcacccggcggaatcaggtgctgaaccgagccccggaacgagagaacagatttctcccaggaaaggttttgtgaactaaacgatgctaattacggggtgggggatgcgtcgcccgggaaggggaggcgcgcggggccgagcgcggcctgggaggggagagaccggggctggccgaggccctcccggggcgcctcccctgcacctctcgccctggctttcgcctttccctgggaactttcccgtctgagttaactattaaccaccggcgagaggcaattttcttcggaatttcagcgatttccttttcgcagtggactcagattagcacgcaaacagtgagatgctcggcttgagtctacgcgcgggcgaagatgcctctgtcgcctcaaacagtgtccttcgcgacggcggaaaactacagcccgcccccgctcccgtgcctgctcaggaagccgtgaccaagccagtgcccgccggtgcccggagtgaaggtggaaaaagccgagtgctcctgctcgggggcggggttgagagggggagattaatccgggcaagccaaggggaccttagacttgcagccagggccgccacccgaggagcccgcatgcagggacgcgcctgaaggcttagtcaaacccggggaaatgccctcccccgcctgcagaatccccacgccgtctcttacttcctccctctttgccactggcgagcttacacgtgcacacacacacacccctctctgtctgtgaccgcaacaaactttgtgaaacttgaaccgctgggtgcaaagttcacgcccttttctccttt

SEQ ID NO: 234989 - DNA, 594 bp, Homo sapiens
  chr10:102495096-102495690
  hyper
ggttgggtgagagggtgtgccggcgtctaggctgggctgcggtccgtgggcgcctcaggcagcgagggtggctgcttgcctgcggctggctggggcctcggtgcgtgtgcacgcgtgtgcgcggggcggagaacccgggctcctcggggtgccggagcctctgcgcggccgggagtgagagagcgggcgcgggcggagcacacagccgtggcggcgggcggctcgggttatctgagccgcttggtgttgggtggctgcgcccagatctccgggcggcggcggcggcgaaggcgagacgcgttgtcgggccgcggaggagcgggacagccagacccagccccaggacgcggcggccgcggggagcctagcatggaagagcgcgcgggtccggcaggtaagagcggcagagacccgtccgcgccgcaggcgaggactaggggagagggatgggggcggccatggccggggcgggctcctctcctctttcatccctgtgctcagtacccggcgggcgacgtgaaggctggggactgaggctctgcggactctggggcctcctgggccgtccctcccggtgtcctctaaaccttctga

SEQ ID NO: 234990 - DNA, 587 bp, Homo sapiens
  chr10:102497179-102497766
  hyper
cgcgcgtggcacagcggccagcggcccgactccgcaccgcacttcctttcccttccctcttttcccgcctttgcgggtgcgggtctcgtgttccaggcagcagcagctccgggaaaggcgggggggagctgcggagctgggcaggagacagggctgtgtttgggaaaaggaaaccgcacttcgaggcggctccgcagagcagagctgcagagtcttccgccctcccagccgccttctccctttgcctctttctcttttcaccgccccctccctcatctcttcggtagccacgtttggccggggcacaactccctggaggccctgcccccctagacggccccgagcccttttggacctcatccggctagtttaaaatgacaatgacagaggcgcgtgaccgaacgtgcctgccggacgtcctggcgcaactgccgcagccgggtttgcgaaggatgcgggttttacttagtctcgctgagcctgttccggagcagcgaaaaccatcaggaaagggcgagagaaggaggaaggggattgaatcagcaactagggcaattgtggtcttcagctatcgctgcctatacccc

SEQ ID NO: 234991 - DNA, 101 bp, Homo sapiens
  chr10:102497995-102498096
  hyper
gcctgatgcctcgccgccctcttttgccaggcctcctcaccccgttattaactgctgtgttgacctgcaggattgattggcggccccgctggaagaggctg

SEQ ID NO: 234992 - DNA, 191 bp, Homo sapiens
  chr10:102498740-102498931
  hyper
agggcctaatccgtcgcgcgcgcgcacgcggacacacacacacacacacacacacacacacacacacggcccccatagccaccgcaactctcagcagcagccctagccccgacccgaggccccaagacggcgggccaggaacccctgggacgtcctggctccaggctggacgtaggcggaggtggcaggag

SEQ ID NO: 234993 - DNA, 834 bp, Homo sapiens
  chr10:102501591-102502425
  hyper
ttaatgcatttaatttggtccgcgctgtggggagcatttcctggggagatgcatttaatttcggaatttctaatcccctccctcagaccccggtcctagctcccctagccgctccccgggaagtggaaggaggaaggcaggtcccggccacgggggaggggcgcggctgggatgctcccgcggccccctccgtctcaccaaggctcagccgccttcccaagctactggaggccgggcgcctgggccccgggtcagggccctgcaggaggaggagaggcaaccacgcttctgccttttctcgcctgggcagaaaacgctgggccagggaactggaaaccggaaaacaggagaaagggtttctggaaggcagcgggagcgggtggcagcggggcagcgggcagtggactaggtctacaccggcacttcacttttgcacaacatgcccagaaacgcatttgagagccctggagtcgcgcttggcttggcttggggcgccggtgcgtgggtacactcgaggtgcggggtgcctatccgccaccccgacacctacacccagacagagcaggcgcggcccagccagaaaaccaggccggcagtagctcggcctggagggcggaggcaaggttgggggccgccaggcgcctgggcaagcctggcagggaagggagccgagaaggcaaaggagccgagatccacaaggaagatttattgggcagatcagatgcacagaggcggctaatgaagcaaatcccgagatgggtatcagagcaactccccaaaagtttatttgcctttaaatttccgcagggaggcgggctccttgtttgaagtgta

SEQ ID NO: 234994 - DNA, 740 bp, Homo sapiens
  chr10:102504008-102504748
  hyper
cgggctgcaagagcgctgcgcaagcttcgccgagccgccctttcgcagacccagggaagcggggggagggagcgaaggagggagagagagttaaaacatcagctgaagtgccaagatgatttatgagacgagggaaaatatttcatgaagatctcccggatattctgtacttaaccagttaggagacaaagggcttcttctgcctggtgcgtgcgagcggaccccagcgagcaagggagctagtgccagagagagctgcggaggctccggcaggagtggggacgtccccgtggttgcgcctcctgcgctcgccccggatccaccgagctagcagcgggcggcgctcagccgcgtccgcagcctcctcttctccccagccggggagagccagcctcgtctcccacatcctctgccgccagcgacctgcagctccgcactgtttccctcccctgtacccccttcccagtcacccgagggttcagaaaccaagtcccccggctctcccgccatccgctgggtcccaccgaggcaggtgggtactcgccggaggtcttcagctcgattctgaaccaagcgttctggactgcccagacccggtgggcaaggggactggggaggccctgcgcacagtcgcgtggaacgggaggggacaagacaaactgctggacacttttccgtggaatgagaagtggggggtgcgtgggtgggaaggtacctccggagggaaaggccaaagggaa

SEQ ID NO: 234995 - DNA, 112 bp, Homo sapiens
  chr10:102505252-102505364
  hyper
atccatctcccggcgcggggagggggaggaggtctggagggggctttgcagcttttagagagacacacaccgggagccgaggctccagtctccggccgagtcttctcgcagc

SEQ ID NO: 234996 - DNA, 819 bp, Homo sapiens
  chr10:102507396-102508215
  hyper
aatcatatatttagcgttgcgggggttggggggggcgtttaaaaatacttctgggataaaatatatttttctaagtaatttccaagcgcaggaaagccgcgccgagggcatcaggcctccgcgggtctcggcgagcgggccggaaagcctcggtccttttcgggaggagtggaaccgggtccacacgccgttttcgcccagccagcctgcctcgcggcccgctgccacagctctcgttctccttttttgcggattccgccgggggtccgccgagtcctggctgcccgcgggcagccactttgaaacccaaaggtttctgcacggccaagcagaggtcggagggagagagccgcagcgcgggcccgcgggccggtggactggtgggtgagacaccgcagcccgagtcggtgctggcggccgtggcgcattccaggcccgactcagcgccgactcgctgcagtcccccagccctggactcccgccgtgtccccttcccatccccaccccttagactggggctgaggggccgggccctgagcccggggaggctgaattattcatctttaatctgcccgcagctgccgccttttcataccggtaacgcgagttctcccggggcctaaattattgatggtcggggtttggagggaggggagggtgagaagtggggctagagatagggagattaacggggtgggcaagggggtaaaagaaggggcttcagtctctcccagcaacgcgatcagaggtctttccccagggtttcaccgagcttgctctaggtaccccccgagaaagggaggggagagaaatgagggg

SEQ ID NO: 234997 - DNA, 148 bp, Homo sapiens
  chr10:102508395-102508543
  hyper
gagaatggggcacaggaagcaccctcaggcctggcacccagtggccgcctcggttccgagatcgggagcccgcgctggagccgggttggaaaccccgtgcccttctcttggccgaaagagcaaaagcccgagccgctcggtttcctgg

SEQ ID NO: 234998 - DNA, 95 bp, Homo sapiens
  chr10:102508723-102508818
  hyper
tctctgcctgctgcctggagccgctctgcctccctgtctctgagcgcagcagaccccgggcccctgcctcatccgccttccttgctctacttcag

SEQ ID NO: 234999 - DNA, 288 bp, Homo sapiens
  chr10:102585768-102586056
  hyper
agagctcgtggtgtcgaggggggagtcgttaaacagaatctagtgctgatgaggaaattacacttgtttcattagcgatggggaaggagatagctcagttcctcttggtcacagttgagctcagaagctcattatcctgctgcacgcatgctttccctcctcgtcaataaacaggctttccagtggctgcatcccccacccccaccccagctccctctcagagaggggccccttctcctctacttaacccgcggttagggatcactgtaaacagtctggggtcatcac

SEQ ID NO: 235000 - DNA, 141 bp, Homo sapiens
  chr10:102586236-102586377
  hyper
agggaaaggcgggagggcggtgtctcccaaaagagctcccacctcttgtgttggcactgcacattgatgccattcttaggactttctgggagaaaaatgtcccgaaggcctttcttcgccaccgccccccactcccatttc

SEQ ID NO: 235001 - DNA, 3244 bp, Homo sapiens
  chr10:102587157-102590401
  hyper
gctccactgcccagccaaggtctcccagtccggatcccgctggaccccagccaggggaggtcttttctgtgcttttctttccttttttgttctcctgtttgtcctctcacccagcccattcttctcctgtgttaacttccaggttccccttattattatagtgccgccccccggggctccgcccctgccgctgctgccgctgcctatgaccgccactagttaccgcggggaccacatcaagcttcaggccgacagcttcggcctccacatcgtccccgtctgaccccaccccggagggagggaggaccgacgcgacgcgatgcctcccggccaccgccccagcctcaccccatcccacgacccccgcaacccttcacatcacccccctcgaaggtcggacaggacgggtggagccgtgggcgggaccctcaggcccgggcccgccgcccccagccccgcctgccgcccctccccgcctgcctggactgcgcggcgccgtgagggggattcggcccagctcgtcccggcctccaccaagccagccccgaagcccgccagccaccctgccggactcgggcgcgacctgctggcgcgcgccggatgtttctgtgacacacaatcagcgcggaccgcagcgcggcccagccccgggcacccgcctcggacgctcgggcgccaggaggcttcgctggaggggctgggccaaggagattaagaagaaaacgactttctgcaggaggaagagcccgctgccgaatccctgggaaaaattcttttcccccagtgccagccggactgccctcgccttccgggtgtgccctgtcccagaagatggaatgggggtgtgggggtccggctctaggaacgggctttgggggcgtcaggtctttccaaggttgggacccaaggatcggggggcccagcagcccgcaccgatcgagccggactctcggctcttcactgctcctcctggcctgcctagttccccagggcccggcacctcctgctgcgagacccggctctcagccctgccttgcccctacctcagcgtctcttccacctgctggcctcccagtttcccctcctgccagtccttcgcctgtcccttgacgccctgcatcctcctccctgactcgcagccccatcggacgctctcccgggaccgccgcaggaccagtttccatagactgcggactggggtcttcctccagcagttacttgatgccccctcccccgacacagactctcaatctgccggtggtaagaaccggttctgagctggcgtctgagctgctgcggggtggaagtggggggctgcccactccactcctcccatcccctcccagcctcctcctccggcaggaactgaacagaaccacaaaaagtctacatttatttaatatgatggtctttgcaaaaaggaacaaaacaacacaaaagcccaccaggctgctgctttgtggaaagacggtgtgtgtcgtgtgaaggcgaaacccggtgtacataacccctccccctccgccccgccccgcccggccccgtagagtccctgtcgcccgccggccctgcctgtagatacgccccgctgtctgtgctgtgagagtcgccgctcgctgggggggaagggggggacacagctacacgcccattaaagcacagcacgtcctgggggaggggggcattttttatgttacaaaaaaaaattacgaaagaaaagaaatctctatgcaaaatgacgaacatggtcctgtggactcctctggcctgttttgttggctctttctctgtaattccgtgttttcgctttttcctccctgcccctctctccctctgcccctctctcctctccgcttctctccccctctgtctctgtctctctccgtctctgtcgctcttgtctgtctgtctctgctctttcctcggcctctctccccagacctggcccggccgccctgtctccgcaggctagatccgaggtggcagctccagcccccgggctcgccccctcgcgggcgtgccccgcgcgccccgggcggccgaaggccgggccgccccgtcccgccccgtagttgctctttcggtagtggcgatgcgccctgcatgtctcctcacccgtggatcgtgacgactcgaaataacagaaacaaagtcaataaagtgaaaataaataaaaatccttgaacaaatccgaaaaggcttggagtcctcgcccagatctctctcccctgcgagccctttttatttgagaaggaaaaagagaaaagagaatcgtttaagggaacccggcgcccagccaggctccagtggcccgaacggggcggcgagggcggcgagggcgccgaggtccggcccatcccagtcctgtggggctggccgggcagagaccccggacccaggcccaggcctaacctgctaaatgtccccggacggttctggtctcctcggccactttcagtgcgtcggttcgttttgattctttttcttttgtgcacataagaaataaataataataataaataaagaataaaattttgtatgtcactccccatggctccaagtttgtctctccctgtctctgagatgggcctcccctccattggtcgatccccaaaagccccttcaatgatcctcccaactacactcccgctgccacctccaactcctttgccgagacccccttggcggcagctgaaccacggcgaaggccgagactagcctgccctttagtagccaccctcccccacgcaccccggccctggggacaggaagttcttactctccgaaacttcagaataactcctagttaggcgcctatactaggccaactctgtggtcctaccagtacacccgcacccagatttagggtgctggctctcagaacccgaagtctgaggccttctccacgtgggtggaggggtggtcgtctgtcctatctcctccctccgttccctatccagtgcagttgcgcgtgggcgcagcagcaattttatccccgaagtctgcaatgaaacgcgaagaccgcagacgcttgccgcaagtttcctcgctctgcgtttacttctgggcccgaagaatgccccgcagaggccctaggagctggttcatgggacttcacgcgcctccagtgtcttgcggagccccagccccagcaagcagcggctgaaattggtgcgccttgtgctgtggtctgggtgtgtcccggagagggcgcgcaggcgcctatgtctgtcgcggggcggtcggc

SEQ ID NO: 235002 - DNA, 263 bp, Homo sapiens
  chr10:102671979-102672242
  hyper
tctatgctgcccacgcttaacatggaaaactgaaagctgaccttgtgttcctttaaaaaatctccaaggaagtcggctgcagagacttcatggtaactcatgagaaacaaaatgcttttgtggattaacaactgtctttattccaatggagttttttgggggttttttcttcttcttaaagacaaaaaaataatctaccgctgacactcaacaagaaccgtcgtagaatggacaagtcttcggatcgcgctgtgcagatccct

SEQ ID NO: 235003 - DNA, 360 bp, Homo sapiens
  chr10:102746984-102747344
  hyper
ccctgactgggggcgacctacccggggagtcgttgccacctccacacccaccccgacccgcgcctgcgcacttcccttggctcacctggcgccgcgagacgaggcgccgtcgcggctgacgctgaagctcagacgctgcagctgctgcacatagcgacccagtccgttgtggagaacgctggccaagaagcggctcggagtcccgcgcgccgtcatagctacagcttggaggccgcggagcctaagcagcgaggagaggggggcgggactaaacctcgaggcttccggttccgggacgaccgctcccggagttttgcttccgaggtcaaggcgagtagcatgtgcgggagactcacgttg

SEQ ID NO: 235004 - DNA, 189 bp, Homo sapiens
  chr10:102758641-102758830
  hyper
ggaaagaaggaacgcggacccacgtgacggctgagactgcggctgcatgtgggaaaggtcttgtgggtgttagggagactgtattgtgtgcgagaaggtgagactacttgaccctgaggaagtggaatattgtctgccgtgaggctggtgtaggtttgggctgtaggcttgcaccggttcgccccagtg

SEQ ID NO: 235005 - DNA, 794 bp, Homo sapiens
  chr10:102791376-102792170
  hyper
agttctggaatggtcgcagggtggggcagctggtcccaggaccggaagaatcctaagaatccttctgatgcacttgctcggatgcagaccgcgaggttcctggggtcgtctgcccctccacatctcaggggtggggctacggtctggggtgcagggctaggggttgggagcgtaaggagaccagggacacagtggagctaggggttacagagggggagcagggagagggctggggacatagaagaggcacaggcacgacaggaacggggctgtgaagtgatgcgaatgccgcgctgctacaagaggagcttgtggatactggggtaggagcccagggggacaagcaagccaaaggccattgccaaggcagccatcaagtaaacaagccaggcggtaacccgagtccctcccggcgcgccagcagaggaccgcccctccacaccgcccacctgcgcccggggctttctctctgggcacctagaccgcttgctgcagggctgggggtctgctgaggcccgccaggggactgtaaaccaagggagcagcgcccgcggctccagcccctcctccctttggctggggagggggccagaactgatccccgaggtgggattggctctgggaagcagcttagggcctggtccaggtggcccaggctgggggcatcgcctcgaatgacacccaccgccctcaggttctgccaatccccgtgcccaccgggtgggcgcggccgggaagctcctgcccctccctgctggtcggcgtcacgcgtgacgtcccgcgtgatggctggg

SEQ ID NO: 235006 - DNA, 113 bp, Homo sapiens
  chr10:102802620-102802733
  hyper
tcaaagctaggctcggctccgcctccttcccgtttcccgagcaacggctttagtacctcaggccccgattctcgctcaccttccgggtcggagcctggaagctacgtctcaga

SEQ ID NO: 235007 - DNA, 88 bp, Homo sapiens
  chr10:102802913-102803001
  hyper
tttttcagctgcctctgaggctgttggctctttcttcggcgccgtcctcctcctttccctctctccacccttgcgcctaacagtccag

SEQ ID NO: 235008 - DNA, 403 bp, Homo sapiens
  chr10:102809890-102810293
  hyper
cggtaaactctccccgactgagcgggctcccccggccttaatgagataatcaatacttgttctcggcttaatttccatctaattgctctttaacgacgccggataatgggccgcctcctgtgaggagggagctggctgggaatccgacccgcctcggactcccgcctttcctcccccgggcaggatgccctcgcgcaggtgggaagggggcgcaccgcgttctctgcgtagccggagctcccttcgcccgcccgcctgccccgcgccgccacctgcctgcagcgctctcggcccccaccggggggcgcttcagactttggttgcaggatcctggccaaggctccgtttcaggttcgggccacccccaaccttatgggctgtggaaccgcgcgcctctggacaa

SEQ ID NO: 235009 - DNA, 204 bp, Homo sapiens
  chr10:102826290-102826494
  hyper
agcagaatcagaggggtaggcgggggtggggcgtgctgttcggcgctgtggccaaaatccgcccggcgctgaaagaggggacgtgggtgtgagtcccagcatcagccagggaatccgcccctagcttgttcttcgcccagctgggctccaagacgccctctgcgggcccatagctcctaccgcgtccacctgcagagcagaggc

SEQ ID NO: 235010 - DNA, 1161 bp, Homo sapiens
  chr10:102890944-102892105
  hyper
cctcccctccctcgcgctgtcattcaccccgctcctctccgcgcacagccaatggagagacccagtcgaaaccgcgaagctctcttgcaccgggctttttcgcctggtgattgatgtcccagagtcaacagcgagcgagcagccggagcggggaagcagaagccagagaggggaagaatacggcgccccctctctccctcccctcccccttctactttagcctttctgcgcacttcgcttccaagtctccgcgcagccaggagccgctgttgcctcccagcccctgctagctgccccccgagccgagcgcagcgagcgccgccgcccgggccccccggtggggccagggccagcatggagcacctgggtccgcaccacctccacccgggtcacgcagagcccattagcttcggcatcgaccagatcctcaacagcccggaccagggtggctgcatgggacccgcctcgcgcctccaggacggagaatacggccttggctgcttggtcggaggcgcctacacttacggcggcgggggctccgcggccgcgacgggggctggaggagcgggggcctatggtactggaggtcccggcggccccggaggcccggcaggcggcggcggcgcctgcagcatgggtcctctgaccggctcctacaacgtgaacatggccttggcaggcggccccggtcctggcggcggcggcggcagcagcggcggtgccggggcactcagcgctgcgggggtaatccgggtgccggcacacaggccgctcgccggagccgtggcccacccccagcccctggccaccggcttgcccaccgtgccctctgtgcctgccatgccgggcgtcaacaacctcactggcctcaccttcccctggatggagagtaaccgcagatacacaaaggacaggttcacaggtgagtccggcccgcgcgctccccgcctggccgcggcccgggctccgtgctacccctgccccgccgggtggctccccaaagccggttctgcgctccaggtcgcccagctcttcttggtgcttcccccaagttgagccgcccgcccgattctataacgcagactcgccatgcttgaagagttctctcagcctggacccctctctgtctcccgaaggacccctgctcggaggagctctccc

SEQ ID NO: 235011 - DNA, 1548 bp, Homo sapiens
  chr10:102893697-102895245
  hyper
ggcgacggcggcgtcggactggcgggcaggaggaggccgtttcccgccgtgggcttgtcgctgagggctaacgggaggatctcggccctgctcgtgggggttcagctgctgcgctcgctgactcgcggggtgttgggcctgggacgcttcctgacgctctgctgcttgcctctgccgtctgtctgtctcccgctccagtggccctctcacccttcactgtaacacgccgtataggtcacccctatcagaaccggacgccccccaagaagaagaagccgcgcacgtccttcacacgcctgcagatctgcgagctggagaagcgcttccaccgccagaagtacctggcctcggccgagcgcgccgccctggccaaggcgctcaaaatgaccgatgcgcaggtcaaaacctggttccagaaccggcggacaaagtggaggtgagcaagcggggcgggccggccgcccgcgagcggcgcggtctcaggcagctctcggttcattggcctctcgtggggcgcacatactttttccgctcgcggtttctgatcctttcggaggagcgagctcccgctaggcttgcggggagctggaagcaaccgaggccgatagctgggatggggctgaagagccctggctctgttttaccggaggcttcagggctttctggttggcacactctctgccggtgtagacgcggcaggtctattccgccgcttgggcaaacaggcgggttagtgcactccacgcagtccaggctccagggatctgtgagtcctggggagctttttgtttgcgcaaactcttgcttatggaatcctgctctgtcctggagactggatgcagaacagcccgcaccttgttgcagcgctccagccgggctcccggcagagggtctgtggccccagaccgcggccctgctgacggtctcctcccccagacacccggcctttgcgcagccggtccctaccctggaaggagaaaatcaatccgcgccggctgcggcggggtttcgcgggtcccactggaaggggaatcaattaggagcagatgggtgtgtgtgagaaagagaattttccttctcccatagccacaactctagttactacgcaatgggctttttgttttgttttgttttttcacatttacgctcacggacgtgaagcgtccccaacactctcgagcagcctccctctccgcgcgcactgacgctttctccggctgcaccctctggcacgctgcaccctctggcacgctgcaccctcccgcacatctggcccttgcccgccggagtttctcccctagctcaggccccatggggtagcgcgggagagtctgggcgaagtcggcggcgccgagacgggcgggccttggggcaggaggaaggaattggagtttcctctttttctgaacgaaggcgaggaatctgcctgggattccgcctacggggccacaaaggaagccatggccccacgattctaccacaacatttctgacgctgggaaaggagtgggggatgcggcctcagaccttggaacgctaaagagggagc

SEQ ID NO: 235012 - DNA, 417 bp, Homo sapiens
  chr10:102899184-102899601
  hyper
tccccgcaggcccgcggagtgctcaggttgggccctgacgagctgtgtggagcgtagtgagcaggttctggcggcagcgccgggtctgctgcaggtctcccgcattcaccggctgtggcacccagcgccaggccgcgcaaaatccagaaatagcctccagcacctcagaagtcgtctccctctacctgggcaggtctgctgtcccctctgctcccgcaggactggagccaccgagctcgcgccttcttctcggggtgcgatttctctcctcttttggactcaagatcaatgcttcccggccggcgcagatcacacagcaggaccccaggggagactgtggccttcttcccgcctcccaattccccaagaccgcctctagaggctgctgtgtccggagaactccgagcattttctgga

SEQ ID NO: 235013 - DNA, 683 bp, Homo sapiens
  chr10:102899842-102900525
  hyper
cggagccctcagcccggcagctctcggaccctgcccagctcgacgcggactcatgcagaagaggacattccgcaggtaggtacaatcccagcgctggggcctggggcgtccggggggcggcctttgagcttcccggataccgctcgcctgctcccggagctgttcggccgccggctgcccgggtcgtgcactttcagtagggccccgctgactctcctgcccttgggctaggcctcccggggatgccagactcctggggacgctgggacccgcggcgcggcgggacacgcaggactcccgcctctccgcccggaattcgttgagacggaatctcagcggatcccgcgtccgccgagcgccgcggccagggagaaaggccggtgtggcggctggacccgcaaactccgtcccaagtggggcggaggctggaggggaggggggctgcgagggtcacagtcaaggccaactactcacaacagaaagctcgaaactctccctctacctcccctgccggaaatgacccgtctctgttcaaaaatagaaaaagaacgatcggaataattgttcgcagaggtgccgggagagaaggggaattaacaaacctgcctgcgcggagaggtctgcttccttctttggcttcagaaccgacggcaatcaccaaattcctgcggccagcgagccct

SEQ ID NO: 235014 - DNA, 2013 bp, Homo sapiens
  chr10:102975124-102977137
  hyper
ggtgtagactcccgcgtcccggggctcccttcctcgctcttccttcggacacccacagcagctgctcctggggaatctgcccccaagtttcgaggaactgccccccagcgcccaggaggaaaggggaatggggctgtaaacgtgtctaattcagacccgttatccagatcggaattagtttctcgcggacacctccgcgccgcgggccattctctgcctggggcctttcttggaccgatccatagggcctcgactggcttccacggcgcttgcaaattagagactctgatgcctcaaatttgtggggtcctgcctccagctcatccccctctcccgaggcttggcctaaaggcaccatccctgccactcctcaccccctgaattcagtcgggggcctgtgtggagggaaaggaaaacctggagagaccaagtggctgcactgccaccgcgcaggcatggatcctgcctggccgccgtctgggaactcgagatccgaggaggggcaaaagccgccggcgccggggtcaggcctggtggacccgagctccttggtgagacctggacccaccgtcttctccttcaaaagcacagggtggcagcggggaaaggatacgttcccattgaaggggcgatggaaaactggaatcagagactgaaggaggcggggcatgggaccccggaagatgcctcccagacgttccaggcctgcttgcccggctccggaggtcttagcagcatcctcggaggttgccaaacacctgggaagggggtaggtggagcttgaaaggactctgggtctctctttgggaatgcaaagtcccctcaactctcctggccctcccatccgccccccacccgcgccagcgtgtggtagccccgagcctagcacgctgagatgtgggaaggtgtgggtctgcccagtgggtggccccgacagaacgaatccgaggtcctgggaggaattgggagacgtgaagagttgggtatctgccgccccaaggtggggccatccgcttggcagtttcggctctgcgggcggcgcggcctcgcgcggaatctagccagcccctgagagtccccgccccctccccgaggcccaaggtattagtgctgcttgatcagacctcatttcctgcgaaaatggaaacatatccagggtccttaataaagtgaatgacgaggcttcggtgtaattgggcttccgtttggtggctatttccttaaactgagagtggaaaaaaatgtaaactcacagcgctcagatgtaattatatgattatcaaaaggagtgcaggatggattagccgagcaacgacctagagtctgagaaacgggcaggcacaaacgcttactcagaccaagggacccagaagtcccggacttccacaccagccccgcatccaagcgcgcgcctttgaaaccttcggcctctcctgccagccagagacccgccctgccgttgccatcgggacacgcgggatctttatttatacgctggggtgggtcttttccttcctcgcagaggaggagcgtcctctaaggcaaggggggtgggtgctggctacgagtcccctgaccgcctgcccggcccgcgtgcgctggctgcatatttctatgcataatccaattttctccgtgactatctagttaaactctttaacaacagctacataattagaatttggattcccattaattttccttgggcctcgaaccatttgcagctcacactggtaattaatgcgatacatcactaactttacccagcgcaggccggcccggctcaggtcgctcggccagcgcctggcgccctcgagcgggaccctgactcctgaccctgcttcccaggtgggagccgttttcctccttccaaagccagatgcctcgggcccgcgaaccaaaagccttctttccaggaaatttcacaattaaaaatatttatcgggagcagatttacgtttctgggtttccagtctcggggcgtctgggtaggctattaagagtaattagcat

SEQ ID NO: 235015 - DNA, 110 bp, Homo sapiens
  chr10:102977317-102977427
  hyper
aggccccagacgctgaacacggaacgaaaaggcttccatcctggagacctggagacgagtgacgccagagcgacctcgtgcggttggggaaggcccagactaggctctcc

SEQ ID NO: 235016 - DNA, 120 bp, Homo sapiens
  chr10:102977607-102977727
  hyper
ccttccctgcagcccaccggttcccaggacgacgctcaaacgtcagtcctaggccacccacctagggcactgagtttcagagggagactcgggcccctaccttgcctcgaattcccttct

SEQ ID NO: 235017 - DNA, 141 bp, Homo sapiens
  chr10:102977907-102978048
  hyper
gggcggctggagacgatgaggccacgcgactgaagggattggggggtgaggagtggtggtgggggcggacaaagggacaacgtggcggtggacgaaccagggccagagagggccgctgtggctcccgctcttcgggccgaa

SEQ ID NO: 235018 - DNA, 180 bp, Homo sapiens
  chr10:102978304-102978484
  hyper
gcatggggactgcttgctcccgggagggtgtgggcaggagtctggtgtatatccggccaagaatccctttgcgacgtgtctccatgcctgggtgtgtgtgtatggacctccgtgtgtctgcgtgtgtgtgaccacgtgcggctgagaggccatgtagacgtgacttgggtgtctatgtgt

SEQ ID NO: 235019 - DNA, 336 bp, Homo sapiens
  chr10:102978737-102979073
  hyper
actactccaaggacatggctcggtttccagggtccccagagctgggacgccgccgggaaaccatggtcctggaggggagggagttatttgagggggtgcttgtccctgcctcgtcccttgtcaggccccgcgcggcgctaaagcgggggccgttttccctttaaatcgcggacactttgacaggggacattaaggacccggctgctcaggctgagcagatcataaaaccggacaggcaatttctgctcccgccaaatagccgggcaaactcgttctgcatctttggttttaatgcactaaactggcagctaagcagggagcgagcaaaaggggggt

SEQ ID NO: 235020 - DNA, 143 bp, Homo sapiens
  chr10:102982318-102982461
  hyper
ggcggagggtaggcgcgcggccccagctcgtccctttcaggggggactcatgcatcaaacttcaattttccggacgattgaattagtgattttttttctcctgaactaaaatacacttaagtctttgggattaattaccacgt

SEQ ID NO: 235021 - DNA, 917 bp, Homo sapiens
  chr10:102983001-102983918
  hyper
ggagcctacacttgggcgaacacaccactgctgtttgcagtatcccgagacaggcccggcaggcgtgagctaagaggcctcgggcccgaacttgggatttgaggctctctcacatcgccggtcccagcggcagcgcctgaggcacagccaagaccatccgaggtccccgggccgcgcgcaggtagcagacttcttcagaactgggggagctaaagagagagtgggcttagagcccaggcctccctggatcccagatcctcgcctccgcctacagccaagcccctcagcttttgcccagagctgctgacttcctcgccgcctccctgcgcaatgggacctagagataagccccaagcccgggtgctagtccaggcagagtcgggtgctagtccaggcagagtccagtgctagtccgcggcctcaacagagctgtcggctgggctccggaagcccacccggaacctgatggaggcagcgaattcctcagagcagaggacactgcggagaggctcgaatccacttcccacattgtgcgggaccgagcgcgcagggcgctctcgcgtggcctccttagctcgggttcagccgaggctctcacgtacacttcgttaccccttccccccgccgcagctctggtccttccttccactggctctcttctctggcctatggaaacaacgaactacttttcgcctttcaaggcccgggtcccaagccacctcctctgtgaagccgccaacaccctggtagctgcctctcagtgttttgcaactggcacggccctgtccctcggtccgcttctactagcgctgggggtgctgcgagtcttgcccactagactaggagctccttgagggcaggaaccgaatctgattcgtttccattttcccagcccccctgcgcggcctggcgcagaa

SEQ ID NO: 235022 - DNA, 551 bp, Homo sapiens
  chr10:102984234-102984785
  hyper
cgcctgcttagctgcgcgccccgcgggcgccgcagctcgggtgggctcagccctggggccgccgcccccagcccaaagggacccagcggggccaggcccagggccgcgaagcagagagcggccggaggtgccagggccgcttcattgggattcatgagcgtgttgggcgggcggcctggggcttcgggcgcggggcgggggccgagtgggggggtgcgcacggcgggcgcagatgcccgggtgaccgacccgccgtggtccctgcgccgcctttgtgccgaggaggcgcgcgcggggacctaatccatcaaattgtctacaaattgtgaagaaaattcaaaaaccatatggtcgccagcgccggcgcgctctgggctgcggagggccgcggccgtgcccgcaccgggagccgcggggggctgggcccggctattgtcgcctgtcagcggccgcccaggcccattcgtcccggccttcatggtccgcgctccgaattacagacccatccatcctaagagagggcaatttttgtcgcccgggaggaaccagcc

SEQ ID NO: 235023 - DNA, 187 bp, Homo sapiens
  chr10:102985773-102985960
  hyper
ttatgggcaagaggcgcctcctcctgctgcttccccctcgcccttcactcttaagcctgtcctgaaaatcccccccaaatctccaaggctagggcgaccggcacgaagagcggcaagaagcccagcctgccgctgcttctcggaaacgggcccaccactcagacacggtcgccgccggttctagtaa

SEQ ID NO: 235024 - DNA, 1091 bp, Homo sapiens
  chr10:102986465-102987556
  hyper
ccacatgaggaaaaaaggcccgaggaaatagaagtcaactgcaataaggccgagggaggcgaggaaggagcgggccggtgcattcgccacatgcagagaaaaatcaaaacagccggagctgccactcccctagaccgcagggttagtgttccccgccctggtttctgtctcgccctcagcaaacccggcagcccgagagctttgaaaacatcgaaatctccgagatttaaaaaataataataaaagaaaggaaaaatcaggctgcggtgggaagaacccgctatataggtttaaatatttatatagaagccatacagaattgcacggcgagggcttccggggcggcggaggccgctggtggcggccggcccggccggccagcctgggtttattgcttcgagagggaagaggcggctgccaggagccgagtccggggccggggacaggggaggaggcgggagttggcagaggaggtcccagctcccctcggcggtccggtccgggaggcgttgggctttcgagcgctaggagcccagggcggcggaagacccggggcgccgctcaatcgtccacgtcgatctcttcgtcttcctcgtcctccgagcagtcctggctgctggccggctggtccgtgagcggagaggcaggcgagagctgcagggcgccagcgcccggggccttcggggcgcctggggggaggaccggagagccgggcctcgacttggccctgccgcagccgccgccaccgccggctgtggcctccgagttctgctcgagttcggccagcgccacgatgtccatctgcccgctggggcccagtttcttggcggactctacgtcggccttcatctcctccaggtcccgcttgagcttagcgcgccgattctggaaccaggtgatgacttgcgcgttggtgaggcccagctgctgcgcgatttggtcgcgatcggcgggggacaggtacttctggtatagaaagcgcttttccaattcatagatctggtggttggtgaaggccgtgcgcgactttcgccgcttcttaggggtctgccgctgcccaaagatggtcataccgtcgcggcctgggagga

SEQ ID NO: 235025 - DNA, 186 bp, Homo sapiens
  chr10:102987929-102988115
  hyper
tcgattccccacgccgagtagccgggctaagagcgcccaggacactgggaacgcaagggagcccggcaaagcaagcagactgcggaaagagcttggccacccttctcctgccaccccccagctctggcctacccagaggtccctgggaaataaggattgggtcccgtcccacatatcttcactccc

SEQ ID NO: 235026 - DNA, 716 bp, Homo sapiens
  chr10:102989240-102989956
  hyper
gctcattaattagcgggccgggggtaggaggagccggctggaattagcctgcctaatgcgcctgtcagtccgggcgctgcgctgcgttcggcccgagctgtttgtaaattacattagctgctcctttattgcacccgaacctcgggcgactgaaaagccaccgcccccaccccaaactgcgagccgcgctcctggcgcacccgcctcccgccggcctagctgcaatgaccgcaccggcccgaaggtctcggtctctccgacccgggatgtggagcccgaaagagtggtgggaaccccagcccgggagggacgcggccgccgctcgggccaggtaggaccaggagcccgggtgggccccgctgccacccagagtggactttgcggagctgagatcaagagcccagcgcctctacctctgaccctcttgcccctcaccccactgcctgggcgacgcgcctggggagagggaatctgaagccctcctgcgctggcccgcaggaggtcagagccggctgcgcagccttgggtgggcgacgcgggaagggggtggaggaccccaggggttgggggagggggctagtcggagagctcagccttctccacgcggagaggcggaggagggaattgttggcggctctggacgcctctccccggcctgattccgaagcggccgccctacctcctccggcaatcttgctcactttcctccggcagcc

SEQ ID NO: 235027 - DNA, 1611 bp, Homo sapiens
  chr10:102995973-102997584
  hyper
tctgaccaaaaaccgttaatggtagtcagctccctccctttcacagaggtctcactactgtcggggggcgccgggcgcaggccgggcatggggcctgagcttaggccaggtggaaaggtggaaggacctagtggggacagacgaagagaccgaggagccgcccgcccggctaaatggacacaggaaaggcctgagtcaggcttctcataataaataaactgcacgtgaataattcagcagtcgcgcgggggccggttgcatcagcgccgccgccgccgcgcggcgcccaattccccgcggaggggagtagccaattaaggcacttgaaaagggagtcgggtggaagatcccccgcccaccagtatcctggatttacccaggtcgagttcagagagcctccccggtcccaaccccctcgggccccatgggtcagggggccgcctgctgggaagtgctacctcagctaagccgctcaggtgtcccgagactccgggcaagggaagacaggcggcgagacggagccagaataagggatgcggacgtctgacctgtggaaaacccagcatctgcagtgcccagccgcacagggaacgtgggcggcgtggttccaagcacagtgaagacgccaggctcggatctgtgctcagagccgggatccctccgggctgcttcgtcctggccaggactttccttgccctgaagtgaggcgccagggaagctgcagggccctccgccctctctgaactcccacgtacttgggcctctcccagcctttcttggacctgtggaagcaattcctgcaggaccagactcccctgtctccccgcggccccctaggtacactccgtaacttccgaaaccttatttcgtttgagcgaaacccggcccctttggctcttcccacttcccacaagtccctgggttcccgatcctgagggattgcattcatcccatctcacacccaccaacgctcaatccctccagttcctccccagccccttcacttccattaattaggtcgactcccttccttcgccgctccctcctgtccccactcagcctccctacacctatgcggcgagcctcgggccaagacctccgccctggctccgccagtcctgcgggggccggcatgcaccagacctcaaaagggatcttcacgggaattccgcatagccagatcccaagcctccagggaggccaccagccctcccccatcttcttcttcctcctccgtctcctttcctcttccctccgcctctacgtatttctttctattcgtttcttttcgtttggtgaggtgccacccgccacagccctgtcccctagggagaggcctggactaactttgccgtcctcgtggccttagcccggactgtgagtctcgagcggcttccgagaggcagctcgggtgtcttcgcagagacagatgaggtgggctggcgattccctagcctcagatggctctgccaccagccagctctgtgatcctgggtaagtctttcaacctctctgagtcttgacgttggtaaaaggcaggagatttagagaaggtgttgggagactaaatcttttcattcgtttgagaaagggagtcgcctgtgttgggac

SEQ ID NO: 235028 - DNA, 245 bp, Homo sapiens
  chr10:102997850-102998095
  hyper
gccacacagtctgacgttagacgggtgaatccagccctcgcagggcctggagtgacctaagccgagaggagctgggctgaatctccaggcgttcctttctttctgccctaggaaagctttgaaattcttattttcaggtaaacgattttggcagtgcccggagaaagatagaagtaagacctaaagaggaactttccgcatgttatgggagagcccctggggcgaggaggcgagggcagccttcc

SEQ ID NO: 235029 - DNA, 53 bp, Homo sapiens
  chr10:102998373-102998426
  hyper
gctcccggtgaccccgtccccagtgccagcggtggggtcgcctgtggcggccc

SEQ ID NO: 235030 - DNA, 144 bp, Homo sapiens
  chr10:102998648-102998792
  hyper
ggactgagggcgccgctgccacagcgcctgctgccggcgggtcgcgggaagcgtaggccctggccgccgcgctccccgcgcgggtccaacgccctgggtgcccttctcgcctgcgccttgaagcccccacgcccatcctagcgc

SEQ ID NO: 235031 - DNA, 472 bp, Homo sapiens
  chr10:103043977-103044449
  hyper
ctcattaccctggcggagccggctgagagccgataaagccgagggggagaagggccgacatcagggtaatgggggagcagggccattgaggagctggagccgagccggggaccgctccgcgcgcagctggagcccggcgagagggccgcggaaggggggtgcgaaccggggccggaccccggggaggagccgggaggcgagcggcgaggggcactgcgcggctgggtctgccccggggtttcgcactgcgccgcgggtcgaagtaccgcgagttggccctgactgtctgcaggatgagggtgtcgaggagggttccaggccagcgtgcctgcctcgcctccagcccggggtaaggagatccacggaggcctctgcgcctaaactcaggtggccagacagagttggggcgggaggcgggtatacggaaaggacacccttcccctctatgggccccgcccgctgtgcaagggtg

SEQ ID NO: 235032 - DNA, 492 bp, Homo sapiens
  chr10:103052147-103052639
  hyper
ccgccccctggagcgggagcatttgggttgagctgcgcctgtcctataaatccacatataattctcctctttcctgttcagctaaggaaaataaacgtgtaaggctgtttctgggagcccagctcagggaccgctctaaattctcctcttattgagtaggggctggaaatcattcagctcggcggcgcgccccagaaccaccccctacccccgctccggcccgcggccgcgcccgcgcccgccgcgcacacgcacgcgcgcacacggaaggcaggcgccgggtatataaatatctccagctctccccatagccgggcagatttattccgctgccaagcctgcagaaaattgacttgttcatggaggcggctattgacacatcaccggggggagggttaggggagaaagcagtggagccggcgcccctccattatacgttaatgtaatcagcagtgtgcgaaatgactgcgcggaaaatagcatcactgacat

SEQ ID NO: 235033 - DNA, 225 bp, Homo sapiens
  chr10:103326426-103326651
  hyper
ccccacccccaccccgtgccggtaacgggagccgatcctgctccgcccgccccgggagggagcccagccgctgccgccgggccgccaatcacgtcggggcccaagacgcccagaccgaggagccgtgaaaccacgcggcccttctcggcggaggaacaaagccctgcgctcagcggccgcagggggctcaccgggcgtctggcctgcctgcggccaggacgtgca

SEQ ID NO: 235034 - DNA, 138 bp, Homo sapiens
  chr10:103329326-103329464
  hyper
cgtccaaggtcgacgggcctggcccagccataaatcacggcggctggaggtgggctacaggcggagcgatggtccctgggatgcagtccagagctcagcccccagctcagcccgggaggaggcgcagacggcctcagc

SEQ ID NO: 235035 - DNA, 439 bp, Homo sapiens
  chr10:103347719-103348158
  hyper
gtggggagccctccgggaatggaggagtctcgcagctgcgggtgaagtcccgggcaggtgcggtgtactcgccgtgtacgcagctggcgcaggccagggaatcccagctcggggctagaagaaagctggagtgcccgaccccggccccaagagtctctccaacccccagagtcggtccccgggtggggtcgactactggccaagctagtcacccgggggtgggcaggaatagaccacttaccagcagagccaatgagagcggacgaaggggggaaggagggcaaatggccagaatagcttccgagtcagccggaagtgaccctctggaacggttgccatggcagcggctgggcgtgctgcttagcaggggaaagatggcggtgacgggctggttggagagtctgcggacagcccagaagactgcgctgctgcaggacgg

SEQ ID NO: 235036 - DNA, 47 bp, Homo sapiens; identical to SEQ ID NO: 202238
  chr10:103454953-103455000
  hyper

SEQ ID NO: 235037 - DNA, 184 bp, Homo sapiens
  chr10:103535518-103535702
  hyper
agcaagtgcaacagcctgtgggagacaaaagcgggcgggagagagaggcgcgggtgaggcgaggggcgcggggggcgggtggcggggcagggcggcgcggtactcacaggcagctcagcgcggagcgggggctgcccatggcgcgcggccccggggcaccgagagcccggcgggtcacgccgtc

SEQ ID NO: 235038 - DNA, 198 bp, Homo sapiens
  chr10:103535882-103536080
  hyper
ggagcgggcgggagggtcacgggctggcggggtgggtggggaggtgggagggcggggaggggtgggggcggggggcgccgcaccgggcgcgaggggggagcgcggggcgggcggcgggagcccgcagcccccggctgggaactggggcctggatgcagcccggggcgggggcggggcggccggggaggggcggccgac

SEQ ID NO: 235039 - DNA, 32 bp, Homo sapiens
  chr10:103536380-103536412
  hyper
cgccgggcccctgggagcggccgctaaccatg

SEQ ID NO: 235040 - DNA, 140 bp, Homo sapiens; identical to SEQ ID NO: 202240
  chr10:103543156-103543296
  hyper

SEQ ID NO: 235041 - DNA, 31 bp, Homo sapiens
  chr10:103575733-103575764
  hyper
aaaaaaaaaaaaaagccaggcgcggtagttc

SEQ ID NO: 235042 - DNA, 31 bp, Homo sapiens; identical to SEQ ID NO: 202241
  chr10:103576004-103576035
  hyper

SEQ ID NO: 235043 - DNA, 257 bp, Homo sapiens
  chr10:103600530-103600787
  hyper
cttgtccacttgacggcgactatccccaccgcaaagcagctccgtgcgcatggctcctcgcagccacacgggggcgcccccgccccggcaacaatactcagggccggagggactccactgagatcccagtcgggggaccgagctcagggctagccagccaggctccaaccctctccgcatcttctcttggcctttctctcttccgctcagacagggccgctgctaaacgcggcctttcccctcggaaccgcactgcc

SEQ ID NO: 235044 - DNA, 48 bp, Homo sapiens
  chr10:103603316-103603364
  hyper
gccccgcatggcccccggcgccccgctcccgcccgggccgtgggaggg

SEQ ID NO: 235045 - DNA, 214 bp, Homo sapiens
  chr10:103824903-103825117
  hyper
ccgggccactgggcggcgtcctggggtctggggaagggcctccccctgcgccgagagcgtgcccgggcgggcgcggtccaggcgctgagcccctggggcgctcccgtggctcctcccccggcgggcgtgtagtgtcggcccagcgactgcgggaggcatcccggagccggccgggcggggcggagtcgacgctcggcccggcctctgctcacct

SEQ ID NO: 235046 - DNA, 116 bp, Homo sapiens
  chr10:103880250-103880366
  hyper
agccgggcagggccgggctttattaatatgctaattgtcctgctagtgggaggggagagccgtgtcaaagtgacccgggagagcgcgcagcaagcgacgacgtgcgtgcgccgcgc

SEQ ID NO: 235047 - DNA, 174 bp, Homo sapiens
  chr10:103892295-103892469
  hyper
agggcggagaacgcgacattttccgattaagtttgcagtactgccgcaatatgggattaggtgaggattagcgcttggagcgcaagtgcccactagggggtggtgtttcaaaacatatacaggcccacttggccccacttggactaaggtgaaaggaacgtacagcaggtagaa

SEQ ID NO: 235048 - DNA, 199 bp, Homo sapiens; identical to SEQ ID NO: 202242
  chr10:103912112-103912311
  hyper

SEQ ID NO: 235049 - DNA, 896 bp, Homo sapiens
  chr10:104000943-104001839
  hyper
caggtctgcagtccgccctcccattctcgacctgttcccaaggcaccggagttcagctgccccaggtctcgttttagggattccaaggtccagcaatagctcctcggccccatgagcccctgtccttagaatggtcaaacactcacagtgcgtcctgcaacaggcagactcccagtagcggcggctgcggcggcgatctagagggcaggcaggggccaggggccgggcacccggccggagtgggggccgcccccctgctcccgggccgcctctccgctcgggcgctcctggactctcggagggagtgagcctcaccgcgtactgccacccccagccggcgcccattcactttatggcagaccagggcgcccccagcccgccgcggcgagccgcgcgcgtcaggccccgcccctttccagctgccctgctggggctccgccctttccagctgtggatctccaggccccgcctttgagggaggggtctggccggcgagacgccaagaaccccgccctctggccaatcagaagcgctcttcagcaactcggccgcgcccctccccacgtggcagagaccgcgctccggctaggacgcttaggcagagccaagtgggcgagagtagagtggtcccggtagccacgggtaaaagggatcggctggcagcgaagtgggttgggccgctaccccgaggaaagtggatcggcgccaggtgggaaggcgcacggggccgccgggtctcagcgctcagacttctctgccactcaagtttcgccgattttctccacttgtcgctgtccgtctctcctcccttttgtctctgttccaatcctcccacgtctcgcctttctttcctcttctttctcctcagccgcttcgctcctgctgtttaccattct

SEQ ID NO: 235050 - DNA, 31 bp, Homo sapiens
  chr10:104005226-104005257
  hyper
ctatgattggctgcgcgcggcagggctcgcg

SEQ ID NO: 235051 - DNA, 38 bp, Homo sapiens
  chr10:104170778-104170816
  hyper
ttgttttccggctcctgcccgcccgcctccactcacat

SEQ ID NO: 235052 - DNA, 217 bp, Homo sapiens; identical to SEQ ID NO: 202243
  chr10:104178852-104179069
  hyper

SEQ ID NO: 235053 - DNA, 99 bp, Homo sapiens
  chr10:104179457-104179556
  hyper
gcgccagatttgtcgcactgcgcaggcgcagaggcgcgaacaaagaggggagggggacgaggcgcgcggccggaggtggtgcgcgctcacgtggctcta

SEQ ID NO: 235054 - DNA, 292 bp, Homo sapiens
  chr10:104181705-104181997
  hyper
tgcgggcaactgagtcgccgggcgcttggggctttggccgagggctgcccacgcctgcagcgcctgtcgctcgcgcactgtgactgggtggacgggctggcgctgcgcggcctcgctgatcgctgcccggccctggaggagctggatctcaccgcctgccgccagctcaaggacgaggccatcgtgtacctggcgcagaggcgcggcgctggtctccgcagcctctctctggccgtcaacgccaacgtgggggacgccgcggttcaagagttggctcggaactgcccagaac

SEQ ID NO: 235055 - DNA, 111 bp, Homo sapiens
  chr10:104192423-104192534
  hyper
gcccacaacagggcggagctcctgctctaattctctaacgtcccagggctatggacgggctcccttggcggccagttttgttgcgcgtagggaggcgttaggcgtgaaggt

SEQ ID NO: 235056 - DNA, 111 bp, Homo sapiens
  chr10:104210002-104210113
  hyper
gcccttctcccaccgtccagcaataaagcgagagaaacaagtgcaggaaactggccggcagtcatgggagaagccaaaaagacaggtgagcagcgcgtccgcctcccgcgc

SEQ ID NO: 235057 - DNA, 46 bp, Homo sapiens; identical to SEQ ID NO: 202244
  chr10:104220986-104221032
  hyper

SEQ ID NO: 235058 - DNA, 266 bp, Homo sapiens
  chr10:104221427-104221693
  hyper
gcagaaaggctctccgggggtctggaggaaagggatgcagtgggtcaaatagctccctggtggtctgggatcgagggatgcactggtcaggtcgggatccgtgccattagcataaaggcatttaaccctggtggcacttggggagctttgaaaaacaccgatgctgggcccgcccgaagagattccgatttaactgttctgggtgaggcctgggcctcggtattattgcacagctcctcaggtgattttaacgtgcaggcggtggg

SEQ ID NO: 235059 - DNA, 142 bp, Homo sapiens
  chr10:104262487-104262629
  hyper
cgccggttcagggcggcgagggagcggcccgacctcgcctctgaagaactacaatccccagcaagctttgcgcctgggttagcgatctagcttgctttgttgcccgcctagtttaagattgggagtcgcatttccaatgcgc

SEQ ID NO: 235060 - DNA, 120 bp, Homo sapiens
  chr10:104263674-104263794
  hyper
tgcgccggcgccccgccccccttagcgccccgccgccccgaggcaccctctggcagactcggcggcggcgacagcctgggcggacagtgcgccgtgcgcaggcgcggagctagacctcgc

SEQ ID NO: 235061 - DNA, 45 bp, Homo sapiens
  chr10:104474158-104474203
  hyper
cggggtgcagctccgctttccccagagtgcgcaagtgcgctaagg

SEQ ID NO: 235062 - DNA, 64 bp, Homo sapiens
  chr10:104474416-104474480
  hyper
gtggcatttgtcccgggaccaggtaaggggccttgggacaatggcgctcgccctgtctacctcc

SEQ ID NO: 235063 - DNA, 235 bp, Homo sapiens
  chr10:104613987-104614222
  hyper
tgtcttttggccccggcgactcaccatcgtcagtgcgcaaccgttcgctaactgaaatgatggcgactggaacgccagagtctcaagcgcggttcggtcagtccgtgaaggggcttctcacggagaaggtgaccacctgtggtactgacgtaatcgcgctcaccaagcaggtgctgaaaggctcccggagctccgaggtgagctggaagtggactctcccggcctgatagtccgg

SEQ ID NO: 235064 - DNA, 164 bp, Homo sapiens
  chr10:104678001-104678165
  hyper
gtgattggctggtcggcctgcctctcgcgggagcagccggcgctcctctccctccctctttccctcccgcgagcctcggggttcctcagctggctgaggtggagtcagtgtcagtcagggaggcgaactgctgagcactggccgcggacgctccgttgcagtct

SEQ ID NO: 235065 - DNA, 50 bp, Homo sapiens
  chr10:105025610-105025660
  hyper
tccattctcagaatcggtgaagtctataaagcaggcgccgacaccaggac

SEQ ID NO: 235066 - DNA, 288 bp, Homo sapiens
  chr10:105037816-105038104
  hyper
ggaagaatggtacaagtccaagtttgccaacctgaacgagcaggcggcgcgcagcaccgaggccatccgggccagccgcgaggagatccacgagtatcggcgccagctgcaggcgcgcaccatcgagatcgagggcctgcgcggggccaacgagtccttggagaggcagatcctggagctggaggagcggcacagtgccgaggtagctggctaccaggtaagggccggggctgggcgtggggaggggtgccctgccctcttccgcgcgtaccctcttcctctggtaaa

SEQ ID NO: 235067 - DNA, 94 bp, Homo sapiens
  chr10:105041589-105041683
  hyper
ctgcgatgctcagacgagctaagacgatgctcagcgtttgtcttagctcctccaggagagaccccagctggagctgggcgtgccgctctccggt

SEQ ID NO: 235068 - DNA, 202 bp, Homo sapiens
  chr10:105110864-105111066
  hyper
gcgggagttcggccggcctcggacgccaccactgcgcaggcgcggcagcctgaggggctcgccgggaaatgtggtttagcggccctcacctccgcggggcgcaaaccctgcagctccggggcaggctgcggggcgcgcgggccgcactttaaaggaatctcaccagattttctccttggaaggggacgctctcttcgccgcc

SEQ ID NO: 235069 - DNA, 120 bp, Homo sapiens
  chr10:105156273-105156393
  hyper
attcggcctaatgcgacgattggctatggctccaaatcccgcccttccgattcctgtctctaggtcacctccgcaacacagcaacggaagtagggtgttgagcccgcccacacttccgga

SEQ ID NO: 235070 - DNA, 1187 bp, Homo sapiens
  chr10:105253254-105254441
  hyper
tccggggagctcggcgttctcgcggccctgctccccttgttttcaagtgcaagttccatgtttccgtgctgggaataaggccagccccgggtgccaccatactcgcctgatgtcttaccccgacccgcgccgccgagagcttgcggctacgggaacgcggcgcgccccggggccacatctggcctagcgggcgcgcgcgtgtcactaagacgctcattcaccggcgcagctgtcaccataacaaccggagcgagggaatcctggagactgccggggcggggggcgggggcggcggtcgcaggagggacccggcgcgggcgggaccgcggcggtcgggggacaccagctgcgtcggagcgcccagaacgccccgcgctccgccgagccccgctccacgcagacccgcgggcgggagggagccacgcacatcgccgccgcggccgtctccgcggggcggtaaccgagcctgcctcggagccgccgaacgcccacgccagcgaccctgactctatggccccgggggagcgcgccggagccgccgcgccgcccacccccagccggaaccctagcgtcccggggagcaagcggggagccccgggcgtccccggccccggcccagggccctgcttgtggcccccgctcccgccacggggcatgggaggcaggtagcccagcctgcgccaggacacccgtggcgggcggaacccgccaaggaccgcgaagtccagagaaaggaagctgaggagctgcccgcccgcccccggctgcagccccagcagggccctcccccggtggcgcgcacccgcgcgcgcacactcgcacaccgcacctcagcgcctgcccggcctcgcccccacccgcgagcgccgaacctcctggggccggatgccatgggtaacaacttctccagtatcccctcgctgccccgaggaaacccgagccgcgcgccgcggggccacccccagaacctcaaaggtaggctccccggccgagcgctgctggaggactggggcgcaggtggagggccagggaggtgtggttggggagggcgggcagacgccacctgttgtgcgtgtctggaggccggagatgcacctctggccgtggagtgggctgggggtggagggcagccggcgatgatggtgatggaggatggcgtcccgcggggtctgcgcagttctgtctgc

SEQ ID NO: 235071 - DNA, 266 bp, Homo sapiens
  chr10:105344360-105344626
  hyper
cggcgcgaggcggacgacgcgcgcctctcggtgagcctatgcgacctcaacgtgccgggcgcggacggcgacgaggccgcgccggccgccggctgccccatcccgcagaactcactcaactcgcagcacagccgcgcgctgccggcgcagctcgacggcgacctgcgtttccacgccctgcgcgccggcgcgcacgtccgcatcctcgacgagcagacggtggcgcgcgtggagcacgggcgcgacgagcgcgcgctcgtcttcac

SEQ ID NO: 235072 - DNA, 369 bp, Homo sapiens
  chr10:105615413-105615782
  hyper
ctggggaggggccggcggctccccttcgccgctctccggctcgggctccggggggatcggcgctggcggaggctgtgggcgcaggaggcggaggcagggcctggcaggcagggaagggaagggagggaggggagagaggggaagcgcgcggggaggggctccgggccgggggaggggctcggggcgacggggagggggctgcagcccggccccagtggcaggggcgggccgacgagcccccacccgagcccagcgcgcagccagcggcctggcgcagcaccgggctagttcgctaggcacaaaaactcagggtggcttcggggggagagggagcggggaaagtgagccccgcgcgcccccatcctggct

SEQ ID NO: 235073 - DNA, 256 bp, Homo sapiens
  chr10:105727531-105727787
  hyper
tcaagttggggagcgagaagaagaagaagcagtacgaacacgtgaagagggacctgaaccccgaagacttttgggagattataggagaactgggcgacggagcctttgggaaagtgtacaaggtaagagggggaaaacgggaagttgtactgcgaaggtaaaacagccactggcctggagtggcgggaggacttctgctcccctggtccttatcctgtccttcttttgactgttacggttcgatgcaactttactt

SEQ ID NO: 235074 - DNA, 376 bp, Homo sapiens
  chr10:105991885-105992261
  hyper
ggggcaggaggttccgcgagacccagatcggtcgcggggccgtgaacaccgcacctcacggacaaggacgcgccgccggcggagtgggggccttcgtcgcgctcccggccttgcgccatgggcagtgttttcctcaggcgggagcaggcagcgcacgcagcaccccagggcgggtcggttacctttccgccgccgcggggctgcgggccgcgacgccgctgctgtgtacacccgtatcccggagaccgtaagccccgcgcccattggctctgcgctttggcccgctcccttctgagccgagcagattggtggaaggtctgccgctctcggccaatgggtgagcggcaagccaagcgaggggcgggccccttgctgt

SEQ ID NO: 235075 - DNA, 418 bp, Homo sapiens
  chr10:106014281-106014699
  hyper
acaggctctgaagtcgtgaagccttgggacggagcgggtggtgcttcgaggtcagtgtcacgggagggaggtcagggtcagggtcagacgtggagccccgtggagtgcggagtggtgaccccttcgttcgggggcggagggatgactgagcatttataacttttgtgtatctccccgtgggtgcagcccttggccagcgagatgctttgacacagccccttaagatgttttaagggctatcccataaagccgggaaggcacaacgggtggagctggcggccgccgggggcaggcacttttgagctaaggaggaagcgggggagggaaggagggcgggaaggacgcgccacctacttcctgaatcccctgcaaaccccagaggagctcggcctgcgctgcgccacgatgtccggggagt

SEQ ID NO: 235076 - DNA, 158 bp, Homo sapiens
  chr10:106014939-106015097
  hyper
ggtcccggagggctcgatccgcatctacagcatgaggttctgcccgtttgctgagaggacgcgtctagtcctgaaggccaagggaatcaggtgggcacccaggcgggggacgctccccgagccgtccgggagcctgctgcaggcggcggggtggggtg

SEQ ID NO: 235077 - DNA, 253 bp, Homo sapiens
  chr10:106034508-106034761
  hyper
ccagatcgcttccccgtgccccgccagagcccagtagttcaaaaattaaatttggggcaaggggtgcgcgccagagcgcagctgtttctggagcctgcggcagcggtggcgagccacagggcggcgaccgtgagctccgggagctgcgcaaaccacctggagaccatgtctggggatgcgaccaggaccctggggaaaggtgagtgctctccatggggtccgcgagctgggggcgccgcgtgacagaaaatgt

SEQ ID NO: 235078 - DNA, 348 bp, Homo sapiens
  chr10:106098040-106098388
  hyper
gaggacggctccagcacaggctttgcgcgcaggtcgagggccgaggcgccgctgcttgcaggcggctgcggtggagcttgcggcccggcacttagaggggcgcgggcggcgatgcccccgctggctcccaccttctggcctgcagcggccggctctactgaacttcagagttactcatttcctggatgtcacaaaaactttttcctccttataagaacaaaacacccgcctctacccgcggccccggaagctccttaaggaggaccgtgtgggtttcggtggttgggcccaggatccgccgggaagaccttcccagtgagcccccagaaacttccccggcacggcaga

SEQ ID NO: 235079 - DNA, 138 bp, Homo sapiens
  chr10:106098568-106098706
  hyper
ccacctatttagtctcttggaggaaaatataactctagacaaaacgccagcctttttctcttttgcagcttgaaaggattaaaatagcttactaccgtttttttttttttttgagaaggagtttcgctcttgttgccc

SEQ ID NO: 235080 - DNA, 78 bp, Homo sapiens
  chr10:106113634-106113712
  hyper
ccgcccccagagagcatcaggatggctgaggtcaggagtcagcgcccctctgtcgcctttcccttgacccctccccat

SEQ ID NO: 235081 - DNA, 724 bp, Homo sapiens
  chr10:106398565-106399289
  hyper
gccgcgggaagctgcggggactggatggtgcacctccccagtgcgcataggacttgggagaccacactcctccgggctgtgtgagcctcgggtccgcccagatctcttatactgtggcacctccgcccagagcctgaagagaagagcagcaccgcgtccctcccgaaccccgagcttcggctcgggctgcagcgccgggcctcctccggcaggggcgctgggaactcgcggatggccggctctcgtccagcgcccgatcccgcgcccacctgggcctgcggcgctggaacttttcttaggaatacccgctactccctgtctttggaaacccacagatgccaggacccgcaccattctgggccggacgttgtcgctggcttggttctttggcccagcctcccccgctgctaattgccattttggcaccgggtggaaaggcaagttcaagagggcgggggctctcgggaatcgctggatgtcttcttccttggccagcttagattctcagtcgcctcttctgcctcctccatccctcttggctcttacctggcgccctttcgcctcctcttctatctccctcttccttttgcaccattctctcgccccttttctccttcatcttgtctttcctctctccccttttccctctattttctccttcattccttcctctcacctttctttcctctccgcgcattcccctccctctcgctccactttaacc

SEQ ID NO: 235082 - DNA, 111 bp, Homo sapiens
  chr10:106399689-106399800
  hyper
tgaaacaattgagtccgttcagaaacggactggggagagtgagggcacgacctcaaaatcctaggcagcaaaatgaggtctggatcctccctggaagaacagacatctcga

SEQ ID NO: 235083 - DNA, 96 bp, Homo sapiens
  chr10:106400700-106400796
  hyper
ccggcttgattttcatattttaagaagattttcttattacctttgattactcctttttaccaaatttctggaggagctcagtggggaggattgggg

SEQ ID NO: 235084 - DNA, 1316 bp, Homo sapiens
  chr10:106401516-106402832
  hyper
cgcctgggccactgctccggccgatggttccagaggaagccgtccccttgctaagggttcccgggaggaggtgaaggcgccgcgggctggggggtcggcggctgaagacctccggctgcccagcacctccttcgcgctgaccggggactcggcccacaaccaagccatggtgcactggtcgggacacaacagcagcgtgagtacccacccggcggcgggtccgcctgtttcctgacaccgaaggggaatgggggggtgggtgggagcgagggacagatagttgctcgggggtcgaggcgggggacgcctcgacttttcgagataacaggtttgtccgattccccccacgcccccaacaggttaacggagtttgttgttagacgctgtgtgtgtttgtttactggagaccctaggcttcggccgccgggaggggagtggaggaaggggcttcttaaagatgagtgggggagggatctgtgctcactttctccaatacttggcttggagggtcagttttcctgtttgcggggtgcttgaattcttggatgagaaaaagggctgacttggggcgggagccgctgaacagaccgattcctgcggctgccgggctccccctacccccaccccacccccaccccccctcccgtcacgcgaaagggaacccggaaggccattcggactcccagcctcctgctcgcctcggggtcgctgctatccgctccaggcgcgcagtcctccagcccaagagggaggctcggccaagtcggcccccagccttggccttcaggtaaccccggttcctccttcaaagtccagggagcggccctggaaagccgtagcagaggccgtaaaaaaaagtttaaagcgtgaagcgaaattccacacccatccagcgctcatgccacaccgctcgccctcacgcacgcacaggcacacggaagtcgctcagcagaaaactctcgacttcaccattgcgtcctgcgccacaaacggctccctgagcggagttgggtgcctgagcttcctgcacacctctccacccgcttttccccgccaccgggttctcctggacaaggatgtaccgagaggtggcgtcgttgagcccggtctggcctactccggcattccgaactgggcgcccgactgagcatcgcgcctgcctggcagctgcagcggcccgcagcgcgtgcccggaggggctccccctacctcgccggcacccagcgctgtgcagccaagcaaagaaaaggcgggggacaggttcccaccatctccccgacttccctccctcccgcggtccctactagagccagatt

SEQ ID NO: 235085 - DNA, 1210 bp, Homo sapiens
  chr10:108923767-108924977
  hyper
gtgctgagtctcccgtcagcgcaaacgtggtgctggtcagtctcagctcctccatccggaagcgggtggctttgtccgggtcccgctcccgagtcccaggctcctgctgccctccatctcttagcactccccgggggctccgactcgcgccctctccccgttctgccttctcctgatccgctccgctccgtctcctccggccggagcgtgcagcaaccgccatggatgccccagtgccccgagcccgctccagggatagcgctcggtccccgggggccactgagaacaggggacgcactacgaggggcaggggcgtggcaggagccctgcctggccgcccctggtgggaaaagcccctaggggtcgaggccgagcgtggagcggagctggggtgcggcgaggggcagcaggagccgccgccgcagacgcccggggcgcagaggatcaagagccccgcgccggcgaggagcgcgctcagccgggcttgggagccgccgccggcgccaacttttcccatcgcgggagcgaagagcagcggagagaggggtcccagaacgaaggtggcggcacgagctctgcgctggcggctgtggggggccggcgctcaggaccccaactccatccaagttgcgccgcggtgggggcgggcggaggcggcgccgggcaggtggcggccgcttgcccgggctgggcttgtgccgagcgcgggtccggacggagcgagccgccgccgcgcgggggtggagctgagctgaagtcactggcggagcgggcgcgggcgctggcgggcgacgcgggagggagggcaggcgctgccgggactccgggcgccgcgtcccgcggccgagctgcgctgcgcaccgggtctccgggcgctggaggcgccgccggcgacctcccctcggcctcgcaggcgctgccgccgcctctccccgccgcccactctgcgcccccgcggccgcgggtcccggcgctgagtccgcgcaccctgcccgcgggggcggtcgaccccgggctcccggagcagtcgatgtgtcgggagcttcctattcctgctttattgtttctatgagtctatgttgctgtttccttttttctccgtctttctggtcttttctagttgaggagatagggatgggtgggcttctgctccttccctctcttatgcttcctgagttggcatcttgaccttacccgcagcagagcctgt

SEQ ID NO: 235086 - DNA, 969 bp, Homo sapiens
  chr10:109674176-109675145
  hyper
ccactttcacactccctccccgcttcgctccccgaccccaccccatcaccactctgctactcgcaacgctgcctggtcgcacccaggaaccatctttgtgggtggggttcctcgtctccgcggacaggctgctagtgagccgcagctcctccatccggaagccagggatcttcatcttgccgcggagttccatgctgccgtcgcccccagtcttcagggactttgcgctcccgcaggctcctgctcacctctcccatcgttgggcgctggtggcaccccaggaggagagaggagcagcaggagcccggtctcgcagtgccggcacggacagtactctgggggtctgggccgcgtgccacgaggagcagaggagccaccggagccgcttccgcagacgccctgacacggaggacccagagcgccgcgccgcgccgccgaggaacgcgctcaccggcgccaaattttcccatcccgggagcgagggcggcggcgaagggtccgggacccgaggtggcggcgcggggctctgcgcgggcggctgtgggtgctggagctcaggaccctaactttagcgaagtcgggccgcggcggggcgggtggaggcggcgtgggcaggggctgccgcaggtgcggagtgaggcgccgccacacgggcgggggcaggagtctcaggaactcggcagccgccagcagagcccggtgcgggaccgggagctgccggggcctcagctccgctctccccacagctctccgtggctgcaggttgaggtcgaactgcaagcgccacggaccctgcctgctgtttactgcgttttcactggagactccagcaaatgtcctggagaggagagggattcctgctctgtccattttagtctctacattggcaccttggtgtaaacccacagcagaggctgcgtgtcctggctgagaaacacagaagggcagcggggacggaggtggggccgt

SEQ ID NO: 235087 - DNA, 354 bp, Homo sapiens
  chr10:110226004-110226358
  hyper
cacttttcccaccgcgggggcggagaacagcagagaggggtcccagaccgaaggtggcagcgcgtggctctgcgctggcggctgtggggggcaggcgctcaggaccccaattccctccaagttgggccgcggtgggggcgggtggaggtggcgccgggcagctggcggccgctcgctggggctgggtttgtgccgagcgcgagtctggaaggagcgagccgcagccgcgcgggggtggagccgaactgaagtcactggctgagcaggcacgggcgctggcgggcacgcgggaaggagggcggccgatgccaggtctccgggcgctggaggcgccgccggcgacccccccctagg

SEQ ID NO: 235088 - DNA, 751 bp, Homo sapiens
  chr10:110671595-110672346
  hyper
cctgcagatggtccgcttcagctactccgttaggaggcgggcagttttgtctgtgtcttactccttccgtccagggcattccgcagactcctgctcccttcttcctctccacttgctctcaatagagggcgcgctgggcgaagtaggggcgtggcaggagccccgctccgcggatccaggttgaaattcctccctcctggaatccgaccgtgagcatttctgagcggtggtgaggaggaggccaccaagacacctccctcccgctgtgcaaaggaacgcaggagcccggcgcaggtggtgggcttaccgcgcgcacgcctggctggagaggtgacgccgctgtctgccaacctttcccagcttttcccacgattggagccaagagaggtccccggggatctcagttgggcaattgtaagggaaggagctcaggacactgacttcaagatgaagggggaggtcagcgaagacagttctagggtgggcggcggccgctgacagagcaggagccacagccaccggggcttggagataggagcaagtcgcaggcggagggggctgcgggctggctgcctgggcagcacaggacttgagggagctgcggggactcctggagtctcatcaggccttccagtcgctgtggggaccccggctgcgcgcggatcgcctgcgccactgtccccactgacccgcccgccgggtttgccaattaccagcgccacctggtcccgcacccaaccccacattttct

SEQ ID NO: 235089 - DNA, 830 bp, Homo sapiens
  chr10:111216353-111217183
  hyper
agagagtcgcctgtcggagcaaatgtgacgctgattggcttcagctccccagctgcaaatgggtagctttgccggggtttctctcttgagctccaggcactctcaaggatccggttcatgtcttcgccctggcccgcttggtatagggggcgcacaggaagaggccaagaagtggaaagaacctcatctcgatgtcccaagtgacaaagcccccggggctcggggctttggtacagaggagcagcagaagccgccgccgcagacgcccggatgcggaggacccagagcgctgcgcagctgaggagcacctggggagccaccgccggcgccaacttttgccatcccgggagccatagcggcagagagggggtcccggacccgaggtggcagcgaggggctctgctttggcagctgtcggggctggagctcaggaccccaactccagccaagtcgggccgcggcggggcaggcgtaggctgcgcaggcaggggtggccgcgggtgctgagccagtcgccgccgcgcaggcgggcgctggagtctcagctacctggcgcgaccgccagcagcacccagcgcggggccgggagctgctgggggcccaggctccgctctccccaccgctctgcaccgctgccggctgcggacagacccgatgcgccaccaccaccgcagttgccacgacccccatggaatcgctggcgcctccgctccggttctctaacccggcgcactctgggatcccaaagcttgccgtgggttggaggcttcctactctttgtgcgttgaggctttgacctgacccagagcgcagcttatgccctggcttgg

SEQ ID NO: 235090 - DNA, 149 bp, Homo sapiens
  chr10:111683213-111683362
  hyper
cacgtcaggggagcgcagaccagctgatcacccgcggaagggccggcgcgaaggaggcgcgagagccggcgggcgggcgggcgggctagcgccgggtcggccacgccctcgcccgtggcgggcgctggcgccgcggccccgcccacacg

SEQ ID NO: 235091 - DNA, 56 bp, Homo sapiens
  chr10:111767116-111767172
  hyper
aagtccaggccccacggggggcgtgcggaggttgaacctttgcagtggcctcctac

SEQ ID NO: 235092 - DNA, 98 bp, Homo sapiens; identical to SEQ ID NO: 202255
  chr10:111768340-111768438
  hyper

SEQ ID NO: 235093 - DNA, 48 bp, Homo sapiens; identical to SEQ ID NO: 202256
  chr10:111968983-111969031
  hyper

SEQ ID NO: 235094 - DNA, 46 bp, Homo sapiens; identical to SEQ ID NO: 202257
  chr10:111969325-111969371
  hyper

SEQ ID NO: 235095 - DNA, 249 bp, Homo sapiens
  chr10:112064510-112064759
  hyper
gtggggctgggggcggggcggcgggaaggggtcggggcaaatgagcccagtggtagtggcggtggcagcagcagcagtagcagtagcaggaaaatcaccgcgacgacagcaaggcgacccggtctgaaaaggaagaactcggtcggcggcgagggggaagggaggaacgccgggcactggaaggaggaaaagacagagacggtgaagtctcgcgagaaatacaaactctcgcgcgaggtcgctcgactc

SEQ ID NO: 235096 - DNA, 1445 bp, Homo sapiens
  chr10:112257149-112258594
  hyper
tataccccacccctcgaggcaaatctccgacgtcctctccttacacgcgcagacctcggtagcgacgggaatccgttccggactcctctggggccctggccggctccctcggccctgctcagcgcggcgcgggcgggttctcagcccacgtccgtgaagctgaaggccggatcgtgcggcgccgccccgccccccacggcgcttcctcctcggtccgcaccgcgagggtcaccgcggccccggagcgcctgggacactcgaccggcagccgcgggtgatgcgcgagtgagtccctcagcgaagcgcggaagagagaacgaagaggcgccttccacttcctctcgctctaacgccggcacccgccccgcgcgtccctcgcccccgctgccccgccccctgcagggcgtggccacggcccgaggggcggggaaacacccatatttggccttatatgggcagccgcgtcacggacggcactcattcacataaaacgctgcgcggccggcggaatccccggcttctagggcggcgagcggccgggctggctatcgagcgagcggggcgggaacgcggagttgcgccgccgctcgggcgccgggctccgtcgcggccgcagccccgcgggtcgccctcccgtgcctcgcccgcggacaccctggccgtggacaccctggccgtgggcacccgcggggcgcgcggcgcggggccgctggccggcggcggcggcggcatgaaggtcacgtcgctcgacgggcgccagctgcgcaagatgctccgcaaggaggcggcggcgcgctgcgtggtgctcgactgccggccctatctggccttcgctgcctcgaacgtgcgcggctcgctcaacgtcaacctcaactcggtggtgctgcggcgggcccggggcggcgcggtgtcggcgcgctacgtgctgcccgacgaggcggcgcgcgcgcggctcctgcaggagggcggcggcggcgtcgcggccgtggtggtgctggaccagggcagccgccactggcagaagctgcgagaggagagcgccgcgcgtgtcgtcctcacctcgctactcgcttgcctacccgccggcccgcgggtctacttcctcaaaggtgagcgctcggggtccctgccacgctcgcccctccggcgcccccgggtcccctccctgcgccggggcgccctcctacaccctgggaccgggagagtcaccacctgcaggagtctgcaccctgtggcttgttgtgcgcttgggagggcactgcaaatgtcagcactcagagctccccctcttccccacccgcgttcctcgaaagcgcccggcagcgggtctgcccggtggtctgggtggagttggttatgctgcgggggctgctgctgtttagcagtttgggggccgtcggctcgtgccgggcacgagccccctttccagacgcgagcttcgccgc

SEQ ID NO: 235097 - DNA, 113 bp, Homo sapiens
  chr10:112327669-112327782
  hyper
cagcctctcccctgtctccacaggctggaccagggctgggcggggactgtgggggaggagggagacccgggtcccgctagtgccccggctgcggggtcgcggagaattggggc

SEQ ID NO: 235098 - DNA, 712 bp, Homo sapiens
  chr10:112402939-112403651
  hyper
tggtttcccaggcacgcaaggcacgcttttctctacttcccggggacgctggcctcaggacttagaactcctgtatgccggacagccggtaaggtctactgggcggccgctttctctggtctttctctgctccgtagacatttctgtgtcaggtgcctcgcatattcgcacccacgcgccagggcattaagccgaaccttgcttggtggctctcagccttgaaaggccgcaggatgtccgcgtccacagctgtgaaccggtgagtgcaggtggacgggcgcacgcgggcgccagggtaattaacagggcttcagagggcgtgacggtgaccgtacgttgtcggcgaactctcttttcatcctttacatttccacggagatttggccaataaataacaagaataaaatgtacgcatggttttgtctttgcgctcgtggggtcgtggcggggtcttttaagtgaagagaaaaagaaaccagaaacccacggtggccccaccggctgcttccggggacacctgaaatcagcagctggaactgacaatttggagagccccggggatggtcatctgagacctgggttacaatacaagtctgacctcggggcgagtccaggctttcttcccctcagggtcgggtgcctcaagagccagtggcgctggccgggctccagccgcgagcagatgccaggcccggcacactttgcacgggcg

SEQ ID NO: 235099 - DNA, 106 bp, Homo sapiens; identical to SEQ ID NO: 202289
  chr10:112631244-112631350
  hyper

SEQ ID NO: 235100 - DNA, 148 bp, Homo sapiens; identical to SEQ ID NO: 202290
  chr10:112632548-112632696
  hyper

SEQ ID NO: 235101 - DNA, 69 bp, Homo sapiens
  chr10:112678715-112678784
  hyper
ggagagggaatttcggagccctaaactgttgtccatctccgtaagtgaccagacgtctcagtaaaataa

SEQ ID NO: 235102 - DNA, 136 bp, Homo sapiens
  chr10:112678992-112679128
  hyper
tatcagttatggccgccttagcttcaacagtaacttccgatcggggagttgtcactctaccctgctggaggcttactctgtagcccggctagccagaggcgcccagtgggcgggagacggcgtagaggaactgagg

SEQ ID NO: 235103 - DNA, 2016 bp, Homo sapiens
  chr10:112835845-112837861
  hyper
aggggtagacacacgagtatctgctttaggaagatttctgcaacacggcagggtgcaattcaaactctgggttctcctttcctgagcttagaaaccaatttgttcggagataggagaaggctctgttggcagaagacctaagagacgggaggaggcgcctggcgtcagcgggtcgcttctcagccgtgaccacgagcggccagcaggtgtcagtgcgtcctcgctttgccctggcgctcggctcctggacccctccccacctcggtctaagggggcgcggtccagaccccgggtcttgcgtttcccgcagacagcatcgcggctgggaggacacgtagccgcttcttccctaagcggaggtctgaactccggcttgtaccacttccccgtgggtgctgtccattccgccccaggggttccatccgaagccgcgccttcctccctctccaggacccctttctccccagcctccaggagcacctgcggaccgcgtcggctctggcccggagctgggctgctccagacgtaactcacaccggaggttacttccctcgatttgggcggggattcccttccatttttttcttcccttttctcccaagatccagcttcttgggggcactcacgggtgcccgttgcgttctgctccgtcggcccggagctgcatggccaactcccagcaggggccgctcctcccctaccccccacccccgggctccctctttaagtctctagctcaaggtacccgcctctccaaagggctcgtcccgcctgagggcaacgctccccgaggtccagcgctaggcgcgggcgctagactggcggaggggtggtgcgaggggcgggggagggtcggcttcccacgtgggggctgacgccggctgctcagcaacgcttgcttgatcctggggctataaaacgagtccaccgtgagcgcagcggagcagcagcagctccagctcggtgcagaagcccagcagccggcgtgccgccgcccggccactccagcgccttcttccccgccttgcgctcctgccccaactcgcgctgtcgtcggaccccggcccatccagcagcgctcggcgcccaccaggcggacgcccaggagaacccctgcctccgtcgcggctcctggagagctgatcgttcacctgccccggcccgcctgaggacgggggtgccttcatgcggcccccacactcctcaccccgccgccgccgccgtcccggagctccgcacagtgtgccccagccccagcagggcgcacaactttggaagtctcgcggcgctccgagaggcggcagagtccgcgccccagccccgggccgggccgggccagaaccgcagcgtctgggggaagccagagagtcggtaatcgcttcggggatgtaaggcgacagacataggacccccgagctcgcatcagcacccttcggctgcctcccggggtgggggcgggccccgcacacggtaagacctcttgctttcgctcaggctcaagattcaagatacagatattgatatgtatatatatatttaatttcctgtcatccttccaagttatcaggccaccgatgatttttgttctcccttcttgaagaataaatctctctttacccatcggctctccctactctctcccgccgcttagaaataaaacttggctgtattaggagctcggagcaagaaggcgcccaccgagagcgtctgaagcgcgagccaggcgcagttcgcgggacccgggccatgggccgctagcggtcctccagttcgggcccggcctccctgcggccccctccctatgtgagccgcagccaggcgagcggggcgccggaggaagaggaggacccacgggcgccgggccggaaggcagctggcagcaggcccaggccagcgggcgcccgcgttcatgttccgccaggagcagccgttggccgagggcagctttgcgcccatgggctccctgcagccggacgcgggcaacgcgagctggaacgggaccgaggcgccgggggg

SEQ ID NO: 235104 - DNA, 470 bp, Homo sapiens
  chr10:114135833-114136303
  hyper
ctggcttttgtgtcggcccttaggggctgaggtgaaaggctttgacacggagccagggtagctttggcagcttctcccctcctggtcagaacacttccactttcagttgtgaaaaaaaaaattaaaaccaggaagtgaagtccccgagcacgttagaaagcctgacatggcctgactcgggacagctcagagcagggcagaactggggacactctgggccggccttctgcctgcatggacgctctgaagccaccctgtctctggaggaaccacgagcgagggaagaaggacagggactcgtgtggcaggaagaactcagagccgggaagcccccattcactagaagcactgagagatgcggccccctcgcagggtaaggggaccatcgagggggtgttattcagcaagggggtcttgtgagggtgtgacagaggccaagggggcatcctgacccccgactttctttaagc

SEQ ID NO: 235105 - DNA, 250 bp, Homo sapiens
  chr10:114206543-114206793
  hyper
ccttggatgactccgtcatggacacctcagcccaggacaagcagagagcaaaccctggcagcgagaggctggagtgcgggacctgctacaagccgagcacctctcggccagcgccctcgccaggactctcccgctcaggccccctgcgcagtctctgttactgtcacttccggaggttcgccgcctcaaacctccctccggaagcaagctgctgtgccttgtagcgtgtggatccggagccgattcccag

SEQ ID NO: 235106 - DNA, 684 bp, Homo sapiens
  chr10:114708957-114709641
  hyper
ttttggtcagtctttcggggatttcatttcagacccccttcgagaaacactgtagcccaactgatcccaggggttggtgaactttcagttttattttccctgacggtgttaacgcccaaacttttcacctcctaagtcaaaaaggactttgactctagctcatttcctactacctccaacgtcagttaaaaaaaaaaaaaaaaaagcaaaacaccactctacatttaaaagaatcatatatttttccttaaggatacttttaatgtttctgacatttagcatttgttttttgcataaaaagtcgttttggcatatccatcctagtgggacttaacatttcatgaaatgattcactactaataaacaaaaaagggaggagggaggcctcatgggttaatagtttctttcattgtagatgaccaggaactttgaccagccccttcacttccccaagctctctgaaagtggagggttgatctttccttttgaccacttttgtcgcatcccgtctaagggtggctgatttcactgctgaattaaccaccaagcacccccccaccccctcccccagccaccactttctcaaatactacccttccttttccccctcccttaagacttatttctaatatttctaaagtgcactgttttgggcctctccccatccccgccccccaagtgggc

SEQ ID NO: 235107 - DNA, 185 bp, Homo sapiens
  chr10:114710660-114710845
  hyper
tcaatgaatcagaaacgaatcaaaacagctcctccgattccgaggtaggaaaagcccctcgggctggtggggttttttatctgtttcctgggcttggcaaatgttgctgaaaggggagaaatcggggctgggggcggcggcggggcccggcgggcggcgtgtgcgtacggtgccaccattgcaaa

SEQ ID NO: 235108 - DNA, 136 bp, Homo sapiens
  chr10:114711918-114712054
  hyper
gagaactggctagcgcgcagagcccggggccctggagaggctccttggctttctcttttgggcgactatgtatttagctttctagtggagattgctggctctcggccctccttcccccttcccctggaaggtcaca

SEQ ID NO: 235109 - DNA, 31 bp, Homo sapiens
  chr10:115613973-115614004
  hyper
ctaaaaatgtgttcgcgcccgcactttcagc

SEQ ID NO: 235110 - DNA, 262 bp, Homo sapiens
  chr10:115614294-115614556
  hyper
atgtttcccttagcgcctctgggacgctgtccctaaggccttattccatgttgaatctgacgctctcaatgtccaggctcggctgcggcgtggggaccgaaaaggggcggggtgggtcggacggcagtttaattacgtccccgggaactgcgccgatttggacttttggcacttggacctatgctttaaaaagaaaaaagtgtcattggcgtggagtggggctagtggagggtgaggtgaatgcgccgtttggaaaccacag

SEQ ID NO: 235111 - DNA, 147 bp, Homo sapiens
  chr10:115802989-115803136
  hyper
atcacaaccaagctcgcagggcaaactcctccaagcctggcggacaagctgtcccaggcgctctggcgcttcctgaacaccaaggtcccctccccgctcaagggagctagcgctctgttccgcagagaaccccggaactgcaggtcg

SEQ ID NO: 235112 - DNA, 654 bp, Homo sapiens
  chr10:115803386-115804040
  hyper
aacccgcgggcgcacgggaggcactagctacgcgatcagctcgggactctcaggagccgctcaattgccaacgggaggggggtgcggggagttggaggtgggggtgcagaccagacgggggcgtgcctttgcccggattggctgcaggagcctgacgcgaggccccgggggttggcttggggagtgggagcggggtggggtgggtgctgggtgccggagctgcgggcccggcgcgctcagaaacatgctgaagtcccggcggctcttccagcagcggcagcggctccagcagcagcggcggcggcggcggcggcggcagcggcagcgacagcgctcggctcctgcgggaaaggcgcccggcgcccatgcctccggccccgcgccgcggctgccctgacccggccgcgacctccctctgcgcaccacgccgcccgggcttctggggtgttccccaaccacggcccagccctgccacaccccccgcccccggcctccgcagctcggcatgggcgcgggggtgctcgtcctgggcgcctccgagcccggtaacctgtcgtcggccgcaccgctccccgacggcgcggccaccgcggcgcggctgctggtgcccgcgtcgccgcccgcctcgttgctgcctcccgccagcgaaagccc

SEQ ID NO: 235113 - DNA, 64 bp, Homo sapiens
  chr10:115804304-115804368
  hyper
cgtgctgtgcgtgacggccagcatcgagaccctgtgtgtcattgccctggaccgctacctcgcc

SEQ ID NO: 235114 - DNA, 161 bp, Homo sapiens
  chr10:115805327-115805488
  hyper
cccggcgcggggcgcggactccgggcacggcttcccaggggaacgaggagatctgtgtttacttaagaccgatagcaggtgaactcgaagcccacaatcctcgtctgaatcatccgaggcaaagagaaaagccacggaccgttgcacaaaaaggaaagttt

SEQ ID NO: 235115 - DNA, 189 bp, Homo sapiens
  chr10:115860785-115860974
  hyper
cgccgtgggaaaccgcagccagtgataagctgggaagccacaggggctggcagctgcagtcggaacgaagcggctggaagctccaaacgggagctcttcccagctcgctttccacttcgacggcaccgttcaaagctctgctcagacactgggacaaataaatgacagggctccgaaaagagggtgaag

SEQ ID NO: 235116 - DNA, 161 bp, Homo sapiens
  chr10:115933903-115934064
  hyper
acgcctcactcagcggccgtttccccaaacccctgcggagctgacacatcaacaaagatggcggcgacactgaagccggcccggttacagctgagggggcgggggctccctggaggaaccaatcagcgcagcgcgggcggggtgacgcagcacaccttgag

SEQ ID NO: 235117 - DNA, 49 bp, Homo sapiens
  chr10:115934454-115934503
  hyper
ttccataacagcgcgttcgtgtcttcagcgtggcgctgctgccattgtt

SEQ ID NO: 235118 - DNA, 622 bp, Homo sapiens
  chr10:115998970-115999592
  hyper
tttcaaggagctataaagcccgtggaggagtcagctgacggcacagtgttcgcggctgcaccgctcggaggctgggtgacccgcgtagaagtgaagtacttttttatttgcagacctgggccgatgccgctttaaaaaacgcgaggggctctatgcacctccctggcggtagttcctccgacctcagccgggtcgggtcgtgccgccctctcccaggagagacaaacaggtgtcccacgtggcagccgcgccccgggcgcccctcctgtgatcccgtagcgccccctggcccgagccgcgcccgggtctgtgagtagagccgcccgggcaccgagcgctggtcgccgctctccttccggtgagtcccagccccgagttggctctggcgcccgggtacccgccagtgccggctgccgatgaccgattcacgctcccggtactggggccccctctgcccagccacccctacccagagcacccgggctgcgcggccccgccgagggtgcgggctttgttcgcattgtctgcgcgcacctgagcgcggccttcctggcacggcggcgtcgggggaagagcgcacctggcgcgcgcctccctcgtggccactcgcggtccgtcccgg

SEQ ID NO: 235119 - DNA, 1362 bp, Homo sapiens; identical to SEQ ID NO: 47757
  chr10:116163377-116164739
  hyper

SEQ ID NO: 235120 - DNA, 369 bp, Homo sapiens
  chr10:116286487-116286856
  hyper
tcaagttcagaacacggccaagaggctttgtagatgccagacctcagcccgacagactgaggctcccacctgcctgggttacatatcaggcttctctccgaagctcggctaaggcaacgtgcatccctctagagacgcactccggaaaccagccccgtgtgcggcgggcaggcacgctctctcacgcctcctctcctcgctttacttactagttcaacacaccagcaaccacaatgggccagtccatgttcccaaaaaaggagggggagtagatttactttctttctttttttaaatgcaggtaggaaagtaccatttctttgcattcactcactattgtctgcatgtgaaaccgacagtgattgtccc

SEQ ID NO: 235121 - DNA, 507 bp, Homo sapiens
  chr10:116391551-116392058
  hyper
agaacatgtccgcccggctttcgattgatcattccccgttaggtggccgagccctgcggtgccattccaacttctgcaaccatgcacagtgatcgatatttataattacctttttccttcaccatggcaaccgggtcctccgacgagcaggactgaagaaggaacgaggaataaactctgggagtggaagcgcgcctcggcagacagatccgcgggcgctggggcagccaggagaagccccggcatccgcttgtgaggtccggggctgtggtctcgagtcccgccccgcctcggcgggccccgctcccatgcccgccccgctatcgcccccgcgctcttctccgcccgcccgccgagctgcagccgcgcccagctcggggactctgccctgcggctgaaaccactcgctacagctgctgctgtaacaaatgcaaaattctactgtcctaatctctggtcactgacaccaccttgtattcctcgcaccgaggacgggctatgaaaagc

SEQ ID NO: 235122 - DNA, 428 bp, Homo sapiens
  chr10:116527905-116528333
  hyper
gagcgcccgcccggccccggccccctccggctcccggtgcggggacgccgcccgcaggacacctggccgcccgctccgcgcagcaaggccgacgggcggggacgcagcggccgcagggacccgccgggcgcggcagcgctgacacccgcggccgcgctgggcggggcgcgcctcccccgccccgagccgccggggcccacccgggtccagcagccgctctgccgcggcgccgggcggggctctgtccccgaggaacgagggtctgcgtcctcccctctccccgcccgtcttcttaataagaagaaaaataacgtgggtgctccgaatggctctccagctctctggtcccagagagagaaagcaagaaagggccgttcgttccttcccctaagtgatgcccttgacaggagagcgaagaccacggtcgc

SEQ ID NO: 235123 - DNA, 43 bp, Homo sapiens
  chr10:116581330-116581373
  hyper
ccggtgtcccaggcgccctgagaaagccgggagagggcggtgg

SEQ ID NO: 235124 - DNA, 108 bp, Homo sapiens
  chr10:116697880-116697988
  hyper
attcccacaagtccgtgcgacctctccgttctgcgcagcttcgcggtatgaggaagagggtcctgtcaggcgcactcttgttgcatcatcagcgtgcacctccacgat

SEQ ID NO: 235125 - DNA, 1295 bp, Homo sapiens
  chr10:116852748-116854043
  hyper
gggcacgcgggccacacctggggggcctgtctccagtcagcgcgcgggccaggcggggtgggcgcgcgcgcgtgggggagtccccggtccctgtcaggggcggggcgagaccaaggcgccgggcctgtggggaggagtgtaggcgcgcgcgagggcggggggcggccccacgcatcgtgggctcccggcgctgccgctgcggccggctcgaggcaccggagacagaatggctgccggggcgcccttgaccgccgggcgggcgaggcggggctgaccgccgcctccttgatcgcccccttccacgttgggcgcgcccacttcggggcgcccgctcggcccccgccctcctgggcgcgcggcgctcggagccgaggcagttggcgcgggccgcgggcgaggcggggccgcgcgcggggtcccctcctcctcccggtcaggtcccctcaggagcgccgggcgcagtctgcgcctcccgctccccgcctccggccgggtccgggacgccgcggctgtggggtcggcccgctaaggacaaggtcgggagactgggtggcgatgcccgagtgcgactggaggcagccgagcggaggcgacggcggttgggatctgtccctcctgaccggggagcgggactcggacgggcgccggtgaggaggaggagaagcggcggcggagaggttttctgcggccggaattcccttcaacagcatccctgtcggcgcccgcgagcgcagtctcgccgggcaggggcgccggggaagatggagactgggggccgggcccgcactggtaccccgcagccagcggccccgggggtgtggagggctcggccggcgggcggcggcggcgggggcgcctcctcctggctgctggacgggaacagctggctgctgtgctatggcttcctctacctggcgctctacgcgcaggtgtcccagtccaagccgtgcgagaggaccggctcctgcttctcgggccgctgtgtcaactccacctgcctctgcgacccgggctgggtgggggaccagtgccagcactgccagggcaggttcaagtaagtgccttcgccggaccccgaacctccagccctgcctcgctcccgtcgcggccttccccgcccccctcgcggcctcccccgcccccgtcgctgcctctgatcccccggccgtgagtgaacctcagcgcgcggcgggagcgggcgagagtggggcccgcgccgcgccccctccagccccggggcgccccgggagagctcgggcccgcgcggagccctgaccaacggggagctaggcatt

SEQ ID NO: 235126 - DNA, 2445 bp, Homo sapiens
  chr10:118030740-118033185
  hyper
ccctgctctgggagcgggtccacctctcgaccatccgggagtccattttcccgccccctggaattccagctcctctctcctcctcccgggcccgcaaggaagagtggcgcaggctcagcccgcgggcttcaagggtttgctccagagcctgcgctgcccaccgcgcacgtcggccctccgccccggggcatcctggcctgagcaacgacccgggctcccgggccacccccggctccagccacccgctccgcccggctgaaactcaggcgctttccgaggagaagtgcggcggcggactgggcaccgggcgcgcgctgggcgcggggcaggccagccatggtcagcggtccgccgggcggagagtgcccagaagctactcgggaaaaacttttctcttccaagtttgctctcccggccccaatgctccccaactccacctgcccgccgcggctccgcgagctcccagagactctctgggggtgcagggccctgggctggagggcttcttagtcccccgccaagttgggtcattaaaaaccacaggaaatcaaaaccaagcccgaaaagcttcaggcagcgccgcgccgccaccgcctccctaacccggggattcgcgatcccattccccaaaaagacacttcttccttccacatccaccacacccgcgccccaattttggtgcggagggcggggtgggctgctgcaagcgaccctaggaaagactcagagggtaagaaagcccgcggcgggcctcgacttacccaagagcggcagcgcgaagtacagggtcgccaggaacatggtgccggcgcggggctggtccccgcccccccaaaaaaatcccgagccgccgctgggtcttgccgagggagctcagcgtgcagcgatccccggacagctgtgctgctctggccgcccaaagttcagctccatccagtgaaagaggaaactccgggtctggcagcagccaccgccgccggcgactcagctccgggatggcgagggcgggaggcggttccgcttttaggggttcaggtccgacccaacctggaagggagggcgcgctttgagatgagagcggagagcgccggagactccccccacagaaccctctcccctcccccgttcccgcctttggggaatttccaacaccggggtgaggacccacccccacccaggtcggggtgcatgtgcgtgttttccaggggccgctgacacggggatggaggtgagggctggagaggtctgaagagggttcctaaagtccaagggggtgtctgttgggttcaacccgagacgctgaacgcaagcaaataaataaataaacggtactttccgagcgtcgcgagcggagcctgcagctgcctggagtccgagccctcggtggcggcggcggcagctccctagccagccctggcgccgaaagagccccttctcccgggaagttggcctccccctcctcgcgtcagccagcgagctcgctcagccgccggccctccccactccgatcgccaatccctagccccagtcgccgccctccttctccccgggactcgtctccctccagaggccgccaagccagggggaaccgatgtcccgactggggctgaaacccggttcctgcgcccctaccccctacccgccgcgcgtcctcggctccctcctgggcgtccgctcctctcacactctcgcccggtgcccaggactcgggcgcttccgcaccccagcccagggcgagcgcgccggcccgcagtcccggcgtgccccggcaggtgcagcccggcgccacgagcgccccccgggccctaaagttgggagacgccagcaaaaagaaaggggtggccggaggaggggggaagaaggagtggggaagagggacgggaagcggcaatgggttcccaaacagaacgaaaaaaactccaaatgccaccaacctggactcaaccgaccgcgtccagctgcggcgaggagccagtttgtttatttacttatttattctttcagggcaatggtgtccccgccccctccttccctttccgggctcactttatctgcgctaggaaaagaaaaaaaagaaaaaaaaatagatgcggtaatcttcgagagctcgaagggccgagttgggccaggacgatttccgagcagagccctcggctcggatgctcgttagggatgttagtggttattggaagcggcgcggagaatggcgtgttccgaggccagatttcttctggccagaggaccctcggcctgctcctgttcccgccgctccgcagctccagctccctcctaagctcgcccgccaggcagccgcagctgcacacgcccgcttgcggtgggacccgcggccggacccgtactcgcgcacaggacacgcagtgttctgcagccggccgcgggtgctgccagacacacacactctctctctctctctctctctctgtc

SEQ ID NO: 235127 - DNA, 1005 bp, Homo sapiens
  chr10:118033245-118034250
  hyper
acaagggctctttcttcttagggcaatcgagccagacccttcttcggaacacaaagttttcccccacgtcactagtggctgtgattcaagacttggtgctttcaagacacactcagacccaggacgctggagcggcgatcctgggatgcgcccatccgttcgtccacgccagcgcgtgcacactcacactcacacgcacacatgcacacgcagtctctacctctctcctggagctccgacaaggagacaaaagcggagcccccagcccactgcatttaaacccggccagacctggctttagaaaatttataagctgacctccattttggctgtttcgagagtaaattaacaacaacaaaaaaagcctaacatgtacacagcccttcgccccaacccctgggaccgctggttcccagtcgtgctgctcaccccccgccccccacgcctgacacacgctccccttcccgcacgccggggggcgcccggggcaccgaagtctacactgggtcgggagaccggtctaggagccagccggcagtgctcgggatctttgctgatgtccaagttcatctctcggggagaccgagtttgaatcaaatctgcgtgcgcccagctgtcaaatctgcaaacctatcacgccagacaatgggccgccgcggaggacagacaagaatggctcattttgatcgaggggggtaaattgaaaagggcacgggctttggttgaagtttgaggcccgggtgtcagggcggggagaagaagaggaggaaggaggagggttgggccgctctccattcaaccacacatcagccaggcgcgcccctcggctgcagcggctgcttgcaggcgggctgcatattgtgtggagtcgccaaagagggtctgcgcctcggggcgcgccccaaacccgggggacatcctacggatccgcacttctcttgtgctgtacgcgtgttcctccagggtaagtatgaggagacggacgccctcatcagacacccctcc

SEQ ID NO: 235128 - DNA, 197 bp, Homo sapiens
  chr10:118547542-118547739
  hyper
cgtgccacctccacgcaacgccgttaaattcagatgctacgctaaaagcagaggaaggaaaaatatctgtgtcacagcaccaactggaaaccaacgcgcgtacatcctgtctctactctggccgagccgaccaaagcacatcctgcaaaattctagacccccgcaaacggcgggaggcggccgtgcgcacaacatcc

SEQ ID NO: 235129 - DNA, 769 bp, Homo sapiens
  chr10:118608585-118609354
  hyper
gggcctgcctggcacgggcggccttagcaacccggaggagctcactaacagcagagagcaagggggcgcgtggggagggcggggtggcccaagacgctgggccactgggacccgagcgcgcgaccccagccggaattcggagctaaggctgccgcgctccggcaaaacgcgcttgatgaggtcgttaaagatttccccctctggaaaatcgccagggaaaagtggtgaaaaacgaagccgggagggccctagtctcgggagtctaggaggagcccaacccccggacctaatgccgcagggagaaaagacagagcagcgagcgcaaataccatcctagctccaataaaagggaacgacttttaccgcaggaagaacctaggcctggaagccacgcgagatctgggggtcgggatcacgttgcgttgcctagcgacagcagggacgctcgtgggaccccaggctaaaccccgctgtagccttaaatctcctaccatggaggaagaaggcggcggccgcagctgtgggaccactagggagctgcagaagctgaagcagcaggcgatggagtactaccgggagaacgacgttccgcgcaggctggaagagctgctcaactccaccttctacctccagcctgccgacgtctacgggcacctggtagggacctgggacaagcgctctcctcccgccaacccctctccccccgccccgcgctgcggcaacgccttgcgcctgcgcctgcgcctcagaatctcgcatgccagccgcc

SEQ ID NO: 235130 - DNA, 115 bp, Homo sapiens
  chr10:118764187-118764302
  hyper
ccacccgcttctccggcaaggaaggtggcactgtgcaacctcgtccgcactgaatcctcgtcccttcccccagcccccgatcgccagcaaacgcaaccagcgggcagcgggtctc

SEQ ID NO: 235131 - DNA, 276 bp, Homo sapiens
  chr10:118764482-118764758
  hyper
cccgcccacgggccgcggctgcccacacctggcgcccgcgtgctgcctaccttgctccttcagactggtaatgagctgcagctgcttctcttcgtccgagctgttcattttggcgggtggggccgggaataaaagggaaagagggagcggcgcggggcacacaggaggagggggaagaaaaagcaagatgccggtggcttgcggctccactacccggaagttggatccgctcccgctcctcctcctcctggcgcggagcgcgcgagtgagatcatc

SEQ ID NO: 235132 - DNA, 39 bp, Homo sapiens
  chr10:118765121-118765160
  hyper
tcccgcagtagactctgggggcgcggttgcaaaacctag

SEQ ID NO: 235133 - DNA, 389 bp, Homo sapiens
  chr10:118890981-118891370
  hyper
cccacactgtgccccgccttattttggatgcctccaacttcagcttcaggcacagtacacgagtaggggcagtaaggcctggctagggccggtgccgcacgggagctgcgggtccctgcaacacccaggtgtgcaggcgctacaagaaggagccggggccgctgcccccgcagcgcggacttcgccccgtgctgcacacgctttagaagagcgtgtccggaagtgtcctccccggccctcctcgcttcccaagatttgtttgcaacgtctacacccgtcaccaccgcataagcaccagggtgaggaggtctctttgcaggaattaatatcgatttcagtctcctgctccttcaaagtttctctttgacgatggcgagacttatattcta

SEQ ID NO: 235134 - DNA, 1659 bp, Homo sapiens
  chr10:118891580-118893239
  hyper
acagatagagaaatcgagagcgaaacactcaaggaagtggaacaaatcgtcgtagccaggcgtctctgcctctccggaaacccgaaatccgcccaaacctcatcccaggcgctcacggtaccagtcgcagggccccgcactataggggctgccaccctctgcccccggagtccccacgccgagactcatcatttgctggctctttcttccttttcttcttttgtttttttatccttcaaatataagacaaaaatacacctcatttatcatcatagatatatatatttcactctcaccacataaatacaaaacatccaaatatccaaaacattcagaacaaagttagtagcctggattcagtgacacctacccgcgtttgaatcgttcattattttcttcactatttgcctagaaaaaaaaaaaagatgaaaaagagggggagagtttccgacgtaaataatttacaataaaattactattttaaaaaagtgtttttcgcttgcttcagatggatgaatacattctagacactgcggcacctcgcagtctgggtctgtgattttggttaaaatgtgggtggccgtggctgtagggacgatcgccgctgcgcagggtaaggaaagagggtgtcgcggttcgtgttctgatttgggaccactgaaaccctaagactggggaggcgaggggagtgtctttcctatcaatcacacaagacgctatctggactccgagactactgctagaggaggcccgaccacccagcggcgtccctgcctccccttccgcaaagaactgctcagaaatccagacgtttcctgcgtgcaggaagggttttgtgaatccgggtgtttgggagaggaggcaatgagtgctgactcgttttccaaaccgagcaattgtgcccgaagctacgcgcctgggaggccgtagggtgaagcgccggctgcgcaggctaccgccggcagccgctttgctctttcctggaggagtgggaagctgtcggccaccgccccgaacaggctcggagaaaagattctgaatttcctttgattagcggcgttaccttttcctttgcttttcccccattaaattcctgtttaaagttacaacacccagaaccttaattttgcattgccctgtggggcattctgtatcctgaattttcttacaccttccaaatttcatcattggaagtatttaaaaactggttccacttcatctggttttacgtagcaattgcttttattgctgattagatcaaatttatcagtgtcgttgcctactacgacgtttgttactgtttcctggggtcgggggtggttgtgattggagttgccctaaaggggagaaaaaccgcaggatttgcccgccaggaagctgtgttgtgtaccgactatcccgagaggtccgcaaagcggggcccaggggctcccacaagccctggtttccctggcaagaggaaggaacgtcctccttttttggtctaaagaaacctggaagcccctggggtctgcgcgcagttttcctctttcaaatattcctaggaatagtcggcagcggcagcagccgcagcagccgcggatctagagcaaacgtcctgtgctttggagttagaaccagtcttttccctcctgggctgggcacggggtcagggcatca

SEQ ID NO: 235135 - DNA, 984 bp, Homo sapiens
  chr10:118893507-118894491
  hyper
aacacttaaaatcagtccagcgcttttttctcggccccttctttattgttggtccgggagtaaggctcgaaggccgaggagctcagatatcgggcggagagttcttgcaaattcccagctagcgaaccagccattgttaacggggcggaggacaggcggctggcgacggagccgagcagcgagggcaccggcaggctgaagaggctgtggcccgcggccggggcgcctgcgtgcaatccccccggcccggcgggcccgggacctggagcaccgcccacagccggcgggtgcggggatgcagcgcccgctgggcccggggcggcggcggcggctgcggcggccgagcctgcagcggcgcccgcgcccagggccggcaagctgggcccgcgcagcgctgagccgagagcgcccgtggcgcaaggcggcagcagcgcaggcaggccgggcggcgacaacaggcggccctgctccagcagccgtagcacgctgcacgtggccgcggtctccgacaccaccgagcgtagctccgagtccttgccctggtccttcttctgcttggtgcgccggttctggaaccagaccttcacctgcgcgccggggtgcggggagagttggagagaggggcagggaagaccagcgtcaaaggaagcgagctcccggggcgcgcggctccggggctctccccaagtcccagccctatccgcagccccacccagcagccggaggggtccgggccggggcgctgctgggggagctggcgccgccacgagggggacacagctgctccaccgggctgcgcttccgggtcagggaagcaggcccaggcaggcgccgcttacacagaacaaagtaataaaatgcccacggcaggaactcgaaggaagaccggaaagggtttcactggcttccgcgctaccccgcagcggtgtttggggctcacagatgtgtgaatcagtgcagtcccaaagccggaatttccggtgg

SEQ ID NO: 235136 - DNA, 500 bp, Homo sapiens
  chr10:118897082-118897582
  hyper
ctcatctccccccgcagcccggtcagcggggcccctccgggcgtggagggccgaggcccctggagagcgcaccggagagtcccaggcgcttgtccccagccggactcggggcggggagggccaacaactttctcccaagtcccagccggcactccttcccaccggcctgtgtcggcggcagcgcgcagctccggccccggagtcgaccccaaagaacgcgcctggcagccctgcccatccctacctcggaccaggatccggcggcagtaatccgggtccgctgcggaattggatttacttttgttacaatcctcagcagcgcccgacgctgagaaggcgccctgcggctccttgaggaaggcggctgggaggttcccctccgcgcccttgctctcccgactctccttgtgcgcgttcttcgagacccgggcagcctcggcgtccgagtggcatcgaacgtccattttgtctggtttcccgaacataggcaagaacaacaa

SEQ ID NO: 235137 - DNA, 35 bp, Homo sapiens
  chr10:118898062-118898097
  hyper
tttggataatatatcagatcgtaatggatggtttc

SEQ ID NO: 235138 - DNA, 804 bp, Homo sapiens
  chr10:118899538-118900342
  hyper
cccgagctactctccgcagggcggcgggtttccagggtccccagcgggctgatcgcccctcagcccggcttcgctgcgcacgctgccctcgaagtccgacgccgactgggcgcccggggaaagtgcctttgattacgagctctgctccggcgggttggtgaggcgggtgggagcagagacgggtaagaggggtaagggactttgcggccaccctgttctgaagatgtagagtgggattgtgttaaaatccggcgaactctcctgttacctcccgcaacgctcaaaagcccagactggcgccttgaggcaccgagggctttgctcccatgcggccaagccgtcgggggtgcagccgccgggtcttgactcccactaccgcgtcgcgggtgcgggtccctgggattcgggtcctcctgatgggggtccctgcagcagatggggcattcacttccctgcagagctcggcccgagggagctcctgggcctccttgggcagggaggggtgcgaccgaattccctggcacaccggcccttccttgccccctaccctggaggggttggaggggtcggaccctcggactacgcgagatcgggtgcgcaggaggattctaggccttcctcagccctttaggagccctgcaggcggcggaagtcccaaaccgcagccttggcccaaatgggacccagatggctctgggtccccggcccggccgcacccctctgtacggcctccttctgtcggtgaaggccgcagcggcctgggaaacccatgcggacacctgcggcgcccggtcaaagacctgg

SEQ ID NO: 235139 - DNA, 1298 bp, Homo sapiens
  chr10:118922202-118923500
  hyper
ttgccttctagaagcggcaggataagcacacgggtttgggcagtgctcacattttgggtttattggcttgatggggttgtttggggcgctctcagttacaaactgcagaagagtgggggcgggggacaggatggggaggaaagggtgggcgaaggagccgagagtaagacaagccgaagggtggaaactgcgggagggagaggaaacgccgaaggcgatgtagagtcctgcgagggaccgggagaggtagggagggatccgagccgcagtcctgagggagagcgaccgcgcgccccgcagccgagctgggtcccttcgccccgcccggaatcccggcccccgcccgccccacgcaagtccccgtgccccctccgggaggtgggagtcgccgggactctgcgctccgccagcctccgtctgctggccgggtccgggatccgcacccggagaggctgaaccgaggctgaaccgaggcggacgcagccccgggtcggtggctcgcctggccgggtggggtgggagcgattttctggcggtggcgtttgcaggaggggaggagacagcgccacccagggcctccccgagcactgccggccaggccgggctcgggggccggagtgagggtgcaggtggggctccgggttctgcttcttgaaggcggcggcggggcgagaaatgcaaccgcgtgggccccgcctgctccccccggtcctgtctttcctcgacgctcgggaggcgtcccgcagccccctagtcgcgatgctctcaggtccccggcgtggaccagcacgtgggcccgggagtcgagtggggacgaaggcatgttggccgcctcaacttcctgcgccgacggctggggacgcggagaaccctctccgagctggggtccccgcctgctgggcaacctcacctcaacgtctggcctggcctggggccgcttggactcggcagcggctgcactcctacagagcccagacgcgccttctcgctttttcctttctgggccggggccctaaactcccggaactcgccgcaagaggagcgttgaaaacaaaagggacagcccaagctgtcccgcccgctgcgcccgaggagcatccccttggcgctgcaggctgtcgcctcccccagcacctggcggggcgggtgccaggctgggcctctagacggtttcaccgctgcttatcatttctccttcattttgcaggggcaggggagctgcccctcccttcggagaaaggccgcgcctgcacccaaaggtaaccctcgggtgaccccgggagcggggctgtctggcc

SEQ ID NO: 235140 - DNA, 1141 bp, Homo sapiens
  chr10:118924328-118925469
  hyper
gctataaaagcaacgccatacattgggatgaaattagacagcgacaaaatcattaccttgacttcccacaataaagacaaccttaaaagggggctattgatggtttcaaattacataacggtggtttatatgttcttcctctgcgctcacagaaagcaattttaaagtgtgaattcttcaaagaacgggcaaagcattcacacacagacatgcgtttttattttatgtattgcaaagcgctatgagagagagagagagaaaccaaaaacaaaaatcccagcaaaaggaggccgagtccaaagagaatatgtccggtttctatttcaccaagctcctggactcacatttggccccggagccgagtgctcggtctctttccccgggacgggacagggagtggagttcctagccccttgggtgggaaaagccccgcgcacgtcaccgggtcccgtctgctcactgcttctgcatattttaagcctggacacagcctcctttaggatagaaaggcatttcccaaacaacaccgattctgggggtgtagtgggcctggcgctgggtcctggagagaaggttcagccccccttctcatccctgtactttggggatggctcgtacttggacaggggtgggcctccgccttctccgccttctatcggacctttcttcggatggatttctacgtaaactcggaaggcgatcaaatgcaggcggccaacctccagcgcttttttttttcctctcaaaggcggcgcctgcatttttgggggctccagcccaggctgagaaagtcccctcaaacctctactctgaggttgctcacacggcctgcaaaaacccgacggggcaccccgccaccccaccttacgtttccctagggccaagtcagtggtcaaaaaccaacccggtggtagctgcctttaccaaggaaagacagccaggacgcccgcaccgacggcaacgcgcggacagagaggaccgtgccctctttcgcatgttacggggcgagggggctgttggcgtcaggagcgccctgggaggaacttcgtagcggattcgagagacagagggaattcagcaaacttgctgccccgggctgccggctggagcccggcagattcgctgcgcagcactgccccct

SEQ ID NO: 235141 - DNA, 959 bp, Homo sapiens
  chr10:118927081-118928040
  hyper
cactggcagaagttgagacacgctcccaggaatcgcgggccgtggcgcgtacttccacgcaccccagctagttccagagactcagcttgttctgagatcctcttgtcgagcccccttggtcccggcgcccggcctgtgtggtgctcagatcagacttatccacccgagcaccacgcagaccagcgcctggaccaaggtcccgggaaggaagccctcctccccttctcctgtggcttagctcagcgatcagggaggagccagttaagaagtcacagtcgaagccatgactgctgtgtcccggggaggcagtggaaggcgaggagcacggagcggggataccgccggacaacccctccccgccgccccgtcggcgtcctcgctgcgcaggggctcccttgctgccccaatctaaaaggaagccgtcgcggcccagggcacggtaactaaaaggccgtcggggagggagacgggaatgagtgggcttggacttgaggtttccgagccagctgctccctagagccgttcctgagctcgtcagccagcacgtatttaatgaatggccactgggtgctaggccttgcacgcaaccctttcgtcctcccccggggctgagccgagggtgacccaacactagtcggaacgagcctggagacatggcgccggggctgcgctctgcaggcctggcctggtcgctctccacgcacccctctctctgtagctgccgccccgcccggctctgcctgtgggcgccccctggcggcaggaagccgagcgcgcaccacgccctcggggctccatccccactcaccccggcgcctctagccgctccacccgcacccccagttcgcgctgcggcggccagcctcttccccgacggccgaccgaatgtccctcagagctttccgtgaccggccagggcgcgtggctgtccggagcccctccacgttccccagcagcag

SEQ ID NO: 235142 - DNA, 164 bp, Homo sapiens
  chr10:119256046-119256210
  hyper
agaaaatcaggtatacgggtctctgttttgttcactaaatcattccaagtgcctaggactctggctgacacatatttcctgctccagaaatatctcttggctgagtgaatgaacctcttcccccagcgagcgagcctgtcggccgaggagaccacgccatacca

SEQ ID NO: 235143 - DNA, 540 bp, Homo sapiens
  chr10:119292023-119292563
  hyper
aactaaatcacttgcgcggttcttgccttttaacggagcgataacgtgaggacatctgaaattccgactttattttcctccagcacacctggcccctgccctccaacgggaactcccgactgcttgcttattttagctctcaattggtattaaaagcagactgtagttgggaccatctgatctgtaaacgatgcaagccctagacagcttttcccagtccggggtagggacgggcggccgcgagctggggcagaggacctgcgggagcccgcgcagcgcctccgctctgccaggcccctccgcatcgggcacccaggctggagccctgcagtttgtcgtctggagcccggaacccgaggtgaaaggcctccgctgagctcccagactcctcagccgagcatatgctgcactcctcacattcatttttaattcatgacatcagtttagggatcactagagcctctaaacagcctctctcaaaaccaaaacaaccaccataacacaagcgaggacaggagacggccgcggagtccagaacat

SEQ ID NO: 235144 - DNA, 563 bp, Homo sapiens
  chr10:119293002-119293565
  hyper
tacataggagacatcgtgtcctctgaaatagcccaggtaccgatctgctccttgtcgccgagcaccagctcagtacaaggcgctggaggggaaggagggaagcacatcagcgtctcctcatagtgatgcagccaccccagccctcaccctatcccagttccccacgcgcccacgtgcctttggggtggatgaaaagatctcaaacgaccagctcctcattggggtaaaggagtgaagagattatctctgatagaggtcaaactccaattgggaggagggcaccaattctgtaaatgacacccgagggcacactcaccaggttcactgcaagccctgagcgttttgcgtttggtgccccgagtgtaagcctaagtattctgtctccgacacgtaaaacaacttaaagtgccattttccaacggaggcatttagaggcaatttgaaaattgaaacgaatctttatatgcaagactggaacgttccagaggccctttaaagctgcggttagaaaggcagttagggaactcaatgatgggctggaaggagacgattgaacgcacagc

SEQ ID NO: 235145 - DNA, 1472 bp, Homo sapiens
  chr10:119293786-119295258
  hyper
tctccagagctaccgagaaggggaacctcaacatcaagtgtctggcagatgggagtgtgtgttaagcgagggctgttttcgttgggaacgcacagcacagctcccttcctcagagccacctccagacccctcggccctcccacgacccccagttcccgggtccgaggttctgggcgccagcggcggccaccgcgccgcgcgagcagcttttattcgcactctctttaactcgccctttctggttctcttcccttcgagcgccctgcagcggagtgttagacaagccctgttgtctgtgggctctcacctcagagtcaatattatctcagatgggcacaatagactggaatgaaaagctaatattgaatcaatgctgtccctgtccgcgccgctgcgatgccaccctttgttgcgcacgccgcccccggcaagctgctggcggccggggctaagcggagggcggccgcggtcgggcctctccgggtccacgccaggggtgggaggacacttcgggcccagcgtagaggaggcctccgaggcccaagcgggcttcggctgctgcgagtccccagaggctccctcgggcctcactcgcggtgtctcctccagacgccaggggcaggccacgaagccgagggctccgcgtggccgtgggagaagcggggtgcacggagccttcccgcgcccagacgccgaggggatgcaaacaggggagccgggcctggtatggccaacctccaggatcgaggggccccagaatgtgcgtgtggccgggggcgggggcagctgcgggggccagaactagagtattccttcgctctcccctgggggccgggcccccacgagttgcagcagagcccgtctgtaattagggcctcctggtccggcaaagctgcggctgctcccagagagagttggggtcttctcagggcccgcgatgggggagtggtcgtggtcagacccccgtgagccccttcggaaggtcccagtccctgtccattcttctgtcccgcagctctctccgcgcaggcggggcagagccggggaagaagacgctggacgaggggtcttggggccgcctcgctggctgcggttggaagcacccgttttcccgcccgcccgcgcaggcgctgctctgtggccaccagcagaggtttcccggccgctgtgagtcgcccacgcgagcgacgtggggatacggggcgcacggagtctcagctgccgccacgcagcgcttgccctgcccgagcttcggctcactggcagcggcgaggccaccgaccaccctccgccttccagtcctaaactcggggctggagaccgcaggagctaaaccaggaagaagaaagagggcagggcctgaggccgggaagagcggcccgggggtcaacggtgagcgggtgcatacgaggcaagagccagagtgacattaagtggggccgcccgggcaaaccttgcgcgtgcaccccggc

SEQ ID NO: 235146 - DNA, 1233 bp, Homo sapiens
  chr10:119295683-119296916
  hyper
aagccccagcccagcccccacgtccagaaaatggggaagtattaaaggaagagacgattaagcccctgagagtgtggctcctgggacgccagcgtttcagaagtagcataggctcctagatggacgctgacaaacccaagtagcgccttacattgtcgggcgaggaccagactccaagttaaaaggccggccgggctatcagtggcagagagcagagcctcaaacacgaaaagccagaaagcgctgcagaggcgtggaaggtgcgccccgcttcgctccccatgctggtcctctgggaactcaggagccggtgcacgctctggtgggctcatagagatgtagctttgggggcgatgggaaggacttgccacgctcccacccaccctccatcccgagagagtgcaagggagacgcaactgtcttcatccctatcccgggctggcgcccgaactagagagtgtacttcttccctagctcctgcaccaccgtctgtgtgtacgtctgtctgtccctcccagtccttgctcggtcctaggctttcatttgaaggcagctgagggagaaagaaactgcaaacccctttggttctgtttccttgctttcaataatgaatcgagacagcgtgtgtgtggtgagggagtgacgagtttcaacgtgatgaaggagataaaacccgacggtggggtcctgccagtggctccatgcgtcactgaaacattgggtctcaaaacggatagatctccggagacgcagaggttcgcgcggatgtccagaggaggacagcgcccctgcagccacccgcggagcccagggccagggtcaaaaccctgccgcaagggctcggagctccaagcagttatgctgagggcgccggtcccaggccgccttgctatgacacgggtttccagtgaagcccaagcggattccacggccccacatcaccggaggagccaggctgccccgggatggatggggtccgcgcgctccgagaggaatgggctagtcaatgtgcgctgctaggagtgtgtggtaatcaatcgccacccctgccaaaaccaaggaccccctgtgtcgggcgtcttcagccagccgcgagggggcgcggatctgagagagtcgcaccccgggaccccagctcttcctactccaccccaggcagggcccgcgcaggccgtccaaggcctgttctctgaaccacctgggttgggccgcgaaatatgggacctcaggcat

SEQ ID NO: 235147 - DNA, 463 bp, Homo sapiens
  chr10:119297139-119297602
  hyper
ccctccactggcctggatgacggcctaggcgagactttggcagtgtggcgcgaccccagcgctcccccgccctcgggctcgggggcgcggtgggtaccgcgcccgcgcccggccctcgccactaggcgccgctgcgctcacgccgatcggggccccgggtcgccgcgcccgcctggcgagaggcctctggggaagacgccagaaagggatttgtcgtaataatttttaaaaaatgtttttagggcattaattatacttttcgttttctcaccgccaccctgcgcgttcggagaggccggcgtgactggggatctcagtgggttggaggaattcttaacgcccccgaggcctttccaactcgggacaccattctcgcgcctcgggccgggaaagggctcgcccttcacgggcgtcggtgcggtccgcggcgagccgcgggagcacagggcgggctcagcattct

SEQ ID NO: 235148 - DNA, 1529 bp, Homo sapiens
  chr10:119300884-119302413
  hyper
caccaataaacagagagcagcgccagcagcctggggatgtgatcataattatgccgccgcgcgagccaatggggacgagggaactcggtcctaaaatcatcccaaaaccgaaggcgagctcgaaaatgcggacacggcccgggaccggagatgcgatccgtagtcgttagttgcactgggtttgcacagcaaccaccacccccccaccaaccccgggacaacagatggcataataataataatagaaataataataataaaataatatcatctataataataataacattgaccacactgacaaaaataattacgacggaaccttaatagtacagtagcaccatatcgggctctcccctgaccttggactgccggtcccagatattccagaaggaattgttttggggaaggaggtgagcaccctcccagacagaaaacgctagagaccgtggggcgagagagggagagagttggaagcccactgctccggcggggtcggcagctcccggtctcaactcgcaaacgaacgagccgggtcaagaatcgcgaacgcaccgaccctgggacctcgaggctaagcgtggttgatggggtgggaggaccccgtacccctcactccaggatccctcctggcctaggaaaccgctgggagttttgctaagtgtggggattggtataaccgaacggcgcctttagcccgggaaccagcccctgcccgcttaccctcgcggtgctcttggggcgatcccagttctcccgacgcggggccgcgtaaggcagcagcggcggagcgctaggctagaggaatctgtctgtccttctgtcctaccagcttgggcgaggcaggctcgggattcagggggccgcagcggaggcggcgccggccagggactctgcagggaccggggtgccccggagggagtggtgctggtggaggaggaggcggtggctgagggggagtaggtggggaaagaggaggaggaagaagaggaggaggaggaagaagaggaggaggaggagaagaagaaactggaggaagaggaggaggcgaaggaggaggagaagccgcagcgggcgccgcaggagcgagtgagctgggagcgaggggcgaaggcgcggagaagcccggccgcccggtgggcggcagaaggctcagccgaggcggcggcgccgactccgttccactctcggcccggatccaggcctccgggttcccaggcgctcacctccctctgacgcactttaaagagtctccccccttccacctcagggcgagtaatagcgaccaatcatcaagccatttaccaggcttcggaggaagctgtttatgtgatccccgcactaattaggctcatgaactaacaaatcgtttgcacaacttgtgaagaagcgaacacttccatggattgtccttggacttagggcgccctgcccgccttttgcagaggagaaaaaacttttttttttttttgcctcccccgagaactttccccccttctcctccctgcctctaactccgatccccccac

SEQ ID NO: 235149 - DNA, 2082 bp, Homo sapiens
  chr10:119303299-119305381
  hyper
ggccagcgcgccctgttgggaaactaggcggcgcggggccgggcgtggtgtcgatccccagtctccgaagctacgactggtttggagtgatggcctgcgggccgcttgaccctttgggaaggggtgcgaacggagaagttgtcccccagtgcgctcgaatcagagcaggctgggctgtgcgtgcccggcgccgcggagcccagagcccgcgggatccccaggctcctggtaccctcggcaatgcccccaaccgtcctggctccgaggggcgcggacaggactcggccgccaggcttgctttcgactgcgttcgaccctgttcaccacccactttgcgccccttcagtccagacccgcggcttcttagtcttccaccctcttctggaggcgagaggatcctcgcgccccgggagaaaagtatgggatttgttttttctttcctgcttttcggaggcctggggaggggcgggaacccgtgcgggaggaaagctccagggcttggcgctctcgccgcgacctgcttaattggggcgccgagcagccacagcgggaaggcaggttcggtctggtttttgtttttctttctttctttaaaaaaaaaaaaaaagaacctggtcaggaaactgtcttagagggaaatatctgttcgtgtgttttcatttcttgcgatattttttatttgtttgtttttctctgggtacggggtgggaggaggagagttaaaacttcagaaaaaggagtaattagtttacggattggagtcagtaaaagacctacctccggcggcagccgatcaatactccgcggcttgtccattcattaacccattgcgttcctgccggagcctagaatcgggtagatgtcacccccctccccatattttaaaaaatcaaaccaaaggaaaaaaaacccaaaaagccttttacccttaatcccgaactggatttgcctgcatcctgcctggactgtcggcttgtttttctttgtttgggttttcggtgaatcgatttcctatgctaatgagtgaacccaaaactctgaggctttgcttgaaaagtttagggctgcccttcctcattcgctatcagtcatgcttatggtcccctcaccagacccggagccgctgggatcttcctgcgttacagactgtcctggcggtgtctgcaagtcggtaaccccccgggtttcgatcccttcgctcgcgtttctcttctagttctcgggagccgggagccccggagcccagttcgcgagaggcagcagcggctgtagccaagcacacccgccggccagatttctgtcccgatcgggcttcaacgactcgccccgcctctatacttttccggaggggcaataaaacaaataatttaaaaataaatctccatgaaaactctggagagcagcccgccgcctttccaccgtgggtcaaagttccccgagaggttagaaagaagagaaagtagtttcttcgggttgtgggcgccaatcccctggccaggctctgcggctccctcccctgcctccagcgcccggcgaggaggtggcgaggcccgcggcgccagggcggctgcggagccggccgaggtcaggagcctggggactggctcctctgcgacagcggctggttgggtgccgcaccggtggagacccggcgttccgggccgggcagctgagcaggcgttcccttcgtgagcccttgggaggaccaccggcccccgcaggtcgagcggcgcggctatgcgaaggccctgagcacggtgccgggccagcccggctcgggagaagtgcgcggctccggtcagagcagccccccctaatgggatttctgctgtgctccccgcagggaacgacactagccccgagagtttccttttgcacaacgcgctggcccgaaagcccaagcggatccgaaccgccttctccccgtcccagcttctaaggctggaacacgcctttgagaagaatcactacgtggtgggcgccgaaaggaagcagctggcacacagcctcagcctcacggaaactcaggtgactgcggcccgggcgcgaggaacccatctaggcgtgcgccccctccccaaa

SEQ ID NO: 235150 - DNA, 454 bp, Homo sapiens
  chr10:119305975-119306429
  hyper
actgtacacggagccgcagggcggggtcaaagttcccagcaaacagtaacgtttttttgggcagactaagttgtaacacttttcctgggcagctcagaaaggtcgaggcttttgttttaaaacatgttccccaccccaaaaccgaggagggcctggcgggtttgtgcggagcccggcacaaggcgcggcccggctgatttctcctggacagccgaggcggcggtggtctttgtccgcctcgctgcccacgctgcctggagtctttgtgtgcgtgtcaagccccgagcgcaccgacgcgcgccttgggccagcgccggggagaaatgaaccgtcctccccctcaattagcaaactcaaagcaaattaaattcagccttgttcccgctcagcttttttcatggagcactttgggcgactgtggctttccgggagagcaagacggaccggcctgcgg

SEQ ID NO: 235151 - DNA, 440 bp, Homo sapiens
  chr10:119306645-119307085
  hyper
gtgggatggcagccgactcccacctcattgctcctgagacctctcacagccgctctggtgaggccgggcctccagccccaccctggtgggaagtgatgggactggggtccgaggttgtgtgaccagcagcctgttccggggctgtttagaaggagggaagagggggcttgctgtcacctccccttctcttagtttctcttactttccgtgtaacccacggtctttcagaagctttcagttttgaactcattttcctagctataaaggtacagctgggttggtctggaggcctacacactccatgtccctcctggcctcctccagccccatccccttcctgctcacctgtgagagtcccccgcacggaggatgcagctcaggcaaaccctgatcgcctacccagggcccccgccacgaagaggagacgctatatttaggaa

SEQ ID NO: 235152 - DNA, 371 bp, Homo sapiens
  chr10:119307582-119307953
  hyper
tatggtttcagaaccgaagaacaaagttcaaaaggcagaagctggaggaagaaggctcagattcgcaacaaaagaaaaaagggacgcaccatattaaccggtggagaatcgccaccaagcaggcgagtccggaggaaatagacgtgacctcagatgattaaaaacataaacctaaccccacagaaacggacaacatggagcaaaagagacagggagaggtggagaaggaaaaaaccctacaaaacaaaaacaaaccgcatacacgttcaccgagaaagggagagggaatcggagggagcagcggaatgcggcgaagactctggacagcgagggcacagggtcccaaaccgaggccgcgccaagatggcaga

SEQ ID NO: 235153 - DNA, 141 bp, Homo sapiens
  chr10:119309782-119309923
  hyper
ttcgagctacaaagcgtcctgcgagcttttgtgaaagtgcaaatcagtttaagcaattatcataccaggaatatgaaggggaaagaggaggccttgcccagtggtctcctttaatctcttaatccacggatccaggggggc

SEQ ID NO: 235154 - DNA, 185 bp, Homo sapiens
  chr10:119310263-119310448
  hyper
ggatacaccgccgccgggagttgccgggggaggagggagacggggtggcctcaggagacccgggcttgcgtctcacagggacaggtgcgcctcggggtatcctggaaaccctcgtggggcttccaggcgctttgacagcacgaccctcagtgaccaccagctgtctcaagcgctttgcagtcagt

SEQ ID NO: 235155 - DNA, 57 bp, Homo sapiens
  chr10:119310922-119310979
  hyper
gcggctcagagagccgcaatccactccaacgccccccttcccggcccaaagaaggat

SEQ ID NO: 235156 - DNA, 293 bp, Homo sapiens
  chr10:119312994-119313287
  hyper
ccgtgacccctctccgggaggtggcttctcccgcaggacccggtgcgccagaaaactctaggcggcgccacgcttggaagcgcaaggtccattcatcagccgcgccccagcgtctaattggccttttgtttattagtgtctgttgcccggctgggagtctccggagggccccggagctgcgagtcggggtgccagaagcggacggcgggccagcgcccagagctggggtccgggtagggcagaggcgcgtcgcactcctctgagggggcgccagagcgcgccaaagatcacgc

SEQ ID NO: 235157 - DNA, 701 bp, Homo sapiens
  chr10:119494303-119495004
  hyper
cagcgactctccccgggtcccccaccccagccaagagggaacctgccaatcaggctgcgccaccaccaggctaggaagcctagggtcgccgatgttccaggatggaatgttctggtgtcaccgtgcgggggggtggggggtgtcacagagctgggaactcgctcagagccagggtctctgctggggtcagcgtctgtacgctaaagccagggcgcaaagtgcgtgggcactgcggacactagaggcttatggcgctggaaatacaaggccgagttgccggcgcaaagagttccccgggcgggttggtgatgcggcgcgctttgataacaggttaatccggccaacattcgctccgcgagagagccatcggagggctccgggagactgcggcgccacggagggagaggcggcgagaggcccctctgcgagcaccctctgggcgcagtgcggtgggctatgctctgcgcagccccgggcgcgcctgggttctcagagcccaagacctgagccgctccgagcgcagggcgccagttctctttcagaagcgggagaagttcaggtgggacaggagacacgggggtgaggagatctttgagagggccggccgggaaagtgggggtcgcctgtggctgagagggccgcatgccgaaggtcccgaccccaggctcacgacaggcagcctggcacgcaggaaggggctt

SEQ ID NO: 235158 - DNA, 223 bp, Homo sapiens
  chr10:119805618-119805841
  hyper
actgtgacctgcacgtgggttggaaaccacttttgggcttgctcggacagcatcatcctgtcctgtttctctgcccccgagttccctagcacaggcagtgcccctcccggagggagagcctaattccttaatcactgcatcctaaggacacttaacggaaacaggcaggctcagggctccccgacttccctatggctgatgtcaaaacgcctcgcgggggcag

SEQ ID NO: 235159 - DNA, 73 bp, Homo sapiens
  chr10:119806446-119806519
  hyper
gaacgtgaaggggcggggcctcgaggtcaggggtcagcacctccctggttgccgtggcgactggaggcgcgcg

SEQ ID NO: 235160 - DNA, 171 bp, Homo sapiens
  chr10:120101736-120101907
  hyper
gagcccgaaccggcgggtaaccaaccctccataagccgtactcacctgtcaggaagtggtcgcccagcagccatcttaggaccccgtcaacatcgcgccttctcattggctcctgcgtctcaaccaatgggctggggccgttctggccctagggtcgccttagcaaccggc

SEQ ID NO: 235161 - DNA, 228 bp, Homo sapiens
  chr10:120354169-120354397
  hyper
acggcggcgggcagcgccagcaccgcggacagcgcccagatggccagcacagcgtaggcgctgaggcgcagcgagatgcgccgcctcagcgggtgcaccagcacgacgtagcggtccactgcgatggtggtgagcgtgaacaccgacacatagacggtgaccggctgcaggaagaagaccaggtggcacaggccgccgccgaacacccagccgcgtggctcgaaggca

SEQ ID NO: 235162 - DNA, 81 bp, Homo sapiens
  chr10:121301366-121301447
  hyper
acccaaaggcctgcacaggtcgtagctattgtgatgagcaaaagggtggaaggaccggaatcaagggcacggctccacctt

SEQ ID NO: 235163 - DNA, 35 bp, Homo sapiens
  chr10:121303030-121303065
  hyper
gtcccgcacaccgcgctctcgggacacttctctaa

SEQ ID NO: 235164 - DNA, 127 bp, Homo sapiens
  chr10:121356665-121356792
  hyper
ctgtctgggaaagcgaactacaagtcccagagttcctcgcgccgggggctgtcctcggactgctccaggcattgtaaggctcttctgttggcccagtctgagctgctgctccgccttcgtccagccc

SEQ ID NO: 235165 - DNA, 52 bp, Homo sapiens
  chr10:121485050-121485102
  hyper
tgtagccaggccccggggtctcgcctggtttcggtacgggcaggcagcgcag

SEQ ID NO: 235166 - DNA, 106 bp, Homo sapiens; identical to SEQ ID NO: 202335
  chr10:121632626-121632732
  hyper

SEQ ID NO: 235167 - DNA, 684 bp, Homo sapiens
  chr10:122216122-122216806
  hyper
caaagcgaagcccgcgagtgatctctggggaacttcctagaaaaaagaaagaatttcaggttcgaacggtgtagggagggccgaacacgggagcaaggttggccagggctgccctgagccctggagaatccccagagcgatcgtccactacatgcccacgtgcgtgcgtgtgccagggagcgagagcccggacagcgggagtcggaggcaggaccaggagctgcagaggggccgcgggcagagccccagcgagcgcgctgccctggcgcggagcccaggggccgcccactggcgggggaggcggggagcgcgcagggaggcggcggcggcggtggggcttccccgggcttcccctccccggtccgcgggtgcccggcgcgggcccaggaggcggaggcggctcctggggagagggatccgggagtccctgaggcggccccggctccgcactaggaggcggggtccgcagtatcgccagcggccggcgcggcttcccggagccccggagcccgaggcgcgaggtttaggctgagccctccccggcgcctgcccccgcccggcgcccgcctccgcccccgcccgcggcctggagcgcgcctccctcgcctcccagggtctggcgagccggcgccggccgagctgcgggagccgcggagagcaccagctgacgccgcgggagctgct

SEQ ID NO: 235168 - DNA, 32 bp, Homo sapiens
  chr10:122610818-122610850
  hyper
aggaacctgacagcggcgccgagggggccacc

SEQ ID NO: 235169 - DNA, 429 bp, Homo sapiens
  chr10:122708490-122708919
  hyper
aggggatgatcctaaagggacgcagtggtcccgcccatcgccgcctctacagggagggagccgcggccccgagctggccacgcgatggcgctgtgcacccggccgcggagcccctgcacgtccggctcccgctcgcgctctcggctcgagctccggactccaggctcggagcaggggttcgggctacggttcccggctccgagggaccgcggggctctctgcctgggaaggaagcttgcgggcctcctcgggcctcgctgcagcccagctaggttaatcaatcagcagccgctcagtcacccatcccttccgcatcagttgcgtggggctggggatcatgcctagggcgggaggcgtgggagcgcagggcgccccgggtccggatccggctacaggggcgaacagagcgggttctccatcccctggggt

SEQ ID NO: 235170 - DNA, 418 bp, Homo sapiens
  chr10:122738987-122739405
  hyper
cctgccaggaggtgcggatgctgccggcgcctggaccgcgcgttgagcagtgcaggtgaacagctcgcctaacgcacaagccacgcccacaccctttctacacgctttctcgttcacttctcattgcaactccttccgccgcgtggacaggttcagcactctcggagtcgatgtcattattcgccatcgacgcgaacctcggcaaagagacgggtcttaccggtctccgaatgttctcaggccctaagcgcgcagccccgcacccgggtgcagccggcgcggtcccacgtgtccctaccgcgagccgctccccgcgtccctgctgccgccgcgcgcttaactctgcctgcccgcccgccccgccccgcccggccgttcctgcgcagccctgggtcggcctcgcgcttctgtgtttaaa

SEQ ID NO: 235171 - DNA, 1664 bp, Homo sapiens
  chr10:123356668-123358332
  hyper
gagcgggcctcctgcgccaggtccgtggtccgcgagggtcggagccagcgccacgcagggccctcggcttttttccccagcgcggccccgtggccgaaaaaaatgagcgcgcaagttagaactcgcctgcgctttcgacatctcccagccgctgcggcagagcaggcaggcgaactagaaaaagtcggtccagttcgccccctagccccaggcgcactgcgctccctccagcgccgacggcggctgcgggcgaggggcgcccaggcaccggagccgtcgcctccccagcagtgccacccctggccatcgccacccctacgggatgtcaccggccccaccccagcggccccctcccgaaaaaggggtctccgcagggcctggatggtacggaagttcccaggacacacggatggggcacctcggagatgaccccgggaaccggcctgcggggctgtgccacgggcaggcgaaccttccgcccgtctgctctggggtcggagaaacgcgcccagtcagcgggaatgcgcccgccagggtttgacagggaggggggcgtcaacgccagaagcagatgtcagcatctggatgggggtagcagaggcagaacttccagaacgccggccgtcagcacgcacccacctcccccatcacctatgcagccacagagggaggacacggagcgtcctccacaatgctagtccttccgcgccccccgcccggaggacggtgcacccggcgtcccgggctcccgtggcgcccacgtccccggctggcgaagctccccgaggcgtcttgcgcggcgattaccttgaatggcaacgctcctccgcgacctgtgttgtccccgcgccccgcgtgggtcgggatggagaaagcgacgagcccggggttgcggggagcaactccaaacgcagaagagtggtccttgggtcttcgccggcgccaagcctcccgggcttcacgcgtaccccaggctgcggaggagcgcgggcatgacgcccgcgggctgccctcggatttggggaacgagaggaagaaaggactcaggcttggcgttgcctccaccaaactttgctcgcgagttgcgaaggctcagagcgcgcaggcaagctgcggcctcggggcccccggggctcgcggccggcccccgccagcccggagagcagtcgccgcgccgggccaggtacgccgcatgcagccccgcggcgcccgagctttgtggcggccgcgcgcgctccctcgcccgctccgcacccgccgcccgcccgctcggctctccaccgcgctctcctccagccgccgcccgcgccgccgccgccgcccccgcctcctcgcggcgggtcacgcccccactgaaacccgagccgtttcctggacggcggcgccctctctgccaatcagcgccgcgcgcccgggccgccccgagtcccgcgcggctcccgacgcctccgagcagccggagacaccggcccgggaggcgagggctcggccgcgatgcggccgtagggatgcagcgacagcctccgaataaggcctggtcccgcgccccgcgccacctcctccctcctccccgggcgagcgaggctggccaacggctcgctgagcgactgcgttacgttgttttatgtcaagttagaaaacaaatgaccgaaggctctaaccct

SEQ ID NO: 235172 - DNA, 179 bp, Homo sapiens
  chr10:123686258-123686437
  hyper
atttggtgtacttccgggccttcttcctttcagaactgtaatcatgtcgcataagccatttgcatcctgttgattttctccgtttaagtccaaactggaagcatttttccatttagtcttcataatcctcacttctaacgattgcataactgtctactcaaaaccgctgcccacaagta

SEQ ID NO: 235173 - DNA, 1295 bp, Homo sapiens
  chr10:123872187-123873482
  hyper
cgccacagccttcccggcgttgccatgcgtagtgggaaggccgtggacaaactaagaacagtaacaagttgtcatgactcagagactcctggaagtctgcagcgcctccaggagcagcggccgggctgtgcgtccatcggtccgtgcgtctctcgcctgccgctctgcggccgcgggcccctcggtgcgtctgggcgcgcccggccccgcgcattcctggccggggaggagagcgcggcgggcgccctgcgcgagcagctggccgagcgctgccccgggtcggagagcccagagctgggggaggagcctggcccggcagccgccgctcgcccagtcattggccttttgtgctgcaacttttcccgagcctttcggggagccacgccggccctgcgccgttgtcccgggaaactttgcgtcccagggccgcaccggaccgtggtgaccccacgcgccgcgccgccaccgggctcggaaaacccagcgcccccgggctctttggcagttgcgactccgaacgaaggcggctccgtgcgggccatcccctatctccccgggcgggtaagtgccggggccacgggcgggcggccggggtcagaagatgggcgcccgaaggaccttggcccccagacaaaggcgtactggaagtggccaaagctcatttcggctttccccggcagggactggccgagggtggaaaagtggctaactgcacattcggtcccctgctggcagaggagtgtggctgcggggaaaccgcgggccccagagtgtctgcccaggagcctggttcccttgagtgggagcgcgggggtcaaagcccgtggttcggggcgcgcgccagtggctgggattcccgctcgcggttggggtccccgcgcgtggttgtggttggcgcccgtgaccaggctccctgccagggttggggtcccgcccttgggggcctccgcgccttcccaccgggctctttcccagctcgtgtggtcctactgggtcgcgtgggggcatccccggcgggccacgacggcgcgtggactagccataaaactctgcgctggatttcctccgagtttgggacttttaaattctcgaatagttacgtcagcagggccgagcgcacttcggggatccggcgcaacacgtgacccgcccgagcgtcccctccgcgtccttggctcccgccgcagagtgcgcctctgcctcggggtgtcctcgaaatccagtgtcggggcgctgggatttgctgcccaggctccgagcgccgaatacaccacgctgtggccaggtgtcctctt

SEQ ID NO: 235174 - DNA, 954 bp, Homo sapiens
  chr10:123922645-123923599
  hyper
gctgcctccaggacccggggcctgaaggaggcagaagccggcggtggaaaagggcgcacgtctctcccagcgtcgctcccgctgcccgctgcccactgcagcctatttacctgttcctccagccatccccttagtcctgggccgggagagaccatttcctccttcctggagggatgagccaacagggctgagccccctactctctcggtggtcagcccgcccgaccaccacgcccctcctttctagggccccagctcccgggccgcggctcgtttgcatttcaaagctacacaatgcgggcggtcccggcgaggcgggaggggccggggcagagggagggtcttcgcctccccacccccagccccgtttccggagcccgcgatggagctttgtgaagatgcaggcgttggggctgctcggcgatgatgacatcatcgtgtcacacacaggagccggctgccggggggtttaagagaagagcctttcggaccacaccggcgctcacgctcatacccgcacgccccgggcagagccgcgcacgccggccacactcgggcgcgcgccggccacactcgcgcgcacacatacgcggcgctcgccccccggcccccggctcgggccgcgagtcgcagctccctgccgccgctcccgccgccacggatgcccgcagctgctcccctctgcagtgcagcaaccccggccgccggccggctcgccccggctcccggctgcaggaatcgcgccaggacgctggccccgctcgcggctagcttgcacgccagggcacagcgaggatgggagggtcgcagtccctgcagccagccccagccagcgacctgaacctggaggcttccgaggcaatgtaagtgctccgcccgggccgccccgagtctcccggggaggaggagaggatgcccgggctttgttagtgtcgcctttcctaatgcctgtgca

SEQ ID NO: 235175 - DNA, 817 bp, Homo sapiens
  chr10:124133665-124134482
  hyper
tgctgaaagaatttcgactaacccttctttaagtctctcttaccctcctgtactattaacaccattgtaagtaggcagtggagctacatttgcagggagagagaagagcgaaaaattggcgcgcagagctgtaaagcgtttttctccaggtcacaccgcagcctgtaaatttgtgacacttggaccgattatgggacagcttgcaaacaaattatctgcaaactaacgaagcctatttttaaagatccctgttcctcgcagctctaggcgatgacatcagagaacccggagttctacctccgagccaagcccagtggtggtcaaaaactacgaataccaggaagcaccgcggcgcggcggcccagagctccgcgcgcaggcctccccggcgcgccgaggccgccgccgctggaaccaggaagacgccagaaactcggcccgccacgccgcagggacccgcgcggggcctgccgggactcgtagtctctgcgggctgggagcgcccgctccggaatctcagccgccgtctgagggctgaggcagcgtggggacgcgtgcgcagtgcgcgggctggccgtcgcggacgccgctccgggcagccgagcctctgtgggagccggggccgcggcggcgcgggtgctccgggccgaggccgcggtaaagtttagcttgaagaacgcggccgcgctggagcaggggtggtggacggggccaggcgcgaggtggcggcggctgcggggctgccgggctgctggagcgcggttcccgctgtggcgagcggggaggcgtccgcagaggggcggtgggtgctggtgag

SEQ ID NO: 235176 - DNA, 74 bp, Homo sapiens
  chr10:124134962-124135036
  hyper
cgacttgcccaaggtcacgcaggtggcaccggggaggcgaccagacccaggtctttcgacgccgaggccagctg

SEQ ID NO: 235177 - DNA, 1758 bp, Homo sapiens
  chr10:124220489-124222247
  hyper
actgtgggtctgggcgcgggctttctgccagctccgcggacgctgccttcgtccggccgcagaggccccgcggtcagggtcccgcgtgcggggtaccgggggcagaaccagcgcgtgaccggggtccgcggtgccgcaacgccccgggtctgcgcagaggcccctgcagtccctgcccggcccagtccgagcttcccgggcgggcccccagtccggcgatttgcaggaactttccccggcgctcccacgcgaagccgccgcagggcccccttgcaaagttccattagtttgaaggacgcgaatctcagcgagagaacctgcggaaagcgaatatgtggggcgcgcagacggggaaactgagtcccgcgagagggccggcctgtgcgctgccccgcccgcgccccgccagcaccgccgtgcccgggcgcgcccgccctgccccctccgcgggcggtcccggtccagccgcccgccctccctcccgccatccggccagcccccatcccgggcgccgtgcccgtccccaaggcggctcgtcaccgctgcgaggccaatgggctgggccgcgcggccgcgcgcactcgcacccgctgcccccgaggccctcctgcactctccccggcgccgctctccggccctcgccctgtccgccgccaccgccgccgccgccagagtcgccatgcagatcccgcgcgccgctcttctcccgctgctgctgctgctgctggcggcgcccgcctcggcgcagctgtcccgggccggccgctcggcgcctttggccgccgggtgcccagaccgctgcgagccggcgcgctgcccgccgcagccggagcactgcgagggcggccgggcccgggacgcgtgcggctgctgcgaggtgtgcggcgcgcccgagggcgccgcgtgcggcctgcaggagggcccgtgcggcgaggggctgcagtgcgtggtgcccttcggggtgccagcctcggccacggtgcggcggcgcgcgcaggccggcctctgtgtgtgcgccagcagcgagccggtgtgcggcagcgacgccaacacctacgccaacctgtgccagctgcgcgccgccagccgccgctccgagaggctgcaccggccgccggtcatcgtcctgcagcgcggagcctgcggccaaggtactccgccgcgctcctgggcagctccccactctctccatcccagctcggacctgcttctgcgggactggtgggcaggttgaggggcagcgaagcgttgtggggtggccagggcaactctcggggacaggcaggtgggccccggggtggcggatttccgcgggctgcctcggaaccgagcttcgcgcccagcccggggccggttctgcgcccagacgatgccagtacgcccggcctgcactctggggctcgagacgccgggcgaccggccatggagtgccctgagggcaaccacacagcgcggggaccccaggacaaataagaggaatgggggcataaaggaaggagagaagttcaggactgggaattggcgcctcgcagagcggcttcaggaccacaagaagtcatttcggttgctttttcttctatttacgtcctccgtcccctttaaaattcactgctttgatcacgggaccgctcagtgaaaactgtatgtaactcttttggaaaggaacagtgtttgccggcccgccccggagtttctccaaaaagtctaccccgagcagggaacggtttggcaccgctctcgtttcggcggcgttgctgc

SEQ ID NO: 235178 - DNA, 625 bp, Homo sapiens
  chr10:124639063-124639688
  hyper
gcgtcgaaaaaccgccgtggtgcccgcgcacagtgcaccgcgcctgcgcatggtctccaaaggctgagcgagggcctgccagtgcgcatgctccgctctttagcgcttcctgagcaaagtttgaacgcctctcgagtccagttggcttatgcgcatgcgtttctctggtgcaggttctcaccaaatccagaagcggcgggcatttgaaatgatgtaagccgggagtcgctctgcctgcccgtttctgcgctgcactggccgacacttaagcactggaagagaggcctggcaggaggcggcgcagtggacacgcggtccgaggacgggggcctcacccgccgccccacgcttgcctcttcctgggatgccgcaggcggggccctaactcacagcctcctcacccgggctcgtgtctgcgcccgcgacttcgactgggaggagcttctggcgccacctgcgccacggtgcgccgggccgccggcgaccgggtcgctgcgctcggcgactgccgcgctcctcggggaacgtgagggtctgagtccgggatccaggagagcagttggtgtcgggtctctgcgggggagcggggctgcgaggtggaggcgaggaccggggtgggcggagg

SEQ ID NO: 235179 - DNA, 35 bp, Homo sapiens
  chr10:124768241-124768276
  hyper
ccttgttaaatgccgtcgccgccgccgccgtcttc

SEQ ID NO: 235180 - DNA, 759 bp, Homo sapiens
  chr10:124893022-124893781
  hyper
gcgggcggctgtcccggactcttctcccgccacactgggcctgtcccctccccatctgagtctagcgctggagttgtgatcagccacgagtccccctccccagactgaaccctcagcattcccagtttaaagtcgactttcgtgcgtcagaactctagccaagtttgcatgcgtctgcgctgaatggcgaagctcccaaaacacacaggcatacacgccggggtctctccacgcatactcggccgcgtggcaggctgtgtgcaggcggtgcccacccaaccctcatagacctacgtgcatcgagctatttctgcggttgggggaaaatgacctctgggtatccagcagcgattgggcgacctaggcccagtttcctcctctctgggcgcgggtttccacttacaaaatccaagtatgagacccaccctgctggggtctcagggcagtgatccgttccaacccagattttggatggcgtagcgttttgcattccagtaaagccctgtgtaaactcaagggagtaataacagtaattgtttatggaagcgccatttacgtttccagatttccaaagcaaaaatggggttcgctgctgtagatgaatgcagaaagaaacattacatatgcccgtcgagatttggtgggggagggtctgacgccccaggaccgaaaaacaaaatctacctctcaagtggggaccccacacgatcacgtctgccaatgcagggcggccttgaattaggcgaggctcaatctaac

SEQ ID NO: 235181 - DNA, 1074 bp, Homo sapiens
  chr10:124894061-124895135
  hyper
ttctctaaggacttcgctgccgtcgagacgcgcagcggatgccgctgcttgccgcggcggaggaagctacgccgctgcgccttcggttcaccttgcccccattaaagcgttagttagacagctccaaacgccagctggccggagagacttcctgggagaaagtgctgtcgtcggggtcacagactcggagttgatccgcgagccttgggcaccggcggccagagcagaggggtgcccttccgagagcagccgtcggtgccgagaagctgttgccccagcagccccaccgagtgacgcgcgggttttggccgggtcagcgcgcatacgcacacaggcacacccactcctggtcccgggggaaggctcactcttcggttttccagggctaaaggccaaggccacgcggatttctgagtccgaagacgcagtgcgaggacttacacctggattcccttactatcggctggatggtgggtggggaacccaaatccctctcttcttggcctcgcccttcctagcaggctttaggaaaaataccgaggtcgccggaccccaaagggtaggaaaatgatgagttctccgagggccgaggtcacgtcctgcctcttgggccggcgctgcgtggctctccagctgcgtgggggcggcgggcccctgtccagccccagggggcgggggagcggcagctgcgagcgcagataaccccgaggtgacccgggagggcctggtccgcccctcccccctcccgcaggcctggcggcgggaagcgggtccctgcgccgcaggggggagaggcaggcgcggtctccgggctcgcggccgttagtgcgcttcggccaagggcgccgcctgctccgcgtccctcgctcgcctcctgcgctcgcaggagcgctccgagtgcctctttagcgggagccaatatccttttgtgctaataggcttgtcctcatttgctgcctaattggactatataaagccaataacgggcgggctcttatagcccgaagccaaagcgccaaaatccgagggaaggcgaggagggggcggtggcggaggcggctgcggggccggggc

SEQ ID NO: 235182 - DNA, 56 bp, Homo sapiens
  chr10:124895615-124895671
  hyper
aaccgccgccgccccccccacccgctcccaaggagtccccgttctccatcaagaac

SEQ ID NO: 235183 - DNA, 85 bp, Homo sapiens
  chr10:124896031-124896116
  hyper
cttccctccgcagttctgggaccccagcacccgcaaaccctctgctcggtcagtttttttcggcccctagcctgccctcgcgctg

SEQ ID NO: 235184 - DNA, 880 bp, Homo sapiens
  chr10:124896596-124897476
  hyper
gactcctcccccgcctccggcacagaccgcgactctccggagccactgctcaaggccgaccccgatcacaaggagctggactccaagagcccggacgagatcattctggaggagagcgactccgaggaaagcaaaaaggaaggcgaagcggcgccaggcgcggccggggcgagcgtaggggcggcggcggccactccgggcgcagaagactggaagaagggcgctgaaagtccagagaagaagccggcgtgccgcaagaagaagacgcgcacagtcttctcgcgcagccaggtcttccagctcgagtccaccttcgacatgaagcgctatctgagcagctcggagcgagccggcctggccgcgtccctgcacctcaccgagacgcaggtcaagatctggttccagaaccgccgcaacaagtggaagcggcagctggcggcggagctggaggcggccaacctgagccatgccgcggcgcagcgcatcgtgcgggtgcccatcctctaccacgagaactcggcggccgagggcgcggcggctgcagccgcgggggccccggtgccagtcagccagccgctgctcaccttcccgcaccccgtctactactcgcacccggtggtctcttccgtgccgctgctacggccggtctgaggccccagaggggtgggggagggagcgcccggcctccttgtccggaccccggaggagactgggccgggccgagggcgccgagaagtccagcggccttcaggaactggggcttgggcgcgcagcctctgcttcccctcccccagtcggtagcattttgtaagtatttgcaatgcattttcgtgcaattcatccctaatggattggaggcgcttcccctcttacttttggt

SEQ ID NO: 235185 - DNA, 1151 bp, Homo sapiens
  chr10:124898993-124900144
  hyper
aaactcttttctgtcttgctcgctgactgcctctgcgctctctaagtacaacctggacgcacaaccctgtattccgggaggcggtggagacagaggcggctttgttcgcgaccagaggcactctctcccctgtactttccgcggcctgaaacgcccagcgagcagggaagaatgctgggcggaaggggagtggacttaggcttatctagtttgcgaaattgagcaaagcgacagcgcgcgaggcgagataccagagacagctggtatttccgaacactggtctgcagcctcccgttctgttcttaaacctgggttccttcgggagccgagagcttttgggcagggcatccctgggcattcgtcagctggttaacttcggtgggctctggttggagggaagaagggagtgagttcagagtttagctgcagccgtaggccgattgccaagtcaggctaggaaaggctgggccacaagaggacaaccccagggacagccagctcttgggacagcggctcccactaccaggagaggggaacttcctcaggtcttgcagagctgagattcccggggcgactcgagcatgggcgcggtcctgatgtgctaagtgtgagggaacagaggctacctagctgctgcagctgcaacagagaagaccttgtctcttccgtgccaggctcttctctttcccctggcgcccaacacctcctgggcggcatctctagatccccgaccctgtcctggcagacgccgagaagcgtagcgctcaccacacccgcgcgctactgggttccaggccgccgcgctcttagtgagcagcctgcggaggcacagcgcgccggaaccgcctggaagggtgggtccgcccgacagaagcaggtgcctgggcgacactcgctggccgggtgtggccgcctgcctttaagctgggggtctgcacgtacaattcctggcggggcacctttgaagctggggagccgaaagggggagatgaggaacccagagggtgaaaaagattccagagagcagccatagggcgcgaccgctggggagcgcctgcacgcctctctttcctctcgcagtgcgttgctaggctcctcaaattcaatcgacacaattgattctactgtggctgaaacgtccagtatagttt

SEQ ID NO: 235186 - DNA, 1561 bp, Homo sapiens
  chr10:124901887-124903448
  hyper
ataaactgcccccccaccaccgggcgctcattctgagccgcgacgccccctcaacaggctcccggcaccgcagagccagaggccacgcggtgagaaccccagtgcgtgcgctcttcttgtgtgagaggccggaggtagagttgggagaaagaggagccggcgaaaaggttagtgggatctgctttcccttctgcggccttctgggccagctagggcctgggagatggggaccagggtcggaggcttgggggcgggagggcggtgctgccggctgcttcctgcaagcggtttgaagaggcatcgcgttgtccggccgcctgcgcaagggccacgcgctgctgctttcacccccttgcgcccgcggggcacctggactccccttaagagtccccgtggggcctgagcttctgctgggcgctacgctgccctccacgattccattttgccccatttactcgggtcgtccacttcccgcggctcagtgacccagccagggggcgtcttccgctagcggtccaaatgtagactccgcaaagaggctaagaagacctgtctacccgggtgcgcgcgatggggtcagggtgtaagaaccaggagcctcatagaaacctctgcttggggtccaaagcccagccgggcactcccagaggacaacatccgcccccgcatgtacacgtggccccgcaggacccagccgcagggctcccacgctcggctccccgccctctcgctgtcccccaccccctaacccgggctttgaggtgtgagcgatcccttgcctctgggcctaggactctggaagtgtgcacggccgttgtgcagggtggatggtgttgaccttttgacctgaaaacagttgggggctggggagcggaggaaggatggcggaagagaggaaagagccacgagaacaactaggcgggatgtacttttgagccctgccgggtgtctccgatcggagtctggggttgagatttgggctgcacttgtccccggtgtgtctctccggcggagtaccctgaaggtgcacgaggtggggagcataggctgaggtgggtaatcgggtcctggatagaaacacaaccctcgtcctcactggggcccatgtatgcgcctgggattcctccccacccttccatttccaggacccctaagggtatcactccagcgacggggcggttctggagacccgagggaagggatagctggagactgcagcgcgccttctccgagagtcccctggaggtgcgcatgagttgtactagcgcagatctcttccttggctgctgctcctggcgatgcatctccgggggaaacttcccaaagtctgagttgccggggttccaaaaggatccctttgggtttaggcctgggagaggtatagagccagcgagagagcgcgttgcgcctatcactgaggcaggagcggtgaggtggagtcacctgctgtgcctcacccaagcgctaatgtcttaaagaaatataaagaatccccttctttcgtgagctccttcaccgccctcgcccccgttggtgatggagtgcacgcatcagattttca

SEQ ID NO: 235187 - DNA, 228 bp, Homo sapiens
  chr10:124903912-124904140
  hyper
cgaaacataatcaacgtttatacttagaaaatttattgagatcattttctctggtatttccttattttaaagtttggacgcgccatatatcataatccactcgcgtgggggcgggggggcagactgtgtttaatatttatcgaagcttgattccaagatcaaacttgtttatgacttcatctgtcatttcggagggagccttcttctattacccggctcagccagcct

SEQ ID NO: 235188 - DNA, 435 bp, Homo sapiens
  chr10:124904558-124904993
  hyper
ggcgtctgggcctccgtgctcccggtgaagatccccatatgctagaaaggggcggcaaggaaggttgtttcttgtccctcccgtccttgcggtgtgacggctataggtgctggaggggcgggaggtccctcgggctatcaatcgaggggagctcaggggaactgcagtcagtcaggctgcagagctgggtctccaccacagccttccttgccccagccccgtgcccaccaccatctcttccctggtaaagtgcacgcactagtaggagctcagtgaacgtttgctgaatgaatgtgtgagtgtgcgcaggcgtttatgcaagtgccttcatgcgaattaatgcgtcctttgccgggtgtggcagcagaggaagtgcctcggtgaagatcagaccctcgaagcgattagagggacgggacagaggaaatacaaggc

SEQ ID NO: 235189 - DNA, 547 bp, Homo sapiens
  chr10:124905574-124906121
  hyper
ctggcactgctccccgagttagctggccagttcccctcggggctgccttgaccctggctccggaggcagcgcctagctcaggatgtctgcgagaagcggatggttagtgagaatccgacgattctttcgctgaacctcccgcgtaccccccaacagcgcgggagcacgcgggacccgctgcgacgtggcccaggagcctgcgccgccgcggcgcagaggagaacgcacaaattgtatttcagcgccaggtccttccgggttaatgagctgacaccatgattaaagctgaccatttgtaatgtgtctcgaccctgccgctgagccctgaagaggttaatgcggtgacggaggccggcacctgcccctcgctggcctcccgggccgctgcgcgcaccccctggcccccgccccctcgcctgcccctgccccggctgcgcggccgactcctaatcaattagcccattaacgagcccctcgaggagttaagtagggaagagttctgccacgggcagggccgcagtcggtaactcaccgcggctaatgatat

SEQ ID NO: 235190 - DNA, 1415 bp, Homo sapiens
  chr10:124907167-124908582
  hyper
acccccacgcagggcgccacggtcccaggagtgccggctttgcccgcccactggggctagaaggggtggagggctgggggaggatggtggagcagcctgtacaagcccctgggaggcgcggagacccgtcgcctgcggaggcgtcgagccactccagctccgagtcccgcaccgcccctgcctctggagagaagggtccaaggggtccaaggagtcggagttgccgcagccgccaggaacccgggctagaatctgcagctgctttcagccctggctgcccctggttagacgccgctgatgcccgccaggccctcggcgcgctctgggggcgcaccggtgctgtgtgcctggccggagcgttttgaaattttccggggccgctcggcggcgctgcgattggccgcgttcgggtaacctctatgcaaatgaggccgcgccgcctccgcgccgccggagacccggcgagttggcgggcgaggaaggggcatttgcaccggggctgggcgggcgcacccagagccaggcgggcaggaacccctgcgcagccatccggtgcctgcatgtccctggcgcggaagggacgcctcaccagcctcggcgccccctccccctagatttcctccccgcccctccccactgcctgcctgctgcaccaccttccacccagatcacccagatcgtctctaaagggagttcttggtttccttcgatttcttatgaacccaggatgggcagcaaagaagatgcgggcaaggggtgtccggcggccggtggcgtctccagcttcaccatccagtccatcctgggcgggggcccctcggaggcaccgcgggagcccgtcggctggccagccaggaagcgcagcctgtccgtgtcctcggaggaggaggagccggacgacggctggaaggcgcccgcctgcttctgcccagaccagcacggccctaaggagcagggccccaagcaccatccccccatcccttttccttgcctgggtaaggatcgcacgtcgccagtgtggcagcgagcgagcgcgaggggagggaggctgagcgccccgccaagactcccgcgccgggccccctctggccagagctgcggcagccgggggttcgggaccgcggggagaggggcgcgcactgtggtgcctcctccgcccggtgggcccctgggagcaggcgaacacagacccgtgccggcttgggcttcctggggaaggttgagttgttgagagagtggaccacagcgagagggacacgcggccggccttacacccggctgtcctcaatcactgcacatctggtactttctttccggacacgaggtggagatctgcaagtcgggtctgggcagtctgtctccaccgtaatctctttctgagtcttcttcctcactcgctccgtatctctgccttt

SEQ ID NO: 235191 - DNA, 772 bp, Homo sapiens
  chr10:124908973-124909745
  hyper
ggtgggaccaaggctgcaggcgcttgccaaccgcttggtcccagggagagctggcggtctccgaggctccccaaccaactccatggcctttctgtctgttctcgctcctcaggtacccccaagggcagcggaggctcgggcccgggcggcttggagcgcacgcctttcctctctccttcgcactcggactttaaagaagagaaagagaggctcctgcccgcgggctcgccctcgccggggtccgagcggccgcgggacggcggcgctgagcggcaggccggcgcggccaagaagaagacgcgcaccgtcttttcgcgcagccaggtgtaccagctcgagtccaccttcgacatgaagcgctacctgagcagctcggagcgcgcctgcctcgcctccagcctgcagctcacggagacccaggtaaagacttggttccagaaccgccgcaacaagtggaagcggcagctctcggctgagctggaggcggccaacatggcgcacgcgtcggcgcagactctggtgagcatgccgctggtgttccgggacagttcgctgctgcgcgtgccggtgccgcgctcgctcgcctttcccgcgccgctctactacccgggaagcaacctctcggccttacctctctacaacctatacaacaagctcgactactgaccggcccgccgccccgcgccgcccccagctgcccgcagagccgggcgcgtactgtactgtaagcagggctccggagcaaggcggcgtgtttccagaaatatgaaga

SEQ ID NO: 235192 - DNA, 969 bp, Homo sapiens
  chr10:124910231-124911200
  hyper
cggaaggttttcaggtttttcggtggaaagacttgcatgcgtctgtctgtggaagtttggctcgctccacgtggagggtgggaccggggtcaggggttaaaggtcgggaccttggcgccgcccagactgcacgtggctggagctgcccgcccactctccctcctaacgcccagaatcgtcgcgcgggctggggcgcaccccggctggaatccagctcaagagtccgcgcggagaaagacaaagactgggaggcaggcctcgccatttaagcgattgccttctgggaacaagcgagctgggtgcccagcggcatattcccggcactgggctcgccttgagcttggccacagcagctcccgctatgacatgccctgtgccgcgcacttcctctccaggggtataaagcaggcgatggcgctgcttgtacctagtaaagcctccactttgctcgccgcgagcttggcgcgaccagcttgtcgctgcgcccagctacccggccggtggcagagttatgtgtctcgcgcggagagggaactgggcgcggtgaggcagttctgcggctcaggagagatccgaggcccgggaccaggcaaagaaggtgagggaggcaaaggcgcttccctacactcttttgttgttaatagtttgcattggttcagcgtgtggctggatcaccggctagcacgcggccgcttgctctgaatggaaccttgacgcgcggcgggggcgcccacggacttcctcgccctgacacctgcggccgcgcaggggctgggagggcgctgcaccgagagaatagccgcgggagtatcatgcaaattgcagattctcgctcccaatagattgcagccacctgttcttggcaaaacctcggaaaaggaagcctgagcttggaggaagccggtggttcagcaccacctggggcgagctcctccggcctctggctgggcagagcggatgcaaaggagc

SEQ ID NO: 235193 - DNA, 640 bp, Homo sapiens
  chr10:125650820-125651460
  hyper
cgcgcaaccaccggcgccccctcgggctgcccagcgcagaaagttccttacctggtggaggcggctccggagccgacttctccctcttgggagctttcttgggcttggtggccctcttgggcggcctgggctcctgcgggcgccgctcccactcctccccgggccccgcaggcagcggcggagagaaggtctcgagctcgggctccgggcgcgcgtagtagggctcccggctccagatctcctgcccgtaataatcagggtcctcgagggctgcgccctgggctccgaccccggccagggtcactgccaggagcaccagggccagcgctggggtagcggtccccgggcgggacatgcctgctccgccccgcgcccagggcagggtcacggtcaccgggggcgccgggcgggctgcgggcgcagaagctggcgcggggcaagggcgcagggcacagcagagcggcgcgcttgggcgcgggaggcggccggctggctgcgcgtgtgaccggcccgcggggctgggctgggctgggccggggcggacaggggcgcgcagaggcgcggggcgggcgcaggggggccggccccgcccttccttcttccctccctttcccggcgacccctccgaggccggtccttg

SEQ ID NO: 235194 - DNA, 2139 bp, Homo sapiens
  chr10:125851234-125853373
  hyper
tgtcacagcggctccgcgcacgcaggcagacgaagaagggcccccgcccccaggagctggtcccagcctccagcctggcagcctccttcgaagacttccctacactgggcgcggacctccagccgccagcagccggcaacccagccccagccttcctcctctatacccgccgtcccagccgcgccggccggccccgggcgcagggcgggcgggaacgtgggcacccggacagcgacggggaggtcaagcagctgtgcccaggacccgggcggctccgaagcctcaacacgcacacactcgcgcgcacgccggcccatcggttgcctggaggagtcgggaaggtgcttccacggctcttcattcattttcccaaaggcaaggttcccttcgccccggcgcctctatcctgccatcccagggggccaattgcgccacagcccgccacccagccacccacagccaccgcgtcctatctcccggcacacacaacccaacagactcgcattacatctccaccgccagcgtcgcctccgcgccccggccgctgccatccggctccccagcttcgccgccccgcagccccggctccccgcctctggcctcaccgcgcggctcagagctgcctcgctcggctcgccgcaccaaggccggccagagacgccgccaccgccgggaagcgccggcaactcccgagtcacgccgcctcccgagacgcggcggggcgcagggaggggacagcagtgggggcggggcggggaggaggaaggaggagggggcggggagcaaaagttcacaccgctcggggctcagccgctcccctatctcttcccaggcccgcccccgccatcccccttccctgaaccgggtcccacgggcttaggcgcgggagagctctggcctccccgcccggaaccgccgcaaggctagagccagggttctggaagcgcatccgagctcgcaaccggggagagagtggcggatgcccacttacctgccccgggccgcgcctggaaacttccccaaagtgcgataggggtgtgggggcggagcgcaaggctggggggaatccccgtcccctaccgccaaacgacgcgcgctcacaccgtgaaagcactggtctgtccgtcggtcggtcccccgcctgcggctcccagagctgggcggtgcaggggcgccccgattccgactactgggctccttctcccggacagcccgccggtgcgttccacgcggcttgcgccccccgccggcctccggctatccacggcgccaccacgccactgctcggtcccctgtcccctcgctccggccgcgtcctctctgcgagggagggggcgtgtgtcgccgctgggtaacccttcccgcggggtcctcaagcgcgcagggcgcccggagcgcggccaggaccaatggcgaagggactcctcccgctggggatcgctgaagcctcggggaggccgggccaaggagcccggggcccaaacctgcctcggctcgtcgagctcgcaagttcattgtctgcctgggccgccgccgccaccgccaccgccaccaccgcgccgggagcgccgcggggagtgaggctgcgcgccgcctccgccggcccggactccctacgcccagccccggccgccgccggcgctgcctggcccgaacccgcggaggggcgccggagccccgagcccagggccagacctcctaccgccgctcctcgccgaccccacctcggcgtctggcacctaacttgtacctgagaagcctgagtccagcccgggagcctctgcggctccggctccgcgggagcgcgcccagccccgagcctctagccccgcatccagggcgcgtcaacctgactccccgagcgctgggaggaaaagtttgggagtgacgtgcagacggcgaatgaaacatccgaggagaaccctccccccgccccatgtcgcgctgacacacatcagctccagtctggaatgtgagatcaaggcgtgtgcgccgagcggtgggtttggcccctgccccctccccctccgagtcaacactgcttgtgtgttgcggtgattccaaataaaagcacatcgaaacccctgaaatctggcagtgacaccttgccagatacttcttttttttaaagacagagtt

SEQ ID NO: 235195 - DNA, 159 bp, Homo sapiens
  chr10:125853673-125853832
  hyper
cccggccgccagagacatctttaaggaacttggcggtctggagccagcccgtacattaatattcaaggccacagcgctggtgagttcggcgccctctgttgtatttttgcatcccgggaaggctggcccggctctttggcccggcgtgttttgcttccg

SEQ ID NO: 235196 - DNA, 125 bp, Homo sapiens
  chr10:126077684-126077809
  hyper
cagggaggggccgcggggctctggtttctgcaagttctgaattgtctccaaggagcatattccaacgtcagaataataaacttttacagaactgtattgctctgcagcgcgcggggggactcggc

SEQ ID NO: 235197 - DNA, 943 bp, Homo sapiens
  chr10:126135844-126136787
  hyper
accccttggtggcccgcgaggatcgcgggtgcgcgcggcgggcaggggtgcgctgacacccgcgcacctgcacccccggtggaggagccgagggcacacgacgatgccaatccctcgtgaatcccgcgaaagaggggccagggggctccggattcatagacgcggggcgtagaagggggtcaggtaggaaggcccaaggaacggcgcgaaagggctcccgggggcggcagccgtcagcgggaaggaggcggcggacgggaagaggacattggccgcggagtaggaggggaaagtctggaagtgcagagcgccggtgccgggagggccaggactgccccccgagccgccgccgccgccgccccccgccgcccctggctggggcgcgccaccccccacctgcgccgcgccgtcggcacccgggttctgcttcttccacttggtcctgcgattctggaaccagattttgacctgcgtctcggtgaggctgagagacagcgcgaggttcaggcgctcgcacactgacaggtagcgcgtggcccggaacttgttctccaaggccaccagctgctcgtaggtgaaggcggtgcgcgcgcgccgcggcttggcgcagttgggctccaggcgccggcgcctgggacgcggggagccgggggatcccgggggggacctcacagggccgcccccgccgtcctcgcagggctccccagacgccaatgccccggccggggcgtcaggtgagcgcgctaggcccggcagcaagcgcgcagcccgctcccgcagccgcggcctcctcggatcctccgcatcctcctcctcttccgcctcggaaccctccaggggggacgcctggccggcgcctgggcccgcagcatctaggggagaaggggtcggtgaacagaagcctctccaggtccccaaacctcgtcctcgtcctccctagagc

SEQ ID NO: 235198 - DNA, 1709 bp, Homo sapiens
  chr10:126137185-126138894
  hyper
cttctctctcccgccgtgttaatagagtttcagatttgtgcggggccggatcgatagatgtcatctattaaaggtaagttttaatcgaacaatattaggatcagacagggaaagggggtttgaagtcggtacctgcaagctgcgggcaggagatatgcaggcgccagtaatagaatatcgatcacgagggtgggggaagggagggcggcccctcggagagaagatccgaacaattaccaggccgcctgcctgggcccaagtgcggccgccagaggcgccccgggccccaggcaatcaccgccaaacttggggaggggagcagggggctgcgcggcatccagcctcccccgatgacctgagcctctgaccctccagggagccgcctttccctgtctgatcccagcaggactcctgctgtcttccgtccttccttccagccacaaactttcctaaccccttcatcaggtgtccgccagcgttgggagtaattcagaaagggtttcgagaagaaagtaccgaaagcttcccaacactccatccgagccccgcccccagcccagtcccagttaacagttgagtctggggagcttgagcgcctggggcagcccagccccgcaggcgtctccgggtggcacctgacctcgctactcacgaagacccccggcgcaagccttagcgtcagctcccccatccataaaatggaggtgatgttaatgatgctgtccatctctcaggttccgaagttttcatcacctttatcccagcccttagcccaggtcctagcacgtggcaagcgcattaaatgcccgataaatgagtaagcctggcaagacaggcgccaggtaagtttccaccgcgagcatcagaactgtggtgcgggtgagcttggcgggtgagcagggatgcggcaaatccctgccctgtaatgcggggagcctcctctctgcctctatccaagtccgaggcgggggctacacttcgcacccggtcccgtgcgccttctctctgaggaagacgctgttaagggccactcaccgggcccggctgttcccccatacactccgcattgttggggctgaggcctcctggggccggggccgccttgcatcttaccaggggtctccagctgtcggacagggtccctggagctggcatctttccccgcttcgacctccgccaaacttttcctggcttcccggggagccgggcgcacggcagggagcgctgcgcgggtgaatttctgtgggtccaggatgtccaggacagagaaagaaatcttgtggtgggagggagccgccttggccccgccgtcctgccatgccagcatgcccgtcgcccacgggccggcggtcggcggcgcggggttggggatggcgccgctcgggcttgccttcggctgtggcttggcggtagctttccagccaggagccgggtccgcgctgccaagtgaagctggggaggggggcggggaggcggggcggggagagcgccgcggggggctgcgcgccgattggcaccggcgcagcccgggccagcctcgggactatcaggcgctgtgccgcggccgcttgcctgggctcggggaagcctccgcgcgcccggtgcgcgcgaccgcggggacagtgttgtcgtctccgcgcgcctccgcccaaccctctgggactctccgagggcgcgagggaggcttccatcccggggatccctcaccc

SEQ ID NO: 235199 - DNA, 217 bp, Homo sapiens
  chr10:126490204-126490421
  hyper
cctgcggaggatacggtgccggggtccttccgatcgcaaaaaccggcgttcctcagccttcaagactgtgagcgctcagggccctcggccgctgcccgccgcagactccacttcccatgatgccaaggggtcgggccgtccggaaggccgtgtgccctccgcggggcatgatggggtagctggagatttccatcatggcggcgtccatttcgggcta

SEQ ID NO: 235200 - DNA, 174 bp, Homo sapiens
  chr10:126847190-126847364
  hyper
aaggattgtttaccccggacagggcaaggaagcccggtatgacgacgtaggccattgccagcagcctccaccacgagcacgcagagcggggatttctacgaaaaattcctcctcttccctataaaatcctaaacgtggggtcctctgcagccaactgccgcttgggccgcctcc

SEQ ID NO: 235201 - DNA, 370 bp, Homo sapiens
  chr10:126848388-126848758
  hyper
ggcctgggtcgccggcggcccccgggcgcgcacccaccgggctcagggagcaggagccgggggcgcccagggaaccgtcgccgagacgccgccgccgccgccgccgctgccctccggacgccgccgcgctcggggtttctttttttttttttttcaaccctgatgggaaggaaggtgaccgcctacttcgcattcatcaactctcatcacaacaacaaaaatcctggcgcaaacggcggccagcgggcgcaatcggtggcgggggcgggcggggacccccgagccagcgtccacccccgggcgccgaggggggacacgaggccgggggcacggaccaaagatgtcctcggatgccggctccgcgtccttc

SEQ ID NO: 235202 - DNA, 93 bp, Homo sapiens
  chr10:126849003-126849096
  hyper
ggccccccctcagcgcggcatggctcccggttcggtccctcgctcctcgggccgccgccggctcctccgggccgctcccgagccaccttaaaa

SEQ ID NO: 235203 - DNA, 397 bp, Homo sapiens
  chr10:126849498-126849895
  hyper
gaaggagaaggaaaacggagagaaaaggaaaggaaagaagcggcgctggccgcagctcccggtacccgctggctgcgcaggagctaggcgggaggcgaggtgagggtcgccgctcgctcactcctcgctcctgtttttggggggggggggcaaaggcggggtctctttttgcaaaccaatgacacaaccccacatgggccggcctcgcccccttcagatactcctcactacaaatcggctctctcgggggattagtggctccgcgaaagtgcacacaagcgcggcgggcgggagggccaggggccgggcgcggcgggcactccctagcccggccccgcccgggaggccctcgggaggcgcgggggcctcggtggcaggggccgaggtcctgtcgcgg

SEQ ID NO: 235204 - DNA, 59 bp, Homo sapiens
  chr10:126850346-126850405
  hyper
gttgggtcggagccccgggtctcgaggagggaggcgcgctgcggcgtgggggcccgcga

SEQ ID NO: 235205 - DNA, 68 bp, Homo sapiens
  chr10:127511975-127512043
  hyper
ggggtcatggctgcggaatccagcaggggcattggggttgacgtgcactcagcgccgagcttcttcgt

SEQ ID NO: 235206 - DNA, 1731 bp, Homo sapiens
  chr10:128075549-128077280
  hyper
tttagccacattacagtagacgcggtgggggcggagggcagcagtggcaatcgcaaaataaaacgtatcataaagtggtaacggttcgtgatttaggccagttgttgaaaaataaatgcctgttatatagaatcacagaacttgagagcttgcggccaagggaagtcgttcatcggtggaccgacagcgccccgggcggcagaaagaaggcggcggcggcggagacccggggaagttgccggatttttaaaaaggcacctgctgggtgagtcctcactgtgcaaacgggagccacaggtgcccgattttaaggggctacaactcgggaaaacctaagtctgtaaaactaagtacgttaaactaagtaagttctcgctgtgcaccaagttgatgggggcgattatttacggcggagaaactgagtggaggaaggagggagaattccgctaaagtttgcctgcgactgacagctagggagtgacctggaagccaggaagaggggcagagaggaaactaaagaagtaggtaagagagtcagtttatgaaaatagagcctgctgtggagagcagcaggcacacctgcggaggagggggctgcctcacctgcggggccgctgcgcgcccccctaagtgtgttagcgggggaggcggggctggaaaggaaacctggtgaagggctggcccggagcctggggtggggatattcactgcgggatagggccagcaagaggacccgacacgcatcgtcccgagtgacacgtgtaaatgtcaagatacagagacatctgcaaatgtcacccaagagggtgaggacgggggagcggtcccgaggctgtgccctccggggcaggtactggctcctgtggggctgcgggccaagtgtcgcccttccccaaggaattggcacctggggggggggggtcggtctcgccgcgctggaagcgcaagccccggggctccggagatgcgccggggcgcgtcgcccctcggggcagccctggacctcggcgcgcccaggcgcagcgtgcggtgccctcggcggggcgggcagcgagccgccctagttcggcgacttacctcgggcctcgcagggcgcgagcagagcaccggccagggcgagcaggagggcgcgggcgggggacacgggcagcgggcgcgctgccatcgtcgccggccttcagtgcagcagctctcgggcccggcggcgagcgctgcaccatcccacgcgggcgccgagccggggccgggcgtcgcgaccggagggatttcctgcctcggcgagtcagctccggagccctcgcgcagcgcccgcgccgccgctgagctcttctagcctttcatttttaaaaaagtttccccccgtgtgtgtgcgtgcgtgcgcgcgcgcgcgccgttctggcacaagccagccttgaccgttgcaataaatgagcaaactgtccgagttggcccggggactaggaagagcgttagtgagagaaggcaggcctgtgaaatggatccacggccagcagtcaccgttcttattaccgcggaacaaattattgtctcccccgcacccccgccagttggcggcgtcccgcgggtcctagagaccgctcgggtccccccgccagggtcccgccccgagccgcggctcgctcacccccgagggtgggcggctcagacgtggctcagtggcgtccgggcgcccggagcgcacacgtccccgccccaggatgatgtggccgc

SEQ ID NO: 235207 - DNA, 1056 bp, Homo sapiens
  chr10:128593608-128594664
  hyper
ccgagctggggacctcgcaccaccaggctccggcctaagcccgcgccttgcaagccgcccgtttcctacctcccgtagaaaccccccgtccgtcccgcccccctaagggcgcacccctctcacggcgtgagcgccagccccgggagctccaggaactcaggagaaccccgcgggggtgcccgggtgcggagcgcggggctgggcgcactgggacagaggaaggggagccccggcgaccgcggggtcggggcccagggtccgcgccgagggcgggcgcagagcccgcggccgtcccgcctcccgccggcgctcccggcctttcccatccggcccgcgacgctccgcccgccccgtcccacatgacgccgcctccgccgcaaactttttcctccccatcctgtcgcggctcgaaaggaatggaaaatggcggcctagacgcggagtttcctgcccgacccgcggcggctccggcggcgccatgacgcgctgggtgcccaccaagcgcgaggagaagtacggcgtgggtgagcagcgccgccgccgccgcgcctctcgccccaagcccaggctccggcggggcgggtgtgccgggcgcctgttgccgccgccccgagcggccgccgggccggggagaggcgcttccgcccgcgcccgcgccgccgccccgctcgcaatgcccggcgaccccggccgccccgcgcccccggcggcgtcagctccagccccggggatgcgggtcgggaacacgagggggtggggtgggaatgggggcgggcgcgtccctccctagggtgtcccctccgacgcccgctcctctggacctctgccgtggagccccccgggctacccccaactccccggccccggccgctgctatctgcgcggctgggcccgtcagggaagcccaggggtcactgtctcgcggcggcttctgcttcttggatgaacttgcgtcccgcgtccgggctctgggtgggcgggctcaggtcggcgcggtcccagcggataattccgccctttcccggcggggaggagggggcgcgacctgggtggcca

SEQ ID NO: 235208 - DNA, 1398 bp, Homo sapiens
  chr10:128993454-128994852
  hyper
accagcaagatgcagactctcgctcttgactttgggctccaggagctgccccgaccccgggctgcccgcgggctccctcctccctcctgccctcgcccgccagctcgcagtctcttaggtctgcagcgttggttggtttcccacgcctgtcccggtctgactcgggctgccaggcaccgggaagccccgcggcgccgaccccaacccgcagccccgggaaggtgccaaccccagcgagtggaggagacgagcatttcacgtgggcatctgccttcactgctgctcgcgcctctcctcaacggccggcgtcagggcccctctgttccaactcatcccccccccgaagttaatcagccgtacttgtactttccagggcgctttagtttggaaaatacttaaaagcctcgaaaccttccggggagacggccgcccccagatctcccagttttgcctggctagggctgtcgggcgctcacgaagctgtggcgtctgtctggaacccacatcgcagaggcgcagccccgctcctccctgacgtcgccaaagttgccagacgcccctcagcgacccggtcgcgccagatgcagttgcataaccttgccccccacctgcgaccgcaccgggtccgctcccggctgcaccggggtgtcccggccccgggagccgccgagtttccggccaagccggtttggggccgagtgtgtgcgcccgaatcggggtcggcgcccgtcccagcggtgctctgcccgcggccaagtacgacgggcgcgggggcgcgggaggagggcacgcggggctccgcttaccttccgctgcttacagataagtcgaggtcgatgcagcgcctggctcgggcatgtctcgctgcggaccctggcaagcctggggcggcacggagcactccggacagggcatccgcggccagactcgccgcgctcacgcggaggaagcctcggctccggggacttggcccgctgcgcgcctgctgcccgccccctccaccgctgccggcccggccctgctggcccggccggcccccgcgccgcagctcgcgtcgctcgcgtccctccggccccgcttagcgacgcgcgcggggaggcagcggctgggccagctccggggacgcccgcgcgctcgcttgctcgcgacgcggcggagccagccacagccacccggcttcgcgctcctccgatgtcctcatttactgcaattgtcttcggcgagatctcagagccagggccaggaggcgggggcggggcagaggagggagcaggagggaagtcctttccgctgctccaggtcccagctactccgcggagccgggcggccagaggcgagggcgccccaagccgcgcgcctgccgcctgtgcgcccggctggcaccgaggcgggcggagc

SEQ ID NO: 235209 - DNA, 1838 bp, Homo sapiens
  chr10:129534422-129536260
  hyper
acaggtgcccgactcggagtccgggaggcgggccctctttccaggtacccagcccagcgtcagcctgggtccatcctccgccaccccacagcgcggggagcaggggaggccgaaagccgggcagcttggggggccgggataacccgggctgcagcaaccccgggcggcagcaggactggagagctggtgtcggacgcactgcagagacgtccctgttttcggcgcgtcctccgacacccagcagagagcttggcgctctccgctctgcgcgcccgaggtcacagcgcggagaaacctggcggggccccggactccccggcttgggaaaagcgatgactgccctgaactgctggggcgttcgaaatttccagggtcccgaccctccgtggggtacgcgcgacttcggcgcagatgtcagtccgctgccttccgggttgagggagcgaggactccagacgaccccagggccgctgtccaggcccagccccgcgttctccacctcgccacctcgctctgcggctccagcctggagatctacggacttcattgcgatctcttgcgcagtgtagtcgccctctatccctagccccgagtcccgggtaacccaggggccccggcgaggcgagtttctttggggcgagatgtcccgagccgagcaaaggggccgcgcattggacggggctcccaagccacagccctgggggccttgaggagtcgtggtacggtccagggcagtcggggctgcggggcccgtgaagccagacgaggctacggacttagggtccctgcaaccaagaccgcgagcgactgtggactcgggacggatcgcacaaaggaggaagggggaatcagaggggcgtccggtccaggacgtgtcaggcctgggcggggcggaaaactgacaccagggcgaggacaaggatttcgctcctccagggctgccaggggaggggctcgccaccgtcactctccatgggctctggccccgacggtgtttaaagggcggagggctgggccgggctggtcgcacccgggcgctgctggcggccaagctggatgggtcgccagtgagtttcggtgcggcaccgctggcccaggcccgggcgcggctggacatggccacctactgcgacgacctgggcccctcctcggccccgcccggccaggcccaggccaccgcgcaccccccgggctatgagccaggggatctgggcgcggtgggcgggggccccctcctgtgggtgaacgcgccagcgctcagccccaagtcctacgcttcgggtcccgggcctgcgccgccctacgcggccccgagctacggggctcccggcccgctcctcggcgccccgggcggcctggcgggcgccgacctcgcctggctgagcctctccggccagcaggagctgctgaggctggtgcggccgccctactcctactcggcgctcatcgccatggccatccagagcgcgccgctgcggaagctgacgctcagccagatctaccagtacgtggctggtaacttccctttctacaagcgcagcaaggcgggctggcagaactccatccgccacaacctgtcgctcaacgactgcttcaagaaggtgccccgcgacgaggacgacccaggtaacagcggcgcgccggctcgctccgtccaggactccccatcttcccgccgggccgcgggcactccgggggtgggagcaccttagacaacctaatttctccctgcgcggttggggatacccggggaggagggagaaggggaagaagtgcttgggcatggacaggttctcagacagcggctgagcccaccacaggcccgcgtttacagtgcg

SEQ ID NO: 235210 - DNA, 1004 bp, Homo sapiens
  chr10:129705208-129706212
  hyper
ggccatacccgcctcgcaggtggggcgggcgccctggatgcgctccccgcgccgggcaccaggcgtcgcccccgctcctcgcagcgcccaggcccccgcccccgccgcggagccacagccggagctggagccgaggcggcggcgggacgcggccggccggacaaatttcctgctaggctgcggacagcgggcggcaggagccggcgcgagcggcttcaggaacccacggcctctgcgcgtccccgcgacccttcttcgcgcccggcgaagacagccgggcgccccggagggcggcgggcaggcgcccgggagatgcggagcctccgctgcagcgcgatctgcgcgaccagaccggcccccccgaggtgagcgcgcgtgcggacagggaccctgcgcccctgtggggaactgtgcaccccgggaggcccaagcaggccggggcgctgcctcggccgctgccgcgggagggaggggccgctccggggctcagagtccggaccccggccccgccgcccccgcggcgcgcccagtaccagcggctggggcccgtacgacccccgaccccggcctgtggcgcgtcccctcacccggagtccccagcccaacttggcgaccacagtggcagtgctcacgctccctctcggtaaacaggaggagggcgcgcgtgtctgcgggtggctacagtgcgcgggggccggcggcagggcggcgtacgtgaaagcgggcgacacagagagggggtgcaggccgcgcgtggggggctgcgcccactcgaggctggaggctggagcctttgaagaaagtggctcgagttgtgccaactctgggaggggccggcgctctgccaggatgctgccccgcagccgggcgggcgcccgcgccttcccagggaggcaggtggagcgggatgcagcagccgccgggggtcggagatgcggcagggagaccctggcaggtggtccaggctggactgccgcgatttgcagggtcgacgacctcacagg

SEQ ID NO: 235211 - DNA, 107 bp, Homo sapiens; identical to SEQ ID NO: 202369
  chr10:129923799-129923906
  hyper

SEQ ID NO: 235212 - DNA, 63 bp, Homo sapiens
  chr10:129948078-129948141
  hyper
cggcccctccgcagcggccccagcccgcgtccccgcagcgccccttccgaagcgccccctccg

SEQ ID NO: 235213 - DNA, 414 bp, Homo sapiens
  chr10:129948377-129948791
  hyper
gagcggagcccacgcggccctggagcgcggtggctgggcccgtagcgccacctggcggcggatcagggcccccgcgcccttgcgtcctcggaagggggaggggaagggactccaccctgcaccccccacagcgcgctcccgaggccgtttcccaaggatgcgcgggcccgaggggatggggacgcggcccgcgcggcgcgttcctggctacctggagtctgggaatggcgaatcccactcgcagcggacacaggcgaggcgcagcgggacgggattggtgggaacggaaacagcggtcacctgggagcccagaaccagcgagtgcgcggtgcagcgttcgcttaccaaacgttgtgggacaaacgcctttcaactgtttctggacgccagtgggccggcgttaccctgttgagc

SEQ ID NO: 235214 - DNA, 425 bp, Homo sapiens
  chr10:130008567-130008992
  hyper
agtccggccgcggacggcgtcccttccagggccggccgccagagggcgagcgcgccttcccgggcggggcggggacgggacggggacggggaggggacgggacggggacggggaggggacggggacacggacacgggaggcttccgctcgcccgcgggtggcgtctctgctcccactagagcgggccaggcctctgggttccgtttctcaagcacacagggagggtggccgcgggccaggggcggccgcgagactccacgtccacgtcccgggcagtccctccggaggttgggccgcgcggcccggggagcggagcgctgcgcttctctgcgagcaccccggggcctttaggcgcccccgtttcctcgtcagtggggggcgcggtgccgcttctccgcgggctaaactgctgaggaaggggcgag

SEQ ID NO: 235215 - DNA, 59 bp, Homo sapiens
  chr10:130009172-130009231
  hyper
cgcgggtgatgcccacactctcagcctgaagagcaggacctgtccgcgggtggggccca

SEQ ID NO: 235216 - DNA, 398 bp, Homo sapiens
  chr10:130085036-130085434
  hyper
tccggggaaggccacgcagggtgcaacccggacgcgcccccgggggaagcccgcgacgcagcagccacacccccagcctgcactggcgcccaccccatgacttcgccttcgcggtcgcgggcagggagcgcgcgtttccatcggttgattagaagcgggagtcggaggagcccccgcccgccggcggccagcgcacagcccggccaggggcgccctccctgccgccgccggccctttgatcgcccgcggcccgcggcccgcagaccacagccagcgctgtgctgggcaggtggcggcagcggggcgcggcgcgctcaggcgcacgggtccccgggccgcggcgcgctccccgccacgccgcacatcaaggcccggccggccggcgggcgccttcatta

SEQ ID NO: 235217 - DNA, 1242 bp, Homo sapiens
  chr10:130338555-130339797
  hyper
ccaaggcaggagagcgcagaactttccacgcgccaccgcaaccaacaggcctcttcatgggaaattggctgaaaatgtgctgaccggcataaaacttttattagaatccgagagcaggaggctgaacttccagggaatgacgggtctgggcgggctggggagggcgcagccaggacccagaccggggcgctcggtcccccagccggcccccatccgtggagcctgcgccctgccgtaactttgggggtcggctccctgggcccccagctcacgatgcccgctaggagccggcgccggggcgccccaaggctgcctccccccgcagcgctgcgcagtgcgccctggtgggatggggacgctgcacccctgaacccccccaaatccggcaggcctagggctggaggcgcggaaaccctcactcctgccgagctcccgagcgggacagactttctgaaaggggaaagggacataaatcaggaaattaaaaaaaaatagtttctgcacattttcaaaacccacgttgcgctctctaaggtccttttcattttaaccaaatcagggggaacttgtcctcacagcggcgaggcagatggaacaataaatcacaggcgccgttgactgcctgcagtgcgctctccacagctgtcacttttttgtctctttggttttagctgacatggtttgaggtccactgtgaaccaatctggacttttttttacagtcatatccatcaaaacgaccagtggccatcagcccgctgcggccatcgatcgggtggcccctgcccccgtgcaggccggcgtgacccggctcctaggtgaggctggagagaaggacctcgttttagcggattttttcctttttttttttttcttttgcctccagctacagctgtgattttctgagcagtcttggctaacgttattaaagttgcatcaggatagatacagagcaaagcagataacaggctccgcgcgcgggagctggaaagaccggcagcctctggttcctgttgttgttttttaagtgcgcggaggcgcaggcgaaactcggagtttccaactcgttgcttattttgcaaagtaaacaagcaaatgttatgtgcataaccttcgctgtctcgctaaaggtcagcgcgcccctgctcatttcccgggctgccttttgggggcactctgatgccggggatttcctcgggtgttggggaaacaagacgtgctcgcctaacaaagactcaatcta

SEQ ID NO: 235218 - DNA, 54 bp, Homo sapiens
  chr10:131757898-131757952
  hyper
gagcaggccgccctggaccggccgccgtcccgagctcccggggcctccctgagt

SEQ ID NO: 235219 - DNA, 190 bp, Homo sapiens
  chr10:131758132-131758322
  hyper
gtgctaatggccaatctggtgtttattttgaaactgctaacagtgatttttctcgggtaaaaaggcagtctctgcgcgcacgctcgggtgggttttgagcagaggctccgccagatggtgcgaagccctaggtgcgctcacggccgcgctcagcccggctccgccgctgggaacccgagctggggatcgg

SEQ ID NO: 235220 - DNA, 1940 bp, Homo sapiens
  chr10:131761129-131763069
  hyper
tctttatgtcctttcaccagcgcagaaaaggagagccagccgctgcaggggcggcgagcacgcagcaggcacttaccgttgctgtacaataactggagtttatagtggatgccgttgttggttttctcgttgtttggctcctgaaagtaacgataaataattgcatttagtgcgatcggtgtcaggcgcggccaccacgctcggtccccctccgcgaccgaggctctcggcctcacacatggcaggattcctagctcgaagcagcgcggtgatgtcactttcctgctggaagcccagcgttctcctcgccccgagtaagtccgagggcgcagagaagttgcccagccctcggcggtcccgggcggccgcacgtggcggcggcggggtggcctggcggagccgagcccgccgcctaggggggcactcgaacccccgcgcaccggcaccgcctgcctcccgcttctagaaagagagagggtgtgatcgtgtgtttgcacttactttctctttctccacaaagtccacaaaagcggtcctttcaatctccaccggctgcccctgcctatcgtagagcgccagcacgaagtggaagaaattggatttccggaggttggaaggcggctgcttctcgaagtgcgcccgcgccagccccacgccgctgcgggaggaaagagacagcggcccggtgaggagcgcggcgccggccggcggagggggccgggccgggccggggccggggccagggcgcgcgggggcggccggtacgtacctctgggcggccgtgttggcgtccaccacgcccgccgtgtgcatccacgagcgcaccgggttcatgccgctgcccagcggctcctccttcatggtcgtccccccgcgcggaatattctcctgaatcccaaacatgaaaactgctggcggcggccgcagctcccggccgaaagcgtttcctcgagcagcggcgctcggggcttggcggcaggcggctgccctggccgccctcgccctgctcggcgcctgcggtccggccccgccgccggcttcagcccgtcccgggcaggcgcgacatacaccagcggccgggcgctccggacggccaggggcgcggaggcggctccaccggcggcggcggcgcttcgaaggagcaggacgcggtggccgcggcggcgcttgttgttgttgttgtttgcaggcgcgctcaacgtggtgtcatcctagccaggcggcgtccgcggctgcaggacactgcgggatcgcccgcttctggcgcggcccgcctgctccaaagacaaataaacggggcagtgagtgctgcggcgcagtcccgggcgcaggcggggcgcggcggggcctggagcggcgcgcgcagcggacggaggcgcacaaaactcagccctctctccccgaggaatggaccctttcccgggagccaaaactcgaagcccccgggagcggcgctgtcagagggtgacgtcggggggcggtgcctgcgccatatatgggagcggccgcccctcgccgcgcccctcgccgccgccgccgccgcgctcgccgactgactgcctgacggcgccgcgagccggcccgagccccgcgagccccgcgagccccgccgccgccgagcgccaccgagcgccgccgccgccccccgccacgcaccgcggctcctcgcgtccagccgcggccaaggaagttactactcgcccaaataaatcttgaaaagaaacaaacgcagccactgcacaattgcagtttggccccttaatacctccctgcaaaacctgccacacagtcgaacacgatgggcggggcggggggctgtaaaatgctgaggcgccccaagttgcccagatgcatgcaataaatgcaaggggctgcagcttgtcctggggccgcccgaaggagaagtgggaagaggcaggtcgaccgcagggagggcgccg

SEQ ID NO: 235221 - DNA, 49 bp, Homo sapiens
  chr10:131763729-131763778
  hyper
ctgccaagagaaatcaggcccttttgattaaaagaaaaaaaaaaaaaag

SEQ ID NO: 235222 - DNA, 546 bp, Homo sapiens
  chr10:131768688-131769234
  hyper
ctggaagctaaccgcgcacaaaagtttgccaataaaattctagtttgaaaccgcggtttgccaacacgagtaaaggaagttggggtggtggagagctacagtgggcacggacggaaagggtggccacggtcaccgatgtactaatgtcctcctcctcggctacccgatctcactccttcacagcaccttaacagagtgtatacacccgttctggtgcgcaaaagtggggcgatgggtgccggcggccgggccggggagtccgtccgggtaattaactcagctccggcgactgcgacgatgaggccgggagggaaggaagagcataccgctcttggacagaaatgtgtcaagctctcctcccttccagcctgcataaaccctttcgcgcacattcgcgcgacttctaagggatccaagccagcggactgggtccagcagcgcgcggcggcgggacgcacccctcctctccccccaggaaggcgggtgcacgccggggctggaagggggagggtgcacctctggctacaaattcggccgcgaagagat

SEQ ID NO: 235223 - DNA, 775 bp, Homo sapiens
  chr10:131770564-131771339
  hyper
tcaatttttggttgttaatccgaaaggaggagttttaattgcttcctgcgttgtcgtccaggcatctaggcgcttcgaccttccccatccctctctccaagggtctggcgtttgtactgggggaagacggagagtgaaaaacgcggggtccttcagctaaatcctcggaaccccggatcttcgcccgtgccggtacgcgcctcccccgcgccgagaatccctggcacgcgatcgcctccccgcaggcccgccgggaaggccgcgagcagaggccaacggaggcctcccaggcagtgctcgccaggaaccaagacgctgccagggcgcggcgcaaaagttcactgcgaggccaggcctgggcgcagctcatggtcaggggctcctgcctccacagtcccaccccgcgcctccgccgcagccccgcccgcgctcccgtaggcgagaggagcgcacccggctccggggccccggcaacccggcccccagcgttcagtgtccggcccgccacgcgcgaagttcaactttgctggcgccgcggccgcctgggggccgcgggctggggcggggagcccccgacgggatcgagagcgcgcttacctgtgccgctcactcgacggacatcgcgggcgccccggccgcgaggtgtcggcggcgccggctgcgggccgggaggtgggcggccccgcgccttcccacgttcccacctcccgccctcccgggagagcccacgggcccggccgcgagcacgccagtgcgcacgcgccacactgccttc

SEQ ID NO: 235224 - DNA, 96 bp, Homo sapiens
  chr10:131909004-131909100
  hyper
tgtcgccagcggccgagcgctaagctgtccatgcagccccagggtcaaaccctcccggcatctcaggcctggccgaggcccgcgcaccacgccccc

SEQ ID NO: 235225 - DNA, 235 bp, Homo sapiens
  chr10:133109173-133109408
  hyper
tgtgaaagtcctaacttctccgcgatgtcagccacggcccgcggcggtcacggagccacttcagcacctcgcgatggacagtgacccccggcgtggcgcgagttccctgcggtccccacgcgggcctgggcggcgggtccctccacggctccgtccagacacccggaggcacctgccaaagctgcggaggtggacgaccgggcgtccaagcacgaactttctcgccgaggcacgg

SEQ ID NO: 235226 - DNA, 222 bp, Homo sapiens
  chr10:133110068-133110290
  hyper
ccggacccggcccccgccccggtccccgcccgcccgcgcccctccccgccggaccccgccccgccctcgcgctccccggccctggccggggtctcctccccgctgcgcccctggacccgggcggccgcggaggacgtgggtgggagagggccgagggcgcgcccggctgggctcccgccgatgccggccccctggtggcctctggccctctgggacccagcg

SEQ ID NO: 235227 - DNA, 205 bp, Homo sapiens
  chr10:133110590-133110795
  hyper
ggtctgaagttccgcgccccacagtggcccgcgggcctcggcggctcctgccctacgccctccaaggcaccaggcaggtggccccagggcctttgcccacgacaccccctgggtggggcaggaccacccctctgtgaattcgtcctggatgcccccaggcacagtctgtactcctccctcccccagcacacgcggcctctgacgc

SEQ ID NO: 235228 - DNA, 116 bp, Homo sapiens
  chr10:133110975-133111091
  hyper
cctccccatcccgggtccacagcttcagtgcagcccctggcgacgcgcgctgacagctgggcagagacttccgtgcgctgtaaaccccttaggtcgctaaacccaggaaacccaag

SEQ ID NO: 235229 - DNA, 579 bp, Homo sapiens
  chr10:133794830-133795409
  hyper
tcataacaggccacttgccacgccttggtgtttggtcattaaaaccaatactggtctgaactacagaccgcggagggcaacgtggactttgaggctgttcggtccaactgcgagacgcagattcacctccaggtggaattctagctcgcgcggagctggagaatcggggctttcccgtgcggtccgacccgggtccaagccaacccccgcccgagtggcgaggccgcgaaccccgggcagtacgcggggtccccacgccccgggctccgcatgcccgcaggaggggtgggtacggaaggggaggatggcgcagcctcgcccggcccgcgatgccccctaggcctccccggcaacctccccttggcgccctcttggccttccccaggcttcccccccgcgccccctcggctcccgcgccgcctcctccgcctcaccctgcaggctctcctcctgcatcccgggcgctccgttctgcgacatggcgccagagggcaactgcggcgatcggagtccgcgccgggctgcgggatgtgcttcagctgcgggcggtgggaaagcggaggtcggagcgccgcggcc

SEQ ID NO: 235230 - DNA, 32 bp, Homo sapiens
  chr10:133795589-133795621
  hyper
tgggcgaggggcagaggcctgcggtgcgcggg

SEQ ID NO: 235231 - DNA, 1158 bp, Homo sapiens
  chr10:133849626-133850784
  hyper
ccaacaagtgggtgcggaccttcctcccgctttaccctgaagtcccagcccggagcacgcggccgtggtgagctgcgatcccaggccccggcgcagcgctgagactgtggctctcaatccgcagcagctgcttcatctgctcaatgccagactccaaaaagcatttctctcgcaacaggccaggggaggcagcgttcggggatgggacgccaagagttaagggtgaggccgcacgcgtgcagctcccccgtgctgcgcatggcgctgggatcggcctgagcggcgggtgagtccctctaagccggcggcgcccggtgcccggctccctacgcgcgccccgcggcccccgggctattttcagccacgccgagccctgttttaggagcttgcacagcggctccgcggagaccgggactgcgtgggggaggatcgcggcgggggccgtcgccgagcaaggagcgcggccgcggggaccgcccgggagtgggggcggcggggcgggccgggttcggggctcctgcccgcggtgacggtgacgcgcgcccccgcccgccgcctctgccatggccgatccggtccgtcggacgccgcccagagtcgctcgcggggagcctcggtgagcagcggccggggtggggccgcgaccgggggccgggcctctgcgctgcgtctggcacggtgcgtccgggacgcgggcgccctggcggccgtggggcgggcggggggcgacgtcccgagggagggggtcccgcggcagagacgcccctgtctggggcggggtcctccttgcctctcccggcggtccccccgtgggcgggtcctctccacggcaccccctgccctgcacaggcctcggcgctggcgtgacgcggccgctgggtggggcccgcgcaggtgctgggccagggctggggacccgcatctccgtgtctccgactgtgcctcccgcggaaaggggcgccgtgcgattatttttatgttggtgtctggtttttaaatttcacagcccccatttcagggatggccagcgtggccgtgggatgctgacgatacgggaagccagagaataaaggctttggtggaggtcgggaggaggcgccggcctggacagttttcctagaaaatattctctgcgtgtacccgcgaccttgcctctcg

SEQ ID NO: 235232 - DNA, 1004 bp, Homo sapiens
  chr10:133999139-134000143
  hyper
cgcccagtgtgtcccgagggcgagcagccacgcgtggccgggactaagcgagcacccaggggccagaatggggcgttcagcacccgctacgtggacagagccagctccgcgcagcgctgccgggcggcaggaggcggggggggagggcgcggcctccaggtccgcccagtgcacctgccgcgcagacctcgctacaggaggctccgagaccggattctgtcgcccgctcctgccgtgaccgcgcggcagcctcaggagcccgcgaggcctctggcccggcccaagcttggctgcgtgttccgctgcgtggaggacgccttcgagagcaagacgctgccgctggacgctctgggcggcggccgcccgggccctcgggttgggaggcgagtctgcgcggcgcgcggagacccctcaacggccgcagcaagtccccgagggcagcccggcgtggcccaggcccgggacccccagcaggtagtggccgcgggacagaggccgtgggcccgggctcggactccccgagaccctcgcacccggaggacgccgggcgtggggctcccccgctcccccctgcggggtcctccctatccgtaaaggtcctgagccttctgggtcctgcgaccaccccccacccccgcgaggtcccgcccaccaccgcgtcccggtccctggggagcgcgtgcgcctccttctgtctctctctctctctctctctgtcctattcgggcccctcctgccctccgtctctcgcggccagcgtggaacagcctcgcggggtcacagcctggcgctcggaccctggcccgggtcatctgcgaaggagccggctttggccaaggtgccttcctggacgggtgtggttcccagagcgtcgcggcccggggttgactggctcggaatcccggggccttgggcgcctcgcgtctcctgggacctgggttccgcgctggagggcagcgggggcgcgggcggggcctggcaggacgtggccggactctctccct

SEQ ID NO: 235233 - DNA, 62 bp, Homo sapiens
  chr10:134000323-134000385
  hyper
cggggtgaggcggggctcgggctggggcgggccctatcgggggcggggcctgccgggggcgg

SEQ ID NO: 235234 - DNA, 175 bp, Homo sapiens
  chr10:134045849-134046024
  hyper
aacagagaagagggcgggtccggcaggctccctcgggcccctgatgcaggaggctccaacgagcggtggcgtaaagccctgggtttggtgcagtctctgtctggagggacctcagcacccgagatcacgcagagcagtgtttacaaaaaagactggaaaccggcggccttttatg

SEQ ID NO: 235235 - DNA, 322 bp, Homo sapiens
  chr10:134121997-134122319
  hyper
ggcggcgggaatctgccgggcagagcccggctcacggtcaggaggcggcaggctgagtccaagcgctgcgccagagggtggggtggggcagggcgggcctggctgcgcgcgcgcacacgcgggcgcctggggtgggcgctaagccctgagcacgtgcgcccgcgctctcgggcacccccgtgccatcctcgcgacccccgtccggcctgagaccgcgtgcccgagtcgcccagggtccccttgtccagatgcgacaggggcctcggcactcggcgtatttcggaggcctggggcgcggcttgacctccgggcacctctgccc

SEQ ID NO: 235236 - DNA, 357 bp, Homo sapiens
  chr10:134210965-134211322
  hyper
cccgctttcggtttctgccgagcctgagtttcggggcgcgcgagcgcggccgccactcgggggggcaaaagtggttctcaaagtcgtcgcgacttttcggggcgggcgccgggccggggcgggccggggcggggggcgcggggccggggtcccggaactccacacatctgccataattaatgcacttttctttgttcagagccactgttgaattcgactgttggcagaattgtcgttaaagcaggggagggtcagatgcgccgtggccttgccctggcagttcctcacaggtgggggtgccctgtcgaaggccacgggcccctggctgctgggagtgactccgcggctgaggtttgg

SEQ ID NO: 235237 - DNA, 57 bp, Homo sapiens
  chr10:134350649-134350706
  hyper
aagctgcacggtccacgctccgtctgcgcggagagccgggcgcgcgtggcccggccc

SEQ ID NO: 235238 - DNA, 390 bp, Homo sapiens
  chr10:134351389-134351779
  hyper
cgcggggccgcggagcagcgagcgagcgagcgagcgcgaggccggagccccggccaggcccggccgacccgccgagcccgcgatgcgccccggggccgccccccggcgcagctgacgccccgcggccccgcgaagaccccggccggccggtcccggaggaagcggccgccgccgccgccgcccagcccagcgcccgcgccgcccgggcaccatggcggggaaggcggccgccccgggcaccgcggtgctgctggtcacggccaacgtgggctcgctcttcgacgacgtaagtcccccgtgccggcggcaggccccaagcccggaacccccgaccctgaccccggggtcccgaactgcaagccttggaccctggaccgtgaacctccagac

SEQ ID NO: 235239 - DNA, 691 bp, Homo sapiens
  chr10:134597936-134598627
  hyper
ccaaagcgggaaaacggaagaagaaaaacctcccgcggggactcgaggcgggtacgcggctcacccgccctttcgggaacccccaagcgcgtccgaatccgccccgaggcgaggcgggccgggccgtacctgctgctccgtccccggctccgtcccgggctcctggcggctgtcgctgcggttccttcccgcgggccgggccccttccctgcgccttcgccgcctcctcgcgcctgcccggggcccgcagcctccgcaccgggaacccggaggacccgaggcgggcgcaggggcgaagccggggccggggaggggccgcctcgctccgggttcgagacggaagaaacacgcggcgcaggctccggagcgacggctccgacggggacccgttaaataatttattgatgatacaaagcgactcgcgcccacccggggccgcccccggattctgcaaaaatagattcgcccccaccccgcgggtcctcacaaggcgtcccccgcgccgccgccgcacgggctgaccagcgccaagttcgagggtttgtgcttcttgagcagccgcgtgatcttctcgtcgtccgagttggggtccaggggccggttgtattcgtcgtcgtcctccgcgtccgagccgcccaccttcagcttctcggcgtccgagtcctgcttcttcttggccgacgccatctcc

SEQ ID NO: 235240 - DNA, 3132 bp, Homo sapiens
  chr10:134598657-134601789
  hyper
cggttctggaaccagacctgggagtggacggggcggtcaggcggccgcggggcccggggctggcgctggggccgttcgcaggacgcgggcccccggctctgctctcccgagccccgccgcgctcaccttcacctggctctcggtcatgcccagcgagtaggcgagacgcgcgcgctccgggcccgccaggtacttggtctgctcgaaggttttctccagcgcgaagatctgctggcccgagaaggtcgggcgcgagtgcttcttcttcccgtccttgtccaggacgccgccggccggggctgcaagggaggggaagggagggaggtcagcggccggcggggtccccctccgcgcccacccgccccgcaccccccgcgcgggccactcacccgggccagccagacgcgggtccctccagggcgcgccctgcaccacgccgggccagaagatgggcgggcgccccggcagctcggccaggggcttggggtagccgcgcgccacagcggccgcgggcccgaagtaaacgccggcggacgacgcgagcccgttgagccggggcagcccccccaggaggcccccgcccgccgcgcccacgggccggcccaggatgtcgctgatgccgtgcggggtcccgagcgggagctgcgcgcccaggccccccagcgcgggcgccttgaagccggccggaccctgcagcgcgtaggggaacagcgacgtcttcatctcggccatgttgtgcagcgcggccagcggggcactgctcagcacgaacgcgcccgggcggttagtgtccatgggcgccgccgccgccggcccgggctcccatccgggccccgccgccgccgcccctgcccgccggcccgggaagtttgcgcgcggcccgggcgggcgtcggctgcagcgcggggcgcggggcgcggggggcgggcgggcggctccggcgcggggcgggcgggcgggcggcggcggcggcggctccggggccggtcggagcggcgccgcgcgggacggacgcgctgataacgggggctccccggggcgcggcgcgcgcgctgattggctgcggaccccgcggtccggccattggccggcgccccccccccgcccgcgcgcccccgccggccgcgcactccatgaagggcccattagcgcggcaggtgcctcccgggctgtaaattcgccccgatttatctccccggggacgaaataaatccagcttggatgggagtgtagttaggcaaaggttttcatgcgaaatcaggaaaaaatacgagaacgtattttattaacggaaagaatgcagatttgaggacccgcccgcgcgctcggagcgccccactcggggaagagtcccggcccgcgtcccagtcgcgactgctccgccgcccgtggctggggtgggtgtgagcggcagcggacgccggcggggaacgcgctccgggcaggtcggggccacaggagggcggaggacgcgggcctcgagtccacggaatccacgggcctcacggccgggcgaggctcgcacggagctgcctctggtttcgccgacacgcggccggcgcggtggaggagtgaggcaggcgggagcggggcggggaggcgggtcccgggaccacacgcgcggctcggcacttccccgtcatcggcctccaggtctcccgctgggggtcccccaggatgtgacctgggcccacgacttcgcccacgggccgcctctcgcgaatccccggccgggagaacagagaccaggacggcctcagcgcggaagccctgtccagggcccgaacgtgggtgcgggctgggggcgcagcggcagaaacgcggccttagacgcgcgcggggggccggtgtcccccccgcccccacggcaccgggagccgctcgctcatccatcccgcagaccgggcggtgagatgactccgagccccgcgcacggcggccgcgagcaaacgctccgacgtctgtggtgacgtctcgtattgatttagggacacggggcggctgtggctgtggcccacggctcgtggggagcccgagtctgtgcgcagggaacgccgctgcgtggcctctctcgggcctgtgccgcggaggaaggcggcgcccggggttcggggccggggtctcacgtccgccccctcgcccccctccagcgtccgttttcgttttgtgcaggtcgaggcggggacttggcgccgtcggccgctcctggatggcggcttggaaaagccacctgcggccaaactccggggcagtggtgcggccgccgggtgtgtgcgcgctcggggctgccccggcggcttccggctccactgaggtgcagccccgcgttcacggggggttcgcttcccccgtcgactccgcactcgattcgactgggattgggattcgattgggcgcggccgccccaccggtgatcggcccccgcggagcctggcccgggaacccccagcgcccgtccggccccgagacccgccccggcctgtcctgcgccccgctccctcggaggagacacgaggaagggccctcccgggtcgggttcgggcccctcccagcaccccaaggcgacggcgcccgcgcccaaggctcgggctctgagctgagacgcgggaactgcggggccggggggggcgggcagggggagttgggggcgggggctgctgtcgccctgggatcccccactctgcgcggccgggcagaccctgggcgggccgggaggggtgcgggtcgcccgaactgaggcccaggaggcgcgcgcgggcggaacggcgggaggaagccgcgctcgggacaggctctggctcttctcacagcctggaggggcggggcagggggcgtcgctagcgctgttttatggctgaggaaacatggacctggaggcgctgcgctgcggcccgataaaccctgggtctgtctgcgccccccggtcctccctgggctgccgagggaacgcgtggggtcgcgggtggggctggcgtgtcactggctgcggagcgcgcggctctccagggctcaggggcgcgggatgaggggccagggtgagttgggggcgcagaggagccgggtaagggggggtccctctcccacgttcttgtaagccgtggaagtcttggcgcgctccgcaggtgccgcgtc

SEQ ID NO: 235241 - DNA, 328 bp, Homo sapiens
  chr10:134602002-134602330
  hyper
cgagcgcctccgaccgcgatgtctttgcctgggctccgccgcccggcggccccgctgcctggagaggtccgcgatgccacctcctggcccgcgagcagatgtcccgcgaggaaggctgccggcatcggcgccgacgctccgcgctggaaaaccgagagcgcggggtttggcagaggccattcaagtttgttttactcgttcagcctgtatttgtggggctcctaccgcgcccgggctgtccggggggtgcaccgtgaacgcagcgggctccggcccgggcgcgggcgggtcagagcagcaaacgcgctcccccggcacccccgcggcg

SEQ ID NO: 235242 - DNA, 92 bp, Homo sapiens
  chr10:134650441-134650533
  hyper
aggggatgcatttaggacgcaaggacgtcgctgtgctgttcccctcatttccaggagacctcgtggcagagccacggcgggggctttgtacc

SEQ ID NO: 235243 - DNA, 423 bp, Homo sapiens
  chr10:134676276-134676699
  hyper
ggcctcggggagcaggttcaggagaggctggagggggacggggcggccgggctgcactggctgagggtgaggaggggcgggaggggagggcagcacatggaggcaggctttctgtggtgtggatgtggctgagaagccagggtgagctgagggcaaagttgaggacgggaggtaggaggccttcaggcaagagggcgggaaagatcaaggaaacaaacaacttcctgtcagaagcgcctgctgtgaaacaaagtccctgcaaaacagcggctgcaggaaggagggtggcgaacccacgttcgcgggagtccagcacccatcacgtctgtcctgggtctgggctccaaggtccacggtggccccgggtatgaggcaggttcactccccaagtcccagagctcaggaccacggaggccccggcat

SEQ ID NO: 235244 - DNA, 166 bp, Homo sapiens
  chr10:134756155-134756321
  hyper
gcgaacaacgccgcgcccccgccctgccccccgccagctccgcgggagtgagacaccagggcagcgacccccggcgaggggcgggaagaagaaaggggagggaaggcggcgtggggggacgccgggggctccgcgcgggcctcctctccccgctcagggctcctgt

SEQ ID NO: 235245 - DNA, 1219 bp, Homo sapiens
  chr10:134901185-134902404
  hyper
aataacacagggtcgtgcagtccgcccggcggcgttttcgggcgagggtctggtgctggggagcgagcgcggagcgaggtgtctctttaaatacgctctgcagtgtgacggcggccgcccggctggaagagccatccccaccctgcggcaggagcccgcccgccgccatcgcccgccccggtccccatggttacgcgcctgcctccggccccgggtccccgctgtcgccgcgggaggtgcgcgcagaggcggcggcgctgctggccgggctgggccgctcgtgcgcggggctgtgactcaccggccggcgccgcagccccgcaatctgttgataactcggtcccagctcggccgctgccctcgcgaatggagagcgggtccccggcggggggagcgcagcgcgtctgtctccgggagcgcggcccggccgccccggcagccgcttcggccacagcaggtgggaaggacgcgcgggtctgggcggcgggagggacgcgcggggccgcggctcggcagaaaagctcgcgccccgaggtgacactggccgcgaggaaagcagctccgagtaactttcggctccgctggggcgggaggcgccacggataatccagggcccccgccccgcgcgcccggcccggagctcgagccacatccaggcagagcaggcgccgcggccgggctggggcgggcgggtcactcggtgccggttcccggtgcaaaccccccggcgcgcctctggctttgtgcagcccgagatggttgagtttggctccggagccgggagtggggcgcagattgatttttaaatatggagaaggagacgcatctgccgctggcgcgttcggtccgagccccccaccggtccccaccggcaccgcctccgccagccccaggcgcagcccccaggccgcccgcggaggggagggagcgacaggggccgcggctgctccctggcggggtcggggctgcgagctgccctccgcggggaccctccgcccgccccgctgaccgccgctgtcttcacagatgggagcagctcccggactgcgcccgccccgccgcggtcaccctgaggccaggggcccgggagcgcgacctcctggccgccgtctgggactttgaccttccagaggccatggaggctggcggggagcagggcgccacctgatcgcctccccctggacgcctcctccagcggcgctcacgcttccgcaacttt

SEQ ID NO: 235246 - DNA, 945 bp, Homo sapiens
  chr10:134973432-134974377
  hyper
agaccccggcccagcgaccgccccgccccccaccccgggccccgccccccaccccgggccccgcccggccctgcccaacgccgctgcagaggccaccccgggactgcggcagccccgcccggcagcagcgggggtgggacgggggcggcgggagccggcgagggggtctgcccgtccgagctttcctgggcgccggctccgcccctcgacccttggggcccaggtggggcgcagaccccgtggctccccgcggaggccacacgcctggctccgcccccggtgcctcccccaggaaggagcgacgttccctaggcgccgggtccggacagcgccgcgcagcccccgcgcaccccgcgccccccgcgccccccgggcccgccccgtatccctgaccgcgtcccctggagacactgcggcagcggcgggcgggcgggggcgggcgagggccgggcgcgtctccatggagccagggcgcgcgtagccgagcccagcccagcccagccggaggccccgggggcggtgcgcggcgcggccgcaggatgcaggccatggacccggccgcggcggatctttacgaggaggacggcaaagacctggacttctacgacttcgagccgctgcccaccctccccgaggacgaggtgagcccccggccccactggggggccccttccgccgccgaggggtccgcggagagcgcccggggggaggacccgggaggggctgtgagctcccgcctccccaggcgccctccatggccgaggggttcccaccgccgttctcagcccccgcgttaggattttcacccggaggggacagcacccccgaatgcgcacgggacggcggcgggtgggcagcccctgcagaagttggtgcgcggtagctcctggtggaaaccctggcgggacagtgtgggggcagcaaggaggacggaggggggtctgc

SEQ ID NO: 235247 - DNA, 893 bp, Homo sapiens
  chr10:135043092-135043985
  hyper
acagaaggactcggcgccgtgcggcaaggaggaagagcatttaataggaagagaatttcctcctcccagggatgctggctgcagacgcgctgcagatggaagaagttcagattttaaaagctacttctgcgagcgcgtgaattccgacacccattcccgcggctggcgtggcttctcctcggacccatcccctggcctggcgactccccctgggacccgggtcggtcctccggacccctcgcgtgcaggtgctgagcccgggcgggggcggcgggggcgggggcagcactgggggccggacaagggggcgccagcgccttccggagcgggaggggctccgcacacacctcgacgggggcgggggtaggctcggcacaggctaaaaacgagcggagccgccggggcttaggcatcgcggcacctccgttgaacgggtctaagaacagaactcctgaggaccctccgtttccaaccgaagccagtctttgctctgcgtcttcccggccgcagcgccaggaccgaccccttaggacccggcgggcggggcggggcgcgcggggcggggcggggatggtgggagggtcgcgtagacccggctgggacggagggacggcggcgcgggatgctcagaacgcgtgtgggcggcccgggcggcgtctggccctctccccatcctcgcgcgccgcgccccagccccgggatgctgctccggccccgcaggccgcccccgctcgcgccccccgcgccgccctcgcccgccagccccgaccccgagccgcggacacccggagacgccccggggaccccgccccggaggcccgcctcgcccagcgcgctgggggaactcgggttgccggtgtccccgggctcggcgcagcgcacgccctggagcg

SEQ ID NO: 235248 - DNA, 87 bp, Homo sapiens
  chr10:135044285-135044372
  hyper
cccagcgcgcccgccgcccggtccccaacgcgcacgcgccggctcccagcgaaccaggtaggcgggggactggggggccaggtgggg

SEQ ID NO: 235249 - DNA, 75 bp, Homo sapiens
  chr10:135044552-135044627
  hyper
tgcggacgcctcccccgcccccggctccccgccagctcccgccccgaccgccctcgccacctgcatccccgagga

SEQ ID NO: 235250 - DNA, 1094 bp, Homo sapiens
  chr10:135050032-135051126
  hyper
ggtaggccgccgatcggttcccggctgaggtcccgccccagcgcccgcctcccgggctccaacctctttgctcagcccgggaggctcggctggctggggcgggcgtaaccgtggggcgaggcccgccggtctttctgatttccgcgggcggcgtgggcgctgaggcagccgcggtcaggacctggccgggagtcggggctgctccgtggaccccgcgtctgcgccgaaaccccgcatggcttcgggggccggacctgcgcctccgcctaactccggccgccggagacgccgtgcggaccccaagccagtgcgcggaagacaccgtcctaccctcggcatggctgcctcccacccggtcacgtcggtccccgcgccccacgccgacgcgcaggcgacccggggacgcggagacgcagacagctcgggactcaggttcgtgggagcagcggccgcgcgtggctatgaccgtcccgggggcccgtgctcagggcgtccccgtgaggtttgggcgccacagtcaccggcggctctgcccgcgccctggccacagtggggacagcctggcttggcggggacgcaccagtcccgccgccgacgcggagttcctaccccgccgtgcgaggcagtggctccggcccttccagctcgggatggagtcagggagccgcccgcgcccgaatgcagaggctcctgcgatggccccggagtgagtcccccagaggagccggattagggctggaggcggccgagtcccccgagaggcccctcccgacattcccgcccccgcgcgccgctccccgggtcctccgcgtctctttcccgggaaagcctccctcggttcctgcgcggccgcacagcctggacgcagcgcacgcgggcaccggcctgactctcccaccccgaagcctgctcccaacctaagtccgccctgactctcccagcctgaagcctgctcgccctcgggtgtccgggctgggcacaggcgccagcgtccccctggagaggagaggtcgcccggcacctcccaggacaggcccaagtgggagtgggaccctcctaccttcctgcagcctcggcccgcggggtggggggtt

SEQ ID NO: 235251 - DNA, 165 bp, Homo sapiens
  chr10:135071049-135071214
  hyper
ctcacggctccccccgcccctcctctgccccagggcctgtgctcctacatcccggcaagccgcagccccgacacttcctcctaatttcctgacactccccactccctggcgggacgttttactccttgctctccttcccactggagggcgcgcgctttctagctg

SEQ ID NO: 235252 - DNA, 135 bp, Homo sapiens; identical to SEQ ID NO: 202383
  chr10:135074988-135075123
  hyper

SEQ ID NO: 235253 - DNA, 302 bp, Homo sapiens
  chr10:135090195-135090497
  hyper
ctcggggtccgcgtcgcgtcctgcggggagagccaccctgccccgcgctgcgcccgggacggttccctggaaccactcaccaggcagcatcatcgcgcccagcagccagagcccgaggccgcgcatggccgggtcggggagcagaggcggaggtgacagccccgcgggacacggtctggttcctgcgctcctggcccgaggctcttttccgcgcgccccgccccggcgccccgcagccaatgggcccctcggccggtgggaggggcggggcgcgcggcacctgggggcggggtccgtttccc

SEQ ID NO: 235254 - DNA, 55 bp, Homo sapiens
  chr10:135121712-135121767
  hyper
ctctttactctgacgtctgtctctcctacaaggctgccgcgccctcctgtgatgc

SEQ ID NO: 235255 - DNA, 102 bp, Homo sapiens
  chr10:135138914-135139016
  hyper
gagatggaagcctccggtggacgtgaaatctttacttagagaaaagcgacagagtcagagacccacgggggcggggctgcagcgagggcgcctggggacacg

SEQ ID NO: 235256 - DNA, 51 bp, Homo sapiens
  chr10:135139196-135139247
  hyper
ggaagaggaagggaagggtggcgggggtctttggctcagaagcggtggcgg

SEQ ID NO: 235257 - DNA, 72 bp, Homo sapiens
  chr10:135150493-135150565
  hyper
aggcggggcctcgactctggtcccgcaccctctacccccacccaccgccccggctagggagccgcgcatgcg

SEQ ID NO: 235258 - DNA, 151 bp, Homo sapiens
  chr10:135192040-135192191
  hyper
tcaacttcccgggcgagggacgtttctgcacttgccctcggcttctgaactttgtactttgcgagtgtactttgtactttggtcctgtgtccctgcagccctgtgactacacgcgcacacgcaggcgcgcgcacacgcgaactgacggctc

SEQ ID NO: 235259 - DNA, 125 bp, Homo sapiens
  chr10:135333791-135333916
  hyper
ggcttctctctggcgccctctggtgggcggggcccgggtgagcggggtcccctcggggcctcagggagccgcagccccagcggaaccaggagggcgccctccgcccagccgcgctgccacttccg

SEQ ID NO: 235260 - DNA, 229 bp, Homo sapiens
  chr11:207667-207896
  hyper
gtgttcctgtgaacgtggggcggggcggggccgtttgcttgctcagtgcctagacgatggtggtggaaagacgcttctgtgggttaggtcctaacggttaggaaggattcacaggcgggtcatgaggaaggagcagacccctcgggcagaagcccgcgaggagcactgggtgtggtgggggcaggggtgcctcctctgtcaagtggagatcggcgcctcgctcgtgcct

SEQ ID NO: 235261 - DNA, 163 bp, Homo sapiens
  chr11:279431-279594
  hyper
cccggacggacgcagcatcccgtgggggcggctggagcgcgcggacgccgtggacctcgcggagcagctggcccagttctacggcccggagcctgccctggaggtggcccgcaagaccctcaagagggcggacgcgcgcgacgtggcggcgcagctccaggag

SEQ ID NO: 235262 - DNA, 709 bp, Homo sapiens
  chr11:280032-280741
  hyper
gcctgccccacctccgacccttgtccccgcgctgtctcccgctgcgcccagagtacaagaagaagtaccgggagcacgtgctgcagctgcacgctcgggtgaaggagaggaacgcccgctccgtgaagatcaccaagcgcttcaccaagctgctcatcgcgcccgagagcgccgccccggaggaggcgatggggcccgcggaagagcctgagccggggcgcgcgcggcgctcggacacgcacactttcaaccgcctcttccgccgcgacgaggagggccggcggccgctgaccgtggtgctgcagggcccggcgggcatcggcaagaccatggcggccaaaaagatcctgtacgactgggcggcgggcaagctgtaccagggccaggtggacttcgccttcttcatgccctgcggcgagctgctggagaggccgggcacgcgcagcctggctgacctgatcctggaccagtgccccgaccgcggcgcgccggtgccgcagatgctggcccagccgcagcggctgctcttcatcctggacggcgcggacgagctgccggcgctggggggccccgaggccgcgccctgcacagaccccttcgaggcggcgagcggcgcgcgggtgctaggcgggctgctgagcaaggcgctgctgcccacggccctcctgctggtgaccacgcgcgccgccgcccccgggaggctgcaggg

SEQ ID NO: 235263 - DNA, 296 bp, Homo sapiens
  chr11:308160-308456
  hyper
ccatcccggtaacccgatcaccgctggtcaccatgaaccacattgtgcaaaccttctctcctgtcaacagcggccagcctcccaactacgagatgctcaaggaggagcaggaagtggctatgctgggggtgccccacaaccctgctcccccgatgtccaccgtgatccacatccgcagcgagacctccgtgcctgaccatgtggtctggtccctgttcaacaccctcttcatgaacacctgctgcctgggcttcatagcattcgcgtactccgtgaaggtgcgtatggccctggcg

SEQ ID NO: 235264 - DNA, 218 bp, Homo sapiens
  chr11:314083-314301
  hyper
tccggacaccacagcggcccttcgctccacgcagaaaaccacacttctcaaaccttcactcaacacttccttccccaaagccagaagatgcacaaggaggaacatgaggtggctgtgctggggccaccccccagcaccatccttccaaggtccaccgtgatcaacatccacagcgagacctccgtgcccgaccatgtcgtctggtccctgttcaacac

SEQ ID NO: 235265 - DNA, 90 bp, Homo sapiens
  chr11:327218-327308
  hyper
tttcccctgaaaaaatcagaaacaaaactcacctcaggagaggcccctgcaccctccaagaggaagtgggagtcacgtgaggctcgtctt

SEQ ID NO: 235266 - DNA, 31 bp, Homo sapiens
  chr11:369237-369268
  hyper
gtgtgccgcgcccccgcgctccgtggcccag

SEQ ID NO: 235267 - DNA, 35 bp, Homo sapiens
  chr11:417515-417550
  hyper
tgctgcccgggagccgctgccgcacgggcctgggg

SEQ ID NO: 235268 - DNA, 146 bp, Homo sapiens; identical to SEQ ID NO: 202389
  chr11:441946-442092
  hyper

SEQ ID NO: 235269 - DNA, 668 bp, Homo sapiens
  chr11:536905-537573
  hyper
gcgcggtcgcagtcagagctcggctcggggcggacacgcatgaacgcgagtgagaagcggcgactggacggcgggcggcagcgtgtcccgcgggccgggcactcgggtgcgctccggcgtccggtgtgtgtttcctggtcctcgggggcgcttcccccggtgcttccttttgccgtcggcctcacttccaaccgaaggtcaggacggcaggcctcggccccaggggcgacccttccacctgggaaaggtgggcgcgagcctccagcagagaccgcctttacccgccccgcgtgggaagcgccaggatcgcgaggaaacgcgacacgtgcatcgcgacggcccaggcacggagccgcaggaagctggcacctgacgcgcctgcgcccacccaactcgagttggtggcgcgtcaccttcccctgggatcgcccgcagcaggggcgcccacgcacgtgccagtccacgtggccccgccctagcgaccgttgctaaggggcgtggctcagccgcacggaacccgagcccccggcgacttataaatatttgcgtattcaaatgaggcctggctcccgttgctatggcgcccaggccgcaaccccgcggcggccggaagaacagcctggagtaggagacagcgcctggaggtggagggcgcccagggccgagct

SEQ ID NO: 235270 - DNA, 106 bp, Homo sapiens
  chr11:568188-568294
  hyper
actgccgggtgggcgggcggagggattgaccccacccccgtcccctccaacttgggcgtccgagccccgccgcgcctgcccagcccgaccccccgcagcccccgcg

SEQ ID NO: 235271 - DNA, 184 bp, Homo sapiens; identical to SEQ ID NO: 202393
  chr11:575194-575378
  hyper

SEQ ID NO: 235272 - DNA, 60 bp, Homo sapiens
  chr11:576422-576482
  hyper
tggttccagtcagcgagcaggacagaggagcccggaagaggcgccgtgcacttccgggtc

SEQ ID NO: 235273 - DNA, 101 bp, Homo sapiens
  chr11:615557-615658
  hyper
ggtgtgactgcaggtgtggccggcgcgcacacatgaagtcacaggtgttgaaccagtgtccaggcctggcgggaaggcgcaggccggaccctgcggagacg

SEQ ID NO: 235274 - DNA, 595 bp, Homo sapiens
  chr11:636912-637507
  hyper
agggccgggacgcacgcacgggccgggtaggatggcgctggcgtcgatgcccgcgcgcttcagggcctggtctggccgcccctccatccttgtcggtttctcgggtcgcggaccccgcgcggcgccgggcgatgctggcctgcccgtggccaccacctcgcttcattcccgtctctttgggccgccgcattcgtccacgtgcccgtctctccctgcgcaaaattccaagatgagcaaatactgggctcacggtggagcgccgcgggggcccccctgagccggggcgggtcgggggcgggaccagggtccggccggggcgtgcccgaggggagggactccccggcttgcgacccggcgttgtccgcggtgctcagcgcccgcccgggcgcgccatggggaaccgcagcaccgcggacgcggacgggctgctggctgggcgcgggccggccgcgggggcatctgcgggggcatctgcggggctggctgggcagggcgcggcggcgctggtggggggcgtgctgctcatcggcgcggtgctcgcggggaactcgctcgtgtgcgtgagcgtggccaccgagcgcgccctgcagacgcc

SEQ ID NO: 235275 - DNA, 273 bp, Homo sapiens
  chr11:639560-639833
  hyper
cgcccgcgccccggcgcccccgcgccccgcccgccgccctcaccgcggcctgtgcgctgtccggcgccccctcggcgctccccgcaggttcgtggccgtggccgtgccgctgcgctacaaccggcagggtgggagccgccggcagctgctgctcatcggcgccacgtggctgctgtccgcggcggtggcggcgcccgtactgtgcggcctcaacgacgtgcgcggccgcgaccccgccgtgtgccgcctggaggaccgcgactacgtggtcta

SEQ ID NO: 235276 - DNA, 177 bp, Homo sapiens
  chr11:796407-796584
  hyper
tgacctggcacagcgaggccacccaccgacagggacctcagcgcgtggccaccacacccccagcacacatgtgttcctgtctgctgcctgtgggttgaaccctatagcatttcctggcctggatctgtctagggctggtactctgagaatgaggctttctccgggccagggtaccct

SEQ ID NO: 235277 - DNA, 67 bp, Homo sapiens; identical to SEQ ID NO: 202395
  chr11:809683-809750
  hyper

SEQ ID NO: 235278 - DNA, 1248 bp, Homo sapiens
  chr11:829438-830686
  hyper
cgacgtgcagggcacggcgggctctctggatgaggaggaggaagaggaggagcgattccacactgtgctggagcagctgggggtggccccggtcctgggcaagtgagtcggcgctggccccgctcccactgcccgctctgctgtttctctgcctgcatgctgtctgcccttgtcacccgagtgctggttctgcacagggtctctaggccgggtcaggcccagcctagcgtcagctgcgattccctgggagggacccggcatgatttcccgcagaatttgcatttcatgaggcagcagccagggctgcagggaggaggggcagcgccgggcgcggggccacataccggcactgcccagggtacacacacctcaccgaccacgcacgccgggcaggggcgaaagcgctcacgggagggatgccctgcacgcagcaagtgctcctgtcctgcccaggggcgaagaagtctcctaagggtttgctgctggcggagggaagcctgcttcccgcttctgccagctccagcctcagttcccgcccgccctccaggcagcgggctgtgaggacgctctgggccaggctgcagcgcgagcgccccgagctgctgggctctttcgaggatgttctgatacgcgcgtcggcctgcctggaggaggcggcccgggagcgcgacggcctggagcaggcgctgcggaggtgagggccggggtggggtatgggggccaatggagggcctcagggcagcagcagaggcggtgccagggggctgtagcgctggcaagttctcatccggggtcgcccggtcccccgaaggcgcgagagcgagcacgagagggaggtgcgcgctctgtacgaggagacggagcagcttcgggagcagagccggcgcccgccgagtcaggtgggcctcgggccccgcccctcccgccaggcccaatcccacctcgctggcctccctggctccgccttctctgaattaatccctccccgacggccccacctccgcgggtccaggctgccctcagcccgaggagatcccactgggcctcacgtatcacccccgtccggtcttctccacccgaccccgctccgcccgggcccactcccagcccctggccctccgtgtacctcttttgcatggccgagcggccggcggaggctcagtggtcctccgtgcgtcccagaacttcgcccgcggggagcggagaagccgtctggagctggagctgcagagccgcgagcaggacctg

SEQ ID NO: 235279 - DNA, 47 bp, Homo sapiens; identical to SEQ ID NO: 202397
  chr11:842931-842978
  hyper

SEQ ID NO: 235280 - DNA, 41 bp, Homo sapiens
  chr11:910924-910965
  hyper
gctgcccgaaagtcggggccggggccggggccggggccggg

SEQ ID NO: 235281 - DNA, 133 bp, Homo sapiens
  chr11:1357330-1357463
  hyper
ggtggggagggaggtcgcaagcaatgccatcttcaggaacaaaactcctgcataacgaagcccaggtttctgtgttttcgtgggtgttcccgggcaccttcgggcaggtggccccaggcgatgttgtgtgtct

SEQ ID NO: 235282 - DNA, 806 bp, Homo sapiens
  chr11:1357818-1358624
  hyper
ccgtcattcagacgcgaagacaaagcgtccctggctcagccctgagaagcagcgggacggcggcgcgttcctgagttcccgccacgcgggcgcccggcgagggcggggcggggcggggcgggcgggggggcggggcgtggagggcgggggggcggggcgtggagggcggggggcggggcgtggagggcgggggcggggcgtgggggcgggggcggggcgtgggggcggggcgtggagggcgggggggcggggcgtggagggcggggggcggggggatggggacaaggtaggggtcgtggggcgctgggctcaccccaggccctcaggtgtctcgagatggcccgggctccgagcgctcccggcgcttacgctagagcctcctcctgtgcgaaacgcgtccgtgcccaggcgcggggaccctgcagggctgtgggttcgcgctgccgctgatcctgcgtcttcccccctcccaggccccgcgtccagcccgccccgcccgcggtgggagacgcgccctccaggtgcggatgagacgcgcggacagcgggatggagaaggtgagacctgtccggcccccgcctcgcgctcccgcttctccaggaagaggtgtcgccgccgcccgggggtccccgtccctccctagcccgatcccccggagccgcggccccaccaccgcctggcactcccgggagcgcgcggcctcggagcccccagccccgcacagccccttgtccccggctgggaatggcgcctcgcacggggtccctcggaggccgcgaggctccgctcggcgtgttcggaagcca

SEQ ID NO: 235283 - DNA, 477 bp, Homo sapiens
  chr11:1410710-1411187
  hyper
ccggacgtggcagccggcgggctggaggctcccaggtcccggcctcgccctggcctcgcctcgccccctagagtctccccgagcgctcgtagcggcggggcggggtggggaggcgctgattggccggcgcgggcaccgcttgccgccgccacggcatcccgctgcgttcgtacaggctcgtgtcgactcggctccgttgcgcggcccggctcggctcccctcagctgcgctcgactccgctgttcggctcggctgttcggcttggctacagggctcggctgttcggcttggctacatggctcggctgcgcggctcggctctgttcggctcggctcggctgctgggctcggctgttcggctcagctgcgcggctcggctcgtctcggctctgttcggctcggctcggctgctgggctcggctgttcggctcagctgcacggctcggctcggctcggctcggctcggctgcgcggccgc

SEQ ID NO: 235284 - DNA, 677 bp, Homo sapiens
  chr11:1568236-1568913
  hyper
ctgctccccgcgcccgccctccacgccagcagtgcctggggacccggacccgcgaggggcgcgcaggacgcgggagccgaggagcagcggcgctttgcggatggagagcgccgcggagggcagtctgggagtgggcgcggccccgccgggcgtgaggtcatcgcgagcagctggcgcaccccccgcgcctgcctcccggtcctcggagcccccggctgcgccccgcggcgcgcgcaggttgggcaggttctgggctctgggcggcggggcgtggaggagccctggggcgggattgtgactgggcgcttcctgcggggttggcggcccggacgccggtgccacccgagccacccagcgatgctctgggccccctacgtcggggctgacctcaccgcccatcctggcggaccccgcccgctctaatgggaccgcgcccaccctacactggcctgcagccgccgtcctcccggctgcgggttccttgccctcagggagggcggggccgccaccagctgcccggagaggtggggggacccaaacctcccctcgcccacaccaaccccgtcctactgccctcaatcctgcccctcctggagtttcttgttacggtccacacaggcgaagggccccatcggccgcgccttgccagccctaatgccctccgagaggcggaggcc

SEQ ID NO: 235285 - DNA, 95 bp, Homo sapiens; identical to SEQ ID NO: 202401
  chr11:1593577-1593672
  hyper

SEQ ID NO: 235286 - DNA, 65 bp, Homo sapiens; identical to SEQ ID NO: 202403
  chr11:1674134-1674199
  hyper

SEQ ID NO: 235287 - DNA, 897 bp, Homo sapiens
  chr11:1769712-1770609
  hyper
cgccggacccacagcgacgctgcctcagccgccaaccggcagagctagcagagcggccaaagcacctgcccacggcgcccgcggacacccgataccgccacgggcaccgccacgggctccaccgcgggctgcaccgcgggctctccagaccccggggcgcacccgcgggcgcgctcagagccattgacgagtaaacaactccccacacaaggcgatgcaggctcagccacgagcaccaagaaccggcacaggtgcggggtctccaactcgtgcgcaccgccccccacctccaacctggggaccccaagcgcgcacacttgcccggagccacgcacccccgggccatacatagacgcacaataacaggctgtgaaatgaacacttctccaacgaggcaccaagtcgctcgcgctctgcgccaccccgcgttcccagctcccgtgcggcgctcgccggggggtctgcggccgaggctctgcagcccccagccccatccgggtctgccgcagccccccggacggcgcctcctcacctacaagcgactcctcggcgcgcggccggaccccctgagcctcggtgcgcgcgtccttccgccgtcccgcgggccgctgtctgtccactgatccgcctcccagcggcccaaccttgagggggtggggagcgcgcggggctcggcggcggcgccgctgcctcccccgccgcctgcgctccctccgcagcgccagaccggccgcgcggctgcagcccagagcctgactcacggcggcagcgggcacagccacctccccgcctccgcctcctcctgccaggagggtgggggcctcggaagccgcgaccctggggagttgcaaggtcccgcagggatgggacccctacagcccccgaccagggtgtccg

SEQ ID NO: 235288 - DNA, 216 bp, Homo sapiens
  chr11:1968629-1968845
  hyper
ccccgtcgcggggcgccccttagtgtcacaagcagacggaccccacagggcgcgcggactccggggagcggggtgggcgtccctgggccgcctcctggcccgggcgaggcagggttctccgggaccccctgtcatgccttgagacacgcgaggcgggtggcggaggagccccccgccaggtttagggcaaccccagggggcgggcgtggccgggct

SEQ ID NO: 235289 - DNA, 98 bp, Homo sapiens; identical to SEQ ID NO: 202405
  chr11:1970024-1970122
  hyper

SEQ ID NO: 235290 - DNA, 108 bp, Homo sapiens
  chr11:2290847-2290955
  hyper
tcgggcctggcgctcggctccgcgggctcctgggggcgcgacccgccgggcctgcccaccccgtccctccaccccggcccccggccctccctcctccctgcctcccgg

SEQ ID NO: 235291 - DNA, 320 bp, Homo sapiens
  chr11:2292395-2292715
  hyper
cggccccattgaggaagcgcgtacgcgtggcgcgtggctcacggggagcatcgctaacaaagctgggttcctgctgggccccgccctgctcctcgcccccgcgactgggctgggcgcgctgtcccctagcgcagctatgtcccgagcgcgcccccacctgtgcgttaatctactgggaatgggggtggactgcgccttacctggggcggggtggggcttaaggagtggtcgagactgaggcggggtgggaggttcaggttcccggggcgccttccccaacccgccccgctttccccgtccctccacgcgcaccctgcctg

SEQ ID NO: 235292 - DNA, 119 bp, Homo sapiens
  chr11:2399695-2399814
  hyper
gctgggcatctttgggtgccagcgtgggtggaggagggtcttttgctgagaatggctttctcctgaccgcagtctttgctgctgggaagtgactgatgggctttcgccttttgtttcca

SEQ ID NO: 235293 - DNA, 176 bp, Homo sapiens; identical to SEQ ID NO: 202407
  chr11:2421277-2421453
  hyper

SEQ ID NO: 235294 - DNA, 191 bp, Homo sapiens
  chr11:2465458-2465649
  hyper
gcccgcagctcgcgcgcctgggcacccgggggcgctcacagtgatcgcggggccagcacaccctcacccaggacatccctttcctccccccaaccccaactccggagtggctcagagggagggaaagtagatgccggcaccctaccccgcccctcctgcccccgctgtgccgttctcggtcgtggtatcgg

SEQ ID NO: 235295 - DNA, 857 bp, Homo sapiens
  chr11:2466004-2466861
  hyper
agccagggggtgaggcggaggcagggccaggccggtccgtggggagagggcgggccaagccggtgggcgcgggcagggacgccctgtgcgcgccggaccggcgggggcggggcgtgcaggcgggggcggggcacgccgtcccatgggaccggccctcggccactgccccctccggccccgccccgagcgcccgggctgggccggcagcggccccccgcggcggggctggcagcagtggctgcccgcactgcgcccgggcgctcgccttcgctgcagctcccggtgccgccgctcgggccggccccccggcaggccctcctcgttatggccgcggcctcctccccgcccagggccgagaggaagcgctggggttggggccgcctgccaggcgcccggcggggcagcgcgggcctggccaagaagtgccccttctcgctggagctggcggagggcggcccggcgggcggcgcgctctacgcgcccatcgcgcccggcgccccaggtcccgcgccccctgcgtccccggccgcgcccgccgcgcccccagttgcctccgaccttggcccgcggccgccggtgagcctagacccgcgcgtctccatctacagcacgcgccgcccggtgttggcgcgcacccacgtccagggccgcgtctacaacttcctcgagcgtcccaccggctggaaatgcttcgtttaccacttcgccgtgtgagtatcgccaccggcgacggccggcacgaaggtgcttcctgagagctggtgtgggggagctctgtcccagcgccacctgccccgtcggagctgcgaccccggagcagaggagggaaggaagtggggaaacgcagaaacacaaac

SEQ ID NO: 235296 - DNA, 44 bp, Homo sapiens
  chr11:2554316-2554360
  hyper
gattccgagagcacgatgtttaaatgttgggggaaaaaatggat

SEQ ID NO: 235297 - DNA, 559 bp, Homo sapiens
  chr11:2883669-2884228
  hyper
ggcggggcgggggccggggtcgggggtccggcgagctttaatgcgcgcacaaagcctcatttgcaggtcaatgccgcggcacactcgcctctcccctcgcccggcgccctttgtccggccgcgcccgctcctcgcgccagatggccgcggaaatgctaatttcgggcgcccctgcccccccacccccgcgtttaattgcgcctttgcagatgggccgcgagtgtgcgcttcatgcagatgagcgcggcctcgccgccttcctcggacctccgggagccgcggccgggcgtgctggggccgagggcagggagggggccgctgtccctccactcgacgcgccgccgggcacgggcgggcacccagcggcccgggcccgggaagcgcgcttctctcttttcatttctccaaaatgggatcttaagtgattctgaatgaaaacaaattggcccgctttcttctccaaacagacgcgcggcgcggtgggggcggcgggcgcgggcccggggcggcccgggcggtggggttggctccgggaccccctgcccggcccggccctcgc

SEQ ID NO: 235298 - DNA, 90 bp, Homo sapiens
  chr11:2890916-2891006
  hyper
ccgatgcaccgacggacgcaccgacggacgcgcggacagatgcgccgaccgcaggctctcccgccgtcccggggccgtcgtgcccgtgca

SEQ ID NO: 235299 - DNA, 446 bp, Homo sapiens
  chr11:2905411-2905857
  hyper
gacccgagagggggccgggagagggcgcggggcgcgggccggccggggtgggggcgccgtccccgcccgcgccgaggtccgcggcgggtcagctttgtttacgtcgccgcgcaatgtgctgtgtaagcatttccccttgtcccgcggccaagccccccggggccgccgccgcgcttaaccccctccacgccgtgctcacggcgcccggccgcgcccggggaggggctcccgcggccgggggcgaaaactgcgctcccggggggtcgcggccgggattcagcctcccaccccgcccgcgcgaagccgctggagggcacaacaacggggcggggaggggggtaagggcgcagccgcgccctgagcgctgcgggccctttaatgccacgggaggaggcgggaacccagcgaggcccccgagggctggggggaccggccggccggacaaa

SEQ ID NO: 235300 - DNA, 60 bp, Homo sapiens
  chr11:2923533-2923593
  hyper
ggtcaccctggagcgctcaccccaccggcacccgtgcccaagcccgcccctgcaaaggca

SEQ ID NO: 235301 - DNA, 870 bp, Homo sapiens
  chr11:2949949-2950819
  hyper
gcctgaggggccccgagaccctgacgcgagggggccagcgcgattgcggggcgccgggtcccccaaggaggtgcagcgcccccgccccgccgtctggggttgaagtggtttttcccaaaggccccggtcccggctgttagggcgcagggctcgccgggacgcgggcagtcactcaccgcggcgggctcatggcgtgcggggtttgggctgcggggatggcctggagggctccgagggctcggagggtgcggcggccgcggcagccacggcgtcctcggcgggtgcggcgggtgcggtgcgttcctggcggctgcgaaagtcctgcagggcgcggcggttctggaaatcgatgagcgccagcgcgatggccgcgttccagcagctctcgcccgcgcagcggaagtcgatctccttgtggtcggtggtgacgatggtgaagtacacgtacttgcccgtgcgctccacgcagtccaccttgaggatggagtggaagcgcagctccttggggcgcgcgcgggggctggcggggaacaggctcaggcggtcggaggtgagcaccccgcgcttcttcttccatagctggaagaggctgtcgctgcgcttctccaactcgccctcgcgtagcacctcgtcgggggatttcatgtcgtgccgagcgcgggactgggagcggcaatgcgggcggtgacggcgccggctctgctcctcgtggccccggcgcggcctttatagctgcccctccccgccccgcccctccccgccccgccccggccctcgggccaccccgcccgcctgagccccgcgcgccccgggccataccctccccaagcccagccgtccgggcccgcaccgtcgcgtccgcgctctggt

SEQ ID NO: 235302 - DNA, 297 bp, Homo sapiens
  chr11:3013495-3013792
  hyper
gcggcagtggcggcgaccctagcttcgctcgctttggggctgcgccgccgtggcctccaacaacgccggctcccattggccgaggctcctagctcctctctccgcgagcaagacaggctgcgattcgccgagcgcggcgcaagtcaactgcgcttcgcgccgcagtcagcaaccaatcacaagcctccgaagaaacgccgcgccatatgcaaatattcctccgcgcggcgcgcgccctgcgttcctccgcctctttaaatggggcggggcaaggtggagaccgcgtgtgtggttccg

SEQ ID NO: 235303 - DNA, 140 bp, Homo sapiens; identical to SEQ ID NO: 202415
  chr11:3014088-3014228
  hyper

SEQ ID NO: 235304 - DNA, 299 bp, Homo sapiens
  chr11:3078596-3078895
  hyper
tggctgggaatcccggacccgcagctgcggctacagacacttcctagaatctgatgcaaccgccgccccggaagtcgcgccccacgccgggcccgtcttccgggacacgcccggtcgctaggcaactaccaggggctccggatgtcgccggcccggagcatgctgggagctgtagttcaacccaatggcgacccgcgctccggagcatcgcgcggccaagcgttcagtggccgtgctgggagtagtcagcccagccgcggggagacaagcactaaagactgagcgtcctgtaataggtg

SEQ ID NO: 235305 - DNA, 117 bp, Homo sapiens
  chr11:3181649-3181766
  hyper
gcgacccacactccccgcgtcgcattcaccctaataggcgggcatacaaatgccgttgcctggagccgcagcccagcgaatgggacccacagcggcgcgccctttagttgactctgt

SEQ ID NO: 235306 - DNA, 321 bp, Homo sapiens
  chr11:3186008-3186329
  hyper
cttggagcccgcgtcggccgagctggggggacagaccccctgattggccagggtttgtggtggtcagacccagccaccttccctggcggtcccggctcctttaagccccaccaagtggggagccgagctgggcgcgccgcttcccactcgcgggccccacccgccccaacccgccaggcgccgacccgtcctggcccggggcgcccccaggctcccgcgctccccagctccccagcgcgcgaccggccccgcggcgtggttccccgcactggctactgccagggtccgcggggctgcggcgcgagctcctggatcccttcg

SEQ ID NO: 235307 - DNA, 262 bp, Homo sapiens
  chr11:3186509-3186771
  hyper
gcgggcctggctgcaggaaatgccagcagatggtccccccgcgcgaggcggagcgagggcgcggcggagggaggaggcccagggagcccggaggcgggaggaggaggcgcggcggccgcaaaacccgggccgaatcgccgcgcggagcgggcgcccaggggctgccccccaccggctgccgcttctcctcatcccccaaccccccgcgcgcgctccggggctcacacccacccgggcggccagaggtcgggacactccgctg

SEQ ID NO: 235308 - DNA, 235 bp, Homo sapiens
  chr11:3224437-3224672
  hyper
gccctgcactccccggcagaaggcagaagctgctcccagccccctccccaccacacgattccagacccttgaatgcttcctccacagcgtctccctccgacaccaccggcagtggtggcccgtggagaaaggaagccccctccacagatggcgcgaggctcccaggcggtgggctgggggtgcccggaggcggcactcaccgtgcagcagggcatgggggcgaggctggggtccc

SEQ ID NO: 235309 - DNA, 34 bp, Homo sapiens
  chr11:3400477-3400511
  hyper
ggatagggcatcacgccccgccccctcaggccct

SEQ ID NO: 235310 - DNA, 500 bp, Homo sapiens
  chr11:3663251-3663751
  hyper
gggagtttattgcccgccccccgccccaagtctccgcccccgactccccacaccccttcctcagagcctccagtctggggacctttccgagactgtaaaggcggggccgcagtttggctccgcctgagaggggagggccgggggcggaggacccacttgaaggctgcggaagccgccagcgggagggagcgccgagggctctggcgggcgctgcgctgtccccggaggagtccggagtccggctgaaagcaaaggttctcgaggctaactgtagcccccgcgctggtaacccgacacccctttcccagcgccgcacgcggggccgggagcgggcgcgccagggcagggactgaggagcaattccctttctcaaggcctgcggggtctttctgcgggaccctctttggctgtgagtgatggggaggaaacttgtgagactcggcctctccctcaggcgggccctgacccggtcggcccctggtccccggcccaccaggcca

SEQ ID NO: 235311 - DNA, 332 bp, Homo sapiens
  chr11:3818839-3819171
  hyper
gcgaattggtggacgcggccgccactctgggtcgaccctgttattcattgggcaacgcgtcttttgaaaccgaactgaagggggaaggggcgagagggaagaggaggggcagaaggagttcggggaggcacagggtaggagcggtgagagggccgtggagtcccgcccctcgccgccgcggttggcgggagcgtgtcgtgacgtcacacagggcctctcgaagtgggcttgtgaatggctagattgggaagcaccggcggggtgtcgggaagggtggtgacgcaacatagagactccgcccccttccttggagcgccgcgactcgggctgag

SEQ ID NO: 235312 - DNA, 100 bp, Homo sapiens
  chr11:6280498-6280598
  hyper
gtcacggtcactgcggccactgcaacacagtacggtaaatgcggctctaggctcagactaaagcatccgcgcctcagcaggtgacgcacgcagacctggt

SEQ ID NO: 235313 - DNA, 160 bp, Homo sapiens
  chr11:6281090-6281250
  hyper
gagcaggtggagccgcgttgggagcccgccgggtcgagctgagtaaggcggcgggctcggcgggggccatggagctgctaaagctgaaccggagcgtgcagggaaccggacccgggccgggggcttccctgtgccgcccgggggcgcctctcctcaacag

SEQ ID NO: 235314 - DNA, 532 bp, Homo sapiens
  chr11:6341237-6341769
  hyper
taggtggatggaagcggggagcccccagctggtggcccacaggccggcaaaggcctcggattggggaccgtttgaggtcactgaccttgaagagcagaacgtggagcttcccgcgcgccaccagcagcccgtggttggcctccagccgctgcacctgggctgcgcggcgcaccgcgcgctcttgggcggcgttggcgtgcgagctcacgcgctccgccttggccagcagctgcgccaaggtgttgctggtggtgtcgtggctgcgactcagagcgcccaggccgctctggatgcggcgcacggaccctgccaggcctccctgccttcgagccaggcctccctgccgctcccgcagagtctccagcatggaggccagcttctccagcagggtcaccaccgtcacggcgtgcacgggaccccccgccggcgcctcgggcacaggcccccgctccaacgcactctccctcatgatccctgaccgctctgctccgtctgcctgcaactgctggccgcactacggtcaggggcctcc

SEQ ID NO: 235315 - DNA, 41 bp, Homo sapiens; identical to SEQ ID NO: 202420
  chr11:6440456-6440497
  hyper

SEQ ID NO: 235316 - DNA, 197 bp, Homo sapiens
  chr11:6495354-6495551
  hyper
gtgctgctagggagccggcgggccggcgagccggatcccggatctcggatcccggatctccgccagctgcctccggctccgggaagggcggtgtagtcggtctcagggattgagatgagactccgtcaagaaaaggcagctggggcagcagggatttcggactctgggagcctgtctgggccgcctgcctcctggag

SEQ ID NO: 235317 - DNA, 113 bp, Homo sapiens
  chr11:6502892-6503005
  hyper
atggcgcgcgggcctgggaaactttgggcggcgcgaccttgactagaagtgtggggcccttatcgctgagtttgtggtcccccttttctctcagctgcgtgacttcctgttgg

SEQ ID NO: 235318 - DNA, 250 bp, Homo sapiens
  chr11:6625058-6625308
  hyper
gcgagaggacccgcgccccctgtcacccctcacttctcctgagtcccaagtaaggaacggagccaaccctggggaggacccccggtcccctctcccagagtatacggagcctgaacctccccacttcccccaactctgttcgcggatagggtctagttgcctgctctcggacatccgttcagcagacactacctcttcgtcaccccctgcccaccctgacccgcctttacctcgcgtctagaggacacag

SEQ ID NO: 235319 - DNA, 84 bp, Homo sapiens
  chr11:6640706-6640790
  hyper
tagtaactagtgacggtactggctcctcccttgcatgggtggtcccaaatgctaggcaagggtggggccgccacccggattctc

SEQ ID NO: 235320 - DNA, 608 bp, Homo sapiens
  chr11:6676730-6677338
  hyper
ccaggggaggccggcgggcagggcgggcgcggccagacgggccgggcgggcgcgggcactgacctccgcgcgacgcgggctccctcgcccggtgctggggcgccgtccggccgcggtcagccccccgggcagcgcccgctcgcgcggggcctgaggccgcgcatcgtccgcagtcgctgtctccgaggcccgcgatcccctccgggcagccgccgtcggtccgcgcgcccttggccgtcgatcggtccgtccgctgacgcccgggcgccgcctcctgcacagccgccccgccgaggatgcgagctccgctgccgcggccccgcgccccctcccctcccctccccccgccctccgcgcggtaacccgagcccccgcccctccgcccgcggagcccccgcccccgcccccacccgcgctccgcgccgccgcccccccttccccccggcgcccgcccggcctccctccgcccctccacttcccggccccaggccccggctccggatccggccccagcgccgcgccgcgcccccgtcccggttcccttcccttctccccgtcacttctcccgtcctctcctcccattcggttctctacgccctctcgtctct

SEQ ID NO: 235321 - DNA, 349 bp, Homo sapiens
  chr11:6704608-6704957
  hyper
atgcgccttagctcggagcgtggtgaacgtgtttgcgcatgcgcatcagagcctgcctcgttggcaatctcgggaagggcggagaaacggtgttgagcttttccagaggcggcgagctgggcgggcttcaggcatccagagcgctctgtggcggccgaagaaccaggcgccccctagtgtgggataagcgggccatcgggttttttttggggctgcgtcagccagtggcatttagggcgatggggcgctccgccgcggagactcctgggaaagagagcgtctgaagagaaaggcacccggagggttcggggtcctgcgggctgacggccctaccgggtccagcagtggc

SEQ ID NO: 235322 - DNA, 111 bp, Homo sapiens
  chr11:6947537-6947648
  hyper
cgccggaagtatgacgctcatttctttaagccactagaagctcaccgtgagtccattcacagggccagagttccaagtgtgcggcgtgggcggggcctgcagaaagggacg

SEQ ID NO: 235323 - DNA, 53 bp, Homo sapiens
  chr11:6948068-6948121
  hyper
ccagtttccacgctgccctccaaggtctgtgccggaaaacctggaggagggcg

SEQ ID NO: 235324 - DNA, 714 bp, Homo sapiens
  chr11:7041181-7041895
  hyper
gcactgaagacgcgcgcggcctccgttgcttatccagatccccggccagaactctgccccggcaccgaacaccgggcacccataccccggggcccaagctgcttctgccctcctctacttgcctttattaagtcttaacgtgggagagaagccgtgatgtacccatctacacgggtgtctctggggtttctaaaccggagtagcttctcagtccctgaccctcgattttctgcccctcttccttcaagcacagctcgtcttgccctgtccgcttctggctcagtcctcctgagagttcatgtcacttaacggagcctgtgagagtggaccgggatggccaaaacactcagtccacacaaacaatggccgcagcccggctggaccgaaacggaagtcccaggtcttggagtagacactcgcagtgtttccatggatacgggaggggcggggcgggaagagagagcgcgggaaaacgtgactcctgattggccagaagtatcccgcgcctcccgacctttggccgctggcattcctgcgcgggcgggagctgcgggcgctcgggggataaggcgaggacgcaccagcattaatggaataggagaactcccgaagcttttagggccctgggaaagggggcgtggctggaaacggagctactggcttcggagaattctgtgaccctcaccaccgcgacgaccccgaggaaacgctgtc

SEQ ID NO: 235325 - DNA, 1502 bp, Homo sapiens
  chr11:7272753-7274255
  hyper
caggcggctctttccaagttcgaagcagggactcggttctgcgcatctggcgggtgtgcccagattgtaaccttcgcactaggcatccaagaacgtgctttggacacactcggcggtgggagcgggtgcttggtttgcatcagggatgaggggtggagtagcgaaagcgcccggagcgcgcactcactcacactccccaagccagggcgcggccgctctgggcgcgaggtcccaagccaagtctcgcgctcggccaggagccggggagtaccccaggtccccggtctggggccgccgctatcctaccctgcggcgcgcactcctgacctggccccgccccccggcggccgcgagtagcgggcggagcgcaagcagagaggcgctctgggctgtgcggcaccgcctctcctcggtgtctggggagggacggagggaccgggcgggagagagagaaagcctgaccgaccggctggcgaagagctgcatgcaaccggtgggaggccgggccggctgggtctggggctcgggctcaggctcgcaccgtttctcggcaggtccctggcggtgagcgcggacggcccggaggcggcggctctgagctggcaggcggagggctgtctcctgcgcccgcctgcccggcgcggtccgaggatgcgggggggcgatgcccggggccagggacgcgctctgtcaccaggcgctgcagctgctggccgagctctgtgcccgtggggccctggagcacgacagctgccaggatttcatttaccacctgcgggaccgtgccagaccccggctccgcgacccaggtgagtgccgccaccgccgcctggagggacctaagggccctgggctgggacttggggccgcaccggggcctgaggcagaacagcgacgcggactgggagagggcggggggcggccaccgagccaggagagtgatcaagaaccagcgcactgtggcctgatgctgtaaccaggcggggacccgggcggtggctactgcacggaggccgactccgggtcggctagggcagggttggagggaccacgcccgccacctgcgctcccatcgccaaggctcctgggggcggctccctagctccgagctacgctctccacttcccgggctatctgcactcagagcgaggggaggccgcggcggcctcggagccgtgggaagggggacgaggccgaaggaaactctgggaagttgggagttggggacggccccgggttggggccgaatcccaccgggtgctgctcatcctttctcccaagcgtctagttcctttccttggtatggggtgagaagggcgggacgcgatccggcgttgggccggggacagggtgcttctggccttgggcagacgggcctgaacccgttcccggcgggtcgcacggcatggaggtggcctgggcctgggcgctaggctcgaccagcgactaccgccggccacgatggggttcgtagactcgtcggtcctggcttgtgcacctgt

SEQ ID NO: 235326 - DNA, 103 bp, Homo sapiens
  chr11:7694731-7694834
  hyper
agccttccggaatccgagccggcccgccccactccccgcccttcgcggtcccgcccacgacctctccccacgcctcccgctccggcccccaacctcccggtcg

SEQ ID NO: 235327 - DNA, 37 bp, Homo sapiens
  chr11:8040959-8040996
  hyper
gcgggagaagcgggcctccgggggctaggactggcgc

SEQ ID NO: 235328 - DNA, 395 bp, Homo sapiens
  chr11:8041176-8041571
  hyper
ccagctgccccgccagggtcgctccgccgggggaccccgagaaagggcgcggagggggcgccgggaggggcggggcaggggccggggtgggcccctggcgggcggggcgaggagggggcgccttcggctctgggatgcgcccgccggcgtctgcgccccgccggccctccgcagggaccgaggctggccccgggcggagtgtcccgctggctgccggggacccgcgagtcgctgcctgttccgcggggcgagatggcagcctgggccggctgtctgggcgcaggagcggcgctctcgagttgccaggctccgcgcccgccccgcggggatggcgagcggctgccggcgtgggcggtttggagctgcgctccccacgcactcgtcctggaggaagg

SEQ ID NO: 235329 - DNA, 225 bp, Homo sapiens
  chr11:8190059-8190284
  hyper
ggaacccttgactcaaagcacgtgaacaaatggtgacgagatgagttaagccagcggggtaagagagaagggactgcgcctaaacgggagtacgcaaggccacctagaggatgcacagacctgcatgcatacgttcctgacccttccagcagcagaaccatctgggccgccacccgctgataacaacggaaccgtgggcattggcccttcaacgccgtctcgccc

SEQ ID NO: 235330 - DNA, 60 bp, Homo sapiens
  chr11:8190464-8190524
  hyper
gggcagcagcagcgacagagccaggacaagcccagaagccagagcgactctctgcactgt

SEQ ID NO: 235331 - DNA, 887 bp, Homo sapiens
  chr11:8284165-8285052
  hyper
ccactctcgcaggccgctcccgcacaagtgctaccggccggcggcgggacactttcttcctctgggccaaactcccgcctccgcgctcagagagacagggagctagcgggccggcacaagaggcggctctctttctcaccgagtcacgctcatgcagatgtcccccggagggtccaacccgccttcccctcgcctgccgggcaccctggcgctcgcgccgtcctcccgcgctcccgcttgccccgagctctggagcccgattctccccgaagccgctgatttgctcggcgctcagcgcctctcgggttacgcggcggctggcgcgagggtgatggctgcggtgagagcagcagcctcagacacgaaatgctcagagcgaacctccgcggcgcggagatcgcaagggagccccagcctccgcgcggccccgcggcgcagcacacggccagtgcacagctcctcggctcgcggccgggacccggggggcgtgcggccccgggcgcgtgcagcccggggctcgacctcctccccccgcaagttccgcccggctgtcccccggtacttccccccgccccagccccggcccccagcgcgccgcccgccccgcaatccccgcacagcccagcaggtgtgcgcccgtgtccccgcgtgtgtgtgcctgcgcgccgcggcagggggcgagggggtgaggggcgtcgagaccccggcccgccacctaccgtcctccttgtccagcaccatcatctcgggcgctccgtgtccagccgcagctaggctcggccgggagaagggcgccgactcggggcgcgctttggaggggcggccggtcttcgggcagctagcgggctctaattacccgcttgtccggctcttaacctagattgcac

SEQ ID NO: 235332 - DNA, 134 bp, Homo sapiens
  chr11:8285495-8285629
  hyper
gagtggagacgcacggctgtccggctccgcagcgccacctggaggcttctaggtcctagctcggtgagcgtctttgctccgatcccagggtcgtggtcttcaatgattgtctggaggacgcatcccatctgtca

SEQ ID NO: 235333 - DNA, 781 bp, Homo sapiens
  chr11:8289528-8290309
  hyper
accccgctgggatccgttccgcagtagggtgcggaaggggaacgtgcagacacccagagaggctgggagactggctggcagtgggcactgccgggaagcccgcggtgcgggtcgcagaggcgctccggatgcccgcaaggcggcaagagtccgtgagaaagttcccagccggagcgcgcagggctggcggcctcgttgggaccgggagacttcctaatcccgccgccgccgaagcccgggcgctgagcctggcaccgccgaccccggcaccggcgcacacatcagccgccgcgcttccgggaagccacccatcagccggaggaggcccgcgggtgctgagggctctgccgccgctagcggggtggactccgcagggccagcgccgcagtctccgccccacgtcccgcgtgcccccgggcaccggcaccgggcgccgggcacctaccgtcctcctggtccaacaccatggtcccgacggctccagccggactagcgccgaggatacggaggggcgcgtggctccgactcccgccgccggccgcctgcgctgctcccgccggccccgcgcgggcgccgagtccggagagccgcgaccgccgacgggggcagacggaccggagtccggagcgcagccccgcgggcagggagcgcaggaggagggactggggggaaggcgcgggggcgagacggccaggccgggatcgcgggagcctcgcgagcagcagctgcccgggccgggccgcagccggagcctgagccgcgcgcgcgtccttcctccgcg

SEQ ID NO: 235334 - DNA, 33 bp, Homo sapiens
  chr11:8703870-8703903
  hyper
cggttccgcactgcggccgggagacaaaccagt

SEQ ID NO: 235335 - DNA, 49 bp, Homo sapiens
  chr11:8704467-8704516
  hyper
ggctgcgcatggccgcctgcggggcagggtggccggcgcgggcccgggg

SEQ ID NO: 235336 - DNA, 140 bp, Homo sapiens; identical to SEQ ID NO: 202430
  chr11:8710629-8710769
  hyper

SEQ ID NO: 235337 - DNA, 558 bp, Homo sapiens
  chr11:8892073-8892631
  hyper
gcgcgcgcgcgcgcgttcttcaaggagcctgcatacaagctgcaacagctccaggtaggagctcgaatgccgccaccgagaggcaaggcggtgcgcagagccagctcccaggacgtcccgagatcgggtctccgctcggcaccaggcagctcttcaccgccggactctggccgcgaggttccccacccccaaccgcgcggcccccgccgggccggaaagcagagccggcggctactgaccgcccgggagggcggaccccaccagccccgctcctctgcgcctgcggcggcccccacgcgcgtactcacggagctggacaccgctgccggggccgggagtcgggagcagagggaaaagggctgggagggcaggggcgggaccgggcgcgcacgcgggaaccggggccacccggcccggaggcgcttacctctgcgttccccagccgggccgggcgcggcgcctggatggggtctcgccgggagccgcgcggcccggaggaggagccgctcctgcagagagggcgggcggcgggcaggcatccgcgccccgggctgcggc

SEQ ID NO: 235338 - DNA, 174 bp, Homo sapiens
  chr11:9025696-9025870
  hyper
cacccggtggcaaagccggcgaggaggcggcggcgctggtggggactgacccggcagtccgagaatccaccgcggccttttcacccaaccgccccctcctgcgtgggggccccgcatcccctggactggcgtgggctctggggcccgatgccctggcagccccggccatctctg

SEQ ID NO: 235339 - DNA, 213 bp, Homo sapiens
  chr11:9026050-9026263
  hyper
cctccgaggttgggagcgctccggatttctccaacttcaggtcggtccccacccaccgggccacgtgactggggagggggcagccggtgcaggcgtgtggaggaggctttcgggacctcctcccccgggcaccctctgcctgcagcccggcacccggcccgcgtttccgagccgggggagcaggtgcagtcggaagcccgcgggtgggcgtgg

SEQ ID NO: 235340 - DNA, 214 bp, Homo sapiens
  chr11:9112510-9112724
  hyper
aagccatcagcagaacttgccggcccccaaagaaagaaacggcaaagctgccaccgcctcgcggatgtgcccggcccggccctcagtttccccgcctacgctgaggcgcgggaccccaaggccagggtccgcaccctcctgcctgctcgccggcgacggtctgactagcaggcgctctggaggcatccggaccggggcgggaaccgtcagcagc

SEQ ID NO: 235341 - DNA, 884 bp, Homo sapiens
  chr11:9286204-9287088
  hyper
tcctttattttaaacgaagtcactcaacctacaccaaactgagaacacacaaccctccctctttctggtcgccgaagacgtggccactgcgcagcgggccgtaggtttggacccctcatggctcagagcccctcatccgtttcccccctccagtccaaagcccccttcgcccgcgcccgccctggtcctcccggccgacactcgcccggctcccgggacaaagcggggctgaaggaaggtttcttctggggtccccgacgacagcgggcgcgggaaagcgccccgggctcggcgcgcactcacccgacagctcgtccggctccagcccggtctccgtgtccagtccgcagatgacaaagtagtcggcgaagcgactgggcgccgagccccctccgccgccgccgccactcatggcgccggggccgagaccggccgggcagtgcggagcggcaccgagcccccgcaacccgggcgcccgcccgtccgccctcaggccgcccctcccgccgccgccgctaccgcggctcgggccgccgcccccggccctggcccggtcccctcggccgccgcggctgccgtgacggggcgggggggcaccgggccgccccgcaccgcatcctggatgccttcccctccgcgccgccgccgctgcagctagccgagagcgccgcggcccgagcgagcctggagaagggcggagagcgcgtggacagcccccaccgtgaccctcctcctaccgcgcctgcgcaggcgccgtctgggagggggcgggctcctgggggaaaggatgacgtgatgctcttcggaccccgccggccgcagcttcccgggaggtcgccgcagcgcagccggtgactgcttggtcgcccgcaactgccactccc

SEQ ID NO: 235342 - DNA, 179 bp, Homo sapiens
  chr11:9336372-9336551
  hyper
ctggcgtctaaagcgtagccttaattacccggaagtgcggtcccagggacttcaaaccttttgtccaggccgccggaggtgcctgtgattagtcggcatttcgcggctgaggctgattcagcccattacatcaattccgcagctgctgtcttcaatttggaggcgccagagagtgcttg

SEQ ID NO: 235343 - DNA, 35 bp, Homo sapiens
  chr11:9406095-9406130
  hyper
tcccaaagtgctccgcaggcgcgcccacaggaagt

SEQ ID NO: 235344 - DNA, 268 bp, Homo sapiens
  chr11:9482341-9482609
  hyper
attctgcactttgcgcgagccactcaggggcgggctgtaaagtcaggcttggctgacgtcagttgagtgggcgcggctagggcggttttctttcgcgtcgaccaaacgtgggccaatggaaaaccggaagcgtcctgtgagtgatgtaatgacagcccaatggaagctgggggcgggcctcagacacactatgcgggttgcggggcctgggggccggacggctgtttcctgtcctggtgcatggtggtcggacgaaggaattgttgga

SEQ ID NO: 235345 - DNA, 289 bp, Homo sapiens
  chr11:9596147-9596436
  hyper
gccgctcccccctcgctttcctgcgccgccccccaaagttggcagcccttgtgtttggccctgccccgaggttgtccgttgagattatgtaactgaacaatgggcctcgtctggaacttcatcttacaaaggggccgatcggcccgtccgggtggccaaggatttgccgcccgttgagtccgggccgccccgagcgtgtcagccccgagtgcggcaccgataacgcggttcgcgaggatgctggagggtgccggcccggccacctgacactcccgagccataggatgcc

SEQ ID NO: 235346 - DNA, 173 bp, Homo sapiens
  chr11:9635931-9636104
  hyper
gttactgggcacgcgctgacaacccacatctggaaaacccggtcctaactggagaataaaacttaaatgcacgtgaactcaccggcagctgaacatttccgtgagaaaacccctaaaagccggcaccggctccggtggggccacagagtctctggagcgaggctctctccaat

SEQ ID NO: 235347 - DNA, 373 bp, Homo sapiens
  chr11:9685091-9685464
  hyper
ctccccttaaacgtcgtcgctgtgtccctagaacccaagatagagtatgcatgaataaacttttgcgaaatgaaccaacaaacttccctcgaggtccttcctgcctccccgccgccctgcatctccccgacttgggactgcgctatcatttcagtcctggtctggggacttttcggggtcttctctggccttctcagacagtgactccgttcccaggacaggaccagggatccctttttcactgcggggcgctgggaggaggcgggtaggctgctcacctaatctctcgggtttttcctcaagacgcggtcatttgtgtgaggtgttgtactcgagcacccaaaatggcccgaactggtctgggaaacattag

SEQ ID NO: 235348 - DNA, 123 bp, Homo sapiens; identical to SEQ ID NO: 202436
  chr11:10316353-10316476
  hyper

SEQ ID NO: 235349 - DNA, 385 bp, Homo sapiens
  chr11:10324219-10324604
  hyper
aagggcacttgcttcgcgatcctcctggcagagccacagctcaagtttcccccacggaatcacgagcttttgtaaagggcagcgaggaggcagcgaggtggcagcgaggtacagtcgcagagttctctggagaacgaacacccccgccgcgccccaccccccaggactggtggagactggaaggaacgagtccagaccacgggaccttccctggccgtgggccgacgcctagctgtccttgacctccccagcagtcggaggcgcgcgcgggagaaatgaaagtaaaacctgtcctggcgcggaaccaagtggaagctggcgacaagtaggtcgcatcctcagagcgactgatagccagtcctggatctgcgcgaagagcttgact

SEQ ID NO: 235350 - DNA, 703 bp, Homo sapiens
  chr11:10326039-10326742
  hyper
agctcaccccgaaacgccggggtcttggtcctctgggggactagtgagtcctgctcctctcggctttgctccgtccctgccccggcccctccgcgggagtctggggtcgcggcccggtcaggcgccaagccggcaggggggcgcggtccacttgaggccacagctccccaggtccagggctcgggccatccgcgctgtcccttccgcgggctcttgctgttcttcgccaggaggctttgcactccgggccgcatgggtcctggataaggacctcaagaggttgtagtggcgccccttcgctccggcgtactgtctgaaccctgtgcccaaagagggctgtggcagttcctgcaccaaccgcctggagcccatacctaagccctctgggcacgagggacctcctctcccccgctcccccctccccccatcccaactccagccccaaaggaagcaatgcgcgcgtccgagagcaggagcgcgcgtggctgaggaaagaaagggaaggcaaccgggcagcccaggccccgccccgccgctcccccacccgtgcgcttataaagcacaggaaccagagctggccactcagtggtttcttggtgacactggatagaacagctcaagccttgccacttcgggcttctcactgcagctgggcttggacttcggagttttgccattgccagtgggacgtctgagactttct

SEQ ID NO: 235351 - DNA, 232 bp, Homo sapiens
  chr11:10329351-10329583
  hyper
tccccctgcctgccgcggttgttaaagttccaagccgccctagcaatgcgtggggacacctccggaaaacccagtaacccctagtaaccccgggtctgcccgggcctgagcgcccgcgggccgctggctcatgggcgaggctgtagcgccccctgcaggcagctgagacaggcccagcgccgccaagcagtacgtgcggtttaataagttctcctacgtgggagtcagcaca

SEQ ID NO: 235352 - DNA, 159 bp, Homo sapiens
  chr11:10562151-10562310
  hyper
tggctaagtagatcgacgtggctatttctgagctatcgtcccaggcaaaaggtttcttatttgggtgtccagcccggcggagaccgagcccgcgggccaccctagcgctcgctctggctacgccgcctcagcccctcctcaagcgcacctggacattta

SEQ ID NO: 235353 - DNA, 166 bp, Homo sapiens
  chr11:10772630-10772796
  hyper
ggcaccctacagccgacacgccaacaaaagcttcggagccgccaaccccaaaacggaaacaccggagccacaagctgagctcgcgtagggcacgctcccccgggagtgcttccgggacagggggcggggtcgccggaagtggccgtccgccgtccgctgctcgttg

SEQ ID NO: 235354 - DNA, 31 bp, Homo sapiens
  chr11:10830956-10830987
  hyper
ctgtggctgccctcgcgtgcctggcctctcc

SEQ ID NO: 235355 - DNA, 151 bp, Homo sapiens
  chr11:10880014-10880165
  hyper
ccccaaaggagcacgcagaacctcggctgctgtgcatttatcacctcttttgttcccggaggccgcaccccaggtccagtttacacagctgccaactccttttcttggttcccactggaatctaggaagaaaactcgccctttacttctcc

SEQ ID NO: 235356 - DNA, 1497 bp, Homo sapiens
  chr11:11642467-11643964
  hyper
ggcatctcgcctgacgcctacagtggccaaaaaagctcgtttgcccgcgcgttccctcttgtacacacacagacattcacatgcacacacactctgagccggacttgtgtgcgatcccgagagcccgcgagcaaccagcccagagtcacacgcacatttggacacgtgcgcagcgcgcccccataccgccagctagctgcacacatccgctcgtgcagccctgcgcacacacgtgtgccccggggaagagcgcacggccgcagacagaaggtcccgaacgcaggcaggagctcacacgcaggccccacgactaccacgcatctgcggccccagagccccgccgtggctgagttgatgcgcaccagccccagcgcaccccgcgccgcgcggggcactcccgggcctcatgggcgacccaagtttccggggcgcccgtaccttgaatgtgctgcttgatgacattctccaggtggtccagccgctcaataatcttcagagtgtcccctttgtcttcctccagcttcttgtcgggcgccggctcctgcccccgcacatacacgctggcgatgtagttggtgacccagcccacgtagagcaggcagatgatgttagtcatgccgctcaggatcacgcaagtggacaccaaagttttggtcttcctggtgcacaccattctgggctccttcctccatatagagctcccgggggcccttccttgtcgtgcgccccgaactcccccgcgctcgcaccccgtagcacgtccggagccgctgggcacctcagcacctgagtcccgaggttctccaaagcccggtccgctgccggtgtagccgccgtgcccaagtttgcagctcctgccgctggccacccggagagaccttgacaaaggaaaccaggtggatttttttccaaattaaaaatccctgaacccttcctagaggggtcacgggtagccggcagccgcgcgtccagatgtgtacgtctgggaaactttgccactgcctgtgtcggcggccacgccgcttcccatcgccagcgccggctgccttggcggtccgaccggcccgcgctgctaggagaacagcggcagcggcagcggcggcggggagagccgcgaagcagagcggcccggccccctccgagcgacaagcgctgccaccaatcgcgctccggctcgggagaggggccggtgctgagcggcagcggaccaacggggagggagcggggggcggagtccagctcccaggccccacctgctggccgcccctggctcccgcccccagggacgcgcccgggcctccacccgcgcctgcacaggctgccccagacctgaagctcccggagagggcgcgctgccagtcccagcccttaggtcggcagcttcctccgttaggggaattccatctcttgctcttgggcaggaatctcctggttttgtggagggggtggggggttcgcacgggtcagcttctttcatccgcccggggcttctcgcat

SEQ ID NO: 235357 - DNA, 370 bp, Homo sapiens
  chr11:12131734-12132104
  hyper
aggacgtacacagtcggtactagaagtgccatgctgctcccccatgtccaaaaggggatgccgtgtcttgctttccagccgcctagaccaagaagcgtgaggcccaggccctcgccgctcccttgatacccgcttaccaacaccgggggtttcatctcgcagcgccaccacgccccactcccagcagccctcccctggtctccgccctgtgcgggtcagggtgggagcgcccggccactccctgcgttctgggccgggctacagcccacgtgcgccggcggcagcggcggtgacagccggccccacgggggcggggcgggctccgtgctgtcctgtcattggccgcgccgctgtcgggggcgttccccag

SEQ ID NO: 235358 - DNA, 222 bp, Homo sapiens
  chr11:12132404-12132626
  hyper
gcctcaaacccacccggcggggcgcacagtgagcaggtggcgctgcgacgaagcccggggcggccctggccggcctctgaaccaattagaacgcaataaaagcctcccaccggcacgccgaactacctcttactccgctccgcaacacccaaaccctgcagttccaagcctagaaaatcgcaagcgccaaaacggggtgggagtgacgcgcctgcagtgctg

SEQ ID NO: 235359 - DNA, 877 bp, Homo sapiens
  chr11:12398999-12399876
  hyper
agggcagagggcggcgcgagggagggagcgagggagggagcgagggaagggaaaggcgagcgtgagctgcctcaaatgcttggaataattccgcttccgtttggaaagccgcagcctcagtcccgccgccgcccgctgcgtccgcccagcgccagctccgcgtcccgaccggcccgcggcagcctgcgccgcgccatggccacctccccgcagaagtcgccttctgtccccaagtctcccactcccaagtcgcccccgtcccgcaagaaagatgattccttcttggggaaactcggagggaccctggcccggaggaagaaagccaaggagggtgagtgcggccaggccggccgggcgggcggtaggagccgggggtgccgtaggggccgaggggccggggcactgggaccgggcgggagcgcgccgcgggtgcccggcgcggtggggcgcgcggcgatgcgtgcgcgcgcttcccgggtacgtcgggcaggagcgacgcgcaccccacactgagcccggggctcgcgggccatcgaggccaccccgcccgctcgcggtcgcccgggcgctgccctcctgggccggggaccaggccaacgcccccgccgggccgtgggcgggcgccgcttggcggccggaggcggcgggaccggagcccaggcggggccccagcccgcagacagtgcgatccagtaggccctgccccgccctctgcgcccgaaggctggcatttcccaagtttccgctgcagctttcctgggcgccgtcgctcttactcgttgccttcattggtccttaaaatcaggtcgtttcctggacctgctgacgtcctctggcagcggcgtcgtggctttggcctcttcgggatcttttgtcc

SEQ ID NO: 235360 - DNA, 155 bp, Homo sapiens
  chr11:12695400-12695555
  hyper
ctgggaatctggcccggagacggcgtccaccgcgctcgagagcaacaatctgcatcaccagaaaggcaacttctctaccctacacttgcagacttccgcgagtccgggagcactcaacgcagtcacccgcgcttccgcgtcccggactagggaaa

SEQ ID NO: 235361 - DNA, 300 bp, Homo sapiens
  chr11:12696695-12696995
  hyper
acgcgcacacacgcacacaccctcgggcgccttggacggggtgcgctggggagccagaagttcggagcgagcgcgggcgggcagagccgccgcctcggagcccggagccggcctgcacccccctgctttcgccgccgccccccggcgccgggtacccccgaggccggcccgggtctgcgcagacttgtgccgctggcggggggttcgctccttcttctcaaagatgaaaaagggcacggtcgtctttgccgcttctccaggactgttgctgccgctgccgccgccgcttcattgcacatt

SEQ ID NO: 235362 - DNA, 275 bp, Homo sapiens
  chr11:12715488-12715763
  hyper
cctgcctttgtaagcggtaggaagatgtatgtctgaggaacaaaggcacttgagtcaatttactgaaactgtttataatttgtggtcttgatctgaatgtcaggctgcgttggcacaccctgctctgctgtgcggcccggcacaactcagccaggaaaggcggcaggctgagtccggggaagtgccccagcaaacacatggcaaatgtttcaaggggctttagtgttccagtgaatcctaaaactaggggacatgcaagccgacactaggcagaa

SEQ ID NO: 235363 - DNA, 340 bp, Homo sapiens
  chr11:12849685-12850025
  hyper
cagcttgactctggcgggctgagggtgctgccgtgccactgctgcaggatggagctctcttcctggtggagacttgattcacaaggacgctaattattcattcttcctccgtgcagcccgctgaaacaattgctgtgcttgttcggtgcacagtgtggcgtcggacagtcaggcctttttatgtaactgatggcgctgtatgttcatattgttctttatgtacttattttatagcttatgcagcagacattcgagtcaattagcttcttgtcttgcaaactgggcactgctgttctagaaccaagttagaagggtgtgttgagggcgacccgggcagacc

SEQ ID NO: 235364 - DNA, 2387 bp, Homo sapiens
  chr11:13030350-13032737
  hyper
tagcgctagctggtcgtggaatgcgattacagcgtctccattggagaccgctgagtgcctcggtttccctgtctgtgcaaagtgcactccccagacgccgctgcctcgagggaccaggaaatgcgtctgggggcgccaggaaagatgagaagataaagtcacgatgcgtccagctagctatagacacaagcagaggagccagtaggccaaaggagacgcacagctgatccgtgccgaggcgcgggctccactccctgaagtggagggacccttgaatctttccttgcgtaggcgcgcggcagagcagcgatttggcgaaaagggccgagactcaggatgcctgcaatgcgagcgaggggcggacagggcgcacggggcgcggcaaggctgcgaggggcgggcctgggccctgagcctcctgcacttccagccacagctctgggccttgggggcgggaaggggtggagccacgtggggaggagcaaaacccggaggtcccgggcaccttgggcagagccagagcggcgggagccggtcctgggcgcgttgccccgggagcgcccgtcgtccgggcagagcgcagccgcaaccgcgaccacagccgcagtcgctttccagcctgccttcggtgcgcagcgggggaacagggctagtgcagccgccggaggggggcacgggctcctctcccatcccagagctactgggctgcccttgctgtcctcgccgccccagcagaccccggccggacctgccacctgcgccctggttgcgccatggatccttcggaaaagaagatatcggtgtggatctgccaggaagagaagctggtgtccggcctctcccgccgcaccacttgctccgacgttgtgcgagtgcttttggaggacggctgccggcggcgacggagacagcggcggagccggcggctggggtcggccggcgacccgcatggcccgggagagctgcccgaacccccgaacgaggacgacgaggacgacgacgaggcgctgccgcagggcatgctgtgcgggcccccgcagtgctattgcatcgtggagaagtggcgcggctttgagcgcatcctccccaacaagacgcgcatcttgcgcctctgggctgcctggggcgaagagcaagagaatgtgcgcttcgtgctagtgcgcagcgaggcatcgctgcctaacgccggcccccgcagcgccgaggcgcgcgtagtgctgagccgagagcgcccctgtccggcccgcggggccccggcgcggcccagcctggccatgacccaggagaaacagcggcgagtggtgcgcaaggcctttcgcaaactggccaagctcaaccggcggcgccagcagcagacaccgtcgtcctgttcgtccacttcgtcgtccactgcctcgtcctgctcttcgtcgccgcggacccacgagagcgcgtcggtggagcgcatggagacgctggtgcatctggtgctttcccaggaccacacaattcgccagcaggtgcagcggctccacgagctggaccgcgagatcgatcactacgaggccaaggtgcacctggaccgcatgcggcgtcacggggtcaactacgtgcaggacacttacttggttggggcaggcatcgagctcgacgggtccagaccgggagaggagccagaagaggtggcggcggaggcggaggaggcggcggcggcgccccctctagccggcgaggcgcaggcggcggcgctggaggagctggcccggcgctgcgacgacttgctgcggcttcaggagcaacgggttcagcaggaggagttgctggagcgcctttcagccgagattcaggaggaactcaaccagaggtggatgcgacggcgccaggaggagctggcggcgcgggaggagcccctggagcccgacggtggccccgacggcgagctgctgctggagcaggaacgggtcaggacgcagctcagtaccagcctttacattgggctgcggctcaacacggacctagaggccgtcaagtcggacttggattacagccagcagcaatgggacagcaagaagcgcgagctacagggccttctgcaaactttgcacactttggagctgacggtggcaccggatggggctcctggctctggcagtccctcgcgggaacctgggcctcaagcctgcgccgacatgtgggtggaccaggcccgtggactggccaagagcggtcctggcaacgacgaagactcggatacgggactgagctctatgcatagccaagactcggactccttgcccatgtgcgaatcccttgtgtaggggtggggggcggggggcggggggcgggaacagggggattcttttttcttgcagaatgcagtgggccagccggctcgcggacttgaaacc

SEQ ID NO: 235365 - DNA, 76 bp, Homo sapiens
  chr11:13229521-13229597
  hyper
attcctctctctcccgacttccctctctccccgagttaaggacttcctgctctagtgtccccgcaacgccatccac

SEQ ID NO: 235366 - DNA, 199 bp, Homo sapiens
  chr11:13298519-13298718
  hyper
gaaatgcaatggaatcgctccgcgctcgagtattctctttggaactacgggaatgacagctccagtgggacacttggaggtcatgatgaacgcaaagaacgtgagaacacttgcagtcctcggggtggaaatgccttctagaaatactaagtatccgttctctcgttgagactttggcaaaccagggattttaggaagg

SEQ ID NO: 235367 - DNA, 130 bp, Homo sapiens
  chr11:13484749-13484879
  hyper
gaagccactgaggcggctgcgcgtagcggagccgccccggcaggttgcaggccggctcctcagcctcttaccgcgagagctcacaatgcgaagaggcgaggccagcagcgttctcgcgagaacggtgctc

SEQ ID NO: 235368 - DNA, 80 bp, Homo sapiens
  chr11:13485189-13485269
  hyper
tcgcttctgccggcgtggacctgatgagagtcggtcgtcgtgagggacaccctctgttccctaacgtcccccgctgctta

SEQ ID NO: 235369 - DNA, 75 bp, Homo sapiens
  chr11:13689962-13690037
  hyper
gccctctctccgcgcccccattggccgttcgcgttccgcgggcgtccgctcccgccccactcccgcccggaggga

SEQ ID NO: 235370 - DNA, 200 bp, Homo sapiens
  chr11:13690517-13690717
  hyper
ccgcctcaccccgggtggtctctgcccctctttgccccgccgccgcccttcacagggccgggaccgcgtgggggacgtacggtggggcctggtttgcagccgcggagcccggggagccgcctggggtgggaggccgctagaggtggcgaaggtggggcggggtggttagccgagcagcgggctccgcgtgctcgcgggag

SEQ ID NO: 235371 - DNA, 433 bp, Homo sapiens
  chr11:14521221-14521654
  hyper
aagccagttcttccgactctgcccgacccaccacgcctctgggactgggggcttgtggcccactaccaggctccgaggggcagtggtttggtgcagccgcggatccgtctactgcggctccgtctactccggctatgaaccgcagcagcggcggcggcggctccagagtccttggctgacgtggaagggggtggggtaacgaccgaagccacagccacctagcacctacggcgactcagagaggacatgctttctttgtgcagcgcttgcgcgctgcaagtatatcctattttcttcctcttctcttgtccagggtttgattaggccgcagagcaatgaaaccacgtattttctagttttccctgcaagccaagctctgagttaagcactatgctaatttaaacgctaactggaaatcgttccttcttcagga

SEQ ID NO: 235372 - DNA, 396 bp, Homo sapiens
  chr11:14541533-14541929
  hyper
agctattctggaccgctcagaatctactccactgaaggaacctgaggggcgaactcatctagctgaccgaggaggaagtgtcggaggctccccgggaagcgaaagcggtggaaaggccgcactggctaccgataacccctagcccggccaggccggagatgctgaatcactgccggagcccggccgtctgccgaggctctcatacctcgtggcaccgggcgacgctaaggatgacaggagaggtggctcgtcatcccccagtcaccagagctctgccctaaaccttccagagatcgggattcaacgtaccatggtggcggcgcgggcctggttgcggcctccagcaaaactgagaatcaaggaggtgctgccgaaagtatcgctcagcgatctaca

SEQ ID NO: 235373 - DNA, 137 bp, Homo sapiens
  chr11:14542171-14542308
  hyper
ctccagtttctcccgctggcgggctgcatctaaagtcgtccgagtcaacagccgtgactctgggtgatactagctctcattaaccgtccacagatttggggtgttatgtgactgaaaggaacgaggctgcaggaaag

SEQ ID NO: 235374 - DNA, 1758 bp, Homo sapiens
  chr11:14665096-14666854
  hyper
cttcggactgccgccgccgcgctttcctcggcctgggcacgctgggtcggcgtggtcccggctcgcgtccctgttgggcggccgcggcgcgggtggcggcgggacaagtcgtgagcgcgcgctgggcgcgcgcccggccggggcagtcgcgggggaggagcgcccgcccgccgctcgcgcgcccaacggaccaggctggggccgtgaggtaactgttgcagccagcggaggtgggaggcgacactgagtctccagtcccgagaggtgcccgagggaaaaggaggcggcagctaaactggtcctggagagaagccccttccgcccctctcctcagccagcatgtcccggactccgccgctcctcagtccgcgcggtggggaccccgggccgtggcggccggcgcagccctgacgggttgcgaaccagggggcgccccgaacgcgggggttggggtctgggagcgcgagcggccgctacggtacgagcggggtgtgctgagtcccgtggccacccccggccccagccatgaggagggacgagcgagacgccaaagccatgcggtccctgcagccgccggatggggccggctcgccccccgagagtctgaggaacggctacgtgaagagctgcgtgagccccttgcggcaggaccctccgcgcggcttcttcttccacctctgccgcttctgcaacgtggagctgcggccgccgccggcctctccccagcagccgcggcgctgctcccccttctgccgggcgcgcctctcgctgggcgccctggctgcctttgtcctcgccctgctgctgggcgcggaacccgagagctgggctgccggggccgcctggctgcggacgctgctgagcgtgtgttcgcacagcttgagccccctcttcagcatcgcctgtgccttcttcttcctcacctgcttcctcacccggaccaagcggggacccggcccgggccggagctgcggctcctggtggctgctggcgctgcccgcctgctgttacctgggggacttcttggtgtggcagtggtggtcttggccttggggggatggcgacgcagggtccgcggccccgcacacgcccccggaggcggcagcgggcaggttgctgctggtgctgagctgcgtagggctgctgctgacgctcgcgcacccgctgcggctccggcactgcgttctggtgctgctcctggccagcttcgtctggtgggtctccttcaccagcctcgggtcgctgccctccgccctcaggccgctgctctccggcctggtggggggcgctggctgcctgctggccctggggttggatcacttctttcaaatcagggaagcgcctcttcatcctcgactgtccagtgccgccgaagaaaaagtgcctgtgatccgaccccggaggaggtccagctgcgtgtcgttaggagaaactgcagccagttactatggcagttgcaaaatattcaggagaccgtcgttgccttgtatttccagagaacaggtatgttagctggaaggcgaggtctgggacgcgagcgggttcgggtttaccgctgcagtttccgagttgaattcgcttatttcaaagcatgttaactttcagaatggaaaaagggtgtgttgcggggggggggggggaggaaataatgttttattctggaaaggattcttaaaatacaggaagccttttaaaaatgcagaagcaagtagcttttgtcattgaatagaaatcaaatagcccgctaatcacatggca

SEQ ID NO: 235375 - DNA, 451 bp, Homo sapiens
  chr11:15136038-15136489
  hyper
tgtttcagctccaagggaaacgatcgcggcacattcccttcccctctccagatgttggcatgcggggcaccttgtgggcgaccccgcctggacggcttcgcggctcccgggcgatcaccctggtgcctgccgcctggcccgggggagcccggtctctaattaggcctgaccgcgtccccattccagcgctcctgcagatgggagggagggccatgtttccccccccaggggcaccgaaatagcctcgtagtcccgcggagacagcaggcagccgtggctgacgcgggaccaaggcttggcagggagcgcgctgctgtggaaggtccttgggaggctgcgaccgcctcggagagggcgggcgggggagaacggggcggggggtggggcgggggccaggggcggcctctcgggctgggccggcagagcggccactttgcgcgcggcctctgga

SEQ ID NO: 235376 - DNA, 146 bp, Homo sapiens
  chr11:15671676-15671822
  hyper
cccagaggcctgccgcgctcggcctgcagttctccgctgcggacggtaggtggcagcgggtcgtgagaaatggccctcgcctggccctggctgcggagacccagcctggagaaaaacgtggctgggcttcggccgccgagcgaggg

SEQ ID NO: 235377 - DNA, 1692 bp, Homo sapiens
  chr11:16626018-16627710
  hyper
gttgctggctgggccgtgcagccagggccaaagcccggccgcaggagtacgcggctagcaccggcgcccgggacgcggacgtcatccgagcgcccattgacagtacagcgggaggtccggagcccagcccagtttgccgcaaggacggcttcgggccacctctagccctaaacttcaagcgcggccctcacagggtctcacacacaaaagcagcccaggacagcccatctcgctaacagcccagccccgccagttcagtcgaagacttatttttagtccccaaataggggctgcattcaatatctgacaattcacacaaaacaacattttcaaacttggtccgcctaagagaccgtaaataaaactcaaaacaagctggcgactgccaccttttatctgctccgaacacaccaattctttttatcttaaagctctgcggagcgccggggaagcagcccggcaccgagctaatctgccctcagcagccccgggccgctcctcccggcatcggagcacaaccccagcagcctttgcacaagccctttcccttctctgcccggccctttaagggagaaggaagaaagcagctcccgcgggagcggccgggctcgggctgggtcccggggcgggtggcagcaccgccccctgccctgggccgagcccgggagcagcggaccgcggccccggctgcagaggaacggcgggtggcggggccccggcagggcgccgagaaggacggagggcgccggctgggctcagggacgcggggcggggaagaaacgtgccggcgaccgtgcgctcggccgggtgactccctggcgaagtccgcgcccggcggggctgaactacccctcgcccccgctcccgccaggtcaggcaccactgccctcgcggccagggtaaagaggaccacagatcagtcagccttggatttcggatgggcttggaattcggtttgtttattcctgaaaagatcattaaaaagtactgtccaaaaacggggggagggggaaggaagggcgacaagcggagggagctggaggcaactcgagcggtgtcccgaaaaagttgcggcggagcggcggtggggtgagggtgggaggagggagcgcaagcgttttctagcgacccgggttttcttcatgaactcctccgagtaaactttatcccggcgagagagcggcggagatcctcgactcccgcccgccctcaaccagtgtcaaccccacaaacagcctaagtttccaaaccgaaatgggggtggggtgggggtagcattaagaagcccagaagctcagcgggtcctcccgacctcccgcacccagagcctgggtgacactgaagcgctccgaacactgtggcgtctcagtcacacagcgaatcaacccaacacttttcaagaaaacaaaatatttgctaggaaacttactttgcatttagtctctattctttgggggatgcggtttaggtcggctcgcaagggaagcccgttttgtccaggttggatattgtctacgtatggatcagcccttggatgagggtttattttaatttatggcttatgcattcttttaaggtcgatttacatgacctccggctacaactaagacagccgaggagggcactccagtcgtcagtcggccaaacccacaattaaaacagccctccccctagtctcggtgtgactagggc

SEQ ID NO: 235378 - DNA, 57 bp, Homo sapiens
  chr11:16627948-16628005
  hyper
cattaccgcctagcggtcccatctgaaccttcaaagccgacacgcatttgctttcac

SEQ ID NO: 235379 - DNA, 1183 bp, Homo sapiens
  chr11:16628221-16629404
  hyper
gacagatttccggacgaatacttaggatggcgataacagctttctgttgtcaaaggttgcgttgtgtccctgtccctgcccttttgccttaatgtcctacgcacagttatctacggctacaacatgtgttttctcagggtggattttttggaggggaggtgaaggggagaaaaacagacccccgccacgcagatctgtcactccggaacaaggcgcaactctccaagagggggacgcatcctcgggatcagcgcgtccaccagcgagcggcgggcgcccgggcccctttctctccctccactccccctccgcgtcggcccctcggagcgccctcctcccgctcctcctcctcctttcccctccccagccaagtacgcaaacccgccccggcccggcagccgcggctcccggccacccgcgccctctcggggctccgctcgctcggctctcgtccctctgcctgtcctgccccagcccctcggtcccagctcacagaaactaaccctggagtgcccggaagggcaggagcggaagacgccgggggacggcggcccggccctgggctcctgccccctgccccctccggcgccccaacaggtagctcacagcgggccgcgcgccctggctctgcctccctcgctctcgagatcgctcgctccgtcccggttacctgggcgggctccaggatggtaccgcgcgggagggctccttgtgcgctgcgccgcaggagtaaatggcattaaagaaaaagggaaagatacaaataaaaaaaattaaaaggaaggggagtcggtgctaggtcaattgtcacagtccggggagcaagggaacagaaccccccagcgccgcggccggcgtagcccgttaactcaagtctgcgggggtgtcccgccccgggtgggggcagcgcagagcggcagaagtttgccgccggggttccaggaggtgcgcgcggagcggggtgactaggggcttcaccctggaacaagtgaaggcgatggttagtgctgtcaatcttggcaatcagtgtgagcggccatgtcgtaagtattcaaagcatttcccgtcgtgcaacatcagaaagtgagtggccagggcattgatctgagcgagggagaggaggctgggctcccctcccagacaacacaggcaagatgagacaagaggcgagggaggcagcgag

SEQ ID NO: 235380 - DNA, 351 bp, Homo sapiens
  chr11:16632499-16632850
  hyper
ggagccccacgcggcgcaagaaccccgggcgctgagctccggggaacctgggagggaaggaggggcgagcgggtggggctgacttacctgcccgcagcagtcgctgcctctgtgttgtccgaatgtccctgcgcaccgcaaccagcaaaggcaattcggctttgctaactttggcctcgcacctccagagaagaggcgcgaactcgcaaaaggaaaggcgcgcacggttcctggagagaggtccccctgaacttgggaaggacaaggcaattaattctgctcgagaagttagtatttaaaacacccacgcaaaaatcataacggctattaaaacctcgaattcccgctttg

SEQ ID NO: 235381 - DNA, 103 bp, Homo sapiens
  chr11:16633300-16633403
  hyper
aaggcattgtccctcgactttaagtggacagagaataacattaaatttcatttgaatctgcgtgtcatttctgttaggaagatcacagcggtagcgacagtag

SEQ ID NO: 235382 - DNA, 442 bp, Homo sapiens
  chr11:16634103-16634545
  hyper
tctttttaaacacattgaggcgggggggcggggttgggagtggggggatggcgatgaagaaaaggagaaaaagcctggagtatactaccttgctcaaaaagctcccaaaggcagcgtggagcggcacagacacgaactaagacaatgtgtgtctgcggagcctgtacagggtccatttctcccccacgtcaccctcctccattcccctctaatgagacgcggatcaccctccactctcaccgacactgcagctctgcacaagggcagctggaatctgggaaccttacctgcagcaccaatacctaagagaaatcgcgcttccctgacactaacacgccatgccatccccacgcaccctgccaaagtcctgtaaccatctacttcttccatctgcctaagagaaactgtaaacgggatttcccccccacgattgaatggaagc

SEQ ID NO: 235383 - DNA, 491 bp, Homo sapiens
  chr11:16635528-16636019
  hyper
gccctcagagactcgggctgacaggagtgagagctaaaacttccaactagctgaaaccaatagccgggaatcgagcgaaggcgaactctcccagcaaagtataaagcttcgggccaaagagtctgcagctccaagtcaggggctgcggctccgaaactccaaacactaactcccagggcagtggcagagggtgggggcagcttcgaagaggcataccaactgctccggtcctggccgaagaccgagctcccttctgcggtgacctcggctcagagctgactccgtactccctgggactcatctcccgcttcctctccaccttcggaacagtagacaaagggactcagggacgcggccagacccaaggtcacaaacggaggtctccgagacgagaattgcgtgcaagagaaggacgttcaggcagcccggccgcctgctgcgagagctgaacatttcccagctctatagtcgcccatttctcaggaaatcag

SEQ ID NO: 235384 - DNA, 112 bp, Homo sapiens; identical to SEQ ID NO: 202462
  chr11:16759951-16760063
  hyper

SEQ ID NO: 235385 - DNA, 202 bp, Homo sapiens
  chr11:17034985-17035187
  hyper
cctccccgcaggcccgcgcagtggatggaggccgggggcgaggttccgactctccaagaccatcccagagcctgcggcgggagagggggcgtcctcctaagcgagattcccctagtctctccctctccccactccaaccccgcaggcccacaccaggacagaacttctcgttctactcctcccacccgagcccatccaggtc

SEQ ID NO: 235386 - DNA, 192 bp, Homo sapiens
  chr11:17036087-17036279
  hyper
cctgagggagcgaccgcccggccgggtcctggcgcccggagttcgcagccgctccggccaacccagcgcagtgcccgcggcctttgtccccgagccttccccgcccccagcctgctggcaccggcgctcccctttgcccccgaggccgggagacccgggcggcgcggggggccgctggcgggggccgctggc

SEQ ID NO: 235387 - DNA, 404 bp, Homo sapiens
  chr11:17228726-17229130
  hyper
atttatgattcctccgtcactcaggaagagttaagctagtattttttaatctgaccgctctctcagaaggatgatgcgctaaatacacactgaaagaatagtgttcccaaagcaagtggattcgcggctaaaggcaacgcggtgggagtggggggtccgggaagaagaaaaagtatccttggcccccagagccagagatgggacaggaggtgaaagaaggggccgtcactgagaagtacaacacacacactcgccagaactaacaatctgccaagaaaataggaccggccactgcggctccagcccggtcccgcgggacaaggcgggggaggggggccggcggccggggggcctgccctccttctgtgggacaaaactaactccctggcgcacctccgctcccg

SEQ ID NO: 235388 - DNA, 759 bp, Homo sapiens
  chr11:17372999-17373758
  hyper
ttaaagtaatgtaagtttatcgcgccaacggtaagatgtcgctctggacgcgtgcacctgctctcgcaatcaccgactgcggtcagcatcttccttagagcagcgccccgggccacttggatcccggtctcaatttactaagcgaacccagaggatgccccgagtcctggaccgcagagccgctcgcgagaggcaccggggctgtaaccgcgcaacctcgtgccgcgggcggaggcgagggaggattccccggccggtgcccgcccccgggctaaagtgcggcgcgggtggggctggtcacgcgcctggcttcctgcagtgcgaacctgggaaatccaggcgacttcgcagttgccgaagggatctgaagaagtgggatgtgcaaaagcgccggctggaaatcccggctgtgtctccgtcaactctttacgcaacagaggtctccccctgcccttggtttctaccgggccgcctgctcccactcggcgaaaaaaattacacaacagcagccgcggcgatgacgtggagggctgccgcctccacgtgcgcggcgctcctgattctgctgtgggcgctgacgaccgaaggtagggggcggctggggtgggctggggcgggggctcctggcgccagagggtcctcgcgggtcggctccctagcatcccgccaggggacctcaacttcctgggggctgagagctctattttcttttctatttcttctcctttttttttttttttttttttgagacggagtctc

SEQ ID NO: 235389 - DNA, 219 bp, Homo sapiens; identical to SEQ ID NO: 202467
  chr11:17373998-17374217
  hyper

SEQ ID NO: 235390 - DNA, 228 bp, Homo sapiens
  chr11:17411057-17411285
  hyper
ttcctcctgcccacgctctacgaaagtggggggctgggagggatctgtgacccgccctcccagtctggggccgccgccctgtcgccctggctcccctcccccaatatccccatccgtatttgggtcagtaatccgcctctcggccgcgccaggtttgcaggttccccgggaaaggaggcgctgagaggcggcgccaccaatcccagggctggcggaaattaggcggtc

SEQ ID NO: 235391 - DNA, 360 bp, Homo sapiens
  chr11:17497462-17497822
  hyper
acgcacgattgtcccggccgtggcgcccaactttgcaagcaagggcgccggggtcgctgcgtcggcgagtcggagctactttgcgcagagcctgagaagttgcgctctggagacacatgcccgggtggggtggcgggggaagggaatccaagtccctagctctcgcctctcctcgcccagggcgcgggcctgggactgtcagagatcacggaccactgcgcggctcagcccggtgaaagcataggggttagctgggcctccatcccagactccaaagcacaggcttccctcttccctaggcccagctgcggctgacagggaggctgccttgcgggaggggtgacccggctccctaagctg

SEQ ID NO: 235392 - DNA, 158 bp, Homo sapiens
  chr11:17498078-17498236
  hyper
gggccggaaggggacgccgagcggtgcggcgcgcagcgcctcctcctccctccctgctctcccgtcccctcctccgcggctcgctgcgcgcactcaccaatgaagaggatggggaaggtgatgaagagtaggaagacgtgcggcaccacgttgagcgc

SEQ ID NO: 235393 - DNA, 70 bp, Homo sapiens
  chr11:17498416-17498486
  hyper
cccggccgtcaggcccccgccccccgggccccgcccagccccgctggcctccccctccctcaccccgccc

SEQ ID NO: 235394 - DNA, 378 bp, Homo sapiens
  chr11:17740292-17740670
  hyper
ggacacccctgctgtggaaacgtgcagatttagatggaggggattcctaacctgggcaggatccgagtttggagagattggcgcgaagctttagcagcaatctccgattcctgtacaaccatagctgggtttctaagcgtctagggaagaaggactgggcccacgacctgctgagcaactcccaggtcggggactggcggaatatcagagcctctacgacccgtttgtctcgggctcgcccacttcaactctcggggtctctccgcctgttgttgcactcgtgcgtttctctgcccctgacgctctaagctttctgctttctgcgtgtctctcagcctctttcggtccctctttcacggtctcactcctcagctctgt

SEQ ID NO: 235395 - DNA, 591 bp, Homo sapiens
  chr11:17740873-17741464
  hyper
cgcctagggctgccggtcgctccctccctccctgcccggtaggggacctagcgcgcacgccagtgtggaggggcgggctggctggccagtctgcgggcccctgcggccaccccggggacccccccaagccccgccccgcagtgttcctattggcctcggactccccctcccccagctgcccgcctgggctccggggcgtttaggctactacggataaatagcccagggcgcctggcgagaagctaggggtgaggaagccctggggcgctgccgccgctttccttaaccacaaatcaggccggacaggagagggaggggtgggggacagtgggtgggcattcagactgccagcactttgctatctacagccggggctcccgagcggcagaaagttccggccactctctgccgcttgggttgggcgaagccaggaccgtgccgcgccaccgccaggatatggagctactgtcgccaccgctccgcgacgtagacctgacggcccccgacggctctctctgctcctttgccacaacggacgacttctatgacgacccgtgtttcgactccccggacctgcgcttcttcgaagac

SEQ ID NO: 235396 - DNA, 138 bp, Homo sapiens
  chr11:17742244-17742382
  hyper
cttggtgactgtccgcccttggtttggccctgcatgttgcagacctcatctcctacccacccgtaattacccccccaaccaggacaggtctgggcccggaactagagccttaggctagagttagggagggggcggcta

SEQ ID NO: 235397 - DNA, 97 bp, Homo sapiens
  chr11:17742746-17742843
  hyper
tgggaggcttgtcgcggccccacccctgcttactaaccgagccctccccgcgcagaacccaggcccgggaagagtgcggcggtgtcgagcctagact

SEQ ID NO: 235398 - DNA, 157 bp, Homo sapiens
  chr11:17743023-17743180
  hyper
cgaaccccaacccgatataccaggtgctctgaggggatggtggccgcccacccgcccgagggatggtgcccctagggtccctcgcgcccaaaagattgaacttaaatgcccccctcccaacagcgctttaaaagcgacctctcttgaggtaggagag

SEQ ID NO: 235399 - DNA, 1077 bp, Homo sapiens
  chr11:17756067-17757144
  hyper
gcccagacgtctctcggagcccccgcccctggagtggcgttccccgagggcggaccgtgggcgggtcccccgggagcagcaggagccgcgcggggcgggcgcccccagcgccgaggttgagggaggccgggctcggtgcggggctgggaggggggcgcggaatcagggctttttaggacccagcgcggcgccttcctccgggggcgagtgcggctgcgcgcgccgtgtgcccgtgtccggagagcggcgggctggacgcggaccgcgcgaacgagcaggcgacgggcgagcagcaagcggagcagcagcccgggcggcagcagcgtcgcggcggcggcggcagcggccgctccgcgcctcgcctcaccggcctcgctggcctcacctcgccgcgcccggacccgccacccccgcctccccgcccgacctccgcagcccccgtctcggccggcagcgcccaccgcctgcccgaagcgaggagcggagtgcggggcgcagaggcaccggagccagtgcccgccggccccgcaaatcaaacccagccaggagaacccccgcctggccccgtgcagctccgcgaccgccgggagctgtcccttcagcaccgccgcgggagcccaagtccgagcgcagcccagcggaaccccagctcgagcccgggctcacggagagcagcgctcggcgttagccgcacgagcaacaccccgggtgcccctgcccagggggcccgccatctcctccaggaggcggggagaaggaacgaggagggcgggcgggcaggcgggcccgccgccggggggagcaggcagccaagcaaggagagagggagggggccggagcccgccctgcgtcccgagctgcagcccggccacgcagggaggaaggcaggcggcatccatctcccccgcgccgagagcgcgccgcggcgaccacctcacagaggagcgcgaatttcccggccctgtctcctcccctccccctcctgggggctggcctctagtccggccccgggagcggctgacctttcccccaaaagctttgtgccgatttctccattttcccgcggagatggggacg

SEQ ID NO: 235400 - DNA, 260 bp, Homo sapiens
  chr11:17757400-17757660
  hyper
ggggtggccagagccgcaggcctctgttccccccgacggctggggggaggggggaagagggcgcgcgcccccctccccggcgccaactccccctggcggccgctcccatgggtgtcgctgggccgcgccatgcctaagggggcgccgcgatgggccaaggggacgagagcgagcgcatcgtgatcaacgtgggcggcacgcgccaccagacgtaccgctcgaccctgcgcacgctgcccggcacgcggctcgcctggctg

SEQ ID NO: 235401 - DNA, 285 bp, Homo sapiens
  chr11:18034650-18034935
  hyper
gatgggtagggcgcggggcggggtctgtggtgggaagcggcccgcaggccgggagagagggtgcggccgggccctcgggccactggggatcagtggtgggcggggccggacgacagccccggagccgcctcccagtcagcccgccccggcggcgctcgcagcgtctccgcccgcagcctcctgtctcgctgggcctctcagcctctcgctcctaccccctcgtactctttatttttagtcataatttcatgtttcatgcaggtgcactgcgcgccacagttcaca

SEQ ID NO: 235402 - DNA, 107 bp, Homo sapiens
  chr11:18343666-18343773
  hyper
ccggggaactcaccgcgcactaagagcggaacgtgaacttcagtctcccctcgcgttcctccccttccttgctgacgtcatccaggagagccgcagactggaaacaa

SEQ ID NO: 235403 - DNA, 1228 bp, Homo sapiens
  chr11:18415860-18417088
  hyper
aggctcatggctccgaccccggcttctgtggttggagggcagcaccttacttagactcccagcgcacgtggagcagtctgccggtcggttgtctggctgcgcgcgccacccgggcctctccagtgccccgcctggctcggcatccacccccagcccgactcacacgtgggttcccgcacgtccgccggccccccccgctgacgtcagcatagctgttccacttaaggcccctcccgcgcccagctcagagtgctgcagccgctgccgccgattccggatctcattgccacgcgcccccgacgaccgcccgacgtgcattcccggtacggtagggccctgcgcgcacggcgccagagggatgggcgggtagagccaactgcctctggttctgctggcctccgctgctcgcgaagggattcctgctcccgggaggtgtaggagccgctttccagaagcacagcccagagacgtctgggcggcggcccacacaacgcatgtgttcggagctcgccgcgctctgcttttgctctaagcgggaaccatggcttctggccacgctggggaaccgaggaggtggccgcacccaagcaggggtcgaaagcccgggtggatgcggaacaaggatatgataggccttaagggtgggggatacctctgggctcgaaatcggcgggcggtgcaaaactcgaggtccagttctcggagcccatagagccaaaaaagcctcagcttgtccggggcgggttcttgaaagacggaaagcggctgagtaccacgcggcttgcatttttctcttgggacgctcgagaggtgggctccgtgagggcagctgctgcctgcagattatagggagccctttgcgcatttattaagaagctactggtgtatctcgggctgcgctaggcacggcgcatgcaaagatgaagcaggcagcatcccagcccttccgcacctcagacggtcagttgagtaggatccgccggtaccaactcctccttttaacaaatagggagaccgaaagctaggagacagtcagggatctctaagttcccagtgagtaggaggcagaggtgaggtgtagaactcgtttttgcatgtctctcgcctctagacgcacccttccctcatcccatgccctcccacctccgcccctacattaaaggtagcattggatcccggggccgttcagtgaagctagcaggtgtccgcaggaactcccttccccctg

SEQ ID NO: 235404 - DNA, 35 bp, Homo sapiens
  chr11:18548288-18548323
  hyper
gcgccctgggaggcgagcgcgtcgcagcctcacct

SEQ ID NO: 235405 - DNA, 240 bp, Homo sapiens
  chr11:18548581-18548821
  hyper
gttccaaccaacccgcccctcgagtgccggaatcagcaggacgaatcgggtcccaaagatgtgggcaagactgttccgagggtcgaaactctggttcaggataagattagcaggtatttcacagagtcgacttaaggaagctagtgccggagagggaagaagtacgaagggcttgccagtgagccttaatgactgattgatcaagtgggagggcactgcactggcggtcagagaactgtt

SEQ ID NO: 235406 - DNA, 54 bp, Homo sapiens
  chr11:18610408-18610462
  hyper
agtgggcaagtgacgagggcacggccagaaacgcattggcgtcaaggaaaccac

SEQ ID NO: 235407 - DNA, 32 bp, Homo sapiens
  chr11:18656064-18656096
  hyper
acgtggctgctggcgtcgacccgaggggcagg

SEQ ID NO: 235408 - DNA, 1082 bp, Homo sapiens
  chr11:18742610-18743692
  hyper
tggttagacctaaggatggtcggtccttggggagggttcagctgaagagcccggagcccctgaccctcacccctactctacggcgagtccctccggcacctcgccacccacaatggtcccgccctccatggctacgcccaccgtcttggtcccgcgttccttttggctcactcgccttgtggacacgccccttcgcttccattgcgtcccgccccgccacgttctggctctgcccctgctctgctctgccccgggggtactttgggtcctctgctcattccggcaatatcccggttcctgactcggcctctcttatcctgccgcgcctctcgggcaatgacagctgcttttcccactgcccggctctcgggccgccgttaaggctctcatcggtgagaagactggcggcccgccctgggggtccctgcctctggccttctcggtaactggacttgggcttggcccccgcaccttcagcacgtgttccttgttaatgctgtcgtagaatatcttggcggactccttgatggggatgccgctctccctcttccaggagatgtggggtttggcgttcccctgcacccgggctcggaacacggctttgtcccctgcgatgagcacaggacgcgttttcgcctcttagccaccaggctagagcctctgccaccctctgccggctctctgcctcctcccagacacctgggcctggccccgggcaggggaggaaccctcggccaggctctgccagggtttagcattggaggtcgttggggtaggacggagggtgggggcactcgattagaaagcgaagcactggagcccggtgagccacaggcagcaacacaccctcgggcgcggtgaccggttgaggcttctccacgaactcagggacgctgtcgcccgcagggatgtttgagctccgggtcactaagctgaagaactccactatgctcgaggacttcctcctcacgacctcctctgtgggggcaggcgagaggtcagaatgggctccaggtagaagcccagctcgcgatgggaggacagagctttcttgagaggacggtggagcatgggaacaaaga

SEQ ID NO: 235409 - DNA, 1637 bp, Homo sapiens
  chr11:18812615-18814252
  hyper
taaagctaaagggtcggtggaggcgaagcaatgggaaggctgggagccgcgctttagaggccagaaggctagcggcgatttccaatctccctcaggggcttcaggctccggagaggcgatgcagcccagagccgcgcaccagcctccgccggccgcagaggctcagaccccaaaccactatcccgattcctccccggaaccgcgcacgggcttcgtggggagtggctgccgctccctcccggctaccaagcgacaagccccctcctctgcatgggggacccctcccccagcatgcgggcgcccagagccccacgggggcgtggcgggggcgggcgccggctcctcggccgggagggctggagaaggtgtcagttgcggggccgcccgaaggagggacccgcgccctccaccttccggctccgcacacaaaggcgcagacggaggcgccgcacttaccggccagagcgggctccgggcgccggcgagcaggcgggcaggctggcgggaggatgcgcgcgcgagtgtgcgtgtgtctgcgtgtgtccctgcttgtgtctgtgccagtgtgtatgcgacgggggccgcgccgagctctgtgcgtctgcgtgtgcgggggcgtccgtccttcggtgcctccgtccttcggtccgtccgcctggcgctccgtcccgcgctccgtgcgcgctccctcgcccgaccgcctcaccaaatgcgcttcagctgcagagtcgctggcgcagccgccgggtgggtttggcaccccccagccccggctccgccccgcccccgggcgggcttccgccgctcgccgggaattgcgcagggctggcggggcgggggaccgggagagcggcctgctcccggggcacgaagggggccggatcacagacccttaacccctgacctcatctcaggtgcctccctctcccgagcaactctgcgcggagtctccgcagtcgtcgcccccatgccaaggttgcttggacaaggagggcggaggagtgggagcagcgcatccatttcattcatgattttttctcctcttgggagccccgggtcgggccgcgcggctacggcaactgccagagggaccccggcagggccgtgcgcgctgaacctgggacgggacagacaggcagacagaaggagtaggggccagcgagacaaagggggcagagttgggggagggagtcggctcattgggggcatgccgtggcgctccccgcatgttgccaacacctgcgcaagtggagcggccccatactagggcgcatgcaataccaggtgccgaggactcgttctaggacgctgaggaggcgtcctttttcccagttctccctgttcagcctctggggagctagagcgagtggacagcccctccctccactgagtcttgccctcctgacgtgcggcgcggggcacgcacctgttttggttttctcgtgggcaccaggggcccggacgagcagggagctgcccatgtgccccacaatcctgccacaatcttccgtattctccaggctgctagtgcgctggccagaggtttccggcattccatccccatgggggcttgaggctgtgggctgcacacagggcagggatcctaaactccattttttacacggggaatcagaggc

SEQ ID NO: 235410 - DNA, 136 bp, Homo sapiens; identical to SEQ ID NO: 202481
  chr11:19093003-19093139
  hyper

SEQ ID NO: 235411 - DNA, 723 bp, Homo sapiens
  chr11:19263419-19264142
  hyper
ataaaatttggcccgtccggggctcgcgggctgggccgcaggcgccctgcgattccccgcttggggctatctcacccctgcccagccccaggccggctcacctgccctcggactccagccggacctctcccccttgcacccctggcatgcatgattgtgctgcccaccgtctgccccgtgcctcgcagaaactggcgcgaggagggagaagcttggctactggtgcctaagctccgtgggctctgggccttggcccagcggtgagaactcaggtgtaggaggaagaggaggaaggcggaaaaccctccaaccctgtcctcgccgtctttcctcagggtctcccacccactcctccctttctcttccctgttgtctttccctctttttccggtctccgagcctcaggcagctttagcctggttccctgtagagccctagcagggtcggggagacacttcgatccttcgtcctcactttgcagaacgggacaccgaggcccggggcggcggcgctgcctcggctgcacctggatcatttgcgcccgcgttggctccctttgctctcctctgccttagacttttctgcggactggtgctgagtgttgcccaaccgcgccgagatctgggcgccggtctctcgatctggactcggtttggctcgtcctcctctgtaatcgcgtgtctttaggctccagcagggcccggggccacacttccccactcc

SEQ ID NO: 235412 - DNA, 130 bp, Homo sapiens
  chr11:19733695-19733825
  hyper
ggccagagcctgccggggtcatggagcctctcccggcttcttcaggccactctaattacagagtctgtggtaggttgcgtggaggagctgtctcggggcgggaagcttccctgcgtattgtatttgccta

SEQ ID NO: 235413 - DNA, 271 bp, Homo sapiens
  chr11:19735445-19735716
  hyper
ccagcgggggaggggctcccgctgcggaagagcggctcggtggaaaacgggttcgatacccaggtgagagatgccgtttgccggggtactgttctggaaggatggatgaatagttctttcgggatggtgtgggagaaagggctggatgggagaagggtctaccatgtggccagggaagggaaccattccccttaggccggcaggttgggggatgcgcgaggagagtgggccggccggtgggtgtggcccgggtgccggaggtttgccttaa

SEQ ID NO: 235414 - DNA, 918 bp, Homo sapiens; identical to SEQ ID NO: 202487
  chr11:19798523-19799441
  hyper

SEQ ID NO: 235415 - DNA, 731 bp, Homo sapiens
  chr11:20153468-20154199
  hyper
cgtgcagcaatactcgcagcgtggagagttccagtcccgaaatggcagcgtcaggcaagctgcttccaatacccctccctccgacaaccagaaacaaatacccagcgcccagatccacaccagcagcaacccagagctccagtctgaggatgagactgttccagggccacagaaaagaggaaaacctcgggcagatggtgagggaagggaacctccgtgttcaggacacctccgcccatccacattcggcctggcaccgatcctgcggaatctctccccaacgcacggtttctacactggaacgattgaaactaagggggtgcgccaactcccccaccttcgcgggtcccctggcaggagacctggtccttgccttaccgcagtaggtgtggctgtgactgaagggagcggcatccctgagcacagtcggagacaaagggaggcgagggccaaccccagcccggaaactctgccctgtaactcggccaaaggagacgccgcattggagcggctgttccgcagcaccatgctgtagaaggtacgttcctctgatgccctgtgcgcaaacccctagccagccttcccacactgccaggataacccttttgaaacctcccctgtttgggacaggccgtgctcccaccttttattggagacgaggcgaacctgggcttagggcgccacctagagccaaaaaagaggaagcgacctggccgcgaagcttcgctagg

SEQ ID NO: 235416 - DNA, 744 bp, Homo sapiens
  chr11:20177588-20178332
  hyper
aaatgtctctttggggctaccgcagggccggtggcgccctcaatgaggtgatggtttctaccgtcgggagaggcagcatctgggcacggggacaaagtgaatgcgcagactggaccccacctcttcgatttcaaagcacttaaaaatagtactctggcgtgcgagcggcttctaggacacggtgatttcctcctgttcctcgccctcctcttcctcctcggaatctgagaagtccgaaggtttcccgggactgctcgagtgcgcgggcgaggggggcagcggccctggcagccgcgggtcccgcaggtgctgggggtcggaggacgcgtggtaggccaggcggtggctggggctgcccgggccctcctcctcctcttcgttcccagggcccttctggcccacgtcgctgaggtccgggtgcggattgagcttggtgggcagggtctgctcgcgacagcccccgctagacaggagttcgcgctccttggagttccgccatttcatgcgtcggttctggaaccagattttcacctggaatgtcccggccggcgagaagaagggagaagcagaggtcagatcaggggctccgggggacgcacgggggcggggagtggagtcgggtgcaggctctgtccttcgggctgtgtcctctccccacccccagaaatgagttccggtggattcccgcattgactccgcccccgcctcagctcgcggttccgtttgcctcatccgctgccaccc

SEQ ID NO: 235417 - DNA, 49 bp, Homo sapiens
  chr11:20179052-20179101
  hyper
ttcagtggacttagggaaacaaacctgcgtacatcaactaaaacagcaa

SEQ ID NO: 235418 - DNA, 145 bp, Homo sapiens
  chr11:20180570-20180715
  hyper
gcatcaaattggcgcgacggattcatgaatgttatacgcctcgcaacctctgaaccagagcataaccccgaggggtggacggagaaatacggcttcggagcagggagcgatgggccggggctggggcgccgccctgcctcgcgca

SEQ ID NO: 235419 - DNA, 39 bp, Homo sapiens
  chr11:20181711-20181750
  hyper
gtaggcggggggtcggctgatgcggatcagatcctccac

SEQ ID NO: 235420 - DNA, 546 bp, Homo sapiens
  chr11:20182623-20183169
  hyper
tgttagaagtcccattctgacgactcagggaaacttggaaacggatgctttggggccactggatgtgtgtccgtaagagtggggagaggtctggagttatttcatttcgggagactggttgagtttgagcgttggtggatacctgaaaagtaaaacgagtctccttcaaattcccagcaacttggaaaacgattttctctaggagtttctgcaaggggctgtccgcacctcaccttgcgggaggagcggaggagagcggcgctgggctgccgagcggcaggattccgcttgcaaagagcttaggctgaccggaaactgcctcgggcaagggtatccaaaggctgtgagtgctatgctggccgttctccaaacacagggagctctcggcagtttaagttgaaactcacagccctgacattttaagccatagcagcgaaggtccagacgtcgtctggagagaaccctaccacttgcggggcccttaacttggcccaaggtttggcagcttcttaattaactacaacgcacaaacgcgtgaaaaccaga

SEQ ID NO: 235421 - DNA, 143 bp, Homo sapiens
  chr11:20183611-20183754
  hyper
cattaaaccagaaacggagccggctaaaactctcccttgattcaaattaaaaagttatttagggcccagctccagaggcgaattaatgctagaagatgacgtaagtgcggagtttctgagcccaagaccgctcatgctcatgg

SEQ ID NO: 235422 - DNA, 172 bp, Homo sapiens
  chr11:20184118-20184290
  hyper
ccagaaggacgcgccgggggcttcaggatgtttgattccctaccggtgaagcgcttgtccaagtcttccggatgatcagaatagagtctatatttgccaaaatcaacttggattttgtttttttttggaggggggaacggtaagaacttgaagccagcgtgagcccttccca

SEQ ID NO: 235423 - DNA, 901 bp, Homo sapiens
  chr11:20184581-20185482
  hyper
gggcgagggctggccgcccgtgaaaggaaaaataaatcctaaggaagcaagaaatcggacgaaaggatcttactttaagtgatctccttgaacgcgtcttttcaaactccgcgatagcccaaggagctgcgcggcgcggcggctgcggctaagacctgtgactaatgccatttgacctgagcccatggggttttgtgcgtcctgccattcactgttatgtcgttatcttcaagtttatttcggagaaatcactcgcgttctttgtctcaaggctgagctttctgtctatttctctttcaagagaaaagaagacgggaggggaaaagagagaatcggagtccctggtttggggtttaaggtccttgcctacgctgcgggggaggccgcagcagatccggctggggctccccgggcctaggtggccaaagctgccgaaacctgccttggatagtagaaagagcgtgtcggaacgcactctgggggtttcgttccccccgcgcaggggagagcgagcatgttcctgccccgggcgccgtgcggtcgcagcagcagcgcggccctctccagtgcgagccgtgcctggaatgtctcgggtaagcgaagggccagcaagcgaggcgaaacggacactataaagcagagagtggtgtgagcttccccgccctctgaaaagatggcaagtctccgtttcgggaaggctgcaacgctaaggtcaccctttgcaggcttcggacccccagtcctccatgctccctgccggagcagccaacagagtgagagcgcattttggaaagattggccggatgccgggcggcgacagggaaaagcgcccgacgcctggctttggggtggggggtgtggggagggggggcagggagctaacgggcgaggcgaaggagga

SEQ ID NO: 235424 - DNA, 103 bp, Homo sapiens
  chr11:20229456-20229559
  hyper
cagggttttctggacgtcaggaagggaccgcggtggggtgctttagaagtggccggagcccgcacctgcatgcagctcgcgcagaaagcgcctggacgctccc

SEQ ID NO: 235425 - DNA, 169 bp, Homo sapiens
  chr11:20229879-20230048
  hyper
gaagggagtcattgcgaaggcagccaaagaccgaagcggcgccctgcaagttcttcccaagtcctcttgggaaaggcgagcctgagagggagaggcgcttttcaccaaaaggtgttttgcagagggcgggagggagctccccgcttccagctcccggagtggcctggag

SEQ ID NO: 235426 - DNA, 249 bp, Homo sapiens
  chr11:20230315-20230564
  hyper
attcccactccagacgccgcagttttgaggcgcaatggggcctttggcctgatcatactcaggaatccttttaggccctttggcctagaggccagagccggggtctgcagagacgcaggcactctctgtccccgcgagccccaccactgggttgctgcttttgagccggttgcttcgggccggcagcccttcttatttcagcacaaaaggtttgaggtgcattgctttctttggcgtaaagcccttgcg

SEQ ID NO: 235427 - DNA, 709 bp, Homo sapiens
  chr11:20385071-20385780
  hyper
gtctactagctggcgcctgggtgagctgagcccagcaggtgagggaaaacgcgggaagagggtcttgcagattccaaacttaggaagggtcgcggctccgcgcacgtgctctcggggtcaccttccccgcgcctgtgagggtgccaggagttcgtctccaggtcccgcccctgtgggcggggcgaggcagcgtcgccgcgaggccacccggaagaccaagccgggtaggcgctgtctccgtcgcctccaacccccccggtccgaccagggaaggtgggatgctctgatggccgggcctgcggcgctgagcgcggcggcggcggctgctctggcggccgccctgctcctgctgcgtcgtgaggacccggggccgggggctggccccaggtaacccctccgcgtatgggaccgagctgggccaggtctcctggccgggccggggataccgtggggtatgcccagtgatgccagcagcttgtggcacctgggcgcaccctccagctcgggccccttccgatgggtctgctggctcaggtgcgggcgatggccggggagccgcgccccgcacgtgactcagcactttccccagagcccggactgcggagaacaatatcctcctccctaacagataaacagcccttgttcctcgggataaggactggcagtcccctgacaccctaagaccggcatctgtcgatgttatttcccc

SEQ ID NO: 235428 - DNA, 68 bp, Homo sapiens
  chr11:20408919-20408987
  hyper
gacctcccactaacgcctgccgcaacccaaggaggagacaaaagtcatcttccgggctgcaacattaa

SEQ ID NO: 235429 - DNA, 1213 bp, Homo sapiens
  chr11:20618193-20619406
  hyper
agaccgaatggctgcgcggtgatggatgcggatttacggcctccttggctgcggcgcgctgggcctgattatcactataaacaggcgtccgcggagggcgggggcggaggcccgcgtctagaggacgtgcggctggtcttcttcttcttcttcttctttttttttgtttttgttttttaatactgcggttccatcctctgcgcttcgtaggcgctgacacacacccatacgcacgacctgctgccccagggcctggcttcctgcctccgcatgctctctcccgcccctgaagcccaaccttcaagccctgctgatgcccgcccctccgtcccagcgttggcctcatagcgaaccctcttaggcctctccgttccagaccctccctccattctccacgtagcccctcccttctagaatcttgcggctgaaagtgggggcaggcggggagcccgaatagcgcctcagccaaaccccgcagccgttcctgcgcgtcacccgcctctgcagagcctgacgcgcggcagtctccacgccggaacccaagtgctcactgggccggggagggccagcgggcgaaatatcaggcctgggggctgagcgggggcgctgggcgtcactcaggcccagggccgcagctgggggaagtgagaaggccggcaggattctgcccactctgcgcagttctcccttcctcccggggcagccaagtctgtgcgccctggaacgtccgggcgccgcgtagactctccattcgcacctggccctttgcgggggctgctcaaatgcaaattgggaaactggccagaaccttccaaagtcgtgactgtccctcggggaagtcggccggggaaccgcagagggaggcctacaccgatctttgggcccgcctcgtggtaccgctccggccgatcgctctctgagcccgagcctgcctgccaggcctgccttctacagttctcgcattcgtcttgagccctctcggaaactggggactgtttaggcagaaacactcgtaggtccccttggcgtcccccaagatgccaagagcctgcggggtgcttctcagcgccagccggaacttgagcaggcacccctgcggaattctcagtcccacccactcagacgaccctcctccagccagagtccaccacagcccaccctaccctcttaaccctcgttcccgacctctccctacgagcgggccccggggaga

SEQ ID NO: 235430 - DNA, 359 bp, Homo sapiens
  chr11:20619674-20620033
  hyper
ccaccaaaggcaatgcagaccgtgtgtccccagccagctgccctttagaggggctaggcgggaaagccaaccagcggaggcatccaaacactctcgggctctccagaggagcaggagggtgccccttagtgcccccggcgcccgccgcaatctgccactgcagcctacgcctgcggccgcggccgccgcggcattgtcctcccgccgcgtgggacggcccagccgctggcgacggcgcgcaccccgaggcagtgggctgggctgttggcagtagggaagggaaaacgtgctgtctgtggctcctcatccccgaggccaggggttccccgagctagaccggcaaggaaggagagaaggga

SEQ ID NO: 235431 - DNA, 326 bp, Homo sapiens
  chr11:20621327-20621653
  hyper
ggaaagggggcgacgaggagaacaattctcgcagccctaggtatttgtacttgtgagcgtcacctgaggtcgcaaagaggtttcctaggctgtagagctgagaggttggctgtggctcctaaagacccgatcccgggcactgtcctcggtgctgaaaagccagatgccggtacagaggcgagttgctctgggtcctagaggctactgagacaaatgctggctgaagccgaggtacctagatttgtgcaaatcgaggagttctattctgcgtgtttgtgaaagggggttagacgagaggagtgcggtggaggcgaagataataggat

SEQ ID NO: 235432 - DNA, 803 bp, Homo sapiens
  chr11:20622700-20623503
  hyper
taaactgccagccaacagcccggaggcggcggcggcgcagggccacccggatggcccatgcgctcccaggacgagcccggagcaggagcttcccgcggctgccgccccgccgccgccacgtgtgcccaggtccgcttccaccggcgcccaaactttccagtcagcggacgcgcgagcctgcgaggctgagcggccaggagtggggtcttgcaaactcagtagcccgcgggcgcaggcggcctctgcagctctgcgggacttgagagaggcgcaaggcgcgcaggcctcgccccctcccgggagctccgggcccggcaacgcgctgcactgtaagatcccttttctgcgaggcccggagggggatgcgaacgtgagtgtgggcaagggcaccctggagcggaacaatacccctgttgtgggctgggtgaacatgagccagagcaccgtggtgctggccacggatggaatcacgtccgtgctcccgggcagcgtggccaccgttgccacccaggtaagcaggttgcattacggcccgcacagtgtcctgctctccagctgcgcgagagaggccagccgggccgtggcgggtgcacgtatgctgatggggaaaccggttggcagtgccaggtgatggatgcgggaggcggctttggggcttcggaagctcgcactgcgctggggtcggcagttcagggcgcgagggctgcagtgaccctgccagaggggccacgacctgccccttcccagccttggcggtagcgggaatacaggtccagatccacgaaagagttgaggaagataga

SEQ ID NO: 235433 - DNA, 166 bp, Homo sapiens
  chr11:20631747-20631913
  hyper
ggggttgctgggccgcagagctctctgatgagatggcccatcattccctcgcgggtggacccgaaggctccgggcgctgggaagcatgctcctgccgcccggtggtgggaggggatattgcaggaggcttggggctgcggagcgagcgagcggggagcctgggaac

SEQ ID NO: 235434 - DNA, 89 bp, Homo sapiens
  chr11:20689751-20689840
  hyper
caagtgagaagggcacgttcttattagtgaagaggattctgaaacgttggaattggtttccaggaaacgagggacggctgttctgaggt

SEQ ID NO: 235435 - DNA, 132 bp, Homo sapiens
  chr11:20690394-20690526
  hyper
accacagctcgctccgcctcgaggaccccttttctgcacccccacctcagcgccctcttcctgcacccacaaagagagtactcagtcataggggttcaacaggagagaggagacagaaggtacaggcggtga

SEQ ID NO: 235436 - DNA, 139 bp, Homo sapiens
  chr11:20691726-20691865
  hyper
ggtagctgcgggagtcgcacccgcagagggagcgcttccggctggcgggcgcggccggggcccgggagggcgcggtgcggcgagggcagagagctgcgggagaaccctgggatcccgcgatctcctcctgtgccttcct

SEQ ID NO: 235437 - DNA, 51 bp, Homo sapiens
  chr11:20692077-20692128
  hyper
tctgcctccggagacgcagttgtgaggactctcagcgcatcttcttccttc

SEQ ID NO: 235438 - DNA, 292 bp, Homo sapiens
  chr11:20692590-20692882
  hyper
gactgagcaggcagcggctttcgtctggttaagaatgttgaatatggatttctcaagggacaaaagaaacctcccattccgttccttacctctatccgagcttcccaggctgcggagacgccaaggctcagtctagcttagaatagttgcttcttgagttcaggcccatccggatgggttagtcttttaaaaccaggacacgctgaaggagtgcgcgcaccccaggaagatcaggacaggcaagactagtgcagagcgtgggctactggctctgagcgcgagagtctggtgc

SEQ ID NO: 235439 - DNA, 1311 bp, Homo sapiens
  chr11:22214111-22215422
  hyper
gggagagggacttttccccacgagaccaaaagtaactcccaactgggagaggggttctctccgagtggcacgcatgagcggatcgatgaagacccggccaaccggctgagggagcatcgggaccccctttggggatcggaggaggaggattccgacaggagggaagcggcagccctggggaaccaggattcctggtcgtgggtggacccagtggaaaaggacgtgcgaagcctgtacagaatggagcaggccggccaacagggccggggggcggcgggtcccgaggagggacgggaggctgcatgtccggaggaggtgcgggaggcggcagagcagggacctggggacggcttgagcggagaggagggggccagcgtggagccagccgggccggggggcggggagatggcggtctccgagggtggggcgccggccggtcttgcggtctggaggcggggaaagaggcgtggaaacagggacgcagcgaaggggaaaggaaagctgccagagggcaggagtggaaaggatcctggcgagcaccgggaggagtggcggctgcgggatcagctgccgagcaggcacagggacaggtgcctggagaagtactgggagagcgcccaggagcgctaccggctgagggtggggaagcgcagggccaagcgcgcgaagcaggttgtgggggaccgggtcgagtggaagtacccgccggagaggaaggccggctggctgtggcgcccagagacggtggagtccgaggaggaggagaaggaggcctgcagaaggaagagcaggcccttagaagtccagcagcagcaactccggcggcccacagtcagattcagcacctgcctcagatctccacgtctgtctcagctgcccctctcctgctgcctctcaggcaccagtgccattaacgagctggcgaagatgggcgacccggatctcctggaagtgttggcggaggaaggtaggaccgcgccaagaggcgtcaagggagagccaggctggctgcctgcacccctccacccgcggcgcagaggccccgggggacgttggcggccctgcggcctgagtcctagggaggttcgctgcgtggcgtgctcagcgcgaaaccgggactgcggggcagagtcccccgcctggggtgagtggggttggtttcggcgccccacagatttctctgctgctcctgcgcgccagggacctgcgacctgtgacccctatggttccggaacaccctccttgctcccctgcaggcctgggaaccgccgagtaattcagggctgctaggctagcgctgcagtgcttggg

SEQ ID NO: 235440 - DNA, 176 bp, Homo sapiens
  chr11:22359319-22359495
  hyper
ttgtaccgagacccgcccagacgggcgctgtcagccgctgaaaaaaaaaatcttccccgaggctgcccaaatcagaactgtgtatcttttatttactcacgtcctcaaagagcagcaagccttctccatcttaatttgactctaccgcagagcagacttacgctggcgtgatggga

SEQ ID NO: 235441 - DNA, 734 bp, Homo sapiens
  chr11:22362585-22363319
  hyper
gggcccgcctgcagcggagcagctctctggtgctgtgttgcaggaggacaccgcggtagtcagggtaaagccctgctgggcgcgtgtaggagtgggaggcgcctactcaggtgcagaggaggcgctggtaacccctgccctcacaaaatgcagaccctgcagatcctgcaagaaagttaggcccaagcggcctgtgtatctcaatcagagcgcccaggggtggatcccgagatggggactcgctaccttaggcctaaaggtgttaaagttgaagagacgccgccgccgcggccaagggcacctgcagaatgtgagagagcctgggaggtcttgcagcttggtgtcaccccaccaccctaatccccgagggtggggggaggtcgacggccctcctcccaaccccgacgggtcctgaaaaatgggaatgggtcagcatcgggggtacctaagccgccaagtccttgactcgcccctgctctgccgcgcagggtgctggagaagaagcaagacaccggggagacaatcgagctgacggaggatgggaagcccctagaggtgcccgagaggaaggcgccgctgtgcgactgcacgtgcttcggcctgccccgccgctacattatcgccatcatgagcggcctgggcttctgcatctccttcggtatccgctgcaacctgggcgtggccattgtggacatggtcaacaacagcaccatccaccgcgggggcaaggtcat

SEQ ID NO: 235442 - DNA, 42 bp, Homo sapiens
  chr11:22364860-22364902
  hyper
catcactcagattccgggaggctacatcgcgtctcggctggc

SEQ ID NO: 235443 - DNA, 523 bp, Homo sapiens
  chr11:22365108-22365631
  hyper
ctctctgggaccagcgcacgcggcctccttccctctgctgtggctgaacttgcttttggcgaaataatcgacgtgctgtatggcctgacaggagctgagggcagaccgggagcaggcagagcagggacagtgcgcctgagtgcacaaaggggtgtagaacggcagatgctgcgctctctcctgcactccccgcaggctcccaggctccccgagggtctgacctcctggcaaggcgcctcgaagacctggccccgtcccccgcccagttggtgctctgggtatgaagtatttgtttctaggggggcaggcaccagcgatgcgatttcacctgttaatgagctgcgtaggggcgggcgttgggggagccctcagctgctttcagtggcctcctgccttgctgcggtgtccacaaccaaggtcctagcgccagttcccagaagcgccaccaacggcacctggagagacacccctaaagcataagacctaaggaccgatggggtggaggtgtcgaggggcacgcttg

SEQ ID NO: 235444 - DNA, 153 bp, Homo sapiens
  chr11:22646583-22646736
  hyper
ccggctgggagggcgcgacaaaaggcagcaaagacttccgaattccccagaagccagtggactagcacttggctcccctctccaggtgatttgtggatgccgggttccaactcttcttggggccgacgagacaaaggcggctgcaacagcgcc

SEQ ID NO: 235445 - DNA, 105 bp, Homo sapiens
  chr11:22647396-22647501
  hyper
cggcgactctctgcgtactgattggaacatccgcgaaatgatacgcctctctgcaatgctattggtcgaaatgcatgtcaatctcccagcgtctttatccgtgtt

SEQ ID NO: 235446 - DNA, 512 bp, Homo sapiens
  chr11:22688125-22688637
  hyper
tcaactgcatttgcgtccaccaaaaaaagtaagcattttacttccgctcggtctatgaggactgatgaaatgtaggaaatctgtttctggcagggagaaaaaatcgttttcccaaacagcactaaaaggagccatcagagaagtatgaagaggggtagtgcggctgtagctgctgccgctgccgccaggctggtggggtgcggggagcggctgctgcaggacctgtgcctggagggggccggccccgagaagctgcaggagcccagcccggagcccaagcgcctctgagagccgccagcagcccagctcgggacgcgggggtgagcacgactggctggcccagttctgcgccaacgccgccgcagcgtgcgcgcaccgcagccggggctcacgggagcccctgcctgtctactgcacccggggcggcgggggaggggagaggtcattaaaaaataacctcaggaacgaggcggggaagagtgaagagccgcggacagttggacaggctcttt

SEQ ID NO: 235447 - DNA, 133 bp, Homo sapiens; identical to SEQ ID NO: 202489
  chr11:22850852-22850985
  hyper

SEQ ID NO: 235448 - DNA, 707 bp, Homo sapiens
  chr11:24518213-24518920
  hyper
tctctccagagcgacgttcttccaaacacggtttaagcggcgagagacacctgcctaggaccctacgcgtctggaagtctctcccagtgaattgggtctcatctcctgccgagtacgcaagttcaattatcggcagattaggtttctactctccgtgccccgccccgcgccatcctggggagcagcgggaataaatgatccgcccctggccagtgctcacccgactgaccagagcgcagcccggtgaccgaagcgcacggggcgatcgcgaggcgccccctccctctccccgcgccgcctccagcgcgagtgacggcgcgccctccgggctccggagcggcggcgccgaacaatccccggcagggctcgcctcgccggtgacatcactcctgaagatactcctcgctcccagcgcctgccttccccaggcgtccgttcgtgtgcccgtctccgcctttccgcctcggaagagcgctcatcactggctggggacagagccgggcaccaaggagcgacaggatcccgaagagagagagagaaggcagcgagggaaggaggaccccggcaggcagcagcatgaaattcagcccagcgcactacctgctgcctctcctgcctgcgctggtcctcagcaccaggtgagtccaggagcgtgagtgacctgaggccaggggcgctgccggggcgaggttggtcctactgtgggt

SEQ ID NO: 235449 - DNA, 117 bp, Homo sapiens
  chr11:27384895-27385012
  hyper
gcttggcttcctccgccccggcctcccttagccagcccttcctcctcagtggcaggaaggtgcctgctgtttgcaagcttgtttagtacggtgtctccccacgccactggcggggtc

SEQ ID NO: 235450 - DNA, 284 bp, Homo sapiens
  chr11:27493263-27493547
  hyper
agcggaactcctgcccgctgagcgagggccctcatgagaagggaaggtcgcgtggacaggctgccaggggcaagcgtttttagattacttcctccttcttggccccagatgcacttgtgagttgggggtgtgcgcggtggggtgggagggtgcttgtgcccaaaaagtctgggaacgaaagctactgctggctcgaacccggactagcaaagtgcggaaagcccgtggcacaggagtgggtgccaggcagcccgcacgcaggtgaccggcggaccccctcccca

SEQ ID NO: 235451 - DNA, 762 bp, Homo sapiens; identical to SEQ ID NO: 202490
  chr11:27493756-27494518
  hyper

SEQ ID NO: 235452 - DNA, 221 bp, Homo sapiens
  chr11:27721074-27721295
  hyper
ggttcggcctgcccgagagtgtcgcagaccctttcagttcccagcggtaggaattccgcctcccaagttttccaagctacattggcttcggacttgtaagtccacttcagtctcaattcctggggagcaggtagccgtgtgcagctccggggaagggatgcgggctgaaggcgcaagcttccctcccactccccccgcaagtcggcgcggggaccacccac

SEQ ID NO: 235453 - DNA, 32 bp, Homo sapiens
  chr11:27722046-27722078
  hyper
tcgattggtcaaacggcgccgccccccccccc

SEQ ID NO: 235454 - DNA, 31 bp, Homo sapiens
  chr11:27722622-27722653
  hyper
cttaaacagagttcgcgcactgacctctcta

SEQ ID NO: 235455 - DNA, 112 bp, Homo sapiens
  chr11:27740064-27740176
  hyper
tcagaaatccccccgcccccaagctcagcccctcccgccacgctcccctgcccgcccctcccctcccctcccttcgcgtagatctgactgagaaaacgactggatctcggaa

SEQ ID NO: 235456 - DNA, 704 bp, Homo sapiens
  chr11:27740481-27741185
  hyper
ccaaaccctggggcgaaaactgccaccgggcttggctctgtggccggaacaaaaggcctgagaagggggtgggggtgagggttataggagtgtggagagcctggtggcccccgcccaggggcgcctaagtccctgagctccctgaagagtggcaagaggataacgcagccgcgcgttccggcagttcgctgtcccccgggggtgcaggcgggggcgggagaggtagaacacaggtctgggcggctccgcgccgcttctatctcacccgccaagcccctcacctccacccaccgccagtcccctgcccacccgggtggcggcggcggctcagcgactagccggccgccctccaccggcgcctccggacgcaacctcgccctggcagggcggtctgcgcgtccagctgattggtggctctgtccagccgccgcacggagctaaaagtgttcttctccaccgcctccagccgcccaggccccctcgcccggcccgctctctggctcttcggtccggaaaggaccttctactcccaggcggaggctcccctttccctgagttaccccgactgactcggacctgggctcagtgaggcatccggcccggctggggagcggagcgcggtctcggcagctccccttcccttgagaaagcgggaaccctctaagccagcgcccgaaactcgcggggagggaggacagaaggga

SEQ ID NO: 235457 - DNA, 772 bp, Homo sapiens
  chr11:27743203-27743975
  hyper
tagatttacgcaaacgccctcactccgagagacacgtttccttttgagttcttacgtgattctaatgaatgagcgaggttaccaatgattgcccaactgccctgctatgtagcaggtgtttcctagggctgccttctaaccgcccgttactgggtcctggcactgaaagttcccagagaaagtgaggagtttcagggtacccctgtaaaaaaaaaaactcagcctgcacaccgctcccttgcccactacgcaggtcacacctggggctccggcgaagctgaattcggctcgggagatttccctgtcgccaggtaagaaaaccttcgccttgtcaggctagggcgggaagaccgctggggaacttgttgcttatcagcgccggcagactaccgctttaataataataccagaaaagcgcagcagggagggggtggggggcggcaacggcgacgactaacctcgctgtttacgtgaccgactcactgtgactctctgggtaaaaaaaggaaacttcttagaaaagttcgtgcccctccccctcccccatcatgactaagggtctccagccgatgaggtcgtgagtgatgatcaaatggggactggggggaggggggcgagtaagtgacttgtccttgggaacatctgcatgcgtcgaagcgcgaaccagcccaacaactttcccttttcctcttaggtactgatgactaggcgagaggcaccaaggcgagccactagttgcccacaggaacctgtgtaagccgagctctcgagc

SEQ ID NO: 235458 - DNA, 113 bp, Homo sapiens
  chr11:27744661-27744774
  hyper
tggagatgtccgtcgctctgaggagcgctagtgccctgggaagtccccagacgcatttcaggtttcgtcgttttggcactgacaccatgattttactcgctctgagttcccac

SEQ ID NO: 235459 - DNA, 147 bp, Homo sapiens
  chr11:28129838-28129985
  hyper
ctctttgcttgctcgtcaccgtggcaacgcgcgcggccgtttccggaggcggtggccaaagtgggcggggctaggccggagctgctggtgggaggcagccacttgagatcaccaggcctcctgtagaccggcgggtgcagggcccgg

SEQ ID NO: 235460 - DNA, 195 bp, Homo sapiens
  chr11:30037682-30037877
  hyper
acgcaaatccaaacgttggaagaggcagcaattcagacccgttcaccggctgttcccaaaagaagggaaccggtgcggctgggaggaggcgaaacgatgctaaatcttaacccccctctcgttgggaaacgacatctttaatcgcgccctcgcctccagacctcggttcccgctccagcacgttaagcagggcgc

SEQ ID NO: 235461 - DNA, 53 bp, Homo sapiens
  chr11:30038272-30038325
  hyper
ctccaaatatccacggaacaagttctgttgcctggcccgaggggtgcacagag

SEQ ID NO: 235462 - DNA, 157 bp, Homo sapiens
  chr11:30038549-30038706
  hyper
acgcctcccctggccgcgaacgcgctctgggcgggggcggggccagggccgaaccgagggtgtggcgttcgcgacggtcgccaggggcgcctcccggcgcggcggggcgggtgcagtcacgacgccgcgactccccgcaccccggctgggccccccg

SEQ ID NO: 235463 - DNA, 126 bp, Homo sapiens
  chr11:30038920-30039046
  hyper
tctatatctcccctcgagccccgagccccgtcttcttttccccaccccatcccctcccaaagcgggtttgttgggttgggagccgggtgcatctccggcgaggccacgggcggggagccctcctgt

SEQ ID NO: 235464 - DNA, 156 bp, Homo sapiens
  chr11:30040140-30040296
  hyper
agcccacgtggcgacggggtctccctagacacctctcccagctcgcccgatggaccaagcaggcagtggcagcgctatgccccggactgctggagcaaatccgaccttgggctggttggttggcgccaggactgtcactgtcgtcctcggggcggc

SEQ ID NO: 235465 - DNA, 118 bp, Homo sapiens
  chr11:30344496-30344614
  hyper
gcacctcttgcctcgccttgaatcatttgccacttcacaccgccccgccccttccgtccccggaggcggccagcctcgtgtccgctctaggcttctcccggacgtctctttgtggtgg

SEQ ID NO: 235466 - DNA, 1063 bp, Homo sapiens
  chr11:30605932-30606995
  hyper
ctcgccctgcccttctaggctcacggctggctcttcccggctacaacttccccttccttcctgaaacaccagcgccttactcgctcagtcccccgttgccacctccgtcacctcctcggccgccgctcctgctggcactgctggcgctagcgctggcggccccgggctccgctggacgcctatcttttttctctccctcttccctagctctggattgattgatgaccaccggcggccaatggctctgacaccacgccatcctcggtcgggcatcacagccccacgtccccgacctcagcctcccgggcgcgttggcatccccgaacccacagcgctgagcccgagcccggggccgccgcctcctccctgctctacgcctgggcgctgccaggttccttccctggaacggcggagaaaggaagggagggagccagcgagcgttggaagggggtgtggaggccacgggatctccccctcttctgacatcttttttcacttaaacttttgtttgtcccacccccccgacctgtttgtgtttgtttgcagcatctcaaatcaattatacatttttcatgacccgcatttgcacttaatttggggtgtgtgtgtgagaggggggtggtgatgtactattataaatcaacttcactggggcatccttaatttattttcttgctgacggattccaaccggctcctgagcctctagaaaaatgcccccttcacctcctaggccgcaaaaccccggaattcaaaggctttacaaagataaccttgttatacgtaaatagcaaagaaactcctgcctctgtagagaagaaatccggcggcaacggttacttttcctcggtactcgtcccccgtcgcctagcctcgaccccagcttgggtcgccgggtcgctccgcaggctgcgagcgcggagacccaggcagcggcggagagtgaggttggggcgcggggacggggtgagaaagagccccgagcgagagcggcgcgcgcgggcggccccgggggcggccgcggggcgcagccggagcacaaagctgcgcggtgccttcccctc

SEQ ID NO: 235467 - DNA, 202 bp, Homo sapiens
  chr11:30608152-30608354
  hyper
tcatcatgagtgcgatctgcgtaaaaaatgataggggaaggaaggcgggctacggtgccccaggaaaagaagggagctttctcccaaatggtgttcttctgcaaagagaacacccagctccccgccacccaccgacctgccaggctctgtcaggagtcctggcaccgttccaggacgcagggctcaccgcaggggtaagggg

SEQ ID NO: 235468 - DNA, 233 bp, Homo sapiens
  chr11:31391279-31391512
  hyper
ttaccatagagaccgcgtcggggtgggcggagcgtcgcttctgagctgtgccacggccacatcagctcggccagaaacgcgaacacgtcggaacagtgacttccggcggaagaagaagccggtccggagttctggccgacagcaggcgaggagtgggtagcagcgcctatgtgaagttaggtaggtctgatgtcgtataaagcgcggagagggtgcccgccaatggctgggtg

SEQ ID NO: 235469 - DNA, 231 bp, Homo sapiens
  chr11:31531543-31531774
  hyper
ccagctcttaggtcggttcagagcggagatctgggctcagccgaggggaaacttagggaggggacctgtcggggaagccactttgaccccacatctctttctgacccctaaaccttcggaggaggagagaatagcctggtctgattgagatggaggggaatacgggttgtgtggagacttctgagcgctgttaactaaacatgttttagtgccctcgctctctatttcatt

SEQ ID NO: 235470 - DNA, 92 bp, Homo sapiens
  chr11:31818476-31818568
  hyper
gcacaagcgtctgtgctaatttactgccccaagtttccggggacttttcaaagcgtttttcaagggaagaaatgaagcgaccacccccaccc

SEQ ID NO: 235471 - DNA, 651 bp, Homo sapiens
  chr11:31818828-31819479
  hyper
ccgaagaaccccgccgatagcatgctctgctctcatttgcctctttgacattttcttaattttaaaacatggagattcacattcttatccatgttctgtctcacacaaacatacacacgggtttacacaggcagcacgcgatcgccgccaggccctgtgctgcctccagaactgacacttaagagagaaaagtcagcagggacagtagagctcaattttaaatctggaaaaaaaaaaaaaaaaaaaaaagatgggaagcggggattggaattccacagcaaaaagaaacctgtcgctgcaggatcccttctctaccccgcggggagagcggcacggagacagttcattactttagaagtggcaactgtttgcagccaggcggtgacctagcggctgctcttacataaaatgggtacatttccccccactttagtggatttgccttccactcttaaagcttttaacaaaataaaactagaagttggatctcgactcccccacccccacgataaacctaagtggtggacaattaagatatcttcttcaaaaggcgccccctcggagccgcgcaaagcaggggccttcagtgggtgccgttcaccttccagcctaatccgtgagaaagcgagtgaaagcgcctcccattatccc

SEQ ID NO: 235472 - DNA, 805 bp, Homo sapiens
  chr11:31819804-31820609
  hyper
aaccaccaaatcgccggagaattggggctggatagagttgtctcttgttgttgtcagcccacgtcgtcgcgattttattcaccgccgcatggcgttgatcagatggaaaccatatttgtctccctctgagacctaacccccgccttatgcttttggagtatggactctttaaaacccaagaaaggcttcctgggctgggaaagggggctagggagggagggggaccctcttagcaccaaaaagtctgaggattccccgggaacgtgaagcgaagctcaccaccggtgcccgctacccccacgccggcaactctgtgcttcgtttggcccacgtgtcctccccacgcaactaggggcgacggtcctgtgcctgaggtgacaatcaccccccaaaaacctcacttgcgggtgggggggtggtgattgccagttgacccagaattttctagcaactaggcgcgttaaagtgaaaagcccctggactagctccacctccggccccaaccatcacaggcggaccctagctgatttgactctcacttcccgccctcagactgccggcgacgaaaatccgcccgaatcgggcgccacctctggtggaagctgctgtcctcggcttctgcccaactccaagaagcggaaggggggtgtatcctgcgccccaagctcatgggagcccacgcaccggggagagcccggagtggaggctctgggctcagccctcccaggcctaggccaccgtgccctgagtccctccccaagacttctcggactaagtgggccagactcttgtcaggggagggatc

SEQ ID NO: 235473 - DNA, 138 bp, Homo sapiens
  chr11:31820969-31821107
  hyper
ctcttaaaactgacatgtctaattggcaattggtgccgaatcgtgtccagaggtctcttgtggaacatttctacagctgtctccttcaactagacgcttattcatgtcgccttaatgagaaacaaaacgttctctaat

SEQ ID NO: 235474 - DNA, 481 bp, Homo sapiens
  chr11:31821527-31822008
  hyper
cctccagcccttctcacagaacctggggtgtttcaggtcccatctctcctcccagaccagagcggctcccggcatcccgccgtcctgctcacagtatcttcacctcaccacttccacatagtcgccacccacagagagtgagaaagtgggacccagaggggcgaacgggggaggggcaaggatagtggggtggttttagttgggagaccaccacttccaatgccccatccccgactcgccctgcatctccctgctcaccttttcatgtgcaccctactcatagtcacataatttgtcaattacagcaaaaagcaacaggatacaattatgttaacctcgcagtctgtcagtgcgttatcttgtcacacttctacaagggggctctccctgcattctaatgtcaaatttgaatagtgcaccacgcagctcgttcttatgcacacagtgctgcccacaaacacacacacgcacccaccagcca

SEQ ID NO: 235475 - DNA, 79 bp, Homo sapiens
  chr11:31822246-31822325
  hyper
ggttgccctggcaccgaagtccccggataccaaccagggcgggtgccccagcttccggtctgcccgttcaacatcctta

SEQ ID NO: 235476 - DNA, 170 bp, Homo sapiens
  chr11:31823126-31823296
  hyper
ggtacagaccccctcggacagtaatctgtctcggatttcccaagcaaagatggacgggcactcccgcttatactgggctattttgcttacaacttctggagtcgctactctcggtttactaccaccgattgccctgggtctgatggagccagtctcgtaatacctgccca

SEQ ID NO: 235477 - DNA, 191 bp, Homo sapiens
  chr11:31824182-31824373
  hyper
aaatgaagagagggcgttgagagtggagggccgcgggggcggcgagtggggcggcgccgggaggatcacctgcagaattcgggaaatgtcgcacggccgggccccgctgtgagctagctctacaatcttctgccgggtggagtccggcagtggccgcccgttgacaaagacaccaccgagctgattcactc

SEQ ID NO: 235478 - DNA, 328 bp, Homo sapiens
  chr11:31824959-31825287
  hyper
gtgctcccttagacgctaaaatccagaaatgtttccatcaccgtccaaactggccaaggcctggcacaagcatcgagttgggttttgtttggttagaatagaagaaggaagaggagagaacaaccagagcagccagtatgtggctggtgaaccccagtccaggtttccgcacctccagtgcagacgtgagagtcagagcccgggctcggcttcagccacagacaagtccggccaccgcaagtaaggcttagagccgggagtcggttcgcaccagccactgctcgctttatttccgccgctgaactccgccctccccttagccaaggat

SEQ ID NO: 235479 - DNA, 1539 bp, Homo sapiens
  chr11:31825691-31827230
  hyper
ttaaaataaaactagctgcacgtcaagtttgagcttaatttctggaaataggcggaagtcgctccggatcatgcatggaaggctaattgaaaagatcagtcggggcgcttgtggcagccttgtcactttgtgacagtgctccgctccgggaaattgcatcgtcacgacaaacgggaccgtgataaaacgaccctttccgtccttatttgtagatcactcagacgagattgaactgcacttgtttccccttcgaggggagccgcgttttcagggtagccgaaggcttggggctgagggggggccctcaccaaggcgcgggtgggggccggagcctcaactcgatgagaagtgacaggcgtttgggggatctgggctccggccgggaccagcgcaagcagggactttgcggggacaccgcttctccaacagagcaaggcctggcccacgtttccggtttctcctaacttccttttattgccttcctttgcttcgcaagttccatctacccctccagctacagagccccacctctaggcacaggaagcttcccggaaaaagaaaggctgtcccagaaagagaccgagagagactttccaaacttcgggcatagccacggcaattcccagtctgctaatgccaaggcgggcgcgtaaggccgcctaaatctagacctccctcctcactcatttcaaaaaataacaacgtgccagccacctccgcagataccgccggctggtgcttgcccaggagacgccagggccagagcgccactcccagcatcgaaatggcagagagaaagcgcagctccaaattccccttcagaggttaagcctcaatcattgtgtcccttccctagggactgctggcgctctcgcccactggcgatgattatgcgcctagaactcgaccgcgaagcaactaataggaaaacatatggtgtcaatttggatgctccgcgcctcgcgcacacccgggaacgagcggcacaaagccctgccggccggcccgcgaccccgcgcccctcggggcctgccagccgggccgcagcgacaaacgctcagggctgcgcgccctggctggggcccgcccgagagacagcctgcggctggggagtctgagctccaaggggagagcccagccgccgaaggcgagcctaccggccaagccctggggtccggcaggttctgcacaactactcccgcaaagctcgccacctttgtgccctttcctcagctacgcgcttaccagccccggaagcaccagggggcgaccggcgtttccaaaacagatggataaggtgctggggaccctccttaagcctgtgtggttcggccagggcaggctgctggaagacccgggcctttccacactttgagttcagttgagccccgacgccgtgtgcctcaaccgtaacctcaaaccgggcctggtttcgctgggcctccaggctcccaggtcggagctctagactagccctgccgcgtaccagcacccaccacgaacaggaaggtgggtgggaccccacggggtctgggcaga

SEQ ID NO: 235480 - DNA, 497 bp, Homo sapiens
  chr11:31827557-31828054
  hyper
aggggcctccttctcgctcaactaggagaagacttcgccccgccctgatcagcccagcccctctctccggggtcagagcccgggcaggggcgagagggggtgtgagttacaggatttgggggggatggggtttctctaccgcagcttcgaaaactcgggcgggctgttcttaagggcccagcccctgcttctccagtatcgagaagagccaagcaaacgccctcccctcccgggctgccgggcgcggagcggggagcagccgccgcaggtccccgggcctcagtcggtcggcggccgggccagcgcgggcgtcgcgagtccctgtgtcctcccctgaccctcgggtccgcgcaccccgagcccgaagtcccagaaagaccagaggcacttactgttctgcatgctggctctggctgggggccgcgggattccacggggctcgaatatggggctctgttagcaagaaaataggagttaatcctcgggcagctgcatca

SEQ ID NO: 235481 - DNA, 227 bp, Homo sapiens
  chr11:31829161-31829388
  hyper
gtgacacaccctgtctacctcgcctcactgctttaaaaagtacgaacaggagggggtgagcgtggtcgacaaagccgacagacggcaaacaatggcttctattctccagctttcctcgaacccaaggagcaaaaccgagtctccctaaccagcaacacagcttccaaccaaatgtaccaacaacccaccaactcacaaagggaacagagggacgcttctagcttcat

SEQ ID NO: 235482 - DNA, 844 bp, Homo sapiens
  chr11:31831437-31832281
  hyper
aaggaaaaatacccaccaagcgcagggggccggagaacagggaagagccccagcctccgcaaggcaagggagatgagagtcgggggaagcctggggagcagagagttttcaagttccgagctcagcgctccagtggagttgggggcaagagcccgggggctgggtggaagctgacagtcctcccgctcggctctgagctccctcggagcgcgcgttccaccgccttggcctggtggcttccttcccggctcgcgctagctcgctcttccctctacctccagcgtgcggctgccttgccgactgactccactcgggctggtggcgggcgcggtgcccccctcggcgctcgagtgccggctgactcttctgcgccggagcccagtgcggcacaaagcccgagggccggcgggcgggcggagacgcggcgagcaggttccctcggcgctccctcggcgagtcctcggagcgcccgctctctgcgcgttcgctgggcctcgggctggacaaagcagccggcagcggttgctctctgcggccgttccagggccttgggcaccacagagcctcttcgtcttttcccgcgggtcgggagcattgggcgacgctggggctaggagccgcggctgctgtcgcgcctggagtctcccttcttcccgcgagctcagcccgcgctggcgctggcgctggcgctggggctgagctggccgcccgccccgagccctgcgccgctcccgctcgccggcagtcgccctccgacgcgggctttcgctggaagtagaaagtttgggctcctgcgtggaaacttctccggcccaactctcccggcgtagcagtgggggagggg

SEQ ID NO: 235483 - DNA, 940 bp, Homo sapiens
  chr11:31832705-31833645
  hyper
ccggcgcccggcctcgcctccaccgctcctcactggcccattagcgaagcctgacctctgtcatcatcctccagcaaaacacttcctcctgcgcctgaaccagagcgggaaatgaggccgagccacggttcccttttcaaacccactaatcactccgcaacatgcaaatgcaccgctcgctctcacacaaaatattgctttatgcaaagcagcgccggggcctcgcgccagccgattggatgctccctctccccgcctggtgcaattggtccgtttgtttgaatatgaatacacttgttttcggctccgccggtgggtcccggctcctctccccggcgcagggcccccgagcccgggctctggcgctcgcctgcatctccccgctccgcgcacgccgagattcggcgcggcccgccctgctgccgcgaacttgagcggtcaagtgaaggtttctgggttgggggtcgcgcccccactccccctaagctggactcgggactcccagtcctcggagggtgcaagtttctgtgctgtcctttcttgccaactccaggacagcgtggcctgccgccccgcccccgcccgcccccaccccatcccagccggggccccaagacacagagcacagcggcggccgcaccccagcccacctggccccttggaagaagaggaaaggggcgggagcgtcactgggtcctggcagctccattccagctgcggaggccgcggcgaagcctaggccgagaggaggttgccgggccgagaactaaacgaggccagaggcctccccagcccaagcctccagggcctgtccaaatcctccaccccgctctccccgccctttcttctctcctttctcctttcggaagccgcggtgcgcagcggagcagaggcacagctctggctggagaggcccgagtaaacacgccacttactttgt

SEQ ID NO: 235484 - DNA, 1168 bp, Homo sapiens
  chr11:31833906-31835074
  hyper
tatgtcagcgtgtgtcgtgtgtgccaccggtcatctgtgtgtggtgcgtgtgtctccgcaccacgactccctctcctgggtctgctcagtccacggaggcagctccccttcagctgttgccagaaaaccggggaggaaagtaagtaaatggcttttctcttctgaccacacaccagaagtccatttgttgaatgccgcacgattaggacacacctcagtacactccaaaggcgcccctcggagcctgcagttaaggtgacaggagagcgagcggctgcctggtcctgcgctgtcccgagctctctcggcggcttcgggccacggagccgggaaggagaaggaaggcctgggctgctgtacacaccccaggacagggcgagggggaatagggctgaagagctgaggcagggaggctgaaatgaagcagccgaagggtacgctagactcttcttgacttagggaaagtgctgaaagtcagagctcatcaataaaatctgcgcgacctgaactcgctgctgactggccgcgtcgccgcagcccctggcagccgggacagtgaggacgctgcaagccgccctgggccgccgggccacatgtgggcctcaccctctcgttcctgcctgggacccagcagccctgcgaccaaggagcccgggcagggctcccgggaagcaaaggcctccccggccctagccagaggtggggtcgcataaccctctcccctccccgggctggggagggctgccggctctaacccttccccgggagctcgcagcgccgggaggaaacctgggtcagaggtgaaggaggtggcgccgggtgtccaggtccgcggcctcctgggcgaggtttcatttcgcaggagcgcgactttcggaggatgccggcaagtggggccgcggccctgagtcccagaccagcgaaagtcggctttctctttctctctccttttactttccaagcgagcattaaagaagcttggactcaagactcaagtccgctgtgcatgagcgagggacttgcgggggggcgggggggggggaagtgattctgtccgaactggaggcgagtatcatttttacaacctctcaattagcgaccgagtggattagcaccttcttaagctttgcctcggaaagaagcagccgtaatcttgttgctatttccc

SEQ ID NO: 235485 - DNA, 1231 bp, Homo sapiens
  chr11:31835307-31836538
  hyper
gttcaaccccagaatgaggccgagttttcaaagtttaaggagagaggggtgagagtgagatttcctcgttctctctggactggtctcaaggaaggtgggggtgctgttctacctcgtggggagcctcactccctctgccaagtaccggctctgggggcgaagcggcctaggggtgtgggggccgagactgaggtgcgggcgcggttgccagaggtgtgtacaaaaccgagacaactcgcaggtcgccattttaattgcggctaccaacacgcccgaggcccacttgctgccctccaagacgcgggggggcggcggggattgcgctttaggttctgtctcctttccccgcctccccacaggcccctgttcccccctaccctccgccccctgtggccagagggaggacctctcaggccggcgggtgcgttcccgcgggggccgccggggtcgtcccacccggtagcggggctgtctgcgtggagggagtcccgctgggggaccgtggctcgccagagcctgcccagagcttctagccagtattgatgcgtcaacatgaggtgaggcaagcatctcacccgcaccgatccctggcattcccctgtgcccaccccatcaggccttcggggaggcaaagaagtgcccacttctggggggaagtgcctccagctcccagcttcagaaccaagagcctcccatccggagttctgacagttctgacacctccaaactctctctttccccggtcaagcagaggcgcagcgccggcgcgctggaaagggtgaagactggcattttttggagaaggaaagtcttggcagacacctgcgtcactttgtagtgccccaaacgtctctctttttgcagaccctgggaaggtgggatcccttgtccgcggagctggcaaacgggtccagtgagccctaaaggcaaaggctcccatcccggccgcccagtccctggtgcctcccccacttccaggcctttgtccctctcctttctccagcaacctgccggttcccgctaacccggcagcctcgccgagcccagagcctagaaaagccaagaagatcccagagccgccccgtggcaccttcaggctgtggccactgctcggcttggggggaagccgcggtgccctcgcccttcctcgcctcctgccaaatggccagtgctaggggctccctgggttcagtcctcagtcctcttccgttcgctctgggaggccagcctg

SEQ ID NO: 235486 - DNA, 90 bp, Homo sapiens
  chr11:31836598-31836688
  hyper
gcccacccccaaaatacctttaaaataacattgtccagtggagtctcccagcaaagggattcctagcagcccagcgggtcagactcccaa

SEQ ID NO: 235487 - DNA, 2975 bp, Homo sapiens
  chr11:31837090-31840065
  hyper
gtcatggctggctcgctcaagcatccagggaaccgaagctaagcgcatcctgacgggcttttaaaatgacattgattaggacaagctgttcccaaccccagtaagagttaatctgcctgttaatcaaggcactaaggggctcaatgcgagttttattagcgacaggagaacagaggcggcagccagggatcaaaagccgggatcccatatatttgtcagcgctatctccaaaaaaaaaaaaaaaagtattttcaatttgaaaacaattcggcgcttttcgtcacttcctaacccagtctcacagagggtgacttccaaacctggctagcggggaaaaccgctgcccgggggacagaggggctgacaggaactgcgggttggctcagccgaatgcggccggggagaatttaagaattctcagcccgcgcggcccgatgcctctgattcctcacgagaggaaagggaatgaaaaatgaagcaacaaatgacaccacccaggctggcagccctcgttcccggccagaccccgctcctcaggcccggctctggcgccgggtggcgtccagcccctgcacgcgcggcgcggcccgcgggaaagtttgtgcagcgagagtgactgtccttccgcctcgcgcgcgctgcccccttctgccccggaggggcgttgggttcccttcggttttcctttccaattctaaaataaataaataaactccgggccctggggaaatctgaatagtaattccagtcatccaaattctatgagagggtctgaggaaaaaaagacaagcctatcacgggcgccctccgatcacgaagggcacgggcatgagaaggcgacagaggaggtcctcggctcgccctgggcgcggagcgaggactctggtcagaggtaattatgtcaccgcgttttctcgccgtgacagccgaataaacacgatctccaataaacatctctaatgagggaggaggcccgaggatggctgggtttgatttatgactggaggagaaggtccacttcccactgcgaagcaggcgacctgctcgccgcccagctccagggagaggaacccgcggaggagaggatcccggcccaggtaaggcgtgcggccggactgccactgcgctcgtcccccgtttccaggtgaggtgagcagggggcgccaccgctcggagtcgggcggaggtcccaacacctgtcacaggtgactgagctccgaaggtgctcccagaagacctagaaagggggcgcaggagcgcgagtgggagtgggggttgggggctagccggggcctggcccagaggccgccccaaactcccgggcggggttcttgggtgccccgcctaagccggcctgggcgtctccagctgcttttagggccgggctcccaggactttcgcccggctgaaccacaagttagtctaagtttgggtcgtcccttccctgactcactaaggggacacttccgggccccggctctggccctccaagggccgcagggtggtgggcgcttctctttcccgggcttggcggcccggctcccatggcgcccgcgcgcttcccgccgaggcagccagcgcagcgcccgcagtaaccggagcccgcgttctagctcagtgagaatcgctaattattaggtcttccgaagtgaagctcaaatcacacgctgggagctttacgcgctgcccagctctgtcggccgcattctttcgtactccgcgtctttctgagaaacgaaccccatctctagactttgttgcggtccagccatctgcactttgcaaccgcgggaaacttctgctgcacctcgcccgacccgcggcagggtgtctttaagcgctccaggcgcgggtacggactttcccaagcgtggatgtcgtgaactgcgatgcagaggaggtctggatgcaaagtgcgtccccacctcctgcatttttcgcggtcgcgagtggctttagcagacagcagcagcagactcccgccccctactcccagctcagggccggactggaagtccactcttaggagtggaacattttgctacttttgcagaagagcacactcggcaaagacaagtccctcctccaccccccttcctatccctccctcagtaactcgcttccatctttgtatgcctccttttaaaagcaaaaatcaagccccggggccacttggggcgggctttgatttggggacagcagtcgctggcagcggagaggccccgcgggccccgagccgggccggggccggagcccgggcggttacctgggagcggagggcggggaggcaggtgagcctggcagcgccggttcccacacttctcaccgccgctcggcaggggaagtggcagatctgacagccgcgttctacgcgaggacctgccccagagtttaaatgtcaatgataagaaaagagggtgctcaggcaggcgctaactttccttaatatccacgccagcgccgtcctcattggctgcccggcccgcgtgacgtcatggcggctagagttgggcacagctctgcgccgactagttttccggccgggcgggagcctgcttctccccacccagggtccggccggctccaacccctgctttggccttccttggcccggcctgtgactgctctagcccggcccggtccagcctgggccgccgtcctgtatggcgtagagtcgatccccaggaaactagtcttgccgagtgcgctcctccgcaccttcgggcactagggccccaagatctctgcccttaggctggccagctacctctctgggtaatcaccctgtcccctcctccgatccccaagggagtcccttcatcggagagacccgaaggccgcgccgggatggagaggcgcttttggcaggaatcatttttaggaggagttcgaggctcgatgagtaccctcaacctggccctcgagcccgcaagtcactagctgggcacagacgggggctccgggaagaggacatg

SEQ ID NO: 235488 - DNA, 505 bp, Homo sapiens
  chr11:31840424-31840929
  hyper
ctcgttgtcattcccgtccctcatccctcaaaacaggaagcttctcaactccttcccctatgcttccatctggctctccaatttgaaagtgacagtggtggggcccggaggggcaggggtcacttgaggagtttgcgggagaggaaggggcggggcgtggaatttcctttaggcagctcgtggagacccagcctgggtggacccgggagtgtgtgtgtagaagcagggagggggacgcctgggccggagagggtcctagggccagtccctgcgcgccttgatccgggcggcggctaagggagagccgagcacagatggcgccgaggcggaggtctagtgattcccgctcccgcccctggcacacctggacaggtgccgggcctcgcaaccggccaggaggcagctccaggcagcccgtctgcccactcctcttagcccggacagctcctagctggacttgattttttgtcttgctcagcccgtcgaggactggagggcagagtag

SEQ ID NO: 235489 - DNA, 1042 bp, Homo sapiens
  chr11:31841338-31842380
  hyper
ctgcggataggcctcggacctgtgtaggccttcctagctggccagtttctgtccgggtctcgctccccacactgtaccaaccctaggccgccgagagggctgttatgggcttgtttggagtccaggccattaagtgtgcgcaaatccctgcaacccagcagggtgctcgagagcgactctggaaacgccacggcccccgcctgcttatctgcctgtcaataaagggcgcgttcgggctgcgcgggagcgccggtggtgcaggcgaggcccgaactaggcccttccgagctccgggccaacgcacgagccgctctccatttgtcccgggcaaggaggctgggagggagggagccggctctggggtcgccgagggagaaggtgcgggtttagccgctgcctcagctggattcttggagaagcgctcgacctcggagcactctggagaccctaccagaaatctagtgctgggggctcctctccgcgcctgccaccagccttggaggaagctgggcagggccccgtgtggtgcccagcctacgaggtcccacctcgcctctccctggcagaggcatcctctctaggccacactggctcgcattgcgggaagaagggcaccgcgggcggcccgggggcatcatcgacgactcgtagagccccaaatgccgagtgctacctgaggcaggctgtagctggggtgaaaaggaccggaagcgggaaagaaacctcttttctttcaggcctcccttcagcccggggtagcacagactgcaaatttccgacacctagggcagctccaggctctgattctccaccgcacagtgagcgagctcggcagccgcccagtctgcgtaggctcccaggccagccccggccccagagcttccccatcagccagcagaggctgggtggagagcctggatgggcgtgagaggccttgaagtaggggaagtagtggagagagagaaagatagagaaatcggctcttggcttgaactgttgttcttgtcgaaggtatgttttcccctcccggcctctgtcgctt

SEQ ID NO: 235490 - DNA, 184 bp, Homo sapiens
  chr11:31845171-31845355
  hyper
ggtccttgcggggccggggagctagaggccgcaggaagctgggagggccctttccaggcaggcagggcagcctcctggcgcggcccaaggcgcgaggcagccgctggctagggaggtccagtctcctgcaggccagggagggcttcctctgggtgcagccgtctccctccgctcctcagcttgg

SEQ ID NO: 235491 - DNA, 652 bp, Homo sapiens
  chr11:31846201-31846853
  hyper
ggttgttcaggccccgggcctgcacagctatgagaagtggggtgcagggtgctatttgcccagcaaaagctcatttcctcccaaatgagtataatgaaaacccgagaggcgatattagtgtaaagatcgggattagtccaaataggagccgcggacttgggcttcaaaggcgacccctactctttttgcccagtctgggggcggagggcgctcgaagggatacttcaaggacaccacatccaacttgtcgcagccccacgttcaggcacaggagggagcgaacattgggcagagggtaatttcaacaaaggacggcaggctccggggatcccggcttttccctgagttctctgggttggaaggagagggtccgggctctgtcggaggagtgggtacagcccagcacatgcttttctgacgcgcagcgctggcctggggagtgggtgcagctgctgcagccagcccccaccccgccccaggctgggaaggacgcagagtataatacgacggcccccttccccaaggggacactagatccagagctccaggcatatttgttgttcaaagttaattatacctgaaagcaaccaaaatgcgcacgccaggcccacggaggccgattgccgaccagcgtagccggcccgcagcgcca

SEQ ID NO: 235492 - DNA, 833 bp, Homo sapiens
  chr11:31847145-31847978
  hyper
ctagcgccagccgccggggcaacgtggcgctaatgcagaaatcttggctcctgcctgcattattcatttcggggacgtggggatgggataggagtggagagtgggtttcttcccctcccccgaacttattctgaaaatcccggggaccaatggacaccgaggaaccgaaagccgagagaatagctgtcaaggggccactttgaccgacggggctgcggtcgacggcgctccccggctgtctttttgtcccaggggttcccaggcccgcagggctaggatcccccagctcccaccctagtcagtcccagtcagggaggacctaggccagggcctcctcccaaggctgtcatctggcggggcaaacgctcttctctcattccttcgtctcccttccagccctcgcatcctttccttctttctgcttcagagctctcaggctcgcgtgcagggcgggatgggcccggatcgggggccccttcgcagatttgaaagttgcctcggccttgatcttctcccagcctccctgctggggactcacccccacatcccgctaccccccggggaaaagcgaagaaagccagagtctctttgcacggcggggacgctggcgctcacctctgggcgcggcctcggtggagcctcagggccagggcggggtgtggcggggtgtggcccggtggggtgagggagggacccggggtgcaagccaggccaaggcctcctcagtgcgcaggcgccgttcgggcccgccgccccctcccaaggcgtggggtcccggggacagaccccgagcccctctctgcgcaactaccgcctctaaaaaaaagaccatc

SEQ ID NO: 235493 - DNA, 810 bp, Homo sapiens
  chr11:31848467-31849277
  hyper
aggggcttttctgtctagaacgcaggcggcgggagttgcaccgccacagcccgggagaccaaagagtctccactccccgctcccggcgcctcctcgccgaccggagccccgagcccagtgagcccagccggtcccacgtcgagaggcgctgggttgggagaagttctgctggtcgtgggctcggcccccaggcgccaggccgagtgcccacctcggcttctttagggggcctacagcgggcagccgagcggctggcggacccggagcttgggaggcgaccgccaggctggtgcccggcctgacccggcgttcgcggccgcccgctcgcccgccgcgggccgggagcgtacaggagtgtgacgcagattgtgaaaacagaagggagggagttgggtcatttccttcgctaatcatcgccccctcctgctcctcctccccacccccatcccatcctcgccgccacccagcctcgaactctcttccttgccagagtctgcctcactttgagccagtggctgcactttatggagaaaatatatgtgcccatcactcacccatctatttgcagcgtccatggagcgcctcggggaacacgcatggacaattaaacacacccacttacggcgggatgatgaggctttctgttaaccacatgtgttcagaaatggatacagccctaattttgacacggaatgcagctaatgcaccttgctatagatgtacgtccgttggaaaagtgtgtgatgggcacctgatctacaccaagagaacagggctgtctgcagaagacccagcggcctgacacctttt

SEQ ID NO: 235494 - DNA, 41 bp, Homo sapiens
  chr11:32009160-32009201
  hyper
tccgctgtaaggccctcccgccgcctcggggccagtctggg

SEQ ID NO: 235495 - DNA, 587 bp, Homo sapiens
  chr11:32354826-32355413
  hyper
tcttggggatccttcgccccccacccccacccccggccgtatttctccctaggctcttattaaaaccaggtgcacggaaggcggcccattctggacagaaaagctttcgtttgacccaaagctcccccttccggcgtgttttctagagggaattcgtgagctgagccgaggagcgagcaggcggcttctcctgaccggggagacgcgggaggtttgcaaacagaccttggcctgggctgcgcagggacaaagtgttcaagggcagcaggggaggctgagggagtacacggctgggaacaagggacactgccgcccccagccacgcaggagcggtgtctgcaccactgaaagtcccccggggcccacagctctatccaggcggaagggaagcagccaggccgccgcggatctgaacttgaatcccgggtggaccggacgccccggccggcgctcctgacgcgcggaggagctggcgagaacctgcagatctcagggctcgcccgcggtccggcgctcggttcaggacgtccgggaaccccgcagcgcttaccctctgcagcaggcgtcgctggcgcctccaagggcag

SEQ ID NO: 235496 - DNA, 660 bp, Homo sapiens
  chr11:32448534-32449194
  hyper
cttgacgtcagccccgggtccccgcgcggaggggagggaggatggggatgggtttgggggcagccggtgtcaggatccccgagcaccagggaggagggggctatgaggtcatgcgcgcccaatcccgggccgcacaggcctcgcgctgctgctccccggcccccgccccaacttccagccccgtgcgggctggtgtgcgccgcagttactaggcaaccctatcgcagacgcgggcggccggccaagttcacccaaagttgaagaaaaaatttgggggagagaaggtggagcgagaggcgagaagaggaagcacggagcggggaaaagcttggaagggaatgaagctggccttgggcctcccgctcacaggaagaaggtcccacgcgggccagagcagcctccccgcagggccctgttgcgacccgatctccgtcctgcaccccggccgggggcccaccccagagcgtagcaggggcgctgggaacgacgtccacaaagcgctgccacgggtcgaaaccctggagggttgaggtggggagaaggctgtggccaaggctgtggccgaaggtacgcgccttcgaggtagtctggccggtgtggccattggatgggtttgaggtctcagaaccgagtgggagtggactccgtgtttaatattta

SEQ ID NO: 235497 - DNA, 913 bp, Homo sapiens
  chr11:32454999-32455912
  hyper
cagagcccttctcccgagccttgggcgaaggtacctcctgcaaaagatacactctgcttcccacgcattccaaaaacatcccggtccctaggccctcgagtaattttgctccaggaaaagcatccgccattgtattagtaaagcgtttactaaattaccgaatcaaaccgaactggcttaggttctcaatagcgtggaaatccactgaaaataaatgaagagggcaaactacaggggctccgcaggttcgggtccgcgccgcccaggcgaaagagaggtgggcgggcatcggcgcgggatgagaaaccaacctgatacttatcgtgtgccgagttccctccttgtatcctgactaagcacagcgaataaccctgtccttgttctaaccccaggtcttgaagaaatactgtcccagctgagccccgcgtttacaagatgaagaggcgccccagatgcgctgaaagaaaggccaaagctcgtgcctccttccactgcctgcggtagaacctggtcccgcatagcttggactcggataagtcaagttctcttccatccccagaacctgcgtggccgccgcctgagcgaagcccagtgaagatccacttctgtattaccatacgcgggagctatccacggacacgacgctgttccagaaagccatttagttactggaggtgcatgtgctcattctagttctctacgatacttaatgtgcacctaagtgtgtgccaacaccgtattataagggctggaggtgctcctggacattttagcgctgcggaggcagcacagcacaggcgctcacccccgcgctggtcccactccgaatccagagtccagacgtctgaaaagcgctacgcttggtgacaatttggcgtttccttaattaacaaaactctccccaaggcagagc

SEQ ID NO: 235498 - DNA, 158 bp, Homo sapiens
  chr11:32456092-32456250
  hyper
ctccccagccgccgcttccgctatcctcacggcccttgggaagcagctgggtaagagctgcggtcaaaaggggtaggagaggggggtgtcctagagcggagagtccctggcgccactgccccgcgcgtagggggcgctccccggcctacttaccctga

SEQ ID NO: 235499 - DNA, 451 bp, Homo sapiens
  chr11:32456970-32457421
  hyper
gtgggtgaatgagtaggtgggagggagggcgggaagtgggggagcggacaggcggtcgggttgcggagagcccccgggtgtgggcgctgccttgaactccttaccccagctgcctggctgccctcagcttcccaaagctcaaataagaggggccggcggcgcggggaagaggaggagccaggaggctcggccgctccattcactcagcagcccaagcccggccaggcagcgcgcgctgctccttgggggcgccctcgcagctggggtgagggcgggtccgagggagcgtccctctcggagacaccctcctcttcaacccaacacgcgctctcagctggccggtgtggcacaaccctccccccacctccccttcttggccttcgccagtgtgggagcctcgtctcactggagagtccgttcaggtaagcagtgagtccgggcagggtcgaat

SEQ ID NO: 235500 - DNA, 467 bp, Homo sapiens
  chr11:32457708-32458175
  hyper
caccagttataagccgggcgtatttcgatcggctagtagttgtttacttggtgaggtttgcgccaggcggaaggcggttgccgcctacctaaaattggagtcagcagcacttagtttccctttccagtgaggaatatctaattcttctacggttaagccgggaaaacagcggctagtttaggagggaagaaaacccttgggcaaacgcccaaagcctgcgtatattccggccggagcatcctggcgcccagtttggggaggaggggtgaaggggagggtttggatacgaagcccggcagggagcgggtaactcctggagccactccgccgagcactgcctgtggccctggtcgaggataccattctggttgctcagtgattgaccaggaggcggaagccagttaaggggaccaaggagtggagtagggagaacctccatcggcccacgggcgcgagttagtgttcga

SEQ ID NO: 235501 - DNA, 319 bp, Homo sapiens
  chr11:32458434-32458753
  hyper
gggacggccaggcgcgacgggagggaagcaaccggttgcagtccggcctcctgtacctggctggcccgggctggggctgcaagctttccagccaaacttatgtgaagcaaagtagttgcagtttgacaaagaatggcgtttcaataaatgacatagtaattttttacgctttggtttttagcttgcattgcataaacgttgtcgccattaaattctggctgcggacccgaagtgtgtgcgggcccaggacttactcgaagggcgcacttcttgggaatgcgcatcccgtaggcgcaggagaccctgagggtaaagatgc

SEQ ID NO: 235502 - DNA, 47 bp, Homo sapiens
  chr11:32458783-32458830
  hyper
ccacctttgctgcttgactttgcgtcgtctccactcagaagctttta

SEQ ID NO: 235503 - DNA, 360 bp, Homo sapiens
  chr11:32459414-32459774
  hyper
aagagcaccggtgcgaaccccggggtgccccctcgcccgacttggacttctccgactaaagaggtgggaggagttccctgcagcctgcggggccaagaagaaagtgctaagctgaggagccgcagtcggaggaccccagggacccgacaggaagtctccgtacgaccccaacggatccacatgcccggaagcccaggcgacactaagccagcgctggggaactgacgtactcctgcagtcgcagggcgctccatgcctctctgtcctcttctttgttgtgggtaacgttctctgcgggagacctgaggttttccaagggggacatgccagctacactggccttggcgccctgagctaagc

SEQ ID NO: 235504 - DNA, 126 bp, Homo sapiens
  chr11:32605170-32605296
  hyper
gaaaactggaggccgcgacaagcgtcgctgagtggaggcccagtaagtcccacccactaggccagcccgagcgcgtctgccacgccctgctgcattccgcggcgagagcgcgcgataggattggct

SEQ ID NO: 235505 - DNA, 94 bp, Homo sapiens
  chr11:32605714-32605808
  hyper
gactcatttctgacgacatagtacttttagactgatgaggaatgatgtctgcttccgtccgtcaaatgcagccacattcggagtgggaggtggt

SEQ ID NO: 235506 - DNA, 143 bp, Homo sapiens
  chr11:32915115-32915258
  hyper
ggagtcgtggggctccgtcacctcttgggtcctgggctctcacatggtgaagtttgggctcgtggctgaactcgggatctgtgagacccaggattggcgccgggggtccgaagggggcgccggagagtttggggcagtggcga

SEQ ID NO: 235507 - DNA, 498 bp, Homo sapiens
  chr11:32915558-32916056
  hyper
aagtaaggaatctttctttgccttctatgcctcggggtgactgagagttgggaagaaatggggcgggggttggggtgggggtagtgaaggccgtaaaggttgaagaaccaaagcatgcttctccatctcggcctttaaggtccgggtgcattatgtagcgtggggttcaagagttcatcttgcatgaccaagggaatctaaaattttgactcctacttgatatttaagctcgcgggaaatgtgtagtagtgccacactgtgaaacggtcccatttgaatgataactggaaggcgtggtctggtttggagaattggtgagcggggtgttttaaagccacctctcccgaacaatacagaatctggtaggtgcagcttctgattacatggaccagggaatcctgggttgctaatgacttcatcctcagctaccaacaggaagcttcgtggctttatgatctcatcagatttcttcattatttttcacgacagaagtgaact

SEQ ID NO: 235508 - DNA, 561 bp, Homo sapiens
  chr11:33037370-33037931
  hyper
gagagacacgtgaccggcagcgggggcggggcctgcagggagccacgccccgcacagttaacagacgggcgctcagggagctagggagctgtgaagctgctggaggagttggcgtccggggagcaagggccatggccaccgtgcaggagaaggctgctgcgctgaacctctcggctctccacagccccgcgcacaggcctccgggtaggtgccgaggactgccgcctgggatggcgcggggcgggctggggtgcgcgggctgggtcccggcgcggggcgggcggcgtggggcgttcggccgcctgcgcctgtcaacggccggctgggcgagcacagcacagctgcgaccacttggccaacgcccccgccgagcgggcggatcgagttcctctctggctggtgggctgcaagcggcagagcccgcccgcacagcccagcttttttctttctacccagactctcaacttgaccgcgcgttggtctgtgcgcccgctaacgtgccaggcacgcgccggggagctccgggatatgctccgcggtgctaccggtgacaagtgtggt

SEQ ID NO: 235509 - DNA, 101 bp, Homo sapiens
  chr11:33060993-33061094
  hyper
cgccgcccagctgcgagtcaccgcttactgaaccccttcggcaagcaggggaaagaccctcccgcctttccgtacgaagacatggcgctgccctatattgg

SEQ ID NO: 235510 - DNA, 41 bp, Homo sapiens
  chr11:33182773-33182814
  hyper
tgtctggagcagtcggaggaacagacgtggagaagaggtcg

SEQ ID NO: 235511 - DNA, 264 bp, Homo sapiens
  chr11:33183094-33183358
  hyper
gcggggctaatttcgcgactctggttattccgagcgtgcagaaagcagcgagatcccggggcgggcccaattcctgggctgacgtcactaccctggcttggagaggctgttgctgagccggctccaaccggctggaaggcgggaagctgtttcgcctggaggctcgcgcgctttttggaattcagttatcaagctttagagcctggctactcacagttgaagcctgattgcaggtcagcaatgctaaacgttaaatgcctctta

SEQ ID NO: 235512 - DNA, 116 bp, Homo sapiens
  chr11:33397373-33397489
  hyper
tgccgcttgggcacgttgaccatgacccccctccccggccagacgacctctctcccgccaaccttcccttctctagatgggggacaggaggggagggaagccctccccttaaggac

SEQ ID NO: 235513 - DNA, 72 bp, Homo sapiens
  chr11:33891164-33891236
  hyper
gggctgcgggcgcgccgcggccgaggcgggggccggggcgcgcagcctggctccaggcggctgcagctgctg

SEQ ID NO: 235514 - DNA, 550 bp, Homo sapiens
  chr11:33891711-33892261
  hyper
gggacggggagagccgctcagcgaacacctctccttggaaaggaggctgggcaaccactaaatcattcttcagggcttcccctcttccgcctttcccttttggtttaactaaggcagaaagtaacccacgaacagctcgagcaagcaagaaaagacaagaatgtgaaataagcacctacagaaatgcaagtgttcccagtggattttccgcccgtcccaggttcgaggtcccaggtccacggacgccgtgcactgggatgccccggacagcgcggctctgcgggctgcgggctacgggctgcgggccccaggctgcgggctccgggctgcgggctccgggctgcggccgcgctctgcagaggcgatggtggtgcgccagccgggactgcacgggctggggacgcctagagcagagccagggcagctaatcccagagggagggtggctgggagggaccacgcggggccggggctcctctcagtcggctggtggcggaatcccctccctctgcacctttcagaaagcggactcctgcggttaaactgccccc

SEQ ID NO: 235515 - DNA, 118 bp, Homo sapiens
  chr11:34126917-34127035
  hyper
aggccctggggtgcggacatctattttgcccttcttagccgaggtactttagctgggatatgaagagtgaagaggcaaaccgcagccaacacccagctaccgcgagcagtgggactaa

SEQ ID NO: 235516 - DNA, 1064 bp, Homo sapiens
  chr11:35160296-35161360
  hyper
gatcttgctccagccggattcagagaaatttagcgggaaaggagaggccaaaggctgaacccaatggtgcaaggttttacggttcggtcatcctctgtcctgacgccgcggggccagcgggagaagaaagccagtgcgtctctgggcgcaggggccagtggggctcggaggcacaggcaccccgcgacactccaggttccccgacccacgtccctggcagccccgattatttacagcctcagcagagcacggggcgggggcagaggggcccgcccgggagggctgctacttcttaaaacctctgcgggctgcttagtcacagccccccttgcttgggtgtgtccttcgctcgctccctccctccgtcttaggtcactgttttcaacctcgaataaaaactgcagccaacttccgaggcagcctcattgcccagcggaccccagcctctgccaggttcggtccgccatcctcgtcccgtcctccgccggcccctgccccgcgcccagggatcctccagctcctttcgcccgcgccctccgttcgctccggacaccatggacaagttttggtggcacgcagcctggggactctgcctcgtgccgctgagcctggcgcagatcggtgagtgcccgccgcagcctgggcagcaagatgggtgcggggtgctcagcgcggacccggcggcagcccctccggctgagtcggccctgggggactggagtcaagtgagctgtctgcgaagtgcattgggctccggaaagcagggctgggatttgcgctaaaccgttggagaatgtgtctgtggaagcaccatttggttgaaagaaaaagagaaagagaagaaagtttgttgggcaggctgccggcgcgcagttttgggcgaggtcgctagagctgcagcacatggcagaaagtaaccgttctcccggatgcgcacagtcgttgtctggactaacaggctcctgtgcccaagggctcgccaagccccaccgggctgtgtctaggcagggcagagctgggcggggcagagactggggctggaacagggcgagtggctgttatca

SEQ ID NO: 235517 - DNA, 156 bp, Homo sapiens
  chr11:35440194-35440350
  hyper
ttgaaatcccaaaagtaacctcaagaggatttcttcctcacactctcaggcccccagcgcaccttaccctttttatcaaaataaaacaaccctccacctctcgcattttcaaaggattaagcagcaatctccaggaaagaaaatcaatcccctccc

SEQ ID NO: 235518 - DNA, 45 bp, Homo sapiens
  chr11:35440950-35440995
  hyper
gcgcgtgtgcgggtgtgtgcgcgcctggggaggcggtggaggccg

SEQ ID NO: 235519 - DNA, 671 bp, Homo sapiens
  chr11:35441175-35441846
  hyper
gccatccctccccccagcctctcgccataaattagccaaataagaaaagaggccccgccgctcgtccgggaaggcttgggcagccggtggcaggagcccaggatctaaggagtagctattgtttcccctgaagcccgcgtggccccaggtcaccccgtgcggggtgaagcgcaggcgaccgcgcggagacccgggatgcccctccgtctccgcctccctggagcagcccctggcgctccctcctcactccccggagcacccgcttcagctcacactcacccccaaactcacaggcaggcacacccaccccatcctcccacgtctgggggtcccaggtccagcggagtcgagcggctgaaacacgcgggtggtgcagcctaaacgcggcccagctgcgctccctcccccgccgaagctcgaataaatctctggccttcaattattcagcgagattaatattaatgcagctccctgggggcggcgggcggggtgcaggggaggccgggattttttttttttttttttaggccgagagaggtcggcctcgtgggtgccggctgagaaggcgcggagagttggccgaggggtgagtggcgggggacggttctccacccactcggcgctgctcgccgcctgcttccgtgtcccgggggcggcgcacagagacagat

SEQ ID NO: 235520 - DNA, 80 bp, Homo sapiens
  chr11:35442069-35442149
  hyper
ttccccggggtagacgatcttcggatttgcgctgtgctggaccttgttagacgatggaacgcgaccggccacgtgcaaac

SEQ ID NO: 235521 - DNA, 593 bp, Homo sapiens
  chr11:35547021-35547614
  hyper
ggtgtcctcctagggtgtcccggacgctactcacagtacctcttggcaaggacgagatgagaaggagctgaagaaaagtgagccccaactgcgtccagcaacccagctccatccttgccgcggctggtgcccgagcgtctactggggagggagaggagggacccagggaggccgggggcaggcgggttttacagggacctccccgagccccagctgagcgggagctcgggtttcagctcgccaggctctcccatcctcatctgaggggaaccaccttcagccagagcgacgtcagcccaaacctctcctctctgctgccttaacccttgcggggccccgggaggtgtggccacgcctggagacccgcggacggcggctgcaaaggaagctgcgggggagggaggccagcctgggtacaggtggggtcccagtgttgggtgctgggaggaggggccataggaccctgggcgggagcagaggtacccagggctgcggggcgctcaggtgaggccgggagatcttcctacgggaggctgagacgggagctggctttgccctctctgactgcacgcggggagcctgattaaaagcct

SEQ ID NO: 235522 - DNA, 1081 bp, Homo sapiens
  chr11:35639632-35640713
  hyper
gctgcctaggcaaagggacccggcgaccaagacacccccgcgagggcccagggcgcgtccctcccgccaggccccagactccggctctgcgccaccccctcctacgccccggcgcgggcgcagccagtccggcttcctccaggcccccaagtcccggaccgagtgtggggccgcctctccctctcggaaggagccatcgccgctttaagtggaagaggagaggaagggggcgggggagcggggggcggggagcggaggcggaggagggggagggggatccccctggctcccacgtggtccgggcgcctgtgaatcgcgcccaccggagggtctcacagcgaaatacaaaagcagctgggaagcggcggggactcgagttcccagcgccgggcggagcgccggacagagccccgcagcgccccgcggccgcgatggggccgaagcgcccgaagccccggagcccacaaactgccgggcccgcctcgccgccgggacccgggtgcctgggctcggcttgaagcggcggcggcgcaccggcacagccgcgggagcatgggcaggaggatgcggggcgccgccgccaccgcggggctctggctgctggcgctgggctcgctgctggcgctgtggggagggctcctgccgccgcggaccgagctgcccgcctcccggccgcccgaagaccgactcccacggcgcccggcccggagcggcggccccgcgcccgcgcctcgcttccctctgcccccgcccctggcgtgggacgcccgcggcggctccctgaaaactttccgggcgctgctcaccctggcggccggcgcggacggcccgccccggcagtcccggagcgagcccaggtggcacgtgtcagccaggcagccccggccggaggagagcgccgcggtgcacgggggcgtcttctggagccgcggcctggaggagcaggtgcccccgggcttttcggaggcccaggcggcggcgtggctggaggcggctcgcggcgcccggatggtggccctggagcgcgggggttgcgggcgcagctccaaccgactggcccgttttgccgacggcacccgcg

SEQ ID NO: 235523 - DNA, 103 bp, Homo sapiens
  chr11:35641673-35641776
  hyper
caaagttctgggaggacgaactcaccgaggcgagaagtgtaacattctctccacccagcttataaaaggattctttactgtgccagcacggggattggatccg

SEQ ID NO: 235524 - DNA, 156 bp, Homo sapiens; identical to SEQ ID NO: 202519
  chr11:35966093-35966249
  hyper

SEQ ID NO: 235525 - DNA, 1505 bp, Homo sapiens
  chr11:36397978-36399483
  hyper
ctccgcggccgaagcgtttgttgactcgcgctggagaggaaccgaggctggacgggaccccatctgagggcagagctgggggaggagggagggacggagggagggagagctgggcagagcgcgacggggagaaccatccaggtcgctcatttctctccggtgagaaaacttcctcgggaagaccggaaactttttcctaggcgcgcggagtctggggcggaggcgagcggcgggtgtgcgcgactcggggtgattcacgccggggaccccaaggaggtgagtggtgggtggggggcgtctctgggaggggccggagtcataggctcagcaaccgcgcaggattgagcgaaaattaccgcgcgctaatctgacggggcgcggcgtggcgggggtaggagctagggaaaagtgtcacgtttgggggggcaaccaggtgggaactcctgcatggttaaggatcctccgatcggacgctgcaggcaggcgtaggggatcttactcgagaccaccatggtggggaggtgggcaggccacgctcccggtctgctctttagggtggttgaagtaccgccgtgaggtgggatgcggatgctggtgatcatgggacctaggctgagccgggaggtcgaaaaagaaagtcggcttgtttgactctctcgttctccctctggggggcaaatctaaagagctgaccccgcttaagcacgggagatttcgcgcctgcagcagccttttcccggcggtccccctttttctggagggaggcgtgggagagaagggcagggcagggagccactttgtcccgtgcgctgctgcacgcgcgcgctctgcggactagggtgggccagggcccagccagtggggatcccgccgggacgggctgtgagcaagccctgggacggcccggctgcggaccccgcgctgggagtccgcagtatcccccttccgttttatttctcccgcctgccttcctttcggcgaggctttcctctgcgcgcttactgtgcgcgcatgccgggctcgctgcacgcagggggcgctctaggggccccgcccgggcagctgggaccctgcctgcccaaccctccggcccattttccttgaggccgccgcccggggtgggaccaggctgtgtgcttgctaactgtgcttcaggaatccgctctgggatgccttcctgtctggcaaaaggggttacccccagttctacccagtccctgtcctcggtcacatgctgccgccgcctcttcccccgcggtgccgggagcccgcgttttgtttgtcagcagttaggcggtgagtatttatagacgccacggcagtcctgcggtgcgcaaggtttcaattactgcgatgcgccccacaagacgaaaggttcacgcgctgcgtctgagctgcacgtctgccccggagacccgcgtggaaaaagctctgggctggaatctccgggcttccctgcttgggcagaattctggacctgttgcccagacgacacgtgcacattc

SEQ ID NO: 235526 - DNA, 199 bp, Homo sapiens
  chr11:36531740-36531939
  hyper
cagtgggagccttcgccaccttcgctggccgcccgcaggccaagccccagctgcggacgccactgcttccgccttctctgctggctgcggggagcgaggggcagggagcgcgccggggaggagacagagcggccgagttcggagagagtgccccctggcggtgatcctccaggcggactgtggcgcgggccgggcggcg

SEQ ID NO: 235527 - DNA, 411 bp, Homo sapiens
  chr11:36616034-36616445
  hyper
tttcccaagaatccgttctctctgggatgtgtagctttggaaatctgtctttgttgctctgggagaggggactcctggaatgtgtctgtgaataaagactagccgaaggtgcgaagtgactagacgggagcaaaggaggaaaactagggaatgggaggtgagagtggctgacaccgacccaacgtccgggttgccggaaggctgcagcgcccggagcggtgtcgggcaaaccgctaccctggtattgctggagcctctcctggggacttttgaacaggtgacccgataggaagcacaactgcttctgttggagtgcggttacctggagaccgcagtctgaagggactcccggcagagatgtcgttacggtgtcctgcctgtctggatgcttaggagcgcgactcaaaacta

SEQ ID NO: 235528 - DNA, 1080 bp, Homo sapiens
  chr11:40314508-40315588
  hyper
cccagcctccccttcgaagaatttggggagcaacttcccccccactctccatccttccggccggccccttcgccaaagatctgattagatttctcatcacaacccagtgcgcaattgaatttttgatttcagccacccggccagccaccttcccctctcccctccaaactccggttatatcctgtctccttccctccaccgcctctgcaatttcataatctcacgttaaatggagtgcggggggcgggggcgggggcgggggcggaggtagtggaggaaaatttcaaggctccgtcagctgtcaagaagaaacccattcctccccccgctactttttttttttctttttaaggctcggggtgcctttccttcctctgtccccgcccccacccccagcacccggtccagatcctccaggtgttgcagaactccgcggtcggggccgggatcacgggggagacgcaggatgcggtccctcgccggtggcccctgccagcccccgggtccccttctcctccatcagccggtagtggctccgggagcgccgaggtgatggaagttgagactggggcttttatttcaaatggggagggcgaagtgaggggacagacagggtggtaggcaaattaaaaaaaacacacacgaaaaaagaaagaaaaaaagaaaaagaagaaaaaaagaaaaaggaagaaaacgggtaaaaaaaaaattccctaatcgctggctcttctcatccttctcaaatgcaactgcagctttgatctcatttccagctgcgttgggtacattttggagccacaagttggttcccgttggcgcagaccttcccgatgtctgctagtcctctgcgaggagacgcgttctcgggagcgcagctgctccgcgccgcccttagcgccatcgccctggctcacggctccctgcgcggcagaaaccccagtccccttccatccacttcggtttgaactctcttcctccccctccctctgctctctcccctctttttctcccaaataaatgctctcccagcaccggcggcagctcttgccagcccaggctttctctcgaccaatgccacgt

SEQ ID NO: 235529 - DNA, 214 bp, Homo sapiens
  chr11:43333313-43333527
  hyper
gtattcacttccccgcccacccacaccccttccatggagagcctgcagccaagctcaagctttcaaaaaggcgtgagctaattcaatcatccttgccgcttttttgctcctccaggctgtagagggcgacaaaaaccgcggaggcgcattggggtggggggtgtctactgaaggccgctcccgacgtgcgcgtctttacgtagacgtcgggggc

SEQ ID NO: 235530 - DNA, 338 bp, Homo sapiens
  chr11:43569294-43569632
  hyper
ccggcgcgtctgggacagcctctagagagactggggagggggcttccccggggggggggggggcatcgcgcagccctaggcgcccgcccctccggcctaagcagggttcctccccaccttccttctcctcgccgccccaccctcccgcgcccttctcttcccccagctcgggctccctgggctccgaggcttcgcccccgcgcgggagctctcggggcgagggcggtgcgcagcggtgcgggggcagaggtgatgctgggcggggcggggcggcacggggagggagcgggcggggcggggccgcgctgctacgtaagcagccgcgagaggggatcctg

SEQ ID NO: 235531 - DNA, 992 bp, Homo sapiens
  chr11:43596515-43597507
  hyper
cagaggggaaagccgcagtagcaagccggacactcccctctgggcgctccccaccgccagaactgacgccttcgagggcggtggatttgtgaatcagctcccctttcccccacacaggggagcccctaaatggctgctggccatttgcaaagggttgtgtgcatgtgtgtatttaattgcaggcttatttgtttctgctctgggagtctgtccgtctctctgtaactcggatcattgctctctgggaagctgtataactggctgattccgtgggagaccaggcaggatgcgtgggcgcaggaaacagaagagggaaaaggagggagaaaaagagagcaggagggagagagcgggagccttagaatctgttatttgcgtcactcgaggagccggggctatctgcccgacaaacacacagaattaatccgagttacagccatagctgtctatgctacagtgaccagatgagaaagggcggggaaaggacgcgcgcgggagcgtgtgcacggccgagtttgcattgggcgtcttgggagagtttggggagggggctgtcctgctgggcacgcccctcggggccccgcttgcccggtgcagactaggctgcagcctgctctgcagctgcccagcccaagcctggggtggcgcccgcctcggccgcctcgcctgctcagtggctgcgtggaacacaaagcgctgtctccgagcagaagcgtcttctcagctgaaccagacccaccaaagaggagaatctgcacgtgacgtcagtagctgatgactgacgcaggctggcaaaggagactcaaggcggctgctccgcgctgccttcatgagtctattttctccagccccctcgtagtgaattactagaacgcaaaacacacacacagacacacatatgcagctttcaaaatatacatttccaaaggcggtgtgttgcaaacacaacgcgattttgcagagcgtgggtgggaaacgtgggaagggtatgg

SEQ ID NO: 235532 - DNA, 511 bp, Homo sapiens
  chr11:43599958-43600469
  hyper
agccgtccctctctcggaaggttccctgactgagactgaatattcaactcataatagtaacaagggcttttaccgatgtgcagaataacacaaataacgctgcaacccacactttgtcttgacaattcagttcaaaccaaagctgctcacagcctctcggcccaccccgcggcctcctcgtcattcactgggacctactggttccctttcccaagcctcgcccctctcagccctgcaagttgcgtggttgtgtttacaaattctgccacaattgcaaaggaaataggggtggggggagcggtcggggcgggagtggtggtagcgccaataaagcacttgcaacacgtggagcggtggttggggggaggtgtccaagagtcaagaagggggcggagggacaccccatggcctcatttccacctccccattcttccccaccccttctcattgcttggcacaatgcacaagtttaccccccgaactggatcctattaaataattcaatggtagc

SEQ ID NO: 235533 - DNA, 49 bp, Homo sapiens
  chr11:43600889-43600938
  hyper
ccctcccacacagtacagtaacttatatacttacctggaagaacccgct

SEQ ID NO: 235534 - DNA, 178 bp, Homo sapiens
  chr11:43602406-43602584
  hyper
gacgattttagtccgcaccaatgagctggcggcctcgtctgtatttatttagtgctctgggggagtttttctctttacgcagcgcctgtagtcacggctggaaccttggctgggggactctgagggataagaggggattcggggggaatccgaactgtacctgttcagagatccgcga

SEQ ID NO: 235535 - DNA, 51 bp, Homo sapiens
  chr11:43603184-43603235
  hyper
tcacctgtcttccctccgagcgagtcccccgcccccaactttttaacagac

SEQ ID NO: 235536 - DNA, 467 bp, Homo sapiens
  chr11:43603524-43603991
  hyper
tagtatcttatgtcctggtgcgggggacccggaggtgaggcgagccgcggtgaattgggtagatccgaaaaagagggaaaacacccaggcaccgcccgatccccggagtctcttcctcccgcgcctgcttccaacctaatttggggcgttttgcagcctcgggtctcccacatctcctctttttcaaaactaagtagcacggaagggggtaaaacaggcgagaactggggaagcccccgcagagaaggagctttggagagatgcggttgtgcccgactcagacgcttagcaggaacagaagcagcagcagcagcagcagccccatcccggcctctccaggcgccggtcctggggaggggggcaaagctgcaggagaggggagagtctgtgagtccccctcctccccctccactcattgcagtcctgaccacttcggtcacaagtggcacaaatcaggccttcaccac

SEQ ID NO: 235537 - DNA, 178 bp, Homo sapiens
  chr11:43604021-43604199
  hyper
ctgctagacgcccttgcccttagggactgggccagaaggacacacatacacacatgagtgcccacagggacagaaatgggtagaagatgggtctagagacaccggagttcaagacccgagggctgcgaaccttcacgttttcggggagggcctgaatttcccccgtatcacaaccacc

SEQ ID NO: 235538 - DNA, 101 bp, Homo sapiens
  chr11:43604829-43604930
  hyper
ctccagggcccaaggagcaacggccgaacccggcgtcgtgcggcaccggagcgagtcctctcctcgcctcgcctcgcctcgcctcagccagacaactgttg

SEQ ID NO: 235539 - DNA, 336 bp, Homo sapiens
  chr11:43902242-43902578
  hyper
aggccctccaggcgcgggggatgtgggactacccggactgaggactgcgcaccggaagtagtggcggcgctgcgtaacgtcgagaggaagtgcctgatgccgcggcctgtgattgggagttgctggagtcggtgcttcactcttaaggttccgatcacagactgcggagtgggtcaggggctgcgagggctgccccaagtcctaccgggtttgcacgggcgcgcccggctccgcccgcaagtgcgccttcctgacttactgctgggtgcgcggggctgggggtgcgagtaccacccctgaagtctcttcctgggcgacctccggggcctcattcta

SEQ ID NO: 235540 - DNA, 37 bp, Homo sapiens
  chr11:43963549-43963586
  hyper
cggaatggaataatcgagatgtgtttgcattcgtgcg

SEQ ID NO: 235541 - DNA, 1375 bp, Homo sapiens
  chr11:43963646-43965021
  hyper
ggggtggcaaggatccagaaggggagcccaccccttcttccgagctcagctctggggagccgggcgctcaggctcgccaggctgcaaagagagctgagagctgcctcgcgccccgcgcagaaccggcggtggaataaccagcgcctcaagtgtgtgcatctgggaccagggggcgggggagggggacctgcggccccgcggccaacccggttggtgcagacttggggatcccagaagggacagtgcccgcccagtcgcggcgattgagggtccctgtccgggcgcagctcgggccagccgcgtgctccggggccgcggcttctcccggaacccccgcgggcggggcctgccttccggagccggttggcggggggcgggcggcgccggggaaggggccgttactttcccagagcggcggggcgacgtcaggcggaagggcgcggggcgcgcacgctttaaatggcattcgctgtcatccgagctcagagccgtgtgggcagccgcgggctatataagccgcgagcctggccgccgcggggcagacggcgacagcagcggcggcgagcgcctcggagcgcggcggaacagcgccccccgagccccgtgccccccgacgggtccgcccgcccgcccgccctcccgaggagcgccggcccgggcccgcgagggccgccgccaccccgcagcagatttggatcccccgcccggcgagcccccggctgctgcctcccggggggccccggcgcagcggccgccctcggagagccccggcgccccgccgcccggccccgcagacgccggaggcgccatggccgccaagcccggcgagctgatgggcatctgctccagttaccaggcggtgatgccgcacttcgtgtgcctggccgacgagttcccgcagcccgtgcggcccgccaagctgcccaagggccggggccggctgcggcggccgcgccagtctcgcttcaagacgcagccggtgaccttcgacgagatccaggaggtggaggaggagggggtgtcccccatggaggaggagaaggccaagaagtcgttcctgcagagcctggagtgcctgcgccgcagcacgcagagcctgtcgctgcagcgggagcagctcagcagctgcaaactgaggaacagcctggactccagcgactccgactcggccctgtaaggggcgccgcccgcgggggggacgcgcgcgtccgcggtccgcgcggggaccggcgtgtgaaccccgagagtgcccgcgccctgctcccgggggacccgcaaggacccgggaccgccgctcctcgcgcgctcggactcccgccccgctgcgaaccggtcggtgcgcccctcgccgcgctcgccctggcccgggagcgcc

SEQ ID NO: 235542 - DNA, 165 bp, Homo sapiens
  chr11:43965321-43965486
  hyper
ttatttttgcattgcgatggctgaaggcatttatttaacgatctttttacctggatatgtctgtgaggctcctgaaaggagacaaataaagtcaatatatttgcacagtgcagttttccaggctcttgactttttgcaccttcggggtccaggctcccaagactc

SEQ ID NO: 235543 - DNA, 297 bp, Homo sapiens
  chr11:43965906-43966203
  hyper
gggttggtcgagagtgtgggtgcgcgctcgctgtcgcgggcaggtgactccctgaccgcagttgacccagcgcagtgcctggcgctcctgcgctgcggggaaaaccgcggccgctatgtctccagccgttctctgcgctccgcagggttcctccaggagggtggggcatgtctttggttagagcctgaagggcacctgggtaccatcgagtccttcccttctccccgcccctgcctttgtttacatatgagaaaacaagcctagggtaacagggagaggagcgcccccagttctccg

SEQ ID NO: 235544 - DNA, 185 bp, Homo sapiens
  chr11:44087353-44087538
  hyper
aaatgacaaactgcgatgaaaggccataaggatgctcacacccgaatctaaaaagccctttgtgtgggccgcagccaagcatactttggcaagaaatttctgtggctctaacctcctttgaaaactggagaaccaaggccaggaggcagaaggaggtggcagacccggcccggcggcggcccagc

SEQ ID NO: 235545 - DNA, 128 bp, Homo sapiens; identical to SEQ ID NO: 202530
  chr11:44087990-44088118
  hyper

SEQ ID NO: 235546 - DNA, 85 bp, Homo sapiens
  chr11:44117173-44117258
  hyper
gtccagcaggaggcgcggcccggcagctcccgcatgcgcagtgcgctcggtgtcagacggcccggatcccggttaccggcccctc

SEQ ID NO: 235547 - DNA, 334 bp, Homo sapiens
  chr11:44327253-44327587
  hyper
ctgggcccctaggcggcaccccaggggctccaacctggcccgcgcctccccagaccttggcgctgagagcgctgcttttgcgggtgggtggacggagaggtaacaatctgctttcaacaaaaacctgtcgccaccgaatcgaaagcgaaagggaagggagaagaggggcagcttcccgcagcggccccgcgtctcgggacaggtagactaggaccagtacgcgccggctgcagctccggcggtcggatccggagtttgggggcgaggcgccggagtccctgccctgagtacagggaggctctctgcgtcgctgagaaacgtcggatctccaacc

SEQ ID NO: 235548 - DNA, 104 bp, Homo sapiens
  chr11:44330613-44330717
  hyper
tggctccgcacctgcggcgctctcacctgcggcggcgccgcccgaggagcctcccagccggcgaggagcgaggcttctgcagtcctgctgtcccgcagccccgc

SEQ ID NO: 235549 - DNA, 134 bp, Homo sapiens
  chr11:44330777-44330911
  hyper
cagcgccagagcgctgcgcggagactccttgccgccgcacgccctgggccggtaagaagcatccgcttcaaatcccgcccagcgggcagcgcaaagcgagcggtttggggaaatgccgaagggaccgggaaaaa

SEQ ID NO: 235550 - DNA, 90 bp, Homo sapiens
  chr11:44331691-44331781
  hyper
ggaggcgaggaggctgtggctgtgcactccttgcccggcctgctcgctctccctcctcccctccacgccggcctctctctctctccccct

SEQ ID NO: 235551 - DNA, 33 bp, Homo sapiens
  chr11:44332119-44332152
  hyper
attcaacccggaggcgcccgagggcttttccga

SEQ ID NO: 235552 - DNA, 672 bp, Homo sapiens
  chr11:44332354-44333026
  hyper
cctacggactcctgcgcgcgagctcgcgggcgccgctgcgggccttcccgctggcaccttttcctaggtttccaaccttcctccccattcccgttcctacgggagattaacacacacacaagccttcgtcgtccagtgcatggtcacttgcacgtcttgttaactatttccctctgctgtaagggcgctgggctgggatgtagcggaatctgtgctccctcaagccctggagaagccctgggctgggcccggcttcagaagctttagagcgctgccctctgcgctcccgtctagaggccgcaccgttcacgccccacgtctgcgcccaggcgaggggatttcctgccaggcgaagtacagagagcggactctggagaccccctgaccttgcccgatagtcgcgctgtcacctgttcactccttggggtcaggggtcggggagaggggtgagaccgtctcttccctttctggcctcactgcccccgactgtaaaacgaactgcttggttttgataggttgtggtttcaccaccactgcgagcctcaaggcccctggcaccgccacagcaagggaaaaaactttgcgcgtgcagcccctcgatttcgcttcatgacaaccgtgctagagattggcgcccccaattttctgatgagctaacggaggctcagagag

SEQ ID NO: 235553 - DNA, 1226 bp, Homo sapiens
  chr11:44337571-44338797
  hyper
tcttaaccgctgcgcgagttatcagaaatccctggagccaaacactacgggggaccggcggaccaaaaggttcctaactcctttggacctccagggctcgcagaaaagctgccacttctccagagccgccagggcgggcgcgagagcagcgagtccgcgcgggtcctcggcgcgctcgccagacccagccgaccgcgtgactcaccacgtcctccgccgggaggaggtcagcatcggccctgggcaccggtccccagccgccgcagcccctgccccaatctccccggaatgcggacgccgccgcgccaacccgagcctccagtcggatagaggcagggagggaggcactgcccacgacgagtgctctccaggcgctgcaaagagcaggggtctcctaggggctttgagaccgcgggcggacctcgggggagcaggcgtgggacccgatctgtgccggctcagcagggccccagcagcgccccagcgtcgcccgcccttcctcctcgcccaccttacgctgggacttgcaccccgagtttaggggcttagccatttccggaactcgggctagtggactctggggaatcaggcgctgggagaggccttcgcagctgcgtctctcctgcccagcatattgtgttgaatgaggcaagggagtgagggggtcgtaaaggaaacccgcactcaggggcacaccttcatttatctgggaacagcgcggatcccagaggtgcgggataaaccaggcgttccagctgctcacacgctgtttggtaccccgcgtctatgaagcacaaagcaggagcggattggaggttttacaaactgaccaaccccgccgcccgcgcccgctggagggagacgcacacctttgccctgcatattcgcttccaggctctgcatctctgctcttggggagccggccacccgcttttccgcgcgggggctggggttctcgcctgaaggcgaagtccgcgtgcgcgatggaacctggtgccccgccctctctggcaagggcaaggccaagagcgcagggcggggagaggagctccggggacccgcggaaaacctggctcgaaagccctggaggcgagctctccaccgtgttcggtggccaccttaattcttgttgaaccgagaggaagttgttgaaaccggaagtcggcctctggggtctgagcccgtccaccctttgcagatcggtaacagccgaggaaagcacagat

SEQ ID NO: 235554 - DNA, 365 bp, Homo sapiens
  chr11:44341437-44341802
  hyper
gaccggagcgaaccgacttgcaaaaccacaagggcaactgatgggataaaaagagacacccaaagccatagcctcgtgtgccactcgggccactcccggagcaaagaggcgaggcccggaggaagcaagctccggaggtcgctagctccggaggtcgctgggaggtggcttcttcgttgaacttctagagcgccactgctccaccccccgccccccgccccgcgcatctcagccgacccgcgcaatgtgctctctcggtcctcactcaaggtcttggggcctgaaggaggctgggccgcgccccgaggaggagccgcccgctggaaacacccaggaaactactcgtcctcaggggttggctgtgg

SEQ ID NO: 235555 - DNA, 752 bp, Homo sapiens
  chr11:44748053-44748805
  hyper
ctttcaacaggtacttcccccggcagcgggaagcccaggagcccgatcaggaccgaggatctcaccccaacccctgcgtttgggccccggggtcagctgaaagttcccctggaataaacacttcgggtccagcatgcccctctccccactcccgcaacgatcttccgaattcagacgcagagagggcccgcgagcagagcgggaggtggtcggaggcggaggaaggggagatgggcagagggtgggcccagggacccccagacaaggcctggacgcggggttggaggaggaggcggaggctggcgggaggcgaggggcagcccgcagaggagacgcgcttctcggcagcaacggcgtctggagccgggaggggcggaggtttggggagggggagggagggcgggggaggggagggacggacggcggcggaggtggggccggcgggctggcgggcgtgcagctgccgccggcgtcgcggggctccaggctgcggggcggacgtagcgccgagcgatccaccgcggagccgcgcgaggccgcccgagccccagccccggccccggccccagccccggccccggccccggccccggccccggccccggtcccggccccgagccccgagcgagcgccgccgcctcgcgctgcgggtccccggacgcgccgccaccgccgggaaggcagccggcgccgggcaagttgcgagcgcgcccctccgaccaggaaagtttccccccggccgccggcgggat

SEQ ID NO: 235556 - DNA, 703 bp, Homo sapiens
  chr11:44749045-44749748
  hyper
gcctgcccggagtccgctgagggccgggggctgcgcccaggacaggtgcagagccggtgggctcccagtgctccgggtggaggagtgggggcttctggagaacggcgcggggtggcaggtgtggttacaaggttcggggtttcggccagggctgcgcccggaaaggggctgctcgccacgccacccggtaagacagtgagggaccagggactgggagcggcgatcggggccgggagggctgtggggcccggcagctgcatggagggcgggctgcctttggggtccctggcagcggggcggggcggggcggaggcgccactcgttcctccaggaccccccttattccttaggtgtgtgcggtttggggaagtggagactccatggagtgctgggtgggtgggaggctcgggcacgtccagatttagggggcagtgggagccagttgggacggtgctcggctcgggtgggatcgcgccggctccgggtcctgctggagtgaggtgactgggctcccgccagggggcgcactgccccggccctcgccagcaggaagcgcgttctggctcctgcgaggcaaccgcgccgacatccaggacgcagggaccacagacacccaacttacgcggggtcccgccccgaggagcccgccctacactagccagacgggggagcgggaccaagagtgaggcgaaaggttcacagt

SEQ ID NO: 235557 - DNA, 384 bp, Homo sapiens
  chr11:44970973-44971357
  hyper
gcagggtagtggggcggtgagggggccttggccagccgctctgggctttggaggagcctgggggttcttggcctccgcgctgctcttgccccagcctccatctctccggcggagaaacccactccccccgggctccaggaagaggcggaagcccgagactgggtcagggcgaaggaaggtagagcgaggggacccaaggcgagcgccccgccccgccccgcccagcggggcgcgccggggtgggcgcggcgttctggcccttcctccacacagcctcccccgggtaggtgcgagtgttctgcccacggcaggggccctaacccacccagcgcccggccagtggccccacactgtacccttcctgcagatcgcgcgactttgggg

SEQ ID NO: 235558 - DNA, 566 bp, Homo sapiens
  chr11:45307446-45308012
  hyper
ctgctgtcccctccccgccaagctttgtcgcgcaaagatccacgaccgcctcccaccccagttccccctctgcagctgcccggcaaccccgccttgcccgggaagggcctgcgcgccgcccccgctcacctgttgtgcagacccgagcaagctgggcttcgccttctccaggtcggggtcctggtcccgcggcagcagccccttcttggggtgcatgtgccgacacaggcaggtgaccccgcacaacgcgaggatgctggtggctgtgcccagcgtggcgcccagcgcgatcacaggcaccgacagcaccatggtgcccgctcccggcgaggggctgggtcccgcagccgctcaccttccccgggccgggcccgcctccaggcagctcccgggatccgggcgagccagcagctctcccgccgccagaggggcggggacggagggagggaggacggctgcgaggacgtcagaggaggctggacccgcagccacgtcaaccggcaaccccctccccgccaacacgtgaccggacccccaccccaacaggagccggagccttccaggtg

SEQ ID NO: 235559 - DNA, 307 bp, Homo sapiens
  chr11:45376918-45377225
  hyper
cccagatgctgagcgctgaaattctcatccgccacacacaacatggcggcttcctggacccgcgcccaattttcgcttccgggatggaagctacgtcatttccccctctgttgccctagcgccccttggaagccaagaatatgaggaagtcttcttccttcgcgccttcttcttccttacgctccagggcagcctgacagagccgctcgaaggctctgctggccgcggctagccggtgaggagggtggggggaggggccgtcccgcgtgtgggggagtctgaaggcgaccaacgagagggagggccg

SEQ ID NO: 235560 - DNA, 61 bp, Homo sapiens
  chr11:45392759-45392820
  hyper
cgttagcaacgaccgttctctctacgccaagctcatttgtctgagcgtatcagcaacacga

SEQ ID NO: 235561 - DNA, 1037 bp, Homo sapiens
  chr11:45686160-45687197
  hyper
cgggagggttgttccggctttccgtggtgggctctgcaccatccggcggctccggccccacaggggcccagctcatcgcagcggtctgggtgcggaggccgggccagggctgggagcaggaagcagggagcggcgcccccgcctccgggtgcagctgggtttggaaagttggtgcgggcgcggggacctcagggtctcaaggcgcctccgcagacccgagccaggcgggtcgtgggacggtgagcccggagcagcccctgagtgcgctccgcagcggaggggagccaagcgcctcgggggccaccgcgcgtctcaagtttgctgccctcctcgaatgggggcagggagggctgaggtgatcgcggcgctcaccggccaccagccccggcagccccttcctgcgcccaacacgccgccgttcctcgccgccgccacccctccgctcaccgccggtagctgctgtccccgagcggaggggcgtctcccaccgcgcccgcgcccctcccggctgctgcggcggagtgtccgctcccgcccgccccggagcccgcggggcccggccaatacctggtcggggacgcgccgggagcagctgcagcgcccagcgccggctccatcctcgggtctggagtcagggtcgccggggacccgcgggtggcggcggcggcagcagccgcggcggcatcctccgcctcccgcgccctcctcctcggcctccctcctccctcctcttcctccgactccgcgcgcgcctcacgggcccctcttcatggcccgggggcgcgagcccggggcggctcgagcagctgagtgcgttctctccggccggacgcgggacccggggccggggctcagggacccgagagatgccgggacaggggccgggacccggagcgccgcagccccgggcgccggaggagagcagcagccgcaggcaccagagcctctcggagcgcccgcccgcgtccccgagccaagagcagcggcggcagcggcggctacagctccgagcgagcggcaggcgctgcggtcccggc

SEQ ID NO: 235562 - DNA, 77 bp, Homo sapiens
  chr11:45687429-45687506
  hyper
ttacccccgagggcgctgctggccgggccgccaaagcctttcgcccccccagcgcccctcgccgcggaagtcctgct

SEQ ID NO: 235563 - DNA, 183 bp, Homo sapiens
  chr11:45826513-45826696
  hyper
aacctgtggctgccgaggtcccccgccagcagcgggcagcggagcgcaggggcggggctggggactggcgaactccgcctctctggggctgtcgctttaagggcaaggcggggcgtgcgggccctttaaggccacgtgggggcgtgtcaggaagtgagtccagggcccgcctcccggggagtc

SEQ ID NO: 235564 - DNA, 238 bp, Homo sapiens
  chr11:45907277-45907515
  hyper
cggcggctgccctctcgccgcgcctccgcctccttcgcagccgccgcctcctccgcgccgcgctccgcccggatggccagggctgtgcccgagaatggcggagcgagaaagcggcggcctgggagggggggccgcgtccccgcccgccgcctccccgttcctggggctgcacatcgcttcgcctcccaatttcaggtgagagtccccggccgccgcgcgcctcgcccttcagcgggga

SEQ ID NO: 235565 - DNA, 45 bp, Homo sapiens
  chr11:46141117-46141162
  hyper
cttagaaatcactctcggcacatctgcacccgacaaccggcctgt

SEQ ID NO: 235566 - DNA, 766 bp, Homo sapiens
  chr11:46259333-46260099
  hyper
ggcgagtggcggtgcgcgcggggccaaccgcgtggagctgtcgggagggcgataggatgggcgcgcccgggctgcaggcggggagccggaggtgggaggtgcctcttgagagtggctctccaccgctgacagcaaacgagctggtccggacggaggacagagggggaagaaacggagggagtcgctgggggacggcgacgagtgggatccgggcgggtgggactgggcgcaaaggaccgcgccgacgccgcatggctgccgggaattcagctcccccggccaggttgagcgggccccggggcccggagcgggcgtcggcatctccggcctccccgcggggctgcaggcaggcggcgccccgagcgcaccccgcgcgagcaggcgcggaacagcggacccaggccgggccttcccgcagcttttctggccgcctcggagggcagggtcccagcgcggcccgaggcgcctcttgccagcggcccgacctcctgccctcccggccccctccaggctccccgcacgtgcaggcccggcgacgtcactgcggctctgacgcgctcttggaggcccgggcggaggcggcgcggcgcgggcttcctccgggaggtcccggtcccggcagcccgcggccgcgtccttggccctcctccgggggaacctcgttcattccaaactctggaaggccggctgtccttcggttactgataaggacgcgagctcttggtaaaagatttgaacaatgcccggaaagaaatagctggaccta

SEQ ID NO: 235567 - DNA, 167 bp, Homo sapiens
  chr11:46260604-46260771
  hyper
tgggtcccagaggcgcagcccctgcggggtttggatgggttcctgcggcctccgatccgctggtgaattgggtgtgtctgagcatcgtccccgctcagcccgcaggcgtaggatagggaggcgtctccgggaatctactccgggacgggtccgcggtcctcagtcgg

SEQ ID NO: 235568 - DNA, 224 bp, Homo sapiens
  chr11:46299338-46299562
  hyper
gaagccctcagccccaaccccgggctccccatggaagccagctgtgccccaggaggagcaggaggaggtggagtcggctgaatgcccacggtgcgcccggggcccctgagcccatcccgctcctagccgctgccctaaggcccccgcgcgccccgcgccccccacccggggccgcgccgcctccgtccgcccctcccccggggcttcgccccggacctgccccc

SEQ ID NO: 235569 - DNA, 891 bp, Homo sapiens
  chr11:46316813-46317704
  hyper
agctggtaccattactgccccgggagagtcccctctgccgccaccagagacagccaccaaagcgccccacggtaggacgattcgagatggagctgcaaggggatttaaggcccggctcgccctttgagtcggggtcgtcggggagaccctcggtctccacttctccctgcgggggtgggggcggggccgcgctactgatgaggggtttaggacaccgtgagacggccaggccatttctgcctcggccccagacgcagaaggggtcccatgcaggcccgagccagtgcaccctgcgctccctcagccgcgggccgtcggcgcaggccgggaccctcctccgcgcgagccctgcactcctccggtgccctccacgccgccaccggctgctgctcgcagcctcccgccattggccaggagctctgcggctcccaccagtgagcaggccggattccggtgaggggcggccccgggtgttcccgggttaaccctttgtgggccgctccaggacggcggcacccggatccttctctaaaatttaaagggcgggcggctgaggccaggctccaagagagggtgcagccgagaagaggggtacgcaggtctgcaagcaggagagctcgggaacctctcctccaagggagggaagccggcgccggctgcgcgtgacagccgagaaggagcttatattggcacgactataggaaaaagtctttaacgaggagggaaacaaatcataatatgtccttctccggcttcccacccccgttgcctggaaaggcacccctgtaggacgctcaccccctgcagaaccctgtcgccctcagagcgttgacacatggctcccctgaagttcgtgaactcctggccgccgaccccttgctcttgctcccc

SEQ ID NO: 235570 - DNA, 42 bp, Homo sapiens
  chr11:46402521-46402563
  hyper
ggaacttctcagacggctcctgtcagcgccaagtttcaccaa

SEQ ID NO: 235571 - DNA, 500 bp, Homo sapiens
  chr11:46412965-46413465
  hyper
cctccgagagcccccggccttgcttccagcggggtcccccagccccggcccactgccgctcccggcccgcgctcgccccggagggggtctggcgccctgtcccagtcgaacccacctctggggagcctcagagcgtcccggggacctgcttcctgctcttcccggcgagccccccgcccccgcgccgccgcggagccacttacccgccgcctctgcccagctcccctcgcgccagacagacggcgggacggacgcgcggccccgcgggccggcggggcgggcggccgggccgagggccgggggcggggacggggtgtcgaggggcggcccctgctccgcccgcagctcccggcgctgtggctccgactcgcgctcacgctcgcacttttccccgagccgcgtgatgtcacgaggaagcagccaatcgtggcggggccgcgccgcccgccccgggccggtcacccggcggcgacgcgcgggggtcaacacccgaggcgtcg

SEQ ID NO: 235572 - DNA, 69 bp, Homo sapiens
  chr11:46413705-46413774
  hyper
tttcgcgcctctccgggacctcagcgccctgcgtggccccgctggcggtttggccgcgaggcgcgggag

SEQ ID NO: 235573 - DNA, 203 bp, Homo sapiens
  chr11:46414438-46414641
  hyper
attaagcttaagacgtctgatttcttctctcggggaaacaactcaagaccctcccccgagggccggaggtggtgagggcgattgcgggggcggcggtggaggagaggcaggagcctcttggcagagaatgggagggaactcgagtagaagccagcgctgcggggctcttggtgtggggttctccgcgcggaacccggaagtgg

SEQ ID NO: 235574 - DNA, 72 bp, Homo sapiens
  chr11:46638624-46638696
  hyper
caaagtctgattgcgccggccactcagttagcccaggcccgtcacccacctctccgcggctgccaggttacc

SEQ ID NO: 235575 - DNA, 349 bp, Homo sapiens
  chr11:46867728-46868077
  hyper
ctcgagggcctcgcgggtggggcaggcccaccgaccactcacctcagctgggtcagaaccaagcggcctgctctaagccgtttgaaaccgcttgggccgccgcacaccccgcagtgtcctcgttctttattggtcctcgacggaccgcccatcggacttttattggtccatttgaaaggcctgtgggcacgcgccgcccgcagccttaaaggggccgcgcgcagccgtgtttccctctggaccagacgccgcctgcacgggtggggacgctggtcgctgccgggggcaagtctgccgactccagaaagaaaggcgaaagaatgtgtgtagacccgggcatccttggtcg

SEQ ID NO: 235576 - DNA, 349 bp, Homo sapiens
  chr11:46938421-46938770
  hyper
cattcctaccccagtagggccgctgtcccaacacgccaaagaggctacaaataaccttccaggagagagccggggaggggagagcgcagagcggagcggaacgtgggccggccaagctaccgctcttcggagagaaagagctcagtccgcgctagagaggacgcggaaaaaagcccctgaaaacccacaggtagtttaaataagagacatgaaaactctgttttggatttgggaggtaaaccaatctttaaaacgagtgcctagacatctccacgccctgccaggcaagttcggaaatctgcactgactttttccacacgagctgtcctacgtgaaagaaagaaccggt

SEQ ID NO: 235577 - DNA, 46 bp, Homo sapiens
  chr11:47198542-47198588
  hyper
accaatgggcagccggcgggacgggggcggcgacgacaaccgcggc

SEQ ID NO: 235578 - DNA, 771 bp, Homo sapiens
  chr11:47208475-47209246
  hyper
cagggctgggactccaaaaccgtgccctaccgttccacagctgccctgctaatctggggcgccttctaaggcctgagacgaacacgcggtgggggtgggacaaaaaggcctaagctcctcccgctccgagttcttatttccagattttgtaccacgattcattcttacccttcgcccctccaccccctttatcagtctggtacatttttccatatcgccacgatgccaccccacgctaaataaatcccttctccctcctctctccctacttccctctccccgctttcccccgggggtgagattttgcagagcggctccgtctgttatttatatccactggagcggtccaagaatgttccgaagctgacctaatcgccacctgctcggcctctccgcccctcccactctctcctgggcccggtgacccagcggcggtgccctgagccttgaagaccagggggagcgcggaccaacggggtcgaacgcccgggcgcagaaggtcccggacgcagaaggtcccgggcgcgcagaatcgcagcgggtcggagagccccggcgctctcagaggagtgcgcccccagggacgcggctctgagccctgggaagctgaggcgcctggctgcgccctctgaagctcgtacttttcctcccaccctcagctccctgaagagtgtgagtgcgtgcgcgcggagttttaaacggcagctttaaaaatagcaaaattatgttgtttctaaatccaggaggaatcactgacgcgttctttacgca

SEQ ID NO: 235579 - DNA, 51 bp, Homo sapiens; identical to SEQ ID NO: 202544
  chr11:47237126-47237177
  hyper

SEQ ID NO: 235580 - DNA, 246 bp, Homo sapiens
  chr11:47279142-47279388
  hyper
cagtgtcgcaattccgggccgtgctgggacctttgctccacgaggtgcctatggaggggagggaacacgattctggaggctgctgggattggggtgggggttcctgggaggcagtccttttgcaagagctgctaagagcgctgggtaaggagaggaaggggagagacatggaacttggctggtctgcagggaaatgccactgttttggccgggagtagggggcgggagtggcgggagagggggtgg

SEQ ID NO: 235581 - DNA, 81 bp, Homo sapiens
  chr11:47447397-47447478
  hyper
cacaggagctgtgcgcccaccttgatctcactgtccagcagccgtgtgcgctggatgatctcctccgtggacatcttgagc

SEQ ID NO: 235582 - DNA, 62 bp, Homo sapiens; identical to SEQ ID NO: 202545
  chr11:47448209-47448271
  hyper

SEQ ID NO: 235583 - DNA, 150 bp, Homo sapiens
  chr11:47600837-47600987
  hyper
gttctgttgctgccggtgaggcgggagagcgccggggccgacacgcgccgtgagtatgtgcgggcagcgctcttctctgaactatcggcggggccccttagatgcctgtccttgccctaggatgcccttccctacgtcctcctggcaaat

SEQ ID NO: 235584 - DNA, 154 bp, Homo sapiens
  chr11:47664236-47664390
  hyper
taagggacagaggcgcatgcgttctgccgggggctcgcccttcaccaggaatgacggtttctcttgcacatgcgcttccaggccgcaagtgtccggaaacagaagaatgggagtgtcagtgggggagtgtgaccgtgacggcagaggcaaggtc

SEQ ID NO: 235585 - DNA, 32 bp, Homo sapiens
  chr11:47789176-47789208
  hyper
acttccccacttccgtcgggttccacccatgc

SEQ ID NO: 235586 - DNA, 249 bp, Homo sapiens
  chr11:49229744-49229993
  hyper
accagcaacaggatcccactcggcagctgacccgcgagtcccagcaccgcggcaccacggggaagactccgaggtttgctccgcgaggcgcccccctaccgaagaggaagccgaggagaaagaagccacccgccagcaccagcgccccagcgcacagccagcgcgggcggcgcgcggtggccacagccgagtcggtttcgtgaaggagattccacatctcggcgcgagcagagccggcctcccgggacc

SEQ ID NO: 235587 - DNA, 139 bp, Homo sapiens
  chr11:57056831-57056970
  hyper
agagaaaggcagctgtttcccgaaaacaaagggctgggtcaataaatctgccgcagcagccgtggatcagtgagggcaaaggctcccgcggggagcagccagccagtttctctgaaacgtctagaacagagccatccag

SEQ ID NO: 235588 - DNA, 175 bp, Homo sapiens
  chr11:57092401-57092576
  hyper
cgtcaccgcgggacgaagccactgcgagccccggcggggccccgccccaactccgcccaggtccacgcccccagggcgcttcatgaatatgcatgagccggttggaacccgggagtgggaagcccgtgcagaattcgtcccaccgtcggcaaacaggcgcggcccagcactcaat

SEQ ID NO: 235589 - DNA, 231 bp, Homo sapiens
  chr11:57103415-57103646
  hyper
catagagcgtcagcgactctggaggacctgagggaagggtggttgccgtgaagcctctctcacccagggggaatccggcctagaaaatgtgtgtagggctctttagaaactacagacacttcttcagtcgagactagatactaaagagaaattgtgtagttttattgtatcagacttagtacaggggtggggtgggggtgtgtattggaatgatgcgtgcccgtttctctg

SEQ ID NO: 235590 - DNA, 629 bp, Homo sapiens
  chr11:57194105-57194734
  hyper
cgaattctgaataccgtcccctaaaataatgacagcaactcaaccaggtgcagaggcagggagatttcatacagaagacacaaactcccgctgccaagttggtgttatcttcagtttactgacaatgaaacaaaagctcccatggatttcaggaacttgcccaaggtcacagggctagtttagtcacgacgcaggccattctactgccagaaatacccccaactcccatgaccctcgcctaggactcgcaaacctggtccccgccgcccttcctcgcatcaacttctaccaggaaagcctccgggggccgctccccgccagcctccgcaccccgctccagcctgcggcctgccctccccgcagaggagcccgaggggccaggccgcgctcggcgccccatggcgcccgaaaggggacccttcgccctacccgcctgctccgcgccggggctctccgcgccctttccgcacgggccaggttcgcattcgcgcctctcgcagcccctcccagtcccctgctcgcctccgccccctcctgcccgcccggaaggggctggggcagacctcccactctccatcacttccttcttcttttcccttgctcacagcctcccgcgccctttttacctc

SEQ ID NO: 235591 - DNA, 42 bp, Homo sapiens
  chr11:57243625-57243667
  hyper
cccacccaggatgacttgttcgcggacctggccaacctgagc

SEQ ID NO: 235592 - DNA, 79 bp, Homo sapiens
  chr11:57244387-57244466
  hyper
cggtgctgagatcgaagaggccagtgtccgatccccgcttcccgtccacccggggctgcggctccggccccagtcgccc

SEQ ID NO: 235593 - DNA, 78 bp, Homo sapiens
  chr11:57298238-57298316
  hyper
gggaggaaagtcccgcctcttctttgattcaaactcgcttccggaattaaataccaacgagacggcgccgggaactcg

SEQ ID NO: 235594 - DNA, 79 bp, Homo sapiens
  chr11:57334771-57334850
  hyper
ttcaggcaggaaaagcgaaattgaaaccagttttgggggagccggctcatcttcaccacgcgaacggctcaagcagagg

SEQ ID NO: 235595 - DNA, 53 bp, Homo sapiens; identical to SEQ ID NO: 202548
  chr11:57365687-57365740
  hyper

SEQ ID NO: 235596 - DNA, 177 bp, Homo sapiens
  chr11:57414486-57414663
  hyper
cacagctgtaagtgcggtgacagcggggcagatagctgcggaaagtcttggtggggaggcaggcagggcccggaccggggtcacagctgggcatgacgggctggaggacaatgccctggtgggctggaggggctggcgccgtgcagcccccgcagagacggtcgcaggtgaagcagc

SEQ ID NO: 235597 - DNA, 39 bp, Homo sapiens; identical to SEQ ID NO: 202549
  chr11:57417004-57417043
  hyper

SEQ ID NO: 235598 - DNA, 109 bp, Homo sapiens; identical to SEQ ID NO: 202550
  chr11:57425067-57425176
  hyper

SEQ ID NO: 235599 - DNA, 103 bp, Homo sapiens
  chr11:57479590-57479693
  hyper
gtgcggttgggggcggtggtgggtcagcctgagccccaaacagtgccgtgaaattctccatcgtaccctccgccccggcgctgtctccgtgtctgccgttggt

SEQ ID NO: 235600 - DNA, 116 bp, Homo sapiens
  chr11:57480293-57480409
  hyper
tgttagtaccccgcgaccttgactgtccctgcccttgcaggtgtatctgggaaccctggggtttacctctctgaggacacctgaggttccgagcctgtagcggacttagagactat

SEQ ID NO: 235601 - DNA, 39 bp, Homo sapiens; identical to SEQ ID NO: 202552
  chr11:58345681-58345720
  hyper

SEQ ID NO: 235602 - DNA, 165 bp, Homo sapiens
  chr11:58668331-58668496
  hyper
ttaagggaatcttcgagtccaagaacggaagctaccattggccttaatcttcacctcccgcttttcttccctgcttcttttctcctccctattccagtaggttagttctctggcgccatcagctggcagcacgcgggaatataccaaacgcggaaacgcgccttc

SEQ ID NO: 235603 - DNA, 542 bp, Homo sapiens
  chr11:58672747-58673289
  hyper
ccctctagacctcacgcagacgcgggtgcagcctgctctgcgacttgcagtcagctggaagctgggcctctgcatcatcagggtggagctctctctgctgctgccgctggatcccgcctggatgcacgtcccgccaccgccgccgacccatcagcggcagaagggcagcaatggccacacaccgaagcaccttggcgggctattccccttgcagctctcctcagcgcgctgctcccactcgcaatcaaaaggcggaaaaagcgcgaaaccgccaggcatctcccatacccacccggctgccgcgcaacccctccttggcttccactgggagacaggggacgccgatgagcaggaagaagcagggcagtgactgcttagtttatcctggtacgcgggaactggctgtggaccgagtggttcgggggaggggatcgctgggaccgggatgggtcatctggacaaatagggagggtgggcgggtgggcgcgcagtcccctcggcctggccgtctgacccgcccgcgagcgcgtgcgcccaggcgt

SEQ ID NO: 235604 - DNA, 429 bp, Homo sapiens
  chr11:58912103-58912532
  hyper
gctgtctgatataaacacagcgtcaagtactgcacgctgtagctacctgaggtttaggccggaagaggcacggctgatttaaaagtgaaagaaagtaaccaattggttcgcagacaaccttttcccaaaaggcgggcgattcaaacccctagccccacctgctccgtttcccgcccagctggagctctggagcctttgcttcctcaaatacgagcgggaactgcgttgagcgctggattccaggccgagtgctggcgaggcgcgcagtgagtgagcacacagggcgctggggtgctccgcggggcgcggtcacgggcgcggccgcggcgggctcgagtcccggctgggaggagaaggagctgggtgtcaggaagccggggactgacagcgccacccatctggggagccgggaggacacaggttttattt

SEQ ID NO: 235605 - DNA, 532 bp, Homo sapiens
  chr11:58940404-58940936
  hyper
ggtggtggtgggaggcgattcactccgctgaatcctcgcaggatcctccctcccccttaaacatccatgcaaatagtatcagtgttgtggttttgcaaacccagcttcaacctagtcggtaacaatccactccccacccctttcatgcccccgcttttcagcagttggtggccctaagtctttctatgtagaaattctagggccgccccagactacaggcaatcccagcccttcgcaaaggcttcctgccctcatcccgtggcggccggcaccttggctgacctgaccctgttttgcttcaggcacgctggggcttgccacacgtcccctcacccccgatctcactgcctctgcgtctcctgtgtgggatgcctccccgcagctgggtcctgggtgtgggaactgggggaggaagaagggattccccggaggttctcgctacagtcgggtaagggaagcgccgggctccctgggaggagagactagggctggggtaccctggacgccgcggcattggcgaatgcctctgcta

SEQ ID NO: 235606 - DNA, 142 bp, Homo sapiens
  chr11:59317876-59318018
  hyper
gcgcaggggcgagcgaagcctcggtggagcggagccgcctgcacctccagagaggcgccatacgggggccgccgcggaggccgactcagcgccgagcgctaagagaaaccgggctgatgcagcaggcgggaaacaagccgta

SEQ ID NO: 235607 - DNA, 356 bp, Homo sapiens
  chr11:59323832-59324188
  hyper
gaagggaaagaatgcggccacgtggcctattttcctgtggatagactaagcaaacgcttttcttcaggggcccggatagctcagtcggtagagcatcagacttttaatctgagggtccggggttcaagtccctgttcgggcggatgctgttttagtttccaataaaatggatttgggcgaggctgagagaaaggaacgttatgtgaaacccgcttggggtgcctcctccttgagggaaaccagaacttgctagtgggttcttaccggaagaagtgaaacgtgtggaaaatgccaagaaactttatcttccaatagcaggcttttcttttccaacctttatacgttgctttgtctta

SEQ ID NO: 235608 - DNA, 540 bp, Homo sapiens
  chr11:59333339-59333879
  hyper
cggtccttgttacggtttaaaaagctggacaaagcccgtgcgccgaacgctttcgaggacttctttggccaagagggggcccgggctgtcaccattcccggcaagcccgcgaccaagcaggcagcggaggcggcgcaggccgagagctcccgcccctctgacagtgagagaagggtcgcagcgcccacggctgcctagaacccgaaagaagaggagcggggtgcggggacacagggttgctcaagaaagtgagctatgcgcagtgctccggaagagcttgtctcaaaccaggtcccaagtgagggcagaggcgtaacttcgtactgggcagtttaaaaggtaagacatatgtccccagtatcctccctcccaggggaaaatgacgataaggtttcccttaactgccccagcccgcgtgagaacccacagggtgttgaccctgttaactgcagaaagaccctgttaactgcagaaatcacatgtagtgatgactaacgcctaaaacggaagcgctgccgaaacccgggattgaaccaggga

SEQ ID NO: 235609 - DNA, 198 bp, Homo sapiens
  chr11:59383395-59383593
  hyper
ggtgggacgcgtccgccagacccacctttgattggttcagataaaggccaatcagacttttggggaagctcattggtgctttcctgaagtttccagcgctcagggaggacgggagaatgcggaatgcccggccaatctgatcgccgattggctgctgtttccgccattcatttcagtttatgcgcctgtcactgccac

SEQ ID NO: 235610 - DNA, 55 bp, Homo sapiens
  chr11:59578500-59578555
  hyper
tgttagtgcctgccggttgcttagcaaggtggtcccttacgattcacagcctttg

SEQ ID NO: 235611 - DNA, 267 bp, Homo sapiens
  chr11:60674118-60674385
  hyper
gattgactcggctcgttccgtaaagcgccggaggattggctggggcgtcgggagagaggaggctcgaaactacatttcccatgacgcagtgagaatttaaaaccaaaacaattggacagcacttgttttgacaactgtgcggcactgtgccacgggaccctggtctttgaaaccttggcgtgcgcgagaatttcccagtgagtttgttaaaatgcagattcctcgggtctgcgtagacagactgtgccccacgcttttctaagtcag

SEQ ID NO: 235612 - DNA, 636 bp, Homo sapiens
  chr11:60718601-60719237
  hyper
ggtcccagcggcgacgcgggcatctctccgcagaaggagctgcggccgtcggggaaggcggtggcgggcagcaggcccgaggcggccaggtagagcagcaggctgagcgcgaccgcgcggtagcggcccaggtacacgtcggccagccagccgcccacgggcgccagcaggtaggaggcgcccaggaataccagcgcggcgcgcgtcgcctgctcgccggtccagttgaagttggtgctgttgaggtacagcacgaggttggcggtgacgccgaagaaggcggcgcgctccagcatctccaccagcagcacggccgcgcccgccgcccgccgccaccgtcgagggccccgcgcaccgcgaggcagcagcggctggcgctccccgggcacgcggggctgctcccgggcgcgcggcgcgggcatcctggctccgggctgggccccccgcggctcttctctcctctcctctccccgcctcagagccctgcactcctgcccccgggcctcggccctctcccccacccaactggctggccctcctttctcaccgctttggcccacccttccctcctgtcccctctccctttcttgccctacccttcctgtccctccgctcactacccggactctaccacct

SEQ ID NO: 235613 - DNA, 45 bp, Homo sapiens
  chr11:60737965-60738010
  hyper
caccagagggcagcggcagcaggtgccggcgctggggcaggactg

SEQ ID NO: 235614 - DNA, 306 bp, Homo sapiens
  chr11:60928909-60929215
  hyper
gcgcccacacttccggggtccgccaggcccgccccctaccggatgtgacccccttgcaacgtccggcgccccagtggcgcgcgtgctcgccccgcgaccccgttggccgccccgcctcgcgcgcctctgagttaccacgacatcgtgccacacacacacgctcgcggccgcccgggccacaaccacgggagcgcccacgagacccctccagcgctcgccgcacgcctcggccccgcccccggtaagaggccccgcccactgggcggagaccaggccgctctgggctagtgcgccggcgcggacgtc

SEQ ID NO: 235615 - DNA, 149 bp, Homo sapiens
  chr11:61062456-61062605
  hyper
cccggcagcaggagcgcgacacaggcggcccgaaggagcagtccggcccacatgaccggcggcggcgggtcccccgggctgggctcggctcctgcgccgcgcgcgggagagggggctgccggccctcgcccctcctcctggcgccgtgg

SEQ ID NO: 235616 - DNA, 118 bp, Homo sapiens
  chr11:61100429-61100547
  hyper
ttgtacgacatgtcgaggcttggagcggcccgtcgggactcgagcgcgacactagaaagagggacacaagcgaaaagacaggtggcccccaacagcgcgcagcgaactccactgccgc

SEQ ID NO: 235617 - DNA, 128 bp, Homo sapiens; identical to SEQ ID NO: 202560
  chr11:61159724-61159852
  hyper

SEQ ID NO: 235618 - DNA, 224 bp, Homo sapiens
  chr11:61160436-61160660
  hyper
atgtctgtcagctgcgagttacctcttgacttttattcctgaagccgaagagtcgagtttcacggtgattcctaggaaaggagggaagccccctccactcccacccccgtaccctcgccccctcattatcagcaaccagaagtgcccctgagtggccggtcccattagttgcagcgtctagtttccccaaagttagacaccaacccatacgagcagagagggag

SEQ ID NO: 235619 - DNA, 152 bp, Homo sapiens
  chr11:61197745-61197897
  hyper
gtctgcccgatagcgcagggcaagggcaggcccagggagaggccgatcctgcaactcaggaaataaaggtcgcttccattctttggtgagcctactgtgtgccggtctggaaatatctgcttaaacgatcagtcatcgtccaagacccaatt

SEQ ID NO: 235620 - DNA, 322 bp, Homo sapiens
  chr11:61275812-61276134
  hyper
ccagcaggtaggccggccgcacgccgctggacgtgaatggctcgcagtgaccgcgcccctcagcccctccttgtgagcctctagtccagagtctttgatccaccgccagcgtttccttcgccttcttggacccgcggctctggggcgcacacaaccgcacaccaaacagcgtcgggcgtcgggtctcagtgccaggcttggccggggcggggaatctctcggcttgtgcttgctccgcggtgggctggatgggcaggtagggggcgggctccggcgctgggaccccactagggtggcgccttggccccgccccgccccgccc

SEQ ID NO: 235621 - DNA, 79 bp, Homo sapiens
  chr11:61276314-61276393
  hyper
gccccgcacggcccccctcccggcgcgggggaaggccggggcggggggcccgggggccggcgcggctccggcaccgtcg

SEQ ID NO: 235622 - DNA, 599 bp, Homo sapiens
  chr11:61334794-61335393
  hyper
atggagccattgagcgccccgccccccagagctgtccaaggtgctgaaacagctgtcggccacgcggctccttgtccttggtgctgaaacagaactcagtcctggggctgcgccctcttccaggtcgccctttgcgcagctcccagcgagcaggatccgagagactgtgcatagtgattccgccttcctctgccaatgcctccctgatcaaccctcagctgaagctatggcagcacccagtgacctcaagagccccctttcctcgagttaggtcctcggatgctgaagaccccagtcctgactcaggacaaaaagggccgccccgcgaacgtggtaaataccacgccccattccctcccgggggcccgccgcactgcctcctggtggctggcgcgggcactgcaccccggcgggcgcacagacggtccccagcggcggcctgggccagcggcgaagcagcggcagacggttctccggcccccgccgccccctcaccgctcccggggcaatctggcgctcagagcttgcggcgttgcccgacacccgcacactccagcctgtctgactgcatcctggccgctttggggctgcctgggtca

SEQ ID NO: 235623 - DNA, 217 bp, Homo sapiens
  chr11:61355115-61355332
  hyper
gggcgggggacgaggcgtctccgctcttaatagctgagcgcccgcaaacgcccggcctgggctcgaggcctgcccctccagcgacgggcgcccccaacattgaagtctttctctgcaacttggacggacccaccccgagcgccccgagtatccggcccggggcagagatgcgcgtgcgcggagggggtgccgcggagcccgcgtgagcagacaaatt

SEQ ID NO: 235624 - DNA, 406 bp, Homo sapiens
  chr11:61447552-61447958
  hyper
cgctaaaactggtcacgagggacctaaaggaggggcaggcacccaggcggctcccttccccgcacgcatcgcggccagtccagcccctcccggccgcccacgggaccccagccgagcctgagccaggcgcccaccgcccccacgcgcagggccggcgcccgcggaagactcggctctccctggcctcgacgccgctcccctccctggcgccagggggcgctgcctccccacgaccgtcgccatggtcaccgctggcggcggagaggggtttacgtaaaggacgcagcgtcccccggggggcggaggcggccttcgcgccggcgccggcgccctgcggaagcggcgttagtgaatcggggccttggggagcccaggatggaggtggcggtcgcggcggcgggccgag

SEQ ID NO: 235625 - DNA, 177 bp, Homo sapiens
  chr11:61519848-61520025
  hyper
acccgggaaggccccgcgcccctcaagcctgggacggtctcgcgtcccccgacccgggacggccccgcgccccgcaagcctaggactgcccagcgctgagcgccgcctgcaggagtcgggagcgtggtgcccgcggccgggctgggcgcggcgcgggccggcagggggcgctgggcg

SEQ ID NO: 235626 - DNA, 102 bp, Homo sapiens
  chr11:61520265-61520367
  hyper
agagaccgcgggctggcggcggcgaccctctggcgctgggaacccccggctgatctccccgggaactggggctcctcgctgtgtttccgcctcctctggctg

SEQ ID NO: 235627 - DNA, 166 bp, Homo sapiens
  chr11:61560143-61560309
  hyper
acttgtagtcctgcgatttcgggtgtagagggagcaggggcctgcggggacctggtgtgggtggagtggggacaagcggtggagaagggtacgccagggtcgctgagagactctgttctccctggagggactggttgccatgagagcagccgtctgaggggacgca

SEQ ID NO: 235628 - DNA, 2274 bp, Homo sapiens
  chr11:61582553-61584827
  hyper
gtgcaaggtaaggtccatggcgataagattcacgttggcaggtccggcagccccgggccctgtaagtgatgcggcgtgtggggcgggggccggggcggagccggcggccggtggcaccacacatacggaccaatcgccgtccccgccgcggcattcccggccccaaatcacactgcgggaagctccagcgttggtgcctgtttcgtctgcgcatgcgccgggacacgcctgcgcccttggccgcagtcagggctcccgagtggtcactctggttgacccgcgcaagctctggcctcgcccactaggctggtcgcgtcagagggtggggcgggtcttcgccccgcagcgtctaagctctgctgcgacgttatgggaacctggtgacccgcggcacactctgggacgccagggtagtggatagggacagtggagggcatcacgctgcagggcacgggatcagagggggatgcaaggggaggggacgccattctggccgccaagggggaaacgcggtgaagggaacgccccgactttcgagtccctaggactgagtccccaggactccaacccagcagagaggcgccggggccttagctctgagggctgtggtctagaaagggaagcagcaggcctggggctggggcgcgcgccgaccccgcagtgagaccaagggaagaagggacaggaccccgcgaagggcctaccgccccagagcgtaaacagcggtccgctccgcggaatagctgaagacctcgctggcctgcggctcagtggcctccccggcgattcgagaacagctctgggggtcctcgctaagtgtatgccattcccaatcccttatgtacgccagcggccgcttgccctccccggccagcgctgtcccttccgcgtcctccagtcttcacacgacgcaggggtccccaaggcagcggtctccccaagcttcccgtttcagccccatcctcgagaatgggctcctttcctgctccctctccgctcctgctggcgagtggagaccggcacctaggtccagacgcggctgcgctgcctctcctagccatcgagacaggatgtgactccctcccctggccactgaccccctccctccccaggcggcctgcatccttgctctcctccctcctagcctacccagctcggggttctgtccccgcccagagacctgaggctcggggctgcagatggaatgcacggcagggaggcgggaccctttgtttgtgtgtgcgtgttgttggcctccatccccactccccagactccacttctccaggcctctctcccgccttttcatcccgcatccgcaggacacccaatcaccgggcaacaggtatgatcaggcgcctccgggctttcctccgaattagtcggtgtttggctcggagtgcgtaactctgtctcccctgcactcagcctccggtcccgccctctcctgtgcccccgcctggctgcgctcaccgtggcatcctgcccggcgtagtggctgatgacccgggagccccctggatgccggcgggtgaactcgctgatgttgtacaccttacggtcgatcactagccaccgctcctcgcaccctgagcgctgggccacctcgtcccaggtgaagtagcgcggggtaggtccctgagccgcggtctcggcggccaccgggtcgggggccatagctggcctggcgacgccgcgcgccgggccagcaggggctgtcaggcgcgtgctcggggtccgcgggctccaggagtggatttgctggcgcgcgcccagagccagccgcctgcgcgccgggttttcagcaccgcagggcagaccggcgggcctcgcagcgcgcgttcccattggccgagcctcgtggcgcggggagcgagatcccgtcccccggtgggtcttgggcaactcacagctgggctgccaacacgcgccccctcgcgggctccctaaaggcgtcgccgccggattcgacttcctgacgtcaggcgggcatcgcggcgttggctcccagggggcgccgcggtaggaacagcggttctagtgcaggccctgggtgcggggccgcgctgcaggagtgaatggactgaggggccagggctgcggggtggccgcaggaagggtgggcggggccggggttgaggtttttccgtgcacgaggctgcccgggcggtcgcggacatcatctttaggctgtggatgccttggccggggtctccagacgctgaccctccagggttggaaactactgcctgcttgccacgtcgtgccgccaat

SEQ ID NO: 235629 - DNA, 634 bp, Homo sapiens
  chr11:61684588-61685222
  hyper
tgacgctgtcaccccgggacggtcggctgcccacccttcgcaccctgcaccccgagagacacccccgacccctcccccggagtctcctggctgcaagtcggctcgcctgcaggcagggcgggggcgcacagcacctccgggtggcggcgcagacccggcggggacccccgaaatcctcccgtcccgggaggcgaccgcggcccagacccagcgcgggaccgcgagcgcgcgcggacctacccgctccacatcccggcgcctcggggcgcccaggcgtccgttcccagcgccgccgcgtcctcccagcgccgcgtccccgcccgccgccgactccgccaggggccgagccgccccaccgcctgtcagccctgcccgcggccggtcagtaggtctcagacgcctgggctcgcggcccccagcccagccccgaccctgccctgggcgggtcacgtggcggaggggggagcggcccgaggacacgtgcccggccccgcccctccgccggcccggcgctgggatccggcgcgcgctcccaaggcctggccccacccggcccgccgcgccgggacagggagaccacggcgctcggagggaacccggcccccaacatcccgcgggccgcgccgcgctcaga

SEQ ID NO: 235630 - DNA, 647 bp, Homo sapiens
  chr11:61722651-61723298
  hyper
atccccatttccttcgtgctgggtgagttcccccttctggctgttccgggtccctgtggccgcccaggctccagacaggccaggggaggatcacgaggagctgcggcaaggggctggggagggggcgggggaacgccagcggcaggtcggcgcctctctgtagggaaaggtgcggactgcagccagtgaaactgaagttagacgttaggtaagacgtcctgccgttagcaatgaaaaccccattttctgagggaagcgctgacatcatggtccctggagcccctgcgcgggaggggagggggtctggcggatttctgggaccagcagggggacccccgggtgacagaacccttggggctctcgcgcctccatgcgaggctctgcctgcctctcgctcccgagcgccttccaggagggctgggggctaggcccgctcgcagcagaaagctggaggagccgaggcatcgccgggcgctgggccctgggctctggccgcagcctggcccctcgcccctcgccccccgcccctcctgcccaggcttctacgtgacgctggtcgtgacccgctggtggaaccagtacgagaacctgccgtggcccgaccgcctcatgagcctggtgtcgggcttcgtcgaaggcaaggacga

SEQ ID NO: 235631 - DNA, 35 bp, Homo sapiens
  chr11:61735124-61735159
  hyper
tctcttatagccgcgtcggcgtcaggcccgccccg

SEQ ID NO: 235632 - DNA, 175 bp, Homo sapiens
  chr11:61793163-61793338
  hyper
gcagtcagcagacacgtacgggatgtgggaggtttgttttgaccacacccctgtcaatagttacaagataagccaaagcaagaagcacagacaccatgcctggcagaaaagcggccgtttgcggaactattttatgtaacacaaaaccacgttttcggtccgtaaggcagggtct

SEQ ID NO: 235633 - DNA, 42 bp, Homo sapiens
  chr11:62313927-62313969
  hyper
gcgccccaactccagaggcagaactccgctcccagagagcga

SEQ ID NO: 235634 - DNA, 301 bp, Homo sapiens
  chr11:62314747-62315048
  hyper
tggttcccaagctccgtgctgccgcgcccatttctcgcgttctctctttctgggggcccctccgtccatatccgcacagaactggcttggatttccaccccccaggagccggggtcaccagtgcctcgcgcaccgcggtgctgcgcaggccgcgggcatacgggggtgaggaccccgggcgttggacagcggacccgacgcccaccttcctctccagactcccgcccccaggagccagagccccagcgcttcctctgcctcccattccttctctgagcgccgcccccgcctccccacttgc

SEQ ID NO: 235635 - DNA, 32 bp, Homo sapiens; identical to SEQ ID NO: 202569
  chr11:62359274-62359306
  hyper

SEQ ID NO: 235636 - DNA, 103 bp, Homo sapiens
  chr11:62369579-62369682
  hyper
ttgcataaatggtctacgctcccttaccctttccgcacgcctcttttccttcgtccccaccccacagagccccggaggcgcccggcagcgccccacaaaagca

SEQ ID NO: 235637 - DNA, 49 bp, Homo sapiens; identical to SEQ ID NO: 202571
  chr11:62369884-62369933
  hyper

SEQ ID NO: 235638 - DNA, 445 bp, Homo sapiens
  chr11:62389462-62389907
  hyper
gacgaggggttcccgccccaaaccccggctcctgtccgcaggccccgcccctgcagcggctccgccctgcgtcccgccttcctcgcactcccctaccagctcccagctggggctggcagcgccgccagggcacgcttccggtcatctgtgcacccccccgccttgtagacttgatttccggtcccaccgccaggttccgggaaccaccgggtggtgacgtcacatccggcgtgccaaactcgcgtggccggcagtcaaaaccccgggtaggtgcagaatctcgagtaggtgcacgtggtacctacctcgagacccgccccctcatcacggaattgcctgagaaagccagtcctggcgcccagatcttcaccttattcatccatccagtcagtcacgccacccaatagctgttgctcaatacttattacacgaatgaaatctaagg

SEQ ID NO: 235639 - DNA, 232 bp, Homo sapiens
  chr11:62413282-62413514
  hyper
acgctttcttcatcgctttggagagtacacgcctaccccaccccagtatatccgttaggtcctagtaaacatttgtggcactggtgatatgtttcgaatctttttttttccccagtaatataaacccgagagcgtggaccaagccattcgattacatgttgtgtttgagcaacaccatccacgccgtgagcttactggaccctgggccgtgcccagcgaccgtggacactga

SEQ ID NO: 235640 - DNA, 68 bp, Homo sapiens
  chr11:62414222-62414290
  hyper
ttatcgcagggggcggggcttcaggccaggggcgggaacgtccagagccaggcgctgtcagactttgc

SEQ ID NO: 235641 - DNA, 395 bp, Homo sapiens
  chr11:62420564-62420959
  hyper
tccgggtttctaccgagaaggctagggatcggcgcggggccgcgcgatggggggaaggtgccaagggctctaactacctgagaggcgcgggaccgtgggtggccggggcaggcccaggtggccctggggccccgggagggtcgcacagcgcggacatcccggagcccgagccgagcccgaggcgcgagcggcggagcgcaggcggcgcatgcgcgctgacaggaaacgcgaaaggaaccagctaccaggcctcgcaggaaaattaatccggcgatgtcctcgaccctcttacattagttccgcaccctgtcggagtcccagagcataatcccgggacgatgatagcaggaagccgattcgccctatatgcaaccactttattcaaaagcctattg

SEQ ID NO: 235642 - DNA, 618 bp, Homo sapiens
  chr11:62432819-62433437
  hyper
gctgtagtagccagattgggcggccgggagtggtgggggtgccgggtggaaggctctgggcggggtctcaggaccctccttttcttggcggggatcgggcttgtggtgccgctccccgtaatgtacggaggaagagggaaagggctctggccccctcggcgtcatgtcttcggtgctggcggcttcccatccgctggttctatcctcaaacgccgggacaccgggaatctcggagaaggacaaccgagatccagctggctcctccatcggggtgctcacactttctcatttgatttcaggtctgcggacgctgtataccctcctccacttcccgctgcagccaataaaggccgttcctaccatagtctgtgtccgcgttcttttttccgggactgcagagttcggggaagctgtacgccgcctttcgctacgcggaatttgcagatcttcccctggacctcaggcctctccggctggagtagggtggacgcttcacataagcttctctggtcgaacttacccgaatctccagatggccgcgctgcgtcgaatgctccacttgccgagcctgatgatggggacgtgccgcccctttgcgggtagggaggtgggggcaga

SEQ ID NO: 235643 - DNA, 81 bp, Homo sapiens
  chr11:62439248-62439329
  hyper
tcgcaatgctgggcgcaggggctggcgtgggctacgcgctcctcgttatcgtgaccccgggagagcggcggaagcaggaaa

SEQ ID NO: 235644 - DNA, 401 bp, Homo sapiens
  chr11:62476910-62477311
  hyper
aaaggtaaacaggccgaagaggggggatttaggggagggtgcgggagtgcagtcgtacagcagaggaactcttaggagggtaggggcggagcttggcttcagttaccgcgactggagccgattttatacctaagatggctgcgcccacagccactcccattccaagatggccgtaccaacatggcagcccccacgtcacggagtttaccgtacagggcttctcttaaaatggcggcccccaggcaaccggcgttctcaatatggtcccttccgccctcttctggtctcaaaatggctgcccctgccctaaccaagccggggcccgcgccctgcaaccccgaaatctggatttcggtgtcctcccgattgagtcgaaggcacacgggcggccataacgaaga

SEQ ID NO: 235645 - DNA, 249 bp, Homo sapiens
  chr11:62495747-62495996
  hyper
cttgcagctgtgacgcttatgtggacacctcagtgtcgctggtggttcacctcggcttcccagtttatttattgacgtcaacaaataaatgttgaataaggaagaagagttagaattgcttgaagccctctggagttttagcactagtcccgcccactcccttctacttccaggtcgggggggggcgggtccaatagaaaggcggaagccagtgtcccaggcgttctcacgcccgcaacaattcctgag

SEQ ID NO: 235646 - DNA, 257 bp, Homo sapiens
  chr11:62521741-62521998
  hyper
tgctcgccgccatcgcttttgcagtcaggcgttggattgggtgacgctcctgtcctcaacttttcctcttcgtcccgccttccttgcctccgagccctcaggattggctgagcttctccttctacctaatccagcaggcaggaggtacccggctccgagtcgctgaacgcggcgctctcctggcgaggctggaggtcgggaaccctgcagtgtcggacccgagctgacagcaagccactcccgctacaggctgacag

SEQ ID NO: 235647 - DNA, 454 bp, Homo sapiens
  chr11:62538724-62539178
  hyper
atcttcagcgtcacgtgaccgccggtctctacagtctgttcacactggccaatcaagagccaggaagcctcctggagggccggaaactttccaaggcgcccgccgactggctgtattggggagggcggggccggggccccgggagagggaatgagtgtgagctcgtgagtgggcgccgccgccaccgcccccgccgccgtcgtctcggtagcagccttcgccacgccggggtcttcaggtgagcaggccttgctctggtccaaggactccccattcccgacgccgactgcttactcaccagtcttggagcccgcaccgcgagggcccgcccccttggctgaccacgtgacccaagttcagtgacccctgacctcctccccccgcgcaccccctccccgatctgggctgggctaggccgggtgggaggatgcgcgttgccgaggcccggcccgcg

SEQ ID NO: 235648 - DNA, 126 bp, Homo sapiens
  chr11:62554789-62554915
  hyper
tgtaaataaatcccgcccccggaaatgacgtctccaccttcgtgggtcgcgccggataaggtgggctttgggcggggtgctgctgcagcggcgcttcctggtggtcagggcgccatggcgctgtcc

SEQ ID NO: 235649 - DNA, 410 bp, Homo sapiens
  chr11:62572860-62573270
  hyper
ctggccgctacgccggcaaacaacctaactcccaagcgctcaggaccgaagtgtccctacgccgggcgccaccgcatttatacagcaaagcacgtcgcgcgccgctgacgtcccaggctgtgggcggtgccgccgcccggagaaagcgcggccccctgcgcgtgcgcacacttaaggccgtcgttcgaggggcggggcctggccctccacgccccgcccaagacctgaacttgcggaaccccggctggcagccagcatgtccccgcaccttttcatctgtccgctgacgctgccctggcagcttcagagttagtgctagagcacagtgctgccgccgcagcccagaactcagtgaggaagggggccgcacaaagggcttcagaggaatggagaccgcgcctccaggtggg

SEQ ID NO: 235650 - DNA, 145 bp, Homo sapiens
  chr11:62609872-62610017
  hyper
taggggcgaggcacgacccgcaccttgcatttgtactgtccgccagcaaacatctggcccttcactgagagggaaagatgccctgagaaagccatttcagaggctcctgatcctcaaacccgggatcccgcggtgggagaaaggt

SEQ ID NO: 235651 - DNA, 610 bp, Homo sapiens
  chr11:62623424-62624034
  hyper
tacggcgagcgcacgcgcatacgttgaccgcatgcgaccccggggagttgtgggtagagagttccagggaaggagggcgtagacaaagcgccacctgaacttgcggcgcgaaaaaggcgcgcatgcgtcctacgggagcgtgctggctcaccgaccgcattgcggcttggttttctcacccagtgcatgtggcaggagcggtgagatcactgcctcacggcgatcctggactgacggtcacgactgcctaccctctaaccctgttctgagctgccccttgcccacacaccccaaacctgtgtgcaggatccgcctccatggagctacagcctcctgaagcctcgatcgccgtcgtgtcgattccgcgccagttgcctggctcacattcggaggctggtgtccagggtctcagcgcgggggacgactcaggtactggatcccgggctaagctcgggaggaggtcccctttggtggggccatttcgggaaagtatgtcaggacgtaagtgcttcactgaagacaggatctgattttttcctaactggttccctatgtcctgccttctggtgcgttttctttagatcttggactactacgggccaacattagc

SEQ ID NO: 235652 - DNA, 276 bp, Homo sapiens
  chr11:63438923-63439199
  hyper
actagccagaaggtggggcacgcggagccgcgacggagcgagcgcagcgcggtctgcgtggcccaacggacagcccgaggcgtggcgagcgcaggacgaggctaggcgaggcggggcgggaaagcgcacgcggcagaatcccgccaccgcctgccgcgtgtgcgcgaagcgagccgccgggtacctgttggcggggcgctgagtgctaccgtcctttgggaattgtagtcccgcgctcactgggtcccggccagcggtcctcatactgcgcactca

SEQ ID NO: 235653 - DNA, 239 bp, Homo sapiens
  chr11:63448768-63449007
  hyper
ggtccccaagggacgctccccaaccctcggcgcgcgaggcgccgcgtgaggccggctttgcccctccttccctgcaagagcgcagaggagcggttcttgcgcctgcgccctgcgccgctgcgcgctttggcacccgcttggggccctttgtgcgcatgcgcgctcgcgctcccgccctctagctgcgctcggctgagtcagtcagtctgtcggagtctgtcctcggagcaggcggagta

SEQ ID NO: 235654 - DNA, 209 bp, Homo sapiens
  chr11:63580539-63580748
  hyper
gggcatctgctggcggaggaaggcttgtccacggaaaggcaaaagcgactcccgatcaaaatccgggggcacctggtagcgctctccacgccagcagaaacgcccaactgacttcttaatggagggaaaccccgggcttggcccgcagactgaggggcccgcgttgcgggttttgggggcccctctgcctctgcgcaccgggtggcccc

SEQ ID NO: 235655 - DNA, 144 bp, Homo sapiens
  chr11:63606383-63606527
  hyper
cttcgtggatttccgtaaacagagccgaagcttcgtcttcggaatcgaggaggagagcgcgtccccggggtttaccttcttcggctgtttccggaattcacccgtagtctgtggccgggaggagaaggcgcgccccacctcccg

SEQ ID NO: 235656 - DNA, 184 bp, Homo sapiens
  chr11:63655734-63655918
  hyper
tctttggcagggccgccactctgggtcagcacatctgagtcacacatgttcctccccagccctattggaggctttgttaaagtcatctgcccctacccaggtcccacctgccacaggtgagctagggttttatgacagccgtggctgcagtgagtctcctcgacctctcgccagctgttaccca

SEQ ID NO: 235657 - DNA, 87 bp, Homo sapiens; identical to SEQ ID NO: 202579
  chr11:63684092-63684179
  hyper

SEQ ID NO: 235658 - DNA, 245 bp, Homo sapiens
  chr11:63705651-63705896
  hyper
gcacactgcggaagcgcccccggcggtttggattcgggtcacgtgcgggtcactccggtgtgctggggatgggttgaaattaaaactttccgggatgcctggtgttcacgctaacagcactgtccactctctcctaaacagtgcttacgtgcccgtctcccctctaaaccctgaggtgtggcgctgagatggcacctcgctcctctctgtgccccctgggctcagcaccgcgtagatgcgagtta

SEQ ID NO: 235659 - DNA, 324 bp, Homo sapiens
  chr11:63741835-63742159
  hyper
tttaggcttctcgcgtacatgattgggtggccccagatgtcattcacaagtataagccttggaggcggaacataactcgaagaagagcccttttgtgctccgcccatagcgtaggaaggtgtcaattggctgtttcgaggaacgcgccaaaaactgccaagggctgtgggaggtgtgttcttgcgtcatttccgagagacttccgcgccgcagtttccctgcttccccagctccagaacttccggccagcgcagccattttggcttcctgaccttgggctacggctgaccgttttttgtggtgtactccgtgccatcatgtccg

SEQ ID NO: 235660 - DNA, 205 bp, Homo sapiens
  chr11:63767759-63767964
  hyper
ggtccggcactcgtcggtaagcagggggccggcggcccgatgaatgcagccgtccactgcgggaagggcgggcgcgactgagctggcctggcaaggctgcggccccggggtgagcaccctcagtcccgagaagcccctcggcgatgcgaggacccatgcggagccgcgccccaaccccgtggcctccggccgcggccgctgcccc

SEQ ID NO: 235661 - DNA, 93 bp, Homo sapiens; identical to SEQ ID NO: 202582
  chr11:63803767-63803860
  hyper

SEQ ID NO: 235662 - DNA, 206 bp, Homo sapiens
  chr11:63828222-63828428
  hyper
ttcaccggaaaatgcgagactttcatttctacctctcgaatgcccagtctttgagtcctgcagcccccgggtcgcccgggtcccggagccggcgggtgtgaacggggccaaagccctccaggccgggcgtgtcagccccgcccccgaggctctttgcatattcatgaccttggcgggcatgcgcaccgcggcggcggcggcggcgg

SEQ ID NO: 235663 - DNA, 47 bp, Homo sapiens
  chr11:63933982-63934029
  hyper
gggcttctctccccgcgggtcagcagggcaccgcctccacaccccag

SEQ ID NO: 235664 - DNA, 69 bp, Homo sapiens
  chr11:63993861-63993930
  hyper
tgggcatttggggcgcctgaacccaagacctctggatggtagggatgcccgggcgtcctggataccctg

SEQ ID NO: 235665 - DNA, 71 bp, Homo sapiens
  chr11:64008118-64008189
  hyper
agcccgtgttacacgcctgtattggatgacaaattctaccaagcacacagccgaccgggagttcaaacgtg

SEQ ID NO: 235666 - DNA, 309 bp, Homo sapiens
  chr11:64009405-64009714
  hyper
cggccccctgcagcggccgcagaggtgttggtgtgctggaccgggggcagctgggtgtggcgtgagtggggccgcccagtcggggcaactgcagtgcagccagatagggtctggactttgcgtaaagggacaggcgggaactgaagagcggaggtggggactgggagggagggaaggtatgggggtgagcaaaggggcgggtccctggctgctgtggcctcccctgaccccctccccccgctgctggggtcctcggccaagcccccttctcactggactggtaagtgtggccccggagcccgggggaga

SEQ ID NO: 235667 - DNA, 45 bp, Homo sapiens; identical to SEQ ID NO: 202583
  chr11:64038085-64038130
  hyper

SEQ ID NO: 235668 - DNA, 226 bp, Homo sapiens
  chr11:64039091-64039317
  hyper
gagtccacaaactcgtcactcatcctccggagctcgcggccatagcgctgtgctgcccagaggttggggggcgccgagcgcgagcggccccgaaaggggctgggctcctcccccatcccttcgtcgtcctccgtccccgcggggtaggagctgtggcgactccggatctccacagccccagcgcctgcagagggtcagtgggtaggggggcgacgttaatctcagc

SEQ ID NO: 235669 - DNA, 39 bp, Homo sapiens
  chr11:64059861-64059900
  hyper
agcccggcggggcgcgggggcaccctggagggccagcca

SEQ ID NO: 235670 - DNA, 516 bp, Homo sapiens
  chr11:64064525-64065041
  hyper
aaggtgcagggagacggaggggtcccaggtggcccctagacttcctgcatcgcccctctgcccaggctatggcaatgtggccctgcgcacagatgccgggcgcctcttctgcatcttttatgcgctggtggggattccgctgtttgggatcctactggcaggggtcggggaccggctgggctcctccctgcgccatggcatcggtcacattgaagccatcttcttggtgagctgctccatgccctgcctgcccttgtgctgggctccggctacccttccccatgtccctggcacatgagcgcgcccccaaagaccataagcctctcccacaggctcctgggggcgggagtggggagtatgggagtggggattgttggtgtctcctgggtcctgcctactgccccatcccgcagaagtggcacgtgccaccggagctagtaagagtgctgtcggcgatgcttttcctgctgatcggctgcctgctctttgtcctcacgcccacgttcgtgttctgct

SEQ ID NO: 235671 - DNA, 1340 bp, Homo sapiens
  chr11:64067395-64068735
  hyper
tcgctgccccgggcgggtgtatccctcacagcacctcacgactgtgcctcaaagcctgcatcaataaatgaaaacggtctgcaccgctgcgggcgtgacgctcccggacgcgagtgggtgtggaattgctttcctcgggccaccgtgggggcacctctggcctcccgtgacccccaggccgagggtccccgggcacccaggtcggtcaagtctcggccctctcaggcccgcgtctctgcctggaggagactgtgtagggtccggcgtggggatcagccaggatgggctgcgcgtctccagcctctgcacacacattggcgggtggggtgcagggagggagaggcaggggagagagaatggcatctcgcgtggagggctgtcgtttgaactctcccagcgcgagagaccctgccccgcccccttcctggagcgttgactcccttctcgtctcgaggcctgtggcgtctgggtccgttggggcagaaccatggaggaaaagccttcgaaagtaagacgtctccctaggccccttaccctgtccgctccaacccacccttggtccgactcgggcccctggcgctatttcttactcagccttggctgcccgcagcccccacccaaccccacgttctacgggatccccaacccggcccggctcagttccccagcccgctcttccttcccgctccagccatccgcgacccttggctccctccttgtatgtggcccacaggtgtcgctcaagtcttccgaccgccaaggctcggacgaggagagcgtgcatagcgacactcgggacctgtggaccacgaccacgctgtcccaggcacagctgaacatgccgctgtccgaggtctgcgagggcttcgacgaggagggccgcaacattagcaagacccgcgggtggcacagcccggggcggggctcgttggacgaggggtacaaggccagccacaagccggaggaactggacgagcacgcgctggtggagctggagttgcaccgcggcagctccatggaaatcaatctgggggagaaggacactgcatcccagatcgaggccggtcagtgtggcctcgccaggccgtgggcacccgcagggcaataagctggccagggactcaatttctggagctgtaaaatggggggaagctgatgggatccaagtttctaggattctctgggagaggcgcccgcgccaatctttcgccctttaaatccgccaggcattcttggagcgccccctcccgggcaggcgttgtaacaggcctttcggtcgtgacgcgcagagtccggggaaggacgcaccaaataaattgcgcaaagaccccgtggtagga

SEQ ID NO: 235672 - DNA, 166 bp, Homo sapiens
  chr11:64084952-64085118
  hyper
ccccccgcacatgcgagctcagcagattgtgggtaagcagtttcatgtcgccgcacaaactctcgccaggccggaaccggaaaaaggtcgtcctccgctgcctcacttccggggatgctcctctcgatgctattggatagccaggagaaccggaagtggcgaactt

SEQ ID NO: 235673 - DNA, 73 bp, Homo sapiens
  chr11:64108263-64108336
  hyper
tgagaggaggggaagcgggtgggcggagcctgatgctcagtgggcggggcctgagggacggtgggcgaggcct

SEQ ID NO: 235674 - DNA, 316 bp, Homo sapiens
  chr11:64410633-64410949
  hyper
gccaagcagggaggggagagcgagggaaatcctgcggaaaaaccgagctggggagcggggcggtgcgggctggaggagagaagagggacggagacctggttcccccgaaggcgggagaccgacggcgactggggccggccgcgccgctgctgccgctgccgcccgacggaggccgggggaaaggagggagcggccgggggaggggggggcgggagaagggggaagggaagcaaatccgggtgaggggggaatgaagggataggagaggaggggataggagaggaggggagcggggctgagccgaggaaaggcgcga

SEQ ID NO: 235675 - DNA, 198 bp, Homo sapiens
  chr11:64478848-64479046
  hyper
ggcggggagagacgcgcatgcgccgcccccagaccgatgggggagcccctccccacgcccagccagaccctaatggaagaggctcctcccagtgcttcctctcctcagcgccccctgccccccgacaccacagccccgccccgggccgctcagcccaggacccgcccgcacttcaccacttcacggtcttggccagac

SEQ ID NO: 235676 - DNA, 32 bp, Homo sapiens
  chr11:64481464-64481496
  hyper
ccaacgagaggggccgtcggtgccgggctccc

SEQ ID NO: 235677 - DNA, 620 bp, Homo sapiens
  chr11:64509680-64510300
  hyper
tgcacgctcgaccccgcccacctcctgcttgcccaggactccgagagcaggaggcaaattagagaggaaaggtgtggtgggcgagagataggcacgccctgaggactggaggaggggagcgcccgagccgcccatcgtccggaggggaaccagctggggcggaaggagcctgggttccccggggtcaagaatccagaggtcatttcctgagcgcttggggggaaggggcaccccttcaccagataagccgccccccattagccggaaacagctcccaggccggagatagcgagttcctccggattccccgggagacagataatgcccctcaagtgtcagagtccgggacccggccctcccttcgccgccgctggggaaggctagagaagggaaacctcatctgtctgaagggcgtgcatctctctgccctgcgttgcggaggaggctttcgttaaagagactgcacgctgcggagcagggtgggtccgggtcagggctgtgccctggactgtgcctgggaggcagggacccgggctcagactcggggctaggctcaggctccgtgtgccctcccgagccactcaccgaaggcttcgatgcacccgcggagcagctcctcc

SEQ ID NO: 235678 - DNA, 322 bp, Homo sapiens
  chr11:64511956-64512278
  hyper
gccaaatgggggtacgcgggggagggccccgctggaaggtggctgggaaaagctgggtgcaccgtggaggtcctccgccctccggggatccagcgcgccttagctctcgtggccgctgccccctctcccagacccgggccgcagactccccacccgctcgccgcccccagcccgcccgcgccgccctgggcggggggggagtcgctgggggccgcgccctccttcgcctggcgccccgcccgcgctcgcccactcactcttgggacctgccgcaaggagcccgcaccggcctggccgaccccacctccgtgcgctcccgccc

SEQ ID NO: 235679 - DNA, 163 bp, Homo sapiens
  chr11:64513658-64513821
  hyper
cggcactgggaagagaggcgtggagggtgacgccaggaaaggggctggagaggcctaggccccgcccccacgggtcgccccctccacctcccatcaccgtcccgccgtgggacgcacctgccgagggtggaggataagggggtgactgcgcggctgctgttga

SEQ ID NO: 235680 - DNA, 173 bp, Homo sapiens
  chr11:64546210-64546383
  hyper
aggtgtcgcagcgcgcacttcatttgttactgcgtgaactgagctccgagtccagaaaggaggggatggggtggggcgaactctatgacggagcgacggcgagctctctcattggctgcggtggtggactcaatcaatctcgcctgcgttgtagtgtcgcgggattggctgtc

SEQ ID NO: 235681 - DNA, 246 bp, Homo sapiens
  chr11:64578117-64578363
  hyper
ctggaaatagtggcgggccgggccgctgcgctgtggcttctgggatctctaggtccgcggctccggacacctccttcccgagatactcagggattggcccttcccttcaggccgaccaggcaggaagcgtgcccgcagtgccttctggaaaatgtagtccgggggcactacctgcagactcggggtgggaggtcgccgagcttctgccggttttgctgtcacgggtcggtcggcaagttatgagga

SEQ ID NO: 235682 - DNA, 128 bp, Homo sapiens
  chr11:64655569-64655697
  hyper
aggaagctgtccccgcccgccccgcgcctccgtccggtttctgcatctttgcccctggcattccttcctcctccagtgatcacgacctgtttctggggttcacctcagcaaacgccgacctcacactc

SEQ ID NO: 235683 - DNA, 385 bp, Homo sapiens
  chr11:64739365-64739750
  hyper
cccaggctcggccaggctatgtctcacacactgactaggggtccttcggcctcagaaaagtggccccggacggaatacccactaagaagtgctctctgaaaaaggcgggcgccaacctcgaacgaagtcgttttgagggactggctcgccagctcctaagcaacttcggggctcgtgccgcgcacccaccaggccttctgcgcacgcgcaagtgcgcttcccaccgccccttcgggcgcagctccaaggcctggccgcggtctgcgcgtgcgcatttcattgtcgacaccgagaggacgccttggcgccttcaggtccctcctggatttaccagcccattgtttatttcgcgcctgctttagcgtggtgtcgtcgggaactagcg

SEQ ID NO: 235684 - DNA, 263 bp, Homo sapiens
  chr11:64863597-64863860
  hyper
ggctgcagggggacgtttcacctgaaggactgcctcgtttcaacaacaactttatggctcccggaagtgcctcctccccgtccccttcctttccagcctcacgcccgtgggctgcagttggaacgatggcggcggcagctgccgccgggcctagcccggggtctggacctggggactccccagaagggcccgagggggaggctccggagcgtcggcggaaggcgcacgggatgctgaagctttactacggcctctcggaaggg

SEQ ID NO: 235685 - DNA, 215 bp, Homo sapiens
  chr11:64885145-64885360
  hyper
acctgcgaacgcacgccggtggtagttcgaaacttccggggcttcttcgattacttccggttcgcagcgcggccgacggcgcgctgtgttttcgcaaagcttccgaggattctcggcaatttccgcccacgcccgaaagccaagccccacccctttccctagtagggcgagagcaggcccagaagccgggcgtcaggtacgagccccgccctatg

SEQ ID NO: 235686 - DNA, 76 bp, Homo sapiens
  chr11:64889776-64889852
  hyper
ccagacagttgcgcgcacagaaggctggcgtagcaggtaaagatggcagctaccatgttccgggctacgctgcggg

SEQ ID NO: 235687 - DNA, 91 bp, Homo sapiens
  chr11:64902078-64902169
  hyper
tcctgccctggctcgcactgcgccctacgtgggcccatagcaatggtgtcaccaccgtatctggggtgatgtctacggggaagggctgggc

SEQ ID NO: 235688 - DNA, 164 bp, Homo sapiens
  chr11:64949024-64949188
  hyper
cgcgcgtggggtgcggccgtccggccctgcaactcgagctgctgcccctggttaaaaataccccctgcccggccctccccctccgttccccgcggtgcccttccgccgcgccccagcccccccatccccccccgcgctggcccctccccggggactgctctgcc

SEQ ID NO: 235689 - DNA, 71 bp, Homo sapiens
  chr11:65029047-65029118
  hyper
acgcgcacgacaacgcctgcgcaccacggaacagggcaaaagggtgacaaacatgcgccactgagttttat

SEQ ID NO: 235690 - DNA, 68 bp, Homo sapiens
  chr11:65029371-65029439
  hyper
gctcccggtttcgcgcatgcgtgcactgcacaaaccatttggcgggtttttccggccactcagttctg

SEQ ID NO: 235691 - DNA, 90 bp, Homo sapiens
  chr11:65081963-65082053
  hyper
aatatacttgtgccggcgcttccccgacgcagccctgcagggaaggatccggtccaaggtctctctgcgatttctgaagaattcggtctt

SEQ ID NO: 235692 - DNA, 73 bp, Homo sapiens
  chr11:65121847-65121920
  hyper
ttcccaaaacaattccgtgagggctgttagccctgcttggtagacgaagaagccgatgcggtctagggtcacg

SEQ ID NO: 235693 - DNA, 145 bp, Homo sapiens
  chr11:65153828-65153973
  hyper
gtgggcaggccaacgcccctagcctgattctcgaatcttcgccaaaccctcttacaggccaacagtcggggcctttgtgaagggaaactcgctctgggtcactctggtggtggcggggctggtacgtgacgcggccaccccacgg

SEQ ID NO: 235694 - DNA, 649 bp, Homo sapiens
  chr11:65185291-65185940
  hyper
agtgaggacacaggcgctcagcgtggcagggtgggaacaggaaggtctcgtgagctctgtgacaggatggggctacaggagacagaggtagcagtgagctggtgaagaggcaggaggaggcaaggaggacagggtgttctagggtgccagctcaggcaaggctccaaggagtgggtgagtgctcaggaggacgggggaccaaggcctggggtaaggggcaggtgcccaggcactctagcatggcacggaacaggggacagtcccaggacatccggatgcagggggctgacaccgcaaagttctttcctgtaaagcacagcccgaggcctggggcttggccctgggcagaggaagccccccttagatctgccttggcagtagtgaggaaagggcgtgcacagaccccacgcagcccgaggtgacgggtcaaatgcaagagtgagaagccccctcctgagggtcctcccctgcctcgccttcctggtgggcggcctgctttccagcacatgtggtggaccagcccacattaggtcaaagtgttaaaaatagccggagggctcagtatgtttgggggtggggggggaatgggaggtgctgagggagggcccaggacagttgggaaggaggaagggcccgtggggctggggtt

SEQ ID NO: 235695 - DNA, 352 bp, Homo sapiens
  chr11:65190804-65191156
  hyper
ttgtggaactgaacttagctcgacggggctgaccgctctggcccagggtggtatgtaattttcgctcggcctgggacggggcccaggccgggcccagcctggtggagcgtccaggtctgggtgcgaagccaggcccctgggcggaggtgaggggtggtctgaggagtgatgtggagttaaggcgccatcctcaccggtgactggtgcggcacctagcatgtttgacaggcggggactgcgaggcacgctgctcgggtgttggggacaacattgaccaacgctttattttccaggtggcagtgctccttttggacttttctctaggtttggcgctaaactcttcttgtgagct

SEQ ID NO: 235696 - DNA, 253 bp, Homo sapiens
  chr11:65192924-65193177
  hyper
gtcagacttgcatacgcagcagatcagcatccttcgctgccccttagcaacttaggtggttgatttgaaactgtgaaggtgtgattttttcaggagctggaagtcttagaaaagccttgtaaatgcctatattgtgggcttttaacgtatttaagggaccacttaagacgagattagatgggctcttctggatttgttcctcatttgtcacaggtgtcttgtgattgaaaatcatgagcgaagtgaaattgca

SEQ ID NO: 235697 - DNA, 221 bp, Homo sapiens
  chr11:65193823-65194044
  hyper
tggggaagtagtctcgggtatgctgttgtgaaattgaaactgtaaaagtagatggttgaaagtactggtatgttgctctgtatggtaagaactaattctgttacgtcatgtacataattactaatcacttttcttcccctttacagcacaaataaagtttgagttctaaactcattagaattgttgtattgctatgttacatttctcgacccctatcacat

SEQ ID NO: 235698 - DNA, 292 bp, Homo sapiens
  chr11:65197599-65197891
  hyper
tgtctgtgaaatgcgggtaaatgaatgtagatgtttggcagcagctactccttgttgagctctcacagtgaactctcctgcctctgccctccttccccgcctcccctggtgcctagcgtcaggtctagccacttcctcctgggcccctctcccttttctgtggctggctgcctgcccgcctggcgctggacctttcatgtaacgggaatcagcatgtatattctggtctggtctgtttctacacttaattttgtttccagtagtatttccctgtaccggcagagttcacaaa

SEQ ID NO: 235699 - DNA, 80 bp, Homo sapiens
  chr11:65264702-65264782
  hyper
catggcccttgatagctacacgaggtttgtgttctgattttaaattaatggatgacgtcgagactatatggaggaaatga

SEQ ID NO: 235700 - DNA, 316 bp, Homo sapiens
  chr11:65265757-65266073
  hyper
agagcctggaagctgaaaaacggtagaaaaatttccgtgcgggccgtggggggctggcggcaactggggggccgcagatcagagtgggccactggcagccaacggcccccggggctcaggcggggagcagctctgtggtgtgggattgaggcgttttccaagagtgggttttcacgtttctaagatttcccaagcagacagcccgtgctgctccgatttctcgaacaaaaaagcaaaacgtgtggctgtcttgggagcaagtcgcaggactgcaagcagttgggggagaaagtccgccattttgccacttctcaac

SEQ ID NO: 235701 - DNA, 210 bp, Homo sapiens
  chr11:65266388-65266598
  hyper
aactagaacctatttttaaccgaagaactactttttgcctccctcacaaaggcggcggaaggtgatcgaattccggtgatgcgagttgttctccgtctataaatacgcctcgcccgagctgtgcggtaggcattgaggcagccagcgcaggggcttctgctgagggggcaggcggagcttgaggaaaccgcagataagtttttttctctt

SEQ ID NO: 235702 - DNA, 241 bp, Homo sapiens
  chr11:65266934-65267175
  hyper
tgattaaaataatttgaaggcgatcttttaaaaagagattaaaccgaaggtgattaaaagaccttgaaatccatgacgcagggagaattgcgtcatttaaagcctagttaacgcatttactaaacgcagacgaaaatggaaagattaattgggagtggtaggatgaaacaatttggagaagatagaagtttgaagtggaaaactggaagacagaagtacgggaaggcgaagaaaagaatag

SEQ ID NO: 235703 - DNA, 324 bp, Homo sapiens
  chr11:65267949-65268273
  hyper
ggactgaggagcaagcgagcaagcagcagttcgtggtgaagataggaaaagagtccaggagccagtgcgatttggtgaaggaagctaggaagaaggaaggagcgctaacgatttggtggtgaagctaggaaaaaggattccaggaaggagcgagtgcaatttggtgatgaaggtagcaggcggcttggcttggcaaccacacggaggaggcgagcaggcgttgtgcgtagaggatcctagaccagcatgccagtgtgccaaggccacagggaaagcgagtggttggtaaaaatccgtgaggtcggcaatatgttgtttttctgg

SEQ ID NO: 235704 - DNA, 105 bp, Homo sapiens; identical to SEQ ID NO: 202597
  chr11:65339689-65339794
  hyper

SEQ ID NO: 235705 - DNA, 173 bp, Homo sapiens; identical to SEQ ID NO: 202598
  chr11:65342125-65342298
  hyper

SEQ ID NO: 235706 - DNA, 476 bp, Homo sapiens
  chr11:65343104-65343580
  hyper
gctctggttaagacgtgggtggctgcaccttggagttgagagctggtcctcgtccacattcacagtatgactctgagcaagtcccttcccctttctgggtctcagttttcccagccgttgaaagggggccagtagtacgtacctcccagggctgcgggcaggaaggaaggcggcccgggcagcgctctctagggtggcaccaagttgctggttgccctctctccacgcagcctctgcgcgcaccgagcgggcactgcggtcgggcgacaccccttccacgcccccctcccccgcccccgctcccgctcccgggtcgcggcgcgaggccccggaagccgggtcgccccgcccccgcgctcctgccccggcccccgccccgcgccggagccccgcccgccttccgacgggggtgcggctccaggaaacggcgcgctcccagctccgcgctcgccacccgacgcgccccaggcgacccc

SEQ ID NO: 235707 - DNA, 847 bp, Homo sapiens
  chr11:65405361-65406208
  hyper
cgctaggtggcctccgctagccctcccggttggtctggaaggcaggcacaagtttctcaggagaggaaatggccttagaatgagcactgctcggtgctgacctccgccaggcctggaatccccgctgctgcgcttcccgccgcagacagctcccggccggccccgcctcccggcatggccccgcctcccagcatggccccgcccccaggcggagccggcgccgggagcggtagcgggagagcggcagcgggaccccagcgcgggcggcggcggctgggcgggagccccagaggtactggcgggagcaggggacgggaggcactactgtcgggcccgacaggggagaggtggcctagccgtgggcccgggtgatgtgtatgggagtggggtcctcgccacgttcgccgccagcaccctcccaacttccctccgggctccagctcagtcccgagtcaatatgtccagccccctgtctctgaccagccgttcctactctctctgtgtgacggcttagcctggccagccagccggtgagtggaagcggcggctcctgactcctggtggcggcactgtgaccccctccccctcaacactgcaagtgtgtgcggggctcccccttattctgaggctcctcttcttcttaggcggcctccaccccagtccctggcctggcctgggaggaaacatctgtcgcgccccctggcagccgaaatggggtcatgacctccagatgtgctgggaagtggccagctcctcctcctggggcagccaggccttccggatctgtgggggcggggccggccctttccccccacccctagtgacacaggcccggaggaatgtccta

SEQ ID NO: 235708 - DNA, 100 bp, Homo sapiens; identical to SEQ ID NO: 202603
  chr11:65420274-65420374
  hyper

SEQ ID NO: 235709 - DNA, 62 bp, Homo sapiens
  chr11:65430497-65430559
  hyper
cgaagaggctgcacgcacagccgctgccgggggtcggggccaagtgcgcgcctcgccgagga

SEQ ID NO: 235710 - DNA, 243 bp, Homo sapiens
  chr11:65479267-65479510
  hyper
gtcctcttgcctacggaatgaagtccacagacttgggggagcgttcgaacccttctaaggccacttcctttctccagcctctcgcgcccagttgactcccggcaacacctcccgccgccacaaggagacgcccgaggacttccctccgacaaagccaaaaacggtattgccacgtgacccgctccgcatacacgtgaccagcttcgcacccggtgggcgtcacgtgacggactcagtagaccg

SEQ ID NO: 235711 - DNA, 56 bp, Homo sapiens
  chr11:65555706-65555762
  hyper
aagctggtgtacccagttatttttggcagacgcctagacagcgtcgactgtgagag

SEQ ID NO: 235712 - DNA, 71 bp, Homo sapiens
  chr11:65600903-65600974
  hyper
ccaagagcggaaacctaaacagaccccccttctccacagacattgtcccctgccctcgcccctggtccacc

SEQ ID NO: 235713 - DNA, 89 bp, Homo sapiens
  chr11:65655412-65655501
  hyper
gagtagtgcctgccgggagggcggaatctggaagatgagctggtgcagtagcttgggcggcgcatgcagcagccgctcgagcatgtgga

SEQ ID NO: 235714 - DNA, 118 bp, Homo sapiens; identical to SEQ ID NO: 202608
  chr11:65657719-65657837
  hyper

SEQ ID NO: 235715 - DNA, 628 bp, Homo sapiens
  chr11:65658812-65659440
  hyper
agcgtgggcagtccggatcagttgcccctggcctgttcccccgatgattgaaggcactgcttcctccacgccgacgcccgcccggattgctccccgagccccgggaccgctgtggacctcgggacctggacgccgtcctggctgcgcaggaggggccgctggcatggactaagaaatcctgacaccaagaagggcccctcgctcttgctggcagggcagcagggggactgaaggctggagcggagggacttgctgggggttggattgggggtaataaacccggacggaagcggagcccacggcctgggcagcgtctgtttggtactcgccggggttggggcgagggtggggtgctgatacagggtacaattcccatccagaaggactgcagaactaatgattcccccattacttcgagcctggggtgggatgcggggcagtggtaaaccagacttcccccatcgggcgccgggaccggccttaatccagcccctgaagtggctccagctcccttcccggctccttcctgtccaagacaatggggcaggaagcaggtgctgggggcctagaaccactcggccgcctcctctgaggctggaagggggcataacagcgcccctccgtggca

SEQ ID NO: 235716 - DNA, 409 bp, Homo sapiens
  chr11:65666908-65667317
  hyper
ccttccctcccctgtcgacacgtgctcgcagcccctcgacaggaaatgggcacctgcagcctcccgggtgccccccggcgggcagcgggcgccgttaggggctgagagtggggtcgcgagagtcgcccgcagcctgaccccgcgcacgtcccggaacctcgaggtctctattcgccgcattcggcaaagggatcgagggccggtctccggggacctggcaggttccactgcccggacccccctggactccccaggccgagaaacgatagggacttggcgacggaggggcgaaggacagacagacggacggacacgcggagggtcgcagaccgggccgggactcccaccctggcccagctgctctcccgacggatcccgcctccctcccgtgtggggaccctcaccccag

SEQ ID NO: 235717 - DNA, 57 bp, Homo sapiens
  chr11:65667910-65667967
  hyper
gaaccactgcgaccgcggggggtgggggcgttgcagcggcgcggtcacctccaggct

SEQ ID NO: 235718 - DNA, 110 bp, Homo sapiens
  chr11:65728917-65729027
  hyper
gaacttaaagccacgaagacactgacttaatgggctctaagtccttccagttctgggatcccacctccgggttaattccgcttcccttgaggagcgcatgcgcaatggga

SEQ ID NO: 235719 - DNA, 108 bp, Homo sapiens
  chr11:65769430-65769538
  hyper
cgtctaggctggacgctgagagaggatcgtccacgactcacttcaaggctgaaccaagaaaacacagtaaaggaacttgccggcggccgcgacggtagcgtcagttag

SEQ ID NO: 235720 - DNA, 347 bp, Homo sapiens
  chr11:65779307-65779654
  hyper
gaagcgtcttggcacgcgggtgcgcgccgccccctcggcctcctgggctccctgaacctcgcaggaccccggcaacttcgagccccgccccagctccaggccgcgggggcgcatcgcgggcgtcgggcggggcggcccagcgggtaaaagctgcgcggccgcaagctcggcactcacggctctgagggctccgacggcactgacggccatggcgcgttcgaacctcccgctggcgctgggcctggccctggtcgcattctgcctcctggcgctgccacgcgacgcccgggcccggccgcaggagcgcatggtcggagaactccgggacctgtcgcccgacgacccgc

SEQ ID NO: 235721 - DNA, 777 bp, Homo sapiens
  chr11:66035253-66036030
  hyper
gctccccctgttgcgggtgaggcggctgctctcatattttcagatgttgctgtagaaataaagacggtttaaatctgagctgggcttgttttgagacggaggtcgggggcccccagcgtctctagactggggtggagccgggaagggtcgtgcgtgagtgggggacagtgtgtctcgctcaaccgctgtccgcgcagctgggcccagatattgtgccccaccccggaattgcgtgaggggcccacaagtcaggctttccctaaaacactcacttgtggggttctggagaccgcgggctcttatgagctctgctcctcacaaagtttttgaccttgagtgagtttcccgagactcagttttttcatctatgaaatgcgggtgatgacgcgcggctgcgagttaggactgcccagtacacgaagaaccctggacaaatgtacttttattagtcttactagaacccacattctcatttaatgttcacaacgtgggtattgggagggcaaggatgactacctccgtcagacagatgtgaaacgtgccaagcccagccctaaattgagctttctaaacaccgagtcgcggtcaggctttccagcactgtcctcaagcctgagtgcgtccggagtgcaaactacaagccccagaaggcaatgcgccagcagtgatgggagtgggcgcggaggcgcgggctccccgactacgcctgcgcagcggggctgagttggagaacgtcttagactacaagttccgggaatcagcgcggcgaggcctgag

SEQ ID NO: 235722 - DNA, 106 bp, Homo sapiens; identical to SEQ ID NO: 202611
  chr11:66049841-66049947
  hyper

SEQ ID NO: 235723 - DNA, 202 bp, Homo sapiens
  chr11:66056757-66056959
  hyper
tgggattggatcacgggcttgccagttcacggtgggaacagccaatagaagagttaagaaagaaggtgggcgagaattatttgcgcgcctgcgcggtgaggcacttgacgcaccctgccacgactacaccagggagtcgagaggtaacctgcagccggagtcaggagcaaagcttccttggtgggacgtactccaggaggga

SEQ ID NO: 235724 - DNA, 527 bp, Homo sapiens
  chr11:66079967-66080494
  hyper
gaagaggaggttgaggggaacttcacacgtttccctggagggcggagtttacatcatcccccaacagagttaagacctctgagggattccctgcagtgtccagggctctgtgaggcgaagcttgcagttgtgttgggcggggcctgtagcgccgcgtgaagagaatgtgtaaactcggggcgaagttcatacctcctagaagccgagactaatagttccgccaatctgcgcgcgccgagcggaggaggtggggcttgtaggttgtgggcgggggactgggcggggccaagagggcagggggcgggcacaatcgctgctggaatctttgagttggcaggggcggggcttgtggctttgtgggcggggcctctggagagctcccgggggctctcttctgttctgcagcgagtaggcgtggctcgtagctcccaggtccgggctgataccgctggagtatgcagttcgccgccgcgcccgaatgaggcggggcctgcgagtaagtgggctgagcccgggctgggcgcagg

SEQ ID NO: 235725 - DNA, 235 bp, Homo sapiens
  chr11:66139091-66139326
  hyper
aaggggcagagaagccgcacctgcacctgcgctggggcggagggccgcagaccggtggggcggggggcgggtctccccagattccggtgcagggcggctggagtcgcacaggtagcctcgggcggatttcggcgtgtctcgcgctccgcaggctgggacctgggctccgccccgaggcggggacagagggtcgcgccacccgtctctccttcccccacccgcctcagggactcga

SEQ ID NO: 235726 - DNA, 98 bp, Homo sapiens
  chr11:66176518-66176616
  hyper
gtgacgtccgcgctcttctcgcagctagtctcccgcggcctcccaattcttgcctaatttggaagagagccgcagcccttctgctgatgcgcgcgcgc

SEQ ID NO: 235727 - DNA, 118 bp, Homo sapiens
  chr11:66186290-66186408
  hyper
tacgtcgatgtccccggcaaaccgtagcatgacttccatggtgactctttcagcaccacggacagcggtcggcgcagtattccttcactgcagattcgctcagattgctggaggccat

SEQ ID NO: 235728 - DNA, 1968 bp, Homo sapiens
  chr11:66187355-66189323
  hyper
tgcaggggtcatggagggtccggcgctgccccttcgcttctcagctgctcccccatcttgcccgcctaggcagggcggggagccctccggagcggtgcggaggcagccaggccccgcccgccgcagccgcggcagccgccggaggattcctgtcctaatatggagctgggattcccccggccccgcccccgcccccggcccgcggggagacagaggctggcagcagggcggggggaagcgctcgcttgggggccggcaacggggggaagggatgcctaagtgcagacccaggtcctcgccgtgcccccacgtccctgcctcagtttccccttcagtaaggttaattagctgagagggaaaccacgaatcactgcagactacagcgctgatgttggtttctattcttggctgtgggaaaacaggatcaacgccaaattcagctggtccctttcccaccggactccctttccacccatcctcgggacttagacccccatgaacaccccctgataagccgccaaggcccgatttgggaagcgggggcgggaatttgttctctaaaaatggccaagggaatcccaggttaaatagtccccagagaggaaccccagcagtgacctgtcccacggaggccaaggaaagtcctccttccctgcatgtgaacgtgaccttgtctgtcaagtaacgagggggatttgtagacaaccctgttcttccccattccctcaactcctcagaaaaattagtgtcagtgccggcccctctctgccctctgcggactcctgccgcgggcttcaggccgccctaaacctggccctgtcgcttccctcaactgaacgcattcagacgccagggtccccacactccattcaagctttcctaacgcagcgccttcctctccgctcagctcccgccaggcttggccccctccgcagcctcctgctcccccctcgcccgcctccctccctctctcattctacgtcatgagatgacgtcggaagccgggcgggaggaggagcccccctccccagtcagcggctcccgctgcagcttgcttagcccagcctcccgctctcccgcccccccggctctaaaacgagccccccacgcctggcaggagctatataaggcggcgtgaggcaggcgaggggggcagcgcagccgagcggagcccaggagagcagagagcgagcctgagcgagagacggggaagcacggaggaggaagccgccggtgcgtcgggacgggagcgcaggtgctcgggcacccgagctggagctccgcagccgccggtcatgtaccgctccaccaagggcgcctccaaggcgcgccgggaccagatcaacgccgagatccggaacctcaaggagctgctgccgctggccgaagcggacaaggtccggctgtcctacctgcacatcatgagcctcgcctgcatctacactcgcaagggcgtcttcttcgctggtggtgagcatgctggggctaccgcagatccgagctgccaggcgccggagaccctggagctgagggaacccgctggggctgtcgcatgtctagggcagcgtgctggcgagctggggagattcgggactcgggagattcgggactttctacttttcctcctgagctccctccagacctcaccttagttctgaatgagagttagagagcctggacggtgtccctaacaccagattatgagaggataagagccaggacagagcggcctcggtgcccgccagtgcagaagcgctccgggagccggggagggaagcccgggaagttgcagggatggagctgcctgagcctaggggaacatagctactgtccgcggtgctgaaagggatctcctgtcgccttcggggcgctgcccatggtgctgacggctgcgccggccgtgtatggctctgtccatggttctgaacccacagtcggcttcggagctctgtccgcggttctgaaatt

SEQ ID NO: 235729 - DNA, 199 bp, Homo sapiens
  chr11:66206305-66206504
  hyper
tcaagggtcctcacgttaggctagggcaggtgaggccaacaaacagcagccttgtttcaaccctattgctcgccaactagtaagacaaggaggatgagaggaggataaaacactttttaacttgttttatgcagataaaggaagggcccgaatggcctaggtacacacattcccacaggaacgcgcacaggcactacct

SEQ ID NO: 235730 - DNA, 131 bp, Homo sapiens
  chr11:66247855-66247986
  hyper
ggggggcggggttcgcagagccccaatgaatgggggagccggaagcaggaagtgagtttgcgaacggagcagctgctgcaggtgaggcgcggcgcctgggcttttggggtcaaagcgtgtcatcccggggg

SEQ ID NO: 235731 - DNA, 62 bp, Homo sapiens
  chr11:66277990-66278052
  hyper
ggaaggtggccagcgcgtcctcctgagcctgggtgggaaagcttggcgcccggaacctttgt

SEQ ID NO: 235732 - DNA, 35 bp, Homo sapiens
  chr11:66314197-66314232
  hyper
agatccaccccggcgcccccgagtcccgcagttcc

SEQ ID NO: 235733 - DNA, 270 bp, Homo sapiens
  chr11:66335704-66335974
  hyper
ggacccgggcctggcgcccccgcccccggcgcgtcctcacccggcggacgcggccgcgcacaaggcccagcacggcccgcgtccccgcagcccggccgcggttgaacatctccagcgcgaagcgggtgggcgccagcagctccggggacggcggcccccaggcctgaaagctggcggctcggggctgggcgggggcggccactgcgcccgggagcagccccagcagcgacaggagctgcagccagggcgccatggcgagggcgaagccgg

SEQ ID NO: 235734 - DNA, 263 bp, Homo sapiens
  chr11:66346491-66346754
  hyper
tacctctttcttttgaggccaccccttcttcccaccgctaagcgttccagaatccacagtgattaattcgtccgaaagagcaggggagtgagggaggactggattctgagggtgctggcagaacaactggagtcgggggtccacggcggtcatgactatcgacacacggtggcgctgttgaggctcggtcctgcgcattcccgagtgtcaggagccctggaagaagttgcaggcttctcacctcccacgcagccactgcactc

SEQ ID NO: 235735 - DNA, 351 bp, Homo sapiens
  chr11:66445298-66445649
  hyper
gctcgagcctggacgcgaccgggccctttctcgcgcgccagctcacgcacgcgcgagtgcgcgctgcttccctccccttcccctcgcgggagccgagtgaccaatcccgaggctgcatacaaatgaccacgcagcacgggggcggggcctgttggtggtggcgcggcgccgcggaggtcagcccacccccagccccagccagccagtcaccaccctggaaagggtcgccactgctgcgtcagaggggctctgaacgcaaccactgcctagaaaagcggaggccttggggagtcgctcaccacaatgggtcctgctcttgggccctttgaggggggcggggagctaatgaca

SEQ ID NO: 235736 - DNA, 113 bp, Homo sapiens
  chr11:66494764-66494877
  hyper
ctgcccatacctgaaacccccgggctctccagcgttggaactgtggctgctccgagagggggagggcagacgacatgtagcaggttaagaccggggcaaacctgcacctcaca

SEQ ID NO: 235737 - DNA, 140 bp, Homo sapiens
  chr11:66610583-66610723
  hyper
gcaggccacgggccgctgctgagaggtcctcaccccgggcccccttgttcccgcaggacgtgctgtggctgcaggaggtctccaacctgtcagagtggctgagtcccagccctgggccctgagccgggtccccttccgca

SEQ ID NO: 235738 - DNA, 1024 bp, Homo sapiens
  chr11:66725362-66726386
  hyper
gagccacatccagtacgatggggacaacttgggctcccgatcctgacagacttgggttcgaaccctcagggacctcgcgcgaggcgctttagtcagtttctccatctgcaaaatgggcccgagagcaagaatgaggcagcccgcaggcggacgctgcggaggggcgctcgggggctgcagccgggggcgggtccgggggcgggtccagccggccgagcccccgcgcgagggggaggggcgccgtccgctgcgtcgcgtcgcgcaccgcgcacagcccgtcgctgtctcctccagccgtcactcgcggagcccgcgccgcctttgcgcgcgcgacccttacataagcgtccctcgcagcggtgccggcgcacgtccacccgctccgacccgccgcgggaagaggaccgtgcggagcgcggcggacactcacctcctcgccgtcgccagtcctcgccgccgcctctaccgctgctgcctccactgacagagaacagctgcggtctccgtgcaaccgaacttgctgcagtcccggccccgccttacggacttcctattggcccagacagcccaacccctcccgttattgggcagtgttctccgtcactcctcgcccctaggctctggactcctccctgtgcccgcctgtccgtcacgtttaagccttggcgccccacgtcagccccgcccctcccgtccccggcgagcgcctggataagtggcgaggctgggagagcccgcccctggcgcaccaccgcctactcccttgtctccggagcctcacgtgggccgccggaccctagccgacgcccgcaataggcggaagtggccgggctgtggctcgcagttattggctgtcggcgggggtggggacgttcgattcattcacccgagtagcacgtgtctcccgaagctgcaagcacaacagttcgcactggggctcaggcatcccggctagacgcagatacgcgctggctagcggagaagaggtcgcaggaaaagctaacgttagcgaagggcaggagga

SEQ ID NO: 235739 - DNA, 680 bp, Homo sapiens
  chr11:66790581-66791261
  hyper
ctggatcccggacgcgcttggggatctccggctcggaccccaggagcagagacagcgctcgagcttgtcactttaaattcaagagggagcgggcgggcaagcgggcgagcgcgagggagcgcgcggcgggctcctgggagcgtgcccggactgcggcgcagctccggtccgccgccccggcccggccgagcccccggcccgcgccgcgctcctcggaggcgggagcccggcgacactgcaggggtggcgttgccgccggcggccgggctaggcgcaggtgcgtgcgcgctgcgggaggcgggccggcagctggagcccagccggagcggcggcccctccgcggagcccgggtgagtacgcaccccgccgacccccgtgcgcggccgggatcgcaccctgatcgcggacgcacgcagccccctcctcgggccctgggcccgggaccccagagccccgcgcactccgcgctcctgcacctccgcgccgcgcttgcacacgaacgaatgccgggcaccgcgcacgctgggcgcccttacccggcccggccactccgcgcagtgcgcatcgcatcgcacgccccgcatgtgcacacacgcggctcacccggccatttacacgcctccccgcgcccacgctgcacacacgcccctcactttcgcattcagcgccctgactgtcct

SEQ ID NO: 235740 - DNA, 110 bp, Homo sapiens
  chr11:66824124-66824234
  hyper
cccgtggccccagcgcggccagctcacagtaggtgctcgggcagcgtttcttcagggacctagacggcctggagaggaagggccccagcccagccgcccgggcctctcac

SEQ ID NO: 235741 - DNA, 237 bp, Homo sapiens
  chr11:66885225-66885462
  hyper
atttagaatttaaacgggccccagagcaagagattggctggggaaatgcccggatcgcggctgggctgctcgcatggcactgctcgggtacctccggccgggctccgtcgacgttcggagcctgctggcccgtcgggcagctgtcgggccgcgggagtcggtccgtgggcagggccggcgcagctcgggcggctgctgccccgtcgctgacccccgcgcgaagctgcgcgcaccaac

SEQ ID NO: 235742 - DNA, 89 bp, Homo sapiens
  chr11:67007554-67007643
  hyper
cagcagcattgttcgcaggcacaggaagccgcggctgagctgaagggctcgagaaggagcccagagcgctgcacgctgctccctctggg

SEQ ID NO: 235743 - DNA, 254 bp, Homo sapiens
  chr11:67085195-67085449
  hyper
accgcaacgttcgcgcgccaccttgtgtccattcccttagcctccagggacaacccggaaaccacatttcccagcgtgccgagcgcctctgcgcaggcgcaaagagtttccctcgttgccatgggaacctcgccccttctagagtcctggccgcttgactcagctaagcgcgaaggtgttgtttcttcctgaggtgcgctggggctgggacccggtctgcagaaggtccaggggatggcgtcgggggattgagg

SEQ ID NO: 235744 - DNA, 175 bp, Homo sapiens
  chr11:67121085-67121260
  hyper
gccaatggcaggccgcctatgcggggcggggccctggcgctagccaatggtaggcagtgtagggtgaggggcggggcggtgcctcagctgtgggccgcgggaggaggggcaggctggggcgggggacctgtcgggatgccccgacttcaccaccttccccggcccccattggtct

SEQ ID NO: 235745 - DNA, 609 bp, Homo sapiens
  chr11:67141198-67141807
  hyper
tctgacgtgtaaagctgtaaccacaaattgtagcggccctccccggggtgggggtaggaggggggaggagggaagggagggcttctggggctccctctccctcccacagcaccgagggggggtgaggtgaggcgaggctgtggcggtaccaccctgggcctcctgggggagggggcggggaggccatcagtccgtctgaggactcccaggagccgggggacagcgccggcttcgggtgggcttctccccaggcgttggcctgggacaccgccccctgccccctgtcccctgccgatgcggggtccctgatccaacctacctctgcctgtgcgaggtccctgctcccaccctacctctgcctcctcatctctaaccttccctcctcctcccccttgagtaaatgcaatgacacattctcccaaatgccagcgagctggcctgggagcaagtgatggtgtttttcctgctgccctttgtctgggctgaccgccccccctgcctattgtcccgccgcttgtcccatttccaaaagctagagctaagcgaggcgctggggctggggcaggtgactaaccagctcacaatgccccctgcgggggaggaagaggg

SEQ ID NO: 235746 - DNA, 169 bp, Homo sapiens; identical to SEQ ID NO: 202628
  chr11:67183098-67183267
  hyper

SEQ ID NO: 235747 - DNA, 67 bp, Homo sapiens
  chr11:67195792-67195859
  hyper
aggctaggcgcctcgccactctaggactacaattcccgagaggccttgcgacggaagccatctttgt

SEQ ID NO: 235748 - DNA, 102 bp, Homo sapiens
  chr11:67211231-67211333
  hyper
cgaggccccttcgcgttcttgctcctcataatggcatccgcaggagtctccaggattgggtgaggccccgccttcccggcccccgacggaacgcacacctcc

SEQ ID NO: 235749 - DNA, 519 bp, Homo sapiens
  chr11:67232078-67232597
  hyper
ccgcgatcacttctcgaagtagggcaggtagaagaactggaagccccggtggcccttgaccgcgcagtagatgaagatcacgtgatagactgcggggcggggcctgtcagcgcagaagccccgcccctccccgcaacaccgcccccagtgccgccccacagcccccgccccttccgccccggtgcccgctcgcacctccaggcaccaacaacaggaagcccggcacgaagaagatggcgctggagacacctgcgggagggaccagagcccggtcagggcgagggggcggaggcttcgaggccttccgggctgccgctgactgcccgggcaagcctcactcccagctgaaaaggagccgtgtactgccgggaggtgggagggcttgccgtggacccgtggacacaagacaggggtgtcctctgcctgtgggggcgggagggtcgctcacctggagagggggtcgcctccagtcccacgccgaccaggatcagcactgcacacagacggagccgcgggggt

SEQ ID NO: 235750 - DNA, 115 bp, Homo sapiens
  chr11:67236852-67236967
  hyper
tccagacggagcgcgcccgccccgtgacgccactcagtggccgccatggcaagcgacagcccgtgccgggctcggacacatcccccaggcgtgtatgtgcgggggcttggagggg

SEQ ID NO: 235751 - DNA, 375 bp, Homo sapiens; identical to SEQ ID NO: 202632
  chr11:67271842-67272217
  hyper

SEQ ID NO: 235752 - DNA, 44 bp, Homo sapiens; identical to SEQ ID NO: 202633
  chr11:67275125-67275169
  hyper

SEQ ID NO: 235753 - DNA, 97 bp, Homo sapiens
  chr11:67276281-67276378
  hyper
accgttcttcctgcggcttggctcgtcctcaggtctaagggcgacctcaaagacccctttacccgcacccccaaggccccgcgctgctgcctaagtt

SEQ ID NO: 235754 - DNA, 508 bp, Homo sapiens
  chr11:67350962-67351470
  hyper
gggaatttccccccgcgatgtcccggcgcgccagttcgctgcgcacacttcgctgcggtcctcttcctgctgtctgtttactccctaggccccgctggggacctgggaaagagggaaaggcttccccggccagctgcgcggcgactccggggactccagggcgcccctctgcggccgacgcccggggtgcagcggccgccggggctggggccggcgggagtccgcgggaccctccagaagagcggccggcgccgtgactcagcactggggcggagcggggcgggaccacccttataaggctcggaggccgcgaggccttcgctggagtttcgccgccgcagtcttcgccaccagtgagtacgcgcggcccgcgtccccggggatggggctcagagctcccagcatggggccaacccgcagcatcaggcccgggctcccggcagggctcctcgcccacctcgagacccgggacgggggcctaggggacccaggacgtccccagtgccgt

SEQ ID NO: 235755 - DNA, 360 bp, Homo sapiens
  chr11:67806323-67806683
  hyper
caggcctcctctccgggattaagcgcctcaggacccgtccgccaggccacagcctgggctcaacctctcccagacttcctggactccagtggagccttgggccgggggcggggcgtccctggcccctccccgtcgtcccgcctgcccggaaaggagtgagcggcgcctagtcccgggctggcgggagtgcagttctgagtcccgcccggcgtgcgcggagcggggcagccagcagcggaggcgcggcgcgcagcacacccggggtgagtgcccctgccggggtctgcggagccccagaatttcctgcccaccctcttccccctgccccggggaggagatcctggcgccccacccagttgg

SEQ ID NO: 235756 - DNA, 45 bp, Homo sapiens
  chr11:68039639-68039684
  hyper
agcaggtctgtggcggaagtgggtgttcccgggtctctgctgccc

SEQ ID NO: 235757 - DNA, 37 bp, Homo sapiens
  chr11:68080906-68080943
  hyper
ggaggtgacgtggtcccagatcgcggggcagtggggg

SEQ ID NO: 235758 - DNA, 332 bp, Homo sapiens
  chr11:68095751-68096083
  hyper
gggattttgtagagcgatgataaatttggcatgtctttattattattattttttcaacacttaaagaaaataaaagctggtacaaaggtatgtttgtttctgaaatgtgtttccttccccagatgttcttttctgccagttctaaaatgcgttctgagctcggtcctccagtttcctccctgtgaggaagaacaatgagacctttgtaaccacacaggggaaacggccgcttccctctgcagtgggcatgggggaggggctgggacgtcccacctcctcccacctcgatggaaaccacgagtctgtgccagcccagccgactgtcggggggt

SEQ ID NO: 235759 - DNA, 210 bp, Homo sapiens
  chr11:68227847-68228057
  hyper
agcattggccactcggattggtggtccgaagcgtccgtcaagcggaggacctgctgttgctacggcgtagggggtcccagccaggtttctccccgtttctgatttgtttctcaggctccggggtcctagaggttccggatccgtcaagtccatgggaaaagaatgcgcccctcgcgcttgactgacgaggcttgcgggccaatcggaatg

SEQ ID NO: 235760 - DNA, 38 bp, Homo sapiens
  chr11:68451835-68451873
  hyper
agggggggctctccgccgcacccgcctatgatggccca

SEQ ID NO: 235761 - DNA, 190 bp, Homo sapiens
  chr11:68518786-68518976
  hyper
acccgcaggggcccgacccggcccggcagcccccatccccgcctgcagagccgaggcccagcccggggaccgccccgtcattcctcctcggagggacgcacctggggccgccggggctgccgcagcgtggagcgagcgggatggggcgtgggccgggcctcaggcgcaggcggccgttggcggttggaga

SEQ ID NO: 235762 - DNA, 105 bp, Homo sapiens
  chr11:68607313-68607418
  hyper
cagccgcagcagtatcggaagggacccagtttaattctcttcccctccagggtaggcggcttgtttttagtaccaactcgaaacgttattttggcctgtgcatga

SEQ ID NO: 235763 - DNA, 127 bp, Homo sapiens
  chr11:68610532-68610659
  hyper
catttagttgttaccgcagaagaatttagaagagaaaatgaaagttctcctttgatcccgccccccaccaccgctgcagttaactctccctgcggttcccgggctcgctgttttaaaggaaggctag

SEQ ID NO: 235764 - DNA, 156 bp, Homo sapiens
  chr11:68611262-68611418
  hyper
gcggctgcaccccacgagcccgggcggctctcgcgcgtgaggctctccttgcacgtgggccttcgcggtttgcactacggaagctggactgtcattctcaccgcaaatgcccttccctcctttccctggaacctcagccaccgacaggtccccgct

SEQ ID NO: 235765 - DNA, 240 bp, Homo sapiens
  chr11:68671472-68671712
  hyper
agcttgagagagacgcggaggtggaggagcgcaggtacgggaggccgccggcgccgctccctcgcggtcggtcccgccgtgtcccgggcagagtctccgaggggctcggcctcatagtctggggcgggaatttcgtctccgacccttcgagtcaggggcagggatcgtccgtcccctgcttggccacctcccgagttgtcagtctcatcacttcctgggcagcgcgttccgtttggggac

SEQ ID NO: 235766 - DNA, 289 bp, Homo sapiens
  chr11:68816177-68816466
  hyper
cctccccagccctcggcccttaagccccagaacgctgccccgccctgggtggaacgaagctgagctccaccctagaggggcggggccctttagctccgccccactcaggagaaccccacccctccctccccgttctcattggctgggactgcagggatcccctgcgccacagtgccgtgcgcgcgtcagcaaaaacgccagggacggggtctccgcgcctgcgcagtgaagctgggcgccttcggggcttgagcttctgagggtcgggtccagcgcgtgggctgctgga

SEQ ID NO: 235767 - DNA, 36 bp, Homo sapiens; identical to SEQ ID NO: 202640
  chr11:69062306-69062342
  hyper

SEQ ID NO: 235768 - DNA, 1412 bp, Homo sapiens
  chr11:69451963-69453375
  hyper
gaggcgcggggatgcggggtcctccccgcagtcttccggaaagggcgggggagggcgcggcaagttccggagtggggcatgccgtgggagcccacgagggcctcagcgcggatcctccgccggaaaaccggctcccgcgagccgccgccgcaggtttcctaggccccgcgagtcccgcagcgaagccctgcgtctccgtccgacgcgggggtctgctcagcctcgggtgggccgcggccaggcctgactgcgggggagagggccgaacgtgacctccgaggtcacccccagccagctttctctcctgtggtcggaagtggttttcttctcgatctgggcgcctactccccaccacttggtctgagaggggctggggccggaaggccagggaatctctggtggatttgggggttcatattgctcagggtaccagccgatgcgttttgaggggcgggagtcgaggaattagaatcgcctttaaccctcaagagttgcgccttcagcctcgggatcccagatgcgtcgttggagccagggccgcccccctacctgttgggtttgcgttttaactccagcgcacaccttgccggcagccctcggagctaggggaggggtctcgtttccccgcagcccgccggacagacgactggggcacgggaggggcggtggcagggtggtctgtgtgtggctgaaactaattgatctggagcggaaacgcacgtctgcggttggggcgatggggggggcggtgcggctgtccatgtgccgagcgtgtggctgtctcgggtgggcactggggccggagttcgccccggcccacctcgcagttttggggcgcctgggatcggcgctacgtaagcgaagcagagctgccatagcacgtgggccgccacgcgcaccccaaaagcaagcagtgtggggggaaggggagctcgagcgccttcggagcccaggggccggctttcggaagcgttttcccgggcgacttaagggcttaacaatggaaaactcgcggagcctgagccaagtcctttcaagtcgccgccaggtatgcggctgcaggtgaccccacctgggtgcgcccgcccgccagccgccctggtggaaaagcgggtgcgggaggtcgctggcgaaaggtcgggactggtccctgcaccacccgcccccaacccaagccccgagccccgcggcgcgcagccgcgctgagtcccggggtctgcgtcgcggcgcgccggttcctgaatgaacgcgctcccttcccccgcctgaatgaaggttcccacagccagggacggtggcgaacacgcgcctgcagcggaattcgctttctcctgaccgaccatccgcccaggccgcggtcaccggggcgggggccagggggcgaggaaagcgtgaaggtgatttcagttaat

SEQ ID NO: 235769 - DNA, 507 bp, Homo sapiens
  chr11:69453701-69454208
  hyper
cagctggcgctccccgccgggccccaaattccagcgccgggccccaaattccagcgcctcccccgcgggttcctggacggctctttacgctcgctaaccgggcttgcaattttgcgctcgtccctgagccgggaaatcaacgaagttcctagtcgagatctgcccggtccgcctagtaacagcgccgcgcccccattggctcatgctaattccagtttcctctgtcttgcgcccgggatgggggggtgaagctccctcctggacccagagccggttgtgccggagtgggcgagcctctttatgccctgctgcccctagccgacttcggcccgcttcgcgcctcgggctgggccagggcgcacgcggggctcggggcccctcgccccacgggatgggagaggccgggtgatagctccgggccccataaatcatccaggcggccgccgggtcgggattttatgaatgaaaaagcagctgggccgcccttgtgcgcgggctgatgctctg

SEQ ID NO: 235770 - DNA, 1168 bp, Homo sapiens
  chr11:69454809-69455977
  hyper
gccagccccctcacgctcacgaattcagtcccagggcaaattctaaaggtgaagggacgtctacacccccaacaaaaccaattaggaaccttcggtggtcttgtcccaggcagaggggactaatatttccagcaatttaatttcttttttaattaaaaaaaatgagtcagaatggagatcactgtttctcagctttccattcagaggtgtgtttctcccggttaaattgccggcacgggaagggagggggtgcagttggggacccccgcaaggaccgactggtcaaggtaggaaggcagcccgaagagtctccaggctagaaggacaagatgaaggaaatgctggccaccatcttgggctgctgctggaattttcgggcatttattttattttattttttgagcgagcgcatgctaagctgaaatccctttaacttttagggttacccccttgggcatttgcaacgacgcccctgtgcgccggaatgaaacttgcacaggggttgtgtgcccggtcctccccgtccttgcatgctaaattagttcttgcaatttacacgtgttaatgaaaatgaaagaagatgcagtcgctgagattctttggccgtctgtccgcccgtgggtgccctcgtggcgttcttggaaatgcgcccattctgccggcttggatatggggtgtcgccgcgccccagtcaccccttctcgtggtctccccaggctgcgtgtggcctgccggccttcctagttgtcccctactgcagagccacctccacctcaccccctaaatcccgggggacccactcgaggcggacggggccccctgcacccctcttccctggcggggagaaaggctgcagcggggcgatttgcatttctatgaaaaccggactacaggggcaactccgccgcagggcaggcgcggcgcctcagggatggcttttgggctctgcccctcgctgctcccggcgtttggcgcccgcgccccctccccctgcgcccgcccccgcccccctcccgctcccattctctgccgggctttgatctttgcttaacaacagtaacgtcacacggactacaggggagttttgttgaagttgcaaagtcctggagcctccagagggctgtcggcgcagtagcagcgagcagcagagtccgcacgctccggcgag

SEQ ID NO: 235771 - DNA, 2955 bp, Homo sapiens
  chr11:69516891-69519846
  hyper
ttgcaagggtgggtttggagcggctctgggtgggagtcagcgtccagcgtgccgaccaccccctttctctgcagtcctctcacgcaggactccgccataaaacctgaaacaggcgctccgagtacacggagcacggcagaggcaccgagcaattttgagactctaaaatgctttgtcccgctgttcacaaaggagctggttgggccggaggcggccccgcctctgcatcctttctggggtgggggccccgggcaggcgcggccacccccgccctggcccctgctccgccagggagtccggggctgcgtgtgaggcctgcgcgggccgagacctcacacagcctcctctgcgcgcggggccgcgggaggggcgcgggttcgttcctttgaactcccagcctttgttcccggccaccagagccccagcgctcgtacacttccggccccgggacctctgcggttacctgggccttccctgccagcccccaccccctgcccccaccagaaagcgtttacaggacaggtgaggcccgcaggaggaaaagcactcccctggcgcaacatgactccagcgcatctgcgtctaagccacaccgtgctcctggtagattaaaaattaattctaaaaaaaaaatctctcctatcccaaatgcactgttttctgccttgcttgacaattgatttgtttttaaaggaaagttatgggtagatcctcttttttctttcccattctttttttcttcttttatactggagggagggaaacggaggcgaggaccacacacgcgcaggcagaggctgaaaaggcccgaggtgggttttcctgtttaatatcaaaggaggccgaataatgggtttcctcggtccggctaggccggcctttgactcaattggaaatgcaaaggcagcttttgcctattctctggctgctggctgagaccctaaatttccgtaggaaatcgtcggacatgcacttaatcggtctttgcaatctttccctcgaagttgcacgcgggtctgggcggaggaggcgaggaaaccctggattcgaaccagcgcctttctctccttcaggcctccgcccggggacaggcgccggtcccccgccccggcgcatccgccccgtggggacacttaccagcccctgcatcttgccgtcggcgcccatgcagaggtaccgcacgctgtgcacgcccttgatggccacggtccgcagagcgactgccttgatctccagcaaacctaggcgcaggggaagcgagaagctgcagcaaggaccgctgggcccgcaccacgtgggtgcggtcggtccacaagcctgtgcttctccctagcgtcccgcgctgtttggggactaacggagggatcctaacgtccaggtgccaaaacctggggttcccaggagttgaggggtccgcaggagcctaagggtggcaaaggaaggaagggcgctggggtggggcgcgcgcagcggggtggggtgcgcgcggcggggcgggcgggggtgctggcgggcactcactgtgcgcgctctggccccgcgcgcagtccacgacgccgtcggcacggatgcgcaggaagcagctggagagcccgtgggggccggaggtgtacaggtgccgcaggcggatggggtcgccccagccgtagtgcacgtggggccccgcgtccgagaaggcgagggggcgcccggccacggccagccagaggccggccaggatccatacgtggaccaccacacacccgctccgcatggcacctccctggggctctcggcgcagctccggcgatgggggtgcgggaggctgggcggcgaccgggatgcgctgcggggctgtgagtgccgggttgggatggtcgtggccctagatcctggacgcagcgctcctgctctgacggcgcggcggctccgggccggcagccttatatagtagcgccttacgggccccacgggtaggtgcccaagacacccgagcatttcttatcgggattgcatcaagcctccgccccccgcacacacccactcacaccccgcctccggccccagccccagccccctccccgggcccgggcaggcaggcggcggcttcttgtcccagccggggtgaccccgcccaggccgttcggatctgcgggaggaggaggcctcgcttagcggccgggtttcggggaactcctccccaccgcgcagcggccccgaggttcttggctgggagagtttgactttgtaaagcaatcgacaactggggcccttcccccaggcctcaggctcccagtggatgcactcggcgtggggcactagcgggggcggggtcaggaaccccggggccagaggttggggggcaccgagttttgcccccttcaccctctgtcgggaaaagcctcacctcggccttagtgcccttccccttaaaagcccactcgcactccctcccccgactttcgcagccccgcacatctgacgtcaaagccgtcccgtagaattttccccggcagttccgacagtctcaggttctttcagcttcatcttcttgcaattcctgccccgccccttttatccgggtaaattgccccccgacggggggccgggcgcgctctcggccggcggggaaacaatggaagccgcgcggactgtaggtggcgccgcagcctcggcgtccgcctgggctttgcgctcctggccccgcgcccctgcctgctccgcgctcgccccggccccgcggctgtgcgcgagatgcaacctgaaagggggcactgggaaggaggctctcgggcagggtgggcgggccagctgcgggattggtgaaccccagcttctcggctggagggtggtggaggcaggggcgcagggagggaggcctgggcctccgtttcccgttttttgagctgtcttgtgtcgggggtctggtttttgagtccccgagtccctgcgcacggggtcaggaggaacagcacg

SEQ ID NO: 235772 - DNA, 1277 bp, Homo sapiens
  chr11:69589108-69590385
  hyper
tgtaggggacccccggcggccgcacccagtcccggaccttcagacgcgagcccgaccccagcggttccccagcctgggccaggccggggcgcgtgtctcgggccccctgtggctgcaccgcgcgccctgtgcccacgggcgaaggcgctggaattcggcgctcggagcccgagtttctgaaggcgggaggcggcgcccgacctcaggggttgcgctgggctgccggagccaagagtgtctgcgtccccagccccgcgtcagaagggaccggagcccgagtccgccccggttcccggggcccccgagcaggtgcccgccgagggtctcagagtgtgactgagcgggttggcccggcggccgttgccccccgcccccgccccttcgcgcctggccgcgccactcactgtcgcgggtgtccgcgtgcgcgccgccgatgcggccgtcggggagcgcctggaggtggaagccgatgcccacgttgcagtagagccgccgcagccgcttgatgcccagcaggtagtcgccggcgccgctctggacggccgcctccttgggctgcgctgccaccggcaggcgcgccaacgagagcgccaccaggctctcccagcggcgctccagctcggcctccagcgtgccgttgggtgcagtgggtgcggcggcgccccctcggcccgcccagggcgccagcaaggccagcaggaccgccgggagcagcgctaccgcggccgtcccgggccccgacatcccggcccgagggccgtgcgtcggtcaggcggtcagtgcgcccgggaagctggggggcagagctgcgcctgtggcgtcccgcgggagcgcacggccgacctcgggcaggagtgcgcaaccgaggaggtgcgggaggcaagcgacggggcccccgggcgccgggctctaccccggctgcatggagcggcgagccgggcggaaagcgcgcggctggagctgggactctgaggagcagtgcgcgcctccctgagcgccaggcccgcccgaggccgagccgctatatatatagcccggcgccccctcctactcgcccgctcccgcggggggccgttcgcgttctcctgggcgcccggggcgctgtggcgttcgcggctggtcgcaggccgcctgccaatcagggccgggggaagggaggaggctggggactagcgccgcgagtgccacctggagggaccccggcccccacccttggctccgcccggcccacggacctgttcgtcccgccccttggcggctcctacacttctgctttt

SEQ ID NO: 235773 - DNA, 40 bp, Homo sapiens
  chr11:70049091-70049131
  hyper
tgagggcacgtgacgttcgggctgcgccctccccgccccg

SEQ ID NO: 235774 - DNA, 103 bp, Homo sapiens; identical to SEQ ID NO: 202648
  chr11:70117685-70117788
  hyper

SEQ ID NO: 235775 - DNA, 105 bp, Homo sapiens
  chr11:71159302-71159407
  hyper
ctggcctcacctgcgcacaccttggccactcacctgcgcacacctcggcccctcacctgcgcccaccttcccctggcctcgcttgcgcgcgctgctccacgccgc

SEQ ID NO: 235776 - DNA, 52 bp, Homo sapiens
  chr11:71159694-71159746
  hyper
gctgggggtggggcgtggcggagtggccacgtgggccgcgcggagaacgcgc

SEQ ID NO: 235777 - DNA, 217 bp, Homo sapiens
  chr11:71163705-71163922
  hyper
aaaaggcaaacagtgcgctacctgagctacttacacacgtggtacaggagtgaaaggggcaggagagggttcccaagaattcagcgccatccgcccagggtggcgggattcccagcacggagaatcgattgctatcgtctgctgtcccgcgggcacgatggagcgctcctaccgtactctccacttttggtgtatttggaacgtttcatgccgtatt

SEQ ID NO: 235778 - DNA, 446 bp, Homo sapiens
  chr11:71318342-71318788
  hyper
gctggcggtgctgctggtgacgctggtggcggccgcggtctcctacctgcggatggagcagaagctgcggcggggcgtgcgccagccccgcatcccgtggccccagcacaaggtgcgcagttaccgctacttggaggaggacaactcggacgagagcgacgcggagggcgagcatggggacggcgcggaggaggaggcgccgcccgcggggaccaggcctggtcccgagcaggctggactcggccgccggccctgcccgtaggaacaggcgcaggggggcgactggccagaggagcagtgaggggccgcctggtccacggactcagcctccctcctcgccggccttagtttaccacttcttaggtcggggggaccccctccgagtcccgcgctgtcttcaaaggcccctgtctcccgtcccccacgttggggacgcccctcccaga

SEQ ID NO: 235779 - DNA, 355 bp, Homo sapiens
  chr11:71639580-71639935
  hyper
aaatgagtcctaccgaggcaagatggcaggtgctgcagccaggaaaatacatttccgtgtgttttaatatttattttcactcactacaactctttcgtggagggagcggaatttaaacttccgggtcagcctcagtgcagcttgggaaacgtagttcctagtccccacgtctcgctccttggagcccagactgagggagcgtcgcgaaagttgcccgttttggaacgctcccatttggctctccaaagggaagaattggttaaatagttgcactgaaaataatgcgattcaaatttctcattttccaagaacgctcccttgctgaagcttgcaagggcacggtactcccctctcc

SEQ ID NO: 235780 - DNA, 426 bp, Homo sapiens
  chr11:71751819-71752245
  hyper
ctctgctccacagcgcctgtttctgagtatgtttacttgctctccctcttctctccctcccctttaaggatggcgcaggaaagggaggtgaggggggagaatccaccccaccccctcgtccatgtttgaacaaaaacccagagaaagagtgagggagaaaaagtctcggtgcgggggggccttaccagactcctaaagccaaacgtatctacaggttttaatccgccattagcatttaaatcttgaaaggagaggaggaagggggggccagtggaaagtaaccccacacacaaaagaaaagttgttggttttcttctcagtctgcctggcaggagcgatcttcctggctgacagccagaagtgcgtcacagccaggagtctgctttctttaaaggcacagcaagcttccccgatctgggagcgaca

SEQ ID NO: 235781 - DNA, 46 bp, Homo sapiens
  chr11:71752691-71752737
  hyper
caggccctctgatcgggggcaccttcctgccggccccagggcaggc

SEQ ID NO: 235782 - DNA, 367 bp, Homo sapiens
  chr11:71791551-71791918
  hyper
cttcgtgggctcgcgccagcgctgtgagcgcacaattagtttaaactatggccccgccccctcgcgctgccctctgattggcctctgtcggcggggcccgcttaaggacccgggaaaaggaagtttgagggccactgggaaagagaaggggtatcaccgcttccggaccccggcctgtacttgaaggcaaagagaactacaaatcccagcgtcacccgcggccttgaagccccgcccctgacaaactgaaggtcccggtaagcatcgcgtcagtacttatggcgcctgccgggttgtggtgacgaaagcagttgccatggagttgctctgagtaaccctgaggcagtgggacgccaagactggagag

SEQ ID NO: 235783 - DNA, 197 bp, Homo sapiens; identical to SEQ ID NO: 202650
  chr11:71814206-71814403
  hyper

SEQ ID NO: 235784 - DNA, 179 bp, Homo sapiens
  chr11:71934496-71934675
  hyper
gctccccgctgggcgtccggcccgcggaggcgcgagtttgctgactcggagggagccgctggggcgggggcgagtgctaataatacccgttcgttccgcagccgcgctttacagtttacacagctgtcaccttcgtttctccttaattaataataaaaatagccgccgttcgggagcgc

SEQ ID NO: 235785 - DNA, 854 bp, Homo sapiens
  chr11:71951578-71952432
  hyper
ctcctggagtgttccagggccgtggagagcagtttagggcgccagtaaaccttttgtctagggcatccagtcaaggcgggccaactgaacatctgtacacggagttgtacaaatagacaacagtctgctctagcccggctctcttcggccctgtgcctgccacaaactcagcctcccgggctccgggttttcaaagctgcagcgccggggtagggaaccccaggggtgctgactggcctgccccctctcctcctcagctcggccctgaggtcccctgggtctccccctctagcccctcggcctccctcctggcttctcaagcatcactcggaactttctgccctaagagggagacagagcggaggtagcctggagctaaacagatcgggtctcccaagggcctccaagtccgggccctgctgcctcccgtagctgcccaagcaccctgggaccgcgccctgccttcgggctgcatctgcctgtattcccctacccccaggtgttagacattaagctcccacacctccttccatgcgcactctcgtacacacacgtgcatacacgcacctgcacgcgagcctcagtgaggtcgatcttgagcgccagctcctcacgcgtgtaaatgtcggggtagtgggtctcagcgaaaacgcgctccagctccttgagctgcgcgctggtgaacgtggtgcggatgcgccgctgcttgcgcttctcgtgcaggccggatggctctgggaagaacttgtagggcactgcgggtgtgtgcaggggggccggggggggggcaaaaaggatgggggagtgagaagcagagttcaacccgttgtgtccagctccgggggaatcacacg

SEQ ID NO: 235786 - DNA, 73 bp, Homo sapiens
  chr11:71954802-71954875
  hyper
agggagggttgggccggggctgcgctcacctgccgagtagggcgcgggctggtggtcgcgtagggcgccaagt

SEQ ID NO: 235787 - DNA, 140 bp, Homo sapiens
  chr11:71955595-71955735
  hyper
ttccgatctggcccctcagccccgcccccagcgaggtcccatcccggcggagactgcggaggcggcccaggaagggggatggagaccgggaagagacggagcctgggatggggacagggaagggacgtggatagacagag

SEQ ID NO: 235788 - DNA, 141 bp, Homo sapiens
  chr11:71956132-71956273
  hyper
gacagccacaagcgcgggagcagaggctgagagcggagagaaaacgcctccggggagcttagacacgagggctggagcgcagaggggcccagggatgatgctggaggctctggggtgcggcctccacggggctgcggagag

SEQ ID NO: 235789 - DNA, 859 bp, Homo sapiens
  chr11:72353615-72354474
  hyper
ccccaccggacacccggccgctgtcaccccgcttctgtctcgccctgggttccctcggcccttccagctggcctgctgtcagcctgcgctcgctgcccctcgccccgtcgccacttctctcgcatctcgcaggggccgctctcagagcctccaccctgtctgatcgcaccctgtttccccgccaccactctggggtccggggcccggccagagccccaggcagagaccggcgcagtggggtggggtggggagggaaggggaaggggggcaggggccgcggacaccgcaggagcctcgggcttgctcctctccctcagcctaggaggcagggggaagtcgggagaatgttggaggtcgctgtgagacggacaggccctggagcagtcgcccatctgcgagggagacacgtgcgcacagacaccgagcgcacacacggcggccgccactgactggggcccccaggcctgggtgggcaggtctctgtcgccgtccccggagccggagagggtgcaggccccagggccacacggtccgcagttccgcggtgggacccgcgctccgggagcgcgtttctccgcagagcggcttctgggttcaggagcctgcggcagccgcgacgctcctgcgccccctgccgtcccatcgcggcggcgcaatccggcctcagttgccggctgcccggaggggccgcgtccggggattcagcgggtcaccggggtcagctccctgcccggaccgacccggttcttaggcctctgcttggcatgaaagcggttggggcggcaggacgtgtctggactggagggtgcgcttgggtctcgctaggcctttgccagcgacttgccgcatgaccttgctc

SEQ ID NO: 235790 - DNA, 124 bp, Homo sapiens
  chr11:72388173-72388297
  hyper
cagttctggaatccggcctccgcgctgcccccatagccttgagaggactgcaggctccacaggcttcagctacctctttgccgaagaaggcggcttcttctcagcgcccgcccccgccccgtcc

SEQ ID NO: 235791 - DNA, 327 bp, Homo sapiens
  chr11:72432832-72433159
  hyper
ctcccagggcctccctcctacgtgcccaacagcaacaacagcaacggcggcacctcgcttaccctcagacgcctgctgggtcttggggctgaggactcccacagctccggccaggcgggctgcgtatgcccaagaatgtcgtgtacctgcccgtgcaagcctgggtcccgcctgggctggtctcgcaaacagcctggcccctggcccctgggtgggtctgaggctgcgttctcttggaggtttttgagcccaggtatggctttgcacctgtgatttatgtctttaagtgtttgtgaatcacttctctacgtgcgtgtgtgtttgttt

SEQ ID NO: 235792 - DNA, 162 bp, Homo sapiens
  chr11:72433403-72433565
  hyper
cacccagaatcccccggggcagacacttcctccccgcccccaggctgcacccccacccaagctgggaagagacaaccaacagtgtccactgatcttgcaggccctcacagggtggatgcccaggaagtcctgactgacaagccctggcggtggcctctccac

SEQ ID NO: 235793 - DNA, 60 bp, Homo sapiens
  chr11:72463659-72463719
  hyper
cttgcgggtcttccgactgtctcctgaggctcaggtctaacccccgccacctcgcccgct

SEQ ID NO: 235794 - DNA, 106 bp, Homo sapiens; identical to SEQ ID NO: 202652
  chr11:72492447-72492553
  hyper

SEQ ID NO: 235795 - DNA, 144 bp, Homo sapiens
  chr11:72525202-72525346
  hyper
gaggctccgacctcgctcctgcttatgaccctcgcagccacaggagcccccacttaggtgaacatttcggacggggccccggcggttcagacccggaggcggctcctcccggaggcagatcctcccggcgtcggccttcggtcc

SEQ ID NO: 235796 - DNA, 318 bp, Homo sapiens
  chr11:72853956-72854274
  hyper
agtggggaggggggcgcagcatgcctgtgggatacgagaattccggcgttttcttcctctcagcccctcaacaccctactctccctaccagctagatgtgcgcgagagaggcgagcaaggacaagtcgctttgcggctggccgcaggtgccaggccattgcgattgtagggcggaaaggcagttgctctgcaaaggaaacggcggcactctactgcagggcattcaagtcaaacatcactgactccgctgagagggagccaagagaacgttaaggccgaggcccccgtttcacagacggggaggcaagtgcccataga

SEQ ID NO: 235797 - DNA, 256 bp, Homo sapiens
  chr11:72929153-72929409
  hyper
ccggcagtgagagcgtcgccgcccgaccctcccgttgcagcaccggtacagacacgctgaccccgcggccttgtcgctgggcggcgtcccggagcgggtggcgcggtgtctacccgggcgggttgagggcggtgccagggtcagtcaaaagtccgccccgccccctgcctggcccggcttcggggttggggaacagcgcagggaggtgggtagccgggctcccaggcacgtgggtctctgcggctgcggcgggacc

SEQ ID NO: 235798 - DNA, 1421 bp, Homo sapiens
  chr11:73018832-73020253
  hyper
gacggacccttcagttagcccgcggctccccgggctctccctggcgccgagtcccacccctttcccggcccagagagtgtgcgtctgcgtgcacctgagtgtcagtgtgtacgagagtttgtgagtccgaggttgccatgttggagcccctgggcaggaggtgtttccgcgcggaggctggtggcccgcggtggacgcggcgccctggctgcgagtctgcggagctgagcacgctcagcggttgtgtgtgtctcagcgactccctgggggcagctcggcctgctgggctcccgagggacctctctggagggccagagggtcgcctcagtctgcaagtcctccagcaggctttttcttcttcggctcctccctgattccctcccaccacgcggttcccaggctcgcgcacgcccggagcccaccccctcttttgggcgcgaggccccgccccccgcccccttgcctctgccgcaaagtttatttgcaacaaaagggtgccaggagcgagcagccaagggcgttgggcaggcggacgcagagtcgaggaaccaagcgctgggatcccgcccaggcggtgccgcggtgcccctggtcgctccagccgcggcgggggctgggcctgggggtcggcgctgaggcgggaggggccgcccgggatggagacgttgcggccggtggccacagaaacttgagccgcggcagagaaacctctgctccggtctctgcgtcctcttcccacactcccgtgcgctgctttcggcgtgggccgctgcgctcctagggagtgggggcgcagggggggttggccgcggctgcccgaggccagcccccccggagtgagttacgccactatggcggacggggcaccccggccccagctttaccgcagcgtctcgttcaagctgctggagcgctggagcggcggccccgggctgagggaggaggacacggacacccccggcttgaggcgacgcgcctcgtgccggccgaccacggctgcccggggccagccctctcggcgcgtgtccaagctggcgtctgggcccctggccgcccccgcgcagccgcgcccgctccgcagcctctcgccgtcggttcgccagctctcccggcgcttcgacgcgccgcgtctggacgacggctccgctgggacccgagacggaggcgtcttacccgcggccgcggaagaagcggccgagggcccagcgcgaggagcctggcccagcgtcaccgagatgcgcaagctcttcggcggtcctggctccaggaggcccagcgccgactctgaatccccaggaacgcccagccccgacggtgccgcgtgggagcctccggctcgggagtcgcggcagccaccgacgccaccccctcggacatgcttccccctggcgggtctgcgttcggcgcggcccctgaccggg

SEQ ID NO: 235799 - DNA, 78 bp, Homo sapiens
  chr11:73087925-73088003
  hyper
ggctggacggcggcgcctcggcgcggctgcggcgcggggcggccaagggggggtctggatggtgtcagcccgtgactg

SEQ ID NO: 235800 - DNA, 42 bp, Homo sapiens
  chr11:73309242-73309284
  hyper
ggaggagccggcgcggcgccgcgacacgtcccacagcctcag

SEQ ID NO: 235801 - DNA, 114 bp, Homo sapiens
  chr11:73358558-73358672
  hyper
tcccagtacgcctcgggtcagcatctcttcacgtcactccccctccctggggtgggcaggtccggagggcggggcccgggggcagctgggctctcaggcgctgcgggaggagag

SEQ ID NO: 235802 - DNA, 280 bp, Homo sapiens
  chr11:73372054-73372334
  hyper
tgggagagctctggaaccagcgttcgtctcgagctgacctcacccttctgggatggctcctcagccctgcggtcggcaatacccattcctgagccggtagcggcccctggtggctactgcgggaatgctgcctcctccccgctctggggcctggcggttgggaatgcccatcgttaggcgcctggtggttgtgcttagcgatctcagggtttcctcgctgctccgccctagcctgccgtagcggacccgtaggttccgggacatccgtagccgatccaag

SEQ ID NO: 235803 - DNA, 209 bp, Homo sapiens
  chr11:73472197-73472406
  hyper
gtgcatgcgtgcgcgccaccgccatcgccatcgccttcctggtttggacagctctaccggctcctcccgcacggcggcgacggggcaggttaggtttccactggcgtcaaaagaagccaggaggaggcggggcaagccagggataagttagtgggaggctggagcccttacgtcacttacataatgagccaatcggaaggggctgaggg

SEQ ID NO: 235804 - DNA, 101 bp, Homo sapiens; identical to SEQ ID NO: 202657
  chr11:73490690-73490791
  hyper

SEQ ID NO: 235805 - DNA, 910 bp, Homo sapiens
  chr11:73693756-73694666
  hyper
caggctcaccgagccgcagggagaacacggcagtgcgtgcggctgtgtctgtcggctggcggagggcgcgtcggacgagccgggcgagcgtggacagtcaatcccaaggcgcgcgcagctgggcttcgcagtggggctccgcgcaggcggcggcgcggcttaagcctcgggggcggggcccggggtggggcctgcggggcggggccgggcctgccagctcctacttgggtgcggagaccctggagcagccgcctttccgcggggaccgccccgcctagggttctctccatgactttctccactcccgtttccgtgcgtcccatcaccgcgtttactccttcgttccccgagatggtcactcccttgccactccccgcctctgcctcacactctctcgggccgccaacctctgtgaggatggcaagactgaccgccagaaacaagtcttgtccagtcacacacctcttgccttcccagccaggacggtttctaacagcgtccagcggggccgtgtcttaagtgcacttcctcttttatgggcccagcccccctacgctgggcaaactacccaccctcctgcgagcgagcgcgcggctggctcctgcagggcgggactggggcctcgcgaccggcctcgctgtcgattggttacagccgccgcgttgtcgggggaaggaaccaatcagaactgcagcaacaggtggcccggcaaccgacaacagccgttgggctcggctggggttcgcgccttctcccccggtggagcggcctggcgtttagggaccaggacactaaaggccccggcggggcgggagcacccagcgtgacctcacgctcctacacacagacaagcaaacgggccggcccccgcacgtgacaaggcagagccgggcccaggccagctgcctgt

SEQ ID NO: 235806 - DNA, 348 bp, Homo sapiens
  chr11:73882113-73882461
  hyper
gcgcatagggatgcgccctttgtggactccattgcgcagggtgcattgccctgaagagcgctcctccttccggtgaaagtcgtcgggttcccagccgggagtctgcggagttctcatactctgttacccagcttcctttgtatgagtgctgttgcgcacttccggtggaagcgctgaagcgagtgggtggagtttacggagccggtgggcggtaggcggtgctacgggtagctgggtgctgtccaaaggcgacagggcgtcgttaggggagcgagtcgtgaccggttgggccacactcaacgtgggacgaagcttcgcctactgtttgactacgtgcgtgcagcctcc

SEQ ID NO: 235807 - DNA, 112 bp, Homo sapiens
  chr11:74022745-74022857
  hyper
ccctcccggctcaggccccgccctctggccccggcccggcccgtcccgtccaccgcccagtctcgctccacgccccctgactccttccttgtttcgacgcctcacctcgctc

SEQ ID NO: 235808 - DNA, 371 bp, Homo sapiens
  chr11:74178231-74178602
  hyper
cacatgctgctccacgatcactgcgctcgggaggatcggggaggatccgggaggactagcttggtatttgcagcgcccacccctcccccactccccctcggttccacagtctcacggagagcgcgccgtggcccttggaagggaggcgggaagacccctcatttccaccccaggccgcagctcagccttcccagctgggtgggtgccttacctgcctctcagcaaggctccggggcgcccgtttgctcgctggacacggcgccctctgaccgagggtggcccaagcgctgcgaccctgtgcattccaccagccccgttccactccgcgggtgcccagcaccgcccagcgcgctctctggctctgggctccc

SEQ ID NO: 235809 - DNA, 31 bp, Homo sapiens; identical to SEQ ID NO: 202661
  chr11:74204886-74204917
  hyper

SEQ ID NO: 235810 - DNA, 133 bp, Homo sapiens
  chr11:74303668-74303801
  hyper
gaggggttagaggcgggtcccagcgctgccgcaccatggcggaccagctttatctggaaaatatagacgagttcgtcacggaccaaaacaagatcgtgagcagctactactggggaacgcgggcgtgcgaccg

SEQ ID NO: 235811 - DNA, 255 bp, Homo sapiens
  chr11:74394498-74394753
  hyper
tttacaagcgaaaacaaacacggccacaagcagcccctgtgcgacgcggccccgcgcccgccagcgccgccgccgcccggtcaaagccggctttgtgcccgtcccgccgcccccgcggcccaggcgattttaattagcgtctgggtctgcgccgggagatgggaatcaaagcccccgttcttccagcgcccccaccgcggcccccaccgcggcccccgcctctcggatccccgcggctccgcgcacccctgctgg

SEQ ID NO: 235812 - DNA, 358 bp, Homo sapiens
  chr11:74442396-74442754
  hyper
gcggcggtcccagcagcggcggcggcgcggcggccgcggagggaggctgagcgcgggccggctgtgctcgccaagggcttcaggcgccgcgctcgggcgcatttgtactttgccgcgggaagcaggcagcccggcctggcgctggcctagcgctggcgcctcctctggggcaccgcgggctcggtggattggccacccgagaaacaggcccactttttcccctcctctcttgtgcgggtctccgggacggacgctccaggcgcggcgccgagtggaggcgagggggctgcggagggggaaggggccacgcgggccacggggtttaacccctgactccccgcgacgccaagaatgcagg

SEQ ID NO: 235813 - DNA, 214 bp, Homo sapiens
  chr11:74459626-74459840
  hyper
caaagtttaacatcgttcagaattgccagtaaagcccctcagttcccacctctttcagttcagtaagaggaaactgcaaggacttttcgagagtgcggctgatgaccgcataataaagaataactaataaatattaatgaagtatcccctctggccaatcaggtctgaggagaaccctctttgggctcacagaagcctcgcccctcatgaatat

SEQ ID NO: 235814 - DNA, 424 bp, Homo sapiens
  chr11:74659856-74660280
  hyper
taagtgccacaaccgggctagaaaaggatgaaggacaagctcctgcccactcctttggaaactccacacctgggccggagaaagactcgaattcgaaaactaagtttcagtcgcacctgcctccggcgtcgcttcagcctccgaggggtctgcggaggcgacgtcccagtcaggagggatgcgcgcctgcgagccccccggggatctcggagccgctccactgcggtgcctgccgctatcttccccacgccttagtaactgcgacgcgacggcagacagtgtaggcggcaaccgacggccgggacgtctaacctcaagtcccagcaagccccgcggccacgtcctctgactacctcgcgccagcaagacccaaactacggatcccgattgactccgcgcggcgcgtcacgctgtcagctccagc

SEQ ID NO: 235815 - DNA, 58 bp, Homo sapiens
  chr11:74851768-74851826
  hyper
gcagtgtggccccagcgcaagggcatcagctttgggggccaaacgcacctggtctcaa

SEQ ID NO: 235816 - DNA, 1380 bp, Homo sapiens
  chr11:74951684-74953064
  hyper
gaaagcgcagcagccgacagccctgattctcgggagcctcccaccccgcctcccacggcgaggagggcgcggagactccgctgggggcggaggacgagaccgggaggcggggaggggggaggcaaaccctgcccactcggctcggagcccggagcggccgcggaagccggaggccggcgcgcagggcgagggcaccgggggcggggggctccgctccccgtctgacccctcttgcccccggccagtcagccagtaagtgcggctcctcagactttcgagacagcgaacggaccgaccgggactgccagccgctccgggtcaaggactcgccccacccgtgccccccaccaggcgctcccaactcactggtgagcgcggcggcccgggcgctggatgcgggggcggccgcgatggccccgcgcgcgggacagccggggctccaggggctgctgctcgtggcggcggcgctgagccagcccgcggcaccctgccccttccagtgctactgcttcggcggccccaagctgctgctgcgctgcgcgtcgggagccgagctccgccagcctccgcgggacgtgccgcccgacgcgcgcaacctcaccatcgtaggcgccaacctgacggtgctgcgcgcggccgccttcgccggcggggacggggacggcgaccaggcggcgggcgtgcgcctgccgctcctgagcgcgctgcgcctcacgcacaaccacatcgaggtggtggaggacggcgccttcgacgggctgcccagcctggcggcgctcgacctcagccacaacccgctgcgcgccctgggcggcggcgccttccgcgggctgcccgcgctgcgctcgctgcagctcaaccacgcgctggtgcgcggcggccccgcgctgctggccgcgctggacgctgcgctggcaccgctggccgagcttcgcctgctgggcctagcgggcaacgcgctgagccgtctgccgccagccgccctgcgcctggcgcgcctggagcagctggacgtgcgcctcaacgcgctggccggcctggaccccgacgagctgcgcgcgctggagcgcgatggcggcctccccgggccgcgcctgctgctcgccgacaaccccctgcgctgcggctgtgccgcacgccccctgctggcctggctgcgcaacgccacggagcgcgtgcccgactcgcggcgcctgcgctgcgccgccccgcgggcgctgctagaccggccgctactggacctggacggggcgcggcttcgctgcgcggacagcggcgccgacgctcgcggagaggaggcggaggccgccggcccggagctggaagcctcctacgtgttcttcgggctggtgctggcactcatcggcctcatcttcctca

SEQ ID NO: 235817 - DNA, 256 bp, Homo sapiens
  chr11:75062273-75062529
  hyper
ggttgccagtgtgtgcgccagcatgcctgtgccacgggttagtgtgcccgtgcgtgtattgtgtgtcaacctgcccccgtgcgtctctgcggctgccggccaatgctgggtgtcagcgagctgtgtgtccgggccaggagctgcggcccacatggggcggcccggccctcgccctttgggtccccccgcccacggccctgccggggagaccacacaggagacctcgggtggaggagagctggtactagatcccgcg

SEQ ID NO: 235818 - DNA, 582 bp, Homo sapiens
  chr11:75294169-75294751
  hyper
gccgtgtggggcgtcggcaggtatcacgggtggggtccattgtgtgaggactaacatcgcggcctttccccagaccagccaccggggactccagagaggcctcggcccagctcccggaaagggtctcccagccaggccttctagcggcccaaagcgggtaggcagagcgcagataccggggcctctttcgcccaccctcgccagggcactatccttcccaccggcccgatcccgcgtcccgaggtctcgcggggccaggctgcacgggcggcggagcccggagcccggggcggggccggagatgagcctgcaggcggggggctgtgcgagtgcgcggggacgggggctgctgtttccgagccgagagccctggtagcggggctctgtgggcggagacgccctcccgagcctgggcatcttcggagtgggactctcgggtcggagttccgccgccggcccatccagtttcagcgggtcgcctttgcctctgggccgggtggggagcctcccattccagagaccccccgactccctgcccctcgcggcgtaggggcgccctttctgcggcgccgcggggccgtc

SEQ ID NO: 235819 - DNA, 1123 bp, Homo sapiens
  chr11:75378396-75379519
  hyper
gggactggagggaggctgcacgctaggcctgcgctggggatcctgggccccgggcagcccgcggggagggtctgcgtggtgactcccccgcgctagcagcggccgcgtctcacctgtaggagctgctcactgcactcgccacctcctcgcggatttgccggttgagggcgtccgccgcggcgcgccccctgccagcctcggggccggtggcctggacctgggcctgggccgcgggcagcggcgtctgctcgtgccccaggccctcggcgcggcgcacaatccaggcaggcccggccttcctgcgcgtgtcgcgctcgtccgccccggacgcctttccggccgccaggccacccgctccgccgggggccgcctcctgctcccgggcctcagcggcggcctgcactggccagcgctcctggctctgcggccggcgcttgggcgccccgagaatgggcgccgacgcctgggaggccgcagagatctgcacgggcttggggatccacgggtggtccccgcggcgcggcagcggccaggcgcggaagtccttctggtactgggtctcgcgctcgaagggagcgtcggagggctggtattcgctgcgcggccggcagctgggctcgggccgctgcaccttccaggctcggtaatcctgccgcatcaccgagtccgcggggccggaggtggagccggagcccaggcccgggcccggcccgctccggccggggcccgccgccggctcgcgctcgccggtaggcccaggcgctggccccgttgcccgggcaactgcatccaactcgccctgggctggctgcgtctctatggcaaccgcgcgcgccgaggggggcgcgagcgccggctgcgcctgctgctgcggcggcggtggctgcggcggggcgcccgggtgctcggtggcctccgagtacttggtgaaaaccagcggcacagcgatgtccgctttgtccaactggttccagaagcgggcgatgcagcaggccctcgtgatgcacggccacgccatgatgctagctgaaaagccggcctcctctttcttcttgtggttctaaagcaagtctctataatcttccttcagcctccgatcctgaccggccaatgtggttcccac

SEQ ID NO: 235820 - DNA, 38 bp, Homo sapiens
  chr11:75380179-75380217
  hyper
aacaaaacaaaaacacctgctgtcgtcagcttgcgctg

SEQ ID NO: 235821 - DNA, 81 bp, Homo sapiens
  chr11:75526101-75526182
  hyper
ccttgagtccctccgcccccaagtccagtaatgccagcgatggacagaccttctacccaatagcacgccccttttctgccg

SEQ ID NO: 235822 - DNA, 463 bp, Homo sapiens
  chr11:75863223-75863686
  hyper
gaagcagttgggacccggagaagttagtcttggctaagttcacagagctaaaaagtgacagagctaggacttgaaatcaggacctttgagtcacgtctctgcctgacctcagccctgcgggccccgttcccgccattccttcctgcctctcacgttgactgggctccccctgtcggtcggcactggctgaacagccatggagtggcgctttggggaaaccacgggcgaccaggaaagatctcaggcaagcctcgggtaagtgagctgtaaactgagacctgaacccagacacagcccatgccaggccgagcgaagagcctgtgcaggggcttggagtagagaagagcacggctcctgtgaaggattcagaggctggagctgggcgatgggccaccgcgcggaggaggcgcgggcggtggtccgagttcctcaagggatctacagacggcgcccctcctaccca

SEQ ID NO: 235823 - DNA, 462 bp, Homo sapiens
  chr11:76032907-76033369
  hyper
tgcccgccccacaaggcccacgcttgcgccctcgggctgcgcagggcgagggtttgggggcgcggtactgacgggtgtccaggcctctcctcgaagggttccgcgcgcagaaaggtgggccggggccagaagacgcgctggaaaggcgttttctgccccctccgggcctcgggaatatttgtgggctgccggcggggcaggcggggtgggggaggctgcccggcgggcgggaagccccgcgcactcgggtcccctgcggtccccggcgggggtcggcgcgtgcggaaagcggcccgagcccccaacctcggcccgtccgcaaccgaagaggaggcgaccgcagcctggaaaagaagagcccccagctgtttccttccacccgggcgggcgggacggagaagggagggagcctgggagagacgcaggtgtggcgctcgcctgtgctggcggggtggcagccgg

SEQ ID NO: 235824 - DNA, 73 bp, Homo sapiens
  chr11:76381703-76381776
  hyper
ttttgcgcaaacccgcccccgggtcccaccccgcgccagaccccggggtcacggcccgaggaggagcaggccg

SEQ ID NO: 235825 - DNA, 374 bp, Homo sapiens; identical to SEQ ID NO: 202669
  chr11:76494603-76494977
  hyper

SEQ ID NO: 235826 - DNA, 151 bp, Homo sapiens; identical to SEQ ID NO: 202670
  chr11:76510330-76510481
  hyper

SEQ ID NO: 235827 - DNA, 204 bp, Homo sapiens
  chr11:77184261-77184465
  hyper
actcggtcccggaccggtactcgtgtggcctcccggctccagcctggcctggccccgccccgccccttccctctcccaggtctctcgaatcgcccggcgtctgagacccgcgaccccgccggtacgcgcacagggggcctttgttggcccgacgggagcgggcctcgcggggcgccgcccgcctcaccttacctggcgcctcct

SEQ ID NO: 235828 - DNA, 204 bp, Homo sapiens
  chr11:77184765-77184969
  hyper
cgagggaagggatgatgggggggcgggagggagcgaggcgacgcgggcggggggggaaggggggactgaggggcgaggtgcgaagggctcagatggcctctgaggcaggaggtggtaactggatgcggagaccaggttcctcgagggggctcacgaaagcgcggggctccgtggaaaagggaatgagagtccaagggggaaggc

SEQ ID NO: 235829 - DNA, 561 bp, Homo sapiens
  chr11:77185269-77185830
  hyper
gcggctgcggctccggtggagccgtgcccgccccgcctcccgcaggtgagagggggcggggagggcctgaccgacccgtgggagcgaggccaaaccctggcccgcatgagggcgaacgcctgggattacgtcatcggcgcgtgacgccagaggctggggaatcacccgcttgctgcgtgacgtcatcgcgtcgcgtcactgttctcggtccgctgtccgtggcgggttgtttccgtgcagcctttctatcagacaattttgggacgatttctgggagggctactgtagtagtcaggatggagaaagacggctaacttccggcgctgagggtccttttcaggttaacaaagcaccaccgcatctatgagctcgttgtcaagggctgaatttgaaaactatccgatgtcgtgtgatctcacagccagacatgtattatgttttctttctgtgggagagggggcaggggtgggaggaagacaaagaaattataacggagatgtttgaactaatgtgaactgacatacgaaaagaatgggcttcctttcacgttttttcccctac

SEQ ID NO: 235830 - DNA, 82 bp, Homo sapiens
  chr11:77300373-77300455
  hyper
gcccactaactcacccgccccctgcgccgcgtctcccctctcaatttcagtcgcccattgataaaaacgaggtggctatgtg

SEQ ID NO: 235831 - DNA, 240 bp, Homo sapiens
  chr11:77348586-77348826
  hyper
gaggagggcggcgcgcaggaggccagcgctggggaccaggaaccctacctctcagcgatgtaaagggtaccagtgccgaggcccttcccgttcagcacagcctcagtgtctggctgctgccgcaggagcccctccgctggcccaggcggcgggaaacttttgaggaagctcatagcagcagagtgcggcaacacaggccctgagggagttggagcacagcaatgcgtgcaccacaccgcc

SEQ ID NO: 235832 - DNA, 303 bp, Homo sapiens
  chr11:77790782-77791085
  hyper
gcgatcatggtgacgccgtttccacttgaggcctggtctcagaccacgaactacaaggaaaaccacgacgaccactaccccggcctaagcggtcagctttctcctcctcctctgcgcgccggactcacgggcacggcgcagcgcggtgcagcgcccaaacgcttcccggtacgtgttgctgcgggaacccggcacgcgaagttccgggctactaagtttcactttgctcgtccgcccgcgctaattctctggtgggagtgggattcacgggcctggtaacgcggggtcgaggagtaccccaaa

SEQ ID NO: 235833 - DNA, 78 bp, Homo sapiens
  chr11:77850824-77850902
  hyper
ggaagggctcctgcgcaggcgtttgtagccacttttaagttttatcagctagttcatgcttgcgttgaaagagtggtc

SEQ ID NO: 235834 - DNA, 374 bp, Homo sapiens
  chr11:77899551-77899925
  hyper
ctcagtgggcccacgtaccctcgccggtagtccccgagccccgcgaccccggccgtgccgcacccacctcctgccctcgctctgcagcctctccctccgcgagcggccagcgcagctttgcgaggggggcggagggtaggagcccagcccaggggcgtggcggtccggggtctgtgcgctgccttccgggactggtagttctctctgggctcctcgcagctcggcgcgtcgagagcgaactccatctcccaggaggcattgcagcgagttgctctgcgccccgcctcgtccccgccggtgtccggccggctggccttaaaggggacgcggtcagagtggcagctcgcggggtggcccccgctccggctccgccc

SEQ ID NO: 235835 - DNA, 165 bp, Homo sapiens
  chr11:78127714-78127879
  hyper
cacttccaaactcccgcgactaccccaagaccatttcggccaaatctcagtaactggcaccatcttgtactttgacctcaccaggcaaggcatcctctggggagaggggttaaaaaaaaaaaaaaaaaaagccagaactccacggctcagcgccacgctgttcca

SEQ ID NO: 235836 - DNA, 50 bp, Homo sapiens
  chr11:78128410-78128460
  hyper
tgtatttagttcacgagcagaccggcttgggaggcgccgcagccgcaccc

SEQ ID NO: 235837 - DNA, 539 bp, Homo sapiens
  chr11:78673012-78673551
  hyper
ccgcggggcaagagcggggctgcctgagcccgcggagccacgtcaggcccccagctcccccggatcccaccacgcaccaggcccctccgcccggcaagtggcccaagcaggcatccgcaacggaaggacaattttaaaaacaaaccctcaaaagtaggaagagagagggacttaccgttcgccgcgacccccaggctggcggagccacttttaactaagaatgaattagggacaaactcttcctcagagtctgagtccggggttggctgggccacaccgttgcctagcaaccgcctctggctctcattggccggaggggaggggggcggggagggggactgctcaataggggttgatgaagcaggatgaacaatgcaagggagcacctgcgaaccacaaagacaaacacagacagaaaaaataatgaaaattgattttgaggcacacggggagggggagggagcaaaataaaacactcatcaacgggaagggggggctcccaacacggggcgatctactgcacacgtgggccgggggcg

SEQ ID NO: 235838 - DNA, 702 bp, Homo sapiens
  chr11:79148414-79149116
  hyper
gcgcgctgtgagtccgcaggaacgcggccgggccggggacgggagaaaggcgcggccgggaccctgcactgtgccgcgcggcgcttgcggctggaacttggcctggaacgcggtcttctcggctccagtttcccgcccaggccccgcccacccggccgccccgctggttcgcaccgctgctccggccaccgaggagcccaaagttggcggcgtcccgcggactccggcggagagcgcgagggagtcgcggccgactcctgtaccacgaagacaactggaggccggcgggggaggcgggccacgaggggctggggcgagggagctgggatgcgcgggcccggctcgccgggaaacaggttgccgcggagtcccgtcccctccccctctgcggtccccgccgcgacctgattcccgccctgcccggggagctaacccagccgcctccggggcgccctccttcttcctggattcccacggctggaccagagcccctctggcagccgggttaaaggctccttcagcaaggtcaaggcgcggccggctggcacctggggatttttttccagccgagcactggcttttcaatcgcattgttaaggatcatggcagcggcaggaaatccgaagggccccacaggtctgcgggagggaggatttattttacagcaaggaacagattcagacagatcggggatttcagtgg

SEQ ID NO: 235839 - DNA, 544 bp, Homo sapiens
  chr11:79149331-79149875
  hyper
tctctatcaaagcccatcaacgtgatacacaggctgcggcgctggagggaagcggcgaaacggggagaataaacgcaacagaagcaaactgctgtctgcagaggcgagaggcgaaggaacggaagccatacccgaccccagccccatcccgtccccatcagcgccgggctagcgcaggaaaccaggaataggtgtaggtaagggtggcagcccggcagagccagcgttctactccctctaacccctcgccagcgtgggcctggatggctgggctgcctgggcatctccaagggggaccaggcaccgcgggcaggtttctaaacacgtgaagggcacagggcttgaaagacaaggaggggcgcccaggaagggcggaaaagaggggctttggggctccccaggacaccaagtcagtttctgaaaacggcgttccctggaaggccttccaacacctccgagggaagacttggagctctgaagacccaatgaaacctcagttctgactgactcctcctctgcgatcaattccggatgcccccactta

SEQ ID NO: 235840 - DNA, 390 bp, Homo sapiens
  chr11:79150291-79150681
  hyper
ggctgcctccctgcgcccctttcactgcgtcgatggtttacagataactgcatttctataaaccctctctccacggttagggggtgggagggagttagagatcgggtgggggcttggcgcggtactgttgagggctctgcacccaactgagcagtaatacactcatccacatggacgcgggtgcataaatcgccttaacattttgccctgaaagcggagccaatttccaaagttaaggaccacgcagctgaatttccagtactttccaacctcgcctaggcgggggcaggcagagaaggggcgggcagcgggcagctaactcgcccgacccccccgccaagaaggactcactaggtgaaccccccgcccttcacccaagtagttggttgt

SEQ ID NO: 235841 - DNA, 132 bp, Homo sapiens
  chr11:79150741-79150873
  hyper
cccactaccttccagtctgctcctccaatgtaacgaccgcatttaaaaatggcaattaaaatgactgaggagctcggtgatcacatttcaacccagagcacatttcccgaagctgggggtgagagtagtcat

SEQ ID NO: 235842 - DNA, 332 bp, Homo sapiens
  chr11:79151053-79151385
  hyper
cccgtgcggggctgctgcagccggcacttgccccgcagggcaggctgcagccgctgaagcccggcgccgcctcgcgggctcctccagcgcccgacgggggcctggggcgagctagtctgcagaggggctgcaggcgaccgggccggggcggggaacgggatccgggagaggcagacgaacctggggcgcgccgcctccctcccacccgcttcccacctccctgccctcccccaacccttgctcccaggctccagtccgcggcgggctccgggggctgcggcggctccaggctccagaacagcttgcctcttcggccacccgcgccctagcct

SEQ ID NO: 235843 - DNA, 269 bp, Homo sapiens
  chr11:79152001-79152270
  hyper
acacacagaaagagagggcgagcgagagagagacacacacacacacgcacacgcacacgcaggttacatgaatgggaggcggtagccaatcctacgaggccggcgagccgcgcggcgcactggcgctgggagcagggccgcactccggcgcgggggggcgccacgcaggtgatgggcgcctctccgggggccacgcgcggccgctccctcaccccagtctcggttcctctgtctccttcccccttcctctccgccgccttctccatctt

SEQ ID NO: 235844 - DNA, 124 bp, Homo sapiens
  chr11:82444962-82445086
  hyper
cggcgaccgtcccggtggtagaggggaggggcttacttagcctggcttggaggagtggggggtcgctttagttttctgagctttctgaagctcaacgccttaactccttcgtttccctttgccc

SEQ ID NO: 235845 - DNA, 254 bp, Homo sapiens
  chr11:82782800-82783054
  hyper
aagggaaggtctgcgatgtcctgagtccaagggctggagtcagtccctgccctggtgctgctgctacacttagctcagctggagcgagcggcaatcgcaagcccagcagcagcagggggtggagagaccgtagcacaatgaatgcagtggggcttttgcaatgacatcatccctctgtccaaacgtccccaatagccatgctcgggagcggtgctttctgggaactgtagtcttcttacgtcctgaagggatac

SEQ ID NO: 235846 - DNA, 111 bp, Homo sapiens
  chr11:82867865-82867976
  hyper
ggttgggttgggccgcgggaactgccttcccaggcctattggcttccctgaatgggttgttatggtaacaaatgaccgaacagtcccttatgaatcggccaatgagaaggg

SEQ ID NO: 235847 - DNA, 127 bp, Homo sapiens
  chr11:82905087-82905214
  hyper
cctcggccactgccgcagcgtctctagggagagagttaggggagatagtggccacagtcacagctgctcttgggagagagttaggggagacagcaccttctgcagcagcgacgtgaattttagtgaa

SEQ ID NO: 235848 - DNA, 148 bp, Homo sapiens
  chr11:82905695-82905843
  hyper
gtcggaggtgttgcgccatgcccggggtggccaattcaggcccctccacttcctctagggagactgcaaacccctgtgagtcagactgtcattggccttcatctctgtcgtattccttttctcacttaagcccgcaacagccttagcc

SEQ ID NO: 235849 - DNA, 521 bp, Homo sapiens; identical to SEQ ID NO: 202674
  chr11:84148448-84148969
  hyper

SEQ ID NO: 235850 - DNA, 237 bp, Homo sapiens
  chr11:84431426-84431663
  hyper
acaacaggggacattccttccgggctgcggcagtggcagctcgctgggggacccaaacgctgtgctcgccgggcacatggagcgacagcctagaccgagctgccgcttcgatcactgccccctgcacccgccgtggccatcccggagccccggtggaagcaacgccgcgggcaagtaccgagcctctcggggtctcccttccctggggaacgaggcgtgtggggggagggacagaac

SEQ ID NO: 235851 - DNA, 424 bp, Homo sapiens
  chr11:84431903-84432327
  hyper
catactgcagctcccgatttggtaaaaagccagtggcttgctgcaatccagagtcactgtggggagcgctggccgggcaagtggggtgggaggaaggggctgagaaagggaggaagcgctgtgcttgccagactggccctgcctttgggcgctcttggtgccacgaaggagtccccagcgtgggagcgcgggacctccccgcgctgacgtgaccccgagactgcatttggcccccaccgctacagccacccgagggtagaagacctccgaggccgacttcccgggaaggggaggcccgctcggagcgcggcagggaacttcctcccagccctttgacaacagcatgccttgccgggggcagagggccagcaaagaaatctggggtagaaaacaggctcaaaatgatttcgctggtgccctacga

SEQ ID NO: 235852 - DNA, 42 bp, Homo sapiens
  chr11:85339594-85339636
  hyper
ttcccgcccagggcgttctgggtccccgcccaccggcaagtc

SEQ ID NO: 235853 - DNA, 230 bp, Homo sapiens
  chr11:85359003-85359233
  hyper
cccgcccacgccgcgtcacgagtcagccaaagatggctgcgcccaggtaatttgagcaaaggccacagtgaactccggcgtggctgaggaaggaggaggcacccacaggctgctgggaggagagcataaggtactggtattccgggggagggggtgaagtaaatgtcccggtgtcaggagaagcacgacgcggtgacacgctagctaccagcagcgctgcgcgtaaatga

SEQ ID NO: 235854 - DNA, 182 bp, Homo sapiens
  chr11:85521825-85522007
  hyper
ccccgtgccaaaacgcagttcccattttagaactggttagactaaggaacaacattctacaccacctccctcacttaacagaggaggaagcagagaccaagagagggaaacaaagttgcccgaggtaacacagcgagtgggccaagtagagactggaacccgagtgcgcacctccgagtcgc

SEQ ID NO: 235855 - DNA, 79 bp, Homo sapiens
  chr11:85522511-85522590
  hyper
gggccttggagcccgagagtgtggagcactaggagcctctgcactccgagaagggacagccaccgcgcagggaaagggg

SEQ ID NO: 235856 - DNA, 160 bp, Homo sapiens; identical to SEQ ID NO: 202676
  chr11:85780826-85780986
  hyper

SEQ ID NO: 235857 - DNA, 221 bp, Homo sapiens; identical to SEQ ID NO: 202677
  chr11:85955560-85955781
  hyper

SEQ ID NO: 235858 - DNA, 222 bp, Homo sapiens
  chr11:86085687-86085909
  hyper
caacctcgctgcctcgagcttctgaatcgcctgggcaacctggaagccgcccatctaagggggtgaggtcgaatcccagccttgacgccttagcaaccgagcgagcctttctcgcgtcccagcaacgcgcccttccctctgccgggcctattctccctggtgcccctcccttcctcgaggctgcagctcacccctcattgggtctctcgttggtcaggaggg

SEQ ID NO: 235859 - DNA, 1001 bp, Homo sapiens
  chr11:86382605-86383606
  hyper
gtcgcctctctccacgcataaaagggagaggagggacaagaaagccaaaccaagtcacaacaagcccctgcaaggcaaaaacagaaaaaccgctggaagggcgcccgggaggatcctttctgggtccagggggcggggcgcaattttccggcagccacgggatcgcaacgcgggccgtcctgccctctggcccattaccttgttgagatgagggttcctggtgacatcgtatccgcgcttcttcaggggcacagggcgcgccgggccaggcttggagtggcagccttgggcgggcgcggtgggtgtccagcgcgggagggcgccgcaggcccggcccggccagggagccagccgcgtgcctgtccccagcgcggcacccatggtccttggcagacctggcacgggagagaaagcaaggtcagggcctccttccagccagccaggacccacgcgcgctgcggggcaccgggcctgatccggggacgcgccctctgggagagggcaggtgctcccaaagggttaaatgttccagcccccgccactcctcggctgccacctgctcggctccgcgcggggcgccaggcctagccaagagccaggcaaagcgaaaccaagccctggaagcagatccggtgcgggtgacagccggcgccacccctgcccccatccctgtgaaaaagaggcgactgcgcggcgaggggtccccgtacccctaatcccgcgtggtggcttgcctcggtcctctccttccctggcccacctgcgctgctcggggagctgaggtctacgcggtcccgctgcggagcaggcggggtgaggagctgcggtctgtgagtcctctcccgccaatgggtggaccgcgctggcggccgcgagctcgcggagctggtgagttcctcaaagagcggtcccacaacctttgttctcagtgcctggcttcccctgaggacgcgcgtggggcgcctcagcactgcgtgcacgtggttttccccagtgacaag

SEQ ID NO: 235860 - DNA, 264 bp, Homo sapiens
  chr11:86511115-86511379
  hyper
gtggcccgcgtccctagttctaggctgttgggggaggggtcgccttttgtaggggacctggtctttttgcgagctggcagcgtgctcccagcagcgaaggccgtagtctcgctcaggaggccgcgcgccagacccggggatgcgcggtgttcaaagggtgacggcgcgcgggtcccgggcaggagagcccgccagagccggtgctgcctggcgccgagaggcccggactggcgactgctgccgcgccaccggggcccacctgcg

SEQ ID NO: 235861 - DNA, 390 bp, Homo sapiens
  chr11:86665886-86666276
  hyper
ttgtcagctgcagctcggcgtccgtctgcagctcgtgcccaaccaggttgggcatcttggtcacgttgtagccgaggttctggcacatggagatgcggatggggtcgcagcgccgctcttcctcgtccccgaagccccgcgccggccccaggagcagcagcaactgcaggagcaaccccagactgagaccgacgcccccgggcgcccccgggacgctcggccctgcgccccgccaggccatggccagcatcgggggtagcagcggcagcggctggggctgctctggcagacacccccagtttgcacgggggcgccggctgcccgcgctgctcccagctcccgggacgggagtgtgatgcggcgacgagggggcagcggccggctctccag

SEQ ID NO: 235862 - DNA, 481 bp, Homo sapiens
  chr11:87908223-87908704
  hyper
cccaccaggaaaaactgcctcgcgacctagtgattttaatctcacgcttggccgcaagccgctgcctcgagactggaaaccggccgcgaggcgctctatccccctgaccccctccccccgcgctcacctgcgatatcccagagctgcaggcgcaccacagtctccgggtcccagtggagcaccttgagcgcgaagtccacgccgattgtggcccggtagtgcgaagagaagttctggtgcacgtagcgcttgatgatactggtcttccccacgcccaggtcgccaatcaccagcaacttgtacaggtgctccttgtgcggggcctgcatcctggcggccggccagacgtgccgtgcctgaccagggaagcgcagcctgggctctgcgcacgagagagacttggggagcgcaagtgtaggtgcagagagaggcgtgggcggcggggcgggggctggggggcggaactcctcccctaggggtt

SEQ ID NO: 235863 - DNA, 148 bp, Homo sapiens
  chr11:88070647-88070795
  hyper
actgccgagccggcggcttacccataaccgagcagttgacatcgcgctgggaaccgctggagcccacctggaagacccaggtgcccagcaggtcaagataggtgcagttggcaggtgtgtcgcagcgcacggcgccgtcgccggagag

SEQ ID NO: 235864 - DNA, 31 bp, Homo sapiens; identical to SEQ ID NO: 202685
  chr11:88071023-88071054
  hyper

SEQ ID NO: 235865 - DNA, 190 bp, Homo sapiens
  chr11:88071606-88071796
  hyper
acgcacacacatggcgctctcagagatgatattgctcaaccccttttatgttacagaggaaaagcaagaggcccagagagaggaagcggcttgcccagggtgagaagggtgaggaaggaagctagccaatgggagaaggctggtcttatgaaccgttctagtgtgtcagtctgatcgccaaaaattatta

SEQ ID NO: 235866 - DNA, 867 bp, Homo sapiens
  chr11:88241715-88242582
  hyper
ggctccgctccgcacgcgcaggccggcgtgctttccagggacattcacaacgacgaggagctctgagtgtaatctcttatgataagagtgtcatatttgggagacgacgggatacagagggccgactcggacactggcgagttgggggttgtgctccccgagtccaccgagtctctgaagggggacggcggggtgagagccaccagctcctccaggtctggcttggcggccgcagcctcgggaccggccgcggggctctcccgggccgcgtccccagccgcctgcgcccctgccgcgggctgcgcgcctcccgtgacttcgatggccggcagaggctggatttcggcaaaggtcgtcatggtcgtgggcaactggatctctttggggatcaggtaggacgagcagagcggggcgccgacgccggggctgggggccgcggtggacagcatcatggagttgagctcgctgatgttggccgtgaagcgggtgaccacactgctgatctgctccatgagggagccctgcgaggagctgctgcgcgccacaggctccgagtgcagcgacggcacatcgtcgtccgtgcggctggccgagcccgcgcggtggctcagcgtgctgatgggcgacggtgagcgcggccgcgcgggcgccgggaagtgctcctcagcctcggccacatcatacagcgccttggggccggcgtctggggactcgggcccgcctgggccggcgcctgcgcagcccgcaccgcccgtggcccccacgcccccagcgctcccgcctgcgccagcgccagcgcccaggccacggctctccgtgctcttggggaagggcttgatgacggccgtttggttggggttttctttc

SEQ ID NO: 235867 - DNA, 596 bp, Homo sapiens
  chr11:89224224-89224820
  hyper
ttttgtaagttgagaatgttcgaattaagacaaaacttccacttccagcttcccacccgtgcacgctcagagaatgaatcaaaatcactgcaggacagagagaacgcaaggagagcctagcccgccatcctaccaggcagaggtgtttaaccccttcgttggcgagccagctcctccaggacacagccatgccgccggccccgccgcgctgcgctctgtgcccgccggaccgagaaggagcgggcggcggccggggcagcggttacagttgtgcggcctgccgggccgctgagcgaggaccgagggtcaaagactgagtggaagcccgaaggcccggcgccgagccagcccgggcggggtctgctacccagagccgggttttccgggcgccctgactcccacccgcaccgggtcagctctgcccactcagctgcccagacgcccagcgctctgagcgcgcggcccaggctgcaccagtctgctccgccgcgccggcccctttgtctaggggcgagcctgttgttgtggctgctgctgttcaggatgtcccgggtgggaacttggaggcgtcccccgcagcctctacccaggcctgc

SEQ ID NO: 235868 - DNA, 3015 bp, Homo sapiens
  chr11:91957434-91960449
  hyper
tagtccagaggcacgacatttgatggtttaatcttcacactacaaactagccttgggacgttatataaaccatgttaacctcgatgtgcctcagtttcctctttgtcccaggagagtaacgcgttctctgtcttcacagggatgtggtgcgggtgagactcaatgcactgtgcgaaagctctcccaagccagcaagcaccacgctctccccgcggcaggaaagtacgttggtgtcatcctagagccccagagggctgagggaagactcgagctctaaaattagccgcttccaggcccggcgccgggaatgccctccagttcgccgcgcctcctccgccgccccctcccgcgcgccccctctcccctgcgccacgctcctagatcgctagtcatccccgccgccgaggctcctctccccctcgcccttttcgctcgcggtttgggaggaggagactgcgagagacaagcgcgagggggagactggagaggggcttggccgtgcgtcggcgtcggctgtgatggggagcccggagcagccaggcggcgagcagtagcggcggcggctgcagctcggagcagacaggagagccggcgctcctccccgcaggctgcgctgtgaactggcctgcggattgggatctcgcgcctcccgtccctctcctcccgctgctgttctcttcatctcggctcccctcctccgcttgcgaacccccggcggcggcggcggcggcgtcccgagcgcagagcgcttctgctcgcggcctcagtcccggctagcgcgcggtgggcgctgcggcggcagcagccgggggaccggctcgcccggagcaagagcgccgagcaccgggtgaagaagaccacgggggaggcgcctcgtagagccgtggatcgccagcggaggcaagggtgcgtggggatttgtagcgtgatgatttggctgcctggtgcaccgactggagcgcgcctgccggagcacagcctcagctgctgggtgcaaatgggctgcgaggtgggctggggaggcgagagccgacgaagcgcgtgggggaaacttttcaccttgtaaagttccaacctccgcgcagccccgagccgccgttgctaccgctgcaaacaggagaagagggtggcttggccccgcggcgggagccgggaggtttacacggagagttggccaagtttggggctgaggatctggggaggggttgcgaggggggttgcggatcagtgcacccatccccggctcccagccgcccctgcaggtggatgagaaggttcaggtggcgagcctgcttggcagccggtgcctctcgggcgcagtgggggatgttcagatgccgatggatgatgcacttaggggaccccgaggtgcaagttgggtcatcgctaggcgaggcgcggcgcagagagggagcccagcctccactttcgctaggaaagggaaagggttaccagtctgcgggtccgttccccacgcctgactcgggcttgcggggcttgtggtcagggtgagatgtagtgaacggcggcggcggctcttcgactggggacgacatcctttacggagtggttggggacagagactgtccctgctatcttgacaaggagagggaaccggaatgctttgcgagagtgcatgatttttggcgggcgtgtgggaaggctgcttgtctttgaaaagaaagcagcgcgggtctgaccatccccaggagtgcggaggagctgtctccggattgggggcgagaacgccaggggcaccagctccgagctcaggccccactcccgggcggttcgggacgaatcccctctacaggccagtgtgtgtgcagggcaagtgtagggggctgaggggcgctggcggggaggcagtagaggtggcctggaccatcttggcgcggcgcgcggtgagcgcgaggattccgccagtgggagtcgctgagctaaagtgcatctggccccccggcttgcatgatggcgagcccggatatttttagctgtgctgtgatctgaattccctcctctcctctctcgttgacttttgtcacatgtgctttccgagatggtttaacattgaacatgattgggctttgcggaaagcaacttttattcactttccaccgttctcctcttgtgggcggggggtggcgggggcgtgcttggggcaaggatgcaggggtggccggagtttggctgcgagctaagagagccgcttgggttgctcgggatgagaggaacaggggtgctcccggggtgtgggtgtgctggcggtgacatcctgaggctgcagctcgctggaataatgggctcaaaccaggcggtggagaggggtccccggaatggacgtcgggggcggggaggctgcggagaccctgcgaggtctccgtgaaggactaggaggggctcccgggagggagtggcgcctgcggcccggagcgtgggcggccggtggctctggcacgcggaatctggtggactcctagcgcctcggccgggagctccagctccatcccgccgccgccgcgcgcccaatgggactcagcttcgggtttgggcgaacctgcagcagccgcggcgggagggagggacgctgggaccgcggtaatgattgaagtctttttcccccctctcccctcctcccgctcctctccgcccccagactctggcgcgtttgttttccaagttggatcccacttccatttacaagtgtcagacaaacccgcgagaacctcccccaacccgccccggccccagccagactagggagggcgcccagggggagggggcgagctgtctgggcagtgcctggggaggtgcgacgcgcccacccggggcttgagcggctggggttcctgtgcgtgggtccttaatgtttaaaagatacacatgaacagcaacaaaacccaaaccactcgtggccacttgttttctgccgcttttctcccacttgcctcggacatattaattttctggccccgacgctagtcttttcaaaggcgagtccggggtagtgggagg

SEQ ID NO: 235869 - DNA, 94 bp, Homo sapiens
  chr11:92675280-92675374
  hyper
cttctctcctaccccgacatcactgaatgtattttcccttctctaccactgggagtcgcaagtgcccacaataatgctccgtttctttttaata

SEQ ID NO: 235870 - DNA, 472 bp, Homo sapiens
  chr11:92930609-92931081
  hyper
attgggaaaaaaaccgtgagtcacggcgcaggctcttgcgtctttgacgtgtacccacagggccccgccccactcaacacacacactcacccacacgcgcgcgcgcaaacacacacacacatattttaacgccctattcaggcctgggcttcgtctgaccaagttctcggggtcagataaccggttcctttgcggatgctgaccacggggtcagttagcaatcgggcctcaactcaggccaagcgcggggcccctggaggtgtgggcgcacccgactcccgcacagacccccgcccacgtcagccccggctccctgcccacgcacaacaccgacctagctcctcgcgcctcgccgccccggcagccgccggcgtcgccgccgcttccatctctcgcgggtctccaggacgccgccgcccgagtgctcactctcccgccgctgcgtggccggcgtcaggcccaggcctacctc

SEQ ID NO: 235871 - DNA, 179 bp, Homo sapiens
  chr11:92931261-92931440
  hyper
tgggtaacctgagatcagcgagggtgggaccttagagctagccgagacccgggcccatagctccctgggggttttaaagatgacggcgaacttaaatttggggcgcctgtccgtatgcaaggcgttagcgttctgtaagtcaccttggagaatgcgaagaaggacgggatttgtcccct

SEQ ID NO: 235872 - DNA, 136 bp, Homo sapiens
  chr11:93275705-93275841
  hyper
cgctggggaggggcggtagtcggccccagcagcagaggaagcaacgctcagctccctcctccacccaccccgtacaggaactccccactgggtcttcagatgccagaggcgtacccagctcggagcctgccccggg

SEQ ID NO: 235873 - DNA, 364 bp, Homo sapiens
  chr11:93474503-93474867
  hyper
gtggccccaaccgcgcacttgctgcttgtaacccaggcctcggcccaaaacccgcgactggcctggtgtcctagagctctgtacacaccaccctcccgacctcagccctccaactcccgataaccagccgacctcctccaaccgtgcggaagaaaagggttggctatttccgtggcccaagtaatagtcaggccgaaatctcgcgatacaacttagcttccgggaagaaggcgagcggtgggaggagacgcgacgtgggggcgccatttttctcgccgcgcagggaggactgactaacgtgggcggagctctagctcgcgtattctgaggaggcggggttggcctaggcgaagatccggactct

SEQ ID NO: 235874 - DNA, 101 bp, Homo sapiens; identical to SEQ ID NO: 202691
  chr11:93861765-93861866
  hyper

SEQ ID NO: 235875 - DNA, 682 bp, Homo sapiens
  chr11:94134186-94134868
  hyper
acaatgagcagggctttcaccgtggggttctgggactcagcgccgtagcgcctcctgcccacaaagttctgccagtcggagaaggtgtagttgttccaagagaagaagtgcgaggcattgggcacggccagggccgcctccgcgctctgctcgtcggcccggccctcgtggggctcggtggctcgcaccaaggggaggagacagagcagcaagaggtgagggaccattttgcaggagccacccctcccctgggagcctgcgggccgggcgtcccctcccgctgggatcggagcgcgcagccggggtgcggggcgcacagcatacaaggccgtcccgaggagccagggagcccggacgcgcggagcaccgcgccgcccgccaccagcccgcggtcggcacgccagctccgggtttgttggagcacttttatatctctgctcccaccaggctgctagggagcgcctctgcctattgggcagcgcggcgtctctcgcggcgacggtgacgcgctctggctctgacaagcctggctccccccaccctaccgggtggcgccgttgctgaccccacgcccagccgttcccactcccgcctgaaactcctccgacagggcttcgcttcgggggctcagtccccagcgcgtacacactcgcgtggtgtcggcttagcctcttgtaaagga

SEQ ID NO: 235876 - DNA, 201 bp, Homo sapiens
  chr11:94227397-94227598
  hyper
gcctgtgagctcccggctggtggcagagtgccggagctggatcccctctccctccctcccagtcgccagaccctctacaggtgtcgcccctaggtccttgagttcagcacatctgcactgctttgtgctgagagcagtaagatgtatagtgcagcgaaaaataatgtagaacttttgaattagaacgtctgccctttcagt

SEQ ID NO: 235877 - DNA, 525 bp, Homo sapiens
  chr11:94245526-94246051
  hyper
cttcagcaccttctttggtgcgcggaatacctagggcctcggaaggccggctgggggcggggagaatcggcagtcactatggcaacccgagacgcctcgcatgctgggctgcctgcgactgagctgagaaggaaaccgtgcccagggctctcggaagaccgctgcggcatgacaggcgaggaggcggtggtggtgaccgcagtggtggcgcccaaggcgggtcgcgaagaggagcagcctcctccgccagcagggctggggtgcggggcgcgcggggaacccggccgcggccccctagagcacggccagcagtgtgagttcagctccagccgcggacgctactgggaggaggggcgtggagaacgagtgacagggcaattgggggaaaccgcagtgggactggctgagaaggtttggggcaggggaggtggagctgctgcttttggcagaaccagagatgatggcactgtggcagaaagcataggtccatctttccaagccctccttcccgatagcctgcctgaa

SEQ ID NO: 235878 - DNA, 941 bp, Homo sapiens
  chr11:94277124-94278065
  hyper
gcctgctcctgcgcggcagctgctttagaaggtctcgagcctcctgtaccttcccagggatgaaccgggccttccctctggaaggcgagggttcgggccacagtgagcgagggccagggcggtgggcgcgcgcagagggaaaccggatcagttgagagagaatcaagagtagcggatgaggcgcttgtggggcgcggcccggaagccctcgggcgcgggctgggagaaggagtgggcggaggcgccgcaggaggctcccggggcctggtcgggccggctgggccccgggcgcagtggaagaaagggacgggcggtgcccggttgggcgtcctggccagctcaccttgccctggcggctcgccccgcccggcacttgggaggagcagggcagggcccgcggcctttgcattctgggaccgcccccttccattcccgggccagcggcgagcggcagcgacggctggagccgcagctacagcatgagagccggtgccgctcctccacgcctgcggacgcgtggcgagcggaggcagcgctgcctgttcgcgccatgggggcaccgtggggctcgccgacggcggcggcgggcgggcggcgcgggtggcgccgaggccgggggctgccatggaccgtctgtgtgctggcggccgccggcttgacgtgtacggcgctgatcacctacgcttgctgggggcagctgccgccgctgccctgggcgtcgccaaccccgtcgcgaccggtgggcgtgctgctgtggtgggagcccttcggggggcgcgatagcgccccgaggccgccccctgactgccggctgcgcttcaacatcagcggctgccgcctgctcaccgaccgcgcgtcctacggagaggctcaggccgtgcttttccaccaccgcgacctcgtgaaggggccccccgactggcccccgccctggggcatcc

SEQ ID NO: 235879 - DNA, 1300 bp, Homo sapiens
  chr11:94473470-94474770
  hyper
aacataacagagcagggaatcgggttagaacgggttatgctctgattttttggaaaatgggcaaacggggcggggactagggaggattccgccagccgggagttgggaggccgcgcgcgcctctgcggagcgtgacggccacggtcgcctagcaacgagcggggatgcgcggggcgcctgggtgggcgaggggtgctcgccgccgccgccgcgcgccctcgggcccccgggaccgcgggaaaacttcgcggctcctcggcgctggggcgtcggcgccaggcccggcagacagagcaatgcgccccgcgggctgagggcagaggatgcggccgcggcccagcgcccggccgggggagccgcggggtggcacgcggggaaagttggcgcgcgcctgaccgcgcctggaagccgcgcggtgccagggccgagttgtcccccaagtttctgcggcgatttgtcactccctggggatctggcggtctgaatcccgcggggcctccggctcagggattctgagcgctgggagagagaagcccgcgcttttcccggggacctgcgcttgagctggtgcttgtgcgggttcgtcctgaatggtagcgattcgagttgttttctgcttttcttctcccccagacagtgagtttgtggaagcctcgcccgcatcctacagcccagacgagttaggtaagtctgctcattttgtcttttatttcttggtcgcaattctgcccgagaactgcgagtttggggggcgtccataggaactcagctagggatggggctggggttggagggcggagggaaagggtcaggggacacctgctgccttcgcggccggaaccggcctttcctcggcgctgtgctttcgggggtggcagggcaagtgtccaatgagccgtgcgtgtgtgtgtgtgtgcgtgcgtgtgcgtgtgtgtgtgtgtgagtgcgtgtgtgtgcgtgttcgtctggggcagtggtgctgctccgaggagcctggcacagcaaacttccagagctggggcttctgaaacctgcgctcatcttgccgggaggacacagcggcgactggttctgacttgccaagtacctggcacgagaaggacgtcgtgtgggtcgtccttaccctgaatttaatgaagtcaggggctgaaaacggcggtgtaatcattaaactgtaagacctaggagctgcttccctccctgatttctattcctcagttagcctgtaggtgtctcgagataggacattccatcctcatgcctgtcatggtaagtggagatttgcgatgggtgaaccggg

SEQ ID NO: 235880 - DNA, 1462 bp, Homo sapiens
  chr11:94501254-94502716
  hyper
gtctgaaattaatcaaaacccggcaggggacaaaggaagggatgctgtcgccctcctaagtctcagggagacacgtcagcttgagctctgggcaatttcagcctggcagtctcgcggcccggggaggggcggcgggtgtctgcagacgggctctagggcccagcggccgggcgccacggcgggggtggagtgtagggttctagtgacgagcccgggcgaccctccccggcccgcgcgcggggagcggggagcgcggacggcggcgggagcgcgcgagaagctctaggacccagcagcggttgtcgggtttggggctggaggtgaagccctgtgtgaatggggttgattgtccggcgccacttccccgcgctgcccggcagccgtcttccccagccgagggactgaactagccatgatcgcctcatgtggagggcaaagttgcgccggggaacttgtgagcctgcggtgaaaggtaaccagcccccactcgaggtgccgggagggcgtctccgagtctcccacgcgaagaacccagtcgccccgggctccccgggcccctgctgctcacggaagggggcagcttctgggggcccggggctgagatcccagattgttgtttttaagcgggttcccttgccccgctccaggtccagttgcctgcgggccgggcctcagcgtcttgccgccccgcgacccacgttgactgaagttgtggccccggggtttgggccccggggtgctgcgcgcccgacgcggggctggcctttcctgaggggcgcagccatatggccagacactccgaggcgcgcccgcgcccgcgcgcgggtctcgcggcgagggaggggacggaagggggtgtccggtgcagctttccccggcgcgagacaaaggcgcgcgcaccggcccgcccgacgggctctggcgctgtggactggaccctttctgcccgccggccagacccggctctggcgggtgggggcgacgaaagggtcgcaccccagccccagacgctcggatcgcgttagctgctgctccttctttgttctctccccagacaagtttctttgacaaactggagagttacatccagctcccgcttgcctgttagggctgcctttacaataatctgctttcgcggggagaaaatttaaactttccaaatggaactgttttttcttggaatgtgacatttgtggcaggagggagagtggtacgttggccgatgacagccgagcggaacggtggcctagtgccgggacagggaccgagcgtgccccataggcggccgggctggaggacgcggcggcagagcagacgagccctggcgcgcacctctagggcctccgctacctggactgcgctcgcggcgacgtgtccaagtttcccccctcagagccccaggccgagaatcccgggtatctgcgcaaagctcccgcgcctcgcccaccctactcttcctatc

SEQ ID NO: 235881 - DNA, 1111 bp, Homo sapiens
  chr11:94883789-94884900
  hyper
ttggggctgttggccgtctccggagtctcgggagcgccttgatgtcccttcccagggctcgggttcctttgagagaatcaagaggaaggtgtttttcactaggactcgcggtgggccccacctgcctaccgtggccggccgggagctattacagcagggtctgcccgtccgacgacggcggctccaatctggggtcccgccggcgccgacccctcagctctctcccgatacctgctggcctctctcatctttggtggcactcgccgccacggggacggtgagatcaaagaggtagacctaggccaggagggactgccagggctccttcccgcgggccagcctctcgtccttcctcccgggacggggctctttccctttctccggatgcgggcctttgagagtcagcgacgccttagactcctcccagaaaaatgcaccctcatctacccaattctgccctaccctttggagctcctggaccctctaaccgctcggtggggtcagagcccacccccggaagggccgctggtcggggactggttcgccctctcctggcctcctcggaccagtgcgcggggaggatcccgctaacgccgggcgcctgcagaccttgagcggcctcgccctggtgacctccccgggaaaggctgggcggtgcttccacaatgagggccacctgttaatttgcacgagaaagtgctgccgagggcccacacgtgcgaatccacctgtggagtgcgtcccctctctggggccaaggcctaggggaggccgaagcggagaagttgcctgaagactgggaagtaagagtaggggcgtcggaggaatcgaagttgcagtgacatcaggctcggacagccggcggactcctcgcaaggtgatcggatacttccgagagccccacagtcctcctgggcctttgccctcgcgtctgggatgcgctcgggcgcccccagtctgcgatgcgttcgtacctccagtagggtgacgttttcgccgggcccctctgcgaacagtctccgccctcctccactgtgagatatttcacagtttcacccgcagagggcaaccttattccaagttcccgagcgccctaggcctctttctcctc

SEQ ID NO: 235882 - DNA, 1066 bp, Homo sapiens
  chr11:94963464-94964530
  hyper
aaggcagaagcaaccgaataaacaaaaacaacactcgcaagagttagccacagcaaagaggggccaggttcctcgggatccgacccagctgctctgatttcacaccgacctccatcaacagctaaactgcacagggaggaggatcgaacggatccctcccgccctccgcccaaggagccgacccggggtagcaaggtagggaaatgagccgtaaaggagagcaaaggcaccaaataaaaggaacaagggaagaaaaaatatcccaacccctccagacttgggtctgtcccggcggaaataaaaagccgcagtagtccaaaccctcctgccctcaacccacgccccctttctcagtccctgcggagggacggtgcccggggatccctctcagcctcccccagtgcgcgcccggggacgagccgcccgagccccggccggcaggaagcgaccctcgccggcaggaccccgggccgaacccgtaccttccgcagcactttccggcagttggtacagagcaggtagttggcggcggccgacgggctgccgccgccccggttcatcgtggctgcgggcgccgaggcgagagcgggcggagggccgggtccgggctgtcactgcggccactgcagggccggtccgtccccccgccgccagccgcgattccgcctcagcctcctcaaggcgggatgtcgggaggagaggcgactgcctgaaagctagcggcactgccagaggcgaccaccgcggcagctgccccagcgacggcggagacggcggcggctgctcctcaccggcccgttgttccacccgcccccatcttccagacccccgcccccgccaggctaggacgagcagccgccaccgctgccaccgccaccaccgccgccgcagcgcctcagtgcggccccgcctccgccgccccaccaccttcaccacctccacgctccggtaccgcccctcccgccaatcggacagctccggctacgcccccagggcgctagcccgcagccaatgagcaacgagagcccgactgggagtcgcgccggccaatcgcaggggccgagga

SEQ ID NO: 235883 - DNA, 163 bp, Homo sapiens
  chr11:96123522-96123685
  hyper
ggtaataaaacacatgcttttaatccggattatccgcggtgacatggggcctccgctactgcccgtataagttaaagaaaggcctgttctctcaaacttcctcctctttcaccttcttctgcagtctatttgccagccaaccccagcccgggaggggatcagg

SEQ ID NO: 235884 - DNA, 871 bp, Homo sapiens
  chr11:98891177-98892048
  hyper
gaaaaagtccactctcaaaccgacctaagtgaacgcgtcagtctgtgctgctgctgtcagaggtgtgagccggggactacaggaatcagagtgaagacaggagcggaggaagggactctcgcctggatctcccgtgccgactccagccagcacgtttgctttgtaatctatgaatgttaaatacggaggggttgcagagcagaaacgctcggggaaggggggcaggtcctctgtacttagcagggaaggaaaatgccggttgactagtgagacgagtggagaaacacagagcaccctccgggaggcgcacagttcgttaagcccagggacatgctcaatgaacctttgcagcaagaggcagtgaggcgctggacgcgggcgccggtgacagcgcgggcggccggggaggggcgaggggccgccccgggaggacacagccagtcagaggcgcggggcgcagggcgcgcggacgcattggaggaaaacacgcgagccccaaacacaccagccgcaggaggcgccgcacctacttcccaatataaccaactacggcgtgggggagcggaactgcgagaaggcggcagccaaagtgccattaaagctcggggcggagaggatgcgttacctgggtcccgtctgctgcgagaggcagggcaagctggaggattccctctgaatgattaagaactccgcaattcgcctctgccacaggctgcaaaggacccgaggaaccgctctctctgaactgtgctgatgggcaggaggatgggagacaggaattgagagtcacagaggaaggacagtggagtctggcatcttattggtaagtggctgacattcctttgccagtgactgcgttctgtgattgtgc

SEQ ID NO: 235885 - DNA, 33 bp, Homo sapiens
  chr11:100557940-100557973
  hyper
cgctctgagcctgcgtccgccgagggggagggt

SEQ ID NO: 235886 - DNA, 330 bp, Homo sapiens
  chr11:100997687-100998017
  hyper
agtcccacccctcccgggggaacggtgccttaactcctctccaagacaagcactcctggtaaacgtccttcttctaagaaagaagcatttcataaagcccccaactcgccgcgcactttctgccccactgggctacagcggacctagtgtgacgctgcacgttttaaatcggggttggttctgcttcggaatctggaagattcggaaagttaaaaaacaaacaaaaaaacagctttcagggaggcacgccccaaaaatagtatattctgcgcccaccttcgtgtccccaagagtgaggagaggagggaagaagaagggaggcaactgccc

SEQ ID NO: 235887 - DNA, 1813 bp, Homo sapiens
  chr11:100998857-101000670
  hyper
aaggcgtgattgagaggcaggataggcacgtggatgaaatccatcaccgtggtggccagcggggagcgcccgggcgccatcggcgcgtcctgctccaccagggcgaccctgggcgctgagaagcgggaatcttccttggggaccagggcgacgcctcctgctgccgcccccggcgggacagccgcggctcctcctccagccgccgcgccacccagagcccgaggtttgcccttcagaagcggacccgcagactcctcggactcagagccatcctcctcctcaacctccaccgcagcggcctgcggagacggcttcactggggccccggaccagtgagggctctcagaggccgggagcagcagctgccgggctggtgacaggccccggggcagcactttatgggcagctgccgtcccggagctgtctccaaccttgcacccggaccggctcatgagcggggacaacacccgctgggtggcgggggcagccggtggatcttcgggaagttcggggccaaacaggcaccaagagctggtgacctcgcaggcgggagggctgggttggctctgcccgggacctgagggcgccaacagagtgtccaagacactgtccagcagtccgctgtccttttctgggggactagaactgctgcctccagcaccccttgtagcttcagctctggaatatgcgccctccacgtccgacagcgactgctggtcctgcgtcttttcgtcggaggggtcctgtccctggcagggccgagggaagagtagcccgtccagggagataggtatggccgaaacttcaggcaaggtgtccgaggtctggctccccgggaacggacctgcggctgggcgacacagcagtggggatccgacctcgggggagggcgggccgcccgccacgtggggagcccggggaccctttgccttcagctcagtcatgacgactggactccccttttctcctcccccgtctccaggaggagggaaaagggaaggaggagggggtttcgggaatataggggcagagggaggagaaagtgggtgttgaatgtggctggaccggagggatctccacctcctgggtcgggggcgggggagggcggcgctggtcagctcctgcccttggcctccatcctgtcgtcaggggaactgtggctgtcgtttgtcccagcgagcggcaagtggggagcgcaagaaaaagtagtaattgttaggagatctcgtctcctaactcggggagttctccaagagagttctccaacttctgtccgaggactggagacgcagagtactcacaagtccggcacttgagtggctgcggctgcgacggcaatttagtgacacgcggctcctttatctcccgactttttctctggcatcaaactcgtgcatgctgtgaagctctcagtccctcgctgagttccactgccccctcactaaaaccctggggctagtcggacctctcggtacagcccattcccaggaagggtcggacttctgctggctccgtactgcgggcgacagtcatctccgaagatctcagatcccagtagtgcgggagcactagccgcctcgggttgtagatttcactcaaatgacaagtgaagctagttctcattgagaatgccacccacacgcacaaatacaacaaggcttaccccgattagtgacagctgtggactggccagacagctttctaacaacgcctcctcctctagggaggccccgcccaaagcccctccctaccccaattaccggtaggatctgaaactctggagttggcatttccacccgttattctgaatgct

SEQ ID NO: 235888 - DNA, 1815 bp, Homo sapiens
  chr11:101452971-101454786
  hyper
cttcgaaagggcaccgcagcagggcttgaggctgggcagccctgacacagcacccatctatcaggagggtctgccaggcgcctatggggtggaatcctccctccaactaaagctgtttatagagctgagaacctcgggaaaccgcttgcgggtggatgtgacaagtcaggaaacttgactacccaatcacccaaaggggcaatgggacagaaatgctatctgcccgctgcacatgtggtcacagcggtgtcggggaagcggagtcttttcttctggagtccactctgcttactccctacctcccctcccgccacccacccagctaaaaaaaaaaataccctagattcataaacaaaagcttgcagttacccacagcccaatacaaacgacccgacgccctcacttctatagcccgtgagtctcccagcccctaacaggctcgtctccccagacgccccgggtgaaaaggttcgcgccgccggtggagagtcctattggttctatttctgtcttcactccaaggccccaggaccggggagaggtcctggtctaactttggctgtcccacggtccaaggacctcagcgctcagcccgaaacgctaagccaagcgtggagaccgccgggcgcacccagcacccaggcagctccaacccttggagttctagtcatctctcccccacataggctaagagtcacccgggcgcacatctgaatcagccccctgttcagatcccgcctgttacgtagcgatcctgtctcttgtagagcgcaggatgaaggggtctggagaaatcgaccacccatctaatcacctgcaatggtggtgttactatgcggtctcactctcgtgggcaaacatatccatgcgtacctacgaggagcaaacctagacaaccccgcctcccccactccccgcgcgcccctccactcactcaggtcccagccctggctctcgcggacctcccagcaccgtcctaggaggtacacacgcgggttcaggacgcgcgcggacggactcggccactcctgcgagcgcacaacctccctccgcgcagcccgcgcccgatccgccccgcgtcgccggcactcacaagcaggggtagtagccgtagcaaggcagcggggcttgcgggcagccgtcttctcccagctccgagtccatgagcagatagtcctggctctcgttgcgccgcgcagcggctccggcagcgccccggggagaactgcccctccggggcccgaacgccgggctctggctcatggcgggaacgcccgactggcctgggccccgctcccgggggagccgagtgggcagttccagcggggacccggtgcggagggttcgcgtcagcggccgaactggacctgggcagaccggtgcccaggggacgacggtgaagcagggggtgcagacgcccgccgcaagtggctcgcccactggcccggggaaaagtcaccacttaagggggtgcaaagaggatcttgacctgagcaggtcaggccgaggagaccccgcgaggatgcgtctggggcgcccgggcagagagggcacaggcggggccgctggtggtagcgaagcgtaagagcggagagcaagggagacggagctgaagagttactatgtcaacagagactctccagccctcagctcccgccttcatcccccgcactctccgtcaagatccccacctttaaagggatccgagcgacgttctagaaagcagccaaagcctgtcctgtagccacaactttcaggaggcggtatgagcctgaactaggaggagccaggcacgcactctttttttcccctcca

SEQ ID NO: 235889 - DNA, 38 bp, Homo sapiens
  chr11:101785493-101785531
  hyper
tacatctgtctttcgtcactgtcggtactgccacaaaa

SEQ ID NO: 235890 - DNA, 370 bp, Homo sapiens
  chr11:101918143-101918513
  hyper
acgacggccgccgcgtctccatggaaacggcccaggcatccacccagccgagagcacgatggctactggggagctcggggacttgggtggctactacttcaggttcttgcctcagaaaaccttccagtctctgagctctaaggagatcaccagccggctccgccagtggtgaggaaccgaggcacagggagagaagaggcccttggtcttcgcggctgtggaggcgcaggccgggcgtcgaggggcccgcgcgggtcggcgccattctgagtgaaccctgaggcttcctgagtgaaccccgaaccacccgggaagggcggatgctgtgggtgggatcggttatcggtgcgctctgagagggtgccagccc

SEQ ID NO: 235891 - DNA, 2030 bp, Homo sapiens
  chr11:101980830-101982860
  hyper
gcgcccgcgttctccgcagacaccacagttcggacccggattggacccatcgtttgcggttcgcggggcagaatacggggcacgcttcgggcccctgcccggctgagcgcgggcgaagggcggaccgggccagggcgagcgggtcacgtgcggccgggagaggcgccgcgggccgggagtgtgcaggaatgtagcaacttgcagcgaaaagtttccctgcgctgccggccgggccgcggtgcgggcgggcgcgcagaggaaggaagagccgagaggaggcggggccgcggcggcgcgggcgggcgcttctcctaactttagttttggcgtttgaggcgagtttctgtctcagtcgggcgcagccgccgccagggaaaagaaagggaggaaggaaggaacaagaaaaggaaataaagagaaaggggaggcggggaaaggcaacgagctgtccggcctccgtcaagggagttggagggaaaaagttctcaggcgccgcaggtccgagtgcctcgcagcccctcccgaggcgcagccgccagaccagtggagccggggcgcagggcgggggcggaggcgccggggcgggggatgcggggccgcggcgcagccccccggccctgagagcgaggacagcgccgcccggcccgcagccgtcgccgcttctccacctcggcccgtggagccggggcgtccgggcgtagccctcgctcgcctgggtcagggggtgcgcgtcgggggaggcagaagccatggatcccgggcagcagccgccgcctcaaccggccccccagggccaagggcagccgccttcgcagcccccgcaggggcagggcccgccgtccggacccgggcaaccggcacccgcggcgacccaggcggcgccgcaggcaccccccgccgggcatcagatcgtgcacgtccgcggggactcggagaccgacctggaggcgctcttcaacgccgtcatgaaccccaagacggccaacgtgccccagaccgtgcccatgaggctccggaagctgcccgactccttcttcaagccgccggagcccaaatcccactcccgacaggtaacctcgttgcccctctccccgtttccccgtcgggcgggcctcagaccgggggggcgctcgggagccgcggccgccagctctggtcaggggaggggggttgcgggaactctagctggggtgggggtcccgaggcgaagtggaactggagtcgtccactccgccgcggtgaccagctccccactcctcccagagtccggggctgagatttgtttttcccttctgagtttctctctgcggttgcagccccggggggcgtgctttccctccttcttcctttctttcttcccggggttcccgagaggttggcgggagtggaggaggggtggggaggaaggaagggggtggggaaaagtcgggcctgggccgcggtgggcttgcacaatgcgcgcgcctccgcgcgctccgcaccttcgctcccgccgggccgggctgggaaagggggaggggggcctctggcatttgtgtgtgggtgtgttgccagcggcggccgagtttgtgaagttgagccctgggcccctttcctttgcggcctctcggtccacttcagtctcctgggggagtcaaataattgttctcttgttttccagtgttgattagaggtgggggtagaaccggtccatttagttttttgctctttctttccttcccccctcccgtttcccctccccctcccgtaagcatttattttcctcgcggctcaggcgatttcggaatacaggtttcgggcttcccctgcccagactttcctggaagttgtttatggagttctttcacccctgctcttcccttgtgtgttggaacttgggccggcttgctcttatcaaacttagtaggtcgcgtgttggtttcccagttgtagactattatttacagtcggctgaaacgcttttgaattagccacatctgtacgttgcgcaggaactgagttgcgctttacagtaccgaggttttaacaca

SEQ ID NO: 235892 - DNA, 31 bp, Homo sapiens; identical to SEQ ID NO: 202708
  chr11:102323923-102323954
  hyper

SEQ ID NO: 235893 - DNA, 1021 bp, Homo sapiens
  chr11:102962155-102963176
  hyper
tctagaaaaaggcagaggagcgatacgggagtaggggatcgagggtcggttgtggggtgggggtgggggtggggggaagcgcaatttacatatgcatctgttccccaccctgcagggcacgtagactcttaacgtgggcggctcttctagtctctccataaacgccagcgtgcacacactcgaacacgaggtcgggtcgggcgcggagactcgcggtgttcggcacctacagcctagctcgatcaaaggggcctcacctgtctccagccccagcccggcaggccgggcccgactccttttcctccagttgtccagcaaaggagggaggagggaagcttgaagggtggggggagatggtacctggagattttacactttttgaggcctccgtcttccgctactgctgctgccaccccaggggattttctcttcttcttcaccggcatcttccgccctccccggcagggtgggcaggggagccggggaagggggtccctgtccgctggaagcccctcagcgctggcacccagttcccagagacagcagcaagcggaggagcagagtcgccagcccgcaccggcgcggcccagcccggccgccgcccgctcccaggtatcctcgtcgtctttctctgaccgggacagggctggctcctcgccggtggacactgcggttcgttctcaccgggaggagataacgcggacagcgcggcagctccaccagtcacagcaagcaagaggctcagcctaacccggaggcgaatcgctgaggcccggaagtgacgcaatcgcggagccggtcccgggaaggggcgtggttccggttagcctctgccactcgtaggtaggccaggcagagcgaagctgtctgacccgtcgactgcggcagtccgcggaattcttgtatcctgtccagggtatcctgacctttctcatgaagcttctaccgcgctctgatgctggcagtcaccgccaaaaagtgaaactactaatactttgcagttgacgttaaaaacaacctg

SEQ ID NO: 235894 - DNA, 106 bp, Homo sapiens
  chr11:102980417-102980523
  hyper
atcaacaacttcttggatgacggcaaccagatgctcctcagggtgcagcgatccgacgcaggaatctccttttccaacacggtacggttccttgcactcctgcctg

SEQ ID NO: 235895 - DNA, 411 bp, Homo sapiens
  chr11:104034044-104034455
  hyper
tgctagattgaaacgcacgatttctcctctcactcgtaaaaataaataaataaataaataaaatttaaataaacgtctatcacccagggaaagctactcttgactccttccacctatcaaaattgcctaagaaaggttgagtctgaccaaggggcggcgcagcttgcaactttcgccaactccgggatgaggcaccgcatcctggtaccagaggcttggacaccaaaatgacttctctagggtgcagcaaggtgagccacctggcttatcctatccccatcagcacgcgtcccacacctctcagtcccattccggaaatggagctctctcaggactggatacaggcaggagacctccctccccaaacaatgcattcagcccgagttcacattcaagattcaaaaagaaagg

SEQ ID NO: 235896 - DNA, 1281 bp, Homo sapiens
  chr11:105480722-105482003
  hyper
gctctccagattcccgggctgtttgctggtgagaaatctttgctgcagcgaggaccggagtcccccgcgcgcagcccagtggcagaagagggctaggctgagagggaagccaggactgtaggagagggaggcagcccgtcctcctcacgaacctgcaaggatgcggcaggggcctgggggcatggggaggtactaaccccccggagcccccgattggggcttgcagacctggcccgtgggcggattttctgcctagcgcagccgagaagcagaggtgccaggaaaaccaagagaggggcgctgggggtgcccatccccagagtcggtccctctgcgaaccgaggaagaaaagaggagggagtcagcgagtggtcagaagggaaaacctgacaccagactggctccggagcgtccgggagactggggcgctccggtgagcacccagggggtgaagccagccgagcggtgggcgaggggcgtgcggagggagtgcgcgctcgaggaggggacgccaggagggcagcgatgctccgggctggtgcaggcttgctgggggatgtcggctgatgcgagctggagagcgcgtgtggcggccgcggcgccagtgtttgtgtgtatgtgagaaagcaaggggcgagcgcgagtgcgagtgaggcaaagatagagcgcatgtctcatccctgcgagcagccactagacgctccaccaccatcttttgcatgtgcaacatttgcagccggacagaaaacctctcccagggctatggagactgcgggaaaaatctggcggctcgcgatggattgctaaggagaactagtcataatcttaaaccaccgaaacctctttccttttttttctttcttttctttcttttctttttttttttttttttttggttgattttaattttagcgccatcgtcttcaatgcttctctgaacagcctttaggaagagtgcgagagaaagagagagagcgcgcgccagggagaggagaaaagaagatgaggattatttccagacagattgtcttgttattttctggattttggggactcgccatgggagcctttccgagcagcgtgcaaataggtaaggtgtgctccgatggggtgtgcatgtggctggttgtagcagatatccgaaagtgagttaaatgagttgctgataagcaattcagggaaaccttcagcagttcccttcccctctgtttccctcctcttcctttctctcctttgcaaaaagacttcctctttagtgcaggttccgttggaatacaccca

SEQ ID NO: 235897 - DNA, 116 bp, Homo sapiens
  chr11:105893007-105893123
  hyper
cccgcccatctcccgccaccccaatggctcatatggctgccgctcatttgatgagtctcatccattggttagaatggtgtagccattctggctgagagcccgccctaggcctggcc

SEQ ID NO: 235898 - DNA, 523 bp, Homo sapiens
  chr11:105948198-105948721
  hyper
ctcgcctacttgacgtcatacaatgccgcaaagcgcagggctgatctccgtctccgcccccagctgctttctccgagaggaggtggctgagtcgggggcgggctgggagggctgtcggtgggccagtctgcgtagcgacggcccgtcccctgcgcacggacgccgggaagaagggggtggggccacgtttgcgtccgcgccatcaggcccgagatagcggcgaggtccgctttcagtgtatggttttccctgccaaacggttctgcttggtgccatccatggagggcgtgcgctgggccttttcctgcggcacttggctgccgagccgagccgaatggctgctggcagtgcgatcgattcagcccgaggagaaggagcgcattggccagttcgtctttgcccgggacgctaaggcagccatggtactacaggtcttttttggtatttagagcctaggaagcagatcttgggggaggcgggccgggctgtggagacccgacactcccgcgctggccgcgaccct

SEQ ID NO: 235899 - DNA, 57 bp, Homo sapiens
  chr11:106888938-106888995
  hyper
gagccccccgagccggctgctcatggcgggaacttggggcgccgccgcaccttgggg

SEQ ID NO: 235900 - DNA, 930 bp, Homo sapiens
  chr11:106889175-106890105
  hyper
gaaggggaggcagaggcagaggcttctgccgcctgcgcgcctatctcgccccctttccctctctgctcccgcctctctccacttgctgccctgcctccctccttctccctttatccccccgcccccccccatgctctccctccgcgggaatcacgtgtcgccatcatactcattgggagtctctgcctcgcctgtcgccacgtttcaggagcaacgaggacacttcgttgctgtcctctgcgcgccctccctgctccgaggaggtgcgcacaggagctcgggtcggactgagggccccaaccccaaacgccttatcctcggccctcgggagcagatgggtcccggcggcgctggtggggagaagggctcggggctggggggcgagaggcctccccctggagccaccttggggaaacctgacagtgtgaagtgggggttagggtccatgttgtcctttctccgagtttatttaggaagttccgaggcaaaagggaaaggccaagcgtccagccagcccactccagaggagacgctttcaggggaagggaaggacaggggcaacattttggcgcccatcctgctggagcagctcctggggacttgtgttccccgcctcgtgcgaggccgtgtgggcgcggagcgagcccagaaaggggcggcagtgaggacagcgtctgctctgacaagacagcactgttgctgagcctcagccgggcggggtgcgcggggctcccggctccgctggctcctcactagtgctggacagctccgcttgccacctatagccgcctttgcaggcgttgagaactggagaacagttcctcctcaaacgacctagcacctggcccgggggaaaccggggaatgatcccacgtccctcatcctcagggctctttgcgccaaatatgcgatctgtttgcacctgactgc

SEQ ID NO: 235901 - DNA, 127 bp, Homo sapiens
  chr11:107328545-107328672
  hyper
aaagctaagaagccgcaagaaaattctagtttacgacggtcgtaatttaacaaacaaaccgggacttccggacccgaggaaggaggagcacggctccaccaacagggcatgcgcacatctgaggtcg

SEQ ID NO: 235902 - DNA, 1347 bp, Homo sapiens
  chr11:107461570-107462917
  hyper
gaacacaccttgcccggactgtctgggaatcccattgacaggtcatctcaggttcaccatcttcctgtcgtgggctcctccagggaggccacccgggagcaattaaactgggccacaccagccacctcccacagcagcggggtccgcagatttaaccctttccccccagattccggcactgggtgccgcgctctctcccccagcaccgcgcccgcgcccccggctcccggactgggcatgctcagtagccgcccgcttcgtgctcccagggaagcctctgcacgccctcccccgctgctctcggtcgcctcctcgccgccagccgccccgggtgcatcccggcttgctccgctccacgcgacccagattcctgccccgcccccgccccttccgcgcccgcagccagtgcggcagccgcggccgcccctgtccagcctcggcgcccgggaccgagcgcgtcgctcgccgccgcggagcgcgtagccggagcgcctggggaaggcggagatgaagaccacgccgccgcgcgccgggagctgctgagcctaccgccgccagagtccaggtgattggcgaccccagaggagcctagggagtaggggcgaatgcccttggggaggagagaggtgcggcgaggacgcgaggcatcacgcaagctgcgctgtgcctgggaggcagcagaaatgctaagcatcgggggcagagagggaacgggaatgaaagtgcactctgccttggtgcaggggctccggggtcacccaggacagtgatttccccttctatcctgtcctcccaattaacacccgagaggctgcaggtcggcgcgagaggctgtttgcatctcggcccgggcgtaggtcgcctagcgacctaacgccgagggctcggggaagggatcccagacagagccaaaatggaaggcgggacaagggcggcctggctggggcgaggggctggtctgggtccctgggaaccccttgccttgtgggcttcggtctccagggaggagctaggcagccgggctgcggggccgccggactgtggggtcctccgcgcagcgagctgggaggagcggtcggctgggctgttgagctgcgcctcctccaactgctgggaaactccgcacttcaatattggagcatctctttcccgggcaggtagaattggacagccgagtggggagtgacagctgacagctgacggggctgttaaaagcagagcagtggagtgtggtggtggggtgagctgttgtgggtgcttttttttgttttccaagtgtgggtacgggctgttctgactcagtgtttatgctcaacctctaagcggcgagttcggtaacacatctta

SEQ ID NO: 235903 - DNA, 325 bp, Homo sapiens
  chr11:107798898-107799223
  hyper
ttggctgaccctcccggagttgagaccttgcttcattttccttggttgttgctgctgtcacgtcttcccgccacgcccactttcctgccggcgcccagtgagcgttgagggagagtgatttgcagccggtcaggggcgggagttcgcggcagcaaacctgcttccccctcccacgcgccaccgcccccgccccgcccccgtccagaggccccgcccctagccgggcctggccccgcctctctctcccgagagggcgggcaccaggcggcggccgcagccgcaggaatatgctggaaggcggcgggcgggcgcccgcgaggtgctg

SEQ ID NO: 235904 - DNA, 127 bp, Homo sapiens
  chr11:107992141-107992268
  hyper
ctggcccaggctgcggtgtcccagcgccaggctccgccccgcccttggctgccggccaatcgccgccgactgagaggcgactattggaggaagcgggatgggcggtgcccgcgccgggccgctaggg

SEQ ID NO: 235905 - DNA, 127 bp, Homo sapiens
  chr11:108092858-108092985
  hyper
accaaggaaattgcgcccaaggttgaagcacacgcaatccgtccgtcatgcagacaaatgctctttcaggggtcctaattaagtgtggaggcctgactttccttccgaatccgccccaggtgttcca

SEQ ID NO: 235906 - DNA, 230 bp, Homo sapiens
  chr11:108093204-108093434
  hyper
tccatcccgcgtccgcgcttacccaatacaagccgggctacgtccgagggtaacaacatgatcaaaaccacagcaggaaccacaataaggaacaagactcaggttaaagcaaacacagcgacagctcctgcgccgcatctcctggttccagtggcggcactgaactcgcggcaatttgtcccgcctctttcgcttcacggcagccaatcgcttccgccagagaaagaaag

SEQ ID NO: 235907 - DNA, 198 bp, Homo sapiens
  chr11:108368605-108368803
  hyper
acactccttgtaacgcccgggcgccgtccattcgcaacatcagtccctgcacattaaatgcggaagggcccttcaagttcattcattcattcattccacaaactttcgtggtgatttttgcccgctttgagtatgggcgggaggagggaagaggagctgaccagacccaaaaaggggcgacacacgccggggagggac

SEQ ID NO: 235908 - DNA, 1042 bp, Homo sapiens
  chr11:108463471-108464513
  hyper
ccccacagcaccacgcacaagaagacccacccattccagccaaccccgtgtgtccaagtcccattcgcccacataagcctctatttgacaaattcctcgagctcctacccttggggtggggacctttcgcctcccgtgaggtgccggctctcccgtgcttcgctgactgcccgcattgggtggggagattcgcctctggtgccgagggaaaactgcgttaggcgagggtggaagctctgtcggacccgtgcgagcacgtgggtgcgcgcgggccgcggagtgagcagcagccaggattcctctccagatcgcgcccccgccgcatttcattgcctgaaacggcccacgccccgcgatggcccagcagacacccggcacagcacagcgtcactgcgcggcccccgcagcgcacggacccccccaccctgcccgaccccagacccgcagccgagcccgtctggtatgtggtgggtggagagggtaccaactaagcatcccaaagtccttcagggagcaactccgcgcagttttctcttcccgacccgcagcctccgcagcagccgctcggagcacccccgggcaggtgccccgcgcgagctcagcgccttccccgcggatccccggcccctgcgggacccaggcccaggacaaaagaaatgaatttgctctgtacctgatcctgtccttctcggccctctgtaactcctcattcctttccagcacctgaaggatcttcctggcctcttcgtcatttaagaaactgaaatcaaacgccggaggaactttcgtcattttctttactgtgtgtgagttacacttaagctccttggcgcctcctgttaggaaggcatttttcaacctgtacaagaccagtttcacgaacttgatcccacagccaataataagtccgcccctttgaaagtctaaaaccacaaacctagggaacgcccacacctgaagggctcatattgacaataccttaatgacatgtttctctcaacctgtccaaccgagatgcaaagtgaacggctaaagggagaga

SEQ ID NO: 235909 - DNA, 90 bp, Homo sapiens
  chr11:108535765-108535855
  hyper
gggcttctgagttcgcgcatgcgcctctgtgcgtttgtcccatgctggttccgtgagtctggccttaggtgtctcgtgtctggggttgat

SEQ ID NO: 235910 - DNA, 487 bp, Homo sapiens
  chr11:109292782-109293269
  hyper
ccctggcggtggctgcctgacgtcaccggcctctctggcaataggctgcgagctcagctccctgaagcggcggcgaaggcggcggcggcggcggcggcggcggcagcagcgcggctcggtctctggtccattcactccacgctttctgcagccgccactgcagccgcgcggcgggggctccctccttgcagccagccggcggtccaggtaagagacaaggtgtgagtaaaggcttctgatggccgggtggcctgacggccaggtgcgagtggggaggacagctcacgcggcctgagcagccacccctggccatagctccagcccccgcccctgcccccggcccctgccctggcttgcttgcgcgctacctcgctactccgcagtgcaacagtttgcagctgcctcttgggagcagcaaggaggctctcctgtgcgctgcgggtctaccggctccagtatgccggaaaagcctcggggcctttgggct

SEQ ID NO: 235911 - DNA, 947 bp, Homo sapiens
  chr11:109293524-109294471
  hyper
tcctgcgcgtcagccgcggtcgcggacagaggcagagtgggatgtggtgccaggggtatccccctgggaatgggacccaagggatctgacgctgtccagggagggcgagtctggacggggagggaaaggaagggaggactgcgtacccggagcccgcgcggcggcccggagtgggtgctgggaagggtaggatccaggcgaagacatcaaccgagagggcgcagaaaagaggagagccggcgctctgggaagtagggacttcaaccaaagcggctgcgtgtctgttgcaattataaagttgtgaagggcggaagggaggctgccttatctgctgagtaatctgcacctccgcggtgccggcgcagaccccatcctgtcgagtggcatgagcaggctgctggtggctctggtgcacggccacgggccggcaggctggggtccgctgaccgaaaatacaggcagcgcccagctcaggcagtgtgcccagagggccgctttgcggtggtggttgatctttcccgacagcactcccctgggcagcggccgagattctaactaagctttgtgtctttgcagcctggtgcctctgcaaaggaaaggggagcgtggagacgtgttcgaggtggtatcggcgaggatctctcgggcgccgctcactccttggtcgccttgcttgccagcagttgctcccttagtccttggctcgctcgcacaccccctcccgctacagggagcagttttgggtggcgtgggctccgtcctcttcttggctggtaggaacggtgtgcccaagaggggaagcctagtgggcctggcccctcccagccccgcgccaatgagtgccagggcgccgaaggagctgaggctggcgttgccgccgtgtctcctcaaccggacctttgcttcccccaacgccagcggcagcggcaacacgggtgcccgcggcc

SEQ ID NO: 235912 - DNA, 1271 bp, Homo sapiens
  chr11:110166501-110167772
  hyper
cggcctcaagggcccgagaaagttacagggctccgagagctgcaacagcagcaggtagagctgcggccgggaaccgcggccctggcctggcgggtgcgagcggcgggagcgactggcgccccaaagcctgtcatgcaacatcccctttgccactggggcggaacgcacgctctctagtaatttaacacccctcctttcaaactggaggccggggaacaagttctaataaatgtaaaatcgaattctacctacgctgaatatctggattttcaaacaacccttgggaccatgccagcccgggcccggggcccagtccaggcagcgggagcccaccgtccccagggcgctgggggtccgacaccggcgctgaaggcagactccgcgccccgaggaaaggagaatcccgcggcggcgaaggtcgactttggcccggccaggcacgttcgggccgcggctcagccacgactcgggcagggcctcgcggcccctaccagccccgggaggagcctggccggccgggccgttaccacagtggcgcctcggccagctgggcgcgagcggaggcgcgccaagccctggcggcggcgccacggccgggcagcacgggccccgcaacttcgcgccgccaccttagcgtctccggaggaaccgggagcggggagtgggggaagggagggcgccgcgccttacccggagagcgggcggcttctgcccgccggcgtgtggctggggcgctgcgcggcggcgcggctgcgacagggagggagaagcggtggtgcgagcgctggcccgcgggagacgagaggcgccgccgccaccgcagacagctccgcaatatggccgctcggcgcctccgcgggaaaaggcggggctgcccggcgcccccccgcctccccctgccggccggccgtcctcgcgccgcggactgagcgccaacgccgccgctgggggccgcccccgccccgcccctcccgcaggctcgcagccgcaggcctggctccgggcgtggccgggggtcgcggtctggggccggccaacgcgaggtgggtggctgcgggctcgggagcgcccagggaaatagggcgaatgcgccggagggtcgagcccttccagagagcgctgggctccagctaaacctgcggtcgagggaagcggagccgcccagcccaaagctcggagtgtgcccgccgcctccccaacgagtggaaacttgaaactcccgctggtgccagcaaactcactgagggcgttgccgtcgcccccagaggagg

SEQ ID NO: 235913 - DNA, 232 bp, Homo sapiens
  chr11:110300415-110300647
  hyper
ggatgggggtatgcggaacagaacacagtggtctagctaaccgatttccgctagacgtccagctatctttcaaaatattttgtttctgcacggcaacttcagccgctaaaaaagcatccagcttacaacggaacctggagggttggtaaaggccccctgcgctggccccgccccatgggaccgggcggcgtgggcgtgagaggcggggcggggccgcgctctgcttgccaat

SEQ ID NO: 235914 - DNA, 1175 bp, Homo sapiens
  chr11:110581775-110582950
  hyper
gggggtggggaggcgggggacaggcagacagggctagaaacacccaaatcaattcctcagggagcgaaacggcagaggccggcagcccgcggcccacgtgcacttgctcagggaaccgttccagcgaaacctgacccggatcggaatcctcccgcagcacagcggccgtgtttatcggaatggaacgctacaagttgtcacctgcatccctctcccagctttgacagggaacacgcgctgcccccacgcccacaccgacacccggatccctatccagcccggccagagtcccaggggccagggaccagtgcagggagaaggtcccccacctcagccctcaggacccccaaccacagcccacccgcccccaccctgctcggttctaggcccagccgaacctacatgtccccgtagtgtcgagcgttatcatccacagtcgcccctcaaactgtgacccccacctgggagacccggaatcatccaggaccctggtgtggggggcagtactccccatatctgccccccgaaaactgctatggagcagccgcgcctcggcgggcaggtgagggggccgagcccaccagcgccgcagccccgctgcctaccttcttcagcgccggctgccgctcccgggcagacatcgccggccctgactttggggctgacaccgccaaagggcagtcagtgctcgcccaggccacttcgggaggcccaggggcacggcgaggggtcggggaaaggcgatcgcccactacagcccgcgcgcctagactgagggaggagccgggctgcagaaccggcggcggatggagacgggagggaggctgcgaggtcgctcgaggagagactaaggctctagaaacggagaagcgggcgctctgcgggaggcggcggcgctgccgctggccgtcaagggcgggaagtgttctgggactctcattaggggccgcgagcctcgagcgtcaaattcccgcggcgtccgcctagcgcgctgctgtggcgggcgcggagggcgcgcgccggcagtgggggctgcggcggcggagggcacgggcccccgctcagcgtcctcaccttcttggtgcagctgcctcccgcgagccgagacactcctgtcagggaagaggagcgccccggctgtccccctagagtctcctgctggggggacatcgctt

SEQ ID NO: 235915 - DNA, 83 bp, Homo sapiens
  chr11:110583130-110583213
  hyper
cgctcgacaccgcgggctggaggcgagtgcagcggcgacagcccgtcagcgccgcggcccgccccgcctcgggcccgccccct

SEQ ID NO: 235916 - DNA, 145 bp, Homo sapiens
  chr11:110583933-110584078
  hyper
gatatctgcgccgagagcataacttcctgtcagcccaaatagaggcaaaaatattttaaaggccaaagaataatcagagggagaggatttggagctgacccgcgttgagctgagtgttgctgcactttgcggggctggttgactg

SEQ ID NO: 235917 - DNA, 1045 bp, Homo sapiens
  chr11:111169520-111170565
  hyper
ttggccgctccggacgtccgcgtaccccaggcccccgcccgccctcccacgtatccactgttgtgtcctgagacacgcggtgcggaccctgcgcgcccagaagctgctacggggggagctagaggctcacagtgagcctgggacgggggcagagcgcaccgactgcactgagccgagctgtggcggtccctgcgcggaccccgaggggcgcccgctgcccgcggagtccggagccgatcggggaacggggtggtggggctgcggtaggctggagcgcggagagggcgcggcgcctgggccctgcgggcggggcacgggattccctgggtccgggctaggaagagcgcaatctcctttcctggggagaccctaactcctggaacccggcttgagggggatccctgctgtccagctgcggtccccgcagtgaccaggcgaggcgctggcatcctggcactatctccaggcgtccaggctgaacgcgcggtcaccctcggccgccgcacccagcgcacttcccggcgcgattcctggacgcacactgcagggtagtggtcagggccggagccgccccggactcctgcggccacctccaccttgaaagctcgcccggctcggcttggcctaacagccagtccccaacctactcactgcggcttttcggggcccggggctgaggctgcccctgctcccagcgctcaggggtccctcccagcgaacccctcttgagcgcgcccgccacctcccgcgagccggggcagtccgaccgggccccgccagccccggggcggcccctaccgaagggcggcctcccggcggagtgcagggtcatcgggagccccggacggctttccccagctcgcgctgcgcggactcgccccggagcctcagtgcgcctcggagaaacgcctgccccagaaagggagggggtagggagagaggggaagaaggggagagtaggagcgggggcgaaggagggaggagggcaagatggagcgcggaaaaggcggagaaaagggacgagggagagcgggcagaaggcaaa

SEQ ID NO: 235918 - DNA, 734 bp, Homo sapiens
  chr11:111383170-111383904
  hyper
cggggttccaaggacggttggtcgcccccgccacagtcactcggccgctcagagcggcggggcgcacggggtcgagagagccagctctagggtttggggctgggaactgaagcctggcgtgaaggaagtgggagcccgggccgaggaggcgaaggggaaaggaaaagcgaggggaacctgagcgggagggccctgagaggagcgggaggctgcgggaaggggaggcctggcactcctgggggtcatgggggtcggggcgcggctcccggcctgggagggcgcgggtcctccccggcagcgccgcccgctggcccagctacgcgtgttgtgcgctgcgaggccggcgggggtcccgctgggcccgggggtgtcctcgggggccgcttgcgcccagccatggtagggcgtcccccggtgaaatggggtccgaggcgggccccgaccccgcgtcggcgctgcggaccgtccgggagctgcagccgcgggtgcccggtgctcggtttgtaggcagtgtcattagctgattgtactgtggtggttacaatcactaactccactgccatcaaaacaaggcacagcatcaccgccgcccggccgggaagaagacgccggctcgggcagcccgcagccttcgagagaagatgcctgagaagcgcggcgtcggcgtgggtcctgcgcagcctgccccgcgagcgcccgctgcaagtgcgaggaaacccgcggtttctccagat

SEQ ID NO: 235919 - DNA, 40 bp, Homo sapiens
  chr11:111385436-111385476
  hyper
gttctcggaggggcggggcaggggcggggcggggggaggg

SEQ ID NO: 235920 - DNA, 31 bp, Homo sapiens
  chr11:111411094-111411125
  hyper
acccgcacagctggcgaacttggctaaggtc

SEQ ID NO: 235921 - DNA, 721 bp, Homo sapiens
  chr11:111411965-111412686
  hyper
tgccccttcggcccgctcctttacacgcatcgaatcagtccttgggaccacccccgcggggcaggcttgccagctggcccccgcctaccgcccgctccgggaggcggccgcagagacagcggggtagggatgctggatccccggtgccgtgggaaccctgcctgttactcctcgtctcttctgcggggttggatggctgggtcgagcgcccggtatgagagcgcttagagatcgggaaagaactccagttagtgtgggacgagccccacctgactccggggaatgactctctgcttccttcctcctgttgtgtcactgcagcctcggatttggacctcagaggaggtaaagtgctctggcttctggcttctttcagttgttctgcatgtcggggggagaacatccgtgcccttttctcagatcctttttgcgggtgccaacagcttgaccaaacgggacagaggagactgggaacctcctctactctggcatcctggcttgcgaaactaatttaaagaatgtaaagttggtttcaggatgggggcggggcggcaaaagaggtgggaagctgaattgagctgcttgggttagggctgcgtgggctctgtccttggtcgcggggaacagaaggccctcccacccttcgccttcctgcaaatgagaagagaaggacacttcctgaaggcaggagaaccagataggcccgcgggcctccttccag

SEQ ID NO: 235922 - DNA, 140 bp, Homo sapiens
  chr11:111472616-111472756
  hyper
ggagacatcaaaacgtggagggttttattatatatagcaacgagaagagaaaaggacacaaagaaaggagcctgtgagcaacgcattgctcagccacagttctttgccggtgccaaatttaggacgcgctgtacttgtag

SEQ ID NO: 235923 - DNA, 422 bp, Homo sapiens
  chr11:112096873-112097295
  hyper
cctaactacgtggcgtgacctcaggcggggcaaacagatcaaggacacagggtccccacccaccctgaccactccagggtatgcttaggtatcccaaatcttgctctccgaagagattcagatagcgagagacacccttaactgtctcccgaggccgggattggccagagcggaagcggagacgcacttcctaggggcgcgtctggcacgcactgcgcagccgcggtgggaggaggcaccggccgcgcggcgggaggaggtgccggccgagcaccgcagacagcgccgggaagatgagcacggaaggtggtggccgtcgctgccaggcacaagtgtcccgccgcatctccttcagcgcgagccaccgattgtacaggtagggtgtgcacacaggtacagcggcgggcggtgggcgccgggcc

SEQ ID NO: 235924 - DNA, 278 bp, Homo sapiens
  chr11:113258498-113258776
  hyper
ccattcccctctcccggacccgaggagcaggaagcggcggctccttcggccacccaggcagcagccacagcggggagtgcgcggcgcggggacaggaagagaggggcaatggctgccgaccccaccgagctgcggctgggcagcctccccgtcttcacccgcgacgacttcgagggcgactggcgcctagtggccagcggcggcttcagccaggtgttccaggcgcggcacaggcgctggcggacggagtacgccatcaagtgcgccccctgccttcc

SEQ ID NO: 235925 - DNA, 1227 bp, Homo sapiens
  chr11:113345086-113346313
  hyper
ggccgagagccgggcggtcaccctccgctactgccgccaccgtcgcctgcactgccgggtagaaacgggtctggcacccaagcctccctccccgactaggtgtcaacccaagagaaggcgaaggagaacgaaagttcaggaccaaggacagcggcaaccgtgggagcgggagaatccagccagaatctgcctctcccccatccttagcttctgccttagaaactgaaaagggtcaggtcgcaccaacacagagttgccaaaaacagcccttcttcctccggaagaagtcggaaactctggccgcgagccccgggtctcgcgcttgggtgctgggggaagtgccctcccgagattgtggggagcggcctccctcccgccctccgatgccgcggctccgccgtgctgccctgggcgccccgcggggaggctgccccagctgcgcccgctcgtgctcggggagaggattcccttctaagtggcgaggaggctactgagaaggagggagaggggatagcagccgcgggctccagacgccctctgcccccgcccgacggggagcccatgcagagccggatcccaggcgggcgctcccgagcaggcggccaggagtggccgcacaaacttctggtcctggcctcgctccccttggaggtccctcctcctctccccgtgacactgagtcgcccgccgctccatccggccggtgcttaccttcaagccatagggcgcccgggggcagagacggcgccggctgcttgaggcttccagctcccgccgcatccacgcgcggccgcccctccggcagccgtccggggccgccactctcctcggccggtccctggctcccggccccgccgcgccgttcagagccccggcgggcagcagctcggccggctctggcccgcggggagcagtggacgggccgcggcggggcggggcggggcggggccgggcgcggggcgggcgggcaggagggagcgcggggacggggcggaggcggcgcggtgcgcgcgtgaggctgccggttcggcactgaagctggacagctctgcggcgcccgagcgcggggagcgcgggagggaggtgccccggtccccgcccctgagacaggccccgcccccgccccccaccaaaggagctgtacctcctcggcgatccccggcctgaacgggtaggaggggttgggggattccgccatcccttgttttgaggcgggaacgcaaccct

SEQ ID NO: 235926 - DNA, 251 bp, Homo sapiens
  chr11:113644420-113644671
  hyper
ctctcgtagccagcgccgcagctcccgtcccgccggccgtcttgacgcgaggcctgccgggaaacggagtctcgcgggcctcagaccgccgcccggaaggcgaggggcgcactacaactcccagcaggcaccgcgccaatcccgagatgggatttccacggtgtcccgtagttggcaaactgtaagcagacgcgttttcttccttagttgttttcaaagttcgttgcttcccgcccgtttttcactggagg

SEQ ID NO: 235927 - DNA, 108 bp, Homo sapiens; identical to SEQ ID NO: 202725
  chr11:113746574-113746682
  hyper

SEQ ID NO: 235928 - DNA, 520 bp, Homo sapiens
  chr11:113929593-113930113
  hyper
gaaaagtttctcccaggactcgaccttggcctccagcaatcgcgacagctaaaaacgggtgtctcgcttcgacaatagatccccgcggaccttctggcacctggttcactagcgcccgcgaactctgcctcgggagacttattgaaatccggatgctcaagccgggaggcgcgcagtaaccaggaggatgagagggccgggtttgggctaggaaagcggccttttaaaacagatgtcagggggactgcagccccgagccatgagaaaaaagttaaaggcgagatgacacgcactgaattggggcaaacattggaagaggagacaaaactgcgtgcttgagcaccggggtgcggggagggggggacaaaacccgtatccagtgcaaattaaaatcttgggagtaggtgggggctgctgcgcgcccttcaccctcagttcccctattaaggattctgagtccccatgcactcctgtcctctggctccttccttcctctccgctcggccggtgagaggcggcc

SEQ ID NO: 235929 - DNA, 1924 bp, Homo sapiens
  chr11:113930326-113932250
  hyper
cagcactaaagatggagaggcgccggggccttgcaggggagggggctcggcgttgacgtgggacgcggcggaggcgcagcagccggtggtgatttgctaacctcgcagcagagaggagttgagggcgatgagagcgggtactgcgaactgccgggcgatgctgtcgctgccgccgtgatacggagagcaacagttccccagcaacacccctccccgacacaggcacacaccccccgacaggcacgcacacccaccccacagtgcccggctcggctgcggtgagtgaggggccgggaagaggcgcaccgcccagcgagcgccgcgcgccggggcttcccggggctggagaggtctggggggcgcgcgctcgcttcggccactcggccgctgggcttgtgccttttttatttggcgtgttcccttcctgccgctgcagccgtcgccgccaccggttgggggtcggctagaagggggagccccggctgtcagcctgggcgcagctgcctccccagcccttcctcttcagggcacggtcggggtgagaggtggggggcgtagcggtgtgcgggggctgagggcgtgagcagaggggtcggggatccggaggctttgtaccgccaggggctggcggagcaacagagcccgtgggtgctcttatgtatgcggaccggtgcgcgggcgcaagataaggttgtggtttatttatttgtgtgtttattcgccggccggctgggaagctagaatcggaggagctgacgagtagatctgggggcggaggggagcaggactgggactgcttacgttttgtttctctttgagaaaacgtggtgggctttttcttgattggacttgatccccaccccccttttgcaggggagggagggaagctccagagggtctgcagcgctgcgggccctcctcggctctcggcgggaccggcggtgacaccggagctcgccgtgcgctcccggccgctctcggtgggtgccggtctctgcacctgatgcgttcgggatgcctttcccaccctggcgcgcccgccgctagctcgcacagcgcctcgcacactcccgcacgcgcttgaaatgcgcacggtcccgccggcccgcggaaccacccggacgcacggagcgctccgcaccgactcgctcgccgcctccccgagacgctcgcaccgtgcttgggccgggcgcgctggccgctggcgccgctggccagaggcctgggacccagccggtcgctcccagggggtcacggccctgggtcggagagggagggcgggcagaccccttctcgcctttcctcccacaactcgctgcggggcttttgtgcttccccttcgccgcggggcgggtccgcctcccctgccgctctcgccgcggagtccagcccgcccggactgtcgccgttcctccccgtctctttcgctttccctcgtccctagctcagctctccttctttcaggagtctagctcctcgggaaaagttgcttccccaagtttgctgaagtcgtctccaagtctcggtgggggtcgctgggaactgggggggtgtgagagcgcggtcgatccccggagctcgggcgggttatcgccggctcttccccgcgccgcctggctggacgctgcagccagcgccagccggatcgcgggcgccgagcggcgggtgggggagacggctgcccgtgggcgcccagatttccctcaggacccaaaaggcttgtttcagggcgccaagcttccattcttttggctgttccctcctagttctcagaaaccccgatgtctgcgggaaagcacgcggtggctcggctcggctgaatgctcatcccaaccttgacggcctccgtccccaccccggggcgggcagcaaaaatgtcttgaccagccgtcctgtgaatcctttctgcgtgagcttggtggct

SEQ ID NO: 235930 - DNA, 246 bp, Homo sapiens
  chr11:114271097-114271343
  hyper
ggcaggcccttcgcggctccccagatcagtccagcctgtgtcggacccgatgactaagcacacaggaacccataactgagcctgcggaagagccagaagccgccttgcctttaacgaggggtatcctggcgagcatgcgcagaccgtccgcgcacgtcgtcgcccgctgagagcaagcgcaacgggcgttttcgtttgtgacgccagggagcgtgaggacgtggggcttccgtgaatgcgcagtgg

SEQ ID NO: 235931 - DNA, 154 bp, Homo sapiens
  chr11:114309918-114310072
  hyper
tcttttttaactgcgcggttacaactaaccaaaactcaggaaataactcctggaagcaaacaaacttagcagtgaaaaacaagcgcgtccagtaacaccagaaaaacacgtggcgggggtggggcatctggtcgcaaccgcaggtgagactcta

SEQ ID NO: 235932 - DNA, 211 bp, Homo sapiens
  chr11:115372960-115373171
  hyper
cttctgctgccaagcgtcattgcacgactcccatttttagtcaaaaagcaatatccccgaccacagctttccaccgccccccggcttttttttttttttttttttttttttttgcagccaatacaagtctattgttgcctctattatgcgccagttaccgagcctttactcacgctcacgtttaactgacactggcgctttttacaatgca

SEQ ID NO: 235933 - DNA, 132 bp, Homo sapiens
  chr11:115373351-115373483
  hyper
aaaaaccctcagcgctggaattgacgctgctgccagacgccccccaataggtttcccaagccgagctcctttgcaagcctattttgggggcaagcagccaacccggcgtcccccaaatctcaagctagcacc

SEQ ID NO: 235934 - DNA, 346 bp, Homo sapiens
  chr11:115375851-115376197
  hyper
gagggtatgctcaggctcctccgcttgtcgagggtctcctccctggttttaatatataggtgtgtgttgaatatatgtgtgaaatatttgtaatattagatatttaagattacacaacaacggaaaaaattagtcaaggcttcaggtgaagagcgggggtggtgggagttggggagagggagtgtggtgaaggcagggtctgccgtgttcctccttcggggctcaaaccctctcactcctcctctgcgcccccagcccttcctaaggaagctggggaccaacaggtgctccgagcttcccctgtctctgggagagcctctcctgctaaagcgacttgcatctccgg

SEQ ID NO: 235935 - DNA, 705 bp, Homo sapiens
  chr11:115529918-115530623
  hyper
caccgagcacagaccgtgggaggggaccctgcgggaggaggctgcttcagtctccagagaccatctcccatctctacagcgactcccctatgaccgtcccccacccggtgctctcgggccacggggaagggacactcgggaaagacaccagagaccgggagggtgcagctgggctcttcgcggggagcgggcgggaggccttcctgttacatgtcgcagctgggacacagacggcagcgctccagggtccacttgccggcttcggttccctcaggcccaggaccaggctccacaccgctgtcgcgtcccttagccgtgtgggctgtagcacagagggggcaaacacctccaggggcttgtgccaagtaattaccaagcaaattcccggcgatttcctctcctccccccgcccccccgggcagtgcccgctgcgtgttccctgattcggcccccggctgtgcaatcagctccaggtaacctgcggggacccgtaattgctctggagttgcctgcgagtttgcaaggtaagcacgcgcggcgcttctccctggccctggggcgcgcggtggagcgccttgcgcccgcccccgatgggccggatgccggggacctgcggaagcagaggctgcgggggtagagatccaactccacggagtgagagagcagctttgcgctaatggggccgggtgcaggaagctggtgcag

SEQ ID NO: 235936 - DNA, 89 bp, Homo sapiens
  chr11:115631319-115631408
  hyper
aaacggtgtatttcagcccgagtttccttccgggggtttggctgtgagtgtgtgtgacctcccagatggcggcacggttcagatcccat

SEQ ID NO: 235937 - DNA, 160 bp, Homo sapiens
  chr11:115846301-115846461
  hyper
acacagcaaaagctcccagccgcttctctggctgcgaatgaaaagcgctgcctcctggctcccgggcctgacggacagggggcctttctgctcagctattattagagccgatgtggcagaagctcaggcagctctgggcggtggggggttcttgttttaa

SEQ ID NO: 235938 - DNA, 186 bp, Homo sapiens
  chr11:116643252-116643438
  hyper
ctatgggagaggacggaagtctaccaaggcgggaaaagagtaatcaaagttacaccccggctttaacgcactgacgctactgctcagaggctcgagatgtaagcggggcggcagaggcaaggcggggggcctcaagcgatgtgagtggggccctgagcatgagcaggggtcggcggagaagccgag

SEQ ID NO: 235939 - DNA, 253 bp, Homo sapiens
  chr11:116643719-116643972
  hyper
caaaatgcctcaacgcgtaacggacgccagccacccgacagggcggggccacggccggaagtggcggagagtgctaagaatcgcgcggctggcaggtgcggccaccgggacgcgctcgcaggctagccagggacgtgcgcaccttcggggcgctccacagccctgggacgacgccaccaggtttcttctcttcattcactcacccacccacccacccatccatccaaccgcagcaagcgctgttctatgaggc

SEQ ID NO: 235940 - DNA, 49 bp, Homo sapiens
  chr11:116706411-116706460
  hyper
ggctcccccggatgtccccgcacccccctctattctcccaaaagaaaga

SEQ ID NO: 235941 - DNA, 210 bp, Homo sapiens
  chr11:116706760-116706970
  hyper
gggggccagatgcgtgcgcagcgcgtccacatgggcgcgcgcgcggtcgcgcatctcctcgcccagtgggctcagcttctcttgcagctcgtgcagcttctggcgcgcgccctcttggagctctgcgcgcagcggctccaccttctggcggtagagctccatctcctcctgccacttcttctggaagtcgtccaggtagggctgcacctt

SEQ ID NO: 235942 - DNA, 505 bp, Homo sapiens
  chr11:117014686-117015191
  hyper
gtgaagggaatggcgtcagtgtgacttcacgccacatcgtcccgaatgccagctccacactgcggtggcacgaacgcaggattgagagatgcagctggagtaaagagagaagcccatgtccctcagacgccacacaaaatgggggtaaccgcgagaacaaagcagggtacccaacggggtgtggcgggacacctgggcgcacgccgccagcgcccgggagagcgaaggcggggagagaggaaccacgctgaggcgtggcaggatgggggcgggacttccggaagccatttggctgagtggcaggggaaccggaagtggaggagctgctgctggtgctggggccggaggagggacgcgccggagcgggaccgacgggaccgagcgagcgaccgacgcgccacccgccgacgcctcagccgcttggggcccgcacggaccctctacttcagtgagtgcatccagggtcgcagggaaccggtggcttagaggcgggggtcggaagggg

SEQ ID NO: 235943 - DNA, 369 bp, Homo sapiens
  chr11:117049879-117050248
  hyper
tggaagctgcggccgcagccgcaacccgtcccggaggtgtcctgtctcctgtcgccgccgccgccgccaccaccgctgccactgccgccctgccggggccatgttcgctctgggcttgcccttcttggtgctcttggtggcctcggtcgagagccatctgggggttctggggcccaagaacgtctcgcagaaagacgccgagtttgagcgcacctacgtggacgaggtcaacagcgagctggtcaacatctacaccttcaaccatactgtgacccgcaacagggtgagggctgggggcttaggggccagaggcgagtggggaagccgacgagggctaggcgattctgccgccccgctacccttttggga

SEQ ID NO: 235944 - DNA, 83 bp, Homo sapiens
  chr11:117103812-117103895
  hyper
tcgccccgggttgcggagttctttttggtacactcgaccctccagccagctgttcctacccgcgccacgggctctctagccac

SEQ ID NO: 235945 - DNA, 226 bp, Homo sapiens
  chr11:117186458-117186684
  hyper
ggcagcactcccgcgcccatccacagcaggagccagggcagggcttgggccatggtgggccccggccttcgggccctctgggctcgcactggcccacgtccgtccctggcgcctgcccccaagtctgggtggtgctggtggcttctcaggagagggagcttgggggcatcaggacgccagggcctgcagggccctgggccagcccccgggtccgggctgtggagag

SEQ ID NO: 235946 - DNA, 153 bp, Homo sapiens
  chr11:117186984-117187137
  hyper
caaagccaaaaggttttcgcttttccctgggatcgctgggaagtgtagtcttcccatggcaggcaatccggcttccggggctggagaggggtctgggatgccctctgccgaggtggagtccgccctgcaaggccctggcgggaagggccagac

SEQ ID NO: 235947 - DNA, 65 bp, Homo sapiens
  chr11:117198410-117198475
  hyper
actacactcccatcgtgcaacggaaaacggacagagctcctgcgtgcaccgaagggacttcgagc

SEQ ID NO: 235948 - DNA, 251 bp, Homo sapiens
  chr11:117666746-117666997
  hyper
gccatctgcgcgcccgggggcacgtcctctgcgatagcctggaacccagactacctgcgcctgcctggtcccgactcagtgcccaggtggcttcagtcggaaatgtctgccctcttccaacctcccgatcccggctgcctcgcggatcaggtacgcagcgccccagccgcaggtctggacatgccggacacctggacccacccctagcaaccccctctctccgggaagagggacacgccccccagcctgaa

SEQ ID NO: 235949 - DNA, 93 bp, Homo sapiens
  chr11:117667477-117667570
  hyper
agggagcagggagatgaggggctcctttgccaccacccctacgggcgcgccccaaaacggcagacgcgggtggctggcggagcggtcgggggc

SEQ ID NO: 235950 - DNA, 197 bp, Homo sapiens
  chr11:117746423-117746620
  hyper
ggagaagcctccagtagccacggtcccgcgagcgtgcaggcttgcagcaggtgacgcggcagacccatgtttccagcgaggctgctcccagctcccaccctcgggtgcctcctctaccagccaccacttgtaagagccagaagccagcgctgggagctccaggctgcacacccaactctccacggaagcccgggaga

SEQ ID NO: 235951 - DNA, 164 bp, Homo sapiens
  chr11:117747016-117747180
  hyper
ctcaaggcagcaccgagagcaattcccagccaccagcgtcacccccagcgccacagcctgcctcccctagaggctcctctctcttccgacgccgatctccttgtttacatccccagcccggtttcccgctgcccaggcggggaccgcggcgcagctgaccgcgg

SEQ ID NO: 235952 - DNA, 33 bp, Homo sapiens
  chr11:117857279-117857312
  hyper
cctgccctctccgcgcccgctccattaaagttc

SEQ ID NO: 235953 - DNA, 88 bp, Homo sapiens; identical to SEQ ID NO: 202733
  chr11:118023499-118023587
  hyper

SEQ ID NO: 235954 - DNA, 46 bp, Homo sapiens
  chr11:118230310-118230356
  hyper
tgctgtgctgagtcggaagtgggaacccttcggccgctgagattct

SEQ ID NO: 235955 - DNA, 70 bp, Homo sapiens
  chr11:118230635-118230705
  hyper
gaagaggccggagcgctatcattgcattatcttttgacttaactttctctagaacgtgccccgggcgggt

SEQ ID NO: 235956 - DNA, 34 bp, Homo sapiens
  chr11:118662152-118662186
  hyper
gcttttccacagccgcgacgtgattgagaaatgg

SEQ ID NO: 235957 - DNA, 317 bp, Homo sapiens
  chr11:118663553-118663870
  hyper
acttaatctttaaccggcagcttccctatttcttgcccctgcttccagctctgggccaatcagagaaagccaaatgtgctcctcacaccaatcgcgtaagaagccctgcttctagtatagccctcctccaacttcccgatgccaacatcctccaatcagagccaacctgaagtttctcccttttttcagtatatgtaaagcttttccactcccctgcctgcctatgagtctgttaaatcaagtgatgggtcgcggctgactcttgccagctctgagtaaatagcctattctcatttggtggtcgttatttctacaca

SEQ ID NO: 235958 - DNA, 62 bp, Homo sapiens
  chr11:118799388-118799450
  hyper
agaggtctgggggcggggtttgtggggcctccatctgactgcccagcgcccctcacttgccc

SEQ ID NO: 235959 - DNA, 130 bp, Homo sapiens
  chr11:118800838-118800968
  hyper
cggaggcagggaacgctagcctcccctagctccagcgaggactaaggacctgagtagctggaaacctgacttcacctctaccctagcccctcccctagcgaacagcccctcccccgtcctctgtgaccct

SEQ ID NO: 235960 - DNA, 124 bp, Homo sapiens
  chr11:118811078-118811202
  hyper
aggtagagaggccccggggggtggggggaagctccaaggcccagccatttccggcagagcagaaactcccagcatgggccacgtggggagctggggaagctgcaagtctcggagtggtgaggga

SEQ ID NO: 235961 - DNA, 188 bp, Homo sapiens
  chr11:118972865-118973053
  hyper
acgtgtctgacaccgctcacattccggttccacgtcagttttagctccgtccgcctccataggtcaagcttaaagggcccgtacctctcccttaatctgggatgcctccggctccaggaagatggctattgaaaggcagggggtggggaggagggacgagggtgtggagacgcgcctgtttcttgcag

SEQ ID NO: 235962 - DNA, 140 bp, Homo sapiens
  chr11:118977772-118977912
  hyper
cctcacaggcgtccgacctgtggaaatctaacaagcataggggaaagcaaaggcagcatcttaggtaagtgaagttactcttgccttgagctgagtgtgggagcaccgcgattgcaagatggggcgaggtgatcaaagat

SEQ ID NO: 235963 - DNA, 398 bp, Homo sapiens; identical to SEQ ID NO: 202734
  chr11:118992030-118992428
  hyper

SEQ ID NO: 235964 - DNA, 64 bp, Homo sapiens; identical to SEQ ID NO: 202735
  chr11:119039732-119039796
  hyper

SEQ ID NO: 235965 - DNA, 362 bp, Homo sapiens
  chr11:119204862-119205224
  hyper
caggctgcgaaggcggtgctattccaaagcccagcccagaggcagtgacctccgacccaagccaaaaaaaaaacctcgcgttcagaggccgggagaaagaacagctcccaaattgaggggagtccaagaccctgctcttttagagggtggggctaggagagcgtatttcgacgctgcccgccaacgaaccaatccccgcctaaagggggaggggatttaatctgtcgcctctccttccctttggaaagtaaatacgttcgggcgccattcaaacggaccaatgagtgatcgacgtttttgtggttggccttcaccgattggctggagtttgtcgtccctccctcctcgtcacgcctctggct

SEQ ID NO: 235966 - DNA, 355 bp, Homo sapiens
  chr11:119234722-119235077
  hyper
gggctttggccctcgcttaacgttggcagcgggggcgcggggggagtccccgcgcggtgccacagtccggacgccgaggccggcgagaccgctacaggacagcgtccgcggcgcccgaacgcgcgctcctccgcctcaacctccccggcgtgcgccgccaacagcccgggtcccggctctcgcgctccggccgactggcggccccgccggcgcctcgggccccgcgacgtcagcgctggggcggggccaggccctaagccccgccccacctcgcctctaccccgcccccggcgccggcacgcggacccgaacgaggcgacaaggtcggtcctcccccgccgggccttccccgcgc

SEQ ID NO: 235967 - DNA, 402 bp, Homo sapiens
  chr11:119252460-119252862
  hyper
gttcctactgtggcgtcattagagcccggcctccggctggggccacccaggcaaccgatatacacagagaaccacgtggaggaaaagcacgcgagtttggagcgggtggagcaggaacagaggtggactggaatgtcacacgacggggcagctggaaggtattgggaaagaagaggcgtcatgggagaaggctcggaacttgagccctggggcgtatcaactttcagtttttagggaaggctaaacgtcccccactccccttctcactgggctgggggaggtcctgttcctcagcctcttctctttttctctgctgtcaaagacactctccgctcattttactttcatgggaccagtgattagtgatgaatgcctgagtgggtaaacggaggcactgagtca

SEQ ID NO: 235968 - DNA, 139 bp, Homo sapiens
  chr11:119292765-119292904
  hyper
cacccgcgagagcgcgcagggcattgcctcggttgagtgcgcccgggtgcgcagggcgcaccactagacgagttcagggtccctggcgctcagccccttgacgggtgaggctaggatcccgcggcggctgcagctacaa

SEQ ID NO: 235969 - DNA, 930 bp, Homo sapiens
  chr11:119293204-119294134
  hyper
ccctctcaagcccccggcgggcctcatccttaatccatttccgtattccaatcctctcctttcccaaatgagtcccccttccccctctctcatccttttccagctctcccctcccccgtccgcccgccttccacccagtccccgcctgcggcactgcggcttccttctcctccggtgccccgcacccagcccgccgcgaggtcacccggcagattccctctagctcgccatcctccatcctctccccgcagtttcatccgtcctcctccccgcctctgcgagctgggtttggggacgtctgggtggaatgtagacccacaggctgtccttggtgcccttcctccctgttctccagcgccccagccccagacaccagtcccccagcgggcgaaagcccgggagcgccttccccgaaagacatcagggtgccacgcggcccctgccctgcagaagcatccccctcccgcccctgcctggaaagcaggcccctccctaagctctgcgcccttcttccctgggcgccctcggaccgtggcccgaagcctagtgttgggaagtcttgcatgggcgcctgacggcggtccccgagccccaggtcccaccggctccagttcccacctggactggggtcttccgctgctgcagcctcctccagacgcgccgccgcctccggttgctgcacccagctcggagcccgcagttttcaccggggatggaggagagggggagcggggagccgggggctcagccaatcagaggcggagattgggggagaaaggacggcagggtggggtggggggtggggaaggaagagaaggcggtcccgcattggtgtgagagtggcaggttgcggcggaagggggccctcaccctgtggctggcaggcctggccagggacgggagggttcgggaccccggggatcagggtgc

SEQ ID NO: 235970 - DNA, 772 bp, Homo sapiens
  chr11:119455154-119455926
  hyper
gattccctcttccgcggctccgcgcggcggagctcaggggcgcaggctcttagagctgcggtggggcgggggccgcgggacgtccgtttgttctccgcggaggaggcgacgcgccgccaacgaccgcagctccacgtcctggcgcttctgggagccgccccagcgggagccagggagaaaatgaatcgccttgagtgacacaggacatggcagattggatgtttaatttgggtatctctttagaacgccccccacgcccacctcctctgctcccacttagcatccagccggcgagaaagccctgctcctcacaaattgccttgtcggctcggagaaaaatgccagcgtgactgattgctaggtgggtccctccaagtgcgcgggaaggaaccggcacgaccgcacaatgctccttcctacagagacgcggcgtcgtgccagagccggagatttgagtcagacaccgggaaggactgcccgtggaggagggcggctcgtggggctgggggtttgtttaggggtctctcgggtccagagggagggccaggcgaccctggctggggtctggtggctgtggggggcctgcggggcccagaggaaaaggccggcacccggtccgcgagagggggcacgtacggggcgcagaggcagaacgcagcccgcagcagacggacagccttccccagactgcctggagctcggagcccggcgccgaaacctgcagatcacaacctgtcagtcgcgctttcccggcagcctcacctgcctccag

SEQ ID NO: 235971 - DNA, 159 bp, Homo sapiens
  chr11:119598930-119599089
  hyper
ttgtaaagaactgagcggagaaagtgctttcatgctacatagagacgtgcatctgactgcttccctgcagggcaggcggttcggcttctcaacctctttctccgccgtgccacctcccaccccctttacccaagccgtgacccaacttttctggctcct

SEQ ID NO: 235972 - DNA, 418 bp, Homo sapiens
  chr11:119600421-119600839
  hyper
cagaacccagtctccggagatccctctcctctgcaccacttggacgttccacggagaggcagcggtgcgcggggcgacggggagctgccagagaagtcagtggtgggcatgagtgggtgagacgggcccactgaggtttctggtagagtttcttttctaatccctgctcccttcgggggttccttttccaaaaattgaagcaccccgcgccccgcccttgcccaaacatagcctgaaaacgagctctcctccagtttccaggaccttagttttgagagatttgtgggattcccgcgaaagtggatcgtccagtcagtgtccctggcagggcagggactctccgccccatcccgttcaccacccactacatccgggtgtggtaggatttctgccaaggcgactgcgccctccgggcctt

SEQ ID NO: 235973 - DNA, 412 bp, Homo sapiens
  chr11:119612123-119612535
  hyper
cgcctgggaccctgcggggcctcctggaggcgggacgggcacggcgccacctagcggtcgtgggccgcggagagagcgtccctgtccttccccgtgtgggacctgcaaccgccccatagcgcagagtccgggaggctccagccaccgcctctgtcggccccattctctaggtccacagagggtagagacactcgggggaacgtacttttactggggtacggggagccctgccccacggctgtcagctcgggtcgggcgcgccgggtgcccaggaggcagcctcccaccctcccccgcacacgtcgttccagtccctccgccacaaagagaccattgattgggaagagcggccgggttgtggtaggaaggctggtggggacacgcacgcacacacacgcgcgcacacagaggc

SEQ ID NO: 235974 - DNA, 468 bp, Homo sapiens
  chr11:119613001-119613469
  hyper
accccgcctcctgccgcgcctgacactccgcagggcccgggggtgggtgggcaggggtgcgagggggcgtggggctgggcgcgccggcctggggggaaagccccgcctcccggatgtcgtctcttcgccccctactagctcttgtctcctccccaacccctcgccccaccccctgcctaatttttgccagtggatcatcggcctttggatgaatccgcagcaaatggctcattcggggcgggcccgcctccccatccccccagtgtgcggtctcctctccccagcaaagatgttcggtggcacttacggcccctttttaacaccaggcgaagccaatattgttaggaaggaagaactgctgtggcagctgctgcaaagacaaatcatatgcagtaatgcatcacgggctgagggagggtctgagtgtgcggcagggcagcgcgggcttatcagcgcggaatggctaat

SEQ ID NO: 235975 - DNA, 516 bp, Homo sapiens
  chr11:120039673-120040189
  hyper
gctagcctaggaagcgcatcgagggagcccgctcaagctgaagcgctgcacgagctgtgtcttccttctctccgccgcgaatgcgggcaggatgcgagcaaaagacccggcaaagagggcgccgagggggcgcagccggggcgctgggcggacccagaggggacatggagaggaacgcggaaggtacgcggtagagacggggaggtggcgcgaggcgggacatggtgagcgacccgaggggcgcgcggactgggctcgcggacggggctcgcggacgtagagcagtcgaggcgcggagggggagcgcgcccccgtgtggccaggcggggaggcgccacggccggggccgtgggggcggtgggaagcgctccgcgtccgggctctcagcgttccctggcctgccccggctcgctaggctttgatggctgcttccgctccccataaaggcctgtttcatggccgacgccggcatgggctttacgtctgccctcgggctccctgcgggctgcagagggc

SEQ ID NO: 235976 - DNA, 74 bp, Homo sapiens
  chr11:120110729-120110803
  hyper
caggtccccagctccatgtatgcaaatcactgctttgcatgggcctggggccaggcgcggggctcctgccaggg

SEQ ID NO: 235977 - DNA, 67 bp, Homo sapiens
  chr11:120195891-120195958
  hyper
ggtggcccggctccggctctgcgctccatcctcccagccagcaggtgcccccagacccccggctcct

SEQ ID NO: 235978 - DNA, 973 bp, Homo sapiens
  chr11:120435029-120436002
  hyper
tttgtaaacttattagtgtgcgctcgcggggagggggctcgggaatccgggcccgggcaaccggcgccgcatgctaatcagggggcgcccgcccccgctttgcccgtggccctcctttcccgattccccgacgtttcgggaggagtggggtcggagcgcagggctgggaagggtcttaggacccaggaaggagacgggtgcctcccagagaggaccccatcccctccgaggtccgggcggctcccggcctctccctggggtgccgtagcccccctcgacccgccttcccgcagccgcagtcgttcgggcctggaggtggccgggcatcggtgccgacgccgcgagggcagcgcccgcggcgggaatactaatgcaccctaaagggcacggccgccgccgcagcaggtaattagctggaccgcggcggagcgcgcggaggtggctgctggctgcaaggactgcgcccagcctccgcctcgcccctcgaggctcccgcgtgggccggcgggcagtgcgtgggccacaggaagcgggctgactggacccggctcaggacttcgcacaagggcagctctttgtttacagctcctctcccagctccccgctttcctttcgcccaccgcctcccttttccggcgatcggctccgccggctgcgggggggtggggggggtggggtgtcctgtgtagccgcccacctcctgtcccggcctcgtgctcccgctggggactgtttgcggtgagtctgtcgcacgcacgtcagggccgaggcagtgatgcggggcagcgtgggaggacgggctgcggagcccgcgtcatcctgcctgtggggagcgctgtgcctgctctcctgccagcgcgcccagctgtcccggccgccgccacgcgggactgcctgccatgtcgccaccggctgctgacctcattaggcctcatgtcatggaggagccggcgattaaaggactctaagaacc

SEQ ID NO: 235979 - DNA, 506 bp, Homo sapiens
  chr11:120894619-120895125
  hyper
ctcaatgggtgggcacgagaaagagcagatgaggtgtttgtggtaaagcctaagccagtgcagccatccccgtcgccatggcaaccccagcgcggttggggaggacccgctcctccggcgccccctcccattcacgcagcggacgtgacacgtgcggcggggtcacgtgttgttgttgggccgggaaagctgcttccgggtcaatgcaggacactgggctccggcggccagagtgggggactaggtgaagcggcgccgggccggggctggccgggaccaggcccgaggctgagcggcggcgacagcggtggccgggaggggggaggagaggcgcagccagaggagccgccgcagtagctcccccgcctcccgggctgaggggtgagtggagccgggcccgctggctctgccgggctctcgaggcccgaggcgttcccctctggagccgaggcgcggagggtcgctcctgcagggtgctgggataggacactcggggaagggtgaaa

SEQ ID NO: 235980 - DNA, 188 bp, Homo sapiens
  chr11:121163081-121163269
  hyper
ttgagggagaaaacgacccagacattcgcgtcaaaggaagtgtcgtctatttccctcaacgcagggcacccgttctaggaatgtttgtataaacaccgtaaacctgcctggtaccaccatgaatgacacaagagctagtttaaaaagaaagcaaagaaacaaacgcaaaacccgaaaccgcatcctcc

SEQ ID NO: 235981 - DNA, 189 bp, Homo sapiens
  chr11:121163483-121163672
  hyper
tgcagagcagtggcgtgcggagcggcggcggaccacctccaggtggggacggtgggtgggcggggaaggaagcggaatacacctgagcgggctgggccggggggcgatggaataaaagaagatggagagacttcagcgcctgggactcgggtgggcgaggcggaaggtgtcctcgcagcacggcttttc

SEQ ID NO: 235982 - DNA, 826 bp, Homo sapiens
  chr11:121526134-121526960
  hyper
ctctcctcctcctctgccctcgggcagtcctcagggacaaagctctttgttgtgaacactccgagacaatacgggattgcacagtccccagggcacaatcggggctgtcctccatggagagtgatcgcccgggcagagacccccacctgttgatctcccccttcccggggcgagtggcaacctgcattgtgctggggacgcacgcgtttccacagcaggctcagcagatggtgctggtgagcaaagccattcccgtccctctcgcgcccctccccaccgccagagcctcgctggtctaaagcaaaaacagatgttttcatcatttctggatctggcatgtgactcgcagttcagcaatgcgccgacataacccagagttgtacgtccccatcatcccccgcaaaataaaaatcctgaacttaaacgagccttcctcctaggcgagccactgacacatgatctgtgtaatccacccggcacgtgtttaatcggactccaactgcaactgcctttgtagccagccccggctctataattgggaagttgtctttttttcagcgaagacacgggacagccagactagctatctttacaccaagggctgggaagaggcgctagccttttaaaatagccctggtctggctggctggcgaacctgtctgcgtgggagccggtgagcggggccagagcaaaacaggaaggccgcggcggcgcaccctgttcccggcgccctcggcaggtggcagcattggcccgagctggcctctgccgctggccagccccaaagcagggcccttttactttcggtggcctcaaaattattagt

SEQ ID NO: 235983 - DNA, 553 bp, Homo sapiens
  chr11:121593320-121593873
  hyper
agagcacgtggtcccgccaaacaaaggaacatgtgtgctgcaaaccatccccctatcacgggagcgcagagctccgccaggagagggccgggcctgcgcactctaatttttcactgcagtttaaacactccgtgaggctctcaggaagcggcgggggtggggggcggccggagagaaggggcccgcgtctccgccgcttccatcaccgccctggaaatagcatctgaacgcgcacggcccgaccaggcttcccccaagctgctaagatttcatttcacctccgacaggcttcatggggactcgctgttaaaagatcactctcccgggatgctgtcgtgggggagggggcccggcactgtatacagctgtcaaaacgtctccgacaggagacgaaggcacatctgcacaagcctgtctcaggctgcggggcacacagggagcgcctcaaacctatcagtgtaatgccgagcggtaattgcattaggattagttatctcctgtgctctgctcattagcccggaggatggctcgcatccagcgagagggtggcaca

SEQ ID NO: 235984 - DNA, 67 bp, Homo sapiens
  chr11:121800445-121800512
  hyper
ccctctgatttcacgctcacacattaacgagagctgacactggagattagacgcagacagctggaat

SEQ ID NO: 235985 - DNA, 206 bp, Homo sapiens
  chr11:122526547-122526753
  hyper
ggccgcttgccggcgttctggctcctgtggcctcaccaggaagcgtcagagtcccgacactggggaagctcggagcgccgcctccgctgccgccgcctcctgcctggctctgggtccccgagccccctcccctggcccagcccgactccctcctccttcccgaaccatccggctcgggctccttccctggcgatggctggccgctg

SEQ ID NO: 235986 - DNA, 1401 bp, Homo sapiens
  chr11:122847227-122848628
  hyper
cattcctggaaacgcgtgatcattcccagttttgccctgcgagcctacaaacccggtaaaagaataagagacctcccaggggaaaaggagaggggtaaagcgcaaagtcaatcagacccccgccccatctattccccaaacaggtgcacgcccggaacgcctttagccttaaccctttggccttcatcttgatttcctaaaatgcactgagaatgaatatttccacacacaacccgaggaacactcacttttaaaatatcagtagcccgtggaacgtggaagcgttgcgggacaggagcgcaacaagttcgggaagcagaaattgctctaggggttttctgtgcccaagtttcccgccgcgcgctggcgccgcgcagtacgcgggaggcagggcgtaaggggcgtctgcgcctgggggctacaaactcaggaagggtgccaggatgcagaaccgcgagctctagaggagaacagggacgggagaggatggaagcgccgcccagagaaggagggagtcgccttagtatttgagtcagagatgggactctggggatgggggatgggggcgagtgggaggttagtgacgagcagtgcacgagtctgtcctgaaactggacgttttaaagatcagattgtggttctatctggatctcggcggagcggaggccccagagacctggtccctttgcagccaaacggactgcccaagaacgggcaaggacttggcgtggagaggaaagaacagagctaggggcaagttgctgaaaggcgagggagaaaggggtctatgatcggagaaaacagagagccgagagctgaatttccagtctgggacgcggtacttgggctggtccctgaccccaaggacgacggacgcaggaaaatgggcgcccgggcgcacagtctcccgtggctgggaccgggagggctagaggggaggcgggaggccgggccgcgggccgtgctggctccgcaccggcctggaggacaggtgggttttgtttgtcttccaggagcggatttccaaggcccgccacgagactggagtctgagtcttccggtccaggagggaaccgcgctcggccccgcagtctcctcccctgcctactaccctccccagcctggcggctcagagcacgtgcggccctgagcccagctccccctcgtctccaatgtccacctcgtcctctggctcggtcagcacgaagggaccggcgggcaggctcagccgagcctcggcggcggtggcggcctctgaaccgcgggggctgccctcggggctttctggcccgtctggtgctttgggttcgtcttggcttttccgcagttgctttttatgcttcatccgccggttctggaaccacgttttcacctgatttcggggagataaaaataaaatca

SEQ ID NO: 235987 - DNA, 95 bp, Homo sapiens
  chr11:122849414-122849509
  hyper
cctgtccagagccccgctcgagaaattttgcttgggtaagtatgacatggggttggggtgtcggtacttttttttttctttttcttttctttttt

SEQ ID NO: 235988 - DNA, 695 bp, Homo sapiens
  chr11:122849809-122850504
  hyper
ccaggtgtaggtaattttacgaaagctcttgggaaaggcttagaataagcgtcagcggggtctatttctactcgaactccacaaggtcccgaaggtattaagacttgaaggcagagaggaacgaagcagagatcagggcctccctctcctcccgcccacctgcgtctcggacaggctgagggccgtggccagctccactcgttctggcgtggacaggtagcgctggatctcgaacctcttctccaagcccgagagctgcgagtcagagaaaaccgtgcgggctttgcggcggcggcagtgcttccccggcagctccgcgtgctgcgggtgcgggaacagcgctgggactggcatccctgcagagagaagagcaaccaagtgggcagagcgtgggtcgccggagagcaatctccgctccgctcccctcccctcccctagcccccagtgccttcctccgcccctcgcctccgtcagtctgctcgccccaaagcccctcaagcctttctctcaggaatccagggcagaggaagaaaaaaaaaaaaagccgcaagaatagcgcttggagatctttatctggaaagtcatctagaaatacaaacaacaaacagtaaataaaacagaaaagaaaatcggaaaatagatccggaggctgtttaaaaatgtcttcttggagagacttccgtagggtcggccag

SEQ ID NO: 235989 - DNA, 435 bp, Homo sapiens
  chr11:122850772-122851207
  hyper
tttctcgcctctcacgtctcctcgtccgtttcggggtcgcgctagggacccagctacctaatatagtcctcattctttttctcattctttccctctcactccaagcccagcgaagcagaagggtttgaggggtttttccatggccgggtccggggagacttgtctttcctgaccctcgcaggcttgactctgtctgagacgcaccaagcagagagaagctgccacaagcaacatcggccaatcccagagaaaataaacaaacataacaacaaccagtgcgggtacttagggctttggccactgctgtatgggaggaccaccggagcagctgagaatagattgtcaccggcgggtggtgaagccagtgcagagatgcggacctggatttacaaacacttttagctttgttctggattccagcgcgcacaaactgcc

SEQ ID NO: 235990 - DNA, 410 bp, Homo sapiens
  chr11:122852371-122852781
  hyper
agattcatcttgagcggagcacctgccacaggacaagggccgggacgaagtggaggacgcaggcagagtctccaagcctgctcgaaagccggcaaccaccctccgaggctcgaatctccgctgctctctcccgggcctgggctaccccgggcgctggagaggcaagaagacaagctcctgggtaggttgggtctctgtgttggagaattggcagcttggagaggggggccgggagagccaatgacgaggctgccagaggcagaggggagggtgcgggaggctcggggcggggcggggagctgtccgcggtgctgaacaccaccggccgagcctgggaacaacagagcccgcagggttcttgttcctaccaggtttctcgacctcaatttctgccccgtcactgcaggggc

SEQ ID NO: 235991 - DNA, 902 bp, Homo sapiens
  chr11:122854782-122855684
  hyper
ctcagagtgtttgcgggatcgggaagggagtggggggcaatgtagaccgcctcctccgtccttatctttcccttgtttcgtgagccctggactcagcgtcctgctttcccccaaagctaaggcaatctccccaggccctgctctcaggcggagaagccaggagcgatgaggggcggggcggctcccggcgccctcttttccagccccgctcccgcgctgccgccggagagggactcggggcgcagccgccccgcctctgccggggccccaggaggaatctaagaaaagagagatggagggaggaaatggcatcgcttcaggaaggggcaggacctccaggaccgaaggcgttttctttctctttcctttcagcgacactgggaaacaaagctccgcggctgaaaagaacaccacgcgcggccaggacccgagcagggccctggggcgctaagggcggggaaaatagggcatccggagtgcaggagattcctcagggccgcccccttctccgggggtgccctgaggaaccgcggcggggactcgccgctggcagcctgcgggtcctggtgccagcgcgcatgggcgggctgtgcggacgtggctggtcctccaaaggtttcagatcccgtccgggccgctcagtcccttaaagctgtgtcccaaagcctaggggagacagcgaggctggggacgccgggaagtttctctgaggtgtggggctcctgagcagaaacgcgcgggggattgccagggctgcagaaactttggctcgaggcggtggctggcccgccttacttccgtggtggggttagggaggcccctctgaaattcaatcttggtattgaatctggtatcttcctgtggcaggcaacgcataccaaaggcggcggcatcaccttcct

SEQ ID NO: 235992 - DNA, 187 bp, Homo sapiens
  chr11:122932840-122933027
  hyper
tgagaccggtttccgcccgccaccctgcctcttataccctatcttagaaccttccagaaggggcccgcccctgctgcctgccattacggcttccccggccaatagacgcccggctgcccttacaagacccaatcacaagcccggctccactcctcgggcctcgcccccttccgcacccaccccaccg

SEQ ID NO: 235993 - DNA, 1184 bp, Homo sapiens
  chr11:123065523-123066707
  hyper
gctgcagggacacccggtcagaaccggcgtctttcccggacgcagggctgcgtttgcccacggccatccaaactcccgccctcccagaggcactcacctagcaagaggagaaggaggagggacatcccgatccccggacgcgggcgcttccccgctcagctgctgcttggctccggggcggccgggcgcctccgacggacctcgggcgagctgggcgcggcgcctcggggtgcgcgcgaggtggctgcagccatgtgccgggcgggagccggccccgcgccccgtgcccctgggggcagatgggctcccggcgctcgccccaccagctggcgcccggacgggagccgggaccagggtcagggaggaaaacgcgaggcgaaaaggcgctaccgcttcgtggaacacttttccctgtttggaaagaaaaaggagtgaagaaagagagagggaaaaaaaaaattcagctggaaccacatggttgcctcctaccgcagcccctccctctctctctcgctgttccctccttccctccctccctcccgcgcggcgtttggggtttgcggtgggggccggtcggggagaagcgtgagctggccgggcagggagggccgggggagacctggggccgtgcagaggcgggtgggttgagaggcgccgggcgtaggattgattctttgcaggaggcattggtgacacctcggctgagagcccatggacgaggccttgtccgttcctagagctctgctctcacttggtccttctctccacttctctctcgcttcttttttactctcgtttctctctgcttccacgtctctcacaaatctggcgtttctctcttccatctcttcctctctaggtctccttgttcgcattcttgcctctccctcctcgtctcctcatgccctctcccctctgtcctctgcgctcttctcgcctctcctctccctccccgtctggttctgttagtgtaaagccaccagactgaccaggccgacggcggggcgcggaagtgggtgcgaaggcagccagcggccggccgaccagggctctccccaccgactgcctgctttggcacccggctaccccccttggcctggctttcctggggcctttcgcgttcgctcgctttctactgtcggtatttgcagcagcgctccctcaggtcccgagcagagctaagc

SEQ ID NO: 235994 - DNA, 651 bp, Homo sapiens
  chr11:123172413-123173064
  hyper
gcccaagaacctgcatctaacgacttcccggtgtgctgtggcgcagcgggcagggacggaggcgcccaggggcaggcggcagcacgggaagaggccagcaggtggcgcggtcgcccaacccggccgccccccgggcgccgagggaagcgggtcaggggcgtccccacctgcccaagcgccggctctcccaggcagcaggggcggcggcggcctggctggctgcgctgcagagcggagagcaggagcggcgtgggaggaattcggagcactttcgccgcctgcctccttttactgctggttgccctcaaaggagccctctccctccacacgcctttgggccttaccagccgccggaagcggcggcatccatcccagcaaagcgtgcattccatcctctggaaaaaaagtctttgagcttcctttacagtgaccttactttggggactgaaccgttgcgactaagaaaacccctcctcaagtttaatggaacgatcacatgacacgtggttgacgaagccattccctccttgctacttgccttgtgtgatacactgtcacggcccgggcttctggcttggtggaggggacaccaccgcggctccggctgcggacttcgggctcctcccctgagccaggcggagagcgctgccc

SEQ ID NO: 235995 - DNA, 39 bp, Homo sapiens
  chr11:123228867-123228906
  hyper
ttacactgcagtgctaaatgttggagcgaggcaataccg

SEQ ID NO: 235996 - DNA, 917 bp, Homo sapiens
  chr11:123524695-123525612
  hyper
ctttgggccctaagcgaccccactggacctccccagttcgagggagccgatcagccgctccgcgcccgctctcgccggcgctcagcaccacggacagtcgcctccccgcccaccccggaactccagcttccactcgcgcccctgcctcgctcgtttgcgcccagggtaagctcagctcggaagggagtcgcactgctggcctagcagccaggctgtggaagggtccaggttgattcacctctcgcctccccaggatcggttgcgttccgactggaatcctcccagccccgcggctcctgcttcgtccgccctaactgcttctccagctgggcgtgaccccactcccgaagccgccggggccgcccgtctgggctacagaatgcgttccacgtcggtcccgtccacgcccgccctcggctccctggggaggtgcagcggggccgggaaggaagcggcagctcccgttcggccggcgatgtcagaggttggggggtgggtgtagaggcggagccccttcccgggagctcgcccccggatggtgcggggccccgaccctgggtggcaggtgatcagcaacccttctctaggcccccaggccgtgtgtgctgtcagccctgacatgcgcaggcggctctccgccaccaccaccgccccggaccctccccctagtgcacactccccaccccctgatgggcgtgcccctcccaggcccagcgccgcgccgagcgggggcggagccgggagcggcgcagacacttccagccgggatatctttgctcgcgcgctcgctggtctctccaggtctccctctcgcgcctccgcacctcccccgagctcgggcgcaccgccgccctcggctcacgccctccaggcaaacccactccgctcccgcacggacttgccgggtgtagctccgg

SEQ ID NO: 235997 - DNA, 160 bp, Homo sapiens
  chr11:124492594-124492754
  hyper
ctaagcacacggccgccggccctccctcctctcctcatccagcactagcccccagctgtctctttcctcccggtgcccacgatcgcaccgcccagaccaccctactctccctgccccggaagttacacactgccgacaccgggacgtaacttccgggaag

SEQ ID NO: 235998 - DNA, 405 bp, Homo sapiens
  chr11:124587805-124588210
  hyper
tgccattgcctgcatctcttcgagagggaaatcgaatcaaaagtgagcgtctgccagtctcagtcctgtgatggctgaggagcctgggcgaagagcatagtaaatatttggcaaagttagcagccttcggagcgggaatagagaagggagtgagtgattcagagagcaacgtgcaggcccctgcagccggagcaggacttttgctcctattcctgagcgaaagggaacaggctgctatccccctgaccggaggggccttccagcacctcccaggggagcggctgcgcttgaggcgacgggaacagaggatggggacggcgggggctggagtggccgcagcagcgagtccgccgtccgactgcggggagggagggtggcagcgacgccctttgtgtggggagctgc

SEQ ID NO: 235999 - DNA, 219 bp, Homo sapiens; identical to SEQ ID NO: 202772
  chr11:124616911-124617130
  hyper

SEQ ID NO: 236000 - DNA, 459 bp, Homo sapiens
  chr11:124630113-124630572
  hyper
ctcctgggtgtctgctggctcggaagtcaccaactggtccgtttttttcggtcccagggtccacggagccactgggagagaaaaggagtctggttgggtctgatcgaaggacactgggacagcccaagaaagggacccttccggcccacagccctctccgaggccagagtgagggagccggcaggggccgaaggagagcgaaatgggcccgctccccggggctatttttagtctccctctttctctgagaaactccccccgcgggcttctcacgccccaggggcagcagcactgagccgccgaggagcctactgagccggagagcctcctccagagcccagaagagcggagccgggcgcctgcacgttgcaccggggtcaccagtgccatttaaccctcgagtggctggcgggaactgggcaaccccccagggggaccgattggaacttttgagtccag

SEQ ID NO: 236001 - DNA, 492 bp, Homo sapiens
  chr11:124631503-124631995
  hyper
ctggggaattgacacgaagtgcgtgtgtcaagcctggggaccaggggtatttccccgggggatcttcctcatcagcttgtatgtggggtcggggatgagagggggctagagttaagtccttaagctctttagccagtgtctcatctagcggctcagctcatccggctctgctgggtggggggtggggagtggacagggtgaggaatggttccgataactcaccccagaggtatccaggtcttccgagagatgcccttacctccccccgccatccgcccccacacccaaactgggggctgtccccgacaaagcgagaagtcagcgccagccagtgatgccctggagtgggattaggaggtcaggggaggagggcgagtcgtgggacccagttccgcagcagtggccaaagttctccctcagggtcgaactcaccccatcccgcatcccaagtcccctccaggtccgggtttcactcaccgagggcactcagcc

SEQ ID NO: 236002 - DNA, 345 bp, Homo sapiens
  chr11:124713064-124713409
  hyper
cccgctgggaggataattaaagcgccaaacggcggagcgggcgggcagcgttcccgggggcgcatttcatcggggctgattaatgaggccggggagttaatgaggagaaagctaaacgcagggagctgagccgcggaaggcctctccgaggccctggagggggtcctccgaaggcatctcccgccctctctttctagtagcggcttagcgcaagccacatggtgccccaggctcctctcgccgcctcaagccaggggcgggggggaggaggggtcgccccaagtcataccggccgcactgaagtcggtctcctccgcttgtggctaacccggctaaacagcaaaa

SEQ ID NO: 236003 - DNA, 589 bp, Homo sapiens
  chr11:124735074-124735663
  hyper
cgtccagaacggaacgctgggcttggggtgcggggcggggactccaactcgcgcgctacgctactcgtgtctcctgctcggatagtgactgtagaggtaagggtgggagggtggagggaggcggattaatcccttaattacgccgtgatcggcgtggcacctgctttccgcctgcccagctcccaggggactccggcactagggggtggagagaaggacgagggaaggaggagggcacgaagaggcaccgaccgtacccaggcgcaccggcaggagagcggcaccgtggctgccgcagcgcgcagaggctgtggaggggcttacggctcccagcccacgggtctcagacccaggggctgggcccccagcccccagtcccgatcccagctgggtcgagccatgctgcgctacctgctgaaaacgctgctgcagatgaacttgttcgcggactctctggccggggacatctccaactccagcgagctgctcttgggcttcaactcctcgctggcggcgctcaaccacaccctgctgcctcccggcgatccctctctcaacggtgagaccctgcctcttggggatatgggat

SEQ ID NO: 236004 - DNA, 111 bp, Homo sapiens
  chr11:124735843-124735954
  hyper
atggctactgagtctttttacacctccttcccttcccctacaacgcccaccccaggtgagaagaaccgttgctggtaacgggcagggaagtccgagctaagaaaggcccgg

SEQ ID NO: 236005 - DNA, 669 bp, Homo sapiens
  chr11:124738426-124739095
  hyper
gtggtccagaaagccggcctagaagtttgtgtcccgatccctctactaaccggcctgtctgtaggcatcttcctttgagacgaggaacgcggaacgtctgccaataaggacatattggatcctgcagagggagagggtaggcaggtggggactgagctccgcagagaagcataggagatggaacgaccagaggattctctttccctctggagcctcaatctctccccacaatttccctgtctgaacgctctgcgccaccccctgtccccagggtcaagggtaggaccggaggacgctatgccccgcatcgtggagcagccgccagatctgctggtctcccgaggcgagcccgccacgttgccctgccgcgctgaaggccgaccccgacccaacattgagtggtacaagaacggggcgcgtgtggccactgtgcgggaggatccgcgtgcgcaccgcctgctgctgcccagcggcgccctcttcttcccgcgcatcgtgcacgggcgccgcgcgcggccggacgaaggtgtctacacttgcgtggctcgcaactacctgggggcagcagcgagcagaaacgcctcgctggaagtggcaggtgagagtcagttgaccgtcagctggttgcttccagagcctggggtaggcgggagggcactgggcaatcag

SEQ ID NO: 236006 - DNA, 42 bp, Homo sapiens
  chr11:124746304-124746346
  hyper
gccgccctctactggcgccggaaacagcgcaaagagctcagc

SEQ ID NO: 236007 - DNA, 365 bp, Homo sapiens
  chr11:124790848-124791213
  hyper
cactgccgcctccgcgcacccgcctccgtctgcgcatgctcatacacgttcacacccgagacaccagcgcccccccgggacctcccctcgtccccagcgcgccgcgcccgggcttcccagccccagctttcccccgggccactggccgcagaccgcgggcgcctctcaggggatcccgaggcggctcaggcgctgatctccaccgggccggcctcgtcttgctcgcggattatgtgcacgcccgcagtccgcagtgtgcgcgaggcgctgcgcgagcggccgggcgagctcggggccctgggcggcgacgagtgtgtccggccggtggctggggagcgcgctggggagcgcgggtagcggcgggc

SEQ ID NO: 236008 - DNA, 791 bp, Homo sapiens
  chr11:124932779-124933570
  hyper
cgagattagtcatgcagggccgctgagtgtgacttccagccctccagcgtctcgtgtcccgcccgtgtcggagcccatggctttttaggacaggaagcgctgcggggtagtgcgggcaggcaggcacgtcacaccggacagcgtcgagattgctgctttcggttccccagcgggtggtgaggcagaaagtgcagggcggaatgaggagccccagcacctcagagctgtcgggcagtggcggggaagcaaagcacaggagcgctgtggtgccagcggccgggctagggacgactggcgggtttgcgctggacccgaccccgagggcgggcgcaagggggcgggcgctgccgtactcaggccgcggggccagggcgggccggccggcggggcatttaaaccccgctgacagccagtccagcccgggacacgcgcccagctctgtagcctcctccgtcgactcagccttaggtaccggtcaggcaaaatgcggtcctccctggctccgggagtctggttcttccgggccttctccagggacagctggtgagcggggcaggggagggaggcgtgccgggacctcctgggctcggggcttgcaggggccgcggggggcctcggagatcaccccagatcggccccggcgtcgccgcgtggccaggggtgctggggggacttggtcccgagctcctccagcggcgcccgcctcggaggttgataaccctccctgcccaactccgcccgcgctcccccagaccccgcgacgctggctcggtgacactggggaagaacag

SEQ ID NO: 236009 - DNA, 41 bp, Homo sapiens
  chr11:125034413-125034454
  hyper
caggagcaggcccgcgcccgccgcccgagagcctccggtag

SEQ ID NO: 236010 - DNA, 1938 bp, Homo sapiens
  chr11:125034712-125036650
  hyper
ggcggcggcggcggcgcggcggcggctgctgctgcgggcggctgcctcagagcgcgtgtgttttattccagtccccaagccagagtattattcattgcgacagggcaaggaggagagagggagagagggaggcagcagggaggagagagagggaggcagcagggaggagggaggcagggagcagcgagggacggcgggagcgtgcagagagaagctggggaagcgccgggagagcgcggagcggagcagcgcgaggggcggcgaggccgggcacggaggctgcgagagccccgcgggccgcccgctcccctgcccggccagcgctcagccccgccgccgccgccgccgccgcctcgccgcgcttgggcccgtggccggccgcgcattgtcctcgggtgcaaggagccgggctgcggactcgaatcgccgcgggcccaaccccgtagcgggcgggcggggagctgtgcgccaggagcgccaggggacccgagaataggaacaggcacgccggcccgagcccgggtgcagaaggctcccggccgggcgctccgcggggagaggctgggaaccgcgggcaggctccaggttctctttctcccggcttcgggcgtccttggggccggcgcttactccgcgccaccagcctggagatgctttccagcggctggaggcgggagcggtcccaggctggggccaggtgaccggaggagtcgaggagccgcggccgcggcctggggaggcagggcgaatgagggtttgcagacggatcagtggagacaggggaacaccggcggggcccgggaagccaggatccgaggggctacacgcacggaccctcacccagggaggagcgagaatgtgtagggtcaccggctttccatgattgctggggatctttggtgaggcgggcgtaggggcccgcgcgaggcttgggaatcgggagcccttctggctcgagaactaggggatgagttcgtaaaagagggaactgaaagcgatcgagagcggagagctgagggggatggcgcaggatcccgaatctgccgctcaaagtttgcatttctttcgggttaggagacgggctttcctggctcccgatccccaggaagaaacgagcgaaatgggccgtcctttcccggggctcttcacgggggagccgggggtttccgcgcggtggggagactcgggttgggaattgaggggtaggggcttgtggatcggcctgaattagggctgggttttaggaccagtctagagttcggtttataggatccagactgtttacggaatcgggatcgaggggccgataagtagtttacacgccggccagagcagagggctggaggtcggagttgggggctggaggaacgggtggcgtttttaggattcagtaacaggatcacagctttttcttgtggtggaagctattggaatttggggagggtagcacgaggggtcctgcagctccgcgtgtgaaaaagcgtttaggtaggcgatgaaagtagttgatctgagccatggcaggcgagccccgaatttttgctgcttccccctgaaagtgtttctttaggaggagaggacttgggccacacaggacccggtcctaagagagcgattccgggaagcggacagatcgaagagaccttctgggcgaagcggcagggcagcctcgcggggctgggagtggatctgaggtcccgacccaggcggctcggagtgctccaggagccacctgggtctgcgggcgcagcgcggcggggcgggagcggtggcccgcaggggccgcggcctgcgatgaaggccggggggcagcgctagcagcgaggtgccacagtgggccgaggagtctgggctgtggcccagggtaggaccggctcaaactccagtgccctgattggagccgcttcctgtgcttacccgcgccggactgagaagccc

SEQ ID NO: 236011 - DNA, 400 bp, Homo sapiens
  chr11:125133215-125133615
  hyper
gcagtgggggaagccgcatgaggaggagcggcgtgggagcaaatggaggggatctgctggcgggcctagtttaggcaaacagcagggactgctggcgacggctccagcccccactcccgcggtaacagctgcagtccagctgctggcatccctgctgggggagcgtgctaaacctctccggggtcagcactgtggtatgtcggtttccatagcaaccagccaacgggccactttctcagaacaattcccctactcagccgggttctggacttagctcagcccaagggcatgtggctgaggagcagcgcgggagggggagagctgccgagggccagactgggccccacagaacgtggctatctcagtccggtcttcgcacggagggcgtggagccgaggat

SEQ ID NO: 236012 - DNA, 616 bp, Homo sapiens
  chr11:125365067-125365683
  hyper
cctccccccagtccggtggggtaaagaaagcctcctccaggcagcacaatggctggcactctgaggaagccggactcatcccgtgcaggccgcatacacactccactgcccttccggccaaacaagcccggacacgggagagggatgagagtcggggatgcctagcggcgaggagagaagggataggcaaaagggaagaagagcgggctgtgatacctcctcgacgccgtcaaacactgctccccgcattccagagcccggggcccacccgacggcagcgcgccccgccaccgcgcagccgccccggtcccttctcccgcccgtctgtagtaaaacaatcgctctcccggcgtctgcggccgctgccagcggttctgacactgcaggaatgcgcggtctggggaaggctccgcactctggggaggggcacgagcggggtcgggggtaagtttttagggacaaagatgatcttggggcgtttacggtgactggaccagataacggtcccgggacgaggtaccgacccactgccccagcgcgatcgggcggcgttcccttcttcccccagcccccatacctcgccgccctgccttcacacgcgcgcacacacgcgggc

SEQ ID NO: 236013 - DNA, 556 bp, Homo sapiens
  chr11:125365743-125366299
  hyper
gagggccgatgctgagatgatactggaagtgcccatcatcccacatctccagggcctggcgcggcgtcccagctgcgctccctgaagggctgggcaggaaggcgacggcctcccgttgttcctttctaatcccagaatgggaccaggtgaggggagctgcggcgaccccagaccgtcctgtcagagaatcccggggcctccttaccacccccaccagaccccacccccagcagtgagtcgggtcctaactaaagtcaacccccgcgacggcacctgtgcgggtcctggcggagggaggcggatcccggggctcagccggacacccccatccacgggccgcgggagcggccggagcgcagcgcagcgcagcggagagccagccagccagccagccagcgagcgctccccgcgcagctccggcggcgcccggctccgctcccgcctccaccccaccccttccccgcgctcgtgcccgggctccgggggcgcgcccgcgctcgggcacccacccaactggcacgcgcgggagctggacgtcatcccctcgttaacattc

SEQ ID NO: 236014 - DNA, 61 bp, Homo sapiens
  chr11:125757373-125757434
  hyper
tcccgggcatgctcccgccggcggagaaggcccagacaaaatgtgcgccaatcaggataca

SEQ ID NO: 236015 - DNA, 449 bp, Homo sapiens
  chr11:125773517-125773966
  hyper
aacagagcggggagcgttgcttcagcaccacggagagatcatgactgcagtttcgtgtgggtttttgtatttttgcccccaattccagaaatgctgatcaaaatctcaaaattacaattagaaaactggggggcgggggggaggtggaatttggttctttcgtccaaattgagcggtcattaaatcattagtaccagggatccagggatctataccggattatgcaaacgcatgtaggacgtagaggttataccgaaaggtaatgtttttaacaagagaccacatttcagaataaaagctttaaaaagcctatgtggaacatcacaggtatctagggcaggaacagcagttagagcttgaacagttctgcttcctttccgcaactgtggcattcgaggtcattcgtcatatcaaattcatcagattttgtctccactttgctaaccaat

SEQ ID NO: 236016 - DNA, 179 bp, Homo sapiens
  chr11:125812008-125812187
  hyper
ccgcaccactgcctcgtccaaagacacagggagactcagggagccgccgcttcctctcaggagagccaggtgtgcccagccatcctcaggagccaggggaggcctcaagggggcagtgtagccaacatgccctgatacaggataaacgttagctgagggggatccgtgaaactcagtaa

SEQ ID NO: 236017 - DNA, 207 bp, Homo sapiens
  chr11:126081471-126081678
  hyper
ccgcaaccttggccgtttccccggatccaggggcccgacgcgctccacctgggcgccgccatcttacaaggaagggcggggcgagccaagaccacgtggagaagggcgactacaatgaggcgggagtgggtgggccctgcaggtcacgtggtgcggggtggggcctgggcgagtcacgtggggacggtgcgcgctcagtgcggctgc

SEQ ID NO: 236018 - DNA, 267 bp, Homo sapiens
  chr11:126138755-126139022
  hyper
ccgcttcctgctgcgccaagcgcgggacacgtcacaccagtggccccggaaatcggctcaaccgtacttccgctcagaacgccgggtgccctccccatctccgcccgggggcgcgcaggactgacgtatcgcaaggccagccaatggcgggtgggagcgggcctgggtggggctccaggagaggtcacggggagacggccacctagagcattgggcggggcagagccctgagggccgctggccaattggcgcgctcgtctgaatggc

SEQ ID NO: 236019 - DNA, 53 bp, Homo sapiens
  chr11:126152945-126152998
  hyper
gtgcggcgggcggcgcttccggagagcggggcctgcgcgctgctcttccccgc

SEQ ID NO: 236020 - DNA, 506 bp, Homo sapiens
  chr11:126225361-126225867
  hyper
tctggcacccacggcgcccctgcttgcctctgtccgggtctcggaggcgcgaacaccatcccaagcctgcgaccgcgcggcatcacccccgcccttccccctcctccaccccgccctttctacccctcccgggagctcctgggagtcgggccgccgtgtgcgcaagcgtgtccagccccttccccgcccccaacccgggcccgggtccccgcctcccctgcaggcggactcgcccgctcccaggccggacccgcgcccgggacagggacccggccgagtcgagccgtcgcgccagcgctgcgccgccggtcggtgcgcctagcggatcggagctgcgcgcggaaccgtgctgccccgccccgctccacccgtgagggtgagtacgcggcggcggtgcgcgggggcccgcggggcggggcggggcggggagccgcggggtcctcggccgcctgaccccagccggcgccgcgcctcccggagggggtcgggccctgcacgtgggcgca

SEQ ID NO: 236021 - DNA, 625 bp, Homo sapiens
  chr11:126870169-126870794
  hyper
cagtaccattttgttgcattcgcaaaggcgaagaggcaatgccagagcatctcagcccggcaccgagagacgcatccatcagtccgagttcccgaagcctgcccacgttcctgcccacagcctcccgcgccctgacaacccagccgactttcttccaactccagcagcgcaggggtcctaccttgactgaagaggaagaagcagacgaagagcagatcgagctggaagggtttcattccttagcgcagcgaaggaaagccggcggggtaacttggctgtggttagtttctcttccttggcggctctcggtgctcagcctccgccggtcctctcgggttcgcgcctaccatctgtccgtccgtgggtccctccgggtggcttcggtctctttgtgcctctgggtatctgcagccagccgacacaaactgcctgttcttagccgcctcgggaagccgggattgtcagcaatgtccccactcggagaagatccattctctggctcttggcatcccaggcacacggcttcctcaggcgggctcctcccacagtgagcgagcgagctagtgacgagtgacagaaggactcctttcactgaagctgaggcgaggggagagggaggggagac

SEQ ID NO: 236022 - DNA, 767 bp, Homo sapiens
  chr11:126873031-126873798
  hyper
ggattaagtgatgagctgcccgcctctaaaaggaccaggaggcgtatcaagcctgagtgccggaaaacccacggcaatcttcagcagccaccacgtggggcagagaacgcgagcagtacctgcaggacccacagccggtcgggctctggcgccagcctcgacggcggccccgccatctccgcccggctgcccgcggcctcacctcctccgggggctcggttagcctcctggcgctgcaaggctgcctgcgcgcggttcgctccgggggagggaggaggagggaggcggcgaggagccgacggctccacctgatggagaagcgcggagagtccctagacctcggagtgcgctgcaagaggggagaggagagagaccgccgcccctgctggaagccttcgcgtccgggggcggcgcgcgggggaaggggtctctggacagtcggtggaggcggcagccctacagagacagccgaaagccagcaacttggaaaaccgcccgaattctgggtttctgcacatccaggctggctccaggtctcttgtgcccaccgtgcaagccggcgggatgccagcaggtggcatcctctccagcgtttcttcgccaggcgtggagtccggaggccgaatccatcagtccccagccccctccccaagcctccggtgccaagtgctgggtcctgtgagcccctggcccgccccccacctccgccagcggggcgagccggagctgggtgacccagaccctcgcggaggcgggagcctacagag

SEQ ID NO: 236023 - DNA, 126 bp, Homo sapiens
  chr11:128418568-128418694
  hyper
ggcgaggttcgggccgaggcagcccacgcccgtcctctcctccctcctctcctgggagtggaaagctcgtcccgggacgccccagctccgggccggcttcgcctgcgcccgcgttgctggcagcgc

SEQ ID NO: 236024 - DNA, 152 bp, Homo sapiens
  chr11:128419145-128419297
  hyper
tctcacgcgcccctcgcccctcgcccctcgcccctcgcccctctcctgggctccggctcccacctcatcggcccacccgaagatgtccattcacccagtgccgcggccggagccgagcggggcctgacgccagccggcggcgtccaccgtcc

SEQ ID NO: 236025 - DNA, 378 bp, Homo sapiens
  chr11:128562615-128562993
  hyper
ttttttttccctctttcccccgtcggactcttaaataaaagtgagcaagtccaaagcgtggtccggagagcgtggacaaggtaacctgttttggatgtccgggagaagggagtccggccgaaagggcccagcccctcgaggctgctccaactggggcgcgcggcggcccaggagggaggcggggaggtctccgggttgggccggggaacgccggcctccaggctgggtagggaggacggtccagagcgcgggcctccgggtctcaccccgggaaaagtctgggtctgctctgcgctgttgcgtgctgcgctcctgggacctgctgactgtcctagagggaacgtcccgcggtagtgtcagttccctggggaccaggaa

SEQ ID NO: 236026 - DNA, 122 bp, Homo sapiens
  chr11:128563713-128563835
  hyper
cgcgtatatttatatagtgtgtgatgcgaaaagcaggaccagcaggggaggaagagggggtgtggggggggagggaagacgagggagagcagaggggagagaagagagaggagagctcgagg

SEQ ID NO: 236027 - DNA, 357 bp, Homo sapiens
  chr11:128565177-128565534
  hyper
ggccaggagcagagaggagggacaccccctaacgtgacgggccttagaggacctaggggaatgaatgggaccaggggttagcttcgaggctgccgcgcaacaccaagcgggagtctgtctggaaaaactattaggctggcgaggtggggactggcagagcccgccattccccagaacccgaaagaatcgactccctgctcagggctcagcaagagaaggctaagatgttgggctcagagaattcaagagatttttatcttctgggtggggtcgtggtttttattttctaagttttttttatgaaagtttgaaatatgctgacttaggtaaaagacaccaaccgaaggaacttgcaaa

SEQ ID NO: 236028 - DNA, 776 bp, Homo sapiens
  chr11:128760450-128761226
  hyper
gcgcggaggacgccggctctgcccacgcctgggcaaggttgagctccgttccctccgggctgctcccgcctcctgtccgtgcagggcgcgtttccagccatcgccgcccagccgccgccgcacgccggggagagatcgtccggggtgagcagcgagcccggggacagctagcctgggtcctgtccctggacctactccccctgcagctggcggatcaggcccccggaccctcactccacggcgggaatcagagccgtcgggcgggggatgcagcgcccagactgtggctcccccgccttcccaaaggaatccccccatctgctccatccctctcgggaaacggcgaaatgctgccaaccgtccgcttagcgcaccgcggagcgactgagcagccccgccgaggctccgagccaagatttctgccctaatagtttctcccttctttctgtctgctccaccgcacccactaaatacgcggcgctcacacacggacacgcgtgacacgcggcgctcacacacaggcatgggacgctcacacgcgcgcgcgcgggtctccgtccctggcaccccgcagcaggggtgcagccgggggcagggggagccgggggagggcgcagggggccgcggggacgcgagcggagggctggatgcctgccgggctctctctccgccttcctcttccctcccagtcctgccgagctgacggcgtcccggatcacatggagcccccgccccaccccagcccgccccccgccgccaacgccggtggcccttcc

SEQ ID NO: 236029 - DNA, 176 bp, Homo sapiens
  chr11:129148499-129148675
  hyper
tcgtccaacatgcagcggcaacttcagtcaatcggaaagacgaggggggaactccacgggagcctaagggagcagagacctctggccccgcggggcccacgcacacctgggggcgggacccgcgatgtcgcccgcgggcagcggagggaaacgctcccgcggctcctccgggagcg

SEQ ID NO: 236030 - DNA, 116 bp, Homo sapiens
  chr11:129149815-129149931
  hyper
cgcagcagcagcagtagcaccgggaagaggcatcctccgagactacggcagtggctcctctctactcccagctgacccccagaacactgtcaccgcgccgcggaggagagggggct

SEQ ID NO: 236031 - DNA, 161 bp, Homo sapiens; identical to SEQ ID NO: 202788
  chr11:129234231-129234392
  hyper

SEQ ID NO: 236032 - DNA, 1115 bp, Homo sapiens
  chr11:129242541-129243656
  hyper
gagaggagtgagagcgctgggcgacgcggccagccaaggcgaggccggtccctcccgggcttgggctctgtccctgcgcgtgagccgcctgcagccttccgaggggcagcaccgcgaccaggaacacgcgaacgcgagtccagacccgggtttggaaaaagggaagaaggagaggaggagaagggaagttaaaaagagagagagaaaacaaggatgaacgatggggagaagggagggcagaagagagaaaacagaagcgggaaattcgacagaggaggagaggcccaaagggcggggagcaatgcggggaagggagaagtgggagggaagaagaggagaggagtcagtggcggtggaaggaaggggaagaaccagagagaagaaaagaggttaaggaaaagaagagcaatgcaaagtcggggccccgaatagtgccgcattctgtgggcacacgccgggcagatagaaagtatagacgcgacgcgctcggcccctcgtcgggcgtcgggtcctggtgctgtcgctcaggtgctggtccccagctccaagcccgcctcgtagtcggcgctgcgggtgagatcgcccgcaagcactcagtttactggcggctgcctaccagcggctcactttcctcggggcgcctaaagctccccgcccggcattgccccgggagcgaacgctgagcccctgggacccagccccgactcggcgcagcggtttccctctcggcttgcgcccgggagaaccccctccgtcgtggcgtcggacggcgatgccagggctgagcggtgagctgtcccgggtcccgcgctttgaccgcggaccagcctcagggtcccgccgcggaagcagggggcgcgcctggggccagcctgtagaccccagagtccggcggcaggacccccggcgccacccggacacctggcagcagttctcgcctgccctgcagccgcctctgcatggagaaagagaatgaaagaaaacaattctagatggagaggaggggaggggaggccagtttgcaaatacttcgggaatgaagttcctcaaagacgcgttgcgggccttgtctaatgctaggctgtgacttggcctcttaacatctattttctcac

SEQ ID NO: 236033 - DNA, 780 bp, Homo sapiens
  chr11:129243896-129244676
  hyper
acagagtgaggctcggtctcaaaaaaaaaagaaaaaatctattttctctaacagcctaatgattagtcctctgggcgtgtccctccctcctagtttaatcaccggcccaggcgccctcatttacttgcttccgcggccaccagggccccctgggcaagcagctccgcagagagcccgccggcactcgcggacgcttctaggctgggagcggggaggaaatgtcaccggccccaaactcggccctagggaaggccatccgcgtctatacttctcagtgtccctgtcgtgcgttttccttccaaccccatgcacactcattccaacataaagtcgtggaaacgggcgtgcactgggctgttcccgccgaacaccgggcgcgactcaggctgccggaggcttcccgggcgcggaggctcggcggggtcccctttacgcagcaattccaatgaacaactaaagtccgtacagattttgattggaacagaccctaagactaagagcctggaaagaaaaaggcaaatcacccaataaacgcctgtcttcgcgactctctaacccggtcgtatcgcgagggatccggatattgaaagcccctttgccggaagactcgggcgctgggagaagcccgcatgggacaggctgccccagtgcccgccggctccctagaatcgtgcagctctgaccctttccaacgaggaaaaaatgtttttataaacaatgttttaaaaaaaaccgcacacttttttaaaaagtcagaatctcgctcttgtcgcccaggct

SEQ ID NO: 236034 - DNA, 1360 bp, Homo sapiens
  chr11:129245103-129246463
  hyper
tcttacgctcggagcgcgcaggctcagcgcgggctgcgagactgcgagtggagggcttgggaagccgcggtcttcgggaaaccgtccacgcggggaaggagaaaggcacggtgggtcctcgggggcactggctctgtggcccgaagtcccgggagcctagtgaggactagacttctttctagtaagagacctgaacgtgccctcccgctgggctgcggacactgggagccgggccggcgggtggcaggacaggcagtaaggtgctcatggggaacactgccccggggagctaccggcctgggccttggccgcgggctggggcggtgcgcgctccccgcaccgcgcgcacactcctgcacacacacctggagcgcgtcccgggggggagggggaggagagccaaaacgagcgtcttaaaatagagagccaggcagaggagcgcgagacaccagagcgggaggcagcgactgagagccgccgggcactaggcgcgcaggtcggcgccggagtggcacgggcgggcgggggcggggtgggcgcggacgcccctcagcacacactccgcacccggccctgcaggaagctcgcgctgattgacagctgcgttgtcccaaaaaggctcagcgaagatgctgatctgcgggtgggtctagacgcgcggcaggcgcgcccgctacccgctctcctccgcgcgccacccgagccccgccgcctccccagctgccgggagcggggcccaggccccgccgtcgcgccagccccgcggccccagcgggccgggcactcgcagccgcgctcgggccggcggacgctcgcgccggctcaccatgcactgccacgccgagctgaggctgagctcgcccggccagctcaaagcagccaggcggcgctacaagactttcatgatcgacgagatcctctccaaggagacctgcgattactttgagaaactttccctctactccgtgtgcccgtcgctggtcgtgcgacccaagcccctgcattcctgtacgggtaagacgctccgctaggggataagtggggttcggtagctttcacgtccgtgtaggtggcctgtgctttgcgatccgagggcgagaggaagggttaagttaagggattcttttcctgcgcctcagcaagcggtgggcattgcaaaggcatctgcgacgtggccgggaaggaccacgcaaggtgtggatggcacgagtggaaataaaggcggcagggccttaggagtgggctgctcgcgcaacgcctgattgtcctgctcggaggagaacgcttcctcgtttcctgctgaaagttcaaacacttgagcaggttcagcgtctaaatcgttgtttcaggaagtggtggt

SEQ ID NO: 236035 - DNA, 544 bp, Homo sapiens
  chr11:129685680-129686224
  hyper
ggagcggggcggggcgcagcggggcggggcgggcctggagctgcacctgcttctgggcggacgcacttggcgcgcggcgcgggctgcagacggctgcgaggcgctgggcacaggtcagacgtccgtacccgcagggggctcgaacctggaggagggctcgaagggagagggggccccgccaaggagcggggctgtgatggagaggaggttccgactcgcaggggacctgcgggggaggggacgcggacagggaggggctctgggacaggggtgaaggctgcgctaggggaggacgggaggggatggagggccctggtgtcgcggaagcccagctggggccccctccgggctgcggaaccggtgcgcacactactcccaccgcccccgagtgcctctgtccggctggccgcggccctggaacgaatattgctcagtcccccgcgagtcaggtctgccgcgttgcccggtgaggggaaggtgtgaagccccgggcctccgtctgcccggtgagtccggggacgcgcgcccccggggatgccatctg

SEQ ID NO: 236036 - DNA, 69 bp, Homo sapiens
  chr11:129765707-129765776
  hyper
tgaccgcgaatcaaagttccatagcccgtgagcgaaggcacgtctattagctgacgtttgcagagagca

SEQ ID NO: 236037 - DNA, 266 bp, Homo sapiens
  chr11:129793271-129793537
  hyper
gtggaagctgcgcacgtgttttttcacctggtgataagaaccacaggaaaattcaggggacgcaggcaccaaatgaaatgaccaaaggcagcttgtcaacgctagagggagccaaacgcattaccatgggttttcatcaaccccgccgaggaatccaatcagatgtgataattggcctcaataacacatactgtccctgtcacaaagaaataaaacaagtagccagaaagccttagaaatccgaacctccccgatgacttgaaacg

SEQ ID NO: 236038 - DNA, 41 bp, Homo sapiens
  chr11:129872812-129872853
  hyper
gtaagccccatgccgtgcctagagacgagaaacgctggggc

SEQ ID NO: 236039 - DNA, 171 bp, Homo sapiens; identical to SEQ ID NO: 202790
  chr11:130029947-130030118
  hyper

SEQ ID NO: 236040 - DNA, 263 bp, Homo sapiens
  chr11:130183474-130183737
  hyper
cttccggtatcagccgatctccaaataaagcattaagaaaataagtggaagttatggagaatttcttcctgacttcaagagattatctacttacacgctgaaaaagaaattaagtttttgtcttcatttttgtaagttccaaaaaaaagcacacaattacggggttttattgtaaattctgcttggattcatagaactcacatggacgcaatttccttttaatcagttctaacgtacctgtcatttctcgaggtaaccccttt

SEQ ID NO: 236041 - DNA, 1223 bp, Homo sapiens
  chr11:130297485-130298708
  hyper
agccatggacgcatcggccaccagcagcgtctccacgaagcgcgcctcagacacaaaccgcttggtcctactcgtggcccccaggggcggtggcggctcgctagcgccttctgcctcctcttcttggctctcctcctcgctgtcctcctggtggtctcctctctcctgcctctgaccctctcccgtctccacctcccactcgggtcctcgcgggagggggcgggctccggcgggaccccagcgctgcaggcggtgcggctgagccagggagccccccgcgccctgcggctggatggtgaactcctcgccgtccagcaggaaggagccgctcagcccgcggcacaggctgaccgccgccagcgactcgggctccccattcacggtgccggagaagaagcagccgcgcagcccccgctcgcccccggtcgcccggccggagcccccgaggcgctcgatcttgaactcgggcgctaggaagctgtcgtcgggcgccaggcgcagcacgaagcccttgccgaaggcggacaggtggagcgcgagctcgcccgcgctgccgggcaaccgcgtgggcaccaccagctccgaggcctgccccccggctgcgggccgggccggggcgccgcgggccagcggcagcagcagcagcagcagcagcaggagcggaggccaccggggggcggcgggggcggggagcatgggggctgcggcggtggctgcgcgcaggagagggaagaagcccgccaggcgcgggcaggtgctggcggcccgagcgcggcccggccgctctctccaggaaaagcggaatcaatcgggtgcaaggccgactcggcccgcggggcccggcggcgggagcgctcccccggcggcccctctggctggcgcagcccgctcctcccgcgccgccgcccccgagccgagcgcgagcagctggccccggcccgcgtgcgcccgtcctccgcccctgcccgcgccagccccgcgcagccgcctcctgcctcctccccaccccgggaagcaccgagtgggctgccgagcccttcttatttatacttccttcccggcttgacataagaggtttatttttgatctctcactattcccgtttcccctcccctgggatcagagagagaaactgaaaagagggagagagagtggagaaaaaaaaattgggatgaaatgcaaaaccaatcaggcagcgagacccgtccgccacccgcccccct

SEQ ID NO: 236042 - DNA, 1282 bp, Homo sapiens
  chr11:130318227-130319509
  hyper
gagtgaacgctgtccgcgggggcagaagcgagtgaggcgtcgggacagtggggcataaccaagagcaaaacgcaaactgagacttcagcgccggtttctcgggccagcccacgcctcctgcctcagctcaatgccactccctccccgccaagtggctctccgctctggaggcgggaccgagttctccggtggcccctggaggctccggcagcgagctctgggaggctgggaggggagtgaggggaggggcgctgactgggccgtccaaagaggagggggcctttaataggctcgcccagcgcctggcttgctgcgctgcgagtggctgcggttgcgagaagccgcccggcaccttccgctagttctcggctgcaaatcttcgtccttgcacttgacagcgattgtacttaagctcccagggcgcgctttgcttggaaaggcacaggtaggaagcgcgggctgccgggtgcacgctcgccgccctgggaggagtctccctcccttggctctcctttctgggaactgccggctgtcccgtagcgttggcggttccagagtgcgggctgcacggagaccgcggcagcggccggagagcccggcccagccccttcccacagcgcggcggtgcgctgcccggcgccatgcttctgctgggcatcctaaccctggctttcgccgggcgaaccgctggaggctctgagccagagcgggaggtagtcgttcccatccgactggacccggacattaacggccgccgctactactggcggggtcccgaggactccggggatcagggactcatttttcagatcacagcatttcaggaggacttttacctacacctgacgccggatgctcagttcttggctcccgccttctccactgagcatctgggcgtccccctccaggggctcaccgggggctcttcagacctgcgacgctgcttctattctggggacgtgaacgccgagccggactcgttcgctgctgtgagcctgtgcggggggctccgcggagcctttggctaccgaggcgccgagtatgtcattagcccgctgcccaatgctagcgcgccggcggcgcagcgcaacagccagggcgcacaccttctccagcgccggggtgttccgggcgggccttccggagaccccacctctcgctgcggggtggcctcgggctggaaccccgccatcctacgggccctggacccttacaagccgcggcgggcgggcttcggggagagtcgtagccggcgcaggtctgggcgcgccaagcgtttcgt

SEQ ID NO: 236043 - DNA, 68 bp, Homo sapiens
  chr11:130319689-130319757
  hyper
tcgtgactccgggcccaaggtcaccggcaatgcggccctgacgctgcgcaacttctgtgcctggcaga

SEQ ID NO: 236044 - DNA, 563 bp, Homo sapiens
  chr11:130786091-130786654
  hyper
ggccttcacactgccccaggcggaaggcctcttcggggcctcggggcgggcgctgcaaggccctggggcccacggacacttacacacgcagcgggcagcggccggcgaagactgggtcacacgccgccgggaaccgcgcgcccacactcagccccgacctgaagtggactcatcgcggtcctctccgggagcctcggccctctgccgccgtaaacctgggcgactgcgctccgcagccgggcctgtgtgaaggctgaccgccggccggccgccggcgacagcttccgggtcgacgtcgacgggagcgaggcatgctgggagagcgtccgcgcgcgccccgaggagcggcgctgcccggcgccctctgctggcgaggagccgccctgacggccctgcgcgaggtagtctctgagcctgagcgtgagcctgagcgcgcacggggcgcgtgctcgccaagagctggcgcagatttccgaagtgccacgaaacagccgccgcagcaatcaccgctaagacccagacttccaggcgctttaaaacgcgtcctagttctggttattaaa

SEQ ID NO: 236045 - DNA, 200 bp, Homo sapiens; identical to SEQ ID NO: 202795
  chr11:131056756-131056956
  hyper

SEQ ID NO: 236046 - DNA, 52 bp, Homo sapiens
  chr11:131558065-131558117
  hyper
ggcacccgcgccccccgagccgcgaggctgcctccaccgagctggagaacag

SEQ ID NO: 236047 - DNA, 318 bp, Homo sapiens
  chr11:131564788-131565106
  hyper
tgcccttgggactcgctcagcgccctcgcagccggaatggggcctgggaagggaggagccccagcagaggggcagtcggagagccatgaaattgcgacctgctgccaccagagggcagtgttggacgggctgggaggagcgccgccgccgccgggagggtgcaggagagagctgtctgccaggggaaacgcacgatgcgttgtccaggacattctcacctgaaaatgctctgggccacggacaggctgaggattttagtacccacccccccgccctgaaaagaaaaatctctgtgacgagataggcactgggtttgta

SEQ ID NO: 236048 - DNA, 1349 bp, Homo sapiens
  chr11:131780314-131781663
  hyper
gcacagcctgggcccggcgcggcgggggttaaggtgggcgcccgcgccccgcgccccgcgccctcccgccgggatgagagcgcagtccgcgccgccagcccgcccgctcgctccgaggcggcaccgggagaaagtggcggtcagggatggagctgctgccatgacaaccccggcggtcggggcccgcgcgcgtcggggctgctcccgggaggaaggcggcgcggaggccgggggcggccgctgagcttggcgtccgcgcggctccggtgcgggctgcgccgcgccttccccagcgagctaccgagcttggggccgccgcggtccgctcccgccgcccggcctctccctcctcggccaccgccgcagcccctgccccgccgagccccgccggacagcggcggccgcagcgcgcatttgggctccgaggaagttgaccgaggcggctgccgcaggatcccgggcccggatcgcacgaagcccgcgcggccgtctcctccgcgcgccacccctgcgcctcccgcgagctccacttcccatctgctattgtttccgattgttttccggtggcgagcccggctccgaaacttacaaagtgttggatgtcccccgttcgaactgagggactgcagaccgcctctgggtagctggatgaagcccaccccgtccccttctggtaccaaagtgcttactcctctccaaagtgccgtgtctgaactgccgctgggaagaagcggctcctgagacgcgcccacacctttcacctgccgcgcgcttccccctcctcggccaccttcccggcggaagcagcgaggagggagccccctttggccgtcctccgtggaaccggttttccgaggctggcaaaagccgaggctggatttgggggaggaatattagactcggaggagtctgcgcgcttttctcctccccgcgcctcccggtcgccgcgggttcaccgctcagtccccgcgctcgctccgcaccccacccacttcctgtgctcgcccggggggcgtgtgccgtgcggctgccggagttcggggaagttgtggctgtcgagaatgggggtctgtgggtacctgttcctgccctggaagtgcctcgtggtcgtgtctctcaggctgctgttccttgtacccacaggagtgcccgtgcgcagcggagatgccaccttccccaaagctatggacaacgtgacggtccggcagggggagagcgccaccctcaggtagggagctgacattgttctgcgaactgatggtttgtatggggtcggggtaaggggcaggggtgcaggtgtgtgcactgaggcgtgcctgggttggcggagaggtcgctggttccctggg

SEQ ID NO: 236049 - DNA, 1098 bp, Homo sapiens
  chr11:132813317-132814415
  hyper
tctgcctctctcttcgagacgctactttaagattcagttgggcacgttctgcagagctctggcatcaaaagtttataacccaaagaagaaggcaagtgtctctgacatacaggagctgtcataaaaagctgcggcttcaaggagaggaggaaatggtttattagatcacacacatggacagatgtacgtgtcccccagccccaggtctcgcatctggaaccccaaggcggcaaaaagttccaaggcggggacgcgcagccggcgcagccagggtcgtccggtcggtggccgtcctctgcagcccggtcggcgactcgcggccagccgggggagcgccgcccggcgcaggctccgggcgcacggggagctgggcggacggcggcccccgcctcctccggggacgcggcacgagacgcggggacgcgcggacgccacgctcagcggccgcccccggcctccgcgccgccttcctcccgggagcagccccgacgcgcgcgggcccggaccgccggggttgtcatggcagcagctccatccctgaccgccactttctcccggtgccgcctcggagcgagcgggctggcgggcggcgcggactgcgcgctcatcccgacgggcgggcgcccaccttaacctccgccgcgcccaccgggctggggatgcctgcggggatgagcccgcaccgcgcccacttcgctccgtcccgacacccgcgccagcggagagaacgcggcgcccctcgcagcggcttcccctacagaggggcggggtggggggagcggggagggagaggggagggcgggagagggagttctggggaaagcagcaaactgaaaactgacactggcaccttccctcgccgatgccagcgcagaagttgacaaaccccgccctggagagctgaactaccctgcccacgccagatggggcaccggtgtgcgtgtccatcgcgctgcgaacggctccccgcccagccaagtccagccctgacggcgcgctgtcctgggcccgcgcagaggtggagtgcacccacctccgaggacccacctcggaaacgcccgtgcccctccactggacgcctgtccccaaagtggcaaa

SEQ ID NO: 236050 - DNA, 597 bp, Homo sapiens
  chr11:132934077-132934674
  hyper
gggaaggagaggaacgccggcccactagccgaccccagcgcaacccagcgcggttcccagacgctgccgggtaactgatgccgccggcacagcttctgttctcacttgtggagctttgtctcccctcgctgggcagcccctggtaccgcaacccgcctggccgccttcccggctgaggcccccgggcagagctcctccgcagggagcattcccgtggacaaacacccctttccctggtagctgtggcaacagttgatctgtggcagcggaccaggaggagggtcaaatgggagaagggacggccagctggtcctaccagagactgtcgctggcgtcctcaggggccgctgcagggccaccttgtgtgcttgccctttccccacggtagactgccccgggagggggactgtgctgcctgaattcttgtccgggtgggactggcctcggtgaaggatccgggaatgggacttccgggccgggccggaggggaagtgtcaggaagagctcaggctttagcgagcctggagggaagggaaggctgaggtctcctctgcctccgcagccacacggcccggcgcggggcgggccggcagtaaa

SEQ ID NO: 236051 - DNA, 420 bp, Homo sapiens
  chr11:133401960-133402380
  hyper
tgaaagcatctgcgcgcgtgtgagcgagtgagtgtgtgtgtgcgtgcacacagcaagcctacctctttcactcacatgcatctcacactccctgtcctcaccccttcctccttgcctctccatctccccactgcctctcctgctctcacgtcgtacaatcaccccagggagagaaaacacccttcccctgtacggtacctgggatgaagagcagggcagttgtcgccgagaagacgacccagtaggcaggatggtacatctcgacgctgcggtgctctcagctgccgggcttgctactgcttctgctgctgctaccgctgctgccttcctctgtgctgaattctgagcaggtttaaatccaatgtttgcaaagggagggagagagcagaagagagagagagcgcgcgagagatgggagca

SEQ ID NO: 236052 - DNA, 157 bp, Homo sapiens
  chr11:133797628-133797785
  hyper
actcccagcaaagccggagggctatgggtgcagtgctgccacgtcaccacagggaggagacatggtcctgtgggactggccctctccttgcagccctgagctgtaacctggtgggtgccctccaggatccactcccgggtcccggctcactaccgtg

SEQ ID NO: 236053 - DNA, 326 bp, Homo sapiens
  chr11:133825232-133825558
  hyper
atcacccttcgcttcgccctctgctcgttctgttttcagacaccaccacccccctcagaagcagaggcgacatattcattccattccggaaagtttcctgaagcacgcccccctgcacagacgagtgacgaggggaccccgtgagaggcgcctccagcccacccggcgccccatgccgctgggagagggttctctgtcggcgagtcctgcctgctgactcccacccacagcgggttctctcccgccgccatctcctccggcttggtgaacttgcccgcagccgggtcgtgtctgcgcgctgacagccctgagctcacagtcctggc

SEQ ID NO: 236054 - DNA, 53 bp, Homo sapiens
  chr11:133827418-133827471
  hyper
agagcagcgcaccaccccctccaaacgtgatgcagaccgggggatgactaaaa

SEQ ID NO: 236055 - DNA, 279 bp, Homo sapiens; identical to SEQ ID NO: 202800
  chr11:133920426-133920705
  hyper

SEQ ID NO: 236056 - DNA, 46 bp, Homo sapiens
  chr11:133939462-133939508
  hyper
gctcctcccaggcggggtcctgtgctgggcggtgggctcgtccccg

SEQ ID NO: 236057 - DNA, 212 bp, Homo sapiens
  chr11:134093743-134093955
  hyper
tgcatctgctcaccgagtctaagatccagcggacaccagggctgcaggccgctaccaaggccccgcaacgccaccatgatcccagggcaccggctcgccgccgccgtgctcaactttcaaagctcgctcccgcgcgcgcgccgagtcgttcctgtggaccaatcacaacgtacagaatttcccactggccaaccaccgcgccgagccgtttc

SEQ ID NO: 236058 - DNA, 36 bp, Homo sapiens
  chr11:134094348-134094384
  hyper
tctgtagggactgcgcggcacgcgtgggcccagagc

SEQ ID NO: 236059 - DNA, 60 bp, Homo sapiens; identical to SEQ ID NO: 202803
  chr11:134094606-134094666
  hyper

SEQ ID NO: 236060 - DNA, 232 bp, Homo sapiens
  chr11:134123196-134123428
  hyper
cactctgcagactcgactgcggtccgcctccgctgcgccgcaggctgtgcagcgcgacccccgcggcgcttggtgggcggtgcatctctgcggcgccgaggccccgaggacttctgggaattgtagtcctgtccccttgggagcccgcctggcacctgggttgttagggctcgtgggaggactacaacccccagggtgcagtgggacaggcgttgccgggtcgcaggtcccg

SEQ ID NO: 236061 - DNA, 99 bp, Homo sapiens
  chr11:134145469-134145568
  hyper
ataggctgtgttctttgcaacggaagaagcaaagacttcaaagggagaaatcggaagatttcttttttcatcgtagggacttcacatcagcgtttccaa

SEQ ID NO: 236062 - DNA, 306 bp, Homo sapiens
  chr11:134146768-134147074
  hyper
ccgggccgcgccaccaagcccgctgtccccagctttcctcggcagatcccctggctacccccaccctgcggaggggccgttcaccagatgccagaaaatcagggtggggcacgcaggccaggggctccagcggctgggcaccgtgtccttcccgaacctggtgctggaagtgcgcccgcctccgcctctcccaggcacccaccggcactgcccagccctgtctggagggtctaggactgaacgtctgtccccggccttcatcctggctgcagaggactggccgggtgatgccgcgctgtcctggcc

SEQ ID NO: 236063 - DNA, 965 bp, Homo sapiens
  chr11:134201433-134202398
  hyper
tgcccctgctttgcggacgccttttgtacgttcttcctgatgtagcgctgcgaggggcgactttacctcggcgtttgacaggtacgcagcattcccgcacccgcctgcgcctcgcgagcagaaagacggcggactctgcaccgctccacgacactggggacccgccccggccagacccgtcccctaccgagaccttgtccccgccccgcccccggccggggccccgccccgccagccccgcccccgccagccccctctcctaccgagacctcgtccccgcccaccagccccgccccgccccccccccgacagaggccccgccccggccccggccagccccgcccccgcttgcgcgaggcctagggctgcaggcgcggagccgcgagccccagccaatgagcgccggcgggccggttgcccaggcgaccagtgcgcggctccgccccccgcggcgaggctcccgcgcgcggctgagtgcggactggagtgggaacccgggtccccgcgcttagagaacacgcgatgaccacgtggagcctccggcggaggccggcccgcacgctgggactcctgctgctggtcgtcttgggcttcctggtgctccgcaggtgagagagagcttcgcgcagcacctgccggaccccacattccccagccctccgcacctcgggttctctcctcccgcgacccgcgaatcccgagttcccggggggagcagccccagctgcttctttctgggagctccccaatacccccgagttcccctgcggctgcaggcactctactcctgccgcgcgatccaggcctctgggcgacacccggcgtgccctcgggagccggcgtctgtgccccgagccgcccaccccgccgcgcctgtgacgccgggctctgccccccgtggacgcccgcagccctccagccgtcagagccctctcagacgcaccccatcgcggccccgtccccac

SEQ ID NO: 236064 - DNA, 237 bp, Homo sapiens
  chr11:134230255-134230492
  hyper
tcagtcaaggacccagacctcgtgtctccggcatggggaggaccagcagtgatccccacggcttccacgcggtggcgccgtctccccacggctgcttccaaggcctgctccgggctccgcagggctgtggctgtgttgggagactcctggtgctggagcacgttttagcgcttggcggcctcccggtttcaggccttgcaaggaagcccgggagccgccactgcttttccctgtggc

SEQ ID NO: 236065 - DNA, 377 bp, Homo sapiens
  chr11:134282101-134282478
  hyper
ggtggcggcggatgcgccggtgccgccgcggctctgccggcgcctcccgccccgcccccacccgctctccgcccccgccccgcccccgccccgagcccgcgccagcgccggcgggacccgagctgctaatggtcggtaccaacctcgccagcctaggcgggggcgcgaggagggaggccggcgaggggacccccccccgggattggtatcacctccccaccgccccccaccctcccccggcaccgtcccccgcggaggcggctcccgcttcaggcggcggagcaggggtggcgggcaggggccgagcgcacccccagatctcggctctcgagagttaaagctcggcccccgcctgcacccccattccaccccgcctc

SEQ ID NO: 236066 - DNA, 76 bp, Homo sapiens
  chr11:134282658-134282734
  hyper
ggggcggacggtgccgtgccggggtacggggtctgctgccccgtggaagggcacctcgagccgccgcgcgtcagcc

SEQ ID NO: 236067 - DNA, 176 bp, Homo sapiens
  chr12:298329-298505
  hyper
gggaagtactggactagctgcgggcaggggccggctgaggcgcgcgcccgcgtgctaggggccccgggggagggcggcggggacgcggcgctactcccctctgccacccggcggccgcagacagcgctgcgccggcctcgcgtttttcgttttccgccagacccggcctcgtaact

SEQ ID NO: 236068 - DNA, 72 bp, Homo sapiens; identical to SEQ ID NO: 202806
  chr12:568903-568975
  hyper

SEQ ID NO: 236069 - DNA, 85 bp, Homo sapiens
  chr12:569665-569750
  hyper
gaactggtggcgtcggcccaggtcggcgggaaccccctgaaccggagtaagtagcacccaggggaggcgaagggcgcgggggtgg

SEQ ID NO: 236070 - DNA, 209 bp, Homo sapiens
  chr12:1059279-1059488
  hyper
gaccttcccagattccgcccgggccgaggcagcggtggacctggtggttctcgcggcctctcaccaccgccgcgcacatccagtcgtcaccggatggcgccttcggttagcgacgaccgcagggaaatggagaagtgcggcttggggggcgaagtcccctctagaatgtcccctggggccgggcgtggtggctcaggcctgtaatccca

SEQ ID NO: 236071 - DNA, 215 bp, Homo sapiens
  chr12:1099809-1100024
  hyper
aatttcgcggccgcgttccacgaagctaaggggcaaaaaaccagctttcttgggacaaagcgtccccccagcagccagggtcgatcccggcgctgctcccgcggcgcttggctgccccgggcgtaacgggccacgagaagtagggggtggggcgccgcttaggtttgggaagacacgaagcggctcctcgggcttccagcgtccacttcctacgg

SEQ ID NO: 236072 - DNA, 74 bp, Homo sapiens
  chr12:1639455-1639529
  hyper
gaggcgcgggaggcggggcggaggcggcggcgcccccaggatccactcgcccagcgccgggccctgcactccga

SEQ ID NO: 236073 - DNA, 545 bp, Homo sapiens
  chr12:1639709-1640254
  hyper
agttcgggggtccccggcgcggagcagggagccctccgggcggcaggagggcgcgcagactccgagcgccggggctgcctggccgggctccggtggacacctcggaggctgccccagcatcggggggggggcccgagacgcctcggcgggaccccgggagccgagcacgcccgcccgcgccgccagccccgcgccccggccgcggatgaagagtcggaggcggcggcccgagcggcccgcgcgctgagaggagcgggcagggtctgccccgggccccgccggccgccccctgcgcccccgcgggccgcgcctcgcccgccgacccagcgcagccgggcgcaggaagagccgggccgggccgagcggcgcccggagcccgcgggcctgacacgcggcgggacatgcaggtaagcgccggccctcgcccccggggacggccccgccgccgccgccgccgccccggctgccgaacctcgcgcggctcctccgccttcccggccccgcggccgcgctgggtgtccgccgggtgggtctgcgcgccgcgg

SEQ ID NO: 236074 - DNA, 209 bp, Homo sapiens
  chr12:1640554-1640763
  hyper
cgccgctcggctttgtgcttctccggtcgctccggcgctccacgtccccgccgtgggagaggcgggacgagacctcctccttcactttcttggagcctcggtggacgcgtagcccgcgctccagtcggagccgaacccccgggtatttgctgcagaccgctgggagaggcagttcggtttgcggggagcctgcccggccctgttttaca

SEQ ID NO: 236075 - DNA, 796 bp, Homo sapiens
  chr12:1739047-1739843
  hyper
ccgggctgggggccggctcacttccgagctggctctgcatgacaaaggggaaggagcaagtgtcttctttgatctgccccctgccggccccacacacctgcctgttggtgcccccgccccagccgaggcttcgagaaggaaaatcaaaagggggcttggggaagggctgtgtcccagctctcctggaccctgctcgggccactgtcctctcctggcggccccaggacaaaaatacttcccgggctgatgacccgaagcacccgccgccccctcccggggagcctggggacgccgacgcgcgagagtggcgcagtgagccggggcgcgcggggctgcgctcgtcaggtccggggccccggggaggccgctgggggcgcgggtcacgcccagacgggggccccggaggaccgcgggggagccgcaggggccgtgtgtcccgaggcgcaggctcgctctagcagcactgacctgctgcgggtcccagggcctggggacaggggctctcgggggcggatagaggaacaggcgtgggttacagcaggcaggaggccaagaggcgggaggcccgggagccagcagggaagggctgtggcatctggaagatgcgtcctcagctcaggcatttgatgccagagctgccgcctggcgtcggcagtgtccccggtgcagctgctgggcaaggtactcggtgccgccctcgaggaccacggtgccgggaggggcaggggccgcctagggaggcaccacctcagccgccagagctttccgggcgggcggttcgcggcgtggcttgtac

SEQ ID NO: 236076 - DNA, 141 bp, Homo sapiens
  chr12:1762094-1762235
  hyper
tcacggccttaggtcggagcaaatgatcagcctggaacccactccagactggtctgcagttctgcatgtgaccacacagtgtcgctatcttctcagttctagccgaatagctctggcccgcaccttggttcaaaaaaacat

SEQ ID NO: 236077 - DNA, 290 bp, Homo sapiens
  chr12:1799861-1800151
  hyper
tccatagagactgcgaaaagcatccgcgagccggggcggccccctcctcctcagctccaaattgcttcctttttcggtgggagaaaaaactccgaggagttgtgtgagcgcctaaggagcgcacgctcctccggccctcaacacccagtatagttttcgctaagttcctggccgaaccacagctcccacgatgcacccaggttttagagcggtcagaggggcggcttccggtttaggacagcgcggctgcgcacggcgtgtggtcttattggctcgaaccgcctcgtgcg

SEQ ID NO: 236078 - DNA, 951 bp, Homo sapiens
  chr12:1905621-1906572
  hyper
cccacggtcataagcgggggagcgcagagccagttttcaattcaggagtgtctactctgaagccctcgcttcactccggagcccgctggctctatcctcgcaccgagcctttgcgacaagtgcacagggaacgctaaccccagccctcaacgctgcacagaacccggggtgaaacccgcgcagcacgacgcgcagggagtgggggagaagggagccccgatgccagcgccgcaggtgccgcactgttaaatggtgtgccacgggcccgggggtctagggaccgcctggcgagcggcacgtctggctgaggcgaccctcgaggaggccgccgcattcccagcgtgggggtcctcccgggcttgggtgcggggggtcagcaggagagacccttccgcgcggcctccctgcctccccggggccagggcgggttataactagcggcttccacacagcaggaagcctgacagaggctgcccgcggggctcccagcgacccgaggacatcgcacacttccggccttctcttctcacactccctctgccttccaagttctccccacgcagctcaggcgcgggcactggcaccgccctgggcaccgcctgagcagggctgggggagacccgccgaagggcccactcgcccagagacgccgtggggtcacggctgcggcctcggcggggtgggctcgacacacagggtcaggcctcgggaccacctctccccatcccggctgtcccggtccccagccgtcctgcccgcctcagaccgtccgcctcctgcgtgtctcctccactgaggacggcgggggaagaccccgggagcgtgggctctgcacttagacgcatcccctcctcccggctgtggagccgtttcccgggggttccggggccctgcccgcacttccgccttgccgagggcgggaggagtgtggcgggacgggcggcgccgccc

SEQ ID NO: 236079 - DNA, 784 bp, Homo sapiens
  chr12:2113105-2113889
  hyper
tgctctactttctcgagcacatcggtcttccggccataaggtatcaggtccttcctttccttcggctcttatggtgccgtacccgatcggtctggtctcccagcgttgggtacgttagagatttaagtcttttccccaactccaggtagctccacagatccgccttccttcccccaaacccccgagaccccatctccacaacttcggcctcagtccccagatccacccacttccagggcgtcaacgtctcctccccctcaccgggtcctcaagtcctgagtctgacgccccccgcctccaccccaaccctgggctgcactgctccgccgcgtccgcacgcacccactcgttggcccgatggccgaaggtgtacagagccacctggctggccacgtccacgatgcggttgatataggggtcgtggcgctgcagggccgctaggctgatgtcgcgcccctttcccaccaggccgcctgccgccacggctgccatcttccctccctcccagacataggcacggggctcttggaagccactctcaatagatcgcagaacgagcgagctgcctcgcaaccgagaacccacggcgaccacacggcccgggaggccttccggctccagtcacccccaccctcctgcccgccgacagacgcaaggcctcactaatcgatggccgcgccccgcccactgaggatcgttgccactggcaacgacaagcccaggcctgccctctgcatcccgtttctttctccaagagctgtttttctacgcgctcgagcctttg

SEQ ID NO: 236080 - DNA, 34 bp, Homo sapiens
  chr12:2144472-2144506
  hyper
cctcttaccggatgatgtgcgatgtcatttggaa

SEQ ID NO: 236081 - DNA, 286 bp, Homo sapiens; identical to SEQ ID NO: 202821
  chr12:2692228-2692514
  hyper

SEQ ID NO: 236082 - DNA, 1111 bp, Homo sapiens
  chr12:2800167-2801278
  hyper
atggagagcgcggccgacaacatcctcagcgggggcgccccacagagccccaatggcgccctcttaccctttgtgaactgcagggacgcggggcaggaccgagccgggggcgaagaggacgcgggctgtgtgcgcgcgcggggtcgaccgagtgaggaggagctccaggacagcagggtctacgtcagcagcctgtagtgggcgctgccagatgcgggcttttttttatttgtttcaatgttcctaatgggttcgtttcagaagtgcctcactgttctcgtgacctggagttaaccggaacagcgtcttcattcatttctgttgggaccagacgcggagcctgggtgcgcgagccgccctccgggaggaaggcgcccggctgcgtctgcagaggcggggagaggaggcggcgagggtcccggggcgcgaggaaggcgcctgccctctcccagctcgcaggccccgggcccggccgcgcctccgcggggagagcaccccggcttcccgcgcgccctcaccaaaaggaccctacagcaaacgggtgtctttcgactctgcttgtagaaaccatttgcacatattctgtacgagcctcgctgtctccctagagccagggccctgcggatttggagaagggagcggggcaggacttccaggaggaccccaacccggcccggagagggaggaggaggcctccaggggcgcggagctctggggatgggcgtcgggccggcagtggtgcggctcactccgtccctgcccacctgcgacgggatcccccgaccggcacgggccacgccgagctcccggccagccgccggcccgcaggcagcgcgagggaggagctgcgccgccggctccgcccaaccaggtggtgctgagcttccgctgagcgctcttttgttttgtggtttgacacttttcttgacagcatgttgcagtttcttttcggttttggttttttttaaatgttttattttgctttcccagcgggaggggaggaagaagagtgtttacaaagtcctgtagccccctcacctttctgttttcacttttgccaatgtacatcgggtttggttttcttgtattatttaaacggttgtggtttcct

SEQ ID NO: 236083 - DNA, 653 bp, Homo sapiens
  chr12:2861785-2862438
  hyper
ccttgccgagggcgcggggcatttgtactgaagaagggctgcaggagagtcggtgacccctccttctacttgtatgtagcggccccaagtgtcccgggagctggtggggcgcttgggctgtatgagcccggccgccaggaggctggggctgcgtcaggagctgtccgtggtgcttaagcggcgtctgctcgggcgcggggtgtggcgcggcgggtgagcgctgtccctggtcctggagaggttcctggcccccagtggcaacggtgagagcagtggcccagaaggccagtaccgggaacgacgatggcgggcacaagggtgggcttgcagcagctgctgctggtgctcccacaggctgcggttctccgcgctcagctcatccagccgccgctcctgctcgtcgatgcgctggcgctggatgtggacgaggctctgctggttctgcacgatggatggcccagagcccttgaggtacagcacggcgcgcaccgggttttccagcaggctctcgatgccacccaccgccgcctgcgccctgcctgcccctgggctggcgcctgggagcgcgagggcgcgggaacccagcagcccagcggtcctctcccacgggcccagcctccctcccgccgccagcgccgcgtcaccgccacccc

SEQ ID NO: 236084 - DNA, 32 bp, Homo sapiens
  chr12:2904079-2904111
  hyper
agcccctccctcgcggcggggcgggaccaatc

SEQ ID NO: 236085 - DNA, 260 bp, Homo sapiens
  chr12:2999768-3000028
  hyper
cctgctggccgcgcggcgggcgaggcccaggcaaaaacaaagtcttcccgctcagtaccggccccgcgaggcgctccagaggaccaagccttagctcgcgtcaccccacccccgcgcaggcgcgtttaactcccgctcgcctcccgccccttagcaaccctcccgcatcgttgggccccggcaatagccaatgagacaggagccacgagaacacggaccaatcggcggcggcgacagtgtggaacgcggttgccaggagg

SEQ ID NO: 236086 - DNA, 170 bp, Homo sapiens
  chr12:3053922-3054092
  hyper
gggtgcagtgagaacggcagatggttccatggcgccacccactgtccaggaatgcatgttgcaggtgcgttaaacgggcagaccccgcacaggtgaggaagtcaccaggcgaaaacagcaagccgaccacatgaccatgcagttaccaagcacctcgtgttagaccatgg

SEQ ID NO: 236087 - DNA, 257 bp, Homo sapiens; identical to SEQ ID NO: 202825
  chr12:3067872-3068129
  hyper

SEQ ID NO: 236088 - DNA, 52 bp, Homo sapiens
  chr12:3068385-3068437
  hyper
ctcggccccctcccccgccgcccgccccggcccggcccggccccgccccgcc

SEQ ID NO: 236089 - DNA, 678 bp, Homo sapiens; identical to SEQ ID NO: 202826
  chr12:3068770-3069448
  hyper

SEQ ID NO: 236090 - DNA, 391 bp, Homo sapiens
  chr12:3186012-3186403
  hyper
gcgctgtcagcatctcgcacagtccgcccgaaacaccagggaaggggttcgtaggtgtgggggtggggtggcgaggccaggcagcctggcgcgagggagagagccgaggcctgggccaggaaggcccttgggtgccgtgtgggcgcagagcccaggagagcgcactgccaggcccggacctccccgcccctaccccgggaagaggcccgttcgccgcagggggaaggcgggatcatagcacctcggaggagcggccggtccgggcatgcgggcggcggggcggggagggaggcttccggaaccccgagagagcacccgtgcctcgcgggccccgtgccccgtccccgggctccccttcctctaacgcaggggacccagcccggggcagtgc

SEQ ID NO: 236091 - DNA, 127 bp, Homo sapiens
  chr12:3186943-3187070
  hyper
tccgactgtgtgaccccgtgcaccgcttgggacagtccatacaaggaccccagagagggccagggggccttcgggcagggctgggatatggcctgcagccccccggcacccgcgaccgctccctggg

SEQ ID NO: 236092 - DNA, 581 bp, Homo sapiens
  chr12:3475056-3475637
  hyper
cctatccgcagccagcgtccccctgcccgccggccccgccacggtccatcagggactgcgggcggcggaggtggcggcgccttgccgggacccccagcctccctcccccgcccccggcgccccaccccacgcgggcgcgcttctcccgccgcagccgcccgcgctcacctggcccggacacgggctccgccacgcggtgatggaagctgagcctagagaggcggagagcggcggctcgcagggccacccagcggcacacggcccgcgcctcggcccgccccttccttgccggccgggggagtgtccgcgcgcctccagcccgccccgcgccccgctgcggtgcccagtgcccgccgtcctcacctggccagcgggacgcgcccgggaaccccgcacgcgggcgggccgcctctttgttagcaagtttgcctttctgtgattcagagcacgcggagcgaattaagtggagtgaggggtactgtgcgactgtctgcgggaaacctgcggggagcgcgggaagggatggacttgatgagccgcggcgcagcggctttcaaacctccccgcgctccgcagccccc

SEQ ID NO: 236093 - DNA, 207 bp, Homo sapiens
  chr12:3601063-3601270
  hyper
ggtgggggggaagttcatgtctcaggtcccctccctcttgaaaatgcaaaacagtcactctcaccccatcaccctctcctgccacccgctgctcccttctcccgcccccaagtcccaaaccccgggcagccgcgctcccctgccctctcctctgggctccgtgagggctcccgggtcccggctttgtgcagagctggggtgggtaat

SEQ ID NO: 236094 - DNA, 105 bp, Homo sapiens
  chr12:3602290-3602395
  hyper
cgggacttgaacgcagcggggcattcagtagcgaatgctgtctccttgagttagggcaaagcctgcgtgcccgccgtcccctcaccacttcctcttccccagccc

SEQ ID NO: 236095 - DNA, 128 bp, Homo sapiens
  chr12:3602875-3603003
  hyper
ctcagcagttgcacatgccagctctgctgaaggcatcaatgaaaacagcagtaggggcggccgggctcctgcgaacaacaacaaaacaaacaaacaaaaaaccacgtcgcgtgcggggcaccaaggcg

SEQ ID NO: 236096 - DNA, 136 bp, Homo sapiens
  chr12:3862232-3862368
  hyper
agctgtcaagcagccgcctgctccgcccgactctttccgctccgagccgcgcgggctggaccagcccctcagcggagctgaacgggaagcggcgccccctggacgccctccgggacgtgcgcgcgccaagcggtgg

SEQ ID NO: 236097 - DNA, 485 bp, Homo sapiens
  chr12:4140249-4140734
  hyper
gatgcgcagcaatgcgcctccaagccgggcccaggccgagcgcctctcgccgccgcgcacattccggagggggaccgcggggctcaaagggcctgcggcgtaggtggctcagccctttccttggctttccctccagggccatacttgccgaaacccactgcctgagcctcccgcccgcccgccgcgcccccgcccggggccgggaaacgagcagggacaactccccgcccgcgcctccccgcgcccggcggcccggctagcaacccagaggcgcggcgctgcgattggctgcgcgggggagaaggggcgctgcgctgctccaatcgccggccgcgcccggaggccgcgccgccaggaggccgcggacgcgtgctcgcatgcctgtggtatttgctcagaggggcatgaccacttcgggcaagcctttaaatgtgagtcagctttcggccgatccctgggaaaaattccttcggtgttgtcaggca

SEQ ID NO: 236098 - DNA, 709 bp, Homo sapiens
  chr12:4273726-4274435
  hyper
gcagggaatgggcctggagccgtgagccgtccccttcgctaacccccaaccccgccttctcctgctcctcctctcttcactcttcctgcctctcggctccggggtctcctcgcttccccgcagtccccgccccccagttcccaaagcggcacccgggcctcgcctccttccagcggagccgcgcgccctgcgtcctggcctccccgccccgagtccccttccctggagcctgggggaccgacagtcgcgggccacgcacgcggtcccagcctcgccgtccgccccggggagagctggaaggtgggcccggatctcccacatcactatgagctcattccagccccggccaagcaaagcctggccctactcgctccacatgcatttcagtctcctctcgcctttcatgcgcggaggagccgggagggagaggatgtgacctcatctgcgcggcatctgagcccaggggtgccccagctcttccacccaggccgctccccgagcccagctccccgcgcccctctctctatccaggagagacgcattggacagccaggagggctcgacgtggaaggaaaggaagctgcaattctgggacaggggcagacgggagaggaagtgaacgtggctaaacgctcactttatgtaaaacgtcccccagactagaatctcgtccacagagctgcacacatacactcgcacgggcccggct

SEQ ID NO: 236099 - DNA, 959 bp, Homo sapiens
  chr12:4379221-4380180
  hyper
cctgcactccctccttcctcttgatgtgcctcctatgtgtcccctcggatttatgtgtcccctcgcattttgccagtcgggttttcggttttgattgaccgtccatccctccacggagaaacacaaacacagctccactctttgggggagccgaggggaaggcagtggctcccatttctgagcctgaactcagtcactacccgctccccacctggcctaggcgcccctgcgcggagaaggcgggactcgaactcgcgctgctcccgggccttgagccgaccgcggaatcacctggctgggaggcatcctccaggtaagcttgggagtatgtgtgcttagtgctgcaggctcctgcagaaaagtgcctataaacacccaacaccctgctgcaccctccacctccaggctttgtacactttccaaccgaaactccaaaacgctagcgtagagggtggggagccggccggaaaaagaataaaagtccaataaaactggcgttcgctaaagtttatcaccagtcctacatgggatatatatatatgtatttttttttccgtgaagggtgaaaaggagataaggaagaaccaacaatctaccccctcccgccgccccccacccccgcgccacggtgatcagtttggacttcaaagccagagcacaggctcttgcgctttttcttgaaaccgaagtctacactgaaagaaagtgtgcacttttgcctagaaggcaacatgcgttttcccgcgtgctaggtggagtgcattttaacaagacattagggttttaacacatggctggagtggcgaccaaaagggaaaactcagtttccagtccaagcctcctagagacattcctgccaacctccgcaccctctcacgccccaccccacgtgtgagagtctgcaaaaccaccggggattggattcgatggcgagcttcacgctcgggaacagtcagtaa

SEQ ID NO: 236100 - DNA, 1119 bp, Homo sapiens
  chr12:4380360-4381479
  hyper
cggagtagggggagggggagagggaaggggcgagagggccctcggctcactcccgagacgtgaggactcgccacccaggcattctcctcggggtgggctgggccccgggacgaccacccgcttcttcctcgcccccgctgcccccacttcgggagacccagagctctggatgcctttccccggagaagggggggtgtgcggagtcggggtggaagagaccttgctcgcagagctatatcaagtgatgtccagaggctgggagccccggcggcctctgtcccttgcctgtcgggttagatttatactttaaaaatacctcccgccctccctccttctctcgcctctccccgctgcaactttctttgatccgctcaaaggtggcttaggtgaaattggagtaattcccttatgggggtcttaaaatgtaagtgaatgtccttatccggggtgactcaaaagcttaagtcgggaagcccaacgtgactaaaaccaataggtgattgttcggggccgactgtgtgcgggtgtacacggtattcggcccgggtgtcatccgcggcgctggactgtttcattttgagtttgcaacttgggtttttcagcgagctttttttcttcctgaaagctaatggcttccacagcaattagacattttcctcgcccgccccttccctcccctttctttacatataggagatgggatactcattcccgctgctattgataaggtcggaggcggccgggcctctccccagctttcgcccgccccagcgcccgctctccctccgccctcccttggcttccttttgatgtagtggggaacgcgtcctactaaaaaaaaaaaaaaaaaaaaaaaaaaaaagtaatctgcccggtaacaatcagcgcgcagtagcaggagccccagagctattggctatgcaaatagagggaggggagacggcgccccaaactcttcctcacccttttaaagcgatatcccctcctttcccccccaccaccccttccgccccaccctcgtttaaagaggctggctccggggcctgagttaatcgcttgcacctctagtttattcgctcccctcctccgccttgcagggaacctagtgtacggctcacc

SEQ ID NO: 236101 - DNA, 361 bp, Homo sapiens
  chr12:4382259-4382620
  hyper
tccttcctaatacccacctctccctccctcttcttcctctgcacacactctgcaggggggggcagaagggacgttgttctggtccctttaatcggggctttcgaaacagcttcgaagttatcaggaacacagacttcagggacatgacctttatctctgggtatgcgaggttgctattttctaaaatcaccccctcccttatttttcacttaagggacctatttctaaattgtctgaggtcaccccatcttcagataatctaccctacattcctggatcttaaatacaagggcaggaggattaggatccgttttgaagaagccaaagttggagggtcgtattttggcgtgctacacctaca

SEQ ID NO: 236102 - DNA, 1733 bp, Homo sapiens
  chr12:4382900-4384633
  hyper
tgcccagccagcttgcgtcaccgcttcagagcggagaagagcgagcaggggagagcgagaccagttttaaggggaggaccggtgcgagtgaggcagccccgaggctctgctcgcccaccacccaatcctcgcctcccttctgctccaccttctctctctgccctcacctctcccccgaaaaccccctatttagccaaaggaaggaggtcaggggaacgctctcccctccccttccaaaaaacaaaaacagaaaaacctttttccaggccggggaaagcaggagggagaggggccgccgggctggccatggagctgctgtgccacgaggtggacccggtccgcagggccgtgcgggaccgcaacctgctccgagacgaccgcgtcctgcagaacctgctcaccatcgaggagcgctaccttccgcagtgctcctacttcaagtgcgtgcagaaggacatccaaccctacatgcgcagaatggtggccacctggatgctggaggtaggtcggggggtggcgctcgccaggagccaggacccctccggatgctcgggtccccggccggagccctaaacctgggagagggcaatccccgcgccggcctcccggctcctgtgcgggagtttaccgcgcgccttctggcgagacgcgtggctttatttctgttcctctccagataaactggggaggcagaggggggaggaaaatctgggagaagcgaggctgtcctgggcgggggtaggggagcatcccgcgcgcgtgttcctgcatgtggctgcctcttcttcccacccccctcgcgacctgtcttttgcgaagccgccgcggctgcttgcgctgcggccaggaagagagtcggggcctgaaatcgggaccccgagtagaaaggcaaccccccccaaaaggccagagcaaattcgtcttggcctcaggtccccgcctgtggtcgcgactccgcgctggcacttcaccggggaggtggagggaggagggagaaggagagaaacggggaattcgggagccccggaagtcccattgaagaaacgcgtgtttcaggggaacccaaaagaaccgcttcttgcccctcactccaagtctttgcccagcgagccgtgtgcccacgtatgcacagctctggacctgccgtggtttcgccatgttgctttgcaaactccctttggaaaggctgggaaacgtcgcccgcttaccctcgcaccccattatcccggccaccccacttctaatcgtgccctctcccccaccccccacctcacgaagattacttacagtttggttttccagcttcctcggtgcggagatttgggtggggtaggaagggggggagggggtgtgtgtaggggggataccgggtcacccctgaaggagaggtgggagccccccgtgcctctttccagggctctctgctcccgtctttcccctcgctcgtcaccgcgttccctagtttctgtccttgtgggccgcagccggacactcccgccgcggcgctcaccccttcaagtttcctcccgggatccaaagccccaggggtcggaatacagacctttctggcacccgaaacctctgtttcgggaagcctggctcttctttggggttttcacgccaaaagggcttttctaggatatttcctcgatttttaattattttttgaaaccatccccccctgctccgactccagctgccgaggctgcggcgctcttcctcctctcctccct

SEQ ID NO: 236103 - DNA, 50 bp, Homo sapiens
  chr12:4384838-4384888
  hyper
tgagttagagtgcgcgaaggagtagccaaagggagcgtcgcggagctgcc

SEQ ID NO: 236104 - DNA, 112 bp, Homo sapiens; identical to SEQ ID NO: 202846
  chr12:4647831-4647943
  hyper

SEQ ID NO: 236105 - DNA, 275 bp, Homo sapiens
  chr12:4758236-4758511
  hyper
ccagcttagcagccgtagtcagccgggagtgctgtcgtgggggattgtgggaaaagatggcggctgccgcacaatcccgggttgtccgggtcctgtcaatgtcacgtaagtgttaccgggaacggcggcccctggtcgggattccgagacggggatttaaggttttggaagtggcaccgtgctgcagcggtcacgccaacttcctaggcacactctggtttctctaggtttggagctgcctcagtctggtttctcctttcgctttccgcttcccc

SEQ ID NO: 236106 - DNA, 171 bp, Homo sapiens
  chr12:4967026-4967197
  hyper
tgtcccaggtcggcgctatgagcttctgccactagggggaaccagggctatttctctgcaggctccaggctgtgagaagaggaaaagtactgaagagagcgagcaaagcctttcagaaaatactgcaacactgcgtgcccgaggcccccgcacatcgctgcaatcttgatg

SEQ ID NO: 236107 - DNA, 372 bp, Homo sapiens
  chr12:5018018-5018390
  hyper
ggtggtcccaaggccgcgggaggagccaatcagcggcgactctgggctcttgcagcctccttagagactccgcagccctggaggtaccaagctgcctgctgccttttctcgcgctgcaggcgcggagatgcagcgcctctgggggcgcagctccagccgcactcgcagggcaaggcacacgcccccggctcctgctgccatgcgcctctgcgggggaccctttccaaataaattgcaagctttgaaagtggccctgtggaggcactaggctggggaaaaaggctgcgggaggagggacatagggtgggaggtgagtaggcgacttgcttctcagattattcccaattagcaccaagttggcagacaacccca

SEQ ID NO: 236108 - DNA, 341 bp, Homo sapiens
  chr12:5020310-5020651
  hyper
ggcccgcaggcgagggggattccaaactgagtgaaaggcagggtggaggggaaggcagcgagaggcaaagtcgcagatctcccgacctgctcgtgttgaagcacctccccctgggcgtgagggagacgcgcgctccggtgggggggccgcttgggtcccccccacccctggtccctggctgcttcccaccccgggctctctcctggcctcccacccccgcgcccggcttccaccatgacggtgatgtctggggagaacgtggacgaggcttcggccgccccgggccacccccaggatggcagctacccccggcaggccgaccacgacgaccacgagtgctg

SEQ ID NO: 236109 - DNA, 54 bp, Homo sapiens; identical to SEQ ID NO: 202850
  chr12:5131854-5131908
  hyper

SEQ ID NO: 236110 - DNA, 794 bp, Homo sapiens
  chr12:5152818-5153612
  hyper
aatttcagcgctgtcggtacaacctgttcctccatcctccccactccttccctccctccgctgggctgcacccttctcagcccctcctttcccttgctaggggccccagctgcgccctccggggagacacccgctgccacgagacccgggaggggaagcgggaggagggggagaggaggggaaggcgggggaggcgccgagggtggaggccaagcgcggcgcagccagagaggggcggctgaaggttgcatctgctggaaggaggcttttcggctgcttggtaacgggctgccagaagagagagaggcagagagcagggcagcggcttcttgacgtcagggccaagcgaggggatcgcgccagcaaccccagctctccccagagaggggccggccgaccgctggagcggagcctgacgccaggcgcccgcggagcgtgagtagggggcgcgggagccggtcagctggggcgcagcatgccctctgctcccgcgccatggagatcgccctggtgcccctggagaacggcggtgccatgaccgtcagaggaggcgatgaggcccgggcaggctgcggccaggccacagggggagagctccagtgtcccccgacggctgggctcagcgatgggcccaaggagccggcgccaaaggggcgcggcgcgcagagagacgcggactcgggagtgcggcccttgcctccgctgccggacccgggagtgcggcccttgcctccgctgccagaggagctgccacggcctcgacggccgcctcccgaggacgaggaggaagaagg

SEQ ID NO: 236111 - DNA, 285 bp, Homo sapiens
  chr12:5540359-5540644
  hyper
gtttgtttgttgctcgcctttcctgcttctcgcgctgtccccgcgtgcagactggtgggtgctgggcgagtgattagctgcagggccccatcctagtttggaaggaaggggtttagaagttggaggatgggtgaaatgggaggctgcgatccatctccctctcccttccacactcaagctcccgcaaacacgcgcgcgcacacacagcccctccctagtccctcggaccacccgcccccacgcccctctaccttgacctcccttgaccgccgacacagcgtcctg

SEQ ID NO: 236112 - DNA, 148 bp, Homo sapiens
  chr12:5541744-5541892
  hyper
acacacacacacacacacacacacacacagacacggacacccttctccacctcctcccctcttgtccctcggctgcccaagaagcttccctcaatctgggaaagtgatcaggtttaagggacctggattggaaagggtgggggcagaa

SEQ ID NO: 236113 - DNA, 479 bp, Homo sapiens
  chr12:5542552-5543031
  hyper
tactcagtggtggatgctcctgatgaaatttgggacgcttgggagttgaaggttagggacaggaggggcgagggccgagggcatgggatgggggagtaggattctgcttgttgctctccgcgggagtgggtgcgcgtccaggaggcgctgcttctttgcgggagtttggctgctgcgttcattcgtcgtctgcgcttcagatgcacggcactgagacccttgcgtccgacggtgtcggggctgtggactagaaaggatcccttttgctggaatcgaggctggggtgggattgccggtgggggaaacaccgaaaagatcgtctggcctcggcctctggcggcgggcggcaggttctgagtccgaatggaggttgctcccgggagcgccgggctcagagctagagagctcgggagactgtgcgcctgtggacttgtttatgtgtgtgaagaggcgggggcgagggcctgctgagaggggag

SEQ ID NO: 236114 - DNA, 506 bp, Homo sapiens
  chr12:6309715-6310221
  hyper
taacttcatcttctgggtgagtgagcgcgactgccgcgcgctcctctcagggcccacctgttcgcgggccccggacactggccgcggccgcgagtgccggcagctggcactgcccgcaccgggcaggcaccgggcgggaagagagagcgccctgcggctgccagctggctccaaggccgggtccagagccgggcgggacggccgcgacgggcgcattcgggtgggggctcatcaccgcccagccggcgtggggagccgggccctcttgagatgaggcgtgcgggagggtcctgagcactttagctcgcctaggatttgagctggggtgtgtgtctgctcccagctcaagtccctccgagtgccagagaggaaggcagggagaagcggagcacccctctttgggccaaggccaaggaggactgtggtgagcagtatggcttgtgaccgggtggggtctcccaggtagtagggggcgccaggaagggagggtgcgggcacggcgagag

SEQ ID NO: 236115 - DNA, 43 bp, Homo sapiens
  chr12:6388091-6388134
  hyper
cgccccgtccgcgccctcctcggagcgccgagctggctttgag

SEQ ID NO: 236116 - DNA, 540 bp, Homo sapiens
  chr12:6419588-6420128
  hyper
ccctcattactgcagcgcctcgcgggggtctggcccggagtggagggcgcgcggtcccagccctcccgctcggccggcgggtgtcgagttcaggtgcgaccgaaaaggggaaaggagggcaccgccacgtgagctgtcctctccggggaaggcggtggctgcgtgagggcgggggctgctcggtccccagggccccgcccctctgcccctctgccccgagcggtgctggcggtagggaggggccagcccggtccccgccctcctcgcccggacccgcgctgcccggctcccgcgggccgctcgatcccagtcccaggctgggcatcggggctggctggcatcgccggggagccgacggcgacggggagccccgcgggcggggagggcggcgcagggcagcgggtgcggtgacacctgtgggcacaggtgagcggcgggagggctacgcggcccgggggcggggcggccgggacccggggcctggaagccggggcgaaggggaaggaaggcctggcctcccgaaggcgggaggaggggagc

SEQ ID NO: 236117 - DNA, 204 bp, Homo sapiens
  chr12:6444950-6445154
  hyper
cagtcaccctgagtcagccacggggagacgctgcagctgtaagctgtgcaggcccggaagttcaagcctcagccgcaaacaggggaagccacacacagaaacacaacagcagcccccgcaggtggaggcgtgtgcccctgctcagaggacaacaaccttcccctgcccgcaccagccaacaccgtgccacctctgctgagaaca

SEQ ID NO: 236118 - DNA, 403 bp, Homo sapiens
  chr12:6449620-6450023
  hyper
gctggtggggagaccgtgggggaaggacagtgggaagaagggaagagcgggtgggactaaggaggcaggaggaggcagaagaagaagagtgagaccctgaccagagacgtgctgcctggggacctggggccgggaccagagcggagcagagaggaggggaaggaggattagcgagaaaagatttcaaaaaaagaggctctgagaagtctgaggagagtctggggagattgctggaagaaaggaatggtaggagaggaagagtataaggcactaaagagaggggaggtaggcgcagccttcagaggccgggcagggcagggaaaatctgcctgactagatgggcccaggacatctgaacaggatgattcccggaccaagacgtggaggacgatcaaggatacat

SEQ ID NO: 236119 - DNA, 50 bp, Homo sapiens
  chr12:6450524-6450574
  hyper
gccagccagctgaccggagggacagaattcagaaccgtctggactccccg

SEQ ID NO: 236120 - DNA, 315 bp, Homo sapiens
  chr12:6450830-6451145
  hyper
gccaggaccaggcccgggcaggagaggctcggccccctcccggagagggcccacgccagccggaaggtgcctcgcccaccagcccactcttccctttgtccctggtctcaccagtggcagcagcaggtcaggcacggtggagaggcccatgccagacagctatggcctctcactcccccatttgggctcagggcagtgtggcagcggcagtgctggggcttcccgggactcggtctgtccaggacgtcccaagtgccttggggtgacagttgagggttgagactcgggcatagagatcacggcctggtcccagtg

SEQ ID NO: 236121 - DNA, 712 bp, Homo sapiens
  chr12:6472464-6473176
  hyper
tttttttttgcccgcgagcccacgaggccccgcgtggtgtcactgggctgcgcgggcgggtcaggaaaggagcggagcccatgggtgggcggggccaggggccggcgaggggcggggcgggcccctcggcgctgcgggcctcaccagctggaagccgatcttccagtccttccagtccacctgggggttgttgtcccgcaagctggaggccacgctacgggctcgacgggccccgtgaggcgggggcgggaccctcaggcgctgcaaggggtgcggcagagtcccccgcaggtcgcgacggctgcgggagccggccacgagagtggtgaaggagctgtatttgtacaggtcaaagagcgtctgctctgtgatgcggtccagctcctccagctcctctttaatttccgggtacctgaaggggcgaggggaagagggtcaggccaggggccctggagcgagtgtctggcccctccggggtcagggtcctcatctgtgccccgggaggccggtccatcccggagaagcctgggcggggctggggtcgtcgtggcgcctcctggccgtccggcggtgaagggtaaacaggtgtgtccgccgggaaggcggaggccacggcgagcccagccgggacactgtggactgtttattgaaggagagaggcaggaggcgcctgtcgtctgtggggcgctctccccctcgcccggacctagaa

SEQ ID NO: 236122 - DNA, 216 bp, Homo sapiens; identical to SEQ ID NO: 202863
  chr12:6560780-6560996
  hyper

SEQ ID NO: 236123 - DNA, 224 bp, Homo sapiens
  chr12:6561338-6561562
  hyper
ttccgccgggcctcgcaagcagcgtaggactgtggagaagggcggtgggcaaggagggaactcgagagcagcctccatgggcacacaggagggctggtgcctgctgctctgcctggctctatctggagcagcagaaaccagtgagtctgggagtcggggagagctggctgggagaagagctactgaagccccagggtgccaccctccccgagattccagaagag

SEQ ID NO: 236124 - DNA, 233 bp, Homo sapiens
  chr12:6579634-6579867
  hyper
cgggagcttggggcgagagttgtcaaggaggtgccgagcccccacaccagagtcaactcacatttttctgacagagagagtgagggtctgttcctctccggaggctgcggcgagacacccggtgagggacgctgcggctgaagtggacggaactgccaagctccgcctcgcgccgactaccccgcggtctagctgcgctggaacttactgcagctgccgcgccggcctccgcc

SEQ ID NO: 236125 - DNA, 1299 bp, Homo sapiens
  chr12:6664243-6665542
  hyper
ttctgcattctctgcggattctagtctccctgcatccaattgcttccaagctcctcattacacagcacaaactttactctcattcttttcacccctgattcttcggaacccacaccaactcgcggcccgttgtgagtggtatgacacagagagacctgtccccctttcccaatccctacctccgcttgtactcgtcccgctcccgcttcactttggccagcacgttgtagagagcgcggatctcgggcgtgatggtgtcgatctggacgcccaccccatccgggtgcacccacgacaagccaggcccttgcaccagagtgggctccagtcccggcccgagccggcgggcgtgcgagaacgaccagatggtgccgggcatgaagcgggccgacgaggaataggtggtggaggtggaggtggaggacgacgagaggctggccgcggagggcgcgagggggccggccggggagcgcgcgggcgagcccagcacgcgcgccgaagggctgcagacagcggccggccgggcgcccagctgcagccccaggggccggatggggctgacgaagccggtctgcactgcctggtcgcgacgacccaggccccgccggccctgcttaccctcctccagcgcttgctgcagttgcttctccaacagccggttccggcgctccagctcatgcaccttggccaggaagcagcggaaccggaggttcagggtcttgagcacgttgatgttggagcccaggtcattgcggagggccatggcggcaggcggggccgggcccggcccgggcggcgagtaggcagcagggccggccggcgagagaggcgccgggggcaagtctcctcccccggcgaagtggtcgcctcccagtgagtcccccagtggcccggccaggccctgctgctcctgctgcaggaggaagaggttggggccgaataacggattcatggctgcgccttctgctgggagatgcagaccggtgcaggagcagggatggaaggcgagccagaagagccaatgcggcgccggcgggacagagccgaccaatcaggcggctcggcagcggggcagaggtcagggggcgggccgaggggaagccaatgacaggctccaattggaggccggaccctggacctttccgggtctgaggccgagccctgtgatgaggggagccaccgcctggactccagccggggtggcgtaaagcccaggacctccagtaccccatgggttctggtggcaagcccatctcccctacacgactttttttttttttgagaccgagtctcactgtc

SEQ ID NO: 236126 - DNA, 259 bp, Homo sapiens
  chr12:6772303-6772562
  hyper
gaagtgactgtaacgcgacaggggccgaagccattttgcggctaaagcctttccgcccttaaaaggagaacttccgcccttaaaaggagaacttccgcccttaaaggagaacttccgcccttactatattaccgccggtacacatccgcccgacactgaaacttttccttttgcatggtagccacgaccgcccacagtgaggcggctgtagcccgcttccgcccttacagacaccccaggacgcgaccgagacaggtat

SEQ ID NO: 236127 - DNA, 339 bp, Homo sapiens
  chr12:6798812-6799151
  hyper
agcttctgcccagcgactgggaagaggggatgtgacgctatagcggaagtgaaggcgggttccgctaggggcaaaagctgaaaccggaggactccggccctgagcttccggaagggacatctggggaaggtgggggggtggaaacgcgacaggttcatgaattatccatcaaggtaggagaggaggtgtgggttcttcagatgctgggaccccgtttctcttccctctggatgttgaataagctgatgtaggaaattaccattattttttctgatacccccaagaatgtctcaatgctttgaatatgcgggaaaggactaggacgtatccttgtttttc

SEQ ID NO: 236128 - DNA, 341 bp, Homo sapiens
  chr12:6832842-6833183
  hyper
tgtttcctcatcccgtttttttccctcttcttcactccttccgttacagcttttctcttgcctcaggtacccagtgcagtcctgatctccagctctccagcggcttagaacagacacagaatgggccgggaccagggacccaccagagacgtctgtagttaatagctggcgctcttccactaataaagttttattgaaataaagcatttaaaaaggcgcccgtcattcttcccccagcgaccaatcgaagagtagaatgcctgcgtccctcactggagcttcagcggtcggaacgcgggggtggggcatgtcctgccgaaatttgcgtccttagagcggaa

SEQ ID NO: 236129 - DNA, 54 bp, Homo sapiens
  chr12:6862687-6862741
  hyper
cgacgaggcggggcggatccctggggggagctttaagccgactctactggagaa

SEQ ID NO: 236130 - DNA, 549 bp, Homo sapiens
  chr12:7260779-7261328
  hyper
acttcccacaaccccgggaatctccctggccacagtcctggcgggaccccccccatccccagctcactgtgacagagtcccctgcacagtcctgggacggctccaggtcgaagtcctggaagacgagcctcacagcaaagccctctggagccttgatgtccgtgctgctctcttggcctttgccatacggctctgggtacccgggggatgtcagctgctggggtagctcttgggccaagaggacggagccccgggttgggcaagcctggaggactccccagagaagcagccaccacctgtgagttggggggagggcaaggtggggccgcgcagctatggccggaagcctgtgggtgtgggaggagcgggggagccgcgctaggactcagaggcctcgcgaggcagggctagaagctgtggcctcacccttgaggcccgggcacttcccgtctcctcccttgctccccttcctcaccccaatccctacagcctcccgcgcagcctgagctctaggattgtgggttttccatcctccgaagacatcacctt

SEQ ID NO: 236131 - DNA, 505 bp, Homo sapiens
  chr12:7282302-7282807
  hyper
tcgaacctgccatcgtcccgggcttcagaatccactgggcttggttcatcatggtttaaggtgaaattcggggcgaaggaggcaggacaggtaggcaggaggaggcggccggtcccgacaggtgcgtgcgcgaggggtgcacgacgtcctgcccctccttgggtcccagagcctcgataccgccctgcggaccgccctgtggcttcctcgcagccctgggctacaaatgccaggatttctcaggctcagactgagggttttacttcacccttcccagagggcacgcagcacggatctgtggatggaaggggctgtggaaacaggttatggcagagttggggggcggggtgacgcggtgccacccctcctggccgccctcaggtcccgctgacgtctctcttccccaccccctggcttctggcttctttctccccacgtccctcttctttcccaccccctccgtggctctccagcttcctccccagcccccgcagttcctcggctc

SEQ ID NO: 236132 - DNA, 45 bp, Homo sapiens
  chr12:7342757-7342802
  hyper
cctttgaggggggcggcaggagagagtaccgacctccctcgaact

SEQ ID NO: 236133 - DNA, 225 bp, Homo sapiens
  chr12:8088727-8088952
  hyper
caagttttctccacgtcctcaggaaggatccaaagtcttaccattacagcatctctgggtctcgctgggatcatgactatttataatctccgcaaagggtggagcctgaaagggcgacaagcccccagccccaccccaccccaccccacccccctgaagcaatcttgtgatctctcggaattctgtgttatcagaactacccccgcccccgccccacagacaata

SEQ ID NO: 236134 - DNA, 145 bp, Homo sapiens
  chr12:8113445-8113590
  hyper
tctaccctgtaggttagccccgcctgctggcgtcttgcttttgtaaaaggctgcgtaagcaagtgcagacgtgagttgcagatcatcttgaatctccggagcgacaagctccatcactcaaagcggatcaaatactctggtccct

SEQ ID NO: 236135 - DNA, 247 bp, Homo sapiens
  chr12:8185699-8185946
  hyper
tcctgcctagaggcgaggaagacccctgtactggccggggaggagacccccagaagtggaaagaagggagctttccgtagggaagcagagtgagaccaccctagcgcgcccccgcccctccaaacacacactctcaacagttcaggactttggaggcaaagagagacggggctgtgcctgtggagtaggcaccctcggcccaccactattcacaggagacaggagtccttacgttcagaagccactc

SEQ ID NO: 236136 - DNA, 1664 bp, Homo sapiens
  chr12:8849730-8851394
  hyper
caacaaaggctcagaggaagcgtagcaactaacttgtccaaggtttacgccggtttctagggggcagagctggcgctatccaccccgcctgtatctccaaacccgcttcagccaggaaatttatcatgtggttttaaatttgcctctcaatatacagaggtactgtctttactccagtcccggataaagaccttctaggtatgaatgatctttgtctccatatctttgcctaccggagggaggaaccaccgtaagcggagactccgggcggcggccggcggaagggctgggcgggaggcgtcgggatgccggcaggaccctgcgcccgagggggtagggggctcgtgtcggggttccaggcgcagattgatggggcctaagcagggaatgtgagggcggggagggcgtacaacggaagggactaatctcgcggtttcgagttgggagcaaacctcgccccccaccccccccatccgtttccctttctcagtgaagacggtttgggggcgggtggggaggcgcgtcctcggagcgccctcgcgctcccttttcgctccccgcgcgcgatccatcgcctctcttcccccgaggccagcgatggctcgggtgcgggcgaggagctgggagggcggctctcgacgcaggtgtcagatccgctcggcagtgctcggcgcgctggcccggcccccagctcctccggccgccgccccccgcccgccgcgccgcggcgccaggagggcggggccggggcgcgcgccgctcctcagcaagcgggcgggcggcgttcggtctgagggagcggggcggtctccgccggcgtcgcgcgcgctgtgtgtgagcggggtcgcgcgcgcgcgcggcaggcgagtgagggaacgaggagcggccgggtgtgagtgtgtgggagtgagagtgtgtgggagtggggtgagggagaagctgacgggacgcgaggctgtgagaaactgggcgagtgtgcgaggacgcccggccagcctgcgggagccgcagtcggcggaggagaaaggaggcggctcccggtatcccgaccccctccccctcctctccttcccccacttccagccgcccggcggcccgcgcttcctcgaaggccccagcccggctcagtcggccgagagcgagggaggagccccccgacccaggtgagcggtacgaccgctgttgccctcgggtgtagagcagtgaggcgaaggcgcgccctcccgagtgggcgagttcagcggaatggatcccccgattagcgggggctgggccggggaggggaccggcccgagcgcgcccggggtccggggctagttgaggccggtggtcgccgctccgcggagtcggtggggagcgaggcggggcccggccttcgcgcgtgtgccgggaggcgccggcccgtggcgtgtgcgtgcgaccgggcgagccgtgtcgagggggcggcgacttcgggcgtgtaaggagtatggtttccccgccggcgagggggtgtggtaaccccgggaacgccggctggagtcggacccgcgggctgctgacctgtcctcgggattgcggcgacactccccctccccccccttcccacaaattctatggagcgaccgcgggaggaggatcacgtggtgcggtcccgcagctactgtattcgattccacgttttc

SEQ ID NO: 236137 - DNA, 488 bp, Homo sapiens
  chr12:10306047-10306535
  hyper
cgagctcgcaacaacgtcctgtggtgtggcccagcgcggggagctgaccccaccagctccgctctcaagccttcggagagtcctctccagtcactatcgtcattcccgcatttcctttgctaggctgtccgggctgggcagctccctcaggcggacacccatggctggcagaccttccgcgcctgcccctaatctgggcatatcactccctcggttttctgagactcgggactccttgcccgctggagcgcaggccatgaatctgggtcccgcactgcggcgctgcacgccgcagcccagggctttggccccagccagcacatccgccatcctgcaccccaggttccggcacgggctgcgacggggcctcggaactgctcccaagcggctgggaaagaactcagtcaggcatgtcggcctgcaaagcacccaggatgggcagtggagtctgcaccgttgacaggctcctagagcggccaggcagagga

SEQ ID NO: 236138 - DNA, 99 bp, Homo sapiens
  chr12:10516946-10517045
  hyper
ggagcctaactagactcacccgggacatgagagaggctcatttcgtccaatgaggaatcctggggcaaggaaggtgtgtgaaagtgtgtgaaagcgatg

SEQ ID NO: 236139 - DNA, 159 bp, Homo sapiens
  chr12:10517105-10517264
  hyper
tgtgtgctctgaggcgagtgtggggggaaatcagacctaggacattgcatacagctgataggacgagctttgcagctgtagcaggctgtgacaggggaagacaccttcctggctaagcagtgtccgaaactcctgtaataggaccgggtctgctggacc

SEQ ID NO: 236140 - DNA, 155 bp, Homo sapiens
  chr12:10517555-10517710
  hyper
ttgactcatggctaaatgtacgcagccctgcctagcagtttattgtagaatgctcgcagctcacgccgagataaaccaactgtgctggcagctacggagttaaagggaaagtcacagaggcttctagcaccaccgatccaaaagtgaaagtgaaa

SEQ ID NO: 236141 - DNA, 234 bp, Homo sapiens
  chr12:10766266-10766500
  hyper
gaaagccgagtatcgcgtgagagtccggaggcgctgaagggagggtcgcagcgccgtgactttcgctttactaggaatggaggcacattgttttcaaaataaagattacattatactagcaaagattagaaatgtgagcatatgatagtcttttttatggacttagagctaaaggtttgcaagtcacttttacttttctggtctcccaatccttgcggcgtttgtgaggtgggt

SEQ ID NO: 236142 - DNA, 290 bp, Homo sapiens
  chr12:10826739-10827029
  hyper
gaagggaagtctgcgggctccgaggtttccgggactcgccacactcgagccacaggaaacctctgctgcaactgtaaaggctggacttgttgctgatctatactcatttcctactctagtgattgctagatgtcaggtatcacggtgactccagtccaggtgaaaacggagtcacgatacagggcaacagcgccacctcacggccggccccgtagcagcggcctccattggcgcctaaaaatggtcaggattcacattcaggtggattattccgcgccaggaacattctc

SEQ ID NO: 236143 - DNA, 903 bp, Homo sapiens
  chr12:10875354-10876257
  hyper
ggtgggagatgtagcgcgagctgcccacacgtgctccgcggccggctgggcccgccccactacggcagcccctgccctccctggcctgactcaccgagaacttttttctccgcgtcttcgctgccggcggcggtggctaaagaggcggcggccgcggtgcccgtggctgcgggggccgcgtccccaccggggtttcctgcgacgtgggcggcgggcgccggggccgcggcctggggcgcaccgctgcccaccgggctcttgggcgcggggtcctggggagccgcggcggccgcctccgtcggagcctgcgggagggtggtggtggtggtggtggtggcctcgcccgcctcactcatgcctcctcctcctctgctctcgctcaggcgcctcggtggcggttggtcggcggttagcgcggctggtggtcgcggcggccggggctcgctctcggggaggccggggcggatctcgcggcgcaggcggcggcggccgaggtggggtcgcgcggcggaggcggctcgagcttcgtgctgcgcgctctctcttgggctcctcgctcgatcttactgccccaaaaatggccccgcacaagtttttctaggcggcgcaccggcccgggagggaagggcgggcgaggggagagggtggggaaacttggctcgggagtcgggccctggactctcattagcatttaaaggcgcccggtgcgctttctatggctccaatccgccgggacgcgagcgcgcgggtcgcgttgcagaaccaaggaaagccagggtgaacggggcgcccgggttgtcttctggagcgttccgaggagcccgcgctgctgaccctttgttggagcggggtgcattggctctcctccctcaacccgtcttgacacccgcagctgacaaggag

SEQ ID NO: 236144 - DNA, 33 bp, Homo sapiens
  chr12:11803181-11803214
  hyper
gttgcagttgctctgttcgcaggaaattatttg

SEQ ID NO: 236145 - DNA, 1168 bp, Homo sapiens
  chr12:12419421-12420589
  hyper
gtccgcattgtggccgggcggtgcacgcagcccctgctcccgggcccctttctctccccctccccacgaccaggcctctccccgctcctctccccttctcccttcctccgtccctcccctccccctagacacatacaacaaggccacctccccccgaaccccaccaactttccagtgcccccactcttcccacctctcaggagcacacagaagctgcaggccaggaggctcctcaggacggcccccatcttcccttctcgcgttctcttctctcaccggcgaggggtggccagaagtgggggaggcgaggagccggggcggccgccgcagcggcagggctgcacgctcatacttcccagcttcccagcgagagaagaaagaaaggggcacgtcaaggttccgcgcgcgccgccgccgccctctctaccgcgccgctcggccccgggctcgcgcgacgccagcgtctgcttccatcccgccgcctcctcccccggcgccccgcttcccccgcgcagctcctcattcagcctctgcctcgcgcagcggcgcagggatacggtcggcaccgcctcctagggtcgccgcgaccgtgtccctgcgcgcaacgagccccttctcccggtactgcctcctgtacggccagggaagggagtcggcaaccgcacgcacagcctctgcctgagaccctgggagaggttctgggctagcagaggcgaactgggagggaaagcctcctcccggtggcgcattccagcgggattctttcccggaccggccgcttcggccctccccgcggagggcgtgaggcggcgttgaacaacattggagccggcgtggtcgggactactttctgcggctcggccgggcagccgtctgccccgctctttgtgcggccgccgccggcagggccaggtggggctccggtctcgcgcccccagccacctgagactgcccagccgcggtgcacgcgcggggagccacggcggatcccgttgcggggtgatgagctccgtcttcggggttggaaatcggtttcagcatcctttttttgggagggcggaatttttgaacgctgtttacaccggctttcagcgtggatctggtgaacgatattaaaacgccaattcaaaactgagattgtcatttttctcccgccttcccagaaata

SEQ ID NO: 236146 - DNA, 267 bp, Homo sapiens
  chr12:12503204-12503471
  hyper
ttgccgcgggggaagggcacgttcctgccctgcaacccggagctgcttcccggcaacattagcgcgtccctccccgcggaggctccgggctcccggccccagcgctgagccccgcagggaggtggctccccccaccgccccgcgctcccccccagctcagccacaccgctgaccccgggctgggcgcgctgcgagggggagtgcgtgcctccctgctggtggcccgagggtctgcaggtgagccttgcctcgcggcccgcgcaagtt

SEQ ID NO: 236147 - DNA, 206 bp, Homo sapiens
  chr12:12510050-12510256
  hyper
cagtgagtgaaagcggcgccgcccgccggccgcaggtgcggcaaagccagtgtcatctgccggttctcttagggctcccggaaagaaggagggctagccgcgtgcgttcgcgccgcgcctccttgcgtttctgttccccaaatagggcctctccttctcccgccgcccaggcccctgcgtgggctggacgcgtcagccccacacat

SEQ ID NO: 236148 - DNA, 219 bp, Homo sapiens
  chr12:12715424-12715643
  hyper
aggtggtaataatcgtttaaaaactgattaaagccccccaaacactgatacatagaaagagggggaaaggcgggggggtggggtggggggttgggggaaagagaaagagtcgctggtcaggaaacttcaagcgcggatgaggtcattggtttaaaaataaagagatggcgtcacttgaaaccaatcccagtgaatgaactcagcggagccccggggaaa

SEQ ID NO: 236149 - DNA, 292 bp, Homo sapiens
  chr12:12764617-12764909
  hyper
cccgcctcctcagcgctagctagtaggcaaaaggaaaacagctgccccttaatgaggctatgtggacatcgtagttttttttccagtcagtagcgcagagactgtgataagaaaaatcacaattcccagaatgccgcggtgctacggcagccgaaggggccattccgtgtgcagcgctcccgcccaccctccggtctcggcggctctccagagcgtctgtaaacacccagagactgtcatggagggggaggaggaggcggcggcggcgaagggaggcgtttggggccgcctc

SEQ ID NO: 236150 - DNA, 421 bp, Homo sapiens
  chr12:12871738-12872159
  hyper
aaaatttcccctgcgcttagattcttctactcaaaacaaaagagccaacagaacagaagaaaatgtttcagacggttccccaaatgccggttctgtggagcagacgcccaagaagcctggcctcagaagacgtcaaacgtaaacagctcggtgggttgatcactaaaggagcacgcactggaacccggggccttcagacctcacgatacctgatcttactggttgctggcaaattaaaagcttatggggttttgttttgtttatacttcgtgaggtcaaaaaagtagcaatggggaaggctggggatacggtaattcctcagagtttctatgcccagagatactttctcttcaaactgttgaccagagcagctacttgtaacccaggccccatcgggtaggaaggtcgtttccctgtgagt

SEQ ID NO: 236151 - DNA, 103 bp, Homo sapiens
  chr12:12876593-12876696
  hyper
gcgttttagttatgcgggccagggagaagtggatgctcgccgcgccaggcacgtccacaggaacgcagccccgagtcaccgtgtccttcgtcctttacccgcc

SEQ ID NO: 236152 - DNA, 127 bp, Homo sapiens
  chr12:12877617-12877744
  hyper
tctttgcacagaaaaagtgattctaaatctcctctaggatctcctgtctggtgttcagagtatgaatttctttttaaaacttgctgtgtctttcacctgggccacaccctacgcccacccaccccct

SEQ ID NO: 236153 - DNA, 410 bp, Homo sapiens
  chr12:12939505-12939915
  hyper
ccttctaataccacgcccctcccagtttaaatcttatttaacacatagctgatgaagcccatcgttaacgttccctgggagagaagcagaagatagcattattcctatttccatatgcagagataaggtcctgagaacttgtgtggctccccccggattccagaacaggtctttgagaactcgtctcatgatccactggaaacagacccgttcccctagcgtggcagtggctgctccgctgaactcgtgccaagttcccgctggcgtccgggcagcagggcgggagcggcggctggcacggagactccaggctgaccgcgtgtctatgtccccgcagggaatggagaggccggcggcccgggagccgcatgggcccgacgcgctgcggcgcttccagggactgctgctgg

SEQ ID NO: 236154 - DNA, 443 bp, Homo sapiens
  chr12:13044060-13044503
  hyper
agctgctgcaatctcgcgggctgggcccttgccccgggtggacccgagtgcctgcggggaggcgggtgtggctcccccgggaggtgacagctggcggggcccgtaaggagctggtctgctccggctcccctctcgtagccggcgccctgggaccagcgcgtgagcacgtctcggaggagtccgatgcgctgggcagggccgggtggtcacccccgcccagcttccaggggtgactgtgcctctgacgtcagacggtttttgggtcattccctggcacggggactttattttcataacagcatgaagtgccgtggaactggaataggcgtgtcctctccctcgaccctccccctccttgtccctctgctcacccctcgctcgttccctccctccggcgagggccgcctttataacaactgctcagagtgcgagggcgggatagc

SEQ ID NO: 236155 - DNA, 94 bp, Homo sapiens
  chr12:13069330-13069424
  hyper
gtttccactagatggcgctgacacttcaggcatcaaccctcatggcctctcagccttgcaaaggcagccacttaaagtcggtgtcctgtgtggg

SEQ ID NO: 236156 - DNA, 31 bp, Homo sapiens; identical to SEQ ID NO: 202886
  chr12:13197534-13197565
  hyper

SEQ ID NO: 236157 - DNA, 244 bp, Homo sapiens
  chr12:13254493-13254737
  hyper
gagctgggccggggcgctaggccacctgaggcgcgtcccctctgccgcctggcgaggctgcgcgggagggcggagagactgggtagtcggagggattccttacacccaggccggtgggccagggctcgggatgtgtcgagctgctggagtccaaagtcaggcatttccctgcctctgcccggtaaagctatgggtcccaggctcccgttctaagggaaggggatgtctgcgtctcattgggaag

SEQ ID NO: 236158 - DNA, 505 bp, Homo sapiens
  chr12:14133241-14133746
  hyper
ccggctccgtccctcggtggagcatggtcattcccaaagcgtccccttcctaagggggaaaaagaggcggtcagggcttgattcgcgtgtcccccggagggtgagaaaaatgcattccgaaaaagatatcaattcgttttaaggaaaggggggaggaaaccccgcatttcccacagagtgcacacgagaggaattgaaaacagctggtaccggtctataaataattcagaaaaggtctggctataccattcctgggacaggcacggatgagaggtgggaaagccaacctgaatggaagaggagagagggagggagcgagcgaaggagggaagtgggaaggaaggaggaagggggggagaagcggcaccatacagcaacacacactcacacacacgcagaaacacaattcccacttaactcgccagcgagtgcggcccccagccccatctgcattgctgctgacttgtctcgctcgctctccccatcgcctccagcagcagcgccg

SEQ ID NO: 236159 - DNA, 86 bp, Homo sapiens
  chr12:14134106-14134192
  hyper
acctttaaaaaagccacgtccaaattagcaagtgccgggttctgctggatttcagagctttacctcatgccagattcgttcacgat

SEQ ID NO: 236160 - DNA, 530 bp, Homo sapiens
  chr12:14134732-14135262
  hyper
tattaatcaccggggacggggggaggcgcggggaacgcaggttgcctggtctggatttgggtctcacactcaaaaacgtgccgcgcacacacacacagacacacacacaccccctacctcgcacaccctgactccggggggaggagaaacccacgaagctggggaagatactgcttctgctcccaggggcgggtgtgagcgcgcgtgtcctctttctccacaccccccaccccaccccacccccaagcccctgcaccccctcactcctcttgctaagactctggcggaggcagcttcccacgtcatgtgctggggaagtggggtggtaaggtggatggaagggggacggaagggggaagaagcttagcccgagtccgtggcgcctcctcccggccgcagcggggaacagcaccgacggagagcggctgaggggcgaggggagctagacagtgccccccgtgggcggcccgcgggctgcggaaagcatctccaaggcggagctgtagttcgaaattgaagacccttgctgt

SEQ ID NO: 236161 - DNA, 43 bp, Homo sapiens
  chr12:14518512-14518555
  hyper
atagcacagtgggcggggtacatagcacgaccccccggagccc

SEQ ID NO: 236162 - DNA, 257 bp, Homo sapiens
  chr12:14520248-14520505
  hyper
ggatttttaaatgacgtcacatatgagatagaatggaggtaggaaagattcttctttttttctcaagagaatatttgacctgatgtaattcttggatctctgaggtcttctacacagaagtatatttagagagcagttgtgtaattttctcccttttatgtttctggagtggttacctagcagcccctttctaccacatgctatttcaggcattttcgagttgaacatacacataaatatttcggttaacaaaagaa

SEQ ID NO: 236163 - DNA, 425 bp, Homo sapiens
  chr12:14720395-14720820
  hyper
gagttcacccaggaaccagacgcccgctggacgtcaactcggccggacgcggggcacgggcgctaacaggctcctaggagcctccccgggcgccccccgcccagggcgcgctctgctcacctgcaggtttcggcggctccgcggtgactaacaacagcggcagcagcagcagcagcagcagaagcggtggcggctgtggcagccccgggcgcccgcccggaccgccgcgggtcatcgctccacggccgcgaccttcctctgcgggatcaggcggccgcggtggcccgcggtggcagaagttgcaagagaggctcctggcctactcaggggcgccgcctctccgaggtggggcgtcctcaactttcctctttcttgagcccggcctgctccgggctctgaggggcgaggacgcttcacgtggtggc

SEQ ID NO: 236164 - DNA, 55 bp, Homo sapiens; identical to SEQ ID NO: 202888
  chr12:14923205-14923260
  hyper

SEQ ID NO: 236165 - DNA, 150 bp, Homo sapiens
  chr12:14924062-14924212
  hyper
tgtgattgccagtcgcagaccagggcttatagtctctcgatgcggacctgtttgaaaacatcaaaaaagtgggcggagctctaggccccacctctggagacatgctatagttgttaagtccaggaagcagtcagcgaaaccagcctgatt

SEQ ID NO: 236166 - DNA, 1215 bp, Homo sapiens
  chr12:14927117-14928332
  hyper
cccaaagactgagccggctggcctcgttatttatgtgagcggctatgtaaatgaggattcggagattgctctattgattggagagagctggaggaggcggtctctcttccagagcgctagttgggagcggagcctgcctgtcattggtcaccagagccaatggaaaggggctgccgcgcggccgtaaagagtttgtagaggcagttcgggtgcggtacgttgcattccggtaccggacgccgagagcggtttgtctccgtctctggagttgtaggcgagaggtgatcatgtccggtcgcgggaaacagggcggcaaagtgcgagcaaaggccaaatcccgctcctcccgcgcgggcctgcagttcccggtgggccgagtgcacagactgctgcgcaaagggaactacgcggagcgagtgggcgccggggcgccggtgtacctggcggcggtgttggagtaccttacggcggagatcctggagctggctggcaacgccgcgcgtgacaacaagaagaccaggataattccccgccacctgcagctcgccatccgcaacgacgaggagttaaacaagctgctgggcaaagtgaccatcgctcagggcggcgtcctgcccaacatccaggccgtgctgctgcccaagaagacggagagtcagaagacgaagagcaaatgaccctgacgccgccctcagggagctggctcccccagcaaaggcccttttcatggtcgtcccgcaatgcttttgaatgtgctggatgtcatggagggccggtgacatctagcggggaggtgggcggcgagggtcccggcgggagccaataaagttggtgaaaatcgtttggtcgagagagctgtgtagtcgcggggacatgtcggatggccccaggggaggggggcgaccgggaaacccctggagcaggcactggtgggtgggcttgagccactctggacggctttagtccgcaggtcaccctcgaggcgtcaggggagggtggcctggaggtgggcagggtggaagccacctcgctgtcagtagggcaaaggggaggcagagtcggtgcggtgaggcctccttcggaattatttttacttccctttcacagagccttcgctctcctgccagtttgtgagcactcaggaccaagttctgggaagataccgtcggatcgagctgagctcggggcaggaagtgtctgcggccatatttttca

SEQ ID NO: 236167 - DNA, 538 bp, Homo sapiens
  chr12:15374053-15374591
  hyper
gcgcgctcagggctcggaatgggtctgcaggaagtcgtcccgaaagagctgcctggacacgtgcgtgacactcacctgttcacactctccaggccaggagagctacggtcctctgcaagttcggaatgggtcccccaagatcgcgaagccctcccacactgcgcagcccaggcttcaggttgcgtttgcgagttgctgggctgcggtcgtgggtgggactcgccgcagaagcaagtgccagtggcccggcgggggtctcctcactcgcgctcgctccgactagcggcggagggactgcggcaggacgcgagctgagcccggccaaggccgctgcgctcagcggccaggatgctgcagtgcggcgcttcggcgccccctactgggggcaggggcaggctcctcccgccgcgctgcctcccaggcttgcgagcttgggtctttaacgtgctgcacccaagacgggcttccctttttcactggttatttccaagcctccaggctcccaccgaagggcggctttcctcggtcaaaaccttgc

SEQ ID NO: 236168 - DNA, 827 bp, Homo sapiens
  chr12:15475222-15476049
  hyper
gcaagcagcgggccgatcctggtggagggttgggaggctgctgtcattttatgggtcggcagccagagtgagagtgtccctgctgccagaggactacggcgggctgggcgcggggtccccgcctctcgctcaccacacagaccccgcgcctcctctggcagccgcggtggtggcggcggcagagcctcgcccactccaatccccaccctctccatccttagtcattaaagaacagcagcgcctggcacgttcttggaggaccccgggcgcagaggaggaaagggagcaggcgcagggggactggaaaggcagcatgcgctcgccaggagcaacctcggcgcccagggtctgaggctgcagccccagttcgccattgtgagccgccgccgggggagtccgctagcgcagccgtgcccccgagtccccgtccgcgcagcgatggggcacctgcccacggggatacacggcgcccgccgcctcctgcctctgctctggctctttgtgctgttcaaggtaggggagctcctccacccctttttcccagcggtccgggcggcagccgcgctccggcgccctcgctctgccgttgggagcggcgcgccccagggcacgatggcccagccgcgggaagcgcctgccgtgcagcctgggcgcacgctttgttgtcctcgcgtgtgcgtgttcctggtggtcttgagaggtagggggcggggggaagaataagggaagtttgctccctccggctttcgccctttgtgctcttttatcgctgctgaaatccacatcaaaggtgggcttgttggatcgtgctttctcaggcaaaatga

SEQ ID NO: 236169 - DNA, 306 bp, Homo sapiens
  chr12:15941609-15941915
  hyper
attcgagggggtaaacgggggtgggaccctgccctaaagggtcattttgaaaagaacccctccccatttgaggcgggttggcagagcagcgcacaaatcccaagtctaacgtaataagccgagatcgggatactcggtctgcagtcgccccacggaccagatgagcgcaggtgtatctgcggaagctcaggttaccatgaatatcactgggccacggcgaaccctccctgcccagcctcccggagccctgggcgcgggtctgcacgggccccacagcttgcccggacccggcgagcggacgcctcc

SEQ ID NO: 236170 - DNA, 140 bp, Homo sapiens
  chr12:16064015-16064155
  hyper
aatatttttattacgtgcaattggcaacttcagtattttttaaagggtgttggtagcattatttccgggagctacttagcgctccggttcggtacctcgtggagaagacgggggaggggagcagcgagatttccttgcgg

SEQ ID NO: 236171 - DNA, 292 bp, Homo sapiens
  chr12:16064519-16064811
  hyper
ggcacgttcgcgccgcttgtctttgcacctaagcttttactcttgtatgcggaaggagtaggaaagggttagattattatcttcctgccttttcgttcactctagctcgctggttggaaaacccaacaacccaaaaaacaaaacccaaaacaaacaacccccaagcaggtaaaaacagataaaaaccttctttctcctccttttaatagaatacttgtgtaatttaatgcagtatttccgtagataattttaaccgtaaccttgaagtggccgtgctcgtggaaaagttgtc

SEQ ID NO: 236172 - DNA, 646 bp, Homo sapiens
  chr12:16500382-16501028
  hyper
ggaaccagagtttctaagggcgccaaatagaagggctcaaagggaatcagcaggcgatggttactgtgggcgggtaaatcaggtgatttagaggaggggtttggcgaggttggggtcgggctttaaacgtgggagggctaattaacaggagattaactggagaggggcggtgcctgcgtccggcccgcgcggccacagtccctgcattgcgcgcgacccggcggcgggacaggcttgctgcttcctcctcctcggcctcaccgtgcgtactgggaggggagaaggggaccgcatgcaaagggtggcaggcagggagggccagggtgggtggcagatggaagacttgggggggtctctgccagctggaagtgcttggctccacttagcagctaaacttagcttttcaatcgatcgcttttgaaagggaattgtatttctgtccccgtgcgggtaagttttcccatttctcaaactccaggaatgaaacgagagagtcttttcatgcttgagtgatgatttccaaacttagccttttcaagtcaaagtaacctcctgtttgaaagggtcccttgaactctggggaaggaggaaaaggcacgtgtagtaatggaggaaatgcctgtagtttgaacgactgctgttctcc

SEQ ID NO: 236173 - DNA, 540 bp, Homo sapiens
  chr12:16757939-16758479
  hyper
acaccgccgaggaccgactattgtgaagccactttgggagcgggtcggagtggcggcagggggtgggggaagggatgaggacggccagacaagacagggcgcacacacggagcccctcgcagtgtgcaaaatgatggcgaatgacaaagccacatgcttccctaactctgcccgtaatcctaaaatcccagcggccccttttagcttcctggtaacaaatggatttgattaaactgtcacatgcagcgttagcatagcatatcatgttcaatatgaaaaagatcataaatctgacttgtatttcataacagcaatctgagtagtccccgtaaaaaatgtgctgcatcagtttgaatctcaatctattaggatataggcaccttggtccagggaccttccctcttctagccacttctgcccctacccgcctgccccccccccccgcccccatgcccaaacacagccacttttccacggcaaaggaacaacattttgttattatggctgcgtggagagaggcagaagcgtcaacaaggacca

SEQ ID NO: 236174 - DNA, 922 bp, Homo sapiens
  chr12:16758693-16759615
  hyper
agtcgtacttgagacgttccgcgccgcagccgctctccctccttccatcaacatcttccgcctgcatctatttcatgtctcatcataaaaataatgaagcctcacatgatttaaacaaaaccgtctcagtagagctgcagcccgagtgaaagttgcagtgcggagctgggttgcagctccagtttatgcctcattagcagaggttggggaagaaaaaaatacccacatccgcacacgcacgcgcgcacccgcagacacacacaccacaaataagccgacgcgtgtgtacacagttgctgcacttaccttctcaattaagcgatacagggggaggccgttcagtaagcacagtggctgctttgtagcgcttctccttgggaaaggtcaaaaagaagcattgtttgaaaaaaaaaaaaaagacgggggagggaatgtctatttttttttaagtttaaaataatgaggtcctcaaggatacgccaagcaatggtgttgaccgcatctgagccacaggtgtcctccttttaggcaactgcagtccgaggctgtctctctccgtcctggttcaagacaacttaccccagcagcgtgcgaggagccgagctgaaggaagctccggctctcagctgcaaaatgcaatcccttcccagccagacataatacagccaaagaaaaggtcactcagttattagtgagccggcggagcccaggcagcgcttgtcaagaccacagagaagcagctcccttccgatttaagactatttacctctcgcccccacccctcccctcttctttccttctctccctccctctctcgctggctccctcgctcgctctcgtgtgcctgttctgcagctcagtcaagtacagccgccctcggaaagtgcaaagcagccacgagacagatcgggctttgttgcta

SEQ ID NO: 236175 - DNA, 62 bp, Homo sapiens
  chr12:19282247-19282309
  hyper
aacaaagctcagacgctgtgtttttgttgtttgaaagagagaaatcaggggcttgggcatta

SEQ ID NO: 236176 - DNA, 84 bp, Homo sapiens
  chr12:19283509-19283593
  hyper
cgcccgccgggataacgtaaccacatcctccccctcctcccaggagcgctgcctcctgccgtgcagcttcctcctcctaggtgg

SEQ ID NO: 236177 - DNA, 250 bp, Homo sapiens
  chr12:19283773-19284023
  hyper
ctaaagtccccgccagccgcacggaggttgcacagactgccaggaggcggtgggcgtgcgagggggtgtcccgtatgggggcacccgggccctgtttggagggagtccgtggggaagcggctctctcgggtggctttgggagcttgtttgaatgctaagtgtgagtggagctggaaaaggctcctcgtagtttctgtactggtctgggtttcttttatcattctttgtttacattcgtgacttgtttgtc

SEQ ID NO: 236178 - DNA, 260 bp, Homo sapiens
  chr12:19593439-19593699
  hyper
ggaaatctctcgccgtcgccgccgcgcccctctcgcagcgcatcgcggcttccaactctcaaaccgttcccccccaactctcctttccccgccctctttcccctcggcgcttcgctcctcacggacctcaggacggctctaactcggaaacagtccccaaacgggcccagatcctctggcggagcagaagagggccttgatgtacacacgtcggtactcaaggttagcttcttccaaccgtgttcgggaacacttgtcag

SEQ ID NO: 236179 - DNA, 2207 bp, Homo sapiens
  chr12:20521072-20523279
  hyper
tgcggtgggctgcgcggtggatcagcctcagcagcccctgctccagcctgtagggtgaaccggccgctttcccagcaaaggagcaatcgagctgagggtagcgcctcctccgcaggagggggcgggagctcggctgagaaagctttcctagggagttgccttaaagaaagaaagcggaattgtcgatcactccagttgccagttttatacaattttaagcagtcgtcgccactcgtttcccctttgcaaaactgcaaatcaccaccaaccttgcatcaaatagaagtggggagggaaaaaaaaagcaaatctccttctcccttctcaccctccctttcttctcaccctcccttcctctcttactcgctccttctccctccctcccttctgcggctgccgctagtctctcggtctggctctctctccgacgggacttagcaacttcttatttctcagccccttgtccatttttttttttccatcctttgccatgaattggattgacagaggcgggggaggctttgctttctgccccagggaatggcgattcgcgtcctggggccgtgccggggagaatcggccgaggagaaagaaagagtgatagaaaaagagctgcaggaaggaggagaagggagacctccatctgccgcgggcccggcgcgctgcagcgcagcgcagcgccgagctgcgcctcggaatggcccggagcccgccctgcgcccccggctcctccagcgtcagcggctcctgcgcgcgggatgcattgggcaatttttgaaatcctgaagtaggaagagaccccggaggatataagtcgggggtgggggtggagcagagaatctgtgaaagatattcaaagagagaaaaggggaatcctgatcgtttctgcccgtgcttgttttcaacttgagcgtgctagcctttaacttgaagaagtctcattggagcatctagcattctccaggagttattcgaaagctgaaactttcagtggattgtgggcctggggagaagaaggattccgagggtggaattgggaagagcgtgcgtgcgtgtgtgtgtgtgtgtgtgtgcgcgcgcgcgcgtgggtcggggcgggggcgtcggggggccactgggaattcagtgaagagggcaccctataccatggcagtgcccggcgacgctgcacgagtcagggacaagcccgtccacagtggggtgagtcaagcccccacggcgggccgggactgccaccatcgtgcggaccccgcatcgccgcgggactcgggctgccgtggctgctggggagacctggtgctgcagccgctccggagctctcggaaactttcctccgcgctgtgcgcgggctccctgtcctttctgctggcgctgctggtgaggctggtccgcggggaggtcggctgtgacctggagcagtgtaaggaggcggcggcggcggaggaggaggaagcagccccgggagcagaagggggcgtcttcccggggcctcggggaggtgctcccgggggcggtgcgcggctcagcccctggctgcagccctcggcgctgctcttcagtctcctgtgtgccttcttctggatgggcttgtacctcctgcgcgccggggtgcgcctgcctctggctgtcgcgctgctggccgcctgctgcgggggggaagcgctcgtccagattgggctgggcgtcggggaggatcacttactctcactccccgccgcgggggtggtgctcagctgcttggccgccgcgacatggctggtgctgaggctgaggctgggcgtcctcatgatcgccttgactagcgcggtcaggaccgtgtccctcatttccttagagaggttcaaggtcgcctggagaccttacctggcgtacctggccggcgtgctggggatcctcttggccaggtacgtggaacaaatcttgccgcagtccgcggaggcggctccaagggagcatttggggtcccagctgattgctgggaccaaggaagatatcccggtgtttaagaggaggaggcggtccagctccgtcgtgtccgccgagatgtccggctgcagcagcaagtcccatcggaggacctccctgccctgtataccgagggaacaggtaagcactggcaactcctctctcggctcttggaaacttgaaacacttggcaaccggcgcagagtggagagaatccgagcgctgggaactaaagggaagat

SEQ ID NO: 236180 - DNA, 637 bp, Homo sapiens
  chr12:21590454-21591091
  hyper
aagctctgaacaccacgagacaattcgttgcttccgaaacgcagccggcagcaggtactcgagatgagtagtgtgagctcccgagcacccgtaggtcggattatctggtaaggcaccggaagtgaccgcctcgcggctgcttcctctcctggagtccagagtcccgttgctccgccgcgatattcagtaaaccactgggagtccggcagcatggaggcagcgcgccctcccccgacggcagggaagttcgtggtggtcggcggcggcatcgcgggcgtcacttgtgcggagcaggtagggcggtgctcaggcggttccgcctctttccccgaccccaaaggggatagcactggaggccttcctcccaccccctccctttttcttcttccgggttccttttttgctgcgcccttttccgcacttattgctcccagattttagaaactgcttggtggtcctcagatgacctcactagctttctcttaggcgcagggaggagtgggaggcaaattatagccgagaaaccaaagctggctgatccgtgctcagatccttgtaatgtcagagcagacatgaggactttgtatttagacaaaaaattcagccccctttctttttatttttttttctttttctt

SEQ ID NO: 236181 - DNA, 247 bp, Homo sapiens
  chr12:21680359-21680606
  hyper
tcttggtccaaatggggactcgggttgcctgggaaatatctcagtaacccgacctccgctccaaagcgcccttgcggcgtccggtcaggcgcggggctttcctccagagctccagggcccctggctcagcccggggttgcgctgggagcgctggaaactcggcagccccgcgcgaccctatcctggagcaacctgccccctccccacgcccggggactgcgctgtgccgggaggagctgaggtttaa

SEQ ID NO: 236182 - DNA, 563 bp, Homo sapiens
  chr12:21810331-21810894
  hyper
cagctactcgggcacgtgtcccgactcccgccagcaggccgtgggggtgatgtggccgccatgaacccaccaaggacaagtagggcctggttttagctgcaaatgcaacaagtctctccgctgagccgcagctgctaccctctgccttctgctcctccgccagggcacggccccccctgcgccccaaactgagcggcaaagtcagggcccgcggccggatgctcagagctaaaggccgcggaggacagatgtgcttcttcctccttcccgcgtctccccatacaagtactaccccgcacgtcccatcaggcttgcctgtgggccaggattcagggtcctgagccgaaacctaccaggagagagaaggctctggagacctctgtaacagtcgtgcggagaagacaaagtcagctgcgtgcgtctcctccggcgccggctctgcaaggagggaggagggggcggggccccacaaccaccgcagcctcttaggtttctccattgtgattggaaatccgagtaccgcctacccctcccctcggctcgctcaatccccttcaaggaca

SEQ ID NO: 236183 - DNA, 737 bp, Homo sapiens
  chr12:21927268-21928005
  hyper
ttttttttttttttttacaacgaaggaatcaaatatacaaggtgcgggggggaaaaaacccaagacaacagcctgcgggttgcagtagggagtgtgccccgaaaagtccatccatcactgcaagcctctgcggtgttttgcattttaaatcatttacgggaacacggacagcctcccccctccgctcccccggagcagctttgaaacttacagactccgggtagcgggcgcggcggctggacctccttgcacacgccggcgggccgcgggcaggtccctcgctctcccatgctggcgcgcgggaccaggggccgcccaggccggagggacaaattgggggctgcgtgtcctaaggagaagagttaaaataataaaaggtgcaactgaatctaaacgcagggagggctagaggaagggggatgggtgtagatcttcccctccccctgctcagctcaactcccttggccacttcagtggaaggaggagggactgggggggcgggggcgggggggcgatgctccacaaatcagcctcccagttagggctttgacgcacgccagacctcggaagccgacgttgtcgcggagtagggggcgggcggggagggggcgagcgcaagtccccgggaggtagggagcaggccagagggagggacgacccgggggagggcgggacctgcagagccagctcctttccagtagccgcgaccccctgccgccagcgtgacacacaagtct

SEQ ID NO: 236184 - DNA, 1334 bp, Homo sapiens
  chr12:22093940-22095274
  hyper
accccttcacttctcgagccgggcctcgtcccttaattctagaaatagcgatcgcgaaagctaagtgccgagaagtgcgagagagtgcgagggcgtttttggatagcagaaatgttagctcaaaatcgacaacttacagttattcctaaaaatgtttaaatggcattcatgtaaaagacacggattcacttactccgatgacagttttcctcccctaggcgaagcacgcagtgcgccggaacggattatttttagggtggtgggagaccagctgctgcctcctatcgagtttctaaattgcacagactgctctgggccggggcagacaccgcggctgagaagcaggaaactgggcagaagccccgcgcgccgcgcctggggccggagaccttccccatccctgctctgctcagctttgacttggggcgggcgcgacgccgcgattttacaaacccaagtaataggcgtccccttaaacttcattagacactgaaacttggaatatgattccatgattctccggagtcgggttttcaaacgtcaaaacactcaaggtattcttgtttctttgttttgtttttccatgctctgtaagcacccctttattagccacgtaaggaagcggatttggggatttcgctgtttccccctgaacggatccgggaaatgaagggctcattctaggtagaggcacccactgctgggttatgagtgcacgaatgtctcacaggagcaaggctggctcaagtctaattttccgcttttccccggcgacctagaaaacttggtttctctggtggaccagccgccgcgctatcgaagggcgacccttgcccaccgtcccctaaagtgagacgctgattcccatggactgcgtaaacagtcaccctcttctcctgtttccaaccagagacataattaactctcgagataacgtgtttatattaagatcaccccacaaccactcccccgcgaaacacaagccgtgaattttgtccccgacaaccctctttaattaacaccggattttctcaagagccagttttgagtcagcttgagataagcattgttttcaggaactgtcgtattttaataaaggatggtcagccgggcggacttctgcccctgaggctccgcatgccgtcctcaaggggcgccgctgcaggactgcggtctgctggcgctggtccccagatctgaaccctaaacaccggtggcctcgtggcctgtgcgatgcaggccgactccagccctgccagtcccaggggatttctccgccggcgccccactcttgggaaggtcgctgcgcttccgggtgagtgcctgacctgcgt

SEQ ID NO: 236185 - DNA, 86 bp, Homo sapiens
  chr12:22199508-22199594
  hyper
cgagagtgggcggcgcggcctgggcgggggtcgggagagggagtcgggctgctggaggggctggggcctccggggccaccgctctt

SEQ ID NO: 236186 - DNA, 98 bp, Homo sapiens
  chr12:22488435-22488533
  hyper
gacctcaagatgtcacattgccttggaggcgcgcggccttttagattaaaggaccgttggttcttagacgtccttcttgcccttcttgcttgtgataa

SEQ ID NO: 236187 - DNA, 131 bp, Homo sapiens
  chr12:22488713-22488844
  hyper
acaaagaagaaacctggtcagcttagtcatcacgaaaacaaaatctaaggctataactccatttgttcagccgaccaggctgcggtgtctggtacctttgtctagcatccgtctccactgagaggtggaac

SEQ ID NO: 236188 - DNA, 267 bp, Homo sapiens
  chr12:22778929-22779196
  hyper
cttcctctcccctccccctgcgatgtgctttcattgatgcctcacactgcgttttgtcttcccaaaccctagcgtactcaattcccaaagtaatgaccacgaccatgcatcgctaggtcggttcttaggcagcaccacacacattgttttgtttgagtcgatatttctgaattattaaagtcgtcttactgaaattaatacctgatactagaaggagcagtggcttgtgactgtttccttttcatgagacaccgtgttgatagagaa

SEQ ID NO: 236189 - DNA, 199 bp, Homo sapiens
  chr12:24103311-24103510
  hyper
caacttgtcactcactctgtcggtctcactgttagctcgtgctttccgcaaagtggtgcgaacgtcctggcaacccgaccaaagtttcctcagctctaaactccataaaacacgatgtgcgatgtggaggggaataggtatccacatgccaaaataacatacacgagcgaacaaaaacccaaaacgaaatcaaaacata

SEQ ID NO: 236190 - DNA, 148 bp, Homo sapiens
  chr12:24714476-24714624
  hyper
ccccaaagtgcaagcgagatttcccaaacccgcgcttaaagtgacacaacacgtgagtggtcttcacttggtacactgagtgaggtggggggaaaaagtagttgcaattagaattaaagcttccggtctctgaaatccctagaatcct

SEQ ID NO: 236191 - DNA, 36 bp, Homo sapiens
  chr12:24714984-24715020
  hyper
ctccagggtcccccggccagccgcccccggggatga

SEQ ID NO: 236192 - DNA, 60 bp, Homo sapiens
  chr12:24715380-24715440
  hyper
tctgtgtgtgtgtgtctgtgtgtgtgcgtgtgtgccggtgtgtgtgtgtgtgcgcgcgcg

SEQ ID NO: 236193 - DNA, 253 bp, Homo sapiens
  chr12:24716160-24716413
  hyper
ggtccgtggaacctttccgggaggcgagccgcgggctgctgggcgcggaggctggagccgcgagaggttcggctgctgaagcggccactgcctcccagagccaggctccgcgccgcgcgtccccgccgccgccggcactgtgcacccacctactcctcggagattggggtaggggaaaaaagttttgaggcgctctcatctctgcctccggggtggttgaactggtttggttttgtgttaagcgaagccaaaa

SEQ ID NO: 236194 - DNA, 256 bp, Homo sapiens; identical to SEQ ID NO: 202913
  chr12:24716473-24716729
  hyper

SEQ ID NO: 236195 - DNA, 916 bp, Homo sapiens
  chr12:25055614-25056530
  hyper
tcctcgccacgctccggagcgggttacccatgagggtgctagacctgggcagcgggaacctcgaagaggtggagattgcaggctgggactccagatttcgggcagggatgcggggaagggaagacgcctcgctggaggcggaatggagggcaaggcgaaggaggatggtgcaggaaacggcgacaaggcgcccggccaggcccgcgagctaccgagacccgggttccaatcctccccccttccgcaaacgcccgggttcgaggtacctggcgggcaagggccgcagcggagcgaagcgggctggccatggggaggctgcggggacgcggggctgcagagagcggcagtggcacggagcgcgcggctggaagcgaaagcaggcggtgtggccaagccccggcgcacggcccatagggcgctgggtaccacgacctggggccgcgcgccagggccaggcgcagggtacgacgcaacccctccagcatcccttggggaggagcctccaaccgtctcgtcccagtctgtctgcagtcgctaaaaccgaagcggttgtccctgtcaccggggtcgcttgcggaggcccgagaatgcgcgccacgaacgagcgcctttccaagcgcagatatttcgcgagcatccttgtttattaaacaacctctaggtgaatggccgggaagcgcccctcggtcaaggctaaggaaacctcggagaaactacattagggcagcttttccaccgactccaaatccaactgacaaaaagcagtttctgccctcgagagtttgcgggcggggattgacatttgtgcgtctgctcttgtctgccactgaccgctatgtgcaaactgaagggggagaacgtgaatccagcttttagatttccctgcgccacctacccaaaccgaatttgtaactcg

SEQ ID NO: 236196 - DNA, 187 bp, Homo sapiens
  chr12:25102145-25102332
  hyper
gaagattcggagccagcgcccagacccgagcctcactcactgctcactcccggggtgcagggcagaggtgccagtgttgcaagcaaatgacacggttacccccgaatcagccactgtgggtgcgtatccgagtgtggggatgcccgtgtaacatttatatggagacgtcaaggaggaggaaataaac

SEQ ID NO: 236197 - DNA, 33 bp, Homo sapiens; identical to SEQ ID NO: 202915
  chr12:25347677-25347710
  hyper

SEQ ID NO: 236198 - DNA, 308 bp, Homo sapiens; identical to SEQ ID NO: 202916
  chr12:25347959-25348267
  hyper

SEQ ID NO: 236199 - DNA, 223 bp, Homo sapiens
  chr12:25348633-25348856
  hyper
ctgtgcagcgtacgcgtcctttttcctaagagcgccctaaacaagaattgaaaatgaagcaattcctggctaaaatattccttaacatgaagatcgctgaggccccaaagactcattagtttcccgaggtcacagactaattttactaaccacacaacctttagaatttcagtctcctcccacatgaagaaacgccggcaccttacaccgacaggaaaactac

SEQ ID NO: 236200 - DNA, 882 bp, Homo sapiens
  chr12:26111918-26112800
  hyper
agccggtgcggggcgcgcggcgcggggagcgccggggagtgccggggagtgcggcgcggggacgggcgctgggcggccgcggagctccgggtgccgccgcgtccccagcgccccggccggcccctctgggcggcctgcgggggcggcgcagttgcgaaactgagtaagtattaactttacttagcggcggcgatccgggctgcgccggggaccccgcccgtcccgcctgcagcctcggagctgccctccgcccggttgcccctctctccgcaccttgggtacctcgtccgttccgcccccaccctgccccgccgcgggctcccgctccctctgcgttcacctttcctggtgtgtcaccctttgcgcctctcctcgcggcacacaagccgcggactgaaaagtacgagcttggtctttgcttttctgcttcctcccagtgtccttggcaagggagtttagaggccacttttcttgcaaagggaattttatgtctggtttttaaaatattttttcctccggatggaaatcggatgctcgcttgccgggtggcggtttggtgaacgcttttctcctctaaaaaaatattggtttataggtttttaaatttcatttgaactattaaccatctgcattctattctcctttgccgccagtccctttggggaggggagtccagaagaggggacgttcaaagtaattctgacttgcaaactagaaagtttgagagggtaaatcgcacaaagccggaagattcaacttgaagggacgcgagctttgaatgtgggtcctggtgcggcactgggttttaaaagatgagtacttgggttcggaatccagtgttgcgttgttattttagcatcatagagccgcctggtgttgcta

SEQ ID NO: 236201 - DNA, 232 bp, Homo sapiens
  chr12:26277911-26278143
  hyper
cgcacactcgcgccggccccactgcgctggtagtttgctctcactccaggcagtgtttggccacagggcacgcgcgtcgccggccagaccagcacccagctcacgtgcggaacgtaccatccgcggtccagcccggaggggggcgggggaggaggggccgggccgggcgggggcgtcgggagaaggcggcgagagaaggcgaacggcaggagggggcggggacacctgatca

SEQ ID NO: 236202 - DNA, 448 bp, Homo sapiens; identical to SEQ ID NO: 202919
  chr12:26379638-26380086
  hyper

SEQ ID NO: 236203 - DNA, 88 bp, Homo sapiens; identical to SEQ ID NO: 202920
  chr12:26986791-26986879
  hyper

SEQ ID NO: 236204 - DNA, 46 bp, Homo sapiens; identical to SEQ ID NO: 202921
  chr12:27038033-27038079
  hyper

SEQ ID NO: 236205 - DNA, 136 bp, Homo sapiens
  chr12:27091342-27091478
  hyper
agcggagagtggtcggttctgccccacagtaacgcgaggaaagaaatctcgcgaggctggagttctccgggagcgccggtcggaggcggtcggcggaggtgtctaccccgccggtgatggcgttgaacgccactgg

SEQ ID NO: 236206 - DNA, 163 bp, Homo sapiens
  chr12:27166929-27167092
  hyper
gacagacccctggcggattttgacctcgcaagaaatgcaaaagcaactttgggttgcagaagccaggcgccccgaccttaccctcgctggaattcccgaagacctcggctgcaccagccacccggtgttcggatgccagcaccgctacgaccagcagctgcag

SEQ ID NO: 236207 - DNA, 278 bp, Homo sapiens
  chr12:27175266-27175544
  hyper
ctgtatttcaaagcgattggaccccagaccattcccccagttactcaaaagatccagcctctcctcaggtgtagcccgctctagaaaggccgcctcgggagtaccacccactcctgacggggcggggagttctctccgaccccacccgttccaaggacgcagccctgtgattggccatgacgcgtgccagagctgcccagtcgcggaagagcagctgttttggcgtctgtttgctgcggtaggaacatggcggatcggctcacgcagcttcaggacgc

SEQ ID NO: 236208 - DNA, 93 bp, Homo sapiens
  chr12:27397408-27397501
  hyper
ggggaacctgcggcgacggccttggccctcttattccccggggtgatactggccccatgtgtccagagagggagcctcgcacccggggaggaa

SEQ ID NO: 236209 - DNA, 424 bp, Homo sapiens
  chr12:28122217-28122641
  hyper
cgggcaaggagcatcggtgaccgctgcaagccctcggcagcatcccagcttggcagcccctccccctggcctccccaacccggcgccctggggaggatggggcacttacaggcggcggctgagaccctccaccgagcgcccgcaggagggcaccgcgtagctcagcaggaacaccgcgacgctccactgctgaaccagtctccgctgcatcgtctccgctcgcgctcgggacctgcaacagaagggaatgggacccgagtgtcagtctggactctccatctccccgcactactccgctccccctttttagcccgctctcaaaaagcctcttcaacatcaagggcatctcccaagttgaaaagaaaaaaaatttctctggagcctctcagcacttacttatttagcaaccggctactccaactgt

SEQ ID NO: 236210 - DNA, 619 bp, Homo sapiens
  chr12:28122887-28123506
  hyper
gaaccaggccctttcgttccagagccacttgtagcgaaacccacatatatatacatagctgtctgtctacctcctctggtgggctggttgcttccggaaagttgattccacacaccctgagaacaagtttcaagtgcgtgtgtcgtcgatcaggagggccaggtggcggcgagggcgggtcgttagtggcagccggagcggcagggaggcggcagccccgcttcacgggcggggagacatgctggccgggcggcgcaggttggaggcgagttgaaaaccgagcggaggaatgttcacacgctccgaggcaaacctgccggagaagtgagctagtcgcaaagaggtggcgccctaggaacgcgcgcggggcgagcgagggcgcaggcgggctggcgggcgggcgcgcggggggcgggggcggcgacgggcggcccgaacgggccccgcgccgcccgagcgagtggaggggagccccgagccgggaatgagcggcgagcggcggagctcccccctcccgcgctgccgaccccggagctgtcaggagctctgccgagccccaccccggagcccgggccctgtcgcgccatccccgtgccgggggcgtgggcgcatccgcttg

SEQ ID NO: 236211 - DNA, 54 bp, Homo sapiens
  chr12:28124106-28124160
  hyper
cagattcttggaagactgtatccgagtcgctgcagccagcggacagatgcagtg

SEQ ID NO: 236212 - DNA, 1413 bp, Homo sapiens
  chr12:28127762-28129175
  hyper
cctcccctcctcccacccagcgtcctcatccccaccgcctgcgatagacttgggtcgcccattaggaagctgatccgcagggacggggcaggcttggctcctggggatcttaggctccatgggaacttcgggggtctcggggcccgtgagcggatctagctactacttcccctaggttctcctcgggcttcagtccctaagagtctggactccggactgccgcacagaatccttcttgcccggagcggtattattgaggtctttgcgttctgccccgccctgtcccgccggcttgggtgcttggtttctaacccgagtatactcggagtctctggtcctgcgcgcccccctcctcccgggagagccccgtatctggctgcgggtaagggaaaacttcgggaaccccgagacccaaggacagggtcggagggagcgcgcgaacttcctctgagcagggctcttcctcccctcccctctccctccaggtcaatttatgactcaaacatgagataagccctaggcagacggtgacgctgacttccccgtgggggcgcggggagagaaggatgaggcagacgtaccccctccctggcctggccctgtccggggccgcgtcggggtgtggaggggcgactcccttcctccgggagccccgactcgctctctcccagcgcgcctcccctgcgcccgtaaagctcggccctgccggagccccgggacccgtctgttttatttcacttaaagcgatctgcaaagtcaaggccgggtgaggtgcggcgcgggagaggagaggatatgaacggacgtggaacgaagttctgtctgccaactccctccgtctgattcttggaatccggtggcatcttaaaggacggaattgagggcaaggagaagattattaatccccgaagcccgctctgtctatatataactgctcagtggttacagttggcgatcgcagggtgggggttgggggtgtagaccgtgggccatggaacacgtggcatctctccagggcataaaaatcaatctagctggtggctcctatggagtttgtaaattgcgcagagctggctgggggaagccagtgagctgtccatggtggttaaggctcgttgatgtgcgtcctcgggctgtcctggtgaggcacagacccccctaccccaggggccgcaacgccccagagccccagcctgccagcgatccagccggtgtgcgcccgacacgaggctggacgtgtgtttgcacaactccaggacgcgctcttgcacagaggccgaattccagagatagacggaaaaatctcccgattccaaattgtgggtttccttttagttccttcctgaacgtgtctttccccactcaggcaacgtttcacatgctttaagaaacgtccatccattttagtagcct

SEQ ID NO: 236213 - DNA, 98 bp, Homo sapiens
  chr12:29301636-29301734
  hyper
cttttctgctagggtgggtggggaaaggtatgtcccccaagcgttcagttcagactagaacctttgaatctctctcctgtctcggtctctccctccac

SEQ ID NO: 236214 - DNA, 121 bp, Homo sapiens; identical to SEQ ID NO: 202924
  chr12:29534144-29534265
  hyper

SEQ ID NO: 236215 - DNA, 1838 bp, Homo sapiens
  chr12:29935682-29937520
  hyper
aagaaaaactatttcggctggggccccagggtccctggagaagcctaggctctgcgttacctctctctgcaccttctaaagtctagatccagagaagtctggcagattggagagcctctgggagcagccaagggtgcaaggcgggggctggggggctcgggagagttttctgctccctctcctgaacccacgcagccctgtcagctcaaggctcccgcctcgtctcatctgaacgaaacccttaaggggctgatacacttctcatctgcaaagctgcccaacagcctccgagaaattctctacttggaagcatcgccaccaccgccacccctccggaaccctctgggtccgcgctagtcccacttggtcacgatccggcaggcgaaggggtgcggaggcggtttcaccagcccgctcccagccctgcctcgagagagaagcccgctgagagggcagacagttgagaaactcgatcccaactccccagccggcgcctcccgaaccgccccgagagcccagattagccgggcagtggatcccggagcaaagtgccatgcacatcctggagaggagggaggcgtggagggaaagggcggcaaaaatgaaatgcccccaagtcagtcccgcaacttctcccggtccgagggacgggcggagggtagaggaggcagcggcggctagcgcgaggtgagggactcacttgaaggtgaggacgcagagcggccggtaggacttgtggctggtgttctcggccatgcccttgccccagaagtcgttggtgaagatgccccagcggagcggggcgccgggccgcacgtcggggttgttcacgatcgcccacacgtcgtcgtgcacgaactcgccctgcagggagcggccgtagcacaggcagcttgccccggccagcagcgccgcggccccggccggcgctagcccgcagccccgccgccgggagggtgtgcggtccccgccgccgcctcgggcagaggtggtcaccaccatcgcgccgccgccgccgctgctgccctggcctctcccgggcgtctggcatcctcccctaccggggccccggcggcgcgcggcgtctgcccggaggggggctcgggcatggtgctgcggcagctggacccgccgcgagctccccgcgctccgccgccgcctgcgccgcggagttggcccagctgcaaataaacagcagtccccccgcctcccccggccatcgccacctcctccgccccactgcgcatgcccgctcgctctctcttccaccgccccccaatcccgggacgcgggccggttcccccgcacagcccggcgccctctgcccccggcccgccttgcttgcaggtggaccggggttcgcggcgcgcggctgcccgggagctgcggggaaggacaccccaggttcccacttgcggtgtccggctgtgctcacccccacgcccccgcccccatccttctcccccgaatggggctgggaaggggcacatctggcggacccctcccgggggacccaggagggtttagcaggtgcgcagtctggaacccccacacccaccttccagggagaaaagtgccgctgcttcccgggaagttcccggcttttcagcacccgggacaacagcagcggcgcccggagagacgctctccacccgccccgcgctcgcgtccagtcgccggctctgtgctctcctgcccgggctttctctcacccgcccggcgcggcgtcccgcttggcggaggaacccgcggggatagggagcaccttcctcaaagccaggagaaggggtctccctggacaaggacatcctgctcgccctgcccgggtgtgttcagag

SEQ ID NO: 236216 - DNA, 630 bp, Homo sapiens
  chr12:30322873-30323503
  hyper
ctggccccagaagtcgttggtgaagatgccccagcagagcgaggcgctgggccgcacgtcggggttgttcacggtcgcccacgaactcgccctgcagggaacggccttagcacaggcagctcgcgcctgccagcagcgccgcggccccggctatcaacacctcctcctccccactgcgaatgccccgatcgtgctccccaaaacccaatacatccacgcccccaaaaaactgggaacccacgcgggtgccttctgtttaccgcagcgctctcactgcaggcgcttgagtaccagatggcgagagttcgcgcgcaggtggagtggggatcctggcgctaggctacccaggagaggaggggaagggcaacccgcggtcccgcctgtggtgcccggctgtgctcatccccacgccccagaccccaaaaggggctggggaggggcacatctggcggacccctcgcgggggaccaagcgggtttagcaggtgcgccgcctggaacccctacgcccaccttccagggagaaaagtgcctctgcttctcgggaagttcccggcttttcagcacccgggacaacagcagcggcacctggggagaggctctccaccccgccccgcgctcgcttccagtc

SEQ ID NO: 236217 - DNA, 655 bp, Homo sapiens
  chr12:30353910-30354565
  hyper
gagcacggagccggcgactggacgcgagcaaggggcgaatggagagcgtctcccctgcgccaatgctgttgttccgggtgctgaaaagccgggaacttcccggaaagcagcggcacttttctccctggaaggtgggtgtgggggttccaggcttcgcacctgctaaacctgcctcgtcacctgggaggggtccgccagatgtgcccctcctcagccccattttggggagaacgatgggggcgggggcgtgggggtgagcacagccgggcacccccgcacacccgcaggcgggaccccggggtgcccttgccctcctctcctgggcagccgcacgccgggatccccactccacctgcgcgcgaactttcgccatctgggactcaagcgcccgcggcttgagcgctgcggtaaacagaaggcacccgcgtgggttcccaagggtgtttgtgtgttgggtctgggggagcatgatcggggcattcgcagtggggaggaagaggtgctgctggccggggcgagctgcctgtgctaaggccgctccctgcagggcgagttcgtgcacgacgacgtgtgggcgaccgtgaacaaccccaacgtgcggcccggcgggcgccccgctccgctgaggcatcttcaccaacgacttcttgggcca

SEQ ID NO: 236218 - DNA, 1378 bp, Homo sapiens
  chr12:30948572-30949950
  hyper
cccacttgtctcgacgcaggggacgcccacttgtctgacgcaggggacgtggctgaagtcagtcgggccgcccgcttgctgcacggcagccgtgggactggcacaggctcctcggcagcattatgggcagctggtagagcggccacttctgagagccggatgggccttccgaggtcgggccgtgccccgctgggcagcgcagagggggtgtgtagggcacgcgacttggagccaggtccagacccatcctggctcctctcagggctccttcccctgcccccattccaccccagccctgctggctgtcccgcaggacccagcgccgcggtagccttctctgaactgcggctcaggcggaggtgtcactcctgcctccagcccaggagggcaggtcaggttatgcaacgcgtgccgcgcgatctccccccacctccaacccccttttctcccgggtccacaccgcagttcccaccgctccgggtgtcctccccagtgcgccgcgatttttgtgtccaagccccagagtccctctgagaccaacccccagccagcacagacttcctgccttcccagctcgggtgagtagccctgaaacgcccgcccccgccgccccgcggccgcagcatcctctcgatggccgcgcctccgggacgacgtggtcccctcgagtagtacaggagctgcaagagaggcgcgccggggccagcaagctctagaacagcaggagcggccccagttgggaccccgggacgacgagtggccggcaacgcggcgcccgcatggcccaagcagtgtccgggaggggtcggggccccggactaggggcgcagcgaggaccgcccggaggctttcccttgggcagctaagtccgagtcagctctactcggatttccagcttccagccccggctctggtggggaccatgcctaggagagtaatctgagctggggactgggctctcctcccgcccctcccggcccgtgcgccccaggcatgcgctcctcccgctgctcccttggcccccagcgcacagctccaaacccgcggggcgagccgtcaccttactctctagccttagccggcccccaaatttaatttctgccctggccgtcaagccataaaagtcgattataatcgccgcccccccccgaccaccccaaccccctgcctttgctctcgcccccgtttcagacttctcttctcttcttgaagtcaagccctcaagtcgggactctaggaagtccgttttcttcgtcctaacccctttgtatcctctcccatccccacccctttcactctgccctctggctctgatttctcggcctttccgttttttctctccaggtagagacagctccgggccgggggtggaggatgg

SEQ ID NO: 236219 - DNA, 576 bp, Homo sapiens
  chr12:30975305-30975881
  hyper
caaaccacaaaacaaaagagcgctccacagaagctcagcacatcttcatttggtgggcgctggtgccctttccctgtgggcggcgccagctcctttctcggctgcctgcccagctgctgggctggagctccgcgtgctgggtgtaggtcaagtgatcccgtcgcgggcgggcggaggtggccgggcagccgccgctgtgcccgggtctggggtgagctgcactgctgccctgggccccggctcccacgcctgtttcccggagctccgcggctccggctgcttcgccctccctctgtgggctgggctggggtcctcgcgagaagtcctgccccgctcccttctccaaatccacaggccctgtttctctggagacagggaggctcatacaggatatgtgcaaatgcttttattacaagctgagttgaaagacacccgtttgctctcgggtccttttggtgagcgccgcaggaagccgggctcctctctccccagaggcggccgcaggttcgcggcgcagggcctgcagtgccaggagcaggcaggggcctctgccctccccttcgtccctgatctccc

SEQ ID NO: 236220 - DNA, 623 bp, Homo sapiens
  chr12:31079223-31079846
  hyper
ggccaacctctcccaggggccgacaaacgtaaagggcagggagacctaagcggggagctgcggagcgcggggagtttgaaagccgctccaccgccctactagtccgtccttttgccccgccccccttagggatccccccggcaaccgcacagctgcctcggactctgacttaattccctccgcgtgctctgaatcgcagagaggcaaacccccaaacaaagagccggcagctcgcgtgcggggctcccgggcgcgtcctgccggctgggctgggagagccggcgccggggcgtcgcggccgagcgctgggcaggcggggactagagggccggcaggaagcctcagtgggcgcaggggcgcgggccgggctgcccacacgctgaccttcccgggctgggagggaggagcgctggctgcgggcggtgggcggctgggcggccccgggagccgccgctctcagtctctctaggcgcagctcccttcgccgcttccggagcccctggcagggtaagtgcagaagcgcgcccgaggagtgggggcgccgcgggagggggctgggggtccaggagaggcgcctccacctccgctgcccgccccgccggcagtcccgagctagactgtcc

SEQ ID NO: 236221 - DNA, 251 bp, Homo sapiens
  chr12:31479082-31479333
  hyper
ctgcagttgctaccgctggccgggaaggtgtagattccgctttccctctgcgcacgcgcggctcccggcacaaaattctcttgaatcgaacttatttgcatacgggcgcgcgcacgttgcgggctgggagggggagaagtcccggcgaccgcgcgcgctcccgaggcctctattgtccttttaaggggagaagctccgcggcgcgggaaacgcggcggccagagggaaacgggggcggggactgcttacta

SEQ ID NO: 236222 - DNA, 138 bp, Homo sapiens
  chr12:32112315-32112453
  hyper
tggctcctcgacccgcccctggaggcggaccccacttgacttaaactctggggcccgggaggccgccggttttctccccgcttgccggggtggtcctcttccctttgtcggtaagtgtgagacgagcaccccgaggtc

SEQ ID NO: 236223 - DNA, 105 bp, Homo sapiens
  chr12:32831955-32832060
  hyper
ggccttcctcctgcgctcccggcctgctcctagcctttgactagagcctgcgcagcatcccagtcccaggctagggcccaccggtgccgcgcagcctcctggaag

SEQ ID NO: 236224 - DNA, 80 bp, Homo sapiens; identical to SEQ ID NO: 202930
  chr12:32908757-32908837
  hyper

SEQ ID NO: 236225 - DNA, 33 bp, Homo sapiens; identical to SEQ ID NO: 202931
  chr12:33048899-33048932
  hyper

SEQ ID NO: 236226 - DNA, 677 bp, Homo sapiens
  chr12:33049138-33049815
  hyper
accagtgaggggcgcggaccggcggagtagaaaaagaaaggggtgaaatcttgaagtgagttagttaacattgatagatatgtacaatatttaatatacataggtacctatatgacaaagctgagtaataggttatggaaaagagtgctttccacaagcaagtcggtcataccgaagacggcgagcaacaggtgggcagaacacggggtcccgcactcccagcacgcggggtgagggcgggataggaggaggtgaccgggtgtggggcagggggcggcgccggggagcggcgggctccactcaccgttgcccacggagctgcggcccttccgggcgagggtctgctgcacctgctcctggatccgcaggctcttgactgtctggccgccgcggccgctgctccccgccagcttcagcttggcctcggagggcagcgccaggctggagctgtccagttgtcccaggatctgctggcccaggacggtccggatgtagccgtactcagctggggcgccgggggctgccatggggccggtgggggcgaccgagctgctcgcctgcctctggactcgcgggcgaagccgccacggagctgggggcgctggcgcgagccccgccccgctcgagtccggccccgcccctggcccgccccccgcgccggtgagaggcccgggccg

SEQ ID NO: 236227 - DNA, 340 bp, Homo sapiens
  chr12:33049995-33050335
  hyper
gcctggggtcgcgcacgttgtcggagtcccagcggataccgcctgccggggccgcgccccgctctgcccacgccccgcgctggacaggatggatttccgctcgatgcagggaggggctgccctgcaggcaggtgagccctcgagagtcactcctgttcttggactgaggcttgcctccgggatccccgagcgagtagtatgtctggttagtcaggctttgtcgcactgttggaaacgtttcctggttttcctggacctgagggtgagaaagggctatttggtcaggcggaaagggcaatatgagggaaatgtgccaagaagataacgtgtgaaataaaag

SEQ ID NO: 236228 - DNA, 181 bp, Homo sapiens
  chr12:33591575-33591756
  hyper
tggatgtctgagagcgtgcgtgtgctagggattttaaacgtctcccctctcttccacttcttcgatatgtgctctgagctttaggtgtcgcctcacaaatgggatcaataatccttgttttaccaactttgtcatgaaaccctagaaaatcatatatattaaaagggctttagaaattgtc

SEQ ID NO: 236229 - DNA, 95 bp, Homo sapiens
  chr12:33592476-33592571
  hyper
tttctctttttttcccagttagccgtcttttcctcttcccgtacctctaacccctctggcgccctaagccatagtccgcccgcggtgactttggc

SEQ ID NO: 236230 - DNA, 114 bp, Homo sapiens
  chr12:33592751-33592865
  hyper
agtgctgaggggaggggggagccgtaaaaaagccaaagcaagccctcgactcgcaagcacgcccccctcctctccccagcgcactggtgtttctggcgggtgcctggcggcgac

SEQ ID NO: 236231 - DNA, 292 bp, Homo sapiens
  chr12:34260770-34261062
  hyper
cgcctggctaggggcaggggcgccgccctcccgcggctccggagctggccaggggaagcgcccgcggggtccgggagcctggctacgcgtgtgcacctgctcctgccctcgccgtggcctctgccaggaccccgacgctccgccggaccctgtcctccagcgtggctgcggccccatggcctgcgacagccgccccgtccggaattcggcgccctccccggggcagaggccgcggcgtcctcaggctgtagcgccggcctgcgacccccacgcctggcttgggacccagagg

SEQ ID NO: 236232 - DNA, 43 bp, Homo sapiens
  chr12:34261353-34261396
  hyper
ccacccggccctgcggcctcggctcttgcgtgtgcgctgtggt

SEQ ID NO: 236233 - DNA, 2295 bp, Homo sapiens
  chr12:39298516-39300811
  hyper
ccttggcctcccaaagtgctgggaatacaggcgtataaactgtactgagccactgcgcccggccgagagtcagtttttacaagcactcagatgtgggcccgaaaacaaatcaaaacaaaagtcgtgacttcccagatcttaggtaaggcatagattcgtctgcaaggagggccgaaatctctacctatcaggcaaaaggcaaaaagcccggaagggtcggggagaagcaagctggaaggctccaggaagtgggtggggaggaagctgccggggttggagccaaccctagcaacagcaggtttgcacacgcctagcagaggaagtcccgggcctaagcgtgcagcggtcacaagagcttttggcagtgctgtccccttcgattccggtcatcacccaaccatccagcccgggtttggggcggaaaaccggcttgtaaagtgggcggcggccggtgttcccacagctgagtcacagcccagccaacttttacagcgtttcccagaaagaaaatacaaagtctcagtcccggagcccaccgcttctaattcccgctcccctgtgtcacctgacccggggtaactccagccccactactgagatatttcccactcatggcgcaacttcttgcctgcgcaaagcctcgtggtaccccgagcgctctccaagtgctaccaaccccacagatgagagggcaggagagaggggaagggctgcgtcctcacctgcaggacacggacacctccacccgcgtggccgggatggcagcgctcagctggttcaagtccccgatgcccgcagtgctgttgtagcggctgtccatattgggaggaggcgccttggacttgtccggcgcccacaaccacagctcgggcggactgagggctagctcccgtcaggcggggatgggggttgagggtggaggcagaagaaggaggcggaggcagcgcgcgggatgggggagggaagggaggaggcggacctccgcgcagagccacgagggaaccgctagccagtcctgggtgaaactgacgctgccaggcaagtggcgcgcggggatcccggtttcccagcccccttccggcaggcagcagcccgggcgggggacacactccgtgatcccctcctggctggaggggtcaggcttggtggacccagcaagcagcctgatggagaaggtggcaccagacgcagacccctaccgtccaggaccgcaagccctcgccggctctgcgtgcttttaggttttgtctccacctctgcacacccacactcgcctcctgggccgcgacagcttccttctgtcaatcaggtgtggacgggaaggtctcgaagtttcctcgcctgagttgaaagctggaggtgggggcacctctgcccgttcctaactgccccgttataaggtccccctccccacaattggttctcacctcgccctcggagctcttgggagatccctccgtccctcctactgtgccctcgggcagatgagtctggtcccagcttctggactgcccactgtcggccacttgagagttggggacggtggggcattgtgacgctctccaaccttggaacacggtggcaaagtggccgatcaatatatgggacaagtgggggcgggggggcggactctaaggtggaaaaaacaatactacttgggatttaaggaagcaatctggattctgtctccccttggttcttcggagcttagaggtctaacggcgacattcctcctacagtaagggctcttctgggtccctcgtttccaaaggcatgaaagttctgacctgaaaatgggggccggggagggtgatgtcacaaccatataacgcagctccttcagccgactcccacccgcaagaactgagacctgacggataaaagcagagaggagtcagagtgagcgctgcgtttgggaaactgcattccagggcagcaagactggtgccaagacggagtcgtggcaaaagcatccggaggtagacgaggcgcccctccactgcagggacctttgttccccgcgccttccctcctgcctcacccgagcgcctgcgggtcccgggagctcgccaccaggcggcgacggagaacaggatgcggcgcagctggaaggcagagggtggagagggggcgggtgtccgtccgatttaacgctccaagcacggagtttccagctggttgggctaagtctgggaggagcagtttttgcggtggaggacttgccttgcgttgtaacattttaatccacttgcagcctcctgcctagagaatctatagaggcgggtgagagtgtgt

SEQ ID NO: 236234 - DNA, 376 bp, Homo sapiens
  chr12:39539033-39539409
  hyper
ggcgcgaaagcgcgcgcccactcggagtgccccgagccagcgccggcgaagcaggtggattcgaccgcccccaattcgtcccgcttcagcacccgagtcactcccgttcccgcctcctggtgctggaggacctcacccagcaccgaggggcacggacaaaacggagcgggaagtgcccagttcttgacgtcggatccgtgttcgcggccggctcagggtccggcgctgaggacgcgtgtgcggggtggtccgccgccccggaaggtcgcgaactcgccgcctccagcgccggcgccttaaccccgccggtcccggcgccaaagtcccgacagtggcggacgccggcaccaggggcgatggagagcaggcgacaccg

SEQ ID NO: 236235 - DNA, 166 bp, Homo sapiens
  chr12:39836134-39836300
  hyper
ctctacccacacgcgggggcatgtctagatccccgtgatgctgaaaaagatgtctcatttgcacagacatcagaacccgagtgggcgcgcggcgggccctgcggtcgccggcgctgatagtcagatgctttgtctcctgcctgggaaggccggagctgcatggaca

SEQ ID NO: 236236 - DNA, 327 bp, Homo sapiens; identical to SEQ ID NO: 202944
  chr12:39837348-39837675
  hyper

SEQ ID NO: 236237 - DNA, 1077 bp, Homo sapiens
  chr12:41086115-41087192
  hyper
aagtctgcagcctgcgctggtcctgggggtgagagtgatatccctgttgtccaatcagagaagcgggtttccctgtggtccccgccccactttccctgctgccccaataaccgccctaaaaggccgggcttctgctgtcaagtagccagggtgggctccgccgaggcgaggaggggcgccggtggggagatgcgctcccaggtgtttgcagcggaagtgggaaacctgtagggtatggtccagctgtgccgcaccgaggcgagcaggagcagggaacaggtaggaagctggacttttccttctttgcagataaaataaagaatgcgcatttccatgctgttgcttcccttcccccagccccgcccagccctcgtcacccccaaatctcctgtggtccctgcagctctcgccgtgcggcgcgggaaggactggggcggaggtggctggggtgcggggaagcaggggtgcgggatgccggagccctggggtgccgggcaaggcaggacggcagtgccctagaagagggctccgagctcggggtctgtgtctcgtcaactttcctttcggaggctgccgccgccagcgccgggaactcgccccagggatgccatatcgcctcggcaggggaggggtggggaagcagagaggtcggcagcccggggcctgcaggtctttttctcccgacgccggcccgcacctgctcatctttcccatcccacctgggcgcctggctagcgcatcccggaaaacctgggagcggttgcggagaggggaggaagcgacttgtttgtcccctgacccctctgttaagatctagctcccttcaggagatgggggtggggaagaatccctgcaactcgaagggcacgttccgattaattacgtctccgttgagaaggcaccggcccttctccacgatctgcggcaggtgggagggagagaccgcggagccacggccccttccctcctagcctggcgctgtctacgggaaccaccttcacacctagtttctgaaaggtggatttggcttcagggatttccagggagtcaagtgattgtgcccggatgggctccgag

SEQ ID NO: 236238 - DNA, 400 bp, Homo sapiens
  chr12:41582982-41583382
  hyper
attcctttggaattgggcatccttcctcactatgcagcaggaaacatccacaccctgatcatactttcctgtcattatcttacgaatggattggcgtcgaagttaaggattgtcccttttctgattatattacgattggaaagagttaaacagattcgattctaactttcccccgggaaagtaggaattgtgaaaactcattttccatccagactctcgttttccatctttcaccctcctgcccaccgtctctgcctattttttgagcacttgtcccgtgcctgaagcaaatccgagaaggaaagacagaaagcgaagactttcccggcccagcctttcctctcccgcggccaccagcatccccgcggccctggcagccgcgcacgcacacctgggactg

SEQ ID NO: 236239 - DNA, 144 bp, Homo sapiens
  chr12:41583649-41583793
  hyper
tcagaccggccctgcgagcccccaggcagcggttgtttcccttctttgtctaagctgctggccccgaactgcgctcctggtcctcccgccggctttcataccgaataaacaagcctctttgcagcatcccgtgtgaagaggctt

SEQ ID NO: 236240 - DNA, 53 bp, Homo sapiens
  chr12:42719560-42719613
  hyper
atttgaaactatgcgttacacgttctgctgagagccgcgaaggcaggcagagg

SEQ ID NO: 236241 - DNA, 1513 bp, Homo sapiens
  chr12:42982745-42984258
  hyper
agcaaacaccatcgcggggcagggggttggggagagtggtgggagttgattcgcctctgccaaaaagccaccagcccctttccccagcgctagaggagagaatcggtaccctccctccggacgccagtaggtgacaggcgatcctaagcggcgggaacacgccaacgcaccctcgcctcccggcgccccgcatcgcctcgaccctcgggctacagaacctgtttccacgccggagaaaaccaagggaagagttggttgtgatgcagcaaacaggagccatgcggagagcctctgcggagccctggcgatgctgcagccaatatctgctttccctgtctacacagcccaacaaaccgattatgaccttctccctgatcttctgcgacaccgacccagtctgggtgtcacagactccggcggtgccagcgaaggtgcccggccctacccctgcggcgctcgccccccaccaccgcgccgcagccccctctgcggaatccgccgggatccaggctgccactcacctcgcgcgagggagacgcaactcggctgcactgtcctcggcgccgctgcggggctgctgggctgcggggctgcggggctgaggagctgcggtccgcggcgtcaggggtgggcgagggtgagcagcgcacgaaccatccagagcccagaaagtctccgtgccgaccgcggcgcgtctcggggaagtcagcgcaggctgcgcgaggctggcatgttccgggcgcgctgtcgggcggcggcggccgcgggagacggcgctggcagctgggctgcaggcggagtgcgctcgggctccggagccgcgcgctgcggcgccgccgcgcaccccgccctcggccgcggggcccggcgcgagcgaaaacgcggagcgcggacgccgccgcgggatcgaggccgctgggcgcgcgcccacgcgtaccccggctcggccctgaaagcgaggtcgggcccggctcgggccgcgcccgggggcagggctgcgagcaggcctgggaccggctccacgcgcagccagtggggcagagcagcaggcggattatgcgcagggagaaaaaagttcaccaaccgcggtccagagtcgcaagtgcggctcgctcggagcctctgccccgcccccgattataagcctttttttttttttttttttaaccaacaatcccgatggactgaaacacaggaagagtgaagggacggggtggggggtgggggagagacaaacccaatttcctctgatcaaacgatttgggtaggggtgcctatttgagttccttctccttcggggggtgtgtgaagggggcagttaattaaacacttagattccttccggcgcgccttgccgagctggggacccgtttggactcgatcctgtctcgtgtaatcccacaggctggtctgagtctctgccccggaaccggaggagtgatctttcagagcaagaagccaaagttcagcctctagtccgttcccttccccgcctcgacggccctggtcgtct

SEQ ID NO: 236242 - DNA, 1579 bp, Homo sapiens
  chr12:43944720-43946299
  hyper
gcataagctgacgacggccttgtaatcctcctgtgagttgacctggccgcggtagaagcagtggcgcaggtccgagggccctgcgtcgctctcccaggccccgcgctccggggttcccaagtgcacctcggtgtagccggcggccagaaaggatgcatcggcggtcaggttcagctggaagagctgcccgtaggcagtgaagcgatagtgggttcggaacggcatgggttccagcgcctcggagctgcgtttctgccggctgaagtggtggctctgagggaacacttctccaaactcattgacccgctcggggatcactacttcgtaggaggtcagtgtcctcaccagggcttctgcaacaacagcgacaggaccagtgagctcccacgcgttcctcattgtccaactctaaacttcttccaccaaacgtccccgctaaaggtcccaggtcccagtacagccaggggcaagacaaatgcacacatgctgatgcgcacgcacacacacacacgtgcactgggacggttagtgctctgctttcccacacccccaacttgccctaccctccccaagcaaagaccctaccactaatggccctaagcaacccacttccttccccagtacctcctaacctccccgcagcccccaactcgttccctccgggtgcaagcgaccccctgccccttgcgcccccgccgtgtggtcctgggagtgcgatgcgtcttaggcgcgcgcgattcctcgaaacccggcgcagtcgcgacctctccggctgactggtccgggagtcccgggagctccagcagggccagcgttccccaacgggctgagccgctcgtccccgcgacctgcatgtcccactcgggccccgcgcccccacttagccgctgaaggcgtctcgcggtgactttaccttgcctggggtggaagtcaacttcccaagacctggtgatgaagagcgagagatggtagagcagcccagtcagccacttggccacccacatggttccaccctggggaccccgatcggggaggcccaccagagccgccggcagccaagccggcttccctcgcgctccgatccctctcctccctctcgcccgccgctctccgcgcctcagcagcctagggaacagcagcgcgggccctgggccggctggtccagccacaccgcctgtctccgctcgctgagccgctgcttcatcgcactgcagcctcaccccccttcctgcgcccgcgctgccctcagaaactctctgctcaggttcagctcggcgcggggaagcaactcgacctagcaggaatggtgccaatatagccaccccggaccggcgagcgccgcggagagcccgcccctatgggctgttcccggccaatcagcgggaggcgcggcccctgctcgcttttccccgcgcagccccctcccttctccactcagccgcaaggggactgcggtacccttctgctgccccagtgggcgcgcgacttgctgagtagccccaaggcccggctgggcaccaattccggacctatgaaaccgagcgagatgcaagcacccgcgtacgtgaaaggtgcctag

SEQ ID NO: 236243 - DNA, 120 bp, Homo sapiens
  chr12:44200419-44200539
  hyper
gggtgctcaaaaacggaagtgatcattttaccaaataggcattttccagcttaaaaaagatgtgcacattatttttcttggtttactcttcctataatcgataccgtttagtgtagaaaa

SEQ ID NO: 236244 - DNA, 1994 bp, Homo sapiens
  chr12:45268917-45270911
  hyper
caatacaaagttaggacaagcggcaagagcaactcctgccggggttatcggaactgaaatcacagtggggatgcagcacgccgggcataccttgaaagagaaaggctttcgtcccattatgcagccccgggacctgacgcactccggtcgtggactccccaagttctaactctgttaagacgtcaatctgtagggaagggtccacaccaagcccccaaactggtgaggggtatgaggtgggagagagaaaaaggaaaagctccatcaaaatgcaagtctcttcctccagggcagcaaagaaccgcgttttcgcgacaatattgggaactgaagatgagaggcgactgcctcctcctccgccgagagccttacctgagatcagcagccaagctttaaatagcggagcacccagtcccgtttccatgacctcctttaaacccttctctctgcaaagttccccctcagccctccgaccctggactaggggcgtgatccgcctcgcggtctccaaggcaagcacagaaaaaaaaaaaatccatatccaaacccgcccccttactccaagcttcccactccagacctactttgggtccgggaaaagcgaggcttccccagccagcccatgctgccccgaggcgggagccatccctttccccagccccagctctgcggccactcacctgctccgagaccgaagatcaaacagaatgttctcagtaagacccgagactccatggtgcggatcagctcagtccatcgtctccctctttaaaaataaaaataaaaatcgaagaggttcttggaatcaagcgggaaaataacgtttgtctctcctgctgctgcctcggatttactgatcagtaggattaatacgctttggttgcctaagaaagaaaagggaggcctccccaggcgcgtgaagaacttagaccctccaatgcgcacatcattcccacacgcagggccgaggcggcagcgcggcccggagggggcccggagggaggggtcggactcgccccggcgcggctccgtcggggaattagctcccgagccgaataaaagcagccaaagactcgcacacccggtagaaggggggcggccccaagaaagcccgggctggggcggccccgcacccccccgtcttccccgccgcccgaacctgttgtaaaggcagagacaatggagaaagctccgggagacgcgcggagagactgctcctccggggagggaggggcgggccgggggaggcggggtaaggaggagggaggggccgccgagggcgaggccggcgctcagcgtcggtctcccgcacggtctcctggatgccaaacccggtctagggagcccaggagccgttgcagcctcagctcttctccctccctctctcgatgacccgggcaatgccaacctcctttcgggattgaaagctctaaatccaaggtgctaagttgatgggcggtctttgctctcacccctcgatttcgggcgcgtgtcttgaaagacaggagagaaaaaagaccacccagctgcaggaggcaaggctggagcgagtagcgctcgcctgccctttaagcaaaggagggaagcccatgtgcactcgtgcactgggctccggagcagccccggggtgcagggcactccccctccagggcgtgcggaggaaggccaccaaaacacgctgcactgccgaggtggagctgggcaaagtaggtagagactggtggggacggatggcgagcctgggaagccccgggtgtcctggtggagaggttccctgccgggggcggggcgctggagagcttccccggcgcggagagcttcccgggcgcggagagcgcagagaacttggccaggaggtgctggacagctccggaacccgcgcgccccctgccaaataaagcgtggagacccggactcgggctctctgggaccagcatacagcagaaggcaaggggaactgagccagggcgtctgttcacgccgaaatatctacc

SEQ ID NO: 236245 - DNA, 534 bp, Homo sapiens
  chr12:45444113-45444647
  hyper
cacagaaagtggtgtgcctccgcctgggccccctactcccgaagtggcatctccactaaagctcgagatgctccaggaagttcccaaaccggctctccctgggcgcagtgcgcaccgccggcgctcccagatccctggaccacccggcctgggggcgcgggcgcggctggggagggaggggagagctggctcacctggcgctgaaggctggaaggtacagtctcggtcccccggagcccggcccggcagcctcgcactgtccgcagagggactgagcacttgaaaagcccaccgcgttccgtagggcgccccggcggggctaacttgttcggctgcggggcacagctttaggggaactgggctagcaggcaggggccggagctgcgcgcccgcggtggccagggcggtcgccgggtcgtggggcgcgggcggctgcagcctgggcgttggggcgcccccgacccgcagcaaattctcgatcaggaaactcttgcccaggttgccaaagccgggcgcagcggggaggttgaggag

SEQ ID NO: 236246 - DNA, 316 bp, Homo sapiens
  chr12:45444827-45445143
  hyper
gcggagccaggcagggaggaaaggccacccgggacggcggcggacttggaacgatattatttatttgcgttgggcgtttttttaagggatgggaggagtgagtgtgggagggggaagctgtgagtttctctggccgacagcgtaggctctgggagcgcaggggggagtctttccccctctctatgcagatctggacgggttttttttttgttttttgtttttttctggacggacggaaggtgtgtccagcccatccattcatgtcaccagccccacaaagtgacagacgcggccaacaataagggtagtgctgtgg

SEQ ID NO: 236247 - DNA, 83 bp, Homo sapiens
  chr12:45445323-45445406
  hyper
gggggacgcgctgtcgtctggggtgtctccgcgtactcctgttgggcgaaccctggctctccggtgttggttgtcacttgagc

SEQ ID NO: 236248 - DNA, 165 bp, Homo sapiens
  chr12:45609639-45609804
  hyper
gtgtgtccacagacgaccttggaacgaaaagctgccctgtttgggatcaatgctcagggaacccagtccactcccgcactcacgtgttcccgccttgccctccagctagttcccccgcgcgcaggatcgcactactccctctgcagtctcgcctgccgacttcct

SEQ ID NO: 236249 - DNA, 150 bp, Homo sapiens
  chr12:46120764-46120914
  hyper
ggccgccggagtccgcgaataccgcccgctcccagcaacgaagctccccggctcccggccgaccgcgagttcctggagcagcagcctccaaggttcccaaagcccacgattcaggcgagcggtgccgaccgggccgtggactgtggcatt

SEQ ID NO: 236250 - DNA, 130 bp, Homo sapiens
  chr12:46123555-46123685
  hyper
tgggagcggggggcgcttttaaaacaccgatctgggttttttaaaaacctcctttgaaaaaataatggcaaactcgacggggaaggcgcctccggacgagcggagaaagggactcgctttcctggacgag

SEQ ID NO: 236251 - DNA, 75 bp, Homo sapiens; identical to SEQ ID NO: 202952
  chr12:46663347-46663422
  hyper

SEQ ID NO: 236252 - DNA, 472 bp, Homo sapiens
  chr12:46766925-46767397
  hyper
gcagtccttgctttcgggggacacatcaaggcttttgggggacaccaccctcccaccaaacactttcttgattgttatttttgtgatttacagtgaagttttgtctcacaaacttgggccaaggcagcaaggttgtcctgatggtttgttgttctttcttttccacctagacctgctttcactcttcaaaactagccggaggtcggcgagcagctccttttcgggatgtgctttttgtacggccatggaaactggactagcggaaaggctaccttttggccagcaagccaggccccttagaaagaggccccagtggggagcccggcgctcctaaggccgtttgggagtccccagttttccactcgctgacacgttgcttctcttatcccaccaccgccgccccgggcaaaggcactgccttgtctgaatgcgggtctgaggcgctttctgcggagcctggtcctttcccttc

SEQ ID NO: 236253 - DNA, 713 bp, Homo sapiens
  chr12:47224917-47225630
  hyper
ttttcccccacaaccggcacctgccctggcccagagcgcagcgtccacctgtaccaccgctagatgaagagtacctcaccgcgcgctgcctgggcgcacagctggtgtgccgcgctcgccacctctcctggactcaagggtgctcccggcttacgcttctcggggcttcccgggtccgggttccctctcccccgtctcactttcttccttcattcgctcttctctcaatttttcctccatcagctctaacctgtaatcaattcccgccttctgcccctcctccctaggcttctcttagctcggttgccgcgaccccactatccgtccccgttcgcatttctgcaccgccctgcccttcactccagcgcgcagcaggccgggcaatccgaccgcgcggtaagccgccctcggaaccgctggcgcagttttcagactcgcccaccgcccagagaccaggggcccacatccagctctgctctcgccttctcccttgaaagagactccttgggggctccccaggtcagagtaccccgcccggggaatcatgctggtctctggggcgacccagctatcagagacgacagttctattttaagccttccacccagtgtccccgacctgaggacgcgggcgcgggtccagggactcgggtaacaccttgccagcaggatcccgggcggtcgcggagccagctcccgcgggggaagtcgggc

SEQ ID NO: 236254 - DNA, 211 bp, Homo sapiens
  chr12:47473961-47474172
  hyper
gtcaagatgcccaacccactcgcctaccaattacgtcccttcgtccagctccaagccgggcggtaatggggtccaggaaggctaaaggggacacgcccagccaccgagggaggggtctcacccttggagacccacttcgcggcggccgcacaggtcacgtctctctccccacccaggccaaggaatccccggacctcttagagctttgctt

SEQ ID NO: 236255 - DNA, 524 bp, Homo sapiens
  chr12:48099380-48099904
  hyper
cccgctgtcccggcgaacaccgcacacccacgccgcaagggggcgggccccacctcggtctttgcgggagggcggctctgccttcccgagcactgcaaaatcgcagcagggtggagggtccgcctgcaaagcagagcgcgcaggcccgggttgcgggggcgagcccctccgggaacgcgcgacccgagacgccgctgccctggacaccgacgcgccgcctcaacgcgcgcctccaccgccagccccggcccgccccgcctcaccggtacccataaccgctacccctcctcccaccggccaccccaaggatctcctacgctgctccgggcagcgagaaccgcaacgcccgctcacctgaccaggccgtaacccgccgcactgccaccccgtcagccccgcagcgactcacgccgagcccggcagtgactcacgcaaagccccgcctcctgcgcttccccacaagcccccgcggcctcgccccgccccctttagcctgggcttgagcgcgcgcagaagtcagcttc

SEQ ID NO: 236256 - DNA, 91 bp, Homo sapiens
  chr12:48206706-48206797
  hyper
tcacacctccttcagcgctggaatctggggggcgaggcctgcgctcagcccctcgcccggtgggggtggggtgctgcgccagcacctcctc

SEQ ID NO: 236257 - DNA, 48 bp, Homo sapiens
  chr12:48395457-48395505
  hyper
gtgactctgtggctgcggctctggacacggctcgctcacagacaccgg

SEQ ID NO: 236258 - DNA, 1198 bp, Homo sapiens
  chr12:48396586-48397784
  hyper
gcttagcgcactaccgggtgacccggccagagtctcctgctcccggctcctcgcagctgcgccgcaggctccagccctgcccccgctgcgctaatgaccggaaagcccgcctgagcccgccgccttccacgctatccctggaaacagcctggtggcaggagagggcccacagagcctcgaaggcagagaacttttattccccccgccgaagagtttccctctgcgattgatttacaatctgtaacatacaaagacagggctggaatcccagccgtcggaaacgtgcccaaacacgtggaaaaaaaaatcctctctacctaatacactttccaggcttcgtttgtcctgaatataatcccagacagtggaccttaccaaaggaggggtagaaaggtgcagtccgaacagcatttggacccgactacaagagccatctctaactataccggttgaaatagttgtagcaaccgtagcaatcgaccagcctgctccccttccctgacacacacatacacacacacacacgcacacacacacacaccacgcagcctggctcggtgagttccagaatttagaaaagtaactcattgtagtacctcggggcggcggggaatggggtaagaccgcggggaagggggcgctattttcgggggcatttgaaaagcacggtctggttggaatgttatcgtctttcagatggcctctcctactggaagtttctgtaccctttatcagaagagaggcgcaggcggacggagggaagtcgagatgagcgctagggctgcaccttgctccagggccagctgggagggggagggtaccctaaagaggcgctgaggtctcagagggcctatcggaagccgttctttgtggcctgggatttcagcccaccagtgtcagagtgttagtcccctttgtctaactctgctttgagcccaccagccaccaagccttggacaggctgtgaagtcaaccctttggcgtttgcttgctccctcgctcgcgctctctctttcctacttcacctaagttcgatgagttgagatctgtttttgctgaactcgaagtgcttcgaagaggcgagctgtgtgcatgtgcgcctaattatcaaagctggtggaaaagagcccatttatatctgtgcgcaaacttctccgagccaacactttgcaagttcagtattctagcgcaacgtagg

SEQ ID NO: 236259 - DNA, 525 bp, Homo sapiens
  chr12:48398409-48398934
  hyper
cacctgcccaagccggacccccctctctgggagtcacgcttcccgccctccacccctagtgcgccgagtggcctgatcgggcggggcgcagagatggcccctgccccccaaacccggggctgcggcgctgcccccctctgaccacaggcgggaagggtggcctccggcccctcccctcggagttctgccggagttggaggggagggggtgtttgcagaggcgcaggccgagagccctagaccaaggacggaaaagacatgggagggaggagggaaagcggtagaaaggagcagcggagggcgagggggcaccgcgtcaggcgtttgggagtggggacagggaggagcccacagagattcagagtcctaaatcttggagacaggctagctgagccagatctgaagggttaccccgacctatcttttagcccttccctgcagtacctggtccccagactcccacctggacgttcacagcgactgccctccacccctcccccatccagctctgcgttgaaggcttcct

SEQ ID NO: 236260 - DNA, 267 bp, Homo sapiens
  chr12:48551342-48551609
  hyper
caactaagatgggcgcctgcgcactgatgagtgttcgtcagcggggcgcgcctgcgcagacttgtgcagcagctttcgccctccagaggcctagttagggggttactttctccttttactcagaggctttgcgcgcaggctcagtgcagcgttctcggccacagccgcagggttcgggtcttggtcctgcagcggggataaaaaagctcaggaaccctgagtgttgggccgattctatatggttgcacctgcgtggaccaggccagc

SEQ ID NO: 236261 - DNA, 107 bp, Homo sapiens
  chr12:48577163-48577270
  hyper
ggaggtttctgcagcagacggctctctcatacttccctattaaacattgcgaccacacgctctttccagccttggccgaagccactgtagcgtcccctctcctcccc

SEQ ID NO: 236262 - DNA, 239 bp, Homo sapiens
  chr12:48577810-48578049
  hyper
cccctcccgggacctctccccctccaccccctcccccaccccggaggccgggctggacgcgacccagagcctccgccacccgcttctgccactcaatggaggacggtctgctggagatcatgaccaaggacggcggcgacatgccggcgcccctggaggtgtccaccgtgccggcagtgggggacgtgatctccggggagtacaacggcggcatgaaggaactgatggagcacctgaaa

SEQ ID NO: 236263 - DNA, 95 bp, Homo sapiens
  chr12:48578229-48578324
  hyper
gggagcttccagagcgacccccaagagccggagactccttcgcctgggatcggggacagcggcttgctgggtcgcgatcccgaggacgaggagga

SEQ ID NO: 236264 - DNA, 956 bp, Homo sapiens
  chr12:48591592-48592548
  hyper
tatgggaggtttcacggagtggatacctggaaaggggaggtaaggcagctcaaaggacactgttgttcaacggagggaagcggattcaacaattatacaattcgctgagtcggggctttcactgcgaaagaacttggcttcggatccgtgatcaaggctgggagctatggaggtggatgtgattggcaaagacctctgctcaggtctgcgtcaaaccttgcttcgctcccatcccattctgcgccaatagggcgcagtatcccaaccattccactcggctaggaggggatcctaagcctcaaggtccgcatctcccgctggagggactgagcagccgcactggtgtcccagaatagatcgtgttccccagaggttgtcaggttcccgcaattcggcgcgggcgaggcggccaaagagagggcgctcattggctgccacagccccggtccgagaggccgaagaaggctgattcgtcacaggccgtcagcgcgggccacgcctatttcctctccaggttctaattaggtcaggggccctacagcctcttgggtagtttgcaagtgcgtcgcggagccggcctcggaaatatggcgacagcttcagctttcagtgtgagggagccgagggcccagccaaaccctgcgggaggcaattcctgggtacccttcccatattttcggtctttgggctgcgccgtggtaacctcagagcctggttgcgtgctcaccagcgacaagtgtctttcattgggacatgaaaggggactgggaagtgccgtgcagtttcagggtggtttctggttaattacattttcatgggttttcgcagagtctgggggcaatttgtgtcctccagagaccagggaccagggccgaagctacggcaggggagacgcggccagggccgtggcttctagtgcgagctcggttcgcgtccgttcccgtctggcgcccggg

SEQ ID NO: 236265 - DNA, 403 bp, Homo sapiens
  chr12:48690460-48690863
  hyper
tccaggacacaggacgccttgagactacatttcccacaggccacagcccagcctcccgtcttctaacagtcttcctagaaaggtgcgcatgttccgaccattagcacacggctggtgcgctcggtgcaggctatcggagcccgggacagggccgatccagccaggcttcagggtgcgggaaacgggtgcgccatgagatagaagctttctgcttccacccactccaggcgcccagtctttctccagcacctcttaagctagccccaggactctgcaaggtacccgaggacaggagtcactgcttgcatcccctcagccttggggcaagaagaaggagccagaatccaggaaaggggctttggcgaaactgcacggaaatcattccttccgtttacgtaatttt

SEQ ID NO: 236266 - DNA, 109 bp, Homo sapiens
  chr12:49183004-49183113
  hyper
agcggggtaggggcggaggaggccaaataatgggacccctccctccgcgcgccccctcctctcctccggccgcttcctcccccagtcctgggaagacaagcagctactg

SEQ ID NO: 236267 - DNA, 101 bp, Homo sapiens; identical to SEQ ID NO: 202962
  chr12:49259401-49259502
  hyper

SEQ ID NO: 236268 - DNA, 119 bp, Homo sapiens
  chr12:49284755-49284874
  hyper
ggccatcgcccaccgggcagtcttcccaccgacgattaggctttgtcttcaaaacaagttagaggtggtggcttctgctttggagccccctcgcttcttttcccggctctcccgtcttc

SEQ ID NO: 236269 - DNA, 209 bp, Homo sapiens
  chr12:49297807-49298016
  hyper
tctcaaaaaccgaccgcggtcctccactgggtagggggcgctccaagacagggactcttctagcctgttgcctctccatgttagcgatatcctcgttgctaggagactagacgcgtcttacagtgggagagctcagcctcactgatagccggggatctctcctgttcgagggctgagatctccggtcccacaaccgcccacaaccaggg

SEQ ID NO: 236270 - DNA, 277 bp, Homo sapiens
  chr12:49351446-49351723
  hyper
gaggcgggagccgtgaatggggatgagacagtgaggactgaggtgacaatcccaagctccagggttgtgcctggaatttaaggactgaggcggcaagttggctgcgtaggagacgggctgggctgcggggcccaggggctccttgggcaaagccagcatcgggatatgggtgaacagtcgttgctgtggcatgccttacccagccagacttcatctttatttcttaatctgggctagctgccatcccctgaaagccctcaccgcaccattgttgttg

SEQ ID NO: 236271 - DNA, 373 bp, Homo sapiens
  chr12:49373994-49374367
  hyper
gtaaggtgtgattacgcccgtggacgtggctgcgtgcccacgcacctgctttctctactagccctagagaccagctttccagcactgccggccctggctctcaggactcaaagtgcggagtcgggggtgggattccggtcccaagcccttcatgagggtgctggccgcgccccgcgtaccccctcgctgatccccgctcccttctcccacaggctgtcgagaaacggcgtttatcttcgctatcacctccgccggggtcacccattcggtggcgcgctcctgctcagaaggttccatcgaatcctgcacgtgtgactaccggcggcgcggccccgggggccccgactggcactgggggggctgcagcgacaac

SEQ ID NO: 236272 - DNA, 282 bp, Homo sapiens
  chr12:49374547-49374829
  hyper
agataaggcaaggggcaccaggagagggcgtcctgggagagccggaggcttggaacgaagacggagaatagaggagacagtggctgagggcaaaggtatgtctggcccgcggacaggtagaagaggttgcaaatcaagcacagtctcttcgctgtacagattcgaaaaataagcctgagaggccgagactgactcgccgcggcggagcagggttgggcagggtttccaaatctcagcggaacatttcgcgcctcccttcccctgggctcagctaggcctggg

SEQ ID NO: 236273 - DNA, 2154 bp, Homo sapiens
  chr12:49390788-49392942
  hyper
gggctgtgtggcggcggatacgggacacggcttctcgcagggccccggcgtagggccctggggtccgcgcccagccccggccggcgcgccgctggaccaccgccacttccgacccctcggctctgccctgggctcccgaagctgctgggcctaaggcttggtgctctgggctacctggctgcgtgggggcgtcccgcaggtttacttcgggggccgggagccccaagatgcggaaagtgcgctcctccagtgtggagtcccccggcctcccgccctcagcttcgcccccgcggcccccgccgggctggtgtaaaaggcgactgctcgacagccgcttttgacaaggggaaggaaagaccgtggccccttcaccctcctccttgccgggcttcgattggctgggggaatcccccaccacgcgtgtcaccccagagggcaaaagctgcacctgctgggttcggggggttggaacatattgggatcgtatcactacgcacgtggcgtcaatgacaaagacgccttccccacgggacaggccctgggaactgcggggcaaggtgtgggcacggcgggtcgccttccaaccctccagggtctccggtcctgccccctctccaagacccagagattctctccatccggtgcctccgggagcccagggtctggggagtgtctggctatggcggggcggctgctttttaggggagggaatccagcatttgggaaaccagatctgttctccttctttcccttccctcgagcccttgaggtggtgcctggatctgggagcgggatgcggggcacagggagccgcagttgcagaccccgcaggagctatctcggtgcctgcgctccctgtagctttggcttggggatggctgtcgctaccactgttcaggtcagcagcagccagccccaggcttttctccacgacccccttgccgggctctggccttgctctggccgctccacagcctggggatccccccaagagaccttgcccctgtcggagaccccaagccccgaggacgtcccggtagatccgaggatccagcctcttctttgtgcgccctccgtctgtcctggctggagtcgcagctggggctgatgaagtgggcacctgagagttcccggggcctctcttagtccccaaggtcctatgggggccttcgtaagaaggtggagccacgtagggtggcggccggtcccagcggcgtcgtggggcggtcccggcagaacctctcagcagcaggtgagcctcgtagcttgggggcccgggccgccgacctccccagggccccgcccacgccgaccctgggtcgctctgcggctgcgcggatggacggggcgctcgccccacaggcgccaggcgctccggccgcaagggagcagggagccctgccagctgggccacccgaggggcgttgcggggctccgggcggggtcgacccggggggctccgtcgggccccaccagccttgcgcctttttcgctcggtctccttggcctcccgctcctgcgacgccgctttccttttctcttgctcccgagctcggacctcggccaggggccccgcccgccagttggtcgcctcctgcagcaccctggaggcccagggccggcggggcggcggctgtggggatcccgggcgcggcccacacctgggacaatgagcaggaacccaggtgagcagtttgtgggggaagggagccgaggtccggggagctgggagcactggagaccacttggggcagccatgtgaaggggtgtgtgtgagtgtgtgcgcgtgtgcacgtgcgtatatgttaggactgaagtcgaagcgggactcctcgccatctctccatgcacactttaacagcgtctgccccatctcacctcctgccctttctcacacccacttctgttcccccaaacaacgggatgagtcaggccccagccctcgggagcgggcagaggtggaaggcgtgggaaagagaagggggaccagcagtgctcgctggtgcctgcggggaggtccggaccccactccccgccccaccactctcttcccctcacccctgcttcactcacgtgcggttctggaacccgcgagcccagtggctggcctggaagtccatgggctgtcgagaaggggcgcggcgactataatga

SEQ ID NO: 236274 - DNA, 271 bp, Homo sapiens
  chr12:49393152-49393423
  hyper
agagccgcgggcccggggactgggaactatatatacccgggcacacgtgtgtgtgcctgtctctgtgtgtgcgcgcgcatgtgacaccgcgcggactgctccgcgctgctacctcccccatgtgcacggccgccccctggggcccgggattggacgccccttcccactgctgttgtcccccaagcctgatgggatcgcacgagtgggcgggggagggacttatgattcttgccaagctgacagtgccccctcccccgcccctatttcttca

SEQ ID NO: 236275 - DNA, 475 bp, Homo sapiens
  chr12:49483800-49484275
  hyper
gtagcaagaggccaggacatcgttcaccagcagcgtcccgtgcgcggtgagcggcgcgaacacgcccacggcttcctcccgcgccacacgggccacgcgcgctggccgaagcgcatccccgccgggcgccagcaccgagtccccagcgcgtagccggcgcgcgaacaccggtgcaaagtcgcctggcgcgggcgccggccctcgagcggcaaacaccaggtgccagggcgtgagcaacagtttgcgtggaggccactcggtctccacagccacaaatgaagcccggcgctgcaagtcccggtccaggaagagcagcaccggcgtgggcaccacccggcctgacgcatcggccgccaaaacccagtctccgcggtgcagttcccgcagccctttccgctcgccgctccacaggcgcacagttgcatttcccggaaagcagccgcccgcccggaccgccagtgagttatctgcaggg

SEQ ID NO: 236276 - DNA, 719 bp, Homo sapiens
  chr12:49485547-49486266
  hyper
ttgagcctggcccccgccccaggcaccggctcccctccctccgcctgattcatcttttgtttcattgccttccctggcaccgggcatcgcttccttccttccttcctcctcctcctttgggcccttagcattaaccccttcgtgctctgggtgccccccagagaggtgcccaagaggagctgtgcgggatcaaggctgctggaaaaaggattggggtggcgggggttgcgcgaagtacaatggccattatccgggatgacttaaccgagcgagaatcctgagcccaggccgggaacgcgctgggagaagcggactcagcagctccggccacaaaggcgcttttcagccgccccggctcagggagaggaaagggcagaaagccgcgcccccaatccctgctccgtccgggtaggtcccctccccccgcgcgtccagtcttcccagttccagctaaggctctgccagtccggagagcccctatctctcccatctctgctctagatgcagcccagaagggcgtgggagtagcacctgagaataacggtctccttgtgcggatctggggagccccctgcagggtgagagcggagaagaggaaaagaagctgcggctggaagcctgcacctgggggagtgagaccacagttatcttggccgctccagcctgggagcgggagaccttggcgcgcaccatagcagggacaccgcgggaggaggcgc

SEQ ID NO: 236277 - DNA, 48 bp, Homo sapiens; identical to SEQ ID NO: 202970
  chr12:49524764-49524812
  hyper

SEQ ID NO: 236278 - DNA, 97 bp, Homo sapiens
  chr12:49525460-49525557
  hyper
agggaatgggcgacgaggcttgccttaattcggaggaaacccaggacttgagagagccatacaatttgaaagacgaagcaccgtgaaatgcagaaag

SEQ ID NO: 236279 - DNA, 411 bp, Homo sapiens
  chr12:49582693-49583104
  hyper
ttccaagtagagcctgggggcgctgactccacccaacggccacaaagagccgaagccgattctcaccatggttgctgcttcgcgactgccgagctgatggcggagacgaagaggagaggttgttgcttcttacagcgcgactcttaggcggtcgatgtaagagaacctgcggcacataggcggatgcggctccctatatacaactcggtcaccatggggatgggccggggccttttcctgttggtccagacccccaatctgcccagagaagccatgacaggagactggtgattggtgcaagcgacgtgggatgaggtaatctctcccccacccctttttctctagcatccgtagactgtttgcatcctttagacaaagagaccgtgcagaagcagtcggccgagcatccat

SEQ ID NO: 236280 - DNA, 559 bp, Homo sapiens; identical to SEQ ID NO: 202971
  chr12:49658689-49659248
  hyper

SEQ ID NO: 236281 - DNA, 254 bp, Homo sapiens
  chr12:49689031-49689285
  hyper
taccgccgtaccttcggtccaccgccctcactatcccccggggccttctcctactcgtccagctcccgcttctccagcagccgcctgctgggctccgcgtccccgagctcctcggtgcgcctgggcagcttccgtagcccccgagcgggagcgggcgccctcctgcgcctgccctcggagcgcctcgacttctccatggccgaggccctcaaccaggagttcctggccacgcgcagcaacgagaagcaggagct

SEQ ID NO: 236282 - DNA, 1040 bp, Homo sapiens
  chr12:49690392-49691432
  hyper
cctggggatcaggacgatgctgggtagacgcagcccctccaccctagtctacaggtggttagactcccacccttgcgccacctggcggcgggcagcggggctgtacctccgaaacctggcctctggtctcgcgcccgcgggggcgcagggctgtacgccctgccctccctggcgcccacttctgttcgttcaagcgtttcttctcttttctgtgcacgaactgcgtggcccgcgtggaatttgcgccgctgtccatcctctgcctgctcccggccgtaggagctgcgagacctgcaggtgagtgtggagagccagcaggtgcagcaggtggaggtggaagccacggtgaagcccgagctgacggcagcgctgagggacatccgcgcgcagtacgagagcatcgccgcgaagaacctgcaggaggcggaggagtggtacaagtccaaggtgcaagagccgggagggcctgcgaggcgggacgctggggtggtgtcgcgcgtcccagccgactaaagcctgggttacccccacttctcagtacgcggacctgtccgacgctgccaaccggaaccacgaggccctgcgccaggccaagcaggagatgaacgagtcccgacgccagatccagagtctaacgtgcgaggtggacgggctgcgcggcacggtgagtacgaagctgcgcgctcgggcccggggagcggacgatgaaatgttctgcaactggccccttccactctcctaccccagaacgaggcgctgctcaggcagttgagagagctggaggagcagttcgccctggaggcggggggctaccaggcgggcgctgcgcggctcgaggaggagctgcgacagctaaaagaggagatggcgcggcacctgagggagtaccaggagctcctcaacgtcaagatggccctggacatcgagatcgccacctaccgcaagctgctggagggcgaggagagccggtgagggtggagctgctggggcggggcagggcggggtcgggactgggccgggcagggcggggcctgggcagg

SEQ ID NO: 236283 - DNA, 460 bp, Homo sapiens
  chr12:49729806-49730266
  hyper
ctggcatggggcaagtaaacttgccgctggctgcctcgtaggcgttgcccacgttggtcaccacgtcgtcgaagcgcagcacctcgtaaccctcgtggggccgccgcaggcccgcgtagaaagcaatgcgaggcacgtagccggcagcgggcgccaccccgcccggacctggaccgggagggcccggggggcctggcctgccgggttctcctgggggccctcttggacctggtggtccagggggcccccgcaggcctgctttcccgcgccggcccacctctcccttggcgcctggcgggaaggggggcacggaagcaggcgcgccgtcgggaccagggccacggggcccatgcgggtcgcacaccatgcggcagcgacccagcatctcgtagtgcgctggcccgcgggagctgtgcaccagcagcgggatggccaccagcagcagcagcaccatggccac

SEQ ID NO: 236284 - DNA, 66 bp, Homo sapiens
  chr12:49731138-49731204
  hyper
ttcttcagggtttcgcggcccccgctgtatctttacttttaccctttacccggagtttggcattct

SEQ ID NO: 236285 - DNA, 1384 bp, Homo sapiens
  chr12:49735794-49737178
  hyper
acttcagtgagcgccgcgcgcagcgcctcggagccagagaccgctgcccggtgcttcctcccatcttcttccatcccttccctcttgctccccctccctcctgcactccctccccggcggccgcggcctttattagggattccgcggctgtcggtcccgccatccatcctgtccgccggcaattaggcggccagacaaagagcagcttcggatggatgagggtcccagcggatcggaaatgtgaagggtcagcgctgccgcccgcggcgcaccccgctcccccttccgcataatcaccggccgcccgtcactcagccggccgcccagggagctcctgggcccggcccgggagagggcggggtgcggctgcagcctaggcgcccaggacagggcgagggcggacctgcggcaggagcgcctcctgcggggcagtggaggactgtggcctgaggcattggccgaagggtgggggattatggccccgggcactccccgaagggaaactggggctagcggcttggggcctcccagtggggaagagggaacaaaagctgcggagaccggaggcccggggtccagggcgccccctgctgggaagctgggaaccaagccttagaggtccggcaggtacagatggaaccaggcccagggcgacccctcctagggaaaccaagggtttctagcctggcgcgcctcctgccggctttgaatgacactgcgcttctatgcccgctccgttcagtgaaatccaaccaatccgcatccgctcaaaaaaggctccaagtcctggcgaacccgaggggagccgagagggagttcaaggagtccaggttttactgcagattctttggcgctagctcccagctgacaaatcaacatctcaatctgacaattagtggtcaagatgcggggtgaggggctcttacagccccggccgcttagccctcccggcgggaggcagaggggtgggcggtgctggcagtgatgaacgactccaggggggcccgtggccccgagcgcgcattcattactcgactgacaggcgggtggcgggccgggcgggctgcgagtggacgtgccgggaaagaggccagtagcaggaggggactaaggcaagcgtttaacagtcccactgctccatctgctcccggtccttcgccttgaccctgggacttgacttccttgagctcggcctcccagttgttggagctggccctggctgggaagcaagggcggggacctaagccctcttctggggttaggtgatttaaggtctgagatgtcaaggaagggtattaggcaggtctcaagactaggcgattcggcctgacctctgagagattgtgcgtgactgtgcactcagagatggcgtgtatgacaggga

SEQ ID NO: 236286 - DNA, 1824 bp, Homo sapiens
  chr12:49738836-49740660
  hyper
agccttagagggatcgatgcggcccgggggccccgcccggggtcgatattcctgattgggaagcggccgcttcgcggagcccgcgtgtaaatcacctgggctgggggagggggcgtggggagcctaccacgtcccaggctcgcgaagccaggaggggtcgggacccgggcggtaccggagggcgacggaatgagaacgacaggccttagagaaccagagagaagcccgcccagggcctccccctcccccgctcagccctgccaactcccccagcaggctccagtctcgcttcagcggccgccacccttcgttgcccctggagccgccggggaggccagtgtcggagccagccatgcggcggctcctctctggccgctcccgcggggccggggcttcggcggctgctgtcacggagccgacaggccgggccggccgggaaggggcgggtggcgggggggagaggcggcggggtgaggctggctcagcgctggcactcagtgggcgcgcaacgtatgtttgccgaattgaaaggctgggacaccgagcggcgcagggcagagggtcggagggcacaggcggggtaggagatggcccagaccgggtgagggcagaagcctcactcacgggggaagaaggcactcgaggtcgctctgaggaccgctgggctgggatagaccacccatcccccgccggggagacccgggtagtaaagaacaagacagaatgggacaggcaggacggtttggaccccacctacaagcgcctccaccaccccagcctccgatccttgtcacgctctgctggggaaaccgaggcagccgatgctgagaatagccaaaaagttaaaagcggggtcagcgacgaagctggggcagcaaccagaattcctgcgtgggttttttggattcctccgcccacgcggggccagtttgcgggtaaatgcaccaccgcgccccgcaccacagctcagaccctttcctctcgctgcagtttgtcagatccccccacctcccactctgcaccagtttatagaacaacaatttggggaaaacaatccgggcggagtgacggccccgtaattgtgacaaagtgagtgcgggcggctggagagagcgctaggccgggagcgctgcagggcgaggcggaggcaggggcgcctccccccgccctgccgccccctcgttcttattccggtcacctcccatccctctccttgactcttcaattcctcttctcccggccccttgcgccttccttcgcttgttcctccatcgctcttccctttcctcccggtaacagctcttctcccgctcccccgaccccgtcgcccctcccccggtgcgctttttcctcgctcacttctcccctctcctctgccctccactcgtttcttcagcttttcctcgcgcttacattgcccttgggcccctggctctccccgcacaatccgcttctctccctccccactcctcccttcctgagatcgaaccctgagccccttcccgacccccactctctgggccgccagcgcagccccgcatttctgggttcctcgggaagtaaacctgggggcgcgctgcggccccgggtgccccggcggccagccccttccctctcccttgtatggctgccgcccccgccccaccacctgagccgggagatagtttgtttgtccagcggcggccgccgccgcccacgctgtttgcaaagcttagcgcgccgtcgcgcagtgcgggcccaattaagtctcattcattattcagcgctcctgtccgcccccgccccccagcagtctgaggcgtcgctttggggcccctcccagcc

SEQ ID NO: 236287 - DNA, 197 bp, Homo sapiens
  chr12:49740982-49741179
  hyper
aggcagactaccacgagcctcgggctgcggcctcgccctcctggtcgagcctcctgccctccaaccctctgctcccgtttctccctctggttcatagcccgcgggacagagcagccctggattgggaggctcctcaggtctcaggctcaggtgcagaagcagagcccctaactggaaggctcggaggtgggccggtg

SEQ ID NO: 236288 - DNA, 125 bp, Homo sapiens
  chr12:49741513-49741638
  hyper
ggtgtctggggaccgcccggacccccccttccatcggcggcagcgccacctggcggccatggtgcggtggtgtgggaggagctgggcccgggctgggcactgagcccaccggagctgcaggcgtc

SEQ ID NO: 236289 - DNA, 176 bp, Homo sapiens
  chr12:49931603-49931779
  hyper
gatgctggtgactgtgagtgcgtctcgagggatgggggtgctgagcctaccgcttcgctcgttagggaacaaattgctgttttggccccggcggctcctctgggcgcgggcggcagccgcgctcgctggcaaatcgtgggagggaggaggagcggcgctggcaggcaagtccgggg

SEQ ID NO: 236290 - DNA, 333 bp, Homo sapiens
  chr12:49942889-49943222
  hyper
ttcggcaacgtgtccgccaacacggacaccgagaagatcttctccatctgcaccatgctcatcggcggtgagcccggccgcgcgcgtcttcccggggccactcccagacttctgcccgcaggcggcgccgtcccactccccggagggcctgaggccgggggctcttccgctttaggtggccgcggaacccgaggccgggggtgggggagacttcgcccgcacagcggccttcaggccttgcctaggagcgtgcgggccgaggacagatgagcccagcgtggtgtcaggccgggccaggtcccctaggtgaccccctctcgtcaccctccccca

SEQ ID NO: 236291 - DNA, 544 bp, Homo sapiens
  chr12:49961430-49961974
  hyper
ggaccctccgcccctcgttctcccaagagtgcacacccaaggtaggggatcggtccaggtctgtctcaagaactcggggtaggagcattgatgaagtcacctctgcaactcaaagcagagcaccaagtagccttggtttgagacccacaggctggtggctggggaggtgggggtaaactcgcaagcccattctcaccccacggtctccatgcctttgcgcatgcgtaacacttcgagccagattctaacccggtccggcccacgcatgcgcagcttttcggggcgccactggggcggggccccaaacttggggggtggtcgtccccggcggcactctgcaaaactccatttcatccccaactcctctgagaaccctcagaggcgaaccgcgaggtctcaccattcctagactgccagatccaacaatttctccgcggcgacggtagcagccgcagggccaaagccggcttccgtgaggtacgtctacttccggttaacgaaccagggggctggcaatctcttccggttcgtcttggcaacgtgt

SEQ ID NO: 236292 - DNA, 182 bp, Homo sapiens
  chr12:50016479-50016661
  hyper
caggaacctagcacggcatcacgcgagtcccggctcaggtgaggggggaataaagggaacaggaagcgccttttgcggggctttgcaggctggcggtcagcgcctttctgcacccgtgtgcctggggcctgtcactctccagccccaaggccttcagcgcattccccgcagagctccaggtt

SEQ ID NO: 236293 - DNA, 58 bp, Homo sapiens
  chr12:50135124-50135182
  hyper
agaccttttgcttcgaggcggttggtggccagtagtcttgatcgacaagctcaggcct

SEQ ID NO: 236294 - DNA, 561 bp, Homo sapiens
  chr12:50297534-50298095
  hyper
ggtgcaggctggggagatgccggtacctttccctgggtcatggtgccgtctctcggggaaggggtccctgaggcccgggtggccgcttgggtaaccgcagcctgcctgcgtctcttccttcctccgcgtgggttctagcaacatccactgcagccgggccaggcgagccggcgcgtaccatcggcgcggggggaggagagggccgggcctgggaagatgctgcggaggacgctgcggattcgcgagcccggggtaaggcggcggcgcaccgccccctcccgccgcttcccccccaccccgccccccaccgccgcccttagccctcccccgggatgagagagagtcgcgctgcggagcaaccccagtggatgggtccgcgggggctgagcgggcggaggacgcgggaactccgtgacaccgaccagctgacgctgcccgcgtgaaaccagagccgggcatcagggcctcatctccactgtctctgcacctctctgcagctccagctgcgcctctgccttttcctcctccctctttggatgcggccctgatttctgtctccat

SEQ ID NO: 236295 - DNA, 328 bp, Homo sapiens; identical to SEQ ID NO: 202977
  chr12:50339293-50339621
  hyper

SEQ ID NO: 236296 - DNA, 68 bp, Homo sapiens
  chr12:50349342-50349410
  hyper
ggtggagctgcactcgccgcagagcctgccacggggtaccaaggcctgagggccgccagcggcctcta

SEQ ID NO: 236297 - DNA, 921 bp, Homo sapiens
  chr12:50354873-50355794
  hyper
aaccccggcctgggagagggcgcctccggggatccgttgcctagtccaggtactgcccagctaccgggcgtcgaggattgcgaagcgtcggggcaggctggcacggtgcccacttttcccaaaacgccagccttccaagcccagaagctcgcccggcccaggccgggagcggcccacgtcggacggccggaccgccctgcaggacccagcccggccgcccgcccccgccgccggcggtgagggaggtgagcggcgccgacctgcgggacgagcatcactccgacccagccgggggtgaggcgggtcaggatgctccggtcgcaggaggaaaaggaggagctggaccaaaagcccgaagagaagaaaaggggaaggccgcgcacggagcgcggtaaaggccggcggagctagacgccccgaggtcggagtgaagcgccgggaccgagccccgtctcccagggagtccggggcgcacggcaccgaggagagcgcgggagccaacctgggcgcatcatgcgcagggcccgggacgctgggccggtctacaccgccgcctgggtcacgtggcccggacgggccggcggctgccccggccggggggcgggggtcgcgccggggttgcgctggacgacggagagcggcgggcccgcagcggcctggagcctcccaacccgcgcgccgcgctggcccccgagcgtaggagccgccccctgcccccccgcgccggccccgcgcccggccgcccgccccctatatagcgcgccccagcagggcccgcgccaggccgccagcctcggagtgggcgcgggacagtgcgcggcgccccgcagccaggcccccgcccccgccgcatccacctcctccgccgcctgcgacccaacgggcgccccccgccgcggcagctgccgccgggcccccgcg

SEQ ID NO: 236298 - DNA, 201 bp, Homo sapiens
  chr12:50361387-50361588
  hyper
ggccagcaggggtcgctgtgtctgcgtgtcggatcttgcaggagcggcaggtctgcgggctcacaaagtcccgtgcacacgcgcgcacacacactgaccccacacagtccggggctcgcggccacacactgacctcagtcgtgcccgagggctgcatgttccgggtgtgtgcgtctcctttcctccgcacgttcattcgaa

SEQ ID NO: 236299 - DNA, 78 bp, Homo sapiens; identical to SEQ ID NO: 202978
  chr12:50419370-50419448
  hyper

SEQ ID NO: 236300 - DNA, 157 bp, Homo sapiens
  chr12:50426642-50426799
  hyper
gcgcccccctcccacgcgctcccccgcgcccaggcaccaatgatggggttggtgctgataggtggttgcgggtgacctcccgagcgcgcccgtaccccaccggccctcacctccccaggggcggccgcctgatccgatgtcccgacaggcgaactgt

SEQ ID NO: 236301 - DNA, 122 bp, Homo sapiens
  chr12:50505850-50505972
  hyper
tccctttatagcgcggcaagccgaatcctagaggctaacccggcaggtgggagggagaaagttgctttctgcaccaatagctgaggcgttcagggttgtccagggacgctaccctcacgtgt

SEQ ID NO: 236302 - DNA, 238 bp, Homo sapiens
  chr12:50677034-50677272
  hyper
gaagtgaggaaagaacggaggatcagcgtccctcgaccccttatctcgagggggagggactcacactccttgcactccccccgccccaaaagtcgaaggagaaagagggtgtggagagaagccggggtcttcccgcactctccggttgtggagagagaaggcccttacctggctaaaagccgcctttcctctgcgctgctaccagccctgtcacaggtcccggcgctctacctagcgc

SEQ ID NO: 236303 - DNA, 201 bp, Homo sapiens
  chr12:50899499-50899700
  hyper
cctttaacaatgcgcgatgcctccccagtgacaggagtgagacacaagcgggtgagccatttagggtcctaggaagataagaagcaatggcattaacccagagagacacacggtgctgcttttagaccacctttgtcataagaagtttttttttttcctggtgcctgttattcgggccgaattttccgcatctggtcacct

SEQ ID NO: 236304 - DNA, 95 bp, Homo sapiens
  chr12:50926642-50926737
  hyper
tgtgtgagaaaaaacgcagagaaacttaagccttgagtgaattagagtaactctttgttagtgactcctctggccctcaccgggctggtttttca

SEQ ID NO: 236305 - DNA, 267 bp, Homo sapiens; identical to SEQ ID NO: 202979
  chr12:51157702-51157969
  hyper

SEQ ID NO: 236306 - DNA, 239 bp, Homo sapiens; identical to SEQ ID NO: 202980
  chr12:51318416-51318655
  hyper

SEQ ID NO: 236307 - DNA, 108 bp, Homo sapiens
  chr12:51419807-51419915
  hyper
atgtgtcctaggccgcggcggggaaggggcgagacccccgcgacctccggcgttccctccctgcccccatctttgggtctttctctgaatggcgcgactccatcagtc

SEQ ID NO: 236308 - DNA, 41 bp, Homo sapiens
  chr12:51477513-51477554
  hyper
gcaaagccgaagccggcgcgcaaaccggctcccgaggcggc

SEQ ID NO: 236309 - DNA, 98 bp, Homo sapiens
  chr12:51632361-51632459
  hyper
ttctgcatccgagcgtccaacagagaaaagatcctgtttccagacaatacctgcatttggtttttctccagctgagggacaccggtagggggggggag

SEQ ID NO: 236310 - DNA, 686 bp, Homo sapiens
  chr12:51785149-51785835
  hyper
ctacaggccaccgcgaccagcagagagcgaaggcaggagggaccagcctggcccagccccttcattttactgtcgggggtagtgaggaggaagaggaagaggcgaaggctggcggaggaggaggtgagagcgaggactcggcagaagcgagatccgccgaagggaagtccgagcagtcggggagctcaggggggccctcccggggagagggtcgcgggctccttctgccgcttacctgtcgcgccgaggcaaagccgcagccgcgccgcggggtggctcccgggtttccccaccggacggccgggagggtgggaccggggcgggacctcccccagctgcactaacgcgcccgccccgcccctccctggccaggtgcagcgggtcccgccgtgtcctcagcctgctgcgggcccgggaactcccggcggaccggcagaggggcgccccggcttctctgcgtctcagcccgccccgggggtgcggtctttgcggccaggctttcagcgcggaaaaagattggagggtcctagtcaccccaaagaggacaggcattagcagagccgcgggcggcgggtgcatggaaccggaatgtgctgcgcgccagcctggagcgctcggagcccggaggcctgccccggagggggaaacgcggcggggcggccatgggccccggggtcctgccccag

SEQ ID NO: 236311 - DNA, 205 bp, Homo sapiens
  chr12:51818792-51818997
  hyper
gagccggacggcgtcctcagctatcaggtagggccccgcctcccgcgcctcccgctcctccccggggcgcagcctcctcatcctctgcccaccctccttccttctgcccccgagcccaggcttcccaggccgctccctgagggcgaggggaggccagcccgggacaccagggggcgctccgggcggttggggaccaggccagggc

SEQ ID NO: 236312 - DNA, 891 bp, Homo sapiens
  chr12:52207924-52208815
  hyper
ccggtcgccgtcgccgccagtgatccatagcgtgagcaggacgaccagcgccccggtgcccagcgcccccacgaagccggtgaggaggccgagcgccagcggccccgcccaacccatggggctccgctcgtacaggggctgcggcaggcgctccacgatcagctgcagggcgtcccagtccggcgcggggaccgcggcgcgccgggggcgcggggccggggcaaagggcacgcgggcggcggcgccgggccgcggcaggaagcgctgcccgaacttgcgcagctgcagcgtcgcctgctggtggaggttcttgcccagctccctggccacgtccgggcggccgctgcgccgcagggcccgagccaggcggtcccaggacagggacgcggcctggggggccagccaggccgccagcgcctcccggcagccgtcggacacctctccaggcccggctaccctgcccgccgggtcctcggccgcctctcgccgccgccgccggctcggagaccccgacgtggtgttgagcggctcaggccgcgccagccggtcttcagaaagccgggacaactcggcctccacgtcgggctcgggcgcctccaggagcgaccggaaatggccgcactcctccggggtcagcagctcggccagacggacggctgcgtgagggcccatagcgtccacggcccccgccggagccagcgcccaaacccagagcgtgaggaccaaggcgctcgccagagtccgcgccgccatccctggcgggaaccagggaccgaggactgtgcggggacggggacgtggacgggctccgcgccggtgatgggggaggggttccgaacgcccgcggattgtgggagggaggaggctccgaacagtcgggaagcctagtgg

SEQ ID NO: 236313 - DNA, 173 bp, Homo sapiens
  chr12:52301149-52301322
  hyper
cctgcagccccagcgaggggcgagcggcggccagtcggcgagctgggcaataaggaaacggtttattaggagggagtggtggagctgggccaggcaggaagacgctggaataagaaacatttttgctccagcccccatcccagtcccgggaggctgccgcgccagctgcgccg

SEQ ID NO: 236314 - DNA, 63 bp, Homo sapiens
  chr12:52401326-52401389
  hyper
ctccatctggctttctgccccccatgccccgcctccccgtggccaggtgtcctgggtccccag

SEQ ID NO: 236315 - DNA, 89 bp, Homo sapiens
  chr12:52401569-52401658
  hyper
gcctgccgcctggccccacgtctgacgtacggggcgcgagggccactgctccctggacttctgtcggaaccggacgcagtgggaggggt

SEQ ID NO: 236316 - DNA, 86 bp, Homo sapiens
  chr12:52427239-52427325
  hyper
tgcagaggatttttaagagccctggcctggatttaggggaaatctcgcattaattccagctctgccatttccggtctggagacctt

SEQ ID NO: 236317 - DNA, 58 bp, Homo sapiens; identical to SEQ ID NO: 202985
  chr12:52463634-52463692
  hyper

SEQ ID NO: 236318 - DNA, 192 bp, Homo sapiens
  chr12:52464067-52464259
  hyper
gaattccttcctgcgtccgtcccgagtctcttgatatggagccaagtaagttttctggttttgcttttagctggtctcttgtggctcagcgccgtgcggaggttgaagcgtacctgcggaggtcgcaccagggcgtgaggaggaggaggaagggcatgagccgagcttgaggaatccgtgctccaaactcta

SEQ ID NO: 236319 - DNA, 50 bp, Homo sapiens
  chr12:52615994-52616044
  hyper
gtgcagatagggggcgccagagggagacttcgaggcgttgctttctgtgg

SEQ ID NO: 236320 - DNA, 782 bp, Homo sapiens
  chr12:52626727-52627509
  hyper
cctctccaagcatcctcctccgggaagccttccctcactgagtccgtttccaatgggctggaactgcggtcccccgctgttctctgcggccgtctagggatggcgctcctgcctactccggaccatccctgcttggactgaaagcctgggcttcggcggggcgggcgggcagagggcggagggcggccccaggaggggcctggcagcagagaaaggtggcccgcggcagccccgcccctacctgtggaagcccagccgcccgctcccgcggataaaaggcgcggagtgtccccgaggtcagcgagtgcgcgctcctcctcgcccgccgctaggtccatcccggcccagccaccatgtccatccacttcagctccccggtattcacctcgcgctcagccgccttctcgggccgcggcgcccaggtgcgcctgagctccgctcgccccggcggccttggcagcagcagcctctacggcctcggcgcctcacggccgcgcgtggccgtgcgctctgcctatgggggcccggtgggcgccggcatccgcgaggtcaccattaaccagagcctgctggccccgctgcggctggacgccgacccctccctccagcgggtgcgccaggaggagagcgagcagatcaagaccctcaacaacaagtttgcctccttcatcgacaaggtgagcgggactggacctcgcctctcctcgagccgcgctccagaccacaccagccgccctaactagccctgcctgcgcgcgggccaggcgctggggagcactgcc

SEQ ID NO: 236321 - DNA, 51 bp, Homo sapiens
  chr12:52627539-52627590
  hyper
cacgatctgggggtccttcctccttcgcatgaaccccgtggctattttatc

SEQ ID NO: 236322 - DNA, 384 bp, Homo sapiens
  chr12:52652220-52652604
  hyper
gccgcggtagggggcggcggtgatgcagcagcggccgggccggggcccgcaggccgagatgcagctgaaggcgcggaccccgcagggggcgctgaggcgggagtagaggcaggacatggtgcggtggcggcaggggcgggcggctggaccccaagccggcgctgcgccttatatgacggcccgcgggcccggggagggagctcgcggccaaggcgtttacgagcttggagggctcggccctcgcgcctcgcggagccgggaatgaaagcgagccaggccgcccggccgcctgcataaaacggcgttcgcctcccgcccgagttttatggggccgggaagcgcctggtcagccccgctgcccgtgcgctgcggtcagtgcgagtg

SEQ ID NO: 236323 - DNA, 138 bp, Homo sapiens
  chr12:52672850-52672988
  hyper
ggacagtcgtcctccgttcagccgggctccgcctgcctgctccagccccgagcaggctccggcgccctggagacgagcgcccctggcggcggctacgcgctctgcggctctcccggctgtgtccgtgggctttagcta

SEQ ID NO: 236324 - DNA, 537 bp, Homo sapiens
  chr12:52702043-52702580
  hyper
tgtctgtaagtagtggggtccgtcccctcctcccgctgggcgggtctgggagcctctgggcaaagggcgcgtgggctcgcagcaaagccactcacccaggtcgcggctgcgcctgacgcgcgcctccgtctctttcccctgcaggcgtcagcagctcccgcggtggcgttgtctgtggcgatctctgcgcctccactactgcccctgttgtctccaccagagtcagtagcgtccccagcaacagcaacgtggtggtgggcactactaacgcctgcgccccctccgcccgggttggcgtctgcggcggcagctgtaagaggtgctaggaggctgccgcctccgccagcgcctgtcgccgtcactctccacccagccagtacctcgcgccaccagaacgcgccgcccgcgccggcctcccaatagccgccgcccgctgcctgcactctaagcgccctccccaccgctccgctccgggagccatccccggtcgcaggagtccggggagggccgggaggcgccatggtctctctctgtagc

SEQ ID NO: 236325 - DNA, 114 bp, Homo sapiens
  chr12:53004286-53004400
  hyper
tgaagtaaacacatcgccagctcgccgccccctcccccccgcccccaaccacactctgggaaactttaaggtggagacttgcagtttcttccagtccctcggtcccacccacct

SEQ ID NO: 236326 - DNA, 492 bp, Homo sapiens
  chr12:53084860-53085352
  hyper
tgagaggggatcaggaagggcgtggaggggaggagtttgaggagagggcggtgaggggcaggcgtgatgtgtggcagaaacgaggcctctactccaagatccgcctgtgggaggtgttggtggaggtctggatgatctgcacgcgcgaggatccgcggccgcttctgccgctccctccgtagctcccgccaccgccgccgcagccgctgccataaccgcctccactcctgcctcgtgccccgcctccgcggtagcttcttccgccgccatagcccccaccgctgccgccgccgtagcctcctgagccgtagctgccgccgcctcccgcgccgccgttgacgctcacctggctgttctgcacggctgtgggtaggggacagtgcacacggggtcagagggaccgggcaaggcccccacctgcacccgcccctgcacctgcagcctcctccatcctcgatcacccgtggcatcgacttgcaaaccccatacatt

SEQ ID NO: 236327 - DNA, 554 bp, Homo sapiens
  chr12:53107929-53108483
  hyper
ctactcatccttcgcggcaactttcgggctgctgcgatgccagcagtctgggaaggtggggctccggggcacaggtcagaagcagcggagggaaggggccccgcgggggtgcgggggagctcagagcggggcgtgccggagggcgaaggggactggggtccgaggacgcccctggcgcggggttcagaatttgtggcgggaccgccagctctaggaggagctttgttctctctggcggcgctgctgccgccgccgccgccaccccggctgacggcgcaggagtcccggagccagagaagccccccgagcaccgcggagctcccgcccaagccccagccgctgcggccccggctaccgccgcgggcccgggctccgactcctcctcccagggcgcagccgccgccagtgctgctgtggccagtctctgcaaagacggtcggggtcagggagcctggcagtgtccgcccggcacgccagcccctcccacagtcccgagccgcaggtcttcccggggtgacgccccgccgagatccggcaaggcgtggggaggacag

SEQ ID NO: 236328 - DNA, 313 bp, Homo sapiens; identical to SEQ ID NO: 202988
  chr12:53135226-53135539
  hyper

SEQ ID NO: 236329 - DNA, 325 bp, Homo sapiens
  chr12:53267967-53268292
  hyper
tggctgggtgccgcgtcaggggtctctcggggcggctagaggccctgggaacctggaagcccgcggggcgcggcggggcggggcagagcgctagagccgggtggcggccgccgattggctgggcccgagcgctcccacggcggccgggggccccagggcggcgccggccgcgcccgctccgcggtgactcatccagcaccccacctctggagctggacgggcgcccggcctcttcccaccccagacccgcccgctaagccgggagagcctgactcagcagggggagcctggcctgccttccgcccccttcgcgtcctcccccggg

SEQ ID NO: 236330 - DNA, 168 bp, Homo sapiens
  chr12:53273344-53273512
  hyper
caggcccgtgcaggcgtggacctcccgcgagggcctcagcagtctccaggacagagagtggaacccgccacctgctggaaaggccggagccggcgcagagctagcgcggggcaatgtggcgccctctgcggggagcccctgctgcctcgcgccggcactcaaacctcc

SEQ ID NO: 236331 - DNA, 192 bp, Homo sapiens
  chr12:53297370-53297562
  hyper
gcccctcaggcagcggagtcccagggctgcaaaacccggcctggctcctgctgtgtgaaagtggagccaggccgctggggcggagcagggacaggacgcgagaaagggacacgggctgaatgggcgaggggcgttggtgggcgaccgcgttatctgaagccataaacttaacaggacgtaaaccccgggcgg

SEQ ID NO: 236332 - DNA, 277 bp, Homo sapiens
  chr12:53342670-53342947
  hyper
acaacacctgctgtccgtgtccatgcccggttggccaccccgtttctggggggtgagcggggcttggcagggctgcgcggagggcgcgggggtggggcccggggcggagcggcccggggcggagggcgcgggctccgagccgtccacctgtggctccggcttccgaagcggctccggggcgggggcggggcctcactctgcgatataactcgggtcgcgcggctcgcgcaggccgccaccgtcgtccgcaaagcctgagtcctgtcctttctctctc

SEQ ID NO: 236333 - DNA, 100 bp, Homo sapiens
  chr12:53359363-53359463
  hyper
tgctgcccctgcctcgctcccgcgcgctcccattgggtggtgcctgggtgtccccggctcggcagctgcggctgcttcccagccccggggtctcagggcc

SEQ ID NO: 236334 - DNA, 373 bp, Homo sapiens
  chr12:53472778-53473151
  hyper
tagatgctggttgcgcagaccccacagtcttggcaccggcgagtggcggccctactgggccctgtctcctccccgggcacggcctgatcactgagatgagacccgggagcagccgggccccagcccatccgtgtgcctacgcccagtctccccaggccctgcactgggccgagggtgcagcaacagaagaagcccagtgaccagagcgcagggccccgcccctggccccagagcccccgcccaggacccccgccttccgcttcaggctccggggagatacgaggcctccgggaccccgcccccgatccccgcctaccggggccgccgcgtcctcctcatccataggcctctcagctccgcacacaagctcttc

SEQ ID NO: 236335 - DNA, 236 bp, Homo sapiens
  chr12:53574316-53574552
  hyper
tccatgccctcggcgcacggcgccgcccactcacccagctgcacctctccgtgcgtccccaagctcacccgctctgaggctgcccccgctagtctagctgccgagcccggaagtggatgcagccgctcggcggagaggacgagggggagggggaagtgcttccggggaaacgggccggggttggtgtttgtaaacttgcctcggtcccggtgggggcagccgcggcggtggggttg

SEQ ID NO: 236336 - DNA, 66 bp, Homo sapiens
  chr12:53607267-53607333
  hyper
gcgcccccgcacctccgcagatgaggcagatggcgctgagcagccctgtctcggtgtcatccatct

SEQ ID NO: 236337 - DNA, 739 bp, Homo sapiens
  chr12:53613776-53614515
  hyper
ggcgaaacaggagccgccggtggctctgcgcagcaagccggccccgggcccggccgccccgtacagccgtcgcggacccggggcaaacgtttccatacagtcgtacatcgcgacccggcttgaagggaaactgggtgctggaaacaccaaggacccgcagccgattccccctcctcccccggcggcgccccgctccagcagggggggagggggagggctagcatagggcgctgggctgcatgcgggtaaggggtgggcggggaagaggggggatccccagcaggggaaagggactgggcggggcgcgaagctggggctgccgctttagcctccgtccagctcttatctgggtgcttcggcagctagcactggggagaccttttttaaaagcgaagcctggaggggtggggggtggggcttggagagcgaagggggccgggcaccgagatgagcaaagctgagagtggagcgcacacatacacatacgtacactcgctccgcggcgcgcgcgcttgcttagacacacatccgtgcatgcatttatcttatcaggcaccaagaatttgcaaatatgcaagagtgaacatacatgtgagcacgcatataaaatcataggtgcacacacgtttgtgcaaacacaccttgctcgggagaatgcttgcaggcatactctccacagctcataggctttgcatgcatttgcactgaggcgcgtgcccaggtcggggttggaagaagg

SEQ ID NO: 236338 - DNA, 355 bp, Homo sapiens
  chr12:53662065-53662420
  hyper
ctggcgcggaaaacgaaggttacattttggatcctcgcggagtactggtcaggcggttaagtcctgtacctaggaaagagggcgagctctggggcggtaaggccggaagggactcgtgagcgtgggtacgtgctgaagtgaaggggatccccagcgctgacgcgaggagaggcgtgggtggctcctggagggagtgtcgggaggccttgggactgccccgggccgctgaagggctgggccgaggcctctggggtagcgcggcgagtggtgtggtagtgcggtcggggatctgcccggaggaaggaagagcggaatcgtccttttataacgggagcacggcgtcctggcgtgggtt

SEQ ID NO: 236339 - DNA, 176 bp, Homo sapiens; identical to SEQ ID NO: 202993
  chr12:53714987-53715163
  hyper

SEQ ID NO: 236340 - DNA, 216 bp, Homo sapiens
  chr12:53718312-53718528
  hyper
gcactgaggacccacgatagtttccgtttgtaccttagtcgtaacaccatccaaacccagatacccctaggaaaaatcactccggcctgcaacttgcatccttcgatgaaacctcgattttcaccatcaggttataatgatcggttaggtgcctgcttcttaccctgtaaggtgaactggagagaaggaacagtgctgttccgcccgctgcccccg

SEQ ID NO: 236341 - DNA, 163 bp, Homo sapiens
  chr12:53719362-53719525
  hyper
ggggcgggagtggcgtcagggtggggagggggctcgtaacccgagcccccccaggatcgccggccccctcccacccgtagcagcccctcttgcgacccgtgcggtggacagtccgacgcggggcgcagctgggagtcgggcccaggccggggggagcggcctg

SEQ ID NO: 236342 - DNA, 141 bp, Homo sapiens
  chr12:53765510-53765651
  hyper
tctggactctggagcggactcagggctacttgtctcaggagacgaaggagaaaaggaaactgcttcacttctggttaaaagaggaactttttttttttttaaatgctgagctgggccgggccgggccgggcgtggtggtcc

SEQ ID NO: 236343 - DNA, 145 bp, Homo sapiens
  chr12:53835282-53835427
  hyper
cagcagctggccccgccccctccagcgctctccgcctagccccgcccccaggagatttccggcttctcggtactggcctagccgtaaagggctccgctccgcccctagagcaaccgtttcctcctcagtcggaccagagtgattg

SEQ ID NO: 236344 - DNA, 133 bp, Homo sapiens
  chr12:53892936-53893069
  hyper
tcctccaccccaccccaatacggtcctttccagctctggaggcccttcgtctccaagctgggccgcggcatccctccgctccattcccttccttcccagccccacaggcgtcgggtccaggtccccagttcct

SEQ ID NO: 236345 - DNA, 97 bp, Homo sapiens; identical to SEQ ID NO: 202996
  chr12:53894678-53894775
  hyper

SEQ ID NO: 236346 - DNA, 136 bp, Homo sapiens
  chr12:53895055-53895191
  hyper
ctccatatcccagcgtgccccgcggcgggccctaccggccgcgactccgggcttggccccggccctagctcgtcggctgtgtattggggcgcgtggaggctgcagtcacggtggcgcccgcggggacggaggaggg

SEQ ID NO: 236347 - DNA, 189 bp, Homo sapiens
  chr12:54070816-54071005
  hyper
gcttgaacgcagcacgagaaagacgggaaaagctcaccaaaccccataaaaaataaaaaataaaaagaaagccgcggctgtaaataaaggcaaatccgccactctctgaggggccgtttgtcctcccctccttggccccgtccttcccgccgccccctcccggctcccgggccccgcggcgccccggcc

SEQ ID NO: 236348 - DNA, 787 bp, Homo sapiens
  chr12:54088875-54089662
  hyper
attgaattaattgacgtacgaacccagaggcaaacagaaaggggcggcaaacactgggcggctcagatttatccttcggcctccgcagggcccggccggacgagatttactgggcctcgaacacggcgacagttcaaacctttgattaatcatgtttttctgcctaccccataatttagttgctctttttccctccctgcctttttttttttttttatcagcggaaacagagacggagtcctcatcagcttcaattacaaatattaaggtcccggacagcactttgacagagaggcggccagccccccacttcgtaccacccccctaaatcatctccgaattaacatcacatcggcggctggcgcgtgttcagatttaaatggtggcatattgttcgcggacggtctagctcagaaccgcgagctcgcagctcccgcggcgggccccgcctctgcccacaccggcccctgcggcctcccgggaggctgtgactcaggagtcgcgggaggctccgactcaggagtcgcgggaggctccgggccctgtctccagcagggggctgcaggcgagggcgcgctggggcgggggcgggcgggctgcacagaggggtcggatgtggggcgagttgggcagaggaagaggaaccgcagatgccgggtggcgggagaggggctggggctgcagggagacaggtgggtttggtcggggttgggggttaggaggggaggacatgctctctgcaaattaggtgcaaacgaaggctcagaatgagcgagtttgggaacgc

SEQ ID NO: 236349 - DNA, 477 bp, Homo sapiens
  chr12:54090210-54090687
  hyper
taaacctgtcagttcggctcatccttaactgggattggctactcgcagtatgcttatcccaagttttcattggctgacggccacctgtatggaaataagaattacccgggactctcaggcccttctcagccgtaccgacctgtggcttagtgcgctgaaacctgcaaggtcggagccgaaactcctgggcttgcttgttgtcctgccttctcttcctcaaaggagatctcttgaatattgccttttccctctgcgccctgcctaaggcctagtctgaaagaagtccgaccaaataacctgaaataatgcggatttgcatgctttctgtatcttctttgcattctctaggttcaaggtcaagattttgccccttccctccaatgccgccagtgttctagcccctttcttccacgtccacctaaggggcagcttctctccgtgtgaagttcctccgtcccgccccgggtttgccaaaac

SEQ ID NO: 236350 - DNA, 182 bp, Homo sapiens
  chr12:54091028-54091210
  hyper
ggtgtatttctgcttgtctccgcgccatcactcatctttactgcccgtccctttgctctcgcgctgctacaacgaggagagactgcagcctgagtcggggctggggatggggggagatgggggccagagatccgcgccccccacgccgctgtgcccttcacgccaaatcctcaccctccctg

SEQ ID NO: 236351 - DNA, 56 bp, Homo sapiens; identical to SEQ ID NO: 202998
  chr12:54120862-54120918
  hyper

SEQ ID NO: 236352 - DNA, 343 bp, Homo sapiens
  chr12:54132240-54132583
  hyper
acataaattacctgcgaggaggaaagacgcagaggctgcgcactttccttcctctcccccagacccgcgcaaggcgctgagggggtcctccctccggcaaaggcggagggacggcctgacaggaacagtgtgcacttgcctctgtcctcccccgagggacagtggcctggggtgaccgagaaacctggccctcccaaggtccccgggctgccaaggaggacccttcggccttagggcggagcctcccccgccgctcaggggaggtggagctcgttgtggtgggcggggctttctccaggtgggacccatcgcctaggcaggtttccccggccaccctcttcct

SEQ ID NO: 236353 - DNA, 917 bp, Homo sapiens
  chr12:54145049-54145966
  hyper
caggggttgggggcgctggggctcggggcgctcactcggacctcggagccaatcgccagagatctaatggctcctttggcagtgggaaggggtgtgcgtgggtgtcctctccttcactctttccccagccctgtcgcctcccaccccccttccggccgcggcagtttccgaaatcgcccggcggccgcgaattcattagtggggggcggatgtaaacgcagcgcggtggaacgttttaattaggcctgaacaataaacaagctaaacgaggcgcgcaggactccctggtgggccctcagcctcctccgcgcggcgcggactcattacggctgcagccaatttcatgccagcgccgagcactggctgggccgggagtggggtcgggggtgcgtgcgggtgcgatccgggcctgcagggtgcggagcgggggcgtcccggggcgagggcagcgggccggttcccgcccgcccggggccgcggcttccgcatttctgcaccatccacctgcctttttcagtgtccttgagatgacgctccctccccacaccagagcggccggctggagagtctagcttgctttttagggtctctctcccgcctcttttcctcccccgctccctctctccttgcggctgactccagctccccctcggtgcccgtaaccctcctttcctctttttgccgcagtctccgtctctcttccacagggtctctccctccccctctccccgtggttgtcagactttctcctggactttctccgccccgcaccgcccgccccggatgccgagcgtggtagactctgcagccgggctcctcgctgcccgctggcgctgcctacacccccttgggctcccctccaaggtcccctccgctcgcccctctctgcccgctgccgccgccgccgccgccttcca

SEQ ID NO: 236354 - DNA, 204 bp, Homo sapiens
  chr12:54150987-54151191
  hyper
gatttcattatcgacgtgctgtctgtctcgggctcagcccggttgccagggcgactctgatcgattgccttccggtcttcttggcttggccggctgcttcctttctggagcctggctgttggcgagcactccctagcggccctctctggtactgcagagcttcccggttgcaggcttgagagactcaggcgaggaacagagagc

SEQ ID NO: 236355 - DNA, 673 bp, Homo sapiens
  chr12:54321245-54321918
  hyper
agttgaaatttctgccctgtcgttccaatgccatgatggagaaggacccctaaaatcgcctttggcgtgtgcagctcgagcgttacaacgatgcaaagtgcggtctttggaggatgcgggagtcggtaacccctcaattcactctcgccgttccttctctccagtctgcgcgaaagccaggtccgagggcttcgaagatctgggggacccgagctgcgcacagtggcgggaaacgagcgggctcagctggccgggccgcgtcccctagccaccgcccgcccgcccgctgctttggcctccggagaagcctggagaggggcctgcgcctcttgaaaaatggcttttgggggcggtaggtctcgggagggcgactggggaaagtgacttgccgcggcttcgagtagagacgttggtgcgggacccaactcctggggaaggcggggagcgctgggcggatgcctggccctagtgcggcgccaacacatacaagttccgctgtgaatgtttgaaagtgtaagtttctctcggattgatttttttttcctttaaatgtatccccttcaaaaaaaaaaaaaaacaaacaaacaaaaaaaaaaaaaacaaagacgtggacaggcaggcgccacccggtctgggagctgaggttcgtgactgctgccgatttcgtttggtt

SEQ ID NO: 236356 - DNA, 44 bp, Homo sapiens
  chr12:54322134-54322178
  hyper
cgggagcccccacgcgccagtcgagcctacgcagctgtggggtg

SEQ ID NO: 236357 - DNA, 443 bp, Homo sapiens
  chr12:54324529-54324972
  hyper
gccaggtagtgtcgcgggcgcttcctagtgcgggcactcatcctgccgctctccggtcggccatttattgtcttgtggggaagggctttcgccaagaaacttggtctgggttagtgaaataaaatactaaacaattactatatgtaaaattttaaaaccagcatattaaaataaactaaggaactctctgtcgtgggagaaatccacaggaaaaggaagagaaggagttagatgctggcgccgagttcctggcggagccaggcggcggtgactcctcaggctgagcggaatcgccatccaggcgccggaaacgacccgaatcccaaaatccgtggaagaaaattgcgctgaaagaacagagccaacgcccccgtcctgccaagtttggcgagacggcaagttggcttcaggagcacaatgccgctaaatgatgcctaagagaa

SEQ ID NO: 236358 - DNA, 827 bp, Homo sapiens
  chr12:54329187-54330014
  hyper
ttgggctgtgtccacaaggccgtgtgctgaaacggtgcaggcagcctgcacccatccctaaactcacaggcacgcaagcgcacgcgcacacgcacatacacagacgcttcccgtgaaaaagcatattaaatatctcctttctgtgttggatcatttaaaagaaaacatttcagagttgaacttagccgagagcttggttcatgagctgtagctgagggcagagtggcttctgccgctccgcggttgtagaagtccctttgaaaaagcagccgagagcagagccggggcttcccgacgaggctgaggagccgttttccattttcctttcgtataattaaatgctccgtctttctccgcataccagcagctggattttctctaaacttcatccacagtcaaacctcactgcctcatccccgaaggccggcggggcgcgcccgggtgagcaccgcagccgagggtttcagcgccaggccctggaaaggctttctagggcgagatcgccttggagatgtaattactacgtttctagtggtgcatattctcctggagtgtttaatttgattttacttgtgtctcagcgagatccacatttttttttcgggggagggggaagaaaccaccccaggcttaaagttaattaaccagcaaggctttactttccaccgccctcctgcaggctcttgcctcggcgcctcccttcccgatcccggctcgccccagacttggagactgcgtttgcaggcgcgaaaggtcttggggaaccaagcaaaagaagagggaattgttcagagcaagcggacttccccagccgcctttagcgccct

SEQ ID NO: 236359 - DNA, 351 bp, Homo sapiens
  chr12:54330339-54330690
  hyper
ccaaaggctggggacgtgtctttgagtcctggcccgcggaaaacgggtccggcgttgggcctgaccggggagggagccccaagaatggggtgggcgtttcaggccctttgtttctcctggcagccctgcagaaccctgtccacagcgccccactacttccacctgggagcagcacttcacagaaggggaggccaggatctgggttccacttctactacccgcggctggaaaaaggcaggcgtctccacccacccacccccaccagccaggccttaggcaagggggccaacgtcatacaacccagtctagacttggccaggccctgtttgctctcctcgttttaccttgacc

SEQ ID NO: 236360 - DNA, 222 bp, Homo sapiens
  chr12:54332001-54332223
  hyper
gttctttccagccgcgagcggaggcgagctgccagggccagagcgctcctgactgttttctattatcttcatttattattttttaaaacctggtttcttccccacccttagcttcaagccccaatccagagacttcagcagtcacagtgatcggcttggcggtagggggtctgtctctccggtgcacatcctatgcctaggcggaggcgcccagttacagcg

SEQ ID NO: 236361 - DNA, 253 bp, Homo sapiens
  chr12:54332435-54332688
  hyper
tcacgtgcgcagagcgggtcacgtgggcgcgggaggggtgctgagaggtggagagcgggagccggcggatttcttaatgaagtgtctccgcatgcgtagagggaatgtagggagggaggtggaagcactaggaggaggggaggggtggagagaaaagaggggagggatggggggaggggaaacaggagcgaggtgtctccctagctcgctgcctctggcaagtggagtttttaaaaagctccagcagatcatg

SEQ ID NO: 236362 - DNA, 70 bp, Homo sapiens
  chr12:54333768-54333838
  hyper
ggggcggggtgggcctatagtgccttggaatccaggacaaaacccccaacccaccgaataactggggagg

SEQ ID NO: 236363 - DNA, 807 bp, Homo sapiens
  chr12:54338496-54339303
  hyper
ggatgtttttgtattcgttttgcttttttaaacattgcattaaaatatcgtcttgattactgagtttttggcgccccctcccttaaacttcgagcccagtggcctcatcatagttgtggtcttgctaaaataacagaaatgaaaagcattagggagcttcactatgcagtgcaatcctctggccccgttgagcccctgccagaactctgtgcctaggcagcctcgggtcctctatctcagtccagccgcttgcctcacttcttcccgcttgccttatctccccgcagacgtggttcccctgcagcccgaggtgagcagctaccggcgcgggcgcaagaaacgcgtgccctacactaaggtgcagctgaaggagctagagaaggaatacgcggctagcaagttcatcaccaaagagaagcgccggcgcatctccgccaccacgaacctctctgagcgccaggtaaccatctggttccagaaccggcgggtcaaagagaagaaggtggtcagcaaatcgaaagcgcctcatctccactccacctgaccacccacccgctgcttgccccatctatttatgtctccgctttgtaccataaccgaacccacggaaagacgctgcgcgggtgcagaagagtatttaatgttaaggaaagagaagaaccgcgccgcccggaggcagagaggctccatggccgtgctgctgggccatccccaactccctatcccatccccagcctccacccccatccagatgggactcacgtggcttcaacagctttggaaatgggtcccgagtgggccgtgcga

SEQ ID NO: 236364 - DNA, 70 bp, Homo sapiens
  chr12:54339505-54339575
  hyper
ttcgctgtccctcccgcactccttaggcaagatttcccagtaaagattttctgtgcgtattttaaaagtc

SEQ ID NO: 236365 - DNA, 376 bp, Homo sapiens
  chr12:54343492-54343868
  hyper
ttttagccttgaccgtgactaggtctttctgaccttgacatcacagggagcacagggaaggggggggaggggtggaaaaggccttgatcttccggtggccagcgaaggggagggctgcttgcccccttgacgcgccatcccccttcccgcaggagcccgccgcctctgtttacacacagaggaggtgtcgtctccagtctagacaagggcgctaataacgcccataaaaggcggcctctccagagatgctctggcaactccgctcccgcgcgcctgccgctggccgctttctccacctccccccgccccgcccttctctgataccttggcgaggccggcgcacgggcctggggacggggaatccagaaggcttcta

SEQ ID NO: 236366 - DNA, 231 bp, Homo sapiens
  chr12:54345041-54345272
  hyper
gcctaatttgcatacgaggcagaaccgctttctgcaaactagacagtgaccttgaactgggccgctgcggcctctggacagaccaggggtaaggcagcactgcgcggaatcactcccgaccacgggtcggcgggggagccaaaacgcagtcactcacagccgattccccgcggtctaagccgccagcagccacgttgcctctcccaccagaatcagcgtagattttataat

SEQ ID NO: 236367 - DNA, 736 bp, Homo sapiens
  chr12:54345520-54346256
  hyper
agcaggcaggccaccgctctagccttgtgatctgataaatgtacgggagagttcgcaccaatcgctccacggtttgggtgcctcggcctgaccacctatagttttgcgcatggtcagcgaagtgccggcgggttaagcccggctagacacggctgccccgactccttgggatgcgagtccctcgcccagccccagcctgctcccggcgaacagctctcgccgaggctggatttagattttaagcgtctcacccgagcctcccgccggccccggggacccagactgggagctgcatttttgtccgagcccggttaaaaaacgggtgcctgagttgcgtgtgtcgcggggttccttaaccacaaacggagcctcggtggtgcaccggaaggctggacgcttagattacctgggtccttgccagagtcctgaaaacccctaggttcccggtgggtctcagggagcaggacaccggggatgcgaattttgctagtggttgtcgacagctctccctgagaggaatcagggtcagctgcaaagaagaaagaggggtttgtgcgtgcttctttgcccgccgaatccaaaacctggggaaaacggccctctttgatgaggctaaatcaggctagaagaaatgcgtgcctggaagaaggacgccttcacccaatcttcatttctcctgcgttgcatccgccgccctgtggccgctgctcctcacgctcagcggcctggcctggga

SEQ ID NO: 236368 - DNA, 336 bp, Homo sapiens; identical to SEQ ID NO: 203004
  chr12:54346835-54347171
  hyper

SEQ ID NO: 236369 - DNA, 45 bp, Homo sapiens
  chr12:54347924-54347969
  hyper
tctacctcccttccgcatccttcctctagccgtgagtggaggtgt

SEQ ID NO: 236370 - DNA, 939 bp, Homo sapiens
  chr12:54348692-54349631
  hyper
tgccggtcgggccccgcggaaatgggcgagcataatctcctgaatcccgggtttgtggggccgctggtaaacatccacacgggagacaccttctacttccccaacttccgcgcgtccggggcgcagcttcccgggctgccttcgctgtcctacccacgccgcgacaacgtgtgctccctgtcctggccgtcggcggagccgtgcaatggctacccgcagccctacctcggcagcccagtgtctctcaaccctcccttcggccgcacgtgcgagctggcgcgcgtggaggacggcaagggttactaccgcgagccgtgcgccgagggtggcggcgggggcctgaagcgtgaggagcgcgggcgcgacccgggagccgggcccggggcagcgctgctcccgctggagccgtcggggccgcctgcgctcggcttcaagtacgactacgcggcgggcggcggcggtggcgacggcggcggcggcgcaggacctccgcacgacccgccctcctgccagtcgctggaatccgactccagttcgtccctgctcaacgagggcaacaagggcgccggcgcaggcgaccccggcagcttggtatcgccgttgaaccccggcggcgggctctcggccagcggtaaggaccccggccactcaagcggcggattcaaacccgacctcttaccagggcgggcagaacaggactgagctagggacgcccagggtgacagaatgtgtggcgaggaagagcttcttataaaatgaagtgcgggtggggggagcctataaacatgtaaacatccccacaaaagaaatggagagtgttcctttttcgtctgcctgcggctggaggcggcagggattccggagttgggggatcctgacggggactccccaggcctgggggtgaggaggtggggacagaaagcccggccctagttctcc

SEQ ID NO: 236371 - DNA, 107 bp, Homo sapiens
  chr12:54350138-54350245
  hyper
gctctcggaagaagcgcaagccctattcgaagttgcaactggcagagctggagggcgagtttctggtcaacgagttcatcacacgccagcgccggagggaactctca

SEQ ID NO: 236372 - DNA, 117 bp, Homo sapiens
  chr12:54351311-54351428
  hyper
ctgacagccacagccgaggcctctgattctcccttccccgctggcgttcacggtcactgcctcacgggccggccagagggtggaccagcgtaatttacgaggcgggaggagaattca

SEQ ID NO: 236373 - DNA, 1097 bp, Homo sapiens
  chr12:54354487-54355584
  hyper
ctgacgtgcacagacgaaattgagtatttaaagccactaagccgctatcgagccggcaggtgatgggtccggccgtctgggttctgtgggtgctaatgtagccggaaatccggcgcgatcgatggctgagacccagagcagagcagggaccgctggccccggtccgcgaacaaagcaaactccggggacttggggttccggccaggccggagcccctgcccaccctccctgctatatccaggaaagcagaagcggtttttcggccccaggccgcgcgagaaacgcactctggagccgccaatcctctctgcatggcacctggaggcgcggaaggttccggtgtaattcagcgggaggtggaaggcaggccccgatcccacagcgcgcctatgctcagcctttggtccgagcggccgccctcctgcgtgtgcctcggtccagacggcgctgccgattttccaaggagaggccgtggcccgcgtccgccgctgcaggactccccagcttcgccctccgctccgcgctgcagccctgcgcggtgctctcggttgccactctagccgaggcctcgagacaaagacgcgccgggcactggtggacgacccgggcgcctgggacactccctgactcgcgcctggagtgctcagcatcccggccctgtggcgaaggttgtgagaccttggtccaattccccgaccgtcgtggtcccggctgcggtcctctccagggtccagggagaggaaacccggcgcgcccacagccccggctgactcgagcagctcccgcgcccgacagcgccggcagctctggtctcctccggagggctgctgtgcccccgcgaaggacgagatgacccctgctggccggagctgtggaggttgcctcgccgagacccggatctgtccagtcgctcgtccctgagcaccctaggcgttggggggacgccctgtgagtgtgagagacctccaagagcggctggagtctgaggcgctggccgggcttcgtgaattagacctttatcctaagctccttccctctgccgggcactcggtgtccccacagcagctgaccgccctcctgcccggcttctcatcgct

SEQ ID NO: 236374 - DNA, 530 bp, Homo sapiens
  chr12:54357368-54357898
  hyper
cccagtccccccaccgaccgctgctcggctgagcgggcgcggctgagatagaggtgcttggccagctctctggtcttgttaacaagcctcatcataaagatggagatgataagaagagcaaggaagccccggtggccgcgaggggcggggcttggtgggcccggtgtggggcagtggctgacccgagccgggtgctgccccggcacccgctcaggtttttccagcgttctctgggcgttcatgtggcgagctaggacccggattattctctctgtactcccgttccctagattttcccttttcctcatggaacaccaaatcagattttaaaaaataaaaatacataaacctctgtctgtgagtgcccgtcttgccctctgccacgtttgttccgggaactgccgccttgctcccttgcctgcatttctctgcgtggttcgctttcaccttcgtctggcgctctcttccctcctctggctctctctctagcttcgtggttgctttttctaccaggtcggtactggcttagg

SEQ ID NO: 236375 - DNA, 275 bp, Homo sapiens
  chr12:54359644-54359919
  hyper
gcagaagcaagggtcggctgttgctctccctcgcccgggcgcctgcagcagtctgggtgggcgggggcgccatgacaaagtgaaggtcaagttagcatcgtaccttataaggaaggcgccggtcctccatttcagccttttctctgccaggacgcggccgtggcatttctggtcttgtaaacatcagactctttggggccttaaaaaaataaagacgcccctccttcctttaccgggggtgagccggccggggaaagcggcggacagggaaatca

SEQ ID NO: 236376 - DNA, 567 bp, Homo sapiens
  chr12:54360131-54360698
  hyper
gttccattccactgcgaagcggagcaggacctaagaattggagagaaaattaaacgtcataaagaaaagttcatttacagcttaaatgtctgaatgttacggtttccttcagaaaacaaggcggtacactcggtaaggagaagtgaggcagcaggggtggggagggctggtgcggtaggaggcttggttttatttctttctcagatccagaggcggaaagaaagggggagaagcaggaaagtgcgacagaagcgttttacccgggcagctagcaaagaaagatgctgcagtcggtggaactggaagcaaagcgcataagggcccagtgcgggggcagcgatccccgagcgctgagctggctgcgctgaggcctggcgtgcggagaaacaaatatattggatatttgctggtctaggggaggggtgaggcaagaatggagggagacagggagaccgggagcgtaaggcagcgccgcagccggcccggcgagaccgaaagagccccgtatccgccgcgacagcctttggcggtgggcagtgggcaggctcagctcgaaggctcagggag

SEQ ID NO: 236377 - DNA, 1195 bp, Homo sapiens
  chr12:54366648-54367843
  hyper
cccttcccagccaccaccctcgcccatcccaccgcccaccccaccccaaccctctctctcctcctttgctcgtgctgtggtatggagagaaggggagtgacgagagaaaaacgaatacaaatctgcaattgattttcataatgtttctgcggtgtttgcaaaccaatcgcctgaacgtccccgatcttacctaagagagaacccctcctacgtctgcgaagtgctccgaactgatatatgacaatatctactttggatcacgtgctcagagagagagagactaagacggataacgcgtcatctcgccttcccaaattttcccccctcgctagaccgggtccaaaacctccatccggagccggcaggagaggagaacgatgtttaactcggtcaacctgggcaacttctgctctccgtcgcgcaaggagaggggcgcagatttcggcgagcgagggagctgcgcctccaacctctatctgcccagttgcacttactacatgcccgagttctccacggtctcctccttcctgccccaggccccctctcgtcagatctcctatccctactcggcccaagtgcccccggtccgggaggtctcctacggcctggagccatccggcaagtggcaccatcggaacagctactcctcctgctatgcggcggccgacgagcttatgcaccgggagtgcctgcctccttccaccgtcaccgagatcctcatgaaaaacgaaggctcctacggcggccaccaccaccccagcgccccgcacgcaacccccgccggcttctactcctcagtcaacaagaacagcgtcctgcctcaagccttcgaccgtttcttcgacaacgcctactgcggtggcggcgacccgcccgccgagcccccctgctccggcaagggcgaggccaagggggagcccgaggcacccccggcctcgggactggcgtcccgggctgaggcgggtgccgaggcggaggctgaggaggagaacacaaatcccagctcgtccggttcagcccactccgtggccaaggagccggccaaaggagccgcccccagtaggtagcagcggccggggaacgggcgggcagcgagggagggagcgagagagggagggcgagagaaggggggaggcaaggggagcggggacggcctcgtgttttgggtcagtccgattttatgtggagttttata

SEQ ID NO: 236378 - DNA, 1427 bp, Homo sapiens
  chr12:54368251-54369678
  hyper
aaatgttcaaactatgtgttcgcgggtcctcgagcagaaacccaagcaactctggggtcagcggcgacaggggaatggggcgaggcggcgcaggactccactgcgttccaggcgggggtctgggcgtttctcccgggtccgcggccttagtgcttgcctagaactgcggtgtggaaggcgctgccccgcgggcttcccggggcgccagggccccggaagcggctctctggtgtctcggtgcctgctggccggcttcctccccgcctcccgactgctctcgccagatttcactgcttcgcgcctgttctcagctttccccccagatttctgggggaggggttgggctttccgaaccactaggagggcggcccaggaagggcccgagggcggagggggagcagacagggggcccgaggggacgcacgtgtacctggagggctttccttctgtcccagaccctgtcagccgcggctctcgcctgagaactggggacggggtggcgcagtggcgggggggtggggacccgctagacctggcagggggtcgaggcttgcccgggtgctgcggctgcaggagagccagccgcctggcgggagggctgcccgcggtgggctaggagaagggccgctgagcgctcagcgggctggggtcgcccgggtctcacgtgtctctctcccccctctcctcgcacttgccccctcccctccctccagacgccccccgcacccgcaagaagcgctgcccttattcgaaattccagatccgggaactggagcgagagtttttcttcaacgtgtatatcaacaaagagaagcggctgcagctgtcccggatgctgaacctgacggaccgacaagtgaaaatttggtttcagaacagaaggatgaaagaaaagaaactgagcagagaccggctgcagtatttctcgggaaatcctctgctgtaacctgcagaccgggcccttttgggggcggggggaggggaaaattattttattttatttttattttttattttctaactcgtcttctttccgccggtggaaaactggactgtggccagggctggcccccaccgctgtggccggcactccattccggaacctcctggaccctctatctgactctcgctgtgggacagggaccgggcctggaaagggggtgaagggaagtgtctgatgcacggcgagtgaacaccgttggcgccgaggccaagactttgatttaaaagaaaacacacctcggcgacaatgtcttgctgctcggattaggtgggggaggggcgacagtagtgagcgcctgagccgaacaatcctcgaactaaaagccttcccttgcccatgtgaaaagatccgctaagacagcatgtctgccagcggaaacttctcgagctcccccctctaccccgccccaccttgcagctaaatg

SEQ ID NO: 236379 - DNA, 367 bp, Homo sapiens
  chr12:54371956-54372323
  hyper
ttggggtaatcccctctagccgcagcactgcccgggaacaaaagatcctcgtctagacgctgccataaagcaccccctcacgtttctaaacccagtttcatttcgaccttaacgacccagtctggcctgtattagaaaccacttccgccctaaatagtaaacaaacctgtagtggagggtcttggctctcccaacacactcagacccccacctcctcagcccgttgccccacatttttcctcttttctccagcctttctcagctcccagcaccccagcccctttcctccccgccgcgcccaccccacccccccgccccagtaaataaacctgaggccgagttcaaagtttcccggagctaaggagga

SEQ ID NO: 236380 - DNA, 3303 bp, Homo sapiens
  chr12:54377163-54380466
  hyper
tctcgcccgtttcccgcgggatgggcggtgggacaaatggctccctggattgactgctgcccggactgtcccaagtctggggcctaaacagcctaaccttgccctggataacccccatgctgaggccacggtgaccctgcatatgaaaacacaaaaccatttcaaatctcccctggccggtcctgcaagcaaatcatacactccacatttccttccagttttccggaggttcaggaacccctgcgtcttctctctccacccctggatggggaaattcggcggatttctttctgcggtcttctagccgcagcgggcttgggcctccttagaaacggtctagcctcctcactcctccactccagggcgctgggctccagtcctttccccgccaaactccagcccttcggaaagtctgaaccctaggctctgtccaaggaaaaatgtggggcgacaggaaagacaagttgttctccagattccgtttcctgaggaaggggtggagagtttagttcgctttggaagaaggcgatggagaaacggaaataactgtttgaaacatacggttccccttatttcttccttttatttaaaaacaaccacaaaaatagactggtctgtcttctttcaaacatgctcccagcccgtgcgctctgtaaaggacgcttctctgggtcgggttttgttgcgtcttgtgtgctggtttcccgtgtgatacgtgactcctccaaactgaccgaggctccgcaggttccctctttctttcccggaatattccctgttttagcgggggcaaggtcaagcggaaagcgaggaccgccagggcctgaagtaaagcagcagaaccggctccaaggccaaagccttgtgggcccctgagatggtgacccaggagccgcccaccctgccaggcccaggccacagctctcgggtcggggatcgggtgcctctggtctctggcttcctctttcccctaccccgcgtccattcggaacctccttttccgagcagccatgaagtgaccgtgaccccctccctggcccaccctagaggctggagattcccagtcaacccccacaggaaacttgcaactccagcgccgcggcccccaagcttccagccccgagggccaagcccggggaaaagaggaggcgggagagcagaaactttagtcctgtttggtattccttaactttttttcccctttctctgctcatcagatccccccaaacccccccccccacaaacctcaccccactcccatccccaaggtaagaagtgggagtcgggtccggggatatggaaaggggagatgaagagtggggagaagtacctgattcgtgtctcgaccttttaatttgaatttgactgttttgagccccgggttgcctcgctctctccctctctcccgcatttcccccctctccgcccccttctccccaggagttacaggctggttactggataaacaaaccccactcttcctagaacccccacccccacccccacccccctccacccctctacctcccctgccgcccggggggcgcttcctttgttcgcggggaagggctccggtgcccctaccccgaggcagctgctagatggcgctgttactccactctgcgcgctccgcctgccgacaacttgaccccgctgacgtcacggccgtctgaatcatcaaggccattttcaaatcccattggtctagccgtcacatggtgagaaccgaatgcgcggataattacggagctgatatttccccccctccccttctttttcctccctcccctccaaccgcgccccccctcccggatggggaaaaaaaaagatgtcagctcctccgctgtagtattgctccttaaaaacccctctctctgaaaatgacatgccctcgcaatgtaactccgaactcgtacgcggagcccttggctgcgcccggcggaggagagcgctatagccggagcgcaggcatgtatatgcagtctgggagtgacttcaattgcggggtgatgaggggctgcgggctcgcgccctcgctctccaagagggacgagggcagcagccccagcctcgccctcaacacctatccgtcctacctctcgcagctggactcctggggcgaccccaaagccgcctatcgcctggaacaacctgttggcaggccgctgtcctcctgctcctacccacctagtgtcaaggaggagaatgtctgctgcatgtacagcgcagagaagcgggcgaaaagtggccccgaggcagctctctactcccaccccttgccggagtcctgccttggggagcacgaggtacccgtgcccagctactaccgcgccagcccgagctactccgcgctggacaagacgccccactgttctggggccaacgacttcgaagcccctttcgagcagcgggccagtctcaacccgcgcgccgaacatctggaatcgcctcagctggggggcaaagtgagtttccctgagacccccaagtccgacagccagacccccagccccaatgaaatcaagacggagcagagcctggcgggccctaaagggagcccctcggagagcgaaaaggagagggccaaagctgccgactccagcccagacacctcggataacgaagcgaaaggtaaggccgcctgggccgcgggcgccactgggacgttccggcacttggtcttcgcggccggggaggggggcaggggagagggttgggcccaggaggccccagaccatttcgggaatgcgaccctggctttcgactagcgtccgctgagctccaggctggtggcgcgtcacttagctggggaaggtaagcggcgacgtggaggtgtcggccctgccccggccatgggtgctaaggcgggggcggtgcgcaccgcgggccgcctgcaggcgcagtgtgctgcaccggacgggtggctgctcccaggcgcgtgctggctgtggtttgctttctcaatgctggtgtcctggggagctgacgtcccccagctcaggtcaggggcttgcaaaaagcctaaaatggcgatcttgggccagggactagggaaggctggggagatggggggagttctctttactgcgttttcccagttgaaaattgtttcctgcgaaacgcgatttgttgtttgtgggtctgatttgtgcgtgcggcttgggctcctgcggcttttggctcggccgggggccttgggcagcgaggctggagccggaagaggtggaggtgaagggctgcccgccacgtccctccctcctccagatgcctggcttggatggcgttggaacagggcatttggaa

SEQ ID NO: 236381 - DNA, 405 bp, Homo sapiens
  chr12:54383374-54383779
  hyper
agggacctgtggttcgtgctgcgaagatgcttccacttaaagcatgagaaatggggtgccgggatgtggggtgtggtgtgtgccctcatagatgggggtgggagtgtggctggtgtgtgtgtcaagccctcactcacccacgcactcacacacagcattctgttctccatgcaaagttaagatcgaatccatccgcttgtaggggaaaaaaaggaaaaaaattaaccagagagggtctgtaatctcgcagagcacaggcagaatcgttccttccttgctgcatttcctccttagactaatagacgttttggaaagttcggctagtgttcgtgtgtttgtcgtagcacccagagcctccaccaaaccctctccatgtctttacctcccagtcgctctaagaatctg

SEQ ID NO: 236382 - DNA, 2346 bp, Homo sapiens
  chr12:54387781-54390127
  hyper
gtatgaatgtttgagacttgcgggaggaagaaaaggcaagagctcgccaaggcgagccttggtctctgagatctctcgtcggctgctggggctccggctcagcctggcagatccgctgtggcctctctgggacctcgccccggcccacggcctgacttcggctcggagatgcagcccttcccgagaacaggtgaagaagacggcggcagcggggactgggggcttcgggtgggaacgccagggctcagggctttgtgtgggtcgtgcagggggcgaggttcgaagtcctgggctggaccgcagcacgagtgtggcccggacggctgcgtggccagaaggggtgttcgggcagggtgcgagagcaccggcaaggtggattgtgtatggactttggccgcagacagagcagagcgggctcccgggctgtggccggcggcgaggcgggcaaccgcatgttgagtctatagaaaggaccttgaggtctgctgggtgtttgggctgccctgggggcggcggcccagagtgtggagcaagcggcgcgcggggcgcggcggtcagcgtgggagaggctgcaggccctgcacgcctctgcagctgccgggccgtgtccgggacgtctgaactgaggccgaccaatggtcacagcatgaaaaataaatgcaatggaaggtctttctgtcttttcttttccgcgtaaaaggtcctttcttttttctctctttcggatatacctggatttggtccagaccaggttgcccgcgggagggccccgcgagcggcagcgcgcgagggagggagagagagggagggcgagaaggagggagggagggaaggagggcgggcggcggcggccgtggtggccggggcttccctccccaggcgggagccgcctgtcctgtatctatggccgtggggagcgaaggaccaggtaacgaaggcgcttccgaagcgggattggaccaaaccagagggacagagtcttctgggtctctctgcctgaggccctggagggagagaaggtagggagatcggcgcccgccgggcctggcaaagaggcctcgggaaatgttgaacctgtatgtgatctcaggctcacactcatgttgtgggtctgtctgcctcaggagatgcggtttgcctttctgtctgagacgccccaaaccctgagctctccttcccaaggctggaaaaaaaatcgggaaaaacggcggaatttgcactttcattcattgggttatctgcaactgagaggggctggttaaggcgtccccaagttggaagggcgctttgcttctgttttctggatgcagagtcctctgactccctctgccacgggctgagtttccggctccaggttcgcgtgtcgccctgaggtttgaggccagacagctcgcagtcgggcagggagggcgggggagagacgagcggctctggccccttaattgtacttcgggctcgtattgtctctcctttcgccacctccgcttcctcagtctgggctccaaagtcactgcaaatttccttgcgacacatacatcacacaaaagatcaggtaacaaggcgctcagggccactggggctccgggcagggcagggagcggctctagctctggggcggctccccctccagccactcccaggctggaaaaccagaccgcgttgggggagccggaaatagccccgcttgctgcggagcgtcagggcgggggcgccggcgggaatgcaggcccggcaggccgtggctttgagagagccacgttcacaggccctggggatttcactcctgctgggcctcgggacctgactcctggtgtgtagggatcccagatacccaccttgggtgggggcaggacgcgggtttcctcgcggcaggccaagagaactcagtttctgcttccagcgcaggccttagctaggaggagttgtgtgtgggtgtgtttttcccaacaaagagggatcaggagagagaaggggggaaagtagaggggaaccagggagggggcggggaggggaagagggcagtggagaggtgaaatgagcccatttcagggggagaaggaaaatgaaagcaaatggagtacggccttctccgcgcagggcgggtgctgacgagccgggagcgggctccctgcctgcggcagccgggatggcccgctggggacaccggagaaagcctgttttaaatttaatccgaacttgacggtgtggattgaaccggagggaatttaaatcactaaaaggaaggcgcggggcagggggaggggacgactctaacctgtctatctttctgtctgtccttcccacggtgctagtttggttgtggccgcagctgcccaggtttcaggt

SEQ ID NO: 236383 - DNA, 258 bp, Homo sapiens
  chr12:54391192-54391450
  hyper
tgaggcctagagtacccatccgagcaagtctcctgggaggggcaggagaggagccctcttccgcctttgtgtccagacagaagtggccgccgcgcccggagccggtcccgcggcaaaggcccggcaagccagcgggctgcacaatgccacggctgctccgccagctcgcccctgccccgtcctgcctgcctacggccgcccttcctccgcctccctctctgcacgcctgcctttcccggctctcctatctcttttcat

SEQ ID NO: 236384 - DNA, 134 bp, Homo sapiens; identical to SEQ ID NO: 203013
  chr12:54392869-54393003
  hyper

SEQ ID NO: 236385 - DNA, 105 bp, Homo sapiens
  chr12:54393243-54393348
  hyper
agtggcagaagaacgctccccttccctccttccctccctgtatctcagcttccccagtcccctcccaccctccctccctcaccgcccctgctgctcctgaaagaa

SEQ ID NO: 236386 - DNA, 58 bp, Homo sapiens
  chr12:54393648-54393706
  hyper
cttctcagatgagctaggagccgtcctgagggggtgaccggtgccttgggtccagagt

SEQ ID NO: 236387 - DNA, 35 bp, Homo sapiens
  chr12:54398704-54398739
  hyper
acacccctctctcccctggtcgggagcgctgggat

SEQ ID NO: 236388 - DNA, 72 bp, Homo sapiens
  chr12:54400370-54400442
  hyper
aaagcaaacaaacaaatgaaagaacggtgagggatccccaaaaggggaaaccaagtccggccaggggttgcg

SEQ ID NO: 236389 - DNA, 983 bp, Homo sapiens
  chr12:54402684-54403667
  hyper
tggattgatgaacgcgaatcgcgtgtaagcgccgccaccgccgggagtctgaggaattcgcctgggctgttagaggaaagagctaagtgagagagcgcgagctctacctaccgacagtgaggagcgccgccgccgccgccgccgcccgctcgccgcccgccgccgccgccgcccgcgccccagccccgggagctctgctgatccggccgagctcagcaccgaggcgccccccaacctgcccagcccccagcccaccagcccagcccagtcccggggagccagctggcctggggttcggtcccggggggaggggagtttcgggggtactgggcggggtactcgtgagccagaggggagggggccgcgggttttcatgtacccagcatgagctcctacttcgtcaaccccctgttctccaaatacaaagccggcgagtccctggaaccggcctattacgactgccggttccctcagagcgtgggcaggagccatgcgctggtgtacgggcccggcggctcggcgcccggcttccagcacgcttcgcaccacgttcaagacttcttccaccacggcacctccggcatctccaactcaggctaccagcagaacccgtgctcgcttagctgccacggagacgcctccaaattctatggctacgaggcgctccccagacagtccctttatggggctcagcaagaggcgagcgtggtgcaatatcccgactgtaaatcctccgccaacactaacagtagcgaaggacaaggccacttaaatcaaaactcgtctcccagcctcatgtttccatggatgagaccccacggtgagaagccttttctctttcccccttggtctcccgcgctccagggtttccccccctccctcgcctcctttttgtctgccctcgctttttctcctggctttggggtctctcccgccccacccccgtgcctgtgcctgggtggttttctcgaagttgggaaggc

SEQ ID NO: 236390 - DNA, 230 bp, Homo sapiens; identical to SEQ ID NO: 203015
  chr12:54404861-54405091
  hyper

SEQ ID NO: 236391 - DNA, 457 bp, Homo sapiens
  chr12:54408253-54408710
  hyper
gatggctgaggtcccgtttcgtttttaaacgtggaattatgattgctattaataaaaatatctggcccagtagcctagcggaatgaacccagcattaaatggctccgaagggcctcgccgccttttccccacaccaaatgtgccatttatcccttgtcctgttcagcaatgtccgtggccccaagcccggcgcgtcggagggcggggtgcgtctggcgcccggctttactcgagatgccaggcatggagagggctaagccgagggagccccagccaccccctcatgcagtacccgctcccccacccctcctgcccaccgcctctgttttctcgtttggaaagaaatggaggtaaaaacccgttttatgggggaacgtaattgtgagcgggatgcgctctctttagaatcgcgtcctcccaaatgctcccgccgtcccattaccggaatggggaccat

SEQ ID NO: 236392 - DNA, 537 bp, Homo sapiens
  chr12:54409009-54409546
  hyper
agagaggtagtgagcgtcctgaagggctccttgagggacccttggataggcgagtggtttggtctccccagtcttatcttccccagataagatgccctaatgactgcctgctggctgggaaagttaccccgcccaattagggagaattcaggacaggttgtgccacagtctagaagtaaaatttccggtgagctgcccgcagcgccgtcccattctccccgctgcccattgtgaaaagctgggccagcgcttccttgtcgtaatttttaactacctgttataaaatttatgggtgggtttgtgaaaagaaacgaggtccctgcatccggcctagggaactgcttttcttactatggaggaagtctggggaaggcatgaggtatcccctcttggtcagggttgaggcacccaaccattgagattcccatgccagcttgatgcgggaccaagtggagagatgccggccttcaaatctcgagcccgtggggagagtgacctgcctgcaacccctcccccggcaaatagtctctatggggg

SEQ ID NO: 236393 - DNA, 410 bp, Homo sapiens
  chr12:54410237-54410647
  hyper
aagctttgaattccgcctgatccaaccttaatgcccccatttattaaggacaatatttaaaactcggcaagccaggagaggcaaccgaccctcagtgcttgaagctttctttcgcctgggcgtccgccctcagctctttctgcgctcgcctgcagcagcctggcccgtggggagtgggcggtgggtgggggtaggggtggggtgggggtccggggatgctccctctatgagagaattgggtaaacatggcgaccgcggcgcccatttgcacacgctacacaaatgcatcgcattcccggttgtttgcagaaaatttacagctgagtaataaaagtttacgatcgactcacaagttggattggccacaagaagtcatgtggattccatccatgaacgtgaactttttattg

SEQ ID NO: 236394 - DNA, 539 bp, Homo sapiens
  chr12:54420508-54421047
  hyper
acactgtctgcttttgggttcgaaactttatttttcccccctagcgacactccagggaaaccttaacgttacagaagatgaataaacgagttttttctcagcatagtcccgtttatggctttattgctacccattgattactccgctttgttacacagaaggaaaagatcataaaatccggcgacatccgggttcttgttatagccagctttccccccccccaacccacccaaaaatggtggggggggggggatatgagctttctctgctccccgcacactccccaccacccttctttgtcaactcaaggcattttcagcctatatcacgatatcaaattaagtttggactaatcaggagaaaacccccatctgcacactttccgctgtttcagttcgcctactgcggctccctcacaagcctcggattcagctgccttttcgtaaccgtctcttccctttttttagccccaagatgggggaataaaatgggcgttgaggttgctgagaggcccatccccaccacgggtgactggcact

SEQ ID NO: 236395 - DNA, 837 bp, Homo sapiens
  chr12:54422113-54422950
  hyper
acagaagcagaagcgatttttttcccccttcctgacatctggcttgcgattggctgggagggggtcagctgactttgtcattttgtctgtcctggattggagccgtccctataaccatctagttccgagtacaaactggagacagaaataaatattaaagaaatcatagaccgaccaggtaaaggcaaagggatgaattcctacttcactaacccttccttatcctgccacctcgccgggggccaggacgtcctccccaacgtcgccctcaattccaccgcctatgatccagtgaggcatttctcgacctatggagcggccgttgcccagaaccggatctactcgactcccttttattcgccacaggagaatgtcgtgttcagttccagccgggggccgtatgactatggatctaattccttttaccaggagaaagacatgctctcaaactgcagacaaaacaccttaggacataacacacagacctcaatcgctcaggattttagttctgagcagggcaggactgcgccccaggaccagaaagccagtatccagatttacccctggatgcagcgaatgaattcgcacagtggtgagttttacagctccgagatataaattaaataaactgaactggctttatgaccggcttccctagaagaacgggcggagagagttttttatggccccataaaaacaatcacgctcgtctcctcaccgagacagggccccctcttctgccccctcagctcgcctctcgctcgcttgcaggggcctggcccccttggcccctgacggattggagggccccaaggcgggctgagggggcaggaacag

SEQ ID NO: 236396 - DNA, 266 bp, Homo sapiens
  chr12:54423428-54423694
  hyper
ggatctttaggggtcggctacggagcggaccggaggcgcggccgccagatctactcgcggtaccagaccctggaactggagaaggaatttcacttcaatcgctacctaacgcggcgccggcgcatcgagatcgccaacgcgctttgcctgaccgagcgacagatcaaaatctggttccagaaccgccggatgaagtggaaaaaagaatctaatctcacatccactctctcggggggcggcggaggggccaccgccgacagcctggg

SEQ ID NO: 236397 - DNA, 562 bp, Homo sapiens
  chr12:54424624-54425186
  hyper
attcgctcgcccgccggcctcagggtgagagctggagcaggctccaagcgctcccgcgcctgccggccccctgcaagcccccagccctctgcactcgccttccccggagcccaggcgcccggccccggccttctgttcgttctcgcgatcgcactgaggggctgggaggcctctctgggctccctgcgcggagcaacacacacaccctgcgggaaaaagccgcgtaggattttgttgcggggggagctgggatcagtcggtttgggcaccaaccccacgcaggcctttcttcctgcctgtggcagccggtgtcctcggcgtccgaaccctgaggcgccccgaaagaccagtaaagaagcactatccaggcaccagggtctcctccacccactcccgggagttggaggcggggggcgccgtgagagcaagccccaggcccgcgccaagctggctgttgcgaaacgtagcggaggcggagagcggagggaaagagaagaccgcgggactggagccctgtcggcagggattgagcgattcaaggacatctcgagagagaaagcct

SEQ ID NO: 236398 - DNA, 445 bp, Homo sapiens
  chr12:54426523-54426968
  hyper
aggcaccaggtgtcgctgtgggcttgttgtcccggctacccccaattccaagaacctttttttttttttccctcccccttccctctttctctctctcactccctctcccccttggttgggctttgccaacatatcgagatgcttttcgccggcttccatcactaacctcccggaggtcatcaagccaaatttatgagtggccgctcgagtcacgtgactctatttaaggctcccttatttgggaagagcgcataggataaagaaagagatatctccacctataaattgtccactttggagaacaaaaaacccctcaacttcaaagagtcacaaatcacccttaatcaaaaagggtgcagaaatttttttgggccctccccgccatgagctcctacgtagccaattcattctataagcagagccccaatatccctgcctataacat

SEQ ID NO: 236399 - DNA, 38 bp, Homo sapiens
  chr12:54427388-54427426
  hyper
tcgggtccgcctgggttttataggccatgcggggcaaa

SEQ ID NO: 236400 - DNA, 1024 bp, Homo sapiens
  chr12:54427606-54428630
  hyper
aaaaatagagggatctgaagggtgaggagcgcggggctccagagcggggatccccccgcggctccctccctccctcccctgcggagccggctccgccggcgcttgcggctccggaggattccagcgactcgggaggggcgggaggggggtccccggtgctcggatctcgagggtgcttattgttcggtccgagcctgggtctccctcttccccccaaccccccctcagcccctccggctgcagagtgaaggctgcggtggaaagtttcctgcctgggcggaggcgcctctcccggggctgggctgggctggcccgcctgcggcccgcgtggcctgtcttgcggctctcgcctcctctccctccggccgcgggtgggggcctgggctggggtggggacgggggaacgctgcaagctattcaccccttcctggcttggggtggggtttatgttccagagacggacggcaagcggtcccgaaccagttacacgcgctaccagactctggaactcgagaaagaattccactttaaccgctacctcactcgccgcaggcgcatagagatcgccaacaacttgtgtctcaatgagagacagatcaagatctggttccagaaccgcaggatgaagtggaagaaagattccaaaatgaaaagcaaagaggctctttagaggcagcgggggaggcccgcagagcgcgcccctagccggttcctgtccctgcgcctttccttttcgcctttcctctctatatttcgggtcgggggcaggtgctggagcactgggctcccgggccccacagacaaaagcgcttttccttggcattccgcatccctaccgacccagggttcccgcggggctgtcggcgctgccccatctcccctcagctcggctcagctcggtacccggggcccagggcaagctccgcaggacttccccggagggctgcggcgtacaggctggcgcagaacgaaccttggcctgggccgtatctccggctcccagcctcagcgcggccctcccgag

SEQ ID NO: 236401 - DNA, 366 bp, Homo sapiens
  chr12:54441117-54441483
  hyper
gcctgagagtcccgcgccgcggggccgctgcagagccggtctcccgagcaccgcggcaggaccatttcgttggaatgtagggcgaggccgaagcccgccccggacccaggccgcgaggtgcgcgccggccgccgaggggccgcctgtaaattacagcccgccgggaggactcggaaatacacaaaaggagccgaaagatttaaacagtcggaggcagaggcgtcccgaggcggccaaagcggaaatcaatcacgtaattaaaacagggaggggacgaagcccaaggctgggggtcccgggttcggaggaggcggccaaggtgcaggccgaggctggcgagcggcttagggacgtggctcgcccgcc

SEQ ID NO: 236402 - DNA, 1442 bp, Homo sapiens
  chr12:54446874-54448316
  hyper
cagtgggtagcaggggaaggcgagacttctgaactctgcttttgccaaccacttcctgtctctcttcagcgggggctcaacccccagacctccagaaatgacgtcagaatcatttgcatcccgctgcctctacctgcctggtccagctgggaccctgcctcgccggccgcatggccagagggttgggtgagtgtgtatggggaagaggggctggactctggtatccttggatggggggcactccaggctctccagcctcctcggctcagcctgggcccctccccatccaacatccactccagtcctcattcaacttcctcttcctgcgaaagaggggcgctgccccgtgacctacacagactgagacacgatcgccatgaatggagacctctggaaaagctcaggagccgaggcccacggggcccagcagaggcctgaggggagaccctgggcgggggctgaatcactgcctcccgacagtcccccaatgcccgggctttggaggggagccgggagcttcccatctccttttgcaggggagggttgtcagtctggcgggatgtgcactgggggcactccaacctctgctagctaaccccacatcaccacccacccccgcctcccagcaccaccaccaccacacacacaaaaaaattggatacattttgaataaagcgattcggttccttatccggggactgggttgctccgtgtgattggccggaggagtcacatggtgaaagtaactttacagggtcgctagctagtaggagggctttatggagcagaaaaacgacaaagcgagaaaaattattttccactccagaaattaatgatcatgagctcgtatttgatggactctaactacatcgatccgaaatttcctccatgcgaagaatattcgcaaaatagctacatccctgaacacagtccggaatattacggccggaccagggaatcgggattccagcatcaccaccaggagctgtacccaccaccgcctccgcgccctagctaccctgagcgccagtatagctgcaccagtctccaggggcccggcaattcgcgaggccacgggccggcccaggcgggccaccaccaccccgagaaatcacagtcgctctgcgagccggcgcctctctcaggcgcctccgcctccccgtccccagccccgccagcctgcagccagccagcccccgaccatccctccagcgccgccagcaagcaacccatagtctacccatggatgaaaaaaattcacgttagcacgggtaggcaactttgctttttgctccccccctccctcccttcttccctagcgctccccaccctcctcggccccctctggcccccgtcctcctttctctccttccccctctctctccaggagcgactctgggttagcacaattgaactggatttacgagcgagaatgggtaatt

SEQ ID NO: 236403 - DNA, 189 bp, Homo sapiens
  chr12:54475616-54475805
  hyper
gggttgagttggggcggctcgtcccgtggccgctgggtcgtctggtttccgctttccgaaagaaatgagaggagaggcaagtggagtcgctgaactttaattaaaccgtagagaagacagtggggggaggggaaaaaaaacgatcggagaaggaggagaaggcggccgagagatcgaggaaaggaagtc

SEQ ID NO: 236404 - DNA, 1274 bp, Homo sapiens
  chr12:54519788-54521062
  hyper
cagcccctggccacgtggtccctcgtaccaatcgatcgaattctagtcgcaattctctgtctgtccctcggctctggggagaaagggggggctgtggcgtgggggctgaggaggggctaaggcgggaggggcgcctcatcccttcaccctcccttttcgccatgtgggggccctgagcgccgccccagaagaggtcgagggaatgttgtgggctggggcacaccagcacggcagaaactggagaaagcgagagacgtcgccagggacccagggacctctccctccagttccccgggcccgcccggccctgatggccactcacgctatagcgcccactctgtcctgggccatcccgcgccagcagtgtagcccccagcccgggcgcctgaatgctctccctccggatcgctgctcgggtccccactttggcgaccgtgcccccgagtcctgcttccccggggcctgctctgtatcaggcgcctgcgccttcaagggtacccggcccgcctgccctccccaagagccgagtttgcgctcctcccggaatcgtttgagagaaggacaaacttttggcaggatggaaatctagatgagcctgtccggagcaggtaagctgggcccgggacgggtgcgattcagcccgagaacaatctgtctctccccgtcccggtctctccctccccttacccctgtttcccctgcaggctgacatattaatctgccttcccccgggagaaatttgggctggggttgggcttctgtcagatgcatggggtcagagcagctttcctccccgagtttagggactaaggtggtagctggcaggggagggggagggttgcttccgaaactgaggattgaggggagggttaggggccgagaaacccagagtctgagggagacgacttctttcctcaaacgcaacttgggggaacttcggaaaagttttttgaggggagatggagaagggagcggagttggggtttcgagggctaaagtgggagagagggtgctccgcttcccgtactgaaggaaggatgtgtgtgcttattccccagtcgggaccgattaccagcctagaaaaacccagccgcgtcccaaacccgctcaccccagcaggcccttagagacgcttggagatccccagacacgccccgcggaaagggaaggaaatgccagcccgagttgccgactctgccgggacggggcgggggatccgcccagagcggtcccctgctgtcctgggcccttacgttgattctaagttaggagtg

SEQ ID NO: 236405 - DNA, 101 bp, Homo sapiens
  chr12:54582781-54582882
  hyper
acccaacccccggcgctaaggacagtgggagtcgtagtctacattgtttagggaaggagattggcgtacccgcagccacttccgccggaaatgctccaatc

SEQ ID NO: 236406 - DNA, 55 bp, Homo sapiens; identical to SEQ ID NO: 203029
  chr12:54608668-54608723
  hyper

SEQ ID NO: 236407 - DNA, 88 bp, Homo sapiens
  chr12:54674339-54674427
  hyper
agacggcgtagaacgaccgaaggaatgacgttacacagcaatgtggcaccacaggccaatagcagggggaagcgatttcaagtatcca

SEQ ID NO: 236408 - DNA, 511 bp, Homo sapiens
  chr12:54811865-54812376
  hyper
gtctccccagcttccgaccccagccccagaagtcccggtctcagcacagctccagccgaccagctacaggaaaccagcttttctcttcctcccaagagccagaggaagagggaaaccgcccaccccccttcacgcgcgcacacacccctcccgacacatcccagcacccgcccttggctgagttcgcccccagccccagggccccagtgccagggtccccgcactcgcccccagttctcggatcccctcgcctgaacagagattgggggcggagggaggagtaggagacagaggagaaaggagagggagccgccgtcctctctcgggtctttccccggtctgagttgaggggggaggggaggatgaggctggcccccatttaaccttccgaccccctcagtctttgactttcctcctactacacgtagctcattcggcttctacccgttctctcgccgcacaatggcccctacggatcccgaggtctcctggagcccccaaaagcccttcc

SEQ ID NO: 236409 - DNA, 528 bp, Homo sapiens
  chr12:54943099-54943627
  hyper
accgaagtccagcccgccgcctccgctgcactctgtaaacacgcactcacatccgccagtacagggcacacgcagccactcgtccccggcgcctgtgtgcgtgcgctcgcccttgggcgcttctgtctgtgtgtgcccccggcttccaatcgttcctttgggagggggaggagtggctgtgaggagtgagagactggcgggcaggctgaggagaagggagggagagcagagggaggggggaacccggccgggggaggaggagagaggcgaggaggcggctctggcagcgcgcggcggcggcggcggtagcggcagcagcagcggcggtgcggagagcttggactgggagcccaaagctcggctgggcagcgggagaggaggagccgcaggagctgcagctctgccagcttgggccgagcctagagacaccggcctggctggtccacgccagccgcaggtgggaagggcctgggatggggggtgagggtctctcggctggggctgaagctgagccgaggtgctgtctcc

SEQ ID NO: 236410 - DNA, 600 bp, Homo sapiens
  chr12:54982005-54982605
  hyper
gatgtggctccgacggtgggggaggggacagaagacccccccccgccccccgcaaactgagcgttcgtcctcaaaagggcgcactgctaagggaggactaggcagggatcctgggtcccaccagtccaggggtccctcgtccttggctgggcgagtgccctgccgccccgccctgctccgcacctgctccgccgcctcggggtcaaggtgcggctccagcagcgggaccgtgaactggatctttcgggggctgttgtcttgctccatggctggggcggcggccggtgggcccgcgctgcggcgggagggaaggcggcgggactcggggctggggcgggcgcgctccctctccgctccgctccggccccggccccagcccggcgcgctcggctcccggctcccggcacagcgctcccagctcgcggctccggggactctgccgccgccgattggctccgcacccgcccctcccggccccctccccctcccccagcccggaaccttaaccccgtcgtggctgcaccggcggctgcgggggtcaccgccccgcgggccgccgagtccgggcgtggcccgggagccgtcgtagtggacagctca

SEQ ID NO: 236411 - DNA, 78 bp, Homo sapiens
  chr12:55413596-55413674
  hyper
acaaacaaacgggcggcaaaactggacctggccggaggagcctttcaagtgggcgtgtctttcggctggggaaaaggg

SEQ ID NO: 236412 - DNA, 244 bp, Homo sapiens
  chr12:56101314-56101558
  hyper
aggctgcctggctcgccctccttgcgcaaggcacccatcacgtccagattgaaggcgacagcccgtgagaagagcagttcgacgagcagggagccaaaaaggtagcaaatcccggaggccccccaagggtcgcggctccgagccccggccatgggacgatccctgcgcgagctcccagcgaatgcaagggaaatctcgcacgccccaagccccaggtccccccaggcgcgtctctggtctccaa

SEQ ID NO: 236413 - DNA, 93 bp, Homo sapiens
  chr12:56123024-56123117
  hyper
caagacctcggggcgcctggggcccccctctggcgctatacctccgtgccaactcggggtaggagagcggggcggagcgcagcctgggtcact

SEQ ID NO: 236414 - DNA, 404 bp, Homo sapiens
  chr12:56137579-56137983
  hyper
tggctctggccccgcgaagggcgccttctgctccaagcggggcgctccctgctgccccggcccggaagctttttctgcgaaaacttgacgaattagggagcgggggctacttcatagaagttttccgagcggtggagatgggctgcaaagttgtatgcacgcctagttcccggaggttggggcgggggaaatggggcgggtttcgagatagtgccttccacccccagtatgctaaaaagatccttgttggagtccggggaagctggggctgggcagtgactctgtcctgaaaagccgtggtggggaggctggagaacagaatcgggaggctgcaggacccccgcagccccagctggactgcagtgctctctgcttcccagtggccctggcggtaactccccact

SEQ ID NO: 236415 - DNA, 222 bp, Homo sapiens
  chr12:56210929-56211151
  hyper
attcggcttggggcgtaatcccacctagaaaaggggagtggaagtattttctgagtgtctggtacctatttagacagaaatacacaaaaatgccaccatttgctaacagggaaatctcagcttcggacgacagactggaaacatcatcccagggaagaaaaacggatcctggctccgacatggggcaaaaaggagggaccaactgacgtaatgcagccctga

SEQ ID NO: 236416 - DNA, 96 bp, Homo sapiens
  chr12:56211700-56211796
  hyper
gcactgtatcttgcgaacgacagaaatggcaaccaactgtgcttctgcattacagaccaccaaccaatgggtggtggcagcgctgattctgttcct

SEQ ID NO: 236417 - DNA, 148 bp, Homo sapiens
  chr12:56320837-56320985
  hyper
gctccgcgcctcccgcactcaccgccggtctcgtcagtaacatagggagtcgccatcttgaaaacgcaaaccacttccggcgtgagcgggctggggtcccgcccccctccccaccggaagtggagtcccgatcgtagcaagccaccat

SEQ ID NO: 236418 - DNA, 193 bp, Homo sapiens
  chr12:56360051-56360244
  hyper
tgaaaggcagctgcgtaacacataccagacacaacagtttatcatgggagagtgaattaaaccaggaacttctcaaaaagacagaaacagaaccctgcatcccaaaacagagacagtgtcggggtatgctatgaggcagaggcaacgactcctctgaggcccaggattcctttgcaacgagattcccggcttc

SEQ ID NO: 236419 - DNA, 138 bp, Homo sapiens
  chr12:56367675-56367813
  hyper
gccccgcctgtcgcgtcccttgctcgtacttgttggtgacagcgcccaaagagactcgcctttctccagaggattggtggatgagtgcacatatagcccaccctcgaaggtaggcgggtaatcgagctattggctgga

SEQ ID NO: 236420 - DNA, 226 bp, Homo sapiens
  chr12:56401112-56401338
  hyper
atctttcggcgctcggctactctcccctagctcctctcccattttcccccagcagtctcccgggcttggggacgctcggtgttcggccacgccgcctgtcgcctggtagtgggaccggaagttgttagggggagggggacggctgtgatggggggggatatttgggggggcaagtcccttctcaggtgaagctgctgatggagatggagccgccgccaccgccgcc

SEQ ID NO: 236421 - DNA, 36 bp, Homo sapiens
  chr12:56472732-56472768
  hyper
aggctcaactgttttcgaagtcttcaggcttgaagt

SEQ ID NO: 236422 - DNA, 334 bp, Homo sapiens
  chr12:56473739-56474073
  hyper
ctccgccaagttgcgggaccgcggggcgtggcacgctcggggcaggcggtccgaggctccgcaatccctactccagcctcgcgcgggagggggcgcggccgtgactcacccccttccctctgcgttcctccctccctctctctctctctctcacacacacacacccctcccctgccatccctccccggactccggctccggctccgattgcaatttgcaacctccgctgccgtcgccgcagcagccaccaattcgccagcggttcaggtggctcttgcctcgatgtcctagcctaggggcccccgggccggacttggctgggctcccttcaccc

SEQ ID NO: 236423 - DNA, 201 bp, Homo sapiens; identical to SEQ ID NO: 203038
  chr12:56497906-56498107
  hyper

SEQ ID NO: 236424 - DNA, 335 bp, Homo sapiens
  chr12:56511633-56511968
  hyper
tttatggttccatcgggtgggggttttctgtcattagagtttgccctgtcactacctgtgctatggagggtatcaaagctataaaggcaacagcccgggttacgtggtgtggtttgcatctcgctggagttggatgggatatggtacgtctctggaggcaggttttaggtttcgcgggttattaggggccaatgctggtaccgcccctttccaggagggctgccttggcgactaccgcttagaccatgtcgtgcctttgggttgggttgccatagtgacacgcaaagcgtgctgggaacgccctgcggcatgtcgcacgcgtacttcatacacca

SEQ ID NO: 236425 - DNA, 304 bp, Homo sapiens
  chr12:56521403-56521707
  hyper
gtaggggattagggacgggatagacggggttagttttcaaacactttcattccaaatacgatcgtatcctttccttttgtaagggcaggcaggaaaaagttgaaggataaggaatgtgcttagagtatgaaaactagagaaagtcggcaaaagaacatatatatatatcccagaccaaatcctgccaaaccgaatgagtagagggaaatcctgaagctccacaacccctcaacttcgcaacttgggctttctccaaaaccaagaaattggcggtgcagctctgcatgacgtcataccacaggca

SEQ ID NO: 236426 - DNA, 64 bp, Homo sapiens
  chr12:56522028-56522092
  hyper
tgggggagctgatcgcaagactaggcaacctccagccagtccctgggtcgggcggatcctccca

SEQ ID NO: 236427 - DNA, 120 bp, Homo sapiens; identical to SEQ ID NO: 203040
  chr12:56552005-56552125
  hyper

SEQ ID NO: 236428 - DNA, 83 bp, Homo sapiens
  chr12:56614495-56614578
  hyper
cagagtgagactccgtttcaaaaaaaaaaaaaaacaagaatgcaaaataaatttagagtactgagagtcggagaggaaatgct

SEQ ID NO: 236429 - DNA, 354 bp, Homo sapiens
  chr12:56615721-56616075
  hyper
cccaccgctgctacgcaacccggcggaagctcgtcaccaaaccccgcctctttgtttaactcagcccctacaccagcagccaggagctgcctacgaggagggacgaaggctggccaggcctccactctagacaggaagtctagtctagagtctatatggtcccagccaggactatgtagccatttaggagggagaactctatgttcttcccggcaaaaacgtgtgggcctggccggccacgcttcgctttggaggggtgcaggtgacttgtgtcttagagctgacgcagattgttgcgagatcattgcggagaggcaggcctgcagcgtgacctgctgcgggtccggcccctct

SEQ ID NO: 236430 - DNA, 213 bp, Homo sapiens
  chr12:56618043-56618256
  hyper
gcaggcggcgggacgcagggcgcgcccgggcggtgctgattggccggaggaggccagccgggggaaacttccgggaatgtccgcactcccgcgttccacggggcagcatccggcggcagcggagcctgtggctccccctgcgggctgctcagcggcgtgcacagtcctgccggctggcttgggtgggtggtgggctgcgggtaggggagggga

SEQ ID NO: 236431 - DNA, 236 bp, Homo sapiens
  chr12:56652044-56652280
  hyper
gatccccatggctcggcccgggctccgtccgcatcgagctcccggcggcggcggcggcggctccaccggggacacggagcggcccaggcggcggctgcggtggcggctgcagggagagcgcggccccgcctaccggggggcgggcgagttggaggccgcagcgctccctggcggccgtcctggtcccggcgctccccgcgcaaacggaccccggccgcagcgccctccgccccacc

SEQ ID NO: 236432 - DNA, 175 bp, Homo sapiens
  chr12:56660466-56660641
  hyper
tctgcggtagacacgcccacgaagtcgcctctgtgcctacctatcgggtcctgtgaccacaggcgacctcagtccccgaaccatctttgcagcttctcaaacgcacaccccagtgccctttctcgccacaggtgtgaaactacatctcccgacaggcggcgttgtccccttcctt

SEQ ID NO: 236433 - DNA, 52 bp, Homo sapiens
  chr12:56660884-56660936
  hyper
ccaggcagggtcgcgcgcatggcctgggcgggctcgcggcgggtcccagctg

SEQ ID NO: 236434 - DNA, 84 bp, Homo sapiens
  chr12:56694265-56694349
  hyper
acagcagttgtgacggggaggattggaccgcccggattagggctaattaagggtggatgggtggcgggcggggaagtgcgggtg

SEQ ID NO: 236435 - DNA, 244 bp, Homo sapiens
  chr12:56754009-56754253
  hyper
ccagccgccaccccgacactggctgccattcagtcaagcccttcccagactgcgagctcactggcgccgccgcaactccgcccctccgcagggcgggacaagctgagccgaaaccacacctgcagcttcagcgattggtggagaagttcaagtaggcactttctacgaggggaggagtccaattagtggactagcccaagactgaaacagctgattttcgagaacccgcgcgtgagccccggaa

SEQ ID NO: 236436 - DNA, 388 bp, Homo sapiens
  chr12:56862356-56862744
  hyper
ggttcatccaaggcgcaagatggcgctgctttttgcacgttctttgcgcttgtgccgctggggagccaaacgattgggagttgcctccacagaggcccagagaggtaggattatctctttttactcttttacctccagaatggctgccgtctattattcccagaccccactccgagaagcaactccaaccctctcgggtcttttccttccccacctgccttggtcttaagattccaaacctgtgataccatttggtttctttaaattccgggacttactcaatccgagtttttcagctccgtgagctatccgtagtaaagcgacctcgcgactctcttgcccgcttggcattctgactcttccctagttgctcgtgtatcatggctgc

SEQ ID NO: 236437 - DNA, 192 bp, Homo sapiens
  chr12:56881720-56881912
  hyper
tgatcctggtgctgcggctggtggctgtgtggcgtctctctgccctgcgccgcggcctcactgaggtggtgccggacgcccccgccaaggagggggctccggctcgggtgaccccagcctcctcgcccgcagtgactgccagcccggctcagggccttctgcagagccttcatggagcgcatgccccagcaa

SEQ ID NO: 236438 - DNA, 143 bp, Homo sapiens
  chr12:56882300-56882443
  hyper
ttgcgacagtctgcggatgcttccgcgtgggcccggcgagcgcgggtatccgcggatgctgagggcgggaaaggcgaggacaagctgaggcgaagccggtgggggcgggaggcgctccccgggaacaccgtggggctgcgaat

SEQ ID NO: 236439 - DNA, 168 bp, Homo sapiens; identical to SEQ ID NO: 203043
  chr12:57081172-57081340
  hyper

SEQ ID NO: 236440 - DNA, 332 bp, Homo sapiens
  chr12:57472541-57472873
  hyper
cacctcctcctcacgtgccttaccccagcaactaactccgaacgggcaacgacagcagcctatcctctacgaaacccgcccctatcaaccaatgggatgggcagggcttcgagcacccagccctccaagggccctatgagtcccgccccttagcaactgaagagagagggcgggaaaagcagctttcagcctattggaaaatgggttctcaccctagcagtggcgacaggaagatcccaccccgctaacaacatgcttccgtcttcagtttatttacaactggtgtgattgatggtaagtttaaccaatagaaaatcggaatgggagaggcc

SEQ ID NO: 236441 - DNA, 383 bp, Homo sapiens
  chr12:57504126-57504509
  hyper
gggaggagccacggcgtgaggggcggggccagtgttacctcccaaactcagaagggaagcgcaaggtctgggatcctcgtccgcccgcttggtggcctaaactcgcttatctcaacccctatctgcccgagtcctctgattgtgggaccacaggatcgaaagttaaaacagcttctctgagttgcccaatgcgtgaatgtggcggtgggggcaggcggggaggtggagccagttcagcacgaggagggttaactcggcgccgccgctgggaaatctcagcgtctacagcagccaagcgtggagcagttttgagggggaaattccccctcgtctgggccaccatgaggtctacatctggggcttgctcacgccccagccacacc

SEQ ID NO: 236442 - DNA, 268 bp, Homo sapiens
  chr12:57504735-57505003
  hyper
ttcctccaggagttcgaaactgctaaaacccagtgccaccagccaccaacactagctgaaaccatctcttggggaccatccacccagccaggggaggatcccgagagctccccccacgaatccacccccatgcactcatagaggcccccgcacccacctcggaggcaacccctcacctcggcaacccctctgctgtcttctccctttctcagcgggcacttccaggccccataggtctgtagctctgtccagcgagttcaaggctggc

SEQ ID NO: 236443 - DNA, 35 bp, Homo sapiens
  chr12:57521847-57521882
  hyper
cagaccactgagtcccggacgcccccggagggagc

SEQ ID NO: 236444 - DNA, 331 bp, Homo sapiens
  chr12:57613965-57614296
  hyper
tggggagcagggagcgctgccttgagcgctggaaattggcgcggctccccctctcccccgcctgcccctcctccacctccaccccgcccactccccctccggctccggcttcgggaaattacatccccgctccgcggctccccccaacccccaccgcgccccggagccggcgcctttataggcacatttattgcaataataaagtgaggcgcggggcggggggcgggggggcagtcgttcccgcggggaccgcgctggctccaggaagcagggaaataaaataaaataaaataaaataaaataaaaattcagataacggtgagccttgcgc

SEQ ID NO: 236445 - DNA, 654 bp, Homo sapiens
  chr12:57618691-57619345
  hyper
ggccgcagtacctggggctgcgccccgccgcggccggagcgggtgcccccggccagcagctcccagagccaaggtcttcggacggcctaggcgtgggccgcgcctggagctgggcctggccgaccaaccacacgggggcgctggcccgggcaggggcagccggggcgttgcccgcgcagcgcaccaagaggaagccgtccatcaaggcggcgcgcgccaaaaagatcttcggctggggggacttctactttcgggtgcataccctcaagttttcgctgctggtgaccggcaagatcgtggaccatgtgaacggtaccttcagtgtgtatttccgccacaactcgtccagcctgggcaacctcagtgtcagcatcgtgccgccctccaagcgtgtcgagttcggaggagtctggctgcccgggcctgtcccccaccctctgcagtctacgctcgccctggagggggtgcttcctgggctggggcccccgctggggatggcagcagcagcggcggggcccgggcttgggggctccctcgggggcgcactggcggggccgcttgggggcgcgttgggagtgcctggggccaaagagtcacgcgctttcaattgccacgtggagtatgagaagacaaaccgcgcgcgcaagcaccgac

SEQ ID NO: 236446 - DNA, 760 bp, Homo sapiens
  chr12:57631781-57632541
  hyper
gtggggaggctcacagcccccgtctctggggaatttgggtcttagggacgtaggaaccgagtcctaatatctctccccactcccacgataacctccaccaccccctccctcctcgcagccgatcctgcagagcacctccccctccagagcccgccctgtggagggcgcgggcgggagcgagctatgcacccgtctctgggatcgtcggggtacagggagggagagggcgctttctagggtccgcctccctttccttctcgctgatacttccgccgccccctactctgacaagcgcggctgtaattaggctgcggggtcccgggctctccgcctcactccggcggataatgagataaagtgtcagagacacggcgagaacaaagagacagagactcgctgcgatgtgtgtggggggggcgggggagcggggctgacgggctgttagagcctccagcagcccagccctcccgagagcccgcgcctccagggcccaggaagggagggcgtgtcctgtcacccgcgcaccccagccctccagtctctgggaccaaaaaacaatcccagagctcaaactcgagcggccgcacaactgggctgcacatctggttctctgtggcacagctggggagccaggacgccggaaggggcgcctggtccttgcgcctttgctcacaggccctcgcctgcttccttgtgccctttgttctgagttccggtgaccccggccaggtcccaaattctccgtcgcgctccttttcca

SEQ ID NO: 236447 - DNA, 245 bp, Homo sapiens; identical to SEQ ID NO: 203049
  chr12:57634396-57634641
  hyper

SEQ ID NO: 236448 - DNA, 244 bp, Homo sapiens
  chr12:57635250-57635494
  hyper
tgtgtgcgcgcgcgcgcgcgctgagtagagtgggcagtggaggaggttggggtgccggttgtcttgtaccccagtaccggcccttcctcggatctgttttcaattcagtctgctccttggcccagacttatgacctttgcagcatgcggcagtatcatccatcacccaggcgccgtttagggggatggagggcgctgggagctcacatagggtcgctgtcacgcctgccgccctctctggggac

SEQ ID NO: 236449 - DNA, 137 bp, Homo sapiens
  chr12:57824120-57824257
  hyper
ttctacacctctccgtcctatttttccatgctccacgctcgaaggaaaaccgccacccaagaaacacacggagctagccaccccgaagcactggaagggcgcaatagtttttaggtcaccccgcaaaggccacaggt

SEQ ID NO: 236450 - DNA, 173 bp, Homo sapiens
  chr12:57853382-57853555
  hyper
caccaaccaaaggcgactaccctacctccactattatcgttctcggttgaacttctccccctgccccgcaatattttcctcaatctggttgtcggggcctctttggggccagccgatccagaaatccaagccgggatttagtactcaccaacagcagcgtgttcagccggggc

SEQ ID NO: 236451 - DNA, 167 bp, Homo sapiens
  chr12:57855186-57855353
  hyper
acccttgggaagccggctgctataaccagcaacctaaggtgtccgggcccctcctcctccccatacacacctaattttattgacccagtcactttctctgctttctctcccctatactttctggattcttctccctttctaaccccaccaacggggacccccactct

SEQ ID NO: 236452 - DNA, 132 bp, Homo sapiens
  chr12:57881679-57881811
  hyper
ggcctcttcatctcgatgatagtcttttcctgtgtcttagcgttgcatgatgggagaaatagtctactttccggtagcggtgccagggcagtggcctaatacggaactccatttcccggcgtgcctcgcgga

SEQ ID NO: 236453 - DNA, 188 bp, Homo sapiens; identical to SEQ ID NO: 203051
  chr12:57941136-57941324
  hyper

SEQ ID NO: 236454 - DNA, 159 bp, Homo sapiens
  chr12:57944029-57944188
  hyper
tcccagccccacgccggctaccaccatggcggagaccaacaacgaatgtagcatcaaggtgctctgccgattccggcccctgaaccaggctgagattctgcggggagacaagttcatccccattttccaaggggacgacagcgtcgttattggggtgag

SEQ ID NO: 236455 - DNA, 131 bp, Homo sapiens; identical to SEQ ID NO: 203052
  chr12:57984705-57984836
  hyper

SEQ ID NO: 236456 - DNA, 229 bp, Homo sapiens
  chr12:57998567-57998796
  hyper
tgttgctaaggcccggaccgtcatcccagcaacagcctcagtcatgtgaccggcaatggcggcgctgacgagaggtaggtgagcccggcgccccccacacccaccgcgcgccccccgggccccgctcgcacccctcacgcgccccccgctcccccggcgccccctcctccacctcccctccccgcgcgcggctccgggctccccgctccgtgcccggccgatcatcttt

SEQ ID NO: 236457 - DNA, 290 bp, Homo sapiens
  chr12:58004717-58005007
  hyper
tcgccttaattggcgattagtcttagctggagtcccggggcctggaggaaagaagggtcctgagagagggcggcatctgggttgtgttcacccacaaaagactccccatacacgcaccccgtaccagggggcctctgtccactcggccggggacagccccaaacccagaacatcttcgcacaggccaaggccccatccactgagtcctccttcatcgcagaggccaaggggagacctgggcagaccctgcagacaggctgaaccccgaccccagcgctccgcagagcccg

SEQ ID NO: 236458 - DNA, 938 bp, Homo sapiens
  chr12:58014813-58015751
  hyper
agctggacgctcaacgggttggggtagccgcggccgtggccttcgggagcggggcgttgatggtgagggaggacccggggaggaacccggggggatccctgctgaggggccagggaaattgggccggggaagagggagggaccagctttcggcttgggttcgggagggcggaggtgcgcggggttggtttgctcctcctctagatggtgacagcgcgtcttctcccccacagctggggatgttcgtgctgcagctcggcgtcttgtccacctttttgtccgagcctgtggtcaaggcgctgaccagcggggccgcgctgcacgtgctcttgtcccagctgccgagcctcttggggttgtccctcccgcgccagatcggctgcttctctctcttcaaggtgggggtggaagaagaaaggagaaggggcttctagaggtcccgtgaatagggaaactcgaaaagggaggaaggacggagggtggaggggtagtatgtgacaagggagcaggaaaggaggttggagccacgtggctgaacgagggcgctgaggaggtgtaagccctggtggcactgggtagagagggcctcgctctgggggtcccgcgccggggcgcatgagccctggcacggggccctctgctcatcgcccctgccctcagacgctggcctccttgctgactgcgctgcctcggagcagtccggccgaactgaccatctccgcgctcagcctggcgctgctcgtgccggtcaaggaattgaacgtgagattccgagaccggctacccacgccgatcccgggggaagtcgtcttggtgaggatggccgtgcgcgccggccccctgcccgcgcagaccctgcggtcctgtgggaactggccgctgccgccccctggtggagtgcagagaggccacggaacagagggccggctcacactttcc

SEQ ID NO: 236459 - DNA, 642 bp, Homo sapiens
  chr12:58021325-58021967
  hyper
aggagaggcgcgtgaccgtgcgccagctccccgtggggctcctgccagggtcgaccgggagggggtgccactcacccagatgagccacgcggctgaggcgggggtcgaaaccgacctcgcgcaccttgtcagtccgcgccaggaagaagttaaccacgccgtcggtgaccacgcagcctgggaagccgacgagctcgtggtggaagccgcgcctttgccggaggcagttcccgaggcctggggcgccgggctccacgctcagcagctgccgataagtggtggcaaagccggagatctcgcgcaccgcgccccccacctgcagggagagggaggttgcctccaggcgggcctgggataggggacccgaaggggtcaaggtctgcgctccggtgccttcgggggtacccctgccccatcctcttccgcttcacccctgcaggacccagacagttcccaggccccacttcgtggttctctctttgtcctagggctggccgttcctggccgcagcgcccccgctgtggccttagcctgttcaaggcccttctccacccccacatcctgcagcccctgccctaccaggtccagcggcgtccgctccagcacgtccacaagcctctccagccgcgtccgcgccgtgaa

SEQ ID NO: 236460 - DNA, 949 bp, Homo sapiens
  chr12:58025667-58026616
  hyper
ctgcgctgcgccgccgcggtcggcactcaccccactacttgctccttgatcctgaccgggatgtgtgcgtagcggggctcaggagcaagatctggcagctcgggcctgcgggggctttgcgggggcgcccacggcgcaagaggtagccggaggccgggcgcgtcccgggtgctcgcgtacaggagccccagcgaggcgcaggcgagcagaaggaccagagcgcacagggcccggcggcccagccacatcctaggtgggggtagggtggggagtgagaaagggagggaagaagggagggcaagggatggggcccttggcccccgcgtcctcagaggctcctgccggctcccaagagcgctctccactccacacatcgcgctagggtttgcactgccagccgcggttttcccggtacccctcccctcacttcccaggccccagggtctcccggcctcctttcttctcgccctctcctgcatctcggtttcctcacacacccgaggcctggcatcttaatgctgaagacatttggatgccgcggtttcgacgcggccgtgcgtaagcggaaaagccccgctctatcagggcagtggcagtccccaagcccgccgcccgccctggccggcgcgcccccgactcctcagtctgagcatcacctgggccggggtgggctgcggagggcggctccacacctagcctgtcaggaaaaaatgcagaatcatgcccgtgctggcgggcgcccccggcggaggtgacccgatgagtggcctcggcaagcggcgcgggggacagagtggaccgggaagcgcgcctcctcccgcctcctcccgcctcctcctcctcccctcaccaaccaatcccacccccacccacccccgggcactgacctgtctaacgctctaaggcagcggcaaaatttcggtccgggctgtgccgggctctcgccccg

SEQ ID NO: 236461 - DNA, 280 bp, Homo sapiens
  chr12:58146166-58146446
  hyper
ggcgaacgccggacgttctgggcacgtgaccgccacccatgcgctgaggggcggacaggaggtgcttcgactgggaggagggcgaagagtgtaagggggcggaggggcgatggcagccacgtgatctgttgctatcacacgtgaccgcttgacattgctctgaggagcagaggtgtggctacgcggcgggcacgtgactggctgccacaacccccgctgcagggggggagcggtgagggggacaagagagggtggagcccgaggcggtgccatggcaacc

SEQ ID NO: 236462 - DNA, 275 bp, Homo sapiens
  chr12:58158676-58158951
  hyper
cctctgcctctcgccgctccacgtgcctctgagctgcgtgggtagaaggcacgtgaatacctcgctacccctggacagctttacattcccccatttccacctcgacctgtgccttaccaaatgcaaacatctggtcccagtctcggcagaggcggccccagggcccaggcacaaggtggcgcagccagtggggcatcgccatggtcaacagcgtggacacaaacaccgagcccacagcgcggatgaaggtctccgtgtcgggtggcacttgagcc

SEQ ID NO: 236463 - DNA, 62 bp, Homo sapiens
  chr12:58159431-58159493
  hyper
gtcttccagcccccttcctctttactcatttcctgccctcaggggccggggttcccgggtaa

SEQ ID NO: 236464 - DNA, 133 bp, Homo sapiens
  chr12:58159768-58159901
  hyper
ctgggggcagagaagactcacgcagtgagcagtccgcaagcccgctggcggcagcggcggtgctccgtccagggcgagaagctgcagcgctcgggccggggtccctcctgtcgcagcagctcctcgacgagtg

SEQ ID NO: 236465 - DNA, 430 bp, Homo sapiens; identical to SEQ ID NO: 203056
  chr12:58166379-58166809
  hyper

SEQ ID NO: 236466 - DNA, 214 bp, Homo sapiens
  chr12:58176244-58176458
  hyper
accacacaagtttgttgtgagtcataaatggataatgaatataaatgcgcattgaaaataaacataaaatgttacccacatttcttgtgttgttgttttgtgacgactttatttcttggtttctgttattttacctggggtgggaggtggggggtaattcccgtatgaaatgtgtcgtctcaagaaatcaagtagaggcgaggactgtgttcct

SEQ ID NO: 236467 - DNA, 217 bp, Homo sapiens
  chr12:58239310-58239527
  hyper
ctttttcgctgcgcgattcagaaccacgccgggtctgatgccatccggcgaattatgtaaccagggacaccgctcccgggctaaacaaacgcggctctgtgtgtgcagcgccggccccgggggagcgcaccgggcagggaggggctctggccgggcctcagggtcgggcttgtttgctcagcgaaactggtcagaggcagccgggagggagcccgac

SEQ ID NO: 236468 - DNA, 51 bp, Homo sapiens
  chr12:59313474-59313525
  hyper
ggctagcttagggcgcaggacttcatccccaatctctggcgtcgttactgg

SEQ ID NO: 236469 - DNA, 60 bp, Homo sapiens
  chr12:59314485-59314545
  hyper
gagttatattttccagcctctccagccagaagtctccactacgtcgtgggaaacatatat

SEQ ID NO: 236470 - DNA, 167 bp, Homo sapiens
  chr12:59989521-59989688
  hyper
tgcacagagctaccgcacatctgtcttctaggtcaggctacagagtacttcggatacagcaagttacgacccatctggaaagacagatctacctgccttttggctttcttccttggtcaaaactaaaatccgaagtggagtgccccgagcgatagagaaagtgccta

SEQ ID NO: 236471 - DNA, 126 bp, Homo sapiens
  chr12:59989868-59989994
  hyper
cttctccgctggctgtggcgggcgaggacacgtcaggggccataaataaataaataattccattcacccgttgacagcgaggcgaatcggctgcggtttgctgggaacggagggctgcagcgccca

SEQ ID NO: 236472 - DNA, 87 bp, Homo sapiens
  chr12:59990174-59990261
  hyper
tggccagcgagcccttatatagacaaaaaaatcccgaagcggccgcgggagcagagctcgcgtcagccagtgcgcgccgacagctgc

SEQ ID NO: 236473 - DNA, 552 bp, Homo sapiens
  chr12:59990441-59990993
  hyper
ccgccagcatccggcccccgagccccctagggtggcgtggcttcattgccgcagaaggtggaggcgggggtggagtgtgtggagagaacgtcttctctttgagcagatgatcaggacaggaagaggctgtgaggggaagacgaaataccgggggatgggggggttgtctttcttcatttttggtccccaggaaggatggcaggggtggaagcagatggaaaactatatgcgggcgaggcctgagcccaggcagaaagggacctctgacttggcaagggttcaggagggcctgagccttctggtcttgctgggccactgcaccacattgggggcgccaggcccggtcaggtggcgccacaggctgcgagcccgctcacgtgcgaactgcctgttttctcagcggatgctgcatcgcggcgcccttctccacccccttttctcctctacttccgcgaaaaggattgcagactgccttggaaagggcggtcgtgcccagtgccactttcccggtagggctgaggagggacttctgtagttccaattccagggaaa

SEQ ID NO: 236474 - DNA, 31 bp, Homo sapiens
  chr12:59991053-59991084
  hyper
gacatagaagaggaaacgaggagtggtttct

SEQ ID NO: 236475 - DNA, 824 bp, Homo sapiens
  chr12:62585689-62586513
  hyper
caccttcaggaaagcagcctcggccacgcacttctcgagttccctggctctcgcaggtaccgggtctccaacgtggcggagttgctgggaagctcgggacaggaaggaggagaggctctgagctcagccgatgtcccccctccagacgcccgcgttcctccgtccaggtgcccctgttcccactgctcgcagataggtccccgctggtgccctcgcggagacttggcgccttccactcgaatccacttagcagcaactcctggccagcttcagcccctcaatcccgcctcgaagtgctgcgggcagagccccacgcagcccacccgctgcccttctaggcatcgtgggctggaaggaagggaaacccgccgatgtccccctggtagcagtgccctggcaccgtcaccaccgaggaggtgcgagttccaacatcgaacacaagcgagcaggtgtcgcctgtgtcactttgctaaaggcgggaggggagaaagaaaggagcggggggagggggccgaggaaacaaatccagatcaccggcggagaaagaagccgtttagcaagcaaagcctcctctccgcgtcccaccccagatgctatactgtcaaaagacactgatgctaatcttttagaaagtcgccataaagggcagagcccctgctccactctagaaccctattccacccagcctggctgtccagtgagtacagagtgacttggctcccccgtatagtgcagcgagaatgcaggagaataggtcctgacactccaggttgagttaagcagtaaaatggaatggcagggccgggcggcgttgcctcgcctct

SEQ ID NO: 236476 - DNA, 565 bp, Homo sapiens
  chr12:62829160-62829725
  hyper
tctgcatccctaagcgaactgctgcgatcctaagcgcggggagctcccccacccagaggtacccaggcggtgcttgggcggtagtttggagaccctgagagggcaatgcaccagacaggaaactcgccctgggtctctcaccacaccccacctgagctgcggcaggtgccattgcaggagtgcagccaccacgggactgcaccctgccctgggaaccacagcccccgtatctccacatcccaggatctcctgctgacattccccagtgtccactggacagctgcaatggtacagcgctggctggacccaaaaggtgctgcaggggctccagtactctagcccacagggagtacgactccctaaggaaaggacgaaaggctgcagctgctgcaaaagaaaccagagcaagttttccagagcccgaagcttcctttcctggggctgtgagaagtcactctgcccccagcggcagcacaaactctgctccgctttgtaagagaagagagaagtccccatccagaggccgagcagcatctgcaccttgtgctaacgctgtagagagtga

SEQ ID NO: 236477 - DNA, 308 bp, Homo sapiens
  chr12:62860158-62860466
  hyper
agtgcaccagttgcgtttaaagaaaaaaaatgtatattaacaggaggtagccactgatttggggccactagtccagagattcgaaatgaagcgggaggagacacgttaagattaatctacagggaaacaaattatttacaccgaaatacaatttaacacaaacatacgcaaagagatatgccaaggagtactcgggggctctgttcaggcacttgttaatgaaaacgaagcgaatcttgacgccttaaaccctgtctagcctacttgattccgggggtggggctgtgggaatcgctgcccacccggaa

SEQ ID NO: 236478 - DNA, 870 bp, Homo sapiens
  chr12:63025568-63026438
  hyper
cataaattagggggcctggccgccgtccctcccaaggacaccgcagactgagattattctgtcggccgcactcggcccccaaggagtagcactgcgagggtggagggtcctccagcgcgggggcgggggtgtaggccccgagtgatttcctgccacagtgccggagcgggactggcgctgcctcccgggtccaggttccagccgctcccagctgttggcggcgctgctgagatgatggcctggatcccccaggttccgggactccccaggtggctccccgaggctatttacagctgaggttcggccggtgattgctgggacggaaaactcatttctcagcctggcttttatttacactcttattaaggaggctttcattcgtgttggaatggcagcgagaggctgcgggccaggcggccgaatgggtcgtgcccgagcgacagcggccgcctgcgccgcgaccttgagggcagaggagcgtgggcggcgtgcggggacaaaggcgcgcggggagcctgggtcacggctctgcagcagacacgggacctccacgtttctaccaccccggaaagttgagcgccttgggggctgcatttctccctttattggtagctggttcggctcgcccctttgcccgaccacacgctctttgtaaatacagaataggacaaaacggaaagagtgatgtgctgtcccctccgtctaaaaccctaagtaaatacccagtcctcccccagactcttctccacctgtggttcaggtgtctgggaagaaggccctgcacgcccgtccgcgcctcccctgcccgggggagccccgggtaggcagtggccaaagactctgtagaacaactcccgggagggcaggctc

SEQ ID NO: 236479 - DNA, 1610 bp, Homo sapiens
  chr12:63327112-63328722
  hyper
gtcgggaaccaagcctgccccggggtatccgggccaccagaacagggtcagcatcaaggcgcccaggcattggaagagctgattggttcccggacgaaccaatcaaccagcgaggccgtgcacggataggggagggccaaaactaccgaggggatggggttaaaggaaaaggcgcaggtgtgccagccaccaggttttgcgtgcacttttgcactccctggttcattaataaccttgaattctattctaaatgtctcctagttttcccgtttcgtacagctgaggtagtagatagaagggaaaacgttacttatcttaccattcataagatggttattaatagtcagtggaaaagtggccatggagctgggggaagggcaataaaatcctccacctctcctttcccgattccactctgggtcgtcaacctaactcagtcggttcctgaaatagctgatcagtcaaacgcaagcttaatcaccaaagcggattaccaaaatgttatattagacagttggaataagtttccccctccccaagggctgagggaaatagtactggcatttaccgaaagcgcagcattttactacctgctaaaggagaagcggaggaactcgcgggctgaaagtgagagaaactgagaccttcggaaatgtacaaccacgcactcggacacggccacctcccggaatcggacacaagctcccaggcgcagtgacatctcctccaagcctccacccccataaactcttcatcacgcgggggcgtcaactatattttgggagggtgggggtacagatagcagattttccttatgtgtttcaaacttcagagcttttctgcccgttttttttccccaagtgacagagaccccggattcacagacctgtctcaccttagctttcccacgctccagcgctgccacccacccctccaccacccataccggggctggagacgccgcgtccttgggctgggggaagagggagtggggagaagagggaaatggccagtgtaagtaaagagctccccgccgaggcctggacgccggcagctagtgagagccctgaggccgagaagcagggagagaagagggctggaaccgtgcggggaagggccgcgaggagagcaggggcgccgccggtgtcgctgcactcactctgcgtagccagtggcccagggcagccgccgagtctccttgaggatgaggatggggcgggcgatgtggtcggcgctgcactccacctcgtcctgagacagccccaggaactctggccgcccgtaggggaaacgcaggggcaggtccgagcctccgcagctgccgccgccgtgctcggagcctgagctgccagccatgatgccgcccatgaaattggccacggcagatttcactcgagtgagcatattactccggcgcccggctgcagcggtgcgagcaggaggcggcgggggccgggcaaggcgcagcgcggggcatgcaggctgcggtgggcgccgggcgcacggcgagtcgggccactgggacgcgccgcgcgcggctcccagagcctagtgctgcagggggccgagccccggcctctcgtgcttagtgccgcggtggccgccgcctc

SEQ ID NO: 236480 - DNA, 214 bp, Homo sapiens
  chr12:63328941-63329155
  hyper
tgcaagggctcaggctgctgcggtggccgttgctcagcccctcccctgccggcccaagcgagactcgcaccgggatcgtgacctcctgggggagggggagaccggctgagtcggtacctggcggaggggatgggggcgctgtgagctggaggcggtacaggtgttagcggctgtcacgtggagccgggcagccgggaaaaggattgaagaatcc

SEQ ID NO: 236481 - DNA, 2300 bp, Homo sapiens
  chr12:63543735-63546035
  hyper
aaagtcatcttcaccgtgcggatcttggcccgggaaatggacttcacgctgctgacacagggtgcgagcaggaaccccttttggaaggccacacccgcttgctctgcacccttgctctggcgcgacgccgtcttcccgcggacgttgcaccagatgttgtagcagatgaagccgtagcaggtacccaagatgaccacgggcgccacaaagatgccgcccgtcatccaggtcacgtaggcacgagaaccccagggctggatgaaggtggcccagcagtcgcgggccttggtgacattgttcacctcgatcatggagaagacgaagtactgcggcgtgctcagcacgaagctcagcacccaggcggccgcgatcatgaggcgcgagcggcgcgcgggctgttgcagagtcttgagcgggtggcacaccgcgatgtagcggtcggctgtcatgactaccagcatgtaggccgacgcaaacatgccgaacacctgcaggtgcttcaccacgcggcacagccagtcggggccgcggaagcggtaggtgatgtcccagcacatttgcggcagcacctggaagaatgccacggccaggtcggccaggctgaggtgtcggatgaagaggtgcatgcgggacgtcttgcgcggcgtccggtgcagagccagcagtacgctgctgttgcccagcacggccaccgcgaaagtcaccgccagcacggcgatctccagtttggccagctcctcgttgcgcacgtccctcggtgggccgttgccctccccgagggcttcggcctcccggcttgtgttgccagcgccggtggccagaggccaccatgggctggagttgcccgagggccccgcgtcgggaccggcggagagacgcatgctgtccatgcagctcctactcggccctcttcggagctccagccctcgcgggccgctccctccccgtctcggaggacttgggctcctcgtccgaagcgcagggtctttggcgcgctcgcagcttgccgggctctgcgatccctccagtgggcgtctcccggagcagcgtcccgcctgcccactgagcagctctcagcagggtgagctggcccctctccctgctctgccttttttcaacttcggcgaggtcgggaaggtgagctccgagcttccggaagcactgggttcccaactcaagtatttatgcggtgcttgtttccttgggacgcgctccctcccgccctattgccggaagactgctggttgcctactccccgctccctggagttttattttttcctctccctacgtcggtgtttgtcctctgcatcactgtggagggggtggagctgggagactcgcagattcctcctcacagtaggtgggatcgtggcgctttcccgcttttcccttccaaaaacttggacaactggacgagtcatgccttttctgggctcgtagccgtttccacaagcttccctcactagccttcctcgctagcctccttaaccatgcatttgacttcaacaggcacgctaagcgcggtacctggaaacctccagtccacgcaccggcgtccacgcatctagctcctgcacctgaacctggctctcgacctcacctcctccagtccgggtttcttccttctcaccgagctcacccgtgcagcagtctggcaaattttattccccaggcaaattttcccggggcaaacatttctccccgctcgtgacttaaagagctatctcttcctagtaacgtctttgatgcatgctatttattaccctatgtttgcgacgggaagaacgcactcatcactttgcagccccagtggctgctgtgcctgtattcacagcggggtttggggggagtgtctcctggttttctctatggagactagggacttaaggagttttctctagattcctggggttttctgcgggaaaagcctgattcccacagcggggatggcggaaatttggccgcagtggtccgtggggaccgtctggttactactgagtcgtggggacatctttttgggtggacaaagagcagctgccggacagcggccatccaggcagtgctgtccagggcaagggacagaaaacccgcccggctcctgtgctcaggagtaagaaagaggcaatctcaaagagaggaaagaggccctgggaaggaggggaaacaaccacctacctagtaatccgttactctgaacagctggagcccctctgcagggcgggagggaggcagaaatgcgatctccctcagctctgttttaacgttggtgaagatatgcctcgacggacagcaaggggg

SEQ ID NO: 236482 - DNA, 1249 bp, Homo sapiens
  chr12:64061816-64063065
  hyper
ctctcctgccctctcctcaccgatgccgagagtggttctgctggagaaccgccgcgcctgcagttcctgcaccttttcccggagctgcgccagggaattacggacgaactggaaggggccgagaagaaaggtcttggccaccacctctagctccaagccttttcgctctttcagactttggatcctccccggggaggacctccaggagccccttggcagtttcccgccgcctagggccgacttttccatctcctcctctacctccggctcccgggcgagggaggccccgcgccgccccttagactggctgcggccggaagattgcagccgctttgagcttactccttgttttctcataatcaaggagtatggtggagctgggtcaatttcaggcacagcccagccgagtcaggcgaggtccagagagacctgactcgcctggcagcctcaacggacttgtccccgcagccgttgcggacctcccggtcgtcatggcgactgtgaaatgtggggtggggcgcatgcgttggaagccattcgcgcgggcagtccctgagtgtcccctcacgtgctccccagcgcgagcagcacccccgcctctgcgcttcccagagcgtgcagcttccggtgagggcagccccacgcacagccccccacaccctccccagcgcctgcagcctccggtgcgcgcaggccccaagcccacatgcgcagtcctcaccttgcgcgcagccccatgtacagccccggacgggctcccagccccactggcgcagaacccatcaccgcttgcccttcacgcgcttcattgggagtgcagcccccaccccgagcgcgcagctccacgcagcctctccacactctccccagcgcctgcagcacccccagtgcgcacagctctgccagtcgcttccccgggcgccgcccctgcaccacttcggcccataaccttgcggcgactgtctgaagaacttcccgtggtttcattcttttcttcgggtttagtcttagctgtgacattttaaccaaaagattacacgttaattaacgaggtattaaagggaaagatctcagctgaaagaaatgactgtaggaagtgtgtcagggaagccaacggaaccgccggcccgccggcggtgcgcccggcattaggaacgtctctactcccctacgatcgctgaggtatcggacagtcagtgcccgttgccaacgcagagggaacgggccgagactgcgggcaacaagtggc

SEQ ID NO: 236483 - DNA, 98 bp, Homo sapiens; identical to SEQ ID NO: 203074
  chr12:64238524-64238622
  hyper

SEQ ID NO: 236484 - DNA, 114 bp, Homo sapiens
  chr12:64616270-64616384
  hyper
gtagaataggaggcggccagttccccgctctaagaagttgcctgcgctctgaggtgagctgacaggcccctctctgtgtggttcgtcagcgctggtgacgtcatgcaaacgtga

SEQ ID NO: 236485 - DNA, 203 bp, Homo sapiens
  chr12:64784403-64784606
  hyper
cccgcccccgcgctggaacccgcgcgccacaaagccgccggccacgcgtcgcctcctctccaggcgcggggacccgggccgcaactgcaggaatcgacgctaggtcggcttccctggagcgccctccccagccctgtccagcctctcgatctttgtcctaacctcagacggcgatgggcggggcaagacgctggtccttcagg

SEQ ID NO: 236486 - DNA, 111 bp, Homo sapiens; identical to SEQ ID NO: 203075
  chr12:64799099-64799210
  hyper

SEQ ID NO: 236487 - DNA, 58 bp, Homo sapiens; identical to SEQ ID NO: 203077
  chr12:65002989-65003047
  hyper

SEQ ID NO: 236488 - DNA, 102 bp, Homo sapiens
  chr12:65153389-65153491
  hyper
accgggaaaagggcggagaaccgggaaaaggtcaagacctgtacgtacctctcgcgcaggctcgggttgcgttctggtaggacgtacgtgtttctgagcgct

SEQ ID NO: 236489 - DNA, 314 bp, Homo sapiens
  chr12:65174361-65174675
  hyper
ggtagctcagtggcgtggcagtctccttctcgcccggtccggagcggaggggagcggctcaggtgccggctcgggggaggcccgggcacctcggggatccagagcccgctggcgccgcgcccgggagggcaccaccggcgaggacgaagccgcgcctcctcccggaactggccggcgccgcgaggcgggaggagcagcgggagccgggcagccgcgcgccggggaccatggacgtccttcccaccggcgggggccgcccggggctccggacggagctggaattccgcggcggcggtggcgaggcgaggctggag

SEQ ID NO: 236490 - DNA, 1793 bp, Homo sapiens
  chr12:65217998-65219791
  hyper
tttttttccttcattttctccgcgcctctctaatctgccaggaaataattcaacgcaattcgggctgaagcgtgtgcctcgccgcctgcggttgggtcatggccccttctgagactgctcggaagtgggagaggatgcttgcccttacgggtgttctgcccctgagactggcgccccttggtgctccctctgttccctcccagatcttgggagaagcacggacatctctgtttctgcttttggtccccgaacgcagttacgcgcccactggctccctgtctctggcgcttctgggcacgggggagctggggcggccccgcctgcgcacggcggtgccgggattgggggcgggcacgccgcctccgtctcccacgcgctcgctcgctcgctcgctcccgccctccccgcctcgagcgatctcctgcctcagccttgcaggctccgcactgcagatgcctgctggcttccctgcgctcggcggctcccgcggtgccccgtaagtccccgtgaccctccagcaccagccggctgtgcgctccctgctcccacgggccggtcagccgcagacactcacccagctccgcgagctcagccgctcagcgagtggggtagcggggaccgagacggacggtagccgtgccagagcccggggcgctctcggatgcggcaggacaagctgaccgggtctctgaggcgcggggggagatgcctgaagcggcagggcggcggcgtgggcaccatcctgagcaatgtgctcaagaagcgcagctgcatttcccggaccgcgccccggctgctgtgcaccctggagccgggtgaggaccccagggctgcagatggggcgctgtaaagtagcgccggggctgcccgcgcttctgccttagcctgactccgtctaggccggggagctctggggaaagtccgcgtgccacctggtgcggggcaccgcgttggcacctgcagggagcgattggtctggaagggtagagggcagacgggggcctgggtggggcagcggccaccccaggcgcggagaacccgctgcttccaccctctccccgcggacccccaccctgcggcctgtgtgctcggctttctccgcgtggcggggaagtgcgggtggctgcccgggccctcagaggccgcaccacctattgtgttccaggctcgcaggaagccagaccttgcgagaggtgtgtgggggcggagagtggcacaggtttgacactgcaggtcggaggaggaagacagtggctgcaaaggcaaaatcgggtgttattttcccaagagtcccttcagcgtgagtgccggggtcagctcgaactggagcctgtaatttgtgagtgcgagtggggagcagcaggagatccttttcataggtgaggtccaggaacgagcctggtcgtgctaggcaaggcccttcccactgtcagcctgtgtttacccatccctgcttctccagactgcataactccgtgtcggctccatcacccggcatccctccccgggattttaagagcctggccctagcgcgggctcctgggcacggaggtttctggcaaggagtggctgcagagggagttggctgtactctcactggtgcttggcgctcacctgttccctggagtggcaccggctgcgttccaggcgggttcacggtccccggcccccgccccccagcgccagcgccttggggacctgctgtagagccgcaggagaatcgagctgcagagtcccaaagggtgggatgcggcactgcctttcccaacctcgtggtttctttgttgttctcc

SEQ ID NO: 236491 - DNA, 367 bp, Homo sapiens
  chr12:65220107-65220474
  hyper
tttcactatgagaaggcaatcggcatgatgcccagcaggtgccccggaaaagtcagaagagcatattggtcagacatacagggaatccttgtagtgtggcaagaataagtcagcgcgggaccgaatttcctggtctttgttatcaagcaaacgtcatgattatacgctcctccattcagcacctcgcgtccggacagcaacctcacttgttttcagcgtgccttaaagcgtgcgctgggctggaaacactcccgtggccgttgttatcaccgttctatgtttgggcaggacttcgtttaaaccacctcagagagaggcggatccatgtggtacttaatattccttcggagaaaaaaaaaacttatct

SEQ ID NO: 236492 - DNA, 691 bp, Homo sapiens
  chr12:65514782-65515473
  hyper
aggacataggcaggggaaggcgctggaggcgggggccttacctatgagtactcttgcctggtgagcatcgatccataggtacaggctctcctcctgcggcggcccggcctccgcccgcagtgccagcaggcacaggaggatgctccagagccagagcgcggcggcagggaaggcgctcctccgggccatgctgctcaggacctcctcgctgccgggaaaactcctcgtgccgcacctacgcaacctggcgccgtcagatactctgctgcgctgcagctccctcagccagggctgttcccgtttagacggctgggcgcgtcgcctcccggcctgggtgccaaggagcctgcgagagcaggaggagggggcaggcaggacgcgggaggaggagggggggaccagcgggcgcgagtcgcgcaagaagatggggcgcgggcgggagtgggggcggcagagacgtaagactggcaaagctggcgaggccagcagtcagcggggcaaatagagcgagaacagaagagcgggaagggctggcgcgagcgaggtgcgagcgaggagtggggcccgcgaggcctgggcggccgccacttgggggcgctgtggggcccccccgggggcggggccgcgagggacccccgaggctgcattcacagtgcggtgcgcccagtggagcgcccgcgaagtgggcgtg

SEQ ID NO: 236493 - DNA, 246 bp, Homo sapiens
  chr12:65564381-65564627
  hyper
gaggcggcggccgcggagcagggaggagggtgtgatcaagtggactccagccccgttcctagataccgtgttaacgctaagaaactgacccctctcctgcccccgccacttactgacatggactcaaccttggattcgtcaacaggctcccttctgaaaaccaataatcatattggcggtggggccttcagtgtggactcccccaggatttattctaacagtctccctcccagtgcggcggtggcc

SEQ ID NO: 236494 - DNA, 912 bp, Homo sapiens
  chr12:66122483-66123395
  hyper
ttaactccataatcgctctgagattgaattcagtgacaccgtttaactgcttctggtttgggggcttttactcgatatttttaggtaaggagctgtcaggctaatctgaggacatttagggaaagccaataaactgtcacgaacttaaaacaagtgaggtttctcgtggtttggtcgaaattttaacacttctcctctcctacccttcacctcttctcctcaaaacacttttttttcttttacaataactgtaaatgccagctctaaatttccctccaatctgggaaagtccaatctcccttcctcgagaggtgtctgggcgcaatactctccggcccgaagcaaggggacgtttgcgaggagggagaaatttaaacccccttcgctccgcgccacctgggagcactttggcgccgcagactcaggagccgacgccatctccaggacggcctcggtggcctcggcaggaggcaccttcggggagcggtcccgcactcctccttcctcagtccccggtcctctgcaccgctccctctctgctgccagaggacctgtccgcgagctccccgcgctgccctggggacggaaaagtttgtttctccaacgcgcaactttcccgctccaggcggcggggaccccgagccggagttttggccaaaaaatcccagagtcctatacctcctgcgcgcccagacctcgggggcgaagggcggctcccccggcgcgccccgatccccgccgcaaagaggacttggtggactagaggtgcaccccgcgggcagcccttggcgccccgctctgcgcccgccggcatgaggactcgtgcgtggcgtttcgaccctccgcctgaactgagactgggtggggaaaggggcagactgctgtctgtgactctgcgggaggtggagcacg

SEQ ID NO: 236495 - DNA, 1208 bp, Homo sapiens
  chr12:66135074-66136282
  hyper
gtgtccgggaccaccggccttagccttctccaagcccagggcagggcgagaagaacatggcccggttcccctcggggtctctggcccagctgcggagggggaaaggtgatcgatcttgctgggggccaccgctagcccaccgcttcctgccgcgacctgccgcggcggccggagcccgggagcttcccattggctcacgggccgacgccatgcagtctgggggggcgtggccgggcggcggggcgtggccaggcggtgcggggaactgcggagagaggagaggagaggagaggaggggaggggaggggagaggagtggagaggagaggaggggaggggagggcaggggcggggcggggccgggcggcgggggcgcacaccccaatctccctagcgctgtgggggtggctgcagctccccgcgcgctccctcctttgggggggtttctgggctcgtgacttttttttaaataaagaatgagcggatgcccgtgacaagttaatagctctcgccgcgctctaaagttaagttgtatctccttcccgccgcgagtctccttccacagacccgccggagctgccgggacgggcgctgcgcgggactgggcgttaggtgctcccggctggttccggcgagcagcccccacccctcgcccacgctcggggttagagaccccagcaccccacgcagacggcccgggcttagacctctccacgtcgctgtggcgcgcgccccgccaacacccccaccccacgcgcagcccgtgtcttctttacccccgcgcacttaacgcagggcgcacgcacgcatcccggccccctcacactcacactgcgtcttctgtcacaccccctgtcgcacacacactgttctctgactcccaccatctcctgtctcacacccactccagtttcgtgttgagcggccgccagttctccctcggtcgcgccggcgcacgctcgtccccttctgccccggagcccgcccgcgccgcacggtggccccttgcgctggcctgatcgtgggaaccaggcggggccccagcgtccctgcccctgcccggtcatccatctccctcccggtcggccagccgagacttcaaaggcgcctcctccggccgggcctgccaaaccccgacgcagcctggatgtgggccgggggcgctccccggcggggggaggccgggccagggcgcgtctggggccggct

SEQ ID NO: 236496 - DNA, 447 bp, Homo sapiens
  chr12:66216562-66217009
  hyper
tttttaaatgtgcacgattggcagttaggaaatgtcactgtaatcgttaggtgaaacttcaatccctttgatgaagataccatctttgagccaagccctgacagaaaacctttggttcctgttagacccctccctccccagtcagctgctgggctccatccggagggatggaggctctctctctccattacagctaagcgttcccagacccagcagaaaccctgggttcctgcagagcactcaacgtgcagcaaagtgtcccagctctgcaaagggcagctggaaatggatttaaaatggcaacgcggaccaatcagcgctgccgcgccaaagcagacatttacacgcgcctcctccacatgcacagcggaacctggcggtgcctaactcctgcttagggctgcaaagtaggcgtttttattccacggtggtctgtatctttgaaaa

SEQ ID NO: 236497 - DNA, 1124 bp, Homo sapiens
  chr12:66217366-66218490
  hyper
tggggagggaacttcggttgcctctagtctttcctggagaaaaaagttcaatgaagaagctggggcgctctgtgtgtgcacattgtttgcatgtgtctgcgaatgtgcatgtctatctgcgtgcctgtgtgtatgtgtgtgtgtgtaaatgcgggtgtttaccagcgcatgaatgcccccgtgtccacgtgtatctgcgtgcatgtgcttacacgcgtgttcgtgtgtatctgcatgcatgtctccgtgtatgtgcgcgctcgcccgcccgcaggctctgtggtgagggcattccgaggcggagtacggctgtcaggggacctctcccactccactgcagtcccttcccactcacagtgaaccggtgcgctgcctgaggtgcagcctagacgcttcctgcaaagtgttggctcggcacggtagaggcgcaggtaaaggccaagccccgaaacgtggctccgggacagtcacgttcccgcgccttcccaggacaactgcccaggggtgacctcgagaggcgggtggagctaggcccacggcgagccagcccgggatccccggcctgtccctttaaccccgccgccgggcgggagcacgtgagcggggctccgggtggcacccgggcgccgccgccgccgaggcagttgtatttcgaacgctgcctctggctagcagccaggcgccttggctcggcggtccgcctggcctccctcctcctcatacttttcttcctgcgcaaccccctcccctttatccgcccacgattagaggtgggcactccccccaccaccaccccctccccaagcgcaagcgcgtgcacgcacacacaccacacacactcacactcacacacactcacacacactcatcccacttgaatcttggggcaggaactcagaaaacttccagcccgggcagcgcgcgcttggtgcaagactcaggagctagcagcccgtccccctccgactctccggtgccgccgctgcctgctcccgccaccctaggaggcgcggtgccacccactactctgtcctctgcctgtgctccgtgcccgaccctatcccggcggagtctccccatcctcctttgctttccgactgcccaaggcactttcaatctcaatc

SEQ ID NO: 236498 - DNA, 1784 bp, Homo sapiens
  chr12:66218550-66220334
  hyper
cagggtggggggaagaggaggaggaattctttccccgcctaacatttcaagggacacaattcactccaagtctcttccctttccaagccgcttccgaagtgctcccggtgcccgcaactcctgatcccaacccgcgagaggagcctctgcgacctcaaagcctctcttccttctccctcgcttccctcctcctcttgctacctccacctccaccgccacctccacctccggcacccacccaccgccgccgccgccaccggcagcgcctcctcctctcctcctcctcctcccctcttctctttttggcagccgctggacgtccggtgttgatggtggcagcggcggcagcctaagcaacagcagccctcgcagcccgccagctcgcgctcgccccgccggcgtccccagccctatcacctcatctcccgaaaggtgctgggcagctccggggcggtcgaggcgaagcggctgcagcggcggtagcggcggcgggaggcaggatgagcgcacgcggtgagggcgcggggcagccgtccacttcagcccagggacaacctgccgccccagcgcctcagaagagaggacgcggccgccccaggaagcagcagcaagtcagtacgagggcgcggtgggggcaccagcccaccccgtccccactgccggggcccagacacgcgcggggcggccggagtgcgggagcccagtcgccgcggccgtcgcacactgcccgccggccggccggggggagcggcgcagaccccacgagtgcgccgcgcggccccggggcgccagcaaccctccgggcggggaggtggggagccgcggcgggcggcccggggaaggcgggaggtggggtcgggcgaagcgcgtcctcggactttcgctattgtgcacggccccgagtggcgcggtgtcgcccagtgactggaagcgaccgggatccgacaaacccgggctcgcaggcgctttccgagttgcttttgcaactgcccgggaggaaggaggtgccggggacccgggcgcttcggccgatctgggctgaaggggctagagtcttgggggccggaggctctttctcccgcctcccggggctgctcgcgggtcgggggctggcgcgccgcagccgcccccttggcgccctcctccaagctctcggtggcccaagactcgcgccctcccgacaaagaacgcatggagacccggctgcctggtcctttttgggctctttaaatatgcggcggccgccggagggagcccggggcaggggctacggggagcctggttccccgcaggacggggttaactcgcccagctaagggcgcgttgaaaggagtgtccaagagagtgcagggtagccagggtcgcttccttgtcaggggcccggtcccccttttgcccctggatctcgcgcctcagagctgcagccattaaatgctcttctccaaggccagtggccgggggttgagtaggggacgatcgaggggcgcccgggaccctgcggagtggagggttttgtctgcggatgcaaccaattaagcgtgcagccggcgcttgcagagctgcgctcagcgcgcagggctgggggttttgttcgctgtaatttccaagccgcggcgggcagagttggagcgggatatgtctattgagaacatttaaactccactttctcgggctttaaaacttgctctctgcttagtcttaaatcgcttccttcatggcaaacacgccgattagaaaataatcctagagtcccaaagttgtccgagagcaaggtggggaaactg

SEQ ID NO: 236499 - DNA, 238 bp, Homo sapiens
  chr12:66563705-66563943
  hyper
gggtaccgggggtcggggtcagccatgatggcaacagcacccctaccggtcccggtccactaaccgcaaccgcctcctccccacttccgcgaggaagagcccagccccagcaagccgtgcggcgtcggcgggcgaacaccgagcgagtcgattttctcgcttcaaaaattccagctgggcggagaaagcggggatggctccgagttagaatggaagagaaaacggtttacattcccgg

SEQ ID NO: 236500 - DNA, 51 bp, Homo sapiens
  chr12:66582933-66582984
  hyper
ccgcccctgcagtgaccggagaacggcgtgttcctagggctctgctgccgt

SEQ ID NO: 236501 - DNA, 50 bp, Homo sapiens
  chr12:66583164-66583214
  hyper
gcgctgttctggacagctgcgacggcgcgctgggctggcgcggcctgggt

SEQ ID NO: 236502 - DNA, 291 bp, Homo sapiens
  chr12:66696078-66696369
  hyper
tcctgataatcaccgcccagcaccaggctccaaaaggagcggaagccccgcccatctcccagcccctcgctctcccttccccgcccctaacccgccttgccccgccccttccacatgccctcccctcggcaattcctggaaacttggggcggagcttcgctgcctttcaggttttatgtacgctggcggccgccaggccgttcccggaagttgatggccttacagtcgtagaactgattggctgatcatgaccatgcagttagccagggttttcccgagttgtttgggttg

SEQ ID NO: 236503 - DNA, 527 bp, Homo sapiens
  chr12:68041630-68042157
  hyper
ggaaagagatgtgtcgggtggggtgagaggaattcgaggtgtcgctccctcaccgcagagctgaaaggaaggtgtgtctctcccagtggccgcgcaggggaaaggctcggagttgtaaggaaataggagatgtctctgatgtttatttttgcctagcaacccacagccaactgcttccccagctgccgtccacacgcgcctctctgcctccccttgtcctagcgactggcgagcggtcacttggtgtcagtaaaccggggagggtgtgtggtggaggtgggagggcagccccctctttcgcccctgctcagggtcaacgagctcagcggccgcccctcccgggacttgcctctccgaggtgaccctcgcacaactaagttatctacatgatgaattggggagaggggagtggctaagtcgctgggaccaagaatggggggacggggaagcagtactgtctgtgagcagccattcagttcgaagagctgaaaatgcatttatgtttaggggtgcgcatggcaggggag

SEQ ID NO: 236504 - DNA, 34 bp, Homo sapiens; identical to SEQ ID NO: 203089
  chr12:68617124-68617158
  hyper

SEQ ID NO: 236505 - DNA, 497 bp, Homo sapiens
  chr12:68758756-68759253
  hyper
cattcttttaagatttctatcgcctcagtattgtcgatttccacatccacagcctaacaacgtggtgcaatcgccctttgcgacgccgcagaccaacagacggatgctgccctgctgcagtttcacagcacaccgggtctttccgcttcagctggacagaggcccagccaggccgtagggaggattccgaaggtctctctgcagaggaccggcctctcagaccgagaaggctccacccaggcaggaaaggacactgtatgtggggcagtcggcctgggccccatggctcgtgtttgttgctgaattgggcaacgtgggctgcggttcacagggcaacagagacttcaccacctaacacatcggggctggtgcagctgaggagggctgcttctgcctcttggtgaccacgccctttcccaggctgggcccacaggaagtctggccgggaagggaggaggcactgcaagctgtgggaaccacaccggctccttcactgc

SEQ ID NO: 236506 - DNA, 933 bp, Homo sapiens
  chr12:69326514-69327447
  hyper
cagtcttcaaaaacgcttccatcccttcctggcggtggtagttgaaatccagcgcagctaccaaaggcagcaacagccctagccagaggcacgggaagtccatgttctagagatgaataaaaataagaagaacctgagaacacatgagggcaggcgggggcatcaccagctacgtctcggtactccggtctcagggtctcccgacactgacgctccctgcctcctaaggaggcaaaagctggaagcaacaccttcgggagtgagccgtgcaaccagagaccgggagcacgggcagcctcggtgccctcgacccagccgcccgcgcctccctctcctcctcctcctggcgcctccgccgtccggcagctgccacagctgcgcccggccccgcgcacccccagcctcaccaggtcccaggcgcgcacctctacccacccgcggccgcccggcggggccgggtgttatagcccggtcagagggcgggcgcgcccgggccccgcccccggacgtccctccggcccactccggagccgcgcgggtgcctcccgggcggggcctcagccgccttcgcacctaggagagacggcgcccgcgcggtgcgccctttcgtggcgcggctgctggtgcccgcggccgggcggctgagctgggcggagggctgcgggcatggagtcgccgctcgcggacagtctttgctggagccccaggtcagaagtgtgtcctcgcctcggccacggctgtagcctgggcagccacagggcgctccaccgagggacactctctgtcgcagactgcagccgcttgggagacgtttagggctcggcgggtttcctgcggttggcggtgccggggcccacctggagccgggacgcatgcggagtcctgagtgccctgagccccgcgcgggctcctgcgggacgggcggcgtcggcc

SEQ ID NO: 236507 - DNA, 152 bp, Homo sapiens
  chr12:69548454-69548606
  hyper
cctcgattttcccgcgtgcgttacacaaactacactttgacatatcacaaagacaactcaagccaccatttcataggctgcatgtgaccttccttccctcaggtttccaggggacacttgaagctaccacaaggtggcgctgcctgccatcc

SEQ ID NO: 236508 - DNA, 165 bp, Homo sapiens
  chr12:69550940-69551105
  hyper
gaaacagaagcctacggggaggaggaagtcccttccctcctccagccttgcagcctccctcgagtgccccctggaggcagagcctagcagcgagccagcaggctgagcagaaacgcggcttccggagtccgagcctcagcatcacaaagccgaggtagaaaattg

SEQ ID NO: 236509 - DNA, 358 bp, Homo sapiens
  chr12:69724879-69725237
  hyper
ggcgggtccctgggcggtagctgttttactcttgtaaaagcgctgccttttgcctgtgctggctctgtttctgtgaacttccgggctgccgagcctttctttttatttactgcttgctcggctgcacggctttcggctcctaatgccttttttcttatctttttataaacatacacctgattgccttgccgattctgcattactgggcagagtaagagctctgcttctaatgctgcccgcttaagacagggactgatagctgtagcatatcctaggtcttttttcctatctattggaggaggaggctcaggtataaacccccgtttcctctgttatttcggcccggtgatattagggt

SEQ ID NO: 236510 - DNA, 207 bp, Homo sapiens
  chr12:70133407-70133614
  hyper
aattccgggcaggcgcccggagtcgcgcccaagtaggcagctccgtgccgccagacttgtgttcgggggagttgagacgaactgcacgggtgggattgcatggctctgccctcccagcgttgacaactcgccccgaccgcccaggaagcgcgagcttactggctccagaagtgatgatgctgggtggaagtcgcagcatgtgaagag

SEQ ID NO: 236511 - DNA, 199 bp, Homo sapiens; identical to SEQ ID NO: 203094
  chr12:70637717-70637916
  hyper

SEQ ID NO: 236512 - DNA, 115 bp, Homo sapiens
  chr12:70759015-70759130
  hyper
gtgggtctgcccggcgctgtcgctttaagcagcgctcctggaaacctcatctacaaatcctggggcgggtcaggggtggcaagactcctaaggagggaaacgacagaaatgattc

SEQ ID NO: 236513 - DNA, 749 bp, Homo sapiens
  chr12:70760476-70761225
  hyper
ggcggggggagcacgccagccgccgagagtggggggcgatggcgaagctccgggtggcttacgagtacacggaagccgaggacaagagcatccggctcggcttgtttctcatcatctccggcgtcgtgtcgctcttcatcttcggcttctgctggctgagtcccgcgctgcaggatctgcaagccacggaggccaattgcacggtgctgtcggtgcagcagatcggcgaggtgttcgagtgcaccttcacctgtggcgccgactgcaggggcacctcgcagtacccctgcgtccaggtctacgtgaacaactctgagtccaactctagggcgctgctgcacagcgacgagcaccagctcctgaccaaccccaaggtaagaacgccccgcgcacccaggggctccccgcgagggaggtttggaggcagcgtcggtgttagactccgcgcggggagggttcggcgtgtgctcgcattgctaggaggagaccaggtggcgcaggctgtgctcaaaccaggaatgactacatcagggagccccagggctccggtcttttcaggtgggtttacgcgcggcgaccagtggtgcccagaggcttactttaaaacctgtcttgcctggtctcagattttgaggcctcgacccagtccgggtcctgcgcctaccggactgggtttggagaagtgcaaggagccaagaaagttaacttttcctccatttaaagccagtggttagcggggatccacctac

SEQ ID NO: 236514 - DNA, 587 bp, Homo sapiens
  chr12:71003555-71004142
  hyper
tgtgatccacaaggccaacccggctccatggctcagcattgcgctcagtagttaagatccagaggagaccgagggggctggacgtgggacggcccgagggccggggcagggggtcacctgttgcgcgcgctcagcgcgccccgtgggcgcagcgcgcttccctcggggctggcgacgcgcaggggccactgcggccaccgctgctgctgctgctcctgccgccccgggcgggctgcggacgcgagaggcggcggggacaggcagcgcgccgcccttcccacgctgccattctgacccgcgctgcctcgccccagccccgtccgctgacttccgcaatcaaaaggcaatttcctcgtctcccggcaaaggaacaatgcgccggcgagggagggagccccgaggagccaacgcctgagcctgccaaggggcccgatgtgggccaagctgcccccgctgccccgcgccgataccttcccggccaggggtccggtccggctccgcggggctctgcctcctcctcctcccgtactctcccttttccccagtctgtggttctcgacccagtcgccttagccacaattagtgct

SEQ ID NO: 236515 - DNA, 434 bp, Homo sapiens
  chr12:71314193-71314627
  hyper
gagaaactccaccacgaccccacttcaggtaaagtgctattagaaagagccaccgccaagggtcttctagtctccgggattcaggtcctcggctggggtttgcagagcagtcagtctgtggcgccgacagaaaccagcaccagcttcaacctccctaagagagggagagaggaagagcagtaggaggttgcgggtaaggggaacagaagcgctcagaggcggcaaatgcctggccttctggacgcccagaagccaaggcggagacggcagggtggactccgcgccagcccagcagcccagcagcagcgccgcggctactgagcatgcccagcgccggccctcacgaggcaagggaatttcaaagtgaaattccgcttctccgggtcttagcggcggcttggagcagagtaggctccatcgctggggtggtggtt

SEQ ID NO: 236516 - DNA, 2094 bp, Homo sapiens
  chr12:71833003-71835097
  hyper
tttagggcaaaagcgagccagacagtgcggcagacgtaaggatcaaaaaggccacctatcattcgccggggacgcctgcctccttaccctgataacgtaactatttctctgcataggattttagtttttgtgtttttgttttgttttattctgtttaatcacttcaagtatctcatccattatttgaagcgggctcggaggaaacgtgccgcatcctccagtccttgtgcgtctgtttaggtctctccgaagcaggtccctctcgactcttagatctgggtctccagcacgcatgaaggggtaagggtgggggggtcccctattccggcgcgcggcgttgagcactgaatcttccaggcggaggctcagtgggagcgccgagaactcgccagtaccgcgcgctgcctgctgcctgctgcctcccagcccaggacttgggaaaggagggaggggacaagtggagggaaagtggggccgggcggggggtgcctgggaagccaggctgcgctgacgtcactgggcgcgcaattcgggctggagcgctttaaaaaacgagcgtgcaagcagagatgctgctccacaccgctcaggccgcgagcagcagcaaggcgcaccgccactgtcgccgctgcagccagggctgctccgaaggccggcgtggcggcaaccggcacctctgtccccgccgcgcttctcctcgccgcccacgccgtggggtcaggaacgcggcgtctggcgctgcagacgcccgctgagttgcagaagcccacggagcggcgcccggcgcgccacggcccgtagcagtccggtgctgctctccgcccgcgtccggctcgtggccccctacttcgggcaccatggacacctcccggctcggtgtgctcctgtccttgcctgtgctgctgcagctggcgaccgggggcagctctcccaggtctggtgtgttgctgaggggctgccccacacactgtcattgcgagcccgacggcaggatgttgctcagggtggactgctccgacctggggctctcggagctgccttccaacctcagcgtcttcacctcctacctgtaagtacttccccacgtcactccgggagagagactaagaggggaaggaaggttcgtccaaggcgaggctggaggctcctcggcgcccgcctgctcgtgggggaggggggcgagtttgtcaagggcatcctggccaggcctgttagggcccccagagaaatgcacgtgtctcggggagtagcgtgccggcactttctggacccgcagagaaatggcttcgagtgcaacccgggaaagcgctgctgcgccgcagcttcccagtccagcgctagaaacatcgcagggcgaattcctgcaaatgcaggcatttgcgtgcggagtggacatttgtgacccagagcctggtacccaaaggcaggctgccatctggtccccgccccaaccgcctctctgcgtctagtcgcattccacgaaaagatggtctgtagaaagtttccccaaaggagaaacaacttgcccagctccaaagggtttttagtctgcatcccttgcactgtgacgtgatgtaacctttttggggttttttcctcttttcctcccttccttcctcccttcttccttccttccctccctcctttctttttattttctttcttttttaacggcgtgattaaaatgtggcaaccacaaaccccgattagagctgccagaacgttatctttacctttggctgcccgcgccgccctttgaagtgcccgcggccgctgtgtaatctttaaccatctcttcccccggggaggaaaggggaagtgggctgaaggctgttgggctggtaaacagcggcaccgacacccaaagggagacctgaagctctctatcatccctgggggattctcccaccccttctctccccactgcaacttccaaagccctgaggcggcggctcattgcgtaattttttctgtggaaaacccaggcccgaaggtaacaggtagttgggtgaacgcggtgacccaggaggaaccctattctcggagaccaaggcgactactctctccacccccgtgcaaagcatctggggcttc

SEQ ID NO: 236517 - DNA, 128 bp, Homo sapiens
  chr12:72148402-72148530
  hyper
ccagagctgggctcgcctcaaattcctggttccttattcccgctggctcccaccaactgaaaagcagaggtggctcgcaagcggcggggctctgccctagattgccagtaggcgctcgactcacatcc

SEQ ID NO: 236518 - DNA, 166 bp, Homo sapiens
  chr12:72234299-72234465
  hyper
cgtgcggagatttcgtcgaatagtgcctattcgcgttccgagggcacatcttatgcatagttagggctatcagctttatgatatgccaccgatagtatttcccagtgcaggagtatttcataaacagctggaatcaactgaagtgactcatcgaacactaatggtt

SEQ ID NO: 236519 - DNA, 248 bp, Homo sapiens
  chr12:72332525-72332773
  hyper
tgactgtggccatcggcaaccagaaatgagtttctttctaatcagtcttgcatcagtctccagtcattcatataaaggagcccggggatgggaggattcgcattgctcttcagcaccagggttctggacagcgccccaagcaggcagctgatcgcacgccccttcctctcaatctccgccagcgctgctactgcccctctagtaccccctgctgcagagaaagaatattacaccgggatccatgcagc

SEQ ID NO: 236520 - DNA, 2722 bp, Homo sapiens
  chr12:72665236-72667958
  hyper
tgcggggcttgttgcgctgaagatttacaatgtacttcttgcaggcggctcagcaaccccctctgtggctgtgggtgtctggtgtgacagagcggagaaaagctctctaatctcccagtgcctgcctctgccgctcagtcgctcccctccctcccgcctttcctgcctcctcgcgcgctccctctcctttgcctttctctgggagtttcagtccctcaatgcagctggagtagccctggcaatctaaacccgaagcctgtgtatatacacacacgcacacacgcgcacacacatgcacacgcgctcggacatacgcacttcggctctcccccttgggatatggagcaaacccagagcttcatctacctgaaggggatggcccggccggacacttctttctcacttgtcatctccggagggcagagcaagactggaatgagggagtctcgctgtcgggtctgcaacctcctgccgtttgccgccaccgccgcttaaagtgcccagggtggagaaggcttttccaggacggatctccgtcgtagcttcgcggccctgggacttcctcctgctggttcactctagtctctcccacctcggccatccttttctctccagctgcagggtgtatggctcgggtgcctcccgtgctgtggccgccgtcactgctgctgcgagcacattccacccagaggaccgaacgccgccgctggagtggggggagaaagcgaaagccctaacttccctctctacaccctcgctcttcccaccgctcccgtccttctccctagccgagaaccggttggaaggctcccgcggaaagcgaggcgagagcgcggcgcaggggagggagagccgggagccgcaggcgcgcaggggcgggggcagcatgtgccccgccgccgggtgctcgtccgagaagtagcgcgcgctgggcaagcaagacgctttccaagttgggcgcgtcccagagctcacagcccggtgtccagagtgaggcggggctgatgggggtcgcggaagctgccgtcgcttgtgtccagaacccgtcttaaaagaacccgggccagcatccccagtcgcgcgccctcggcccgcgtgagctctccgatgcctgctctggctgtggcccgggtggcccgcccgcggggggtgccagagggggcgggggaggaggaggaggcggtgtgatggccctggacggcgagctgggggagcaagaggaggagaagaaaaagaagaagaaaaagaagaggaagaagaagaaggaggaggaggaggaggaggagggggccgagaagagcagctcacccttcgcagccgcgatgggggaagacgacgccgcgcttcgggctggcagcagggggctctccgacccgtgggcagactcagtgggagtgcgaccccgcaccacggagcgccacatcgccgtacacaagcggcttgtgctggccttcgctgtgtccctcgtggcattgctcgcggtcacaatgctcgctgtgctgctcagcctgcgcttcgacgagtgcggggcgagtgccacgccaggcgccgacggtggcccctcaggctttccggagcgcggcggcaacgggagcctccctggatcggcccggcgcaaccaccacgcaggcggggactcctggcagcccgaggcgggtggggtggccagtccggggaccacgtcggcccagccgccgtcggaggaggagcgggagccgtgggagccgtggacgcagctgcgcctgtcgggccacctgaagccgctgcactacaatctgatgctcaccgccttcatggagaacttcaccttctccggggaggtcaacgtggagatcgcgtgccggaacgccacccgctacgtagtgctgcacgcttcccgagtggcggtggagaaagtgcagctggccgaggaccgggcgttcggggctgtccctgtagccggttttttcctctacccgcaaacccaggtcttagtggtggtgctgaataggacactggacgcgcagaggaattacaatctgaagattatctacaacgcgctcatcgagaatgagctcctgggcttcttccgcagctcctatgtgctccacggggagagaaggtatggagggaggcggtgccccgcgctgccccaccccggcgcgcggctcgaacctctgggcggcctgcgaccccggggacccagctggcttccaatacccgggaagccaggggtggggggaaggaaacgaaagcggagtagggcagtcagaactccggggtctcccagatgcctcggggtctcgctgccgccaacttcgcaaactgactcaccggtgccaaaagatgaatgctgccccctcctctagtcgggacctctcctcttcctgtcagagttccttagccatcgaaacgcagggctctttttctgaagggtagctgataatctgagcgatgccagagtgacatgaaaagcttgccaagttactgtcgagggaaaatacgtggcgctgaaggccaagacaacagcgcatccaggttagcatgtcagggcaggtcagggacacaccgttctccacccccacccacaacatgcccatcttccctgactattagtctcctgccaggtgcagagcagaggatgggctttggctgcgtcaagtttccccaaacttcaagttgagattcggagtgaaaagagtggtttccagagataggctgagaggaccgggacgggggtgga

SEQ ID NO: 236521 - DNA, 500 bp, Homo sapiens
  chr12:74931275-74931775
  hyper
taaaatgatgtttcgaatcacaccacaacagtgcatataattattaaaattttccacttttcagaggatatcaattaagcgtggctgctgaattcattagcgaatgtttaaatttacaaataaagtaacataaaatagcatcctcgcaattttttaataatcagagataatggaagtcatacactaagttcatcctgttccttttcataaactcaaacgctctcaaagcagcagcgcgttgagaagccccaagagtctgcgcggaaccagtgcgcaggcgctctgaggggcggaagcggagaggcggggctaggcccgacaggggagcggaagaggcccaggaggctgggtgaggcgctgagacggtttggcggtgagtcctgggccaggcgcagctgaaaggcccgcaacccgggaaacgtcaaaacaaacagaaggacttgggattccggagcagtcgcccctatcgctgctcctgcagttgcggacgccaccgaccc

SEQ ID NO: 236522 - DNA, 741 bp, Homo sapiens
  chr12:75601208-75601949
  hyper
caggtcctcgtcgtcgccggggtcgccgccaatgaggtcgggggtctcgaagatgtccagcgcctcctcggcgtcgcggtgctgccggtaggtcatccagcagcagggctccacgtcggtctcgtcgatgccccagaaggccagctcctcctcgaagagcggcccgcacacgtctgcggggcagtgcagcttgccggtgcggtagtaattgagcacataggcgaagacgcccgggtgccggtcgaagaagaactcgcggccgccaccgggatggtcgctggccctgccgccgcgggaactgcagttgcccgcgccgccctcgaagcagccgcctggcccgggggacagcgggggcgctctcggcggcggcgacagtggaggcggcgacggctgcagcttgtcgcccgccgtggtcaagcagtcgcctgggggctcggaggaggcaagaagggccaggcgtgttccaggcagggtcttgagggtgctgcggtaggtttcgtgccgggtgcccccgacattgaggatcaccctctcgttgttctcgatcttgcccatctctgtgactcagacatgactagggggaggcaaacacagcgccgagttaaagatcttagccgtcaaagacacaccatgacccccaccaccaacccagagcgagtccagggatgcagagttggcagacaggcacggggcaaagaccctccccgggaggggatcagcgtccagcgctgtccccgcctc

SEQ ID NO: 236523 - DNA, 502 bp, Homo sapiens
  chr12:75602929-75603431
  hyper
acatgccctttccaggaaatcgcccctttcaccacccccgcccccatttccagataccttaacgagaccgagagaaaagtggttctgctttggtttccgagtggacgaggttctctgggcagcgggactgagtcttggcgcccaggtgagccgcccttctccgacgagaaactacttgttggcgttttccggattcaggtggttgagccgcttccctgggcgctggggtgggggagaaagcccccgccggccgccggccgcgctccccgccttcattctgtgatctgcggatttgccagtcgccaacctccgcgcccagagtcaccatcgcgcagggttgggcaaaccatggagctcggggcgggtccagccggcactgcccgacccctccgggagcgggcagatcggctggccgtgaatggagtggagactggccgcaggtcaggagagctcaccacttgaaggtgaagtcgccctgctcggattccatctgcagattttg

SEQ ID NO: 236524 - DNA, 229 bp, Homo sapiens
  chr12:75723898-75724127
  hyper
acgaaaaggtcgtcggcccaagtcccttgttcgttctacgccacctcccgcccccgccaatctgcctcctcagttccgctgcctggctgaccggaactgagcttgtggccggagaccccgccacgctctcagaagtacttgctggctggaaaacccaaaggggtgaaacctcagctacagccgccgcagcctcccagggaaccggctccgcggcgcccctaaaccccgg

SEQ ID NO: 236525 - DNA, 442 bp, Homo sapiens
  chr12:75728068-75728510
  hyper
ataaaaatctatacacggaagctgcgtctaagaaacgaatatatagtgctttgcactcgactggcccattgtcagcatcccgcacttgttctttacctaacttgtgtggcttgcatattgcaatctgtattacaatccagacgcgctctgcagattacagattggatccacagaaagcagtttggatggttgaaattccctccaccagagggcgactcagagctttcccctgtagctcagagctttgtggaaggggaaccctgctgcctgttcttccccacagcgacactgacaagttgatccagccgcgctgggctcgagcctgtgcggcaggatggagccaagggagagcgtggtgcgggggcgtggggaaatcgggttgccccagccgttactggtccgcgcagtcagggcatcctccgcatcctccacatccttccat

SEQ ID NO: 236526 - DNA, 146 bp, Homo sapiens
  chr12:75905415-75905561
  hyper
tcttaaaccctaccggctaaaacgcctacactcaaaatgagttccgcggaactcagacgaggagatctgcgcagtctccgtgcgtacgtgcgttaagcccgcgcttttacacaaaccacagcttctcctacgtggccaatgaagag

SEQ ID NO: 236527 - DNA, 182 bp, Homo sapiens
  chr12:76425500-76425682
  hyper
ggcagccggcgcacgcctcattaacttggggcctttccaaagcccgctgcgtccacgccctccagcgtctcttgctccgcctctcgccgcccacttgcttccgcgctcgttcccctggaaggcgacccggacccgagccccggaaactcctctcctctacccagggcgatcgcccaaggagc

SEQ ID NO: 236528 - DNA, 157 bp, Homo sapiens
  chr12:76426120-76426277
  hyper
gacccacgtcaggtcgcatctcgcctgcttttctcgaccccgaccgcaggcgctaacccgtcttcggctttcttcttgacccgtacggtttgcaacgtctcttaaaacagtaactcaactctctacaaaccggggtaatatccggtgctgagatccc

SEQ ID NO: 236529 - DNA, 217 bp, Homo sapiens
  chr12:76742083-76742300
  hyper
cggccacctgcaacgccgccttcacagaccctgcagcggccatagaacttaacatatctgggccgcttcccctttttgaccagcttgcagaacacccgggccgaccgaaaacaggggtgggaacggccggaaacggaataggcggggagaaaacccggaagccaggagtcgaagccggggtagcacggcttcttggttgggcgagagggctgccctt

SEQ ID NO: 236530 - DNA, 218 bp, Homo sapiens
  chr12:76952933-76953151
  hyper
cgttcccctgccgcggcttttgtaaggctgcagatgcacctactgtgggcccctaaacactccaccctgccagcctttccaatccccctactccaaaagggaacaaaggagccaaagaactcctcggcgggggtggccaggagtccccgacagcccgagctcagaacgtggcaataagggtgcgcagtcgccctgaggggtgcgaacccagcacccca

SEQ ID NO: 236531 - DNA, 304 bp, Homo sapiens
  chr12:76953529-76953833
  hyper
tccgccgcgtcgccgcctttctgggcacccagaaccgcgaagatccttcacattctagtgccctccccctgccccgcccgccccccggatcacgggcttcggccacgccctcttcccgtcacgtgacggtgcgcggaggcggtggtggagttgcttcccctgctaggcgggctcgaaccgggcgggagtcactgtccaccttgcttcgccagggtgttatcgccagccagtccccttccgcatgcccaagggcagcctcaggaagcgagcccaccaccgtcggcccagcgcctgttgatcggcc

SEQ ID NO: 236532 - DNA, 84 bp, Homo sapiens; identical to SEQ ID NO: 203106
  chr12:76954040-76954124
  hyper

SEQ ID NO: 236533 - DNA, 341 bp, Homo sapiens; identical to SEQ ID NO: 203108
  chr12:77718709-77719050
  hyper

SEQ ID NO: 236534 - DNA, 434 bp, Homo sapiens
  chr12:77719312-77719746
  hyper
gtcctgggagtggcgggttcggatgggctggctgcggtgggccactttgggcatctcggcgtggcctgcgccggggtcacggggagggctgtcagcgccagggcggcggaacccgaggtctccagacgagtgagggagggatgcaggcttgggggtgatggagcgcttggctggtggctggtgagcgtccatacatcatagctctccttcccactcccccgcccctcttcgggattctctctttctctttccccgtcctcatttctttcttcctttactcaccactcgcttcattctcttccttccatttcctctttttttctcccctcatttcctttttttcctttcccttttaaagaaaggggaatcgtttgtaaccctttcgttctaccaacgtggaatagctgtgaaacctgcagcgtggtcacctcagc

SEQ ID NO: 236535 - DNA, 1914 bp, Homo sapiens
  chr12:79257342-79259256
  hyper
cgcccctagcctggcgcgcggtcccttcccccacccgctgagccttcctgttcggtatttcggtattaccaagctataaattgcctgagagcttagagacaatcaggtcaccaccgccctcacaagagaaaagcttcttacttccgagcagaacggttcagctgggaagagaggaagcagggagagaatctatgctttagtcgtcactgctctggcaaggggtcgagagagatgggggagggaggtggcaaaaaataaaaatgaaaaaataaaaaagcatctccaacaatgttgcacttgacccaagtgtacaaacttattggtcgctgcaatggaaactcccagtgcactctccacggcctggcagccgccgctgatgggtggagtcgcgctcccggccccacctatgggacggagctgcttctcccgcatctcggctccaccgcacccttcgcgggaagtccccaggcttccagcaaagctcagcttatcccgcccccgcttccaacccggaaccccagaagaacagcatgatgagcctccggcagccaggtgggccacctccccgcggctcagtttgaggacacttgtgcggaaccctttcacatccccaccctacccagctttcacaactccgccgggttaaatggccaaagacaaacttctacctctcctgtccccggtcccagcttttcaaaaacccacagctggcgaacccacacacatcgaaactcctaggtcgctgttgcagtctgggcatgctcagtatcagggtaggttttgattgagagtaaaaaaaaaaaaaaaaaagctttgtattatgctctctttctcctgtgcatactgcttgctgaacagcttgtggggcattcctgagtctacctagaggttttatcagacgcccttgattgtgtctccttgggatctgttcccctcttacttcaccccctcccccaacccgcctccaccccgcttcccaggtccctgtccgctgtggggatggagagacactaacagaactgggatgggcgatgttggctgaacggatccacctattattagtgcgcggggattggctccttggcgcagcgtacccgaggtggagccaatcaggatgctggggctcggagatgatgggcggccgcctcctcactggagggattcctggagaagctgcagtgtggggatgctctagaccgagtactgcccccagtgtctttccacctcctcctgcagcagcggcagcggcagcagcagttagcagcggcaacttgaggctgcaccccgggcaagtccccagggtggtgctcagccgagaggggggcttggcgccccgaaggggtgtgtgtagggtgggggcgaccacgtgggaccagctggtggccctggaaaacctcccacacacccacacccacacaccccttttgtgttgcaggctgcccctccaagagcggaggcagcgagagtacgcgtgtgcctcgcgccggtccacgcggggagagcactggggaccgagacccggcaccacctcccggtccgccctccaggtaaggaagcgggactggcggcgcggccacctcggcggtgcctatctgctcgaatccatcccaaagattttcttctcgatacacttgggttttagtggtgggagtctgagacctagggagggatccccgggtggcctattgtgagaaatatgagactacatgtgcatctcctggaaaagcactttgcacagcgcccgtgatttagagcctggagttgatgttgggcatcccccatcttcttgcttcctctttccttctcttgttctctctcctccgtcccccacccccaatctcaatcttttctctctttctctcccacacctcccctctcgccctcctcccaccctaagcacgcacagcgtttctt

SEQ ID NO: 236536 - DNA, 493 bp, Homo sapiens
  chr12:81102160-81102653
  hyper
tgacccaagaagaccgggtgcttgcaataggcaggaaatgcgtacccggcccgaggaagcaggaaagccgccccccaccccaccccaaccccggaaccgatgtttctttcctaatctgccgctgccttggttttccctccagcttgagggtgcggatttcctgcgcacctgcagctcccagtggccaagtgtttccgatcattccagggggctcgtgataacggctaaggaaggtaaagtaaaagggctctgggccgcaccagagaaaatccgggaggtggataggatgcttgggccgagagggctcgaagcgagagcagggacgcgccctgcgaaaagggcgctctttgcgcgccgggaccaggcctttcctcgctgccaaagcggcctcgcgcggggcgcggagctgcttcgtgttccttctttgggtgctatgtttgtgtgttgttttttcgctcaggaggagcaagtattgattcgtcagcctcgagta

SEQ ID NO: 236537 - DNA, 233 bp, Homo sapiens
  chr12:81330305-81330538
  hyper
catttccaaatggccgcccagggtcctaaatccggcggctgcggagagggactagagggtgtcctcctctgcagagccgtaggactcgagcgccttcatcactggacgctggagccaggaaggaaacccacacactcagggacaggtataaccccacaggggtgcaccagtgaggccccgatcgcagcggaggactccatccctgagcttgtgagggcgtcctggggaggaag

SEQ ID NO: 236538 - DNA, 662 bp, Homo sapiens
  chr12:81331198-81331860
  hyper
cctcggcggggcgagtacagtgggaaggggcagcgggaacgtagcggggagagaaaggggaagaaagtgttctgttctcggcgcgaacgccttcctggctcgtcctcgttccccttctcctcctgcctgagcgcgtcccatgtcccgttgggaattggcaggcggggaagggaggaggggagaggggacgcggtggcctggcgagcgagccgctcccttacctctgtccagggtgagcggctggaccactgtcaatgtcgccatgtctgccgtgggagccgaagtgacgctcggcttcagcatcagcaaccgctcgtagtgagaaaaaaaggaggagattgggggcgggggtggagagggaagacggaaaggagggggaggagggggaaggaaggaaggtggtggtggtggagaagaaagcttgggtgggttggtagccagatggagacgcaactgttccgcggcggcagatcttcagttgcggtgcggagctgagcaggtatccgagagcgactgcatcgccgggctctgggagggaaggctctgccctagaactttgctattccacccccaggagcgctgggtgggtgtagctggcgggttgcttcctttcaactttccactctaataaaatggtcagaatatacgtgtgtgcatgcggg

SEQ ID NO: 236539 - DNA, 894 bp, Homo sapiens
  chr12:81471297-81472191
  hyper
ggtcaggaaatcccggagcagtccttgccctggagctgcttgtgtttttagtaaccagggactgagctgattttgaaaaatcaatcaatcaataaataacaatcaaagagccttgcctcaacgcaccgagttgctggtttcctgcaggtcagaggcgatgccacctccaccaacgaccttccaaagattaaaccagccgtgtacaaactgctggattgaaaattgagagatgggccgttggcctcctcctaggagtacttgtgtgttgaaatcggaaggacgttctggagtttgagcgcgatttttcccggaaggctgcggggttggaagtgcatgttggggtttggatctcgtgcagcagcgcaactaacctgctgcaacggcgctgtgacacccctgtcccggggcccccactttagcctgttgcttctctggtcgctccaggtcggtttttcccggcgactctagtgtggcttccaaacttctgggctctgggctcacttcggaatttgcccccgccccctactcccttccctcaggccccaggaagttgcaagagtaccatttgtcgcacactcggggaccgcgggtggccggaggagatgaaaccgtcttggctgcagtgtcgtaaagtcaccagcgccggggggctcggagggcccttgcctgggtcctctccggcccggggagccggtgcggccctcagggctttagtggtcccgggcccgcggggcggtctcgggggccggggatgcagggcactgtcctccggcagtggcagcgagtacaagacccacttcgcagcctcggtgaccgaccccgagaggttctggggcaaagctgccgagcagatcagctggtacaagccctggaccaaaacgctggagaacaaac

SEQ ID NO: 236540 - DNA, 1264 bp, Homo sapiens
  chr12:82152215-82153479
  hyper
gatcaatgacaaccgcagtctccggcttgaggagaagggaggctcacacccagcactcctggaccatttccctagcaacgggaggagaaaggcagctcagacacacgcgtgccccggcgccctcccggaacgtgccccggcccggtggcgtggcaggagctcggcatcttcccgtggctccgtcagcagccaaaaggagaagcgtccatcggaaaaatggcatattacaaattttgctttgggaagcaaagctcggttcagaccattgtcaaaggaggagagggggaggcggctcttaaagcagccgcggcccctttgccagaacagccgcagctccccgcgtgcagctggagccccggggcggagaccggagaccggggactgggtttgactttcagaaacttaaccacgcggcgccgctccccctccgcgcccgggccacccggggtgtgtggggcgtccctccaaaagaaagcttggagaaaaggcgtgagaagtatctgggagagaagttctccacccagtctcccctcctggagcccctctggagtttaaggctaaccctgggagttagaaacctaaaggaaaacgagtccctagggatgcaaaaagcaggacaggtctcctcctggcccccagcctgtttccgcgcgctcccgtgtctcgtttcacttaaaggaggcgctttttctctggaaaggcaaacatcaccccacgccgtcccccggccccccttccctcccccccgccgcccccccgccgccacagcacacacacccatttttctcctcccggcctttctgcaagcctctttgcttgcttcaattggccggaagaaccaacctgctggcagccggtgaggacgctacagcatcttctctcctcacttgcctcgtgcggtggctgctactcctcctcctccgtctcctcccctcctcctccttggcagccaccacctcctcttcctctggaacaagggcttcccctggaagctgctgcagtggtttccaccggcccttaaataaattctgaagtaatcacgtctttgctctcctcctcacgcacacgcgcccgcggatacactcgtctcccccagagccgctcccgggctgccgaggctcgctctgctcccagtgccccctgcgaaggcgagggccagggatgggcaaagtgggaagggggcacacgcttccccgcctgggcttctttcacacaatgggctctacagccttcgcttgtgtcagcctgcgctggtggggatggg

SEQ ID NO: 236541 - DNA, 148 bp, Homo sapiens
  chr12:83080816-83080964
  hyper
ggcggccggagtccgcccgagcgacaccggagcagtgcgcccgggaggcggcgaggggaggcggttcgccttgtccctcccacccgcgcctctttctctctcttcctccagctggtcccagagcccggcttggtccggtccctctgcc

SEQ ID NO: 236542 - DNA, 80 bp, Homo sapiens
  chr12:83081324-83081404
  hyper
cctcgcgctgggagccgagccggagggaaggcggtggagagatgattgcagagttggtgagcagcgctctggggctcgcc

SEQ ID NO: 236543 - DNA, 1485 bp, Homo sapiens
  chr12:85305073-85306558
  hyper
ttaagtagtgaaccgcaaggatggtgcagactaagattgggtctacctataagatctggaggggaaaacggcaagaccagaagaaaccgtcgcagacttatttgcataagcacccaaacactgcttacgtcactgcgccggagtccggaccccgccccgtcttactccagcctttcccagctagggaggaggatggaaagggaaagcgggacgctggagagcgcgagcctgggggctttgcttcctaaaacgcacatcaaaggctgcttctcagctcaggaaaaataattcccgttcccgcagcctgtgccactgggtgggtcatgcctgttcccgaacgcctcgggcgtcttgattcattcttatgtatccagttggtgcgctacgttagagtgcaaggatttccctgtactcaataccgtcttcttcccagtcacacacagaccagcctagtgaaagaaaggtagaaacgatctgggtttctaactgcttcccatcttcttacagtcccagcagcaccaccctcaccgccacactctcaaattccaggatgcgcagaaacacaggagccgtgatttctccagcagccacgtgcctttcgtacggcgaaaggccccctttcgggccatttatcacaggatacctcaagcaaaggggaactgtggtcacgtgaaaacactctgtcctcggtagtcgccttctgcctttgctaaagcgaacggaagcgaatgaggaataaagctctctgctctccccgccccatcgcccacctgcacgaggtttagcttccaattcacctcgcgtctctctctgccccaaccctcccaactttcctcttggactttcccgtgttggaccccacccttcaaccaaccccgacttggcttggaaacgagtaggtctctggggatgctgtgggcaatttccacgacgggaagaaaggatggcggcacgtttcaacccatgtgcttccccttacatgtgcagcctgtcgccccccaccctgattgtacagagatgcagagttagacggttgcccgcccagcccagcttctccctcccagggcttttgagctgccctccctcctcccaccccaggacgcagcgagtccttcccggcatccatccatcaattcgttcccggtgctggtgcccaggctcctgggtggctaatggcgagccccacctcacccccagttgtgcccttagcgtaggcgcttgccattaccgtcagtgtgtcttgaccaagcgcctcttgctgcttccacgtccgggcagcagcagcagcagtcgcgaaagggtagggtccaggtggctgtgacggaggccgaagaggagctgttggcagagaagcagcttcttgcctaggttgggacccggagctgggttttgggggtcgccgccctgcaggctggcaaggagagactcgtgagcgcctgtgtgtctgccagggaaacagcacgggatacaggcgcgcgggtgcgg

SEQ ID NO: 236544 - DNA, 345 bp, Homo sapiens
  chr12:85306618-85306963
  hyper
gacggaggcgcccacgtgctcggcccgcccgtgttacggccgcctaccggctgcagaggagaagggtaggctgtgggcggcggcggggcgcggaggggtagccaggagcgcaggctgggctccgcacctccctgccccaaaacccattgatgcagcggccactgcggctgccgagcggcgtcttcccagagcccggggctgtgcccgcccgatgcaggatgcaactgaggaagcccgctccaaagcaaaacaaaacaaattcctccagccatgccgtctttctccaacccactcaagcgaaagaatggacaccagttaccagccgctgacttttgtctcagtgag

SEQ ID NO: 236545 - DNA, 340 bp, Homo sapiens
  chr12:85430011-85430351
  hyper
ccctgaaatgctgcgttcgtttcaatttagaatcgagattgtttgtccttctagagcacctgtagggaaaaaccggtgtctcttccttgtgattggctgttgccatggatacgctttgtgtagcggctatgggcgctgtcttacaacaaagccaaggaatctcgctgctgaggggtgagccggggtcttaagactgggattcccgttgagggaggtgaacagctgtgggagctcaggccgagccgggactctctctgcctggccagacttccagcaaagggagagaccgcgggtcaggggatggctgtgcgactctgcgaagctcgaggctcccttccac

SEQ ID NO: 236546 - DNA, 535 bp, Homo sapiens
  chr12:85667227-85667762
  hyper
gtttccatgagaagcgaaacttcattctctttgctcagaatagagactcctccacctatgcgcgtttaaccacagagttgttcttgattgtaagggacttcgcccacttggttgaagtggagagccggtcctcattccagacgtcccgcacggcagtcgctcatggctccctccaggccgggagccaggaaggtggtccttcaccgaggtgcgcaccaagcggcggtccacccaggcaatggggtgcaccaatttgcctccaaaaatttgctgcgcacacaacctgttcacagttcctgatcagaaagggctaacgagatgtctgtctacagctgtctctgggcgagggcgcaggctttgggaagtggttcagcgcgatcggggacaccgcttgcagcccttggtcctgcacccctaggaggggtgtcccacaagctcggcttcccttttgcgagccacagagagctttttgttccgaaactctcattacgacagatagtatttaaaactcatcaaaattcgcttcagaaatctg

SEQ ID NO: 236547 - DNA, 169 bp, Homo sapiens
  chr12:85668062-85668231
  hyper
ataaaaggtatcaatgggcacggaaggggcacagtaggtggagaacttacgggaggccaatctacttcactccttcgactctctttgattttgtatattggctatactctggtcgggtttgattaatgaccacggacttcacatttacgttgcataattccagtccaaa

SEQ ID NO: 236548 - DNA, 1787 bp, Homo sapiens
  chr12:85673206-85674993
  hyper
tctctcccacccatcgccaccgcgtccacactccgccgcattccagagaaaaagaaaaggccacggcctcgtaaagctcccagctggcccggaccccgagctcctcccggttagaagccgaagcggcccctctactacggcggctgcgattaacagttgccaatgcatctggttccttgggcttcggattaatgtgaatcttccacgtaaacgatttacggatgaaataaaagccttttagagcaatatttcctttcaagttcttaagacgcctctaaatctttctggtagtgagtggccggcatgggggcggggtggggacgggtggctcaggaaggcgcaggcagtagggagtggaggtttaactgctttgcgatctcaccaagatcttccgaaatgccagtccactgtcacggcggcaatgaatctgggtgtcaggggctcgtctctcctggcatttgtctgaaatggagctgtctgtctgtctatcctaggcctggacgccctctgcccgggtaagtggggaaaatgggggtggggtaggggcggagggggacctggggtggagttagtcgcccgcctattttcatattcattagaactgggaggctgcccgaggaggccagctgagtttcaagatataaaagcaacttcgggtgctccttttccagccgggacgtattaaagggaccggagcggggcagttcccgacgccgcagcgctcgctttcccttccctcctctctggccctccctcctcccacccactggctccctcccccagcgctctccagtttctgtgccccaggagctacgcgacagtcttccaggattatggagtttctgagcgagaagtttgccctcaagagccctccgagtaaaaacagtgacttttacatgggcgcaggaggtcctctggagcacgttatggagacgctggacaatgagtccttttacagcaaagcgtctgcaggcaaatgcgtgcaggccttcggacccctgccccgcgccgagcatcacgtgcgcttggagaggacctcgccctgtcaggacagcagcggtgagtcgctagcgccccagccggagccgccgcagcccttccgcaatcgaaaatgcaggatcggtctgatcaggcagggagggagaaaggagaaaagtgggagcgagggacctggaaggtggaggaaggtagtggaaggtgctcgctttatgaagcggtgttactgctgctgcagcctttgggggcggagggcggagggagggagagatccagcaccgggttgcctctgagcgattctcctttcgctgtagggtctggtcgcctacggatccctgagtccttctgtaatattggttcctggagtaaactgatagggcgctaaatagagcgtaattgagtcaagacagaacgcttcctctgcgagcccgccttgcagtccgggcggtaggaactgaaatcgatcacagctcgttagagtacgtcactgtcgtcacgagtagggaaaaaaaaaccggaaaacaaaaacaaaaaacaaaaaaccctttgagctcctttaggtaaagataaatctttttaattttccaagacgtggcgatatattttcaaagtttgaggatccctagatttctagcgtgtgtgaatttgtaatttctgcttttttttgcgtttgcaatacaacacgcgttgaatgtttgttaaacactaaagcacactaaatagcttcgggcaaaccatccccggcctaatcactcattcccagattctacgttttgtatttttatgacttc

SEQ ID NO: 236549 - DNA, 57 bp, Homo sapiens
  chr12:88429153-88429210
  hyper
cgagggtggggggcggaggacgcacgtgggaacccaccaggcgcctcagcttctgca

SEQ ID NO: 236550 - DNA, 1344 bp, Homo sapiens
  chr12:88973384-88974728
  hyper
atggaaaaaggtgcgtgcattgtggaggtactagagctctttagagcccacacagagctgcaaactaggcagacaccgccgagagccaagtttcccgggcaggcgggcaggttcccgccccgccgagagctgccgcttaggagttccgcgttggcttcgctcccgcggctgcacccgcgttcgcgccgctcctggtgcccggcgcccacctcggggctacacaaataaatctgagtgagagagctagtgagggtggcgcgtggggtgctgtttcataatctcctggaatccacgggaaaaccgtctcctatgcaaagacatgccttcccgtgataacttaacattccatggcccaaaagccaatctttccaccagacgggaattacggtttccgactgacagctcaaaacttaactgctgaggctccaaacttgacactggctccctctcagcactcccactccttttctccctggctcacccggctcggctcgggatcacacaccacgccggcctcccccgcatcctcttgtctcacccggcaggcacagccctgcacgccccagctgcaagtcccagggagcgccggcttccccggggcaccgggcgcgatttttcctggagagcctgggagctcccgggcgcgccctactcacttgtgtcttcttcataaggaaaggcagcgctgcgatccagcacaaacagtggtgtggcgactccgtttagctgttctggagctccagcatattgcacgaacagcggcggcagatagtccacgcattgggtagcccgagcgcagcgccctctccactgtccctgcttcccgcagcgcttctagtctcggcgcgaggcggcgagcgaagcccggctgctgagccgccggcgcttttatacagttcccgcccgcctgctccggacacgcctccttcccttccggagcccggggtaggcgagaagcaggcaagggcgcggagggaagaatcgggagggcggccagagcacggtaaatgccccagaagtttggcagattaggccaaccttgtccgctcgcctgggggccccggacctgcactggcgggagaccgcgaaggcgcggggacgcagagggcgaagcttggtaccctgcagctactgctcgcgaggagtcccagcttaccctcccggatccgctggggctcacctggcacccccggggacagacgaaatacctcgcgcgccagagagggctcggagctccctctgttatacaaagtcggagagggagaggagtccgggaggttcggagcaaagaattcaccctgcctgccttagagaaataaagtttaattgcgatctgtagttagg

SEQ ID NO: 236551 - DNA, 350 bp, Homo sapiens
  chr12:89744647-89744997
  hyper
gtcaaggtcagactcgatgtccgaggaagagtcagagctgatccgcaggcccccgagccccagcactggcaacggcggcgagctgctgctacacgagccgtctagattggtctcgcaatgcagggagaactcggcttggaacttactgaagccacctgccagaacgagaaaagcaatcatctaacctgagaagccgtagtagttttcacagcttgtaagaaccgcagcccggcgcaagaaacaccacaagcatcctacgaaccccctacatacagaaccatctataagagaaacacactttaaatgtgcaccatcgggaatggaacgaacgggcccgcctcgccagggaa

SEQ ID NO: 236552 - DNA, 276 bp, Homo sapiens
  chr12:89746244-89746520
  hyper
cacaccccctgcgcgaggcagctcctcaatggatacaaacagcgagcgtctcaatggatacattctccgggccagccaatgagcgtgctgcggaaggggctgttgccgtggggacgggccggctggaacaggttgtgttgatgaattgttaatgagtttgtcattcacaaaaacggaaaggaatttccgctccggataagccccagtgcaaacaagctgcaacagcgggctcggcgggaggaaggagaaagaaggggaggcggcagcggaggagga

SEQ ID NO: 236553 - DNA, 75 bp, Homo sapiens
  chr12:89747180-89747255
  hyper
ttaatgatttctgggcaaggagctcggcttctgacgggggagccggtctggcggggctgcctgagcgaggtgtgc

SEQ ID NO: 236554 - DNA, 237 bp, Homo sapiens
  chr12:89919819-89920056
  hyper
cagtcaaaccccgcgctccaggcatggccagccgagccccgagacaccgccagccctgtaaagagaggacgggaggtatgcgccgggtcagctgtggccacacaccaagccatgttaactaacactcgcgttctccctggtttgatgtcaggaagtggggtagtaaccaggactggaataagagcgatgaatggaagggcgttgtgagcctgtgatcgatgcgatcagagttctatt

SEQ ID NO: 236555 - DNA, 421 bp, Homo sapiens; identical to SEQ ID NO: 203129
  chr12:90101338-90101759
  hyper

SEQ ID NO: 236556 - DNA, 140 bp, Homo sapiens
  chr12:91502983-91503123
  hyper
ttagattgcgtacacgtgcgcccccttctgggcgagcccagcctaattgttccagtcaatctccaggctcttccttaatgaaatgccttcctgtaagaggtttctgggtggtgttcattgaccaccgaattagactactg

SEQ ID NO: 236557 - DNA, 199 bp, Homo sapiens
  chr12:91775643-91775842
  hyper
aaacaaaaaactaacgaaaagccatcaaaggcgttgtatcttgactatgcccaaatttgttattatgcttatttgatgatgaataaaaagcaattcttccacggttcccttaaatctcacaaagagaaaacaaatgtatgtgtagtagatagtaggtagtaaagctcccgaaactttgggctttcgtttttgggcacca

SEQ ID NO: 236558 - DNA, 35 bp, Homo sapiens
  chr12:93323253-93323288
  hyper
acaggcggcaggacgctgtcgccgcagcttcttcc

SEQ ID NO: 236559 - DNA, 255 bp, Homo sapiens
  chr12:93835925-93836180
  hyper
acttgggacaggccgcgaggggaggcgcggggctctggcgctcgtggccgagcctgcccgcgacggtggtacggcacgacccgcgcgcgactgcgcgcgcgtctctcttaaccgtggccacgcccgcgccggtggacgacgtaacagaggcctggcctacgacgtatcccattcattcattcacgcgttcgttctttcagctcacgcgttcgttctttcagctcagcctgcattgcgcgcgttccctgctggctc

SEQ ID NO: 236560 - DNA, 201 bp, Homo sapiens
  chr12:93964217-93964418
  hyper
gggacgagcacggcgtccccacgccatcgatgtgtcttagagccggagagtctggtttccgaggacccacagtcgctcctgcacgcccaccccccgcaaaagtgcggccaggagggtcgcatcgagggggcgccgccgggatgtttagaggaacccacccccgtggcaggccaagggccaaggatcgctatccttccctga

SEQ ID NO: 236561 - DNA, 911 bp, Homo sapiens
  chr12:93966428-93967339
  hyper
gactgacccaacctcccgctttctctttgtaggcgatcagtgggtgaccgcggctgcgagggactttgtcatccgtcctccaggatctggggagaaagagccccatcccttctctctctgccaccatttcggacaccccgcagggactcgttttgggattcgcactgacttcaaggaaggacgcgaacccttctctgaccccagctcgggcggccacctgtctttgccgcggtgacccttctctcatgaccctgcggtgccttgagccctccgggaatggcggggaagggacgcggagccagtgggggaccgcggggtcggcggaggagccatccccgcaggcggcgcgtctggcgaaggccctgcgggagctcggtcagacaggtagggagccgatcggccgcgacgcgtgcgggagggagcgcctccccaaggaagcagctaggaagcggggtcgaggtgggaagcaaagaataagatggaaatacgtcccttgcttccaagggaccgcggagagcacgctcgcagggtcctgggtccttgggaatgcgtaaggaaagtggttctccagggactcaggcctggcggagcgcagagcgcgggaagagcttcttggaaatagcttcttagcacgctggaagatttactgttttccgcagctgctcagggttaggctcccgggctcgaaccccggccggggaaagcgtcgggcgcctccctttgcacggggtgcaatcagcaagtcggtgccgcgggccccgcaggcccagcagcatctggctcccgggcggagctgcggctgcagcccaggatcttggcggccaagttcagggactgacactgccgcgagggcggctgcccgggcgtcgagagtaggctgcgaagcccccgccgagcgcggcttccatggt

SEQ ID NO: 236562 - DNA, 63 bp, Homo sapiens
  chr12:93985156-93985219
  hyper
gagaatgaacaagatgggagcgaggagaaagcgtgtgtgcgttcgtgtgtggctgtctgtctg

SEQ ID NO: 236563 - DNA, 327 bp, Homo sapiens
  chr12:94542234-94542561
  hyper
tcaccgaatcaagaggggaggggagatgggcgtggagggagggcgggcgggcgggcaggaggcggagggcggaggaggaagagaggatgaggaagggggccagttgcatcccactttcacaatgggaaagtgaaacgcacaagcgcacccaacctctccagccctccccgcccgcctcgctcctctccgcccgtcccctcccttcccctccgcgcctccccgcgagcgccagcgctgcacacaggaactctccggcgaaggagggcgaggaggaaacggtgccggagcgcgcagggcttgctgccgccaccgccgctgcacaggctg

SEQ ID NO: 236564 - DNA, 137 bp, Homo sapiens
  chr12:94853872-94854009
  hyper
cggggccgggctgcgctcccgaaggcgttcctggagggccctgggatggactcagagatccccagagccccaggggacggaaaatctagccccgggcacttgccttggagtctgagtgatgcgcgtcgttggagcgc

SEQ ID NO: 236565 - DNA, 1115 bp, Homo sapiens
  chr12:95266893-95268008
  hyper
caggagctgcgcgccgtcggcgggccgtgcctggaggaggctcgcgccttccaaatgccggagtgcaggcatccttcctctccccaaccccagccccggcctcgacctgtcgcccacctggcccggacctggggctggctccgtctctggggtgtgcgccaagggagccccaccgacgcccagcagagctgcccgggctcccaaagaaggaccggggctttgggcagaattctggcagccaggcgggcgtcaggggagccggagaaggggctcgccagcaggcgtggggcggagtgccgggcgcagcccacctcgcaagcgcgggcccagggctccgacgtgccagcgcagccccgaagagtgcgggcccggggtccccgcggcgccccttcccctcctcagtcccccgggggcgaccgcgctccccgccgaggtccgtccccgccgcaccctcactattcccgctgggaggaccccggcgcacgcccccgcccccgcaccccggggcgacggcgcactcaccctccgcatggtgtctgggccgtccgggcggggctcggcgacttgggcgcgagaagggctgggccggcggcgacgctcggccggccgggagctccgcgctgccccctcctgcacacgcctgcgccgcggccgccaagccggcgggggcggggcggggtagcgctggccgcggggtccccggggctctcccgggctgcggcggaggcgcggagccggccaagggcgcactgagctcgcggagctccggggccccggggcctttctgccgccgtcgcagcgtccccgcctcctcgggccgcttcgcccctctcctcttcctcgagttctggccccaccaggagcggagcgagtctccgatgcctgccccgcggcccccagaactgagctggagaagctttggggtgaaagctgggcccaccctacagggaccccaagtttgcggagcaagagtggattggcggagagcgcagatggcaattctcacccgccttaaaagtaccaccttaaaattctccccatgggatgggaaggtggcccgctaatgtccgttcctactcttcgttttctttttaatttttcagacagggtctcgc

SEQ ID NO: 236566 - DNA, 153 bp, Homo sapiens; identical to SEQ ID NO: 203136
  chr12:95397472-95397625
  hyper

SEQ ID NO: 236567 - DNA, 31 bp, Homo sapiens
  chr12:95467508-95467539
  hyper
cccgccagagctacgcgttcccagccaggta

SEQ ID NO: 236568 - DNA, 51 bp, Homo sapiens
  chr12:95867761-95867812
  hyper
cggggctccaagccgagactcctgcacgcccggcccgaagctagcccgaca

SEQ ID NO: 236569 - DNA, 1140 bp, Homo sapiens
  chr12:95941838-95942978
  hyper
catatggcattctttcccatcgaaggccatcgggaatggctttaggaagctgattttcaagctttaagcggcagcaggtgccggcagcgcggggaccgatcgatggagagaaggcgggcaagacgccgggaagcgcattcctcctcaaccgagtgccacaaccgccctcccgaagtgccccggggcttcgagcatcacctcgcggtaatccgggagggtggagggatgcggctggacccgggcgttgcgtgctccacacagcgcccagcccgtgccagccccgcgcccacctctccacgacgctcgtgccgggatcagcgcgaagccccttccagtccccgaagccctcgcccgcgcccgttctcccccagctcgccccctccagcccgctgcgccttgccgcagcatctccgggcactctgaggctgccgccgggacagggtcggagcgccgcagaacccaccgaaacttcccaggggggcaattcaaaattcgccggacgcgtcgccgccgcgcgcccctcggctcattcccttccgcgcgcccgcagccccaggctctccctctctcaggaccccccagcgccctgcgcggcgagaataggcccccaggtgcctcccggccccgggggctgccgtcgcacgtccgctcccgcaggggtcctcactccgccaatcgccgcggccgcgcgccctcgcgcacactcaccagcccgagccggggcggccatcttagcgctcaccccggccccccgccccccggttcggcggccgcgacgacccggtgcggcggctacgacagccgtgacgcgcagcaggccccgccccctcccacagccccacccctgcgccggctcttcgcgggcaccgagaacctgccggtggccgccttccgcgcctcgtgggggggtcggggccacggacggtccccggcgccgcaagtgggtctgcgcgaacaacaagcactgcctccccgggcgggcttcgcacctgtagtgccgtcgggacacgggagggtaaacccagcgtgtcctgtgtgcctgtgagccgcagaatcatccacggacgtcgttagtccttcctggaatttctgcgatttacacaacgtcgaattgtttggcagaaacgcgtggcaaactcc

SEQ ID NO: 236570 - DNA, 88 bp, Homo sapiens; identical to SEQ ID NO: 203137
  chr12:96183452-96183540
  hyper

SEQ ID NO: 236571 - DNA, 52 bp, Homo sapiens
  chr12:96184965-96185017
  hyper
gcgaaacaggctagcgcctacttcccacatcccccagcgaaacaagccctcc

SEQ ID NO: 236572 - DNA, 143 bp, Homo sapiens
  chr12:96185197-96185340
  hyper
cgaaggtgtgcccactttggtgtaagaggtattgcctaactcaaactcaaggtgctgaaagaaaagggtcacaggattagctagtcggcagtgtaagaacatcgttgtccagaggcagggcaagggcacgacaaagggaactc

SEQ ID NO: 236573 - DNA, 122 bp, Homo sapiens; identical to SEQ ID NO: 203141
  chr12:96252231-96252353
  hyper

SEQ ID NO: 236574 - DNA, 191 bp, Homo sapiens
  chr12:96252588-96252779
  hyper
gccgcctgcaaggcgcaaacccaagccgctgctggttgctaggagatactgggccagccatctcctccaatcagcacgcacctctttgcgtccaatcacagaggcaggaagggccgtggtgggaggtgaaaggtcatagtcctgtttggcggccatttctcttgaaactgcggctcgggacctgcggtacc

SEQ ID NO: 236575 - DNA, 114 bp, Homo sapiens; identical to SEQ ID NO: 203142
  chr12:96336966-96337080
  hyper

SEQ ID NO: 236576 - DNA, 97 bp, Homo sapiens
  chr12:96794233-96794330
  hyper
ccccggaggagagcgagtgcaagagaaaaaacacttttattgaaacgatccaaccagcggcggcggagaaaagcgaccggccgcgggagcttacccc

SEQ ID NO: 236577 - DNA, 661 bp, Homo sapiens
  chr12:96883069-96883730
  hyper
ggtcgtcatcattatcgttattaagtggccaacatggataaagagtatagtctggatttgtgaccttaaatttttggctctaatattcgccagcgctctgctcagaacattctctgttcgcatttcatacagcggtgccagcgcacaaccaggcaacgccctcaggagcatcattgttttctggacctggttctttctcgctctgccctccaggggccgctgtgtttctcggaatgcgcgcgggatgcccggttgccacgagaccgtcgccaggcaaccgcgtgtacacatactccaggcgggccggggcgcgtcaatatggcggcgcagggctccccctcgagctctccgtcagacgactctaccacctcggggtctctgccagaactgccgccgacctccaccgcgacttcgaggtcgcccccagagtcgaaggggagctcccggagctcgctgcttcagtggacctgccccgaggactcattgcccctagccgtgttttatgggccgctggacgcgaaaaacccgctcctggcctcttgtgagaaggagatccaggagttgttaggctttatgaggaaaaagaaggctttagccaccacggaggaagagaagcacgaattccgccggcgttggtaagcgctggcggggcactggggag

SEQ ID NO: 236578 - DNA, 79 bp, Homo sapiens
  chr12:97300789-97300868
  hyper
agttggcagtggccggagctccgtcgctggggcgtggagagggccgccccggcccgcagttcccgccctgacactggga

SEQ ID NO: 236579 - DNA, 390 bp, Homo sapiens
  chr12:97379542-97379932
  hyper
gggctaaccacgtcggccccaaactagctgcctgtctttaaatgtttgctttcatatttggaagtgctgagcgggcacttcagtgcgacctggatatcacctgtgggtttcagggcagtcatccttgagacctcttgttcctcgggagacctcttggcctctttaaggagccaggggtcggcggcgcacttaggggagaaggagcaggagaacttgagttaagaattgccccccggattggaaccagaggtagcgggaagccagcaagggcgaggctctttctaggaactctaggtccaccgcttgcctttggggaagagggaggaaggggccttggggcgtgaagttgcctttgggacatcagccagagcctgcgacgcaagcgcggcc

SEQ ID NO: 236580 - DNA, 113 bp, Homo sapiens
  chr12:98897819-98897932
  hyper
agccccgttctcccgcttccgctggttacgtcccagccttggttagaggactagcagtcaggaaagtttggacgctgaaggaatcggtctcctggtccgacagatactgggtg

SEQ ID NO: 236581 - DNA, 103 bp, Homo sapiens
  chr12:98987129-98987232
  hyper
cacttaagtgaagcgaactgaagcccgtggtcaaggagagacacctgaaggtgaagggacaaagcgagcagggtaagagctcgagcccgacccctctcaaaaa

SEQ ID NO: 236582 - DNA, 39 bp, Homo sapiens
  chr12:99037822-99037861
  hyper
gacctcaagtgatccacctgcctcggtctccaaacataa

SEQ ID NO: 236583 - DNA, 84 bp, Homo sapiens
  chr12:99038221-99038305
  hyper
ctggatgttgagccgggtgggagcccaaacagcagggggcccacaggaggccggcccaggcagcctcgcgtccacttaccaggc

SEQ ID NO: 236584 - DNA, 33 bp, Homo sapiens
  chr12:99038997-99039030
  hyper
ttatttgcataagcgggcgcgcgccgtccgggc

SEQ ID NO: 236585 - DNA, 370 bp, Homo sapiens
  chr12:99139511-99139881
  hyper
gagtatcagaaaatcgtggtttcatacttggtattaatgcccctcttggcttcttggcccggctccacaatccacggtagattggccagagtcttttgctcagatgggtcgatctgctttaaaacagaaaggctgatgcctgttatacggtcgccgcgcgggtgcgcgcatgcacgcggacgccgctggcgaacccacgcgaggcccctcgccccaggcgcggggcggcgatgctggtctaggcggctcgcgggctcgctctttggacacacatttaccgcataccgactctctgcagggcaccctgagggtgacggtgaataaggcacagcccttgcccttgtgagcacacagacggggagcagacaga

SEQ ID NO: 236586 - DNA, 774 bp, Homo sapiens
  chr12:99287418-99288192
  hyper
tcaagcaattccaaagttcccgtgtctctaatctactgatccaacgtgcccggcgcacataagcagcaccgcgactgaatttcaagtcttctcaaactcacacctcagttgctcagagaggagaaatgcagcgaggactcgccttcctggccagtctctgaaaacgcgaaaccttcctgagctgtccatttgttttaggggctgtttataaacggctggttttcttggaggaaaaataaacaaataaatacggggcgatggcagcatcctgataaacacaggaccttgtttggcttttggcaagttgtaacctggagtaaaatcacatccaagttacaagcacgcaaattggaatttcgctggaaacactgacccgaccttcaccgaagcagcaaatcgcagtctctgctgctctgctcctgctctccaaggcttaacattggaaagtccatgcccacgtccccctctaattaatcaatgtagaaagaaatacgagggaagagagagggagcacactccacaccaaccttgccagcttctattcttcctgctattccttaaaggcgatgcacagcgcacctggaaattacgtggacttggcatggctttttaatattaaagacaaacgacctttggaaaatatacactgttaaagtcaaaccatttggagagacacccagcaatttacctcctcaaactcctcggaaccccaagaatgaggaaaggaaatggaaaatgcgcttaacccgggggtggtgggggaatcgataacca

SEQ ID NO: 236587 - DNA, 242 bp, Homo sapiens
  chr12:99289272-99289514
  hyper
ctgtctgccccagaggccacctcgggtttcttctcactaaccaagcgacttcgtgtttacctcgcaggagacgcctcggcagtcctcaacttgtgtgcgccggtggccctctcctgtgggacttgcgttccagctgttctcagagcgggtatgatcggcctccagtagacttggagggtcacgggtgagattttgataaggttcaaatactcctcactcctgcctccggtttccaccaaagt

SEQ ID NO: 236588 - DNA, 189 bp, Homo sapiens
  chr12:100594720-100594909
  hyper
gacaagatatatacgcctagtggtttcatgtgctacgtttcatctccggacatcaatgaactgcagacacccccgcgcggccctgacttagccagagggattccctggttggagctgggtgggtgattgtgatgctttgaattgaaattgattttggttttagttttgggctgcgaggccccggaagtg

SEQ ID NO: 236589 - DNA, 63 bp, Homo sapiens
  chr12:100660779-100660842
  hyper
actgacaagtctacggaacctcggagtcaaaagaaccgccataagctcgcgcgctggctcctc

SEQ ID NO: 236590 - DNA, 651 bp, Homo sapiens; identical to SEQ ID NO: 203145
  chr12:100967341-100967992
  hyper

SEQ ID NO: 236591 - DNA, 801 bp, Homo sapiens
  chr12:101110903-101111704
  hyper
tggcgtgaacccaccggggatcccgcccgacgccggctgcgctgggccaaatccgcggcgcgcctctgccgggcacctcccacctccagcttcgcccctcccctctcccggccgcgcgtcctccgcggctggttcaatccccgcggggacccggagcgcggctgccggtctacgccctctctcctgccgctctcgcggcgcagcccggccgggggcccccgcgcgccggcagctctaggggcgagcgcggcgcgctgactgggcgtgctcagccgcggagcgcccgggcgccgctagagccaagcgcatgcactcgccgggccgggccgtccaggggcgcagcgcgcagggggccgctctagccgacgccctggccagtctgggcaggacgcgggccaggatggcctccctcaccgcatacggtaactggggccgtcgcgggttcctggggcggcggggcggaagggaggggcccagggagccgtcgaaacacccggggaaacttcggggttcgcctctgcggaggggtctggaagggagggagacggcggccgtgcgcgccgctcctgaggggccgatgttccgcggggtttcgggccgcgggtaacccgggaaccgggtgtctgcgggaaaaacgcttcaaaatttgggaggatctgggagcttcgggactctagaaacattcccctcgcttccgaccactcaggggaagggacgcgggtgttaagtcctcctctagcggggtgaggcttggagttgggagatgtgcgttcagccagcgcttatcttgtccctgactga

SEQ ID NO: 236592 - DNA, 117 bp, Homo sapiens
  chr12:101673658-101673775
  hyper
cacgatgcaggtacgtagtgagggacagtaatgttagttgataacgattacaggtatgttttattttataatgaaaatacatttgtcttctaaacctttaccgaagggagtgaaaag

SEQ ID NO: 236593 - DNA, 254 bp, Homo sapiens
  chr12:101673990-101674244
  hyper
ccctccttactgtcggttgcatcccttcgacactcccgaggccgtcgcgggccactggccctctgcagccatgaagacaaagcccgtttcccacaagaccgagaacacctaccgggtgagcgcgggagcttaggcagggagccgcgggtctccgctgcctcagtcgtgagacaggctctgagcgagactccaggggcctcagacttctgggccgagtgtgtcactttcctggaggctccggcgaaagagggaga

SEQ ID NO: 236594 - DNA, 603 bp, Homo sapiens; identical to SEQ ID NO: 203146
  chr12:102455400-102456003
  hyper

SEQ ID NO: 236595 - DNA, 138 bp, Homo sapiens
  chr12:102878315-102878453
  hyper
agaacttgaggactcgtcacgcttgccccacgttgcataaaatgtggggaaaagagacaccaacgccaaacttcaggggcaggacccacataaatgctttcttggggaataaaaaaatgtgcgcgccctctagtggac

SEQ ID NO: 236596 - DNA, 170 bp, Homo sapiens; identical to SEQ ID NO: 8983
  chr12:103218426-103218596
  hyper

SEQ ID NO: 236597 - DNA, 572 bp, Homo sapiens
  chr12:103311039-103311611
  hyper
gcgtggtgcatctccgcacagtaacgcccctcgtgggcgttgtcctgacgcaggaggccagggcagcctgccggatgctccaggtcacctgcccaggacgggccggaggggaggggctgagggagggtgtgggggacgcaggaggcaccacttcgctgcccgccctgggtaaagggaagaagccagggagcgacgggccacccaagccccgtcgattagacaggtttaggcacttccgggactctcagaagcctgggaagcgagttctctgcaattggactaagcctgcgaccgtctggtataacaattatatgaataatccgccccccttacccccagctgaaacagtcaggattctcatttagatttttgttgttgttgttttcccttctgttaacctctaagcacactgccttgctgtgcgctgacttcagaaaactacagctagagggcacgtgaacgctgagcacagcaggtaaagagcaaatgtaagagcgatctgggtttaaatccagcctggtgttctccagctattcgcacaactgctcctgaagctcggaaaagagggtggt

SEQ ID NO: 236598 - DNA, 337 bp, Homo sapiens
  chr12:103344363-103344700
  hyper
gacctcagtcacttcggtaaactgcccttgctttccggaggcggcaggaacgtttcaggagctccaaggctctaggcgcctgcattcctcgccccagccggtagtctcctagccctgttgaacgcaagagcatccaagggcgcgcaagtccccaagagctctcagaggttcctgaccctgagcgttaaagcccttcctcgcggatgagacccttggtgcgttccacccgcttgggggctgagactcgccaggacgcactcagaatgaactttccgcgcaggtcagatataggcacccaggggttttgtgacgtcacaatgccgtctgacccggtgaa

SEQ ID NO: 236599 - DNA, 833 bp, Homo sapiens
  chr12:103350083-103350916
  hyper
tttctccgcagcgccgcgtccccagacgtcctgaagctggacggggttctggccagagagcgccagggccgaaggcccaggaaggacgcctgggcaggcgctgtccaagcggtcgagcgacggctgcaagcgcctccccctccctctcggcgccagcacgcggccccgccgggctccgctcccagtcgcctgccaccgggccgccgggcacacgcctggggcgggatggtggctgcgccaaggccgccgaggtgcccgcggcggcgccgaagaaccaggaatccccaccagtgccctaagcgccatcactcaacccccgccccgcatctttcttctccgagggtctgggagtatcccagagcactcccttctttatgatatccgctaagctggtccggaaataatctttatggggagggggtggcggtagggggcgatggtacagggggccagaggtcatcctagggggacgtccctgccatatacacccacctacaggacggctcacaaccactcctcggtgtcgcttccccgcggccccccacacacttgctcagttatggggagcacatcctagtttttagagctgaatgggacattagagaccatattctgtggctgcagacgaggaagcgaaggctcagagaggatgccacttcgaggagccacagagcattgagaggacgccttgggactagaacccacgttttcacatagtccagcactttttttcactgttctggacggagtccctcccccaaccatgtttctaaacttcaatcgtaatttgctccaatttctagggtcaccgaggaacccgaagagaataacag

SEQ ID NO: 236600 - DNA, 410 bp, Homo sapiens
  chr12:103351144-103351554
  hyper
cagcccgccccgagcgcgccgcctgtttattcagccgggagtccggcacgcgccaggcgcacgcactgcaacaacaaacccagctgaatggagagtttgcaaggagcgggagaaaggaacgggagggggggagaggagaggaggagggggagtttagggagtgggtgggaggaagaggtaagaggaggggggggagtgggggctgcagccgctcgctgcagcagcggggagtggggggcgaggcggggccagggctgcgcgtggggctgggtgtcccattgaaaaggcggacgcactccggcagcccagcactctctcacttctggccagggaacgtggaaggcgcaccgacagggatccggccagggagggcgagtgaaagaaggaaatcagaaaggaagggagttaac

SEQ ID NO: 236601 - DNA, 142 bp, Homo sapiens
  chr12:103351734-103351876
  hyper
agcgccacgcgaggctcccgaagccaacccgcgaagggaggaggggagggaggaggaggcggcgtgcagggaggagaaaaagcattttcactttttttgctcccactctaagaagtctcccggggattttgtatatattttt

SEQ ID NO: 236602 - DNA, 212 bp, Homo sapiens; identical to SEQ ID NO: 203151
  chr12:103355123-103355335
  hyper

SEQ ID NO: 236603 - DNA, 148 bp, Homo sapiens
  chr12:103355911-103356059
  hyper
acatctgctctaatcgcttagcaacacaaagccggggcttgtgcggcgaagggaagccattcacagagctctgacaggccgcattcagcgcgcgttagtcagctccataaatcaccgctgcccattggctgcgcggcgggctttggag

SEQ ID NO: 236604 - DNA, 291 bp, Homo sapiens
  chr12:103358634-103358925
  hyper
gagggaagtggattcggtgacactaaggttctttacccactgcgaaagcgaatggcttggatctagcgcaggtcgaagttatattccttcttcctttgtatgcaagattaggttgttacaaaagagggtgtgtaggttaatggcaggaagcaagttgcagcgcggagcgcgggccctgagcgcgtgtcaggcttaatgatttattcaagctgcagcgcatccgggcgttgattggctgcaggcatgcgtccgctgtcagctgcgcgcgccgggaactctccaggctacctg

SEQ ID NO: 236605 - DNA, 359 bp, Homo sapiens
  chr12:103359254-103359613
  hyper
cccagaacgtcccgcgtgcgcccccctctaggcagccagcgggcggccgcttacaaagccgcctttgatgctctggctaccagggctattttggggacgagatgggggaaagccgccaacccacactccttggagggagtcactttctgcaaagtgcgttggagaggactgggccctgggtccgggctgtcgaagcaggaagtggatgtaggggacaaaagctccgcacctgccaaatgcgagaccttagagagagcctccccctcgccgctccctgctcccccgcgggcccgggaagcttgcactaccgggctcagcgcagccagccccaccgcctccggactcgaccccaccatagc

SEQ ID NO: 236606 - DNA, 959 bp, Homo sapiens
  chr12:103889139-103890098
  hyper
agagcaaggcggggcgtgccctccaccgcccccaaccgctccgcccggcccctcccccgctccctcccccacccctcccccttcctgtattagcatgcgggcggcggcgagccggccgggtggggagggcggcggtggcatcgctgcgcggggcgcattgtgggccgcgctcgcctccgcgggggaccatctgctcgctgtcaatgcatcacctgctcgtctgggccgtcgccggggcaacggggggcgggggattaaggagcgtgtgcgtctcggtccgggccgaggcggcgaggtgggggttggggcgggggaggagagctccttggccccccacccccctgccccgagacgggtcgacccgctcgggggccggcgaccaccgcgacgggttccgccgcttgcctccgctccttggcctttgctgccgtgctgcctcttctcacgggcgcggctggagtcccggggagcagcagagagcaaacggtccggctctacctcaccctgccagggggcgagtcccgcgctccctgcgtctacctggagctgcagggtccctatcccggggcgccgcccgcagcctcctccgcgggagctggagcactctgctgggtcctggggacgcggcgcagcgtggttccaagcgctccgcagtcgccgggcaaccacaatggggctgccttgccgtgagaccctcccccgcgactgccaccaaagtcacagaaaactttcacacctctcatctgacactgtggcctgtgcacgactccaagcactggggaagccttcgacatcagaatatgaatggcacctgttcttccgggggcggcaagggggatcccgatgtttatcaaaatgggttgattttccacggagggggtacttctggaggtagtaatccccagaaatcctgaaattcccccttccacctactcatctgcctcgaattgtaaaccatt

SEQ ID NO: 236607 - DNA, 475 bp, Homo sapiens
  chr12:104235216-104235691
  hyper
atttcagggtggcgcgggggtggccgtgtggtgtggtggcgcgcaggccacatgggatggaatgatgaggtacgaccccagcgccgcccgcccagctccgccgcaccttcgtcctgccttctgggactgacccccagctctggccacaaggacagcgcccctcccaccccagctgctctggccccggccctagaaggtgacctctctccgcattaatggcctctggcagtctaattaatggcagtctggacctcccctggatcgtggggcccctctgagacgtccccgatccccagcttaaatttatccaggaggacctgtgagtgggtggctgggccgaggttccactcatgggctgatgtcggctggaggatcccagccccttaagacctcagtaagtttgaagggccctcccattacacagcctggaaggccaatgcccgccccccgcctaggtttccgcctggcggcagag

SEQ ID NO: 236608 - DNA, 398 bp, Homo sapiens
  chr12:104322592-104322990
  hyper
ccgcacactaaatacgggaagttgtaaaagactgtgacagactgtcactaaaaaacttgtcttcaggaattcggacgattatctgaaaagatattcaaagttcaattttgttggaggaagcaataaggaagtggggtgtctatgtcagagacgggcgcgggtatgcgagggggtaacgtatagagtaggttaaagagacgtagaaaatatttccaaaggcacaagtttagcatgagggacttccctcacaggaaagacacctggtgttttatatgtccttctgagcacagacagggtatttctatgaagttacaaagctgcaatcccgttctcatgtgcagcaccacaggttttgctttcaaatatctgcaggtgcatcctcctgcactcgttaaact

SEQ ID NO: 236609 - DNA, 309 bp, Homo sapiens
  chr12:104324276-104324585
  hyper
ctcaccggccgcacgccatgagggccctgtgggtgctgggcctctgctgcgtcctgctgaccttcggtgagtgattctggaggagcagacgtcccccctccacacacgcggccgcttctcgaaggtcctgggggcgttgaacgtgggaggggggatcccggggcctgcggtgggccaagggacgtcaccattcctcgaaagagggcaagggaattacgtttattctcttcttcctctggaaataaaaaaagagagcaacatcatctaactgccctacagatctaatagtatctcgcccggaggtctcag

SEQ ID NO: 236610 - DNA, 366 bp, Homo sapiens
  chr12:104359127-104359493
  hyper
atatccaaagtaatgcggagagtggtttatgtagagctttacattttacatagcagctttacattcaccctcatttcacagataaggaaactgaggcccaagatggcacagtggcctcgacgcccaggttttccactttcaaagaccctccctcacatctcattacctgataatgcaacacagtctttaatcggggcgaatttcggggtggaaaggactagataatgctgataagcgtcatcatcccatatacacagcaccccaaggacagcaccctatcgcccacgcgtccaccagcccccgaaaatactggagacaaaagctgacgtcggcagagcgctcctagtccccgtcttctggtcctcc

SEQ ID NO: 236611 - DNA, 240 bp, Homo sapiens; identical to SEQ ID NO: 203155
  chr12:104443911-104444151
  hyper

SEQ ID NO: 236612 - DNA, 67 bp, Homo sapiens
  chr12:104532325-104532392
  hyper
ccttcccccgccacgtggaggtgcctcagccgcctgagctcagcctgcctgcgcctggatttttaag

SEQ ID NO: 236613 - DNA, 692 bp, Homo sapiens
  chr12:104609377-104610069
  hyper
attttccaatttacctttagcgaccgttctttcctgttaaaaaaaaaaaattcacgaccttgaagaagatacacgggctatgacttcgctgttgtcaccgagcgccccgcccaccgcgttctccgacccgcggccggcagggggctcgcggcctccgccaggcgtccttcggctccgtcagttcccacagggccttgtgcgacatgggctgcgccgagggcaaggcagtggcggcggccgccccaacggagctgcagacgaaaggcaagaacggcgatggccgccgtaggtcaggtacgaccgagggcgaaggcctggtccccaggtcgacgggccgaagcgggccttccggccggggttggggataaagtgccccggagccctggccttgaagcccctcactggagtcagtgactgaccgcgcgccacgctggagaccccagaaacgctcccccaggtcaccccgggagacggaggccggcggccggccgagggctgccccgcccgctggctgtgagagaggtgggaggtggaaggaggagcgggcccgccgcgaggacctgcccggaaacctgtcggaaaccgaaccgagatctcggcagcgacccgcctgatttcgctcagggcccgttagggcgtcctcttcctacaagcaccgtgtttccaatgaaaggttacgggggaagcgacca

SEQ ID NO: 236614 - DNA, 115 bp, Homo sapiens
  chr12:104680592-104680707
  hyper
cttaggttgggggcggctatgagcaggcagaggatgtggtgtcacccaattaggagctctcagcttacgaggcaattagcataggttgccagggctgcacgaggagtggatttct

SEQ ID NO: 236615 - DNA, 727 bp, Homo sapiens; identical to SEQ ID NO: 203157
  chr12:104682328-104683055
  hyper

SEQ ID NO: 236616 - DNA, 182 bp, Homo sapiens
  chr12:104850142-104850324
  hyper
gaaagctcagctgtcgcctgacccgagggtcgtgcagtttccttaaccctgactttaagtcagccctctttaaccccgactcccaagctgggctgtcctttgaaagaaaaacgaaaccgcccagttctgagcgtcggaaaatgggcactcgctccctgggggtttggggcaacttccccgct

SEQ ID NO: 236617 - DNA, 375 bp, Homo sapiens
  chr12:104851224-104851599
  hyper
cagaatctgccggatggtgctggccacttgcttgggatcctttatcctggtcatcttctatttccaaagtatgttgcacccaggtagggggcgcgttagcgtggttttgttggatattttcttctctctcgcgctctagctcgctccgcctgatttctgcctcttccaaccctacctctccgccttcggcctcttcggggctcctggctgcccagagctcctggctgcccagatctacccgggtcaccgcgtcgggatggggaggagaagggaaggtgtgcttcgccctcttcttcctaccggctccgggctggaggatgggaccaggaggggcggtagtttttttttttttttttttcttcttctttttttctt

SEQ ID NO: 236618 - DNA, 873 bp, Homo sapiens
  chr12:104851959-104852832
  hyper
tccgggtccgcagtgaccttgcggctggtgccccggggcctgctccagcccccagccctgagctggaaactccgagctcctgggtcacgccttgaccactgcagttttggaggaaactttggccaggtcctgggctgaccgtccgtttgcatcccccacttctgggatccgagcaacgggaatcccccgggcggcgtgggaatgaaccccattcctccggtcccttgtggctcaggcaaagttccacgtccgaaatctggactgggggagggacgaggctcgtcgcttcctaggggtgcgagggaaagtttgggttctggagagggaggggcgccctcgagcgcggcggccgggggtgagcagctcggctgcgaagcccaacaggtagaacgttccgagaagccttccgggtaacgcgggtctccccgccaagccgtggctcccctgctcccttttaccctcccttagcagccccctgccgggccacgttggctcagaaatccattttctacgcctccgagttgcctttctcagcgtagtcacagcaataatttgcttttctaattgcaaggaggagggaggtggaaacgcatttccttccagggaagtggggttggtgtttttcatttttgcctcccgccttctcctttcactgtgtatctaacactttaaacagacgcagtcccgaattcatcaagcctgcgtttgggtcgatggcagaggaataaagctgttctttccatcaaacaggcagggctgcaggctgcagattccttgacagcgcagggacagacggcccctttgccccactcggtctggagcagttgttaaggcagccacactgccaaggatatggtccgactctaccacatg

SEQ ID NO: 236619 - DNA, 603 bp, Homo sapiens
  chr12:105477920-105478523
  hyper
ctcagccccctcccggcagaagacaatggcctgcgtgccagttcccatccgggaccctccccaagccctcctctgaggtctctctgtttttgtttgtttgtttgtttgttttaaacgctgtcttggtgtttagcaaagtctaagcatcgctgctcatccccagccccaccgccccggccctcccgccccggagtctggaaaccaggacagggtgacagccgggacgctcgcccgggccggactcacccggccagtggagaagcgccggagcgcctggctgccccgccgcagcatgctggagaggagcgctagcactggcgacgcggcagcgcgggaggcaggcgggcggcgcagcctgggcgcggcctgggcgcggcctgcagtctggatgccccggactgcctggctcgcggctcgccgctctcggcctctgctagtccgcacccctcccaaagcccacagcccgcggcccgccccaccctaccagctgcaaggccccgccccctagctgtcaagaccccgcccccagctggaaggccccgccccgccagctggctgcgttcggacagccaacctggtgcgacccggcggagcgcgtgggct

SEQ ID NO: 236620 - DNA, 229 bp, Homo sapiens
  chr12:105629078-105629307
  hyper
cttgactctcatctcgagtgtgctaatgaagttcccttgtgcgacaaatggggcaggtactgtatttttctcttcactaatgggaaaacggtgccaaaaggaggcctggtaccgccggaaaagagatccaggccctctgcctctcattctggctggcacaagtctcatcacatcattaggagtagcagtaataagactgactcattatctgtaccggacattgtctgct

SEQ ID NO: 236621 - DNA, 616 bp, Homo sapiens
  chr12:106532092-106532708
  hyper
agagagccccagggcgcacagacccccgcctcgcacgccctcagtccccggccgcgtccacccagcgccccccgcaccctccaggattgccccactcaccactcggccagaaaacctctcggtggcccgcttgactttgccgtaggtgcctttgcccagggtctcctgcagctcgtagcggtgcttcaagttgtgcttgtggtgatgccgcttcaccccgtgcggcttcctgggctccagggctgcagtcgcccccgccaccgcctctcggggagagcccggcgcccccagccccaagtcggggcggtcccccgccacaggcgcggcggccccttccatgtccaagcgcggggcgagccgggctacagagggcaagaccgggcacagcgctgggatgtcggggtccccaccgagggaagccgctgtacgctcaaggtcgcccccgcagcatcagggaggcggcccgataccgctcggactgcggctcggtcactggcggcggcggggactgcacatctggcgcccgcggcgcgcacggtccgcgcaccgccccccggccgcggcgagctgtggagcgtcgggcgaggtggcggcggtggcaggggaggcggtggtg

SEQ ID NO: 236622 - DNA, 106 bp, Homo sapiens
  chr12:106532888-106532994
  hyper
gccacccggggccggggccgccgtgagctgggagggggatgggagcgtgtcgcgactcgccctttgtgcggcgcggcgtaggccacggcggcggcggcggcggcgg

SEQ ID NO: 236623 - DNA, 117 bp, Homo sapiens
  chr12:106533276-106533393
  hyper
ttttcttgtaggtgtcgccgcagcctggcggccggagctgggggagggggcagggaggcctggtgttcggttacaggcggtgactcacggaccttgcccgcccgaggctggcacccc

SEQ ID NO: 236624 - DNA, 159 bp, Homo sapiens
  chr12:106640992-106641151
  hyper
gtctaggccagggcccgccaaggaggagcggccggctcccgcctccgggcctgggcaggcagcgctaggggccggtcgggaagcacgaaggagcccggccgtgggtccggaggccgcagtcgatggggacagttgcggggccgggggtacccaccttct

SEQ ID NO: 236625 - DNA, 95 bp, Homo sapiens
  chr12:106695918-106696013
  hyper
gttccgattgccccgtctagacaggggtgtgcgggcactcaatgttccacgcgcggccgggagctcgcagtgtggtccacgccagtgcgcctgga

SEQ ID NO: 236626 - DNA, 37 bp, Homo sapiens
  chr12:106751649-106751686
  hyper
tgagcagcatggacgtgctagcggaggagtttgggaa

SEQ ID NO: 236627 - DNA, 491 bp, Homo sapiens
  chr12:106974459-106974950
  hyper
cgggcggtggcagccgcccaccctggggacgcgctccttgctgccaccggaacgcccctggccaggctccatctacgcgctgtcagaccctcccgccgtctgaagaaggcttttactcttcagcctattccagtggcagagaagctaaggctacaaaggcgaacgcgaacagtcagatctgacttcgaattccgctgtcattgctgccaggcgcaccacgaggacgcgcggtgaccgccaccatggcattcggctgccaaaggtttccatcgacctctttcccatcaccagcatcgcagcgggaaagaatgtgcctggcgcccttctgggcactgggcatggggtggtgaacaaagtcctccagaaataaaccgggtaatgagcccggcagcggccggggcaggaagggaccttcgcagagagtggtcaggcacagcccctccgaggaggcgacgctcagctgagaccagggtgacgcaaaggtgtcggcc

SEQ ID NO: 236628 - DNA, 559 bp, Homo sapiens
  chr12:106975168-106975727
  hyper
gggctctgtccagccggtaccgcgcgccgccttcttcctcccgcaccgtgaccttaactcggcacgtgctggcccctcgggctccccagtctccgtacattgtcccactcagctctgattgtggggagggggcggaccgagggggcggggggcgtctttccgaaggatcgcggaaagccgcgcgctgccaggggcccggggttagagacccccactcccgcacggcgttagggactccgcgcttccccgcccccgccgcggcccgccggctctgcctctgtccatggtcaaagcacccggggtaatccgcctttctcttccgcccgccgggccccattcatattctaatcacagcgcggccgacccgcgaacggccactttatcggggcccgcaggagacgcagcttgctccccctcacttccacttccagcaccccccggccctcgcccccctctttctgcactttcaactccgccgaggagggggtccctgggaaaaccgcgtccccacttggatgccggggcttctcacaaacttcgaggccgactgggggacggc

SEQ ID NO: 236629 - DNA, 676 bp, Homo sapiens
  chr12:106976182-106976858
  hyper
gcttcactccccacgcgtgtctgcggatccgcgtgcaaggggtcaagacataccccctcccgcattctcagggccaccacccgaaatctaacccaggaccaaaatggggggtgggtgggggcgcaagagaaggaagggagtggggccccactcgtggtagcgcaggcgactccccaggctccaggagttccccgcggctccccccccgcccgcgcccccctcccggcctgccagcacggcgcggggcccgatggtggggaagggccgggagggggagggggccacatctaagccaattttgatttcgcctataatgagtgccgggcgaaggctggagaaggcctctggaactttaaataagaaaaacgttgctaatgctataatagaagggggaagtcggagggctgggattgcgtcgctctgagccccccttttcggaggcggcttttcttattcaaaacaggcccacaatgggcttcacagtgcgcctcgccacggccccatctgacgagcggccattcatcaggccggctggcctatcaatgacattgctcccatcggggctcctataaaatgatgctttttcccatgaaacatccgcaaacattttgacgggtttggctttgcccggctggattactgagtgtccccttgctcgctcgctttttctctctcc

SEQ ID NO: 236630 - DNA, 281 bp, Homo sapiens
  chr12:106977375-106977656
  hyper
gcgcgcgaaggagcgcgctttcgcttgccctggacacaaagttacgtaaagatgcgctggctcgcggcgagctcgaggtgccacttgcagaaactttgccagccgaccgccccctcccggacccaggtcctcctagggtatgggggcctcggaatagcggtgcgctcggggtctggcggccagggccgggaagccgagcggaacgccccgaggcgggggagggtgacggcttcgcactgcgcctgggaggtggggaccgaggctccggctggtagagacgc

SEQ ID NO: 236631 - DNA, 503 bp, Homo sapiens
  chr12:106979278-106979781
  hyper
acttgcaaaaccgacgacaagggaagtgcggctcggcgtggtccagtccagaagccttccctcacctcccttccagagaatttaatccaattagcctttcttctgagtttcccttgttatgtaaagggtcttttctcctggcttgcagagacgcgcgctccatggagcagttcgattctgctccttttgtataagatcgcgcgcgatcagaaccaggaatattgctgttattatatcattccgaaaggactggaacaaccgactcacagcaagtgctggggcgaagtaggaaacgtccaggataagagaggccggcgagcggggccaccgtcccttactcttaaaaggaaaatccccgcgaagtgcctcgggcccgggagaacagttttgcaggggccagggctctagtggcctgctttggggccacttcagcatgacctgcggaaacgcgcccctttgttccgcacactgagccagtaatatattcctcgggtttccccaaa

SEQ ID NO: 236632 - DNA, 1458 bp, Homo sapiens
  chr12:106980201-106981659
  hyper
agaacgatgggggaaagtgggtagaattttaggccaccgagaacttgtgcaaagtgggccgggccgggtcggtcgcctacgcaacagaaggatcatttcttttaaaacgggatggcgcgttagagagggccactgccaagctggagctggaaacttctgcctccatccactttccgctcccatctccagaacccagagctgaggcggccaaagtacttcctggagccggatttgagttccccgggccgcatcggtgggagggcacgctagtttacaggcccccagctcagcacaaattctttctaaaattctaccaccaaattaattatatgcctttgtgggcccggggtagggatgtccagtggccttggcgccgtgcccacaaggcaaagtgcgtcctggagggaacagggcccgagcctcctccattcttgcccaggcacagccctggggaaggagccactgtctgcgggcttgggagagcaaggagccggaggtccgagccttgctccagcgcccaaaccagacagtctcgccctccccgggcgtgtgtgtgtgcgcgcgcgcgggcgaacggggcatgtgcgcccccatctctgccacctgctaagcgccggcgtctggatttggcagcggggtcaagtgagagccgcatggtaccagggttccgagtccccgaggctgcagcccttgatggcgcggaggctgcacgcaggctgggtcctcggagtcccggattcagcacgcgactctgtgcggcagcctgggacagcgcgctttcctacccggcctgcaggtcccagagactcggaaaagtttgcaggggccgcccggcgcctcgggcctgggatttccaaagccgctcccgcccccgtccccagcgcgtcaccatggagactgctggaagttggtggtggaaaacagacctggcgcaaagcaaaatattatgagtgcagttggggtgacttcagggggcggggggaccggagggcaggagcgggagccagaggcagaggccgacaacaaagggcccagtgcgaggaagagagaggagtttgcacggggcctccccgccgctgtgtgagtgctggaccatcctgcttcccagaggctccgaggtctctaatttctctccagcagctataccttttctcagcccgccttggagcccttgctccctccctcctctccgggttctcttccagcctcccccctcacccgtccggaggttaggcgccagctgggcagtgcgcccgcctccccaggagccacaggctcaccaacgtgaaaggttctggcttttcttccccacgacccgtgggtcgcccagggtgagtttctcaccccctatctcaaacccgatctgaaagggtgatgggttagaataaggtgggaacggaacgggaagagaagggagcgtctggccagaaatcttgcgagtggggatgggtaaagagg

SEQ ID NO: 236633 - DNA, 180 bp, Homo sapiens
  chr12:107168078-107168258
  hyper
tagatgggcggggaagagccgggttgctctagtcctttgagaatgattcatagaggagggtcaggaaagaagaacggttcagtctgtgaaagcccccttaaaagactggacagttctccgagggagggagaggcaggagagcaagcagggccttgggcctgactccgcctcggtccgcta

SEQ ID NO: 236634 - DNA, 423 bp, Homo sapiens
  chr12:107168498-107168921
  hyper
ccgcggctcccccgcacctgcggccatggatgaggagcgcgccctctacatcgtccgggccggcgaagcaggggctatcgagcgggtcctgagggattacagcgacaaggtaaagagtcctggccccgggcgtgcggtatcgcacccccgggccgccctccgtgcttgcacatcgcatccttccccacccccctcattccggggatgcgcattgctctcccccgaaaacgtttccggcttgggcatgcgtgtttgtgcccccagccttttccatccatgcatcctgcatcccactacccccactgtagcgcccactcctctgattcctggcccagcagcttgacctccggtcctcctctcaagcgtgcaagtcacacccccggaatccgtagatgtgcatctgtgccccgtgccccactcctg

SEQ ID NO: 236635 - DNA, 140 bp, Homo sapiens
  chr12:107349516-107349656
  hyper
gtgggcgtgtgcccggtgggcgcgggaggggcccgggctgcacgagcgcgcgtgcgcgtcggaactggagccgcgggaggaggcgggagctgaggaggcggcggagggggcgggtcgcgtcgggcgccacgtccgcagcc

SEQ ID NO: 236636 - DNA, 1525 bp, Homo sapiens
  chr12:107486364-107487889
  hyper
ctcactgatgaagaccgagtgtttcaggtcgtcagtactctttggccagagaagtattaagtcaattctatttaatacttagggcacctaaaattcgtaagcggtataagcaagacagtcccacgtctaaattcacagatttggcggatcgcatggaattcattaacatcagactcattaaacacccaaatccatttcccacgggcttgtgactcaccgccacctgttgatgcccacattggaggagccggcgaaccaggggtccaggatgtagacgcagcggatggtgtcggcgccctgaatgcactccttcagggcggggttgtcgtggagccggagcccctttcggaaccagtgcacggcgttcacccccatgccggggggcgcggcgggtcctccacggagaaattcaaggaaggaggctccggctcatagccgacaccttcgcttccaagagaattgcctcacccggggcgtgaggaaagggcggcagagggggaacaggaaaaaatgactccgaggaggggaccggagaaggcgggggcgccggaggcgcagtggaaagatgaatggaggttgcctagtcggcggagtccgggtgtgacgccctttaggagcccgcgcccgccgcaaccgcctggaggcgacgcataacttcgagggcctcggacctccggagcctgagcaagttccaggagctcgagccgccacgacggcccgagccggcacggacggccccaggagattcgtcacggaaacctcgccccaccaaggcggcccctaaagacaaaacggcccgcccgaggtgagtcaccgaggagaaccggaggggaatgagcccctgtcggcgacgctgtctctcggcccgggagaaaggaccgggaacggaggctagaggcggtggtcgaggccgctggacggttgccggccggtgaccggtcccgaggctgcccgggtgactctgccgccgccgccgcgtcagcggcctcggccccgcccccggctcctcattggagggcgcgctcccctcgtgaccaccggcacctcacgtttctgaagtgtgtttactacactggctcggaggggtaatctgctcgcgcttcggtcgcttttggaggagcggcagccgcttgatcccaaacttgttgaccctcgtccacacgctgaactcactgcctctgcccctttcctgtgccgactggtggccgtcccttggaagcaaatcgcgttgaccacaggccccttgtgagggaaggcttagccccgcccccaagggccatgagcggccaccattggccgaggctcgctgagacccggatgagcacggggatgcggggagcttgcgggcgcgcgcgctgctccgttaggcgcgcgtgcgctctcgctgcgttccagagggtaagggggcggggccggcgggcaggagcgcgctcggcgattcctcccgtgggatttggggagggcctggaaattgtccggtttccttcaggagccagtggtggagtcgggcggagagtgaggggag

SEQ ID NO: 236637 - DNA, 93 bp, Homo sapiens
  chr12:107488134-107488227
  hyper
aacctttcacccctcgtctcttacatttaatgtagtttaccggtctctttgaaactggacgtttgtctacttttccagcgacagtgaactgca

SEQ ID NO: 236638 - DNA, 2713 bp, Homo sapiens
  chr12:107711707-107714420
  hyper
gctggagcaaaccccggctgaaagagggccgcactaattggtttgcgtacccgaagtgggaatagagagggaggaaaaccatgtttcaggtgttacggggggaaaaaagtgaaatgcgaaccgcaggggagagagcgaccgtcaggcagacaccttgtgaaccgcggtggagagcacacctaggtggggaggtcaccggcccaacccaccaccctccgggagaatgcgggcagggacagcagcagggggcagcatccacgtctctacgcttgcaagggttccccaagtccctggccactgctccccacttcctgcagcctcggtgtccgccgggggcgtgtgtgaggggcggggccgcatggggaggagggatttaaaaaaaaaaaaaaaaagcgaggtaattagcattctccgattccactggctctccgccgcccctgctttgcatacgcccgtcccactggctgcccggggtttgctggggttcggcaaggtttgcagccgccacggccgctgctgcgctccggtgcagggcaggctggcgccgagcgaaccagggccgggaactgggagccgggagccgggagccagctgcccgcggagctgcggcggcggcggcatctggggtggtctcagtcccacgaacaccgtggccggcgcccggtggctactgcgcccagcggggctcagggaagagcggtctagacactttttattttggaagaaaggggcaagccccggcgggagcttccttcccggcctggctcgctccccattgcgcccagctccggcccggactctggaagatgactccagggtctgctctgtatattccagcggcggcagttccgggaggcagccgaaagtactaacagttggtagcagcggctagtggaaaagtgagccaaggcggcgcggactcggctctccccgcgccccgcggcactcgctgctcctcgccgctccttccctttggctcccaggcggctgcagcatgaagtggcgcagcgatggccaggagaggtaagaagcccgtggtgagaacgctggaggatctgacgctggactcgggttatggtggcgcggcggactcggtgcgctcctccaacttgtctttgtgctgttccgactcgcacccggcgtccccgtatggcgggagctgctggccgcctctagctgactccatgcacagccggcacaacagctttgacactgtcaacactgccctggtggaagactccgaggggctggactgcgccggccagcactgctcgcggctgctgccggacctagacgaggtcccctggactctccaggagctggaggcgctgctgctgcgttcgcgggatccccgggcaggcccggcggtccccggcggcctgcccaaggacgcgctggccaagctgtcgacgctggtgagccgggcgctggtgcgcatagccaaagaggcgcagcgcctgagcctgcgcttcgccaagtgcaccaagtacgagatccagagcgccatggagatcgtgctgtcctggggcctggccgcgcactgtacggcggctgcgctggccgcactgtccctctacaacatgagcagcgccggcggcgaccgcctgggccgcggcaagtcggcccgctgcggcctcaccttctccgtgggccgcgtgtatcgctggatggtggacagccgcgtggcgctgcgcatccacgagcacgccgccatctacctgacagcctgcatggagagcctcttccgggacatctactcgcgggtcgtggcctccggggtgccccggagctgcagtggccctgggtcaggctcgggctccggcccaggcccgagctcgggccctggtgcggcccccgcggcggataaagagcgggaggcgcccgggggaggagcggcgagcggcggcgcctgcagcgcagccagcagcgccagcgggggcagcagctgttgcgccccgccggccgccgcggccgccgcagtcccgccggcagccgccgccaaccaccaccatcaccaccaccatgcgctccacgaggcgcccaagttcaccgtggagaccctggagcacacggtcaacaacgactcggagatctggggtctcctgcagccctaccagcacctgatctgcgggaagaacgccagcggtaagtgtctgcgcgggtgccactccctctcacctaacctggccaactcttggcgcaagtttgcctcgcgtccccctcccgcgtcttcccagccacgcgctgctgtcccaagccgctgaggaggcggccgggctggaggtagccagaacaagaggttgcctgtttgctcctgcactcgggtgcgcgtatttcacgctgctggtgctgtcccaggtccgggagcgcgaggttccgcccccggtgcggggcggggcgacagctgcctccagcaggcagtgagcaaaacccagcaccattttttggagcagggttgagatcatttgcgcttagtacatatactccacccctgcactgtttgttttgaccttgaagatgccacttccctgggcgcatgaattgggctccctaggacttgggaggaggcgcgttccgctctccgcaatccagtgctcccacttccccactccctcggggggcacgcagtgcacgggggaaggaggggcctggcggccgtaccggctgaatggttgaaagcttgcacggcctagacagtcgtaaaggtgtgtgt

SEQ ID NO: 236639 - DNA, 692 bp, Homo sapiens
  chr12:107714659-107715351
  hyper
tgttagtttagggcgtcgtttccagcaggttctatcatcgtctcttcatgccccactgttttgaaggcctgacttgggtaggtttgaacccgcagttctgtccttgaagggggtggggccggggcgcttgttttcgagagctcgcgctggcggtgctgcccgtctgcgaaagccggagctagacacttcaaagcttcaattttccacaggaaatggtagaaacgtaactggagactctaaaggcgaaataaaactttgttacatattcggcggtttggccagaggttgcgcggttggagctgaaatgcagtctttctgggcagatttcattcatgttgctgcctgtctgtttcccgggggctggaggagcactgcggtgggcggtgccaagggtgtgcatgtgcgtgtgagagtctgtgtgcgcgcgcgtctgtgcgtgtgtaagtgtgcttgtgagtgtgcgcaggaacaagcgggcgcgcagggcgcccggctccagccgaagcctttggaaaccgaccctgccgccctcggtcccttcacctggatttgatcgtcagtgggggaggggaaggaaggagcaaagcgggtgtgtgtttgtgtgtgttggggaggggaatccgcactgatctcggagactcttcgggatctctttgccagagcccttccccgtctgctgccagccagggcac

SEQ ID NO: 236640 - DNA, 201 bp, Homo sapiens
  chr12:108079429-108079630
  hyper
ccagaccagcccacgtggattcctcgcccggctgcttccgcttccattttgtcccctcctatttctcattcggcgcctcagaatgacgtctgaaatgagcgccgacgctgcccaaacaggagcctgcgcatgcgctctgccctggcagcggccctgtgcagatccctgagcgtgtggcagcagtgcggtcgtggtccctcc

SEQ ID NO: 236641 - DNA, 54 bp, Homo sapiens
  chr12:108169510-108169564
  hyper
ctagcgagcgcccgaactggccaggacccccgcgcccgccgcacagcgcgcagc

SEQ ID NO: 236642 - DNA, 1397 bp, Homo sapiens
  chr12:108237331-108238728
  hyper
gctctcaatctcggcggtgctaccaggaatccgagtagaagtggtcagggatggagcccagggccacctcatccttcttcctcctggagccaaacagcttcttcatcgcggcagcttcggagaagcctcagctaccctgcagctccccttcgccttttcgcggaatccggagtccagtcacaattagctaagcccggggcaccaaagcctttagcagcgaaaccgccgcttccgacctctcggacctagtgagccaggcagagcctttaggcccacgcctgggcaccacagccagcccgaggcccaggaagccgctcccaggctgcgcgcggctggcgctgggcttccagtgccggactgccagaacaggctgggagcgctggggtcttggcgctctgcagccaccagagatctggccgagtgggtctggttacccccacccctgtgccgccacagcccggcagatcgcctagcttggctgccccagctgccgcatctgtccctctgtccgcgtctctgggagcccggcggggtgggaggttgctggctgttgctgtccactccggatcctgaggccgcccagggtactcctaccccgcctgcctcggtgcccctgacctgcagtcgtcacctgcactccaggcgggcaacaacagcgaggacaccctgcccggccaggctcccagcatcagagacgctgggtggacaacgtggtggcggccaatccaggtggtccgccagaccgcggcagagacaacgcagaggctgcgggttaggactgcccagcgctagcggcccccagctctgtgcgcccgctgaggaggagacagccagcagcgtggtcaggcaggctctcgcgctgaggaggcagtgcactcaggatactgaggccgcccagagcacgccccgccaacccacctaggcgcctgagctgcagcctctgcgccgtctctgccgcggtccggcaggccgcctggattggccgccgccgctgctgccaccacggtgtccacccaacgactctaatgtgggaagtctggcggtggagggtgtcgcgggctctccggcagacccgtagctggtggtggagctgagggccctggggcatggcgggcagggacttgaggcccgcaggaggagggggccgtgccgatgctggctgtgccggggctgcctgagaacccgcggaggctggggggcgaagacgcgcggcacaggtgcgcaggaacgcggtggtggcagggtcccagactgcccagcctaggacgggcgggataccggactgtagagcagacgaagggcggggtctcagctacggagctatggacccaaggatgggcgtgcgcacgccgcgctgcctgaccagtctgcgggccggttgtgcttgccgggggaca

SEQ ID NO: 236643 - DNA, 590 bp, Homo sapiens
  chr12:108523022-108523612
  hyper
ggtaggcagtgctgtggctccgtgcgaggagcgcgccgggctgaggcgcgctgctggtggcggcggcggcagcggcgcgggagctagggctggagacgtgaagtccaggggagcgagcaaggcagccaaggaggcagcggcgaggcagcgagagagagccaggcggccggagctccgcgccgagccgcagccggtgccctgcgcgcaccgggcccgggcatctccatccccggggcgggtgcccgcgcggggcctcgccgcggctcggggcacccgcagtgccgcccgcccgagcgccaggctcacaggagcccggctttcacttcctctcgcttccgcccgcctccctggctcgccggctggcgtcgccaccgcctcctcgtccccggccaccgctgtcgccgctgctgcaattcaaggcgcacactatcccactttcccgctggaggcgcagaggatgccccttgagccagacctggagaaatagccccagggcccggcaggaggagccttggtggcgagaaaggaaatccaggctcccctttccttaaagccactgcagcagctgggaaggcgcccacagagcgggc

SEQ ID NO: 236644 - DNA, 92 bp, Homo sapiens
  chr12:108908840-108908932
  hyper
gccccgcccctcccgctgcttattggctgctacgtgaacgagacaaacgcaagcaacaaccaatgggagtggcccacggcgcgtctttcccg

SEQ ID NO: 236645 - DNA, 57 bp, Homo sapiens
  chr12:108955306-108955363
  hyper
tagtgtgacctggcgcttgggtttactctccccagcaactgcgcctcaaacgcaaag

SEQ ID NO: 236646 - DNA, 121 bp, Homo sapiens; identical to SEQ ID NO: 203172
  chr12:108956083-108956204
  hyper

SEQ ID NO: 236647 - DNA, 275 bp, Homo sapiens
  chr12:109162558-109162833
  hyper
acacgacggggcgtcgcgcctccagggctaggccgggcggatggagggggtccccggagcccgggggaagtggcgcagtgggcgtctgcatcggcccgaaggcacttgcgcagaggtccggcaggcagcagagcaccttgtgggcgtggtcgctggaggcagcgcctggcacccccatctggcacagagcgtccctgccctgccccctggggctgcggaggccacctccacgcccatttgccatccctgagccgcttctgcgacctgtgggggtg

SEQ ID NO: 236648 - DNA, 116 bp, Homo sapiens; identical to SEQ ID NO: 203175
  chr12:109250887-109251003
  hyper

SEQ ID NO: 236649 - DNA, 414 bp, Homo sapiens
  chr12:109531040-109531454
  hyper
ccataactgacctcgctgccccccaccagtgttaaaatagatcagtctagtgatgctcaagtggatacgattcagaagcgagacgcaaagaggttaaacacgggtaaaccgcacgcaaaattctgatatcactgcaacacgtccgtggggtgggggtggcaagagtgctctagcatcgcagctccggcgcagatcggaatcccgcagtcaccctggtggcctcgtggtgggaaagacgcgccccagcgaatcggtcgcgtcacttccggagcacgctgggaactacggcaggctagggcgcaaagagagcagccgggcggccccctggtgccacctgctggcctcccgtgtgtggcaagcactgccgctttcccgttgatcacctgttgggccactgtcgagaatcacggctgg

SEQ ID NO: 236650 - DNA, 98 bp, Homo sapiens; identical to SEQ ID NO: 203176
  chr12:109535377-109535475
  hyper

SEQ ID NO: 236651 - DNA, 169 bp, Homo sapiens; identical to SEQ ID NO: 203177
  chr12:109592371-109592540
  hyper

SEQ ID NO: 236652 - DNA, 85 bp, Homo sapiens
  chr12:109747423-109747508
  hyper
tgttgcaaccccctctctcccccaaagtggaggacgggccgggaggcagagacggggccccaggtggacgcggattcggtccacc

SEQ ID NO: 236653 - DNA, 136 bp, Homo sapiens
  chr12:109747913-109748049
  hyper
cctggagccagccgcgggaaaggtggcgcggaccgcggacggcggcggggcccagagcgggcagaggtctccacaggccccttaggaggcttggatgagtttggtcccctggaaagtttgcgtttctggcgcccta

SEQ ID NO: 236654 - DNA, 175 bp, Homo sapiens
  chr12:109915370-109915545
  hyper
cgaagaagctctgcggaactgtcattttccggaactggatgcttgcttcctggcggggttctgaaagcgaacaccgcggggcaagatggcggtagtgcgtcggctgctgccccgggtctggcagaactcgggtgttttgggctgagacagtggcagctgcggccccgaccccaag

SEQ ID NO: 236655 - DNA, 268 bp, Homo sapiens
  chr12:110011228-110011496
  hyper
gcgcaggccaagacggctccccaggccaagacggctccccaggccgcacacagccatgagccaggctgcttgacgggacctgaccccgccaggttcccgtccagtccgcggggtgactccacccacagctggccgcgccaccgctcaggtttcaatttttattggttcgcagttctcaccccagggcgggacactcccagggacttgtttcccattggtttaacggaaggagcggggcgggaaaacccgtgtcggcttggctgcaaca

SEQ ID NO: 236656 - DNA, 680 bp, Homo sapiens
  chr12:110337997-110338677
  hyper
ctcccgctggccacgacggggcaccagagaaaaacacaggctccctacgcgctgaaggaggcttggcccttgcgacgctccgtcgtcgggctcgttgccggtgcaaacagggaggaaacagccggcgttgctgtagcgcgtctgggaattacaccgggggactggccggcccgcttcgtgcctgcgggaagtcgggccgggggactcttcggaaactccgagcctcagagaaatgtgagtcggagggttggactaggccggatccggcgttagggcgggggcccgcaggcggcccgcgcgggcgggaaccggggcggcagtcagcgggcgcgagctcagggcgcctccggggtcctcactgcgctccccacgcgctgtgaccccatttgttgcacgtgcatgttcaggtcgagagagggatgcgacgtgttcggggagcagcccaccttgtgggtggccaatccgggacgggaatcttaaacttttaactcttggtgcaaagactgatccactggcggctttacgggagcgggaaaaaagtatgtgaagcttgccacggtctcgagaccgaggtcacacgttagcagcctgccggctacatttggaccatagacgcagagtgtttgcccccaaaactggaggacctccagaatgagattcttggcgtgcaccaggccttt

SEQ ID NO: 236657 - DNA, 165 bp, Homo sapiens
  chr12:110561795-110561960
  hyper
atgaaacatcacacgcatttaacataggttaatcatgcagagagtattttgtaaactgcgaagtgcaggactttcgggaagcttattgtagcgcgtctaggtcggagtaacagtcccaaatgccctcggctgtctgcagtggctcagcacgtgggcccgctttgc

SEQ ID NO: 236658 - DNA, 322 bp, Homo sapiens
  chr12:110841360-110841682
  hyper
gctgctgaggagccgcacgttggagtgcagccccgcggccgccatgtcccgcacgtggtctatcacattcatcctgctctgcaaagccgcgggcagcggcggcagcactgactcgaaaagccggtagaggatccttagggaagactccaaaatggcggcgtcgccggggtccatcgggtccacacgcggcaccacccccaagcaagaggtaactactgaagtgcccgaataaaaagaaactcgagtccctgctcctgtcgtggtccttttcaggtgaaatgagttgttatttttacgcaaaaatcacgttatcatcctaaac

SEQ ID NO: 236659 - DNA, 200 bp, Homo sapiens
  chr12:110906303-110906503
  hyper
ctccgcatccttgcgccacgtgcttcggtccgtggtttgcgtgcagacgtttgacctgtatggtgaccctcgcgatttgcaaatgtgctgaggatctggaatactgaagtggaaggcacctcttgttttggggagcatgtatatttccctcctgtgacgcactgcttccacagagaggtgcaaacgtgcaaacgctcagc

SEQ ID NO: 236660 - DNA, 203 bp, Homo sapiens
  chr12:110939787-110939990
  hyper
cggctcccaacaacgcagcaccccacccgagagccaggccttggtcgccgcaactgcagccctcaccatcctgtcaccgggctccgctcagtcaccaccaccgtcgccgccctcttcctcaggctcctcggcgacccgcccacttaaccgcaaccaatgagagcagagggagacagaaattgccgtacggaggcccgcacgga

SEQ ID NO: 236661 - DNA, 147 bp, Homo sapiens; identical to SEQ ID NO: 203180
  chr12:111021164-111021311
  hyper

SEQ ID NO: 236662 - DNA, 44 bp, Homo sapiens
  chr12:111051731-111051775
  hyper
cgcccctcgtttacgccagcttcacacccgctcactagtgctcg

SEQ ID NO: 236663 - DNA, 65 bp, Homo sapiens; identical to SEQ ID NO: 203181
  chr12:111052028-111052093
  hyper

SEQ ID NO: 236664 - DNA, 217 bp, Homo sapiens
  chr12:111126683-111126900
  hyper
aagcactgcccgcccgcgccgggacacgccagagccgagggcaaccgagggctggggtcctgctggggctccacggcgaggcctggacagcggagatgcgggggggggtcccctcttctcggaaggatcgggcactgggggtcttgtagaaagggctgcacgccaaacggggtacgccccccgcccggcccgagcacttacccggcgccccacccgc

SEQ ID NO: 236665 - DNA, 282 bp, Homo sapiens
  chr12:111127125-111127407
  hyper
cccggctgcctcccgccccgcagggtgggcctgtcctgggcctcccgcagttacaaaggtcccgcccgtgggagcgaatcgcggatcacaaaaatcctgccccgggccagcctaagggaagggtgggcgggggaaccacttccttcctccgccggctggagcggggcgaatccaccccgccaacccctttcggggagcttctgctccatcccaccgtctccgggccacccctgcctctgggtctcctgattccttggcctcgtcccctgcacagtttctgcc

SEQ ID NO: 236666 - DNA, 61 bp, Homo sapiens
  chr12:111284505-111284566
  hyper
cagcgattgcatggcgttggccgagggaggggctaagactgttgattgactcaagaagtca

SEQ ID NO: 236667 - DNA, 48 bp, Homo sapiens
  chr12:111473008-111473056
  hyper
tgcttttcttctgtttctttcctctcttccctgctctttctctctcct

SEQ ID NO: 236668 - DNA, 100 bp, Homo sapiens
  chr12:111843201-111843301
  hyper
cgatgatgaaagccgtggtcgctattgcaccgcccagccctgcgggcactgataaggccctgcaggagggagtcagcaagggcgcgccccctggaggcca

SEQ ID NO: 236669 - DNA, 273 bp, Homo sapiens
  chr12:111844537-111844810
  hyper
cactccccattccgggccatgtggctaagagggtagcgccctgattcaggaagcccctctccccagttcctgcactgccgaggtcgaccgggccaggcccccgcatgctgctgaattgggcggttcaccagggctaggcgtcccagagacaggtttctggtattgatcctctcacacctcttgcctggggttccctgggaatcccccgaccaaaaaacgtctggagtgggtgttggtcttctagatccgcacggtagggatggtatttcagag

SEQ ID NO: 236670 - DNA, 57 bp, Homo sapiens
  chr12:112036146-112036203
  hyper
atgttccggaaaacgccaccacagcctccagacccctccaacgttcacacctaaacc

SEQ ID NO: 236671 - DNA, 181 bp, Homo sapiens
  chr12:112123544-112123725
  hyper
caggcgagtgttccgcgagctccaatcggataacaaccagtgacacactcatagggcaggcgctggccggcgcgggccccggcgggctcaggcgaggctggaaggcgagccgagaggccgagcggcccggggccggcagcgccgccaccacctcaatgcagttgccgccgcctcagcagca

SEQ ID NO: 236672 - DNA, 37 bp, Homo sapiens
  chr12:112123942-112123979
  hyper
agctgcaggttttcgcacagtcgcgagttaacctctg

SEQ ID NO: 236673 - DNA, 805 bp, Homo sapiens
  chr12:112204379-112205184
  hyper
cgcttttgggtttacggccggtctcttcacctggagcatcagccgggaaggtcagggtcgccctggctcgggcctgttcacattggggtcaaaggcacacattgggggctcaaccaaggcgagctgcgttcgcggggccgggtctttccgcacaggcggagggcggtggcgggcgcggaggcgtcgcgcgagccagggggcagccacgggccgggggtacctagcgccacccgcttcgcttgcatcagctgcgcgccccatcccgaggaatggtagaggcagccccgcccccggcccgcccccgcctttccattggctgccgcgcggggcggggagcggggtcggctcagtggccctgagaccctagctctgctctcggtccgctcgctgtccgctagcccgctgcgatgttgcgcgctgccgcccgcttcgggccccgcctgggccgccgcctcttgtcagccgccgccacccaggccgtgcctgcccccaaccagcagcccgaggtcttctgcaaccaggtgagcccaccggccgggctcgcgctttgttttccggcccgagtcccccgcaggcccctaggaaggccccgcgccgccgtgggccttagtgtactcatctggggctcgaggggtttgcagaggctgacctggaagcacatctgccccctcctctcctgcaagcattttagccccttcgccgcctctgacagtccccgtcccatttccccgtgacttgggccccctctccgtcttcgcccagcctcggtctgttttccagggccaactctcggggttccgttctc

SEQ ID NO: 236674 - DNA, 48 bp, Homo sapiens
  chr12:112847008-112847056
  hyper
tttggcttcagtgcggaaccccaacgtggctgcgacaggctcagtgtc

SEQ ID NO: 236675 - DNA, 55 bp, Homo sapiens
  chr12:112856480-112856535
  hyper
cagcgggcccggacgggtcggtggcgtagacgcggagcgcgcagctcacacctgg

SEQ ID NO: 236676 - DNA, 76 bp, Homo sapiens
  chr12:113013007-113013083
  hyper
gtggtgttagtgctcgagggtcacgcgcgggtggctttgccgcggtggtggcagcggtggcagaggcgacaccgct

SEQ ID NO: 236677 - DNA, 401 bp, Homo sapiens
  chr12:113229230-113229631
  hyper
atgtcgagaagtcccgtcccccacccctccggactccccccttctctgctttaaccatccaattacttaacttctctgcctaggggttcgcttcccacccatcccctcctccaaggcatcttagcgctgtccgtggtgctgaccgccaatcccctggttgccgtttcgaccagctgggatctctggtgcgcccaacctcccctcccggcctcccacctttctttctccaggcaccgcacacataaatcacgggtgggaggcaggcttggttcccgcttggttccccctgcactgggaagctgccgccccgcttcccttgctcacacagggctttgcagtagtggtggcagccgcggcagaaactggctctggggaagcaattgattcgtctactgccagca

SEQ ID NO: 236678 - DNA, 432 bp, Homo sapiens
  chr12:113541667-113542099
  hyper
cacagccagcccaggcggaagtgggacacccgctgattgacgggtggggagggcggagcctgcagtccgccctgccccctcacctgagcgctcagcctggaggcagcaggtccagcgcgcgctgcggaaggcaccggggtggcaggcggccagcttgttcgggttgggggcgctggccttgcgcaaggccgagagccactggttgagctcattcacattctgcagcgggtgggaggcgatcagggggcgggtgggaacagagggacgccccccgctccccatcgcggtggggtctcaccttgcactggaggtaggtggtgtgcagcgcccccgtgccgtcctgcgtcaccacctgcatcacgtggggcagttggaaggcgccctcgtctacgcgctccacggcgcggatgtgagacacggggatggagtgac

SEQ ID NO: 236679 - DNA, 506 bp, Homo sapiens
  chr12:113592183-113592689
  hyper
gcccatgtgagtcccttccccgcccccgactctagttccaagaggttccggagctggtggcgcgcttcgacggcctggccgagacgcaggcggcgctgaggctcagggagcgcgagcagctcgcggagctggaggcggcgcgagcgcggctgcagcagctgcgggacgcctggccggacgaggtgctcgcacagggccagcggcgggcacagctgcaggagcgcctggaggctgccagggagcgtacgctgcagtgggtacgacccgccctaggtggggggcgctccggaccccaggcttccacagccgggcggggaggaacgccagggctgatgaggaccgatggggcaatgcttaccccagagggtccgctgcactaaggaggggaatctcaggcatcaccgagccgtttcgggcatgaggccccgccccatccgcctgcacaaggctcctgcaccccactcccgagagcacctgactgcctgactggcagaggtggatgggaa

SEQ ID NO: 236680 - DNA, 141 bp, Homo sapiens
  chr12:113658922-113659063
  hyper
caatttattgttccgctcagttgtccccacctcctgaagtctgaccaatcagaagcaccgccattttgacctttcaccaatggaaagacttgggactccctctgggttggactcaacgagtaaggcggggaacaagggagg

SEQ ID NO: 236681 - DNA, 153 bp, Homo sapiens
  chr12:113796257-113796410
  hyper
gtgggtcccgccccgtaggcctcccctcgcgccagcccctcccatcccggaaaggctcagcccaagcccggccccgcccgccctcggccccgcccatggcagagcgcagtcacgtgacccgggctgcggggcgcagcattgtgcggtcatggt

SEQ ID NO: 236682 - DNA, 64 bp, Homo sapiens
  chr12:113796830-113796894
  hyper
tgcagcaccgccctgcgggccaagtaccctgtttgggagctggctactgcggcatccctcacct

SEQ ID NO: 236683 - DNA, 2339 bp, Homo sapiens
  chr12:113900160-113902499
  hyper
tctgagcccagcaatcctggcgccccacccagggggagagcaggatgtgtgcgtgttcgagtccggcctgctccctcgggctcaacataaacgtcaaagtaaggaagagcgggagctggacccggctggccacttcctgacccacagccctattcctagagaagctgaccttgagcctcaagattggccaccagggagcgccagcgtgcaggtggctcggtctccctctcggtggctcccggttcacgcgagttcctcgctcgctctccgtcttctccctctggctgacgctgtctctccatctcctcctcatcttgccccctttcctctccctctctttcaatctctctccttttcttatcatctttttttttaaagacggggaaagcacagcgagaaataagattacaaaatgccactcggattgcagagagagggaaaaacaccgtctccgccccttggcctcaccctctctcagtccaaagaggtggcggtggctgggtgggtgggtgggggcccggggaaagtctagagcgtgctcgaaatctcttgaccctccggagtattgactttggtcccaagaaattgctcgcggttgctgggagagtactggcggtgggctgaggctcctggagagcccgcggggtggagatgggggtcggccccccctcggcgcccagccgaggagcagctgccagttgagtgcggacccgagagagaacccccgagggacacccacgtctcccaccgcgtctgcgtcgggcgttttggtttcaggaggctgcttcggggcggggcccccgggggccgagcgcggggggcggcccggcggccttaccacacggcggcttcgttgagctcggggttgggatgcgacaggggtccgctgtagccgctggtgccgctcattgggaagggcgggctgggcccgccgctgaatacctcgccgggcatggggtgcagcgtgcccggcaggcctggctcggggctcggtgtgtccgggtgcgagatcatgtcggtgaacctggggttgtccgcggcgtgcgggccggcgagcggcggttccagcgctcccagcggcgtcgagccggggccagaggccgccaggaagctggagtcggccggggactgcgcctgcgaaggcgggccgtgcgcgaagaagtcgtagttgcttcccggcgcgtagtagtcgccttggtagtctgcggagggggagcgggaaggagacagggcgcggtgagagaaggcgaagtaggcgggggacccgggacccggggaggggacccgggcgggcgagagaggggagcgcgcgacaccgacccaaggttagagagacctgcggaggccggcgccccttgagacggtggacgtcgcaggctcacggggagggttggggagagagacaatgagagatctcgaaagggcaagagactcagactgccagagaccacacacagagacgggagagactccgagaccgtgggggacacacgcggcaaaaactcggagacttcagtcacaggttccctgacacctagagatggagagagacagaggcggccagagacgcagagacagacaatgattcctaagtgtcttagggtcggtgagagacacagagatgcgggacagcgagagacagacggagagatcggcagaggggcagagagaaaggcggaaaagagacccagagacgcggagtccgcggctgagacccgaaagcccgagacatcggagggtcgcggaggagtcgaggagacgcagagagaggaaagacggccgcggttagagacacgcgtggaaacccccgggggcggcagcgagggagtcaggagtgagcccgaagatggagagaagtcgatgcgcccagagaacgcaagacggtggatcagagatgagtcccaggaacctccagagaagcggaggctgacaggcccggggagaggaaccgggcagggacaaaccagcggacagagcagagcgcgaaatggttgagaccgggaagcgacctggccgggggaaactggatccgggccgcggcaggagcgactggtgggttgggccgggcggggcggccttggcgccctaaactcggtccctgcgccctaccaacccagtccaagtccttcgcctcgccaagtacggccgccgcgtcgatcccggtgagaccatttgtaccggcctagcctagcctgagaaagagaaaactgagctccagcgacttgggagagggggaggaggacacgaagattctctgggtcatggccagagctccgcgggctccttggggtagaagctcggtcctccagccttgccccgggttggttttgccagcaccc

SEQ ID NO: 236684 - DNA, 712 bp, Homo sapiens
  chr12:113903016-113903728
  hyper
accattaatttaattctccccgaaagtgaaggggaagatggggagcggcaaatttggagccccaaagggacagggatgggagacggccgcggcccgcggcgagccggaaaaccagcgaaggccgctgcccccgcgccgtgcgcgccgcctccgcccatatggcggccgggccggaggtaattggaacaaacgccgtctgaaaagggcacaaaagccgcagctggggctttgtccgcgctcccacggggagccgccggccccgccgcccggcccctttctcgcccgctgccggtcgccaccgccgggatctcccagcgcggattaggcggggctgcctcgctgggggctggggagtcttccccaccattacggggaacgaggggcccccagtatccagctccccacctcatccagcgcgcagggagaggaggcggtgggataggtcggggcgggggcgaagtggtcctcggggaaaccttggttaattatccaggcggggaaaaattccgggccggtaccgcccccactacctcgctgctccgggcccagattttgtagggaaagaggcaaatttaggtggagagagtcggtgagtggagactccggaagacacgcccaccatccgggctctccagggttgggggtctgtccggggttgggggtctgtccagggttggggggctgtccagggttgggcggctggggcgctcca

SEQ ID NO: 236685 - DNA, 1038 bp, Homo sapiens
  chr12:113904446-113905484
  hyper
gtgcgcacacaccccgccacatggaacaggagttgctgccttcgatgctagtgagcaggcggcttggaatgaatccagacccccatcccctcccctcacactaccctccagcgctcggaatccacctcatgccaagtacaccaggcacagggcggcaggaaggctgtgcgtctgtccgtgggggccgcatgcatgtggatttgccagtactggcctcagtgtgactggtgggagtgtgcgcgtctgtggagttgtgtctccgtgagtgtacctgtgtgtgagagggtggaatttacctatacgtgatcgtgcgatcgtgtctagacgtgtgtccctggagtctctgaacgcaagtgtgagtgcaccttgtgccctgcgtgggtgaatgtgtcactgtatctcgtgtgtgcttctgtgtgcatcactgtatgggtgagaccatgtatctgattttgtgtccaggacatgtgggtgagtgtacatgtgtctgtgatcgtgtgtccagcgagtgggcgatgttctggagcggcggaaagcgtgctggccgggacccttcgccctcagctcccggaataggacaggtgcggaacagcgaatcccggggcgccccttacctccgtagtaggtgtacggggtggaccccaacatctcagactcgtccaagcggccgcccagcggacgcatgcgccgcggactccggaagaaggcgtgcctccgggcgcctagggcgctcagctgtttcatccggcgttctttggaccgtcggttctgaaaccacacctgggacagaggagggggctgtgaacccaggatcaggagtgtcctctccccccctcttctcccttccctgactgggctgcccctgctgggtccttgcgcctcttccgcaccaggactcccccgaggcggggccgggccggattaggccgggaggggtggagagaggcttcggcgaaccagccaagggtgaaggatttcgcggacccgtggggcgactcataaagacttgggcttcctggtccccggctcgcccgcggc

SEQ ID NO: 236686 - DNA, 65 bp, Homo sapiens
  chr12:113905664-113905729
  hyper
accttccataagcaaggcggggggcggaattcagagaggtaaagtgacccgcccccaaatcgcaa

SEQ ID NO: 236687 - DNA, 169 bp, Homo sapiens
  chr12:113906329-113906498
  hyper
ctggattccctcccaaacctgcgacagcccctcccccagggacccggtgcccgcccactctctccaggcggggctgggcctttggaggggcgctcttaagccctctccgcgcgtctcagctagtacctgggtaagggtagggggacgcgtaccctctggagaactccca

SEQ ID NO: 236688 - DNA, 332 bp, Homo sapiens
  chr12:113906951-113907283
  hyper
gctggatgagctcaggtagtcgtctttgcacacgaacttgttctcgtcgatgacgtagagctcctcgccggtggacagctgcttgttacacaccatgcaggtgaaacagttgaggtgaaagactttgctccgggccttgcgcaccaggtcgctgggcgagatgccttgcgcgcagccggcgcatttcgtgccaaagcgcctgtggacacaatgtgcctgtcactatggggtgggactgcatccagccctccccagcccctgacctcttcccacccgacctggcttcggtgaagtccccatttccatatctgtcaaacggaaccccaatcctg

SEQ ID NO: 236689 - DNA, 1748 bp, Homo sapiens
  chr12:113908946-113910694
  hyper
ctccgcctgggctcgggacctttcctggaccaaggacaggaggagagcaaagtgctgcccgctccccatctaagcttgtgatccggggaggctgggatggggatgggggtatccccttccccagcgccccagtggagcgcgcgcagggtgggcgcgcaggcagcagagcggcgcggcctcttacctgaaaaagtcatttttgcagtagagcttgccctcgcgcgagaagcacttctccgagaggttggttttgcactcgcagcactgaacacatttgatgtgccacgcgcggtccagcacgttcagcagaaagcggtcgaggatgggccgctcgcaaccggcgcagtgcaccatcatagccccgcgccccggcggcttcggccgccttgccctccctttgggcccctggccctcgggcctgccgggccctccgctgcccttcgcctcttgtctcagcagctgcagggcgagtctggtccggaccaagactcagccggtccagtccttgggcaatctctggcctggcgctgggctgcccggagtggggtggtggggggcgggtggcgttcacaacctcatgccacgggccgcacgccccggcgcctgttccgggcttccccaggtatctcgggtggctgctggcctcggcgctgcggagcggctttccccggtggcggaggcgccggcactttcccccactttcaagcggtccggatcctcatctttgtctggtcgccgcgtaattcgcgcatccttattcagatttggtgacgtggcgctgcacgtagggggcccagcggccaatgggcgcaccgtggccatggcaacctcttaaatttatagcatatctaaattggctacagcgttgctgtccggacagagcaaaaaaaacaaggcatcagtattgttgagtattagcttgtacctggttcggaggctaagtaagtatttaccttccagtttggggctgacggggcgggggcagcgcgaaacgaaaattgcgtctctcttcctctctctttctcctcacaaatatttgggggtcacgggttccaaggcctagtccgggaggtacccctgcccccttcgccatccctggaacttgcagaagttgccccacgccccacacttcgctccccttctccagcccagccagcccagattggattcccccacccccgcgccccctctgcgccctgaagctgcgtcagcgcggttctcccggctcctggagccggccccggcttctttttgtcatacacggggctggggcccagccgggcctttctcatggagagagctagtggagaccgcgcggcctgggtagttttccccgcccggccgccgagcccaggcccaggcccagggtggggaggcgggggagcaggaggggtgccatttggcctggtcccgaactccagagtttcaggcctgagtgcgctgctcacggggctctgagggagatgtggacagggggagattcagggtggacgggtcttcccgcagacagctcggaggtggcactcaccacgtctctcctttcctcgctgcaccttccagattccaggtcagcctatggggcactgtggtgagtgggtcgtacggctgaggcgggggacaccagcgactatgagagcgctgtttgtattcacgccgtgcgggctgggtgtgcaagttcgtcccctcattgggcgcaggagaagcggcgcacgtatgttccgtgctcggcagggcgcccagagtgtgag

SEQ ID NO: 236690 - DNA, 139 bp, Homo sapiens
  chr12:113910973-113911112
  hyper
tgagcttgttagtgtatactcgctgtttgagaattccatttttgcatctgtttattgtgttagtaccatcaatcctgtgagtaaatttctgcgtgtgcgttttcgtgtgtgcagattcgtgtgtttgtaattgtgtatg

SEQ ID NO: 236691 - DNA, 765 bp, Homo sapiens
  chr12:113913003-113913768
  hyper
tcccgacctaacagcgctaacagatggcgaccaggcagcgaaatcccctcctatatgtaactaataaaccgcttgtgtcttaacagggtaatgcatggagacgcaatgtcacttatacaagatgttgatggaatttactatataaaaatcttcctcctagagtaaagagtatcaacattacaactcgacagacggcggcgggataagtaaaacagacaaaagacaaacaagataataatctgtttccaatcacttaagccctgtagagttagtaatatgcggtttgcatattcccccttgagttcggtaattaattactggcgaggaggcgcacactagcctggggtgggagttttggggagcgctgagctggggcgtggggcatacctctcttgagttctccagcccgggacaccgggcagcggccggaatgagggcgcttccagaggtttggagctgacccacccgcgggttgaagaggtcgtttcagttgcacctccctattcctcaccggaaagcctccggcctgggagattctgcagccaagcaggaaagggggtcttctctggcagccagtgtctctcctggctcctcttaaagcatcctctccttcgaacggccgggagtggcagctttattgggaaacgcgcgctctgggggcccaggtggctggggggaccggagaggcgcgcgctttgcccacttctcttggtggcatcttgtgcgacccagcccgtcctctcccgacttcgatcattaccgctc

SEQ ID NO: 236692 - DNA, 58 bp, Homo sapiens
  chr12:113913948-113914006
  hyper
agccagccgtgaaaaattatactggtgtaccactgagaaactgttttgccgcaaagag

SEQ ID NO: 236693 - DNA, 253 bp, Homo sapiens
  chr12:113914366-113914619
  hyper
agagggatggcgggggtgggagtggggtgggtggggggtggtggtgaattttctggggaacccttgggggtggccgtctgagagcggcccggagcccaggcggggagagtgtcctggcctgggtggaaccctgggaggcgggggcgtcgtggctggtgtgccccactggcgctaggccgtggattgcttggtttccagaacatctctgcggggcgcagggccttcctgtcagttgaatcgtgctcggcttaat

SEQ ID NO: 236694 - DNA, 361 bp, Homo sapiens
  chr12:113916262-113916623
  hyper
tttggcagccccagcgctgcgtgtgtgtgtgtgtgcctgcgtgtgtgtgtgcgcgtgtgtgtgtgtgtgcctgcgcgtgtatttctcgcttgctaatgattgtgtgttgatagagtgatgcagtggcctcattagcctttgtttagaaggtgttaaaagggaaatctgcatcgggaaagcggcggtttacgcagcagcccggctgaacaccgcgagccaaggggctggggggcggggacggtgcccaccccccaggcccccactcttcccccaggcgcccaccgccgcggaccccgggagggaggaggggtccggggaaagcgaccccagctccttcctcccaaggcgagtatgtttaccc

SEQ ID NO: 236695 - DNA, 55 bp, Homo sapiens
  chr12:113916653-113916708
  hyper
actgcgggatcgcgctctctaaaactcctctcaactgccccgcagtgcgcggcgg

SEQ ID NO: 236696 - DNA, 1062 bp, Homo sapiens
  chr12:113917065-113918127
  hyper
cgggaacaaattccgtgagaataaaatcatagctaggctggcctacttccctaaagcttggtggaagcgagtaactttattgagtctgggctagagggtgtgtgtgtgtttgtgtgtgtgtgcgtgcgtgtgtggtgtttgtttacatatgtgtgtgggatttggcgagtgagcttcgtgcacggcatttttcaccctctggaagaagccagatttcgggcaaggtagaacgtgagaagaatcccttttatactggctcctacgaaaggaaccagaaaaaaaaataatacacattttgagcagcctctgtgggtgcagcttgttgaactcggagccagacgctttttctggcgaaacggagaaaaaacgccgcggaaacggtgcgcagggttggggagtataggttctgattgcaacataattccgcaagcttttttattttttatttttcccgggacgcggttgcgtcggaagaaacgctttctaatctttctagctccctggatttgaagttgcgggtcttggggcgaggcttagctggtctgggggtccttgcgtgtccacagccccggatacgcacccgcgaaacgttcgacatcgccgcttttttgttttgttttgctttgtttttttagtcgaaggcgaggcgttgtttggggacagatcgcggccggctggggcctcgggcagtgacagtgaaacgaattccaaacccattctgaactcgccatggcgctctcctgccctccaacacccaccccaaacaccgtgtaggcagaagcgaggttccccgtgaagccgggttaaaatcggcagctgagatgcggtgggatgggatcatagccgagttcggaggatgcggggagagaatagaaaaatctccatcgttctgctctgctctctttctttctcctctaagcaggtttgccggagaaggcaggggtgagccacggtggctgcccggctgtgcaccggcgccggagtttggaccaagacaaagacaggagctgtccgcggtgctgaatcggcggcgccgtcgccggagcaagggggcttctgtaa

SEQ ID NO: 236697 - DNA, 46 bp, Homo sapiens
  chr12:114029798-114029844
  hyper
tctgctaattcactaccccgacaccgtctcatctcccctgcaacca

SEQ ID NO: 236698 - DNA, 165 bp, Homo sapiens
  chr12:114404167-114404332
  hyper
gtccggaagtaggcgtggctaatccaaaactactcagggaggtcacaccccacaaggggtgggcctgggcgcttgcattttgcgcaggcgcagggccttgggcggattctgtgagacgccaatgcagcggagaaggcggcagggggcgccggtccctaacatgcg

SEQ ID NO: 236699 - DNA, 404 bp, Homo sapiens
  chr12:114833813-114834217
  hyper
ggcctgctttttcccgggaactgcggaggttgtctctgtgactttgattatttgcattgatgaccctggggcaagattcttggaccaaccctggagtccggccccgatcgagtggaggtagttgggggaggcgagccgcggccgggggcgggggagggacgaggaactcgcgggccccgcggctgcccgaccccgggccgcgcgtctctaatctccggccgccgtggcccggccgcctccccggccgatagcgacgccgaccggggcggcgtggcgacagagagacgcagcggggccccgctggccgccacagtccccggccggcggggccatcggcccggcttagccaaattgctttgacggctggggacagtgtggagacatcagcgcgagggcgatctaat

SEQ ID NO: 236700 - DNA, 31 bp, Homo sapiens
  chr12:114837908-114837939
  hyper
cccagagatgcacacgcgtgggtgcgcccag

SEQ ID NO: 236701 - DNA, 849 bp, Homo sapiens
  chr12:114838222-114839071
  hyper
ctgctgcctttctgcgccctggcgcactccaaatttccctccaccttctgaggaacatgccccagaaagcaaagattctcaaggctggcccggggcgaaaagacaagttggcagatctcggctcactcagcgatggcgggaacggtcgaatggaggcctctccctccgagccccggagccaaagcctcgcagtgtttatcagcctgagcgagcgcgcccggaggcggaggcgcagaagacttcgcaggccttttatagttaaatcctcacggctcaggctcggggggaaagagggactcggacgtgtctttccttcctgggggaataggaagaggactgcagttcgttgatataaacagaacgcgcctcctagttcactcaggccttgggccgagcggggagcagactttgtttaattttaaataataataaatgtcactgttgtcagtttattgagggaggcttcggctggagaacgggggcggggggcgtctggaaaggcggctccaccctcccccttcacacactcggtggcttgggcctaccgttcgcctgctccacacgcctgctcggggcatcctctggctttttgctttgcgggacgcggaagacccgtccagcacgggtagggatgtggccaggacgtccccaggcctgggcgcgcgcgtgcacatgctcacacactcacactgacatacagagctgcaccactctccttcctcctcccccagaagtctagcatttctagctaaaactctgcgagcttttaaggggaactccggggcgagtgtcttggcgaagctgccgtgtttattggtgtctgtatatagagcccggccgagccccggt

SEQ ID NO: 236702 - DNA, 240 bp, Homo sapiens
  chr12:114840977-114841217
  hyper
ctgtgcgctcccagcggccggtgatggcgcgccagccagccaggccccgaccgcaagacaaatggtgcggcgcgcgggtctagtcggcggcgcggaggaggcaggaggaggcaggaggaggcgggaggaggcgaaggctacggaagatcagaagaggggtcaagccatcgctcatgccggcctgaatcggccgctgacctggcccttattaagatgctgggggccgattctacacatagt

SEQ ID NO: 236703 - DNA, 39 bp, Homo sapiens
  chr12:114841856-114841895
  hyper
ctaccagcacctccgttcccagccgaaggtgactgcaga

SEQ ID NO: 236704 - DNA, 945 bp, Homo sapiens
  chr12:114843002-114843947
  hyper
gacttgcaagcagctttcttcgcctcgttctcggggcttcagggaggcggcgactggagccccgctgcctactcacaacaaaagaaagcagggctggcgcccctacacgcgctcccattcactgccggccgcggggagaatcctaccccgcgccctcgccagggtcccggggagctctgggctggcggaggcgaacaagatgcggtttgacagaaccaggccgtgcttctgcaaacctcaatgccgctccgccagccgcggcggcctcccagactccatttgccggggagctccgagccgcgcaaaatctctgcaagctgtgctctgcagaatgcaaagccgggctggaatccgccattcccgccgccccagccgactcggccgacgagctccctcctgagcctcccgggccatctgccgggacggttacctcgttcggtgaagccggtgcattcaccacatcctctgctgctcctagcagggaagccggcggtgaggcgggggagcaggcatggtggctccggggtttatgcggggtttactgcttacccagaatagcggctactgctgcctactagggcgcacctaccgctggagcctccgcggcgactgcccacctccaacacacacctcctctgctgtgcgcttgctctccctaaatacttcccagttggcaagcgccaaagaacacaaaatagcctccaagagcaccggcaaccatataatctcagtgccccgctcctcctttacacccccagggagggaaagttggaagcccagtgaatggtcgaagtcctttctgagcgcagctttcaggattaaagttcccggattcgaggtaagagtcagtctctctcactctctctccctctctctctctctctgaaatacaagccaactcagctgagcacagtgacgttgggttgcctcgatgctcacaaagta

SEQ ID NO: 236705 - DNA, 620 bp, Homo sapiens
  chr12:114845898-114846518
  hyper
acttggagacgtcacgagtcacgcaaccggcccgcgcgctgtcacgtttggctggggggcagcggcgggaggtaaatttctctccgtcttcgcctatcagtgccgggtctgcgcagccacaggttccggacgtcttggccccgggaataaataaagacataaaccaacccggctttctccggaggaatgagggtgatgaacataagacacaaatagagccaagatcgactttcttaggaagggggagaggagggaactcttcacgaagggaggtgggagtccacctcagacctctattggaaggaaatcgagttgttccgggggactgaggtctcttgcataaggcatgggatccttattattattattattatttttaaatcccccgcggaggagctctgggcaaatgaataccgaggcgccgctctagctggttaggcttgggatgcgataactcagtgccctcttgcagacttgcatagaaataattactgggttgtcgtggaggggacacgagacagagggagttctccgtaatgtgccttgcggagagaaaggtccaagaatgcaattcgtcccagagtggcccggcaggggcggggtgcgagtgggtggtggag

SEQ ID NO: 236706 - DNA, 874 bp, Homo sapiens
  chr12:114846782-114847656
  hyper
gagccggagagcgtcgggccttccggaagggtaagttctccgccaaggggtcccgagggagctggacgtctgaatctggacttgcccccagcttcggggttcgattctgggttttgcgcgtccccaacccccagggctttccgaagcatggcctggctccaggcccggtcctgtaaggactggaacggcagcaaaatgtgcagggaggcagtcggccggcagagctgcggcgggagccaaggtcaggcccgcggggagagcgggcagcttccagcgccggccacaagctcccaggccagctgggccgcagacccctttgcttccagagagcacaacccgcgtcctttctctcagccaggctgcagtggctgccccgagcttcgctttcgtttcccaagctgttaataacgatatgtccccaaatccgaggctcgtgtttgctcccagatgccaagaacgcaacccgaaatccttctcccaaaccctaggtcgacgagatgagttcctacttgacctctgagccgaggtgggccggaaaccgaggcctaggccccgccggggctgcaaggaaaaggggaaactccgagcgtagcgtcttttccttgtggttcctttctccggcatcccggactgcgggccctgcagccacctggaccggcattcaaaggattctgcaagtccagcttcacagactggctttcccagacgctccgaagcccgcaccacgaacagaataaaggagagacgagagatcgcaactagatttgagaatcctcgttcttttccccaatcgttcgggcagtaaactccggagccggctacagcgcgcatcctcccttcctcctttcggagaactgtcgctttcccgaagctg

SEQ ID NO: 236707 - DNA, 475 bp, Homo sapiens
  chr12:114851899-114852374
  hyper
cctgctggaaatgcgcacagcccctgctggaaatgctccttccctttccctactctcccgcgccttcaggtagagcgtttaagggattcccagcagttcccgagtacacgtggaggctgctccccggcgtgctggagcggctgcgggctcagtctgcggagggcgccccggtgaagtgtggagttcgcagtcggacgcggccgcccggcctctcggttccgggccttcccctcccaggcactgcgttctgcggccgggacagcacccgccaggcgcggcccttctcctatctttgctctgtggctctccctggggccggaggagtcctgccgcctcaaggccccagactccgcacccggagggacttgccgctagcgccgctccttcagcctccccaggcgctcccttcgcttcccggtgtttcaggctcttcccaccgcctgtttgctctgggcgcagcgctggctgccacact

SEQ ID NO: 236708 - DNA, 275 bp, Homo sapiens
  chr12:114877145-114877420
  hyper
ttaagtctaattagcgagcccgagctaaaaggccgccacagcggcggggcccagggagaaaaagcagcgttcccaattcccatgcttccagctccaggttgtcggtcttttgtcagcctccgaagccagggtgctcaacctggccccctttctttcctgctggtgaggccacccgctttgggacagaactctgggcctgcgcctcagctctccctcttagcgccccggcgccccggcttcccaagcctggggactgagcccgcagacgcccatgg

SEQ ID NO: 236709 - DNA, 1399 bp, Homo sapiens
  chr12:114877707-114879106
  hyper
tgctacaaataatcgcgtggaagacggccaagaataaccagaaaataaacacagctcccccggccctctgaacgcaggccgcgggtccctccaggccccacctggctcttctccggcctaggggaggcgaggaggccgcgccacgatctctgtactcattgttcccatggcgctgcccttaaccctcgaaggactgctcccggacctcgattccaagcagggtgaccctctggcctttgtccccgctgtctttcctagcaggaaaactgtcgggaattcaacctctgtcaaaaaataaaaacaaaaaacaagaacaaacacccaaaccccaacaacaaagagagaacgcggactccagacagttttctcctttcaactctagaactttcccggaaacataagacacccagtgctcatcgttacacccttaggtctgcgcctgcgggtgggggccacgggctgtgccggagcgcatagccgcgggtgtgcccttaattttcatatatataatgaagtgtctgcgcgctaacgcgcctgcaaataatgtgtgtgcgcaaagacgtttctgtctacagataattacgcgtaaattatccgtggcaaacaacatatgcaaacgacatatgcaaacaacatatgcaaacgattatctatgtgcagataattccatgcccacgagccgacagatttgcaattctcaagtacttctatgtgcatgtaattctacgggcaaattgttccgagtgcaagggatttggtgtgtgtgtcagtgattgcaccgctgaaaacaattctgtagatgtgtcgatgcctttagaagaaagggctccaaagaatcgtgtctcgatggttggtcagcgcgcgcatctgcggcactggctaaatcccgggaagcagcgcggagaaacaaaaagtgcttttcttccagccatgccttctccctgcggaaaccgcctgctccctgcgccgcacggaaagcagaaggcggaagggtgggttaggtgttctgggttctccggcctcctccaagcttcgtgctcggtgaggtacggcgcgttcaggttgctgcatcagtttgcacagcgctgtgccgcgctcagtcgggaattgccacagacgcccgatttcctcggtgccatgtgggctcctagctgccgccacagagcggccggatcctaccagggtttcccagtgcccgggtacctgcaagaatcttcccaggacgggagcagtgggcactgagcagcgctgccgggagaaagatgttgcgttttgccaagcgctcacccgcgcttcaaaaccccagtcggtaagaccttgcgtcccccacgggcactaaaatggcgaagcacgtcctggctaacgcagtctgtctcttacagcacgctcacgtgcgcct

SEQ ID NO: 236710 - DNA, 172 bp, Homo sapiens
  chr12:114881977-114882149
  hyper
taacccccacgtttgtatgcctcctggggacaggggtctgtctgcagcctgcagcgccccagctgtgaccagagaagcattaaggagcggcgcgggcaagaatttggcatcaaaggaaatactgtaggtttcagcatcggtctctcccgctgatcgtcgggctccgcggggc

SEQ ID NO: 236711 - DNA, 610 bp, Homo sapiens
  chr12:114882413-114883023
  hyper
cctacacttttctacgagctttgcagtcacttaatctcccaacaaccatcggggtagataccgttatatcgccattttacagagaagcaaacgggaggtcaaacaggctgacccaggccgcctagttcctgcggggatttgacgactgtgggaatcccgtgctcggaaggcgggcgttgctacagggcacgatgaatgttgagcccgtgccccaatttcgccagacttaacgacaattcctacacaagtccccccagcaacaaggagggccagccttcgctcctgcttctctcttagttgtatatctggagccaaggagtccaaaacagctcaccagctctaagtgcacacatatcagggctgggagccggaaccgcctgggcatgcgttcctgcgcgcttactcctgaggccagggaaaaaggtttgcctgcgatcctgaccaaggccacgcattaaaagactgcgtggaatccttaaagcctctaagaatctaacgtcctaagaaagaccaccccagaagtagatgtgatgtacctaagccctggcattcgggctctgcgcctcaccagcgtctttacgcacaggcgcaattgcgccgggcactaggg

SEQ ID NO: 236712 - DNA, 109 bp, Homo sapiens; identical to SEQ ID NO: 203209
  chr12:114883302-114883411
  hyper

SEQ ID NO: 236713 - DNA, 262 bp, Homo sapiens
  chr12:114885374-114885636
  hyper
tggaagaaacgaactgggggccgagttcgggcggcgatctgccggggacccagtcctgagcggcttgtttgggatactgggattaaggcctcagaggagcacatggctagcctctgcagccctcggagggtcactgacgccccctgcttttccttccaaatgtctttccccgaggctggggacacctgttctgagcagaagagggcaatggttcaacctgtttgaccccgcccgggtctccttctgcgggaacatacgcccc

SEQ ID NO: 236714 - DNA, 864 bp, Homo sapiens
  chr12:114886016-114886880
  hyper
caggagtcccaggtcgagctgtgggaaagagaaaatgcggatcggaggtcaggtgcacccttaccggcaacttggggtacacaaccggggtcccagcatcacctcccctcgccccgcgctcatgtccccactctgaggcccgtgggcactgaggtggcaccgacctcccaggacccctgcattgcctcacactttcacttccctccctgctccgcagtgtccataaaataccagccgttcacctgcctatagcgaacggatccgagggtggaggcaatgacttacctggttgtgggtggatggatgaagaaggcctttacttggagcctaagccctggcgcgcgcgcaccacggcgcgaactgctccatcaagcatccactggcctccagccgcgtttccggttgtagcactgggcgcccccagagtggacccgataagctatcggcgcggcccaggaggggcggtcagcggcgagtcagggcacctcggaccggctcccggctcccggtccggctgcctgccagcggccgctcaggacagaagcgagatgcctgcctaggcgtttctggttacaatcacctcacacaccggcctgcattccgcctccccaacccccatccttaccacgaagtctgaagtcacaccttctccctggctgggaagctttgccagggtgggggcgatgagtgccggccgaggttgttaatctaaggagctccagcaggtccgtaaaaaggaatattttcggtggccagaaaaatcaacattgaattaggtgtgtcacccgcacccccccgcccccgcccatccaccaggagttcattctctactcatttagccgggactgccgtgtgttcctgatt

SEQ ID NO: 236715 - DNA, 389 bp, Homo sapiens
  chr12:114917591-114917980
  hyper
aactccatctagcccgtcctccttaatcaataaaacaagaattaggtctcagatccaagagtcgctttctgtcttccagtttatgactttggccacctcgcagtcttttagggtcgccggaccggcttcctggaatacctgaggtcgcagattcaggtagtaaacagatgtggggtccaccctccgccaaatgggcggggcaagttcaacatcccgcctccccgaccttaagtgcgcagggcgcctggtgctcgcttgccgaaaacgttaaacatttttctttgatcccgctctttttttggggggaaaaatgtctggggaagagggaagtagtgggggagtgaggtgcctgcccaagcgaaattttgatgcccgcctgcctctggctc

SEQ ID NO: 236716 - DNA, 76 bp, Homo sapiens
  chr12:114918239-114918315
  hyper
taatcgcggcgctgcgtacctttgtaagggtccttaaccttttcacccttttggtggtggcggtggtgggctcctc

SEQ ID NO: 236717 - DNA, 84 bp, Homo sapiens
  chr12:114918624-114918708
  hyper
gggggtctccgatgcgaccccggactcggagcaggaaatcctgggtgctcctgaagctccgcctgccccgggttccagcgagag

SEQ ID NO: 236718 - DNA, 139 bp, Homo sapiens
  chr12:114939043-114939182
  hyper
ttaaactcgtctccggcccctccgatctgcagctcgatcaggggcagacactgttgagggaagccagagagaaggggcaggcctgctggcggtcagtgatgcatgatggaaggaaccgggaggcgcgccctggaagcag

SEQ ID NO: 236719 - DNA, 843 bp, Homo sapiens
  chr12:115106007-115106850
  hyper
aggcgctggggtgccgagccagctgcggcgacctggacgcattcgtagacgagacagataggtggcactcgaagcccagaaaaaaggcgaaggcgcctgccctgagtggcctctggggcggccgcagccaccataaagcctgcggcgagattgcgaccggcgccaggtgagtaataggcagcaaaatccagagagactgcgagccgttcatcccctccaccccccgcccatcagcgctacaggagttactcattaacatcacaatatacaaatgagatacacaggagattaaaaaaaaaaaaaaaaaaaaaagaggaacgccagtaagagaggctggacacaagtctgagcagggtccccaaatcgggggcggggggagagaagggaggaggtaagcaaatttggactgagaaagaagagaaaagcaaagcatttcttcccttttggaggctgagttcttttttccccaattcgggagagcgcaaccagccaactaccaccttctcagaggcgcggacaccgcgcgttgtcgctggatccagagctgcccccttcaggctgtagccgctgcgcagaaggagcgcgccctggaaatctcccagtcctcgggggagccccagcctcaaaggtccccagggcccgtctcagctcaggccctgccacccccgcagcgcaccccgcccctccccccccccgcgactccgcaccaacatactctggttgtctgtcttccctcccacccccggagacatcgcagaggaggctgtaggggtccccacgtgcctggccagagatggaaggggctttgccccgctctccaaaaggtctcgacctcgatccctt

SEQ ID NO: 236720 - DNA, 2284 bp, Homo sapiens
  chr12:115120681-115122965
  hyper
ctccaggtgcaccttggggtcgtcctccacctcttcttcgggctccatggtcttcaaaggcctcagatgcgcctggggccccagggaggagaacgggatgccggtctcggccgcccccaccaattgatccatgatcggcttggccagggcgcccggcagcgagagcgccgccgcgccgttgggaggcagcgtcagcgcggggaagaacggcggctggtgacccagcaccgcgctcatggcgaagtccggcgcccggtgaggtaggaacggatggtaggccatgcttgtcccaggaatgaccggatctctcatggagaggctcatccactccaggcggggcgctgggctccagccggggacaagtccgcagctgctgtgttttgttgtttttttgttgttgtttaacagcagcacataattcaaaaggggggaaaaagcaaaacaaaaaagaaagaaaaaagaaaaggaggcagaaatcacaactaatgcacttcaaagggaggaggggaagtgtcttttggagaatgggaggccgcttttaaagagggcaaggcgaaaaatcagcaaacatagtcgcgcgggtgaccgtccttgtgccttgcgtttttaaaaagccgctcctgaacgtcggtttcagaagcgagaggagcgagcagggtctcgactcgcgcccgagccctgccgctgagctcgaaatagacactccagccctgcgtcccaggaatctctctccagcccctaggtcttttgttgcaaatgtgaaaggttctcctagaagactttttacctttctttttcttcttcccccgccccctatctgtcttcctctccctctttctcgctggtggcgtctgcagctgtgctagacccggctttaacagggagcgagagagcggaaaaagtctctctcctttaaaaaaaaaaaaatctgatttaaacccccttctaccagcgctatcaaaacttgaattgcaaactggcttccgttcgccgccctcctcctccttcctctgctccgagcctccggagggtgtctcggtttcaatccaaatcttgctgggctcttctcccgtgcctctctctcttccttgtcctaaaacgtgagcgaattcgcttcctaaatctgtgtccaggcgcgcagggcagggaggatttagagggggaaaaaatggaacagagggaaagagagggaggggagagagagagagagagagagagacggagtcggagagggagggagcgagagaaagcgagagctcctcgccaccctccgccgcctctagaattcaccgggcgtctgctcggcggctctagaaggtcgggctgcgctgtgggctgcggggagccggaggcctcttgattggctctttgacgctttcggaccaattgtgttgctgcataggcgtggttttcacaggtcgagtgctgggggatagagctgagttataaaaagaaggtgtcggaaactgtaacgtcgcagcgccgcatcggtactactgcctgtcctgtgaatatgtcaacatgatcagagggcgggcgggagccactggggagcgcgcgcgcacagagtcgcctctaggtggcttatcgagagatcgctgcagcccctgagctcgctcgctcgctctggttcagcccacgtctgaaatgcctcagtcatccagccggggatcgagggaggaggcagggccaaggaggaagggggagggagagagggagggagccagcgagcaggcgagccgggcggggaaggcggagagcgcgcccgggcgccgggcaggggcgctcgcctctcttgcactccgctcgcctctccgaccgccgcggccggttctctctccagctctccttcttctccccgccccgggcgagccgggcgggtggccgagcctccccgcgagctgccatccggccactcggttctacaaaagccggcggcagccgagaagcgagcgccgagactccaggcttgcgtgctctccagccccacgtggagccaagctccgcccggccgccgctgaagggctcccgagctcgggtgtctcggtgctggtctcccctgcgtctgggctgggggagcacaaggatgcggccatatctcagcacacgcatgtgtgggcttcctctccactgcgccccacccgcagccatgtgcgggtacccaaacacccccggtgtatctgtactcgaacacgcgccaacacactgggactgaaacacacaccgaaaaacacgtacacacaaacacgtacacagcctgcgcggctggccctgcctgagctcc

SEQ ID NO: 236721 - DNA, 193 bp, Homo sapiens
  chr12:115130546-115130739
  hyper
cggtaaagaccttgcggggagccgtggggggcggggaggagtaaccaaaaatgaaagagaaatgtaggactctctgtctcccaaagtggtggaaaagcaattgcaaggagatggctctcgggagaataacaggctcagagagaacgcagccgagcgggggaatcttcgtgcgcgaagccgggagggttgcggg

SEQ ID NO: 236722 - DNA, 163 bp, Homo sapiens
  chr12:115138445-115138608
  hyper
gggcgaaatgcctgcgagggagggttggcgaatgggttggttggtggcaagactgcagttcttgtacatggacgggggttggggggtcaacactggaagaactcctgcctgacgccaagagccacccgctttccagctcgtcccactccgcggatgtttaccc

SEQ ID NO: 236723 - DNA, 303 bp, Homo sapiens
  chr12:115889541-115889844
  hyper
atgttgctcaaacacagcagcgtcgtgacagtgccaatagccagcagtctcctgtccgcgtgggttgcgagccccgggcgtggacggagttgggagcggagggcggcaggtgccagcggggcccgcctctccctgcaggcggccccggcaagttcacggccggcccggggcgaggggcgagcggcgcgcggccgtgcggctcattctaccgccctgcgtgcgaaggggaggccgcgcccccgcgcccctcgctcgcgccgtgcctgccgccgccacccgcccggccgccgggccggccactga

SEQ ID NO: 236724 - DNA, 248 bp, Homo sapiens
  chr12:116354935-116355183
  hyper
ccccgactcagcgcggtcctggcctcacctggtgctgctgaccgcccacgcccgccgcccgcctttcatctcccctgcccgtggctccgggcactgctttcccaattgcccggaccacgccagcgcccgggctctcggcttcgcgcggggctgggcgggcggagcgcggcagcctccaggtagggccgccgccaggtgaagccgcgccgcttcgcctcttcccggtctgtggcgacacctgctggccg

SEQ ID NO: 236725 - DNA, 203 bp, Homo sapiens
  chr12:116713913-116714116
  hyper
tacatttttaatttcgatgaatctagacaccgtcggcgggtgccaggcttccacgagaacaattgacaccctaactgcttcaagattaaggcaggcgattcaaatccgaaggaaaagttgtcaattatcagaaagagagagcgcgagagaggcgaaggcagataaaagcgatgttatcaaaccgaccagcttgttgcttttgt

SEQ ID NO: 236726 - DNA, 143 bp, Homo sapiens
  chr12:116714176-116714319
  hyper
gagaaaaacagtttttaaaagacacaggaggagagaaagaagaaaaagctttctccaccttccgtcggctcggtgcaatggctttacggctctccagcatagtaagccccgagaggcaggcggctgtcgatgtttacaatcgc

SEQ ID NO: 236727 - DNA, 569 bp, Homo sapiens
  chr12:116946058-116946627
  hyper
aataaatcaaaccaagccaacgccaagctctgcaagctctcagcggctccagcgttttcaaggagcggggtcaaggtcaaagggcccctcccaggctgcccgggcggggctgtagtgggatgctggtccccaggctgcgcctcggttctccagggcgaaacgcaggggcggggccgtgcaggggctgggcgtcgccgccggagagggtcccagcgcgcccaggcctcccgcaggcgggacgcggcgtcggggggctgctgcgctgctcggccccagcgggcccgccgcgccgccgcggctctggctgcctcctgcatgccaattaggccctaatttgatttctgttctatctgtgcgaaccccattaaaacccaattccgcttattaccaacagctttcttgcaacgcgacgcctctccctcccagggccgctgctcaggcgcgccgaggagccaggctccgcgcaccaggctggcggggacaccttccccgttccccctgccctgggacgtgcagggtccccgctgattcccgccccggggctccccgggtccaggctggggcccagg

SEQ ID NO: 236728 - DNA, 511 bp, Homo sapiens
  chr12:116971004-116971515
  hyper
cagtgactttaggaacatctcgaaggcgacagattccagttgttaaggctacgatgaaatagcagaagactctgggaagcagcgtgcaacgagtggcaaaggagcccctaacgctctttcttctgtgctcgccccgccccctccggcgtgggccccgccccgactaagccccagccaggccccgcccccgatgttagcgcaagccacgcctcctcagctcccagccttctgggtccgaggctcccacctgctctaagcgcttggtaccagggagggaatgggaggacgcttgcgggatagggaggcgggggctggaaattggcagggtgagagctggggaaactagtctgggacgcagccctccttgtcccccttcttcattcacccccttgttgaggcccttggcttttgcataatgtaagtacttatttaatgcgtgtgctggctcgagagctctgcatttgtctttctgtccttcatatgccagtgtacctccgccttctgtctgtct

SEQ ID NO: 236729 - DNA, 258 bp, Homo sapiens
  chr12:117175870-117176128
  hyper
tgaccccgccctacgccccgcctccgctccgcagcgacaagggctagtcgcgcaagatcttctcaccattggtccctaaggaacggcggcctcctattggttaagtgccgggaaagggggcggacaatcgcgtgagtgctgcgggcgtagctgtgcccgggtcctagcgccggacccggcgacgccaagaaaccacccaataggaggccggaagcatcggaagtcacatgctgcccaggctgcgcgggtgattggctt

SEQ ID NO: 236730 - DNA, 204 bp, Homo sapiens
  chr12:117316476-117316680
  hyper
ctgggaagccgagcggggcatcctgaggtcagggcgccagaggctgcagaaccctggagggtgtggctgcaggggacgcccgggcgggacaaggcaggtaggagaagaacccagaggtgtgggaagagggtgtctccgagtcagggcgcagcacggaagtaactctggggtagaaggcgagggcggggcgggggaaataaactc

SEQ ID NO: 236731 - DNA, 43 bp, Homo sapiens
  chr12:117317742-117317785
  hyper
ctctccctcattctctgcagcgctcctcgctactccaggatcc

SEQ ID NO: 236732 - DNA, 359 bp, Homo sapiens
  chr12:117319770-117320129
  hyper
taacgtgcccccagcgcctggctagaaacctgaccctaaagtgcccccagcgcccggtgggaggctggatgggcccacctgagctcgcgtggggcgcggacggaggcattctcgctgcccggcacccgcacccaaaagaccctcgcaaggggctttctaaagggaaacttcttgtctgctttctttgtgaacattattttcctgatggcgttacagttttctgcgatgaccccgatttaatgcgcagtggagaccctaaggggtcggcgagaggaggggcgcgggggactttaattcccccttttccaatccgacagccactcctgtgcacctccagactggagcgtctgcagttgtca

SEQ ID NO: 236733 - DNA, 228 bp, Homo sapiens
  chr12:117348613-117348841
  hyper
tgaggggcagctgcgtaaacctctgctttgggcgccacaagccacaagccggaccaccacgtgcgtacaggggcagcgccgggggcgtggcgggggcgtggacgcccacccggaaccctagagcggcggcggcagcggcttccggccgcggcggacacttccctgggcgggactgtctcgtggcacccggtggaaccgaggagaacgtggagcgccgggagcggcgaa

SEQ ID NO: 236734 - DNA, 97 bp, Homo sapiens; identical to SEQ ID NO: 203223
  chr12:117349182-117349279
  hyper

SEQ ID NO: 236735 - DNA, 1024 bp, Homo sapiens
  chr12:117536375-117537399
  hyper
gccgatgcggggcgcgcagcctttgctggtcccgggagactcagcgaactcaggggaggacgctgggctccgggcaaagtgctctgcggccgctgcctcgctaagtctcccagccacccgcggggatgaggctgcctgaacccattttacagatgcgaggacgaaagcaggcgccgggcgccggctctcccgactaaggtcacccggccggggagcgtcggagacctgttcccacccaggtccgccgacttcaaaactttccgctctcgcgctcacgaatgcaaacgactctcaggtgtggggcgcgcgcgccagcgggggtgcctgagggacttgcccgcccggcctgaggcacctgccctgcgcttgggaagcctgggccccgctccctccccggtccgcagtcccccggccagggagttcccgggccagtccgaagctgagcggctgcggcactgagcatcgccgcggagctcctcgccgcagcccgcgaggtggccagcggggacccatttgaaagaggaggagactgaggcgcagagagggcccgccactggcccaaggtcacacagcgcggcggcgggccggggtccccaacagtggccgttcggaggtcccgccccggtccccgcgccgccccccgcgggtactcacagccggtcttgccctcgagctcccgcacctcctcagacgcggagtgggcagcgcccatggtgcccgcggcgggggccccggggcgcgcgtccctctcaggccccgcactggcttcggctgcgcagcggcgggactggcctcgggtccggcctcgggtcgggacgccggcgaaggctcggagccgcgggttccgcgtggggccggagcggggcctcatataacggcggagggcggcgcgccgcggtcctagcgcacgccggtttcgcgcactgcgcggctaggggagcgccccgccccgccccggcccggaaaccgccgggaaggggaccccggagcccaccgctctggagtccccgttcgtgcagcagtg

SEQ ID NO: 236736 - DNA, 151 bp, Homo sapiens; identical to SEQ ID NO: 203225
  chr12:117628333-117628484
  hyper

SEQ ID NO: 236737 - DNA, 41 bp, Homo sapiens
  chr12:117797360-117797401
  hyper
gaggtgagatgaggcgcctatgggcgcgctcgcctgcaccg

SEQ ID NO: 236738 - DNA, 639 bp, Homo sapiens
  chr12:117798056-117798695
  hyper
cagtgccctgggggtgggggcgagcgtctggcgtcctctggggcgcagtcccgagagagccccttccgggacctcggacgcaaggcccctgagtggccctggaagttggatcccccggggaccctgctccgaaccctggccacctggaagcaacctcatcgagcgctccttccactgcccagccccgaaccgtggcggaacgcgcccctcggcctccctagagcctcctttgcgggagaagcacaactttcccaggttttggagacggcgctcttacaccccaatctcgcccagacggaagaagtgagaggtgcgggcggccccgccatgaccgcgggaggagagcgcaaggaggctcctcgcaaagttggaggccaggccggagcgatgttccgggagcggagccctcccagcctcgggcccccagccgcggacagctggcagtgccaaagactccgccattacctgcggctcgcagttgcgattcggccgcagagtcgggcaccgaggaaggcgtaaagttgagcttgggcaggtacaacggtccccagggactggcatcccccagcccgggctgcccgcgggagggtagcgagctgtgccaagggctccgccattaccgccagcgcacagctcgga

SEQ ID NO: 236739 - DNA, 105 bp, Homo sapiens
  chr12:117799175-117799280
  hyper
ctcccctagcccccactcctcccttctcttcttccctccccttgcgtcccctccctcagcctcagcgaacccaagttcgggacggaggctgcgggcttccccggc

SEQ ID NO: 236740 - DNA, 37 bp, Homo sapiens; identical to SEQ ID NO: 203226
  chr12:118313953-118313990
  hyper

SEQ ID NO: 236741 - DNA, 367 bp, Homo sapiens
  chr12:118541717-118542084
  hyper
accccgccccctgcgcccgccagcctactcctgccggcggaaaacaacaggagcgggatccctcccgcctcccagccaggcgggagcccaacttcctctaccttggcccgggaggagggctttctgccgagggcgcgccgagccgggtcccgccgggccaggggcggggcgcggaggctgggccctccccagtccactccgcccgggacagcagtaccgagtcgcggggacagcgggcgggacggagccctgcagctgccgcaggacgcaacccccgccgctgccccgggctgcagaacccggaggaagcggttgccaagctgcagaacgcaggacccccctggcagtccccgctgagcgtctcgag

SEQ ID NO: 236742 - DNA, 613 bp, Homo sapiens
  chr12:118573924-118574537
  hyper
agccagtgtgctgagctctccgcgtcgcctctgtcgcccgcgcctggcctaccgcggcactcccggctgcacgctctgcttggcctcgccatgccggtggacctcagcaagtggtccgggcccttgagcctgcaagaagtggacgagcagccgcagcacccgctgcatgtcacctacgccggggcggcggtggacgagctgggcaaagtgctgacgcccacccaggtacaccgggcggcgggcgtgcagcgagcggcacggcgcggaggcctgtgccggcctcctgggtgggacccagcggagacagggccaggggcggtggggaggttcagcctgcgtgtgtcgaggcccccccaggccagaggtcccggggtccatgtcccatgcctgggggccaccccgagcaccgggaacccggcctgtggcgtggccaggcaggttcggcctgcggcagaaattcattcacttttcccgggcttcagacccaagagggacctaggttcggaaacaggccggatccccctctccccccacaggccagggcgctggagagggacgtcgccgggacagagtaggctgtggctgcccggacgcccccagagcttcccctagg

SEQ ID NO: 236743 - DNA, 358 bp, Homo sapiens
  chr12:119212090-119212448
  hyper
cccccccacactgcctaccacgcggggcgtttgaacacgaatttggaggtccttgtttgtccttgaacgcggcagggagtggaggaaggcgccgggaggaggcacaaaatcgctttgtgcgacagcgcccgacagcttctccgcccggagccggctccgccgtgaatgggccgcggacaaaggcgtcccctcccaagtacctgtaattggagcgtccatgtgcgcgggcgctgctgaaatgcaatggacaaaagggagaggaatggccgcatcttccggctgcccgttgctatggtttccgcggagctggtgaaggggagggctgttaccaggcaacgggagagggaccaagacaaag

SEQ ID NO: 236744 - DNA, 66 bp, Homo sapiens
  chr12:119417765-119417831
  hyper
tgcagagcaagtagcgctctcaggcactcaaataagcggacgcaggcgtgtcgaacacacacactt

SEQ ID NO: 236745 - DNA, 1612 bp, Homo sapiens
  chr12:119418346-119419958
  hyper
cctccacttgcttgggattacgattgaactgcgaggcggtaaggagatggggaggagagaccgaaaagtaactatccccctgctaatcctcgagattttcctctccaaccctcccactaagcgctttcttttccaaaacgtactcctttcccgagactagcggcattaggaaaagtggctgcaggcggattccccaggagtggatgggggtggggtggggtgagatgggaactctttcctctggacggggttggcggcggggacgctgggcaggccggctgtgagacacaaaagagatacccttgacagctccgcatgcacagatgtaacgctgcgccccttggcgggcgggggccctgctcggcagatggcgagaagccgaattggtgagggattgtctatcaaatggcactttctgggtggtggagacctcgctaacccccggcgcaaagaggaacgcagggcaccctctgtaccggcctaggccgtgtctcccaaaagtgagggtctgggggaggccggctggggtggatagattaagttttttacgagcccccccaaccccccccccccccccacgcagaagatcagctacaagacttgcgaaggggctggaaagaaaggtggcctggcccaaagggggcacccaggaaagggctgaggaaggccagcgatgatgggagaggagaggggcctgggaagcaggatctcctgcctggcgcagattggggtgccaggatggcttctcagagggatcagcgctgcaactcggtcgccgcggggccctggtgacaggcgcacgccccgccctttctcctcccaagacctgcgggcttttgttatgcagatggcggcaggaggctgagcctgaggaggagggggttggtggggaggaggagagacggagaggggggaggaaagtgcagctcgcgcgaccagcctcctcttccaacgtcacattgtgcgagagacaaaacccgggcgcgccggagctcacacgcgcacgcacacacatccgaccccgtcgcctcttctctcctggtgctgcccagaaagccagccctcccttcccttcttggggcgcagaggctcagccagctcagagcgcagcctggagccgacccagaagggcgaagaaagcccagcggacgagcctcctttctctgctgcctgcccgggctggggcgtcccatcccccgccctgaactccgatctctcccaccccacccctctctgggtttcacccggacagagccgggagctgggtgtcgcccccgtttggaatccacgtttcagcactttggacagcgccccggacgccccggcccctttgggttggcgatggcgagcgttcagcaaggcgagaagcagctttttgagaagttctggcgaggaaccttcaaagcggtggccaccccccgtcccgagagcatcattgtcgccagtatcacggcccgcaagccgctgccaaggtaatgatctccttcttagaaggggggatcctgaaggtcctcctttctggcctgtgccccagagcccggaggggtggatgcaggcagccgggccagggcgcctgtcttttcccgtcactactcggcggctcccgctgaaa

SEQ ID NO: 236746 - DNA, 129 bp, Homo sapiens
  chr12:119499108-119499237
  hyper
aaggtgtagccctgcgtgtgcacttgggtgtgttggcagaacttccgctcaaatccaggggctttgctgattcatgtttcctagagcctgacggcggttcagcaccagggacagcgaccactgattaaa

SEQ ID NO: 236747 - DNA, 31 bp, Homo sapiens; identical to SEQ ID NO: 203228
  chr12:119616602-119616633
  hyper

SEQ ID NO: 236748 - DNA, 177 bp, Homo sapiens; identical to SEQ ID NO: 203229
  chr12:119772414-119772591
  hyper

SEQ ID NO: 236749 - DNA, 1630 bp, Homo sapiens
  chr12:120031625-120033255
  hyper
cgccctcccggcgccgccggcctcgcccatgtctcagtacgcccctagcccggacttcaagagggctttggacagcagtcccgaggccaacactgaagatgacaagaccgaggaggacgtgcccatgcccaagaactacctgtggctcaccatcgtctcgtgtttttgccctgcgtaccccatcaacatcgtggctttggtcttttccatcatggtgagtgaatcacggccagaggcagcctgggaggagagacccgggcggctttgagcccctgcaggggagtccgcgcgctctctgcggctcccttcctcacggcccggcccgcgctaggtgttctttgtcctcgcacctcctcctcacctttctcgggctctcagagctctccccgcaatcatcagcacctcctctgcactcctcgtggtactcagagccctgatcaagcttcccccaggctagctttcctcttctttccagctcccagggtgcgtttcctctccaacccggggaagttcttccgtggactttgctgactcctctgaccttcctaggcacttgcccggggcttctcaaccctcttttctagagccccagtgcgcgccaccctagcgagcgcagtaagctcataccccgagcatgcaggctctacgttcctttccctgccgctccgggggctcctgctctccagcgcccaggactgtctctatctcagcctgtgctcccttctctctttgctgcgcccaagggcaccgcttccgccactctccggggggtccccaggcgattcctgatgccccctccttgatcccgtttccgcgctttggcacggcacgctctgtccaggcaacagtttcctctcgcttcttcctacacccaacttcctctccttgcctccctccggcgccccctttttaacgcgcccgaggctggctcacacccactacctctttaggcctttcttaggctccccgtgtgcccccctcaccagcaaagtgggtgcgcctctcttactctttctacccagcgcgtcgtagttcctccccgtttgctgcgcactggccctaacctctcttctcttggtgtcccccagagctcccaggcgcccctccaccgctctgtcctgcgcccggggctctcccgggaatgaactaggggattccacgcaacgtgcggctccgcccgccctctgcgctcagacctcccgagctgcccgcctctctaggagtggccgctggggcctctagtccgcccttccggagctcagctccctagccctcttcaaccctggtaggaacacccgagcgaaccccaccaggagggcgacgagcgcctgctaggccctcgccttattgactgcagcagctggcccgggggtggcggcggggtgaggttcgtaccggcactgtcccgggacaacccttgcagttgcgctccctcccccaccggctcacctcgcctgcagctgggccacggaactccccggccacagacgcagagccctgattcagcgctgtgaaaatcgctagccacccgtcccccatcaagtccgcccacacttgcccacgggtggtggcaccatattcgattcgtgggcacctgcaaggctccatttgcacccgtaacttgcccttt

SEQ ID NO: 236750 - DNA, 182 bp, Homo sapiens
  chr12:120105358-120105540
  hyper
aagcgtgagaacacgtgcattaaaagggctttaagaagtggagtttctgaatcagatttgcattttagaaagatccctctggctgcagagtgtagaatcaactataagtgagcaaagatagctaaatggcattattcagcccagcgcatgaacggctcagattgcccgcgcgctggggtgcc

SEQ ID NO: 236751 - DNA, 253 bp, Homo sapiens
  chr12:120315130-120315383
  hyper
ggcgggtctcagccgtgtttggaccaatcagcgtctccgctcctatgatagacatgggcgtctcagccaggccccgcccatgtccctaaaggcatggaggaaagtgaaggggagagccaatcaaattgcatcttcctttgactcgcgaccaacgggaaaaagggaagggcaaaatcagcagggcaggtcttggaagtttgaaattggcggttacgcaggatgctgcgtttgaggacgcgactgttaatctagg

SEQ ID NO: 236752 - DNA, 750 bp, Homo sapiens
  chr12:120524639-120525389
  hyper
ttcccatgaatgacgagcacttattccttggtgagcaaatgtcccaacggtgcagcgcgtggccaggattggaggtcgtccaggcagcccctgcctcagggcgttttttggcaaggaagggaaccccaccatgcccggcgctgcgccgcggctgtagccctgggcccatctgtccctcgccggcaacgttagtcagcacattcctggggctcccgctgctctcggcgccacctgccgggggacgccggaagctcaggaggctgtggctgtcgtggggcaccacgggttctgacgctactggaggggtgtccatggcaaccgatgccgcgtgaggatttccgctgtttgctgccagccaatagcagtgggtgtgacggaggcagccttcggcatctgagccctcagcatccattagacgggctcgggtcccgtcgctgccgcagtgggcggggctgacgcggtggctgagctgtctggagcggtttctctagggaaggcaggcgggccggcgggcggggcgcacttgcggtgtcggcacaggtgactaattgctcggtagacctgaagccaaagaagaagtgctggtcgcagcagtggcctgagcactttgcaagtgggatccacctgttcctttttctggccgcacttcggttagtgcggtcggtgttgtgaagctcgagctaggcggcctctgcaggcggatcctctagctgcccttgagccctgcacattagtcgctggccctgtaca

SEQ ID NO: 236753 - DNA, 477 bp, Homo sapiens
  chr12:120638748-120639225
  hyper
cgtcatctcggggcgtgcaagccgccaccgaggccccaggcggaacagaataggactccatgttcccaaaggcccccaaagacccctccatgcttcccgccggcgacccctggcgcccatctaactagcacacgaaccttccacgaggacgcctggcgagagaagggcctcgcgcccgcgcgtgccttttataatgcgaacaaagtagccaatcagaaaccgcggatagcgctcctgtctattggctgcgccatcgcccgtcagacaaagctgaacgaatacaggcaaccattggataatatcgctgccactccagccaacggaaagccgcctttaagtagggtcgcgaaggaaggcgctgcctcgcgttggaggagcttgctctgagctgctgccacctgctgggctggagctggagctggagctgcgaattcggagtcccggttccctgtgccacctggcgagctcagcaaacta

SEQ ID NO: 236754 - DNA, 117 bp, Homo sapiens
  chr12:120703715-120703832
  hyper
tggcgccccctcgcggctaagcgggcaggtgggcggctcccaggcctccagccactcccatccatctttctgtccctctcaaagtcacttgcctgaccctgcggatgacaaatccgt

SEQ ID NO: 236755 - DNA, 52 bp, Homo sapiens
  chr12:120729780-120729832
  hyper
gtgtccgtgtatacgacgtgttcccactccaccagccgtatttaaggcccat

SEQ ID NO: 236756 - DNA, 76 bp, Homo sapiens
  chr12:120739996-120740072
  hyper
gaccagaaagagccgacagggggcgttcctggatgatctggggctgtcaattgcgagacgcggaggattgtgggac

SEQ ID NO: 236757 - DNA, 133 bp, Homo sapiens
  chr12:120763473-120763606
  hyper
tttccatctctaacggggtgcgttcgctacagggtcctcttggaacatatttgtttatttgacaagaggtgaaaatatgttatccttagcagatatgcaagtcccctttgtatgcctcgtgagatccttggcg

SEQ ID NO: 236758 - DNA, 55 bp, Homo sapiens; identical to SEQ ID NO: 203232
  chr12:120875858-120875913
  hyper

SEQ ID NO: 236759 - DNA, 42 bp, Homo sapiens
  chr12:120884034-120884076
  hyper
acactgctggtagcgcttgaagaggtcggtgcacgggtcccc

SEQ ID NO: 236760 - DNA, 48 bp, Homo sapiens
  chr12:120933807-120933855
  hyper
atgccgtgggctgcgtcaagccaatagggtcgcgcggcgaggggcggg

SEQ ID NO: 236761 - DNA, 90 bp, Homo sapiens
  chr12:121079468-121079558
  hyper
tccgagcaggtggcgccaaacccactcctctggcctctggccagtaccgccagggagggactcaggagagcaagcggtttggagtctggg

SEQ ID NO: 236762 - DNA, 311 bp, Homo sapiens; identical to SEQ ID NO: 203233
  chr12:121124597-121124908
  hyper

SEQ ID NO: 236763 - DNA, 168 bp, Homo sapiens; identical to SEQ ID NO: 203234
  chr12:121454119-121454287
  hyper

SEQ ID NO: 236764 - DNA, 200 bp, Homo sapiens; identical to SEQ ID NO: 203235
  chr12:121476535-121476735
  hyper

SEQ ID NO: 236765 - DNA, 171 bp, Homo sapiens
  chr12:122124826-122124997
  hyper
ttaaatgagcatgcgtgaaggtcgccccggtgcctgagtcacgttcctgtactcaatgcgcctgcgcttcctgaagccagactgggccctcggctccgcccgcctatttaagtgggcggagacagtcgcgtgagttcagtggacccacaatctcccgcgcaattaaccaga

SEQ ID NO: 236766 - DNA, 203 bp, Homo sapiens
  chr12:122150705-122150908
  hyper
ggcggtcggcgagcgcgcgggcgtggggcgctggggggccggtcgggcagcgctgcgggagcagccgccggcaccgccgccttgcaccatcgcatcatgtccgggcagctggagcgttgcgagcgcgaatggcacgagctggagggagaatttcaagaactgcaggtagggccaggccacctggtcccgcaactctgctgccc

SEQ ID NO: 236767 - DNA, 190 bp, Homo sapiens
  chr12:122231274-122231464
  hyper
ccgagggggcgccccggggtggcggccgcctgtccgtgctcgggacgctggggactgagggtcggggctctgggctcagggtaaggggcgtccctcgcccccaccccagccccgctgcgggcctcacctcggggaaggagccctggctgtacaccatgagcagcgaggtcttgccgcagccgccgtcgcc

SEQ ID NO: 236768 - DNA, 402 bp, Homo sapiens
  chr12:122231704-122232106
  hyper
ctcagccctgggtgtgggtattcagctctcagtcccagggatactgcagcaccggaaaaacggggctcagctgcgagcaaagctcccacccccaacccaccgccaccctccgcgcgtcacgtcgcgcccctcgccggcgagacccgatcgtggctgcccagcgactccaggtgcccctgattagcaggctccgccttcggcagggaccctctgattggctggcgcggccagacagggtctcccggattggctggctgtgcctccgcaccgggttcgagaagcccccggcctccagctccgggaagagcccctcaactttgcactgccccagcggtgtggcttggcacatgtccgcctctggcctcagcttccccacaggaggtagcggcggtggcaccaggg

SEQ ID NO: 236769 - DNA, 75 bp, Homo sapiens; identical to SEQ ID NO: 203239
  chr12:122237447-122237522
  hyper

SEQ ID NO: 236770 - DNA, 140 bp, Homo sapiens
  chr12:122242481-122242621
  hyper
tggggggagccagcgagacagctcctttcggggcgcgctggcaaggtgggagggggtgggggcctgccgattggattctttcgcgtgtgtgtagaagcggccgccgccgccgccgcggcggagacgacaacaacttgctg

SEQ ID NO: 236771 - DNA, 95 bp, Homo sapiens
  chr12:122326469-122326564
  hyper
gagtcagctggggcgagatcatcccctagcgttggtgtgcaattgcgtggggatccattgcttccgacgctactcctgccgggtcaccacaggcg

SEQ ID NO: 236772 - DNA, 110 bp, Homo sapiens
  chr12:122459495-122459605
  hyper
cgcgacccccccgcgccccgcagaccggctgtctcccatggacccctcggcacctgcagcctccgaggaagggtcagcgcgcgtgtccgcacgcccgcccccaccgcgcg

SEQ ID NO: 236773 - DNA, 275 bp, Homo sapiens
  chr12:122667640-122667915
  hyper
cctgcccccgcgcacgcgtcctagcggttgccgggcaacgcggcccgggccatggaggcgtcgtacgagtccgagtccgagtccgagtctgaggccgggcctgggactcagcggcccgggaccgggaccgtgagcgcggccgtgcgcgagcacttgcggaagctgtgtctgcgcgagttcccgtgcggtgccggcagctgggtgcgggcgccggggccggaactctgggggcctggaccggctgcggggaggcacgggcccgggcgagcggagcg

SEQ ID NO: 236774 - DNA, 60 bp, Homo sapiens
  chr12:122688564-122688624
  hyper
ctggggacagaggctggagccgggcgcggtagaccccgccagcctgggccgcccgcgccc

SEQ ID NO: 236775 - DNA, 90 bp, Homo sapiens
  chr12:122710555-122710645
  hyper
cgccattgtgcagcgcgcggacgccagacgcacacgccggaagtgacgcagcttcgtgagcgcggagcggggcacggcctccacctgaga

SEQ ID NO: 236776 - DNA, 107 bp, Homo sapiens
  chr12:122907627-122907734
  hyper
acaggctgcaaggcgcttccgaagcaggttaagttggggattgggaaggatcatctctgccctcgcctccctccagggaaagaccctggatgaggcgtccctggaga

SEQ ID NO: 236777 - DNA, 204 bp, Homo sapiens
  chr12:123011575-123011779
  hyper
gtttctataacaacgcaattcgaggcggtgattgggtgttctttcataggggagtgtaaagaccgtgaagagggcggggccaagaatacacccccggaatgcgcagtcgggagaacggaatgggcggaactcagggtggggcaacttcctatttcgagtctaaagtaatcttggtctcttccggccgccgtaaaggggttgggt

SEQ ID NO: 236778 - DNA, 152 bp, Homo sapiens
  chr12:123319202-123319354
  hyper
acgccacccctggcggcatctcctcggtgtactttgctgttcagatccgcctgccttctgtgccagcctaacagcgcccggcctcagcccccattgtccctggagctggcgaggtgtccggttgcggagccggcggcgtctctggaaatgca

SEQ ID NO: 236779 - DNA, 109 bp, Homo sapiens
  chr12:123321240-123321349
  hyper
tttgcgtttgtggcggctatttgcaagttccgtcccacttgtccttgcagagagctatgacttctgcggttgccttcacatctagttagcacacgcactctacaacagc

SEQ ID NO: 236780 - DNA, 121 bp, Homo sapiens
  chr12:123380319-123380440
  hyper
gcctaagcaccagtcgcggttccctggctcccgcaccccgccccaagcgcccccatttctagcccagtcccctcaacacgaccggaggcgccgcggtcgcctccgcctccggccaccgttc

SEQ ID NO: 236781 - DNA, 140 bp, Homo sapiens
  chr12:123380680-123380820
  hyper
aagggccgccccccgcgggggggacacgtgacgccagccctgggtcgtgacgtcatcaccgcgcgggcgggcggacgtgacgtaagtgtcgcggctcgcttggagtggaatgtgtcagggacagtcgggacttctaaagg

SEQ ID NO: 236782 - DNA, 178 bp, Homo sapiens; identical to SEQ ID NO: 203244
  chr12:123451028-123451206
  hyper

SEQ ID NO: 236783 - DNA, 409 bp, Homo sapiens
  chr12:123459138-123459547
  hyper
catttgttggctgcggtgagaccacgccccgtcgccctcccacacctgaccccgccctcccgcgtccattgggaacgccaccggaagtaatgcgagacggagcgttttggtggagacactcactggggcaatctgaggtaatccaacagactgtggcggagggaccggaagcgccaggcagggacccggggtagatgctaaatccaaactgaaacgtacagggctggatgattgaagcaccagcgggaactagtcggacctccgagctctttaaactgtcctcagctcggctggttctccacgagctccgggcagacggcggggggtgggtcggcgtttaagtcaaaggccttggggctccgagtcccttcctctccccgtcctgtgaaggcacgacccagttcagctg

SEQ ID NO: 236784 - DNA, 46 bp, Homo sapiens
  chr12:123459789-123459835
  hyper
tgcttcactatggcgacggtgggggctccgcggcacttctgccgct

SEQ ID NO: 236785 - DNA, 41 bp, Homo sapiens
  chr12:123717762-123717803
  hyper
gcgtccacctcgccgttccccctcgcgcagctccaaccaaa

SEQ ID NO: 236786 - DNA, 34 bp, Homo sapiens
  chr12:123755169-123755203
  hyper
ccactccccatggctccctcggtcccctgggctc

SEQ ID NO: 236787 - DNA, 255 bp, Homo sapiens
  chr12:123849887-123850142
  hyper
cgcatgcgccccgcgcctgctttcaaactccggttaggaagggcctggagctattttcagaacctgttagggtggggagctacggcccaggaagttacctagcagcgtttctgtcacttggaagatctcttcattacctagttagtcctagaaacaaaatgtttacatattcattgcttgttaggctcgctcaaagcactttattggcagtgaaaccgcaagtaacccggagccctcggcgcgaccacggctaga

SEQ ID NO: 236788 - DNA, 330 bp, Homo sapiens
  chr12:123868413-123868743
  hyper
cccaatggcagctcgggtgtcttccatcgcagccattcaacgtctggcgacggtcaaatttaaacacccctcccacctcctccgccgggacctgtcgggaaagcgtttgcagttattgcggcggctggacacgccccgccgccgaagaggcgggagaagggcggggcctttctccgagttggcctatcactacgggcagcctgcggagaggcgggaggcggcgccaatcggggcgagcagctggagcccggcggagcagttggctgagttgttgcaacttttttcgaaagctgggtttcccgggagatcccaggcggtgacagagtggag

SEQ ID NO: 236789 - DNA, 342 bp, Homo sapiens
  chr12:123874197-123874539
  hyper
cgggccgcttcctttgctgccgcctggctgggagtggcgcccacacggctccgccatgagcctggcggtgtttgacctcggaaaagtttgactgcgccttcgtggcgtctccgcagcccaagaccctacttccccggaggtggccgcggtcccaggctgtgcggggcctgcgcgggcccctcggagaggtcacgggtctcaccgcctcggtgttgaatggtccccgaggcggcgagggcccggcgttgcttctggggacgccctcctccgtctgtacttactcagaggaggggccccacgcccagaggcgcccgcagtgacctgaaccgccccaccgccccg

SEQ ID NO: 236790 - DNA, 133 bp, Homo sapiens
  chr12:123920539-123920672
  hyper
aaaagaaaaggaaggcgtctccctgccagtaggtgccctcctacgccccgcaggcgccgtgggcccggaaccctcgctcccacactcacctccccgctggccggagggctctgtctccgcagcccctccacct

SEQ ID NO: 236791 - DNA, 286 bp, Homo sapiens
  chr12:123920852-123921138
  hyper
cggcggtcagctggaaggggctcttgcccagcgccccctcgggcccaacctcgtccctctcctcgtcctcctctccctcctcctcttcctcttctcgcacagggggctcctccatggccacccagacccccgccgacctcggagctgctgtcttggagtctcccaaaggttagacttcctcccggcacccaaaactttccgctgggcagagtccctacctgcccaatcagcgcggcccgggggtgggcccggggggatggtgcaaggggccgcgcacgcgactctt

SEQ ID NO: 236792 - DNA, 45 bp, Homo sapiens
  chr12:124017664-124017709
  hyper
cccttgggtccccgcggtcccactgcccggacggacagaccgagg

SEQ ID NO: 236793 - DNA, 66 bp, Homo sapiens
  chr12:124068852-124068918
  hyper
ttccggacactgtcgttttcctgggaagtccacaggaactttagcttggacgagaaaggactaggg

SEQ ID NO: 236794 - DNA, 197 bp, Homo sapiens
  chr12:124155698-124155895
  hyper
gcagtggctgctgcgttttcgtgtctgagtccttcctgggttctaatgagggcgcggttctgctgtgcccggcccgcgaggtctaaggcatgggcttccagcctccggccgctcttcttttgaggcttttccttctgcagggcatcctgaggcttctgtggggggacctgggtgtgtacggcgcggcagtgacctcg

SEQ ID NO: 236795 - DNA, 495 bp, Homo sapiens
  chr12:124246517-124247012
  hyper
tgcaaaccggtcggcgtggggtggggtcgcaccctcggctgcagcggcccgagggcggctcctggcggcgagggtcccgctccgcatccaggggcgtgcgcgctgccggggccagggagcaaccagcctacctcggcggcccgggggcctggtgcgcgcctccgagatcccggggccggggcgtgggctgcggctcgcgggttcgggatcgaggggccgggcgcggggcactgccgagcttgcagcccccagcgccggcgccgtcggcggggcgagctgcggccgtttccggggcgcccattgctagggccgccgttgccacggacgcccgccctgcgcccggctccctctgcactgcgcggcgccatggacgacctgcgggtgctgtggatgcgcgaccgcgtgtatgcggctttcggcatcaccgacccccagcttttcgaggacctgctcaaccgcgacgacggccagggcgaggacctcatcttgcacttc

SEQ ID NO: 236796 - DNA, 269 bp, Homo sapiens
  chr12:124456337-124456606
  hyper
tgtgcattctgctccgtttcacgaatcacaggcaaatcgttactcagagtaaactaaagccgcatcaaagcttcaggaaggggctggcaaggtagtgtacttacggaaaggctaccaggacgggaggcgatacaacttgtcagggagggtctctaaggttccccgggtggtaacaagcatttaaaaaggcgatgtggattcagacggcctcctccccacagcatcccagacaaagccgggctaggccccggggcgctcctggtgcacct

SEQ ID NO: 236797 - DNA, 673 bp, Homo sapiens
  chr12:124779559-124780232
  hyper
cccaccgcgcaggccggggcggggagaggaagggggaggaggaggcgcctagaaaaggaggcgcgggccggggaggtgcggagagggccgggcggcaacgtgcgcctcggggctgggccggcctgcgggatcgcagcgcagcgcagaggcgaggctgggcccggcgggcgggagccgcggagggcggagggcggagggcggcggcgctggcaggagcgcggcccacggcggcgagcaggctgcaggcccgcggggatccggggcgcggggggcgccgggcctgatcgccgcctctcgcggtgcccgcaggtccccgggcgcgcagctctcgccccgccgccgcctgccccgggccccggagcgcggtggagaagcccccggaggagcggggggcccgcgccccgcgccccccagacatggtgggccacctgcatctgcagggcatggaggacagcctgaaggagcagggccgggagggcttgctggacagccccgactccgggctgccccccagccccagccccagcccgcccttctactccctggcgcccggcatcctcgacgcgcgcgcggggggcgccggcgcctcctcggagcccccgggacccagcgaggccagagcggtaaggaggcgctctctctcccaaacgggggaccgcgtgggcgggtgggt

SEQ ID NO: 236798 - DNA, 195 bp, Homo sapiens; identical to SEQ ID NO: 203250
  chr12:125093638-125093833
  hyper

SEQ ID NO: 236799 - DNA, 99 bp, Homo sapiens; identical to SEQ ID NO: 203251
  chr12:125198344-125198443
  hyper

SEQ ID NO: 236800 - DNA, 137 bp, Homo sapiens
  chr12:125256630-125256767
  hyper
tggagagacaagtcggggggactttacccccaggatggggaaaagtcacccacaattcaagcaaagatgacccttgtgacagattaacatttcagggccgctacctggagaatggacggctcgggacacgcgtggga

SEQ ID NO: 236801 - DNA, 119 bp, Homo sapiens
  chr12:125473583-125473702
  hyper
gtgggcgctccagcggccggaccagcagagcaatccgaaacccagcccacgtgggttcccagaccaccaactccggccgtgagacttccgggttgtgttatcgcgagaactgtaactga

SEQ ID NO: 236802 - DNA, 167 bp, Homo sapiens
  chr12:125477528-125477695
  hyper
ttgtcttggcaagaatccatcgcaggtggcgctggtacttcctggcactaagatcgattggcgggaccgggacttcgcggcttagcccctccattttcaagttccccgccaaaccctcccctcttggttgtacccatttctgatgatcatcgcgtgaatccatcatt

SEQ ID NO: 236803 - DNA, 444 bp, Homo sapiens; identical to SEQ ID NO: 50292
  chr12:125534028-125534472
  hyper

SEQ ID NO: 236804 - DNA, 386 bp, Homo sapiens
  chr12:125670142-125670528
  hyper
caacacctccgctccgtcactgcctgaccctgcgctgggaactcattcccgggaccgccagggaatctgcccttcccaggagaactcctggctgcctccgcgtgctcctagggcctgcgcgaaatgggaaggcgcatcctctagcctgggtaaataagggaccctgcctcacccgggtggccatccccaggccgccttcgctgtgtttcaggtcaccgcacccagcctgcgcacccctagcccccatcccggtgccgtgcagaggctctgcacacagcctcggcctcccggaggccctcccctctctcctctcccctctcccacaggcactccctagctgtgccacatttaacccgggacctcctgtccgcgctcagtcttgcagt

SEQ ID NO: 236805 - DNA, 445 bp, Homo sapiens
  chr12:125815550-125815995
  hyper
taaaccgcccaaatcggggtttcgtctctggaagaggggagggatgcaccaccggctcctcgtgcagcgctggcggcggcggccactgggtggcggtgttgcccgcgaggcccggggtctgcggaggagggagccggactgggagcggggcggggacagcgccggggagggcctggtccgggtgggctcagtccgggctcccgggtcggtcccctcctccgcgttgctgccccaggagtccgcttcgtcctccgctgactctgagcgacacaggacaagctctgaattgcattccaggaaaaggggactgaggctttgtatttttcctccgcaccaagattcccaaggctgctgttaagggtttttacccagggtggggtccacggcgaagccctggggtctgtgtgaaggggaggtgctgtttctttcccgagttctccgtggc

SEQ ID NO: 236806 - DNA, 143 bp, Homo sapiens
  chr12:126168472-126168615
  hyper
tccctgtgcagagcgccccctgccggtccctcttggaggctgggccagcgttgcgagtcttgccagggacgcgcgctctagcgccggaggctgggaacgcaccgcggtgccaccgcgtcctgcaggggcggggcgcgcacctg

SEQ ID NO: 236807 - DNA, 172 bp, Homo sapiens
  chr12:126675649-126675821
  hyper
agctgcgccgcagacggcgaaaaccagaggtggttacagtcaagtttagggactgcaggagcgaattcccgaaggcttgcaggagccgcccggctctgcctccagcctttctctctgggcctagcgggactctcccaggcaggcccctccctgcccgcgggcgcactttccc

SEQ ID NO: 236808 - DNA, 648 bp, Homo sapiens
  chr12:127210929-127211577
  hyper
cctgtccggagtaacggtcaggagagaggtggggaagggctgggcccctctcggtgtcccgggttcccggcagaagtctccagggctgagggagtctgcagacacggagtttccgtgccagaggagcgggtccacgcggacaggcagttccagctccgggtaagtgcggccccatctcctctccgtccccggctccgccagcagcagtcccggagagatttcccctccccgccgcccgcgctctctctcctcctgcgcccaggccggtctccggctccggagtcggacggcgacggtgcagatgagggcgcacaggggacggtcctggagcccgggaagggtgcgagatggagacggcggttcagaaaagttgtcaggtctccagcccgggcagtggcgggagctggagccgcggtggagacgactcgaggggacgcagcccgcctggcacaaagggccacgggcgcgagggactcgatgagctgggagatcgcggccccggcaggtgcggcgcgctggggcgggtgcttggcgccttccccggcacaggtgagactgggcggagagggcatctgtggcgtggcctctctgggtgcggagtgaggggacgcagtaaacgtggggtttggatcccgcggcggcgctgga

SEQ ID NO: 236809 - DNA, 148 bp, Homo sapiens
  chr12:127765269-127765417
  hyper
ggaaggacggggcgcgcgcggcaggggggcaggcggcctggtgcaggtgcatccccaggtgcgcgccacgcccctgcgggacccggcggcaccgcggtgcgttcccagccgccggcgctagagggcgtgtctgcggaaagactcgctg

SEQ ID NO: 236810 - DNA, 316 bp, Homo sapiens
  chr12:127865648-127865964
  hyper
gctcacactcaggtggaaaccgggaaggcctggaaatcgcaggtcctgaggacgcggcgagttcacggagaggacctgccgggcaggggctctgggagcctccgcggggaggggagggcgcgcggccggcgcggccacaacccggtctgcggcgccatctagcgggcgcgccgggaccgtcgcccactaggcccttttccggaggagaagctgatgccaatcaaaacgccatctctactccttgtcaaagtcaagtcatttagcgaaaggcctaatgagctctgcaatcagctacgcaagaaaaaggagtgtttag

SEQ ID NO: 236811 - DNA, 247 bp, Homo sapiens
  chr12:127939990-127940237
  hyper
cctgggaatctggccggaattccacagggctgcagggcccgccgcccagcgccaagaaagcgggtggccacatcgaagtttctcaacgggaggagcggattcgtctggagacgccgccttctccccgcgcctcttcttccagcactgccacacgggtcctggaaggatcctgcaccctctgctcagtccccgctcagtctctgctccgggctgggggctttctccacctgcccgggcgggggcgcca

SEQ ID NO: 236812 - DNA, 267 bp, Homo sapiens
  chr12:127940468-127940735
  hyper
gcacccgctgcagacgcggtcggcgaaacgtcgtcccggccccagctcgagcagcggctccgggtggacctcgcagggatgcggagcggccggatcctgccgactcgactgctcggggccgccccagggtgtgggcggccggcagggaccgcgggtgagcggtgggcaggtctcaggactctctccggacgtgcggtccggggccgcgccgggtgctgggcgcgctacccagccaaggtgaggcaggagcggcgtctgcggtgctgg

SEQ ID NO: 236813 - DNA, 370 bp, Homo sapiens
  chr12:128750699-128751069
  hyper
aactgctcagaccacgcgtggcagaaagagcagagcatgagcatcaggaaccgcacagggaagccgctgagatcacctgggatcaccaccatgagggaggccagccctggagaaatcagagggaaaagatagagagaacgaagtcgggggggggggggggagggcggatcttccttgtctgagtctgcagagaaattgcctattgcaggagcaagtctagagaggggctattctccacccactgaaaagataataaaacacatgctatgggcggcggggagatgattggggagtggaagccccacagacatgcagtgaaaaatgatcctttcttcccctctgcgttctcgtccccttcccagagacaccg

SEQ ID NO: 236814 - DNA, 43 bp, Homo sapiens
  chr12:128751249-128751292
  hyper
aggctaaagcagcggccacctgaagttgaggaatggggcgtga

SEQ ID NO: 236815 - DNA, 54 bp, Homo sapiens
  chr12:128752072-128752126
  hyper
acttcccggttccgggggagctcggggtgagggcagccgaagcgaggggtgcgg

SEQ ID NO: 236816 - DNA, 903 bp, Homo sapiens
  chr12:128752306-128753209
  hyper
gggcgtggctgagggacacggtgtttgttccccatccctgagttccgtgcggacctgccccagccccagcacagtcaccctgtggaactggcatccaggagaggtgctccgctctgtgcgctccttcctcccggctgtgtgctccctgtccacagctccccatccacagcttcggcactgtggggctggtgctccaggagggaaggcccggttctttgcatcccctttccgcaaccgctagggtctctgtgcgggccctagaggaacgctcactcatcgcgcagctcaccagggaccccagcttggcagaaaccaggggctctctgcgggttctctcaaatgagtcctttgcggtgggggagcgcggatggggaggtgggtgcgtccctcgcgacgggaactacctcaccagcggtcctgtccggggctccttcacctcagtgtcctcttctctacaatgggagtgacggccctgctttgggttggaggaatttaaaggagttaacgtatggcgcccgcagggctcacgaaaggtagccgtgtggtttttccgaccttttttattatgtgcgtgtgcggccgagtggccgcgcggatgcggcggcgggaagggcggggagaggcggtctccagccccaggagccgcggggcaggcggggagcaaggcctaggctctgccagggcagcagctgcccgagtcccggggcgcgcccagggcgtagaaaaaggagagcgtcgctttcctgctccccgcgccctggcgaaggtctcgggttcatttggttaaacggaggtgcgcacatgggtgccctgagccttcgcgcggcgccgcgggtccagtatcggccccaggctctgagcagagaacactcaaagccacccttctcccgcctaatgctctga

SEQ ID NO: 236817 - DNA, 116 bp, Homo sapiens
  chr12:128753739-128753855
  hyper
aagcactttgcagaggaaggcggtgctaattgagcagggcgtgaccgacctcctccgggttttcaccccttgcccttgagagaatttaaccaggcgaactggatgttccctttaaa

SEQ ID NO: 236818 - DNA, 392 bp, Homo sapiens
  chr12:128850383-128850775
  hyper
tggaggtggccaggctgccccgttgattgtgtgccgaggagccctccccgggaaggctgtgatttatacgcgcaggcttgtcacggggtgaaaggaagggccactttttcattttgatccaatgttaggtttgaaagccacccactgctgtaaactcagctggatccgcgggccgtgattaaacacattgcccgctttgttgccgagatggtgtttcggaaggcgctgtgaatgcacttccctttgcggggctcacacagacaagatgtgtgttgcaaggatgaggcgcctgctcggcctccagcccagggccgggaagggagaaggtgctgtgcgtcgctgcctgtgtcgcccgcggctctcctcccagcgacagactccagacctctatg

SEQ ID NO: 236819 - DNA, 41 bp, Homo sapiens
  chr12:129338699-129338740
  hyper
tggctggttagctccttcacactcatctttttctgcctttg

SEQ ID NO: 236820 - DNA, 86 bp, Homo sapiens; identical to SEQ ID NO: 203256
  chr12:130387117-130387203
  hyper

SEQ ID NO: 236821 - DNA, 1547 bp, Homo sapiens
  chr12:130387589-130389136
  hyper
tgctccaggacaagcaccttcggccaaggggcgtccgaggagcttggctgccgcacgagcgcacgttcacacgcgcgcacacacacatgcacacaagcgcgcacacacacttgcacacgagccctctctcccggccgcccccatcctccacacactcccacacactcactccaggcgaagttagtccccgggccctggcggccgcggcgtcctcacctttggaaaacagggcggccaggctgatgagtaccggcgaccagtggtgccacagcgtccccatctcagacgggcacatcctggagacccggagcgcagatcctccgctccccggcgccgtccaggcgaacaagagaccgtctcagtcccctagaggcccgcagcggggccggtggcgagggagcgcccggctaggggcccgagcagcccgggcgccctgctccctcttcccgccagtccatggccaggccgggaggcgacgaccgcgcgggctcctgagttgctctccggagtccaacacgcgcgcaggcaaaccccacctccctccttcgaccccaacagaattttttttaaattttaatccacagggggtatttcctttcctgtttacccgagcgaagagtggcccccggtggcccaaggaggggcgcctccaggcgcagggctccggcggctccagctgctcccgggctggctagcgggcgctggcgcaggcggcgccggggtggcggggctgcggagcccgggacgcgggcagaggcggctcggagccccccgggcgggtggccgggctcgctgggcggcccggggctccctggcccgcagcccccatcccaggccggccgctgcgcctcggggctcgggcgcgcgcgcgctccggcacccaaagtttggcgggtgcggctgctccccggccgccgcctcggcccgcccggccccgggcccggctggggctcgcggggctctacgcgcgccgagcgcactgcaggctccggagacgcggggctcccccctgcgcccgggggaggcgggccagatgtgcgcggaggagggcccgccggctcggggacgcggccgagcaacgcagctgcctcctgccagcaggcgcgggggctccgctccgcaaggaccgcatccggaacggaacggaggcgatcgccacggtgcccggagccggctggggctttcgccttaaaaatttgtctgcttttaaaaagccccaccctttcggagtgacagctgtgagccccaatccgcaaagtaaatcccacctccccctggccgccccacgcccagcctcccggccaccctccctgcgagcgcggacgcgcggtggcggcgggcgagggctcccagcgcgggcgcaccccggggacggagccacccactctcccaacaggtgtccagctggccaccggcctctcgtcgtcatcaaaacctcaggcccaggggaggtcctccagcccgggggcacctgaggctcttcgccagggagagcgcaaggatggctggagaagggccctcgccccgccctgcgcatctcccaggga

SEQ ID NO: 236822 - DNA, 344 bp, Homo sapiens
  chr12:130498554-130498898
  hyper
agccaaagcagggaagcctccggaaagagggcaaggagagtggcggggtgcgagcggggcgctgcggaggaggctgcagcggcagcggtgcgggcaggagctctgatgcgatgcgatgcgatgcgatgctgcccccctgtgtccttcgacgatattgctgcgggaagctttctgtgctcaagacctcgtccatccctccatcagctcagaccttctctgcgaatagctctccgggtggtaaagagatgcatcacatttaaaacttcgagacgtcctggattcacttagaaagatgggaagaggctcacgcctgtaatcccagaactttgggaggctgagatggg

SEQ ID NO: 236823 - DNA, 86 bp, Homo sapiens
  chr12:130498947-130499033
  hyper
actgggagcatcccacatgtggagatagctagactgcctgtttagatggggcaccgcttcccgttcacccccgccctccccgctcc

SEQ ID NO: 236824 - DNA, 305 bp, Homo sapiens
  chr12:130526815-130527120
  hyper
aggtgcacacagatgtgggtcgctgccttcccaacaggctcctgcccggttcacctggggaagcgcagggctgcgggcacaggattctcccatcagacaccgggagagcatctccgcggcagcttgcagggcccgctgtctccactagggggcggcgtacgcgcgtctctcgaagccgggacccgcgcggggaggctgcactggctggaaacagcgcctgggcgctcccgcggctcccacctcagagatgtccccaggtgccccacgccccccgcgcgagccccgacacgcgagccccaccgcac

SEQ ID NO: 236825 - DNA, 218 bp, Homo sapiens
  chr12:130645187-130645405
  hyper
cccaagtttcttaccgatgtaaaaattgtagggcttgttttaattaaaagccaatactctccgaggaagtggccccctcctgcacggcgtgcagaaagctggtcagtgaggggggttcctggcgggccccatctccttcccgggcgcttcctagggagaccttgccccgtgcgcagcgtccccaccgcgggggcccgtgcagccgccccccacgccgg

SEQ ID NO: 236826 - DNA, 503 bp, Homo sapiens
  chr12:130646005-130646508
  hyper
ctgcagccaaggagggcgctggccgggcacatcactcgccaaatcacataaataccccacgagcgaatgacttcctataataaataaactcagccgccaagaaggcatctccagccctgctggcgcgaggccccggctctgcggcttcggagggggcgggggtcaccgcggtacaaaccaagcccgcacttcccgcggggtgggaggcggtgttcaaagtcccgggacgcttcccgcccctcccccttcccgccttcttagaggagacctcggatgagcggccctaaaatccggattctcgagcccctccccctccccttagctcgtctctttgaaatttcaaagaaaatccctcctcggagcccggagcccggggctggtagcacctccccagcctcaggaagatgcgggcaggtttacaagcaagggcctactttatggcccaggctataaaacgcaaatcccacctccctttgaaagcgccctccgcccgggactcacca

SEQ ID NO: 236827 - DNA, 61 bp, Homo sapiens
  chr12:130646808-130646869
  hyper
gcgccccccgcaggctgggctgcaggccgggggggatcggcccccgcggggcccgggagcc

SEQ ID NO: 236828 - DNA, 836 bp, Homo sapiens
  chr12:130647529-130648365
  hyper
atgggctcgtgcgccgccatcagctccatggacatggagcgcccgggcgacggcaaatgccagcccatcgagatcccgatgtgcaaggacatcggctacaacatgactcgtatgcccaacctgatgggccacgagaaccagcgcgaggcagccatccagttgcacgagttcgcgccgctggtggagtacggctgccacggccacctccgcttcttcctgtgctcgctgtacgcgccgatgtgcaccgagcaggtctctacccccatccccgcctgccgggtcatgtgcgagcaggcccggctcaagtgctccccgattatggagcagttcaacttcaagtggcccgactccctggactgccggaaactccccaacaagaacgaccccaactacctgtgcatggaggcgcccaacaacggctcggacgagcccacccggggctcgggcctgttcccgccgctgttccggccgcagcggccccacagcgcgcaggagcacccgctgaaggacgggggccccgggcgcggcggctgcgacaacccgggcaagttccaccacgtggagaagagcgcgtcgtgcgcgccgctctgcacgcccggcgtggacgtgtactggagccgcgaggacaagcgcttcgcagtggtctggctggccatctgggcggtgctgtgcttcttctccagcgccttcaccgtgctcaccttcctcatcgacccggcccgcttccgctaccccgagcgccccatcatcttcctctccatgtgctactgcgtctactccgtgggctacctcatccgcctcttcgccggcgccgagagcatcgcctgcgaccggga

SEQ ID NO: 236829 - DNA, 46 bp, Homo sapiens
  chr12:131199253-131199299
  hyper
gaaggggtgcccgccggccttcccctcacaccgtgcccccagggaa

SEQ ID NO: 236830 - DNA, 1238 bp, Homo sapiens
  chr12:131199583-131200821
  hyper
cagggcccagagcccggacacctcctcttcccaccgatcttccattttcagagggagccgctctccctcctctcaggcctgctccatctgtgacatttcccttccctggacgaagtggggttttcacccttgtgagcagagtctccttcagggctcctccgtgagagaaatatggggctggacagggtccccttccctccctcctcactcaccctaagaacctccagggacccagaggccacgcaggcacggagccagcacccccgcctcccccggggccagtgaccaggccgggaggtgaagcagtcctccctccctccggccagccgccaccccgacctcagccagcgtgcgctccccggggacaggagggaggctgcttccaccgaggcctctgctgacagatgtccgggcccccacctggacctacccagacctaagctcctgggcgggtggtcccgtacgcgctgcctttcccggtgaaatacggtttccactgggagagtctgcccccggccagcagcccgcgcacactgctcacacaggcacacgcatgcacgcacacactctgccggggaacatctgttttgacaaacacattattcaagtcagtccatgggacgtgaattgacagattcctgggcgcagcctgcgggctttgtgcatttgcacctgagccgagctggggactctgatgtgtttgtcccacgtccccttccccccctccaccccgcccccaagaagacaagtccaggccctgagccgctgctgtctgagaagcctggggcgcactccccaggcgagcggggccgtgtccatcgggtgccaaactttgcctggaggggcctttcttaaaagcctggggtgggggccatgacagagccacagcacccctgcagctgacacccggcacccaggaagaagcccgtcagcccttcccttccgagacgatcctgaattccaagcagcaccgacatgccagcagggcgagccgctgctccccgcacccagcgcccccggaccccacgctgaagggcattctccatccgctgcaagataaactttgtctgggcaaagagtttccggctaaccccctgtgatcaacgccgctgcagctcgggtgcagaaaggcgaggggagacgggaagctatttttaggagaaaaaaataaatctcagcctacctttagaagcgagctgtgccaaggctccggaggttcacctcggagacaactgcag

SEQ ID NO: 236831 - DNA, 262 bp, Homo sapiens
  chr12:131201142-131201404
  hyper
cgtcagtgtttgaacgcacacacacacacacacaaatacacatgcacacacacgtgcgcatacacacaccaagatggctatacccctcactgccagtttctttcacagagctgtggtgaaaagctcggacagagatggaggcaaacagctctcagccatgcggggcttggggttggtgcttttctctccatccctgggaaaacagcacaggatcttccctgcaggaggccgggggtctcctgcaaccgacaggcaaccgatc

SEQ ID NO: 236832 - DNA, 203 bp, Homo sapiens
  chr12:131400789-131400992
  hyper
ctgactgtctaatgcacctccgcatccccggcacgcaggacccggccgggctgccgcctctcagaatcgctgtgcaattggcgattgcgacattcatggaataaattccccttcgcgacacatggggacgctcacgctccacgctgtggccacactcttacgcgcctttgttcaaatggtccgcggtaatcacccctccagct

SEQ ID NO: 236833 - DNA, 46 bp, Homo sapiens; identical to SEQ ID NO: 203259
  chr12:131438509-131438555
  hyper

SEQ ID NO: 236834 - DNA, 333 bp, Homo sapiens
  chr12:132195265-132195598
  hyper
ctcggggtggacccgaggcctccacacatgtggcaggctgcagcaacccgccacccacgaggactcgcccaaggcccagagcgcgccgggcccctccctccgactccgtcgccgcccgactggccgcagcggaagccggcgcgcgatcccacgctgcgctttcgccacgtcctgacggctgcccgataaaacggacattaaaattgcactttccactgaatacagcagcgcctattgtggcggcacacctgaatgcgaaaattaaagccaaaatatttcctagcggctaaaagagctccaagcctaggcgaatctgccggtccgctcgccgga

SEQ ID NO: 236835 - DNA, 1072 bp, Homo sapiens
  chr12:132312848-132313920
  hyper
aggcggcgcgggccctttaaggcggccggcctcgttagcatacatttgcatggccccgccccgccgcttgaggctgccgcgcggggctcagtccggcgggggcgccgcggagagcggagggcgccgggctgcggaacgcgaagcggagggcgcgggaccctgcacgccgcccgcgggcccatgtgagcgccatgcggcgccgcgcagcccggggacccggcccgccgcccccagggcccggactctcgcggctgccgctgccgctgctgctgctgctggcgctggggacccgcgggggctgcgccgcgcccgcacccgcgccgcgcgccgaggacctcagcctgggagtggtgagcgcgcgggcgggacgggcgcggagctcctgggccggagccgggggtctccgcgggccgggtggcggggaccgggaagaccccagcagtgcacgtcggcgtcgcgcgggagccctggcgccctggacccatttcctgggtggggagactgaggcagggacgcgggctgagcgaccgggcgagcgcacgcgagtcctggggaggcgccggctgccgtcccggctccgtgcgctgggagcgcgccgcagccgcaggagcccgtggagttgtgagggggtcgcccacccggagcccgggtcgccggcttgcagcagccccggagcagccgggctgggcgagagcaggcatcgcggccgccccgagctctgcgcgctgcgtgcgttccgggtgggagtggcgggggcaggagcacgcacccacaaagcgaggaagggcaggggctacggagtgggggcaccccgaaagccttgagcccccgagtttgctcggttgagggtgttgggggcacagggatgctggcccccagctccccactggacaaggacctggccctcagcctccttcccctccaccccaggtcggccaggctggccctgccttgccctggtacagtgctgagccgggggcgcggggagagccttcctcactccacacccagtagctgtccccagctcagcttagaaaccctgcctgggggcagcgacgtggcctcttcctac

SEQ ID NO: 236836 - DNA, 95 bp, Homo sapiens
  chr12:132379246-132379341
  hyper
ccctagttggagccggagtcggagtcggagtcggatccggattcggattagcagcccgggaagagtgccgtggcacaggcgccggagggagcgcg

SEQ ID NO: 236837 - DNA, 37 bp, Homo sapiens; identical to SEQ ID NO: 203261
  chr12:132380562-132380599
  hyper

SEQ ID NO: 236838 - DNA, 42 bp, Homo sapiens
  chr12:132628953-132628995
  hyper
acgtcgggttctacgcgcagtggtgacgtcacgggagcgccg

SEQ ID NO: 236839 - DNA, 150 bp, Homo sapiens
  chr12:133136379-133136529
  hyper
cgctcagtgaggccggcgctgcgcgcctttccccgggtggccgtgatcggaggcagcgcgttcggaccccgggccggcggcgggcgcgggtggatcggcgcctcggggctggattagtcgggtctgcccgcgccccgcccccgccccgcc

SEQ ID NO: 236840 - DNA, 649 bp, Homo sapiens
  chr12:133194967-133195616
  hyper
tgcgctcgaagccccggcagccgcggcaggaaccggcctggacggggtggggggcgccgcggaggccggcgggacttcccatgtctttctcctcgagctcggaaaaagttcccacccggggaatcccgaccctccaacttcgagaccgccggttccgcgctcggcccccacctggaccaagagctggggctgggctgccgcgcccccggctctgtccccgcgaggccccgctcccagccccacctgggacacccgggactcccgggacacctgcggggcggggcggggccggggcgaggcggggcgggctcgaggccgcaccccggaggcggagccgcgagctacccgcccgccgcgcgccccccgctctcggtgcgcagcggggccgaccctcagccctgcagcgccttcctggaggtgggggccgcccgcgccatggccgccgcccagcccaagtaccccgccggggcgaccgcccggcgcctggcccggggctgctggtccgccctctgggactacgagacgcccaaggtgatcgtggtgaggaaccggcgcctgggggtcctgtaccgcgccgtgcagctgctcatcctgctctacttcgtgtggtgcgcggggcgcggggtgcggggcgcggggtgcggggcgc

SEQ ID NO: 236841 - DNA, 231 bp, Homo sapiens
  chr12:133195928-133196159
  hyper
gcggacccgggtcgcgggagggcccctgccgtgcctgcgggcgggactcagccttcccagggtcgcctccggagccggcgccgcccctgcccgcaggtacgtattcatcgtgcagaaaagctaccaggagagcgagacgggccccgagagctccatcatcaccaaggtcaaggggatcaccacgtccgagcacaaagtgtgggacgtggaggagtacgtgaagccccccga

SEQ ID NO: 236842 - DNA, 94 bp, Homo sapiens
  chr12:133287119-133287213
  hyper
ttctccgcgtctccgcccctgcacccagcctccggcctcggcaggcgcttccggtgcggaaccttctggaaagtaccgcgccgccctcccggcg

SEQ ID NO: 236843 - DNA, 579 bp, Homo sapiens
  chr12:133463691-133464270
  hyper
agcgcacactgcaccgccgcccgtgtggcctgcccgcaacccggtggctctgcccggccccggcccccggccccggcctcagccccgcacctcgtctccgcccgatggtccactcccgcttcctcaggaggacgtgcggctcgccctcctccgcgcccagacgcaggagccgtccccagggctgcggcggcggcgactgcttgccttcctcgggccgctccatcgggattcacatctgcggagaccccggaaacgcccatggagactcccgaccccagaggccgagactcggcgcccgccccaccccgcgggccccggcccggccgcccgcgcccacgcagccccgcagcccggcctggacgccggcgggcgccccctcccacggccgcaaccaggtcccccttcgccgcccgccgcagccccctcgccagccgcgcttacccccgccccgcgccgaacccggaaccggctgcgccgccgccgctgtcaagagacattgcggctccctcagctgatccgcggggcggggccagaggcctctgcgccccgcgattggctggcggcggcgctcaccaagag

SEQ ID NO: 236844 - DNA, 112 bp, Homo sapiens
  chr12:133464450-133464562
  hyper
tctgagagccccgctaatctggggatgactcctaggagtagaagacggtccatcttagttgtcacgaggtagtgcacgtggggaccctttcgggtacagttgcacacagtgg

SEQ ID NO: 236845 - DNA, 45 bp, Homo sapiens
  chr12:133481617-133481662
  hyper
tataattttggagatcaaaagtgcggtggagcctcctcttctgtg

SEQ ID NO: 236846 - DNA, 131 bp, Homo sapiens
  chr12:133484601-133484732
  hyper
gtttttctctaggtaaagccgcgggatgaaccagcccctgtggaaatttagaagtaacgacgtccgtcaatttctgtatgaaaaatatacagatcgtgtgacacgtcttctgggaatgaaagtctgctaaa

SEQ ID NO: 236847 - DNA, 40 bp, Homo sapiens
  chr12:133706775-133706815
  hyper
tgtcccgggtgaacgagccacaggcccgcatgctcacccg

SEQ ID NO: 236848 - DNA, 33 bp, Homo sapiens
  chr13:20176451-20176484
  hyper
cgccccggggtggcccgccggggtcgccggaga

SEQ ID NO: 236849 - DNA, 81 bp, Homo sapiens
  chr13:20207704-20207785
  hyper
cggtgttacgccgcgcccgccttaatatgattggtttttgttcctgtcactctaggatccaagcccgccattggtcggctt

SEQ ID NO: 236850 - DNA, 192 bp, Homo sapiens
  chr13:20357046-20357238
  hyper
cccaactcacgcccgctgcagctgcacattcaaaatggcgctgccacaaactgcagttagaagaagagacgccggtgcaagtcccacccctccgccaaagccggcgccggaacgacgcgcctgcgcactcgcggcaccaacggaccgttgactgaccgcgcatgcgcataacgctgcgcgtgcaatcgacaa

SEQ ID NO: 236851 - DNA, 123 bp, Homo sapiens
  chr13:20532066-20532189
  hyper
ttgttcccttggccgaatggcagagtccagttggggcttcccgaggacaagtttcccggccccacggggtttggtttttagggggtcccaagttcccacagtcgttccgacaaaatggaggac

SEQ ID NO: 236852 - DNA, 1289 bp, Homo sapiens
  chr13:20701841-20703130
  hyper
tcgggggcgtaccccgagtgggcagcagggccagcccgcgcgtccctcagggtcaatgctggggccctgagggtgaggtcagctgtgaggtgaggtctggtggccgaggggaggtgcccagcgtgcgcgtccgcatccggcgggcgacagagcagccccggaacaggagcttcccggcaccggccgtggcgtggcgccctccgctgggccgttctcccccgcagccgctaagtcagcatcgcctactttcccactctcgagtttgcccctctttgctgcccggcagctgggtgtcccatgtcccctgcccgccagtgtgcgaccgcggcctcccgcggggcggtgacggcccctctccttcagcctgaccgccgccagctccctcggcgtgtccggggtggccaggccttgtttagagtagctccagcgtttgaatcgcgcaggcacaagaaggccgtctcctcaccgcgggccagcggggccggccagggcccgggcggagggggagcccgggttccgcggtcgggttgtggggccggcgctgacctcaccgcatgggcccctgcggccgccgtggcttctcacgcggcctgactttggactcgagtgcaggctcttagctgaatctctgtgtagacagggtgggtgggactccgccctggggtggcgctgggggctcgggtctcccgccgcaggcctgtcagcggggcgcttcccgtcgattccaggagcgcccgcgtctctgctcagcgccacgagtccaagcgtgggggaggacgagactttcaaggcggggggtgacagtgccatccagcccagaatacccacccccagtggcgggctgccgtgcccaggccctgatccctgcccctgcaaacatcactttctatcgcccacggggctctgcagatgtggccaggctaagggtccagagttagggagattgtcctggatgatccgggcggaccctaaatgtcatcaaagtgtcctcgtaggagagggagaggaggcgaccgtgggggcagaggctggaggaccgcggcgcccgggacctgcccgcacctgactgcagccaggtggcgccgattccggacgcccagaactctgtgggaatgcagctgtactgtgcggcgtgtaaaccaccgcatctgtgggattttgttaaagcagccacgggaccactccaccccctccagctgtggtcctttacccggcggcggccacctggcagcagcccggttccccatcctgcggggttcctcccgcccgcagaccggctcggccataaa

SEQ ID NO: 236853 - DNA, 153 bp, Homo sapiens
  chr13:20711077-20711230
  hyper
gcgccagcagcaggcgctgtggttccccggcgtccctccggggcctcccgccgcgatttgcggagcgcacttgttcccaggtgtgccagcgccctgcgcagcggcccagccaacccaggctcagactcaggtctgcgccgtttcctcgccacg

SEQ ID NO: 236854 - DNA, 46 bp, Homo sapiens
  chr13:20735267-20735313
  hyper
cgcgcttcccagcacgcacacctaccgcccccgcatccctaccctg

SEQ ID NO: 236855 - DNA, 402 bp, Homo sapiens
  chr13:20766298-20766700
  hyper
cggggagcacagcccggaaacagaccctcgtgaagtgtttaggaaaaagggaagccactgaaatcttggccccggggtaggccgggatcggctggctccgcgttagttctaggcaaactccgcccaaatctctgcccggggatttttctgcagaagccgctccaagaggtaaaggtcagttcctgcagcgaaggcttcctgcttcaccggcgaaacggagctttgcttcgaagctaagctttcggtgaatttaaaacgtttggtggcagtgggtcaagtagccaggcggctgcgctagagtaccccgaagggacatcggcgacaccacaaacctcgcgctggcggctcgcccgcgcctttttcccctcccgcgcgcgcccggccccactcgcaccccgggcg

SEQ ID NO: 236856 - DNA, 975 bp, Homo sapiens
  chr13:20766940-20767915
  hyper
ggcggggccggggcgggggtctcggcgttggggtctctgcgctggggctcctgcgctcctaggcgggtcctgggccgggcgccgccgaggggctccgagtcggggagaggagcgcgcgggcgctgcggggccgcaacacctgtctcccgccgtggcgccttttaaccgcaccccacaccccgcctcttccctcggagactgggaaagttacggagggggcggcgccgcgggcggagcgcgcccggcctctgggtcctcagagcttcccgggtccgcgaacccccgaccgcccccgaaagccccgaaccccccaagtccccttcgaggtcccgatctcctagttcctttgagcccccatgagttccccaagtgcccccagcgccctgagtctcccccggttaccccgagcgccgcctcccccagccccttggcggcccgggtgaagcgggggcggctgagagtcgggaccccccaggaagcggcgccccagaccccggctccggcgctgtgccgtgggcggggttcagggatggctgtggtcgttgtcctctgtactccgcatagtgcgagaggacttggcatttatgagcgcttctttaattttttattgttagagaaacaggcattcctccaaggactgaagatctgttcgagtcgcggaggctgcgcgggcccgcgaggctctcgcagggggacctaggctgggtggcggggcagtgccctctggaatgggggttaacggtggccgaggagggggcgccgctggtgccggcgaagtccccgcttctttctcccctcaaaatctcaccaatccgaacgaacgccttctcgaatttccgattttattcaattactttcaacaatgtgccaaggactaaggttgggggcggtgggagagacaagcctcgtttttgccatggccggcaggggggtcccgccatctgcggagggtgccccccgcggcccccggcccag

SEQ ID NO: 236857 - DNA, 796 bp, Homo sapiens
  chr13:20805881-20806677
  hyper
gcagcaaatgaaacgggggaaaggggcaccggccctcactctggcctcttagacacacgatatgaaaccttcataaaacctgttgtacaagtcaaaggggaccacgctggggtaaaagtcaaaccagtccatcctcgttcctctgcgtacagagagagggtccagcgcgggcggcgcccactgccatcgggccggggccggggcgcgtggacaggagggtgcggatagaggcagatcgggggcccggtcgccccacgtgcggccagacacccatcccggccgcgctctgccggctctgatccggtgccagacaggagcgacaggggcgaggtggggaccagccgccgacctcacctgttttgttttcttggaggaaattcctccgctggggggccgaggtggcaccgcccgctcgccccccgcaagacccagccggtccgcgcccgcttacctgctctgcggccggcggccctggcgcgggctctgcgcggggcggcgcccttcgctccggctgggcaggcaggtcgggctcgggcgccgccggctgtcgggctctcgtcgggtttcgggtgaaggccccggctcccacctgctgcgccttttaaccgcgccccaccccgcctctgccctgacgcggctcgggcgggctgcgggaggcgagcgctgtcactcgacgagccccccgcccccacctacccggggcgcactagccgctgggcgcggaccgtccccctgaggagcaaggagtgcaggaccggggctgtccctccggggccggatgcgcagagcggggacc

SEQ ID NO: 236858 - DNA, 259 bp, Homo sapiens
  chr13:20875746-20876005
  hyper
agcaggcgcgctcccggcgaatctgcctgaatcgccgtgaatgcggtggggtgcagggcaggggctggttttctcagccggtcttggcttttctctttctctcctgctccaccagcagcccctccgcgggtcccatgggctccgcgctcagaacagcccggaaccaggcgccgctcgccgctcgctgggggccacccgcctctccccggaacagcctcccgcgggcctcttggcctcgcactggcgccctcacccacac

SEQ ID NO: 236859 - DNA, 159 bp, Homo sapiens
  chr13:21099487-21099646
  hyper
ggatgagaacacagtcgtcgcaggatcgcagccagaattcgtttcattcaacacggtgcctggcacttctatgtggacctgcgggcagacgcggcgacattcaacagagtccaggaaccgcaggccccgcggcctgggcggtcaacctcggaacctcct

SEQ ID NO: 236860 - DNA, 142 bp, Homo sapiens
  chr13:21100066-21100208
  hyper
tggtccctgagtggggtgcgcgccgcgggcccgagacaccgggagacacacggcgcgccgaccctcgtgggcaggggcaggaccagcgcgggggcacgtcggggggtggaaagcgggaagaccacgcgcttgtgactgtcag

SEQ ID NO: 236861 - DNA, 38 bp, Homo sapiens
  chr13:21141043-21141081
  hyper
ccctctcctccaccgttctacccgcatcgcccggcttc

SEQ ID NO: 236862 - DNA, 309 bp, Homo sapiens
  chr13:21347826-21348135
  hyper
ggcgaccgggacgcgaggcccaacagcgcctaacacagcaaccaggatccactctcaggccggcgccagctccttccctcaggaatccgccagccactgctaattaaactcttccaccactaccaccctggaaaaaaggtgagaaacaaacacacaaaaggcacctaacccagtccaaaacgcctcggcggcgcgcagccaaccctacagctgcgcccgaacccgccactcaccagccgcgcgtgcgcagtcgcccagactcgccgtgtgcagtgggagtggctagccagtctcgctagcgcaggcgca

SEQ ID NO: 236863 - DNA, 1052 bp, Homo sapiens
  chr13:21634591-21635643
  hyper
tgcgcctcgggccgcgtcccgccaagaccgtgagcaaactcgcagagttggcgcggcagccggccgggagacgccgagcagggcctggccgcccgcagcccgggaggaacggcgcccccagggtccggtggcctctgaggggctgactggcccgtgagccggcggcgcggccgcggggaacggggtgggaaccgcgcggcagtgggtgaggcggcgcagccaccgggggctgaggggcggcgcggcctcgactgcggcaccgccgtgggtccgtcggctcgcgggacgacggggcggccggcgggggccaacagggcgggctctgaaggactgattggcccgtgggacgatggcgcggccgggaggatggccccggatccgtgggaccgctgcgccgccggaccgggggtcccgaggctgtcaggggcgcccggccgggcgtctagtgaaaagccgatcccccggagacagcggaagcagaggcgcgcccggcgctacggcctttcgggtctaggacaccgcccccggcccgcgccgcccctgccccgccgggatcccggccgccccggtcgccgcacaacaaagcggcgcagccccgctgcccccgcccgacgccggcctccaacttccccggctcctctggaaccggctccgcgggctccgtacggcctggactacgagccgccgggcgggggcggctccgggcgggcgcggaccgtgggggcagggcgcagggctccgtccggacaaacttcctcggccgccccgccgggcgcccttcccggagcctcggcaccacagtaggtgcgcggagccgcagggctcgaccgcttcgcggaaactctcgccaccctccgagctgccgccccgaccccagctcccagccccctcacctccaggggcgcggtctacaccctcgggggcgtcctggccggcggctcccgggcctctcgcgccgggagaccgggcactggtggctggagctgctgctggccccgcagggacgggggagccccgggcggcggcggtggcgtggacggcgactgctccat

SEQ ID NO: 236864 - DNA, 122 bp, Homo sapiens
  chr13:21635883-21636005
  hyper
gcggtagctcgccagggcctctcggacctatttgactggctgctatctgcccccaaacttgagtatttgccctctcgactgcatttgtattaaaagttggtaactgtcgttaaagccactat

SEQ ID NO: 236865 - DNA, 406 bp, Homo sapiens
  chr13:21649637-21650043
  hyper
acgaatatctgctgcgaagcagtaggaagtgccctgcggtctgtttcccctagcagagactggccttgtggcggaagacccccgcgcgtagggagggccggtgcggcgactccgggcggggcgcgctgttggtgtccagggcgcggagcctgcgccagcttcacaaaagcggtgtggacgcctgagccagtccgctcttgctggacggctccccatagtttagcccaaaaatccccctctgggtggctctggcaggagtgatttagggccacaattaggttggacgaggagtggggacttgccccgagctgcctttgcagacccggcggcggcgttctccccaaggctgcccgcttggctgcgcggctgaggcgagttgaggacccagcccgtccccaactctcct

SEQ ID NO: 236866 - DNA, 247 bp, Homo sapiens
  chr13:21714415-21714662
  hyper
gttttcgtcattacgcatgaaaacgccaccttaagcttatgtcgcctgtgaatatttaagggaaaaaaacatcccggcaaccaactgctaggcgacggacgctaagcacctcctccccgcggacgtcagcacccgccttttcccgaagtcgcaacacgcaggcgcgctccggctcgctcaccacgcacggaagtgcgcctgcgccaggagacgccccgcccagcccctggccgactataaagtgtcg

SEQ ID NO: 236867 - DNA, 147 bp, Homo sapiens
  chr13:21750215-21750362
  hyper
tctctgtttataacgtaatagtgctactttcattatctcaagagagccgtggggttgtacatgggtctaaaacggacacgcgacaagggttcctaggaataaaccataaacaggcccgggagctacgctaacgccaaacgccgagca

SEQ ID NO: 236868 - DNA, 68 bp, Homo sapiens; identical to SEQ ID NO: 203279
  chr13:21872166-21872234
  hyper

SEQ ID NO: 236869 - DNA, 178 bp, Homo sapiens
  chr13:21872501-21872679
  hyper
gtgagcaccagctcgtctccggtgggcgccgccttcaatgtcaagttccagggcagtcgcttggacccgtttggcgagcgcggagtgagcggcgcaggaggagctcccctaggtcccggaagaaagccggcccctgctccgcgcggccagcgacactcagagcgagattgtttgggcc

SEQ ID NO: 236870 - DNA, 148 bp, Homo sapiens
  chr13:22178312-22178460
  hyper
gcttctctcccggcgccgccgcctaccgcttgggaactctcgcgacatccgacaggcttccgccccgcctaccgggcctgcgccgtgggtgcggttgctgaggcgacgctcgcagccgcaagaggtggccttcggttccggggctgcc

SEQ ID NO: 236871 - DNA, 367 bp, Homo sapiens
  chr13:22243217-22243584
  hyper
tctgtttcttccatcgcttttttccccactaagtaaccatcccggcgcactgtacccaactggtcgaggaacgcccctgctgtacccatcactgctggctgcctcggagattaatgcgagcgactcgggtggtttatgagaagtgacacttaatacccagcttcttgtatctgccgccgagcagttaacgttaaagcccgctctgtaccaccgcggatgtgactgctgtaaataccacggggcagggctctcatgcttcagaaacacgtaagcaagacgcaccgagccagccccggacacccaatgaccctggactgcggcaaagggggggtgggaaaggaagaggggaggaccactcgctcttctc

SEQ ID NO: 236872 - DNA, 70 bp, Homo sapiens
  chr13:22243944-22244014
  hyper
agacaatgtgaacaaagaggagcagggggagggaaggggggccccgcgggagggctgtgggcgagtgtgt

SEQ ID NO: 236873 - DNA, 377 bp, Homo sapiens
  chr13:22244253-22244630
  hyper
caacggagctcaggcttccacgtgcggccccgcagggcagagcaggaaggagcggctgcagccccggggcgccccgcaagcatccagtgcccggccctcccagctccgcggcgggcttcggacggtggagtgagacaccagaactcgcctttcgcttccccgagccgatgcacggcttgggatggcgccgctcgtcctaagcagcgtggtttgagggcgagaagacgcctactggagcgctcccctccacccagactcccgaagacgcgcgcccgagtcgaagtcggggacagagaaggttctctggcgcccccctgccgactgctttgcggccgccgggacccgagcagcggggcgggacctaaacatagccccaa

SEQ ID NO: 236874 - DNA, 127 bp, Homo sapiens
  chr13:22244999-22245126
  hyper
ggtttcttcctcccgcctctcgcagtgcatctttcatttgcttttctttgtaaagccagggctcctcgactgcctcccaggaagtcctgcgctctggcgcgccgcacctcgcctgccgcagagcggc

SEQ ID NO: 236875 - DNA, 132 bp, Homo sapiens
  chr13:22248800-22248932
  hyper
atattctagttggcgcttcttcacgcaccccttccctccatgagcattttttttttttgatgcagtcacctttaggataggacgtttgccacatgcagtcgagtcattagaaatcccgtaactctgccactg

SEQ ID NO: 236876 - DNA, 322 bp, Homo sapiens
  chr13:23489699-23490021
  hyper
gatgcccgcgccggcgcaggggcggataaaaagccgtagcgccacgggagtgggcgggagggagagggggtacccgagggccacaagagtatgacggggctgtaagagctggtgtggcgggtgctgcccccctgctctgtctgcaccgcaagctcacctcctggctccgcgttcggttcggcacttggaactggatctggcgactgtgccggcgcgccgcctctgccgcggtcctagcgccgctcggcttcacgctccgcaagtcccaggcgtctgcaggaaccgccatcaccacccgcacccgcgccgggggtcgtgcctg

SEQ ID NO: 236877 - DNA, 405 bp, Homo sapiens
  chr13:23733511-23733916
  hyper
tttcaccacagcaaacccttcggggtgcctcctagcggcggatggagaactagcattgcgcgagagtgagtaaactgtgataaacccaaggggtttgcgggggacaggctgggtggcaagacttttaaaggctcgcaaatggaaccactccctccagagggactatctaaatctcctcaggtgctgaccctttctgacagtaaaggacgagggccagaagtgtaaagattgtggtcccgcgctccaagcccaagatgcgttcagcaggagtagttgggttggaaagaaggcacccagcgtctgcagcgaaggactcgcgtgggagcgagaaatgtccctgcccagtgccccgcgcgctggatcgcgggggcgagtctgagggtggagaggccgccgggtggaggc

SEQ ID NO: 236878 - DNA, 88 bp, Homo sapiens
  chr13:23734096-23734184
  hyper
gtgctggaggggcgcgcctcgatagaactggagaaactggaaaagtggaggggcggggcagtggctggaggaacctctgaagcgacgc

SEQ ID NO: 236879 - DNA, 223 bp, Homo sapiens; identical to SEQ ID NO: 203284
  chr13:23949731-23949954
  hyper

SEQ ID NO: 236880 - DNA, 296 bp, Homo sapiens
  chr13:24040764-24041060
  hyper
cggccgcgtgttgagagcctagaagtggccccgaagccgtgcctttcccgatagccaagcagaagtaggacttgaagcaccgaggctgggatgcccatgctggtgacgccttggggctcgcagttatacttggtgaccggtctacacggcgattcggtgctttccggagtagcagattcatctatctttagacccaccttcgtccttcggcggtttagcacggcctgcgctttcctgcgagccctgctgtcacccgaacagcctgatgacttcacgctcaaccactggagggcaca

SEQ ID NO: 236881 - DNA, 1320 bp, Homo sapiens
  chr13:24152955-24154275
  hyper
ccgctgcgagggtgcggccgtctcggggcgagtgcttcccggcctgcaggaggcgaactcgggcttccccgggaggcgtccgtgggaacgcgcacctgcgagtccctgccggctgaggagccgaggtctgcgacctctgccgacctgagctcaggcgcagcagcgcagacctggccgccgtatcccctctggctgggatgcgggcccacgcgggaaaggctgaaaggtggggaacaccccggcggaaaggaaccctccctctctgctctgaaggaaagtttcccaacacagccatgttcttggtggtctccggtcccccatccccaagcccccagtcagcctcacactcatccgcttcagtagccgcggagtgggggcctccaaagaacccagctgcagagcaagtccggctgacgcagtgtgcgctgggggcggggctctggacgggggcggagccacggcgagagccgcggtgagggcggggcccgggtgggcggtgccctgagcggggctcctagtgggcggggctctggggtggcggccgttgccgggctacgggagagcgcggagccctgcgctgggaggtgcacggtgtgcacgctggactggacccccatgcaaccccgcgccctgcgccttaaccaggactgctccgcgcgcccctgagcctcgggctccggcccggacctgcagcctcccaggtggctgggaaggtaggtgcgtcgctgtccccggcgcgcggcgtcccgcgaggtcttcagccctcgccctggtggatccccgctgggtgggagccgggagtggaggcggccgccctagggagggaggagcgcaggcgggggctgctcacgggcggagtactgcgcggcgaagggaacccccgaaggggctgaccgggtctcggggccgtgacaggcggcgaggcggtgggaggggagcgtgtgaattcacgccgggtccccgcgggcgacgcgagcgacgcgacctggactcctatccgggatattgtaaatagatctgcttgtgaggctcacgactgggagcctgtcactctgcccaagcccgacccggccccggcgcccgcccgcgtcctgcggaggtcccctgagccagcgcgcggctgcaggggtctcggggccgcatcccggaccagcgccagcggcgggagagcgttgtctgtgagcggcccagggtatattccttctgtgggaaagagttccttagagttcagcaggaattattagtatattgatgagtagagcctgtgatagatttagagagtgagaaagccagctcttacaatgcgtgtaatgccatctc

SEQ ID NO: 236882 - DNA, 519 bp, Homo sapiens
  chr13:24477489-24478008
  hyper
gggtgggtaccggccgcgcccctgctcggaggcggcgactccctcccccgccttactcacaccgtgcctcagtttccccgtcagtgcagcggacaagacaatgccgaggtcccaggcgggcggcaggatccaattagtccgtgtaaaatgagaggcatctggcttctcccgggcaccccgcagcctgccccgcctcttagtggctaaaggcagggagcccctgagtcccagcgcggctgggggctctcagcagttctggccgagctccctcccgcccgcgtcgcctggcctcgaaccgctgcaccgcgggcggccccgacgggttcccgacctcccgctggggacacctgtcccgccgcccggcccttccccgcctcccgcgcctccgccccaggggagctccgggacaggcccacctaggcagcctgccggcgcagacccagcgagggaaggccagtctcgggcctccaaccggacacgcgctccccattccgggctctcccacgtctgcacactcca

SEQ ID NO: 236883 - DNA, 413 bp, Homo sapiens
  chr13:24553697-24554110
  hyper
accgtcctacccacgaagaacagcaaacaatagcacagccccggccctggaagccgagctagccgcagagggtgatgcggaactgctcatcgccagggaaacgcggcattcggacagccgtccagagcctgtctgagttctgctgggcggggagccagagactgattcgctgcggtcctgggcccagcggctgggaggtcccgccctggccgaggaaatgaagagggcgcagggcatgggggcggcgcgcacccgggacagtttccagtcggcttctccgtgaccttcctcccccttccagctcggagcgggatgctgggatccctccaaggaccctctgaggacgtaggagggatgctgagacaggcaagtgggatttctctacatattgtcacctcgcccgcacttttgga

SEQ ID NO: 236884 - DNA, 113 bp, Homo sapiens
  chr13:24734667-24734780
  hyper
ccactgcgcctggccggggaactgtttttgatgggtggggtccccggctgtggttggtagtgtgggggcgtggccgagggtgtggcctgagggagtgagctaaccgggggcgt

SEQ ID NO: 236885 - DNA, 113 bp, Homo sapiens
  chr13:24735200-24735313
  hyper
gcctctgcttcccccgccggtggaggctaccgggtgctcacctgttaggtccgtgcgcccgctccctgcccggcggtggctctgcgccctctgggccacccggcaccatcgct

SEQ ID NO: 236886 - DNA, 216 bp, Homo sapiens
  chr13:24735553-24735769
  hyper
ttagaaagcaagtttctcttggtaccagcggagtctcgtcccaggggaaagattttgggacccggtgcccatcgtctgtggactgcagggaatgcattggcggagttggtttggtcccattctgtgcaggaggtgggggaattggtactccagccccaggcaggtagaagcccgcgctgctgccagcgtcagggggagctcgggtgacttgggctg

SEQ ID NO: 236887 - DNA, 94 bp, Homo sapiens
  chr13:25254433-25254527
  hyper
tctgggcgcccagcggaaccagggctgtactcacctggatgccggacccgccccctagagaccccgccccctggcgttcggctactaaagggaa

SEQ ID NO: 236888 - DNA, 86 bp, Homo sapiens
  chr13:25255020-25255106
  hyper
gcctttcctctgagcgccccccggcctgggcaccgcttctctgactccccgccacggctccgtgcggccgccggggctggctgggg

SEQ ID NO: 236889 - DNA, 1741 bp, Homo sapiens
  chr13:25319901-25321642
  hyper
ctcccggctggcagcgccaacgtgctcaaccccaaggctcgctcttgggtctggccaaggaggtcccagagcctggctgcaggcgccggttagccccagcgctgcagcgggcggcctgcagggtgagccacgcggggaagtccaagatctggtggctgcctagggcagcctcgcgcccgcagggcccgcccaccgctttgcttacgccgctgcccgtgggccaccccggcgcgcagggtccccagcccgcgcctccgccacagccggctttcccgcgcagccacggactgcactgccgccacgccggcaagggctccagctggacggagggggccttcctcgctccgggatccctgtcccactgtgtggcttcccgaggcctccccttcctgcgccaccaccaccgcagccgcccgtcgcggtggtcaggggcgctccgcggagaccgagaccaggccccggcccgcagctccgcgcgttcccaggcgcagctcctgatgccaagttcacttggaccccggctgagattagagaggcctggcgaggtgtgggggtgcgcagggagaatgggctgtggtcgccatggtgcgtgttggtcttgtggagatggatgctcctccgggtcaatctctgccttctcggggtcgccctcagtgtcgctgctgaaaaggcctccgtcctcctggtccttgctgtgcgctccccacgtcaccgcgttctccttgaggggccggcgggcgttggcgaaggtggtggggactgtcgtgaggatcatcatgggcagggaagggcgcgcggcagtggcctcgagccctgggtcttctccttcctgaatttgcaaagccaggcgaaggccctcgtgctctcccagagagctgcgctccacccgcgggcctgcctgcgcgtggggagagcggggaggcggggacaggagacctgagcccctgggcgcccctaccacgtgtcccccgtcccaacactggacctcttcagattccttgccgagaggggcctcgtcccaaggctggatgcgccgcgcagcggtgaaagccgccctcgcagcccgcaggcgaccagtgggtgctgttggctttcgccccggggagggaacgggcttgggggcactggcggcggcggagcgcggcggggaagctgtgggggtcgtgcgatggttatggagagtgctccatccgccaggcctgggctctgggcgagctgaggagaccggagtttttccccaggagggagccgcgcaggccggcgacctcttcccaaggctctactgctggaccgcgcccgcggcgccgctcccgccccccttcagcgcactctgcgcctctcgctgggtatggccagctcgcagtgcgcgtttatgctgcggtaaacgcattgaaggaacgcacagcttatctaatagggttttgaaataattttcggtatgccagctggggtgtggtttgcccaattctgatcctgtttccagagaacacagctgcttagacaatctgttatcttcgcgtcctgtcttccttttgacgccagaacatcctagggatcaggggcctctcccatgccctggaaccatcctctcacggtgctgctcttcactggtgccaataacagagctcccgcaggcaggcctggatcagtggggactggggccctgaagtgagatggagcaagacagagcggcccttgggagaggggcatggggcggccctgtgctttagactcggcaccc

SEQ ID NO: 236890 - DNA, 308 bp, Homo sapiens
  chr13:25497030-25497338
  hyper
gatctcacccgcgcgtctgcgctaaagcgcaggcaccgctgagcccagtgaaactacaactcccagtgacgccacagcgacgggcgttgcccggcgggggatggactgcgcgccgccttccgaccagcagcgggccagtggtcgacgtaggcgggcggcgtggcggggcggaaaaccgtttccgggagagaccttccgtggtggacgtcgccccaggctcccacacttagaaaactaaagggaacgcctaacggagcgatggatctccgtgttcccagcaaagcagggagcacggagagtcaaagcta

SEQ ID NO: 236891 - DNA, 190 bp, Homo sapiens; identical to SEQ ID NO: 203287
  chr13:25497658-25497848
  hyper

SEQ ID NO: 236892 - DNA, 390 bp, Homo sapiens
  chr13:25592165-25592555
  hyper
ctctcagcgcctcccgcctctcagcagaaacgcccaacagaaccgttagaaccagcgagcacgcgcaccttagccggccccgcccaacaggcccgaggcagagaaaccgccttagcagctctcgcggcgcccagtacaggcggcggttgctgcgcaggtgccgcgggctggcagggctccctggagccgcaaggcgcgccctgccccagggcctgtttgactgtggcccgcgccctcttctcctcttccaacggctcccgatgctcagagacccccgcgctgggccctctgcagcccagggatggggttgagtggtgcttctccacctggtgccgccgctgggcccacagcccgacttcgccactgcgtcgcccccggggtccgcgctga

SEQ ID NO: 236893 - DNA, 680 bp, Homo sapiens
  chr13:25620894-25621574
  hyper
atgacattgagaaagagacccgggtccagtgaagcatcagacacgctggcgcatggggacgaggagccctggagactcagggcccgtctggtgcggcccgggctttgctccgcgctcgccccctgcagctgccggggccgccgcaacttttcaaacctcaccgcaccgacagctctgtcccttcttttatctggagacgctgagcctcatcaactctcacctgcgtttcaggaaaaataataataataataaatgttccacggacacaggatttcggccaaatgctgcttagctctaccttccccaaaagggcgggaggggtggcaaccagtagcgaaaccccgcttgcctgtctcagcaactctcccacgtccgcaggaggccttgcggggatccgagcatcccgctccgagatggaagtggtaggacagtccgggagaagccgacgggaaactgtcctgggcgcgcaccgcccccgtgccctgcgccctcctcatttgctcggccagcgcgggacctcccagccgctgggcccgcgaccgcggcgaatcagtctccgcttccccgcccagcagagctcagatctgctctggagggctctcgggatgtcgcctttccctggagatgagcagttctgcgtcaccctccgtggccagcgcggcttccagggctgggctggt

SEQ ID NO: 236894 - DNA, 83 bp, Homo sapiens
  chr13:25746064-25746147
  hyper
tctagactcgctcttcacgggagcgcaaccatggatcacgaaatgcctctaaaaacgacaacgcaattcaacccaccacaaaa

SEQ ID NO: 236895 - DNA, 48 bp, Homo sapiens; identical to SEQ ID NO: 203289
  chr13:25861519-25861567
  hyper

SEQ ID NO: 236896 - DNA, 86 bp, Homo sapiens
  chr13:25945988-25946074
  hyper
cccatcgccttccccgacacctaaaagccccggtcctgcgtaatattgcggatccctcccagcctcccgtccgctcctcctcccgc

SEQ ID NO: 236897 - DNA, 50 bp, Homo sapiens
  chr13:26043142-26043192
  hyper
gaaggcagaggatgagatgtcccgggccacgtctgttggagaccagctgg

SEQ ID NO: 236898 - DNA, 86 bp, Homo sapiens
  chr13:26043372-26043458
  hyper
cagagccttcccctgccccctccccaccccactagcccgcggtgcagccccgcgcttccagtagggtcatgcgaatgcagccctca

SEQ ID NO: 236899 - DNA, 174 bp, Homo sapiens
  chr13:26623880-26624054
  hyper
ctcaggatgctagcgaaaagcctcccaggtaaacacaacgggcccacaaagaggaggagccgccccctcggggacacgtttgccattttacctctacacctcccctcccccgaaataaataacacacacacacacacacacacacacacacacacacacggagtgactggtgta

SEQ ID NO: 236900 - DNA, 135 bp, Homo sapiens
  chr13:26624294-26624429
  hyper
agaagatgggaatccgcggcgtctggcacggggcagcagccccgggaaagccctgaggagctgccttcctttcggggagccttcaggggagcaccgctgccaggccctcacgggtgggggcgcaccctcgccgtc

SEQ ID NO: 236901 - DNA, 641 bp, Homo sapiens
  chr13:26624757-26625398
  hyper
cgctgggcgcaggccgccctacctgccgagccgtcggggccgtctttgtccgcccggccaggctcgccagcgccctgctggcggtcattgtcgcagccgccctggtccaggcgcgcctcggcgctggagcagcagtagcgcaacgcgcagctgccgcagcagatggtggcgtcgccgccgtcgaagcgctcgggacactggaagccgatgcgccagacgccctgcgcgtccagccagccgtggcagtactcgccgctggccctcgcccccgccgccagcagcgcagccagcagcagctgcaggagcgaagcggcgttccaggatgaggagacggacgagcggcgagcgccccacatggcaccaccctgggcgcggacagcgcgtctccagagagcgcaggacggtctccgagaagtcgtggccccggcgacccccgggcctcgtcactgactgtcccgcggcgctttccgcgcgggccactcccctctgccgcgacgcccaggaggcgacgacgccgggccctaggtccaggagctcctaagccatccccgtcctcagccggtggcccggtccccttagggactgccttatgagttgcactcgctgatggaaatctcgggatgcagtcagaaggcccccgg

SEQ ID NO: 236902 - DNA, 77 bp, Homo sapiens
  chr13:26625578-26625655
  hyper
cctttattccctcctcgggcgggtagaaggggcgaaggcgggcagtgcacgcaaggctctgggcagcaagtgacgca

SEQ ID NO: 236903 - DNA, 50 bp, Homo sapiens
  chr13:26625835-26625885
  hyper
gtcctgcgcgcccccagccgcagtcccgggagcctgcccagctggcggcg

SEQ ID NO: 236904 - DNA, 58 bp, Homo sapiens
  chr13:26626305-26626363
  hyper
gtggccaagggcggggtctgcctgctggaataggcgcgggaggaaacccaacctaagc

SEQ ID NO: 236905 - DNA, 271 bp, Homo sapiens
  chr13:26760408-26760679
  hyper
acatctggagtgccgtgtggagacgccagggcgcgtggagctttgagcagttaaaaacccagaccgggaggccagtgcgtgtgtaagaccgcgtttctctgcaaggctgtcccgcggcaggaacgcgctcgttgggccgcagagcaagagcgggacgcgccggggggcgtctgcgtggcacgtgggccccgcagccagtcgcgctaccgactggcagtcagcggagacgcttcggagcaggtctgttagggcgcgcgcacacacatgcacg

SEQ ID NO: 236906 - DNA, 50 bp, Homo sapiens
  chr13:26828724-26828774
  hyper
cacccctgccccccggccccccgacccagctctccggcctcagaggctgt

SEQ ID NO: 236907 - DNA, 1206 bp, Homo sapiens
  chr13:27131470-27132676
  hyper
attaggatataagcgcaaactcaaaggtactgtaatgggcacctagcaatcagaggtgatacaagggtctcttggcccgaagtatccccacctctcctcgctggaaaggacgctgcctaagcctcatcccgagctgggggcggaggaccaagggtgagagccaccgcctccgcaatcccccgcccctcggcaccgtcgctcagcgcgctcgccggctccctattggccgaggcactcgccaatcctggtgaagcggccccgtgagttggccctggttggtggagccggcactgagcccccctcctgctccggccgagcccccccgccgggagggggcgtggccgcggccgtggacgggccggaggcggcgtcgctcgcgccgctgcgtgcggtgtggtgcgaggcgggtgcgccgggcggccgcggcgcggcgggaccatggagctcagagcgcagccccggcgccggcggcgggaccgcggaccggtgagtgagggctgcggtcgccccggctctccgctgtaggctgctgtggccctctcggctccgggccgggcggctgtcgggggaggggcggccccacggcgaactgaagttgctgcatcgccgcgcgctccggccgggcggcggggcccactgcgggctgcggcgccgcctcgcgcctatccctgcagcccggccgcattctcccggccggctcccgcgctggcaggggcttctcgccgtcacggcgcggccaggcggcccttctctcccgcgcctccgggcctccggccctttgccgtccggtgcgcgctccctggactcgggacagccacccgccctccccgccgtaagtggcgcccgggcctccgctcgcgccccacgcacgacgccccgggccgctccgcgtccgggaccttcgcatccgttcagtgtctgcgcgccctcgctggttctggtccagctccgcgtgccccccggccccattcggccctcgccgccctggcctgtgccctcttggtgcccgcgtgcgtgttggttgcgggcgtcctctccctcgaggctgcggtgccgcgtggctcccggcctcggagaccaggccggactcttggagtgcaggggaggaggtggggcggcccgcgagtgcgggggaccgcgcgcacggagccgcggcgcgcggggtatcatccccgggggtctttacccgcgcgcctgggctttagc

SEQ ID NO: 236908 - DNA, 178 bp, Homo sapiens
  chr13:27335041-27335219
  hyper
ggctgctctagggtgcgggcaggcgagggcggcccaggggcgcggggcgaggggcgaaggagccaggaggctgagaactgcatggtagccctgcctgcctgccgcgctgcgcgccccaccccagccggcggccccgggcttgcaccgggcggggcaggggagcgctgcctggagccct

SEQ ID NO: 236909 - DNA, 114 bp, Homo sapiens; identical to SEQ ID NO: 203295
  chr13:27825512-27825626
  hyper

SEQ ID NO: 236910 - DNA, 291 bp, Homo sapiens
  chr13:28024612-28024903
  hyper
gcaccgctccgcacgcctcatatttagcattacctgtgctggggcaagcgattgacatactgtagcggacgcaagtacagcggatctgcggcgagtccccttcgctctccgtagtgggcggggcttcaccccgcgtcctttaaaggaaaggtgatgggcggagccacgtttttctactgttgggattcagttccgccgacagaaaatgcggagaacgcggaggaagtccctgaggggaaattgctgctcacctggctcccgctgctccgcaggtgcggtgaaggctaatgt

SEQ ID NO: 236911 - DNA, 203 bp, Homo sapiens
  chr13:28194643-28194846
  hyper
gccgccgccgccgcggatttcctggcaaaaagcaaactccggccaagacttcacttctcaaccgcccctgctgccttcccgggggcagcgccaaggccgagcggcccaacccgcacccgggccaatcggaggtagcacagggcgggaggtgggcggaccagagggcggctccacctatccgagagctcgggaggcgggccaga

SEQ ID NO: 236912 - DNA, 102 bp, Homo sapiens
  chr13:28195534-28195636
  hyper
tggtgactcatctcgcacgtgacccccctccctcttcaaggtgtgttgaccgactacagtttaagcctgtcgtcccacaaaaggcccgggagggccggggtc

SEQ ID NO: 236913 - DNA, 167 bp, Homo sapiens
  chr13:28364173-28364340
  hyper
cggccgcggcccgccgggctgagagaccacagattaagtgcgccttggttctctcagggatgctattttgctccggcccgggtctctcccgcgccgagttgcacaacaaaccatttaaacatttcagcacaaaacccgatccattgtggggccgcacattaaaaagt

SEQ ID NO: 236914 - DNA, 203 bp, Homo sapiens
  chr13:28364684-28364887
  hyper
cctccccgggcacgcggggcggctgccagtggagctccacgctggccactcgcgggctcccagctccgggtgcagtgcccgccccttgcacccctgggccccgcccgcccttgcgcccctccagcctgcctctgcccagcggaaagcccctctccccgcccgggtctcgctcttcgcttcctctcagcgacccagcccagctc

SEQ ID NO: 236915 - DNA, 483 bp, Homo sapiens
  chr13:28365572-28366055
  hyper
ggggagagcggaggcgggtcagggtgggcaaaggcagccgatgccaggaatacaaccgcccttcgcgccgttccaaactaagagatggcagcggtttcccagcgcactgctggaagtgtgctccagtagacagggtgtgggcaagatgcgcgggcagacagtccgcactcgccacatgtgctggggtgcgagatctagatctgcgccatctcggctttcattccccattccctgtctctgttcgtaacgctcagagactgtttttcctcttttacatccacggccctgtcatttgaaggaaagggctggttggccagcatctaccgaacaaagactgggcgtcgtaggcagcaccaaaattaagactatttgagaaacttagagaaaaccgagggacagcgatgggtctagggctggataaggaataatgagcccttctcctccctccccacagacgcctccttcacgcgggaacccggtcct

SEQ ID NO: 236916 - DNA, 693 bp, Homo sapiens
  chr13:28366529-28367222
  hyper
aaaaccctattgagaggccccggccgctcctggcgtagtccatcacatggcaatagtcctatttaagccgcgccgccggcgcctttcagcaccactagcgctggccagcaccccgcgctctttgggcggtgcccacggcagcagaggctactgtttcagcctaggtctcagccgcgcgttcagcctcctgggcagaggcagctgcgggataccgcggccagggaaagcgcgtggagagccgaaaggtgcggtgggcgcagagggcgggctggctgcggggcgaccgcgcgccggggccatgccgcgctccttcctggtggactcgctagtgctgcgcgaggcgggcgagaagaaggcgcccgagggcagcccgccgccgctcttcccctacgctgtgcccccgccgcacgcgctgcacggtctctcgcctggcgcctgccacgcgcgcaaggctgggctgctgtgcgtgtgcccgctctgcgtcaccgcctcgcagctgcatgggccccccgggccgcccgcgctgcctctactcaaggcttccttcccacccttcggctcgcagtactgccacgcgcccctgggccgccagcactctgctgtgtcgcccggggtcgctcacggcccggccgccgctgctgctgccgccgcgctctaccagacctcctacccgctgcctgaccccaggcagtt

SEQ ID NO: 236917 - DNA, 302 bp, Homo sapiens
  chr13:28367801-28368103
  hyper
acctgtcccgcctacgtcgcatcgagatcgcgacctacctgaatctgtccgagaagcaggtgaagatctggtttcagaaccgccgagtgaagcacaagaaggagggcaagggcagcaaccatcgtggcggcggcggcgggggtgccggtggtggcgggagcgcaccgcaaggctgcaagtgcgcatcgctctcctcagccaagtgctccgaggatgacgacgaattgcccatgtctccgtcctcctcagggaaggacgaccgggatcttacggtcactccctaggcgcgtgtctccctaggt

SEQ ID NO: 236918 - DNA, 150 bp, Homo sapiens
  chr13:28368350-28368500
  hyper
agcaccgcggcccccgcccgcaagcctgcttggcgcagcgccttgctggcagccggcgcctcctagcccgccctctctgggctggcttgggcttcctcgcttactctactctcctccgctctcggtcaaggtcggcggccttggatgctc

SEQ ID NO: 236919 - DNA, 924 bp, Homo sapiens
  chr13:28369066-28369990
  hyper
cgagccggctcctcgccttacagctcagccagtgcctctcggaaccctcagctccgctgagagcccgccttgcatgccagccaggtgcgcgctaacgattgtcccgctccggcgtggcgcacaagcgtcgcggagctcagagagctaagccggaagggaaggagagcgctctccttggactgcaccatgggtcccaacccctgcagcgcctccttctcacctgggatccagccccacctccatccctcaccatttcgctgtcctggccaacagccgggagggcagaaaccactccctccataagcacaagaaatccgtccttcactgcgcttggattgataacgattcgttagggacaaatttccattctgcgggatggtgcagacttctctcagagggccctcctctctttgttttaaggcaaattcccttagccgagtccctggtcgcggaacattccgggcaaggaatccgagaatccgaagtgatcctgccccagggagtccccgagagggactctgcatagctggagccagtggctctgggacctcatgttctcaccaattctcgttaaaatcctatatccccctacgacttagaatccacaccccagctccctttgaggacatatgcgggtttttttactctctaagatggatgaggagaaggaagtgcgtgaggttctgcagaaacggagagcgcacagctgcgggaggagtatttctgcagtcagtatttctgcagtcagacctgggaagctaatatccgcgttctcgccgctcccattctgtgtccaggaaacctgatagaccttcttttcctgccagacccctacacacacacacagacacacacacacatacacaccctggggagcgctgaactccccgtgtctaggcaaagcaaatgcgtcttttccagcag

SEQ ID NO: 236920 - DNA, 143 bp, Homo sapiens
  chr13:28370404-28370547
  hyper
gattttagtcccagtctaaccggcctaagaaccagcggagccgatggtgtaactcctagtcggaggccaaaagcctgagaacctgggaagccgctaatcgaagacccagactacaaggccccggaaccaggagcttgtggggc

SEQ ID NO: 236921 - DNA, 712 bp, Homo sapiens
  chr13:28370985-28371697
  hyper
gatttgggggcgggcggcagcacgattttctggcaacgagttcgttgtgggtctgaaggaccggcttagaactagcacctctcctggattacaggagggggtggtcttgtgcacctgggaaaggccttcgccagcactcagtgtcaggcatcttgatcagaaatgcactttcgagcctgccagggaaccaagtttggaggggatggaaacggcggtgggagacatagaaaggatgaacacacacacccggctctccccgcactcgcctcttctccagctccccctcctctcccgcctaggagtccctcctgttcccagcttctccccagagtccgcagatccacagctgtgagccaggtccgcgtggggccagttttcccaggagtgcacgtttcctcctctcggcttcccagggattcatttccggaagaccaagctttcagctttctagtctgccttagcgagcagcgggaggaaaaaagcaagcctccttgtggcgatcccagttgttgccaaggtggtgacgggagcgcagcgctggggacctggaggcggctgcggcgcaccagagctctcaagcatcccgccgccagcagagactgcgttcaagtcccagcacactttcgctcaaacactcctcaccctgcaacctctgacctgaatgcagaaacagtttgcgtcttgtgctgagctggccgggaggcctccgctc

SEQ ID NO: 236922 - DNA, 558 bp, Homo sapiens
  chr13:28394423-28394981
  hyper
gcccacaccgacccgagccaacagaatggggaggaagcaggtgcagggagtcagcttcatcttccccttctcttgatgatgctcttcagccattagggtttcaaaagagtgggcgtgagcaagcgagaaaagccccttcaattctgggaaacttaaagacagtttcttccagcaggaacacctggagaggcaaaaaaaaaagcaaaaaacaaaacaaaacaaaacaaacaaacaaaaaaagttgtgttggaacccgtggagagaaggaactgtccgtttccaaactctgcttcggcccctctcccctcccacccacggccccaggcagagagggccggaaaggcagcccattcctgcccgcgcattcgggcgcacaagcgcattgcgcatgtactgtggagggggcaccctggtctccacctggaatgcgcttctagccaagtaattgcgtcgcctttgcgcgcagctggcctggggaacctgggcccatcagagccagttactcttggtccccgctttactggagggtcgcaggagactttcgcttccaaaagcaca

SEQ ID NO: 236923 - DNA, 279 bp, Homo sapiens
  chr13:28395257-28395536
  hyper
tttcagtcaaatgcgcaaagccaggtggctcctttaacacccccagagattgtccccatgatctcctctgcgccatggggcgctgggtgctgggggcgccgtctgtatcctctgcctggtaactgcccccatcgcgccccactgcgccccagcccaggctggaaaactgggccaacagggaggcttggatggggggaaacccagcctgaggctggaaacggctagaagtgaacgggacgagtggctttgcaaaagcagccgctgcgattctctagcgcc

SEQ ID NO: 236924 - DNA, 55 bp, Homo sapiens
  chr13:28395743-28395798
  hyper
taaaagctgaatgcgcacctcaaagagatgtggtgtttgcgcagggaggccccct

SEQ ID NO: 236925 - DNA, 478 bp, Homo sapiens
  chr13:28396896-28397374
  hyper
tctgttagacggtgcggtgcctgcagctgatttgatgggttggaaatgcgcacgaaacaaaatacttgaatcctgaaaaagaccctttgtaagtttctttagaaatcaagcaattctgcatgacaaagaacaattaataagccgtcttttcacaaaccagcagctggtttccccgtcaaggaaagttggaaaaaattcaggctgaatgcgcgcagaagctctttgcgcacagacatctctccaaggtgacccatttggcacagctgaaataaataaccccgctcatgcccagagagcgggggaactgtcagaaacatttacgctagaatatcttgaaattgcaaatccttttatgggggaggacgctgccgatgtgggttaaatggacaatgacgctggttaagttggagggtcctttggagacggacacgtggcttctcaatgaaagctgctccgggctcgcgtggccgccttcgcc

SEQ ID NO: 236926 - DNA, 1063 bp, Homo sapiens
  chr13:28491468-28492531
  hyper
agagctgctgttaaatggctcgggaaggtgctcgcctaatggctcggtatcgctgccgggcctgttgtgggcgaggcggcttggagggggcgcaggcgtcagcggggattcagagcggaaacgcatttcgcctgtaatggactcggcgattttacgataccaggagctagatccacggggaagtacaacacacgaccttactaagcggagggttccgcttgatgcgttttttatacggctgtacgtgataaaattccagataactttgtttcatctaataataataataacaataataaatggttgtttgacctttgctccctgggtcccttctataggtcgcaggcagcagaaaatgctaattgtgaaagtgagaacgcgcctccatggaatacccccggcgatcccctcctcctcccccacagccgcgggtacccgggtttttgccggcgaccgcaaccggcggatttgctttctgctgagagcctcttttctttctgcagggccgagcaaaaatattaaatggaagcaaatgaagcatcgaaatggagaccaatttacagaaatgtgcaattagttgagaagtgcaaagtaaacactccgggggtggcaggcgaggcagggagcaggggagggagagtggggcgcagactgagtccagagtgggtgtaggggtgcccagggaggaggggaagggggaggaaaaggagggggaggggaaaagtggccgatctttgtcctgagcggagcttgccgtccgctcataaccgcgtcgccaagtcaaccctcggcgactcggcagattatctccaagggtcaacacgccgcggccaggcaaccccctccagcctgccctcctgatcgatgtggtcactcgcggccagggtgatagggtagagttctccgcggccgcagacaatggactcattgacgcgggcgcacagagattaggtgcccgggccccacggcctttcactctctgcccccaccaaaactgcaggtggcacttttccctgaagaaatcaccgaaactctccccgcccgccgccgtgcttcccttggc

SEQ ID NO: 236927 - DNA, 1930 bp, Homo sapiens
  chr13:28494087-28496017
  hyper
atggtgcggcggccggcccgccggtccgcgctggctgtgggttccctctgagatcagtgcggagctgtcaaagcgagcaggggtggcgccgggagtgggaacgccacacagtgccaaatccccggctccagctcccgactcccggctcccggctcccggctcccggtgcccaatcccgggccgcagccatgaacggcgaggagcagtactacgcggccacgcagctttacaaggacccatgcgcgttccagcgaggcccggcgccggagttcagcgccagcccccctgcgtgcctgtacatgggccgccagcccccgccgccgccgccgcacccgttccctggcgccctgggcgcgctggagcagggcagccccccggacatctccccgtacgaggtgccccccctcgccgacgaccccgcggtggcgcaccttcaccaccacctcccggctcagctcgcgctcccccacccgcccgccgggcccttcccggagggagccgagccgggcgtcctggaggagcccaaccgcgtccagctgcctttcccatggatgaagtctaccaaagctcacgcgtggaaaggccagtgggcaggtaagcctggctccccacccctttctcctttccggttctcacccggccgccttacctccaagcgctcccaggagccttctctctgttcccggcgccttggattatcccgggtcggactaaactacatcagggagctaccgagcccatccctcacagcagtgcttctctagtccagtttgaagcatctttcccacccagctctcctgggagtgtacactccttccttccctgttcgctgagcccatcttcgccccaggagcccgcgctcccagcgccatccttagagagccgaggctgagtcctgctcagggcttcggacactacagatcctcctccagcaggggatccgggaacccaggactccttggtagtgcacatcgaggaagccgagtagggacatgggtgcctcggacccaggccccagatcgccttcggagccccggagcccctcacttcccgcgcttcgttaaggaagggcaggcatctaggggcgccaggtaggtgcagaaaggcagggagggaaaggaaactgcacccaacccagcagtgtccggctgccctggttgtggaaacaggataggagtaaagaggaaggggctggggcaaggcgggggctcaccgcgaggctgaaagccggcctctcaacgtcagagcctggcagctaggagagcaatctgagaagcgaattcgtttttcaccaaccgaaagcaattgaagctgtctccccgcaccgcttcccaggaagtaatttttcaggagatgggcgctccctgcctagctggtggggaggcgagaggcctggttcctgcggccctccgcgccggcagagaacagaaggtctttcccggagccgggagccggaggcacggggtagcccccgggtcctttgcggccccgcgcgagcggcaagttccggcgcggcctgtgtcgtcgccgctactcactgtcatcgctgccgtgcctcagccacttctggtcacacctgcaccgcaaatagttgccttttcctttcaactggcagccgggagtagggggaagcagctcgagccggcgtcccccggcccaccccgaaaatcctcagcgcccatctgcggggtctggccagccctgcctgacactgaccccaggcgcagccaggaggggctttgtgcgggagagggagggggaccccagcttgcctggggtccacgggactctcttcttcctagttcactttcttgctaaggcgaaggtcctgaggcaggacgagggctgaactgcgctgcaatcgtccccacctccagcgaaacccagttgacaggggcgccagaagctgccgcggcgcctctgcaaattt

SEQ ID NO: 236928 - DNA, 1828 bp, Homo sapiens
  chr13:28527188-28529016
  hyper
tgctttggaaccagcgcggcttctgtgtggcagctactgagtgcacgctcgacctttgccaccctccgcgctgatggaaactggaggaggatgtggtttagacacaatgtggcccaagcgtccttgtttcctgaatataccccaaagtacaagtcccatctccagttttgaaagaattccccgaggaaaggggcttgagtggagtgggtggaggtgagaggggaagatgaggtgttggagaagcccggcgcacggggcctctattaatattaacttttattaagagttggcctttccccggggcttcacaaagcaggaagtcaagggcagtggaacagggaagggaactggcaggaagagaagaccttgagtaaattatttagctgtgacacgagattaagagtgaccccaccctcctccctgccccacacaccataaagtgggcccaggttggggagcagcgctccagctgccactaatcatggaagcccagaggcgaaatcagcttcccggggacccagaaaattgctggagtctggcgaggggcaaatcaggaagtgtctttgtcggagatgggacggaacccggcttcggggcgcaaccgggctctgggggagaccgcgtttgtccaggtggcaggccgcgccttctgatggctgtgaagagaaggagcgggggttttaagagccacagcgccaccgagagagtggaaaggagtagattagctcgcgcctgctatgcgaggcgactccccccgagacccacccgcagcccagcgcccttggccaggaggcccggaaagccaccgaggcggccgaaaggggccgcggggcacccctcagcccctcctgcggcggctccggctgcccctgctcagcctcccgctccccgcccggagtcccagctctcagatcggccgcagagctgggaacagaggccgcggggtccaggccgttccgcccgctcagccggagcagcagcgccgcctgccgggggcctcgcgcaggcgagacaggccagacgccggaggccgcgggcggctgcagctttgacgggccgaacacaccagcgctcccgttccgccttttgaaaatcaaatcccttgggcctggtgccaccatcgctcagcccaggtcttcgacgacgggtcgaaggccagtgctccaggccttcttcaccgagtggcttcggcgcttgcggcccaggttccccgcacctccgcgccgtagttgcgcgcaccttttgaaaagcttggcgtcttcaggtataaggacaaaaacaaccgcggacatcacaccattccaaagaagaaaaagaaagtgcccggaatctcagggcgcgacttccggggcgacgggcggcggcggagaggcgctccccgggcttcctacccggcaggaggccgcggcgccgggacctcgcctgccctcaccgcgcgccacctctcgggagacgccgcgaatctctccagggaatcccgggcagcggcgcagacccagcaaggaccggcagcaggccgagaccggccgtcttgggcgagagcagcgggacacgagcccccgggcgcccgctgggagcgcggggaggctctgggctcagggaagctgcgctccgagtggccttggaggacggtcaaggagcccgggccccgcggcggccgggagtggacgcgactggtccgcgccggccgcaggggaaggggcgggtcggcgctgcctgagctctatctgctctaatggctggggtagatccgcggagatacttgaataccaggccgaacgcttccccaaggcgtgttgtagacaacgggcccatttgagcatgtgca

SEQ ID NO: 236929 - DNA, 1162 bp, Homo sapiens
  chr13:28534469-28535631
  hyper
ggctcagccggagtcggcagaggcgcttgcacctcccaactgggtgaaaactggaacctttccgggttcacgagcccaagccccatctcttcccagagcgcgcgcgccctctggcgcctgaaccggcgactggacgcggtggaggcgtgggattcggaggccgggaccccaagctctgcgctggaggcgtcaggagccgcgaggtcatccggtctcaacctcaggcgcccctgtgcaggcctccctacactcctcaagctgcgctccctactcgtgccacatcccttgttccgtaggtattgcttcgggggtgacacagttggcgttagaagcgcggtggcctcacttgccggagagggtcttggttttgcgcctttttccgtggcccgggaggcttgccaggcgctcgcagcagcgagccgggtgcttgcatctcagagagcagccgagctcccttccctggccccgtacccgcgtgcaaggggaccgagccccgggaaggggaagaacttgtaatcgcttgcagcgggacaatgtcgacttttgaacctctaaccactaagcaaacaacccatgtgctcttgctccactgtccaaacagggtttattgacaggcgtttcacggcaacgcatagcaaccccggcggctagggggcgggcctgtgggcgcggccggggcgcggggagacctgcggggcaccggggctcagaccggccctgacccaggacccctgacccaggacccctcgcccagcggacccggacacggcttcctcctctgcccggcaccccccgaccccacgccccgcactcctccctctggcttcgaggccaggcgcccgcgggccgggccaccggagcccctttcccaatcctggagctgtatacgccacccggaagggccgcggaattggagaggtgctgcagagggtctatacctcttgctgtttcccggctctgctcatcttccccaactgcccttaaggcgcctccgtgggcgcgctgattaggctctcggatgttggtgggaagatcgaaacgaagggctaagcccccctcgcccgggtcctgccggaaagttcagctcggcggcctccaggatcaaaaattttaaaggctgcagcccggtccccagtggatcggccagataacaagaaactgt

SEQ ID NO: 236930 - DNA, 989 bp, Homo sapiens
  chr13:28540420-28541409
  hyper
tttgaatggggctgcggccccgaccccgcgcctgctatgaaagtaaagggaactaacgcgactttctccgcggtggacgctcggacacgcgtgaccgcctcaaacccactccaggctgccattggtactcgcccctttttacagatgaggaaatggagaatcagaccgggtcacgcagatagtatcaggcggggttggcaccggagcctggctggagccacagaggacacctccggagctgaggcgcagggcagttccctcagccgaacaccccgggagggagactcgcctggaagtgtctcggagcgacccttgctcgggtgctgccccttcagtgtcccggacgtgccgggcaacgcgatgaccagaccctgagcgctcttcgacccatgccccaagggccttggaggcgccccacaccccctgggaacctaggagcggggctatggaggggagggatgagagggacttgtcagaattcattattgactgcgaaagtcaccaccctctttccgggccctaaaagagacaatggcagggctgggaaggtgtatatcaaagcaagccaggccgcgtccccccctccacccccacaccttgacagatgacgctccgcagaggagcccggctccggcccgcgggctgcggccaccccacattaacatcacaagggcacccggcgccgactgcggccttgccacctcggcgcaggacttcacagcggcctctcatctgctgaccccgcggcctgggctctggcggcttccctcccgcccccttcccggccctcaccccgcggccgctctcccgggacacgcaaaggtcttccttagggcgtgcgccacccccgccaaccgcgccccagacaggggctgtagaaagtgggtctttgggagccaggatctgggagcccctgctaggagaaaggcgcctcctctaggagaagggaccaagccaaagctctgaggctcacccgaggctgatctgtg

SEQ ID NO: 236931 - DNA, 1562 bp, Homo sapiens
  chr13:28541973-28543535
  hyper
gggcgcgcccccgtcgccttagcagctggggctagcaccttcttcccagcgacagcagctctccctggtctgcctgctcgctgtaccttgaattggcccgagtggccaaacccggtcccacacacagcctagccatcctccgacccccccaggtcacttctcttcttagatggctcagatggggaaagagagagcggagataaatggcctagacctagcccaagaaggttcgagcctccctctctcctcggcggccaggagccacgcaaggaatgcatgccgcagcaagtgccggaggacgcgattctgccggcgtccagcagtgctcacgccgacattccccggagcttcccgaaggtgtcccggggttgcgaatgaggagctcttggaaagaggacgcctgaacacggtgttgagactcagaatattcactcccaggctcagtaggtcagagaagccccgacgggccagaggcccccgaatttgtctccgggccgtgcccctcctggcgccgagctcccagacagcccgggacgcccctgtgcgcactggacgcgcgacgcgcagcagccactggctcgacccgcgccttcccaagcaccctccgaaggggcgcagcctctgcttaccttggctgccgagggactgctgcgccggcttccgcatccactcgcacaggttccgccgctggccgccgggagacagctgctcggcggcagcggtggcggcgggcccaggagggccggggttgagcgtttgcagcagcccagaagcgcaggaaggcgcggcggccgggtggtgcgggtggtgatgcgggtggtggtgcggatggtagtctgcggggctgctgtagcccatggctgcggccggggagccaccgttgaggccgtgagccacggcgttggcggcggccgcggcgcctccgggcgcgtagccattccagtcctcccggagtggggcgccatacgctgccggccaggatggccccggggactgcgcgctgtccaagttcgctgccgctgcagctgcggccgccacgtggtaaccgccgtagtccgggtactgcggggggctgacgaagttctgcggcgccaggttgaggccgccagagtggcgcacggagctagggtacatgctcacgtccttgtccaggaggtagctcacgtacatggtggcgagggtccgggagcagacctcaccatgctgcctggggaccgacgctggaggctgccggggggcacgaagggaaaggggcgaggggactcgaggagcggcgggtggctgcgccccagcccgcggtgctccgctggctcctcgcggctcttctgcctccgaggcggtccctccctctggcctgcctcctccctccctccctttcttccttctttcctcccacctccttcccactaggctgcagaggcggggaagacccgccacaggctggcgtgcggagccccaggccggcggccttccgtgattaacgagtgtttacaagactctattagtaatgacacagacaccaatggttggagacgtcgaggcgcagcgcgcactctacgcac

SEQ ID NO: 236932 - DNA, 57 bp, Homo sapiens
  chr13:28544071-28544128
  hyper
aaatttgagttaaattcaagcgatttattgttaaacgtttacattcaagaatcagaa

SEQ ID NO: 236933 - DNA, 378 bp, Homo sapiens
  chr13:28544504-28544882
  hyper
atctctcttggtttgggaagcgctgcggccaaggggcctagggctggaagtggccgtcttggggaccgaagccgcgcagcccgggatcgggagctgccccgacaggagcgcggaggcggcgagattcggcccccgcgcgcgcccagctcggtttcagcaaccgcgtggagtgggcctgcggccgccgttcacctcctaatacaagcctttgacagcgctgccagattcgggaatgaggatcactgcggcgaggcccggcgggctgggcagcctgactcggcggctttgagcgctctcagaacccgcgggcgctcgcggcactcctggagacctgcacttgtctgttctcattgtcaagcgtttcgctcggatatttgt

SEQ ID NO: 236934 - DNA, 840 bp, Homo sapiens
  chr13:28549575-28550415
  hyper
gagctgcgctctcccgtctctttactgggagcgttctcctgccggggcttggacatttccaagggaagtgaaaatccacaaagctgcccccacttcgtaagggcctgtgcctggagggtcgtcgggttacagaaattgaaatcagctctttgccttccaactcttcttggccttgccaccgcgattggttttgttttctttgtttttaacgaattggtaagtaaaatattagttgttcaccctgaaatctgccctaaccacttccgtaccccctgaagctcgctgggcgcgccctgggctgtccttccctgagcagccgggcctagagtcaaggcgcgatgattgccgcgcaagctagggtccacgcggccggggctcctctcccgcctcgggcgcaccagaggccagaaagcggaaagcggctctgccaggccaaggccgacagaaaccgagagcatgtcgctatttgccggagagaactgccctgccaggctgccacaggtgacttgcccgcgcgagccacggcctctgcgcagagctcctcccgaaggggagagtcagagccacccgcgggtttggtcggggctcttcccagcccggcgtccacgccccgcgtcctgcgctcgcccttgcggctgcttatgctcaggtgtttcggaagaggcgccgcgcagccagctctctgtcccttcagctccagctccttctaaagggacagactcagcgtctgcccccatctgcaccccttcccgcaggaataaaatcattttccggacaagcttggaactgttgaaatgtaactatgtaattggagacaccggggtcgtgtctgggagattc

SEQ ID NO: 236935 - DNA, 551 bp, Homo sapiens
  chr13:28551500-28552051
  hyper
actgatgggtttcccggggcagtcgagccacccccccaaagccgacctccgggagagatctttagctggacgcctcccgccttttaggagcgatggctgcaactattccgtccgtccccacggggcgccttcccaacccttcggttggctcttcccttcgcagggctcttcccggcccaccgcctccttcctgcggcttccccggctccccaggccggaccgaggccagcgtttgactttcctggctcccagtctgctcccctagtgcccaagagcgagaacaccgcttccgctcacatgtaaaggtcgggcgcagcaaatgaagtgggaaaagagaaaaacagacaaaccgctgtggcataaaagattccttttccgtccgttttgctttgcagttcgggcttagcaggagagggttggggagaactggataaacgctttggaatccacaaaggccggtggtgtcgggggccgcaaagggagtgaagaattgaagcagtgagctggataaatccggggcaaagcactaaacaatatggatattttggcaa

SEQ ID NO: 236936 - DNA, 282 bp, Homo sapiens
  chr13:28552711-28552993
  hyper
agaaggctgcgggagggtgaagtagagtacccaggcggtgatgtcctggcggaacaggggcgcccttggcgcgcccctctaacaagtcctggaccttgcgcttctcggtccccactacattcggtcgggaccaggatccaggggcggggcgggaagtgacacgtttgtcttttgagaccttgggtcaagaagagcggaggagagagagggcggccgctgaggctcggaatttacgactaggtcgggagggagcagagacgcgataaggatcctgagcttttc

SEQ ID NO: 236937 - DNA, 40 bp, Homo sapiens
  chr13:28675150-28675190
  hyper
ctcccgccagcgcacaggcgagcattccattaagaaccat

SEQ ID NO: 236938 - DNA, 224 bp, Homo sapiens
  chr13:28712328-28712552
  hyper
cgcgcagcggcgacggccgtctcaggaagaggaaaatggaataaacaactcggaggaaccagagcgcgagagagcgagtggaggcagaatttaaaaataaaccggcccctccgccttccccacccgcttgccgctgccgctccctcttcccctgcccgcgccctcgaagtccccgtctgggcccgcgcgctcaccccgtcgtcccgcgcggcccctttaagaaa

SEQ ID NO: 236939 - DNA, 218 bp, Homo sapiens
  chr13:29067852-29068070
  hyper
ctgagcagagactgcgagtccgaaccctcaagttcctcggggctttgacccctcaatggcggcggtctaactgctggtaaaacccccggcccctgactgttccaccgcccgtctcccaaacgcccagcgaaggctgacttaggtggcgggcggacctcatcgattcctcaaaccacatcgtttggtcaaaatcgcccgccctctcttcgctcggattt

SEQ ID NO: 236940 - DNA, 1539 bp, Homo sapiens
  chr13:29068370-29069909
  hyper
cccctccaaatcggctcccctcctacactctcgtgacgcgaggtcgcggccagtgcccaatatcaccaaagtcccggcctcagcccagccccgggcagcctggcaggctttcaggagcctctgctcccggctccgggggaccctgcgtacctgccccaggtcctctgggaatgggctctgggtgccaggcaggtcccggtgcgtgctgctcctagtgcccagggcctcggcagtgagaccccaacccgacagctggataagggatcagcgatcctgtcgcaaacggacagccccagcgcggacccggtctgagcgctgatgctcgcgggtccaggccagccactcctcgaggcgctccctcggagaaagggcgcagcggccccaagcgtgcccgctgcaactagtgtcccaggttctcgccgtagccagcttctccgggctacagcctcgtctccccgcgtgcaccccgccctggcctcggaggctctgccctccggccgccccatcgcagcccgcctcaggccccggcccccagccgcgcctcacctgtgagaagcagacagctgagcagcgcgcacagcaggaccccggtgtcccagtagctgaccatggtgagcgcgacgcggcctgctcgcccggtgcccgcgctccccgcggccaacgacccggccgccagagtccgtcctctcgttcgccgccgccggccccgcgccctgagcgcccgtctcgcggctccagccaggagacaaccacttccccgggtaatcctcgccgccaggcgcccgctggccgctgcacccgagccccggagcccgctccgagccgccgccgctgccggggaggagccgagaggagtgtccgcctggcgcgctccgagcctcccgcggacctcgatgaagagcagccgagggcgggggcgatttataacctttccccagcccacttcctaccccggcacctccttctggtgacgtcaaggggtcccccacccctcatccgcctccccacctaccctcttcttcctcccaggctcgcttccctgcggctacggagaggggcgggggccgacgagggcgggtggcccggggccgagcgcgcgtggggaggtgctggcgacgcgggcccgggagcgcggccccggcaggttcagggtctttgctccgcgccctcttgcccttgcccctcctcctgcccatcgcgctcaggaaatccttgcagactccctccacccggcttactcagctctgggggccgcccgaaactggggaagggacaaggctgaagctccgccgcctggccctaggggcggaaagtccgatccaagggaagctggccgcgcctccgcgacggtgttcttggcacggaggactgaggcgcagtccggctgtctccccttgcctgctcttcccgcgctgtcccgccgctcctgaccccttcagactgtcccgagaagtctaggaaggcaccggagaccctcggcacaaggcactgaacctggagcgcctgaggggaactgacgcttgcttggcacctttggga

SEQ ID NO: 236941 - DNA, 202 bp, Homo sapiens
  chr13:29105479-29105681
  hyper
cccggggtgtgtgcggattctcaataaaaagggaaaagcacgatccaagttaattttccagcgccgacaggaaatgctgtttcctgcatcgtacaacgctggtgccaacaagactgacacaggagcccattgtcccgcgaacaatgtggcgatggggaaggacgcctgagaaaacagaccccggccccgtgagcgcgtttgt

SEQ ID NO: 236942 - DNA, 1006 bp, Homo sapiens
  chr13:29106303-29107309
  hyper
ccaaagtctccccagaggctcgtttcgaacccgcagctagccaagggcaaatgcatactcgaaagtgccacgcctctcgtccaccctgcgccgcgtccagtccacccccttcatcccgcgccccatgtccacccgcccgctgtccaccctgcgccccatgtccatgcgccccctgtccacccgctcactgtccaacccgcgccccatgtccacccgcctgctgcccaccccgcgcccccagtgcacccgcccagccccgagcgcccgcggagccgagtggagagcagcggccgcagcgcggcgccaggctcgggctgggctggccggcgcgaacccccgggggcgtctgggcggccaggccgggtggcggctgcgcacgtaggagtaccccctgagcccagccgctcggccggcctgacccgcgggtgaccggatacgagtaacgcgtgcgccccgatctgtgccctgcgcggggtcgggcggggaccggccgggggcgccgcgcgcccggtcgggttgactgtcgggggcgatttccgcggggcaaggcgggggcgcgggagcagcgcgcagctgcggggccattccacctgagcgccctgaggtcagggccggggcctgaggacacggcgctgggctccgggggacgcgggttcacgccggcgcccgagcgccacctccccgccctccgccggctcacgtagtcccggggttcggtacgtgaagtgccggcgcgaggctgctcaggccaccgcatgggccgggcgataaacaatcgcacaggatacacaacaccctggactgtcacaagcccctcgcaggaaaagataaataacatctgaggcgctgcggcgcggcttccccgggctgaacaaaaactaggaggtggggggcggtggggcgaagtaaacaacagaaccgaagaattgccgcacggagcctgggccggcggagaaaatcagatgcagtctccttccctttggtgactatccgtgggggtttctcc

SEQ ID NO: 236943 - DNA, 34 bp, Homo sapiens; identical to SEQ ID NO: 203316
  chr13:29233057-29233091
  hyper

SEQ ID NO: 236944 - DNA, 52 bp, Homo sapiens
  chr13:29293546-29293598
  hyper
gcttttcctggggaggggaggggggacttgggcaaatcgttaaattttcatg

SEQ ID NO: 236945 - DNA, 314 bp, Homo sapiens
  chr13:29393539-29393853
  hyper
agcttgcttctagaaagaaacgcctgccttttgcgcaaatcttttcagagactggctttgggctcctatgaatcaggcaccctagcgtcctccaaagttcttcccgatgctgaaccccaatgcctcctgctgcgcctaattcgaagcggctccctcttctgttctgagcggaaaacagcggaacccattcctggaggcctgccctggaacggccaactcattcttactcctttctcctggggtccgatgctagggcaccacggtgaccagccgcgcagcgggcagcggcccgcgccgcgcccaccgcctgcgga

SEQ ID NO: 236946 - DNA, 43 bp, Homo sapiens
  chr13:29394633-29394676
  hyper
cgagctggagaggaggaggaagcagcgtggcggaacccggccc

SEQ ID NO: 236947 - DNA, 215 bp, Homo sapiens
  chr13:30002457-30002672
  hyper
ctggcagccctttcgggcgtccccaggcagtgccctgaagcccaggctcgccttttgtgcttcctgcgtccgctccaggcgtgtctgcgcggtgcggaggcgcatccccgccaggggagggctgggagcggccgcgcacccagaggagagcaggctgtccttttagggagccggcattggtaaatgctctgtggttatgcgactattgatttgcc

SEQ ID NO: 236948 - DNA, 140 bp, Homo sapiens
  chr13:30424807-30424947
  hyper
ctcgtcctccctccgcggacaccaagtgcgtcaccacggagaccattccctcgagcatcacgggaagtgtagtctacgagggtgggggggggagggagccgccgaacgcctcctcacccagctccgaagccacgcccccc

SEQ ID NO: 236949 - DNA, 225 bp, Homo sapiens
  chr13:30880886-30881111
  hyper
tgtgacatacatacggttctgcaccgaaaggcagcaacctgcgagggtcagaggcgccgaagacccgaggccctgcagcttgggcggctgctcatccctgagactgtgcagggcggtggcccagccggggtggggctgagcgctgcaactggggcgggcccagctacagggcgggaagcccgaggctcacctccacttccctttcccaacgcacagagcccaggt

SEQ ID NO: 236950 - DNA, 116 bp, Homo sapiens
  chr13:30982478-30982594
  hyper
gcaaaggagaagcgcgtgcagtcccggcgcggcccgctctgctcagttctccagggcgggccttggcctggactgcgtgtcgggaggactcgcgggccccgcattgccgcatgcca

SEQ ID NO: 236951 - DNA, 94 bp, Homo sapiens
  chr13:30982774-30982868
  hyper
cgccggcagctgcgcgcgctgcggcaggcgcggagaggagccacctcgtcacgtggggaggaaatgccttgccggcctccaaacctactggctc

SEQ ID NO: 236952 - DNA, 236 bp, Homo sapiens
  chr13:31039902-31040138
  hyper
ctccccgccgcggcgctgccccagactcaccctcagcgaggcacagagtcgcccagtgcccgtccggctctcacttgccccggtgctgtctctatggagctcaatgtactgcaatggctgtgagagcgggagccagacgcagcctcctcactctctccgctctgtaacattactctccagccagcgcggctcctattggctaccgccaactcacggggctcgctcattggcccgat

SEQ ID NO: 236953 - DNA, 173 bp, Homo sapiens
  chr13:31191666-31191839
  hyper
ctcgcgcggaccacggaacagcgacgcgcaagcaggtctctttcgtcagcgtaatccctccgcagaaagccgcgcactagttttaatcacgccccaccccctggccgctggcgccacctccgccactcgggcgctttccagcagcttccagaaacgtcgcctccccaaaccca

SEQ ID NO: 236954 - DNA, 944 bp, Homo sapiens
  chr13:32605029-32605973
  hyper
ctgtccccttagagtgcacacgttcgggctccgatgccccttgaaaagactgcatttctgggagggaaaagtaaaaatgcagataccaccatgcgtgtggaaggcagggaagaaaaagcccagacaagcgtcctcttgttgagtctctttactgcaacgaggctgacggatggggtttttcaaaacgtcgctgcaaccagatgcaaggctgcagctttgcttaccgcagcgtgctgcagttgtgtttatttcagggacagacacaaggggaagcagcagccagagcacacccgggccgctcacgggaagccttgctgaagagagaggatccgcagaagctgggaaattcctcccgcagcctaggcggagactgagccgcggctcaggttgagacagtgggcaggggcagggggcggcgctcccggcccatcccttagccccgcggcggccgtgtgggccggaggctgcctgcaccgcgtcagggaggccggcctagaaaccctccctcccagaagaaagccgatcccagttcaggtggggtcttcctcggttgcgtacctggctggagccgagctggtgggcggccggcagccggcgtttctggtgatgacagccccgaaatgaaagcagcgcggccgccgcctccgagggctgcagggagatcagcgtccagcaaataagaagcaagtcctggacccggaggaggaggagcggccgagcatctctctctgctccgccgtgtcctttagatgagcactcccggccggagccggaggtggatccgcagagctgcctctgggcgcctgaccccgcgctgacatcacaacctgtgacaggcgcatcacgcccggtacctgctcccggccgctgcccgtcctcccagcctctttgtatgccgcagacatggccagccagcaggattcgggcttctttgagatcagtat

SEQ ID NO: 236955 - DNA, 431 bp, Homo sapiens
  chr13:33001996-33002427
  hyper
gtggccccgggcccgtgcaccggcgcccagaccgctgtcattacctggccagtgtagttttcccggagcccgggaggcctcgcaggaggtagaggtgtttcctaaagctgtggcggcgaggaggtgtcccccgcgggggcggccggggcggccgctgccgctgctgctgctgctggggctggaggctcagcctcccaaaagattgaaggaaactgtcctccatgggcaggagggctggctgcgagagccccgggttccctttactgaagtcacggtcttggccaaagctgttgtttttgtgactctccggccatgtgatggatagaggggcgggcgctgggagcccagcccctcctttccacccgccggaaccgtgctgcgtgggagggggcgtccctacctggaaagctggggacgctgggagactcaca

SEQ ID NO: 236956 - DNA, 46 bp, Homo sapiens
  chr13:33589987-33590033
  hyper
ctttcagcgcacggcgaagttccccctcggctgtcccacctggcag

SEQ ID NO: 236957 - DNA, 74 bp, Homo sapiens
  chr13:33590393-33590467
  hyper
ccctcggcgcccctgcccccgcccccagtgccagggcggaggcagtcccggctcgcaggtaattattgccagcg

SEQ ID NO: 236958 - DNA, 198 bp, Homo sapiens
  chr13:33590647-33590845
  hyper
ctgggcctgggcggccgccgcctgcgtgcggagccgggcgacggcgcgcagacctgggcccgtttctcgcggcctcctgcccccgaggccgcgggcctcttccagggcaccttccccgacggcttcctctgggccgtgggcagcgccgcctaccagaccgagggcggctggcagcagcacggcaagggtgcgtccatc

SEQ ID NO: 236959 - DNA, 481 bp, Homo sapiens
  chr13:33591025-33591506
  hyper
tccatctcgtgggcgcgagtgctccccaatggcagcgcgggcgtccccaaccgcgaggggctgcgctactaccggcgcctgctggagcggctgcgggagctgggcgtgcagcccgtggtcaccctgtaccactgggacctgccccagcgcctgcaggacgcctacggcggctgggccaaccgcgccctggccgaccacttcagggattacgcggagctctgcttccgccacttcggcggtcaggtcaagtactggatcaccatcgacaacccctacgtggtggcctggcacggctacgccaccgggcgcctggcccccggcatccggggcagcccgcggctcgggtacctggtggcgcacaacctcctcctggtgagtgcgaggggccaggcggagggccacgcaggggagacagagggcctccacaggggccagggggaagtgtgggaactgagtctcccccagacgaggcttcacttgg

SEQ ID NO: 236960 - DNA, 529 bp, Homo sapiens
  chr13:33924391-33924920
  hyper
gcccccgtgggtcgcggcgtctccggggcactgacctgccagccgcctctcccggacgttcttccacagcagatcccaggctctggccgtggagtcccgcaactgctcactgatggatctcctgagctgcgtttggcaaggtttccgtttgctggtcattttagatccgtcctcataacgaccggcgggctctccaccgccactcccgcgtggcccgcgactcagactcccggcgactggaaaggacggacgcggcactcccgccggggtcccgggacccaatgcgggcgcgacatgggtcggtccggcgctgggaggctgcgccacgcgcgaggaccgggatgcctggccaccagaaacgccgcgctaggttattaacctctgcgctcgccaactcctctactcctttcccactttccttctcctcccctcctcccctccgttgggcgctcctccactcccctccctcccctgccctccccctggctgcctcgcgccccactccttccaggagcgcgcttccccttcc

SEQ ID NO: 236961 - DNA, 1323 bp, Homo sapiens
  chr13:35516209-35517532
  hyper
ccactacccgccccgcctctgccagcttgccccagtgtctggcagcagtccccatgcacctgctcacctgtctatccgttcggggtggttgggggagggacgaggggtgtcggggtgggtgggtgggaagagaaggagggcagggcaaaagagggggtgcaccgagggctccgcccccccggaggctgtgcgcaggcgcagtggctgctaccgcaggcagggggcggcaacatggcggagtgagcggcggcgtcggggcttcacaacaacagtggtggccgtagcagcggcggcagcagcgtcaatagcatcggccacagcctgagcttcagcaccggccagcgtcgtggccagctgctcgcgtcctcgggcttctcggagcggctgcagcatctccgcggggggcgggccgggccggacagaccgggagagggagagagcagaggcagcggcggcggcagcggcagcggcagcggcacacctgctgggcgggcacagccgcttgcccggcagcggttagcggtaccgccaccgccgagaataagcctgcggatcccccgccgcctccgcgggggagagcgccggagcgggccgggctgaggcgcaggcggggagcgggcccggcgccgcggcgctggtggatgctggggctccgaggcgacggccggggggcgggggccgaggcaggtataacggtaccggcggcggcagcgccgctgctcttcccttctcctcaggaggggggccaatggctagcgagaagccgggcccgggcccggggctcgagcctcagcccgtggggctcattgccgtcggggccgctggcggaggcggcgggggcagcggtggtggcggcaccgggggcagcgggatgggggagctaaggggggcgtccggctccggctcggtgatgctccccgcggggatgattaacccttcggtgccgatccgcaacatccggatgaaattcgcagtgttgattggactcatacaggtcggagaggtcagcaacagggacatcgtggagacggtgctcaacctggtaaggaaaaggcgtgctctcaatctgcttccccagtccccacatacaccgtccccagcgcctttccctcccacccttcacccccagggtcacacgcgccgcgcgtccctgggagcgcagagcgttcagccggtattgcccagcgggtgacctgcctgcgcgctgctagagccacgccacctccctcctctcctctttctggtcctctcctgccacctgagcgcagtgcccaacttaacaccgcttcttctcactttttaggaccgcgagtaacccagtac

SEQ ID NO: 236962 - DNA, 31 bp, Homo sapiens
  chr13:36044871-36044902
  hyper
gattcggaggagggcgcgggaggcaggaggc

SEQ ID NO: 236963 - DNA, 1175 bp, Homo sapiens
  chr13:36704552-36705727
  hyper
tccaggagcaattccgcgcaaacctggttttcaaaagcagcctcttttgtggggcattgcggggctgtgcgtgcgctcccactaggaggaaaaaatgccatttcctctccgcaagcttttagcactgcaggtactaatttgaacatgaggcagcctcgctgtccctgaaggaacttgagaccctgcaaacgtacttgcaacacccacgctgcagccaccaccacgcacgaatcgaccccatccacaagcacacatcactggcccgggcacacggaaaagcacacacacaataagaggccgggcccggccactccttccttggttcccgctccgcagccagttctgacaatgacaagcacctctcccagctcctccgccctggctctccatctccactaacaacgcgaaaagcctgggagggcccgctcgcctgactccaggtttaaagccccatggcaccaaacaaaagaggcaggtgccagcagccccggggccgcccgcacgcaacgcccccgggtcgggccaggctggccagggcagggcggccgcctttcgaggaactgcgggcggggcggcggggccaagctgagcgcccgccctgccctcggcgccccgcggctgcgggcggagcgggctctgcggagtcccccggccgccctccccgcagctcccgtccccagggaaggcaaaccacgcaccggtccgcggagagacgccgccgggggtctttgtggccgcgctgggggccgcctcctggtgctgtcctcgccgggctgggcgcggccggggctgcggggctgcagggctggggggcggcggcggggccgggctgggcggcagcagctgctggagcgcggcgcctcggttgcggccactagtgcagggatgtgcctcggcccgtcctcattgaaatgcggcgcttcgcacagcctcactccagcctctctctccagaggagggcggcggcggcggcggcggcgggcgcgctcccttttcttgtctcactcgctcacacgccctcccgtctccctcctcctcctcctcctccgcgtgcgcgccccgtcgcccccgcccttcttggcagggcgcacccaccacggctgcgccccaggtcctcctccctcccagcgccctcttcccaccgcagcaacctcggtgcatctggcttgactaca

SEQ ID NO: 236964 - DNA, 250 bp, Homo sapiens
  chr13:36729094-36729344
  hyper
agggcagaggtcagcgcggggtctccccggagcaggagtgagcggcgagtgacaggtgcagccgcgccatccccaagcatcccggaacctggcccggaggctgctgtgggatccacagccctgcgcgctggggaggcgctgcaatgaccctgcggcggcgccttcccccggcgtccccaaatagaaacagcactagtgccctctctccgaccccaccagggccgctgccgggctcctccttactcagacc

SEQ ID NO: 236965 - DNA, 1173 bp, Homo sapiens
  chr13:36919851-36921024
  hyper
tattgtaaagagtaaaatcacgcgcaatccatcccaatataaccgcagttgttcgtgggccttcttgcagagaaaggctgcccaaccttgacggggccatgggcgctgcgggagggcaaaagaccacagagatctgcgaagccaaagtaaacaacggggttggggcggcgagaatgatcaatagcgatgctccgaaaggactccgcgataggaatcgagcgggaaggattccctccatcctaacagtccatgggttaagaggccgaagcttccctaaataccacactcccgcgagagaagggactgagaacaacttctcaaactattctctctcgaaatcgctcccttcctcgaaaattccatctctgagactcggatgaggtccccaccccctccacccttgtcccgtgaccgtcgcccgctcagcctcccagccgagtccgcggggcctggggcgcccaccccgcccacccaagggaccgcgcaggggtgaactcccccgcgccccacctgcgccttccagacctcgggcgccccggcgttgcctcgagagctccctgcgcggccgccgcggcacggaccagctcccactcccttacactgggcgccgctgcgctcgccgggggccggtcccgaggttcccaaggcctcgcgcgcgcgcttgccgtggcaaccaagacgttccacgacgcgcgctctcgaacgcttcgcgtcacgcggccgcgcggccccgcccgtcggcctcgctcccgccacagagcccgcagcacgccgccgccgcagcctaggtcacgtgagtacccacgcgcgcgtcttgccagcggattcatcaccggcctgctcagactaggttctgcccactctgaccttctaaatggtacgtgggaggacgtccgtccccttcggacccaagagtcaccgtaacactctagaaggggagaaaaggagcgagggcggcaggcgacagagaacctcgcgagtcagcggccccgcgcagacccccccaggcacggtcccctgcggccacgtcggctgctcggcgcctgcgcaatctctttctctccagcgaaaccgaggcctccggagagcctagtagagagtgtgggcagtgagcgcttgtagccgctagagggagcgctgggcacagtgcacgagagacaataaaggctgatt

SEQ ID NO: 236966 - DNA, 514 bp, Homo sapiens
  chr13:37004574-37005088
  hyper
aaagtggatcaaaacgacaggttccacgaacaaacactgcgccggcgcctctactttggagaaaaggaaaagggcgtgaggtttcggtcatttttgtcaaaggaaatcagatgaaaaggggtgtacaaaggaccaggtctcgtgagcgcagccaatcttgtccgctcccaagcgactcaggctcttggcaggacttgctgtagagtcccagacggagttagccactgagtccttcagcgacccaggaaataacaacactgttggcaggtgggggagggcgcccgggaagatatccaatagtggcgtcaggcaagaggacagaaatgctcctttcattcacctttcgaagcagagcatttggtccccgttggcctctgactctctgttgcggcaatctagatgttaccagaattcccgtgtttccttcatattcaaaggcacaggaaatctggggtgcaagcggactgctgtctctcaaggaatagaagtctgtgacaaacgtatagaaatgagt

SEQ ID NO: 236967 - DNA, 1126 bp, Homo sapiens
  chr13:37247935-37249061
  hyper
agatgggctccctgcgcaacgcctcctcgtcctccgagattttccaatggtggcgcaagctcctccctcgcccgagctgggcgccgtcctagagccaagcgcccgctagagccgagactagggggcggtgaggagtgggacccgctcgcggccattggttgtgcggccaggaggggcggagggacgacgcgcgggctgtgcggggccggcagcccggatccactcccgctgcgcctgctgtccgccgtgcgcccagactgcgcgccgcgccgctgcgcccaacattcccgaggacggcttcgcgggcgcgtatcgtccagaccggagcaccgccccaccgctagcgcaggagacctgccggggaagtcgcgtgtcctgacctgcaggtcagtgagggaaacttgcagggtcccgagctctgggggtgaacttgccctacgcggagagcgccccactccttgcctggggcggcctcgggtcctggaggcgagccgcctcccagactctcccccgagatctgggctcccggagatgtggctcctttctgagaaacacccccaaatctatcccttttgaggtgtccttactgtcccgagaagcaatcgcagcccggctctccgagtcttggggtgactccacgggctgcaggaggagccgcgaggggccctgagtgcaatgtccttggccccgtgttgacctgcctcggtcccagacactgggaaccgggaaggtctaccctcgctctgcaaggtggattcctccatgcaagtgtagacagttctacactttgcagagtgtgtctaggtgccttctgtttgcttttgcctttgtggtgtgtggagggtcattcttgggtttgttttgctcctgtctgattttctagggtcatttgcgtcccttctcgggaacggggactcgccatgcgcacactgacagctggctttgcacctgctaaggcgctggagagtcttttcgcccgtcttagggtggccctaaatccggggaagttttatgtggcgctgaacacttgcgtttcccaggggcgttttccctagctcccggaaacccagtaggtaactgcgccagcgacccttcccctcttcccgggtctgatgagacactggaa

SEQ ID NO: 236968 - DNA, 264 bp, Homo sapiens
  chr13:37493431-37493695
  hyper
gatcacaaagctggcgtcaggcagtctcctgtatctgcttcccacctcgccccctcccctctgcggagagctggcaccgaggggcgggccaaggaaaagacaaacaccccggctccgacacagtccaagcgcgagcccggagacacttcaacaacattcctaactttttttctcagttcgcatgcctcaaaggtaaacaaagcaaaaagcctacgaaacagaaggcaagtgaggccaattcggcgctggcgagtttaaaagtgg

SEQ ID NO: 236969 - DNA, 153 bp, Homo sapiens
  chr13:37493903-37494056
  hyper
aaggcgagctgcgccgcggccaactccccagagcagtcccctccggccccgcgcccaccccaccccaccccactccaccccagacaggctccaccaaaaaacccgggaacaacgaccgccaaaagccaagcctcacgccgaggagcctcccag

SEQ ID NO: 236970 - DNA, 61 bp, Homo sapiens
  chr13:37572855-37572916
  hyper
tctcatcgatccacgcatttattcccatttgtaacagatggctgccgtcaaggctccgtca

SEQ ID NO: 236971 - DNA, 119 bp, Homo sapiens
  chr13:37574643-37574762
  hyper
accctgttatctccgaactgttggtgttattctgagtcacagcaccagctcttttataaagagggagacccgctccttctttaacagcagattcgtcaaaatacgtccaaggcaaggaa

SEQ ID NO: 236972 - DNA, 800 bp, Homo sapiens
  chr13:38443276-38444076
  hyper
cctactttaagtgccggagagctaaggcctcacttatatgcacccagatgcccccgagatctccattttccccaaatgcataaaaggctaaaaacggccacattccccagcaccacggcgtggctgcagctcctttgtttaccatataagtcacaccgggggttcactcctcgccctctcccctgctttaaagccgagtgcggcggaagactgaggagcacccccaaactcctgctcagcccgagtcaagcaccgaaagcttcacaggtttttttcctgagccttgaagagaaaccacatagccagaaccttttgaactcctaaccccgcagggatgtccgcctcccagaagagagccggcttcccaggcagcttaggaaacttaaccgagatcccagaaagaaggcgaggtgtagctccggtcgaacggagccccgaggcgacatcctctttacctgcaaagttgcaatcttcgggctgaagtgatgggatccgaggactgacggcgcgggtgccgtgcggggtgagagcacgcccggcaaattccaatggaattcccttagtcgctgctgagttttggagcattccaaggaaaacgatcgaagctggagcccacgcagctggcaccgaactgggcggagtgaggatgctctgaaagcgaagccatgggaggcgggggaggggcggcccgggagggggaggtaaccgccaggggaggagaacctctcccacccccgcctgcacagatccctctggataaagttaagagttcccacggctgacagcggatgagcccagag

SEQ ID NO: 236973 - DNA, 35 bp, Homo sapiens
  chr13:38923590-38923625
  hyper
agaaactttagagcgcgtccgccccagccccgccc

SEQ ID NO: 236974 - DNA, 138 bp, Homo sapiens
  chr13:38924354-38924492
  hyper
gcgaggagaggtccgtacttgctcgctaagtgtcagcttggcagcttggccccgtcacgagggtgtgggtgtgtttctgattagtgacctcccctcggaattcatttggtgggcaggtggcgcgggaggacaggtgga

SEQ ID NO: 236975 - DNA, 1803 bp, Homo sapiens
  chr13:39260402-39262205
  hyper
taccctaacagagtcggatttgggagcgcctggggccacattccctagaatttattctttggtgcaagactagcaattctgatcagactgcatttctcacgcattccaaatgccctttttcccttttactctgtgaacctcggttgcaaaggaggggcttgttaaaaactcaccaatcggaggactgtgcccattgtaattcacgaggagaaggcagcgtctgggcgcgccgaagggggctgggctggagtgcaacctgctctagctatggcttttaattccagctgtccttttgcaaatatgccccagaatttcttctcaaacgctctgggtttcgcttcaaactcaaaaagcattgcgtctaactttcccctgggtttgcaagtttccttgggaaatggccatgccctgcgcgggatttcattgactagggcggaggggtgggggtggctaaaatgggtaaccctcggtcgccggcagatgaagtgaacccagcacagcagtgtgttccggctcctctgcaggagtaccagatctattaatagcagcccagagagtagcgcaagcaggggtgggcaactcctggccacttcttccctcacttccaggacaacctgttgcgcctctatctcctcccctccccgcagtttccccgccttggcctctaagagctgattggcagaaattactacccaaccctcagctccgcacctcctcccccgaccaacgattggccacctgggaggactggagtaaggggtgcgagcggagggatttccctcaaagcccagggtccggggacctggaaagtagaagtggagggattcaattctccgcgcgattgaggcgctagcggcggagctggacggcctgggaaggcttcggctcctcggctgcggctccagcccggacggcgccgcgcaactttgccatccttctggcccagccccggctacaggaggaccccgcgggcaacgcgcggagttcctggcacttcccggcggtgtctcttgttgtctgcccggggaccgacttcgcatgctctcaggctgacctgtccaagcccgaacaccgggaccatgcactcagccgggactcccgggttatcctcgcgccggacaggcaactccaccagctttcaaccaggaccgccaccgccgccccggctgctgctgctgctgctgcttctcctgtcactggtaagccgcgtcccggcacagcccgctgccttcggcagggcgttgctgtcccctggtctcgcgggggctgcaggggtccctgctgaggaggccatagtgctggcgaaccgcggactccgggtgcctttcggccgtgaagtctggctggatcccctgcatgacctggtgttgcaggtgcagcccggggaccgctgcgcggtttcggtactagacaacgacgcactggcccagcgaccgggccgcctgagtcccaagcgcttcccgtgcgactttggccctggcgaggtgcgctactctcacctgggcgcgcgcagcccgtctcgggaccgcgtccggctgcagctgcgctatgacgcgcccggaggggcagtagtgctaccactggtactggaggtggaggtggtcttcacccagctggaggttgtgactcggaacttgcctctggtcgtggaagagctgctggggaccagcaatgccctggacgcgcggagcctggagttcgccttccagcccgagacagaggagtgccgcgtgggcatcctgtccggcttgggcgcgctgcctcgctatggagaactcctccactacccgcaggtccctggag

SEQ ID NO: 236976 - DNA, 101 bp, Homo sapiens; identical to SEQ ID NO: 203335
  chr13:39610513-39610614
  hyper

SEQ ID NO: 236977 - DNA, 345 bp, Homo sapiens; identical to SEQ ID NO: 203336
  chr13:39610817-39611162
  hyper

SEQ ID NO: 236978 - DNA, 120 bp, Homo sapiens
  chr13:39612313-39612433
  hyper
tcccgaagcctagcggtcattattttgaatgtcatccccaccatacctcgtgtctgagtgtgcgatgttttgattttgccctctggattaaaaagaataaatggcgagcgattaaggcat

SEQ ID NO: 236979 - DNA, 1233 bp, Homo sapiens
  chr13:40176535-40177768
  hyper
ctcaaacgggaggtcggctactacttttttttctaatcttgtcaactgcagtcagggctgaagttgatctatctgggccacgaggctggggaagaccagcagggggtggcctgcgggcagggggcccccatctccaactgcggtgaggcgccctcgccaagacaagcccatatttagccccctgccattgcctcaccgagccactccacccatggagacacacaatgatccctccattctaaaagggggcaagaggcattttccagccggctctggacgaagggaggggataaggatgggaaggcagcaccccccggaggcagacgccaagagcggacgcggctggcaggcagagccgacggatccgccgagctcaggaagtccggagcccgggagcagcccaactccggctccggggcagagagggagcccgggagaaagcagcggagcccacgcccacggggcagccgagtgatttacttacatggctggcgggcggcggccaccttccctcccgcgtcccgggcgcacacacaacttgctgtctttctcgggcgggaacatccacgggaaaccggaccgtcctgcccttctttgcctctgtccctaacagccgcagaaccccggggcccgacctggaagagcaggggttggcaggaggcggagggtctccagaagcgggctggcaccagcggagacccccactcccggcgagtccgcggcggcagctctggcggagcgctgtgggcgcgcgcgggcgccggggatcgcacgcagaggagcggatctccctttggcaggcgaggcacgcaccgcctcctcccctccgctgcccggccctcctctttctccagtcccctcccctcgcgccccggggaactccgcgcagacagacccaggacgcaccggggacgttcctggagcgccgggaagggagtgggggggtgccccgctgtccgcgcgggtccaggcccacccccgggggcagctttcgcggctcctcccctagccccgagccccctcgcgccccctctccctgcgtctcattcaaagctgagtggggaaggcagacagaccgagaagtatgggagaaagttgcttgtcttcctgggtgaccccgaggagccacggaagatgacacactttgcctgttggggcttttctgggtttactgttcgggtttatgctcctgttttcctgccgccgttaaaagaagccgtagacgggaaagag

SEQ ID NO: 236980 - DNA, 253 bp, Homo sapiens
  chr13:40976492-40976745
  hyper
aacacagttcttcacggtttgccagtagtcgagggaggaatctgaaagctgactgtttctcccacagcttcaggagcattaaaacttcaaaagaggaactatttatgctgtcattaccacagcggtcacttctgcaggatttctttctctgatgcagcactggttggacacacttggcccagggccgagaggggagaggagggcgttacagagacactgagtcatcctgcctcctccacgccctccgcagctg

SEQ ID NO: 236981 - DNA, 283 bp, Homo sapiens
  chr13:41238386-41238669
  hyper
cgacagagcgagactccgtctcggaggaggggagggaggtgtttagctcaactagacagcctttacagcaattccgccaccggtgacagtgagaaactgtcagcttggggaggccgcgccacgactggaccccgcccccgggaagcctccccggagccgagggcccccgggccttctcctcggagtcgggaagtgcctgcccccacgctaagtctctcctggccacgctctgaaaggcaaaaatggcaaaaatcctccttcaaggcaccgctccctcgacgcg

SEQ ID NO: 236982 - DNA, 88 bp, Homo sapiens
  chr13:41345169-41345257
  hyper
tgagtagcataatcgcagccgctgatgtctccgggcttccagaggacaaagggtggcgggaaagggggcgaagaggtaggaacgtcga

SEQ ID NO: 236983 - DNA, 147 bp, Homo sapiens
  chr13:41345437-41345584
  hyper
cggagccagttgcctccaagcgacccgacccaccccgcgattgtagtcctagaggcggagtcctcgccagagttcagcaaaggttcgctggccgaggcgggtcccagaccggcgaacccgacagtggagggcgtgaccagttgtgca

SEQ ID NO: 236984 - DNA, 225 bp, Homo sapiens
  chr13:41635650-41635875
  hyper
gggaacagcggaacgctggtcccggggactgagtaaggtgtctggatcggagggaggttcgggtgggcatcgggcggctggaagagctcgactcgtcccgctgggaaagcgcgagtctgagtggaaccctggacgacttgcagagcggctggcgcagtcatgtgagttgggtctcaggccctgaacaacgaggtgttgtttctctgggccgccctttctcgcccg

SEQ ID NO: 236985 - DNA, 277 bp, Homo sapiens
  chr13:41706714-41706991
  hyper
cttccctcgctgacgctaagatagcagcgtctccgaagagacagcagcacgagcccatttactgaattcaaccctaccccgcagaaccgcctcccgttatcgtttagacagtggctgactcaccctctctcactcccgcgtcctttctccgcgtctgctcgccttcacaggacccgctggcttggagccgcagaagccgctactgcagcgtgggcgacaatgctaggcgcccaggagaactaccgctcccaggttgcctttcgcgccccgagggctg

SEQ ID NO: 236986 - DNA, 164 bp, Homo sapiens
  chr13:41837649-41837813
  hyper
tctttactgaggtcggaaccttccgagacccgccacatttcagcccgacaaacccgagatcacgttcacttcctggttcacttcttccgggttaacgcacgctcccggcccctcctccgccactaccgctctccggaggagttgtcctcgagcatgcctaacaa

SEQ ID NO: 236987 - DNA, 172 bp, Homo sapiens
  chr13:41885138-41885310
  hyper
gagtcttatgaggcgttctgatgcataggagcaatggtgaatgagggtggtgactcaccaccccatgggactccaaggttttggtgacagctcgcctgagccccagggggtgccgagattgcggcgaggagagccgcagcacaaggcaaatccacgcggttggtccccgcta

SEQ ID NO: 236988 - DNA, 39 bp, Homo sapiens
  chr13:42031267-42031306
  hyper
tgggacacggccgcgggctccttcgtccctcaccgccag

SEQ ID NO: 236989 - DNA, 260 bp, Homo sapiens
  chr13:42032121-42032381
  hyper
gagcggcggggacaggtaaccggcagcgcctggggaggaatctggccgcgccaagtcgctgggtgaccctgggcctggcgaaggctcagttttcttgtctgtaaaacggacttggtaatagaacgcacttcgggggtggtggagaagattacaaggtaacagcgactgcgtggctgtcacttggcagaggcgccaagtgtcagttatcttcgggaaccgtggcggcccctcctggccctgggaggtggtcccgctgcccc

SEQ ID NO: 236990 - DNA, 738 bp, Homo sapiens
  chr13:42621978-42622716
  hyper
tagacacttcttgtgcgttctgtcgtcttgggctgcgtgtagtctcttgtttctgcgctttctccacgcccttcccagtttcctgttagccgaaggggatcgctctttctgaacgaaaagttctcagagcggagctgaacctcccggaaaatgctcttctcttccgtgtgcgccggatgggggtgggggtgggccagaaactgaacgccgccgtcaggagagctgaggggacccgacggccctggcggaggcgggagaggtacggtcctcggagtggggctgggggtggggaaaccgacgaggggcagcccccgactgtcttggtggcagaggggacttttattcagctggaaccgcgcggcgaggcccaagtgtctctggagagattcggggttcaggaggtggcgggtgcacccaagggtgctgggaggaagctccaggttcccattcttccccagggatcggcgttgcccctgctgtccagaagtgagagggggtgtgcgggcatcgccactacggggtgggctgcagaggtttcctgcctcccccaccctcctgtccatcctagggacccagaccgtaagggagtggaagagatgttgctccaaaccctgtcaccccatcctctctacccgcgctggtcctatccgaggctgggtgcgcaggggtccgaggcgggcgggggtccgttacctctgcgtcccaccgtggccgccgctccggcgggaaccgagcgga

SEQ ID NO: 236991 - DNA, 1049 bp, Homo sapiens
  chr13:43148318-43149367
  hyper
gccgggctccaagtcggcgccccacgtcgaggctccgccgcagcctccggagttggccgcagacaagaaggggagggagcgggagagggaggagagctccgaagcgagagggccgagcgccatgcgccgcgccagcagagactacaccaagtacctgcgtggctcggaggagatgggcggcggccccggagccccgcacgagggccccctgcacgccccgccgccgcctgcgccgcaccagccccctgccgcctcccgctccatgttcgtggccctcctggggctggggctgggccaggttgtctgcagcgtcgccctgttcttctatttcagagcgcaggtgagtggccaccttcccaggggatcgcggctgagagcgcccatctccttcccccgcacttggaaactgagtctggcggcagggctgggccacccagagcttgcatattccggaagggaaagtgactccagaagggagagaggaagtgttgagtttggggacaacctggcgcagggctgtcgggcgcaccctgctctctctccgcccacgcaccccagcttctcggtgctctgggggcggactcccctggccggacgatgggtttgaatctcaccccgtcccttcgctgggaaacaacactggcctctcaccttttctggtagtgattgcatactttttctccctgtcatttctcacttgaagttaagaatcaacttctgttcacgtaggaaaaaagatgagcgccttcacttgggcatctacctttcccttcccgcccaccacccggcgggtttcggttcctgcgcctggctgctctgcaggtgtgctggggccacggtgctggagggctgcgcggagcgggaggtcgcggtgctcgtgcccaggtcgcccaatgggtgggcagaatgacacggcgcgaccagagaggcgcgggctcgggatgggggctctgcggctgtggcgctgtcctgtgggggtgaaggaagagggacagccccacgtgcctgctagggatgtgggcggaggaaggaagcgaggtgagtgtgat

SEQ ID NO: 236992 - DNA, 93 bp, Homo sapiens
  chr13:43566570-43566663
  hyper
gtctcacaatcaccttagaggttaatcagaataactgggatcagccacggacacctggtgagcgattagcccgcagagtgactacaatcctga

SEQ ID NO: 236993 - DNA, 1830 bp, Homo sapiens
  chr13:44359822-44361652
  hyper
cttgcccacctgtcgaccccactttccccatgtgctcgccgcgggatgacaaccacaacactccagaaccaccccccttccgaaagagggcggggttacgccttcagccaatcaggacccgcgagccccgggtgtccaacctatggggtggctgtggccgtgcagggggaggacgtggggtggtctgggaggggccgcgtccgtgggaggctcgcacgtgtcgggtccggagaggcggggaggcggccggcgtccagcggccgaggcgcgggctctgcaccctggcagcggccgagtccggctgccccagtgcctcctttacctcgcgttgggccaggcagggcgcgctcccgccgacgaagacctgtccaaggtgtccgagctccccgcgagaggggacagtcacgaataacaacagtacccagcgcagactaggcggggaggaaagtttccggcccgcagcagagcggagtccgccaaggctggaggaaaagggatgcagagcgggagggtgaaaacctgaaagaagagggcagcgggaacactgtgtgggcaggaacgggtcccgggggcgacgcccgcagggggagacgggtgcggggtgcgctgtccaaggtgcaggggaggtgactggcgcgcggcgggcgcggagcccggagctgacactggctggcgggcggaggggagagcggggaacagctgtctggggcgctgggcacccccgggcgcgtaaaagtgagggagcttgagacggggcacggcggggaagggcgtgggggctgcaccgaagcccccacgcgtccacgcacccctcctcaccagcctcacctctagctccactcccctcccccctcgcccactcccctctcagtctagatccaggtgccgtggcgggggtgagaccagaggaccccggctcggagcccggacgccccagggaggctgcgggccccggagctgcttacctggggccgccgtatggggagcggaggcaacccgctgcgcggagtggggcgccgggcgcggcgcggctcctcctagcctcggcgtcctcctcctcctttgcttctcccggactctgtcccgggcacggagctgggagacgcggccgggctgcagtcgccgttccctctgctgccgccgccgctgcagcagacagaggacgccccgtggcggctggaagcctgtgtgagtagcggcgcccgggagagcggggatctgctgaggggcgctggagactccgcggctggaggcgcgcgggcgtgcgcacgcgcgcctgcgagtgtgagtgtatgggtgcgcgcgcgcccacggggtgggggagtcgcgaggggagggggagagaggccgagagatgctcgtagggaccgaggcaaaattctacgaccccggaaatccgtaaacgcggggaaggaggatcgaacgcgtgtctcgcttggagaagctgcccacggggcggcagcagaggaggaggggaagtcagcgaggcgcgctagggctccggatcccagcccggcagagccgagcggagcgcgcagccaccgatgcagcagaggcggcgcccgcagcccacggtcgcgctgccccctctcgggaggggccgaggccgctcgctcccgccaccgccgccgcggtcgggactgctctactgggagcgggggaaccgagagagggaccgcacggttgctacggcgaccttggaggggccgggcccgctgaagggccaagagaagaacccgggcgcacgtggccgactccaggctggagcgggcgtgttacaggattgtgggcttggggtagacggtggaattgggccgcgtggcctgggca

SEQ ID NO: 236994 - DNA, 205 bp, Homo sapiens; identical to SEQ ID NO: 203350
  chr13:44453169-44453374
  hyper

SEQ ID NO: 236995 - DNA, 33 bp, Homo sapiens
  chr13:44453844-44453877
  hyper
cggggaatctgtgcggccgcggcgaggtaggtg

SEQ ID NO: 236996 - DNA, 650 bp, Homo sapiens
  chr13:44947726-44948376
  hyper
gtccccgtccccgacgcgctcacaaacgccgtggtcgcccgaaccttcggccccgcagcattcggctacaggaccgcgacactgcagggccccggctctgcgcgctgcgctccggccgctcggcgcgggaggacgtgcggtcgcgcctgcctcggtggccgcgcggggtaggtggctgcggggaccggaaggatggcgaggaagtcggaaagggtttcctgagatgagagattacttccgtccgggctgcggcctctctctggagtcggctagccggggctcggggagcggggtgcgcagggctcggggccacgccttgccacctgcagcgcccgggtgggccgcgggggcctcggcgggacgcgctcggccctgtcgcaggagctaacgcagggggaatccttgcaggtgggagcatttcagagcgcacaagccatggtggccaaacagcggatccggatggctaacgagaagcacagcaaaaacatcacccagagggggaacgtagccaaaaccctggtaaggcggggtcggcgccggccaggcagagccctgcagcccggcggggtggggcggaaggtgggggcggggccgggcgggtagcggcgcagggtccggcctcccggctcccggcccgccccttctgcggg

SEQ ID NO: 236997 - DNA, 296 bp, Homo sapiens
  chr13:45009499-45009795
  hyper
aacctgggcagacgtcgcagccaatgggagcccgagttatttatagctccgaattaaaggttcagagtttgcctagcaacagtgggcagagaatcccgtgagaagagccacaggcgctgctccaataacaaagaacggccaaggcggaaataaaaaataggagaaatccaggcgcaggctaagaaaacaaaactttttctctgattcttcttcattgtgaaggagcccgcgccaccggggacccgtttgtgcaccgtctagaagacccttatccaggatcccgacttctggggccc

SEQ ID NO: 236998 - DNA, 59 bp, Homo sapiens
  chr13:45011210-45011269
  hyper
tcggaggtttccacggcggcctcaaaacactgggccattgcttcggcagaaaatgtgaa

SEQ ID NO: 236999 - DNA, 525 bp, Homo sapiens
  chr13:45149891-45150416
  hyper
ttttcatttgagttccgcctggcgcaagaggctgtgcctgcagctgagcctgcgaaaggaggttcaggctttgtggaggcggaggctgtggtcccgacgtagaagatgctgcagggggcggcggctgaagcagcgacggaggcggaaaatcctcggaagatgtggcattactaccgacgccggtacctgctgcattgagagcagaggcgctgccactaccgctgccccttcgagggaacattgccgggtgcgccatcttcctagcgctaatgtctgcagcggcggcggccgcggcggtggactcaggcggctggtgcattgtgttgggtaccgggggcgcggaggagacgagtgcaatttccttctgcaccgtaatctttgtattggagacgccggagaggaaaacgggacctgacgctccgcctggcgcgattcctccttctcctcctcctcagccaaaggcgccggtcgctcctgccttcgagagcgagcttcggaaaggaggatgaacgagggtgaacaggg

SEQ ID NO: 237000 - DNA, 1068 bp, Homo sapiens
  chr13:45491763-45492831
  hyper
tgtatttcggcatgcgaccgcttggttcccccgctttccttcacctctgacctaatctctcacttcaaaaactgacttcaagctgttgccagatacgtcccttccgccgcctgccgcaggtggctagggtctgagcacacttgaacctcacacccgccccaggggtagctccttggttcccttcagccccgatgtgtccctcgtgctttgaaatggaattacagttttggttaaaaacatgccttttccgagttaggaagaatctaaatcgactgaacgccagtctaaaatttcggcgttcccacaccgggagtcgaacccgggccgcctgggtgaaaaccaggaatcctaaccgctagaccatgtgggagacggcaatagcgactccaagcctagacaaattgagtcttctcggtcggcttccgcccactccatcgcgttcatccgtaggcgtcaaacctgctcctgcgcctgcgcggagtctgcagcggtttaaaccgttcaggttcgcattctactgtttctctccttgcaggggcccttgaatctttcttcaatctactctcgcgtctttcgtgatctcatccagtctcctggtgctaggtaccatgtcgacaccaatgtagacactagattggatgagtcattgttcacaattcctcacaaaactcctgcaaagtccaaaagaactggggtttgaatgttagaggctggtgaagaagtgaggaccacggggcgtcataacaccgcgcagtggaggccacgctgcactggccggtgtccgccgacagggtgtgtgccacagacgcgcagtgccttgcccgaatctgtccctcccctcagcgctggtccaggctggccacaggcaccaccccgtccctgaaagtggatcttttcctctgaaaaaacaggaatgagaactgcccggaagcctggaacattccaggttctgatgactcagcggctgaaggcaggatttgtgtcaccgaaagcagccagagtggcggtctgtaaatgtagcttagaaaagtggagaaagtctcttactgcaggcgttcatgatagatg

SEQ ID NO: 237001 - DNA, 164 bp, Homo sapiens
  chr13:45563658-45563822
  hyper
accacaggctttacgtcatttctcggcgccgggaaacctgccattcttcgctgctgatcgcgggattctttttggatagggttgacgttcgtggatagactcatatctgtgaccagtgtccgccaccgcggatggcaagagacctgatcggaccggccctgccg

SEQ ID NO: 237002 - DNA, 31 bp, Homo sapiens
  chr13:45694566-45694597
  hyper
ttgtctgcaacagcgcgccgtactgacgtag

SEQ ID NO: 237003 - DNA, 145 bp, Homo sapiens; identical to SEQ ID NO: 203354
  chr13:45991445-45991590
  hyper

SEQ ID NO: 237004 - DNA, 122 bp, Homo sapiens
  chr13:45992566-45992688
  hyper
cccgccccgtccgcgcaaacacgcgacctcctcagctcccattggtttctgccagcactagccacacccctgacagccccagatggggacacggaggggcggggcccgtcccaagtgcccct

SEQ ID NO: 237005 - DNA, 135 bp, Homo sapiens
  chr13:46038853-46038988
  hyper
aatctgtacaacacgtaacaataaagttattgatgttgaggaaaagacttccggtaggggcatttctatttccattgggtcctgtcttctccaccttctacgtttcaaccggaaatagtcgtacccatttaaagc

SEQ ID NO: 237006 - DNA, 228 bp, Homo sapiens
  chr13:46189793-46190021
  hyper
gcattgctaacgtgcgcagcccttacccaagccaggctcccgcgcgtgcatccaccgcgatctcaggccccggcgtttgtggcagctctcggttaccatgggaaccgcactccgcagcctccctgggccccatctaatctgcgtgtgtgcgtggcggagaattctaagcctctgcacctgcccttgccttccctttcccagcctctctcctggcggggaactgtttgg

SEQ ID NO: 237007 - DNA, 256 bp, Homo sapiens
  chr13:46425365-46425621
  hyper
aggttgacagcgtcggggaaagacatcagaccatcaatccagcttttcctgccagctggggaaacaacactcggtcactaacagcacccaatcacctagagagcgagagtgagccgaggcaaacacgccgggttccagacaccgtcccagcccccgagacccgggtttgcaaagggctgcacacgttcgccggagggtcgctgccgcctccgagaaaggacttgaacctgagcccggtgaaggtaaaatgacacag

SEQ ID NO: 237008 - DNA, 239 bp, Homo sapiens
  chr13:46626261-46626500
  hyper
atacaagggttcccgtgcttacatcaaatggtaacgaggggtacagcctattgtctgagtctacttatcgcccttagacaaatgccagaatcataatcagagtgagaaattacgcctgagcacagggggctattgcagagttaagggtgggatgctcaaggaaagctcaaaatcccagtgactcaagcaaagacgggggggggtaacccgggcctccgcattacgggtccgctcaatgc

SEQ ID NO: 237009 - DNA, 486 bp, Homo sapiens
  chr13:46626732-46627218
  hyper
ccaacccgcccgccgcctctccagggtcaagcgaaactgggtcgcaggaagaaaaataacgaagagattgtagattaagaaaaggcaacaaaaacactaccaggccgctaggaggaccgcctcaaaatgccgccggaagtcagaggtttgccctgttcctctgtagacccaggcagcttccggccgtcagattagtcgtcagtgcgcagacaccacccttcgtggacacgccctctaggcgtaaggttccatgcgagcggtaagagtgcggcgggacttggaaatcgaatctgtgctctgtgagagatcctaggaaaggaaactgggagcccgggagaactaaaattcccaattaaaagtgaatttaagtgagttttctctttttattacataattccttaccataaacagctgttgtaaatgcgcaaaatgcggcatttgttgacagtacctagagccactcattcattcgttcaacagtgttta

SEQ ID NO: 237010 - DNA, 37 bp, Homo sapiens
  chr13:46756059-46756096
  hyper
cttggatggccacgcgaggtggcggcagatgtcctgg

SEQ ID NO: 237011 - DNA, 666 bp, Homo sapiens
  chr13:46785661-46786327
  hyper
gaaaaccgaatgcccgcttttcgagagcactgcaaaattagccccgggacccggctgcacaaaagtgcagccttaaagaatgccagcccatattctagacacccaagtaaagcatcctgtaatcgagagaaaataataaataatagtggtcattgccattaagcataaaaatagtaataacaattgtcaccacggcgttccgtacagcagctgcgcgtggagccggcttctcctccggcccccacggcccgcagcttcccctgcagccccacagtgcgtcggaggaaggcgagggctccgcgcgcgctgcaccgtgggctgggcctgcccctcccggcgcccgcctcgcctcgcctgtcccgcgcccgcctcgcctgtcccgcccccgcgcctgcgcgtcaagtggctgggctggcttagcggaccccggttgctagggtgtgtctccttggcctcctagagggtggggatccgtggtgcttcttcgggaacagcctcctgcaggaagaccctcgctggacctttacctcgctgcctagattccgaggaaaaggagataggagacgaaaagccagttggtttggaaagcggccgattatcctaaagggtagtgtgggagtccagcacttccatgcccctctttgggtactacggaagggagatttc

SEQ ID NO: 237012 - DNA, 894 bp, Homo sapiens
  chr13:46960938-46961832
  hyper
tagtctctgagaatcgccctgcgtaaaagtgtcctgaggtcccgcttctgcgcccttcccggcccaagccgaacacagggtcaacctcactctacaaagtcaaccggatagaaatccgccaccccgcgaggagccccttcctactgtctccaaggggtccccgacactgctctgagcgaccctaagatacctgggtgtctctgctgggcacaaacctctctggcgccacttccaccatccaacctctcccgcggccctcccttccctttctccaaccaccctctccaccccgcgccgctcccatctcgcccccggccccgccagcctcacccagccaaacccgagcggtggaacgctgcgctgggtaaacgccgcgcgtcgggtcctccctcgcgcggctccgggcagcgttccgtggccaccgcgctcccggtaacagcagaaaggggagggaggagagctaccgaggaggggacagcgacgccccgacgccgccacgccccccgcctcccacacgggggccaccgtagctctctagaagctcctcagggaagcaaagcgccgttcccgccgcaggcaccgagacgtcgcccagatggaagaaactctggagatgcgcgctcctacaccggtgccgcggcgcccgggcccagcaccacgcacctatgcgcgcctctgccggtcctcctagaaatcccgccctgcctacccgcggcgcgagacgcaacgacgctttcaggggtcaaagacctggcagaaatgacttcccaaccccagatgcccccagcagcagtatttagcagtcatacaattgcctgaaatgaagaatgagtaatctggatgagtcggccctgaaatcgacctgcaacttacccggaacgtgagctgtctctc

SEQ ID NO: 237013 - DNA, 318 bp, Homo sapiens
  chr13:48807036-48807354
  hyper
cccttgtacccggcgaactcaggaaagttcactcgatttcgctacaaacctgcagcactcggcctggaggtaacctggttgggagcgaattcagaactggaaattccaggcggcccagagggacacccatccctctccgaggcgcgccgggatccggcgcccagctgcggggcgagggcagggtcccgcgcagcaccccacccccggccgctggccccgcccccgcccccgccccgcctcccaggggatgtgcgagcagtctccgccctcgcgcgggagctgggaggctgcgagatccctaccgcagtagccgcctct

SEQ ID NO: 237014 - DNA, 218 bp, Homo sapiens
  chr13:48877516-48877734
  hyper
agagtggcgctcccgccgagggtgcactagccagatattccctgcggggcccgagagtcttccctatcagaccccgggatagggatgaggcccacagtcacccaccagactctttgtatagccccgttaagtgcaccccggcctggagggggtggttctgggtagaagcacgtccgggccgcgccggatgcctcctggaaggcgcctggacccacgcc

SEQ ID NO: 237015 - DNA, 1066 bp, Homo sapiens
  chr13:49794351-49795417
  hyper
cgctccgccgtctgacctgccgcgcccgcagcgtgcgggctgggaaaggaggcgctcaccgagagggaccacgcgccaggctcccagcccgacccgggacgcggcggccgcgcggagcacccatgggcagcccctggaacggcagcgacggccccgagggggcgcgggagccgccgtggcccgcgctgccgccttgcgacgagcgccgctgctcgccctttcccctgggggcgctggtgccggtgaccgctgtgtgcctgtgcctgttcgtcgtcggggtgagcggcaacgtggtgaccgtgatgctgatcgggcgctaccgggacatgcggaccaccaccaacttgtacctgggcagcatggccgtgtccgacctactcatcctgctcgggctgccgttcgacctgtaccgcctctggcgctcgcggccctgggtgttcgggccgctgctctgccgcctgtccctctacgtgggcgagggctgcacctacgccacgctgctgcacatgaccgcgctcagcgtcgagcgctacctggccatctgccgcccgctccgcgcccgcgtcttggtcacccggcgccgcgtccgcgcgctcatcgctgtgctctgggccgtggcgctgctctctgccggtcccttcttgttcctggtgggcgtcgagcaggaccccggcatctccgtagtcccgggcctcaatggcaccgcgcggatcgcctcctcgcctctcgcctcgtcgccgcctctctggctctcgcgggcgccaccgccgtccccgccgtcggggcccgagaccgcggaggccgcggcgctgttcagccgcgaatgccggccgagccccgcgcagctgggcgcgctgcgtgtcatgctgtgggtcaccaccgcctacttcttcctgccctttctgtgcctcagcatcctctacgggctcatcgggcgggagctgtggagcagccggcggccgctgcgaggcccggccgcctcggggcgggagagaggccaccggcagaccgtccgcgtcctgcgtaagtggagccgccgtggttccaaagacgcctgcctgcagtc

SEQ ID NO: 237016 - DNA, 499 bp, Homo sapiens
  chr13:50018030-50018529
  hyper
gacccctccactacggccaggcgctatgtatgttttcaacccccaagaagcccagtcccagccacacacaagatggcagcctcacacctaccggaggaaacagctgcgccaccactccagtgatgccggcctctcgactacgagtaactccattggctcagctacagtgcgcgagacaagccgagagcgctagcagtcaatcgggaggcggcgcgctcgggcgccactgcggtgccagcggtaagtgcgccgagtctctgaggcgtgaaccagtggggagtgcgaccaatcaatgggctcctggctgggtggtgggacggccggcgtccgactcctcccatgtagtgatcggtttaggtaggtcggcctggtccccggcggaggttacgccttccctcatccccggtagaggcagggcgggactgttgtggttgagatgaaggctagtaaatggtgaagtacttcccggccagagggcacctgcgctcgggaggtttgg

SEQ ID NO: 237017 - DNA, 423 bp, Homo sapiens
  chr13:50070357-50070780
  hyper
agacgccggggcggcgctggacgaacttggctcaccactcgcgtgcctgttggtgggggagggggccagaggacagggcgcggcccaggccagttccacaggtggctctgactgcccatggtttcgcgcgagtggtgggcacgcttcggtttacctcccccgcgggtgacagcccagtgcttccaccacaaccgatgtcaactctcctagcgcccctccgctcaccggtaaaccaggacagtggaggggcgccctgatgcggtgaggcagggggcggccctgagggaagagctgggtctcacgttcacggaggacgtgactggaacccgtctccccttctccagtcgttccagtcctccccggccctctacttgagtgggtgggtcttctgatgggttcctgcccttgcgtgtgtgtatagct

SEQ ID NO: 237018 - DNA, 88 bp, Homo sapiens
  chr13:50264906-50264994
  hyper
taaactcagtaatgcgcctggcacacattagacacgggtgtttcgtttgtcttggcaaaggcttcgggttttgcgacaatagccttgc

SEQ ID NO: 237019 - DNA, 159 bp, Homo sapiens; identical to SEQ ID NO: 203362
  chr13:50265731-50265890
  hyper

SEQ ID NO: 237020 - DNA, 312 bp, Homo sapiens
  chr13:50367043-50367355
  hyper
ctcaggcgcggggcggcggtcgtcaactacagttcccatcatgccacgatccgcctggagtaattctccacgcctagtgagaacgaggagaatgccgggacccttccgcgcgcggctctttgcgcgccgcgctcatgttgctgggcacaaagctccgcccccacaaggccgcctctgggcggggaagagcgggggagcgtccctggcaccttgcgccctatcaggaggaagagggcgggccttcctgggagcgcacctcgctgcctgtagctagaagatcagaaaaggaacaaccgcgagtgctttgcagtc

SEQ ID NO: 237021 - DNA, 182 bp, Homo sapiens
  chr13:50510537-50510719
  hyper
ttaggctggcctgcgaggaagacgcggagaatcaaggggccggggagagaccggacagggcgagcggccgggctgggccggggagacgggtggggctagtggcgcgcggaggcgtggcagggggcgtggcgttgcgggcctgcggatgtgggacggcgtgcgcctgcgcaccagctggtttt

SEQ ID NO: 237022 - DNA, 209 bp, Homo sapiens; identical to SEQ ID NO: 203364
  chr13:50570752-50570961
  hyper

SEQ ID NO: 237023 - DNA, 553 bp, Homo sapiens; identical to SEQ ID NO: 203365
  chr13:50571189-50571742
  hyper

SEQ ID NO: 237024 - DNA, 51 bp, Homo sapiens
  chr13:50654635-50654686
  hyper
cagaaagcatctccggaatatttgcaacccagagccgtgcgccccacacgc

SEQ ID NO: 237025 - DNA, 370 bp, Homo sapiens
  chr13:50701604-50701974
  hyper
ggacacgcgcttttcgcccctactttgttcttgcgcagtcttcccagctgcggagaggagggagcgaaagcaaaacgaaagcacccggggcgcatcagttgcaatagcttccctgagcgcggccgtgggaggccaagatctgaggtcgcgaggcgacggtgggggcccgagctgcgcagaaactgggtgggggcggtccctggagggcgcccgggagctgctagaagttgtccggagcccctcaacccccttggaaaagcgaacgcggatgttaatataccaactccgcagggaacttttggcccgggtcttgagctgaaattccagactgaatgggaccgtgctgaaagttcgacgaggcaaaggagta

SEQ ID NO: 237026 - DNA, 950 bp, Homo sapiens
  chr13:50704196-50705146
  hyper
aggggttaaaatggcgcggctggatgggcgtggggaatgttgccagtgttcggtcccgactcaggggagaaacggggtgggggtgtggggatcccggaaagggccggaaaagccgggagcaccgggaggtgtgaggccagagtttctgctactgggggctcttccagggaagacgctggcgggaataggatggggctggcagctggggagcctcgcggtggctattgcacgtctcggcccccctggacagggttatgtcaggagagcgccctggcaccgagctctggccgctggataagatactccctcgccggctccctccgtgagcggggctgggcgggtgcggaggggcgggcggtgcgcctcgccgagcccggggcgctgaggtcggcaagtcgtcttcggaactggcggcggcgcttctccagtcgacgtggaaaaaaaaatcgtctcaaatagcacccctcggtctgcagccctttaacactggtaaagtagataacaaggaactctgctgaacgagggaaactcagtttagaacgtcccagagtttccaagtttgtcaagcgactgggaatcttggtcgccgcgtggagagctgcgcccatttccccttccagaagaaaactgaaggcgtattcctccaaaggaaggctgcagtcaggcgccacacagaacacaggcagtcctctccggccgatctcgggctcgcctctcccagggccgtagggagcatcttttctgagcagccccgggagggcagctccgggcgctctccgcgctgggccctgccgcggccggtgcgttacatcaggaaacgcttggtccggttttctgtctgctagtcaaaacaattggctgaatctcgaaataacttttttgatagtccggaaaagaaacatgacaaatagactcaccatcaggcttgcgtcagagaaccattttcccca

SEQ ID NO: 237027 - DNA, 139 bp, Homo sapiens
  chr13:51086772-51086911
  hyper
tgtctcagcagctctcggggggacctgcaggctggggaggcagcttctctctgcaatttggccgctcctggacttgttgcagccaggcttcaaagagaaaccaccgcttcctccccgagccccacgccagcctcagagg

SEQ ID NO: 237028 - DNA, 396 bp, Homo sapiens
  chr13:51417473-51417869
  hyper
gaagggcagcaactcggcgcccccctcagcgcctcgcactacctcctcctctggggagttcgcccgcgccgcggtccgccgactcctggtccccacgcccccgccccgctcctcgcgcccgggccccggccgggcccgcggcgggcctgagcgacgggctggagcggtggacacgtggtctgggtcccgcgggttcccgggggcgactggaccgtccccccagccccactcctgctgcagcagctgcaaggtctgcagagccaccatttggtggctgatggaggccactaagggcgcagggctggccatcgcctccgctggcggcccggcgcgctccgcgtgcaggtggagcagcagcgagggaggcgggggcgttggggtcgccaaggtcacatt

SEQ ID NO: 237029 - DNA, 127 bp, Homo sapiens; identical to SEQ ID NO: 203367
  chr13:51483755-51483882
  hyper

SEQ ID NO: 237030 - DNA, 125 bp, Homo sapiens
  chr13:52027211-52027336
  hyper
gctgcggaggctccgcccctgacacgtccccgagccacgtgatacaccgcctcgccgttctactggtcaggccctatcctttcattagcatatttaaacagctcaggggcgggggaagcttgtag

SEQ ID NO: 237031 - DNA, 121 bp, Homo sapiens
  chr13:52028195-52028316
  hyper
cctcgtgagaaagcggaaaaactgacttcagcttgcccagatggcgcagagaatgggtttcccgtaaccccgcctgtgtctttccttcagcctcgtcccaaatgccgtgggagggaaggca

SEQ ID NO: 237032 - DNA, 257 bp, Homo sapiens
  chr13:52159090-52159347
  hyper
atcctggtggtgccggtgttcagctgcgcgccgcctccgctgtgtggctccgggaagcggagccgggacggcggcgagcgctccggcttcaccccgggctgggtagtgcctgcgggagccgggtggccctcgggctaacggtgcgctggagggactttggtccatccctgaggacaggagggaaagaggggaggagccgcccggctttgcaggtgtgtgcttggggaacgatgccctgagccgcctctgcaagataa

SEQ ID NO: 237033 - DNA, 124 bp, Homo sapiens
  chr13:52377716-52377840
  hyper
tggagccaaaggtcgcagtccaggtgctgcatctttttaaaggaaacacacccaaaggcactaggacagagccttagctagcgatttagatccagccctatctgacgccgccagcagcaccacg

SEQ ID NO: 237034 - DNA, 223 bp, Homo sapiens
  chr13:52586275-52586498
  hyper
agggagggagcgacggctgtcaatcacaggccacgccctcctcagcccaaccccccactgctgtcccgcccacgggggcgggagccgtgtgcgccacgccgaacactagtctacgcctcggcatattctattggctggaaggccgtgggaagcggctaccagtaaccaatagtaacgcacaattggcccgtgggggcggggcgagcacggcttgctttctcag

SEQ ID NO: 237035 - DNA, 385 bp, Homo sapiens
  chr13:52703047-52703432
  hyper
tctgggccgcccccgccgccccaggccgaaactccatccctttcccccaccctgccgagctcccgaagccctgtggcggctccgggcaagaactaagggcggcccctgcaagcgtacctgctccgccggctccgcggggccaacgaagcgtcccggaaggatccgggttcccggggccgctgcgcctccctgcggccggggcggagccgcgcaaggaaacgcgggcggggcgcgggtctggaatggcctggggaccagtccacctcgaggcagggtcaggcgccagggagtttggagacccggcagagtcaccccgcaaccgtcccgttgccttgggtcgggattcctttgctttgcagtctacagtagcgctccccgctcttgc

SEQ ID NO: 237036 - DNA, 649 bp, Homo sapiens
  chr13:52733271-52733920
  hyper
ttctggtttggccagccctgcgcttattaacttctttttttgctgcaacagcggttctcactggttctttccgggcagcgagcgagaagaatccgttgagccggggccggcgcccgcggggcaactgcaccgcgggggagcccagtcgccccgctcacccgtgagggccctttctcctggaaaagccgctccgccctgctgacccccacggcaccgcgcgcccagaccccaaggcggcgagggacttgcgggtttgcggcgagtggtccagaccgcggggcggaagtgaggggcgcggccgcgcgtccggggcgcgtctacccctcgctcccactcggctccgcgccgcgaccacgcgccgccctcctcgttctagaggcagcccgccagggcggggaccactcacccgcttccccggcgaccctagtccactccttggcctggcaaccggcggcttccgcggggcgggcccggcgggtcgtctctcgggttgcgggtgaaggaagccgcctgggtctggcgggaggcactgttcttggagtagccgggcctacgaagagcacgttttaaagctgttgttccacgttgcggtggaacagtgctgttaacattgagggaaattgtccccgactaactgagttctgtctgc

SEQ ID NO: 237037 - DNA, 545 bp, Homo sapiens
  chr13:52979986-52980531
  hyper
taccccttaaaagcgtcccctggggccgaggcgggtgtggggaggggccgccaccgtccacctgcgccttcaggctgcggtgaggtggcagagtccggaggcatttcccgaccccagaggagcctccaagagtctcgcggcacgggcgcgaacaccaggatgcggagggcgcttcttacctttcgagactgacgggcagcaaccccaggccgtccgggcgcgtggcgaggcggacgggaaggctcaggggcggcgaggtagagcgccaagcatcccgcgtcccagactgcacgccctgaccccgcggcgttcggctcccacagccccgcggggcccgcccccgacggcgtggggagggcgggcgccgggagggcggggggcacacgggaccgggcgtggtcggttcccgccccttctgggcagcgcatcctttcctgccggtccccagctcgccagctgctggacaggaaacaggcaggaaacgcgcggccagccaaggtcctgcgggagggggtgcggccccggcagacgcaggtcccctcaac

SEQ ID NO: 237038 - DNA, 58 bp, Homo sapiens
  chr13:53024891-53024949
  hyper
acgtggagacgtgcgtggagcgccccctggcggtccattagccgccggcctttcagaa

SEQ ID NO: 237039 - DNA, 256 bp, Homo sapiens
  chr13:53029197-53029453
  hyper
aaatacacacgctcgtggtacgccagatcggtgtttacgtcctcgtcagtgaacgcgtcgatgtttaataagaagggcagccaatcaacacttttcttgtctttttctcgtctgccttcctccaaggactgtgagggtctcaagatgtgtcccatctcggttgtttgtcaacctagtcctgctatgtcgtggggactgagcaggccgactcctcccccatcgcacgtccaggatgaagagcgctgtttaggtttga

SEQ ID NO: 237040 - DNA, 575 bp, Homo sapiens
  chr13:53174028-53174603
  hyper
cggtaggagctgccggccagctcgccatctagtccccagagcccgggctttagggcgcccggatgcaaaccagttttgccgccaaggaacccggacaggcgcgcctcctccccggcctcgcaaggaacaggttaaggagacatttcccactttctctgcccggccctgaacgctcgccgcccctgcccagccgcccactgtctggcagcctgcaagtctccattcagaagcggctccgtgctgcccagcgatggcgccctggcggcgcggaagcccgcggccaaatgacacgacttgggggcaaaggaggacaacagttcccaccaggtaggcactgggggaaggaggccgatgaccctgagattctccagcgaccccggcgggccatccctgggcggcgcgcgggtcccgcggcacgtgcgtggcagctctcgccgcttccctggacgcccgggaaggtcacgccgcctgggcgccgaggcccgccccgcgcccctctccctccgcccggggcgctccgcagctgccgaggagcggaagtgggcgccaggccgcggcgcgcccagcccagccca

SEQ ID NO: 237041 - DNA, 122 bp, Homo sapiens; identical to SEQ ID NO: 203372
  chr13:53226636-53226758
  hyper

SEQ ID NO: 237042 - DNA, 992 bp, Homo sapiens
  chr13:53312973-53313965
  hyper
cttcacttgcttttctacaacgttgacctaaggcggaaagccgcgtgccagagtgggatgggagaggggagctcacgctgggcccgaggggcccgccggcagccgcgcgcccctcgccggcccgcgctcgggctccccctaggggcaccatgggcgacacgggggtccccgcgcgccgccctctggacttacgtgactgtcgctccccttccagaagtagaaggccccgatggccccaaagagcagcagcacagctcccgaaatgaggaccacggctcccaccttgagcagccgcgcggggctggagggcttcaccgtcagcgtagcgtacgcctgcgggccggggcgggagagggaccgtcgcgtttgtgccgccagcacctgcggcccccagcgcacccgggccccacgcggtagcccccagggagtggggagtcgggcgggaaacagctcgcccgggctcctacgggtgcccctttcgccgcgctccctcccgagggtcctttgcagtcgggcgtggaagtgggatgagcaaaccccgcagcacagggccttcgccccaggacctgcaccctctaccggccacgggacgtccctccgcacccgcctgtggatgccgtgacccctgcacactcatacgcgtggggcgacatcccacccacacatttgggacccaaatttatccccccgccaacacacccattcggtggcacgcacccctgagtccgaactgtggaacctgatactcacacaacccaggccctgcgtgtggaatccctggcggtactcaccggggggctgcagaattccacgtcatcaggtcccaccagggcaatgggaactttgtcggagttctctgtcatgtttgcggcgggaggagtgaggcacttggagactccctgggcaccctgggatctgtcccgctgccccgacgtgcagggcatttcaacgccgcgcgcacacacggtgcacggtcccgcctgggccagccc

SEQ ID NO: 237043 - DNA, 1990 bp, Homo sapiens
  chr13:53419717-53421707
  hyper
gccacagggggcgccggctcctttccaaaacccggggaggcaccgtagggctgcagcagggaataggggaatgggagtggggggagggttggataagaaacaaacaaaaaacaagtgcgacaggttgtctacctgaatgcacccaccctacccctccagtctcccttcccccagcctgtccgcggagctcggaggggggcgcccagccgaaggaaggcctcacctcggcgtgcgcgccgcggagccgctgctgcccctcgaagtgacaggcgctttccccagtggcgctgccgccctctgagcccggcacttcggccgcggcgaccgcaggcggaggcgcgtccgccgcggggctgccaaagggcgctttgccggtgccagggaaggtgagcacgtcgaacatgttgggcctgggcccggctccccgggcggcctcctccggggagccgggagccgaggctccgccgcccgccgccccgggccgctcttcccggagggccccccctttgcgcacctccttcttgcggcggttgcaggtggtggcgatggcgatgatggcggccagcagcagcgtgcagctcccggccagcacgatgatgacgatcagcggcgtgtcccattgcagcaccgacccggacaccccgagccgagagccaggcgggcgggaacgctccgggcttcctgcactggcaggcgcagccggcccacgcccgccccctgctgttaccacgaagctgacagttgcggtggtggtgagcgggggacggccgccgtcggatatgaccaggagcgccctgaacacgcgaccgggtggctcctgcgagaggtcgccggtgagcagtatctcccccgtgcggcggccgatggcgaaggcttcgcgcggctcctgctgctgcagctcgaacgccagctccccgttggctccctcgtctgcatcccgggcctgcacacgggccacaaccgtgtcctttgcggtgcgcccaggcaccgccacttctagggagccattggctggcgccgggtgcaccaggactggcgcatggtcgttctggtccagcacgcgcacttgcactagggcgctgctggaaagctgaggggagccgccgtcgctagcttggatgcgaacgtcgagttggcgcagcgtctcatagtcgaagctgcgcagcgcgtagatggctccggtagctgggtccaccgagacataagtggacacggcgcccccggcgcggcccacctcggcctccagcagccggtaggtgacctggccgttgcggcccaggtcccggtcgcgggcggccaccgtggccaggtaggcgcctggcgggttgttctcgcgcaccgacacctcatagaccggccgcgtgaagagcggcgcgttgtcgttctcgtcgcccacacgcaccgtgtagggccgcactgtgcgcagcgggggcgcgccgcgatcctcggccaccagcgtcaagttgtactcggcgatgcgttcgcggtccagcgacgccgcggtcaccaccaggtagctgcccgcgtaggccggctgcagccggaagtgctcgtgcccatagagggcgcagcgcacttgcccgttggcgcccgagtccctgtccgaggtgctgaccagggccaccaggctctcgcgcgccgccccctccggcaccagcgaagtggcaccagcctccggcgtcccggctcccgccggcgagctagcgtccgctcccccgagtgcagcggcggcggcggcagcggcgaagggtgaggttgccggcgcgcctggggcggccagcggggtgatggcgatgtcgggtgcgttgtcattgacgtctcggatgcgcacgatgaccttgcaggtggcagcgcggggcccgggtccgcggtcctgcgcccgcacgtccagctcgtaggtgtcctgacgctcgtagtccacgggcccggccagggtgaggcggcctgatcgcgggtcaagccgaaagaggcggcgcgcctccggcggggt

SEQ ID NO: 237044 - DNA, 85 bp, Homo sapiens
  chr13:53422121-53422206
  hyper
cactgccgcaccctcggacacctctaccgggatctgggccctggggaagcgcggcgcgtggtcgttgacgtccctcacctctacc

SEQ ID NO: 237045 - DNA, 1041 bp, Homo sapiens
  chr13:53422236-53423277
  hyper
gagaagctgaccacatcgaaggccagcacgcactgcggggcctggccacacagccgctcgcggtccaggccggcgtccccgacggtcagctgcccgtcgccttcgcgcacccggagcagagagctgttgaattgcttcatcaggcggaagcttgtgtcacccgatactttcatatgcaggtcctcggccagggtcccgatgaccgtgccgggggcatcctcctcgaaggtgctgtatcggactgttttgctctgggccactgagagcacccagcagaggctgaagagctgcaaggggaaaaggcaggggctgccccaacgcctcacaggactcatgcctccagcctcaagtgcgatccgaaaggctaaggaagtcttctctggtttccaggtcgggcgtcagtctcaggctctcggaatcacgctctttgcgagccctgtgcgggagaagtctgcgggtagcagctccgagcctccagcgggctctgaggacgcgcggacccgccctcactctgcgcctctccgtctcttacagaagctgcgccgcctcgcgccgcctttgcctttatagccgccgatatgctaatcacccgagccgggtagccaatggccgcctccccctcgcgtcgcccctccgcctgcctctgacaatccctttaatgtggaaaggcttagaggggaaaacaagaaaggaaaattagggaatctttcttttgtttaactccttttgctttttcccccttttcttgtcagcaccctgcatgtagaggagttggcacagggctccaggagtaaaaggagcggatggttttgttaattgtcgcctgcctccctccgtgccgcggctagaactaagtgcgaacacgctggggtttcaccccagtggctcctgattccgccttcccccagcccctgccaacacacacactctgcattttgcacctctgacgcttccaaacccttgcagccccctacccacagacttgctctgctgaatgaggctctgctttccttctctcctagctacggtgcctggaatagc

SEQ ID NO: 237046 - DNA, 242 bp, Homo sapiens
  chr13:53423900-53424142
  hyper
aagcaacactcgtccggttccagaagaacaaaatcacagcgtgacgttgaaacctggcaggaacgtggggggaacttaaccatctgcttaggaaagtgtggagcttcggcactgccaaaatctgggctgggcggatcctggggctggccgggcgctgcgctgccccacagatagccccctcccatccctgacggccagggagatggagctcggatctgcaacaagacggattcttaatgatt

SEQ ID NO: 237047 - DNA, 366 bp, Homo sapiens
  chr13:53424663-53425029
  hyper
acaggagcccaaatcgcagccctttcttccgctgtcttccatctcccaagtgcgatttagtatgtagccctcccaccgtccccgcccaagagatattccttggggggtacacgcagtcgaaggaactttctattttccttccgagccccgcaacactcccaccccaacctggggctggctggtgacctttagcgcccctaggctaacgtcatctctcctcacccctcttcccccggagacccagacgggaacaggttcagaacttggctggtggacagcggcctcagcgcttccgctggcgtacccagggcaaggtcaggcccgcctggcgctgctgctgccgggcggaggacccggaaggtgggg

SEQ ID NO: 237048 - DNA, 47 bp, Homo sapiens
  chr13:53425269-53425316
  hyper
tcattctcaaggctgaaataaaccaaggcgtgcttgaaagtgggaaa

SEQ ID NO: 237049 - DNA, 595 bp, Homo sapiens
  chr13:53774953-53775548
  hyper
gagggccctaacggcgacgtggtgttcgcttttggcgcctgcacccagagggaggcgcgccgcctctttcagctcgacccgcggtctggccgcctcactctggccgggcccgtggattaccagagtcaggacacctacgagctgcacgtgcgggcgcaggaccgcgctgccgcctgcaaggtcatcctgcgcatccgcgacgtcaatgacaacgcgcccgacatcgccatcaccccgctggccgccccaggcgcgccggctgcctcgcccttcgccgctgccgccgccgccgccgccgccgccgccgccgccgctgccctcgggggagcggacgctagctagtcggcgggagccaggacgcccgaggctggcgccgccacgctggtgccggagtgggcggcgcgcgagagtctggtggctctggtcagcacttcggacagggactcgggcgccaaccggcagatgcgctgcgccctctactggcaggtgcacttccggctgcagcgggcctacgcgggcagctgcctggtggtgaccgcggggtcgttggaccgcgagcccatcgcctagtacaacctgacgctggtgaccgcgg

SEQ ID NO: 237050 - DNA, 886 bp, Homo sapiens
  chr13:58203566-58204452
  hyper
acatattgattgctgttgctcgcggcatgttcgtaccagcgcgggcagaaacgggctcacgagcgccctcgaattcacacacactcaccgaaatacacatctcagcccgtggaagcgcattcacacacacccacgtacactcctccgcacctcattcagatgggtccacgcggagtcagggctgcgcttcccttggcatgggcgtgtgtgcggcgagggcgtgtgtgcgtgcgtgtgtgagagtgtgtgtagagaaaccctttaggcagaccgcagctacgttattctgcaagcatactgcgattcccgattccgtgtatgtaggaccacaaaaaaattaaatcgctgttaaacttttttttgtaaattctcttttccgaaggaaggcgctggaagagctactcccggtggttaaaggcccgggagacctggtggcgaatcctggggcgcgtccgctttggcggagcgctgggctccgctagccggactggttccccatctaactgatctaatcaatgactccgaagagccggggctcctggccccgcccccgccatcctcttctccgcctcccattggacgcgggccgagaaggcagggccttgctcctcgctcggattggctgacagggaatcagtatcaatgtttaagcggcggcgtgaggtgaatagagtcagtcagcaagagacgctggggagagagcagggatcgcgagcccggcggatgcggcagcggcggaaggcggctggggagacgctactccaactgttgaattgaattttcacctttcctttcatccgctgctttgcttgcggagatggatttatttgctttgaaatccgcatatctttctcagactgtggggtgatcccggcagacaccagac

SEQ ID NO: 237051 - DNA, 351 bp, Homo sapiens
  chr13:58204884-58205235
  hyper
atagactgagtcagagaaagcgttaggaagaagccgcaactaatgtctgtgaagggaggaccatgaggcgagagtgaatacgattcgttccgctgcttctgactcatccggcagatcggaacacctgcatttctggatgtgtcattcccgtatgtcgaggcgcctccagaacccgaaataatgtgtagacagacctgtgtctaacatcccctcggagggagctccccggggtaggagcccctggctggaccgccgcggccgcagctctgcaccccctgccctccctgagtcgcccagaaaaactgaaagagagactgcagaatgcatcacgccaaaccttgatgtgttgct

SEQ ID NO: 237052 - DNA, 1112 bp, Homo sapiens
  chr13:58205443-58206555
  hyper
tgtttcccttctagcgagagacagggagagtgtgtgtgcaaggactgggagggaggctcccccttcctttttattcggcctcccccctcctcctttaaatgtgcacgtccaaccatgagttgcctgttgatttcccttcgcctgggaagaaaagcaaactggaattaaactgcttggagagaagtccttgctcgcggggagaggatgggatggtagcggaggctactggcttggcgtagagaaatcagagagtgtgttctacgaacagaggcgaagatttatctctctacttcccccctcccaatagactcacacagcaaatgctgatcaggctgtggctttcttgatttcgggggagagccttttccgaggaagagagggaggagcctggtggggagaggaaactacaaatcgggacactagttctttacgctgcatttcctcccctccctttggctgctcggaaaggagagagaggaaaaaaaaaatacgcttggctggtagatgcagtccgccgccgccgctgcctcagccagcaatgcaagattagatctctaaatgcagcaaaacactgcctgaaaacagaccggcccgcgcagcaagcagacatttcacggtgcgctggggaagcttcaaaatatatctgtgactctgtcttcgttgctcttcatccccatcaatttcatcacgggaggcgagcagcaagtaagaatttcactttcggatctgcctagagacacacctccctgctccctcccccactcgatgtgaagagtattccggagtctccgggcgggagtagatttgcagcaccctagcgggagcgaggaaaacctactgattctttagctcattatcatctctcccagacgagatttccttcttatcgcctgcctcatcgctcaagtttgagcctcccgaagtccgggcgggagagacgaaacccctggctcacccccagccgcaggaagccaccgccttgctccaagcccctgcagctctgctgcaccgcagcttctcacccagtgcggatgctgtagatcaacaggttcagggaacttgagcagaataaggagagaccaccgggtgccgcagctcgggtgcagagggaa

SEQ ID NO: 237053 - DNA, 564 bp, Homo sapiens
  chr13:58206763-58207327
  hyper
gcaaggggccggcacggtgatcgggaacatcggcagggatgctcgactgcagcctgggcttccgcctgcagagcgcggcggcggagggcgcagcaagtcgggtagctaccgggtgctggagaactccgcaccgcacctgctggacgtggacgcagacagcgggctcctctacaccaagcagcgcatcgaccgcgagtccctgtgccgccacaatgccaagtgccagctgtccctcgaggtgttcgccaacgacaaggagatctgcatgatcaaggtagagatccaggacatcaacgacaacgcgccctccttctcctcggaccagatcgaaatggacatctcggagaacgctgctccgggcacccgcttccccctcaccagcgcacatgaccccgacgccggcgagaatgggctccgcacctacctgctcacgcgcgacgatcacggcctctttggactggacgttaagtcccgcggcgacggcaccaagttcccagaactggtcatccagaaggctctggaccgcgagcaacagaatcaccatacgctcgtgctgactgccct

SEQ ID NO: 237054 - DNA, 579 bp, Homo sapiens
  chr13:58207575-58208154
  hyper
agaccggcctaatccgtgtgaagggcaatctggactatgaggaaaacgggatgctggagattgacgtgcaggcccgagacctggggcctaaccctatcccagcccactgcaaagtcacggtcaagctcatcgaccgcaacgacaatgcgccgtccatcggtttcgtctccgtgcgccagggggcgctgagcgaggccgcccctcccggcaccgtcatcgccctggtgcgggtcactgaccgggactctggcaagaacggacagctgcagtgtcgggtcctaggcggaggagggacgggcggcggcgggggcctgggcgggcccgggggttccgtccccttcaagcttgaggagaactacgacaacttctacacggtggtgactgaccgcccgctggaccgcgagacacaagacgagtacaacgtgaccatcgtggcgcgggacgggggctctcctcccctcaactccaccaagtcgttcgcgatcaagattctagacgagaacgacaacccgcctcggttcaccaaagggctctacgtgcttcaggtgcacgagaacaacatcccgggagagtacctgg

SEQ ID NO: 237055 - DNA, 669 bp, Homo sapiens
  chr13:58208368-58209037
  hyper
ggagagcaacgccacggtgagggtgacagtgctagacgtgaatgacaacgcgccagtgatcgtgctccccacgctgcagaacgacaccgcggagctgcaggtgccgcgcaacgctggcctgggctatctggtgagcactgtgcgcgccctagacagcgacttcggcgagagcgggcgtctcacctacgagatcgtggacggcaacgacgaccacctgtttgagatcgacccgtccagcggcgagatccgcacgctgcaccctttctgggaggacgtgacgcccgtggtggagctggtggtgaaggtgaccgaccacggcaagcctaccctgtccgcagtggccaagctcatcatccgctcggtgagcggatcccttcccgagggggtaccacgggtgaatggcgagcagcaccactgggacatgtcgctgccgctcatcgtgactctgagcactatctccatcatcctcctagcggccatgatcaccatcgccgtcaagtgcaagcgcgagaacaaggagatccgcacttacaactgccgcatcgccgagtacagccacccgcagctgggtgggggcaagggcaagaagaagaagatcaacaaaaatgatatcatgctggtgcagagcgaagtggaggagaggaacgccatgaacgtcatgaacgtggt

SEQ ID NO: 237056 - DNA, 149 bp, Homo sapiens
  chr13:60738356-60738505
  hyper
accatttgagcagcgctgggatataaaaccatctgctagccctctccttgcacgtctggggctggaaaaagtagttctgggactgggtacggtgctggaaggggtactaggcaggatgaaacgacggggcccacgacgctccaaaagga

SEQ ID NO: 237057 - DNA, 186 bp, Homo sapiens; identical to SEQ ID NO: 203380
  chr13:60970305-60970491
  hyper

SEQ ID NO: 237058 - DNA, 823 bp, Homo sapiens
  chr13:61988789-61989612
  hyper
aagcaaagtaaacgcggaaaatggctatgcaaaaacaatttgtcaattgcagtaggcattcatagccagacgccagcagcaggaaacgatcccgaacccctgtagctaaagcggattgagcgcacccccgatgccctcgaccttatctggatacatttcttgcttcagaaacttcctctcatgacccacggacttccctattccttgttaaaaggaagacacattatcccaaactccctttccctcccggcgccatccttcccgtgaagtttagataaaggtagaaggtttgaaaaaccatccgagtgggaattgcttcacaatactgcaacttgtcggggtcgcggggttccttgaccctaacccttaccggcaggttcctgtagctggtgctgctcctgggacgatgtagacgccccatatccaggcgcgggtgccaggtcgccgggcaccagctcactcccagggcctgtgagctgcgcgcattccctcggccgcgcattccctgggaggctgcagtcagagcgctcttgaagggagggcggcagaagacactccctctcggttcatgcaaatcgctgggggaacttcagccaatagtcactggctcttcaattaaggacgggaactcaaagagtggcagaaaggcaagagggcagaagggcacattcatggtttcctgccccggacgcaggtaactccatactctgccagaggagctggaatgggggacttgctcctgaagactgcgaagaggcagctcggggttgggcacagtagcgcttacctaccagcctccttccttgccgcaccagtcagatgc

SEQ ID NO: 237059 - DNA, 1907 bp, Homo sapiens
  chr13:67803748-67805655
  hyper
cccgcgattagttccggcagagtgatgcaggtagggatgcagatacagccgagtaggtgagctctgccccaaccgtctacccaattacaagcatctttcgcctacactgaggacacatctaaacacagaatttacaattgtgcatgcgaaactttacacttacgttagttgcctcaacctttcccctttcccagtatgctgcagttaggaatgatttgttccaacacatagaaagccatgcatctggtagcaccagtttggggagaaatcagaagcagcaaaatgtttcctccttgtaaaatgtgttgcttcgggctggcaaattagcaactccagagaacaaattcacggatttgtcgttagtcattctctccacatttcgtctctcttacccactgggtctgggttcttctgggcatttagcacacacaacacatagttgcacttcttcagctcagggatattttccacagcagcatgcataccatttccatccgatgccaatactgcttaagtctctaacttcttgtaggaaacgtcagagttgcggtgatgatgattctctgacagctatccgggtgacagttgcccgaaaaattcctaatcggttatctcttgcgtgcttcagagactctgaggcgctcctttccgtctcgcgtgctctccctctctcccttcccctctgcccctctctccttctccctctcctctctctgaactgaatttcttgatataactctcaataagcccagagggagggcgtgactgcccaggccccgcccccgggctctgattggcctgcatcttgcggcgcgggcggccgcagcccggcgcgagggagggagcgcggaacaaggcgctgactgtctcccagcctcccctcctccgcgccccctcggcagcagcgaaaacccggaaatctgatcctggccccaggagagccgggttccatgaggtgcactgagcatgctctgcagggtccggcgtgggagggacgcgctggcgctccccaggcccgggcggaagcggcgctcgcaggcgctgaaagcgagcgaccctctgagcccgggtggtccggcgggcaagggcggcgcgggagacccgcagggcgcgggcgcggatccggggaaccagggccaccgctgcgggcggatgggggtcaccgaggcggctcgtctccaggcgcacacttcgcacatctctttgctaagtgaaggggccaaaatgcacagatgggggagtctacccaggaacagaggcgcgagacgtatagccacccctgggttgggagcacgagccagcagatccccggagcgcgttaaacggacaacatgcccggtgctgcaaatagaggcttttgctggcagggacattggaaagaagggcggagagggagtacagcgaaaggtggggaccgcagaatttggaatctctgcggagaccggaaagaaaattaatcggagcacttcctacatgcagagccacggaaactgccttggaaagagaaagtggcagcgtctgggtcccctcggtcagcccgggccagtcggctgcgcgtgcgaagtctcctctagcggagcgggaccggccgcggcggtggatcgtggcggtccctgcacttctgctccagccgcgcctggaaacctgagcccggactcgcggctgctgcaaaacccgcttccagcccacctcactgcgaactttgcttccgaggggctggaaggagtcccaggcagctgtttcccaagctgtggaacacttcctttcccctaggcactttctgctgattccaactttctttcctgtgattttcgtcttttcccgtgcatttcatttctccgactccagctctgtactaaatcctcacaagtttctcgttttcatacgggaactggatggaatgactc

SEQ ID NO: 237060 - DNA, 573 bp, Homo sapiens
  chr13:70681653-70682226
  hyper
ggcttttgagcaggcgactctggctgggtccccagtgctcaaagctgccactgccgtcctgttgcaggcagcctccccccgccgggccgccggtggaaggagacgggtggctgaagagtttccagcggagtcgcagaatgtgcttcacatcgaagtcttttcgcccagagcctgacatgctttacgcacagaaggcaaaaggctggcagctcacgcaggagtaggctggtcagcaggtgggggaggacagcggggcccgggggcggaggaagaggcgggatgcgccctctgcacccctagagccagaagacgctaggtgggctgcgcgctctgccaggcgaaggctggagcgcagacggcaaagccgcgcgtttcagccgtggtcgggtccgcaggacctgggcgtggggacaccaccaggcaggagcagaggcaggactgggacgccaaaagctgagaatcctcgatgcccgcgcgagagccccgtgttatggcgaggtgggacaacccttaggctggagatgcgcgagggagggaggtctgagcgctccgaagctccggaggcggctgcag

SEQ ID NO: 237061 - DNA, 707 bp, Homo sapiens
  chr13:72438285-72438992
  hyper
catacttttgagcgcgcgcgcgcacatacacacacacacacacacacacacacacacacacaacatttaccccaaaatagtcgaaggttcaaagcccaaacacacccaagtcccatggaaggaagaatacctaaacacggaaaagaatttctggctaggtcaggataggacatttgctggactggaattcgaatctttttcgtttcacagccttcccgggcactaacagagaagaagtctttctccatggaaaaaagagctagcgctttttcaacccaatgtccttctggtctccttgctacacttcctttccacctaagtttccctatctctgcgggagcacacactaactccgctccttctctcaatcttcaaacttatttggagggtaccgaagtttctgcgcaaattttgcgcgcagttcccacgtgcccgcttcaggtcttcaactttccctattttctttctcccggaatctcactctgaacttttgcctctgcgcttccttgcagagaaccgtggggacaaagcggcgctgtgaaagggggtggaatgatcatctctaccccgaaactgacaagttgccccactcccgccccctcttggtagatcctcccccactgagcgttcattagcataaaactggtctggctggggaccggtcccgccgcctcctccgtgcgcgcgctttgctgggctggggaagc

SEQ ID NO: 237062 - DNA, 1235 bp, Homo sapiens
  chr13:72439196-72440431
  hyper
cttccattgagtctcgggcaatcggtcacctccccctaccgaagaaaacctgctggttgccctcgcatctgccccggggccaccgtacccctttatttcctttgcacacgcactcgctcacacgcggacacacgcacacatgcgcgaacacacagacccctcccctcggctggcttcccctccgggcttcggagctcaagtccccggagcccatcccccgggatggacccggtctctcagcttcgcgggtcatttccctcccgacctcaaagtgccctcctcgggtgctggtccgctccctcgcctttcccagcggggccctcacccggagcgcgtctccccgctccccgagccctgcggagcaggtcacgacctccccccgcccccgggacaccgctcggcgccacagatcagccctgtcggtgccgggaggctggccgtggaacccaggtcctggggagcgcacgaacgcggacagcagcgctgagaggggtctccaggcgcccgcgcgcccggggcagggggctgtggctccagcaaaggcgccgtcctcctccctctcgtcccctccgccccgaggctcggctttcccacatcccacagcagcccatccccgggacccagagggcaaggggaggaccgggccgaagagcgaggtctgggcagggtgaggtgccaacttctcagggggtcgggcgcggctggcgagccccgagcagggagaggagagggccgcgctcgccggggcgcgcggctcgcgggcgcgcagagcgagcggcgccgggaaaggagcgagggcaggcgagcaggctggtgggaaggggcgcgggcggcgggggctatcccccccgactcaccttgcgttggtgcagtcattgtagagggtctcgaagtccttcctggagatgagtttgcagcggttcactcctggctggatggcgcccagtcccctcaggatgcgaacttgttccacattgcacaccaccggcgtgatctccagccgcttcagcttggtgtagaccgtatgcaagccccccaccaagtgcttcaggaacaggtcgaaagcctggggcaggcagatcagctcgcagccctccaccgtgaaggaagccactttggcccccctcagatccaccattttgcactcattattctgaggggtgttttccactggggacggggttgagtacacgggtttcccggggagggggccgcagctgctgctgctactgctg

SEQ ID NO: 237063 - DNA, 695 bp, Homo sapiens
  chr13:72440491-72441186
  hyper
ctggcgttgatgggggtgctggaagcgacgccgccgccagcgctgatgccgccgccgccgccgccgctgccgttgctcgcggccgccaggttggggttgcagttgctgccaccgccgccgccgccaccgccgcctccgttgccgctgctgccgccgccgcctccgctgccgccgccgccgccgccgccgccgccgccggtagaggtgactgtggccgccgccgccgccgccgaagcgatgggctccgggcggaacagagttggcccagaggacgccgggggtccgatggaaggagccggagacgaagtcgccgaagaggtggaggtggtggtgccagaggaggaagcagacgtggagattgggggttgaggggggaccagctgggtcggagggatcaaagccgccggcactgccatggtcacatataaggggaaacagacggaggagaagcgagaggaaaagttgccacacacccccgggaggggaaggggaaaaaaggggggagaaggagcgaggggggcaacaacaactccgggagagaacgagaaggagaaagggagagaagggggagaaaaggaggtgaaggtaataaagagcgagcgcaagaggggcgagcacgagaggcgctctggagaggaacgcacaaaagtgtcccgcaagtcgaaatgcgagtcctctccgggggctgggatcga

SEQ ID NO: 237064 - DNA, 356 bp, Homo sapiens
  chr13:72441410-72441766
  hyper
gaggggaggagctccggaaacttgaaataccctttgaagccgcaaaaacctcactcactagtattaacccaaattatccaaccaggaactcggagcagagactccgagagcgcgagacactggagagggagcgtgcgaggaaaggaggaggggagggggaggatacggaaagaaactgtgggagggacggagaggaaaagccggggacacagaagtggcgatcggaaaaggagagggagatcatctacttctcttctactactaccgttagattgcatgtctcacattccatttcgtccgcggggactggtaattttttccaaagcttctaaacaatcgcccgccaacttaaagag

SEQ ID NO: 237065 - DNA, 211 bp, Homo sapiens
  chr13:73632748-73632959
  hyper
acaacacctaagacgtgcaatactctttttcttcctaatcctggcagagaacagtgcgaagagatctccctccgcgtctccaccctaattccccctcttcccagattccacccgctccgctacttccctccgcccccggctccgccagcccaatctgtcagagaagttgtgtacaaactgcgcggccgccctgcgcgcgaagctcgtggcc

SEQ ID NO: 237066 - DNA, 1166 bp, Homo sapiens
  chr13:74707109-74708275
  hyper
agtggctcccaggccggctctgcgggttcccggcccgggtggacgtacaaagttgccccttgtcaactccggccaggtcccccgtaattgaaaataacagccaccggccagcccctggctacttgcatggaccaggcactgtagcaagtgacagttacacatcattacgaccagagacaataatgaatgtagcaccaggagcactattcatgccagcagtgtcatctccgccttaaccccttcccctccactctctccagcgcgcacacacagcccacacggtcccggtgcggagctattcatccaccccgctcgaggccggggggccaactacttccacgagccccccctcccccccaagttcagccctggggttttatttcacatccttggcaactgtcaggcaaacactgcaaccaacaattccactaggggtagaaaaacacttgcttaattcacgttacttgataacttcttctggaaaaaaaaaattaggggaggtggggaagaaacctccttctttcttctccacgaatccgaccgacgctacttgctttgcaacagcatcgcccttccccggccccctcccgcttcccagcactttccccctttaagaacacagaccaaccaaaatgatttaacttgagcagatgacagaaggaaaataaaacacgttaagagaatacggtctgatttgggatggcaaaaaaaaaaaaaaaagaggagggggttgtttattttgataagaaacggaatcggcacagacctgaacagaagctgcagagcaggagaaattgttttctttccctcacacagagtccccctctctctctccctttctctctctcacacgcgcgcgcgcacacacacacacacactcgcacacacacggcgtcacccgcgcacacgcacacgcagagcctctcagcggctctctgcagttctcaggaaatgaatggggggcaacccggggaactgttgtacttgcaaatgacttacccggatcacatgatgcgctaaatgtagggtgggccggtgggtggaggctgccgagttgcgagccccggtctagtgtggggagcctcgccaggcccgcatcgaattaccccggggcccagccgagggggttgcaggacgccgcttctcctccctcgcagcccgcagct

SEQ ID NO: 237067 - DNA, 139 bp, Homo sapiens
  chr13:74708455-74708594
  hyper
ctcagcaggcgctaagtcgctttattgccataaaatggggcccccgagccgctccgcccgaggattaggaggcgggctctgagtgtgatggttgaaatcccctgtgggaaactaacccctccccgctcgcagaggtaga

SEQ ID NO: 237068 - DNA, 371 bp, Homo sapiens
  chr13:75149819-75150190
  hyper
gcaaatgttcaggcgtgcagcatttcaattgatgaaatttctttgtggaaccctgttcccaagggcagggaaaattggagagtgaacaattagatgctggcgcggcccggagaggctcgcggatgcctggccgcgcgcctccgcgggacgtcagcgcccgcggcacgatctgctgctgtcactatcagtatccggcaggagcccgcccgccccggcccggccccaggccgtggaggaggggggagggtgcggcgcaggaagctgaagataagtctccaaatcgggctaagctgggagtggggacagcgagggggagggccgggaagcaatgaagtcagaggcacagcagcgactgcagctgaatcaatttg

SEQ ID NO: 237069 - DNA, 105 bp, Homo sapiens
  chr13:76054892-76054997
  hyper
tgctgcgaagatgacgcgaccagccaaaccggttaaggatttgactgcgattgagaactagtgaggacctctaggaacccaaccttctgcgttcatacacgcgct

SEQ ID NO: 237070 - DNA, 83 bp, Homo sapiens
  chr13:76056038-76056121
  hyper
gaactccgcgcttcagcagccctgccccatgcagcacttccacgggcgcggctcggaggctccggcggcgggcaccgaggcaa

SEQ ID NO: 237071 - DNA, 31 bp, Homo sapiens
  chr13:76056405-76056436
  hyper
tgcagggctgcggcgcggtcagtcctcagga

SEQ ID NO: 237072 - DNA, 101 bp, Homo sapiens
  chr13:76123767-76123868
  hyper
gacacttgacctacggccctgcacggagcggttaagagggtgagaggcccgtcaaactctttttggtgtttaggcgctcctcctccgggcggtgtgttggg

SEQ ID NO: 237073 - DNA, 134 bp, Homo sapiens; identical to SEQ ID NO: 203392
  chr13:76450655-76450789
  hyper

SEQ ID NO: 237074 - DNA, 130 bp, Homo sapiens
  chr13:77460215-77460345
  hyper
gaggagccactgccgcccccgccgccgcccccgttgggtaatccacgtgtgctgtccgccagagccatgacagagaggtggccgggccgggacagtggcaggaagccgcgctgcactcaggagctgcaac

SEQ ID NO: 237075 - DNA, 178 bp, Homo sapiens
  chr13:77601288-77601466
  hyper
gagtctaaaatggcgcccagggctcgcggccgcgcgcttccctggcgcgtccccgcccaagggggcgggaagggggcggggggggggcggagcccggcgggagtagggccgcgcccaagcgggagcgcgcgctgcggccgccccagtctccttgctgtgggacgagcctctgccttcc

SEQ ID NO: 237076 - DNA, 171 bp, Homo sapiens; identical to SEQ ID NO: 203393
  chr13:77901202-77901373
  hyper

SEQ ID NO: 237077 - DNA, 133 bp, Homo sapiens
  chr13:78271862-78271995
  hyper
gtggtggctgccgcggccggaggcgagggcccggtgctgatgcgaaccgccggctcggcctcagcccgcgcgtggtcggccccccaggccggggcgacagggaaggagccgtagcctccccgtggcccgagga

SEQ ID NO: 237078 - DNA, 1173 bp, Homo sapiens
  chr13:78492726-78493899
  hyper
aggcgtccggtggccgctccgcagtttcagagcctagagacaagcagaggaaggaagacaggacacttgggtcagctgcccgagccaagtcgctgcaaacgctaataccgcccgcagcctcttcgccagtatccacgctcaaaagtaactcaagtttgcgcgccagtgggaaacttggcgctcatgactcgccagcgcgggtcgaaactccttcctgatgccctctcagctgtttttcttcccccgcgtggccaggaggggtaaataatatgcagtggggcggggcgttctggaaggggtgtgccagggagggaatgatgggggtcccaggcaaagctccgaactctttcacgtaacgggaggaatacagacacgtcttagttaagcgtgcgtgggaaccgcggaattaaggcacctagaggccaagggcttgtgtcaagctctgcattttgccccgcaggggaacctctataccccgcgattgaactcgaaagactcctcccggcggatgaaagccgctactccctggctggctgagctacagctcccgcagcgcgcccaggagtgcgccggagattcggaaacccgcagagacttctcaagtcagcaggaacttggaaaccgctgttccctccaaacggcttcaaacactcgcgctccttcctttacccaacctaattttaatttgccctctctataggcttaatttttatttttttaaaatcccaaactagtaagccaaaccgaagccccagaataaggttcaatcaatgattttaattcaacaccaagcccgaatgtttacctctcggatctgacaaaccagatgcagagcgacgaatggagaccaccttcccgggaggcggaacccagctgggttccagcctgctctgggagaggagcacgcctcccttgagctgcaggcgggtccggctctgacgaaacgctgcgagaatgccagacagtgtagcctccaccgtttgctcggggtctctgctgccatcagacaagtacttttattcattcatcccttcccatcaatcaccgccagactcctcccgcgccttccgaccccgctgcaacctttccccttgggcgatgcctggacagcatcagtagtagttgcccgagggaggggggcagtcctcgtccggggacaggtcccaaaaggct

SEQ ID NO: 237079 - DNA, 259 bp, Homo sapiens
  chr13:79160900-79161159
  hyper
aggcaggaagtctgcgaaaagccccagacagccactgcagtgccaagtgtgctgctcactagcgacccctctaggtcttagagagaagagagctcatgcagaagagtactcgggaccattgccgggacgagaagcccatcaggctgactgctccattagggagcatcgcaagctcggggtgcgaaagcttccccgccgccaaccagccagccctgccctgtgtagacgggtcgccagagcgcggcgcagggatcgagct

SEQ ID NO: 237080 - DNA, 173 bp, Homo sapiens
  chr13:79161684-79161857
  hyper
agcacacacacacacgcacacacacacacacaaacgcgcatccctgagcaagaaggcaaaaaagaatccaaaacttgagcaggtcgccaggcccttttcctctctcagccaaagtatgcccagtctacatccccgccccaccaccccagccacgcgggcgggactgcgtccat

SEQ ID NO: 237081 - DNA, 380 bp, Homo sapiens
  chr13:79169699-79170079
  hyper
tccagcccttggttcgccggagcaggatgctggtctcaacactagggctatgtcggcttctcaccgaaccgagattttcaatttcagctttgcgattcaggattccacttgaattccccaggacgaaagcctagcggccaggctgcatttcgccccgggtataaatccctgccggataaattcaaatctgtagcagggttttggtaatatgcatcttagcaacaaaacaaaaaccaacctcgtatgccttccagttctttttaaaacgtgtacggcagttgtgaaagttttgtggtgcttgagactgttgacttatgcaactggggagagggtttttttaaccgctttgagatattggtccatcccttttctctcagaac

SEQ ID NO: 237082 - DNA, 890 bp, Homo sapiens
  chr13:79170739-79171629
  hyper
gtcggaacagcgctgggctgctgaagtttgcagcctccggatccgcgccccgccctgcagatccaccggatttcggggagggaatcggggggctgcccgtcctcccgtaaagctgacttgacaacaattacgaaagtttttaattagctccttgttataattcattttatttccagaactctccgaccataaattattcaaagagtaagccaacccgagcggggcggccgcgcgccttccccacgcgcgccgggctggctctggccgctcagctcacccgatgccccgtgagccagccccgcgccagaagccgcggtggcaggaaggtttgatcaaacattaaataacgtaatgtttgcgacaaggcttatctcacaagtggaaaagaggacctcgcgagaattagaattcggctgctattttaaaaaatcaattaagcttgcggtcttttttgaaacagctcgaaaggactgcgtggctatcatcgtggcgctaagactgagatggcaataacaccgatggcagaactgtaccagtattaattgtcatcacctttatcatcccgctggccaccaaggccgttcgaatggggtgggaaaggctagttttagccaggatcagaagccccagttccaacttcacggacgaaaaactgcgaaagcctatcaacttgaaagatgagtagggatacttcacgcaggtgccaggtgctatcaggagaggccggggcggcggggcagaggcagagggcagggatcgctgagtgagtcctgcgggcttggggcgccctgttctctcacgtgcgctgccacgtgtaggaggaactggaccgaagtagtctcagtatcacaagaaaacaaaaatcgatacaatcacggcagtgggtgcct

SEQ ID NO: 237083 - DNA, 166 bp, Homo sapiens
  chr13:79175603-79175769
  hyper
ccacacccgcaccacgttctttttgaggtccagtttctcggcgatggcggcgatcttctcggacgagggccggggctgcacggcgaagtaggcctcgagggagcgcttctcgggcgcggcgatggaagtccgcttgcgcttcttctcgccgccgttgaagagctca

SEQ ID NO: 237084 - DNA, 182 bp, Homo sapiens
  chr13:79176669-79176851
  hyper
aagaggttgctctgcagctgcaggcgacacaaaccaaaccaaaaaaaccacaaaaccaaaagagcaaaacaaaacaacagaagaaacacacacacaggccggaaagcacagcatgcgaagggcaaacacaaagcaaccaaaataacaacgggtttgggggcagtggagagcgggaaagacgg

SEQ ID NO: 237085 - DNA, 294 bp, Homo sapiens
  chr13:79181160-79181454
  hyper
ccttcgttggttggcgtgaggactggcgggagaggttttgtgccaggatccgcactgtctggggtgaacgctcctcacctttgacctgaaccgccaacttcccatcctccacttttggagagcgcgcctgatagctgctgcccacctgggcactgacatcctccttccgaccgggtgcggagaaagttagtatttgactccgcagccactactcgccccaccttctcacctccgaggggttgaacccgagttgtctgttggggtttagggactcaggatcgggtctgagggact

SEQ ID NO: 237086 - DNA, 444 bp, Homo sapiens
  chr13:79183407-79183851
  hyper
ctctttgttggtttcgcgtcttaatcgccaggtttcacgagtaataataaaatgaaaggaaaccgcagggcgggccgttcgggtggagcttgggcgggaccagcccggagcgcccccgagaaagtgggaaaatcgggctggaagggctagggcgcgtctgtcttcccgagactggggagtgggggtccggtgggggctagaggggaagggaagagcgggcaccggcggcgggaatccgagaaggccgagttcgctgtaatcccagggacagaagagggctcagagccgaggctggcgggccggaccccatctccccaacccgaacacaaagatgacccggtgggttaggcgaggtcgccccttcctgccctcaaaaggtcaagtctcgtcttaatggacagatgatgggccagctcgccaccgcctaaacgttccagcgcccag

SEQ ID NO: 237087 - DNA, 44 bp, Homo sapiens; identical to SEQ ID NO: 203396
  chr13:79980677-79980721
  hyper

SEQ ID NO: 237088 - DNA, 42 bp, Homo sapiens
  chr13:80055214-80055256
  hyper
cccgccccccgcgcgccttttgcgaccgcccactcgacaggt

SEQ ID NO: 237089 - DNA, 50 bp, Homo sapiens
  chr13:80055634-80055684
  hyper
gccggggactgggcgctaccaggtggtgagttcccggcctcctgtgcctc

SEQ ID NO: 237090 - DNA, 724 bp, Homo sapiens
  chr13:80913011-80913735
  hyper
ttcacttagtttatcgcctctctgtgccccaacaccgtccccagcaggtgggacacagccgatccccaggggagtttctccaggcggactgacgctgtccatgggccaggctgcccccctgcttacgatccccagactcagacaggcgggggccgcgggcgcctccgaagggtacgtgtcacgaaatgcaggagcacacttcccccgcctccctctccccagctaagatctcccccaactcaagagaactgccttccagccccaaggagccactccgcccccaggcagaggtcacgccgcccactgccaggctttctgcaaagcccctcggacatccggcacaggtttcccaccccgacactgcgagcacgaaagccctgcctgagacacgcagccaggacgcacaagtccaacccacgcacacacggcgactccacgctgcactgaccgaagggggcattgcctgtaatctgcacacgcctatctccttttgggtcgagagaaaaaaaaaagatatcatatttcttaaagtgaaagaaaaatggctttttaaaaaaagggcattttccagggtcccactgctcactccgggcgcgcaggacccagctcccggagctgtaaactttcggtgcagatttgcttgcagtcaaagtagcatctttgaaataaaagggggcttttttgtttttattttttaagtgatttctgccgatccgatccctgg

SEQ ID NO: 237091 - DNA, 1675 bp, Homo sapiens
  chr13:80914000-80915675
  hyper
aatggaaaatgatcgcgaccgcttgatgactttcttcctgcgctgggtcagcccgagcttccaaaaataaaataagtgtgacccaggctgaccacgaagaacggaagagagagagctgcacttccgaaccgcagagacccggcgccaggcagggcgacgctcccacccgctccgggctagactgtccacacggagcagaggcgggcactccctccacccggcaccctgcctttttctcaccctggaagtctcctgcccccgaggcgggcaacctgtgtcccccagccccaccagcgccccgcctagggacagcctctccctggactttgccttccaccaagaggaagaacaggttagaaatgcgggcgcctgcaaaggcaacctggaaaatacaaagtgtttttctctccctctcccgctctcagcgccgaattcgcggccagtgcacggctgggagcagacttcaggctagctgtcctccgtcccaaccccctagagcgcgggcgcgcggggtcgcctgtcggggacactgcacggggtgcatacagaagtccccgcagaggcaggccgagcccaagccccgggcgaggcaggtccgcggggagcgccccggatcctcgcgaagaccctgcgggatttgagaaagggaggctcggggagagacggacccaactcctggtccggctgcacctactccatgttgcccacaacgcgccggccgcggcgccaggaggggaagagccaaacgtgcctcaccgtgatcgcggctttgcaccaacccctctcccttggattctcttctttctgcgatgtgcaaataaatccagtctcgatgcaaacttttttcctttctttccaacctctgctttagaccaacttccgagcaatcggcgggagaaaaaaagagaattcggagccagattccccgctgatgaacactccggggttcggagctggagacgactccccttctacaagcgcacgcggagtatttcctcttttttctcaatgaacaagaggccgaagcgccaacggcaagtcccttttcctggcagatgagcgaatgggaaaagaaaacggccttacggagaacctaaagccagatcgccaagtggtgcggccggggccgcgtcgtagcggaggcggcgcgggggcgcgggccgggccgggccgggcgggcgcgggggcctgggcgctgcgcgctccgccggcccctctcctccgctagcgctgcggcgcgcagctctcggcggtgcagactgggcgttgtggaggcgaggcagcgaggccgaggcgggggcggtgggtgcggaggaggaggaagaggaggaggaggaggaggaggagggtctggggcccgcccggggggggctcgccgttggcctgcgccctcgcctttccggaggaggcagggagctctgcggcggccgcggcagcagtaaatggcgtcatgtggatccgaggcggaacagagcagttgttgtcccagaggatatatcgcatccggtcccagctcattggctccgcggggctacattcactcacactccagcgcccgccagcgctccgagccgcaggaggcattcaaaagggcaaccgcgccgccccgcgcgtccccaggccggtcctgccgcccgagcgccgtcacgcggggcgcccgcggggccgggctggg

SEQ ID NO: 237092 - DNA, 201 bp, Homo sapiens
  chr13:80915906-80916107
  hyper
tctgttcccctttgcggagcgggtgacgggggctggggcggggggagaagaagggggaggggaaggggagcgggaagtgaggtgggagggctattggtttattctttgtctactggattaacccgattatacaccaggcaccagcacaaaccgcctcccccacctccgagccttgtacgggaggaacggaatgcagattcg

SEQ ID NO: 237093 - DNA, 186 bp, Homo sapiens
  chr13:80917260-80917446
  hyper
ccggctggtttaaaatgaatacaaagatattaatataaacgacacagaagatagcttgccctcctgtctgcttgggagggtcaaagcctgggtgtgcaaggctaggcaggaacgtgctgccggtgtgcggccagcaagtctctcgagcagagcaggtgaaagcaacgccgtcgcttcgcctcttca

SEQ ID NO: 237094 - DNA, 246 bp, Homo sapiens
  chr13:84455511-84455757
  hyper
ttttcacagtctacgtgtaggtccccttctatctcattgcaggaacagatcttctctttgcaaacgtcccctgtaacgtttccagcggcaaaacaaagagacgtctccagcaacagaatccaaagcagcatttttaaagcgagcaattcatccccgatctcatcacaaagtaacagcgaccatcctgctcgccacagacacaattcaagttcatttagtgctccaatgtccgaagccaggaaagga

SEQ ID NO: 237095 - DNA, 630 bp, Homo sapiens
  chr13:84456113-84456743
  hyper
gtgcatggctgtgcgtcggactgaccttgcctctctgatacaaagcagggttttccgcggcttctgttgttgaggctgctggtggagttcttgctgtggttgcgggttgcccagaagtccccccgaggtgctgtccagttcccccggtgctgaaatcacgcccgaccgaaggactcacgctgcccagccaatggcgctggaaaatttccgcaatcgctgcgttttgtggttgtccatccttttcctttcctccccttcggtcctcttaaggcttttttttttcttttctgtgctctcgctctcgcttactagctcttcttttcctgttctccttctctttcttctgctctttcggaattacgtggaggggggcggagggcggggggcgagttgtctgagggaggaagagagcgcgagaatgaggggaggggggcggagaagagagttgctaagaagctctgctcgttccagcctggtgcactctgaaagatctgacaccctctgctgatctgcagtagcaaaaatccatctggctagggaatgctgaaagaaaaaaaaatcaatccacgtacagggcaagcgttaaaaatgtgggcataaaaggctgacgatctacatagatgcttattt

SEQ ID NO: 237096 - DNA, 160 bp, Homo sapiens
  chr13:88323381-88323541
  hyper
aggaggaaggcaggcgatcagcacagggctggaatcatctgttcctgaccaccagcaagcctggcactgccggggttatttccactcctccctttcccaatccgagaattgcacagtcccacgctcgaattacacacatggtccaagacttctctctctt

SEQ ID NO: 237097 - DNA, 70 bp, Homo sapiens
  chr13:88323901-88323971
  hyper
cccaaaggatgtcggtgatagagagttccaactaatgacgattgtgcgccgcatctggggaagggataca

SEQ ID NO: 237098 - DNA, 110 bp, Homo sapiens
  chr13:88324691-88324801
  hyper
cccgcccggctccggctcccggcccctaccgcgaggcgcctctccagccggacctccgccgccccctcccgccgcctccctatcccgccgctgcagaacgccccccgctc

SEQ ID NO: 237099 - DNA, 1828 bp, Homo sapiens
  chr13:88325193-88327021
  hyper
cctccctccccttcttcctccgttttcccttccttctctttggggcggggtgggggagggggagcctcgcgtcctggaactccgggtgcttctgcctgggctgctgcttgagcagctgtgcccggagcctccggtgcggcctgggtgctgggctccagtccgagaggctccatgctgcttactgcagggacgtacagggcggtgatccagtatctaaattctttgggagaaaatgaatagttcccccgcccccgccctccaggaaaaaaaaaaatctgagaatctgagaatgttcagcgcacccgcgaatttgcatcggaggtgcgtttccccgtcagaatgtcagcctccccaggctcattcaactttattttctcaaatttttggtctcctttgctagcaaggaggagggggaagggagtgggttgagaggaagctcttcgacccttgctaactagaactgaattaaagttgtaaacgctggagtttaatactggctggactgaatttgcaatgggctttcagatggggtgggaggtgaatgggggcggggaagcacagggagggagggggaggggacccaacctcgctgaatggatgtgcggatttgatccagcggagaactgaaatttcaaggtaaacgttttgctttcactggggtggggatgtttttgccgcttttaagccgggagacgtttaccgttgcgttgggaggtcggggatacttgcgaggtttatgcactgtggttccaattcatctcgacacgtctgggtggccacacgtgaatgattcgcaggcacactgatacatgtgcgtttgaatgcaggggcgtttaataacgcgggctggagtcgacttggggatcaggagcaaggtctccaggcttgaacccgctgtctcggaaacatcttggctttagtttggagttgcaattcgatattagacttcggtagtgaggcaaaggcaaggttgaccagagaaaaggcataggttcctagagtccagcatttctatcaaatgtcctccaccccattaaccaacgcagcatgcgcgcgcgcgcacacacaaacacacacacacacacacacacacacacacacacgctcattccatttatgtccttcctttaagagtgctgctgttgatcagaagtaggaagtggaaggaagccttcaaggggacaaaaagagagcaagaaaaaaaagggggagggggtcatattgattcctgtgggagatgaaattcggatattaaacaactgacctaagtcgcttacagttcttcctcccacctttctattttgcctcttaatcagcccaggcgtcctttccctgagattaaaaaaaagagagaggggagcgttaacaattaaatgtaataagcaactccaaagatggggatgctgtcgaggtggtagttccgtgcaaaccttgctattaccgttgcaaatagacgcggagcccaaggtaagggaggctttcgtgctgatccttggtgtactgattcccggtaagcggtaggaacgtcctttttaaactctaggcatcgggaggtattcggagattgcggataccttcgctgagttctttgtaatccatcgtgcagaactatttcagtggcttaaagatgcggtttggtagcgtcgctgacatgatcaatgagaagtggtcgcagggcgctctccgggaagcgctgctaagtggtaccgtgcatgcaattaggacgctgatgtgctttaatagcgtggtagtgaagtccaccatcaaagcaaatgcgctctccttttttctccttactcaaagctccgggagacaattggtgatttaa

SEQ ID NO: 237100 - DNA, 353 bp, Homo sapiens
  chr13:92001426-92001779
  hyper
gggtgttcctgcccggtcttctgttcctaaactgcagcaaagggaaaaggaactgaaaaaggcaggctcgtcgttgcaatatcaccaaaagagaaaattaacggcatgccatcaggaccacagcagttggagaaacaactctttatcccggcttgcagccacgaggtcttgattgggggaggggtggtgaagaatagtctgtgggctgctttttttttttccttttactggagctgtacagtggagtcggtgattgctgctgatcataatcaagtattttaggagcttatttagacatgtatctgatagctaaggatttttcaactttattctcttacgtatttttcaactgt

SEQ ID NO: 237101 - DNA, 943 bp, Homo sapiens
  chr13:92050661-92051604
  hyper
ttcttccccagaacggactgggagagcgaggtccgggtttccttctatttatttgcatcgatgtcgctccgagtcttcagcactgggccgcgtatgacagcatcttagtgggtgcggagcgggacagcgcgccgggggcgtggcaggggcgtggcctgtccgcggggcggggagtgcggggcggggcttccgcggagcgcagcgagcgggcacatcccaggttagctgctgcgagccgagccgggcggcggaggcggcggcggcggcggcagtggcggcagtggcggcagtggcggcagcggcagcagttgcagcagtggtggccagagcggatgcttgcgggctccctgcggctccactagttttcttcgccccgcccagccgcccactcttctcggctagggaagaagaccagagggtgctcagctggaaaactctggtgtctcagcttagggcctcctccgggaagagctaactgctcccaggtgaagccggtgcccgcgggcggtccgtacaccccgcagccggctcgcaccgctcgagagcctcggccgctgtgtcttccacgtctgcagctcagccagggcgcgcagggcgagtggggtccactggcgggtaaaggggaccaggacggcgaggatggacgcacagacctggcccgtgggctttcgctgcctcctccttctggccctggttgggtccgcccgcagcgagggcgtgcagacctgcgaagaagttcggaaacttttccagtggcggctgctgggagctgtcagggggctgccggattcgccgcgggcaggtaaggggcaatgagggggtctctggactggcggcgtccgagcccggccttcgctcccccaggctcccttggtggcactcgtgggaagatgacctttcgggccctgcagccgcgcagggtgaatcccggggaggcttccgg

SEQ ID NO: 237102 - DNA, 439 bp, Homo sapiens
  chr13:93878955-93879394
  hyper
ttcccctttctaccgactaggaagagatccagtccaggttttgcctttgactcggcctgtgaatttcggctgtgcaatgtgtagcacgtttctttctcccccctcctttctccttccctcttgcctccagtgactgtctccaggatttctctcttcctatttcaggaggactctcacaggctcccacagcctgtgttaagctgaggtttcccctagatctcgtatatccccaacacatacctccacgcacacacatccccaagaacctcgagctcacaccaacagacacacgcgcgcatacacactcgctctcgcttgtccatctccctcccgggggagccggcgcgcgctcccacctttgccgcacactccggcgagccgagcccgcagcgctccaggattctgcggctcggaactcggattgcagctctgaaccccc

SEQ ID NO: 237103 - DNA, 1522 bp, Homo sapiens
  chr13:93879603-93881125
  hyper
agcggcgaggagcgcgccgctgcctctggcgggctttcggcttgaggggcaaggtgaagagcgcaccggccgtggggtttaccgagctggatttgtatgttgcaccatgccttcttggatcggggctgtgattcttcccctcttggggctgctgctctccctccccgccggggcggatgtgaaggctcggagctgcggagaggtccgccaggcgtacggtgccaagggattcagcctggcggacatcccctaccaggagatcgcaggtaagcgcgggcgcgctgcaggggcaggctgcagccctcggctgccgcacgtcccactggccgcccggcgtccccttccttccccctgttgctgagttggtgctcactttctgccaccgctatgggactccgcgtctccgtgttgggcggcggatgctcctgcggcttcttcggcgggggaaggtgtgcgtctccgccgcctcattgtgtgcacacgcgggagcaccctggctcccgcctcccgctgctctcgcgcccttctaccccttagttgatggctcaggcccggctggccagggagcccgggtcactccggggcggctgcaaggcgcagacggagagccgagccgggcgctcactccgcgttctggttcgggcaaacttggaagaactgcgaccgcagtttgcccagcgccacagtctgagtggcgccttctccactcccgcccttgcgccggcaggggcggtggagagacgcggagggctcccccagcccctctctcccctatccgtccttcgggcgacagagcgcccggcgctcgggccgggggcgggcaaggctgggagggaccctcgccggggacctggcctctggacgccggcgtttcaaggctggtttggggacttcacgggctgcctgtttcagatgtggggcgggctttcccgttagggttcctcagtgcttccccagttgctgttggccactcagggcccggggacaccctgccacccggtctggagccggcctcgtctgccagcgaacagccaactttagcgggtggctcagctggggattcgggtccgggttcgggggccccgtgtcccccgcatgcccggccactggcattgctccaccaagagcttgagagcgcccaccctttctctcggcgccagtgtgtgtagcacttggtctccgacaacttgcgcggcagtctgggtgcttgttttccggctcttagctccaaccgaatccgagcttctctggggctctgtgaatgaaacgtgtcggggagagataatcctttggctgctaaagaacagaactgagagaggccgagggaggccaggagatgctgcgagggcgcgggctgctcaaaccgggcagctgaagtccttagtgacctcagatcgtcaagtcaaaacgctgaatttccaccagcctctgtctgctttttgccaaataactggtggatggatgaaaagcattttgcagatatcttagaacatcacagtttcgatacgttgaggaattacta

SEQ ID NO: 237104 - DNA, 400 bp, Homo sapiens
  chr13:95201109-95201509
  hyper
ggaacgtctagacccgtggcttgtttaaacacccgctgctaggccccactgccagagctgcctatccagggccgagaatgtgcatttctaagtagttctcaggcggtgctgatgctgcggatctggggactgtactttgagaaccaccggtgcagaccctggccaacgttctttagtctgatgcgtcggggagctgtaaagctgccatccttcaccggtgggcaagtaacctggtggcgccaccccagggccagacccagggccggcctcggtgcgcctctagccagaaataaccagcactgggttccgctcaccggcaacgccaggtgggggccatctgaccactcaacagttttgctttttcttcaaattcggatacttagaaggaatgcgatgaaat

SEQ ID NO: 237105 - DNA, 178 bp, Homo sapiens
  chr13:95201749-95201927
  hyper
cctcgctcctgggggtggttaggaacgactgtttcatttcctccttcacccttcaaatctcagtttttgcttgggcttgaaggaatgggccagggtatcgtggacggagagtcttacaaaatttgagtttttgaggtcagaatttaaaagtagctgccgaaacccgggatcgaaccag

SEQ ID NO: 237106 - DNA, 638 bp, Homo sapiens
  chr13:95201987-95202625
  hyper
tgtctcctgagtaaactatcactgagcgctttgcgtccaactggcttgcttgtcttttcctggtgatcatgtacagcatttcttccttgtcctgttaaacggtgtcgtcggaattcttccacctccctccttctacgctgccactgggcgctgcacacgcgccttactttcttagattgctctcggcgcgcgcagcccgcacggtccaggagctgggtccaggcccccgatggcggctcctcgggatgctggttccgtcctcccagggccggtccccgcgagatccgaagcagcggggtcgcctcggggagctcctgcccaggcctggtagccccttcccttcgatctgcccctgcctgtgactatccacattcgtcaccttgctccccgaaaagttccaggccccaggtgaggagccgtgtaggcccaatacgattggatgaaggagtgtacggggcaggaatcgtcagactggcctctggagaggagtttgcagcctctccgtgctccgggcccgggaaatgtccaccttaatcatcacctctttgcatggagcctgactggcaaataaatgctgggtgagctcactaacgatgattattcagtcaatgctatttcccacacgagtcaacaaatgt

SEQ ID NO: 237107 - DNA, 166 bp, Homo sapiens
  chr13:95354380-95354546
  hyper
gctttgacacttctcgtaggttccaaagacgaagacacggtggcttcagggagacaagtcgcaagggcgacttttccaagcgggagatggtgaagtctttggacgtgtagtgggtaggtgatgatccccgcagccgcctgtaggcccgcagacttcagaaaacaag

SEQ ID NO: 237108 - DNA, 76 bp, Homo sapiens
  chr13:95354726-95354802
  hyper
cacccgcaacctcccgcaccccaggttcccaaaatctgaatctgtatcctagagtggaggcagcgtctagaaagca

SEQ ID NO: 237109 - DNA, 796 bp, Homo sapiens
  chr13:95355494-95356290
  hyper
ggggttaaattagcggggggagaggccgcacctaatttcagacacttttctttctaatgtggctccagccccagagggaggggtcaccgggactggaggctggggtgtcctctaagaccctctctcccttccagatctctctgttccgtgcggatcctgccagagcccgcgtgatcatcgcctcccacacccctccctccctgacctggccagtctcttctcccagggaggaactttgcggaggggtcagtgttgggaaccctggggtcctccgccgcctcctgatcttccgccagtcccgccactcctccgccctgggcgtgccttccgcaggtgaacctgaaggtgcgtctgcaatgctgctgttgcattctcgttcttgtagattcttcttctattctctctctttgccttccgtttcacccagcacccacttttcctacgctgctctgaagaagttctctatcttctgtctcaggctctccgtgcgtcctttcactcgtcttcacccggccagtctatgcaggcagagtaaggccatatgggcgaccattcggataatccaatttaaaagaaacccccttacaaaaatccagctaagcgagagggggcgagggagagcgctcgcgcaaatgtttgttgtgcagaattcccctgtgtttgtgcgcagtcccaaccccacacagtctcccctggatcctgatgcgcgcccgcatagtgatgacttccaaatctggggtttaccacgtggtgacaaataaacaggggtacactccaaacccgctggatgtctatg

SEQ ID NO: 237110 - DNA, 902 bp, Homo sapiens
  chr13:95357001-95357903
  hyper
aattaaaaagccaacgccaattttatttcctccagtcaagcgtgagtgatggggcggccgcgcaagggcaacggagtccagcggacaaagcttgcagagaggggcagtggcccggaggcaagggtggcggtggggggggtggggggatgggtcacaaaagtagagcaactgagcttgctgcctagcggtgccacttccctgctctgcgctaaggctatcgtcgaaggcccagagacaccttgaccctggaaacccaatccagcacgtcctgcctccccacaaatatccctcaccccaaatcgctgtgcgttttgtctcctcaaagcgactcccaatggatttggatttattcagatagaactcttcggaagtttttcagatttttcaatttcaagaatttgcatgttttaagtgaagctgaaaccgcgaaggctcaggttacactttaaaatatgcaaggcttccgtgcggccccgacatttggtaaggctcaattgcttaagaaaaaagaaaaaaaaaagaacattgctttgagaatttggggtgccccccccccacttttgtcacaattcagagcttcattccctccggccgtccaggacgtcgagagagcggctggccagagctcagccccggcgcattcgcagggacgtgtcagctgggcaggctataatttgcattattccattaagttaggagcagcgctgataacgactggaaagttcgacggctgggtgggcccgcgacccgcaggcctggcgagcaaccatcgaaaataaaacaattgctgtccttggcggcaaaggcctctatggacgcctccagggcagcgcagggaaccaaagggcaccccagatctctgcgggttcgcgccttgcctcgtgggggacaggaggttctct

SEQ ID NO: 237111 - DNA, 249 bp, Homo sapiens
  chr13:95358191-95358440
  hyper
agcgaccatcctgcgtggacctttctcccaggggtgggatgatgaaaaaagaaatcctcctggggaagcccctaggtatcccccagcccctacctttattaggaggcccgggtttcccccattaaacttatattcattcattcattcattcattcattcgttcattcattcataccacgactattcagtgagcacctaccatgtgccagacacagtattagactctcaaaaacgcggcataaatggaaa

SEQ ID NO: 237112 - DNA, 313 bp, Homo sapiens
  chr13:95359104-95359417
  hyper
ttgtttcactgtcacgcagtgtcaacttagtctattcaatgggggctacttgaaggccggagggacaaagcgtgtacacattgcaccgctattcattccggccagctggatcggctgaaaaaaaaaccttgtgaaaagaaacgcctcacaatggacacagaagaagtgcacaatgctaacagttttccaaataccactgattggtttcttcacaatgaggagaaagccgccgctttttcttagctccacttcaacaaacaacactctcacaaaacctcccaaccctgcgttttgttctcggacaaaacctcct

SEQ ID NO: 237113 - DNA, 205 bp, Homo sapiens
  chr13:95360076-95360281
  hyper
tgcttcaagttttgggacaacggtgaataccaaagaaattgcatcatggctttaaaaaaaaccttgaaaagaaacgaaaatagaagaataaaaggaagggaaagaagaaagatggaaggaaggaaggagagagaaggaaagaaagaaaaatggagaaacagggagagagacggagatagataaagagatggagatagagatcgcg

SEQ ID NO: 237114 - DNA, 341 bp, Homo sapiens
  chr13:95360461-95360802
  hyper
cgccaacttgttagcaagaccattggagtcagaatgggtgataaacgagtctgtggggcctgtggaggtcctcaaacagccgcacaatctgttggcgatatgacctcggtgctccccctcggcatcctcacccctcctcttacccatctttccagtcctcttctcattcatcaacaactccggagcgtttctcccagaaaacgctgatctttgggaaaaggggagggggcgggaggaggcggggagtcttcaggccgaggaggcggccgagctggaaggctcagggtggtaactaagatttagggctggggtgatttccagcgagccgcaggaagttccgt

SEQ ID NO: 237115 - DNA, 592 bp, Homo sapiens
  chr13:95362957-95363549
  hyper
aagcagcttttcccgtgtgccagccatttcagacctcacatttgaacagcgtgcatgcaacacggaccgggagggggttgggggttggggggctgaggggcgaggaagaagaatgagaaacaaaaacaaaaccgaccatgaaacttccaacaaaactggaaaggccaacatgtcaaaaagttactcctccacctccgtgggtcaaaacgcaacaggttccgaagtgcaaagcaaacgccaactgctgccgcacacaaccgcctgctttcgagttggctgccgaagtgcgggtctgaaatgatcctgcgaattcacaggcctgctcgcccgcgcccttgcgcgcttggccactcctgccccgcctggcctctctgcctctacctggcacctatacattctatgtacatacaaaccgggcccccggtcgcgggagggcgcacggggaggccgcagcgctcgtacctatacatatgtacacgtgtgcacaccggtcctcgcgaggcggccccgcggggtcatagcgcggcagcgtaggccgcggggtaggggtccagctggggcttgcccatgcccggcagcaggatgtaggcga

SEQ ID NO: 237116 - DNA, 1256 bp, Homo sapiens
  chr13:95364809-95366065
  hyper
cggtgactttctcatttgacagaagcagatgggggtggggaaggcggggaggtggccctggaggaggaagaggagggggaggcggaggagtgtccaggcgtgccacgagaacgcagagcgcagcaatggatataaatacaaatacagcagcaccagcctgtcttcttggctccgggcagggtgcgccgatgggaaacccccaatcggctgggtgattttttttttttggaggggggagctgtcccccgcagcacctgcctctcgagtcttcctctcccgctgctggactgacgggtggggcgaggaaggagggtggatgaggcttgagcaagcgttggtcgcccggcctcagaggaagttctcccggctcgccgaggagccgcgtccggccgtcccctgggccatgccggctctgttcgctccgagccccttcaggcgcgcctgccgacttagggctcccggagctcgccggccgcggagggcagcgcagcctccacgcggcgccgcaggcctggcaccggccgcgtccccgcctcgctcttctcggcagccgcctggcacttgcaactaacttcgcccaagtttcctgcgccgcggcgcccctctcggcgcgctcctgggagcgtgcgcccgcgagtccgccgcgcccggggcccctctgtcctcgctgctgtggccagagccgagccggcgcaggggcggaggtgctgcaggagagttaaggaaaacgggccatcacctcagttcgcaggtccgcgctgtggcacctcccgctctccccactcccgcggcgcagggggccccttcccagcccaggccgccctctgcaccggctcaggtgagtgtggctacctgcatgtgtgcgcgcccggagccggcactgggtgtgcatgtccagccgcggctgtgtgtgtatatctgggggcctgcggaggaggtggagcccaggactcggggagggaggagggatcagcggagccgcctcccgctcccacacccccaggacctcgaattaacagatcccctccgccccccgccccctcccaatcctcctcctcccactccttttcacttgagagcaggtttaggcgagtggagagtccggagcgcgccggggagtctgcgccctgtttggcgttggcaaaccctggtgtcatcccggctacccaggccggcctggcgtgcagctgccctggttgtggccctggaatcctcgccgggaggaagaaggcggcgggcacgagtaggagagcctc

SEQ ID NO: 237117 - DNA, 70 bp, Homo sapiens
  chr13:95620500-95620570
  hyper
ccccttctgtcctcgccctaacaccgcagggcctctcctggggatgtggggtcctgcgtgcttttggggg

SEQ ID NO: 237118 - DNA, 78 bp, Homo sapiens
  chr13:95620990-95621068
  hyper
tctgctcggtctgcattcatggaccccagatcttcaccctaggatttccatctcagcatttcacgttcccggggaaaa

SEQ ID NO: 237119 - DNA, 786 bp, Homo sapiens
  chr13:96204689-96205475
  hyper
gccgctccaacaagcgagcccttctccgcggccctttggctcaggggagcgcaggccggccttcctcccgcacgcgggcgcgggccagctgcagatggagaacccggggggcgaccgcgagccctctgaggcccctcaagggacagggcatgggtgtgaggggtcgcgtgcgccccctggcgccgggtccgctgggcggggtggtgggcggggacggtgggcggaggcggaggcgggaggcggagccccggggttgggagtgcgggggtcgcggcgcagagtgggagccggagagcgagcgcggctgcagccggcggcatggctagcacggcttcggagatcatcgccttcatggtctccatctcaggctgggtactggtgtcctccacgctgcccaccgactactggaaggtgtctaccatcgacggcacggtcatcacaaccgccacctattgggccaacctgtggaaggcgtgcgttaccgactccacgggcgtctccaactgcaaggacttcccctccatgctggcgctggacggtctgcatccccgcggcccccgccctcagccctccttccttgatggccagcccgctaggcgccctctcgcccccaatacccccagcgggacccctagactggactcctctgaggcccgacccgtctctcccaacagggccttagggagccagggacgctcctggtgcccgccctctcctgatggctgtctcgcggggcgcctgttcgagcctgggaccccgggaggggggacacgcagacaggcccgg

SEQ ID NO: 237120 - DNA, 994 bp, Homo sapiens
  chr13:96296226-96297220
  hyper
actccatcgtggggcgtcgtgccgctgaccacccctttccccttgcgtggatctcggtcacaagatggccggaacaggaaagaagggggcatgctttcccgttccctccctcccccatcccgggcagggcccccagccttgcgcggcgcctcaagtcccaggcgcatggcaccgccgggcagccgaaccagcagacaaaagccgagagacgcgggttccaggggaacctcggcgcccttccttggaaggcaaacaggcagtgggggcagcggcggctactccagctggatctgcagaggctcggctcgcagcctggagaggcaggagggccggcttcgcgggtatcgggatgccccgtcagccacctcctgtgggcgcctggcgcatccccggtctcggctcaccccagctgcgcgctcctgggcgggtgccgggcgctgcaggcgggcgggggcgacacaggggacccagaccccagggtcgctgctgacgcgggccgggcccgcggaggccgaggagcagcaaagcggagagaggcaggccggctccttcttgcagggcgcaggatgaaacgtgtctggtctgggcaagttgtggcgaggcgggtcgactggcgccgctctagggccttccagactccggaccacggacgactcaggataccccacccccctcccgccccctcccctccgcgatctccctccggcctcttccctcggtgtcccggctcctctggcaactgggcgggaccgcgagcgtctagaccgcagcgctaaaatgcgctcagccaatccggcagctggcgcagacacgtggttcgggggcgcgctccgttgctggccctggatgctaaccctaggaaggcttttcaaagagaaaccagattcgctcctacccggttgttggtctggccctcagcaagctaatttcccagaggagcttcaggtgaattatcttccaaaaagagatgcgttttaatcgcagaagtctgcag

SEQ ID NO: 237121 - DNA, 46 bp, Homo sapiens
  chr13:96705898-96705944
  hyper
gacacggggcgggaagctggctctccagaccgaactagggctctgg

SEQ ID NO: 237122 - DNA, 133 bp, Homo sapiens
  chr13:96742303-96742436
  hyper
ttggcgcatgctccgtacctagggcaggtttttgctgcgggtagcagggctcctgtcacaccggctggcgggttgtggcggtgccagcctgtgtgtgcgagtgtgtctgcgtgcctgcgcctgggcggacagc

SEQ ID NO: 237123 - DNA, 981 bp, Homo sapiens
  chr13:96742966-96743947
  hyper
gccagccagccacacgcctcggcgtcaggggcatggaggaacggcgggctccgagccgcgccccggagtccgcgaaacttccgagcgggcgcccgtccgccctgccgccgccgccgccgccgcttcgcctgccggcctgagagcgggaccatggatgaaaggttcaacaagtggctgctgacgccggtgctcactctcctcttcgtggtcatcatgtaccagtacgtgtccccctcctgcaccagctcctgcaccaacttcggggagcagccccgcgcgggggaggccggcccgcccgccgtcccgggtcccgcccgccgggctcaggcgccgccggaggagtgggagcggcggccccagttgcccccgccgccccgggggccccccgagggacctcggggggccgcggcgccggaggaggaggacgaggagcccggagacccccgggagggggaggaagaggaggaggaagacgagccggaccccgaggccccggaaaacggctccctgccccgattcgtgccgcgcttcaacttcagcctgaaggacctgacccgcttcgtggatttcaacatcaaagggcgcgacgtgatcgtgttcctccacatccagaagacggggggcaccactttcggccggcacctggtgaagaacatccggctggagcagccttgtagctgcaaagcgggtcagaagaagtgcacctgccaccggcctggcaagaaggagacgtggctcttctcccgcttctccaccggctggagctgcgggctgcacgccgactggacggagctcaccaactgcgtgccggccatcatggagaagaaggactgtccccgcaaccacagccacaccaggtactgtcgcccgctgggtctctgttcttcccccccaccccccatccctcttcctcagtcctgacccagagcgaccccgcgctccctgcccctgccgatggtttcctggcgtcttcagcggttg

SEQ ID NO: 237124 - DNA, 245 bp, Homo sapiens; identical to SEQ ID NO: 203417
  chr13:98085205-98085450
  hyper

SEQ ID NO: 237125 - DNA, 368 bp, Homo sapiens
  chr13:98795069-98795437
  hyper
cagtggcgctccccgcgctgcattaggtagcgccgcgcggagcccggccctggccggaagcccaagagaggcgcagatccccggcggcgcgctgggctcgggaggcccctgggcgcacctgcccgggcggagcggagcggggcggggcgggcgcagggcgcgggcccggacgctggagggggctgtggctctcccgcgtccccgctgctcgggctgcgcggcgcccgcctccccccgccgaggggccggcccagacccggggaggggcggtggccactgcacttcccgctcgccggcctcagaggcggcgggtccggcgcgggcgcagcggtgcgggcgctcggctggggcgcggggcggggacgcgg

SEQ ID NO: 237126 - DNA, 94 bp, Homo sapiens
  chr13:98795677-98795771
  hyper
gcttgggagccgccgatcccggagcccgagccgggagagggagccgccgcagccgccggcgctgtggaggtaggaggcgcgcggtgaacaatga

SEQ ID NO: 237127 - DNA, 89 bp, Homo sapiens
  chr13:99128923-99129012
  hyper
agtgtgggggcaaccgagacagcccttgtcaccgaaaccacagcctgactcatacctggccctgctttccggcccatgggtgagctgtg

SEQ ID NO: 237128 - DNA, 32 bp, Homo sapiens
  chr13:99230061-99230093
  hyper
ataaggggaaaatggggcgcagagggcaggga

SEQ ID NO: 237129 - DNA, 614 bp, Homo sapiens
  chr13:99404492-99405106
  hyper
acggtgtttctgccgcccctgccgtcacccgctgggtcccgtcccgctccaagcgcactcccggcccgcagggtgggaatacgaggattacagtgccccacgggcgggcgggccaggatcgcaacctcggcggagtcggcgcctctgggcacctctggcttccgcgccccggccgcacggtgaccacccgggaggggatcccgggcgccccgcaacctcccggcccccgtgggccttcgggtcgccccgcttcccgccgccgcgtacccttcgcgcctcccggccctcggtgccggcccccgccccgcgtagctccgagtctttagcccggccggccccccacccgccgagcgtacccatggcggcggctcccagggctcctgcgacctgccggcgggacgtgctcctggcaggtgctactcctccgacctgacgtccaggcccggccccgttgccccaggtacagccccagctctgcgaggcggggccgccggctccacccggggggcggtgctgcggggagcagaggtccgtgctcccgagccgtcgcgcgtggacaccagccccggcccaggtgcgggtgggccccgacgggagcgcgtggcaggccgggg

SEQ ID NO: 237130 - DNA, 249 bp, Homo sapiens
  chr13:99739203-99739452
  hyper
atgcgcggtttcggagcagggtttcctgcccagggagcccggctgcgctcgaggggaccccgaagtcaccggcagggtcggagctcggtgcaccacgccccccctctgcgcccggggcctctgcggggacagaggtctcaggaaagtagcctttatttatgtggcaccgatcggaacccgcggccggccaggcggacctggacggagcgtccctgctcggaacctggcgcggggcgccgcgcgctcgtg

SEQ ID NO: 237131 - DNA, 38 bp, Homo sapiens; identical to SEQ ID NO: 203422
  chr13:99740140-99740178
  hyper

SEQ ID NO: 237132 - DNA, 100 bp, Homo sapiens
  chr13:99852544-99852644
  hyper
gggaacaaagaggcggctggacggcccagctctccgcacccggaaggacctgttccacctctccggctcccgtacccctctatccgcatctgagtgacca

SEQ ID NO: 237133 - DNA, 82 bp, Homo sapiens
  chr13:99853142-99853224
  hyper
gctccgagcccggcgggaccatgttcaccagcaccggctccagtgggctctgtgagtaccggcctccgccatcctggctgcc

SEQ ID NO: 237134 - DNA, 201 bp, Homo sapiens
  chr13:100153680-100153881
  hyper
ttgcggtccgcttcggtttctgttgcgggacccggggtgtctcctagcgcaaccggaactagccttctgggggccggcttcctttatctctggcggccttgtagtcgtctccgagactccccacccctccttccctcttgaccccctaggtttgattgccctttccccgaaacaactatcatgagcgcgaggctgccggtg

SEQ ID NO: 237135 - DNA, 112 bp, Homo sapiens
  chr13:100259205-100259317
  hyper
ccctcgttgcacccggaaaatgggtacacaccttaggtcgaattacctggactcagccccaggaaacaaaactgcctgcctcccccaaatggcaaacgtgaacgcgccagtc

SEQ ID NO: 237136 - DNA, 183 bp, Homo sapiens
  chr13:100548279-100548462
  hyper
gcggtggccgcagacgccgagccctgcggagccccgaggcctcgtcgcccgcgcccccggtgcgcgcggagccggggccgaggccgggccaggaggagtgtggcggcccaggaggcctggactgtgggccctgctcgcccgcccgccgcgggccgcccggagcccgcgcgcctgtcgcgcagc

SEQ ID NO: 237137 - DNA, 1280 bp, Homo sapiens
  chr13:100608204-100609484
  hyper
cgagatttggccggcgctgcggcgtgtggggaaagatgattacactcgaaaggaatcacgactccttgcggagccattactcgtgccgctccgcacgcgcaggttctggcccggctttcagcaactccccgctcctcgctaaccactcgctcgtaatttgtgggccgcagtggagctgcgcccggggctgcagccccccaattaaagcacttttgcagctcggacacccagagagctgcctccgcgcacgccaggccggcacctcctgctcccactcccctctccgcccagccgtgggcagctgaaatggatgtgatttcacgcacttcctgcgcgcgcacacacacatgcacacatggacatacacttgcacacacgcacaacgcgcattccccctccaatgccgcccgcacacgtgcgcgagcctggacgttccccttttgtgctcgttttgcaggcccagagctcctgctgctggttttctcctttctctccttcatcgcctcttccttcgccactttccttctggaccctccgggctggctcctgcccctctgccccggtggcgctctcgcctattcctcccgggaggagccggggccgcagaggtgcgccctgcacgcccagcgagggccgagttctgggacggctgggaccaaagggctggcctccggcctgcgccctgtttgttttcctttcgccccctgaatactagattgagacgtaaagattacccgggccgaataatgccgggagtcaacactcgagcaaacaaaagtgcttgcacaactagtcaaccccgctgggacccgggccgcgggctgggggagagaacgcgctcctcgctgctaattacaaataaatgatgatgtgctcactaagtaattgatttaatgaagttcctatgaaactattaaacccgggtggaggtcaggctggaggcgccccagagcgcccattgtgggctgtttaactccaccaggctcctcggaaagacatcggggctaataggtgaagtcacagctgctcgcgctgacttctcggagcgcccggctggccgcgggcaccctcgcgccctcttcttgtagcgcccttgtgccccgccgcccgcgccccgcgccggccagcttacccacgccactcccagccctgtcgccagctcccgagggcctctccaaagggatcccgggtctcgttaagagcgggaagttgagcactgaacttgtgctcaccgccagcagtcggcggcgtgcaccgccgcccacccctccctcctcact

SEQ ID NO: 237138 - DNA, 108 bp, Homo sapiens
  chr13:100611982-100612090
  hyper
ctgggaaagtcccgcgcccggccgcgcgccctagagcgcccctcgccggtgggccctggaggagccgggcctccgctgccaccgagcggagtccgggcccgcagagcc

SEQ ID NO: 237139 - DNA, 1108 bp, Homo sapiens
  chr13:100620727-100621835
  hyper
ccaccggggacagtgcgcagggcgtggcctgtcccgccgggggcccggatcggcttctgcgcccgcagctcccggcagccgcctagggaaggccgctcccctcgcgaggcctgggcaggcgggaagggccctaggccgcgcgcggccccgcgcttgggagttccctttcggggccgggctggggagcggcttcacggtccctggatcctgccctgccgagaagtgctgggcacaggagcgagcagccggcttagcgggccagggcgtttttacgagagcctcctgggaagtttcttcctggaaaaatcattaaggcggactgatcccgattagagagaaaaggggctcctgggaaaacgtgctccccaccggccatcaggcggcccgcaggagccaagccaaggctcccgcctcgggccaccccgacgctgctgcccccgcagagccccgagcgcccccggcccgagcgtgggacccggcggctacctcctggccgcagcagcgccgataaatctgccaagtgattactgaacgtaaactccagttacttaagtgtcctccgaggggtaatcgtatctgtccctataaatcccgactgcgttcgcgctcatcagcgcttccgcccgacgcgctggtccgctcaaagggggcacacgacccacaggagccatccaccgcctcgcgccgcagccgccctcctcagcgctgtgggatccccagaggcagggcttgaggtggggtgggagggtccccacgacgccggtggctccccaccaattccacgacagggtaggcctcaccgatggtgggaggctcgggtcctcctacaactagaaccttctctagaaaggcagatgtcaactccagcaccctccagggcgagtgtgatactgcgtgtgagagggcgcgtggggcgtgtaaatgatgtgagtgtgaggacacacaggtgtcgcgggaatggggtgcacgcgcaggaggatatgagtgtgtaaagttgtgggagacgcacgcagaagaaggtgtgcgtgaagagtgtgtcacggtgggcgagtgcgagtggtctccggggttccgaaagcgcattcctgtcttcccggaggggtccctt

SEQ ID NO: 237140 - DNA, 50 bp, Homo sapiens
  chr13:100622015-100622065
  hyper
tgccgaccgtcctgggcgccttcctgctccagctgctgctgcgtctgctc

SEQ ID NO: 237141 - DNA, 175 bp, Homo sapiens
  chr13:100622485-100622660
  hyper
tgtggttgatgagcttgtatttggccttgaagggcttgccctcgcgcggacagtcctcccagaagcagacgtggctgctctgctcggggcctcccacgtgctccaccgtgacgtgattcaccagctcgtgcatggtgccgaaagttttggagcagggcttggcgccgccggccgg

SEQ ID NO: 237142 - DNA, 1528 bp, Homo sapiens
  chr13:100622720-100624248
  hyper
ggggtcgatccacttgcagatgagctcctgcttgattggctgccgcatgtagcgcaggaaggccccagccgcccctgggaggtgggggtggtgctggtgcgggtgctgcgcgggcgccggcggcggcggcggcgccgggggcggcgcgtggtgctgcaggtggggcccgggcccggccgctgctgcggccgccgcagccgccaggttcaggtttaagttcacggctccgtagccgtgcagggcggccgccgctgcggccgcaaccgccccgtagtgcgcgtccccagagcgcggcgcgaagggcggttcggcgcggccgtacagctcagccgccgcggctgccgctgccgccgccagccccaggcgcatctggccgttgagcgggtgcgggtggccgcctggggcccccggcgtgtcgtgcagcgcggggaagagcgccgggccgccgctgccgtccgggcccgcgtaggtgccgctggcggagatgaacatgccggccgagtggggaggcggggccgggtgctggggggagccggtgccggaccgctgctcccctccgagcggggccccgtgcatggccgccgcgggggccgtggcggaaaggtccctccggaggacgaagtccctgctgtggcctttgccgctgctgccgccgccgccactgttggtggtggtgtagcccgagagggcaggaggaggaggaggcgggggagggggagggggtgaaggggtgggaggaagaggaggggctgggggcgggggcgcggagggctgcgcgccactgctgcccccgccgcaggggtagctgcccgcgccggggtgcgcgaccaaggctgcagcacgggcggcggctgccggagcctccgggtgtgccgggaacgcctgggagggagggctgaggcccagcgtgctcgcctgggccatgtgctcgggtccgagcggagtggtggccacgccggggtcagcgcccaggtcccgcaggcggaggtgcgcgacggcggcccggagttgggagtgggcgggcgggccggccagcgccgggaagcctgtcatattctgaagcggctggacctgagccgttgccaaatccgctaatctcagcgctggcgggttcctcttgctcaaagggggctccatcagaactacacaatcaggcccatagaccctcactggggggactttattccctctgcccgccttcaaaaacatgtatgtattgggcgctctttaacttcttttgtcctggcctcttaactctgcttattcctgttcccactctatcctccagcgattggcagagtgaacaccacatttgagctgcacagtgggaccgagattttggaaatggcacgggtgggattggagggagccgcgtgattggcagtagcctcggctgctcgattggctcccgttcaggccctcgacccagcggggattcgcccccgtgcttgcggccgcctgcgctttcgcttcgcgccccctcctccgctggagccacacgtccccgcctccccggggatgcccaagt

SEQ ID NO: 237143 - DNA, 308 bp, Homo sapiens
  chr13:100627019-100627327
  hyper
tggcccgcatatttcgacggtggtgctggtcgtcagggccagtcctcaaatccatgcccctttctgcgttttgcagcggaggtgcctgcgtggaggcagcaaagtggcaagccatggaaatgtcctttctggagttagcaagggctcttgcggggcgtgtatttccagacctctaggttgcaccccgaaccccaacctccttccaaccccagacaaaggcgcgagtaggttggggaggtgagaggcccagtaaatggccagctaaccagaacccaggttggctgagttaaccgcgctcagctgcctgg

SEQ ID NO: 237144 - DNA, 145 bp, Homo sapiens
  chr13:100630674-100630819
  hyper
gaagggacggcgacgtgactttgaacttggctcagctcttctgtgccctgcagagagaggagaactagagccgggaaagaatagccaggagcgcccaacccgtagggtctccggcgggaattaaggcgtccgccccaccgcccgg

SEQ ID NO: 237145 - DNA, 997 bp, Homo sapiens
  chr13:100631531-100632528
  hyper
acctgcagagactcgcttaagccgggagaggctgcctgagccggcgcaagagagcccgggttctgccagccatagtgagctagaggattcttcccgcgtttttgtttatttcatttcagaacataattctgaaaaatttattattttctcttcgtttaattttatttcaactcctagagatttataaataaaagcagttctccaggccagccaggagaacacgcccgaggcgctggcctcaggctgtcccttcacacctccgcagcctctgggccctccgttccctctctagttacctcgggagcgcgagatttgggcggcgggacaggaaacgtccgcagcggtcagccaggcgcggcgccgggagcggcctcgccgctgggccaccgcccgggtggtactccctgctcctggagaaggagtggatggatatatatgctttctagaaggtttaagccctgccgtgtctgacggcttcttctcccgagaccctgagcctgacccgcagccaaactccggcctgagtctcgcttggtctcgggcgttcccacacttctcagcccaaggatgcgcggcccggcttctgggcatttaccctgagggtgacactgtctttaaacgacttccgaacaacccccttccacgcaggggccgctgcccagtgtttactgctgtaaacggagcaggacgcaagcggcgggtggggagctcagcgcgccgaggggcggacggggacgccgcggggggcggggaaggcggtgtctgggtgggcgtccggagggtgggaagaaggggcatgcctggctttctctgtgcccacggtcctgcacctgtggtttcaatgccacagagcaagtttacaaaggcggggtgaaagtagggagcgtgccaagcgggcagcagaccagccccccgccgctccttgtggcgcgctcccggcgaggccccgggcctgaaatgtccccgcgcgcagagcctcctgccaggcgacccagct

SEQ ID NO: 237146 - DNA, 1851 bp, Homo sapiens
  chr13:100634590-100636441
  hyper
tgccgctgcggccgcagcgctcgggccccacgccgcgcacgttggctcctactctgggccgcccttcaactccacccgggacttcctgttccgcagccgcggcttcggggactcggcgccgggcggcgggcagcacgggctgttcgggccgggcgcgggcggcctgcaccacgcgcactcggacgcgcagggccacctcctcttcccgggcctgccagagcagcacgggccgcacggctcgcagaatgtgctcaacgggcagatgcgcctcgggctgcccggcgaggtgttcgggcgctcggagcaataccgccaggtggccagcccgcggaccgacccctactcggcggcgcaactccacaaccagtacggccccatgaatatgaacatgggtatgaacatggcagcagccgcggcccaccaccaccaccaccaccaccaccaccccggtgcctttttccgctatatgcggcagcagtgcatcaagcaggagctaatctgcaagtggatcgaccccgagcaactgagcaatcccaagaagagctgcaacaaaactttcagcaccatgcacgagctggtgacacacgtctcggtggagcacgtcggcggcccggagcagagcaaccacgtctgcttctgggaggagtgtccgcgcgagggcaagcccttcaaggccaaatacaaactggtcaaccacatccgcgtgcacacaggcgagaaacccttcccctgccccttcccgggctgtggcaaagtcttcgcgcgctccgagaacctcaagatccacaaaaggacccacacaggtaaccgcgggctgggacagggaccaggcgcggaggggagacacgcacaggctgagactcaggctgtgggtgccgacgctgggcgcagaccgccagccggggacctgggatgggaggtgtttttgcgtgtacgaaagagccagcagcttgtttctgttggacgatgacaatattattgggctaggtttttccatgtgcggaaatcgagttttgaatgattagcctcacatcaaatgtatgcttgggtcatgcaattgcttcgtttgctcagccccggttaataatttccgttttaagtagaaagcacaaaataaaactgctcgctaattcggtgcccgggaagcgagcctagagaggattttgccagcttgtctgaatgtgcttttctgctcggagtgtatgtctgtctgagtggtttgtgtgttttcccacttcttttactcggggtccaaacgcccttcccgggactgtttcccatgaaatgagtctggtgtgagccgaagctgtaatgcgtttctcatttttaaagtgtttttaaagcccgtctcggggtgggtcgcgggggctttactgtggtttcgcagcagtttgtgaaattctctaatgggcaccacagagtttgcgattcccaacttggacccaggtcagctagagccccaggtcagctagagccccaggcagcgcggccccgcggggggatcgcgtgagaagagagagccgcaaaagaacgcgcctcccgcctcatagattattcatctatgaccaggtctcagccaaaatcgtgccagacgatttcctaaaagaaagccaaatgttttagcaacttcccccgtcaatatttactccgaagtggggatgcgccagcggcctattgttctcttccgggaagggagggagccgaggtgcgagacaagcttttaacaaggtttaaaatttgagaaatttatttgcatgaaatgctcgctttcgagtcctgtgtctgagcggatgtctttaagaaacaatttaggtgctaatggaatttaacgttaaacggtcccctttccaa

SEQ ID NO: 237147 - DNA, 757 bp, Homo sapiens
  chr13:100637157-100637914
  hyper
ctctgggtgtctgcagccagcgccgatgtttgccgtccacaggggagaagccgttccagtgtgagtttgagggctgcgaccggcgcttcgccaacagcagcgacaggaagaagcacatgcacgtccacacctccgataagccctatctctgcaagatgtgcgacaagtcctacacgcaccccagctcgctgcggaagcacatgaaggtaccaccgcggcggccgggaggagggcgaggcaggccgaggcgccggtgcagcactggcccggaccacctcagccggcctgggagggtccccaggggccagggcggcggggggaacatttctgggggtgctctcccccaggggcccggccccacagcagctgcactcacacccagtcccctctggtcccccctcccggcttttgtcttgcaggtccatgagtcctccccgcagggctctgaatcctccccggccgccagctccggctatgagtcgtccacgcccccggggctggtgtcccccagcgccgagccccagagcagctccaacctgtccccagcggcggcggcagcggcggcggcggctgcggcggcggcggccgcggtgtccgcggtgcaccggggcggaggctcgggcagtggcggcgcgggaggcggctcaggcggcggcagcggcagtggcgggggcggcggcggggcgggcggcgggggcggcggcagctctggcgggggcagcgggacagccgggggtcacagcggcctctcctccaa

SEQ ID NO: 237148 - DNA, 1231 bp, Homo sapiens
  chr13:100640906-100642137
  hyper
gagcgggcgggagccgcttttcctcgaaagggctcccagtccctggtccctcgcttcccaaggctttgtccaaacaagtcacggacccgacaaggtggtccattctctctctttggcctttcttttctgcccttcgaatccgaaggactggatggaggggaggggatatggcaatagtgtagaagtgtcaagatgtgaaaattgctcaactgagaacgcacgcgggggctcgcggcccaacagcctgcaccacactcaggagcctgggcctgggcctgggggtggggtgggggggacaggcgtcccccccaccccaaccccacccctatccctgcccggctgtctaaacggacctaaatgctaacctgctgttgccttgactccagagacacgaaactgaagctagccctcgcccctctctgggatcccgcgctgcgctgcgggtagctgcccgcagggaggcccaacctgccgcggctggagcacggtttctgctagccgccgccgtcaacttgaacttcagtgagcctaggccggcttccttcgcgctcacctccatccaccacctaagaagtcccctcagcgcgagcgtcgctttatccggaggcagctggagccccctcgggaggcccgtcattattattattaattatcgtgatccttactgcattattaatgcccaggatgataaccggcatcggtatcagctttccctggttcagtgatatcccacgaagttcggggcggggaggaagtcactccaggatcagaggccgcgtcggttctgcttggggcatgggcagagggaggctgctggggccaagccccggctggacgcgagggaagaaactcgtcccaggacccgcacgcccatacctggctgtcccagagctcttccctaggccggcaccttcgctcttcctcttccccaccccctagcccttttgtctctttttcagacggatgttttcagtctcaagtggttttattttccgcacaaaaccctgagatcaagggcagatcacagactgtaccggaggctcgggtttccctggactctgtgctgttctgcgtcccagggttggctaggaaggaaggcctgggccggcgaggtgacgggtctcccgcccaggtcggcaggacggggggaggtgtgtcccggtaggtccctggtgagctcacccgtggcatcggggacccgcgggaacccaccgggcgcccactagagact

SEQ ID NO: 237149 - DNA, 568 bp, Homo sapiens
  chr13:100642503-100643071
  hyper
cacttcccccctcccgacaccagatcattgctgggtttttattttcgggggaaaaacaacaacaacaacaacaaaaaaaacactaggtccttccagactggatcaggtgatcgggcaaaaaccctcaggctagtccggctgggtgcccgagcatgaaaaggcctccgtggccgtttgaacagggtgttgcaaatgagaacttttgtaagccataaccagggcatcctgagggtctgagttcacggtcaaggctgtgggctactaggtccagcgagtccaggcctcgccccgcccccgagctgccacagccaagatcttcggcagggaattcgagaccagggtcctcccactcctgccccgccccgacagtccgagaactctcggtgctggggccacctcgtcgccctcccacgtttctcttttgttcccaggagccgacgagcttttgaagaggtgacacctcgcttcgccttctcctgctctaggccctgccctcgtccagcatccctcctgccccacgaagcgagaggatgctcagcgcagctgccaggcagagagtgtgtgggga

SEQ ID NO: 237150 - DNA, 388 bp, Homo sapiens
  chr13:100643131-100643519
  hyper
acacaacacactcacaccatatgctcacacaccctcacctccttcagcttccgcacctcccagccacaggctcgcgtgagtgggaaggacctgaggccgcagaaatgtgggttagcgtgggcagcaggagatgctccccgcacccctcctcccattcctacctcccccagccctttctagcgcctcttggaggggaccgggcctgccctgcgctctcaacctaattcggcctcggagggtcctcccccacccagggcggcactccccaggccggcactcgcgccactggcgtgggactaaggctccctgcagttgggtctcccaagcccacttccaggggctgagagaggccaggctgccttgcctgcccgcgcgccctccagccctc

SEQ ID NO: 237151 - DNA, 165 bp, Homo sapiens
  chr13:100644068-100644233
  hyper
gtcgcctgggtctgcgtgcccctggccccgtcctcacccccgggctcgtcccccagcctccgccggcccgcctgtgaatggtggatttaatgagcgtttgtgtggcgttggccggcggttctgaagatgcgctgacctggagggagggcgcgaaaggtcaggcgc

SEQ ID NO: 237152 - DNA, 279 bp, Homo sapiens
  chr13:100644447-100644726
  hyper
gtgaaatacccaggcgaaagagacccgtgacaacttgactttctcctcttcgagaggcccgtgtgagctcgagagcccacagcccgtgtttccagtgtgactctgtttactaattatggaaatatagggatcctataaaataaattgtttcaatatggctttggcgagtctgcttcttgacttcttcacccttattgtttcaaagacttcgtgtgtccttggcctttaaacttcctcttgacaatttcatcttttctcccgccacggagctcctttcta

SEQ ID NO: 237153 - DNA, 50 bp, Homo sapiens
  chr13:100646376-100646426
  hyper
aatgtctggcgctgcgggcagcgggcttggccacccgtttttcagacaca

SEQ ID NO: 237154 - DNA, 340 bp, Homo sapiens
  chr13:100647980-100648320
  hyper
attcctgcaatagacgataggttctgttcggtagcgggaatgtcctgtttctttgctttaagtttcactttgtgattaaaatgcaataaaataagtctggaaaatcatttttaagagaacactttcaagaagcacttcctttcctagtgccagacaacggtgctccccaaccacttggctggaacgcttgctttcgatttgtttgtttcgcgcatttccctaaagagccgggctctttgcgctgttttaattctgctttaaaaatgcatcgcttctgccctgaatccttctctgaaacaaattcctatcgaaagtgtatcagattcgttccaaatatggg

SEQ ID NO: 237155 - DNA, 744 bp, Homo sapiens
  chr13:100649347-100650091
  hyper
ctgtgtgtgcgaggacaattattttcatcagctgcttgctagcccgcgcccgactgctcctctttgcagaaccgacgggctttcaactctggaagtgaagcaggacgaattcctccatggagactccctccttgggaacgtcgaactctctctgccttggggagtggggctcgataaagggtacctaggtcgcaccctggcaggggagcactagagggccgcgaggtcccgggtttcgccatcctgagacccccgcgcggatggcccaggaggggcgcggcggccctgagtcaaggtgggcgggggcaggtgcttccctccaccgcgttgtcctatgccggcgcggtccccaccgcccgacctagcccggcgccggccgagcacggcggccgcgcttcgcactccttcctcccaccgggtccgcaggcccggcttcacgattcccgggccctcgggcatgtgagggacttgagtgaatgcagctccctcaactcactcccgcaaaaccacagccaagagggccttaagtcagagaacccggcctaggagcctcccctagagcctcggcgcgggccccttccccttccccacatcggtcggccgagggagcctagagccggtgggagacgggcagcggcctctcctgatcctttcctgcggtcatacaagttcctagggtgggccgaggacagagcgcctcaggcatcgtcggcttcccacggctgcggcccaggcccagcctgc

SEQ ID NO: 237156 - DNA, 160 bp, Homo sapiens
  chr13:100740896-100741056
  hyper
gctttgcaatttacgctttcgaacatgcaggaatgtagtttgggcatttgtctggaacttcggattctcgggactccagggtggccaaggcgcggaggtgactcaatgacattgaccggcctggatgcacgtgggttgctgagccgatgctgggaaggta

SEQ ID NO: 237157 - DNA, 168 bp, Homo sapiens
  chr13:102068535-102068703
  hyper
cccagcgcccctgagccgtcctggcccggaccggccaaggaactaacgagcgcgcatcgcgggcctcgggcgcagggcacggagccggccgcgccgcagcctcccgggcaccggcggcggtgaccaacctgtaaccccagcgctcagagctgtcatggtgcccgcggg

SEQ ID NO: 237158 - DNA, 359 bp, Homo sapiens
  chr13:102068883-102069242
  hyper
tgggggaggggtgggagccggagttttcgggcctttaaaaaattattattttatttaaatttttaaagttagctttgctacagggactgcagtgatgccgaagggcgggcaccgcagaggaggctgcgccgcagttggtggggagcgccagggtcggtactggcagttccttcttgccggctgccacccgcagtcagtctcacagcaacagctaggctctcatctgcgagctcctctcgggggtctttcgtactcaacagcacggcggcggtgtgcacgggagtccgccgggcacacgcggggtacacttaagtgcactgccaggaggccgggagcccagcgtgcgagcgtgaggtcag

SEQ ID NO: 237159 - DNA, 461 bp, Homo sapiens
  chr13:102568281-102568742
  hyper
tctacagcagctcccgctgggggcaccgccaggatatccacatttgtccaaggtctgggaacccgggaggtttctaggagaccccagagaccaagtgaggccaggcccaccccatggaaacccccaccagctcagatcagactgcgagcggtggctcgaccccgggtgtggcaggaaggggtgccccgcgttccagagccagtgccagtccctatcctcccgggaagccgagactcagggggaacaggtttcccagagcccagcctgcagggacgcggagggcaggagccgccggcgaggagcagccaacttgccatctctggcggctgcacttctcggcggctacaggttgcccgacagcggactccagggtccccgcgacggcacccagagtgctcagaagggaggccggggccggggtgggccgggaaaaccgagggagggaaggagcctggagaagc

SEQ ID NO: 237160 - DNA, 123 bp, Homo sapiens
  chr13:102569642-102569765
  hyper
actacaccccctccacctatgtggtccccctcctgatgtacctcttcagaaagaaacaaaacgtataggtaataatgatttaaaaataataagaaagaaagctaagatggattgcagggatgg

SEQ ID NO: 237161 - DNA, 72 bp, Homo sapiens
  chr13:102569945-102570017
  hyper
ccctgctaatccctccagcaccaacgcccccccgtcgccacccccaaccccgggttggagggaggagcctcc

SEQ ID NO: 237162 - DNA, 1188 bp, Homo sapiens
  chr13:103052309-103053497
  hyper
ttttagactgtctaacaactcgcagtttctcctttgctgcaggaatggtggccgcaaacggtctcagcctccgcacccaccgcctccgtccccgcccacccgcacctcctcctcctctgcctcgcgctgcacccgcaggcggcagacccctcggagcgcgccaccccagctacgttgcattggcaaggttcggaggctggagggcagcagccacttgctgccccagtcgctggggctctgggtgccagtgcggcccccggcagagcccagggcgtcagggaggccgtggagagccatgatctactgcaccgcagtgccagcgtcaggagcttccagagcccgggctgccactgcgggacggccgatctgcccgctccctccttcagacacaaccccagacaaaaacagccggccccgggtccctctccaccctgaacggagctaggggacgccacacactcccggctgccagcgtgagcggttccgggaaaggctgcgcccagcctcctcgccagcgccgccgccaccaccatgcagccctccagcctgcctcccctgggttgctcgcccacagctccgcggccgcccccaatcgcctcggactgagacgcggggacgggaacccctgggatccgactccccaaatcagatgcatttgcatttcttatgtaatgtactgcaagttcccttgttggagccctttggaatcggggcgcatgatcaccagtaggcttaaaagcaggaactcacggcctggctcatccccacccctggccctgtgggaccccgacgcagggctttgacaccgctttctaaagggggggacttcaattacaaatattagaggggctgggcttgtcctctcagtctggggttccctcccggcgcaagccttgctcaagtattcccggtggcaggatgtgtcagaggcagacagggggaatgagttaatgctcgggcacccggagctggacgggggagggacgcgggggctgacggaggagcggggccgcgagggagggggcctcttttactttggtaaaggtgatcgtggtggcgaatattgtgcaagctaatcagaaagtctagagcaggttctcggaacccagctacgtccctcgaacctgctgcagaagtaaggggagctcgcggttctttttcctggcaactaccgaagcttcagctgcc

SEQ ID NO: 237163 - DNA, 456 bp, Homo sapiens
  chr13:103054543-103054999
  hyper
tttttataatcaatcgccagtgctcagtgggatcggtttgaacctgcagttctcaatcaccacgaagaaaagatgcaaatttaggtgccccctccccttgtcagtcttgtagtaggtagagagcgccacaaatccccttcctccttcctctcactcttccagtttccaacaaccgtgagcatgaggaaaatctcccctccggattcctcgcccagcctcggatgtgagttacaggcattagagggaggaggaggaggagttgaagtttgcattgaaaagactggctttccatgacgtagccacgtgctttcagacccgtcaccagtgagatgcttcaaccagcccagggagggcagtgtcactgcagtctctctgctagggcccctcctgaagtctccccacccgccagctccagccccagccccaaacccagacccaacgcgcgaccctctccct

SEQ ID NO: 237164 - DNA, 123 bp, Homo sapiens
  chr13:103248986-103249109
  hyper
tattcctggctggcggtccatctccttgcccgtctctcggggagtgattcggtccgggacaccaggactctgcttggaggcctgctgttgcctaaaaaccccaagcgcgggcctcttcaaggc

SEQ ID NO: 237165 - DNA, 2004 bp, Homo sapiens
  chr13:103451072-103453076
  hyper
gtggacagaagcagccgagccttcggcagggacccgccggccgatcgcagcagccaacgcgactgcaaaggttgccgcccggcgtgcagggcaggcgcgcgggtctccgcgaccccaggacaatcaaagcccgtgccccggcgcgcccaggtgagggtcccctggcgttctgctgtcccggccgagaaccgcgctgctcctctctctcaggacaatgatgaacttgagttgctcctgccactggagcatcatttgggagcgaatccgtctcaggttccagccaaggtgtagggcgaggggattggcccgtgcgtcgggccaggctcagtaacgccttctccaagtggatggcggggtggacacgcgtcccggcgccccgggctccctgggatatgtagttcgcgacaggacgagcggaaatactgccaggattttaccacctctcgcccatttatttacttctcggtcaccgctttcgggggacagataaacaccacagatgcccatcaaaggggcgcacgggtctggaggcgcagctcaggtttttgcgttggtcaccctgccctccgcacgtggagagggcaggcataaagcaccttgaaaggaaggtgctgtcaatgctatccgacgacctgtcgccgggcaccgcagcatcctcgctcgctccgatgggacgagggacgccggccccagggtaacaggaggcgcctcgccggccgcgcgctggatgctgtgatccaggtccggagccgggttccgccgcggccgcagcgacccgaccccacccgacaggccagaggtaccccggggcggggggcaggggccgaggtggcggccggctgtgcgctctgagcgcctggccctccgctgggcacctgggcgccgccagcccggcctgctgccgctctacgcgcagccacctgggcattcaaaatttttacttaattcgataccggcctgggctgccaggggtcatcgcctctccgagccccgtggcgtccagatggaggccactgcatgggtgcgcgctctcccgggaaggagtagggggaagagctgtgtcgcggggggaagagaagcgccagggaaagaagggcctagccctctggtgaacaaagctcgattaggaggtgtccatgtggataccggtgacccctgtgcggccgtcggtctccacgccacgctgggcagggtccgggaaccagcgcgcagcggccgtcgccttcccctgcacgccagcacccgggtctgggccgccgccaggagtcacgggctcaccgccctggtcagcttggcagtcggacccggagccgcctcctctgcctgcctccctcttgccagctgccccgaaaacccagaagagccggtggctccgagccaaggcgggcctggttcggcgccaggaaagggggtttctttcctattttcttttgtgcaattgtcattattaatgataccgactcgtttactcaaacagtcgaatcggagccccagctcttagcccggatgcagcaattgcccgtgggccccctttaacaccaacagcgtccccggggcccggggcaagcatgttcgaggcggtcacccccgggcctcggcgcgctccccctggcggagagcctcgtcttccggccggtgagggaaggtagaggagggagtaggggcgaggaggcctcggcggcccttgggctctgcgggctggggactcggggtgcccgcgacacgcgcggaggcgcgggctgggttggccacgggcagggagcgcagccgcgctccttcctctctgcccgcgtcgcctccgcgcgcactggttctgcgcggcggggcttggcctgcgcgactgtctactccgtcccggcggcctcggagcccggccgagcggcgagcttgtcagaggacggtggtggaaacgctcccggcctccccaggggcgcgggctggaggctggcgccaggcgcggaggactcccggtatcttttgacaggctggcgcctcggctctggg

SEQ ID NO: 237166 - DNA, 290 bp, Homo sapiens
  chr13:107001524-107001814
  hyper
tgcagggatggcccgacactccccgcagagcctgagagcgagtggcgagccaagataccagcggcacaatgtttcacctgcgctgccagatactcagacagagaaaacacacgacagtttgtcaaaacagccatcagcgcggcgcgctcgttttttcccgcagcccccggtcctggctgccaatgtacacggccaggtttatctaagggctggagagctcctctcttaaattcccggcgaggtggggatgatgtggcacaggaagggaccgggagcgctccccggggagc

SEQ ID NO: 237167 - DNA, 193 bp, Homo sapiens
  chr13:107185497-107185690
  hyper
tggctggagcaggcggcctgggggaggggcgaggcctggcgctgcgcgattccgcatggaagagtgacctctggaggcaccgggcgggcagcggcgccgcgggctccccgcgaccgcctcgcccgcccgcccgcctctcccggactccgggacccgctgctgcgcgaggtcctagcccggctccttccggcac

SEQ ID NO: 237168 - DNA, 399 bp, Homo sapiens
  chr13:107186448-107186847
  hyper
gaagtgcattacaatcaggtcggccatcgagaccgcatactccggggctaccggcttatgaacgaagcgggaggccgaggtgcggcgggccctcagggagaagcctaaggcccgtctccccggcgcggaggaaagggctcgacgcccgagttctcctgcgaagcaggcgagctccccgcgcaccctcgggctggcggcgcggtgccaaggcgccccggctccagggctctgcgggcagcgtagcgactccaggctcccctctccagaacgcgcttcgctgccagcgtcctgccaccccggtcgcccgcccgcgggccccggaccacgccgcccgcgctccccgcgaatgcagcatctccgcctctctccagagcccaccagtccccgcgtgccggccag

SEQ ID NO: 237169 - DNA, 326 bp, Homo sapiens
  chr13:108518134-108518460
  hyper
gtcctggtaagcctcgacgcactgcctgcaagtggtcatctcgccgccttccttgagcaccacatccagactgcagttcaaagtgttgggactggacaaccccgagaacaactcccaaagtgtgtaggaattacaaaacgaaaggtaaaaatccgacaagttccagagcggagtgggatgcttgctcctcacctcctgcccgtcccccccggccgccccccgactccagttcctggcgcacaccgcgtccgcattctccaccgtgaagcactggcccgaggacgcgccctgggggtaacaagtctccaggcgccacacgggcttgg

SEQ ID NO: 237170 - DNA, 554 bp, Homo sapiens
  chr13:108518709-108519263
  hyper
gctgccgctgctgctgctggtgctccttgtcccgggcccgggtcagcttggcctcggcgcagaaccacaagtgatcagagagcaggactgtgaaaaacaagagagatgccagagacagtcgccatttctgagccctctcggaatcgatgaacggtttctcgttctctcggggtgctgccaaccagatttttaagccgtcgtcatactgccgacacatccaagcacccctggtcatattttgggaacgcacagccctggccgactccaccgtgagggcgcctgtgccggtgtcaccacaatatgcattgacttaaagggtttaatttccttatcccctcctcccgtttcttctctctcctctctctctttctctctcttcccctctccctctctcctctctctctctctccctctccctctcttttatctctctctgtctcttttgcctacataaatattaccaggctttgaaggaaggtctgacttgcttcctaatcatcagccgaccccatcctctgtagagtgggaaacaataatggagagagagagagaga

SEQ ID NO: 237171 - DNA, 176 bp, Homo sapiens
  chr13:108519443-108519619
  hyper
gcccactgacggcgcccggagcgcctcccctcctcctcctcctcctcctcttcttctcctcctcttcctcctccttcctttccttctccttcttcttctcctccgcctcccgctcctgctccgcgctggctctcccagagtccggagcctgggctgcctccggcggggcgctccct

SEQ ID NO: 237172 - DNA, 61 bp, Homo sapiens
  chr13:108519799-108519860
  hyper
gcgggctaagttgccgccatcttcgtcctggagaaacacttttttggggggagcgctggct

SEQ ID NO: 237173 - DNA, 124 bp, Homo sapiens
  chr13:108520040-108520164
  hyper
atattttgttttaatcactgaagagaaaaataaaagtcagactgcggacggcatggccggtgaggctcctcgcggccgcgccgcccgcacgctctggctccgggaagcgtccgagttgcaggcg

SEQ ID NO: 237174 - DNA, 255 bp, Homo sapiens
  chr13:108520344-108520599
  hyper
cagtgcgtgcagttattccgtcctgctgtgtgacacgggagaatggcgcgcacgcctgtgcacctgcatcgaccgtgtagctgcctgggtgacagccacccatttgtctatgttttctttcctattctaaagtaaacgattagaagtggcctcatagagtcttaggaagaaacagtaagccctgtgccacccggggtcactgcctagccctgccctccgcgcgcaccgtccgcgtctccgagggctcctcctcgg

SEQ ID NO: 237175 - DNA, 64 bp, Homo sapiens
  chr13:108521019-108521083
  hyper
cgccctctctgcggtgctttccaaggaccctcatgccccgcccgggtgcacattcaccacatgg

SEQ ID NO: 237176 - DNA, 84 bp, Homo sapiens
  chr13:108868007-108868091
  hyper
ggggctgcggaggcgggacctgcaggatcctggttagggtcttgagtacacacggctcctattggcctcggcagcagatgctct

SEQ ID NO: 237177 - DNA, 712 bp, Homo sapiens
  chr13:109148474-109149186
  hyper
gggcgtggagaggaggcttgtcggtcccttcctgggaaaggaatcgcggggacttcccaaccgctaggacgcgtaagccgaggctgggagtagaagccttctgaactctggacctaccccagaaggagggggcgaaactggccatttcgagggacgcggaagccccgttgctaggggagatgggggaagcggcgtggtcacctacacaaccgctcccaggcgcgatgggggctctgcttcctcctcctctgtttctttggggatggaaaagagagcagaacaaagatgtagagtgaaggagggctccccagctgttgcctcttgcgcggattctgctgacccctctgcgcgaccccagctgggcagtgtcagctccattgtctcagaggccggcggccaagtgagggaccagtctcacccggggggcgtcgagcctcagcgcatcgccccgtcttccctggctgcagaaaaccactaggccggtggaagtgctccgtttaattggtccctagtacgcccccgaaaggaaatggagacgatttccgtcaagttctcttagtatttctgtcatttacagaaaagcagtagctactcacatgtggctcagatgtctgtgtgggggttgtgagccagggcattaaaattgggtgttaaccgtttgccactcagaagaattattagccattggaggaggagcggtttctcttgctaa

SEQ ID NO: 237178 - DNA, 1770 bp, Homo sapiens
  chr13:110437273-110439043
  hyper
gccgctcccgccgccgcgccgccgtcgccctcgctggcggtgcgcacccggcacgagctgcacttggccgccggcggggtggcggccaggctgtcggtgcgcgagcggcgcaccaggcccgtctggctggggggcaggttgaccaggtggtggtggcggcgcgcgccggggacgctgatggggtgcgtggccgacgaccccgacgattggctcttactgcgcggccggaactcgaagagctccttgagcgccttcatggcctccaggatggtctcgtggatgttctgcgccaccaccgagtcgtccgcctgcatccacagctcgccggggcctgtgacggccgagcggcccacctcgatgaagaagaagctgtccgagtggccgcagcggcggatgttcatgagctgcagcgtcaccgacggctgctcgcagttgagcttcacgaagccgatggtgcgcgcagacaggcacagacggtacacccccgtcaggttcttgctctggcccagacccttgggcttcaggttcacctgccacacctcacggtaggcggccgtggcgggagccaccagcccgtagctgtcctcggccccggcggcgccggcagagccgcccagggcgccgggcagggaggcgctgcaggacgcggcgggcgcggcggcggggggcgcgtctccggcggccgcgcggccctcgctgaccaggtcggtgagcgcgcggtaccagccctcctgctcctgctcgttctcggcggccacggcgaagtactcgtccttggtgtagagggcgatcaggtacttgtgcttggcgtcggcgcgcttgttgatgttcaggcagcagtcgagagcgatcacccgtttcggcgcgcctgccttgctccgccactttttctcgctctcgtagtactcgagccgcggcggttgcggcgccgaccccccgcccgccgtcgcctcgtcgccgcccgcgccgggtccgcgcagcacgaagaagcgcttgtggccatgcttctgcttgcgcaggtagccgcacttgcgcacgctgtggttgttgttgttgttgttgttgttgaggttggggccgtctccgctcgccggcccgggcggcccgtgccgcggcgggctcgccatcgcgggcgcttcaggccgcgcggcccgggcccggcgcccaggggttggggcgaggggcggagggggcgcgggcgggggcggctccctcccacccttgcgcccggccgcccgcccgatcacgcgtccctcgggcccaggcggtggggaaggtccggggaggcccgcgggggccagcaccgctcggcggcgccgcgccctccgcgctctggggctcctgaggatgcccggcgcgggcggtggccgcccccctccccggctgcctgcggccgctgcctcctcgggctctcgggcggcgccgggggacgcgctcgctgggccgggagtcggggtccccgagccgcggggccgagcctaaggcgcgcgcggccgcaccggggctgctgccgccgcgtcgcgctccgggaagccggggtgcgcccgggcgctcggggtccgcgccgccgccggggctgctgctgctgctggtgttgctgctgctgctgccaacggcgacccgggctcgtcgcggtccccgccgcacagtgagtaacacatcgcgcaccgagtgactgaactaagaagagcaaaacaacatgtgactcggcgttacgcaggcacacacagcgcggccgccccgccccgctgcctcgcattggcgccgcgc

SEQ ID NO: 237179 - DNA, 970 bp, Homo sapiens
  chr13:110439223-110440193
  hyper
ttgtggatgccggcggaggagatgccacccagggcgggaaaaggggcgcggaagaggggcggggcgggccacggcgcgcagggcccttccctcccgcctcggactcaattaattgggcttgagcttccgccggggagggggcgccgggcggggccgcggctgggcggggcgggggatcgggatcggcggcgggggctgcggccttgcagtggaagcatgggcggcgagccgggccgtgctctcggggcgcggggtccccattttgggcgagggcggccgctcccgcgctcggggtgggcgcgccccatccccgtcccccgtttcccgtccccgtctcccggccgcatctccgtccccccgcagccgcgaaacgcggggaggttccagggcccgcggccgcgggttcgcgagcaccgcgctccagatcgagagcggcgcgcgcccttccgtggaggacagaggggcgcggagggggcgcctgtgtcccacccgctcgcgggcgctttacggggcgtcctctgcgccattcacttgtcagcttgtcgggaagttgaaatcgcgtttgggaggtaataggagaaagagatcggggacggcaggcggagaaagtgcggtttccatagcgccggggagagggcggacccgcgagccagcggtccctgagccgggagaccgcgcgggcgtctctccagcccccgcaggagcgccgccttccttccgcaggggcgtcctctccccccaccgctgcaggagcacccccttccttcctcggaagcgtcctctcaccacaccgcttcaagagcccccccttccttccacaggggcgtcctttccccctccgaggcaggagcgccccttttccccccacaggagcgccctccccaccccaggagcgccctgcgcccagcagacgggcaggtgggcgggcgtccactacctgtgtgcgcggtgcgggcggtgactgccaagt

SEQ ID NO: 237180 - DNA, 186 bp, Homo sapiens
  chr13:110790766-110790952
  hyper
aatccccctctcccgcgcccttcgcagcgcagccagggagggagggagcgcgccagagcctcctgcaggtgcgcgcggggcaggcgggcgggcgggcggcgcgcgcgcccagggggcccaggtgaccgccttccgcgcgcacacagccggccagggcgcacccggaagcccgttacccaaaggcaa

SEQ ID NO: 237181 - DNA, 764 bp, Homo sapiens
  chr13:110958728-110959492
  hyper
ccttaggcagcagtcgtgggaaagctcagatacagctgtttccaggcaaagggcccagagcttttcagcctcagccaccagggtctccagacaaggagaaatacgcccaaagctgctcccaggggctaggagctcggagctcccagtgtgggtctctgagcagcgcggggtgggcgctcccggccctccagcccccaactccctcgcgcacccgggacgggtgaaggcgcccagctgccgagcatacccgcgacgcgggttcaaatcccgccggctcccaggcaccctcaccccgccacagcgcgggctgtttctcctcccttccccggaggaattccttaactctccagtacccataccataacaaaggaggctcggtccaccaatgcgcgatcgtagcctacagggacccccaacgaaccccggcccagagaatgcacctggccgtgccacgcgcgacccccgaggggcaggcggacgggtccaggcgcggacaaaggggcctctcggggcgcccaagctcggggcgggacgccgggagcggagctggccgggaactcaccttcgcagcggcccggctgtgctcctcgtggagcagaagggcggcgggcagcagcagcagccagacgctgagccggggccccatggtggcgcgcccgaggcggcgagggacggctgcccggcgtgcgggggccgcggcggacagctagctctcggaaggccggacttccagcgctacgcaccgtcccgggtgcggcggctcc

SEQ ID NO: 237182 - DNA, 136 bp, Homo sapiens
  chr13:110959972-110960108
  hyper
gtagaaagggggagggtgggagagcgaagaccgagctcctcggccaaggagcacccacaggggcctaacgggaggctctccttctttccgggtcgtgggggggacggccctccggtcacccctgcatgcgggccgc

SEQ ID NO: 237183 - DNA, 716 bp, Homo sapiens
  chr13:110960468-110961184
  hyper
cggtaagtcctggctcccgcgcttggacttgcgcgcccgagagtggttgggacgtttgagtggccttggagaaggcagctcgtccgtgcgctcccgagtgtgtgtgtgcgtgtggatgttcgccaggctgcccaccaaggttctgagaaagcttgctcttccctcatcatgctttccacctttccttccccttgggttcccagcgtcaatcctgtgttttgcaagcgtcggcctttcacgggaactgggaacttaaaatgtagcctgaggcaccgttttcgttgctttgggcaaagctgcagccgtagaggccaggaaagtgtgtcagtcactaggcagtgagacgccaggcttagggcgaaaaaagttttcctggaactcgggagctggtggggagtctctgtcacggactgagggttttttgtgtttttaaatgggagtctctgggtaaaggggcggggcgaggaggcgaacgagacaaccttagtattgtttgaattgaagcattgcgagggaacaatggcagaaaaaccgcgttttctcccaagtcctgttccggccctggaagagctgctccgggcgccacactgggatcctgttcgccgagcctgcccctccacgccggccgtgcacagccctgccgataccgtgggtgcagctggcgactgcactgcgaggctttgtccattttatacgttttgtttaaagagtaggag

SEQ ID NO: 237184 - DNA, 241 bp, Homo sapiens
  chr13:111213552-111213793
  hyper
acgagtgggaaaccccgagaaggaggcatttgctgtccgaggccgggaccctgtgcgcggccgggtgccctgctggaagccccgcgccccccgtccccggcggagccccagggcggtgtggctcatgcggcgccggcctcacctgcggtgtcccagatggagatgttgtaggagcgccactgcttcaggtagaaggcgccgcccaccgtgctgaccgtgtccgggaagcgccgctccatat

SEQ ID NO: 237185 - DNA, 89 bp, Homo sapiens
  chr13:111214033-111214122
  hyper
gcgtgtgcgcgcccgggaaggagctgggtgcagagcacggagcccacgtcgggggcccggaccgcggcggcctcgcctcgccccgcccc

SEQ ID NO: 237186 - DNA, 78 bp, Homo sapiens
  chr13:111267965-111268043
  hyper
ctgtggggcaatccgggcttgcagacgaggtaaggtcgattccatttggcccggggatggtcacacgcgcgggggccg

SEQ ID NO: 237187 - DNA, 58 bp, Homo sapiens
  chr13:111268659-111268717
  hyper
tacagaccctgcacgtccttggacgagagggactggatattgcgacgcctgggccgca

SEQ ID NO: 237188 - DNA, 150 bp, Homo sapiens; identical to SEQ ID NO: 203457
  chr13:111358789-111358939
  hyper

SEQ ID NO: 237189 - DNA, 251 bp, Homo sapiens
  chr13:111365469-111365720
  hyper
ggggcattactcacggtctccccgcctcctcttcatcgtgattgggctgtcaaagtgatgttggcaagtagattggctactgcggttgccagttctgtttcgggccctacttatactgctctgtggggcggggacgaagagtcaggggctgaggagcgagttgcggtagttgctgtgtaccatggtctcggaggtttctgtcccgcggcccgttaggtcctggtcgggttttcagcgaagcaggccgctcc

SEQ ID NO: 237190 - DNA, 107 bp, Homo sapiens
  chr13:111527014-111527121
  hyper
tcccaaccacggcctcgccccaaccttggctgcggttccccaagcagagccgcgccagaaccgcccggctcacccccctctccccgcccctgcgcctctctcccggt

SEQ ID NO: 237191 - DNA, 1719 bp, Homo sapiens
  chr13:111766866-111768585
  hyper
tgtcatcagttgttcgaggaagctcgcgcatgacgcgacacttgccgtctgggctctccaggttcggcctgctgctttcacagcccagatcttcggcgtccccgagacgcagccaggcgcccggcccggcccggcccggccctctgcacagccccacttcaggccacgccgtttccttgaccttcccccggcagggtctgaagcgtcaccgtccgtctagagcagagtcgcgcaggcccctgccctgccggtgaggtcggcgccgcgctccggagagtcggttcctcccgattcagacccatatggcttcagatggaaccatcatttctgttccgtcatgaccggcttgcaaggtagcaaagcgaaacaaacgtctcgttttcagcctgtccccgccaccttgaaataaaaccggcaaaaataaaaagagcattctgggaagtacttcatcatttcaacgctcacgaattcaaaacataaacaaaggcttccgagtgccccggccaggggcgcggggcgcacggcgggcccggggcaggtaagcgcaggtgcgcgcccgcccccacccccggctccctccccatccgctccccgctccccttcccctttcccttccccgcccgctcccagccgccgccgccgccccgcgcacggcctggagcggaggctgcgcagggcgcggggcggcgcgggccgggcgcgggccgggcggacggccgcgtctttcttctcctggcggtgatgtcattgggcgacggcggccgaggccggggggcggcggcgggcgcccgcaggttcccgagccgctcctgagaaggcgcctgacagcgggccggggcgcacggagaagcgggccgggccggacctgctgggccgcgccgagccaatcgccggcgccggccgctcgatgggcgaggcggcggcggcggcggcgggggccgcgggccgggccgccgctccgaggtgaaggcgcgcgcccctccccgcctgcctcccgggccgcagcgatgaattccgccgagcaaaccgttacgtggctcatcactctgggggtgctggagtcgcccaaaaaaaccatctcggacccggagggctttctgcaggcgtcgctgaaggatggggtggtcctctgcaggctgctggagcgcctgctccccgggaccatcgagaaagtaagtcccggcccgcgcccccgcccgcgccccccggtccggcccgctgcggcccgggatgcgcgcggagcacctgaggccggccgcgctcgggaaacccgtgcgccctcctttgtgcgcggagcggcggcgcggccggcgccaggaccgtggcgggagctcggggggcgccattgtgtgcggggcagggggagggggccggggagcggggtcggggggaggggcggcgcgggcggcgggggtccccgggaaggagagtgcaccgcagcgaggagacggggcttctgcgccgcccgaacgctaagttgcccctccgcgtggggggccggccccgctccctggcagcagccgcatcggaaaccgcgttccgacgcggtgcggctcactccgctggctttgtgtggacagttcttgccggtggcgttgcgtgagtttcgcctcccaggttaattgaccggttgctctgtatttttaaagaggcacgcatctgtagctgagggctgcgctgtgaaacgatctactactttcccctcgagaaaattcccca

SEQ ID NO: 237192 - DNA, 84 bp, Homo sapiens
  chr13:111806516-111806600
  hyper
aggtggcggcgcgcgggccacccccagggcagggtggagtctgcgtgtggaaccccagacattgctctcgttccagtgaggaag

SEQ ID NO: 237193 - DNA, 293 bp, Homo sapiens
  chr13:112707800-112708093
  hyper
accccgcagccacgcgcgggcgtaaatcgttctcagcacgagaaacacaaaggccgcaggatcccgcgagccgcagggggttggggtcatttttttgatgccgccgcccttaagagttccagtccttcaggcgaaaggggcagatcaggccttcggggaggacccttgcctgggagagggagggcagtgccccaggggccgcctccggtgcctaaacaaagaagacggtcttctgagcgtccgccctccccgcctcgccgcgcaaggaccccgcgctcctgggccacttcctc

SEQ ID NO: 237194 - DNA, 37 bp, Homo sapiens
  chr13:112710206-112710243
  hyper
attcaggagcccgtcgcagagcaatatttaaaaaggg

SEQ ID NO: 237195 - DNA, 248 bp, Homo sapiens
  chr13:112710423-112710671
  hyper
gacacgggacgggaggggggtgacatcctcccacccgggggttagaaaaggtccgggtggtagttccaggcgaaaataggcagccctctgtgatgacagaattgacaactattttttgggggggcgggggttggacttccgagtccctcgggacggaggcgcaggggagcaggaggggtgccccgtccctgcagttgcctcggcccgaatcccgcaggccaggccggaacgcgggggcgggggcgcgg

SEQ ID NO: 237196 - DNA, 519 bp, Homo sapiens
  chr13:112711185-112711704
  hyper
gaccggggtccgagatctgcgtcgcgctgggcacgctggccacccggtccggaatgagtcggggctccgggaggtgcccgtgggcagagcgttaggggcgcggccgtgccggacccgccctggggacccgctggagctggaggaggaactaactgtaagtgtgtctcgaacttgcgcgggggcttcagcccgcccggggctgcggagctggccggtaaaggctctcgggagaggggcgcggtgtctccacggtgactttccgtgaaggaggatggggtgtctccgcagctttggggccccaggaaagaacaggtgggtagatgtggtggccacggctagcggactcgccgcggggcacatttgtcattttcttatctgtgcgttcactcctcccccatcctcggcttttgggattggccgccgcccaacggacccagactgtttctctctgggtcgccatttttggggaggggggagggaggtcgagtctgtggatttgggggagaggttcttgtccgc

SEQ ID NO: 237197 - DNA, 583 bp, Homo sapiens
  chr13:112712304-112712887
  hyper
cccgtggagaggaaaggtcacgaagtttcaaaggtgaaatggattttcggcggtggctggtgcgggagtcaatgggcagggcggggcaagcctggcagtcatcgacccgagcagggacccggctggccgcctccccttgcaggaaacaggtgtttgaacgcgatagcggccgccagtcaactaaggcattaaaagctcgctttataacatcgatttcctggagtgcggtggggcctgcgttctggaagctcgtttgtgaaaggcggggttgggggaattgccctgatggtaccccagttggcgcagaagatccccaaaagtccctgtcaccgcagcggcggacagcggggctgcccaggcggctgggagggcagcttttccctcccgctggggtggaaagaggagtcctgctccgttccccacccaggacaatggtcttgttaccccggcctcctcccctgcacctagggcctggcatgcagagagcgcccgcagcagagggggaagtctccaacaactggcaggtgtcccccgaggagctccgcttgatttggaagggtggttaaaccgggatccaggagga

SEQ ID NO: 237198 - DNA, 1090 bp, Homo sapiens
  chr13:112715223-112716313
  hyper
ttctcctcaaaatccgaggctcgagaaccatctcctctggcagggtccagtctcagctccgcctcttgcctcctcacccacttgggcataacttttgcgggtcctagaaatctgggcagcagaagagggaggggaacgctcccagccggcagccgctctgggcgtgcacccgccacgcgaagccagaggttggacgacgcagccggccaggcgcggctcccgggggaccccgaaaccgcctgtggctcaggccctacttggcaagaagagactggggagtgagaggaggggtcactcttgctctctcgcacaatagacttcccgcaggcgagtgcgaacggccttttgcttcctccttcttttccaggacccttagcgacaggagaggaagagaagcggcccggcggtttaattgccaatttcctgatgcagccacagggcccagcagcggctcagcctaggccaccgggtccaggcctctaggcaataggcccggcgccccctccaagcaccgtttcccgccgaccccgcagtcatcactgtgagctcgagagtatgggcagcctgtggtgccctgaggcgccgggcgctcggcgcatccgccgtgcccacagcgctgaggaccaactagggctgccctcggccaggggcactgtgcccgtttgagtggcactcggacctggcgaggggtggaagcccaggtagagctcgcgtctttaagagccacccgacagaactgcgcgctacatctgcgccagctgggctgggtgggaacagcgcagaaatactcccgtgccggggcgtacagggcaggtaggcccagcagagagtcttctcggaaagtttcccacaaaagaagggccgggcaggccgagcggcaggaaaagccggtgctcagcggcgaggcccgagaggtctggcatccggcggcctcccagctttgctcgggtctcccgccgcctctctccagagccgcccgtagctccgtggggcggagggcgcaatgccccgctctggttccagcctttttcctccccttgtctcctctttcattcataaacctggtggctacagacgcagcttgaatatt

SEQ ID NO: 237199 - DNA, 189 bp, Homo sapiens
  chr13:112716639-112716828
  hyper
cgcgcgtgcgcgcgcgcgcacacacacatacacacacacagttgtttgttcttcgattgtgaatgtgcggctctccacacgaaccgcccgaaagaaagcctgggtcgcttttgaggagaaggagtttcttgacccttccccgcaaacgctactggaacggcctccaaactaggacgcctagtcaggcaa

SEQ ID NO: 237200 - DNA, 851 bp, Homo sapiens
  chr13:112717125-112717976
  hyper
cgagcgccctggagcgccatcacccgaacgcgcgctccaggccctcgaacaaggcctctggctgccagagcgagtgaggggcgcagaggcggcagagagcggagagccccggtgtctccgcgagggcggcggcggccagcagacggcgatcgaggcgcgcgccacggcacggccagcgcagacacgccgcggggtctcgggccggagccgtgcagccgggcccgctgcctctttgcccctcatggctccgcgcgggaggaaaccgggccttctccgcccgccctcctctcgctgcggtgtccccagcacccccgccccgcccccgcgcggtccccaccgtcgcgctcccctccctcctcgccctcgctccgcgcctcctgttggcagagatggcctcgaaggcctcttccaatttgaatggctctttcttcttctctctcccgcgctttcttttccgccttctcctcctctccttctgactactcttgtctctttcaaaagctccgcctggaaactagcggcttcctcttcatctgcctcctttaactgtggcctcggccctctggggcgacaccagagcgcggaagcctgagcccctcggagatccggggaggcacctacacatggcctcaatcctccaaccggccccagaagccgtaggagctgaacccaggagggcaaccggttgtggtgcggccacatgtccctggagagtgtcagcaagacgggtcgacttcaccaggaccacgaaagacagggcagagtttctgtcttctttcactgtcccgtagaactcctagcttgtccatcgtgctccttgcttgggactcgggactgacactgggccagaa

SEQ ID NO: 237201 - DNA, 2186 bp, Homo sapiens
  chr13:112720053-112722239
  hyper
gaaaatctctttcacgttcccaaatcaaagccactttgaggtttaagaatgataaccacaggtgaatgccttactctttccacgagccaggcctttcctttgcatgacgcagaccggcggctgagacccgtcctgaggccccgcctttcattcggtttatgtggccccgcgcagttcacgcagttttctccgttcttaggcaaccagctcgtgggaaattcactccagaaaagcgtgcgccatatcattattttgcgattcaacaaactttttcaactgttgttcaggaactagattccagatagatcttgttgtgttcggccttcctagaaattccttttccagaggaagaagatccgggttgggaagagtgcgtgactatggccccgggctcattgaaagactcctccccacaaaagtttagggctgatactaaacgaagctatggagccatgcccacacaaatactccccctttacccgaattgtggggcctggactgtgaaggccttcgctgcaagagcgggcactggcgaacttcagtgcacgccgcggccgagaacggatgcagggcgggggatggctgagccgcctgatccttgcagagaacctgcaggggccctcggagggtatcccctgcgtccaagggagcgcccctccttttcagcactcgggggaactgagggcgacgtgccagccccgcactcaactttccccttccctgcaggcacagagttggccggcgggggcagaggaggagctgggtctccactgcgcccgtttaaacctggccaggggctgcgtttcctccccccaccccacgacgatcctttcttagtcttcgcttttcaacccaatcgttaatcattcggaacgcgcgggcggggagcggcgaggagggcgagctcggggttcgccgccgccgccgccgccgcgcgcgcgcgctcaggaagcggtgtggctgtcaccccctcccgggcctcctcccccctccttcctgctttgctccccctccttcctcccctcctccccgctccgccgcccgcgcccagtgtatctactccctccccacgtcactcgccagcgcgccatgcaaatcaccgccgccgccggctcccattggccgcggcgcgctcatttaatggcagcccgggcccggcgtatggctgctgggccccgcgcgccgccggccccgcgtgcgcctccgctccgagcgcacggccccgggcaggcagcgggcagcccatcccgggctcggcggccccggctctccggccctctccgcgagcccgcgctcctcccgctgtccccgggcccctccctggctgcaccgtaatcgccccctgcaggcccccctgcgcctccccccccccgccactggcgcctggcttcccccgggcacctgggaccagcacatgcccagcgcacgcggcgcgccgccctgctagaagttgcagcctccgagttggaggccgctgaggaccgagcgcaggaggaaggagacagcgcgcagcggcggccggcgaggagacagcacaccccgggccgggcccagcgcaccgctcccggccccaaaagcggagctgcaacttggccacgactgcacctgtttgcaccgctccgccgagggcgcctgggctgcggtggcggcgaagacggcgaccccgaccgtcggcctctttggcaagtggtttgtgcatcaggagaaactttccacctgcgagccgaaccggcgccgagtgcgtgtgtttctgcctttttttgttgtcgttgcctccacccctccccattcttctctccgctaggacccccccgcccccgtctcactccgtctgaattcctctccgtctccctcccaccccggccgtctatgctccaggccctctcctcgcggtgccggtgaacccgccagccgccccgatgtacagcatgatgatggagaccgacctgcactcgcccggcggcgcccaggcccccacgaacctctcgggccccgccggggcgggcggcggcgggggcggaggcgggggcggcggcggcggcgggggcgccaaggccaaccaggaccgggtcaaacggcccatgaacgccttcatggtgtggtcccgcgggcagcggcgcaagatggcccaggagaaccccaagatgcacaactcggagatcagcaagcgcctgggggccgagtgg

SEQ ID NO: 237202 - DNA, 38 bp, Homo sapiens
  chr13:112722959-112722997
  hyper
gcgcactcgcgggcgccgtgccccggggacctgcgcga

SEQ ID NO: 237203 - DNA, 366 bp, Homo sapiens
  chr13:112723177-112723543
  hyper
ggcgacccacgagctcgcggcccgcgcccggctcccgccccgccccggcgcggcgtggcttttgtacagacgttcccacattcttgtcaaaaggaaaatactggagacgaacgccgggtgacgcgtgtcccccactcaccttccccggagaccctggcgaccgccgggcgctgacaccagacttgggttttagactgaacttcggtgttttcttgagactttttgtacagtatttatcacctacggaggaagcggaaagcgttttctttgctcgaggggacaaaaaagtcaaaacgaggcgagaggcgaagcccacttttgtataccggccggcgcgctcactttcctccgcgttgcttccggacg

SEQ ID NO: 237204 - DNA, 250 bp, Homo sapiens
  chr13:112726392-112726642
  hyper
ctattaaaatcacgcgtgtgggagaacggcactcatgctcccgcgtttcattcccccggcaaagactgggcgccgcagatttctgtctccggaaaattccagttaattcaagaaacccatccccggacgtgtgcccgcccccccccgaaggctcgcttcaggccagcccggactccagcgccccctcgaccccgtcgggctccggccgactcccgccccctccccacccacgctcggcctgggcccgggg

SEQ ID NO: 237205 - DNA, 148 bp, Homo sapiens
  chr13:112726822-112726970
  hyper
ggggtggggcggcgtcaggacggagcgagggccggcgggggggctcgcgtggaggcccaggccgggaggtggggacgcagggacccctcacccagtcctctgctcccgcccgagccaggcctcgggatcacctccccttgcctgaggg

SEQ ID NO: 237206 - DNA, 105 bp, Homo sapiens
  chr13:112727510-112727615
  hyper
gcacgagtctcggggcggcccgcgctccccctactagtcccctcattgcctcggccccgtccccgcagcctcggggcgggagggcgcaggggtccccgggcgccc

SEQ ID NO: 237207 - DNA, 77 bp, Homo sapiens
  chr13:112727795-112727872
  hyper
gcggaacgagcacggctcgggccggacggcaacaagtgggcgcgaagggagggggaggggaggccgggtaccggccg

SEQ ID NO: 237208 - DNA, 153 bp, Homo sapiens
  chr13:112728052-112728205
  hyper
cattccccggggccgcttcggctgctcctctggagggaagactggggagaaggttgcctgcgctctctgccccagaggctctgttttagaaactgtttcttaatttccataagaaacaaaaaaatcacaggaaggcctggttcctctcccgga

SEQ ID NO: 237209 - DNA, 122 bp, Homo sapiens
  chr13:112728785-112728907
  hyper
ggtgacatgggggcgctgtgatggaaaatgggttctgggttcaaaatcaagccacagaacgctgcctggcgagttgctaagtgtgacttgtggggaaatcgtgtctgcggcagaaacactgg

SEQ ID NO: 237210 - DNA, 810 bp, Homo sapiens
  chr13:112758026-112758836
  hyper
ccgcgcgcttggctcgaagaccccgccctgggcaggggacagaaaatatgaaatcagatggggagttatgaataactgtcctcccctcccctctgccgtgtttcctgaatccgtacgctatgcaggaggggggcgggggcgggggcgcggggaggaggagggggccgtttgccattaatctgggaacaagcggctaacctcggtgactggtattttcgcttttcttttctcacttttctcagtgtggggaaagcagtcaagcccgcgcggagcgattgtgaggggctctgctggaatttggcagcgcggaggcttggagagaagccccatgctggctcccattcagccggcccgttttcctcgagctttggaagtttcactcagccgtgcactcaatggcttcacaaagctgattacaagcttcagcgcattcctgaaggagccaaaagcgacgcaggtgcaaacgagccgagggagccccttatcccggtgacagaatgggacaagctgggaaaggcttagaccacacaagtccaaggctcaccaggccgcagaaagcctgccttgggaaccgggggtcattatccgccctattcagcggggcccggggaccctgggggccgagcgaggccagcccgggcgggagcaccgccgccagcgcgcgccggcgacaggggggaaccccgctgggcgctgcggccaggccggggctcagggcgctgggctgtgcgtttgcacaaatctgtgttccggcgggccggtgtcaaccctagtggggacacgggagaaagagcacgccagtaggccacg

SEQ ID NO: 237211 - DNA, 2235 bp, Homo sapiens
  chr13:112759142-112761377
  hyper
ggagtcattaacttcgtctcctcgtgctcagggaccagcaacttggtgctgcgggcgccagaaagaaaagggtagcgcctcgcggagcgcgcgggggaagagggactgcggcagcgggacgcgagggcgggaggggcgcagcagcggggagccggagcgcagcggaggggagcgctggggggcggggagcgctcgggcagccaccctgtccccgtctggagccccgcgctgcgtctaggagggcgcaacacgcagtccccgcgggggccagagctcggagccccctagtgcatgccccctctcctcgcgccctgccgaggcctcggccctgcctgccgtgccctgggcctggttgtgcccgggggtccccgcgggcagggcgcggggcaggcagggcgcgcgcgccgacgctcttttgtctgataactaatttgagttaatgcgatctttatgtaaagctaacagcggataattgtctattttctcgccaacagtctccatcacaatcacttatctggaaacctgcggttggattaatcgttatattcccgagatgagcgtcgctgcaatccgcagcgaacgcgggtagggacctggagacgcctcccgggcgctggcggggccggtgtgggccagctccgctaccgcctgagacgcggtgtgcccaggtgttggtgcccgcgggagagggctgtggggcgccttccccaggatttgcttgacttgcttttcgctcgagtgggtggtgcgcgggtgcgggaggcggagggaggaggaggggtgaggggaggagggcctgtggggctgcggacccggagcagcctgggtggagcgcggcctcgggaggccctgggtgcatcgcggcggggcctgggggggcccaggcgccggaggagccgtcggtgccggaatgcagcgtgtttcacttgggagaaacgttgccctcggtcccttgcctccctcctgttgtctcggtttttctggcttcgtccttcgtcccacccacccgttcccacctcaggtccctcccccaggatcccctccttaaggatccaggtctctgaaaattattggcaacagttacacgccccacgattgaaatccacaagagaagagtcccagttctgcaggccgctccagggctaggggtagagatggtggcaggtggtgcgtcaactctctagggaagaggaacttgcattacaaagacttgtctttctgagctgaagtcaaaacgggggcgtcaagcgcgctccgtttggcggcggtggaggggccgcgcgcccgcgctgtcccagccggagctgccctggctggtgattggaggtttaacgtccggaattcaggcgcttctgcagctcagatttgccggccaaggggcctcagttgcaacttttcaaaatggtgtttctggaaaataacaaattcagactcaactggtgacagcttttggctatagagaatgaaactgcttccctttggcggtggaactcttaaacttcgaagagtgaaagaatacaatgaaataaaatgccataagatcactggatttttcagaaaaaggaagaccccaaattactcccaaaatgaggctttgtaaattcttgttaaaaatctttaaatctcgaatttccccctacaacatctgatgagtgctttaagagcaaacgagcaaatcccacctcgagaatcaacaaacccaagctctggccaaggctctccccgcgttttcttctcgtgacctggggaatgtcccgccccatcgctcacctggctcttgtcatctcgctcatcttgaagtgacccgtggacaatgctgctccctgccgcagctccgccggtcactcaggcagaacggggtatgcaaatggcctggagaggccgaggccgaacactgcgcccattgtcccgggcgctcaaagcgccgagcagctgcgcagactttctgggctcggaccctcggccgccacgctaatgtcatcattgcaaaacatcagattttgagaactatgcagtctgaattcattagcagccttctcggcgaaggttcttttccccgtgacaagtttcaaagtccagaccccctccaacgttggtaggggtaggaagaggaggaggggcccagggaggggggtctttcgcaagtggggcctcgggggatccctgctctccttctggtgcattccgcaactttaaaagccttccttggggttctgagcgcggatgtctgacttg

SEQ ID NO: 237212 - DNA, 100 bp, Homo sapiens
  chr13:113295149-113295249
  hyper
cccttgggtgttcgcgggcctgggcacagcgcgatgggaaacgcaggtgccgcccacccagtcggcagttccggacctgcacggccgtgcactctgcccc

SEQ ID NO: 237213 - DNA, 313 bp, Homo sapiens
  chr13:113547077-113547390
  hyper
gtctctgcagggtttctgcacgctggggagggcaggttccccagtggagccactccctgcgggtctgagtggggcccggggtctctgcacggtcaccgatgctgctgctgctccagggagcgggcttgcaggagcaaggatccagtccctgaacgcacgtgctccccccgggagaaattctgcagccaggcttggtccacgcaccgtcctcccggcccacacaccctcctcccggacctcagtctgtctctgtgtatcacatgcctgttcccagtgttctgacctcaggtgggcacggcgcggtggactgcac

SEQ ID NO: 237214 - DNA, 1127 bp, Homo sapiens
  chr13:113622876-113624003
  hyper
atccccggccagccacggacccacgcatggacccagcgacccacggacctgcttacctgggcgcggcgcgggtggcatgcggccacacggaaggggcgcgctgggctgctgcggcctctgcagcttctacacctgccacggggcggccggaggtaaagggaggcggcggccaggcgcggccccgcggaggcagctgcactcgctcggtccactcgcggcttcgcggctgcccgcaaaccaggagggcgtggagacccggaaccggggggaagggcgggggcacttgtgcggcacccgcggggctcccaggggacctcggcggtgacacgaatttctaggtgaccttggcggtgacacgaatttctaggtgacctgtgtgatacactaggtgacctagtgacacaggtgacacttccaggtgaccgcggcggtgacccgcggggctcccaggtgacctcgttggtgagccccggggctccccgacgaccgcggcggtgacacgcggggctcccaggtgaccccggcggtgcactcacaggactcccaggtgacccgcggtggtgacacaccggggcgggcgcgcgccgcttccgcttccgccgagccgccccccgccccccgcggcgcagcgcgcgcccccctcccggtggcgcggaaccaatcctgggcagggaggcggcggctggaggctgaaagcgctgccgtggccccctccccgcctccgccgcgccccctccgcactcgcacggccccacccgcaggcgccccccgtgcggaggaagcggatctgccaggatcatttttgttgtgtcggaggatgaggttttggctgaggactgaagagatggccttggaagaaatggtgcagagattaaatgcggtttccaagcacacgggtaggaggagctgctggccgtcagtgatctgtgcttaagcttgacatcatgggctgaaatgtggggaaatgcgtctgatttttgtaagccgccctcgtgttcctttctagccgtggtagctgtgacatggggggcactggttggcagctggtgtgttttcagaggctgtcggcgatcgtatgctgcccgggatagtcaaaatgactgcacgttggtgacactggctctctc

SEQ ID NO: 237215 - DNA, 87 bp, Homo sapiens
  chr13:113683950-113684037
  hyper
ccctcttcccaaggtgggggcggggctgccctctgctggagacgcggagcattgcggctcggtcccgggacatccctgggagaccaa

SEQ ID NO: 237216 - DNA, 662 bp, Homo sapiens
  chr13:113807345-113808007
  hyper
gcgttcagaggccgcgctgcctgggtgctgagccgtcccggggttcacggtcgcagtttgtccttacaaaacgcccagccgccccgacctgtggtgcttagggaggacctacctggctgtgccggtctgagaaggggccagtgaggcccggtgcgggtacgggcgggtgcagatgcagccaggaggacgggcgggagcgggggcctgtcccacacgggggcctcggcagcaccggcatggctggaggccagtacggccaggtgtggcgggagggagcgccgtctggcttgggtcgtccatcctgacaggacgctgcaagggcaggagccccgcgccccgtgtcctgcgcccccgctcgaggacaagccccagccgccggtctccgctgggttccgacaggccttgctgggaggccttgctgggagctgggggtcgaggctcacagactgcgctgaccccagcaggcacagctgggtccagggactcgggaactcgcagcctgacgcgggccggacccccggggtgggtgctgagggcctcggatgccctccctggctggacgttgtggctgtgctgatactgagcggtaaccctaggaaggagagtcccctgggctcagctacccgggacaaggtcaacagggacaccggccccagttccag

SEQ ID NO: 237217 - DNA, 313 bp, Homo sapiens
  chr13:113862929-113863242
  hyper
taatggtaatgtgcgccatgggagcgccgccgaacggagagcgccaccccctacgcctcaagcgggccagctggcgtcacttccggccctcggtccgtctgggtcctggcgcccccggccccgccgcgggtgcgcaggttggttccggagggagaacctggggaccggctcggcgacgcgctcgggctgagggggcccggggtctttctgccggggccccgtcctctcagccgggacgccagcggctctgattgtgtgttcgggcccgcccgggctgaggggtttggggtccagtggcgaggacagccccacg

SEQ ID NO: 237218 - DNA, 188 bp, Homo sapiens
  chr13:114017782-114017970
  hyper
gcgctgggattacaggcgtgagccaccgcgcccggcatggatcgagttttgatccatcccgatatggctccctgctgggagggacgggtctccttcgcgtccgacccgccggcccatctcaaagcgggaaaaccggtccctgcggctgccctagctcggagcccgcagcttcgtcccgacctgcccgg

SEQ ID NO: 237219 - DNA, 318 bp, Homo sapiens
  chr13:114018150-114018468
  hyper
aggtagctggagaaaaacttctcgtaggcggcgtcgtcgaagtcctcaggccgctcgaatccgtacgggtcgatcctgcaaaaccgagagaaggaggccggcgtccccgaagtttcctctggggggtcgcgggcccgcgcggggaccgcagccgccggggacgcccgcaccccgcgccacacacctggggacccgcgagcgctcggcgggctgcatgcggggagggaggcgcgcaccgagcgaggccagcgggtcccaagttcgcctcccggctccggggcgcttaagtccttccggcgggaccgcgggcgcgtgggg

SEQ ID NO: 237220 - DNA, 202 bp, Homo sapiens
  chr13:114145958-114146160
  hyper
gcctaggcgctcttcgctgaggcccacgttctaacctggaatggaacctgcgttcccaccctggccgcccgggtggactcggggcctccagggccggccgcagagatgcagccctgtccctggcccccctcctgtgactcctaacggctcctcacggtgtccatgacccagggtgtggacgcctgcgcgggggaagcaagac

SEQ ID NO: 237221 - DNA, 210 bp, Homo sapiens
  chr13:114565970-114566180
  hyper
ggggccagcaccgtcgggctcctgaaagcacccgctgcctccaggagagcacctggcagaacggggccgcggagccgccctcccctcccgcatgcggccccgctcgattcctggaatcttatttttggacctgctgccgcaagcagttcccgccctcggccctttcaattcctctttcgggaggggactgctctccacccctctcaggag

SEQ ID NO: 237222 - DNA, 138 bp, Homo sapiens
  chr13:114566904-114567042
  hyper
gacgcgcggtcagagcgcccgggaggccgaggcgagccgcgggcgccgcggggcggaggctccggtcatcccgtcctggcggccctgaaggtcacatcgcggcggcggcggcggcggcggctgcggcacctcaagcgc

SEQ ID NO: 237223 - DNA, 121 bp, Homo sapiens
  chr13:114927748-114927869
  hyper
tttgtccttgaccacggcatcagctgtgctgtctacagaaggaactatattattcccacttaaatagctcggtgtttcgtcaagagagtgcaaacacgagggcttcggtagagggaggaga

SEQ ID NO: 237224 - DNA, 313 bp, Homo sapiens
  chr14:20773921-20774234
  hyper
gtaaccacacagacgcacgcagcttcgcgtgtgtgccgaggaattcacgggcagtacataaactggactccctgcttcattcggagtaacaaaaacacatacagaatttaatctacggccccacctgcaatttctgcaagatcggcttgacttcttcctcttcatcagccatcatctcccggccactccacccccaactttataaccacagagacgcacgccctctctcaccgcggaaccacagcgacatctggcgttctggaggcttttctgccccagaagggctttgcttcaaaccgacttaaccatttat

SEQ ID NO: 237225 - DNA, 418 bp, Homo sapiens
  chr14:20811405-20811823
  hyper
tcgcgcggagccccgttctctgggaactcacctccccgaagctcagggagagccctgttagggccgcctctggccctagtctcagaccttcccaagggacatgggagtggagtgacaggacgcactcagctcgtggccccactgatgagcttccctccgccctatgggaaaaagtggtctcatacagaacttataagattcccaaatccaaagacatttcacgtttatggtgatttcccagaacacatagcgacatgcaaatattgcagggcgccactcccctgtccctcacagccatcttcctgccagggcgcacgcgcgctgggtgttcccgcctagtgacactgggcccgcgattccttggagcgggttgatgacgtcagcgttcgaattccatggcggcgcggcggcgacggag

SEQ ID NO: 237226 - DNA, 87 bp, Homo sapiens
  chr14:20922851-20922938
  hyper
tgggagaaaacgccgacaggactcctggcaatgtcaggagctgtggaggtcctcactagtccgcgctgggccgcagctttccggagc

SEQ ID NO: 237227 - DNA, 239 bp, Homo sapiens
  chr14:20929632-20929871
  hyper
cagtggcctgccccgccccgttccgtctagcagcacgtgataggctatccccgcccgggtcatgctattattcgcgtagataaaccaattcctggtcctgtgaaggcagctctccttttccattggggagcgacgcacaaacgtcaactgtcacatgacctgccagatgctgctgggcttgcaaaacctgcacgtgactagaggttctgcaagctattgggagcgacgcccatcgcgct

SEQ ID NO: 237228 - DNA, 407 bp, Homo sapiens
  chr14:20937480-20937887
  hyper
gacagggccggcccgcgtgctcgcttgccattggctggggactccagggcaagggatataagccagagcctagaccagtgagccaactgtgcgaaccagacccggcagccttgctcagttcagcatagcggagcggatccgatcggatcggagcggatcggagcacaccggagcaggctcatcgagaaggcgtctgcgagaccatggagaacgggtgaggagggcaccaggcccgcaggacccttggggaggggcaggtgctgtgacccgggaacctggcacactgggcccagagggagctggcggagggagcgagcgcccaggggatgcagagaggcctggcactgagcctagtgtcgggagcaaggcggcagagtcatgcggcagccagcgcgggcagggacgca

SEQ ID NO: 237229 - DNA, 86 bp, Homo sapiens; identical to SEQ ID NO: 203476
  chr14:21093067-21093153
  hyper

SEQ ID NO: 237230 - DNA, 258 bp, Homo sapiens
  chr14:21093455-21093713
  hyper
attttgcacttgtacgctggggcaaaatgctgacagaatgaagaaggtaattgcaaactcctataacgtgtgtggtagtgtggccgagcggtctaaggcgctggatttaggctccagtctcttcgggggcgtgggttcgaatcccaccactgccagtggtacgttttagcacaacaaggatcctgaagtactaacactttctaactagtaaaataattaaatcttcctttcccaggattctcccggattacacagcat

SEQ ID NO: 237231 - DNA, 753 bp, Homo sapiens
  chr14:21098604-21099357
  hyper
accttaaggatggccgtagttggaaattcttagagtcctccgctctaccaggtgagctatcggaaagtgtctgtgacattcgttagcgtagatttttgtgcattgagtagcggctggtgagactcctgacttctttgcatttgggctcagattactgttcaagaagttccagagagccaggtctatagttaactgagtcccgggagcagccttgaggcagtaggaagtgagatctgagtcggaggtagtgagaatggaaacagagcagaagccaccggcttggggtgaatctgcatagcttctgaactaggctgccctcagagtaatctgcgagccagttttcgccccaggagcgcaggaagggaccaccaggcaggctacaagtggagaagtgcgcaggactccgggagtcatggctatcagcagattagattagatctgttccccacaaacacagaggtatggaccaagtgtaacatttttctcccagagacgtgaacagtctagtttcttcctcgcttactgcagcgtacaaacacctattttcccagtatcgttcataggatcccgacgctgtactttttcgtctcaaatccaggatctggctttcatggaaagatcataaaatgcttcctttcttcactagtttgtttcagcgttgaaaaggctaaaaagctcctgctcttttgcttgggaaaagtattcctacagccgaggccccagcgagatttgaactcgcgacccctggtttac

SEQ ID NO: 237232 - DNA, 714 bp, Homo sapiens
  chr14:21099779-21100493
  hyper
ttgctcatcaaaaacgaacaaacaaaccataaaagacatttaatatatattgttatcttaaaaacgcatgctccacgatacatgctccccagcttcaggcttgacaagtcccaagtgccgagcaacatcagggtcagggtgcgtttcattacagaagagaatgcagtagtgatcagagaggttccccccaacccgcttggattcttagtccaactctcttagtctgagattggggttgtttttaaaagggaggcggctgtcttcaagcacaggacgtacccctcggaccttcagagtttgggggtggacgcagtgagggcgccaaggcttccagatctcccccagcctttcagcggagtccggcttggtcacagattcctctaagttacctgaagcagaggtggctagaaggggtccagcccttttcttggtcctttaacactcctcttcctagcatctcggagtcggaaggcagctccttctctttgggcctccaggcttttctaagcgccaacttgaagtccagaaagaataaaagtggcgtcgtcgcatgggaaggttggggcggaagagtttctcttcttttctctcctttggtgtcagcctgaccaggaggctcagtcattcactggacagctcccactggccgggagccagcttggcgcagggcaagcaatgtgatcaaggcagacactgatgcgccctggagaggtt

SEQ ID NO: 237233 - DNA, 449 bp, Homo sapiens
  chr14:21100726-21101175
  hyper
ggccaaagcacccacgtggagtgctgggtgctgtaggcgagaggtctgaggtagtggcttttagagctcaacatcttggtaatgttggttcgaccttttcccctgccagtcccgcggtgacctttatctttcggtgagtgaaatcggtcgttcgtgtttttcgtgggtcttccaaccacaggccgcctgagatggttctagtccctttgagtatacagacccttcctgtgcattgaccgacacagctcggcccggatcccgaaatgaacgtttctaccttcggaacgctgcgtctcggatccttctgaacccgcacgttgactttcctggagtctggagaaaatcactagattctaaaggaatcaaaactgttcaagtgttgtgctacaactaaaaaaataaatgaacactcttaaagaatagaatctctccagttctggctcgttggt

SEQ ID NO: 237234 - DNA, 88 bp, Homo sapiens; identical to SEQ ID NO: 203481
  chr14:21101235-21101323
  hyper

SEQ ID NO: 237235 - DNA, 41 bp, Homo sapiens
  chr14:21101619-21101660
  hyper
agaccctgaccgcgcggtgatccagccgcgggatggagtct

SEQ ID NO: 237236 - DNA, 155 bp, Homo sapiens
  chr14:21121248-21121403
  hyper
tacggcagctccttcgagccggaatcgaaccagcgacctaaggatgtccacaaatgtttctacaggctacagtcctccgctctaccagctgagctatcgaagggcgcacgtttctggggttgggtcattgatctttcagcaaatgcaagactcct

SEQ ID NO: 237237 - DNA, 107 bp, Homo sapiens
  chr14:21131529-21131636
  hyper
gttgattggaacccgccttagaagagaaccttgcgctggttgccaccgcgcacctctcagggtggagcaaatcctccgagtgtggtttcctcgcgtcccagagcgct

SEQ ID NO: 237238 - DNA, 33 bp, Homo sapiens
  chr14:21150420-21150453
  hyper
gacttgggtcactaaatttgattttaacgcaga

SEQ ID NO: 237239 - DNA, 42 bp, Homo sapiens
  chr14:21150633-21150675
  hyper
accagtaccgcctgagctccgcctcctgtgagatcagtggtg

SEQ ID NO: 237240 - DNA, 1320 bp, Homo sapiens
  chr14:21150855-21152175
  hyper
gaaaccggtccctagtgccaaaaatgttggggaccactgctccattccacaccctctccctcccgtgtctgtggacgtgtaagcggaagagccgagattgggagggaagcgcaggaagtgaggacatcagggagcccgggcctaagcctggaggcccgccctctccggcgttcacagttgcgcagtcagaattgtgtgcgtcccaccgcctcagcccccagttctccgacgcccaggtgccggtccccaccctacacacaaacacacgcatccacgctcgcgaggcccctgggtccgcgcccagtgaggccaacagccctcgggcgcccagaggatgagcagcctcggtatgcccgagtttcaggggcgcctgctctgcttgggagcccctcagtgaggcaggggaatccagatttagaaaggttgtcctcagaacctcggacgcaggactgtcttacaagctggctttgtgactctgcagtaattactttccgggtataaagagatttctttctttcccgtctctggttaaggatgtctcgagtagggatttttaggagagttgtttccgtgcttccttcgatagctcagctggtagagcggaggactgtagtacttaatgtgtggtcatccttaggtcgctggttcgattccggctcgaaggagacgctgctgttttggggtttacggttgctcttcgtttgtgcaaaaaatctctgtatcttgacgtgatcaaatctgtttctgtctctcacccttgtccgaaggaaacagcttagccgcgaggtgggctgcgttaatcgcgtcttgaaaagttggttacctttctgaaagatagtagacccgaatcgtcccaccgttgggggaaggcactgttgtcttaccgaagtgtgttatattttggcttctacgttaagtccaaaggccggcagatatatacgtatcgcgcgtctgtcctggggctcagtaccctacagccttgcaaccgagctcagctctggccctcgatctctatttcagccccctccaggttccctccaggccctagcgggcttaaatcgctccccgggctcagtgagacacaagcatgtgacctaaagtctaaaaagctgccttccttcaccccatcctgcatctggatcgaggagaataagccagagaataagccacacttgaaacttggtgaagatggaaggaataactaaataaggcctaagggaaatgtcacaacagaggaaaagaaacaaaacaaaaaaccttcagaacagcaggcggaaaagagaaattcagagtgataggaagcaccactcagctacagtg

SEQ ID NO: 237241 - DNA, 552 bp, Homo sapiens
  chr14:21152235-21152787
  hyper
cggacgagccctcgtggctactgtttttccacccccttttgtcaactactgaaaaaaagtctccgttaaatttgaaacacaaactgtctcgcgatgggctgtcctgccaaagaaagcagcagcgaataagtacgtggcagatggtgctgtcgaccagtgtcaagaccaagtttcatgggttcctggacgctcagccaggggtagtctctgaagggccgcctggcaattgggagcagaagccagtttcccgccatctgctctccgtggaggcagtgctctcgcggctgctgcccgttggggtccagctgaggaaggagcgcggatcccaggctcgttctttgcctgggctgcccctgcggcccctggggcgggtgctgctgcggcgccagctccaagggcggatccaggcgggaggggcctcctcggagaagcggggcgcggtcccaactacgcagaggctggcacgccgaccctccacacctcaccacgcccccatctccgtccgtgtacacacactcacacaaggacgccaaccccacctagatgcaaagc

SEQ ID NO: 237242 - DNA, 340 bp, Homo sapiens
  chr14:21341857-21342197
  hyper
attatcgtctacccgtgtcagcaaccaagaaacctgcagcctgtctcaaaggaaaccaagaaagaagttttggactcttgtgcaggaagcttgtggcgcggcgccccctgccgaccaatacgacggccacgggaactgggagaccacgaaggctctgggcctgcggagttgcccaagctcctccggcttctccggaaacggctttttccggtgacacccctggagccacagtgatttgtttccctaaaggaagcggtttcccgccagggtatcgtccctaataccctccgaaggagcccattgaggagaaaggcatagaatgtcccgcagaaggcagaag

SEQ ID NO: 237243 - DNA, 863 bp, Homo sapiens
  chr14:21439059-21439922
  hyper
acatccagccacctccgcaatggaaagctcgtggcatacagcaggcgctcattatttgaagcctcttcattctcctgcttcctcggtggttaaggaggcttttggaagttcaagtccgtctcagctaagaaccaggagacacggctttggtgcctctcggcccgctgggtctcggcggcgcagcgtcccctgccggccactgtggcggcggctggaatcagcctcagcacttaaggggccgcgcgggaggagttgccccacctccaggcagctctttccagagcagtgagggcaagtctggggattatctccataaaggaagcgaggtggctcggtggaggggcttcagatccccttcccaggaccctgtgacccgccatcggaagagagtggacctcattctatttcaatgtctgcatagtacagacatttgctgtgggcaaatcggacccatgagcccagagagcatcatcccgggaaagctttcccgaagcacaggcttccctgcaccaccatacacgcgcacacccgcacgcgctcactcccccagccctcctcccctccctcactcccgccctggaagaagcggggagctgaggggagaggtggaaccagcagagaaacgggccgggcaggagcccgcaccagcccggcttgggacaccgcagccgctcctgccctctgctggctggaaggcgcacttacacattgcggtcatcgcggatcgccgagggccgctggtgccgctctgccgccaaggacgctcagccattggagtagaagtgagagaggccgcgggctgagtagagaggggtgaggattccggaaaggaagcatcgtcaggaagcgctgaagttcctact

SEQ ID NO: 237244 - DNA, 159 bp, Homo sapiens
  chr14:21458483-21458642
  hyper
gctgccgcacgtgcggctgccacaggcactggctaacggtgcccagttattgctacttggtgagtaacggcgggaaagcgagaagaaacgggactggacctacatgcaagtgattccgcttttcgtctttggcccatagggagcgctgggcccactatg

SEQ ID NO: 237245 - DNA, 222 bp, Homo sapiens
  chr14:21492961-21493183
  hyper
ggccggtgccaagcgccccggaccttgcacacaacctcgcgcgcaccccaaacacgccctgcagctcttggagcctcagcctttgtgcgcagcaaccgagcgcccgctccgtgctggccctttcccccgagcctccagctccaggggacgcggatcaatcacaccgcccgccggcccggctggcgccttccaggccctacggcccctcgcctgcccctcccc

SEQ ID NO: 237246 - DNA, 64 bp, Homo sapiens; identical to SEQ ID NO: 203487
  chr14:21539066-21539130
  hyper

SEQ ID NO: 237247 - DNA, 685 bp, Homo sapiens
  chr14:21539343-21540028
  hyper
cttggggcgctggacgctggagggtacgctaaggagaagcccacaccaacaggagtgaacactgccctgggaactttcactgcagagtactctgaagcaccgctgcgagagtgggcactgccagagagagcgcccactgcaaagagggcgggggcatggccaaggggccgctcgctgcagagtggaggagggggagaggccttgccagggggagctcaccgcagggagtggaggaggggcaggggcactactggggccgcccctctacggagggaagggcaccctctggcagggaggctggaggaaaaagaaagaggaactgggccagggagagctgactcagtctctctggtctcctctctggtccccgccggcaggaggctgggtctccgtgctcccgcccgccgcctccctccccagacccctcctcccctcctgccgcggccgtttcctgtggctgagactctcgctcagccatgagctcaccgcccctaatgggttgcagctgcctcgctgctcaagccctagctccgcactccctgccttggagcagacggccccactctgcctcacccccgcccatctccaccttccccccacccacgcgcactgcgtccgcctggtcccgggaacactgggggtctgtctgctcgcccacacaccttggggccgggtctgcgcgctg

SEQ ID NO: 237248 - DNA, 61 bp, Homo sapiens
  chr14:21768995-21769056
  hyper
aaagtgtggttaatagatcacggtagatgaatacatattatagatcaattcgtgattatat

SEQ ID NO: 237249 - DNA, 112 bp, Homo sapiens; identical to SEQ ID NO: 203488
  chr14:21852940-21853052
  hyper

SEQ ID NO: 237250 - DNA, 301 bp, Homo sapiens
  chr14:21905266-21905567
  hyper
ggaagctgcaggccgagaggcccgacaagccctgaaggagaaaacgagctgtgcctcaccccagtggaggagagaggtggctttacctgcagtggctgtggggggccggttcgcccctctccctgtctctccagcaccagttccccctcctcctgcgcaacctaacctgatgctcctgcccgccccgcgccatcattggctgaagcgcactgccactcaccaaaggcgaaaagacgcaaaacagcgcaaagggtgggactataaggagctcccttccccctcccccgcaggttaggttgag

SEQ ID NO: 237251 - DNA, 168 bp, Homo sapiens
  chr14:21924475-21924643
  hyper
aaataaaatctggcggcggctcgcctctgacgactcagttcacaggcggccaggcccctcggcatctttttttgacccccgccattgggggcgctgtgaactaaaacaacacttagttacctacttctgggaagccatcttggctcggactccgggactgggtgagag

SEQ ID NO: 237252 - DNA, 64 bp, Homo sapiens
  chr14:21945161-21945225
  hyper
ctagcccagatcacgtctctattgcactccccggaatcatccttaggtcgggagtaccctacgc

SEQ ID NO: 237253 - DNA, 240 bp, Homo sapiens
  chr14:21979450-21979690
  hyper
cacgcggacaccccgaaggctaaccggaaaatgacccctggagctgagcaagacagaaaagtcatttccggtgtcgcgctttcttggaagctataaagagccacgttaggtgttggcagagcggccggtatagtcctcatacccgctctctcatgcttccggacacagtgaggctgtggttgccatgttggtgactggcagagcggccatgttgcttatagacgcgcatgcggccatgtt

SEQ ID NO: 237254 - DNA, 682 bp, Homo sapiens
  chr14:21994118-21994800
  hyper
ccaccgaaagtcttcgccgcccctgcgcatccccctccgcccccacccctgcccagcccgaccgaccctaccgcacctccgagctctgccggctccccgcagggcaccccgagacgagagctcctctcggattcgtgcgccatggttgtgggggaagtggagggccaggtggggtgggagacaatggatattgggattgagggaggcgatggccgctgggtctgcggcagcctctgcacccagcggcccagactgcggagatggagatcggcagcggcgggggcagggagcagcggcggagggggaggggagcgaggaggcggggagaagctggagtgagaaagcggggagaggggagatctgggaggagctgatgaggaggggagtttatggggaggagctgctggggagggaggcgggagctagaggaggcgggagaagggagcgctagcgggggcgtgggggcgggagctcagagctcgggagagtttccggaggcgcagtgacaggtgctgtgaagcactgcgggggtccacctttcccggtccctggccagctccccccatctgcagatgcctttgcccaggcctaccctcctccccccgccctcccctcctaagctctaggggcacagtgggaaacgtagccctgctcagtggagcaaggcgataggcttctctta

SEQ ID NO: 237255 - DNA, 226 bp, Homo sapiens
  chr14:22004962-22005188
  hyper
acccctccccaggcacccaccgttctcagacgcgctgggaccttcgcagtccgagattaactgttggggtttccgctgctttcgccgagacattcccgggtagagagttgggagagggaggggcaacgctcacttggtcttaaccggggtgacctggtctcgtctcccccttgggtccgaagccaattgatgcctctcccccagcgcaaatcactgtgaagcagag

SEQ ID NO: 237256 - DNA, 162 bp, Homo sapiens
  chr14:23057965-23058127
  hyper
tacagcaggtacgcgtccagcaacttcagacgctgcggagtggagctcaagtactcttctaagaaccgcgaaatgacagacactaccgacgccgacataactgcacgcaaggtactccagtccgcgccccaaactcttggaggacccgtcgaccacaccgga

SEQ ID NO: 237257 - DNA, 362 bp, Homo sapiens
  chr14:23066988-23067350
  hyper
gagacatctctgccgggacacatgccagtgattgaaaacacagcaagggccccactagctgaaaccaagttgcagagttttgagggtcccaccgccgaccgccggcccgccgcgagccctgccccctgcgcggccacgcccccttgctccccgcggcctcccgggtcagctggtgctggcgtcaggcgctgggcgggctcgccaggacctggcaaggcttgtttactatggccgatgatctggagcagcagtgagttaatcctgtccctttctctctttctctctctctctctgggccatgatcctgggactgtctgtggctgaggaacagttgtagacaccttcccgctcttccttttcca

SEQ ID NO: 237258 - DNA, 177 bp, Homo sapiens
  chr14:23067565-23067742
  hyper
tgggacgcgggtgcggaggtagcagccaggcgtgctcgtctcgacttgccccccagaacggcagtcgtggggatggagagagcctcctccctccgcccggcaaagagaagatgtggagagactggagaggtctccatcgcgctgaaattggtgtggaacaacgggcttgcaagtttc

SEQ ID NO: 237259 - DNA, 542 bp, Homo sapiens
  chr14:23291814-23292356
  hyper
ctccaccccatgaacgctcagcttcctcttccctccctcccaaccctgcataagctggcggccagacaggagtctgggcgagcgccccaacccctgaccacaactgcctccggccccgagatgcttggctgaatctcggtagtgcccccagacgggaagccccttgttgggggggcgggggcgggaggcggggcgaggaatgtgcctcctcggagccggaggaggggtctcccgaaggccgtctcttccaccccgggttcccgactccccgccccctcggggtagctgttgcatcagcttccagattccaaaccaaagaaagtgggctccactaagctgggaaggcgtcgggcagcaaagccgccgccaggaggcagcgcttaatcaaaaatgtccgggccgagggggcccaggataccggagtccccggagcgtctttcatctgaagtcttagcagcagcgcggacctaacaaaaaagggagttgctgaattagttcaagaaaaggcaactggaaatgcttcatcacgttttaaggctaaa

SEQ ID NO: 237260 - DNA, 48 bp, Homo sapiens
  chr14:23299071-23299119
  hyper
gccaccgaggccacgcctacttccggctaccccggctactcctgctca

SEQ ID NO: 237261 - DNA, 543 bp, Homo sapiens
  chr14:23355773-23356316
  hyper
ccgggtcccgtacagcccagcgggcgcctgagccggtgccttcctgcagagggccgccacctggccgggacgctgagctgcaagcacatcgagacgtcggccgcactgcaccacaacacgagggagctcttcgagggcgcggtgcgccagatccggctgcggcggggccgaaaccacgccggaggccagaggcccgatccgggcagccccgagggccctgcgccacctgcacgccgcgagagcctcaccaagaaagccaagaggttcctcgccaacctggtgccgcgcaacgccaagttcttcaagcagcgctccaggtcgtgtcacgacctctcggtgctctgagccgcggtcgccatggccactgcggtcgccatggtcaccgcgccctccgctcgccccccctcgccccgccccgcccccgtccggcttccttggtggaggccgtctaggaaaccaaaaactcccaggatgccccggtgtgaccgccgggggcggcccggggccgctcggcggcacctccacacccgccccaacgcgttc

SEQ ID NO: 237262 - DNA, 173 bp, Homo sapiens
  chr14:23388421-23388594
  hyper
ctcactggtttcgcggcaaccgtccaaagtacaggttctcattggctaaagtcctaagtatgggtggagcaaactcaaatgcgtcttagcaaccaccgagttcccattgattggctaacctcagagactccagaaaatggaagcgtcctttggtagccgcccatcactctctc

SEQ ID NO: 237263 - DNA, 38 bp, Homo sapiens
  chr14:23388823-23388861
  hyper
gggatgctgaactcgaaatccccgttctgagccggcta

SEQ ID NO: 237264 - DNA, 285 bp, Homo sapiens
  chr14:23398577-23398862
  hyper
ctcgcgctgtccacgccgggattccttgatactagtagccaatcacaaagtcaaactagtgccccagaaggcgggacgagtcgccttaacaaccagagcgtctgccacagctcccgaacaggagggatggggagtggcttttcctgccaatccgcgggctgcacagtggcgtacggcatggatccaccaatctcagggtctggttcctgacgaacttcaatctcccagaatgcttagtctatctgaagaacgccgttgagagactacaccgcccatgaaaccctg

SEQ ID NO: 237265 - DNA, 629 bp, Homo sapiens
  chr14:23450224-23450853
  hyper
agaaacggactcacgagataccaggggggttgaatttagcagaaataaggagccctggttcatctgaaaactagcaggaaggggacagtgctctggggccgcccccatccatccctcttgcttctttcctagtcccgcgtcttcacctcggaccccggggcaccggcactttgggccgtcggggcagtggagaaccgaataccgtgacgggtcccttcccgtccctaaccacttctctcactcaccgaagtagtcctccctggcctctggctcccgcatccgggcccgggcggcctccggaacgaaaggacctggtggctcctccagacccgacggctcaatccccgagggttctccgcgggctccggcttctcgcccaccggtgcccaccgtcaggcgaagcaaagctgttagctcgtcctggtaccgggcgcccacggcgcagtccccgtagccggtcacagagtgtcgtccgggttgcgccccccgtctctccaagggccccgccgctcccactccggccccggctagagctccagggctgcccagggccgggggatacgagtggcggctttcctggcagccgaaccccgcgggccgctgagcgtacaatcggtccagggcggcgt

SEQ ID NO: 237266 - DNA, 737 bp, Homo sapiens
  chr14:23450883-23451620
  hyper
cgggagaatagcctgccggtgctccggccaggggtgggccaaacaggcacggccccgctggcaaggggctcccgtggcgctggtcgtagcccatgctgatgccgctggtgcgattgctgcagggccggctacctccagctccgccagcccccgccccgtccagcagcaggctgccccgggggctggacggcttgctcgcgtcgctggccgagctactggcgaagctagagcgggggctgagggccggggccgtgggctccagccgaaaatcggggggcaacgactgaggtagaggcaaggcccgggtgggcggcggccccgcgggaaaagagccttcgtagcgcggcgcctcaaaggagccgcgctgatttcgctcagcgtccagggaaccttgctcccgggccggctccaacggctcatccccaggtcccccagtagctcctcggggccctgacttcctaggtccccccaacccacttaggcgccccttgcccggcccgggggtcccgtcagacccagaccggctagattcaccctttctgcggccgaacttctccagcaggcgactggctttctctcctaaccgctccatgccctcgggcctggggcctctcgccccctccccgcctggcaccctgcggcgtctcggcggccggttctctttccctgcagccggactctggttccccaggggcacaggggaggcacaggggcttagcgggcggcctggatgccct

SEQ ID NO: 237267 - DNA, 479 bp, Homo sapiens; identical to SEQ ID NO: 203497
  chr14:23451829-23452308
  hyper

SEQ ID NO: 237268 - DNA, 186 bp, Homo sapiens
  chr14:23503914-23504100
  hyper
ccatgaagcatttcgattcctggctcttctgggacaccccagcctggcgcggccaggctcagaccatcactgagactccctggacctagatccagcagatctgcacgacccccaagtccgaaaaacccgcgctggttcaccggtagcggtctctccaacacgctggcaagcgccatgtctagtgtg

SEQ ID NO: 237269 - DNA, 130 bp, Homo sapiens
  chr14:23527202-23527332
  hyper
agctgcaaggcggcggcgttttgagagcccatgcaaagcacggtagcaggtcagctgggggacacttaaggacggcagaagggtccagagagtccgaggcccgggcccagggagcgggtcgggaacagag

SEQ ID NO: 237270 - DNA, 35 bp, Homo sapiens
  chr14:23540715-23540750
  hyper
tgtattggcggagcggcagcgatcagccggagaca

SEQ ID NO: 237271 - DNA, 244 bp, Homo sapiens
  chr14:23755249-23755493
  hyper
cgatggccgaaaccgggactgccccccccaccgtccccgggagcgcgccggtctacccagccctgctcgagcaagttggaggcggggcggatgggtggggtgggcgtccagaggcggtgccaaggtggcccgagtcctgattggtaggcgcaggcgggcgggcacgggcgaagcgcactgggctggccattggctgcgtgggtctcggctgaagtcaggtattggctgcgtgggcctcagctgg

SEQ ID NO: 237272 - DNA, 218 bp, Homo sapiens
  chr14:23770438-23770656
  hyper
gcttctttggttccgctcactccccccgcccccacgcccccacgcccccacgcccctgatttccccacccttttcgccctccccggcttgactcccttggaccgctcccgccaatcctggtctctcctactcctccccgccacatcgggtcgccccgcccccgggtgcctttggtgttttccgccgtcggccgcaggcgcctcgtctcagataaagtg

SEQ ID NO: 237273 - DNA, 144 bp, Homo sapiens
  chr14:23772082-23772226
  hyper
tccaaggccctcacggcccgggcgcccccgcccacagccctctgacaggtggctccgcttgtcttcgctgctgcaccagggggcggggactccacctttgcggtcccgagtgaagctactcaaccttttaaaaaaaacatccac

SEQ ID NO: 237274 - DNA, 101 bp, Homo sapiens; identical to SEQ ID NO: 203498
  chr14:23775763-23775864
  hyper

SEQ ID NO: 237275 - DNA, 125 bp, Homo sapiens
  chr14:23790484-23790609
  hyper
agatttcccctaccgggatttgagaatttggcgcagtgccccgccttagaggtggggccttatttgattgccaagtaatattccccaatggagtactagctcatggtgacgggcaggcagcttga

SEQ ID NO: 237276 - DNA, 1010 bp, Homo sapiens
  chr14:23821270-23822280
  hyper
gacacggctggcggcgctggctgctagggcagcgctggcgacgctgacgccgctggcattgggaggctgctcccagccagaggcattaggggggaaggccccgtagtggcaatgcagcgggggcgccagcgtgaagatggggtccgaggccatgcccagagccacgaagagcaccggcaggcagcagaggccgagctgcagctgctggccgccgcccagcgcccccacctgggcgagcagcgcctcaaagctgagggggcctgggggcacggccagcgacaggctgctgcccagtccgtcgccgcccgcgtctccctccccctcccgctcgcgctcccgctcaccctgcagctgctccgtgggcaccgcatctccgagggtcccgacctgctgttggggggcagggggtggcaggagaagggtgaagcggaggaaaccgcagagcaagggcagggggcaggtgggagggagggctaggaaggcagtcaggggcgagggatgcgcaggaggaaaatgccagacgctccgcgggggcgggggtgctgggagaggatggcgtcgccacctggggctcgggcacttactccgttggaggtgggggtgatctctacagtgttgtcgattttgccgccgcccccgccattgggctcgggggtcccggtggccacccggggagccagcttgccgaccgcaggggccctgccggcccgcgccgaaaggatgcgctgtcctctggctcagttgcgcgccggctgcccggacacagacagctcgaagagatcccgctctgcagctctgcagccgcgggcgcctccttggtctctgcgatctctgcgctgctttcccctccccttcctctagactctcctccccttcccacgtcagcagaaccttcggtccagactcttcgtcagagagaggaaggggggccagggcccaggggagggagggaaggggggctctgtcgtctctttcctgggtctgcgggccattgcggtaaaaaagaaaaa

SEQ ID NO: 237277 - DNA, 643 bp, Homo sapiens
  chr14:23834174-23834817
  hyper
ggaggtctctccccggcagcctccactccctggtggactcaccgacgtggcaatggccatggctttggcctcccgcgcagcctgcctcaggccaggctcggttttgctgacttcagcggtggctgccccgcaccatggtccgcggcctctagcccccagctgtggcgcctgagtcgtggcctccgccaaggttggaggaggagaaagaaaacccacaaaacttcccaaatgagaggcaggctagccaggcaggaggaggagcggggcgggccggggcgtcgctgcgggacggcatccaagggcgcgcgctgcgtgctgtccccgcggcctcccgggcgccaccggctcggccaggccccgggagctgcccgccctaggccgcgggggcgccccgggctcgcaggatccgaaaattcccttcccgggccggggcgggtgagcaggcgggcgctgggctgcgctcgacgcctctccaggccgctcaggagagcctcgagggctgggagaagccgccggggcggttgggctggacgagcgagtttaggggccaaccgtctccacccgccggccgcgctgcagagcggtgctcccagggctggggtctgcggcgaccccgctgggaggaagggagagcgagaactga

SEQ ID NO: 237278 - DNA, 51 bp, Homo sapiens
  chr14:23938810-23938861
  hyper
gaaagcccttattcgtattggcttagatttgcaagcggcagttgtctatca

SEQ ID NO: 237279 - DNA, 196 bp, Homo sapiens
  chr14:24020943-24021139
  hyper
gctggagtctaggcgtcccacacaatggaataatcaatacccaggcgcccggggctgccccactgagcaggtgcagcgacccgcccgccgcggcgcatgccgggagttgtagtctgttcgcgcccgcccgcctgcctcgcgggacccagggccgggggcaggccggccagcccaccaggtcgcctccaggttcaag

SEQ ID NO: 237280 - DNA, 453 bp, Homo sapiens
  chr14:24024866-24025319
  hyper
tacgcgctgcccccgcccccttccctccccccaccccaacccccctcgccaccattgccactggcctgcgcttagctggctgctatagcagatatctgttggacggtgtgaatggcttgtattccaggcccatctgcctgcgttgggggtgcggcggggggtgttggagacgggactggggcttgagctccttgcacccgactctccccgccgccttgtagccccagttcagctttaggtagagtaccgcaggcaccaagtgcagctttcctgtcgccatagcgacgggcggggcgagatggcaaagtctccctttggaactacatctcccatcatgcatccgcgcctcggggtgcctggctcagcctcaggcatgagacctgtaccagcccccgggagccgtgcggggccaacaatgaggagcagaatgcaaggggcggcctcgctcccctg

SEQ ID NO: 237281 - DNA, 36 bp, Homo sapiens
  chr14:24025555-24025591
  hyper
agacctgaagttccgctggccggtagtgtagcagga

SEQ ID NO: 237282 - DNA, 574 bp, Homo sapiens
  chr14:24036495-24037069
  hyper
cctgaagcttcagcgaaggcaccaccatcctgactggcagagtccgggagtggagaaacactctctggtcgggcgtgcctgggctttcggcccaggcccgtcctgtgtcaagaccctaagagcccgggtcccacaggtaccctaaaattgcgcccgcattttacctttcccgaagtgggtctccaaattccgcgcccaccccaccgcccgagaagcccactacgcatgcgtccgcaccccaccggcgccccttcctattgagcatgcgcgggagccccacctatttctctctaccgtttcctccccctacctggtaccccatccctagctcagccattgcttttttttccacgaccctccgctgtttcttccgcgagcttcctcccccgatttccatctcaggcagcggcagcggcagcgacagcctgcctaccccaggactccagcctcacctggcttctgcctcaactccgctcctctgccccccagcgcttcctggtacggggccgagcaggggttggtgctccgtgcggtccttccctctccccgcctccaccacgggaccccgccctcc

SEQ ID NO: 237283 - DNA, 282 bp, Homo sapiens
  chr14:24045264-24045546
  hyper
cgagccgggcggtccggtgctgcccacctcgctgctcacctcgctgcgcagggagcctcgcttgctgcccagggagctgcgacgtccgcccgctcggagcccgctgagcagcagcgaacggcgaaagaatccgccggccgccggagtgcgctttcgggacgacgcgccgtcggcgtccccgggcccggccagcacgaagccgccccgggagcccgaggcggggctgcctccctcgtcgcccggcaagggcaggggcgggggtggcgtcggggggtcgctgtg

SEQ ID NO: 237284 - DNA, 47 bp, Homo sapiens
  chr14:24505639-24505686
  hyper
cgtcctgccccttcgccctactctgtcacctcgctggaaggagtgga

SEQ ID NO: 237285 - DNA, 257 bp, Homo sapiens
  chr14:24583740-24583997
  hyper
tacctctcggtagcgaaccaccaaacgtttcttttttaagccccgcctctcagccgttacgcctagttcggctgtctctgattcaggaagctggcagttcccacttactcctccccagcaagagctaacagccctccttgggtgtgcactttctcctcccctcaggcacctcgcgcattctcccgcctacctatcaatcatcgtgctccgctgtccagttggctggccaagggggcggggccgtcgtgtgacgtttg

SEQ ID NO: 237286 - DNA, 223 bp, Homo sapiens
  chr14:24605551-24605774
  hyper
tggctggagcggccgggggcatccccgacccgccccccaggctcccacgcgagtcgggggcagtcggccgagctggcgcgcccggagcacctgcgccccggggagggcggcgactgctgcctgcggggagaggcgaggcggccgtggttctgcggggtgaggtgaagcggagagctggcgtggaggggaactccgctggcctggggccggggccacacacaga

SEQ ID NO: 237287 - DNA, 103 bp, Homo sapiens
  chr14:24610778-24610881
  hyper
cctagctggcggccgcgactctgcgcctgcctgggagacagaccaaactgcagctccctgcagaactggctcctggagtcccgcccacgtggtgctccttgat

SEQ ID NO: 237288 - DNA, 100 bp, Homo sapiens
  chr14:24611143-24611243
  hyper
gcagaccgccttgcgcctattatgggttgagtggctctgtactctagatcggctctgtcacttactaatgggccgtgttgccttcgcgactgcaggtttt

SEQ ID NO: 237289 - DNA, 72 bp, Homo sapiens
  chr14:24658235-24658307
  hyper
gggttggagaactcgagcttcgggcattcagtggccagctcggctttataaaggaccgtgcccttaacagca

SEQ ID NO: 237290 - DNA, 120 bp, Homo sapiens; identical to SEQ ID NO: 203503
  chr14:24685267-24685387
  hyper

SEQ ID NO: 237291 - DNA, 248 bp, Homo sapiens
  chr14:24701155-24701403
  hyper
gactgcgggggttcgaatacagtgagacccgacaaaagcgaccccattctgggtgatagcacagtcctggcaaaaaagcaggcatggcaaaataccccagggtcgtcaggtgggacctgggccccgctctcaaagcccttctgggtccccctatttcccaccacccctcgcgcggagccctgaggcagtcagcgtcctccaggctagggaaaggcgtggttttccttccccacgtctcccgtaaggca

SEQ ID NO: 237292 - DNA, 114 bp, Homo sapiens
  chr14:24701640-24701754
  hyper
tgctcccgcgtttcggttcagtgacgtcgtaaattggaatgaggcatccagtttagcaacagcagagatgacgactctgcgattctgagagtccctggcgagcccgggctagcg

SEQ ID NO: 237293 - DNA, 225 bp, Homo sapiens
  chr14:24702080-24702305
  hyper
tatgaaccctccccgccccccgtcgccaacattccttcgttcccctaaatcagcctcttgccccattgctctttgcaggggtagaagaaggaagtgtagcggggtaaggaatgcaccgtcagggtctctcacaaccctttcccagctctcctccccaacaaacagtacctgggatggagccctagggtaatcgcagccacgggatgggtcgaggtgacaggcttc

SEQ ID NO: 237294 - DNA, 143 bp, Homo sapiens
  chr14:24711905-24712048
  hyper
aaccgtgacggtgcgtcagaaggccacgccccagcggagctgtagctgcccgcttcctgcactctctgccggctgacatgagttggcggctgaggctgtcgtggccgctgaggctgttgtggccgttcgtctgggtcctccca

SEQ ID NO: 237295 - DNA, 33 bp, Homo sapiens
  chr14:24740923-24740956
  hyper
cgggcgactgtagcgtgcgtgtgaaatgggggg

SEQ ID NO: 237296 - DNA, 42 bp, Homo sapiens
  chr14:24768607-24768649
  hyper
tatgggaatctggcgcggcagcccctcggggcgcgtccacgc

SEQ ID NO: 237297 - DNA, 91 bp, Homo sapiens
  chr14:24769098-24769189
  hyper
gacgtcgaaggtccgtccgcagttaaggaagcttttgcagccggacaggtcgcgaagcacacatggggcagggtccgcgctctccacacaa

SEQ ID NO: 237298 - DNA, 760 bp, Homo sapiens
  chr14:24803606-24804366
  hyper
caacgaaaacacatcgaaaagaagaccccacaaaccccaaccccgaaaatgctccccaggtagagaccctcccgcagcagaggctcggctcaccctgccgctggcccaggccactgcgagcagcgccgcgagcgcacagagcacgatccccagcagcagcagcagcagcgggtactgctggctcaggctgtagtaggtctcgtagaagaggtcttcgctggggggcggccgggggctgaagaggcgggccatgatctccccagccccgagccccggggctggctagggccgggcgccgggttacctccttcggcccggcgggccccacctgagcttttctcacccgctcaaagccgctaccaccccgcgcccccaacctcgtggcaatcccgtctcctttttcaggccctccctgcggcctcccagcccgctcccagctggcgatgaggggatccctcagtcctttcctcctcctccctcaaacccggattgtagaggtgccctagaaaagcctcatcgccaggagggcaggatttggggttggtgcgagggagccccgggttcccctgatccccgaactcactgcccgcggcgctggcgcagcggagtgggctaggtccggggagggagccggggacctgatggcggagtcacgctcgccgctgcgctctggctcagagtcccgggcgacaggcgcttccctcccggcgccgcggccccctcccacttccccgacgggacagcccggccccttcctgtg

SEQ ID NO: 237299 - DNA, 328 bp, Homo sapiens
  chr14:24808629-24808957
  hyper
agattgcggctggggtcaaccggggtcactcacgagtttacgatcttgaccgccacatcgtagccccacttcctatgttgcgcccggaacactgtgccgaacccgcctttgccgacgagctcctggttctccagttcctcgatggacaccaagggggcgggggcaccgctgggcctgagagaggggtgtcgcccactagccggccgtgccgtgcctcagcgctgctccccgcgcccctgtgactcggcgttctcactgcaatccccagcctccctcgccggcccccaccgtccccggactcaaagacgttctctgagcgagtctgtgg

SEQ ID NO: 237300 - DNA, 356 bp, Homo sapiens
  chr14:24837550-24837906
  hyper
gggcggccagctgcgaggatgaggagctggaatttaagctggtgttcggggaggaaaaggaggcccccccgctgggcgcggggggattgggggaaggttagtgctgggctgggaaggggtcttggggtcagtgagaggagggccggggatcctgagtctggggaatttaaggcagcgagcctagggtggggggtgagggagtcagaggtcgaagggagtcggggggactcgttggcctgcggaagtgaggctgggggcccgggcaccactttctcctttttaggtcgtgactggggtgggggtgggggtgctgttggctgtgcgccgcctcccggctgggccgcctgtcactgaac

SEQ ID NO: 237301 - DNA, 219 bp, Homo sapiens
  chr14:25148244-25148463
  hyper
aactcctgaattgccgcctttcagttcctgcggctgctctgactgtctgcattgcgccctctagtgtccagactgagttcttttactgtctagactggggagtccagagcagattcttttacccgccacgtgagggagcaattcagggaaagtaaaactattagtaaaagacattattttattttcaaataatcgtaattttaccgagttcctagaaaa

SEQ ID NO: 237302 - DNA, 1153 bp, Homo sapiens
  chr14:25518430-25519583
  hyper
ccggcggtgttggtgaggctcgatgccggcgtgcacggcaagcgcgaattcggaacctggcgcccttgaccaagcctgagatcggaaagggggcatcgcccagggccagcgccctgggggcagggtgccgtgcccgccagaaaagctcgcctcagttttggcagtaatgattttcctagaagatgccagagttcgcgaagatcggagtgattcgcggatttctgcgctcaagctagaggcgcagcgaccccgagctcccccacactgggagcctcggggcagcattctcggggcccatgccatcgcggggacggtgcggaaaaaaaggctccatcctcaactttctcggaggaaatcgctccgttctgcggcttgcccaatactgcccgcacaacgggtcccagggttggagagaaccagggacacgagtccctctctgcgcgcacaaagcagctgcgccggggcgcgcggccccctctcccgccacccgccaacttggaagaatctctctgggagcctgcctactcccctggcctcacagccacccgcctcggacggagcgccaggcgccccaacagccgtggcggctgcaaccgcatctcccgggcttggcctccgccctgaccgcctggctcccctcgccccggtcctaccgtgcagcctggctcgcgcccctgccgtgccagtgcgcggcacgcgtcccagagcacgaggctcctccccggggggctgccccgcgcggggctccgggctccggacaaggcttagccggcccgggtgctggctcgccgccgctcgcggctcccgcgccggctcctgctgccgcgcgcgaaaagggaggggttggggggaaactcccggcaactccaactccgggcgctggagctccagctgcagccgcgcgcccgcccgccgccgagtgcgagcgcctgcgaagcaaacctgcccgcgcggccgcctctgagcatgctcagtgccgccgtgggcgagcccgagcgccctggcccggggcaaagagcagcggctaggggctgggggctgggggccgggacccgcgacccgccccaggcctcggagcgcggaggtggcagaggaagggaaaggccaatgtaggggcgggggccctgagccaaagacccgggagaaaccgatc

SEQ ID NO: 237303 - DNA, 304 bp, Homo sapiens
  chr14:25601970-25602274
  hyper
aatgttggaagagtcctgaacggcatccctcgggggtgggcagcatttggggaagctggcgtatgcggcacgagagtgcaaggaaggaagagctgcaaccacgtggctgagctcagccctgggagatggggccgtccttcctctgggagccacggaaatttctacctgggtctaggcgggcagaggctctgcagcagcggacacgcatgactgggtagagccagtcttcaacagtgccaccgtgtggcagagaggagcagtgacagttataactccgtagaattatatgcgggttctcccagcc

SEQ ID NO: 237304 - DNA, 395 bp, Homo sapiens
  chr14:26674237-26674632
  hyper
agggtgggtgtttgccaagtcgccggtcccctgcgtccccgcccgccggtcccttctccgacccgagacccccgcccgccgcagcccgactctggggcgtttgggaggtgggcctgaggtttgcctaggactcgagttcctttcaaaggaaggcgagagggagatggggagaaggagactcggagacttctctattaaagccgcgctgaactctagccttctggcaagccgcggcaagccgccaatttgaagtgtgtgagctttaatctgctcctagcctgatgggctcccgtgtccacagggagctgggaggcatccattacgccggaccaaggagatggagcgtctaggaaatatgttaatgccggagccctccccgccggcccgaacctgcc

SEQ ID NO: 237305 - DNA, 1014 bp, Homo sapiens
  chr14:27065772-27066786
  hyper
attcacctctgcttcgatgcattgggtgcattgttaagatgattccagtgcaaatgaagaagcgatatcggtcccgttaaaactcatcttccaaggaagcgcaggatgttaactaacaagtcaccgttccagacacccccaccctcgtatgcacccccctgaagacaaatcaatgaaatatttgcaccgacaatctaagtgcggtaagggcatgcactcatcaagattttgcatactacttgtggcccaaagcaagaggatggagagaggaaaaactctccggcgccccagtcattcgcaatccgctacccaagtgccatttatttatttattttatcagactgttaaacgcagcgcgcatcttcgggcggccatcacctcactccggggtcatcctcctcctcctcctgaatggaccttcttgcccaggtctaggatatttacatggtcaacctctggaccgattaaatggaaagataggtctattccgaaaaactggtcgccattttgatgaatgataaacacagaaatggaaatgtgtcggggacacctaggcgcggggcaggtgcaggggagggggcgcggggcaggggcgcaggggccgccgggttcgggctggaggtgtccgggccgcgggagggagggagggaaggagggagggaggacggcgagggagggaggcaggggcgggcggcgggggatggggccagcggggaggtggaagcgatacccaccgcccgtattggtcctcttggtgctgccggcttcagggggggcttccagcggccttttccgcgagtccggcgggtccaggtctatgggaaccccagtgtgggtcccgttctgctggatgggagctgccgccatcatgtttgcagttcctgccgctgctaccgggagaaggttctcccttttgttttggctttttcttttcttttttcttttttttttttttttttttttgcgtttggggtttcttaaggttttttttttttaatcggatcaatataaatc

SEQ ID NO: 237306 - DNA, 894 bp, Homo sapiens
  chr14:27067007-27067901
  hyper
ggagtgggagagcgcgagggctggcggggcgcggggagaagccgaggaggaggggagagtgagggaaagagtgaatgagcaggaggaggggaaggaggtggatgccgagagaggagcgagcggcagaggagggcaggagccgggaaggagcgcggcggtccccgcgccgcgctagcgttgcgctcgctcccgctgctggtgctgccgccgccgccgctgccggagcggttctgccgttgcctgggctgctcggcgctgctgctgctgccgcccggtctcgctcattatttctcccgcttgttggggggggctggcggggagggaggggggtggctgtgaggggagggtagagaggggttgagttcgtagactcccacacacttcgcgctcgggtccctgcctctcagcagcgccgccgcctcccagcgccgatgcttcagccggcggggcggctgaggggtgagggggaactccgcgggcgggggcgagggagcgtgtgtgcgcgagcgtgtgcgcgcgcgaggggagcgcgtgcgcggtgaggacgcgcgccggcggttggggcgggggcgggggccggggcgctcctgtgggaagggaggggtgaaaggtcgctggtccccggcaacacggctcaggcaaacgtaagcggcttgtcgcagaaaccaaggggtccacgaaacgcgctaggctagaaggcgggaaggagagattactgacagccgtgccagccaataaaatagaaatgtgagaaaggttcttcgggccccttcccaatcaggaaacttgggtgatgaggggcagcgaaggggtggggtgggatcttggtccagctggtactggagcggcgacaattttggctagtctaagaagggcattcgagtgaccgttgac

SEQ ID NO: 237307 - DNA, 180 bp, Homo sapiens
  chr14:27068102-27068282
  hyper
cttagagtgtcactcgccgccttaaatcctttcgggaacaagccaggatataaataaataaagctaggtgtgggtcttcccttcacaaggcgctggtaggcagactaaagacaggcaacagctgagtgtgcacacagaactaaatattgaacgaaatacgagtgtcggaataaaattcat

SEQ ID NO: 237308 - DNA, 79 bp, Homo sapiens
  chr14:29224712-29224791
  hyper
gagcatttttgttgcgttaagtggccggcattagcagcctaaacacgtaggggaaggctaacatcgccgttaatataat

SEQ ID NO: 237309 - DNA, 882 bp, Homo sapiens
  chr14:29225611-29226493
  hyper
agaatttgagcgctcgaatgctgttgttaaatttcttcccagagccccatgctccctcgtttagcatctcccttccccaataattacttgagaggatgagctcgagattgaagagtgaggttggcttttctgtgtgaggagccgataggatccaccaacactaaaatcaaaaagactcctggtgcttgcgagtacaaccccaaattctctcgcacactgcccaagtttcttgaaactcggaggctcagctcagtgtaaaaacatgggggttctcctgagtcggtttccctgaccacagggggacccctgcaaacacggcctcctctttaatacctttgtaactcagttcttcaagcaacccacctaggagaataaaaggacccactgagctccaataactgagtagatgattaaataaagccgagatctcagatcttcgcgtttggggtggggagtgggggcgctggggaaaagtcgggaatagccccgcggtacctggggatcccagttgttttttctaagaaagcccggggttaaaaaatgcattggaatgtggcgatgcctccatcagccgtcactttataagttcccaagtcacgctgctctagaccattgtggatgaaagtggattgtctctccagaaccaaatattccctgacctgcttccccaacgcgccctcacgctttcctgggagagcacagcgctgccggagacgcggcgcttctgtcaattgtgcagagcaattactaagaaaatattgtgacgatgttgtagggcgaaaggggacgtgaggaggaaagggagggggagttagtttggagagcaatttgcaaaggaatattaactttgattcccgaggtcaccgcgggaaaaggggttct

SEQ ID NO: 237310 - DNA, 1265 bp, Homo sapiens
  chr14:29228250-29229515
  hyper
tctaggaaaacctgcgggccctgttttgtgtttcgagcgggagagcagacactcagctcaaatagaggcctttctctcgtctttcggggtgtttattctatggccaaaaggtaagatggccaaggcagcgatctgagcgtgatgtctggccccgcggggggcccaggaggcccaagttgggacagctccggagctaccccggtgcccctcagctgggggagggcgcgcggcagccgcctgccagccccacaggctgctctccaaaggagctgggctttttcagcgtttctgtttccttgtagcctcatctatcttatctaacaagttcacgctccgggagaaaagaagagggtgagaaaaaaaaaaaagaaagaaaaaagaaaacctcttcaccgcggtgattcatagttcataggctccggagccaaacttgccgacccagcttttttctcgaacattactttctctcctacgtgccttaggacaaacccagaaggaagacactaaaattgccgaacaagaatctaggattgttttaaaaataaaagtgaccccccacagacacctttgatgttgttgattctgacacagaggagtcgagttgttttgtttacacatgctaacggtaacttgctcctgatgccgctctacgcgcagcttagtctgtcttctcctctcctccccgcaggcgactccttccaaagagcgagagagaaatacgggtattactgttatcccccactgggttcaataccccttacatgtaattgaatattcgaattaacgtcacctgcatgcaccccagtcttttaactctgaaatgtgctttatagcaatacagacttgaaacctttaactgttttctatatccccgcgtttaccgtggcagatgacctcttagcccaaaattgatttggtgtgtatccggtcttatgtgccaaaaaaagagatacctaggctgaaaaggcaactttaaggggggacatctagagagatgacgcctagaatcaaggcctctggctcgattgcgttcggcaagcgtctgcaacaaaggagcgtcgggcaagctcgcgggtatgcgcagggagcagcggcgcgcagacctgggagccccagctccgcgaagctcctcgaagggaaccctcgcagttacagcctcaagaggcaaggcaggggagggagaaaagctggacctcttgagaaacgctcctccaacagattttccatggcctcgtgttggagaaggggcgcgggggaggagcgag

SEQ ID NO: 237311 - DNA, 1414 bp, Homo sapiens
  chr14:29234530-29235944
  hyper
cttagccctgcccctggccacgggatccttttaaagcccccgattcgcaatttccccattcacttcaacctccaaccgaaccttcccagttccaaagcccaagaagctgggactgtgagatccacgttcccaaggctccccggtgctttccagcagcactcagggttggcaagagctggcttcagtatactgttatttcaggaatgaggcccgcacaaaataaaagcatttgagaaacggaaaggaaaaaaaaggagtgaaaataggaaggcttaaaaaaaaaaccggaaagaaatagacgcccacccttattttccctccaatgtcaacaagcaaaacgaaaatatttccagggtgatcgctcgcagctacccgcttccaattcggattagaagctgaggctggagcggcgaggagaaaacgacatcgagtcaccccgcgcgtgagcgacgctctggagcaggagagaaggaaaaggaagagacacacgtatatagcatgtgttacctgatttatttcgagattgtttggtactgttttctctctgggcacctctcatttcggaaggccatcagaggcgcccactactgagcggccccggccgccgcagcagcacccggagccccagtcccggtttccccgcggtgccggagcccggagctcgccgccgcccaggcctcaggaatcgagtaagtaacccctgtttggccccgcgctcctctgcccacttcctcctcctcatctcatcgctcccaaagctctcccacaccctcctcccccgaagtaaaggacacccccgcacacacgccagcggtgggccttatctccccccttatccaaagctgcgctagactattacctacaaagggcacaattttcctgctggctcagaaatgccagacactggcctgcaaggccgactcggaaaagtagtgcctcgcctctacctcctccatttcctgccctctcgcatcctctccctgcactcccactcttcccactaccaccaccacccccgctttcaaaaataaaattggatacaaactttaatcactaaggacaaatattgacgcttaaacgaaaatgacccagtacaatgaggaggaagccggaaatgtgagctattggccctaggaggggaatttcggtggagcggagccggcggggtggagggggtggcgggggcgcagggaagggctgcggcaccgcgtgctcccgccggcgtatccctacgcggctccgcgcggcctcggggtccgaggcccgcggagagggggaggcgagcgcccgagggggcggcagccggcgggcggggcgggggtgggtgggcccggcccctccgattggtcgacggcgagagagacgctcccgcacgccgccagctctgattggcccagcggtaggaaaggttaaa

SEQ ID NO: 237312 - DNA, 178 bp, Homo sapiens
  chr14:29236124-29236302
  hyper
ggaggaggaggaggaggaagcagcgggggggggagcggggggtggggggggagaccaagaagtacagttgggagcgagggagcttcacccccggggcggtggttgtttcttttttctttctttcttttttcttttcctttttttttttttttctaattcctgaggggtggttgctgct

SEQ ID NO: 237313 - DNA, 189 bp, Homo sapiens
  chr14:29236482-29236671
  hyper
gtgatgctggacatgggagataggaaagaggtgaaaatgatccccaagtcctcgttcagcatcaacagcctggtgcccgaggcggtccagaacgacaaccaccacgcgagccacggccaccacaacagccaccacccccagcaccaccaccaccaccaccaccatcaccaccacccgccgccgcccgcc

SEQ ID NO: 237314 - DNA, 264 bp, Homo sapiens
  chr14:29237018-29237282
  hyper
gtacgagaagccgccgttcagctacaacgcgctcatcatgatggccatccggcagagccccgagaagcggctcacgctcaacggcatctacgagttcatcatgaagaacttcccttactaccgcgagaacaagcagggctggcagaactccatccgccacaatctgtccctcaacaagtgcttcgtgaaggtgccgcgccactacgacgacccgggcaagggcaactactggatgctggacccgtcgagcgacgacgtgttcat

SEQ ID NO: 237315 - DNA, 171 bp, Homo sapiens
  chr14:29242808-29242979
  hyper
ataatttttttccacgttgacagaaatcacggtgaatccccaggtcaaaaggatgtagacacggcaaaggaacatggagagaaaacgagaaaaaattatacggagaaggggtagtgggagactgaaataggtcctaaagtgtaaattaattcatttcgtggaaatatgatt

SEQ ID NO: 237316 - DNA, 478 bp, Homo sapiens
  chr14:29243293-29243771
  hyper
agggaaatgaacaccgttctgggcttgactttgtccctgctgggaatatcccagttcctggctttggaaatctcaggcaaataattgattcttaatgcacacttaggagacgtcggtagtacgctcgagagcctctctgtcccagagtggctgagagcacgcgccagacacaggttggctcggcccgaagcgaatttgggactctcgtcgcggtgtcctattaattagcttttcccggcgcctcagggactccggggtgaagatggagaggtggcataatggcgggacttgaagtcgttgtggcagggacctggcagcgttgttttctcgggttttgaaccggtgtggagaagtaacttcagctgctgagttggggccgccctggctgcgcggtggcggaggaggagaggagaagcgctctcgggacattgcggcggcgatccccgcagagggtgaagccgggcgctgcgcagggagc

SEQ ID NO: 237317 - DNA, 108 bp, Homo sapiens
  chr14:29244138-29244246
  hyper
aaaacaggtagcctcggggtgggaattcccagagcactgaaggcgccggttgttggccagagggaggccgggactccggtgggcagagtaccccgcgagtgcggagat

SEQ ID NO: 237318 - DNA, 607 bp, Homo sapiens
  chr14:29247133-29247740
  hyper
atccttagcgtcagcgctgtaagaggtggagccgctcagtcccgcgggtggctgcagacagaaggtgggcgagtcctgggacttaaaaagttttgcagaaggttgaaaagaggagcagagggagagttttgagtttatttattttattttcctttttttttttttgtcttgtgccaagcccttgaagttaacgtagcgacgacgtggtccttgtaggaccaagcattcttggcattctgtcgagattgagattccagagcatcggatgaacgggacttatagctaaggcgtactcacccacccctcccttcgtctttttacgcacgcagcaactcgtcctcacgtgcataggggtagtggacagtgttgacttgaattgctgtccctcgttccaagcctttcctgtgaatgaacccgaaaacactcgacaggtcgtgaataatcgttttaatgagtgtgcaaagcgtgcgacggggtgcaccgagctgtcgggttaaacaaacaacttgtaccctgaccaaatccgattgttaaagtgcaaagtgatgtcagtaccatttccattgcctttcggaaatccacagatctgacacgcgggagtccaatt

SEQ ID NO: 237319 - DNA, 773 bp, Homo sapiens
  chr14:29254361-29255134
  hyper
cctgcgtacgtccccgcacccctttcgccccagcggccgctcacaaagcgccacccgcgcctcgggcgcccgcagaagccggagccagttctcagccctgatcgccgccagccgcccaggcttcggggaaggagggaggggagaataatgcgcccctctttcaataaacgccactgccaaccactccaacagacacactttcggtcccccgccagagctccggtgcccccgagtgaccgctttctgcgatcgcgtccgccgggaccccgtccctctttccccttcagtcttcagggagggggaggcgctccgcattagcggggcagttcagcaaccccgaccccacccgcgtggctccaggcccaggggtccgttcacttccccgtccggtttgggggacgccaattcgcctaagaaaaccctggcagaagagcgcggacccttcactacaaacctcacgtcagggttacagccacatttaggaacctcttcggaaaagctgagaaatcactgttttgcaaaaagccttctgtactgtgatggggctttgtggtgagaggaacctctgagaagcctcgtgcggcttgagtttagagtcacgccctgcccagcgacattctcccgcgcacgggagaacctgcacttccggtctccaaccctcgcgggccgtgactcttcccctcccccgcgccgggccctgcatttccggcccccttgctctcctgcacttccgcccagtcacatggatgatggatagcgttgggagctgtttt

SEQ ID NO: 237320 - DNA, 1025 bp, Homo sapiens
  chr14:30396133-30397158
  hyper
aggacaaggaggggcgcggcgaggaaagggcaagatacctggaaatgtcatgagaaggatggaaatgggtgaggaggcggcggactggagagaaatcggtgaatagaggaagatggggcgagaggaggatgagcaacagcgagcgcagcgcctcgggttgcaggcgtccagccgcggcggggccagccgcttccagagcgccggcgaggctggcggccagccgagccccgggagccggaaagttggcgcggagagggccagccgggcagcgccccctgcgccgcggggaggcgccgggctggcagcggtgcggcgacttaccttctggtcgacaatggagcaagccatctcgcggacgtgcgccaggctgtagtccccggacgagtcctgcagcagcagcaccggctcacggctcaggccgatctgcagatggaacgagatgcccccgaccggggccgcgacaggagccaagaacggcgcgggcccgggcccggaccctgggaccagtgcggcggccgctgcggcagctgccgccgccacgggcagcagcggactgggcggccgcaggaccggaggggcgctcatcgctcggcggggcgcagggccgggcagcggagggcgggggctggcggcgcggcagcaggaaagttttgcagccgctgagccaggagcttctttctccgagagcccagacggaaaataaaaactttccggaaaagtccctgggctgggggagggcaaggggatgaggatcgggaggggaggggactaaggggaggagatggggaggagggaaaatggccgaggcgggaggactctgaggcccggaacgcggcagccggctcggggccgccggcactggggaggcgccgccgccgccaagaatctgccgcctggcgcgctcggaaggacggggcgacgggtcggcgcggcccgagcgccgggcgggggccggggcgggaagggggcgtgaggggcggggaaggggagctgggggcgggcactggggagccaccacccggcgg

SEQ ID NO: 237321 - DNA, 241 bp, Homo sapiens
  chr14:30739845-30740086
  hyper
aagctgaaagacctcggaacacaagcgttttgcttggtcactaagcctagacaaatgtaagtttccccgccccagctcccctcagcctgtcacacaaaagcgttcacatcagcagtcgtcagcggcgatgtcaggcgccgtgtcgttcttcaaacccttgggaaagctttagcttctcaagccaattgcactgcattgtcagtaggggtgtccgtgagctccccctcgtggctgaaggcca

SEQ ID NO: 237322 - DNA, 183 bp, Homo sapiens; identical to SEQ ID NO: 203514
  chr14:31027986-31028169
  hyper

SEQ ID NO: 237323 - DNA, 362 bp, Homo sapiens
  chr14:31091325-31091687
  hyper
aactcttagtattcgcctaacattacgggccactgaattaacctgcaccgggtctcccagttctaccgagagtggaggtcttcctggaggaggtggggtccggaactcaggcacaccctttggccccgcccttccgggctttgcttccggggcggtaagggcagccacgtcatccccccgctccgctccccagccgggcagtggctcgtgggagccaagatggcggcggcggcggcagcgacagcagcagcagcagccagtattcgggaaaggcagacaggtactgacttattctcttctccttgaagcttcgtgactgccccgacgacatccttctcctctggtgcgtgcagctcagagac

SEQ ID NO: 237324 - DNA, 465 bp, Homo sapiens
  chr14:31343657-31344122
  hyper
gccgccgggccccgggggaccggctcccgcgcttcctcccgcgccccccgcacagtgctcatgcgcacggcccagcctttatagcggccgcgggggccttgccttccgcactcgggcgcagccgggtggatctcgagcaggtgcggagccccgggcggcgggcgcgggtgcgagggatccctgacgcctctgtccctgtttctttgtcgctcccagcctgtctgtcgtcgttttggcgcccccgcctccccgcggtgcggggttgcacaccgatcctgggcttcgctcgatttgccgccgaggcgcctcccagacctagaggggcgctggcctggagcagcgggtcgtctgtgtcctctctcctctgcgccgcgcccggggatccgaagggtgcggggctctgaggaggtgacgcgcggggcctcccgcaccctggccttgcccgcattctccctctctcccagg

SEQ ID NO: 237325 - DNA, 118 bp, Homo sapiens
  chr14:31494513-31494631
  hyper
tacttaaagttgacgatgggaaataaaacttcacaggtcagtcccaagtcactgtgcaccctagcagcccaggaaagaagcgtggctgtcaaggggcaagcgcgtaccaagtctgagg

SEQ ID NO: 237326 - DNA, 255 bp, Homo sapiens
  chr14:31677205-31677460
  hyper
gtcagtccgagcgcgctcatgcacgcacgtccagcttgcttggcgccgtggctaacactttgcgcgctcctgcggagggcgtcgcacggcacagcacagcaaagctgcggcccaacctgtccccgctgagccttccgcccaggccacccgcactcagccacgatcttccctcctcgcgcacggaagtgcgtcgcgtaaggaaggcgtctccccccgctcctgggaggccgaccgcctggcggttcaccccaaaga

SEQ ID NO: 237327 - DNA, 196 bp, Homo sapiens
  chr14:31888988-31889184
  hyper
acttgaaataacgccgcgttggccgagagtagggtgaaagaaaatgtttcctcacactaagcaaatgccaccaaaggaaaagctttctttcctggagagaactgcaacagttagaaagcaaatatccacactctccactgctcccttctgggaactctctttgagggttcctgcagaaaacgaacgggcctctgag

SEQ ID NO: 237328 - DNA, 169 bp, Homo sapiens
  chr14:31889898-31890067
  hyper
gccagctggccgccgagccatcgagcgcccactctggcaggcgtgactgcttcaccgtcgaaagagcgatggagactgcggcccaagttaggattaggacagcggtttttcagtccggagattccggccacaactatttttgtctgtttttatcgtaagccagagtctt

SEQ ID NO: 237329 - DNA, 136 bp, Homo sapiens
  chr14:32030565-32030701
  hyper
ccgagcgttgctccgtgacgtcatcactccgcgccacccgcgacagtttcccagcagggctcacagcagcgttccgcgtcatggggatttggcagcgtctgctgctttttggtggggtgtcgctccgggctggtgg

SEQ ID NO: 237330 - DNA, 125 bp, Homo sapiens
  chr14:32030902-32031027
  hyper
ggctgaggcgtggcgggacttgaaacacagttagaacgtagatgtggtattctacattgctttcttggctttgggttatttatcaaatagattgaagaaaagcaaaacacgtggaagccttatct

SEQ ID NO: 237331 - DNA, 324 bp, Homo sapiens
  chr14:32670301-32670625
  hyper
ggaggtataaggacgtacaagaatgcttctccagttcaactctaagtgaacgatgtaattcctcaaatccacctctcagcctgtttttcagcgttcctgtgtttggctgccaggggcgaaagtagcggtcgagggaagacacctgtgaaggggcgtggctactcgcccgggttcctccgtccctgaccccagaggcgcctgcgcagaatggacagaggcgctgctgtacgagaggggtgtggccgccctgtccaaggtcctcagcccccgacccgacgggcgcctatgcacaccggccggagatagtcacgcagatgccagtgg

SEQ ID NO: 237332 - DNA, 443 bp, Homo sapiens
  chr14:32670851-32671294
  hyper
agacttcggggagacgccaagcgctccaggccggccctgtcctctgcgctccactgctgccgcacggactgccagactcccggcatgctctgcggactgaagtccgcggcacgagaaatcaaagccccggggcctgggtcccacgcggggtcccttacccagggtgccccgggcgctcatttgcatgtcccacccaacaggtaaacctgacagatcggtcgcggccagatacggcctggcggtcagagcaccaatcttacgagccttgtgatgagttccgttacatgaaattctcctaaaggctccaagatggacaggaaagcgctcgattaggttaccgtaaggaaaacaaatgagaaactcccgtgccttataagacctggggacggacttatttgcgtgctcgcttcggcagcacatatactaaaattggaacgatacag

SEQ ID NO: 237333 - DNA, 202 bp, Homo sapiens
  chr14:32671354-32671556
  hyper
ttgcgcggttcaacgaaggtcgttgggcaagatacggtggtgttcctagaggttgttcaagatctctcggggcctgcattttcctgctcgcgagcttggcccagtagacacctacgatgctgtccgggcctcccaccagtcctgtcgcacagtgggcacacttcctcgacagcctccatcttcgaggcgcctagttacgtta

SEQ ID NO: 237334 - DNA, 1523 bp, Homo sapiens
  chr14:33402213-33403736
  hyper
tgccccagcaggcgcgggacgccgccagggcgaaggctcgtctttgtgcgggttggctgtttcccgagagccatcagggtgggaggggacgcccgggtctgcggcaagggcaggcgtctggcccctacaccgtgtgcggggacgctaggctgggcggcctgtgtcactcttggccttggcaacttctggccaatccgccctgcccctctgggtcccggcgggccggctgcgccctaggctcaaagggttaagcaggtgcctctccgggcgaggcgctattggccgagggctggggcggcgcggccgcggtcaccacgcttcgccgatcccaacttgggttcctgcggaaggcaaggcggccactcgtcccctggctgcggctgcggggcccaggccttggcgcgcagggagtgggaaggagaaaaggacgagaaggggcaagcaccagccgcaccagcaaagggggcgagggtggcgcgcgcaagatgaggggagctgaagccctgcatcccgaaggaggctgcgcccaccgcccgcaactccactccaggctcgccagccggaagaaagaggaggaagtgggacaacgggggtcctgggcaggggtaggggaaacgatcaactcccactgcccccacccactagtcgagttggaatgcaagtcgtcacttaaaaaggctcacccaaaccgcaggcatacctcctcaccccttaaagaaacattgatgtaatagtgtggagaagtaactgagagacgcgaggaaataaatgcacgtgttttctctttttgtttccctggtggttggaatttgcagagttcgtctcagtggtggctgctaatttattcgtttcatcggtcgaaaggggcgtatagaggtgggtcagcggggcacaaccggatccctctaaccggacctcacctcacaagtttgtcctggaccaacccgcccgcccaccagcagagggaagggcccattcttataaggagaacaaactctccattgcacaaaagcggcttctttttttctctccgtctttgcacaccatccctcctcgataagtatcaagttctcgaggagcccaacttgcgcttggcagccctcgcgctgcctgatgtgcataagacgggcagagaggggttccggccaggaagggaggctctacgtccccattcctgcacacgcgggctggcttccaggttgctggaagccgcgggaggcgcgagcttgcctggatggtggttatttctctagagaaaggaggagagagagagcgcgcctgagtcttgcactttgggtcggaagtgcgcggcgtgtgtgtgtgtgtgtgtgtgtgtgtgtgtagaggggggcgggaaagaaacgcaccctccgctgccggtcattcccttgcaccggccaagtcctcgccaagcctcccggtgcatccttcctccgccaccccctccccttcttccctcagctgggctcgcgcggcgcagccggagcagccagtgagagcaacatcctggaaagaggggggag

SEQ ID NO: 237335 - DNA, 487 bp, Homo sapiens
  chr14:33404276-33404763
  hyper
ctcctgttttgtgtcttacaacacacatgcacattgccagggctcactttgcctgcccctcgttctacagatgaggaagaaaaacacacttcactttggtggattgaaaagcactccagtgcgctggcgaagtgaaatcatcctttgccctttgcctggccccaaatccagagcttcagccccgagtagcggaggagttgcagcgaagtctgagacgccgcacaaggtgcttttgcaaagtttaggatcctcatccctttccagtggaattttctcaatgcctcagccggatgcggacccgcgcatacggacagctaggggggcaattgatcactggaggctgattgatcatttgtttccaaacagaataggaacgattttcatgtgtagctgtaaacttgcaattctacataatagtgttatcatgtcacctgttactacagggaaatacagcatgaaatccgagtctcttcggcgctgttaagta

SEQ ID NO: 237336 - DNA, 1424 bp, Homo sapiens
  chr14:33407751-33409175
  hyper
gcgtacgagagagcgctctggagcaaagcagctggaaaatgcccagaaatactttcacagcggtcaagctggaaccccccgcgtgtcctcccccttcccgctcctcccggcctagaccccgcgccccccgcagggagggtgtgcgccccacctgccaccgggctgctccgggtggtagaaaggggtgacgggggacgggggcgggggcgggtggcggcgcgggggtgagaacccggaggcggcggggccctgggccgggctgcccgcgggaccgcgcggccgcctccccccgccgccgccgccgcctccccctcctcctcctccgccgccgccgccggtcgcctgtctccgcgccgggcatgcctcgggagccggggcggcccgggccgcgggcgctctgcggcgcatggacggcggcggcgccgggcgagcagcgggaggagaaggcgcaggcggcggcggaagcggcgacccacggctgggagcaccggcggcgcgaggggacggccggccgcccgcgaggctccggccccactacttttccgtagcctccccacctcagcagcacggccgccgccgccgccgccgccgccgccacggccacggccacggccccggccccggccaccgcccgccgggcagcccagagcgccgcgcacggccgcactctcccgccaccccacgcacacgcacacccccgcccgcccacgccccccacccgggaggggggagagaggcaaaaagtaagagaggaaaaaaaatagcaggaagatggcgcccaccaagcccagctttcagcaggatccttccaggcgagaacggtaacacttttctgtttattgaacctgccgccgggccgctgctcccgccgccgccgcctccgccgccgagggcccctctccgcagcccgcccgcctcctgggccgcgagcccgcggggacctcgtctgggcgcagcgctcgcccggggccccgcgcattgtccccgcggcggctgcggcagcgagaggctctggcggcggccgggctctctgagcagtcgcacctcctcggctcggcgaatagagtgactcactgacaaaaaaaaaaaaaaaaagaagaaagaaacagaaaagagaaaaagaaaaagaaacaaacagatgcgaaggcgctgccgtgtgacgggagcagcagcgagggtggggggccggggatccccggggccgccgcaggtcccctagcagctgctctcgaggaagggaatgaggctggggagggggagggaaggcggcgagcagggggaggaggcgaggagcaggaggaggaggccgggggcggggagcgcggagctcgcgccaggcccggaatgtgtcgcggaggggccggctccgtctccgcgcgagcagctaggccgggccgagcccagaggagcgcggccgccgcctc

SEQ ID NO: 237337 - DNA, 1218 bp, Homo sapiens
  chr14:34419302-34420520
  hyper
ctcgtcttaaaatcggaccacagccacagcttgtctggcttttgtcacccacaagagccaatatttcaaagtcaacagaaggtcatcatcatggttcacctgagccccttaacgttgactttcgctcagaggagctggggcgaggggtggggggaagcagcgagtagagacaaaccaggctgacttcttggttaaaaaacaaagttcgcttacggccctgggaagtcgacatacaacggactccgagtgcctcccgtccccgcgggagcagctgcggcagggcgccgagcgcgtcctaccttagacctctccttgacgtagtatttgcccagccggctcccgcagtagaggaccagcctgtcgatgagggacaggaggaagctgatggcctcgcagccctcctcgttgcccccgatccacgtgatctggtcgccccgcaggtgtcgcttggagacgccggcgcgcggccccgccagctggccgtcccgcagggccccggtgcagtgcagctgcttgacgcgctccaggacgcagtcgcccaccacctcgcccaggaagttgtccaggtagcagaagcccacctcgtgcagacagggcacgatgtactccagggcaattttctccaggtccagcctcatgatgtgtcccaggggcatctcgcccgcagaatcgaggtccgggatccccagcgtgcaaccagagagggaacgatctacacgagcgcgaagccgaggcgcggggagcgtggcccggggttcagaaacctgcggctgccacggtacccgagccgctgcagcgtcggggacaagggaaagtttctcgcaactctcgggagaagggatctgccttcgggaaccagcgggagtggtgcggagctccacgacccgtttccggactggcccggcgagcagtgcggcgcaaggagtcggagggcgccttttggggatgggaagccaccactgccgcgactgcggccagactccgggagacgctgaggtccggcccttaagccggccgactccgcgcgtcacgggctccgccccgggaccgcctccgggaccgccctttcccccgccccgctgccagtcacccccgcctgctctgcccctccgcgaaggatcccagagagcccggcgccaaccttagttgtttgtgaccaggggagcggctggaaagcagactgaatttttagaatgcgctggatttgcatattgtttt

SEQ ID NO: 237338 - DNA, 650 bp, Homo sapiens
  chr14:34529232-34529882
  hyper
tggtgccctcgcttcggatgcaagatcccagctctgctgcagctttcgagccggagggacaatcgaaatgatcaaaaatgcccggcgggcagccttggcgagcgcgcggcggggcgcggggtgaagtctcgccagggcgcgccgcggcggacaccgagccacacgcactgtgcctgcgcccgcggccgccccgaaggtagtcggtaactgcggcgggcggcggccggggctggacagccagccccgcccggcaggctcgcagctcacgtagcgctagcgtgagtcagcgcgttccagcgcagccccgggccgagggagggctcccgcgcgcagcgccagcagcccgcacgtaccggccccgggagggggcgcctaggtggttccactcgcgggtgccctgtgccctgcagtgtccccacgccccaggttgtccccctcgaaagccacgtgggcgtggggctcgccttccctgggcggagtccccatcggtgcctgcccgcccggaagtaggggcgcgagggtgacgggcaagaccgagcccggcccgtgattcttcctcagccggagctcgaccttctccttgtcccttgcgtttcctttctttgaaccacacactcgctcgctcacgtttgtcccgactaagttgcccc

SEQ ID NO: 237339 - DNA, 198 bp, Homo sapiens
  chr14:34931784-34931982
  hyper
cccagcgggcgctcggtccgtccagactggcccagagcgcttgcggaagaaatatttctggaacacttgttatgcctcaggcatccttctgagaaggaggattgccagggagaaccggaatgccttcggttccttaccttgtgcagctggcggcctagctgggagacaagcattaatcaagtcgtgatccgtgtaaga

SEQ ID NO: 237340 - DNA, 156 bp, Homo sapiens; identical to SEQ ID NO: 203521
  chr14:35008736-35008892
  hyper

SEQ ID NO: 237341 - DNA, 346 bp, Homo sapiens
  chr14:35451779-35452125
  hyper
cgcaagcagagaccgccccaccctccgcggaacaagcctccggtctgcaaagccctaagccccgcccctctacggaggtctcacgtgcgcctggggatccctgccttcagtcacacctctatctctcatctttccgctcttagctgggagtgctccgcctagtcacttttcttaaggtggctcgtcgaggcctgacttcttccccgaaatcacgtccctagacagcctcctattttaccactaactttactcctgcagttattcagcggtaggaaactgaaaccaaaaaccagtgtaagcaagtaaacatctaaactgtttcaggagccgcgtagaaggaacgcgg

SEQ ID NO: 237342 - DNA, 297 bp, Homo sapiens
  chr14:35591558-35591855
  hyper
tcattgttcattgcggatatctggaagccttccaggtcccctgaatgtagtagacacttcagcagccgtctcctaccccttttgccactaaatgcttcaaaactgccttttttcctcgccgccgggccaggcggaacgcctaagtccgggtcagtctcgtccgtcggtcggggctggcgcggtgcatcgtgggcactgtagtttccgccgcgtttatggccgcgttaagtctgagtgccgctttgagttgttgaatgaagtgaacttcatttgtcagcgttcggtacgcagtctagg

SEQ ID NO: 237343 - DNA, 103 bp, Homo sapiens
  chr14:35761313-35761416
  hyper
ctgataggcaaatcgctattctgggcccccaggaagccttttcgtccttgctatagtcaattcattctccagatgaaagcctgaaagcgccacgacccaagtt

SEQ ID NO: 237344 - DNA, 44 bp, Homo sapiens
  chr14:35872861-35872905
  hyper
gtcagagagaacccgggccaggcaagcggcgcacctgctgcagg

SEQ ID NO: 237345 - DNA, 52 bp, Homo sapiens
  chr14:35874140-35874192
  hyper
gccactagggtcacggacagggaactttttgatgagcgccgagtggctggaa

SEQ ID NO: 237346 - DNA, 821 bp, Homo sapiens
  chr14:36002427-36003248
  hyper
atgctgattccgccggcatttctcactcaatctactccatgctaaacaggccggttaggaattaagtcatactctgggtagtacaagtggaaagtgtgaacagagaaaccactttatgcgaggacagtggaaaatgagatcctcctttcctctccctactcctgctcctatcgagaagcacttaagagcgcagacgcccaggacccagccgcgctcgggcgtcccgactcggaggctggcggcgggcaggcacgctctcccgcgctgagagcccttctgcggagatgaactctcgagtgtcgccgccgcgcgcgggcccgatcgataccggcgggcggacgtgctcccgccgccgacagcagccacagggcggtgcagtcagctgtccggccgctcggtcgcacttctcatcagctcaatacccgcagaggacgtgcaccggttccctcccggacacccaccccgtggtctccgccgcaccttctgcccaccgccccttccgctcggccgtccggcgcagagcgggagcttttcagccagacgccctcgcgttgggggcagccgggtcccggcccgagcggagggcgtcgtgaggtggccttttcgcccggctccccagtgggacgctccgcggaggcagccaaggcggggagtgtcgagctccctcacactctggaccttaccttctggcgtcttcgcccgggaggctgcagggggaggcggacccagccggccacaggggcaggttcgcggcgctgtgaggcggggctgggcgtgcgccgccgccgccgccagattcgtctactccagtgaatcggcac

SEQ ID NO: 237347 - DNA, 48 bp, Homo sapiens
  chr14:36003668-36003716
  hyper
gaacagtcggggtcgccatgtcgggcggctggggtgagcccggggacg

SEQ ID NO: 237348 - DNA, 280 bp, Homo sapiens
  chr14:36004856-36005136
  hyper
ccacttgccttcgcttgcccattgtgcggagcgcacttccctacagcagatatcagggagaagcaccggctgtggcatgctgtccgcgaggagctgctcctgcccgctctggcgggggctcctcccgaaacgtcgggccctagcgggccatctgacgggagtgcccagcaaattttctcgtgcaagcactgcccgtccactttttttagctctccagggctgacccggcacatcaataagtgccacccctcagaaagccggcaagtgctgctgctgcaga

SEQ ID NO: 237349 - DNA, 152 bp, Homo sapiens
  chr14:36278470-36278622
  hyper
accctgcagaggccgaaacggagacgagtgtggtagtgatggggtttcacgactctgccgtcggtggcgaacggtgtccgtggcaaccgccttctgacgtcaagagttcttgacgtcatgccagcatgagatcacccgtggcactccccgcc

SEQ ID NO: 237350 - DNA, 191 bp, Homo sapiens
  chr14:36295494-36295685
  hyper
cagggcaagcccccgccctctggctcggtggaaggcctccgccaatggcagagctcccatcgcagagcctgcgggttaggttgtgaggcccgggccgggggcggggaggagccaagggggcgagcaagctcggtggctgggtgggttggggcgttccgcgcgcccttcattgaagcggcggtggccgggct

SEQ ID NO: 237351 - DNA, 325 bp, Homo sapiens
  chr14:36789320-36789645
  hyper
ggaggaaaaaggaccctgaacgctaagcgcctcctaaactcgcagtgaagcttttccacattcattctctccaagcctgcctctctcggagccgggttttcacttaggccaacctcacccactcttggggaggacagctgcaaggtaaacgactctgcaaccggtaccgccgtcctcctcactccgaccgaggaggctgggcccgggctccttccacacctcggcttcgggaccgcatcccacacctctgcaggcctagctgcccccggcctctgctagagaaaaagaatggcgaggagggaccggatggtttccatattcccag

SEQ ID NO: 237352 - DNA, 38 bp, Homo sapiens
  chr14:36972874-36972912
  hyper
ttgtttagatcctgcggttggctcgctcatgaatatta

SEQ ID NO: 237353 - DNA, 666 bp, Homo sapiens
  chr14:36973149-36973815
  hyper
gcagcttttgagaactgcatcggggttaaacggcagagatcctgacgacctgggcgaccgtccctgcgcagcccggcgggaggctgcgcccagaatcctgggctttgggcctctggggcccggcgaggagatgaagaagtcaagcctcgagctctccggaggttcgatggccgccgggccagtgcgggctcagaggaagaccctgcaaaaaagagcgctcgcccccacccctggagccgaccctgcgcagtagggccgcagccggtccccgcgggcagctcagcgggcgcgggcgggaggctcccggaacgcaggctgaggtcaggctgaccacgccgcctcctcagtcgccgtatcgcggggctggcggccagcgccttagaagagcctgctccgccgcaggaagaaagacgcccgacaggcgcccactgcccgaacccacgcgggggccagtcagccagcgggccgtgttgggaaagctccgcgcggcggcgggacataggatccccatcggggacctgggcgacggcctgagcttgggcgcccctccagctgggcgtcatctccacacagttcttcccttgcgccgcgaattcagcccctgtgaagacgctttgggcattggcgagcaacaggggaaaaaacgagtcacttaaatgggagaag

SEQ ID NO: 237354 - DNA, 1036 bp, Homo sapiens
  chr14:36974421-36975457
  hyper
tcaatccgtggcttcgcattcatttgaatgctagaaaaaataaacacacattaagacttttgaaggctccatttctgaattcaagagagatgaaacaaattcgcccaaaagatagaaatctttgcctcggaaattatcggagaatattaacggagagggaggggagcgcgcgggtcgccgaggaaggacgcgggtacggccccttgctttggggtggcagagccgggctcaggagccagccaagctgacttcgcgaggtggcgcctgggcctttcgggggaaagccccgacggcggagccgcggctgggcggggactcaaatgctggcggcctctgggctggggccgagcagggggtgccgaccgcgggaagtctgggcggccgccctcccacccagacgagccgatgctgggccgcggtccctctcagctacctcgcttgcccgcctcggggcccctggagaggggtctgtgcctcccaggcagggaagcgtcttgatgtgcaccccggcgttcaccaaccaaataagggcctcgctcacacagtcgatgtcatgctgggtattaaaagggttgtgctgcagctaaaatatctcacagtgtgtgtgaacctcataaaagggaggacccggattccaagcccctcgaagtccccaagcagcctggagggtgggggactcccctctccttctctccacactgagcccccgggcaagcccaggcctcctcctgcgccggggtccccgggctccgaaactgcgagagccctgcggagcccggccagaggggcagagggtgggggctgggggcggggacctggggggtgcagcccagccagaacccgcggcctagcctgatcgcggggagccgggatccgccttccatcctgggaaacgactcgggttagggaagcgggatgggctccgctcggagttcccaggcagctggggcgccctccaagtgacgcctttgtccaggctgcgctcgcggagaataaagggggcgctgtccaacctcaggttcggggaaaaccaagg

SEQ ID NO: 237355 - DNA, 1350 bp, Homo sapiens
  chr14:36977298-36978648
  hyper
aaacagcagtagttcgctggctttgtttggtttcgtttatttgtacaaagaaagattgtgcgttaagatcttttttaaaaatccctgcaagttagagtttgcatcatcgtcgtgacctagtgaactaatatttgtatattctgggatcgaaattccgaggaagtttctgctcttccgcacaccagacttgccggtgtggtctccaggaggggttgggggccgcgtcctcagggggcgcgcggccgaggctgttcccagcgcgggaacgggagggagaacctgggcaggggcggggcggggcggggcgcggggacctgggtacgcggagacgcggggcgggcgggggccgagagcgaggctgccggctgggtgttgggagagaggccgcgggtggacggggtaaggactgggactggggagactgagagctggggggtgcggggaggatgaggctgcggacaggaaacgaagggcctgggacagctgcttctcttggtcctagaaaccaaactttcgtagcgagagaccctaagacagctcgagatttcaagtgtccacacttctagtttagacatttggcaaccaattcggaacagccgggccgcgaggggcccccaggtctttggcggcgtcgttgggaggccgcggagttgtccctgggcttccctgaaggccccgcagactccccgccagtcccggccacacccagccagggctttgcagctccagcctgagaatgttagccccggcaaccccttctggcggttgttcctttaaaaaccaattcattttttccatcaagtcttctacccaatgggtagactcttcgttaaatgactgttaaccagtactgaggagaagcacaatcaacatagtttctctgtcacctttcttgccggttttttcctcccaaccatggagtctccattttctaagcaattaaattatatattcaacaggaacattccatttaaaatggttcgggacagaagactgatgcacaaggtctgaagctggaagaaaatatttagtgcttgcctacagattctgtcacccatcatctgctcggaatgcgctccgtatctttcagcgtgtccggctcttatgattgcaaatggccctgttttcaaatggaaataagacttgcaaactgattatgtgtattgaatcagaatcactcgctagatcctcttgtttaaaatgtattgaaaaaaggatgatgggtgcagacctctgtaaccagctctgtctcttctctgggaggtcgatctattttgcaactttttgccatttgagcgtgtttcagccagataattacgttgccattgtgttaccggcccaaagctcaga

SEQ ID NO: 237356 - DNA, 191 bp, Homo sapiens
  chr14:36979680-36979871
  hyper
ggaccataactttgcgaggttcgctttacacataggcatatccagttccttagacattgactgggtctcctgggttgcggcagagcgtgcagtcagctcagaggaactagctctcggtcctcttagtgtcattatggtaattcacaggtttacttctgcgcgcgcgcactcagccccgtgtgtgctgctga

SEQ ID NO: 237357 - DNA, 293 bp, Homo sapiens
  chr14:36981788-36982081
  hyper
cacagctgcacaaggaggaacgcgtcagccagaaggcagggagagccagaggaacatggtgtccagcgtctcctaaccaggatctagccgagcagagaaaacattcagcctcctccctcccaatacccgtgtctgtcactttctttccattcaaaaagaaagtcctagttgaactaaacaagccagtaacccatgcctaagaatcatatcatctcagattctcatctcccaatgggctttctagttctccacaaataaaatcgtctactctgcttcctcgcgctaataattgg

SEQ ID NO: 237358 - DNA, 184 bp, Homo sapiens
  chr14:36982700-36982884
  hyper
tctccaggagtgcgcgcccagagcgtttctagcggagactgcccaggcctggctcggatttcagtcgcggggccccaggctacttcccaccgggccagcagcagggccgagccgctgccctgttggctgaggcattccctgcccccacccccctcctggccttgaggaccgcagtgtgtaccct

SEQ ID NO: 237359 - DNA, 1476 bp, Homo sapiens
  chr14:36983115-36984591
  hyper
gaagccactagagcggctctccaaggctctcgagaaagtcctagtgtttacatggcgaagtgggggtggggagaggaggaaggggggtgcagtgtgcaaaatctcccccactcctctcagccgttggggcctagggatgggtagggtactttggcggaggcaaagcttcgcggtgatctcggggtgaaccgtacttgctcccaaacctcggaagcttccaagcacctcagcgccaggggcatcctcagaatgctgatttctccgagaggggaggccagaaattgggcacgagttgatgcaggagattcccagaaaggaggactgtcggctttccagaagccgacggtgctgtaggggcggagggtgtccccaggttgcggaaccctcttgcactgctcccagcgcgcacctatttccctaatgaaacgcttcagattgcgttctaggtctcttcccgcagctgcgacaattcccccagccgggagcgggagcggatggagccagcgtaattgatggcaagaaagaggctgaggtcctgtttgtctcggtccgcaaacccgattgagttcacctttccccgggacaagtaaacagacttcaaactatgccgactgtagacggcgaggagaagaatgtatttgatggaaactccatccaatgcaaagatgataaggccgagggtgccacagcctactaaaattgtgactcccaaaggcttcctcccagctagaatggggtgcggggcagccgccagaaccacagccgggcaccgccagccaggtccccgcccgggcttgggctaggctggggcaggttaagcgaagctccaattccgtgggatccggacctagagccaaacagcagctgcagtatccatgtcccctgcccggccggcctgagctgggtgccttagccacctacactcccggtcccggaaccacagctgaccattccaacgcaagtggtcaaatttgtttgttttccaaaacgtgagacctgttaaaatctcccttccccgccttccaacaagcactctcactagacccaaccatcctcttgggaatcttcgagtccctctggctgttggaaactgtgtctcagcagtgaggcccaggtttctgagggagaaagcccggcctagcccacagtcttaaggcaccacgccagaggaggctccaggaagttaacaaagaggactgctgggcccggagcgaggactccggccagtctgctttcctcacaagctcttggtgggggagcgggagagagggattgggaagagatgcagacgaataacgaaatgagagaggggaagagaggaagaaaaagaaagttgaaaacctgggcgagaagtgagtacatgccaaataagaatcaattgcccataatccaatacttccaggcctagaggaaagtgctgggaggggcgtctgcccgcagctggctcagctgcctttcgaccggagatttggcaag

SEQ ID NO: 237360 - DNA, 138 bp, Homo sapiens
  chr14:36985894-36986032
  hyper
tcgcggagggcggtcgccgctgagcctaggcggccagagggtgccggggagggggcacttcctttgtgtcagtgacaagtgggttatgttgaagactctttcctctccccagctcccgtcctcccttcaaaaaaaaaa

SEQ ID NO: 237361 - DNA, 2520 bp, Homo sapiens
  chr14:36986349-36988869
  hyper
tccttggtctaaacgcggccaggttgttaagaaaagtcgaagcgcgtggagcagcggtggatggtggtctgtgtggcgggcaggagggaagcggtgaggcagagcgctgggctagggccggcccggcgtcctctcaccaggtccgaccgtatagcaaggtggagcaggacatggtgccgtagtccgagcccgaggagttcaggtgggacaggctggatacctggccctgcagcgccgcggggctggcggcgtggtgcgccaggtccggagactggcctgcgctgcctggctggtggcccgggtgtgcgccaaggccggcgccaccgctgcccacggagatggccgctgccgccgcctgcgcggcctgcgcctggtgctgcgcctgctgctgcgcgtggccttgtaggctggcggcgcccggcgcgggggcacccgcctggcacggtttgccgtctttcaccaggaccggcaccgccacgcgtcgcggcgactgctgctgagcctgttgctgctgcgggcacccggtgcccccgccgcccccgccgccgccgctgtcctgctgcagttgctgctgcgccgccttgtccttggcctggcgcttcattttgtagcggtggttctggaaccagatcttgacctgcgtgggcgtcaggtggatcatgctggccaggtgctcgcgctccggcgccgacaggtacttctgttgcttgaagcgtcgctccagctcgtacacctgcgcctgcgagaagagcacccggcgcttcctgcgcggcgcgcttggcagcggggccatgttcttgctcacgtcccccagcgagcccaggccgcccatgccgctcatgttcatgccgctcgccgggcccatgaagcgggagactgtaagcgacaaacgcacagcgtcggccggggccaggccgagccaggccacccctgttttccgcgccattggcccgcccggcccgccccaaccgacggcgccctcctgacccaggcagcctagcgctggggcccaagaggcccatccgcggggaactgccagcgcctgccccaggccgtaccgtcgagggggctgtactggagcgctcacagccccaaccctggctgccctccctcagtctcagttccctctttcgaaccaaaagacgcagtgggggaaaggccgcttctgctcctttcgtgcccagcccgggtcagagcattaggattagctggccacaggcggcgaactgggctcaggccgggagctggggtcctacggtagaccccagtttggagaggttaggagagggggtgttgacttccaaaagctggagcccccagacgctttgcctcttggcttctctcctgtcaggccccagtgagggcacctgctcggacccttagagtcccctctggaactgcgagtcctcccacctgcccagactccgctggagagagggccgggccgggcgctcgagtgcctcccaacagggcagcctccctcctggcccggtctagcctctccgcgctctgctcgcccctgctccttgagctcggggtcgcttcccttggctccccgaggtcttctgcgccgagcagagctgccagtccaccgcgcctaggagacgccgagtacccgcatctgaccgcaggaccccagcgctaccaagtgcctgttcttggacccccagccgagcagggggaagcatccccagctcccgcacccaagtccctggcgccgctgccgggccgccctccctgatgcccagcgcgcagcctgccggcgccgcgccttctggacggctctcgccgcacctcctgagctcagcccgcggccccgcagtggggcggcctcacttactggcggggaagcgcgggtctgggttggcgccgtaccatccggggccagaggcgctgttcctcatggtgtcctggtacggcggcagctcgctcatgttgcccaggttgccgttgcagtagccccccacggcggagtgcgagagctggggcacccccgccgccgtcatgtggtaggcggcggtgacggcgccgtggtgccccacggcgtgctgctgcatggccgctgttggcggtgccgcctggccctgcctgtacgccgccagcggagccccgaggccgccgccctccatgcccactttcttgtagctttcctccaggggactcaagatgtcagacactgagaacggagtcgtgtgctttggactcatcgacatgattcggcggcggctggaggaggaaggaagaggaggaaaaaaaagggagagggggaaggcgaagcctcgctgctttttttttctccctttgccaaatattctggtgttaccttaacgccgatcttgttggatgtacacgtaacggagtggaccgagtcctccttaattggcttgagtggaggctcgggggctgcctcgcgtttgttttagcccggcgccaggttttaggcagccaccagaggcggggcgtaagcgctaaagcaacaagacaatagaagcctacatcttgcccgagataattagctta

SEQ ID NO: 237362 - DNA, 1366 bp, Homo sapiens
  chr14:36989193-36990559
  hyper
gggttccccgggcacggacaggtctttaggaggagggggctgagggacagggtgggggtttcacctgagcctgccggggctgctcctccctcccgccgcggcctcccagccccgcgccttcccactgcctccggaccacatcgggcttcgctgcgctgagccccagtcgccaacaaatgagcgagcgagtctggggacgaaccctggggccgcactgttggtctacgtgtctgtcagtctgtctgcctctcttctgccgccgtcagagggacacctctgctccccgccccctttccccctaccggagagaatccgagcgggcggagggggcgctgagtaggggatcgactgcctcccggaggctgtcccggatccccgagccacaacccgcccccgcagctcaggggtttttcagtgggccacccccgctaacacgcctcccccaaggtcttccccccccccccccacccccggccgagcaaacacagcactggcccccagagctgggaggatgggaaggggtctcacgggagggtccgtcactgaagttgccccacctcgaacaaacctggtgtccctgaccctcgcccatctcccagacacgcggggatctggggctggagctgactttccgaggacatcacagccccagcacccgagcccagagccacgctgttttcccctctgatgcttcagggagcgcgcgagcagggagcggcgtgagtgcccgtctgtctgttgccgggcggaactgagcctgaaccccggcggctggagcgctggccaggagggggcgaatgccgaggtgcgggcagctcagcgggcgggaggctgggccgaggctcgcctccgcccgcagctcagccatgcaaaagtgctcttgcttcccgggaataaccaaatatctttgtttaaagtggtggcgtaaatggccagtcgctttgtggccacgctggatattagtagatgaggatcattctgcttcaattgggcgcctctcatccgacgagcaagaaactgcttaggaggaagagggtttcctgtctgcgcgttcccaggcttcaagtgtgggccccgcgccttgagggtccttgggcgcctggcgagggggagctgtgggctgcgctccccagcggaatcgggggtgtcccccgcgttgctccggccaggccggggcctgcagccgagtcgactaccgagtggagcactgaacggcgcggattttgagaccgactccggtttttgtccttggattttaaacgtttttatcattgtttttgttttgctttctccttagctgttttagtctcctctgcgcgccaggggctgggagggcggagcgctccccggccggccccggcaggtg

SEQ ID NO: 237363 - DNA, 349 bp, Homo sapiens
  chr14:36990873-36991222
  hyper
cgccctcccacctgcgcccgcgtttttgtgcggtccccacggcagagctggggaggccaccctacgtttgcgcagggagacgcgctcgccgctggtgttgcgaaagaccagagcgaagcccggctccttgcccttccttcccaggggcttctctggggggcgctctcaggccccgacgaactgagcattgatcactgtggtggctaagcaaggaggggaggcgacgccgggcttaagcgaaccacagaggagaactggcaacgctgaatacagaccttgtctgcaggcgcgacctggccgggcctgagtcccgaatggggtctaattgcgaaggcggggtgggtttccc

SEQ ID NO: 237364 - DNA, 863 bp, Homo sapiens
  chr14:36991601-36992464
  hyper
ggctggcagctccccggcctccggctctgacagtccgggggcaaccaggcctgcagttctcgaggaaacccccagccccccacgtctcgttctggaccaggaaccccctccccaacaaccgcgcagcaagtggcgactctgggagctgaactggagtggagctcgaagtggctggggcgggcaaagactcccgcttcactctgggacacaactgggacggcgcttcaacctctgcctgcaggcgtgcttctcgcgcgcaccagcaagctctctatccacctcgcctgggcctttgcagcgccctgccgcccaggctccagcgcctctactaccctagccccttctcaacacgcggctctgccttcttccccagtaccactgcactgccgaaaataagcccggagactaacgcaccttgtagggaagagaaggacatctgtatctccaagcttatccaagcaaaggcctccagagtccctcccatggcccgaaacacctccctctgaccgaagagcgtcctttctttccgccgcctcctggactcatcctaaatagggcagacccgggctaaaccagtgatttttttttccatgaatacgaagaaccccgattgcactttgcgaagtctgcgcgtattcctttatcccgcaactagcttgctcccgggtggagtgggcacagtggggagcggtcagggcagggcagggcccaacgctggcccctcgcggagctttccctggcgcgacctcacacggtcgctgcctctattccgaccacgctctgcttcgctggctgcggctccgccaggaatccgagggggcgcaggcccaggctcggccctagatgcgcggaatcgccatcag

SEQ ID NO: 237365 - DNA, 1578 bp, Homo sapiens
  chr14:36993502-36995080
  hyper
ctcgcgagtgccatcgaggcaaccaggcgcagggagcggaaggcaggagtgtaactgggcgctggggggcgctgctccgcaaccccaagatccgaggaatgcctccgggggatgatttctctggaggggtctcgcagggccccctctgcgctgctttctcaggcaccagaaccgaaatcctcgggagggaccgcgggagcccggggcgtgcagacaggcggctttcacagacgcagcgggaggaaggatccctctactgctccctttcccgatttgaccgtctagggcctttgagaggactttccttttgggaaagcttttctcaattcgtggcctgtgggcaggctggggggtggggcgccaagtcatccgagcgcggcttctgcttctccctttccctcacaggcatgctctacggagggtatgggaggcgagggcgcgtctatgagggccagagtccgcgaagagagtccggcccttaggcctttggtgttgaagaatctgctcctctgtcgggtcaagccccactagaagttaacacctgtggtctccaaacttgcctattttcctgtcacgcagttcaagccaagattcaactcgtcttgaatttttgtatttagagcccctaccttctccaccgactccaggggcgccctctggcgggaaggggcctggggtaggagggaacctgagggagcgggttacaaagcagagaacagcgggagctcagcagctccctttgaattgcgaggaaaccaagacggagacgggaggtaggagcacgggcctgaagcggtcagccgaccctgtgaggcccgcgctgccgtgctacgccgcgaatccgccagacgcccccgtcggaaggggcagggacaccctcgggggcgctctagggttcgtgctgcgctaaggtaagtttcgcagctgctcctgataattaaaggacagattcccgaagcatccttgtggcggcgcggctgttttcgccccaggacctgtgcagcctcattcagctttaggtagtcgaaacctatagctctttctgccctctgttccccaacaaatctcagtcccaacagtgggagcccgtgggccttgggtgttcgagtttcccgcgggcttgccagcagcgctggggttccctcctccgctcctttcctcctctccaacctcccaccacagcccgtctcccccacatccccaacacttgtcccaggcagtttccggtggccgcagtatcgaccccaggccattggggtgggtgtgagggaagggtggagggggaatctccgaggcccaatgttttctgggacttgagggaggctgaattctccctcgctgcctaggacttggggtctgaaggttgcagaccgaggcgatccgcagcgccctcttccggcggccgtctggagaactgcagctttagagcggtctcggggaagctttgctactagtttccggctagggaaaactggtggtggtcggagactggtagtacatcatccacgcattcgctcattctaactgtccgcccgaccatacgtcaggctgtctatcggtccacccaaagccaatata

SEQ ID NO: 237366 - DNA, 1679 bp, Homo sapiens
  chr14:37050238-37051917
  hyper
ctcctgggccgcggcggttcccacctcgccaccgccgccgccgccgcacggctgcccgtcgcgaacaagcaccggcaccaccacgcgacgcagcaggccgggcgcggcgtgcagctcggcggatgctgccaggtcaggcgactccgccgcccctggagcgcgagcgcgcttcagcttgtagcgatgattctggaaccagatcttgacctgcgtgggcgtgaggcgaagcaggctcgccagctgctcgcgctcgggcgcagacaggtaccgctgctgccggaagcgccgctccaactccagcgtctgcgccttggagaatagcacccgccgcttcttccttttctcggcgtccgagcccggagacgcgggcctagcggacggccgctgcgacgagtctggcgggctggtctccaggctgctctcgtccgaggctagggacagcaaaggagacacgggtgggtgagacgccggaccctacgagggcctgctgcccttctggcgcgggcgtggaggcactggccagagggcacgcccactagcccgagactttcgggatgaggccatttcctgagtccacatctggacatccacctctccgaatgcggtgacctcattcataccacagcggtcatcagcgggcctgagatcgtgccccgaaaaaacccaccccggggccctcttaacatgtccgcaccggtagttgcgctggccgaccagtttatcacaagctgggtcaccagcgccggcctcctccaggtcgactgcactgcagtgtgccgaggtttgcggagccctgagtgggaacggggtgggggtaaactcgccaacactggccatcccagacggaggcctggagatcgtggccgtgttttcaggcatggagagggggcggggggtggggtgggggcggcaggtggcggcgcgttttaaatttcaattattccgacctctagaaatcgtcagacacagaaaccccaaatctcggagcaccagtgccaggcagggatctgctcttaggatgtgccgaccgggatgaatgcgttaggggttcgaggacagggctcccgtttccaagactgaggaaatctagactctgggctgggatttcggctttccggcccctcgtgggctgggcccttgattctgctgccccacgcctcctacctcccaccccgcaccgcaatccaccacgcacttacaagggtagtggccgcgctccgaatccagccaggcggcgcaggggtcgggctggggggcgcgtggttctggctcccgcctcggcaggtgttgcgcgtcctgctcgggtaaatctagaaggctgcgcacggtgaagctcaggcgtccagaggtggccatggccgaggaggggaaggaggcgggggcagggcaggctgggaacggaggggcggccgggacgccgctcctacggatgggcgtgggaggcgctcgccatgcgctggcagccgggatattagcgcatttacagcggaatctctgtttatataaacagctcttcccacccaggccgctttgaaagccgaggtccgggtctccagggtgttaagtacctgaatgagcactggaccagagccggggcgagcccggaaggtgccacctccgcccccgccccgccccgcaccccgccccgcaccccgccccttggcgcccagttacctccc

SEQ ID NO: 237367 - DNA, 1997 bp, Homo sapiens
  chr14:37116035-37118032
  hyper
agagggcttgcccccgggacaacttggagcctgcttctggggagccacacacgtcctctcccacttcttgctggagacttggggacgtgaagggggggttctgtgatcccggaaaaaaagtaacttctcttggtaggtgatactaggcagttgcgtcccggggagtccccgcctttctgcgcttcccctgacgggggcacaggggccggcgtgcgtgtgtgggtacgtagctcatcccggggagctgggatcctcttttccgcacttggggaagacgaatgccgaccattggctcagacaccataccacacaggcatttctggaggcatttcgcggcgttattatgggaagttgcgcggaccggggccttcgcgctacagccgaggagtctcagcgcctgccaggcgggagccgcacttccggcgaggtgtcttcgggagggggcgccacagcccgtggcagtgccggcctcccgccttaaccagcccgactcccgccgcgccagcaccgtggggagcgagtgggtcccgcccggccgcggcctggacctggcagccgggcttcgtgggcgctctgagccgtggcccgtggcgcggggtgatccttgtgcctggcgccggcctcagaaccccgtttacggctttccgcgcatacggaggttgctggggaccccgacacctgcgcgccctcgactggggcccgctccagcagtgaagacccaggcccttccctgggccgtggctgctcttggtgcctcatgggagcgcccggggtagggactcggctagtgacctgtaggacatgaggggcgagctgggagccgattcgcccacggcgtctccttcgccatggaggccccccacccattccactccggggttgcggccacgcaccataagagcaccttcaggtctgagctctttaggggtgggagtaggcagttcgtgagtccgggaaggcctgcggggtttcccgcctgctgcggacttagcgtggggccgaccggggctggcgagggctggcgaggactggcggggacccgcggggctgagccagctctcgcgaagccctcaagtgaggaacggcgcttgtggctgcgcgctctccgcagccaagttgcagggtccagcaggggctcaggtcctgttccctccgcagatcccggatctagggctctagtggtctcggccggagggaaggtgacgcgcagtgggcgcagacgcagagtgcggggcgccgaacgtgggaaggagcgggttcagcgcgctggtgagagtttcaggaaatccgggagagggcggtatttaccagtcccttccccgagagcaaccaggcaaatcggggaaggttagaggtgggggacctgcctgagccgggacaaaaaactttggagctagggccttctaaccctggagacttgccgactccggggcgggctctcgcactcaagtcccgagatgggatgattttccaactttcgtccagcctctccttccgctcccgccgctctgctagcactcccgcactctctccctgggtcacaaccctcgcctgcggaatacctgtctgaagggcgcgtcagtagaagcttcgtttcatactacctttcttactgttctcttcatctaaatcgcaggacattattctcggcttcatttccacatagcattcggcagtggacaaggagtaggcggacccgaacctgaacctgacagctgatgccgtgaagtggacacttgaagttcttggtttggctttagggagcgtttagggaatgtgttaggcagcaatcgggcaagcatgagctgtagcccaacccttccctccgtgggaaaattcaagttaggacgcaatgcgaggcctcttaaatctttaagatcctcgggtcagctcaaagagtctttagcaattcgttgttttgtcttgagaccattatcggtccctaagcacctaattatttaatggcagccctctgggtatatcgggtagactgatag

SEQ ID NO: 237368 - DNA, 981 bp, Homo sapiens
  chr14:37123598-37124579
  hyper
atgcccccgctagccgcaaggttcctgctggcctgtagagctttcgtgatccccgccaagatgcgaacagtaaggtcctcgtatggatcgcagtttttgtccgaaacctgaaaacactaacttgggatttcgcagttctggccctcgggcccgcctcggaggcgcacccccaatccccacggaacgaattccgcggctaaaatgcattttcccaaggcagtaaaagtgacccctgcacctaacaacctttgggctttctcttctcctgactaccacctctcgcagggtgcgctgaaatctctttatcgttatcgttttttataaatgaaatgatttatttattcgctgtttgcagggaatgaaaggagttgatcctgactccaagatgcattccaaagaaagaaaacgcaactgtagcccggactccgcggaggaaggccaactgactccactacgtgcacttccgagccacttgggcccagctagctgtgttaattatgggttctaattttattgcaactcggcacctcctggtttgttcccactatagtggtcttaaaaagaaacacacacaggcataccccagaatgaatccccgggaaggcaaaggtagattttttcggtgcttgagttgatgctctgagagcgcgctgagagtctcgggcatgtcttggcactcttggaaacaaattgcagccaagagcacggttcttccggtcctctccttgctcctctgtgcgccgctcggccgcgggactcctggaacatgttgtgcaccgcccgagtggctgcggacctcacctcgacgccctggatagccggggccaggaggagacgagcaggcagtctcccgccctcacctagtcagctgcgacctccgcggcgtggactcttggccagcagtgaggaggacaaggttgcagatcctctttgctgcgggttctgggtccggccttgggcggcattctgtcttctaaagtg

SEQ ID NO: 237369 - DNA, 791 bp, Homo sapiens
  chr14:37125018-37125809
  hyper
agaagatgggttttcggtgaatcgtgaaaagacatgatcgggtttcccttggagcatggtggagaatgatgcggagccttggggtcaatggagagttgagggtgcagagggatctgaaagggggaaccaaaaatatcgggctttgaaattctgtggattttcaaaggcggttcccaaccttgtcaaaaactacagtgggtgcgcgatctaatctggctcctataggtggcgctgtgacaaggtgcggtggccgggagaggcggctgggggactcgaagactgcgggaaattttctgcgactccgacgctaacccgctgctcccagcctccgcttcctgttttcgagggattagctaggactgtgcaacaccagtctccgctctcggagtcggcacgggggctggtgggtggcgggatgaactcggggaaggcgacaggctggaaacgcagctcctcgactttgcagcgcaccaaccccctatcgccccgtccgctgctcaggtgcgaggattcgccagacgccacaggactgggggcgactcgcaagggcatcatgccacctagaggaaacgcgcagtgagtgagccctgggtcactgaaaatgggagaacgttcgagtcggtcaagatgactccggcctgcgagttgattcagactcctcggaagccagaaattgggtctagagtgggttggtccctccgtcagcagttcgggcccagccgaagcttggggcctagagggcagacgtccggctctgatcagagtacagcgggctgggcctggcagcctgc

SEQ ID NO: 237370 - DNA, 2797 bp, Homo sapiens
  chr14:37126047-37128844
  hyper
ttgcttttcccacacgcagctgcacctctcctgagcgctgcagctgatggctgtatagtgaccacggactgcgtcctcctcacgaagctgcgcaacttctgctaatgctgcaaccctggcaagacgaaatccccctccctctggctagatcagcccagcctcccctcagggaccttcctgcccctccctacccctccctacccctaggccgctccccccttcctctgttgggatccgatccttgttcgctcttgcaatcccgcagcccggagttttgccccgtgcattaaaacatgttctctttcatttgcagatttaataaacaaacgtaaccatatcacatggagctccacactgtccttctgaaagcaattccgctgttgaaaactgaaaaatgggtgtaatttgctttcagaaagtaatgttagggtcacggcaatttctcgggccgttatttatttttactttaaagtctttaggaaagatttgcttatatgctcggaaaacttccaaatgcgcgaataccagcaatcccgctcgccttcaacgcgtggggtaagggggggtggggaacaattactgagtgacgctaatatggggaaactgaaaagaaatgtcgattgtttttattgtaatagaaggagtgagcaaacagaaaaaccaaccccgggtgatcggaaacaggcaggcggagaattaaaagcgggtttcagacagcaacaggcccctcccctgctctcgcaaggagaaagcgggcgacgagcgctcgcagcccgtggggctgatcccacctcccgcagggctccggtcgtgtcgctgtcggaccgcagaacgccgggacgcatttccgagctcgggcccgacccaacccgctgccattctagctacctagtggagccgcggagagactcttgaaccgtgaggctccttgatgagaaggtggagaggctgccgggctattctccgagcatcttccggccgagctctgctcctctccgtgcgcttgcggcttctccttgggctagcgcgtccgcagtccctccaagtccaggccgcaggtcagtgtgcgggcgcctcctgtcctcctctcccaccagaggacccctgagggctgtctccatccccaatccccgcgactgctccttttagccgccatcccctcccgcagcgcagatcctgcaggggccagcggtccagggcggaccctccctcgccctgggcgcggggcgagcttctggctgtcacttgccgctgcagtttcagggaaactcagctggccgcttaccctgcaagacggggacatagcagagggccgagttctggagaagctgggcttgtttttctctctgcaccgcgcgcaatgccccaactgaccctgaagggtcttgcctttactgcatttgcccccagacggctagaagtcaatgcactatgaaaatcccagtcccggacctcggactctggctgtcttacaatccctgcaactcctccgagtggacaagaggcgggcaccgtcgcctgggcctcgcttggggggggggggtcctgtccccagcagggggcaagttggaggaatcagctccttaatattttctgctagctctgcttgtcataactgcaactcggaatagaacaacctctctcccgtgcatacgcacccccaactctcgccctatcctcccatccacagtcatcactgacctgtagacccggaggagcaggcttccgggggtcggtccaggttggggatacagggaggggtcctcgcgttccgcacaacctgtagtgcttgggtctgacttcggcagccctcgggtacagtctgccgggctagattcccgttgcttctccgcgtctctccgcgggccgctctagcgccgggaagggggcgccgcaggtgactgcccgcggcactgggacggctgacagatttatggagacttcacagcatctggctggggtccgcgagggcagggcggagtccggtcgatccgatgctggggtctaaagcttccccagccacacgcctgggccgagtcgcccccagagtccccggcccctgctccccttgggcgggtgtacacaaggatccggccagcgccgagtgtactggttcctcccacccagtgtagccccctccttcacactctcggcccggcttccagtctcccactgagtaaatatttatccagagagcgagtcgcccctcggaggaggcctcgacgcggctagggaaaggctttttggcttctccctggcctgagccagctgcaggccttactggtgttttggttttggtcttaaatttctccttttagtcgaaattcttccgatctctttgagatcttctgagtccagagtgagcagtgtaaccaggcggcagactccagctgacccttgttcttgttctaggtcctgcatccttacattcatcgggactgaccagaccttagtgttctctcttttccttccttcatcctctttctctgcctcagatccgtcgtctctcggtcggtctcagcgggtcgctgactacctcgccctagcactcggtccgcgccccgggaaggcttcagcatcaccctcttctgctgggatcccgctgaccctgtctgcagcttcggcttctcttgctcccagagcggggtcttcggcttgccgcggatacttagtggcccaaaacacctaaaattgactcttcctgcgctcttgagaatgccaagagcacccagtacctgcaaccgccggcatgagtggggcctgcggggagccgccagagctgcggacaggccccctg

SEQ ID NO: 237371 - DNA, 286 bp, Homo sapiens
  chr14:37129075-37129361
  hyper
tgcagaactgctaaagctctcgcagagtccccagaccccccgcgggacatgaggtcttgcctgttcgtatgcgaacatccttgtacccgcctagcagccctgcagactgcaaattttccctgggtgcacggaagtagagcagatttggcgcagaggtcgatactcactgcctgtctgtgaggggggaggaggattccttcctggtcaagttgccgggcatgttcattccctcccgcaagcctaaggcagagtcataagctcccctacgatgcggcaaagtctcaac

SEQ ID NO: 237372 - DNA, 2607 bp, Homo sapiens
  chr14:37130072-37132679
  hyper
aaattcagaagtaggcagaacgacagggcctctggagcttaatggaagacgagggaattacatccatgtgcagcgtcggtgtccactgtcttgggactaagtctctttcatatttaaacaaaactctttcgagagggctcgctggtttggagaaccctcacaaacgctgccaccgagggccaggggcccaggacagtggctgaatgtggcagagccttgggctccgtagtgagtgccccacgcactggcaattggtcgacttggggctgtgcgctagcgttagccgcctgtggttcagttccccgcacacggcgtggcccgtgcctcgagcctgtgtggctagtggttggccggtccacctggactggggggtcgccgcaggaagctggcggtaggaggaacctccctggccttaacagtggcccccacctgtggctcgggctccccgcaacctcctggtttctttggccggcctatcttctcacacctgcgctctcgccacctggcatggactgaagtgaggtagaatcggcaggtgacacagatcctctcctgacagtccccagaggcccgcatgacagattttgctaagacaactccctcacccctgtgcacggtggcgcccgcctcccacctatagccttaacttcaattctgagatgtccatcgttccccggaggaggtctcctcgggccccttctcccttcgagtcattcacattcagaccaaacgctttcatttgtttattcagcattttaccagcctgattttgctgtctttttgtgccgcttctgggaagatgtcaaacacccattttcattgtatttagtcacccaggtggggagctagcctgaaagagacagcggaaggagtttcctggactgcgctgtcgctcaccgacccgcaccaatcaccatgcagcttgccctcggacccgccccttttagggcgtgtccccagtgagtgatagacggagccgccctgccctgctcagcccagcccacgttgctgcttagattgaaatgcagaactcaagcctctttcatcggggcacagacttccttttacttcttccttttgccctctcgcctcctcctcctgggaagaagcggaggcgccggcggtcggccgggatagcaacaggccgggccactgaggcggtgcggaaagtttctgtctgggagtgcggaactggggccgggttggtgtactgctcggagcaatgggtgagtggcggcgggggactctgtcagagccgggaagggagggagggagcgagcgggcaagggagggagggagggagggagcgcgagggcgcgcgccactaggcgctcacattctctattgactttgctcgtgttcctacaagttgtaggaacacgctaagggtcagcggcgcacagcagttcaatgtgaacgctggctactgggtggctgttgatgccattttctgattttaagagaagggagctgtggcatcagcgagcccctcagcccgagtagcaaaccaagttttgtttcacacgcgcgcacacatgcaaacaaaacaggaaaagaaaagaaaagaaaacaaacaacaacaaataaaacaccctctagcttcccctagactttgtttaactggccgggtctccagaaggaacgctggggatgggatgggtggagagagggagcggctcaaggactttagtgaggagcaggcgagaaggagcacgttcaggcgtcaagaccgatttctccccctgcttcgggagacttttgaacgctcggagaggcccggcatctcaccactttacttggccgtaggggcctccggcacggcaggaatgagggagggggtccgattggacagtgacggtttggggccgttcggctatgttcagggaccatatggtttggggacagccccagtagttagtaggggacgggtgcgttcgcccagtccccggatgcgtagggaggcccagtggcaggcagctgtcccaagcagcgggtgcgcgtccctgcgcgctgtgtgttcattttgcagagccagccttcggggaggtgaaccagctgggaggagtgttcgtgaacgggaggccgctgcccaacgccatccggcttcgcatcgtggaactggcccaactgggcatccgaccgtgtgacatcagccgccagctacgggtctcgcacggctgcgtcagcaagatcctggcgcgatacaacgagacgggctcgatcttgccaggagccatcgggggcagcaagccccgggtcactacccccaccgtggtgaaacacatccggacctacaagcagagagaccccggcatcttcgcctgggagatccgggaccgcctgctggcggacggcgtgtgcgacaagtacaatgtgccctccgtgagctccatcagccgcattctgcgcaacaagatcggcaacttggcccagcagggtcattacgactcatacaagcagcaccagccgacgccgcagccagcgctgccctacaaccacatctactcgtaccccagccctatcacggcggcggccgccaaggtgcccacgccacccggggtgcctgccatccccggttcggtggccatgccgcgcacctggccctcc

SEQ ID NO: 237373 - DNA, 482 bp, Homo sapiens
  chr14:37132859-37133341
  hyper
gagtcttcctagggggtgttctgatctcattaacttgaaactcatgcccctggtttccttgccacacacagtcttctgcctcatctcaaactaccagacccataacatccccccatccccaacacatggttcgcattttccaccctcccccgcctctcgcgccgaggcagcctcagcccggcttgctcacttggagagtgcggccggggctggacttggggcgcagcccgggaggcccgagcctgcttggggctgccggctgcagactccgctgtgggcagagcagcttgcttggggatcactacggccgggagaagtctggccgggaggagtccagcacgccttggaaattgaagtattctccgattctggtaatcaggccaaatttgctcaggcaggaagttcaaatgtcacctaattggtttcgttcttatgcttcacttcattttcctcggaaatggaggtcccgaagttactactag

SEQ ID NO: 237374 - DNA, 185 bp, Homo sapiens
  chr14:37133569-37133754
  hyper
ggtccccgggtccccgagaatgcaagtggatatctatctagttcctgcatgttttaagcagtgccaccccactgtttctttcctttctcacccctgaccttgcctagtcctaagcgtcctttctgccttgtcagaaggattccccgagccctcctgcccagtccggcttccgcaggagacctgag

SEQ ID NO: 237375 - DNA, 1234 bp, Homo sapiens
  chr14:37135420-37136654
  hyper
tgtcttccctcaggcgtgggtcagagaatttggaaaggcctactctgaggggagtaaaacttcaccaggccctgggctggaagcacaggaggtcgcggctgggcccagcgccctcgggaggccaagggcagggagccgacccaaggtctaagccctccagctctccgtcgcgggtttgggtcccgtctcaagagtggggcgcgcgggctgggcctccggcctgacaccctctcttctctccatcagtgagcgacagctccccctaccacagccccaaggtggaggagtggagcagcctgggccgcaacaacttccccgccgccgccccgcacgcggtgaacgggttggagaagggagccctggagcaggaagccaagtacggtcaggtgaggaggcgagggtcaggccaggtgggccgcgtggcggcggggatttaggcgatggaacactttgtgatgggtccctttctgagcttcccgcgagagaagcccaggctggcgtccctttgctgctacgagccagatccttcgtggactggggcgaagcagaggcctgagccttggaaggcggagctggggcctcgacccccgccaggggccgggagcgctcgtcagggcgctgggggtctggggcggcagctccccggggcgaggctctgggaagcgcctccaggcctgtcggcctccgggagcttggggaggcggctcccgaagccctttcggcggctctcgttgggggtagagttaaccaaagaaggcgcttctgaagggccgagcggagcagccctggggcctcagagccgcgccttcacgcccgcgaaacgcgcgccccgggtctcggccccacggtgcgactgcggctgcggggtcctcacgttcggactttctctccggtggctctcggacaaacacgcttggccaatcctgcggagaggggcacccagataaacgtaacaaagctaccattttctcgactaaaggtcacattgtaatctcccaaggaagttagtgagaaaacctcaaattatacggactggctgtggaccgtttaatttttctttccctccgtccctccctcatgtctccaaaggaaaatttaaaacactcgtgtttttattttccccccgagaaaagctaaacaaccaccacaacaaaagccccagatttaagtctaaattcatcaccgtcctggagtcaagagttcaaaactctcaaaaaaccggaccttaaggcaa

SEQ ID NO: 237376 - DNA, 859 bp, Homo sapiens
  chr14:37641120-37641979
  hyper
aactaagtcagaccgaactggatcattttcaagtaaaataggtagcaaggcaaaaagaccgcctcaaagtcgctgcccttggggctctgccacttgctttacaggctaggaacggacaatgccgggaacccgagagcggccggcgcggacgccgaggcaactttacttggggcacccactactcgcaatcaactcccggcctcctctgctctcgcgcctctaggggctcaagcactgctccgggagcgctgaattttgaggaagagggcagaacttcagtaaggagacctgtctgggcaacggtttcaggacacgcggtggggaaagcgactagcctccggcggggcagggcgggctgtccttacctgcagaaccaccggccacgatctgccgagaagcctcgcgcactaagctgacttcaggcttggcggacatcttcgccaggcgggaggacaagggagtgggctgagatgcgtcaacgagctcgcagcctgcacagcctactgatccagagagccccggctgggctggtcctcaagcgcgttggctccctgtggagcagcaatccggcgactgctggaaagcgagggttcgaggcgcagattcgtcgcgcgatctccggcgcgtcggaacctgttcgcagcgctctcgcagaggcgccctcggctccgaaaatgtctctggaaagaagacccgcggatgggtttgggttggctcaccgcagcggctcaggctttgtctcctagattggcgcccacgcccttctctatcaggagcctccggtagtttgtcaaactagacggttgcctctgataactcaagtgaagtgacccaggcctggagcgccaagtacaaagcg

SEQ ID NO: 237377 - DNA, 377 bp, Homo sapiens
  chr14:37666792-37667169
  hyper
gtcttgggaaaactcgacgaggccaagtatgaggccacaagacaccgtttttagttccgcgttctccctcttctaatcctattaggttttgtccagacaacgttttgctctttcagaagagaaagagcgttctgcgctcgtcgtcttggattcgacaaccataagcatcccgttagggcaaccaccgcagcagactaagttcgactactttctctccaaactcctcccgggccttcttcccaagctctctctttctcctggaggccccgcctcgcggcccggcagcgcggcacgcgcatgcccggtgctcgccgcttgcgctctcccctgcggcgcgccgccgccccgtaggccccacgcgccgccccgctcctccg

SEQ ID NO: 237378 - DNA, 855 bp, Homo sapiens
  chr14:38052533-38053388
  hyper
acacacacgaggtcaagacccgcagtgtcttagtgggttttcacctccacctccgtacaatcaagagggcagagaaggcgggggctggaggtggctgaaagggcagggatggcggtgaaacccgggaggaggcgacattcgtgtcaggtggcggtcccaggcagtgtccacaggcccggaagccgaggggaccaggcatcaagccccgcgtccagatccctgcacccgggggcgggacctggtgtcccgcggtccccgcccaggttcctggggcgcttttccgcaatggctggcgtggaagcgagagggggcccagtttttccttgccaggttgcgggtacagccagctccgcgccggggttgggcggcgcggccgggatgctgagagccctgcgtgctcagccaggggcgcagggcggcccttctgcccagcgcgccccgggcaccagggatggcttcccagctggaggccgggagggaggagagtaaatacccattctgcgggggcagccctcgggggatggttgcgaagggagaaacgaaaaataaatcagacaagagagccgtcccgcccctcctcgcccggtcctggcgggcggcgccactggtcctgcagcctcgggcgtgcccgcgcccccccgagcccagggggcgtcgcagcgggccgggcgggccaggactgcgcctgtgtgcgggtccccaggagcactgctcgcctgccagccccgcccggccgggcccctccggcgggatagagccctgctttgctcttttcgttggccaagcacaattgtgttattggagataatgaattcaatccccatcaaagggcattaggctcgcccggggcctgga

SEQ ID NO: 237379 - DNA, 1009 bp, Homo sapiens
  chr14:38056999-38058008
  hyper
tttttgtaaaaatgtttgctcggtagcgttggtgggtccgagcgccaccggagctgtacacttgggtcaggaggaaggctttccctcctcgcccctcttcgccccctccctcccctccccggggacccctcccccatctcgggcgaaattcctaagaccagcgagcaggagcaccgcggcgggacggtcagcagcccctttccggccctggtcttcgggagctggcgaggtgaagaaatgtggaaacacccagacgaaaaggggatggggtgggggtcgcaggaaggcggcgccctcaggcagggtctccgcactccctcggaaccacagatgttttcttcctgacccaggggcgcggcgccccagcccgggcgcccgggtgtttgtgtgtccgggtttccgaggaagggattacgcagcgggagcagccgcggcaacgcgggccgccggggccgcaggagccgtaacgaggcggctggccttctttgttgacttttaggtcccgggctcaacaggagatttattcgctaggaagggaaaatgcccaaacaatgaagaactatctgcacttgtcacctcgagacgcttgctgtcctgctctgtccgccttccctggcaaccagctgtcctggccgccaacccgcgcgcgtcctaacgcgcgggtggcaggtcgcatcacccagaggtggcggagtgtgcggtctgagaactgcgagaagcccacaaagcaggggctgggcctgcaggctccccgcggtccagctcccgaggcaggtctccaaagtgcccccgtcccccgcataactagaaaatgtctccggcaagtaacagagcgagagctaaggccaacttaagcttggtggggtgaaggcaaggcgctgatgtttctaatacgttgaaaaggagaaagggaacatcacagagaggacagcacagaagttaaacatcttagattcagtgggggcgggattccgaggcccaagcccacgcctttatattacatttggaa

SEQ ID NO: 237380 - DNA, 100 bp, Homo sapiens; identical to SEQ ID NO: 203544
  chr14:38058220-38058320
  hyper

SEQ ID NO: 237381 - DNA, 230 bp, Homo sapiens; identical to SEQ ID NO: 203545
  chr14:38058546-38058776
  hyper

SEQ ID NO: 237382 - DNA, 1778 bp, Homo sapiens
  chr14:38060543-38062321
  hyper
ccagacaaaccccccagtcccgggagctaggaagtgtttaggacgggtctggaatacacaccttggtagtacgccggctccagggctgagggctcgatggggctcctggtggtcaccgaggcgctgcctagaggcaggctggcgggcaacgtagagccgtaaggcgagtattgcagtgcctgttcgtatgccttgaagtccagcttatgctgctgctccgaggaggacatgaggttgttgatggagaacgggtggttgaaggagtagtgggggtcccctttcaggtgcagctgggactcgtggggtgccaagccgtgtgccgggtgagaggcgggcacagaggccagcgccccgggcccggagcttatggggggcgcagttgaggaggctggagtcttcaactccgaggcgccccctgtcgccgtcgccccactgtggtccagagtctgggggctggcggcgggcccgggggccggcgcgccctctagctggccggtcttcccgtgcacaccccgatggaggggcgagtcggcgctggggttagaggcgccagaggggtccttgcggctctcagggccgcccttggcgccgctgcccccgcttccgctcccgcccccgccgccggcccccggctgcttctcgcacttgaagcgcttctggcggcgcaagtagcagccgttctcgaacatgttgccggagtccgggtgcagcgtccagtaggagcccttgcccggcttgtccggggagcgtgccaccttgacgaagcagtcattgaaggacagcgagtggcggatggagttctgccagcgctgctggttctgccggtaataggggaagaggtccatgatccactggtagatctcgctcagcgtgagcatcttgctgggcgcctgctggatggccatggtgatgagcgagatgtacgagtagggcggcttggcgtgcgggtagctgcgcttgaacgtcttggcgtcgccgccgccgcccgcgcggctgcggcccaggttggacggcgcgtacgccatggggctcatgcacgggttcatggcggccgcgtaggggcccaggccattcatggaggccgcctgctgcgcacccatggcgcccatgccgctcgggctcagcgccgtacccatggccgtcacgccggccgcagtcatgctgttcatggcgcccgccgagccccccggcatgccggctactgcgccgggactcaggccggcccctaggcccgggttggcataggacatgttgaaggacgccggggtcatgttgccgctcgtagtcatggtgttcatggtcatgtaggtgttcatggagttcatggagcccaggcctgagttcatgttgctgaccgggacggaggagtaggcctggagtggagacagcgagtgaagaagccccggagggcggggttagtggtgggcactggagggcggccgtccgggacctaacccgggggcaagtgcagagcactttgcagaacacgggacgcccccacccggggcaaatggctaagcgccctccccagaccgagcaaagatgtcttgcacggcagggggaaaatcctagcgcggcaggcatgaaagataaacgctcacagaaaatatgaccccaggaagatgtgtaatcgccttacacgccaggctcaggggctggcttccagggccccctcatcgcctcctccatccacgccaggcggtatcccaagtctccaccccaaccagcctcggcaaagcgccctttggggggaaatcgttgatagagcaaatcaccta

SEQ ID NO: 237383 - DNA, 2156 bp, Homo sapiens
  chr14:38063549-38065705
  hyper
ctagcgccacccagcggttttagagaaggagcacacttctccccaaatagggcttttgaagaacaagttttacaaaatttagaaatcgtttcattattgagacacccaacttggcggcagagcgctttaatcagaagacgtctgcgaattaaacggtgggacgaagaggtcgccttgtgggtatgctccggctttctcagagttgcttccaactcgcaccggcgctcgcccgcccgctgcaccccgggcccggctcctgctcccgctcgctgctgggaagaggcaagcgcttcctagagccgctgttttcaaagcccggagtttcctaaaactccctctccggctgcgagagtcgggacagagcagggcagcaggtcccgcttccaggcccggccaaggcccggccggggccacaccggcgggcgggcagcggtggcaccgagaaggcgcccccggcccgcctgcctgccttgcctggcgcccaccgctccccggcctcccccggcacgggctccagcggcgccccaccggccgcccgcctcgccttgcctctcacctcctgcgtgtctgcgtagtagctgttccagtcgctggtttcatgcccttccatcttcacagttcctaacatcctggagccaccctgcccaatacaaccatccagccctgtgcgaagcgacgggcggccgcgcggcgcggggcgggggaggggagctgagcagctgcagtcacccgagcgcccgcgcgggcccaacgccacccgggcgaagaggaagcccagagctgcggggcgcggcgtgcgcggcggcggcggcggcgcggcgggcgggggcagcgccgggggcaggcggctgccgcggagcgcggcgccggggagcgcctccgcgggaagtgagcgggctgcctctgcgaggcaagtgcagttgagctgatgtggatcttacgtcgcttgagtgcccacctcctcgtcctctccccatttgtccgccgcacaaagacgctcgcacctacaaagcccgaggtgcacctgcaaggcggccgcccgccagtccggccgccgcgcctcccgccccgccgcttcaccgctgcgcgcgacccctcccccgcgacccctcccccaagcggggccctcactttgtttgcaaagcagtgtaattggtttaggcccggaggctagggaaagagggaaatggggagggagggggtgtaaccccctttggaaaaagaaaaaataggcggggccaggcgggcgggcgggctagggctctggatcggaacctcgcagccggagaaggccgggggcggtggcgtcggagactgggcttagagaccttgtgggataactgaccccggggtccctccccagaggtacacgccaccttccgagcgcgggctgcggcccagtctcgcgcccctcctgctctttgcttcctccctcctgattcctgacccaaagttcaaccccgggagactggagaatacagacttttttttttctttcctcctgagagcttcagactagaaaagggaaaaagccccacttttgcttcgtcactagaaaccgggtcatctgagtcagccgagccaagtgacgttaggccgacccgggccccgggctagcagagcggaggcgctgccacgaaactcgtacctgcggctaagagcaggtgagtcacagcaccggtttatatctttatgacataactttttttttttgttccgcctcggtccgctcctctccccttgtcatctgtagcgaccacaaagaggaagaaactgagagcagatgtctgtgtgatagggcaggcggacccaagtcgggccgtcctccccctgccgggctcctcctcccgccccccttcagccgcttcagggagtgagctggagacgaccgtctggtttctgataggaaaaggtcagggggaggggacatctcccataacacgcgcgttagctgggagagcaagggcctgggcgcgggaacgcatctgcactgcgaaagagatgccaggcagaagcccgagactgcccgcagcggcgcttggtcctgtctgtgacccggagggtccgggctgagatctcaggggctcgcttggttcctaatcggtcctggacgtcggtgggagagtcttcccaacgcaaagtctctttactctcat

SEQ ID NO: 237384 - DNA, 238 bp, Homo sapiens
  chr14:38072483-38072721
  hyper
ctggacctgatgcccggattctggcaatcgtcagttgtaggaacaaagtctggagtagtggctggcatgagagtcagccctgacgacctcacccagggaaatgaggaacccgtgtgaacctaagaaggaaaccgctatggtggttgtggtggtgggtggctcagctccagaagtggtgaagcgactttcccgaaagggaggaagactctgggataattggcaccgcaaaaatttcctt

SEQ ID NO: 237385 - DNA, 905 bp, Homo sapiens
  chr14:38677134-38678039
  hyper
gctgacatcctagctcttcccggaaaaactcgaatgtcgccctgccgttcctggggttggtgacaggtctggtcatcgcacggcggcagctcctcacctggatttagaagagctggcgtccccgcccgcccaagcctttaaactctcgtctgccagaacccgccaactctccagggtacaaagtacagcagggacgcgggtggagcccttccaagcggcgcagccttatctttcccgagtgaacacctaggtggattcccaacaccgcgcctggcacgtttctggagggagtctcaagctcctccagagctcccagctgcgcgtcctcgtttctgcagtcgatattcctgtgggagacacggggggctctgagcgctacgagctttattaagagatttgcgaatggttcactcaggtccctgaacactcccaatagcctaagctgcctgctgtgttatagcgcagaagcccctaacgcacggtggttgtcctttcttctcataacgctcgcagcttagggccagtttccgcgattctaagagtaattgcgtgggcacctgtgctggggccaggcgcaaagaagggagttggtctgcgcgaagatcgtcaacctgctaacagaccgcacatgcactttgcaccgaccatctacgtctcagtctggaggttgcgcactttgggtaaggagggcccggaacttccctggcgggtctgagctgcaaggcaagcgagggtgggaagagggaatttagggttctggactgcgggacgggagagaagctggggtctccagagaaaagggcagcaatggagggaaactgagatgaactccagacatccatgttcatggatccgtttgagtctttgctttgggtaggagaggagtggaatgagacagaatctat

SEQ ID NO: 237386 - DNA, 780 bp, Homo sapiens
  chr14:38678219-38678999
  hyper
cctttctccaccccacccccttttttcgtagctgctgacgcgctggtggtgcctattaatcatttaccagtccagagccgcgccagttaatggctgtgccgtgcggtgctcccacatcctggcctctcctctccacggtcgcctgtgcccgggcaccccggagctgcaaactgcagagcccaggcaaccgctgggctgtgcgccccgccggcgccggtaggagccgcgctccccgcagcggttgcgctctacccggaggcgctgggcggctgtgggctgcaggcaagcggtcgggtggggagggagggcgcaggcggcgggtgcgcgaggagaaagccccagccctggcagccccactggcccccctcagctgggatgttccccaatggcaccgcctcctctccttcctcctctcctagccccagcccgggcagctgcggcgaaggcggcggcagcaggggccccggggccggcgctgcggacggcatggaggagccagggcgaaatgcgtcccagaacgggaccttgagcgagggccagggcagcgccatcctgatctctttcatctactccgtggtgtgcctggtggggctgtgtgggaactctatggtcatctacgtgatcctgcgctatgccaagatgaagacggccaccaacatctacatcctaaatctggccattgctgatgagctgctcatgctcagcgtgcccttcctagtcacctccacgttgttgcgccactggcccttcggtgcgctgctctgccgcctcgtgctcagc

SEQ ID NO: 237387 - DNA, 1455 bp, Homo sapiens
  chr14:38724273-38725728
  hyper
tgttctctgcggcacggggctggttgcagtggccggcgggcgcctggtgggcaccccggtccccccaagggtcggctgtccttccccactggtcacacaagagcggccgtccttccccagctcgaagcccgtagcacattcgcaggcaaagcctcccaagtcgtctaggcagttagggagctctgcgcatttgccagcacggaggtacctcccggggcagggacacaacacatcgcccgagagtttgtcccagcgagcgccgatttcgtccgcgatgcaagtaactgagatcgggagctgtccccggcagagcgcactcacctcggtcccaggtggactgaagtccagagcggcgctgtgcagctggaagggcgcgcgatagctcaagttagaggcggccccggggcgcggcgcaggacacaagacctcaaactggtacttgcacaggtagccgttggcgcgcaggtggcatcgcatctccttccagcctgcgggctcgaccccaccggtggcctggagtaccgcgcatctccgcgcggtgcaggagcgttggggctcctccacccactgcagcgtgtcgctttcgagaccgccggggtcggaggacagccaggagaaaccccgcaaaggctcgttctccagggtgcagtgggaacgcctgcgctccagtgcgacccagaacagcaggtctttggagccccctccgggccctgggcctgcccgcaggagcgcgagcacagcgcgcagctcggcgcccgcacgcacggtgctgagcgccccacctcgcaggatgcaggcctcctcggccgcctgccgcttcatggtagcgtggtgcaggctgtagcaggcccccgaggccgagcagccagcacggtcggcagtggggtgttcgccgccgcccggcccgggccagagcgcctgccagaggaggcacagggcgaacgccggcctcattctctgaggccccgcacgcagagctgctcccaacttggatctgtcccgctcgaggacgcagagctgtgtctggagcgcggtcaccgccctctacagctggcttccccaacccggttccccctcccttcccctccgccctcgctcccgacggaccccccaactgccaagaatccccccgcgggcccagcggccaacagtttcccttaggccgcgacaggaaatgtgtgcggagcgctgccaggcccggtgcagccctgagttattctggggtcaggaacacagctggcgccgggtacaggggacgcagtcgactagaaggtcaaacaccctgcttagagcaagaggagaaattcgccactgggatgaagtgtgtggtttttctccgttcagggagtttcatcaggaccgcagaacccataacacgtaagcgaacataggcaggaaggacttgagaaaggaactggcttatgattataagaccacgcccgtctattgtgtttc

SEQ ID NO: 237388 - DNA, 83 bp, Homo sapiens; identical to SEQ ID NO: 203559
  chr14:39583445-39583528
  hyper

SEQ ID NO: 237389 - DNA, 618 bp, Homo sapiens
  chr14:42074283-42074901
  hyper
tctccctatgccttcggagtctgtggcttcagtttgctgcaggttctctccgtggacttctcagaaacctcaactttccacttcgagggacagaaagctacaaggaaaacgctgatggttttggtggagattctcctggacttcagtggtgtcctctggtacatctgtccgcggtgtccctttggtttatttctgtggtcttcctgcgcagtccctcagcggctcggagtttggccttccagctctccaactcagatcctgagcctcctaagctcccgcggagaccctgaagtcccggatctggcgccgctcgccgacctggagggaggctgcaccgctgaagtgcagtctcggagctgcgctcctctggaacaaagcagccagacgtggcttgagtggattcctaagccaaggattggatccggagtaccaggggcagagagggggagcagaggaaagaaaggagatgtgaggagtttccacctaaagcacttcactcctcgtgttcttccccgacagagatagctgtgtggttcttccttacgcgtgggtgcaggtgtgcgcgcttggggtgagcccatggttgtgctcgagtatacgggcgcctgtgcacctcca

SEQ ID NO: 237390 - DNA, 235 bp, Homo sapiens
  chr14:42075460-42075695
  hyper
ccttcacatagtaaaatgtgaccaactgcagtattcgtaatgtctgatgctgagctgagttgattcccaaatataaatgttcttttcagaatccgctcccatctgattagtaagcaaatcaccacccacaactaaggggacagcggaagccagcctcagatgactgaaacccccaagtcagtagctctcctcaaaatttccggcgggttattatagataatgacttttcccaccg

SEQ ID NO: 237391 - DNA, 1512 bp, Homo sapiens
  chr14:42076295-42077807
  hyper
ggaggcggtgagcgtgtgcagagctgcccgaacggaggactatgtatgtgtgtgcgcgtgtttgcgtgtgtttgagcgtgtttttccttcttcccttgaggatgtgaattgtttagcagctggctgctcccttaggatccttgactttggggagctctggctgtgaacacagcccacccatataatccattttgcacggtccgttatatcagaaaaaaaaagcgcaactggacgggggtggggcagaccaacgaaacctagacagacacacacacactcagaggagagaggaagaattgaaagacttgagaagactttgataacctccctgctggcccttctgtgttccggaaagatcctggatgttggctaccttttcaagtcatcttggcatgtctctagtgttttgtaagccgctttccagctagctgcgtgtgtgtgtgcgcgcgcgtgtgtacgcgcgcgcctatctgatgcatttgactgtcttttatccaactgcccagaagcaaatgtgttaactcggcgatgccccttcatgcccgggttcttgcagagctctgaggacgcccagacccattttcctggctggatttggagcggctgctgggctgtggacccaggtgtgtggatcgctttacccagaagcttggaaagcgccaatattaacctgcttccaggtacatcacaaggtcaagagagtgtcttgcagccctcttgtttccgtgtatctacaccttcttctcttggccagaaggatatttacgttttggttcacagcatttgaagccaaaagttcagcccttcgaactggtttgctatacaaaacaaaacaaaacaaataaggtaatgaggattgcttattaaactgcttaacaaaatccccgactcttcctcagccctttctcggctccctcctccccaccaaaatgtcaccagctcttgaattacgtggattcgggttggaggagaacttgaaggaaacgtgattaaagggctatgcgagaacgctctctttgctgcccgcggtccggtgggcttcgaagccaatcgtgagaaggaccggttccctccgtgctgcttcctccccgtgcagtgctgggtgtgcgtgtgcgagtgtgagtgcaagtgcgcgcgcgcccgggtgcgagtgtgtgtgagtgtgagcgtgtgtctgtgtgtgcgtgcgcggccgccctgcctctgcccgctccccgggcgcggagccgcgggtttcatggggcgattgcagcgattcccccacccagagcgacctgcgggcagcggcggcagtggcaggagccgcctttccgattccctacgatgcgggtgctgagctatggcaaagggcagcgaagtgacgagcgagacccgcgtacgactgtgaaagccacctggagccaccttgccgggattgtacctgcaggcagaaagtcttcctacgaccgtcttttcccttagaggcaccaggtaacaaaccaacgattactcgcctcacccaatttccttttg

SEQ ID NO: 237392 - DNA, 689 bp, Homo sapiens
  chr14:42078755-42079444
  hyper
cttatctcagcgcccgcccccatcggaaaatttcactcctttctcgaagacattagaattaacaagataaagcacttccaaagtagtctcatcaatgttttattccatagtgaagacggtctgaataatttaactaaggagtgttcgtttgtctcccgcctttgggagctgcttgctggctacattcagcggaggatttggcccagccaagctcagggtgccctgcttcaggaggcagtgactggggctgctggggggcggggggttctctttgctaacgccgtttaggaagtgtaggggcgctgcctgattttcccccactcgctgcatttctatagatatccatatgatggcatttgcagacttctagctggccgatagctgctctgcttgtccctgcgcactgacgtccccaactcctcttcgagtctgggctcggctgctgctgcagccctcgcaggctggtggtgctacaaggccatgtatgcagcgggctttgggggctgggctctgccactgcagctggcaggacggctttgacactttctccgggcagggcggaagagctcagcggaccccctggcagacagcaagcgcatcgtggccgaggcggccgcctggatgcgagaggagggagatgcccagagccacagaggagcgtggagggcggtggtgtcctgtctttgcct

SEQ ID NO: 237393 - DNA, 53 bp, Homo sapiens
  chr14:45366374-45366427
  hyper
ctgtatacacagccgacacacgcacattaggctggggcgtcttcgcgcctgcg

SEQ ID NO: 237394 - DNA, 99 bp, Homo sapiens
  chr14:45431483-45431582
  hyper
ggcggcctggcggcaggctgaagctgttcttttgcctcttctgcagcttggggcttggagaggatctggaagtctgggctccatcgagccctttggaga

SEQ ID NO: 237395 - DNA, 85 bp, Homo sapiens
  chr14:45553394-45553479
  hyper
tcttcggctaggtcgtcacaggctccggctcatggcatcaagtggcatccatcataaggtctgctggggcgggctccttgaaatt

SEQ ID NO: 237396 - DNA, 89 bp, Homo sapiens; identical to SEQ ID NO: 203564
  chr14:45603790-45603879
  hyper

SEQ ID NO: 237397 - DNA, 34 bp, Homo sapiens
  chr14:45722603-45722637
  hyper
tgtcttcaaagttcgtttcgtcttcgtagggcac

SEQ ID NO: 237398 - DNA, 1615 bp, Homo sapiens
  chr14:48143413-48145028
  hyper
aatcaaagactgctggagctcggattccccgcggggataaatcaagtgcaaagccgctcgttcgcacgagtgcgttgctgccggctaaacccaactccgagccagagcccaggcgccggggaagcggctcgcagcccaatccgcagcgcgctcgctgcctctttatcgctcccaataacgtgatgaagtgtaaatcaaatgccacgccgggaggggccccggaacggcgcgagtcgtgcattttcgctcaccagcctatcttgcctaagaatcacaaggtcacgatagcgtcgcgattccactcaccgtacactccttggccagagatcccctccaggaggactgtcagcagccacacgagaccgtacagtaaatccatcttcacgtgaacatgaacatatccagcccagggggtacgcaacgggaccttcaggaggccggcggccagccaggcgcgctccactcgcgcccgggccaagccgaggtgcccgggaaccgctcgccgaaggaggaagcgccgtccgtctgtccttccccggcggcggcggcgagcggagcgcaggagccccgcactccacacactcatgcacacacacactcacacacactcacacactctcccacaacacaataccctgacacacactcacacgcacgccgcactcacaccgggtgcctgggaaaatcgcagacgccggggaggagcagggggcggtgatgggaaggggagctgcgaggcgaagtgttcttcagggaagcgggctcgagtctccgcagctgcggcggcggcggcggcgcgctgggccggcggcgggcgcgggcagggggccgggggtgccgcgcggtaggagcctggcttggacagccgaggagcaggaagtggcctctgacccaggacaccgagcagggctctcttgcctggattcgcctttacaaagtaactcgcgaaggtccccggaggggcgtcaagcggcgacagcggcccgcccgcccgcagtccgaagcccccagccctgctgtcttgccttcccccattccatcagttgccattgcaacgccaatcctgttacacgatacagactcgcatcgccgaacggggagaggaggaagaggaggaggaggaagaggaggaggaggaagaggaggagtggggctaggggaacgggggtggggaagagggaagggaggagggggaagaaggaggaggaaagggtccaacagggagcggagtgtgcgtctggagctcgcttgggcacaccagcccagccgccaccgccaccgctctccaaaatagcctttagcgcccggccagcgtagaggtgctctggccggccgcaccaattcccggagccgaaagcagagtccaggcaccgccacttgcaagagagggagaatgccaggcaaatacccgatccgcacacacgtctacgcgtgcccaccggcactgcgcgcgtcctcttcgcttccgcgccgcccccgccaggtggagggggtggggacggtcgggacaggcgggagtttagaggagggagccgcagaaggggttccccgcttgagctaacgtagtggtggcatccagaggtgaacgcgggagcggccgcctgcggagggcacc

SEQ ID NO: 237399 - DNA, 144 bp, Homo sapiens
  chr14:50053096-50053240
  hyper
agaagctggcccacgcatgcgctcttcaaatttttgagacagtttacccagaatgcagtgctcaaaggaaacgcgtgcgcagtgtggtcaggttgtttcgctgggtgagtaaaatgaaatcttagaggcgttgtgggctggccc

SEQ ID NO: 237400 - DNA, 242 bp, Homo sapiens
  chr14:50234378-50234620
  hyper
gggctgggccccacgtgagagctaagcgactgccctcgcgcccgcagaacagcagggcctgcatcgactctaaggcgagaccagaaacttgctagtggagcaattctggtgcccctgcccgggctgtgaaccctctgagatcatccctcaatcaaacgaatagaaatcctcgggaagaaaaaaaaaattgcggcaatccggctaaaattcagcagctttcagggaccgattcaggacattat

SEQ ID NO: 237401 - DNA, 315 bp, Homo sapiens
  chr14:50319666-50319981
  hyper
caaaattcaaattcgaataaagattcaaactgttctcttgaaactgcattccttcctggaacccttacggaccagtctggttaccgtgccccattgtgtcttgggctcaagtcagccttcatagtgacccctgctggtcgaaacaattttcgagatgattatcaggagtatttccccacaggggggccgtagggctcagtgtagaagagcaaggacccctttctgcgcgcttactttgacataagattttgaaatgtaacgaaacggaactgcttcggtccttctaagattatcctcaacgatcgaggcgaactc

SEQ ID NO: 237402 - DNA, 115 bp, Homo sapiens
  chr14:50329599-50329714
  hyper
tgcagggcagttacgtcattggggagcgggggggccacgccgggcgacgtgagcttggacacacccacactgggcggtctggaggctacgttagtgtggcgtcatccgagctggg

SEQ ID NO: 237403 - DNA, 256 bp, Homo sapiens
  chr14:50359202-50359458
  hyper
ggcagattccacacgagacactggcctcccacgtgtctttcaggaaacatacaaaattcaagggataaaggaagccaagaaggggttgcgaaaaagggaaaaaaaaaaaaaacaaaagcgaacagagcttccctgggacgttcagggagcgcggagggtgcgggaaggctggggcgggcggagggaattcgcagagcatctggcgggcaccgaggtctgggaacaggcctggaggcagctcggttcgtggagagag

SEQ ID NO: 237404 - DNA, 615 bp, Homo sapiens
  chr14:50469903-50470518
  hyper
aagtcaagggattccgtgtccctgcttgtgtcaacatagaaaacgcccatggcaacgggcaagtgcggcctgaaatggcagagtgtgtgtttcacaaaacaggggtggctcacggctgcagccgcccggggaggtcctggccttgccttcgaggggctggtcctcggggggtggatgcagctttgcggggctggctccacgtcgcgccgcggcggtttgggctggggagcagccctgcagggaggcgccgccgggtgggccgcggagatagctgcagggcggggcccccgggggcgcggggacgcccagcggccggatatcagctgccacgcccgcgtgggcggagaaaagagcaatttgactttggacggagagctgagatgcggggaggaaatccaccaccggcctctggcgactcctgtcctgcgcgcaggggaggcagcgcagcccgtgaacacccccgagcccggtgcgggccgagcagttctccgcacctccggtaaaggtgcaggaccgggtgatggtctctgcagcagtcagaaggctcctctcccagcccaggaacgtctgcaataaattgcttccatgtgcgggcttcccgcttcctctttctct

SEQ ID NO: 237405 - DNA, 118 bp, Homo sapiens; identical to SEQ ID NO: 203565
  chr14:50511811-50511929
  hyper

SEQ ID NO: 237406 - DNA, 239 bp, Homo sapiens
  chr14:50698773-50699012
  hyper
agtccgcttttcccgagactgtgctgggggccgctccagactcttcagtttgactgctttttacccatatgctccctcctctcgacctgcttaagacaatccggactcggtgccactcttgtagcgctggagccccaggactaccgtcgtgggaggctgcatagggacgtggagagaaaggggcattcgggctggacaggatatttaacgtatttgtgctctacgtggcttgttttcat

SEQ ID NO: 237407 - DNA, 205 bp, Homo sapiens
  chr14:50778818-50779023
  hyper
ccgcgggcccgtccgcaggcaccaaccaaataacgcagcgctggcaccatcccctacgcacgctcccctccctcagcgctcagaagaagccacttgaccctccacggccgaggacccgcgctctttagccccgcccctcacgcgggggccaatgaagtggcgcgccttcgccccatgtgggagaggctgcggtggccaataggcg

SEQ ID NO: 237408 - DNA, 875 bp, Homo sapiens
  chr14:51026824-51027699
  hyper
tccccactccttcccaccagcgccacagcaacatcctcagagtctgagcgaactgcgcccagcgcgggcacggagcctcccaccgccagcaacctgcggccccggagaaggcagcgagcgcagtgacagcgcctcaccgccaccagctcctggaccaccatggccaagaaccgcagggacagaaacagttggggtgagtagcaaatgagaacttctgcagcctgcacggggtcttctggccctccactttctgcttctgtggagacagggagggccaagggctgctaggtgcctgcgtccacggctgggagacgggccgtagccgagccgctccctgtttgggcggaggaaccatggccgagcggtacccgcgtcaccgaatcgcgctgtcggggtgagggctgcagcttcgcgcaggccgggcctccagctccttcttccccacccccctcccgcctcctcccagcatttggacagcacccaccaggcgcctccggggacttgtgggttccgccttagcgatcggttgggaggaaggctatgggggtgggcagggggctgttgttactcggccccagaggggcgaggggtcggggatctagagcaggccaagccccaacccccctccccgggagccgccaactcgctggctctgcagggcgcgggctcccggcggcgggcggcgggcggcgcgctggaacaatgaggcggagcgcgccgggtcccggacggacggtagcagaccgagcaactgggagaagggccaccctcttgggaattcctgagcactgcagtactcctcttaatttgggggttgggtgggggaattggggaagaaggagagcaaagttgtggtttccagccttctgccccac

SEQ ID NO: 237409 - DNA, 329 bp, Homo sapiens
  chr14:51338731-51339060
  hyper
gcggagcgcaccctcgggccgcgtctcccccgccgtaccagcctgcctgaccgcgcggaggaggagggcgggcgcggtgccgccggggcgggaaggtcgcgggcggctgctccggactgcagctcccgcggcggtggcggcgtatcgggacacggcgcgggatggacgcgcaggactgccaggcggccgcatcgcccgagccgcccgggcccccagcccgtagctgcgtggccgcctggtgggacatggtcgaccgcaacctgcggtgagtaccgcccggtccacccctggccgggccccgacggctcaggctgcgcggggatggggca

SEQ ID NO: 237410 - DNA, 280 bp, Homo sapiens
  chr14:51410199-51410479
  hyper
ggagtgtgtgtcttcggggaggacgagtccagggcattgcctggccctgggccgcctttgcgaaagactcacggaattccaggagctacacccactcaggagaatgggtgggcggcgctctacgcttggagcgggaccctgcccctcctctgcaccacacttagccactcccagaggcctgagacttacgaccttttcccagctcggcgtttgtctcccctcccaaaataccaagctccagcaaggcaagatttttgtcccttttgtttagggctgagtg

SEQ ID NO: 237411 - DNA, 354 bp, Homo sapiens
  chr14:51411079-51411433
  hyper
gatctgccgccgcttctcctggtccgtcaggggcttcgccatggctggggcggcgggctgcgcggcgggctgcgcagagagctggaagtgcggccggaggcgctgggctgccgggcaggggtggagtccgccccgccgcgccagcagctttcaacgcgcacgaaagtttggggcccgccccctcgggcggtgccgtccccgctgcactcccaccgcgtcccggcccctgccccaggccggagggcagaggaagtgcccggcccctcccgaggctctggggccgcagtgggctcgggggtgggagacgaggtccaagcgccggcgagacccctgccagcccgggacctgggctcg

SEQ ID NO: 237412 - DNA, 542 bp, Homo sapiens
  chr14:51560334-51560876
  hyper
cccgaccctccgccgtgcctcaccaggtccgcctatccagcagcgacagactcccgccgtccgcgcgaccccaccgcccccatcccagtccctccccgagggttcgcagcccgccctgccctcgagcgtgcctagcggccctgggcactggcgcggctctacccagctatgcagtgctttcccacacactggccgcggccactggctgcagacccgccgcggaaagggggcgccctgagtcccgctcgcaggcagcgcgccccgagagacccgctctaaggcatccccgcaacaactctgtgggggcattcaactcccccgtgcgccggttaagattcccccatgcctcctgcaatgcaccagaccagggaggtaaacatcgaaggcacctgcattgcgcccccactgggatgcgctgtgcgcaagagacggggaccgtctgctgcaaaaccggatgatcggagacgcagggagttaggagtgggttttcttaggactcaccttatgtagtttccacatggcccccagagccttgacttcgt

SEQ ID NO: 237413 - DNA, 285 bp, Homo sapiens
  chr14:51562376-51562661
  hyper
tctccgtgaatccgctgacgccgtgccctggagctcccccatcccgggagtctgacggcgctggcgcaagccctggcgacactcttggcttctttcatcctgcgtccctcgtttcctaaagagcatgtataaagtcgatttcctagtgtcgacatgagattcaactgggtaaccgatggaaatggtcagcattagtcagaatctatgaccccttcgtttcatgctttaaattatagctcggcccagaggcctcagtgccgtggtgtgaacgtgcttccttccacg

SEQ ID NO: 237414 - DNA, 411 bp, Homo sapiens
  chr14:52117843-52118254
  hyper
ccccaaagccactatcgggaggggacaaaaataatttctgaggggccatgggcactaaaaccacagcagacagaggctgtgtctacctgaggaactggagaggtagaattagagggggaggctgggcatcctcggcggcgccccctccatccagcgtgaaacccacgaggcgcggcgtctcgagtggcgggcgggcagggggctgcaggattcacgaagccacctccgccggggaccgccttctctcggagtggcctcccctccggcgttccgctttagtaagacgacactcaggccaaacagccgcccccggccagcccgactcggctctggagggagcgccccgagggagtccagccggaggcggagaaggccactcggccagaaggtggggagccgccggcgtcccct

SEQ ID NO: 237415 - DNA, 1090 bp, Homo sapiens
  chr14:52118494-52119584
  hyper
cggccagttggggcgggtcgggggcggggtctcagggggcggggattcgggggggcgggtcgggtcgggaggcgtgggtggggggcggggcggacgcggagcgcccctctggctggcggggccaaggggctgagaggagtggggcaggctcggcgccggtaggaagagtcagaggggtgaccagagagcccaacgcctggtgctcaagactttctccgaggtatgaacaagaaccaggcgtctgggccctttccgctcgccccatcgctcagccgccgcgccccggacgcccgctgtgccccctgccggcggggcggcggcgggactgggtttcgggagggtttctggaagtcgcgagtcccagcgaaggcagtgcaccgctctccgcctctttcttcgccttcttctcgctcccttagctctgggtgtcgggcaccggtggtaaggtcgcttctccgtgagtcggaggtcgctcactctgggacgggcggacgaggccctagggcagccgagcccggcagcgggggaggcgtggagctcggggcggcttcagcggcgggggcgggaggctggtcctggctgcagactgcgcgcctgggctccgtgcgcggtccctggttctctgcatcgcggaggtccccggatcacagggctccctggcgggccccggcacccaggtctgtgtcgctgtggctgggcgccgggactagcacccgagtcccgcgctcccgggggctgcgccgtgccgcctgttgtgcgcgcgcagaggccggacagcccggctgcgggaagggacccgagcgcagggtctgccccgcgtcccggaaagtgcctagtctgcggagccggaggttgagctggggcagatcggcgccagacgggggcctgggtgagatacgagttgggggtgcggcctgcagaatttgggtttctggaggagcttacggcgcgctggcggagccccaggcgaacaggagcaccggattcggctccgggagggccaggcactgtcaggtatggacagctgcggtccacccgtgtaagtgtaaagtctacagagattaaaacaacacctcgagtcctgggacag

SEQ ID NO: 237416 - DNA, 402 bp, Homo sapiens; identical to SEQ ID NO: 203574
  chr14:52313655-52314057
  hyper

SEQ ID NO: 237417 - DNA, 301 bp, Homo sapiens; identical to SEQ ID NO: 203575
  chr14:52327326-52327627
  hyper

SEQ ID NO: 237418 - DNA, 44 bp, Homo sapiens; identical to SEQ ID NO: 203576
  chr14:52455679-52455723
  hyper

SEQ ID NO: 237419 - DNA, 75 bp, Homo sapiens; identical to SEQ ID NO: 203577
  chr14:52455753-52455828
  hyper

SEQ ID NO: 237420 - DNA, 2069 bp, Homo sapiens
  chr14:52534581-52536650
  hyper
cgagggcagcgccccgcgcttgacctcctcgtaagcgcctacctgctcccaggtggccaggaaggcgtgggtgggggtaaagcgcgcagagcgcgggaagccagcgcgcacatagcgggcggccaggcccagcactgcgggggaggtgtcctctcggtacaggactcggcctctgccgtggctcgtgtcgatgtccgccagaaaaggggcgatggccgggaagtcggtggggaaatcatagtccacatactgcgtttccctggggaagtcctgagtggagatgatgccgttggtgcccacctgggagaggagagggacaaaaaggtgacagtcgctcaagcccaaggacgctaccctttcgcgcagggagggaagggaactgacttaggcaaaaagcctctctctccttccccactggccagggagtctggattcagggaaacaagcgcaacttttgcgactgtcccagctccgcgctgcagtaggtccaggggccctaaaactcgttcacctatcttctcactcccctcacaaccccggagccccatgtcctcggagaggaagcctccaggtctgaagagggaacaccccagctccgcagacgggcacagccttctcgcggtcctaactgcaaagcccgctggccgccctagcaacgccaccttttctgcctgggacgcgtacgtggctgcgaacaattcttgctctcccctccaggtcattcttgctcccctacagcagcggggcaggcagcggcatcgctctctggccgggtaccaccgcaagggtgctggggggctccaggagtggggtctgtttcctcccctctggaggcagggtttccgtgagaccgaccccagggaagaagctgcgggaaaagtgccaggagggggctgaacttacgtagaggttgctgaatcgggcttcgtagaagtgcaggggattcgccagcttcaccacggctgagctttcgtcgtcgccttcctgcaggagctggtccccccacgactccccgtgtgggaagagctcgtctgggtgcagcgccgcggcccgcaacattagcaacggcagcagcagtagcactggtaacgacgacagcaccggccgcccggccacccggtccccctccatgctcgctcggccgtgcgcttacccgctgcacaacgcgtcccgccccggcctccagcccactctccgcgccgcgccagcctcgaacctggatctccgcgggcgcctgggcggggcgggactccaggcccacccagcaagctaattggctgaggccctcggctggggaccaatcaccggctctgagaaagttcggcagtggccaccacatctggttctcgttaacttttctaaggcagcggccgctggagcagcggggctggcggggtaaaagctcctggccagggctgcctggagctgccccttccactccgcccccagggagctcccgggtcatcctctcatccgggctgccccgcggcccccaaggagccccacccccgggaccaaatggcccgcaaggtttggggcagcggcgttgcaggagatgagctcagcgcaaagggaaccccgcagcggcgagtgcggctgctggcctgcgcgctgtggccccaacaggctggcagggcgcgggcgggtggcggggttgcggtatgagctttgctccctgccctggggtcccgggcgctcctggctctggaggcctggccatcggtccgaaaagcaaagggacattgtcgtggtcccctcggccgcttcgctccacccagagacgccctgaggagaagcgagcctttgtacgaaggcagagggctgactcctaagttctgtccccctcccgaaggccggccgctagggaagacttggccaccctctggaagtaccttcccccgggaaaaccgcagcaggaaagaccatgaaatactactgtgtgtgatccgctccgtttggggagtaggatgaggcatcccgcttggttaccaggcagaaaggggcgagtcgcggggatgggaagaccctgatctcttgcccattgctgcggccgtcggagatgccctccc

SEQ ID NO: 237421 - DNA, 1447 bp, Homo sapiens
  chr14:52734271-52735718
  hyper
actggcctgctccgcgctcttcaatgccagcgccaggcgctcaccctgcagagcgtcccgcctctcaaagaggggtgtgacccgcgagtttagataggaggttcctgccgtggggaacaccccgccgccctcggagctttttctgtggcgcagcttctccgcccgagccgcgcgcggagctgccgggggctccttagcacccgggcgccggggccctcgcccttccgcagccttcactccagccctctgctcccgcacgccatgaagtcgccgttctaccgctgccagaacaccacctctgtggaaaaaggcaactcggcggtgatgggcggggtgctcttcagcaccggcctcctgggcaacctgctggccctggggctgctggcgcgctcggggctggggtggtgctcgcggcgtccactgcgcccgctgccctcggtcttctacatgctggtgtgtggcctgacggtcaccgacttgctgggcaagtgcctcctaagcccggtggtgctggctgcctacgctcagaaccggagtctgcgggtgcttgcgcccgcattggacaactcgttgtgccaagccttcgccttcttcatgtccttctttgggctctcctcgacactgcaactcctggccatggcactggagtgctggctctccctagggcaccctttcttctaccgacggcacatcaccctgcgcctgggcgcactggtggccccggtggtgagcgccttctccctggctttctgcgcgctacctttcatgggcttcgggaagttcgtgcagtactgccccggcacctggtgctttatccagatggtccacgaggagggctcgctgtcggtgctggggtactctgtgctctactccagcctcatggcgctgctggtcctcgccaccgtgctgtgcaacctcggcgccatgcgcaacctctatgcgatgcaccggcggctgcagcggcacccgcgctcctgcaccagggactgtgccgagccgcgcgcggacgggagggaagcgtcccctcagcccctggaggagctggatcacctcctgctgctggcgctgatgaccgtgctcttcactatgtgttctctgcccgtaattgtgagtccccgggccccgaggcagcagggcactgagactgtccggccgcggatgcggggcgggaagggtggagcggatcgggatggacgcggcgccaggcgagctgcgccctgggccaggaaggtttgctgctgagttccccaaattggattccttccacagccccgagatataactcagtttgcggagcgaaatgagggaaagttagagaaaggaagggaaaggctgagcccggcggtgtctccctagcccagcaaaaccctctccatgtggcagaactccctcctctctgcttccttctggggagatctcgaggtcatttttgcgccttaggaggagc

SEQ ID NO: 237422 - DNA, 147 bp, Homo sapiens
  chr14:52780684-52780831
  hyper
taacgcttcccagccgaggtcagactgccgtgcgcttcgagtaccggaccccgaggaagcgagaaacgccgctcccgccggtcgcgggcagcttcagtacaccggcaacacgcgcgcctctgcccagtgccgcgcccagcgggtgct

SEQ ID NO: 237423 - DNA, 1108 bp, Homo sapiens
  chr14:52781103-52782211
  hyper
ccagggcaagccgccgtcggcgcgctgggtgcgggaagggggctctggatttcggtccctcccctttttcctctgagtctcggaacgctccggctctcagaccctcttcctcccaggtaaaggccgggagaggagggcgcatctcttttccaggcaccccaccatgggcaatgcctccaatgactcccagtctgaggactgcgagacgcgacagtggcttcccccaggcgaaagcccagccatcagctccgtcatgttctcggccggggtgctggggaacctcatagcactggcgctgctggcgcgccgctggcggggggacgtggggtgcagcgccggccgcaggagctccctctccttgttccacgtgctggtgaccgagctggtgttcaccgacctgctcgggacctgcctcatcagcccagtggtactggcttcgtacgcgcggaaccagaccctggtggcactggcgcccgagagccgcgcgtgcacctacttcgctttcgccatgaccttcttcagcctggccacgatgctcatgctcttcgccatggccctggagcgctacctctcgatcgggcacccctacttctaccagcgccgcgtctcgcgctccgggggcctggccgtgctgcctgtcatctatgcagtctccctgctcttctgctcgctgccgctgctggactatgggcagtacgtccagtactgccccgggacctggtgcttcatccggcacgggcggaccgcttacctgcagctgtacgccaccctgctgctgcttctcattgtctcggtgctcgcctgcaacttcagtgtcattctcaacctcatccgcatgcaccgccgaagccggagaagccgctgcggaccttccctgggcagtggccggggcggccccggggcccgcaggagaggggaaagggtgtccatggcggaggagacggaccacctcattctcctggctatcatgaccatcaccttcgccgtctgctccttgcctttcacggtaagtcactccctacgtttccacagcccggctctgctcagccttctcatgctctcccctgacgcctccaccctttccaccgccctacaaactttttgcaac

SEQ ID NO: 237424 - DNA, 40 bp, Homo sapiens; identical to SEQ ID NO: 203584
  chr14:53161604-53161644
  hyper

SEQ ID NO: 237425 - DNA, 82 bp, Homo sapiens
  chr14:53162609-53162691
  hyper
cgagagcgaaagccggaggggcctgtgttttcctgcggggttggggggcggggggtgcccgccccgcgccgccccgcccagc

SEQ ID NO: 237426 - DNA, 202 bp, Homo sapiens; identical to SEQ ID NO: 203585
  chr14:53173877-53174079
  hyper

SEQ ID NO: 237427 - DNA, 169 bp, Homo sapiens; identical to SEQ ID NO: 203586
  chr14:53196918-53197087
  hyper

SEQ ID NO: 237428 - DNA, 544 bp, Homo sapiens
  chr14:53257754-53258298
  hyper
aaggggcctgggacgttcgtgcccattcaaaaccgatggctgcagagagcgcgaccaactgtctcatttcccacgccaaagtctggggagcgaagttccgaccccagtcccagttccagccctgccaggccaagaccagcgtatggccggaccgctggccatcatccttaacctctgctccaggcgcgcgtgcgttcaacttcctgggaaccgcgctccacaccatgtgcacccagctggcgaggattaacgcccagctcctccacacaacacccccgggggcctggccggggcaccagacacacctgttagataaacctgagggcaggcccgccccagcccccaggacacacggtcctgctctcgcgccccggccccggtccctcctcacccgtagaggccctgcggtcggcgctcctagccaggcgcgtcggactctcccccaccagtgtgcacagcaccggatccggatccggcttcagcgccagccccacctcctcctccaccgcccgcgccacagttgggaaccgcggcccagacgtgg

SEQ ID NO: 237429 - DNA, 1472 bp, Homo sapiens
  chr14:53416859-53418331
  hyper
cacatcccccgtcccgcgtaactacgcaattaaggttataattgggaggctcgaatcattacatatgaaaattcagagaatagcaaaacaaaataagacgcaaaggggaacaggtctatctgcttaaatactgaaagattttacatctccaaaaagcatttgcgagatgccaagatttctcaaatgggcccctcccccgtcgtgagcctctttcctccccctaccaattctgggaagtcattagttggacgcggctgggatgctactcaccgagtttctccaccagcttaagcatcacgcctccaatgtgcacctcgccggtcactctcagggtgacatcgcggttcaggtccgtcacatggacactcagttcccacgtcccgtccgcgtagcagccatctggcatccttatcccgtccagagccatggctccttcctgcgagcgcggaggaaatggctctcgtaagcgtcactcccccaaagaaaggcgaatcccaccgaattcgcagcgccggccacgggctgggaggtggtggaggacccggggctttcggcagaaactcgggagggcggcggcggccggggctgcgggaggaccctacgccccgctcgccccgcagcgttcctcggtcccggcgccgcccgccccacaccgtccccgcctagcggaccgcggagggcttcacctgccggccggccccgagacacagcgcgggctgactccccgttcccctccccgccgcgccccctcgggtcccggcggggtcccgctccctcaccgcgcgctcctagcgctccgggcccgggactcgcgcggcaacaggcgaggggctggaggctcgcggggcggcggtgtccgcgtccggttcctcggctggcgaagcgctgcctgtggccggagcggctaatggagtcccgtcgtcgcggcccctcgcctggctccccgcgctccaccctctccccgccccctctgtccgagcctggctgggctgggcgcgctggctccctccttcgccgcccgcagagctgccctgagcgggtccggccggcctcgcctctgcccccgccctcccggcgccgcgctcgggggagggggctgcgggtcccgggcggggcggggcggcgtggggcggggcggcgcgggggtggcggggggcgcggcggggcggcaatctcggccccgcggagcgctgcccttttatggaaatgaaggacccggctcaggaattgaatccaacatccgggctctaggcggcgggccctgaggagggggagcgggggagcgcgggcggcctttcccggggcgctggtggccggcggggcgtctagagctcaggctggactggggcccccgcggcgtgtgtccgcgctggcagcagggagagggggcttgtccgtgagaaacggccccaggaaattcccagggcaaggtcgttttcggagaacaaagtcctctcgccccctccccacgc

SEQ ID NO: 237430 - DNA, 40 bp, Homo sapiens
  chr14:53619297-53619337
  hyper
cttgtagaaccagcgtacctcctccgggcccagctccgtc

SEQ ID NO: 237431 - DNA, 71 bp, Homo sapiens
  chr14:53619544-53619615
  hyper
aagtcatagttctcgtcactgaggcaggggtccagcgcgaggtggtggttgtggtcgtcggtgcccggcgc

SEQ ID NO: 237432 - DNA, 2938 bp, Homo sapiens
  chr14:54420072-54423010
  hyper
gaagctgcagcagtgcgttgctcgggatggcactacggaatggctcctaaaaggaatatttgaatataatgagactccaccgcagacaggctctgtttttcttccagcccctcggagtcacgtgagcgccgaggcccctcccgcggcaggcggcgaaagggcttgcgcgccctcccctcctccacagccccccgcccctcgcgggcccgcccctccaggcgaggccaacctccgcgcccgccgcccgagcctcagcggtccgggaggagctcccggcggcgctcggcagagccctcggccggtgccccgcggccgccgcgctcccagggctactggcgcagcgcacggagaacccggttctcggcgcggtgcgtcgtgctgggcccccgcgccgggccacctgaagccagaggatttggggcgcactgaagggactgcgtctcccagctcgaacccggcttaagtggggccgggagcgaggtcgggaaagtctcacccgcccaaagcctcaccaccgagaggcacttaaaaaggaaagcgcagagggaccctgcccacgcgcgtgtacacacacacccccccacacacacacaagcaaacacgagctccccgccacttcctccccagggtctcctcaaggccaaatattgctcccaatgacagccagtcaccccttggcgaacgcctgctaaggctccgaagagccgggccaccgatctagctcccggctgaaagcagccgaccttgtcacgcgcggggccgggaatgggagggagggtgttagagggtgatcgctgtgggaaagtgagagggagcggctgttagtcattgctccgggtccattaccgagaatccccaaacctagtccgccgctgcgtggcccctctccccatgcaaagcagacccccgaagaagccatgccaggctgagggacagacgccggggctcgaagctccgggcagattcagaaagaggcgtcgctgcagaaaggacgcatcacagttttcagatcttaatgtggccgaggttttacaactcccgacccggcgcagaaaggaaatcccaccatgttccccggagtcgagaaaacggtgaacagctttcggcctgcgctcgacctctgcgtctgcgtctctctcgcctcggcttcccttattttttaaaccaccaccacactccttcccccgccacttccttcccccacccccttcctccgttgcaccagcagcagagtcgcacgcagcaaatactccttcaagaattttacctacctacagttcaagcagttactgggatgtcctgactaatcgaagatgctgccgcgcgcgtgggtcgctctgcgcaagggcctcttcgaaaacccgactaggcgcaactcagcgttcagcagggccgggagcgccaggtcgtccccggggcccgggccccatgactcctgccccaaagcccactccacccgacctccctttcctgaggctgttcccagttgctgctttgggtcgctccggagctcaagaactcgggttgcctgccgccccactctccacgcacatacttggttttcttcttaggggcattggcaggtagactttgaggaagaaaagtaaaggatcgaacagctcagccctccctcccgaccgtggatgcccggagtcgaccaacacctcaggtccgggtgcggaggccgcgggcgcccctgcgcgaccgtccgcgcccggcaagagccgcgcggctttcgcctttgctggtcccgcgccaccgctggggcgggctgcgaaagggttgggaagagcaaagggtttttttgttttgttttgagacgcagaagccctttaaaaagcccggcgaggagaggtccagaagtagagaaagcagacggaggcaagctgtgcccgcggggcaaagggacagtagaaggggcgggcgcccgggttccccggaaaaccctcggccccaaggaatctcctggggcgggagagcgcggttctaaaaccgagaggataggaaggggaagggggagttgtgtttcaatttcggattcaccaggattcatctctagtcacatttttcttctcaaatttttaaatcgaaaagataaaagccaaaagaactttcatccccagagctttttattgggggaaaggaatgtaactcggggtggttgtccttcacttccctactcgaatcttctcctaatgccgaaatgtgtttacaggtagcctcagtttaccaagtatgtatcttttgggggtttaacctctcacaaagccttcaactcacaaaccgcgatccttggaaaccatcctccaaagcagtgcttggaggcctctaaggcccccggaccaactcccgctggaagaagcctgcagggactcgggaatcacgggaacctttcccgtcggttccgggcctggagggccaggaagagccgcgcgtccgcctttcgtcccgccaggaactccccataggacacgacaccgcaggaacaagcgtcctgggagcccctgggatcttggctgtcgtctctagggaccctacaccgtgaaatgatagaggcgaggttccttgggttccgcaagtcgacgaaaatagctcgtggagaaggcgcgtcctgcaactgcagttcgcaagctctcagggcgccccgccagctgggggccagattgggtgacactcccctcgacgcagcctccggagcggcgcgcactctccagaggccagcaggactgcgctctctaccgcagaacctgctccagctaggtgttctctccccatctcgccgtcgctctgccccctcactctctctggacctcagagccggttctctccttcctcctcccgcgctttccgtccggggatcgcaacctccagcccgtgggcaacgcgttcagcccaagaccccacagtttttcccaacgacccccctaccaagggcttc

SEQ ID NO: 237433 - DNA, 255 bp, Homo sapiens
  chr14:54423265-54423520
  hyper
accataggtccctgcagtagcgggctcgccagcagcagctcctggggacctctgaacggttgcagtgaacctgggcgagggccggggactgtggcgctgcaggctcgagatagcttggacgggaatcccatcggggagacaagctagatactcagccggagcagcagcggcgtctcaggctcgcgtccctcagctcggatgccacactcacctagcttccgggccgggctccgcgctccttccctccctccctcc

SEQ ID NO: 237434 - DNA, 516 bp, Homo sapiens
  chr14:54430167-54430683
  hyper
ctaacgtaaagaaacgtccgcgtgctccgctgataccccagggccaccggaggagagcagtggggtgtgagaactaggctgtgtccagtggctggtggtggggggagcggctactgcgccttccccttgggcactcctctcgggtccctgaggcgacgccctagtaagcctccacgcacgtcagcgaagggtgggtggagggtcaccctgaccgcgccccacagctggctcccgcgctctgcccaccgccacgccaccttcaccgcgcgatctcggcactcccgcctttctcttgccctcgttatttttagttcggctgctgcacctccctgcctgcaacagctcgccccactctcagactcgttttgcaggatttgtgcccctggtggctaacctgatccacacttgaataaacagcgagcgcccgggcaacctgggcgagccacccgcgcggaatttgcatccatccgcacgagaggttcctgagacgctaagcgttctcgcctaccagaactt

SEQ ID NO: 237435 - DNA, 410 bp, Homo sapiens
  chr14:54686919-54687329
  hyper
actgacttgatttgcgaagacacgcatgccttttccgagttggactgacgcacgccctcccggagcccgccccccatccgcagcccagttcggcgctcacactcctccggagcccccggctgcattcccgtaatgagcatccccctggaactgcctgccctttatcttgctggggggacccgcaccttttgaactgccatctgtagattgtgttggtgcactgacttgttaactgtgccacgctgtgaaggaaatggcatgatttagatcaagtgctcacgacggctgttcataagaaacacttgagccaagctgttgctgctcagaatgtgccctggggagaggggttccgtttcgggtcacggtcctgccttgtatgagggcaggcgcaaagcgctgcaatcccgggg

SEQ ID NO: 237436 - DNA, 290 bp, Homo sapiens
  chr14:54908014-54908304
  hyper
tgtagcagaaggccgcgaacgtgaacgccatggctggggaggaggagcggggagcggcgccgttgccagcggagaaaggcggcgcagggccctctgggtaaaaccattcacttcccccggccacagccgcgaccgccaccgctaccgccgcggcgccagccctctcagcgcgcctgcgcaccagcccagccgccccggcgccctctgatggccggagtctgcgttgcactgacattgtccgcacagttgttgattgatttttccttccttcttgcgtttattctttcaac

SEQ ID NO: 237437 - DNA, 432 bp, Homo sapiens
  chr14:54976301-54976733
  hyper
tagaatttgccggcggaacagcaatgaccactgggccacagcgcttaagacgcccgctgggtaccaatcctgggagtcgggggcggtgcgagtcgggccccccccatcccaggtctgcgtagccaatagctcgggacgggagcgggaggggcgtggcgtgtccggcagggggcgccgtgattggcacgccagctcccgctgtccgcgaggctgccctaaagtctagctcatgagaaccccaggcaagtgcggacctacaaagtttgtccgctccggggcactgtagtggcttttaccctggccgggcgggcggggctcagccgggctgggctgggctccgcggctggagccgggctctacccagagcaagaccctgatggctgcggtgtttctggtaacgctttatgaatactcgccgcttttctacatcgc

SEQ ID NO: 237438 - DNA, 576 bp, Homo sapiens
  chr14:55367881-55368457
  hyper
ctatttggtggaatcgctctacactccttcagagaaataactggggcagggagattgcctttccagcgcactgtttttctttcaaaaaacagtgaacggtagaatgcttcttagggcaaataaataaatgtcaccaagacacacggaaggtgtagactggaaaataatgtctttggtcccagctgtagaagccagaagctttatttttttaaacacagaccaatactgcttctctggccaacaggcagcaaagtccccattttccactctccatcaccccatcttgcatcctacccacactgattgcatccccaccctctgggtgaaaagccgacacgcctcagacgctaacagcaccgggtcaacccggctttattttagggtgggagggtgcggggatgagactgagtcctggaacccacggagccctccgaatcccggagtagctttactgctttttgcggggttgggggtggggggaggaaacagatttcagcagcaaactcacccaatcaacctcacacctcaaactccggggaagcccgtgcccaaaattgtgccgaattttgtaaatgt

SEQ ID NO: 237439 - DNA, 196 bp, Homo sapiens
  chr14:55493977-55494173
  hyper
gaaccggcggaggcgatgaccgtgacggctgggttgggaccggaacgccgaagcggggttgggggtggcagaaaagcatctgctttgtaagacctacacgaggtgcaggagtggttgggcctcccctctccacttaagcaagcgcccagactgatggcgatggtgatggcagcagttactcgcacaaccccagtta

SEQ ID NO: 237440 - DNA, 122 bp, Homo sapiens
  chr14:55518036-55518158
  hyper
atacccagcctccttcgaggcctagctgtaaaaaccgctgagcaaaaggaatccagaatcagccctcaagcaactcaagacaagttagcaatttccgccgggaagccgtgaacatcggcagc

SEQ ID NO: 237441 - DNA, 801 bp, Homo sapiens
  chr14:55595810-55596611
  hyper
cgcccctgcggcggcggctcggggtgtctggccggcgcggggctcgcccagcctggtccggggagaggactggctgggcaggggcgccgccccgcctcgggagaggcgggccgggcggggctgggagtatttgaggctcggagccaccgccccgccggcgcccgcagcacctcctcgccagcagccgtccggagccagccaacgagcggtgagctgcgcggggcgcgggggacgcggctccggccgggcaggggagagggcgcccgggcgctgcttggggcgcggtccggagagggttcggctccccgggaccgggccggggcgcgcgcggagagccccacagcctgtgctctgccctccaggagcggggcggcgggcagcgatctgggcccggggcagtcgcctttgattatcgagggcgctggcgttcggggaaggttggcagcaccttacgagacccacacacgtccccggggcggcacgggccaccttctgcggagcctcgtgggcttcgccgccgtcgcacctccgccgcctgcgctctgcggccccagagtaagccccatccggtgacgagccgcagtctggtcaccccagtcccaccaggtcccgctgcgaggggaggcggaggggctcgctcagcaaaccagacggccgctccagtttctctaattggggttggagccccgtcacccttccccagatcacggccgcgggggagcgaagggacttcccaggactgcatagggcgcctcccgggacccacagcttggctggcccggccccttttgagcatcagct

SEQ ID NO: 237442 - DNA, 195 bp, Homo sapiens
  chr14:57046229-57046424
  hyper
ccttcctcgctcgcggttttcgacgctgctttggtctctgtcagacccaaccaagtcagtataaaaggggggaatagccatggagaaggtaggcctgtggccgggcttgctttttaaagggaatgctctcctggtgattaggaaccttaaatcacattataagtaggtgaacgccaatgcgtggtgcactgcggg

SEQ ID NO: 237443 - DNA, 1156 bp, Homo sapiens
  chr14:57260987-57262143
  hyper
aggccctaggtgcccgggtgggcacacttccgcgagggcccggggacagcgccggccaagtcttgcgggcaactgcacactcggttccgggaggcaggtactccaggtcgggagccctgaggccaagcctgtctcagttcccacgtcaagaggaagcctgggcttcggagcccaccctgcctggggccgcggtcccggagcgcggcgggaagaacgcccacgtcacctcccggtgttgttacacccacaatcaccacactctgacccccgcaaagaccacagaggagtaggaagagggctgccctcgtactccccaagccacccccgcctctgagcgcggaggcacgatgttctggggctcgagccttcgcatccaccgggccagcgctaaccaccggccgccgccctggaggggacccggcggccccgccacgtgcggctgcgagtttcagacccgcttccggggggcggcggccgtcggaggcctgggttggggggtcgtgagccggatgttccccgcagctggccagaaagctgcctctgagcctcttgagcaactccctgcctcctccggtagtctctctggactctccaagtgacttgctgggggcaccgggcgcggggagggcaggcccccggggtgacgcaggtgtgtactttacagccagagaaggcctagctttcagggacattggcttagtttgttgggtgagacgtgggggtggagaatgggagcactgtctctttgccaaattttccagagaaaccccgggactagctctgtccctggtgccccggctactgccagcgggtccttagcgctgtcgattgcgcgcaccggagcccgaagtcttccccaccgctggcaggagagccccgcgagctctcccggacgtgtcgggtcctaaaggggagagctgagcagccacttcagggattgcactccgaggtggccgaggcagggaggagcgctggccccgcgaaggaggcctcaaccttaggacaacccgggcgtcccgggcgaaggtctcgatctgccggagccactgcctttcaggcatcgctccattaaagccagggaggagagggtcattggccagcgacccgccctccttacgtccggaggtcaccccacgcctacaggcaggtttttctg

SEQ ID NO: 237444 - DNA, 1774 bp, Homo sapiens
  chr14:57263780-57265554
  hyper
ctgtcacaccaacccaagggcggaaacggggcgactaggggaatcaggttttatcagagcaccctgcgctgacaggctcgggcggtttagaagagaaaatcagaggtgctcagggcacctggtcacaaacctgggcatgcagatgcctgatgggggcttggaccctttcgtggcacgaaaaggagagagactgctgttcatcttaaaagtctcgaaggaggcaaaaacccaggcggaagtcatggctgactctgatcctgcatcttctcattctggttgttttccaccgcgtctgctcccatttgcgtgggatgcgctggtctcctgcccgactcttttgtgttcctcttttgcatgattaaaaacacgtttctatatgcactaaaccatcacctagcactggcacgcctggttttgggttacagctttgtccgtataataacagcgaagttctccctgggtgtgagatgcgggttcgaacatgtggtgtgcgcgccagggctggccgcttccggttaagtggacgcggggacttgactgcgtcccctgccttgcaggtaactggaatgggttgcctggcaagttggccctgcccgggacgccgaagggaccgcttccccattccagagcctgcctctggccttcagggccgctgacaggtccgaaaagaaagagaaggcactcagttttaaaaaaaagagatctagaggactggggaaaaggggatgagccaaggcaaactgggaattgctcgggcttcccccgaaagcctcagctcagtgccgggggagaccccaacggagggccagactcccccaaatccagtggccgaagacctggatttcctgggaggatccccgggggcccgaggcaggcccagctgggccccgtctgctcgggacgcgggaggcctcagccgtggcgggagcccccgctgtggcggcctcgcccttcgaggccaggagaagcggccccctcctaagccgtcagcggctcatcctaccgggagacctggaaaaccagcagccgcgggccctgctgggcttgctttcgccgccccggccccttctccccggccagtggaccccgctcgccgtcccgtctgtcagtctcggttttagctccttcgggcgcagggcgctcgcctcccggccgggccaccccaccctccaatccccgaggccgacccgacccctgcactccgccaggccgcgaggtttcccagcgaccggcgccccggcccgcggccgacctggaggcctgactgcagggctcgggcggggccctctctcggctctggctggcggcccactcccgcgggcgtacaggcctcgccaccgggcctcggccttgccgcggcccacagcgccctgggaccggcgcccccgaggcctgagaactacgcccggggggcgcgggctgaggctcaagagaggtcctaggtgcgggccagggatggagccagcccagagagaaaggggaaaacccggcaaggcaagagcctcagtctcgcccctgcctggcccgccaggctgtgagtggggcccattgggcagcgccaacctggggagtccggcgtctgccccagctgggggccctcggggcagagatgtgagtgctgttcccaggtaactccgactgggcactggggagttagaaaagccagctctttagccagagcgcctagggcgcggcggagagcgggccgcccggcaccacgttccttctggcagttccgccccagcctcccagcgtcttgcgcctgtggcggcgg

SEQ ID NO: 237445 - DNA, 308 bp, Homo sapiens
  chr14:57270894-57271202
  hyper
atctgccctacctgcaccctcgactcgggcaagttgattttcagtgccacctcctctcgcatgaagatgtctgggtaccgggtcttggcaaacagtgcttccagcacatctagctgcgcccgagtgaacgtcgtcctctcccggcgctgtttccggggggtggctgcgggacaagaagcccagggccctttagggtgggggagcagtttctcagtcataggcgtttccgcgggttctccgacgcccctgccctccaccccgcagcagtcccccgttcctcacagcccttcagccgggagcctaccaat

SEQ ID NO: 237446 - DNA, 221 bp, Homo sapiens
  chr14:57272038-57272259
  hyper
ggggaagaggggtgcgggagtgcagcagggctcacttacccgggtagcccacggaggggtgcagcaagtccatacccgaagtggtcagactcagcccattgactgcgtaaggcggttgcttaagataagacatcatgctaaggttgtttggaggtgcaaagtcggcccaaatcgggggtacccagctggaagatcttgatgcgcccggggtggacaggttc

SEQ ID NO: 237447 - DNA, 110 bp, Homo sapiens; identical to SEQ ID NO: 203600
  chr14:57272911-57273021
  hyper

SEQ ID NO: 237448 - DNA, 762 bp, Homo sapiens
  chr14:57274535-57275297
  hyper
ttttgaaaaatccacgcctcactatgactgctcacgaggtggcctctggagaactcatacctagaagctgaccgcggtcgcgcggcgagttccggcagccggtcggcgaccgcacctccgggcgcgagtgcctgggtcccgcgttcctgcccggcagccccgcagccccgcagccccgcagccccgcagccccgcaggcctggcgcccgaggtcccgctccactgcccgcgccccccgcgcagccttatatctaacggtcaattcgtgcaatctgtcgcttctccctcccccacgccttgttttttttttcttccaagaagcccatctaccagttgctgtgtcctcgctcaacaataattacctcgtccgagaattaattataataaatgttttcttgataaactaacgagataatccgaggggcacacgtcccttaattacaggccgccatgctcctctctgcttctcgtccgggctgattaattttctgcatgatggaaaggaaacaaaactacgcggactggcgactggcctgcggctgggaagacgacgaagaggaggaaagaaagaaaaaggagacgtgtgggcaccgcggaaaacggccggcgctggcctctctccggcgaactcgagtgaaagtttctggcctcggggaatcaaataactctgccacccgcgagggagggaggaagaaacgtgccaaaagggttggccttgactattaattatcgttgggagaaagccccggtgttagcgctgag

SEQ ID NO: 237449 - DNA, 1223 bp, Homo sapiens
  chr14:57275584-57276807
  hyper
ccaaaaatatgtcccgaaatcgggcatcgatttcaagagtcacttgaacgcaacaacgcgaagacttcttgggagtttgcagagcgacccgtcgcccgcgcccggcgctggcagggaccttcggatggttcttactgggccgatccatggcacaggctgggcctcggcgaacccctcggcccccgcccggccccgagccacgacacctcattgtcctggagcctgggaagggggtgcgcgagcgcgcgggcgagccctgcctctccccgccagagaacagctgaggggccgcggtcccagcgggaggattccggtccctggcccggccgcggccttgggcggagcaggggccactagctgccacttctgcccgccccaggtgcgcgcggagggctacgtggggcgggccgcgacccggcaaagtcatgttgaaaaaacactcttcacgttcgctcggcctggtgaccagggtcggggaccacgacaaccgggggttgggaggctgcgtaattacaacccagggtggtttggattttggggggtggtggatatttaaaaacaaaaaggagatctggaagcttttgggagaaacagacaaccgagctgtgctaggctgagggagaggaggccaaagagagcgagcagtgagcgccggggcggacgagaagccagcgctcccagcctcctcggttatccgctccggtttccgctcacgttcaacaggggccgacaggggctcgagcggcggcccccggcccaggccgacccgcaagcgaaccgagcttccggcgcgcgggcccaaggaggcgcctggctttttattattgttgtttcaatccatccatctagttacatctgcatctttttgtctcggactctaaaaaggtccctgggatccatccaaacgaccccaaccaaatctgggggccaaaacgcaaagatcgcgggagaagcccagaacggcgttgacataaaaacaaaaccacaaacaaaaccttccaaaacaccccagattacattcgcagcgtttcgacgacgttttgcagaagcgacgacccccaggagcacgctctctgcctctctcccactaccgctctcatctctagatcacatttttctttttgcaacgatcgttattacacctcaaaatttgtaagagaaaaaatacatccgcctacagaactccacgttcgcagaggggcatcggtcggtctattggaggt

SEQ ID NO: 237450 - DNA, 355 bp, Homo sapiens
  chr14:57277092-57277447
  hyper
caaagtagatgtggcgagtgagggctgctctagcaatttttatttttaatcacagtggaggctgtgttggagctgaggccggtcccgctctcagggagatttgctgagaaagcgcctctctggcaactttttgacgcaaactctccaaccaatggcagggagagaatgattgacacatctaagccagagggaaaataataaaaacacacaacagggggaggaaaacaggccgctgctgcacggggggacgagcaggcaacaaatccaggcctccgacattaccagaatgttctttaaagacactgggctttgcttaaaatatacattatgggccggagcatgtgaactaattgta

SEQ ID NO: 237451 - DNA, 294 bp, Homo sapiens
  chr14:57278006-57278300
  hyper
gggaacacgaaccccggaatctaatctcagggcccatttaggagaagtagctgggaccacatcgggcctcgaggatgcgagtgtgaggtcgacaagatatcgtggaagagagcgaacgagggaggcccccgttggaaacagtttctgtgttagaacaaacgccaccaaacgaccgacactgcgaggcctggagctacctgggctggcgccgcccgagccccgggctgcgagcccagaggctgggaagtgatgggacctgggggcccgagccggagagtgcgacccccagcccaa

SEQ ID NO: 237452 - DNA, 1068 bp, Homo sapiens
  chr14:57278622-57279690
  hyper
gttggtaattaattcgtcgctttgttgtcggttcttatactgtatgtgtactcaaatgtggccgtccttgggatttacagcaattaacgaattacgggagtgcgcacgaggcagcaagctctcggcagccgggctccggctcgggctcggcctggggctggggactccgcggcagcggcccctgtcacaggtgtccctagagctttgggccctggcggcccctcgagcccccgaggggcccggagcccgcccagctccttcccggccctctgcagcagctccagtccggagacccgctggctgtcgcgttcccaggagtcaagagtttctaggggcccgggcgggggggagggtgagtaccgaccttttttctcaccccacccccactgtactgaaacacctggcggccgcccccgaagcctttaatggggatggtggtgaggagggggtaacaaatgccccgggcgttatgaccctcgtggcgctggctgtcggaggcactggttgggtgcgcttggtcagagtcatgatgctttcgatgaaggaaaggcaaatccacctcgatcacctgaagcagagtctccttcctacccctagaaaagacaacgtttcccccagtttgatcacaatgatgtttaaagcataaaagagccgaaaaagaaaaatggacgttgtgaatctggcagaggggaaggccggaggaaggccttggggacagtgggcatggggtgggatggagaatgatcagaacatgcgcttgtgagctaaaccaagtaaaccattttggactgggagatccatctgccgtagggtccagtgtccagggtaacctttcaagcccgatgtagaggtttgcgatgtcctcccagatggcgggggcagctgaatctccctaaaaatccccctgttctattcgacaggggcagatttatgcatggtggggcgtgagagggttttgcccttccagcggccggcagcagacagctcccgcttctcctttgccctctagtctaataacttcgcagaaatacagggccaataaactacgagttggaaatggacagtgtt

SEQ ID NO: 237453 - DNA, 39 bp, Homo sapiens
  chr14:57281266-57281305
  hyper
ggaccatgttgttccggaatgaaacggattaagattgtg

SEQ ID NO: 237454 - DNA, 1358 bp, Homo sapiens
  chr14:57283301-57284659
  hyper
tacctgagatacacggtgcaaacgcccccggctccctcctttcccaattcacccacttcttaatttgagtttcttaatgtgcaagcgccagggccggctgtggtcaggcgggctattttctggcaagtgtggcgcggggctggacgcccctgccggcgggtcgccgggtctcgagctgcgccgccccgctggaggcgccggggctgcctggctctccgcgcaaacctcgcgcccttccgtttgcgcgcatggagccgggtgagggcggccgcggccaccgcgcgatggaggatttggaagctcagagccagctggtacattttgagaaatttagcaaaccagactgggctgcctcggaaactgggttctgttctgactcatttgcagaaaagttatggggaaaaacatcttgtaaaattaaggttatgtttggcgggtacagtcttgagcgcacatggtcatccggcgaatcagccaagttttccaaagcgccccctctccagctctcaggccaggggagcaaagcgtaggtgtgtgcgtgtgcgtgtgcgcgcgcgcgtgtctctgtgtctgcgtgtgtgctcgcaagcgcgtgtgggtttggggtggggggacatcctgacctttctacaccctagtgcgtcccaactccagactgggaggagacgtctgcggcctctggtcttttcccttcttggacgaggtgcggccagctgagacctcacaccggccacctcggacccagtgcgccgagctaggggagacggcgcgggactgggggacccctgggatcccgccctcgtagcggaaggagtggcagcccttggtgccgggcctggtccttgaggctgccggccctccggggcgccaggactcgaggacgcggtttgcccccgcagtcctaagatccccggggccgtgacagcttggggaaggggcaaactctgtttggtctccacgaagtgcttcgatgttcgcaaaagggtaggcccctcttgcttggggtcctacacccctcggaactggctctgcccctgcctcttccccagcacagtctcccagctaaggctcagacagccggggaaaggggcgcccccatcactattccccacaacccgccccagtgtgagccagggcgcggctgcaggctgacaggcgcaccgtgaccacgccgtcacttcccttcaccaaaggttagatgggaggcgtgcaccctctggggagttcgcaaagcttctcgctttgatcagccgcgcgcagtgccagggagagatattgctggggtctgagtccgtcggaagtgtctagaaaagaagagagaggagcaggtaatcagactttggcggctgccctggaga

SEQ ID NO: 237455 - DNA, 513 bp, Homo sapiens
  chr14:57735567-57736080
  hyper
ccggcgccgcccgcgctgctcccattgtcaccgcctcatacgccggaagtggaactgcgcgcgccagggaggttgtcgggaggggccggcgaataaaacgagcggcgaaagaaccgaaaaaaggctcgacgctaccgtgtatgaggaactttgatccttgcgggccaccattccggaagtagaatttagaggaagaaaataccggagttgcagggtataggtaaatttctcaaggttataggttggggttcttagaactttttgtggtgtgtgttggcctagagcgactcagaagcgttagtgacttcacctaaaaaagctaacctctctgctgagcgcgaccggtatgcggcgcaggatgagcctcagggcttctgttaagagtctgtctgagaaagccggtctgcgctgttcctcggtggcgaccttaattatgagatgagctaatgctttactgacttaaccatggcgcagcgggcagtgtggctcataagccacgaaccgggaactcca

SEQ ID NO: 237456 - DNA, 88 bp, Homo sapiens
  chr14:57858261-57858349
  hyper
gcttaagaagcccttcgggcagggaggttgagcctggggaggatcggacgatacgatatgtccgatatgaatccgagctacaaatgcc

SEQ ID NO: 237457 - DNA, 1205 bp, Homo sapiens
  chr14:58331877-58333082
  hyper
cctcctaaagatactgtaaccggagtaactcccgcgctggcagcgtctcaacagcccggagtgaacgagctgaccccaccagcgccgggacccacgtctgggtcggccgcccccgccagccccacccccgagcctccccagcctgcgtccccagcgccccgcacgcagtaggggctttcggggcatgtatcccctagggctgactttccgctaagtgaacagccatgttagcctcctccgggcgtaaatccaccagggtgagccggccaacggcggtcaggagcgctcaccaggtcccctccgcacctccccccaaggctacgactgtttccaaactcctgggcgcacccagccgggccccttgccctctcacggttcagcaccgaggacagcggacatacttttctccccggggggtccccgccgccaggaaggcggtgttgacagcgtccgcagggctgcaggtgtccgtaccgcgcgcccgcccgtccgcatccccgcggcacccctgcgcgcccacctcccttccccgcctcgcgcagggcagccgcgcggcgtcttacttttctggctggagtaacctggataatagccatagtagccggtgatccgcaggatccggtcctcgatagtggccaccccgttgggggccgccttgacatccatagagagcgcggggcgacggccccgagtgcggcggggcggagagcgcagcgcggggcccgggagctggtgcaggtgccggagccgctggtgctgatcttgcagctcctgctcccgcgcccgggctctgactccaccgcccggcgcagcaccggctccgcatcacagcggcggcggcggcggcggcggcggagcggcccccactcgggccggcctctccgtcagcctggcagctctcccgcgcgccacccggagcactgctgcccgaatagcgccccctcacctccgacgcccaccgtggccgggggcgggtgtgggcgccccacctggtcgccagctttcatcattaacccttgcgcgatccttcccgaaaactagacaccccaaccccacctgatgaaagggatgtttggtcagtggggcgcgagaggagaaggcgacggtggccaggggctcagagaagggtgttgggagtgggagaaacccaagagggactcatagctgttaatgcgaggcattaactctgtcgctcggggagaaga

SEQ ID NO: 237458 - DNA, 35 bp, Homo sapiens
  chr14:58619016-58619051
  hyper
tggcactgacagccgacgccgtcgcccacgccccc

SEQ ID NO: 237459 - DNA, 244 bp, Homo sapiens
  chr14:58711341-58711585
  hyper
tcagataccacgacgccaagcggctcaaagtacgcgaaccgaaggaggagcctttgctttccccaaccccgcctccattgcttctgcacatgcgcgccgccagcctctcgcggcccgcttttttcccacaatactcctcgtcctgggggccggagccgcggaacgagccacagagaaaaaggttattggttggcagttcagccaatgagcgggcctgttactagtttgcggcatcctgtggtat

SEQ ID NO: 237460 - DNA, 121 bp, Homo sapiens
  chr14:58766356-58766477
  hyper
ccctcagctcctgcgtcctggctgccctcgtaaggggtcttgtcccttggctggtgaggattctgcccctccccgctggcgtttgtttactttctttcccttggtcgctccccgcagttga

SEQ ID NO: 237461 - DNA, 172 bp, Homo sapiens
  chr14:59655229-59655401
  hyper
agatgtagttccgcgagtcccgacagcaaagctgtcccggctccgctaatagattgggaccactactcccaggagtctgcgcgcccgaccggagcgtccatgcgcagtgggagccactttgtatcctatcaggcgaggagagggtgatgtcacctgcgagttagtaacctac

SEQ ID NO: 237462 - DNA, 931 bp, Homo sapiens
  chr14:59931089-59932020
  hyper
gcaggccaccaccagccccacgctgaaggccgcgcccagctgcgcggggtccggggaggtccggtagaggcagccgtggaagctctgcgccgccgcgagttcccggggcgccccgagcagctcccagggcaaggagaagcccagggccgtcagccaggcgcccgccagcagctgcagcgcgcggcggcggccgatcttctcccgcggcggccgcacgatagcgcagtaacggtccaacgagatgagcgccacgctgagcgtggacacgatgccgaagcacgagctgaagaagcggctggcggcgcagaagccgcgccagggccccgcggcggcggcaggcgccgaacccccgggcggagtgaagaggtccaggaaggcggcgggcaggcagagcagcgccgtgagcagatccgatagggacagcgacaggatgaaggcgttggtgacggtgcggagctgccggtgcttcacaatcacccccatcaccgcgcagttgccaaggctagacagcaggaagatgagcaggaggacgagcgcctgggccgccactgcagctccgtgcgacagcagcggcgccgcctccgggcctagcggccgcctcaccgccgcccccgcctcccgcgctgccccggacccgccaaggccgccgccaccgggagcggcagctgtgccgcctccgcttgcgtcgctcaggttccccagcgccgcggtcgccacggtgctgaaggagagcacggccgccgtggccgcggaggaagtcccgccaggtgggccggccgcggagggggcgccggagtgctggctgcccagtaaggccatgctcgctggtgggcggggcggctgcggctcctccatggggcccagtggcggccgcggatctcctcatcccgcaccgggggcggcggccgctaggtcggagtggtggctcggg

SEQ ID NO: 237463 - DNA, 525 bp, Homo sapiens
  chr14:60043256-60043781
  hyper
ccgctcagggttcccgctgagtgcctcctaagcgccacctctgaggagacgtcccttccagcgcccgaggggcgtcttacccacaacaaacagctgctccagcgcctcgaccgcgaccgaggagcccagggtggagggtaaggtgcataactccagggaggggccagtggagacggcagccgcctgcaccagcttctcgccagcgcccagccctggggtccaggggctcagggccattttgccgctctacttgagcgcctcctaagccagagccaaggattgccggttgccacgggcaacgaggacaccgaggtcgtggggcgccccctcgtggcccgcacctctagtaggtaccctcctggttctctaattttatccacgataattaagcagtctgggaagaatgactctctctttagctaatttttcccctttcaatttccattgcgttagttcaggcctgtatcttttttgtgggccactggaatcataataatgatcacttttgagcgcatctttgtgccg

SEQ ID NO: 237464 - DNA, 62 bp, Homo sapiens
  chr14:60097110-60097172
  hyper
gtcccgggtttcccgtgcgcctcaggcatgcactactgaaataaagagaataccctgacttt

SEQ ID NO: 237465 - DNA, 748 bp, Homo sapiens
  chr14:60336957-60337705
  hyper
tattcccagtcgcccgtggcgacgcgggggtggggtcggcgctcaaggcagaaagcgcgaggcaggtgcccaggagagccgcgcagaaggggactgactggggggccctggtccccgacgccatttgaggggcagcggcgcccgccttacctgtggatgcagtttccatggcaacgggcgactgccgggcggggcccgagccggcttcccgcgacgccgcttcccgggccctggcgcccaaccccgggctgggctccccagcctgcggcgccggcgtggcccctttcggcgtcaccgcttcgttctccccctccccccggtgcctgagccactgggacccggggccggccagcggcagcagctcgtcctgcggatcccccggcgcggccatggctggcggtcccccggcgcggcgacggcggcttggctgggcagaggctcggtggctgcgcgggcgctccctgctgctgtccccggagggactcggcgctcagggaagctgcggtgtctcagcgtcgccgccgcctctgctgcaactccgccgagccgctgcctgccgctcttcccgcttcagctcctccttctcccccctcctcttcctccggccccgccgcggccgctgcctgcgctcctcctcctactccactcgctgctgccgccgctgcttcgctattcccaatcctgttattacgcaggtgaaaatggcctgcttggtccgggtcctcctgggcacgtcagcccccaacct

SEQ ID NO: 237466 - DNA, 81 bp, Homo sapiens
  chr14:60386762-60386843
  hyper
cccccacccttttatccccctccccgccccttttctcctcctccccacccggaggtcgccggaggcggagatcaggttacc

SEQ ID NO: 237467 - DNA, 197 bp, Homo sapiens; identical to SEQ ID NO: 203607
  chr14:60558407-60558604
  hyper

SEQ ID NO: 237468 - DNA, 489 bp, Homo sapiens
  chr14:60794398-60794887
  hyper
gaagcagaattgggcgctcaagactcagacccggactgatgagctaagactgcttgcaagagggagtgggagtcgttaaaaaaatatcctcgtggcttaatgaccaaggcgggtttattctcaaggaagggggagcggcgtggtggtgttactaaacataacagatggcagctgtctgcggctatatagggcgcgctgacaaatccctctggatggccacgcggcgctgggctgcggggcctgggtgcacttcgcgcctggctcggagggcgccgcctgcgggaggacctccgggagccgagctgcctccccgcaaacccggcccgggcccacgcgggctcagggcgccaggcggggtgcgccgaggtgcagctccccggccctaggcttcgctggggtgggggtcgaggcctctccgcgggtggctccctccaccctgccgccccgcctcgcggctgggagttgcccgggagctgtgaattcactaga

SEQ ID NO: 237469 - DNA, 101 bp, Homo sapiens
  chr14:60798393-60798494
  hyper
ggctgctctggggacttggccgctttgtcacccgtgccggaagctcacaggccccggagatcccgccttctgactgcatcgccctctgccttattttttct

SEQ ID NO: 237470 - DNA, 953 bp, Homo sapiens
  chr14:60951980-60952933
  hyper
ccaagcccaacgagcgcttcagaaatcgttgttgagtcggggcacgacttgaagttttggggatggggtgggaagcacccgcataaccgcttatgcgtgggattgcaacaagcatccggatcttccagggttcacggacacccagatttctccacaggatatgccctttaaagtaaacgctctgaatatgtcccttggtggcgtgtgtacaaccacgtgtagcaaaattctaacgaaagcccttccccaacacccgggtaaacctagagaaacagtgcgatttcgcatttacgaatttaccacgaagaataaaaaaattggaggttttcacagaacagccaattcgcattacggcatacgcctgaggcggggttcctgtctaccgtgcccctcagagcccaggaaccacagcccgtgcgcctcccgcagtgggagttcgccggccgactcccaccctcacagcctcctgtcctggcttcccctcgcccgaggctgcaacaccgcatcccccccatcccccgccgcgccctcagcctcgggccgcaccaacccaggggataaggcgactccggtcgctctgaggggcagggccagccagccccctcccacccacgcacacgctccccctcagagccgccggcccagagaaaaaccgccacatgcagctcccttccacacgcacctaaacagctcctctggacccgaacgcccacaccctccctccctggggtcccaaactccactcaggacgccacagcggatcctaactacaaacggtccccggagccctgggctggactcgctcagccccgcccccacgcccctggtaccagccctgagagaccccgcggagcacgccgcgggagccgcagatcgcgctgaagagcagcgagatcgcgctctggacgagacctgcgcggctgcaaccgctccttcttcgcgggtggaagcgc

SEQ ID NO: 237471 - DNA, 40 bp, Homo sapiens
  chr14:60972828-60972868
  hyper
cgtctatggattcccggcaagacccgagcctttgtccaag

SEQ ID NO: 237472 - DNA, 36 bp, Homo sapiens
  chr14:60973460-60973496
  hyper
ccgcacccttctggcggctcccgcgaggccaactca

SEQ ID NO: 237473 - DNA, 444 bp, Homo sapiens
  chr14:60974102-60974546
  hyper
ttccggctgattcggaagtcgctccaagggaaagaaggtttatgctttgtcattatcttcatcgccctctttattttgcccctgccttgtcgtatttcaagaaaatgaactcttagaaaagaaagcctctccgttgaggcggttggcaatctcacagaaatgatgtaaatggtttcagggcttttttcttcccctctgctatttttttcgagtgaactgtgaagatctgtgaaaataatatcagggttttccgtcagaacgagctttgccctgcactcaggcgtggcgtgatctgacccgacacctccaaccatctgtgctatctatctgccttctgatttaccagatctgtacaagccgcatacaaattgtacttgatactaaagaaaagacagtcgggtccagtccagttcggctgtgaacgttctcacctgatttctgtct

SEQ ID NO: 237474 - DNA, 1498 bp, Homo sapiens
  chr14:60975415-60976913
  hyper
cttcctgctcccaccgcaaggtttgctgtttcgttacaactaaacttgcgaattctcggagcatttcagtttggcccagtcctctttgtcctctggagacctctcgaccgagacaacgcatcgccccaaagtgaattcctgaattcctgtggcatcactgcctatttggtgggaaaaagggagggaggggtagagcggggtgggggagggaggagtagtgaacgctgccgcactcgcctctctttttctcccagacactcgcatgtcttttcaacctccaggttctgcaaaatactgaagaaaagtccaggagctaacggcgggcgctgtcgagcacggggaggtgctgaaatagtcctggcgtgctgattcaagctttgattggcagagccacccggtgactgacagggggtctccatggcgcccgcgccgccaatccgcccaccccaatagcggagccagctcgcctgccggcgtgcctgagccgagccgagcccgaaccccaagccgcggagccagcacctcctccagtcggggtcgtccgctcccggccgttgagccaccgccgccacccggtagtgtgtcccgctgccccaatccgcctcatcaacaagcgcctggcacactcagccaggcccgcgggcatctgctgcgtgtcccgctccgggctcagtgccctcgccgccgccggcactgcctcgatgttccagctgcccatcttgaatttcagcccccagcaagtggccggggtatgtgagaccctggaagagagcggcgatgtggagcgcctgggtcgcttcctctggtcgctgcccgtggcccctgcggcctgcgaggccctcaacaagaatgagtcggtgctacgcgcacgagccatcgtggcctttcacggtggcaactaccgcgagctctatcatatcctggaaaaccacaagttcaccaaggagtcgcacgccaagctgcaggcgctgtggcttgaagcacactaccaggaggctgagaagctgcgtggaagacccctgggacctgtggacaagtaccgagtaaggaagaagttcccgctgccgcgcaccatttgggacggcgaacagaagacacactgcttcaaggagcgcacgcggcacctgctacgcgagtggtacctgcaggatccataccctaaccccagcaaaaaacgtgagctcgcccaggcaaccggactgacccctacgcaggtgggcaactggttcaaaaaccgccgacaaagggaccgagcggctgcagccaagaacaggtcggtacctagaggcctccgcgctttgagcgcaccggggaggaggcgggtggaggcacctctggcgcccttacccagtccctggcgactccaattcagcaggagttgggagcgcggtctgtcttgggttaagagccctgcgttctgggctcctggccgggagttcccttgccggctctgcttccccacccgctggctccccacgcctgcgggcagctgcagcag

SEQ ID NO: 237475 - DNA, 48 bp, Homo sapiens
  chr14:60977339-60977387
  hyper
tttgcctttaggtcgggccgacccgatccaacgcgatcgcgggagcac

SEQ ID NO: 237476 - DNA, 673 bp, Homo sapiens
  chr14:60977616-60978289
  hyper
cgcggaggggcggccgcggactcctgcccgacctctgtcgccttgccgagtaatcctcgccttaactgctggggtcttcggaagaacctctagccgccgggctggagggacgcaggaggtggtgggggcgggcgacgggcggctgtgttacgagctgtgacccgtgttccctttcttccccgtagactccagcagcaggtcctgtcacagggttccgggcgggcactacgggcggagggcgacggcacgccagaggtgctgggcgtcgccaccagcccggccgccagtctatccagcaaggcggccacttcagccatctccatcacgtccagcgacagcgagtgcgacatctgagttgcccatccaggatgctcagaagcagattccagtgtaaaaacgagaaaaacaaaatgaaagaggggaagaagatgagagacctgcaaatccagcgccacagaagccaggtgaccagggacccgcgggctcgggttgccgtttcccgccccaccccgcggccggcctggcttcactggcgccctttggccgcgaccacgggaaccagcggtgaggcctgacccagcaccacgttcttcttgctttgctttttcctaaggattttgctgcaaagtctccttcggaacccgaactgcaagctgagcgcctgcccagattc

SEQ ID NO: 237477 - DNA, 109 bp, Homo sapiens
  chr14:60981159-60981268
  hyper
tcaggctcttttccggcttataaacatttcaaccacactccagtttcaccaaaaaaaacgacggcccctgctccccaaatgccgcagttcctctcgcctccactttaat

SEQ ID NO: 237478 - DNA, 666 bp, Homo sapiens
  chr14:60981925-60982591
  hyper
ctggagcggcgggcgcgtgggtcccctcggggaggcgccccaagccacggtccgctcccaaagagaagcccagactgggcccacagtacccgggaaggtgagtccttactcgggggcccagatctccccacggaggccacagatctgggtccccgaggaaggagagccccccttttcgcgcacccaccttttccatccagcgccccgcgaactcgcggacgtgtaggcctcgagccactcctactgttgggctgcgtgactcagcggctcgaggagagaaacctctcaaaaccgggggaccgagacggggttcaatttaaacctaggtgggagaatgagcccacaagcgcgcgcccctgcagctgcggaggcgcgcgcccgcccaccctcgggcgcctgaagtcgcagcggttgcagagcctcgagcccgtggatgcggcgcgcgccgcggtctgggcctgcgcgagaggctgccgcccgcgtcgggcctgggcctacgcgtgtctggcctgggcctgccggtgcaacagcagttgtcgccaccggtcctaggccgcgccgagcgagtcgccgagaggggcgggaagaggggagaggtccgagaccagggagcgggacctaaagggggctttccgcgcccgacaggtccgccggggttagccttcg

SEQ ID NO: 237479 - DNA, 336 bp, Homo sapiens
  chr14:60982799-60983135
  hyper
tattcccaaacttcttcagacgtgccctaccgcgagggaacgaactggttttcttcccgttttcacctccttgtctggagacaaaggggtgtgagggcgatcccagagctgaacaagcagtttcacgcctccctgcccgctcatgctgtttccgcttgccctgtggtttgctctgcctggaacgccgccccctacctcaactgctaccctgtcattccacaaagcctaccccacctccactaagttttccgtgagccagtgagctccacacagataatgtgccaccaccttttttaatgctcccaccgcaccttatctaaacgtctgttttagcgc

SEQ ID NO: 237480 - DNA, 858 bp, Homo sapiens
  chr14:61104194-61105052
  hyper
ggggctgccgagcgcgagggagctgagtgaggcccttgcgccctaggcggttgcaccccggacccctgcagctgtggacgccggagctgtgcgcagtcatcctgagccagcccgcggggcccgatcggaagggacgcctctcctaagagctggcctggagtcctggagcctccaagcgggcaagtaggggccgcaaaggctgggctgggcctccgctgaggccctcgggggcctctgggccctcatggcctggaggccgcgcggcccaagcccctagagcagaggccgcgctagcctgcaggggtcgacgcagggccggaggcagcggcttttccttcccactccgggttgaccctaaagacacgatttaacgtggcggcggcagctgcccacgctgtctggaggagcagggcgcctgggatgcggcggcgaaactggcccggaggggggcccaggcctcacgcgcccggctctctcccagctctcctcctcctccttctcgggctcagaaagccttccagccgcggccccagccctccccccagcctgtgctgggctccgctttccctccatcaactccaagccgaattcaatccgagaaggctcctttgagcttttgtgtttgctgggggagatgtgggcgcaggagggatcgcgttacaactttcatttcctgaaatgtttgagggaacatccagggtttttatccccacatcaggccgggcgatgggctcgagtttcaggccttgtcactcagctgtcaccaaacaaacgaagctctcagagcccaggagagggagagctacctgctattcatgacccctggagcaggtgatcgctcatgggaaaaacaggtag

SEQ ID NO: 237481 - DNA, 2457 bp, Homo sapiens
  chr14:61108286-61110743
  hyper
aaggtcgcggaacacgcgtgcaggcgatgagactgagccttcgggtccctcagtgtgaattgtccatgggggcgcggtggggacacacactagtgcgctggcttcgggcagctgaaggaggtagtctccgagagtttttagagtcccctccaagggaaagcttggaaaaaagagaaatggagcggagagagcacgtgggctaccagcgaccaccctcaccttaaacctaacccacctgtccctgtcaacgccaccctaacaaatcagggcagaaggtgagccgcgacagcctgacccgaagcgcgctgcagacctaggctggtgccttccccttggggccagggctgtgcgtgggggacaaggccgctgctctccctagggccgctggctaagaaggaaatacctgacctggccccaccaagaaagtggagctcctccacccccagttctgctggagacactagaagccagggcccctctctctgccgcgggaagttctagcgacaagcccagaaagtgacgtcctctctacctggcacccctcctcagagcgcgcgggtgaagagtttgggtccgaaaaccaaagccaagaccccaggaagcgaagaaggagacaggaggtgtctgaagcaagaagggcactggagaatcggcagcagggcctaggccgcctccgaaccaggatccaaggcctgcgccatctgccctgtgcgggaagcgcggggcctgggaggcagggagcgctcacacctgcggtcgggcaggaggcgcaacgcgctgccagggcggctttatcctgccgccacagggcggggaccagcccggcagccgggtgtccagcgccgctcacgtgcctcgcctggagcttagctctcagactccgaagagggcgactgagacttgggcctgggagttggcttcggggtacccaaggcgacgacagctgagttgtaccacgaagctcaggccgaggcctcctcccttgtctggccttcgaatccatactggcagcctctcctctcaggcactccgcgggccgggccactaggccccctgctcctggagctgcgctatgatccgggtcttgagatgcgcgcgattctctctgaaccggtggagaggaggctctgccccgcgcggagcgaggacagcggcgcccgagcttcccgcgcctctccagggcccaatggcaagaacagcctccgaagtgcgcggatgacaggaaaagatcttcagttcttctgccgctagagaagtgcgggatacaagcctctattggatccacaacctggagtcctgccttcggactttgccaaagacttgcaggcggtggggaggcagtaggaaatgaagccccctccagcctcagccgccgccgcgttcggtgcagcagcagcagtgccactgccacagagcagaggaaggcccgctccgcgcgagttctgtgccaggtgtcccgttggccctcagcggacaagggagagccgctaataagggtcgctgctcagcaaactcagagctcatccataagtgccaacgccactgcttctttctggaagcttccactccggcccggggtccggccccagccacgctgtcctagcccagagaacaggttcaagaacggtggtgcccagccccagcggtgcccttctccgtccctgtagctcgctgggctcttgagcccctacccactaagccaaaaattcgggaaccgggagccaaaccccttggcctctgagaatttaggaagcttcgttttcagccaagaggtcaaggcgagcagagagtggggactcgaacaatcgcgtgtttaggtttaaaacgttaaaaaataaacatcactcgagtgttttttttttttttcatttcacttggcacaatgctgtatggtttcgtcctacaaactatttataagccgttgttcattacttttggctaccgttatgacatctgtagaggagaaacgaaaagtggctttagattcagttaaactgcgacgcccagaaggtaaactggaggtcccttaacagctggttctcgaagatttcctcgagggaagaaaaaaatatggttagtttcccctaatgatctctctgaaatgattgccaaaaaaactcaaagcaatatccagctttctcgcctcctcctgctcgccccttttacccagactgagccgaggatggcggaaggaggcacattgtgcaatttcttattaaacacatctggaatatgcgcgctctggatttagtgccaggggttttacaaagagtttatgactgtgacagaaaattgtccttttaacaagtttacaagcagtaatcacgggggcttttacaggaccagcgctcttgctcctcgccggatctgcagacatttccaagattcaccaactaagggagcaggaagtgggccggggcgccctgcgagacacaacttccacgagcctaaaattat

SEQ ID NO: 237482 - DNA, 2594 bp, Homo sapiens
  chr14:61113926-61116520
  hyper
ctggagtcggccctcgggcctggcttataggacggccgttttgtaactaaaggctaactgcaaccatacaatccctgttcctgtgttacttgctaactcttcagcccctcgtgtccccctctcaaacttcctaccaacacccaccccaacccatcctttctgggcaggggaaacttcgccgccccgcacaggctgccagcgggcgcggcgcgctggggcgtcagtccgggcactcggtaccggttaacttcaggatttcgcttccctcgccgcttccgccttccgagtgctcgtcagtcctcccgactcctagcgcctgtctgtctcctttctttccccttatcctcacagtctctgtctcccgacaagcccatttcagcagaatttatcctggctctggttttccaccaagacaagaaagggagcaagatcttcggcccctagtcttggaagcgaacaaaggaaaacctaaccggcccctgcgctcaggttttcccccaaactctttggcttcgcggagcgctctccccgccacagccacctccccaccgtccttctgaatctctgtccgaaacgctatagagaacagaaggagcctgcccaggtggccgaaggtgttgccccgaggtgggggaaagtagagaccaatttttaaaatattgccttgtgagctccagtgcgagagagggctgcgactggagaccctttcctcgtctgggcatgcggcgcggtcagccagaccgacgggctgcagtgccgggccacgcgcgagcgagcacggcgaggatcaaccctttcttaatttggggcgccggggagtaaatgcagcgccaactctccccaaagctctctttttgttgtatctttaaaagtctcctccatttgtccagctagtgagaaatgaagcaggctacctctaaaccaaaagactatcaagagagagctgtggagaaccaggcgggagtgggggcagagccaatgtctcaggccagcttcacccctctggggagcaagaggagagaggttcgcgaacctcagctcccaccaaacccctttccttgcgacaccaatcaacatttcactgcccgttgatttagaaactcactctccacccaccactcatagccgcggccagccagggaggcataaagaccaaatctagcgccaatatttcccgacactcacatcccagagaaacccacgcgcgggtgctcaaagcaaatgaggccccatccttagcaaggaacctcagagttcatgaactttcgctgcagcgccgcggagggcctgcgcgccgccccgtggacgggctccggccggcggggaggacttggtggctggtgcctgcgggggcgggagggggcggaggagaaaggacggcttcctagggtcgcccgagtcgcgggaagcacgccgcgtacctttccttggcctccgcggcccggtctctttgcctccggttcttaaaccagttgctgacctgggtggtggtgaggccggtggcctcggccagctcccgcttctcacgcggcgatgggtagggattgtgcgcgtaccactcccgcaggacacccctcgacttctccttgaagcagtagctggtctcctcgccgtcccagatggtgcgcggcagtggaaattttcggcgcacccgatatttgcccacggcgcccaggggtcggccgcgcagcttctcggcctccacgtaatgcgccttcagccacagttgctgcagtttggggtggttgtgaggcgagaactggtggctctccaggatcttgtagagctcacggaagttgccgcggtggaaggcgaccaccgccttggccttgagtacgctctcgttcttgtgcaggtggtcgcaggcgggcagtgaccacaggaacctgcccaggcgctccaggtttccgccttgctgcagaacctcgcacacgcacgccacttgctcctgcgtaaagccaaacgacggcagcatcgacatggctggggcctgccggggcgcacggcccaggcgcacgcggcagggagcagagccgagaggcagggggcggcggccgcagggaggggggcgcggctgttcctaacctcctccttaggctttgcaaaggcgaaaaccggagtcggaacttggcggtgggcggccaaggaagagaaggcggaggagtaggggaggttctggacacggaacggccggcgcactcagtagcctttaaggccttgctgcctccgacctcccgcccggtggatgctgctagttgccggggaacttggtttctgttctccccgcagcggccttaaagcgcgcagcgtccccggcacgctgattggctgccggcggcgcctatccggggctggccagccagcgcgccgcccggctgggcagagaggccgcaccgcccagagcggggagggcgaggctgcggagctgggggttgggggtgttgccggggctgcgcgggtagggagtggtgggaggagaaggaagaggaaaggtgggaagccagttggggtctgagggagctgcgctgcggaggtgtggggaggtagggagtgggtgagcgcgtcaggaccctgcaacgcgggacccgtcgcca

SEQ ID NO: 237483 - DNA, 511 bp, Homo sapiens
  chr14:61116724-61117235
  hyper
cagaccagggtccgcgcatgcagcctctggaagagtggcttcgggttggcttcagctcgaggagtccaaccctatttcctcctccctccccccaccaactaccactgtcctccccccactgctgcacaccaccctccaaagggcacaagtactcccagtcggacagcgtttccctcgttcacaaaagacctccatgatttgagaccaggcagagagctgtttagagcatacttgctgagcacctagagactccgagcgttcatttgtgatttggtatcttaatgttctgcgattgaaaccagcaggttcctgaagcttctggactcaatttccccatctgtgcggttgtgttttgcagtgccacctctgctactgaggaatgccgagaggctttacttgctattagcaaaaatgctttgggaacctcgtacgaaaggcgctggatgtggtgtaaattaaataaaactgtgcccggctccaataaccgtccggttgtaatataatccttacc

SEQ ID NO: 237484 - DNA, 1583 bp, Homo sapiens
  chr14:61118672-61120255
  hyper
gtcttcaaaaggaaccaggacgtactacattgccgtcatctgggaagacgacgtgtagaaggtgtgattgcgggaacccgggcagaaaagaggtgctcttcctcggaggccgtgactgggccggccaacatttttcctcccgcttaatccaatagatcgcgtaactggaaagggaaagtgctatgcgctttataccaaggagtctacctgctatttcgatccctcggttaggggaaccaattgttataaatgttaattattggctcggatatataaggtttcccaaaatggaacctttcactgaaaaccgctgaaagaggtaaaatgacatgaatttacaaaccacctaaactaaatgatccattttaaatcgcacacagaaaggtttgagttgttctcgtaacataaaacctttgctgtcaatgcaaatcgcacgaaaagcagagatgcgttggagatttaaaggaaatgagcaactctagccagccggctgctgccctcgctgcagcgcggctcgggagggaacaccgctggcaaggagcgcccgatgccaggtttcggctctccagtgcctcctctgtgcaggtaacggccgcgtgcgctttagtcgatgaaaaagcattcagtgggacagcattagctgttgctagggtttctcggctgggttgacaggccttgatgcaaacacccctagctgggacccacttgtttcccttctggcttgtagcaagatagttaggggctcccgggccgctttcttggaattctttcaccatccagaacgacggtgaggattctactctacctacaaatatttggaaagggagggcatagagaggtgtttcttcaataaattcgtgtcatcgctctggggcagtgcggagactccccaaatccggctgaagtgccaaaattctttttcctctgcttagtcggaaactccgggtgccctcgacccttgggaactccggctccgatggccggcgtggcgccggagcagcagcccacctgctcctgggggacgccgctccccgcgaggtctgaataggcctggggctcaggcagagagatttgcggactcagagaagagaaacccaaaaccagtccattagtaaatgagttttgtgttgtcaaggttctttcccatccacttgctgttctgaaaaatagatcacgtttcgttatctttagtgggaatctgcaacgtgacaccggatccgcgcggcccccgcctccctccctgcctcgctctgcctggctgaggggagcaggcgggcctcctcagcttatttctgaacaatgaagatttgtctcttccccaagtgtatttatgtatgtatggagggaggaagttttctcctggaagcgggaagctcgagagcagagcctcctacttctttggtgcgaaaacgctgcgctggcccaagattcagggcgactgacgccccccaccacctccaccgcccacacctggacaaacagagccagctgtgagcctggctcgccgctgaaaaccctgccgccccgcgcggctcccgaaaataccatctccgtattgtctcgaggtcagggaagggagaaag

SEQ ID NO: 237485 - DNA, 192 bp, Homo sapiens
  chr14:61120573-61120765
  hyper
ccctcggctctgggcgctcgtttttttctctccgggactgggcgctgtgaggtttcacagagtgtgcttatgtcacccactgaggcagcgcaggtaagttctcttgaaagtagaccctcaagtctgggcggtgtagtaggccttacttggcgagaacctttcacagggagtggagggcgggcaatagatggt

SEQ ID NO: 237486 - DNA, 98 bp, Homo sapiens
  chr14:61122759-61122857
  hyper
caagtgggaacttgcgcctgcctcccttctccccggccgaaagctctagttcgcctcccctacccccggtccaggctcggcagcgaggcaatcagcac

SEQ ID NO: 237487 - DNA, 136 bp, Homo sapiens
  chr14:61123172-61123308
  hyper
gcctgtacctcagtcggtgcatacccaagccgtgggatctgtttttgcattctcacacgagcatattgctcgggttctaaaggatccagattttcgcagacagaagctcgaccgcctctgttcccaaaagggccga

SEQ ID NO: 237488 - DNA, 73 bp, Homo sapiens
  chr14:61123968-61124041
  hyper
caggcgtcggggcttgagggaagaggggccggggcctgaagggcggggaccacaacgaggcgcggggaggtca

SEQ ID NO: 237489 - DNA, 1073 bp, Homo sapiens
  chr14:61188224-61189297
  hyper
agctgaggctgagccgccgtcgccgtctgcgagggtgactcaccgggggtgcgggtgggaggtagatccggagaggggcctaaaccaggcaactgggccggcggcggggtgggtgtggagtttatggggtggggcgggggggacgaagaagccagcagtggagcgtgggggagtcccagggagcgtgcccggctcgcgagcggaggcggcggagcagctggcctgctcgcggtgcccccttgccaccctctgccccggccctgcggattccgttggtttccgagcgcgggatccgcggcctctagtgggcgcagggcaggtggctcggcgtaaccaaagcgccttctctggacctctccgcatatctgcggaaggcgcacgcacatcccggtgcaccttttgttttggttaccgcgagggccggatagggcaccaagcctccctcccagccttgggcgaggaacgccggagcccgagccgtcggacccccacaggggcccagaagcggcaagggcgggctgagaccggctctggaatgcgctggtgatcaccttcacctggcgcaggcgggctggatccccggctcccagtttgcttccccgagaagaaccttcgagctgcttttggattctttctctcctatccccgcggggctggagacaccaggtctttaggcgaccttctccttactttgtttcgtccaacaaaacacacagacgcacacaccaagtgtctgactcgggaggacgcacaaaagaggtggaaaatccggtattttttttaccagagggggaaagcagtctgccaggcaaaaagctcaaacccagtggggtgggagcgcccccactcctttgctgccgcccgccgtaagccggcctgccccccacccataactaccgtaccaggagggagccaagcagcgttcgggggccgagggaggaagcagcccttcagccctgctaccccggctgcgctgaaacccgatcctaaggagttcagaatcaggtttcaaaacatgacagagccgagctgcaccagcaccccacgttgccgcggccgctaagggaaccata

SEQ ID NO: 237490 - DNA, 616 bp, Homo sapiens
  chr14:61201376-61201992
  hyper
ccaagccctagatgcaagaccgggggaactgactgccggaacgtttgtgttgcagcgcctcgccccttgccggtgctctttcgcgaagggaccgtctctgccaagcgcctgttggtaggaacctgcttggtcgcgtctgagggggcttgtaggtggctctggctgaaacaggcgcctgcgagagtctgtaggagggaaaccgccatggacgatcagggttgccctcggtgtaagaccaccaaatatcggaacccctccttgaagctgatggtgaatgtgtgcggacacactctgtgagttgggcggcagtggattccctgggggagagacgcgctgggtgggaggagaggaccgggagatgctaggcctcgtcttgggagcaaagggcgttgttagtttcaacactggggaggaaaatgggaaaagaaggcgttgtgactttaaatagactgtagccgctagccccgagcggctctggcctgctttgaactgcgggttctcagtgtggcatccagcagtttgtcaggttcccccttccatagccaatgagtatcccgactgtatttccaggctttgtgttgtttactgggctctggacatcgctgattaaaagcgt

SEQ ID NO: 237491 - DNA, 90 bp, Homo sapiens
  chr14:61447492-61447582
  hyper
cagtaaaatgtggcgaaaggcttttgaaacattccttactatccagaacctcgaaactaagctcagcacctaggcgggtgggtgacctcg

SEQ ID NO: 237492 - DNA, 79 bp, Homo sapiens
  chr14:61655855-61655934
  hyper
tcccagcgccccagcgcccccgcgaggcccgggcagcgtccgcgctccctacagggggaagcccgccggtgtttgggaa

SEQ ID NO: 237493 - DNA, 115 bp, Homo sapiens
  chr14:61747077-61747192
  hyper
cggaacgtgggcagcgccgccgtgcgcatccacaccacgaagtcctgattgatgaagccggtgttgttggggtcggggctgagctcgtagactggccggcgccagttgggcgggg

SEQ ID NO: 237494 - DNA, 129 bp, Homo sapiens
  chr14:61748032-61748161
  hyper
ttagttccaggccctacgagcagtgcccacaccctcccagttccgcctccgcccaggtgcgctgcacccccgcgggtcaccgggagccgcacctcgcccgccccttccgaggtgagcaggtgggtgttt

SEQ ID NO: 237495 - DNA, 1400 bp, Homo sapiens
  chr14:61788057-61789457
  hyper
ctcaggtgtttgctcgggctgggccacgaaccctttcctttttggcctgcgcccggggtggcccctaacccgcagcgcacggccagacccagcgctacaaggagggcgcgcagggcggcgcaagcgggcactggcctcccgggggcttgcgcggggatccacccaccgcagggccgggccgcggaccgcgggccacgcccctggggtccggaaggcgcgggagcggacgcgggggttctgtgaacttggaacctggcggtgcgaggttctcgccggggatgcggcggcggcagctgcttcctggtttgaagctcgccgagtgggggagagcgtgagccttcggaggcgggggcaggaggagaagcaagaggaggcgggggaagagacgcttggggctggggctcaccggacgggtaggtccggctctccagggagaggagctgcccggccctggagaaggggcgagtcctgcgcgagtccccgggaggcgccgcgcgcttggaagggacggtcgggcttccccggcccgctgagggctcggcggcgggctcccctcctttccacctcgggagggagggaaggaggggagggaaaagtcccacggaggaggcagaatggccagtcgaggggcgcttaggcgctgcctttccccagggctgcctcgactcctgcacctgtcccgagggctggcctgagacgggactcccggttctcccgctgcgaagcagcgcggccccccggggccggggcagcggcgccggcatgtcgtctggcaccatgaagttcaatggctatttgagggtccgcatcggtgaggcagtggggctgcagcccacccgctggtccctgcgccactcgctcttcaagaagggccaccagctgctggacccctatctgacggtgagcgtggaccaggtgcgcgtgggccagaccagcaccaagcagaagaccaacaaacccacgtacaacgaggagttttgcgctaacgtcaccgacggcggccacctcgagttggccgtcttccacgagacgcccctgggctacgaccacttcgtggccaactgcaccctgcagttccaggagctgctgcgcacgaccggcgcctcggacaccttcgagggttgggtgagtagcggtgaccccttccctttgtgtccacccaacccccgttccccttatgtttttcaaaactcacccgggtcccgctttcccatcgctttgtggctgagggaattccctccagactttggtcttcgtccacgtggccgcggcactggtgacgcgaccgcggtgggtgtgtgcaggcgcaggtgtgtctccaggaagccggcctggacacgatcccctttcaggacagcggcttggcctaacgggaagtcgggcaggggtccagggcggtc

SEQ ID NO: 237496 - DNA, 144 bp, Homo sapiens; identical to SEQ ID NO: 203625
  chr14:61943723-61943867
  hyper

SEQ ID NO: 237497 - DNA, 110 bp, Homo sapiens
  chr14:62162716-62162826
  hyper
gccgggctcccccgctgtccacgtcgccatcttgtcgtggggggtgggagacgcctcgaaagtgctttcaggggccggggtctgagccctgcttgccctccccgccggcc

SEQ ID NO: 237498 - DNA, 178 bp, Homo sapiens
  chr14:62163066-62163244
  hyper
ccttgagttcccgactgagggactcgcgtggtcggatgcgatcttgtcctgtagttgtccagccgtcgcgggtgtctttgcctttgtgcattagggatttgccgcgatggccttaagatgcgaactttttagtttgcacgtgcaggttttgtttcgttttaatcgccttgaaaaactt

SEQ ID NO: 237499 - DNA, 188 bp, Homo sapiens
  chr14:62229157-62229345
  hyper
ggcgtgcgggcttcgggtgccatggggactcctcccggcctgcagaccgactgcgaggcgctgctcagccgcttccaggagacggacagtgtacgcttcgaggacttcacggagctctggagaaacatgaagttcgggactatcttctggtgggtgtttcttgtccaccacccgcctctccctgcccg

SEQ ID NO: 237500 - DNA, 656 bp, Homo sapiens
  chr14:62279269-62279925
  hyper
cgccgcagctcggccgttctgcccgggaggctgggctctcaggacgccggcggcggccgcagggctggcggctgctgggcgcggggcggcgcggggcggcgcggcgcggcgggggcgcgcggcaggaggggctgtgcgcggcgcggcccccgagcgcaccgggcctgccgaggagcgcgcgcccggccgggctcggcgccggtttcccgaacctgggcggccgtcgggcagccccctcgtccgaccatggcgactgacagtgagtgcgctccggccgcggaggccaggggtggggggaggccgcggtgcccagggtgggaagttcgatttcagacgctgcctttgtgctggctcgcggcagcagcggccgggtccctctccgctcctcacccttggctgcctggcggggcttgaaagggcaggtggccctggcggcgcgccccgcgagggatgtggcagaagggcgtgcgcctggcgccgaggcggagggaccctcgatgccgtgtggcagcggggcctgccatcgcagcccttcgcgggcactgcccccaggcccagagccagccttcagcgagccgggcaaacgaaggcactgcgcgtttttggcgctgtgagttcaaggttcgcctcgagttctgggtcgggtttgtgcgtct

SEQ ID NO: 237501 - DNA, 858 bp, Homo sapiens
  chr14:62583659-62584517
  hyper
aaaaacactgagccaaaccccgctgcttcctcagccgctgaaagtgccgccccacccctctccccaaacccgacctccgtaggggacaccgagccaaggcctgcagcgagtgacctgcccggggaggcgcgggaccgaggctcacctacccgggcccgcgagtctcgcccagccccagcctcccaacccactctgccggccccaacttaggcgagcgcagtcgggacccttctgtcggggctctttgttcgccgcccctcggcgttccagctctcaaccttgctcccagcagcccccgccggcgcactcgacctacaggaaagttgctcccgagctgtggaggggcgtcatcgcctcctagcaacgctcctagcaaccgggtaacatctgctccctgtggtccaatgcgagctgagaacagctgcgcgcccgcctagcgctgcgaacccggagtgagaggcgcttcagagactggagggacggacctgcaggagccagggctgcccgccgagctgcagttgccgctactgccgctgtcagcgcccgactgaagagtgacagccgcaaaagcaggagtgagcaccgaaccccgcgcttctacctaacaggtgcatgcgccgatctggtgagtggacccagctcacaaggtatgtctggattcatccagccaggtgccttcctccgagctcagaagggactcctttccttgagggggaggatagggacgtgttccgggatcccaccccgcccccaaccactgaagagtagccagctgctggtcccaaatgacctgattcgattttttaaatgtaaaccttaggattggttcttgggtgaagagtccgctgctcttcgcta

SEQ ID NO: 237502 - DNA, 457 bp, Homo sapiens
  chr14:63511825-63512282
  hyper
ccttaccactggagcgcctgacgatgttctccaaaaatgtgttctgcggtgccaccagccctctcttgccccccggcatcctgggtctggagagcagcggccaggatccgcggcgggggagggggggatgcaggcaaagaaggtggaggaagaggaggaaaaggtggaagagaagattgagccgaaagaagagggggcgcggcggcggcgacggggtcccctgactgtgtctccagcccgacccggatgagcagctctggggaggaggaccaggcagttcatggtagtagcgctcccccggccgccgctgcccagactgtggcggtgccgcacacggggctcgggaactgcaggctccgcggggcacagtgcgcctgcgccgcccccgctgtcgctgtcccgccggtgctgatgctgaggctgctgctgaggctgctaccgcggcggccggcgcctg

SEQ ID NO: 237503 - DNA, 31 bp, Homo sapiens
  chr14:63513062-63513093
  hyper
agtgaggagggcagtgttagcgatggaaaaa

SEQ ID NO: 237504 - DNA, 533 bp, Homo sapiens
  chr14:64108074-64108607
  hyper
acatcccatactacgggtcgtctcttcccaagtgaaaatctgctttctggcctacaaaaggattatactaaacccttttagtggtggggagagtatccgtggagaggaaagagcaggaggaaacaggtctttccctgaaaatgagcaagggcgtttggcttttattgaaaaacgccccagaggaagtactgggaactgcaccggcaacagcagcctgacccgcagaagtttctttggccagggccagcacaggtttgacctggtggctccgacggcggagcgagactgccaacacgtgcacactccgtccagacctcccacttccctccgcgctcccgcgatagctgtccagcaactctagctttctagactcaaccacggcgtcgccgctcgtcgagagggctgcccatcccggggacccgcccagcctggcccagcaaaatgtaccttagtagcctcaacctgtaccggagaaaacgcaggctgcgcggcggcttagagcggtcaagtggaaccccgcctcgacctctctg

SEQ ID NO: 237505 - DNA, 267 bp, Homo sapiens
  chr14:64109073-64109340
  hyper
tattgttttcacgcgaagaaaccagcccttcaggccgggctgaatgtggtttagggattctctggctgtcattgggtgaaaaagcgatcagtttgaaggtagctccgcctgggctctagggaactctgggatttgtagtccggaactttcgagtcctgtagctttaaatgtggttgttgctactgagttctttcatgttgttaataacacccattgacatttattgtggtttgttggactttttatcctttcgtttatcagcagcat

SEQ ID NO: 237506 - DNA, 443 bp, Homo sapiens
  chr14:64761315-64761758
  hyper
ctggagtagggcctgagaatatgcatttccaaccaggtcctgggggatgccgacactgatacagccagtctggggaccacacttcgaggatcacgtcctcagcccctgactcacataagtgtcattcagaacagatgtctgattctaaggagccagtggtgaaaccagagaggctttgggtttgtcaaatccccagcagcaaacgtaacctcgggccctggagtggcaaagccgtggactagaggtggagggagtgggttctcagctctcaagaggtcactgggaaggcctttcgcgttagatcaaagatcccaggtacttcctcgaactcacttgaagtggcaccggggagacctgtgcctccggccacggcgcccttctccgctggaggcacctgcccacccctcttctcgggcgaaggcccctcgcgccccctggtggca

SEQ ID NO: 237507 - DNA, 187 bp, Homo sapiens; identical to SEQ ID NO: 203631
  chr14:64805571-64805758
  hyper

SEQ ID NO: 237508 - DNA, 213 bp, Homo sapiens; identical to SEQ ID NO: 203632
  chr14:64931838-64932051
  hyper

SEQ ID NO: 237509 - DNA, 865 bp, Homo sapiens
  chr14:65006698-65007563
  hyper
agccaggcagttttaatcgagcgctcacaaccactgagacgcagtgaagcacccaccataaaatcccaggaggccgaccgccggttcagactttttcttttctttaatccccgtccaagggatccgccctcaccccccaccccagccaccccaattccctattccctccccttggacggcgccggggaaaacaagctgctcgagctttatttcttcggtgcaaccaactcagaatgaattcctccgcccctgcgtgctcagtgagtcggcaccctagcagtgaactgcatttaaaacctcaggaattgagcgaactctcccagtggctctcctcaccgggatccccttccacgcctcctccccgtgccgcgcctcagtccgcactgctcattggccgcgtgccctgccaatccgatgcacgtcggctagggcaaagaccgcgaaaaagcgcgtacacctggctctgggagcgcgcgcctaacgccagccagcagcaggaggcgcgcgaggcaccacggcctggcggccgagagtcagggaggaacctcatttacataacggccgcccctctgtctcctggcgggggccggagtcccgcccctcgtccaacttgaaatctgttgggtcacgggccagtcactccgacctaggcaagcctgtggtggagctggaagagtttgtgagggcggtcccgggagcggattgggtctgggagttcccagaggcggctataagaaccgggaactgggcgcggggagctgagttgctggtagtgcccgtggtgcttggttcgaggtggccgttagttgactccgcggagttcatctccctggttttcccgtcctaacgtcgctcgcctttcagt

SEQ ID NO: 237510 - DNA, 138 bp, Homo sapiens
  chr14:65008388-65008526
  hyper
gcgcaccctgagctcgtccacgcaggcgagcatcgagatcgactcgctctacgagggcgtggacttctatacgtccatcacgcgcgcccgcttcgaggagctcaatgccgacctctttcgcgggaccctggagccggt

SEQ ID NO: 237511 - DNA, 894 bp, Homo sapiens
  chr14:65008556-65009450
  hyper
caagggccagatccaggagatcgtgctggtgggcggctccactcgtatccccaagatccagaagctgctgcaggatttcttcaacggcaaggagctgaacaagagcatcaaccccgacgaggcggtggcctatggcgccgcggtgcaggcggccatcctcatcggcgacaaatcagagaatgtgcaggacctgctgctactcgacgtgaccccgttgtcgctgggcatcgagacagctggcggtgtcatgaccccactcatcaagaggaacaccacgatccccaccaagcagacgcagaccttcaccacctactcggacaaccagagcagcgtactggtgcaggtatacgagggcgaacgggccatgaccaaggacaataacctgctgggcaagttcgacctgaccgggattccccctgcgcctcgcggggtcccccaaatcgaggttaccttcgacattgacgccaatggcatccttaacgttaccgccgccgacaagagcaccggtaaggaaaacaaaatcaccatcaccaatgacaaaggtcgtctgagcaaggacgacattgaccggatggtgcaggaggcggagcggtacaaatcggaagatgaggcgaatcgcgaccgagtcgcggccaaaaacgccctggagtcctatacctacaacatcaagcagacggtggaagacgagaaactgaggggcaagattagcgagcaggacaaaaacaagatcctcgacaagtgtcaggaggtgatcaactggctcgaccgaaaccagatggcagagaaagatgagtatgaacacaagcagaaagagctcgaaagagtttgcaaccccatcatcagcaaactttaccaaggtggtcctggcggcggcagcggcggcggcggttcagg

SEQ ID NO: 237512 - DNA, 458 bp, Homo sapiens
  chr14:65016471-65016929
  hyper
atgaagaattatgccctgggcggctttacaatggataggccaatacgtcgccacggcttttaagactgggaaacggggcaccaggctgggctttagaaatcgctggagaagcctgggtgcggccgcagcccgcgcggcctaggacggaagcgacgccccgccccgctccgcgccccgggcagccgtgtgcaggcgcctgcgggcggtatcctcggcgacgccgtatggcttccagggcgaggccatgtaccgggtgcccgagttttatgcgaggaggaagcggttaggtgggcagaccccttacttgatggatgtaagtgcagccttggtcgcccccatacccgggctgggcgcaaggcgggccctgctgcccccaaccggcgccgcgcccctcgccctcctccagaggcgggtcgtcgccttcgccccgggctggcggttctcaaagacacctggcc

SEQ ID NO: 237513 - DNA, 1278 bp, Homo sapiens
  chr14:65170675-65171953
  hyper
tgacttggaaaagcggacacggccggctctggtaggattaggatccccagatcgatcccggctggtcactcacttgggaaagccctcagcccccttcgcagggcccggtgttccctgtccatacaaggggtacgttctggcagtccatgctgtctcgggaggcggtgatagcaggtctgtgacaccagggtgaccccaccacgtgcgtcttggtatcctagagcatctaggctgcccgggggtgcgcgctcatcaccctgcgggcgttaatcgttaaccgcgcccaggcctcgccgccgccgcagccttaccccggctctggctcgccgcgccgcgaaggttgccccggcccccgcagagccgccaattgctggactgcagccgcgagctggagtctccacccacaggaaaaattcctggcccgcccctccctcgctccctcgctccctcgctccctcgctccctcgctccctcgctccctcgctccctcctgccctcccgctgcagctccggctccgctcgacttcctgccgggcgctggcaagccgcgcgctgcctggggtctccgggggccgcgcttgcagctggccgagtccgggccagctgaggggctggcggtgggcgggagcggtcggcggcctcagccccttcagagagcgactttcaaactcgcgcccgcgtcgcggcagcacctgggcagccccgcacgccgtgcgcgtcccgagcccgcggggcagctaccgctcggtgagtgtcccctgattctcctctctcccctcttatctccctgcattaggctgagcggcggtgccggcagtcacgctggggccccagtcccttcgcggcccccgtgccagccccctgcggggtgaggaccggggcgaccgaggagggcctggaactgtgttggctgcttcccgggccaccctgccgcagagtgcgcgagcgcaggagggtcgtatggggagactttttctgtctttttttccctccactccggaaacaaaaggggcaaatgcgccgggcggctccagagaggctcagtttgaaatccaggaagcccgcgaggccgcgcgcgcccgagggctggtgtttggctggagctgtgggcctggcgggtggacccttctgcgcgaggacccgagcctcggctcctgccagccccggaggcgcctgcagcctgttccgggttggcgccgcacggtgctcgctgttgggaatctcggctacctgtccggcagggaggagagtgggggccagaagcggggagcggaaagc

SEQ ID NO: 237514 - DNA, 271 bp, Homo sapiens
  chr14:65346619-65346890
  hyper
ggtgctgccgagccgcggacccgcccagagatataaataacattatctgaggagggacattcctgccgggggacatcgctgctgccgggaccagatagtcccgcggcgggggcggggaggcggggccgcagcctcccgcagcgccaagcccagcccccgccttccccacccactcacgcacctgccaatcagcctccgcgcctgggggcacctgccgggcctcagcccggctcctggaacccgcctctgcctccccgcccgccgctgagcc

SEQ ID NO: 237515 - DNA, 347 bp, Homo sapiens
  chr14:65381011-65381358
  hyper
caccctttgcccacgcacggtgccaaggagactgtgccctgccttgacaacagttgctaaggggcggagacttcggctcggttcccgagacggaatacccaggagtcgagtacttgggcgcatgcggcaaccgtatctcagttctcgcgaggtttcgtcttcccggaagcgttggaggacattccctgttgactgcgtcgcgatgtgtggcgactgtgtggagaaggaatatcccaaccgggtgagcgactgggcgctcccttggcccgcgggcggcccccgaggtgtctcatatccaaggctggccttcccagagaggccgtacgtggggcggactcggccgcact

SEQ ID NO: 237516 - DNA, 65 bp, Homo sapiens; identical to SEQ ID NO: 203643
  chr14:65438693-65438758
  hyper

SEQ ID NO: 237517 - DNA, 113 bp, Homo sapiens
  chr14:65565399-65565512
  hyper
tcagtgggattttgcgatgtactgaatttagtagtaagaatactctttggggttacttcctttaacaaagcttactggccattggagaagctgttttccgtttgtactgaagc

SEQ ID NO: 237518 - DNA, 34 bp, Homo sapiens
  chr14:65569329-65569363
  hyper
tccctctaacagacggcccgggtagctccagaaa

SEQ ID NO: 237519 - DNA, 181 bp, Homo sapiens
  chr14:65569737-65569918
  hyper
tggttccgttttgcgcctaggggcgtaacccgcccgggagggaatctggctgcggcggaccagggggcgcggctcgggatgcctgcgcgaaccctcgggggctggtggggaggtgtcagtggcaggtgtttcgtggtgctaccggacaggcagaatgaccgacctcgccgggcgaccgctc

SEQ ID NO: 237520 - DNA, 121 bp, Homo sapiens
  chr14:66869959-66870080
  hyper
gtagcaggcacaaacgtatagtacacatcctgaggcggagatattaggaacaaagctaaaaccctggcaggaaggaagtactccctggacgatttttttttaacctcggtaggttacagaa

SEQ ID NO: 237521 - DNA, 288 bp, Homo sapiens
  chr14:66974387-66974675
  hyper
tgtcatagtagccaccgttctgccactcatgcagctttctaagacacctctcggttccccagcgctttcagtggggcggccggccattcccgagggttgcaagaggaggcccggggtgctgagccagcctcgctgcccccgcgtagaaagccggcccgccggcgagagccagcctaaggcgcggacaaccaacgaggtgtcaggctcggcaggggattgcttctgtctggggcccggccgaggttgcgttcgtgcctcgcgcgcacacgctccgcgttcactcagcca

SEQ ID NO: 237522 - DNA, 74 bp, Homo sapiens
  chr14:66974895-66974969
  hyper
ttgggtctcgcgctccgcagagcgttccgacactctccggcctcgttctgccgcctccgcgcgctctccccgtg

SEQ ID NO: 237523 - DNA, 429 bp, Homo sapiens
  chr14:66975358-66975787
  hyper
gccttaggcttttcgcctgtggtggcccttctctgcggcctcgggaggagggaaggctgaagaagggaaccgcgggggtgcattttacaaccgctgagaaccgccggagattgggggtgttcccgcgggtcccctcccccaggccccaggagccggggtcgaccccgtgggatgttaggccccagcgccttcggaagcaaagtcctgggcccccggggaccgaggggccggtgcggagggcgctgcggggctccgcgctgtcggtgcaggcggcgggatcccggctccgcagtctgaagcatgccgctctcggctggcctgggcgcatcctccgctagtgctcttcagagagaggggggaatcccatctccacccccttcctctccttcccttccccccacctgggcggccccacgccagtatctgtgc

SEQ ID NO: 237524 - DNA, 193 bp, Homo sapiens
  chr14:67708297-67708490
  hyper
aggtccctgggagcgcggcgggggaggggcgggcggccgggctccccttcccccacacgctgcgcaaactccggccagcgggagacccctggcagccaggcgggcttcctcaggcgcgcgagctgcggccgtggagggtgtgagcccaacctttgtccctcggagcaacgctgcctgcgcggtgcccgctcct

SEQ ID NO: 237525 - DNA, 251 bp, Homo sapiens; identical to SEQ ID NO: 203646
  chr14:67825995-67826246
  hyper

SEQ ID NO: 237526 - DNA, 236 bp, Homo sapiens
  chr14:67826866-67827102
  hyper
tatgtctttctcgcgccttgaaggttacttagctaaagctaagatagcgagaaacagtacttttcaggtccttccatgatctacattcgtccttgttctcggaggacccagactctatggttaatgatgaagaggggcctctattcgttcagcgcttgcgcatgcgaggaggttccgcatgcgcggtggagtgagcgaagcgcacgctgaggaggatcggcggccggtgaggggga

SEQ ID NO: 237527 - DNA, 365 bp, Homo sapiens
  chr14:67878634-67878999
  hyper
agagcatgcccgttccggggcgcgcgtctggccccgctctagggagccgcgtcggcggggccccacccgggcaatgtcccgaagctcgacgcgcactcaccctcttgaccaggaagccctccttgagcacgccgtcctccatgtcgccgcccgcacgccagggccaccccaggtgcgccttccccgcgcctcgcgctcctcggcacccgcgcagcccgcgcagtccgcgcccacggcgcccaggaagcagctccgacgcggcagggcgacgcctccctggcgcgtgtccagagcctgaggccccggggcaggaagtcagaccaagtcgggatttctgacgtgacgtttccacccaaaggtgctcc

SEQ ID NO: 237528 - DNA, 32 bp, Homo sapiens
  chr14:67982132-67982164
  hyper
gcggcggcggcggcggcggcggcactcaccca

SEQ ID NO: 237529 - DNA, 37 bp, Homo sapiens
  chr14:68067076-68067113
  hyper
gctgatggttgtgcgttcttccgggccggccttgact

SEQ ID NO: 237530 - DNA, 435 bp, Homo sapiens
  chr14:68086297-68086732
  hyper
ggctcctgcgttccgccaagttcaggaacctggcatgggccggccgcctcccgcgaagggacacacctgttggtcaccgcgctcttactggccagacccggatattggccttctggcgtcagcggcaggggcatgtccctggccggagagcacaggccagagtggggtgacgtcatcgaaggcacgtcccagccttgcagagcggtgggcggggcctgcgaagaaggtgtgccgggggctggttggaggcgcgggcggcggggccaatgtggcggtgacgtcacggggcgggcggacgctggcgcgggtaggtaagagcagcggcgggcggtggcgctcactcccggcttccaaccgcgcggagcctctgccttggagattctcagtgctgcggatcatgtccctaaggggcagcctctcgcgtctcctccagac

SEQ ID NO: 237531 - DNA, 126 bp, Homo sapiens; identical to SEQ ID NO: 203647
  chr14:68141650-68141776
  hyper

SEQ ID NO: 237532 - DNA, 302 bp, Homo sapiens
  chr14:68162290-68162592
  hyper
ttccctcccgccccgcaacaagaattctcaagagaaggcaatacatttgcacagacctgatttggggcgcagccatatacagaaggaagggcagaaggaggagcaacagcgggaacatgagctcaaccatctctgccggctgcagcggcaccagagcgggatgctccagcgttgctcgccgactatggcttctctttctagacacgccccaattcaaattgcgacagcccggggagcagaccttctgggaaatgtagtccagagcttgacagcctcaggctggctacgtgggagcgctgccg

SEQ ID NO: 237533 - DNA, 293 bp, Homo sapiens
  chr14:68283048-68283341
  hyper
atccccaggtggtcgcctcctcaagaatgagaaattcagcaggaacctccctagtttgagccctctgttaaggcagaggattgacgaccaggagacgaatctgtgtcataagtggaaagcagtgtgggggtgggccgcagggacgctctctgcgggggtcgtggagaggggcccctccctctcaggggtgtcttacactcacctgctcccggcgcccaaagcaatagagctctcagcgcagccatgtttgagccgagtcaggtgacagaacccactccgaacagcggtggtgg

SEQ ID NO: 237534 - DNA, 122 bp, Homo sapiens
  chr14:69259278-69259400
  hyper
cgtaaaacaggatcgcccaaaacttgtcccaatcccagccctccccccgaagcccccgggctgccctgccaggcaaacttcgcccctcaaaaccctggcctccagattcacatgtaatcccc

SEQ ID NO: 237535 - DNA, 56 bp, Homo sapiens
  chr14:69260259-69260315
  hyper
ctctttttgccagcgggagctgaagcccgtccttagcgcccgggccgcggtttcca

SEQ ID NO: 237536 - DNA, 230 bp, Homo sapiens
  chr14:69261379-69261609
  hyper
cccattatgagcacgtttctttggaaaggacggggcgggccgaagagagcgcattctcaccacccccaacacacacttttttttaaaactgcatttcttatttattcgtaaacatctgggcaaacccagcgaaaccttccaaatcacaattgtttgagaaaccggctgtttttcaactttgtgaaacccaacttttgctgcagccacgaacctacgtgatcccagcgggg

SEQ ID NO: 237537 - DNA, 458 bp, Homo sapiens
  chr14:69262251-69262709
  hyper
gagcaccatcaggcgccccagaatggctacaaagtggatttttccaaagaaagctgattcctcgaatttcctcggcttttccaactcccggaggccctcccctccccctctccccgggggcgcgggctccgcaaggctgcgactggcctagcccgctcgctcccgagttgtttaccggccccgccgaccaagggtttgttccagctcccagagcctgtctctataattaaactcttttttaaattgtcgggttgaaacgtcatttcggggactttccaagggtgagggagccgagaggagggagcgagtcccttaacccttcgctgacccggcgtccccgccgcggtgagggcccgagggcgggagccgacccgccctcgcccagacgtggtcgacaggtgcccaggggtggcgggagggcggccctacggtgcaggaaggccgaggcgaggcgtgcg

SEQ ID NO: 237538 - DNA, 50 bp, Homo sapiens
  chr14:69444743-69444793
  hyper
actggccactgtgcccgggtcccatcgccagctccgagcccagctcccgt

SEQ ID NO: 237539 - DNA, 561 bp, Homo sapiens; identical to SEQ ID NO: 203652
  chr14:69446238-69446799
  hyper

SEQ ID NO: 237540 - DNA, 312 bp, Homo sapiens
  chr14:69620502-69620814
  hyper
actcttccttcctccggtcctttagttgaaaaaggctaaattgttccgtctggcagattagagtggtacatggggggaaagagaaagggataaagaagtaggaagaaaattgccaaaaccgagttgatgaagtcccgagaagcacgaggtacttctctccgttccagataaatttgcacgacacaagaagcgtgatttgaaactaacgatatatgttatttaattgggttcggtgagctcctcttaaaggtctcgagtggggagcactgaggttggacagctgttaaccagcagctgcgctccaggccagaa

SEQ ID NO: 237541 - DNA, 245 bp, Homo sapiens
  chr14:69658126-69658371
  hyper
ccgtacaaaatggcgttgcccgttcccacacgccagctgggattacgtcctccaggcctgtcgcaggaacggaagtggttacggccctagtgaatccgggtgggtgcgcgcaggcggccgcacaggttccaggtctttaacgtgagcccgctgcaggtgtgcggcccagtccgagacagcaggtaagtgaggctcagaagccggcgaagccttgcaccaggattgtgcgcggggcagggggtgct

SEQ ID NO: 237542 - DNA, 1343 bp, Homo sapiens
  chr14:69726522-69727865
  hyper
gggtcggcaggaccgaccagggccgcgcgggggcagctgccgggcgttcggtcacctagcggtgggagccgaggctggctttggccagtcgccattccgccgcgggcgtctgtctcgccgggttcccgggcgcgggaggaaggcccgcgccgcttcccactcggcgcgcttctctcccagtgcgcagtggcctggtgggtcagccggcggcggctggagcgcggggccggccctgcgcacgaatgaatgggcgcccgggggacgcgcgcgctcggggctgaagggcattaggaccgtgaggatcgctccgcgatcctgtctctccctatcacccccccgcccccccacctctctcctttttctgctctgcaggactgagcagctaggcgcgagcgaaaacaaacagctggggctgcgagcgcccccgccccggccccgagagcacgccggcccagtcccccacctggggcgcccgtctgcccaccatgaggaagatccgcgccaatgccatcgccatcctgaccgtagcctggatcctgggcactttctactacttatggcaggacaaccgagcccacgcagcatcctccggcggccggggcgcgcagagggcaggcaggaggtcggagcagctccgcgaggaccgcaccatcccgctcattgtgagtacgccccgagcgtcggccggccggctagggagccgcggcgcgcgtccagaccctgcgcggcggccgagggcgcggggcccggccagggctgagtgcccgctgcgccgggccggctttgtatatgttggagcattcctgcccgttgttatggcaacctctgccgggcggcggggctggggcgcaccgactaagggagggtgacagagggtgggggctgggagaaagtgctgcaagtttggtgggcccggcgtgcgcgcgcggctgggaacgtggcggctctcccggctctgcgctgccggggccgggagtctgggggctgcgggagcctcgtgtgccccggaaggctgccgggcccagcgcgcggcgagcgggcggtgggaaccactcgcagccgagcgcgtaggtggcagtgcgcagcccctctccagccttctgggggcagaggacatcgggtgggggcgtgggtaggggaaggctctctaggcgctgcgcctggcttcgaacccccttctgagccgggtcaacttgaacccgcttcttcggcgcggacacccagcttccccggagttctctgggttgaggagaggtctcgcactgtacgcgtctctcactcccaaccttagggtccgccaccacgggtaggtgggcagtgtcagcgcccgaacttggcgatac

SEQ ID NO: 237543 - DNA, 48 bp, Homo sapiens
  chr14:69728075-69728123
  hyper
gcacctgttgaggcgggaggctttggcacccgccgagagtgcgctcga

SEQ ID NO: 237544 - DNA, 362 bp, Homo sapiens; identical to SEQ ID NO: 203655
  chr14:69864916-69865278
  hyper

SEQ ID NO: 237545 - DNA, 185 bp, Homo sapiens
  chr14:69950636-69950821
  hyper
aactccgaaaggagcggaagcggatggaacagctggtcccagggagcgcgggccaggcgcgcagataaatcacggacacacactgcacggatagctccagactggcgttgagtgccaaatgccgacacagacacggtcaggttccaggaagagaaatccgatccgatgcgcgctaggcggcggcg

SEQ ID NO: 237546 - DNA, 820 bp, Homo sapiens
  chr14:69951034-69951854
  hyper
agtgtgtgaccctacgccctagctccgtcctctcctccaccccgaggcgagcaggtgtctgcaggagtgcctccaaccccattgcaaagcggacgtggccctcgtctcgatgtcggcgctgctcgccgagagggaccccggggtggtgttgggcgcgcggggcggggacggggacgcgctgcggccaagtccccgggccctgcgacccgcagggaccttctggacgcacggagcccggccctccagccggcgcccgccctgattggcgcccgaggccggcctcccgccggctcacctgccactcccagccaatcggggccaccagaattggggctgtcgccgggggggtgggtggctagggcgggaggggaggagatgctgccggcccgaggctgagccaccctccccgcggagttcccgcccggccctctgcaatccggagcccaagccgccggctacgcgccctgcgcccccttggtgccgcgtccagtgcccagcgcgctttgatgctgcagctccgggccgggccgctctgcttctctgctcgctgggacgctctccgacggctccgccctcgcctctcgccccgagtccctgctgaccccggggaggtggggtccgggccgggcacagccccgctgaggcaggatgttcacgtccaagtccaactcggtgtcgccctcgccgtccctggagcaggctgactcggacgccctggatatcagcaccaaagtgcagctctacggcgtgctgtggaagaggcctttcggcaggccgtcggccaagtggtcccggcggtgagtgcgcccccgcgccccaa

SEQ ID NO: 237547 - DNA, 278 bp, Homo sapiens
  chr14:70014700-70014978
  hyper
cagacaaagccttgcgggctccacgggataatcaacagcgagaacgcccccagggacctccggaaagagacaccattggttgcaggcctccaggttctcgtctgcctggtgagtgaggtggcacgcagcgtcagtcgtctgcaggaatttgtgctggggtaaatgcgcgcttcgtgcagaccgcagagctggaggcggagggctggggtccctgggccgcgggcgggttccgcgtgcccctccctcgccgcaccgcgcagtcccgccagggggcgcca

SEQ ID NO: 237548 - DNA, 708 bp, Homo sapiens
  chr14:70038556-70039264
  hyper
gtcgctcccccgcccgggccagcgcctccaggtgcgcctgatgttcccgctctttgcgctctgccgcctccttggcccgccgaccctgcagctcctctcgccgggcccgctcccgcagctcccgggtgcgctgctccaccaaatgctcgtagttctcctgcgcacggcccaaactggcttccagcgagctccgcaggccctctcgctcctggcgctgctgccgggtccgaccctgtagcagcgcctcgtggcgcgcccgctcggcccggctcagctcccgcttctcccgctgcagctggccctcctgccgctgcttggcgcgggccgcgcgctgggcgcgctccctgcggatctgctcagcccgctcccgcccttcctgtagaccttcctcacgttgcttcaggttctgctcctgctgaagcttgcgcagccgatcctcccgggccgcgcgctccgcccgctcccgccgcaggaggccctggcgttcggccagctcccgccgccgctcctcgctgcgctcgtactgccgctgccgccgccgcgccgcctcgcgctcttcgcggccacggcggcctcgccgctcctccacctgcgcggcccaggctcggcggccctgctctagggcgcgctgcttctcccgctcctcgcgctcccgccgctgcttggcgtgcacgcgctgcagctcccactggccgtgggcagccgcgc

SEQ ID NO: 237549 - DNA, 365 bp, Homo sapiens; identical to SEQ ID NO: 203656
  chr14:70193443-70193808
  hyper

SEQ ID NO: 237550 - DNA, 81 bp, Homo sapiens
  chr14:70233585-70233666
  hyper
tagcaggggcgaacgacgtcaacagatgtccctccagactccggcaccagccggccgagcccaaacgagttctcgcccccg

SEQ ID NO: 237551 - DNA, 215 bp, Homo sapiens
  chr14:70346784-70346999
  hyper
gaggtgcctcctgcgtcggagagaagctcgctctccgctcatgcagggcttccctgtggtctcacgctggcgcccggtccagcgcgctggagttgttggcaggcggcgggggttgggacgggggcgggtgcagctctgcctggagagttttaggttacccgcgagccacacaaggaccttgtgttgttgttttaaaaagcgatcactgctcgtaa

SEQ ID NO: 237552 - DNA, 582 bp, Homo sapiens
  chr14:70653714-70654296
  hyper
gggtcgccaggggccgaggaggcttcccttttggtgccccaccggaaggccggatgtgttcctatcacgtacccacattccacccccgctcaactccctcctccccccacccccttcgggtgtttcttgaccacccaggagcttggctgcgcctgctgcagtctgcgtttctgataaattgaaaccagttttaattcttctgcccgggagacctaaccgccgaatgcgttcggaggtatgttttttaatcgccaggaaagggggagagagagagaaagagagagagagagagagaggaaaggaggagagaagagaagagaagcggggggcggggggagagagagagagagagagaaggaagctgcgatgagcgggtaaatttatggtactgcattaaaggcatttcttctatttaaccccaccccgccaccaccaccactaccacaccgttaaaaataaaatacaatgaattaagacgaagaactgcttttttccccggagcaaattgctttcatcatctttcccagtggctcgggtcctctgggcaggtcagccagggcctgtaggagcagcagcgctagc

SEQ ID NO: 237553 - DNA, 31 bp, Homo sapiens
  chr14:70654356-70654387
  hyper
tccgcgcgcgcgtgtgtgttgggggatcggg

SEQ ID NO: 237554 - DNA, 159 bp, Homo sapiens
  chr14:70654807-70654966
  hyper
tctgcccctccccacccggcggcaccctcctgtagacacccactctgccagatctgcccccccaacactgcatacacaatgtacactttccggggcaccctcaccccacttctcctggcactaaatccacaggaaggcggttcatatgaatgatcttga

SEQ ID NO: 237555 - DNA, 380 bp, Homo sapiens
  chr14:70826032-70826412
  hyper
gagtgggggacagcggcggggaagtgggggtgtggaaaagactggtggaagagcttttaggaaagctctcaccccgtcgctagctccttcctagcccgagtgccagcccttaacttcacattttacagattccctcccaggtcttgatcctgccaaggaggagggtcccaccccttgcggaagatcctcctcactccactcaccaacatggggactccatagccgagagtcttgttcttgcgaaaagcacgcatcaccgcgggtgcaaacatgagtgaactcttccatcggctcagaactccaagcgggcctagcgcagactcccaaatctcagcagctcacgctctcaccaagacgagtacgtccttaactcacttcct

SEQ ID NO: 237556 - DNA, 136 bp, Homo sapiens
  chr14:71067681-71067817
  hyper
gagaacgggagggcggattactgggaaaaaaattagaagacttagaggacagaaagaccgagtggagtcccgccccacgcccaccactgatggaagaattctgccttgatcgtctgtgatcgtcaagaaaacaaat

SEQ ID NO: 237557 - DNA, 129 bp, Homo sapiens
  chr14:71786797-71786926
  hyper
tgccctcttgaatcggcttaaaaattatccttccgcaaccacccctagctttccccaccgccagtgcgccgggcaggttgaaaactgcacccacgtttgcagcctctgctctccgcaggagacaggaat

SEQ ID NO: 237558 - DNA, 47 bp, Homo sapiens
  chr14:71787538-71787585
  hyper
gcctcggggacggcgcgagcgggggcccgggcgcctagacaatagtt

SEQ ID NO: 237559 - DNA, 1019 bp, Homo sapiens
  chr14:72398593-72399612
  hyper
ctgtaatattccaaatgcagcgtgtggtgtgcatgttgaatacataaaaatgacgaggttaggaacaatatcgctgacggtcgcggtgtcccgttttaatttagagggcgccagcaacacgtcagtgagggagattcagaagccgccgggcacctcaccccgggccgggaatccctaagagaaccttgacgccgctgaagtttccggaccgggccagtttggaattgacgaaagcagcctccgcccggtcgagccagtctctcggttttctcggcggcttcttgaggatgaggcatttctaggttttctcctcctcgagcaaatcacggtctgcgccttccgcggctctgggaacaggtgagccgtgcggcggcgcccgcgggacgcgctcaggtgccggtccccgcccgccggcccctccctgcagcacgcggtccgggcccaggtgccggggcccaggtgccggcgcccaggtgcgcggggcacggggctgcagctccgctcggcatccgacagcgggcgccgctgcagcagctcgcgggccgcggagctgaacggcttcgcgagttggggcagctcctcgcgctcggccctgctcggcggcgagagctccgcctgggcgccgcgttcctacagccgccggagccgccaggcgccgagggaacggacagacctccgcgcacccttgccgaccggggcgggcagaggcgggcaagcggcgaacgcctgggagcgcggagagccaggccagcccggagcgcgccggggacaccctgtgcgccccgagtcccggcaccatgcgacccgccgcgcgtcctcgcgggcccggggcttcgctcttcgctcgctgagcccctgcgctcgccaccacggaaactcggaaagaggaggcgaggctgtggggagcggcgcggagacggactagacttcccctccgcccccaagaggctgccggtccccggttccctgggcttctccagctttatcatgaacctggcgcaaggttggctttaggaaaa

SEQ ID NO: 237560 - DNA, 458 bp, Homo sapiens
  chr14:72399831-72400289
  hyper
ggactgtggaagcacgagcttacataagtggttaggcaagctggcgtgtggacttgtgtgggatgggtgcaggtctgcatataaatcatgttcctgggtttctgggtgtgaagcgcacaccgacggggacgagagcgcagaggatggcgcttttagatacttccagtcttccgatgttgtgatcgcaggtagggcagctttgcctctaatcaggcgttcattaactttttccctgaacaagctcgcccatttgtggtttggaagaaaagaaagcgagtctccgcggtgaggtgtggagggcaggggcgggtggggaggtttgttgtttgggaactgcgctagcaaaggaagcggtggctattcgcttggagaggatgacaaatgaactggttgcgtgaggagtgaagagaccgtgtttacagtcaccagcaggctgcgtaaagaagtggcccagtgag

SEQ ID NO: 237561 - DNA, 97 bp, Homo sapiens
  chr14:73359750-73359847
  hyper
gcaggcaggcagaaattggctgttggacccggggctggcccccgcgagtcctcgcccggcccgccccactctgtccaggatctgggcaagcgctcaa

SEQ ID NO: 237562 - DNA, 255 bp, Homo sapiens
  chr14:73360750-73361005
  hyper
ttagtcttacttacgctttcagggggttgtgaatgacagtcgccattttgctacaatgtaacagaatattgtctcagagttctaaaggttcgctcaggggaagcgacgggccaatcacagcgcgggataccggcccgccggccaatcggcgctgctggtagctaggtgggcggggcctgcgccgtggtagttattaggagagctgtcaaagcccagaggtcactcccttttgtagagcccgagagccagcaggtc

SEQ ID NO: 237563 - DNA, 107 bp, Homo sapiens
  chr14:73361733-73361840
  hyper
ggagtggcacacgcgattctggcgtcacctttcactacttagatagaaggtggaaagaatttgctaatgaataatccgatgtgacccgaggcgtccaatgagtctgt

SEQ ID NO: 237564 - DNA, 229 bp, Homo sapiens
  chr14:73393144-73393373
  hyper
cctaactggctgacgctacaccttggtctttccgggtccttgcacgcttcgctccaactcctgcagagctgagccggaggggaatccggaagggacacgctgaacaggtaagactgtgctgcctggggtgcctactggcatcgattcgagggctgccgcgctcccgctgcagagctcggggtgggagacaggcgcggcgaggaaggccagggaaaggggcggggagggg

SEQ ID NO: 237565 - DNA, 213 bp, Homo sapiens
  chr14:73706332-73706545
  hyper
gcggtgcaccgaggcgcacccggctgtcctgttgcgggtctcctggtcacctgtgggccatagggagagacgcgcccacacactctcgcccgcgcccaggacagctgcgggagccccgggccgctctaacccaatgcgtctcccgcaggctgagatgcggctgctcctgctcgtgccgctgctgctggctccagcgcccgggtcctcggtgag

SEQ ID NO: 237566 - DNA, 42 bp, Homo sapiens
  chr14:73925198-73925240
  hyper
ctgccgctgcccccgaccaactcaagcgccactgcctctacc

SEQ ID NO: 237567 - DNA, 1110 bp, Homo sapiens
  chr14:73957467-73958577
  hyper
atttttaaattgctctctgagtgtagattccttgtttgtttggcaagggttcttgccgctgccgctacagcttgaagccaaacatttaatgaaagagagcgggaggggccgaatagaagaatgatgggcgtggccaaccccgaggtggctggaggccgcgcccccttcccagagtgcaccgcagccgctgcattcaggaaccgctttagcttcgcccccggccggccgggcggggaagactggtgtggtctggccatggatgggctccaggccagtgcagggccgttgaggcgcgggcggccgaagcgccggcgcaagccccagccacacagcgggtcggtcctggccctgcccttgaggtccaggaagatacgaaagcagctgcgaagtgttgtatcccgcatggcagcgctgaggacgcagacgctgcctagcgagaactcggaggaatcgagggtggagtcgacggccgacgacctgggggacgcgctacccggtggggcggcggtggcggcgtcccggacgcagcccggcgagagccatacggccacctggggcccgcagagctgctggaggcctcgcccgccgcgcgctccctgcagaccccgtcggcgcgcctggtgcccgcttccgcgccgcccgcgcgcctggtggaggtgcccgccgcgccggtccgggtggtggagacctcggccctgctgtgcaccgcgcaacacttagcggccgtccagtcgtccggggcccctgcgacggcgtcggggccgcaggtggataacacgggtggggagccggcctgggactccccgctgcggcgcgtcttggccgagctgaaccgcatccccagcagccggcggcgagcggcccgcctctttgagtggctcatcgcgcccatgccgccagatcacttttaccggcgcctatgggagcgcgaggcggtgctggtgcggcggcaggaccacacctactaccagggacttttctctaccgctgacctggattcgatgctgcgcaacgaggaggtgcagttcggccagcatttggacgccgctcgctacatcaacggacgacgcgagaccctgaacccacccggccgcgcgctgcccgccgccg

SEQ ID NO: 237568 - DNA, 144 bp, Homo sapiens
  chr14:74180377-74180521
  hyper
gactgtggctcaccgtgctcctggccttagaacaataccagacactcccaccaagtaggcccgagggaggcgaccttcatgcagtcacgattaacaaagacagagtcctgatctcgcccttctctgcccccacagtcagtccgt

SEQ ID NO: 237569 - DNA, 137 bp, Homo sapiens
  chr14:74180761-74180898
  hyper
tcgcggtcgcagcctggtcttcccgcgggcgaggagcggccgtttgggagactagccagagggagaaactgtgccgaagtcgcggcggctgcgggccagcggaaagcggcttcttggcgggcgcggggactcctctg

SEQ ID NO: 237570 - DNA, 213 bp, Homo sapiens
  chr14:74208146-74208359
  hyper
aggggaaaacagctcgggcggctctgaagaggaaatctcaggccctagatgctacaggtcattgttagcaaccccagccgctcccaggaaaccagccagcagcagcggagggcagggctgggcgggcacagggtcccgactatacccagtttgcagttcggcccacccccagcaccaggaatgcccctcccaggctatcgctcctctgcaggc

SEQ ID NO: 237571 - DNA, 44 bp, Homo sapiens; identical to SEQ ID NO: 203664
  chr14:74225613-74225657
  hyper

SEQ ID NO: 237572 - DNA, 156 bp, Homo sapiens
  chr14:74226413-74226569
  hyper
gccggccccgccgcgtgcaggcctcggccgccggccaggcagccccacttacccagctcttgcccgggctccgggctccgggctcggctgtcccccttccgccgcgggtcgccgccttcggtcgcctccgggactccagccgcctgcacgcactcc

SEQ ID NO: 237573 - DNA, 126 bp, Homo sapiens; identical to SEQ ID NO: 203665
  chr14:74238690-74238816
  hyper

SEQ ID NO: 237574 - DNA, 116 bp, Homo sapiens; identical to SEQ ID NO: 203666
  chr14:74252875-74252991
  hyper

SEQ ID NO: 237575 - DNA, 52 bp, Homo sapiens
  chr14:74253272-74253324
  hyper
ggttttctgaaaatgcgtagggttgttttcccaaacttccgagctactctgc

SEQ ID NO: 237576 - DNA, 274 bp, Homo sapiens
  chr14:74254304-74254578
  hyper
agaaaaagtttttccgtttggtgttggggctaaaagggtcatgtcagaaagcagtgtgctctatgtgttcttaatgcctaaagtgggccttaaaacaagggtccctgtccccacgttctctctaaaagtctgcatgatgtccctcgtcatttctacgggttataagtgagcaagacgtttaccacgtatcacacttctgggggctatttcaacgcccaagctggggctgcagaatggtttctgttctaatcctcccccgcgatttccacctctt

SEQ ID NO: 237577 - DNA, 390 bp, Homo sapiens
  chr14:74318399-74318789
  hyper
aactctcccctgacgttccgcatttcccttgcttctcccggaaacgtggggcgcccaggaatcctaaacttccaatccctaagcttccaaaccccgcccctgggaggggagggggcgcggagccgggcctagtcgcgcgcctgcgtactgcggtcagagggccgaggcctgggggcgagctggggtcgtgcagtacagcctctttccggcaaatcacgcgagatttcgttcacccgggctccacagggtcagtgacgcgcgagcggctcccgcgactgtggctcccgaagctgcttcgggccccagcggtgaggaagaagactctcaaccagggtgacttctaggcgtcctcccggagctaccggggacactggcgttattgcccgcaac

SEQ ID NO: 237578 - DNA, 224 bp, Homo sapiens
  chr14:74486146-74486370
  hyper
gcaactacgacagcggagcccctggggaagccaagatgccgtcgaagggaaaggacaaaaagaaaggcaagagcaaaggcaaagacacgaagtaaggagaagccacccgagagtcccctctccctgggcctgcctgggatttcgggtctggggctggcaacctggcgccccccgcgccggcccactcggaccctctccccggctctcccggcttgtgaggatta

SEQ ID NO: 237579 - DNA, 69 bp, Homo sapiens
  chr14:74551628-74551697
  hyper
ctcgttttcccgccgacggttggccacgtcacgtgacatgggttggaagatggcgtctcccacagacgg

SEQ ID NO: 237580 - DNA, 445 bp, Homo sapiens
  chr14:74706143-74706588
  hyper
ggctccagagcattagacaccggagggggcacctgggaccaacttcgcgaagcgggaagcccggcgggggggtggggggagctaaagacctgcggcctcagcccctccaaagaacagggagatgacggggaaagcaggggaagcgctgagcaagcccaaatccgagacagtggccaagagtacctcggggggcgccccggccaggtgcactgggttcggcatccaggagatcctgggcttgaacaaggagcccccgagctcccacccgcgggcagcgctcgacggcctggcccccgggcacttgctggcggcgcgctcagtgctcagccccgcgggggtgggcggcatggggcttctggggcccggggggctccctggcttctacacgcagcccaccttcctggaagtgctgtccgacccgcagagcgtccacttgcagccattg

SEQ ID NO: 237581 - DNA, 38 bp, Homo sapiens
  chr14:74707908-74707946
  hyper
atcgaaaaatgtccaaatctgctttaaaccagaccaag

SEQ ID NO: 237582 - DNA, 100 bp, Homo sapiens
  chr14:74708126-74708226
  hyper
ccgggggccttggcgtcggcaccggttgagcaggatgagtggccgccgggaaagcggcccggttcgggctttctcctccttgttcaggagaaaggaaagg

SEQ ID NO: 237583 - DNA, 759 bp, Homo sapiens
  chr14:74708406-74709165
  hyper
ctctgccaactccctaagctttctgctcccaccgttctccaaagctggagcgatctctgcactgacagagcattttcttttggcttctgctcattcgtgattctgaccgagtcgcttcccttctgtgagcctcagtttcctcgtctgcaaaatggagtggtaggcgatgtagactggacggtcccaccagccgtagctggagtagggtggactgcatcggggtacagactagaaagggttttgttttgttttgttttgttttgtttttgtctttaaatggaaattacttgcacaaagttaaaactcagtagatgccgacaggtatatcttgaaaagtaacctacccttctcccacccccgccctcattcccttccgcaccagccgcactgctaccagttccttgggtacatttgtaaggtggttttcaaggaaataaaggagaaagaaccaaaaatctgcctgcctttctgcgggtgctgctcgcaggtgctgccccggcgctcacctcggagctatttccccgcaccccactccgtccccatcaggtggggccgccacagactctgcgccctttcaagacatttctccactagggcgttctctggcacccccgccgccacatcgttttctcccaccctaatttgttttcagcctctttgcaccctctctgcgcttttctatgcttcgttcttccttggccctgggaaactccactgttgaccgccaccttttaaaacggcctatcctcaccccttagg

SEQ ID NO: 237584 - DNA, 222 bp, Homo sapiens
  chr14:74724285-74724507
  hyper
gaggctggcgggccggagcgcccctgccggggattggccggccgcgctccgccgcagactccgcgccgccgggcgctcacttcgccacctgacggcaacggcgggaaccgcaggagcgcgcggaccaccccccacccacttcccccgagccccgccggccccagctcccgctccccaggaagcgaagggttaagctgtcagcggcgcgatgttaaacaggtg

SEQ ID NO: 237585 - DNA, 536 bp, Homo sapiens
  chr14:74892590-74893126
  hyper
cggcgcccccagaccgccccttacctgtcccgccgcggacggtcccgcctcctccgcggggctcgggggctcggcatgggccggtgagcgacggcgcccccgcctcgcggtcgcggtggaactcccaggagggctcccctgctctcgtccccgcgtccctgagcagccgccgcttcagcaccgcggacagctcccgcccgcagcccgccgccgccgcccgccccgccccgcgcggtcccgggagccccgcatcctggccgggccccgccgccgccgccgccgcgcagccctcggcccggcccgaggcggctccgcgccgacttgggagagcagcgaggagggtccccctccttcccgcctcccgccgccgccgcctccctctcgcttccgtgctccgtgctcccttccacgctccggaatcagcccaccaggcactccggacccggctccggggcggggcggggcgggaagtcgggggagcccggaggaggcggcgaagcgaggggcgcgcagctggaacccgcgtacccgcttcc

SEQ ID NO: 237586 - DNA, 44 bp, Homo sapiens
  chr14:74959041-74959085
  hyper
tacacttactctggctccccattctgctgcgtgactttaggtag

SEQ ID NO: 237587 - DNA, 294 bp, Homo sapiens
  chr14:74960116-74960410
  hyper
ccgcccccggctccggaaagccagctccagccctctcaggcccagaagcctgcagtctccgcccatgccatcccctcagaggcctgacccgcccggacccacctccgccccgccccgcctcactcctccccgccccgttccttccctttagagcacctctccggcttcctgggtgcgtccccgccgctgccgtctggagcattcctagccaatcagacaccttctcctcccgcactacccaataggcatgttgggggggcggggcctccgtgaagtcccggcctcctgttcgtt

SEQ ID NO: 237588 - DNA, 1349 bp, Homo sapiens
  chr14:75077987-75079336
  hyper
aaatcttccaatcccgattttggaacctcggggctgtttcccgaagtactaaagacagagggacgagggtatgagagcggcgccctctcctctcgcctgcacgcccctccacaaatgagccctggctcccctctgtaccctccaaacttccctctcccatgctcaccccgtgagccgccctcgcggcggggttgggggcgcagccccagaccgctgtggggtccccaggcgtgggagagccggcgcggcccgggtccggggtgctggttgctgctggcccaggggagtgcttctccgggtctgcgcaggtggctggacacgccgcgactgctgcgcgcgggacggcctcctggcctccgcctcggtgggcctcctggggctcccccagcccggctgggcccgctccacgggctgcaagcccgcgacaggcgcgtcctgctcccggaacagactgtacaccttggctgcagccgctgccgggtagctgcccccagggcgccgcagtcgattcgcgtctccaccagccggctcgtatctccctacggggtccctttgggcatgacccgcgcccacgaagagagccagggtgagcggcaggaagcctctccaggggttccgcagggcgcgccccgggctgcgggctttggtccgcggcctcatggcgcggggcggctggagagtggtgcgcgcgggcaccgcgaagagctttgtggtcggcacgctggacgcccgcgggctgttctcccggccccgcccggcggccagcttctctgagtctagggggccctgaagcggccgactgggggcccggctctcggcggaacgagggctgcgcgccccgagcctcgagtccgcgctcctactccagctgggctcgcacggctgctgcaccttcgcgcctcctccctgtgcctgcagccgtctgaaggggacccggacggttttatttttggaaacctcccccggctttttcgtctcttttatccacaccaggccccctcctcggagggacagctcagccccctcattaccggagagggagcgaggaattccagcaacacccactttggcaccgggaagccagcgggcggcgagcgggcggcgagggggattaacccgtgcggagcagggggcggcgcggggctgacccaggcgctggtcgggcagatggcgcctgccacgaccgggacactgggccgcctttctcctgctctgggcaagttcgaactgcagacctgccccgaatcgttctcccgcccctcgcctcagggaccgtctttggatcgggggacccaggctgcagccttgcaggtctgaaggaagccgggaggggcgccgaggcccgcgta

SEQ ID NO: 237589 - DNA, 144 bp, Homo sapiens; identical to SEQ ID NO: 203671
  chr14:75179349-75179493
  hyper

SEQ ID NO: 237590 - DNA, 100 bp, Homo sapiens; identical to SEQ ID NO: 203672
  chr14:75179845-75179945
  hyper

SEQ ID NO: 237591 - DNA, 106 bp, Homo sapiens
  chr14:75229919-75230025
  hyper
ggcaaccacgagtcgccaagtaaaggaccgctctatctcgcctttgttctcctctcggtggttactgcgcagacgtagtcgcccaagtcgcgtccccgccttcccg

SEQ ID NO: 237592 - DNA, 145 bp, Homo sapiens; identical to SEQ ID NO: 203673
  chr14:75230400-75230545
  hyper

SEQ ID NO: 237593 - DNA, 163 bp, Homo sapiens
  chr14:75348311-75348474
  hyper
caagagagaagggcgccaagctcagagccagttctgtggaagggtaggggaaggcctgaccccgggggcaatgtggtggcgggacagtcgtatacaccttcaggagaaccacctcaggctgacaggcagtgcggagggccccaagagcgccttagggttgcct

SEQ ID NO: 237594 - DNA, 124 bp, Homo sapiens
  chr14:75349046-75349170
  hyper
tcggcgcccgtctcgtcttgctctgttaaaatcagtgggtattaatgagtcccgttgggaagttgagatagtttggcaggcccagcgtgttgattgggtctgccagcacggtgtgttgcattta

SEQ ID NO: 237595 - DNA, 734 bp, Homo sapiens
  chr14:75469162-75469896
  hyper
aacaaaagtgagacgtctgcccaaggggcagccgaccctggacatgcattcagagcgtcagtgtcagctgacactcgggagtgacagctcgggcagtcaccgagctgggaagacaggagggagtgccgcaacttcttcagtgtagccttaagtcgcggtgaggggcgcgtagagacttgctgctcccatagcaacgggaccagccaccctctacaggcctgacgggttacttccgttcaccgtcggctgagccaagaaaggccgcttccgatcctccagcccccgaggcgcgggggcgcgcggacgcccggttataactgaacaacccgagccccacgtctctgattggctcaggcagaggaagggggcgggagatcggcaacgaagggcgtagccggcttccactcaaacttgaggtttccccccatcccctcacagcggaagccgacctcgcccgccccggaagtgcaaactgtgtggtctggcaggtgtggattccgccggtgaaggctgaaggcagctaccttaaagatgccgggatccgcagcgaagggctcggagttgtcagagaggatcgagagcttcgtggagaccctgaagcggggtggtgggccgcgcagctccgaggaaatggctcgggagaccctagggttgctgcgccagatcatcacggaccaccgctggagcaacgcgggtgaggccggcctgcctccgccggcgaacctggcccctgt

SEQ ID NO: 237596 - DNA, 507 bp, Homo sapiens
  chr14:75517724-75518231
  hyper
aactgacgggtaaacgtttaacaagtattccgattaatgtaaacccaatgatttcctgatgacgcctcccagcgcctgggactgacgggacgcacgggcctggatccagggcacgggggcctgggagggccgcgcgggccgagtccggggcagcgctgccttcccgccaggcccagcccctccctggccagccccgtccttgtccccaaactgggcccgcccggccgccaggccgccgggcctccggggccctcgcgcatccggctccgaaagctgcgcgcagccatcatcagggcccttctggtgttagaagagaccccggcatcatcttttcgtcgcgtgcttcccccagagtcacctggagtcccgcttaacaaattctccgacaccaaccgcctcggacgccgacgcgcgcaccttggatcttgaggctcgtgcgtgcccacgagcatgcgcttcggagggggcgcgccaggccgcgagacaccagtgcgcatgcgcaccagt

SEQ ID NO: 237597 - DNA, 198 bp, Homo sapiens
  chr14:75530723-75530921
  hyper
gcgcaaacctccgcgcccggaagtttagtgtgtagctgctccttcgctgtcgctcatgcccatcacctccagctgaccaatcagagacggcgcctcggcccgggcccgcccagaaggtgggatttcaggacgcggttgtccggcaacccaaaagctttgggttggggatctgtccaggaactcggctgggcctccaca

SEQ ID NO: 237598 - DNA, 369 bp, Homo sapiens
  chr14:75535863-75536232
  hyper
tccaaagccttggcgaggacaagcaaggagcgcgcgcgtgcagccatacctggggcccgcccagcgcagccgagcgcgcggagaaaggccagcagcagccccgctcccgccaggcgggcggacgccggcatcctgcggcggaagcacgcggaggcacagccagggcctccgccctttgccagacaagggcacaccccaaggtctgggagcgtcgttctcagaaaagtacaagttcttctttgaaggagctccagaaaagcctctcccgcccctccccggctccccaagggcagggctggaccgagctgcagagttggccggacactgactgggtcaagtgaccttgggctgaccgcacccccacccccg

SEQ ID NO: 237599 - DNA, 242 bp, Homo sapiens
  chr14:75593511-75593753
  hyper
ggcccctgactggcgctaggccccggactcgagtccccgcaacccccggactcgctcccaaagtccgagttgatggaatcgcagtgtcgctcgtactcgcccagcaccgacatggcggcggccgcgggccttggggaccagcctgcgtatgcccggaggccctggccgcgctgcgtcccgctcgcttcagatgccggcccgcggatccgtcagcccagcaaccccgcgaagctcgatggtgg

SEQ ID NO: 237600 - DNA, 276 bp, Homo sapiens
  chr14:75725634-75725910
  hyper
tctggcccgggggcgggagaagctgttccagaatcggttctggctccactgccacctcagcactttctaattgcagctccaaacagccgcagctgcagtcatagcaacaggccccgcccaccgggcttcgctcctggcgtccagcacgtgacggcgacgcctgcgtcgctccctcagcccctggcgctaagggaggcggggaagtgtggggggatgacgtttactctgtcgtctccatggatataatgcatagacgtcaacgtcgccagtgtttgg

SEQ ID NO: 237601 - DNA, 355 bp, Homo sapiens
  chr14:75745344-75745699
  hyper
cgagattaggacacgcgccaaggcgggggcagggagctgcgagcgctggggacgcagccgggcggccgcagaagcgcccaggcccgcgcgccacccctctggcgccaccgtggttgagcccgtgacgtttacactcattcataaaacgcttgttataaaagcagtggctgcggcgcctcgtactccaaccgcatctgcagcgagcatctgagaagccaagactgagccggcggccgcggcgcagcgaacgagcagtgaccgtgctcctacccagctctgctccacagcgcccacctgtctccgcccctcggcccctcgcccggctttgcctaaccgccacgatgatgttctcggg

SEQ ID NO: 237602 - DNA, 51 bp, Homo sapiens
  chr14:75761835-75761886
  hyper
attaataatcgcgcggcagggttgctgatgtaaagcgatttgcagatctaa

SEQ ID NO: 237603 - DNA, 141 bp, Homo sapiens
  chr14:75894269-75894410
  hyper
aacacaggctgtgcgtgaaggggcttttgacttttcccccggctccggcctctcgcgtctctctcctagggctgcggctgctgctgcctggcgggcacaagccgggcggcggtgcgcggggggtgcgcttacataaccgct

SEQ ID NO: 237604 - DNA, 208 bp, Homo sapiens
  chr14:76044577-76044785
  hyper
aacacttaggtggcgccgggctttggtgcacgcgcgcagggcatgcggacaggcaccggagaggctctattttgggcattacttcgggaaggcggatcttcttgcagggtccgctgatagcgggtggcaaatgaatatgaggggcagtgcaaagggtgggggttaaccgggcggtttccatggcgcccggggcgtgggggaggaatgc

SEQ ID NO: 237605 - DNA, 254 bp, Homo sapiens
  chr14:76597642-76597896
  hyper
gagcctcgcttgcccgtcggtgggctgggcgggagcgctgaccctggcgcctcggaggagggagggggcgggctggggagggggaagacagcgtgactgcggtctgatctacagtgacgagtaccaatgttaactgtcacctctcatctccaaactaaatcacacctggaattggaggagccgaggagctgatagagtcagcctcgcagaggcgacaagtcaatcagcgcggagatgcccgcggagacaccggc

SEQ ID NO: 237606 - DNA, 128 bp, Homo sapiens
  chr14:76603108-76603236
  hyper
cacggttaataacacgattgctcccctccgcctccttccttcctctccttccccctccctttccctcgccctccacacaattctctcaattaacgataggcagaaattaatttttcccctcgatcgaa

SEQ ID NO: 237607 - DNA, 550 bp, Homo sapiens
  chr14:76604548-76605098
  hyper
cagtgtgtgaagagcgctataggattttagagagattcagcccggacaatcagggttggcttcacggaggagggggtatctgagctgagctttgatgaatacgtcagatttgggggaaaggttgctgctggatagcggggcaggaagaacgagcgtatctagttgtaatgccaacaggtcagggggggaaagttggggaatggggtgggaggaggaagaattagactggccccttccatcatcgccatccttctgtgttgacccaccccggctccgtcccaactctcccttcctctccacatccaggaaagattaacttctctccgtgcgagaaagttatcattagccaagaattaaaagagtgattaatgatgccccctcccctgccccctccccaaggccttatctggtggcggtcagctggacaatgcggcagggtgggagggggaagcgagggcgacggagaaaatggaaaacaataaatattaagcgcaagaaaaaagggagcgcagcgccgttcccacttgttagattgaaggcgcctctccag

SEQ ID NO: 237608 - DNA, 139 bp, Homo sapiens
  chr14:76605398-76605537
  hyper
atttgcagttattatgaaggagatgagacagattaaaagcccttgtgttcgccgctttgcccctttatttagtggcttcatctacgagatgaaagaagttggaaatgactttctctgctttgcgcggcaagaagcttca

SEQ ID NO: 237609 - DNA, 299 bp, Homo sapiens
  chr14:76819085-76819384
  hyper
acttttctatgtcctcggccccggttgctctgagctagctgattggaaagccctaaccctcgaactccgggctttctgggaacgcgggctctctcccctctttccctccgcccccacgcgcacacaggcgagcaccgtccgcccttcctagttcccaccgcgcgcccctcgctgagcgctccgcacactctgagatccagcgcgccctctggtggcacacggccccgaatcgccgcgctcctgcgggccgcgcgcagggtcgccgggtaggcacaggcacgtcccgtggccacggacct

SEQ ID NO: 237610 - DNA, 380 bp, Homo sapiens
  chr14:76842493-76842873
  hyper
ccagcctcctccacggcttcgcatcccctctgcccgctctctccggagcgtgcggatgagtggagagctgggctgtgcgcgcacggctctctgcctccctctcccccgccgcggccgcctcctcccactctgcgttctcgcgctcactgtgccctgcccgggctcgcaccttgcccgtgcccttcactcgctcttccgcgtgatttccccgccgtctttctctaccaactgggaatgctaaaacgggactgatggacgtgtccgaactctgcatcccggaccccctcggctaccacaaccagtaggtgccctgcttctcggtctgtctgtccttctgcccgtctggcagtctctgtcctggggatcgcagttccttttct

SEQ ID NO: 237611 - DNA, 767 bp, Homo sapiens
  chr14:76843228-76843995
  hyper
ctggggaccaaaaatgatcccggcaagagagagaaaatcgaacgtgccgcggcggtttggaaactgcaggcggccagtgccgctctcgcctcgcggtctccgtggggcgccccgagggtgcgcacgtggcgcggcggatccagggcgcccgggggatgcgggcccagcgctgcgtcgtaggcaaagttcgttctcggctttgggggaggctgtgaccagcggaacagaagggcaccatttccctgctccgaggcggctttgcgctcgcggtgccagaacctggggttatccgagcggcgtgggcgcgggcggcagccggcgccgcgagaagcgactctcagaaaccgcgggtctccagccccggggcagcgcgccaagagcgcagagtgggaaagtgaactgatcgcctaagcagcgggtggtcaacccgcgtgtcatgtccgggctctcggggatcccactctatccacctacggtttccctcccgacaccctccacggtcgccgctccacctgctcgggtacctgcccgggtctccccttgggcgctgcgcaccccacggcgcccccggcgggtgtcccggaggcaggttgtgtgcgcgtgcaaagtggtccctcggaaggcttaataataataatacataaaactctaggttcttacggacagctttcctgcttaactttgtgctcgtcttcctcttttttttctgacgcaaactaaattctccaagtcagcgtttctccagttccaccgtgctttcatttgtg

SEQ ID NO: 237612 - DNA, 344 bp, Homo sapiens
  chr14:77227531-77227875
  hyper
ctcagggcccctgcgaagaatctttttcaagaaattcccgaccgcaggaattccttctgcgctaggaatctccatggagtttgcgctccctctggcacgttgaaaacgtcctccgcagcttcgcaccggcttcgcggcgccctgacagctgggtgaggagggagcgaatgcccaccggcgtccttggggtaacttgggacagaggcaccgccgcggggggcggaggactgggcgcgaaggcgctggccctttaagggggggacggagcgcatgcgcggcgcgggccgtagtcgagcctggtgggcggctggctggcaggggacgtggtcggcggcagcggggcc

SEQ ID NO: 237613 - DNA, 211 bp, Homo sapiens
  chr14:77228494-77228705
  hyper
ggcggggaatgtgcgcgtcggcgcgcgccccctccccgctcccggccagctgcgagtcttggctcccggacttgtctcgtcgcgtcggagaaatcgccccccagcgccgctctcccgcccgggggtcttggttccgagctcgcgcggccgggagtcgcctcggtcttccttggggcgcgcgcagatgtgagcgtgcgagagttgtgtaggg

SEQ ID NO: 237614 - DNA, 498 bp, Homo sapiens
  chr14:77422360-77422858
  hyper
tgtcctcctggtgtcgtttttaatagctcatcctttcacaatcaagagtggctcatgccggagatgagttacccgcaatgaggggctggatttattctaagggcagagggaagccatcacaggaaatgatgtgattgatgttttgaaaagaactcgctggctgttccgtgaagaataaattagaggggcaggagggaagaagtctgcctggggcggctgcagcaacccaggcgtgctgcgaggtgccctttgactagattccagtgggggctttcgggcgagcagaagaaccccagggatcagctctagccacgctcagctccctgggccggccctgggcatttctgagacggccctcgcgctcagggacctctcctcgcagttccattgtctgttcttgcggagtcctgccacactgggagggccaccccctcctcttgctcccctcccctccccgggtccagcccctcccctgcctggcccggctgccgcccagcg

SEQ ID NO: 237615 - DNA, 361 bp, Homo sapiens; identical to SEQ ID NO: 203681
  chr14:77428119-77428480
  hyper

SEQ ID NO: 237616 - DNA, 68 bp, Homo sapiens
  chr14:77493464-77493532
  hyper
gacgccgccgctgaagaagaattggggctctgacggttcagctctgggggtccctcctctggtgttgg

SEQ ID NO: 237617 - DNA, 282 bp, Homo sapiens
  chr14:77499644-77499926
  hyper
ctaaaggagtaatcccggtatttgaaaaaaaaaaaaaaaaagtattaacttaggccagggcgtagggttacgcaagagccactcgagcatgaaatcccaggaacaacgtgattcgctgagaagccccgggggaggaaagcctgcaccgcctgccaggacctgcccagcctggggcgcgcgggcagccgggctctccgtgcaaaatcgggtggaaggaaaaggagagcgggcgtagtgtttagtgcaggcacagtggccacagcgagcgatggatctctgact

SEQ ID NO: 237618 - DNA, 147 bp, Homo sapiens
  chr14:77519690-77519837
  hyper
aatacaccactcgtcgggacaggattgcaaagggggcctggggaggtgagcccactggaaaacaatgtgtgcgcgccccctgctggctgcgagcagaggtcccgcctgtccgctgggggtcttcaggtggttcgtgttagcaccacc

SEQ ID NO: 237619 - DNA, 201 bp, Homo sapiens; identical to SEQ ID NO: 203684
  chr14:77564278-77564479
  hyper

SEQ ID NO: 237620 - DNA, 167 bp, Homo sapiens
  chr14:77600250-77600417
  hyper
gagcatgaggatgacgaacatttcagaacccaggacagctcctgcagggcacggggaggggaaacaccagagccgctttacacccaggccaccggcataactgcgatctaggcaggctttccaccgggagggagggagattaatgagattgacgctacattttgtag

SEQ ID NO: 237621 - DNA, 1738 bp, Homo sapiens
  chr14:77606580-77608318
  hyper
ttctccgtccctgcgtccccacccacacacacatcttgggcagcactcagggacctcaccaggttacccaaggctctttggaggtatgtgtgcgtgagggaccacgatgtgtgtgtgtgtgtccttgtctgtgactctgtacgtgtaatctgtgtgcgcttgagtatctgtatttgtgtatgtatatatctgcgtgtacagacacgcagcctctgctatctagctttaaaaaaatcaattgaaacaatcgatacactcacactcgctctcgggcaccgggtgaggtgggggcgcaaccagaatacctgtgtcagcgggtcctggccagcacatctctccaacgctggctgcccgggctatttctttgcgaagagcgttttcatttgaggcgaaattaaaatccccccttcgcgcccgcctcccgccctcctgctgagagaaacccaaacaaccctcatggcgccgaaatcctttccatgccgacaagcccgccctgggcgcacgagtggatgcttggccagcctttcctgggatcgaccccgccgccgtgctcagccctcaccacgtccccatcccaccccacgcctcacagccggggttcctggccagcttcggaagccaccgagaaataggattccgtgcgcccgagagaacttttccaggggctaaggaatcggccagccggaggcgcgagaaaagttctgggaaggcggttgcacctaggatgggtggatgccacggggcctccgtccaggctgtcccgtccgcacgggtcgactggtcaccttggaatcccctttgcaggtcccagcgccccccgggaacccgcagcctccgcggagagcgtgggcctctccctaccgctggggcgcagcgcagtgcacgcctgagggtggtcgccgggggctgggcacgcccccagtcctgcgccgccgggggctgcggcggtgctgcccaccccagagagccctcggcctggggctccggcgaagcaagtgccttcccggcgccggtcgccaggggggcgcgggagcagccagatgcgccgcagcgctgggaaggcggcgaaggacaggggctaggggagtgaggggcgctcggcaggcagcctcagccctggccctgcgcgggagaagggacagcagagaccgcccgtggggccccggggtgtagggagctgtccgttcagccctggcgcccgcctcgcccgcggcagagggcggcacagccggagccttggaaagaccggcagcgccggcagccgcgggcttctcggccactgcctcccggacgcacgggaagccgccccccgcgccgccgccgccgcactgccgccgtcgcagaggggtgaggaaatcaactcaccgagctctggtcgccgacaagaggagccccggacgccggctctcgccctgcccgaggctgcaaagttgtggactcggcccggctggctcgcagcctgcgcttcgcttcgggaactgggcaagtagcggggatgtggggaggagggagcgggcagctgctggcttcccacttgggcgccagcgagtaagggccaggaagcggcggggatggcagctgggcaccccccagccccgccacccctccctccgctcctgggggcggtgctctggccgccagtctcagcatcgtggacttgccccctcctcccctctcgattccccttgagcgggctggggcgccctgcctggtttcagcgcccgttccagctgggaga

SEQ ID NO: 237622 - DNA, 565 bp, Homo sapiens
  chr14:77647941-77648506
  hyper
gagcctgggtcttcgcgtaggatctgccagcctgggttccccggcaggtcagagaagctttggggcggggccaaggttggcccctgcttgggaggagccgggatgcctctctcacagtgatgcagagaggaatttgctgacagtcccttgccaggtggggctggcttcgcccagccggcgaggaggaggacccgctggcagtctcctcccaggtggggagcgtggagcctgtcactgcagcctggcggcctgagcgccgagcctggggctggggccgcggtgctgaggacgcaaatgtggtgagcacgcgatgcgggtgcggtgaccggggctggtcgggccgggaagaaggggcgccggatccaggtcccgcacggggagggggcggggaaggattgcttgtttctgtgctttctgagaccttgcattgggagggatgggggtaggggagactgcgccacagtcccttgccacgctggctgtctctagcttgtacccaggaaagggtggcctgagccgcccacccgggagggcgtggctttagtagaccggtcttcactgggtt

SEQ ID NO: 237623 - DNA, 50 bp, Homo sapiens
  chr14:77736729-77736779
  hyper
agaccgctcacacgcgggcgcaggagctcgccccacacatctcccttccc

SEQ ID NO: 237624 - DNA, 52 bp, Homo sapiens
  chr14:77787314-77787366
  hyper
cagcccccaggtacggggcgtggcgggagagctgggcgagccagaggcgacc

SEQ ID NO: 237625 - DNA, 33 bp, Homo sapiens
  chr14:77787594-77787627
  hyper
aagtgagctgcaccgcccgcccaggccgacaac

SEQ ID NO: 237626 - DNA, 184 bp, Homo sapiens
  chr14:77843606-77843790
  hyper
tgcttgtgacagacgatttttaaagtcagggcttgaaagaacaaacaaaacctggggaagagtcaggaagacactgccggaaatcgtggtatccatagagacgctatcggaagttggggttgctaggaagccgcggcgcgtctgctaagctgcaaatggctgaagtcccggaggattatgattc

SEQ ID NO: 237627 - DNA, 55 bp, Homo sapiens; identical to SEQ ID NO: 203688
  chr14:78266694-78266749
  hyper

SEQ ID NO: 237628 - DNA, 254 bp, Homo sapiens; identical to SEQ ID NO: 203689
  chr14:78432197-78432451
  hyper

SEQ ID NO: 237629 - DNA, 641 bp, Homo sapiens
  chr14:79745139-79745780
  hyper
agattcccatcattcgccctgcgggaggggccctgggcattttaaccccgggagacacacgcgcctggagagtggtcgcccaagccaccgccaggcagggaggagcgcgcgtgcggcaccaccgcgtgcagcagctccagcgctcgcgctgcctcaaggggtttatttttatttctatttggagctacttcggccttagccgccgcccttacttttcctccgaaattgtgagaaggtgccttcatggctggagtttggtttcacgcgcctgggagaagagcagggcacgggtgataaagaaggcgcagtgtcggtctgtcggtgtcacacacgcgcgcacacacggcggggcgggagccgcgcgagcgagaggagggcgggcggcgtgtgctggaggctcgcgcgggtgtatacgagcctgtgcttgaatgggaagggccgggattccgggtcgctctggcccctccttcctccggagccagccagtccctcggcagagcgctggggctgcactgatttgctctcgggagtgcgctatttgcatatgacttgcccatttgtgaatttggctccccaactcctcgcttcacttcacctgtgcctccctggtccgcgcacttcgcaggcgcccgcccgcctct

SEQ ID NO: 237630 - DNA, 332 bp, Homo sapiens
  chr14:81421283-81421615
  hyper
ctgaattgcctcgcggagccgcgggctgcaacgtgaggcggccgctgccagtcgactcaaccaccggagtggcccctgcagttggatagcaacgagaatcctccaggggtgcagggcgacggcttcggccgcaccgcgggctagccagggctgcgtgcccgcctctgaccctcagcagaggtgtctctggccaggaggagctgaagttctgcaggacattggtccgcccgcggacagtccactccgcggggactttctctggataaggagtgcgtgcgagtggctcccaggcagacagggtgtctagaaggctacacgctagggaaggtggc

SEQ ID NO: 237631 - DNA, 41 bp, Homo sapiens
  chr14:81687740-81687781
  hyper
gtggcgtggcttccggcctctggcgcgttcctattcgggaa

SEQ ID NO: 237632 - DNA, 1268 bp, Homo sapiens
  chr14:81901893-81903161
  hyper
gcgtcgggagaggcggggaggcaggcagagaccaggagctgcacaaaagcacagttaatgattcactcacagccctcaggcagctccttccagtaggggttgcaccagaacacacggacgcgcacacacacgcacgaatgcacacacacgcacacgcgcgcgcacacacgcactctcatcttcaactcttcatcccagcgagaggcgggtgtcaggcaaattgcttggcaacgcgcagagaaaactccatccaagccccacgtccaggccgcctctgggcgctgtccagcgggcagagcgcctgaggccaagctggggtcctgcctcccgacaccccgaaggcggggcgcggcgccaacccggggtttcaggcgaggggagtgtaggggaagcaccgtccccagggacacctgttgtcgcctccccactcgggccgatgaagacatcctgggcgtcccaatctcgaagacacccgtcggccagaagtgtctgtgtatggggccaggtgtcgcaggagtcctcctccacccctacctgccttaagcagagtcccctcgtcctcccccaccccgggacgcccgcggctggtggaaacgccgcgcctccgcgtggctcgaccaggcaggctcgggggcgccagggggcacagcggcgctaggacctcgcggccggcccgcccccgcccccgcccccgccccccgcccgctccacctgcggggcccctcttggggggcgcgctcgcctcctgctgcggggcgtgggtgcagttacctgcgccgcggtccgcagggtccccggcgtccgccgaaaggtcgccgcggcaaagccggcttctctggccgcgggatacccacccggccgcactgctctcgccacgatccctcccggccgcagcgccgacgccggctccagactcgagctcgctctgcgcccgccggctcccggcgccgctcccgccgctcctgattggccgcggcgcgctcccgagccgcgccatgattgggcagccggggagccggggcggggggactggccgggcgccgccgggatctgctggccaagcttcccgcgccgcagactcgctttcccgcggctcccggggccccaaccagaccccgaagctgggattcttcccctctgcgcctagtggggccggccgtccaggcacgaggcaacacggaaagcatcgattcgagcgacatggaaatggcgtggaatggggagcgcatgggagtcccacccgctccgcctgcgggctggtagttgag

SEQ ID NO: 237633 - DNA, 53 bp, Homo sapiens; identical to SEQ ID NO: 203695
  chr14:82000012-82000065
  hyper

SEQ ID NO: 237634 - DNA, 148 bp, Homo sapiens
  chr14:82000298-82000446
  hyper
cattgctccgccccgggggtcattcattggccaatcattgtacgaagctcccacaccagctttctcggttggaccacgactcacggacatggccccagctaattggtagcccctgggttcaaccggaatcagcgcgtgagtccaagac

SEQ ID NO: 237635 - DNA, 852 bp, Homo sapiens
  chr14:85996080-85996932
  hyper
ttgggggatgtggacgggggcggagagcagagaagtaaaggaataaaaccaacttcgctggcaacttcaataaatccggtaactggaggcaaaaaatagactccgagggctgggtctggtccggatgaaacgctagggctccttcccttccttgaatcttgggcgctggaagccagccacgggcgtcttgccacgcgagtgcccctagacagcaacacacccactggaaacgcacgtgaacaaagctctcgcccccgggagccgctgcctgcggtttcctagtcgatcccagcttctctagggagtgtcaggcgcacacagggttaagttagttccctccctggtaggagggagaggaggaggaggggaaaagcagcatactgtctcaggctgggtaccttgtagttagttgtacgttcgaaacctgtcgccgtcacttgcgcgtttggcattatccattgtcaccgcggaggaacgagcgctcgagatatcatcagtgcccgcaaatctccgcgccaaggcgctgagctactcctttccgaggtgcgcctctggtcctccgtccctggtgcccagcagcggcgaggcggcatctccgctcccgccgccgtgtccaccgagccctgggatcagggtggcagttctcaacgatgggcaggagggacctcggcggcgacccctaaaacaataccatgccccgggatccccgctgctgccgcgccagcgtcttccctttccacctccctgaccctgtcggattcggatgagcccattgcaaggagaagacgcagccgtcaggtaaaaggggctgcgttgccaggtgaagtttccagtaaccggccgagctgctgc

SEQ ID NO: 237636 - DNA, 1105 bp, Homo sapiens
  chr14:85997498-85998603
  hyper
acgcctttctagagcgcctgcggaggtggcgaaggcttggagagcatacgaggcggaatccggatcgagtgagttccttgagccgcttgcgtgggacgcagggagagggcgaataacgccctcaggcgctgaatgcaggggcaaggagccagcgagggtggctggagcaggccttgccagctgttaccaagtctctccacaggcttgggggcttggggcctcctggaaagatccctccgccgcgctgaccagtacggggctcgctcccgcactttgaaggctgccgcggtctttcgtcatttataatcaagcccaagatcaaggttgcaagctgaggtcggggtactgacaacgggaatgaagccataggggaagaggataactgggacgggctggacccatacttgatacccgggaaactcctagagcgtgtggtgctcctgccagcggcagttactggtggagctgaggccaccgctactgtcgtcgttggcgctttgcttctggaacctcccagcaagatggcactcactgtctgttcccttccgattagcacccccagccgcgctccctcctccccgggatacgtattagtcacatactgtggggagaagatgggctatgtaaatgtaagtcaacgcgctttcccagccacctttgcataatgcaacaggaacagcgacccgcgcgcacgaaccgggtagtgtgcgcgtgtgtgtgctcgcgtgtgtgagcgcgtgtgccagcgtgcgtctccgcgcgggcgtgcgtctgggtggatccttgcgtggcttgggaggcaaatcgggcgtttctccaagtcgtcttaacatgatttaggctctcaaatacgtgaaagcggtagacacaacagggatgcgaaggaaataaaaaacaattggggaagtggtgccaagtcactcaggctttgaactgaggacgagtagtgcggtcgcgcctggggcgcgtccggaaatcatcctcagcctgtggcggccactgccccacttaaactcttctgcggggagagttgagcggatccctggggggttggtcctgggctagttttaaactctccggttgcatctcgcgtggccccaccgac

SEQ ID NO: 237637 - DNA, 1066 bp, Homo sapiens
  chr14:85999426-86000492
  hyper
ctgggtagcagccgcgcctcccaagcattctttaaaccagaaaagtaggagggactccgggagagagggagggaatgagggagggagagaaagagggctccaggagcggagcgcgccagagcgcgagggacggagggagaggaggagcgcgggagctgcggaggcgatcccgcgaattcattactgtaaacatatccgggggtgtcaggaggggtaggggtgggggccgcggcgcctacattagcccggccgcgtcggattgaggcagtagtgtggtctgagcagcctccagacccacgccgggcgggcgcagcacttggagcgagccctgcgcccgcccccgcgcagcgccgcacgcccggctccgagctgtccgcacacacgcgtcggaggagagcccgcctagctctcccgccgagtcccgggatcctccaaatccgaggagctccggcgccgcggggcagctttctgccgccttccccgctcgctgtacttcttttggggttcgttggcttggcgaagcggagagggggaggcggaggaggagagaaggcgggggtcgcggcggccgaagccaagagaaagtggcatgcccgaaccctggaggcggtggtggcggaggacgggggaagacgatgccgcagctccgtaggggacgtaggcgagagcaagcgaggcgagctgggcgccccggccccggcccgctgcggggaggcgcgcgccgctctgaggctccggcctccgcacccccgcgccccgacgctgcgggcgacagggcttggctccagcagccgccgccgtcgccgccgccgccacccggaggacccagcaaaagtttggatctgggggagggcgcggcgctgagcgggattaccaccagggctggaaggagacctcgagaacctttgcaggtaacgcgcgcccccaaccctcttcttccatgccccgccgctgcgctcccgcttcctcccagagcccttcctggccctcgcgggtctggcagaaagtaagagggaggcgaagttcaagatcccggggatgagcaccgagcgctggcagatcacta

SEQ ID NO: 237638 - DNA, 142 bp, Homo sapiens
  chr14:86000928-86001070
  hyper
tgccacgactgtccgtatgtgtgtctgtgtgtgtgcgtgtgtttgggggagggggttagtggtgttgcagagaggcggaatttttctcggtggcctgatgcgcagtggtcctaaggtagtgagtggccgcgtgtgcgcattg

SEQ ID NO: 237639 - DNA, 483 bp, Homo sapiens
  chr14:88792792-88793275
  hyper
aaaacatccaagaaagatgccgctccaagcggttctgtctccctctgtgccgccgcaacttccatggctattgcttcaggcgggttaagtctggtggaaagagactgcctagcgttcctgcggcaggaaaacaaaacatcgtggcgcaaagtctccctgcactcgccggcccccagcaggagacccgggctggcggccactgcgtcctgggtgcactcggtggcaaagcgctgctaccgggcacgggtctctgcagctcaaaacctgcccggctggagcgcaccaatagttgccccaccactttaatgaatgccgtgtggcccggcatgggaaggctgggaaagcccgaaaaccccagtcatctctggcaacgaagtttccccgagttggctggctcccttaccccctccccacgctccagcccggggtagctgtgagaccggaggagacgatgcctgccgcgtggggagtctcagggtggct

SEQ ID NO: 237640 - DNA, 154 bp, Homo sapiens
  chr14:88851824-88851978
  hyper
cctgacaggaggtcgctctgcggaagactggcaggatcccagagcaacagactggggctcgatgccccttccccgccaggtctctccgtccgcaactgtcctcctagtaccgggtatcccgcaggcggggctgcggaacgcacgtcccctgcgc

SEQ ID NO: 237641 - DNA, 279 bp, Homo sapiens
  chr14:89020631-89020910
  hyper
cagtccttccctgcgccccttctcgccaaagttatctggcgaatttcacgtttatatattctgagaggcacaaatatgcctaacacatttaaaaccctgatccagaattaacccgcaacaatcggccagggcgttcggaatagaagttcaagactccttttagaaattactcaagtatatgagagcgaacctgaaaaacaagacttttctctttgttacgctcccgctacgggtctggccgccgcgccccattctccgggattccggggccgcgggcgc

SEQ ID NO: 237642 - DNA, 352 bp, Homo sapiens
  chr14:89029588-89029940
  hyper
gggcccgggtggacgccgcggcctggcctccgctggacgctcctggcgggctgcggctcctcctcgtccaggccgcctcggccctggggacatttgcggcctcggagcgtggctgcggctgaagtagccgccgggaaatggaaggacaggcgcaggcccggctggagccaccaccgcggcgcacggcgccgctttggatccgctgcgggaggtgggcgccgcggggctggggctggagctggagtggggtgcggggtggggggcggtgcaggcgaggctcctcccagcccccgcccgggggatccgaggtgcgcgcaccagcaaagtggcctcagccgctgcagagtccggt

SEQ ID NO: 237643 - DNA, 376 bp, Homo sapiens
  chr14:89258194-89258570
  hyper
ctgggcgcgctccccgggagcagcccaccgcttgctgtgcttccatcagtcctttattaggtaaagggtttccccccaccccgggtgctttaagaatgcgtttaataagaaatttctcacaggatctaacggaataaagtgccaccaaaataaccttttcgcagttttcgtaattgtgatggagtgggaaaggggacaaagccgtcaaaccgggtgcccggtggatccgcggacctgatcttcctgcacggacccgagagagagtccctagacgaggaagaggggaaaggcatttgtagggtgttaactggtggactcgggaccagagagacagctgcggattcccctcggggtgatgctccgtgcaggagcggtc

SEQ ID NO: 237644 - DNA, 400 bp, Homo sapiens
  chr14:89290490-89290890
  hyper
gtgggaaggacctcgagaaacagcggacaatttcaggatttaggactttaggtcttgatgggtggatggtactgtggaagctgtttacttgtttgtatttctagaatcggaaggtaaagcgaaagggatggaaacgagcgaatggaagaagtaggacagacaccagacagagatcaactccagggactcttccggacctgcagggcaggcagagcattcggttgctaggcagctgcgcctcctgggagggtgggggaccccaggggcaggtgtctaactcactacctttttgtttagccgcggtgccttcttttcaaaatcaatgaaacctgtagcctttaaaagtagacatctttttccaaccaagtttaggcaagccctgtagccgagttctgcttgc

SEQ ID NO: 237645 - DNA, 934 bp, Homo sapiens
  chr14:89493264-89494198
  hyper
gtctggagcgtgtccgtgctgggcccccggagatgatttctggaatcgcgacccggggacctgaggccactctgggacctgcgaggcagttgttgcccaaagacaaggcctgggtacaggagctcgggaagctctctgctgcccgtctccgttatccacgttcgtctgggcaccctcctcgggtgctgcccattattcctcccgcacctgccggatccaagagtagacgcagaacccggacctcggaatgggacgatgcgacgggcggggaaggcctggcccggccgaggtgccctcggccccgccctccaccgagggcagggaggcactgcctccgctccgtccactcgtaactggtgacgctggcagccccgccggggggcggggggagtgcaagaaaatcctgaggtgtgtcgggggacctggaccagatgccctcctgcaccgccctagctccggggaagtcgctctccggctccgcggcgcgggacccgccagcgggcagaggcgcggcgctttgatgtcgcgcggccacacggtggcgctgccgcaccgcccgctggcggagactgggggccaggggtgcccggggtggggtggagccgggacgcgcgcactccccagccacgcccggggctcatcctggaacccgggcgcccgcagggtcgcgaggccaagtgtaggtcattcccctccccgcgggacccgtgcctggtggacgcatcgccgacgcggaccctgaacgctcacatgagatccttagggaaactgaggccgaagaattgggaatctgcatttagtccactctcctgtccgtaagaagaaaggggcgcgactaaggggaagggaaggagccacagggattcattcccagccggtcccagtagccgccacaacacccggcaggtccgagttaatccgttctgcaagctag

SEQ ID NO: 237646 - DNA, 134 bp, Homo sapiens
  chr14:89506861-89506995
  hyper
tagggggcgccagcgggcttgttttccaggatggccctaaaattctctccagcgaggagaggaccatgacggccaggccacgcttgctctgaaaagcgccgagcgtggaagggtgtcttggaatggggtctaaa

SEQ ID NO: 237647 - DNA, 280 bp, Homo sapiens
  chr14:89817835-89818115
  hyper
aaatgcaaattttctaaaaccgttctgtggagagagggaggcttcctgtgaggcccacttcctgtgaagcgtttggtctatggacagcctatttttaaaaatgtaagtccttcctttgaggccccccggaactggcagcaggccgacgggcaatcgttcctctggccgcacactttcaagtgaccgaatgtacccaaactgtttgataaggtcatttgtaaatatttactgatttgcagagaaaagaagttaaattacataaacccgtgcccacctcctg

SEQ ID NO: 237648 - DNA, 243 bp, Homo sapiens
  chr14:89884048-89884291
  hyper
agaggagattccacgtctccccagtgctgcgtcctgataggacccccagggccttccgagccctctcccagcgaccacctcgtgtcccggaggtaagcaccgcagcgtcccacccaggtggccgcgtgtctcccgagggagggccggtggccattacaagacaagaggcaccgtcctaaaggccacgccggtggggcctctcaagtgggttgtgcggaacgccccggccggcctagagagaaa

SEQ ID NO: 237649 - DNA, 493 bp, Homo sapiens
  chr14:90084101-90084594
  hyper
acataaaggtatctcgagcaaactgcacccaaatgaaaaaccgaccctgcagaaatctgtgcacaagagggctatctgaaactacagcacgattttaaaagaaggttttgggtgactgttttcataagtctcaatctaactgaccaatcagtgtgagagttaaagtgggctccagtcattcgtgcagccttcagagctctgcaccctccgagctgctctcctctccaaggcagagtcggcgatcaatgaaaaacagggaacaaaaggaatataacaggatgtcttccttagctaaggaaaacgattccctttttcctcaatgagccagtcgcaccctgcctacgacagctccacacgggagcttccagcagaccagtcctttcgggtgaggcacattttacatttgcaatcatgtgtcccaactgctagcaaatgtgtcaccttaagcacagcctgtgacggagggctccccgagcccaaccaattgaaacta

SEQ ID NO: 237650 - DNA, 92 bp, Homo sapiens
  chr14:90420659-90420751
  hyper
tggctttgaaaggcgggagagatgcagactcaaggttaccattaatagactatatagagagaaaggagatggaacttggaggtagccgtagt

SEQ ID NO: 237651 - DNA, 54 bp, Homo sapiens
  chr14:90422068-90422122
  hyper
ctggttctcctctcgttttaagaagtctccaggaagtaagccaagagctaggag

SEQ ID NO: 237652 - DNA, 347 bp, Homo sapiens
  chr14:90526595-90526942
  hyper
gtttctgatgaaaatgcactcgccagagctgtgtttctttattcgaaatcacacggttttactcaacagggctcctagcccttctgtctctgctcctggtgcgtaagggcggtgtgtggggctctgcgcctgaaaccgctctctcggaaggtgggaagatgcccacgtatccattcctctccgcgtacagattcgctcccacacgcccgggcgggtgattccggagggccgcgcggggctgtgtgcgcgggcgggggcgggatgtgtctggagggggcagagcgccctctcccggccccggagggcccacgcggaccggctgagcgtcccaccagccggttctgcat

SEQ ID NO: 237653 - DNA, 180 bp, Homo sapiens
  chr14:90527242-90527422
  hyper
cgctccccggaaggtgagatctgagcgcggcagcggcgccagcgcccgctacaaggcggggtctcggggagggggccccggcggtttgctggagagccttgctactgttctgcatgaggtgggggatgccttctgcgcggaccccgcgtccaggcaaaactctggaacgcactaggcagc

SEQ ID NO: 237654 - DNA, 99 bp, Homo sapiens
  chr14:90528022-90528121
  hyper
gcgctctgcttacccgcagacctccggaccgcgccccccccccgccgccccgccccgccccgccccgccccgcgaccgtctctttgcgggaaactcgag

SEQ ID NO: 237655 - DNA, 68 bp, Homo sapiens
  chr14:90528481-90528549
  hyper
ggggtgtgggcgagactccgccgacgcccggtgccgtgggcctgggggctgcccccgggggcccggcc

SEQ ID NO: 237656 - DNA, 238 bp, Homo sapiens
  chr14:90528909-90529147
  hyper
caacctccgggcggcctccacttcctccggggggcaggaccgaccctctcatcctttcattcatccatctgggcgcccagccagactccactgacatgagctgtcgcctgatcaacaggtggtattgcctccccgctgctctaatgtggtccaggcaccggcagcttcagcgtcacctggcagcttgttagaaatgcagtctcagtcccctctgcagacctgccgagtcagaatctgc

SEQ ID NO: 237657 - DNA, 96 bp, Homo sapiens
  chr14:90529393-90529489
  hyper
aaaagtgccaatgacggttcaaaagatggaaaattttccaccaggaagaaccagggaagtgacctttgggctgaatcaattcgtgttaggcataac

SEQ ID NO: 237658 - DNA, 146 bp, Homo sapiens
  chr14:90722847-90722993
  hyper
tcagcttccgtagcgtccctaacgacttccgcctctggcgggccgcagtggtggaggaacttccggcagcggcagctcaagtggccaaggcaagatggtgagtgactaagggtttctttccgctggtcgtcgcggtgcgatggggt

SEQ ID NO: 237659 - DNA, 255 bp, Homo sapiens
  chr14:90723211-90723466
  hyper
gaacggatcaggccgctggctttgctgctccgccgaccagggctttgctgatcggcgctgggagtttcgggggcgcctcctcgagtcaccgggaaaaatgctttttgagtcgggcaggtgaagggtgctggagaagagggtgggattcattccacctgaggagttgagcgcggagtcgtggaaggcctttcggagctgggggcatttgaaggaggccttaaagacgttgttatgacaggcggagctaagacggaa

SEQ ID NO: 237660 - DNA, 241 bp, Homo sapiens
  chr14:90798342-90798583
  hyper
aatgtggttttcgcggcgctctctggggcttgaccccgaagcgggaggggcggggcccagagaggagggtcgtcaagggactggggcgcggcggggcagggagaggcagggcaaagcagggtggggcggggccaaggggggcggagcgaggagtgacgggttcctagtggttgggaccctgtgagaaccggaactgcgaaaaccggagaagggaattgttgaccgcgaaagggactaagga

SEQ ID NO: 237661 - DNA, 351 bp, Homo sapiens
  chr14:90849381-90849732
  hyper
aggacctgggaaaaacaaaacgacccgccgtagaggaaaaggaaaccccaaacaaaactcgggcgcagagcctatttctactggccaaagagcgccgccaagaccccttccgtccggggctgtccgcgctgccactagtaaagatggcggccataggcggagccgctcactccgaaggccgcaggctaccctgccggccacgaccattcacgcggagccctccacgcccttcgcggcttgacgcattgcaggtgcagcgcgaccaatcagacggcgcggctcttttcggccaaccactgcagggtcgcgccggcctatcagagcgtccttgtcaaactgaacgaggaaaga

SEQ ID NO: 237662 - DNA, 525 bp, Homo sapiens
  chr14:90850032-90850557
  hyper
ccttcgcgttttgtgaaaacagttggcgccgcagaaatgagataaacgcccctgagctcgaaacccgcactcgaactgccaccgagccgacccttcctgttttggaactcagggcccggccacccgagaagcaccctcatgggcactttgtttctacaagggcccgtttccatttccttcctaaggtttccttatcccctgcggcaggaggggcccgctgggctcgggttttcagctgcgttggagctgcagaggctgcggagtgaacgcggccaggagcccgcctgggagcgcgcagcgctctaggagccgagagccgctgcttggccctcgctggccgggtaaaccgaggggaagctcctggcctcctttcccttaagccccttattgcttctgtggggaaggccctcctaggtagaggcgaaggaccggggagataacctctcccatgggccacatccgctgccatggtctgtgtcgtgccagaaggtacctctcagccctcagtgccgtgaaaaatctgac

SEQ ID NO: 237663 - DNA, 90 bp, Homo sapiens
  chr14:91224517-91224607
  hyper
ctcgagttgaatcgcggaatcaacccaagtacaggggcttcaaatggtcagccggccttggggcaccactgtcccggtggccgcggcagg

SEQ ID NO: 237664 - DNA, 223 bp, Homo sapiens
  chr14:91224896-91225119
  hyper
actgcgctagaacgcggctcccgcgacccctggcggcggctgccgaggggctgcgggacgaccttgggcggcagctagcagcgagtcctagctgatgtggccctgagtcagcttttagaggtcccaagactcgttcacaggccgctaaacgcaaactaaggcacctcccagcacaccaggatcgacgtgtcctccttcagtccggactcggcggaatctgcac

SEQ ID NO: 237665 - DNA, 76 bp, Homo sapiens
  chr14:91526953-91527029
  hyper
cctcccccttcggcgggcaccgctagtaccgcgcaaccaaaccgccccctgctccaccgccgcctcctcaggccgc

SEQ ID NO: 237666 - DNA, 443 bp, Homo sapiens
  chr14:91580266-91580709
  hyper
ccctctgttgagccggggagagcaggttaactcttgcagggagaactgggcttgcagggtccagccagctgccagcagctctgcagctttaagaactggggcgggctagctgccgaggagaccacgctgctgcatgggccacgtgagctcaggctgtgggagcggatggagctgctacagtcagcgcttggggctggcctcagcttgtagacccgagccctgcagaacaaccccccgtggcgcaggagagcagaagaaagggggcctttatgcccttttgagggaagcacacattctgcaaggccgtggaaacaaagggaggaactgtttgtagccctcgtccagacgccccaaacaaacagtaagtcagaagggaacagagcacagcacagtccctccctccgccccaggcagtatccaccttgccccgccccacctaagga

SEQ ID NO: 237667 - DNA, 498 bp, Homo sapiens
  chr14:91581049-91581547
  hyper
gggttctgggctgccgcaggcacacaggccagagcttcgtggatacctgcagggcccaaaggtccctccctgttttgaagagtgagtgatggctatgaggtagcggccaggctgatcacccctgcgttggctggaggcagaattctgtaaatcctcgccaagtctttctccaggccactggttagctcatctcagcctcctctgggagcatcaacaccaacatggcacaggggactgcagtggtgtgctttggacctgtgtacccacccaaggctaaaggcagagccaggtgactttgcgggggtctcttctctaggattatctgtacttcccctctgtcctcttttactacgggagatcgagctagctataacccaccttctttcatgagaaccacactaaattgcaaaaattatcccagtgctggaggagggcagcaggttgagattatgttggcaggaagaatgttggcattgattggcacgcaggggacgagag

SEQ ID NO: 237668 - DNA, 71 bp, Homo sapiens
  chr14:91883879-91883950
  hyper
cggggccccggccgtgtcgggtctgcggcgtcccgtcgccgggctagagagaagccggtgcaccaacaaag

SEQ ID NO: 237669 - DNA, 107 bp, Homo sapiens
  chr14:91975839-91975946
  hyper
cttcacttaccgtcgctctcagccctgacaagcagggacatgcccttcagccgctccacgtagccagacgacacatgcccggtgccccggtcgtcccactgccggtc

SEQ ID NO: 237670 - DNA, 335 bp, Homo sapiens
  chr14:91976580-91976915
  hyper
ccgccgccgtctcttccgtcttcctcacacagccaaaaccgccgccatcttggttcgcccctcaaaagcggcgcgcggggccacccagggagcagctgcaggggcggctcgtagccccaccatttaaagagacagcagcgagaccgggagccttactgcggcggaggcttccgacggaggcgggaggcgggcgcggagttgccgaggtggcgggagcgcagggagcggaggaggcgggacgcagattgcgccggtgacagcccgaggctccctcccgcctccttgcacgcaccgtcgtgcgagcgctgggcggtgtgtgcgtccgtcgcgccctg

SEQ ID NO: 237671 - DNA, 536 bp, Homo sapiens
  chr14:92040360-92040896
  hyper
ggaggttggcagggaggaggcggcttgcagatgagaaggctggcaggcaagcgctgcgggcgaccgtgggtggtgggcgggttttcccctcaggcaggtgcaggtcctaagggggcgggccccgttgggtgctcatgacgcaaaggtccctaggatttgctcctcacagcgggagcgccctcgagaggaaccgcgtctgcgcctcccgagacggaccactcgggcgcctccgccccgcgccctgcctcgggggccgccccgcgcagtgagctcagcgtggaggcggcagcgccctcgcccttccgcgccctcccagcgcggtctctcctcgtccgcgcgccccgctccccaggcgtttctgggatgctggttggccgggcacttacgtgtttcaaagcgggtgacagccgccgctcgggtgtactgttcgctctctcccgccaggatccgagttcttgttccccgacaactcgtgggagtgcccgctccagcgtggtttctccttctccgggaacggccccagtgagcagaagagc

SEQ ID NO: 237672 - DNA, 565 bp, Homo sapiens
  chr14:92302195-92302760
  hyper
cctggacgcgccgtcggaagcccgagcacggagcagggagccgggcgcccggcgcgcggccgtccccgcctgggctggggtctccaccgtccccggtcacgggtccccctaggcagagccgcccacctggccagcggggacctagcctcgccccgtcgcccacccctggtgccctccagaccaccgcgcttccagctgtcgcggggcctaaagctctctcaggcccccgcgacacaggcgtcgctgaggagacgtgggaacagcccctgggccccaccacggccccattttaaagaaagttaaagacaaaagagacagaactgacactcacctccagcccgcaaggcggggccgccctcacaggcaccccccacagccctgagcgagctgccaggtgggagaagcgcacctgagccaagccacgccgcgcctttccccgcccgggtcccgccgccctcctccgggtctccacgtcccacgcccgcgctgggccggcgccgcgcggccgcggccggttacctgctggaggcagtgggcgctctgctgtcgccgcctgcgggaactg

SEQ ID NO: 237673 - DNA, 240 bp, Homo sapiens
  chr14:92413692-92413932
  hyper
cagaggggccgagcgagtcgtggagaggacacggggagagcgccggggtcctcccagccactgcagagccctcagcgcaagcacctggttttgcttagccctcttcagtaattcagcattaaaccaattggaggaggaatgttaaaaatgaacacttcattttctaagtatgttaaacaatgcaaatggggcctcagtctggacacagctggttcagattacagcgctcaccaactggct

SEQ ID NO: 237674 - DNA, 75 bp, Homo sapiens
  chr14:92414137-92414212
  hyper
ggaggggcgtgcacgcccgcgctgcgtggcaaggggacccgcgagaacgttgtcgcctccggaaggaaagggact

SEQ ID NO: 237675 - DNA, 101 bp, Homo sapiens
  chr14:92573061-92573162
  hyper
aagagcgagtgaacgccggggacacgtgaccttggtagcgcgtcctcctagcttctgttagcgggccttctgggggatgctacatcgccacctgctgtctg

SEQ ID NO: 237676 - DNA, 107 bp, Homo sapiens
  chr14:92588220-92588327
  hyper
cgaggcgtgcaggcgtgaccgccgtcgccttccgacagcaccgtgcccaccccccggagatggtctcgccctggttcctcctcgtctccgccgctagtctccagctc

SEQ ID NO: 237677 - DNA, 60 bp, Homo sapiens
  chr14:92789078-92789138
  hyper
tgttagctctgcacgaccaattaattttctcctgcatcttccccccgtggtgggtggcgg

SEQ ID NO: 237678 - DNA, 48 bp, Homo sapiens
  chr14:92789370-92789418
  hyper
ctactgaagagaagagtgcacgggggagtgcgccctacgggacgagta

SEQ ID NO: 237679 - DNA, 434 bp, Homo sapiens
  chr14:92790378-92790812
  hyper
atgttttcccctccttcctcatcaggttggtcccaagggttcatccagtcccctccccgccgggcaggtagagcgcgcccagaagagctgatggacgctctgggctgtggcgccggttcccctgagctacgagcggcccctgggggggctcaggacgcggctgcaggtgtgtgttactaagacgaaagcaagaaccgcttccgtcccgggagtgcgcccggaatgggcagcgcaactgcggggtgcaggcaggattctcttggtctggggtgggcgaaactgagtggcccgctttcctattctgcagagccgcaggaaccgccactgcgtctcgcccctgccctggttcaaaggggtcccctgggtgccctgaggtgtttgttcttcccaaaccctaaaggcgttggggcagtctgccgcggggggtagctgcc

SEQ ID NO: 237680 - DNA, 357 bp, Homo sapiens; identical to SEQ ID NO: 203724
  chr14:93214736-93215093
  hyper

SEQ ID NO: 237681 - DNA, 121 bp, Homo sapiens
  chr14:93389822-93389943
  hyper
cggcgccccgcacccctccacacttcccttcgggcgcggcgagttttcagcaccgcggacagcgcctccgcctcccgcctgaccctgcagtgtggcctccgcctgggacccacaagacact

SEQ ID NO: 237682 - DNA, 147 bp, Homo sapiens; identical to SEQ ID NO: 203725
  chr14:93582647-93582794
  hyper

SEQ ID NO: 237683 - DNA, 32 bp, Homo sapiens
  chr14:93799560-93799592
  hyper
cattatttttgctcgtcggctgggagccgggc

SEQ ID NO: 237684 - DNA, 915 bp, Homo sapiens
  chr14:93896716-93897631
  hyper
tcctcctgcattttcttcctcgcggtcctcaggaacatcctcgcgccctccggccccggcgctccagcccgccccggatccgcctccctctccttcctccccgaggttgagacgaagcgtgggacgcacctgggtccctctctggtcaccctgctgaggctccgggggctgctccgggagcaggatttacaggcccggagaacgccaatgggagatccaaatggtcggggactccggcgctttaagaggcttttctctgggaaacacccgtcccctccgtgcgccttatgaatggaaatactcctcccccggtcgagcccattttcccatttcaccaggagccgcagcctgctctctcctttcggtctccccgcccacatcaacgcgggcagctccaggaggggacggacaggaagcctttggccgcctattaaatcccacccatttctccgggggcgatttcctaaccttccgggaccgaattctgcaatttgatgtgcgttttgtccgaatggtagcgacacgggcctaagggagggggaaagcgagggggtggggggtggggggtatgcactcttttcctcgcaacatcgctggcggagcgagggagctcacacgacacagattttggggcaaagcctttccaactggacagcaccatgtccaccaaagcggagcagtgtaagtagcagccggcccggcattccggcccggcctcggctgggagctattgcagctgcggcgtttgcggctgctgggagaccttggcattgtgctggtgcgggggtgggggctgaggttggggcgggtggggggtggcggagagagaaggtgggggagggtggacgttaatggcagcgcggcgctgtccccggtgctgaaaaataatacggtcttcctcgggctccagcgggg

SEQ ID NO: 237685 - DNA, 126 bp, Homo sapiens
  chr14:94226382-94226508
  hyper
acagctgccgtccccgagggctgcctgaccatatttagacaggagcagacggagaggcagcataaatcaagccccacagcctgggctgccagggggaacaaaacaaggcaacgtcttggcacaatc

SEQ ID NO: 237686 - DNA, 1676 bp, Homo sapiens
  chr14:94254039-94255715
  hyper
gcagcaccaagtcccggaggagcatctcggccagcggcgcccgctcctggggcgaactgtcaggagagcaaggctagggtcaggcggacaccgcgcaggcacttccgccgccgcgcaccaatatacctcccagcccgggtcggacgggcacgccccgcacccaggggcaccctagtaaaccaagcctgcacttacactccagcttacaccttcactgactcttcgtcagtcccagaattcacactcttcttacgcacatccccagagccccgcgtgtacactttagctccgcgcacagctccagaatactgcgtgcataccttggccccatggacacctccagaaacagccaagcacacttactgcgccccattaacccccatacaactcactctcactgtgagcacacttcaaacccggcgggcactactcacctgcgcgcacaaccacagaaacagccgtgcacacacactgatccccgtgcacacccaccgactcctgcctgcaccctcgctgaccctgcatgcacggccccaagaaatctcacgctgcctgcacccacactgcccagccggcctcattgcgcacactgcaacataggcacctccgtgcgctgcccctttgcacgcctccgcccagccccgatctcccgctcccgggcgtgggttcccccacgcctccatctccgcccgcacccttccaacgcctcacgctaccttgcctggcggcggccccagccgaccctgggctcggggaaaagaggtccgcgttccccccgcggcagctctgtttcccagcagccggacagcccccatttaaagccagccgcctccccagtcccccgccctctaggcggggcctccgtcctcaccttggcggctgcgcgggcgcccgggggcttcacatgccggggaggagcgcccggcgctggagcaaaagtttgcgcgccggttgggcctcccgggccgctgagcagaggaccaggagcggcgtcctcgcacggggcgcagggcgcggtggctccggactgcgcctagccgcgcgcggggcgggaggggcggcaccccgctcccagggccagggctggccgccgaggcggaggcagagggcggggaaagtctcctccacgccgcctggagccggccgcgcgagccctccccgggcccgcgttggctccccgcctttcctggtggcgccgcgcggctgcccggggcactggggtgcccgagctctctactaccctcacgctggcccgcgagaggcagcggcgggaggcgccggcagggagctcccgctggggcagcaaagccgtgggtggaggcgaaataaataatccacgaaaaaggaaaacagacgtgagccgagccagagcctctcccgcctcccgcccggggttgcgctccccccgccgccgccgccagcgccgctgcagtgattcctcgtctccatctagcgaggctattgtgtattgggcgcttaattatttattcaccctggaggccgaggattcccacttccatggggttttggcccttgcctgcgcttcccccaagcctctcccgaggctgcggaaaggtggcgaggactgacttgagacccttttttgcgctccatccttgaggactctccccgccgcactccccgcaggctctcccgggcgccggggctgaaaggtg

SEQ ID NO: 237687 - DNA, 245 bp, Homo sapiens
  chr14:94405738-94405983
  hyper
ggggctgatgacgtcgcggttggggtcggcgccgtgttgcagcagcagctcggtggcgtacacgttgttgttgaccaccgcgaagtacagcgcggagctgcgccggtcttcgtagaggcgcgcgcgctcgggggccagcggcgtgttcacgtcgaagcgcgcgctcagcagcgcctccagcacctcgtcgtggttgcgctcggccgccaggtgcagcggactgacgccgctacggcgtatgcgcg

SEQ ID NO: 237688 - DNA, 260 bp, Homo sapiens
  chr14:94492880-94493140
  hyper
actatggtcagtgatcgtgggggatcgcgaagggggagcgggcagggggcgcggtgggcggggtcgctgccggagcgggtgcacccgcgggacgggggtcggacgcgaggctcagcccccagctcgcccccgccgctttccgaccccctgaaatacggagtccggacggatactgagggccaagtcgcgcccccctgtaccccgtggatgtgcagctgaggaggtccagctcggccccgagcccccgcccccagcgtgtc

SEQ ID NO: 237689 - DNA, 260 bp, Homo sapiens; identical to SEQ ID NO: 203729
  chr14:94547568-94547828
  hyper

SEQ ID NO: 237690 - DNA, 100 bp, Homo sapiens
  chr14:94595900-94596000
  hyper
tggtgaggccgtccgggtcccaacttggcccaggaaatgacagcgttcttggggtgttacttccccctccatccagtagggacgcgcctactctgcccta

SEQ ID NO: 237691 - DNA, 181 bp, Homo sapiens
  chr14:94889857-94890038
  hyper
agcagcctcactcccgctctctttcctcactttacagccccggtcttcaagagcggctcggaccttaccctcacaatgggccacaggaatttatatgtcccttgaaagacctgaaatgacacggcagtgtctgaacacacgggggcgcgctaatcacctcgttttagaagaagtcccaaag

SEQ ID NO: 237692 - DNA, 596 bp, Homo sapiens
  chr14:95233528-95234124
  hyper
caaatccctgcagccggccgttgccggaagccaagctggaaagctctctaagccttagctttaagtctataaaatggtaaaccgaagaaagttgaaagccattcctgctggcccttagtctccactttcatccccacgacggcctgggaaaccatacagagggcaggctcttgtcttcatccctggcccaggcgctcatgcgcaccgggggccttctccaatcgttcataaactgctcaccagcgctctgggcgcgttcccgggagctcccttctccgcccagctggtgcagaggaaagacagtctggggaagaagcaggaggtgtcggtactgccacctagaagtgaccccaccagcggtgcgctcttagacaagactggccttgagtgcatcacgtgcggccctggtcactccagatgcccagggagcagcacctggtcccggtcagccctagggcgcacagctcagaaatgccagagcagaaacgcttgccctgggggaagaggcaactcgcatgtggagctgggcagctggagcatctgtggaagttccaggaaagcgctgggggaggtggcatgcccgctgcctaattccc

SEQ ID NO: 237693 - DNA, 2302 bp, Homo sapiens
  chr14:95234592-95236894
  hyper
taatttaactataaatactacggtgggggctagtcgcgggcggcctcgggctgctgggctgtgcgcgccctgaccccagacgccgaccctcccggctctgtacactatttacagctcctcgttcctctttctcgaccccctcccgcaaggcagcgcgtgtgcaagaaagtagcatcgtctgtctgtgcaagtccttcgagttaggtaagtaatacgggcaagtgtcccgcggccgtcagctgtccgagtccaaatcgcttttaccttcctcttccctcttctccggtgacgccttcgacgacgacgtcttgttccacttctccgcgttctccgactcctctgatgaggaccgcttctgccgcctccatttggcgcggcggttcttaaaccagacctgttgcgcaacggaggacaaaacagttcagatcaaaggcgcgcttcccccagtcccggggcacccggggagcttggtgtggcggcgggacaccccgcgcaggccaacaaaaggaggggagccgctcgctcccgcttccgcgttttcattcaacttcctgggcctaaagcgccctccagcagcctgcgggccgccatcgggatgtttttaaagtgcggggagagccaagcagggctgggcaaacccgactggggccccacctcgcggggaaggaccgctaggcgcccacggcaggccccggcgcctacctccactttctcctcgcggaggtgcactttccgggccagctgctcgcgcgtgcccacgtccgggtacttggtctcctggaagaggttctcgagagcttcgagctgctcgtcagtgaagatggtgcggtgccgccgcttccgccgacagtgcagctggttgagaagctgcagctcggtgcgcgacagcgtgcccacgttcatgtagggcagcatctggtgcggtaccggggacaccagcaccgaaccggggccctcgtagcctgcgacagagtggggcgcacggtcagccgcccgccctcgccaccgcacgcatgcacgcccgccagcccccgaccctcttccacttagaagtcgtctgcaaggggatgctgagaattgggggtgcacgggaatcaggggtgcagggaaaaggaggaggcgtgttagagcatccatccgcacacccgccaaagccagtaagagaattcaaaacaaaacaaaacaaaacaaaacccagtttccccgggcaggcactgaattccagttttcgcgaactctggccaaaagtttgcagcaagaagtttgcaaactcctgcgcccgatcggcaaaagcggaggggggagttgcaagaggagcaaagtttgaggaaggtgaattaaccaaccggctccatgggctaaggaccgcagtgggcggcagaggccggagcgagcgcgaccctacctgggggcgtcgggacgcaggagcactgctgggcgcccagcggcggcacggccccgcagcaggccgggcccacgggcgccgcctgcacgtgcagctgcccgtagaagtagttgttgtagccgaggcgggagccgctgaccgcggccgggaggcccgcgccgccgggggccacggggcgcgggtagaaggcgccatagtccgaggaggcgccgccgctggcgccgtagagcgagtccccgtgcagggccgggaagacgacgggagccgccgcgctgtgcgccaccggcaacaccgagtccttgcagcgcggccgggcggctaggatgttgtcgatgctgaacatgctggcgggcatccccgagccccgcgtcgggaccggggggcggcgggaacgcgccgaggacagagccttaaagtgggggggtccactctcctccagccgccgaccaaaccgaaagagagcgccggcgagcgcgcagccctgcgcccctccccgccccctgcgtccgctctccctcctcccgccctcccctagccgcagcgttcgctgaactcaacccgcgggtaggacggagctcagaccagctgaacctcttgttggttttatactgagtcgacgtcatcctggatttagttcctggtaatatgcagatgacaaacagaaccagatttggccctttcttttcctttgggtgggggaagagggttggggggagggggagaggtgccaaggggagggggttacaaggcctgaaaagagattgtggattgcgaattaatgaaattaacctaatcttttccattcggcagccgggccgcgggccggccgagctgggcgggcggcctaattgccttggttaatctcattaattcctttgtgccgccgcagttaacaac

SEQ ID NO: 237694 - DNA, 648 bp, Homo sapiens
  chr14:95237576-95238224
  hyper
taggcctgcccttccgcctggcaggcccagagtggattccctgggccgcagtggcctggacgatggccgggtctgatagcggcaggcggccgcgatgatttgcgggattctcggcatggcacggccagcctgcccgagccacgggaggcgcagccagcccaccactcacggcaagcaggcggccgagcgcccttcgagaaggtaggcgacggtacgcgcggaacaaaagcagtcccccagatcctgtggaccgggtgcaagctcccggcttgcaactcaggccactccaggggaaggggcagtacccgacccaggcgatacccccgagagccggagagggagatggggttgcgggagacctcgggtttcctgaaggaagtccgcctttaactcacacctatttttcgcgatttctctcaggctaattaaccaagggaccccgcaaagttgtctgaagtcgccgccgtaaggctaagtaagtgggctgcccactccccggctcaggggcaaaggggaaagcccacttgtcaatttctgttcgggtttcaaagagccattgcacggaggtttagtcctgtccgagggcactactgtggcggcgcgcagaagcggcccagtggagccaggcggcgacgtttctcctcctag

SEQ ID NO: 237695 - DNA, 995 bp, Homo sapiens
  chr14:95239329-95240324
  hyper
cacagctccagacactctgccggagctctaggggagctcacccctgcgcggcgggacctcccccatcgggttgccccttcaatctgcagccgcgcggaggcaggccccgggaaaggcagtcggcgctcggtgctcgcactgcgcctcggcgggcggaaactcacaagtgtcctcaacgtgctaaacaaaccatcagggccccgcatcgcctggcgcaattggaataacaaatgcgacgcacgcaaattgtccacctcgtgttgctaagcgattgtttgtcggccccgcacgcacagctcagcatgggaggaccgcgagcgtccagaggcagccggcgagcgcttaggtcggaaatgcagtaaacatgccgctgattttccctattatcacccaaacacgatttcacacaaagcaatcaccacgcagaagtctatgaaaatgtgtttgttgaggagtcactcgccccagtaatagtcctcatttttaagatattaaagaatagctcagcggattccacatgcataaggtctatttgccgttcggcatctgtcacggcgcttttgcactgcggtcatcactaaattgattcatagagtgtagattaaattgcttctctgatttaaaacagtgtccaactttggagtatgcgtgtgagtatcttctcccgccccaaggtatttttgtcagggagaaaactgtcgccccactatccttacaccccattccgcataactgtaaaaaaataatgcatcttcgaccccaacttcttacggttcgtttcaggaactttcttaattctctccgtctcctgcccggccacagagcagagttcacaatcggatgcgtttaagtcggatttttcgtgtcatgtgcaaaaagccggtgtgtccttttcaaggtacggagccctcatcggagggcgcattagcggggtcagaggaattaggagcaatgcgcagagccccctgcagcccgcgtgctgcgccgagacctca

SEQ ID NO: 237696 - DNA, 190 bp, Homo sapiens
  chr14:95240354-95240544
  hyper
gtttgtattgggacttttaaaaaatccagtctcaaagctaagtgctcaaaccccgttccatggctctgctgctttctggaggacatctccggtagccccaggggattgtccgtgtgaggttgggtgggtggagtagagccagaggcgcaaatgcctcctggctaaggggcagcgcgcattagagctgggt

SEQ ID NO: 237697 - DNA, 163 bp, Homo sapiens
  chr14:95240581-95240744
  hyper
tagctgattttttgctagaagttttccaacgctccaaataaaagcacccgatcccctaaggacgaaataatcaaggtgttagggaagctcaacagaagagaagagacgagaagagaagagaagagaagaaggggctatcgaaaaatgacgtgttcccaaggcc

SEQ ID NO: 237698 - DNA, 253 bp, Homo sapiens
  chr14:95241783-95242036
  hyper
ggaactgcaaagtccgtgcagggcacagttcagagccctccctgggctgccagggtttttgaaacacatacatacctgcataaacccatttgttgctaatatatccgtctcccgtaaataagccaaggaatgtggattggactgcgggtcaccaatggggattcaaagcgtcccataaggttgccctcccaagtgcgagaccgggccacacgttgatttcctgcgtactctggtggggcgagcgctgctcctt

SEQ ID NO: 237699 - DNA, 299 bp, Homo sapiens
  chr14:95623685-95623984
  hyper
ctcgccgtcgcctcgtccccgctgtcaggttactccattcacctgggcctgcagcagcctgcgccgcgcctccgcctcgacccctcccgccggcgcctgcggagactgcgcagcgcccggctggccggcagccagcgcacggcccgcggcaacggcgcacagccgcttggagaatcccactggctcccgcaccgcccctccgcgcccccacgctccgctcgccccgtggcggcatgagagcgagcctgtgattggacagggcctggcggtgaaaggttaatcccggccccccagccact

SEQ ID NO: 237700 - DNA, 116 bp, Homo sapiens
  chr14:96001254-96001370
  hyper
tgattggtggaatcgagtaattactgatcagtattgtccaatcacggagggcagtttagagccggcccaatgagggcctccagggggcgggtcggactgccgcgggccggggagcg

SEQ ID NO: 237701 - DNA, 378 bp, Homo sapiens
  chr14:96343295-96343673
  hyper
atgagcagcgcgcacggggtcccgcgcccggcggccagccctatccggcggcggccagcgggtcaacgctgcccgggagaatgaggcaggagccggcggcagcctcctttttttccttctcctcgccttcctgcggctccggcgctccgggtccgggccgggctgcggctctgctgcgtgccccgcgcgcccctcaaccgcctccggatgcgcttctcggtaagccaggccctccgcctcgcgaacaaagctcccttcgcagggcccggaggccgcctcagggcccctgtcctaccctccttccccacttacagcctggaaacattcggggcttccgattgaatcgttcaatttcccctgccccgaagccccgcctgg

SEQ ID NO: 237702 - DNA, 299 bp, Homo sapiens
  chr14:96505313-96505612
  hyper
gactctgggaggagcgttggcgtggaaagccaggtcactccgatcttggtcctcaggctcgggataacgtgtcagccccaagagagcgctgcccacagccccgggtgggttgggttcaactgcacggggcggggcgccaacagctcaggacttgggttgcaggctggttcttgcaccaaccagcggggcggcctcgggcctcagtttccccatcccgcccacgaagggaggcgattgcgagcgcttggggtttctgacggaccccgccccgggggtggggcggggagtggtcacgtgga

SEQ ID NO: 237703 - DNA, 107 bp, Homo sapiens
  chr14:96506092-96506199
  hyper
gttcccgcccgggcccctctcgttggcaggaaggctgcgaggagcctgggcagcccgagtcgcccccttctgcccatcccccactgctgtcccccttctggggtccc

SEQ ID NO: 237704 - DNA, 130 bp, Homo sapiens
  chr14:96670922-96671052
  hyper
ttttgccgtcccacgactccaacgggcagccgggctacgcaaacatggaaatcttccaagagcctccctggcccccagggctcagagggtggcagagcggagagcgaaggtggccgcagccttcccggcc

SEQ ID NO: 237705 - DNA, 56 bp, Homo sapiens; identical to SEQ ID NO: 203740
  chr14:96678043-96678099
  hyper

SEQ ID NO: 237706 - DNA, 152 bp, Homo sapiens
  chr14:96968600-96968752
  hyper
agggggtaattgccgggccgcaggcggccttaggaactccgcttcccgtgaggcttcgcggcggacggcgctggtgcgcaggcgcacgcacggcgtgcgtggtggcgtcagcagttctagaacgttgctgtggtagcgctcgggcgccatgt

SEQ ID NO: 237707 - DNA, 114 bp, Homo sapiens
  chr14:97050713-97050827
  hyper
aaatgggggcttggttgggccggcctgtgggcagccgcaaaggaatcttcctggcttagcggcttggccggctgagggagccccggagcgggcgcagcactccctgctcttatg

SEQ ID NO: 237708 - DNA, 556 bp, Homo sapiens
  chr14:97058807-97059363
  hyper
acccggagctacgacgacttatgagatgggcgactctaggaccctcattttccagacgagaaaacggaggcacctgcaggttcagtgacttgcccaaggtcacgcacctggtcagcggcagagacaggactccccccgcccgggcccgcggattgccgggtcggttctcagtcaccgcacaggtgccctggagagtgcgaccaccccctgccctccgccccgcgccggccctcggctcagtgccccgcccttcctggagcacggcctgcgcatgcgcgcgccccagggcccagccctgttcctgctccggctcctgcggggatggatgcttcacgcagtaagcgagtaagcgagccctggagaccggggccctgggtgtgcggtcggctcagtgccacgcggtgagataggcatggttatcaacccacgccaaggcggttgtgtacctggcatagaaaacactgctgttgaatgttgtttccatagtcattcgccagcgtccactgatgagaggtgccaccacggacacccggccttgctccgtcgaagctttggt

SEQ ID NO: 237709 - DNA, 79 bp, Homo sapiens
  chr14:97207757-97207836
  hyper
gcaccctcccatcagccatccgggccagcgcctccagcaccccactgcccggctccgcggcaccccactgtccagcccc

SEQ ID NO: 237710 - DNA, 182 bp, Homo sapiens
  chr14:97263999-97264181
  hyper
caggccccgcaggcgcccccggggatgcctggactggccaggccggcccccatctgagctccacgttctggacgcgcgtggtgtcgcggccgagctcgcaaacgccgcctcgggcctcaccgggaagccggttctgtcaggcggggctccgggtgaacagcgcaggcgaggcccctgccccg

SEQ ID NO: 237711 - DNA, 284 bp, Homo sapiens
  chr14:97499701-97499985
  hyper
ttcgctatgcggagcgggcgcgggaccccagcaggtgagggcccagggcaggtgccttccctcgccccggctcccgccccagctcctggccggcccagcgcgtcctgctcccgctctcgccgtgctctcggcgctgcatgtccccggggcgcggcgcagcagctggtgccgcggtgggcatctgttcggcctcctctgtccccacgcgtgacctgatcgctgcgacagcggaatcccacggtgcaggcccagagctgcgccgagagccgcgcgtccagctcctc

SEQ ID NO: 237712 - DNA, 520 bp, Homo sapiens
  chr14:97684972-97685492
  hyper
gtgacgactggattcggaattttcctctcacttcgtggtagtgaagaatttaactacaacagtaacaacactaataattctaaaagccgtgggaggtcagagcgggcgctgcccggcgtcacccctgcagcgtccggatcgctccgcataggcaggggtggtgccccctccccggggcacagaaacgccacatcccgggggcgccgcccagaggctgtctctgtttctgtgtcccttcatgaggctctgtcccacaaaggcagcctgagccaggaccctaaagaggcctggtcatcgggaccggagggagttccgcttcccaggccggctctgcaaacgcgagcctgcgccaaggcgccctgcgggtttgctggtggcatcgaggggcagcgcggggccagcgctgggagctccgaacccacacgctccggccagctgcccgggaagcgcccaagcacacgtcccgagtcccagattggattaagttgcccaactacctactttttctctctttaaggag

SEQ ID NO: 237713 - DNA, 560 bp, Homo sapiens
  chr14:99736020-99736580
  hyper
taaaatataacataaatattcggctctcggccgcccggcagccagtcctctgcggtgactgggcgcgcagccctctcgagctccgcgcgggcagcccggccccagcccggcgaggtgcgcggcggattgcaagcatataacctgcccgcggtctcgatggcacccagaggatgttttatttctattgcagttaaaaaaaaaaaaaaaaaaaaaaaaaaaaaaaaaaaggaacggcgacccaggcaccgcgagagaaagaacggcggggaaatgttcgcgcgcagcgaagaagccgccccgcgggctgcggcgggcggggagcgccgcaaagccaccttcccggtgcaagtgtgcggggactcggggcgggttcccctgcaaacaccgtacctggcccgctcgcgctcgcttttcccctctgctaaataaacccaacagggacggtggaagctgctgcttgtcttgccccgctgcctgactttgcccgcccagccacatgcttgaaatcgacacgatttcagccggtggatttccactgcgacctgccttgtttatttaga

SEQ ID NO: 237714 - DNA, 1179 bp, Homo sapiens
  chr14:99736842-99738021
  hyper
ccggcaaacagccgcgcagctggattattttgcaaatagcaggaggaggggagagaaaggcggctgcggaatcctaggactggcgcggccggcaccctgctgggccgggcgcagggaccggggacccggagccggcggccgcccctggccctacggctcccccagccggaacgcaccccgctctcctccgcccgcgccgtcagcgcggacccacgcgctcgccaacttttccccacttcccggctccccctccccctccgctcccccagccccctccccctcctctccaaaccccgccaccagcgccgccgccgccacacacgccgctcggaggggcgagcgtccagccgggctcggcgcgcacacacacacactcctccagcctgcatgccccctccccggcccggagccggctccgcaggcccccgagcccgaggcgcgtccggctgctcggcgccccaactccccgggctgcaaagaaactttcctatggcccccgccccccgccatgctccaggccgacgccgtagactctgccagccagcgggcggccccggcgcctggccaggctcggctgttccgggctcggtgtccccagccccagacgcccggagccccatctccggcccctcgcgcgcactccgcagacacttacgggtgatgagctccctctgggacaagtgctgcgggttgccctgtttgcggcgggacattgccccggcatctattctggcatcgcccggagagctgcactgatggggggagccgggggagggggtccgagccgccgccgcgccgctgccgccgctgccgccgccgccgccgccgccgcacctcctcctctgcccgggttggtgttttttttcccttcctctctttccctctcttcctcctcttcttcttctttattttgctctttcttctatgctgttttttgttttgtttgcaaaaagaaaaaaaagggaagaaaagcaagaaaaacctctcgatctaaaataagaaaaagaggcaaaaaaaaaaaaaactgctgttgctttccgcggactggctggtttctttaaaaatatattctttcgaaggaaaaaaaatctcttacacttcttcaaactgcttggcctcttgcacttgcaaatgtcttcttgaacttaaactgggttttgcaccggctcctgacacttt

SEQ ID NO: 237715 - DNA, 606 bp, Homo sapiens
  chr14:99738250-99738856
  hyper
tttttgttttttctcggagactgacccttccgaggctctggggggacaccaggagaggctccttcccagttcacctggcaggctggcgccggccggaggggctgccgagtccccgcgagcgctccccagcgctcccctggcgccgcgggcccggggggagcggggcggaggggcggctcgcccagtgcgcctgggtcggtgcgggcgcagactgggagctatagattgcaacgtgaagatggcggagtccgggttctctgggagctctcggtctctctatggctggggctgcctctgtacaatgggataaaattcaagttcaagtgcggacgtgacgtttaatctgcactagagacaaaaagacccagagagtcggagcactgggggcgactagcggtggctttttaacattgtaccctgtaagagaacaagaaagcacacacagagacacactcgcgcgcgcgcgcacactcacacacacacacacacagtcgccagttgcgcacacccgcagcccaagccggacacacgtgcaaaccgcgtttttgtgcgctcatctcccccgagccccggctgcgcaacagcgggagggggttggggggggcc

SEQ ID NO: 237716 - DNA, 1919 bp, Homo sapiens
  chr14:99739438-99741357
  hyper
accggggcgctccacgtgggagagggacttggacttgccagcccaggagtaggtgtggccaaatctccgcagatactcgggtgggtgactccaggaggcgcccctgacaatcacagcaacctggaagtcacaccccgccccccgcgctcctcggcccagggtaggacttggaaatgcctgtcagactgggaaggacgcagctgccttgtcagccgtttgatctccaaccggcgaggacaagaggagttgtggggcctctccgtggcccggggacaaggccagaccacggcccccgtggacaccccccattccccaggctgtggccaactttgtcaatttgatgacctggcctccagggctgggcgcgccacgcggctggcctcctctcccttctcagggtttctctggaggcggccagggcgggtcggggcctggctccggctaggcttcgcgggcgagtccagctgcacccaccccactccgcccccaggcctggctccggcggcttcacccgggcgcatggcgaggccgtgacgcctcagcgccgcctccctcggggccttttcctcggggggcacacgggggtttttgttttcgtcccgaaggtcttgggtggggcgatggcaccaacaatttaacagcgcccagagtccgtgagcgagaacagaaagagatcccttccagtcccataccctaaaaaataataacaataaaatgtgccctggcttgcagttctgtaaactgtgggctccacggtgggcggacgcgaggccgagcggatggagaccgggggcggggcgcggacttgcacctcctcgccctggccgggcaggctgcacccggctgcccacccccaacaccccacctccacgtggtccaaagtctagtagggcctccctcttctgccatccctctcaccgggaaaatctttccaggaaagtggcttaaaaaaaatatgcccacacgcacctttaataaacttctttaagacattcataaactggccatccctactcgcccggactctaaatttgaaagatcaactcgcgctctctttctgagaactagcgatgtgaagcccagagagggtgagcactttgccctaggacacacagcgcgtcagggacaggtctggacccaaaacaccgcggcgtgcctgcagcccagcgccgccggcggtccgggactcgaaatcccgacccacgaccctcaccttcctggggttgattacaaggaaggcagaccccgccagtggcaaggcgggacggggaggacccctcaggaaaagggagcccctccgcgagcggcgcaagggctctcggagtcccagctgcagccgccaccccgcgtgcggtaaggggccgtgcctggggagggggcaccccctccccactcccagcaggaagtagctggcgtgggccggcgcgtgccccacggacccgaggagcacttcctcattggccccgcgctgccccgacggcgggaagagggacgcgcgggcgggcggacgcagggccggacacgccgccgcccgccggcgcgctccacctcgcggcagccggggagaggctgctctgcccctgcccagccttgagccggccccttcgccctcctcctcccccttttcctccgcatcttcctccccctcctcctccttctccccctccttcccctcctcctcctcctcctcttctcccgagaggcggccgggcgcaggcagggagcgatcccagctgccactccagtctcctctttttccctctgcccgtctggcacgggcctcatcagcgcgcaaagctgttaatgtctggtctcacagctccccctttagtcttgctgcgctccatgtctcacgttccaagccggatcaatagccgcctctcggccgaccttgacctctccctcgaccctgccaggct

SEQ ID NO: 237717 - DNA, 128 bp, Homo sapiens
  chr14:99947369-99947497
  hyper
ccgggggcaagagcggccggctcagccgccgccaaccacgatgtcgcaactggctgcgttcgcccccgccagagctttgattggacgaatctcgacccgggccccgcctacgcgcccaagttccgtta

SEQ ID NO: 237718 - DNA, 555 bp, Homo sapiens
  chr14:100069746-100070301
  hyper
cctggctgtcgatggagctgcgggagccggcgccgcccccgccgccgccgccaccgcttgcggcccccgtcgccgccagtgccgcgcgctcctcgtccagcagcagcaccagctccttgagctccaggttctcgcgcagcagggcctcctggcgcgcctcgagctcgcgcagcttctgctgcgagcgggccacctcgtgccacacggcgccggccgcgtggcgcccgaagcgctgccactcgcgcgccagcttgcgccccttctgccggtcgtcgtcgaggaagcagcagagctcgcgcagctcctggttgtcgtcctgcagccgctggttcacgtccttgaggccgcggatctccagcaggtgctgctgcagccgccggttcacgtcgcgcatcaggccgccgtgctccagcatgaggcccaccttctcgccctcggcgcgccgcagccgccgcgccagctcctccttgctccagcgcagcagctcctcgtccggcacctggctcagctcctccgacgccgccgccgccgtcgccgcgggcttagccatggcgg

SEQ ID NO: 237719 - DNA, 50 bp, Homo sapiens
  chr14:100070541-100070591
  hyper
tctggagaagcaggcggaggcccgcccccggcccagctcccggagccccc

SEQ ID NO: 237720 - DNA, 326 bp, Homo sapiens
  chr14:100071011-100071337
  hyper
cgcgcgaaaatagcagtcgagccccctccccggcccgcgtccccggtcctcttccctctccccagataaacaaatacccacgatccgggcgacggcgccccttctccctcccgggggcaccagagttcagggcagtcggagacacagcgaacaataggactgtgacatgggggtcgctcttccccgcagcagggcggctctttgtccccttccctgcccccaggctcctccgcccccgtccccacccgggtcccctgccggagcacgcggcggggctgcgtctccactcctagcccagggctgagctaaacgctggcgtccgcgcc

SEQ ID NO: 237721 - DNA, 54 bp, Homo sapiens
  chr14:100111857-100111911
  hyper
gagatcggaaccccgcgggggcgagggccaagagtgggcggcggactcgggaac

SEQ ID NO: 237722 - DNA, 94 bp, Homo sapiens
  chr14:100125687-100125781
  hyper
cagcacctgccccgcggagcccgtgagccctggctcagggcgaccccgagccgcgccctctcccaccccgcccgcaggtcggcgctgctgggca

SEQ ID NO: 237723 - DNA, 76 bp, Homo sapiens
  chr14:100150429-100150505
  hyper
gttgtgattggtgaagaccacatgctcggggtggggcctgggctggggcggtgtggaggttggggcggagctctgg

SEQ ID NO: 237724 - DNA, 949 bp, Homo sapiens
  chr14:100259351-100260300
  hyper
cgcccgctctctcccggccttggtctttgtccccgcgcccccgcaagggccgcccgccgcgccccgcagcccctgagcccccgtgcgcggaggcggggcctggccaaggggacagcgggcggcagacgcgcccctgcggctcccaggccgcccgggccgcgctccccgcggggaaagaggccgcaggcgcggggaggctcggccccgccccgccacgtccccctcccggcccgggccccgcggccgccgaggccgccccctcgcgggcggagcgggcgctgggctcgcgcggctgcggcggcggcggcgggcccggggttgccatggtaaccggcagcagcagccgccacagcagggccggccccagcgccagcgccggtcgcggtcgggctcagctcagtgtgtggtgagcggcggcggcgcggccgggccggggagcgggcgcggcccggcggcctcagcatggaggacggcttctccagctacagcagcctgtacgacacgtcctcgctgctccagttctgcaacggtgaggggcggccgcgcggggccggggcggcgagcggctggtggcgggcggcggcgacggcgacggcggggaccaagccgaggggccgaggcccggcggccgcgggcgaggccgcgcaaagttgttgcggaggggcgcgcggtccccgttcccgccgccggcgcattgtgttggagccgcggggccgcgcctcgctccgggccgccccgggctccccgccgccaccccggctcccggcactggcgcgcggaccccgccggctccagcacccgcggagcgcgcccgggcggaggcgcgtggggcacagggcggcggggaggcccgggcagcctccgcgttccggggaacgtgttgcttttttgcttcccgacccacatctgtttggaaatgactggatgaagaactcgggaaacaaatcct

SEQ ID NO: 237725 - DNA, 66 bp, Homo sapiens
  chr14:100438960-100439026
  hyper
agtaaagtgcaaggcccccaaatgtaccgctcgttgatgtatcacccagctcgggagcctgctgat

SEQ ID NO: 237726 - DNA, 197 bp, Homo sapiens
  chr14:100625299-100625496
  hyper
tgcttttttcaaagaaaacacgcgcgcctctcattcgcgtttgctcccttcccggcgctcatccgccctgaactccagcctggggcgcccgtggccgcgagacccaggggctctgagcgcagcaggcgcccagtgactgcgggtggaggccccgcgtcgcgcaagctgcctccgcgccagggagcgcgtgcgcctcg

SEQ ID NO: 237727 - DNA, 224 bp, Homo sapiens
  chr14:100688018-100688242
  hyper
tggcctcactgcctcggcaggctttcacttcaggagcattgattgagccgctctttgtaagcagcagtggaatcaagtagcaaccgacacaatcaacagggagagataaccaagcacccaaaccagcacagaactgcaaactgcgctgctatgaaaacacagatggggtgagggagaaggaatattggggagggtggagctgcccggctcgcggtaagcagagg

SEQ ID NO: 237728 - DNA, 94 bp, Homo sapiens
  chr14:100772216-100772310
  hyper
cccgggacctcggcgcggggggcagtggggcatcctcccggcagtcctggcctccgctcagccacggtgctgccccggcgccccagacctcccg

SEQ ID NO: 237729 - DNA, 1078 bp, Homo sapiens
  chr14:101033469-101034547
  hyper
tgccgcccacacaacgcctcggctcaggctccggaaggaaaacacgggaggggtgttcccaaagtaggggtcagggtgccaggggaagtcgtggaggaagtggcaaatattcaaactggctgatcccaggcctgccgcgcaggtggtcccgtgaagtctaccaaggcttaaagtttggcaccgggagggaggccgcgggggacactccccagaagctgtcgcgggattcccccaaaatggctccaagacgcggctgcctggtccagccgcgaggactccatcccccacccccgccccccagaggcggacacttaaaagctcagagccaggcaactggcagcccgggggctggggcgggtggtggttgggggtggggtggggtcgggggagagagcgccggggcagtgcggaacggcacgaacggaacccggagggtccccggggaccagcgagagtccagggcagggagccagaggggcgctgaggaccgcacaggaccaggcggccccgggtagggggcagcccggccctcagtggcgctagccccagcccccgccgcagcggcccgggccggcggaggagccccgcgcgaggctccccagcgcctcgcggcgcgcacacacgcaccacacacacgcacctggcccgcagccccgccgaggccgcccgcgggccctgggggatgcgctcgggtggagcccccttcccccgccttccccagcgccctcacccccgacccggcccccgcgagccgcggcacgggagacgctccactcacctgagtttctccatgtctgcggcagaggcctgcgagaaaccaaacgagagggtcagcaggcaggaggcgtgcgctccgcggccgcgccgggcagagccgggcacagcgggcacggccgggcaaccccgcggggccccgtccgtgggaagcccggcgccgcgcgtccccagcttccagtcccggccgcggcccccgtgactcagtgggcgcgccgggccgcggccgagtaacaggtgagcccgcccgggccgccgcgctccccgcaccgagttacgccccccggggcgaagaaggggccgg

SEQ ID NO: 237730 - DNA, 130 bp, Homo sapiens
  chr14:101053020-101053150
  hyper
aggatagtacctgccgcgaggtactgaatgggatggtggtgtccgaggttcgtgcgcgcccacgcgctgcaaacgctcaatgaggcggccccgggtccagcctccttccggctcccgggcctttctccgg

SEQ ID NO: 237731 - DNA, 401 bp, Homo sapiens
  chr14:101543871-101544272
  hyper
ataaatgaagtgcgcgccggcggagtcagtaactcactgcgcggctcccggcaggcgggggcggagtgggggccgcagaaccggacgtgcctggcgaggttcagaggcgctagcggtgtggtgggtgggcagcgccgggatggctggagggaggggctacggggggaggcgctgccgatcccacactgatctggcggggaggagggaggggcggatggggtttgctggagaacttgaccttgcttcgctcccctcaaggggcagctgctgggagaccaagtgtcaccggctggcaatcagggccccaagcctggagacttctggacaagcggaggcaagccgaccatgacggcttgggtgcagggagcaggtgtctgagcctttgacgtagacttcccgag

SEQ ID NO: 237732 - DNA, 100 bp, Homo sapiens
  chr14:101923238-101923338
  hyper
ggggttcaaggccgcgccgttgtgagtccgctgcggaactaggaactgaaaccccgtggttcccaatgagccagcgaaagtctgtcgaagtattgagcac

SEQ ID NO: 237733 - DNA, 622 bp, Homo sapiens
  chr14:101923607-101924229
  hyper
aggggagacggggcgggtgtgaagtctgtgccgggaaaagaaaaatatgagtgttctcttttgtgtgcgcacaaacagccgagcgcggggaggtcgggcccggggtcacgcggctccgggctgcagctgccgccgtggggcggggggtcccaggcggccaccgggcgtcgcggccgcctgcggcatcagcattccggcggcgcgggcggccgctgtcctcgcgcgaccccagcccgtccagagcgcgccccggcaccgaccctcggggcgaggcgagcgcagcccccgctggccaacaaggtaagcgcggcgcggggagcggtggccgggagcctgggcgccaggcgacccctcgacagggcgcacggaccggttctccgccgcgcgggtcgatgaccgacggggaggcccgagtctggccccgacgccctggcccggtgtccccgacgcgcctggagcccgggagggaggcgcgggcctggcctgggcccaggaggatggagcccgactcagggccgtctctccccgcttgggggtgctcaggagggcccagggtacctgcgcgggcaccttggcggcgggtcaccctccctccgagccactccgtccgtgggcagcggcc

SEQ ID NO: 237734 - DNA, 128 bp, Homo sapiens
  chr14:101924259-101924387
  hyper
gccctccgcgagcccccagcctcccctcgagcgccgcgggagccccaggtgcacacacgcaggcctgggccgggcctccaggcctctgtccttcgggcgggctgggaggtggcctggcgatgcccgcc

SEQ ID NO: 237735 - DNA, 1495 bp, Homo sapiens
  chr14:101924417-101925912
  hyper
gtcggcgaggccatcaaaggccgggggtggcggcccgccgcgttgcccatgaccaggccgagggcatgaaaggatctttatcctccagtgacattgccaggccggcgcttttctgcggcctccccctcccgcggccctaattggggccggctgctaatgtgattaaaggccagttaaacgtttctccgagcagggggtgggaagaggccgagacccctgccccctccccagggtcacgccaggcccgtggtcgggggtcggcgacggtgccagcctgggacggcctggccaggtgcctgccgattgttcacccccaggcgggcgggccggcgggctcccggggctttatgtaagccggtgggctttgggcccgaccggatttagggattcttttcgcacagtttccattttctggcctttggaactgcgccctaagccctcggggccctccccctccggtgcccggcgctggcggggcccagccacgggggcgggctgggggtgccaggctttgggggtctggagggcctgaagcaggtcgcgttgggggtctcactacctaagacagtgactcaggacagtgggacctgggtgctgtgctgcggccaggcagagcctgcgacccgcggcgccccccgcggcctcggcgacagcccggttcccacgtcggcgacggcgtgggtggtcccgcccgcccgggagggctccgagtcttggccgcccggggcgcggggcctgagagcgagtgtctgcgccgcgctgcccgccgcgccagtttccgaggtcgcccgcgggctcatgccctgcgccctggggccccggggaccttctccaagccggcctgacctggtggaggctgtgcgctgcgctcggggaaggccgggctggtgccgggggcagcgggtcccagctctgaagtgccagcgccggcgccccactccccgcctgctacggtgctctcgcccggaaaggcccgaggccctggaaggagccccgcgggggggcgccgtctggagcagccctcaggggcgccgggctgccgcgacgcagtggctgtaattgcttcggggtacctggggatcgatggcgtggcccagccgggtgtctgcgcctctgaggttgcaaatctggaaccagttaggatgcgggaggcagataataaaaagccaaatgggcgccaggtggaggagtgagctccgcacgttccatcaggtggcccgggccgcgcgctcgggcggcggcagagtctctggggcactcggggcgggcggcagcaggtgggacccgcggcccgacccgcgctagggccgcccaccccctcggaccccggccgggtctctccacagcctccgtgcgcgtcccagaaggaaaatgctagcaaaccggaaggccgcacggggccgagccggcctcagcccggccaggagaggccgtcggtgccccgaggaggaaggggacccggcccgggacggccgccccgcggtacccaggaagg

SEQ ID NO: 237736 - DNA, 1257 bp, Homo sapiens
  chr14:102026077-102027334
  hyper
cgttccttcgctgccgaaagcgattcgcccgcgctctaccgagcccagccagctcctacctcggcccgggcggcgagcgctgtctccgtcccgagaagaagtttcgcggctggtcccggggcggcaggcgcacgggacgctggcggcggcggcggcttccgacttgggctcagaccccgccgctccagacaagtccccgcgactgcgacagtgtctcgggcagttcagctccccagacgggagacagaccctcgcgacctggttcaggccttgccctgggggacactgcagtccaaggcgaaaggagacttgctcccggcctctgggtccctaggtcaaggcacctccccgccccgccgcccctgagcccaagtcgccaaccccgcgccgcgcgcagcgagggatcagaaggtctcggacgccgcggcagggccggccagggccccacgagttagggagttgccccgcacccctaaacgctcagcacccatttacggttgaaagtacgcacttgacgcgtccgggcgcctccgcggtgagtcgcgccgccgctctcggggtccgcgaaggtggctcagttcgggcgctccagtctcgacgttcccggggtagagagcaacgtccggggacgaacgggacgggtgcgcccagcggccggggctgcgctgggcgaggcaagcggcgagaggggagcgctccggcgttcaggcaacagctacccctagtgggagagccgcccggggccggcgccgccccgcgcccgctgccccgcgccccacgcccgtggcgccccgcgcccgggtcggctgggggcgcagggccggcgccgctttccccagctctccggtctccggcgcccggcggtaacccgcccgcgggctctgccctccgcacctctcagcccggccccggcggccgctgacccaggaaccgcggcgccccgctggaacgagatgggacggggcgggcgcggccagggcggcgcgggctggggcggcgcgcggcagcctcgggcagcggcggggggcgcggagcgcggtgtgcgtggcggggcggtgcggggggcggccgtgtgcgaggcgcgagtgtgagcgcgcgcgggaggcgggcgggcgggctccggcaggcgagcggcgcccgcgggcgagccaggaaggcggcgggaacgcaaagttgcctcctcgctggcccgcgtcctcggtggggcgggagccggggccaccgaagcggcggccgcggacccggcctcccgcggca

SEQ ID NO: 237737 - DNA, 179 bp, Homo sapiens
  chr14:102027550-102027729
  hyper
cctggtcgggctcccggtccccagcggcagcggctgccggagtcccccgcccccgagagctggctgcggggcccgggcccgcccccaccggccccaggcccggccgctccgccctccgcccgcctgcgcccgccctcagcccaagatttctagggcattggccgcgctgctgggtgatc

SEQ ID NO: 237738 - DNA, 257 bp, Homo sapiens
  chr14:102029132-102029389
  hyper
ccgcgcgccctgagcgcagctgggttccaggagactctcagctcagctgagctagttgcctggcacccacctgtcgcgcgcggagagggggttccctgttgcttttgtgtctgtttcctgtccctggtaggggaagtgatgtcgtggatggggaggggtgggcagggtagtttcccccgcttgttttgggtgcacaggagccccactgctgatgacgaactatctctaactggtcttgaccacgagctagttctgaa

SEQ ID NO: 237739 - DNA, 1203 bp, Homo sapiens
  chr14:102029813-102031016
  hyper
tttcttttccctctgaatagcggcaggaattaaacacaaatccctccctcgcgtccccatagtgaccttgggaagcgggacgggaaggagcctaggctggcaggggcgctggaggaggatggaggaggaagagggtctgcggcggtgcccggggcgctcctacaaccgcacgcacccacctggacggggaacttagctgcgggagaagagcgaggtagcggagcgccgcgggatcctggaaagcggcgggagaggcaagggggccctctcttgctcccgcgcgcgcacacacagaccgaacagatgcagctgcccctgcagccgccgatccaacttaactgagtatccggcggtgtgtggagggggttgggtgaggtggagggcgagaggggctttggacccggtacagcctggctcccgaccgctgcaggcaccactgcgcacctgactcctccctggcccccttccggcacctgcaaccttgcctcttgcccacccgctccaggcagctgaggtccgctggaggcgcgccttggcagaggggcgccctcactccagctgcggctcctactgccgggccagcgtgctgctgggtgcgccccctgcccaggacccccctcctcctgtccctcctccgcttccccaagctccagtcaaaccccaccacccgctccgtgctgggaagcagaggtgggaggccgctgggatgaagagagagagaccagggagaggtgaatggtggattccagggctggggcggggattcggggccttaggcacaggtcccctcttgcagtcacggccaggggctcgctctcgcgcaatccccgccctcactgtctcgcctgttgcgcccggagtgagggcgacccgggggacgcgggattagcttagcccgcagcccctgtgccagcgaaaccttgaacattaagtgaaaggtgggggacacagtgaaagccgctgaggcgggagtgtacggatccaggtgaggggactgggcacggcaacttccctggcgcgccaggacaatgcctgggaacccaggattgtcagggtcgccgggggtgggggtgagtagtgtcggtttgcgcgcttggatgtgagcgcgggtgtacatggcagggttgggtaggggtgcagaggggcgcggcaggcaggatggaagagacgcccccgttcagccaacggcgtccctaattctgc

SEQ ID NO: 237740 - DNA, 295 bp, Homo sapiens
  chr14:102031223-102031518
  hyper
agcaaaggagatcgcggcagggacgcggcccggcgcctgggagagtcctccctgacctccccgcacgcgcggctggccgggactggagcttggtggcgcggagggtggcctgggacagcgtcagcctcccggcccagcagagaccgctccagccgctccgcgtccctaccggtggcttgggggtccccttggacgcgccaagcgacctctcctacccggaaagcctgcgccccctgggcttcctggagcttcccagatcgaaactccaaaaagcgctttcgcgccgcagcgccgg

SEQ ID NO: 237741 - DNA, 675 bp, Homo sapiens
  chr14:102247586-102248261
  hyper
ttgtttacagctgccgtatttcccgggaccctggcttctgtcctcagggaccccttcagaccttccccaccctccgaagcctcaacccgccctgcgcctcccggtggcacagcgaccttggcggctttggcccctgagccgctaggctgccaaggcgcgctgtgcgcgtggggccaggctcgacctcactcctgttgtcgctgcagacccgcgtgggctcccgccgggccctcctgccgccccccagcctccccgcccctgcccttgccagcctgcgccttcctgggcgcctgacgcacccctctgccccaaccacgttttctcaagagtgttgtctgtcccggccttccaaggagacccttagctcccgccggccgcctccggagcctccggcatgggccccaggccggggtcccgcctttgccccggcctccgctgcctcgccccggagcccggaggaggggagccggccacccggggaagaagcggaggacgccgatctggcctcctgcgttgcgcgctccaaccctctgcttggccgcccgcgaaccgcgctctcccgtttcctttccgtcccgtctcgggggcttcatcctccagccgtggccgtggccgtggccaggtgtaccggagcggcacccaggagcccgccctagcacccgctcccgctcccac

SEQ ID NO: 237742 - DNA, 83 bp, Homo sapiens
  chr14:102276019-102276102
  hyper
ggctgcaaaaagccggaaaatatcccagcttttaaggcacactgacagccaaacagaacgctctttccgtttgcagttttttt

SEQ ID NO: 237743 - DNA, 141 bp, Homo sapiens
  chr14:102605815-102605956
  hyper
tttggggtcccggcgcccctcagggcagggcgggagaccgctgaggaggcaccctcaagttcacctcaggctcatgacaccagccccgccgcggttccccctgaccggctttccgctggccctggcggctgcggaacggtc

SEQ ID NO: 237744 - DNA, 32 bp, Homo sapiens; identical to SEQ ID NO: 203763
  chr14:102606251-102606283
  hyper

SEQ ID NO: 237745 - DNA, 241 bp, Homo sapiens
  chr14:102771431-102771672
  hyper
cctcgaaggagagcgttagagatcccgccgccatgttgtgtccctgtcaccctagcaaccgtcaggccctgaacgccatgagctgtcgcctgcgcatgcgcaagatgccccgcccatgtacgcgtgcgcagtgcagcccgtcccctcagcccggttgctaagcagcctttcctccgcttccatgtaaatactgtgcaaatccccgcctttgacacaggcgaccttcgctcggctcgctctc

SEQ ID NO: 237746 - DNA, 60 bp, Homo sapiens
  chr14:102829077-102829137
  hyper
acctcatgtaatccggggagctcctgagcttctggtccaacctgcggcctaagcagtaac

SEQ ID NO: 237747 - DNA, 159 bp, Homo sapiens
  chr14:102829774-102829933
  hyper
ctgccggtctggccgcgggctctgctccttcgccttaagattgacgtcgtgttctgtcccccactcgcagcccgcgtcccttacatccgcccaccggcgcctggccccaggccttgacactcatccagttggtgttcagtgttcgatgagtggataagt

SEQ ID NO: 237748 - DNA, 116 bp, Homo sapiens
  chr14:102975681-102975797
  hyper
ccgccacctcctacccgtcccctcccggcctgcacggccagacgtcgggcggcggagggtcgcggggccgagcggggcgtccgcgcgcaggtggccggcgcagcgagggctgcacc

SEQ ID NO: 237749 - DNA, 534 bp, Homo sapiens
  chr14:103010922-103011456
  hyper
cctgaaacgctgcccggaacgccccgcgggagaacatctgcgccaggggccgggggccgggggccgcggcgggcgaaatccgagaggcccgggctcctcctgctgcgcggccggggaggggggcgcctgccgggtcggggctggaggacctgcgcgcggccccgggaggccccgcctcgccttccagtctgtgaaatggggcgacggcctgggcgtggcggcgagttcttgtccgctgccggcgggcgcggtcgtcgaggacacagctaggggaggcgcagaaacacccggaggcggcaccgccgtctcctccccgggatcccacaccccgcaggttcaggaggaaggcgcggcccgaggcctccggggcggggtgtccccgagacgggaacccgaacccgacggcctccgttccgcctgcgccccttcaaggctcccggacgggcctcagtggcttccccgcccctccccaccgcgtcccggctccccgggcggggggtggggggggtcgcgtgcggacggttccccaccccg

SEQ ID NO: 237750 - DNA, 745 bp, Homo sapiens
  chr14:103021374-103022119
  hyper
cagcccaggcttgccatggactggctcctgggcgttagatgaatgaatcgactcaacccgggccgccacgttgtgttcagaacaccgacagtcgctcccaggcaaccagcacctgctgcgccccgtttccagcgacctccccaaccgcgtggactcgcatccacgtgcccggcggggccgcagcagaaaggctcggaccccccaggacgatcggccggtgggggccggtggggccgcagactcggggggcggggggcgccaggcttccgggtcctgcccccgccccgtggggaacagcaggacggcgccgaggccgtttcgctttcctccgcgcccatttgccgggaggggaccccgtgctccgacctgaaggtgacggcagagcctgcgggaggcctaggccggtcccgccctacgggtcccgggggcgaccctcgcgctgacattggcgtccaggccgcggcccctgcctccgcgcccacccacgccgggcctggccctcgctcccccgggaaaagccccgccggcggccgcgagagcgcggaagcgcagccgtagtgaccgcgagacaaagacccggcggcgggggaggcggcggagagaccccgccagcgcggagaccccagggaagcttctctggaagacctggtgctggtccgctctcccgggacctcattttccttatgtggacaacgggggcggggtcacagcagcccctcgggcttatagccgggttgttctttcc

SEQ ID NO: 237751 - DNA, 231 bp, Homo sapiens
  chr14:103057881-103058112
  hyper
ctctccaaggcagcggctctcaggctagcctcagcctaccccacccgcccgcaccccgtgttctccctcgtgggggtgccggggggagtagggaggcggggcgggcggcaggtccggaaaagtggctgccctcgccccgaaagaagttgaccctcctcccgtgccgagagcttgggatgaaaatagcttcttcctctttacccttcctggacccccgccccaggacgactg

SEQ ID NO: 237752 - DNA, 89 bp, Homo sapiens
  chr14:103394819-103394908
  hyper
gacgtgggctcgcacctggactgtggcgcgggtgaggcggtcgggcaggggcggggctctggaaaggcatgttcaggggcggggactgg

SEQ ID NO: 237753 - DNA, 253 bp, Homo sapiens
  chr14:103395328-103395581
  hyper
gggaggctcgggtcccctctccccacctcggcccgaccccgcccctcctggtctgcacacgttgggtctgagcactcaggtgaagtctcttcctcgggctggctccggtggggacccggctgcccgcagacgttcacgcgcgacgaggacctggctgttttcctggcgtcccgcgcgggccgcctacgcttccacgggccgggcgcgctgagcgtgggccccgaggactgcgcggacccgtcgggctgcgtct

SEQ ID NO: 237754 - DNA, 52 bp, Homo sapiens
  chr14:103430382-103430434
  hyper
actgcttggagttagggaaaaatttcaagtgagaatgccatcttcaacctct

SEQ ID NO: 237755 - DNA, 83 bp, Homo sapiens
  chr14:103524516-103524599
  hyper
actgaggcccagacggtgtggggtcagggcccaggcttctgggggatgctgccaaggcgggagccagcgtccccagtgcccgg

SEQ ID NO: 237756 - DNA, 272 bp, Homo sapiens
  chr14:103557877-103558149
  hyper
tgccccaccccgccgcccttcaccgcgagccggggcccagaccgcccagccacgcccagagcccgcgggcggagacgccaggggcggtgccagcgaggtcccgtccccggtaccccgtcccgcccccccacacgcggtgacctggggacgccccgcgggagtcgttctgcggctccccctggcgtcggctggggccaccgcccgggctcccacctcaaccctgcaatatggggttggggcagagtggtctgctgcccgctgcccgcagccgc

SEQ ID NO: 237757 - DNA, 38 bp, Homo sapiens
  chr14:103571012-103571050
  hyper
ggggacccgcggcctcaggtcgggggctgggaggcacg

SEQ ID NO: 237758 - DNA, 439 bp, Homo sapiens
  chr14:103571080-103571519
  hyper
gccgagcacgtgaaggcggccggcgccatctccgcggagctggaggccaccaccctgcgaatctgcacgcgggcgctcggcctcttcgtgcccaggtgcggacgcatcctcagtaggggagcgacctggccgggtgcgctctgcaggtgggagggaggagtctgcgtagggacctgattgggagggtggacccagggtcatcgcgcagctagggagggtccccaaaggctctgtgtatcccgccccaggtttgaaaaggcttttctggcgtcggaggcggtgagcgagccgcacctgggcgcctacatcaacgcctgcgaggagctcaggtagggctcgcccgctcctgtgcgggcgcagcgtggccagcagggggcgcgcgagcgccgggaacctggatggaggggagtgcgcgcgcgtggagggggcagaggtgagg

SEQ ID NO: 237759 - DNA, 109 bp, Homo sapiens
  chr14:103590101-103590210
  hyper
aaggccccaggtccggcgtgactccccggccgggcgacacaggccgagtcacttcctcgcccgtgcccgggtgtcctcatcgggggatgggtgcgccttccacatcctg

SEQ ID NO: 237760 - DNA, 198 bp, Homo sapiens
  chr14:103655331-103655529
  hyper
actggacgtcccgccggctgtacctggcgccccgtggcctcgctcccgaccgctgccccgcagaggcctcccgaccgccgaggccctcgccacgcccgggtgcccccagggggcgccggcttccacccacagagctccccaggcctgggcgggcgcagggagggcgcgaccggggcgcacccgcgcgggaacttggca

SEQ ID NO: 237761 - DNA, 160 bp, Homo sapiens
  chr14:103674108-103674268
  hyper
gggctgtgggaacccggggccgtcctgctggtgctggtgggcacccaggccgaccgggactccgagcgccaggtgctgatggcgcgggcccgcgaggggccctgcccgttcccgggggtcacggccaagatccagcggaggatggaccaggtgttcacgc

SEQ ID NO: 237762 - DNA, 214 bp, Homo sapiens
  chr14:103686663-103686877
  hyper
ccgcgctcccgggccgaccctctgcggcctctgctctgcgcagtccgtcctcttctcccgacctggcgtgcgtctcctgttccccggccccccatcccatgggaccgtccttcctaacggcacttcaccccgcccggcccacgaggtggtcccgggccggtgacaagatctggacgtggcgactccgggaaggggcgaccgggcgcggagagcc

SEQ ID NO: 237763 - DNA, 919 bp, Homo sapiens
  chr14:103739781-103740700
  hyper
aggtcgtgggcgggcgcagggccccggcggatacttggcagaggcttggggtcgtggcgggggcgcctcccttccggtgcgcgaaaaagcaaacgcgacgcgcgggctgcagagactgggccgggcggaggagacccccagcctgggttgagcggggcggatctgggactccgaggcttcctacgtggggcgggttcccagcggacgcctctgccgcacccctggcggggacccagctgcgccccttcccgcggccctcctagggcctgggtgcttggaggctcgaggccccaagatccatgtcgcccggaatcccggtgcctaggccttgtcgcgggccctgggaccaactcgcgggggtcaggagctgggggttgagagaaagatgatcaggtgggttggagaaaggagacgcttcccgctgggcgagtgagcccaggacgcggcagaagagggcagaccctaggggaccgccgcgtccccaggcgcgcacgcgacccctccccgcgccgaaaatcctctccccgcctcagtctccccgcctccgcctccccacccatagtgtcactccgaccctagccctgggtccaaacgggcaggagaggtcgctggtgcctccgcggtccccgccgcgcgcagaactcggccgagtgcaccggggtctcctggcctctgcgcgcagctggtcctgcagcgtcaggacccgaacgaccccgaggccccaggggctgggccctccagcagccccgcagcagccccgcagcagccccggcaggcaccctccagcggccgtgggcgcctggtagctatggaggcggtagaggtggaaaccaggcctctgtcttcacacaggaggaactccaggccctcgtttaggactccaggccaaaggctgtgtcagccgcgggtcccccgccac

SEQ ID NO: 237764 - DNA, 157 bp, Homo sapiens
  chr14:103745189-103745346
  hyper
tgtttttctttctcactggagctggttccagattagatctggtcggacccggcaggcacctggcgggcactgtgcgggcagggaaccagggagagcaggagggcgcgggtccgggccaaggctggcgggggtcgccgcggcgcgaccgcctcctccg

SEQ ID NO: 237765 - DNA, 246 bp, Homo sapiens
  chr14:103745670-103745916
  hyper
cgaggcgaacgcggcgcccgcgttgctggaggtcgtggacgcggcgggcgccgagcacctggtcacgctccaggacctggacatccgccacggcgacggctccgcggtgctcccgggcgtgtgcagcgaggcctcgttccgggccgtgaggccgccgagcaagcgcctgcgccggccgtgggaacccggggccgtcccgcgggtgctggtgggcacccaggccgacccggacgacgggcgccaggt

SEQ ID NO: 237766 - DNA, 52 bp, Homo sapiens
  chr14:103800152-103800204
  hyper
acgatggctcctgcgtcccgggagtcgccatgacgccgcggcctgtcccaga

SEQ ID NO: 237767 - DNA, 111 bp, Homo sapiens
  chr14:103851531-103851642
  hyper
gacaggaggaacccgcagcccgcgggagtcagcggagacccgaccagcactatccagccctctgcaccgcccccgcggcgaggtctggaccaagtcgcccctagcaacaac

SEQ ID NO: 237768 - DNA, 37 bp, Homo sapiens
  chr14:103988563-103988600
  hyper
agcgcgctgctgaggaccctgcggctgcgcgggggga

SEQ ID NO: 237769 - DNA, 361 bp, Homo sapiens
  chr14:104029513-104029874
  hyper
caaacccgggcctcggggccactccctgttctgcacagccgcctcaggcctttgtccaggtgctctcgcgtcctatcccgaacagtcccgcagccccgaggctcccgcatcaacgccctcagtcggatgggactgagggtgccgccgccaccacgccggggactgttgacagccagaacctttaagcgtaacagagtcacctggcaagtttgtacctaccttatttgttcccgagaatgattattttttatttttaaagagctcttggcttaccgtgcgttttttttcgttgtgtgtgtgtgtgttttggctttgttacaattattagtgcttttcttcaagcggcgagcactttatcatc

SEQ ID NO: 237770 - DNA, 109 bp, Homo sapiens
  chr14:104094604-104094713
  hyper
ctggcagcagcgagcggagcctcgcccattgaatcagcatgccctcccggctggctgctgagtcaggcctgcggagccggcgaagccgcaggacttgacccaggcgcgc

SEQ ID NO: 237771 - DNA, 174 bp, Homo sapiens
  chr14:104181915-104182089
  hyper
gagaggggcggagcgtacccgggccagccctcgccgccgattggtgatcgacctcagggttgcaggggcggtgcccttacacggattggagagggcagcgatggggcggagttcaagctccgattagtccgcgctccgtggcgggcttggcgattggacgccggcgctgtcagc

SEQ ID NO: 237772 - DNA, 1296 bp, Homo sapiens
  chr14:104582801-104584097
  hyper
tcaggcccttgctgcgtgagggggtagggcgtccctccccccgcgtgggaaatgaggaggcaggtacggggctacccctgtgggctgcggggtgggggttcagggtctgagaagcagaaacctccctccctccagtttcactttctctttacccctccccttccccctcccacgaagttccctttgaagtgagaggggctggggtgggtgtgtccagcccagcccccacacccaccggagagctagcgcggccctgggctcctgtcgggcgctggtcctcacctgttccggccaccctgggcctcgacccggccaaggtggagccccgggccctccgtgcgcccgagcacccccggcccagacgagacggttcgggcgtggcccggcggggacccagaacccgggaggccaggtgcgcccaggccaggcgctggaggctggggcgccggatggggcggggcggccgctgagtcagggccacccccgcgcgggcgcgcggagcaggtccccgggccgtggaggatcagtcgcgggacctatgggcccgggagccgccccgcccggaaaaaccggtcgggccagcgcggcgcgggcacattccggcgccgggaagggcggctgcgccgcataaaaggcgccgccgcgctggccaccgccgctcggagctcagccgccctgccacgcggggcccgcgggacgaggggacgccggggccagcgaggacgcggcggggctgggcttggcggctgggatcccccagcgccaggcgagggcgtctaaggcgtccggtacggcgtcggggccgggtggctgcagcagggcagggggtgcgcgaccagcggggatctgggcgcaggggccggtccccgggatccgcaggcgacgcgggcggtcccaagggcgtcgggggctcctctctccgcagctcggcgaaccgacggtgttggggactcgcgcgctgggtccagtggttcttaacagttcaacagttctgtagcgcaattgtgaaatgtttaggaccactagacccggcgggcgcggcgacagcgacggagcgtcccacgcgcggcctggagtcagagtcacagtcaggggtgcgccggcgaccaatccaggggagcccacggaccggctccgcgctccaggtcggccgccccatgcgccgcgccccgcagtccccagggcctggctggctccacctgctgccagggaagaccctcggccggagagccaagtgctgctgggaggtggccgggcgtggccgggctgtgctgtgggaaccgctgggtgggggcg

SEQ ID NO: 237773 - DNA, 2652 bp, Homo sapiens
  chr14:104601612-104604264
  hyper
ggacggccttgcggcgccgccggagcagtggggttgtggggcgtggccatggtccttcccaggggagagtagaggagtgcagggggcagagagcacagaaagtctagcccagccttagcaccccagccaggccataggtgcgcgctggcgccgctgaaaacgttctccttccctcgcctgtccaccttccaggtcctgctcaaggcgcctaatatcccctgggcagggtccctgacacttccttaactcccaaagaccttccgcgtgggcctagcgcatttaggcgaacctctctgcctgcttgatcctctcccttcctccctcaagccaggcatctcacccacttgcgcgcgaggctggggcagcccacaggaggagcgcgggacccgggcttgagtttgcacccaggcagagcgcccacccccgcccctagcttcggaccctgaaagtaaagtcgtcgtgcccggcagccagcccgaatcttccagccctcagggagtcggggtcggggcagggaaggccacgggtggcggcacaatcgggatcctggagtggaggcgcagactgcgggtcccgctgcgcacgctccgtggtccggttggggtgggccttggaggtccataggccaaggttgaacgggggctctggagcgtgggcggggtggagtgcacaggtcactgggctctgagcgtttccatgggccaggaccccaacgcgccgtgtcctcaggacagattggagggggaaggggctgcgattatgccccagtcggaagggttttacagcagccgcgctgccctctccctgccggatacccggcagtagacaccgacgtctgggggctagcgaggcaggtgggcgcggaccgcgacccgattctggcttccaacctccgcccagtggcgcgcggggccgtcgccccacacctccagtccgcgtggctggtgtctggctcgccgccggggcggaaggggcgctgtcggcgcaggcgggcggggccggagcgcgggggcgcgcggcgcggagcgagcgcagggctcgggggcgcggggcgcggaggaccgggggcttgacgggcggccctgcgcggtgcggggcgcggcggcggcgggcgcgcggccagtgaacgcgcgggcggggcggcggtggcgggaggcactaggggccgctccccgcgcttccctcttccatggcgctgccccagccgcccgagccgccccgcggcgcgccccgcaaggctcccagcctgctggagatgggggcgctctgcctggactcggagatcatcctgggcttcaccagccacctcctgcggcgacgaggcaaggtgagggctgtcgggaggggggcgggcggcgtaggcgccgtcccgttactttgccgcgcggctcgcgcggccgggggtgctgcgccgggaaggagacggcaggtccggagccgcgtcccgcagcccgggctgggactcgctgccgcactttcccccattagcgttgtccaagtctccctctgccttcaaggctgtgtcccaaccggacccacccggaggctgtggctagggcggagagcgcagcgcagggattctcgggctcaccttgcgccttgctaggatgggcgaagtagggggtcggggcccctgactgatcgtgagcccccgaggtgactccagccttgtgcaccccgtgttctgcggatatgggatgtgagcttgtgcttcccgaagcgccgcggcggtagaagcgctgaagttgcgggtgtggctggccaggggcgcaggaccggtgctcccgaccgctgcgtgcttctgtgttgcgtgtgtgggtggggggacgggatatagagagtgtgtgtcccggagcagtggagcggcgggaggcggtgctgtctgccggcagtgcggggtggggtttgggtgttgtcctcagtacccagatccagatgtgggctgacgcccgttttcattctccaggctgcgaagagacgggtaggggaagcgcttccggccccccaggctgggtggaaagcgactgcaggcttacggatctcagaaagagtggagagcccctgccactttattccatacccccttgcgttttcgaacccctaaggtcatcaacgacccggaaagccgggaggggatcacccaccccactttctggggagtgcgtgcgtgggcggggaggcttatccaagtaaaagggggtgggcaaaacggaaagggtcactttgacgtactgagtctctgcgaaggcctcaccgtatgtgccggcagccgcgtgtcctggtctccgccgggtcacgaccttcggagtttccgagtgcgcctcaggcctgggacgcgcggcgctgtctccccagtctcggagccgtgtgcgcagcggccggcagggggcactcgcgtcacggggagcccgcccgccgcgcccgcctggcttgacccgggctttggggctgacccggagcctggcccggagctgcctgcggccgcggatgccggcgacatttggggcccggctaggcacagagcaactggtcgccagggaagggcgggggggcggcctcccagccggagacaaacaagcaattaattccggagctgagttcccatctgccaggcctgctgacaacaggtccggcgcacgcccgcaggacctc

SEQ ID NO: 237774 - DNA, 725 bp, Homo sapiens
  chr14:105070705-105071430
  hyper
cggggaggtgggtctgggggcgctgggggcatggaaggggcgccgcgccgggagcggcccccacttacccctcgtgtcccttgcagaggaagaagagcgtgcgccaggcgtgcgcggcggccagcagcagagacaggaggctggcgagcaggctgaagcggcaggcggccggcgggccccactcctgcaccgtgaagcgctcgcgctcctgcaccgtgaggttggcgctcagccacatgccctcggtgaagagcaggcagcggccgcggaagtcgtggccgttctcggacagcgggaccaccaccacgaagctgaacaggaaggccaagaagtagcaggcgcactgagcgaaaaggaaattgttgagcgccatggccggcccgggcgagagcggcggcgggaaggccgcgggaggctgcgccgggcggggaggccgcgggaggctgcgcagtggcggcgccggcaggtcccgcgcgcccctcccgggacgcgtgcgcatcggccgagcgcgggaagcgcctgcggtcagcaccgcggacagctcctggtgcgcgcgggccaggagcccggggtccaggggccagagaagggcggcctgcgggagatgcgggaattttaccaggtcggcctggagggaccgaccctgtgccgctaaagacttcgggagccacctgtacgggcctcacacaggccgactctgggtcgtcagttcctcatcagctcga

SEQ ID NO: 237775 - DNA, 81 bp, Homo sapiens
  chr14:105155746-105155827
  hyper
gaccgcgagggggcggccaggttattcacgggagtggggagaccccttaaagcgccctcagggaccggccacagtgggcgg

SEQ ID NO: 237776 - DNA, 200 bp, Homo sapiens; identical to SEQ ID NO: 203783
  chr14:105156381-105156581
  hyper

SEQ ID NO: 237777 - DNA, 37 bp, Homo sapiens; identical to SEQ ID NO: 203785
  chr14:105190455-105190492
  hyper

SEQ ID NO: 237778 - DNA, 42 bp, Homo sapiens
  chr14:105190873-105190915
  hyper
ctcccatgccctggccggtcactcacccgcttggatgccttc

SEQ ID NO: 237779 - DNA, 678 bp, Homo sapiens
  chr14:105293563-105294241
  hyper
gtccagctcaaaaacgccaggcccgcccccgccccgcaggtccgcgggaaggaaggaaaaggcgttggggatgcgtaggaggcagaggccttggtggtcgatccggtgtggagtggggcaggggctgcgaggagggcgcccaggactggtatcagtgaacagtgacggtggggcagggcggtgaccttagcaccagcgcttcggtgggggggaggaagcacctgagccgcggagaaaggcctgcgtgaggtgggcacaggctggcgttgaagccctggggtggactcacgtccaggggagggcggtgcttcacacgtcccaggcactgtcttgtgtggccccaagtgctgtctgaatctctcctgcgtcttgggccccagcaccaacagccgtcgccctggagccaggcagcagccttaagcttccctgggaggctgactggctgggagcagggaggtcccatcggggaagtaggggcgtgcagggggcttggcgcctgcagtcctggaggggcagggcagatgataaggctaagtacctcctgtcctttgctcagccagccactaggaggaggccgcagagaagaagccgccaggggctgggggaggccagggacggggcagggaggaggggctgggctgaatgcaggtgccccaggagctgcgggctctccttcca

SEQ ID NO: 237780 - DNA, 872 bp, Homo sapiens
  chr14:105309797-105310669
  hyper
cagtggggctccgtcgccgcagcgccccggcggcctcctcctggccgctggccctcccctaaggcttcctcatcctaaacagcaagtgaagccaaacgaaaaccctgtctctcccgccgttccctccctcctggcctccgtcccccgggctcgcctgccccgccgcccggcggaccggtcccttcctgctttccctggcgggtgctttccgctgctctgttacccggagccaggacgcgcatatattcccagaatccgcgctcagtgcgttcggtcccccgggacacctgttctctgcacaggcgcgtctgggcgcagcgggggcagacacgcgttcccgggcagcgactccggaaggcccgagggagtaaatctggccctcccggttcagcacaaagctcccctggccgcctttcaaaaccgaccgcctcccaactctccgcggacacgagtggcggctgcctcccctcccctcccctagggccgcgcacgcctcccgcagggtctcagtgcctcctgggcgggggataattcctgtccccaccggtgtcctgtactcgcggggtcccgggtgtaagttctgggtcccgggctggctccctggtgagcaaagccgcatcgctcgaattccagaaacccttctcgccgagcgcctgcctggctgctgaaagcctggagactgcgctctcggaggtggatttcggaactcaggagagaagaatgagacgctccctagtacccctagtcccccaggggtgggaggggactgtatctcaaaataagattctgcaactcgacttttataggggaaaccaggcacgcatttcaaaatcttctcatccgtccccacctccttgcgccgcttttccgcg

SEQ ID NO: 237781 - DNA, 699 bp, Homo sapiens
  chr14:105330456-105331155
  hyper
ggtgcttggggtggggctcccgccatactcaagggcgcctcttgactccctctgaactcgcaatcccgccccagggtccggcacaagggctctgctggggctgagatccgtgaaggcagatgcggagaggcgccgctggattgcgagcaggcccaggtgcggggccaggtgggcgttgtcgcagccgggaacgcccagccgctccagctgcccacaggacaaagcccagggttccccggccgggcgcacgccttccacattctccctcacctccacgccttcgctcactgcgttccccaacacctggaatgcagcaatgcccttcgggcacgctgccccgcccccacgttgatcccgtcccctagcttggctccagggacaccggatacgcctattgtagcacccggcaaggagcgagcagtccgcgggaacttacccaggaaccccgagcgcctccgtagttcccaaccccacccccacccctcggccaggtcaggtccactgtgggcgtccaggtaagacggcgtcgatgcccaccaccatcgcccccagctcagcccagagcgcccggggtcagaggtggagatgtcggacatacgcccagtctggccaggctcgggagggaaaatctgggagcggcctctggaactcaccctgactccttcaccgtccgctcctctttttggcttccggggccaa

SEQ ID NO: 237782 - DNA, 199 bp, Homo sapiens
  chr14:105332329-105332528
  hyper
ctgccccgcccggctcgctgcccttccctgccctgggcctagccacctttccccgcctcacctctgactgtggcccttccggccggggcggctgaggggacaagtttggggcgtttattattcttcctcctagcaacgatggccagcccagccccgaggcagccgaaggccgttttggagcgtcgcgggctcccaggcc

SEQ ID NO: 237783 - DNA, 414 bp, Homo sapiens
  chr14:105433899-105434313
  hyper
gccactggcccacgcgggacagtccccagccccaccctcagccaccgcactgggagcggctgttcctacactgcctgtagtggggatggagtgcagaggctcagcgagcggcagacctgcctctggccacagagctgcgcagtggggacccctccagtcactgggctggcaggagcctggcccaggaacacaaacaggaagggggaaatcctgcccgcctcgggataaggctgcgcagccaggctaccggcctcggacccgcgccagtcgggagagagaggaaggcccccagtatcccagtcccccgccaagagcaccgcctcccaggcccgagctcctgaggaagccccgcctcggccgcagagcgcaggggaggccgcctttgcccgcccggcctccggttctcccagacag

SEQ ID NO: 237784 - DNA, 597 bp, Homo sapiens
  chr14:105444349-105444946
  hyper
gagactccagcggccgggaaggcccagaaccacgcgcgagtcccgcaggcgtctccgagtcccccgcccccaaggcccgcactgcgcgcccctggacacgccccggcgcgcgccctcgcgcgtagcccacccgccccaggggagcgggctgcaggcggggaggggcgcaccgctgccgggggttccgggccaggtgggcagcaccatgtggaagcagtcgcacatcgcggcggccaggcggtgcgggcctggcggcccgtcgcgtccagtcgctggtcccggctccggcgcacggggcgggcgggcgggagccgcgctctgccccgctgccctgcgctgccgcgggcggccgacctcggactgcggacaccgcgcgccaggctacccagccgctcagctaggaccccgcccggctccgcccagccctgccgggccactgcggagcgcgctcgcgggcggtgccgtcggcctcattcagcccattggctgccgtcgccgcggccccgcccctcccagccaggccccgccccaccccgcgcccccggcccgcctgtcgcgtccgcagaattaactttggactcccgccagggagcgacc

SEQ ID NO: 237785 - DNA, 230 bp, Homo sapiens
  chr14:105487900-105488130
  hyper
gcggtctgggctccgaggtctatccaagcctctccagagaccggggttatctccaaaggcttcctaggtttacacgtaagaaatgtaacgtgaaagttcaaagcaggggacacgtgttttaaatctcttagtggaaaaggttttaaataggatgcgagaacctgcaatcattgacttaagtaataccctgagcgcctgcagcaggcccggcaggcgtggctgcagctgag

SEQ ID NO: 237786 - DNA, 53 bp, Homo sapiens
  chr14:105511922-105511975
  hyper
aaaattgggaattatttcaaaataaaaagctggataaatgcatacacacaagg

SEQ ID NO: 237787 - DNA, 92 bp, Homo sapiens; identical to SEQ ID NO: 203791
  chr14:105512395-105512487
  hyper

SEQ ID NO: 237788 - DNA, 220 bp, Homo sapiens
  chr14:105559994-105560214
  hyper
gtaaccccagggccgtgccaccctcctgatcaccgcaagcatggaccccccagcacgctgcgggtgggacaggcagggcccctgtggggtggcttgactggcctggagttggggacgaagtccccgggcttggtcccccgagggcttggttgggcgtcccggggtaggtggctgccgcggcgatgtgggcggcttgcgtgtggccgatcggggtcgctgc

SEQ ID NO: 237789 - DNA, 335 bp, Homo sapiens
  chr14:105662773-105663108
  hyper
cacccgcccccagcgccgcaggatctggaggcgggagccccgccctcacagtgtccccctggaggggacatcccgctcctgcccccgccctgcagaccgcacaccgagccccagcctcactccccagcccccgggagccccgagccaggtctgccgtcgcctctgaccccaggctgggccggcctcctcgtctgggcctcggctcggagggtttcctgcccgcccgctcctagcctggcaggaagcggacacctcagaacaaagggaccggcggacaatggccattgaattgggccggggcgctcgcgcagggacaggccgccagctgcccgcgc

SEQ ID NO: 237790 - DNA, 1036 bp, Homo sapiens
  chr14:105714538-105715574
  hyper
cgcgaagcatctgaacgaacgaggaagcccaacgaccatcccacaggccgcggccagaggcagactccggaatgcaaatggccaaacaagcaggtccacctgcgttcctaaccaaaagatcgctaactgaagaacgggcgcaagcacctgcgcatggcactgcgggtctgggggcggccgcctgccagcgccgggagccgccttccacggctacctctgcacagcgcgcggctcgcgccggttgctgggcagaagctcgagcagcttcgaggatgtcgggcctgggggcggggccgcgaggcagcgacgtcgcgcggggcgcggccctgacgcagcgtgacgcaccggcgccgcggcgggtacgggctcgggcgggcgggcgggcgggacggcgccccccgcggccgggcctggccgggctgcgctaggctgggctcgggcagggtcgcaggggcgggggtggcaggggagcgggtggcagccccgcgggtcacagcgccgccgccgcccatgctgctgcccctagcctgcctgcacggccgcgtcgctcagtgcctgacctccttgcttttgcttgcagagccgctcccgaggccccggcgcggcgcgagggcgcggggcgcggcgtccacaggcgccgaggctgcccccgccgccccgcccgcgaagatggcggcggaactctacgctcccgccagcgccgcggccgcggacctagccaacagcaacgccggcgccgccgtgggcaggaaggccgggccgcgcagcccgcccagcgcccccgcgccagcgccgccgccgcccgcgcccgcgccgcccacactcggcaacaaccaccaggagagccccggctggcggtgctgccgccccacgctgcgcgagaggtgagcccgtgccccgcggcccccgcgcccgcgcgcgcccacgcccccagcccgtgcctctacctttgcaggaacgcgctcatgttcaacaacgagctcatggccgacgtgcacttcgtcgtggggcccccgggggcgaccaggacggtgcc

SEQ ID NO: 237791 - DNA, 75 bp, Homo sapiens
  chr14:105781910-105781985
  hyper
atttagaggcgtcgccaagccagtactgctatttgcgcctcccagttgatcttgccattgcggaagactggctgt

SEQ ID NO: 237792 - DNA, 251 bp, Homo sapiens
  chr15:22892513-22892764
  hyper
ctctgcctgggaggacaccttcggcggctggcgtggggaaaggggccgcccggccggggatgccccgccaggaggagggagcggccggggccgcggccgggagggaggagcgccgggaggaagaggccgagccgggagagcccccgccccgggaggaaggggaggaggccgagtgtttcctggcgcattcccggccagcccgagtgactcactcggccaaggaaactcccagggcccgcccaggaccccca

SEQ ID NO: 237793 - DNA, 677 bp, Homo sapiens; identical to SEQ ID NO: 203796
  chr15:22893131-22893808
  hyper

SEQ ID NO: 237794 - DNA, 325 bp, Homo sapiens
  chr15:25683895-25684220
  hyper
ccgcgagctattccgaggaggagccgaaggaggcgccgccgcccgcagccgagcgcgccgggtcggcagaggtgaagcgtaagtaggcggcggatggcgggcgcccgcgctggcggatggctacgcggcggaggggtgcgcgagcgagcgaagcctggtgtgtcgggtcctggcgaagggaaaaggccccgtcgtctcctgtagtcaccccgagcccagcgccaccatcttgggagacacacggatctcgcggccgcggcgcaagacgggaggactggctgggcgggccgagtatcccggcaggcagcgcgcgccgcccggccgg

SEQ ID NO: 237795 - DNA, 587 bp, Homo sapiens
  chr15:26095517-26096104
  hyper
agacagcgtggatgcgttttgtacggggaacaaaactgatttccaacttggcaaaaagcaacaggagaggccccggctgtgtctggtaccgcctcagccgagccctgaagggaaaggcccagaaaaagggatgtggccacaccctgggggccagcccacaggcgaggcgagtccccaggcgccattctacgcggccagttttggagaactggaactgtgtagagcgtccggcggcagcggacccagcgctgctccattctccctccctccctccccccccagccccggtgactcactccgcggcccgggcagggcgagaccacgcccaccaccccccaagacctggccgcgctcacctcccctcctgcacagagcacctaagggcccaaagatcacatctgaacaaaggatggaacttggaacttacatttacctttcctgcccctgactttttaaactgttattagaagtatacaaaaacaaaaggcaggacataaaagtagtgaaatgctttaaactctacaaatgactcagttcaaatgtgcggtgacagcctgggtttcctgccatttcgttaacccctcgtg

SEQ ID NO: 237796 - DNA, 1378 bp, Homo sapiens
  chr15:26107460-26108838
  hyper
cctttcacttcaggtgggagcggctgtggatgaggatgtccagcggccgtcggtttctagccttgggatcattctggccccgacacggagtgacaggggatccccacgcgtccccgcatccagggcgcccctttagctgcggcggaggcacagagaggccttggcggcgctgtggcttcggtcggcaccgggtcccgcgcagccgggccctccaccctgagtggagctgccttctaagcacccagcccctgccaatcactgtgcccaacaccaagttcccggggcgccctgccctgcgccaccgcgcgctcgctcgcccgcccgcccaactcacctgctgaagaccaggcagcccaggtggttgatcttgtggtcggagcggtggcggctgtagtcctcccacaggtccctgaaggccgtgatggccaggatgaagagcaccggcgccagtgccaggccgggctggaaggcgttcaccgccggcacgaagttgagcagcgcgatgaagacaaagtacacgttggccgggcggtggaactgctcgaacaggttcttgggcaggaaggacagcagcgtgtacttggtagtcttgagccggttgtcggccaggtgctgggcacacccgcgccgccgtcgccgctcgcccttggccgcgccagccgcagggtcctcggcgcccgggggcggcagcaggttggagcgcaccgtgcgcgtcctgccctctcggcgcctccgccgtcccggaggcccgggctcctcggtccccgccggctcccgctccatggccgcgtgtcgccgcgcccggctcctccgccgctcacgcccgcccgcgccggcctcttaggttatcatcactcgcggcccgggcgcggcggtgcgagctccccgcctgcgggacgcacggagaccgcggtcagcgcgccgcctggccggcccagcgcgcccagcccgcgcccagccccgtccactcccgtccagccccgccgcccggccgcagtccccagggcgcaagctgggcgggtgccgcacagagcccccttgtcctcgccgcccgcccccggcccgggtcgtttccgccgcggtggccacggccccgccctcgttccgcgcccggactgggccacgccggatagcgggaaacaaaaaaagcccgagctggaaacttcagagaggtttagtttcgtttcccagaagcatcagttcggtcccaaaacgctgcaaacgcgcgctgcctgcagtaggagagaggaaaccgcgaagcgcgagaaaaggcgcccccgtccccaagcagcccgcgcgcccttccaggggccagacctgctccatcctggacggcgaaacgacctcgggagaccccggttaggaccttactccaggg

SEQ ID NO: 237797 - DNA, 433 bp, Homo sapiens
  chr15:26178857-26179290
  hyper
gaaggaagccactctctgcccgccccctgccccatctcaggccctagccctctgccaggagcgtctcctgaggctgaaagtgccccctcccgctctcagactctgcgctgccatctgccttgcttctctcggtaccacttcccctgctctcttttgaatcggattctctccttcaaactccagctgatccagcccgcacatgccaggcccgtatgtagattcgtctgttgccaccgtcctccaagccctagggaggggttgagctccgtggaaggcctctgatgggagggacacgactcggaggctgagcagcacaggacaccgtggtaaactgggattcttctttgcctttctcagggaggcaaaaggtgcagaggcctgcagtgtgctgtgagcgacagtgccagctagtggcgcacgacttacatcgcta

SEQ ID NO: 237798 - DNA, 572 bp, Homo sapiens
  chr15:26327330-26327902
  hyper
ggcttataaatttacgagtttcactgtgttccaaaagaaaggtccagtcattcccacaccgggagtcgaacccgggccgcctgggtgaaaaccaggaatcctaaccgctagaccatgtgggagatgacaagtaaccgttgaattctaaaccaattgaatcatttccgcctgcccttgctttccgccttctgccacgcctccgacaacaaatccctgtctgcgcctgcgcctgcgcgggctttcggtgctgaccgcttgttgatagaggtgtgctccttctcgaaaggcggaggcagggctgggcgctgtggctgctggcactacccagttcttcagcagcgctgtgcctggaggcccccagcccctcgccccccggctcgcgggaggcggcaccagacctcctcaggccctggtccctaggaaactgcagcccggcctcagtttccagaaagctcctccgtgcgatttgggaagagcacggtttgaatggttgaaaatagaggggctgaagaaccgagccgcgcgggcctggctccggggctgagttccctagcgggcgccgagcggagcct

SEQ ID NO: 237799 - DNA, 1311 bp, Homo sapiens
  chr15:27016782-27018093
  hyper
caaaagcccgcttcgcacctcggggtactgacctccgcttcccacaggtcagaatattgaatccagtctgcattcacagaagacctaagtgacactgtgtcaccagcctccgactctcccggtagagcggctcctctgagagcccgcctaggcgcggcctcccgctctctgaagcagcggaagcctgtcagcacctcggacagagactggcggtgccgggcccgggtctcccagtccaggaggcagccttggaaaaaccgcagagacacccctggaacgcacagaccactgtcttcgttcccctttcctgcagccagaatctctttccaaacgacaacaaaggaaaccttaagtacctcttacctagaatataggagccacccccacatctcgcctctcccggttccccagcgcctgttgctaaggaggcgagacagcgctcgggaaacctcgggaccaggcgacagagcgctggaggagctgggagcccacgggcagcggcagatgggagcactaggccggccaggactcccccgcaggaagggtgcgccctcgcggctccgacgccagccaggcccccgagcgcccggggcgggtgcagggagccgggcaagcgaggggccggcgcctgggagcgcggctccctctgcggaccggggaaactcggccccggccgaagaggcctccggcccagcactgtggacgcctgtgatcccagacagcgggccgggggctcagggaccgccctgggagggcgggcactcaccatgttgacttcggaaaccatgtcgatgctggcgatgtcgatgttcatccccacgcagaccgggggacctgcgggaagcacaggacacggcgatcagcccagctccggcgcggggcgcgggcggctctgaggactgggggctatcccaggaggggcgcgggcgaagggcccccactcccacccgccgctgctccgcggatgcggcccccgcctccctccgcccaggccgccgccgccgtgggtcgcgcttcccgcaacggccgcgcgcagcccacttacccccgaagtcgggtcttaggcgaatgtcgtagcctttcaacagcttgtccaccgtctccttcacaaaggacatgttcccgggatcgttcacactgggggagggacggggagcacaaagagcggggtcaggggcggctcagccgccagcgccccgcgcaccccgcgccctgcccgccgcccgccggcccacccgcgaccctacctctgggcgcagcacaccacagccaccagcaccggggccgagaagatgccgaaaagccttcctc

SEQ ID NO: 237800 - DNA, 688 bp, Homo sapiens
  chr15:27018323-27019011
  hyper
ggaggccggagagtcggaggcggagccgccgcgccgcgcaccctgccctcccccacgctcgcctcggcccgaggccggggccctgggcgctcccctcccgcctcggcggccgccgcacgggactcggacctctgggaccgcggagtgcgggggcgacctgggccggacgctgcgagcggagccgcggctgcgcggagtcgggaggggcggggggtcgtcccctgagccggctcctctgggctctcggcggccgggcgagtgcggggactgtcggcagcctcggcgccggcataagcggcggcggaaacgctgcccgcctaccccggccgccgaagttggccccgcacgacgaccaccgcccgctgcagcgcagcccgagagcccccgggtgccgcgcctctgcccgccggactgcgggccgccgcctcccgacggtgcctgcagaacgccgggaagcccccgcctcacctgcggggctcagagcctcgggtccccagggtccaggagagccagatgggcagcaggagctccaggagcccggagcacatggcgctgttcctccggcctaacctgctgggatccgctctcccccctactctccgagcagccaaacggcgacgcagggatccccgcccctacccccacccccacccccaggctttcccgcctgacccgtcttccagcccct

SEQ ID NO: 237801 - DNA, 1499 bp, Homo sapiens
  chr15:27112035-27113534
  hyper
ggtggtgactacacgaggcgccgaagatgctgttgagggccctggagaaacttcagcagaacagggcctctccccttgcaggccgagccgggggccctgcgccctccccctccgcccagctcggccaagggcgcatttgctgagcgtctggcggcctctaccggagcacctctgcagagggccgatcctccagcccagagacgacatgtggcgctcgggcgaggtgagagcgggcgcgagtgcgccgggggcgctggggggctctgcggcgggcggcgcgcggcccggggcgcggcgcggagcggagctgcagggcggcggcgggagcgcggggcgcaagagccgctccgccgggagtgccggggaagttcgcgctggcagcatggggcggtgacgccgcaccggccttccgcgcctgccagccgggcgagagcaggcggaggagaaggaggatgcatcctcaccgacggctcgcctcccggggccggcgcgcagggtgagccctgggcgcgctgggccggggcagtggggtaagaggacgcgagcggggaagaggaccggccgccccggctcggtccgcacccttctcctcggggcgcctgagcggcaggctgcgtggccggggaggagaggtgcagagcaggcggggcgcgcagccaggccagagcgcaaactttaccctggcgactgcggggctgaagccgggcgcgggagagagcggggtccgggcggctcatccctgccggacggggcaccagggcgcggtgaccggttgggggtgggggacacccgttgccaccatcacgggagccggaggggtgagatcgcccacctggaaagccagcgtcagccccggggctctgaggcgcgcggcgtcccggcgctgctcgcggggtggactcggaccccgcgggggtgtcgcgcgcgtgtcgcgcgggctgctcgaggccaggggacttggagtcgctgctgcaccgcgcgctcccagcccaggaggaaggcgctgcctggcggagcgcttggctcgtacccggggcaggagcaggggaagtctgcgaaagccgggagcgagccggggagggccggggagctggagaccctcggcgtgccgctgcggaccgcgcgggtggcgaccgcgggtgccagggcgacccaggctgcggctccgcagtgcagcccccgcgcccacctgccctggcgcgccggccctggtgagcctctgtgggggtccggagggtcgtgggagcgcagcctctcctgggggtccctggctcggggctgaggggcggcgggaggcgccgcccgggtttcccgcatgcagcgccgcgtgctcgccgcctggctctggcccgggccccgcgacgagccccccggacgcgcccaggcgaccaccgcatggcaccctgcccttcttggcaggagtcgcagaaggccttcgcttccgaggtggaagtacctgttgtgtctcccaattccggagtttgcgggggatgggggtt

SEQ ID NO: 237802 - DNA, 869 bp, Homo sapiens
  chr15:27216000-27216869
  hyper
tcaaccccgggcgacggcgggcacgggaggtcagggagcgctggaggaaacctgcactggggtagaaatggctggaggaaggcggaccgcgggctcgctctcatggtgccaaccccggggacctttcttcaggctccctgcgggatccccagcctcccctccccctcggagctccgcccccttcctggcctcaaactccgagtccattcaaacctcgccttcctcgccctgcgcgttgtcaggcgtgtaattggggaaactcctccccgccgggaccgcctcggaggcgctgccaggggacagccgcccagctgcccccacctcccagcacagcgcacacagccccggcctgggcacccgcgcccgctcgcggctccaggcggggtgggcggcgccgcgccagggggtccccggcgcccattgctcccgccgcccggttgcgcggaccggcgctagtgcgcgggtgggggcggcgcgccgcggtggcccggcgtcccgtgtgcgtccagtgtgcgccccgcgggggcgcggccagcgccagagtagatacctgtcccgcccgccgcggccagcagcctcggaggaagccagggcaaagagggccggcggagaccaggtccgcgccggaggaagccgcgcccggccgaggccccggaccctgcgccccgagctccacggcaccatggccccgaagctgctgctcctcctctgcctgttctcgggcttgcacgcgcggtaagtggcgcgggggccgcatccccggaggccccgagctgggcgacagggcggcggggggcgctgtctgctggagtccctggcgcgccagccgtcggctgggctgcggcacggcgggccgggaggggactggg

SEQ ID NO: 237803 - DNA, 866 bp, Homo sapiens
  chr15:28339717-28340583
  hyper
aaaaatagatggttcagagtcggtggaaccttccagtcctcacactcaaccccaaatcgttcgtgtgggctactgccggccctctctccggctctgcgctctttctgcctgcaaccgtgcccccgaactcgggccctgcgaggtgggggtgggcccgggcccctcctgccgcccctgctgccagcaccgttctctccgaggccctcaacgccccgccgtgccgtggccttcagagcgcgccagacgctcaccaagcctgcccgagccccgcctcccgcagccgtgcccagggcggagtggggcgacggcaccggtgccaggaccgacagaggccagggcgcggcgccgggcgtggtcctgacacctgccctgccgggaaggggacggcgttccacgcctgggcccttctccactgcgtacaggagcctgggtcacctgctcggcccaagaaaaggctccaggcctgcgggtgtgaatgagcagcagccaagagagcggtgctgccggcgctcaagctaggccgggtcaccgcctcctgcccaggtccaggcagccccggcctttcccgctggtactggcacgcccgtggccgcacggctgagtgctccgggcatggtgggtctgcgggactcggagcagagctcgagctggcggatccccggttggcgcccggcgggagggcaggagtggcccagccaggccgccctgcgcactccccgcccgggtgcgcccgggggaccgcggccctcccaccccgcccctgtgaaacgacagccggcagcaggcgccgcacgccgacttcacagtggcggcgatcaacagcgtgtggaaaacagcttcttcgtaaatcttaagaacattgtggc

SEQ ID NO: 237804 - DNA, 325 bp, Homo sapiens
  chr15:28340883-28341208
  hyper
tgttcttcgagttctttaaatatctgacataataccggcaaggaacgagaagcaccaggtttaggcgctgaggtgaaaatttggctgttgaaaggcagtccctctgcagccaactcccctctggtggacagtgtctaacatccagagaaaacacccgtcactgaacgctcccctccccacaaagcgctgcttggccccaaatcgtccctaatgcgctgctcagccccaaggcgtccctctgagcgagaaaccgcccctggctatgcttgcaggggcctggctgggtccacagggcatggctgtgtctctcggagcacggcccttc

SEQ ID NO: 237805 - DNA, 941 bp, Homo sapiens
  chr15:28341521-28342462
  hyper
gcgtagccgtgtctcgggagcctggcggtgtccgcaggagcgatgctgtgaccgttgcatttgaagcattccttctagttcccggatcccagggagggggcaggagaagccctgcggccaagaaggcctgaagaagcccgtccaggggtcagcctcctcctcagccggtcctgggctgagacaggggtgtcccgctgagggcagtgtagggtgcggtgcccccaccccacttcgggcctggaccgagaccgcgagtgtgaccgtatatcccttcaggtggatttttcaacatgtgaacttggttaaaagcttctagaacgttaagccaaacatcgtggctttccatccgttttctgttcttgtttgaaagagtacgcctccttccagcctgggaggaggggcggggcccgggagagggcctcgggaggccgcgggtgggctctgccgagggccgcgttcgcagggccccccgggactggcggccccgcggcaggccaggcgcacctctcggggagaaacgagcagcgccagcaaacgcgcagccgggcacgcggccgcccagccccgctcccagcccggggccaggacccctccccgcggcgccgctgccgcaagcctcctctgctaccccagctgcgggcagtttggcccggcgctgtgccgctgtagttcggtgtcccttcgcccatcctgcaggccagcttggaaactgtgtcccatgctcctcgaaacaccggacctgctccccgccgccctgcggaatgcgcctcctggcgcctcagtgggtggccgggccgagagcacaggcgcgccagccacacctccccacgggtcggacccacacggaccccgccgcgctccgccgaaactgcgcgggtcccgcgggtggccggcgcaagagccacagcccgcgacaagccggctgcctgcaggtcagtgac

SEQ ID NO: 237806 - DNA, 394 bp, Homo sapiens
  chr15:28344098-28344492
  hyper
cctcatggcccaccagggggcgactttttcctgggtcgcctggcagagagccggagggggtgctcagggggcagctgctgcaggcccaggcggactcagccgcgctaggtcggctccgtcgcacccgtctgtgcacactaacctttaggggaacttgccttgcttcctaagccgcgactcagccggggctgtgtaaaccctccctgcctgttcccaggctagtctggctcctcgcctccttcctcccgaccgcggagcacgtgcactttacctgcgcacttgcagatctttctccaggagtgagtttaaggtccgcacctccgctctggatggtgagcggagcacagccttcgaagtaagaactcagagggagctcggcgctcccgcagcgggt

SEQ ID NO: 237807 - DNA, 49 bp, Homo sapiens
  chr15:28344695-28344744
  hyper
gtctaaggccacgccgccccggcgtccccgacagcgctctccgcgggga

SEQ ID NO: 237808 - DNA, 1389 bp, Homo sapiens
  chr15:28351667-28353056
  hyper
gtgctctgagacctcgttgtccccaagggtctctccaccctccgggccccggcctccggccccgcctggcatgaggagcggggagcgcacagcagggtgggggcaccgggcgcacgcggggaatttccccacgaccacggccacgccaaatgcctgaacctccacggctgccggcaacagcgagcgcagggagggggctgtgcgcgcgggggccctggtggcggagcaggcatcaccccgagagcgccgaggtttgtggtcgcaaccccgggagcaccgctgcgggaggagcggcgtggccgggcagaggcgacttcctcgcaggcagtaccgggccccgcggccgcctccgggcctgtcctggtgccccgggcttccacccggcgggctggcgtgcgggggctggtcttcgccgagatcctgctgggagcgggctctggccccacggtgagcccggccccagcctcggtgatgcgcttcgctgccgcgcggggagggagagtccggcagggtcacgaggcgccggccccggggccgcttgaaacccgaagagaccccgctcgctcgcgcgcccgccggacgaatcctcgcggaggtcccggggcgcagccggcgtgagggtggggtctcatcgcaggggcgccgggagcctccccgctccgctagctcaaccaaggaccgctcagaggggctctcaccctgaacctcggcttttctaaaggaagggcagaccccagatttcccccttctcttctcgaacgtgctttgggtgtttttctgctttcttttttggcaagtcaggacagcgcacagtgcacggagctccgaagctctctcagctactcccggatttctggttaaacctgagggtgagcccgaaagaccgctgccgccggcggccaccccagcgcgggtccgctgagaatggaaacagcaagtgcgcgccggccaggccgccacctctccctcctccaacagcccgggcagccgcaggggccagccccgggccagccagggcccagcacaaaatgccttccagcgacagcagcgccggaagccccttctgaggtcgtggataagcctccgcgcaggggccccgcgctcagcccaccccgcatgcctccgcgccagggcctgctggtgggtggccgcctgccccgggctatcccgggctgggcactggcgccgatcccgcctcgcttgtggagctgcatttggggggaaagatggaccggcagcgtgggacgcagagccaggccaggccgcacgggctgtgcacaaagatatgcccgacaggcggggagaaggcatggcccaccggctcaggagaaagtcctggaggggaggcagtccgcccctggggacaacgcggggggccgtattcggaca

SEQ ID NO: 237809 - DNA, 181 bp, Homo sapiens
  chr15:29033871-29034052
  hyper
ctctgagcgcgactcggagggcgacgccgcggccgcagccatgggtgctgggcctgcaggggcgcgggggggagggcgacgctaggacctgcggggccgggcgggagagagggctgccgggaccggccctagacactgagccgcggtgggatccccgccggctctgcgaggccctgcgagc

SEQ ID NO: 237810 - DNA, 253 bp, Homo sapiens
  chr15:29131588-29131841
  hyper
tgggatatgggggtacagcccggcggccccactcctctctgaccggccgcttccccctcccacgacgggtgggcgggcggggcggggaccaggcggcggctctcgcatcccgcgcggggggcaccgcggcaaggggccacccggcgcggacaagaggcgctgtgtggcggggctgtccgctcgactcctgccgggctggccgggctgcttggcaccggcatcaagtccccgtgccgggcggcaactactgagt

SEQ ID NO: 237811 - DNA, 172 bp, Homo sapiens
  chr15:29432129-29432301
  hyper
ggtctgcagactacgcttcccaggctgccgtgcctgggctgccggcaggctctgcctgtagggggtgccagagggcacctggccggcctgcggggcgaggagggagctgcgggtttcctgcgccttcccacctcctcccttctgttccccggctttgcgggctgagagctgc

SEQ ID NO: 237812 - DNA, 1186 bp, Homo sapiens
  chr15:29561185-29562371
  hyper
cggtgtggggtatccgccggtattccaggtaacgctgtcgcacaaagtcctcagtaatgagtttctttggatctccgaaaattaaatgcttcttggtggggtagacccctaagcgccgcagaaagtcccaggcttcagtttccttgatggtgttgcccttcataaagatgagccctaagacgatcatcaggaggcccgtagtgggcgtgccttggtcacccctcatctcggcatcctcctccacaggctccagggtgttgatgaggatgtaagtgttgctcttgggttcaagttccaccagcttatacccgaagacgtactggaggcgctcggcggcccgtttgaagaggtcggggaagatgtccttgtagtccccgatgacgtgcttcagtatgtcggcccgcttgatcggaatcttcttctggtctttaatcagcaagaactgcaccagctcggacactttcagctccagctgcttctggctcctgggccccacggcgggggcggcctgggcccggcgggcgccctgaggcgaggggccctgcgacccctgcgagccgcccggcccgcgggacgtgctcggggcctcctcggcaaagccgtctctgagaacccgggcgtcttccccggcccgcgaagccccggggtttccgctatggctccagtctctgtccctctcggcctggccgccagagcggccccggttcctcggtttttgcaacatgtctccggcggcaggtgccggcgcacactccggtaggcaagcagccgcggcggggattgcgggtcggcgacccgctaacgccggtgcctggaggcgcgcgcagtgtcggctgagactgcgtgctgcgtcatgaagcctgcgccttgcgtcagggcggctgggcggtgcgcctgcgcggctgcggcgggtaccaaaaggaacagcgttttccgtgcagccctgcaggtccgggcgatgatttttagtatagtgaagtgttgttaccaaaccatgcaaacagagagcgagaaccgaaactcctaaacaagtgtgtcgctaaattcagaccacacaggctcaggcaagttttacagacagtattatgagtttctaaatcgggagcatttgtaaacggaaagaattcagaggatgaacgtgtgagaaaaaaaaaaggtgaagaggaagggccgaccgtggaagtaa

SEQ ID NO: 237813 - DNA, 1681 bp, Homo sapiens
  chr15:29861982-29863663
  hyper
gtggttaagagtctgaaaatcggtcatccttaaggtctggagctcagaaagcacgccgcccccccttgcctgccccctgccccaggacgccggatgcgggtcgcctgcccagtcccgtcgcccacaaaccacgccgttctgggcggacgcgggaaaccagaagtccccgaagccaagtcagcgagcgaccacaggggccgcccggccgatccccgatatccgggctgacccaaaacccgacgggaggcgcccctcccccgcccccccaccccaccccccacccccaccgcccccggtcagggccgccgcgagggtgagaggcgcgcccacatgctgctccgctccgggttcggctcccacctcctcgcctcggccgcggccgctcggatggcgaggtcgtgtccccggcgcgcgcggtccccggcgctccctccggccgctgcgggctcggaggacggcgggcgcctggctgctgtttcctccaagaaaagtaactccgggaatcagcgcaataggagcgggaacgcgatgctccgagagcggcgagccgggccctggagttattctgctcggagtttcgaactgcgccccgcgctgcagctactcggccccggcgttggccgccggaacttgccgcccgcggtggcgtcccggcggccgcagcgcctagcccccccggcccgcgcagtccccggagcccgtccccgcctggtcgcggacactcaccgagaagcctgcccagaaggggcaggagtggcggacgcgggccgaggtggtgagcgccagcgcggcgaagctgactgccacgatgaggcatccgagcgccatctgcgtggccccgagcgccagcacgatgcgggagcggcccgggcactcgcgcaggcgggacaggctgcggggcagcgcggcgggacgcggcgctcgggggccgccggccggaggcatcgcgccgggcgcccgcacgcctcgcccgctcccgcccggcccggcgcgcgccgccgcctctcctcacagagggtccgaggcaagttgcgccgggtgcagggacggcctcccagccggctgccagggctgcggcggccgcgcgccgggagcgggccgggccgggcggggagccgggcgcccgcagcccccgccggtgcccgcgcccatgccgccgccgccgcgccgcccgcccgccggccgcgccgcgctgcgccctcccccgcccgccccgcgcgctccccggcccgagcgcgggcgcgagccgccgccgctgctgccgtaccgggcgcgagccgctgccgtccccgggcgcgagccccgccgccgtgcgctgggccccagctggggcgggagcgggagccgggacccgggagccgggagaggggcggggaaggcgcaggtgcggtcctggcgtcccagcctccgcgctcacgcctcgcgccctggcggctgcaggtctgcggaaggagagcgggggcggcagcgcatcaagggcaacggcatcagcctccgcggcggagccctgggtcggctgcgcggaggggcccgatagcggcagcgggccagccgagccttcagagcctggggacggctcgggatgggcgcgcggggcgctgaggacggggagacgggctgggagcagacaggagggaaattccgagcgctgggccgcaggtgtggcgaacaggagcctctt

SEQ ID NO: 237814 - DNA, 58 bp, Homo sapiens; identical to SEQ ID NO: 203807
  chr15:29864126-29864184
  hyper

SEQ ID NO: 237815 - DNA, 45 bp, Homo sapiens; identical to SEQ ID NO: 203808
  chr15:29966982-29967027
  hyper

SEQ ID NO: 237816 - DNA, 269 bp, Homo sapiens
  chr15:30113523-30113792
  hyper
tcttattgtccattcgtaggaatactttgtattacttgtgaaagtttaattcaagttaaattattaaatgttaaagaggttattttcaaagttaccttaaataagtaatacagcatgaaagaaaacccgacctactacgcctcacaggctgagtggagtgttttgcagtctcaaagccttatcgctggcgtgcgcataccgcagggagtgacatcagatcgaaactacagggtttcgccggggaccaaccactcctccaaagacagcag

SEQ ID NO: 237817 - DNA, 56 bp, Homo sapiens
  chr15:30113972-30114028
  hyper
gcgcccgcagccccctccccggccgcccccagtgcggcccgcgccgcccccgcccg

SEQ ID NO: 237818 - DNA, 177 bp, Homo sapiens
  chr15:30114388-30114565
  hyper
tcaactcggacaaaagtccgggaagcgcccgccccgcccgggtcttctccacggggcgcgcccgaccggcacctccctccgagcgcggccacccactcggcctcccgcagctttcgcagcccggccacgtcggcctcgcccggtcgcccgcccgtcagcagcacccgtggcctcccg

SEQ ID NO: 237819 - DNA, 350 bp, Homo sapiens
  chr15:30114865-30115215
  hyper
ccgtgcgagtcttcctgtttgtttttatccaaggtctggcagaattcgcccccaaggagaaagcgcctgtgcaccaaagctttccttaagagacttgtccacttgctcctcgacaagccacgcacatcatggggtgagccccatgcatgagtgcggctggaaaggccggcagagccgatacccgacagttgtttccttcactgggcaaacagcatggtcacggctgtcaccgcgtgcctcggcgttgttcccacggaaggcggaatgcattttctgcaaggcgcgtcatggctttcatctccgaggagctccggcagggtcagaagcgttgctctcgttcaccggcgccg

SEQ ID NO: 237820 - DNA, 787 bp, Homo sapiens
  chr15:30260516-30261303
  hyper
tctgagccagaacccgccgtaatggagcagaaaggacagacagaggcgggaggccgacgcccgggtgcgggtgccaggcgtcccggccgctccccgtcgccctacgcgccgcgggcacagcgagggtctcggcgaaaccagtcagcgggcacgcggtacaaggcggcgctcggccctgggctcggccttggctgctgcgccccgcgcggcgcgccccgcgtcccgtcgggcccgacagtcgcggcctcgccccccgcccgaccgccccggccgccgctcgctctcccactccggcccccgccccgctccgcgcctagcccggctggggctccgcgcccgcgcggccgcctcaccacagcttcctcttgagcggcaggaggctgccgcggttggagggggtgacgccgatggccatctgcagcaccgtcaggtatttctggtacttcatcttgtccccgctccgctcgcgggcagggccccgccgcctccgccgccgccgcagacacagcccctccaggcgccgcatagatcagctctgggccatccgccgccaccacagctcccaccgctcccgcgcccgccgcacccgcagctgcggccgtgcgtggcccgggctcccgctcccgccgccgccgtcgccgtgcgtgcccggccgctcccgccgccgccgccgtgcgtggcccgcagctcccgccgccgccgccccttccacccctgcaggccgtggcccggcggcgcgctccggtgggcgggtgcgggtctcgcgggaggccgggctggcttggcc

SEQ ID NO: 237821 - DNA, 131 bp, Homo sapiens; identical to SEQ ID NO: 203813
  chr15:31507691-31507822
  hyper

SEQ ID NO: 237822 - DNA, 56 bp, Homo sapiens
  chr15:31621005-31621061
  hyper
cccattttggtgtaaagaattgtatgcttcctctgagctcacgtgagttcttctgt

SEQ ID NO: 237823 - DNA, 340 bp, Homo sapiens
  chr15:31621315-31621655
  hyper
gccgctccaaaccacgtggcaggtgatggggtagagggtgagagcggggccatttctaggcattcggggtcagttaagggtgtgggggctcaggttgggggtgggagtcagtgtgggctcagagttcagctcgggacgcggctgcagggtgggtgtggccctgggggaggggccaggctaggctcagctcggctccaggtggatcctgagtatcgggtgggggcagcgattggggcgtggctggggttgagatccgctttgggggatgatgcccgtgctgggcaggatacttaatgtttgggaaatttttctacggcctctgtcagggtggcctgccact

SEQ ID NO: 237824 - DNA, 44 bp, Homo sapiens; identical to SEQ ID NO: 203816
  chr15:31621685-31621729
  hyper

SEQ ID NO: 237825 - DNA, 328 bp, Homo sapiens
  chr15:31775902-31776230
  hyper
cgcagcgcccccacggccggcgcgcacgcctcgtcccgcgcgcccgacgcctgcacgtggatgacgctctggcgcgctggcgccggggggctgcggccaggcactggtccgctggcgctcgcacgccgcgcgcctccccccggggaggccgtgccgcccgccgccgcccgcgccgcacgccctgccgcgggcccggggctcggccgctccttgagcttgagcaccagctgcgtgggtgggcccggagaggcgcgctccgggaccggcacgccctccgtctccggtctgcgcggcggccgcttggccgtggcggcggcggcggcggcgg

SEQ ID NO: 237826 - DNA, 287 bp, Homo sapiens
  chr15:32322645-32322932
  hyper
aggcgcgcgggggcgggcggggcgggggcgcgcgcccggctccttaaaggcgcgcgagccgagcggcgaggtgcctctgtggccgcaggcgcaggcccgggcgacagccgagacgtggagcgcgccggctcgctgcagctccgggactcaacatgcgctgctcgccgggaggcgtctggctggcgctggccgcgtcgctcctgcacggtaaagccactgcctccccgccctccactcctccgtgggatcccgggcacatcccgggcgcctctgtgcgccccgcgcct

SEQ ID NO: 237827 - DNA, 682 bp, Homo sapiens
  chr15:33009640-33010322
  hyper
ggggtcagcgccctcgaagttgggggcctcgggcggggccgccggggagccacgacggccgctcgaccagagcatcccgcagtcccgttccctccagaggggaagaatggccgaatctggcacgatcccacggagatctcgctcttcccagcgcagtctccgctactgagcgcgggaccaacgcaggcgatgccgggcggccgacagggaaagcccagacctggggcagagaaggaatgaggggccgccagccggggggatttcctcccgctcttccctctccaacgggagcggaaaatgtgatttgctgtgcattccaggcgcggttccctggggtgacctctcccagccggcccgggcggggggagcagacaaagaggcgaggcgggcggagaggggaccccgcggggaagcaggaggggtgcggggggcgggggcagtaccgggaaagggggcggatagcgggtctggcggcggcggcggcgcctggccaatggagaggcgcggccccgggcgccgcgctctgccgccggcatttaaacgggagacggcgcgatgcctggcactcggtgcgccttccgcggaccgggcgacccagtgcacggccgccgcgtcactctcggtcccgctgaccccgcgccgagccccggcggctctggccgcggccgcactcagcgccacg

SEQ ID NO: 237828 - DNA, 1207 bp, Homo sapiens
  chr15:33010502-33011709
  hyper
gaagaaccatcgcggggtccttcctgctgaggccgcggacaccgtgacctcgctgctctgggtctgcagggaaacgtaggaaaaaaagttgtcaggagcgggcaggatgacccccacatcccgtttccacctcccggaggcccccgaacacgctcctggtgctggtggcagcagcgcctggcagacgcgcccgcttagcgagggcgcgaagtccaggccgccagagcgcaggagcatccggacctgctagtcggccgctgactgcgcggcgagttgccttgagagggtcccatgtgcttggggcgccgcgctgggtctgggggcgtcttggggcgcccattggagtccgcgggttggagcatccggagaatccatgatgtgtgcatttgccgatccccgaggtgagatggagactggcaagggcagagccgctgtgttcagccacagcggaaaaccgaacggtgggtaatccgacagctgcggtgcggggcgcggccctggccgcggggtccagcgaacccgcagtgctcacaaggcagacaccacacgcgctcgcggaccggccacgcactcgcgggcgctcgcttctctactccagcctcttccccgccccgcgcacgcccgggctgaatggtagacgttctggcgccgggcagcggccaccggctggttcccacttccgcgcgcaccccttaaactgtgttctagaggccccagcctcgccttgcagcgcctcactagctcctgaggactagggactggcggctgaggcgggttggcggctgcaacgagctgggcgtctttcgttctctctcgctgcctggctggctccgctggcccctccacagcttgcggagcaaggccatagcaggggagtgggaggtatattggggctgtcacctccttgctggccggagttatttgtagactacagactccggaagaacagacgcgccaccgctctcgcttggcattgccttcggatcgcagctcctccttgggggtgccccagcttggcgtttatttgcctgcgccaggctctggcgacggtcaccgggccaggcggggagggacggacggcaggtgaccagcctctgctgtgaagaaattcctgcgcgcccggagctgtccctaatgcattcccgggtcgaatccgtctactgccttcccctcctcgaccgactccgaatctcggctcttatagaca

SEQ ID NO: 237829 - DNA, 111 bp, Homo sapiens
  chr15:33603978-33604089
  hyper
ggaaaccccagtcagtggctccgcgtcactcaggtcccctccttgacacctgagggcgctgctccgtcccagatttgggggtgagggggcgaagtctgttgcagccacacc

SEQ ID NO: 237830 - DNA, 257 bp, Homo sapiens
  chr15:34394021-34394278
  hyper
cccacagagcggccgccatgacagcagctctgcactcagaccggcagccccggaagccctcccagtctcccggccgccaccgccgccgctggcggcttgatgttgtcatcactgcgcgcccgtttctgtcataagctgtgggatccaaccagagggaagagatcatggccgatcgactagcgaggcggaagtaaggcggaagtactgcccttaactcccggcactctggattggaagacggcgcacagagcctgtgt

SEQ ID NO: 237831 - DNA, 203 bp, Homo sapiens
  chr15:34635316-34635519
  hyper
gtctgcagtggtccgcccgaccgcgtcacgtgttcgtcaatttccttcctgcataaccggaagtctctctctcctggcactccggaaaatgtagtcaatttttgccttgttttcagctagccagaagggggcgcacgagagcagggcttggcttggggccctacttgcaactttgcaggctaaaacacgtggagtgtccctac

SEQ ID NO: 237832 - DNA, 130 bp, Homo sapiens
  chr15:34730006-34730136
  hyper
agcggcgggagcctaccgcgagcggagtacggaaagcccgcagggccgcgccacatggcgcacgcgcactgagctgcatacctaggtgacaaacgtgcacgttttgcacgtgtatcccagaacttaaagc

SEQ ID NO: 237833 - DNA, 1063 bp, Homo sapiens
  chr15:34806425-34807488
  hyper
attacaggcgtgagccactgcgcccagccaaaataccgaaaatcttaaaggtctttccccttccccgcctgggctcaaaaaacgccggagccgccctgcaccgccctgtcgcggtctccggagcaggctggccgactgagggcgaccatgggtcccaagaaggctccggcagtcgcgggctcccacctcggggcgcggcgacgggggcctagaggggccaacagcccccaagcttacgccacgcgaggagtcggagagacgcgccctcccctctcctcccacccaagcctccggcagtcccgggccggggctgggccagttgcgggagaaaggggcggggaactggggcctctctggggaaggctcccctttgtcctgggactccgggcgccccctctctgccctcgccctgccccgcgaggccgccgccgggcgcctcacagtcatgttgcagtggagcgtgagcgggggctgcggctcctggttcttgtggaagatagtcccagaaacttccctttggccttgaaccctgacacggacatcttccactcatctacggcgggaggggcgcggaaggggagcctgtccggagccgctgtcacggccgcgactacccagcggggccgcccagccgagctttcgcgactctgcctctgcctgccgcctggacccttgtgggagcgcggctggaaaatggcaagggcacggaggccttggcgggagctgtgtggcggcctggggggctgctccctttgtaaccgactccacccacaggaggcgcggctcctgtcaagccgcagcttcaaagggcaacataaccactgcccccactaccgcctgggaaagggctgcccctaccctgcccccgtcaccctcacccctcacccctcaaccaggcgggccctgcgcgcaccagtttcggcgggtgcacgagtccagagcgtgcgcgcgctcccggctgccccctcctcccttgacccagcacctttctgcccgacccatctggttccttcctcacactcgccgactggaagctcagggcggcacagccactaactctctc

SEQ ID NO: 237834 - DNA, 363 bp, Homo sapiens
  chr15:35014048-35014411
  hyper
ttctatacaagggccgcgcaactggagagggcccttctgcaggagagaagagggaatgtgctgaatgagttaaagtgccctttgtccaccccccccccccgccccagcactcggcgggcgcaggctgagctggtgacccgggcaggaccggagccaaaggattaatccatcacaatgagacgttctattctgggcaggcggcgcgagcagatgctgggcgccggcggaggcagcgtgcagggctggcgctcacgcaggccgccagcaccctgcgctccaccccaccctgctccctaatgagaagagaggagctgaacccagacagccgctccctgttgacgccttaggcgtttcaaaactaga

SEQ ID NO: 237835 - DNA, 233 bp, Homo sapiens
  chr15:35046610-35046843
  hyper
gcccttacctcccgatcatagtggagtgctgctgcaccgcggcttctagcagcctctccaagatggtccattcccccatcgctgtgcatccggaggcagcagacaaagactgggcagcaccgggcacgttcccgctcctggcccctccccgggccgcacttccagaatgggagtgaattgcctcccaattaaagaagcaattttttaaaaaatcctcgaatccccctttcctt

SEQ ID NO: 237836 - DNA, 197 bp, Homo sapiens
  chr15:35047503-35047700
  hyper
gtaggtatcttctcttctctcggtgcatccctcaccttttcgctttttgcctcctggagacaactgaaattccttccctagatggagatgctggctgagggagggcgagtgggggcgaccacttttaaatctcccttaggggacagagtggctgagagtgcttctgcagagtggctgcggttcggtgcctctgtgga

SEQ ID NO: 237837 - DNA, 296 bp, Homo sapiens
  chr15:35087492-35087788
  hyper
ctgcgaggaccaacgcccaggacaaaacaagttagaaccaaatcaaaaagtgtgggctttaaaaaaaaaaaaaaaaaggcagtcgcagagcggcaggagctggggccttggctgaatgcgggccgggctggccaggtggcggcgcggggctggcgtccggcgcggcccgcggaccaggcgaggagtgaacgcggagggccgggcgctgactcaccgtcggcggggcgggtcggctcggctccggcggcagcgggctctgggtggctggctccaggagggccgctttatagaacgct

SEQ ID NO: 237838 - DNA, 137 bp, Homo sapiens
  chr15:35279816-35279953
  hyper
agtaccattaaaacgatgtgaggatttcacgaaagtaagcgaacaagaaatgaaagacctaagagaaacacacacaactttcagttggggaataatctccggcggctgcttctgccccactcgccccgggcccattc

SEQ ID NO: 237839 - DNA, 65 bp, Homo sapiens; identical to SEQ ID NO: 203827
  chr15:35280590-35280655
  hyper

SEQ ID NO: 237840 - DNA, 42 bp, Homo sapiens
  chr15:35280893-35280935
  hyper
aaagtaaatataacgtagaggtcaagcgcaggcgctttgtgg

SEQ ID NO: 237841 - DNA, 602 bp, Homo sapiens
  chr15:37174937-37175539
  hyper
caaaagtcgttccgcggtgtagattgacactcgttatgtgggggtctggttgcggttggaagacttatccgagtcagggctgcattgccagcgcctttcccaagagtggaggttggcggtgcaggcggtgcggctgccagcctgagattgttccggctctcgttacctgtgcgccctcgcgttacatggtgctcataaatcccgcggcagattaactgggaaaccaagaaaatgcctctatgcaccgaaccgttgaaaaagaaccaaaattctctcaaatagtagcagtctcacaccttgcattggacgtgaaacactatagtaagatcaaatgtcaaagacatcggttattttggtgcacttcagctaccttttccgtttccagcaaaattgagaagtacgaccccaaaaagaatagacacacccatggaaaagacgtgtgtgtgtgtgtgtgtgtgtgtgtgtgtgtgtgtgtgtgtgtagctatggtgacaacttttaaacactttttctgcttaaaaaaaaagattcggacagggtctggtattgctttgcgttgcaggaaagggtcattctggacaaggaaccgtctgaattccgaa

SEQ ID NO: 237842 - DNA, 398 bp, Homo sapiens
  chr15:37175818-37176216
  hyper
tgggggggttccttcgcattttattattattattattatcatttattcatttaaatgttcagtccttgacaaggtattcccctgccgcggggttttgctggagaatggacgtgggggcggtggaaggagtcagtgaaaggtggggtgcgcagaaaaacaagattcgcttcgcagggggctgacccgcagcgttctgctctaattgccagcagggggcgctctgatgttagctctggactagacagcagagccactctgtgcttgcaagacaggcttggcagtttcacgcagctgcaaaaggaaagggaggggggattgtagttcctaaatcctcaacagctattccacttgggttatttaccctcggttcgaaatgcttctacgtctcactttaccta

SEQ ID NO: 237843 - DNA, 272 bp, Homo sapiens
  chr15:37179523-37179795
  hyper
gaacggccctctcgcgggcaacccccacgtctgaccctcccacacacacaatgtagtcatagaaacacctagagaacctcgagccccgccgcggaagaggcaggagagggaagaaaagcctcgggcggccgaggtgggggtgggggcgaaaggggacggccagccccagatccaaaccagttccaacgacaaaaacagccagcggcggggggcgaggggagagggacggtctccccacccggcggccaaccctcccgcgcacagttgctcac

SEQ ID NO: 237844 - DNA, 632 bp, Homo sapiens
  chr15:37180023-37180655
  hyper
aaacaaaggcagcatctgggcgacaccccccttcctgcgttccccccagttatttactgggtgaccccgtcctttctcttcacctcctcacccagcgcctcggattatgagataatggattttgcgattgttcttgtcagggaaaaaaatctccacagaaccccacgttttcatctttcaactgttttatttaagccaatgggaaggtattgagggcagtaattgattcataatgatccataaatcgatgtcggaaagcggggggagagggtggaggtgtactaagagtatgggggggtggcgatgctgtttatttctaaagcttcaactaaagtagctttgacactgttggggctggggggggaggagctgttgggctctgccggatcatccatcattcctgtcacccagagtctgcccggaggagccgtagacgcaatctcccttctgtctctacaccgaaactattaatattaaaacctcccttcaaacactgccccgacggtctccattctcatcacaatctgaccggcctcccccatcagaccagcatttcccccgcgcggcactttctcccagccccggccccgacggagggggcccgccccggcgcgcgacgccctgagttgatg

SEQ ID NO: 237845 - DNA, 508 bp, Homo sapiens
  chr15:37391107-37391615
  hyper
cattatttagcagcggattccctgcgtccttgtcaatttcagagacaaaacaagcagcccaggctagtagtctaggcggcggcgcagcggctgcggcagcgcggccccagcggcggccccggcggcggctcctacgcagcccgtgcccgccccgagccgcgcgagccacggcggcagcggcgcagcagcggcagcaggagaaccgggggaatcgcgctgctggggtaaaagctggagcgaggcgaaagcgtgtaacgattgcacacgcacacacacacaccactcacacgcactcgccgcccgcccgctcgcacagcgctggaacacgcgcgcccagacacgcacacacgcacgcacacacactcgcacacacgcagaggcacgggagggaaagaagccgatgaataattttgctattttttaaaatactggccgccatcatcaagcagcgagcagcagcagaagcgttgaagggagaggaggcatcgggacaggcccctcttaggag

SEQ ID NO: 237846 - DNA, 177 bp, Homo sapiens
  chr15:37394680-37394857
  hyper
aggcgcggatagcgcgacgccagggagaggggctgcgggccgcgaggtttctgcccaatggcccgagcagggacggccagactcacggagcttcagggaggagagtgtagcccaggttttcagccactcttttttgccgggcttcaagcctgctagagccgacgggtaggaaatctg

SEQ ID NO: 237847 - DNA, 214 bp, Homo sapiens
  chr15:37398850-37399064
  hyper
cctgctttttctctcgtctcttccgctcgattgttttcctctttttttctgtcctcctgcggcctcttgtctagttcctacccctacttcagcgcaggcggcttggaaagccccggccagaggctagtaactctcgcaagtgggagatgctctggcgacggatctctcttttctgatccctcctcccccttacccagcgcggatcacacacatc

SEQ ID NO: 237848 - DNA, 74 bp, Homo sapiens
  chr15:37402561-37402635
  hyper
gaggagacgccgcgcgaagcgcagggccccagagggacacatgcacagaggcgcacacacgggtcaggcaggag

SEQ ID NO: 237849 - DNA, 515 bp, Homo sapiens
  chr15:37402969-37403484
  hyper
atcaattcccattttatgatcgctgacaaactcaatctcagggcggggtgtgagagctgggggtgagctggctcgggccgggacagaggtctctctgcgtacgccccgctccgcccggcgccaagggaagccgctgtctcttccgtcgagttctgagaccttggcaaacttccctcccccaaccgccggcgtgacttctgagttgtcactaatccgaacctgatattcaccagagctccttcggtcaccgacaacgctccccgctgctgccgcggcctcccgcccgccctcctcggcgtgttttcatttctaagtctacgggcagggattgccccgacccagtgtgtgtgtgcgtgtgtgtgtgtgcgtggtttcatttacattttaaaaatcatttttgcgttcttcagcgtggatctcagcactttccctgtgtctcaggccgactaactttgcataaacaaagcaacaaccgaagctcatagtgggtgaaatcttgcggggaaatgaaggca

SEQ ID NO: 237850 - DNA, 456 bp, Homo sapiens
  chr15:38543234-38543690
  hyper
ttcagtcccctaaggtggttcatgtacaggctggttttctaagtggagaacagataatagaatttgcagagccaggagctctgactcctgtggctgggctgaccttaggctccagcccgcaaccccagtaggtttctgtgcaaaaatcttttgagatgaatgcatactttgtcttctaacaatgcattcgtgacagctgtctatccaatcggtccgcctccgttcagagcagttcgtgccacagaagcatctcctgcgctatagttatgcaacctcactcgcagcgggagttatttcctccgttctggctgcgccagattcatgtaacacgcctaccctgggcttcaatggaagtcgttctccattaacaatcactccagctttccgagatgaatgccctgatagcataccccttgcgcagtaagaatccaggcagcgaggcgaggtgttaaaaca

SEQ ID NO: 237851 - DNA, 63 bp, Homo sapiens
  chr15:38746261-38746324
  hyper
ctcaggcagttaccggccagacccggaccggaaccttggcgcggtgacgctagtttccggcgg

SEQ ID NO: 237852 - DNA, 687 bp, Homo sapiens
  chr15:39872814-39873501
  hyper
tgtcccctgcgccccgtcggcccatttttctttttacaaaacgggcccagtctctagtatccacctctcgccatcaaccaggcattccgggagatcagctcgcccgaaagcccctgcgccaccccgcgggccctcctaggtggtctccccagccccgtcccttttcgggatgcttgctgatcaccccgagcccgcgtggcgcaagagtacgagcgccgagcccgtgcgcgccaaggctgcgtgggcgggcaccgacttttctgagaagttctagtgctcccaagccccgacccccgcccccttcactttctagctggaaagttgcgcgccaggcagcggggggcggagagaggagcccagactggcccccacctcccgcttcctgcccggccgccgcccattggccggaggaatccccaggaatgcgagcgcccctttaaaagcgcgcggctcctccgccttgccagccgctgcgcccgagctggcctgcgagttcagggctcctgtcgctctccaggagcaacctctactccggacgcacaggcattccccgcgcccctccagccctcgccgccctcgccaccgctcccggccgccgcgctccggtacacacaggtaagtcgcccccggcggccgccgaggaccaaagctgcccgggacatccacctggagcgctgaggcttcagt

SEQ ID NO: 237853 - DNA, 149 bp, Homo sapiens
  chr15:40074512-40074661
  hyper
cctttgccgtttacggtctagtttaaatggctggtgatcagttctagatcttggtgggaagatccaaatctcgggaaagtagaagccttggttacaggtcctaatgttaggtgattcctggagaaatagcctccgcggaggcagaagcc

SEQ ID NO: 237854 - DNA, 213 bp, Homo sapiens
  chr15:40075102-40075315
  hyper
ggctgttggagccctgcgagctgggacggccggcgtgtgtccttccgtcttcgctgccgacggtgggggttgggagcgatttttcgtctttaggttggattcggaacgcggacgtctggatgcttgtgtatctctgtccctcatattgctgtgatgccttacaggtcagttatcctctccgagcacagtttcctcctccgtaaaatgggaaca

SEQ ID NO: 237855 - DNA, 1604 bp, Homo sapiens
  chr15:40211820-40213424
  hyper
ccatcctcgggccacgagaaagccctatttgaactcttctgctcccgcgtgggggctggagtccaccgtccctgcttaactacactgcagctacccgggatccttaagcttccttcaactctctgcactttgccaggcacccgaaacccacggcggctgggcggccctgctcccggctctccgagcctgtaccctcggggaggcccggtccggaggcgccccgcgggaggcttaccgagcagcgagcctatgaagatgacgacctgcacggtggtggtgaactggcggtacagctgcgcctcgccgaactccccgagcgcgctgcggttcacacccgcagcctcggcgccggacgcgttgtgcggctcgctggcatttggagagatccagctcccgttatgtcccatggcgaggctgggactccggctccgcgcgccgcccgcctcggagccccgcgcggagcctctcctcctccgggtgaggagggacgcgcgggcgcctggcggagtcctggagaagccggagcagccgacgggtcccctcacgtctccacatcgccaaccccggcgcccgggaggcggggagggagggaggcgcggctgcgccccatgcccactccctcctggatcccagtcagcagccacaagaaggcggcacggtcagagcccgccgagcgtcgtccgtccctcctccagggtggtcagcgtggcccagcccactcgacaggaatggaaacacagaaggaggcattcgatggtcaaggagggcgctctccgctcccgctgcctccttcaaccgcgggtcctccgcccctcgagggctagggcatccctctccagtcccctcgggctgacgcactcgacccctctccttagcgggaggagaacgtttggccgaagctatttttcagtcctgttggcttcgaggctggatggcgatgtgaagccaacgtaatgcccacgccgagtggccggagccacgaggggacccccgagtgcccgacagcgcccatggcttgggtggaaagccctgagcgtccccagcagcctggccctgcgcccggccgcctgccaagacgcccgtgctgggtcctgcttcccagcccctcacttgtggctccgacctcctgcctcagcactggcgacggggaccccgttccgcagcgcctttttgcctctgcatggctgggcgccccctttcttagcccccctcggtccctcggccgctagaacacagcttgacagccgggcggggacgaaggaggacgcccccagtggggcagtggcaccgtctgcgcggccgccagactcggtgcgcgcctggggcagccgggggcgcgcggctggcgaggatggtcacgtggcacgcgcgaccccgcccctcgcgcccaggctgccgcggggagggcgccatcttggccccgcggagcgtgactgtctcggctggaagcgtgggaggccggaggatcagtgactggctgtcgtggacatgctcgctacacctcccggggcttcgcttcgtttactattaactgtcgttactcctctgtatctcgtcagcaggggctgcctgcggtgttagaattacacgcccctgccacctgg

SEQ ID NO: 237856 - DNA, 148 bp, Homo sapiens
  chr15:40225953-40226101
  hyper
ctggggaacaagagccgaaactctgccaaaaaaaagaaaaaagagtttcccgcactagccatgccagggtggagaagttccagcaagcacttctgttaaagatacttgtttcgtgaaaactatacaatgtggcgttttcattcctatc

SEQ ID NO: 237857 - DNA, 171 bp, Homo sapiens
  chr15:40401049-40401220
  hyper
actccgcacggtgcggtattgtttccaaaatacgcctgctcggggcatcccgcaaacagctgatgaggccccgcccccctgcgcgtcacgccgaggactgaccaatggcgagtgaagcgccaagtcccgggctgggccgctgccagggacggtcacgaatgtacgaacctt

SEQ ID NO: 237858 - DNA, 636 bp, Homo sapiens
  chr15:40544705-40545341
  hyper
tgggttcgccgccgcgtcctacctgaggccacaccctgaaatcaaaatcgcggtcaggtgaagccggcgctgcaccaacgtgtaagcgcggcccctcctcggcgttcccgcgccgaggtccctcccgcggagggcgggcccggctcccacgacctcttcgagcgttcctgggcttcccgctccgcaggtgggttccccggctgccccggaggttcgcggcgagaggacgggcctcccaacacgcgcagcccccttcctgggtgcccatgccccgaagttcgggaccagccggcgccaggcgaggggccttgggcgcaggcatctggagctccgcgtccctggagcgggacctccctccgcgggcgcccgcccggcgcggggcattcgcgtccccgagagggcgcagcagtggggcctgcgagctggggccgggtggccgcgccgggtcggagtgtggctggagaggggccgccccggaagcggtgctgcgcccaacgtccccttctccccgtaagccccgcaaggagcctgccgcctcttgcacctgagccaggagttcagtcgggaggcgggcgcggagcggttcccagcgcctggacgtcagccagtcgcaacacccgcgggaacacttgctac

SEQ ID NO: 237859 - DNA, 103 bp, Homo sapiens
  chr15:40650948-40651051
  hyper
ggccctgcccctgcgtcttctccggaagccccaagcccgcagtaacctcagtccgggtttcagcgtgccagtgtgcatgaaggtgtgcgtgaatcgcggatgg

SEQ ID NO: 237860 - DNA, 54 bp, Homo sapiens
  chr15:40698353-40698407
  hyper
gacctcggcctcacgtctgtggagtgaagatttgagaccgtgggacagtactgc

SEQ ID NO: 237861 - DNA, 265 bp, Homo sapiens
  chr15:40762823-40763088
  hyper
accagcctccggcacgtctggactcggagagagcgctgcccgcctccctgcctccagacccgttgctggaggaagggctaggacaggcctgagtttgtggcgaatcccccttgtccacttccctgaggacacacgctgcaggagagcagcctcgagtcttttctgccttcgaggtctcaggagcttttgtccccaagcccagaggacaggggtggccctgactcaggcgccctcttccgggtaggggtccgcgtgcgccctccca

SEQ ID NO: 237862 - DNA, 162 bp, Homo sapiens
  chr15:40861435-40861597
  hyper
ttatcgcagaccccgcctcgggactgggcctccctgattcgctggggccgagtgacgtcctcagatcgcgaccctgggagtggagtgggggcagcgtggttatgtggctggaccgccgcggatggctcagggttcttggacattggcgctacgaccttaggc

SEQ ID NO: 237863 - DNA, 41 bp, Homo sapiens
  chr15:40886162-40886203
  hyper
atgttatggaagccgccattttgtacggaagccaaagtcca

SEQ ID NO: 237864 - DNA, 312 bp, Homo sapiens
  chr15:41055853-41056165
  hyper
gcctggagaggcctccgtgaggacgccgtttgctctgggctctgcctggcaggggactttggaacctggcctgaagtgttcaagaagcgggcgcgggggcaacacgcgcgcggggacgcagtaagatcacaggctgcaaagaaaacagcactaagcgtcctggaggacgctggagcttcaggatagtgtccttccaggtcgtgggaccgccccctcctccccgcactccaccttcccgcaactggatcactcggcggaagcctcaggtgggccccggggtccaagtccgccgccgggagggcgggggcgggc

SEQ ID NO: 237865 - DNA, 329 bp, Homo sapiens
  chr15:41245392-41245721
  hyper
gcccgccgcctgacgcaatccgaggcgcccttgctgcatgccggcgctggagaaacctcccctgccgttgcatcactcctgccaggtttgccacagaggtggagctgaaccaatcagcgggcgcgctgggcccgcggcgcggttaagtgagaagcagaatccgaagttgattggccaaaaggggatttgccccaccccaatcaccgcggcagctggccgcggtgggcgtggtctcccggcaagaaggtttaaagggcgcctccatggggggcgctcagctggagctaccgagcggtgccaggccaggtgtgtgcgtccgtcggtctttc

SEQ ID NO: 237866 - DNA, 472 bp, Homo sapiens
  chr15:41522911-41523383
  hyper
gccgcagaggcgacgcccgcccggcccaacgtccagtctcgtctgtttcccgaggagccaatcagcacgcggccccgaggccggctccccagcgccccctgcggccgggaggaggacggcagccaggaaagatgaagagcgcgtgcagtccccgaagggtacaccctagggttcccccccacgcgaagtttctctccgcaatccgtgccacctatcgagtaggattcctagtgttcgattcctgtgagaaaaggtagactacgctgcctgtcgcaggttagtttgttgtaaaactgttggtcaatgacgttgcccttttaattgcgtcgttagcgaccgagtggcatcgcccctttaaggccggtggcagctgcggttccgggggcggggtccgtcttcagcaggacttgggctggagctgggctgattcattcggggctggaactcgaacgctgacgttggctcctgagcc

SEQ ID NO: 237867 - DNA, 181 bp, Homo sapiens; identical to SEQ ID NO: 203842
  chr15:41576046-41576227
  hyper

SEQ ID NO: 237868 - DNA, 85 bp, Homo sapiens
  chr15:41576677-41576762
  hyper
ccccctctttgcccgtcagcggtatcagttgaggcctgttgtggctctgagtattttgtgtccccagcccgttgaccttgagact

SEQ ID NO: 237869 - DNA, 467 bp, Homo sapiens
  chr15:41624809-41625276
  hyper
agcacagctcctgcgtcctcattggacatcatgggcaatccaagcactggagtccgagtccgcgcactcgttacctgaacaggcgttacaggccctttggcgcctgcgtattcgtgaagtgtgaaaaaagcgcgcctctgttgggacgggaaatcagcctttctattggtcagggttagaaaccccgcctttgaggcattttcaaccaatggaagcgcggcattcttcatttaaactgtctataaatttctgcctagtcaaagttaagagtggcgccagggatttgaaccgcgctgacgaagtttggtgatccatcttccgagtatcgccgggatttcgaatcgcgatgatcatcccctctctagaggagctggactccctcaagtacagtgacctgcagaacttagccaagagtctgggtctccgggccaacctgagggtacggcgctggcggtgcgggtccctgg

SEQ ID NO: 237870 - DNA, 1864 bp, Homo sapiens
  chr15:41786424-41788288
  hyper
gcgggagagggactgcctcccggcagcgggctcttcgcacctgcagcagccgcgccgcctttccacctcgtcggtctcctccactggctcctcgtcgctgctcgaggactcggaggacgacctgctgagcgacagtgagagccggagccgcggcaacgtgcagctggaagcgggcgaggacgtgggtcaggtacgggccgcgggggcggggccagcgccgggcgcgggggctgcacgggggacctggctgggtgctcccggaggacccgctcctgtccatgctccctccagcggaaggtcctgttctcgcggtttaggaggaatctgggggtcagagggaggcgcctggccgacctctcgcctgggcaactttcacctcggctccgccggcgggtcgtggcgctggccctggggcgtctaagaagcggggcgaggagcaggcgacccgccgcggggactgggcgaagcgggggtagcggaccttgttggctgtgggttaggacaggagggatcggaggggctgagccttgccgggtgaaccctcggaaggagagaggcgaaggagagtttcccttaccccccgccccctctccggtgccgcggccgcacccccgccgttgccacggtttccctctcctgagtgggagtggagcggcgctccaggctctgctcgggagccgctgccgtctgctcccagcgcccgcacgaggcgtggacgcaggggagggaggggcgtgggcctgggagctctggctgggagcggaacgcagcccacccagtgcgcgccctgcctcccatcttcccggctcgccgctcctgagcgcggcagagaggggcggtaaactgaggctgcaagggggcaggatcactctgctagtctctgcctctgatagcctgggtgttctgggaccaggtctgaccctcggaaaacacagccctgggcactgttaagtcattcctgacgcccgccacttagggatgtgcggctcccgggacaccctccttgttcccctcgttttaaccaaggccaaataccttgaataactgtccgtggtcagcgcgaaggactttctttagatccacgtttcgcaagtgtccctgaggccgaggaagaggcgaggggcgcccccggcctcgggcgtctggggcctgcccataagtccgggtcggcgcggcggggcggggagagctgtggccgcgcgcctgctccgccgcacaatcggctgggacaaggcagggaagctgtggcgacctgcaggggttcacaagcccggaggccgatggggtttgtcagtgacaccagaggggaaaagcctcacagagcaggaacaccccccgccgccaggtgctgggtgcgccggctcggtcactagcctgccgcttccccttcttccccggtggtcagagcagccccggacccaggatcgtttctggggtaacccttgcctaggtcggggggcggatgccggggcttcccaggatgtggagtgtggggcagtgagaggccccccgccccgcctcttcggaaaagcctgagcagcagctcccggggcgcggaagctctgacacctgagagccggtgcaggcgaaagggcgcgaagcgcgggcgcgtcccgcttccctcttccgcccgcagggactcggcgaagtgcctgggagagggagtgcgctaggaggaggtcctgcggcccaagcctgggtgtagagaccgccccggctaaggtcaagcctcggggacctgggcgaccccgccgccctccgagccgtcgggagccggtgcaaatcgccgctgagggcccttccagctccaaggctgcggcttccaggccttccccacccccaggcccgccggggcctccccgaa

SEQ ID NO: 237871 - DNA, 2050 bp, Homo sapiens
  chr15:41804054-41806104
  hyper
cccgcccagcgccgcgaccccgggaccccttcgctcccatccatcgccgcgtgctcttcaacggctcgagactccccgaggcagacgagctggctctccgggctaccctgcgggcagcgggggagggaatcggcggggcccgggagcctcccctcgctgtgctggtgacccggcaccgaggaaagcacgctcccccggcccccaggcagccctcgcccccggcgccggcgccgccccatccccactggctgcgctcactccgggacaggcgtcctctccctgctgccccaccaggatgtacagcgactccccgagaccgagggagaagattgctgagacgaagacgccatgcgcccgcgacaggtggttcttggcgcctttgccgcccgcggctccgtaggctgagatcctgcggggaacggacggtgagtccccggccttcggtgctcaggccggccgctccgggcagaagttggcgacagaggaggctccagaattattttttatctgagggacttggaggctgcaatcgactctgacgggatgggaagggtaggtttgcacaccgaaaaatcagatattacacttatttcaggagggttcgtggaaatgtggggaggctcaagcaccccttggcgccgccctggttgggggccttccgctcggtgtaagaggttccgggtaagggctaactcggtggcgactactgccaccttgaagggcactcaaggtggacctccccgcggaatagtccaagacgcaagtcggtgcgcacgtggacttcgttaccctgagggtgaaacctccaactagcaggtcactgtccaccctacctccgccgtgcacttacagatactggccagggcccggcacgcgccacagctgcacgcctctcagctgcccggcggcccccacggtcaccaccacgctggtccccgcgtacgccccgtcacattgtgtctgtgtgggcccatgccggccgctggccccgcaggtagaaaacagccaagacccctcggtgcctgagagcaaggagcgaggcaagggtcgtcgagcccctggctgggccagaggggtctggtatggtgagcgaaagaggaaggaggcgtctaaagctcacccggagaattcagcggggaggctggctccaagatactaggcggggcgctgactttcgggtcccgggggctgggacttgccagcggcaggggcgaggaccgcagaaaagtctcctgggaccccgggctagagcagagaatggcgcctgaaaggtgttgggagaaggcgcaggacgttaaggcgggtggaaataggatatgaaagaaagagagaaccccgcaacagctgcccttgcggtcgcggccacacccgtcacccggcccagccgcgctctcagcctggaagccactacccgactccggtcgcagaagccccgcgggtgcgcgctgataggtctgccagtttctctcctcgagcgcctttcccagtgaataacttaggggccgcaatgaatttggtcctgcagcctccccaatgctttcctcaacttagattggtggccccgccccaaggcggtgctgagaccccaaagaatgttcctccttcccaagctgcgtgatccagactctgggattcgcacgcacttggcgcttctcggcccgcactccagaagcacggaccggagaaatttggctgtgagagttcgaggcctctggaggaaccactgacacctggcctgttgaccggccacccccaagcctaggaaagtgcctcaggctggacggtcccctgaccgccagatagcacttacccgcggctccgaaccacaccagcagctgtccccagcagcccatccctgttgggtccacccggcaacaaaagcccttgcggtcgcggccacacccctgtcaacctaaagttgacagctcattttgccacggcagccctggccaccacttacaggggtgtgctgccgctggcgagacactccccggacctaaagctggtctggccacgcccacctcagaccccaggacgccagaggaggaaa

SEQ ID NO: 237872 - DNA, 34 bp, Homo sapiens
  chr15:41851950-41851984
  hyper
ctcggaaaccacacgggccggggctgggcaccca

SEQ ID NO: 237873 - DNA, 1026 bp, Homo sapiens
  chr15:41913246-41914272
  hyper
tgaaagtgcctggtatacctcgccacactcccataattacccaaaccgtctcattccaagcccaaggaccgggctttcaaggggacacgaaaggaacgcccgggaggtgagcgccaggagatcgggagaggtgcctttcccggcatgctctgcagcacaccgaggggcgccaggcgtatcccggcgtgcatcggggagcgcccaagggcgatggttcccggctcctggagaggcgtgcgaagttaagccggtaggtgcgagcttccttagctttgagcctctggtttctcgtttcctctttatgggtttaaatccataacggcagaaaaggatggccctctaactaccctccctctccgcgtgcgaacgactcggcgccgcttcgagctcggtgccaggtgattagcgggtaggggcgggcttgcgaccagcacgtgacccgaactggcagccaatgactagccgggtggtccagcagcgcgaggattccgggacccgcgagcggagcggcgcgtgggtcggttgcggtcggccccggcaggtatgcgcaggcgccttgcttgccacgcgctacgcccgtccccacgcgcctggtggcgtgttcttggcgcgaagtgttaagagtctgggtgtttttgtgcgttggggggaaggagagggtggcgggggcgggggggcgctgaggcgtcacgtggacgccacagccaatctcaggccgaggcgcacccacagctttccccggcgccccggggtgcgacgtgttcactgaggttcgaccgggccctgacggcctgagcggtctttcgaagcgcgtgtgcggcctgtaaattctggccgcggcttttcgtggcgtcctgctccgcggtgagcacagacgacaagttctcagcaaaatggctgctggaaagagtcgccaagcagggggagtgctggggccgcgtgaaggtcacatgacgaggttggcagcgcgtgctgctggcgcggggtagggggagggtggggggcgtggcgggtcacgtgccttcg

SEQ ID NO: 237874 - DNA, 1104 bp, Homo sapiens
  chr15:41952226-41953330
  hyper
gggctgggcgcggccggggcggagccggcgaggagccctagggaaagggtgaaaggcacagttgagaaaggcccgccgggcattggtttcacagtttccacgaaggcttcgtgtgcaagcctgaggagtttaggtgcctccctcctgcctcgcctttcttggttctagaaccttcagtaggcttttctgggttgcagggacccggaaaagcagcggcttccactcggggggcgggtcccaagggtcttgctgctgctctggggccgtttggactcctggtgttgggggaggggtcagggaggtgctgctcgcgtctccttttgcgcctgcgcggcgggctccgagcgggtaggagcgcgtgcgcggtgacgtggacgtccggtgcgcgcgcgcaggctcttcagctggagcggacacacggtgtgcgaaccgaacagaataacccgcccccagcgggatgtgaaggactccgggtgaggccggccacgccccgcacggtaactctcgggcctgggtggagggcatcgcttagtactggcccgattggagtttttcgagagtttgaagctcttgtgtatttgaacggcgtgagaaacgttccgctgagagagcttcgcacgccctcgccaggccgggccttgcgcagggccgcctttggcgcgcccctgtggtccctgagcgaggctgcgcatgtcacctcgcgcgcgtccccggcctcacttccgcgtcgctcagctacctaactgggaacatcgacgccagagagagcggccacgaggcgggaggggtgagaagcgcccatggctcggccctgccctcgcgtgtgtggggtgccgctccgcgtggtacggtccgcgtgacgacttctcgcccggcgccgggctctaggtcgagagccacgcttacgcgcttttcagtttagagcctaggtctcgtggttctagaactccaagggaaacggtgtcggcgtcgcttttctgagaacttggcgcagcgttttgacacctgtgcaaacgtcttttctaacaagtaatttccggccaaattgtttgaggcaggacgtcaagtttaataaaggagggcgaggaagtgagctgtaggagt

SEQ ID NO: 237875 - DNA, 160 bp, Homo sapiens; identical to SEQ ID NO: 203847
  chr15:42119937-42120097
  hyper

SEQ ID NO: 237876 - DNA, 36 bp, Homo sapiens; identical to SEQ ID NO: 203848
  chr15:42263898-42263934
  hyper

SEQ ID NO: 237877 - DNA, 71 bp, Homo sapiens
  chr15:42349322-42349393
  hyper
aggctacccggatcgtccagcgcgacatggagtctgtgtgtcctcaccagtgctgcgtgacaggagccggg

SEQ ID NO: 237878 - DNA, 200 bp, Homo sapiens
  chr15:42565687-42565887
  hyper
cgggtcctggaaacgtcgcggagcttgtttgctgtgcggcgtagcggcccctctctcagacagtcgtctgtgcgccgtgagactttggacctactgcgcaggcgtcatcctgttggaacctggtcagctgggttagagagatcgctacatgccagcctggcctgagtcttttctgtctcccagccgttaaaggttttagg

SEQ ID NO: 237879 - DNA, 97 bp, Homo sapiens; identical to SEQ ID NO: 203849
  chr15:42841085-42841182
  hyper

SEQ ID NO: 237880 - DNA, 79 bp, Homo sapiens
  chr15:42868395-42868474
  hyper
agcagaaggtgagggcgtgagggggaaattgaggccgacacaggtcgcggtttctttctatgctcgacagctgatttaa

SEQ ID NO: 237881 - DNA, 481 bp, Homo sapiens
  chr15:42873437-42873918
  hyper
ggctagtgactcccgggatattgggcagatggcaggtggggtctgagccatggaagaactgcgaagatccaacagaaactttctatcataaatgatttgagtttctcctggtgtggtggagaagagcgtcccctcgggcgtggtgcaatagtcaagaggtagctgcgcggcgtcgctgatggccacggtgtgggtggggaaggcgcggctctggctgggctggtggccgctgccagcggaggaggacatggctgtggacgcgggctctgggctttgtgtggcgggtaggcggcggcgccgggccggtctgctccagctcctagggcgggtggaaaagcgagctctgcgcactcctcgctcgcttcctctagttccctcgtctggctccgcccctgccgccagccgatcctcgggcctcgccagcagcctcagcagcagcagcagcggcggcgacgaccacgatgacaggaaacctacatag

SEQ ID NO: 237882 - DNA, 125 bp, Homo sapiens
  chr15:43213001-43213126
  hyper
tattctcccccctcgtaacccgacacagcctagcccacctgccctgccagcgcgcacgcccacctctccgctacaggtgctgattggagagtgcgttccgaactcgcagcgtcggttggctagtc

SEQ ID NO: 237883 - DNA, 88 bp, Homo sapiens; identical to SEQ ID NO: 203850
  chr15:43394990-43395078
  hyper

SEQ ID NO: 237884 - DNA, 101 bp, Homo sapiens; identical to SEQ ID NO: 203851
  chr15:43397760-43397861
  hyper

SEQ ID NO: 237885 - DNA, 421 bp, Homo sapiens
  chr15:43415143-43415564
  hyper
cattgaagtccaaacgtaaatccttccagtttttggcgcccgggtatttgacttgcgctcctttaatgtggtattctgcctctcgttttcctggccgcctccctgggacccagttccagctcaccagcatcggctcctcacactcagtgtttaggaggtatcatcatatcatgggctgacaggaatgacgggagagaaaccttaacgcagagtgagtccccatggaaaccgcgccaaccccgaccgggggcgtcgccagcgggaaggggtgggtcccctctcgaataccccgcccggctccgggaacgtcaccgacgctctggggcttttgctaagaagcgctcgcccaggaggaggcagggcaaattggtgaacagggcggcgtgtccttatacgggcacgaactcgcgaggtcctgtga

SEQ ID NO: 237886 - DNA, 95 bp, Homo sapiens
  chr15:43425869-43425964
  hyper
ccggcgccggccccgcatccagctctggccctgcgacaatagagtccggaagtgcaggcaaagcggctcccgggagcgccgcgcggtcctgcgcg

SEQ ID NO: 237887 - DNA, 390 bp, Homo sapiens
  chr15:43622047-43622437
  hyper
gggcattaggaaaacgctgggctgcccaggcgatgagggccgcggcactctccggctcgaggtaggtcagcaccgcctcggccaggagcagagtgggtgaggctgcgtcgagccccgcggcgcccagggcctcctccactcgctggagctgccgcaagtccagacccaggatgcagtagtctgcgctctcaaagcacagcgcggacgcgggctcccccctctcgaaaggcccggttaacgcgcacagctctggcgtctctccaatcctttctgctttgcgccgcgccacgtccggaaaatccacctcccagactgcagcccgggccaggcggcccgcggtttttaagcgaaaatagagcgagtcgaagccagcgccgagagacaagatct

SEQ ID NO: 237888 - DNA, 355 bp, Homo sapiens
  chr15:43622638-43622993
  hyper
tggtgttctgtaccgcgcctgcccgacgctcacggctccgggggcccatggccagaagagactcaggaatggcagtctgtcacggttgtgagccgccccttggttagcacacacctcacggacctcggtagggggaaaaaaaccacccatgctcctggacttccccttccgccggcacttgtgcgtcacttccgggaagagcgcatctcgccaaccagaattgaggagggtgtagccagtgctaagttcgcttgcggctgacctttctttggaatgtcgtgagttccatttgtcccagaatacggtccgctaccgctgtgacatgagtgttagggaaggcgggttgtcacgtttc

SEQ ID NO: 237889 - DNA, 68 bp, Homo sapiens
  chr15:43785355-43785423
  hyper
ccctttcccgtcacgtcacacaatatcggatcgtccattcgctgccgccgcccgccactcaagaaatc

SEQ ID NO: 237890 - DNA, 152 bp, Homo sapiens; identical to SEQ ID NO: 203852
  chr15:43802598-43802750
  hyper

SEQ ID NO: 237891 - DNA, 482 bp, Homo sapiens
  chr15:43803490-43803972
  hyper
ctaccaatgcatacgtctgcatctccatccctagtgtgcacttcctgagatctgcgcccttgtcacctgcatcttccatgccatgtgtccgtatcctctcgctctactaacatctcgcttgcccatccttactgcacactccatggcgttccgcagtctccctgaggcagcggagctctatgcagcccctggggcccctctggtcacaccctccaccgcagtgttttggaccaggtgtcctgaaagtcctcaccatccctggagaatccacgtccctatcttgctgtatcttctttatggtccctgaaccagcacggggagctttctgaacgccccgtacaaatctcaaatctctgaatgccagtagccaaccactaagtgaccttcgtggctaccagctcctaagtcctcacctccttccccagtgctgtgcctgtggctgtggtgcagtgctgcggagccacctgcgggtggaagcaagc

SEQ ID NO: 237892 - DNA, 185 bp, Homo sapiens; identical to SEQ ID NO: 203853
  chr15:43809675-43809860
  hyper

SEQ ID NO: 237893 - DNA, 49 bp, Homo sapiens; identical to SEQ ID NO: 203854
  chr15:44068769-44068818
  hyper

SEQ ID NO: 237894 - DNA, 380 bp, Homo sapiens
  chr15:44119067-44119447
  hyper
gccaaggcggccttcttaagaagcgcgcgtaaaaccccaacttcctgctctggcgctgcggccgctggggatctgagtgggctccgccccgcctcggacccgcccctcccggcctcccgccgcaatcttggcgggaaggcgccggccgctaagaagccgaaagatgtccaggtcgggcgcggcggctgagaaggcggactccagacagcgaccccagatgaaggtgagaaacggactggtgcttccaaggtgtgctcctgcctcggtttttgtgagggttatgcgggacacaggcccaggaggtcgagggcacctggcaccgggggtaggcgggggatccctgcccttaggccttcagctttgacgaaaggttcttatca

SEQ ID NO: 237895 - DNA, 49 bp, Homo sapiens
  chr15:44487641-44487690
  hyper
tagtcaagccggagcagccctctagcgtcccaaacgaggggttcctctc

SEQ ID NO: 237896 - DNA, 57 bp, Homo sapiens
  chr15:44580503-44580560
  hyper
acagaaaggactccgacccaggtacctgagacatctgagaccgccaaaattaacaca

SEQ ID NO: 237897 - DNA, 76 bp, Homo sapiens
  chr15:44828876-44828952
  hyper
accagagggacagcgcaccctccggtcgaagcggggtaggcgttggcaggggaggggcgacgaagactggcgaggt

SEQ ID NO: 237898 - DNA, 79 bp, Homo sapiens
  chr15:45003638-45003717
  hyper
gtgacggtccctgcgggccttgtcctgattggctgggcacgcgtttaatataagtggaggcgtcgcgctggcgggcatt

SEQ ID NO: 237899 - DNA, 68 bp, Homo sapiens
  chr15:45403702-45403770
  hyper
gaagctccgcagcgcgtcgctccaggagtgcgaggagccatagatggcgctgccgtccagccagcccg

SEQ ID NO: 237900 - DNA, 222 bp, Homo sapiens
  chr15:45404016-45404238
  hyper
cctctggaagggcagcaccacgtccccgcgctggtcggggtcgaacacggggtctccaggtgggatgcggatgttgaggaactcggcggggcaaccgggcgtttccacgctcaccacgtcggaaagaacatggtagcctgcgggcatggggcgccaatacgtgacaaaccgtccgtattgcgccctccccacggccagggcggcctccaagtgtcctcagga

SEQ ID NO: 237901 - DNA, 658 bp, Homo sapiens
  chr15:45404749-45405407
  hyper
accaaagaagacccccagtacggtgcggttgtggagcgacggcaggccggctatgccccgcgtggctgcgttgctgagccggcgcgggttgggcagctgcggctcctccagagcctgatacacaccgtcggcgtaattggctggtacgcggcgctgcaaccggcagcctgcggaggcagggagcggggctctgtctaagcactccatcccctaggatcccccaaacctctccctaagcctccctcaacccccatcccacttcactgacagaaccttccctcaagggtctcttggccccgggagcgcataagattgcgctgtgtaggcagcggagctgctgggcgcgtgttccccgcagattccccgctcagggcctttcgcgccccggcccttcgcgagccacggccccagcacgcccgggcccccagaacgcaccaacagcaccacgctcgtggtgcctcaggttgttaaaccagccgtcatagcgctgcacttcccagggcagtgagagtgcgtcctgactgcctgtgggcacagagaagggcctcctcagcactacgctcccagctacccctcccgagcaacgaaggccttggccagtccttccccagctcgcggagcgcccctaaccggacccaagtgtcgggccgcactggga

SEQ ID NO: 237902 - DNA, 606 bp, Homo sapiens
  chr15:45406348-45406954
  hyper
caggacagacctgcgccagtgtgagcatctggacctagggctcaccctcctgccgtggaggtggggcccttatttgcacaacctcttccagctcagaccagcccctgggctgggacacccgtgtggcacgtcgcccacgctgctataaaaggggtcccgcgcgacttccaaactcagcgccaacccgcagaaccaggaaagtaacggctacagacagtgagaaatagtttcgctcgccggctagaaaaactctgtcggtaccaaccccagagcgttgagagcagcccacctccacgcttccttaacggagaggtgcaggactcagacttcaccagcccactcggtcccagccttgtacgcaaagagacgccaaggacgcgctctcccgcgtccaggcagccccagcttgctggcttgcctgcccgcctgcgtgcagcactcggccggcgtgcagcatgaccctgtggaacggcgtactgcctttttacccccagccccggcatgccgcaggcttcagcgttccactgctcatcgttattctagtgtttttggctctagcagcaagcttcctgctcatcttgccggggatccgtggccactcggtaa

SEQ ID NO: 237903 - DNA, 850 bp, Homo sapiens
  chr15:45408666-45409516
  hyper
gaggtctccgaccgcgggcagccccatgagcccgcctcaccccacagggaccccagtgcatcagctgaacgagaccattgactacaacgagcagttcacctggcgtctgaaagagaattacgccgcggagtacgcgaacgcactggagaaggggctgccggacccagtgctctacctggcggagaagttcacaccgagtagcccttgcggcctgtaccaccagtaccacctggcgggacactacgcctcggccacgctatggtaagtgctggagggaaggctgtgtgcacgtgtgtgtgtgccaggagctgggccgtatgagcgggaggatgcaggcctcggaggcgctgagcagctgcagccagacccgacgcgctcggggtgggcatgacagcctcgcgggttagaagatccacgagatctgcacagacggaatccggagagactccagccaccgcctggacctcaggagcccgcttctcccccggggaattcccctgcaccgctgccatcccagtccctggctttgacgctggggtagggataaagaagagcgcagctgtgggaaccccggtgggctgggagaagcccgctcacagcgggtccccccactccccggcagggtggcgttctgcttctggctcctctccaacgtgctgctctccacgccggccccgctctacggaggcctggcactgctgaccaccggagccttcgcgctcttcggggtcttcgccttggcctccatctctagcgtgccgctctgcccgctccgcctaggctcctccgcgctcaccactcagtacggcgccgccttctgggtcacgctggcaaccggtgaggaccgaga

SEQ ID NO: 237904 - DNA, 824 bp, Homo sapiens
  chr15:45421280-45422104
  hyper
acacgaagcgcccccgggggtgtgattaaagagggaaccaggtcccgacgttctgtgaacaaacgcgcgcccttactctcagtggggctcccgtccgacccccactcctctcctaactcacgtaaggacccggctgtgaccggacaaaccgggtctggggtgcttccagtcactcttcaagtcactcccaaacttctcagactgcacccgaggctctgcggcgccgcctccctctcccggcctggtacagagaagggctgggtgcgccaggacagtagtaccggggtctgccagctccgcagaggtccctccaatcccccctcctcctctgcgcccccccacccatgcccagcaatcccagcagctccagcgcaaacctagcgacgcagttccgggtctggcggggcgcgggcgcggctcgcagggcggtgggacccccaagacctcacgaggatccccggagggagacgtgactccggggtcttagaggggtttaggtcggatgggtgacttgctttgacgcctggcctggtctgtgggtggcaggtgatcgatggccttggacttggagcccagacccgacggtgtcgagaggatctgaggagagtctcccctccccataccctctccgcctcccaccctctccccagccccatgggacttgtgaaggcggacttgcttttttcgccgtccacacaaccgcactagccgggccttcggcaccgacggaacatctctacctgcgccccgggagccctcgccgtctcacctcgcgcgctgccgtccgctggaagcacctccgcgcctccccaggcgccagactc

SEQ ID NO: 237905 - DNA, 421 bp, Homo sapiens
  chr15:45427362-45427783
  hyper
caacattcgcatcccgcccggagaccccatgttcgaccccgaccagcgcggggacgtggtgctgcccttccagagaagccgctgggaccccgagaccggacggagtcccagcaatccccgggacccggtgaggcggggaaggcggcgggaagggaccgcaccccagccaggtgggacctgggcttcgggcctggcagggcctggaggggagaggcgcccactccccagccgcggacacccgccgggccccggccttccctagctcgccgccgcccatcgacccgggctcacccgccgcgtgccccgcaggccaaccaggtgacgggctggctggacggcagcgccatctatggttcctcgcattcctggagcgacgcgctgcggagcttctccaggggacagctggcgtcggggcccgacc

SEQ ID NO: 237906 - DNA, 92 bp, Homo sapiens; identical to SEQ ID NO: 203856
  chr15:45459390-45459482
  hyper

SEQ ID NO: 237907 - DNA, 149 bp, Homo sapiens
  chr15:45479888-45480037
  hyper
ggggggcgcggccggagagggcgcaggggggcggtagtcgggctcggggggcgccggcttgctgccccctccgccgccgccccccccgcggaagcccaggtgctcccggagccacttggctactccgccgctgccgccccctcctgggc

SEQ ID NO: 237908 - DNA, 47 bp, Homo sapiens
  chr15:45480415-45480462
  hyper
ttacgtgtcgccacgcggtcccctgtggggagcgcatccatccccat

SEQ ID NO: 237909 - DNA, 880 bp, Homo sapiens
  chr15:45492665-45493545
  hyper
cactatacgatcacggcgagctactagggacacaggacctcggcttgtcgcctgaactcttctctgttgaaagccccgcccccttgcaatgtcattgatttgtcattgtttgttctagcctatctccaccctcgcagccatctgagggcacgcaagagcattaatctctgctttctcgattttggtccacacttgcctgcgcaccagacacggtggccgatttctccaccgtggaggctgctcttggggttccccttacctcgcgcctcaaggaagttgtatggtggtgggtcagaactgattttccttcttgtaaaatttaagagctccagtcccagccaaagtcgttcagatagcatgatagtcagggcatggtgagcgtcagagagactttgggccaccattcgggcgtcctcaggggcttcacatcattgcaggcccggcctcataggaatcctttggttgcaaagcactttcatgtcccttcttttgcggtccgtgcgtacagccaagaggagacttcgggctagggagtccacagcgctcccggctgctcttgcgggtgaacgtgggtgcgggaggaacctggtagataatggacgcttaggaaagctggaatggccgccatctagacgagaagggcaacactgggtcagctgctcgtcgtggcgtcccggtagctcgccgtgatcgtatagtggttagtactctgcgttgtggccgcagcaacctcggttcgaatccgagtcacggcattgtggaaacaatggtacggcaagggcctctttttagacttagaaagccacacattcttctgggaagctaactctaaaagctgttacctggccagggctgaaattataacggacaatgaagtgtg

SEQ ID NO: 237910 - DNA, 304 bp, Homo sapiens
  chr15:45669906-45670210
  hyper
ggaagccagaatgtcggagcgattccagtactagaagcatgggagggtctgctgccagggcagccgagggcggggagcgcagaaactctgcttacaggctgcactcgccccgactcctctccagacgtgggatcccatgttatacttggagtgaatctggtcgctcgctccccgtccccgattcccactttgcttgcctcttctccccatccatctaccccacacgcattttccagaaatctccccaactcgacgcccactcaggctactgaaccccaataacgccacccttttactaagagga

SEQ ID NO: 237911 - DNA, 177 bp, Homo sapiens
  chr15:45722445-45722622
  hyper
tttagaagggttggctttccctcaggcctcggctatctgcgctcccctcttagggggttccacctcctactccccaaacctccaaactcctcacaagcacctaggggggccaagagcgaccggggtcggcaggtaaggaagaccgcggcgagcggcagggggcgccagcgcccgcgt

SEQ ID NO: 237912 - DNA, 165 bp, Homo sapiens
  chr15:45815255-45815420
  hyper
gccgggggctgggcgttgctgctaggagttccctccaccgaaagtgtgtctcaggaatctcgggtcgggatctgggttgcgggtgctcggcagaagacaaacccagcacttttcttgctaactgaaaaggcaagcagcttttctctcctcgaattgcttgtctct

SEQ ID NO: 237913 - DNA, 31 bp, Homo sapiens
  chr15:45879207-45879238
  hyper
taaaaagctgtgccgcgtgagggctgaaagt

SEQ ID NO: 237914 - DNA, 1261 bp, Homo sapiens
  chr15:47476226-47477487
  hyper
ggggaagttagagccgagggagcggcaggagcacgtgggctgagtgggggtgggaggacgcagacggcggagtaaccggtggaagtgtcaaagaggaaggagtggagggctgctgaggtgacagggtgtggtctgtgagggagcggacgaacccggagaagagagcagagagacccaccaggactaggaggcagcggggagcgtgcctgcgtcgctcggagcggtgacagcaaggagcgcagcgcggaggccgggcggcaaggggagtttccagtcctcgataagtggagtccctgctctgcgctgcgccagcgccttccgcctgggcccgcggtgctagacacctgccgagtccgaagcgggagtcaggctgagccttcggcccccaagtaagtcttcccttttctctccatttctcctccgtcgcctttacttctttatctgcgaagcgaggagctgctgacggaggttctgcgcgaaaagcgcaccggggagctctggcggcgtccaggatgctccagcctcccggcgcgccgcggccggcgcagagacccgaccgcgaggcccgccgcccggttcccgtgcgcagcatggcccgaggcggcggcagagttgttggcactgataagacccgtcttttgtgtcttgcccgatcccggagctgtgccaggccggggggagggagcggaagccactttatggctcgtggccccacctcttgcccccaccccaaatcctccgggatttcaaaatgccgcggactcgggcgcaagtgagcgccaaacccgcaagctgggcgagttggatccgggtcggcagccggctgaaccgccacgctgccccgctttttttattttctttttagatacggcatctaattggtgggtgctgggaggcagggctggttgggtgagcacgagtacctgggtgtagggaacgacctaccttcttgctttccttggggtttagaggggaaggggtgggggcacccagagccccgaagcccggagcgtcccgcgctagcgggcttgcgcgcggccggcgagcaggcgttctctgggtgggtcccttgtctggctcattgttcgcggtgactgttcttggggccaggctgagcgacacagacaccgctcaccgggctgtaaataaaagtgacgacttggaggagtgggggtcaaggctgccgggagggaaaaggcttgcccattttagaaaccgacttggagctcggaagagcaaacgtagtcgacagagaaaaccg

SEQ ID NO: 237915 - DNA, 1821 bp, Homo sapiens
  chr15:48009298-48011119
  hyper
aagagggagggaatcgaaaaggttgcttcgcaggctgcagcacccactgcgagctggatgactgaggcactgggagttgctagaaggagcagctactcagaggtggggagagggagggtgcgcagcagagcgccggagaggagggacgcggaggccaccgaggggtcagcagggccgcggcgccagggtgggggcctccaggcggcgctggccacggttcacccgcgagggcgagcgcgcccggccggccgcgcctcctgccgtccgtgcccgggggtgggacccgcgccgggagctgccgagtgcgtggagggagccaggctccggctcgcctgatggattgacttggagatggatcgaattacaccatttgccgtgcatcggtttgttttgctcctgctctgtcccgctgctgctgctgctgctgcaaggggtggtggcgagtttcaggattctatcaaggaagccaagacctaaggagacagagggatatctatttttacaatatttttctttattttctttcttccttgcgcgtggcaagcttttttttttctttttcttttttcttaccagcctccccccaatgaggtaagaccgttttcaacaatttgctaatgctcttgtggcgcccggtgggggtcggaacctgagatcccgaatcgctgtgtgtgtgtgtgtgtgtgtgtgtgtgcgcgcggtgggggtcggaacctgagatcccgaatcgctgtgtgtgtgtgtgtgtgtgtgtgtgtgtgtgtgtgtgtgtgtgtgttgccactggacagttgatttattttccaagctgctctctctgcctgccgtgcaagggacgcgcaaagggctagagaggtttggcggacgcgtcaaaactggcaaagctggcggcttagggggaggggcaagtggacttggaggccctcctccactgtgcacccccttggaaaaaaagcggagggggcatcaagtaaaagtttcttgccaggcagagccagctcggcgtcccccgcacatagctggggttagcaggggttgcttctctgccgggcacagcgtctccaggagccagccggggagagctgagccaaggccgaaggagccgcctgcgggcttagccgccccctcccgcccgttggccccagagcggacgctgggacgcccggggtctggcagctctgcgcccggctaggagcgggcgggcgagcattagcctgcgtcctggagaaggggcgcagcgccgcagttgaggccggagcagcccctcgcgggcgtaggatacctgtcagtgagcgcccggattgcacggcccccgggtagtgcctgccggcgaggggcgggagctcgggtgacttggccatccccatccccggcccaggcccggagggcggccgcttcccaccgtccctctccccttactggcagagcgcgctgcgggcggactcccgggcccggagcagcccaccggccaccccaccgcccacccggctcccggtgtctcctcccggccgctctacccagcaactttccgtgctttgttccccgactggaaatgctttacggaagcgtcttggacagggtctccgccaggcgacaagagctcggtgctgagatgtgttacgttctcatctccccatcaattatggatggaaacaaataaggaagagtcaattttgctgagccccttctccggcaacgagaggcgttctgcagccgggagggagccgccgctcgcgccggcagccgctggcaggggcatggtgaggaggaaggtagggaaacttttatttcccgtcttgacagcggcggtgtttgtccctg

SEQ ID NO: 237916 - DNA, 165 bp, Homo sapiens
  chr15:48011367-48011532
  hyper
ggggattgaagtcccggtatgaatcgcagcgtttgaggaacttagggcagtactccctgttctggggtgaccattcggtaactgatgttccagcatcccgagccctcagcgccgtcagctggatgatctcacagggaaggcgcagcacatcgttactatagatat

SEQ ID NO: 237917 - DNA, 690 bp, Homo sapiens
  chr15:48469937-48470627
  hyper
cctgcaaaccgtggcggtcgctgagctttgctcaaagattctttaaccaaagtcagggaagaggggtgttcgctgtctcgggctagaaatcagggaagagcgctggtccccgggcccccagccccggctcccagaccacaggcggccaggcctggggcgggcggggaagggcctgggagcggcccagctgcacctgctcctcaggaagccgatggcccgggggcgggccggggtctgggggtggttgtcccccatcggggcacagcccggcctctagccgcccggtagactccccgccccccacctcgccccggttcccggaggaaaagacaatacattttaacgccattggagctgctgctgtgctgcggctgctgcttctccgcctccgcggggtgcggctctcgccgcggctcgcccggcggctctgcgggctgcaggtgcgggctgtcgccaccagtggccccgggcacctcggccttgttggcgtccgccatcccgccgccgctgcctccgcctcggccgcctgagctgaggggctccgagcgcgacaatggcggctgccggggaagcggtaacggatcccgatttgaaaaggccccgagcgctcagtaacccggatctcgcgagaaccggtcgagactgggtgactgggagatggtgtgtgccgggtgcggggggtgggagtgc

SEQ ID NO: 237918 - DNA, 190 bp, Homo sapiens
  chr15:48483066-48483256
  hyper
accttgctttcaacgtcggttaggtttagaatctacatattcaacactgtttagaaaacgtacctggcagctatctagagctttatcagagcgtttcctggctgctattttgttgtcttctagcttgtgttggggagacaggtctcaccacgcaccatttcagcactacggacagcgcctaggcgccttc

SEQ ID NO: 237919 - DNA, 194 bp, Homo sapiens
  chr15:48483813-48484007
  hyper
tgcaaacgcgcgcgcgcacacgtacttcggcgggcgcccacgtcctctgtctcaccaacagacacagacatttacacttctaggccaggaaagcgctaaccagggccctgtgactctacgcaggttccagaacacgccttctacatttgttactgaaccgatcagcgaacacagacaaacgtgccaacacttaa

SEQ ID NO: 237920 - DNA, 156 bp, Homo sapiens
  chr15:48623408-48623564
  hyper
ggcccgggcctggcgtacactctcggaaaaatgggggccagagcaaacaagaagagcgaaagcaagagggctaggcagccagaggcggcagcaagactcaagacgccaacggcgccgtcttcctggggccccagggcctgcgccatccctgggctg

SEQ ID NO: 237921 - DNA, 54 bp, Homo sapiens
  chr15:49102693-49102747
  hyper
tccacaggctgagcgaatgaccttgaggaactgtttggcgtcagctacggcact

SEQ ID NO: 237922 - DNA, 207 bp, Homo sapiens
  chr15:49170052-49170259
  hyper
taaggttattttccggtttgcagcattacaagcagcagtagggttaagtaacacagaaactgttacgctcttgcatgcagggtccctagatacgaagttcgaatcgatggaaacgtagctcaaaaggcgacgccaacaccccggagaaaacactgagctactccaaccacagtggcgcgccaagtaggaggcggtacctgaggacca

SEQ ID NO: 237923 - DNA, 137 bp, Homo sapiens
  chr15:49255441-49255578
  hyper
gcaccagtgttctcgccttggaatccttgtcgggagagcctagacccaggctcccggcggcgcgggtcgctcacggccaactcttaggcgcagaacccgggcgagcgccggtcggggggcccgctgcatcactagcc

SEQ ID NO: 237924 - DNA, 135 bp, Homo sapiens
  chr15:49255861-49255996
  hyper
tactactgacgggcgctgctccgcattgtttcactgacttgtgatgggtccgtgttcctcagatcccctcccagcctgcctaccctcgctcagagcttccctccctcctggattcctctcggagcttttttcaga

SEQ ID NO: 237925 - DNA, 227 bp, Homo sapiens
  chr15:49447914-49448141
  hyper
cttgtagctgattcgctacgactccaaaagagactgcaccaccccccgtttcctccgaagtggttggtgccttagcaactaaagctggcaactgggacatcgtccggtgctgcaggtctcagccgaagggcgtcggaaactgcgctcgcatcgagcagtttccagcctcctgggtaaaggagcagtctcctcccttgcttgggactctggacgcatctcattccggt

SEQ ID NO: 237926 - DNA, 34 bp, Homo sapiens; identical to SEQ ID NO: 203873
  chr15:49448552-49448586
  hyper

SEQ ID NO: 237927 - DNA, 99 bp, Homo sapiens
  chr15:50716741-50716840
  hyper
ttctctgggaagtcgtccgctgtgaacgatgaacgcctttccttccaccagctgctggttaccccggagacaagctctgtccgcggagaggagtgggac

SEQ ID NO: 237928 - DNA, 45 bp, Homo sapiens
  chr15:50978873-50978918
  hyper
aactcagctccggcgctagcagcagaagccgagtctttcataatt

SEQ ID NO: 237929 - DNA, 79 bp, Homo sapiens; identical to SEQ ID NO: 203874
  chr15:51058036-51058115
  hyper

SEQ ID NO: 237930 - DNA, 62 bp, Homo sapiens
  chr15:51200800-51200862
  hyper
tctggtggcctctcgcgagaacgacgctgaacttgttcaggtgggacgccaataaagatttc

SEQ ID NO: 237931 - DNA, 728 bp, Homo sapiens
  chr15:51385893-51386621
  hyper
gcgggtcctaggtgcgtagacccgtgggtggggggcggagcggaccggtggaggtgggcagagaccggcggcaagtcgacccacggctgtgggtggcttcctcctgttgctcagtatcagggagaggcgggggaggacattcattttttttcttccctaagtaagcatccacctattgctttaataactatcgattgtgaaaagccggcggggcctcttaaaggcgaagtcgggaggcgcgcgcccctgcgtctgtgttcggggaccagtccgcggggaccttctggaccttctccgccggctgcgcggcagcgatggaccctgtgcatgggctctcctagcagcctcgggaaccgcggccgcaagctgtggtttgacccctgccccaaccactcgcgaggccttttctgttcagagcccccagtcacgttcttggacccagtcacctgcgccgcagcgcagtcccggcgccccaggttcgaggacccggcccgcgctcggaaagttatttcaaaaggcagatgtgttgcaaccctctctgcagcaaactacagtacgcggattcccgaacccttccccgcccccacccagcccgggcgaccagagcccgccgcgggagactggcagcaaggagagccacccctaaatgcaccttccctccctcccgcgcgcccaagtgcaatggggttgggggaagccccaaagcaaactcacgacgcggagcaatc

SEQ ID NO: 237932 - DNA, 763 bp, Homo sapiens
  chr15:51559324-51560087
  hyper
tctgtcactcccaagcagggcgaatcgagccagatttttgttggacgctttcaggagcaaaaccagctcctcgtattgtgtcccattcacagctggagcagctcgggcactaggcgaggcagggggtgcggcgagcggtctccagccggctgcctgcggtcggtgccgcccgcagaatctgcgcggcccagtgcaaaataaaaacgcggggccccgcgttcaaaaagcaggaaaaagcctttccctttctcccgtggtctttctgtccacctgtctcggcagggtttatttgctagttaagttgcgctggcttgagcacagggacgctggcgggccaaaggccgaccctcacaggcgacccagcgtggcggcgaggtcccttggctgtacgccgaggtctgcgccgcccccacgtccgtggccggccactgcccagggcggagggcagcggtgttcgccgggtgggggcccagaacctgtcccaggaagacgcaggagacgcgaccggggtgagacaagagtccaagctctcaagcatccactgtgttattgcacttcacttacaatacacgaatttgaaggaaaaatgattaagaatttcatatggtgactgcagagcattcattagattccaagcgggaccccttctgagcgcgggaccctatggcggattgccattgaaaccagccctgccggctccccatgccccggggaagggtcttccctgtgcccaccccagcttagcaggcgagagcactggaag

SEQ ID NO: 237933 - DNA, 39 bp, Homo sapiens
  chr15:51633851-51633890
  hyper
aagccctgccctgcccaaggcgcatagagcatggcccga

SEQ ID NO: 237934 - DNA, 237 bp, Homo sapiens
  chr15:51915459-51915696
  hyper
aggacacccgtcaccgggaatttccacctggagatatcttagatatcttcagtcttttcgaaagtgcagtacataagatattttattttacataaacaatgtaggcatcttgcaactatttagagaagccatactcccctgaaagctaattattttgctcccaccttttgtcacggttattctagacagcaaaaagccgccttagagacgggtgactcctttcgactttttttcatg

SEQ ID NO: 237935 - DNA, 621 bp, Homo sapiens
  chr15:51973520-51974141
  hyper
tacaccagctggccggtcgcccctcctttgttccattcccgggggattggagtagcgttggagtcaccgacgccatcccctcccgcctctggcgtgcatggagcatgcgcttccttcctcacttcctctgcaggagggagcgagagtaaagctacgccctggcgcgcagtctccgcgtcacaggaacttcagcacccacagggcggacagcgctcccctctacctggagacttgactcccgcgcgccccaaccctgcttatcccttgaccgtcgagtgtcagagatcctgcagccgcccagtcccggcccctctcccgccccacacccaccctcctggctcttcctgtttttactcctccttttcattcataacaaaagctacagctccaggagcccagcgccgggctgtgacccaagccgagcgtggaagaatggggttcctcgggaccggcacttggattctggtgttagtgctcccgattcaagctttccccaaacctggaggaagccaaggtatgtgaacacttttcttcttcctaccttccttttatttcgccacgaaaaggtaaagtttggcataatacgtgagctgtaaatcaccctgacgcgttttctgatca

SEQ ID NO: 237936 - DNA, 264 bp, Homo sapiens; identical to SEQ ID NO: 203876
  chr15:52028982-52029246
  hyper

SEQ ID NO: 237937 - DNA, 42 bp, Homo sapiens
  chr15:52029519-52029561
  hyper
cgggccgcggcggcgcgccctgctcaccgtgacaccgtactt

SEQ ID NO: 237938 - DNA, 193 bp, Homo sapiens
  chr15:52121766-52121959
  hyper
cagcgttgagcctcgcccttcttgctagaactacaactcccaggatgccccgcggcacgggagtgcgcacgcgcgtcggaggcgaaggaggaacccaccgcacctacagggcggtcgagtgagggagctgctggcgggtgggtctggcaactctttgggaggccgacgcgggcggaccggcgggtgctgggaa

SEQ ID NO: 237939 - DNA, 88 bp, Homo sapiens
  chr15:52122375-52122463
  hyper
cgtcgccgggacgcgatcacaccgagatggcaccgagcctccttcaaaggcttcggcttgttgaaagtggggcggcggagtgggggag

SEQ ID NO: 237940 - DNA, 212 bp, Homo sapiens
  chr15:52587421-52587633
  hyper
gaggcgctccagtcccgggagatggggacgcacgcgcgacccctgggcactggggattctaggccccgaggccggagcggcggagggggcggcccctcccacagggtcttcccacccacagggcacccaggcgcagcggagccaggagggggcttacccgcgggcagggacggagcacgccggggccctggaggggcgacgctcgctcgtgt

SEQ ID NO: 237941 - DNA, 210 bp, Homo sapiens
  chr15:52820415-52820625
  hyper
gcagcatctttccccggggctcgccacccccagcgcagctaaactggggagctaaaggtgatacggccaccgtttgcaggattcaaaataacctcacagaaaggctagctggcggtagaagcggcactgcataccaacacaagacgttattttaagcgcgtgtccccacgagagaacccatccgatctactggagcaagcatctcccacc

SEQ ID NO: 237942 - DNA, 95 bp, Homo sapiens
  chr15:52820925-52821020
  hyper
ggcgagggccgcacagccccagtcctcgacgccggccgcggggtgccttacctttgtgtagagctccgacgcagccatggcgggccccgcgcgcc

SEQ ID NO: 237943 - DNA, 279 bp, Homo sapiens; identical to SEQ ID NO: 203879
  chr15:52821287-52821566
  hyper

SEQ ID NO: 237944 - DNA, 98 bp, Homo sapiens
  chr15:53075362-53075460
  hyper
gggactgaattgaacgttttagcttaatgatccaacccctgtcacacccacagggacgcgaattccgattttataagcaggtgtgcacgtgcactcag

SEQ ID NO: 237945 - DNA, 1738 bp, Homo sapiens
  chr15:53075490-53077228
  hyper
aaagatcaaccacccgatcgacgaggataggtttgatcttttcgattacctcagtgtgccagtgtatattcccggctgggcctagcgccctaagaaacttcggaactttagctgttaatttttgttttcttactatgacttcccaaagacattctatctgcctaccggggcgaagagaaatgggaccaggcgtcagggcggtgggaccctgtccagggtcctgactccgcgccagggctccagaccagtcggcctccgaaggccctttcacccaccccacacaagaggaaacaaagacttctcagctcaaggcctcagggctgcctcctgactccggtcagtttgcaggaagaggaaacaacaaaacaaaggaaccgccaatccgccgggtattatatccctcagctccaacctccgacttcggaccgccagggtcaccttctctacgctgaccccgcttttcttaaatgaaaacacgccaacaaaagcatacttcggatacaaaatccaagtacgcatcttttttggggaggttagagctgaggtgtacttcggaagatgagaattttgttttcatgaattgggtaacacccaggcattgttaggtaccccgacagaccctctagatatccttctcttcctccttcacactttcttcctatcaaaatagttattgttttgaaattcactagaacaacgacgttctaaaaacaaaggcgcagcaagcatccctttcttcgctgccgcgggctgaaccacggacgctcgcgggtcgcccagccccgacggcccgcagggggcgcgcgccgcagccgcagcacagcccggctacccccagaaagggagccgaatggagggaagcagggagcgcggagggctcgaggcttgcagataaggagaggcgcatcctgggatttgggtcctctgctgctacaacacaaccgtgctattgttggcactgtccgacccaagtgtcggtggtaagcggcgatgtcggggctgggtctctagcaaccgctgtgccctgggtcaggctggtcgccccagctaccgggatccctctccggatgcttccagggcgataggtgctgcacccattgacgggatagccgcatacctccgaacaggtagtggagttcgtctctggcaggcatcctagctgcgctgacaccaaggtcgccacacaatagccatcagccccccttaagccccagaagtaggtttcccctgccccagccatagcggttccagtcgtcgccacgagcccacttcttatccccaagcgcacctccctctcctcacccgggtttatgcccgttacacagagagaactacacagggggaactatggtcctacaccctcgaggggacagacaccggccgtgagacaggcaccacgcagagccttctggtgactgtccgcaggagcgagaccttttttggttttgcagtcggctaggtgtgtgtgtgtgagggtccccagttgactaccgggatgcactgccacttttcggcctggcgggctctgggactccttggtctccgtaggaggccatcctaggccttcggaggaggcgctcccagctggcggcgcccctcgccccgggctcagaggcggacacggtcggtcgcgccctgctggccctttgttcgcgccgcagcgggctgggagcagctgcgcgacaccagacccacagcgccaagacgcgaagcgcgaggaaaccgctgcgcttgactc

SEQ ID NO: 237946 - DNA, 626 bp, Homo sapiens
  chr15:53077594-53078220
  hyper
ggacgggaagggggcgccgccaactcccccgcggggtttggaggtttcctcgcctccaagtcccgcagggcagggtcggagtgcccaacacccacccccgcccgaacctcgggcctgcgcgccgccttcccctgggtccgcggtgctgcgcttgctgttgggtgtgtgtcgctgtctctttccgagccggcagctcctgctgtgtggccgaagccctctggaatctttaattggaaactaatcttggtcttgatagacgcccacgtcagaggcgcgccacccacccacaccccccgcctcatcccggaggagacgcggcgagaaccctgtcgctctgctctttaatggggcagcagcaagtagtacatggagggaacatatattgatttttaaaaggtagttaatttggtgggaatttcctcctgtcgcccttcttccaccagccgctgttatttcgtgaccggaaggcgcctccccaaacacagcgccacgtgcaagagggttttgaccctctgcaacaggctgccggcaactggaggacagaggggcgtggagaagccaccactctcccgctgcggagcgaaggaaccgagctcagtgagccctgacctcgcaaggtggttgga

SEQ ID NO: 237947 - DNA, 4408 bp, Homo sapiens
  chr15:53078742-53083150
  hyper
ggcaggcgctccttcgatagcctcctgggtgccacaagcacctgccaggcaccatgtttgcgcctccagcgtgcgggtcccagcactcaggctccctccccctccacagtgccgtcccctgagctcggctatgtagctctccacgcttggaggtcagagggcgctcctgcggccaggtttccatggctcagaggtcgtctctgaacagaacgtgtcagtctgtccttccagggggcgacagcaggcagtggggggaggagggatattgaagtccagagcaagagcctccagggggcgggggtgggggatggggaccgagttttcccggaggggtagccttctccatttctatcttcttcccacattcccccgctccactctttggcttcagcgggcactgcctgggtaagaggccctgaagcctggctctggggtggtgtgggtgtgtgaaaaggcactaccttgggctctggagagacggagcagtcaggacgaggagcagccccttcgcccactccctccggaacctcagttgctcgcgggcagcccacgggtggagatatggtgccggtagcacaagagctagagagtggaaaaccgggggccagcgattcgctggggcgcccagcgagcctcttctcccctgactggttcccgggcgcaggctgcaggaacctgcatgaggactttgcctggggcgaacgaaggcagagctgggctggaaaacctggcagggcagagtctcagccagcgcggtgctttgggaccggtggcctgcagcgcccaaacccaaagaacgctttgggtcgcttcggggcacgaatcgcaggctggtcggcacctgccacccccagcttctcattggcaggcacgagttggaggagggggctttggcctcacgctttgattttagactgtgaaacggctcagtgcccccggctcagagcggattgactgtctctcgttctccagggacgaattaatggagaacgatcagttaattaacaaaccctcattccggcttttaccttttctcttcgccaaggctcaggcctgggcgctgggctgagatggaggtggaggtggggggtgggggagtggggggggagggggcatggaccaggagtcaatcaacttggcaaccgccggccggatctcatcaaacccaggccaccctccgctgtccttagctctacctcccctcatgttctctaccctcaagggtcgccgaatcctcctgaaatccccggtggggttcgggctgggctcagctttcttctctgcctatccgcggtctcggggagccaggcgcggtgtctgcgctgcgccaaggagagcttccagctgaactcagaaacacctggggcttggggtttcgggcaggagacctctgctcctagacttgggggtcatttacacactctcatccccaaacccccctcccgcacggggattcagacgaaaatcgcgaagaggaataataaaacaaaatgcaaagtcctcagggagtcggcagcggagtcggtcccaggacatggctattgctttgcagctctcactgggaccttgggacggtcagcctccctctcctttccacagccaattccatgcgcagagagcgtcctaacccttacaactcgtctgtgctacacacccaccgcccaatggctctgaaactttttgcccatactcttagattgaggtcaccccagccagcgccaaaagaatgagcgcgggagggggtcacagcagccagttcggccaaacatcgacgctgctccggcacgctccagcccagcgcctgggatgtgtcagaggtacctgcgaggaacatttgcgtgcgattccacgcacgcgttgcatccctcttcccaaacccggatcgctgaactgagaggtggcgcagagtgtctcaccaggtgcggggatttctctccgcctcaggccgtacgagcttccctcgctgtccctgagcgcaaatgagcctcttcagtcgccgaggcccggccgcttagctctcggagccttccacagcccaacaccctgagccctggagtaggcaatttgctcccacagccctgtgctggcccttccaggcacagggagtcccccttctaggggtaggggcgggcgggatgaagcgcacccagccctctctcctacccttcctcctttggtcccttcggctttcgtgtaccttatctcccgcgcgcccagctccttggccggctcacctgctaagcggagcgcggacatgcgctggaactccggctcctgcagccacttccacatcctccggaaggtctcccggccggatttgagtttgctccagggtttggggttgcgcagcaggtccgagagggtcccctgggagcggcagagcaccctctgcgcgaagatggcctgtgggatgctgtagcgcttgagctcggtggtgatacgctgcgccacctctttggtattgatctcttccatctgccctgaattacttccattgctgacctgcgcgccggtcaccgaagggttgggctcccgggctgtgcccaggagttgcccgtggccctgggcgttcaggtgggcgtggggatggtgcggaggaaggccgttgatgggcaccatgccggccgaggtgggcgtgaggtgctgctccccgtggcggccgagcatggccgggtggtgggcttcgaagccgttgggggtgagcatcttgtcggtgggcatggcggcccccgggtgggcatagtgggggagcccttgctgggagttgtggatgctgcccagaccggagctggagaggggcgagaggctctggcccatgccggccacgtccttgtggtagggggtatagaggttattcatggaggccagcccgcgctcatcccgcatgagcgtgaagctaccgctcacgttgcccgccaggcgctggtggtggtgcgggtggtggtggtgatggtggtggtggtgatggtgggggaacttgtccgagactgtggagatgggaggcagcggctgcagaggggtcaaggtggtgtaggtggtgggcatgctcatacctgggggagtctcgcaggccatggtcatggtgggatgcagggggccggccaggctgtgctcaggggcccggtggtggtggtggtaatctccgccgccgctgccgccgtccagcagggacgccatgcccatggagcgcgggtgcgcggggggcaggtggctgccgcggtgcgccacggagctgcgcgcgtgggggctgccgcccagcaggtcggcaggggcgggcaccggctcatggctcaccccgtgcagctcgccgatcgcttccatggtcagctgcgcgttcatcgtgatccgggcgagcaggcggcggacacaacatcgatgtggccaggcagaggcggcgaggggcgcacggagtccggtcttcacatcggctgctggcgactgttgccttccttcctctcactgtggggctctgtctctctctctctctctctccgtgtgtgtgtgtccgtgtgtgcgtgtgcgtgtgtgtgtgtgtgtgtgtctcgccttccctcttaccccccaccttcccctctgcgtcctcggcttttttttttttaatattaatttccaaagaggatccgcgccgttgggagagcgcagtgccccagcccgcccgcctcggccacctctcgcccctctctttcttaaaattctgaggtctccggctcccctgccgcggcccgcgcgcctgccgcgtctgctgcctgcccgccccgctggccagcttgagccatggctctgttactgttacagactctgtggccgcggttcggtagccgccgccgccgccgccgcagcggcccgccctcacgcccgccaggcgcagcgcgcatgcgcgaggcccgcccccgccccctaggtcgcggcgcgccaggcccttggcgtcccggtacaaatgaaggagggggcccagcgccttccctgcggcgctggatggccagggagctgcgggcacgtgcgaaagattggcgcagagcgcgacctggggccgccgctgcaatcccaggagactcgcgcctggctcgctcgcctcccttgcttgagtgggctctgtcctcccagcccggggacgctcgtgtcgggcttctagcggctggagtgctgtgcttggagacatcgcccctctctctccagttgctgcttcccggtgcagcttgcccggggagctggggactgtgtcatcaccccttcggctctagcccactaagctttatttcccggggggctgctgggagtgcgctttcccacccttgaattcacggcctattgggggatgggggttggggtggggtggggtgcagattgcttaaagggctgggtccgtttggcggccgttgacccggcacccttcgtcctcccagataca

SEQ ID NO: 237948 - DNA, 348 bp, Homo sapiens
  chr15:53090066-53090414
  hyper
tgatggaaaaaggaaaacaacggcccacccgacttagaaacttcttagccgctgaaaccccgcaataaaaacgggaagggggcaggaatcgggcttaagtgtaataagaaaattatttatgaaaccggataaatgacttcagagccttgatgcatttgaacctaacgctctcggctcctggcagccccggctccagctggggagaccgcgaaaaccccaagccacggagagctggggggcggggggcgctctgcttgcctaggcagcctccggcttgccgcccctcttcctccgtccccgccggaagagccctctagggcgctgctcgcagaagctttggaaagttgg

SEQ ID NO: 237949 - DNA, 543 bp, Homo sapiens
  chr15:53090661-53091204
  hyper
ggctttatatgaagagaaatcgttctaaacacggtaggaaaactggaaaaggcgctcaccctcctcccccgtcccccgtgcctccgtgggttctttaccaggcccggggtttaattgggccttggcataaggctcccagcaagcgcgggacattctaggctagctgttcccgggctagaggagagtgagcgctcaggtctgggcccaattctcctgtaattcggcacaggcgccgcccccacttacccactggccccaaatatcgacccactctcggttttcccctagtcaagggccactgagagggaggaggagaaacagagggggtgggggagcgaaaggttaaatcctgaccctggaggaccgcgggaaagttcagagcccgagggtcaatctcaggcccgagttcccatcccccactgctgggggtagagccgccaggtcccctccccctagctagggtcctgggcccttggaggcgaagctgagtgagggagaggggcgacccctggccgcagtgggatggggcgatgcaatgctagg

SEQ ID NO: 237950 - DNA, 1272 bp, Homo sapiens
  chr15:53095560-53096832
  hyper
atttttaaaagataccaagacgtaaaagacgagaaaaacatcccgggtgctctgcataaaccacacgcaacgaaaaagctcaccgccagacagcttccagcactcgaaccaatacaagtaaagcacatttgcaaatgtgtttgactgtttttgtaggtttaagaagactacgtttttctgaccacttcaaaaaaacaaacacgaattcagccgctgctttaataacctctgaccagaggagctgattttgccaccgagttatcggtcagtgctgcgaggtcagtggcctgtgatcatgtttatagcaggtttggcttggatttggtgacacagccagcaaacctgggagattatgaaaccgtgaaccagcccagggaagtgtagtcaagtttcagtttgggcatttctccgggtgagggaatccggtgggctccatttctacaaggctcacaaacgcaggtgcagttcggccgccgcacgctgcctggcgggagaaacgcgcacaaaccgcagacgcgtgctcctgtagttgccactagctcggggcacgcccgtgttatttacaccctgctcgggggcccccctctcatttgttactttaaactcatggggaggaactgttagctgccgtggcgggactggcaggctgggaggggggcgcccccgctcggctcccgggccgtgacgcggccgctgccctccgcccctggcttccaccctgtttgcatggccacaagctcagcggtggaccagcgtggccaggcccccggagcccttgccccggcctaccgcccctacttcttccccctcaccaccccccccaaacgcttgtgagactggcttaccctggtgggcgagtcgcagcgcattagcggatttcatggcaagttgcttctgtgacatgagatcaggttcgcgttcgaggatttgccccctaggagggaaggaaaggagagtcaatctgcataatttcaaatgagaaataaatagggaaacagggaactgaatttcaagccccctaattcctccctccccccgaacctgtgagccaccccgcaccccccacaacacgccccgtgcacaggtaaaaaaaaaaaaaaaaagtaatcagcacacgtcgcaggtgataccttttattgtgctcattttaaagacaggaacaggatggcctcctgcccgaagactttctctgcagccaggcccggggcaggagggtcagctgggcagcatccgggcccgcggattcctgcaaggtcgcgaggtgagaggtgc

SEQ ID NO: 237951 - DNA, 1518 bp, Homo sapiens
  chr15:53097070-53098588
  hyper
cctcttccgggcgccgactggctctttttggtcaggccagcctcgcatttggggatgcaacttgcatttgaatagctgcctgggcttgttatggacccgggaaagctctgaaagggaatcactatgcaaattgtcccagttacaatcgaaaggttcgatctccaggagctgcctgacggaagttgatgtcagctatctatgcattagggttgcattaccgccttcgtcggcctcctcgccacccccgctcgcgcctgcaggggaggctttttttttttttgcttatgtttatattttccctcagtaattaaaaaaaaataaaaaaagaaaataaaaggctgaaggtggtggcatagctggctagggcctgggaggcccacgggctgagaggggaggaggtgcggaagggcggggttgggtggcggggggggtcgttcttttgcagcaggtgttgatggtgcgtttgaaatcaaacatttagatttttttttcgctttgccggacgaggcggcggcggcggcggcggggggttggggcggcgatgtctgcctcctcccgcccgcttgatcctacaatgccggctgcggatcaatacccgctcactgtaatcccagtaattgtagggctcgcagcttttattttaaagaaataggacactagggcgccggcaggcggctgaggcagaacggttgggctgcggtgcctccgggggccttttggggcgccttttaccccagagctcagaaagctccgggcagcggggtggtggcgggatggccagtagccagggcccacctggcggcccgccgggatgtggaggcccactgggttccggcccggcatggcgctggcgagaaggcgccgctgggcgcgtagggtaggcagcacgcgggatttagccttttcccgacctgcgcgcgggccctggcgggaaggccaggtccgggatgggcgtcttgggcttgggcgccgactgtgggcggtcttggccccagaccccgacgcgtggggacccaggatgctggaactcaggccttcggcctagaaagacagaggttttgtctcctttctgccgccttccagggccggaggccgggccaggctcccgggtggcctagctcgggcctagtctgcgtctggccctcggtctgggaattggcagggacgctaggacctggtgatctaacgcccgcgcggcctcttacgccggggtttcctccaggtgctcgttgccacgcgttcgcccgacgcccgcagatcccgtcgcgcccgcaggctaggccagctccgcaagccgcctgctacctctgccgcccgccccttgctggcagagtccgggcaggactgccggggcctggggccgcagtccccgcgccgctggccgcccgcagcttctggcgcccccgaaaatgaccatctgtcattcaattaaggtttcagggcagctgatgggggagccagggtcagcgaccccaggacaaaacggcctgctgcctcggataggagaagttcaaatgt

SEQ ID NO: 237952 - DNA, 144 bp, Homo sapiens
  chr15:53489679-53489823
  hyper
gctgctgagcacatcgagagcgccccctaggcgctggcacgtggctctgcaggaggaagccaccggtcgatcatccctgcgtttgtcaggcgcccaaacccacacacaaagccctggcacaggcggcgacgcggcctctctccg

SEQ ID NO: 237953 - DNA, 162 bp, Homo sapiens
  chr15:54051733-54051895
  hyper
gcgggaaggcgtgcggctgcaccagccaggggcagacgaagaccaccagcctgggacccggcagcccgacctgcgctctgggggtgcctgccttacctgagccgtggggcggaggagcggcagaggccaggcaggctggcgggtctcgcccttagggtcacg

SEQ ID NO: 237954 - DNA, 419 bp, Homo sapiens
  chr15:54270543-54270962
  hyper
cctctcggagctacgccgtgctacggcggcaggagagggagcccgggcgctctcggtggaggaggctggggatcgcagtgccggtgctgcattcagaaaagactcagccgcagccggcgatgtgtgaagttcccagcacgcactcagcccggctgctcctcaccctcaaatgttgatgagcctgggcgctcctcaacacacgggagagatcccattttgctttctgggagaaagagatgagaaatgagccgcggaaggtatttggcaatgagaagagtgaaaggcagtttcttgccagcagctaagttgtagaattgcttcggaggctacccgggagtgcgatagaattgacaagaaaagaacagacaccgttgcagaccaaggcatgcctgattgcacgagtcggatccctgggacgc

SEQ ID NO: 237955 - DNA, 486 bp, Homo sapiens
  chr15:55489070-55489556
  hyper
acacttttcgatacgcatgttgaacccgcgtgtaaccccaccaaacaaacgccaagcttgagaggaagtgatgcaaccccgtcaccggaagttaccttcttcccccttccccgaccggaaaaaggcaagcgtccttcgttctcgcgggtctgttagaccagatgcgaacacgactgtgcctccggcggccgtgtggtcaaatgcgctgccgtttgacgcaggcgcagagctgcagactagacctgttcgctgttactttggggaaatgtggttctgcgccaccttgtgaacttgctctcacagcgcctagttttttctctctgtgtgtcggcatttatgcaagtattatgtatctttggtttgtgctttgcctcggagtgctctcgagagcactctcttaactcatttgtctactgcctgccctagaccagccctcgattctcgtcccacagtgatttgcagggtgtaagcggcgaagaccctgca

SEQ ID NO: 237956 - DNA, 54 bp, Homo sapiens
  chr15:55700704-55700758
  hyper
atccgggagccggcgaccacttccagttgctatggttacgagttgcaacctcca

SEQ ID NO: 237957 - DNA, 535 bp, Homo sapiens
  chr15:55879822-55880357
  hyper
ggaggcgagggatccgcgcggatgtctcgggggccagcgggcgcccgggccgcgcgctcggatcgcagcctcggccccggggtgccggcgggacgcgggctgcgcggacttaggcccggacagagccccatggcctcccggcggccgggcacggggccccgcgcacctcactcaccccggttcccccaatccggcacccttctcggttacctcgaactctcttcagcgaaatgggatccttctcctgttctgctgacattacagaccgcaaagcatgactcccccccaggccgcgggaattcggtctctttgatgctgcggcggcggctcctcctcctcgcggggccgctgcggctgcgaggcaagcctcggagccgaggcacggccgagggcggtggggacgcgggccgactttgcaaagtttgggaggaggacgaggcctcggggcggcggggcggcggggcggcgtgcgggcaccggcggggctcagcggcggtggccgggagcgcggcctgggggcggccccccacccggg

SEQ ID NO: 237958 - DNA, 341 bp, Homo sapiens
  chr15:56034910-56035251
  hyper
gtcagcgccaccacggaggaccccgccgcgcgctccccacgccccatcgtttcctctttccccatcccactcgcgcccgctcccgccccacagcggtaagagaaagcagaagaaagcgcgcccacctggcaaaggactgagcagcagcaggagcaggagcgcgcggagcagcatccccggcggtcgcagccgggcgaggggtcgcagaggaggcgccattcagcgtagccgcgcgggcatgctccccggccgcccagagcccctgtccgtctgcggcccccgccccgggcgctctctgctctgcggctggtcgcacgcagcctggctccccgctccggctc

SEQ ID NO: 237959 - DNA, 404 bp, Homo sapiens
  chr15:56657423-56657827
  hyper
gcactaactaagtcgaatttgcagttaggaagccttcctgggttcctgggacagcgccgagtgctgcgagcaaaggccgagcccgctgccagaggctcgcgccgctcgcagcacagaacctgagagtgggaaggcgtaggcgcccgggcgggaggcaaccgggatgtggaaactctcgcgggaagatgcgtcgttgcctcggtaaccgcgtcgcagtcgccgaagatggcggggcgaagtctgtgtctcacggtcagttcaactccaggctcctggggagcgtctgggttccggcgactaggacgcctaacttcctttaacttcgggtctgaaagtctgtggctcttttacagagaagcagcgttccagggactccgttcccgccacccgttcagcaaccctct

SEQ ID NO: 237960 - DNA, 161 bp, Homo sapiens
  chr15:56757166-56757327
  hyper
ccatcttggctgacgaaaaataccccctctcgtgggaccgcggccaccacctcccgccgcaaacgcagcagccagcagccccaaggagcgcacctggctgcgcgcgctcgggtgtttacgcggcgtcttggcaacggtggagctgcgcgccctccgctcga

SEQ ID NO: 237961 - DNA, 181 bp, Homo sapiens
  chr15:57598789-57598970
  hyper
ccttctgggaggacgcgcacagcccgaggaggcagagccccagacgggaatgggcttttcagaggtggggtgcgggcgaggggacgatgcattatttttaatatttgatttatttttccaactggacttcttcccggggctctttctgggcccagctgcctttgtgatcccgcgccccggt

SEQ ID NO: 237962 - DNA, 787 bp, Homo sapiens
  chr15:57668407-57669194
  hyper
agaagaaaaatgcccggtgacggcggaggggaggtggaaggacgaacggctccgggaaggggtgaggtctaagcgcagccccgggcccagcggagccgagggcgggtggtgcgggggttcctgggtaggttcgtcccgacgggccgcgggcggattgaagggagggttgggcccgccggcagccccggcgggtccaggcccccggccagcccctgcccctcctcccaggagggcgggcggcgactgcggggcggggcgcgggctcgctcggcctcccggcggcgccgcggcccttgcactccggccgggctctgctggctgcggcgggagctggacgcgggaggaggcggcggcggcggtgagtgagctccgggctggagcggggcggggtgtgcgccggcagccgggtttcggggtgctaggggccgcccagggcggcgggacccccaggggttcgggctcagccaggtgcactgtgctcagtccgcgcgtccactctcggtgacccgcgccgcgcgtgtcctggggctcgaagatgcgacccggactcccgcgccgcgccccgccgagggcaggcgcagaacagatgcgggcgatccctggggaacccgcttcggggcggggtgggagggaggaggccctgcagaacctccctttagtgaagagggactttctgccttcgcacccctgcctggaccctccggctctagtgacagctgggagagactcacacgaagcagtttctgacctatcctgtcgtacacaagtcctcggcgtgctcggccgg

SEQ ID NO: 237963 - DNA, 151 bp, Homo sapiens; identical to SEQ ID NO: 203890
  chr15:57883948-57884099
  hyper

SEQ ID NO: 237964 - DNA, 32 bp, Homo sapiens
  chr15:57998720-57998752
  hyper
tttttgtataaaccgacgaacagctgatgacc

SEQ ID NO: 237965 - DNA, 109 bp, Homo sapiens
  chr15:58357206-58357315
  hyper
gaaatttgtcaaaccggccagagcgctggtgtcttgacaattccttacgggaaagcccctcagcaccctccgggctgtggaggacctgattgggaccaacagccgaggg

SEQ ID NO: 237966 - DNA, 515 bp, Homo sapiens
  chr15:58358275-58358790
  hyper
aagcggagctggcaggggctggcggggaccggagcggcccggtgctgcttcggagtagagaaaggccaggaaagtccaggctgcggagggcggctcccagctcgcccacgttccctcccatccccgtcccaggacccaccgaaccccgtcccccttcctttccggagacccgggagggcgtcctccgttctcctcctccgggcaggggcgccaggctctcggcagctacgccctctcccccgaccccccgactcccctcagccgggccgaggtgcatggtggccagagggtcagggagaggtggcagtgggtgcgagtccccctcgcctcgggctcagaatgaggatccctgcgagcgggtcagcgcggggcggcccttgccaggcgtcgcccgcccagttgctgccctctgccggccgggaccgcccgggcggcttgcgctgtggcgggaggatatgggcagtgatcatccccggctcctccgaggagctgcatgcttcgtgggctcctttagt

SEQ ID NO: 237967 - DNA, 165 bp, Homo sapiens
  chr15:59062963-59063128
  hyper
aaaatctgcatctcgtaagaaatgccttaattttccatattaggagctgagaaaccaagtcccctgagcccttcagggacaagttcttttccaaatactacaaccacctccaaccacccaacaatgcctcaggccgagggtgggccacacgcgacccagcgctaa

SEQ ID NO: 237968 - DNA, 255 bp, Homo sapiens
  chr15:59225884-59226139
  hyper
ctggcccctcccccggtccgccaccctagcgcaacctgcagcagcagccgccagcacccggatgacggccgcgcgtgcgcgttggcgcagggaccggcagcggcgcgctcggtcgagcgggccgcggccacttgggcggtgcgctcccttgtgtggactgggaggtcgggcacgtcctaccgcagcaacgtccgccgcgccgccgttctctcgtcgcttcgttagccattttcttgcaacgtcttgagtcttgag

SEQ ID NO: 237969 - DNA, 39 bp, Homo sapiens; identical to SEQ ID NO: 203892
  chr15:59396925-59396964
  hyper

SEQ ID NO: 237970 - DNA, 453 bp, Homo sapiens; identical to SEQ ID NO: 203893
  chr15:59397170-59397623
  hyper

SEQ ID NO: 237971 - DNA, 170 bp, Homo sapiens
  chr15:59664777-59664947
  hyper
acttcaaaagttggttcccctcgccaaaaacaggctcccgacacccaagcactcacaggagccaatgggaacccagaggggactccatccaggcgggattggcggtgctaggtgagggcgagacggcggcgacttagcaggcggggcgcatgctgcggagggcaagagtc

SEQ ID NO: 237972 - DNA, 83 bp, Homo sapiens
  chr15:59665217-59665300
  hyper
gtagtcctcctcccgcgccagccaccgaagaacgctgcggacccagctcgctcctggtagcaagacccgaactgtaaggaaca

SEQ ID NO: 237973 - DNA, 382 bp, Homo sapiens
  chr15:59729539-59729921
  hyper
atgaggcaaaggtcgtgtcccccgcaactccgctgaaatcctgcccaccgagaggaagcacaattatgagtgaatgggcttgtgcgtcctgatgagaatccaaaatcgagaggaaggtggaaagagccaggacgcgctgggaggggatgaagctgacgggagaagaaagggctgggaagaggaggggtgttcggggttcttcttctcgtcgtgtctgctgcgatgagacacgatcctgggtcccaactgcaggtgtcaaggcgattcagtaaatgacacatggcagccccggagggttcgttcacctgcacaggtggggcgtcaccgtggcctaatcaaataacttctccccaatttgaggtggggcgggggagagaactat

SEQ ID NO: 237974 - DNA, 202 bp, Homo sapiens
  chr15:60286352-60286554
  hyper
cccggggcatttcccgggtccctaggcaaatcgctcctcgcccagtggtcctcactcctgggagccagtgacactttcttatttatttatttgcgccctgaaggacgactcggatttccaggccagccggaagaggcagaaagcgaacaggctgctcagaggtagtggcccttccttccaggcgtcgcgctgatccccaact

SEQ ID NO: 237975 - DNA, 726 bp, Homo sapiens
  chr15:60287014-60287740
  hyper
ttccagatccagcacggggaaagatgagacatttgccttcgagctcgctaagaaagtggcacctggttggtggaggggagagataccaaatgtcggcgcccagcctgaaataagtggcatgggacgcgcagggagggcgttcagcttcagaaagcagcggctacgctgggtccaaacccggcggctcgggaggccatagctcctaggtgcgtccgagctcctgctaccctgcgcggtgttgtcctaccggaggaagtggctgatgggcagtctaggatcccggcccctgacccagggccctctcctccctgcggtcctggtccgggtcatggtcccggggctggtctgaagtgctgtctacagagggcacttggggaaacatcgtaggtccggaaattcccagggaaagtttttgcaggagttgtggacgccgcagcagccccaactctcccaacccagcttgcgacccgagagaagtcgctcacacttctctttgggggagggcgacagttccggggaggacgcttggatcccgaaaatgacgggatccaggtcccacaaccctcaggaagcgctgcggtcttcaaaactgcgcagctaaattcctgggcgcattctccctttcttggcgagtccagtgcccgtgccggggagcattccagcccagcttacctcggcaggtagaaagcacagcatcgaggctgcggaccctacatctgggctcca

SEQ ID NO: 237976 - DNA, 85 bp, Homo sapiens
  chr15:60288334-60288419
  hyper
actcctggtattccggagtgttccttaaagactgtgaacccaaactgctttcaggggtgaagtaagtgacgagaaggtttccttt

SEQ ID NO: 237977 - DNA, 55 bp, Homo sapiens
  chr15:60289607-60289662
  hyper
aacccgctttgtgggtggcaactcagcgggggacgcatggagacaagaaaacaaa

SEQ ID NO: 237978 - DNA, 621 bp, Homo sapiens
  chr15:60291859-60292480
  hyper
tggcaccacagtgcaggggtcgctggcgggggtagggggtgtgggtgggtacggagtcctttcactgcccgtcggcagttggcaccagagcggaaagtgtgtcccctcccccgcctctctcccttgggcagtttgatttcccgccagactcagtcggagtggcctggaagagcgggctcaaactccaaaggcagtcgtgggagagtcgtagcggatacgtttcccctgacatgcgccgggtgctcgtctctgccccccacccgcccccaaaacccaaacctgcaagtcgatgttgtccggtgaccccgggaaaggagaactttctgagctagttccctctggtcccgaaatccagcacgttaaagccaggccttgcggtgctggggggctggtgggggaggcgcacagactccgaggacaaacagcccccaggacactcgggatggccatttttttaattgaccactgacaggctgagggagtttgttttagtgctgaataccccaggaacgaaatccttttgaaagggaggctaagtcgtttcacgccaccaaagtgcagatttgaagaatgactgatgggacaaagaggcgcgatgcgttagcgcgggttcccagagcg

SEQ ID NO: 237979 - DNA, 2554 bp, Homo sapiens
  chr15:60295980-60298534
  hyper
ataacccatgcaaccaaccccgggtagtgctaagcgcaggaaaagggtcggcttcaggggaaagccgtgcctaaagttacctaacgatacaaaccggatacaacgcagaggaaacagaataccccagccaagcaatttccatgtcaaacatcatccgcgcggctgctccatctgtgaacgtgagtggtcgcctggctccctcttccgcggcggccgcttcctcataccttcacacggcgcacaccggccggcgcgtccagctgcctgcccagtggccgaggctcttccccctcgcccagtcttgagctggaagtgattcctattggccaaggtgtccatgtaaataggtgtgaaagaaaccagagctggccgggctctcccttctcgctcagtcccctccctctgcagcccccgctccccctcctcttcctcctcctcccaaggcgattgtcatatgatagctaagaagtggcacattaatgaagcgccgctacaggggtcttttctgctcctgtcaccgcttaaaactatcagatggttcgagggaggacatggaggcagccacctagctcagcggagacgcggagcccacagcagcgccctccggagccctaacacgtcgctgccaccatccgcgccgggactccgcagccgagctcggccgcccgcaggacgctccaggagcgtcgcggaccgggcggcacgggacgctgcggggctgagctcaagagcccaggttcgcgccgagtccaaccggacccggacgctgcgcgcggagtgcgcgtcgagtgcgcgccgagagagaagcggcgcgcagcggcgtcctcccggatgcggacgcgcaacttgaagcaactttaaggtgagcagctctctgttccgtccctgccccctattctggccccagtaccgacttacttcccggctatcctcgcgccgttcgccggcttcccctcccgcgcccactaagcccgcaaagttgctggcgaaagagtccgggcgctggctgatcgagcgccgcaggccccacccccgacccccgaagtctgttactcggtctggctgaccccgccggtgtctctgtgcatccatgctacctttccctattacccacccccttcccagatccgagcagtccgccggcccgcgcggacccagagcaagaagagggcgaggaagaagatgcctcggcccggccgcaacacgtacagcgaccagaagccgccctactcgtacatctcgctgaccgctatggccatccagagctctcccgagaagatgctgccgctgagcgagatctacaagttcatcatggaccgcttcccctactacagggagaacacgcagcgctggcagaacagtctgcgccacaacctctccttcaacgactgcttcatcaagatcccgcggcggccggaccagccaggcaagggcagcttctgggcgctgcacccaagctgcggggacatgttcgagaacggcagcttcctgcggcgccgcaagcgcttcaaggtgcttaagtccgaccacctggcgcccagcaagccagccgacgcggcgcagtacctgcagcagcaggccaagctgcggctcagcgcgctggcggcctcgggcacgcacctgccacagatgcccgccgccgcctacaacttgggcggcgtggcgcagccctcgggcttcaagcaccccttcgccatcgagaacatcatcgcgcgggaatacaagatgcctggggggctggccttctccgccatgcagccggtgcccgctgcctacccgctccccaaccagttgactaccatgggcagctcgctgggcaccggctggccacacgtgtatggctccgccggcatgatcgactcggccacccccatctccatggcgagtggcgactacagcgcctacggcgtgccgttgaagccgctgtgccacgcggcgggccaaacgctgcccgccatccccgtgcccattaagcccacgccggccgccgtgcccgcgctgcctgcgctgccagcgcccatccccaccttgctctcgaactcgccgccctcgctcagccccacgtcctcgcaaacagccaccagccaaagcagccccgccacccccagcgaaacgctcaccagcccggcctccgccttgcactcggtggcggtgcactgacccgcaggagcccacgccccctctcgttctcctccccaccacctcactcgccttccctggctcccagtcctgccggcccccacctgggaccgccaccctaacttgttcatttcaccttcggccaacccgccttgccccaagagaactttgttttggacccaggagaccaaacacaaacttgcagatgggccgagaggcgcgtgggagttgtcctcgcccccacatcaaggaaggccggggccacctgagccgaaccatcccctccctgaggccccgaaaccccctcctatttgaccggcgggggaaaccctgtcaccccctcttcgccgagaaaagcgcgtcttccctccgcccagatcggcggagccccgaactctgcgcagtttcaagacta

SEQ ID NO: 237980 - DNA, 219 bp, Homo sapiens
  chr15:60771301-60771520
  hyper
taaaggatgtggccgcgccgactcggccctgcgtgatgacgtctcagcgacatagtgggcggggccttgcgtcttgacggctgctcccctcctttcctcccgccacaagcgctcgctgtggttctggcagcgaagtgcgagactgggctcgccaggcggaagtggttggagactgcgtgttttcctagaaagtcctcgaccttcgtcggggagaggagg

SEQ ID NO: 237981 - DNA, 150 bp, Homo sapiens
  chr15:60883426-60883576
  hyper
ggcggccgggcctgcgaagcagctcgggcagattatccacggcgaggaacctgcgggcgcacaagcgggcggcgggcggcgggcggcgtgctgcgggctgagtttctccggagctgtttgcaaccgtcccaagagcgagtctcggtttct

SEQ ID NO: 237982 - DNA, 1212 bp, Homo sapiens
  chr15:60883785-60884997
  hyper
gactaacccgcgcccgtcggccctcaccacggtctaacctccgcccctgcccgcggatcccgtgggctgccgagttcctccccacctccatccaccagccaaagtgtcaagcggggtgcgccgcggctccctgggccgcccagagcgtcttggcacgctcgaggcgcccgtctcgctccggcccgcgcgctttcggaagtggccgcggcgggacacagcgcgggacacagcgcggacctgcggcacttgcccggccggcggccgctgaggcgctcggggacgcaggggcagggcgcaaggcctggggcgctgaccagtccccggggatgacatcgcgacaacgcgcacgcacggccctgcccggccgcggcgcctccccgacctaggccggagctgtcccgggtgcgggccctggggaccggccgcgggcgtccccggcttcctctgaactccgcagaccctccccttcctttccgaagcgcggcgactcccggcaaactttcttttgggagacccgcccggtgccaagcggacccaagagactgacaggagccggagggggcagcagagggggatccaccccgtgcgcctttgccccccaatcggaggcaggccgatcccgtggccgggctcaggtggcgccgcggcggtggcccagaaggccctggcagggcccccgcgccgagccccgggcagtacgtgcgttcgggcaggcgcgcccacccctccccctgcgcgccctcctccccgccccccggagccgccagcccacccggccccggcggggcgcccgggctcacctttcatcgctgcgatcacaaaatacatcatttaagccgcggtgcggagagcgcagggagagcggatggtccgaccccggagccccctctgccgccgccgcgccgccgccgcccgagccacagcagcagctgccgcagctgcccgcccgccgagagccatcccgagccataagaggctccatgtgaccggctgacatcacggccgccgctctgtttacaccgcgcccctccgcttcctcccggggcgggaggcgggaggcgggaggcgggaggcaggcgcgccccagcgccgcgccccgccccgcccccgcgggcaggtgagtagcagcggcggctctgctggcccaccccggccgggcctgccctcccgcgccccgggccctcgcccgggcgcccgccttcccctcgcctt

SEQ ID NO: 237983 - DNA, 572 bp, Homo sapiens
  chr15:61519472-61520044
  hyper
ctgttacataacccgctcgcattccaaatccaccgtctcagggtctaaatatactctttgcagccaaaagctccccgcacacaaactcaccgagctagcggcaggtccaggcccccagccctcatccccttcccttttgtcccagccctcgccgcccccctcccgctgaaaccgcggttcgccgcggtcaccctttggaaatcgcctttaattaaatgtttttcgcgtgtgtcatcctgatggcttttactgtactcgaattccgtgaatgggaaagcgcctggacagggggtgtggctaaggtggggggggggatactgtaaaacagccagcacatgatcagccatattcctacctccaactacaacatcgagaggaagggagcagttcctggggcccccattcgcctctacccagccctccccaaccgccgccagaagccgagtgcaagaggagggggcgcgctgggccggtacccaagccggggctggagaaatcctctccgtccccagctccaggcggctcgcgcgagcacgcttcctccggagtgacaggcgcgatttatacattat

SEQ ID NO: 237984 - DNA, 1582 bp, Homo sapiens
  chr15:61520356-61521938
  hyper
tgcttggaacctccgagagggaaggattcccagagcagaaataagtttcggtgcttgcttttgtagacgctccctccggatgcgcgtggagcgccccacaggaccgccgccctctgcgcgttggcgcgcacacgccccccgccagcctgggcgccgggctccgaacccccggtctgcaaacttgcgcatctcccctcgccgcgcccgccagacaacttggcgaacagctcgcccgcccgcaccccgcttccttcggcccttccttcaaatcccaaacgcaccgccgtgctccaaagaaggtgtccacgtcgcccccagaccccggagcgccccctctccacccccgggacttcccaggtcgctcactcctcccgccccccgcccagatctgagagggaccgaaaacacacccccgactcgggcagccagggccgaaactgtcaagaggagaaaaggtaaagcggaaggagggtggccataaacagatttttttgccccttcttaaaaggacactgccgctttaaaagtttctttcccgggcccccactccccgcatctccgtattttgggggagcgtatttaattgaggcaacgcagctttcctccagtgtttgcagaaaaatcaaagccaggggggtgagcccgccggctgtcaaccttcccgccgcctcccccgccccactctgctcccgcaagccgagaacgggctgcaaaagtttgcaacatttctggggggcggaggggggaggggaggggggtcctccgggctcggggcgccgccgcaggctcgcgcgcggccgccggaccccgcgccccgggcgcccgctcccggccgccccccgctccgcgcccgggctcccgccgccccctccccagcccctctccagcctcctacctctgctggtgctggaatagctctgtctgcgcaccggggcaggcggctcgctcttgcgggcggattcctggttcagcggggtctccctggagccggcggccgcgtccgcgccgctgctgcctggctcgctggcggcggggtcgggggctgccggagctgactccatgttttttcccaatgtagagatcgctggagatggcgagctccgagactccctctatcttctgttttcagagcaactctatggtaccaaaaaaaaaaaaaaaaaaaaaaaaaaaaaaaaaaaaaaaaaaagaaggagaaggcgaccggcgaaagcaggagggaaaaagcaggcggcggcgggcgggcaagcaaaagcgcgagggagcgcgcggagtgtctgggtggacgtgtgtgtgcgcccgaaaggggacaagaggcgggtctggccacaggcagcgctagcgagagcttctccagccggcccccacacccacattccccaccctccagaccccagaccgagagccacagactggctgccaattttgggaggtggggaaaagaggggaggaggagaacagagcctcccgcgccccaatcctcccctctccccagcccagggacagaaattaaaatcggtgagatgattccgtgcctacttctgagactctctcgggaacagaactcgtccccatccgctgc

SEQ ID NO: 237985 - DNA, 514 bp, Homo sapiens
  chr15:62358992-62359506
  hyper
cctccacctgaagccggagagagaaagaactgggtctccaaaccttgctcagcaaatccagccacgtggcagagggacagggaagagcctggcgtcaggttaccaggcagcgcccctctgctcggcccactggcaagcgctcccagcggcaggtataaaagctcaggctggcagtccttgaacactggtgctgaaccccgccgcgcgcgctttgaatttcccagccgctaagcgcctctcctggtcggtgtcccaggcagaaaggtgcagagacccatctgacgcaggactccaggtattttaggagggacccatcggcttgcttaattccctgggggattcgtctgaggctctttgcctctgcaaggggagaaccagccacagtttcccggaaggaataacaattactttaattctagctgaggactagactgctatggtccaaagagtcaggaaacgattgcaaggcaatcgttggcacagagaacagagcgactgaagttacaatccagca

SEQ ID NO: 237986 - DNA, 359 bp, Homo sapiens
  chr15:62359734-62360093
  hyper
caccttgcgggactcgctctgacgatccttgtgcctttgtgcactgcaggtagacaagctccagcagagagtggccagatgtggtgcctggagcgactccgcttgggtcctgagtgccttcggcggagcggagactggcttctcccgggtcgggcccgcggagccaagtctcgcaccaccgccgcgtgcgcaaatgtgctcactccggaccgcatccctgagttctgcatcccgccacggctcatgccccgcctggccttggctgcgctccggaattcttgggtcgaagaagcagggatggacgagggcgccggccgcacagactgggacccgcgctcgcaggccgcgctgtcactgcc

SEQ ID NO: 237987 - DNA, 169 bp, Homo sapiens
  chr15:62457398-62457567
  hyper
tctcttcttcagtgtctctggatctggttgcaagctcagtgccagtggcctctagcccgctgccgaggcgccaccttcagtactgcggccaggagagtggcgctcccctcttataccgtaggctgagtcccgcccagccgccagcggcccaacccggaggtgctgcaca

SEQ ID NO: 237988 - DNA, 208 bp, Homo sapiens
  chr15:62683364-62683572
  hyper
gccgggactccagcgccactttgcaaacaagtctcccgccgaggctctgggctaagacagcccgccagtgcggagttccttctccggtgccggacactcagacctgccgatcccacgactgccctttacttggcaatctcgccacgggcgaactgctggccgctgagcgacgggggcagtgccgggccgagagcggggccaggctttg

SEQ ID NO: 237989 - DNA, 55 bp, Homo sapiens
  chr15:62684295-62684350
  hyper
cggcgacagcagtagcgcccgcggctgcgtgttctgctctcgcagctcgtagagg

SEQ ID NO: 237990 - DNA, 641 bp, Homo sapiens
  chr15:63334348-63334989
  hyper
ccagagcgtgagcgcgcaggatgacacctggctggctgagagctgccggggaggcgctggcgggtgccgagagcgcactgaccctgacgcggggtgcagcacggctgggaagcccccgggcctttggctaagcgcgccgggggacggcacaggggggcgacgcgcatccaccacctggtccgcgctctcccggcctccggcagctcagggcgggctcggttggggaccctaatggctgggtgccggccctgggagaagggcacgcggagggcggagggttgcgcctcggccccggctcggccccaacgccctctccctggcgcgcaggtttagaaacagggcggcctctccggccgccgcctcggcggctcgggtccccatatatagtcatatccaccgtcaactgggaggccggcggccggcagcgaatgggcgagcggcccccgcgggaggagcggggagggggcacggggcggagggaggagaggaggaaggggggcaggagaaaaaagcttttccaaaaaagtattggctgtcttgaggaatgcggtcgcccccttgggaaagtacatatctgggagaagcaggcggctccgcgctcgcactcccgctcctccgcccgaccgcgcgctcgccccgcc

SEQ ID NO: 237991 - DNA, 202 bp, Homo sapiens; identical to SEQ ID NO: 203918
  chr15:63448918-63449120
  hyper

SEQ ID NO: 237992 - DNA, 37 bp, Homo sapiens
  chr15:63449921-63449958
  hyper
gcttaggccatggcgagggagcgcccgcggccaccgg

SEQ ID NO: 237993 - DNA, 132 bp, Homo sapiens
  chr15:63674098-63674230
  hyper
tgatgtcatcgtgcggggagggggtgggggaggagaacgccctgcccaccggagggctggcgccccagatcctaggtgagttgtagccttgacttcagcagcactctgcgggtccccggcgctcctctgggc

SEQ ID NO: 237994 - DNA, 93 bp, Homo sapiens
  chr15:63779680-63779773
  hyper
tgtcccctagggggcgagctggggagagaccggagtccctgggagagctctgcgcggaaggcccgagagaattggtcccgcagagcttttaca

SEQ ID NO: 237995 - DNA, 419 bp, Homo sapiens
  chr15:63795380-63795799
  hyper
aggatgagcagaggtgcccccggtgggtggataccattaggcagaggtctatgcggaagaggccgacttgtggcgtgggaggtagggaggagtaagaagtgattgacggggcgtccctggctgctctaggactgcattgcggggaggtgcccggctctaaccactgcccggcccggttaatcatttcctgaccttccttcctcctctcgctctggccgcaggattgccacatcagtcttccccctcctcctgctcgccttctggccccgaggctccttcgccgggttttacaaggagccccaacttggaagcaatatttgtaatagccccggacgtcctcaagtgccccagtgagatcgcaggctcgatccagggtatgccggcccaagcggccccttgaggcttgccctcttctctaa

SEQ ID NO: 237996 - DNA, 78 bp, Homo sapiens
  chr15:63796159-63796237
  hyper
cccacgcagcatctaggtggctggctaacgccacgtgttcagaacctagaaagggctacggatcgcacctgccgcaag

SEQ ID NO: 237997 - DNA, 98 bp, Homo sapiens
  chr15:64126646-64126744
  hyper
ggccccggccctccggccggctaagttcaatcacataaaagcgtttcacttgacctactcttccaccttgttcatgtctttgcgccttatgggactgc

SEQ ID NO: 237998 - DNA, 134 bp, Homo sapiens
  chr15:64443636-64443770
  hyper
cgtccttggtaggcgcttaactcaggttgggtgacattttcgctcgccagttcctggcatcagtgagtgctccgtcaatgtttgacaaacggttgactccactgccccgcgctgtgggcgcactagacttcggg

SEQ ID NO: 237999 - DNA, 123 bp, Homo sapiens
  chr15:64454833-64454956
  hyper
agatgggtatccggggatccaactaactccctgggtcagggcaggggctgggggtgtcggggtgggtccgggtcgttccctggactgaatgggcaggacggcccagacgccacgaggccacag

SEQ ID NO: 238000 - DNA, 336 bp, Homo sapiens
  chr15:64455663-64455999
  hyper
aattggctctaaacgttgtggcttccaaacacttcagggacatttatccttaccgagcgtggccttgtacggctcctccacttgtcttgcaaaacttgctgcacaacccacttccttttttactgaggccgtcaagttactacccatttttctctcccttctgtaatcttgctgtgcttactgttgtgtatatcaatggacatcttattgtatacgctgttcttaacttcctttaccttttcccccaatagactacatttttttttttttctgcggaagggactgtgttgcatttactctgtccacagctccctcacagcgcggcagtactgagtg

SEQ ID NO: 238001 - DNA, 414 bp, Homo sapiens
  chr15:64648210-64648624
  hyper
caaatgaggcgggcgcggtcccctccccgaggcgccaagtgcttctctacccacccgcagcggtggtttctctctttcccaggagcgggagggaggggagaaggcggacgggagggggaaggcgaggagccgaggggcggctggagccgaaccggaaccactagcgcggccccgccctcgtcccggagtcgcagagtaccctggcgggcctaataggacaaactttgggcaggcagcgttaaactgacaccatcacttccgggttatccccacggctgccccctccttagcaaccgcgtggggttgctaagcggaagtgccttcaaagcaacccacccccatttcttctgggactaccagaagatatatcgggagcactgagctctgctttggcaacacgctcttaccttctgc

SEQ ID NO: 238002 - DNA, 83 bp, Homo sapiens
  chr15:64752567-64752650
  hyper
ctaaccggcacgccgggttttccagcattccctgagctaagactccctaatctgggctccgggtgagcgcgcattccgagacc

SEQ ID NO: 238003 - DNA, 56 bp, Homo sapiens; identical to SEQ ID NO: 203922
  chr15:65067772-65067828
  hyper

SEQ ID NO: 238004 - DNA, 256 bp, Homo sapiens
  chr15:65117948-65118204
  hyper
gtgtctttctttgcgtctctactccaggagcttgggctgtaccaattgcctgctagaggaaggaggtttatggtggtggctgagcataccaaatccagtggacggctgggcgtggtgggaggaggccgccgctgcggcagccacccggcggcgcgtggtgtcgggtctgaaaaccctacgcgactccgaagatttattttcagaaccatccttccagcacactccctctcccctctagcccgcacacagaggctgg

SEQ ID NO: 238005 - DNA, 220 bp, Homo sapiens
  chr15:65186316-65186536
  hyper
tcccgagccattctcgggctcggccagccattgggctgggaacctgtcaatcctggttgatcttccaatgagctgtgaactggtcttccgggaggacttacaggaggctggaaacggggcctggcgcgcgcttccctctcagtgcgaggctgactggttggactcgccgggctctactgtgggccccacgctatgtttagacgcccgacgtgtcccattt

SEQ ID NO: 238006 - DNA, 199 bp, Homo sapiens
  chr15:65203768-65203967
  hyper
cgagtcccgagaggcgcgaggaggatgagcctgccagatgccttgtgcgcatctatctccagggccggggaggctgggcgaactcccggggaggagactgggtcagggacacctgcggaactcggcgtggccccgacccgccggcctcgggcgcggaggggtgggcaggttaagagagcaggaggagggacctgcgtcc

SEQ ID NO: 238007 - DNA, 79 bp, Homo sapiens; identical to SEQ ID NO: 203923
  chr15:65281790-65281869
  hyper

SEQ ID NO: 238008 - DNA, 43 bp, Homo sapiens
  chr15:65282476-65282519
  hyper
tcttctttcagttcgcgttttctctgtcgtgtacagctttgga

SEQ ID NO: 238009 - DNA, 110 bp, Homo sapiens; identical to SEQ ID NO: 203924
  chr15:65321808-65321918
  hyper

SEQ ID NO: 238010 - DNA, 38 bp, Homo sapiens
  chr15:65426171-65426209
  hyper
gagaaccttccgacggaagtgacgtcgttacgacgcgc

SEQ ID NO: 238011 - DNA, 55 bp, Homo sapiens
  chr15:65477569-65477624
  hyper
gctgactcggttccgaaccctttcgcgggccctagaccccgtggagagttcacct

SEQ ID NO: 238012 - DNA, 188 bp, Homo sapiens
  chr15:65578946-65579134
  hyper
ccggggtctgggccgcggctcgccgccgaagagagagaccgaggcctggaccgcgggtcggcggggaggttgggcccagggataaaggaactggggctggtgggggggaggggttcccggcctaggggaagggctatgacaatggaatgacaaccgcgggaacgtgctgacacgtgtcctccgcggag

SEQ ID NO: 238013 - DNA, 617 bp, Homo sapiens
  chr15:65647775-65648392
  hyper
agccaccggagccccggtccaagcggccccaggctccccggcccagggcgcggcaggggcggcgggcgagggcgcgagcccggaggacgcggcgggccccttcccggcggccgggcccgaggcgggggccggttcccacagccgaccgggccgcgcgccgcctttgaagtggccgcagctgcgccccggcccgcggctaatccccgccgacgcgggcgtcccgcccccccgcccctcccgcatagcaatagtgtccgcgctgaatggcgctggctaattacctcgctcgcaccaccgcgggtgaatgagagaatccggcattgtgcgcggcgaatggagaaaataagacagccattgtcctcgcacgccaaacgagggtttgatgtcgctggggcgagcgaggcaccatttcccgccaccccctcccccagagcctcggattccccagctgggcccggccccggcgcactcgcggcggcggagggaaactgaggaagcggtgcctgtctccccgaggaaataggcccttcaccttccgtggaagctgggcggacacgcgcggcccccggactcgccctcgtccctccctccgggcccctccccgagccttctccacc

SEQ ID NO: 238014 - DNA, 44 bp, Homo sapiens
  chr15:65669009-65669053
  hyper
attcaaacccctgcgcatcctccccatgtcgtgagttcacccgt

SEQ ID NO: 238015 - DNA, 57 bp, Homo sapiens
  chr15:65669415-65669472
  hyper
cttctcctctccttcttggctcacgggctctgtcccgggtcgctccctagccacgcg

SEQ ID NO: 238016 - DNA, 149 bp, Homo sapiens
  chr15:65669832-65669981
  hyper
gcccctagggcccccagcagtccggccttggtaccctctccccgtccggatccgcagggtcccccccgcgcggggtccgccctcaggtccgcgccgctctccccgggtccgcccctcgcgcccgctccctccctgctcgcccttcccct

SEQ ID NO: 238017 - DNA, 503 bp, Homo sapiens
  chr15:65670161-65670664
  hyper
ctcccgggcctctcgcggctcacagcgtcccgcggggccggcgccggggccggggctggggctccggccggggccgagcccaggcggtgggggactggggccgcatgcctgctcagcagcgcggggggcgcagggggagcgccgcttgcgccatcttgcacccacccgggcgatctgtcagcctcgcccggggtgcgcgctccacactcgcaccgctcgcggccgccccgccctcctccccagcccgccgcccccctcctctctgctcccggtcccctcccccagccccctctccccggaggcccggtctggggaacaaaagagccggcgagcgctttaagcggccggacattcccggctgcgcggcggacgcgccccctgcgctttgaactgtggctggagcggccggcgccgtcccgggctgcagccgggtatcccctccccgcgggccagccggggacctggggggctgaggaagtggacaccagcggactggggagtgg

SEQ ID NO: 238018 - DNA, 448 bp, Homo sapiens
  chr15:65713971-65714419
  hyper
tctctctggaaagccgcagcagctggagagaaatccccctccccacccccacctccaagtccctccccgactctccccggacacatcctcagctcccccctccgcggggaaggcaagaactaggcgaacaaagcggccagcccatccccctcccagccctgccacctacactccccatgagccgcccccaaacgcacaccggacaggaagcgacagagctgtgggtggaagccgcagccctagacacacacccttggggacttcgctatcccctccccagccctttctccagcttggacaactctgacttaccccgtacccactccgcactgggctgcggactggatgaggccctgctgacctcgtccacgcttccctggtcggtccctggggggtggggccggggtgacacgcgtcccatcgtgagaacaagcgctggacatgtcca

SEQ ID NO: 238019 - DNA, 313 bp, Homo sapiens
  chr15:65714728-65715041
  hyper
ctcaacccaagacacgcgcaggcaaggcagagcccgccccgcgaaagccaccgacaccgcagctacccgccccgccgatgccacgccgcgaccatggcacgcactgcggacacgacaggagcactcccaacacacacacacacacacacacacacacacacacacacgactccagactctgcgaaccaaaggcacacacccactgcggacaagcacgccccacaaacgccccccggccgcagctcgcagacccccgcgcaggcatcgcgggcacctggacgcgcagcccccgcacttgctcgggactccggct

SEQ ID NO: 238020 - DNA, 142 bp, Homo sapiens
  chr15:65715221-65715363
  hyper
ccgccgccgccgcctccccgtgcttcggccgccgccgcggggggagagcgcgccgggcgtcagtggcccggggaggcgcggcgccgcgggcgggggcgcggcctcgggggcccgggcccgagctggggccggcgcgggggcc

SEQ ID NO: 238021 - DNA, 182 bp, Homo sapiens
  chr15:65809983-65810165
  hyper
gcggcagtagcagcggccttggcctcggaggctttagcacttccggttcgttgcgatccgctttccgactggcgaaggcgcagccgggccaagaagggcgccgctgtctgctgggtggggtccaacaccacagcgcagtctagtggccggaggagccaaggaggcgcggggtggagactggg

SEQ ID NO: 238022 - DNA, 236 bp, Homo sapiens
  chr15:66083363-66083599
  hyper
acttcttttacattcgggctattcttttcattaacgtataatacattttaaagaataacatattcacagagtaatacaatttctgccctcacgggtctctagctggctgacacgcgttttctcctcaaataaatacatgcctgttgactgatgcctgtcctgctgttgcaaacaagaaataactgtcctataagacaaaaacctctctctacggttctaggcgtaaccatacgttt

SEQ ID NO: 238023 - DNA, 198 bp, Homo sapiens; identical to SEQ ID NO: 203927
  chr15:66084910-66085108
  hyper

SEQ ID NO: 238024 - DNA, 141 bp, Homo sapiens
  chr15:66585520-66585661
  hyper
cgtttggagatagcgagagcaacgaagagaaaacattaattacccggtattagtattaatacggcggctccattcccacatggacctgggggggacaaacaaagtctcctaatcttggacagctgcgcccagcccttcttc

SEQ ID NO: 238025 - DNA, 65 bp, Homo sapiens; identical to SEQ ID NO: 203928
  chr15:66586477-66586542
  hyper

SEQ ID NO: 238026 - DNA, 165 bp, Homo sapiens; identical to SEQ ID NO: 203929
  chr15:66678950-66679115
  hyper

SEQ ID NO: 238027 - DNA, 108 bp, Homo sapiens
  chr15:66797136-66797244
  hyper
gaggagacagccacgctcctctcagcccggctgctgccacaggaaaaggaagtgcttaccactcccgctgtatatgtcaccttccccttgaccgccccaccttgcccc

SEQ ID NO: 238028 - DNA, 507 bp, Homo sapiens; identical to SEQ ID NO: 203930
  chr15:66992920-66993427
  hyper

SEQ ID NO: 238029 - DNA, 156 bp, Homo sapiens
  chr15:66994461-66994617
  hyper
ttggagcctccggccctgcaatgggacgtgttctcctttaagagttaagaaacttgaaaccttgtttgcgcaacaatcagcgccgcggagccgccaaagtgtctagactggcatatgatgggaggcagccaatgactccgcggcgctcctccgggg

SEQ ID NO: 238030 - DNA, 588 bp, Homo sapiens
  chr15:66994912-66995500
  hyper
atgtgttgacacccgcgtccaggagaaactcgctccaagtgcatctagcgcctgggacctgagacggcgttggcctttcgtgcatgcaaatccagggatttaggttttgtttgggatttccttttctttctttccttttttttttctttttgcagggagtaagaagggagctgggggtatcaacaagcctgcctttcggatcctgcgggaaaagcccatgtagttaagcgctttggtttaaaaaaaaggcaaggtaaaggcagggctttccagacacatttaggggttcgcgcgagcgctttgtgctcatggaccagccgcacaacttttgaaggctcgccggcccatgtggggtctttctggcggcgcgccgcctgcagcccccctaaagcgcgggggctggagttgttgagcagccccgccgctgtggtccatgtagccgctggccgcgcgcggactgcggctcggcgtgcgcgtgttcccggccgtcccgcctcggcgagctccctcatgttgtcgccctgcggcgccccttcgacgacaggctgtgcgcggtctgcacggcgctccgcggcggagcttcatgtg

SEQ ID NO: 238031 - DNA, 197 bp, Homo sapiens
  chr15:66995980-66996177
  hyper
ttttcggagcgggacgccgccggcgcgccccgggacgccagcgaccccctggccggggcggccctggagccggcgggcggcgggcggagtcgcgaagcgcgctcgcggctgctgctgctggagcaggaactcaaaaccgtcacgtactcgctgctgaagcggctcaaggagcgctcgctggacacgctgctggaggc

SEQ ID NO: 238032 - DNA, 102 bp, Homo sapiens
  chr15:67058139-67058241
  hyper
actctggtgttagacgtcctttcttgcagcagtagccacaacacagggctgggatgttgtgcgacacttgatgtaactcaaaagtcccggcctgcaagttcc

SEQ ID NO: 238033 - DNA, 406 bp, Homo sapiens
  chr15:67357337-67357743
  hyper
tccgcacacgttcccgaggctctcggccggtgtgatctcaccgactagagaataaaaacagcccaggggcgccggcgccggccaagggccttgacggggatcagcaagcgcgaggccaagtgcgggccccaacttcctgggcccgggccttccgcgcgccccctctcgggctcgggtcctctccagggtgcactcgcgtccggacgacgcttacttgctgcgagtccaaccctctccggcccgcaactccaaccgagccgcccgagtgtggactccgagagcggacgccacgggccgcgctcagccctcccgcccgaggcccctctcgccgtgtttcccaggacttcctccccgcgcccgcccgacttcaggtcggggccgcgcagggtcccgcgcgctccagcca

SEQ ID NO: 238034 - DNA, 61 bp, Homo sapiens
  chr15:67359191-67359252
  hyper
gctgtgggtgaggagcgggagcctagtgattgacagattccttcttcgttctttctttgcc

SEQ ID NO: 238035 - DNA, 125 bp, Homo sapiens; identical to SEQ ID NO: 203933
  chr15:67547184-67547309
  hyper

SEQ ID NO: 238036 - DNA, 229 bp, Homo sapiens
  chr15:67813118-67813347
  hyper
aacaacgcagacccggggtcacgcctcgtcctgtttcaacaacaacacccaagggcttccctggagcccagggcgtgggagggagacttgggtttgagttctgcaccttgcggaggtggttagttatttaattgtcttccacctgaattttcctcaggcccaaattgatgagacctccccgaatccctcccctgcccgagttactaatgacggcgtgaggtcacacctg

SEQ ID NO: 238037 - DNA, 41 bp, Homo sapiens
  chr15:68112013-68112054
  hyper
cctgccgtgaggagcgctggtctcacctatgatcccaaaga

SEQ ID NO: 238038 - DNA, 187 bp, Homo sapiens
  chr15:68112101-68112288
  hyper
tccggaccctctccagcctcagtctctggtccgcaacaggagtgaggtgggcccggagctctgagcaccttctcaccggctccaaggcccccgccttctcctcacttttggtctcgggttggggcccggcaggccccgcccagcctccttcacttccttgggccagggccgccgccgcgccgggctc

SEQ ID NO: 238039 - DNA, 286 bp, Homo sapiens
  chr15:68112553-68112839
  hyper
acctaattaactgacgaaaactgccgttaattcaactagtaaaagatatgtgcttgcggaggaggcgcgtccgcgcagcctcagcccaagccggagcccaaatggacgccaaacccggggcacggaggcagcgcgggctcggccagtgggaggagaagcgcgcaaggcgcagctcgcatccagagtccggctttccgacccctggtgccaccgggaagcggataaaagagagagaatcttcaataatgggggtcaggaaggccaagggcagcgacgcctgcccgct

SEQ ID NO: 238040 - DNA, 1297 bp, Homo sapiens
  chr15:68113277-68114574
  hyper
attaacccgccggacgccggcccatagtagagccccagctcctacccccacgacctgctccccggtgcccagccctgagcagcggggcttccccagcctctgtccacgcgcctttctccagctcagaccagggacaggagctgggtgggtctcctggcactggccagagcgcggggagctgtccgtagcttggtgctgaacggggacgcagagtcgacgctgcacaccccctggtgcggggcggtaccctttgtctaagaggtcctgggggccccccgcggccgggctgctggaaacggaggcgtctttggccctcgctgtacaacagaggcaggacaggcaggtcctgctcagggggacccagcccatcctctctttcctcccaccccccggcaccctgggggcgtcctggctccaggatcgttgtcaccaccaggccgaattctgagatgccttttaaaaaatcattaggaggctaagaataattaccgaacgagattgtaattatggggtgggggagcctgggccgagggagagggaatgagctggcggggacttgggggcagctctcggactgggaaggaaaataggttcctgtgttctccccggggaaggtgtgggaggaaagacagcgggatagttggagcgggacagaggcacagcctgggaaagacacccgaatggaggggccagaggcagaaagaaaggggccgagcgggttccaggactcccctgggagaaaagggaaaggcagggagatccgagacagaaagaccggaaccgaggagggggaagagggcaagaacgcgatctaaaagagaccctcagaggagacagagcccacaaacttgggagaggttttcggggcctaggagaacggtaacctacgtcagccagggtagccgggaagaaggcaaaggagtctgtgggctgggcctgccctctcctcagtcccttcaccaggcctgagctatcggttcgcgcttccagagtcccttcccagggtctctgcgagccaggagggaaaggaagagaggggagaagtggaggaaaaggggagacacgccccagaggagttggaacgcaggagggaaaggggaccatacccggtagcccgagggaaaaacgaggcgagaggggagaaggcgaccccgcgctgctacccgcggaagatttatggcgcctcccgggttccaaggacaggctgcgttcgtcgctgctgccaccgccggtagtcgccgtggccgctgcgccccctgcccaggcggcccgtcgcgccccaggccatccctgccat

SEQ ID NO: 238041 - DNA, 332 bp, Homo sapiens
  chr15:68117233-68117565
  hyper
gcccgagtgggaaacgtatatctgaaggaggaaagctcaaggagtgggcgactggaagctaagaagtggatcccaacaaagttccttgagaacctctctgtcccacacgttgacctcggtggaaaccagctttggtctggaatacagctaaaaatgcagaaaatgtggttagaactgcaggatcctggtctcactaatagctggaaagaaaacggtttatatatccagccgaaatctttctgctcaacgaacgcgggcgccagccgtgagaggagaagctcgggtttgtggaaactggcaatgttgtcccctgaagccggctcgggcaccaa

SEQ ID NO: 238042 - DNA, 2355 bp, Homo sapiens
  chr15:68117892-68120247
  hyper
ttgccgaaggcgcacggatctgggcgctgaaaaagccaggatttggcaatggctttgctgtgtggccttgggcaagtcactctgcgtatctgggtttcacttccttcccaatccgaaaacgggattgggttccttgcagcccgggcattcctgaggtctcctttaccccttctcctcccccaagccccgggggctgttgttaacggcgccaacatgggtctgagtaacaaaagacgcctgtccagggggtgaatgagtttggactccccactgccaagtatcccccgcgcgcccaactcggagcgccctgctgggcgggcccgagcctcggcggcggcgctgaaaatggctcatctgctctctgctttctctatttcgcaggagcggcggcatggaggctctcaccactcagctggggccggggcgcgagggcagttcctcgcccaactccaagcaggagctgcagccgtactcgggctccagcgctctcaaacccaaccaggtgggcgagacgtcgctgtacggggtgcccattgtgtcgctggtcatcgacggccaggagcgcctatgcctggcgcagatctccaacaccctcctcaagaactacagctataatgagatccacaaccgccgcgtggccctgggcatcacgtgcgtgcagtgcacgccggtacagctggagattctgcgtcgggccggggccatgcccatctcgtcgcgccgctgcggcatgatcactaagcgagaggccgaacgcctgtgcaagtcgttcctgggcgagcacaaaccacccaagctgcccgagaacttcgccttcgatgtggtgcacgagtgcgcgtggggctcgcgtggtagcttcatccctgcgcgttacaacagctctcgtgccaagtgcatcaagtgcggctactgcagcatgtacttctcgcccaacaagttcatcttccactcgcaccgaacacccgacgccaagtacacgcagcccgatgccgccaacttcaactcctggcgtcgtcacctcaaactcagtgacaagtcggccacagacgaactgagccatgcttgggaggacgtcaaggccatgtttaatggcggcacgcgcaagcggaccttctccctacaaggaggcggcggaggcggtgccaatggcgggtcgggtgggcaggggaagggtggtgctggcggcggtggcggcggtggcccagggtgcggtgcagagatggccccaggcccgccgccccacaaaagcctgcgctgtggcgaagatgaggctgccgggcctccggggccacctccaccccacccgcagcgcggacttggcctggcgactggagctagtggcccggcgggcccaggagggcccggtggcggcgccggcgtacgaagctacccggtgatcccggtgcccagcaaaggctttgggctcctgcaaaagctgcccccaccacttttcccccatccttacggcttccctacggccttcggcctatgccccaaaaaggacgacccggttttaggcgcgggcgagccaaagggcggtcctggcactgggagcggcggcggcggcgcggggacaggcgggggtgcggggggcccgggagccagccacttgcccccgggggcaggggcgggcccgggcggcggcgccatgttctgggggcatcaaccctccggggcagccaaggacgcagcggcagtggctgcagcggccgccgccgccactgtgtacccgacgtttcccatgttctggccagcagcaggcagcctcccggtaccgtcctaccccgctgctcagagccaagccaaggccgtggcggcagccgtggcggcggcagcggcggcggcagcggcagctgctggcagcggtgccccagagcccctggacggtgccgagccagccaaagagagtggcctcggcgcggaggagcgctgcccgagcgctctgtcccgcgggcccctggacgaagacggcacggacgaggcgctgccaccgcccctggccccgttgcccccgccgcccccgccgcccgcacgcaaaggctcctacgtgtcggccttccggccggtggtcaaggacaccgagagcatcgctaagctctacgggagcgcccgggaggcgtacggcgcggggcctgctcgggggccgggacccggcgctgggagcggcggctacgtgagcccggactttctgagcgagggcagctccagctacaattccgcctcgcccgacgtggacaccgcggacgagcccgaggtggacgtggaatccaaccgcttccccgacgacgaggacgcccaagaggagaccgagcccagcgcacccagcgcagggggcggcccagacggtgaacagcc

SEQ ID NO: 238043 - DNA, 2197 bp, Homo sapiens
  chr15:68120277-68122474
  hyper
cgcggacggtcccgcaaactctcccgacggcggcagcccccgcccccggcgccgcctcgggccacccccagctggccggcccgcatttggggacttggcagccgaagacttggtgcggagacctgagaggagcccgccaagcggcggcggcggctacgagctgcgagagccttgcgggcccctaggaggccccgcgccggccaaggtgagccccgcgcccgccccgccagtggcgccttcccacctaccctgtgcgcggcagggctgcggggccgggcggagaacgggaattttgttccgcgcaggcgtgggagcagcaggcctcggccactctccgcaggcccagccttgggcgcgctgcgaaactgggcccacccgcaccctccagtgagggtttcgaagggaagggaagctgggggcggcgggaggactggggaacttgtgtgctttgtttttgttgatgggaatggggaggagaccggctgagactgccagacacagagacagaaaaggggtgtggagaaagaaagaggaggtaagaaaggaacccagagccagagaaaagcgctcgcccgggtgggcatcagagccccaaggaagaggagaagagaggacagtgtggcctctccctgagtcgggccccagcagtaccgggtccccggaatctcccaccaccccaactcgcagttttccgagtctcttcgcactcccgccttgggaaccacagggttcgttgctgggaagctgtctcgggaccgcgtgcggagcgggaggggggctctcaagctggcagggccggggcttgaggggcaggatgcagccaggctggagtcgttggccattttgaaagtgagtgcgcatacctgtacattcggttcattaaaacacgaatcattaaccggatgcgaaaggcgtcatttatgccgcggacggggcactggcgggagggaaaatgcctaaaaggaggcgggtgcagagggtggaggacactttgaacgcccctcggcttgggagccgctttgtgtttagagtaattttcccgagggcgctaacaattaccctgaatctacaagggggcaagggtgcgccgcgtgcgtcactgtgcccgctcaagtccagcgggcgcaccaacctttgccactccgtcggctttccctcttggccgcggggtagggctgggcgtctttgggccgccgcagggcgccaccctaatcgcctgtcatttctcggccgtcgcaggtgttcgcgcccgagagggatgagcacgtgaagagcgcggcggtggcgctggggcccgcggcctcctacgtctgcacccccgaggcccacggtaacgcctgtcgcggccgctggccactgtaatgggggaaccgcagacagagggccggggtcaaggaaggcctgcgaaggaagacaaggagagagacgcagagaaagagggagagggaaagaaaaataatgaaaacaaggaagctaagctagtactcccaacaacttccaatctttagttacttaaaaacaacagtgacaacgccctctccaccacacgcacacacatgctgcagtacacccagacacggcgttaaacccttaacaaaatcacgcccgacacggccttcaaatcctctcatttattcagcaagtgtgtttggccgcggggtcccctttggctaggccggatcggggcggaggatgggggcacatggccgcgcgcttgggtaccccagaagcgccagggtagctgaggcccatcgcggggtggtgggggccgccctgcacttgcgcgccttaccaggttcctcacagaggaggggttgggggcagcggaaaatcgggcaggtcgaggcagccgaaccccggacgatgtccccccacccaccccgaaggtcgcagcctgggccgcgttctcagcaggagtcgggcggacagacccggcggccacgcgcgctcgcggtgccccagtatctgcgcgcgatgtaggtcgctcgtccctggtgggctcggctgctcgcctagctcttttccaaggggctggggcgggggcctgaagcccggagatgagcagaccaggcgcgggggtggggggtgcccggcccaaagcctcagggcgcgctcctgggcgcacagccgggaaccagaggcggccacgacgcttttaattagggctggggcgccccgaccgcggcagctccggcag

SEQ ID NO: 238044 - DNA, 593 bp, Homo sapiens
  chr15:68125163-68125756
  hyper
attagcctcagaatggcaagcgagcccagcaaacggcttgcaggcatcattacatggagtgattgaacttcttatcgcggcaatttccatggtttctaaattaaaaatcgaggcgtaaaattacctgggaagtaatgcctaagtttgctttaattttggttagatccatctgcctttaagcgccatcccaggccatttccttcctccgccagtctgcagttaggagctccggtaccccctcccccatccctggagttgtttctgcgcggagcttagccctggggagaggaggaagcccgggctgtgaccccggcctttcggagggtggtctgcgtttcctcactggcccctccccttgtcttccagataccctgtgtaacgaactcgaccaggagcggaaggcgcgctatgccatccagcagaaattgaaaggtgcggaagccgggaaacaaagataggaggggtgctgggtgccggccgtgctgtcgactgaatgaatgaatagtgggactagtgaggaaggccacgatccacgtggatcaggatctgtgagggagaaaagtgggaactgattttaacgggaagattattct

SEQ ID NO: 238045 - DNA, 537 bp, Homo sapiens
  chr15:68126032-68126569
  hyper
tgagcctggagaggcgcccagagtgaccctcgcgactgtctccccagaagcccacgacgccctgcaccatttctcctgcaagatgctgacgccccgccactgcactggcaactgctccttcaagccaccgctgttgccctagggccggcctggccgcacccctgcgccctcaagccatgctgctccttgtaaatacccgctgctgcggtggccctgagcgaggaacaagccattcggacccgaccgatgtaaatacagccgcccgtccgcccgccttcctcccgggctccccggccttgcccgccccctcccgggcgtccctgtccagggccccggcttggtttccaagtgtaaataccgcctcgcgcctcaaatccccctaccccgtgtgaactctagggcatcggacctcaaggggttaactggacagacggggggcgggaggggagagcgccccctcccattgtatagccttgaacccgattgtgaatacaatgtagcaacttcgctggcgcctgccccgcactccccgtcccg

SEQ ID NO: 238046 - DNA, 1792 bp, Homo sapiens
  chr15:68126855-68128647
  hyper
gtacccgtgactttcgtttttaataataataataataataataaaagatgtcacttctggggctacggaggtgggagtgcaccggcggagcggggcggcggaacaccgtgcaacaggtgggggtgggagccgccccgcgggttctggggctcccagggtcagaatcgggcctgctcaagtgggcagcagcgagcactcaacctctccactgtgccctccagacacactcagttttcccccacagggcactccctctccgcgtttaggaccctcccttgggcccggaatggaggaggggcattacgtcacggtccttagcgcagcggtcccgggctctttcctcaagagctcgaaggcgccgagggttcatccatgcccatttccacgcctgccacaccggggaagttacctccggggcgctcacagacagggcgccctgccgggaatcccaggttcaaccagaattgtccctttagatggcgcgggcaccgccggcctggcctggcctgggagcgctgcggcagggcggaggtctcagggagtaaggtggtctccgccgggcaggcttggaaaggaaggcgggacttggagagctcggtcacagacggcctcccgtctgccccgccgctacccgaaaggagggagccccgtccgcattttctgttcggtccattttagttcgagaggggctaaggactcgccgggcctcggctggggcgtccgacgtccgggtcacggttggcaaggcctcccagcggcctcagtttccacagcgcacctcctgcttgggctacagacgacgctgcaaattgcagaacactctttgcagggaggagagtgtggatggagtgggagagagctcacggcacagggaatcattcagccttggctttcatttctcgccctcggctggctagtgggggtcccgggttgagcccttcttttatctttcctgggtctccgtttcggcctctatgaaataacacgcaggcctccgtccatgcggctcgtagaaggcgggcggcaggccccgcgccaccggccagcagctcgggaccgggagccctgggctgagggggccgggaagtttcgtggcgggttgtcttggtgggccttggacggagccggctagtaggggcgtgctctgggcctccccgaagctgtgcagacgaggagtcccgctgcgcggtacagccaggaagccagtccctagagtcctttgcgctgggggtcggagccttggagtcccaggatgttccgacggctaagaccagagcggacacaaaggagataacaatgaagagggcgccggcaaatggcgaagcatcgcctccggacaggccatctccgggcagggcccctctagggagcgggaacgtttcatatgcatgggacccaccagatccgctttccgctggaccggtggcgaaactgaggtccagagaggaagagactggagtctccaggccgcgccagggcccgcggaactgcgacggggcgggacagcgcgggtgtgggagtttgccggcccctttccccaccgcggattgcacctttggaagctgcacttttcttctctgtaaaatgggcatcaccattaccacccaggcaggaagttccgtggctgcggctcgacagaggagccaggcaaatgctccttcccacccttccttcccaactccccccaaagtggaaaagctcctaggcagctggggccctccggaagggacgccccatctgggcaggaatctctgcggactggagtcgtaggcggatccgacccagaaagctc

SEQ ID NO: 238047 - DNA, 279 bp, Homo sapiens
  chr15:68260481-68260760
  hyper
atgcaaactaggatcattttcgggcgttggggcccccccgcttgaaatctggtttccatgttcacaaaacgcagcccgactggtggaactcgcgactccagacgcagagaagctgtgggcagaggcggaggcagagggtgggaatgcagcctggcgttggagtggggagaaaggggagggaggaaccgcgcgcccaggccccgcccggttgcctaggtgacggggagcgagaggaagaagtgggggctgagctgatccgagcatttcagatcttaatac

SEQ ID NO: 238048 - DNA, 315 bp, Homo sapiens
  chr15:68347700-68348015
  hyper
gtaccaattactcacgcctcacgaaattagatgaaagggtgcccccttttccccgcttttctcccaccccaatctttacctgatgatggcttctttaccgtagcagatataccactacacaagcagttgggggagggggtggtggaacccttatgactggattgtgacaaatggggctccgcttgaataattttggtttagtagcaggcagttcttaactaacgcgtattatttcgaggctctgaacgcgatcttctctgtggcttcctgtgtgtgtgaacccagcagctggttatgtctcgacccagagaactg

SEQ ID NO: 238049 - DNA, 40 bp, Homo sapiens; identical to SEQ ID NO: 203941
  chr15:68521278-68521318
  hyper

SEQ ID NO: 238050 - DNA, 191 bp, Homo sapiens
  chr15:68549437-68549628
  hyper
gacttctgcaggcctctccccgccagcgagcgcacggcagcggtgcccaggggctggaggcagcggaacgcacgcgcccggcgtcgctgagggcttgcgccagccccagagtacccgcgtgcccgagggagcgcgcccgcctctggctccgagcttgggggaggggcggcgtgagggagggaggatcttgt

SEQ ID NO: 238051 - DNA, 330 bp, Homo sapiens
  chr15:68569511-68569841
  hyper
aacggaggttctgccggctcaggatgagattcctgctctgtctgaacgcgggactcgctttccttcccaggatacctcgctccttccaccgcgagcgcagctccccttcgctcccatctttctctcacacttaacccctttctccgggaaagtcaggccgtacttccagtcccttctcagagcctggtgttgtggctctcaagccctcccacatttcgggaactcagaaacgccgcccttttcctgaaatggaccctccgagtacgcgcaaccccttccctaaccccggctcaggggcagaagcaggacccgcaccgtctatagtaaaat

SEQ ID NO: 238052 - DNA, 46 bp, Homo sapiens
  chr15:68598773-68598819
  hyper
tccagaaagctttccggggatgtccctcgctcggaatcgctcccct

SEQ ID NO: 238053 - DNA, 1205 bp, Homo sapiens
  chr15:68723466-68724671
  hyper
ggagccggggagcccggtgtgggacggccggggccagggtaccctagggcggagagctcagggctggcttcccgctcccagccgcgcgcccctcgggccggaggttcctgccgcgccccgacacctggagtgcattaggcggcggcgcgcgtctaggcgacggcggctttccccagattattgaataattgcataattccgagcgcgggttgggaggcaatgccgggtccctaccccgggtgtcaggtaacgtttcgggggtcctgcgctgcgcgactgtgtcccgccgctgctggccgggcagacgagagctagcccccgcctaccggccatcgccccggggctttgctctgtctttggccggaggcactctgcgcagccctcacccccacccttcagccctccggggccgccgcgcccggctctccaaactttgagatgcttccccggagccaggcaggagggcagccagggcacactctcttggcgctgattcccttccccagccggggccgtgcgccctcggcgctcccgggacacccgagtgcccctggcagccgtgcgggaaccccggcatgggccttggaggcacctaaggcgcccaggagggccaccagatctgggagcttttcaactcaagcctcttcaactcttcccaaacacaccaaagagtcccggctttcaatagccttcgcacctccctctttagcgaaacttgactgaaccgctagactggggccagtccctgggggacccacgtccccaagagcagctgaggtctgaccctgggaggagggtcgcgtcccgatcctggccgctggatccaagccccgagggcccagggagggactccgagaggcaaggggaggcagagggtgggcacctacctggccacaggctgagcgcccaggccaccaccaggcccctgggcaggtccatggcccgcggcacggcggctgggtccggtgtgcagcggcggcggggggcggcaagccagagcggcagcctcctcggcgcggcgcctgcagcctgcactgcgcggggcgccgggctccctgacagctgcggctcattcagaggaagtgggagggctcgagcggaggggaggggcgccggacaccactccggctcgggctctgggccagtctcggccgctctgccacctgggcaggcggcgcgctgcctcgacgcgcctgtgcagcgct

SEQ ID NO: 238054 - DNA, 230 bp, Homo sapiens
  chr15:68821324-68821554
  hyper
ctaaaaggtggaaacggtgcagactaatcctaaattagtctttctctttgcctcaacaactactagatatcttctgatctctgacactccaatgtttcctggacaaacaaagggagcgaagtacgtgggttgttcaataggaagtggcttgaaggtggtttggcaggctggggttttattccctgactctctgtgggtacattcttactgtggctcgtcaggagatagta

SEQ ID NO: 238055 - DNA, 1146 bp, Homo sapiens
  chr15:68870281-68871427
  hyper
gaagccagcacttccgggcttgccaggctgtcctgcttggagaacccctctgcttccacctctgctaactcctcccctccaccctctccgcggttctgtatctgcggaaaccggttctgctcaggtgcttgggagggagactcctttctcaagacttgcgaggtcaccttcaggtgactgtccctcaaatctccgcagcagctccaggacacactgtgccccgagtcaggattggatcaacacacaggacgcacctgtgttatcactccaccagtagagcggcactcagtggtagtgtagacagtcctagggcagggcagcttctataacaagaggttccttagggagctagcggccgagtggaaagagcgggaggaacggctcgggcaggcaggtcctgtgctgtggtctaagtcacttcccacgtccgtcccactctgatcgtcagtttcctcctctgcaaaactcactaaggcggccttcgggcaagtcatcgcggcgggaattagattcgaaagagtgcttacacaaatccgtctggccaccctgtgccccgggccagcgcgaggtgggggtgcgggcagggctcccgggcttgcggctgccacgcccctcccagcccgccgcgccacactcacggcccacgggccgactttgcgagcctccagggggcgaacccgaccgccttctttgcccgcgcagcgcctcggccgtccagcctgtgacttcaccagcgtccccgggccagcgggacacccgagagcccggggcgccgcccgttctcccagccggcaggtgccgggagccagcctcgcccagccgcgtggcgtccgcaggcccgaaggggttaaggccgcggacccgggcgcccgtccggactccgggagcagcggtgcccggcggccggcgatcgagcgggaggctcggggcacggccgctggcgggctgcgcttcctcctcctcctccctccgcctcctcctttgtagcgagttcccggcccctcttcctccccccgccccccagcccgggccctctccctctctccctttcttcctgcctcgccttcctgcggcgaaggaggctcatctattataaatgcacattcggggctgacatcagcgacgagcggcgggcgagcgccgacg

SEQ ID NO: 238056 - DNA, 262 bp, Homo sapiens
  chr15:69109438-69109700
  hyper
accagcacctatatcggctttttaaaattctcagagatgccagcatcggaggacccgacgcgacgaattgcctggctcctaagtcaacatccggagaaaggcggtttacttttttcaaaagcaaaccttcatccctctctttcgctttaggatctcattactattgtagctgccttctcccaggcaaaaataaaagggggaaggagcaggtttagaccgaggaggagggttcccctagcctgcagggcgctgcaacatccac

SEQ ID NO: 238057 - DNA, 173 bp, Homo sapiens
  chr15:69111353-69111526
  hyper
cagtccacagctgcgttaaggcggggagggggtagacaaaaaggatcttgttttcaaaagtctcactcaggtttgggggaggaactagggaaaagaggaagcgaggcctgccttcgccgggattcgggtttaacgggctagaggggcgacaggccagcgcacggtgctgccca

SEQ ID NO: 238058 - DNA, 127 bp, Homo sapiens
  chr15:69113815-69113942
  hyper
tcgcgctggggagcgtggctgcccccgtcacccccaccgcggctgcccagcagcccgcgcgccccttcccctccggcctcgtccctgtcaggccgccaccatcgccaccctcgtatacataagtcag

SEQ ID NO: 238059 - DNA, 304 bp, Homo sapiens; identical to SEQ ID NO: 203943
  chr15:69114202-69114506
  hyper

SEQ ID NO: 238060 - DNA, 245 bp, Homo sapiens
  chr15:69136219-69136464
  hyper
cacacacatacacacacacacgtgtgtgtgtttcggggctgctcaggaggacaggcggctctgcgctgcggctgtggtgggctccgtgcacaccgcgctaggctcatagggcggctggcaggtccagagagcggcgtgggagcagctgctgccacggtggcagcggagatgaaggtgtcagcctgacgcgggcggctcctgagagctcgctggggcgcctcagcgactctcacatctgttcagca

SEQ ID NO: 238061 - DNA, 430 bp, Homo sapiens
  chr15:69366379-69366809
  hyper
agatgggctgtggagggggacgttgggaactgcccgaccccattctcgccttttcccgctggatgtgcagctttcggaacgtgcaggggcgggagtgtctacaacctaagaaaagggccgcggtggggagcccggagcagggctgggtgcagggagcgctctcgctgcccggggcgctctgcgctgcgcgcccagtggggacagcacgccgccccgggagtctccaggcgcgggaggtcccagcagattttgcataaagggaggaatcgagtccagagaacaaacaagatactggaggtggtggcacggagaggattgattcggtttgcaaccctacgaggtcgtggccgctcggggcaggaaagcaggctcctgtctctccaggatccagcctcccgatcaccgcgctagtcctcgccctgcctgggct

SEQ ID NO: 238062 - DNA, 102 bp, Homo sapiens
  chr15:69452709-69452811
  hyper
tattaaggaggagcggagaagaagaggggcggagaaggggcggggagaatcacctttccttttttacaattggtcgtagtagactccgagtcctgccgcccg

SEQ ID NO: 238063 - DNA, 453 bp, Homo sapiens
  chr15:69453523-69453976
  hyper
tagcaaggtttacaccggtgtaaaccttgtctctggaggcagatcatcggggtcttgggggttctttgagcgggcgtgggcgtccgtttcgcattgctgggatgaagaagcagtgtgtccgggttctggggagaggggtctgttcatcggtgtctccgggtgagagagcgatgtatccgttccgctggggccggggccgccttggggggttgttgggggctgagggtgtgtagcggcgaccagcgtctggccggggtttctgctttgcccggagcggggcggtaacttggcatggtctccagtcttttgggggcgacggggcgagttagctggcccccgggcagtctctcggggtgggcgcggctccgcaggcgctgggtccgctgagggcgggagagggctttggtgctaccgcgcaggctgggcagcatcctgaaacgtttttgttcaggt

SEQ ID NO: 238064 - DNA, 68 bp, Homo sapiens; identical to SEQ ID NO: 203947
  chr15:69591245-69591313
  hyper

SEQ ID NO: 238065 - DNA, 45 bp, Homo sapiens
  chr15:69591723-69591768
  hyper
ttatccttcctccaccgcccccctcccgccgcccccactttaata

SEQ ID NO: 238066 - DNA, 82 bp, Homo sapiens
  chr15:69706605-69706687
  hyper
ccctgcggacgggcgctgattggcccgtttgaaatgcgccaggcgggagctcacctgggctcttagcgtcgccgccggcttc

SEQ ID NO: 238067 - DNA, 79 bp, Homo sapiens
  chr15:69744999-69745078
  hyper
ccgtatttgcaggcgctgagaaactttctcaacagtaagaaccaatcaggcgcagtgcgcaggcgccttcagtgggtcc

SEQ ID NO: 238068 - DNA, 180 bp, Homo sapiens
  chr15:70388517-70388697
  hyper
aggaactggaattcgtctttgatcctgtcacaagactcagccaccgtgaatttaaatcccggctgcccgggttgatggggagcctggagcccgcgaagacaagacaggggagggggcgggggcatgagaccgcgctcagagcggccccggcccctccccaacggcgcccaaccaaaagag

SEQ ID NO: 238069 - DNA, 1440 bp, Homo sapiens
  chr15:71054803-71056243
  hyper
cgccattcttgtaacgtgacaaattatctaaatcacaacatctgcggtcaggctgtttctcaagatttctgttctcctgccaactaaagaggccccgactactccttggcgcgcacactgaggccgcgctgcaggtcagcaccgaaagagccccgcacggatcccgccccacaggtgcgatttacacaacccacatcaccaccacccctcccaacttcaccacctctagggtcaccaccctgtggggttttgtctttacgactaagccgattccctctgcctcgctggggaatcaaacttcccagtgacaacgacagcggccagcacgggacgtccaccagcccggcagggcttgacgctgtctcagacccggggaaggtccggagtccgggcacggtggcgcggggtgcgcagccctgcccacctgccctacctggtgcgagccccggccccggggactggggagccaacacggccgagcgggcgtgggcagcagggcgagcgccgggagaggagagcgacgagggggggtcaacggaaagagcggagtaggggtgccaatcgaggaactttggatttaggaggagggggccagaaccgccccactgaggtttcttccagaagttcggaggcttgggagaaaggggtggggaagagacccgtagaggctcgggtgcggcggcggggaggatccccggggtctctgggctgacggagtctccggcctcagggaggagtcgccagggccgccgaagccgaactggcagaggaaaagcagaggaaggcggcgcgcgaactcgccagcaaaggagggctgcgctgctcccggagcggagcgcctcgcagcccggaccgcgggactcaccgcgctggcggcggcggcgccagacgacgcggggccgggcacgtcctgcctcctcaggcgggacttgaggctcttcatggctaactcttgcctggcccccgcgcgaaccttaaaggctgcggagtgccagcgcgcaaggagtagacggcagcggctgcagcagaggcggcgcgggctgtaccagccccacctgcctgccacctgcgggccccgggcagcagacgtcgacaggcctgaggcggggctcccctcccgtagccaattgacccgctgccctggcgggggcgtggcaaaccgcgaccaatcggaatgcgggaatggggcgggacttcccttttaaactgagtaacacccttcctctcccagctggaggaaaagtttgggaactttagcccgggaaggggcggaggaggtgggcggccagaggcgtggagatgcgcgcaggccgggctccaggccaccggcgcccgcccacccggagcttaagatctagagagagcacggggtcccgcctttgccacctctcatcttcccggactcccctcctctttccacccacgcgctctttaccaagt

SEQ ID NO: 238070 - DNA, 119 bp, Homo sapiens; identical to SEQ ID NO: 203954
  chr15:71056447-71056566
  hyper

SEQ ID NO: 238071 - DNA, 763 bp, Homo sapiens
  chr15:71146071-71146834
  hyper
ctgactcaggggctcggcccggagctgcttccccggcggcggggctgactcaaccccctctgcccgaggagttgtcgcgcgcagtcagcgccccgaactcgcgcgcggcccggcgccccctcggggcccacctcccgggccagccgccgcgcctacctgtgcccgcggctcggctcctcctcgctcgcgctgccccagccggggctgaggtaccgggccgggtccccggcgccccgagtctccgccccctcctcctcgtcctccaactcgtccacgtcctcggcctcctggatggcgacgcggatctgcaccgccgtcttgggcccgggccgagcctccccgccggactgggccatggctcgcgggactgcggcgccgccggggtcctcacgccgcaaggcccagccagccggtcggcagcgactgcgacgagggggcgggggcggtgcgagcgcgcctgccgctcggcccaggggagggacaggggtcgcggcgccccgccccgcgccgccgccgccgccgccgccgccgccaccaccccgaccgctagtggagcgcccgcgcaggcggggcctcggaggtggagggcggctttccggagctcctccgacggaggcccgtcccggaaggatccccgcgacccccgatcactccctccgtcttttcgccgctgtggggccccagcccgagaggaggtgtcagggctccctcctcctgcgccttctttcacggcgccgcagggatgggcgcagcacagctgact

SEQ ID NO: 238072 - DNA, 710 bp, Homo sapiens
  chr15:71184726-71185436
  hyper
cgggattgtttccttccctacctctggtcaccggaagtggcgatctggggcccccaatgggagggctctttgatatcttcctcctcctcctccctgcgctgctccccaggagccagtggacacaagcagagggatacaaatttcgcgcgggcagcgctgaggtgggccgtaaagaggaacggaccggaagtggtggtggttatagcaaccagtgtggccagcctcttccccagcttatcctcctcccaatactcccgctctgtttttatgaggctgggaaaatagaacgaggaagtggtgacgcactgggctctcacgaatacaactagaagctgcaacgactgtgtggctctatcgattcgggagaggtccagaccggaaatggtcgtttccatggtaaccctgagcaggttgcctgggagatgacctctttcgggtctctttgaatctccgctgtagcgtcacctggaaggcagatctaacagagaacctggactgtctcctatcatgattcccgggaaatatcgctctgtttctggccgggctgcgaacaacgtaagttgggccttctactttctctttcttcccactggtactctttctgactggcgtctttgtcctaggagatgggctgtattattaggaccggcaccgctgggtctactcaagctattgtctgaccagggtttgaggttcgtgggctggaccaa

SEQ ID NO: 238073 - DNA, 231 bp, Homo sapiens
  chr15:72072597-72072828
  hyper
tcttggcctgtgtacgggattgcctcatttcctgctctgaattttaaaattagatattaaagctgtcatatggtttcctcacaaaagtcaacaaagtccaaacaaaaatagtttgccgttttactttcatccattgaaaaaggaaattgtgcctcttgcagcctaggcaaaggacatttagtactatcgattctttccaccctcacgatgacttgcggttctctctgtaga

SEQ ID NO: 238074 - DNA, 141 bp, Homo sapiens; identical to SEQ ID NO: 203960
  chr15:72409488-72409629
  hyper

SEQ ID NO: 238075 - DNA, 309 bp, Homo sapiens; identical to SEQ ID NO: 203961
  chr15:72522193-72522502
  hyper

SEQ ID NO: 238076 - DNA, 87 bp, Homo sapiens
  chr15:72522952-72523039
  hyper
aggggaaccagaacgcagtttcaatgagttacacagaaagcattagaatcaggggacacgcacagcttgaagaggagggggtggaag

SEQ ID NO: 238077 - DNA, 807 bp, Homo sapiens
  chr15:72523219-72524026
  hyper
gaaaggagccggcggacccgcctgatctggaaggaacggcgctggggacttctgaagagcaggccccaggcgtgaggagccgttctcctctctctgagctccactgcatcccagacgccctggatcctgcgccgccctgcctgcgtgcccggggccggccggcgcgccgggattccgcactagccgggcgactggcccttggtggggactgatggcgtagcctcctgcaccgctcacctccggcgctgaccgactcgggctacgctgcaaagacgaagagatccggagccacggcgcgtgcagctgctgtgcaaggagccactgcctcagcctcaaggttatcccgctgcgggccgccgcaatccctccgccgccccgccctctgcccaatcccggctccgggcgacccgggccccgccccctgcgtccccgcgggcgcagtcaccttcaggaggaagcgcggcggcggcggcggaacgcgcgggcaggttgccctttcggtgggactaaattctgcggcggaaggacacagattcagagtcacattttaagaaacctgatgaccaatggggacgcggcggggcaacggggcccgcccccggagcgactttcctcccagacccccgggcgccgggccacctgttgccgccaagttgggctgccagatggggtgtcttttcttggctctcggcccaggccaccccagctgtcccggcctacctgggcagggcccagatttatgggttccggggcagcattctcccggccccgccctgccactccccactcctccgggtgtctgctctg

SEQ ID NO: 238078 - DNA, 37 bp, Homo sapiens
  chr15:72565125-72565162
  hyper
gtcgggaaagggtgcggagtggggggtggcgcctgcg

SEQ ID NO: 238079 - DNA, 123 bp, Homo sapiens; identical to SEQ ID NO: 203963
  chr15:72612098-72612221
  hyper

SEQ ID NO: 238080 - DNA, 492 bp, Homo sapiens
  chr15:72612514-72613006
  hyper
cgagccccagcccccgtgcttggtgacgtcaggcagctggccgccgagtctacgcaaatgatttgcataatgaggaagcagccgccaatcagagtgggagttgactgggctcgccgggggcggggggggcggctgggctcacgcgctcctgctcgccatggcaaccggaccctcgaatgccctgtgtgtgtcgagtgtgtgcgggcgtggccgtggatcgcgcgtgtgcgccttgggccgcgtgaggggaagcagcttcgtcatgcgtgatggtgtctgccggagtcggggctaatccccaccgcacacacaggcacacacaggcaaacgcaggcacacgcaggcacacacacctccaaacgctggtgcgtttcctgcgggggtggatggggattcctcttctctattcccactatcgagccagtccctcggagccaatcccaccccgccccatcacacatctctgtcttcggtgtctttaaccactttctt

SEQ ID NO: 238081 - DNA, 336 bp, Homo sapiens
  chr15:72668399-72668735
  hyper
acgtgaccagaggcggctctgcgcctgcgaccccaggaggacccacaccctgccctttcacttccggcctggacctgaggctcctgctacgtgcagcggattgtgccgggcgtcggcaactgctcggctcgccagactgttcacgggcccagtagagcagtaaataaccggccacccctgcggccgtgccggccgtgatggaactagacagctcacccgactcgagaagaacggggtggggaggcgaggacgcagggcgacctggagaagaaagtttcccagatggctctagggtgaatcttgaatgttgtgatgcagctcgccaggcctacgggg

SEQ ID NO: 238082 - DNA, 101 bp, Homo sapiens; identical to SEQ ID NO: 203965
  chr15:72978671-72978772
  hyper

SEQ ID NO: 238083 - DNA, 133 bp, Homo sapiens
  chr15:73344172-73344305
  hyper
caggtttcctcccggaggcctttcggtttcctctgaggccctatatagaggctccaggcccggactgtgcagaggtgcgcgcccacgccggcctcccggaccagcctgagctcggagcgcctctcgccctcag

SEQ ID NO: 238084 - DNA, 385 bp, Homo sapiens
  chr15:73611101-73611486
  hyper
aggcttcctctcagcggggcctgtccccactgcttccccacagccccagaggccaggcctcagccattcagacgcgggggaggtgatcgcagcacagggccgcgccctgcctctgccgctccgggggtccccaaggaagcaccaacgcctggccgcagggggcagttgtcatggggacgccagggcccgctgagctgcctccttagcaacgggactccccggccagttgccatggaaacagcatcccctggcaagcggtgatggggaacggctgggtttcctgcccttttccgaggactttcccctcctagggcgggagacacggcactccctataccggcgggagccgcgaggacttggtttttccagtcgcccgtcgccaccc

SEQ ID NO: 238085 - DNA, 1792 bp, Homo sapiens
  chr15:73659595-73661387
  hyper
tctccaatgcagcccagacccgagaagaccagtgactgaacccagaggaaagttcccccagcgcggtgcaggagggggcctgggggtgtctcggagcctagaggcgccctgcctctcttggagctcccagcgcaaggcaggaaagttaactccggctgggaggcagggtcaggaggaggcatgcctgccaccgcgcagggcacccacaggatcatcgctgtggccccttacctgaagtcactgtaggggtggataatccaaaatccggccgacttgaccctctcctgttcgcgctccacggctttctggctgccgaacatccttagggagaatttgttgaccccgggttggagcatggccccgaactggcgctgcatgaagccggcctggcccaggcgcacctcggcctccgggaggatctggtcgccggcagccgcgcctccctccactttgatagcggtgtccaccgagggctgctcgcaggaggcggaggccggctgcggtggctgctggggcggcggcggcgaggctgcgggctgcgccgaggcgccggggcgctcgggctcggccgccaggcctgggggcgtcctgtcctcgccgggggacgcgtcgccctcggcgatgagccgccgctcctccgcggagtcatgcaggtgtccgtgactgctgccgctccccgtgccgccgctgccgccgccccggctgcccagcgaggccaggctcccgcggaagcgcctgcagtcgccgttcgtgctggacttgcccgcgccgcgggccggcccttcgctgtccgctgccccgagggccgagctccgggactccgtgccacccgcggccgccgagggggagggcgagggcagtggccgcagccggatgctcctgcggctggggtcttggcggcccccggccccctcctcctcggcgtcctcttcctcgtccatgatccacgccttggcccccacctgctgcgggaggctgtagagccgcttgcgcatggacggcggcagcttgtccatggcgccaggggccggggtcggaccgggccgggggcaggagcgcggcgccgcggacgggctccaggtccgcccgccggtcagtccgcccgtggggacgcgtcctttgccgccggcgtgggggcagcctcaggcgcccatgcttgggcaggctgcgcgccgcggggaggatcctagtcccgctccgagtccccgggctcgccgcgctacacctcctcccgggcccggctgggcgcggggaccccgcgctcccttcttgcctccctccctccctctggcgttcaggggcgcggcgcgccgcccggctccaggcgccccgcccccgcggggaacaatgggcgccggccggagaggctctgcggccgcggcgctcagggaaccgctccggagtgcagagcgcacggcccgcgcgggtcccgggcgtgcgtcccgcgggagggctggctgtccgtctgtctcgccgcccgggctttgtggctggccacccgcgagctcgcctcgcctcctctgccccggcccgtccggcccgtcccggggctcccgccgcaaccgagcggagcccagcgacccgccgggcttacatcagcggccgcctcccccgaagcgccctccggcagcgctcgggctcccgcgccccggaatattcatgaagccgccgcagctcgcgggttgccataggagcggctccagcagccgggcctgcctacctgggcttcttaaaggggcagcggcgcacgggccgggggctggaaaggggcggggggcgggcctggcaaggg

SEQ ID NO: 238086 - DNA, 157 bp, Homo sapiens
  chr15:73661627-73661784
  hyper
ttcctcttgggaggcgaccgggttcgtctggatgcagagtcccggccttcccgcaaccctcctggagagggggcttccggaaatgcgccgcgtcggggaggctcccacggttttcctgtgacatgggcagggtgcgaaccccgcgccagtctttccc

SEQ ID NO: 238087 - DNA, 981 bp, Homo sapiens; identical to SEQ ID NO: 203968
  chr15:73976465-73977446
  hyper

SEQ ID NO: 238088 - DNA, 268 bp, Homo sapiens
  chr15:74219416-74219684
  hyper
cgtccctgcccctgccggggcgcgtgggctcggacaccgtgcgcggccaggcgcggcacccattcggctttggccaggtgcccgacaactggcgcgaggtggccgtcggggacagcacgggcatggcccgggcccgcacctccgtctcccagcaacggcacgggggctccgcctcctcggtctcggcttcggccttcgccagcacctaccgccagcagccctcctacccgcagcagttcccctacccgcaggcgcccttcgtcagcca

SEQ ID NO: 238089 - DNA, 376 bp, Homo sapiens
  chr15:74219934-74220310
  hyper
gaccgccgctactcgcacagtctgtacagcgagggcacccccggcttcgagcaggcctaccctgaccccggtcccgaggcggcgcaggcccatggcggagacccacgcctgggctggtacccgccctacgccaacccgccgcccgaggcgtacgggccgccgcgcgcgctggagccgccctacctgccggtgcgcagctccgacacgcccccgccgggtggggagcggaacggcgcgcagcagggccgcctcagcgtgggcagcgtgtaccggcccaaccagaacggccgcggtgagtacggccccggcgcccctccggccgcgcgtacccctggccactggaaactgctccgggccccccgggcccctccttaga

SEQ ID NO: 238090 - DNA, 190 bp, Homo sapiens; identical to SEQ ID NO: 203971
  chr15:74268224-74268414
  hyper

SEQ ID NO: 238091 - DNA, 482 bp, Homo sapiens
  chr15:74420293-74420775
  hyper
ccctctgcgctagcggcttggaaccttgtcaccctcccctcccccacccctacttccacacacctgattagttgtctgtttctttaatgatcaaagacgtgggcggcggcgggatgaggtcttggttcccggctccacagccctccctaactgtcattattaacgttataaacattagacccgcttctgcgcgccggacggcgccggacgaggtgcgcgcagtcttctagctgagctcggaggcagatccagaagtcgcggctcccaccccaggcctcggcggactctgcctggggcgactcgggctccagccctgcccgggcgggcactgggctctccagggtcgaaggcaggggtaaggggcgtctttcccccagggcagcctccgggaacaaaagcatttgctgtagagtgagctagagcctccgggcccgcgggagtcagctcccgcccaggggtggtcaccgcgtccttaaccaccc

SEQ ID NO: 238092 - DNA, 1243 bp, Homo sapiens
  chr15:74421725-74422968
  hyper
gtattgatctccacggaagccccaaaccctcgccatcgagagacccccatggcccggggtgatggctgtggggcttggtgctcccagagagctcagtggctacagaatgggtggggattctgcgtgtctcccggagcctgaacccctttcctggttatggccggtagctgtctccagggctaacgtgggcagcgcaggggggcggaaaccgggttttagccaaatgcctcgacatcgccgcgcctccgcctcctcgtcgctgaaagaaatgtcggggtttcatcagagctagggagcgacagtcgggaacagcgagtctgccgaagccggctgttgtgtgagggtgtgagacggcggggcggtgaggggccaccgcggcttgggggatagtgcgtgtggggttgaccgtgtgtctgcttgagaggctgtgaagatatggggggcagatatgggagaaatgctcgggcctgaagtccccagcccaccgtgctcaagagtagcggacgttttgccaccatccttgtctgtgctactgtctgctgcagcttccgtgccccgttctcctggagcaggcaagacctggagtgaggtgcttgggtgcgctcgagagagcttccccctgctccacctgtcccgcggtgcgcgcaggccaacgcgtcgggcagtgggcttcaagcgctggtttagccacaaaagaccagaagtaaagagttccggcttaagaggctgggcagggctgcggtgggctggggaggggggtgtcccttcccagcacgccctgcagggctgtgcgttctggtgtcgggttagactagcaggcggggcgggggggttggggcggcggggcgggggagactagggcttatatcagcccagatccaggcaaaaatggtagggagggtgcggcgctctgctaacactatcaattatgcatcatgttgaacgtggcttcggggaggaggcggctagcagcggggggtgcgggagggaagggtccgcgcgagctcggctgcgcgcagctcagcgggtcccgctcgaagtctgtcggtgccaccgcctgcatttgcaaaaagagtttaaaggcaaagacacgccttccccccccacttcagccgcgcgcctttccttcccccaaattcctcaaagatggtttgtctcacgtgttgcagggcgtaaaagcggcttgcattcaattagcagcgaagctcgcgggcgctggcgggacaggcgcgtgagggtgagt

SEQ ID NO: 238093 - DNA, 1121 bp, Homo sapiens
  chr15:74428169-74429290
  hyper
agaagccgggattcgtggcaacccctagtttttagttccaaagcctcctgccggcagggaaccaaatccttctgtcctcccacccccaccccacttctggccagttggagtccagcccggtgcctggggcgcctttcagctccgcgctcagattttcctgttttcgttgttttcaaagacagcgacatttcgggtctggtgctaacacccccttcccagcctctgggaaaatcgagtgtgtgtgtcggggggtagggagggaatgcgttttctgtcgtctctctcctaacttaaagcgccgcaggaccgcgcgccccttggcggctgagcctgtggacttggtcgcgggccaatttcgttgtccgtgtgttgggctttccggaggtctgtgcgcccaacagcgccgctcccgcggctccacccgacccagaccctagctggaaagcgccggaggcggaggaagctgactgtggcctcccgggccgcggctctctggagggctcgcgccctagttcgcacaaagcctgctcgtgactgtgcgactgtgcgacgggatccggatggagccgagcccctccgtcctcgcgtctcggtcctcgcgtcgccccgccccacccgcccctgcttcggcgggaatcgtgtttgcccggcgtgtagtccctgacaagcgtgccctgtaggagaaaagtctgtgtcctgtgaagtgtgaccgtgtagtgtaggggggcgggcgggggggcggatgggcggggagggagggaaggggaggggcgcggcgcggcgactcggggcggggttcttttttccattttgaaagaaagcgtcggggttggggtggggggagtttcagtcctcgggatcagccctctccgcgaagcgcagcacaagcgcgggcctgggacggagtagccccccggagcccgtgcccttttctaaacgcgtctgtatgcagtcaataaaacaatcgatttgaactgggctcggtgactttttgtcaggggacagagggaggaggcctgggcgatgaaggaggaaaccgcggaaggaaggagcccccccagagcctcccgttggaatcttttgagtgatttcctgtttgcgtgaccatcctgtgatttttt

SEQ ID NO: 238094 - DNA, 126 bp, Homo sapiens
  chr15:74537933-74538059
  hyper
tgtggctcctaggcaggcaccgcgacccgcgccatcacccggttgccatgggaacgcgcggcaggagcctaggcgacacgagcctgggtgggggttcggagagccgggcacaccccgagtcctcct

SEQ ID NO: 238095 - DNA, 441 bp, Homo sapiens
  chr15:74658163-74658604
  hyper
gccgggcagagaaacgcataccgggtcgctccctgcttcgccgccgcctcctggcagggccagcgaagccagtgctccagcgcccccgtaacacctcaaagcgcacggagtccgtgttggggaacttggcggcagagtgactgggacctaggacctgcggtggggccgccgccgcctccgcggggccgagcgcctggacctcgccctgaggtaaacgcgggtcgacccggggggcggatgggctcgggctgtgtcgaggggaggcggaggtgagcgacccgcgaagagcgcaggagcaggccgggggccacgctagggcggacccaatttcggaatagcgcggcccgggcggcggcgtgcgctgggaggaatgctgggtctgtcgctagcgccaaacttgaccacgctgcgaccttttcactctgtgctctgaccttcaaa

SEQ ID NO: 238096 - DNA, 76 bp, Homo sapiens; identical to SEQ ID NO: 203974
  chr15:74685108-74685184
  hyper

SEQ ID NO: 238097 - DNA, 436 bp, Homo sapiens
  chr15:74725792-74726228
  hyper
ccctggcgcccgggcgttgcggctcctggctgccagggacttggtgcgacttagccggggctccggcccccgccgctcgctcgccgcagcgttacagccggctctggtgtgccagcgtgtacactcacacacactcacccaaacccacacgctccacgcggggacagcgcggggacagcccgggacccgcagagctgcgcgcacgcactccctccgggtgcagcacactccgcacccgccccgcgcagcgtctgatcccgcgcctgaccggccgcgcggcgccgcctacctttccagacggcgaagatgcggggtccgctccttaggtggccctgggcggaggcggcggccgcccagagcagcagcagcagccgcagccgcagcggaagccccaaccgagccggcgggccagggacgcgggcgcgcggtgcgctgg

SEQ ID NO: 238098 - DNA, 229 bp, Homo sapiens
  chr15:74753655-74753884
  hyper
aaatgtccggcgccggaatgtctgggtgctttggttggagagggtcccatttccagtcattcttcagcctggtgattcccgcgctcccctgaggagcatatgaagtacgtcggttctgccaggttggaacgcgctgctggacactcggccgtaaggcggatcccggatcccctcccactccgacccttccctccagaagggccggttcccaaacggcccctttagacac

SEQ ID NO: 238099 - DNA, 277 bp, Homo sapiens
  chr15:74988541-74988818
  hyper
tcttggctggaatcggggctctacccacgactccccagcctcgatgcctgggcccccctcttgcaggctcgatgaaaagcacccgcttcccctcctgttaccccagcgccaatcgcagagctggagcggaggactttcagggaggcctggtgacgtgacagcccctccgtgctaaactgcagctgtgggacttaataagtgcgacaaccccctgatggattaaagaaaacaagatattcctgccgtggtcgatcttcaaagcgtatcagcttcagcc

SEQ ID NO: 238100 - DNA, 137 bp, Homo sapiens
  chr15:75017910-75018047
  hyper
gtacgtgtggccacgcctccttccctggagcgagctgagatggagggagaagcagcctgaaccgggctggtctctctgggattggagagaaaggtggcggagggcggcgggggtggggggtcgggtgggcaagaacc

SEQ ID NO: 238101 - DNA, 50 bp, Homo sapiens
  chr15:75018269-75018319
  hyper
cagatgcctccccagcgctacagcctaccaggactcggcaggcgggggcg

SEQ ID NO: 238102 - DNA, 45 bp, Homo sapiens
  chr15:75018660-75018705
  hyper
gagcacagaaatccggcggcggggggccacggaaagactcgggcc

SEQ ID NO: 238103 - DNA, 486 bp, Homo sapiens
  chr15:75075780-75076266
  hyper
ccagttcacttccccgcccattttgtacacccgggaaccgaggctcaaagggagaagttgctaccccaggcctctagtggagttaggctggctgtcctttcatccccagctatacagggctggatggctgtgggtggaaggaaaccaggcaggcaccttcacccactggggacacaggcccccagcccggccccagagggaccttgttggttgagcacgtgcttccctgcagagggctggagggagtgaaagggcttccggctccagctgtggctgggtcagctagcaggagatgtggggaatgtgtggtgtatggccatctgtgtggtgtggcaggaaggtccggtcctggccccggctctgagttgaaacaacctggtggtcagtcctgacccagcactcgccacacctatggcccagctggcacaggagcagccaagttcaggatataaatggggtcacatgggaaccgtggaagctctgtct

SEQ ID NO: 238104 - DNA, 349 bp, Homo sapiens
  chr15:75118800-75119149
  hyper
gcgggagtggggagcgggcacgtggtccagccttctcagccccgtgctgccccccgcccccagtgaggaggggtttggggaggtgggggcgggcccgggcgggggcgggcggcgggcggtgccaagcgtggggcgcgggcccgcggcgggagctgtccgcgaaacctagtgctgaagtaggcgcggacgtgcccggtgcctggcgcgtggtagcaggcgcccggtgccccggccggcgaagaccatggcgttcatggtgaagaccatggtgggcggccagctgaagaacctcactgggagcctgggaggcggcgaggataagggagatggggacaagtcggcagccgaa

SEQ ID NO: 238105 - DNA, 129 bp, Homo sapiens
  chr15:75119190-75119319
  hyper
gcaactcgtggaagagaagtgagtgggatcccttcctggctccaacgacctcccctccccacccccacagctgctcagtccatccccgggccagcctcaggtcccaatcccttctcccctactttccta

SEQ ID NO: 238106 - DNA, 165 bp, Homo sapiens
  chr15:75119349-75119514
  hyper
acactgcccccagacccatcctatctgacacccaaaaccccgctccagcatcatgctccggccaagggggagtggggggaggggcgaccggacgagggaccgaccggagcctgggacgaggaagggggtgcacgtgcgtttctgacgaaacgataatcccttaat

SEQ ID NO: 238107 - DNA, 226 bp, Homo sapiens
  chr15:75165610-75165836
  hyper
agcgggcgaactccgcgaacgctgctgcctccgggcacccagacccagcggcgcttcgtgtagaccctccacttccgggagcgaggcagcggttctggcgcaggcgcgatgccctcccccgagggcgtggccctatgacggcaccggggtcgctccgccccccccccccccccccccgcccagcccacaatagtgcggtgggtgggcattcggcttccgtccacat

SEQ ID NO: 238108 - DNA, 320 bp, Homo sapiens
  chr15:75230421-75230741
  hyper
agcgggcgggggccggacaggctcacagcgggcggagcacgtaggcccgcccactgcgactctggcgcgtgggcgggaggagccaccgcgcggccggcggcggcgggggctacggcggcgcgctgaggacaaactgttagcctcgcgtcccgccttgtctctggtcaggtgacgtgcagctgccatcctgtaagtaggaatggaggcgagggaggagcaaccgaccgtgatcttgttcgagtcaggcccaggagggcacttaatcacctcaaaataggaatgacagcaataacaacaaactataataaaaaatacgtact

SEQ ID NO: 238109 - DNA, 127 bp, Homo sapiens
  chr15:75249802-75249929
  hyper
aaggcggtaggctcgctccacccaggccctagagcccacccttagagctgcgcgctttagggtgagccaggcacgatgccttgccaacgtggccgcccccttcctcccaggcggaattcgctcaggc

SEQ ID NO: 238110 - DNA, 911 bp, Homo sapiens
  chr15:75250989-75251900
  hyper
ttgggagcggccctcggtccctgctgttcagaaccgggatttaccctcttaccacttcctgggagtggctgcggcgactggaccttggcaccgcaatgtgtgaatggctgaccccctccccgtctcctggtgggatcaggaaccctcggggtatgctccgaaccgggacttcggtctcggtccagtctccatgggccccacacagcggtgggggctggaggcacagcagccttgggaagaaacaaagactgtccgcagcgcgtagcggggcgtggagaaccgagggctgtgtaaggtcaggccctgagaaaaagcccccgaaaggctggaagttacgttggaacgggctggttgtggaaggagcgagctctccgtccccgggagtatgcaagtttgggctgcacgatcacttggaagggattgggcggagttctgtcatttggagaaagggtcctgggagcttcaggtttgtgtagggcgaggacggggcggttctgcgtccggccaggttggccctcgaggacccagccgtccccaacctcctaaactgctgtcggatgtagaagactcgcattcactgctctccacagtcggtgaagggagaacgccgaaaagggccgcattccctcctgccggtcccctccccttcccgcgctccctctgcagcacttaaaatgtaaatgtacatcgtgattagccgcggggtcgctaattacagctgaagccattcattacactgtcagcgcgcgtcgcagcccgccggctgtgcgctccctcctagccgtgaaggggtgtagggggtgggggcgggagatgcggggagtgagggaggaaggatggggtgctgtgaattagggtaatgtggcaggcctggaggaagctggagtgggagagagcgggcagcgagcggg

SEQ ID NO: 238111 - DNA, 158 bp, Homo sapiens
  chr15:75316097-75316255
  hyper
gaagctctgtttgcgactgtgcgtgggtaggcggccgtccatctgtgcgacctcactttcccggctgtacgggtggggccgcctggagcaggagggacccccgagccctgagtggagggtttgcatctgtacccgtccagcccgactttgtgctgctc

SEQ ID NO: 238112 - DNA, 477 bp, Homo sapiens
  chr15:75470762-75471239
  hyper
tggctcggccactgcgccaggtcttggaacatctaaggcagaaacaggaccaacacccgcaagcctccaacagcccctggggctccgtccagccgttggggtggaggggttggggggaggtgcaggggcgggcactgtggggggtggggcggggccggtggccgcgactccaccccgcgcccctagtcgagtaaacaagccacgggcggcgcctgggggccgctcctgcaagccggggcgctgggttacatcacggttccctggagactcccgccccagcggccgggtccctgaggcccgcgcccgcccgccgcctgtgtccgagaagcagagagctggcaagggcccgccagggcgggaaggctcccacgttttctccggaggcccctgggactttgttgcaattgggttcagcccgggcatgggctgaacgtggacgcgcgggaaccgcgcctcggtttccccatctgtgaaacc

SEQ ID NO: 238113 - DNA, 91 bp, Homo sapiens; identical to SEQ ID NO: 203980
  chr15:75495098-75495189
  hyper

SEQ ID NO: 238114 - DNA, 373 bp, Homo sapiens
  chr15:75639263-75639636
  hyper
tgccagcactaacccgcagctatactccagccacacaggacttctttgagttctttcagtgaccaatctctttctcgcctcagggcctttgtactggcggttccttccgccggacacgtcgggtttcctcgtttttgcggactggcgctttctgatttcagagactctccgcaacagaaccatctcaagtgggtctacctcctcgcctttttttgttgttgttgttgcttggctgcgcttctgacagggcaggccgtgatgatgtttgtttatgagttaggtctgactgttcgttggtgcttaagatccccaccgggtccctagggcctgtgcgtaccgcgcacctgtgcacgtcctgcgcgcagctgcaggc

SEQ ID NO: 238115 - DNA, 61 bp, Homo sapiens
  chr15:75640810-75640871
  hyper
cctcagatggggggtcaggaagtctccctcaagtgtctgggacagagggacagcaggggcc

SEQ ID NO: 238116 - DNA, 210 bp, Homo sapiens
  chr15:75661045-75661255
  hyper
caccggcggctctcggaagcccagctgctgtctgaactttgagccgagttggaagctagaaactgtttttgaggctctcctatgttgtccgaaatagtgggccgcagggaaaatctcaaaataaaatgggaaatttgacgattagaactctcgaaagtctcaagacagagacttaggccattcggcaagacaggcgggagcctcagctgc

SEQ ID NO: 238117 - DNA, 202 bp, Homo sapiens
  chr15:75744075-75744277
  hyper
gaagactcagcttcgttccaatacaggacgcaatacccgcccgtcaaagactcagccaaccaccgaggcctgtcttatgattttcccgccccttccccctcgactggtaggggagggggagccgctctccttctccacgcccctattggcggggagcttccctaactcaaccccgcctattggagacggactgctgaagccc

SEQ ID NO: 238118 - DNA, 108 bp, Homo sapiens
  chr15:75748049-75748157
  hyper
cagaccgagcggccggcggactagccccccaaacgcctgagattggggggaccaaattaaaagcagctgtttaacataccttccgagccaggcgaggagtcctgaatg

SEQ ID NO: 238119 - DNA, 182 bp, Homo sapiens
  chr15:75932855-75933037
  hyper
tcagagtctcccccgcaagagctgaagaggccatttctggggaagaggggtgactgcggcttgttgattgggtttactgtgctaacttgcactgggctcctgccatgccttgggggagcttgccggagccggctctcctggggctgacctggtagtccccgccgcccgccagcgtcaggtcc

SEQ ID NO: 238120 - DNA, 459 bp, Homo sapiens
  chr15:75939285-75939744
  hyper
ccacttgcctcttctcgaagattctctacctgaccacttctctccttgctgccgctggctagcacagaacatccagtccccgctgctgtactaagcaacacggaaccgggtggcacctagacttgttccctgtcgctgcagatgtagagtagtgtctttccctccttccaagctagtcgcccagggcagggtcgccctgtctggctagggtgctgcacccgcagctctcggtatcttaggtcagacgcctggaacgcgcaggccgtttctgttcctccggaaaacaatctctgagctgcgccacgacccgtccctgcggagcaggagtggggaatgggaaggtgggaaggcgagtccgcgactctgctccccaaccccagctggcgcggcggctttccacgcacccccctccccccaccccgatctcccgatcctggctctggcgcggtgctccttgca

SEQ ID NO: 238121 - DNA, 58 bp, Homo sapiens
  chr15:76136832-76136890
  hyper
ttgagtgtgtattcgtgtggcccctcccttgtgtgtaagcctcgaaaatggataggtg

SEQ ID NO: 238122 - DNA, 525 bp, Homo sapiens
  chr15:76351370-76351895
  hyper
ctgcctccaaggggcgcaatgttactttttatgcatcaagcacggataacacatacagcacataagcaggtcgacagtgtatctgcggtactgggatttcacggggaaaggagatggggacgtgtaaaaagcctttttaagagtcagataacgaaaaacggaaaaagaggagaaacacggtcctacaagggtcctgagctgaggccatcaaatgaatgtactgacaggtatttttctcccaggcagccaactgagagtcaaggcactctgaccgtgctatgactccggccacacagaaagaggtgttttcccctcggtggcctccaagcgcagcgggcactgcgtgccatccgctccctcaccgggcgccccgcgcggatgaaacggagcaactgggaaagagctctggaaactgcaaagcgctgcgccaaagcgacgggaggttcccattctcagctgtacgaaatcccgcgggggtcctccgcttccccgagcgacgccctcggcctccgcacttgttgcttc

SEQ ID NO: 238123 - DNA, 159 bp, Homo sapiens
  chr15:76352475-76352634
  hyper
gctgggatcttgccgctgaccttcatccccctggccgggggagccaggcgagggtgcgtggggcagcccagggcttcagctccagcctggagacctgcttcttgtcacatgcttcttatttatttttgcaaactgccctggttcgggtccagctgcaga

SEQ ID NO: 238124 - DNA, 43 bp, Homo sapiens
  chr15:76627465-76627508
  hyper
aaaaaaaaaaaaaaaaaagccggaccggtgagaagactagacc

SEQ ID NO: 238125 - DNA, 549 bp, Homo sapiens
  chr15:76627538-76628087
  hyper
ggacgctactggacgaggcttaaagcgctcgccccagcgcggggccggtgaggaacgttcaccgtggaccatggtcgaataatgttagcgtgcactcggggcctcgccctagccttctgcaaagcctcggcctgcgccctcggctgcatccgtttcgacgccaaccaacctcatgctcttagtagaacggcagtagcgaccgcgccctcaggcccacaagcccgaaggtctgggcagggtctggaatggcggtggagacactttatccgcaggcgtttcacctcgcgccccacccaggcgcacaccaagttcttggtactccttttaatgggaaaacaagaacagacaccatggttggataaatgttatttataattcatgggccggtctttgaaccctttcaaacaaaacccacagcgatttctttgaaagaatgcctggactgtgctcagagctctcagattttctcaggaccaacgagccgccgcctcgcagataccactgtaaattacccagcgccttacgttcgtttctgattatttgcattgc

SEQ ID NO: 238126 - DNA, 900 bp, Homo sapiens
  chr15:76628327-76629227
  hyper
gaggggcagcagcagcggcagcagcagcaaggatggagtcaggacccgtcccagtcccgggtgagcgcttttggatctgggttctggctcaacccacgtaatgccccaatctaaagttttctacgtgtgtgtggataggaaagtctaaatagagtttatcagaacccaggtggtcattctctacactctctctagcttggacccgaagaacaaaggcacatgagaggagaaaggtgaccagctggacgatgacggtcacgtccaaacggatcccccttgtcctcggctctctcgtcctgagagtgggtttaatttttttttttttaatttatataagaagggagctcttaaaggagagccatctccaccctcaggtatccatcacccagctccagcgcgcctgggaaaaccgccccgaaagtccaagaggaagctcagagttgtaacggccgcggagccagctcggcggtgacgcaaggtccagtccagattgccaggcccggggcatgagagaggatccttgtaggtttcggaggtgggggggctgcactccattgttcactccgggccaatcagggttggcccacttcctcccagccaatctcccttcacccccagcctccaacccaacccaccccgcccatcagcccctggatccccatcacctcccccgcatccccggcagttctggggaagcttcgtgacgccacaggtcccgcccccagctccggcccggggctagtgcgtgttgacgtcatgctgcgtgcgggccggtgcggaatcgctccttcaactccgcggggcagtaggagttagttagcaaagagccgaggccgggcgcgcgaccctcgtccttctgcccctggccgcacactttgcgcacatctctttttctgcatg

SEQ ID NO: 238127 - DNA, 1423 bp, Homo sapiens
  chr15:76629495-76630918
  hyper
ggctaggatgacttcgggctgcgaaatctgcttctgttttgcgcaaaggcaattaggtttgatttagggatgtgggtttttttttttttggttgttgtttgtttgcctttcggtttttcaaagctaggaagctttctttcgcttgctctgggatatttaaactaagaaatgtctgagaggatgagcggggactgccgaaagacgatgtgtctgtgttgggataggaggcagccgctgtgagtgggagtgtgtgagcggaaatgccaggacagcaccgttaggtgttgatatccaggcgtccgcagtgcctgtgtatttactctcttcttagtttcgtgtttgcgtttagtttcaagacacgtcgacaaaacgactgtcattaatgaatgtaataacgaaatatttggggtgggggacagaagaaaccttcagcaatccacaagatactggtttttcgtttccaatgccctggacctttagagagctcatcatctttccttatggtcgcaagtcttgaaagaaagagcaagagagcgagcgggttgggttggggctggagtagccgaggccggcctgggtccgggcagtcaggcctgacgcggccccgcgcccttccccggcagagaagcccgggacggccatgtgcgtgggctgcgggagtcagatccacgaccagtttatcctgcgggtgtcgcccgacctcgagtggcacgcggcctgcctcaagtgtgccgagtgcagccagtacctggacgagacgtgcacgtgcttcgtgagagacgggaagacctactgcaagcgggactatgtcaggtgaggccggcgggaacgcgggctgggccaccgcgcgcaggggccggggccgggactggggatggcggcctgcccgcgcgccccggccctgcccagggagaaggccatccgcatcccgcacgggtgccgcagcgctcccccgggcccgggaatgcccgcaggcgggtcaccgcagtctcctggtggccacaaagtgtcctgggcgcgcgccggagccgtagcagccagggagatgagggcggccgcaggcccagcgctgacaccgccgcaccttgggcccgcaggctgttcggcatcaagtgcgccaagtgccaggtgggcttcagcagcagcgacctggtgatgagggcgcgggacagcgtgtaccacatcgagtgcttccgctgctccgtgtgcagccgccagctgctgcctggggacgagttctcgctgcgggagcacgagctgctctgccgcgccgaccacggcctcctgctcgagcgcgccgcggccggcagcccgcgcagccccggcccgcttcccggcgcccgcggcctgcatctgcccggtaagcgcgccggggcctgtgccggggtgagcggggtgtatgtgcgtgcgtgtgtgtaggggt

SEQ ID NO: 238128 - DNA, 2039 bp, Homo sapiens
  chr15:76632174-76634213
  hyper
cctgggcagcgcctcgccctgggtccacgtcggtccctttccctctccagagtcctgggcaagcctctttcctcttcctctgaaactccgacttcttccggagggcttcgctcgttccgagggtcctgcgactggaggaggcacatccctgagcagccactccctccccgcagcggcctgtcgccgagctcccgcgccctgcttgagctcgggagagatcgctgcggggcagtccggcccgggagcgagagaaagaacgaaaatgcacagctctctccgagtaaggcgaacagatggagaggaagacgaacaattaaacgaaacaaacagaataaaacagaaacgaaatcgggccccggggggctgggccacccggaggttgggctcggggcgggtgggtggcggcccctcgctaacctctggcctcaccctgtcctggcagacgctgggtcgggccggcagcccgcgttgcgcccgcacgtgcacaagcagacggagaagacgacccgcgtgcggactgtgctgaacgagaagcagctgcacactctgcggacctgctacgccgccaacccgcggcccgacgctctcatgaaggagcagctggtggagatgaccggcctgagcccgcgggtcatccgcgtctggttccagaacaagcgctgcaaggacaagaagaaatccattctcatgaagcagctgcagcagcagcagcacagcgacaagacggtgagcagccgctgggccggaggctcgagtcgggtgggggctgcgcttccgccgcggtatctgcgtgcccttttctgggcgagccctgggagatccagggagaactgggcgctccagatggtgtatgtctgtaccttcacagcaaggcttcccttggatttgaggcttcctattttgtctgggatcggggtttctccttgtcccagtggcagccccgcgttgcgggttccgggcgctgcgcggagcccaaggctgcatggcagtgtgcagcgcccgccagtcgggctggtgggttgtgcactccgtcggcagctgcagaaaggtgggagtgcaggtcttgcctttcctcaccgggcggttggcttccagcaccgaggctgacctatcgtggcaagtttgcggcccccgcagatccccagtggagaaagagggctcttccgatgcgatcgagtgtgcgcctccccgcaaagcaatgcagaccctaaatcactcaaggcctggagctccagtctcaaaggtggcagaaaaggccagacctaactcgagcacctactgccttctgcttgccccgcagagccttcagggactgactgggacgcccctggtggcgggcagtcccatccgccatgagaacgccgtgcagggcagcgcagtggaggtgcagacgtaccagccgccgtggaaggcgctcagcgagtttgccctccagagcgacctggaccaacccgccttccaacagctggtgaggccctgccctacccgccccgacctcgggactctgcgggttggggatttagccacttagcctggcagagaggggagggggtggccttgggctgaggggctgggtacagccctaggcggtgggggagggggaacagtggcgggctctgaaacctcacctcggcccattacgcgccctaaaccaggtctccctggattaaagtgctcacaagagaggtcgcaggattaaccaacccgctcccccgccctaatccccccctcgtgcgcctggggacctggcctccttctccgcagggcttgctctcagctggcggccggtccccaagggacactttccgactcggagcacgcggccctggagcaccagctcgcgtgcctcttcacctgcctcttcccggtgtttccgccgccccaggtctccttctccgagtccggctccctaggcaactcctccggcagcgacgtgacctccctgtcctcgcagctcccggacacccccaacagtatggtgccgagtcccgtggagacgtgagggggacccctccctgccagcccgcggacctcgcatg

SEQ ID NO: 238129 - DNA, 1213 bp, Homo sapiens
  chr15:76634517-76635730
  hyper
cccacgcggacccccgccctgccccagctcagcgctccctggcggcttcgcccgggctcctagcggggaaaaggaaggggataactcagaggaacagacactcaaactcccaaagcgcatgattgctgggaaacagtagaaaccagacttgccttgaaagtgtttaagttattcgacggaggacagagtatgtgagcctttgccgaacaaacaaacgtaagttattgttatttattgtgagaacagccagttcatagtgggacttgtattttgatcttaataaaaaataataacccggggcgacgccactcctctgtgctgttggcgcggcgggagggccggcggaggccagttcaggggtcaggctggcgtcggctgccggggctccgcgtgctgcgggcggggcgggcccggtggggattgggcgcggccgagggggtggggctgggcgcatgcgcgctgagggccctcccagaagcaggagcgccccattggcgacccctgggcacctggcggcccaggcccgcgggcaggaggcgggacccgtttgggcgggaaacctgcggcacttgtggcggttgagcggcggactccggcctagggttatgcgggcgagggcgcgccccgctcccggaaccagccttggcctggcgcctgccgagccccgagccccactctcgctcggcgccgcgggccctcccggcgcttccttccccagcggtccgcggccctgggtgaggctcgaagccccgcgcgctgcccctggccctgcagcacagcagtgaggccaaccccggccagagcgggcggccgtgacgggccgtgccccgcgctgtccccggagtggatgcgcgacgtgatcaatccgcggcatttattaattccacagtctagacagaggcgggggccgggcggcggctgcttatctgcgtttggcatcacctgcaagcgatacaccgaggggccgcaacgagcccccgctaggagcgcggctgccgggaaaataagtccacccagaaccagtctggcgtgtccttggtttattttctttccagaccgaagtggagggggtcgggggtggcccgggtgggagggagctgggaatggcccctggatatgccgtgcccaggtcacttggtgtgacatttcaaacccctgcgacttgttttcttgaaaactggctttagtgatcgcaggaaataaccgagagata

SEQ ID NO: 238130 - DNA, 997 bp, Homo sapiens
  chr15:76638236-76639233
  hyper
gagctcaggaaggccggttccccgttgggaaagagcgtgtttaagttaaggcgtggtttgagagtagctaaccagagatcaggtcagctgttagggcgtgggggagggagggggcagggagcagggacgaggaagtggaagaataggggattgtgaggagtgatttctttccagattatcgagactcaagactttccagaacgtggcaaagagccctggaagaaatgtcccaggaacgccgcggtcaggaccgaggctccccggggccaggttcagggttcgaggtcccagcctcgcaactgctggcgtctggagggcgggagagtggccgggcccgaagctgcggctccgacgtacagttgcgagtctggggcggtgggccccgcagagctccgggggaagggagccgccgccgctgcggggaattggcttgggcaacgccgctgagtgttcaaacgtcgctgctcccgggccttgggcagcctctcctacctgacccaaattctgggctgcaaagcccgggcgaagttgtcgctttcactccgaatacgcccagtcgcaccgtcaacttcataggctgggcccggcagaggcctttcgcctccgcccagcggtctccgctgcggcccctcagcctctggagagccggggggcggccctcgccccggcagaaagcaacctgtggcggcactgcgtccccgcgagctacaaccagacgcggccgcgctcacctgggcgttgcgctcccccgagccccggagagtttagaagccgtaaaagcccggggagctggagcttaaatcgcccggaccgggccggggcgcccgaaagcagtgaactcgagacccccaggaaccgcgtgcgccgggaggcaccgggacgctcccgggcccgagccgcgcaggctcccggctgggtggggcctgggtttgcttcttacgcctcctcctctccgggacgagggggcaatgagaccgttcaattaaatgtttaattg

SEQ ID NO: 238131 - DNA, 300 bp, Homo sapiens
  chr15:76639454-76639754
  hyper
ccgacacttgcctccgtaccccggggccgctcgctgggcccgcggcagcccccgcctgggaggagcattgggggcgccaggggctacccctcggtctcgcaggcgcggaactcagcccggccctgcggctccgggagttgctgagcactcgcggccagcggctggagtcctgggtcccgctctctggtgcccggcggcggagtcgccacgcgaggctggaggggtggccctaaagcccgtccctctggcttggagctgcgggtccccgccctcgagccggagcgccgcgctggacacccg

SEQ ID NO: 238132 - DNA, 209 bp, Homo sapiens
  chr15:77711492-77711701
  hyper
ctttaaaaaacaacgaatcgcaaaaagtaacatttaacaggccagaggcaggcgggggaggagggtctctcccggtgctctcagcaatctttaacgtagccaaaggaggaaaaaacgaaatcaagctcccagacggatggtgcatgcgacgagaggggagggggcagacgcggttcagacggcaagtccccatcgaaggaggaaagaaa

SEQ ID NO: 238133 - DNA, 115 bp, Homo sapiens
  chr15:77924998-77925113
  hyper
gctggggccggggtcgaggccgggcgcgctccgccgcggggccggggccggcgggcagcggccgcgcatgctgctcggcgccccgcgtcgggagaggggccggagcggcgcgggt

SEQ ID NO: 238134 - DNA, 380 bp, Homo sapiens
  chr15:77925412-77925792
  hyper
aggggcgccccagccgctgccctgcacgcttagggcagcgaaacaggcaggggtgcgcaggcgaggggcgcaccagccaggcgctccagctctgcacacggccgcgcccctccgggtccggggctctgggcgagtcccgggccagccgggtgtcggggagtccggcgtgcggtcctccctgggtgtatgcgcgcacaccgttgtgtgtgatttttgtgttgccacatgcgtgtgcatgtgagcgcgcgagtgtgtttacacgtgttaactgggctgtggacgaacacacgcacgaggacggacagggctccctacacgaacagggttgtttggagggcggcatggggaggccgaccgggagcccccgtcctggccctgtc

SEQ ID NO: 238135 - DNA, 301 bp, Homo sapiens
  chr15:77927041-77927342
  hyper
cgcaggcgactccccggtccctcaactccgcgctgcctggacccctccccagactccccagcccccccaccccggctgtttgtgagctacccgtgcgctcccgccctcccgcgccgcctcctcccaccagcccgacaggaatagacgctcgctggctcctgcgtaaaggctccgccaggcacccggcgggcgcgcagacccgctggggggcgggggcgggggcgagggctattcctggtgcggtgactgacgcaggcaaggcgcggccaccacatctctccgcccccgactcacctgctcc

SEQ ID NO: 238136 - DNA, 384 bp, Homo sapiens
  chr15:78112179-78112563
  hyper
cactcccgcgggaagcgccggccccctccgcggcgccgccgcccttctcccccccttccagtccggcctctccggcgcctccctgccttgtcccacctgcccagcccggtcctcgttctccccgctgctctccgtctgtctcgccgccgccctctcccgcgccccttcctccccaccgccctgcgctgcctctcacattctccgcattacagcgggtgccgcccgccgctcgcggggcccagggttcgagcgcgcagtgggcggcgaggggacccgccacgcccggccccgccgccccctccgctctccgcggctccgcggctgctagctccggcctggcgctagggtggcgacgtcccgcgctagcctcggctgccgctgaca

SEQ ID NO: 238137 - DNA, 464 bp, Homo sapiens
  chr15:78236699-78237163
  hyper
agccggccggcctgcgctgtcttacccgccccgtacccccgcccctgtctcgggagcggagtagcggtggacttttctcacgcccgcacacactgtttgcggagaggccagggcagacaacctccacccgtttccggagccactggcgccccctcattcccgctccagcagcccatgcctcgcttcacccctggtgcctcatcatcgcaccaggaagccagggcccgggaatttctttttccggtccgacagggtcaactgagtcgacgatcacttgacttggactaacggcctctgggagggcggggcctgctcgagtgaggccgggagcggaccgcagcccgctggaggtgccgggggcgaaatgctggcgtctcctcctccgtctcccagaatccttccctggaaaaaaacagcatccaccgtcagtttaactgaggaccgaattaaggcattaggaaaga

SEQ ID NO: 238138 - DNA, 188 bp, Homo sapiens
  chr15:78556921-78557109
  hyper
gtggaagtcggtccggcgcggggcggggggcgggcgggagctacaagcggcggcggcggcggcgaccgtgaccgtgacgcgcgagcgggcggcgggggcgcgggccaggggcgcgggccagggtgccggcaggggcgtccggggcgctctgaccggcctcgcccgccccccccgcagacacaagatgg

SEQ ID NO: 238139 - DNA, 549 bp, Homo sapiens
  chr15:78632558-78633107
  hyper
gctgggagttgagcgcataccgagtaggggctgcgggggagcgggggcagggccggcggggcggggccagaagcccggcggggttgggggcgctctcctagtgactcaaggcgcgcagcgctgggcgcaaagcgccagtctccgccttgcgagctcagagtgtgcccgctgcgccgccgctgtccgtacctgccgccgccgccaccgccaccatgcccaacttcgccggcacctggaagatgcgcagcagcgagaatttcgacgagctgctcaaggcactgggtaagctggtgcagagggcgcgccccgacggggagatgcggcccggaggtgccctggtcccggaagtgccccggtcctggagggggtggaagttggggagcccaggcaggagggagtccccggggcaatagatcgccttgtctcccaggcgcaccgggtctcggagaagctggtagagatcccggaacccacgcgttcagcgaacgtttgctgaatgtttggcgccctcctcgatggtgcggactttatctcgtgctagatcatagc

SEQ ID NO: 238140 - DNA, 174 bp, Homo sapiens
  chr15:78633327-78633501
  hyper
ggtcccgagactggcggcgaggccccgtgacccaagcctgtggtgcaccctgcgcaggtgtgaacgccatgctgaggaaagtggccgtagcggctgcgtccaagccgcacgtggagatccgccaggacggggatcagttctacatcaagacatccaccacggtgcgcaccactg

SEQ ID NO: 238141 - DNA, 347 bp, Homo sapiens
  chr15:78912226-78912573
  hyper
aagggtcccaggcaggaggtcggttgagagcgtatggcgttctgagtagtgcaggcctcggcaccgagggcggaaagcgctctgagctcacagccgcacgacagaccgccggcctgggccctccaggaattccctgcagccttgcccggtccccgactctcgctacccaccagccctcccaggcacccaagagcctcccagcggcgggccagggccggcttcccccagcaggctcctctggagagcgggaggaagacaggaggcgctctcccggtggagggtccctcagcgacgcagccaggagcgctaggaggctacaaccggaggagaggctggcgctccagctc

SEQ ID NO: 238142 - DNA, 185 bp, Homo sapiens
  chr15:79103104-79103289
  hyper
ggtaaaccgcgctccgtccagcccactcggacgagagctctcccgggagccaggcgcgttgctgcacccgaggtggggaaaccggagcccgaagagcggaaggggcttattccaggcgacaggcagtgtcagtaactgaatcaggggccgaggaagtttccccagaagcgcggcttcgctcccgg

SEQ ID NO: 238143 - DNA, 961 bp, Homo sapiens
  chr15:79383248-79384209
  hyper
ctgcaacttggtgcctcctccccctccccagacacacacacacgcacacgcacacgcacacactcaaaccctgccctccctcccctcatctccccttctctccctcggatgttaaaaagcaaatcagatcaattttcgtttaacccaatgaaaccccgaaggctcgccatcccgggagtttgcgtctttgcgccccaccgcggcgcactgtagacctggggttaagtgccagttgtcattttctcctccaaaggctcgccccccccccccactttatttctaatacgaggtggaaggaggaaggtgggtggcgaaatagagctgcaaaagcgtccagtcctagtctttgcatagtcagccgggtcacattgaattccagcatccggctgcactcccggcggcttccccagctacctgaggacagtacagggggtgagatggggtggtggttggtgaacgttggttactttattttatattattttattttgagagttgccataattaccggcgccaccccccgtgcaccctgaggtctggttggcgagccgctgctgggagttttctgcaaataccccccaaagcctgaaggcgggcttcaaacgcaggcgccggggaccatgggagccttcaaatagctgcgctggcgcaatgataccttaatgatagattttccgttcttatttttagctctcattcgcctacacagttacacggcatttatccgagaacgtcacagcgcccgcatgctgcaccgggagggcgcgcgggccgccgggcgagccgggagctggggcggggagcgcgcatcgctgtctgccgcagagggcagcgagctcgccccgacccggagcaagccgcgcctggcccgggcgctttgcagcggggatgggtgcccgcgcagccctgtgaaggaaagacaccatctttccgcacggaaactgcgtatacccctcccccg

SEQ ID NO: 238144 - DNA, 309 bp, Homo sapiens
  chr15:79502051-79502360
  hyper
ggcggggagggctcgccgggaaatcaaacgtccatttacatcttgtcctgcaaagcttcatcaaaacttctttgccggccagtcacgtccccttatcacttttccagcccagctttgtgactgtaagtgttggacggagaactgataagggtaggtgattgacactcacagcctccggaacccccgcgccgcctgcacttgcgtgatggggaaaacctggcgttcccgctctgggtgcccgaggacagcaggggattccaggaggagaccttgggcatagggggcccaggtatgcgccccctgcctgag

SEQ ID NO: 238145 - DNA, 543 bp, Homo sapiens
  chr15:79574865-79575408
  hyper
accccaggagtggccgcgcctgctccgcgctcaccctcggggagtctaggagccccctgctaagttgctgagcgagtcggagccccaagagctagggtcgagggggtggggcagcaggcgcctctgccgaggctgcaggtaggcacttccccacccccgcggccccctccttcctccttcctcgcagctcgcacacccacacaaccctcgcccgtcgcggctggagagctgctctcggcgccagcgggcagcagcgcgtcgtcagccagcacagccggccgaagaccaagccggaggtctggggctgcgcagagacctgcacacccgcagcgcggaaccgggggcgattcctatctttctttcatgcttctttctttttcttaaaaccaaaccaaaccaaaccaaacccaaaactcccctgctcccaccgcaacttggaggagcggtggaccgatttgaaggaactgacgcagaggttttattcacgaaccttgaagaagttctgggcaagtgactcaacaggacccgcggggcccggggtag

SEQ ID NO: 238146 - DNA, 211 bp, Homo sapiens
  chr15:79576066-79576277
  hyper
acactctgccggcgcggccggagccccggagttcagcacctcggacagagcccgagccccgccgcccgaggcgcacagtgagcgtggaacagcccggctccctagcccccggccaacgctgctctcagttcagggcagctacgtaacaccgcccctagctccgcgccagaaagggctctcgaatcgcaaaagcaaacgtgttcgatttctg

SEQ ID NO: 238147 - DNA, 110 bp, Homo sapiens; identical to SEQ ID NO: 203991
  chr15:79603182-79603292
  hyper

SEQ ID NO: 238148 - DNA, 306 bp, Homo sapiens
  chr15:79725318-79725624
  hyper
tggaccgaccggtgcatccaattcttaaattgagatttccagtcacgttgatgtggaatgggatcgttgttcttcccgagggtttgataaggatgctcaacttcacctgtcagaaagcacgggagctgggcctggcccgcggggagcgtaagctcgctcacacgcggtccaactcaggcaaatgcagcatgcccgacctgctctgccgccatccctccgaaagcgataatttccttgggctaccgaatccatcagagtagtcatttgtcccctcgccggcggtgcggggagcgtaacatttgagta

SEQ ID NO: 238149 - DNA, 263 bp, Homo sapiens
  chr15:80215297-80215560
  hyper
tgtacttgcaagcctcgaacccccaactccaactgacctcccctctgccagagcaagaccacgagtacccgccgagagcggacctggctggctacacaaagccaggcgcccgaccagagggatcctccgggacgtcctccgccaccggggcgtccccgcccagccccgcccggcgcccggcgctcaccagctctcctccccctcctcctagcctgacagacgctccaggtcgtctagcaagccgccctcccccgccgccagca

SEQ ID NO: 238150 - DNA, 55 bp, Homo sapiens; identical to SEQ ID NO: 203995
  chr15:80285825-80285880
  hyper

SEQ ID NO: 238151 - DNA, 35 bp, Homo sapiens; identical to SEQ ID NO: 203996
  chr15:80351965-80352000
  hyper

SEQ ID NO: 238152 - DNA, 146 bp, Homo sapiens; identical to SEQ ID NO: 203997
  chr15:80352850-80352996
  hyper

SEQ ID NO: 238153 - DNA, 157 bp, Homo sapiens
  chr15:80445215-80445372
  hyper
ggcggggtgttcacggtgagaccaaaagtcaggtaggagcctccggggtccctgctgtgtcacccggacaggccgtgggggcgggcaggggggcggggccgggcctgaccacagcggccgagttcagtcctgctctccgcacgccaccttaggcccg

SEQ ID NO: 238154 - DNA, 391 bp, Homo sapiens
  chr15:80543969-80544360
  hyper
aggctcagaacagcgagggtgcctgagcacagcaccacactctcccggtttctgagccccgagccccgcagtggaactcgggccgctgcgacgcggctcccgtgcggctcccaccgaggctgctgtcccctgccgcgcgggtccggccctccccgccgaccgaggcgcgccccgggcgcagtgccgccgaggaggggatcggtcccagtgtccacgcgggtctcctcgccgccgcggcagggctcggcccgacttcagcgagcagatcctccgcctgcggccggtgacccgcgcgacgccccggcggcaccgacaatgctgtgctccagccccgcaggcgccgcggcagcgggtcccgggatgctcccgcggtccttacctggcgaggccc

SEQ ID NO: 238155 - DNA, 265 bp, Homo sapiens; identical to SEQ ID NO: 203998
  chr15:80988126-80988391
  hyper

SEQ ID NO: 238156 - DNA, 1846 bp, Homo sapiens
  chr15:81071387-81073233
  hyper
cggggacttgctctccgcggtccgccgcggccgctccaccgagtcctggcctccagcgccctcacctggctgctgcgggcgggactctgcgcacccgggctccgcgggctcaggtctgcgtctcccagagccgccgccagagcccgccccggtccggcccgggcacagggcccccgccccacttgggcaaggcgggggcgcgtggagggaagtttcatcggggggcgagggagggagcttcggtgccgcgcgggcgtcaggggctcctcgggggaggagtcagtaaaagtggctataaaagcggcctctcggctgagggccggggagctagcgctcaagcagagcccagcgcggtgctatcggacagagcctggcgagcgcaagcggcgcggggagccagcggggctgagcgcggccagggtctgaacccagatttcccagactagctaccactccgcttgcccacgccccgggagctcgcggcgcctggcggtcagcgaccagacgtccggggccgctgcgctcctggcccgcgaggcgtgacactgtctcggctacagacccagaggtaagagggcctggctgggggcgtcagggatgagctgacggcccatgccacggaagagaggtaagaagtgggggcccgcgcctccacccggcacagggtaaacgttacccgcctcagtttctgtttgtctgtccaccctgtgctgtgcagtctacctctatctgtctgtttgtccatgcgtctgttgatgggcacacgctcttggcactgtcctctgtgggatttctctgagatcttgtgatgctttacaagctgcaggtgccggggggcgctggagtccccagagggcatccagagggggcagactcctgctttccgtagattttcccccttctgaatggcaccgggggcttgcgcccgggagagtgtctcgccgaggagggagtaccacaagggtcaggtctcggtgtcctgccgactgggagccagctcacgccgagctctagcgggcgtgcgcctagcaacaggtctgcgccctgctgctcctgcctcagcacgctcttcctcccagtttccctcgcctcccagtgcctccgggacagcgctaggcacccagcgacgcgctggcgcggggccgagctgaggcaattgcaatgttagatgaacccggggggctctgctgatgtttagactgagactccaaacgtggcatcgctggaagaaggtctggtggtccctggcaaaggacgtcggctccaagaaaggtcgcgttaggttgtgaggaaaggcagagagtcctggcagaacgctggccaggtctccagctcgccgctctgggaacgaaggccagtgacattctggaatggaccccaagggatgcgtgtgctcatgagagaggagcgctgtgcgccctgggtcctcagccgcagacactctctgcgacagccgctgttccccaagggtcggacgctacggcagtcccaggagttccgccagctgccgggtttgaggtcctgagtccttctccaagcagccaacgctacccacaggtgagagctccctttaaaaactaatcttctgatgtgtgagccagtgcctggctgcagccccataccagggacggtgagccggggagcgcgtctctccatccctgcggtctggaaagtgatccagggcgcgcccgagggcggggagccggcggctctgcgtgcccaggcgcgacgccaccatggacagctcccagccacttcctccactcggggtctgtggccctgggtctccggggaagtcgtgcgctttcttcccagacccaaggcgttggggcgctgggaaagagga

SEQ ID NO: 238157 - DNA, 105 bp, Homo sapiens
  chr15:81282496-81282601
  hyper
gacctcagtttctcgcctgtgaaataaattggaactggaagttctggaggctgcctcggctctaaaaaagcccatttctggatgtcggacgtttatcctcagtct

SEQ ID NO: 238158 - DNA, 370 bp, Homo sapiens
  chr15:81292679-81293049
  hyper
ctagcaccactcttcggactccccatccagtgctcttttcctcttttcgttacactgcactgctggtcggaaacccatcgtggaagtggatcaaacacaacaaagggcagggggcgttggaaaaccgggcgaagtcgcgcagaccgagacgacccaccggccccagcaaatcaccaggggccgaaatccagtgtcctcctcccttcagcccagaagccaggtcaccttttagacttgctctcttggcggggaggaagcgtggagccccctggtccggctaagagcttacgtaaggcccgcgggcggctgcgccccggtctcccatgggtgtgcgcagagcccccgggccggagcaggccttcccctgtcc

SEQ ID NO: 238159 - DNA, 102 bp, Homo sapiens
  chr15:81294212-81294314
  hyper
gagggccgcgccaggccatgcccaagaaggcggcggcggcggcgaaccagcagaagggactttcctggcagcccggcgacgaggagcgcggacagtgagttt

SEQ ID NO: 238160 - DNA, 162 bp, Homo sapiens
  chr15:81616530-81616692
  hyper
gagctcgtagccccgcctctttccgcgcccccgctcccgaattggtccaggccctcagacggatcccgcctcccggagattggcaggacaaggagaccgcggggccaggctctccagttagcgtcagcgcctgggcgggtcccggacgccttgggcgggccg

SEQ ID NO: 238161 - DNA, 1201 bp, Homo sapiens
  chr15:82336626-82337827
  hyper
acgatgtacgtgtgcgtctgctgctggatgcgcttgattgtggcgcctttgggccccaccacgagccccaccacgcggtagggtacccgcacttggatggtggtctgcccgggcaggttgggcggcccaggcaccgcgccgttgagtgccgtgttcttattccgggaggcgcggatcatggagaagtgctcggcagcagagatgatctccctccgagccatggccacatcctccttcctgcccgtcacaacaaagacaggctcctccccgcgaactggggtcttgatgtaagtattggtcttcgcccgcagcgctttgattttacaacctacgaaccagggtgcggaggagggagtgggagagagagacagacacgcccattatcctggggtaaccgcggggaccggggacagcccgcgtccaggacagcgagacggcaggacaagagatgggcggaaagggggcgtctccctcactgacctcgggccgcgccacgggctgggcagcggatcccacccgcgaggcgctcgaggaacagcccattggctgcctggccctcccccagtgactgcagtcgtcccgaaccaaacccgagaatcccagaaaagtcatctggggagatgccgctgggatccagctgggcgcgccgtcagctctgaagacacggggaaggggctcggggaaggcagctgaagtcgcgatgcctcagcgctggtcgactgggggtagggggtggggtgtgagtcccgggacccattgttcctcctctgggctccattccgctttgcagaaatccagaatcctcctcccatcctatgctcactcctcctccttcctcctcccaaaggactgatcaaaggccccctcccccaagcatcttacatttaaattgtctttctggaggtgggctggttggggggcgttaggggagaaggcagtgattttagcagaagaaagtgcatcccgccagggcagcggcgcggctccgggagacagcctgcctgcactttctttgtctggggcgccggcccatcgcgcggctcttcctctctccccaaggcaccccacgccgcggatcccgatactgaacacgccttcccctcgaggcagtggcctgagaccctacaccacccccacccacctccccatccctcctcgacctaccttgccgccccacgatctcggcgacatgctcagaact

SEQ ID NO: 238162 - DNA, 51 bp, Homo sapiens; identical to SEQ ID NO: 204004
  chr15:82338056-82338107
  hyper

SEQ ID NO: 238163 - DNA, 104 bp, Homo sapiens
  chr15:82338504-82338608
  hyper
ctccggagggggacgagggaggcgcaacgtcacaggcgggagctgacaccacaatgctactgacactatcgctgggggaggcgattggcgcgcgccaggccggg

SEQ ID NO: 238164 - DNA, 38 bp, Homo sapiens
  chr15:82340197-82340235
  hyper
gtgcagctcccttcaccgcttgcttacctggagctgtc

SEQ ID NO: 238165 - DNA, 385 bp, Homo sapiens
  chr15:83315057-83315442
  hyper
ttgcccctcttccccaccaacgacacagcccagtagttgactcaggtgccaggagagagcgcggggaggctgggcggtagccagggagaccaagggaagcggttgccagagaaatgcggcgtcagtcagggccggggctgcaggcgcggggcgggggaggagagacgcggcctcctcccaggcgggcctggcgggaggcaccccggcttctaagagcgaattcggctcccgactctcttcccccagctgagagcacggtgcaaggggccagggctgcagggagcaaagtgcccccgaaaaataagcgcgcgcccacgaaagcgcccaagagcccaggcgtctgcctggcttttctcggtcacggggtcaacgcggggccgctcac

SEQ ID NO: 238166 - DNA, 877 bp, Homo sapiens
  chr15:83348864-83349741
  hyper
gcctccagtgcccgcagaagcggccctcggacagcgaggacagcccgccgtcgcaggctcacccggcgcttgatggacatggtggccacgttctggagcacaacgtactgcacctcactgcggagaggacgggtcagagcaccccgggcccctcggttggggcaagggtcagcggatgaggggaaaaggtggggcaagtcgttgcggggagaggaccagtgcggagggcaggactacggtcagtgtggagcgggtgggcagaggtggaagcggctggtgggcgtgagggggcggagccgggcagcccgtggggcggggcaggaggcgagggagggggcggggctgggggcggagcgcacctgtggctgcgcagcaggcgcaccagcgccttggcgatgacgcccacttccgccttgggcgccaggtggaagtagagctgcgccaccgccatcaccaccgcggcgctgcggctctgcagcaggggtttggtgttgcgcagcagcagccggtggtcggggtccatgacatagggctttcgggagggggcggccgcggcggccgtctcctcagaccccgcgcccttggcctcgtcctcctctgagccgtagaaggctttttccgcgttctcctctagtagggattcctggacggggagaccgacgggtctgtgggcgcctccccgggacacacttcggcccgctctgcctgggctgggcccacttacgttctgggtggggctcaggaactgcgtgcgggcgtagcgggtgagcatgctgatgatgaccacctggccccactcctccacgtcgatcagcaggttacagagtttccggtagtttttgtgaatcaggtcgatgcgctccgggcagacctcctc

SEQ ID NO: 238167 - DNA, 40 bp, Homo sapiens
  chr15:83377915-83377955
  hyper
tacatccagggcccgccttcctgaagaggccccaggctca

SEQ ID NO: 238168 - DNA, 46 bp, Homo sapiens
  chr15:83378135-83378181
  hyper
ccgcgtcctaggccggcccctggagccggggtgccagcgctgcccg

SEQ ID NO: 238169 - DNA, 367 bp, Homo sapiens
  chr15:83378721-83379088
  hyper
tggccccgcccatccctaggaaatgccctcttcagggcgtcttctgccctttaaagcgacttggctcgtctccagatctaaaggtgggcgagtctgctggacggacgctgggaccgtcttgcaggggatgtggaatagctgcccccacccccgaccacctggcctcggcgggacgggcctctggggctccgctctccccagacgcacgcgcggatgctcacccacgccgtggagggaaagcgggaactggaaagaaggctgtgcccgcaggctgggggttctagagcgggaaggggtcaccgcacccgaggaccggcctcagatacctaaggacgctccctttcccgccccacctttcctacaaaat

SEQ ID NO: 238170 - DNA, 844 bp, Homo sapiens
  chr15:83620896-83621740
  hyper
caaacgtggagaacgacaaactgcttagactcacacaggccctggagttgactgcgcccaggggcgaagagaccgcggaatggccgaggcaggaggccggccagggcaccggtccccgtcaggtgcccccgtgcccgggctgtatgggaggggaagggccacgggctccgcgcccaggccagggtgcccctgctgggtgtccgcgtgccccggcggagggcgcgggtcaggtggccccagactcccgggcgcagagtgtgcgctcgctccggcttggggaggcgggggccggcccgccgggaggctccgagcccggttacgccagccgcggccccgcagtccctccggaggggcgcgcggagagcgcgcggcgcgggctcactcaccccatctccggcgctgctccggcggccgctccgacggggcctctcgcgctcgctctccgcccgctcggcagccgctccccgcgcggcacatgcggcggcccgtgcgcgcccggctcagccccggcgccgctccattccgcggggctgcgcggctgccactgctgccactgccgccaccgccgccaggcgcgggcgggcgggggctgggcggccgcgctggggcggtgcccgccccgccctccccagccgctacccccgcccggctccttacgtaacctcgtggcccccgggccgcggcagcgagccaagaggcggggggcgcagcactgtgtgcaccgtcccccgcgcagccgcgcagtcgccgcttttctcccgggccacccagtcctcggtgccggccccgcgttggcgcgcccccgccccacgccgacccggggccctggcgcagtgccatcaac

SEQ ID NO: 238171 - DNA, 56 bp, Homo sapiens
  chr15:83654593-83654649
  hyper
gtctactcttcaccgcctgctctcacctcacgttccccacgaagactccgggagca

SEQ ID NO: 238172 - DNA, 1634 bp, Homo sapiens
  chr15:83875522-83877156
  hyper
ggggcaccgggaatcgcgctcagggaaaactcaacaagtctagaaggcaaagagatggatgaatgactgccaagaggctcccgctggcctctggatgaccactaccactttccaggatttactgcccgccggcactcgccggctcgcggacagccgctcaccccgctgccgtacctgccccgacgttcgcccgggacccagggtatccaccaatgaccctgcccggagccgaagcctccgtcgcaggcccgctgcccggcggcgtggcttcccggtcggcaccggctttccaggaggaaggcagcgtcgggcctgcgggggccggacccgccttcgaaagtgggcggaaggatggccgccctggcggagtgcgggcgaggccgggagcccttgcctcagccccggcccggtcttcttcgtgccgcgccgccctcagccctcaccacagccggccgcgagctgcgggctcggggctgaggcgatggggaaagggggcgggcgcgccatcatgaaggggaaaatggtgggcgggcgggcccgcgcgcggccgcggtactcacccgggccggccagtgcgggtagcccttcatcttggcgaagaccaggtcgcccgctttgtactcgcggggccgcggacgcgccatcccagccgctccccttcctggtagtccttggtcgccgcgaagatgccgggaggccgcccccccgcgggccgacgaattgcgccgcgctccccgcgggcctcaagccgggcggacgagcggccgctccgacgaggggaagcggcgaggcggcggctgaggcaaggggtgggcggggggcgcagcaggcccggcaaatcacggcccggcagcgggggaggggagcccccggccgttcggcgctcgcccgcgtccggccgcgccaaggtccccgccgccgccgccgccgccgccgcgcgcgctgctcaccagcgccgcgtcgcctgcctcatgccgccgctgccggtctccctcccgggctcccgggcgcggcgcgagcgccgggcctcgcgtctgctccgaattccttctcgggcagcgaccgcaaacacgatcttattattgttctcgcgcgcgctcagcatcccccccccgccccgcttcccgcttcccgctcccctccccttccctcccgcgcgggccggttaattcctaggtacacggccggctttcgcggagaaaccgagcgcgccagcccggcttctcggctggcgggcgggcggtgggcgcgtcctcccccagcaccgaagcccgcgccgggcgggcgggagtgcctactccggaggacgcccgccgcctgctctcttttgttcttggcccggagctgcctgccgcagcccagccaatcaccacccggccgcccccttcccctcccgtccgtgccactctgggggttctccccactcgcgccccccgctcccacgcccacctcccgctgactcgaccctctcctggctacccccagccagccacttccgcggctgctctctggtgagtgggggacaaaggcgctccaggcctgggggacggcggcgcgaggggaccctctgctgggcaccaagctgccggaaagagcaccgctccggagtcagcgaccttattggattcttgccc

SEQ ID NO: 238173 - DNA, 1864 bp, Homo sapiens
  chr15:83951702-83953566
  hyper
gaggcctggctgagaccaggcgtctgggccgctttaaatgccctggccttcagaggactgaggcgagcacagccataaaaccaggggacgttaccgaacccccgagcgtctgatgccccccgccccccaaccacacacaacttcactcacacaattaaggctgggagatggcattccacttaactgtcagactcggagcggtggcagccccgcagccacaaagagatgccttaaatgagaagaacatgtttctacaccgcatttgtgaaagtttggctcggagctacgcgctgattaatatcagatctccttcactcgcctcgccacaatcttgtcacatctggctgacaaatcccgaggaactccggcaaagccaggcggcggcggggctccgggtctgggcggcggctccggaggagcagcgggagaccccgcagcggcctcctccttctccgcccgcggcccccagcctcgccgccgccgcccggctcccagcacggaaccgacggggcgctcccgagacgggcgagccacgcgctcgcaggtcccaaggccaggctgggcgggactgttaagggagctcgaagtcgggggccgggggcttcccgtcccggcgcttcccatgcaaacccctgaaggaagcggcaggcgcagccgcgggctccgcagcccaggcccacttcctgtcactccaggaaaacctcggagcggcggacgcggctcggcccggcttccagcccagagcccaagcgccttagccccgtcccagcgctttctgaaagacgggccacctcgcgcggagccgcgacaaggactccagggtccgcagtgaagctggtcaaatctgccccgcacacggtcaacgctcggtctgtgtcccggaagctttcggaccggacctgtctaaatagcgactttcagtcgtgggttttttgttcttgtgggtttgttttgttttttgttgttgttgttgctctacaaaagatttgtcccgcagtggacgggagcctcctcacggccgcccgcccgtctccgcagttctcctcagtgaccggaggctgccgcgcgccccgttctccagagaaacaatccccggagagaaagacggccagtgtgaaatatcagctgtttcacaaattctgaggtaaaagaaaaaaaaaaaaagaaggggtcgacccccacaggtggaaacagcaagtcctaacgtcctgggctgaagcctggggtgcgggcggcagagagtggcgtgtagggtacccgccgagtgccgccgccgatttccacaggctggcccgccggcacctccgacgcgcccgcagatccggcgcggagaccgtttgccagctccgggacgtcgggcagggacgggtcccagagccccaacccccccgccgccgcctcccggccggagaccacggtccctcccgccgcgcctcggggccgcgctgccgcgcaggtagccagctggccctcgggaggtggccctcgggtacccacgggagccggagcccagcggcgtcccgggccgcctgctccgcgcacagagaatccccgcgcccgcggagggcgccgcgcttacctcggccatcctgcgaccgctgcggtgccggggctgccggcgcgtctcccgggcccgggccgccccgcgtccgccccggctcggcgggcgccgccgcatccacgctccggccgtcggggcgcgacccggcgaagtgggcggctccccaagcgcccaggctgcgcagcacgatggccgcccccgccgcgcaccgcgtgtgcccgcacgcccgccccctgcgccccggggacgcctctccgcccctccccctgcccctccgcccaccgcgcggtcgccccacgccgc

SEQ ID NO: 238174 - DNA, 39 bp, Homo sapiens
  chr15:83953986-83954025
  hyper
gcgccccccaccgcacacgcacacacacacacacacaca

SEQ ID NO: 238175 - DNA, 103 bp, Homo sapiens
  chr15:84034239-84034342
  hyper
ttctgcaggctaacgctgatcttccccagacgctaaatcataatcttcgtgtttttcgtatttcacattctagccacaatttcaacatcccatccccgtgaca

SEQ ID NO: 238176 - DNA, 1471 bp, Homo sapiens
  chr15:84115617-84117088
  hyper
gcagattgcacccagagcaccgcgtggagagagaagaaagcccgccacccacagaccgcttcctcctaccacaggtcccccatcgagttgcatttgttgtccctccctaggcgcatttctgagccttcctttcttaaacatacaccgagcgaaaatgcgccggagggaggcgatgttgcctgtgagccaaagccggttcggcaccaagacagaagcagagagaactgatctctctcccggtacccatgacaatctcagagctagatctatatcgtcccgcgcccagcaagaagcactgtgtgactgtactcccccgacccccaggacatccccacgcccagcttcccaggccggtcttctgcgcggctcaagtagcccaggtctccacgcaacaatgaagcgtgggcggccccagcagcttcatttgcatatcgccgcggcttggccaatgggctgcgcaggggctttggaacgcagtgttgccatcggcgtgcgcgcgtgtgtgcgagtgtgacagcggctgtggctgtggccgtggccgtgggaggcgggcccggcggagcccagccgcggggggaccggcccgggctcccgctccccgagcgcgtcgcggccgcgtggcccagccgagccttgagaccaccccgcccctgccggtcgcagtcgcgatgtcggtggccgggctgaagaagcagttccacaaagccagccaggtagggaggcgcagaggagggaaggagggagggggacgcggaggctgcggccccccgaggctcccgggcctttgggactcctgttccctgaagggcctctctcggggctcaatttcttcccgcctaggagggcgcgagggtggggtgaggggccgcctgctctctcctcggcgtcttggcgccttctccttcccattccctggcccccggctctgccctgggccgttgtaaatcggagagattctgcggagcggagggcagaggtggcggccgcggggactcgggaggcggagacggagtgggcgtgggggggcccctacccgcgcgaggggaggacgaccacagggagtacgatgccggcagggcctcccccgagtctccagccgtttggttgggagagcctcgtggggggcccatcctccaccggccaccggcgcctccagagatgctgtgtatttggcgcttggctgtgtcccgctgagctccccgcgcgcgcatcgaaatggccccgtctggactgtgcccggctccccggctggggctctctaccgcggtccttcccctccccaccgtcttcccggtgtcggcccggggctgggcatcacgcttctgctcttacagagctgacagcctgcaggggagacacggagacagacacgtaaacaaacagtgctagacacacctccacgcacagaggatgacaaataacacagtgggggcgtcagggagagcttcccggaggaggagacatgtcattt

SEQ ID NO: 238177 - DNA, 923 bp, Homo sapiens
  chr15:84322262-84323185
  hyper
cgagccagcggttccgggcaaacctctgtgtggctgctgggcctgactttgcagagctggcgcccgggtctgggcggggtgggtggaggctatgggaggtggggccgggggtgggctcggggggagcgacggcatccctgctccggctccggctgaggcggggcggccaggctggcttgcggcgcagcggccgcctttccccagtgcgcctgccggcggcggcggtggcggcgtcggcaatcccggctcttggcacaacgcctggcggccggcccagggcgaggagtggcttccaggaagcgggcggaggagcgttccagccgagtcccgccgtcgccgcggccccgcgcgctccgagcggcccgggcctggccccacacggcgtctcttcgcgcccccggcgcctccagctcaagccgagggcgcggtgccggcgcgcaggctgacgggcgcctgggcgcgccgtgcacttgccgggcggtgcaggtggcggcgcgcgccctccgcctctgggccggggccagcgcagcgctctgcgcgcccggagggggcgggagaggcggggcagcccccgtcccagccccatttaacttcgcggcggcggcggcgactgcggcgccgcgggctggaggccggcgtcggggaaggtcctggtgccggattccgcacgaggtgttgacgggcggcttctgccaacttctccccagcgcgcgccgagcccgcgcggccccggggctgcacgtcccagatacttctgcggcgcaaggtgggtgcaccgagctcggcgcagggcggcccctcaggggtcgggggaaggcgctccccagagggagtaagacttggagcagtggcctctctaagcaagttgggggtctccaagcagagtcggggcgtgccacgcgggccccagggggcctcaggac

SEQ ID NO: 238178 - DNA, 82 bp, Homo sapiens
  chr15:84323365-84323447
  hyper
gaaggtccggccggttgaccactgggtagcgagcgcccagaacgccgggggttgaggcgacgcgcgatcgtggaaagtgggc

SEQ ID NO: 238179 - DNA, 229 bp, Homo sapiens
  chr15:84749076-84749305
  hyper
cggtgagtgtgtgctggcgctgggggctggaacctcctaggccagtctctgggcggtgccgcaggaccctgctcgctgcggctctgaggcggaaacaggggctggggccgagcgcgggctggaagctttggtccctggagtgtcgcttccagtctggggccgaggcggtcgcctgtgtagacccgggatcctcaaatagaacgaatccgggaccctgcagaaatgaagg

SEQ ID NO: 238180 - DNA, 249 bp, Homo sapiens
  chr15:85143989-85144238
  hyper
ccaacacagggtttctgacggtcagtctgcggattttcctgcctctggtccgcaggcactgcccaggctgtcagccccaaaccctactccggggaccgcggtcaggttcgtctccgggcggactacatctcccacaatgccttgggcccagcctccctcctgccgcccggctgggtgccgtctccaccaacagaaaggcagaatttccagggccgttctcggcagccaatgagcgcggcggtgggcggg

SEQ ID NO: 238181 - DNA, 90 bp, Homo sapiens
  chr15:85197334-85197424
  hyper
cggtggcgagccccgaggccacagctggcccactctgcaccaggatccccaacgtgcctccacccacacccatccgcccgccaggcaagc

SEQ ID NO: 238182 - DNA, 31 bp, Homo sapiens
  chr15:85524762-85524793
  hyper
ttccctcggaccccgcgcctaaaccccggcc

SEQ ID NO: 238183 - DNA, 99 bp, Homo sapiens
  chr15:85525474-85525573
  hyper
tccggcgggccgcgcctcccgcagggccagaagacggccgccttgccccggacccgcggcgccggcctcttggagtcggagcttcgcgacggcagcggc

SEQ ID NO: 238184 - DNA, 140 bp, Homo sapiens
  chr15:85923533-85923673
  hyper
gcggagaggagaccgtgggtgggcatttcccagagcagcctctgccagccaccctactttgatcactttgccgccgagcagcagcggcggtcaacctcagcctcccttagcaacctgagtgccccgtccaggagccttac

SEQ ID NO: 238185 - DNA, 98 bp, Homo sapiens
  chr15:86126184-86126282
  hyper
cagcaaagagaaaccgctattgctccgtggaaataaactatctgaataaaacttcttaacgggggttgaggctgaagctgaaacgggagtcggacacg

SEQ ID NO: 238186 - DNA, 503 bp, Homo sapiens
  chr15:88798434-88798937
  hyper
agggatctgtaggcgcccagatgcagatgagggtggcaaaggggtgtctcggaaatgcccaaaatggggctggagagggcgggctgcaggaggggaagggaagaggtaggcgtccatgacggcctccacacgtccaaagtctccccgcgagcagccagctcgcaacttgtttacttgtcagcatgttttgctgtttccaaatggaaatagttaaacacctcggctggatcgcgagcagtccctatctgtcaccttccctgccggctaagcgctgccgccgctgccaccgccgctgccgcctctgccaaagaatcgaacctcgtctactttattccacttgagcgtggccaaactgttgctatttagtggggagcaaaaaaaaacaatttgcaccatcgaaacgagccagcaactggttgggaggcgggcggtagctgggccccgcgtgccctcggcggccggggtcctctccggggagaggcacacacacgcatagccggatc

SEQ ID NO: 238187 - DNA, 331 bp, Homo sapiens
  chr15:88799117-88799448
  hyper
gagcggccgcctgacttacatggaagtgatattccttgagatgtccgtgatgttgatactggcgttcccattgctgttccctgaatcctgcccttccaggagggggaagaggttcccatcgtccggccgccggcaattgatctcagtcttgctgcagacacaatttgcagggcaagccagcacggagcccacatagtccagccagacgcttcccagcaagaaaatccgccagaaactacacttggctgggcaaagagagacatccatctccgatcgctgcttctaaaaaagaggaggaggagaggagaggggggtggggtggggggagtgg

SEQ ID NO: 238188 - DNA, 830 bp, Homo sapiens
  chr15:88800530-88801360
  hyper
ggggggcgcaggctcacggacggcgacggggggtgccggagcgcacagacaccccagagaagcacccagagccggggaccgggaccgcagacgcgcagtccttggtctgaatgacactcatttccgtaatctagagtctggggctctggtcttggctgggaggggactgcgggacatggcacgctaggtgccccccgtgcccgctgcgctttcttggaggtgggttttgcattcggccttgagcaggcatggatcggggaaggaagaaacaggggtcgaaagggctgcgctggagagccgaggtggccccgggcgagctgtgcgtgcaagagaaatggccgggggaaattgagatgcaaggggcatattttggcaagcgccacgccagcaccgtcagaggccggcttctcgggctcagctctcgggtgagctgagctggctgccgggtgagggggcgggcgggctgctttctccggattcgggggcgcagaacctcctccttccctcccacacaagcaccccttcctggtagggacgcaaagcaggtgcagctttcgacgagagctcagatctcatccgggaaagaagtgtgtgtggggggggccccgcttttgcgctggtagggatttttttcttaataaaacataaagatgccaagtgtgagctgtttgctgaaaaaaaaaaaaacgagcattcgctgtgggaaaggagaagaaagggttaggggagtccgagcaggcagacacactacagcattcacacgcagaagaaagcagggttctccttcccgagcttggaggagggcaggcgaggaagcaaaatacattgaa

SEQ ID NO: 238189 - DNA, 68 bp, Homo sapiens
  chr15:89010447-89010515
  hyper
tgcaggcacaacgcgcccaacaagcgccatggggatccgttgcttgagggtgcggctgcaagagccag

SEQ ID NO: 238190 - DNA, 265 bp, Homo sapiens
  chr15:89010954-89011219
  hyper
gctgtgagaaacgcggggtcgcggttcctgcggtcctggacttggccccagacagccgggtaacaaatgactgccccctcgagcccaccgccacctccaggactatgctcctactcgtgtcccttgagccacccgggccccagtgaccgttaggccgtggccctcaccgagcttttcttcccagcagggtcgtggccagaacgccggccgggaccatctgcacaggcgctcgacagctccaagacgctgcggccaagcagaaagt

SEQ ID NO: 238191 - DNA, 1738 bp, Homo sapiens
  chr15:89147772-89149510
  hyper
atttgatgtgaagcgcggctcccccctctccactcgctttctccgctcgccttcaggatgacgtcatgaacatccgtggccctgacaggccacccgtgggttggtctcagctttaaagcagctgttctcctctggcccggcagccgcggcgactgtgtttgcacccggcggaccatgccaggactacggacccggacaggactgatggcctcagagaggcaagtattcaaggggcacttcacaaacagcttcctcaaaccccaccccctcccccgcactgcgctgctacttgcactgcggctcctggggggaagcaaagtaccggcagctgggtggtgaggggctttcttccagaaagaaacggagagcaagtggtcttcctccctagccgcggcgacccatgccaggtaaaaatcccagccgaggtccccggtcccgtcccctcctccaggtcaagggctcgggactggagaagcagccaactggagctgatattcgggaagctaagcctgaggctgctctggagggccggagaagcgagcggccaggcttggcacccgccaaatgtgccttgccaaaatgaagaggaaggaaggcgactccggagcccagcaggtgagcgctcctacgggatgctgggcaggctagaggtgtgggggcgtctggttccagtacctgcccggggcgacgcggaaacccagcttgcagtttgtttcgctcggtcccgcgcccagtaggagaaagacggccccacagcctcgcgggagccggctctcgcaacccagccgccccaagcccgccgtcgcccctcctcccgcgcttctcgcccctgattctagatgcagctgacttgttgcatgcagaagagcagctgggttcggcgttccaagcctctcctctttgctttgcctgccaccagatctgagcgccaggctggccagcacccagagagcccagagccgcaggaaaaaatgtgaaaagtaccaggagaccactgggtaatcgccccagtgcaaagggcctttcttcctacccaccgcaattgcagcaaataactccagggaggggaatcagaggcgccggggattgcgccctgggagagccctatctgctgaaagagagcgcctaatgccgttacttcccagtgtagcctttccactcggcagaccaagcgcctctccttcgagtcgctacccgcttggagtcggctcagaatcaggctgctaaaggtccctggagcccctcccccagcgaatccgagcctgcagcttcagcaccagaggctggacagcgccccggccctagggtgcccatggtcggtgcctgcgcacggctcggcctcccagcccacgccacttgcgctcgcggcccctcagaccccacgcggaggaggtcaggaggtgacacaggttcgcggaagaaagcgggactcatcttcctcatttctccagggatttaggtgtgggattctaggagagcattctctctcgctctggccacgaccagtggaaaaacttggcgccaaatttaggcagtggtgcggggagcagaggcacgattgcaggcggtgagcaaaggggcaagcgggacagaggatctactgtgagccccaggctctggtgttccgtgaaaaatcgccacatttaaatcctgcgctcccccgtgctccctctcgctctctcccccttcctttttcccttccttccttcctccccgcgctctctgtatgccttaatag

SEQ ID NO: 238192 - DNA, 162 bp, Homo sapiens
  chr15:89164363-89164525
  hyper
ctttaaaatttcccgccagtatggccggctcgcagcacgagttacgccctcttcaggagtccctccccttctgctctcgcccgcctccccgctgccaggcaggctcgaccaatcagaagaggtcttgggcgggcgctgccgtccagcgagccaataggcggg

SEQ ID NO: 238193 - DNA, 241 bp, Homo sapiens
  chr15:89312742-89312983
  hyper
acacacatcgcacgcgctgcccgcccccacgtccagcctggctccgcgcagccgggcctgtcccgagcctcctgtaagctgcttctgcgccctgaacgctgcctgttgtcccctccagagcgcctcgcggctcctcctcctcctccccgcccggctggaagaggaacacagccctcccttgtccctcctcttgatatttccagtaaaagcacctcgaacacaatctcgctgccacaaccct

SEQ ID NO: 238194 - DNA, 121 bp, Homo sapiens
  chr15:89345998-89346119
  hyper
gagatgtccttggtctctcccggggaatttgaagacccagagactcgcagctccccgtgagcctccccgctgacgccttacctccccctctccaccatcccctgccatcccggtgtacgcc

SEQ ID NO: 238195 - DNA, 77 bp, Homo sapiens
  chr15:89346599-89346676
  hyper
acccctcacgggccctcccctcccccgcccgtccctatgtatgtgtcacagcgcgccatgcccgcccgcccgcccac

SEQ ID NO: 238196 - DNA, 1307 bp, Homo sapiens
  chr15:89437678-89438985
  hyper
gaggcagcatcgcccgcgaggtctgcacgagcgctgctcccagcgagaaatttgacatccctgtccctgtttgcacaaggcttgatctccgcctttgaaacctgcagcccccaggagaatgaaaaccggaggtgtttcccaatccgctggcccgggcggcgtcgagggagagaagccagggcccctctcaatcgctgccccctactccagggagcacaggcactcccgcgggtcagcgctggacaccaaggtcccaacaggtttacaggctgcctgtggcctgtggctgccaacgagctggtggcaggactgggtccaagtgccgtgctgtttccatactggctgcgcacaagcctacgtttctccctgagggtcgccatctcccacccagggctctgccctccaccctccctacccttctggcctcgctgtccctggggcaagaaccccggtgagcgaggtctggaacccataggcatcagttgcctttgccccaggcgcccagagccggccagctgcggtccagaggcgcaggtccgccagccgcctcgcaggttgccctcagcccctcccaggactcccggggcccccggagcatccaacagatacccaggggcagggcctggggcgccgcggacggcactggaggcagccgaccctggacagacgacaggggagagagccaagcggaccctggcaggaagggggctggaggcggacggtggtctcggaggccacggggtccgctcgggctctgctccctcacggtgggcacgagggtccggcgcccgcatccccgcgccgctccctccccacttgtgccccgggcgcccctcgcccgcgatcacagcccatctcagcccgggcctccgcagtgcccggcccacgcctcctgccccttccccggaccctgcccgggaggtgtggggacccgcagggcacccaaagcggtaagggaggaacccggcccgcacacagccccagaagcccagcgacccctaagccacgtaccgtccccaggcagctcctcgacggctagagctctcgggggccgcgagctgtcccggtccaaggcagcagtctgatttcggggaaattaaaagggcagaaaggaagcggcagcagaaaaacccccgcgctcccgccagaccagccccttaaaggaacacgcgcacctttccctcccaagggctgggctcgaagggaggagctgctgcaggcttgagcggtctccagactcgctgggaaccaccgcaaagagggtgtgcaagagttgaggccctcacgtcttgggaaaggagagtagg

SEQ ID NO: 238197 - DNA, 397 bp, Homo sapiens
  chr15:89787063-89787460
  hyper
ttcggacaggcagcgcccccctccgactgtgagctgggacgctcccgcacgcttcccggcaccccttcagtcttcatggtacaccccgcccgcaggtacccggacggcggaagtgagccgcgggggcggatcttgttgttacgggtaacggaagtgtggcggcgttgggttgagcgggctttttggaagtttgtggcggaggtgaggccgaggtgactgcagagcggctcgcgaggtgctcgggctgtgggactgggcccctgggagggagcggttctgtgggggaaaggaggctcctgtcctgacttggcgttctggtattttctctggcgtggaaagtaggcgcgctccgctgtctcccgccgcctgcctcagctttcgcggttccctcctaggg

SEQ ID NO: 238198 - DNA, 257 bp, Homo sapiens
  chr15:89877892-89878149
  hyper
ccgccggaaacctcggtcctcacggtgcttcccggtctgctgctcccccgaccccaggcccacggcacggcgtcccccttcgcgcggcctacgcagcctcggggtagcgtgtggcctccacccggccggtccgcttcgctggcagccgcaacttcccgtctgcacccagctaggtcccgcggctacccgagaggcaagcgggagactcccagcgcgaccaataggagggccgccaatggagcggtccgcccgcgggg

SEQ ID NO: 238199 - DNA, 251 bp, Homo sapiens
  chr15:89878847-89879098
  hyper
ccagtctccgcatccgtcttgtgttgctccaggtgcttcaacagctctcagcgctcggtggttggtgaactgtggtaaagtgcacgcagaataaggtctacgtgattaagcaccgcctgggggttggggtctggaggcccagctgcacagatgaaagggaggctcagagacgtttgggaccaaccgagatcacacagctgattaggaataaaattcaggtcaagctgaaagtcggccgccaccgtccagcg

SEQ ID NO: 238200 - DNA, 124 bp, Homo sapiens; identical to SEQ ID NO: 204023
  chr15:89902214-89902338
  hyper

SEQ ID NO: 238201 - DNA, 327 bp, Homo sapiens
  chr15:89902764-89903091
  hyper
ccgagaaaaagatacgcaacggcaagccatacttttctggacactggctctgggggcgctgctcctctgaacctcgactttccccaggcacgcacctcagagctgagccccctggggactcccaagctctgcgtctccctgagtcctgaggcaggagaggaggaggcttcaggggcggatgagcctcctccccctagccgtaccctgtcaccctgggagcctggaacgtgcatctgaggccagagcgactcttgcctcttttccagtgagctgggggaaagtcaccctcctgaggagaccagccttcgagggcgtcatgagcgcgtg

SEQ ID NO: 238202 - DNA, 388 bp, Homo sapiens
  chr15:89903426-89903814
  hyper
cacagcccacaagaatcatccgaggctgcaccgtgaccagcccctcaagacagagcgagacccaaataacccccgcgggcggacccgcagcgttctgtgactccaccgcggagtccaaaaggcagctgagggtgggagcggaggggaagggaggggggccacaggcgctcgggcgagggaggcgcgtcaatgggccgcaggggccggatcggtggcctaatggattcaggcctgcacggcagaggcgcacccggcggcctgcccgcgctctcaatagcggacaatggagtcccggggtgacctgaacaaagaatttggaagtagttaaactgcagaacacgttctcggcctgggtgcctcctttcaaaaggagcgctgggagaagaaa

SEQ ID NO: 238203 - DNA, 78 bp, Homo sapiens
  chr15:89905400-89905478
  hyper
ccattcttcccaaagcagctcggatccctaagtctggagctgccagcgaggcttccaacccgctgcttgccatcacct

SEQ ID NO: 238204 - DNA, 120 bp, Homo sapiens
  chr15:89908903-89909023
  hyper
gcgcgcggttaccgcgagtctcgctgaggagccattttgtgcagcatcctgcttaaatcacactccgaggggctcgttcctcgctccctcttccccctcgcttcctctctttcttccctc

SEQ ID NO: 238205 - DNA, 356 bp, Homo sapiens
  chr15:89910429-89910785
  hyper
tccctggtctctgccgcgtgggctagatctactgcaagtgctgggcatggggaaaggaagagagaagttaaaggtgaaatggcttctgctctcggcctctccgtgagcgctctcggccctcctgtggagatcgccacgtcctatcacacgcgtccctaaaccttgtcactcgagcattcttgtctcccaaactctgatggtccgcagtgggtactgggctccctgggccctgggaggaagacggaggagtttgggtgaaagatcagacggtgcgcagccctgaggcttctgagggcagagggtgcgcttccttgccctcggggcggggaagccgtgaacgccgaggccattgtaag

SEQ ID NO: 238206 - DNA, 661 bp, Homo sapiens
  chr15:89913307-89913968
  hyper
tgactagagtgtttcgggattcacgaggctatgggctgcatcccttgggccgtccctcccttcccaatgcacctgggagcctgtgtgctgatggtgacctcatttcggaggaaaccggagcagcacttcctgcccccttgccctgcactccctgccttcctccctcaccggccaacgggtgtgggcaaaccctgggccccgggcttcgatcttcccctcccaccacccctacccgtttgctgtgttgcaagaactagtccttcacttgccagggtggctttgcagcttcccagcagtgtctacacagttcagatgagtgttgttgttaaacaccactgtcccataccatctgggcaggtctgaaacccgagttgagggtctgatgaaggaggagtctgtgcgggagggcaacgcggcattttcccgctttctacgaaaatctgttgatgcaaacctcccgcttcagagaaagatcgcggcagcagggctgcggagggcgatgagcatgccagttctaatctccaggagcccatcccacaccttccttaaacggccctcggagagaggccagaggccagaggccaacccatccgatttcggcctcctggtacgaatgcctgcccctactagagcaatgttcgaatcccctttggacacttaa

SEQ ID NO: 238207 - DNA, 933 bp, Homo sapiens
  chr15:89914293-89915226
  hyper
taaaaaggcccagtggctcacggaaggtcgcacagaaggccactgacagggcagcgatcagtacagccaccgtggtgggcgaggcatccggggcttccttttctctggtccacgaactcccaactccgaacgctgtgggactgcatgggcctctgcccgggccaatgaaatgcgctgccgagaggaggctgcggcgcggcctgaggccggatctccacaggccggagagttctctgccggccgcggccggacctcccgggaaatgggaccagagcgcggagggagcctggccaggaggcctcctaggactcagccgcgacgctgaaaagcatgaagggtcggaattaggcactcatttagcgagcgttactaatccgaagttacagcgctaattccctgatccggccgctcccacacgcagcgccgggattagaggcgcggccgccgcccgccccgccctcataccccaaacgcgcccgccccgcgccctcgaggctgcgggctcagggctaatccgccgcgccgcgctcgcctggcccgagcgcgcggcgggtcgggctcggccagctggggcgagccggcctgttcgctggctcgggcgcccggttccgggctgggcaaggagcgcttggccatgagccgcgggacagcccaggcgggacggatgcgccctccagggcccaggcgaggccgcgcggtgcagaaccgccgggatttctccaacccgggtatgcgcacccacagcagcggcctttggaggccgcggcgccattttagtggccttccttcccccttggcatctgtcgtgtatggtgtggctgggtgtccccagctccccccatcccgctctgactttggctgccccctccgccagcctggatagagtgaccaatcagctctgacctagggtgggatgcgcgtcaccatggcgac

SEQ ID NO: 238208 - DNA, 849 bp, Homo sapiens
  chr15:89921791-89922640
  hyper
agctgggagtggcgcggctgcttcccgcccgcgcaggatcaggccggcccccgcgggcctggagctggatccagagctagggaaactggaaaaacaggcacaaactcggaagccgcggtacggcaagagcctaagcaaagaatcctttccaagattcacacctcgtctacaccagggcaccgcctgggcctacggccttccgaacccgaagcgcccgcagcccagagctggcatcaggccatcaggccgggaaggtcgtcgcaggccccagagtgcgggcgcggggggcgcgcgcccacaggacgcccggggttgggtaggcaggagagaagggcgccagcaggcccgcggctgtttcccctcggtccgcacagcgggcccgggaggccattttgagagcgcgaagaggggcggcaagatggctgcgtgggcacccggaaggtcgccgcgccaagggcccgctgagcccctcctcccattcgtccagccgcgcggcccacagaagcggaacgcgcgtcgagagcgccctgtccgctcgccccagacagatgcccggttattcattaccgcgaggcctagaggaaagagtggctgccgtcttcctgcccacagcccgccggaccctccgtcgcggctgcccggtccccggagccgcagccgccgagcccggctgtgcgtgtcgtggctgctggggagaaagaggcttccggtaagagcccccctgactgggctgcccaccccgggcaggggcggaaacggccttccccgcgtggggaacaatggcgttattttggagtctgcaaccgcgagcgcttcaagctctttgattattttcgaggagtgttaggt

SEQ ID NO: 238209 - DNA, 1324 bp, Homo sapiens
  chr15:89942572-89943896
  hyper
aaggccccatcaacctagcccgggcccacgaccccaaatgaaacatctttcactcgccccccagcagcccgggccgcgtttgaccactagtagggcagaaccactgaccggcaggcggcgctccccggggctcccggctcgagccccagggcaccgggaggagtaaggaccccgagcgggagggagacgactggggggcgcgcggcacaaagagctttttattcaaatttgtttagagtttcgcgaatttgcatgaaaaatgtgtgagaaaagccagctccggtgacctcatccgcacctgccattaacgttcaattagcggctgaatagcggccgccgacgcgacgtgcagagaatccggcctgccccgcgcagcgagggcggcgggccaggcccgggatagggtgggaccgagggagggggacgcggcgtagggccccggcctactcctctggcccggagacccaggacctcgtccgcactccaactctccgagggaacgcggggatctcaggactcacgagcccaagattgtttggagcgcgccgggagccttaggatgcctggctccctctgggcgcagaaaagggcgggcttgcctcctccccaggacggaaggtggccggaagagccccgtcccagctcagatgggcttccccgccatcttccggacaaagtgtcaagtacaagttcaagttcagggccaggcccgggggggggcgctgagccttacccggccgcctttgttctctggcataatcgctcccacgtccccctcccgggcggggcccagcagagacccccgccccgccccgccccgccgcgccccgcaggagcctcctcctcccgccggcgcggcgcctgtgccctggtcccggtgtccccgctcggtgccaccgaaggatctaggggctcgggccggggagggggtggaggggggagtggaggcgcgatacgaacccgtgggagcctccccaaccccgcagtcccagcggcaaactgtgcttggtcggacggatgcccgcgcggaggtaagagccctttgcgggattcgcccgtatccctgtgccccgccccccgcctgggactacgcgggccccaaggagcggggcggaggatggtgtgctgaaaaccggctgggcagccccgctgggcctccggtggggtggggggcgcactgtcgctccagggctctggggagtacgaggcctgggcggtgggtatggagggcaagtgcgcccagccgaggcccagtaagatcgccggcctttcccaaaggcgtttggctcacccatctctcctcggctagcctcttggtctcccc

SEQ ID NO: 238210 - DNA, 2055 bp, Homo sapiens
  chr15:89949458-89951513
  hyper
tcgcttcttgtgcccggtattgtgggctacatgcctttccggcgtacggagctgagcgtccaggccagtgcccctcaacctctcagtaatgtttacccgaggccgtcgtgcaatgagactattcgcatggcattgtcaacgcggcggcgcgcgcgtctcggccctccgcggcttgccagactgtcctgcaaaccacctcacccgtctctttggcgcaggagactcaggctgtaaccggagaaaacacttcaccctggaaccctaactcaggtcctggcaaaagatgcgagaggaagacttgctctcttaataaatctcggccgcccgcacatctggcccctagacctgctcggtagaggactggctggtggatgcgcggtccaggccgtgggcactcgacccacctctattttccttcccgaggcgcccctggattaccactttcggtttgcgcttacatccgggatgtcgaatttcccagggaatcataattattttatctataatttattctaaccccaaggttccaagaaaatctgtaatgaacgttaatatctacagcctcctggtcaatctgcatcgggcgagagagccgtcgggttcttcgcagtgggtgacttcaggtccctgtgccttgtttcctatcactctgaaagaattttctccccaaaggaaatccaacttgtttgaaacaggtttctcctctctgactttctgcactggagaaaaatctggatctgcttttcgaaaagattttttttttttaagaggcatccgggcaggcctgaggagtcgggctgaaggtgcgccagccattattgcctcagacctccggacgctacgtaccccaagcacctgagctactagtggtatatcagacaagatttctgggagcagccccaggagtccctccgcccgctcccagtccgcaagcgcagaggatcctgcgctctgtcccccaaggtcttggcgtttgctgagctctctccgcgcgcgtcgaggagaggccgcctctcgtgagcaaaagctgggagttgttagagattccgcagccgctctgagggcgagatcgggtttgtcccacgacctcggcgccaggaagctgtagaaagagacagaccccaattttctccccttggagttgaaacaaaacctgaaagcccgaggttgcccgcaccgccagaggtggcgcctaggcggcgggggcgaccagagccgcgtgcccgcgcggttcccaggcctgggttctgtttcttcctattttagttagttacttagccggttagctaatagacagctcacaggcagcatttatgcaaacgccaagcctggacccacgctgagtctccgcggccgccagacctatagttgcccggctgggctcccagaggagtgaagaagggaaattcctagtaattaaaggggaggttttcccggggcgccccttggtgaagtggccttggcttccagtgaggaacaaaggactaaggtgcctgcgcgcagcgcgccctcggggcccggcgcgaccagctttcacgcctctcccagctcccacgcctctcccagctccacggcggccgcgggctttgtgagctggggccgcgcgccgcgctgcacctgcccggatttaagtaccttggcgaggcagcgcaggcggctgttctaatcgccgtctccaagtacctgctcatgaataaacaccaaccccatttatcaggtacttagcgctcattgtgaaggggaaattggcccttttctgaaattgtctatccacaacccatctgcgcagttctggttgcagaattcccctcacccttgagacacacacacacacacacacacacacacacacacacacacacactcgcaacacgaggctcctccaagctaagataaactcgcttttcttccggtaagtgcgcgattgagccgcgacaataggcggcgaggaggaggccgttgggtcaatagcctgcgtctctcccattgataggaaaagtcagtgcgcggaatgcagggccttaggaaagccctgtccggcgttccagccacagg

SEQ ID NO: 238211 - DNA, 1226 bp, Homo sapiens
  chr15:89951773-89952999
  hyper
tcctctgggaacccggatgggccgaacagcagcttccggcagaggccctcaggtttcagagttctccaagtggggagaagggcggcctgctcagcccgcgcacccgtggcagcaccacagagggaataaaagcagggtaaacaatttgaagatccccacgaaggcaagagagtaaatttacaaactcatttgcgtccggaatacttgcttctttttcactcatacattccttctaaaatgtgggctttctgtgtacatgggcgcgcattcccaggactcggttccctgggtggaattcacccaggaatacaatcgattttctgaacctgcgtaaggccacaggcagctctgaaaatgaaagcgtttgctaagtgggggagatctcaccgatcgaacgtttaaaaatggctttgtcttcattcagctctcccgatttattctgtgttttacaaatagaagctcagagcttctgtcgcccagtccttgcatgactcatggcggtggccacacgggtttcagggataacgggatgtttagaaaatcgctgcatatcggagtttcctagcacgttccatttatactgaacgcaggcggccgctgaaaatccagcctcgactcttgctaatgactgggtaggaccctcggggtcctgcgacggtgctggagggtgttcccggctccgatgtggggaggcctgcgcggggactaggttctcgagaggcgagcgggcgcgccagagaacccgagactgctgcggggccggatgcgggatccctgggctgcggttctacgcagaaacgccaatggccatgcctccccagctcctcccagccccagtcactaggccggcgcctggcccggagatcctcccagagccctggcggtgccatcatgccggagaagacaagctcggccccgctggaattcgctccaaacacagatgctcatttttggaatattctagaaaaataacaagatcttgtttgtcgttatgattcacgggaggtaactgatgggagggccatttacatgagggcagacactgtggggcgaaggtgacttctggacgtaggctttaaagtaggaacggctccaaattcccaatatctccggccttaccggttgcaaatcggacccctgcgggaaaaccagacacttctgtttcgtggctttcgggctgcctccagcccacgcaggctcgtttagtccccgtggagtcagccccg

SEQ ID NO: 238212 - DNA, 197 bp, Homo sapiens
  chr15:89954192-89954389
  hyper
accctgcttaactcccatgacgtcagatcaccacttagagcgtcttgatgcccaggctagaaggatctcggttgcaccagctttccccactgcagtttcaggttttgtcccgacagactttcagcaagcggcttagctcagccctggcgctgccttccaggaaagaggggcagcagcagcctcggctgagccgggtg

SEQ ID NO: 238213 - DNA, 462 bp, Homo sapiens
  chr15:89954591-89955053
  hyper
tctgcatacccccgcgcgcgcttgctctgtgtggggggctggcagataggggtgttcctaggggccacgcggggggaagggggtggcggggccggtcttgcgcttcccacgctccatctgttcagttcactctggtggtctctgttccagtctggcctagggatccctggctccccacggccaagccgagaactagcgggcgcaggttgcattgtgcagactcccggggtcaggtcgcagggtcacgtgcacgcgtcgggcctcctccgggcgctcctattccagatccgccgacagagggcgccgggggcccgagaggagcatgttcgggcgcctctcccgggtccctggcgccacgctgtggggcttggtggttcagagccacacctgacaccctcacgtcccaaaccgggatagtcgcaccgacaaaaatcacaggaaggagcgcgcagttgactgtgg

SEQ ID NO: 238214 - DNA, 241 bp, Homo sapiens
  chr15:89956216-89956457
  hyper
acaccccccgcccccgacctactgacccctcttcccccctgacatgaatagtgggactcacagcctccccagcctctccaactagtgcctgcaaagccacggctcctaatcagggtaatttaatatattttaagcccccggcggctttattttccctccttttcgagtttgttttaggcattcacagctctcaccccgtcattagacggccttatttgacggatggaaggagctgctatga

SEQ ID NO: 238215 - DNA, 232 bp, Homo sapiens
  chr15:89959772-89960004
  hyper
aggcgctggggggcgccgtgaagtcaggatgactgggaagtgggggcttggagagggcgcagtgaggtgcttttgaaccaacgcagacctacagggccgacttcctgagggcgaatgtcgctttgctgcagcggggcacgggtttggttcccggcggggcctggcctgggaagcgcggggctgagggcgatgcccggccgctatcccgagtcggtgcgtgcctatgctgcag

SEQ ID NO: 238216 - DNA, 194 bp, Homo sapiens
  chr15:89962759-89962953
  hyper
ctctggctctgaggcgagatgggagctgtcctcccagtggtgctgaaactcgggctgcctccgttggggtcaccgacagaggctcacttgttcaggcacttcctgggtcagcctttccgcctctgagacgggctctcccatctcagatgggagattctgcctggaagggaagtagtccacgccatcatcattcc

SEQ ID NO: 238217 - DNA, 81 bp, Homo sapiens
  chr15:90016167-90016248
  hyper
gagctgcaaatggtgtgtggcgagcgccaccttgtgatcgccgtgcggatcacatgccacggagagcagggtggtccttca

SEQ ID NO: 238218 - DNA, 526 bp, Homo sapiens
  chr15:90039453-90039979
  hyper
cctgcagaggccggcgagatgcggagtccgcggctgcagggtagatcccctcctctgcccagctctgggccgagcccttggccaggtggggaccggcgcggatatgcctccgctgggcctgcaggcggcgagacttacttgggtagcgatagtagaattcgttctccatgtcgctcaagttcttgtgcgtcctctctgaccaccagtgggcgtcggcctcgaagtcgtagcgcacgaacaccccgaagagaatcaccataatcacctgcaggagcaggcaggtgagcggcagccgccagcggaggttggtgttccaggccatgctgcaggggtgcctggccgggctggcagcgggcggttcggacgctcggaggccggcggggcttttgagacccgggcaggggggcggggcggccacgtggggcacggagcagctgactcgggcaccgcccgcgcgctcgcccaactggcaggggcccaacccaagccgagggccccaaaagattccccgcgtcgggctggggga

SEQ ID NO: 238219 - DNA, 417 bp, Homo sapiens
  chr15:90198046-90198463
  hyper
ctctcagcacagtaacctttcgttaattcaatcacccagcccctattgggctcccgaccctgggcacacagcggtaaactctgcctcgcaataccgtgtgggccttcgcgcacccctccgcgtgagcgttccgagcccggtgcagtcccggcttccgcgcgcccctgctctccgcacagcgctcccgctccgaaggtgctctgacaaccccgcaggcgctattcggagccggggcagggcagctggggctggaggcggcgggcgcgggacggagctccatgaaagttggaagaagtgattacaaatcgggacccgactctcgcagccttggcgctcgcccctccacgcaggcccgggatgccggcctcagcccccagatgtcgggaagacggcgccggccagtccaaggaagagctt

SEQ ID NO: 238220 - DNA, 37 bp, Homo sapiens
  chr15:90234210-90234247
  hyper
tccggatgcctgacgcctccccgcagatctcaggttc

SEQ ID NO: 238221 - DNA, 384 bp, Homo sapiens
  chr15:90293504-90293888
  hyper
tgtgcgggtgtccgcgctcgtgggctccactctcagggggcccctagcgaggggagacccagtcctctgcgtggcctttccctgccttcgcttcttggagccctgggcatactatggtggccaggtggccaggctgccggcggggagcagcagggtgcctggtcctcaccttggcgggcggtggggctgtgcgcgggggcacggacgaagggggcgcggggaaggggacactaaccggggacggtgggcttggctccatcgcctgcccttcagggcacgccgcctcggcgaacagcgcaggcgggtcgcgcggctcgggtgcagctcgggctccggggcaggcaggcggggatccccaggacgccccggcgcggacggcggata

SEQ ID NO: 238222 - DNA, 563 bp, Homo sapiens
  chr15:90319563-90320126
  hyper
gcctcccagagcctgcagcccggccatggcccagtcgcctcctccgcagagcctcctcggccacgaccactggatcttcgcccagggctggggctgggccggccactgggactccacgtccccggcctcctcctccgattcgtcgggttcgtgcccctgcgacggcgcccgcggactcccgcagccacagcctccgagctgcagctcccgagccgcagaggcagccgcgacgacgcccagacgagcgcgcaccggaccagcgggcggacagcggcagagcgccagcgagcgggagaaactgcgcatgcgcacgctggcccgcgccctgcacgagttgcgccgctttctgcctccctccttggcgccggccggccagagcctgaccaagatcgagacgctgcgcctggccatccgctacatcggccacctatcggccgtgctgggtctcagcgaggagagtctgcagtgccggcgcaggcagcgcggggacgcggggtccccttggggctgcccgctgtgccccgaccgtggccccgcagaggcgcagacgcaggcggaggggc

SEQ ID NO: 238223 - DNA, 472 bp, Homo sapiens
  chr15:90357978-90358450
  hyper
gcccccgccctcccgccccacttgcctgggccgccgggcgctggaacctggaccctggaccctggcgggttccgagctgcgccgccgccgtccctgcccctccagcactggactcctcctttcccgtctttttaaagggaagtaaccggacccgaccactactccacccgattcacccctagcgggccgcccgcccgcagctccgcccgggctcctcccccgtccgcccgcggcttcccgggagccccccagggctcctccgctcctccgacggcccggccttccccccggggcctgggatgcaccagggctcctgctgcccccgacggggtccctgtcgccgcagcccgcgggacccgccggccacatctggacggcatctgccgcgggggaggggctcagagcctcgccctgagtgtcccgcagggagccttgtgcatccggggcaggaagccagcgcatcccgtgcaga

SEQ ID NO: 238224 - DNA, 60 bp, Homo sapiens
  chr15:90792593-90792653
  hyper
agtcccatgatacaccggaagaatctggcgtcgaggccggccagctccaaagggcaaacg

SEQ ID NO: 238225 - DNA, 194 bp, Homo sapiens
  chr15:90808537-90808731
  hyper
ttcccagagaagccgagtgcccaaggcactgggctgtcgccgtcagaagactgccgagcggaagccctgcccaccgaggtggcggagacaggcaggcctgggcagccgctggggcggagggacggctcttggaaacggaatccgtactttaattaaagtttatgcagttttccaggagcgtcctgtacctcatt

SEQ ID NO: 238226 - DNA, 137 bp, Homo sapiens
  chr15:90895267-90895404
  hyper
ggttccgggggaccggtagctggggaattgggtttagcactttccaacgcttggaactggacatccacggctccgagtcctttgaggtcttgctcgggactacgtttcccagaaggctaggcgataattgacagctc

SEQ ID NO: 238227 - DNA, 33 bp, Homo sapiens
  chr15:91072783-91072816
  hyper
cctgctcgaggtccggtcgcccaggttccacct

SEQ ID NO: 238228 - DNA, 179 bp, Homo sapiens
  chr15:91260439-91260618
  hyper
ggctttggagatacgcgtccctcccggcgctgtacggcgaccccgccccagcagcctgagggggcgggaacagatgtccgagtgcgacagtattggtcggcttccccaggaagcagccaatcggaataggcaagcttccggcgggaagtgagccagggcttggcgcggcggccgtggtt

SEQ ID NO: 238229 - DNA, 164 bp, Homo sapiens; identical to SEQ ID NO: 204037
  chr15:91475572-91475736
  hyper

SEQ ID NO: 238230 - DNA, 900 bp, Homo sapiens
  chr15:91642937-91643837
  hyper
cctgatgaggcaaacgagaacaaagcagtcgaacagcaccatgatcgacgatactttgggggcggcgtgatcagaggattccccttcccgggaacttgcgtctagtcctctgacgcatcctagttcggagtgggtggaagggcatgtggagtccacagcgccccctcgccctaggcggggtggagacagcgagacgacgcccatgatcagctggttacaaaactcgaggaataagaagtttaatatttattggtctgcaaatccggagaccttgcggcctcactggtcctccttccctctgagctatctccacacccagccttcgatcagaaggagatttagaagcagagctgcccgcagcgaatacttttaatgcccgggccgggaagaaagcgggttaggatctgatcccgctgagtagaggacccaggagcctcccgccccgcgtgctctgtagcgcgggggcgcgctgcgcgctgcgcctgggcggctggcgggggcggcgtgggcgcggtgatgcaggtgtgacacccgccggcgcctgcctccgcccggatcgcccagctccgcgttagccggagctgcacgcggggctgccggggcggacgctgctctgcctgcatccggaggcggccgccagcggatttgccacccaggtaggggactgcgttgctcgctgcggtgcaaccgacccagccggggcgcggaccccgcgtgcgccagggctcccagactcgcctgcctgggctgaaatatacacgctcgcacagctgagtgctgttcatagtaaatggcacaaaagatcggagagtcttgaaaaaccggcgcagaaaagcaaggacttgcccgctgcctggagctgtgcgcttctttgaaagcggcctccccaagggctgtttt

SEQ ID NO: 238231 - DNA, 155 bp, Homo sapiens
  chr15:92936664-92936819
  hyper
gcctggctgaaaccgccttctcgccgcgcgctgggggctgtccccaggtgttggtctttgtgtcgagaaaactttgcgaggaggcgagggagctggacaaagagcgggcgagggagggcgtttgccagcctgaggggtgcgccgggcggtgcgcg

SEQ ID NO: 238232 - DNA, 63 bp, Homo sapiens
  chr15:92936999-92937062
  hyper
ggagcaaagctgtcaaactgcgcgcggagccgggcgcggggcgggggaagggagaggagggag

SEQ ID NO: 238233 - DNA, 180 bp, Homo sapiens
  chr15:92938348-92938528
  hyper
ccaaagggcggtagacgacaggtggggaggcagccggggttctgaggaggcccgaggagagcttcctggccctgggcaaggggaaggtgaggtctcaaagagggcagaaggtctcttcttctgtgggatttgtgctctgccaggcgctcttctcgagtcccgcgccgcgtgcgcccctcc

SEQ ID NO: 238234 - DNA, 906 bp, Homo sapiens
  chr15:93198354-93199260
  hyper
atgtaccaggaaaatccagacgagcacaccccggccccccacccactctcccgggcagggcaggaggcacacggctggctggggcgcaccagggcacctgtgcgtgcaggtggggcgggcgcgcggcgacagcaggttggcgatgccgccctgtcggccggcgggggaaggaagagggcgggagggcccacctgaagacgcgcagcagcaggcaggcgatgaggagggtggtaaaggcgaacgccacgatcacggctgccttgagggtgggtaggtcgcggaggaggatggaaatgcgggtcaccaaggcgtcgccactgctgttggagctggagctgccgctgccgcccgccgccccagacccaaaccgggtggtgttcccgggccccgggccgggcggtggccgcgactcgcgctcgggttcgggccacggcgcggagacggactcggctctgctggcgcgggcggcgggagcggccaggagcgcgagcagcagcagcggcaggagcggggcgggcagcggcacggcgcgcatagtgcggtgggtcggcacaggatcgggcagggcgcgcgcggctgagctccaggatccgcaccagcacggaggcctgcaccgggggatcctgcggcggaggcggctgcgcggtgcttggcaggaagctgcggcgcccggaagagcccgcgccaccgccgccgccaccaccaacacgttgcaaggagtcattcgacgggccgcggccccacgtgggcggggcaggccacccggcctgggtcccggctgcgctccgctcgcccgcgaccccaattcctcgggacttgagaccccgtggtgaagcagcaactgccacgatgacacttgggctggccctgtgttacacgtttcacgtgttttatttatttcattta

SEQ ID NO: 238235 - DNA, 115 bp, Homo sapiens
  chr15:93352980-93353095
  hyper
tgctgcaaatccaacgaggcgagtcctcttggatcgaattaatgcattggctcttcccttcgcaacagctttgatgaccgtttcccgcctttgtgcaaagcgttagaacaaaccc

SEQ ID NO: 238236 - DNA, 143 bp, Homo sapiens
  chr15:93353296-93353439
  hyper
atttagacatcggtcgctgtgtattacaaaatgcaagaaataaagcacaatcgtcaagtgctgaaggcccacagcttccccttcgtgtccacggatctagtgctgaaagacaaaccctttgactccgccggggcagttggtcc

SEQ ID NO: 238237 - DNA, 229 bp, Homo sapiens
  chr15:93363550-93363779
  hyper
aaaccccatttcacgttttggcttcccaggagccgcaacccaggccgaccagcgcacaggtttcaggcaggaaatgtcagggcgcctttaagaggaatctgcggtaattttccaccgccccgccgacgcggcgggatgctgggcgcggcaaaatgcggctgcgcggcagggcgcgcgcctccgttgccaggataccgcctcctccacccccggcgcccagggccctttt

SEQ ID NO: 238238 - DNA, 974 bp, Homo sapiens
  chr15:93443566-93444540
  hyper
aggctctagatggcggctgtgccttagagagagcgcgctctgctccctgcctttgcctcactttacgcaactttccctaactttcgggcagcctcagggggcccccgtagccccctgcctttcctagggacttactggggtcgattcgaacctttttttgggagaaaagcagcttttaggagctttcttttcgtgccttgttggaaagaagcagccgtactgagagcccaggtcgttgttttttccagcttagaagccatggcgcacctccatttttgtgcgctctcctaatgaggttttttttctttcggacctgttttagtattaattattgctttatttttttgaccagttaacatatttgagggttattttatttatttttcgttttttaacggaggattttgcctttatttttaattatttgggatctgatatttttctactagtagataggactcttggtttggacatactacatggatcaggtaagttcacgatcattggtgataattttaaagatttatttgtttaagtttgccttgttttctgtaaatacgagaaattcttggatgacgcaataagatacagagattgttatttgtatctagtgtgctactttgagaaagtttccttattgatagtgatgcttccactgttcggtttatcctgttgttttttcttttaaggaaaaaatagaaatatttagttttttggtgcttaccgttgttgtgttataacaatatcgttaacatcgtcaggactttgttcctgataataaaaagcatcgatagaagccgggaccttacctttctttcaacttttgacagtaaatacctgggcacaggacttcaaagcaaacacagattccccctcccccttaatatttaagaattaaaagatgatgagaaataaggacaaaagccaagaggaggacagttcgctacacagcaatgcatcgaggtatgagctat

SEQ ID NO: 238239 - DNA, 1214 bp, Homo sapiens
  chr15:93615626-93616840
  hyper
tccgtgggtgtccccgcgtggccaaatgggtggaaacgagacgaggtctccggggagggggctgtcgggaactcggctgggacctcaggggcgaccctggctccacccctgggcacccggcaggtttgcaaactgctgggcgaggagctgaagaaagtgtccccagcaccgagggcgtgcctccccttctccccctcttcccgagcccctaggaggcacgttcccagccaccccctttctcggaaaaagggaagggagtgaggcaccccggcccctgcgccctccccacacggctccatctcacggcaactcgggcagggtgcccctctccgggtccccaagggcaggcatcgcacccacgacggggtgcgggagaaacaaaagacccgtggaaataggaggcggggtccggaggaggtccggagaacttgagcccggactcactcgcgcacatctggcccagcattgaggggcggcccagggacccggccccgcgcgcccggccggcagtgccttacctgcggggaagctgcagagaaggaaggcgagggtcggccagaatcccagggctgaacgtcctgcccctctccccatacccatccatccagctcggcctgttaccactagcctctccctggaagaagagttcagaaaaaaagaagaaaataaatcacgctgcgaagaaagggcagcctcgctccgccggcgggagcagcgagccgggaggctccgtccacctcggccgcgggcgcccggcgcgctccccttcccgcgccgccccccgcgcgcccctccctcgccatccatcactcggttctccgccaatgtcgacgcggccccgcgccccagccgcctgcgcaccgccccctcgcgctcgggtttcagcgaggccggcgaggtagccggaggcggccgggcggggacccaggctgcccggccgcagcgctcgccgtgaggacctcggaaaaccacggccctagatcagagggcgcgccacgctccccgaccctcgcgccatctccagcccgcggctgtccttgcaaaccaggcccagcacccttgggaggccgcagggcatgaggcggggcaggacgcccccttaatcccctccacgaatatccaatccaagtagaaaaactgtccttggaggcaaatcccagccctactttccaaccagactgccgaccccaagcttccaccgacgccccctggct

SEQ ID NO: 238240 - DNA, 1890 bp, Homo sapiens
  chr15:93631376-93633266
  hyper
gggagaactgattctacctccgagcaagtctaatacaattacattaataagacgcaatcccgaattgcacccgagcgtcccccacacccgccctcccattgaatacacctgtcccccatgcccgggcttgtaccctgggttgagctgcggcgcgagccggcgctgaatcgtcgccgtgccctcccgtccacttaggaaagccggggcggcttggcaatgggcatcctcggccctcaatccaaggtccgcaccttcccgtacgccggcgcgccgaggcaaagggccgccgggacgcgagcccacgcggtgcactgcgccgacatccccgagggcaggagatggccaggcagctccgcagccgggcgtcgagcgggaggcgggggcccgggcggcgcgggccaatgggggttcacggcgggacagtcgggtggccggctccgtccggggctccgcgagccgggctgagggaaggagctcccagcccgcacacggtgtaagggacgtgtgccgggtctgcccaaccacgcgcgctggcggctgcccgggggagagtattttaggaaaaaagaacaaacaccaaaccacaaaaactttcctgctgccaacagctaaagcgatagaggcgcagcaaagctccaaatgtgggcaagatgggagcaagatgagacgcggggctaaggaagaccaaagcagcgccgtggccccggcatgtgtcggcggcgcctcggagatgtcagagccgggtctgcccggctcccgacccgcgcttaccttggcggctgcatgagcccctgcggcccgcggggggtggcgctggcggggctgcgggagaagagggggtgtcggggcgccgctcgtctgccccggggcaaggtgggaggggctccgctggcgctggtccccgccgccccggccggctcagcagcggcccggggagcgcctcctgctcccgggctgcatgcctgcgagcgcctggcggagccggcccgggagcgaacggccagtgcttccccggcccagcggctcgggcggcgcagccagcgctcgggagacaactgcagagtggggcggccgggaccagccccctccctcgcccggcccccgcccgccgccgagcgcggcgtcgcgaggttcgtttgcgcgccgaggggagggggcgggccgggcgcccgggccgcgggcggggggcgcgcgcgggcggggccggcagggaggggcggggaggagcggggtgcgggctcgcgttgccccgccccgccgcggccccaccctcccgcatcagcaccggctgggtgggtgcggagtgcgccagcggccaagtcaagactccttgaatgctcaggttagggggcgcgggcggcaagtgcggcgactccccggggcgcctccaactttccgaatcgcccgcagggttgcggtggagcgcacggtgtccttcagttaggcggtggtcgaggggagttcctctgagatttctggagaaggcggttacatccaagacaaatgctgttgcgctctgcggagacgcacctttgttctatagagattttgttgttgtttaagaatcttcctgaaaaaactaatacatatgtattacatgctaacacacgcatacattcttgcgtagaattgtacataactcaggagtgtctagagtgaaaagaccgtatcgcactccctcccacggccgcggctctcccacggccgcggctcccccgcggtaaccttcggtcagggtgtgctctgccgcggttctttccagtctctgcgcttttacatgcacacgcacagattgcgagtggaatctcctgggcttttcaaaagaatgttttcaacattaagcgcatgcacacagtggcttgaacacggccacgtcgggagcagtaaatc

SEQ ID NO: 238241 - DNA, 748 bp, Homo sapiens
  chr15:95387988-95388736
  hyper
gtcctttggagtgcgccggccggtgacacccaagaggcgacccctccgcccttccgcttttggagggtgggcggccgggggtgggggtcacagtggccagcgtccccggagggcgccggcttccaggtgcgggtggggctgcgcgccccgccgggcccggagaactttcactgggcgtccgcggcgcgcagacaatgggccggggaagcgccttatcgcggcgcgcaggccttccccgagcgcggcgggaggcggcggcgcttccgcgggcccagggccgccagtcccccgtcccccggtcgcccgccgccccctggccaggccccgccgccgccgcccgctgcttcctcccgctcttcctccctgcgacctcgcggcctcctggcgaggcgcggccggcggaaaagcttggtggggtggccgcggcagcgacacgcgcggccggccccgggaaaacaaaggggggatgtgtgtggccaagagtccggaaatggggcgccggtgggggccggggcggcgcagctctgcctcctggagcctattgtttgccgggtgcacatgcacacgcgcttaacaagaaattaacacatcctgccgccgcttatctatccatcgatggccaaacagacggcgcagtcactttgcacggagagggcttttaatgtaatgaccaggccggagaagaatatctcaagcccttcgtagaagttcctctttgtttccgtacggcccttgataccatttgtga

SEQ ID NO: 238242 - DNA, 236 bp, Homo sapiens; identical to SEQ ID NO: 204044
  chr15:96596585-96596821
  hyper

SEQ ID NO: 238243 - DNA, 94 bp, Homo sapiens
  chr15:96864181-96864275
  hyper
ggttaatggacacccggctcctgacaccttccaggtcagcttggcttgcgaacttccaacgcaggaattggaggattaccggggaaggaatgcg

SEQ ID NO: 238244 - DNA, 1133 bp, Homo sapiens
  chr15:96864557-96865690
  hyper
gaaaaggccaggagcgggaaaaggaagaagaaacgaaaaagattctccccttttcttaccttttgcccctcctttcccctcccgaaatttgcgcctacttgattatttgcagctgtttcgaacctcaaggtttgttcacagtagcgagagagacttgcgcttggagaagtgaaaagccattttcgcgccagggcttcgctgcttgagtttgggggttttgctctccctcccagcaaactcccctcaaagccttgctaacttcgtcaagccctgccagcctttactccttggccacttgggttcgcagtacccagccaagggccccgggcgggtttccatcgctgggggtggcctggtacccccaaagctgagttcccgcctaggagaggacgctgacgtcctggggcttcctcggtgcctgtcacccagccccctgccttcctcctcggcctcagatgtcgtcccacctgcccacgagcagggaacctggaacccactctcccggcagtccccagcgggttccgccacccggcggccgcccctgacaccgagtgggtgggaggaagaggcagctggcggggatgggccattgagacctcttgaaaaatattaaaagacaggatgggtagagatttctccgggagaaagttcgagggtgcatcgggtcgcggctgggaggagtacccgaaatgccagcaggagaaatgcaacctgtttaggccacaccttcaatccccgaggctgtctggagagactgcgtgcgggggacttgccggcgttcccacaccgcgcctgcaatccactcccgcggctgcctggcctctgccactcgcggcttgaagccagtggctctcaagccctcggccccgcggcggcccgcgcagccttcacccggcgccggcaccacgaagcctggccgcagtggactccccgcagctcgctgcgccctggcgtctcccgtcgaggagggagggacggaggcctgagccgggagctccctggcggtggtcgggccgccccccttgaggcctgctcccccctctcggcctcgccaaatccctgaaagcccagtcccccttcgtcaccccgggggcttctaatcactcggtatcgatttccctaactcttttcat

SEQ ID NO: 238245 - DNA, 196 bp, Homo sapiens
  chr15:96874478-96874674
  hyper
gagagcgaggcgcgcgccggacgcccggggcaggcggcggcggcggcggcccagcgccaggacgacgccgcgcagcgcccgacgcggaccactttcatgctgattcccccggacccgggcagcgctccggccactccgcgggccgccggcctccgccccggcctgcctggctccctgggcgcgcccgcacccggcg

SEQ ID NO: 238246 - DNA, 634 bp, Homo sapiens
  chr15:96875062-96875696
  hyper
caacaaagctgagccgagagaaacaaacaaaacaaacacaccgggccagacaagccatcgacaaaactttgcaaaagcaaaaacaaaaaaggaaaaactaaccaacctcaaccaaccagcccccgagccacccggggcgccctcccgcgccctcttgcaccctcgcacacacaaaaggcggcgcgccggagcccgagacccggggagccgccgccgccccgccgccgcccgcagccaggggagcaggaagtccggacgcagcccccatagatatggcaatggtagtcagcacgtggcgcgacccccaggacgaggtgcccggctcacagggcagccaggcctcgcaggcgccgcccgtgcccggcccgccgcccggcgccccgcacacgccacagacgcccggccaagggggcccagccagcacgccagcccagacggcggccggtggccagggcggccctggcggcccgggtagcgacaagcagcagcagcagcaacacatcgagtgcgtggtgtgcggagacaagtcgagcggcaagcactacggccagttcacgtgcgagggctgcaagagcttcttcaagcgcagcgtgcggaggaacctgagctacacgtgccgcgccaaccggaactg

SEQ ID NO: 238247 - DNA, 372 bp, Homo sapiens
  chr15:96876448-96876820
  hyper
aattcgccgagcgccgcgagccgtgctttgccaatggcgcgctcggcgcggggcgcgggctccgggttggggcgagccaacgccggggtttctttgtgtttctgcgagagcgactctcccggtccggagtcagataacagcctgggcccgagcctcgccggctttccccggcccttacaggccctgcccaggctccgctagtgccggccgcctgctccctgcctctcccggcttcctctctctttagccggcctctctctctccgccctctccctccgtctctttctccgagcacactgattagacagacgccagacctccgctctctgcttgtctctcactgggggggttccccgccgggctggggctggg

SEQ ID NO: 238248 - DNA, 884 bp, Homo sapiens
  chr15:96883779-96884663
  hyper
tgggacccagcgagcgcgttctgtgtgaaattgacgagatctttaaaaaagctgctaaacatggcgactctttccctttaagtgtctctttttccttgctgggtttttttttttttttttttttcatctgatctgagctcgctttatttcttttcccaaccccgctccccctcctcctcgtggcgctcgggggtgtgagagaacccagttagacgcgaaatgcaacaatagtgcaaggagagagaggggcgctcgctgcttctcgccactttcaaacaaacctgggggaagattgagcccgggggggattccagcctgctcgctcggctcgcggtcgccctgcctcggcctttcaccattagctctccctgggccgcgaggagctggggctcaaagttagcgggcgacgtccgaggcttagcctctagccggctgcagggacgggggcctggagttggcagctgctacgggaaagtgcctgccccccagcccccgcccccacttacgtgcggcagaattccgccagcgccccgggaaagtccggggtgccgggcgcgcggagctgcactcctgggatgtgcattaagcggcgacaggcggggggggcgagggcgggggcggggggcggtcagggggagctcgagcgtgtgaaactctgcctcgaatctcgcttttgacttggtcctatgagctgagccaacatggcgtctcccactgcaccgcgagcgccgggctgccaggctcggcagggccgggtaatagaaaacacattggttaccaaaaagaaaaaaaggagggcggggggcgctaaaggccattccgtctgcaggcagaaaacccttttttaaactcttgctggcaagtgagtccggtcctcggttctt

SEQ ID NO: 238249 - DNA, 707 bp, Homo sapiens
  chr15:96897393-96898100
  hyper
acacacacacaccccacacacgcactacgagaaggggagtttgatcttgtctcattggcgtctcgggtctgaaaggaaaatcgtttgggtaaacagccaagcttccaggcttaacgcccggctcccgcccccgcccctccatcccctcctgcctcccccactcgccttcaaccccacccgccacccacactcggctccgcagccgggccccgagcgagctccgcgagtcctggcgagagccgagggctccccgggttcaaagggccgcagccccgagggaacgccctccttgctgtgccccggggggcagaagcggactgctgggcggtgggaccggcctgggccacggtaggaaccgcgaaacctccggcttccctaaatagagctggtctcgggggagggcgccggggagttcggagcccggagggacatttttgccaagaccgagcggaagccgagcccgtgcggctggctgcgcctaggagttccgccacgggtccgacggggcaccctgggtccccgcagcccgtcacaggcgtttgcacatttgtgtgcacgaccactggcgggggcgttgagcctctgctagccgcctcgggctccgcacacccttgggtgattacccggcccccacctccctccaagcgacctcggctccaggaaaaggctttaatctgctattaagcgttttccaaagtttctttcca

SEQ ID NO: 238250 - DNA, 754 bp, Homo sapiens
  chr15:96899904-96900658
  hyper
gacatctgcactggccgcagctgaatggccggaaatacacggggcccgaactagtggcttcctaaagaccacgtctcatttatcttctcctttctaggaaagcagctccccagcttgagtgactactttagacttggtgaaattgtgcctatatatttttctccttcttctgttattttcccttcatcccaatgcagccactgtgggatctgtcggtcacagataatggtttttaacccgtcagaagacctgtgcgttgcggcttctctgagggtttcgattacggaaaaagtccgggtgacgtacaattaggctgccgcaggctgggaggcttggcggcgtcattccagtttctgcagcgaggtggcgctccaaggtacggcagcgcgcccgggttttcgccaccgagcgcatccgccgccgcgtccacgcagcgaggcagcggccaccgagcaatgttaactcggggttcctaaagcctctgagcggaaaatcgggagcgctcagacccacctaggcggagcggtccgcagggtgggcgaaggcctgaggccacgactggggaaggctggcggcggcggggagcgctgtgatggcgagttccggagcacactccgcgcgccgccgctcgggggaaatcttcgaaattcccgggcggggcggaggctggggctgcaggtccccaggcacggcgagcggcgcgctggagtcagcctcggcccaggcacaccgagcaagcgcccaatccaccaca

SEQ ID NO: 238251 - DNA, 133 bp, Homo sapiens; identical to SEQ ID NO: 204051
  chr15:96903477-96903610
  hyper

SEQ ID NO: 238252 - DNA, 605 bp, Homo sapiens
  chr15:96911212-96911817
  hyper
aggggacagcaatgcgtttcaaaaaaaagttgcgttcctggccagcagttgcctaagctcctcctggagtcactggttgcctgctagatagagctgccccaaggggatggggacacagggctggttgggtcctcgggtggggctcgaggaacctgctttcaggtgaattcgttccgggcgttcggtgtccctgggcttgcctaggggtactggggacccttagtgggccagaacccgaagctgaacgtgaataagggacagggtaggacctgaaattgcagagacatagaaaatcaatacgtggtcgggagtcaactgcgcgcgaccaagggctctgccctccctctctccgttgatttggacgctgggaagctgcccgccgtccttccccaccccctttgcccagccttggcaagacctctccggaaacatactcgcgttaaggaactgggaaagcttcctggcccggagctaggagcccgacgttggggctccttgctgagtgagacgctcagtcctgtgctccccgccccgccccaggcgcccagtcccgctgggatccatctcctcagccccggtttcccgctctgcgagcgggggaagaa

SEQ ID NO: 238253 - DNA, 1181 bp, Homo sapiens
  chr15:96952092-96953273
  hyper
caggaggaggccaagccagacgtccagctcaggggcacttggccatgctgaggactgcgcacctgggccacgtggtccgtgggacaccctggagctcgggatccctttgcaagggttggggagagataatgaaacccgcatttgcgcgctccccaacccgggccatctgattagtcatctgagttagcccttcacgtgcacacgtgggacagaaaaactccaacagatcttcatgtttcagttccaggtttatgaaaataataataggatgggtttggctaattaggaaaatggtttgaaccagttacatcaccagcccagtgaaaagccgccgggatgccggctgacgtgaccttggtatcagtcttctatttcacttatcccttgtgttgctctcggtcaggcccccctccaattaaaaaagaagaagaagaaaaaggacaagtgcaaataggcgcctctcgttttgaggaacgcgcctgagcagcacgtgtgtacgcagccccagaggcccagaactttctcccgcaaccgcgccccggaccgcagtaatcccggcggggcagggccggggagctggggacggggtggtctttagggtggcggcttcccccgaccccggacccgggaaccggccgccggcgcggggcgcgatctgcactgccggtcccacaggagttaaaccccgaggcagacaaaagggaggccgccgcggctcctttgctcggctgtcagttgaaaagagaaccgccgccctctggacttcaactcccgacggaaaaggcattttattatgggttatgacaagttgcagagagacgcggacaactcagtaagaaggagcggcgagcggaatcaaaaatgctcgagatgtttgcaagacagagcgaacacggcttcaaatgacaggtgttagcaggactccagacgggatctgcgggatcggccgggtgggagccgcaccgcacggcgccgggtcggggagagaacccggcctggggaggccgcggggtgcccccgccgcgccgcccaccagccccgcgcggcccggagccgaccccgcctcctcttccgaaagtcctaagtcaggacagcggcagatcgtcccagaaaatcagcgccaactccctctgctcaaatttgctactttgtgttttagttccaggcgggaagtctacact

SEQ ID NO: 238254 - DNA, 1753 bp, Homo sapiens
  chr15:96959376-96961129
  hyper
gcctttcctcttgtcgctctcgctttattacattagcgcgggcttccccgcgccggcgtgggctcagaagccgaggcgccgggtcacccatgacaaatgtccccgtgtctcgccaacaggccccgcctggccctgccactccatctgcccaacaggaccccggagagtgcttgcgggtgtcagtttcaggtaaagagctctcgaaagcgcaaagtctccaaaaaggttacaagggttccagcgcctccccaagtcacggaagcctgggccgccgctgcagcaggaagggttcgtacccggggggaggggaccaccccaagcgcgtgtgttaacgaaccccaagcgaatttcggggcttgaaagcgctaccggggcagccagattactacctcccactctcacctccatccctccccgccccttgcccgtcccacgggcctcagatttgggcgtagggctgggtagggcgcctgggaggagccagagggggcggatcaggccgggatttggcgccaggtacccccacccgcccgcgtcccggggtcgccagctgactccatgtgagcccacttggcaccggccccccgagggatcctgcgacgcgaggggtgcccatttgcagtgatccgcggactctcgaaccctaaaccccggggcccagctctgccccggcgtggatcttcgggaaaccggagcggaggctcgtggagacctgggaggagctgcgctgactggggcaggggacgcccagattggatcggttccgagctctcgtcgcccccgaggagggcacgacgcgctgacaaacgtggccgtcaacacctcgagctgccccggcgagttatttcaacagactgggagagagccgtactatttgagtggcaggcgacgcctttccccactctcggtatttatgttgcaccgacggcacttaggagagcttagttttagatgcggcattaatcttcacttgttaagagatagtctgtcagcctttaccaggctctcccactcccgacgtgcaaggccctcccccagcgcgcggccacccccaagctggtcctcgcaaaggcgcgcggagccgcactgccgaggagaggagcccggggttaaactggggcaaggcgagcgagccgcggacgccaggcgcgagcgcaaggttaaagtcaaaagctctgcctgggccagcactcaagacggtcctggcaccaacgcctttcatttttgcctgtttgcaagcggggaaagtggagtcctcaatcatagcgaggagcttttcttaagccacaaagcacacgggcgcaaacatcctcgctgctaactcagggcaattgtcttcctattttctcgttcctgacccccaagtttcaccggtgggaagtcatcgaagatctcccttttaccaccagctctacggggtcgcttttctcttaagcgccctgtgagggtcctcccttttaaattatttcctgcccagttatttttcccccaattaatccagaatagttttctcatctgctccagatgcacgcaaactgcagagctgaaatgaactgaactaagagcggaattgaaatacaccaggggtttccctgcaggaattgttccaacgaggtatccacgggtttcaagatccgttgaaatgcttcaggtgtggtttgcattctcaccgaccctcgggccagttccctcgcccccaaccgccgttatttgttccccccacctacttcaatagttgcgcctcacccttcct

SEQ ID NO: 238255 - DNA, 341 bp, Homo sapiens
  chr15:97491101-97491442
  hyper
tggagatttctttaatttagcgaagactgcttcccgggctccgcctggcccgcgccggcccgcgtcctcggtggtctgggcgccccggctgagccgctagcgggtcactcgggcggctccgacgtctctatcagccgcgcccgcgccgcccgcctccccgcgctgctgcccggctctcgggctctcgctttttttttttttttttctttccgcggcagtcttaggattcttgtcacatgatggcttcatcgggcccttctcctcctgatcctttcaagctctttctcctgcctggcatatcaaaggagatttgtgggtcaccgagccgggacgcagcatat

SEQ ID NO: 238256 - DNA, 402 bp, Homo sapiens
  chr15:98503355-98503757
  hyper
cattcattaaagtcccgatgcggccggcccccaagatctcaaaaggaaatattgccgagttccgtttcccagagcatctatttcccctcgagtattgcagatgtaatcataaacacaagccagttacagccacaacttcatgctttagcgagaacccagtggctcctgcaaagtccttacgctgctagaaaccccgcccccgttcgtaactatgggaacggctgacacgctgagagccggagataaccctgttccgccccctccctgacagatactgtttcccactgtctgtccacatgggcgcaccgcctcactattggccagggctccaggactgtgcctggcctcagccagtaaacggcctgtgcacgtgcacgccggagcctcccgattggccaacac

SEQ ID NO: 238257 - DNA, 791 bp, Homo sapiens
  chr15:98503997-98504788
  hyper
gccgcgagcgcctgtgacagcggcgccgctgtgctcgcgaccccggctccgggcctctgccgacctcaggggcaggaaagagtcgcccggcgggatgggcggggaggctgggtgcgcggcggccgtgggtgccgagggccgcgtgaagagcctgggtctggtgttcgaggacgagcgcaagggctgctattccagcggcgagacagtggccgggcacgtgctgctggaggcgtccgagccggtggccctgcgcgcgctgcgcctggaggcccaggggcgcgccaccgccgcctggggcccgagcacctgcccccgcgcctcggccagcaccgcggccctggctgtcttctcggaggtggagtacctgaacgtgcgcctcagcctgcgggagcccccggccggtaagcgcaggcgagcgcctggggttcccccgccaggctgcggggccggggaggggctgggaggccgcgcaccctcgggatgcccacctggcaggtgagatcagggcgggcttccgggggtggggtccggcctaccctcgcgggtaaggagagaccgcaagtcctgggtgcgcagctcttcctggcgccccgcccctggcccgccgggcctgaccgggaccagtggctcgggattttctaggaccgcgacgggagggggccattgggtgcggtgggaacctgtgattggacaatgggggatccagaaatctaggtcctgttccttctggtccaagaaagggacggtggaaccggcggctatgaggttccattctgcggtgcccgtgtcct

SEQ ID NO: 238258 - DNA, 62 bp, Homo sapiens
  chr15:98836083-98836145
  hyper
caggggttccaaatggcaggcgtcctctcccctctgtcccacaaagaacagtccgtcccctg

SEQ ID NO: 238259 - DNA, 99 bp, Homo sapiens
  chr15:98965275-98965374
  hyper
ctagtgggacccccggtgcgccgccgccgatggggtcttagggcctgtctgtctgggctagagccggcccgggagcctgtttgcggggagtgcgggtca

SEQ ID NO: 238260 - DNA, 123 bp, Homo sapiens
  chr15:98971414-98971537
  hyper
agaagaagaaaagacacgcgagcccctttgaagaataaatctcagctgtgttatctgtcttgtcacagcactgaaacgtggggatggggagaacgtagttccacgttggcacagatgagctgt

SEQ ID NO: 238261 - DNA, 34 bp, Homo sapiens
  chr15:98971897-98971931
  hyper
ggggctcactgctgcaacccgggtctcagtcttc

SEQ ID NO: 238262 - DNA, 1308 bp, Homo sapiens
  chr15:99090780-99092088
  hyper
ggtatagccaatagcgtcatattcagccctgtttaattcccactgtcttgggtctagaatttaggcttttgagaaatctttattgaattaatgaaaactcaaagaccacgattctgcattcccccaaatcctgaagtgcagtaggagcccatgcagggcttgggacgggctttttgcctcagcagccaggacagcctctgcatccgtgaccacctccccgcccccctcgcattcccccccatcccctggtgatatccttctagcgcaggctcgtgctctggaggcggggtggggccgggattctgcagctgtaaccaactcccccgctgggggcatggggctggtccctggggcgcacagagaagttgtgacagataattgacgtgatcgggaggggcgtccaggcagacctcatgtgacttctaaaaccaacccacaaatctgaagcgtggcttgcgtggtcagccgcctgcctggcacccggtgaacagtttctcccggactctctgcatctagccccaaagaatctaagattctttgtctagaaaagtgccctggtcttccctggcacccttcgcggtgggtttccttgactccgcataaactcccgttccagcccaaatcagaggcggtcgcagcagccgttcctcgtctccatcagcatccgcgttgccatttccccgtcctgagctgttgctcatatcaaatgtcactcggggatgactaagagccgatgttgatgaggagccttcagcgttacggtaaaggagctcgtgcaaacttagaccccagtcatctgacggtcacgtgggcgggcgtcgcggcccaggcccccgcctcctccgtcctccgcgattcggacatgacacggtcctccgcgaagggcaggcgttacataaacccggcgagctcacaccgtgcggcggggagcagcgcgaacgctcgacccggacacctcccttccaggtcccgttccgtaggcggggccgctcccgaggcacaaggaggcctgcgcggcgcccgaggtgtccggatcccaaaacaggaccccaggagtttctcacactcaggactggcccctagttgtcaatccagaaaaggcatcctccgtcctagatccagcctgtatttcacggaaagcgtttcctcccccatccccaaagccggcaggggtggggcggagaggggaggcccggggagactgactctattatataaacttgtaattggctccggttcctgcggctcgggcggcactgcaggacgtttccaaccagatgggttgtgaggccccgcggcttcctcctc

SEQ ID NO: 238263 - DNA, 115 bp, Homo sapiens
  chr15:99191216-99191331
  hyper
aatgccgcatgcacgcatttatttattttgcaacagctgcaagaaacaatgaagcttttcaagaaccggggaaacgcgctttccagccgcgctgttgttgttttcaatgaacctc

SEQ ID NO: 238264 - DNA, 44 bp, Homo sapiens
  chr15:99192792-99192836
  hyper
tcatcccaaataaaaggaatgaagtctggctccggaggagggtc

SEQ ID NO: 238265 - DNA, 1125 bp, Homo sapiens
  chr15:99193436-99194561
  hyper
ctgcggagaggccccgaagccccaggacacgtctccaagcgcccgtcgctgcctcccgtcgcccaacgtgcttttgcccctcgggctcctcgggttcctggccttgcccgtcactttggcccgctcctcgttgggttacctgcccccggcgtcccggggctgggcggtggggtgaggggaagcgctctctgggcagccccccgggaagtgcgaggccgggagtcttcctcagcttgtctcttccggggagcgccactgggtccccagttcagagggctctgggatggtctcccagtttctcccgggccgggggatggaggggtactagggccgcatccgagtgtgcgttggtgggtgtgtggtcggagccgacgtgcattccgacacacgtgctcgcagcgcggggtgtagtcgccgcctcacggggacacctagacgcccgtccctggcgagaggtgtcgtacgctgtggtttcagcgccagggtctgcggcggcgcggggagggtgttgtgttttgcgagcgcggagccctggccttggttttgttgtggtcggcgtcgtgtcgccctctcttctgccgccccgcacttcctttgtacgtagttaataagcagtgtcgctccacattcgctgtcttttgcaatctgatagcttttgttttggtggtgtcgggtgggggttagtagggaagcgcggggatgcggggagcgagaactccccccggtgtctacggccggaggaggtgggggttttattcttctgaaaaagttgaaagtgtggcttactggtacattcaagatggtagggtaatttgaacacgattaaaagtttaaatgtcgcagaactgggactgggaacggtgagggcgtgttggtgagtaatggttgccgagggtatgcaggtggtgccgattaactttgaaaaaatcacgactgagccttcacgagtgaggcggggaaggaggaggcagcggaggttgtatggccccatcaccggggcaattcagaaaggctgtttctataaacaaatccttaaacgtctggtaagaaatgagtccgcgacggaacgagagcagatcgtggttcgcgtgtttactgccgagtgggacgcggactggggccgga

SEQ ID NO: 238266 - DNA, 52 bp, Homo sapiens
  chr15:99791471-99791523
  hyper
ccaatacacagatcgcttggcaaacgagcattttcccgcgcctatcgtgaaa

SEQ ID NO: 238267 - DNA, 32 bp, Homo sapiens
  chr15:100346202-100346234
  hyper
cagccctttcccaggcggtagcggggacggtg

SEQ ID NO: 238268 - DNA, 124 bp, Homo sapiens
  chr15:100881161-100881285
  hyper
cgccccacccccaccctccacggcgaccactctgcgtcgcaacagaccggacgggccgacccggaggtggcgcgggcagtaccaggccgccggcggcgccgcaggcgctgagcgagacgaggga

SEQ ID NO: 238269 - DNA, 561 bp, Homo sapiens
  chr15:100889932-100890493
  hyper
tgagaccctcttcacgctggttgcaggagtagccaaccccgctccctggcagcccgtgagatgccacatcccctccagcagggggcggccggcatcggtcccgtcttcctaaaccggcgttggtgggaaatgccggcaccagctccctccccgctccagagccctgttttccccatttgtatttcactactttcctgttgagcttggattccagcctcaaattccgcgatttggccggcatcctaatccccgagtgactcttgccaaccactctctgtggggcctgtgtgcttcctcctgggttctggggcgctggcggcgtccgcttcaccgggaacgggagccccagcctcccgaggccttcctgcctggctctgggaatggccactgtccagaaagccccgcggccgtccatgctcgctcgctcagtcaggcccttgtggggatattgcagaacgagtccgagttactatccctttaaatacaggcgtttcggcctagctgccgccggtccaatccgcagcgcttccgtgccccactttcccgcgtcagcctggctcc

SEQ ID NO: 238270 - DNA, 619 bp, Homo sapiens
  chr15:100913418-100914037
  hyper
tctctcccagggcacccctccgacccccgctgcgaggggtttcccgcgggaggtggacgaagcgtgggccaggacaggcgcctggcactggggtttcagagccgcgagtaggccctgaaggccgggagggaccgccagtccccactggaagccgcttccgtgcagcccgggacaggtgcgcggcgcccctcgccttcgcctccgcttctgctcttcccctcgcggccccgcgcgcccgcgccctccgcccagaccccggtgcagcccggccaggcgcggcggcggcggcgtctccagcgagggaaggtcgtcctcacgcgctccggcctcagggcgcctctccgcccggcctcgcagccttcccgtcctgcccacggccgaggccgcggctgtcggggtggcctggacgggtgcagggctgggcgggggcggcaggacttgaaccggcgcctgctctcgcggaggcagcagcagagctcacccctttctcgggaaatggtttatcgtggataaaacgcagtccccaaagcgaaggtccgacgggcggccagacgcaccccggggaccttcaggtggacacacggggcctccgcgcgccgagccgcgagggaagaggggc

SEQ ID NO: 238271 - DNA, 246 bp, Homo sapiens
  chr15:101142345-101142591
  hyper
actctcttcacaccgccatttgagggaacacaaatgcccgctctgggccaccgtagttcacagaaagtacaagctggcacctcctcccgcatgcgcagagaccgccttcggcgaatagtgtctcttagcaacggctttgagtccctccgccaggggcggagcctcggaagccaccacggggaagctgtaaggggaagtgagtgagaccaatcggagacgaatctctgccccgttcggcacgcctcc

SEQ ID NO: 238272 - DNA, 32 bp, Homo sapiens
  chr15:101419279-101419311
  hyper
gtcagaggcccagcggcgccagggctcctcgg

SEQ ID NO: 238273 - DNA, 270 bp, Homo sapiens
  chr15:101419539-101419809
  hyper
ccccgacccgggcgcggcgcagggcccggcggagagcgcgcattcccgagcgccgcgagccggccgaagtcgggcgagcgcgccgtgcggcggctgggagtgggctgcatgtgccgcgcggggagcccgcccgacttcggggaggcagcggggcgccgtggccccgcggctcagctccctgccgggtcgggtgtcccagccctgcgacttccggggcccggcggctcctcggggagctcgtccacaggcagcctccggggcgagagagcg

SEQ ID NO: 238274 - DNA, 1031 bp, Homo sapiens
  chr15:101420039-101421070
  hyper
ggctgcgcagtgtccgggccgagccggtgcgccgcagactagggcgcctcgggccagggagcgcggaggagccatggccaccgctaacggggccgtggaaaacgggcagccggacaggaagccgccggccctgccgcgccccatccgcaacctggaggtcaagttcaccaaggtgaggcgggcgcccctcccacccgacggccgcgggcccctgcgctgggcagccagactcggggcggcgggggcgagggagcagcgggccgggggtccgccgggcgccgccgagacccgagcctccctgcccgggcgcggctctccagaaaccgcacctttcgcgggacgtctcgggcgggatcgcaggcggcggggctcggcgctgtgagcctcgaagccgggaaaccgaggccgtccagcgcccgcgcggggccgggccgcccgcatccctgcgaggccccgacgtgtccctgcgctgcccgctttgatcgcgagtggaggtgcgcgccgcgttgactcggagcgcgctggttttggggagctccctccccaaaaacccctgcgatgatttccagggtggacgagtctggctttgagagggtcggagggtccgagagcgccaagagagagtccgggaggcagatggcggagctgcagttggaagactggggaagcgggtcctccgagcaaagcgcagcgggcgccttccgtgcttagtttatacccggctcagcagcagaacgaggaggagtaggaaggtgctcgcttactgacgaaacctccccggagcccagaggtcccggtgtttacacacaaggcgcgcgctccggaaggtcgcagacctgggcctttgggaagcggtgggtcgcgaggccgcagaagcgcacggttctctgcctcctcgctctgtgggctgggaggctacagcgttggcagaacggcgagattacctgcccggggcagaaaggaataaaagaagatggtgaggcctccgaggcctctgagctggggctgaggagggccgagagacccgggtc

SEQ ID NO: 238275 - DNA, 216 bp, Homo sapiens
  chr15:101458274-101458490
  hyper
atcttcacctgccgcgtcccctccagcgtctgcccgggccctgggcctgcgctccctcgcggtggcgccaggtggcggggctgcgcgccctggaggagctgcaccgccgtcgcggggctctctcagcactgaggacaccacgccctgcaaattgttgggaacttgtcggtggcaatcacactgctggctcctgcaaactggtgtgaggccctcagg

SEQ ID NO: 238276 - DNA, 128 bp, Homo sapiens
  chr15:101458670-101458798
  hyper
tgccccggttctgtgaaatggcagtgagggtgggggagatgtgcgctaaatcctgggaacgtgcgagtcataactttccaggagaggggcccagggcgctggtcctgcagggcgtggaaccctctgct

SEQ ID NO: 238277 - DNA, 109 bp, Homo sapiens
  chr15:101460290-101460399
  hyper
tacaggggaccttcctggcaggcagggacgcgggaaggaagcctaggaaggccggggtcagcgaggagacgctggtggagaatctgagaacccccgtggccatctcaac

SEQ ID NO: 238278 - DNA, 433 bp, Homo sapiens
  chr15:101513643-101514076
  hyper
gcgtggctgagacccgcggctctctcgccaaagcccctgcgcctccgctgctgtcggcgaggtcggcccggccgctcccccgcgggccgctgtccccggtgccctggaagggctccaggtggcggtctcgctgcagaatcctccgagctgcgctcgccgcccggtgccttcgcagcggccccggttgggttgcgggtcgcggggcggcgagcgcagggagcgtcgcggggccacccctctctcttcctgaagcccccgcgatcgtgcaacgggccgcgccgcctcctgctgtgttccacggtgattctcaagagcacgcgggcagtgggcggtgacgccgtgtgtgtgtgcttcctcccgcgcaggtgccggggacacgggcggcaagccgtccacgcggggcggtgaccctgcagcgcggtcccgcaggacg

SEQ ID NO: 238279 - DNA, 92 bp, Homo sapiens
  chr15:101835856-101835948
  hyper
ccgggctaggtggcccgcctggggcaggtcgccgggacaaccccaccgccccgcaagtccagcccggcctcgggcacggtagggtttgcggt

SEQ ID NO: 238280 - DNA, 1392 bp, Homo sapiens
  chr15:102028777-102030169
  hyper
ttccgacaacccagcggtgtagacattgccactgactgcaaaggagcttgtcaggggagcgacttgccaaaggtcacaccgctcggccatcagaaccgcggcagaagcccccacacaaagcgccctccctccgctcctggagaggttttaaacccaggacccccggccctgcgctgtcccaaggcctctccgacggcggccgggctccagggtgcaggctcccggccatctacccccgggagccgcggacaccgagggagcgcgagtccccgagacgccgggccacgctcatgtcacccaagcagcggccgcggccgccttggcgcgcgcaccgggtccggagctcgcgccgcccgtcgagggcagaggggccgctcccccgcgggggagagccgggtgggcgcccaggacccagcggcggacggcgcgcgacgcctgaggcagcccagactcccccggagcccggcaggtgtccgcgccgccccggcttctgaggccacacttccgagcgcggggttgggcggcactgccgggggacttgcggtcggcgcgccggacctgcgtgggcgcccacgcgggaccccagtcccccccaccccgccgagtgtcccgcgcgcgcccccccgggcgacacccccccccgcagggcgccccggccgcccgccgtccccaagcggtcccggagccttcccacgcgcgcgcggggccggggccgggcggacaggactgcggaggcgcccccctcgcgcgcgccggaggccgccgggaaagttttgggcgcgcggggccggccgcactcacctggcccaagttgaggtacccgtgcgccgccgccacgcggtccgcctcggccgggccgcccagcacttgcaccgcccagtggttggtgtagacggggcgcggcgggggcggagcaggcggcaggcagcgccagcagcagcagccagcgccagggacgcggcgcgagcggccggaacccgggcccgccggcgccccccgcgccccccgcgccccccgcgcccgcggcggtgtcggtggcggcggcggcccggggcggcggccggggcccgggcgcaggcggcgcgcgcggaggcatagcggcgacaggctcgcgcggcgcccgagctgcgagtgcgccggggggtggagtgccgccttttaaagccgctccgcgccggggaagcgccgccgccgccgccaccgccgccgccaacaccgccgcgggcgggagccggggaggaggaggcggccgcggcgcgttcccgcccccgggcccgcgctcctgcgaccgggctccggggccgagagccgtccgggaggcccgaaacgccccccaccgggggaacttccccgccgacttctggggctctcgggacgcggtgccgccccaga

SEQ ID NO: 238281 - DNA, 66 bp, Homo sapiens; identical to SEQ ID NO: 204073
  chr16:103517-103583
  hyper

SEQ ID NO: 238282 - DNA, 46 bp, Homo sapiens
  chr16:122248-122294
  hyper
gctatttttgcggcgcgccgggctaggaatccggggctgggccgcc

SEQ ID NO: 238283 - DNA, 180 bp, Homo sapiens
  chr16:215172-215352
  hyper
cccaggacaggctgcggcccctcccctgcccttcaccctcccacagttcctgccctgactccaataaatggatgaggacggagcgatctgggctctgtgttctcagtattggagggaaggaggggagaagctgagtgatgggtccgggggcttcgcaggaactcggtcgtccccactgtc

SEQ ID NO: 238284 - DNA, 151 bp, Homo sapiens
  chr16:215712-215863
  hyper
tggcagagcagtaactttacccgaggggagtaaacagatgcccctaaagtctgcagtaaaggtgcccacgcgcaacggcgtgggtcaatgccagaaaccctgggatcccggaggtcgaggcctccacacagacgggaacccgggctggtta

SEQ ID NO: 238285 - DNA, 255 bp, Homo sapiens
  chr16:216523-216778
  hyper
gctctgggggtccctagcggggcagaccccgtctcaccggccccttctcctgcagctgctaatccagtgtttccacgtcgtgctggcctcccacctgcaggacgagttcaccgtgcaaatgcaagcggcgtgggacaagttcctgactggtgtggccgtggtgctgaccgaaaaataccgctgagccctgtgctgcgcaggccttggtctgtgcctgtcaataaacagaggcccgaaccatctgcccctgcctgt

SEQ ID NO: 238286 - DNA, 176 bp, Homo sapiens
  chr16:230326-230502
  hyper
tgtcggagattgagcgcgcgcggtcccgggatctccgacgaggccctggacccccgggcggcgaagctgcggcgcggcgccccctggaggccgcgggacccctggccggtccgcgcaggcgcagcggggtcgcagggcgcggcgggttccagcgcggggatggcgctgtccgcgga

SEQ ID NO: 238287 - DNA, 126 bp, Homo sapiens
  chr16:231282-231408
  hyper
gcgcgcctctttccacctccagcaggtttggggcctcggccatgggggcaccgaactgcgtgcagcctgaccctcccgaatggggtggtaggtgagggccgcgggacgccccgggcggcgggctgc

SEQ ID NO: 238288 - DNA, 61 bp, Homo sapiens
  chr16:325216-325277
  hyper
aggaaaacccaggcctaggccaccagcccagtgaccccagggcccagtgggaggcagggcg

SEQ ID NO: 238289 - DNA, 35 bp, Homo sapiens
  chr16:330455-330490
  hyper
gggcgacccgggtgccggcccgtgcgggcgacacg

SEQ ID NO: 238290 - DNA, 83 bp, Homo sapiens; identical to SEQ ID NO: 204074
  chr16:475426-475509
  hyper

SEQ ID NO: 238291 - DNA, 112 bp, Homo sapiens
  chr16:577428-577540
  hyper
cggctgcaggccccgcccctccgtgcccctcgcaaggccctctgggagttgtagttccagctcctcctcgggccgccccactccctgataatcctggagcgcggcgcctccc

SEQ ID NO: 238292 - DNA, 37 bp, Homo sapiens; identical to SEQ ID NO: 204076
  chr16:619792-619829
  hyper

SEQ ID NO: 238293 - DNA, 294 bp, Homo sapiens
  chr16:698981-699275
  hyper
gtggagcaggggcctctggacggcgagagagcggcagggtgaggcccggccgtccgtggcatggccaggcctcagcgcgacctcgcctcgctgcttgcatgcggcgggagccccggccggccgaggcgctgacaggtgggcgcggcggaggatccgcaaccggcgcgggcttcgaagccggtcgggctaacagggggctgccttgggaggcccgcggggcaaagggcagcgggattcgcggctggagcaaccctggaggccgctgacgtgagcggggtactcccaccggggagg

SEQ ID NO: 238294 - DNA, 276 bp, Homo sapiens
  chr16:725376-725652
  hyper
catcctcacaggcctgagcccgggaaggctgtgagagggcgaacggtcttgcatggggggttttaggtgccccccatccccgtgactccatttaccagcggctgccgtggaggtagtccagtgtgctggagctgcgccagagcgggggtgggggccggcgctgagacgcggtgctagctggaggcggttcctgtccggggtgtgcgtccgcgtgcagggtgcgcgcgtgtcttggccgcgcgtggcggcgtgtgcggcaggggcgggcaggcgggc

SEQ ID NO: 238295 - DNA, 105 bp, Homo sapiens
  chr16:750434-750539
  hyper
gggccggctggggtcggcacatgattcgacctcacggccgcccttaggggtggaggggtcgctacctcaggtttggggaaggaacacgaggctctgaggagcgaa

SEQ ID NO: 238296 - DNA, 719 bp, Homo sapiens
  chr16:750612-751331
  hyper
tcgcaggatgccggcgcccgaggcggcagcaccaggcccacgggcgccccagtctaaatatcctccgtgcccctagagcggggaccctcgctccccagacccggaagcgccgccttccccgccagggacgcctgggcctccgcagaccccgccggccggcgcgccacccgcgccagcaccatggacagcggccgccccagccgcgcgctcagggccaggcccgggctggcttccaccgcggacggctgcggggtcggggcagccccgcaatcccaaatcccggcagcccccgctcagcagggaggggccccgggggcgaagagtgggggagaagccgggaaggatccggaggaggcggcgggggcggcgccaggggaggaataatcccggcgcagtgccgatttaggttgaaaacgctcccagtcatgggcctgcacgtggagcgccggggctgggggaggcattcgcggggctcctttcccgccccgctcgggagctcacgtttgccggcgcccacagtcccgtccccacctccaggcctcagggtcgagatggagaaaccaagccgcactttgagagcccacaggagggaggggacaggctgaggagcggccgtctgggtatgggtccggggcctggcttccctcatccacacccgcagcgctgccagaaggcgctgctctgcctgtggtcagccctcgacccgtgtgcttggtggg

SEQ ID NO: 238297 - DNA, 104 bp, Homo sapiens; identical to SEQ ID NO: 204078
  chr16:755704-755808
  hyper

SEQ ID NO: 238298 - DNA, 150 bp, Homo sapiens
  chr16:778216-778366
  hyper
acggcgaggagctgcgggtgagcgcgcgctcccgggaggggcggggagggcgccccgggtccacccgccctcacaggtccgcctgctcctccgccgcagttcggggccatccacgtgcgttgcctcctgacgcccggccacaccgccggc

SEQ ID NO: 238299 - DNA, 428 bp, Homo sapiens
  chr16:1030251-1030679
  hyper
atgcaaagcagcaagggccccggggtctgcggacgggggcgggcggccgctgggggcaccagctctcggccgggccagaacagggggtaggaggcgcgtcctgtgcggtcggtggcggccccaggtgggtgcggtgcgctggcaggaagcggcagcacgacccccgactttgcatctggacttttctagtaacggaccagctccttctgccgaccgggccggggagaccgcgtggctcagtggctgcagcggccaccggcccgggcgtgggggctttgagggcaccggcgcggtaggtcacccgggtttcgcgggccgcaagctcggagacgcgcgtgtcccgcgttggctgcctgacccggaatggcgcagccccttcgcctccagcgcgctggttgaaaggatccgagccaccctcggggacggcc

SEQ ID NO: 238300 - DNA, 89 bp, Homo sapiens
  chr16:1203767-1203856
  hyper
gtccgggtgcccctgggcgcgccgccccctggccctgcggcgttggtgggggcgtccccggagagccccggggcgccgggacgcgaggc

SEQ ID NO: 238301 - DNA, 44 bp, Homo sapiens
  chr16:1204276-1204320
  hyper
agaaggtggaagcgaagcggtgaggcccccgcgggcttggaggg

SEQ ID NO: 238302 - DNA, 226 bp, Homo sapiens
  chr16:1359098-1359324
  hyper
tgtccccgcctaccgccccgaactggccaattgcaaggggtttcacagggcgctgaactcgcgggagcgtcaccgtcctgcgacgcttcagaggatccttaggcctcagtggtctttgacccccggccccaggacctgaccccaaggaaacctccgggacctgtggctggagaggtgaccgccaggcatccggggagcctttggagatctcggcttcctttttccc

SEQ ID NO: 238303 - DNA, 202 bp, Homo sapiens
  chr16:1382486-1382688
  hyper
ggccgctgcgccctcggcaagtctgagagcctcaggcccccgacaggaccatgcttagcacggacttctcaaagtgtggtccctggactggcggcagcagactggagctgggaagtgcaggcgctggctggcgtggggaccacacctgtgatctcagcgccttaggaggccggggaagggggatcccttgagcctgggagtt

SEQ ID NO: 238304 - DNA, 322 bp, Homo sapiens
  chr16:1382868-1383190
  hyper
tttttgagagctttttcgagactctgtctgaaaaaaaaagggaaaaaacgcagatcgcgcccccacccagacttcgggaccagcgggttggggacaggacccatcaatgccttaacaaaccctgcaggagaccgcgggcccgctggggttccaggacagcgcagcggaggaagagcggggagccacccgggaggggctggcggggtccagtgcagaccccaggggctccgggggctctggccggctgtgaccccacaagcgccaactgggccctcaccagagccccagggacgatcgccccacagaccgtccgcgtgggcgt

SEQ ID NO: 238305 - DNA, 42 bp, Homo sapiens
  chr16:1402306-1402348
  hyper
ggtgagtgaggagcgctgttggccggcgcgggggtggccgcg

SEQ ID NO: 238306 - DNA, 426 bp, Homo sapiens
  chr16:1661890-1662316
  hyper
accaagtgcccagcgccgctcggctacgctaacgtagcgcagaagcacatactccacccaggaaagggtgcgcttaactgcctcagacgtgcttccacacttctcagaactcaggttcgcgcccgattccacactccgagctaccacgccgttttcttctcacgtatccgtcaacactgctgcggccaatcacagcacgggccctggcctattggctgtctgtccaccaatccaaagagacgcacagtccgcaaggtcgcgaggctggcgtcacaacactactggcgccgcgggctcgcccccgacgcccaccgggctcgtacgtgcgagcgcgcccgcccagcgctagccaatgggagcgccgttttggggagacgggcccgaagaaacattgggggtgctcgcccccgcgttcgtcgccccgcc

SEQ ID NO: 238307 - DNA, 121 bp, Homo sapiens; identical to SEQ ID NO: 204082
  chr16:1663980-1664101
  hyper

SEQ ID NO: 238308 - DNA, 188 bp, Homo sapiens
  chr16:1832740-1832928
  hyper
gacaaagctcgcgcgcacattggacccgggtgggaggtggtaccgcaggccgcgttgaccggaaagtaggtccgtgtcatcgtctgcgccggaacctgcgggaccggatcgagagctcctccggcaagctgattggctgggacagcaggattaggcctgtcaagaagagccacgggcgggcacgcact

SEQ ID NO: 238309 - DNA, 65 bp, Homo sapiens; identical to SEQ ID NO: 204083
  chr16:1875917-1875982
  hyper

SEQ ID NO: 238310 - DNA, 212 bp, Homo sapiens
  chr16:1877136-1877348
  hyper
ctgcgggggacagcgttccgaggcagttggtcctctccgggatgccgtaggcatcagctgaccggcccagcccacgtgactacaggggcacttgatgggaatcatggcagcatccaggccattgtcccgcttctgggagtggggaaagaacatcgtctgcgtggggaggaactacgcggaccacgtcagggagatgcgcagcgcggtgttga

SEQ ID NO: 238311 - DNA, 112 bp, Homo sapiens
  chr16:1877591-1877703
  hyper
tggcgaagagcttcacggcgtcctgcccggtcagcgcgttcgtgcccaaggagaagatccctgaccctcacaagctgaagctctggctcaaggtcaacggcgaactcagaca

SEQ ID NO: 238312 - DNA, 519 bp, Homo sapiens
  chr16:1967767-1968286
  hyper
ggcccccacagggcggtcccaaccccactgcccggagcgcacccctgctccctgggaggcaggatatcgtgccgctgctccctggggcgcacgataccctccccaggaaggcgccggtcagggcggacgggccagggtgctcaccggtaccaggcgaggccgcgctcgtagcacctgtcgaagaagtggggctcagagcccagcgcgcggacgtcggggtgcagccgcagaaactccagcagggcgcgcgtgccgcccttcttcacgccaacgatgagcgcttgcgggaagcgccggcggccgggaccgctggccaaaggcaggccgggtgctcccgggcggtggacggagctggacggctcggagggcgcgggggccggcgcgggggcgcgggcggccggcgggcagcggccggggagggcgcagaggcagtaggcgccgagcaccagggccacgagcagcatcggcgcgcgggacgcccgcagagcggccccttgcccggcccctgcgccctggccg

SEQ ID NO: 238313 - DNA, 276 bp, Homo sapiens
  chr16:2014896-2015172
  hyper
agcgggagcgggccgagctcctataagacaacctgtgattggctccgcggtgccccgccctcaccgggctctgagtgctcttgcccgtccggccccagccgcggcccgggaatctacgtcacccgaaaagcgactataaacgccggcgcctccgtccccagccgcggctcgggaatccacccgaagagtggctataaacgtccgcgcctccattgcgctctcctcttcacttaggtaggtcctgccgcgttgaccactggcgtctcgctggtggtc

SEQ ID NO: 238314 - DNA, 74 bp, Homo sapiens
  chr16:2033652-2033726
  hyper
cccaggaccctagcgcgcgccgcaatctgtgcggtcacgcccggcccgcgttgagagagcgcttggcagccagc

SEQ ID NO: 238315 - DNA, 1048 bp, Homo sapiens
  chr16:2040742-2041790
  hyper
agcagcctagcccactggggcgtccctgggagggccctgctgctccttccctccggcaggggaggtggcagttgggtgccgagctctgggttttgtccaggtggcaacctctgggccagccgcacctcggcgcctgtcttggaggagggcggtgcccacggtggggcaggggctttggcctcccctgcggagtggctctgaccagaccgggaggcaggacgctgcgttttggtccgagcgcacgtcccgacttgtggcccactcttggggacaagtgcatgtcccggcttcccccttggctccactctcggagctggagcgggaaaggagcgaagggatgaggttgaggctggaggtcgtttcttggaaacacagggctgccccgtgcagcgctggttaaaatgactgcggtccccctcatgcctgtctcccggaactggtgggcaggaggcattgaggtttgacggaacctcagaggtcaacggtgtcatcttttcagcccaaacacttacaggtgatattaataatcagtcacgtgggggctgtcatccctcgggtacccaccacgtgcaggaagctgggtggacatgtctgtcccagcactgcatgagctgtgcccgtcaccctatttgcatgctagaaaacaggccagacagttcccaaccgcgcaggaagcaacagctccgctgcctccataccctccctcccgccccgctctgcctgctgcactctcacctccccttcgccgttccggctccagcctgggaatcgcgggcccaggtgaaggctcctgttcccacactcttgagtgggctctgaggggactccacgggcccacgcggtgcagagtacctggcttgaatcaaccccggcttttgtcagccatgtgatcccggacaagtcacttcacctgttggggtcccaatgtcccccgcatttataaagagaataagaacaatggcgatcccacggggactttctgaggatttggtgaggggacgcatgtaaagtggctgtttaacacaatgtctgggcatagtagatgctc

SEQ ID NO: 238316 - DNA, 171 bp, Homo sapiens
  chr16:2054057-2054228
  hyper
aacagagcagctgtcgctctgcggagctttccaggacagagaagaaacgtgttccaagcagctgctaagggaataccaatggccgccagccggggatgcatcaggtgacaaggcccggctaccctgtccggcgcccccgcccccacgtttccatggcgccttcacggcacg

SEQ ID NO: 238317 - DNA, 158 bp, Homo sapiens; identical to SEQ ID NO: 204087
  chr16:2058558-2058716
  hyper

SEQ ID NO: 238318 - DNA, 170 bp, Homo sapiens
  chr16:2097196-2097366
  hyper
cagaggccctgtccgtgtccctcactgctcactgcagtgcttggcccccagcaggtcctcaacggctgcaggataaatataataagtgccatgccctttcctgttttccctcagaggcaccctcccccgagctgggggagcaggcttctggctgcgtgtgtccttggcac

SEQ ID NO: 238319 - DNA, 176 bp, Homo sapiens
  chr16:2198065-2198241
  hyper
gggggagatcgcagcgcccgctgtgtcctcccggtgaccagctgtcacctgagcccagggcgcctgccccagcagcctggtgtgtttgccaagccagggctggagcttcctggacccgcctaccctggaggggatggagcagtgaagggcaccgggccaagcgctaggcatctggg

SEQ ID NO: 238320 - DNA, 316 bp, Homo sapiens
  chr16:2198819-2199135
  hyper
cagcacccccgctgcctccacgctgcccaccgccaacggggcccgaccggcgcgctccgggactgcgctttccggccccgacgcgccgcccaacgggcccttgcagcccggccggccctcgcttggcggcggtgtcgacttctacgacgtcgccttcaaggtgagccaggcacccgccccccaggccagcgcagcaggtggcgcccggcctgagccaagggttgggggtcggacagggggtgcagggcccgcggccccagggcgcggagccgacgcgggaggaaccccgtggggcttgcacggtgcatcgtgcaca

SEQ ID NO: 238321 - DNA, 160 bp, Homo sapiens
  chr16:2245390-2245550
  hyper
cagaccccacgtgccgacctgcagagccctgtccgtgcccgcacaggtgccctgacacactgacacggctatacgtgcgcagccgcacacgcggctggtccacacgcccatccatccatctccggcggcccccagggaggctacgcgctgagccaggatg

SEQ ID NO: 238322 - DNA, 34 bp, Homo sapiens
  chr16:2245973-2246007
  hyper
tggggggggcatccgcctcgccctttgaaggccc

SEQ ID NO: 238323 - DNA, 68 bp, Homo sapiens
  chr16:2265374-2265442
  hyper
cttccccggcaggcgtgagtacgcgcctcagtcctttgcaaaaacgcgttcccggttccttggaggta

SEQ ID NO: 238324 - DNA, 31 bp, Homo sapiens
  chr16:2273284-2273315
  hyper
tccgctcgcccctcgcgttctctggctctca

SEQ ID NO: 238325 - DNA, 228 bp, Homo sapiens; identical to SEQ ID NO: 204088
  chr16:2301867-2302095
  hyper

SEQ ID NO: 238326 - DNA, 58 bp, Homo sapiens
  chr16:2318222-2318280
  hyper
tttgtgggagtcgcgctggggacgttcaaggtgtctcctagccggtaaagtccctggg

SEQ ID NO: 238327 - DNA, 359 bp, Homo sapiens
  chr16:2391752-2392111
  hyper
gtcgcggtctaacgggacgggagtggggaggtgggtcggggtgtccctgggccggaccgggtcgtgggactgggtcgccccaggcaggagagcctgggaggggcgggcccccttggcgtggcagggagaggtggagtgagggactcccgggctccagcatgagggcgggcgccgcgcggggccgacagttgccgcgggccggggccaatgggtccccgagcgccgccagcggccggaccacagtgaggtgcgtccgtggtcccggcgccccgggtgagggagggctgctgccggtcctgccgctgggagccgcctgcgacccgcaccgccagccccgcgcccagccagccgccggcacc

SEQ ID NO: 238328 - DNA, 196 bp, Homo sapiens
  chr16:2510306-2510502
  hyper
ccctggacgcctgcgcacagcgacaattgcaattggagcagagcctgcgcgtttgccgtcggctgctgcatgcctggtacgcggaccccggacccactggccagacctccctcgggccctcagagtcccgccccgagcgcccagggctgggagaccgggcgcagccgcccacttcggagctgtgggttgtcagtgc

SEQ ID NO: 238329 - DNA, 200 bp, Homo sapiens
  chr16:2521459-2521659
  hyper
ggagcgggggcgacgcctgtcatcgctctaggcccagcgggaggacgcgccaacatccccgctgctgtgctgggcccggggcgtgcccgccgctgctcccacctctgggccgggctggggccgcccgggggccctgttcctcggcattgcgggcctggtgggcagagccgcggagagggcttcttttccccaagggcagc

SEQ ID NO: 238330 - DNA, 550 bp, Homo sapiens
  chr16:2732189-2732739
  hyper
tgtacagtgtagacgtttgctggcatggctcttcctttgaccagttcatgaactggagtcagggtgggggtgaaggctagggtcgaggtctgggtcaggcgctcgtgcaccgctcgtgggaggtcgaggctgatgtccgctgctccccatcagcgttagtgcccagatcaccccgtgctccgctcccgccggaagcgggcccagcctcctgcttttcgggaccggaacttccgcctaccgcgtgacgccggggcgggcgctctaccagggcggacctgtgggcgggacagaactcagaggacgctattaaaagccggacgcttccggtggaagggagctgttgcggggcttgctgggatcatggcggagaatcactgcgagctcctgtcgccggcccggggcggcatcggggcggggctggggggcggcctgtgccgccgctgcagcgctgggctcggcgccctggcccagcgccctggcagcgtgtccaagtgggtccgactcaacgtcggcggcacctacttcctcaccactcggcagaccctgtgcc

SEQ ID NO: 238331 - DNA, 222 bp, Homo sapiens
  chr16:2888902-2889124
  hyper
gccaaactggagtgaaagcccgaccaccgtgtctcacagggaaactgacaccagatgcgaacttccaaatggatccctccctgcaagtgtggagctggcgctaccaggcactgctctggccatgcgtctaagacacaggcagagggcgctgcccaccacgctggcgacggcctcaaagcccctgttcatgcctgggacagcgcccaaggaccttgctcatgc

SEQ ID NO: 238332 - DNA, 749 bp, Homo sapiens
  chr16:3016807-3017556
  hyper
gcggggaccaggggcctgggcgggcctcgaggtggggcctggccgggcaggggagccgccgtgtcctggtcctcaggatgctgactgccggccccgcccgcagtgtcggtgggctcctgccaggggaactggacagcgcctcagggcgtcatctactccccggacttcccggacgagtacgggccggaccggaactgcagctgggccctgggcccgccaggcgccgcgctggagctcaccttccgcctcttcgagctggccgacccgcgcgaccggctggagctgcgcgacgcggcttcgggcagcctgctccgcgccttcgatggcgcccgcccaccgccgtccgggccgctgcgcctgggcactgccgcgctgctgctcaccttccgaagcgacgcgcgcggccacgcgcaaggcttcgcgctcacctaccgcggtgagcctcagctcggcgcgccctgcccgctgttcccaccccgctctccccaccccgcctcacgcccctctccgcagggctgcaggacgccgctgaggacccagaggcccccgagggctcggcccagacccccgcggcgcccctcgacggggccaacgtgagctgcagccccaggcctggggctccgccggccgcgattgggggtgaggcgggcgcgcgggacgggagtgagtcagggagccgccccctcgcgcccatcctcaccgcagccgtgtgcccgcagcccgggtcttctcgacggtgacggctgtct

SEQ ID NO: 238333 - DNA, 296 bp, Homo sapiens
  chr16:3068100-3068396
  hyper
ccggccccaagaggcgtctctccaacacgcacactagccccggactcacctgcgaaggagataagggaaattcctaggccgagtgtcgggacaggggcggaggcgggggtcttaaagaagcggtgacgtcactggaccaccgccccggaggaggggcagagaccctgtccctgacggcagcgggcgtgcgaatcccaggcttgtcagaggggggcgctggaggctggggtcgctgggcccgcctcgggctggcagacgtccagactcacccagggtgagggcgccaggcttagggt

SEQ ID NO: 238334 - DNA, 33 bp, Homo sapiens
  chr16:3070231-3070264
  hyper
tgactgaactgagcgggcgccgcggggcggggc

SEQ ID NO: 238335 - DNA, 582 bp, Homo sapiens
  chr16:3078146-3078728
  hyper
ggcccggggcccaggcgcagcgagaagcggggcgcggcacggcgcggggtcgacgacgacgcggaggcgctcagctccttctggcgctgtgagcgcagctgctgcccgatcaccacctgcatgtcgtcctgcgggaggccgtggtcggctcagcgccggtcccgccccttgccccgccccgcacacgggccccgcccctcacctgccaggcctccagctcctgcgtgagcgccaccttctggcggatggcgcgcagcagctcccgagacagggagtctcgctccagcgagacgcggttgagctgcagggacagctccagggccctaggcgggcaggagcagaagacgcgtttgagggcgctagggcctcagggagccggggtggcgggggacttctgtacccgggcgggaggagggctgcaaacacctagatcaaggaggtcagggggcccctgggtgggagtggggatcattataacccgtatcagaagaggaatcaggagcccaggagggcccagagggcgctggggcggtggtcaatggcttgaggcttacttgttcacggcctcgtcccggtctgaga

SEQ ID NO: 238336 - DNA, 239 bp, Homo sapiens
  chr16:3086764-3087003
  hyper
cccccggttccccggcgatcccggttcccctgcccccgccccggctcccccaccttctccgccgacgcggccggaccaggccctccccaggctcgaggggcccggccctcggcgtcccccaggctctcacccgaagccgccgggctccctccgaggtccccgcggtctccggtcccctcttccggaggcggctccaggtgtgcggccaacacaggtgaaggggcggggccgcgggaggg

SEQ ID NO: 238337 - DNA, 271 bp, Homo sapiens
  chr16:3095340-3095611
  hyper
tctcaaaaaaagcaaaacaaaacaaaacaaaacaaaacaaaagaggacgatacttctggggtgtgcaagcgcagggggacggccgtgtggggaaacagcaagaggacgcccatctgcctgcccaggaggaggcatccggagaaactagcccctcaggcaccttgatcttggccttccagtttccagaactgtgagaacgtaaacttctggttgagcctcccagtccttggtgttttgttctggcggccccagcgagcgggcgcgggatcgc

SEQ ID NO: 238338 - DNA, 40 bp, Homo sapiens
  chr16:3096463-3096503
  hyper
gcccgccccttgtcgctggacgtccgaagattgggccatt

SEQ ID NO: 238339 - DNA, 435 bp, Homo sapiens
  chr16:3184680-3185115
  hyper
gcatcccttcgggcggagcagaagctccacttgtggctaggccatgtgccctctccgttcctcgggccagccttggcttcccctttttgtcgctcaagggccagggtcgcaaggaaatgtgaaaaaaaagcggagacaaaagagaacgaggtaaatctagatgcagagcctcgcctttcctcccgggtgcaggtgtatgacgcgtatggagtttctgtcttctaataggcagcctgagaattcttcctgttcattggccatcggtcatggagaaggcgggctcagtggacgaacggctttctgggagctggggaatgcttgcgtagcgtagtttcccagcgagccccgcgaggacttccggcgccgggagctcgcggcggaagtgggatctcctgggccgtagtgggcgttgtgtgtttcgggggcgggggcggg

SEQ ID NO: 238340 - DNA, 32 bp, Homo sapiens
  chr16:3200663-3200695
  hyper
tacagccgcagggccgcgtggcctaatggata

SEQ ID NO: 238341 - DNA, 301 bp, Homo sapiens
  chr16:3208782-3209083
  hyper
gttggggtgtggccgggacccgggcggggaggggtaggggtggagtgaaggcggggtctgggggggtgcgcgtggacggggagagtggaaccgcgggtgtggacctccaagtacagacgtcagagaacgtttgtcgtcctggctcgttggtctaggggtatgattctcgctttgggtgcgagaggtcccgggttcaaatcccggacgagcccgcttttttttttttttctgaacaccatcattttctcgcggtgaagattgaggagcttcacggagtctcggccgcagggaacttggtctc

SEQ ID NO: 238342 - DNA, 73 bp, Homo sapiens
  chr16:3209383-3209456
  hyper
gtttaaatttccgacgagcccagggtttcgaacttccttccttttttccttcgtttctctttcttttcttttc

SEQ ID NO: 238343 - DNA, 2180 bp, Homo sapiens
  chr16:3220285-3222465
  hyper
gccgacttgttcttttttaaagaattaaaatatggtctgggtcttttactttggaagaggggtgttaacttcagaactgtcctaggttcagttcagatccccgcgagggaaggggattaaagagagaaggaagttgagcctctgagcccattgcgccccggaatctgggaggcggcgtgaccaggtgcccgggttccatccgctggggctgggcagcccccctgcccccgcccagtacagaggctcctgccgggggaggcgtccatcgcgttcgcttacttctctagaccaacaagcgagggacgcggagactgagttggctgcggccaccgggtccccggacaccgtcttcattcactcccaccctcagtcaagcacctgtacccgcagtcctttcctaaaagaagaaaaacggccggtcgcgcgctgtccagagtactcagtcctggatccaggaggtggctggcggtgagctgatttccgggttcttaaacccgggcccggggcccaaggccccgcctggtggggtctcatcctgcagtttgagaaaccgaagaaggtaggagagggaggaagcgccggctttgcctgtgaaagattctttcattcgctccattcttgttcttgcgcgctggatttaccaggctaacaaacaacagctgatcacggcaggctgggctcctctgggactcgcaccggggcctctcgcacccaaagcgagaatcatacctctagaccaacaggcctcggtggcgggaagcaccatctttgctcctccactccctcacccccctcccgccccgcgccttatctttctggaacccaagacttcgtattctccgctctccataaacgtcgatgccagctctaggagcgtggccgggagcccacgatcgcggcagcgagaagcccaaccagaggggaggagggagtccccggagtgggacagcgctcaggtctggggtggggttgatctagggcaaaatagggcgggcggcctgtggcgatgggcaggaccctctcgcccaccacacgcggaactcgctggatcctctccacatccaggccgcgtccactggctttccaacctgctcaggtccttaaagaaggattcaaaaggtgttgcggtattggcccaacaggatttgaccctgaggcccactctcaccctaatcataaccgcaaaaccacagcgcctggagagagagtgagagagaaacagaaacggagcgagtgtgtgtcgctgtgatgccctttgccgtcgctgctcatccccagtgacctcctggaactttttcagctcttgctgacagaggaagacacgggggcagagctaacgtctgagtcagggcagaggcgctgggctccatccgagggaggctatgggggcgcctctgggatggagccaaccaccggcgcagtcggatgaaaggtgggctggccgctcagccatcctcctagggcaaggccttgggtatgagtcagcagccccaggtgtgagcgcagacccggtaaccccggcgcaggggaaaatacagcggggagccccaggctgcaggcctgaccctgagcatcccctaccaagcccagtgtggatgggctctgtctccaaggggctggttcaccagggtctccccgcagcgaccccagaattctgccaatcacttggggacggcgatgagctctatccacttcggaatcagccgatttgtgccggattggtggcaggtgtctgaaatgtcagcggaaatacacgcacgggaggctcgttggtctaggggtatgattctcgcttcgggtgcgagaggtcccgggttcaaatcccggacgagccctagaagtggttacttttcccttgtcattttagagaatatagagctagaaaatcggggaccgagcctgaagcctcaactaccagtcgcgttgctccgcttcaggtcggtccaggtctgtgcctcagctacaagggacaaggatgctcctgaggctggcctggtcggcacttgcctcagcctcgagggagtcccgcgcccttctccttcccaaccccagaccagagaagctgtaccctctgcagcccgggtcgctcagctccacatgggctccgggtatggtggaggccggtggttgggttctgagtgatcgagtagtgtgcacggtctgggcgggccctggagagc

SEQ ID NO: 238344 - DNA, 175 bp, Homo sapiens
  chr16:3232599-3232774
  hyper
gaaagggtagaaaccgatattttggaccaaaaaccgggctcgtccgggatttgaacccgggacctctcgcaccctaagcgagaatcatacccctagaccaacgagccacacgccccgtagcctccggcttgtctttgtggccttcgtggagtcctcgtggccagaggtggggacc

SEQ ID NO: 238345 - DNA, 764 bp, Homo sapiens
  chr16:3233614-3234378
  hyper
ggggcccgagacccccaccccgccagggcccactaaagtgctgccagctgagccccggccttcgcccctccttcgtctctccctcattcccctccctctgacaccccgccacatacattactccccgcaataccatgcaattttaagctagggtagggctcacctgagactggagccgccataccgtcgaaccctacgaaaaatttatgcccgtaaataaacaagcccggcgcattcttccttattctaaataacttcttcctgctgcacggggtcgtctcctttaaccacggctaccgcagttggtagtgctggatcccatttcagggtgatgggatgctggatcccatttcagggtgataggaccgaccgcaaggcgaacgattcaggcccgtccgtctgcgtcccgggaccccgggaggtctccactgacgccctgccagcagcaggctccctccgccttcctagtctcctgtccttgctgaaaatgcgaaatgggaaaaaagagaaggaaaagggggctcgtccgggatttgaacccgggacctctcgcacccaaagcgagaatcatacccctagaccaacgagccgccgcttcccctctgttttgttgttgttgttgttgttttttgacacgtccttccgcccctgacgcagagcgagactctctccatcgccccaatagctcagtccttagcgcgcgcacctgcgaatctgggcttttgggttcgcggccaccctcagatttgcgaggcaggctttac

SEQ ID NO: 238346 - DNA, 265 bp, Homo sapiens
  chr16:3237826-3238091
  hyper
tatatcataccagcacgacattgaaaccaccagctcataacctcagcgggtaaccttgttggtttacccagcaggagtaaagcctgcctcggaaatctgagggtggccgcgaacccacaagtcaagattcgcaggtgcgcgcgctaaggactgagctattggggcgatggagagagtctcgctctgcgtcagggacggaaggacgtgtcccccaccagaaaaaggaaaaaaaaaaaaaaaaaaagaaaaaagaaaaaaggaagcg

SEQ ID NO: 238347 - DNA, 1644 bp, Homo sapiens
  chr16:3238151-3239795
  hyper
tcccggacgagcccccttttccttctcttttttcccatttcgcattttcagcaaggacaggagactaggaaggcggagggaggctgctattggcagggcctcagtggagacctcccggggtcccgggacgcagacggacgggcctgaatcgctcgccttggtgaaatgggatccagcgctgccaactgcggcaactgcggttaaaggagacgaccccgtgcagcaggaggaggttatttagaataaggaagaatgcgccgggctcattggtcgctacaggggcataaattttttctaggattccagagtatggctgctccagtcccaggtgagccctcctccgcttaaaattccagtttattcggagaaggggagaataccggaagcgggggagaagggaggggagtgagtgagaggagggaggcggggaagaccgggcatccgcgggcagcacttcagtcggccctggcggggtgggggtctcggcccttgtccccacccccagaccccggggccttcccactgagagcgagggaattcgcggctttgatctggaggggacagggagccccttttagcccagatctgctggattctcgggagtcaggtgaaatctggatacagggaagggcagagtgacagtaaagggtgccccggaaccgatgcccgacgcctgctgccccacggccttcattcttgctcctcctcacgtcctggggactggaggtcccgccagctccccccagtgaagggcaagggggcgcatcgcagaatcgcccctggtgcgcagcgtagttggtggcctaagccgtcttctccgagagctcagccatcctgggcacttgaggccaggcaggcgctgcggggctggttcagtcgatggagaaaagagactctcagcgtcagcctttagggttcgaggcccacgtgggaaactcgctttctgggttttggcttccctggggagaagggaggaccggagccggagaagcgtgaggtgcggcgaggtagggtgcctggtagctggtgtctcgtgcactccgtcaggcctttattgaacacccattggtgccacgctgagggactgcagcgtttccaaggcgagcttgcagtgatcgaggctcgcagaccctcagcgcagccgctgcctgctattgggaggttcccatgtcctgcggaagctggagctcctcactgcgcgcctcggagacgccgaatccccaactcaaggccgagtggcggtggcgggcgaggacccagggcccttctggattgtggtagcgccagggctgctccccattttgtgcgtcgcggaggaggggccggggctctgggcttccgccacacccatcctcacttgaaattgccccttccaggcgggtctgaaataagattctactcactgggtcctgctgggtccgccccagccgcccccaggatgctaggacgcccacaaagataaccttaatgcgtaaatcgtgtggctcgttggtctaggggtatgattctcgcttagggtgcgagaggtcccgggttcaaatcccggacgagcccggcttttggtgcagggtaaaagtcgtttcctgctcttttttagattcggctcgacttacagacctcagcgcaggacgtggacgccctgca

SEQ ID NO: 238348 - DNA, 690 bp, Homo sapiens
  chr16:3241321-3242011
  hyper
gggagatcgcagagcggtgagcaaagtcttgcaccagcggggatgtcggggtggaactgaacctgttgtaggggacccccagtgtgccctggtttctggggctgattcattacgtcacttagtttctactattctcatgccaccccgccaattactagacataaaacgttcccagggaagcccggctagctcagtcggtagagcatgggactcttaatctcagggtcgtgggttcgagccccacgttgggcgacttgttttcttccttgctaccttggagttctggaaacagccagcatttaatgaacactaccaggtgccacatcgcgctctgtgatggtatcccctcaatgattgaattttggtctccgcgcgctcccagcagcaaggattgtcagtgaaatgaccaaaggcagcaccgggacgggctggttgccagccaggggcagaggggcgggggcgggtgagaactgaggggccacaggatgggtgtgaggggtgcaggggcctctccccactttgtgcggtgcggagaggggccggggcgctggcccacccactgagtctgcaatcccagtctcctgtcactttgctttcgcaggcttgagctttatcgctccaagtactccacggctgccacaaagaaaagtaaagggcctgctgctgtggctcgttggtctaggggtatga

SEQ ID NO: 238349 - DNA, 800 bp, Homo sapiens
  chr16:3355109-3355909
  hyper
cctcgaggaggcggcgacgagcccagcaacagctcgagcacggccggccgggccgcgggaagcccgagaacgcggcgcgcgcagctgggaggcgacccttacccggcgaggctcccgggaccaaacgccgcccgacagccacgcagaacagacgcggcagtgcgacgcctcccccactggggacacgagacagcgacagccacgcggtgagccggtacaaggccctctaggcttcagcgggtctggatactcggtggcattaacccttccctaccgccggggaagacagcagtttctctggcgaggaagtaggccgggctcaggcgccttagccagagggcgggcctgcgccaccctcggaaagcgtcacttccacttccggccggcgctctggctctgtacctggacagggctgcggtaggccagcggtgggctggcggttgcgctcctcagatcggcggcctttcgggcggtggcttgcgtttgagcctcagaaagcgaggagcggcctccacggaagccaagctggccgaggtaaccgagaagcggcttcccctatggcttcgaccctggagccgctggagcggcggcggccgcagggaggcagccattttccgtaggcggtggccgcggcgcttccgggccgcgcggctggagcctgaggcggggccaccgtcgggcacgagaaaccattctctccccgcttttcgcagctgtatcccagaggcgcggctgaagctcgctgggacactgcccgcttgcccagtgcccacgggcacgcctgtcgcagacacaggctg

SEQ ID NO: 238350 - DNA, 741 bp, Homo sapiens
  chr16:3550753-3551494
  hyper
actcagaacctgtcacccagcgcgaaacgtccgcaaagcgtgtaaacagacgcccagaagctgggaagcttgcagccctcatagacgccggtatcgccacgccctctgccctcggcgtctcaggagcgctctctgccggcccgctctccccgtgcgtatgcacgtgccgccgcgtcttcgcttcgctttttgtttgtccctgaccgtgcgccgtccaagggtccattggttgccatagagatcgtcgagcgctgggcctgtgatcgctgaggggcgagcagttgcgaccctgggctcctggggacctgagcgttatgtctttccgcgacctccgcagtaaggcagccccgcgcccctgtgacctgcgggtcttccagagattcagggctcccgcccgccgggtcccctgtgtaggcgatccctgaggcttgcgctgccggaggctcctttcgggcctctgcgcctcagggaccgcctgacccgcggctgcaacccggccgagcgtcccaggcccttcttcggccatttctagcgaggatggaaagttctctatctgccactggccgcgtgtggctcagaacgcttgaaatgtggctagtgcagatgaataactgaatttttaagtgtaatttatttctgtttgtgtagctgcatgccgctcttcgctaccgtattggaaaatgcatggagagtttagagactattttttgagttgggttagcttagcgcttagaaaaccga

SEQ ID NO: 238351 - DNA, 63 bp, Homo sapiens
  chr16:3766893-3766956
  hyper
tccccagaacctgcacggcgccgggcactgagcgggcgctcacatgtgcgtccaatgaacgaa

SEQ ID NO: 238352 - DNA, 171 bp, Homo sapiens
  chr16:3767713-3767884
  hyper
cgtgaccttggatcgcgttgtcaagggcgacgggccttgcgcgcggaggtgggggaggtggccccgccgcccccggcccacgctggccggctgcgcctagctgtgcgcattcctggaatggggcggatgtcagtatccacgcgagggtgtggaggcgacgctggggaagaa

SEQ ID NO: 238353 - DNA, 161 bp, Homo sapiens
  chr16:3931230-3931391
  hyper
gccagggaagtggaatggcctctgcaggttacagaccgcccttgggtcctgccgacgaggtgggcggatggggaaactgaggcggggggcgagcaactgctccaaagtggtcgaggcaggaagtggcagggccgggattcgggtcccgccctacctcgtga

SEQ ID NO: 238354 - DNA, 170 bp, Homo sapiens
  chr16:4166810-4166980
  hyper
aaaatgttgccttcccactcggcacgcctttgggataaatcgaagtttccaaccgttggatttccctcccgggaggctccccttgctctgtaagcaatgaatgcgggccccggggcactcggcctgccctggacctgctcacggggcgaccttcacgggcctagcctcca

SEQ ID NO: 238355 - DNA, 208 bp, Homo sapiens
  chr16:4321188-4321396
  hyper
aggtggggacccccggggcagagggttgggcaggagtgtctacacgtgtgcagcaaccttccctccaggccggattctgcaggcgctagcgtccaccagcctgtgccacaccggcgggctcctcctccctcaatccccgcccagactgcctcgggcggcagagcacgtggctccagccctggggagccatttcgctcctggagcagcg

SEQ ID NO: 238356 - DNA, 401 bp, Homo sapiens
  chr16:4363851-4364252
  hyper
ttgctaacagatttaaactagcgtctcctgtaccttttttctacacacctcgaccccagggctgcagttctgcctgcctgaggtcggatgcggtcggctgcagggcagggctccgggctgaagcgcagcgattcccgccgccgtgagggggcgctctgcgggcctcggcctcggcccttccggacgcccgcacaggtcgccggacccagagagtcggcccttaatagccccctcctggaagcgctaggtcccgaaactggccttcccccggggcccatctcccggctaatgtttaacccggccacactccacattatccacactcaggagaccggggtgaggtgagggtggaggctgggggaggtcacctccaaatcgccaacttccgagcctttgctcca

SEQ ID NO: 238357 - DNA, 809 bp, Homo sapiens
  chr16:4377512-4378321
  hyper
cccgcctgccagggcgggatccttggctacctggcctggccggggactgcgggcggggggccgggtggctccgccagcgctgcagctgggggccgtctgctcgggctgcggtcgggcacacaatagcagccattgtctcggccagggtggcggggggcccgcccagcccaccctccgggtgacccccgccctgcggtgggtgggaagggcagggcccggtcccccgaagcccccgccgtcccggtggtccccgcggccgcccccgcgcgcttcctccctcgccgcagccgcttcctcccgctcgccccgctctaattagttccttttgcagctggaggagccgcgcagcggccggttccgcggccacccccaccccccaccgacaaccccagccctcgccccaacccctgggcccttgcgtgtgggggcgctgccctgggcgcatcccaggctgagtgctcgagagacgcggccctgggctctgtgcaccctccacgctgcgctgtcccaccggggggaaactgaggaacggaaggctccaccaggaggcgcagaggggcgtggggccggcgggccttgcgctgcgcccggggagcatccacggggtgcccccacctgaccgagagccggctcctgccctcgggaccccgcagtaattagcacccaggcctctggctgagcttgtccagagccaggctgtcggccttacgctggggagagccacggccacccgctcatgggcactcactcagggttccctggttgcaggcccgctgctccccgctctgggcctccgaggctttcaggag

SEQ ID NO: 238358 - DNA, 643 bp, Homo sapiens
  chr16:4421674-4422317
  hyper
gcaggtcaggtggccgcagggtgagggccagggcaacccggcccacgagcccctcggtggggaaggggcgtgtctccacgcggctccgccccggccaatggggagaggccccgcccctgccgcggcgggcccgccccccgggactcttaaggcgcgacctgcctccagcgagccgactccggagcccgagcccggggcgggtggacgcggactcgaacgcagttgcttcgggacccaggaccccctcgggcccgacccgccaggaaagactgaggccgcggcctgccccgcccggctccctgcgccgccgccgcctcccggtgagtttctgtggggctggggggctgcgggcggggaagggggcgccacggccaggctgtgcacacgcgcggggaccgccgccgcgcgcacacacgcactctcgggcgggaccgcggccccagccccacacggtcacctgggccgcccggcgggcaggccctgtacgctccctcccccgccgtcctggggcgccgacagccccgcggccggccagggtgcgcgcctgagtgtgcggtgagcccgcgaggctgcaagcagacaaaataaacaccccgtcccatgcttcctcctcccacggctgggcctccggcatgaccagttt

SEQ ID NO: 238359 - DNA, 97 bp, Homo sapiens; identical to SEQ ID NO: 204107
  chr16:4465717-4465814
  hyper

SEQ ID NO: 238360 - DNA, 219 bp, Homo sapiens
  chr16:4475918-4476137
  hyper
gttgtggggaccccgcggctgccggctatatcgggtagaggggcccggccgcccagggagggcgtggtgggggcatggctgagccgcaagctgagcgtccccgcctttgcgtcttccctgacctcttgcggcccccgagcgctgctgacattgagacctggtgtcagccttacaggtgagggcaggttccaacttccgagtggcggtttcagggcctag

SEQ ID NO: 238361 - DNA, 156 bp, Homo sapiens
  chr16:4526213-4526369
  hyper
tcctgccgaagcacgcctacttaccccgctgagcagagcctgagcctgcaacctccagagacctggggaaagccacatactccgcttcccgcccccggcaagggcgtgtcagctacaaggggcgtgtcatctctaggccccgccccgcgctgcgtg

SEQ ID NO: 238362 - DNA, 973 bp, Homo sapiens
  chr16:4587969-4588942
  hyper
acactgctgggctccgggacggccaaggtcacccgcggggctcggcaggggctggctcggccacggggctcctcctcgaccccctttccttgagaaaacaactcccacccctcccctccccgtctcgccctgcaagacggagatggcaatttccacaaccttccctgacggaaaaacgtgcgggcgagcaggctgccattccgggcgcacaaccccgcggcacacagcggggcgcccgcccgggccccgccaccgcagcggcttcgacatccccagggccgcgctaggtctcggcagcgccctgaggggaggacgggccccgccatgccgcgccccaaccgccggccccgctttacctccagaagcccggtgcccgaggccggccgaaagcggagaggggcccgggtccggacaggcgccggcagaacaagaccctcagccccgcgcggctttgcgcgcacaacgaaaccccccaacccaccgcccaccccaccgcccagaggcttctaggacttgtagtccgcccggtcaccccccccaccacaacccgctctgagaggctggggactacggtgcccggcatgcaccgcccaggcgccgcgggcgggggcggggagggggcgccacggtccgaggtcacgccccgacctgaggagagctggcgcccagacccttcccccggggaggagggctcccgcgcgaagccgtctccgaatgcgtccagtcgactcaccgtccccgcagccctggggcagcggccgcaacagcaggaccgaacgcctcggcagctggcagtcgcacttctgtcacaaggaggcgggtagactttggaccagggccgaggcccgggacgtcacggtggggggtggggtctcgggaggcacgtgatgcgccgtgatgacgtcagtgggagcggaggcgatttggcctagagctggggctgagcacgtgggatggtcggggcctgtttgcc

SEQ ID NO: 238363 - DNA, 46 bp, Homo sapiens
  chr16:4665023-4665069
  hyper
gcccgggaaggggcgtgtctgagcaccgagcgcccgctgtgcggat

SEQ ID NO: 238364 - DNA, 134 bp, Homo sapiens
  chr16:4666535-4666669
  hyper
cagctagtgaggctttagcccgcttcgagcgcccgggggcggtaaggcgcgatcatagcagctctaggtgaccttggtccggctccttgcgccccctggccccagcctccttcgttgagacactatttgttgag

SEQ ID NO: 238365 - DNA, 140 bp, Homo sapiens
  chr16:4743270-4743410
  hyper
cattgcggatggacggggccatgcgggccgggtcggcctcctggggagaaacgggtgggcgcaaggggatcggcgccatcgagggtggagaaaccgcagggaatttcggctgtccgctttggggcgccaaggaagatgtt

SEQ ID NO: 238366 - DNA, 73 bp, Homo sapiens
  chr16:4852902-4852975
  hyper
cagcctggggcgcccgcttgggggcggagctcccggggcgcccccaggatatgatagggcgctctgctccact

SEQ ID NO: 238367 - DNA, 907 bp, Homo sapiens; identical to SEQ ID NO: 204108
  chr16:4986646-4987553
  hyper

SEQ ID NO: 238368 - DNA, 46 bp, Homo sapiens
  chr16:5007929-5007975
  hyper
tgtaaacagtactgtcggccagacgcagggtccggggcgggtcggc

SEQ ID NO: 238369 - DNA, 455 bp, Homo sapiens
  chr16:5008155-5008610
  hyper
aaaaataaggggcggggctagaaccagggggagttcgcctggggcggggccagagtggggcgggaccagttagggggcagggccaacctgggcggggccatggccggggacgtgggcgggaccaggtcaggggcggggccaggccaggatctccgctgtcccgggtcctggagctctctcggcccggcaggtttcgctcccgcccctccggccttccacagctgtcctggccgcagggtgttcaaggcgggacacaccaggctagagatccgcgatcgggccccgcctcaggtactgcgctccaggccaggcgggcgcgggtaagcgctcagctcccgagccaggcgggcttccagggcacttcccctaggctgcattcccaaaggctcccgagggcgagggtgagcaaagctgcggggacctgtgtgtgcatgcgtgtgcgattgcctctacgt

SEQ ID NO: 238370 - DNA, 148 bp, Homo sapiens
  chr16:5037519-5037667
  hyper
ccccccaccacggccgctcactgccgctctgcccccaggcctacgagaagcgtttccccacgtgcccacagatcccagtcttcctgggcagcgaggtcttgcgcgagtcccgcagcccggacggggctgtgcacgtggtggagcggag

SEQ ID NO: 238371 - DNA, 173 bp, Homo sapiens
  chr16:5037919-5038092
  hyper
aactgggcggggttcgcggggccagggccggagctgggtggtgaagatgggttggcggcagggcggaagtcgggggttggtgtcctgggtccgggctgggtgggcggtggcgcaagggacctgggactcagggcagggggtgactggggcaggcccgccggactcgctctcca

SEQ ID NO: 238372 - DNA, 36 bp, Homo sapiens
  chr16:5121865-5121901
  hyper
ttggtcctgctggcgctgtgtctgctgctgccgctg

SEQ ID NO: 238373 - DNA, 43 bp, Homo sapiens
  chr16:5122223-5122266
  hyper
taggtatagccggcgttaatcttgccacgtgtcagaagtgtgt

SEQ ID NO: 238374 - DNA, 1653 bp, Homo sapiens
  chr16:6068894-6070547
  hyper
aggccaggagaccagggtaccgggtcgcgtgtccgccgccgccgcccgctggaatccagggctgcacgcgtgaccgcggcggcggcggcgctggcgaggggaagggggagggggcgctccctcgcgcaccagattatttttggctccgcagccggggctgctcgctgcttgtcgcgcgctcacacacacacagacacacacgcacacacacacatgcacacattttctcgcgctctctccggctctcctttgtttattttctaatctatatttttactggaagatttcctctttattctctcccgccctcctacaagcgctcttgctggccgtctgggtgcacacaccgctccctcgatcaccccagcccccttcctggtctcccgagcgcggggtttgaaggtcacctcctttccagtccccgtgcgagccgcgctgccgccgcctcctccagccagagtcggtgggactggctgcgctgccctgaagtggttctccaagcagcgcggagggtggcggacggcggacggagcccaggggccgcgtcgggtggggaaacccgaactcgcggaggggaatccctccccctccgccccagccccccagcagcacccgcggtggggcgggggcgctctgccagccccgggaacagcagaggcggcggcactggctggacccacgcgcgcgcctccggggctgaagaaggaaggagtgagccgagccgagcaccccacatctggaggggacagccagccgtgggccccgccccggcgtccggagcaggagaactccgagcttcttgcccaggcagagagagcaggagcggaccgcgcgcccgggattgagagtccttgcgctccagacccccacccagtggccgccagggtccccgcctgtccggaccctcgccgcgcccaggcaggcgcgccagggcggggctgacctgcccgcgaagttgcggacagtgcgtgagaaaccagcacccccttccgccgcctccagcttatggtgagtgtggctgggggtgcagagagcgcacgggaattcgggggtctggggccgagaacgtgaccgcagccgggctcgccgggagttctaggtaagtccaggcggagtcattgcctctgcacccaccctgacctggtgggtcaggtccagaaggtctcatggagggaagcgctaggtccccgagaactggcctcctcctagcgccagtctgggcgctctggacgggaactttttcagggtgtgtggaaagatctcgaggcgtgtccccccctacccccaggaggccgagaccctgagcccccttgtgcgtcgcttccagaagcacgtccttccttgccccagagcgcccctccgaagcatccaggctacctcgtccgtcctcctgggagcgagtcctaggtgccaggagcagcgggagcctgcctgcgcactttgattagtctccctggccggctgcaagcgtgcactcagcgcgcccccggaccgctgcctccgcccgcagggtgtgcaggaggaggcatcttagtgacccgggagggtgtttaggtgccccgaaccccttgtgggaggaggggaagagaaggctcacttatgtggagaaagcgccgctgtgtttactggcactggaatcgatgccccgcggtg

SEQ ID NO: 238375 - DNA, 786 bp, Homo sapiens
  chr16:6533082-6533868
  hyper
ccgacccgtaggggcgggacccacgcagccccagtatccactgccttcccccagctgcaagagtttgcaaaaacattgggcgtctcatttggcgagcgttttggcgcggacagaggccgaggccggccggggaagccggacccgggccctggcgccgccgtggcctccctttgtgcgcgcccgggtgttgattgcctccttgcacgggctgctcgctctcgcgcccgcgcgctcggggcgttctgcacctgctggcggtcgtgccaggcagcccgggcgagcgaaggcgcgcggcgcgcacgacagatgactggagtcatttacattgctagcacgtgggtgccgtttgctgttgcctcggacttctcccgtgctgtgttttcccggtgaggaaacaggaggcactttgcagccgacaatgaaatcttggcagctaattgcagtcgtgggagatgcccttcaggtacggcgagcgaagaagactctaaaacactgtcagggaaggagagaaagagggagagagggagggagggaagggagagaccaggcagcttctgcagaggcttcctgaagcccactgactccgcgggagggggttgcagagggacgggggcgggcgacagggggaggagtgtgcaaattgacatttttggctgcctgtggcagaggagcagccgtcagccgctgtccaacgttagcgcagacacggtggcggcgtgtgcgcctccggggctgctgattagaataggggacttggccgtggatggaatccgggaaacccaaacc

SEQ ID NO: 238376 - DNA, 146 bp, Homo sapiens
  chr16:7354032-7354178
  hyper
aagccagacgaccgcgcgaagggaaccaactagtttccaggtccccgcaagtgttttagttggaggcagaggaacgccgggatctagcacatccccaggcggggagagccagggaggagggaccggcggggtgcggtggggggagg

SEQ ID NO: 238377 - DNA, 506 bp, Homo sapiens
  chr16:7354238-7354744
  hyper
gagagagagacagcgcgagccaccggtcattgacttagataaccagcaaaattaaaaaagaaaaaaaaaaattgtagcgcccaggcagagagcaacgtgattgcattcaagcgtccccactcgggctcggcgggcgccagagagacatgatgcagcatcctctgacgggggccacctgcgtggcgctccccaacgtgggcatgtgtccccagctttcgtgtgccttgacttttatgtacttacagcaggtaaggcgcgcgtctgccctcggtggctgctttcctggggctgggccagatgggtccccgcgcgtactgggctgcgcttcggtgccttatgtaggttctgaggagggggctcccgcgttgcgatggaaagggtggatggaagcctcctgctctctgtggagcccgggcacctcgcgctgagatgtttctgcacctgtccgaatactttaaaaccgcctgatgcccagcctgggcaccggaagtttgaaatggaaaact

SEQ ID NO: 238378 - DNA, 295 bp, Homo sapiens
  chr16:8767886-8768181
  hyper
acctctgactcccagcgccctgtttgtcttccggagcgctggggccaggcggaggaaagtagctgggagcaagaagggctggcagggccctgagcgccgagatggggagtgaggtggggagggcgggatgctccttcccttctccgcaaaggaaccccttctgattccgactctggagctccagagaccggatccgagacgcgggtggaggtggagttacactcgcctgcagccctgagggtgtaaatggcccattaagatccaggttaaatcaacctatggagctgccccccag

SEQ ID NO: 238379 - DNA, 294 bp, Homo sapiens
  chr16:8768421-8768715
  hyper
ggccgggacgctcggcggagccagggagtccggcgagtcgctgggggaagtcgagcagacacccagcgctgccggaactcggggcgcgcatcccgcaagtcggaacccggcggatcggatcccgcagatcggagacggggcctggaggtgagcgcgaggcgccgggtggcttgggacgggcccttccgaggggagccgagaggaggtccttctgccctgcccccaggagcaaaacctgggcatcttctcctggaaacggagccctcatcttcccaagacgcggggccctccccc

SEQ ID NO: 238380 - DNA, 39 bp, Homo sapiens; identical to SEQ ID NO: 204116
  chr16:9053887-9053926
  hyper

SEQ ID NO: 238381 - DNA, 214 bp, Homo sapiens; identical to SEQ ID NO: 204117
  chr16:9056293-9056507
  hyper

SEQ ID NO: 238382 - DNA, 65 bp, Homo sapiens
  chr16:9187129-9187194
  hyper
ctgctgaaggtcctgcagtgcccaagataaccgccccggccccctctcagcgaagaattatcatg

SEQ ID NO: 238383 - DNA, 142 bp, Homo sapiens
  chr16:9229669-9229811
  hyper
agctcactcctgtatcgatggactgaggttacgaatctcttctctgatttaacccaaagtttagatgaggacactgcggatcaagtattcattgacctcttatcaccggccaggctctgtgccctgccgcaacagacaggat

SEQ ID NO: 238384 - DNA, 62 bp, Homo sapiens
  chr16:10133419-10133481
  hyper
gaacagagggcagcgaggactgcgcagcagcgggagggaccggtggcgttgggcgcggggag

SEQ ID NO: 238385 - DNA, 813 bp, Homo sapiens
  chr16:10274220-10275033
  hyper
cagaagggccggcagcaccagcagggtccaatagcccactctgcccatagtcgccactgacggtccctgcaaggtgaagagtgagaggcagggccgcggtgagcaaggcgaccagaagaaagggattaccaacttggcttcctgctctaggagccaggcatggaactcagcagcaggataggctgctgggatcacggactccattccgagtccccgacgccatccacatccctcgatccatctctaactctatccacaactccaattcgagctaattctccatcccccagccccttctcgcatccagcttcctcatcccctgtctccaggcacttccccatccccatctctgtccatatcccccaccgcattccccaagttcgccgcgggccacagaccctaagcgccgcgcgtgttctgtaccccaccaagctcctaggtgcacagaataaaccctccatccaacccctcccacctgggatagagaggaccaagttatcaaccccgccccctgctggcgcggagcgaactacagaccccgcagggcgtgcggaggcggcacccagaccccgcgtcccagcttgagagctcagctagttggctgaccccgccccctacgagcccgtcgtgtgcaccacacactttgctctacgcccagccccaactacagacccggctcctctcagtcagagtacaccccaagtgcttgggagtgaggacgctgcctggtgggcccaggctccgctgtgcctggggaacttggggctcgccccacctcgagccaaggggccgtggagagtccttcacccctac

SEQ ID NO: 238386 - DNA, 856 bp, Homo sapiens
  chr16:10275093-10275949
  hyper
accctctctcacgcgcgccgtgtgcaatgctgaattctggagagtaggcgcgtccccccgcgggccagcgcgtaggagctggcaaagaacgtgcgtagggggaaaggtaggctcccaagaagctcccagacggacgtggactgtacagcccctccctagcctttctactgcgggcgctgttgccaagtcctaggtgcacgtgggcagtgggccgcacacgctcataggcacgcgcgcttttctgcgcacttcctcagactgctgtagcggtgcccacggccagccggagtcctcacatgtcctcaggtggtgcacacgcatgaactgcggcaggtgcacagccctgcgtacctgcaaataccagcacggtcgtgcacgcgtgccctgacgcgcgcctctcgggacggacgctgctggagccgggggaagttgaggcgaactccaagaggcctcgacgttcctgggtaagcgccgcggagcgcggagccgcagcgccccctggtgcccctcctgcacttcgccgctgggctccctcccgctttccctctccctctctagcctgatccctctcccgctctccctccggtcgagtctccctcctccccggcccaaggagccctgatctccctctgggacgtacctgtagcccgagaaggtcgaggatgcagtggggcgcgctgcgcgcacgagcatctcggccgcctcagcagccaccgggtttagcgggttcccgcatgctgcggccccagcgcgctcccctggctgtcccgcgctgtccgcatcgcccccacggggggcggctatcccagccggaggctctgcagcagggctctaacggggcggaggagagaaggag

SEQ ID NO: 238387 - DNA, 1217 bp, Homo sapiens
  chr16:10276211-10277428
  hyper
cacctccccagcgccggctgctgggagttgtgcgaccgggagctgctgagcgagggaggtagggagagaaagaggaggtaacgagggtgggggggcgctggctgagtttgtgacgagccagcagtaggagagggggagggaaggacgcgggctcccgcggtcccggttccccgagggaggtggatctttcccacgcagcgaccctcttgtgatcctgccgcttcctccctcttcaggcctcccacctccccccttcccaagggggcctcccaggcccggcgtcccgcgctagcactcaccgcagcctctctccacatagttctcagcagtggccgctcctggtcatctccagggctgatggctgcggccgcgattctcagcgctcacccggtcccatgatccggccaagccctaggagctcccctccaagatccctagctccgcttcctgccccactccggacggcaactgcccggtcctctgagcgcgccggagcaccctctccgcaacccagctccgggctggtgtgtttgagggcgagtgtgtgtgtgagtgtgggagcgcgctcgcgtgtggccggggatccccgcggtccccggccgagagaggcgcgggcggggaaaggcagctccctccgggcccttcgctgctgggccagctccgcgccgggcgttcggctccccacttcccagcgggagtccggtgagcgcctggacaccctggttcacagcactggcaaagccgggttcccggggcgtctttctgctgcggtcgcctccgaggaagaggagaaggaaggtagcggcgccctccacaccaacttagggacttgttctcagccggcgagacgcagtagcccccgctcaagcccaagaggcttcgagctccggcgggcgaaagcgtctcctgcccgcagcctctctcctaggtgggtcgagacagaccccgcagtccctcggcggcgacgcggagcgcggccacccgttccgagagcgcacggcggcaaataaggccaggataggtggctggctggcgacgggggcgcctgcggcggcgcgcgctgctgtccgtggtgttggaaccacgctctccgcccgctcccgggcgtctggtgcggctgaagaatcaattattcagatctctgctaccgcttcctcctcccccagtgcctcgcgctgggtacagttatccccctccacgcacaggcgcgccgacac

SEQ ID NO: 238388 - DNA, 689 bp, Homo sapiens
  chr16:10479685-10480374
  hyper
gcgctatggcgggtaagccccggtggctgaccggaagaagcgcccacggaggcgaaccccaggcgcccctcagcctacttccatttcccctcgcgacccttcgccccgcccactctagctggctgtgcctgactggctgggctgccgcatattcgcgctgccattggtccataatcagctgggggtgggcgtagggagacctacttcagcaggtcctggccggaccagcattgttaacggctgcggttcgaagtggctgtgggtattgctgcggctggtgcgtcgtcgctctaggtacgttggggccgggcgagtgtcctgcgagagcggcgattggcggggtggcggctctaggagcgtcggtcgcctctctgagggccggccccggaggcctcggagcgccgggcctaccggacgtttgcggcgaagctgccctgactgaaaagcgtccgcggggccgtctgacaggtccgggaagaggcccctgaggggcggacgggcgcgtctccaccgttttcgcagagggatactggtgaagcgggagtggtgtgcggcctcaggtccgggcggcactggggttagggactgcggagggaagtggtgcgtgttttttgtcctgaggggtaagtaaaagctcgctcttgtccggaatgctttcagaaattaacggataaatctccacctccacc

SEQ ID NO: 238389 - DNA, 101 bp, Homo sapiens
  chr16:10837591-10837692
  hyper
aggttcgcgcgtgcgcacagccccctttccgagacttatttcgcgcggtcggagaatcagattgtgcccacaaggcggaaatgtacgacagcgggttccgg

SEQ ID NO: 238390 - DNA, 125 bp, Homo sapiens
  chr16:11350261-11350386
  hyper
ctgccccagcacccgcctctcgaggggctctggccccgaccctgcgccttccggccacttctcggacccctccttcggacttggcgaccccgattttgccccgctacctcgggttccactttctg

SEQ ID NO: 238391 - DNA, 36 bp, Homo sapiens
  chr16:11351144-11351180
  hyper
gatttagtgattccgattgtcgtgcgaggccatgga

SEQ ID NO: 238392 - DNA, 290 bp, Homo sapiens
  chr16:11439013-11439303
  hyper
tgatctgcatccacgccaaattttgagatgcgttgaaagaggaagttctttacctctctgccttcaattatttattctcgtttaacccatttcctccgttcattcctaacttgagggcgtttatttacttttatctacgcatgcgcactcctggctgctagagagggcctcttcgcccggcggtcccgccttctgacgtcgaccattggccggctctgccagcgcgctcctgattggtggctgagggccgggccccgctgcttctcaaagttggcgggaaagcggaggcg

SEQ ID NO: 238393 - DNA, 193 bp, Homo sapiens; identical to SEQ ID NO: 204122
  chr16:11762783-11762976
  hyper

SEQ ID NO: 238394 - DNA, 323 bp, Homo sapiens
  chr16:11836629-11836952
  hyper
gggcccgaaggcccggcccggcccgttgctccccaatcccgcagctcgccgcacccgctaacccggacgctccacgtcagccgcgccgccgccgcggggtccgccccacctcacaccccagagcacgcagctccgcccaccgctcacggagtccgggcgggcaccgacaccgcccaaatccccgcccccaacgggccacgccctgcaccctacgtaaatgcacggaagccttccccgcccgcagcccagtcttggccccaccggtcacgaccccgctcacggagtctgcgcaggcgccgtcgcggggcgtggagaagctgctc

SEQ ID NO: 238395 - DNA, 110 bp, Homo sapiens
  chr16:11944971-11945081
  hyper
cgattcggtcaagcgctaatgatagggaagctaagccaggtcgccaggtctatctcatctagctccacagcacacttgcaacccaattcactagcgccaggccgcaggac

SEQ ID NO: 238396 - DNA, 31 bp, Homo sapiens
  chr16:12913374-12913405
  hyper
ggaggagggtcttgcgcgccccctggaggtg

SEQ ID NO: 238397 - DNA, 500 bp, Homo sapiens
  chr16:12994399-12994899
  hyper
gagaaatgagagagggcctccggggagctggaattcgctaggagagagagggcagatttggaaacacagaggagacgggaggctggaagctgaggaagcaaggcagagctctgcagcccccggtgaggatttccggggggatccgtggggacaggggccagccagctccagagaccgatgcgcgggctccaggtccgggagggtggctgaggctgggtgcccaggccttgcgctgcgccagatccgggagcgcagaggcggcgccgcggtgttccctcctgtggagcgcagaaaacgctgcgggggcgaagagggacagaaagcggcaggttcgagaggctgggggacttccaaggaaagaccttccaggacacgccatagcctcggccttgttcggctgtcccctcttacccccgaccttctttgattcgttcatcccgagcccctctcccccggagggtgcttatccctggctcaggggcttgccacctgtccttccc

SEQ ID NO: 238398 - DNA, 118 bp, Homo sapiens
  chr16:12995319-12995437
  hyper
gccccccagctagctcccgctctagtcacctcttccccgcgcccccgcccctctagagctcgcgcccgcccccccccacccgcgcctcctctgcccgccctcctccccctcccccttc

SEQ ID NO: 238399 - DNA, 205 bp, Homo sapiens
  chr16:12996397-12996602
  hyper
ggtggtggccgtcatggtgctcgtgggcatcttcaccaagctggggctggagaaagcgcaccggccccaaagggagcacatgtccaggtgggctgcctccccttcgccctcccctcggggcttcgctctccctgctctctcctccccaccttcccccaggcaatggcgctccccacggtccccgctccccgcatcccagcctctc

SEQ ID NO: 238400 - DNA, 917 bp, Homo sapiens
  chr16:12996782-12997699
  hyper
gacacgtagcctgggagcccgtggccccgaaatcttcgggtttggggagagggtccatggcacccctcggattccaggtgctagctttttggtaaacaggggcaggcgagcccgaaaggggaggggggcgtgtgtgagcccgagcgcgcgtgtgtgaaggagggagggtcagagtgagtgccgcctgcaactcgtacgactcgcgaaaaggagacgagggaggtggagtgaggggagggcgagaacaaaagccttgcttggagcggccgcctcgctttcccagagcttcgccgtccctggatttgggacctcagctgcccccgcccctttacccacctcatccctttctctggccaccacttctccctgcccggggccgtggccatcgctgcagattgagccccttgccctggctggcgtggactccgggggcccgagccccctcctcgcgcgccctcacttccaagcaccctgatttcgtcaactttcgggtttgccttgttcattatgcaagccccagcaccagctagttccagcagatgggagaaggctttgggggattaatggagctatttgccttttgctttttttaaattttttttattttaagtgtctaaatcgattcgcaaactccgtaactttggaggcggaggacgcagccactaggagcactaagcccccggccgcgggagaggctgggggttggcgtgaggtccgggcgggcggggtggaaggagtgactagcggcctgcgaacagctggatggttggggcataagctttaactgtcccctttcagagtctgggcaacgaagtcgctgtatttttctctaccctctccccaccccttcttccgcgccccctctgccgggggcctgtgtgtgtgcgcgcgtgtgtgcacgcgctccgtgtgatgcc

SEQ ID NO: 238401 - DNA, 39 bp, Homo sapiens
  chr16:14164836-14164875
  hyper
cgagcactcaggacgggtggcagcggtcacctttgtcgc

SEQ ID NO: 238402 - DNA, 140 bp, Homo sapiens
  chr16:14379226-14379366
  hyper
tcagcccgggccaaagcgcggagcttccagaagcttttattttctaaatctcacgcctccattcagcaaccctggctgggcgtgggctccctgcaaggcggcggtggacggcccgcagtcgggccgataaggaaacctgc

SEQ ID NO: 238403 - DNA, 179 bp, Homo sapiens
  chr16:14396710-14396889
  hyper
gggcttggaaattgacgaggcggtggagcgtccgcgtccccgcccccaccccggaaagcccgctcgggaaactgactcgctgcgtgaccccgatctcaatgccgcgcgcggagcaggccggccgcgcccgccgctccacgtgcgcccgagccccgctggcatgggcggcggcgcctgcg

SEQ ID NO: 238404 - DNA, 91 bp, Homo sapiens
  chr16:14727905-14727996
  hyper
atcccagcttccgcggaaaacagagtgagagcctagacgctgttaagccctcaactgtcgccattgggtcctccccgccgaagcccattgg

SEQ ID NO: 238405 - DNA, 71 bp, Homo sapiens
  chr16:15188339-15188410
  hyper
gccctgaggatcccgaagaaagggtggaaacaccctggatgtgctaagctgtggccgggtacactcaagtg

SEQ ID NO: 238406 - DNA, 834 bp, Homo sapiens
  chr16:15528309-15529143
  hyper
cactgcgcatgtgccgtgcatccctgccccttctgggtacccgtaggcgctcccgggcgctggcggcggcggaggagagggagcagcgtcacgggcgcccggcccgttaaaacgctgctggctggagccacctccctccctgcagcccgcaacgggaatggagtaaagggagacccgtcgacctggccacggggatcagcgatggaattaaagcaatctttgtccacccatctggaagccgagaagcctctgaggcgctatggggcggtggaggagacggcttggaaaacggagagactggggagaagtgagtactggggcggggggcggggggccggggacagctggggatccatgcgcctgcgcgggtggtcgcgggagcgcgaggaacgccagcagtggacccagggaagcgcccccgcagcggggctggcagctcagggggatacgcagctctgcgcagcgacgcgctctccccgcgaacaaaagggggggaccctccgggctgagcctcactgggagggttgggagatggccaggcagctaaggcaggagcctgggctcgacttaggagtcccggatccgtcagctcgcagctggtcctgtgaagtcgggtctctcccacagcccagggaggaggatcctctctccgcctgggatgcgccagggcgctggagacgcgggaccgtcctggaaagcgcccacgtccctggagaggggggagtgtctgctggttttccgcttgctttcctaccccctgcgtgaggtttcggagcgcacctgaaattcccagcttttcctccctcgccttccttgggtcggggtgggaggctt

SEQ ID NO: 238407 - DNA, 115 bp, Homo sapiens
  chr16:15737214-15737329
  hyper
ctggcttttttggcgaaaacccccagtttaaggaggccttccccctggcttcacgttgtggagtcgaaaggaaccttgaagcggagaatgagctcgtgacgtggacccgaggaaa

SEQ ID NO: 238408 - DNA, 41 bp, Homo sapiens
  chr16:15951328-15951369
  hyper
gtctggaaagagggccggctgtgcagcgtgaagggtaggga

SEQ ID NO: 238409 - DNA, 33 bp, Homo sapiens
  chr16:15982613-15982646
  hyper
ctccaccaatcagcgagcgctctcggaaggccc

SEQ ID NO: 238410 - DNA, 130 bp, Homo sapiens; identical to SEQ ID NO: 204126
  chr16:16043203-16043333
  hyper

SEQ ID NO: 238411 - DNA, 103 bp, Homo sapiens; identical to SEQ ID NO: 204127
  chr16:16155950-16156053
  hyper

SEQ ID NO: 238412 - DNA, 71 bp, Homo sapiens
  chr16:17510577-17510648
  hyper
tacggaattctcagcggctgcctccaccaggggttgccaggggcaagcatctgcaccgtggtgaaacatct

SEQ ID NO: 238413 - DNA, 234 bp, Homo sapiens
  chr16:18812906-18813140
  hyper
ccgcccttcccgacggcccccgcgacgctcgctcctcattggacagaccgagcttacgcctcaaggaagccgggccaaccgaagctcagcgcatggcttgaaatcgaggtcaaaggagacagaggcagcgccgggccgagggggaggggacacggagtgcccaatcagcgcccagggactgcgcgacgccccgcccagcgctgtgggaagcggttcaaccgcctctgcaggggg

SEQ ID NO: 238414 - DNA, 432 bp, Homo sapiens
  chr16:18995158-18995590
  hyper
ctgcttgtcgccaccgctggatggagccttgccggatctcccgggctctgcagcccctctgcggtccctgatgctcggctcctcgcgggggcgccccactccggcttctgtgatgtcagcgccggaacctggaatcccggctccgcgagggaaggccggggaggcggcggcggcggcggcggctggagagggtcctcggcagcctctgaggagcgcggggcgcggccatgagcgagtccagcggcagtgcgctccagcccggcaggcccagccggcagccggcggtccatccaggtagggcggcagggagcgcgcgcggggacggtgcccctggggtccgagggcgcacggagggagccgggtgctggaggctcggcctggccgctgttccctcccacccccgacgccgggtgctcccggctctggggaaca

SEQ ID NO: 238415 - DNA, 36 bp, Homo sapiens
  chr16:19179237-19179273
  hyper
cctccgtttgggacgccctacgcccaccttaacttg

SEQ ID NO: 238416 - DNA, 32 bp, Homo sapiens; identical to SEQ ID NO: 204130
  chr16:19179914-19179946
  hyper

SEQ ID NO: 238417 - DNA, 693 bp, Homo sapiens
  chr16:19421882-19422575
  hyper
gaaagaatgaatgcagactacgggcggtgaatagaggtctcggatgccagcaggcgtcccaacccagcaggaactggctcaattctcagaagaaagcgatcggccccgaggcaggaaggccggctccggtgcagggagcgccgcctgcgggctgcttcgggccagggtcgacccgagggccagcgcaagcagcggcaacaggagcgccaggaggtgaggcgggttcgccaggagtggggccagcgcccgggctgccagcctagcaggggcgtcttggcggagccccctcgccggctcccagagaggctgggaagaactgggaggggtgtccccaatgcggggcgcccaagcgtggcagcacgggctgggagcggggagccagcggggtgcggcgccggagtgcggggagaaccaccaggcgccggaattggggagcacgtggagggggcagcggctccagccccagaccgccgcgctctgtcactttgcattaagaaagcttccggggaatgcacacggcctggccgccgccttcgtgcagcccgccctgcaggtgcaggaagaaaagaataatcgcacccgtttctcaggtgcttacttcaccatgtccgatccggtaagttttttatctgagcagcggcctgggtgagagcgaacatgagctttggaagcgcactatttgtgtgttgtgca

SEQ ID NO: 238418 - DNA, 813 bp, Homo sapiens
  chr16:19566588-19567401
  hyper
ttgcgtcttcgctccgccgccttctggagtcctttctgcccctagaggacgcaggtgagctaagcagcagtcatgccctttaccatcatgacgcccgcaggcgggaccacccggcactgtagacagctgccctttacaatcatgactcatagaaactacggcactctggccgtggccgacgttgctcctccgaagcatggcgccggcgggagttgtaacccgggctgtccggagcggggagctgcccctcacaagcatggcgtcagctgaaaatgaagcctgtgctgtgcggagcgtcgcctgcccctcacaagcatggcgtctgcagaaggtgctgtgcggccgctgcggggcggccagctgcccttcacaaacatggcggccgaggggtgcggggagtggcggggtaaggatgggaagccgagcagacggccccagaacaagcggtcatgtgactgggaagatggccgtctttccttggtaaggaagcagcggcgggtgggctttggagaggggctgtccttacttgtgatggggtcggcctgggtctgagagtgtgaattcctctctgtcgggttctggtggtcgaccggccacccccaagttgtcttgaccgtagaatccctggccgctaccgcggtccagcggagcaatctgaagccagactggcgggttcttggttctctccccgtctgctgcctctctgcgccttccacgggcccctgtccattcattccctaaagaaaacttgagtttccaggcttccgcgtccccagaagttggcgcgggttctggggtcgctggatgagggta

SEQ ID NO: 238419 - DNA, 403 bp, Homo sapiens
  chr16:19894933-19895336
  hyper
gttcaggtgccccccggcctggtgcagttgggcggccaatgtggcgcgtgggctggggccccaggcggggacgccgctgcccgccacactccaggggcctttgtccgcgctccaaggagccgcccccttagcgaacgggggacggaaagggaggactggctaggcctgggtgtgacagagcaaggacggaggagtgaacccgctgcacgggggagatttctggggcaaggtcgttggccccttcccaggctgttcaaccggctgcccggggccaaggcgggtgcgggctcctcccgcgcgctcccttttcggcctaagcgctagggaccccgggatgtgtggggtccttgtggggctggaagcctgtgtcccccaaggagaggggaccgagaacaggtctagt

SEQ ID NO: 238420 - DNA, 88 bp, Homo sapiens
  chr16:20084495-20084583
  hyper
gccccctccagatgcgcgcacaaatgcaccttcgaatccatgctcacatgcccagcccatcgcccgccgtcacagtcatcacacacac

SEQ ID NO: 238421 - DNA, 1167 bp, Homo sapiens
  chr16:20084643-20085810
  hyper
acagcaacttcctttccccccgtgtggaaatatccatagttgcccttaaagcttaaactttttccgagggggcgccagggaacgcacgggggaggacgggggattctgggtagggttgcccggcacttggggttcctggcttccctccctctcccccacgcccctcacctggtaaaccgaggcacagcaagaggctgtagtagaccacgggcacgaaacccaagccgcaggccgagccgggggaccaccaagacagcgagctgttggctgcgaggtgggcgtgcgtgtgctccatgagcgcgcccctcgctccccttgccgcttcgcgcccggcctgccagcccgactctggtcgccggctcggtggtggcggcggcggaggcagcggcagctggagcagcagcgcctctctccccgcaggactggctcctacccttggccgtgatcccctctgctcgctccgcacctgcccgcctggagtcttggctcagccctcccgcagggcgcggggcgcagggtgcggggcgcgctgcgcggggcctcgggaggggctcccggagcccgtctgtgcgcctcccacctcggacccgctccactcccgcctcaaagccggggggctgggacgccgctccccgcagccaatcagcggctgcctggaagcggagtgtgtgtggggtgggagggatgcggaagaggagggggtcccagccgcctcgcttggctccactttcaggggagaagatgcagttagacctgggagccccgaaggaagaccggagtggaaaacaggctatccccaatctccaaccccgagggaggggcgtggtgtgggtaggatctgcctctcccgcagcggctcctcactcctccagcgtgtcctcagtttgcctttctccactctcctcgcagccacctctcttgcccctctccaatgcttccagtccatctccggatagaggattctatacctagggcaaagaacgggggaaggggtggggctgttggagcagcgaggatgctaaagcgttgtcggttttcctcgacaagggaagctgagcttgctggctctggaaagaggggtgcgtgcctccctgtgcgtgtgtgtggcgactctgggggtggccgccggtgaactgtcccctaactggagtgcgtttgaagaggata

SEQ ID NO: 238422 - DNA, 310 bp, Homo sapiens
  chr16:20359828-20360138
  hyper
ttcacctggacggacgcatcccacaggcagcagtggccgctccagtgcgcgcaggccttgcggctcacgatgccctcgtcgctggacggatgcgtgccattgagccacatgggggcggccgtgttgcagcgcaggactggcacgcaggtctcggccatgcgcgcaccgccctggcccacgaagcggtaccagccgcgcaggtccgtgtcgcaggcgtagccctccccgtactcggtgctgcgccagtactcgtccagggtgcggtgcgcctggcacggatccgcgcacacgagcgcgtcgccctcgggca

SEQ ID NO: 238423 - DNA, 36 bp, Homo sapiens
  chr16:20753258-20753294
  hyper
ccgcctcctgccccgcctcccgactgcaacctgaat

SEQ ID NO: 238424 - DNA, 199 bp, Homo sapiens
  chr16:20911813-20912012
  hyper
gattgcgtcacgacgcacataaagacgtacgaagccgtcgccaagtaagggcaaagacctagcaacccggagggagctgggctggaccatttttttttcttgttttacgggaatggagcggggaggataatgaaagcgtaaaggaaaaatagggggaggaggagctcagcttattgttggatgcggcgggagatgggta

SEQ ID NO: 238425 - DNA, 600 bp, Homo sapiens
  chr16:21294968-21295568
  hyper
cttgggagcatgcgcggggtggggcggtggggggactgaggtggcgctcccggctcctccgcgcgcccccggcaccttccgcgcgtccccggctccccacactccgtccccggctccccacactcccaccccggtctgccccgggcgcccccggttccccacctcctggtgtgcctctggcgggtccgcgcaggatcaggctacagactcgcccgcgggcggctgcgcggcgggccgttggggagggtgttgggatgaggagccccaaccagatggacgcgcaccccgcagcggcggaggcggcggcgaggcttgagcagtgagtgctcgggagccccggccagcccttcctccttctgcctgcgtcctctgcgctggccgctgctccagacgccagggggcccacccgctgcccgtggtcggcgcgcggagctcgaaagcgcgcgcctctaacaaatgaaaacccatagggacttagggttgaattttaacttttttttttttttggcttattgtttagtgctagatagaagggtttgagcggtgtagtcaattttggtgctagtctgacttgaggcaacgtgacgtgacctacgcgtc

SEQ ID NO: 238426 - DNA, 216 bp, Homo sapiens; identical to SEQ ID NO: 204134
  chr16:21531391-21531607
  hyper

SEQ ID NO: 238427 - DNA, 84 bp, Homo sapiens; identical to SEQ ID NO: 204135
  chr16:21964475-21964559
  hyper

SEQ ID NO: 238428 - DNA, 31 bp, Homo sapiens
  chr16:22173699-22173730
  hyper
atgcaggtgctcccgcgccgggagtgggcgg

SEQ ID NO: 238429 - DNA, 298 bp, Homo sapiens
  chr16:22203675-22203973
  hyper
gggggaatttggaggagcaccgcctaagccgccactggcctaaacacaacacgtggtaacttctactcttctacactctggccatgccaaggcttgcggttgaactctggtctcgttctctcagagccgcaaacctcggaccatttgaagctggcggtcctggggcttcctttcctctcgataacatgtttacatccaaactcacttccttcctctctttcttctccctgctaatcctgggaaatctgttcttcgagcaggaaaaacaatctcacactgctcacgttattttctagat

SEQ ID NO: 238430 - DNA, 72 bp, Homo sapiens
  chr16:22217390-22217462
  hyper
agccttgagcaggagaaccggacactgtgtactcagcagggggagccaagacttagcgctaaccattgcacc

SEQ ID NO: 238431 - DNA, 57 bp, Homo sapiens
  chr16:22308550-22308607
  hyper
gtctttttgtccccgctgcatacactcctggctcagttttgcgcgtgccatcagcgc

SEQ ID NO: 238432 - DNA, 996 bp, Homo sapiens
  chr16:22824596-22825592
  hyper
agccctcctcactcagccctcggcgaccctctggtaccctggacagctccccggggagcagtctaccgctaggcggcggctgctaagagaggaaccctcctgacgcggagtctgccgctccggggctcgctctccggcaggcccggggagaggtggggtgacaatgggttggggtgcgcgcgtgcctcataggtgcgagacagagcgagccgccggggtgtgagtcagcgcgctgggggctaagaagctgggtgaatagtcacggaatctcactcacgctcggctcctccacccatcccgtctacagcgcgtgtcccagtccagggcgtgcgtgcgctcggtgtccgattccgggctgtgtgtgtccatttggcgagatgtcgagagcggggggagtgtccttgtcggtgtatctgggcccaggttaggggacttctcctccccacccccgcgtgggtgtgggggtgtgtccgggctagggcgcgtgtgcttctgtgcctgtgcgtgcgtgtgcgggtcagggtggtgggaccgcgcatcagggcagggtgcctgcgtctgcgtctgggtctgtctggtctgcatgtcggcgcgatctcgacctggattcgtgtccctggatgtcgagaggccagcgtggtgggggtgtccagcctcccggaggagtactatgccttgacaccttcgtttcaccgccccaaagctggcctggggctccgtagggagtggcctgcatggggagggcccgcgtgctgtgtttctgggaggggtaagagagtgggggcgcagggggcgggccaggtccctgggcgcggcgcgggctcgggggacccgcgcggctgacgtcaggccactccttaaatagagccggcagcgcgctccgctcggcatttcccgaagagccagatcgcggccggcgccagcgccaccgtccggtccacccgccagcccgcacagccgcgccgccgccgagcgtttcgtgagcggcgctccgag

SEQ ID NO: 238433 - DNA, 59 bp, Homo sapiens; identical to SEQ ID NO: 204136
  chr16:23159923-23159982
  hyper

SEQ ID NO: 238434 - DNA, 42 bp, Homo sapiens
  chr16:23193696-23193738
  hyper
gcaggcacctgccatctggacgggagtggaaggaagtcgcgg

SEQ ID NO: 238435 - DNA, 184 bp, Homo sapiens
  chr16:23313522-23313706
  hyper
ggggagccgggaccgtgcgtgtggccaggccggtagcgcccagtaagctccacccgcgggcgctccccgtgcttccccgcccctgaacctgctccctcccagtcggtctcgccgcgctcgccgggtgtcccagtgtcaccaacactcggccgccgccgccagcttggcgcgcaccgccgcctcc

SEQ ID NO: 238436 - DNA, 190 bp, Homo sapiens
  chr16:23313886-23314076
  hyper
gcttgggtgcctgtctgaggcgcctgggacccggcctggggactgaacgggttgggggcggaggggagagctggaggctgggaaaagcccccagggtgcagaaggcagacggggccagggtccccggcgtgtctgggacctcagagacggcggcaaagtcctggcatagagtgggcggggcaagaagttg

SEQ ID NO: 238437 - DNA, 228 bp, Homo sapiens
  chr16:23464125-23464353
  hyper
ccagggccccgagcggctcaccctccacggcgtggttcacctcttggatgaacagctgcagcttcatcaccagggtggctgcgtggccatccgccttcccggacgccgcctccttggagccggccctgaaggccgcattgatccactccttcacgtcgaagtcgtctgccaggaacttggagaagtccatggcggaactgcctcaggcctggcgtccagaacttaaga

SEQ ID NO: 238438 - DNA, 92 bp, Homo sapiens
  chr16:23464614-23464706
  hyper
gagctcccggcaccgacaaatatcccatgtctgctaacatttgccgaggactaaactatatgcttactataaagccctgacatacattagcg

SEQ ID NO: 238439 - DNA, 143 bp, Homo sapiens
  chr16:23568685-23568828
  hyper
gggcttctccctgcgtcacttccggggactgcttccagccaatcggcctccgccacagccagcgcagccttgccccttaaagtcacaggccccctagcgcgaaatcccacgcccccctggacggctgcggccgcactcgccac

SEQ ID NO: 238440 - DNA, 92 bp, Homo sapiens
  chr16:23607741-23607833
  hyper
ggcactgcgccctcggagcccatccaggttcggggacgaacaactgcttggtgtcacaactaaactgtgcagacgtcgccgtctttccctaa

SEQ ID NO: 238441 - DNA, 248 bp, Homo sapiens
  chr16:23652254-23652502
  hyper
cacgtgagcaccacgctatttccacattttcattttctgtgccccctcagccctaagaggagggggtggtcagatgatactgctgccctcggactgccgaggacacaaagccaggcctaaaaccctgggaaagcggggtcagagtcctgcgtccgcccttcccgcacccccggcaccttttccttctcctcacagctgaggggcttcccgggaggctcgtccatcgggcaggcgacagaacgaaaaga

SEQ ID NO: 238442 - DNA, 87 bp, Homo sapiens
  chr16:23706370-23706457
  hyper
agacatcagctgctgcagcacgacctcgggctccagacccccgcgatccaggtccgggttttctacgtactgagcagcagcaagggc

SEQ ID NO: 238443 - DNA, 391 bp, Homo sapiens
  chr16:23724337-23724728
  hyper
cctcgccccaagtgcgacgccgccccctgcgccccgcgaccagactttggggacttggcgtcggtccctggctctcacctgtggactcagcgtcccgagcagcagcgccgcgaactggagctggagccccagccggggccacggcctcgaccccctgaccgcactcgccatagcgcctgggcagctgcacggctggccaggtccctgggtgcctccaagggagcgctctgtccccgcccgacccggagaaggctccgcccctggctgggcctgcaaccccagcctggagtcctcgccgatccccgcccttctcatcacactcccagccgcatcctcgcgtcccagtcaccccaccaaacacggtggggcgctttcccgggagagggatttt

SEQ ID NO: 238444 - DNA, 643 bp, Homo sapiens
  chr16:24266969-24267612
  hyper
gctccagtggtgcccgcagcaaaaggcaaacttgcctggctcatggggtgaaagggaggattgaagaatgccgcgttgggtgggtgctgagggagcgccagagtgcgctacgggcttcgctccccttcccctttccttaacccttcctagagcggaggaaccgggtcgtgctgcagcgcccaggagccagggcgctgactgtcctcggctccagaaactttgcgcggagagtgggcttgactgggcagagccgagccggctggctgacccgggaaggaacgggggaagggcggggtgagggaagaaagaccctttagcaccccgggtttctagcccgggcggcggtgtgcagctgcatgagggagctgtcccttcggcaccacggaccttaaagcctaggcgttaagacgacggaggcggggcaacaggcggggagctgtcccttcagcaccacggaccttggcgcccccagggaaaccagccggcccccgccccaggactctgtcttttctccagtttgagcgggggtgtcgggagcaggcggagagctttcctgcgaggctgtggaagcagtgaacactcttctcagcggctcgcctcccagcagtgctattttttgccatccgccctcacccccagcaca

SEQ ID NO: 238445 - DNA, 43 bp, Homo sapiens
  chr16:24267672-24267715
  hyper
tctctgggtttctttgccttgagtctcccggggctgtgagaag

SEQ ID NO: 238446 - DNA, 191 bp, Homo sapiens
  chr16:24550403-24550594
  hyper
agcggctgctccacgatttccacttgtcaagagtatagggtagccagtttattggaagcagcagctagggagcgcttgcatagcaaccatagttttctgcgtagcaaccataatgctcacttaaattgggaggcttagaggagctgacggggcctgtggggaagggggagttagccggccacccctaggca

SEQ ID NO: 238447 - DNA, 137 bp, Homo sapiens
  chr16:24551563-24551700
  hyper
ccgtggggtcgctcggactcttaacgtgtggactgaccgctactgactgcaccgccaatccccccgtctctgccggccccttagcatgagcgagggggacccagccgggtgacattgtgcccgttggcggattctcg

SEQ ID NO: 238448 - DNA, 386 bp, Homo sapiens
  chr16:24740563-24740949
  hyper
ttcaaaagccgcgcgggctcatcaggctgcagttggggtaaaatttgcgttttaggcaattttttttttttttttttttggcgtgtgtcagtgggggaggggccgggcggcgggtaggaaacttgtgtcgcagcaaagaaggaggaggaggggagggactcccctcctcggtcagaccggagccggccgcaccgaaaaaggttggactcgggactccgcaggcccccccagccactccgcggggcgcctcggaggctgtgacctccagggaggtccggctgggtgcagcgtgacacgccggggcggttgccaaggacctgcccaatctgcgggtccagttgctagggcctccatcttgggggccagtggccgtggcgcccccggaa

SEQ ID NO: 238449 - DNA, 231 bp, Homo sapiens
  chr16:25025361-25025592
  hyper
atacggtagggaatcgaaaaaattaaacaaggaaactaagcaaaaagatggaggaaatgaaacagtaaaaagcaaatttagaaaactcgagaggaagtaaaagtattttcatacactcaaaaaaaagaagtgtcccacgtgcttcagccaaaccaaactccccttaactgttaaaaacagaaaatcaaaagaagagctgtgagaaattcatactttcgtatctctttgctg

SEQ ID NO: 238450 - DNA, 417 bp, Homo sapiens
  chr16:25078044-25078461
  hyper
cagcgggcaggcggcgccgcaggaagtgaccgggcaagaacgggggtcgccgcccagctcggccttctggtctctgcgccctcggcctggggctccaggccacaaggggaggccgtgctgggcgggcccgaagggggtgggcggggccccggaagagacgtgggggcggggccaacggaccgcggaggcggagccgctacagtctgggcgctggagcggtgggagcagcgctcgtccgccgttggggcccccagcccgcgcgcgtgaagcagctagccgaccaagccccggaaggcgagtgccggagggggcgggacagctcctccggggccagcgggcaccaggcttgggggctgaggcccagcggcccgagaccaactgggctgaccgaggccgcctccccgccagccctggggt

SEQ ID NO: 238451 - DNA, 83 bp, Homo sapiens
  chr16:25123186-25123269
  hyper
ccaggaacctccacgcccatggccactaggcagagggaatcctctatcacctcctgctgttccacctcgagctgcgacgcaga

SEQ ID NO: 238452 - DNA, 169 bp, Homo sapiens
  chr16:25268733-25268902
  hyper
ccgggaggctggacgactgggagaaaaatgaagcaggctgaggaaaggctgggcggaggcggacagccgggccgggagggggtgtgtccgctactcccgggtcgggcgcggagaggcgagtccccgagtgggtggggccggatgtgcaggccccgcccggcgccaggtt

SEQ ID NO: 238453 - DNA, 304 bp, Homo sapiens
  chr16:25702790-25703094
  hyper
cttcaagagaagatggggggcggggggcggtggctggaaagatggaagttgggatgggaaagcggttgtagaaaaggattcactcctggaccgaaggcaggaggatatcccgggcgagagaagggagggtcggggatgggctgagttggagtcccagaggaaaagcggaagcgagagcttcgtcacccgctgtcttccagctcccggtgcgcggcaccggaggcaggcgttgggctttacctctctaaaagtactggggcaaaggaatggagaacacggcgtcccgagctcccaagggagggga

SEQ ID NO: 238454 - DNA, 561 bp, Homo sapiens
  chr16:25704248-25704809
  hyper
ctcgcaggccggagagcggccaacgggagcagcgagaggggcggcgccgtcagcacccccgactatggggagaagaagctgccacaggcgctcatcatcggggtcaagaaaggagggacccgcgcgctgctggaggcgatccgcgtgcacccggacgtgcgggcggtgggcgtagagccgcacttcttcgacaggaactacgaaaaggggttggagtggtacaggtaggaccctgggctccgcgggctggtggagacgcgtgggggagacgcggaggggaagccgcggctttccacgcccttcgagcatccaggcaccgtcccgagaggcccaagcccccgcgagggctctgcaaaccctggcggcgttgctcagggggatcggctgagagggctggactccagcgaaaggtcactttatttcagggcgaggggaggaggtgtcaccctgccctgcctcccgcgctcctcatccaaggaggtgctgtctgaatctgcccagctccaagcctgggaacccccagccctcctgcctgctgggtgtttccgaaaccaggctctt

SEQ ID NO: 238455 - DNA, 54 bp, Homo sapiens; identical to SEQ ID NO: 204143
  chr16:27215267-27215321
  hyper

SEQ ID NO: 238456 - DNA, 118 bp, Homo sapiens
  chr16:27280261-27280379
  hyper
gggcttccacttgtcgccctccgcctcctgcacctcagtgacttccctgaccaaggaggaagaattggcgtgcagcctgggcttccctcaatggccaccattccgctggcacaatgta

SEQ ID NO: 238457 - DNA, 290 bp, Homo sapiens; identical to SEQ ID NO: 204145
  chr16:27413511-27413801
  hyper

SEQ ID NO: 238458 - DNA, 190 bp, Homo sapiens
  chr16:27561384-27561574
  hyper
agtggagctccaccgtcattggtccggggccccgcagtaaccaggggaactgcaaacagtgtagaggccgcttccggttcgagctcccggaaccgccgcctctagggatggacggtgagtgtctgtgggcccctccgggaggtcgggctgttattctcccatccctcccgaccgcgctttgggcagaatc

SEQ ID NO: 238459 - DNA, 127 bp, Homo sapiens
  chr16:28223525-28223652
  hyper
attttagtaaaggcgtggtttccctttcgcttttttcgcccattcattccgctaaaattttagtgagtgccttttacgggcggagcatcgagctggcagcgtgacgacacgcggccctatggagctt

SEQ ID NO: 238460 - DNA, 157 bp, Homo sapiens; identical to SEQ ID NO: 204146
  chr16:28304161-28304318
  hyper

SEQ ID NO: 238461 - DNA, 403 bp, Homo sapiens
  chr16:28502991-28503394
  hyper
agccagaggtggtcgttccatgagggtgggcgggaatactcaccctcggaatccgaaaagcgccgccgcgagcctgcacagcctcccatcgcatcaagttcaggtcccccgagggtccagggtcatagagtgtccaaagggggctcccacgggagggatgagggtctgcgacaggtgacaaggatcaacgcccgattgccggtcccagctccggcttgtctagggcactcgcgccccgcgatccatcaaggaagctgggggctccatctcgagcgccctacgacccaccacgccccacccatcgtactctcccccgccccgtctacagcagggaccctgaggcctgtacctttaagagcagcagaatgttctgcactatgcagaggccgtttgtcggatcacg

SEQ ID NO: 238462 - DNA, 307 bp, Homo sapiens
  chr16:28874813-28875120
  hyper
tctcgctggtttccggtgctcggcggctactctagccctcagccgggccctgggactctatcccctaaggccggttctctatggtcgacatcgcccctttgtcccgaatttcctccgggaggacgctctggtgggatccaagcacttcccccgctgcgtctgtggtcgcttttaggtgcaactggagaaggcactgaagccctacgagattcacaccgtcttcggtctcctggggtcggcgccgagtgggaggatggcggaagtaagtatgaaggtgcccttccctcccgccgctgttctctatggt

SEQ ID NO: 238463 - DNA, 904 bp, Homo sapiens
  chr16:28891022-28891926
  hyper
ggggcgggctggcgcgcagcagcgggtgtgattcgcgtcctcctctctcctcccctgcaccccagaggcaggttttattttaagctttaagggtgttctcagccaaaacaccgaagctaagccaccctcgcggcttcaagagcttggagagctcgggttacccacccgaactccgggctccgggtcccgccgcgatgccggctgcggcgcggggggccactgccactcccggcatgcgccgggcggacggccgctccaccaatccccgcgcccgtcggcgcccctgccccgccctccccagcctcctgacgctgattggtcgaggggaggactcgctcctagtggcgggaaagcgcggcggtgtgatgatgactccaaggagcccggcgcccggtcagggagggcactggcatccctcattacccgcccagcctggccttagcccttccccgcgctccctaggcacccccacccccgcagggcatctccagggctctgcctcctctcccgccctgggggctactccccatcccgcggtccatctgcatgtcgcgggttcttccgcagcatgtgagcctcgctggggactctggaggcaacgaaagcctccctgtgccttggtctccgaacgcaggccccgtcgcgttaagcacaagctggcagggcctctcctctcccttctcagatttgctccttgacatttgcctgctgcctggcggtggcaacagctggggcggggcgcgcgcaggaggccccgtaaccctatccccgctccggctccctcgtgaaaccggagcttccctgccttggccgagggggagggctgcgggggccagaccgcctgcgaagaccacagggtttttcctctcgggttttggctcccgtgggatggatgtggctgtgc

SEQ ID NO: 238464 - DNA, 93 bp, Homo sapiens; identical to SEQ ID NO: 204149
  chr16:28936699-28936792
  hyper

SEQ ID NO: 238465 - DNA, 117 bp, Homo sapiens; identical to SEQ ID NO: 204151
  chr16:29607010-29607127
  hyper

SEQ ID NO: 238466 - DNA, 156 bp, Homo sapiens
  chr16:29691162-29691318
  hyper
ggtacggggtgaaacggtgaaggtgggggtgtgcgcgtcatttgaaagatgtatagccgtggtggtttatgtgaatttcctttaagctcaaagcatatgtctaactactaagataatcttttttttttttttttttgagacggagtctcgctttcc

SEQ ID NO: 238467 - DNA, 124 bp, Homo sapiens
  chr16:29721781-29721905
  hyper
agtaactcaataaacgtttctctatggtttctctggtgagcacgtggtatttctaagccacctagtggcaataaaaatcctcttcatgagacacattgctggttctctacggtacattgcagct

SEQ ID NO: 238468 - DNA, 84 bp, Homo sapiens
  chr16:29816661-29816745
  hyper
ttttgtataaccccgtgttgtgtaaatacagtttttgctccggtgcttccgcctgatttttggggctgcgggggcgggaccggg

SEQ ID NO: 238469 - DNA, 52 bp, Homo sapiens
  chr16:29822515-29822567
  hyper
cactaagaactgccgccaaccccaagggtttcttctcggcctggtgtccgtc

SEQ ID NO: 238470 - DNA, 53 bp, Homo sapiens
  chr16:29822747-29822800
  hyper
aagaggccccgtcagaaacccaaacagagctgccagacgggaatgccgccctc

SEQ ID NO: 238471 - DNA, 231 bp, Homo sapiens
  chr16:29827281-29827512
  hyper
tggtatacgcatgcgacttcccggtggccatctttactgtgggctgaagcctgtgcgcttactcgcgcatgtgcaagccttccctcgctttcctcttccaagtagccttgcctagagcggagcctcccgcgccatttctgtgcgcctgcgtagcgtgaccctgcgcagcctgggaggcgggtcttagctccaggtgcgtacggcatctgacttgacgtggcccacaactga

SEQ ID NO: 238472 - DNA, 504 bp, Homo sapiens
  chr16:29874494-29874998
  hyper
acctcctcctccgcgcccgtcgttgcaaaattggagagaggaaaaagtggcttaaaaaaatagttgcggcccctttaaggcctgtcggcttcctttcccttttcctccctccgcccctctcccttggctcgtaccaaagcgcagaggaggagagggaggaaggaaccattaacgtcaagcaaagttagaaacggaaaaggaaagggtaaaagagaagaccgaataaaaatctctgctttccttttgtggagggtatgacttcctggaggcaaagataaggcgataaaattcctcctcctgagtctttgcgtccccaagaggccaggagatttggtgcagtcctcactttactccccgccccctaagtctccagccgcctttgctctcgcaggctctaggcggctagagaggctccagagcgccctgcagatgggttgcttttcgcgtgccccttgtgatgggaggattaggtcgcaggctccaccctacgtcatcctcccaagc

SEQ ID NO: 238473 - DNA, 574 bp, Homo sapiens
  chr16:29887818-29888392
  hyper
gaccgagcccaggtcggtgcaagaaagagggatgcagcccggagaagatgagagggagacccagaggggacagtttcggggaaccgggcggaggagtgagaactaaagggcatgggggcaggccttgaagaagatccaggaaggaccccgagcgaagggatggaacccagaaagcacgggggtcgggacaggacaggccgacgacggggcccacagggaaggggcggggccgaggggacgcgggcggggccggctcactcttttggcaggcgggcggcgcggcgctccaagacaggtcccactggcaagtgagaatgtcggagcctagcagctcgtagccaggctcgcactggtaggtgagcaccgtgccccggatcaggtccccgtgggatgccgttctccagccccactccggaggtggcagctcggggcacgtgtcgttcctcgggacctctgcaggggagggaaggcgagtttggaggctgcgttttaactgcgggctcccttccagcctcggaggctttgctctgtgccccctcccgggatctgtctctctctctctctcttagagaca

SEQ ID NO: 238474 - DNA, 334 bp, Homo sapiens
  chr16:29888512-29888846
  hyper
gagccaccacgaccggccacctcccgggatctctggcctgcccgacccctgcccatcccgggactctatccctcagtacctttgaagtgcaatacgaagccctggcccaggcctggatttgggggcccgggcggtgcctgaaactgcagtgtgaggtcgggcccagaggagagaaggcggcggcgcggctgaggtccccgcagctgggccaagactcgggcgctgggaccgtccccgtcgaacagcgtcagcatgtccccttcccgcacattcaatctgcagggggtgagaccaggcaatggggcggggctgcgactggcccctcccatccagc

SEQ ID NO: 238475 - DNA, 62 bp, Homo sapiens; identical to SEQ ID NO: 204158
  chr16:29910888-29910950
  hyper

SEQ ID NO: 238476 - DNA, 240 bp, Homo sapiens
  chr16:29973075-29973315
  hyper
cgcgggtaggggacgcacagcccaaaaatgcccgcgacaagcttctggggcagttctcgccagtctctctggagggagcctacgggttctgcgacgtttctcgcacttgctccctggcctcgctcccgtttccacccctcccacggaggttttcctttctggtggctccttccttgggtgtccctttggtacgcccccaccctggcggtgagctgcgaggctggcgcccgcgtggccact

SEQ ID NO: 238477 - DNA, 129 bp, Homo sapiens
  chr16:29984757-29984886
  hyper
atggttgctaacctcggagcagtctattttcccgccttttccgcgcccagcagcagcttcctttgcccctcccaacttccaccctgcgcgcagtcgcagatcgccgctgctgtccgtccacccgcgccc

SEQ ID NO: 238478 - DNA, 193 bp, Homo sapiens
  chr16:29985280-29985473
  hyper
ggcagagagggcgcggggaccgtcagcagcaccttagctacaatcgttcagctattctcggaagagagaagggagagggaggaggccggggcgggagtgggggctgtcaccctcggaccccggcgtgagaggggccgtgcggccggacgtcctcggggtgggcccccagtcggtggccgaagacctacagctc

SEQ ID NO: 238479 - DNA, 342 bp, Homo sapiens
  chr16:30006505-30006847
  hyper
cagtttgtcttccctggaagcggcttcatccacctgtgtgtgcgccaagagggcaaactatgcaccaaggctgcgctcaccgcgccccgtcaggcccctcctcctcagcagcaagccccgcctccgcctcccgcggcccaggctccggcccggcacacctgcatcttcagcagctcctcctccaccagccgcttcagtgcctgcttctcctcgggctccaggtggctgcggcccgagtgagctaagtacctccgccgcacgatggaatgcgtaagcgtgctgcagggacatggtgtcaggacggagtcccgacccacccgcgccctttccaaccccatctcc

SEQ ID NO: 238480 - DNA, 206 bp, Homo sapiens
  chr16:30007370-30007576
  hyper
gctttccagcgtccgccatttttgtggcgtcaccgcgtcgctgctacgccatccccagcgcagtggctgccgcgctcctgtcccagtgtcccccgggaggtcggcccgtgcggtgacgcccctgagcgcggggtacgccgggagttgtagtcctgacggcacagccttgcagcgtctccggaagtggaggcgggagcggcacggca

SEQ ID NO: 238481 - DNA, 40 bp, Homo sapiens
  chr16:30032528-30032568
  hyper
gagcacctcacacgcgcagatacacgcctggctttagggg

SEQ ID NO: 238482 - DNA, 285 bp, Homo sapiens
  chr16:30075774-30076059
  hyper
aaccaagggcctccgtctggatttccaaggaagaatttcctctgaagcaccggtgagtgggcaggggctccctccccatcaatagggccgacccaagtcttcctcccccttcccccatgccgggccccacgatagtgtgaatgtcaggggcttcaggtttccctaaatataggtccctgccagaggatccgtggcgggaaaagggcaggggtcattagagaagatcggggacacatgtggggcgggcaggagctgccttataaccagcccgggaacccctagctc

SEQ ID NO: 238483 - DNA, 325 bp, Homo sapiens; identical to SEQ ID NO: 204159
  chr16:30077527-30077852
  hyper

SEQ ID NO: 238484 - DNA, 125 bp, Homo sapiens
  chr16:30103514-30103639
  hyper
gacccagcttggacggctgtgcctaccccatgccccgccggggctcagaaccgcacaggtctataggggcggaaatctccgcttgagctcccccttcccggattacacgcgagcctgagctgtct

SEQ ID NO: 238485 - DNA, 296 bp, Homo sapiens
  chr16:30379992-30380288
  hyper
ccctgtttcacagcgggatcctgactgcacagtctcccttccatcagccagacttccccacctctctactccatccctgggacctagggctatgggggaagggagatgcctgcacccctcccaggctatccaccctaagggaccaagggtctctaccagaaccctcgcccaaccaaccctccagaatatccggcctgtagctggagttccccatcaaagagcagggatgacctcaggtatcatctcattcaatccactttatagaggaaaaaactgaggcacggaaatggggaagc

SEQ ID NO: 238486 - DNA, 81 bp, Homo sapiens
  chr16:30382503-30382584
  hyper
agtcggtgacaaccggagacaagccttatgggagggtgacagctggggacagcacggagaaggggcgggggcattagtgca

SEQ ID NO: 238487 - DNA, 809 bp, Homo sapiens
  chr16:30411405-30412214
  hyper
aaataaagaggttgtcttggcgtagtcagcggctttctagctccgacgtctggttcaaaaacggccgccagctccatcagccgatgccccaggcctgaggtctggctgcccgcaggcaccacctacgccacagcatccagcgcgacccttaaaaggaaaaccgcgcggcgctgcagagacaaggcagcaaggaggaggaagagggggcgtgtggggggcgttgttgctatggcgacggctgtcggcgggaggcagcccacaggtctggaaccggcgtggaaagcccggacgccggcgcgccgcccaccgggacctgggaaacccgacacccgagaccctttttatgcgtcgggaaatgagtcattcggctgcacagcccaaagggagggcaaacggtgctccttcacccccagaaaagcccgccggatttcccggcgccccgcggggcctgggaagcaggtctgcaatccctagcgttttcacaaccactggcctgatcggccagggattaaagaaaaaagaagtccagggcggttctccccgctaaacaatgaaggcaacgaagtacagggtcgcaagttcccgcccccggctctccccgatctccgtgcggaaagaatccctggacgggttctcgcgagatcgtaagcactggcctggcttccctagaaaccgaccagggctggctgcagtgcggctcctcccgctccgcccgccctttccaaattgatgcgctctcaaaaccctagaaccctgcgttcagggctggggctcttgatggcctgagcggagccctttggggcttctgg

SEQ ID NO: 238488 - DNA, 347 bp, Homo sapiens
  chr16:30428811-30429158
  hyper
gagacccaggtctctggctccggggcctgccgctaagggctgacctatccccctctccccgcaggtcccgggcgaggcgcccgcgccgtccgccgacccggcgcgtccccacgcgtgccccgactgcggccgcgccttcgcgcgccgctccacgctggcgaagcacgcgcgcacgcacacgggcgaacggcccttcgggtgcaccgagtgcgggcggcgcttctcacagaagtcggcgctgaccaaacacggccgcacgcacacgggcgagcggccctacgagtgccccgagtgcgacaaacgcttctcggccgcctcgaacctgcggcagcaccggcggcggcaca

SEQ ID NO: 238489 - DNA, 220 bp, Homo sapiens
  chr16:30545486-30545706
  hyper
tccccatgggactgagcacccgatactccacctgggtccgcttctgtcggacacttcgccacctccggatcctgggcagccggatcccacagttcggccttctcctccacccaggagatgagcgccggcttgctgcctccgactcctgggggagaagaacgcaaaccccacgctgcgaggaggccgcctgcccggccccggggcccccaactccacacgc

SEQ ID NO: 238490 - DNA, 255 bp, Homo sapiens
  chr16:30545948-30546203
  hyper
gggccagaggcggcgccatggggactgtcagccccagcgacggatcggtcatctcccctggccaggcctgggcatgcggaacctcccgcgcccgagaacacttccccggcccggtaccaagggaaggagggacgtcagtagagcccccgaaggcccactagaggggatggaaactaagggccgatggctgcgagtccatggtcagaactggacgatgtcttcaaataaaacggcggcagcgcgacctctcgacct

SEQ ID NO: 238491 - DNA, 177 bp, Homo sapiens; identical to SEQ ID NO: 204161
  chr16:30583154-30583331
  hyper

SEQ ID NO: 238492 - DNA, 52 bp, Homo sapiens
  chr16:30583722-30583774
  hyper
gtagaagcaggtgcgtgttttacagtagcttagctgcggagtccacccagcc

SEQ ID NO: 238493 - DNA, 127 bp, Homo sapiens
  chr16:30596946-30597073
  hyper
gcctggcaaagggaggcttccggggaaggtggagatgctggcgctttcctgtctttcctcagacaagtccgtaagggactcctgcccttaaccaagatggaaccttcctggcgtcaacacccctcgc

SEQ ID NO: 238494 - DNA, 1149 bp, Homo sapiens
  chr16:30620879-30622028
  hyper
cggatctagagcagccggttcccagtcatcggtgtttcgttccaaccaggagatgagggctggtttgggacctgcgcaccctggggaaagagaacaaatcagaaggccagctcctagatcacgccgagtagtatctccccgacggcacctcctgctaagcccctgcccacctcccctgacaacctggtcgcctgccaggaccgtggcctccctgcctacaccctctccggctcctgcatcccttcgcgccccgcggcagcggatggggccggcctcaccgagcgcgcccaggtgaccgtaggtctcccgcatcacgtcccggtacagggccctctgcgcgggccgcaggcagccccactcctccggggagaagtacacggccacgtccacgaacttcagagccctcggcctcctgccccttttccgactgggtctggcctttcctggtccctgcgcagggagcggagccgaaggtggcgccatgggacccgagaagccggcgccacggccttccgtgtccaggcctcggccctcgggcgctggcggcccctgggatcgaggagcccctgccggaccagggctgagcgtggccggggaggcccggagggaatcggaattggtcgcccgcggggctaacggaaaccttttgctgttattcaggaaactcctgcccgaacttgggtgaaaggcaccggaagatgccttcggggaaaatggcggcgctgctaccgcaccgcctttgcctggaacacaggcagcttccagctatcgattttattgaccggagcgccatgccggcttcctaacctctttgccctcaagtgtaatggcgctgcgattgggcttcacgccgtcttttttcccctccccaatacgcgcgttcattggacgagagccgaagatcgagcgttctgattgggtgctagcaaaggcggtccgtttgaacgaagccaagagctgcataagggcaggaagctggactgctaggatcaggcgactacaaggagttgtgaagcgacttgcaccgacctgggggcagcaagaggccccggggctgctttccgctgttcgactctggcaggctcagccaatcactgaaggagggaacgatttgagcgatggagccactctggccgagttagagctgag

SEQ ID NO: 238495 - DNA, 78 bp, Homo sapiens
  chr16:30669805-30669883
  hyper
cctggcggagaagcgccctaagactccaaaggagacaacaggagtttgtgctggagctcccccgctgcccatcggccg

SEQ ID NO: 238496 - DNA, 379 bp, Homo sapiens
  chr16:30670364-30670743
  hyper
ggcctctttgagccggaggacttgagacacttttaaaggggaggtctgcgtttcggggcgagctttcggccccttttaaaggggtggcccttcctcttcctcggggagacttgcatcgacccctggcagggggtggccaccgcactaggccgccggacactgtcgggtcgtcttaaaggggccgggagctggacaacttggggcctcgccttaaagggacggccgccccgttttcgccgtcgcggccccgccgagcccgcagggggggccctcgggcttgtcgccccgggggcggcgccggctccccgggccgtggccttggggcaagctcggggccagcagatccggctttaaaggagaagccgtggccctctcgtca

SEQ ID NO: 238497 - DNA, 76 bp, Homo sapiens; identical to SEQ ID NO: 204164
  chr16:30786651-30786727
  hyper

SEQ ID NO: 238498 - DNA, 231 bp, Homo sapiens; identical to SEQ ID NO: 204165
  chr16:30787247-30787478
  hyper

SEQ ID NO: 238499 - DNA, 307 bp, Homo sapiens
  chr16:30797729-30798036
  hyper
ggttaatgacagggccgacacagagcatggacgtgggaagaccgagggaggccgaggcgctgggagcccaggcgccaggcacgccagcctgagacctcgcgatggccccactgcagagggagggaatgaggagccgcctcccgagagatgtggggaacggcccagggtgaccctgacatggaggcggcgggaatgcggccgcccggcccggcccccccaccgcttggctccggacttctgctcccccggagccgcgacccccgtcccgctgctgatacagagcctgggcatccgcccctgccccggc

SEQ ID NO: 238500 - DNA, 472 bp, Homo sapiens
  chr16:30798319-30798791
  hyper
ccccgggaacccaggcgtccccaactcacggctctggggtctgggaaaagccggaaggcggaatccagccccaggggacttaaccccttcagtgccctgcctcgggggacggactgggcgccgaggactctggggtccttctcaaggggtgattccaggctgaggacccggggaccagttcagggtgactgggacggagcaggaagtgaccccagcttcccgggcccctctagcctggagtcagagcatcagctctatgggatttaaccctttgcctcccgcagcctggggaaaaaaggggacagcggtgggagcagggaggaggctgggacgacgcccctgtccccgtctccagtgggagcaggcagcgtgggcatctgggagagccccgatgcccgcgagggtccctgggcttctggccgctcttcatttcgcaggggctccgccggccgcgcccggaaagccctatctc

SEQ ID NO: 238501 - DNA, 396 bp, Homo sapiens
  chr16:30816842-30817238
  hyper
gcggcgacggcctcccggagctgaaggggttattcccactgagacgcggtcgcctccgctcctagagaggcccacggagggcgccgcacttccggcctgggtccagctttggctccggctcccgctcctgacctgctgcttcccgggctggcgtccgggccggcgtccgggcccaggcgaccggggcctccgagctcagaggcagtgccgaggaccgaaggaggggaagggattccccaaaggcatccctgactcccgaattccagcaagggagaatcaggcgctggggaggcaaggagagggccgcggctctcctcgggggccgcggggcgcgactcttccaggacctcggctgcttttcccagtaaagcccaggcggcccgaggctggccgagg

SEQ ID NO: 238502 - DNA, 134 bp, Homo sapiens
  chr16:30934320-30934454
  hyper
tcccatcgcacctcgtaagatcgactactagtcaggtgtatgtccctcttccgccatcttgcttgtagtcctctttccttttcacctttccattgttcctgacgagtagaaatggcagcgggaaggcagcagat

SEQ ID NO: 238503 - DNA, 60 bp, Homo sapiens
  chr16:30934682-30934742
  hyper
ccgctgtccccagcgtcctattgttcccccgtagcatcagtggccgcaggactacaactc

SEQ ID NO: 238504 - DNA, 100 bp, Homo sapiens; identical to SEQ ID NO: 204170
  chr16:30935543-30935643
  hyper

SEQ ID NO: 238505 - DNA, 40 bp, Homo sapiens
  chr16:30960169-30960209
  hyper
gactcattttgggagggatttggaagtgtggacacctggg

SEQ ID NO: 238506 - DNA, 216 bp, Homo sapiens
  chr16:31044530-31044746
  hyper
gtcccagagacggcggtgacagagccgggacacgtgacagtcacagggtcacattctgcggtccacgagtttgggaccgggctggtcacgtgacgcggtgggggcaccatggggtgatgtgagatgcgggtgtctcggattacgtacaaatgacgtattcctaccccttttggcaaccagatttccgttggaagatgcaacggttccggtgacggt

SEQ ID NO: 238507 - DNA, 212 bp, Homo sapiens
  chr16:31085565-31085777
  hyper
tagcgtgcaaagacgccgcgttgtgacctacgtgggcggagtcagccgtgcagacctagaacttagcgccggaagtgtgtctgcgtaaaactgcggctcggaggcgggacaggcagtgctcccgaagcggaagtttcgcggggaagcttttgcacctaaggacacttcctgtttcctagtaacaataggaagtgtccgtagagctgggagta

SEQ ID NO: 238508 - DNA, 215 bp, Homo sapiens
  chr16:31117073-31117288
  hyper
cctgtatacagtattctgaaaagggggtcgcgaggtgcatgtccaacctccgccgccgggggcagcagcgagtccaggccgagccggggcctagcgagcggggtcaaatggggtgaggcctgtgccagacctctccacctcggtggcagccgcagcctcctccgcctgcggctcctgtccacgccgcggccacgtgagcgccagattctggcgca

SEQ ID NO: 238509 - DNA, 31 bp, Homo sapiens
  chr16:31128844-31128875
  hyper
caactcgcggggccgcggggacggccacaga

SEQ ID NO: 238510 - DNA, 188 bp, Homo sapiens
  chr16:31191155-31191343
  hyper
cgccccctcgccccgcccccagcgggcactcaggccgtaccactgtgccttcatgggggtggagatagatcgtgggctagtcctgccgaggagagaggggttcttcctcaaaaaatatgattatgtatagtattcgcatgattctagttaacttgtttcccttctgcctgctcggaccctctacctgc

SEQ ID NO: 238511 - DNA, 718 bp, Homo sapiens
  chr16:31213467-31214185
  hyper
ctggcttggctgccgactgaggaggggcctggatcccagctggcgcggctccagagcctggaaggatatgggccaagtgatccccttcccttcccttcccgccgtggggccggggtcccgttggtcggtaggccaagcgtggggagcctcctttccggtagagcagctttgtttaggggtaggaggaacagaaagcggaagagcccgcggggtaagcgctggtgtgggtggaggggaaagacggggtggaggggaacgggggcggctcaccctggtgcgtggccgcctgcagctgcccggccatctcctgcaggcccatgtcgcgcagcacgttagcggtgagctcggcgccgtaggtctccaggtagaagctgaccagcttgtcggtgaggtccaaggcgtccatggacagcagcgcgccccgcgggatgcgcccgtagccctcgcgcagcggcaccgacagcagcttcagcttgaacttcttgagctcctcggcggtcaggttctccagcgcatccaggatggcgtcgcgcgcgcgccccatggctccaggatccccggccgctgccgccgctcaccccgctgcagccgccgaccaggaggaagtcggctccggggcggaacctggactccccgccttcctcccactctggtctcccgactccccgccccggtccgttgccctccagcaaaaggcgcttccttactacacccttgg

SEQ ID NO: 238512 - DNA, 41 bp, Homo sapiens
  chr16:31227397-31227438
  hyper
tgctgttgtcttacgcgactggtgcgcgcgtggggctggct

SEQ ID NO: 238513 - DNA, 575 bp, Homo sapiens
  chr16:31227822-31228397
  hyper
cagaacccatgaaacggaacagggcccaggcagcccaggagcctggaagggggcagtggggcgagatgcagcccaccagggttcgcggcagcccagcccttcgcccccgggaggggctggccggaggtctgagggaggaccccaggagggaccctgaaggaggggaacaggaaggctctgggcgggacctgacgcgtgggtccttggcgaggaagcggggttgggtcccgagatcacgtaccagctcagagtggccctcacgcagcccgctgcagccgtgcggcctcctccaacatgcgcatgtcgcgcagcacggccacgacgagctcggctgcgtagtcctcgtagtaggaggcgaccagcttgtcggtgaggtccacgatatctagctgcccgagcgcgccccgcgggatgcgctcaaagccctcgcgcagcggcaccgtccccagcttcatcttgaacttcttgagctcctccggtgtcaggttctccagcaccttcaggatggcctcgcgcttcgttcccatggctcagccctgcgcctctgagcctccgagggcctggagccatcaggt

SEQ ID NO: 238514 - DNA, 293 bp, Homo sapiens
  chr16:31469969-31470262
  hyper
cctgaccattttccgggcgggcagctgccccgaccacaccaggaagggctgctcaggcggagccacctcgcaatccaggggtgacctgggggctccccgggacgcgaatgtcccgctcccccgccgccccgccccgtccggattctccctcgcctcttctggcgcggccgactgcgctgcgagtgaagaactccccgtttcctagatgccagctcctgagctcacgagcacgtccagagcggaggacactcgggacaccggggtccagctccggaaacggaaaattccacaag

SEQ ID NO: 238515 - DNA, 43 bp, Homo sapiens
  chr16:31483758-31483801
  hyper
atggaacgggaggtgcggcgcccgcgggcgcccgggcgcgggg

SEQ ID NO: 238516 - DNA, 1189 bp, Homo sapiens
  chr16:31498607-31499796
  hyper
gctgggctgtcccctgaccccggcctgttgcaggagggctggccgcgctgatgtacacggacacggtacagaccttcgtcattctggggggcgcctgcatcctcatgggttacggtaggggctcgcctaccagggaggggcgcggagggcatggtcgcggagctctcggcctgcgcgcggggccgttgcgcgtctccggtctgagggtcctaaggagggtcccctgacggccttgcccggcagccttccacgaggtgggcgggtattcgggtctcttcgacaaatacctgggagcagcgacttcgctgacggtgtccgaggatccagccgtgggaaacatctccagcttctgctatcgaccccggcccgactcctaccacctgctccggcaccccgtgaccggggatctgccgtggcccgcgctgctcctcggactcacaatcgtctcgggctggtactggtgcagcgaccaggtgcgggtatagggctgcgcctgcagtgaggccggggcggagccgagacgggcggagcctgagtccctccccgccttccccacaacggtctaaggcgcagtctgaggggcgggaacccctcgggttggtgctaaaccagacagaaggctccatctactccaagcgtgcagctgaacttggggcactcacgagccagaggcggggcacagagcggaacggggcgcggggcggggccgaggggaggcccgcaagcgggcagctgaacgcccctcccgtaggtcatcgtgcagcgctgcctggccgggaagagcctgacccacatcaaggcgggctgcatcctgtgtgggtacctgaagctgacgcccatgtttctcatggtcatgccaggcatgatcagccgcattctgtacccaggtaacatccctgccccgcccctttcctgtgccagcaaccgggcgcccgtcgcccagttccgtcaccctcctaagactcggcagtttgggcccggagtcccgcctccctccgggggtcgcacgcctcctctgctaggattcccagtccccacctcctgggattcccagaccaggccccgtcctaacggcgcggtggcctctctctggcagacgaggtggcgtgcgtggtgcctgaggtgtgcaggcgcgtgtgcggcacggaggtgggctgctccaacatcgcctacccgcggctcgtcgtga

SEQ ID NO: 238517 - DNA, 82 bp, Homo sapiens
  chr16:31519859-31519941
  hyper
gcgctgcttcggacgccccggcaccggcccccgttgctttgtagcattctgcagctgggctgcaggcgccgtgggcctccgc

SEQ ID NO: 238518 - DNA, 356 bp, Homo sapiens
  chr16:31548823-31549179
  hyper
ccggcgtttccccgcggaggtcatgaggtccccacggcccaggccccgtccccggacagccccgggtgccccaggagctccggccgcagctcacctgggaccggcctcccgtggagccaccccttgcccagccgcccccaagttcccgcaggaggaactggcgacagacacgtccagcccgcagccgccggccgcaccggcgctgcactaactgggacgcgccccggggccgcgctggctcggatccgcccagacccccgctcctccattgccgcccagcggggatcgcggcgcgctgccctcccttcctgggttcccggggctgagcttcctgggaggtccgcacacccccaacc

SEQ ID NO: 238519 - DNA, 435 bp, Homo sapiens
  chr16:31580581-31581016
  hyper
ttcgctgtcggcggcggtggctaaagaggcggcggccgcggtgcccgtggctgcgggggccccgtccccacccgggtttcctgcgacgagggcggcgggcgccggggccgcggcttggggtgcaccgctgcccacccggctcttggtcgcggggtcctggggagccgcggcggccgccaccgcaggagcctgctggagggtggtggtgatgatggtggcctcgcccgcctcgctcatgcctcctcctcctctgctctcgctcatgcgcctcggtggcggttggtcggcggttagtgcggctggtggtcgccgcggccggggctcgctctcggggaggccggggctgatctcgcggcgcaggcggcggcggcagaggtggggtcgcgcagcggaggcagctcgagcttcgggatgcgcgctcgcttcttgggctcc

SEQ ID NO: 238520 - DNA, 603 bp, Homo sapiens
  chr16:31885057-31885660
  hyper
cgtccaatcaggagtgaagccggagagcaggggcggcttccgggatttggcgggggccttcgtcggctccagttagagctcgggtctcctcgccacagctccgagtctttcgttctgggaggcccaggcggcttcgcgttctgagaataaacagaacctctgttgctctgcgacttgcaggcactgggagattcgtagctaagacgccagggcatcccggaagctgggaaatggtgagtgtgcggggtcgggggtccccagagggagggagggcggtggtcggaagcggcgggaacccgctgtaggggcacccgggcctccccgcagtcagcctcggggtctgggccccgagtcccaactggtgcagctcggccctcggtcccctccgctgcaagatggcggccaggccggcagccgggaccccgcgtgtcctgtcccatcccgaccccgcagagcgacctcgtccctggccggagccctctctgggcagctccgcgtcgcagccccgcgtctcccccagattgtgcggtgaggacgggagcgtctcaggggagacccaggttcggtgtgtgggaagaaaccgtgccctgtggggtcctcagt

SEQ ID NO: 238521 - DNA, 302 bp, Homo sapiens
  chr16:46723139-46723441
  hyper
ctagccccgcccccgggccctacaggcggctcattgattggcctacttctaggaacccgagtctcgcgtgcttattggccctgtcacttaacgctagatggacggacctgagcgccagccaatctcaccacagcgtgcgagagtgggcggagcagtgcagggcagtggggatcgcccggcggcaggcaggagacaacaggagggaaaggcagtgtgtgatgagtttgtcaagaaggaatggaaggagggggagccgacaagtccacgttcaccgcatctgcgttggcgattgcgctattgat

SEQ ID NO: 238522 - DNA, 34 bp, Homo sapiens
  chr16:46917869-46917903
  hyper
ggatgatgaaactcggggcgatgactgcaccatc

SEQ ID NO: 238523 - DNA, 110 bp, Homo sapiens; identical to SEQ ID NO: 204181
  chr16:47175828-47175938
  hyper

SEQ ID NO: 238524 - DNA, 54 bp, Homo sapiens
  chr16:47177806-47177860
  hyper
ggaccggcaggcagctccgcccgcggccccggcgcgggatccactgaagtggcg

SEQ ID NO: 238525 - DNA, 209 bp, Homo sapiens
  chr16:47178220-47178429
  hyper
cccgcaccctcgccggcctgccgggtctccgccagccctagcagacagagaggggcgccggtccctagtcccccagacctccattcaaggtcaaaactttgcccagctcagccttgctcgaccctgggcagggaagcgcggacatcggcagagggagcccgaggctctccgtgcccttcgcgccggtgagttcccgacccgcggcgctg

SEQ ID NO: 238526 - DNA, 256 bp, Homo sapiens
  chr16:47495527-47495783
  hyper
cagctccactctgcgtgtgcccccgactctattccgcttgtgagccccactcggaaagtaggcagcggtccggacttcccttagagtcttctaacttaaaaatcgggcggcggcacattcctgggaaagggaatgtgtcttccctgtgaatgtgtctttcctgtgaatgttctctgcaaaagtcagatagcttaatcagaccaagtcagatgtaactacgatctggctgcagaaagccggcgtctgggctccttgc

SEQ ID NO: 238527 - DNA, 94 bp, Homo sapiens
  chr16:48399755-48399849
  hyper
tgagaaggaagtgcgctccctgagccagctcaagagttactgcaggagcctgcctgccgggagagccatttggagcctcggccggggctgggcc

SEQ ID NO: 238528 - DNA, 498 bp, Homo sapiens
  chr16:48844675-48845173
  hyper
ccgcgggtccggggcgggcacagcgggtcgggggcggcctggctgggctggcagagcacgtctcggcggcaaaagaggcgccgggcatgctctcggatgaacttggcagatttagacactcagccctaattgcggcgagctcgggccgctgcacccgcgcggggcagatgtgcctcggcgctgcccggcccaattgctcccatttatcccggcctcgcccgcccagttgggagcgcgcggccggctcgggccgccaggaaaagcctctgccatcaatcagaggcggcggggcggccgcgatcgatggcggcccccgcactgaggcccccgcctcccgatcaatcggccgcctgccgtgttccaccgcggcctgcggacgccgcgctgggagagacgggtcgatgcgtctcggggcgccggggcacgcggggacggcggccttcgcggggctctgccctcaccctggcatcgtcctgccgggcccgggtgatgctggcc

SEQ ID NO: 238529 - DNA, 540 bp, Homo sapiens
  chr16:49308920-49309460
  hyper
agtgcagggcacacgtccgcagttcagggtctttagccttccattgggtccgccccgccccaggacccaacctgcaatctgtgggagagtcccacaccttccctccgcgccgcactatcccccaccaccacctcattaaggcaacaattaaggagaggggtgaggctccctctccatctgggtaattgtgttctcattaagagcggatgcgcccgggctctgagcattagcgctccagtgcagcttggaaggcatgctcccagctcggctaatggtggaagcggcggccgggcagcaagcgagctggggggcaggcgcggggcccagcgcaacccagcgctgctccgcagacagcagacaccacagtgatcaccctcggctcctcgcctgcgcggctcccggggcgcttagcgcggtgtggagaacccgggcggagaagccaggtctgggcttgttgggtcctagaagcctccctgagttcccctcacagtacctttaagcctggctgggtgccggaaacgctgcgcagaataggaaaca

SEQ ID NO: 238530 - DNA, 1050 bp, Homo sapiens
  chr16:49311507-49312557
  hyper
taccggattgcatgcggagaagaaacgggcccgggtttcaacagaggccccgtgctccgtgaatttctaactcgaaccagccgctgggataaatccgagaaacgttgtttattgtgctattattaactttcccttctccccacgcccctagaggaaataaaattcattcctgaatattgggccaggaaaacgtttctctgaaaggaaccacaactgcaggggaccacccggctgcagctcccagctcccggcccttcgccctaggctgcccactcgctccggctcccgacctccccgctgccgaagcaactgggtcagcctttcagacttaaaacgaagtcgtttatttcatttttgctttcacattatgttccgatacaatcaaaactcctggacgaacctcttgaataaagtcctgtgaatgagcggaatcataggtcctgggcgcccgagtatgcggcgggtggactccggattcagaggcggtgtataaaacatacgctgcttcgggaactgcgagggggacgcggtgggagacatccggggacagaaggcctgaggagtctgccgctccaggcagggtcgtttgggtcctcaaactgggactattcctgatgcatttggaatgcaaagaaaaaaatcaaacttcgctcctgggccggcggccgcgcctggcctagcaagatttcggccacatttcttacgtttccgccaaagctgtgaacacaggcgaatgcagtgctggtccccggcctggcgcaggaaggagcgcaaggccggctttgcaaggaagccctcgcgcccaggcctttctatggttgcgttcccccaagtctcctgcctttcggaacctcgccctttggcaccccagacccccaacctcgcagctggggaagatgcggattttagaaagctgtttcagaaaaataaaagtcccacttcgactttattagattaaagcaaaattaaaccttgactattcacacgtatgttacagaggaagaggaggcgtccggaagaagctccttggcgtttcgtggagtcacagag

SEQ ID NO: 238531 - DNA, 299 bp, Homo sapiens
  chr16:49313201-49313500
  hyper
acatgtaggaagtttcaagtcgtgctgctttctcgccctcttaatttcagcctctttctcactccccttcctgccttcgccctctccctgcctcccttccggctacgagccagtcagagaggaaacaccaggaatccggagaaggtcgagtacttccagccccccatcaagtttccccgctccagcttgaggtatgctcggtcgcctttctccatttggattaggactccgttgctggcggcctcccgggtcacgtcctggtcaccagcgaaggctgaaatcaccggccacccgtttag

SEQ ID NO: 238532 - DNA, 1428 bp, Homo sapiens
  chr16:49314017-49315445
  hyper
tgatttgtgattagaagtctcgcaccgagcggcacaatgtatttcctccccaaaccacgggctcaattccctcccccatccagccgcgcccgccaccgcctggttttgcccctgtggtggcaccgtcagccaagggcctcgcgccctctccccagctgtgcgtcccacctctctcggcgcccaagggaaacctggacatctttggggacccggagagccggcgagtgattgctgggacacggctggagccgggagagagtagcactacgccccctccctccctcctctctctacccctcaccctccggggctaaatgctgctagctcaaaaacccacagtccgcacggggtggggattggggacaagtgggagaaaacgggggccccgtccgtggtgctgaagacaagcacgcaagccgcatcgcaggcttctgagccggggcaaggggtagggtgtactgtcgcggtgcttcctggggagtccgggaaggcttcccaagcggcagctgtctggggcgctaacaacagccgttacaaggaagtccctgaaatccagggaacccttcggagaggcccggaaggcagaagcagaaaattctgtctctcgggggatggggctggatcccaagagccagagacagggaaagcagaggacagttgaagccacagaactgagaggccccgctatctgtccctccaagcagcccgaagtacatgcagccgccacttctgcctaccacctccggacagcccgagcacccctgaggccagtaacccccctacggggccagggcccggcacgaggcgtcggctgacctgtatggtttgtctgttgtagacttttaccacgtggaagttaaaactgtagatccctttgcgcggggcgatgaaagtgctgcgttctgaatcaaagttgttcccaatgttcactagtacctataacgagacgggaacgaaggggagtgggcaggaatcggtcccggactgtcgtccccgcgcctccgcagagcccttggagaggaccgggcatcggtcttccatccatccctccttcaccagcccaatctgcacgccgcgggaggaaggaacactcacctggtcgaagtagatgatcatggtgcgattactcatctcggacggctcgtggttggtgctcctgatggcagagaaagccaccttggcgctgccagagcgcacagagatgcccagggcagtgcccgtggggtcggacgtggggttggagtcgcacaccaccaggcacttgccctccagcacgatgggctccgtctcattctgcccgcgggccgggcccgccagccacgcagcccccagcagcagcagctccaggacgcccagcatcgcgccgccggcgcccaccccgccccccacccccagggctgctcgcgccagccgccccccccgtcccag

SEQ ID NO: 238533 - DNA, 888 bp, Homo sapiens
  chr16:49316465-49317353
  hyper
cgatggtggagcttggcctctcgctctctcccgcctctccagcgactgctctgccggccgcggaggtcggatcgagcggtcattcattcatttgttaattcgttcacttattcaggggagatcattgaacccctacggagtaccgggtactgggccgggcgctgaggacgcggggctgagcaaaagcagccgaggcccaccttcgtgccccttaaaacccagcgtgcggggcggcaacgagtactgcttttctgttttgcacttaaaatttacattttgcatccgtactttttatttactgtgcacccttacggcatgctttacgcacccgtacctgcacctcctagccttgagtgtagacaccagatcctgagatgggcgatttttcgagaataatttttaccctaagtggattttcgtgccacgcatggacttggaactacacacacgtagtccaaaacgtgaaagtcaaaatgcagctttgccaagtggcagggagaaaggagagctgagaagatgaggagaggaagggcgcgctccaggctttccagcccgggtgcggtagacgtagccctgaaggatgaacccaggctggtagtagggcggcgggagggcggggggacctgtcagtcaagtccaaagcagaaacgcggcgccggatcccagtcagaggccggctggaacgcttcccacaggctcctggcgctccggtccccaccaggcgaccttgatcctggcgtgctcagcggagccagcgcagcgtcgggagctggagagacgcggggcgccggctgagcgctcctgccctctgcctctgggctagcctctggcccggcctcccggcctcccccagggtacgctctcccccaagagcgaacaccagctttg

SEQ ID NO: 238534 - DNA, 221 bp, Homo sapiens
  chr16:49889625-49889846
  hyper
gccgggcctcgctcgctcacctttcaccgagcgcggcttcgcctgcttccgcctggacatgtccggggctccgggcgctccgtcgccctccgcagccggctccccccgccgccccccgccgctccgggcagcccttctcccccttctcctccgcctgtctcttggaaacttttttttttgcagcccggttggcggctgtggggagcggaccgcaggtccgg

SEQ ID NO: 238535 - DNA, 1118 bp, Homo sapiens
  chr16:49890526-49891644
  hyper
gggcccctggctcacgcccccttctctggctctcggatcggcccggcgccggccccccggaggaggaaggggcgcgcgggggcgctcaggcggcggccggcaggcgcgcccgtgccccgggcatcgctcagcccgtgcgccgggccgccgctgcctgccctcgggctgcggtgctcagcgcgaggcgcgcagccgatccccaggccggtgccaagtcgccggccccgctagctgcctccatgggccaggggctcggagaggggggaggcggcggccgcggtggcggaagaggaggacgagcaggcggcggcggcggcggccgggctcccgtcctcctgggcagcggcggcggcggctgcgccccggctcctccgcgctccagccggcgccggcccgcccgccagcctccctcgcgctcctgtcttctttgtggtcgctggctctcctcctcccgatccggctgctggggctgcactgcagagacacataataaagccaggcttggctggaaatgtagccgggtcccagcaggaggatgtgaggagcggagtcccggcgggggagcgctctgatcccgtggggcgccccgcactgctccggctcggatcagacggagagagggccaacagcaccgagcgatggacagcgctggaaatacagctccggccgcccgcaaaacccggaccgtggtggcggcggcggcggcggcggcaggcacggcgcgggcgcgggcaccgcaccagcacgcggggccggggctcgggcgctggctgcaccgggggcaggaggagggaacacacttagggcccacgcggctgtcaagctcgccaagacgcatgagcctcacaaactgtaaaaagtgaaagaatgggggagcaaacggagttgggctgccctagtattgccacctcgcgatgtatgcctcacgcacatgaactatccagggacctggctctgccaggttggcttttgcccaccggtcggtgttcaaagaccacccctgccccacatccaacaaattcttccaccactgggctaaccccgtgcgccccctacacccttatttgtagaattctcgcgcctggtgtgcacttcctctgtccgactgtaaaaggaac

SEQ ID NO: 238536 - DNA, 109 bp, Homo sapiens
  chr16:50188126-50188235
  hyper
gggaccccgtggaaacggaggaactacaaccagggagtcgtggggtgagtgctggctctgcggcccgatggcctggccggtgcgaatgcgcagccgggcacacgcccac

SEQ ID NO: 238537 - DNA, 863 bp, Homo sapiens
  chr16:50581390-50582253
  hyper
gacgagcgtaacacggacccacagtgtccccagaagggggcaggcgttctgagagccacaaaggtggggtggaatcccttgatgtcgaccgccaccatccccctccccccgcgcgacctccccgcagagacctccccagacaaaacaaacaaacccttgggtctggcgaactgcagcggggagcggaaaccaaggaagatcaaagactcagcggttacccccttccgggccgcgcagtttggcagcgcgccccgacccgggcgggcacccacgggcccccggacgaggagatcccagagactggctgataacggggcgctttggacatttgtcgctgcctggagagggctgggctcacactggcccggggtgcgctgggggctcctcctggactccccaaataagaaactagaggagtgcggtggtggggggcgggtcacggggcgggtaatgaacactttctgcagaaggtaggtcgtgggaagactgggaaaaggcagcgctgccgaagcttgcacctgagcagctaaggtctccgctcccgacctcagtttccccacctgtaaattggagccgccgagtcccgccctgcccgtttagagagaacgtggagcggagggaagtgacagtacagttagcgatggccgggctgttctgtcccaatacgcctcctggacaagccgccccgccgggtcgccagccctggagctcggcccccggccccagaccgcggcagggagcgcggactgtgtcccgcccctcccgtcagcgccccgccctcgtccccgccctgccccgcctccggccccgcccccgccgcaaccagccttgcctttgatgcgccgcaccggccaatgggcgcg

SEQ ID NO: 238538 - DNA, 236 bp, Homo sapiens
  chr16:50775657-50775893
  hyper
cagcgccccgccccggctccagcatcagccaatggtgacgcggcacccacagcctttcgcccaatcagcttgagcttcccgcctccatccgccgctcttctctgccccgccccttcgctttccctttggttccaccgagcttgacagagcggaaagtcccttcggccggcgccgggctggcagccattggaggaaggtctgtcacagggaggcccaatcacggcccgctcaggagc

SEQ ID NO: 238539 - DNA, 44 bp, Homo sapiens
  chr16:50840618-50840662
  hyper
gccatctactgggcgaatgccgtaaggtcggttgtgaggtcccg

SEQ ID NO: 238540 - DNA, 152 bp, Homo sapiens
  chr16:51167777-51167929
  hyper
gaggagggggtgcgcgcccgtcagctgccttcacctcaaccctgttgctttgtaaatgtaaatccagttctgttctgcgggccgagcccaaaggctgagtgtatttttcacactgggaggagaagcagggcagagggcgatttcttattttg

SEQ ID NO: 238541 - DNA, 1677 bp, Homo sapiens
  chr16:51183714-51185391
  hyper
ggggcccgggcggccgcagcttagtgggctgaggtgccgatcagggtcacgcttcggagctctgtcggggcccagctccctccttcacaccccaaaatgccgcctagggcgtgggcatcccgagtggcatccggagccgctgagaccccgccgagattgctccttgtgcgtcctcccacagccgagaggccagcatcgtgccgggacgacccggggacccgagtccgggcgccgctacaccgcctcgggcgctaggcctgggagctttgaggccggtaccgtgaaacacctttaggagcaaggagggattccaggtgtcctccctttgtaccccaactccctgcccggatctcttccactctctgccatagcccccacacacaaactttgttctggacttgttcagccccttcgggacccacagttgtcgcctccatcggagaaaacaagtgcccctgtttcaggggggattccactctggctggccacccgcaaacctggaaaactattctatgacttcttccctgacccccctggaagtagggagcaccacgatccgcagagggcgcataccgaccagaaagattttggggggcagagggtgcaagtgttgtgggaagagatgcggagataaattttgcgagccagaccccgacactttccccgtccgtttgcaccgtctccggaacaactggcggccagcagcactctccaccccggccgcaaccccagcgggtcaggcgctggcgccccgacaccagtccccatcttcttgcagctctgaacctccaaagacacccggttctgcctcgcaggccgagggggagtgtgcgtgggggcaggggggcgcagcgaactcccccacgctcggagttcagcccagcgcccgaagtaaacttccttaccgctggcagcaaggccgggcggcggaggccgggccgggtgccctggggccggcgccgggagcgctaggggccccgtgcggtcaggccggggcgacctccacccgcacccacgcctcatggggctcccgggtcttggccgcggctgggatccccggaaaagcagggacggagaagccaggccggcatgcccgccctccttcccccgggaggacccaacaactccggaaagatcctgccgggagatgtgctcgctttccccggggcagcgggggaaagcccagcaaaggcacattgaaaattaaaaagaaaaaaaaaattacgccgagtggaagaagcaatcggggccgcggcggcggtgaggtagggggcgcgggggccagccgcgtgtgagtgggtccgagtgtgcgtgagtgtgagtgcgtgtgtgtgtgtccacggcgcgggccggagcactcaccatctcgccgggggagcgaggccacttcggggtcggattggaaatgttgaggcttcgcttgcttcctccgcgacatgctggctcaaacatcagctggggcagaataaaaaattactaaaaaaaaatcttctcaaaattacggaaatcgagcggcggcggcggcggcggctccccccgcccgccggcccgcccgccccctccccggctccccggccccgggcgcagcgcgcatgtgtcctgctataattatgattatcaataatgcattgcgattaatcatagaggggctctttgaaaggcgattggcaccgggcc

SEQ ID NO: 238542 - DNA, 120 bp, Homo sapiens
  chr16:51185571-51185691
  hyper
ggcctcctctccactgcgggcccggcgccccggcaggcgccccccgctctctccctctcccctccctcttccctccctccttcgcccccccccacaatcccgggctgggccgacccaaat

SEQ ID NO: 238543 - DNA, 917 bp, Homo sapiens
  chr16:51186471-51187388
  hyper
ctgagcgcagcagcgagcaccggcctagggagacacagcccgggcggacccggcactggactgggccagtccctgggacccctgggcaccccgccctggggagggggccgcgccccagccttccgggacgaggtggcggcgcagagccggaaagcggggtggggggagggcggtggggaggtgttctgtccgaggctgcctggcggcgccgaagctcgcctccactttttgggcacttgccgagcgcggcgcccgaacttttcgctctatcaccatctccctcaagctgagatgcaacctccctaccctcgccccagagcccagagccaggagcccgatccctctgccgggctcaggcgcccgcgaacctgagactcggtacgcggctcagcctagctctttcccctcgcgcctcggggtctcctcgctccaaggttctcgaagtcttgcgcccgaaggactaaactaaactaaacttcggctgagtaatgggggaggaggggggtgcagatacacaatccctgccctatctcacgatcaggaaaggagagggctcataaggacgccccaattcgcgagcgcccttgagtctggccggtgccacggtcggttcgcgcgaagtgggcaccggtctcccgagccgacttcgtgtactccggacctgtactgcgctccggtagaggacccttccctttctcttagcttcttaaatcttttcttttaaggtgtaaatgtgtgtgtgtgccgatgaatgtttctgtttttcatctgctgactttatttttttttattggtataacttctcccttctctctccctgctcgtccgttttccaccttttctcttacttatcttctgccctcgctcactccctaacacacacattcacaccctctccgcctcgctctcccgttctc

SEQ ID NO: 238544 - DNA, 811 bp, Homo sapiens
  chr16:51189680-51190491
  hyper
gctctccgtagattcggttatttttccaaaccccgggaccttgcttccccgggagtttcagaaactcctttcctactgaactgctgtcactcaatcctaacctctcttagaacactggagcggcttcgaacccgaagtatggagcaggcttgggtgggtacctcgcccctggccaagtctacactgtgcgccctcggcgcactcgctctccagcagttcaataccagcagcaaaacgcaggtttttgggggaactcccgccgcccgccaccaagggctatctccagacgggcgccgggtgcagcgccgtgaccgggcgccctggcgccggctcgggcgcgaaattcagcggtggcaagcggagggtgggcttggtaaccacccgcgcgcgcccgagccaagagtcgcgtactgtctgcccgcggcaaagttcgtctttctccgcttggagggctgttcctacaccggtattaagaaaccgacttcgctagcgactgcaagtgcttgcgattttgactttccgtccacagttgagcgtcttgcacttaaattcactgcgccccgcatgcaacagtgcctcgccaaggggcctctgggtatgaaattcctcccagaggaaatgtcccgacgtagagaaagtggaaaaggctaatcgaatttataaaaagaaaatctttcctccttttggttaaatccctttgcggttttctgagcgcgaaaaaaaaattatcaccatgtaatagagtgtagctaattcttagaacctagtagtaggatgttcaggaagcccagcaggacgcacagattcccat

SEQ ID NO: 238545 - DNA, 195 bp, Homo sapiens
  chr16:52579148-52579343
  hyper
tcggagagcaggaacgctccaaccaccaaagggttaaagcacacggaataaagtcccctcgatctatattttttgggaggcccctctgtgccagacgctgagctgggcgatgatgacacgcgagggcgagcaagagagaccctaatggtcttttacaaacttcagcactagagttgggaacgcagtataaacaaa

SEQ ID NO: 238546 - DNA, 1541 bp, Homo sapiens
  chr16:52579631-52581172
  hyper
gttttcgacaaattcggcgctgggggcttcagggaggacagaggacaccggatggtgggggggaattccgcgcggcccgggtaccagggctgcgactctcgcccgcctcgctgctccgagcgacgcccgctgcccttctgaggtccacctcgccacctggaacgctcggtcctcgaagttggcgcagggggaggtggagaaggtggagtgaccccagggtgtggtgtggaggtctccaatcccgatctccccgaaatgcaaaacttagcccccccaaaaaaatgagaggaaagaagccacttactctaagcggggaggggcgggcaccccggttccgaggtccaaagtgccctaacgaaagggcagcaaaggccacctgcggggtcccaccacttccccccactcccctgtccaggcatactcaaaagtttgttcctttccgtccgtaagcggccccgaggccggctctggagtaggtgggggaggtaagaaggactgggggtgggggagggcaagatcatcggaccaggagatcagggacccctgcgtagcccccactcagtccaggggggctgcgatcgtgtttactaataacagcaacaaacaatcacacgccagcccttctttcagtcctcgggctctcttcgctttttgggggcagcaaaggagagtctggcggggaggtgggagggagcggaggggctgaggagagcgccggctgggggacaaaaagcggcgtgggatggggcagaaagagaagcggggagagctggacagagacgaaggctcaaaggtagaagagacatgggaggaaagaggccaaagaaaagtgcagcaggcggtgagcccgagcgcggggcgcgcccaggatggggaggtggcccccgccccccggcccaccggcccagcccggtcaccttgctgtagccgtagtaccccaggcactgcgcgaagtccaggctggcagggtccccggccgccgcggggtagaacctcacatccatgccgaagctgggcccggggccgggggccgggactggggttcgccggggccgggacccgcctcctcgccgccgctagatccaccgtcgagggcgcccgggggtggcgcgtgggactcgcggccggaggggcgccgggacccagagcccgaggagctcgggagccgcggccgccgcacacaaaggcgcggccacgcgagccgcgggagagcgggaggcggccggggggacgcgccccgccggggcaccgaggcagcgctgcgcgcgggccgggcgccgggggcgcggggcgcggcgctggggcccgggtcggcgaggcgagttcaggtgcgctgggcgaggctgggacggcggcggcggcggcggctggccccgctcctcctcctcctccccgggcggactgaggagacgagccgcggagacaaggggcccggcccctcccctccttctccccctcctgcctcagccgccggtcccctccccgcgccgccgccgctccgcccctcccaccgcgggcagctggcgcgccgcccgccccgc

SEQ ID NO: 238547 - DNA, 32 bp, Homo sapiens
  chr16:52581388-52581420
  hyper
ccaccctcctcctgcgcgaccacagcttcccc

SEQ ID NO: 238548 - DNA, 238 bp, Homo sapiens
  chr16:53088451-53088689
  hyper
ctctcattcagggacggtttagggggtggcaggaaaaaatggttgctgataggcgaagggcctccctgggttggagagaaccccagcctcggatggtcccagcacatttaaaagagaagcagtgccaaaggtggggtgcactgaaagctgctggatgaagggaaagatccttgtgctcagcccggaaaaccggaggatggataccaggccgaggggtccctccgtgccccaagagaaa

SEQ ID NO: 238549 - DNA, 33 bp, Homo sapiens; identical to SEQ ID NO: 204196
  chr16:53468698-53468731
  hyper

SEQ ID NO: 238550 - DNA, 307 bp, Homo sapiens
  chr16:53537311-53537618
  hyper
ggaagaacacactcggtcctgcaaatcaaatcaccccggtttgggtgggactgcacttgaccctccccttacgtaacagcgcctgggacggcctgtcagtcatggaagtatcggccccccggggagggatggggcagagacaaacaagcgccgggtcacaattggccagggcgtctgccagtcaccacggagaccttcccggaggtttattcgcacagcccacagcgcaaccgccatgcgcaggggctggggcatacgctaacgtctgcaagccaagcttttggggagggccgggccgcgcgactgc

SEQ ID NO: 238551 - DNA, 401 bp, Homo sapiens
  chr16:53737492-53737893
  hyper
aattggtcctggacgtggggataaagggcggcctgtgattcaggcctgaggatgtggaggtgtcttgggctgggctgctttcacgccagcagaactccagggccaactccagggccttctccaggcggcagagcggaccctaggaccccggcccgcgctgcagtggggagggtcagcaacctccacccaccctcatcctcccccatcctcccgggtactcaccgtgccactggccctgcagctagctaccgttgctatagcgccgacagcgtggcgggcggctggccgagaggagcacgggagaaacatggcaggctcccgtagcctcctgggaaatgtagttctccttggactctagcctgtttgctcgcggggtagcggactacgctcttccagctgtc

SEQ ID NO: 238552 - DNA, 90 bp, Homo sapiens
  chr16:53738159-53738249
  hyper
gcctggagatcttcgtgcgctgtgagcaaggatcagggaaccggaagggcttggtttgatggcgagcggatgcgcggtgttaaactaagg

SEQ ID NO: 238553 - DNA, 829 bp, Homo sapiens
  chr16:54316014-54316843
  hyper
gtgcagtgttgagccgtgtcttgttccgtggcttcgaggggtgtgcgcgcttcctatacctccccggaacgcgcgagatagtcacacgcgccactttgagggtcaaacaccccgcatctggccacactgtacctttactaacgtggggagggggcaaaaaaatgtgtctctccttcttaccccgaggtgtcactcgcccaaacactccctacaacttcttcaagtcaaacttgggcaaggttggctggctgactgcgagaggaaaaagagggcgcggagggggcgcggcgcgcggccgggtgtagaggccacggaggcgaggcgccgagcgtcccctttgtcctgtagagggagctccagccccaaatttccctgctgcctcccccggcccgcccaccccaggcccgcctggagccggaatcccggctggaaaggtgcggcggtctgacacccccgcaacccccgcgccggggccttagcaggatgcctcttctagggcacgtgggaaaacccaccagggtgccaagacgcacagatgctcccaggacccgggctccccaactctcaactagagctgggcagtcacacatcatctagaggattatgtacccctaggcgaccctcttctccatatccgcctccaccgtcaccccacaccctggcatctataaagagggaaggggggcaaccgggttggaaggaggatggaatctgggcttgcacagcctcttataggtaacagtgagaaagcctcaactgtgtcgatcaaagaatggggacgaagggagtgatgagaacacgaccccgccacccgcgcaggctaaccccg

SEQ ID NO: 238554 - DNA, 3043 bp, Homo sapiens
  chr16:54318433-54321476
  hyper
ccgagcgaaggcggcggcggcagccgggtggcccgcggctccgggaagtcccagcaggtgcggaggggcagagcccagcagggagagcgggtgcaggcgggggccgggcggtgggcctggaaacggccggttggtccaagccgggaacttgcccagcggcgctgagaccagtctgtgagcggcggcggcggcggcggccggagagagctgcagggcggaaggcgcgaccgctgcccccggtggagacccccccgcgccgggaggcgagcggcgcgggttgtccgggcttgtggcagtctccgcgagggaccagatcttgggcttctgcagggcggaggcgggggctggtgcgggagcgcaggggtccaggctcacggggggcgacggcagagacggcgaggccacggccactggtggtggcgctggagccagactcaggaccggtagtggccggtcctctaagccctcagagctatcttccgagtcgctatttttggagtccgaaatgggtcccaggcctaggtcgccatccctgcgcgccgccccagccagggacagctcaggctcggtggccgcgccgtctaagttctccaaatcgatctcctcgtcctcgtcgtcgtcagccaggccctcgccccccgtgtcctcctcctcccccccgagctcctcctcctccagctctagctcgcgtttgccgtcctcctcgtcctcctcttcgtcttcctcctcgcgctcgctcccataagcgtttccctcctcgtcagtgcggctgcgaggcgcccaagtcatcttattctccttcttgaggcgccggcgcgcgttggcgaaccaggtggacacctgggtgagggtcatcttggtgatgatggccagcatgatcttctcgcccttggtggggtaggggttcttgcggtgctcgttgagccaggccttcagcgtgctggtgctctccctggtggcgttcttgggacgggacgggtccccgaactggtactggccatacgggtagaaggcggggtgcgggtgcggaaacgcggcagccgcggccggatgctgcaccccggggctgtccttcagctcatactgcgcgccctgtacgcacatggagaaggaagggacacgcgcggagggagcgcgagtgagccccagccatcgctgcctcccccctcctggcctgcacccctctagtccggcccccgcgcgctcagctcgccctgcgccccagcgccaacccctccttccctggctccgcgggctcttaccagctgcgggaagatgggcagctccgcggcgtagggcaggaaggcgccgtagccttgggcggcggcggccgcagcggccgcggcgtagggcgccccgtacacggacgagagcacgttggacagggaccccgaggcgttcagctccgaggctccggcacccaggccgccccgggcccccgcgctgccgccgctgccgccagcggcccccgggcgctcggacgggtaaagcgggcggatgtattggtatcccagctgggggaaggacatggtggcccgcggggcacggacggagaggggggccgacccccgggccgcccagctcagcgccgcccgcgggctccggcgcgcatcgggggctgggccgggcttggggccgcgctgccgcccgcgctgcgctgtgctccgcgttcgcctattgatctgctccgcggcggcgacggcggcggcgagggcggcggcgaggagccaggtcaggtccgaacagattggcggagattcccggggctccgggctctgattgacatttctacggggcgcaagcccctcctctctgcgccgcgctccctcctctcggccgccggagctgcctctgcccgctcctcgctcctcactgccctcctctccccagcagtgtcgcgcctcgcttccttcgccctcctctagttttcactccccctcctcgcccttcctctcccctcccctctccgcactcctcttccccccaggatcgcttccgctgcttcgggctcctgcactgccctggacgctatgaaactctcctttctcctctccccttctctttccctttctcacgagggcttttgctctccggtccgttcccttcacttcttcctttctcactacttctattttgtaaatctctctctttactcacacgatactccccgcgacctttccagcctctgcgccctgggctaagtaaggcagccaaaagttgtggacacttagggtgccgcgcggggggtgtgtgtcggtgtctgtctgtccatccccgcccttccaccccctccctcgcctttccccaaatctcgggtctgacgtcgcgccctcttattcgacttttccccgcgtctcttccccgagtcgccaatcgcctgggcgccttacgggcgaggccgcccacccccgcggatcccgcgcgcggggcggggcggggcaggggcgggagccggagcgccgcgagtccctgcccgccccctcctgctcgcgccgggcgggggagcgagaggcgcggggactgggtgagtgcagggtcagctcgcccctcccgcctcccgcccctccgagcctgtccccaggctgaggcgcgggacctgggccgaggctggctccgggagctcccctgtgcccgggccccttttacagctcgcacctctcgactcccggccactttcagcagcttagggagggagctagcagccggcgtgggggtggggagcgagggagtgcgtcctaacagagtctccagaggccacctcgctgccttgcgggggcgaggcagcccccaacccagcaggaccaaacccagagattagccacttaacgccgcccccgggtccgtgtgcgaatcccttactaaaaatggcgggctggctccgggggctgaagggtggcagcccgggggcactggaagggtagggagccgccacaaatcggtgaagcaggcccgcgccccaggcggctgggaatgggggaggagcagggcgccgggggacggaggccctaggaacttttggagagctcttcgagaagtttctgta

SEQ ID NO: 238555 - DNA, 338 bp, Homo sapiens
  chr16:54324279-54324617
  hyper
gcccttcctgggtccggagaagcgacggggacacttaggggaaaactttgccaacttcgctcttggcgcggaagaggccgctggccggaatggtgcagcagcggcggcgggccgcgacgcgcagggtgggccccgggccagtgctgggcaccctggagcgcgtcgggatgcccaaagtggggcgtgaggccggtgggctctttgctcctccgcttcgcccctgcgcctcccgcgacccgtctcacttccctgcgtctctgagcggcccgagaggcgcagcgctcagagtggccttgatggaagaacctggccctcggcgggaacgattttcttttgct

SEQ ID NO: 238556 - DNA, 61 bp, Homo sapiens
  chr16:54404674-54404735
  hyper
tgctgtcactcttcccccctcggatcctgagtgacggctcggcctgccacctcctcagccg

SEQ ID NO: 238557 - DNA, 272 bp, Homo sapiens
  chr16:54628744-54629016
  hyper
tagctgcaggaaaccgggcaagggagaatgcaaatagcagagacctcaaggtgctggaggagttaggaatctcccctccctcactctaacgctgccgccgccgcaccccgccacctccccccctccccacccccgccgcccacccgccctcaggttttaaatttggaagatattgtggaaatggacaaactcgcctttgcctgctgaccagagcccagccccaggcatgaaactgagaaagtgagcagttgcaaggacgtgacgctttcttg

SEQ ID NO: 238558 - DNA, 1800 bp, Homo sapiens
  chr16:54962409-54964209
  hyper
aagggctctactccggaaagccgtgtcccggacgagagccgcggcgacgaagggaacaggcgtggacagaggagccacgcccacgcgcgcccgccccgaaccccgacacccggagaggctcgaccggcgccgacgcggcccgaggcccaggccctagcccacgggacgtctggtcgggcgcggggcaccgccgcgtccgttcggcccacgaggggacacgactagaggggcggacggcgcggccagagggcctggcccgggcgggggctcacctctcctccgccgcgcgggcgcgcgggccgcggacgctccctcgtggctggcgcgagcccccggcgggcggcgcgcgcgggccgttaccgaccgttagcgccaggggctgcggctgcggcgggcggagccgggggcgggcgctgaggggccgtggggccgcaagaggcgggagcgaggggagcagggcggggacgctgctcccaggagctcccggcgacgactcgggcctactgcgagcccgggaagaggccgccggcgaggccgccactggccggctgcgcgctcccccaggctcgggccgcctgggccgctccgcctcgcttagacattggccggctggcagccacctcggccccacggtccccgccgccgctgcagccagcttcccgtctccatgacaatagcgcgatcgagaccccgcccctccccgcccctctggcgccgagactcggaggaaagcggggttacgtcaccagggggcggagcccagggaggccagcgcccaatcataggtgaaggaggtgtcaggcactgggctgggcggacccaggggctctcggagaatgtagtctgaaccgctcaggcctcttggtgggcggtgtctgggggaggggagcagacggaggggaggagccaacgcgcgtgcacgagagcgcagcaccgagcgggtgccggtgcggcgctgggttagtgtgagatcgcgaaataaagtacatctcgcccgtcaaagtcaatgcgagaaactttgtatatagttatgcttcggcttgcgtgtggccccattatgcgaagttcccgatatcccgagcttccgcggcgtgcccaaacctgtgccatcttctgtcctggttcaccagcgcccctgtctgtcccagagttcgagtgcgtccgtggcttgtggtggcgggaggtggagagaagaggagagggtctgttttgtattctaactgtgtggccgtcgtgggcaagggctctgcctctgactcagttgtgtgtgtttgcttcgccagcgcctcgctgaacaaacagtggttgggttgggcactgctctgcccagtgtttgcagtggagcgtgggcggatgcgagagtgcgtgcgaaggggaaggcgacttagttaaacaaaagggaaggggacccgcaccctccaccaccaccgacttggcggtgcgagctgcgtgcggtgggaaaaccgggagaaagaggctgcgaggcgtgggagtggagctggggacggtcccgagatctcctcgggtgtagctgattctctgtctggcagttcttgcccaccacccctactctagaaaaaggctaccccggtagttccaggaaccagtgtcttctccctcgccgtccggcggggggtcggtagaaggaaggcgaggcggagacgtgcagacgtctgaggcctgtctctcgcccacctgctgctgccggcgcagaggggcagtcatcccggacttcctgcgccctgggcgcgggccatccatcggctctcccagagactttcattccggatctccagctgg

SEQ ID NO: 238559 - DNA, 903 bp, Homo sapiens
  chr16:54964663-54965566
  hyper
gccgggttggctgcggccgcccagaagctcctgccagtcctcccaccgactacaccccgggaaggaggagcttcgggcgcgcacaaggcgtcagaatcctcaatttccaacttagcatcttggcaggacctttgcaaaggcaaaagcagagccccccggtgcaaagagcgaggggaaaaaagagaaagcagcaagggaggggaggggaggggaaaaaaagcccagctggggcgagcgaggcgcgcagaggagcgggcgcggcggtcgcagccggaggcgcgcgggaagccagcgaggaggcgccgcgggccggagccccggagccggggccagaggagcggcggcccagggcagccagaggccaggtgcccgcccgctcgccctcgcagggcgccgcccggctcgttggcggccgcggcgcggcgcgccccatgcccgtgtgtggccatgtcctatccgcagggctacttgtaccagccgtccgcctcgctggcgctctactcgtgcccggcgtacagcaccagcgtcatttcggggccccgcacggatgagctcggccgctcttcttcgggctccgcgttctcgccctacgctggctcgactgccttcacggcgccctcgccgggctacaactcgcacctccagtacggcgccgaccccgcggccgccgccgccgccgccttctcctcgtacgtggtaagtgagcgggatccgcggcgggcgaggggcagcaggggccgggcgggaggacgggggcggagggggacacgggcctaggcgccaacaccgacctcccccgccaagcttcgcggccccttcaaacttgggcgattgtctccgccagcttcgcccaggccttggactcaagagttgctcgcaaaagagagccgcgtcttgctcgga

SEQ ID NO: 238560 - DNA, 1653 bp, Homo sapiens
  chr16:54965776-54967429
  hyper
cctccaaaatgttgcaaatccgtaatcctatcttcgcaatccgatttgggagtattaaatttctgaaaagtcggtcgagctgcggtgcatccgggatttttcggccgggttgtaacttcggtctggggtagtatttttggagggtgggagtgcgtgggcatggctcagctttttgtttgcatttcttagctgttgaaaaaagaaaaaaagagccttgacttcccttgttttccccccttgcgcccaacgtgcgtccgctcccccgccgagcgcggagtcgcctcagttgcccaggcctctatctgcatggagggccgggccgccgtggccagatctgcgcacggggtacggacgtgcccgggcagatgggggcctacggggtgacaccgaggccgggacagcttcaggggccccagaaggacctgacccagaaattgaggtccccgctgccttctgaggagggggaggagttgctcctaggtctgaaccccgccagccttgccccgtaggaagctggagtgcgggcctcgtccacccacagaccccggggagcgcagggaaaagggtgcttcggtcgttccgatggcagtggagaccacggtccacactcacctctctgcgtctccaccgcagggctctccctacgaccacacacccggcatggcgggctccttggggtaccatccttacgcggcgcccctgggatcgtacccttacggggacccagcgtaccggaagaacgccacaagggacgccacggctaccctcaaggcctggctcaacgagcaccgcaagaacccctaccccaccaagggcgagaagatcatgctggccatcatcaccaagatgaccctcacccaggtgtccacctggttcgccaacgcgcgccggcgcctcaagaaagagaataaaatgacgtggacgccgcggaaccgcagcgaggacgaggaagaggaggagaacattgacctggagaagaacgacgaggacgagccccagaagcccgaggacaagggcgaccccgagggccccgaagcaggttggtggacatgggaaagggcgtgttgggcgggagtaaaaaggaaaagagaggcctggagggggcgcgcacggggcctggaggttgggggcaggggtccctgcctttgcgggcgggaaccgggtcccgccgcgcggcctctgcgcccctgacagcctgggtttcgcccgcaggaggagctgagcagaaggcggcttcgggctgcgaacggcttcagggaccacccacccctgcaggcaaggagacggagggcagcctcagcgactcggattttaaggagccgccctcggagggccgcctcgacgcgctgcagggccccccccgcaccggcgggccctccccggctgggccagcggcggcgcggctggcggaggacccggcccctcactaccccgccggagcgccggcgcccggcccgcatccagccgcgggcgaggtgcctccgggtcccggcgggccctcggttatccattcgccgcctccgccgccgcctcctgcggtgctcgccaagcccaaactgtggtctttggcagagatcgccacatcgtcggacaaggtcaaggacgggggcggcgggaacgagggctctccatgcccaccgtgtcccgggccca

SEQ ID NO: 238561 - DNA, 194 bp, Homo sapiens
  chr16:54970266-54970460
  hyper
tgcaaatgccagggcgcaggcctcccaaatcagaccgcgaaggctcggggctgcgagccgaatgcccgccgagctgcctgggaacgggaaccgcgcacccgggaacgccaggcgtttctcttcatccaggaacggcgcggagagcctccggctggggagctaaaccgctggggactccgcggctgctgcctgag

SEQ ID NO: 238562 - DNA, 503 bp, Homo sapiens
  chr16:55090597-55091100
  hyper
gctgtaattgctcccagccccggagtctggcaaaacgctcttgtggggcgtcggctgcggccccagattaatcccatcttttcccgcgccccaagcgccgaagccccagaactgccgccggccgggcccatccccagcccaggctcgtaatcaaaaggcagatttccgcgccgggcacctgtttgcagggctgcgcctccttccgctgcggtgttttatctcggcgcggcggtgaataattcatggccccgggtctgctttgcagtcaaacgcgctgcgttctgtccggcgccgccgccgccgcccgccggccgctgtgatttattatttaccaacgcgcggccgcgccgtgtaaggtgagcattgtggctgctcgcagaactgttacaatctggcctcgttagtggcctttcttgctgcatctccaaacagcggccccgcttattgattttcccgcggaacctctgccaagaaatcccaccgctgctgctctcaaagctgtt

SEQ ID NO: 238563 - DNA, 1379 bp, Homo sapiens
  chr16:55357865-55359244
  hyper
gctccaaggtcaaggccctgggccaggccagggcttggagagccggaatctagcccgagtcctggggaggctgaggcggggaaccagatccccgaggacaaagatgggcgggccagtgggatccaccgacgctgcccggagctgctccaacgagagccgggcctgtggcgtgaacaaactttacttcagcgcaggggcggaggaaccgggctggaggcttctcccccgggcctctgctctcctccacctgccagtgctcagcctccgcccagccttcgcccaccccagctccctccccctcccccacgcgcctctgttcactcagactcctgtctcccctctcccctcctccttctccctcttgcctttctcccccacttttctcctgtctcttcttttgtattctctcctccctcgccgccccggttgcctctcgcctcctccgggccgcaggggaggaggtgagcgcgctgcgcccggggcctgcgcggctcagagggaggcgtttctcctacttctcccgggtaatttggagaggttgtgtgtgtgtgcgcgcgcgcgtgagctccaggcgaaaaggggtaggattcagcgccgagcagagagggtcagggtttttgacgttcctcgccagctgcacaaacctcccggagcaagtgtgagtgtgggtgagagtgcgcgcgcgcgcacgggctggctgcgcttggcacgcttggtggcccagggtcccggggcccggggtcccgtctggcggcccgggattaccgtgacgtcacattgagcctctggccaccttggactgggacacctccggagcctcacagccccgcgccgcgccgcgcctcacctcgccaccacgcgcctttgggaacccgcatcttcttccttcccctgcccatccatgggcccttctgtcttccggaccccacgggccggaggggcgccttccggagcgcagggctcggcagccgggctgccctcggctctgcctccactggggccaaccaggcgaaggaaccggcgctgggcatccgcagcggtgtaaggaactgagacacctcactgctgggggcgcggaacagctgggctgagacgggaactcgacagggaagagagagacgggccagggacagccaccatgtccttcccacactttggacacccgtaccgcggcgcttcccaggtaagaggcgcctctatgggggataggggacagactgggtggagggagtgcctagtgcacggcgcctgcctctgatcatcctcctcttgtgttctgggggaagccagaaggagcaaggaccagggtaatgtgtcacagcctcctctgacatccccagtccctaaatgagaacgtttcaccccggagtgcacgctgg

SEQ ID NO: 238564 - DNA, 126 bp, Homo sapiens
  chr16:55362578-55362704
  hyper
gggcttttctcactcgctcttgatttcctgcagaagttactgctagccaggaggcccgggggctccggctgagtgacctggaagacctggaggaagaggaggaggaggaggaggaagctgaagacg

SEQ ID NO: 238565 - DNA, 291 bp, Homo sapiens
  chr16:55363064-55363355
  hyper
tctcagtccccagagactccgcgtgcgacgagtcttcctgcatacccaaagcctttggaaaccccaagtttgccctgcagggactaccgctgaactgtgcgccgtgcccgcggaggagcgagcctgtagtgcagtgccagtacccgtctggagcagaaggtagtgggcccccagcggcgctgggagtatctatgcaaaagacacccacctaccgccccgcccggcaattgcacaccctctgccattccagtctgcccaggtctcccacagaactgacgggagattgcttta

SEQ ID NO: 238566 - DNA, 803 bp, Homo sapiens
  chr16:55364744-55365547
  hyper
ttgcgacagcgcggcgtgggctgcatacctcagttcctttagtagctgggaaagaaactgacaaggtaacagacaaggccgtggcgcctgcagctcagcggactaaccgctgcgtaaccaatccgtggagccaagctgaccacctcgcgggtcctgcgcatgggaagtggtgggacttgtcaggatgtttatctggaaactgcatctgtttccgggttcgtatttgggttgtaagtttactgggggaggggtgacgaggaccgcgctcctccgatcgaactgaacctaatggggaggtcaggcagctttcagggtcggtgtgaggcgagagggggcattcttcccgttttatcaaaagtgtcagcaaacacttccggtacaggccaaccaatgggaactgacgggcagggaaggggtctttgtcccccttgctaggagtgtcgagcgaccgggttgggggtaagagatttaaagacgcccgcgcaatggtgggtgggggaggctgcctgcgttcgtgtcccgcgtctagtggctttggctttagccagggagtgagcgcaccgctgctcgcagggaagcagggacccggggcagtgccctagaggggagctccgaagagcaaatgaggcgggaaggcaggacgaaaggcagctggggtgtgcgcccaaggcctggattcctggggagctgcgtttccaacgccgggtcccggccaggccaggccttccaggccagcgcggaggccagactatcagtcactgaaatccaggcgagcatagtccgcctcctgggcaggatgattg

SEQ ID NO: 238567 - DNA, 59 bp, Homo sapiens
  chr16:55365833-55365892
  hyper
cgaacactcgcccgcgcttcctctgggagacccctctttgctttcgttttgttcctggg

SEQ ID NO: 238568 - DNA, 479 bp, Homo sapiens
  chr16:55404803-55405282
  hyper
ttttagatccttggacagatcgcagcctcacctacgggaagatctacatcccctcctccagggctctaccgagggagaaccaaggtagaaaagcatgcctttccggctgctgcttttgcatcttatacggatagccggctcatggcaatgtgactcaagctggcaggggtctttgagcatcaaacgtgtcctccttccctctacctacttcggctccggtttctctcccgaagcctaaataaagaaggtaacagacaacacctctattggcagaggcttctgccttttccgtcaggctggctgcagcacatccgtaatccttatgtcagcctgcactctagcgttgccggcccggtccagcatctgacagccgcgaatccaaagctgccggcctctcgtttctaagcagcagctcacagcgccagccgccctcccgcagaaggggaacaaagcccggcggactagctcactatcttctg

SEQ ID NO: 238569 - DNA, 138 bp, Homo sapiens; identical to SEQ ID NO: 204211
  chr16:55499096-55499234
  hyper

SEQ ID NO: 238570 - DNA, 302 bp, Homo sapiens
  chr16:55514151-55514453
  hyper
acagctcgagggggccatttgggaagtgattggggcaggagggaagcagagagcgcatcttttttctcctggcttaatggacaaattggtcaagggctgggcctcggaaagtttcctcgaacttctccaaagggtcggagaaaagaaggagagagctggcccggcaggagggaggaggagtggggcaggcgctggagggcccggcgcgtggggcgggggcggactgcgctccgctcgggtcggagagcggccagagagccctccttcctggctgggctcccaaaccgcggttcagatgttgt

SEQ ID NO: 238571 - DNA, 1309 bp, Homo sapiens
  chr16:55689584-55690893
  hyper
ggcctcctttctgacgcgacgcagaccccagttctggagagtctgtcactcgctccccgtggtgggagatcagaggcctggtgtccttgggagcggcgagcggtgctcggcgcaggatagaaagggagtgcgcgcccgagtcccccagatccctgggaacccgcgccaccctcccgcccctgcccatccccggccgcgctgtcagtctccattagcgctaacaggctccagacggagcgggccgggcgctgggttaatgcaatcggcgcgttacctggggcgcaggctacattaccagcccggcccccgccaggcacggccagaaccagtcagcccgcgccctgccggccgccccgcgcctccagctcttccccggccccgcccgaacgccacacggcggagcccagccccagcccgcgccctagagcctgccaaggcgccgccggtcgggggccggcagggcgcaaggcaccagggatcccctcgccgccggacacgtgagtgcgccctgagcgcgggacagggctaggtctgcctgggaggcccgggccgagacgcgccagcagagggctagcgagtttgtagtgcagtgacgttaagtgtccgagaaggctcctgtggctgttgaagtgtcgcggacctgagctggggagggggtcggcacgctgccctcagcctcggtgagttcaatcccagccatttggggcaggcgagagtgggtgaacgaggaaaagtgctgcagggtcttcagccgcccccagagggctgtcagaagtctccaactcttgagttccggcgtgccccaacctctgtttccaaatttttccagcggacgcgcgcccttttctgggaaccctgcgtccgctcagcgcgcgctcatcccagtgtctaaggcgctcccgggtggtcttgggagttgcaagtagggaggaacggccgggtaaccacctcttttccctttatccaagcagagcctcggcgtgcccccaggaccggtaaagttcctctcgccagccgcatccatgcttctggcgcggatgaacccgcaggtgcagcccgagaacaacggggcggacacgggtccagagcagccccttcgggcgcgcaaaactgcggagctgctggtggtgaaggagcgcaacggcgtccagtgcctgctggcgccccgcgacggcgacgcgcagccccgggagacctggggcaagaagatcgacttcctgctgtccgtagtcggcttcgcagtggacctggccaacgtgtggcgcttcccctacctctgctacaagaacggcggcggtgagcgtggggt

SEQ ID NO: 238572 - DNA, 244 bp, Homo sapiens
  chr16:56224483-56224727
  hyper
aggggtttgctggaaactcccggtcgcttgaagccctgtccctccactccgggcaccctggcctccccagggtgggcacccctcctgcacggagagcggcggctgggatctcggagcagggtcggctatggccctggaggcagcggctcacagagaaaaagctctggcttttctccgcccgctgcgttcctcttcttacagcctcgggtgtcacatattaggtgctcaataaatgtggacatag

SEQ ID NO: 238573 - DNA, 577 bp, Homo sapiens
  chr16:56390319-56390896
  hyper
cccccgtcccacctcgcggcgcagcccctggagctcctgctggggggcagggcccatctgccgcctggggctccggtgcggtgcactggtccgaggagtgtgctcaggccgggctttccagaaggccacaggccactgcaaaccctgctgcctgccggccgcccagacaccacagacgccacctggcggccctaagccactcccgccacacgctcactccaggttcgtatagaaaaagcacagctctcactggccagtagctgccaaaaagaacacccatcgtataaggaaatccagccccatagaaaacaatctgcccaccgaccccctttctaaggatagcctttgtaggggttttttggttccttttttttttttttcagtttttgtttttacttttgtcccgccgagtactatgtattaccagccccccaccccacagatcagttttcctagtctttgggaaacgggttgtgttttttttcctttgccgtgttggatttccggtcccggctgacacctcccttcgtgtgtgcgcccctccccacccctgcctttgtttcggtgccctgtgtcc

SEQ ID NO: 238574 - DNA, 32 bp, Homo sapiens
  chr16:56642231-56642263
  hyper
tacactgtgtcctcccgctgcacccagcccct

SEQ ID NO: 238575 - DNA, 651 bp, Homo sapiens
  chr16:56659228-56659879
  hyper
gaacacaactcgctcgctaccgcacgttccccgctccgcactcagcggatcccgggacggcagcaggtgggctgcacacggactctgggacaagtcgagctgaaaaccgcggagctaggggtggggtggagacgcccgcgacgccaaggctggggtcccggaacacgctgggaggagggtggaaggcaacctcggggaaactgggaaaggcggcctggacttcgggaacaccgcgtacctgcgggggcacagccccacccgagcgaacgggctccaaaggggaggtcccgcggtgcccaccgcgcagagctcagggggtggtgcgcccggcccttctgcggcgcacagcccagcccaggaacgcgggcggtgcggactcagcgggccgggtgcaggcgcggagctgggcctctgcgcccggcccgacctccgtctataaatagagcagccagttgcagggctccattctgctttccaactgcctgactgcttgttcgtctcactggtgtgagctccagcatcccctttgctcgaaatggaccccaactgctcttgcgccactggtaagggaagctctgcgccctggaatccccatttcccagccctattacagagggtctctgggtttcaggaagtcgcattttaagttct

SEQ ID NO: 238576 - DNA, 667 bp, Homo sapiens
  chr16:56671949-56672616
  hyper
acgagagtgagaggccgacccgtgttcccgtgttactgtgtacggagtagtgggtccgagggacctaggtgtggacagggacaggcaaggcgacagcgaggagaaacgaaaatcacatcggtggcggttgctctgcacacaactcgctcgctaccgcacgctccacgctctgcactacgccgatccggggacaggagcaggaggctgtggctgcactcagacttcgggacaggccgagctgaaaaccgtgagaggggtggggtggaggcgaccgaaacgccaaggctgggttcccggaacgcgcggggactagggtggaaggcaacttcggggaaactgggaaaggcgaccgggacctcggggacgccccgtaccccgggcgtaaactcactcccgcgttagcggccccaaagcggggagggggtggtcccgtggtccgcacccaggggagctcagtggactgtgcgccttgcctttctgctgcgcaaagcccagtccaggtcatcacctcgggcggggcggactcggctgggcggactcagcggggcgggcgcaggcgcagggcgggtcctttgcgtccggccctctttcccctgaccataaaagcagccgctggctgctgggccctaccaagccttccacgtgcgccttatagcctctcaacttc

SEQ ID NO: 238577 - DNA, 377 bp, Homo sapiens
  chr16:56677223-56677600
  hyper
gggggtggggataccgcgaccacctgaggctgggttcccggaccgcccaagggcaggaatggagtgcaatctccgggaaattcgggagggccgggattatagcagggacgccgcgtaccgccaggagcacagcccctccaaagcgagcgtgagccaaagggccgcccccagggtgcgcaacagccacgttaaggaggatcctgcgcccggcccgcctggtgcgcacagccccgccctgaaccctgggcagcgctgacactgagctgggctggtgcgagacctggggcggggccactgcacccagcaccctgccctgactgtaaagtcaggcggcctgctcctgttccgcctcctaccggcccgcctgttttttcgcc

SEQ ID NO: 238578 - DNA, 223 bp, Homo sapiens
  chr16:56691536-56691759
  hyper
tgttgacgaaggaccggggcggggccggggggcggggcgaaggccaggatctccaggtacccggaaccccaaggggcgggtgtagcaggcaatcttggcgaaactgggaagggcgggcaggagggcagggaagccgctcacccaggcacaaagcgcctcccgcttgagcggactccaaagggacggtccgcggtgtgcagcgagctgcgctcaggggaccttg

SEQ ID NO: 238579 - DNA, 449 bp, Homo sapiens
  chr16:56701843-56702292
  hyper
gcatcccaaggcacagaacccgggcgtcccttaccagcggcacaggagcagttggggtccattgcaacccgaggcgagactagagttcccaagcgagaagggaagaggcagtgggtgcacgtggaaggcggagtggagcccaacagccagcggctgtttttatagtcaggagacggggccgggcgcagacgccccgccccgcccttgcacccagcccgctgagtccgcaccgcccgcggtcccggcctgggctgtgcgcaggagatgggccaagtgcaaggtcccttgagcgcagctgggcgcacaccgcaggacggcccctttcgcaccggctcgcgagggaggcgctgtgccccccgtgtgcggcttctctcaccctgccaggccttcccagcttccctgaggttgcctgctacacccgccccttggcgttccgcctaccccagtat

SEQ ID NO: 238580 - DNA, 491 bp, Homo sapiens
  chr16:56703367-56703858
  hyper
gacagggggtgggcaggccccggggtgtggggcgcaggtcaggatctcggggcacgcggaacgccaaagggcgggagtagcaggtaatctcagggaactgggcaggcccggcagggtgaaacaagcagctcacccgggtgcacagcccctcccgcgggagccgctgcgaaagggccgtccccgcggtgtgcaccgacctgcgctcagggtactttgcgcccgacccgtctgctgcgcacagcccagcccaggaccgcgggcggctcggactcagtgggtcgggtgcaagggtggggcagggtctctgcacccggctccctcccctgactagaaaaggagctgccaactgttgcgctccaccacgccctccacgtgttccactgcctcttctcttctcgcttgggaactccagtctcacctcggcttgcaatggaccccaactgctcctgcgaggctggtaaggaacgcccgggttctgtgccttaggatgc

SEQ ID NO: 238581 - DNA, 314 bp, Homo sapiens
  chr16:56709742-56710056
  hyper
gggtggggacagcgcgaccacctgggaatgggaaatggccctcagggtggcaggggcggcgcgtacctctggcagcatagcccctcccgcacgagcgggccccaaaagggcggtccccgggagcccaccaggctgcactcaggggatggtgcgcctgacccgcctgctgcgcacagctcaacccaagaccgcaggcgccgcggattccgcgtgggggtgggtgagaagggtactctgcacccggccccctcttctaactataaattgagcttccggttcctagaatccaccacgcctcccacctgccccactgc

SEQ ID NO: 238582 - DNA, 97 bp, Homo sapiens
  chr16:56763915-56764012
  hyper
aaggccccacctccgccccgcccccggccccgcccctgttcttgtcctcccccacgggtctccataaagttcatttggcgtcgcaccgcgcgagggc

SEQ ID NO: 238583 - DNA, 67 bp, Homo sapiens; identical to SEQ ID NO: 204222
  chr16:57023303-57023370
  hyper

SEQ ID NO: 238584 - DNA, 41 bp, Homo sapiens
  chr16:57127018-57127059
  hyper
ggagggcgtacgggaggtggagacccgccgctgccgcagct

SEQ ID NO: 238585 - DNA, 95 bp, Homo sapiens
  chr16:57220055-57220150
  hyper
attgggccattcacgcctcaggatgaggactggccagtctgcgcctggagggcgggccggtcccgctgatcacgtgacacgatttttgaaaggtg

SEQ ID NO: 238586 - DNA, 316 bp, Homo sapiens
  chr16:57318149-57318465
  hyper
gtccgtgcgggaagcgccctaggggtacgcgcagcgcgtcggtgacagtgtgagcccgggtggggagcgcaaggttcgcgaaaaatgaacgcagcgccggagtccctcacccatcctggccggaccgggagcccccggccaaccccgtgggcccgcgcgtgctctcaccagctgcagcagcatgagcgccccgaggcgggagcgcacgaagcccaggtccgggcgcagcgccgacaccgaggcttcggcgccctgcgcaggactgctggtccgcgtgctaactttcgacgggaactcggccatggcggctccgctt

SEQ ID NO: 238587 - DNA, 273 bp, Homo sapiens
  chr16:57481495-57481768
  hyper
ggggctgccaagccggggagaggcggggagcgcggagggggcgcgaggccggcttcagctgggttcgacggtggggggaagaggccgttggggcggcccacgagcaaggtgaggtgaagggcatcggcgcgggctcgggcgagccgcctggctagcttcggccctgctccgctgtctgtgaggggcagatgcagcggggcagggcctgtcacccccatttcatggagttggcagagcctcagagagggctcggggtacgaaagtcacgcagcc

SEQ ID NO: 238588 - DNA, 336 bp, Homo sapiens
  chr16:57496650-57496986
  hyper
ccagcctaccgtgcggatcacggagctcactgacgagaatgtcaagttcatcatcgagaacaccgacctggcgtaaggctaccgagggaagaggctggcggctctggggcgccgggaggcccaagccggggccccggggcagggggcgggggtgtagtggggtggggtgggggcgatgtccttccagagctgcccccctgcaccagggctttagctttgggagcctgcggcgcgggcccagcctgtcgaggctgcagcgccttcacgccccttggcttttgatctttcagggtggccaattcgattcggagggtcttcatcgctgaggttcccata

SEQ ID NO: 238589 - DNA, 311 bp, Homo sapiens; identical to SEQ ID NO: 204226
  chr16:57519803-57520114
  hyper

SEQ ID NO: 238590 - DNA, 145 bp, Homo sapiens
  chr16:57570647-57570792
  hyper
ggggcgaggggtgcgggccggggcggtgggctctgctgcagagcgggccgtaccccaacggaggccccacccccgtgaggggccgagagttgcgggggggctcggctttcttggttcaggtttcctcagcgccaactacgtacta

SEQ ID NO: 238591 - DNA, 616 bp, Homo sapiens
  chr16:57769284-57769900
  hyper
ttttccaataatgcggacgctgattggtcaatccaggacggttgctcaagccattggcgcagccgccattggagggcggctctcaaaagttttcagacacaaattaggttcgagggaggaaacggagaggaaagggaaaacttgagacggaggcgggactaaggaaacggcagcttgcattggtttattagaggccaaggggcggctcttgaacgttccttcctcttgattagtcctatttaggaaaagagggcgggtactgaggaaaagcggcagaagcgcctgcttccattggtcagtcctggcaggaggcggagcacccgcggcagctgattggtgcgggaggcaaggtgggcggggctctgagccggaggttttgttgtgagggtcggttgtcaagcagcggccaatcaaggcaggggatggaggcaagtgggggtcgcgcctggagcggagcctcggcctccggagccgcagctgcaggtggagtgggcaaggggacgaggtggcgaggggacggtgggccctgggctgggccgagccaggcggggctggctgggcttgcgggcagagagctctgagcgtggggaggctagagcccgtactccgcaagcag

SEQ ID NO: 238592 - DNA, 241 bp, Homo sapiens
  chr16:58035172-58035413
  hyper
aggtgaccagatccgcgtgcgcagccggcagacagcttggagtcggtgggctgaatcttcaccactgtcctgccgggttccgcccctcccggctccgccccgaggcggtgccagcccaggccccgcccctgggagggcgcttccggcacagcggaactccgggtgccggttgaggttgctggtggacctgctctggtggtcttggatgaggccccatgagcgcggcgcccctggtgggcta

SEQ ID NO: 238593 - DNA, 81 bp, Homo sapiens
  chr16:58058822-58058903
  hyper
ctcaagctgcttccggaatagaatgaaatccagctcgttaagcttcgcggggaggtgtgtccacccgccccgcgccgactc

SEQ ID NO: 238594 - DNA, 206 bp, Homo sapiens
  chr16:58059307-58059513
  hyper
cctccttcccgtccgcctaggcctcggtatcccccaccaggtatgagaaggaggagtcttcattcttcccaggcggggagaccacgccttccctgcctcctccctccgcggggggtcgcgttggaggtcacccccgccccctaggcgctgggttgggagtgacgcggggtgggctggagaggtttcctgccgtctgggaagcgtaa

SEQ ID NO: 238595 - DNA, 719 bp, Homo sapiens
  chr16:58060581-58061300
  hyper
cctctgcagcgcacctcttcgcaaacccttgagggcgcagggcctcgctctcctccccgctactcctacagccctgttctgggcactgagcccccaccccgacccccttacattcagcctgtgtcccgggagccgcttccgccgcccccagcccttgcctcccctccttccttccctccagggcagccgattcctcgagagcccggctggcgcgcagtggcgctctttgcgagtggggagggggctgctctcggggacagccacaggcggagcaagagctgggcggctgggcaactgcgctcctgcccaggtggcctcccgtctgggtgataccgagccgcgcacggcgggccaggatggaggcggggggatgggtgcaaacggctgaggcagcggactcgggttgcgggggcgctttggcgactttctgcgcttttgcgaggaagcctaggcacgcccgggcggggtcctaaggacggaccctgcctcccacagcgcttcctcccaacagcgcccctacgtcgaagccctggattcgagagggtggaccccgcgcctctcttcgctaggagcccgcttggcgtccctcccggggccccgctctggatgggtcccgcgggtgaccaggcgcgacatcccggcgtagagccgagtccagccagcgccccagctccatggtgtctcccgagcgaggacaccgaaggcgccagctttcttgc

SEQ ID NO: 238596 - DNA, 144 bp, Homo sapiens
  chr16:58283895-58284039
  hyper
gcaggggccgcttcggcagagtgatgactgatgatgagtccgagagcgtcctctccgactcccatgaagggtcggagctggagctgcctgttatccagctgtgcgggctggtggaggagctcaggtaccgccgcccgcgcctgg

SEQ ID NO: 238597 - DNA, 469 bp, Homo sapiens
  chr16:58497214-58497683
  hyper
tctaaacaaagactacggcagcgccgtcccctcccccgggaacccgacgccgcgcggccacagggggcctggaggggcgggcagggcctcgcagcgcacccagcacagtccgcgcggcggagcgggtgagaagtcggcgggggcgcggatcgaccggggtgtcccccaggctccgcgtcgcggtccccgctcgccctcccgcccgcccaccgggcaccccagccgcgcagaaggcggaagccacgcgcgagggaccgcggtccgtccgggactagccccaggcccggcaccgccccgcgggccgagcgcccacacccgccaaacccacgcgggcacgcccccgcggcgcaccgcccccagcccggcctccgcccctgcagccgcgggcacgcggaggggctcctggctgcccgcacctgcacccgcgcgtcggcggcgccgaagccccgctccccgcctgcgcgtctgt

SEQ ID NO: 238598 - DNA, 786 bp, Homo sapiens
  chr16:58497983-58498769
  hyper
gcggcggggtctctttgttcgggcggcgggcacgggggaccacctcccacggtgtcaccgcacccaccccgcgcccttcctccgcctcctggagttcaccgggaccaggtggcggcgggtgcctttttgggggtgcgcggccatgcaattggtggatttttttaaaccgttttggaggggggagcgcggcgttgggggcgggagagcgctcctggctgtgagctgctcctgccgcttcgctccgcgctctcctgccgctccgctccgggtctcccgcgctcctctccccggctcggccgagcgcgctgccccgacgccgccacccagagccgggccgcgccgggcgccgagatgaaggtgctgggacaccggctggagctgctcacaggtaccgcccgcctgccccgcagccggccgccactttccgagttggagcggactccgggcgcggcggccggggactggggcggctcgggtctgagcaggaaggggtgcggaccccaactaagtcctagttttgtgctacctgtttgtgtgcggagcccagccccgggagaggacttgaggttgtggcgagtccctggcgctggcgtccgggctgcgggagcaccggtcagggggtggccccatggggtctctgaccagcggagctcggattaggaccctgaaagctagctcagggctcctgccctccaatcagtgtcgcttgtcccctaagaaaggacccgtgggcttctggcaggacccgcgccatggacctcttatttctgcgccctgtgacaatct

SEQ ID NO: 238599 - DNA, 1212 bp, Homo sapiens
  chr16:58548939-58550151
  hyper
tccaggagccctctaggccacgccactctgaaacacacacgaaaactgctctgaacgaataccaccagtaaaagggttccatggccatcggcaacaaggggtcgagatcaggaggtcgctcgccgcccagttgcgtcgctcaccaccggccggccaccagaccctcggcttccgatccagaaaccgtattttgttcttgcacccagaccgcaagaagcctcagccctcggggacagaccgaaggccagggctgtacctggctcagaaccaggcgccaagcggcacgggactctccttctgcactcgcagcgcgtgagtgcaattggagatcctggactcaagatgttttcatgaggaacgattccagcccgcggtaactccggccagtctgcagcgtggacgacaaaacaggcaccacgtggttccggcgccggggcggggccagagacgccggaagtgaccgcgcggtgcgccggcccgcgaggaaacgcgctcttagaccatggcgacccaggcgaagcgtccacgggtgagtggcgggcgcggggtccagccttttcctccgcgcctcaccccttctccgttcgcagaaccgtccgcctgcgccccctccgctccctcccgcgggtcccgcgcccctctccgctcgtcccctcctccacccaaagcccgttctgcgctcgcgccgcggtctcctgcagttcccagcggcctctctgggggtcggacctggtcactgcgcgcacttatctcaggtggcggggcccgtggacggcggcgacctggatcctgtggcctgcttcctgagctggtgccggcgggtggggctggagctgagtcccaaggtgagcgagcgagccggcgggcggaggacccgcggcggggcgcgggctgccctgaccagccctcctgctcaggtggcggtcagccggcagggcacggtggccggctacggcatggtggcccgggagagcgtgcaggccggagagctgttgttcgtggtgccgcgggccgcgctcctgtcgcagcacacctgctccatcggcggcctgctggagcgaggtgggcacggcggcgggctagggccctggggcggggcggggcggggcggggcgggcccggcccgcgaggccgcgccggggcgctcacacctgtgtcttcctcagagcgagttgcgctgcagagccagtcgggctgggtgccactgctgct

SEQ ID NO: 238600 - DNA, 2316 bp, Homo sapiens
  chr16:62068387-62070703
  hyper
agtgttgtaaagagaacaggcgcttcaaaagccagcccccatccctcggatctgctttgcgatggtaccggatgcgagaggacagtactctcgcttaccttccctagcgtcccctcgttcccattgtcagcccccagatatcatgacgccaggtgaaagaaagcagctgatctgattagcagctcgggcgcgctaagggattgtcgaatcatgcctcctaaggaggaaactcttgtggaatcttcaggaaagggtggtaaagttgaaaggacctttcctccctcccgctgtcttggtgataagctctatcgtttaattggtgctgaagtgagcagctgccagcccgattttccattacggactaatattgtgcgtttgcaacaataaacaattaatgtggtttgatttcttacatttagcaacccaagcaaacagctgccatctccgctggtggaggcaaacggctagtccttgacatgccgccggctccgtgcctgcgggggaagggtcaaccgcaaggaaactttgaggattctgccagactgggtgggggaaggctctggtgtttgggaggaataagcggaggaaattgtggatacctgttggcatcagcgttggcggcagcacgtttttttaccgtttcccagccttggctggatcctgggagaaccggagtaggtcccttatgaacctcttacgtactggcagaacctaggcaagagcctttttccctccgatcctgcgaggggcgcgaccagcccctcaaaggttcccggatgagaagcggccagaccacagaaagcgcaggtctgggctcagctgtccctaggagagcggctacggagtccccggcttaagggggcctccgtgcacgcaatctcgagttgcggggagacactgcctgggggtcctgcaggggtgctgggcagcgtcttggcgagggcagagccgcagggcgactccggagcccggcaagtttgtagcgggcaccgcacctcccagagctggagctgccacttgtgggaaagcctcgcgctggggctttcgcagctgagccttggcccgcagccctgccgcgggggtcgccctccctcgcctcggagatgaggcggtgcagaaaaccagccatagaccactcgggccccctcgcctccttttttccctggcttgcaccctccgcacagcgggctgcaggtgcttcccattcaccgcacggaccccgcagtgaaggcgcgcggctgcagccgcgcctgcctgcgttgggaagcggcgaaatagccaagtcgccgcagggaaggaaaccggcaggaaaactggaggggcacagcctggagcttgctactctctaggatctgttgtcaaagcagtttgcaaaaacagtcaggcaaaaccttgaggcgtacgtacgttatcacccacggatatcgcgaaagacacagcttagcccagagcctatgctaagaaccctcatccaccatctgaggggcaggaggcgcgcaaggtgtccgaaggggcatgggaattcctataagaaacggtcccttctggatagtcggaacatagaggaaaacgggggtgggttaggggaacacttactcttgtggggccctgcgctggcgaatgtcaagcctccaggttcacaaatggctggaggtgctcggggttagctcccgagggcggcaagcgccgaccggtcctcgctcgctaggcaggcgcctccggattccgttcatgcctctcggagctacagggcttggtgcggagacgcagggcgggcgcgctgggctctgggtgtccgcaacccaaagtgcagctggtgtcttgacgctaccgtctatgcacaagccggcggcggcggcggagcttggaggaggcagggagattccaaataaatccactaattctgggctgagcgctccggcgtgcgagcccgcctgcctgccaaatgtaactgtgaagtgatgtggaaaagtgagccgggtgcctcccctgacggatctcattgggcagagcgcagaggcaggtctaccacttggaaattcatgtaagcagtcccccctccccgccccctccccgccttcccccttcgctctcccgcgctggctcgatcgctctctttccccctacccaagtgggcgcacaacttttcgctcctcgctcccgagcaagccccgcgcgtctctgccgccagagccacgaggtgaagatgcgcccttccgcgcggtgcgcgcagcccgctgaggaccgagctcctggataagtgggctggcagataataacagcatgcggatgaggtacctgcgagctttctctcta

SEQ ID NO: 238601 - DNA, 2113 bp, Homo sapiens
  chr16:65154643-65156756
  hyper
aaaacctttcacccgggagaggcaggcgcggcgagccccgggcgaaagcagggcctcggcaaaaaaacggacaaggaagccggacccgcaagcctcccccgaccccactttctctggggactccgcttcacagcgtgaggcgggccctcctacagttcctctgggttggggaggggggagaagggagctctcctcgccgtcctccccatctggccagcttctcagtgcttcccacctcccggctcgcgttccggggcagagcgcagggagggaggccgtgcgtgccgggagctagagaggcttggcgcgctccgagaagcggcgcaggtttcgggaaggtgtggttctcaaagttaacgttgaccctggcagctttcgccaatcccaagccagaggcgagcccgagtctgggccgctcatggacctactcctgcgctggtgggagcttacaaacgggcgccagagctcccgcagagactcgggctggagggctgtagcgcaccgcagcctgctgccccagaaccacagtcggcggccccaaacccacgctattaaagtgcgggcaatctccttccggagctggggtctttccgttttcccgggcttacccggcagtctcgactgcagggactaagccccggggagctttcggcagggatccgggaggatggagtaagaaccccgcagagcgcggtcatgtcgccgctttggggaagcggcgcagggctggcgggcaccgcgccgtgggcgactttccccagagatatgaccggggacagtcggcgtgtccggaggtctgctctgcagtctcttgccccagccaggtacaaaccccctctgctgtggcctcggcgcagaccccacaggaggccggagccagggagagtcgtggagcgcacatctgaagcctccgtcccctgctttgcccgcgcccacagctggctcccttctccctttctgatttttaaacaaatctctccctcccttttgctttgcgttagtgaagccttctcgactcagataccaccgtccccctcaccaccccgccccgccaagacattctcttcctgagaaaatcctgccccccattccaagaagccccaaccaggcgagaggaagggactggcggcgcacctcacctggggcccttgagggtggacgcaacctccgagccgccagtccctggcgcagggcaagcgctgcggtgtcagtcccggccccagtcccggtcccattcacaagtcagcggcggctgcgagcggcccccgcggcatctgctcctcggcccgcgacgctcccctcagctggcggcggccgcggaatgagccgccgagcgcgctagtggcaggaatgagaaaccggggggaggtggcgggcgggcaggcgggtgcggggcggggggggcgggaggagggaggctgccgctgtgagggaaggaaagggcgggggctgagagaagccgaggctgcgagaggcagcgagatgggcctcgcagaggctgcgggggccgaccccgtccgcgcccctccccccaggggcccagagatgctaacccctggattcgtggccgcccctcccgccccgtggcgcggcgctccgactccctcagggctcagatggagtctggagcgactgaagttgggctccagggacgcacagccaatcagggagggcggcggagggaagctggagaggggttgggagcccccattttcctccttcccccaaatccgctccagctggccaggctgggctctcgcctggcgggccgggatggtggttgggggaaggtatcgtccaagtgagggaagcaattgggaattcgggagcgcgttctattctttctcactccaccaccccaccttccaaaaatccctcaacgttggcggctcctgcccagcccccacccctctcaatctcccatcccttgcaaactcttctggtggctctggtggtgaagtcgggcggggagggagacttaggacttgggaagagcccagtctccgttctctctcagctctcctctcgtctagtgccccccacgcaacgcctcggagaggggtgcgcggggagcgcttcgccggggtcggcctcgctccagcttttgggaggg

SEQ ID NO: 238602 - DNA, 223 bp, Homo sapiens
  chr16:65156936-65157159
  hyper
actcgctaccgtgagggttccccgggcctgcttcctgccctccctccccgagtcgccgggagaaagggctggcagggccggggcttaggaatcacgccaaggactgggcggggcgctcgcggtaccgggaacggcgtggggatccgcacacccagcagggaacaaccatgcctgtgtggggacccctggcttgaacaagtttgcagggtgggaggtggaggca

SEQ ID NO: 238603 - DNA, 185 bp, Homo sapiens
  chr16:66440409-66440594
  hyper
gaccaccctcaaccgttgcctcctgggtcccaggacaatgcgaatctacagacttcccagacctggggggctagaggctgaaccaaggagcatcgtccgcggctgttgggttggtaatgggaaatgaccactagggggcgcgctgtgtcaataaatgctcagccagggccggtgtctgcgagctc

SEQ ID NO: 238604 - DNA, 792 bp, Homo sapiens
  chr16:66460620-66461412
  hyper
gcccagcctagcctcggtccaacctgtctggctgtccttccctgacacctcgtttgtctacccttctctgcacgtgtcagtggctccccgctcgcgtccgtgtgtcattccctacacacgcctgtgtgtcctcttcacacgtctgactggagcgtcggcctcccgcatttcccggcctcctcgccgccctgccccgcctgctgctgtgtgggtgtcgggctggctgtgcgcaaaggggcgcggctcggccctcccccgcacccgcgccccccgccccgcatctcggagtgacccgggccgcggcgccgcggtgctgaggcccgggagccgcgccgccgccgaggggggccggggccggtgacggtggcgtgggcggcggcgcggggacgacgggcggccgggcggggctgcggcagggcagggccagggccagggccggggcctgggaagccgccgccgccgctgcctcggcccgggatcgcgggcggctggtcggcccggctcgcctggccccgcctggcccgccccgccccgcccctgcgcgcccagcaggccgaagcgtagcggcgcgccccccgcgacgcccgagcccgagcgcagtggcctccgagcgggaaccggactgggagccggagccggggcgggaaccggagctggagccgaagctggagccggcactgcggcgcacggagcggagcgctgcagccaagccgagtaaggggcgtggggctgggcggcgcgggggaggggcgggcggggggtcccggccccattcccccgcgctctgcggtg

SEQ ID NO: 238605 - DNA, 538 bp, Homo sapiens
  chr16:66612754-66613292
  hyper
atcgtgtgttgcatcgatgcgtttgtggtcaccacgaagatgaggaccaacttgaaaagattcctgggagtcgaagttgaaaggaagctttcccccgccaaggacgcctaccccgaaaccggccccgacgccccgcagaggcccgcctgaagccagcccggcgccctagcagatgcacgtgtctgtcgaatcgctgcctccgagcccacccccgagctcgcatgctgtcacccattccagcctaaatgtgaccataaaattagggctgctgcttttatcgagaacacctgcttcctctcgttgccttgtgtgaaagtcgcgttgtattttcctgcgcttggcgctgcgcccgcggagctcagggccgtgacccggtgctcgcagccccccgaccccgcagcggagcggcggcttacagacctggggccacctggagacgccgggatgggaccgcgagggcagctccgcgcggaggtgggaccggcgggttgggaacggagttggggcccgtcgggggccggcgcgtggagggtgggag

SEQ ID NO: 238606 - DNA, 90 bp, Homo sapiens
  chr16:66638026-66638116
  hyper
tttgcgcgcgcgcgcgcgtgtgtgtgtgtctgtgtgtgtgcctggagctgcgcttgcaggtctgagagtcctctgagaatgggttggggg

SEQ ID NO: 238607 - DNA, 45 bp, Homo sapiens
  chr16:66638476-66638521
  hyper
ccaggccggggagggggcgggtcgggcccagcatcccccgcagcc

SEQ ID NO: 238608 - DNA, 129 bp, Homo sapiens
  chr16:66914360-66914489
  hyper
tccatcaagggcccgcctccgcaattgagccaaccagggctggcgggagggcgcttccttctggagctgggtcctgactagggaccgcctgggtgaggtgaggacctggtggccgcagttgtggcactg

SEQ ID NO: 238609 - DNA, 50 bp, Homo sapiens
  chr16:66914767-66914817
  hyper
cccgcgggctcgccgaggacccttggctgcctaccggggcaccccactag

SEQ ID NO: 238610 - DNA, 50 bp, Homo sapiens
  chr16:66959367-66959417
  hyper
gtagtccggactcggactttagggtttccgccgccgctgctgctgcagcc

SEQ ID NO: 238611 - DNA, 180 bp, Homo sapiens
  chr16:66968462-66968642
  hyper
ctggagcagaaggcgctgagaagggaccacggcggcgctgggtcgtgcgagccagtagcgggctgaaacgtagaggccagaaccaggtctcagggggcactaaaggcggtcggaggtaatccccacaccgcttcctcctggaagtcaggctggccgggagctcccgtatccaggacggtt

SEQ ID NO: 238612 - DNA, 281 bp, Homo sapiens
  chr16:67189352-67189633
  hyper
cgcagctccagttgcagcggcaccgagtgctgggcgagcgcggccgccaggctcctctgcagcgcggcgcgcagcgccccctcgcggtaggcgcggaggaagcggccacagggctgccgcccgcagaatcgcagctgcacgatcagctgcgggtcgctgcggtggatcttcagcatctgcagcacgtccgggctcccgccgctctctgcggaggcgggcggtcaggcgccgggcggtccccaagctcggccgttctccaaacggccggaggaggggcgaag

SEQ ID NO: 238613 - DNA, 232 bp, Homo sapiens
  chr16:67193001-67193233
  hyper
gtttcgcatccgccgactggcagctcttcttacgtgttctttcacggaagcccctccttgggaagccccgcgccccacccaccaggagtcgtccctttttgggcggggctgaggcttccaggctgggtcctgagaaagtttggtggccggagactgtggggcgcttaggtaccgacctaacaacttctgcgcctgtttccagggacgagccacgcacggtgccccctgaaca

SEQ ID NO: 238614 - DNA, 420 bp, Homo sapiens
  chr16:67194621-67195041
  hyper
acaaaacaaaaacaaacaggattggcaacttcaaagaggacgcacactttccagtaacccatccccctctaaaggctgcgctccagggtgggtctgcggagttccagccgaacccaaattgctcagcgggagccagggctgctcaggggtcggaacttaaatcttgagcccctcaggccccagaaccgtcaggtcccagagacccaagttttttttcatccagtggggctgtcttaggaagcacccgggacatctccccggcgaggcggaggcggggaaggagcctcccctccaggggtggatccagctttgccccgcccacgcctcgcttcctgattggctcatggtccctgacaaagaaaagcctacattaacgctcccgccttattaaccctgtagtcactttctactaaccggcgg

SEQ ID NO: 238615 - DNA, 1774 bp, Homo sapiens
  chr16:67197290-67199064
  hyper
tgcacgcgcgtccccgctgcccaacgaagcctgggtcgcgttgcgccgccgccaccctgggctggcagtggagctggagctggagcccgcgctgcccgctgagagcgtgacgcgcgtcctgcagccagccgtccccgtggctgcgctgcgcctcaacctctcaggcgacaccgtaggcccagtgcgcttcgcagcacaccactacgccgcaaccctgtgcgcgctcgaggtgcgcgcagccgcttcggccgagctgaacgccgcgctggaggagctggcggcgcgctgcgcggccctgcgcgaggtgcattgtttctgcgtggtgagccactcggtgctggacgccttccgcgcgcactgcccgcgcctgcgcacctataccctcaagctcacgcgcgagccgcatccctggaggcctacgctcgtggcgtgattgggcgacttctctcccccgtccccgtggacgtaagcgctctgagagggaacggggggggtgtccaggcgcgccccgagtgctagtgccttcttttgggattgttgccccccgggtctttaccgagttgggaactgtgatggcatcgggaccagtcctgggcgccctgagaccactcgctgctctcaccctctgcagacgccccacccgctcggtcctggacacactgcccccctctcttgcctccacccctctgcggactctgcagctccgcggccccggcgcagggagagggagggcacgggcgcgggccgggcctcaagggtgagtgtgaaataaacaaatcctgcagtgtttctgcgtcctattaaaggcggggtcggatctgaaagggaaggacagggaacgcgcggggtaccggaggagccatcccggcagaggttgggtttcctcaagagcctctggacgacacagctgcggggggtcagggtcggggcactcacacccttggaatgactacgtcccggggttcggcgggagggggcgtgcttccctgcccccccttcctatctgcttgccctgcctggggcttcactgtgcctctggccattaccttctaggacttgcccagcccacaccaggtcgcgcaccggcgatttctcctgtagaacaaagaaggaaatagagggaccgagaggggtgggactcgaacccaagtctcccactcatctcaccccaccccaccccactccaccccaccccacccctccactccactccactccacacatcccatccagccagccttttctgcctgctggtgcctcggccgctgtccgagccccgccccgcgggcttgcacgtggcccccgcctgacccggcgccccggggcggagtagggcggagcgggcggcaaacgcagcactttccgcggctttgacgagcccgcagcggccgggcccgagcgcagagccgggccgagactgcaccatgcaggaagcgccagctgcgctgcccacggagccaggccccagccccgtgcctgccttcctcggcaagctatgggcgctggtgggggacccaggcacagaccacctgatccgctggagcccggtgagggccggggcccctcgattccccctgtggtcccggggtccctccacgtcagtgaacacccatgcccgcccaaccccctcctgagactgggccgtggatccccggatttggccattcagagaagttcaccttggagggggtgtgcgagaggggggtttcctctgcggccgaagaagggttaggagcctgccttctgaagacctagagtccgagggaccttcgag

SEQ ID NO: 238616 - DNA, 317 bp, Homo sapiens
  chr16:67199320-67199637
  hyper
agcatgagtgtgtgcgcgcgctggagcgcaggactggccgtgagcgggcaccgctcaccctcctggtctccgcccgcacggtgggcgggcggcgttcttggtagagcgggaccagtttcctcgtaagcgaccagagccgtttcgccaaggaagtgctgccccagtatttcaagcatagcaacatggcgagcttcgtgcgccaactcaacatgtgtgagtccctacggccgggcggggagcggggatgggggactcggtgccggggatggggcgacccacgcccccacgccccactccccagacggttttcggaaggt

SEQ ID NO: 238617 - DNA, 803 bp, Homo sapiens
  chr16:67204018-67204821
  hyper
ggctggcgcggggccgctgcaatctctgggaagcgggggcttctgggtcgcgctcagctctgcaatgcatgcgttctgtgatcctggtgagttggtatccttctctgaacttcctctgtgacaggcagagaagaggggtcgatgacaagatagatggaaagcacctggaaattggcaggccctgagtgggcgctggacgtgtggggccgcgggccgaactgccccctcctggcctcatctcctggtgcgccccgggtggggagggaaagctgactacatgcacgtccccagccagcgcgcggcctccgcggtgtggctcctagtgcccggggaagaaccctcaccctccctattcccagcagccctggccgccccgcccccgccgcagctgctgcacccacccccaccctgcccggccctttctgcaccgtcatctcctgccccgccgaggcttgacccgtgagtggggacgcccaaaacgggccagaccgggagccccactcccggctgtgggagggaagggaaaccgagattgggcagaatcagcgccccaccacccgctgcggcgctcgggggtcgggggggcggggtgggtaggactgtgggccccgccctgccgcaggactctcaagctctgggactgggtggagggaggtaaggggcggggggggaaaatccgtgcagtcgcacatgcgcaaaggctcttcactgtcccaagaccctggcttcctggccaaagagcccgcgcagcgaggtggggttgggggctgggacccagctccgtgccccgccacctggctctc

SEQ ID NO: 238618 - DNA, 152 bp, Homo sapiens
  chr16:67218041-67218193
  hyper
caggcggccagggcggcggagactcttgctcacggcctgggcgcggagacgtgggggcgtagcccgcggcctcgggaacgcagtctgcacagagggcagatgcctgcataggcggggcgcagcccgtgtaccaggacgggagccaggatact

SEQ ID NO: 238619 - DNA, 101 bp, Homo sapiens
  chr16:67225901-67226002
  hyper
cccaggtagttttcgtcttattcggaggctggacatttgctactggtccctgaagttttgcggctgcacccacagacagcaatagcgccacgttccctgga

SEQ ID NO: 238620 - DNA, 105 bp, Homo sapiens; identical to SEQ ID NO: 204248
  chr16:67261057-67261162
  hyper

SEQ ID NO: 238621 - DNA, 74 bp, Homo sapiens; identical to SEQ ID NO: 204250
  chr16:67280819-67280893
  hyper

SEQ ID NO: 238622 - DNA, 141 bp, Homo sapiens
  chr16:67281140-67281281
  hyper
accgcgggtatctgcgcgcccaagggcagcgccccgtccaggctgcaggtgggggcccggcgcggctccggaaagttggcacatgcgaaggggtcggtgtcttccaggtactgcaccctcacggtcaccactgataccggc

SEQ ID NO: 238623 - DNA, 76 bp, Homo sapiens
  chr16:67281521-67281597
  hyper
ggccgccgctagccactcacagggcccaatgggaatcccgttagttcactggctaggagggcgggaaaaaccgagc

SEQ ID NO: 238624 - DNA, 296 bp, Homo sapiens
  chr16:67427325-67427621
  hyper
cgcaggaatggaccgatggacgcgggagaccaggcggctccgcagctccgctccctgccggctcccgggtgggactgcagcccaggcggctccgccgtattatcccctgtttctcggtctccatagagacggcgagtcccacccccgaggctgtctcggcgggagagtgaccaaggtcacgccggccccgcccacgaggccccgccctccccgagactctccgggagccgcatcccgcccctcccccgcaactccgcggtcctcgcgacggcgagaccagcgctctgcagttcggg

SEQ ID NO: 238625 - DNA, 199 bp, Homo sapiens
  chr16:67433368-67433567
  hyper
gagggggcacagcgcgattggccggctcattccccgctctgcggcccggccggtcggggtggttgagtggggtctgtggagggaccaagcgccaggcctgagacagccccgagcgaggcgacgaggagcgcgcgcgccctctgcaggcgctgcggggtgggtcccctggaggaggcagcgctcccgaagagctggggga

SEQ ID NO: 238626 - DNA, 200 bp, Homo sapiens
  chr16:67464693-67464893
  hyper
gtgctcacctgagcgcggcggcttggcggccccgggcgtgtgggtgggggcgcggcggagagctgaggccgggcacccgggctggaccgacgggccctctcccaagcaccgcccgcagccaggcggctcctcgagcgcagcaactttgggactttgttccggctttttccaaatcgaatctggtcgagggggcggggcgg

SEQ ID NO: 238627 - DNA, 345 bp, Homo sapiens
  chr16:67465267-67465612
  hyper
gctgctggccgcgctcgactggctgtgccagcgcctgctgcccccgccggccgcactcgccgtgctggccgccgccggctggatcgcgttgtcccgcctggcgcgcccgcagcgcctgccggtggccactcgcgcggtgctcatcaccggtgagtgcgcgggtcgcggagcgcggggactccaggctcgagggcgggactggacactcaacaggactgactccccatgggcacagccaaggcgggctcctcagcgcaagagtgggagagttctccacccctgggtgcagggagcgagccaaatagggagcgccgggcacctccccaagcccgggttcactacctg

SEQ ID NO: 238628 - DNA, 530 bp, Homo sapiens
  chr16:67571279-67571809
  hyper
ggaaccccagtcaccggtcccgccccatccaggcgggctgagtcaggcggcaggaactgggcggggggcggcgccgggaggagccgaagccgagccagagccgctgggagcgagcccggagcccagccgggcggctcgaagtggccagggccggaaggtccgcggggggcgagcgcgggtcgggggccgtcccggacccaccatgaacaccaagaagagaggtaggacccagctcggggctgcgaaagctcagggactggccccaggggaagcaggccgggtttgggggccaggagtgtgtgtttcgccgaagcggggtgggggtctgccgaggagctctccccgccgatgccggggtggaggcgcacgtccgtgactcagtttccaggtgggagcctcaggaaagaggagggggcggggcccttctcggcatcgcgcccagctctgggaatccccctgcctggagggcgccgggacgcccgggccggtgggggctgggggcagcaggtcacgctggcaggcggggggcg

SEQ ID NO: 238629 - DNA, 92 bp, Homo sapiens
  chr16:67679034-67679126
  hyper
cgccggaggagcaggtggctgccgtgcgggtctgggccccaggcttcctgtgtgcgcgctcgtcctctgctgtttcccgccggagctcgttg

SEQ ID NO: 238630 - DNA, 164 bp, Homo sapiens
  chr16:67753296-67753460
  hyper
cgctgggaggggccgtagccgggagctgcgcatgctcgctttttgggggcggagcttaagcagcctggctaggaggctcaggttattcatttccggcggcggaggcggcagtttcctaagcttggcttctctccggtccgctgaccggcgtcagggaccaggtt

SEQ ID NO: 238631 - DNA, 84 bp, Homo sapiens
  chr16:67867774-67867858
  hyper
gggccctcctaaccgcccagccagctgcaggctccgccttcccgccgccacagttaatgtaactctcgcgatgctcccgcacag

SEQ ID NO: 238632 - DNA, 39 bp, Homo sapiens; identical to SEQ ID NO: 204258
  chr16:67876117-67876156
  hyper

SEQ ID NO: 238633 - DNA, 378 bp, Homo sapiens
  chr16:67881198-67881576
  hyper
ggccttagggccccgccccgtctagcctggcccggcctgcgcgagccccgcaagctctgcaggctggctagcgggcagaccccagccccacgtcctgctacccacctacgaaggatccggggatgggcagcgccacccggcccgctccagagtcagcatgggtaagggcgcccgcctgccgcagccggggcttgggcccctcaccctgttcccgaccatagcccggccggggtgtaggtgaacgccccctccttgtctgcccctcggaagtgtacgtttcttaccgcgccctttgtggagcccggactggagttctcgcagggagggcagggtcagggaatatgaggcgggaggggattccacgggagactttatccc

SEQ ID NO: 238634 - DNA, 92 bp, Homo sapiens
  chr16:67907296-67907388
  hyper
cgcgcgtctgaaccgccattggggcccacagctcccttaggactagctctggatcctcccggcgggtaagggtggacggggattgactgtgc

SEQ ID NO: 238635 - DNA, 66 bp, Homo sapiens; identical to SEQ ID NO: 204259
  chr16:67969396-67969462
  hyper

SEQ ID NO: 238636 - DNA, 109 bp, Homo sapiens; identical to SEQ ID NO: 204260
  chr16:67969492-67969601
  hyper

SEQ ID NO: 238637 - DNA, 35 bp, Homo sapiens
  chr16:67970754-67970789
  hyper
tacttcctgctttcgctttcgcctttacccttcct

SEQ ID NO: 238638 - DNA, 76 bp, Homo sapiens
  chr16:68057151-68057227
  hyper
cgccgcgacctcgcgtacggtggctggcgaggctcagtacggtgtgtggagctggagcaccgtgaggaagaagcga

SEQ ID NO: 238639 - DNA, 91 bp, Homo sapiens
  chr16:68118979-68119070
  hyper
gccggtggtggtcccctatccaattagagaggctaacggccttctctcgtctggtttagaaggaatcgccgggggaatacaggccaaacta

SEQ ID NO: 238640 - DNA, 126 bp, Homo sapiens
  chr16:68271378-68271504
  hyper
actcgcgcccggacacggcgacagggagagcatgggaagtgcttccttcgcccggcgggttcgagcgagtagcactttactttccctacaggtggaggcgggccttggtgcgcggctgtccatctc

SEQ ID NO: 238641 - DNA, 566 bp, Homo sapiens
  chr16:68344575-68345141
  hyper
tcgggtttcgtaccggctgcacccgaagatgccctccacaccagctgcaccacgcccaatacctgggagcacacagtggccaccaagtggaagacattattctccgccgctctctccaaaccctccgacgtcttctgtgccgctgactcgaccgcgtcgctccggaggcgtttacaagcgagcacaagagcctccgccggctccgcactgcgcttccgcttcacccggagtacagcggtcctggcggcctccatagtggctgccgctgagcactgtgggagctcgcggggtgtgatgggatagctttccagttctgctttaggacccgccccccagcacgctcctcgacgctgcgaggtcccgccccgcgtgctggccgcggtaaaagtggtagcagcggaggcgagcggagggtttcccgcggcgggtgaggcgctgggtatgctgggaaggtggggtcgctttggggttctgtgtgcagcgagcatggtgtccttggcaccagggtttcggcagaggagcctagcgtgggcctacttggactcctccgcgtggggcagctcggg

SEQ ID NO: 238642 - DNA, 108 bp, Homo sapiens
  chr16:68481954-68482062
  hyper
tcgccaggcacagcgggagggagggtccaagcctcctcgctctcccaggagagatggggggtgggggtgacccccagccctcgcccctcatacccaagagccttctcc

SEQ ID NO: 238643 - DNA, 408 bp, Homo sapiens
  chr16:68504000-68504408
  hyper
taaaactttccaaaatgctgcgttctgtgcagttagtggtagcgtttgccagaaaaaaataatagattgtaaaggaagcaacacggaacaaccacgtttttgttattcgaaatgcagctacacgtgtttacagtccttaaccatttcatctgacagcctggggagacagacttctaatttgtgttttgataaactgagagtgacagagcggttgttggccctgcttggaggtggagtgatggtgtggtcagaagggaagccggagggaagttacactcgtggggtgtgtgttatgtgacctttgtttaatacacgttcttatttgatcttcacaaccatgccacttggcaggtggggaaactgaggtgcagggcagggtagtcatttggccatcgccacaaaggggag

SEQ ID NO: 238644 - DNA, 218 bp, Homo sapiens
  chr16:68573158-68573376
  hyper
gggttgcaggagcgaggctccgagtgcgcaggcgcacttccagttctgccccaccgctgcggccattgtccgaccccggtgcggctgaggcccctttgggcagcccctccgcagatcagaattggagataaccgaggcttcggcgggggcgggaggagctgcccgaggctctgggtgggccggaggtcgcgaaatccggagccccccagaggcggtga

SEQ ID NO: 238645 - DNA, 522 bp, Homo sapiens
  chr16:68676403-68676925
  hyper
tgaatgaatgagtgaatgaccgacaaggggagctaaggggaaggcagcggtgcggtccgcgtcgcaggcagaagagctgactctccaatctccgctcctctctccgcccccgtccggaatgctgagtgcccgagaaggaggcggaaatgagcgcgctcaacagcccaccagccgggtgtttacttaattagggcctgcatcccgaggctcgtttgtgtttaaccgtccgcctaatggcttcgtctggctccgggcgggcgcgggggaacctgcgaggcgagcgtaggcctggccaccctgtcccgccgggggcccactccattgcgccgcgcgggtgcgcgtagacctgacctcccctcgggcataaaaagcgccctgcgggagatccaggccgggagggcgcggagctcagcgagcagccccaggctttcccaaccgcgtggtccacccccagcctcagtcccagccccagctgctgggctcacccgccggctaagggaatgctcccgagataccagatgc

SEQ ID NO: 238646 - DNA, 1598 bp, Homo sapiens
  chr16:68678667-68680265
  hyper
gttgtatccaattcagaaacgcggtccttcgggacctgctagttttataccccggaggatcctccccggcgggctggcacgggaggtggagaaagaggcttgggcggccccgctgtagccgcgtgtgggaggacgcacgggcctgcttcaaagctttgggataacagcgcctccgggggataatgaatgcggagcctccgttttcagtcgacttcagatgtgtctccacttttttccgctgtagccgcaaggcaaggaaacatttctcttcccgtactgaggaggctgaggagtgcactgggtgttcttttctcctctaacccagaactgcgagacagaggctgagtccctgtaaagaacagctccagaaaagccaggagagcgcaggagggcatccgggaggccaggaggggttcgctggggcctcaaccgcacccacatcggtcccacctgcgagggggcgggacctcgtggcgctggaccaatcagcacccacctgcgctcacctggcctcctcccgctggctcccgggggctgcggtgctcaaaggggcaagagctgagcggaacaccggcccgccgtcgcggcagctgcttcacccctctctctgcagccatggggctccctcgtggacctctcgcgtctctcctccttctccaggtactccacagcctcgccgtggccccgaccgggaccgctccctggggggcgggcggggtccgcatggggcagtggcgtcggggagagcgcggggctgcgctccctggggccaagggagtcccggaaggcccgtgaggaccctgcggtgtggggagtgcagggccgggcacgcctggacccagcctccttcactctctgccctcgggcgcaggtttgctggctgcagtgcgcggcctccgagccgtgccgggcggtcttcagggaggctgaagtgaccttggaggcgggaggcgcggagcaggagcccggccaggcgctggggaaaggtaagatcctcagggtggaaccgcagggtaggggccgcacgtgaccattttggtgtggaccgcgcgaggggtgttcgggccggggcaagggactcctggcgccacctcagttcccggggaggcgcagaacgcgcctcgggggctgggattgggggtggtggctgacggagaaggctgggcagcagagcgcctatgacatccagccccttgtccggtagccactgcttaccttgaccccctcctccgagatgccggatggctgagcccctcacccagtctcgacgtgggaagttctcccccgctggccccagcagaggaatgcgccggccacattcttcccccaacccgcgcgcaggtgtggggatgagccgtgccccgggcagcccccttcgcccctctcgggccccctttgtgaaccgtgctttgtgtctccgacagacagaccgggtctgtttcttttctccgagcttccctaccccgccccccttcttcctcggcagctggaatgcactcttaaccctgctcttcccggagggcctgcgcccttgtagcctgcctggaaactgggccctggcacacctgggctggggccatcacgtacgggaaccaccc

SEQ ID NO: 238647 - DNA, 1018 bp, Homo sapiens
  chr16:68771020-68772038
  hyper
ggctagagggtcaccgcgtctatgcgaggccgggtgggcgggccgtcagctccgccctggggaggggtccgcgctgctgattggctgtggccggcaggtgaaccctcagccaatcagcggtacggggggcggtgcctccggggctcacctggctgcagccacgcaccccctctcagtggcgtcggaactgcaaagcacctgtgagcttgcggaagtcagttcagactccagcccgctccagcccggcccgacccgaccgcacccggcgcctgccctcgctcggcgtccccggccagccatgggcccttggagccgcagcctctcggcgctgctgctgctgctgcaggtaccccggatcccctgacttgcgagggacgcattcgggccgcaagctccgcgccccagccctgcgccccttcctctcccgtcgtcaccgcttcccttcttccaagaaagttcgggtcctgaggagcggagcggcctggaagcctcgcgcgctccggaccccccagtgatgggagtggggggtgggtggtgaggggcgagcgcggctttcctgccccctccagcgcagaccgaggcgggggcgtctggccgcggagtccgcggggtgggctcgcgcgggcggtgggggcgtgaagcggggtgtagggggtggggtgtggagaaggggtgccctggtgcaagtcgagggggagccaggagtcgtggggacgatcttcgagggaaggagaggggcatccgtagaaataaaggcacctgccatgccaagaaaggtcgtaaataggagtgagggtcccggggataagaaagtgaggtcggaggaggtgggagcgcccctcgctctgaggagtggtgcattcccggtctaaggaaagtggggtactggagaataaagacatctccaataaaatgagaaaggagactgaaagggaacggtgggctaggtcttgagggggtgactcggcggccccctcccgggagttcctgggggctcggcggccgtaggtttcggggt

SEQ ID NO: 238648 - DNA, 348 bp, Homo sapiens
  chr16:69139467-69139815
  hyper
ttaaagtcatcagcgccccactgcggaattcaaagctaagctgtcacaattgttaacaccttctttgaccagcctttttacatttgacaattctcttcagcgcctctttcctgccagcaggaaggttttgctgccttggctttcgggagccccctagacagcgaactgccccttcgcgtgcagaagtcggggaagagtgctctcagctcgccttccttgcagggtgagtaggttttgcgggttagagagcggggcgtgggggcggggagggagagtaacaattttggaagtccctgcgtggtatctggaaagttaacgacgcttcaggttctaggttgagcccaatga

SEQ ID NO: 238649 - DNA, 70 bp, Homo sapiens
  chr16:69140475-69140545
  hyper
ctcgcctccctcctccccggcggctcctgttttgtgaatgaattaggaggcggacgccggtgcggggctc

SEQ ID NO: 238650 - DNA, 86 bp, Homo sapiens
  chr16:69166893-69166979
  hyper
ggcgtcggggggacggggtagggtaagtgacagacgtcagaccaggcagccagattaagtcaaaccctgtcgtttcttcctcaaga

SEQ ID NO: 238651 - DNA, 205 bp, Homo sapiens
  chr16:69373484-69373689
  hyper
ggaccacaaggggcgctgactccgaacttaggacaggaagaaacaggcacatttccggtctctatgctttctcatccggccggcttgctttcccctgcggtcgtccagactattgggcgctagcgagacgaactattggtacggggctagagaggaaggctttgggattgccggggagcagcgagcgaccgacttccgtttccag

SEQ ID NO: 238652 - DNA, 150 bp, Homo sapiens
  chr16:69419948-69420098
  hyper
acgccgtagttcccgatgtgccggccgcaatgcctcctggggcttgaagtccacaccgcccaggccggtgaacccggcgggttttgcagtcaacttcgctccgaatttacagaaaacagctactatgctagggacgcggaacagtgtatt

SEQ ID NO: 238653 - DNA, 255 bp, Homo sapiens
  chr16:69458315-69458570
  hyper
ggagggggctgaacgaccctaattggttagttggacctcgaaccagactttcatctggaggatcgggcgaggagtgggcgggatttcgaactgagccactcccttcattggtgaaaagaaaacgaaccaggaactattcggaagtgtgattggctgttgctaggaaccgtctcaaggccttatgggccctggttacggaagccgaggaaggctgagcgcgggctctcaaggaaagtagtcgcggaatctcagtta

SEQ ID NO: 238654 - DNA, 117 bp, Homo sapiens
  chr16:69760286-69760403
  hyper
cagtgctcgagagacgaccgccaagcaccccgccctttgcagcactcaccgaccatggctctggtgcagtccggggcgctgattggctgggctcgtggttgccggggcgaccctggc

SEQ ID NO: 238655 - DNA, 94 bp, Homo sapiens
  chr16:70333388-70333482
  hyper
ccctgagctggctttgtttacgcagccgcctccgcgttacgtaagcgcaggtgagtgctcctatcggtaaagcgctcagctgcctgtctgtctt

SEQ ID NO: 238656 - DNA, 64 bp, Homo sapiens
  chr16:70380544-70380608
  hyper
aaaataaaataaacgttggcttatttcagtgtgaagtaaggcaataaacggagggctaacagtt

SEQ ID NO: 238657 - DNA, 457 bp, Homo sapiens
  chr16:70415351-70415808
  hyper
ctggacacagcgccggaagttttccttgagtcacatgattggctgggagaaacagaagctccgcccgaccgcagcgcagattggtgccaggcccggccggtcccccagtctcgtgattggcggggcacagcagacgcccctgggctgcagcatgattggtcgcgggttgctggtcctgggtcccgggccggagccccggtgcccgatagatgggccggaagggtcgcggcgaggcccggctcagttgccccggtagacttcgatcttgctggccttggccagcatgtcgatgatgtgggcctcgaagtccgcgtcgtgcacgccagtcttccggaactcgcccgcgtaccggttgttctcccagtagtggtgccagttgccccggctgtcggccccgaacccgtacacgttcacctgcggggaagcgcagcggagcgtcaccccaggcggggacctg

SEQ ID NO: 238658 - DNA, 271 bp, Homo sapiens
  chr16:70472227-70472498
  hyper
aggagagaggagagacgaggttcagaccagcctccacgggactggcgctttggccaagtttctggcttcagccgtgcctcagtttccccaaagtaggaaggtcgagccgtgagaactgggccactgaggatggttagggggcagtgccaggtaggggaaagatcacaggggagagaggaaagaggagctgatggggcagacaggctctggccaagagtggggccggggtctcccaggtggagcagaggccgggagacccagggttagcggt

SEQ ID NO: 238659 - DNA, 361 bp, Homo sapiens
  chr16:70473302-70473663
  hyper
tcagggggtccgccgtgcaggaggggagacggagggggatgggaagtcttcattctcagaaggccgggctccagcggctggagcagacggccccgagccgggttggatacgtgggttcctagggaggtgcacactagccgaggacgcctctcagatgctgctgtggccagctgctgacgagcccggccggagggcactgttcccactcgcgctctcaaagagccgcgacctgaggccagcttggcttcacgcccgggctctgaaagcccgagctgcggtggggccgctgcgccctggcctgaggggagagagaccccatcagcggtgcgagcgggggtttggcctcgctggactttgtgtt

SEQ ID NO: 238660 - DNA, 1157 bp, Homo sapiens
  chr16:70719172-70720329
  hyper
agttaacggttctccgctttattattttttcctgctttggcggtgacagcattgtctgggctccggggccgtgggggaacatggtggtggaagggggcggaggccggtaagaccccggactcgttaaagggccctagagtcggtcctggatccaaaccccattcatggtttggcggtctggggcgcagggagcctgcgtgtgcacaggctcgggtcaggaccccacggggccaccgcgggcaccgcacggacaccccgacacacgagcacccacacccccagacgggcacccggagacacgggcgcccagcagacgcaggcaggacgcgctcagacaaggacacacagacaccgcggcgcgcggccacacgaggctcggccacccgccgccacgcgtccccggggggtcccgcacccgtcgccgcgcgcccggccccgccgcgccccggttaccttcatgtcgttgactatggcctggaagagcccgcccagggcgccgcactccttctccgccgtctccatgctctggctgggccgggccgcggcggcggctaggcgcacggagcgcggggagcagcgcaagggagggggccaggccgcgcgggcgctcgctccgaggccgggccgggcctcccgcctccaggctgcgctcagcggccggccgcgccgcgctccggggtcgcgggcctccggcgggcggcgcgggccatgtcgcagcggggctggcgggcggcgcggggggcgcggcgcgggcagctcgcggcgcagcctcggcgcggggactgacggcggcggtaatccgagccgccgaggatcgggcgtcacgtgggcgcggcggaggggggaccgcgaggagggagggaaggagggcgggccgcgcgggagggggctgtgggaacggccgcgcgggcgcaggcccattcacggccagaaaccagggctttgaaatccgagcccgggcgctgccagactggtccggcgagcggggccgacgggcgcgggcgccaccgagggtcggggggcggcgctgggcggggcccgccctgcccacgcaggagcgggactggcggttgggcctcggcccccgggcaggggctccacgatatcttctggcctttggtctggggcggggggcttctcgcgcttctaaagacagg

SEQ ID NO: 238661 - DNA, 119 bp, Homo sapiens
  chr16:70834931-70835050
  hyper
tgccacgctccgccgcctcgccctggaacccgggcccggaccccgctccagcacacctgaccctggccgcttaacaactcccgcccggcactagcgggactcacgagacagcggccatg

SEQ ID NO: 238662 - DNA, 33 bp, Homo sapiens
  chr16:70835271-70835304
  hyper
gggcttctgtagacgttcgtaagaccgaatggg

SEQ ID NO: 238663 - DNA, 121 bp, Homo sapiens
  chr16:71264524-71264645
  hyper
caactcacagaccccgccgccgctgaggggctccatacccagcttgaagccgcccgcactctccatgcgccgcccgagctgttgccgtccgttgccacggtaaccacggagccgcacagcc

SEQ ID NO: 238664 - DNA, 130 bp, Homo sapiens; identical to SEQ ID NO: 204278
  chr16:71323303-71323433
  hyper

SEQ ID NO: 238665 - DNA, 69 bp, Homo sapiens
  chr16:71460432-71460501
  hyper
atctgaaggtcctgagttcgagcctcagagagggcagctgttttgttgtgctacgaatgcagcaaatgt

SEQ ID NO: 238666 - DNA, 31 bp, Homo sapiens
  chr16:71496369-71496400
  hyper
gaccagtggatggcgcgctgtcacacccaat

SEQ ID NO: 238667 - DNA, 929 bp, Homo sapiens; identical to SEQ ID NO: 204279
  chr16:71659878-71660807
  hyper

SEQ ID NO: 238668 - DNA, 141 bp, Homo sapiens
  chr16:71841910-71842051
  hyper
acattaccctgagcgagtggttcgatggatctcctacaccgagtcctaaccgggaaacacaatcaaccgaaccgtcccgactctttcaggcaatcaggaagaccgggagaattattagacgctgacgtccgcagggccagg

SEQ ID NO: 238669 - DNA, 141 bp, Homo sapiens
  chr16:71842652-71842793
  hyper
gagtgacactcaccggcccgaaacctcgaatgaaaccagcagctccgggggcggcggcagcagtggcagcaggaaccgaacatccaaaatggcggctccctcggcctcaccaccgctaccgcaggcggagggatcctgagg

SEQ ID NO: 238670 - DNA, 187 bp, Homo sapiens
  chr16:71880267-71880454
  hyper
aacaaggaagcgtcgcctgcagggcctcgcccctgcccccttggtgaagggtggaccccctactctctaaacgcagaattcccaatttcgagccctacccttgttggatcaaggattgcgggaccactgggagccataaccgtagtctctgacaagcttctccctttctgtcgggcgcacctctcgc

SEQ ID NO: 238671 - DNA, 249 bp, Homo sapiens
  chr16:72127405-72127654
  hyper
gcctagcaaccctcgtggccccgctagcgggaaggaaaccgaacagaaaacgcacaagcgcagaaaagaaactcctggccgtcggtcggcccccgctcaacagcccaataaacggaagagcttctagtcaccgcccaccttgctcggctctgaccggaagctaggcgtcacctccgcccgtattaaagatggtcgacctttttcccctccttttcctgcccccagactagaggcgggatgtagtctctt

SEQ ID NO: 238672 - DNA, 208 bp, Homo sapiens
  chr16:72127870-72128078
  hyper
gagcctgtctgagcgaggggtggcagcgccggcgccccagaatccgggacagaagggtcccaagagtcgcgcttggtgaggtgagagtcccttcttccttcctggcctgcccttctgtaatcatggcggctctaggcggcggatattggtcccctgctcaggtccgggccccagtttggggagttcctctgtcgtccctgtcacccac

SEQ ID NO: 238673 - DNA, 59 bp, Homo sapiens
  chr16:72699159-72699218
  hyper
ctgtgtcctttattcttctttctcacccaacgatttacctgaacggttataaagtgcac

SEQ ID NO: 238674 - DNA, 691 bp, Homo sapiens
  chr16:73099948-73100639
  hyper
gggctctggctagccgggctacccgtggggtggcctagggcccagcctgtgtcaaggctgcgggcagggcactggtcccctgtggactcggggcgcgccctctcagccgcctccctgtttaattccagagctcagcgggctgcagggacattcgacgccagtttcctcaggcccgggcgtgagacgcgcccttctcgtgtctgctcttccgtccctctgcgctggatgttgtatagcgcaggccccttccctccccgcctctcgttcccaaaaccttatcattgagaattcgacagttgccccgagatgctgatcccagttcacggagccagcgtgcgcgtccctaatgcccggcacacccatctccatttcgggacccttttttttcctgcgggctctggactcccgggaggaagcctcgggccctccggctccccggagacaccggctgaggcgcttaggccagtgcagagtcgccgcactgggacccaggcgcccctcacaggtgcacgtagggcatggcccaacggcccctcggatgggcggggaaacaggcccgggcggagcaattcgatcaccccattatgcccctgcggatgcccagaaaagccacgaggcccgggggaccgccccagcagtggtctggaaaggagagggcgcggcgaggggcgcacctcgcgcccagggccca

SEQ ID NO: 238675 - DNA, 37 bp, Homo sapiens; identical to SEQ ID NO: 204284
  chr16:74352126-74352163
  hyper

SEQ ID NO: 238676 - DNA, 161 bp, Homo sapiens
  chr16:74640802-74640963
  hyper
gcagctgctgacccgccgggccgccgcctccggcctgccctacgaaggacacaaagttggccccgggaccctggccctggctgtggacgccctggccggggagtttctcggccccggccgcgaatagcagcagcagatgcagcgccgccgacaagcggaac

SEQ ID NO: 238677 - DNA, 166 bp, Homo sapiens; identical to SEQ ID NO: 204286
  chr16:74700794-74700960
  hyper

SEQ ID NO: 238678 - DNA, 231 bp, Homo sapiens
  chr16:74847108-74847339
  hyper
ctgggcctgggcctgggcctcgccaaggctgcggagcgcagcgccgcgcttcaccactaggtggtggacgtacgctcccagtatgagcggcgctgaccccgggagcagcatggccctttgcagcccgagctgctggaacaggctgggacacgcctgccctctcgcggccccctgcccgaggggccctgcacacccggagccgggcttggcgaagtcagtctcagaccccct

SEQ ID NO: 238679 - DNA, 45 bp, Homo sapiens; identical to SEQ ID NO: 204288
  chr16:75032744-75032789
  hyper

SEQ ID NO: 238680 - DNA, 90 bp, Homo sapiens
  chr16:75267942-75268032
  hyper
gtgcgcgcacacacacgcacacgtggacgcacacacacactagcacacgtggacacacacacacacacaagcacacgtgaacacacacac

SEQ ID NO: 238681 - DNA, 200 bp, Homo sapiens
  chr16:75284495-75284695
  hyper
caacatcttccaggccgtaagcccctcaccccgcacccctaggcaaatctccgctttcccaactccctcacctcggtccagcgatcagcctctcggaccctcgagagggagctccgaccctgctctagctcttgcgggtcccccaaccatggactccaaagccttcatgtccacactgcagaacccggccctggccccct

SEQ ID NO: 238682 - DNA, 41 bp, Homo sapiens; identical to SEQ ID NO: 204290
  chr16:75285013-75285054
  hyper

SEQ ID NO: 238683 - DNA, 461 bp, Homo sapiens
  chr16:75285279-75285740
  hyper
tccggcaggaaatgccgctcgcttaaccccttccagcccgctgccgcctccaagcccgtacgcggcccggccccacctggcgccctcaccaggtggttcatggtgtccggcgggcctggggccccggctctcgcgggggcgcacaccgagctgcccgggccgcgtgccctcggggctccgagcgcgccgcagccgccccggtgccgccgcgcagctgccgcctcggccacccagagccggtccagccgctctccgcctgccgccacggcccagccggcccagcccgatcccagcatgcccggccgcgcgcgcccattggccgccgccgctctccatgcaaataagccgcctgtcgggggcgcgggcgcgcagacagaagcccgcccagtaggggccgccccccgccccgccccccacctccaaccccgaggctccaggcccctgcccgaggccaggcttcc

SEQ ID NO: 238684 - DNA, 244 bp, Homo sapiens
  chr16:75299145-75299389
  hyper
cccatccagccaagccgtcctgggggaggggtggctccggcgactggcagagaccgcgccccaacctggccaccccgggggagtcccgggagcgccgcagggcagcaatccgagggaggtcttgcgggacagcacaggcctcccaccccctcatccggcccagcagtcccggaggggagtcgcgggagcggcagagacccctccccgctaggcctagccgtcctggtgcggggtcctggcgggc

SEQ ID NO: 238685 - DNA, 146 bp, Homo sapiens
  chr16:75299912-75300058
  hyper
ccgcgccgccccccccaccgtctccgcggccagggacgcgttaaaggtgaggaccccggacctaggcctttttctgtcggcccaacgcggcggggaggcgcggtctcctccgctcctcgccgatccctcgcgggccacctccagtc

SEQ ID NO: 238686 - DNA, 235 bp, Homo sapiens
  chr16:75528799-75529034
  hyper
tggggacatcccccgcggagaatgaagaaccaacgtaccccaaagcttggcggctctgcccgagctgcagcggcacggtgggggacgcctctctccctggactcagcaaaggctcccaaacgtcgtctcttccaaattccaccgcacagccagctctttctcttcactgggagggtccgcaggggctgacttgctccttaaggtcccaagactattaagcgacacccggtgaggc

SEQ ID NO: 238687 - DNA, 84 bp, Homo sapiens; identical to SEQ ID NO: 204294
  chr16:75600000-75600084
  hyper

SEQ ID NO: 238688 - DNA, 68 bp, Homo sapiens; identical to SEQ ID NO: 204295
  chr16:75681563-75681631
  hyper

SEQ ID NO: 238689 - DNA, 245 bp, Homo sapiens
  chr16:76311036-76311281
  hyper
cagaaggctccaccgccttgtcccttcccccactcacacctccagctgggagaaaagggttaaggattattggaaaatagaagagaagggagggagccccaaggaggcccacgaacgggaggccgcgcctctgggtgcagcggagctcgagcgctgttgtgtgtttggaaggaaggatgctgctgccaatttgtgggaccgctgctgcgaggagtgggcgtggcctcggcggtgtggatgcttgt

SEQ ID NO: 238690 - DNA, 122 bp, Homo sapiens
  chr16:77224184-77224306
  hyper
ggtccggaagcagcgtcggggcgggaattcgaaccctgggttcccacactggcccgtggcagggcccccaagccttttcccaaactgatcacagaaagtgacgacccgttcgcccggcggac

SEQ ID NO: 238691 - DNA, 652 bp, Homo sapiens
  chr16:77245984-77246636
  hyper
agaggacggccaaacggggaggcctcctctttgtcctcgcagatgctggagcagcgactggcccgggagatccgtgccctggagagaagcaaggagcagctgctctcggagagtgagcctcccgcgccaggtgggcggggggagggggatgtgcccgggcctcggccctgcccctgacgcccgcccaccgacagggaggctggtgcgcgccaagctgcgggaggtggagcggcggctgcactcgccgcctgaggtcgagggcgccatggcggtgaatgacgggtgagaggggaagggaggagtgggcgaggagggcaggggcagggcggaggggaacccgcccaggtcccccgctccgcccccgactgccgcttccccggcctgtgcctccctcggcgtcgtcgggtctccgcgtctcggtggcttcctcctcgtcccctggactctcgctctcttcctcctgtctcctcggccccttctccgcaggctgaaggcggagctggagatattcggggagcaggtccggagcgcccccgaggtcggggccggcgagggagaggtagggagcccgaggaagggaggcggggcgggcagggaccgagtcaggagagagcgggcgggggtcctgggagcggcccccgagagtggggtc

SEQ ID NO: 238692 - DNA, 744 bp, Homo sapiens; identical to SEQ ID NO: 204299
  chr16:77756211-77756955
  hyper

SEQ ID NO: 238693 - DNA, 398 bp, Homo sapiens
  chr16:77822929-77823327
  hyper
gcgccctcacccgggtctcagagcctccccgggccaaagctggggaggatgcagaggggcggcctccccaagccagatctaggggtgacgggaggagaatgtgagctcctgggcgcggggagaatgctggcgcccaggcaccccgggtctggaagattgcgctacgggagttctccgtctgagaggacaactcagctttcgcacgggagggttgatgcttaacagaattaaaaatatatgtattaagaaccgcaagcccactgtgtgccagccgccgttggtagttttacacgtgcgatcttatttaatacttcctgggacctaatgagtcaggtgccatcatgatccgtttacaggtaagaaagccgccgctcagcgagaatgagtgatttgcccaa

SEQ ID NO: 238694 - DNA, 358 bp, Homo sapiens
  chr16:78079828-78080186
  hyper
caggccagggaaggacaggccgggcaatgggcgcggagacgaaggggccggacagcggcgaggcgctggctccggtcgcggcacccggctgctgagggcagtgctgctgcttgggacgttccaggcgaccaagtaccctcggcggccctggcagggcggtgcctggggtgggcgctgggcctccaggcctgcagccacgcttggcgctgtccgctagggccaggtgctgaagtgttggccgcgagcggagctgctgcagcgctggcttccccgggccgctgcgggtggacttggacaacataaagggctgattgagcggggccactttttcgcccgcgtaaagtgtcctccagcagca

SEQ ID NO: 238695 - DNA, 108 bp, Homo sapiens
  chr16:78804565-78804673
  hyper
tccccgaagtgaaccgcccacagggagatgcccctatgggagcttcgcaccagaacccgtctgcgccagtgtccctgcagcgccctctactggcgaagctggacatgg

SEQ ID NO: 238696 - DNA, 288 bp, Homo sapiens
  chr16:79623477-79623765
  hyper
agggttcctggggccgcgatcgggtggagtgagggggtctcaaggtgaagggcggagccttgcgggaccgagtcttgctccctccctccaggcgcccgcccacccaggagagcggcgcaccggggagttttgatatcccccggagctcgctcgcgctagggcagtccttttgactttttaaaccaaatttgaacacaatccgagctcctgcaggggtgcgggagcttgggtgggcgcggggccctggggcgcgctgggtgtggccgtcattagcgcccccgggcgccg

SEQ ID NO: 238697 - DNA, 3176 bp, Homo sapiens
  chr16:79632611-79635787
  hyper
cccacacccgagccggacccccgcggagcacttatcagggtggctagctggaatcgcgtgtcagactcacatgaaaaactcgggagaggacgggttgtcgctgctcgagccgttttctcggaagccgctgctcaccaacttctcgtatttctccttgtacgcgtccctctcgcgcaccagcctggagatctcctgcttgaggtggtcgacttgctgcagcagctggttcttctccgactccaggacgtgtctctgctgcaccctcttgaagcggcaggactgggcatagccgcggtttttcagggtccgcctcttctgcttcagccggatcacctcctccttgctgaccccgcgcagctgccggttcagctcgcgcacagacatggtcaccagctgctcgtcggagaagcggtcgtcgaagtgcaggccgccggcggcgtggtgcgggtgcagggcgccccccgcccccgccgcgcccccgccgcctccgccgccgccgccgccgccgccgcccccagcgctggccgggccaccgccgcccgcgcccccagcgccaccggccgaggcggccgcgctgcccgcggcgccgggcgcgccggccgtcgggtggtggtggtggccggcggcgtggtggtggtggtggtggtagtgcgggcccgcgccgctctgcgcggcggccgcggcgatcacggcggacaccacggcggcggcggggcccatctcctcgccgctgccgcccaaggaggcgccggcaccggccccggccgccgcggccagctgctgcgccccgcgcgcgtagccatcgaagccgccctggagctggtggctgttgctgatgagcgcctcgaccgcgtcctcggggctgaagcccagcgcctcggggttcagctgctgcgggtagccggtcatccagtagtagtcttccaggtgcgccttctgctcgctgcccgagcccgggctgggcgccgagaagctgggggaagggggcaccgagctgcacggcgtgctcatgggggtggaggacagcgagcccccggcgatgagacggccgcactggctgatgatgcggtcggtctccaccggttcctttttcacttcaaacttcatcagatcgaagtcattaacatattccatggccaggggactggtgggcaggtcggagttgctcattgccagttctgatgccattctcctgccgccgccgccgccgccgccgccgctccgccagatgggctgcaggagaggggccagcgggctgtgctgggtggccagcgggtgagccagcttgccgggctggggcgcttctagcttgcgcggcggtggctggcccgaaacctccgagcgcgctcacacacacacccccccgccctgcccgcgccccccgcgcccgccctccctcccccctgctcacgccaatgtgctccctcgctcgccccggcccctccttgctcgctcgcctccttgcgcgccgagccggcggcttcaggctcgggaagatcctccgcgagctgcggtggcggcggtggtggctgcggcggcgaagctggaggagcccggcccggtgcgcggcgtcccccgctcgccgctccgctgcgcgctttgcataaggaagggctcgcctcgccggcccgggctgcaggcagggcgcgcgcggcgtccgctcggggctggaggcgcggcgggcgtctgtccgggcggcgcgggccttggcacgggggagttaacacttcatgcttctcgcctcctcttctgcttggctctctttattattttttttctttcctctctctccctcgcgcgctctctacctctgtgcaaagtgcaaggcagaggtgcagcccgactggaggagagggaggggggagtttagttctttcttgcctttttttaaaaaagcaaaatagcgaagtcctggggaaagacgaggcagagagcaaaggggggagggggaggccaagccgacaagcagcccgagctacagctagaagatgaaaaaagattttaaagcctctgatccagcaagaagagtttaaagcaattgctgagttttatagcactcgtgacgtcaggtccaaatgagaaattgactggcactccgggccaatgggaggcggcgagagcggccgcgattagcataatagtatagaaacaaggaaacttttcggagctgtcaatcagggcccaatcagctgactgtcagctgggacgggctggcttaacccttcctgcgccgctgcctacccgggagggaacgaggcccggcgcaaagtttggtgtaagaggggaaggagtttttccagaggggcttcggcaatccgggcggacctgggagggcggtttgcttttctttggagcgcgagacaggcctcccatccggagccccagctcgctgggggctcactcggctgggattggcctgattcccctcccctgcctgccctccacccccaggattgtgaattcgcctcccagcttttcctcctcgcaccaactctggtacccaggtgtctgccggggaccttccttccctgagcctggccgtgcccggcgctcaaacttggccccaactctttgtccgtctctcgggcgcccgtgcggggaagggaccgggaagggagggatgcagtggggtgtccggatcggggctgcgggctgggcgccgcccggccatgcgcctgcccagaaggctgggcatccgtggagagggaaagcccattttatccctctctttacaacgaggtaaaataagttgtttagaggccattcttcacggagaccggctgcccgctggcgtcgcgtgcccttggacagagcgagcgcctatgcgagataactccggggaagctcaaagtcaggtcagccgggctcagccttccggctcctgactggccggagtttggcctttgagactcatattgcgcgctcgctctctctctctcttacacacacacacacaaacacacacacactcacactcacccgtccccttacgaaatctgacctctgtttatcagggtcaggcgcgccctttgcacttttacgtttcctttaattatttcggacttgatcgtggcagggagcaagggggaaaaacaataccccagccctcaccagctaccctcgaagggttaaattttaaaccgcggtttctggaactagtccggaaacgcagagtg

SEQ ID NO: 238698 - DNA, 104 bp, Homo sapiens
  chr16:79804151-79804255
  hyper
gctcagcgtgtgtgcgtgtgtgcgtgtgttcaagggctgggggctcaattgtgagaggtggcccaggggccggttagagactgggaaggacgacagaggcaaga

SEQ ID NO: 238699 - DNA, 99 bp, Homo sapiens
  chr16:79804435-79804534
  hyper
accggcccgagctccgcgacgccgcgcccccagccccgccccgccttaaaaaaaaaaaaaaaaaagaagaagagaaagagccgccgggagaagcgcgga

SEQ ID NO: 238700 - DNA, 607 bp, Homo sapiens
  chr16:80574538-80575145
  hyper
ttccggtactgtttcgtgcattttgtttggtgcattttgtccgtctccctggcacctggtgggtggtgaatcagcagtttttgaacgaataagtggttatcacattaattcgtgcctcaatgaatgaatgaatggacaaacacaggccgggagcctgacccacttccctcttccctcccgggacccactgctccaggattgggcgaacctcaggtgagcgcctgctcccctcttccgcgaaccttcgcctacggcggccgggaggcatcaggagcgcggtcagggcgaaaaagccgactcgcgagcgcgcaggcgcagccctgacgcttccgtggggccacttccttttttgtctcctagcaacggcgggtagcgttgttgacatcccgggaggctgtgccgccggcctgagcccagagtttcgcggcctccgcgatggtaaatctggggtctccgtccacgccccgccgttccaagcacgccgaccgtcaaggaccttcgcacccagcttctggggcccacccaggcacgggcggtccaggggccgcggcggaggctggtggctccaggatcttcctggaggggcgagagggagaccttggaaagg

SEQ ID NO: 238701 - DNA, 33 bp, Homo sapiens
  chr16:80837584-80837617
  hyper
ccagccgggccgcgcaacccccgccccacaccc

SEQ ID NO: 238702 - DNA, 155 bp, Homo sapiens
  chr16:80837797-80837952
  hyper
agagagtgtgtgtgcgagagaaagagaaagagggagcgggcgcgggcgccgcgggaggcggcgggcggcgggcggcgggcgggaggcgcgcccggcccccgccaccctccggccgccgccgccgccgccgcgggctcggcaactccggattgcgc

SEQ ID NO: 238703 - DNA, 837 bp, Homo sapiens
  chr16:80838132-80838969
  hyper
tgcgcgcggggtccggtgtgcgcgtgtgtgtgcgcgcgtgtgtgtgcgagtgtgtgtggtgtgttgagtaaactgtgtttttgcagaatgacaggcttgggggctgcctatgcgcagaatcagagcgggcggcggcggggctggcgtaaccggcagcagcggcggcggcggcggcggcggcacgagcgcgggcagcagcgacggccgcgcagcgcgcccgggaggcacggacgcggcccgagcgccgcggcccccgcgacccggcgacccggcggcggtggctgcagccggcaacggctcgccccggcgccgcctgcaggaagccgcccggcgcccgccgccggcccggacgctgctgccactgggcgagtccccgccccccgggagcccggcccggcccccggggcggggaggcgggggctgctgcccggccgcgccccgggggaccggtcccagagtcgactagcgctcgggcccgccccgccaccccgggccggcttcgggagcagctggcggggcccccggggggcggcgggccaggtgcccgccgggtgcgcccgatctggggccgcgaaggggcggccggggagccaggtagagggctgcggctgcagacctcagggaaggggccccagccgagccccgccggcccggggtccccacctacctcctccaccctcgaggggagtggacgccgcctgggagacctggcccctcggggctgcgcggcccctccctccaggctgggttgtaagatgtggaggccacagggaggaaggatgaaatggcccatccagaggcaccatggggatccaggacaggcgtggccaccccata

SEQ ID NO: 238704 - DNA, 502 bp, Homo sapiens
  chr16:80966003-80966505
  hyper
gggggccaggggagcgggggagtcggcagcgccgcctgggacagagcttgccgcacgctgacctactttctggggccgatgtgtttgcagccagaggtaccgcggagccaagcccggagcctcggggagccgccagcgagcgcagactgggagggagccggccgggctccccgccaccccttcctccgcgcgccaagacctgtcagtttcacccagcccggcttccctggaaaggcgggatccctctgcagatttccaggctcttggaagaggaccggcgcgtctattaaacccgagtcgctccacgggctctccgcccagagcacaagctgccttcccccgggaactggacctcggcagcggcctgcgcagagccgggctccggggccctggccgctctcgggaaggccccgcgggttcccaccaggccagagggagaaccaccaggaggccgcgcgcgcgcacacgccgggcgccctcctcgtgccgaggtggaaagagc

SEQ ID NO: 238705 - DNA, 301 bp, Homo sapiens
  chr16:81039731-81040032
  hyper
actctacgtaaaacgcctgatctttaaacgcaagaaaagcaagatgaatgtattactttcctggaaaaaaaaagcattaaaggagaaaaaagagtaaagtgtactgatggggctcttggtgggttctcacatcacagggcactgcagctgagacttgcttgaacggcccccgttttctacccgcaaattctcaattgctagataaacaacaataacaacactttattgggcgctcatcgtgtcaaaccctgtgttgagggctccattcctcaaggtccattttaccggcgaggaagccccg

SEQ ID NO: 238706 - DNA, 132 bp, Homo sapiens; identical to SEQ ID NO: 204313
  chr16:81040580-81040712
  hyper

SEQ ID NO: 238707 - DNA, 445 bp, Homo sapiens
  chr16:81110796-81111241
  hyper
gagctactcaggtcgctgccggatgggccgttgccttgggttacgaccacgctgggggcgggaccgcggcggaagtgacgtagcccaacaaagcctagcactggcgaggcggttcgtggcatctcctatccgctccgggcgctgccgccggaagggccagcgacggagggtctcagatggcggggcttgaggcccacccgggctctcgggtcggcgagtcccgttggggagcccttgtgcctgctaggatatttagcagatgccaggcggccagaaacgtcctcacttttctccctcggccctctggggaaccgccgtgagcgtttcccacggacacaaacttaacaggcccagaacgtccagggaggacgcgttgtgagcctcaaagagcccacttacgtgaccgacagcaccaggccgacgggcactcgctgaactgctggcc

SEQ ID NO: 238708 - DNA, 126 bp, Homo sapiens
  chr16:81130106-81130232
  hyper
ctccagggcctggcgcgacctcggatacggcgacgcgaaagaggggcgtgggcatggggaagaacctgaggcccggaagaggcagcaccgagaggcggagactagcgcggcgggcctgggtatgat

SEQ ID NO: 238709 - DNA, 35 bp, Homo sapiens
  chr16:81348358-81348393
  hyper
catccctccatcgcgggagcgacctatctcatccg

SEQ ID NO: 238710 - DNA, 214 bp, Homo sapiens
  chr16:81348862-81349076
  hyper
gcggcggccagcccgtacatcaggtggggagggggctacggcgggcgggcgcggcggtgctgcccggagccggaggcggggcggccgggccgggcgtggcccccagaccctgtcccctgtccccggcgccggggtccccgcgtcaccgttggcgcggcgtccctcccggcaagcgccggaacccggccccgctgaccgcgtcccccaggcggcc

SEQ ID NO: 238711 - DNA, 374 bp, Homo sapiens
  chr16:81779773-81780147
  hyper
tggcacaaacaaggccggcctgctggataaagggaggtagaaacgctttcagccctccccggtgcttcccggtttataacttcatctactcgtgacacgtgggggtccgccgccgccactggcagggtgccttgagtgcttgagttttcgcccccagcacaggtggagaacccaactcccagaaaacatctggggcggaaacggaagcatggccgcagcggtgaacgcactgcattctgggaaatgtagtcgaaacggccgctggggcagagtgagcacccacagtggtgccttctggggagggtcgttttcacgtagtccaagagccaggggtgggaaccgcggggctctcaccccagcgccgggaggggatg

SEQ ID NO: 238712 - DNA, 161 bp, Homo sapiens; identical to SEQ ID NO: 204316
  chr16:81812592-81812753
  hyper

SEQ ID NO: 238713 - DNA, 155 bp, Homo sapiens
  chr16:82204032-82204187
  hyper
ggcttccccgagccgcgggtcgccttcccgggacgtcggcctggccccctcggaggcccatcctccctcggggactcccttcctcagggaccccctccacactcagtagtcctcgccagcctcagagaggtttccgccacgcctgccacccgcct

SEQ ID NO: 238714 - DNA, 1478 bp, Homo sapiens
  chr16:82660355-82661833
  hyper
aatcagctggcattgcccagcgtgatttgtgaggctgagccccaacagtccaaagaagcaaatgggatgccacctccgcggggctcgctcctcgcgaggtgctcaccccgtatctgccatgcaaaacgagggagcgttaggaaggaatccgtcttgtaaagccattggtcctggtcatcagcctctacccaatgctttcgtgatgctgctgctgatctatttgggaagttggctggctggcgaggcagagcctctcctcaaagcctggctcccacggaaaatatgctcagtgcagccgcgtgcatgaatgaaaacgccgccgggcgcttctagtcggacaaaatgcagccgagaactccgctcgttctgtgcgttctcctgtcccaggtagggaagaggggctgccgggcgcgctctgcgccccgtttctgcattcggatcgcccggcacgggcagggtgagggggctttcggggggtcggggcctccggtcgcggcggcgaagacagatcggggctcggtagggaggtcattccgagcccagagatcctaggcaccccccacacacaggctcccactctggcgtgcgtgtgtgtgtgtgtgtgtgtgtgtgtgtgtgtgtgtgtgtgtgtacgttcgttaacgggaggaggagagagctcccagtccttttttgctagcaggggcgacattctcgcccacatcaagtggggtaactttggttccctcctccggaggctcggtgcattggagaaagactcagttagaggcgactccaacgagccgcggttttccccagcccaacgcccagcggccgaagcgctgctcgggtccggattgcgggatgcggggctggagaggccgagcaggcaccaccgacttcccagggcgcccgggccccctggtacagcccggctgcccgctggaaggcgcctcggggcagcagagagcctcagcccggctgctgctgtcgctcaaaggcgccggcgccggccgcacccgcatcggggtccttttgctcccagaccccgggcccgaaagggccggagcgtgtcccccgccagggcgcaggccccagccccccgcacccctattgtccagccagctggagctccggccagatcccgggctgccgcctctgctgccttccctgagcgggagcggagcgcagagaaaagttcaagccttgcccacccgggctgcagctgcttgttaaccctcagagcgccacggcgcgagggaagggcacgccaaccaggagagggggcgagggagatgcggtccgcctgcagtcacctctgcacctcagagatttcgggaagtttgagtgcaggaaagcagcgctccgaggccaggcctggggtgctggccgctgcggggggcacgccctgcgctgctcaggggcctgtggtttcggagagcaccccgatccagtcccccatcgcctctctggcaggcgttgggacttggagtgagctg

SEQ ID NO: 238715 - DNA, 122 bp, Homo sapiens
  chr16:83986688-83986810
  hyper
atgaggcaggcagcgtgacacccgcccagtgtgcaagttcattcatcacgggcccctgctgactcacgcttatgaaagtgattttcctggccccgcccactgcctgcgccgcctcctccctc

SEQ ID NO: 238716 - DNA, 50 bp, Homo sapiens
  chr16:84151074-84151124
  hyper
ggtgcgtgcgaaacggaggacctttgtaacgccacgtgtttgctcttttt

SEQ ID NO: 238717 - DNA, 177 bp, Homo sapiens
  chr16:84179011-84179188
  hyper
aagctgcggggcgttcggtgtcgccgaagtaaacatgcaccctgagccctcggagcctgcgacaggtggtgcagcagagctggattgcgcgcaggagcccggcgtggaggagtctgcgggtgaccacgggagcgcaggccgagggggctgcaaggaaggtgccgactgccccccagg

SEQ ID NO: 238718 - DNA, 173 bp, Homo sapiens
  chr16:84328194-84328367
  hyper
cttgggaggagaccgccccagcctgcaaggaagtgctcattatggagagtggagagtgacaggccactcccggccacgtctccaagcaagccggtgccccctcctcctgctgccaccgcccactgagctgcctgggctgcagacgccctggttggagcgtctggggccagatg

SEQ ID NO: 238719 - DNA, 674 bp, Homo sapiens
  chr16:84401741-84402415
  hyper
cacctcgctcccggcgccttagagccgcccaccctgggttcctcaagaggatcacctggggctcgttaaaaacccagctcccggcggctccaaaccgtgactgggcagggaggggtctgggaatccggattttaaaccagcatttgctcctccacctcccccactccaggtgattcttaggatctgtaagtttgggaaacagcccaagccctgaggcgacgcagcctctccctgggcctttcatggccagccggcgctgtccccagagcccctggggtcccaggcgagctcgcggggcggggccgggtgagccggcacctccctgtgcgcagccccgccccaggggcggggcctcacctgccgcgggcaggtagacagctacctggtaaccgggtccggcccaggaggcttgggcgcgcgcagccatcccgggcctcgccggggacctagggacgcaggcaacgcctgcgcccgctcaccatggtcgagggacgcgtctccgagttcctgaagaaactcggcttctcgggcgggggccgccagtaccaggcgctggagaaggacgaagaggaagccttggtgagtccccgcgactccgcgccgggcgtgcgacccgaccccccatcccctccgtcgtaaccgtccccggcccgagaccccgcgttcgcgctgcg

SEQ ID NO: 238720 - DNA, 61 bp, Homo sapiens
  chr16:84733968-84734029
  hyper
agggcgtggagggcgccgaaggggttaacctccctggggctggaccgcggggcgagcccgg

SEQ ID NO: 238721 - DNA, 518 bp, Homo sapiens
  chr16:84853347-84853865
  hyper
gcgagggagctgagcgtctccttgtccctagccggccctggaggccagcggccccgccttcctcgcccacccggcgcccgcgcctcagctgccccccgcctccttcagcccgctgagcctgcggggcggggccgggggcggggccggtgatgctcggtcctaccagcgccgccagcgatctgggggcgtggcctccgggctccggggagcctacaagaggcggtacgctgagccccggcacccactcgcatcccagggcgtctccggctgctcctattgagctgtctgctcgctgtgcccgctgtgcctgctgtgcccgcgctgtcgccgctgctaccgcgtctgctggacgcgggagacgccagcgagctggtgattggagccctgcggaggtaagtgtgatttccatgcttctcccttttgcaaactgttacccccccgagaagctggaataactaggacagatgccacctcgcagggctgactgtgtgctggcaccacaccgagtgctctgcttg

SEQ ID NO: 238722 - DNA, 91 bp, Homo sapiens
  chr16:85045410-85045501
  hyper
cggagtgtgtacccgcgcccgcggcggtgtctcagaggcagctccagtggcctgtactatatgcggggatgtgaccgaaggaaatgggaaa

SEQ ID NO: 238723 - DNA, 175 bp, Homo sapiens
  chr16:85202555-85202730
  hyper
tgaatcatcgcgcgcggctccggctggacacaaaatagatagaggagccggccgctattgtgcgcagtttgggacgcggggggaggcggcggcgggcgggagggaggcaggcttggaggaggagggcggggggagggagcgcgcggggagggattcccccgcccgccgcgcgccc

SEQ ID NO: 238724 - DNA, 742 bp, Homo sapiens
  chr16:85202970-85203712
  hyper
cgctgcgaggggccgtgcgcccgcgcccgcgccggccgcccgccgccaaactttgcggcgcgcacacatgctccaagttgggcgcggcggcggcggcctgggcgggagctgagggcggcccggggcgcgcgggggcccgggcgggcggcgcggcgcggccatgagcgggcggccggccccggtctcccgcaagcagcggctcatggcagccgtgggcgagcgggctgcgggcggcgcgccgctctcctgcttcatctgcggcggcggcatcgggcgcggcaaggagctgaagctgcaggtgaagcagccggcggcgggcgcggggaccccggcgcagcccttcttcccgttcctgcagcagcaggagccggcgcccggcgcgcgcgagctgtccccggccgacggctgcgtgttggtgtgcgccgtgtgccgctgcttcctgggcgagcagtgggccgccttcgagcgcgcccgcacgccggtggacaagcgcatgtactggctcaagcggccccaccagtgcgacgcgggcgcaggcggccgccgtggcggcgccggggccccccgcgagtggaacgtcgcctacgcgctgggcagcgccaccggcgacgacgacgaggacgacggtggcggcccccggctgcgcggggccgcggaggagacgcgagactccgacctgtcggagctgtcggacaccgaccccctttccgagcccgacccgcccgcgcgggacgccgccagc

SEQ ID NO: 238725 - DNA, 151 bp, Homo sapiens
  chr16:85205738-85205889
  hyper
ttcggggcatgtctgtcatccgcctgataacattggtaattagtccagccgtgcgggtcacagagaggtctccgtgctcacccggtttgaaacacatcagaggtggaagttcctctccgttctagctcccgtgtggcttggcttttccaga

SEQ ID NO: 238726 - DNA, 132 bp, Homo sapiens
  chr16:85482269-85482401
  hyper
ttaatgcaaactggcaggggcgatggaggggggctccgggggcaccactggcagcccgccccacgccgcccacatccccggccctgcaacccggggcaggaaaccaccaacgtgtttatgaaagaggcaggc

SEQ ID NO: 238727 - DNA, 130 bp, Homo sapiens
  chr16:85589833-85589963
  hyper
gcgccgtggcttgaacggtgctttttgttcattcctgggttttaatattattttccttcttcatccctctctggccactatggaattctaatttgaaccatgtttggattgaagccgcctctgtattact

SEQ ID NO: 238728 - DNA, 690 bp, Homo sapiens
  chr16:85590203-85590893
  hyper
ccgggggttgcgcgtctcgctccttttgtctgccgggagccggctccgccgcggcggcggagcgagcggccgaggcacttaaaccttccaaggtgaagtaagcgccgagtgtgaagttactttcctgcaggccgccccgatcgggtagcatgccccccccccccccagtcctggggtttatttccctctccctccagccaacccccttgcgcggtctcggcgcgagcgtggctcgccggcccccccgccgccccccttcctgcctgggattccctggaaggttttgttccgccgaggtcggaggagggggccggggaagctcaggagggtatttggcgtggcttcctgtttccttaaccttcctgcgcggtgacagccgcttgccctgtaactttctgtttcggggcaagtcgcgctttcagcctggaggggaggggaggggagggggttgacagctggaggtttggggagcccctcctgaattcaccttatttggatttctaaaccttaaaaaaaattaagtgtaggctacatggaagctggtgatccaggaattcaggcgagggagccctgggtggtgaaccccagggttcttccccaccgcgcgccgtcacccccactcctgtgccccctggggtcggggagaaacgcacaggcctgccccaggtggggccacgtgacgcaggtcag

SEQ ID NO: 238729 - DNA, 111 bp, Homo sapiens
  chr16:85645214-85645325
  hyper
caaggcggggggccggcccgcgtgcgcccccacctccgggccccggcgcgcgctcggtcggaggtcgagcggggagcgtggggcctgagggagcccgccagaccctgcccc

SEQ ID NO: 238730 - DNA, 444 bp, Homo sapiens
  chr16:85722385-85722829
  hyper
cccctccccacggcgggcccaggcctcaccccgatgaggtagatcttgtccagactgaagttggggataatggtaaccagctccttctcggcgaggaattcgacctcggcagcgtccatggcggcgcgagctgcaggccagagcctcacggtctcctcgggcccctcagcgtcccggaggagacgccgcggccgccgttttcccgccacggcgagagcccgccccggccggaagacggcctgcgccagcctataggaaggcggtagacagcctataggcgctgtctgcgggcgggggggcggagaccgcgctcgcgaagagcccgcggattggcaaggccgagggaggctgcgcgccggccccgccccggcccgcggacaggccccgcccccaccccggccccgccccgcccgtgggcgtgcacctggcgctgtcaggatctcc

SEQ ID NO: 238731 - DNA, 208 bp, Homo sapiens
  chr16:86273134-86273342
  hyper
ctggcctcaccggacgtggagggaagcagcgtttcccctgtgaaagcagccgagtcactgggcagagacgaatccagctctctcttcccttctctcaggaaggtgctggaaggagattttcctttccagcagttaagtggatgcggcttgggatggtcaatccgtccccaggcctggggacagctgtcctcaccggaagacagcctgc

SEQ ID NO: 238732 - DNA, 947 bp, Homo sapiens
  chr16:86320170-86321117
  hyper
ccccacgcgccccccgccccttcgcgcaccgaggtcgtcctgcgtctccgggatcccaggccagcgggaggaggggccgcaggggcgctgcgggcaaggggagcccagtgcgcagggctccagaaaccccgaccctcgcaggggagagccagccgaaccagacgtgtgggggcagcagccgccgcggcggtctgggacgcgggtgtcgccttccacgggacttgggtccagggacccaagacggggatctgggaggagggggatgcccttggggcctgagacccgggcggtttccgaagcgaagtagttacccagaaccgctccctaccttctccccgcctccctgtctttctgcccctctgtcccctgcagctgctcggccctccctcctctgaaacccaccgcccgcccaaggctcactccttcctgctgttcccgcccgcgaagctgttgcagggacggtgcgcccttgggctgcactcaccaccgcccctcgcccgcgacgtcctggccccctaaccccagctttcccgccgccgctcactcccgcgctccgctgcagctcagcccggtctgcaactctccctctgttttctgccccgctcctcagttctgcgctctcctcttctccaggcttccctctcctcctccttctgcctctcccctgtccccgttccattctcctgcgcccctcgccagcgcgctcgcagcccatcggctcctgccggggcccctctggtgccagccgccttcaggctgtgggtccgtccgctggtggaggggaaggtcggggctggccccgggccccgcgctgctgggccccatggtcagtggagacgcctcctggtctcccttcagagctcctcgtcgtcgtcggagtcatcggaggaccaggaaggaggaccccccaccagctgccgcagcctctgctgcgaatccccccacac

SEQ ID NO: 238733 - DNA, 483 bp, Homo sapiens
  chr16:86334431-86334914
  hyper
caaataggattttgtttccccgacgtccaggctgagtgcagccagatgggatgacttgacaaagtcacaaacgctgacaaatcccggcgggggagttgtggcttcctccaaaggaaggtaggtctgtgtttgtcaattgatcagctcagcggtggccctgagtgaggccgtgaggaaagtaactccgtagttttaattctgatgattacttcctgaaaaaggaccctgcaatggtgggtccaacctcctccttccctccgtctctgccagtcgctcggtctctgtctgtgctcccctccagctgcctgtccctccccctcaatgggggcttaggggcccagctcaccactcacgctcccacaacgtccagcgtccatgcctgcagcctgtttcctgggaatttcagtccatgtggagcaagaggccagtctcctgctctgagcccaggagggcacgtcctccgccagctctcagcactggctc

SEQ ID NO: 238734 - DNA, 1072 bp, Homo sapiens
  chr16:86530872-86531944
  hyper
aacaaaaatatacacggccacctacttcgtcgggaaagacagtccagcgcccaccggcccgtgctcgcccgcctgccgagccccgagtcccggcaacgcgccccgggtgctccggtccactcggcacacgccgcgcgcggggctcggccgaggtggcttcgggtggctctgaagcctcggtcttcccggctcccaggacgccccccccgcccccgcccctccattcagcctgtcatctcggccctccgccgcctccggagccccgacggaggtgctgagttgtcaacgcaaattcctagttaagccacttgttgataaaccctctaggcaaattggttccgtctttacctgcccgccccgcccccgcccccggccccagccggcgcgcccctaattgctggaggagctcgacgccggcggcggcctctgcagcgagctaattgagttggaacccgagcggtcttcgttaagccggacgcaaggcggggacgggggaagggggcgggaggtgagacgcagcctgggacctccggcctggggttggaggcccacgcttgctggggtgggcttttggtggaggaagagcaatcatgcggagggctctgccgccgggttaagtggacgcagcgactatctggcggttctcgggggtctgcgttccctggttcacaaccaccccacccccacgcgcctgtgcacatgtccctcccgccgcgcagggtctccgcgggcgcgccccgccccaaatagagcttactacagtaacccgggagtctcacatctgcgcgtcccccacccgcccacccccgcaccgcctgtaccccaatttcggcccgcacccgaccaaattttaaaaattgggagggttttggggactgcaatggaaaatcagctggccccggccccagactccgtctacactggcacagacaggtggagtacaaagccggcttcctggatgattcaggccccaaatcgtaggtagaaatgtgcaagtaatggaccttcgatctgctttccctcccttagcacataatccgtagtattcgctgtttcccgttgcccctataga

SEQ ID NO: 238735 - DNA, 762 bp, Homo sapiens
  chr16:86532208-86532970
  hyper
cccggcgggagacgcgcggggcctgggtttccagaaggtgcctccccaagggggcgggccccgggtgcaccccggtgccccgaggccccccagcctgaaggcaggccgaatccgcccttgaccaagtcgaggccaagcgagtgcgaaaaaggcgtgtatgaggggccccaagaccttttcccagcctgaaaagttttcggcgttgcagctctggcgttcctggaccccgggcgctcaggcgcgcacccctcccctgggctggtgaaggtataataaacacggcgttcacgccggcaggacccatcattagcccaaaccgcggtggaaaggagcgctcggttgcagagctagaacagcagttaccagccggggctgcctggcaccctcccgccgccgccggcgccttcctggccgccgagctgcctcgcagccaggtcccaatgccgaccccaaggcgtgccgcccctggaacccgcgggggtcccaggtccacgccaaaagaaacgcgctctgcttctcccgggcgtcagatgcaccgcctcggccggacgccagccctggacaaatttttccgggaaggcgacgtaaagaatgtcagacttgcaaaaccagagtgcgcctcggttgcttaaaatggagagagagagagagagagagaagtcaggggcaggtgggcagcggtggaggggcggctgccctggagtcacggacttcagcagaggcggcttagcaaaaaacgcagaaaaacgtgggggcggcagc

SEQ ID NO: 238736 - DNA, 142 bp, Homo sapiens
  chr16:86539364-86539506
  hyper
ctgccctcgcggtgggtggtcggcggccccctgccccgcccgcgcggccggcctgggctccctcggagcgggatctggttccccgctcgggttacggcgcgctctcggcccgggcggcttcgcttaagcaattagctagtaa

SEQ ID NO: 238737 - DNA, 232 bp, Homo sapiens
  chr16:86541650-86541882
  hyper
tgggcggtgcggagcgtgtctgtgtgcgcggaggctgagctggttgtgtgaagtggtagcgggtctgccagagagcgtttacctgcgtgaatgcacaaccacacactacgggtcacgtcccacactcattctttccctaggcgggccaggctgtctgcacgcggagacccagagaggccagcggaagggcagcgcgggaaggcggctctcttctcccgcgagcgcagatctg

SEQ ID NO: 238738 - DNA, 146 bp, Homo sapiens
  chr16:86542062-86542208
  hyper
ggtaggctttgaacgcgccgcgccgcgggccgtgctgcgagcccggcacacgcctctcgccccagctcgcgctggggcttggcctctaggctcttcgcgatgacccgcgaaaacacccctcgcccccctcttctcaactcggaacc

SEQ ID NO: 238739 - DNA, 186 bp, Homo sapiens
  chr16:86543474-86543660
  hyper
ggagggcgcattaacacttgctcgccaggttggtggaggcggggcggattctgctggcggccgcggggcggcgagagtgggggctctttaagcgcccaccaacgcgggggcccgaggggggcagggacggagggagggaactccgggagggtcttaggccgacccgcgagacgcagccgagcggag

SEQ ID NO: 238740 - DNA, 246 bp, Homo sapiens
  chr16:86544770-86545016
  hyper
tgccgggcaacgtggacggcatggccctgcccagccactcggtgccccacctgccttccaacggcggccactcgtacatgggcggctgcggcggcgcggcggccggcgagtacccgcaccacgacagctcggtgcccgcctccccgctgctgcccaccggcgccggtggggtcatggagccgcacgccgtctactcgggctcggcggcggcctggccgccctcggcgtccgcggcgctcaacagcg

SEQ ID NO: 238741 - DNA, 209 bp, Homo sapiens
  chr16:86549503-86549712
  hyper
gttgcgcgtggctttggcgccgctggactagcgtccagggcggcggcaaagcccggtttcctgttcatctccttgccttcgcttcagcgggatctcccagcgcacccatgtccaggtctagcggggcgggaggcacccaggggggcttgtgcaggaaaaccggtccggattgcccgaggacggtgaccggcctcggtcttccggcctga

SEQ ID NO: 238742 - DNA, 112 bp, Homo sapiens
  chr16:86597561-86597673
  hyper
atgataagcagggcgggccgggcggtctttttctttttccttttctcgtagtagttccctggttggcctcaagatgacgccaacacccacggagtccgcccagccgctccag

SEQ ID NO: 238743 - DNA, 606 bp, Homo sapiens
  chr16:86599307-86599913
  hyper
cttggaggctcccagggggacgttgccaggagcaggaggcagggacagcgccctagggtcggtgttagcggccggcgccggcctgggccacgggaaacgtccacgcttggtgcccgcggtgcgcggcgctcattgcgcgcgccttcgagccaagcccccgcggaaaacaggctcgggtttctcctcgcagggcccaggaactcggctctgcctggcccgggtgggtcgctgcattgtcccggtcttctgggagtgcggggtcagcttgttagagggaatttctacctgggaaaagggagacgagtttcgaagctgaagttggtaggctgcgagtgtccacgcgggagacgaaagggggaaatagcagagtcacttcacccttttccccaaaccccacaaaactgctcgcagcgacgcggatgatctaccgaattccccgcgaattcggaggattaagttgtcagtcagcacgttgctaccttcccctctatgcactccgctgcctggctcctcggcggggagcgagggaaactcagtttgtagggtttacctctaaaacctcgataggttatccttgacgaccccgagcctggaaactccctgttg

SEQ ID NO: 238744 - DNA, 39 bp, Homo sapiens
  chr16:86600790-86600829
  hyper
ccccggaggctgccaggagcccggggccgcccctcccgc

SEQ ID NO: 238745 - DNA, 385 bp, Homo sapiens
  chr16:86601009-86601394
  hyper
ttactaccgggctgcgggcagctacggcggcatggccagccccatgggcgtctattccggccacccggagcagtacagcgcggggatgggccgctcctacgcgccctaccaccaccaccagcccgcggcgcctaaggacctggtgaagccgccctacagctacatcgcgctcatcaccatggccatccagaacgcgcccgagaagaagatcaccttgaacggcatctaccagttcatcatggaccgcttccccttctaccgggagaacaagcagggctggcagaacagcatccgccacaacctctcgctcaacgagtgcttcgtcaaggtgccccgcgacgacaagaagcccggcaagggcagttactggaccctggacccggac

SEQ ID NO: 238746 - DNA, 36 bp, Homo sapiens
  chr16:86601934-86601970
  hyper
agcatgcgagcgatgagcctgtacaccggggccgag

SEQ ID NO: 238747 - DNA, 201 bp, Homo sapiens
  chr16:86602390-86602591
  hyper
acgccgcctctctatcgccacgcagccccctactcctacgactgcacgaaatactgacgtgtcccgggacctcccctccccggcccgctccggcttcgcttcccagccccgacccaaccagacaattaaggggctgcagagacgcaaaaaagaaacaaaacatgtccaccaaccttttctcagacccgggagcagagagcg

SEQ ID NO: 238748 - DNA, 157 bp, Homo sapiens
  chr16:86609738-86609895
  hyper
ctagagcgtgggcatttgttttttgttttttggtttttctctctctctcctaatctctctctgtctctttctcgctctcttttttttttttttttttttgctttactatcggtgccccgcccaccagcctcccgtgtctccgcccacgtcccgccca

SEQ ID NO: 238749 - DNA, 237 bp, Homo sapiens
  chr16:87350811-87351048
  hyper
aacgccgcggggacggtggggaccggctcgcacgcatatggcttcttatggctgacgcgccctttcacacacacatcgtccgcaggccctgacgccctggctcccgcctttccctcctgccccaggaggaacccaacccgagctcaaccccagccccaacctcaaccgctcagaggagcccaacaacgcccgcgcgcccgcccgtcccgctgactagcccgcgcccagccaatcaaa

SEQ ID NO: 238750 - DNA, 187 bp, Homo sapiens
  chr16:87525618-87525805
  hyper
tgaggctgcccaggtcggccgggttgttggccttgatctccgagtcgcgcagcgagtggtagtccttgcgggccaggtcctccaggcacgagccgaggaagcgaagctcgagcgggatgcacaggtccagcaggccgcacaggaactccacgcgctgcggcgacggcagctccgagaaccagcggta

SEQ ID NO: 238751 - DNA, 183 bp, Homo sapiens
  chr16:87577567-87577750
  hyper
ccacgtagggctgccgcgtgtggtccgaaaatcatcctaaaaatggaaccttccactcaggcaggcaccgcatgggtctgtgtgagccgcatgtttctcagccaagacgcggctgtgtaggaagttccttataaggatttcctactctttgtgggccacccgttcatgcggtgaccaacctca

SEQ ID NO: 238752 - DNA, 284 bp, Homo sapiens
  chr16:87635073-87635357
  hyper
tttctggctcaccgcgctgcggtcaccggcccacactcccaggagcgaggaccctgggcagcctccacacccccatcagcccactgcaccggtctgctgccatttcccgcacgcatttcaggagggctggggacgccggcttctgcctgaggatttatggtccaggaaatgcattttaaatggatcccaggatgctcggatccaagaatcagactctctcttgtgcgtgggaagaggggcggagggtgagagtatgtctggagagagacctagaaacgcccgaa

SEQ ID NO: 238753 - DNA, 145 bp, Homo sapiens
  chr16:87635537-87635682
  hyper
taagcccccctccccccactcttggacccaagctgcccggaaggaagaaggaagcattgtttgtcaccggagaaaaccacctgtggtttgcaaagggcctcagtcgagtcaggggcaggcggggcagatccgagcccggcgggag

SEQ ID NO: 238754 - DNA, 88 bp, Homo sapiens
  chr16:87636402-87636490
  hyper
gaggggccctctcgccgctgaggtggagccgcgggccccgccgccgccgctcctgccccctccctccctcctcccctccccctcccct

SEQ ID NO: 238755 - DNA, 578 bp, Homo sapiens
  chr16:87637150-87637728
  hyper
gggccgggccggggcgggagggacgtgcttccgatcgcgccccttctgtggatctctggggaagttgagctgcgtcctccggttgggccgtgggcaccaggggcctttcccgggcttccctggaagccacggcggctcctggctacaggttgccccgctgcctggtggggacagtgcccctgtgccagctgaagggtgttgggggctttccaggggcagagccaggcggggcccagcagagcctccgtgcgtcggacacagcaggccggagacctgcgggaagggccaggctgggcccgcggccctggggaacccagcaagggcagagggggctgggagaagggcccctccccttgttggctttgccccccaccctggaggccgcccttcgatcaggccccagcttcgcttctggtgttcctgcggcgcccgagggccttcctcagccccgaatctgcccaagccgagagaaagggagtgatggggagcgctaggggcgggggatgccaacccgaaccaaaacagccaggcagtacacttctaggtggttggacgcggactagcgctgtcgaagcagg

SEQ ID NO: 238756 - DNA, 83 bp, Homo sapiens
  chr16:87695288-87695371
  hyper
caagagcaaagacccgtccaagagcagggtcagcacctcggagagttccccgcaggccgccacggggcggggagagaattcat

SEQ ID NO: 238757 - DNA, 133 bp, Homo sapiens
  chr16:87984528-87984661
  hyper
agcaggtaggacccgctgggggcgcacagcccacctgagacatcgtaactacaagtcccagcaacccttggtgcggggacaggacgggccaccggagtccggagagactacaagtcccggcaggcatggccca

SEQ ID NO: 238758 - DNA, 101 bp, Homo sapiens
  chr16:88292854-88292955
  hyper
accccccgcccccccgaagcgggccagagaggtgtcctcggtgggtcaggaagggtcgacgccccctccttccctcagccgcatcccgcgcccccatccct

SEQ ID NO: 238759 - DNA, 1138 bp, Homo sapiens
  chr16:88449364-88450502
  hyper
gcagaccccgcggccgccggccggcgtccggccttcccagcacccggcccagggctggagctggctgcagggctggcccgcggcgacctgggcagggtggcggctgctccctctcctcccaccccgccccgaggcgcagcgcgcggcagagcggctcggtgcccggcgggcgggcggcccgggcgggcctgcggtcgggatgaggacggcgcctccgctgcagagcgctggggcggcgcgggccgggagctcgttggcggcggccggcgtggcgggcggagcgggcctcggagcggaggtgagtgcggatgcgccgcctgggcgcgcgcggtgcctggggaccccgggctggaacgcggggcgggggtgtcaccgggctgcgcgggggtctccggcccggctcccgctcctgcgccctcgggggccgctccccggcggggccggaccctcccagcgctcgcggcgcccggcccggctcccccgacctcctcctcccgggcccggacgtgcggggcagcgagcgccggggcccggcgggggccgcagccttgcccggagcggagcgttggcagcgcggggtccggctccgtgggcagtttgggaagcgcccgggcaacgtactggcgagggccgcggagcgaggggctcggggagcgggacctccgggcggggctgcggggagcggggcccgggccgccccattcatcgcggatcggagccgggggtgccccagccgtgccgccgcctcctccgggccgcccgcccgggcgtgctggccccgcggcgctccgagcgcggcataggcttgcgagtcggcggtgtcagcgccccggacgggggtgggagctttggagcccaccctgggggagaccacgccgcacccccgcccagccccgcgcacccccagaggcttttgcagagccgggaagttggctggacgtctagacccgtggggacgcggcgccccgcgtggcggcggccggaagggaaggccaatggggctcgggggactcccgcggccacccagtccttgtccctgcaccctgggccgagggcagagggacaggtccccggcgggggcgggggggcagctcagctgccaagtccgctcctgcagcggaggcggttaactgcttca

SEQ ID NO: 238760 - DNA, 174 bp, Homo sapiens
  chr16:88522425-88522599
  hyper
ggttggagaacagcgcgggggcgccgcgactggggcgagtgggggcttggaacggcccgggttggggccggggagccggcgtccctgcgctggtctgtctgggggagttttctccccaaacacacttaattgccaagaagttgatcctcccctgtggccggtggtacagtccgt

SEQ ID NO: 238761 - DNA, 107 bp, Homo sapiens; identical to SEQ ID NO: 204337
  chr16:88636352-88636459
  hyper

SEQ ID NO: 238762 - DNA, 526 bp, Homo sapiens
  chr16:88729457-88729983
  hyper
tgactgccgccagcggcttctccgaggccatggtcccaccgcgcagtgaccccagctccacagccacttacggcccgcgatcccaccccagaggcctctgcctcctcacgcgctaccacaggattggcccgtgcgagcccggctgctcgcgcgccgaccaatcagcggcgagtcgggcgcacgcattacctctcagccaatggacgggatcggacgatgggttgctgacgtaggtccgccccacccgcagggtgcgctcgccaggcctggggcgtggtgttgtctgcgcaggcgccgtgtgcccaggcgcctggcgtccgcgtcggcgatccggggtctgggcgcggcgaggtgggcgctgttgcctgtgggggctacctgtctgctggtgctgtgcgggcttgtgcggggctgtgcggcagctgtgtggggcccgtgaggagctgtgcggggggctgtgcgaagggctgtgtgaggcgctgtgctgggggctgtgcggagaccttgaggcgctgtgcggggtccg

SEQ ID NO: 238763 - DNA, 232 bp, Homo sapiens
  chr16:88752793-88753025
  hyper
caccaggaaggagcgcggcatgttcccctcccgggcggcaggccggggtgggctggggcgggaggggcgcgcctgggtccggactgctgcgtccgccggcgcttgaaggggtcaggctcattagcatagcgcgccgcctccgccaaccagcgcccggcgcgagtggggcggggccacgggggcggaactgagggcgaggcggggtctcgggcaacacgcccaggacaggtgc

SEQ ID NO: 238764 - DNA, 364 bp, Homo sapiens
  chr16:88878670-88879034
  hyper
ttctcctttattggccgagatccccacgctgcgcgcgggaggctggcgcgcggggtggagaagggcgtgaggaagcggtccaagtagcaggagggcggtgcagggcccggagggagcagcccagggcggaggcggcgggcctgggctggaccggccgggggcgctggcctctcgcggatgggccctgccgttgaggcggctcttccccgcccggacccgggggagggaggccggaaggtgtggccaggccagggcgcgcatccgcgagggcagaagcccttctgtccgcctgcagaggccaggtgaccccttagccttggggtggggagctgtgaaccccctggccgcccgaggactggtaccc

SEQ ID NO: 238765 - DNA, 185 bp, Homo sapiens
  chr16:89006898-89007083
  hyper
tgtgccgaggcccgcggccgtcaggaccccagggaccgcatgccaggcagggtccaggacccccagcgcggaccacctttagcctgcggggcagcgccggggacccgggcaggagggagaggagcaggagggagctctggacccccctccccagaccggccgccgccacctctgcctctcccagg

SEQ ID NO: 238766 - DNA, 40 bp, Homo sapiens; identical to SEQ ID NO: 204346
  chr16:89266729-89266769
  hyper

SEQ ID NO: 238767 - DNA, 175 bp, Homo sapiens
  chr16:89268832-89269007
  hyper
tgggcacgtttctgcgtttcagaacgctgttcgcttcctcacacttagattgaggtggaactcacgtcacataaaccgggtcgcaaggctcagctcagcggggcccccccaacagtgttgcgggaccagcaccttctcgggctccggaacagcttctacccgagcagagcccgcc

SEQ ID NO: 238768 - DNA, 601 bp, Homo sapiens
  chr16:89323409-89324010
  hyper
ccgaaagcgcattccgtcgtcaaaatacaccacgaggtcccgggtgccctcaccgccctccccttcctcgccctctcgtcgttgctgttgggacgggctctcgtcgcccgcgctggggcgcagtgactcagtgtgactcaggcctcgcccgcgctcgggctcacggagcagctgggacgacgggcgtgagcgcagaagccgcagagcccctcgcgcgcctcgcgggggtgtggtggggggtggccgcctccggggacgggcgggctgcggggctccgaccccgcggcagcgtctcgcggcgcctgaggccccggtgggcgtgggttccaggctgcacggctggtttgccgtctgggggtggtttgtgctgggacccccgcctcgccgcaaggaccgacgctttccgtatcccgggttcctgcttcggtgtaccggcagaatctgatcacgcgtggcctggagaatgcgcccagggtcgtattgcctggaaggagctctcagccgctgggggagccggaagggagacggttctgccctggacgcgggctgctcggcggccccggctctcctccaaccggccaaaccccgcctggtcccgccg

SEQ ID NO: 238769 - DNA, 75 bp, Homo sapiens
  chr16:89626701-89626776
  hyper
ttttctgcctttgcgctgcaaacgtgtctcacaaatgtgaacaaacagaattcctcgggcgtcgcccgttcgccg

SEQ ID NO: 238770 - DNA, 588 bp, Homo sapiens
  chr16:89641242-89641830
  hyper
gcctgtgctgcctcccgccggcggggccctgagcctcctcgccctgtcggcggcggtcccctctgaccgcagggtcttcttctagagtcctgatcgccgaggctgagcggaggcgcccggtcttcccgcctcttcagtcttaatgtctccctcaccctcgccccccacccccgtggcttttggcgaggtccgtgccctatttttaggcagaaatcggcaaaaagagtggactgcgaggtggtttctgtccccgccgacgcctcctcttccgctgctccctcccccgggaccggtgatggggaaggtgggggagtgagttcagggcggagcgggcccaccccccacggaacccaggcctgccccgccccgccccggcctcgggggactggtgtggaccgtgccccgcggacccctcggaatcagaccgcgattcagccctcggccccccgggacggtccttccagccccagacgagcgcggcgcctgcacacaacaggcgcccactaaatgcttgttgatggaggtggcgagtacccgaaaccagcggagcctggaaatgggatcctagagatccgggaagggcgcggg

SEQ ID NO: 238771 - DNA, 551 bp, Homo sapiens
  chr16:89778233-89778784
  hyper
accccgcccccctcgctgggctcctcctacaaagcctgggcccgtgggggacgcacatggtcctgttcgtactccaggatggcggcgtaaagggcccgctgctcccgttcctccggggtcagggcgacttggctgcaaaacctcctggggagaaaggcacgcggtgggtgccggggccaggccctccccgcagcggccccaggggcgggcaggagtcccacctgttggcggcctcctggagccgcagccggcgctcctccatctttctctggagctgggtgcagagtcaaggggccgagcgtgggatctgagcgggccctcggttcccaaccccgtcccacacccggagaggccgggacgtcccagggacctcctctcggtgaggggctgtccccaggtaaggcttctggggcagaaggcagcctgcgctcaagccaggagggccgggccagagaacatgggggacggcggccgggccttcccctgagaccctgcctctgcaaagcggggagcccctcggccctgtaccccgaccccggaacctccgctcc

SEQ ID NO: 238772 - DNA, 32 bp, Homo sapiens
  chr16:89787466-89787498
  hyper
gggtgggttgtcgcgacggagccgggcctctt

SEQ ID NO: 238773 - DNA, 200 bp, Homo sapiens
  chr16:89788695-89788895
  hyper
cttgaagttgcttcgctggagaggccttagaggcctttgaaatttgaaagatttcttggaccagcggccacatcccccacagggcggcttgtcccgccgagagccgcgcgcccgagccgcttgctgtgtccgggagccgcgcgaagggcgctgcaggcgctgccctcggacctggagtccgggacgccctgtgctcagga

SEQ ID NO: 238774 - DNA, 94 bp, Homo sapiens
  chr16:89882314-89882408
  hyper
gcttcgcaggaggcgcacagctgattcctttaatttctgtgccctttcaggattatatttttccctcttgacccttcccgctacggagagaagt

SEQ ID NO: 238775 - DNA, 85 bp, Homo sapiens
  chr16:89894335-89894420
  hyper
accccagccaccctgcgacaacccctggaggtcaccttgcccggggctcggggaggccactgcgggctttgtctgctcagctcct

SEQ ID NO: 238776 - DNA, 45 bp, Homo sapiens; identical to SEQ ID NO: 204351
  chr16:89927371-89927416
  hyper

SEQ ID NO: 238777 - DNA, 50 bp, Homo sapiens
  chr16:89984233-89984283
  hyper
gctgtaaatgggacgagtaattccatccccctcccgcttccacccttcag

SEQ ID NO: 238778 - DNA, 84 bp, Homo sapiens
  chr16:89984503-89984587
  hyper
agcggaaatggcgcgccgcccggggagggcgggagcagcgtcccgggtgcccctgtgaggatgagcgacgagatgactggaggg

SEQ ID NO: 238779 - DNA, 202 bp, Homo sapiens; identical to SEQ ID NO: 204352
  chr16:89989101-89989303
  hyper

SEQ ID NO: 238780 - DNA, 253 bp, Homo sapiens
  chr16:89990062-89990315
  hyper
gtgacctcgggctgtcgaggcgcagctcacgtcagtcgcgaagcctcagccccctccacacctgcgccccctccacacctgcaccccctccaccgggcctccgcaggtgcagctgggagccctgtctgggcgtggccctcttttttggggccgcggcatagccttgagtgagacgggtggggtaggcaggtttgggtggggtggggggttctcctcacagccgtgatttcctcggcccgaaccccccactgga

SEQ ID NO: 238781 - DNA, 257 bp, Homo sapiens
  chr16:89992768-89993025
  hyper
gcgggaaccgcattcgggtcctggaggggcttggaggccccagtctcgcagccccttcatcggggacccccgctcccacctgccttggccactgccctcaaagcccggccccgctttccccaggaccccaagcgctgcgcgaggtcagcaccaaggacagcgcccgggccgagcgcctggcctcgaacgccgggttctgctttgtgtttccaggtttttgtttttggttatgagaggaggcctggctctgtcgcccg

SEQ ID NO: 238782 - DNA, 123 bp, Homo sapiens; identical to SEQ ID NO: 204354
  chr16:90085456-90085579
  hyper

SEQ ID NO: 238783 - DNA, 110 bp, Homo sapiens
  chr16:90086088-90086198
  hyper
gcgccctcccgaccccggccgggcgtccggggctcctgcgcactcacttggcggccgcgcccgctggcgtcctcttgttctcttccaggtacttgcgtgtggggcgccga

SEQ ID NO: 238784 - DNA, 528 bp, Homo sapiens; identical to SEQ ID NO: 204355
  chr16:90088770-90089298
  hyper

SEQ ID NO: 238785 - DNA, 291 bp, Homo sapiens
  chr17:655679-655970
  hyper
ggtcccagcgggtcgggctcatgattccccggccccgcattcaccctcacccggtaaccccgggcgtgccccgcacacagttcacccccaccgagcgcctcccccgggacgcccaccacccagcgcggccgcaccacgcgaggcttccactcccacccgcccagctcgcgccacatacagtccctcaacgcgctcctgccgcgccgccccctccagacagcagcgttccggatcctagacgctttttgacggctggtcctccccagaaaatgcgccgtgtgagcccaaaca

SEQ ID NO: 238786 - DNA, 58 bp, Homo sapiens
  chr17:685406-685464
  hyper
ttcatccccaggacgtcccgatagaaacgcgccgtctggaagcggtttcccactttga

SEQ ID NO: 238787 - DNA, 236 bp, Homo sapiens
  chr17:900017-900253
  hyper
aggcgcgagagcacgcgcaacgcttcctgggaaatgtagttgggtgtcggattagaactacaaatcccggtactcaccgcgctgcagccccgaccgtgagggcgctttctggtgaatctgaatctcgtttgtctgtgacatggggaaagctgtccaagcccaattccattttcacaagaggctttctttttggaaacatgatagcggtctcgctggtgtgcgcaccaggagcgttg

SEQ ID NO: 238788 - DNA, 212 bp, Homo sapiens; identical to SEQ ID NO: 204361
  chr17:1011776-1011988
  hyper

SEQ ID NO: 238789 - DNA, 146 bp, Homo sapiens
  chr17:1082871-1083017
  hyper
ggggtcccgatcccgatcctggggtcccgatctccatcctggggtcccgatcccgatcctggggtcccgcccccgcccggcacacgtactgctgtagagggtgtcgatccaggacaggcgcggcaggccccggtggctgagcggct

SEQ ID NO: 238790 - DNA, 430 bp, Homo sapiens
  chr17:1173983-1174413
  hyper
tcctgcagccggggcgaggcggaggagccggcgggcaggaggcgcgcgcggccggtgcggtccaaggcgcggcgcatggccgccaacgtgcgggagcgcaagcgcatcctagactacaacgaggccttcaacgcgctgcgccgggcgctgcggcacgacctgggcggcaagaggctctccaagatcgccacgctgcgcagggccatccaccgcatcgccgcgctctccctggtcctgcgcgccagccccgcgccccgcgggccctgcggacacctggagtgccacggcccggccgcgcgcggggacaccggggacacaggcgccagccccccgccgcctgcagggcccagcctcgcgcgcccagacgccgcccgcccctcggtgccgtccgcgccccgctgcgcctcgtgccccccgcacgcgcccctgg

SEQ ID NO: 238791 - DNA, 91 bp, Homo sapiens; identical to SEQ ID NO: 204362
  chr17:1390869-1390960
  hyper

SEQ ID NO: 238792 - DNA, 182 bp, Homo sapiens; identical to SEQ ID NO: 204363
  chr17:1420195-1420377
  hyper

SEQ ID NO: 238793 - DNA, 78 bp, Homo sapiens
  chr17:1588187-1588265
  hyper
cagtcggcgccgaggtgctcagatggattagtgagacgaccaattagagttgcacactgcgccgaggaggcgggccca

SEQ ID NO: 238794 - DNA, 105 bp, Homo sapiens
  chr17:1613225-1613330
  hyper
tcgaggccccggccgcagtctccctgtgcgcacccccaccccagtctcagctctggagacgcccggcgggtctcccggcctcagcctcccacccctcgccctcgc

SEQ ID NO: 238795 - DNA, 337 bp, Homo sapiens
  chr17:1613690-1614027
  hyper
tccacgcccagtccctcgcctgggcggtgattggagcagccgcggggccgccgcccccggagccttggccaccgattgcgtcttgctccagccgggggagcggttcgggggctccgggcagtagaccatgccctggagctcggggggcctccgggatgttcgccaataggggtcctccccagctccaagcgtcctgaagcgctggagttgcagacctgggtctccagtctaacctcaactgacactcccgggccccacccacgaaccttgacctcttcccggctcccgcgactttcacctgctgagcgtcatcaccacccaccgccacaccctgcaa

SEQ ID NO: 238796 - DNA, 403 bp, Homo sapiens
  chr17:1619656-1620059
  hyper
ccgcctctccgggcgccctggctctgattggcaaggaggccacccttttgccgggcggaattgcacgaagccacgcccacccactgaggagccggccaatagacggacaggtgtggcccagccctccgcgtcagcgacccgcttagaaaagcgctacgtcaaacgagagtcctaaagagcaggcgaaagccacggcgtctgcgtttgcaatgcatgctggtccgtgtagttctcagcctgacaccgtcgttcccagaacccagcgcgctctgtgagttggcatttttaaactgagctcggaatccagcccggggaagtccttaaagggcgacagcccctccttgttggagtcgtgagtgcttcttttagacattccccaaactgactcgccggcctctgcggg

SEQ ID NO: 238797 - DNA, 231 bp, Homo sapiens
  chr17:1667771-1668002
  hyper
tgtcagggcagccacgtgcaagagcagctggctgggaacgcagaggtctgcggctcgaggcggggtttagaaagaaaaccaggctgcttcctgctgcccgtcctgccttaagctgagtaaactcaaaggcaatcttctttcatgcctcacgatattgtccagtggattatctgatttaatttgaaggacgagagccaacaatcacacaacgtcctcccaaattttctgatc

SEQ ID NO: 238798 - DNA, 251 bp, Homo sapiens
  chr17:1881120-1881371
  hyper
ccaaccagcggccgcgggccgcccgggtgggagccggggtcgggggcgcatcctgcatcctgcaccccgcatcccgcacctgcatcggagccccgcgtcccgcaccccgcaccctgcaccctggatcctgcatcctgcaccccgcacccctcatcccgcatcttgcaccccggatcccgcaccccgcatcctgcaccccgcatctctcactccgcatccggcaccccgcagctgcacgcaccgcaaccctc

SEQ ID NO: 238799 - DNA, 745 bp, Homo sapiens
  chr17:1901339-1902084
  hyper
tccgccccaggccgcgatcgatcccggcctctcccggcctcattaccgagggagagctgccggggctggcaggggagccagacggcggcggagggggcggggaggcctccttggctccctggcccggattaaatatttactatgttttgtttggcctttgggggaggggcggggagggctgtcgcattgatccggagctgcagggcgagggcggtgcccagacccggcgccccaaggcctcccgcaggccgacccgagccgagcgcgccctttgggcaccggccccgcccgggagggtcttctcgctctagagccgggggcccgcgctgagagatcggggttaccgcgcggggagccgcggccgcgctgggatccgttccctctcgcgggagccgccggccggggatctgcgcaccccacgcgccccgctcgggtcgggcctcccctccccgcggctgcccccgggccggccaccgctgcccagcgcgcaggtccctgccggatccccggcggctttcctgcccccactttacagacgtgaacgctgaggcggagggtgggggacgtggggccggctcgcctcctcctgggctcgccgggatgtggcctccgaggtcgccgcggcgctttcctgcccaagctggcgctgccggagcgcccgggccccgctcccctcacgggcctcgcagcacagacggggacaggggcggcctcgcgcgcacggggaccccggggtgggggtggg

SEQ ID NO: 238800 - DNA, 1252 bp, Homo sapiens
  chr17:1927172-1928424
  hyper
ccagccgcaggcgccgcggcttctcagcctcctggccgggccaggcgcgggggggatcccggcggggcgccacagcctgctcgggcctgggaggggagaggcagacgcagaggctggaacagctggtggcggggcccgtgggctcccggcgtgatcacctgccctcccagggcccgggggacggcgccccgcgtggcaaccacgtgggggcgcggcgggacttccccggtgcccgcaccaactttgccgcgctccgtaccgggccgggctgctggggcgtctagctacggtggtcgcgaagccagctgtcctcaagttgagctgtgcaccggtcgcgcacactggcggcacggctttcgcgtccctccgctcccagcataatgaaagtttgaggaactggacatcaggcgctggccgctccccaccctcagccgctgggtgcccagagcccatccctagcgatcagagcagaactgcagagaagacgtccgcgtccgggccccgtctggggagctagggcgcgcggggagcgcccgggccgcgcggtcactgaccgctggctgcacgggggcgccgtgcggactcggcctccacaaagcggcagaagcaagggcgtgtgcccgcgcagggaatggaggctgcaagtgcaaaactttatcccagcaaagcaaaggtcccaggaggccggctccccttccaccaccggccgctcactctggtctccgactgacccctccgggccggatctctaggcctggccactcgatccatggagaaaaccccgtgtctcacaactggccgctgacgggagctgagccccagcagcagcccctcggcgggtgcgcccggcaaaacccaccagcccgccgggggctacttcccagaccgggagccccggcgccgggcggcgcccgggctcgcggctctttccggagcgcattcaacttcaacttgcccctgcggctccaactcacctttgcgaagcatgttggccacggggccgccgctccgaggtcggcctaggcgcactccctcccggggtccagattcaaatccctgggcgccagctgcagctaatccgagcgcgtcgaggcgggggcaagccggggatccgctcgtgcccggtggcccggccccgcaggggcatggtgagctccagccccgcgccgagggcaccggcgcccgcaagcaaccgtggtgctgcccggcagccccgcgcgcttgctcagccccggggcgagcggcttgctcc

SEQ ID NO: 238801 - DNA, 295 bp, Homo sapiens
  chr17:1929078-1929373
  hyper
gtccgctccctgccccgtctcctccctggccagcgccccttctcccagtctcgacggctcttccccgcactgaacagctccagcgaacccggctgccccgcaccccgagtcccaggacactgttctttcgtggggagaggaggggagcaagcattcggaaagggccagctgcaaattccagggagaaggaaggacccgtgcgggttcgggtgggccgtctccgcctgggtggggtggcggcggggggtctctgatctcccttggtccacacagaccccgccggggggttcgcgga

SEQ ID NO: 238802 - DNA, 82 bp, Homo sapiens
  chr17:1933404-1933486
  hyper
tctgcgctctccgcgttcttccagcgctgtctttttagtaccacatgcgcaggcaggtgatggcggcgctggtcgtatccgg

SEQ ID NO: 238803 - DNA, 362 bp, Homo sapiens
  chr17:1957351-1957713
  hyper
tgcggggcggaggcggagcgtgggccgcggagatccggcgttcgcaggaggcttggtgcgcggcggggctgcacggggccacttccggagtagtactgcgagcagcggcgcgacagtgcggggtcccctttctcccagaagagacgtcacccacacaaacctgaccttcacgtggggcgcgggaccttgcggggtcccagccgcaggcgcccctgttgtttccttcgggcgggtgggttggagaagaagtccacgcgggattcttcaaaacggcgtacagggggattctagggccccatggttacttctttggaccccccggaggcgctgtccagccacttccagtcgccctgatgactcgt

SEQ ID NO: 238804 - DNA, 559 bp, Homo sapiens
  chr17:1959075-1959634
  hyper
ctcccgccctgtctgcagttggaaaacttttccccaagtttggggcggcggagttccgggggagaaggggccgggggagccgcggagggaggcgccgggcccgcgcgtgtagggcccaggccgaggccgggacgcgggtggggcgcaggcccgggtcagggccgcagccggctgtgcgccgtgcccgcccggggcgctgccccctccctcccctgggagctgcgtggctcccccctcccccccacctgcttcctgcctcagcctcctgccccgatataacgccctccccgcgccgggcccggccttcgcgctctgcccgccacggcagccgctgcctccgctccccgcgcggccgccgcccgggccccgaccgagggttgacagcccccggccagggcggcgccagggcgggcaccgcgctcccctcctccgtatcacttcccccaactggggcaacttctcccgaggcgggaggcgctggttcctcggctccctttctccctacttgggtaaagttctccgccctgaatgacttttcctgaagcggacattttactta

SEQ ID NO: 238805 - DNA, 91 bp, Homo sapiens; identical to SEQ ID NO: 204368
  chr17:2206903-2206994
  hyper

SEQ ID NO: 238806 - DNA, 248 bp, Homo sapiens
  chr17:2303774-2304022
  hyper
acccctccccaggcggcggctctcgcggggagccgtgcgctgccaggctccgcaggccgcccgggagggggccctgtccgcggtttcgcgtgggttcggggaccggggtcactcgcttccccttccccagtgccccaggggcccagcccggccgctcaccacgtgctctctgttgttgctgcgcttgccattccaggaagcgggccgcctccagtagcgtctctatgctcatcgcgccgagagctgcc

SEQ ID NO: 238807 - DNA, 72 bp, Homo sapiens
  chr17:2627362-2627434
  hyper
attgtcggctttcccggggaagggcgtggcccccgcccctcctgtctcacaggcaggtgggaccaggccagg

SEQ ID NO: 238808 - DNA, 496 bp, Homo sapiens
  chr17:2658619-2659115
  hyper
gtagtttacttctttaggcatcacttcctgggtagaacgggtttcctaagggagtaaggcacagaacgaggcaatgggccgcctggtctctccgcgcgtcagtaggactcggggaaccagactccgcccagtgctccccagaaacccggctcctcggcgcggcggggagagacccggacggggagaggccgctgtcccgcccgttctgcggggccggcgctgacccggctccagccgcctccaggggcggggtctgagcgccgcgccctccccgcgccctccccgcgccctccccgcgccctccccgcgagcgcgccccggacacccgcctgcggcagccgagcctcctccaccgtgcggcccgcggagggcagggagcggccgggcgaggcatggcgggccgccgggcgccgggggagaagcgctggcagctggtgcgctggtgagtgggcgccgggcggcgcggggcctaatgcgggagcgaaccccgaggccc

SEQ ID NO: 238809 - DNA, 87 bp, Homo sapiens
  chr17:2679493-2679580
  hyper
cccaggcagcggggagtttcaggggtctgagcagccctggagactcgcagcatagcgttctgtaccccgtcccgggtcccgcgcaac

SEQ ID NO: 238810 - DNA, 402 bp, Homo sapiens
  chr17:2756327-2756729
  hyper
gaagcggggtcgccgtgaagttggttattgaacccatgtggagtcaaactcccagggccgggagagccagtgttcgcggggagccgaccccagcccactctgcatcccagctcggcgatccttgcgccgactctgcggggaggcgggggcagaattccgcctcgttcctcccatccgcaagctcccacccggggacccgggcccgggagctgcgagccggggcgggcgccgggctcaggtgccccctgtaagcgctgggcggccgggaggggacggggaccgcgcgcgggcagtttcgtttggacggaggaggacgcgcgtttcctcttggtgcctgttttctctccctctgttttaaaagcagtgacagcatcggggaagtatccggggccgggccgggga

SEQ ID NO: 238811 - DNA, 856 bp, Homo sapiens
  chr17:2756969-2757825
  hyper
gtcccggcgcgggcggcgcgtctgagcgggagccgggagccgccggcccgggccgcgccccgagcgagcctcggaaatgcccgcgccgggggagcggacggcggctgccccgcgggccccgaggagacgctgaaggtcgccgggagggaggggagagcgcgcggtcacctgacccccggggcgcacctaggcggggcggggcccatgcgaggcggaggccgggggccggggcgcgggctcaggggccgggtgcggagcgcgcggagccggggctgcggggacgcgggcgggcgaggtcgggcaccgcgggcggcctcgccatgtcccagcccgcggggaggaggcattgccgaaaggcggggatccgcgccgccgtggtgctcatcggactcctgcacaaatcccggaggcagaataaagagaaaaggtaaacccctgcagcgccggccgcttccctccgctctcctgctgcatgccagttttctttggggtggacttttccgatgggtgtttggttccgtgttggttagaaaaaagcctcctctccaggtaccgtcgtgcgaaccgagttcggagcttcgccccggaccctggctggtgcgaggagcctgggcaggaccttggcggaatcggagggccgctgggagggcgcatcggggtggatccctgacggagggaccccaagtccgtcgcccccagaccctttgcagaccgcgaccccgttccccaagcctgcagccgcggatgccattgatccagcccaggcggctccatgcgccggtgttgccatttgcttcctgcaacttggctgagccctcgaggtgcctgcctggccgagatccgcttgctctgcgct

SEQ ID NO: 238812 - DNA, 576 bp, Homo sapiens
  chr17:2951983-2952559
  hyper
gtaggaaagaaggacgctttcaggaaggatggagggcccaggacgatttcgctccccggtggacgtggagggcgggcagggtcatcctttctcctgaaactggggagccctacgaaggggttccggagaagacgcacggatctcgaatacctccccgcccggctgccactggatggcgcgcgcaacctgcggaaccacagggcgacatccagctgcgggcggcgaagggaattggagcgtggacctctccaggcttttcattcgctggttctgccggtgtcccgccttttccatctcctcattggctgtcgcctccgggcctgcgactttgctcagcccctccggggagtggaatcgggtgtgcaacaggccgtgaggtccggctttgcgaggaactcccattggtcagtcaaacaggagtcccaccctcctgggcttcccattggttgctgtcccaccgctgctctcagtttcccagcggctggggatctgggttttctgggggtggaggggtgcagtacgctgctggaagctcgtttctctttccaccgttgtgtgcctcgggctcgcggtcaa

SEQ ID NO: 238813 - DNA, 258 bp, Homo sapiens
  chr17:3539485-3539743
  hyper
tgccgagggtgatcggccgcgcagccattatctccctgacccgcgcagctccagtctgcagccagcggccccacaagtccgcgctcttcgcccaggggggcggggcaggggcggggagtcgcctgccaatctttcagccacacccaacatggaggcttctcgtcttcccactggccggggaaggcgagcttccacgcaacctctcggcgggccccggctataggcggagaggcggcggaaggcgggacctaaaggggg

SEQ ID NO: 238814 - DNA, 142 bp, Homo sapiens
  chr17:3571907-3572049
  hyper
gccccgctcggcccgccccctcatgaatagttaacaaacctccagccaatcactggccggagcgccactccgctttcggaagtccctgcgcgtgcgcagaaaagcgggcagagggcggagcgtgtccggggcgcccacggcg

SEQ ID NO: 238815 - DNA, 54 bp, Homo sapiens
  chr17:3572297-3572351
  hyper
tggtgccaggtctcggaagctccagggggagggggcggcgtgaacccaactcac

SEQ ID NO: 238816 - DNA, 126 bp, Homo sapiens
  chr17:3599032-3599158
  hyper
gctcacagacccccagctaccgggaaaaccgcgtgcacgcctgcgaattccaggaccctggagaaggacgcggcggctggcacccgccctgcccctcccccgccttcccaaaagtccgcggagaac

SEQ ID NO: 238817 - DNA, 124 bp, Homo sapiens
  chr17:3867984-3868108
  hyper
atctggccgagagctggggcggtctgcggagcacccggctctgggctgcgcgtcgcctcctctgggctctcctgggcccggggcgtcctgcttcccagctcgaattctgcgaagtgactccaga

SEQ ID NO: 238818 - DNA, 114 bp, Homo sapiens
  chr17:3868443-3868557
  hyper
agcctccgcctcagcgctcccgagctccacccgccccaggagggccaggagaagtggcagcgggtcagaggaggaagtcgcaggaaggcagaaaccactcgccccgccaaaagg

SEQ ID NO: 238819 - DNA, 98 bp, Homo sapiens
  chr17:3908049-3908147
  hyper
ctcctggaaagcgccgggacgcggcggctctggctcggcagcgccacccggtggccggagacagaggcggccgggccgagccgggagagcagccgcgg

SEQ ID NO: 238820 - DNA, 290 bp, Homo sapiens
  chr17:4046209-4046499
  hyper
ctggctctgcagccgccgccgccgcctccccgcctcgacctgtcaacctccgacagcagctggcgggcggggacgcggaggagacgacggcggcccctgcggcttccggcttcctggccgtcaagcgacgaccgctgtcgcaaaggcgccgtcacgtagataggcggcctctaccaactcacgacagctaggcggggagcgccgcctcaaagggtgcaaccttgatttcccagaggacgagtctgtctcagtatctacgtcattccgtagcctccgctgccgccatcttt

SEQ ID NO: 238821 - DNA, 148 bp, Homo sapiens; identical to SEQ ID NO: 204378
  chr17:4402640-4402788
  hyper

SEQ ID NO: 238822 - DNA, 719 bp, Homo sapiens
  chr17:4544584-4545303
  hyper
aattccaaggagatcgggtagcggcaacatttattgagcgcttactgtgtgccaccgactgccctaaagccccccacccccgtggcctccgcgcgctttgagcccaatgcgcgggcccttggcaaagagaatcggccagaggccaacgggggcgcatgtcctccccggtatttgactgactcggagccaggggcgcagcccaccccgcccggctctggggagctcaccttgccccgtgcgggccacagtcgcttcccgagcgccgcctccccgtgctggccgaccagccacagctgcacctggttgttggaaccggcatagagcgaggccccagtggacacgcggatgcggtagagacccatcttgctcaaagatgtttcgctccttctggtggagaagggtggacgagctaaataacccagcctgagaccccgccctctcggaggtcgcttggggtcggaatgtgggtggcaggtctccaatcaactccgcctaccgctggggcccccagctccaaggagcagagcttcaaggggcagaattcagccccagtccaaaaggcggtgtcctggcgagagcagggagtggaaaccactatcttgacgggagggagaaaaagaaaaggatttggaccgaaaacacgcaggaagagggaatcaacgcctggtacagcaggcaggcgaggtgggggtaggagttatgcacgtgtgtaccacgga

SEQ ID NO: 238823 - DNA, 98 bp, Homo sapiens
  chr17:4607657-4607755
  hyper
tgttaaaggtacacgtggtccggacaaaaggcgccaaagtcggaacgatttccatttagcggacggagtcttgggacatcttcgctgtaggaatcaat

SEQ ID NO: 238824 - DNA, 139 bp, Homo sapiens
  chr17:4614298-4614437
  hyper
tactgggctctcccgtgcaggctgcgatgcagggatggaggaaggaggagcaggtggctggccccgaggggtcgtgtacggggaggctggatgccgggacgggggggatccactccagactcgcgccaagccaatggaa

SEQ ID NO: 238825 - DNA, 118 bp, Homo sapiens
  chr17:4634531-4634649
  hyper
gtctgaatggcctcgggctaggggatattccactgtcgcctctgactacgggtggtcctgtggctgaggcgcagcgggccctgggagttgtagttcatcaagcggaccgaggaggcga

SEQ ID NO: 238826 - DNA, 172 bp, Homo sapiens
  chr17:4843519-4843691
  hyper
gatcgagtgagtacggctcgccaagttggagcgctctcgcgatagacacagcaactattcagctgcgaggggacgggagaggtggtgagcactctcgcgagatttgaaggagcggcggaggccagagggaggagaggtttgtaaactaggaggctccgggtttccgggcact

SEQ ID NO: 238827 - DNA, 354 bp, Homo sapiens
  chr17:4853556-4853910
  hyper
ccgagggcagagacctacctccccgcagtgctacaagtggggcgccggaagagccccaggcgtgcagaagctcacaaaaggccacccgtcctcggtccattcatttttgttcactgttgattcagccccattcattgatgggctggggccgtgcgctgagcgcccacagtcgatggggaaaggggctctgaccgacagtccccacgccgggcgacaagtgctgtcccagcgttatcagtcgggcgccttgccagccgaaagggcctgtctaaattcgtttcctgtcccctaactcatcccggcgctggctggcctggagagggtaggatggggcggcgccgagaatggccgtta

SEQ ID NO: 238828 - DNA, 105 bp, Homo sapiens
  chr17:4871286-4871391
  hyper
ctggctggtgcagcgatgtttaatggcaattcgtataaaccaagcccatgcacaagtagaaagtgcccgtggagccggcaggaggcccccgccgcgctagagaac

SEQ ID NO: 238829 - DNA, 90 bp, Homo sapiens
  chr17:4890353-4890443
  hyper
agatgggaggaggcccgtcgggctcggctatgtgcagtgaagctggggttggggtaaggactccgccccagggcgcaggtgcgcagtcct

SEQ ID NO: 238830 - DNA, 42 bp, Homo sapiens
  chr17:4938972-4939014
  hyper
gttgtttgttgttttaattaattaattaattttgagacgggg

SEQ ID NO: 238831 - DNA, 125 bp, Homo sapiens
  chr17:5000770-5000895
  hyper
atccacggccactccactctcctgcagtaccgcggacaagaacaccatgtactcttcacaggcaggtgtcttctggtggacccaactctgttggtacttgtcgtctccaaaaagtccccaaatgc

SEQ ID NO: 238832 - DNA, 122 bp, Homo sapiens
  chr17:5001075-5001197
  hyper
ccggcgggtctttctgccggggaccagtggggtcggacgctgagggccgaggaaccccgcccccccaccgcaccgggcgggctctggggcgtccgcggaggctcccgcgtgcgtgtgcgggg

SEQ ID NO: 238833 - DNA, 256 bp, Homo sapiens
  chr17:5094998-5095254
  hyper
caggcgccgcggccgccagctctgtgaacgcagcggggtctcacctccaggctacccccaacctcccgctcggtcgggggcccctccacggccgctatcactgggtcgcggctcctagcgccaccatcttggaccccgcgcctgggccaggcgagaacttccggtgcgctccccgggactgcggtcccccagtccgcgccccgcccagccgtcccccgtcggctccagccaatccgcgcgcgctcccctggccgtc

SEQ ID NO: 238834 - DNA, 394 bp, Homo sapiens
  chr17:5322761-5323155
  hyper
aggaaaagctctccgccgaggccaaagaccacgtttctcgtcagcaactgcggcggcggcgacgaaggcaacgacgaagaagctggtttctcagcttcggttggactctggtttttcagtccctcccggagccgcaagaacacgacgtggttaggaagccaggtctgccacagctcgccgtcgcccaccggtccctcggcggccgccatcttggcccaactgctcccctcactccagttgctcagcccgccgctgagcacagccaatccgcggccgtccactcactgtttcggccaatcaccgagcagacggcccggaagctcgagaggctcgtgccaggtcggggggcgaaggcgaggccagcccaccaagcaggggcgtcaccaagggaaag

SEQ ID NO: 238835 - DNA, 106 bp, Homo sapiens; identical to SEQ ID NO: 204384
  chr17:5389578-5389684
  hyper

SEQ ID NO: 238836 - DNA, 34 bp, Homo sapiens; identical to SEQ ID NO: 204385
  chr17:5390233-5390267
  hyper

SEQ ID NO: 238837 - DNA, 196 bp, Homo sapiens
  chr17:5972267-5972463
  hyper
gcgagtctcttcccgctctgggcgccacctgactgacccgcgtaaggagggactgtgactggtccccaggcaaacgctttccctgccacctgcacctgttgcaagccagctcctcggagccaggccaagcagctctgcccctagcgggagtcggaggcatgaaactcccttttaggaagacggagtaagaggcacc

SEQ ID NO: 238838 - DNA, 756 bp, Homo sapiens
  chr17:5973337-5974093
  hyper
tgggagagtggcggcgtgctctcctctgcgcggcagtgccccgtgtgtttgtgggtctgtgtctgggtgtgagcgtcatggtgcgtgtgttagagcccgtggggccccggtgaaaggctgtggctctgggtgactggtgtgtgtgtgtgtgtgtgtgtgtatcagagtgggtggcggcgtctctgctcggcagtggcgcgtgtggcccgccccgcgcgcgtgttctcgcgggccggggcagggcgtgggccccctccggcggagccgcgacccctcccccgggcggcgggaggtgcgcaccggcgcctctaggacccggcggcggccggccgctgtccccgggccgcgcgagtgagcatgtgcagagcccggcgcccgctcgcccgcccgctgcccgccccggctccgcgcccgcccgcccgccccgccgttcagcccggacgccagcagccccggggagccaggcggcggcgccctgtgcccgggcgcgtgggtccgcttgccgcgggcggccggagacgtgcgggcgccggggcttctgggctccgggcactgcggggggctgcgggctcggcgcccggggaaggcgggccatgggcgcgggtgcgggcgccccagccggccgcgatcgcggggtgagtcctgtctctcggcgctccagccggacccccgcgcgggctgcgagcagggtgttccccttgccgcgggcaaacaagtttgtgcagacgcggttgggagcgcggcggggctgcacct

SEQ ID NO: 238839 - DNA, 204 bp, Homo sapiens; identical to SEQ ID NO: 204386
  chr17:5974393-5974597
  hyper

SEQ ID NO: 238840 - DNA, 134 bp, Homo sapiens; identical to SEQ ID NO: 204387
  chr17:6347035-6347169
  hyper

SEQ ID NO: 238841 - DNA, 581 bp, Homo sapiens
  chr17:6347453-6348034
  hyper
ctgaaccctgtgcgcgctccagggaggggacccggtgtgcgatgcgcgggggctgggctagcaagggcagtggcgcgagcgggacgcaggatacaaagcccggagccacgaggctggcggcggggcgggggccggagcgatgaatgggcacggccgggccaatccaagcgcagcatttgcagccgcgagagagggagccaatcggatccccggggcggtggcggtggcgggggcggggacggaaccaatcagctgtgaggacggggccgggggcggagccgcgcagagtttcaaatcggctgcggtgggcgaggagcagctgtgctgcggctgtgctcggccttagtggtgtcgggtgagtgcgggctgggcacaagtttcgcccttgttgcccaggctggagtgcaatggcgcgatctggactcaaaacaatttttttgttcggaggggagggcatcaggttctgttcacaggggagggcatcaggttcggacacgcacggcctgtggggtcgtctgggtaccacaagaagtcggatcgaaatcggggcgtctggtgggaaggccggggtctgggcgggt

SEQ ID NO: 238842 - DNA, 70 bp, Homo sapiens
  chr17:6399733-6399803
  hyper
gagtcccagcaaatgttccccgggcctgggctcttctctccactgccccgtgaccagataattcccacag

SEQ ID NO: 238843 - DNA, 317 bp, Homo sapiens
  chr17:6459172-6459489
  hyper
ggggcggccagcagccggcgcggcacggggctcccctccttcccgagaaggaatctgggtctctggactgagctggtgacgggggctggggcggggggttgtggcgtcctggatggagagagctgcaggagcagggggcgcgtcccggtttgcgttggggtgtgggacgaagcggcggccgcgggacatccccttcggtggcgaagcccgggtctgcccggggcctccgcggggtgcagagggctcccaacggcgggactggcccggggcgccgcagacctggccctttccggcggggccgtggagaaggggacgcg

SEQ ID NO: 238844 - DNA, 93 bp, Homo sapiens
  chr17:6459729-6459822
  hyper
ccgggcggcgggctccggcggcgctacgcgcgctcctcgcgcttcccgggcccggccccgaccgcctccggccccgaacggactccgagcgcc

SEQ ID NO: 238845 - DNA, 192 bp, Homo sapiens
  chr17:6460089-6460281
  hyper
ccaggggctcagagacgcggagacagcccgagacactgcgggccagagacggggccctggactgggagaggggcgcacagactattagacagcgctggagagagacgctcctagggccagaacgccgaggtggagggagagagagagaaattcagaggagaccagagacccagagcccggctccggctccgg

SEQ ID NO: 238846 - DNA, 241 bp, Homo sapiens
  chr17:6544040-6544281
  hyper
ccatagcaacaggcgcagggcggcttgggagcctttgaggccctgaactatttaaggatccaggtgttgcaaggcggtaagttttgcagccagtgtccatgaggtcggggctgggactagattagggtagatctaagcctgggcttgggagtgcagctagcgcagaaagatctgaggaactagagcaaaaagccatgcggatggattgtggtcgtcagaggctcccgtagtctttagcggc

SEQ ID NO: 238847 - DNA, 389 bp, Homo sapiens
  chr17:6554828-6555217
  hyper
atagcgacagcagcggccataacaaacgaagacaccaaaacgccaccagcctgacagagcaaaagcccagagacgcgggcgaagttccggaaaccacggctccctcttccggtcccggggcactgtgggatatggggcggggcggctccgcccatccccgaccagccctgggatggctccacccgcgctggctccaaaatagcgagggggcggggcccgggccgtgggagcgcctgaggggcaggagtccagtgttttagccttcgaaggaccatggtgcttccacgtcatcgtgttgtggcgctcccggctatggcagtaccgtagttttcctctcttctgcctgcggtgaccattgggctgtagggtgccccgaggcctccctggcc

SEQ ID NO: 238848 - DNA, 76 bp, Homo sapiens
  chr17:6617063-6617139
  hyper
ctctgaagggtcccggatgaaactctctgcaggcctctgggtctctcaggtctatctccccgatctccctctcctt

SEQ ID NO: 238849 - DNA, 127 bp, Homo sapiens
  chr17:6659262-6659389
  hyper
gggaactcctgagccgagaattctgaagatctcctccctccctgaagctgtgggctgggccatcggaaaactttcagttttgtttccttgcctgcaagaaacgaaactcaaccgaaagcctgcagag

SEQ ID NO: 238850 - DNA, 497 bp, Homo sapiens
  chr17:6679233-6679730
  hyper
ggtcaggatgggaaaggcagcgaactgaaccgttttgagccccaagttcggggccgaatgtcttccctgtgcgcagaagcaagggcgggggcgtgccatcctcacccggagcgccggccgagcctcccgcctcccaacgcctggccagggccccgtctcgccctctgcacatgggatccactgaccaggcaactgcaggtttggggctctgcgacccgggggcaggaacagagccttgcaggcggcagcgcgtcacaaaggcggccggagcttggcatttagcttgggccagagcaaggcgcagacccggggcgcccatggagttggcgtcggagcaacagctgcgcgggcggagcaggtaggcgcgctccagtccctgcagcccgagcggggttcagcgaacgggtaacgggagaatgcgggccggagcaggctggggtggcggtgggatgccccgaggcccgcggcggggaggcgggctgctctcatcaccccct

SEQ ID NO: 238851 - DNA, 490 bp, Homo sapiens
  chr17:6734926-6735416
  hyper
tgcgggtaggggtcggtggggtggggtcatggtttacttacctcagcgccacacagaaccactacgcaagctcgggatgggagcctccttaccccaactggagcttccagctcttgcagaacagagaggtaaacaacgcggtctccatgacaacaagtgacgcgttgccagggcaaagagggctggttccgccactgagcagcctggccaaaggcttagcgcaggcgcaaattctgcggaccccagagccagagacccaggagtgtggcgtgtgggaagggtagggccagatgctccggccacctcaacctaccgcgaagacgcggggcaccaagcagaagacagcggccaaagccccgagctgggagtcaggagacctgcgtctagtccgagccctcccgcgggcgggatcatctcgggtcgcgctgtaccccggctctcagacttcccggctgtacagtggggttgggctgggcgatgcctccaggac

SEQ ID NO: 238852 - DNA, 273 bp, Homo sapiens
  chr17:6915580-6915853
  hyper
actaagagcccatcgccccagttcccaggagttccgccagttagactttttcccccatggcctcgctaaggctagttcctcgtcacgtgacgtgacaggcttggtcacgtgacataccagctccttccattcccgtgtgcggggggagggggaccaacaaaccggaggccctcgctcttccaatactcacgccctagctacagaggtcaaggaaggtttccccaggagcagttttggtttcagacggcgccgtctcccgcgaaagtcctgaga

SEQ ID NO: 238853 - DNA, 44 bp, Homo sapiens
  chr17:6926239-6926283
  hyper
accccgccctggactcgccatctggagagcgagggaggaaggaa

SEQ ID NO: 238854 - DNA, 434 bp, Homo sapiens
  chr17:6939629-6940063
  hyper
gtgcagaggtgcggcgtccagaacccggctcctgcagaggctctgggtggcagcagccctgttaccgcttagatggcgcgcaggacagagccccccgacgggggctggggatgggtggtggtgctctcagcgttcttccagtcggcgcttgtgtttggggtgctccgctcctttggggtcttcttcgtggagtttgtggcggcgtttgaggagcaggcagcgcgcgtctcctggatcgcctccataggaatcgcggtgcagcagtttgggagtgagtgcggcgcctggatctggcggactgcgaccctcggaagggagagggaatgcggcgactgggaagtggaagggcgaggggcgggagatgctgggggggagacccctgagatcttctcgcagcgccccttccacttcctcaggcccggtaggcagtgccc

SEQ ID NO: 238855 - DNA, 954 bp, Homo sapiens
  chr17:6945588-6946542
  hyper
gccttggtctgccagccacccgcagaccagccgggcgcccgcatcccccatcgcagccacggccaccaccagcgctgctccgtatccccccaggccccggtctaaagcgtggggagccaagtgcacgtaaggaacgaagtacccgcccccaaccagggctgtgcctagagcaaagattgagaaggcccggcgtgtgaacagactcaggccgagggcagctaggggactacgcggtggggctggggggtctccaggaaggaccaggggtagcagcagggcgccacagggggtgaggtggagggtgatcgcgccgaggaggagcagagcgccccgccagccgaaagtatcgagaagaagctgcaaggcgggcgccaggagcagcgaggaggccccgttgccggtgagcgccagccccaccgccaagactcgacggcgggagaagtaacgcgagagggtgcctagggcgggggcgaacaccagggcccaaccaaagcctgcgaatgaataggaggggatgggggccggcactggggacgcccgccccagcattcccagcccggctctccgcaccaggcccccgcctcgttcgctaccccagatcccaacaagctcctgtcacctccttcaccctgaatgacccgggcatcccacttccctcaccagcgaggaggcccaggccgaggtagagatgcagcagatcgctggcgaaagccgagaagacgaagcccagcgaggcgaggacgcccccaaccatcaccacggggcgggccccccagcgcgtgctcagggcgctgcccacggggcctgaaagggggcggagtcaacggaagacacgcccccgggcccccaaactctctccaacacttctcattggctgtttgcctccctcgaactaatggttcttctccttgacctcaagatgcactcttttctagagccggttgccctttctca

SEQ ID NO: 238856 - DNA, 31 bp, Homo sapiens
  chr17:6947309-6947340
  hyper
atccggcaagccgcgcgtgaggccagacgcc

SEQ ID NO: 238857 - DNA, 182 bp, Homo sapiens
  chr17:7137843-7138025
  hyper
tctcctcatgtcacgtgacttaaaggcagccaccccgcgctcctcagccgccctccgtcacgtgatcccctcccaatcacgtgaccgtctgactccgcctagtgcccccgccacatgatcgctgccttcagcaacggtctcccagcccccaaacgtgtaccccagccgaggtcctctgagca

SEQ ID NO: 238858 - DNA, 105 bp, Homo sapiens
  chr17:7145849-7145954
  hyper
ctaacgctgctagcgtagcaccaccaactgaccggccccctcacgccattagcgtaatcgctttggaatcaatttgtgggctacgcaggcgacgtagcaaagacg

SEQ ID NO: 238859 - DNA, 167 bp, Homo sapiens
  chr17:7146325-7146492
  hyper
cggaggaacactgcgggacttgagttaaatcatgtgatctcaaagagggcggagcgtcacgtggcgggtgcgcgaagtagggccggcttgggagggcgccggggaggcggggccggctgggcgacagctgggagggggaccgacgccttcccggacagcggaggtcg

SEQ ID NO: 238860 - DNA, 258 bp, Homo sapiens
  chr17:7155207-7155465
  hyper
ggggtcctttagccgctggggaccggggctgcagcctctgcagctgggtttcccactctgacaggcgccattttaccgtccaaaggactccctcttcctgtctttccccctcctcttcccctttgacactacttccggtggtgacgtgtattcgcttcaccgggactaagttcctcctgcgcggtctatggcgggtaggtataaggaaagccaaaagcactccaagcgaggctgcagtattgcgcacgcgcagaaggt

SEQ ID NO: 238861 - DNA, 105 bp, Homo sapiens
  chr17:7155683-7155788
  hyper
ggggcgccctccgcgtgagcgcccccctgggaatattgaacataatcacctctcattccagactatgttaggtcttaatggtgggaggacgcccgagtgctcggc

SEQ ID NO: 238862 - DNA, 1003 bp, Homo sapiens
  chr17:7165742-7166745
  hyper
ccgaggctgcggtgcgcagcagaggtggctcggaggtgagccagcaggtgcgggcggacaggtggggcgcacctgagtatatgtagggcgtcgggggcgcggcccgcgcgccccgggagcgcgggagggggaggcgggaccggaggggcggccgaggatgacctgacgtcaccgaagggacactcacctgaaccggaagtcgtggcccccacccctccttgcccaggtgaggaggaagaaacctgagcaccagggtcacgccccttcgcttgcccggttttgaccgccgctggggaggaggcggtggctccccaggagtcccaagctccgagtcagcccctccggactggatttccctcgaacaccgggaagccccttcctttcttcccaacaggtgcgcctgggacgctgcggggcgcccctgacaagcctcggcgccgccctttccccgccgggttctgtccaaagtgctctctcctcggccctgctttcgcccccacccgctgctctccttttttttcctgtctcctaccctggtcgatcccaccttcgggggccctggctcgatccctgagagtcgcccccttcagcaccctcttcagtgtcccggttctctggctctgctacagacacccggcttagcgtggctccccaacagccccaccttcctgtgcccccattccaacccaacatgacttacagcctgaaccctttgcactcaacctccccacctaccactgtcccctccggcatcaaggctcctaactggaggaagaaaccactgggacctaaagccggccgagggtggggagcagggtgagggctaggtcagagtcttggccacacccatcgttcccctcccttagagtcttttcagacctatcctccacctttcccacccctcccccacactcgcccgtttctctttccctcccgggcctgggcttggactgccaattgctgtgcactctgtcacgcctcactgttccgtcctccctataat

SEQ ID NO: 238863 - DNA, 133 bp, Homo sapiens; identical to SEQ ID NO: 204394
  chr17:7184885-7185018
  hyper

SEQ ID NO: 238864 - DNA, 87 bp, Homo sapiens
  chr17:7198333-7198420
  hyper
cagtgagtagcaccgctcgcctccaccctcgagaccgaccttgcccgtatgctgccaggtgcagacgccttccggccaccaccgccc

SEQ ID NO: 238865 - DNA, 55 bp, Homo sapiens
  chr17:7199968-7200023
  hyper
cggccctttcagagttgaagattcggatttccggggcatcgggcacagtggacag

SEQ ID NO: 238866 - DNA, 99 bp, Homo sapiens
  chr17:7218861-7218960
  hyper
ctctctttaatttcgcgggcccacctggtggcaccccaggggacgcgggctccggagaggggcgcgcgagagagaggccgaggcggaggctctgagacg

SEQ ID NO: 238867 - DNA, 130 bp, Homo sapiens
  chr17:7232755-7232885
  hyper
caatgaagcagcccgcgctaggagctggggacgaccacgatgagaacagaaggacacggggtcgggagcctcgctttacggcatagcgaggtgacggagcggctccgagggggacgaagacctgggcagg

SEQ ID NO: 238868 - DNA, 491 bp, Homo sapiens
  chr17:7284208-7284699
  hyper
ggggcttctcacagtcggggcgatctggtctggaggagggaggggccgccagtcgccctggggaccgtcaccttgtcccactagggaactcggggtgcggccctcgccggccccgggccagcggccaggtccccgccctccgcgggatttactcctgtcccgcctcctcggatttagcccaggcagcctgggaggttccgcagtcgccgcttccgccttgaccaggtgagggtccggaccgagcagggggcccgggctggggagagccggcggagcagccgtcgctgggggcgcgtccggggggcgctgggcctgtcctcttctcctgcgtccttccctcccgcagccgcgcttcctcctgtctcccttctgcgctccccgcttcccaccgagcgcgcagggccgggtcccccagggtcctgggctttctccttcccaacccaaccctgttcgcgcccggttctgagtccacctgcgcgtttccaactagg

SEQ ID NO: 238869 - DNA, 102 bp, Homo sapiens
  chr17:7307383-7307485
  hyper
gctgcagctggcccggccatagctgtagaacaggacgcaccggaccaacgccgcccaggccacccaagaggccagccaatcccgaccgcccatgcaaataag

SEQ ID NO: 238870 - DNA, 355 bp, Homo sapiens
  chr17:7340252-7340607
  hyper
atcccagtggtgtccgtggcgggctggcccgagggggctcggagccactcgtgggccggtccgctggcctctgagtcggcttccttctacctggtgcccggtggcggcaccgagcggccgtgcgcctccgcctggcagctctgttttgcccgccaggagctggcgctcaaagcgcgcataccagcgccgctgctgcaggcgcacgcggcggcccaggcgctactgcgcccgctggtggccgggacccgggcggcggcgccctacctcctgcggacgctgctgtactgggcgtgcgagcggctgcctgcgctctacctggcgcggccagaaaatgcgggcgcctgctgcctcgggc

SEQ ID NO: 238871 - DNA, 797 bp, Homo sapiens
  chr17:7348518-7349315
  hyper
cgaaggggcagtgacggggccagcggtcgtggccaggcaccagggctgcacttattctctcctcccccaggcgtccgcggctcggaggcggagggtcgactccgggagaaacttttctctggctatgatagctccgtgcggccagcgcgggaggtgggagaccgtgtcagggtcagcgttggtctcatcctggcgcaactcatcagcctggtgagggcgcgcggggggtggaggtcaggccagccgaccggccgggggcgtggctttaggcaaggccggaccagggacaggctgggggcggggcctgggacgagaccaggctgagatggaccagcctttggtgaagattggatcgaaatcagaccaatggacaagctctggccgtgggtggtggacgggcctggagtagaactgggtagggtgaaggacggacctgtgatcggaccttaaagtggggctggggacgaggcaggggctgggggacggacctcgacgtagggccacatgagtcctgagtgcccagggtggggcggagcttggtgctcaggggtcaataaatggcagcgggtggaggttcggggctgggtggattatgagctgaaggcagggccggggacagagctaggcggagggctaggcaggggcgggtctggtaggttgataggctgggagtgtagacggcaggaagaggtgtttctgagatagaggcaggtcttaaactaacgccgcttctgggaggtggacttggacccgagaggatggggctcagaaaaagggggcggcgttcccaggagaga

SEQ ID NO: 238872 - DNA, 401 bp, Homo sapiens
  chr17:7387161-7387562
  hyper
gcccacccgtctccgggggccgtttgacaaacatcggctacttccggacaagccactggtcctgccatcttggtttgttcatgcatattcagcaagagaactgcatattcatgagcaaccgcccttccccgggaggacccgccccgccccgccgccattaccgattcgcagagcagaccattttccagctggggggggctacgaatgagaggcttttgctgaagatgaaaccgttgtccaaactagaatgaaagcggcccaattttaccctcgagtcttcaaaccttaagcctcagtgcaaaagggagcagcgaggagaggcggtgggattaaagaaaaaaattcttctctccctgtcacttcaaaaggtcgcccaaccagcgagcggggggtttacccac

SEQ ID NO: 238873 - DNA, 201 bp, Homo sapiens
  chr17:7475777-7475978
  hyper
gaggctgagacctcgccccccttgcgtgatagggcctacggagccacatgaccaaggcactgtcgcctccgcacgtgtgagagtgcagggccccaagatggctgccaggcctcgaggcctgactcttctatgtcacttccgtaccggcgagaaaggcgggccctccagccaatgaggctgcggggcgggccttcaccttga

SEQ ID NO: 238874 - DNA, 343 bp, Homo sapiens
  chr17:7554499-7554842
  hyper
ttgcaccccatttcgttttgtttctagacggtttggtggggggtgaagctgcattcataccccttcctcttgttattctcccctgctctgacagcaccccttttcatcgcagttggggggcctaggatcggtgcatcttccgccgcgctgccagcaccccgcagcgcgtggtcgtgcaccccggaatctgcagcagctgcatatctgaggggggtctcctttgcccgcgccgccttcgctccccgtgcttttgggtgtgtggagggcttcagcgcgcggcgcccccgcttctccgcaaccccccgccccgcgcccggactcgccccgcgccaccaagatggtc

SEQ ID NO: 238875 - DNA, 53 bp, Homo sapiens
  chr17:7555284-7555337
  hyper
ccttccctccctccggctctcactagctccgcagccccgtctatttttagctc

SEQ ID NO: 238876 - DNA, 35 bp, Homo sapiens
  chr17:7591550-7591585
  hyper
tcggtagggggagcgtaggcgcttctcgccaagat

SEQ ID NO: 238877 - DNA, 138 bp, Homo sapiens
  chr17:7591824-7591962
  hyper
tcgcctctcctcccgggagtcttctgcctactcccagaagaggagggaagcacaggtgggtttctttagctctgcgtcggatccctgagaacttcgaagccatcctggctgaggctaatctccgctgtgcttcctctg

SEQ ID NO: 238878 - DNA, 53 bp, Homo sapiens
  chr17:7621507-7621560
  hyper
gcggtgtgggatcgcgtggtgaaccccacggtgcatgcgcctcaggctctagt

SEQ ID NO: 238879 - DNA, 48 bp, Homo sapiens; identical to SEQ ID NO: 204410
  chr17:7739847-7739895
  hyper

SEQ ID NO: 238880 - DNA, 49 bp, Homo sapiens; identical to SEQ ID NO: 204411
  chr17:7744964-7745013
  hyper

SEQ ID NO: 238881 - DNA, 66 bp, Homo sapiens
  chr17:7748393-7748459
  hyper
agcgcagccaccccgtccctctgaccggccttttggttccctgccacacacgtcctgactcccagc

SEQ ID NO: 238882 - DNA, 1098 bp, Homo sapiens
  chr17:7760505-7761603
  hyper
ccgtccgaatcctgcgcggggtgtaacaagcgctcagaccgcgcagcccaggctgcccgcccgcggaaccacagctcccggcagcccgcggggcactcacacaaagcccagaggctgccgggagctgcagttccccaccccctccatcttgctgcttgactgcccctcagtcccagaaccagagcccgtgctaaccccagcactggagctgctctgacgccgactgcaacagccattctcttctcgtagcagcatggtcggtccagctccggccatttgcccggaggcctcctctgggcctttcaacttcctaagcacctttcaggttgggtggtccgagatctcgcgagcgctcccgacctctttcctttcgcgagatcccctctcctccccctcctagtctcctcggcaacggcacagatctcgcgagcttctcctacttctctagcgctgtggctcactgaagcgtactacgccggatgtcttaagatatcgcgagacctttacctctggtttcttacacatcctttagaaactggaatttagcgagaatacattctttcatactgcctcctcccttgtttttctgtctcagagagatagtctgtcctaaatatcccatgtagcccaggccactgaattaaaacggagcgtattcgttctctgccccaccccgcaactcctgaaagcggcgcaactcaattacttgatccttatatgccccacgcgggactcatactacgtttcccgtgaacacgtgcagtccaaaccccgcccctgatatttatctcagtggacggtggccggaaaaggacaatggtttccatgtcagcggataaacgctctcccctcggctcccggacgcgacggaggtcgtagtagtagtgagtacgtgctgaggagcaaaggagtaaccaagagatccagtgaccgacagagcaagagccatgccgcgccggggcctggtggctgggccagacttggagtattttcagcgtcgctatttcacgccggcggaggtggcccaacataacaggcccgaagacctctgggtatcttacctgggacgcgtgtacgacctaacgtcattggcacagg

SEQ ID NO: 238883 - DNA, 41 bp, Homo sapiens
  chr17:7791235-7791276
  hyper
acgcctgcccaagttcgggaacctcccgctggggtggggag

SEQ ID NO: 238884 - DNA, 55 bp, Homo sapiens
  chr17:7835479-7835534
  hyper
cgcgggcgggtgacgtcatcgaggcgagagaggcggagccgtggacagtgggcgg

SEQ ID NO: 238885 - DNA, 199 bp, Homo sapiens
  chr17:7905914-7906113
  hyper
taagggctctggccggctgtacccacgcccccgccctggcctgggctggcaaggaagacctgtgggcgggcgtcaaaagggggaccggccctgtgacccctcaccgggggccgtgggcccgagcccccggacttccctgtaaatgtcagaggcccctccgctgggatagggtcggtctgagggcgcaggcgagtccctg

SEQ ID NO: 238886 - DNA, 802 bp, Homo sapiens
  chr17:7975836-7976638
  hyper
gcagagaacggaatcgcggtgagagcgcgcggcacagcctgcacctgcaccccgcggcgccagccctgccgccagcgccccagtaacttgccgcgcgcattcacagccagacccagggaaaggaaggttttttgtttttttgtttgtttggtgttttggtctctgaggtttttgtgttttttgcttgtttgttttgttttgttgaaaatagtagggcacagaatggggagaggagagacgggaagcgcgctcctaaatagaaatgctgttctcaatcagcaccgggtccaggtagtagtaggggatgggaaggcacttgttgcgctggcggatgtcgtgtgagatctggttcaggcgctggcggaacgcctctatgctcctccgcggggcctcctccacgaagtgaatgtccgggaagtgtcccaggggccgctgcgggcagagagctcgacagctgggaccagggccggccagcaccccctcctcctgccggtggccctggcccctccaccctttggtttcagtggcctctcactccctgctcccctcttgacgccgctagttatcctcccccatccccggcttctggtcccctccctgtgctcagagtcccccatcccgtctcgcaccctgtcgtcaggctctcggctgagggtccagagcaccagcagcgtgatgcacgtggtcttcacatccggcaacgtgtccatgaaggtctccagagtggtcagccccttagtctgaatcggtggattccgcatggacgctgggaagttgggcatccaggcggtgaactccatct

SEQ ID NO: 238887 - DNA, 52 bp, Homo sapiens
  chr17:7982656-7982708
  hyper
ggaggagcattcgcgcacacagaggctcagcggcagcgccgcctgcagccca

SEQ ID NO: 238888 - DNA, 56 bp, Homo sapiens
  chr17:8021862-8021918
  hyper
gtcataaatcacacgtgactgcagccacacgcaggtgagtcgcacacgcattccag

SEQ ID NO: 238889 - DNA, 100 bp, Homo sapiens; identical to SEQ ID NO: 204413
  chr17:8022390-8022490
  hyper

SEQ ID NO: 238890 - DNA, 40 bp, Homo sapiens
  chr17:8022550-8022590
  hyper
tctttgcttttgggtaccgcacttcgcataaaatggtaac

SEQ ID NO: 238891 - DNA, 211 bp, Homo sapiens
  chr17:8026217-8026428
  hyper
caaaggcgggactcgggtgaggatgccttggggccagggttgccaaccaagcttgtgtccccaccccagtgggaagccctgggacgcggaaacgggaagcttggggacctagggctagcggagggactgacctggtcccgggtccgctccagcagcagcagcctcagctcttccaggctgcggttgatgcggtcccggcgccgcttctcca

SEQ ID NO: 238892 - DNA, 240 bp, Homo sapiens
  chr17:8027809-8028049
  hyper
tgaattttatacatcatctccgaagttcgcttcctagtcgagacagggagcaacccgagtgcgctgggtgaatctgtccgactcaaccgaagctctgccgggaggttggagaggcgctctcttctatctaagccagttacattcaagtccgcgaacatctgcgcgcccactctgcggacagggcacttgtctaggctcgggcgagtcatagtgagatacgcaggagagacccagcttatc

SEQ ID NO: 238893 - DNA, 777 bp, Homo sapiens
  chr17:8055129-8055906
  hyper
tcttcccctactccccgtccaaccacacccctactactgagcattttctgagcgccaggggaaaagggaaggttgtggccaacagcaggaaccagcgctgggaacgggatgttctagtccgaagtgggctgacatcacaggcggcgcagggccagggactggagaacagagacacggggagcgctgaaagcctaatagggtcctggtaccggggcaaacctggggcccctcgagtaacgagcaagaagaccggggcatgcccgctgagagtcggctgtggggccgggaaagctgggacggggaggtggggacaagctggaggtaagatgagtgggtcaggagtgcagactcccggtgcaagatttcgaggaggacttcggtccttgggggcagggagagggtgggtagcggtaaggacgacagtgtgccctctgcctgggccgaaagtagcccatcagattggaagtggcagcggtccggctcagggacggagatcggccccaggatggccgcagagatgcctacctggtcgcaggagtgtcctccgcacgcctgcccgccgccgctccagcccgcagccgagtggaagctccaccgggcgggcggggaggcgggttgcataatgccgggcactgccccctcattggcctcttgccgacggagccgcaggccccgcccccgattggctggggatctcttcccggcgcctgattggctagtggtctccactaaggtcagggctgtgtcacacacacgggcgcacgtggacctgggtgc

SEQ ID NO: 238894 - DNA, 91 bp, Homo sapiens; identical to SEQ ID NO: 204416
  chr17:8093691-8093782
  hyper

SEQ ID NO: 238895 - DNA, 35 bp, Homo sapiens; identical to SEQ ID NO: 204417
  chr17:8191800-8191835
  hyper

SEQ ID NO: 238896 - DNA, 813 bp, Homo sapiens
  chr17:8229943-8230756
  hyper
aaagagaggagcctcgccctcttccccccacgccccggcccccaagcctgctcactagctctctcctcctccttccacccgcaaggaaccctccagcccacttcctgtgatcctttccggagcccttcagcctggctggctctccagccatctcggaaagcttctctttcctaaaccctccatactcgcaggttcagctacagaggtaactgcaggctcaggttctccagggtggccagcccaccagcccaccgtcccggtgcagcagtgcctctccagcgacagctccaccgcgagcctggcgggctcccgaccttgctccccagcacgtcgtctccaagccacggtctcaccaccctccatcagcctcgggcgacaccaaggggaacagagcgctggagctcctcgaagtcctcccgaccttagcggggctccgttcatcctcccggacgtggccaggccccgctctggccccgcgcccgcccctcccgcggggctgcccctgtctctctgccggagacccggactcagtgagtgagcgcagcgcggccatagggcttcctgcagcggggtctcagcacgtcttctggctggactctggggtctcctggcctggctgtgtctcctggttctcagcgctcgcctcccacgcggggcggagtatgggagtgggctgctcccgcggaagaatcctggggaagttgaggcactggctcccgctgttcagaacactgcccgacgtccccagagctagccactcctccttcccacccacccgcagcactctcgaggtcgcaacggcagtcaccaggt

SEQ ID NO: 238897 - DNA, 43 bp, Homo sapiens; identical to SEQ ID NO: 204418
  chr17:8280080-8280123
  hyper

SEQ ID NO: 238898 - DNA, 34 bp, Homo sapiens
  chr17:8286558-8286592
  hyper
gacctatgtctctcggagcgagaggggcgcggag

SEQ ID NO: 238899 - DNA, 149 bp, Homo sapiens
  chr17:8287112-8287261
  hyper
gtgaggggccttgcgaggaccagggccaccgatcgccgcctgcccccgcggaaataggtccaaggccgcgtttccaaggcgcccccagtgctgtgggaggtgctggtccagaccacgcttcgaaggagccaggcgagaggaagcctctc

SEQ ID NO: 238900 - DNA, 641 bp, Homo sapiens
  chr17:8532919-8533560
  hyper
cttcaacttccctccgaaccaattccagtccgattttatgggatcagggtgtgacccccaactgcagaaggcaatgaagagactgcggcgagccattcccagctcgcttacacaataaagggatcccgaggcgagtgctgaccctccccccggccgtcctgctgcagcgcgccccgccacatttcccgcctcgccccctcaaaccgcctgggcctcgcagggcgtccacccccggcctaggcgctccacggagggcgcggcaggacgccctcctcccgcgctccttccccggcgccggcggagtccgaccctccccacgcccgcggccggctccggagcccctcacccgccgcgcgcttccccggccgcgcagagccaatgccctcctgtccctccacccacgggtcgggcgcgcgccgcccgccttccaagcccatggtgaacccctctggtgctgcgggggaccggtcgcgccaggcctaacccacccagcaacccacgcaggggcccttcctgcccagcgcccccccaccctaccgccgggactgcgctttccagccccgcttagaatcccctctcttcctgggaggcagacactggctcgcggggcacgccgagacctccgccgggacactagcccc

SEQ ID NO: 238901 - DNA, 1106 bp, Homo sapiens
  chr17:8533841-8534947
  hyper
ccgcttcggtcccccgttcctgtcctccagagccgcccgggacccctcagcccaggagccattcctccctccacaaactgtcccccagccctgggccgtgcactcggacccgggtagccgcacctctcaccttcagccgaagatggtggcgcgggcgcacgtccccagccgcgaccacagatccagcgcctcagtcccaaacccaccgctgcctccgccgggctcctttagcactgctgctcggggctgccccacccacccctaccctcattgggccagctccacgcccatcaccgccgcccccagacccactggttggtttgcgcgcccatctccaagggaagacgttagcaacccgaacgaagctaccttcccgagtccggctccctccacccacctggaatgacgctcattggctcccgctcccagcccaggccacagaggccccaatctcatgggctggctcttacgcccgtcataggctccgggaggtgcggccggggcagtggcgcgggattggctggctcgtgcgtagatggacagctgaggctggctgaacgcccggcgatcccgcgaggctgcgggtgcgggccccgcggcggccggcgcgctgcgctgacattggctgtgcgggccgcggggcaggtgggccgcggcaggaggctggcgctctgactgcagactcctcgtcctagcgtcaggcagccgccgcagccgcagcacattcgagcgcccggtcgccccctgtgcttgcggcagccggcatgtaccgcagcgggacggggttccaccgcggagtcgcgggccctcagcgttgcctgcaggggcggggcggagcgcggtccagagtcctgacgtcacccccggggctgcgcggggttggggccgcggcgctgcgactcacctgcagtgggggaaggaacgcgggggagggcgctgctccgcccatgcgcacagggtttggcccgggacccggctgcgctccacgctgcggccactgtcccgaccccggccccaggcggactctgccgggatcggccgagcgccaggcgcaggacacggtcctccaaggtcgcagttttggtgttagcggggtgagaggctct

SEQ ID NO: 238902 - DNA, 90 bp, Homo sapiens; identical to SEQ ID NO: 204421
  chr17:8649035-8649125
  hyper

SEQ ID NO: 238903 - DNA, 62 bp, Homo sapiens
  chr17:8868583-8868645
  hyper
cctacgacacagggcgtcctgtgtcagaggcaggaggctgaggacacagctgcgcagagccg

SEQ ID NO: 238904 - DNA, 443 bp, Homo sapiens
  chr17:8869065-8869508
  hyper
agggggcggggcctaatggggcggggctgaccgcggagccggcctctccagccacctggcggcccggcagcgtcagccaggtgcgcgcccggccccacatcctctgggtcacgcccccgaggccgcaaggcgtctgagaagcagccccggctctgacccgccagccctcggaagaagcagaccctggccggtccatggcagtggcccgaggggcaccagcgcggagcaccagcgacccccaaggagtaaggggaggttaggcccccgcgtcggaagcgcggctttggccccgcaggagggctgggcggagcaggggggcaggtctggggtaggggcttaggggaaagacgagaaagaggaagctccgacgagctgcttccttctctcactgcgacccacttcctcttcctacttctattttctttcttttttttttttttttt

SEQ ID NO: 238905 - DNA, 143 bp, Homo sapiens
  chr17:8901426-8901569
  hyper
gcaaactatttgtatcgtttctccaagcccagcatttactgtgcgagccacctgggggccatttttgttgcccgaggtggtgcgcctgcgccacctggtggactacgggaaagtagcagatcggtgagatgggttgaggcacc

SEQ ID NO: 238906 - DNA, 51 bp, Homo sapiens
  chr17:8906622-8906673
  hyper
tggcgggggtggccgcgggccggggccgtctgggggcggccatcccgggcg

SEQ ID NO: 238907 - DNA, 263 bp, Homo sapiens
  chr17:8906853-8907116
  hyper
ggtcgcgcacggtcacgccggcaggtcgcgctcggcggccggccaagccagccccggccctgccgcgcccgcgccccgggccaccccgcccggccccctcggcgctgcacccctcgctttccccatctccagccgctcgctattttcacacctcccggtgccccggccccggcgcctgattcagtgcttagtaattaatttggcgtttcagaatggtcagcgggctggataatgggtgcattcatcccccgggctaatctgaa

SEQ ID NO: 238908 - DNA, 640 bp, Homo sapiens
  chr17:8907416-8908056
  hyper
acgcgcatctagaaggaggcgcaggcgactgctcaaggcgcggacggcggagctggggctcgggagcgtccgtccaaaacccccgaggttcgccaaagaggagggcccgcggcccagaccctccggagcgtgcccgaggcgacacggcaagcttctggggctcccaaattgtgaatggagttcaatgcacaagcatagatagtagaaacagggtcgacctgcacagactttttattccgagttccttgtgctatcagccccgtcgccctcgcggcctggaaggtgacacggtgtcttccccggcctcctgctcgccacccctgttgggaccctcgggtccgcctggggacatctgctgagcgggtgacggaggctttatcctttgatcccttctggatccggtgacgcgctaagtgttgggcacgtacggcctacggagtttgaatgctggggccttcctgttgcggcacccccagcccactggtgcagcgggatcgtgcgctcccgccgcagccctaatccagaggaccgcgccgcgccagcgccttcagccaggctgtggcgcctccagtgggtagggctggctcggctctagccaggtgaagctccagactctggattttcccgtcttcggggttca

SEQ ID NO: 238909 - DNA, 1112 bp, Homo sapiens
  chr17:8925060-8926172
  hyper
agctggcaagcccgcgctgaggcgggacgcgcctgctagcagcgagcgagaggctctccggcgaccggcgcgcgggctccccggaggggccaggcaaacttttctttctcttttgccccctccagaggtaaagtcccgaacgcggactttccggcggggacgcgatcggggggcatctgagagggaccccgggctgcgagacgaaggggcgcgggccgtgcagagtcggggtcccccagctctcctgcgcccgaaacttggggtgcgaggggggctggtcgcggacggggagaccggctcaggcatgcccctcgggcggcgtgggggcggcggtggcggggaagcagagcgttctcccgccgggcggggaagaaggggcgcgagcggtgcggacttggagggccccggcttcgccgcccgcgggactttgggggagagaggcgggcagtcggctgcggggtgggtgcccaggaagccgggcgttctcccgcatctccgctcgccaccccgccgagagctggagggcgcggggcgggctggctgagcgcagctcccttctctccgcaggcgccttctgcggcaggcggacagatcctcggcgcggcagggccggggcaagctggacgcagcatgatgcgcgcagtgtgggaggcgctggcggcgctggcggcggtggcgtgcctggtgggcgcggtgcgcggcgggcccgggctcagcatgttcgcgggccaggcggcgcagcccgatccctgctcggacgagaacggccacccgcgccgctgcatcccggactttgtcaatgcggccttcggcaaggacgtgcgcgtgtccagcacctgcggccggcccccggcgcgctactgcgtggtgagcgagcgcggcgaggagcggctgcgctcgtgccacctctgcaacgcgtccgaccccaagaaggcgcacccgcccgccttcctcaccgacctcaacaacccgcacaacctgacgtgctggcagtccgagaactacctgcagttcccgcacaacgtcacgctcacactgtccctcggcaagaagttcgaagtgacctacgtgagcctgcagttctgctcgccgcggcccgagtccatggccat

SEQ ID NO: 238910 - DNA, 793 bp, Homo sapiens
  chr17:9143012-9143805
  hyper
gtgaacatcatctccgtgtataagcagggcacgagccgcatccgccgcggtgaccagagcctgtggatccgctcgcgggacatcgcctgcaagtgtcccaaaatcaagcccctcaagaagtacctgctgctgggcaacgcggaggactctccggaccagagcggcatcgtggccgataaaagcagcctggtgatccagtggcgggacacgtgggcgcggcggctgcgcaagttccagcagcgtgagaagaagggcaagtgcaagaaggcctagcgccgaggcagcgggcgggcgggcgggcgggcgccagggcggggccgagcgagagcgggcgccttggcccggccgccgcggacttggcccgcgagggctttcccaggtggggggagggagggggcggggccgcacggcgcggggggcgggaccctcggcggcccctccccctacccccaccctgcgcgctctgggcgggagccgcgtgcacgcggggcggggtgcgccgccggccgggccctggagaaatgacgagacgtagctacctcacggggctccttccagagcagagacgcgcttccctgggcctgggcgcggccgccgtggaggggctgggggcagcctgccctggggcccgggggcgggcgcagaatcgcacaactggggccccaggcgcggggcgtggatggcgcggagacgtggacgggaggagaactgtgaattctcaagcccgtagtgtgggcggggcgcggagcacccaccaaaccaccacccgacacgcagccgacgggatcccccc

SEQ ID NO: 238911 - DNA, 884 bp, Homo sapiens
  chr17:9548018-9548902
  hyper
cgcgtagggggcgcgcctgagagcctgaaaacttcctggttagcaaatactgaggctggaaagggcctgaacttggcagtccatagatccaggtcgagttccggtttccctgcttacggatcgggcggcctccctacgttgcgataacctctctgagcccccttccttgccgattaaagcaagggtgatcaagtcttgcaagtttttggaaaatgattctaacccaatctgtggtgtaaaaaagcaaaccacaaccactcgggggcttttttcacagggcaacacgtggctcccagttcaggtcccgggttggcgggtgcaggcacagactctgcctccccccaaggggcagacggtctggaaggaggtggcgacacctgtccgcacacacctgagcctgcggaggaaccagcggtgcacaaaagcgctccccacccccacacagcgcccagcgcgcgcctctcaccacgcccgaggctgtgctctggagatgcctgccttgcccttttcttcctgcagtagccaggcctttaccatttactaggcgctttcagaatgttcatttctccgtaatttccactgcttgaaggctgctcgaggaacaggagcagcggcgaaacccaggtctgtcggtttacgaggtaaggaagggtggggaatccgaccacgaagactcccagtcagcgcagcgggggcggcaccaggcaggggtaggggtggcccggcgctgccctggagggggctggtcgtgccgccggattcccgcgcggggcggggctgccccgcccttggctccgcctccgccccgtccccgcacacctggcccgcaggtagccggcaccaggagccttagagaagctgtagggcctgctggccgctcgtcc

SEQ ID NO: 238912 - DNA, 249 bp, Homo sapiens
  chr17:9549262-9549511
  hyper
accacggcaacacctgtttcatgaacgcggtggtgcagtgtctcagcaacaccgacctgctggccgagttcctggcgctggggcgctaccgggcggctccgggccgcgccgaggtcaccgagcagctggcggcgctggtgcgcgcgctctggactcgcgaatacacgccccaactttccgcggagttcaaggtaggcagcgctgcgccgccgaccgccctgtccccctggtttcgcctcttgaaaagtg

SEQ ID NO: 238913 - DNA, 149 bp, Homo sapiens
  chr17:9862885-9863034
  hyper
tggtgaacgttccgcgtgccgcttgctgcctgaagccgcggaatccactggggagaagagagttaaggccaccacctcctggcactgaggaatcagcacacgacattttattctgaaaccccccgggtccaaaacgtcaaacctaaata

SEQ ID NO: 238914 - DNA, 41 bp, Homo sapiens; identical to SEQ ID NO: 204428
  chr17:10600737-10600778
  hyper

SEQ ID NO: 238915 - DNA, 133 bp, Homo sapiens
  chr17:10633512-10633645
  hyper
gttttcactaaagctaccttcctcacaaaaaaaaaaaaaaagaagaaagaaaaaaaagaaggaaaaaaggaaggaaggcaggcgggaggggagagaggaagaaagagaaagaaagaaaaagaaagaaggaaag

SEQ ID NO: 238916 - DNA, 524 bp, Homo sapiens
  chr17:11501656-11502180
  hyper
cagcgacgcgaccccgccccttcccgcgtacacctcctaccttattagcctggaaggggcgggaccaggggtccgtgcccaataggaagggagcagaggagtgagtcctggccgcgtccccgtcgctagggaaaccgatgcagctggaggccgcgcgcgatgcggctcgcggaggagcgggccgcgctcgcggcggagaacgcggatggggaacccggcgccgaccgacgactgcgactcctggggacctacgtggccatgagcctgcggccggctgcgggcgcctgggagcgttgcgcggggagtgctgaggcggagcagctgctccaggccttcctgggccgcgatgctgccgaggggccgcggccgctgctggtggtgcggcccgggcccaggggcctggcaatacgccccgggctggaggtgggacctgagtcgggcctggctggcgctaaggcgctttttttccttcgcaccgggcccgagcctccagggcccgacagcttccgcggcgcagtggtctg

SEQ ID NO: 238917 - DNA, 939 bp, Homo sapiens
  chr17:12568512-12569451
  hyper
tggatctccagatgcgccgtgtcacatttgtccccccaaaaagcatatcctagaaaatgaaagcctttccatttccccgtggaaatgcatctaagtccagtattggagctgcgagatacagaatcgtctctgccagtgccctgagcccctcaaaccgaggggaatgcgtgggcttcggtccgtcggaagcttttcttctcaggggtccagcttatttccaaattgccccgcgtgaactgtcccgcgggcgcgcacgccctttcgcgcagcctttgcagccggctggcgggagatcccggccgcttccctttcgccggcagaagcccggccggggaagccccggctgcgcacgcccatccccaggacctcggagctcccagcggctgccgcagccccgcgaaccacctgcaagccccgcggcgtcgcagcccttccttctttcctccgggcatccgctctttagctcgcgcccctctcccagattcccgacccctggccctgctcccgccctctgtgcctcggcggctgcggggcccgccgcaaagagttaagagccggttcccgagacggcttcggcggctccgggtccccagaccccgctcgccgctcctgattggctgagcgcctgtcagtagtaaagggtatcagatggcaaagttgggaccttcataaaggcgtggtggcgattctccgcaatcgccggcagcctatgacatcagacaggaacgcctgggatgccgcgctgctcctggccaacctccgaggaggaggagggtcccgccggctaagagttaattagccccgcacggcgaggggggaggcgccagttttctggggacactggctgccactgtactcctacccaggggagctcacggagagttggatgaattctgggttgttagctgcggtcagctgggctcccgggagcctgttgct

SEQ ID NO: 238918 - DNA, 982 bp, Homo sapiens
  chr17:12692658-12693640
  hyper
aaagctgctggtgacgctgccttctcccacctccgcactccactgtccttgcaaactttggacagaggaaaggtgggcacggggcgcgaaactacaagtcccggcatgcacggcgttctccgcacaggcgcacggggaccgccgggccagccggccagccagcctgcggagactcccgggtccccgcgccggactgggactgggagcaggcagcccgggcggagcgggccggtgccgaggacggccccaggcattgctctgccccgggcattgcgcggcgcgcgtgagggggatgcggcaggaggcggcgcggcgggaggagtaggcggcggcgccctcgggagggagctgcgcgcgggccagacggcgcccggaggctccgcagtgccgccgccgtcgcccgggaggctccgcgcgggagccatgtaaccctgcggcgggctccgggctgctccgtccttccccagctcccgggctagcgcggcagcggggccacgatgaagaagcagttcaatcgcatgcgccagctggccaaccagacggtgggcaggtaggtcacccgcgggcaccgctgtcggtgcgcgcccgcgaggctgcatccgcaggggcgcgcaggtgatggagcccgcccagcctccagtcctccttgcctcagtcctttcccctgcaccagctccctccaggcgccgctcgcaggcgcgacccctcctccctaacttcccagaccccggagctcttctcactcgccgccttctgctccgggctccggttgccaagcgcaaagtgtgacgcatcctttacctgcgtccccggctgccccttcgcttcgtcctccctgcctttccccgggactcccttctccctctggccgcctgtcttcctggaaacaggtgtttgctctgattgtgctggaggcagccgaaccgcagtcggtctccggagatctcttccctcccctcccctgcgccgagttcagggctgc

SEQ ID NO: 238919 - DNA, 106 bp, Homo sapiens
  chr17:12877675-12877781
  hyper
ggtgtctgggttggccgcactggaggcctcttggatttcgtcgtttcccatgcccccgcccccatttctaagcattcatatttggcttctgcgtcgcgctggcacc

SEQ ID NO: 238920 - DNA, 268 bp, Homo sapiens
  chr17:12921256-12921524
  hyper
gcccacatgcgcccgtctccaccaaaactgagaaagccgccggtcacctacgcccgcgtttcccgtgcaccacctagccgctccgcatggcggatccagccaatcagcgcgccgtgcaccgagcttcccgcctacgcgaggctgctcatccaatagaaaggagctttaccgctcgggacttgtcaattgacagtggccatagagtagaggaatactagagcgtctcaagcggccccgcccctagttctgttccggtttgccggccgca

SEQ ID NO: 238921 - DNA, 1223 bp, Homo sapiens
  chr17:13503837-13505060
  hyper
ccccgctcaccggtaccaggcgaggcccttgtcgtagctgcggtcgaagaagtggggctcggcgcccacggcgcgcacgtcggggtgcacgcgcaggaactccagcagcgcccgcgtgccgcccttcttcactccgatgatgatggcctgcggcagctgcttgctgccttcgtccaggagcagcgccagggtccccggcggggcctcggccacggtgcttccggccccggagccgcccggaccccctgacaggccaggggactcttcttcccaggccgcctcctcgccgtcgtcgcggggcgcgggcggccggcgcctccgccactgcggcagttgcaggaggcgctttctctgtgccgccgccggccacaccgccagctccctcgggcctccggccaggacgccgccaccaggggcccccgcctcctcgccgccgccggacagccccacgacggggccggacagggtctggcagcgctcggccaggcagtagaagacgtaaagggacgtgagcagggagcagagcatcagcaagaacttccggaagatgctgcgggacagcggctcggccgaggtggagagggcactggccgggcccggaggggccatcctagccggaggcgacgtcgggcaacgcgccggccatgctaggcctggaccccgacaggtgccagagcatccccccggcgggccagcgcgctggacggaggccacatcgccgtgcgcccctgtggccgtgcgaactgtcccgggaggcagcggccggggctccgcggggaaacggaatcccgggggccccgcgcaggatccctgcctccagtcgagggagcgggaaggggaacgcgggtccgtgcttaagaaaccatcgtcttagactcgcccaagtcctgagcttggggcagccttggcccctcggttccccgcaagagtcgccggaatcggggtcttggcagcggtgtcgaaggcgtgcgtctcagccccggccccgagagacttctcggcgcggatctccgctcagcgatcctgcatcactggctcggtccccgtgagggcacgcgcggctgccgggcctctgcgctccgtgcgctccagacagtggcgagcgacagtgacttccagccccggctttctctggtccccttgcccgcctgggcgcgttctctccgcccgagttcaggttctctcagccaaggagcgaggtccccccgagtccctctgcccga

SEQ ID NO: 238922 - DNA, 525 bp, Homo sapiens
  chr17:13505240-13505765
  hyper
gctggccgccgccacacgtgggacgccgagggcagcaaacttgctggtgacgtcaaaggcccgggccggaccagcccccggacgagcgcagcggggcgcggaccagcggccaggcggggccagacgggcggggtgggatggagaaaaggtggcgcgggctccgcagcagccgcccaatggcactggagagggcgggggcggcaggggcgacgccccttccccagtgtcccccattcctccccgcggcttcgcccccttccagtggatccggtgtctgcggcggctccggggttgcctgagtgacagctaaggccggccggatctctgggggcctgacttccacccaagacgccactagcttggtgaggggccccagagctctccaccgcagctcagccctccgcagccctgaccctccctctccaggttccccgcgctctgctcccctcttggcactgttgccctatccttccccatcccactgctttccatcgcctggaacctactcctcgtccccttggaagt

SEQ ID NO: 238923 - DNA, 526 bp, Homo sapiens
  chr17:14203857-14204383
  hyper
tccgaatgagtccccggcgtgggttggggggggggttccagtgcctagtgcatctcctaccctgctctccctcctccaaccgcctccctactctgcaacacgtaagcatcacgaaacctcctgcgaaacatctggatggggactggtgtcccaacatctgggcaactaccgccaaggctggcttctagggaacgagtgcggaaatgcgtgcgggtgtgggagcgcaccactcagtagggtaggacctctcccagcgctaggtcactgcagcattcttcccaccatctgctcctgtcaccagcccctaactccgcccctttgggcccgccccttgttccgaagccaatagcaacccctgaccgccctacaccgcccagaagcctttccacaccccctcgtcctgggagcgggttggctgctgagctctcggagaagcgcctgtatttgcatggcgttcggggtttttggtaggtagagcagcccgtcactctggaaggccgggaccgcccactccacctcggtccac

SEQ ID NO: 238924 - DNA, 206 bp, Homo sapiens
  chr17:15164106-15164312
  hyper
gaacgcactgggccgagcgacggaggcgcgcgcagagggagggtcccgcgcactagcggaaggcccggcctggcccagcgcccgcagcccgaccgcccgcgcgggtcaggagccttcgcgccgcctgccgccgagagggggcagcagccgcctgcaggaccagcgcccagtgcccagcgcccagccgggcccgcctgcaacggaac

SEQ ID NO: 238925 - DNA, 349 bp, Homo sapiens
  chr17:15164530-15164879
  hyper
ggtgcccagatttccgtctgagacctggagacagccgtggcatgcggtgggggagacagcggcgaggaggctggtttcccagaccccagtgctctccgcattccgtttgtctccaagtttccacccaactctgccagcgtagaggaacggtcctggccccagctcagcctcgcgcagactctggcggctccggagaggtggtgcagagccagagtagtgtggaaagaaaagaatggctcgagagggttgcccggaccctgcgcttcccgtccaccgcgcgcttccccaggcagcccctggggtcagggggcattctgctcttgcgctagacccacgtgctcgcctaggg

SEQ ID NO: 238926 - DNA, 1031 bp, Homo sapiens
  chr17:15165789-15166820
  hyper
acaaactcgggtgcgttggctccgctgctggcgccgccaaagctgcgctgcggggctgcgcgcgcgcgaagcaagggggcagtgggaggctcctggcgttcccctttaacgggaacaacgccctgtttgcgtcgctgcagtagggtgtgtccctgggtcagcgtgtgcgggagggcgggactcagggaggagagggggcaggagagagggagggcaggagacagtcacttggccttaaatgcgcctcaagaaaaagtcggtccctgcaaaaccgcggcgacttttactcgaaaccagaggcggctgagctttctcacctcccacctcccttctcccctggccccgtggagacctagtgttgaccgagaaactggctcctcagcccactctgggaagacccagccaaatgtagctcagcggatgcccagggctgggcttctgggcccgccgacgccgaccgcgcccgcgcggggctgaggctggattcctttcccactaatagagggcagcgggcgcttgagcgctggaagaagtccctctcctctcgggtcctggagcccctgccctgtcctggcgtcttagccggacacacctgccccgcgccggtccccgctattactgtctgcacctacgaagcatgccagcttcctaggattggcggggattgatctagcgggctcctcttgggtgcgaattaggggaagaaaagtccggccgactactggatagcatggtctgggattgggctcctcctagcctaggcaaaaccagactaccaccgaataagctctaggcaaagtgttcctgcagcagtcgggcttggctgtcagccttggctggagtcctggccatggggtttggcgggcgggtgcgaggtggccatttgaggtggggttggagcagccaaggaaatcagctgattcatagcctcctaacgtggcccgcccagcgttacagggagagaggctagcccccttcagtctcggcttggcagaggcgcgcccaactgagactcccgtgcgcaggccagc

SEQ ID NO: 238927 - DNA, 860 bp, Homo sapiens
  chr17:15244286-15245146
  hyper
ctaaactgcccaaacacaagcgaaagctttgcagccaagctaaacagaaacgactttgggcggtgagagaacagctttgatctgaatttaaggagctcggtctacaagaccaggtgattgaactctcctccccgtggctgcagatctgaaggctcggctattgaagcagagggggacgaggaacagcgtgcggggcggccagcaccgcagtggaaaggcacagcgctgctaacgggtaattattagaattaagaaattaaacgaattagcacagtgtcgggggttcggatgccccttccctgggcatcccttgaaaacccttgaaaagcatcagaaaggtaaattacgaggaaaccaacgtctgggtgggaggtgcctgtggatttgtacggtttttatttggaaggaaaagtgaagatcgcggggaggaattgcagggtgtccgcgacctcccgcgatcctgaggcgagaagttggagtcctggttggcgaagggggatcctttggggtagtcctagaggcaggctagagtcagcgagaccactcacctgtcggcggatgcccggcgaggggcgggaaggggctgtgggaggaaggggtcgcagcctaccacctgcagccctcgactggggcccagaccagtctggccctggccccgcctttcctatctgtgacgatagcagcgcctgagggccactcagcggccgccccggccggctcgccggagctgactggccagttataggagaggcgggagctgtcaggccaggagggaaacccgtcgggcggcggttactatggacgcgctcacgcttagtaaccgaggctccccgccctccgggagacctccttggtttggg

SEQ ID NO: 238928 - DNA, 147 bp, Homo sapiens
  chr17:15820950-15821097
  hyper
gggccggactccagcggcaggggcctccccaggctgcggctccgcgccggtgacgggggctctgccgaagggctcctgcccctgcctagcctggcccatgctggtcgcatcaggggctccattcaacagacgaccgctccgggcctg

SEQ ID NO: 238929 - DNA, 649 bp, Homo sapiens
  chr17:15848769-15849418
  hyper
ggcttctgcactgacttctacggctgcctcttcctcgcctgcttcgtgctggtgctcacgcagagctccatcttcagccttctggccgtggcagtcgacagatacctggccatctgtgtcccgctcaggtgaggcgctcggcgtcgcccgaactcggggccccgtcggagctccgaaatgggtcgtcttctccaggccggggttcctccctcgggggccccagacgggccaggctgggggcgcgcggggcgcttggagggctggttcccagcctggccaccccgcaacgctagaccagtgcgcccgggcacccaagacatcccagatgcgcgtcgctctaaggagatctgcgtagggacagctctagggggtccggggagtgcggtccccggcgcccggggaggcgccgtggaaaccccggggaaagcgtcacccccggggaaagcgtcacccccgtgggcgggtggagcccggggcgcgggagttttggtgatcacatctccactcctgccacgaaggccgttcctaacactcgcccgcagcggcggtgcagcggcagtcccgtgagtgctgcggctcccggaggcccgggaggttcccactaagggcaaggcaactttggacgctgggcattcgcaccgtcagaatg

SEQ ID NO: 238930 - DNA, 81 bp, Homo sapiens
  chr17:15903673-15903754
  hyper
cgggtaaaattgccgagaatgaggtgggtcatccgagaggggattggaatccatccaggcttttccgactctaaggcctgc

SEQ ID NO: 238931 - DNA, 116 bp, Homo sapiens
  chr17:16120414-16120530
  hyper
ttccggagcatgtcggcgggagggacttaacagcggaacccaacattccccggtgaagttttccagccggagtcagggtcagaggcagcctttcctactgcgcaggctcagtgctg

SEQ ID NO: 238932 - DNA, 730 bp, Homo sapiens
  chr17:16283875-16284605
  hyper
agagcgaaactccgtctcaagaaaaaaaaggaaagaccccccctccttctcccgccggaaataccctctttcaggacggcgcgcctgtgcggcgcacgcgcgctcagttacttagcaacctcggcgctaagccaccccaggtggagcccagcaacaacagagccaccgcgtcccccaccaatcagcgccgacctcgccttcgcaggcctaaccaatcagtgccggcgctgcaaggaagtttccagagctttcgaggaaggtttcttcaactcaaattcatccgcctgataattttcttatattttcctaaagaaggaagagaagcgcatagaggagaagggaaataattttttaggagcctttcttacggctatgaggaatttggggctcagttgaaaagcctaaactgcctctcgggaggttgggcgcggcgaactactttcagcggcgcacggagacggcgtctacgtgaggggtgataagtgacgcaacactcgttgcataaatttgcgctccgccagcccggagcatttaggggcggttggctttgttgggtgagcttgtttgtgtccctgtgggtggacgtggttggtgattggcaggatcctggtatccgctaacaggtactggcccgcagccgtaacgaccttgggggggtgtgagaggggggaatgggtgaggtcaaggtggaggcttcttggggttgggtgggccgctgaggggagggcgt

SEQ ID NO: 238933 - DNA, 420 bp, Homo sapiens
  chr17:16290017-16290437
  hyper
acagagccagaacttgtctcaaaaaaacaaaaaacaaaaaactggccagtgtgtgaggggcgcgcgattttttgagatgtgagagggaattgtgcttcacggtcaccaccaggtgtcgcgacatcaggtgccgcgccgtcccgcttctgaggcgcggtggcctgagaaactggttgcagagcccgctcttcctagcctactgcccgaaaacgcagaatttggggaattggaactttggaggcgggagcgaaagacctctccttctcccgccggaaatacccctcttttgggaagcgcgcccctgccttccggaaaggaagaaacgtgatcacgccgctgcactcaagcctctgggtgatagagcgagaagaccctgtctccaaaacacaaacacacaaacaaacaaaaaggtaatggggg

SEQ ID NO: 238934 - DNA, 338 bp, Homo sapiens
  chr17:16342655-16342993
  hyper
agcctggagtctgcgaaggccgggacccggttccccggcccacagtgggggtgtgcaaacccgagagaactgggtaagttggggtcggcttgcagtttggggtaccccgagggcggtgtacgtcggtaagattgtaacagtattactggaagacttattcgactgtcctgatgatacttgtaataggaagtgccgtcagaagcgataactgacgacgtctaatgtctatctgaccgcagtcgctgaaacctctacaacttagttgaccgtaactgccagagccctgccctgaattcctgtccttactccctctttaagattgcgtacccactgcagag

SEQ ID NO: 238935 - DNA, 101 bp, Homo sapiens
  chr17:16439048-16439149
  hyper
ataggggtcttcagccgtgcgcgtgtggagcagggccacggcgcctgcgcagcggaggctgtggaccacatttcccaagaacactgcgttcctgggcccgc

SEQ ID NO: 238936 - DNA, 86 bp, Homo sapiens
  chr17:16439419-16439505
  hyper
ccgcctctcggagtcgggaggaagtcgagctggggtgcagttacgagtctcagttaataatgaatagggtggccaatggtgggcca

SEQ ID NO: 238937 - DNA, 320 bp, Homo sapiens
  chr17:16440043-16440363
  hyper
gaaaaggggactcacttcggagaagctgccctctctgcaaacttatttgagtaagggactgaagactgaagttagggagaggaaagggatacacgtctgttagtgcgagttgcgtgtcttgttagtgcgaactggaacccaagtttcctttgggaagactttggcgaaagagtacaggaacaccagccactccagaaagagaccgctcctcttgaacccgcccacttaactcctcccgcaggctctacgttcgaatgcctccaccctgattttagaaggttataggcgcacaatcaaggaaatgtcgacagagggcgtcc

SEQ ID NO: 238938 - DNA, 458 bp, Homo sapiens
  chr17:16487636-16488094
  hyper
tttcagagaattggcgccgggaggggcacgggatcaccgtgcacagtgagtgctgtacaaagtgcctgtgcagctccccgaagccgcaggagggcgcccgactaagccttttctgccctgcgtgaggcgcatgcgtgttccgtctgcagctgcagacgcccatcctgggagtggacaccagcttcgttccctctcagcccactcgggaagcgccacacggcttcggcttcggacgatccagggccgcgtcctctgtgaggaaacagctgtgacggctgaggagggagggaccagctctaactgattgcttaagttgttacagatggtacagagccagtggctgagttttgtaaatcaggtgtgttcattgagcgaactttccacttcggaatattcagcatctgaggaggttcagtttgattttgtctatcgctggcggggcgcgggctgacgcctgg

SEQ ID NO: 238939 - DNA, 275 bp, Homo sapiens
  chr17:16570628-16570903
  hyper
tgaggaggctgaggaggctgaggcggctgaggagctgaggggctgaggcggctgaggggctgaggctggtgaggggcttgaggggccgagcggataaggcggctgacgcggctgaagggactgaggggctgaggtggctcaggggctgacgcgggtgaggggctgaggggctgaaaggctgaagggcgggcagcgtgccgggtccctgcggctgggtccaccgcacgtcacgtggcagaatcccggggctgctttctctccggctgctcagccac

SEQ ID NO: 238940 - DNA, 133 bp, Homo sapiens; identical to SEQ ID NO: 204449
  chr17:17140479-17140612
  hyper

SEQ ID NO: 238941 - DNA, 113 bp, Homo sapiens
  chr17:17184594-17184707
  hyper
tcgcgagcggcgacgtcacttccgctggttcaagcaccgcgagactatacctagctgcccacccgttactgtttccatggaaacagcctgaattcgccgtagccggaaattag

SEQ ID NO: 238942 - DNA, 180 bp, Homo sapiens
  chr17:17204069-17204249
  hyper
cggcctgatggatggagtttttaaaaaactgcaacggcaacccaatatagaaggcacagcaggagccccgccccttctgagttggcggggcgggagttccccagatgccgctgcagttgccctgctgcggctctggcccagcatctctgtgctcttgggaacctgtgaaggctccactgc

SEQ ID NO: 238943 - DNA, 412 bp, Homo sapiens
  chr17:17398323-17398735
  hyper
gccgggaggggagacgccagtccgcgcgcgctcccggcctggggcgcaccgggccgttggatttgacttaacaaaaaggtcctccttaggttgtgtcgccagcgcggcggggctcctagctgatgacgcagcgctccttgtccttggcctggctgccggcgctggccttctcgcggatgtacatgaggtcgctgtgtacgctgggccggcgcgcgaagggtgccacgatgccaaaggcgtcgcccgggtcgccgccgccgccgccgctgccggcccgcagcagcttcttgttccgcagcgccttcttgtgcagcacgtcgcagtactgcaccgagaccttgcggtgcaggtctgggctcatctcgctgggcagcttggccatggcgaagagcgcgcggaacatctggtccag

SEQ ID NO: 238944 - DNA, 56 bp, Homo sapiens
  chr17:17398915-17398971
  hyper
gtcgaggatctgctgcctgagccgctgcacctcctcgaaggagtcgcggttgtcca

SEQ ID NO: 238945 - DNA, 257 bp, Homo sapiens
  chr17:17399691-17399948
  hyper
gcacaggccgcttgctctggctttggcgcccggccgccgcccttatatgcagcctgctcggctgccccgccccggccctcccagctcggtgcgtcacgccccgcggggcccgcctcccccgcaccggctcccagtcccggcgacctcgtcacccgctgccgggctcctgctctctgggcgcgggggctggggggagcagtccagggtcgggctgaggctggaggcgctcggactccgcttttccactgccgcgggct

SEQ ID NO: 238946 - DNA, 227 bp, Homo sapiens
  chr17:17596965-17597192
  hyper
gagaggaagccaggcggcaggtagctgagaaagacatcggatccagggggagcagcagagaaagcaaacaaacagggctttgtgtggctgcagattggcggctcagaagggaagccaggcctgtggtagggggaagggagaggaaggaacgggagaccaggccattgctctgggccagagatcggcggctggaccagcccgggctgggcggccgggaagtagcgagt

SEQ ID NO: 238947 - DNA, 525 bp, Homo sapiens
  chr17:17655444-17655969
  hyper
agagggctgcccagcgccccgcaggagcctcccgcccggcatacccacgggccagtgccgggactgggcgcggggcggcgcgcgggcgcaggtagccatggtgacagcgccccagactactcgtatttcctgccttttgtgttcgcacatgccccagcccccagcccgggcagacgcccctgattggccgtcacactgcggaggggcggggcggggtgagcggaaaggggcggggctgacctgtgggcggggcccccggggcgaggctggtcttgtactggcgcgcgctgcctgtgattaacaggcgggcgcggccgcgcgcggctggaaaggggcggggcttccggaacagccgccccgggagcctgggataggggtgagtgctccttgatggcggccccgaacaaaggacgcctccagacccgggcttcctgtccgtagtttttcttggcccttggagtctgagagtgagaggcctgctaggccagcgccccctaatcctcatccggccgtgggtggccaggc

SEQ ID NO: 238948 - DNA, 2179 bp, Homo sapiens
  chr17:17685254-17687433
  hyper
tcggggccccgggccggccgccccctttttgcggggggagagcaggagccgcctctcgcagccactctgcgcgcggggtgggagggagagagggaggcgaagggacgacagcgccgggctccccgcccccatcccacccggttccaatatttcgcagaaaggcacgcggctcctaatcggtcttttccaggctgagatttagccgtgcgatgcccgcgcaggggcgggggccgcgggccaggggaggcgctcagagtccggagccgccgagcgaggtgaggagcccgcgtcctcggctggtggagcgggcgggcgggcgcgcaaacccgagaggcagatatagaaaggggggcaggttaaaaataaccctctccggctgggaagctcgcgcgcgctctctcgcctcgttcggtgccagaggactccaggggaggtggcgttggggagggcagagcgggattccccctcctccgccgggcggggtgcccgcctgcgcgccgcggttgcacgtgtgcggggccgcgcgcccgggccccctctgcacccggtcggtgggtgccccctccccaggaccgggcgcatctggcagtggccccccgcccgcagccttgcgcggctggagggaagcgctccattattcattatttacgagcgttaataggtttgagccacgggggcggggggttgggggggcgacgaggacccagtggggaccgaagcattagaagaagggatagggagggagggggaagggcgggggcggggctgtgccgcggcctggaggaagaggtctcggcctggggcccggcgagccgggcgcacctctccgtcaggtttctccacaccgccggccgtcgaggctgctcagggcgccaagagggcagcacgggccttagattttgctctcggcctctgtccttcgcgtcctcgcccttaccgaggcgtggggagggagctgcggaggccgtacgccccgccctgcgcgccccttgccgccgccgcgtccccgcggcagccccggcctcatttatcatcatctttggtcaagtggagtgtgcaaggaacagctgcttcactcggctgacttcgagggcggctacgggagaatcagggagatgaatgatgggggctggtggcagccccccgcggtccccgcgcaggcgagagggaggcggggacgtccagggccgcctccgcctcatggcgagtgcagcgcccccttcctctctcctggcgcctgcagcgaccggggaccgggggaccggggcaccgaggaccgggcccgccccgggaggggactgggcgcggggacgggggggcgcccttcgccggcggagaactggcgggcgcgctgccggcagagcccgaggttgccgtgaccttgctggggtcagcgggctgggctgcggaggcggcggcgcggcgtctttggtgcgctttccggattggcgcagaggccgggaaacaaggcgggggcgggcgggggaacacaaatagaaggtgaaattttacctgcccctgagggagtcctgcggattttctccggcagcagcaggcgctctgcctttgtcttacacggctgaaacatctgttgcagaggggcggagaggccgcaacaacccccacacaccctgcgctgctccccgtccccctctgccccagccgggctgcaggactccaggcgccgcgttaaccctgctcgcgctggggcgcgcgcccgcactcgctgccgcagtccagcgcctcgcgtggggctcctcgcccccgccccggatctggtcctggccggggcgcccggtgacccccctccacctcgatggggtgctgaggtgtaggcggggggcgggggcggaaagggttaatggcctagtcgcagaccctaattgtcagagccggccccgcttcgtttcaattaccctaagtagagactgaatgcgcaattaacgaagtcagcttgccaactggaaagccggccccgctttcacgttgagcagaatactccaccagctgacttggacgaagcaatttcctcctctctctctccccttttttctctccttctctcttccaatccccctccctctttttctctctccttaataataaaattataccaagcagtttgcggtgtggcaggcggccagaaaagcgtttctttaaacgccgccgtctcacaatt

SEQ ID NO: 238949 - DNA, 68 bp, Homo sapiens
  chr17:17876012-17876080
  hyper
gacgagtcaatcacgcaaatggacggaacagaggtgaatctaggaatatccccgcccatagaaagtac

SEQ ID NO: 238950 - DNA, 81 bp, Homo sapiens; identical to SEQ ID NO: 204455
  chr17:17991153-17991234
  hyper

SEQ ID NO: 238951 - DNA, 144 bp, Homo sapiens
  chr17:18086430-18086574
  hyper
ctggcttgtaccccgacaacgcgcgtctggcttctgccggacgttcctatctgggttcagaactggggccgggtgctgcaggtcccgcagtctgagaagttttcgcgggtttcagaagtttccttaggcgttctaagggcttta

SEQ ID NO: 238952 - DNA, 42 bp, Homo sapiens
  chr17:18163702-18163744
  hyper
gggtcgcctgtcacgtcacctgttcgcggtctcggaatgcag

SEQ ID NO: 238953 - DNA, 218 bp, Homo sapiens
  chr17:18164239-18164457
  hyper
cctgcgaacggggcgtcacccgcccacctagggctgctgcgcggcctgctccgcccgggcccagggcaggcaggtttggcggaggagggaaggccaaacggcctccagggccccgctgcgcaaacttgggttattttcagccacccgtgccctttcctgcttctcggagctggaaggctgtggactgaggcctgcgcgaccccgccagagatggggct

SEQ ID NO: 238954 - DNA, 392 bp, Homo sapiens
  chr17:18218744-18219136
  hyper
agccttgttcagagcgggggcttttgctgtcgcagtgggttccggagagtgcaggtgatttcgcagcaggtttcttgtgctggccgcgctcgccggacgaagaagagaagggcagttgggcctgcggccttggcgttcatgaggcctcagagagctccggaggagctacaactgtgagggggctgctagagttcttctcctcgggtgtgtgagaagcagcctaggaccccgggttcggggagtcgcaaagaaggccgtaagggcttcacttccttctccggaggcctgccttctgcgcgtcgattaacaccgcattctttcccacttcctctcaatgttttcttcatatatctggaaatatgatcagcgcccctgacgtagtggccttcacc

SEQ ID NO: 238955 - DNA, 258 bp, Homo sapiens
  chr17:18266750-18267008
  hyper
ccgcgcaccgccgcgggccagccacgtgaccagccgctccaaccccaaaccccgaacttggcgctggaccgctcgagctcaggaaggtgcactctgcgcgccaggcttgggcttggccccgcccccggaggcgcccaatcagagagcgcagccaagcatgggccgccaccaaacgcacccgcgctattggctgcggcgcagcggcgggcagggcctgtttctccggggcgggccggaggccgcgtagtgcagctgcgc

SEQ ID NO: 238956 - DNA, 230 bp, Homo sapiens
  chr17:18761717-18761947
  hyper
actggggcgatctcgcgcccgcggcccttccatttttccctcccttcttcctctcccgccaggggtcggcgggggcgggggacgggcgtccggtgcctgggctctctcctctccctgaggcgccgctggggagtcgaaccctgatgatgggacctgtggtgagcagccctgaaagcaagcccagacccagccattctccgtccctaagctgacacggagcccctgatttt

SEQ ID NO: 238957 - DNA, 887 bp, Homo sapiens; identical to SEQ ID NO: 204458
  chr17:18907421-18908308
  hyper

SEQ ID NO: 238958 - DNA, 45 bp, Homo sapiens
  chr17:19141013-19141058
  hyper
tccccttctttccaaccaggccccgccccacggactggagcatgg

SEQ ID NO: 238959 - DNA, 111 bp, Homo sapiens
  chr17:19141268-19141379
  hyper
cccagcctggtctcccgccagcccccgtgcagagcccggtccgggcgccctccgggaatcgggggaggggtccttatctctgtccgggatcccgcccgtctcacctttcct

SEQ ID NO: 238960 - DNA, 45 bp, Homo sapiens
  chr17:19141603-19141648
  hyper
tctctccctgtggggcggctcccctagagccgagagccgagcgcg

SEQ ID NO: 238961 - DNA, 144 bp, Homo sapiens; identical to SEQ ID NO: 204460
  chr17:19265481-19265625
  hyper

SEQ ID NO: 238962 - DNA, 138 bp, Homo sapiens; identical to SEQ ID NO: 204461
  chr17:19281498-19281636
  hyper

SEQ ID NO: 238963 - DNA, 128 bp, Homo sapiens
  chr17:19436795-19436923
  hyper
tgctaaccgagtcacggctcgaggcctctgggtccttccacgccaggtcattcagaacctgaaacccccagcggaggtggagagccggggtgagtcctggcgtccgagacgtggaggacccagccccc

SEQ ID NO: 238964 - DNA, 126 bp, Homo sapiens
  chr17:19437103-19437229
  hyper
gggcgggctctgggcgggcggccggggcggggactgcagagcaggctgcactgcgcggtacccactgccggcctgcgcggtactcactgccggcctccgcggtacccactgccggcctccgcgcta

SEQ ID NO: 238965 - DNA, 240 bp, Homo sapiens
  chr17:19552168-19552408
  hyper
tggagacaccccccggagggaggcggagggaagggaggcgaggcctgcacctgcatgcttcccgcctcccactccccagcgcccccggaccgtgcagttctctgcaggaccaggccatggagctcgaagtccggcgggtccgacaggcgttcctgtccggccggtcgcgacctctgcggtttcggctgcagcagctggaggccctgcggaggatggtgcaggagcgcgagaaggatatcc

SEQ ID NO: 238966 - DNA, 409 bp, Homo sapiens
  chr17:19648094-19648503
  hyper
agaggcggcgggggcgcgcggggcgcggcggaggggagggcggtgcgcccagtctccgcgaccgaggggccaggtggccccaagtccttcctgaacctctctgggtcgcactctccccagcccctccccccacgccccatcgcatggccccgacactggcagaaggcggccgcccagcctgagcaccttgtgcaggtctgcggccagcgcgcccaccagctcctgctcctgctcctggatcaggcgctgcagcgcctccagctgctggatccggaactgcagcggacgggtcctgcccgagctgaaggcggcgcgggcgcgcttcacggcctcgctgatcttgctcatggcgcctggggacagagagcacctgcagctggctgaggggcacgagcgcgccctgcctccc

SEQ ID NO: 238967 - DNA, 1180 bp, Homo sapiens
  chr17:19770124-19771304
  hyper
gggggaaaacggtacgggggctcttcggggtgcaggggaccagtgctgggaaaggtgacacctcccaggctgcgaaagcctgaggctaatgggacatccgcccattttccgctgggtctgtaattatcaacctcaaaagtgaccagccctgggcacggggaaaaaaaccaaaggtccattcacgcccaaccctcgagtctgcacggtgcagtaccgtctattttgggtccagggtaacctgggtgcaaacgctcctgcgggcggaccgcggggtgggccccgggcacacaggaggatcagcagcagccggtcggtaggcggagcgctgccagaggcttgggcctcacaacaaccctcacaggaccaaaacaaacggcgagacgggctgcgcgcacaatagcatacccgggcggctagccgagtcgggggtctcggctcgcggctgcgccaagtttcagaaccacctagccccgtgcctgccgcccggggcccggcctcgccccggccggcgctcacctggcggtgccgcccccggaagaccacggcgaaggccccgtgtcccacgagatccctcttgctgtactcgaagtcacccaccacctccatggccgcgcccccggggcacacagcggacgggcgggcggcgcagtgcggcgcaggtatcagcaccgcggctccgcgggcccggagcgcgccagcgtgcggcgggtctggggcagccgcagccccgggcccgggcggactctcatgccgagagaccggagcggaaactggggaagctgccgcgcggagccagggtcagcgaggcccggcccggcccctgccgctcatggcccggcctgccgccggccgctggctgtctggcgaagcggcctcggcgctgccgggccaggggtgccgtcaccgtcactgtgcgcgcccagagccgcacacgcgctctgaggcagtgaggggcccggtactctccatccccagctcgtcgggcctcctcggccctccccgctcggggcgctgctgcgacggcgacggccgccgccctagaacccgcaccgccgcggccccgcgcttccccgcctcgcggcggcgcccaacgccctcgcgcgcgctacccgctcccgcgcgactggctgccctccgcgacgtccgcgcgccttgaaggccgcagcgccagccggctccc

SEQ ID NO: 238968 - DNA, 462 bp, Homo sapiens
  chr17:19881063-19881525
  hyper
gagtgggccccaccgcctcctcgggatgcccaggcagctccagccgccatattatcaacaagccgcccgcccggagttccggtccttccccgcgctaggcttcacgggaggtcaagcgccggccccgccccttttccccatccccctcccgcgggtgcaggggcgcacgcccgcatcgcccacgtgacccgcgcgtgctacccgcgcctctttcccgggccctgggtgcctggagcgagccaccgttcctgcagctgttttgtggcgtctgtcgccggcccccggtggagcgctgcagacccagtctctgcaaaactaactccctggggcgggagccctcccagcagctggaacggggcgggccttaggtccccggcttccggcccctgggtacccttcaaattgtgcccttctaaaaggcagggtcaaccctgccacgctccagctcgacccctcctgctc

SEQ ID NO: 238969 - DNA, 79 bp, Homo sapiens
  chr17:19912416-19912495
  hyper
ccagtgtagagtgcggaaatggggtccacatctggcttgggacgcccaaacatcgattatgtgcgaccagaggatgagc

SEQ ID NO: 238970 - DNA, 42 bp, Homo sapiens
  chr17:20059384-20059426
  hyper
cctttctttgactggagcggacccgccggacgcaaccgcctc

SEQ ID NO: 238971 - DNA, 110 bp, Homo sapiens
  chr17:20744391-20744501
  hyper
cctcttctgctgcccgccctgccccggccgcatcgctgccaagctcgccttcctgccgccggaggccacctacaccctggtgcctgagcccaagccggggcctggtgggg

SEQ ID NO: 238972 - DNA, 510 bp, Homo sapiens
  chr17:20755756-20756266
  hyper
ccttgagcgatcaccgagcgcacctcgcaatctctgatcttcgaacccactgaaaaagcacaaggcatggggagtcctgttggttcacgccccgggtgcgaataccaaaagcaactcccgctggaaagcctgcaggaaactcgagacaaagacagaggcaaacgcaacgctgggaagagccaggggtgctgccgtctgcaaaagcagagacgcgtctcccttcgggcaaagtgactgctacaaagtctgttccctcctgcgcagggacagagacatttaaaggcctgaacggacgtcagcaccagtagagctcgctgggtgagcgccaggcctccccgccccaaggatagcgcgcacagggcgatctgctgctcgcgaggtagaaagtggcttacttggggagaaaacagagctggtggcgctgctgagtgtcaaaccctggagcccatcgtcaagacgttatattggtggcagttctgctgtgagtgcacttgccgaattgaacagagc

SEQ ID NO: 238973 - DNA, 69 bp, Homo sapiens
  chr17:20945959-20946028
  hyper
gtgggctgccgggcgcaccttgcgcttgcgggcctcagccgtgccgctccacacgaagcactggtagat

SEQ ID NO: 238974 - DNA, 132 bp, Homo sapiens; identical to SEQ ID NO: 204464
  chr17:21030040-21030172
  hyper

SEQ ID NO: 238975 - DNA, 86 bp, Homo sapiens
  chr17:21069251-21069337
  hyper
attaaaaaccaaaattgtgtgtgtccaagttcctaggtagccatagtaagtgctataattgataaggagggctttaggccataatg

SEQ ID NO: 238976 - DNA, 83 bp, Homo sapiens
  chr17:21117925-21118008
  hyper
ggcccctccgcgtcgccacgcctgcccttcacagccttggcccataaggtcaccgaggggcgggaggcgccgcccgggccctc

SEQ ID NO: 238977 - DNA, 111 bp, Homo sapiens
  chr17:21187754-21187865
  hyper
tgttgacgggcagcgcgaggggcgcggctttagtccagggggcggagcctgaccggacctgggtttttcgggcggctggcggacttgacagagagcgggaggggcccggat

SEQ ID NO: 238978 - DNA, 212 bp, Homo sapiens; identical to SEQ ID NO: 204465
  chr17:21189752-21189964
  hyper

SEQ ID NO: 238979 - DNA, 202 bp, Homo sapiens; identical to SEQ ID NO: 204466
  chr17:25659906-25660108
  hyper

SEQ ID NO: 238980 - DNA, 38 bp, Homo sapiens
  chr17:26220451-26220489
  hyper
tctgccggccgcgcgcgggactcggggtcctactgggt

SEQ ID NO: 238981 - DNA, 883 bp, Homo sapiens
  chr17:26554427-26555310
  hyper
cccgaggctcccggcgaagacgccttcctggggtagctgagccgctgctacgcctatcctcgccactacctcatcctggtcactcagccgtcgtgagcgcaggcgcggggcgggcggagcgggacccctggggctctccccctgcggccccgctccaccgggggcgtggctagatctgaccgcgcccttccaggccccgccctcaggtatgggaaactaggccgcccggtcgcgcgcctctccaaaacgttcttcccagactgcgaggaccgcctcggcaggtggcggtaaaagcgcccccatcaagtcacataacatcctgcctccgagagcgcggtctggccccaccctggtccatcacttacgacgtctcccaggcttgcctccccggatcggattcctttcccttcgatcccgcaggccggaggcgcagacctgtggtgaggacacccgaggcctcctgggagacctgcagaccacgcccacctcatttacatgttcactcccgaccctggaaacccggatttcgcctccggacagcggcgtctgggcagggttcgggtactgcagtcccgcgtctggatgcccccgccccctgagctgcagggctgtgtgtggtccttccctggtcccaaaataaagagcgaattgcacagaaacggaatgtgtgcctttgtattttctttcctttctccttcgtggaggtggcgtctcgtggaagtggagggtggaggcgtgggggccagaggagagaaaacctactcggacagaggcgctccaggacaaggctggggcgagcgcgggggttccctctgctcggagcccaaggaaaattcgaccacccagcctggggctggacagcgcccagaccaggggctgctgt

SEQ ID NO: 238982 - DNA, 535 bp, Homo sapiens
  chr17:26578404-26578939
  hyper
gacagagccgcgggcggtcacgtgaccccacggctggggtcggcgcgatccctgacggtagcttgcgggtgttccgcgccgtgggcagcctggcgtgcaggggcgctcagccgagggacgtggctatttctgggacacacaccagtgcacggacgccctaagggacatcctggtgcccaggggaatggtgcacacctggacatgcccggtgatgcacgcagaaagcatcgaggtaaaaatgaacggggagacacctctaaggtgtacgcacgaggacggcataaaaccattggtcagctccctaatctcaccgacctctctcccgcaaattccttatcgccctcctttctccctgcccttccctcaaagtgtcagtcaggttgtcctcagcccagaagactcttcctccagacatcctcatggccggctctgtcgccccctggaggcattagctcaaaatccaccttttaaatgggtcttatcctgacacccctgtttaaaattgcaacccggcagcgtgcggtagatgacgcct

SEQ ID NO: 238983 - DNA, 60 bp, Homo sapiens
  chr17:26879852-26879912
  hyper
ctgactacctctccgcttactcattgtgttccagcctttctgcccgtgagttccaggctc

SEQ ID NO: 238984 - DNA, 450 bp, Homo sapiens
  chr17:26903726-26904176
  hyper
cggagtcccaggtagcaggacgaggatggcaggggaagagccaaggaaatgaagcggagatgttgagtggctcccgccttgcctggccttacctgtgcgcagccagttagcagccgcagccacaagcacagctcgggttctgatccgcaaacagatgaggctgcagccctggctccctctggtaaatgaggctgcggatgtcgcagagctacgtgactcctccgggggcgtggcctgcatgccccgccctgaccacaccccctccccaggactggtgtccggggcaagaccacgccctcagaggcggggcggcgaggtggagtgagcgccccgccaggcatccgtggctgttagggactgccctcccacctcggggagcctggccatgaccttgcgttcatttctgccacaatccctttaccacgtgccgggcacttgctggatgctggg

SEQ ID NO: 238985 - DNA, 334 bp, Homo sapiens
  chr17:26926091-26926425
  hyper
ggtagagcccggggggcggggcccgcgttgaccacgcccccggccctgcctgcccctccgttgtcgagcgttttccgctgacggagccctcacctcagacaccggcggtagggctggatgcgggcccggcccaggaccggtcttctgtcctcacaccggggaggaccacgcaggtagctggagagtccaggagtccatccctcctgcttccagcggacctcctcacatccatggtgttcatatccaagttgtctccgtggatggagaagaggaatcctctccctaggtctccctcagtcctctccagccgcagccttgacgggaaagagccggc

SEQ ID NO: 238986 - DNA, 56 bp, Homo sapiens; identical to SEQ ID NO: 204471
  chr17:26926827-26926883
  hyper

SEQ ID NO: 238987 - DNA, 326 bp, Homo sapiens
  chr17:26988802-26989128
  hyper
ttcaccacggagccgcaagtaacgacacccaggctggacgctcccacagcgctccacaaaccccccaacaacagcagaggtactacagccatcctaactgtatcgcggagccccaaatcttcgaagaaaactcggcccctccccggaaccggaagctaatggcgaaaccacggagagaaggaagtgaagaagcccgagtctgatctttatggtttatttgactagagcggcctgagaaaccggctgagcctggttacttacgatactctcgctctgttccaggggctcagtgacagctgccttcctgagccgcttcggttaccttt

SEQ ID NO: 238988 - DNA, 843 bp, Homo sapiens
  chr17:27038291-27039134
  hyper
gtccgatagccgagcgttccagctctggctggaaccagacttcccgcccatcccgcgggcgacccagcagggcctcaggaccccagtcctcaatcattggcccgcggctcgacgcgagcccgcccccggccctagctccgccccggccctagctccgccccggcccagcactgggccccgcctctctcgttggtttgcccgtctccctcgtcggtttgccggcttcccgcgtgcgccgctcggggtctgcgagccgggccgcgccctctgcccagcccctgccccgcccctcttaccgcggcatctgctctcatcccacgagcgggccttgggctcggtcttttccttagtccatctttcaattgtgagcgtcgtcctgacccacatcgctctccgcccaggtcttcgtctctacaggactcttgcgtgaagtccaaccctgagcctcagcccggccgagccctcggcccagccgtgaactccagtctcggcttcgcccccgcctagcccctaaccccgcctcatgctggcgcagcccccgccggcctccccagcccggctccaggctgcgtagtcttcccagctgggtctcagcgtcagccgcgttcttcatccggggcctccggcgcctcccaggcccctctttatctcagaccttaaccttacaggcccagctctcaccacccatctctggttccagcttgcagtccaaaccccagattttcaccctgcctccagatcgtagccccaattcttagtgttacaacgagccttgcccccagccccattcttagccccgccccggccattctctaaaccgcacactcccgtcccgctccccgc

SEQ ID NO: 238989 - DNA, 72 bp, Homo sapiens
  chr17:27039397-27039469
  hyper
cgaagacctaactccgggctgaggacctgatgtcggctcccagcccctgcgccaccccgcagcgttcccgcc

SEQ ID NO: 238990 - DNA, 560 bp, Homo sapiens
  chr17:27044394-27044954
  hyper
acaactcggggccacggggaccctacgggagtccgcggtctcggagacgctacgaccaccgcgggccacggagatgaaacaatcacccggggccgcggcgagcccaaaatcacccgggccctgggcgtcccgaagatgactctggggcgaggagactcttcggccgccaattgggggcggggagtcccgtctggtgggggccgggcccgcgcagaccctacgattacgcggggccggatagttcctacgattacgcggggccggatggttcctacaataacccggggccgcggagacccgacgtcatctcggggctgaggctgccctaccattacagagcggcccgggggcgcggagcggccccgccacacggggtcagtgtgggcaggggcggcgctgccaaggcccgcaggccgctggaggagggggcgaggggcccagtccggctacagggcctcgagtcccactccgctcgggctccgccaacgctgtaacacgatccccggaaattcctggagaagggccgccccccgcccctctcctggcggctccaggcctcg

SEQ ID NO: 238991 - DNA, 52 bp, Homo sapiens
  chr17:27046942-27046994
  hyper
aagtacaaagcatcgcgagtctttagtgctctttggcgctataagcccgtgg

SEQ ID NO: 238992 - DNA, 399 bp, Homo sapiens
  chr17:27070824-27071223
  hyper
agaagcggagccacgatctctgtcccccaggggaaagaaaagcccatgatcccgtgggtgggcgagactggcggtcaccagacccaaaaaccatgcactcgggggtgggcggggccgcgagggcgcgcattaggaccgcgcggccgcggtccgccctctcttccggagggcgggcttcacagccgagccctggccgcgaccgccagtcggcgccgcccggagccgggagcgccgctccagcgaggcgcgggctgtggggccgccgcgtgcctggccccgctcgcccgtgccggccgctcgcccgccatgcctggcttcgactacaagttcctggagaagcccaagcgacggctgctgtgcccactgtgcgggaagcccatgcgcgagcctgtgcaggtt

SEQ ID NO: 238993 - DNA, 448 bp, Homo sapiens
  chr17:27181909-27182357
  hyper
caattcctcctcccgcccacatcccatgtgtctcggctttcaatttgggcagacctacctctctcctactcgctggttcgtcagccgctctgttcaatcgtaggagcgctcctggtcggttcccgcagtgccttgcggctgtaatggctgcccccagctggcgcggggctaggcttgttcaatcggtgttaagagtctggcaggtgggccctcatgtcgcgagggagcgggtgatccctttttcctcactcttaggcttccaacggaggtgcgtgtcctgcgtcgcggggtccgctttctctggtccccgcttggcctcggcttctcgcagtaatggccagggctctgccctggaccacttcctcggattctctcagcccgacagttcggtgactccttgcgtccccgcggtgtccatgaacagaggtaaagcgccctgataggtttg

SEQ ID NO: 238994 - DNA, 304 bp, Homo sapiens
  chr17:27230104-27230408
  hyper
aggggcgtgtgcgcgtgcgggtgcgcgccggccctgcgagcgccccctaggcgtgcgtcggcgtcctgggggcgtgtgcctctgtggacacctttgaggtgagtgtgtgcgcttgggccctgggagcgccccctaggtgtgtgcctgtgtgaactcctgggtgtgtgtgtccacgtacaccctgtgagtgcacgctaggtatgtgcatgcatctgcaacgcttgtatgtgaatgatctctaggtgtgtatgtgcccatgtccctgaggatcaccctttgggttgtgtgcgtgcctctggatcct

SEQ ID NO: 238995 - DNA, 293 bp, Homo sapiens
  chr17:27621158-27621451
  hyper
gtatatctgagcgcgtctcgccagcgcactggttaaccgagcgattctgcgagattggcagccgcactccaacaatcaggagccacgctgtgccgcaagccccgcccccagctcaaatcctctttccttccccttcgccgctgccgcctggccaacgccacttaccctgtgcaacctcacagggccgggccttcaacgtcagcactatggctctctcttctgtcgctttctctccttcaccacgcagtctgtgaacagcactttctacactcctcgccggcaagcaggctcgt

SEQ ID NO: 238996 - DNA, 38 bp, Homo sapiens
  chr17:27893141-27893179
  hyper
ctcgtagggccagggcaggccggcctcgaaccactctc

SEQ ID NO: 238997 - DNA, 807 bp, Homo sapiens
  chr17:27940231-27941038
  hyper
gggccaggacgccgcgggactgaccgcctccactagagggtggtggccgcgggccgccctggagcctccacgccgtgtcccggccccggccggtgggtgggtgcgcccgggagcccgcgacattccttccccacccccaggagcgccccgcccacgccgcagcgccagcctgcgcccccggcgtcagtgcccagccctcggcccagctcagggccaggttccggcggccacgtgttccggagctacgacgagcagctgcggctggcgatggaactgtcggcgcaggagcaggaggagaggcggcggcgcgcgcgccaggaggaggaggagctggagcgcatcctgaggctctcactgaccgagcagtagcgccccctgccgggaccctcgccagcgccacgcgcgccacgcccagggccaggagccagacaaaccccggcctgcgcgcctgcagagcggcggctggagactggagccaccgcctcgcgggtgcagcagcacagcaggcacggttcggggagggattcggcatggccgcggggtaccttcccaggccagggccctggaggcaactggcacggcctggtccccctgctttgctgtattctgattccccaacccgctcccctgggctcagatctgtcctgtcctagggcggagccaggcggtcctgagggggagatgaatccttagaggagcgctgtccctatcccttgctccttctggccggtccgcatttctgttcactaaccccactccaggacactgcccctgaagcctttgcatctctgctcttcactcctgggg

SEQ ID NO: 238998 - DNA, 41 bp, Homo sapiens
  chr17:27941068-27941109
  hyper
tgctttgttccagacacaaaccagcacgtctagggcccagc

SEQ ID NO: 238999 - DNA, 474 bp, Homo sapiens
  chr17:27942512-27942986
  hyper
ctccctaggccagctccagccgagtcccagacgaggctcgcagtccagcctccgctggagcgacgtgggtctcccctaagctccaagagttctggtctcccgcgaggggcggagttccctccccagtcccgcccccgggcccagcccaagaaggcggggtccggagttcgggactaaaagccggggcggggccgagcttgtgcgccccgccccgctccgcctgcctggcgcgcggggctagtccgtgccgtccaccagctcgcacagcatgttctccagagccgtgatgcgctgctcctgggcctgcacccgctcgcggagggccttgatctcttccagcagcgtctccagggtgtgctgctgctggggcggaggacagagaggccgtgtcgtataggggcggttgggggagatgtagattgggccagagtgcagcagggccgatcttaccgacaagggggcgtcgctggccga

SEQ ID NO: 239000 - DNA, 69 bp, Homo sapiens
  chr17:27943346-27943415
  hyper
tgtagaacctataagggagcagggttcagcaccctcgcagacttccacgtccttaacttctcctgtcta

SEQ ID NO: 239001 - DNA, 796 bp, Homo sapiens
  chr17:27949458-27950254
  hyper
ccgagcctgaggcccggcctccctgcacccttcttcagcctgctgccctgacactgcgttcttgcgagacgaggtgtctgcgccctccgggagcgctggctgctgtccggccaaatatagacaccacgtcctccccgcccgaaaccgaatttggcggcgcggggggaggaggcgcagacctctgcccctcagggaccccgcccgctccgctggctgcggtgacggccgggtgtggggggctgggtacctggtcctgagcgggctgcggggcgctcacgctgcgaatcctctgcggaaggggcccgagtgcgtagggggccgaggaaggcttcagggcgaaggagccacctctccgggtgtctgtagtatctgggacccgggtgtccagctccgcactctggccgatcctgcggctctctagagcccggcgccgctgcagccccagctgccgctgccatcaacctaagagggcggggctagcataggggcggggccagagcccaagttgccccgccccctccagcggcgggaaagtcgagcgaccccgactcccctcccagcttccgccggcctcggagaaccatcgaaaataaatgtgcagctgtgtgctaggtgcgcacgctgcttccctccctccatgactcccgggtaggctggggaggctcgggttcgcagacctagagcaggacgcttggagagggaacgggcgagggggcgtgcgcccctagagcgggcagccgagggagaccaggtgcctccacccgcattccagcctcaatcgcgctcccaatttagc

SEQ ID NO: 239002 - DNA, 530 bp, Homo sapiens
  chr17:28088013-28088543
  hyper
tccttccctccagacgcacggagacctccaggcaagcaggatgcgcgctcgccctcgcttgattgtttgctccccaggatgctggggaaagcggctgctgaaagagcaaactttctgagcgttcgcggaggcggagggcgcgcggcggactcacagctggttgatggcgttctgcgagatgaccgcgttggcggagaagtaaggaatcatgtcggggccaccgaggctgcaggtgcaagcgaggggcgccttcctcttgcgggccaacgtgctcagggtcatggggccggctcaaagtgcacaactccgcatcctggcctctgctctgctccggcacgaggcgcaggctgcgcgtgcacccggcggcggaggcgggcccgccgggtcgcgcggaggcagccgccgaagccccagggctcggcggtagagtccggactgacgggcgtcgccagcagttcgcccccacccgcgtccggggcgggacgggcgggtcctgagagcggagagggtaggcccggccggcgccccgc

SEQ ID NO: 239003 - DNA, 325 bp, Homo sapiens
  chr17:28256763-28257088
  hyper
gggcaaaaatcaacgtcttgtagttcctgctgctagtctttaacatgggggtgtgggggggttcgcggcagccgagtgccaaggcctgggaagcggcgcggcgcgtgcgcagtggcgttcggcgggacccgctgaggcaaagcggagccgcagtgacagaagcaagcggagcggccgccaggaaggactcaccgaggcgcaggggctggaggtggtgctgggggtaggtgaccgctggaccgtgaccaaagccatctaggcgctgctgggttgttccgggcagggcattcttgtcctgagtgtgggggacgggagggtgacggag

SEQ ID NO: 239004 - DNA, 329 bp, Homo sapiens
  chr17:28443742-28444071
  hyper
ccagcgattcaaccgacaagcaggatccgggccacccaaagccgcgcgagagtttacgtgacgacatcggcgtcagcgtcacggaggcgtcggccacgttcagcggacacgggagcaagatggcgattccgggcaggcagtgagtgatccgggagttagggtcaggctgggggatgagaaactacggcgactgtatctttggccgaggagttttaaatgcgctggaagtgaagggactgtgtcgtcaagggtagagacgggaaaaaacgagaagtcctgaggaacatagattcccctcccccgtacattttcccggatggaagcccgaa

SEQ ID NO: 239005 - DNA, 111 bp, Homo sapiens
  chr17:28562514-28562625
  hyper
cctcctcgcctcctcgcagggcggtggggcgcagcggttctatccccctccccgaggcggggaagaaggtctggaaagaaacgtgggttcgaggcggagaggaaaagcgga

SEQ ID NO: 239006 - DNA, 166 bp, Homo sapiens
  chr17:28563901-28564067
  hyper
tgcagctccagagaagccaccgccccttgtacttggaggaactgacccctgaaaactgtgcggccggttgggctgagcgtctagagggactgagctggacaaccacgggcaagcgagggcagctcccagcgggtggagtccgcgcgggattctggtgccacctaga

SEQ ID NO: 239007 - DNA, 200 bp, Homo sapiens
  chr17:28705363-28705563
  hyper
cgcctagtgaggtgcgagccttcctccccacgaggcgtcccgtgcaaccgcacgcggacagcggggctccagcggaggcggggtggatgcggagacaaggcgcctaggagactgggctaaggctttgagtgtccgaacgaagattctttcgaacctattgattttttctagtcttatgattctttcgaaccttttgattc

SEQ ID NO: 239008 - DNA, 149 bp, Homo sapiens
  chr17:29020921-29021070
  hyper
tcctccgcccacccggcaagcaccacttcatcacgccaccgccagggtgtcaggcggggctgagcggttgtcatttctctctaacccgtcagaactctgcacttccttgacagttcgctggctggcctccgacccgtagctgatttctt

SEQ ID NO: 239009 - DNA, 397 bp, Homo sapiens
  chr17:29033064-29033461
  hyper
tggggtgtctcaggcgcggggctcatgggaatcccaaggcgcaaggtgggaggctggaagcgaggagcgccctgggagcagggtgtccgaagcgcgggtaccgatctgggcagcgcggggcacgcggcgcgcgggcgagtctgcgtgcgcgcgcggacgccttggttcccggagcccagttgctggcgcggcctccactgcggctgcgaagccgaaggtctgaggtgcgccagggctctttacgcggcccccagcctctccgcaccctttgtctcctgagcacgccgctcacaagtccaggagacatggatcagatggaggctggagagccgatcccagctgggaccagtggggtttagagggtctagaaaggggtgaggggcgagggtgagggggt

SEQ ID NO: 239010 - DNA, 59 bp, Homo sapiens
  chr17:29248940-29248999
  hyper
ctggctgaggcgccgcggccgggtccctctccacctgccgggcggagcgcacgggccat

SEQ ID NO: 239011 - DNA, 783 bp, Homo sapiens
  chr17:29297829-29298612
  hyper
tttctagcagctcgcggcatgttggtttcccagggcaagaggccgccactgaaggtcagctctgtctttccagctgggcactggaggctctaagtctgttttcagcaggatcggaggaaggagacggggtggcgccaaggaaggaggagaaaaggcggccgagaaaaggaggagggcaaggggaagaggaagggcgagggaggagcctgaggagactcgcccggctcaaccccgacgtccgcgccccggccgcctgttggccatggcgggcctgggcctgggctccgccgttcccgtgtggctggccgaggacgacctcggctgcatcatctgccaggggctgctggactggcccgccacgctgccctgcggccacagcttctgccgccactgcctggaggccctgtggggcgcccgcgacgcccgccgctgggcctgccccacttgccgccagggcgccgcgcagcagccgcacctgcggaagaacacgctactgcaggacctggccgacaagtaccgccgcgccgcacgcgagatacaggcgggctccgaccctgcccactgcccctgcccgggctccagttccctctccagcgcggccgcgaggccccggcgccgcccggaactgcagcgggtagggaggccgggcccgcagctcccctggctcccccgggctgcccgccgcctgaccctttcccatgtggctcgaacccctttcctcagccgttctacttttacgttccttttctcagtctaaaagtcgagttccgctcttcggaggca

SEQ ID NO: 239012 - DNA, 428 bp, Homo sapiens
  chr17:29335427-29335855
  hyper
ccgcctgcctcagccgaccagcgccgtcgactactgggcctagcccagacgagaggagggaaaggccgcagaggccgcgaggatgctgcggaggcgcgggcggccggctgccgcctagttgtgcagcccagaccaaggaaagagaagtgggaggagcggggagctcggcgtcccgcgtcctccgcggctcaggacgactacgctcggcacgtccgggaccctccggccgtggcggttgcagcgccaaaagctcgggcctcagcccctgacgctgtggtgactccgccgcgcctcgccgtcgcccctgtccccgtcctgcccgccgcctccgccgctggggacatgtccaaccccggaagccggaggaacgggcccgtcaagctgcacctgacaggtgagggggagcgccgggccgggctgggcagccg

SEQ ID NO: 239013 - DNA, 59 bp, Homo sapiens; identical to SEQ ID NO: 204485
  chr17:29422762-29422821
  hyper

SEQ ID NO: 239014 - DNA, 33 bp, Homo sapiens
  chr17:29719082-29719115
  hyper
cccctcccccagctcccccgccgggtcacccgc

SEQ ID NO: 239015 - DNA, 143 bp, Homo sapiens; identical to SEQ ID NO: 204540
  chr17:30454644-30454787
  hyper

SEQ ID NO: 239016 - DNA, 266 bp, Homo sapiens
  chr17:30469088-30469354
  hyper
cagtcgccctactcgatcaagcattttctgacggccctatccaataacgtggggacgcagctgaaaaccatgcaagctgatcgctgccctcccggagtttatggtctggtgagaagatccctgctctgagtcactgccaagctctagctatgtgactttgaacagggaatttctgtccctatctataaaataaacggggttaaaccagggaatccgccattcaaattcctggcccaagtgtctccggggtcgcggtgcccaaagga

SEQ ID NO: 239017 - DNA, 68 bp, Homo sapiens
  chr17:30592873-30592941
  hyper
gggaagggagcgcggggagcggcggggccggggccggcccaagggcgccctcgcctcggagccgggcg

SEQ ID NO: 239018 - DNA, 792 bp, Homo sapiens
  chr17:30593241-30594033
  hyper
gccgcctgcgccgaggcggagcgcatcgaggagctggaacccgaggccgaggagcggctgcccgcggcgccggaggacgtgagtgccccctccccgcccggcaaactttctagggggcgccggggggaaaagccgcccctgtctcgccccacgccgggcaacttggaggtttcagggtgacgcgggagcgccccggattggccgggtccccgcgggcaggagggggcggagggaccggtctccccgaaacgcgcgcgcaccgcttcccccgctctggttcccgcggcttccctgcgggacacagcaccgccactgcgccgcggacctgtcaccgccggagccccctccccgccgctggtgcagtgcccgggacacggcgttttcccgcagaggcggccgcgtcacggcggtgactccccctcccctcacgcccgcgacctgcgagctcccggagctggggaaggagcggacgccgcagagtccccgtccctggccatgcaagccggcctggcgaccccttcctccgctcccggattagctcccgcccggcacctgccttgccgcgacactgattgaaattcaagccggcccccgcctctgaccccggccggagcagggaggcaaagagtgctgggagcggctttgctcctagaaggaggcccgggagtccaagaccgtggcggtgccaggggacggtcccctgggcgaggagagggaggggctgccccgagggcttccccgccgtctgctgctcgggtctccatccctccggtcctgcgggccggccctgcg

SEQ ID NO: 239019 - DNA, 297 bp, Homo sapiens
  chr17:30846452-30846749
  hyper
agacaaagggaatctgcacccgccgggtgggctctggcggcggcggcgggggcggaggctgcggcttcgagcgcgacgcggtcgccaaggcaacgccggccccagcgcccgcggctgaaacgaagccgctgcccgagcccgagcgccagcgcacacgccctccttgcagccccccgcagccccggccggccgcgcttctccgcctcgccgccgacagcccctcccagcccgcctgcccgccctccttccggctgtttttgtttgtctgtctttcccgagaaggtgatgatttggggc

SEQ ID NO: 239020 - DNA, 57 bp, Homo sapiens; identical to SEQ ID NO: 204546
  chr17:31254914-31254971
  hyper

SEQ ID NO: 239021 - DNA, 377 bp, Homo sapiens; identical to SEQ ID NO: 204547
  chr17:31255335-31255712
  hyper

SEQ ID NO: 239022 - DNA, 190 bp, Homo sapiens
  chr17:31264131-31264321
  hyper
ggctggtatgccgacgtgcctgagcagagggtcggggccaggatgttttccacgtcagccacctggcccctccgcccacccgggagggcacctctgtatgcctgctgaaacaatggcactgctgtgagttccaggggcccacacgttccttgttgccatggccccaggtaaatcacgaggaaccagccct

SEQ ID NO: 239023 - DNA, 75 bp, Homo sapiens
  chr17:31618426-31618501
  hyper
gaggagaagttgtgcggcccgcagagctcgccgcggtacttgcaggagagcagcatgtcctccagctggtggccc

SEQ ID NO: 239024 - DNA, 37 bp, Homo sapiens
  chr17:31619521-31619558
  hyper
gaccctgagccgagtcccccctgccccgcctaacccc

SEQ ID NO: 239025 - DNA, 349 bp, Homo sapiens
  chr17:31620098-31620447
  hyper
aacacctcccgggggtgacccggactcgctgctccgcgcgcccttctcctctcgagactccgagctcgcggtggccgtgacgccggctaagctccttccccggttgcccgggagaaccctctttgggccccaggcgaacttgggcagcggccgcgcgacgctggcgcggctgggctccgagcacctgctcctcagctcgctggccccgcggctccgggcgggcggggcggcggcggccgtgagcgccgtgcgctcctggagacgcggtgctgacgcgcccggctcctcctcgctgcattttaattcctggccactgtggccgctgcacaccgagcgggaagcctcttgc

SEQ ID NO: 239026 - DNA, 385 bp, Homo sapiens
  chr17:32483868-32484253
  hyper
tcccccctacacacgccactagagacaagattaaaagcgagagcgagagagaaaatgcttaaaacaagtcgctgagcagctcggagcctgttaaccagcgcataatgccccatgttaaccatcctgggggatgtcagggcggccacgctgatgcactgcggtcgggcgcagcggcacagccttcagagccgccgccgctcggttccttttcccatgatgttttggactccgaatgccgtttctcgccgccggcctccgtccctcctctcctcctcctccaggcccccttttgtgggcagaattccaaatgccagcggccgctgctagcaccggggagaggaggcagcgcgcggcgcggagaggcgaggaccggtatctggagact

SEQ ID NO: 239027 - DNA, 1704 bp, Homo sapiens
  chr17:32905945-32907649
  hyper
aaataggtttcccacagctgcgccccggacccatcccgcacgaagctgagccccagagcccccgcggcccgagaggagctgggcacagcagcgaggctgattcccagccagtgcccagcgaactctgggggtgggggtagggtgccccctacccgcgcctctggaagagcggctgcaaaacacctccggcgcccggtggggagcgtgcatcctttgaaaagggacatcagtgactgcggtggcgtctaccctggagaaacgcagctgagggaggtggaggctcctcccgccgcagctggccggccccattcgggtcccagcgctagccggcgttgggaaggaaaaatcaaacataaaataggggcgagcggaatcgcgaggtcggcccttggcccgagtctcattaaggagccgcgcgcgccgccaggctaggaatgcggaatggacacgtggacagaggagggggagctaggagtcggggagtctccgtggcgcgcgagctgtgggccgcgcgctcgggggccacgtgaccacggggaatctgggaggggtgggagtgagcgcgccaagctcggcgcccgcttctgcccgggtgggcgctgaatcccggacggaggaggagggcgggcgagcgcgagtgtgtgtgtctctctcgagtcatttacggcggagcagccggcgcgagcgccgaggaggcggcgacggcggcggcggctgcttcgtgcaactgtggcttcccccacctcctcttcctttttgctcctcgattcttcttcttcccccacacacgtccatggggagccggctcccctgccagcacctcctctcctctcggccccgtaggcaccagctgccgcttccctggccgcaagctgcgcaggtgccggctgccctggcccctggcgccgcgcccgcgtctcaccgcccgcagcccggactggcgcggcgatccgctcgcccaaactgactcggagggagcgggagccgatgcccggcagcatcgagacagcgggcgaacgggcgtccggggacagggtgggggcggcggggaggaggcgtcggagactctgaaccccagaaaagttcaaggtttgtgcaggttcccccagggaaggcgaggagcgaggcggggcagcgcgcctctctgccgagacagcgagaccttagcggggtggcccggagctgccgtgagctgcaggagcccctctgcatcttacagcgtttatggtcatcaagctggagtcgacgtcctgggcaggaagggctcggggcagggcgcattagccggctttctcgctccctcgcttctccaagccccatctacatggggcagcccgttctggccgcgccacccttgccccagccgccgagcggctgcctgggcaggaggcgctgagccggcctgtgtggagcctgggccctgatccagactggagaaagcgcgctggagcggaggagcgagccttgcgaggggacaaacatctggccgcccgcctcgggcatccggtctgggcgtcgcctagggtggtggcgaccggcgtcgccagtttcagcaccgcacggaaacttttccttctccagatggattaaagttgtctggattttctctttctttgagaaagacagcattcatttgcacctgacctgggatttttatgctgggctgctgcaggggcttggaggaagaaagcggcgctatccatg

SEQ ID NO: 239028 - DNA, 188 bp, Homo sapiens
  chr17:32907829-32908017
  hyper
agatcctgcagggggcaccagctgggggaggtggaggctcctcccgcccggagctgcgcccccaccggctccgagggtgtagccgccagcgcctgggacgccccctccccgcaaagtgtccccgaattgcactctctggtcccggagctgcatctgagacagccgggcgccacggcagccctgagttg

SEQ ID NO: 239029 - DNA, 270 bp, Homo sapiens
  chr17:32909037-32909307
  hyper
gaggcgaggggagcagaccgaggtgggagggagagagctccgaaaggagagtggagaagcggggccctctgctccctcctaacgtgaaaccagccgacctgggatacattttcttaaccagcaaggcgtggcggggttggggggcgggggtgtttcgatgctccacgctgaggggtgagcctcaggcagaatggagggcgcttagatggagggggcagtgggctctccgcattggtggagcgccctcggtgtgccgggctcagctcttgc

SEQ ID NO: 239030 - DNA, 519 bp, Homo sapiens
  chr17:32965109-32965628
  hyper
tgactcggtgcccgcgggcgaagaggacgaggaggaggaagaggacctgggttggggctgcccggatgtggcgggccccacgcggcccactgcacccccggacctgcacaattacatgcgcagaatcaaagagattgcatagaggcgccagccggagtagcagggacccccccccccaacggggtcagctcggggtaggacacagccgggaccccggttcacactgactctgggcggctgaattgattttgtactccctgcccctgcagcttggctccgtgcggagcgggccgcctcagtgtctgggccttccctcgcctcacgccattaccctcttctgccccctgcaggtggagggctcttcctccagtggctcgtaaggaggaaagcaaccccagcctctgttctgccctttccaaacctcctcccatcttaagcaaccccctgccccaagagtgaggcaaggaggtccagcttggggtcaggtgggcccacgctgtgtcccgggcccgcctcccg

SEQ ID NO: 239031 - DNA, 177 bp, Homo sapiens
  chr17:33213946-33214123
  hyper
ttcctgtcggggcccgtgcaccccgggtagcaagagccacgtgaacacatttgggttagtgtgtcaataagattagcaggaaagaaaaaggagaagttgtcagcatgtgagacataaaggtgtaaagcttttatcagtattgccaaatggcttcagtctccccgacctagatcccat

SEQ ID NO: 239032 - DNA, 922 bp, Homo sapiens
  chr17:33288232-33289154
  hyper
cgggcccctagccgcgtaatggccgctccaaccgctgtctcacattttcatggtgcctttaggacccaagttggtccgcagcacatcctgcagccctcgggcggcgcatatattgacagccaaagctgcccgggcccgcgccacctcagccttggagttgacggcctttatcgcagccatagcctaaccgttcagagggagaaaaaaaaaaagccttagtcgcgattctgagcaaaaacggcaatgcgacgccacgctctcttgagcctcggccaatcatcgcccttacaggaagtgacgttatcatgcctcgcccgacggaaaccagaatcgttttgggtctggtcgccaagatggcgtcctccgcctccgcccggactccggcagggaagcgagtgataaatcaggaagaattgcggcggttaatgaaggagaagcagcgtctgagcaccagtcggaaacggatagaatctccattcgcgaagtacaaccgtttggggcagctgagttgtgccctgtgtaacactccggttaagagcgagctcctgtggcagactcacgtcctgggaaagcagcaccgagagaaagtggccgagctgaaaggcgcgaaggaagccagccagggttcgtccgccagttcagcgcctcattccgtcaagaggaaagcgccggacgcagacgaccaagatgtcaagagagcgaaggccaccttggtgcctcaggtacagccctccacatctgcgtggaccaccaactttgacaaaataggaaaggagttcattagagcgactcccagtaagccttcaggactcagtttactccccgattatgaagatgaggaggaggaggaagaggaggaggaaggagatggagaaagaaaaaggggggacgccagcaagccgctctccgacgcacagggcaa

SEQ ID NO: 239033 - DNA, 70 bp, Homo sapiens
  chr17:33349988-33350058
  hyper
caggaagcaatcctcggcctctcaccccacaggctgagtgagcacagtgacatccggctgagctctgttc

SEQ ID NO: 239034 - DNA, 111 bp, Homo sapiens; identical to SEQ ID NO: 204551
  chr17:33446952-33447063
  hyper

SEQ ID NO: 239035 - DNA, 188 bp, Homo sapiens
  chr17:33469240-33469428
  hyper
cggcgacgccccccgcccccatccacgcacacccaccggcactgctgccgccatcctgcgtccccacgtggaggagaaagagcccggcagacagagcgccgtctccgtggtcgggcggggtcgccgccggccacatcgccctctgctgttggggaggagaagcgtcccgctgcgcacggcctcaggga

SEQ ID NO: 239036 - DNA, 59 bp, Homo sapiens
  chr17:33673438-33673497
  hyper
aagccccactacaatggaagcgtcgggcgtatcctcccgggcctctttccctccctccc

SEQ ID NO: 239037 - DNA, 1626 bp, Homo sapiens
  chr17:33700165-33701791
  hyper
cggttcctgctccgcgccccgcagaaaccgcggctggctggccaggggctcttccaacttccagcgggagcaggtgcacaggtcaggcccgccccgcccctaatgccttctacccccattacccacccccgccccgcccgccagtcctccatagtccgctttttagggaacctgctgagcaaactagctgggcccccggacaggggagaaaagcacagatacccccactccactccacccccagcccctccgcacccctccagcccctccccacaccccacaccctggctggggtggggtgggaagggtgctgctcccttctcgaacctggcactcgagttacagcccgacgcggattcggctgggctagaccctgaagcacgggtagaaacgcaactccggagtcccaggctgggggcaaggaccctctctgacctctcaagctccagcgcttccgaagcccccttagcgtttccctggaggcgcccaggtcgagtccttatatactagcgggttggcgccatcccacgcacatcccacgcaggagatgcaagagccaatgggcgggtctgctaagcccgcgaactctgccgcgttaaattgcctagaagctcccacccttctgactgttgccacgtagttcttagtttccgggaatttggggattttttcctcccccttcttcccacccttcctccgtctcctcgctccctccatccatctctccctccctatcatctatctattcatctatctggattacagcaaaacaaagaataaagattatgaagaaagagaagaacttcccaggcccaagcagctgtcggctcctgcgctcccaacggggtggccgtttccttcctcgcaccctcttctctcccggtgcctgcggtcccaccttccagatacccctcggagagtccagctgagctctcgccagagctttccccttccaacccgctcgacttgcccagatcccaagctgggcttctctctccatcgccccagaaagtgggtcttggagaccgaggcaagaatttgggcctccgcttctgttccagaccccggaccccttgccaaaatgcggcagatgtgcagattgggccgcgcttggttcctggctgggtttatggagcctgcggctgaggcaggctccgcagaccccgagccagagtgggatttaacggcggccggtgcgctgtgcttggtcaaccccggtaaccgtcacgctgctagtgatatgaaaaaaacctgccagcgttctgcttttctgccccgctgcagtctttagcacccgccaggattctgtccgagtgtttggattttgtaatcctcctgtctttggccaactccccatccttggcggagcgctcgcccttggccgggctccgtgctgccagccttgcggaaccctaggcccgggcggctctgtcggaggcccacttctcactgatgcggagtggcccgagggtgggagcagcggttaatgccgcactgattaatacaggctccagtgaaagcgaaagtaagaaaataaaacggatttcattatacatatacaatgtgtgtatggatacatgtacatacatattacacttatgtgtatgttacgcacgtttgttaaaa

SEQ ID NO: 239038 - DNA, 456 bp, Homo sapiens
  chr17:33775274-33775730
  hyper
gaaacaagagtcccaaccttcgcaacgggggaagcctccaggacgcacttggctctgcctgtttgttccgcccccgcggaaaccgctgctcgctgggcaggggctttctgttttgcagccggaacaggaacacagatagcccgccaagccgccggcgacaccttccaacccctttagctctccgcaccgtccctccccaccgccccgcctccacccgcgccgcgatcaagtcctcatagccttttagggaatttgctcagcaaactagccgaaccccaaaggcaggggagaagcacgcaaataccccgactccaccggctggccggagctggggggcgggggttgctctcctagcttgctccccatccgagtcaacgccagtccagggtcgtgccggactagaccctagggcgtgggtacaaacgggagctccgcagtccccgtaggagcagggac

SEQ ID NO: 239039 - DNA, 387 bp, Homo sapiens
  chr17:33787454-33787841
  hyper
gccccactgcacaccgagcaccaccgtcacccagtttcctctgggccgcgccctggggcggccgcaatcgccgctgggcagggaggatgcctccaggtagttcttggcgaacgccgcagctccggtgacgcgaggagagccggaaggagacgcggccggcgagaggtgagcgaactgtattgctctgcggcctccagccacctgcggaggaagagggagccagaggccggccccgcccccgcccccgccccgctgggctgccacactccagccaatccctgccccgctctccgccacaacccgctcaagtagggggactctgactgccccgcgcaggtggcctgccttggcagcaccgcccgcgggaagtggcggcctggcgcgcta

SEQ ID NO: 239040 - DNA, 237 bp, Homo sapiens
  chr17:33814750-33814987
  hyper
aggtccatgtctgcgcactcttcaccaagtagggggacctgagttcttttccactttcctgctctccgcgtccgtgtgcggctagcccctcgctcagctgcatttctatcgggcactcgactccccggaagtggtggcaccgcacgcgctgttatcgactctgcgcctttggaaacggtgtgtctgcgaatccaacgacgggcgcggtgactcacgcctgtaatcccagcactttgg

SEQ ID NO: 239041 - DNA, 252 bp, Homo sapiens
  chr17:33905430-33905682
  hyper
ctgaggattcagtcgtgccactgtgagcccgggacacaagggctgactccagctgttggctttgagtatccccgcccgcgcccgtccttgctcgctgaccccaggcgaggcgcaaacaacccacgacgccacgtttgaagggaggtctccgctttatgacagaagccgcacccggaaatgaaaccaccaggacctctgggatgcctggcggaagagaggcgctctagttccgaatgcggtccggaaaccaga

SEQ ID NO: 239042 - DNA, 189 bp, Homo sapiens; identical to SEQ ID NO: 204556
  chr17:33914229-33914418
  hyper

SEQ ID NO: 239043 - DNA, 91 bp, Homo sapiens
  chr17:34400014-34400105
  hyper
gtggtcatcccttccgccgcccaccggctcccccattgtattgactccacattgccccctgctggtgaaacaagtgcgaaggtcagcgtct

SEQ ID NO: 239044 - DNA, 459 bp, Homo sapiens
  chr17:35014238-35014697
  hyper
aagggaggggagggaagggacgcggggcggaggacgcagcgggcggcctgcggaggcggcctggctcggggtgggggctcggccggagttcccgcggctgctcggcggcggccggctcgggagcaaccttgagcgcggtcgcggaggcagtgatttaggtgccggcaccggagcgtgaaggtaaatggccacatttcaccgtcgggaggtgagccggaggcgcccgccctggcccttcccccaaggccccgggccggtgggggcgggagttttgcttcccctctctgacccgctccgaggcccgcctgggagggcggcgcccccacggtgcaggacaggagggctgcgccgggctgcggggtgagcaagacccctagagctgcctttcccgaccccttcctatttggggggctgtttccctcacttccccgtcgccccggcctcctcccaaagctgctt

SEQ ID NO: 239045 - DNA, 173 bp, Homo sapiens
  chr17:35060309-35060482
  hyper
agtgacagatacccggggaggctgggcgtgccaagctggaccggtccggccaggctggaagcccagctgcccgctttttctcagtgcctggagaccgcccgccttttcagcaccacggtcagcggccttttcgcaggcgcgcgccccagccccgccccgggttgggctggcat

SEQ ID NO: 239046 - DNA, 486 bp, Homo sapiens
  chr17:35078589-35079075
  hyper
agccttaattgctacttaagcgtgggccctgcacttaacatccggggggcaggcccggtgcgtggtgcacgccgggcgcgctgtgcacagtctccggaggccgccagtgcgaccccgccccacccgcgcacccccgcccggagggccccagcgcgcatgcgctcgccgcagggcggcctgcggggctgtggacgcgaggccagctcgtagggggctgggcggtcagcggggtcaagggacagccacgctgggacggaggacggggacaggggagcccctgcggcgccacttcttcctctccgagtcctgtctgcccttgatggagccactggtggggttacttgctggcggtcggccactttcgcccctccctcgccagcccgccagctccctaaggttttgtggttttttgtcaccaccacacctcagtgttgagctaagtgaggacgtccccccagcaaatgtattggacggaaggaaacggtg

SEQ ID NO: 239047 - DNA, 69 bp, Homo sapiens
  chr17:35165347-35165416
  hyper
ccgcatttccaccccgctcccactgctgggtaaatgttcatctggacggggacaggatcgggaaccgcc

SEQ ID NO: 239048 - DNA, 34 bp, Homo sapiens
  chr17:35165956-35165990
  hyper
ctctcgccctcccggggaccgtgtgcggggagca

SEQ ID NO: 239049 - DNA, 258 bp, Homo sapiens
  chr17:35241874-35242132
  hyper
ctgccaccagggcccgctccccctccagtatgatgggtgaggggttgtcagacggaggagcagtgggggctgcaggagagacgtccgagatgggacgggacatttgggcagttggggccgatttgtcgccattttcacgggcagacttgtgaattaagtggcatgaaattgagcacagaccaggctcccccccagagacggggcagcccccgcccaggaggggagaaggcaagggggcgggagcgggaggggtggccc

SEQ ID NO: 239050 - DNA, 190 bp, Homo sapiens
  chr17:35285489-35285679
  hyper
ccgagagcagagagcggcagaagctgttaattcttgaggctaatgttcacatctccaacttatctctccgaggggaagtgtccatttgaccacatgatcctccctcccctaccctcccccaaggggaaatcaaatcttgaagtgagaccggaagagctgctgcggaacgtgagcacgggagagctggtgg

SEQ ID NO: 239051 - DNA, 320 bp, Homo sapiens
  chr17:35289323-35289643
  hyper
ggattaattactgtgaggcacgagccccgtttgtcttccttactgggtgttcagacagaggaacacgggcacgcacccaaatacacattgttgtcacgccgtcttagacgttttatttatttgttggattcctgcccagagccgcttttccacgggcgcagagtctcccaccaaacacgctgcctctttctctcagcacgcactcgcctgtcccaaagccgcacacccccagacccgcgggacgccccctccgtgcctgcagggccctcggctccgcgcccgtccccgcggccttcttcgtggcagggtctctctctggg

SEQ ID NO: 239052 - DNA, 1619 bp, Homo sapiens
  chr17:35290200-35291819
  hyper
gtgctctgacctagggatctcggacaagcctcctaacttgggcctcctggccgggaaagtggagatagtacccttctcttccaccccccaccaccctcttgctatacggttcaggggagaccgtgatacaagctgtgaagtactgcacacgagtagatcatttccatgagagagtgatgggtgagattaaggcaatttgagtccggagagaactagacgggaaggagaggcgggagaccttggcgctcagatccgagcgaccttatccacgcagttccctgcgtggcattactgcggcctcaccgagtctgggcggagtttgcgtggcctctgggaccggcagagtccaggggtgctccgggctggctatttcctccctcctccgggatgggtgtagcagggtgtgtactccgcatggggtaacctcctagagccggctacgccccaggcgcctcctttcacggccttgtcactcttttctgctccttgggctgttctggaaccgaagagagaggagggaaatggctaggggcggccatcatcctcgggatcaatagcagccgagagtgactgggcaggctctgtccatgggccgagcgtcattctggaacctggagggggcgggggcgggggaaggaagggaagtggaagtttgagaggggcaccttcaggctccccaaactgcatggcagctggagagggctgacagaaccctctccaacccgggttctgaccagggtccctctggggctgatcgtcaaggagcttctcaagaaaagaaacctggactgtgaaagtcacctcctaggccctctggggccgtatccgggggtgcctgggaggagggtggaaaggattctgcagtcaccgagctatgggcgaaaatgatccccgcggaccctggtccagaatgtacaggtcctgggcggtgtaagtggctgtgggtctgtggaggacattgggtaggaaaacgcttgcgtagttgaggatgcagacaataaatgtggccgggaaggtgaggagggaaggttggtgctcttcgctgaacggaactggcttaaatgcagagctgagctgagcggcttcggagaaggcgaatttagaaagcctggtcaattttctctccatgtccctgcgaccgattatgttttaaaacaaaagctcaatggaaacgaaaacaaaacaaaacccaccatttgtctaatgtgctgtccccgtggaggagttaaatctggactccaaacctagaatctggagccaagaggcgcactttgagttgcgctcctggccccccttgcagagacgccagggttggctcctgcggacctgtttactgagccatctggacaccaggacgagcggagcctgacgccctagagcgagcgtcctgtcctcatcctcaactctcctgcctcgctggtccgtctgtggggaggggccttctttcccctatacctaggtcccaaggttcttacacccctaaatggatggagcaacctcctcctgcccaccagagggaggtgacaggccctgggttggggaagggccgacagctaggtccagctgtcgtccggtaggtcccactgaccgccccacactccaccgtgacccctctgctt

SEQ ID NO: 239053 - DNA, 52 bp, Homo sapiens
  chr17:35291999-35292051
  hyper
cacgcagcgcagcaggctgggaggcgcctgggggtccgggtggaagaagtgg

SEQ ID NO: 239054 - DNA, 188 bp, Homo sapiens
  chr17:35292531-35292719
  hyper
cccacggttccacggagcgcaagccagattctctgaagcagcttccccgttcgtccgaagagggtattccatctgcacagcgggattccctgccagcccaggttcactgcgactccgcttccccgagcatttcccccgtttcagcttccgtctggtctgcgcatcgcgagtggggtccaaaggccaat

SEQ ID NO: 239055 - DNA, 3360 bp, Homo sapiens
  chr17:35293023-35296383
  hyper
gggggcggcggtcccgagttcctagccagagcgggattagggagttacgggttccctgaggagtgaactatggagggtgtggtttgctgttgtctggggaagccggtgccaacccgaagcctggacaggggaggactggaatcccggcacacgctgcccatgcactgcacgcccatctactgcagcctcttcgtggcgtcccggcaccccccctcctccttccctcttcccaacgccacgaccaccacccccagccgccgctggagcccccggtttcccgcctagtcgtttgtttttgtacgtaaaaggtgtctccggatcacagttttctcacaactttctcgccagggttgcaactcctcacccgaggcgcttcccggtccactccttcccccgcgccggcgccgcgcctccggtctccccgcccccatcaggaaaccgcccgaatcaactttgcaagagtgctctgcgggagacagacactcagctcgcccaggacccggaccctgtggactttggatggattgggggagggggcacagaaagagggacgggaggagggagattctgctgctaagagcctcctccccctccaaagatgtgcgctgcgcttgggacaaacttccaggtcaagaaagtacggggggacaatggcaacagccgctgaattgcaaagcccagcagtgcaggggagccgcctgggattccggacccggctgcaccccaaccttccacaaggctcggtcttggactacccccactctacagcagaactctggcctccgcctgcgcctattcccgctctctctctgtccctcccatcgaaacccacgccttaccggagcaggagggggcccaggcacggtgctgcccgccgtccgcgccgcgcggggccgcgggtgccgccgccactgatcctctaaacgcggtctccccgcactctcccgggccgggggatgcagaatggtttacagagggaccgcgaggcgctgattggtcgcaggccgcagtgacgtcggcgggcgctgcattaaggcgagggggcttccagagctcagccaacagccaggagcagtgaccaagccgccggagctggggagagacgcaccggggcggcgactgggccaggagaccagggactgagggacgcgcccggggagggccagcaacaagccgcggcccgggcgcgacagcggcggtccgcgccgagccgttccagccgccggcctactgtagccgctgcgccaggacatttttttttaaagctctccaagctgcccccctcctccccgactcctcccgctgcaaaagaaaaacaaaaaaaaaaaaggaaggaggctagaaaggaaacccagatttgccaccacaacgaaaaaaagaaggggaaaaggaaaaggagagaaagtcgagcgactgtggggttagacggaggcagacagagcgtgggccgagcgatgcggggctgtgcgcccaggcggccgcgagttgtgactggagccacgatgcacggccaggcgcggtgagaagccagcccgtagtgcctcccgaaggagcccgggcgcagggagggtcgccctgaggacacggaggccgccaggcaggccaagggccgaggtgactgggctggggcggtagggaaggagcgagtgcgcctggctgcctccgcacggagttgtccctctctgttttcgattgacacaaacacttctccaaaagcggggaaacctaagcaacaacagcaatcaacaccaagatcttcctcctaccctcccctctttcccttctcccgcggtcggccctcgccccctcccccaggcccagcgcgggcgctcggcgcgtccagacccgcggcgcgatgccggcagtttaggatccaaagcttctctgctccttttgttctttccttcccttttttaaaaaaagaggggggaaatcccagtggtgggcagcctggcacgcacacagtcgccctcataccccgacaaaagcagatgcactttgacttctgacagctctacctcaagccccggagaactcagcggcgctttcctcgcaacccgagctcggcgagtcgtcgtcttcttcttctccgtttttatttatttatttccgttcccgccgccgttctcgctgaccttcactcctccgcgggctctgagcagaagggtcgcattctctcccgcctgagacttcttttcctcgccccgggagctcaggcggcgccgctccagcccggggccccgggactccccggctgcacacttcactgagacgcccccccaggccccgatcagcctcgtttcctccaccctactttgatttcctggtgcgagttttggcttgcacggccgagtgtgtgtcctctttttggagagactggggagctcgtgccgattgtcttcaggagtcatcccctgggctctactttgcccctctctctctctgggcctcatcagaccaaaccaaagaccatggttcactgtgccggctgcaaaaggcccatcctggaccgctttctcttgaacgtgctggacagggcctggcacgtcaagtgcgtccagtgctgtgaatgtaaatgcaacctgaccgagaagtgcttctccagggaaggcaaactctactgcaagaacgacttcttccggtgagtactttcctcccacgcctctgctgctacctccccgcgggcccttcccggccagcttcggatcagaggttagcgtggcctcgctgcccagttaggaactgcttctagagagggcagccaagtcccgcgggcgcccgcctctccgccagctggcgcgctgggagcccgggacgcggccctgcttgcatcctggaaactatgggtctgggtttggctgcatgtgcctgggaagaaagggtctgagcctgactcggcccagaagccccttcaagcttggaagagacagggcagcctcgggcgttgtagcccggactgctgtctttcccggagccaagctctgcagcaactgcattctccaggccttcggggttgtttgccctccaggcagagcccaggctccctcccggccactaccttttccgaccccgagcggtcttggcggtaagctccgagccttttgcgtagagtgtctgggccaactgccctgtcagcggcaggaaagaactcggccttaaagccgatcctgcacgcccgggggtcttccccaaacccggacatgcctccgagtgcagacctggacaaactgctgcactgtagcctgcgaagtgcccggagctttttcctgcttccctggctgccgaagttgtctggtggttcggcttcagccccaggtgactccgactcccacgggctccgctcagtagtcctcctaggaa

SEQ ID NO: 239056 - DNA, 536 bp, Homo sapiens
  chr17:35296788-35297324
  hyper
gctcgctggtatttcgggagaacgcgcaggctgagcctctgagcctccgcgggctgcccggttttcctcaaggactggatcatagcgggagggtggcaaaccgtactcgtacccgctgccagtgggtccctgagcctggcttccacaacccgcggcagagcgcccagagccagctcccgcagctcccgcttttgccaacctgtcccgctttaggcaagagcgtggcggcggccccgctaaggctacggaggggggctctccgcggctatgtttgtttaccaacagcggggctagacatcgccaaccccatgcctatgtgcgggtccttttgcgatgaaggagagaaaagcggcgctccgcgcacgtttatatagagttctaattgtaattcgacttttctgaatctaatcggaaaataagtgccccgttccccccgcccacacaggtcactgccttgccaccttctttagacgatgcatctttcctctgggataacgctgggagtgaggctggggcttggcgggtagcttgggccc

SEQ ID NO: 239057 - DNA, 590 bp, Homo sapiens
  chr17:35297630-35298220
  hyper
ctagcgacctggtgcggagagcgcggagcaaagtgtttcacctgaactgcttcacctgcatgatgtgtaacaagcagctctccactggcgaggaactctacatcatcgacgagaataagttcgtctgcaaagaggattacctaagtaacagcagtgttgccaaagagaacagccttcactcgggtgaggccccaattcctggctggctaggtgcaagcgggtcctgggggaggaaggctcgccaaggccccggctcatctgtcctttccctcttagccaccacgggcagtgaccccagtttgtctccggattcccaagacccgtcgcaggacgacgccaaggactcggagagcgccaacgtgtcggacaaggaagcgggtagcaacgagaatgacgaccagaacctgggcgccaagcggcggggaccgcgcaccaccatcaaagccaagcagctggagacgctgaaggccgccttcgctgctacacccaagcccacccgccacatccgcgagcagctggcgcaggagaccggcctcaacatgcgcgtcattcaggtcaggccccggcgcgcctctccatcccacagaggc

SEQ ID NO: 239058 - DNA, 1750 bp, Homo sapiens
  chr17:35299252-35301002
  hyper
tccccctccagacacggcggcctgtccaggtcctcctgtgggattcctgctcaccattggctcagggtccgccctgagtggtcctagtcagagatcgcaccgtcaccactaccctacacacacacacaagcgcgcgcgcgcggtgtcggctagccaggcggtgaaggggtgctggctaggcccggagcaccccggggtcgggggtggagtctcggtggcctcaccccgccgccatgtgctgcaggtctggttccagaaccggcgctccaaggagcggaggatgaagcagctgagcgccctgggcgcccggcgccacgccttcttccgcagtccgcgccggatgcggccgctggtggaccgcctggagccgggcgagctcatccccaatggtcccttctccttctacggaggtgggtgcgcgccgaatggcggggcacggccaggtcggggcgggcttcgttggaagcgggtggcagcgcgggggggcacgcctcgctctctgtaagccactggagagttggggcgagtagggagaaggctgggagtaaatcaaggggaggcggcgagaccgaggacccaattcacggccctgaataacgggggtagctggtaaggggcagctcccgggcttgcgcccagcctcctccctgcacccaggcccgcgagggctccccgcgatccgcgagttccccgcgtggccttcctcagcccgccgaggtcgcgtcttccctccctttcggtcccgccggcccccggccgggccctgacgtcctgcgccctccccgccgctccgcagattaccagagcgagtactacgggcccgggggcaactacgacttcttcccgcaaggccccccgtcctcgcaggcccagacaccagtggacctacccttcgtgccgtcatctgggccgtccgggacgcccctgggtggcctggagcacccgctgccgggccaccacccgtcgagcgaggcgcagcggtttaccgacatcctggcgcacccacccggggactcgcccagccccgagcccagcctgcccgggcctctgcactccatgtcggccgaggtcttcggacccagcccgcccttctcgtcgctgtcggtcaacggtggggcgagctacggaaaccacctgtcccacccccccgaaatgaacgaggcggccgtgtggtagcggggtctcgcacggtctgcggagttcgtggttgtacagaaatgaacctttatttaagaaaaatagaaaaaaaaaaaaacataaaaagcaagtccccacccccttcctccagcctcgagaaccattctccttctggggagaccggatggaaaagggggacacgaaataggatccaaatcggcctcgaggtgggactgggatccgcgcactggctgtcgacgtgcagaactggggctccccaaaggaaacgcagacctctccccaactcccacctggacccggatccgtagacagaccccgcgggcgtgtgcgcctggcaggcgggcggcgaaaagacgtccagggcagccgcgggtgcgcacagccgttggcgatgccaggagccgtggggagggaggccgtgagcacagccgggtgaaggaagtgaagcggcccagggcgctcccgggccagccaggagggttctagctctgggatatcccttattagtgttgtctcagagttcaacaacagcgacaaaaaactcttatagcttcagaaacgccgacctgccgtgcatcaggtgggactatat

SEQ ID NO: 239059 - DNA, 341 bp, Homo sapiens
  chr17:35303270-35303611
  hyper
tatttgataagaagcgttttcgagttgggcacacgatgtggattcgattcttctaacaacgtggttgtggcgcagtctctcccctcgtcgcgggattcagaatcctggcgaaaacccgaacaggtggcaacgctcagcagtcaaatttggagccgaaggccccaaggaggaggcctggaaatgtcagggcctgttctccttcccatcagtgctgtgccgcccacctctggccccgaggtgcggggacgtgcggcaccatacctaggcggagctcccgcaggaggcgcagcaggagggaagcgccactgcagtcccctctcgcctgggagggcagcctggtt

SEQ ID NO: 239060 - DNA, 106 bp, Homo sapiens
  chr17:35716404-35716510
  hyper
ggcccggccttcgcggccccttctgccacagccgggtacggggccaacccctcggctcctcctcctggcggagaggggagtgggggaagcggtcccgcatgcgcct

SEQ ID NO: 239061 - DNA, 50 bp, Homo sapiens
  chr17:35716810-35716860
  hyper
tggatcctggcgtgttgaggagaagcctcagtaaacgaagctcagtaaga

SEQ ID NO: 239062 - DNA, 64 bp, Homo sapiens
  chr17:35849757-35849821
  hyper
ctgcacggaggagcgctctaggggaggctgctgcctcgggagctagggcgcgcccggaccacac

SEQ ID NO: 239063 - DNA, 424 bp, Homo sapiens
  chr17:35969347-35969771
  hyper
gcgccagctcccgcggccccgccgccaccagaaccagctcctggccgcagcgccatcttgctcccgacctgccgctgccttcgccgccgccaccttatcagcagctgtcagctgaacacagccacttccgggtcaaacaccaggccccacctcgccgcggaccgggcgatggggcggggcctcgcgcccacgtgactcccccggccctcggggaggcgtggcgcgcccacggcacgtgacccggcgccgcaggggtcccccagattcaattctagctctcgggctggtggggcggtcgcgggcgcctctccaagggagctgattcattgtctggtaggccctctgcagggcccagctggcggcccagtggcaaagcgccgttggtcctccgtttgaaaaccatgatcgcggttagtggaaagag

SEQ ID NO: 239064 - DNA, 387 bp, Homo sapiens
  chr17:36003202-36003589
  hyper
cgtgcaggcaagccgaacacaaaaggaagcaaaataccccaagggtggcgagagccaggccacgggtgtccatgtgcgccggcctcccccagcagcgggttcattcccgggctcctgctccttctcagttactcggccctcggtcccttgggcacaatacctggaatcgagctgcgtctgccgagaagcgtctcgtgtcgaatttggcccccgcgccgagccggcgaaagagatcgtggacgtccatctttacccagaaagcgccacagttctacggcgcctgcgcagactacttcccaggccccgggcagcgtcggaagagggcgtgagcataattggctcctgtaggcggagcctggctgggtgagaaacgaggctattttatta

SEQ ID NO: 239065 - DNA, 348 bp, Homo sapiens
  chr17:36101943-36102291
  hyper
tcacgtgtgttcaccgggaagagccgggagagctggttatttttgtttgtttgtttgaaaacacagctcaggttcagaggttccctaacacggagaaaggcaccggtcccgaagagggcctgcggccattgtgtcccaagcgcaggtgtcaaacgccggccgcggcgcccgcagggtccgtcccgcacgctccttctcaaacaatgactttgctgcccacgagcagagaagcctggactccagcgcagtccgcagcgcgttcgttaaggagcccaacttcggcttcttagaatgcagcccactttctagacgcccccggcgcacctgcctcgaggccgcgagaaaggc

SEQ ID NO: 239066 - DNA, 1004 bp, Homo sapiens
  chr17:36102471-36103475
  hyper
tgggagccccctgtgcagtgacctaggaaccgctagcgatttcttgaaaaattactttaatcaagtccggcgctcccgggagcgggggaggaaaggcagcacccgctcgggacgggagaaaaaagcctccaggtctgtcccgcgtctccaactcggcgagggtctccggctccccagtccctctccctgccctgctggggcctggggctttggggagggaagagcggggctggggtctaaggaccctgggccgggcctggctctccgccggccgggcctgcgggtgtcggcgacccgggggctccgcgggcggctcgggcgctcacagagcccgcgtcccgcgccagagcggtgaggccgcggggccgcacggggcgcctggctgggtgcgcgctgggagcggcgagcagccccgcgcccgcgttttgatctccttcccccctctaagccgcgtttacaacttcaccaatgaataacccgcctctcttttcaacctaatcacggctctttgtgtatctttctgttgatgatttatagaaataaattaataacaccccaactccacgtgctgcagtttatgttacgtctcagctgcggccagcccggcgcggggctgggtgcggaggggcgccccaggtccttccagcgccgcgctagaaagcgggcgcctgcggccgggtgggagggcctaggccctgtggcccccggtggccggcggtgggagcctggttcatccgccaggtcctgagcgacctccccggcagccctggcgccccagccgctcctaggggccactctctcgacccctcttagcctccgcgactcacaccttccgcctcgcggaactctcttgcaggagttctctcccggtaggggagaaatcacctccgggcgggagagcgacgagggaagaacctcaaacctatgaattataccaaagtgtgtttggggaaaaaaaatctacaagttcccctgattgttttggctagagggcaaaccgccag

SEQ ID NO: 239067 - DNA, 480 bp, Homo sapiens
  chr17:36103655-36104135
  hyper
cttagataattagtaaccagctgtcaaagtctagggcggtcggggaggacccacaaacgatcccggccctggggatacactgccagccggcctgaactcccggggagaggccgggggtgggcagcgaggtctggaaacgccctcctttctcagactgagaccagatcctctgcgaactgaggtctgagacgcgttcgcccccacaccaccgcgcttcgtttctttggccccgcgcgtgtccacccggaccctgcatggaacatgccctttgcaaatctaaacccgcgttggggatcccggataattccgggccttgcatgggcgcggctaacaagagtgcccaccagggaactcgcctcccagatcccggctccggatgccgcctgtccttcggcaaagaactgcaggtcatcatgcaggtcaatgtgtccgaggccgacatgcggctttccagacccgaggcagcgcgcaggaaaaatg

SEQ ID NO: 239068 - DNA, 857 bp, Homo sapiens
  chr17:36104795-36105652
  hyper
accagcacctccttggtgaccccggagctcagcagggcgctcaggagttcttgctggagcgacgtgagcttggacaccattttccaaggacggaaaaagaagggggtgagggggtgggtgggtgcgagagaggagggtggaggggagtttcacaagcaaaccccaaatccaggaacccctccacccttcagcctccagacacctgttactccccggggtcccggaggctcctccgaaaggagtcagaaaacttctaacttgccatgatcgccaccattaggccatataagatatgcaaattagtgggaagggcccagctttcggctggatgcaaatgatggtggggagggggaaacccggagagagggagagccggaggggcagacctggagagcagaagacctgggccgggagcggggctttgccagggtccattgtactcacgctggggggctagagaccttcttttactggttctgcttatcagccaaacttcacctaacctttggacttgttaagccagtgccttgcagcctaggcgcggggcttttccaccggttctcagttccgctttagtccagagagaagacactacgcttcggggttcaggtgagagccagaggaagctggggtgctcgtggaagaaggggacgcaggaggaagcgaagagtagagaccctggatgcgtcccggccgacgcaggtggtgggccaggagagcccgcagggcggaagagaaactgaccacttaggaaggggcgccgaggccacgggggaggtgaggcagcgttaggtgtggtgagcatgccctggagggactccatttatttctacctcggttactacctccaggcccca

SEQ ID NO: 239069 - DNA, 261 bp, Homo sapiens
  chr17:36204361-36204622
  hyper
agtcatgccaaagtcgggtgtcagtaaccaggggggccgcctgaggcgtcgcatccaacccccgcccaggtttccgccccgggccagcagtagccagtccccgagggcccatcttccagccctgaagcggtaaacgcctcacctctagtggcgagtgcgaggaaccgcaccctagcccgcctgactgtccagccccgggtggtgcccatcctgcctgttgttccctctcaaaccaaataaacctcccgacgtatggactct

SEQ ID NO: 239070 - DNA, 1515 bp, Homo sapiens
  chr17:36714788-36716303
  hyper
aaggggtgggatggcgaagggcaggggcgggatggcgaagggcaggggcagagggctaagttctggggaagaacagaggcaggaggagaacggatggggatcgtggagaggggagcgttaaaatgggccatgcaaagggggagctgcatggctgtggccgcgagcaggggtggtattgcagggggaggagggcaaggttaagttctggggaatatgaggcaggagaaggggttgggaatatttgcgggacagggtgtagccctatgtaggtccctgccgacagtgcggccgcatggctatggcttccatcatcccggaatggggacgggactggaatgaaggactcaagcgctggcatttgatagagcttctatggctgggacaggaagactaagttgatgatcgatccaaccctgttccaagcctgaatggcgggggtgggcaagatcttacccgttgcccagatggcaattctctgccccctccccagcctgtctctgctaattatcctcacctgacggcccctgggcctgcttgaggagcggactcggcgatgccaagctcctgacaggtgggaccatctgccaagcagggccggggagactgttggggctcaggagggaggagctgagaggacttgggggaagggctctcgctgactcagggaaagggatgcagggcaggaaggaactggaactgccccgagggatactgacgacggaggggctcagtgggtgactggggctccaggagggcgatggggactcagggaaggagaaggagggctcaatgagggggtcacgggcgagggataaggccttggtgaggaagtggaggttcagcgagggagcggaagctcaagaaaggggaaggggagaaagggttcggagagaggccagtgagcggcgaaggactcgggcgtggaagctctgggaaaaggatgaggtagtaggggatggggcgggacttgcggcaagggacttctaccagtaggtgggcgttggtggggcggggcccaggacggggcggtacctggagcttgcgcaactgctggagctggccgcgcaagtcactggcgctgttctgcaggcctcgcaggtgaagctgcatctgcagccggctaacggcggtaggctgacctgcgggggtgctgctggccgagggcgggggcgggccggacaccggggtggccccgctgctccggccgcctgacccacaggctgcagaggaccacgaggatgggagaaagtgaacaaactgtgagcctgggaaggactgggctgggacaaagtcctccctactctccgaccccacacagtagccagagaagcccgtggctctacctgccccaagtggtcagccctaacggtggggaccaaagtgccaggaaaaagacctcttgggctaaggccagtgatgtagctattgcttaatccccactttatagattagaaaacaggctcggagagaacaaggatgggggagggggaggttcactcacgtgctgagggggtg

SEQ ID NO: 239071 - DNA, 243 bp, Homo sapiens
  chr17:36729019-36729262
  hyper
cgcctccgcagccgcggccgccgccgccggtgccctttgctgcaatgcgagagccgccgcggccgccgccgtgccggcccgggccccagtcgccccggtaaccgcgactccacctggcgcggcgctgcgcgccgccgtgcacatcccctctcgcggccccctccctcggcgcggccccgccggcgcagccccgcagaggagcggcggaggctggtggctgcgtcgccgcggtcacccgatacg

SEQ ID NO: 239072 - DNA, 171 bp, Homo sapiens
  chr17:36735071-36735242
  hyper
ggtcacggcgcgcccggcctggggctgcccatcccccaagggggtccctgcgggaaggggcggggcctgggcctaaggagagtggagaggcgcccggggagaggcaggggctgcccagcaccccactagggactgaagggggaagtgcgtggatggcgtggaaagcgcgcc

SEQ ID NO: 239073 - DNA, 548 bp, Homo sapiens
  chr17:36829804-36830352
  hyper
aggctgaaggtgctcgtggtggggagcgtcggtgcagggcggcggggctgcgcggtgcgcggagggggcgccggcagccggcgtttcttggcggctccccgagccggccctttcgcaggcggccgctctggcccccggcgcaaactcggagtgtccaaggcgaagcccttcgcgtaacaccaaagtttcgaccggcggatcagacgatcgaaatgttcctggcggagatctccgggtgcggccggagccgggctggccgtcgaggggctggccgctggagcctcgggggcggccggcggggggtttccatcgacttcggcaggctggccgggcaggaacggccgcggcgccgtcccgggacccgcgggctcggtggagaggcccgcaggtggcgacggaggccgggaactgggttcctgaggcgggctggcggctgggccacgctgaggctcgagacccggggccgggcgaggcggggccgaggcgaagctggtcgtagattcccgagggtgcgggggcgcagggcagcggcccggaggtgcacagga

SEQ ID NO: 239074 - DNA, 284 bp, Homo sapiens
  chr17:36859556-36859840
  hyper
gacaaaggcttcccggcccctgtctccaagtcgtccatccctggggcgtaggcacgttttagtgagccctgtccggcgaaacccgaaactgcggccaccttggcagcggtgggccccaaaaggaaatattcaaatattctgaaactcgtgcatgatttaggactgacatttttacgtttaattttcttgcagttttattcttgctagtaaaggtaattcgttagaaacccttaagtgcagtttctcctctgtgtcttgtttaacttttcgtgttagcgaaattc

SEQ ID NO: 239075 - DNA, 85 bp, Homo sapiens
  chr17:36886891-36886976
  hyper
ttcagccctgtcacctcctccttcctagatggcctcccgtgtccttccctttccactgattttatttttccgtttccaaaccacc

SEQ ID NO: 239076 - DNA, 140 bp, Homo sapiens
  chr17:36905017-36905157
  hyper
tagaccaaagggcgcggggctccggcgggggacgcgacgccttcagccaggcgtccgagcgattttcattcactccaagtgacactcccttaaaattaataactgcatctgggagggcgagcgtgtcctccccactcccc

SEQ ID NO: 239077 - DNA, 944 bp, Homo sapiens
  chr17:36905397-36906341
  hyper
atccggccgaaggcgagcggccacactggactaggaaacgaggcgccgggctgtaaggtgggcccgcgccttttctcctgcctggcgctgattcccgcatttttcgctcgcgccctgcgctgcgcgctgcctgtgcgcctccctgggcgcgcgggcgggagagtcgggcgagcgccaagacggctgggcccgactcccactggcgccccggctccacctggcgctggggctccggtccgcagtggctccggcaggagggagagaacgaggagggaggcttggaaacgccgggagtagcggtgaggccgacgccggggaagcgaatcgatactgcgttactggacgcccgtgggcctcatgaggatggtcgattccctcattcgttattcacgatttattagggatggcggccgcgtctgtccctccagagagctcgattatccatccggccagcagcgccattaagcgcactgacggtgggaggctcgagttagaaattaggataggaatcttcgcccagttttggagcgcctgcctcctcttccctcgttgctcgcagccaaggcagccgcgaagctgggggcctcgggtgaatgctttcgccctctggccggcgaccaggagacctgcgcacactggccgccgagtgaccccagctcgagcctgcagccacaccagcgggacgggggcggggaggaagaggaagggcggagagacttccttccagagggagtggtccgagaaccggcgggagaagggccaagggaagatccggtcacctgctccggagcctgcaggcggagaggcgagtagttcaccggccccggaggaaaggggaccctcccactgttcccaggcaaatgtgtcgccggcatcctgcactctgccggggaagacgcgcatccactcgctctgcagggaggggaacgcgggaaggactccca

SEQ ID NO: 239078 - DNA, 249 bp, Homo sapiens
  chr17:36981592-36981841
  hyper
ggcgtcatctcaccgcgtcggcgtcgcggaacgatgacgtacagggctcggtcgcgctttgtgacgttggcgttacttgcagattttgcaaaggtccgggctccgctgtcgaggcctttgctgtcgaggtctcattttggctgcttcgggtcgccacgttgcctgatgtcccagactctctgttgaaacgccacaactctgttcagtgatgggttgccgtgggcctgtgcccacggctgtgttgccatg

SEQ ID NO: 239079 - DNA, 241 bp, Homo sapiens
  chr17:37009959-37010200
  hyper
acatcttgaacgccggaaaaaagaaaaaaggaagtcgattcaaaggacactgggatatgaactttaacgccccgcccaccctcctcacgtggccggagcaaaaaccggcctcttccgcctctgggcgctgccttattacgtaataagtttacgacgtcgcttttagccctctctgcgaagtgggagttgaggtagaagcgcaagagataggaagtatcttctctacgagcttaagagtagt

SEQ ID NO: 239080 - DNA, 198 bp, Homo sapiens
  chr17:37025964-37026162
  hyper
gaatcagttccagcgttcaggaggatccaaccccaccctcgacgggcttgaggggttagcccgcctcccgcagcccgggcgccccagatgtgcagcctgctcgcctctgcgccgcctccggctggggaagggccctgggcaccgggcgcagtcagcctgagagcgctgaggcgccagcaccgcgggccccgccgtccc

SEQ ID NO: 239081 - DNA, 160 bp, Homo sapiens
  chr17:37183538-37183698
  hyper
gctcagggcgcggcgccagcgcctgtcatgtcccagctgcgcctctgggtcccacggcacctcctcaggttggcaactactgtggctactagtccaggaggctcagcctctggagtgggtccaggaccggctccagccgacttccgaccctctggggccg

SEQ ID NO: 239082 - DNA, 461 bp, Homo sapiens
  chr17:37307715-37308176
  hyper
cctgcttgctgccccggtcctgacgagggagggggccctggctcaggctgcggccgcgcggtccccggggctggcggaggggcgggcggcgaggagacggcggagcgcggggccgggcgagccggcaggagcggcgagagcgcgagcggagctggaggctgcggcctccgggagcaggcggggagctgggggggccgctgggtcggtgggggtgggggggagctggggcagggggcggggcggggggcgcggcgtcgttgggggctctcccggcgcctgccctcagccctaacggagcgctcccctagagctctgcagccgctcccaaggcaaggggtgcagagtaggggacagggcgggagcccctcgggctgagagaacccctagaagcatcagccgccccgcgctcctcactgagctcctggctccctttccctcctccgttccgccgggaaagctgc

SEQ ID NO: 239083 - DNA, 147 bp, Homo sapiens; identical to SEQ ID NO: 204574
  chr17:37310273-37310420
  hyper

SEQ ID NO: 239084 - DNA, 743 bp, Homo sapiens
  chr17:37321161-37321904
  hyper
ccagaccgaggagccgcagtactaggaaggtccaagcagcgtgcccaatcgctcctccggactacagaggagcccgggaacccagggaagagctccagtgattggtccccctgcctgtcagtctggtgggaggcccagctctctaccctccccgcccgagagtcacttacaaccggtagagaatggtggtctttccttcattgtccagtcccacgatgatgaccgtgtgctctggaagcgtcggaggaagggcagcgtcagggccaaacccgaagaccaagggactgtgtgcccccaccagacctcccaggaaggagatagcgctccccgcaggctggggacctctgcccaccgtaccgcgtctgcttcccacccagctccgacacctgccccactccgggacggtggaaaagacagctgagcccccacctcccttcacattccagaaaagtgtctgaaaggcccggggcgcttcggggcttgccaagagacggtgtttagagaaagagcataacgcgaagtcacaatcgcaggaaactcgcagcagccccccatccccgccgctggctccgtttagcggggagaaaggagggtcgcccagctttgcgtcctggggcgcaccgaagcgccgggacccaagaggagcaggcagggacgggggcaggggaggccgcggggcagtcgaggagcgcccatatacgaccctcggagcccgaggtccccccgtgcgtccgaccacagat

SEQ ID NO: 239085 - DNA, 384 bp, Homo sapiens
  chr17:37353469-37353853
  hyper
cgctccgcagcatcgccacccagccccaggcccagcgcccatcaatcacaacctgcaaggatggggggcgcgcaggcatccctctctcctccgcgcccggcatataaccccttcctctcccgcgcctctcgagccgaccttaacacggtccgcgggagcgaccccctcccgttgggccgggccaccacgcctcacctgcgggctggggtcgaagacctccatggggatctcctgggagggtgggtaagggccccgggacatgctggtcttctggaccatggagaggagcctcccctcccgccgccggcccggcccagccgggctccctcagcgcatgggagaggccgtgggagccgaaagcagcgcggcgcagccagcacccgg

SEQ ID NO: 239086 - DNA, 644 bp, Homo sapiens
  chr17:37365973-37366617
  hyper
ctggctcagggggcgggggctgtaaaccggaaccggtggaggagggggcgctcatcaggaaaggcagcccccactctgcatccgggcagcgccagcagtgccccagcacccccgcagcccgcctctccttggcgccccgctcccctccgcctataaatagcacaggacgtgctcgccgtggcgatgacgcggctgggcaggcggaggggaaggaggcagctctgccagagcggtgggcggcgagcgcggcggcgggaggggtgcggcccctccatgctgggctccgatgacaggggcgactgagtcatcccggggacccacgggccacgactgtccccgccgccagcgtttctgtctccggcttgggggactgcggggacgaggctgacctcggatgggtactgagccctcccagacccccggcacgcccggtctcggagggcacctctgggtgggcaagatcggcctcgacggccctggcgcgcaggagcatgtccgcccctgcgcgactcaggtgcacatggaggcggaaagtgaccgcagccccaagccgtttccctccagcgtccccagacctcctcccactttcctcaggtccccttttggctctccccagaccccaccctcctcgggctgctggagga

SEQ ID NO: 239087 - DNA, 346 bp, Homo sapiens
  chr17:37380887-37381233
  hyper
atgatgacattcattaattacgatgacttctctttttgcttctacccgctccccctcctctggtcccgctcccgtggtggggcgcggggctgcctgtctttctggtctggagccacaaccgcaggcccccgtcctcgcccgtgaccgacggccggcgctgctgcaggccccctcgcggactccgcagctgcgcacccccggccgcggcctcgcgtccccgagcccaacagggctaggagcggggaatgcaggactgcggaggggcagggagagacgccctgagacgcggagataaacacccggagacgccgggagagacggggagagacgcacacagagacaccaa

SEQ ID NO: 239088 - DNA, 264 bp, Homo sapiens
  chr17:37382193-37382457
  hyper
ctttgatttaggaggtcgcctggtcccgccccctgccctacgccgctcccccgcgcagccctgcaaatcaggctctcagctattggctgcctcggtggccaggagggcgaactgggcggagtcttggggggctcgacacgatggggcggggcttggcggggaaagaagcggaggagggagtttcacactgaaaaacccgggatggaggggcgtgaccagattgagggaagcttggggagatcatagtagcgtctggatgggttg

SEQ ID NO: 239089 - DNA, 60 bp, Homo sapiens
  chr17:37617659-37617719
  hyper
tgaaagcgaagcacgaaacatcgcgagaggctactggactctcgcgacgatttctgggat

SEQ ID NO: 239090 - DNA, 935 bp, Homo sapiens
  chr17:37618440-37619375
  hyper
atcgaagcacaagcggcataagtccaaacactccaaagacatggggttggtgacccccgaagcagcatccctgggcacagttatcaaacctttggtggagtatgatgatatcagctctgattccgacaccttctccgatgacatggccttcaaactagaccgaagggagaacgacgaacgtcgtggatcagatcggagcgaccgcctgcacaaacatcgtcaccaccagcacaggcgttcccgggacttactaaaagctaaacagaccgaaaaagaaaaaagccaagaagtctccagcaagtcgggatcgatgaaggaccggatatcgggaagttcaaagcgttcgaatgaggagactgatgactatgggaaggcgcaggtagccaaaagcagcagcaaggaatccaggtcatccaagctccacaaggagaagaccaggaaagaacgggagctgaagtctgggcacaaagaccggagtaaaagtcatcgaaaaagggaaacacccaaaagttacaaaacagtggacagcccaaaacggagatccaggagcccccacaggaagtggtctgacagctccaaacaagatgatagcccctcgggagcttcttatggccaagattatgaccttagtccctcacgatctcatacctcgagcaattatgactcctacaagaaaagtcctggaagtacctcgagaaggcagtcggtcagtcccccttacaaggagccttcggcctaccagtccagcacccggtcaccgagcccctacagtaggcgacagagatctgtcagtccctatagcaggagacggtcgtccagctacgaaagaagtggctcttacagcgggcgatcgcccagtccctatggtcgaaggcggtccagcagccctttcctgagcaagcggtctctgagtcggagtccactccccaggtgag

SEQ ID NO: 239091 - DNA, 172 bp, Homo sapiens
  chr17:37755347-37755519
  hyper
tgtttttaaccctccccctgcgccgcgccccagcctcggcctgggagcccggccgagcgcgagttcgctgcaagcgggatccgctctgagcccggccggccggcagcctccgcggtattcccggcgcgggcccctccaggggctcccctgcggctcctgggggcaggggtac

SEQ ID NO: 239092 - DNA, 920 bp, Homo sapiens
  chr17:37755736-37756656
  hyper
cacccccacccctcgcttttaatgcgactctggcgagaacagatgtcccaaaccgggcgaactgcccagaccccgcccagctgtgcccttggtgaagacttggctaagagtaggaactggcatgcaggtccccaaaggggttcgggggttcccgcgacccctgtgggacctgacctagcagccttggcctcctggccagctcagcctcaggcgggaggcggaagagacccggaaagacccgttcctaattcaattaattccgaaaagaggaatgagacgcagacagatactgacagaagctgggagagaggtttaaatacccgaacaccagacacacactctggtatggaactccgcagcccctgtcagcgcggggagacctcgctgcgctcccgcgctggagagggcaggagagttggctgcgctagagccataccctggctcacatctgggcagcgtctccacccaacgctgtgccccagctccctgggcatggccggcgcctagaggttccctcttctcctcccctcggagcgccccagcttcccttccctgccctagggaactaaggtgactccgctcctcgcatctccctcctgaaatccgttgccctccttcctgtgaacccagccccggtcttggccttcttctcacgtccacactcccagggctggcgcccctgtcccagtgctttaggttggagaaagtttccagagcagaacagccctcccaaggcagctgcgccctttcttaccacttctcacccagggaaactttgtcgagaatttttaaagctgcaggacagaaaggcagaagctgcttcaggattcagaaccggggcagggttttaaggtttctcacagttcaggtgtcatttctgctctggccccgtggccagcgcctgggtatcccagccctga

SEQ ID NO: 239093 - DNA, 795 bp, Homo sapiens
  chr17:37757096-37757891
  hyper
aagagaagcaggcacagccccgtggagcttccagagtatcagggttttcctgccactgatcctcctgggggtcggtgtcccgcagtgatttatcgggctgtctccccgagtcacaaaatcagggctgggggttcactgggggtccatagctcactgtccgagtcatggctggaacgcagctcaacaatgaagggacaggaatggagctcaacagtgaagggacagggagtaactgctttccttccctttcccgccagatgggcaaatggcctggactcggagatacctctttttctctgtcatcttccaaatgctggacttggaatggggtctggaaaatcaagaggaagatgtcctcctgattgaacttggatccagccgtcgggttcagcggcccaggggttgagctgagccggctggtggacgcttggagagcctgccgctgaggctagggcaagaagggcgtcctctctgtgccttctccccaggccaggcacagcgctggcccctttcctcctccctcccctgcttctgttcttggagcatctctgggtgtgtgtgcgcaggcgggagagcaagcaagagaaagagacctgcgaggggacgtttggggccgcttgtccgcgcacatcttcttctcctgctcatcacaccatctcgccagggaagttgagcactggggaggagggtgatgagaggctagagccagccagagtgcagggaatgtggggggaagggtcagaaatcgggaaaggggcgactggtgtggatgccgggattcaccagaagctgagt

SEQ ID NO: 239094 - DNA, 769 bp, Homo sapiens
  chr17:37759987-37760756
  hyper
cctcaatgaaatgaggccaccgtgagaaaccggtccggctttgcatctcatttacataaatatttattaatcgtcattaaactgaacagaaacacgcaatgcacttcgggtgtccgacgggagtttcatcttcgctacaagaggaaggtaaaattgcgtgtgtgtgggtgagtgtgtgggtgtgtcgcctgtgggattgcatttttgcatcgtgtatttggatgcctgatcccctgcctccggtgggcagagggtctccttttgcccctttttgggggaacctccagtaggagccctcagacctctccccgcccacccaccagctaaagccaagaggactccttggaccaaaaaatactctctccagacaccggaaatcgccaggtggcacccaccgaggcacagtccgggcaggggtggggctgcccccaggtctccatccccacccctcaccccaggaggggacagaatggccgcggggaggaggagccggcgagctcacctccttctgccccccggacgccggcgccgggcctgcttgtgcgtgcggtgtggtgtgcgtgtgtctttcatgcaaaccctccctccccaaaccgaccccccaacagtttgccattccatacaaatttggaaacaggtttttaaaaaacagcatgacgcacaacggggacggggcgggggagggcagtggcactggggccccaaatctccgagtcactgattgtaagaacctggggagggggagggggcggcgcgggcccccacttca

SEQ ID NO: 239095 - DNA, 339 bp, Homo sapiens
  chr17:37761154-37761493
  hyper
aaaatcgcaaaacgcggagactggaggttgggggtgagggcgttccaggcccgggctccggcgccctaacttctaccctcttcaagaaagagggagcgcctggctcctttttgcctcggcagctgggtgtctgtttttaaaataataatgagagggggaaacgcgttccattgctcagctgcccccttaccaacgccttgggcctgcagggaggagggggaggaggaaacctcagcgaagatattgggaatgggggaggggtgcctccagggagcccccggagagaggtccctggagaagcactccttgggagagaggaggagggaaccccttggggag

SEQ ID NO: 239096 - DNA, 52 bp, Homo sapiens
  chr17:37762933-37762985
  hyper
cacaaccctcctccacccccgagtctcgtgcgggctcctgcctaggctaccc

SEQ ID NO: 239097 - DNA, 564 bp, Homo sapiens
  chr17:37763954-37764518
  hyper
atctcgctccctttcggacaacttacctcggagaggagtcaaggggagaggggaggggagggggggagggggcaagagagagaggggggagaagagggatcttctcgcttatttcattgttcccccatcttcagggagcgggggcagcggctcctcaaggcggcgggcgccggcgtcttcagagcgccatgcgaaccgcggagcgagtgtggcatctctaccaggcggggtaccagcctctatgccaggccatatgggcttggcacgtcacgggcagcagctatcacatgagagacggtgattggcatgcgtctgcactgggggagagccggctcccccgggacccgccgccatctgtcactctctactccaaaaaaaaaaaaaaaaattaaataaataaaggaaataaataaatatttctgccgccctcccctccccgcccaacgcagggaaagcagggattgagaggaaggtgggaggagttgccccctgtatatagagaccccctcacgggaacaatggggtggcaaggctggacactgggggctcgtggtggccaattct

SEQ ID NO: 239098 - DNA, 175 bp, Homo sapiens
  chr17:37782954-37783129
  hyper
cctttatcctctctgctggactccatcaataatgcagcttcaagttctggggagaccgcagggggccccccagctggctccccaggccttggctctaactcccaccctcctcccagccccaggagaacacgattctccatgctcattggccagtttcccctaaaccctccctccg

SEQ ID NO: 239099 - DNA, 32 bp, Homo sapiens
  chr17:37793198-37793230
  hyper
tgtggcctaataacgacggccctggtcttctt

SEQ ID NO: 239100 - DNA, 141 bp, Homo sapiens
  chr17:37793985-37794126
  hyper
tcatttctaatgacacgttccctcaccccgcatttttgggttagtcaatgtctcctggttttcttcgtaccgctctgacagtcggtcaaagtcccgcttcacgttttcctctgtcgcccaacccctcgctctgtacactga

SEQ ID NO: 239101 - DNA, 90 bp, Homo sapiens
  chr17:37844398-37844488
  hyper
ggatttttgtgggcgcctgccccgcccctcgtccccctgctgtgtccatatatcgaggcgatagggttaagggaaggcggacgcctgatg

SEQ ID NO: 239102 - DNA, 813 bp, Homo sapiens
  chr17:37856349-37857162
  hyper
cccccgggcagccgcgcgccccttcccacggggccctttactgcgccgcgcgcccggcccccacccctcgcagcaccccgcgccccgcgccctcccagccgggtccagccggagccatggggccggagccgcagtgagcaccatggagctggcggccttgtgccgctgggggctcctcctcgccctcttgccccccggagccgcgagcacccaaggtgggtctggtgtggggaggggacggagcagcggcgggaccctgccctgtggatgccccgccgaggtcccgcggccggcggggccagaggggcccggacgagctctcctatcccgaagttgtggacagtcgagacgctcagggcagccgggccctggggccctcgggcgggagggggcagttacacggcagcggctcgagatggcccatccaagagactggcgctttccaggctccgaggggctccgggaacttgtcaaagaagttctctgaaattgttcagaaagttttcccgcaaagggtgtattgcgtagagcgcgcgcgcgcgtttccccccttcttgagccccctcaagctttctcaaagcctttccagttggcagcctccgcctccggactggcctgggctggattccttgggggggtcctctgccctgcccctcctccagcccctccccgctccccttcagacgattttggtttggttgctcctgcttctggcggggtcgggtgtgtgtgtgtgtggtggagtggagggtggcatagcaacctgtcccaaccagagccggggaggaaagggtggcccggagggtggcctct

SEQ ID NO: 239103 - DNA, 88 bp, Homo sapiens
  chr17:37886988-37887076
  hyper
cactccccactcccggtgtccgctggacttcatggcttcatttactctaatggactatcttagactgcaaagcgcttttcagtttaca

SEQ ID NO: 239104 - DNA, 574 bp, Homo sapiens
  chr17:37895514-37896088
  hyper
ggacctcatggaggcgggcagcctgtaatgattaactgcagagacactccagcattcttcccgaattaaactttaaaagagctgccccgccttctcccattgggtatttttcctgagtgagagtgggcggggcctcagagtcctgggtcctcccttatactaggagtcatccaggggtttctcaccttctcacctgggccctgcaccctaaaaaattataagcctctcccgtgggggcggggcgtggagtactgggcggacgggggctctcccgccacatccaggcccctggcccaggcctcagtcccgcaagcccttccccctgctctgggaagcagagttgttttctgttggccctgaacaccgggccccgccacctgcccttagggccagccaggtggggcgtgattcaggaagtaaacaaggaggttgggaggacgggaacgcgggtggggctggaaccactgggggaggaggcagctgggaagccacggacggagttacctcgttgaggggacaaactgattttgggggtcggtgtttccaaccgaagctttaccggggcctcagtttg

SEQ ID NO: 239105 - DNA, 319 bp, Homo sapiens
  chr17:38020386-38020705
  hyper
ccgggccgggctggagctgccgctgtggctactcggcctctccacgtgctcctgccgtcgcctggactcagcgcgcagctggcgggagattcccggcgcggggagtccccgggatccggcagccgcgtcggcgcagactgaaaagggcaggagccggcgacctgccggtgcgcggggttacagcggcgctggctggcggcggctttaaaggacgctggccgcggagtgccgcgggttccgcgcctccagccccctttcgaatgtcaaacccaaggaaccccgacaggatggaaatgtcgcatcactaaattgtctcaaa

SEQ ID NO: 239106 - DNA, 172 bp, Homo sapiens
  chr17:38210766-38210938
  hyper
ccgtatttgtctgcgccggcgaggaaactaagggactcgtctagtcggcccgcattgttcttctcctttaagggaggacatccaggagctgaggcactacagagactcagggactcgagggagctcgaaaggccgctcacaacccggcgtcgcccacgacgtcactgtcgac

SEQ ID NO: 239107 - DNA, 78 bp, Homo sapiens
  chr17:38219347-38219425
  hyper
aaggaggagggagcgagggggcattaatatgcaaatgccttgcgattgattatgcaaagccgcggggctccgtggcca

SEQ ID NO: 239108 - DNA, 37 bp, Homo sapiens; identical to SEQ ID NO: 204594
  chr17:38228861-38228898
  hyper

SEQ ID NO: 239109 - DNA, 206 bp, Homo sapiens
  chr17:38255680-38255886
  hyper
aacaaacgcagcacgtgggcccggctctagagccatgtgagccctcccggcggccggagccctgtaggtgccctccctcgggccgggcaccacgctctggactcctcaagtgtcgctccctcctgtcactgaggattccccagtgagatccgaacgattctcccagcccctccttccctgaaccccatcgcgccactcttctcaga

SEQ ID NO: 239110 - DNA, 127 bp, Homo sapiens
  chr17:38256107-38256234
  hyper
tctgaggggtggtgatggggcgtttctgagagcatttccagcccgaacaagccgctctggaaatcccacactaaagcaccgcagcacgttagcaaatctccgggccgagggacaccccagtccctta

SEQ ID NO: 239111 - DNA, 119 bp, Homo sapiens
  chr17:38256918-38257037
  hyper
cccgggccgcacgcggcactggagcaggtaccatgtgatcccagggagcgcctcgtgccccagtgacacacttttccaacagccggcacgttgagctcttgcgcgcctgcgcaacgaca

SEQ ID NO: 239112 - DNA, 361 bp, Homo sapiens
  chr17:38264384-38264745
  hyper
gagacagaagcaggataaagcgcaaggagacaagaagggagccccgcgcgctttccctccttcctcatcttgcctcctgtttctctggcccacggaggaaggggcccagtgtgtttgtgccggctcgaggctcacgcgggctgccggggtcacatggcccgggcatgtgcagcctgctccatttctaccacaacaactcgctcataaacagcccggctgctgcggcggtggcggtggagacatgtgcaagcgagggggtggggcacgtggccctgcccgagccaagggaaggcgctcgctcagcactgcctccacccctccccagcactggcgctgcctcgtcacaggaaattcctagtgc

SEQ ID NO: 239113 - DNA, 89 bp, Homo sapiens
  chr17:38296368-38296457
  hyper
gactccttccactcgggaagcccaagatggccgggccaggaacccgggaggctgctgaagtctcaattcccctcgccctaggcctgccc

SEQ ID NO: 239114 - DNA, 738 bp, Homo sapiens
  chr17:38347443-38348181
  hyper
attttccaccccttccgcccccgccctcctgcctttcgctcctcatcgccttgcactgccatcttcccacccactcccctcaccccctggcgccctggccgcccctccgctgccgtgggtgcagctggagttcgtggactacgtgttccacggggagcgcggccgccgggagacggccaacttggagctgctgctgcagcgctgcagcgaggtcacgcactgggtggccaccgaagtgctgctctgcgaggccccgggcaagcgcgcgcagctgctcaagaagttcatcaagatcgcggccctgtgagtgcggccgtcggcgggatggggggccggaggccggaggcccgcgccgccgcccgcccctgaccccgcctcccacccccgcagctgcaagcagaaccaggacctgctgtctttctacgccgtggtcatggggctggacaacgccgctgtcagccgccttcgactcacctgggaggtgatgagacccctcccgttcctacctgggaatctgggcatcccgggctccccgaagtgcgtcctcccgggacggccgccggcctggagggagtctttgcgccagttggagggaggcgccctcttctggcatacgcaaccccagggcgcacagcttggctaatggaccctgtctttgtgcaaattagtgaaaagcccggatcccgcctgagtcacggcaggcagcccttggccaggtcaggtcgcagacttggctgt

SEQ ID NO: 239115 - DNA, 109 bp, Homo sapiens
  chr17:38375105-38375214
  hyper
ttgcaaggttggccgaggcgggttcttcgttaactcgagattaaggaaggatatttaggggggagggtgtgtgtgtgtgcggcggattaaagacgaaaggagtatattc

SEQ ID NO: 239116 - DNA, 165 bp, Homo sapiens
  chr17:38443942-38444107
  hyper
agattccctcccccgttcagtggtcgtggcctcacagcgactctaagacttggggctctctcattggctgtaactcttccactggattggtagcaaaaaaagaggcggtgcccaaggcgaaaggctctgtgactacagccaatcagaatcgaggccgggctttgg

SEQ ID NO: 239117 - DNA, 253 bp, Homo sapiens
  chr17:38474111-38474364
  hyper
acttccatattacgccgccgcctcacttctcagatttaggtgtgggtgtgtgtgtggttggggggaaaggagtgtaggataccacacgctgcggtcttctccaccgagcgctattttcattctttccgcagaacctcaccccgttcttgctctgaatcttcggttctgggtctgagggagggattctcccggattcccacggtccagtcttcaactaggagtggctcctttaagactcgcccttcccgaggtc

SEQ ID NO: 239118 - DNA, 407 bp, Homo sapiens
  chr17:38478452-38478859
  hyper
agccaaggtgccctcgtctgggcgggcaccttggagcagtgagggggattcctcaagcacaaaaggcaggggagaagtggcagggaagaggtggcaggggagaggtggcaggggctaggcacagttgggaccttgcttgcctggaggccagtagatgccggagatgaacctggaggctcaggacagggcaagagtggggcacgccggggctgggtcctctggctgttccctctccccacagagttacttgaggtcaggcagtctccatgtgtcactgtaccccgcaggcagtgtcaccgtgacccactcgctgtgtgtctgtgtgtacacacctaccttggagtggctttatcccggccctccccccggagcctctgtcccctgggtcctaccgcaggtcctcagcc

SEQ ID NO: 239119 - DNA, 151 bp, Homo sapiens
  chr17:38501383-38501534
  hyper
tcccaccaatctccgccactcacacctccgcccgctcccagacgtccaagaatgtgaagcacgtggatgcccgtagttgggggagggggagacgcttatcaggcggccgctgggctaggggccttcttccgctgccgcggtacacccagag

SEQ ID NO: 239120 - DNA, 91 bp, Homo sapiens
  chr17:38573797-38573888
  hyper
gggcaacaacgcacgacaccctggaagccgggtcatacttcactactagcaccagaaggggcttccgcctctccacgatcaccccggaacc

SEQ ID NO: 239121 - DNA, 89 bp, Homo sapiens
  chr17:38574211-38574300
  hyper
ctctcaccgtctccgtccagaagaaccaatcgtagcttgccttttatatccacctatgaacggctgagttggccggggtttgtttgaat

SEQ ID NO: 239122 - DNA, 203 bp, Homo sapiens
  chr17:38599494-38599697
  hyper
agcttccaaactgcgccgcttccttcttcggcagaaaaggactttcagatgcggcggcggcggcggcggcgactcaggacagcgccccctccccctaacggccgcctctccctctccccctcgcccgccccggctcccccacctctgggaaggcgctgggggtgtggccagggaccggtataaagtccgggggagccggtccc

SEQ ID NO: 239123 - DNA, 159 bp, Homo sapiens; identical to SEQ ID NO: 204600
  chr17:38604453-38604612
  hyper

SEQ ID NO: 239124 - DNA, 137 bp, Homo sapiens
  chr17:38739098-38739235
  hyper
tccccagtgagacccggtggtgacctttatcttggcaaggtggcaagggcgacaggaaacttggactgaaataacctctgtggtgaaagcaggggtgggaaatgttgaggctggtctcatggcgagtgataaattag

SEQ ID NO: 239125 - DNA, 264 bp, Homo sapiens
  chr17:38804062-38804326
  hyper
tccctttgtcccgcgctcgccccgcccctcgcgtccggagcttccgcactcgcactttccacactcttcttaatttttttttttttccgggccccacccgaccctctttagaaaaactaaccttctagtgaagatgcggtgatgcttagcacactcagggatttttttcaggacccattggatcctcaaaactccccgaattttgatactttcccagccgggcgctgattcgtcacggcgaagagggccgaggaggcccgacct

SEQ ID NO: 239126 - DNA, 168 bp, Homo sapiens
  chr17:39683516-39683684
  hyper
ccattcttcctaaacgaatgggccccagggcgggagagtgggaggaggccaaagcctgagagggatgaacactagacccttccggccagagaaacggaatgcaggaggccctacgctgcggtggcagagggggcaagactggccccgggtggaccagatcaccaaagc

SEQ ID NO: 239127 - DNA, 565 bp, Homo sapiens
  chr17:40306686-40307251
  hyper
aggacagtcatagcggtttccttaaggctcaccaaaggcaggtaagctaaggaaagaagctccccacctcctatggcccgacgcctggggagcccctcaagagggggctacgggtcgggggaggggtcagtatccccctaaactggggctgggcgggaggaagggctgccctggagatgcttcaacgcaggcgagacaccaggtcctgggacaagcatactcacggcggctccggggcggcggcgttacttggggccggggctcggacgggatccgcttctctccccgccggcggtgtcccaggctccggcctccacttccgcctttcagccgctccggatccggatctccacctccgccccgcccctcaatactcccaggtgattgacagtgcggagaccaatgggaggcactcttggccgacctacccagcggcgccggtaggaacgcgggagtggcggtagggagcgcgcgagggatcgcgggacttgtagttcgcagcgctgggaggagtcagtggctgcctgggacttgggcttagggtggagccggctgactgcgaggc

SEQ ID NO: 239128 - DNA, 281 bp, Homo sapiens
  chr17:40400757-40401038
  hyper
ggcggcactgttaccggaagaagcgaagagcagcgatttccttccaaaaggtcagctgcctcagacagaccaaacagaaagcagcgaattcttgccaacttcccctcctgcttctgcagctagtacgcaatagcatttagtttccagtaaagctccagataaaaacaaagcaaatgtgagacccagaatctacacaatgtcagtgtctcgcttgactgaacgaagggcagtaagatcatatggagctacgctttttcaacgtggtggaagtgttaggaagg

SEQ ID NO: 239129 - DNA, 173 bp, Homo sapiens
  chr17:40428745-40428918
  hyper
agcagggctagggcgcactgtcgtggtcgttttggttggccccctccgcggcccgcccacctctctccctgggagcccaggcccgcgttccgggtcctctcccgccgaggccgaggtcagaagtccacaggggccccgatcaataattatcctgggtttgcccccgggagggc

SEQ ID NO: 239130 - DNA, 110 bp, Homo sapiens
  chr17:40441311-40441421
  hyper
gcctggcctggccgcggtccagggataggtaggcatggcaaggccaggggcaggcccggttccttggcctctgcagaggagagcgcttcagcgctcggctcgccctaggt

SEQ ID NO: 239131 - DNA, 385 bp, Homo sapiens
  chr17:40464190-40464575
  hyper
aaaaagcaggggactcgaggtttggggaaatgatggagatgggcgcgggtgggcagaactctgacccaggcttctccttagcagctgctgctcccagcagcctcgaagctggcggctgagggcccggcgccaagatgcttctcaaccctcggggccaggggcagtcccagagccgcaacaaccgtcccatcctcctccttcccagagaccagcaggtggcaccacgcggctgcgctgttttcagctggctgccggcgactgtgcgaggcggaggtgcagcaagcgggaccggctcgccccggctggacccccgcactgccggctgcagccagtccctgctgtcgctggggcccttgggctcagggacgcgcgctccctgggcggg

SEQ ID NO: 239132 - DNA, 58 bp, Homo sapiens
  chr17:40540529-40540587
  hyper
ttcagccaatcctcgcccagccccagcctggccgaggcacgccgtcatgcataattca

SEQ ID NO: 239133 - DNA, 208 bp, Homo sapiens
  chr17:40558069-40558277
  hyper
aggggaccaaacttcgggtcggagatggggttgcgtaataattgcacttgggctaaaatctctgtggtcgtccaaccctgtcctgatccctttccacccgtagatgatattaaaccactacggccctcgggagacacagctccactttggaaatgggcggagcgccctctggtgccgcaaatcgcacactgcccgagccaggccgaaa

SEQ ID NO: 239134 - DNA, 597 bp, Homo sapiens
  chr17:40573766-40574363
  hyper
cagcctcctcccgccggctgcgctgctgcgcctggcccccgcccccgcaggcatgcggggtgattcacctcgcccagactgcgcccagaccgccggaccccgcaggggctgtccacccactccaccagcccctcttgcactcctgacgcccactcttccccgcccagccccgcccgcttccaggaggcccagggtgccagcgcgccgcgggtgagggtgtcctcaagggcctgaaaatgcctggtggccaggagcagagagcagcgaggggacaggggtgggccgccgaggccgatgtgggggcgcgggggcgcagggtctggggaggaggttggcggtcgcgttccccgcttggcacagcccccgctggtgcgtgcctgagccctgaatcacccgctatatcaggcccgcaggcgcagaggccccaggcccgggccccgcagccagtgtccgcttacagcggaccccaacgatcgcgagggacccctgactttcctagaaacttcccccaagtaggaagaagtttgacagagccaattagggagggagcggtctgcgaggggcagcgtcctcgagtccacccgctaattcggttct

SEQ ID NO: 239135 - DNA, 619 bp, Homo sapiens
  chr17:40574658-40575277
  hyper
ctttaaagttgcggcgccgcagcagctcggcctcgttgacctccagcttcttgatctgccccgcctggcgctccaggctgccgcgcacggtcttcacgttgacgctgaccttgcgcaccttctccagcagcttgctcaccgtattgctcgtggtggcgtgcgccttgcccagcttgctcagctcgccctggatgctctgcactgcgccctccatctccgcctgccgctcctccagctgtgcttgagtcagctggatctggtctacggccccgatgattttgtccaggaggctcagcaccagcacgccgttcacctggtccgacttgatcagctcttctgagccggcccccgacggctcctccgctgcctgagccccagcggaggaaggctccggggcctcggcgtcggggtacccgggaagcggccgctcgacaatatagagcgtggggtcctccatggctacccggagccgtgcgggaccggccgggtggggctggagctggagcgggagacccggagagaagcaggagcggaagggaggagagctagcgggcgagagcggagagcagaggaaactcgagccacgtccgtgcgcaccgggacagcggccagaactgct

SEQ ID NO: 239136 - DNA, 115 bp, Homo sapiens
  chr17:40610751-40610866
  hyper
gcacgctgggtctcgcctgcgacccccgtgactccgcactgctgcagcccgggcgaggctgcgccccattggccaactgcaatgaggtcattgcgggggcgggggccggcggcgg

SEQ ID NO: 239137 - DNA, 63 bp, Homo sapiens
  chr17:40713961-40714024
  hyper
ctgccttgcctttctccgcccggtcccagcgggggtccgatcggcatcaaggcttcacccact

SEQ ID NO: 239138 - DNA, 199 bp, Homo sapiens
  chr17:40719398-40719597
  hyper
ggtggagtaggggcggaagggatcatacacaggggaggcactcgcacgccctagcctgtgccagtctcgggggactcattaagctgcccgcgcaccccgggctgtgtgtgtgcaagcgcgcagggtgacagaggcgccttcccggaatggggggcgcgctgtgcgtgcctgcagtggaaggggcgcctccccctagggg

SEQ ID NO: 239139 - DNA, 967 bp, Homo sapiens
  chr17:40760808-40761775
  hyper
aaagaggagccctcgctcactcttgagcggctcaagatgttaccagaagctcccgccagatgtgcggggcgggggtgcgggcacaggtaaggcagagaagatgggtggacggccctgggaagaactagggtgccgaagcctgcaggcgggatggagtggaaggaggtgaggcaaaattaggcaagtacaggaaggagccagtgcagcgaagaaaacagggcaggcgagaagtagagccctagaggaaccaacgaattcgggactcggagggtttccgagggtccagttctctcaccagaaagccgcgttcagccccaggcaccacagagcgctcctagctggccgctcccacaccagggctgcctgcacccgactcagcagaggctcgtaaggccccagcacctccaccagggcccgctgcgccgcctcaacctgctggtcccgctcccaggagcctgacacatctcggcggcccctgaaagtcgaccccgaagccgggcctggggtcgtgggaaccccttcggcctcagccatctccccgcggcagccacaacatccggggccgtggcccgacaagtcacaataacagcaactgcgcagatgcgcgattcggcgggggaggtggcttcgcaccacagcgcgcttgcgcgcaggcccaagcaggcgcccacccagaggggagggaggacgccgtaccccgccctcactgaggcgcggagccggatccggaggcgccgagccgcatccggagccgcgcacgcgcaatctgcatgaacgaaggccagtgcttaaagacgtgccattcattgccagaactcgattctcattggagcggaggaagttcgtgggtggagctggttgtttggcgcctgcgtcttgcggcgagcgggctggcgtgcggcgccgttgcgggcgggagcggctgcaacgccggtgcctgaggagcgatgccgagggaaatcatcac

SEQ ID NO: 239140 - DNA, 93 bp, Homo sapiens
  chr17:40829163-40829256
  hyper
ctggcgccgggcgcggctaccaatcagacggctgaaaccgcgttgggttgcatcatgtgcccctggcttggtgacagcggggaggggcgggga

SEQ ID NO: 239141 - DNA, 419 bp, Homo sapiens
  chr17:40831605-40832024
  hyper
gagctgagcaggaagaaaggcggggccggcgggggcagccgcggcggggttgaggccctgaggggcagctcccaccccgtagcagcctccgcaggtcctggcggaagcgcaggcccaggaaggcgtagagaacgggattgaggccacagcgggcgagggccaagccgctggtcaccagcagtgcgacatccttgcgtttgctggcagggcagctccgctcgcgcgcagccagtagatcggcagtatccagcagcagggcgaggctgtagggcagctgcagcaccacgaaggccgccaccagagccaccacgacgcgcagcgcacgccggcgctcgggccccctggcggccagcagcgtgcggcccagaagcgcgtagcaggctaccatgacgcccagcggcagcgcgaagcccagggcc

SEQ ID NO: 239142 - DNA, 62 bp, Homo sapiens; identical to SEQ ID NO: 204610
  chr17:40897135-40897197
  hyper

SEQ ID NO: 239143 - DNA, 121 bp, Homo sapiens
  chr17:40925326-40925447
  hyper
tttaggataacagcgagggactgggtcatgacgaggactcctcctgccggtctctctctttccagaaaggcttccggaacctttctgcattgccttctgcccggacgtgcggaagcgaagg

SEQ ID NO: 239144 - DNA, 34 bp, Homo sapiens
  chr17:40932501-40932535
  hyper
tgctcgcgggatccgcaccgcgggagcagctcgg

SEQ ID NO: 239145 - DNA, 59 bp, Homo sapiens
  chr17:40932939-40932998
  hyper
tgccagcctcacccgctccggacccccccgatcctccggactccgctggtcctggcccc

SEQ ID NO: 239146 - DNA, 56 bp, Homo sapiens
  chr17:40985217-40985273
  hyper
gccgcaccgtttccgagtctctcggaggctcagttctcagcgcaccattccccaca

SEQ ID NO: 239147 - DNA, 191 bp, Homo sapiens
  chr17:41116341-41116532
  hyper
tccctacacgtggcgccctcttccccaaaccgccttgccggcccggcagtctcaagtgcctcgccgtgacgccgtacctctcgggcataactgtcacgctgacaccagaacgccatacctgcaggcgtgtgaggaggcgcacgcgcagagaagcctgggagcgaacggagagcgacgtgggacaaacgtca

SEQ ID NO: 239148 - DNA, 38 bp, Homo sapiens
  chr17:41132449-41132487
  hyper
tgaattaaattcccggggaaggcgcgccctcggggact

SEQ ID NO: 239149 - DNA, 362 bp, Homo sapiens; identical to SEQ ID NO: 204611
  chr17:41150140-41150502
  hyper

SEQ ID NO: 239150 - DNA, 92 bp, Homo sapiens
  chr17:41323035-41323127
  hyper
gcactcctagttccgcccctcagcctcaatgtttgttattgttgttcgggttcaggttgcttctgccccgccccatcgacgcaatctccacc

SEQ ID NO: 239151 - DNA, 120 bp, Homo sapiens
  chr17:41393018-41393138
  hyper
atcgccgtagccacgcctacccacgcgggaaagggcgagacatgcaaattagaaatggcgcttcagccacggggcaaaaacagagctgagaattcacttgaaaacgtagccaactataaa

SEQ ID NO: 239152 - DNA, 330 bp, Homo sapiens
  chr17:41446506-41446836
  hyper
ggtagcccagtgagcgcgaccactacttccctgtgaacgcgagagctcagacaagccacagggggccagagccgagaaaccggaagaccggcgaggagaccatagcacactcccaggaaagagagcgcgagggcttgggccaggatgggggcagtgcgggggctgaggagtggccagattctgggtgtactttgaaagcagagctgatggcctttgcggacagttgggatgaggggtgagagaaaggagtggagggtgactccaagggtttggccagagcgactgccacattcagcctgggcgacaaaagcgaaactacgtctccaaaaa

SEQ ID NO: 239153 - DNA, 95 bp, Homo sapiens
  chr17:41471596-41471691
  hyper
ctttggggccctttcgcacatttttgccccacactcatacttagcgataggttgggttttctcaattttgttcatgaggaaacagaactgggatt

SEQ ID NO: 239154 - DNA, 166 bp, Homo sapiens
  chr17:41476228-41476394
  hyper
gcaaacgcccctccgcgtatggtgggggctgcagcgcccgtagctccacgctccgccccgccgccgctgattgtcccgcgccttgtgacgtcacacgcgggtttttaaggccgaaccctaggcaggctctgcagaggcagcggttggaggcgcggtgggtgtctgc

SEQ ID NO: 239155 - DNA, 85 bp, Homo sapiens; identical to SEQ ID NO: 204612
  chr17:41624075-41624160
  hyper

SEQ ID NO: 239156 - DNA, 660 bp, Homo sapiens
  chr17:41790829-41791489
  hyper
tgaaatcatttttgtaaaatcgcaatttgtcaccaggggttttgactttccttattgcctcgtgggaggtggcagaggcagcacatctcagaccgagcctcggttcctccccctacctcccaccgctgcgcttgaagaaagatgctgcagcctccccagtccccatgccagcgctcccacttttctctgagctttcggtggcagacagcgccttgggcactttttcatgctcataattcgaattacctgtttaagtcggtcaaatgaaaaaataccagctccgcccccacgcgggctggccggggcgcctggagcgccagggcggctgcagcgcgctctccgcggccgtcggccctgagctcatttcctggggcgcgcgcgccgggctatttcagcctggcgctgtgcaaacaggacaatttactgcggccaaaagggacccaaattacaatcgtatcacagacaaatatccgccacgccaggtctccaggggccaggaggggcctctctcccggcgcggggggcgggcgcggggtcaggcaggtccgcggggctcggctcggcctcgccgtgccctgatcggcgtttgccaccgagctgtgcctgctctctgcaacaggaaggggcccagctcccccgggcgaccgttcctatctgagt

SEQ ID NO: 239157 - DNA, 348 bp, Homo sapiens
  chr17:41832685-41833033
  hyper
ggtggggaggggcgcgggcgggctctagtaggcgttctccagctcggcctggttggctttggcgctccgggcgcggggccgcggcttccggcccttctgcggccgagcggcctcggtcccgaagtccttgagctccgactggttgtggaagcgggtgaggcgcttgcacttgcacgaggccaccaggcgcaccttgcgcgcgcgcggcgcctcaccaccgggacacagcagctgcacgcgctgcgcgcggtagcggtcggggatgcagcggaagtcgggcccactaggtcgccaccacttgccgcggccgatggcgttgggcagcaggcgcgccgggccgcactggcc

SEQ ID NO: 239158 - DNA, 961 bp, Homo sapiens
  chr17:41910022-41910983
  hyper
agccagcccgcagcgccgagccccggtgccactaagaggcgtaagagcggccccgggccctccagcctccgccccgccccgccccgccacgccacgccggactcaccctcgggctgctccccgcaggaggccgagcaccgactcccgctcgctctccgaaggaacctgtgggagaacaaggagcgcactgggcgcaggagcagcgaccccgggggacctcggagggcggtcccggaggacgcggagcagcagggagcggggggcgcgcggcggggcgggcgcgggaagagggaggcgggggccgaggggcggggttgagactcccgcggtgggctcggtgggccgcgaggctgtccgggagcacgggaggagggtctcggcccggcctcccgcccctcccgccgcggcgcccagctccctcgtccgttcccctcgcggcctcctacctcgtcgcgccgggatgtgtgctccgcgaacgggagccgcgcgagtgcccagagcctgggccgccgctggctccgccttcccggacccctccctgcggctgccgcgccgggcgggggtggcggagcctgaggaggcgcggcgcggggaggaggcgcggcgcggggaggaggcgggggaggagcggaggccgccctccgcgtctggcaccgccgcaccctccgggccgggctccgctagccggcgtcgtacccgctcccgctctcccgctccctgagtcccctgcctgtgtccccccgcaccctggcacacagccagacttcccttccgcccgcgcaacccaccctccgcgagtggaggggtggacacctgctcaacagagaattcgattttgcaaacatttattgagcgccctccaggtgccaggcgctgtgccaggggccggggcttcaaagacgaccaaggcacagatcctgggtttgaagatctccagaggtggggcggggggccggtcgga

SEQ ID NO: 239159 - DNA, 296 bp, Homo sapiens
  chr17:41977937-41978233
  hyper
gggactcccggagcgtcctacacgccgccgtctaccgcctccccagccaaagcctggccgggctggggaaggcgggagtcgaggagcgccctctgaggaaccagccaatgggaaggctcagccgccgtgaccgccttgctgattggctaaagccctgactggcgctgcgcggtgcagagcaggcggtaacccgggtgggagaagagtggtgggagggagccctagtcccacagattgcccgatccccagcatgtcagtgtcggtggggatggggaggaggcggctaacaggaagtt

SEQ ID NO: 239160 - DNA, 173 bp, Homo sapiens
  chr17:41984004-41984177
  hyper
cagaggatggggtcgaaaggccaggcggacgtgcatgcttggaccatcagatcacccctgccccaacggacccagccctaacaccctgggcgctaggacctgggggaggggggcgtgttgtgagccatcaaagaaggctctctacgtgcgcgcccgccggagaccagggatga

SEQ ID NO: 239161 - DNA, 890 bp, Homo sapiens
  chr17:41984411-41985301
  hyper
tagggggaccagggggccaccgggacccagcgcaacctctgtctcgctccccaacccccggaagcgctaacagcacggttcttacgtaatgccgggcttctaagtacccccaacccgcacagcccccggggaggccgcgcagataccggggcccctcacagctcaccaccttggtgcctgaagccactttggagcccctaccgcaggggcggggaccagtgtcaatgggcagcggggcttggttctcccaaccagcaccccagaaagagggcccaggggcgggggcgggtggacagggagggaacgggcctgggtgaaaggggcctgtggagtttaaacccagtgaatagggtcctaagtgccgtgtcaggacgaaaagaaggcggaggtcttgggataggagctggcccgggggccgggggacgcctacctgcgccccgggaagcccctagctccgggcggctccagcgcagccgggcgctcagcgtttattgcttgtcaatcgctagcccggctcttaaagcggcaaggcctctccgcgagggggcggaggtccggaggagaggggaggtgaggagaacgcggaggccggcacaactcggaggaagtagtctttcccagcagctggtacgggggcagccaggtagtggtttgggagacaccgcacagaccacgacgccctgctggagtcccactgggaagggttagggaggcaggactggtaccagtacccgctggtgcccctcggctcccaaggatcccttaaaggggcgatggtaaaagtgcctaatgagaccggcttgattactccgcccacccatcttggcttagaccggcgttctagttccaggcgtgcctcacttttcctcgttatcctgcttccatattga

SEQ ID NO: 239162 - DNA, 63 bp, Homo sapiens
  chr17:41985665-41985728
  hyper
ggctctgtgcagtgcgactagcatttggggccagctacgctacttctccgacctcggcgttca

SEQ ID NO: 239163 - DNA, 363 bp, Homo sapiens
  chr17:41995084-41995447
  hyper
ggctatagggccagtggctgcgacagggacctgatacaacagtgcgttaaataaggagcttattgagctatcatgtcgtaagccggtggagaagtccagggctagtgtgggggctccggcgggggctgtggcccccatccgcatggagcctccccacggttcacaggtctcggtcttcggagccttcagccccgtgagcccgaacagtccacacggcggcgccagaccctcttcccaacgccaccctctgaagcctccgctccaaccgtctccacttctgcttcaggctcaggattttcacttttctcgaatgggggtggccctcccctgatcttctgagtcgcaacagcatctccctccctc

SEQ ID NO: 239164 - DNA, 118 bp, Homo sapiens
  chr17:42030768-42030886
  hyper
gcgtcgaccagcgcccctaggcagacgagcagggccagaagcactgtggtcaaggcgggccacggcctgcgcacgaacaccatctgggaaggcgacattgggacgtgggtcattccaa

SEQ ID NO: 239165 - DNA, 557 bp, Homo sapiens
  chr17:42061026-42061583
  hyper
caacaagctcagacacccaacgctccccggggccgggtcttaggcgcacattggctcgcggtgcacgtccactctcctgtaggctcgtgcccttgacatatccggggctgtcacagtcccatgccccgaccccgaccccgcgcgagtctgcttgatgacgtcgctgtcgcaccccaccggcctccccgggtcctccccaggcgcgcgcaggggccgcgtgtccggtgccggccgggctgagtgttccgaggcgagcggctgctgtttgcgcagctaagtggcgtctgtgtacccagcggggcgcagcggtcgcgcgcttatctcccgcaaacaccgcgcccggatccgccggaaccacggccgcgccgccccatttgcacgccccggccgccggaggcccttatcgcccgcgtttatcgggccatcgctgataagaaaccgagggggcggcggggcggcccctctccttggatccaagaagcgatggggtcgctgttagggggggcgccagccccggggatgcggggagccttcgcagcctccgggtcagccctgct

SEQ ID NO: 239166 - DNA, 125 bp, Homo sapiens
  chr17:42072190-42072315
  hyper
tgcctgggcccaacgaacgggagggcgctggctggggccgggggtggccagggccccgggggaaaggcggtaagcatgagcaagagggtatcaggagtcgccccagcctcgccgccccggggcgg

SEQ ID NO: 239167 - DNA, 2130 bp, Homo sapiens
  chr17:42081912-42084042
  hyper
ccctgtccggaccccgccccgaccaggtccagccccgcccaacggcaagttaagagccccccagtgccagacgctccagacagactgccactcttggggggcaagagttggttgtcgtcatggcgacggcgctgatggctgtggttctgcgggcagctgctgtagccccgaggctgagaggccggggaggcactgggggcgcccgaaggctgagctgtggcgcgcggcggcgggcggcgaggggcaccagcccggggcgccggctcagcaccgcctggtcgcagccccagcccccgcccgaggagtacgcgggcgcggacgacgtctcccagtcgcccgtcgccgaggagccgtcgtgggtgccgagtcccaggcccccggtgccccacgagtccccagagcctccttcgggccgctcgctggtgcagcgggacatccaggccttcctgaaccagtgcggggccagccctggggaggcgcgccactggctcacgcagttccagacctgccatcactccgcggacaagcccttcgccgtcatcgaggtgagcggagcccggcgtgggccgtgacgcagcgaggggatggggttgtgcggccacctgtcctcaggcatggcaggatacgctgcgggctctgcgcagcggaagcgggaaggagcccggcagggcccagaccagcgccgccgggaatgggagaggccgtaagctcctccggaagcctcccgcccagcccgagtgaggatcctgggggaccccacccgccaggtgtgatgctctgaagaaggcccccaacatgggcgcagttaggggttcagaaggacctggacaggagccgcttgcactgcccctcccccaaagatgtcccggagtccaaggtcggagggaggagggcgggaggtaccccagcgtgagacaagggagtggcaagacccaacggggcaaagggcggagcaggtgggcactggtggccagaactgggtcctgacagcttctggaagggtagggtcaccgagacggccctgcaggccaggctgtgggagccagcggctcaggtccgtgtcacgctccttgaaagcccactcctccgcaggtggacgaggaggtgctcaagtgccagcagggcgtatccagtctggcctttgccctggccttcttgcagcgcatggacatgaagccgctggtggtcctggggctgccggcccctacggctccctcgggctgtctttccttctgggaggccaaggcgcagctggccaagagctgcaaggtgctggtagacgcgcttcgacacaacgccgccgctgctgtgccattttttggcggcgggtctgtgctacgcgctgccgagccggctccccatgccaggtgagtgcccgccctgcccgcccaggcgtcctcagagcgtgctactctgcccgccctgccccgtccggcaggcctggagggggccctctcgagcaccacgtctggcccacagctacggcggcatcgtctcggtggagacagacctgctgcagtggtgcctggagtcgggcagcatccccatcctgtgccccatcggggagacggccgcgcgccgctccgtgcttctcgactccctggaggtgaccgcgtcgctggccaaggcgctgcggcccaccaaaatcatcttcctcaataacacaggcggcctgcgcgacagcagtcataaggtgcggccctttctttcaccttcccccacgccggcgatccgggccttctcttgcgcccctcgcacttctccccgacgggccgcagactcactagcaagccgggtgggtagaaaagcctaagggagtataggggaggagttcagccctgggtgcccagatctgcgccctccctggctaaggactccgggcggaagtaaggataaaggggtcagagaaaagagaggtccgtgggggtaggggggcagtccgtgccggctgtgggccaggctcacccgctgactccggacacaggtcctgagtaacgtgaacctgcccgccgacctggacctggtgtgcaacgccgagtgggtgagcacaaaagaacggcagcagatgcggctcatcgtggacgtgctcagccgcctgccccaccactcctcggccgtcatcaccgccgc

SEQ ID NO: 239168 - DNA, 517 bp, Homo sapiens
  chr17:42091703-42092220
  hyper
ttttggggccgaggcgctcaccttcagccagtccccgtagtggacgtagcccccgatgtaggcggcgtaggtgctaatggccaattggagtgcggcccccagcgcgaaccagcgccgcttcacgccaaaggacatgaaactagcgcacagcacggctgcccccatgtcgaaatacaggtaaggcactgggatgtcgggcttcctgcgagccgggagtggggaagcaacgaggacagaatgaagcggtgggggaagaagcttgagaccccttgagttcccacaggctccactgctcccccaaaccagactcccctcccatgggcaggaccgccctaccagatttggtccgacacccagaccagaacccctcccagggaggtcccaattcctcccagttcaagggtcccgacttctagcccccaatttcttgcccacatcaccgccccctgccgcgtttagcggctgcgtaggcctgctcaccggcgtgcctcagccctctcagcgtacagcatgagct

SEQ ID NO: 239169 - DNA, 190 bp, Homo sapiens
  chr17:42200992-42201182
  hyper
ccgccaccaacaacaacattcggagacgtcactcccgtcacgtgacccgacccggagctaaaaatagacccagaccccccccccagccccccccgccttccccttgcccgcagccaccaccaacccctcccctgcctctcggccctccccgccgggcggggccagcgacgccatcgtgacagctccttaa

SEQ ID NO: 239170 - DNA, 128 bp, Homo sapiens
  chr17:42219140-42219268
  hyper
gtgctgaaccagccgactgggaagaggagccgcttgggggcgaccgagagcccatccgtttcccctttaagaccagagcggaagactacagtgagaaggccctttgtgtcggcgggaaagaaatatgc

SEQ ID NO: 239171 - DNA, 169 bp, Homo sapiens
  chr17:42263792-42263961
  hyper
tgaaatgctttcccgccttctttctccgggtcccacactacctggggccgcactcttcaagcactggatgctgactaactggtctccttatctgtcttcccgactggcccagagctgagttcttactaatccccgctaacctggagttaggtgcgcgttgcaaagcagt

SEQ ID NO: 239172 - DNA, 111 bp, Homo sapiens; identical to SEQ ID NO: 204627
  chr17:42264411-42264522
  hyper

SEQ ID NO: 239173 - DNA, 165 bp, Homo sapiens
  chr17:42287799-42287964
  hyper
cgactgagccttgagcgccgcctctcgggccttgtacttggcctgcggggatggcccgggcgtcagccttccacccacccccagggggcgcgcgctccccgcgcagcagcccaggcgctcccgccggcgggcagaagcatgggctggtgcagatgtctcccgcct

SEQ ID NO: 239174 - DNA, 149 bp, Homo sapiens
  chr17:42295577-42295726
  hyper
cagtcggcttctccgttcatcctccagctgtccagccacctcctcggtcgtgctggccgggcaacccggggtcaaagccacctcaccctttggaagacataccagttcccactcaggaaggctgagaggtgaacgactaacgactttct

SEQ ID NO: 239175 - DNA, 201 bp, Homo sapiens
  chr17:42297965-42298166
  hyper
ccggcggaggggccgctgtgggagccggttcaatccagcccggcatggttctccaggcctgcccgggcgcatgaagatcggcgccgccgccactcgtagcaacccctctcccccgaaatccgcggctcccgggctcacttaccgagcgtgtggatgggagcgcaggccgggggcacctgggagcacggcgggccgaacagt

SEQ ID NO: 239176 - DNA, 579 bp, Homo sapiens
  chr17:42298856-42299435
  hyper
gacggcgtgaggccggagggggatttgcaaggaaacctgcctgcttcccgctcccattgctccatccccgctgcctcctgcctcctgcttctctcctgcgtctttccaactctcccctgtcgccactggtgtgtgtctgagtgtgtgcgcggttttttttttttaattgctctttgcttttgcaaccctgaagcaaaagggggggggggtagttacagggaaaaaaaaagcgagaaagaagctcttagatttgcaacacatcggaaaaccgggggagcaccccgccttatccgatctccatgctccgcaagggccttccgggttttaggacaagcttctcaatgtcccgtttcgctgggtttaggatccgaggagtccgagcaaaaagttctccccctgggtcgtagtgacgggtgtcggggtgggagttgcggggatttttcaagaagcagcagctaccccggcgtcggtcactgggccggggtaggggaaagagcaaaatcccagtgggtttgcgcgagggatcttctagggtcgaggcgggtgtggggggagttggaaccgggagacaccgcttgg

SEQ ID NO: 239177 - DNA, 124 bp, Homo sapiens
  chr17:42385180-42385304
  hyper
aacgcggcaatgccggcagccaaggggttaaccttaggccagctggctctggggtggtgcgagggggtgggccgccaccccctccggttgccttggcaccattgtaggcgcctgctctgctgct

SEQ ID NO: 239178 - DNA, 232 bp, Homo sapiens; identical to SEQ ID NO: 204628
  chr17:42386109-42386341
  hyper

SEQ ID NO: 239179 - DNA, 356 bp, Homo sapiens
  chr17:42392356-42392712
  hyper
ctacctaaagttcacgcagaggtgagcggctccatgactgcggcggggcgggggacggggcctcgggacatcctggggacgtcctggtcccaccgccctcagcggccagcgcagacgcgcggggggaggggcgggaccggccgtgcccactgctccctctcccaagctacgactacctgacggacgaggaggagcggcacagcgccgagagcagcacgagcgaggacaactcgcccgagcacccgtacctcccgctcgtcaccgatgaggacagctggtacagcaagtggcacaagatggagcagaagttccgcatcgtctacgcgcagaaggtgcgcgacgccggcgggcccggg

SEQ ID NO: 239180 - DNA, 85 bp, Homo sapiens
  chr17:42392913-42392998
  hyper
cggcgcagaaccagcgcgagaaacgggagctggaaggcgtgatcctggagctgcaggagcagctgtgagcgcacggcctgcccta

SEQ ID NO: 239181 - DNA, 234 bp, Homo sapiens
  chr17:42393844-42394078
  hyper
cgcttaatggggccgagggcgccagcaactccaagctctaccggaggtaagccccagccaggtggggcttgggcctgagagcgggtcgtcctggggaagaagggcttcctctaccggcgcaccagctctcgctctgccgcagacacagcttcatgagcacggagccgctgtcagctgaagccagtctgagctcggactcccagcgcctgggagagggcacgcgggacgaggagc

SEQ ID NO: 239182 - DNA, 62 bp, Homo sapiens
  chr17:42422395-42422457
  hyper
gggttaaggaaggcgacgagcaccagctgccctgctgaggctgtcccgacgtcacatgattc

SEQ ID NO: 239183 - DNA, 44 bp, Homo sapiens
  chr17:42441403-42441447
  hyper
gggtcccatcacccgggttcttgggtttcgagagtccccaaaat

SEQ ID NO: 239184 - DNA, 149 bp, Homo sapiens; identical to SEQ ID NO: 204632
  chr17:42462944-42463093
  hyper

SEQ ID NO: 239185 - DNA, 445 bp, Homo sapiens
  chr17:42633725-42634170
  hyper
aaattccctcaaacgttcgtcaggcctaagagagtcgtcccttcactcaaaattgcccgtcaccccccgccccccaccattaactttcgattaagacctcctccttagggcaactaaactttactttgcacaattaagatttgccgcagaagaagcgggagggagaagccgcagctccgggccattctcctttccctcgctccctccaagccccccgccccaaccctccagctccgggcctccgagttcctgagttttctcactttgaggtgccaccgaacacaaagaaccataatgggctcctttgtgttggctacggggcaattacgcctcggagtcctggtccctttaagagtctcttaaagagacaggatcccatttttcagagggttttttaagggtgtgtggagggggagggcgagggatctacgtgtaaagtgaagtg

SEQ ID NO: 239186 - DNA, 64 bp, Homo sapiens
  chr17:42635073-42635137
  hyper
cctgccccgcctgctgctgccgctgctgctgctgcccgccgccgggccggcccagttccacggg

SEQ ID NO: 239187 - DNA, 123 bp, Homo sapiens
  chr17:42635737-42635860
  hyper
gcgcggcccgatggttccatgttcttctcacaggaggagacgcgtttcgcgcgcctctggatcctcacctggtcggtgctgtgctgcgcttccaccttcttcactgtcaccacgtacttggta

SEQ ID NO: 239188 - DNA, 57 bp, Homo sapiens
  chr17:42635890-42635947
  hyper
cctatcatttttctgtcgggctgctacaccatggtgtcggtggcctacatcgcgggc

SEQ ID NO: 239189 - DNA, 60 bp, Homo sapiens
  chr17:42733684-42733744
  hyper
caatggcgggctgcgaaacgggaggggcgggcctcacagcggggcggggcgcgcctgtgc

SEQ ID NO: 239190 - DNA, 201 bp, Homo sapiens
  chr17:42766993-42767194
  hyper
taggctccataaacggctcggtccactcccagtgcctccaaccgtccgtccagccaggagccaaagccgccgcctccgccatcgccttcgccaggggctatcgcggccacttcgctgggcgccgccatcttggggtcagggtcctgcaagcccctagggcgcctaccgcagtgcctgacgggccgcgccgcaggtccaccg

SEQ ID NO: 239191 - DNA, 34 bp, Homo sapiens
  chr17:42906458-42906492
  hyper
actcgatttcacatcgtcttgatgctaacaaaat

SEQ ID NO: 239192 - DNA, 44 bp, Homo sapiens
  chr17:42977088-42977132
  hyper
gcaaccacagctgcgggcgtggtctgcgcggggttgccctcctg

SEQ ID NO: 239193 - DNA, 434 bp, Homo sapiens
  chr17:42988669-42989103
  hyper
ttgagcaggtcctggtactcctgcaagtggcgggccatctcgtccttgaggctctgcccctcttcctccagccgcgccagcgcctcctgataactggccgcctcccgcacgtgccgctcctcctgctcgcgcatctgcctctccagggactcgttctgtgggatggagccggccggtcccgcggagccccgacccgacttggggaggtttcgaggcccggcccccggccccaggccccgcctctagcccgggggtaacgttcaggccccgccctcgacccaggtcctcgtccctggcccttctcccctggcatctcctggggtggccgtccctgctccgcccgtccccgtcctgccctggccgcgctcaccgtgccgcgcagagactccaggtcgcaggtcaaggactgcaactggcgccggtagtcgttggct

SEQ ID NO: 239194 - DNA, 349 bp, Homo sapiens
  chr17:43025009-43025358
  hyper
ccgccgctggcgtcgctgcttgctcacgggtcccacagccacaccacagacagcagtacccacaccgggagagagcgccccacaccctcccctacccgcgccaacctccacccggcgccttgcgttcaaattagccgggcgggccggaccgtgcttcctattggtcagcgtccgtatcgctgattggctgtttcctaagtaacaaagtgttgcgagagccgttcacagtgggcttgctcacttcctcttcctgtcggctgcagtttcccaggcggtgtctccggggttgggcacacgagagtagcgggcagaagccaacgcagggttgggatacgtggggccacagcca

SEQ ID NO: 239195 - DNA, 208 bp, Homo sapiens
  chr17:43044389-43044597
  hyper
cgcctaggcgcccgcgggcgcggatgctgcttctccctgttccatacgccagagcccatccttgccctccccttatcgcccactgctgtcggcccgaatccacttcccaaggggcaagcccccaagggcaagtccgtgcacctgggagccctgcgctctgactagttgggttcatttcccgcatttccagtagcgttccagacggtgc

SEQ ID NO: 239196 - DNA, 58 bp, Homo sapiens
  chr17:43044777-43044835
  hyper
tgccctgggcccagcccagccccatgcccccgcctggcccacctggccattcttgcag

SEQ ID NO: 239197 - DNA, 398 bp, Homo sapiens
  chr17:43047527-43047925
  hyper
tcaggaagagtagtcttcagcgctcggctgtcaggcaatccggtccccggttccccacggcggtctcctcggtgtgccccaccaagagcgacagggctggtgacccgaggggcgcgtgcgcggtcgtcagcctgggatttgcacggacccccttctccctagtacgctcgctcgggggcccctcctctgctacgccgctggggctcgcccgccacccacagccctcgcagagccctccgggcacaccgcggctggccgcccggggccaaggatggggcgggagcgcccacccacccccgcgccggccggggcatccaagaggcgcgctcgcagccacacggcgccccgcctcccgctccgaaaaagctcctgctcccctggcgcggtgtggcgtctcc

SEQ ID NO: 239198 - DNA, 169 bp, Homo sapiens
  chr17:43212859-43213028
  hyper
gggctgggaagtccgacccttcgattaagccccgcctgattgggaaaggctctgagaaactatttgcatgatcttgaaagagctgtgctgaatggttgaggtaggtaagccgaatgtgaaacaggctctctcattggcctaaattccccccctcgatctgcgtcgccat

SEQ ID NO: 239199 - DNA, 178 bp, Homo sapiens; identical to SEQ ID NO: 204640
  chr17:43239156-43239334
  hyper

SEQ ID NO: 239200 - DNA, 329 bp, Homo sapiens
  chr17:43324779-43325108
  hyper
gcaaaccagcgggcgccggggagaagggctgcttcttcactagagttggcggcgagggagcccgcttcgagggggcggaggctttcgtggctggcccagtatccctgcgggaggccggagggggcgagcgggcagctggggttagacacgccgggccagccccgcagcagttctccttccggctgccccgccccatttgcgccagtcctgcctcccacccgggcatctggccccttttcctttcgccctacccagtacttagtgacgccataagtgacctcgccttacatctccgcgcgtgccgcctccgtcaccgcctgccgggtccc

SEQ ID NO: 239201 - DNA, 323 bp, Homo sapiens
  chr17:43325348-43325671
  hyper
ccgggagcgccaacccctccaggttaggaatctgagagtacgggctgcgcgcacctggggcgggtgcctgggaggaggtggaggaggagacggtcctcagaacgggtcctgggggtcggaggcgagggcgggggttgtaagtggccgggagaggtccctcccgcgggtcccggcgccccccgccccgtcggggacgcacctacttcgtgcagtttgtgcagcgagcgcgccagctcctagttggagaggtcgctgatgcgcgccgcgtggcagaaggcgagccccgcgtgggagcgccccccaacccccgcagcctgggctga

SEQ ID NO: 239202 - DNA, 735 bp, Homo sapiens
  chr17:43339110-43339845
  hyper
tccctactccaaggcgcgcatgcgtgtccgtgagagcacatgggtgtgcaccgcgcaggggctgaggctgggagccgtagtcaggggcaccgggtgggctttggcggcgggtcgacctgcctttcaggtgccgggggtttgggagcaggggaacgggccctgggcggattcctgaccgcccccttcgcgcccctccccctctcactttcgctttccccgcctgccccaaccctcgcccccgggcgctcggccgctcccacctgtcacccccatgcagaccgaggctctgtcctggaggcggggagcgggctggtggatgctgcctctccgcctccagtgtgctctttggctgagggactggtgggcgctggaaatattagaggcgccggtgcctgtgatgtcgccgcctctgtgacgtccccgccgcgaccccacaggcagggagccgcatttaggtttcgggcgggcggacgggggacggcccgagtgaggcgtcctccgaaggctgcgggcccgaagccagaactccttcctctccgaagacctcgggggtggggctcgcgcttccgcagcgggcctagagcgagaggcaggcggcaggtaagcctggctgtgctggacaggacttgcacccgctctgcacgccagcggctcagggctgccgcccttttcgtggtcccagggcccttccaagaaccggctaaaccaacccaagccgcgcgcacacacacttgt

SEQ ID NO: 239203 - DNA, 131 bp, Homo sapiens
  chr17:43974330-43974461
  hyper
cctccacgcgggtcgcccaggttgatctgaatttctggggaatggcttggctgcccgcccgggaccaggccgaccctccttgacggtggcgtagagggctggagcctgggtactgcgaggctcctcgcatg

SEQ ID NO: 239204 - DNA, 239 bp, Homo sapiens
  chr17:44849686-44849925
  hyper
gtggtgacttaaaacgttcaacgcggagtgaatgggtagcgctcccagagccgctttcccctggctcttggccggagacgggaagagcgatcagaggtgactcgcttttggggagcgcgtctagacgcagggttgtttgattcagcgctacctggcccgaggaggggcaccggaaagcgctgagaccaacacaccgacaagaacgagtttgaaatgcaaaccgccgccacttggcccca

SEQ ID NO: 239205 - DNA, 288 bp, Homo sapiens
  chr17:44919154-44919442
  hyper
tgagagaccttgagcaaccacgtcctcctctgagctccgcgtttgccgtgtgcaaagtgaaggggtaggccgaccccgcagggcccttcttgcgctcctctgcggtgtgtgggggggtctctggtccgcgagaggacagtccctgccgcgccgagcgtcctccagcgtccgcggccgccgcgagcagcgctgaccggcagggggcgctcctgcagaaggctggccgcggtggcgccctcggcggggcctgggctggcctggggacccgggaggcctccccctccatcc

SEQ ID NO: 239206 - DNA, 737 bp, Homo sapiens
  chr17:44928883-44929620
  hyper
tcctttcccagcgccgcctgccccgccccacccgggtttaaagtcccgcgggcgggtggtggcggagctgcgagcttgagcggcgcgaggagatgctagagggcgcagcgccgccagcaccatgcgccccccgcccgcgctggccctggccgggctctgcctgctggcgctgcccgccgccgccgcctcctacttcgggtcagtgcccgccgcgccccccgcccgctccccggcctgcctgtctctccctcctgcgctacagctgggccaatttttccctcccgctgtccttggccccgccgaggtctcgaactcagaccctagcccggcgcgacccaacccacttcgcagtcggagttcgcgccctgagttcggtctccagcttccccggctccgaatccatcgccctgttcagtgtccgagtctctggtcgccccccagccgccgctctcctcatcccgccgggtctcggactctgcgcacgcctcggaccctggccccgtccgccccggccccgcccgttcaggcgtcagtcccgctctctgatgccctctcgggatcctcacgccggtgccctgtctgccgccatcctggcctccggcgagccgtccttgcctcggactccttccccaccctccgccttcgccctgcggagcggagaccgagagggctgggtggatgggtgggacgggctgttcccggtctcggggcagaggatcgtgcgcgtccagggagaa

SEQ ID NO: 239207 - DNA, 60 bp, Homo sapiens
  chr17:45000263-45000323
  hyper
ttgtccttcctaacgcctgactgaatcctgaggctagccttcagcgaacatgtacaccgc

SEQ ID NO: 239208 - DNA, 1332 bp, Homo sapiens
  chr17:45055673-45057005
  hyper
aactcccacgcgagcgaccgcagtcccaaattgcatctccatacccactcccaccctgccccgaacgtcttaaaaaacaaacaaacaaaaaaaactggtaagaaccctcaccccacattctcccaccccgcaacgctgcagcgcacacaggacagagccgggcgtccaagtcccttcccgcgcccccgccgacagtctcgccgcgtccccgcccgggcgccccaggcacgtagctgcccgcccggaggcggcggcagagcgcagagagcggggcgagggtccgggtctccggggtccttcttgcagcagcgctggcgagggcggacccagatggcgctcagtacagccccaggatggctgcgcccacgtccttggagggccggcgctcctgcaccagaaagttgatcatgctctcggacttgatgagcaggttgcagcccaggaagaagacgccgaagaccacggtaagcgacagcacgcagagcacggcgatctgcgccacccgcgacacccacaggctgcgctcgtcgggcgccagccccgcggggaccccgtcgctggcggccagcggtgcgccccctggacagcagcccagccacgtgcccagcccgtgggtgcggtttcccagggcggccccggcgccgccgcccacgccgtccacctcctccaagccgctgtggttcaggaaggtcgcgttcatcgccgcgcggcgccgggggtctcggcgcgcagtcccgggtgcactgggctgctcgccggggtccgcgctctcagggacgctccggacccctcggaccggctcctgcggtacggggaggggacgaaggcgggaggctggctgcctgcgcgctctcgggccgcctacccctgggcaccgggcgggaagcgaccgcccggaggagcgagcaacaggcggcgcaggagctggagccggagaacctagtgtgcttagcggtcgcccgctgggttcctcgcgcgcctggccgcccctcccctagcaacggcccggccccgccccgccggtccccgcggcatctccgaggggcgggaatcccgccgcgggcgcagcctccccggagtcccggtgctggagggggtcgggagatccggcagcctctgtccgcgggccggcgaaactccaccccctcctggcacccgctgtccgttcttggctagaaaacctctccaaggtgcccattccaggatttgatacccttagcagtgaagttattccggaatctgccctgactctcttcgcttattatttaagccctcgtaagccttgctagacatcagatgagtcgccgggacccctggcgctgcccactccac

SEQ ID NO: 239209 - DNA, 142 bp, Homo sapiens
  chr17:45266823-45266965
  hyper
gtctgacccaaagcgtaggtttctcttctcagccacgccttcagccacgcacaccacgcccaatcggccgtcccagggttgggctacgccaaatctgcaaccagcaggctgggcgtggcgtgacagcgcgggcgggtagcgt

SEQ ID NO: 239210 - DNA, 825 bp, Homo sapiens
  chr17:45330948-45331773
  hyper
atgcgctgacgacccggctggcaggcgggtcctcgtgggcgaggcgagggaggcggcgagagaggagcaatagtttcccaccgctccctctcaggcgcagggtctagagaagcgcgaggggatctagagaagccggaggggaggaagcgcgagtccgcggcccgccccgttgcgtcccacccaccgcgtcccctcccctcccctcccgctgcgggaaaagcggccgcgggcggcggcgcccactgtggggcgggcggagcgccgcgggaggcggacgagatgcgagcgcggccgcggccccggccgctctgggcgactgtgctggcgctgggggcgctggcgggcgttggcgtaggaggtgagtgaggctccggctcggcagcgtcgcagctgccccaggatctgcgccccggtcaagttgcggacttggagccggcaaacgcggagggctggtcccgcgcgtctgcgctgggaatgcgcgtgtcctggctggcgcggtcggagccgggagctggggaccttcctggcccggcggtggcggggctgagaggtgcctggtgcctgggagcgggtcctccgagacgccgaagccatcagccaggctgagcgccttcccggccgccgcggcgcgcacggtgcggtgggcgcatctctgagccccgcgctcacccggggctgcgcgcgtcgcgggtggtcctggtcgggccaaggacgactggcccaggagccaaggcgaggtggggcttccgggggttgttcccgcgccttggcagagggatgccgctgtagcttcctgggtgagagcgtgcgcgcgcgcgggtttgc

SEQ ID NO: 239211 - DNA, 37 bp, Homo sapiens
  chr17:45401134-45401171
  hyper
gccttccagtcagcgcggaggcggtattgagttcagc

SEQ ID NO: 239212 - DNA, 489 bp, Homo sapiens
  chr17:45500789-45501278
  hyper
gtcggctgcgcccgcggcccggggcggagttggccaccgcgcctggctgcgggcggccgggcgaacgggctcggcgcgcaggtggctcctccttcgcttctcccgatccccggccgtgccaggcacggtgccggctgccgagggaacgcctttgtgcccggtcctgggaacccgcgacggccgccgcgcgccccggtccattgtttcgcttctctgggttccaggtaggtgcgggcggcgcgcggggtccgcacgacgtgtcaccccggcggttggggcgccgggacccgcgggcgccggcaggggcgttcccgggcgcacggcggcggtgcagcacctgaagcggtggtggtcggccagcggcggcctcctgcacctcaccctcctgcaccttaccctcctgctgagctttgctgggctccgtgtagacctagacctttacctgctactgccgccgcccaccctgctccgggacgagctgctgttcct

SEQ ID NO: 239213 - DNA, 39 bp, Homo sapiens; identical to SEQ ID NO: 204651
  chr17:45609732-45609771
  hyper

SEQ ID NO: 239214 - DNA, 166 bp, Homo sapiens
  chr17:45772372-45772538
  hyper
ggggtgcacataacgctccagcgcgcgcacacacctcggacagtcccctcgcgtctcacgtgacacgcggcccggacgtgccaccctgcccacgcgctcacgcacgcgtgcacacaccagcctcctggtcgctgccccactccgtcccgacgcccctgcgaccccg

SEQ ID NO: 239215 - DNA, 612 bp, Homo sapiens
  chr17:45867089-45867701
  hyper
ctctgcttcctcctcgcagcagccggcgcgtctttgttccgtccaggcatcttcaacgcgtccctccctctggacgctgccgaggaaatactgaagtggtagaggatgtggggaggccgtccaagagtggaggtgtcccgggcctgctctctccaggaggaggagtgcaggctggggtccacctccccggtccagcagtgctggggaggggaccccgcacgtgtgcccggagcgcggacacggtgatgcggctgcccctcgccccggccccaggctcgctgcgccctccctccccggtcgcctctgcgtttctcccgccagcaggagaccgagtctgagcgcagccgccgaccctgcgccttccctgtgcactcaaagaccgccagctctgggggagcccggggacccacgccgctctgggcacaggcgaccgaggccaaggcgctccgggtctctccagttccggcgtcttctggtcctcgggctccgctccgcggccactgggcccgctgcacgcgagcgcgccgagctctgctcccgctgctcctgcgaagctggtgtccacacccgccggcctgcaggcacctcggggcccacgtgtcctccggccac

SEQ ID NO: 239216 - DNA, 69 bp, Homo sapiens
  chr17:45918751-45918820
  hyper
tcccggagcagagcggccttgcgagtcccacctggctccctgtcctacccaggcgcccatttgaggcct

SEQ ID NO: 239217 - DNA, 239 bp, Homo sapiens
  chr17:45973403-45973642
  hyper
ctttcggttggtgcgctctaccgtccatcagtgacattgcacagacctattggtcaaatcaacgtcgctctagacgcctctggttgattggttaatagtgctgtcggtccccaatgttccaagcgcttattggtgaaggctgccgtcgctcgggcggtggcgggctccgggattggcggttgcttggcgggcggtgtcaggctctcggtggcggcggaggcggcggaggccagggagga

SEQ ID NO: 239218 - DNA, 162 bp, Homo sapiens
  chr17:46048350-46048512
  hyper
ggcctgagtggagcgtaaaccctgattggctgtacggaaggcggcgacgtggccgaaggatgcccgtttgtgtctaaacggaggctcggccacaacgccactggattggtggtagggcggggcgggccacagtctccagcctgaagcggaagtggaggaaag

SEQ ID NO: 239219 - DNA, 288 bp, Homo sapiens
  chr17:46089197-46089485
  hyper
tggtttccccagaagttgcccgtttcctgggccattcctctccaggcagccctcgggagttcccgccgcaccgaccccagccaggctccagcggtcccctctcttccatcccgccatctctctgaggggcttgcgtctccctgatgcgctctggtgtctgtctgagccatccatcaaggatggcaggctgggggaaacatgaaaaagagcctatttggctattaacatcccctcccgctttgttgtctctctcctccccagtcccctaccagcccctcacccaacccc

SEQ ID NO: 239220 - DNA, 191 bp, Homo sapiens
  chr17:46124668-46124859
  hyper
cctaaatggggtcttcgcatcagctgcgttaaaatcaccccagcaggcaggttatccggccgccactccagggtcattaaatcagactctccagtgggacctcggaattcgtagcttagcaagctccccaagtgatgctgggagtaaactaacgtttgagagtcacaaacatgttttggcaatataaccag

SEQ ID NO: 239221 - DNA, 82 bp, Homo sapiens
  chr17:46125608-46125690
  hyper
gagggacatccgtcgacggccccggcctcggctcgttgattggagaaactgttcctagggtgtttgcggcgggcgggtttcc

SEQ ID NO: 239222 - DNA, 199 bp, Homo sapiens
  chr17:46178731-46178930
  hyper
gtggccgcagtggcgtccctcactgaagcggcgtaccgcaggccccggccaacggccctcccctcagccgaacaaaagagcctcgcagtctgcgctgcccgccgctcgcaccgcgcaggcgcaacgacccgccgcacggcaccatgggcctcgggggtctgtccaagactacaaggcccgaagcgccgcgcgccgcgca

SEQ ID NO: 239223 - DNA, 210 bp, Homo sapiens
  chr17:46507535-46507745
  hyper
acgggctggaaggcgacccggctgcaccgcgaggcacctgtacctcagccgcggtcgccgcccgcccagcccggccgcggggcggggccgtgggtccccgggcgcgtcaggaagtggcgcgggcggcaggcggggaccggaacggggcgcggggcgtgggtgcacgtggcgctcacgccggagccccacggtagaaggattgggggtgcc

SEQ ID NO: 239224 - DNA, 1896 bp, Homo sapiens
  chr17:46620279-46622175
  hyper
aagaaagggagtggattaaacgctaattcagtaatacctgaattttagcaaaacacataagtctatgcgactgagggtgggagaggctcgatttttccagtagacggccaaggagcgcgggggtcgaaaggaccgggaggaggaaacaggttagggaaactgcaggtcgatggcacagagcgtactggtgaaaaaatccagctcttcctcggaaaaagggaccgggctgtcgagagaaccctgtaggctaggggagaggcctccggatagctggagacaggagtcggccgcgaagaagttgaggtcgggaaggaaaggtgaatcctggcgccccgagaagacgtcttctggcaatggcccgggctccagcccgccggccccgcgcagcgcgcagccgggactcgacgcgcctgcgccctctaagcgaacggctaaaggccgggggtccgcgcttaaggcccccggcaccacctccggcgggtgacagcaggcttcccacgccgcccgcgaggcggaggggccgcccgggctggccgcgggttcctcggcagggtcgcagatgtcctccagggctcccgggcaggcaggctccccatccggcggctctcggtgctgcgtctgccgcttgtgcttcatgcgccggttctgaaaccagactttgacctgcctttcggtgaggtccagcaaggccgcgatctcgacgcggcgtggccggcacaggtacttattaaagtggaattccttctccagttccagcagctgcgtgttggtgtaagccgtgcgcagcctgcgcgccccgccgccaccagcctccggcagtcccaggccatctgcagggaaaacaggctcggcgtcatagcgggccgtgtactcagcccaacctcagttcggactaccccatcctccaaaaccagtatcacctctccccttcctcgccaccccacccccgcccccaccccaaagccgctcgctttactgcttttgggttttcttctctccctctctagtctacagccccggcccgggtcagggcaaagcattcagagccgcccacgggccacgcagggggcggagagcggctcccttcggcgccggaacctcagatccccctcccaagccctcccagtggacccctcaattcggaactttccaactcaaccggagcgagggtcagaaagattgttcttcacccctcttcctccctagctctgaattcttcctcttctcctagagttggggcagaaaggaccgaatcttttctgcttctagggtctatcccagcaacaacatactcattcccctacacagatacgggtgaaaacctcaatcaaatcattttcttctagcagaaaaaaaggcgtttccccaaccagcttccaaaatcagccatagggagagaaagagagagagagacagaaaaaaaaaaagacgctgttagcggccaggcctgaaccccagtgggatattctacttccccatcccaggaatggagggggtaaggaaccccaacaggctcgccaccattttttttaaacctccttccactgctttttctccccctcttctagctgcccctcaccccacccccaccacgcttaccgacctgcaggcgatccgaccccggaggccggaacggcggaggcggccggagaaggagacgtggcggattggctgggtttcttggcggatttcttctctttcatccaagggaactcgggggccgggggggcagcggggagtggcggcggcggtggcggcggcagagcaggcccatcttcggctcgcttttggctcctgggtctctgaagggtggaggcgccgggctggaggctggggaaggtttgctcgaaaggaggaggaggaggaattaatgtcgactccttgattgatgaagtt

SEQ ID NO: 239225 - DNA, 1590 bp, Homo sapiens
  chr17:46654955-46656545
  hyper
tatctccctggcgaaaaagtcgctggtgagaatggtgaagaggatggggaacctacttcaaaggcgcagggcccaccaggccataaaaatttatgggggatgtaattatgtggctctgaaaacaggcgaccgtaaatctccggcaatggcgagtttatagcggggacaattggcttccccagctcaacccccccccaacccatgcctccgaagtccctttggtgtaaagctccaggggtgggagggggaaggggtgcccacgcactcacccgtgctcacgtgaactttgcgcatccaggggtagacgacgggctctttgcacgcggagtgggacgggctggggtgcagggggttctgggcgcagggaggcggcggggggctgctgctgaccgcctcgcagcgctggccgggctccgggaggagggccccggcgggtggcggcgcaggagcccgaggggacagaccgggcggtggcgggggcggcgggggtggtggcggaggcggcgggggcccagggtcccggcaggccgcgtagcgctgcacggtgcacgccgcgcgccgcccgaagcccgcctccggctggaagctgctctctcgcctctggccgccggcgtagtacccgggcgagtggtcgctgggtaggtaatcgctctgtgaatattcctcgcatggagggaacttggggtcgacatagtttgagttgatcaaaaaagaactcatagccattaatttctgggaattgcccacaaaatatactaaaatttattccgacccctgactcgttttcctgtttccgaaagccctcctacttactgtcaagtgaacaaagttaggcgcccacgtgatcctccgagccaatggccgccccgcctgcgattcccggataaggaaatctgctcacccggaccccactccagccaaagaggtttatttccccttcttcccttccccctccccacccacccacccaacaccaggatttacatagggctcctgcggggcgaccccctccttgcctcgctctctccgggatcagagagagagcgagagagagagcgcgcgcaggttgcgactggagggcctgttggggcgctaggcagagcgcaaaccctagatcccttaagaagttggggctcccggtgtagccctcctgttctgcctcacctctgcccagcattctgtaccttccaaaggccccagtctcctcccctcggcgggagggagcgctagcaccctgcgtctctatggggagttaggttactggcgggttgggggctccgtctcgaaaggggaacccatacgggggccagagcacagagcttggggcttttctctgcagctggatggggaagggtaggggtgagagaggaggcgtccagagctagagggcgggtgcgcagagggacttgtcagagatgaatggaaccgcgggcggatcgataggaaattcatgcactaattcggggagacttcgccttccaaatctcatttagctgcacggttagctagactgtgtccgtcagtccgtctgtcccccttctcctatccactcctccctttaacccacacggcccaagcctggagaaacga

SEQ ID NO: 239226 - DNA, 176 bp, Homo sapiens
  chr17:46659085-46659261
  hyper
ggaacaggcggcagagccaccgcgggtttgggtatccttgatcctggcgcccaagagcagagatttttctcctctgcgccctggaagtcaccacctgccaatcccaccaaggcgccgcacccccctcacccctccagccgcctgagatggagaacagggtttatgggcgactccca

SEQ ID NO: 239227 - DNA, 411 bp, Homo sapiens
  chr17:46662740-46663151
  hyper
ggagcaggggctcctcgggagcagaaggggccgctgtgctcacagggctagagggagagttcagtgtcccaacgatgcgggggggcccggggccaccttgcgcggccgctcgctgacgcctcagaggccccagcctggctgtgaacttggtctaaggcggactctactggcagctccgggatgttacagcctctgcctctggtccagagcagcggcggtgcggacaacccgtgcgctttcggtttcccttccgcccaaatatcgcctcccagacccccacctctccctgggaaggatttcctttctccctccttgggatcccttgggattcagaaaacagaaaagaaaacgaattagagagatgcatgcacctaaggacaagcctgcaggagccccgaaatagggtatcct

SEQ ID NO: 239228 - DNA, 584 bp, Homo sapiens
  chr17:46663380-46663964
  hyper
gaccaaaaccagccgctgtgctccgaagccgcaaggctcagcccggatccactaggggagaggcagtccagagggcggcctcgcagactgggaactgtttccggggaggagaagctagaggatactgcagagagtgcatttttctctccaagaggaactttagggggagaagagacaagagaggagacgcctaaatcactgagaaaaggaataagaagagagggaagagaaacgttaaaacttggggacaaggtgctttttgggatccgacaggttcccgaattgcccgaagtccaatactctccaggctcccaaatttcccctcttcctcttggagcctgcaatcagtaaattcgccaaaagaaagaacgaaagatccgcctaaacctgccggcgtgcccccacccccggtctacagaggcggaggtggctgcggcggtgtggccggcggcgcgtaatgtatgctgcagcggctcggagccccacgtaggccggcgctgctgcccccgtctgctgacctctgcatgatcccggactctatgaattattgatgagatatgagcgttgatttcccctttcaggat

SEQ ID NO: 239229 - DNA, 800 bp, Homo sapiens
  chr17:46670738-46671538
  hyper
gcagggcagggactcgggcgaggacagggagcagctcgaagccgcttgcctgaagcggggctcctgggcgggcgcggggaaggcgcgcgagctctcgcccaccgccccaaagtggctggaggaggccgaggagcggttgacgctgaggtccatcccattgtaattgtagccgtaagagccggtgtgcatggcagcgggatccctgtaagagccgctcagagagctgccactgccataatttagcaactgatagtccgggccatttggataacgccccgagaaggagtttacaaagtacgagctcatttgggtgattttggagggcttgatttgtggatcgtggtcgttataaccctgtgcttcacgatttatgatgtattaatgaattatagcgatgcactgtacttcgttttgctatgtatgcggccaaatatggggggggggttggaaggggggtggggggcgttagggaatcacgtgcttttgttgaccagtcgtaaattctcgctgatgacctcaagaggtaattcatgctctatggttacaaataatgacgatccgagaatcgttagggccgattcaatgcgagcctccgagagagggggaaaaaaggagaagggggagaaacagagagaaggttggctttggcctctgagcagagcgcgccacctcccggcgaccgacgggagcgcgggcgtgagaccgccatggcggcgggcggctgcctccctgctggctccctgcaggctccctgcagtcgccgggagagaaagaaacccggccaaggctcagccacaggg

SEQ ID NO: 239230 - DNA, 922 bp, Homo sapiens
  chr17:46674938-46675860
  hyper
gagagacccccggccggcgcccaatcttcttctatctcctaactgagatgcccacccagcaccctgtgggagattggggcagggggcgctcactagttctgtgtcccggggtgggcgcccaggggagccggggcgacggcgacgggaagtctcactcactgttgcacgaattcatccgctgcatccacgggtagaccggagtggagcacttctgctcttctgtctcgccgaacacgctcttgtcctgcgcgcagtccgacttccgcggctcggggtggaacgggggctgctcgtcggcgccggagagtgcgcaggccgactctttctcgcggtagaaggccggcgccggcccgtagtcgcagggcgccgctcggccgtagccaccgcccgccggcgggtaataggaggaagtggcaaagcccttgtcctggcccggccctggcccgtagggcgcggggtaatgtctcagcgggtccgcatagcccgacgaatagagcggtagctggcccaggaaggactcctgcccgctggccagagtgacggggaaggtggagttcacgaaataggaactcattgggaggggaggcgcgcgcggccgctgctgctccgccgggtttatgatttgttgtgttttatagtccgagcgccgcgcctattagtagtatatccgagattgggttttagctgaggggggatggcgaggtgccagtgagggccagaaggaaatacaaccatctgatccaacactgaccaatggcagaggcaggaattgtcaaatagcacccaggaggagcgcagcccgcacgagggacccgcgcacaaacctatcaacctttttttttttcctccttctccttcgcctttctcctctctccccccaacaacacaacgcgtcctgttccacctacgtaggatctgtgaa

SEQ ID NO: 239231 - DNA, 63 bp, Homo sapiens
  chr17:46687507-46687570
  hyper
tggctattctctgcaaacaccggccttcctccgcaagacaaacggcctcgtctccagcccgtg

SEQ ID NO: 239232 - DNA, 611 bp, Homo sapiens
  chr17:46688530-46689141
  hyper
cgagccctgtggattggggctgggggctcaagggccgctgccgactcccgcgggctggaggccgcttgcaggcgagatttggggaggaagagattgagtggaagggaaaataaataacctcggggcgatccgtgtcaccctccacccatcctcttcagcccgttaccgagcgagagacaaacgcagggattgaatgcacgcaactgggtgggtgggtgcttggggcaggtctgttctttattaaaccaggccaattctgcacggcaaggccttttggggaagttggtccggttctcccaagacgaggaatgaggcgagcctggctcacgactctgtctctcttggtgccccagatatgcgggcggagatggagcaagtcttcctaggtgctcctagggcacaggatccagcccacgggccttggacgctgccgtttctggtggcaaaaaaaaaaagaaagaaagaaagaaaaagaaaaaaaaaggtttgaaagtaaaagaaaaagggggttgggagggtggggagagaaaggaagggtggaggttggcccgggcgcgctgctctcccggttcccggaggcggatgcctcagtggagcgtgactaccagaga

SEQ ID NO: 239233 - DNA, 151 bp, Homo sapiens; identical to SEQ ID NO: 204668
  chr17:46689520-46689671
  hyper

SEQ ID NO: 239234 - DNA, 205 bp, Homo sapiens
  chr17:46690863-46691068
  hyper
ggcggctgctgggaatgggggaaagggcgagacagaggggaggggagggtgggggagggggcagggacggagaaggttggaagattcgtgaacgagcctgggagaccattataataagggcaggggaccttctaccccgtgcgggggcggggggggcgcaagaaggccgcggtcggcggaggaggaggggcgagggggattagac

SEQ ID NO: 239235 - DNA, 68 bp, Homo sapiens
  chr17:46691437-46691505
  hyper
attcaggaaatgtttctaagcgacccccttcaagggaaagaaaaaagaaagaagaaagaaagataaga

SEQ ID NO: 239236 - DNA, 489 bp, Homo sapiens
  chr17:46692105-46692594
  hyper
agttgggggctgttggggagggggtggggagggggaaagggagggagagagagaaaaaaacgcggattcgccggctcctagtcaccctcgccaggaaaggagagggaaagagaggagggaaaaaaagaaaagaaagaaaaggcgaagaagatctcgaagccgacacactttttgtggtttccaggaatagaaaaggacagagaagcctccaaaagtctaagcttgcatggcagccgcggctcgctcgccctccccccaccccccaccccccaaacaaaaatataccaccacttaaagaggtcctcgctttacatttcgaagaagggatgccagttcataaacagttttcggtgatttacttccctgcaaatgagttgtttcatattttgcactgtcttttcatgatcatttgcatccattagagaccccgcatcctattggcttcttcgtactcctcccggacagaacgcagagcgagggtgagagcga

SEQ ID NO: 239237 - DNA, 96 bp, Homo sapiens
  chr17:46696376-46696472
  hyper
tttctagcggagaccgcaaagcagtgcgccctttatggcctgtaaaaagggggaccgagcagttttcaaactccacgcgattgtttcaaattctga

SEQ ID NO: 239238 - DNA, 1808 bp, Homo sapiens
  chr17:46702260-46704068
  hyper
ccccccacccctcctctccccggggtcccttcgagatgccccgatattcggaagcgattccccgactccccaagaggcggacagcccgggctggggctcgggagccccgcagagagcagcgggggaccgcagaaaaggaagcggtagcccctgcgaggacgccgaggaggagaggggccaccggagggaaggctcccggggaggggccggcgcatccggggagggggctcagtcaccgcgtcctgggcttcccccgcccctcctgtcgccggttgcggactctgcgcggctacagcgcgagatctgctaggaacaatcctccgccaagctgttgcatcgcaaataaaatcctaatgagctccctcccccttccccttggccggcttttacggtctgcgcgtggcgcggggagctctgccagccgcacggccccgggcagcccagtgcgctccggcccttgccctcgccggctctcggcctcgctggccgctggccccggcccccgccagctcctctcccggccgtcgccggtctctggccgggctttcagctggggcctccgggagagagggggaaagagggccgagagagctgcaagtcgatccccgagcccctgttccccgcaggacttggagaagtgggggcagcgctcctctggcggcctcagtctccccttctagagcacgcagctttccccttccctccgtctttccttcctctcccctcctcctcccggcccgctctccggccaccgccgcagtttcccttcacattgtccgcagtttattgcctttcccctccccgcccccctcctggccttcggcctgggtatttcctcactttttataacttactttgatccggcctctctttgtcctcgcttccttcgcaaattttattgtccccgtagccgggtctttgattagacagcacggcctccctgcccgccgaagtttccaaactgtactcgggcgtgccctgtttgagcagctccccaggcgcgcccagcagcggctccgccttcaccgccgcctggccctgccccggggccgcttcgccgcgcggcgccggctccagccaggtgcggaggtacctgctctcggccggcgggacgccctggggctggatgtaagggtggtagacggacggcaggctcccggacgcgtgcgggctcagcggcgcccaggaggcgccgaacaccggcgctttgggctggaagctgcacgaggggaactccaggtgctccgcgtggcccggctgccgcgagctcgcgtactggccagaaggaaacttggctggaggcgcgtcctcactctcgtgacttatgatcgagtcgacataatagctgctaagcgtcccagaaatggacattctcagacattatccgggcgcttgcagggggaagggaagcgctcgcgcggcggcgcccaagcagggagaggtggcacccggaccggtgtgagggctttcggacgcgacccccccagccccccaccctcccacccccaccccctgctcaacttctcagccaacaaagtacagtggagcagcccgtctcagctctccttgcaaaatgattggtcaaagtttttccgactgcctgataaagcgtcagctccgacataaatcaatcgggcgagggggctgcgctctcgctgtcatccgtccgcaccgcactccatatcgaggatggattgttttatgctgatgcaatgtgctatcacgtcagggctccggcggccacgtaacctcagccccagctaccggccgcccggtccccccctcccgctgcaggaaggggggcagtt

SEQ ID NO: 239239 - DNA, 509 bp, Homo sapiens
  chr17:46711018-46711527
  hyper
agggagtccacctggccgcccgctccccctcccgggtataaatcttggggaccggaaatacaataaaacttcaccgtgttgatgaacttcaaacggtttacatcccctcctgtcctgaaaagaaagacgtccgggggcggattaaaaggaaggggaaacaaatttacgagcggcagaagcacccgcctcggcccctttctttgcccgcacactttgtccgcgtggagagaagcagccccagcccccgggacttggcctccgccgaaccggccgccaggcgcgctcttctctcggaggagtcggcgctgacccagcccgcgcccggcagagactggaagccgccgcctacacggaaaatccacagagccccgcgcagaccctatgatcggctcggcccgccgggcttgggatgaggctccctgcttctcgctagagcagaactgggctccctggcgcttccttgcgaaagcccaggctctcccaaccacgcccggtggcctccatttttt

SEQ ID NO: 239240 - DNA, 491 bp, Homo sapiens
  chr17:46713828-46714319
  hyper
gaggagacagtctcggagaattcagaggtgccagaagccgagttcctagaccccagctggattttttttttttttttttttttttttccaatttctggcggcgggcggctggggaagcagctctgtggtctcccggcgggtgaggccgagacagagaccaacctctaggcggcgccctggcgttgagtccgcgctgaacaagattctctcgcagctctgcgtcccgcgccgggtgaaggggcgtgttcctgcaggcgctcggggctcggcctggagctggcggccggcacgtcgcctttggcgccctctgccaaccaagagaaacacggttaaatgagtgcgctgggacagaaatccacagctaatcaaggccccatccgctcccaccccctggcccttacctcctaactccatctccgacgctagggagccttccacagcccgaatctcctttgatgtccccagcagccggctagagggcagcgccagca

SEQ ID NO: 239241 - DNA, 171 bp, Homo sapiens
  chr17:46724765-46724936
  hyper
ggcgggaggcgactgatccacacttagggctccgaatccggagaaagagagcgccggaccctcctccgcccacctcccgccccagccgcagcccagcgacttcccgccatcctcggccaccgagcggctcctgcctggggttgttcgaccgggatggctgcaccaggctga

SEQ ID NO: 239242 - DNA, 392 bp, Homo sapiens
  chr17:46755634-46756026
  hyper
gcaggaagggcaggcgccaagcctcaagtctcaaacacggtgcggggctgcgcggcaaggagaaacccaggagatgctcggggtcggggcccagggcagggaaaaccctcagctctggtcaaaagccaagtgagcgaaggaggcgatgcaacgtcaccctggtggccaaggcaggcacccaggtctcgaggttccaggagagggacgcgctgtgaccaccagccccctaggctcctgtctgctcgatgagcgtccactcgccagttccagccgcgagcgcccccagcactcccggagctgggccgggcgccgccttccctcgggcggccggcaggggtcagtgtttggccgcaggtgaacagacagcggccggggctgaatctggttcttct

SEQ ID NO: 239243 - DNA, 218 bp, Homo sapiens
  chr17:46795453-46795671
  hyper
tgttctacttgctgcgatcgggatagtttttttttccactttgaggctctttttttttttttttaaggggcaggaacatcattttgcatcaggccctgtaaaaaaaaaaagggggggggggtgggtaggaaccaggatgttggggaaaattatttcaatgtgttgagtctgaagctttttggaaagcaatgtagatgtgatctcgtttgctctgaatc

SEQ ID NO: 239244 - DNA, 863 bp, Homo sapiens
  chr17:46795709-46796572
  hyper
cttaactttcataaacgccggcaccgaactcaacgcaaaactacccaagtgccaaagaccatttctgggaagctcattccatgagaccttcgcatttttccaaatcaaaggcttcccttcggatctaattatttctcctctacagggctgcgggagggggaggggatgtgagactagggcaacagattaagattgaaagtcctttctcgcagcttcattttcgcccccacactgtcccaaatgcttagaaccctcctcgtcagaatgggaacggtgcccccgcttgtcctaaaagacacagaccaggtccgtgaacttgacccaggcgcccacgcctcttttccccgaaggtcagacaaaggcagaagggttggctggattctttcccgggccgcgaaggcctggggatcgcaagttgaggaggagaagaccgcaaacccctttggttcaagcaagctctgcggcaggtaaaaggcaaattggtggggacgggtaggacagggagagcattatctggctaactcccgcaggcctcttccgatttgtcggcggggacctgactccctgcggtgtctctggccccaaatacggaggccaggagcttttcgttgtctcgcccgatttggtatcttattagccggtgtcgctgagccgcgggggactcccggctggaaaggaagccctgcgctcgaagcgccccacgccagacggagtggcccctgcgcctccccgcgcgccggcgcgccctgttcaccttcgactggatgttaccgagccagggagagacccggagatcgagtgtttgatcttcccttgctccaggatcctgaattctttaaacacactcgcacgcgctcgcacac

SEQ ID NO: 239245 - DNA, 999 bp, Homo sapiens
  chr17:46796632-46797631
  hyper
gcaggccgctcctcgcagcctccgcagtcggcgggtcgcctggaaagacgcgccggtttcccgggtcggatggctctccaggccgctatttcctccgccaccgagtagggagacgccccatttgcgaagtttaagtttccaggtcctgggaaggcagctgggaaacccgcggggctcggcagccgccctggtagcagccagggatcggatagcgcggcgggcgacagccccccggataaccccgccgagggaggggcgcttgtaaaaccgagcggcgacggcctcgttacgaccgactcgaacattctctaataaatcatcggccttagctagtattcgtttgtgtacgcatctgtttatcctgattattaaaataaattaaggattagactgcctagaataaggtaaacgaacatgaaatgccaaggaggaaaacagaaaaagttacaccatgtcgatcccgaccaaaacattggcctgacttgccggatggcctcaagaatccggcttttagctgcaggcccggcgggtgttccccggaaggcaaggattggaagctctttgataaagccgcgcgaggcccggtttctcgcgtttcgggtcgctccacagccccctccgcccttcccctccacccctccgcgtctcggcctggctccggaggggtgaaggaatgtttatagcctgactcaagttcaatgacaaaaacctgcctggaatgggaggtgcggcgagcttcagccatcaacatgacaaaggctggacgcaggtctcgggcgggggcgacgggctgggcccacctagagatggggagctgagggcccacaggatgggtacggaccccgcagaccaagagctgcctctctgccctcagcctggggtctgcggagtttggcgagtagtgcgggtgtgtgcccgcctggatgagggtaaggcgatcagcctctgagtgggcaaggggacgtctgattactgcccaggcttcgcctgggggtccag

SEQ ID NO: 239246 - DNA, 498 bp, Homo sapiens
  chr17:46799464-46799962
  hyper
ctttctgcccagggcggctgccggtctctccaggaaccgcgagtaggtgctcccgccaggtggtatcggtgaaagcctgctgctcacccttcccttgtttcccaaaacttctgaaggctcccaaattcctgggagaccctctcccagggcctcctgatgcagctaccatactgagcgatccgtcgataacgcccttggcccaccgatcagtttaccttattagagagaaaagcactcttggaggtagtaagatgggccggtccttgatctgagaaatgggcgcacaacatcgctgttctctctgcaaaggtggggaccagaatccagcttgcctgaccttgcaagcaagcatcggcctaaaggtttcagcctcccagtggcgctctgtttgcacgccttaggctaggagaggaaggacgggagcacagcactgggtgcccctctccctgtagagtctggggcggggctcagtaagaaggcctgcggttggtggctccc

SEQ ID NO: 239247 - DNA, 1162 bp, Homo sapiens
  chr17:46800166-46801328
  hyper
aatgggggcgggggcggtggagaccaccagcctggaacttcaagttcaatggcaaagtccctgaccctccccccaggctgggcgccagcattattctaggggcgattaaactcttttgctgccccctgtgcacctcccagttcgggggcagtttaggggaggagagaaggtaatggtggaattctttccctcactctcccccgaccacttcgtcccctccccctcatcccctctacacagaactaactggtagggagagaggaagaaaggctggcatcggttcctcattggatgttttaaatctgtctcaggcccaggccagtgcctggggggaggggcggggtgtcctgcttttgggctagaggcccggggccgctcccgagctttctcccctcttccctggagagcgactgttcgggagggtgagaatggtataaatttcaaaaacaacgaaaccttcttttgccccctccgcagcagtcgcctccgggctttattgcaagtttacggtaacgagttcatctatttaattcgcggttgcagctcggggatttctattagacaggacgggttggggccggggggcacagggtctcccctgaaggaaacccaattagagtgcagcacttagcaccttcaatataactttaatgaagggggggaggggagctgcagggaagagaagtttgctctaggttggggaaggaaagctggagctgctcccgagaactggggggcctggatgaggctttttcctgcttcgagggctttccagcttccggcccgggaactactatttggagtagggatcgcctgcagggaaggcggggcggattctcggctggcggcggcctcgcagggttcccggaagcgctagccagccggagtaaaacccgaaagatggagcctcaggttcgcgctctgcgttgcgggtgctggaaccgagattcaaaaagagcttccggaggtagtttctacgcattgcgccactactcccttattcggcttctggaggcctaataaaatccacttgctttggagttagaaattatttcgggcctggagcccgcgtagacgcgaccctgtgatcccatttcgtagcttgctgagagattcgctgcgggagtttggctctgagggaggggaacggtctggagggcag

SEQ ID NO: 239248 - DNA, 247 bp, Homo sapiens
  chr17:46801832-46802079
  hyper
cattcgagatggctcgtaccgaacctccttgccttcttcctgggtctctcgggggctggaccaatacatctgccgatgccctggccgaatggcaggcgacatcgggtcctggacccccacacgcagctcagtacccacgaggccccaggccgctggaagcctgtagctccgcggacgatgaaagcctgcccgcaggttctcctggagtggtgagcctctgtcggaagggggcgcccacgtcttttta

SEQ ID NO: 239249 - DNA, 912 bp, Homo sapiens
  chr17:46802381-46803293
  hyper
actctcgccagttccgaagtcggcgagggagggggtttacttgcccgatcgttggtgggtttgagcttatagaggcagaggagtaagaacctgcgatattgaaagctacccacatggggcttccttgaaggaggacgtggaaggcagaaagtgacctgctctgagcggcgcatgtaaccgaggaccttaagctggaccacggggcttggacgattttttaaatcaggaaatcgacctcatcttcctcctcctcgtcctcttcccctgaacccccagtccgcatgcactcacactctttggccttttccctcagtcccgggctcctctttggtaaatagatttgtaggtgtctaagtcacgtcccaccctcactccttcccaggagaggagacagggctaggatcccacccgaccgcgggccataaacacttggctgcggcggccgccgcggggtttctaggagagctggctccgggagggaaatgtcctcgaggtagtggcggccgcggcccaccaccaactgctcgccaccgaccccactactcgccaccgacccgctgctcggagcttcggttctgcgggttgtccagacttcaggcctgtgcgctcaatcgtggagaatgcgccggcaggccccccacccccagcctaaggtgcaggaaggaccagcacgaacccgctggctttgctgcgcggccaggagatgagtcccaccgggcactgagcccaggtacaggacatcagagaatgaacacagaggcagaggccctcatgtccctctcagagtcccggctctgcaaagagcccgtctgtctccagcttccagaattccgcactgtgaatctgtctacgtggactgggaaaacagggttggcaccactctgccactccgtttgtgcctgggaagggcta

SEQ ID NO: 239250 - DNA, 333 bp, Homo sapiens
  chr17:46804102-46804435
  hyper
ccccaggacacccccactttcgctcctcccacccaggcaaggagatctcttaaggggtagcgctgttcttcaccttggcgagaaccttcttctctttgacccggcggttctgaaaccagatggtaatctggcgctccgagaggctggtggctgccgagatcttgcgcctcttgtccttggtgatgaacttgttagccgcatactcccgctccagctcccgcaactgccccttgctgtacggaatgcgtttcttgcggccgcgacgaaaggcgcaggcgtcaggagggtgctgcccgctggagtctgcgcggcgtgaaagggagggaggaaaag

SEQ ID NO: 239251 - DNA, 85 bp, Homo sapiens
  chr17:46805459-46805544
  hyper
caggcaacagggagtcatgtcgcggttctccaggagcacccagagtctgcaccacagacacgtccaggtaactggccataggctg

SEQ ID NO: 239252 - DNA, 253 bp, Homo sapiens
  chr17:46805724-46805977
  hyper
gggagctggggacgtcccctggggcaccccagggcatgggtggcattgctttggcggctccgccgagcctggcagatccaagggggcatagttgacagcaggcatcagcgtaggcgccgctgggtggctggtcagaggggagtgggcgaccagattccgcccccctcccgctcccagcaagccttcgatatccttggctccatccaaggtggcataattgccgggctccatggagccgagggtcggctcatga

SEQ ID NO: 239253 - DNA, 624 bp, Homo sapiens
  chr17:46806431-46807055
  hyper
tcatttacacgtccggggggaggggaggcgtggtgggcggaggaagaggggacgaggagccgggccccacctccttctcctcctctccctccctagctttctgtctcctgcgctttgacaggtttaacgagagaataaaaagctctctctataaagtgtccatctcctgggggggaaggggagtcgggggtggggctgggaggccgctcccggcctcagaggagaacccgggaatgcgcctgtgtaagaggaggctgggaaatgggggttaataggtatttctggcagcccctggctttgggtcctgggtactagcaccccagttcattcccggtacccttcctgtcccagatgtcctggaatgagctgctccgggccccagggaggtgccctggacgccccttacccagggactcgctactgcccagaatgctctggaggccctgattcgggtgaggctgagggaagaggcgggagacacgaacgtagacgtagaagacatgcgatctggatggaacccaggacactccacttccggacctgaaggggaaatggagcctctagagtggcctgtggaagggtctggatttccctttaagtaaagacatacggagggacggagac

SEQ ID NO: 239254 - DNA, 432 bp, Homo sapiens
  chr17:46810526-46810958
  hyper
agcccattcagctcggccccacagacagcctgtgacctttacagcccggcctttgagcgcggccgccgcgcccccgggggttccggcaacggggacttggcacctcggtgtcagctcccgcccccacccaggctagggacccgccaacgaggggtgggggcgggaggcgcccacccgtcgcactagtgggcatttgctaaactacgttttatttttttgtaaagtgagcgcccgctgccttcgttctcccaactggagcaaactctgtggcggcgacgatggcggccgtcaggtcggtggtgatgaatagagaggatttctctgcagcgcgacgctcccctctcccgaaaggttggctccacggtcccgccggccgcgcaggtctggctgaactgcttggggtcgcccggctcctctcgattttatgaaaat

SEQ ID NO: 239255 - DNA, 259 bp, Homo sapiens
  chr17:46811407-46811666
  hyper
tcctttgcagcgctctcgcccagtttttccattgttcttctctgaagtctggaaagggcctgcggggctatagctctcagcggccggagcctgcgcttggcaggggacggcctggaggacggcctagtgtggctggtgggttcgcggagccctgccctggagctctgcctgaggctagaacagcacccgctggagatgaagggtgactccggcctttcgccctgaaacgaagtcaagcggggcctctcctggccttaga

SEQ ID NO: 239256 - DNA, 145 bp, Homo sapiens
  chr17:46812471-46812616
  hyper
cagaagagtgacgacgggcagcaggagggaagggagctttaccggaaggagagggaagaaaactgtagaaggaacaagaaagagtccaggaagctgccacggatttttcatgcgtgtctagtgcaggcacggttattagtgcttt

SEQ ID NO: 239257 - DNA, 747 bp, Homo sapiens
  chr17:46815972-46816719
  hyper
cagcccatcctccccggccttgcactgcccgagatccgtgcaggtcaagcgggcaaggtgggacgctctcaggtgggagaattcataggaattaaggggaacccactaactcttcatcaagactagaggccagcctaaagaattttccccctttttgtcccagagacattctttccttccttctgcgtgtgtaaacacacctggtcgggcagatttttcagtaatcccaatactgagtcacctcaccggccggggtttactccccagctcctggatggtaaagcgccctgcggcccgcgggtcaggtctttaacggtccagccagcgcagcaagagagctggggagtcttcttgcagtcccttcctcctactcacgcaaagatctcctctatgctggtaggtgcacctgccctccaccgatcctcaccctgagcgcaggtcgtacctcaaggcgaaaacccgcttagtgcgttggcgggtggagagctgccgccttcttgatccgggactgagaagctgcactccctgacgccactgtggccagcacctcgggccgcgcagacccctacatctctaatcccatagccctccaggggtccttggggcagtccctttggaaagtcttcgaagtgcagggtactttaagtaccctgtagacgccttttatttaatccgcacaacaaaagaacggggcaggagtggggggaaattgttacttccgttttgtagataagagaactgagccgg

SEQ ID NO: 239258 - DNA, 1085 bp, Homo sapiens
  chr17:46824262-46825347
  hyper
gggagtaaatcagtcgctttataattccacgatgtttgcatcattttggcttctgagaggctgcgttttgaggagacaccagaagcctgggaagttcgcttactggttctcaagtcagagtcccccttcccggggctccttctggggactccgggggagagggatctctctgtccatcctgcaactcctctcctggcatagatgccccgcacccccaccttgggccatccttatctgcctgttccccatcacgattgatcctccagggtcgccaaggctcctgctgactacaaaaacatccccaagattcccttcttgacccggttcaggcatatctctttatacttccatgtctccgtttctctatatttttactgtggaggactcagaagagagctgaggctattgtccggggaggaaaggaattcgggcaaatttgtgggtaggggcccagacccaagacccgtgtttctcctgcgtgggttggagtctgtctcaggtcgctccagggacatcaagagcccgcgccgccgagagcccgcgccgccgtccagcgggaagcagcggacccacaggggcctccagccgcctccccgctcccgccccgtgtttctcctgggcctccagctccgtggagagagctgagagttctcggcccgcgggcttcctcaccaaatccccaaaaaccgacgcaggcacagagggctgactgtgttttgagtaatgcacgcgaggcagtccaatccggcgagatggcccgaagcggggcccagcggtcgggggtgtgggtctggagagagagggtctccccacttccttcctccggctgctcggtcacccatcgactacccgggcggaagcggggcgcagaggggcgcagagggaggcattgccctccaggagtatctattcccatcggggtatggtgaatgccatctaggcccatgctccattcccagggccccctcggttcctccaaaggcgtccacccagaagcagccccagtgtcgcgcattgactcccgccggccaagtcgccgccgaaacaggatctcctaaagcgggctccaccgggtcccagggcga

SEQ ID NO: 239259 - DNA, 204 bp, Homo sapiens
  chr17:46826843-46827047
  hyper
ctcttacggaattccgaccttattgaaaaaaatgaggagaggtttgttttgtttcttaatcatttcttcgccatctctgactctctttaaggttagaagacacggaaaagttccacattgggccgggatggcaaaggctggatcactgcagaacaaagacctcagtcctcgcatccccaccccgacccccggcagcctctttcg

SEQ ID NO: 239260 - DNA, 335 bp, Homo sapiens
  chr17:46827421-46827756
  hyper
ggaaagccaggggtcgaagggatcgattctaggggccgcagaggctactctcgtgctctggagaagcaccgcatctttctccggacccccgcgctcagccaatcgccccaaagtctccaggtgggggctccgcattaccagtcttggtcgcaaaagcagccctttcaatcgcaccgaatttcccctggtgtgaaaaggcgccatcgccagcattttgccggggtttatgcctcaatcccgcattccagccacttccacgaattacttggaagacagaatggtttgtgcccatttatcctacctggagcacagacaagaaacggccaaaaaatgaa

SEQ ID NO: 239261 - DNA, 1298 bp, Homo sapiens
  chr17:46829423-46830721
  hyper
taggaaagcacagacgcacctccaggcgaccctgcagactggggtcgggaaaaggacaggctgagaagtctagaaaggcaaagaagttaacgatgtttggcagtctgaggtcttatcagtgtgttggggtcaggtgggggccgaggcaacaagctcaggcagacgccagccggggctgggacggtgcaggtgaggaggggctgcctgggggacagcccgcctcactgacccaacctgggacaaggtagtggctgggttaggggctggggtgtgtcttggagcccccaggtgacaggagagggaggaagggagtgactggtgaaacattaaccccctcagggttctgaagggaaggggaacatccttagaggacacagggagaagacaaacgtcccttcatcctgagattcacttggaaatcccctgaacttccaactcctggctgatgaaacggagcaagttgtctctgccttatggcctccatcaccaagcctgaaggagagtctctcagcccggtttgggagtaaacccaaaaccgttcattcgtcagggaatgccccaggttggttcacgcgagttttaaaatgaatcggaggtgaaatggagctcattaccctctcttcagcccgaccctcaatctttggcagcgaggggcagttatgggacggggggcgggtgggaagagcgcccagggccccctccgggttctcccacggtttcccgcatctgggcctggccagcgcctttgggaggaagggcctaggcgcggtagggatgcctgggagtctagggagtggcgggggtgtttcttggcccggcagggtggggtttccaagcgtgatctcctcgccctggcagagccggggtgccgggtgggggcaggctcgggggcctgcctgcggtgaatcaggcttgtgacctcaggccgtccaggtaaacatcctctgcgctttggaaactgttgggactagaaaggagcgggcggcagggagagggaagggggaaggagggattctgagtggaggagacctctgaaatcctctctcctgccaggaaaccagggcggtcttccaagcgggcagccacgttgcctacttgaggccaaggcagaagcatcaatcacatggggcgtagtttctgtctggctaaagaacggctcacgcggacctcgggaatgcgactgtggaaacgacggggaagctggaagggctgggtggcgggggaagctggagggcacagcttccagattccagtttgttaagaatcacctgaaggacgtttctctgaagggaaagtgg

SEQ ID NO: 239262 - DNA, 1737 bp, Homo sapiens
  chr17:46831219-46832956
  hyper
gcgctgcagagccccgtgcttagtgaccaaaataatgtcccgcctgcctcatcttcctctcggatttttgccaaggccaaactgcgcgtgtcccagaaaaaaaccctcggacacttggcctctgccctgtctcagccgagtgactaggatgactgggaagtgaatcacaggaaaatcacccaagcccactcttctccacagccggtgagcagaaggaaggaagcaaagaaggaagggaggaagggaagaagggagagttcagttccctttcgtcgttcacacagtggtcctccacaccaggaaacctaagggctctgtggagggccaggtgccgtggcagcaacactcctcagggcctgtttcagcaccccatttacgtggcacatgaaaaattcaggatgaacgccctggctgaaagctcttcctgggtttgggacatcagaagaccttcccgggatgggctcttgtctctgcagtagctatgacctgcacataaacctgtttcctacactgtaaaattggcgtaaccaccattccctcccagtctttctctggagtcctaatgggaacagtgacggaatgaaagtgaccacgctggaacccgaagcgctgttcccctccgtggcttcacactgatctccacactagaattccgtgtctgcagttcaagttcaaactactgtggtcggggaagggctacagagatctcgcttggccgtggagtcaccggccccgtccagtcttgcttgggacacatactggtttacactctctcgggttcagtttcctcatctgtaaatggggctcgtatccccctcataaagtggtttgggggataataaagcttgtaaaagcgctttgccccagtgcttggcacataatacgcgctacgttaacaatgtcgcgtacacgcccgaaccggaggaaccccattccacgctccttctggaaccgaattcacctctgaggctttggggcttcagagccggagccgcttgggcaaaaccagcagaacagcgagagggaacgggctggtctagccctgccctgagcatttctactgagacccccggtcctgcttcttccagcctctgctggatttctctccgacccctctggagcgaagccctttggccctgcgttgcatgcggcacggtgcgggttcgggctctgcgctggagccgggatgccctccggcggagggtgcgcgtaggcggcgcctgggcgtgagccccgcctgcaaggctcagcgtcggggaagcacttttctcgtcgacccggggtctttttccgccaaggagctcggggctcaagaactcgggactgggctgtgggcggggcatggttttcctctctgggcgtcctaatctccaatttcaggcaaattcgctaggaagaaccttcccgagcgcgccttctccaacaggacctccaagccagcctcacgcacgcaggcctggctctctcctgcagaatccccacctgccctataactacccacttcagatatgggggaatggaggagatattccaatcacgccatctacctacagtttccacggccccttctgttgaatggtattttcctttagggtccctagaagcagagcaaatgaaaaggccagggggaaaaaaaaaaaaaaaagaaagaaccggtgaattggctctgagcccaataaacggttcctctttccttctccggtcctttcccttccaacagagcgattgagaaatcat

SEQ ID NO: 239263 - DNA, 43 bp, Homo sapiens
  chr17:46891977-46892020
  hyper
aatgagcactgggacgggtccactgggacgggtccattgcggg

SEQ ID NO: 239264 - DNA, 225 bp, Homo sapiens
  chr17:46894280-46894505
  hyper
caccaggaggctgcggtctggagccagcaccgggctttggggcgctcttacccgcaattcctactcccccgtctcgccccgctgggctgctagtccagcttgcaaccacacctgccggccccctcctcgaaggatgaaggagtaacgctcccattggctgccagacagccccaaccccaacccgcgctcgccctaactttgggtccgcccggccctcatatttgc

SEQ ID NO: 239265 - DNA, 321 bp, Homo sapiens; identical to SEQ ID NO: 204685
  chr17:46970399-46970720
  hyper

SEQ ID NO: 239266 - DNA, 222 bp, Homo sapiens
  chr17:46985398-46985620
  hyper
cgcagagcctttccgagagaaggggcccaaagcgagtcaacttctctactgagcttcccatgaggatgctggatccccaatcctaaccatgcagacgtctgagggtcgccgccattaacgggaatgatatggcccttcctcccccactccctcctctcttctcccctttcaacacttgaattgggctctccgctacttccgcacagcgcaggacccacacga

SEQ ID NO: 239267 - DNA, 458 bp, Homo sapiens
  chr17:47072749-47073207
  hyper
ggtggaggatatagagaaaccgagttggaagccctcccccgcccctaagtcccagccccatttcttttcagcgcgccgggaaaacggggagggggacaaaggtgctgcgtgctgtctttcaactcccgactttttgaatggcatacaatcgtccggccgcagagcggtgagccaaagtcggagtcagctcagactctgcaaacgaaaaataataacaataaaaaaaattcaaggcattcatatcggtgtagtcaacacgtgttgcggagtcggcccgggccgcaggcgactgagacaatggggtcggggactggggaaggggagtgacccccttcctcacctgccctcccagcacgcgtgcccccgctagaattatcctccctcccacagagtccggagtaacaccccagttttcgccctgttcaaggggattccagaatttctgggggtcgacccct

SEQ ID NO: 239268 - DNA, 482 bp, Homo sapiens
  chr17:47073627-47074109
  hyper
cgtgcgcggagcggaaattaccccctccccccgcgggtctgacctggggacgtgggcggggcttcccgcttagccccccgccctccgtccctctcccgccttcccgccaggatcggaatcctgcaccccaaacaaagttccgagacccgaacctagggcctagagagctgccagcagtgtcccgggtggtgcaggctctggaaactccacctgtctgtccccgactctgggagggaaaaggggaccattcaaatctccacccggtcactccctccctaagacctcccccttcagttcgctccggttagccctagctatcactcctcttccttgtctcccaccgttcctgtctcctggagtcatctccggccagttccgcgtgttcccctcaggaccccgaaacgttatcatttaacagccggaccccgggtgcgaaccaccctttctcccgtggggatctcaaaacattatttcctgcggct

SEQ ID NO: 239269 - DNA, 70 bp, Homo sapiens
  chr17:47074469-47074539
  hyper
cccccagtttgggctggggtagggggatgggtgggggcggggcgcttccctaggggccaggttcttgcaa

SEQ ID NO: 239270 - DNA, 314 bp, Homo sapiens
  chr17:47075727-47076041
  hyper
acccggaccgcctgcgatctgtccgcttcgcgtggggaatgcagccctccagcaggacttgcaaggaagggggtcttgcctcccgcccagggcctggggcttgagccattttgatttgaaagtggggcgtgagcggggtggcgcggcggcggcggcgccgggtcgccatgctgcttcccgagacgccgaggctgggccgagaggcgcgcgcggtggcagtgagggaccctccccgccaggccccgctccgctcccccaggtccaccccttcccaaaccagccccgacaggtgaccgctccgtggcccaaagccc

SEQ ID NO: 239271 - DNA, 753 bp, Homo sapiens
  chr17:47209860-47210613
  hyper
gaggaaggaacggtagggaccgtggtgatagactaggggtggacgcggggattgtgtttttctttaagcgggagagagaagcccgatcaccggcagcggaggagaaaagtccagggtagagatgggggcgctggtgtgggggcggtcaggagagaagggcgggggccgtcccaagcgtcctgcacctgccctactcgccgagaatttgcccgggtcggtgccagggcggggcagtcggcggcctggctgctaggctccgtgacatccggcagtctgagggcggcgggattcgggatgacttcgggcgggtgagtgtccccggggcagagcagagcgagaggtgaaacttcgggagcagggagcgccgcgggtcctttctggcgtctgcagagcgggcaggtgctggggacgcagacgccggagccagggagcgggcggttggagtcttaagtccaaccggttccccgcataggtggctgcagaggcgaggtgacggcgcgtgcggaacgaactctgcacccccaggaatggggagcgctggcttttccgtgggaaaattccacgtggaagtggcctctcgcggccgggaatgtgtctcggggacgcccgagtgtgggaatcggctcgggagtgcgggcttcggggctctctgcttggaactcagaggcgctgacccagcctggggcccgtttgctgcccacgggaggagccgccgtcaggggtatgtgagtgcccgggcgcggggactgcggg

SEQ ID NO: 239272 - DNA, 234 bp, Homo sapiens
  chr17:47308432-47308666
  hyper
ctttctcatccgccgcctccagggcttcggttcttgagatttgcagaagtgcacctccacctcctgcccattccgctgtcgcgtcctaaacccagtgggaggcacgggatgacccagccctcgggacccttttccccagattataggttactgaggattgcgggggttggcgggaggaatgactccctacccccacccccgcccgtaaagttggtggagcgggtggtgacagac

SEQ ID NO: 239273 - DNA, 398 bp, Homo sapiens
  chr17:47439788-47440186
  hyper
gccacattgtgagcgctccgccgcccagataaccgccggctccccgcgccgcccccgccttctcccactccgcccactgccgggagcccaggtaaagacgagagctgcgcatgcgcggcgctctccgtgagtcggggggcgtggttgccgaaaggaagccaaagtgaagagtgcagggggttgtagcaggcgctgctgtgggattccacaaaataggcgcgggttaggatggggaaggtaaagtgaagaaacgggccaaagcagaaaagtgggtcgacgtgagatttggaagtaaaaagagactttgaataaaaacttaacgactgctgacctccttgttctccttggagggcagtgggagtgacggggggcagaaatcagctcggcagcatgcaagc

SEQ ID NO: 239274 - DNA, 202 bp, Homo sapiens
  chr17:47492339-47492541
  hyper
caccctggttctgcggctcttagcagatgaactacaactcccaaaaggctatgcagcggcgggcccgcggagaaaagcgttttctctttggtgatcaacgcgaggatgttgccgcaaagccttttgggggctgtagttttctggggctaaatgcacgtgcctatcctgtacagaggctaagactgccgcaaggagagcctta

SEQ ID NO: 239275 - DNA, 150 bp, Homo sapiens; identical to SEQ ID NO: 204691
  chr17:47563693-47563843
  hyper

SEQ ID NO: 239276 - DNA, 885 bp, Homo sapiens
  chr17:47572596-47573481
  hyper
ggcggggcggaggcggggccgcagcactggcttcacccagcctctcccgcccgcagccagagcgagccgagccgcggccagctccggcgggcagggggggcgctggagcgcagcgcagcgcagccccatcagtccgcaaagcggaccgagctggaagtcgagcgctgccgcgggaggcgggcgatgggggcaggtgccaccggccgcgccatggacgggccgcgcctgctgctgttgctgcttctgggggtgagtgttagccggagggggcccgctccctttcccgggatcagaactccgagaagagccgggcgccgccaccaaggaaacagaacagagcattggggtcccagatactgagggtgggtggtgggaaaggacctctgatgccgggaccacgaaggagggtctagggttcccggagcgcagaggcgactctccagggtggagatgagggcaagaccggagcacggatgccggtcctcaggtaccgcagggggcggtgggggagctgggaggggtctttcaagagggggcatggggctctccgatgcccaggttcttcggaagaggacactcgaatgccgggatcccgaagggactttcccctcagcatctcggtctctggagagtcgtgggacagaaccaaggcgagagaaggagggggaactggacggggactagagatgagaggggcgagctgggctggggcggggagcccgggacgacgggatggaacaatggaggaggtcggagggactggaggcagaggggacccggcaaggacaatggggaccggccagacaatgggggggaggggcgtcggagggagaggttggggagcgggagagaggttgagaagtgggttagggagggcagaagagg

SEQ ID NO: 239277 - DNA, 169 bp, Homo sapiens
  chr17:47575161-47575330
  hyper
atgggcgtgcgtgagcggccgggctgagctgggtggatggtggatggggaggcagctccgcgggggacgggcccctaccgcactgttccagcccagtctggctcaagcgcctcgcttcttccctgggggaccgcgtggggaggcgggaataatcgcatgtgctgagttc

SEQ ID NO: 239278 - DNA, 215 bp, Homo sapiens
  chr17:47647459-47647674
  hyper
cgagtgagcagagcgcgcggcgggcgcggcggggcctcaccttctcccgggccaagcgcccacaggaggcgccccgagtgcccaccaggtggcgcgctgacgccactcgcctcccacgcgccacacccgcttggtctcttcatcgccccctgcggagctggcgtggaccgcagcgacttgggtccagccgacaggtggccgagggggcagccact

SEQ ID NO: 239279 - DNA, 43 bp, Homo sapiens
  chr17:47785463-47785506
  hyper
gaaccggcagcctcgagactgatccctcgccctggagattttt

SEQ ID NO: 239280 - DNA, 160 bp, Homo sapiens
  chr17:47841642-47841802
  hyper
tcgatgagcctagcgatccaagccaagaccccaccctcacaccgcccccttcggttttccaacatcccaggggctgctgattggcctgtacagaagagggctggttctccagcgccaccaatgagaagacgcagaataggggagcgtcacacccagtccc

SEQ ID NO: 239281 - DNA, 316 bp, Homo sapiens
  chr17:47865438-47865754
  hyper
ttttgcctcctccccgcgacatcaactaactcacttgctgttagctaagggcaaggacaatgtctcctctaccagacaggaaacttgatggcggacgctatccgttagttcctttttcaattccccattcccaccccttcgagaccacgatgtttcttaaaatacaaagtttcttttacaaaacatccctccgcaactttgagtttatataataaacggaaacgtcctttaaacaatcaggctacgaaggggttaaatctaatctcagcaacctgatggattctggggggtttccttcctcgactctagaaattaa

SEQ ID NO: 239282 - DNA, 92 bp, Homo sapiens
  chr17:47928612-47928704
  hyper
gccccggcggcgggtgggctgcggcgctgccgccagaggagggacccggccgatccggggtgggctggggcagggccgtgcgcaagtcgggg

SEQ ID NO: 239283 - DNA, 84 bp, Homo sapiens
  chr17:47967996-47968080
  hyper
cgccgggcccaagccgaccccctgttttggctctgccgcctgatttctaccgcaggcagatatcttccgagaccccgggcccct

SEQ ID NO: 239284 - DNA, 152 bp, Homo sapiens
  chr17:47968110-47968262
  hyper
ccaaatgcctgagagaggtggaagaactcttataactaggcttctgccccgtcactgcctactctagtcccgccagttttggggtagccgggggactcgctggcctcctgttcccgctgggagcggggccagggtctcgaggtaggggggag

SEQ ID NO: 239285 - DNA, 248 bp, Homo sapiens; identical to SEQ ID NO: 204696
  chr17:47979497-47979745
  hyper

SEQ ID NO: 239286 - DNA, 541 bp, Homo sapiens
  chr17:47987574-47988115
  hyper
ctttcctggaggagcggctcccggtggcggcgggctgcctggaggaggaggcagggccaggctgggcgctgaggaggccgccccggtggcgctcccacgacccgggcaaggcagtctgggcgccgtctccggtctcggggcctgcggtcggggcaccgcggtgccgcgtttgagccggtcagctccctgcggaaattacaggggcgctcggcgctgcggtcgcgccccccggggcagcgcccgctggttggaggcgtttaaattgaaagcagctttggggagagggggcggacgcgggccgccgagcaaggggagggggcggcccggcacagcgaccccattgtctgtgcccgccgaggggtggaaccttgcggtgagctcggcgcggcgccccctccccgagctccggcccagcggcgctctcagctggttcccacgctgcgcagcgctggccacgacccctcgtcccttctccacctgggtctgcctcttggctcgctgactgcaagcctggcagcgcgcacgcgcacacttcctccag

SEQ ID NO: 239287 - DNA, 69 bp, Homo sapiens
  chr17:48041600-48041669
  hyper
ggggtatttcctgctccctcatccagcgaagttcagcgtcgcgtgtctccccagcggcgcagcctgcct

SEQ ID NO: 239288 - DNA, 1191 bp, Homo sapiens
  chr17:48041887-48043078
  hyper
ctccgggagagcgtcgccgatggtggagcgggagacgggcgtggggagccccactgcagtgctgggatcgaagtggtgctgaccccaagacctctcccctcctcctcccccgggagcttctccagggttatttgggaaatgagggggaactccaatccctgagaaagcgctcaggggcttgctgaggtgagcgcaaatggaagcacaaggccgggctggccgtgggctcagtaaccagtcggctgcccggcttgcgccagcactaaatgctcgatcagaaagagaaaaagaggcgcaataattccaaatttcaggaaaagtcaaatcggagaggggggacgcaggtctcttcagactgcccattctccgggcctcgctgaatgcgggggctctatccacagcgcgcggggccgagctcaggcaggctggggcgaagatctgattctttccttcccgccgccaaaccgaattaatcagtttcttcaacctgagttactaagaaagaaaggtccttccaaataaaactgaaaatcactgcgaatgacaatactatactacaagttcgttttggggccggtgggtgggatggaggagaaagggcacggataatcccggagggccgcggagtgaggaggactatggtcgcggtggaatctctgttccgctggcacatccgcgcaggtgcggctctgagtgctggctcggggttacagacctcggcatccggctgcaggggcagacagagacctcctctgctagggcgtgcggtaggcatcgtatggagcccagagactgccgagagcactgcgcactcaccaagtgttaggggtgcccgtgatagaccgccagggaaggggctggttcggagggaattcccgctaccgggaaggtcggaactcggggtgatcaaacaaggaatgcatctcacctccgtgggtgcttgtgctgcgcaaggaattattaccggagcggttgcgatggcctttgcccggcgacccaagaagagtaagcaaactaccgtccacccagcggatcaggtccaatccctgcgcctcggcccaatccctagagccccgcggcgccgtatcccctcccccccaactctggaccccgccgtctgtccccgcggcatcaccagggtgctggagttttccgagcaggccccttgcgctaagcgagaggatctgtgag

SEQ ID NO: 239289 - DNA, 726 bp, Homo sapiens
  chr17:48046649-48047375
  hyper
tttcccaggcgcgcgttctccgctgaaagaggctcagagagacactttctccgggatcttaagtgtgggggctgctggctggggggcccgtccggcccaacgccggaggcttggaaaagagagttggcagcgggagcggactacgtgccgggccatggcccttctgcccgggccctggccacaatgacctctttgccctgccccctccccggccgggacgcctccaaagctgtcttcccagacctcgcccctgtcccgtcggtagcggctgcctacccgcttggcttgtcccctacaaccgcagcctcccccaatttgtcctactccaggccgtatggccacctcctgtcttacccctacaccgagccagcgaaccccggagactcctacctgtcctgccagcaacccgcggcgctctctcagcccctctgcggacctgcagagcaccctcaggaactcgaggcaggtaagttcggccgtggaggctcttcccacctctggggttcggctcctgtgcgcccctaaacttctccctcgcctggttggacgcagctagcgggattcaaaccttccttggattccctgggatgtgggggtggggggagggcgaagggatggggcgggagacacggggggaggggcgggggagagttgatctaggtctcctttcaaaaccgacctggtttcgatttgcagttgtgtaaagacaggcgagagggccccccc

SEQ ID NO: 239290 - DNA, 111 bp, Homo sapiens
  chr17:48048844-48048955
  hyper
gggctccatgatcgcgacccgggcagatctcgtaacttgctggaactggggtagggaaaggcagctgtccgggaaggaacttggagggggtctgctgggagagttggggcg

SEQ ID NO: 239291 - DNA, 43 bp, Homo sapiens
  chr17:48049135-48049178
  hyper
cggtttttctgggaattggttgaggcagggtcgaggagggagg

SEQ ID NO: 239292 - DNA, 97 bp, Homo sapiens
  chr17:48049478-48049575
  hyper
ggttagggtggctggcttggaagaacagaaacccctcggcccaaccctcccctgtccctcagcattctagggctgggctgtcccgcggccgagattc

SEQ ID NO: 239293 - DNA, 847 bp, Homo sapiens
  chr17:48049755-48050602
  hyper
cttctgggggtccctggaaacccaggcggccacggtgtggcgggggagacatggtcacttttcctgcagggtgcgcctgagcagaggggcagcccgttacagtaggcgaggccagggcaaacccggggtcactatcagcgctgcgagactggtattcaaggtcctctcagccgggcctctcacccaccccgctggccgcagccggaggctgccacgcggacaccgtctcaagcctctgagcattgctctgagcctctgcctgcaatgtccttcctctgtcatctctaggcctcggctcagccctggacctagcctttctgccccgccctaccccaagctggcgccaccgcccgtggctgaactccgacctcccaccgcaggcgccgcggtaccctggctgtggccctcggcgctttcttcctagggtcacaggacccatacgagtgggagctccctgggagcagaactgcgtcttgtatcacctggcgcggtgaacgtgggggttgaaacgctccacgcggaaggtagagggcaggggccaagggggcgatcctggtggctgcgctttttgctatttgctgccgacggcatgcagacgagatgcaaataagcttatgaaactgtccgtcctaccccctcgctccctcctcgccccctacaccgtgttgtgctgcccaccagactcggagaagccgcggctgtccccggaaccctccgagcggcgccctcaggcccccgccaaaaagctccgcaagccgaggaccatctactccagcctgcagctgcagcacctaaaccagcgtttccagcacacgcagtacctggcgctgcccgagagggcccagct

SEQ ID NO: 239294 - DNA, 96 bp, Homo sapiens
  chr17:48071282-48071378
  hyper
ccggctgctagccgcccccttcccagtcccatctcgccgtcggttgtttctctcgctccttcccgtccgccccccgccctttaaaaaagtttcatt

SEQ ID NO: 239295 - DNA, 250 bp, Homo sapiens
  chr17:48071610-48071860
  hyper
tcattgccccctcacgactcctagtctccccatcccttatccaaaggagggcccctagagtttccagcccctgccgcctacccccaagccctctgcgacttgatcgaggatcgcctgctgaaatgcccacgaaatcacctcgattcggaggtttcctaacaacccacagccttccccttcctctctcagctcatcccgatcctcatccgggaccgcggcgcactgcgcacatcgcgccccaaatgcttgc

SEQ ID NO: 239296 - DNA, 263 bp, Homo sapiens
  chr17:48072070-48072333
  hyper
acgccccgtattgccggtaggaggctccgtaggtatattccgacttgggcgagtaagcgcccgtgcctgcaagcccattgagattgaattggtggtggtaggtgtaggggttcaccgtctggccatagggctggcccgagtagtaatcgtgctggggagcgctgtagtagcccaggtcagtgacagaagactcgggcagggtaggcgagtccttggagcccgcatggcagctaagggagctggagatgtcggtgaggatgctg

SEQ ID NO: 239297 - DNA, 85 bp, Homo sapiens
  chr17:48133040-48133125
  hyper
cggttcccagatgcgccaatgccaggtctctccagcccggctggccttttcagcagcagcagcagcagccgcaggaaagcggcca

SEQ ID NO: 239298 - DNA, 243 bp, Homo sapiens
  chr17:48133662-48133905
  hyper
cgaaaccgatcagcgctacggagcgcagcggccggcgggttccagtgtcctccggcggcgcggggagcaggtgaacaggtcctcacgcccagctccgcgccctcacgcgctctcgccgggaccccgcttccgctggcagccatgggccccggccccagccgcgcgccccgcgccccacgcctgatgctctgtgcgctcgccttgatggtggcggccggcggctgcgtcgtctccgccttcaac

SEQ ID NO: 239299 - DNA, 243 bp, Homo sapiens
  chr17:48172654-48172897
  hyper
cgccatgacgagccgattggctgggcgttggaatgcccgccagggcaagggtagggaggaggcggccgaaccgcgtcgctgggccgaaaggtgcgcgagcgctgcccgcgcggggaccacaaccaaagtcgcggccgccgcagccatgcgctgggtgtgggcgctgctgaagaatgcgtccctggcaggggcgcccaagtacatagagcacttcagcaagttctccccgtccccgctgtccat

SEQ ID NO: 239300 - DNA, 359 bp, Homo sapiens
  chr17:48206080-48206439
  hyper
agcgggagcgggagcggaaggaagtgaggagtaggaagaagcagagacagacacacaaactggcggagagtccacagggctgctgagaagaaagagatcacaccgagagtggggccacgggaactggcactgggaacaagggcttccgccgctctaagtgacgcccgagggtgggagagaagggagaagcccttcgggcaggcgataggaaagggcccctgaagaggagaaagcgacagagagaagtgcaactgggagaggccgggaagaggtggatgggaaaggagactagcggtcggggaggcagttgtggagccagagaggtggtccccccttcccatatcgccggccgtccactg

SEQ ID NO: 239301 - DNA, 218 bp, Homo sapiens
  chr17:48207630-48207848
  hyper
cattcaacaaacgtccgccgagcagccggggcgccgaggctggaggggacagcggtgaacagaacccccgccccctaactgcgctcaaggccagtgggccagtcgggggctcagacgagtggggaggccctcacgagcctgggcgccatgggcccagctaacagagggcacttcttgccggaagggagagcgcacccctggcccggcctgggtccagg

SEQ ID NO: 239302 - DNA, 131 bp, Homo sapiens
  chr17:48226428-48226559
  hyper
gctggctggctggcgagcgggggcggccgcgtgcacgtggcaggggcggcgcgggggcagggcgggggggctcacttacttggatgggcgccgtgctgaaatggatcttccggctcggggctgggtcctcc

SEQ ID NO: 239303 - DNA, 177 bp, Homo sapiens; identical to SEQ ID NO: 204703
  chr17:48278764-48278941
  hyper

SEQ ID NO: 239304 - DNA, 59 bp, Homo sapiens
  chr17:48350454-48350513
  hyper
caagacagattggcgacacagcaggaggcgcccaaggacatgacgttgagcctctcagg

SEQ ID NO: 239305 - DNA, 272 bp, Homo sapiens
  chr17:48503149-48503421
  hyper
caaggacgcttcgcgcctgctcctttggcccccggctcgcaagtagcggggccagcacgtgacccgagggggcaggggatggatggatcttgaccttgccatctggcccctcacggatgtgctgctggctctccctctaggaaatcaacaaatttttgcgcttctaacatccaggcccctgaggatggtcgcgaggaagatctgtttcggactgcagctggggccttcggatccagaggaaaccagggctattcttcgagggtgggaggggg

SEQ ID NO: 239306 - DNA, 39 bp, Homo sapiens; identical to SEQ ID NO: 204705
  chr17:48585621-48585660
  hyper

SEQ ID NO: 239307 - DNA, 61 bp, Homo sapiens
  chr17:48619126-48619187
  hyper
ctcttcttcccaacttccacgacctcccggtgtagggctctgaaccccgggtcactcaaag

SEQ ID NO: 239308 - DNA, 227 bp, Homo sapiens
  chr17:48619727-48619954
  hyper
cagctctcaccaagtggactttttgcggggtgtggcggccgggtctcgaccacagcgtggatcaccggctgtttaggaaactgcagctgcacaacgtggggtgcaaaactgccccgcttcctttacagctcttctcaaccctcacctccatcccccgtcacccaggcaccttcgcttccagatgctgccaggctgtcactcaattcggtcatttcattcatttatca

SEQ ID NO: 239309 - DNA, 242 bp, Homo sapiens
  chr17:48624467-48624709
  hyper
gcgaagacccgcccgcggctccgtaggtgcccggcccgcccctcgcagcctcctgacttcccttcctgtcctcagcggccgggcccacggccccgagcagccatgctgggcgcgcgggcctggttgggccgcgtccttctgctgccccgcgccggtgcaggcctcgccgcgagccgcaggtacgggcgggcgagcgggcccctagggcactccctgcgcctgcctgcgggcccagtggaggg

SEQ ID NO: 239310 - DNA, 1428 bp, Homo sapiens
  chr17:48636445-48637873
  hyper
cccatcggccggggcgggaactgagacgaccccaaccctctgcggtggcgggaggtgcgcgggggctgcgtgggtggtgcagccttaggagagtgaacaacgcccaggggtgatggcctcagcaaagtgaggggtggtgatggaggtcatccgacccatcccgccgcctctccgcagtggcgcaagcgccccaaaatctccggagagggaactgactgacccactaggttccgccgtgtctacctctcgcagatgttggggaagtgcttcccggcgtctaatcctcgctgttcccccctccaccggcgcccagcacacccgcggcgctccgctcccgggtacccacagctttctggagtggcgccggcggcaggagagagctagagccgactgagccccagaactcggggaggtaggcggggcaagggccggggtctgcgcgtgcgtgtgcacgcgtggaaagcacaaacccacgagggcccgctgccggtagggttaaggtgagtgagtgaaggcggcagacccgcgaagttccagttccgcggacactctttccctaagccacatagggacttaagagaaactgaggcacgaagttggggggtggcggtggtggggactttgaaggtcgagtcgataaagcccagctctgtgcttccgccccctcccacacactcgagacccccacaggttccttcttaggggtcctcgctctgctccgcagcccctcctggggatccgggctctgcggtccagcgcgacctgcctggggccacgtgttcaagcacgaagcccctgcgtggagtccacgcccttcaaaaggtccctaggggcaaagggatgaagcccaggagcgtcaatgtgaggtcaggtccagcgggttagggttacgaggtcagggtcgaagtctcagaattgactcgggagtatgaccaataagcccaagagatttgtggaggccacgcccagaccatgcctaccctagcctttctcgagctccgcccgtttctccaagactgggcccctccagcctgaagccccacccccaggacatccagctccgctccttccctcccccagtcccgcagccaagctcaactccagggtgggagattaaccaggtggagacctgggatttcgctctgggaccccctggtgacaaccctcacccccgtgccgcctgtctcctttcttccccaggcccgcccagagctgagctccgtcctccggctgctgcccaaatcaggggtcgtggacaaaggatgcctggggcctgcggccctacgccaggaccccgcgccgaatactctgattcttcgggctccctccaagggagtcccaaagaccccaatggccaataggaaagtgggttcggtctgggcagcagtctgattggctccagccttcgggagcggacccaggggcaag

SEQ ID NO: 239311 - DNA, 138 bp, Homo sapiens
  chr17:48638580-48638718
  hyper
ggcgcaggggaagcgggactcgcgccgggcggggtttccctgcgccccggcgccccgcgggcagcatgcccctgcgggcagggggagctgggctgaactggccctcccgggggctcagcttgcgccctagagcccacc

SEQ ID NO: 239312 - DNA, 648 bp, Homo sapiens
  chr17:48639235-48639883
  hyper
acgcgagcaggtctcgtcggtaacccgggcttaccccacctgcgtacacacacctcagtcttcctgggttgggggggtggggatccaggccaggagaagagagctgtgccccgctggctcgcagctggacgccctccagatgtggtcaggggagggtcgtcatcctccagatgtgggaagcttcgggagcctgggagctgtactctgcccgcgccggttagcgagctgggtttggtttccgagtttggtggggggtgggtgggggcggtggggaggaagctgcggggacggaggaggggggaccgcaatctcctgggtttccctccttcccccgccccaaagtttgcggcggattctagggtctgatcccccaacctggtccttgaggctgaggtttttactgacctagaaggagatgttggggggcggggaccaggtcctggcccacctcaccccccacctcgcgggttggaggcacaacaaggagattccggcggcggctgatgtcaggggcgcagaatgagaacaagatgtggtggaggggagctgtctgcccccggagctgggagtggagcccctttccgctagagcccagtgccgcgggtgcctcctacccgatctccattcgatgcagggtgcttaagattg

SEQ ID NO: 239313 - DNA, 730 bp, Homo sapiens
  chr17:48711976-48712706
  hyper
ttggaaatagactcgactcctggactgttagcctcggtatttagagagacatccccctggcttggcccaggggccgctcgcaggggctgtcgccgtgccaagggcccccccacctctgccccaaagtccctcccagggaggcgctgtcgcaacccgcgggacgggggcagggagaccggacccagaggcactggggtagggctcggcagggcgggtccgggcggagcgcggggtgcggagggcggaggcggctccggcgcccgctctgcccgccgctgggtccgaccgcgctcgccttccttgcagccgcgcctcggccccatggacgccctgtgcggttccggggagctcggctccaagttctgggtaaggcgcggggctccggggtcactgcgcgggggccagggtcggccggcttcgcccggtccccgccgcctgccttcccgcggggccggcaggtatcccgggacggagcccctgagacggcctgggcgcccgggagggggcgatgggctcgggagggaggttggctgcgccgcccggagccgggtcccacgcggtgtcggggacctgccctgctctgcccttcccggctgcagcactggggagcccgggaaagtgaggaagagtgcgcggctggggcgcaaaggcacagtgcgtggctgggtgagtcggctccatcccagcccctccgtcgggtgcggaaggggcgtttcgcaatcagccgcgg

SEQ ID NO: 239314 - DNA, 104 bp, Homo sapiens
  chr17:48785241-48785345
  hyper
gcctcccgaaggccggctccgggggaccctgttcagtgtgacaacgctgacccagatattttccgttccgacccggggctccggcgcccgggctggctgtttat

SEQ ID NO: 239315 - DNA, 45 bp, Homo sapiens
  chr17:48796758-48796803
  hyper
agctcgggaaaaccgggcgcttggggaggcgcgcgggcagaggct

SEQ ID NO: 239316 - DNA, 37 bp, Homo sapiens; identical to SEQ ID NO: 204709
  chr17:48997201-48997238
  hyper

SEQ ID NO: 239317 - DNA, 650 bp, Homo sapiens
  chr17:49021780-49022430
  hyper
aggtggggaggtggggctgtcggtgctccagggtccccgcagagggcagggaagccctggacctggtctgaccttgcgcgctagccccagaggtcgccgtgctctgctgtcggcgttcaggtgcccgcggtcgggccggggagggcagtaatcaagccggcccggcggctggcgaggggcgcgggtccagcgcgctgccctcggccgccgccctgagcggttatttataaccgcgggtcgcgttacctcctgaccttaagctggggcgggcgatccgcagcgattagcatctatctcctccccgccgcccgctgcgaacaaacacccctctgtgcgccctcccccgcccgccccgcgggaggccctgcaggaagcaggatgttgacccggagcctccctgcgctcctgcggcggccccgccacatgtgagtggcgggcggtggagtgcgggtgggggggaagcggggagcaggagctactcgtgtttgatggcttcccgagttgccaatgtcctggtctattctgagtgaccgccttatttacaatatagggctccccagcccgtgtctgcccaaaggggtgccctctcccaagccagtgggggccagccagccctggttggggcagcacctgcacaggtggtcccagaa

SEQ ID NO: 239318 - DNA, 187 bp, Homo sapiens
  chr17:49197806-49197993
  hyper
gctcctggtcctgcgcgaacaccgagtccaggttctccagcacagccaccaccagcggcatcagctctttgaccacctcctcgtcatagcgcccgataagccgctcgaactcgcggtagatggagccggccaggccggacacccgctccgacatcacggccccggagccgccgggctcctcctgata

SEQ ID NO: 239319 - DNA, 130 bp, Homo sapiens
  chr17:49199266-49199396
  hyper
gtgaggtttctgccgcctgggagagtgtcacgtgtggggaatgacacaacgcccacgcctagagcgggctgagtcaaggatcccggtgtgctcatctaacgtccgcaaatgggacggaagacactctcaa

SEQ ID NO: 239320 - DNA, 204 bp, Homo sapiens
  chr17:49337243-49337447
  hyper
tgctccccgagcccgcggcgccccctccccgggctgggggcaggtgcctctccccgggactgcggcgactacagggggcccccggctgggcccagaccggtggcgggtgcagcagcccccggatttcccccctttaactcgggtggccccaggatatcaacaacattagcatagccctccctccccagcgcgcctgcgccgtga

SEQ ID NO: 239321 - DNA, 139 bp, Homo sapiens
  chr17:50235350-50235489
  hyper
acggatgtgcgccccagatgtgctgacacatgtccgatgcctcgctgccttggaggtctccccgctcgcgtgtctcttctcttcgcaccagcggcggaaaccgcactagcagcggcggcggcggcggcggcggcagcag

SEQ ID NO: 239322 - DNA, 67 bp, Homo sapiens
  chr17:50235669-50235736
  hyper
cgcccccctcaccggggcatggtcggagggtggctgctgcgctccggggcagttcttctcctgcttc

SEQ ID NO: 239323 - DNA, 447 bp, Homo sapiens
  chr17:50235916-50236363
  hyper
tgggccccggggactggggcgcggtgggggcacacagactctccaggtcgcgcgcgcccttcctgctcctctgctattttcctgaactccccagaacccccagttgcctggcttccatcgcccgcaactagcgccgctgtcgagattttccgcaatacaactgcaggggtcgttatttcctcgcctacggatccctacgcttcccaactcagagaggaggaggacaggtgggggcgggagggggaggaggagaaggaggcttggccaggtgagcgtcctcgccgccgccgggcgtcccagcgtcagctccgcagcccggcacccgggggcggaggcaggaggcccgggcggggaggtgaggctgagcgcggccatgaggaggaggaggaggaggctgggtgtcacagcttcaggccaccttggccgccgcctcggccccagtccctg

SEQ ID NO: 239324 - DNA, 1036 bp, Homo sapiens
  chr17:52977561-52978597
  hyper
gcacacctcccctcccggatctctaggacaaaggcaggtcgagggtaaatatttctagttattcagtatattcagtggctaactatttattttgtgggtaccagacaccgacataatcggttacgtccttcccttaattctcataattctgaggtttgtgttattaaccccctattatctttggtctacccagggcagccaaagaggcgcagagaagaatgacaaggtgcccagcaagcggcaggatcaaagcctgggtctctaattcccaggctggagattctgggctgcctgctcctcctgcacggggcgaaaagcccacctgggatccgagcgggcggccgcgccactctcgcaggctccatacacccgccactacccgcctgtaccacctgcagccggcagcgcagcctcctcgcgggtcccgcagggcgcgctgcaggtgcgctgggcgtcccgaagccccgccctcgcgtccctgccccgcgcccagctcctcacgctcggtgcccgcgccccgcagcggcagcgcagaacgcaccgcctctgccagagcccgggaagcgctcgggcgaagaggaggagccaagggtaccgagcgggtggagtcgggagccggagagcggtggaggcggatttcctgggcccggccctctggcgctaccatggcgtttggcaagagtcaccgggatccctacgcgacctccgtgggccacctcataggtaaggaggcgcggggagagacgcccaggcaggcaggggaccgtgggatcctttcctgcttgatccattctcggcctgcagaggacggagttagtccaacttgaaaaaattattcccctccccccgcaactttcccaaggcacccgcattccacccggccccctttcgtcgtttccttcttggccaactcactgtagaacctcagtcctcaaaaatgtaccttcctttcgatgccgcctggggagtggaaccaaacaggtgaaccgcgggagtcaggcatggagtgtttgggcctccacgaggagacaccaga

SEQ ID NO: 239325 - DNA, 140 bp, Homo sapiens
  chr17:53316183-53316323
  hyper
ccgatcgtttgcacgtttgcattctcaatttctgcactatatagggcaactcagacatgaaaacaatctttgtaagaagaagtggaatgctaatggttcctggagttttgcaggaatattccaccggccccatttctaat

SEQ ID NO: 239326 - DNA, 555 bp, Homo sapiens
  chr17:53341253-53341808
  hyper
catttgtgcccattcgttcttgcagccccttccccagatcgaagactagggtcttagtaaggagaggtaaggagggaggggaagaacctgcctggccccccgcggagctctgcagggggcgtcgcggctgcacgccagcgcccgcaccaccccaggcgggaagggagttatcacacagggggtcgcacgcagatctcggggaccgtgggtgccacgaggtcaaactggcagagggagacgctgcagctgctgtaacagcaaggaaagccgaagcccccttaggggatactttacaaaattattttaatcaccgtgcaaacctaataacttgacccaagcgcaatcacctgtattcacccagagtaaatattcctaaaatcccgttcagtgtgtctgtgtctctcccgcctctttccgtttcaggcaaatgtctaccccccctctccccccaccgttaacacctctctgcagcgtgggaaacagtgcccagcagctcagtcctccgcttcccgctctgctttttgcatcccattcggacttataggaagtagttat

SEQ ID NO: 239327 - DNA, 820 bp, Homo sapiens
  chr17:53342946-53343766
  hyper
tcaccacgaagacggtgagcgctgccgcggccccgctccgggaagggacgacgctccgggggtccccctccgcggccgggcacgcccgctggagcatcccccaaccccgctcccgccctgtcccgcggcgccccggccccgcgctgatgaaattgaggagctcacccagcacccttcctccccttcctcctcctccatgaaaggggagggacccctcctgagctacatttaaaagagcttcgggcacccggcctccctgggtcccgctcctgcggcgcgggtgggaggtgtaacttgacaggtcaggatcgttccctagaacgaggcacacccgcacgcagagcgagcccgcctgcggagggcagagcctcccgggctggggaggagaaaccctggggcctggttctgtgcggggcagggggcgggggtcggcttgagggagggggtttcactgcgtagcctgggttttggggttgtgttacagcttctgttactggttagtatttggaactcacgaggtgtgagagaagactcgttttcttctggtgaagggtagctgagaaagcggggtgggggctggggccggtggggggagtggtctctcggcgggaagccgtgcacgcctccagcgttgacactttcccggtgcactttttctggtgggaggggagagcggagcaggctcacgtgtaaccgcgcaggagcctcctctggcttgagccctttcttggtaagtcccaaaccttcccaagacaaccttggccttagcagtagaggaggggtacgtgtgatgaggccccaaacccggctaagtgatgcc

SEQ ID NO: 239328 - DNA, 39 bp, Homo sapiens
  chr17:54670214-54670253
  hyper
aagaattacatcacgctgcgcaacgctgcggctctcgga

SEQ ID NO: 239329 - DNA, 106 bp, Homo sapiens
  chr17:54671815-54671921
  hyper
ttcatggccacctcgccccccgaggaccggcccggcgggggcgggggtgcagctgggggcgcggaggacctggcggagctggaccagctgctgcggcagcggccgt

SEQ ID NO: 239330 - DNA, 791 bp, Homo sapiens
  chr17:54673562-54674353
  hyper
aggctcacagcctccgggatcttgcaggtccgagccccgaaatcccaggccctcggccggaggtgctggggatatcagggagatttgacactggcctcccctctccccggggacctaaggaagactaagggccatggtttcggaggggtccgaatctgggtgaaaatcaccacctctggcatctgcttttgggaagagagtatgcctgtgctcgggcactttctccccttgaggggtggggaggagggagaaatcggaaccggaatctttgcgctttaagattagataggggcagaaggcacgtaacccattaaagggacgtgcaaaacatcactcccaccccaccccttaaaaagccaactccttgggaccgacgcctgactctcgcatgcgtccctccgcctcagtccccagtggcgcccgtcctcacagctccacgtgggccagcctcctgacactgctcagcgctctctttatttatcttggactccaaagtcgctctcctttgctccctccccacctccctgccacctctccgcgcctccctcccggcgttccttccaccccaccccccaccccccccaaccccccaagtccggagtcccggcgaatctatgctaattatttcaaacctgcgcctggtccccagcgcagtctcaatgcccccggccccgcccgccctgtccctccagcccggcgctttcttccctcccgacgcagcctcgatggctcctcatttcaatagcctggccccggagccgagccccctccccggcgctgcctccgtcagc

SEQ ID NO: 239331 - DNA, 259 bp, Homo sapiens
  chr17:54674987-54675246
  hyper
aggtcttcccctccgcgacgccccctcctccctccgcgggcccgcccgcccgcgcccctcctccccacccctgcccacttggaaaacccgcccgcagccggcgagcttctcggctttcagagcaggagccggtgtgagctgggaggacgcgggttgcagacgtgaccggcgacagacagaccaccggatgcacagaaccagagagcaggcccgaagccgctgcggccgcgggagaggacccagcgggacccaggcagtc

SEQ ID NO: 239332 - DNA, 419 bp, Homo sapiens
  chr17:54755974-54756393
  hyper
gctgctggtgcgagcgccggcgcggcgcactaaatcatcgctggcgtccacatttcaaagcggagccggaggagtgccggtgatttctgggtgccacaccgatcactcccaagctctgatctatggattgttttgatttcctcctttgaactcttcctatcccgctccagcggcagacagagatactgaattaagcgacagacaagttggagacaatgagcgccgggggccccctccctcccccggctcccctcccccctcctccccgaaatttgcagacatctgctagctggagcccagcgttggagtcataaagaagagctggcaggagagtgatgtacagccctgggccctcccgagtgactggcgttaacctccaacggagagacgctcaccccgtttacgacggagccctttgt

SEQ ID NO: 239333 - DNA, 169 bp, Homo sapiens
  chr17:54857395-54857564
  hyper
ccctcctcctcgccgaggcagaaaatagaaaaggaagaattcagcagattttccccggtggccccctcggcggcaccaagataaccagcgcagaaaccacaattggatccttattcctccagcccaggaatgcgaaggacgggacggtttaaccgccttctgcattttc

SEQ ID NO: 239334 - DNA, 84 bp, Homo sapiens
  chr17:54857791-54857875
  hyper
ccctcgctccgggcggccagagtcgcagtcaagtcgctctttgcacagagcagctctgtgtggactggcgggggtgtggccggt

SEQ ID NO: 239335 - DNA, 95 bp, Homo sapiens
  chr17:54912306-54912401
  hyper
cgcagggacatcttccgcaagagcaagcacgggtggcgcgacacggacctgttcagccagcccacctactgctgcgtgtgcgcgcagcacattct

SEQ ID NO: 239336 - DNA, 359 bp, Homo sapiens
  chr17:55038098-55038457
  hyper
ccgcccacccggccgtcccgctccctgcgccgcgcacctgaggcagtcgttgtctctcacaaggcgcgcgctctcggcggggggcaagagccccccctccaggtagaggcctaggaaggccccagaactgaagccgaagcgctggcggatgagactaatgagatctgtgacgactcggcatctgttcaagtcgaccagaagccagaaggccgtacagtgcggggtagctggcggcgggtaatcaaattgaagccgtagcctaaccgtctcggaagctgccatcttgcttggtgctcaacggaagccgagagataccacggggccaccgagaggcgtgctcgggcggctcgcccccgccg

SEQ ID NO: 239337 - DNA, 130 bp, Homo sapiens
  chr17:55055244-55055374
  hyper
aatgtctcctttccgaaatactctccctaaaatgacagagaacctggccaggcggacagaacggcccctgcgcatttgcaggggtcctggtgggcttgccgggcagagggcgtgcgggtctcagcaagct

SEQ ID NO: 239338 - DNA, 50 bp, Homo sapiens
  chr17:55162841-55162891
  hyper
caggtgcagggtgcgacgcgccctccaggtaccccgggggcgggacgctc

SEQ ID NO: 239339 - DNA, 50 bp, Homo sapiens
  chr17:55335001-55335051
  hyper
aatggggctcaggcgcgtggctgatctcgaacggcgctctataccacccc

SEQ ID NO: 239340 - DNA, 119 bp, Homo sapiens
  chr17:55927364-55927483
  hyper
ctgccatgatctgcgcctggtaccgagcgtgactagctgctaccggaaccggaagcggctgctccaggtaaagggcgcataagttgctggccgagccaaggatcgctgggctttcaccg

SEQ ID NO: 239341 - DNA, 420 bp, Homo sapiens; identical to SEQ ID NO: 204720
  chr17:55938684-55939104
  hyper

SEQ ID NO: 239342 - DNA, 167 bp, Homo sapiens
  chr17:56084355-56084522
  hyper
ttgaggtcgatgtcgcggatagcgccgtatttgtagaacacgtcctcaatgtccttggttcggatgtctggaggtaagttacccacgtagatgcggcaatcgttgttccctgcggggccacgaatcacaccacctcccgacatggcggtgacgaaaagcgcggactc

SEQ ID NO: 239343 - DNA, 75 bp, Homo sapiens
  chr17:56084800-56084875
  hyper
ttggggtggtttgcgaacagagtgaccagccgtttggtaaaagttaaataacgaactttcgttaaaggagctagt

SEQ ID NO: 239344 - DNA, 594 bp, Homo sapiens
  chr17:56234326-56234920
  hyper
ctgcgggttgctagcggagtcgcgcgtcgggagctacgtagggcagggaaggcatggcttctgttttcgtccaatgagaaggggccagcggtggcggtcgggccaggtccggggcctggggacgccgaggcggccgcggaggagcgccgcgtcaaggtctccagcctgccctacagtgtggatgcgctcgtgtcggacaagaagccgcccaaggaggcatccccagtgccggccaaaagcgcctcttccggggccaccctgcggctactgctgctgccggggcacggcgctcgggaagcgcacagccccgggccgctgatcaagcccttcgagaccgcctcggtcaagtgggaaaactccctaagacggagcggcgtggatgcaggaaccctgctgataattcgccgccgccaagacacgtgagccctaccacctgcaccctgagaaaacacaagaccaatccgaagccgcgcacagcctttaccacgtcccagctcctcgctctggagggcaagttgctccagaaacagtacctctccattgcagagggtgcggacttctccagctctccgaacctcacggagactcaggtca

SEQ ID NO: 239345 - DNA, 129 bp, Homo sapiens
  chr17:56296380-56296509
  hyper
aagaagtggggagcccggagaagtggtcgggattgtaagcagaaagtggggacctcagaacaccgagctcaggttggaatgatctaaggacacaaaagcatggggcctcggggctggggcggtgcgact

SEQ ID NO: 239346 - DNA, 107 bp, Homo sapiens
  chr17:56296749-56296856
  hyper
cccaagccgaacgcccaagagggctccggggtcctaccgatcaccgcttaccatgtatgcgataaaagctcaccgaaagcgggacctcgtgcgctgtgcaaatgagg

SEQ ID NO: 239347 - DNA, 71 bp, Homo sapiens
  chr17:56327077-56327148
  hyper
gtgaaggatgggagccagaggggacgggatgcactacccaaacacgcagtgaaaggaggaggagggatcgg

SEQ ID NO: 239348 - DNA, 330 bp, Homo sapiens
  chr17:56405979-56406309
  hyper
tgctgctgctctttcgcttgctgggtggctgggctggtcctaaggaggcctgggtcgatgggctgcttgcctcatagtctcagcccctgctggcctctgctctggggactgcaggggtcccttacagtccaggagcctcgagatggtgggctccgaggagggctgagcctcagaattgggtgggggggtgagccgggaagagccagccctcccctcctcctcctcctcctcccctcccacccaccaataggaagtcggctgctggtttccatggtgatggcgctggactggtgggctgaaccggctgacagggtcggggacagaaggaag

SEQ ID NO: 239349 - DNA, 321 bp, Homo sapiens
  chr17:56429044-56429365
  hyper
cactccttcctctctcgttcccaattccgttttatctattcctttctctagtctactcagggtcaggcatcctttccgactactcactcagcagcggatccccacccgcctctgactcccagtgtctttcggctccaacgtaagttcaccgaacgtctaagagctgaggattcaaaggcatgtaagaccgcccctgccctcagctgcaagacctgtccgcgatcctacgaggtaaacgatggcctccttcggcttctcactccccctgccacctctgagttctgagacttaacttttctctttactgtcccacagccccat

SEQ ID NO: 239350 - DNA, 94 bp, Homo sapiens
  chr17:56429665-56429759
  hyper
tcccgccagcaggcggggaggctgggcggccggccgccacctgggccggagcgcgtcgcagccacctgagcccgccgagggcgcggcggaggct

SEQ ID NO: 239351 - DNA, 207 bp, Homo sapiens
  chr17:56429999-56430206
  hyper
gaagaaatccagggacagccccacccctccttcctaactgcgagagcgctatagggtttccacttgcttcccacaggaatgctggcctgggagctacggcggaaaaaaatgcgtatttatcttttaaaactccgtctgtttgctcgttccggctgataatttatactttgcgcagttcttagcgcttagacacggttcctttactaa

SEQ ID NO: 239352 - DNA, 230 bp, Homo sapiens
  chr17:56595391-56595621
  hyper
cgagtcgggcaaacgccctcccagcctttagccaatcggatgcctaaagacgagactatacctggaggaaggaggcgcggcgccggaggggagacgcgaccaatgggaaatcacagcgcgtccttgcggcagccaataggagagcagtaaagagggggctgctggccactgctctggggaccggaagtggaggcggctcgtcgcctactggtagcgcaattagaggcggg

SEQ ID NO: 239353 - DNA, 627 bp, Homo sapiens
  chr17:56736331-56736958
  hyper
acccttcctagaaacggtataaaatacttagcgagcatctaattaaaacagaccgtaacctaagaagacgtaaggtcataaccacaactccaaaaccaaacgcgcgccactacaacaactctgaaaataaacacacgcaacaacacacaagccgtcttttaaactagttcaatcacaggacagaaaagcgcaaaagcagtcccccactaccacaagttatgcagccgagttttctcattcggggaaatcgcgggagcaaacacatagtaaaaaccctcccccaagaaaaacactttatcaggaccaacagcgtctctcccccgccacaaagacattatttacttaatattgctaataccttaccatcgtcctcaacacacaacatactcatggcaaattgtattatgagttgtttttaggcatcgcttcgaaactaccgcttcttcgtatgacacatctcagactacaccttctttggtattcgctagaaaatttctcccgcgaagaacgcactagaaccggcaatcactgcgcccctatctacatatgcccgcctcttatagtaacgtcaccacctgcttctgtacgatctgactgaactcccttacggatcggttcgctctagct

SEQ ID NO: 239354 - DNA, 59 bp, Homo sapiens
  chr17:56833016-56833075
  hyper
tgcttaattagaaccggttgccatggcgacagtctctaggcagcgtgggctgagctctc

SEQ ID NO: 239355 - DNA, 51 bp, Homo sapiens
  chr17:56834155-56834206
  hyper
tccctttcctgcctggaaaggtccttcctcccaggcttgagctccctcttc

SEQ ID NO: 239356 - DNA, 67 bp, Homo sapiens
  chr17:57184398-57184465
  hyper
tggggctctgctacgccacccacgcccaccttggcggagggcggggccccacggctctcaaacttgc

SEQ ID NO: 239357 - DNA, 469 bp, Homo sapiens
  chr17:57784633-57785102
  hyper
gtgggtaatgcaacgaggtgaaaagaaacgttcctactggcgagaaaatgaataatgatattggtctccttcgccctgtaaggagccaaccaacctacctacagtacctcctttcctcactcgcgccttcccttcttctgggcagcgaacacgtttctatcgcgtgagctacctcttccggggttcctgggtgacaagttccggatcaagaatcacaaagcgagcagtcattcttcctcttgccacacccacagggcccgcactaagagcctaactgaaatcccgcgaggatcaaccgagctcgccgaaaggagggaggaacgtatcccttctggaggctgtctcagggggcagagggaccggaccggaagtgacgtgagcgggttccggttgtctggagcccagcggcgggtgtgagagtccgtaaggagcagcttccaggatcctgagatccggagcagccggggtc

SEQ ID NO: 239358 - DNA, 420 bp, Homo sapiens
  chr17:57970251-57970671
  hyper
ttcagatatggtacgcatgctcactgtccaccgaacgctccagctgacaatgcgcatgctctagtcctccaagcgcgacttcggctggtgttttgcgcatgtttctgccagcgcctggatcctgccgatagttctgcgcatgtccactgcccactgtttggcttcacggaaccctgtacgcatgctcctacgctgaactttaggagccagtctaaggcctaggcgcagacgcactgagcctaagcagccggtgatggcggcagcggctgtggtggctgcggcgggtccgggcccatgaggcgacgaaggaggcgggacggcttttacccagccccggacttccgagacagggaagctgaggacatggcaggagtgtttgacatagacctggaccagccagaggacgcgggctctgaggat

SEQ ID NO: 239359 - DNA, 142 bp, Homo sapiens
  chr17:58156217-58156359
  hyper
gcggtgcctcccgcggctgcacggaaggccacgaaccgacaacttgcacagcagccatcttttctacgggcggggggggtgggtggggtgatcccagggaaatacttccgggacatcctcccgttccgcgcgctctagttcc

SEQ ID NO: 239360 - DNA, 257 bp, Homo sapiens
  chr17:58212866-58213123
  hyper
cacacagaagactgcggggagccttagcccctacccggcctgcagtgctctctggggcacacggcagccccacgacgcctttgggtttcttcgagcgctactcgcacgcaccagcgcccacacagctgcaacgccaaacgcccgccagcaccttagggccgcgggagtcccttccccaggcccgccccacacgccggccttttctgccgcttcccaagccggagccaatcagcgctcagcagcgaccggcagggacg

SEQ ID NO: 239361 - DNA, 281 bp, Homo sapiens
  chr17:58216282-58216563
  hyper
gtgtataggcaagtcgctaaccgggagccccgcgcctcattccgactggatcagggggccccgcctgtccacggtccccatgcgcggtgcgctccccctcctagggccgtaattgccgcagccatccctacgcgtctccagcccccgtcgtctttgtccattcggttccgaggccgcgcttggactggggcgcccacgactgaccccggaggcacagcgaacggggcagctgcagggactccctgtcctgcaggcgactgggctcccgcgaggcagcaggt

SEQ ID NO: 239362 - DNA, 103 bp, Homo sapiens
  chr17:58216773-58216876
  hyper
atttacctgcttcccagaaacggtccatggcttccgtcccggtcatagcgctgcgcagcgggaccgttctgccccgctgccctcgaacagcccgtccgcgctc

SEQ ID NO: 239363 - DNA, 157 bp, Homo sapiens
  chr17:58218836-58218993
  hyper
acagaagctgcagcggcgcggggcggtgggctgtgagcgagcatatgtaggggagcgtttcccgcgagaaagcagaacctgcgccagccgagggccctagggctgctggtaggaggactgttctctatcgtccagctgctcccgacctcttctctga

SEQ ID NO: 239364 - DNA, 575 bp, Homo sapiens
  chr17:58227227-58227802
  hyper
gggagggcaggccccgccagggggaggagccgcctcccgcgtccagctgtcggggctccctcccgtcgcggctccgctataaaacccaggccggcaggatcgctgcacccgcggcggcctcctcggtgcgcgacccccggctcagaggactctttgctgtcccgcaagatgcggatgctgctggcgctcctggccctctccgcggcgcggccatcggccagtgcaggtgagctcccgggctccggccccaggtgcccctcggcggtcccctccgtgcccccagctcccgcccctgcagaggatccccccgcgggcgaccggtgagcgtcggtggcgctggggtcccgggttgcgtgtgcgccgggggccgcgagggtgcgggaggactgggcagcgcgcgagcttgtgtgtgcacacgcgtgtcagcaccggctgggggagcgtgtgcacgggtgtgcgcggtgagggtgtgtgcgcgtggcccggcgagacgagttgggagtccctgataaggatgcgtctcaggccgggcgcgggtgctccagcctgaaatgccagcacgttgggaggcagag

SEQ ID NO: 239365 - DNA, 454 bp, Homo sapiens
  chr17:58228042-58228496
  hyper
aaaaaaaaaggatgcttctcggacccgcctcaacgcacgccttcttttctcacccagcctcctccgtctgcccgtgggtttccgtccgtcccgctgggactcagcgctgggtgactgccccgcggccagagcaagggcggtctggcagggtcctggaagccgcgcttcccacacgggttccttgcccctgagggtcgcaagctcccctggcctccctaacctccagcgctgaattgggagcctggcgggggcggggggtgggggacccggagccccaaggcctctgcggagccggtctttccggacagggtgattttcgtttaaagattaatggtgaagccgagctcttaattattcctctaggtgggaggtggcaggaaaggcatgttaatatttgataagaagctaaaggcgcttcaagcggctgggcacagggatccgatcctggaggcac

SEQ ID NO: 239366 - DNA, 667 bp, Homo sapiens
  chr17:58498603-58499270
  hyper
ttacaacaacaacaacgacaacaataacaacaagacgtttgctgaacatgctggcatagaggacaagttaaaaagtttctggactcaaagggtgctcctccaaagctccgggcctccgggctacccctacttgaagccgctatgcccctctcctgtgcccgaggtggccgctgggtggcaggggaggcccgggccgacggcggtcccaccgcactgtcgcgaaggcaggcgaagaacagggccacactgagtggggacaactgggcccgggcccagaggacacgaaggaaggtccgggagaaggaattcctagtttcagggaagaaaaggtggctcgagtgaggaaactgcgggggcaacggtctctcgtcgccgggaccccgccgtgtgccgcccagggacgcgagggggcgctgctgccgcgccaggggcgagggtcccggggcctcctgagcacctcccggccctgcccggccaactcagactacacccggactctgcccaccgcgtttccgccctcggcctcgggtccctggagggctcgcgggtaggaagagtcggggtggcgggactttcgccgacacccggctccccgcctggtggctgcgcacacgaggccggcgacgggacttgcccgcgtctcagcgcctcctgtgtgaagcgggac

SEQ ID NO: 239367 - DNA, 50 bp, Homo sapiens; identical to SEQ ID NO: 204728
  chr17:58676701-58676751
  hyper

SEQ ID NO: 239368 - DNA, 144 bp, Homo sapiens
  chr17:58754612-58754756
  hyper
ttgttgagattaccggccgtgccccttattcagatcaacccctcctcggctgatcgccggcgcgagccagcctaggctcccggaaggtaaacacatcgccaagggctgggcagaaggcgggtgtgggacgggtgagtggccagc

SEQ ID NO: 239369 - DNA, 163 bp, Homo sapiens
  chr17:59467391-59467554
  hyper
taggcctggcggcccgatcctaaggaagcccctgcttttcttgcgcctgccggtgctcttctcccgcccgcctggccctgctgtcagcgccccctagtgccgggccggccgcgcatgagggcggtgggacagatcgcccacaactcctcggcttgcttttggg

SEQ ID NO: 239370 - DNA, 1542 bp, Homo sapiens
  chr17:59473674-59475216
  hyper
gaccaggagggagtcgagccgcccgctctccccgcgtcccccgccccatcccagccagttggccccaccctgcgcgggataattgggacgggagggaggcgacgggagggcggcggctccagagagactgcgcgcctgtcagcggcaatttgtttaagtggacgggacgggccgggccgctgcgggctggggtcaccgaggccgcggcccccaccccaaccagacctgggaccgcgggggagcccggtccggccgctaaaccgggctggctggcgccagggctccgggaggtgcggtccggcggggaagccgtgatgggaagcgactctgtccagggagtgtccttcaccaccacactcctcacgtccaggcagtgatcgacggcctggcggcaccctcacagcgggcccatagcacggggccacacacgtcccctgagcttagcctgggcacattcgtctgccaccgagggcttaagccagtctgcagcccgcgccccgtcactcggacgcaagtccgtcgtccgctctgccacgcggccgcacagcccgagcttcctgctgcccactgcccgcggggtcacgcaaccccggccctgcacacagaggaggaagcggcggggaccccctgccacctggaggctcaacccggggaaggtcccagcagtgccccttaaccctgcgagaggtgacggggccggaggacggaagggcagccacgccaggctcaggaccgcggccccacccggcccaggccgtccccgctcccgccccatttcactgttgcgggaagcgcggggcgcacagaccgcgcgccaccagcccaagcccgcccgacgccctggccggagaccgcctgcgagagggaggggcggccgagcgcgcgtcccccgcctgtctgcgggacctggccgatgcgaagtgacaggggccggagctttgttgtggagcctcggccgcctggcgccagccgcccccgcccgcgccctccccctccagccccgggcggcccgcgaggcgccccccggggcctcttaaaggaacacgcacactcggcccccggggctccgccaggggagggggttcctgggaagggggagggggccggcctaggtgggggaggggcccagcggaggcctcacggcgccgctccagggcctcccaggcctccccagcgccagctttcggtgagcctcgggcattcctagctggagagtttggctgggggtcgctacagactcttcagagcggctgcagcaggacctcagggtgatcgcgggaccgcggggcggggcgagtggtgggatcctggcccggacagagccccggaaagccagagggaaggtcggtgccactgtaggtggggtcgccgtccccagatgcagccgctgcactgtcgccgccaggtttctcggtcaaataacccaggcctgagtgtttcaaactcttcaggcctcggacccctggaccagctatggatggactaatgaaatggactaatgtctaaaacgcacacatttagatgtacacatactcttacaag

SEQ ID NO: 239371 - DNA, 401 bp, Homo sapiens
  chr17:59475276-59475677
  hyper
cgcgcgcgactttgcgaatgtattcacggattcctaggccggtacctgggttcccggctaaggaaagctgccctggttattatctggtcacctcaccggctgcgcaaacgtgtccacaacgggtccctccccgagaggccacatctcgcctaaggtggagccagcaggtatttgcctgtggaaaactgcagtggatcctgccccgtctgcgtagactgcgcagctcggagtcaaagattcgttctggccagagaggaggtactaagagaggtgcgacctagccaagaacgaggtcgtggagaaaaccctgtgggggcggcgctcacatatgcggtgatgaggagttgtgagggccctggggtcggccccgaaaagtagggataacggtcgcagaggccata

SEQ ID NO: 239372 - DNA, 92 bp, Homo sapiens
  chr17:59476757-59476849
  hyper
ggggctcgggccagagcggccgggcctctgggcgcgggagaaggagggcgccccctctccgctcggggtcgtgtcaatgctttgcacttggg

SEQ ID NO: 239373 - DNA, 144 bp, Homo sapiens
  chr17:59477029-59477173
  hyper
cattggttaatattttattctgttgacatgttttcttactgctgaggcttccgacaccttctcccaggccccccctcccggccggagcttggcctgagctgtcaaaaccccgcccccggagacccacaattggtccaaaaagcg

SEQ ID NO: 239374 - DNA, 244 bp, Homo sapiens
  chr17:59477773-59478017
  hyper
actgggcccgcacccgcccgccgcgcatctgcgctccctcaagagcctggagcccgaggacgaggtggaggacgaccccaaggtgacgctggaggccaaggagctgtgggaccagttccacaagctaggcacggagatggtcatcaccaagtccgggaggtagggctgccggccggctggaaggcgcgcgggcgggcgggcgggctggggcacgggactgcacggatcagagcagagctgggga

SEQ ID NO: 239375 - DNA, 240 bp, Homo sapiens
  chr17:59478497-59478737
  hyper
ctgaagaaagccacagccccggcccctccacccttcgactcagccaccgagaatccaggcctcgggttcaccctcttcccccgaactgcacggccaggatgtcttatcaggctctgtagcccagttcccaatacaaacaccctccagatttatttctgggagcttccgtcccaagtgggtatttcccctgaacgaatttcggggagattaaggagaagcgagaatatttctagagggcct

SEQ ID NO: 239376 - DNA, 1778 bp, Homo sapiens
  chr17:59488095-59489873
  hyper
gcttccctgcctcagacctgcgggcaggtccgggaacccgacagggacagagaagcccgttttccagcctaaatagaagctcgtgggcagcgcgtttgctggaggtcgctttgggctgaaacgcctctcatactcctagaggagcggcgcgtttgcgtcccgcggcttctcactttcagcaggacattaggagggagacgagagtcggctgcgcgcccgcggcggcctacgtacagggctgcggacaccagggggcagcaccgacttagggtcgcgggaggggtgcgggtgcgggcatgggcgcgggggaggcgggtgcctgcgaaggccgggcggggcggcctagtcgcggccgtttttaggccgcgtcgttgctgcagcaacccgggtggggtggggtgggactccagggcctcgagatcccccacaccactttcgccgccacctcccgccgcacatgtcccctccgagtcgcccacccggcgctccgcggggccccagctggtagcctgagtgcgactgcgggaacccgcggccggcggctgggccttgtcccagacaaaggctaggccactcccatgtccaattaagccaccctcctccccggcctcccagccctcattgtccccggggtcgccaattagcctaggcgcccggcgtacccgccgctccggtgccgcaaggcctccttaacccttcagggcctggcccggggtccttggacggcagagccgccggcacacgcgtggcaggagggccagtgctgggacgatggcgatacctgctggcggcctagcctgtcgcctcgggctctcgcgtgtggggcgtgtgaggtctaagagggaattgtgcgtgtcggtgtggggtggcgcgtgcgattcccggaggaactcggagatggagggtgtgagtgcaggggctccgagagacccctagcggctaagccgcccggatcccaaggcccaggggacctcatttcctctcgggttaatcggaatcttccgagccctcaagcccttcctcctccactcccccgccgctgctgtggagaaccggagccaccggtatggcctggccctgccctcccgaaggccgcagctcccgggcccgcctccccagctgaccgcgaactcctgcgtggggtgctcctggggcgggaggggcgcgctcagcctcgctctccccgggactctcacgctcaagcgccccggcttgaggccgggaccccctatttcccggttatgggacggccccttgagggacagcctctacgagccctggatttataccccgagcctgccttcctccgctctgggaaggacccaaaatccagtcccgcttcctccccctccttcgctgtccttggccccgaggtgcggagcaccggcggtcaggcgggatcccgcaggaggccgagcgctccctgctcgcaggacagggcggcagcggagggagcccccgccctcttgggaggaagcccgagctccgggtctcctgggcaccctcccgggagcgccttcggggtggaggctggttgccgggcgctgaacgtgtccgagcacgcccggggcggttttgcacttggacttccttttgggctctccggaggcgcatatctgttcctcctattggatggggccggggaccccaaacccactccggaagcaccgatttccagcgctgacggccgcgcctggtttcccagcgagtcctcttggcagctcccgcagctccccgccgggagcacgagtgggagcgaacccagagcccgcccaggc

SEQ ID NO: 239377 - DNA, 1267 bp, Homo sapiens
  chr17:59529012-59530279
  hyper
cagcacttccctgccgccgccgccccgcacccggccaccgggcttcctcccagtcctcacccctgacctccgcggccgacttcgaggcgcgccaggccgggtccagcgcccgcggccccctgggccgggacaaggagggcgggtgagcagaagggccgtgcccagggcctggaagtgcaaggccgcgtggtgggcatggtagggaagcggagcgtgggcctgtgaggcgcgtgtgcgcctgcgacctcgggaccggggctcccaaatgaacagcgcgcacagctgggagcagggcttggggagcggggctctgcggccggggatccgtagaagccgctgcctggaagcgggcgccggcagggggtggccagacccggtcgtggagcgtcctagtcttcgggcacggcggggccaggcgagccctcctggttgtcgagcctcggctgagagccgggctgctcgcccttgcttcccgcctctctaatctaaaccatgcggggctcccagcccctacccggctcgcggggcccgagggccaagaggagggcactgggccgcgcggtggaggagccggcggctcgcgtggggctcgggatcttggggaccgcgacgccggggaaccctggagcccccctccccgggggacagcgggcgcagactgattgacagcggcgacgtcagcgcggagggggggcggccccagagggagggagggaggaggagggaattgaggccccaaagtgcagccttggagatcaagggcccgctccagagccgggatgtgtccagccccgagggcacggcaggcagctggaccctgacccagcggcgcggagtcggagccccggccgtcccgcgctcctcggacccgaacctgcaggggacctcgggccgctggcgcctccgcatgcggcaccgcaattagggtgagtgtgggttccagccgagtggggacgagctgggcgtgcggggctggggccacaggggctcagggttaggctgcggggacggacaggaggatgagctggaaaggggtgagtcacgcgacccggggaagaacttcaggggcggtcaaagttgcaggaaggcggcgcgaagtgccttgggtcgggccgccgcctcggcccgacacccagtagttggggcacgagccctcctctctgagtaacgcgatgaattgggtctagagatccaagagcatagaaatatcgacagcgccagcaccctaagaacaaggccgtgacaggcggagcggtggcctggaaat

SEQ ID NO: 239378 - DNA, 886 bp, Homo sapiens
  chr17:59531720-59532606
  hyper
catcgcaaaggcagcggaggttgcgggccgcacccgcggaggagtggatgtgaaggacgagagcggaccgctatgcggtgctgagtgcgggaccccgcggtgctggcggcggccgagcgcgcccaagctcgaggtccgagaggaccgcgaggacggccgccccgggccagccgggcgtggaaaaaaggaaattgctgggaagggggcaagctgtcccgaggtctggatgtggcttcgtggcggagagaaaaggaagaggcaaaccctgagcccgggagggagagcactgagcaggcctcgtccccagtccgagctgcgggaccggcgtcagtggacgcgggcggtgaaccagctcctcacagggcagggctgagcgcgtaggactgagagcgcagggcgcgagccgcagggctccgctgcacggctccgggtgtgacaagagcccagcagaggaccccatggccatgcgggccaagcgcgagacggcccctccttgcgaccccgcaggccgccacatctgggaccagcggatcgcttggtcgctggagccgatcccgccggggccctagatatagttggacccagcgcgctggccggagcgggcagctaccctactggcgcagcggccctgtgtggggactcctaggtttccgaggctcggcccgcgttcgcacgtggcccgaggcgggtgctggcgctggccatgtccagcgagtctcactccctgcaggctgtggccgaagactggtccgcctgtcaaccttatctttatgggtttttcccaacccagactggccccggcccctttttatctcctgggttgcacttggcttgtttactttgcgaggtcctgggagtcgaagtctaagcccgggatgaggaggcc

SEQ ID NO: 239379 - DNA, 1809 bp, Homo sapiens
  chr17:59533754-59535563
  hyper
cccgcacgaagtcccggaatcggctggagagggccaggggtcctctggcgagtgtggacctgggcgagtgactcgttgtgtgctgtgcccgcaggagatgctgcaggataagggcctgtccgagagcgaggaggccttccgggccccgggcccagcgctcggagaggccagcgcagccaacgcccccgagcccgcgctggcagcgccgggcctcagcggagccgcgctaggcagccccccgggacccggggccgacgtcgtcgccgccgccgccgcggagcaggtagggctgcgccagccgtcgggtagaagtcgggcgtcggtctgtctgcggggccgcctgtgtccgtctttccgtccgattgtcggcaggactcgctttcaggaggacctggctgcattcaggacggtctgcccgttcgttctccactggacatggctcgctttctctgccttttgggtccttctccactttgagccctcggggctactctgggacaagcaagagctagagctagagatagaggagagggcggtaagagagagggagacccccgtagcatctgagcgagcctggaccaagtgtccagctccaacaacccgtagagggcctgggacccaacggcgagggggcaggaggaggccaccccgccggtgcgcacgggagccgctgcggggatccgaggcctctgggacgtcgccgagggcttcacagtgataatcggacgatcacagcgcacgggatgccgcctggggatctgtgtgcactatctgcaggcgcgcgcctggccgagggtgcgtgcgcctctccctgtctgtgtctgccccgggagcctgtggcgatggcccgccacagaaatgttcatgagtgagcaggagtgtcgtctaacctgcgctggccactatgtgtgtcctctgagggttcctccgtaggtgcagctttaaaggaggaagttttagccaccgattaattcttttatattcacgaatagttcaaaatcgttctgtgaaacgaaatctggagccatgggctccgggcgggcagggttccgcacagctcttcgggtctggttcttctttcctcaggctccgcgtggagccctgggcctggcagacacaagtttctctccctcccatccccagaccatcgagaacatcaaggtggggctgcatgagaaggagctctggaagaagttccacgaggcgggcaccgagatgatcatcactaaggctggcaggtcagcgctgggagatttacttccggggatggcggtggggagcaaggggggccagggaggtcccttagaagtcctctcggccccggcctggtggcctgtgggaggcctctctgcctcctcgggcgtcagtgccacctcccttcgcagcttgggactgggccgccaaagcccgcagggggccaccgcagccgcgcgggccttgcgggaaagaccgaggggaggggcagcgctatgcaaatgaatccaaacagggatcgcgacgctcaaaagtcccagctccagcacttttggccccctggggggctgctttgccctcctctctttgaggacctgaggaggtttctcaggaatgcattgattggagacccagagatgcctctcagcagatggggagagggaaatagactatgctgttcagttttcatacattttcgtgagtgactcgaaccccaagtttttcatcccaggggcgccgctcttctgtttccatccccatctctggccaacgggaaagcactacgttgggctccgtgtgtgttgttgggggagcggctctcggtggctgccagaa

SEQ ID NO: 239380 - DNA, 771 bp, Homo sapiens
  chr17:59539225-59539996
  hyper
acctccgagaaagtcggggctgcagcggggttggggcttgggggaccctccaggtggagagaatctaggggtatcccctagtctctgtccctttccccaggaaaggggctgagagtaagcgccttgaatttggccaccgctttggccggggagctcccgcggctctcgcagcgcagctagaacttgcgtgttccctcagcagtgagttcgcagttacgggtttgttgccagaattaaaaaagccccaaacccttgccccgcgccccgcgcgcctccaacaccgagaaacgtccgaggaagcttatcttagcagttcattctaaagccatttccgagtatgaatagataaaggctccagctccgcaccctttcagagcctgtttcatgatcagaggagaagccccgggctttcatctcctcccgggccggcgagcaggcggcttgtttattcccctggcggagccgtttccgcgtgtgccgtggggagggcgggggagcccccatctgtctgggggcgcgggagcccgacggcgcgaggggaactgggggagcatggagagggcgcttggggcgcggagagaaggtgcggggcacgtggaaagcgtgccgaggggctgggaagagggagggacaggaggacggggtgggagcagggagagggtagggggcatagggagagggtgcagggaggggagagggggagcgcgcaaggagggggctggctggggcggacccagaggtagagcgcagagtgcccgggacaggcgggct

SEQ ID NO: 239381 - DNA, 32 bp, Homo sapiens
  chr17:59941038-59941070
  hyper
ggctcaaggtacgcggcggaaggttgtcgcca

SEQ ID NO: 239382 - DNA, 130 bp, Homo sapiens; identical to SEQ ID NO: 204740
  chr17:60142477-60142607
  hyper

SEQ ID NO: 239383 - DNA, 89 bp, Homo sapiens
  chr17:60143463-60143552
  hyper
gccactaacatagcgccatctgctgggtgccccggccagtataaaacgacccggggccctggccctctctttgcggggaaatttacagt

SEQ ID NO: 239384 - DNA, 50 bp, Homo sapiens
  chr17:60781592-60781642
  hyper
gcagggcgttttccccggaggtgcggcgtgcgcccgcgacacaaaggtct

SEQ ID NO: 239385 - DNA, 54 bp, Homo sapiens
  chr17:61043210-61043264
  hyper
cagcagcagccacctcgagagtgacatcacccctgagggcggagcccaactatg

SEQ ID NO: 239386 - DNA, 125 bp, Homo sapiens; identical to SEQ ID NO: 204743
  chr17:61043854-61043979
  hyper

SEQ ID NO: 239387 - DNA, 96 bp, Homo sapiens; identical to SEQ ID NO: 204744
  chr17:61044393-61044489
  hyper

SEQ ID NO: 239388 - DNA, 75 bp, Homo sapiens
  chr17:61522994-61523069
  hyper
aggtggcggcagctccgccctcagcgcagttggcaccggcctgacccaccacagggccaccgaggccaccgaagc

SEQ ID NO: 239389 - DNA, 172 bp, Homo sapiens
  chr17:61554256-61554428
  hyper
cccccgggctgcacctcggcccctccccggcccgcgcccctgcccggggcgggccaggaacctcggcccgcgccgctggggactctggagcggaggaggaagcgcggcggggcgggggcgggggtgtgtcgggttttataacccgcagggcggccgcggcgcaggagaaggg

SEQ ID NO: 239390 - DNA, 381 bp, Homo sapiens
  chr17:61615574-61615955
  hyper
gagtatttccagcacgcctggtcctacaccaatggcattgacatgaacgcggtgagccccgccgctccggctaatgccccgggcgtgggggggagccaagatcctgcgggggcggggcgtccccagagccctcaccaccctctcccccagccccaccccggccgcgtcccgctggacttggccgcccgccttgcaggtgctgaagggcttccccgagtgcctgcaggctgacatctgcctgcacctgcaccgcgcactgctgcagcactgcccagctttcagcggcgccggcaagggctgcctgcgcgcgctagccgtcaagttcaagaccacccacgcgccgcctggggacacgctggtgcacctcggcgacgtgctctc

SEQ ID NO: 239391 - DNA, 237 bp, Homo sapiens
  chr17:61678078-61678315
  hyper
aaacaaagtccggcgctctctaggcaaccgtgagggcttgagcactaactagatctgctcaagggcaagagaggagcgagtaccgtgcagccacggaacggactttgcgggcagtggggacgtgtttttggagcgaacccggtaaaggaagtgtgctacgccatcaagggcccccagtcccgggtgccgcggggacagtgtagggtcattagctgttgagccgccccgggcgggccc

SEQ ID NO: 239392 - DNA, 330 bp, Homo sapiens
  chr17:61776666-61776996
  hyper
ggaggtggaagcctcgggtggagaagcggcacccgctgggttctgcaaggggaagtcagtcgggagggccccgccagcccggccccagcctgcagggtggggggtgttgacaggcaggggctggggggattgcggttgggactttccctaagtcatttcctgttgctcttggtcttgccacttccgcccctcacccacctcccccacccctgctccccaggggccggggtcccgagtggcaccgtccctcggaagaacaaagttagcgggagcggaggggccgggggctcccgcgcagccgccgtgtgcgtcccgcgggctgggaccgct

SEQ ID NO: 239393 - DNA, 34 bp, Homo sapiens
  chr17:61778462-61778496
  hyper
actcgctttggagcggcggcgaggccggcgcctt

SEQ ID NO: 239394 - DNA, 232 bp, Homo sapiens
  chr17:61818856-61819088
  hyper
cgcctctctcgcccggcaactccgcttcagcgtctccccgccaggcccaagcctattctgctctcgggctgcggcgcctcattgcgggagtcgaggacgcgggttaaaaagggggcccgtggagggtgaggtgagcccaggatggccgctccgacgaaggcccgggcctggggagatggaatcggtggcagagccaggagggactggccccggcagcgtaccaggcaccccg

SEQ ID NO: 239395 - DNA, 289 bp, Homo sapiens
  chr17:61851078-61851367
  hyper
attacataatccccgcccctgggccggaactgccctcgcctatcccaatcctcctacctaggattccgtcaagttgacgtcacacggaaccggtgctccggaagctaaaggtggccatgctgtgtgggaccacgtggccagaggcaagagtgtcgctctagtagtatatgcaacagtttaaactataggcatgttcatgtaaatatggtttctgtccaacccgttttctcttgggatttttggctagccccttgacgccactttttcttcattcgcagacccactttct

SEQ ID NO: 239396 - DNA, 224 bp, Homo sapiens
  chr17:61920536-61920760
  hyper
gccgagtgaggcgcggggtcagaggtctaaggtcacttaggggcttcacagtgaatgagccgttgctactactctctcccggtatagcaccctcaccgaattccgcggccacactccccgaaaatagttttgtcaagtctcctttctgcatcttcggcgttaaagactcaactcagagtcggtagctgtggctcacgcctgtaatcccagcgctttgggaggct

SEQ ID NO: 239397 - DNA, 178 bp, Homo sapiens
  chr17:61921000-61921178
  hyper
aaaaaaaaaaaaaaaaagactcagctgctctgtggggcagaacagcagccaactcaacttcctgtaaaagctcatgctggtagctcggaactgccaagggacctaggaggctccagacttgacccagctggtgaacggtcgacttggccaaggctgagttctaccgcacatttttaac

SEQ ID NO: 239398 - DNA, 428 bp, Homo sapiens
  chr17:61926212-61926640
  hyper
agggagcagccagcagaggccgcaagctcggccaagcgagccgggatgtccaaggcgggaacgtggcttcgcgcgcaactctctgagacgcgggccggctcacgtgtccgggccgcaccacgaaaacaacagccacaggggagaacaacctcttgttttcctcatacagccgagctttgctgcaaacgatccctttccttttgtttccacattgcgttattcagaagtggttatgcggcgccaaacacgcgctttctgccccacaggtttcagccttccccaccctcatcttccccgcgctcccctcccgtcgttgtagcttcctgctcgcccctctcatctcagccaaccctgctgagctttcgcgtgggcgtcacgagtttctaggcagatcaggaaaaccgctctccggccgcaccctcgcgcgc

SEQ ID NO: 239399 - DNA, 164 bp, Homo sapiens
  chr17:62075060-62075224
  hyper
cagtactggggacgcgggtgctgaagtcaccacgattttcctcgtctgaggagcagtggctcaccttggccaggaaacagggcaaatagccgcaaggagagaggcgagaagccggccacgtgtttccagccagagtcctcagcctcttccgtgaattcgggcgg

SEQ ID NO: 239400 - DNA, 181 bp, Homo sapiens
  chr17:62103203-62103384
  hyper
accaagcccttgacgtcttcctggacctcaacctcatctcatcagctccccctacggagtggggcggaggcggcggaaacgctgaacgctcagggtcgacaggagcaggggctgcactgcccgccacctagtggccaaagtgagcaggtcccctaaaagacacgacgccccgcgatctgcg

SEQ ID NO: 239401 - DNA, 408 bp, Homo sapiens
  chr17:62223211-62223619
  hyper
ccagacaactttacgcgcacgtggtcgcaaggtgaacttgctattggttaatggcagtaaagcccgcccatcagcgctggtctgctcctttaaaagaacgccatcgacgctcccctgtctttcagcgcctgcaggttccgggaggtcaggttgtattcctggcgggtcgtctggctgggtgggccccggaggtcgtggctcgggagcagggaggcgtaggggggccggcctgctgtgatgacattccaattaaagcacgtgttagactgctgacgcgggtgatgcgaactggagtctgagcctgcccgagcggagctgggagggggctggcgggcgggcgcgcgcacacccgctgatctatcactctcgttcttgtagctcccagccgaggacgtcggatgtcatcgt

SEQ ID NO: 239402 - DNA, 288 bp, Homo sapiens
  chr17:62223930-62224218
  hyper
ggggcggtggctgacggggatacgcggactcttgatgcgtaaggagtgcccctctgctcccatacgttccccagcccagccttccctgagtgtatcgcgcgcgctgtgccttcgccgtgagttcgacataagtcccaggctgtcgcgtctgccatcagacgcgcagatttagttgaaggcagcgtggaatggcgtctgcagggctgttgtgtacttgacataaacagattcggtgtggaactgcattgagttaactcctgactaaagggtaatcgacctgtttacaaa

SEQ ID NO: 239403 - DNA, 1545 bp, Homo sapiens
  chr17:62776306-62777851
  hyper
tgtcaagcgttcctcgactaggaaagggtatacacttgagtcactaagcacactgggccccggaggcggggtcatcgagctgcccagagccaacaaaccccaaggtggacactgccccggcgccccttccccccggaccccgcagcgcactcacgtctgctgggcgggcctcagggagcccaagggccgggtgggcggggccggcaggttaggcccggaccatcgccctgggcggggcttccgaggtggtgccggagaggtttcgcggaatcggagctggcaacggcagcgaatagggacagcgacgctcaggagtgctgtcacccatacccaaagaagctgcgtctgggcggggcgaggaggaacctgaatgcctctgctggggaccttggggggcattgggacgaggaccggagcagaaagccggggtccggagccaggaaggctgcgtctgaaggggcgctggctggtcgctagcggagcccaaggagggtgggcctcccctgtcccgccttcccccttcccttctcccccggggatttgctgtcccggagtccctgcgtccctcccgcctgcggctctgggaatgccggtctggggctggttgtctagtgcgggcgttcccgttcgcggggaggtcattggcaccctgaatcacccactgcgagcccttccaaccggattgtagacctgccagctccgggcccacctcccccaacagggcctttcccggagcaacccggccgggcctggaaaaactccgagagggattcccagcgcagggacgcccaccggagcgcagtgtctcgggctggataagaaggggacccggccacagctccttcgccaacctgcgggaacacagagaaggggagggattggtgggggccgagaggatccctggagcgcgagagcgcacccgtcgccaggaggtcccctgcgtccactgcccaggcgacgcaagctacagcggcgtcaacgcctgggtcggcgctaggggcctgggcctgctccccacccgcctccagagggagggcagcccttcgcctaccttctcctccccgtgggatgcggcccgagcagctcccgccccagcacggagacaaggggagcaggcgcgcggagctcccgggtgcggacccgccacctgccgcacccttccctccccaaccctgcccctttccccacccccaccccacctcccacctcaactcccgctcggcggcccactgcctgcccgggcacctcggggcgtccgctcgccggcctcgtctccacttgtcccggcaggcgcgcgtgggctcggcgtcccgcgctccctcctcgaccgcgcggctccggcgctgccaggtttcctgtatagcactataaccagtgaggcaccggcggagagcgcccggcagaacttcctcccggactggggctgggctgcggttgcgagagacaatccccggcgtcctggcttcctgtcgcctctgggccaggcccgcgcctgaagaggaaagatgccaccccctcccctgcatttcccgggatcctgggcca

SEQ ID NO: 239404 - DNA, 75 bp, Homo sapiens
  chr17:62971851-62971926
  hyper
ggcggccgcggctcgccttttcctgagtagagggtcacgaggggactacaagccccagccgtccgcccccgcagt

SEQ ID NO: 239405 - DNA, 400 bp, Homo sapiens
  chr17:63556495-63556895
  hyper
gagggggaagagaagtaggaggagaggatggggcggaggagaggcggggggcgggggagggcaagcggggggcgccgctaccctttcatcccacctcccaaaggcactcccgcgcgcactcacacgccgactcacatccataaccgcgacagcgacgcgacccccggggggtatctgccccctctccgcccccgccactgccgccactcggataagtctcctctctgggccccccgccaacccggtcaccgcgctggggagggggctccggcgcagggcgcgcaaggctgcccggccaagccccccggaacgctgggcgccgggtccgccgctcccctccgcgccggcccctagcgcgccccgaaatagccggcctgccaacttcaaagggccgccccgc

SEQ ID NO: 239406 - DNA, 114 bp, Homo sapiens
  chr17:63557135-63557249
  hyper
caccggccggggagggggaacggcgcgccccgccgccccttttatgcaaaagatccgagcgggcctccgcccccgcccggcccggctttcaacgcaggtcctgtttccagcagt

SEQ ID NO: 239407 - DNA, 260 bp, Homo sapiens
  chr17:64825647-64825907
  hyper
tccgtgctgacatccgcacagatgaacggatcagatgagatttaatctccctgaggcccatgggcacgagtcactggagttttatggggtccagtaaagagcaaggaaaagtccgggtcttacaaggctgtaatcgcctcttagaaagagtctcccctaaccacctggtgccttagccctgcagggagctgtccagatgctgacccatttaagcgcagcttcctcggccgccttcagaccttccccgccaaggttttttc

SEQ ID NO: 239408 - DNA, 84 bp, Homo sapiens
  chr17:64831323-64831407
  hyper
gagggacattggaccagggtcgggggtcgcggccgctccagcgaggtaagagccgggaagaccgggagagaccacctcttccat

SEQ ID NO: 239409 - DNA, 1433 bp, Homo sapiens
  chr17:64960805-64962238
  hyper
gcggccgcgcagcccgcactcgtcgccgcgcctcggagtttgagccccagcgctgccggagcgcaggcacgcccggggcgcggggtcggagcgcgcagcgcggcgccgccccccggccctcggccccccaaccccggcgcccccggagcggcgcgcggagggaggagggcgggcgggcgcggcgggccgggccggcgggcggcggactatgaggcgcccaccatggtgcgatgcgaccgcgggctgcagatgctgctgaccacggccggagccttcgccgccttctcgctcatggccatcgccatcggcaccgactactggctgtactccagcgcgcacatctgcaacggcaccaacctgaccatggacgacgggcccccgccccgccgcgcccgcggcgacctcacccactctggtctgtggcgggtgtgctgcatcgaaggtacggccagccccgacccctcgccgccccacacacacacacacacacacacacatatacacacgcgcgcgcgcgcgcgcgcacacacacacacgcgcacacactgcccggcgcgcgggccggggagagggtgggcgcggcgctggctccgcgcgagacacaaaggagccggagctggcgggcgggtcccttcgcggccagctgtacatcagctctggtccctctcggctggggacctccccagcacaccgatcccacaaactctccacgcgcacaccccctcgcccacagacacaatgaaacacaccgaaactcaagcacgcgcgcgtagcccgggacccgagcgatccccaggggccgcgccggcacccccgggggaggtggaggctggcgagggggcgggaggaggctggggttggggggagcggacgggagggggggaggggttgcttggcaaccggtgtctgtgctattgctatgggaactggccatcctggggcggggccggccgggggcggggcgcgtcggtgccgctgggcgctttctacaggctcgggctgaggggtgggggcagaagtaggggcagaagtaggggcgggggcgcggtcggagccggggtaggggctgagttcctagcggatctagggtagctgggtaggcccagcccgacgcccgcctcgtctcccacggagtcaccggcccgctcctcgctgtgcggtggggtggtaaggggagcgacaccgagtctcccccaacggagacagcgacctcggtcgcggcccctcagcagggaggctgcggagacctcagtaggaaactagggtgtgcaggaccgatctgcggaccgggaacagactgggaggggcgtggtcatctcgtcggagctgggcgctgcgacccccaaatgcgactggaggctgagtagtaggtgtcatgaggctggaatgctaggggaccaggatttcagccccgggaccgtggggacagctcc

SEQ ID NO: 239410 - DNA, 257 bp, Homo sapiens
  chr17:65362659-65362916
  hyper
tgtccccctgcttcggccaccactcgtcacccacaccggaagttgcccgcgcacccgctcaggcagcccatcgggagcccacgcaaaggacccctcgaggtccccggcgctggttgccactcaggcactgccgcggacagcctgggggtggggcttgaggcgcgcggggcgggactcgccactccagcctgcagcgtcaggttttgtctctgggaacatcagactttttacctaaaatttgcgatgagaaaagcgag

SEQ ID NO: 239411 - DNA, 165 bp, Homo sapiens
  chr17:65713844-65714009
  hyper
cgaggcgtggtctcgggaggcggagtctgacgcaagccggcccagcccacctggctaaattcacagtcgcgctcgctccttccgcccgccagaggtcgcaggctgcgagagcaggttcctggtttggcaagcactcgccccctcaggcccgttcattctcgcgag

SEQ ID NO: 239412 - DNA, 434 bp, Homo sapiens; identical to SEQ ID NO: 204759
  chr17:65822942-65823376
  hyper

SEQ ID NO: 239413 - DNA, 135 bp, Homo sapiens
  chr17:67410686-67410821
  hyper
acgcaatctttgtcgcacccagttatctcgctcagcgaccggggcgaccacgtttccttaaatcagagccccgtggactccgccggagaactacattacccagcggccttcgcgcccttcgcaggaaggacgtct

SEQ ID NO: 239414 - DNA, 363 bp, Homo sapiens
  chr17:68164454-68164817
  hyper
accccgactgcgccgtccacaataccagctagtttgctgaattagttcagcgactcaaggaggccttacgaggtttaaataaactgcacaaaagacacatttgatcgctcgagaaaataaacatttaaaaaactcagtggaaagaaagactcctaaaatatatcctgtcctttaggagcaaagcttcgttaggacaccgaagtactcagaaataataggcacttactcttcggtttacacacacacacacacacacacacacggattagtttataaagttccaggatccagacccggttaacactgaagttgctttttaggggtctgcgcgctctcgcctggctgctgggaaggagggctggg

SEQ ID NO: 239415 - DNA, 179 bp, Homo sapiens
  chr17:68166017-68166196
  hyper
gtgcgcaccagaacatccccagagctaaaaatactgagacatgcttggaacagttgagcaatagaaacagatttctctgcagcatctgtttgtgctcataacttccaatgcaccagctgtagcgagatactgggtttggaggcaagggcgagagcgtctgtgttcggttctcactctaa

SEQ ID NO: 239416 - DNA, 355 bp, Homo sapiens
  chr17:70026538-70026893
  hyper
aagaaaacagtcagctcctgcggcatctgatttgcctcctgccctcgctgctgttaatctgcaacacgccacagcctctagatcgctgccgttcagagtcggatgtcatgggggcgactggcaggggttctttcttctttcggtttgatacatccttccttccgctgctcctcgcaatcaaccgctaggggaaggagggaagcaggcaggagggagagcgggagacttccggaaatccctttcctcccttcccttcacaggttgccccatagtgaccctggagactcccgcctgcccccagtgaaggaattggttactctcccagagccctcccgggcatcgcccccttcctcac

SEQ ID NO: 239417 - DNA, 1581 bp, Homo sapiens
  chr17:70113056-70114637
  hyper
ccgtacccccggggcgccctgctgtgttacagccgcccgacgcccccagacccggccaggtcaccagggcagattggaggttcgcgccccctcacccgacacctcccgtccacctcatctttctttttttcgaaaacaggaaagggaagaaaactgaaacgggcctcttggtctgcagttttagcggagtcgggattccacagccctgagtggcacatgccggtcaacttcccaaagtcgggctcccgtgtggggagaaatacacacgcaggaatgcacaagcatcgcgtgttcgcaactgtcgctgggaggtctggcggctgtgatgggacatgcactcactcgggcaacacgtccacaggtgacatctattcgatcagtcaacagatatttattgcgcacctacgacgctatctggtactttccttttccccttagctgttgctgtccagcccagcgccagtccagagacgggcttaccggccgctcccttccacaagaaactcgtgtccggcgtgaagagcggacgataaacactctccaagcccagcgaaatgtactaattacaggagcggctgggagcccgcgacacggggacctgtccctccagggataggagtcttctacctgcaagggacccggcctggggaactggaatagacaaggggtaaccccttctcccatcacctctaatgagaacattgtccggggctgagatatttgggggacgccgctgctcaccccaccaaactttccctagggacagaaaagcgtccctaccgaaaacggatttaaacaccgtccccacttttgctaaggaagtttggatagggaggttgtggtccttaattcgccaggtaaaaggaaccccatcagctcgcatccctcacccccatcctgagcactgagtgtttgcgagaaactcgccctgcgccagcaactctgggctccggtctcagctcccgcgtagacgcggaggagagattggcggcccccgctggggaaattgagcccggcgccggtccgggacgtgcaagagggggaaagggggagatcccagacctcggtttcccgagggcttccctggggagccactcgcacctctgtgtctccgctcccggcggcagacctcgcggcgcttgctcaagagcgggtatccgaaagcacgtcccgaacacggagaagcgccctccgtctcctgcctcgtgacctgcgccctttccctccctcaccgcatcagatggaggaccctggctcctttcgcccctggcaaaatgctctagccaacactgggtcaacagccttagtttccagatctgtaacctgaacatcaggagcgggttcctttccttctacctgtgtctgaggtcctctggtcggggactgcgcgcgtcttcccaggtcagggaggaggggtcggggcgacctgagaaagacacaacgaagcgaatggagcccctgaatggggaaaggggagtggacaccaggaggcccctgcagaaatgcaggaccgatccactcgcgagctgacaatgccacgcgctagacttggcctgacggtggcaacgcttggcacctggg

SEQ ID NO: 239418 - DNA, 404 bp, Homo sapiens
  chr17:70115369-70115773
  hyper
ctcctaggaaaggacgatgctgttcttacactttctgaaagtaatcacagagccctggatacgaagctattgtatgcaaatctcttaaatttgtaaacgagctatagggcaccagaaacatcccatttgaagaagttacattcgttaaaaaaaaaatgctgttgaacaaggctgtaacttactaccttatgaagagttccatttcctataagaaatgtcgggcttcttccgaagacaacgagagaaaacaagattttaagaaattctcccggaaggacattgatttggatcttgtgatagtgtcctcacttcgcaaattagaaagggaaaaaaaaactagtttttattatgatgtgggccgattcaccacaacaataatttaattgaggcgaatttttgcaaga

SEQ ID NO: 239419 - DNA, 151 bp, Homo sapiens
  chr17:70116068-70116219
  hyper
cccttcaggtgtttcgtaaatgccagcaaaagcaggcaagcagcatgactccgccagagtggagcgttttgtctgcggtggtgcccatttgtttggtcttttacaaaccaagtgaccggcctgggcctcgcggcccgggacagccgcattg

SEQ ID NO: 239420 - DNA, 79 bp, Homo sapiens
  chr17:70116991-70117070
  hyper
cctctcctcccctcccgcctcgtcacccagcccagtgccacaatcctcctccctccccaaaatcgggtccaatcagctg

SEQ ID NO: 239421 - DNA, 930 bp, Homo sapiens
  chr17:70215662-70216592
  hyper
tgctcccagggcagcagacacgctctcccaaaggggcggacacagacgtcctcacaccgcggcccgaccggccgcacattaatccgggtggatttggccatcttgtgacatagccaatcagttcgagggaggggacggcaggaacgcctctcctttcacgccacaaaaggattttcgtcccttgagagcacaatgaaaaaaaaaaaaaaaaaaagccaatcaaggcgggatcagctgtgggctggtcgctgcagatctgtctctcccagaggggggtgggggcacatattggtccgtgtgggaaacccagagcctcagcttctcacacattgttctcctcctcttcaactgcaccccctccccaccagcccggaccctcccctctcccctccccaaagccgttattgccacaaaagatactttccccattgtgccccggacagctgagaggtccgagttagccatacacagctccgcgtcctctccagggagaaaggggatggaccctgcaagtggagagcgggatgcttatcatacaaaggaattaaacccacttgggctctctcgccatccaggactgtggggggttaaatacggttacattttcattaggtgctaatagcagaagggcagccccgggcagcacggaccagacattgttatgaagaacgtccccgacaagggaaggtcagggcaggtggggtgggaggtggggagagggacatgccagcgtcaaagccgggtccagggaaggggggcatgccatgggcgtattgttggcctgcgagttccgtcaatgggaaaagtcatgtttcctccgaaggaaacaagtggaaattgtcggggaggggaagggctggtgggtggctgggaagcagagctcggccagttgctactaaggctgccttcgaactgtccctccccactgcc

SEQ ID NO: 239422 - DNA, 39 bp, Homo sapiens; identical to SEQ ID NO: 204766
  chr17:70553092-70553131
  hyper

SEQ ID NO: 239423 - DNA, 1350 bp, Homo sapiens
  chr17:70587739-70589089
  hyper
tattcagaaagcccgtccacaccctggccaaacgcgtaccagcgtcagcctgacgggtggcccagtcctcgccggaaagctgcttgccaaacgcccccgctcaccccctagccccaacggtgagaggggctcggctgagtcgcgttctccaaccgctgcgccccagcagcgtccccggtcgccagtgggcggacgccaggagctcacggaggcggcaccgctcccgaagtaacggagcccggagggcgcccaggcgttaaggcaagtgcaaggggccgagcgggtgcgccgaggacgcgggggcgtctcccccagctgaggttcggtccctccaggcagccaaggcttggcagcgctagaggctgaaggacaacggccgagaacgcccaggatggggtggtcgctgaccaccgtgtcccaggtgaatcagctccgcttggaggcagggggatgactaaaatgacctccaagaagatgtcaattacaagaacaaaaatttcaacccggaatctcgagaccttcgaaaaacgacgcggaggaaaaaaggaaagaaagaaaagaaagtaaatcagatcccttccccgaaccgcagggaaacttacctccagcttggcgacccagctgttaagcagaacaaatcaatccacggatggagaagaggtcgtgggtcttctgagcccagctgatacacaccaagtaatccacgttaaggggtccgcagccccccacccaattccccactttccatccaaggccaaagagcagccagaccctgtcctctgcgctccagactcgcggaggtcgcgggcgggggtcctcaggcggccgccttctcgtccccaggggtgggcgcgcgacgcgggcagggaccgggcgcccggaggaccaagcgagcgcatcccgcctactcgtgctgggacatcacccagcctggacgccgctcctcgcctttcttccccgcgcatcgccagcgccaaccaaagatccccgccgggaaagcctctctgccaagctggaaagcgctgaaggcggatcgtctctcagacttgggtttgcaggttcacaaggcccgggaggcttacggtgggcgcctgcctaacagagggtccttgcggagaagcgcagaacgacaaatgccagaggcggtgaccgcgtcctctggataccagcgccgcaccgcgcacccgcgccgcctgcgcgccctgcagtcggctgggccattcggcccttatataccaggcggacccgcgccgggacggggcggagcggggtgggcggggagggggtggggaaggccgaacggcttcctgggagtcgtagttcgactacgtagtcctgtcgtagtcagaa

SEQ ID NO: 239424 - DNA, 81 bp, Homo sapiens
  chr17:71088837-71088918
  hyper
tccctcccgcacacgtggccctcccgcctccgggccccgcccccttggccgcaactggcaactcccgcctgaagaatagat

SEQ ID NO: 239425 - DNA, 43 bp, Homo sapiens
  chr17:71128278-71128321
  hyper
attcaagggccagtaaatcccgttcccttttgttttctcctgc

SEQ ID NO: 239426 - DNA, 354 bp, Homo sapiens
  chr17:71160734-71161088
  hyper
cggggctggcccacggtaaacacagctttgctaacttgtttggctaaggaaatcacagaggtcccggtataagtctgggtcaccccggccgccactccagctgcctagaatatatgggtggaagggaatcgactctgtgaaatcagagggaaaatagcgcttgtccttgccatgagtcttgaggagaccgaaaacgcttaaccttttacgcccccgcaggcgggtcccctctctccccgctccccggctgtctgtaagctctgcctgcggccacccgcaggcgtttcagccggtctcacccctgtccttctgcaggacccgggaggaggggttgggggggcggagcgaagccgc

SEQ ID NO: 239427 - DNA, 34 bp, Homo sapiens
  chr17:71161268-71161302
  hyper
ctagcgggagccggcacaagagggtcgaggagcc

SEQ ID NO: 239428 - DNA, 50 bp, Homo sapiens
  chr17:71162382-71162432
  hyper
tgggggctctcgctctagccgcacagagaccaagccgggttctgcaggcc

SEQ ID NO: 239429 - DNA, 127 bp, Homo sapiens
  chr17:71227528-71227655
  hyper
agaacccctaatttaagacccgcgtcccgaggccaggctccctcgggaaggtagcgagtgcatcgcgataaaatctttcctcccgccttcggagtcaaacggccccgcaatccaaacagtttagaat

SEQ ID NO: 239430 - DNA, 253 bp, Homo sapiens
  chr17:71228588-71228841
  hyper
ggggtggcagaagcgctcgcctgttcacagccaacggagggtacggtataaaagtcaagccaggtttcaaataaattcaattatgtcataataatatcatacaagtatttgagttgaatccgtgtaacatattttaaaacaggcggacctatccggcagtggtgcagacggcctgacgaggttccttggccgggggttgggcaggggcctggggggcttccctggggggcttgtcgccggggccgcctgggct

SEQ ID NO: 239431 - DNA, 241 bp, Homo sapiens; identical to SEQ ID NO: 204769
  chr17:71306521-71306762
  hyper

SEQ ID NO: 239432 - DNA, 288 bp, Homo sapiens
  chr17:71307577-71307865
  hyper
cccccctcgcggagatcgcgggccgcgcgccgccgattgctgcgctcctgcccacaccgacacacaccccattcctgggaagggggaggccctttaaaaccggcccccaaccccctcagcggcacccttggccagggccgggagttccagcgtggagagaggaaatggagtcccggcaacgctgcgcccggctccctgccacctcctcctccacacatcccgctctgccaggacactaggtgcgcagcttagggtcccaggcaccgcggtgggcgcggtgaaaagcgc

SEQ ID NO: 239433 - DNA, 522 bp, Homo sapiens
  chr17:71308045-71308567
  hyper
acccgagctctgggccggctgcgctgtccccttcgtgggctccgcgcggcggaggggctggcggcccctgtcagcgccggcgtttgtttccctctggctctcgggctttcagggctgggagcctccaggacactccccttccaggctccgcccgcgcccgccccgcgcaaccctccccgcgcacccctctgcgctgatgtcacggcgccgcagcagccaatggccgtcgggaacctctgcccgactgctcggcctcctcggttcaaactgaaagcctgagactttcccaactccgtatggggcagcctgggcccgcccggcttccgggagacactcccgccccagcctgcgctccggccgcgaacccccactggggcccccagggccaggggcgcgtctccctccgggggcctggcgcgaggctcttttgaggctcttccccattcgagccggggcaagaaaccaagaactccagcccgggtggcgttcctcgttcctgctccctcccggacctgctaacca

SEQ ID NO: 239434 - DNA, 76 bp, Homo sapiens
  chr17:71639537-71639613
  hyper
cggtgggtccgcggctgcacccgcgaccttggctccaggcccgcgcagcgaagcacccccagccccagcggctggc

SEQ ID NO: 239435 - DNA, 1268 bp, Homo sapiens
  chr17:71639913-71641181
  hyper
tcttctctgcctccccaggtcgtccccaccttcccccattcggaagccacaagtctcggagagactgccccacccccaaaagagccccaaaacttgggagatggggtgtcttgaaactccctggagagggctctgccacggctaagccgggtgtccaggaggtcaccgtgaggccggccagctcccgccgcccctcccccgcccactctcccagccccctccctgtccccacgtgggggtccctccttaccttgggctctggccgcgcggatctgatgcagagctagcagtgtccagatcaaaagcccccacatggtgaccagcctggagaggggtcctcggggtctcccttccctccgccctgttttataatcctggtggggtccgataccccgtggcttagtcccaggaaacagtcagtctacgcggctccgtgccccggggtgtaatatgcccgggaggggcagcgcttggctaccccaacccttcctcctcttctgtactagtccgagcccggcagcgcgcccggaaggcgaggggcgagcagggagaaagaggccaggccgccctctcggactagggcgcctctctcccttagcaccccaactccgacttctcccaaacagggcggcctctgcgatccggccgggtcgccggccgagctccggaataaatggacaacttcaggaaacttcctcccgtggccacgttgcccgccccctccccgccccctggttgggttctcccggccgacgcagtcaccgccgttccaggcgccgggcccccgggacccggccagagccgagcgcagtggcagacgcgggtgcgggggttcttttaggggcgccggtttcgggggacgcggtgagcatagcggtccgaatctccctggagctgaagttttcttctctctaactttgcaggcagcatctggcggggccgaaccaccccctctgggctccaccgccctcgcgccgaatcgggagacgccgggtctcctccgggggcgctggggccgggcgcgccctcggctccgcgcccagccggctagcaaactttgcgggtcccggagccgggcgcgcagccctgagcgcccatgtccgcgccagccgcggggcggcgggggagggtgctgggcttcgcgacgcgggctgtcgccggcgcccgggcgcagagcctcctgccggcccgaggatggagaccggcggctctgccctccgccgcgccccggccggagctctcgggaagacgcacggagagcccggcgg

SEQ ID NO: 239436 - DNA, 150 bp, Homo sapiens
  chr17:71641393-71641543
  hyper
ggcggaggcggagacgcggagaggggggccgagcgctaccccgtggccgcgactggagagcagcctgcgcgccgggaggggcggcggcggcggcggcggccccgagccaggcccgggagcgagccccgcagaaatacaatccgactgcgc

SEQ ID NO: 239437 - DNA, 566 bp, Homo sapiens
  chr17:71897914-71898480
  hyper
tatacatcttggttctgcagcgagtggagggaatgaggagggcctttcaagggaggcgggattgcattcgcacctgattacgctgcgcggacacaacagaggcgcccggacccgcagccctgccttcgccgcctttgctgggctgtttgcgcttcgtttccttctcgccgccccatggcgcgctttctctcttctttatttcgccggttctccccgctcctaacctgcttaacaacttacctcgctctcccgcttgctctccccccgccccccatctccactggttcccgagcttctcttcatgtccctaatggcgtggctgcgccagcatttaataaaagctgctgaccgggaaatccgagctaactgaattacttcctcattaaagaggcgggcagattcttgggccccgcgtgcagccaccctcgctgcctccctccccgccccgctccgccctgctggtcccgcctgccgtccgcaattaggcggcagatgcttgccgcccggtggtggcctgggttctgcagggactgagggggctcgtcggcttctctccagggtggatc

SEQ ID NO: 239438 - DNA, 114 bp, Homo sapiens
  chr17:72199626-72199740
  hyper
ggcggagggagggcggcagccaggatggtccattccattcttggagctgcactgttgacttcgaccacaagggggcagggctgctgaaattggaagtgcgaacgcctacatgag

SEQ ID NO: 239439 - DNA, 120 bp, Homo sapiens
  chr17:72209117-72209237
  hyper
gcaaattttctgagtgagacaccttgtcctcactcaggcgtcctgcaggcggcttcagcgagttgttggggcagatgcgccgggagctcccgagggcagggacggcgtcttatttctctt

SEQ ID NO: 239440 - DNA, 51 bp, Homo sapiens
  chr17:72209566-72209617
  hyper
gcagcgggctgcgcgcccagaactgggactgggatcgcggcggggcggggc

SEQ ID NO: 239441 - DNA, 515 bp, Homo sapiens
  chr17:72209873-72210388
  hyper
agaccgcagccacgcgcgccccaagtccccgcactaccccctctcccctcgagagcctgcactttcccacgtgcctctcagaccccttctctccccgcgcagccctttcccgtctcccctctccccttttcccccaccctcccaggcccgtggcccgcgtcccctcctgtctgggaacctgggggccgggaaaactgaagagatcagagtgaagcgagcgtggggaaggggaggaagggcgcaagaccgcctgcggggtgaggggctgaacgctgagcgggcagggcggcgcgggggaggggtaaggacaggggcattcgtctcggggtaatcctggcgcgcgaggtgcggggatgctgaggggtgccccgaagttttcgaccgtctgagattccaagatggggcgctctctttccggggctgagtggcctaggaaagtttggcagaaactgagtagagtctcccgagtcggtcttcgcagcacccctcctccccagccccggcctgcagggtgg

SEQ ID NO: 239442 - DNA, 94 bp, Homo sapiens
  chr17:72322529-72322623
  hyper
gagacccttttagaccctcctccccaccccgctccgtggtctacttcagtcggcctccagcgacagagtcctgtcccctcgccgccaccccact

SEQ ID NO: 239443 - DNA, 678 bp, Homo sapiens
  chr17:72352837-72353515
  hyper
gatgaggtgcaggtgcagggcgttctcaaccaggtactcggagttgcgccgctgcaggtcggcgtgcgccaggaagtcgccggcctcctcgctgctctggtggaagctgtaggcgtggcggaccagcaggcggccctgctggcgcgcccccaccagcaccgtcttctggaagctcacgcccgccgcgtcgccgccgctgctggccggcgtcaccaccagccgcggtcggccgtcctccgggcgcgcggcgggcagagcagtgcccgcggcgtccgcgtaaacgggccgcaggctgacgggcagccagcgcggcgagaagagcacgttccaggtgacccggcggcccgcgtcgtggccactcgggcccagctgcgtctggaagctggtgctgcggtcgtcgcgggccgggttgttgatgacccacggggcgccccaggcgggcgcgaggtagttgcggggcaggaaggcgctgccgttgacgtcgaagaacttggcgtagtgcagcggcgacgcggcgtggaactggtaggcctgcagcaggaggtcggccaccgcggggccgtggcgcgccagggctgccgagcgcgcctgcagctggaacagctgtgccggtgggatcatggggtagcgtatggcgcgcagcgcccgctcggccacggcagggggcggccgcgcgcg

SEQ ID NO: 239444 - DNA, 1926 bp, Homo sapiens
  chr17:72427016-72428942
  hyper
cctcccctccccctcgcgggcgctcagggttgagcaaacactccgggccgcccgccccgccaccagctggctccgaccggcgcaccgctggcgatcccccaggcaattcggcgtcatgagaaccggcaccccgagactcggcgccctgccctccctccgcgtctccagggccctggccaggcccaacaacctctccctcctctgtgcgcctcagcccctacgggcctctggcgcgggctaactaggcctcgctgcgggcccccaggactgcgcaccccaccccccgcgaggccagcagccccgggggaaggcggccggaaaatctcttgtttatcgggctggataagtaccagcctggattcgcttcccaatttctgcggtccagcttcagcagattcctggggccggaggggaaagggtggcaacccacagatccaccccggaacagggagtggggggtggggctggtgggaacctgacctcctggaaaggacggactcggagtcagagccaacgtgtcccggagcgcagaggcccagggggtcgcgctaaacactgtacctcggggaacaaaaccgtgaaggctaattaggacaagtcggagcagggaacggggacgccgggaggggagagcgcgctccgagttgggcagaacctggaacggtcacaggaaacccgggcgcggggtagtcgggccgagggggacctttgcccacggtccagagtggtctggactcggcccacgcgtgagaggagcgcttggtgacgatcccacgtacgcttggtgactggtggaggtcccagagaaggaccgtgcgtgcaaaaggcgaacctcggtgtgcggtgtgtccacgtgtgcaagctggggaggggagggggcgcagaaggcgtgacaaagacggactctgtcttgagtgtgcgcctcgctccggcccgctcccagcgaactgtgcctgaagtgtgtctcacgggagggccaggacgaaggtgacaaaggctaggtgtcccccacggagacgcgccaaggtagccccgcgcgtgtccgtaggcgcgctctctggaagacgcggtggggggtgcgcagggctgcaccctcacaccaattgccccggcgaaggccgagcccagaaagtgagtgcgcgtgagtgtgcgcgcgcccgcatgcgggggcgtggcagtcaacagcaacaacccacacgccggcagggccagaaactcccatctccctcaccagccggaaagtacgagtcggctcagcctggaggtgagtcggggcggggagggccgggcaggctttgttcctgtgtaaacggagcgcacgtacctggagcgcggcgggcgcccgattagcgccctgaatggaggtgatgtaacggtgatgcaggctccagcccaccctcgccgaaagcaaggagccctgcctggggacaggcccgcgcgagagcgagcaacccagcgcgcctggctcagcctcggtcccagggagaggcaggccctgcgtcccggcccgggccccgccatcccagccaggaccgggcctggcccagcgccccgcgccgcgtccctcccacccccgcccgccccccgcctggggctggagttggccccaaacgctgcgctggagcggggccggcggcgagtcccaggtaagggctgctgccttcccgctccgccgcccggaagagtcgggtcgggacggcggggagtgggcgagggcagaggcggggggactggacatcctgcgggctggggacgccgcgccaactccgctcggtcgctgaaagttttcaaacccgagccggctggggactgggggggtgggggagcccggcgctgcggctcgggctggagggaggggaaaccactccataatcggggtctccaagaggagcccctccaccgcctgcctctcggtgggagtccgcg

SEQ ID NO: 239445 - DNA, 168 bp, Homo sapiens
  chr17:72449939-72450107
  hyper
ttcacctaaaggcaacggtggcttgcctcacccccaactccaccgacggcaggagagggtccgcgggggcccgggcccagggaaggttttacgctccgtccttaacccagcgtcctaacctgacccggctgggagagggggcggggccccggaaccccacccgcagac

SEQ ID NO: 239446 - DNA, 260 bp, Homo sapiens
  chr17:72450407-72450667
  hyper
gggcctcgcagccgctagggattgcgggggccgcatttatccctgtgtctctcaggccccgcagagacgggggtggggtgggtgacgccagggaagcaggccccttttcccaagggaagaatccccttccggaggcccgccgggccatggagtttccgcgggtggaggtagtgaggccaagggcacggggagccctgtcgctgccttacgtctggctctaggccggggttcctcggctccaccagcgacatttgtggccg

SEQ ID NO: 239447 - DNA, 432 bp, Homo sapiens
  chr17:72667264-72667696
  hyper
gtgacggagatgcccgttcgctcgggatcaggaacggtgagctcctgggaccgcaatgccctgagaacgcagccgggtgctgagcctccggagtccggtagctgaatgaaatacgcagggatcaccagccggacccaaatcttgcgtccctgccagcatcctggagtcctaagaggcagggattggagcggacaggatctcagaactctggtcccgggcgcacaacggcggagtcgctgttcctggtgctgaaacgctcagtcctggaagaacgtggccgcctgcccgcctggtaccgcgccgcggccgctgcggggaactgtccagtgctgaaaacggatgcggcccggcccgcagagctcagacccaagcctgccgcacccagcggagctcgaaccgagctcctggaagcgctgacgcagagcgcaggga

SEQ ID NO: 239448 - DNA, 300 bp, Homo sapiens
  chr17:72732898-72733198
  hyper
attcagatgagctcgggccgggtgacttaacagatgaggaagtgtctcggggccatcggcggaggcgcagcccaggggtccccagctccccgcctcgccacctggggacagcccacggcccggggctcgggcgccgcctgctgtcgcggtgcgcagcgactacgggaactcttccgcagcagacggggtccccgcggcccgctcccccaggggcaagcaagcgaccacaggggaccggtcccggggctggatgtggctcatgtccgaagcgcacggagccgagccggtgttgctcaggga

SEQ ID NO: 239449 - DNA, 532 bp, Homo sapiens
  chr17:72733408-72733940
  hyper
gacatgacgggcacgccaggcgccgttgccacccgggatggcgaggcccccgagcgctccccgccctgcagtccgagctacgacctcacgggcaaggtgggtgggcctcttccgtgagacccccgccctcctcggcgctagccccttcctggctgcgtctgggttggactcagcccttcccccaggcagctgcgtctcccagaggagggagggagagagggtcaggacacagcctctggggccgtcccaagctctaggtgtctctgctggcttggtgggggcgggtcgcggaagatcgcaaaaactgagtgatccccccgccggccccaactcagttctcttctgccacactctggcaaatatgagcccccgggagcccatgcttcttggtgagggttaagcgcgcaactctcggggctcaggctgggaagggctgggagatggggaccgaacggagactcggagaggacgtcccctgctggcagaggaactggcgttaatgccattttccgagctaagctcttagttgaga

SEQ ID NO: 239450 - DNA, 1689 bp, Homo sapiens
  chr17:72855929-72857618
  hyper
atcaggctccccccgcgggaggagggggcgcgagcagcgagagccaccgtcacccgcggctcaaggacactcgcgatgcggcggcggcggcggcggcggcggctccgggcggggacccgcgccacgcctcctggcggccaagctgagcaccacgcacccggcgccccccgccccacgctgccccccgccggcgtccgcggctccggggcccccacccccactcccccaagctgggtcgtgaccccgagtcccgcagtggggggaccaagccagcctggcaggcggccccagtaccatcccaggcccgcccgggggccctgggcgaacccaggtgtcccggacctgcctacctgcccctggcacgctcttattcttcgggagtttagaaacaggctcaaagtcactagcaccgccaagacctggacgggctctgaaatacagccagcggaatggtaccctccccaaataagtgtctttcctcgattttcctgtggcccggggtcagggactgaactaagataacgccaccatccgagggctgggggaccgagccagaagtccccttggacgaccagggctgggaaaccgagtggacgaatggggtgggcatcagggcctggcgggaattcccgtcttgctcacccagcagctccttgcagggtcgcgggacgcacctgggggttcaggttgccgggtgcctttgctccgcgtgtccccgccctgcccgcgtaggcaggaaacaggagactcggggcttcccctccccgccgtcggggatcctgggcgaagcccccagagaccggcgcaggcggctggtgcgcagccagggcccagcgccaggtcttgctcgcccagtgccctctctgcctacccttccctttgcgctctggaagcccgggagccgggcacgggccagcatctgcaagatgccactactctggaagcccactccgattctcccaggtcgcaggaaggagagagctaggctggggcaaaggagatggggcagagctggaaggggaagaagcgggactcgcggcgggggaaggggtctgggcgccgaggcgagtgcgcagcaggtgcccagcagacctagggaaactggggcactgggctggggagccgcacagccccctttcaccttctcgactcctttccaacccctcgctctggtggatcccagccccggcccccactcccggccctgttccccgctctccgccccggcggcttccagcagcaacagtttgggtccgcggcagcccagactcccctggtcccgcggtgctgccgcgccaagcgaaggaggaggagggctcggcgaccctggggacgaacgtcttggacgcttcgcccgcgtccttctctcgcgtccgccgcgcgcctgtctgctcggcctcttcttcgccttctctccggccgcccgggtcaaaacccaaggccaggttcttgagggtccgggtcctccagccgccccctccttgagccccgagagtcctgcgtgggtccaaccccccgggtgtcccgcctctgtctccgccgtccttgctcgcgcgccgcgggaacccagccccaagttggcggcgaagttggtgcccctcgcccgccgctcgccacttaccgaggggaaggggcgctgcgcccgcgacgagagcccgcgccggccgcctccctcgcggtgtctgtccc

SEQ ID NO: 239451 - DNA, 666 bp, Homo sapiens
  chr17:72889397-72890063
  hyper
aggctgcactcccacggctgctgttgcagaccccgcgccgccacctccgccgcaccccgcccccacccgcagcccggccgggacgccgggtccccgcgttcctcacctgccggcaaggcgaagaggctgagcgcgaggatggcgcagtccacgccgtggcgctcccaccaggagctcgtcctcaccacgtcctgcaccagcacctccagctcccgcagcagcgcctcgcccccacggtgcgcgctccgcgccggttccatgggctccgtaggttccatgggctccgtgggttccatggactctgtgggctcgggcccgacgcgcacggaggactggaggactggggcgtgtgtctgcggtgcaggcgaggcggggcgggccggggcggagtcacgcgccgcctggggacacccgcccccggggtcaaggtgcgagacaccctggctcctctgctgcgggcgctggcgacccaggcccggctcaggcgcgcgaccctggcaggcggcatcagaaccgccgcggagggaggagccaggccgatgagctgagagtggctaggcggggaggcgaccctgcggtgagacccagcccaggtagtagggacggaggcgtcaggggcacggagaccccagtggagacaccccccacccccgccccgccccgagg

SEQ ID NO: 239452 - DNA, 102 bp, Homo sapiens
  chr17:72919304-72919406
  hyper
cagacggagggtgcggagcgccagagccgcgactaccaagacatctgaaacgctcacccgggggcgggggcggagggggcgggggacgaaatctcccgctgt

SEQ ID NO: 239453 - DNA, 56 bp, Homo sapiens
  chr17:72920264-72920320
  hyper
tggatcatgtgagcgggactgagagctttatggagccaaactcccgcagctgtaaa

SEQ ID NO: 239454 - DNA, 181 bp, Homo sapiens
  chr17:72920500-72920681
  hyper
cgcttctcctttcttcccatccagcgagaggggcaggttccgcattttctcttcccctttcccagcgcttcctccagcacccgaagccccaaccctgcgggtcaggaactccctagtccccaagtctagggatgagatgggggaaggagagccgtcagggttgacctggagttttgtccgc

SEQ ID NO: 239455 - DNA, 784 bp, Homo sapiens
  chr17:72931819-72932603
  hyper
gcaccctctgggtccgagcccccgggagggtaattaacgagggattaatgagatttccaaagtcaacagaaaaatcgatgggccgcggagcccgagcggcggctgcgcagtcccgctgggggagggcgtcgcgggcatcggtctcacctggacggacgatccgctcagcgcccgcagtcggtggttagcccacggcgatgcctctcccggcctcaggtaagcccggagcgccggcggaactttcccagcttgcgcaccccagacactggcacatactacccacccccccaaaaggggggttcacaagtaggggctgcagggattggaacgggaaagcggggtgactgtggagaggtgaactccctttaatctgaggccggcccctccacccgccccgcaacccgcgctccgcgcccctactcctttccgtggacccggggagcacagagggcctcagggcgcgactcctcccggccgggtccacacagcagaaagcgcggaggcctggggtgtgaggttggttggggctgtctggacgcccggtctggggcacgcaggaagcggctgccccggccccgcagtccctaaaatggctcggaaggaaatcccgagggcgcccgcactcagcagcctcctcggagccggccctgcgctgctgggccgggcgccgggcccgacggctccgcggctttcatcgccaatccagccgagacccacaaaccagtccagtgtcccggccctcccttggactggcgtcgcgcccaggggcgtgccagggggcggc

SEQ ID NO: 239456 - DNA, 183 bp, Homo sapiens
  chr17:72968521-72968704
  hyper
ttccaggtacaggccgcggggtcccgttccggcgctggccttggcgttacgctcggggcccgcccgtccccccatctcccgacgagccaagttcgcgtacccccggccctgcccagcccccagcccggcaggtggatggggacgccggggcccccgtggcgcacctgcgtcttggtggtgagc

SEQ ID NO: 239457 - DNA, 127 bp, Homo sapiens; identical to SEQ ID NO: 204782
  chr17:72968954-72969081
  hyper

SEQ ID NO: 239458 - DNA, 386 bp, Homo sapiens
  chr17:72984124-72984510
  hyper
ccgcccgcggggccatgcggagagccgccgggatggaggacttctccgcggaggaagaggagtcctggtacgaccagcaggacctggagcagggtgagcgcgggggcgaccgggacaggaaggcggggagcgcccggtgacccctgtccgcttctccattgttgggcgctatcaccccgggaggggctgggctggaccgggcgcgcccgactcggaggagggacgcgtctggagaaccgggacgtggagagagggggcgctgccggagaagacgcggaccggacgggcggagacctgcaaaagtggggggcggggggcggtcttcctattttcccagacgaccgggcatccgtcatccagctcgcccaccccgtcctggaggcagc

SEQ ID NO: 239459 - DNA, 116 bp, Homo sapiens; identical to SEQ ID NO: 54574
  chr17:73008759-73008875
  hyper

SEQ ID NO: 239460 - DNA, 99 bp, Homo sapiens
  chr17:73009128-73009227
  hyper
gtgctcgctgtagcgcgagatgtgcaggagcccggaaggccggctgggtatgcttctttcaaggctgccagcttttctacgttcgtgtccttggccctc

SEQ ID NO: 239461 - DNA, 1419 bp, Homo sapiens
  chr17:73029789-73031208
  hyper
gggcgtcccagtgccgggggctgggggctggtgctcgctaagtaaggatgggggcaggtccctgcgcaccgcggtatcttcccgcccgctcaccaaaagtgcgcgcggcagggacggacccactccatggatcgcgcctctgtcaggccttctctaggaaaaggggacactcgcttatgaggggaagggatggcacggccacgtgccccaagccccagtggcctaatggataaggcactggcctcctaagccagggattgtgggttcgagtcccacctggggtagaggtgaaagttccttttacggaattttttatttcttttctcttcccttctcagggatgctggaatcgaccttggtctctagttcgactcccgtgcaacgtgttgaggaggagccacctcctccaagcgcctaaagccggtaagctcgggtcttgccaagcccttgaatgaacagctttcgtccgggtagggccccacaatttcgaagctggggaaactcgtaagaataaagttgcccaaagggttcccaggacaccccagctccacctggcggggcagccccggagaaccagaggtaaatgaccaccgcgactgcaaacagagggtcctgcaagagaaggcgaggggcgcaaacagggcagaggcaagcaggtagcgggcaggtggtggtggattctgaggtctctggctgccggcaccaaaagaaaccttgcgagcacagcccctctcgacaccccaggtgggactcgaacccacaatccctggcttaggaggccagtgccttatccattaggccactggggcgcggtaagacgctaaacccacgtgctccttgataggtgttcaaccatagtgcccaaacacggccctgctgtgggtcaccgcgctccaagcctgagaagccatggggacgacaggatgaaccgctggctgggcgcggcgtccccaccgggctacacaagagctccatgcggtgacgacgcgcggggaccaggagcccgcggtgccctgtaaccccgagaagaagtgctcggcgagcgcagaggccggtggagcatagctgggaggaatagggatggacgagggcggagggaagaacaaaccctcaaactatgctgggattcgggcaagggctgctcgctccaaaagagcccgaccacaaaggaaccctcaatcttatgatctgacgtcagacgcctcatcccttaggccacgcggtcgcaattcccagggaggctcagagactagtccaggtgccgctccgctcgggggtgactaggcgggcggctggggccagaggaagggtgagcgcttcgctcaacaggcggccagggtgcgagcagtgaagctgcggcacgccggagcgtttaatggccatcaaattggcctctctaggaggtagctgcagccggag

SEQ ID NO: 239462 - DNA, 81 bp, Homo sapiens; identical to SEQ ID NO: 204786
  chr17:73043061-73043142
  hyper

SEQ ID NO: 239463 - DNA, 123 bp, Homo sapiens
  chr17:73073461-73073584
  hyper
ggccgccactaggacgggaggtggaggtgtccaactcgtgggtgtgcctgggcgtcacctacccccgcagctccccgctcggcggccgcccgagccgcagcgtggtctacctgctgggccgca

SEQ ID NO: 239464 - DNA, 82 bp, Homo sapiens
  chr17:73105914-73105996
  hyper
cagcgaagccgctcgccgctggttccagcacaggctaaagagcttcggcatccagaaaaccagaagcgcgccgcgcacgcgc

SEQ ID NO: 239465 - DNA, 232 bp, Homo sapiens
  chr17:73127281-73127513
  hyper
aggtcgttcatctcccgcacagcgtccaaggctcccgggatgggctccaggtccaggaaaaagcccggggcttcgtacacactggccactttatcctgaaagacaagagttctgggtcccggcttcccgttcccgcgaggacccgcagggaggctcctgggggctccgggcccgagctcagaggggcggagggggcgtcggtcaggggcacgcgcccaaaggctcctcccca

SEQ ID NO: 239466 - DNA, 252 bp, Homo sapiens
  chr17:73127892-73128144
  hyper
gctgatttgcatagagtgtccgggccgccccgcccaggtcgtaaaccagtgccgacggccctgcggttgcgcgaggccatcctagggttcgggtgcagggacggctttggggggcacttttctgaccctgcgcttcttcgggacccagcctttgtccccatcagccgcctcccactttacggcagacgtacccccgttcaccccacgttactagtaggggaccgaccttccgggggcccaacaaagggatgc

SEQ ID NO: 239467 - DNA, 248 bp, Homo sapiens
  chr17:73150719-73150967
  hyper
gccaagcaccatgcggcattacgatgggctgtggcggccacggctcagcctaagcccgcccccttcctggactgggaaggccttgggactctctcccctcccccaccccaaaatctcggcgatgattggacggaaggcgaatctacctcgcgctgggtggaagtcgtgctggctgtcactgtaaaacgttacctgacagagggggaagctctttcttggggagttacaacctcggcaagcagaaggga

SEQ ID NO: 239468 - DNA, 92 bp, Homo sapiens
  chr17:73201313-73201405
  hyper
tccagcacaagcccgtttgactgtcggggtttggacaagtggctgcgacgacactaaggtggagaccgggatgtagcgaggactcccagagt

SEQ ID NO: 239469 - DNA, 296 bp, Homo sapiens
  chr17:73257643-73257939
  hyper
ggctttccccttccgcctccgccatattgcagccgcccggccccgcggcttcaaaactcgcgagagtctgcacgagctgagacggggcggggcctgcatggggtcctgagaggagtgagtgccgtcaccgagggccgcgccagactgcgacggatacagggagggcaagggtttccttttggcgctcccctttggaccccggagtgaaaaactctaacgtccagatcagtggagagaaacgcagatttaggaccctgaggagtctttttcacccgtttcccgtcactcgctcaggc

SEQ ID NO: 239470 - DNA, 80 bp, Homo sapiens
  chr17:73401911-73401991
  hyper
cgccagacctccccgcagcaggtggcctccgcacggctccgcccccgggtcgccgtaaccctctcggtgccagagcgggt

SEQ ID NO: 239471 - DNA, 236 bp, Homo sapiens
  chr17:73452534-73452770
  hyper
cggccgcatcactcggcacctaattccgccaggctcccagaggggcggttgcagctacagcctagcacgccgcgtagccaataagaagccagaattccccctattctcaaatcctgaccaatcggtggcctgaactttagctctctggccggcgcctctgttgcccggaagggaggcaagcccccttagagttgccagtaacggacatggctgcggcccccggaggaggggacgtg

SEQ ID NO: 239472 - DNA, 33 bp, Homo sapiens; identical to SEQ ID NO: 204792
  chr17:73521010-73521043
  hyper

SEQ ID NO: 239473 - DNA, 98 bp, Homo sapiens
  chr17:73522040-73522138
  hyper
tcgcccctgtccgcgtcgctgtgctggcctggaagagagacacctgtagaaagttctgcgggaaacttctctgcctgatctgcgcgatgactgaaact

SEQ ID NO: 239474 - DNA, 170 bp, Homo sapiens
  chr17:73522383-73522553
  hyper
gtgcctcctaatccccggacgcaggaagcccgcgggagggacttcggtctccggcctttctccagctggggcggctttggacaccttcacatgacagtgcggagacccagtctgccctccatgctgacgggcggggtttgcgctgtgggatttggcgagaagtggaaaat

SEQ ID NO: 239475 - DNA, 245 bp, Homo sapiens
  chr17:73663127-73663372
  hyper
accggccgtggtccgcccaagaattaaaggctgctggctggttccggaactgttcgaagacccctatacacaaccccaactcagagaagccaaagcgctgggaattcagctttaggcagaacccacgcaatcttatatccgtcgcgcagtgatgacgtagcgcgagcgctggcatgagggcggagccaggcgcaggaaactgccgttttgattggtttccagtgtggcgcgggggtctcctggga

SEQ ID NO: 239476 - DNA, 300 bp, Homo sapiens
  chr17:73749756-73750056
  hyper
cctcgcagagcctacggccttcccccgcctggccctgctcggcccggcgccccccggcggtgccaacgcggcccttcgttgttcccaaggctgcggctggaagttcgagcccctgctgggggaggagctggacctgcggcgcgtcacgtggcggctgcccccggagctcatcccgcgcctgtcggccagcagcgggcgctcctccgacgccgaggcgccccacgggcccccggacgacggcggcgcgggcgggaagggcggcagcctgccccgcagtgcgacacccgggccccccggagg

SEQ ID NO: 239477 - DNA, 121 bp, Homo sapiens; identical to SEQ ID NO: 204796
  chr17:73781201-73781322
  hyper

SEQ ID NO: 239478 - DNA, 35 bp, Homo sapiens
  chr17:73851964-73851999
  hyper
cgcggtgggctggcggcgtcggatcaccccgccat

SEQ ID NO: 239479 - DNA, 38 bp, Homo sapiens
  chr17:73937163-73937201
  hyper
cgcagtcggcggtcgactcacccgccctcacagaggag

SEQ ID NO: 239480 - DNA, 201 bp, Homo sapiens
  chr17:73993431-73993632
  hyper
acccccctccccggcgccaccacagctagtccagaaattcccctgcctcacaagaacccacttcctctcctcccctgtccctcccggcttattgctttatgagccagctagaatcgaggccacaggcagccgttcttcctcctaccatcagacactgaaacggccaccgaccatcagacactgaaacggccaccgttagct

SEQ ID NO: 239481 - DNA, 162 bp, Homo sapiens
  chr17:74068653-74068815
  hyper
gctgatgggatagcggcggactccgccgccgtcggcccttgctgcagcagggcgccatgtgctggagcgcgcctgcgcgagggatcctgtcatcccgggtccggaattgtggctggctaggtggggacttgaggccgcagtgagaccgtggctgctgagatc

SEQ ID NO: 239482 - DNA, 805 bp, Homo sapiens
  chr17:74070955-74071760
  hyper
agcggcaccatgaacgtctcgggctgcccaggggccgggaacgcgagccaggcgggcggcgggggaggctggcaccccgaggcggtcatcgtgcccctgctcttcgcgctcatcttcctcgtgggcaccgtgggcaacacgctggtgctggcggtgctgctgcgcggcggccaggcggtcagcactaccaacctgttcatccttaacctgggcgtggccgacctgtgtttcatcctgtgctgcgtgcccttccaggccaccatctacaccctggacggctgggtgttcggctcgctgctgtgcaaggcggtgcacttcctcatcttcctcaccatgcacgccagcagcttcacgctggccgccgtctccctggacaggtgagccagcgccttggcctccctgggagatgggcatccacgcgggggatggagcgggaggcgggactggggaccaagaagggacgcgcagagtgggacaggacactaagaaggcagtggaagacaagcgggcgcggaggaggaaaaagaggaataagaatgggggaccgtggtgtccctcggttagatgcgtcctggggcctggaagcctggagaatgtggctctccagcgccgcccgtgcctgacaacgcgcagcgtttcccagtacgacgcgtttgtgcgcgttcatctcgcttgagcttaatgccctccgtgagggtgggataggacaaagtgcccaatatacagaagagttgagttcctaagtaactcgctcagagtcgccagccagggatcgggtgcgtgaagtgaccgtctgtctcctgca

SEQ ID NO: 239483 - DNA, 98 bp, Homo sapiens
  chr17:74072427-74072525
  hyper
gagactgtggttgcagtccccgggggcagcgggagaatggcttgaaggcacacctttcctgctgccgggcccgccccatttccaggctccgctgagtg

SEQ ID NO: 239484 - DNA, 164 bp, Homo sapiens
  chr17:74073425-74073589
  hyper
cagccatgcatcctcgagccctgtcctggcccgtcctggcagggcccaaaggcaggcgacagcatcctgacggttgatgtggcctgaaagcacttagcgggcgcgctgggatgtcacagagttggagtcattgttgggggaccgtggggagagctttgcctgtt

SEQ ID NO: 239485 - DNA, 414 bp, Homo sapiens
  chr17:74136579-74136993
  hyper
gcctcccggacgcgcgcttccatctcgcgaccccgggggcgcctcctccgaataagtatgtggtgcctgcgaggaccacggtgggagctgagcactaccccacccccgaggggacagtgtgtgtacggggacgccctctctaacatcatccccgcagctggggaggatcttttagtgccgaggtatgggaaacagaagcaaggccctggggtcccacccccatcagatctgcctccctcttcctttcctcttcgaggttttattagccaaatgaagagggtaggggcatccgaggctatccttttctcccgaagagcaggaaatcaggacccccttcctcctcgcaacaaatggaagtggggcgagaagtttgggagggcggtacgacggggcgggggcggtggaggtcctctg

SEQ ID NO: 239486 - DNA, 150 bp, Homo sapiens
  chr17:74137385-74137535
  hyper
catggcgacgctccgcccccataaacagcttccgcctctgccattggccagcacgtctccaaggagaccgcgggcacttgccactctccctggcggcaactctcttcgaactccctccttctgccgccctctcccgcgccacccaacccc

SEQ ID NO: 239487 - DNA, 762 bp, Homo sapiens
  chr17:74236187-74236949
  hyper
cctgcccctctccctcctcgcggctgcggcgcccgcccgccctcaccggacttgggcgggtagcggtacacggaattagacgggatgtccacctcctccacgcccgcgtgctgccggctcgtcagggcccccatggccgctgcggctgcagccccggcccggccccggtgcccgcgccgccctccgcgcttcaccgcggccgcccgccccgcgcccggtgcgggggccgactgcccgccgcggccggctccgctgcggcgctgcggctctggcggcggggagcccccggcgcgccgcgcaccatcctccgccgggcaccgcggcggcgcctctgccaagggggctgcgggtctgggccgggggcgccgccgccgcctcaggccgcgtgatgtcagcggccgctccgcgcggggaccgcggcggccccagccaatggcgaggcggggcgggagcgcccgcgccggagcagccaatgagcgcgggactgcagcaggagccggcggcgcgtgcctcgcgcggggagccgcggctggactcggcgcgcgtggacgcggcccagggcctcgcggcgggggcgtgggcgtgggcggggactcgcgacggggacgggggcgcggccgggtgcccgcggcggggcggggcgggaccggccggagctgggaccccaggagacgagcgctgcacccggccgggacgcgtcgcccctccgcgcctgtttatcccggctcggattaccgcgcagggagccgccccctcccgcgg

SEQ ID NO: 239488 - DNA, 150 bp, Homo sapiens
  chr17:74261114-74261264
  hyper
gccaatcagagtgcgcggccccgccccgaacgcccggccgtgaccaaccacgaggccggatgagccaaaacacagcggccggccaatgctggggagccccacggcgccgagctccgccaatgggcgcggccgggcgaaaagagaaacagt

SEQ ID NO: 239489 - DNA, 141 bp, Homo sapiens
  chr17:74350254-74350395
  hyper
ccgaggaggtatacgatctagctctgcatgtctatggtagcacagcgcccgccccacgaggcgcgtgcgccggccggagattaatttgaaaagtagagggcgggggttctttccagctggttgaccgcagtactgaagcgg

SEQ ID NO: 239490 - DNA, 172 bp, Homo sapiens
  chr17:74379765-74379937
  hyper
ctcgaggtgctcgcggacacgttctgtggcttgccgcgataagtgtatcacaaacacactgacaaacgcgtccctactggcctccaaagaagtgacaacttctgagcgcgtttccggcgccccttcttcacgctgagccagagggggcggggggcacgtaccacatgcttgg

SEQ ID NO: 239491 - DNA, 176 bp, Homo sapiens; identical to SEQ ID NO: 129394
  chr17:74381119-74381295
  hyper

SEQ ID NO: 239492 - DNA, 261 bp, Homo sapiens
  chr17:74381538-74381799
  hyper
cgccgcagggaatgacgccggtgctcctgcagccacggctccgggcggggaaggcgagccccacagccggccctgcgacgcccgcctgggcagcaccgataaggagctgaaggcaggagccgccgccacgggcagcgcccccacagcgccagggaccccctggcagcgggagccgcgggtcgaggttatggatccaggtttgtggggttcctgctgggaagggctgtagggggattcctgttcctcgccaggaatgatgga

SEQ ID NO: 239493 - DNA, 322 bp, Homo sapiens
  chr17:74581425-74581747
  hyper
cttcggggacccagccagatttcgacaatagaaagtgtacttatcaggccggggaggacttcaccaacaaggggcaccggggcgggtcgccagtgcacaggggcgaggtcttccttggacccaggcaaaggccgcggggtccgggcagcgcgaggtcaaggctgggagagggttctggcgacaaagggccgcggccgagtcctcgctgagagctgccccagaggggtccacgcggaggttgggctgagggctgcgggccgccggggagccctgggctggggaccctccccgcgccctggtcgcccctgcgccctcccgctct

SEQ ID NO: 239494 - DNA, 170 bp, Homo sapiens
  chr17:74620091-74620261
  hyper
aagtaaggagcctggggtgccgcggaggacagggcgccgcgagcagggcgccgagctgccgccacctgccgcccggagctggcactgcacccttttagtgcaaagcaaatccctgtcccattggtcccctccttccctaaccatgaaatctaaagcgaagctcccctctc

SEQ ID NO: 239495 - DNA, 47 bp, Homo sapiens
  chr17:74707239-74707286
  hyper
gccaacccctgcccggcctgggcagccttgacgctttggggcacaat

SEQ ID NO: 239496 - DNA, 77 bp, Homo sapiens
  chr17:74722035-74722112
  hyper
ggaagttgactctcgtctggctcctccggggtgggggcagggcgcgtgcgtgaggccacgtcgttcctagagccacc

SEQ ID NO: 239497 - DNA, 51 bp, Homo sapiens
  chr17:74733646-74733697
  hyper
gaaacgctttttccgcctgggaggccggacgatcgcgattgggcaggagga

SEQ ID NO: 239498 - DNA, 189 bp, Homo sapiens
  chr17:74734106-74734295
  hyper
gcgccggctgctgcggctggcacttggccctttaatccccttcgtgggcccctcaacctggagcggataaattcttggcgcttctccgggggttgtgctcttccgtactcggatcgcttcttaggagtatcctaactgccggtggggagaacttcgccctaaacctggggttccgatccaggaactgga

SEQ ID NO: 239499 - DNA, 993 bp, Homo sapiens
  chr17:74865180-74866173
  hyper
taaagttccctcctggttggttttttccccaggggggcgccgggtggaggtgggcgaggtcggttcctgcgaacgttcaagtcctggtggcagagggggcggttcacacttcaacccctggtgatgaccagtggggctgggctgggggaacggatggcgttggggttcggggtgcggatggggagggttgtgttattcggggacctgtcccgagttgggcagggttggagaggactcggggtgcagaggtaagaatgggggcagaaaacccccaggtcgtggtcctgggcccagaaagttgccccagcctgcgcgccccttcccagcccctcagggtccttcctcaccccgcggacggtcccatccgggtggcaaagttagtgtgcggcgccttggagctccccctccggtccctcccgtcccgcccgtctgcccctaggtcggctaccccccaacccctccgcctgtgccaccctctccccagcctttggtggcactgctctcctccccgcggggctcgggcctggctccgacgagagggtcccgagattagagcgaggactcgctcatcccaggattcgcccccgatcgcaggcgtcggagaggcgggggcaggggcggcgctgcagggctacggggcggctggagccgaggctgcggcggagcgtggtgggcgggcggtggcgaaggcgacacgcttcgggcggccaacacctgggggcccaggccaggcagggctggggccgcgcgggactcactggacccagccaggggcccccagggcccagcggtgccggggcagccccctctcctcccaggcatccgcggaaccggcccgcagcggggtggggagggggcgctgcccagtggacgcccggcggggcccgagtgtcaccccgtgggtagctgggcagcgaggaagctgggggagtgaccgccccggcgcgggggccggactcgggacgtggccacaggtgggctccgggcgcggga

SEQ ID NO: 239500 - DNA, 90 bp, Homo sapiens
  chr17:74866203-74866293
  hyper
ccctgaactcttgccctccaggtctcggcccagccccactgtggtccccctgccggctccagacggggatgggggcggggagacggtggc

SEQ ID NO: 239501 - DNA, 598 bp, Homo sapiens
  chr17:74965155-74965753
  hyper
ccgcagccggcctcggctgtttaccaggcacccgttacgctaattgaaatgtgccaaatagctgcccggggcggggccgagcggagcagcgggctccgggtcacctgcggtgttgatgaggtattcaagaggaaaaagcgccggagcggcagcttcatttgcaagggaaatgacttgacgaggcccttcatttgcatctttcggcccagaggttctgattagctgcggaggaaaagcccgcctgttttatgcatgaggagctctgcctggagaccctcggctgctcacccgccccagccctgccttctcctcctaagtcggggaggaggagaggggtccccagagggcaggatccaaggctgaagcctaagaccaacccttggtggtgaaaatagaaatttcttgaggcaaggctgccataaagtgcagtgagactcatcggtgaggggggcactgtgcgatctccatccggggtcttcagggcaattgcatgagctcagcctgctaagagcctggcaggcagcgcgagctcccctggagttccggccgctccgcccagtggctctgtgcagcgcttcccgcccggagaacctagtgc

SEQ ID NO: 239502 - DNA, 113 bp, Homo sapiens; identical to SEQ ID NO: 204808
  chr17:75082778-75082891
  hyper

SEQ ID NO: 239503 - DNA, 169 bp, Homo sapiens
  chr17:75368668-75368837
  hyper
ttattgtggaggaagggaggcgtcgcccgtccctggcttctctgacagccgtgttccatccccgccctgtgccccttctcccggacagtgccttctccagggctcacccaggagggtgcagcggtggcccccggggcggtggtcgtggtgggggtgttagctgcagggg

SEQ ID NO: 239504 - DNA, 373 bp, Homo sapiens
  chr17:75370387-75370760
  hyper
ttgcggggctgctctgtccaagcctgggtctggcgtccgcgtctctgagcctgtgagtgcgtgcgctttcctgcgtcctcttgactgccggtgctggggctctgcgtcctgcgtccgcgggagtaaatacagcaggcgaaggggaagctcacacaatggtctccagcgctctggggcagggcttctgaggggcgggcctgcctctgccgggacctggagcccccgcccctcggagaggctcctaggctgacttgggcagagccctctggtgggccgggagggggaaaggctgtgttgaaatgagcaaactgtccaggtgtcaggccaagctgggaggtgaccagcctgaggtcctccccgctccatggccaga

SEQ ID NO: 239505 - DNA, 378 bp, Homo sapiens
  chr17:75447463-75447841
  hyper
ccctacctctgccccgcgctctgggaggctccttgttccgcgaccacaaagcccctttgatcctctgctcggctctgagccatgtgacccggtgggcgggccgcggctctcggcgcgtccagcgcagcccgacgttccgctgctggggtgagtcctgctcctttgttcttcccagccttgcaccactggctcgggggctctcaggtggcgcggccgcgaggcggaccctgatggccatggtggcggtgccgggagccacgctgtccctgggccccggcccgaggccggcaggaccgagcggggtccccaggagaggggtggcggggagctcgatctccacgcggggaccagattttcggcctcaaaatagaagaatag

SEQ ID NO: 239506 - DNA, 632 bp, Homo sapiens
  chr17:75524569-75525201
  hyper
ggctgggaagaagatgcccccgaccccctctcgtggtcgccagggtaggggtgggaggaatctggaagccacgtgcgatgctcggagctgcgtcctctgtcctggggcgtgggtccgcgagcgccgcgcagcctcccggaccgccctgagctgctgcgcccggcgctgctcctccttccccagctccgcgccttcccctcgcgatccccctcctgcctcttcggtcctggaagcgtcccaagatggggtgggggcatggagggagagaggggaggagggagctgcccgggggcagtgccgccaggaagtgggacggggactctggcgcccctccaggctgctgcgcgcgggctggggaccgtgcaccgctttgcgcgccagacgatgcatcttctggaacggcagctgaggcaatgcggggtgtgaagtggcggcgggcagaggggctcgcaggggctgggatccgcgtgcccctctctgcctcggtgcggagcacgatgtgcccgggcgggggcgaggacgtccgggaggggctgggctgcgcacgctcgcggggccgtcgcagatgggcggtttggaggcgctgcagtccctgggaaatgggagcctccgtcctgttctctctgctgctt

SEQ ID NO: 239507 - DNA, 844 bp, Homo sapiens
  chr17:75953609-75954453
  hyper
acaaaattgcattgcgaaagtactagtgtgttattatctcctcttcaagacagggacacgtagacagggaatggcctcttccaataccaacttccaagtagcactgctgatcctccactgaacgatgggggaaaagctagcctgcttctgcgaccttgcatgaaaatggagaaaattcttggtttcaaaatcttctcctggcttgaaccgaaagttaaaaagggacttttcgaattgcacattgcgcctgaccttacctaccactaatgaataatggatatcgaggagccgtggaatggaggatcacggcggcgtacggagcaccggggaggaatcgtggggtgcgtaggcgccggagcgcccgggttcggcccggaccgaaggcttgcgcggtgaaggtgtggtgtctgtgctccggggaaagggctgtctccccgggggactgtttcgcagcgaggcttgttttgctcgcagctgggcgctccctggggagcgactgagcgcaagggcgggccgggaggcgcgaggcgagcacgatgctccagggccccaaggactcgtgtgcgtgtgcgtgtgcaaagtggggcggtgcagggcgtgtgcacggcacgggcgagacgcgcgccggtgcgggcgccgggcgccgccgggcgcaattacagcataaagcccgggcgccgcggggcgctggcccggagaacccaccggacgcgcagaaccggatcggcacccctcccgccagcaccctaacgcggagccacagcgcccagggaccggagggcaggcggcggcggtaaaggacaccacgcaagtctccacgtaacccccccgagcagtgcaagct

SEQ ID NO: 239508 - DNA, 188 bp, Homo sapiens
  chr17:75954655-75954843
  hyper
ccggtatgcagatacggtgggagtcacgtgctaggggccgggacgacttcctgttggaggccaacgcggggcggggaagggggcgcgagcgccccgtctggctgaagcggggggaggggggttcttgtcagttagagcaacaagatggccgcggtggcagctccgcacctcagcgcgacggccccggg

SEQ ID NO: 239509 - DNA, 456 bp, Homo sapiens
  chr17:76123732-76124188
  hyper
ctcccagccaccagcgagtcctgccggcctctgccctggactcctcctgcgctcaccctcaggaactcagggctcaaagtcggccgggttgaagggcgctttcctcggacaggcaaagcccgggggcgccccgacagagcagctccttgcaggggtgccagtcacaggaccggacggcgccctccctcagtgtcctgggtgccatcttcgggcccaggccccacaccaccccctccctccagcaggagcaaagacgtgggaaaaccagcccagagctgggtccgaggcggccccacccagcctaacacgggacagctgccgaaagaggggctgaggacgccccacccagtccctagagctggaatcccttcctccagacaggcccttctaagctcagggaacccggggactcgggcacccagcgccccagcactccgccccgaggcccaggcaagt

SEQ ID NO: 239510 - DNA, 91 bp, Homo sapiens
  chr17:76228052-76228143
  hyper
cgcccccggggccctgctacccccgacccgtcccctcccgccggccgcccccatggcccggctgggcgcgctgctcctggccgccgccctg

SEQ ID NO: 239511 - DNA, 247 bp, Homo sapiens
  chr17:76254668-76254915
  hyper
gctggctggagggggccttgcgacataagccccaggtgggctgcctttcacggcgcccccggctccctggcacccgcccaggcgcaggcgctggggtgtgggcacacactcacatgctgagttcagtgtgcggattcctgtaacgctgggctgctggcaggaagtgcgcgccggggaggctgctgctgggaacccagggctggccccgctgagataaagggaggcagcagatcgcagctggagatag

SEQ ID NO: 239512 - DNA, 206 bp, Homo sapiens; identical to SEQ ID NO: 204814
  chr17:76355660-76355866
  hyper

SEQ ID NO: 239513 - DNA, 125 bp, Homo sapiens
  chr17:76356800-76356925
  hyper
gggctgcaggggacgccccttcgtggcagctacccagcctcggcccactgccaggttctttgccaaccctgacgcgagtgtggagcccccctcccctcccctatgaaaacgctttcatgcactgg

SEQ ID NO: 239514 - DNA, 57 bp, Homo sapiens
  chr17:76374528-76374585
  hyper
cttacggatttaacgggccggcttccgaccccctcctgcggcgcgaccactgttcct

SEQ ID NO: 239515 - DNA, 381 bp, Homo sapiens
  chr17:76588313-76588694
  hyper
tccccttcctgccccgcgcttctgttgacctttggtcctgtttgcaggaagctctcaagtttaactctgaacttgaagggaaggaagggagtgaaccacatggccctggggtcggggcctctggccgaagggcgctcagcttggtctgtaaaatgaaatgtgttttgaatgtcatgagtcaggaaaaaagaatttgagcgcagtctggaaatgaaatttcctgcctgtggtttgactcacgtctgtctgtctcgaaatctaccccaaggacatttattccactgtgacagggctcatctctgaggagcaccagactcctgcggtggggagggaagattatccgcgctgcagagactagctggcctccggaagccgcctcct

SEQ ID NO: 239516 - DNA, 366 bp, Homo sapiens
  chr17:76921081-76921447
  hyper
gagcagctgcaggcgtcggccgggcgaagcagcgtcgccagcagcaggaggccgagcgccagccgcagggtgcgggccgcggcgcccatggcgggccggggggctgggcgggcgggggccgccgctggggggtccgggcgctgctcgcggcggcgggctgggggcgcgggcgggggctgagccggggccgaggcgggcccctcccgcgcggctcaccctcctcacctgccccgctcggccgcgcaaactttctctcctctttgtctcgggggcgcgaggggaggggcgcggggcgcaattcgccgggcggggcggcggggtggggggcggcgggcgagcggcgctgcggttctcggcggccgcgct

SEQ ID NO: 239517 - DNA, 132 bp, Homo sapiens
  chr17:76921831-76921963
  hyper
ctctggagggctacgctgctccgtcccccgccaccccggggtcccttcgagcccagcctcggggcgagccaaggggtgtcctttggagcaggggccgttccctgtcgccacctccccgtttctgtgggcggg

SEQ ID NO: 239518 - DNA, 120 bp, Homo sapiens
  chr17:76967524-76967644
  hyper
ctcaggtgagtagggcgacatctggtggccggttgttgaaggtcattgcagagaggaaggaagccgaggaggggagcctgcagtgagggcgtcctggggttctccggttctcaccaccct

SEQ ID NO: 239519 - DNA, 357 bp, Homo sapiens
  chr17:77020152-77020509
  hyper
gatttccctgaggcgcggcgcggggcacacacggttaatcctccgcggctgctgtttggacgaaaagcgctgggggtgttggaggctcctcgctgctcacatctggctgggcttcgctccttgcgcgtctgtcccactttctccctctcttcctttactttcgagaaaccgcgcttccgcttctggtcgcagagacctcggagaccgcgccggggagacggaggtgctgtgggtgggggggacctgtggctgctcgtaccgccccccaccctcctcttctgcactgccgtcctccggaagaccttttcccctgctctgtttccttcaccgagtctgtgcatcgccccggacctggcc

SEQ ID NO: 239520 - DNA, 112 bp, Homo sapiens
  chr17:77071391-77071503
  hyper
tgacccctgcctatctcagaaatacgggtgcaaacccgagtggccgcggggcccagcgggaatcccgacgccccggccagacccctgcttcccacgtcgctggtctatgcgg

SEQ ID NO: 239521 - DNA, 226 bp, Homo sapiens
  chr17:77188708-77188934
  hyper
ctggcagcacggaacgagagctggaaggaccgggcacgagagtgagaccgtcagcaccagggacagctccagccagaccctggagccgccgtggctgcctacacctctgtctccctgggcccaaacaagcacgggtgtcagtgaactctctgttttgcaggggtggccagcggctagccctgctgatggccaccttttaccaaaacatcctcgcctgttgagttag

SEQ ID NO: 239522 - DNA, 99 bp, Homo sapiens
  chr17:77189188-77189287
  hyper
ggtgttcacttgctcggtgggggcaggggcaggcatgccggcatggctgccgtttcctccaaagcaccttttatagacctggtccgtgttgcaatttgg

SEQ ID NO: 239523 - DNA, 376 bp, Homo sapiens
  chr17:77216338-77216714
  hyper
gaagcggccgctggcggcaggttggtgggggtaggggcttggtcccccaacgctggcactcagtttagctgtcacttgcagctgtcttaggaagtgcggctctcctctctgcctcccgctcgctcctgctcactccaggtcctctctccctctccctgtgtctctgcctctcgctttatttccccaggttgctcagctccgtgcctgctctccgctcgcccatcgatggggtcctgcccggcactgccctgtcgcagtcactcctgctgcctggatctctgttcagagttgaactacagcgtcctgattccagcgctcatcaagcaggggacccaggggagggtgtgtgtgtgtgtgtgtcggggggacacaaaac

SEQ ID NO: 239524 - DNA, 207 bp, Homo sapiens
  chr17:77290658-77290865
  hyper
agcgtgagccaccacgccccgctagatacctttgcttcttggagaaacaggaaagatgcggaatgggggaaggcaggagttcagcaccacggacagcgacctgcgggtgggagacgctgccagccacgcggccgaactccggactgggggccacgtggaggaggccttggttcagctctgccccatgcctcacgggacacacattta

SEQ ID NO: 239525 - DNA, 190 bp, Homo sapiens; identical to SEQ ID NO: 204821
  chr17:77766025-77766215
  hyper

SEQ ID NO: 239526 - DNA, 188 bp, Homo sapiens
  chr17:77770287-77770475
  hyper
ctacttacttctgcgaccatcccttccatttcacgaggtattccatgcgtccctgcgggtgcaaaggcgataatgtgtgtgcatggggagaaacgcatgacgaggatacaagaaatgcatgcgaaaatgcatgcaccagatgaatgctcgaaaccccgccgcaaaaggcacgcgcccgctgcatcacc

SEQ ID NO: 239527 - DNA, 563 bp, Homo sapiens
  chr17:77772695-77773258
  hyper
cctaaacttcacaaggtggccgcttgtcgaacagtcccatctctccggccgttctgtctgaacgaacagcgcgtcgaggacgctcagatctcccagtgaccctcgcgggccgcccgtgggaggccgccgacggccgcgtccttaatcataaaaagtcattcccggtaacaaatagtttcgtcggccggtgccagcgatacagctgtttctgtttaagcttaaatactttccaacagtttgggcagtaaaaataaagtcggcctcagccgcctgtaagtgtctggtttccccgcccagagaaagcccaccctccgccctgggcccgggtccctctgcctgtcccgcccgcctcctcttggaatccgctgcccgccaaggacaacagcgccccagccccgcaccggccgcctcagcccctcgagctggctccagggccactgtggaagtgggagggagggggccttcccagagtgggccggggggacctgacccgcctggcctcgcgccctacccccacccctggcaagctctcccgcacccgcgaagagcggtgattttccttc

SEQ ID NO: 239528 - DNA, 385 bp, Homo sapiens
  chr17:77773657-77774042
  hyper
ctaaacaaaactatcgcttgcgaaaagtctgagtttgcaaacgtcggggaatcctgcaaagcttgtggcaaaggtggaactcgattcagaaggaaggaagaggtatagaatgatctgagggcagggagcctggctcttgtcagtagcagacgcgctcagtcccgccaaggaaggcaatccccaacggggcagagtgtgtctcatccctgcctggcgcaacccctgccccccaacccgtgagagagcagcgttgcagggggtgtgaaaacaggtcaccgggcaacctcattcctcgacagtttggagacaaagcgggaggtggcggtctgagaaatgggagcccacctcccgggctctggctgggtgggcgcgggaggaagccctg

SEQ ID NO: 239529 - DNA, 616 bp, Homo sapiens
  chr17:77776774-77777390
  hyper
cccattcctaggagccccaggcgcccttggggagcagaaagaggcggtccagagttgggccggacaaccgcaacctggaaggagtccgggagtccttgggtctgggcgctcagttctcacggtctggggagaaggggctcagacgggacggactaggcacagccaggggcggggactgcgagaggcgaggggaggccggcagggtgtggcggcagagcagcccgggacaagtgagcggcctagagatcaaggccttggagtcccgtccgagagcaggacgttatcagaaacctccagccccaacccctgcctggagatgcccggggcgcgctgactctgttctcgcatcaccccgggccctggctcaacgcgtgagcagcctgtggttccagataccccgagtggagagtttgaccccagattctgcctgcactgacaggcttggcctggcggttacgagccacggttgatgagcgcccctcctcccgtgacccagctcatgagaaaggcggggagcaccaaccctcccacgggaaaacacggggagaggctgggcgagtcaaggaatggtggcaccagagcctgggcgcagagaggcagctggacctcctgggct

SEQ ID NO: 239530 - DNA, 168 bp, Homo sapiens
  chr17:77778673-77778841
  hyper
gaaatgtgatgttcacgctgagtttctgtatttttctagtttcaacctcagagcttactttttggccaaacggatgaaggggtaagccaccgtggaagtcccagcagatacccccaccatcgccccatccatcctgggaggttcggtggccctcgaggcagagacatg

SEQ ID NO: 239531 - DNA, 584 bp, Homo sapiens
  chr17:77786283-77786867
  hyper
ctccccggccggcccggcccgctggggcctgggttcctttgggttggggaagtgggggtacgaacccacgcggctgtgccaaggggtcccaactccggagtccaaccccacccaccagtcctctgtgcgcacttttcgtttatttctcagcagtctcagtcctggagctcctggggcgatttcgtcccctgccctggtgcgcccccgggccctgccctgagcccatgccccaggccgggtgtccagttcaccctgagctccccttggcgcccggagaagggtgctcgggcccgggtgctggggagcggcggggtggccgccggcgcctcttcggcgcggatggctctcggcggggccgaggagggggtcgcagagcggctccccgccgagaggagggtgggcgctcggcacctgctgagctacggtggtggctgcggtttatggcgcccgaggatccacccggatcttctccgcggagttccgggcttggctcgtctgtagtcagcacgcacacagctttgttatttgttatttttttaatttttctgcggggagcatcggggctagcccgcccagctccaacg

SEQ ID NO: 239532 - DNA, 206 bp, Homo sapiens
  chr17:77788475-77788681
  hyper
gagggggacgtgatggggtaaggccattcctaaggcttgtggcagagctgcctcttcaccccacccccatttctttcagatgcggagatcaaagcccaggctcactggtgggtcgggagctcactcctccaagtacacttggccaacctcggggagcccggcggcggcgggaggggcgcgggcacctgggggatgggggtggggag

SEQ ID NO: 239533 - DNA, 330 bp, Homo sapiens
  chr17:77789341-77789671
  hyper
atcggcgcccggcttcagctgcccgactgcggtgggcgggtaggcacgttcccccgcagccacccgcgcacgggtttccaaggcgtcaagggcaattcacctggtcgctgcaagaaagcgactgcgcccccacgtccagccagccgccttgtccatgagaaccacctggagggcagggtccagtgcccgggtgccacccgccacgtggtgacggctctgggatggcacaggctcgtgcgtggccgccgggctgccgtctcggcccctgtgcgggtctgcgctttggcggccgccgagccgaggggagaaaatggccggtggcgcggggcc

SEQ ID NO: 239534 - DNA, 125 bp, Homo sapiens
  chr17:77813857-77813982
  hyper
gccaaggagagattgaagaacgcacgaggaaggggaccgaggagcagccaatcccggggccctggcgcccaagaacctcggcagaaagggctccaaatccgatcccaccccgatcctcaatggct

SEQ ID NO: 239535 - DNA, 2009 bp, Homo sapiens
  chr17:77814211-77816220
  hyper
aaaggggagatgaacggaatggccgaggagccacgcattcgccttgtgtccgcggacccttgttcccgacaggcgaccaagccaaggccctccggactgacgcggcctgagcagcagcgagtgtgaagtttggcacctccggcggcgagacggcgcgttctggcgcgcggctcctgcgtccggctggtggagctgctgcgccctatgcggcctgccgagggcgccgccgagggcccgcgagctccgtggggtcggggtggggggacccgggagcggacagcgcggcccgaggggcaggggcaggggcgcgcctggcctggggtgtgtctgggccccggctccgggctcttgaaggaccgcgagcaggaggcttgcgcaatcccttggctgagcgtccacggagaaagaaaaagagcaaaagcagagcgagagtggagcgagggatgggggcgggcaaagagccatccgggtctccaccaccgccctgacacgcgacccggctgtctgttggggaccgcacgggggctcgggcgagcaggggagggaggagcctgcgcggggctcgtgttcgcccaggaatcccggagaagctcgaagacggtctggtgttgaacgcacacgtggactccatttcattaccaccttgcagctcttgcgccacggaggctgctgctgcccggcggctgctacccaccgagacccacgtggcccctccccaggggtgtaggggtgacggttgtcttctggtgacagcagaggtgttgggtttgcgactgatctctaacgagcttgaggcgcaaacctaggattccctgagtgttggggtgcggcgggggggcaagcaaggtgggacgacgcctgcctggtttccctgactagttgcggggggtgggggccggctctcaggggccaccagaagctgggtgggtgtacaggaaaatatttttctcctgccgtgtttggctttttcctggcatttttgcccagggcgaagaactgtcgcgcggggcagctccaccgcggagggagaggggtcgcgaggctggcgcgggaagcgctgtaggtggcagtcatccgtccacgccgcacaggccgtctgcgccgtcggaccatcgggaggtctgcagcaactttgtcccggccagtccccttgtccgggaaggggctgagcttcccgacactctaccctccccctcttgaaaatcccctggaaaatctgtttgcaatgggtgtttccgcggcgtccaggtctgggctgccgggggaggccgagcggctgctgcagcctccctgctgccaggggcgtcggactccgcttcgctcactacgcccaggcccctcaggggcccacgctcaggacttcggggccacacagcaggacccggtgccccgacgacgagtttgcgcaggacccgggctgggccagccgcggagctggggaggaaggggcgggggtcggtgcagcggatcttttctgttgctgcctgtgcggcggcaggaagcgtcttgaggctccccaagactacctgaggggccgcccaagcacttcagaagcccaaggagcccccggccacccccgctcctggcctttttgccaacgactttgaaagtgaaatgcacaagcaccagcaattgacttcccttccgtggttatttattttgtctttgtggatggtgggcagatggggagagaggcccctacctaacctcggtggctggtccctagaccacccctgccagccggtgtggggaggagctcaggtccgcgggagagcgaatgggcgccaggaggtgggacagaatcctgggaaggtacagcggacgccctggaagctcccctgatgccccagagggcccttcctgggaaacctcccgggggggtgccccataccatcccacccggctgtcttggcccctcccagggagccgcaggagaaactagccctacacctgggattcccagagccttctgctggggctcctgcccccgacttcggataaccagctcc

SEQ ID NO: 239536 - DNA, 417 bp, Homo sapiens
  chr17:77816435-77816852
  hyper
gaccctggagaggtcgggaaccttttaacagccgtgggctggagggtggctactaagtgttcggtctgggaagaggcatgacccgcaccatcccggggaaataaacgacttcttaagggaatcttctcgctgagcgggtgctctgggccaggagattgccaccgccagcccacggaacccagatttgggctctgccttgagcgggccgcctgtggcttcccgggtcgctcccccgactcagaaagctctcaagttggtatcgttttcccggccctcggaggtggattgcagatcaccgagaggggatttaccagtaaccactacagaatctacccgggctttaacaagcgctcatttctctcccttgtccttagaaaaacttcgcgctggcgttgatcatatcgtacttgtagcggc

SEQ ID NO: 239537 - DNA, 402 bp, Homo sapiens
  chr17:77817073-77817475
  hyper
cctagcgggccgcgcggcactgcagccgggggttcctgcggactggcccgacagggtgcgcggacggggacgcgggccccgagcaccgcgacgccagggtcctttggcagggcccaagcacccctcggggccacaccgccgcccgcagggccgcgcctccgcattgcggcacgctggggtcgcaggcgccgaagcgggacgcgctgttttctacgacgtccgtccctcccaacgtcagggcagccacctcaggcccgcccggagaagcccacccggcccccggcccccactcagtcgcgaggccccgccggcctggagatctgcgcccccgggatccatatttcaaatatgatctttggaacggcttccaccgcccgccgccgccgccgccgcgctcacaac

SEQ ID NO: 239538 - DNA, 31 bp, Homo sapiens
  chr17:78010029-78010060
  hyper
gtaggacccctggagaagggcaccggagccc

SEQ ID NO: 239539 - DNA, 360 bp, Homo sapiens
  chr17:78010738-78011098
  hyper
cccctactccaagcgcgcgactccctctaaaacccgggaccgctcactctgcagtcaccatggcaaccactctgcgtggcggtccctgcgcgcagtcctcctaagagtagagggctctgcagggcgcggggctgttggataccgcccctgaccttgctccggggccactcgctgtggccggagaccagcccggccccgcgcctccctcctgcaaggacagatcccctctcgcaggcttgggggtgacccgcgatgggaggggtccctgcggttaggcggcccgcgatagtccgcggtcaccgtcctggggcctgggtggaagcactgagcgcgcacagggagggcggctgagtgaagatc

SEQ ID NO: 239540 - DNA, 89 bp, Homo sapiens
  chr17:78194131-78194220
  hyper
cgggatcgggatccggctccggctctctggtctcccgctcggccccgccccctgccccgaccccggtcacgtgcgcgccagaccccgcc

SEQ ID NO: 239541 - DNA, 205 bp, Homo sapiens
  chr17:78237353-78237558
  hyper
tgtgatttcactttcgcagaaaatgaaactgaagccgtggtcacgtgacaggacatgtagtatatagcaggctgccagcgactcctgctcttgcttctggatctgcagggcagtcccagcaggacccatggagtgtccttcgtgccagcatgtctccaaggaggaaacccccaagttctgcagccagtgcggagagaggctgcct

SEQ ID NO: 239542 - DNA, 42 bp, Homo sapiens
  chr17:78388504-78388546
  hyper
cctggtgaatcctttcggggttcagcaaaggcggacgctgac

SEQ ID NO: 239543 - DNA, 101 bp, Homo sapiens
  chr17:78428772-78428873
  hyper
ccgcagcttttggggggttcgggggcgggggaagcagggccgcagaaggcccaatcggagccttctgacacccgccccggcccgccgccctcccggagctt

SEQ ID NO: 239544 - DNA, 1242 bp, Homo sapiens
  chr17:78449591-78450833
  hyper
cggtcccctctgggcgactgcgggggcggcctggcagggagctggggcgagtggccgccgcggggcctcgcaggcgcggggaggcaccggccgggcacccgcgcggctgaggcgagggcgggggatgcctggccgggtagggaacggggtgggggagggcagaggggcgagcgagccggagggggaaccggagccgagggcgcgcgcggacctcgaggttctccaggcgggttttgagcgattgcaaagtttgcccgagttggctgagcgtctcggcggccggtgtccgggacaggtcgcccatggtgttcttgcccgagccgggctgcttgcggccgccgcccgcccgggcctcgccggctccggggtccagcgtgctctggctctcgcagcggcccagcttggcggtcagctcgcggatggtctccttctggctcaggatggtctccttctgctgcagcaccgtctcgcggagctgcagcacgctgctccggagctcctcggcgccgccggcggccacggacgcggcgcacatgtcggcgtccacgggcaccgaggtgcagatgaagcgcgtcggcccgaaatcctgggccccggcgcccaggaggcagagggcgagcagcgcacaggtgcgcgcggcgcggccggccggcatggctgcgggcaccgggcgctccgggcccggctcggctcggctggggctcggctccggctgggacccggctcgggctgtggctccgcgagcggcccgcgctctgggcgccgcgctcttcggccgcgcggtccacaccgccgcgctatcaggcccccactgccgcctgcgctgcggagcccgcgccttttatgccgccgcgggaggggcctcgagccgccgacgtcagcgggggaggaatcccgctttaattgtccgcggcccgggcccgcggcgcggcgggggtctcacgagcgcgccaccggggctgcctccgctcgcgtcccccccgcccttctgggagctgccgcggccccctcctcccccgcccccgcctgggccggcgctgctgccccgaaggctccgagagctcagggggaaggaagtcgggctccggccccggactcgaggatggaccacctgcgtggtgtccccgaacctccgacggggctccaggcgggcgggaaaccaccgcgtccgggagatagaattcggttcggccctcctggctgcactgaacacccttgggccggggtcgtttggagccgggc

SEQ ID NO: 239545 - DNA, 89 bp, Homo sapiens
  chr17:78451013-78451102
  hyper
cggggcccccggcgcctcccctcccccagctcccgggctctgtggacccggccccgtccccgggggactgtcagtccccaccccgtgcg

SEQ ID NO: 239546 - DNA, 205 bp, Homo sapiens
  chr17:78452362-78452567
  hyper
cggaccgtgcccagccgagagcgcgcgggcgcgggagaggagccctgccctgcccagggcaggctgtttagacggggcgggaacccttagcctggccccgcgtctctatccccagcagccgtggagccttcctagccgcccaaggccagggaccctgcctggcttttcctccagggcagcagatctcagcggcctggcacctcgg

SEQ ID NO: 239547 - DNA, 47 bp, Homo sapiens
  chr17:78954936-78954983
  hyper
cgtgcccccgcccccgcgcccccgcgggtttccgggaccccagtctc

SEQ ID NO: 239548 - DNA, 722 bp, Homo sapiens
  chr17:78977738-78978460
  hyper
gcgcctttctcagccgcctcccgaggccccaggcgctctgcgggggctctggcggggttggtgggggtgggcgttctcgttgtttcagcggcgctgccccaggccctgcgggagggaccgtgggacccgagacatccccgcctggcctccgctccccacccgggagtggggctcgcacccccccaacctcgggtaaagacgcttctggaaggaagggcgccccgcggaccccgcccaaccctgcccagcccagcccagcccagcccagcccttcccggggcggcggcgcgggaagcaggcggcggcgcacgggcgtcgtcatggcaaccccaccggctccgggggccgggaccgctgccccctccgcccctcgacccccgcccccccgcccttcctggctgcggctggacccggctgcgcggggcgcgaggctgcctttcccgggatcaccagggaccacccggcgcgctccccgggaatccgcacccctggccccagcgctccggagcgacccgggtcagcccctggctgcctgcaatgggcccccgggcgaaccccgggcggacccaggagtgagcacccggtgcgcggcaacgatgatcccgcaagggaagctcacgggaggcaggagctgtggcagccgccccaggatggggcgcggggagcgcgctgagctgtcctttcccgcagcggccccgcggttgaagcgtgggcttgggttt

SEQ ID NO: 239549 - DNA, 728 bp, Homo sapiens
  chr17:79007514-79008242
  hyper
agccagcacaactgcgtctcccccaggggcctgactcgttgaaggaatgaatgaatgaatgattttgcagggatgggaggctgggagactgagaggtttcattaaacggaaacgctcagatctggtgtttcacaacgtaaaacaaataattcctctatgttagcctaatttatgtaaatatttctccacgggaattgtaccgggagacctgtgtgccaactcggccagcttccccggcagaatctccccttgggaggacccttaagcaggacccttcctaaaaattggaggcagctctgactcctccattcctcctacaaggttcccccaccccctagggctttccaccgcatgagagtcctccgggcccctcgtttcctactgccctcgacccttccttcccgagacctctctctctcagtaaactgcctccaacgagaatcttctgacggcaggagggtcctccccgtccctaagggtcgccctgtccccaggccttccagcaggacactcccctgtcccctctccagatcctccttcccagggccctcctccaagatcctcttccccaaccctcctctcccagggtcctcccctctccagaatcccggccccaagcccccaagcgctgtctgcctgtctggggtcctccccagagttcaccttctgcaggatcctccctccaagtcctctcctcacgatgctcccccgaaatcctccttctccaa

SEQ ID NO: 239550 - DNA, 132 bp, Homo sapiens
  chr17:79009065-79009197
  hyper
tcgctcagaggagatgcaccggctcacggaaaatgtctataaggtgagcgccccccggcgccgagctgagcccgctccgtgtgcgcctgggtcgcgcgccgcccgcgcgcccgagcccgaccagggcggccc

SEQ ID NO: 239551 - DNA, 311 bp, Homo sapiens
  chr17:79009437-79009748
  hyper
gaacggagccgcgcgccgggccccggaagccctcggaccggtcggggtcgtagcacacccgggcagggccggggcggcgggggcggcgggcccaggggttgcggcggccaggacggcatgggggctgtctgaaggccgcggtcggcgcggtggcaccgtggggctcctccaggcgcggttgcgcgagcctcgggcacttcattctcaacaggctttcccttcccacaactcctgcccggcgcccatgctggggcctaaggtgggaggtcggagcgcgggcaggctggatgggtggacggataatctatcat

SEQ ID NO: 239552 - DNA, 214 bp, Homo sapiens
  chr17:79317325-79317539
  hyper
tttgaaaggtgaccgggctggggctgtcggagacccgctctgcggggtggcccttctagccgctaggcccacgacaggacttctagggaggggtccctgcaaatgcccttgggcgaagagaggacggaaagaatattctcccttaaattgcaattaagggtgtgcggggcgggggtgcttggggggtgctgcggcaggccgggttcgctcaacc

SEQ ID NO: 239553 - DNA, 402 bp, Homo sapiens
  chr17:79317847-79318249
  hyper
gcgggtgtgcgctccgagcgtctttcggcgggggggaggggggagcaggaggggcgaggagacttgcgcagtcagggagccgcgaaccccgagtctcggtcctcgaaggcggcaggagaaaccgcgcgctgtgccccgacctctctcgccctggccaaccgcgacttgggacgagctggaggagcttcccccgggctccggacgcccgcgccgaaaaccgggccatgggtaccaaacccgactctaggcggtcattcactttgtccccacccaaactctgatgagctatttgggagtgcgcggggactgggaagtgagggacttttataacattcttctttcgactccggcttccgagcccaccacccatcttgcctccttcgcctccgccctttgttctaa

SEQ ID NO: 239554 - DNA, 75 bp, Homo sapiens
  chr17:79319124-79319199
  hyper
gaggccgaggcagggcgcacctcctcctgggcgaattcaatcggagctgcagaagagacaagcatttccaaactg

SEQ ID NO: 239555 - DNA, 141 bp, Homo sapiens
  chr17:79650802-79650943
  hyper
ggcacccgtagctcggcgccgcggctcaaggcccgcccaccggccactctcattggatagttctcaccttcggacttctcattggttcttagggctcattgttccaagggcgcgtccaattagcgcgcagcgttagcggga

SEQ ID NO: 239556 - DNA, 57 bp, Homo sapiens
  chr17:79677826-79677883
  hyper
gcctcctgagcacctccacccgcttccccaccaggcgtggctgtgttttcaccccca

SEQ ID NO: 239557 - DNA, 135 bp, Homo sapiens
  chr17:79762619-79762754
  hyper
gccccgcctggccgctcctcttccgcggcccacactggcgactttgaccccggcaagcgggtcactgccctgcccggctccggcccccccggcgccccaccacccggccgactcggccaccgggcttatgctccg

SEQ ID NO: 239558 - DNA, 111 bp, Homo sapiens
  chr17:79791491-79791602
  hyper
ggacgggtccggccgcccctggcccacgggtggggcacgtgctggcccatgggcgacgcgcggcttctccagggaggcggccctgggcgcgggggcgggcgggcaaagctg

SEQ ID NO: 239559 - DNA, 42 bp, Homo sapiens
  chr17:79849415-79849457
  hyper
atgtccattttgtcggccatggcgggcgcggaatcgggcatc

SEQ ID NO: 239560 - DNA, 47 bp, Homo sapiens
  chr17:79884793-79884840
  hyper
ctcgaatcccctccggtatcagcttgagcaccgagtgacctcacgct

SEQ ID NO: 239561 - DNA, 80 bp, Homo sapiens
  chr17:79885579-79885659
  hyper
ccgccgccgccgccgctccacagacgtcacatgatgtttggtcacgtgggctccattcatgaagcggcgacgcggccggc

SEQ ID NO: 239562 - DNA, 49 bp, Homo sapiens
  chr17:79885890-79885939
  hyper
cggacgccggcggcgttttccagctcgagtgctcagcctagggcaggct

SEQ ID NO: 239563 - DNA, 795 bp, Homo sapiens
  chr17:79918208-79919003
  hyper
ggacgccagcagagcggctgggcccagaggccgaggggtcagtgcccgagctggccggggaccagcccttccagcgccgctccgctccccacgcggagagtcaccgaaccgggcactcctcggggccaggaccgcggggcgcccgacggaagccctttctccccggggagagaacggccgcggcccgcagggaaggtccagccggagaccgggcgcgtcgggcggggcggggaggtgcagggcgcgggccttacccggcggggctgccgtcgttgcaggtcaccgaggtgttgagtaggaggtgcaggcgcaggtcctcgttgagctgctgcgcggagcaggggtacagggactgcgccaggctcttgacttgcgccatgaagctgtccatgttaccctccacggccgtgaagtccagcgggaagctctccacgggctgtccggccgccggcgccgcctcggtccgcgggggaggaggcggctgctgaccccggcgccgccaggtcttcctgccctcgctgcccccggcgcagtgcagcaggctcagcagcagcagcacgcgcacccctcggcccatggccgcgtccacctgcggggagcgggcggccttgaggcggcggcggcggcggcgggggatgccgggccgggggtgccgggccgggggtgtcgggggcactggccgctcctgctccctcgcccccgctcccgcccgccgggcctggcggagaaggcgcgcgcggctcggcgtcgaggcgctcggggccgggtgccgtcggcctccgcagctggggctcc

SEQ ID NO: 239564 - DNA, 36 bp, Homo sapiens
  chr17:79981250-79981286
  hyper
ggctgggtgggggcgcgcgacgcacctgcctgcttc

SEQ ID NO: 239565 - DNA, 581 bp, Homo sapiens
  chr17:79988350-79988931
  hyper
gacccttgtcctcccgccgcccactggtgggacgtgaggccagccagagagcggggctggccaggtctcccgtgctgaggccgtgccacggtgcgctggggctgcgtccgctcactgcgctccttgccctgcagtgatggcgagcgaccaccgagaggcgctgctggacagggagagcgagaacgcgtctctccgggagaagctgcggctccgggaggcggagatcgcccgcatccgggacgaggaggcccagagggcgagcttcctgcagaacgccgtcctggcttacgtgcaggcgtcccccgtgaggaccctgagccccccaaagtgagacaggccgggaggacccgggcgcagtaggagtgcatcaggcggcgcccgagatggaccaggggctgcgtcccgcccgcgccgcctctttgagacccgggtcgtctgttccacgcggcggttgcggcgactgttggtggtgtcgcggctgcgggggaaccccgtgggaggcgcctgggaagggctccctaccggccccttcttcccggtcgacgccacgtgggagcacaccgggaaggggtcccgcgggc

SEQ ID NO: 239566 - DNA, 36 bp, Homo sapiens
  chr17:80190010-80190046
  hyper
ctcatgggatccaggaaggaaacgaattaccctttt

SEQ ID NO: 239567 - DNA, 174 bp, Homo sapiens
  chr17:80291220-80291394
  hyper
agagtcgagcctggcgcacagggcagggacgcgggtccccacaccggccggcagctcgttcccgcccatactcgggtacgcccgctgcgaccccgcccgcctggcctgcgacgcacgctcagggccagcggggggtgacggtcccagaggcagaggcgccgcagccccagagtc

SEQ ID NO: 239568 - DNA, 351 bp, Homo sapiens
  chr17:80291597-80291948
  hyper
cctctgggatgcagcttctccgcgccccggagccccaggaaaatgaaagacacgagagggaggggccagggaggaggcggcggacccgcgcgggacccacctcccagatgaggaaggagctgggtttacgggaagcctccaagtttcgggaaccacccgcgttcacaacaagcgtgacggtgaatttattattttcacgggaggcaccgcacccgcggttcacgctaaaggaagcaggaaagccgccgggagcatttttccaggagagttcgtgcctgggcgggtccagctcgcgtgcggcgcgcgttccccgcggggctgtttggctccgctcctggaggcctcgagtct

SEQ ID NO: 239569 - DNA, 75 bp, Homo sapiens
  chr17:80333154-80333229
  hyper
accaggaactaccgcgaccacctgcgcggccgcgtgcggggcccgggcagcgggggaggccgggggcccgttccc

SEQ ID NO: 239570 - DNA, 387 bp, Homo sapiens
  chr17:80452515-80452902
  hyper
gacacaaacagggacgttattggggcctggagaagaattatgggccacaggctgcccagtcaggaaagaaaagggagtctatagcagaggatggtttcgatccatcgacctctgggttatgggcccagcacgcttccgctgcgccactctgctggctataaggggggagcctgagtcagatcatgaccacaggagtcatctccctgcaggcggcgacccctactggccaagaggggccaacagaggactggctgggcaaggcacatgctcaattataagcctactcctcctctctcaacttcttgtagataaaactctctgaattcatgtccttttctgctgttaaaacattggctggaggccgggcacagtggctcacgcctgtaa

SEQ ID NO: 239571 - DNA, 371 bp, Homo sapiens
  chr17:80655505-80655876
  hyper
ctcctcactcccagccgaggtgttcgcctctgcgcgttcccccttctcctgggttcctgcccccgcctttctttccccggagccgtccaccccctcgccgggcgccggctttcaagcctcaaacttgggggatccccgggctgcctgcctgggagctctgggcgctccggcctcccctcgccctggaacccgctctccggccgctgtcgtggggggtcccctcttccgcacgcgagtcacctgtgctccttcctctcccccggacacgcgggacccctggcctcgggaccggaccctggtctcccctcccctccgacccacgcgcagacccagcacctgggcgcctgctcgccgcgctccgccccaggagc

SEQ ID NO: 239572 - DNA, 177 bp, Homo sapiens
  chr17:80656296-80656473
  hyper
cccgcaccccggcacgccctccgcccgcgctcacccgccgggtggccgtacggggactcggccgcgccatcctgcaggctcgccaggatctcgcccttgcccacgtcgctgtcgcccaccagcaggaacttgagcagaaagtcgtaggcccggaccgggctgcccagggcgctcatc

SEQ ID NO: 239573 - DNA, 121 bp, Homo sapiens
  chr17:80657073-80657194
  hyper
ggcccccgcaggccgcctcgccggaggagtccctgtcgccgtagaatccaggctcgcggtctctccccacggttcatccagggcctcgtcgttgccccatttacgcggcgtgcctgaatgc

SEQ ID NO: 239574 - DNA, 94 bp, Homo sapiens
  chr17:80693655-80693749
  hyper
gctggcccgtgcgcaggcgggggctctgcgggtctctgcggggcctgggaaggcggaggggtcgggggcaggcgcatttcctggggctgggcct

SEQ ID NO: 239575 - DNA, 114 bp, Homo sapiens
  chr17:80876633-80876747
  hyper
tataaaatacatttaaagttcacatgcaggtgcatctccaagaaaattattttaaaaactagttaagactttcatttcccagtcctcaacacacatcagagcagtactctgttc

SEQ ID NO: 239576 - DNA, 142 bp, Homo sapiens
  chr17:81009744-81009886
  hyper
tggtgcagagcggcgtccataggggtgggcctcccggaggggcgtggaaggggcggggctgctcggcgcggggcggggccgggaggtcgccgcctcagtcttccgccctgggccacgccccggtcccgggtcacctctcgga

SEQ ID NO: 239577 - DNA, 351 bp, Homo sapiens
  chr17:81036702-81037053
  hyper
ttgtcaaagctggggcgggggttgctactgatacccagagtgcgggggccagggtgctgccaacatcccaccatgcgcaggacgtccccaccccaagaaccacccggccccgcgtatccggagcgaggagtgggcagcgctcggcagaggccccggcgcggcggctgcacgtcctccgggaggagggagggaagccgggctcaccgccgggcctcccccccggtcaggagggagccgggaactcccgaggcaccaactctgcggaacgcggggcgcccggatcgcccctgatcaccgcccgctggcgaggcgcgggggacccagaaccggcggggccgggagcctccttta

SEQ ID NO: 239578 - DNA, 47 bp, Homo sapiens
  chr17:81039340-81039387
  hyper
gaagggagggcgcggtaggcagccgagggtggcggggaggccacccc

SEQ ID NO: 239579 - DNA, 82 bp, Homo sapiens
  chr18:268117-268199
  hyper
ggcctgtgaacaccggtcgggcgagctggcagttgggagtttccctagcgactcagttcgggtgggcgttgggcgcctgagt

SEQ ID NO: 239580 - DNA, 941 bp, Homo sapiens
  chr18:499314-500255
  hyper
ccgaggtctcccgacgtggacacctaacgcccttggaaagggagtgaattggtaggatatcatcgctccggttagttccgcgggagctgcccttcagaaaaaaaactttccagagccaaaagttactttccaagcgccttggggcttcccgggcgcctccctcggacggcaaccctagaagtcaaagcgattgcatcgccaggtctgtggcggctggaagcggggtgaccgcggtcagatggcatttcgcacccacgcagggctgtgttatcctagcacagaaccagcaactctcacacgaagccttgtgtaaacaccacgcgggcccattcctgaacgactctttgatgcctccgctgcggttacttatctcatacataaatcaggattccgctgacaaatctccgtgtttccactaaacagaaggctgccctgcagtccttctcgtgcttctttctaaagtacgataacatctgacacttccataaaccggcctgcagaggacaccgcgcagggggcgactaaccagctgaggtgtgtcaccccaaaacaccagtgggcacaccccaaggcgggcacgtggaagggacgcggaaccgagggcaactattttccagtcggtgaatctgatggagaaagatgccaaatgcacttcccgagccagctgaactcctcgggcacctaatcattgccagatgtggcgagggcgcacggagaacatccccagtcccggagaaaacacccggccgccagcgcggggaccgctcgggccgggaaacggctagaggcgggaggagagaggactgggcgagcgtggggagcgctgcggcgtggaaaagcgaccgggagggatggcgatgcctccactctcctcggcaggttttttcaattaaaaagttggaaacgggaatccgtaaacaacgacttagggcttcaaacta

SEQ ID NO: 239581 - DNA, 141 bp, Homo sapiens
  chr18:657235-657376
  hyper
atcaagtagaaaagctgcattataccacttgcttcggttgcttcagtgagaacgaagaaatggaaatgcaaatcccttattagttgtaggaaacagatctcaaacagcagttttgttgacaagaccgcaggaaaacgtggg

SEQ ID NO: 239582 - DNA, 31 bp, Homo sapiens
  chr18:658431-658462
  hyper
gcactgaagctggcgcgggaacttggtttcc

SEQ ID NO: 239583 - DNA, 207 bp, Homo sapiens
  chr18:712016-712223
  hyper
tacagaggaagccagcgagcgctgtgctctagggtttccactggcgggaacccaacaaaatcattttgctgctattgcctattatgcattctaccatttccagcaaaatgtgagtcgtaaaagtaaaaccaggatattctaaactccagcaaagaaaaaacccaggagagtggaaagtttctggatacttatacaattgctccaagg

SEQ ID NO: 239584 - DNA, 94 bp, Homo sapiens
  chr18:812980-813074
  hyper
ctgcccccaggagcttcctgttgactgtaggtcgaaccagccttgccgggaggggaaccgaagctgagttctgtttggcgactatcccagtcat

SEQ ID NO: 239585 - DNA, 181 bp, Homo sapiens
  chr18:903663-903844
  hyper
gggggtgatttaggcgatgaatcgccacgttaatagcactactgccaaatcttcaaatttagaggctctggtgaaaaattaaaccggtggcaattttcaacgtttgtagcatctgttaccctacacttcagcacccggagtctggacagctccgcaggccgcgctccggaggcagcatgag

SEQ ID NO: 239586 - DNA, 3993 bp, Homo sapiens
  chr18:904527-908520
  hyper
acctctgtaaccagcggtagcagcagcagaagccgcagcttcagaggcagccggagagacctcggagcagagaaggcgccgccgaccctcgcggctgcctggcccgcggctcctacaaaggcgggctagccgcccgccctctcccttgccttcctccccttcttttctgactttccctctttcccttaatcgcctgcttcttcctccgggtggacttacggccaccttgctcctccgcgcttcacctcatcgccccctctttctttcttctgcctctctctctgcgcccccttctctccgtgtcacgctccctcctggttctgcgcgtctacaaacttttgagcagaacacgagcctcggcaaacgagtcccgcagctcctcctgctgctcccgctggttcctgcggcttctgctcagacaccaacgccagacggcgatgcctctcgggtggtgactccagcgcaggaacttgaagaagcgctttgcccgccgtcctacctggcagctctcctggcagcgggaggagttgaagggtaagggagggaaaatcttaccaaagcgaccggctcactcgactgctgattctttcgcttggcatcgcgtcaggggagttagctttccttcagccgggtctggctagttattgggcgccgggtagatgcatatatatatatttttttctaactatagcaagcaagaagtggcagggcgcgcaccggctgtcgccaagtgctgttcaactcagggagccggggcttcgctccgtccctcccccggcttccagagctttttggggttggagggtgggaggccaggggcgttctcacagctgtgtgtcctctttcccatcctgcgcagaatgaccatgtgtagcggagcgaggctggccctgctggtctatgggataatcatgcacagcagcgtctacagctcacctgccgccgccggactccggttccccgggatcaggtaggtgctggctgcctggcccaagcaggagctggggcttcccaggcacagacgcttcctcacggtctccttcctgcagtcctttgggtccagactactagcatcgccctctgcgcccccggtgcgcctccgccagcctcggctggacagcgggtccccattctagccgagggtctggcaggctccgcgactgctcggacgcctcccccagccctaggcagctcagggtcccgggtagagccagtgagcttctggccgctggagaaccccccctcccccaacccggcccacaggatgggggcagggcacggcccctagcttggtttcttttacctattcttgggacgagttaggagaacttcagctctggagcctggccgggggttgagcgtgaagctccctcggactttgctttgttactgcttgttctggactatccgggtggggtctctctctctcctccaccctttcttttcatttcattccaattctttcccctgaagagctttctttcaagtgatccgtgttccaactgcattttgaatcccaggctgtcttggggggcgtgcggtggggagggtgttggcccggtgtgattgaggaaaagcgacttaagagagggaagaacaaggacgagactgcgaaggagggggaaaaacaggcgcaaaggaggaggaagggaaagccagcaggcaggcaggaccgggagagcagccctgcctggcccgggatggaggaaccttggcttttttcttaaccccgggtttctaaccggcaggcgcggcccaggttcccggaggcagccccagagtcgcggaccgatgtgccaggctgtggatgagccctgggtaggggagggttcgtaccagcggcgcctggggcagcgaggagcgcgcgttctgcctgcgaagctgccttctccgagccccgcccaggaacattagctctggggggccgctgatcattgatttggacggagagatgggttctgggttctgtattaggattccagcatctgggctcgaggcagggcaatatccagaaagaccccagggttcggggtacccgggccagggctgaggcgcatcgccgagcaaaggctgggtgcgaggcgtgcggaatgatgcgcttgccttgcccgggcctctccaaggatggagaaaaggcgagtgaagcagcgaagtacgactccaaccccgcccagagagtgctactagcgctggctgcacgccaagtctctccaggggtccaaagcgagagggatttgttttaacccatctctacccgtcctgtgtcaagaacggaggctgtagagggcgactgcgaagtcgccaggcactcgctggatctcggtccccctcctcgtgctctggggttgagatggggcaccgccatcgataacagatcagcgcgaactattcgtttagtggccttaaaacaccctggtttcaccctcagctattttcaagttcccgtgtgcctggcactttctccgtgcgagaagcaccggagggtgcggacgcgccacagtctgagccgccgccgaactggctaagtttaggggcatttattattcatgttcctgccagatcctcgcctgcccaaaatagaaaccgaggttctccgtgacctacatctgctcggagaagggctcccctgggctcggaggctggggtgggggtggctgaggagttggcccccgcacgccccacgcatcctctcctttgctttctgggcctccccattcgggtcttcgcgtgggtcagcgcccggtctcccagggcctttctcgtccccgcccgttgctgctttggggaggctcgggagccaggcggggaggggggcggtccttttccgtagacaggtgtgcgcgatcggcggagacgcctcggtttcccagcgcttgttgaggccgtggcccgcaggacgaccctttacccgcgaagggggggtgggcgggccgcccggcggggtaggagtggttgggtgtcgttgcctcctccttacctctgctcccacccccagtcctgggagaagagacaattctcagcggaggacttttatcacctgtgaaaatccgcgcgagccccttactttggatcctcgccgagctggggaggaacttgcactgaccacaccttctgtccccggccaccccgcaggccagaggaagaggcgtacggcgaggacggaaacccgctgccagacttcgatggctcggagccgccgggcgcagggagccccgcctccgcgccgcgcgccgccgccgcctggtaccgcccggccgggagaaggtgagattcgcgcggcctcgcgcacacccgcggctgggagctcgggactgcggtgacgggaggggcagtgtggtgacccacccaggatttttttttttttcccgtgaaagtcctcaagcctgtcctctccctggcccgatcctattgcagcgacagaaaatcagcagcgggcgggtctgtgtggacctgagggccgcgtggggaccgaggggggctgtggcccaaagagtggcagtgagtggcgtcaaggaacccacactccgcatctgccactcctagagccgggactagctcccgatcctagcagttgctctcgagatcatcccgggagttattggcgagttctgggcctctggaggtttccctgtcagcctccccggccgccgagggggcgcgcgcccaacaagggggtctctagcggccacctggggacagaaacagtgaccctgggcgcgcactttgcctccccgttagagatgtcgcccacgggatccttaacgaggcctaccgcaaagtgctggaccagctgtccgccgggaagcacctgcagtcgctcgtggcccggggcgtggggtaagagtttgtggaaggattaacctgcgcgcgccggggtgggtgcctgtgcggggcgcgcggggcgggcggcggtgggtgcccgtgggggccagggtgagtctgcgcccctgggtctggggtgggcatccgccacgggtcgcagttggagatttt

SEQ ID NO: 239587 - DNA, 588 bp, Homo sapiens
  chr18:909045-909633
  hyper
ctggcatatgtagggctctccggttactttctctgtatgtcgcgggtgagaggaacagcgaggacaatttagcgcaaacacacgaagggtcggatctcaagggggcagcgctgggagaaaggttaggcttgaagcgcgcgtcgcctgcccggatcttatcccgggccccctccgcagggtttggtgccaggagatcctgcgtggggaggggggcatcgaggggctgccgtctcggccctccccacggctgcttccaggcagaggcgggcgacgcggtgggcagtgcgagccccgggccctccccgaaggctcccgcgtggggtggggcccgcctgctccccgcggcgattgaacctgtgtctcccgccccgccaccctcttcccgacccctttgcttgcagtgggagcctcggcggcggcgcgggggacgacgcggagccgctctccaagcgccactcggacgggatcttcacggacagctacagccgctaccggaaacaaatggctgtcaagaaatacttggcggccgtcctagggaagaggtataaacaaagggttaaaaacaaaggacgccgaatagcttatttg

SEQ ID NO: 239588 - DNA, 183 bp, Homo sapiens
  chr18:961752-961935
  hyper
ctggaggctagcatcggaactgtcaccggcataatttcgttgtttttaacttttcagttaaaaaacttttaacttttcagttaaaaaagaaagcaagcgttctttggctgtctctgtgccggatgcagagggcacaactgctctgtggcacagccctctgtgatcggccgcgtgagggtcctg

SEQ ID NO: 239589 - DNA, 140 bp, Homo sapiens
  chr18:2571523-2571663
  hyper
gcgtaatgacgtcagcgccggcggagaatttcaaattcgaacggctttggcgggccgaggaaggacctggtgttttgatgaccgctgtcctgtctagcagatacttgcacggtttacagaaattcggtccctgggtcgtg

SEQ ID NO: 239590 - DNA, 31 bp, Homo sapiens
  chr18:2846545-2846576
  hyper
ccatggagctggtgggggaacggccctgtct

SEQ ID NO: 239591 - DNA, 164 bp, Homo sapiens; identical to SEQ ID NO: 204862
  chr18:3012399-3012563
  hyper

SEQ ID NO: 239592 - DNA, 419 bp, Homo sapiens
  chr18:3246159-3246578
  hyper
ggagaggacgctggcggagctggtgctctcgtggtggcaggccaccaccctgtggaggtgtccatgcattgcaagtgctcgcaagctccaggaacaaacgcatccgcgcagccgtctggggtttgtcccgtcgctgccagccctctcgctgagtccccgccctcgccgataagagcccacttaggacccccattacatggatggcttcccaggacctgcccttaaagactccgatttagtaggttggaaatgacgcaattatttttatttttaattagtaccccaagtcattctttaccatcaaggaagtttgggaaacagatcacttttgtttcaatcacctgtggaactggagcagttatttttttccccagcgactttaccacgaagttaactttggaatacgttagtggttaata

SEQ ID NO: 239593 - DNA, 817 bp, Homo sapiens
  chr18:3246852-3247669
  hyper
caagtcttccttatcggattctgggcggaaaaagataaagtcggggaggactttctctttttaataagattcatcgttacgaattgttctaggcaagcagacctcaggagaaataggcccaagttttgattcctgttttcaccaagtcgcaagtcctaatcgtagcaagaggtgcggggaagagtcgccttccttcctgcatagtgggatccaagtcaggctgtccttgttagccagggtcaaaggggctctgccagggaaaaacgacggcaaatgtttttcaagaggaagtctccagccacttgtgacctgggaaatccgtctgggccaaaaagatagtggaggcttggctgagggccccagggacacacgtttcctcccgtatggagggggcgggactcttaataaaattacactgcacacagagctagcatcaagatccgctcccgggatacgcgcactgctccggggccctcaggcggagacccagaccccgcgcggggcgtcaagcgcaggcgcactaccgcccacaagctggagcccggcttcggggcggggcgagggtcagtcacgtgggcccgcagccctctcctcgatttccctacaaggacttgggccgacgggccccgcccttcgccgtgccctggaatgtgcggccaggcaaagccacaggacggacgcaaccatctgcggaaaggataggggggaggaagacttaacactgcaacaacaggtacaaaaaagaaggaaactcagtaacaggacccagaggaccattatatattgctctatattctaggtcgcccactttacactt

SEQ ID NO: 239594 - DNA, 44 bp, Homo sapiens
  chr18:3248119-3248163
  hyper
cttcgctcactggcgccttgagcttgggcgactgccgggcccgc

SEQ ID NO: 239595 - DNA, 32 bp, Homo sapiens
  chr18:3261695-3261727
  hyper
gcaactcagggttcggcgccaggggaccccaa

SEQ ID NO: 239596 - DNA, 59 bp, Homo sapiens; identical to SEQ ID NO: 204864
  chr18:3262505-3262564
  hyper

SEQ ID NO: 239597 - DNA, 303 bp, Homo sapiens
  chr18:3451104-3451407
  hyper
gacttttacaaatccccagtctctaaaagttttcccacgatgaattttggggcaggaggaagagttagcacccagggccagcagcttcaagcggcatgcagtcaaaatgcgtccaaatgtgacaagcaggcttggttgtaagtgcaaagagcaaggctgtcattgtttccacgaagtgttctggaagctttacaactaaaacttgccgtcagtttggtttaaaaacaaaatacaccggagggggacggggggtggagaaaccacacaaaacaccccgaaaggtcagagtgtgaagtccctttt

SEQ ID NO: 239598 - DNA, 88 bp, Homo sapiens
  chr18:3453725-3453813
  hyper
cgctgcttagggcggtgggatcctcaggccatgttgtggctttctccacaacatttccttgtatgtggatagcgtgaaagaagcttgt

SEQ ID NO: 239599 - DNA, 400 bp, Homo sapiens
  chr18:3498978-3499378
  hyper
aggagatgggcaaacgggtacgggaagtggggggctgaggggggcccggggggcggctcctgcgaggtggacaactacaccgcgacagtggaagtcaccgagctcgggagcggacgggctcggagggggagaggcagccggcagaggagcggccgggggaggaggggacagatgcttggcggcggcggccgggctgcggggcgctcagagccgggtctgcgcctcggggatgtagatctcgatgctctcggcgctctcggtggccgagttctggcggacggacgcggcgcgcttggcggccatcaggcgcttgcgggcctcctggcgctgcgagctctccagcgagcgctcccggatcagcggcgcggggcccttcgccggcttctttggcactggagga

SEQ ID NO: 239600 - DNA, 1120 bp, Homo sapiens
  chr18:4453795-4454915
  hyper
gcattcacctcccacgaccgggagtcagtctctgtgtcaggagtaaggagtgaagagtctcgcctggatccacaaaagacgtgacatctcccacccagcgtcccactgcttgccgcctggctacctttaaccccttgccctccgcacatcctccccttctctagcagaaaattccgcagcgctacggtcgggctggaggcaagccctgcagccgggggcgagcgcggcactcggacacaggcactcagtgtctccggcgccggcagccgagccacgggccaccccttcccacggcctcccggtgccacccagcgaggccgggacagcgcgccttccgcaaaaagcgcagcagccgaagtcctgaaagcagggtcttcatcgccgcgggccctccgaaggtgcctctcccagctgcagccgcccctcaatgaaagtgcaatgtgttatctcgcccagcccagaggagaggtccctgtttggccttggttccagcccggctcattcaattcgctgaatgtcgggtctcccggcccgccccgcgattctccgggaattggccttggccgcgggcagggggcgactctccagtgacctcctccttggaccccatttctctctctctctctctctctgtgcctgtctttgtgtctctgtttctttggctttctcttacaaacgcacgggggagttggtccttttccacaatgccaaaatgtcacccaaaaagctagtgcaacaacttgctttgcaaacgacccaggagcctgccgagaaagccctgcggggagcagccccctcctcccctgcaaggtgcatcgggggtggggtgggggtgcgaatttgaccggtggacatgaccgggacaggggaccggtgttctcctcccctcccccttccgggaccctgtcgcaattagaaatccttcccctgcctgggtccccgtggggagccgcgaggaccgcatggccggagaggacgcgctcgcccccgagatcccaggttacccggagggcccgggagtgcaccccgggcggctgaaagggtaaggagcgcggactctcgagccagcggccgggggagcccagcccgcagcccctccgcgggcgagggaagcggcgac

SEQ ID NO: 239601 - DNA, 93 bp, Homo sapiens
  chr18:4455635-4455728
  hyper
cgtgagtgggcgtgacccattggttcccttgcgcagcatctgtggagaattaagctttcccctcctctcttgccagccgttgttcctaatctt

SEQ ID NO: 239602 - DNA, 1397 bp, Homo sapiens
  chr18:5196251-5197648
  hyper
gttcacaacgaccacgcttttccccgcttcctcgattagcctggcctcccttgctccagtggggcggactcaaatgcgcacgcacgcacacgccgccaagccggtcaaccgcagacaaatctgactcttcgccaactagtagccacggagagcagcaaagggaccaaggtccttcaccgcctgctccaaaaagacacggcaacctccagcggcgccgcagtagctgcctctgtgctgcagcctccggtcggagtttcaggtctaattccttaagaagtatcgctcctctgcccttcgtcctactccccttggcttcgcccacttcgcctccttctcctcgggaggccaggaggacccgggtcactttgccaattctgcggagggggaagtagcagtgagggagattcccacgcaagtagcccgaagcccactactctttgccccacctctccactctcttgcccgtgtaggtgccggtgctgctggcgaaagtcccagttcttaaggctcctgagctcggaaggggtgtggaggagccagatgggaagagaagcagcgggacgagggcgaggaagggctggagattgttagaggacagatggggcgggactggggagaggggcgaaggcgacgcgccgaggcactcctccgccccatgagcacagacagtaactccgaaacgcgcagatgggccgtaaggtaaagaggccttttttccctctcctctccgtcctctaccctgctcccctcctagacacttggtgaaaaagcaaggtgcggtgtacctggagcgaacaccatgatttcttccagccgctacgcccccagattaagagagaaagacaggcagacggaggatgggaagaaggccggacttggcggggtccggtgcaggagggcgcgctgggcgggcggcgggcggggcggtcagcaccccggacagctcccgccgctagatcctggggccgcagctccagccgccgccgcgcgctctgcctccacaatgcggccacagcggcggcgggaggaggagggtgaatccccgctcagtccatccctcattcctgtgccagctcggcgacgtacactgctgcttagggagcaaagcacttccaccgctttcacgcgacgaaggtcggaagagcaagagagagaaaggtaaacttcccggcaggggacagtgaattgcttttaattacctgctgtggctcgtcgccgtggatattggactgacatttaagatagatttgtcaaaaaaaaaaaactctaagagctttctttactctcgaggatgactctgagttctccgagttgggctggctcgaatagaggggcgggtctgtcaagttaataggtcctggaggtccgtgagtcctctctcgcgagtcccagtcctc

SEQ ID NO: 239603 - DNA, 1485 bp, Homo sapiens
  chr18:5237298-5238783
  hyper
cctttcccgcctaccgagcctgcccaccacccgaagtttaagctcatcttggaggacctgacactcaggaagccgtctcccgttgttccaccggctttgtggccccaatgtctgtataagctgctgatttgccttgggaaaacaaaccagcatcgatttcagagaaattactggataatttgcgctgtgaggcgcctagatcgcaaggcgcactccgcaaatgacagccgctcccgtgcacttgtccagtcattcgggtggcatactgtccgggtggaagcccgccaaaataatccatttggaagggacggagggcttcgtcagaaattgccttcttgtagctatgagacattgagcaaaacagataagaactggggcaatggaggcataaacattaaggctaggatgtatttttggggagaaagcggcggctagcagggacgaagctcaacttcatgcgccgcgccccggaatgctttgcctttagccactagcggagccgcccgcctgagggagccctccgggagtgagcgcacgcaaccgtgcagtcagattcctccgccgaccgcggccctctctcctcgggctttgccttcgctctctagcttttcttctttcactcccgctcgccgactccagcccgctgggctcacgctctgccggacaccaatcccggcggccctgcccgacggagctcaaggctaggcctggccttgtccgcggagtccgcccctcgccgccaccgggatccgcccccgcgccgacacgcacttccggcagcgccgcggccgggagggaccgagcggggagcaaggcctgcggggaggcgcaggatggacgcgttggctgtcatgatgtaggacctcctgacctagaaccatgcccggcgcagggagaacaacgagcttacggaccgggtgcgggggctgctgtgcgagaaagcctacctgctggcccgggagcgttcgccggcccacctggtggctttccctggacgtttaacggcgactccgcccggcctcccgactttttgatgcaggcgttctcttacatgactttcttcgaggctagattctcgaaagacatcctgaaggtggctttcttaattagctgcctcaccggctggcggagcagttcgtagtcgcctacatcgagagggagagccccgtcctggctcagtactggggcttcgtggacgcgctgtagcgggtcttcgccgtcgtgggtaggaaacagtcgggccggatccccggtgtctggggagcggctgccggccgggcccgcgcgagccgcttcactcctacaagcccggctcactagttccaagctgctggactttgaccctcgctgggaagcttgatcgccgcctgttctcgccaatctctatgcctttgcactgcccagcaacccggtcactgcccaggacctgttaaaagttgaatggacctcccagaatcacgccgctgccaccgccgtttctagaga

SEQ ID NO: 239604 - DNA, 43 bp, Homo sapiens; identical to SEQ ID NO: 204872
  chr18:5295777-5295820
  hyper

SEQ ID NO: 239605 - DNA, 988 bp, Homo sapiens
  chr18:5543273-5544261
  hyper
cccccctgcccagcggggatgctttgtgcggagcgcaccttatcggccccgcgctgcgcccgcccgcgcctgcacccgggacgagcccgctgccgccgcgcgctgagcgcagggcccctcccgcggcccgccagccgccacccgcccgggcggcgccgcagtgtcgccccctgtcccccgcacctccccgggggaggggccggcccgcgctcgcccccagcccgaggggcaacttaaaacatggcgccccgggcgggggatttgtgcaaattggcggagaagggacgcggggaccgagtcgccccttcggccagggatcccagggaggcccccaggccggaggccggggctcaggctctgcgcgccggcccagccactactgcgccgcggcgggcggagcgggcggggggcgcggcgcgcaggctcggcccggtgggggtcccggcgagcgggagggcggttggggaccccggccgcgccgggcgcggggctcgggattcgggagaccgcgcggcgccgaagccacgcgtcagccccactgtcccgcgcgcctcgccccaggcctcgggctcttcctccgcacctcgtaaagccgagaccccctcgcagtcccccactccgagaggcggaaaagttacctgggatcagcagggagcccgggcgcgccgcggcgtggggactaggctcgggcgcgcgtcctcggcggcggtgcgcaggagactcgggcgtggggaggaagccgcagcccagggctgctcgccgctgttccccccgccccctgttgcaggagacaccgaggctccgcggagctgcggcgggggcccacgcccagagaccgtgcgaggaaagccaacctcgtcctgcctgccctcccagccgcgggggagggggccaccgcagtacttcaggacagttacatgggcacagcctcctccgtcctggcgcagggtcaggctccgcggacgacgcctggagacagctgccaatg

SEQ ID NO: 239606 - DNA, 64 bp, Homo sapiens
  chr18:5628202-5628266
  hyper
agaccctgctctaccgggttagaatctgtttctaatcacgtggaatttagatttaaaccacagt

SEQ ID NO: 239607 - DNA, 46 bp, Homo sapiens
  chr18:5628986-5629032
  hyper
aaagggagttgggaggctcagcagcccccagcgtcgccttctcggg

SEQ ID NO: 239608 - DNA, 413 bp, Homo sapiens
  chr18:5629212-5629625
  hyper
tttaatcctgggattccgcgttggtcgtgggggtaccgggagctggagctggaggagaggagccggcagcgcggagttgccggggtgcagctgcgcgcagctggcggcgaggggaggcggtccctgcggctccgccgggctgggggaactggctcctgcgcctctgcctcccggaggatcgcactcgctcatccttacacaccacacacacacacacacacacacacacacacacactgccgctagcgccccccacgccacaagccggaatgcggaggtcagagccactgtccacttgaaagcaggaaagcaggggctgaaacgctgagatggaggcggaggctctggcctcatctgcgaggttcgcaccttcccggaaggcccccccctcccccgcgtttccccagggcgag

SEQ ID NO: 239609 - DNA, 340 bp, Homo sapiens
  chr18:5630465-5630805
  hyper
agggcagagagaggtagggctgctcacaggtccctccgcaggggctctttccttcgaattctccggggtccagtctcgggctcggcggcgggaaagagctcctggaggctggaaggggccgccagacccgggctcctcccgcagctgcggtggcggcacctccaagttgccacctgcagcgcgcttcgggcgcctgtgacagcccgcgccgctcagccctcgcgggcccgccctccccgtccgctcgttggctgcgcccggtgcccgggcggtccccgcgctctgccccgccctgagcccgcctcccagccgcgcgctcgcaaagtatgggtctccttac

SEQ ID NO: 239610 - DNA, 1008 bp, Homo sapiens
  chr18:5890374-5891382
  hyper
acagcagagtctcgcgtttgaccagctactgcgtccaagaccgactcggtggaggtgccggcctcccgcaggggtgtgtagcccttattgctgctggatgggtcatccgactgggagctcccggagtcccgcctggtggggggcgagccctccagccgcaggggtggcgagggggaggcggccttggccagagggctggagtccgggtccgcactccccggggagggcgggggctcgggggacggcggcgcccggtagtccgggagcccgctggtgctgcggcgccgcaaggccgcgtacctgccggtcctgggcaggcggccgccctgccccctggcggcgcgcgccgctaccgcgccctcgggctcctccggctcccggcgcgccccgcgcatgctgccctctgcgccgcggaggttggtcatgctcaggtcgagctcgcccctcgggatctcctgggagccgcgttcccccggaggcctctgccagctgcagctcgcgccctccgcgtccccgcccctatcgcggcccccttgcaagggcagcagcgcgaaggcgctcagcgaggagtccacgaaggagctggccgtgctctggcgcccccagctctcgggtgggctgcagggcgccggactgctgcagctgctagcggctgcggcggcggtggcagcggcggcccggcgactgcctgccacgcccgagcgctcgcggtagacgctgtacacggcctcggccaggctcgggggctcccgcggacagcgcggggaagaggccaggtccggcggggacgcggcgccccgagggcggccgccgctcggcgccgcggggtgaggaggccacgagcccttggccagcatcgccgccgctccgaaggcgtccccggagccaccgcagcccccgggcttcagctccaggccccgcgactgcacgtagctgaggaagccgttgagcggtatggccccggggggcgccgcggcgggggcagacgacgacgaagaggcggcggcg

SEQ ID NO: 239611 - DNA, 190 bp, Homo sapiens
  chr18:5894651-5894841
  hyper
cacaggctgggagcgctgtgctgtgcccggtacccaacccaggtcctcgaccccggcccctcactggcagggcggcgaccccctggcccctggctttggtctgcttattgatgttagctggagtcacatgagtgcagcagctgggagtccgcctctggaaagaagacaggcaggagccaagtgagggcaa

SEQ ID NO: 239612 - DNA, 63 bp, Homo sapiens
  chr18:5895561-5895624
  hyper
cccccgcccccgccccccgccccaccccctcctccggcgcccccccccacgccgccggccttc

SEQ ID NO: 239613 - DNA, 261 bp, Homo sapiens
  chr18:5895984-5896245
  hyper
tgcctcggtcttttgttgcctctactcctcggcacggcgcagcctgggctctcttccccctcccgcttgggagtttgcagtgtggacgctcggcaagcacagtaagttgtcccccagcgaactcgggcccgggcggagtggagccgcccccgccgggacgggcgcaccgcgggacgcttggaagcctctgccagatgcgctcgcgctccagccccgccgggctttgtgaccagcctgaccgggacccggcagctggggctc

SEQ ID NO: 239614 - DNA, 154 bp, Homo sapiens
  chr18:6414079-6414233
  hyper
agagcaggcgagggcgactgtggccggcgcgccccccgcagttccaggcggtggcaggagcctgagagccgccgtcccaggctggccaggcgcccgcccgccctgcgcgcactccctgggctcccgctcccgaggctgggcagaactcgcagag

SEQ ID NO: 239615 - DNA, 854 bp, Homo sapiens
  chr18:6414413-6415267
  hyper
ccgtcccgtcccgctcccccggtcccaggctgcgctggctccagggcgcccaggtagccgcgcctggcaccccgaccctgccctcgcggctgaccgaggcgccgggctctgcggcggccgcgcccgtccaaagtaggcgacaagtgaggcagcgcctctcgcggggagcccggcgcgcgccccggcggcgaaagagaaagagaaagagcctgggccgggaccggggctatccccaaccgccaccgcccccaccggcccggccctcgccgcgggagtcgtgcaggcccctctacctgcccggggatggggccaccccgcgcggcggcggccgtgggcacccacgcgggctcgcgaccatcccacgcgggcggcggcgtccttcttacccccagcggagcggcgcctgcccgcaacgccgaccgagctacaggcggggggcgagtcggagcgcgaggttccgccagcccaggctgcggcgccgctgccccgcggtgcccggcgggaggggcgcgagggtgcacgcgcggggtgggggcgcgggagccgccccctgcccgccccgcgcgcatgctcccgccgcacctgcctcgctcagtgttccacaccccggggagccgggtggcgctgggcccgccgaggtcggggctttcccatgggagggaggtggctgcggcggaattttcagatgcgtccttctctgtattcgttccctgggaaggattcccccaaatcttggctacttcctgcctgccagcttgctccctggcagcgaagtcccagtagctcacccatgcttcatcccagctcttggggttcaccgtctgaaggctctctcctccggatccctctcggtc

SEQ ID NO: 239616 - DNA, 1004 bp, Homo sapiens
  chr18:6729209-6730213
  hyper
aaaacaaactttactagagccgctagcaggagccccaaaggatcccggccggtttccagtttcctagaagcggggatcacacctccccgcgcactcccgacacatgcgcgcgcacgcacacacaggcgcacacacacagacacacaggcgcgcgcacacaggcacacacatggacacacgggcgcgcacacacaggcacaaacacaggcgcacacataggcgcacacacacacaggcgtgcacacgtacacaggcacacaaacaggcacacacaggtacacacgcacacacagacaggcacagacgcacgcacacacacaggcacacaaacaggcactcacacaggagcgcgcgcgcgcgcgcgcacacacacacacacacacgcactatgcccgcccccactccagcccgtgggcgtggttcccagcgtctgcgaattcgcgcgcccggggcggggcgggcctgcccgggggcccctgacagccgcgggagagagcggctggtcgcacctcgggccgcgccgcccagctgctgacagcctcccggcgcgccggtccatgctggtcccggtctttgttctggggccggcgccgagacatgcgcggctgacgatggaggtggaggactcgggcggcgtggtgctgaccgcctaccactcgtacgcgcgcgcccagccccccaacgccgagtcgcgctgcgcgccccgcgccgcagccagccacccgctcagcaggtacccggagccgctcccaccagggcggcgcagtcgcgctgggcttggggggttcgccgtgcagctgcgccttgtgcctgagcgcacgaccgccgtcactggatgttgtttcaagttttggtggactagatgagtgagcctggggttctttgcattgtctttgactggaggtgggaaacgctcgaaggctccaccagcctgggctgaagtcgttggctagcagagattagcaagcagcaggattgcattcttgatacgatttgaggataag

SEQ ID NO: 239617 - DNA, 324 bp, Homo sapiens
  chr18:7116447-7116771
  hyper
tgcgtttccagctccggtccagtgcttccatcatgaatgcttgaatgaatgagatggtcgcgtttctgcagagctcacaactcagcacaatgcccaaacacacgtttcccacgagggcactgcaaattccgcccactacttttgactcgaatttttttttaatgaagtttatattcgtgggaatacgcccattgtcatgtgctgcatacattaagatgttttcaacaaatatttgtgactgcctagccaacacgaagccacgctgcgaagacagctctaggggtggcgtgggtgactagggttgtcccccaaaagggaaaagaa

SEQ ID NO: 239618 - DNA, 937 bp, Homo sapiens
  chr18:7116947-7117884
  hyper
cctcgccccggcgcgcccacggtcaatcccgcgcagtgaatgagcgggtttggccacttcgcctattgcacaaaaagcgcgggtcgggaaggcgcatcagtgccctggacgccgcctgcgggtccccctgcccgggacggctggctaggggcgcccttctcgccgcgtctctccccactagcccgcttggctgccaggggccccgaggaatccgccctttcccggccgccgcgacccagcttgcgcagccggacaatgagggcgactcgggagagctctttctccattcatcccccgcgcccggccaacagccccgccacccccgcccgcgcagccggggcactaaaagcaacccccggcgccccgctccgggcgccccgctcccgccacccccagcactgctcgcgtagatggcgctcctgggtcgcgaagtcccgcaaaagccagaggcgaggctgggctttaaccccaaagcccgaggaggttaaagcctaagcctgcaaagagcgggcagcgtccggcaggagcggcgtccccatccagccctccccggcaagcgcgggagacccacgtggccgagacacccactccgaggtggatcaggatgcgcgcccggactccagcagccccaacgcgacgggctttgtccgcggccgcccccgcccgcccgcctgcgggggacagggaccctaggacccgggccgggctcacctctctgccggcactgcgcggcgacacacagcagcaagaccaggagcacgcccccgcgcatctcgcctccgccgccactcggtgggtctggggagaaagccgcgcgcccgcctggaacgctccacgggacgcgagtccgcgctgccctggccccgccgctcctggagtcctgccgcccctccctccagccgccctcggacacacccctcggctgcgccccgccccg

SEQ ID NO: 239619 - DNA, 170 bp, Homo sapiens
  chr18:7567090-7567260
  hyper
ggaggtgggcggggggagcccggtggccgctcctccccgcgcggctgacgcccgcttcggcggcggtagtggctgtggccgcggggccgcccccagccgagctcccggaggcgctcgggcgcgggccggcggggcacgggcgctcacgccctctagcgggccgcggcggc

SEQ ID NO: 239620 - DNA, 326 bp, Homo sapiens
  chr18:7568580-7568906
  hyper
gggctccccctccccaccctcgtccccctagcggagcgccgcggccagctgcaacttgttcatccagcccggctgcccgggggtcccaggtgggaaggagaggcactggcggtgtgcgagcaagcgtgtgagtgtgtgcgcgtgtgtgcctgcacgcgcgcgcgggggcgttctaagcccagaggaacccctcacggagaggatctgtggatcggagtcgggggtccggcgtgggggcgaacccggcacgctgtcacaggggtttacaaccaggatgacctttattacctgggtgacacaggtggatagacggcaaatgctggccc

SEQ ID NO: 239621 - DNA, 55 bp, Homo sapiens
  chr18:8367529-8367584
  hyper
caaagttggaagccctggcggctgctgcctgcagccgacgcgcgggggcgcccgg

SEQ ID NO: 239622 - DNA, 133 bp, Homo sapiens
  chr18:8608807-8608940
  hyper
accgagcagtgccacggcccggtagagggtgcgggggcttgcacccgctggtgtttgtgagagagcgctggtgtagacgcgaacgcagcgcaggcggcccggcggcgcggcctcaggtcggggcctttccagc

SEQ ID NO: 239623 - DNA, 199 bp, Homo sapiens; identical to SEQ ID NO: 204884
  chr18:8705987-8706186
  hyper

SEQ ID NO: 239624 - DNA, 67 bp, Homo sapiens
  chr18:9102407-9102474
  hyper
aaatccaggcgggcgcttcgttacccaggagcccaaggtgcagctccgggacgcttcttttcaaggc

SEQ ID NO: 239625 - DNA, 38 bp, Homo sapiens
  chr18:9136542-9136580
  hyper
ggtgacactagtccgagtggggcgtggagaccgaccag

SEQ ID NO: 239626 - DNA, 70 bp, Homo sapiens; identical to SEQ ID NO: 204886
  chr18:9474876-9474946
  hyper

SEQ ID NO: 239627 - DNA, 168 bp, Homo sapiens; identical to SEQ ID NO: 204887
  chr18:9475347-9475515
  hyper

SEQ ID NO: 239628 - DNA, 186 bp, Homo sapiens
  chr18:9707862-9708048
  hyper
gggacccagaatgtcgcttgaggatgggacccccgcagacctccacgcgctgccacgcaaacggcctcggccgagagcattcgctttccagatgagaatggcatcttcagggacccgctggtagtggggccaggtctccacagggccggtccagtccttcctacccacccgggccctgcggccagg

SEQ ID NO: 239629 - DNA, 439 bp, Homo sapiens
  chr18:9709170-9709609
  hyper
gccagaaacaaaaaagcagtcaatccgtgcggcccggggactgcagacaggggacccggcgaggacgcagggagccgctggcgaaccgcccctgggaattcagataaacgtagggtcgcttcctttcgggggcccactccgcattccagaattccttcttctaaaagaagagccggttctaagggcgttttcagcagccattagcatctggtgtacccgcccgtgtcattggcaaagctggtctcatgaaaaccatttcctaaaaaagggcagcgaaagggtcgcattcttgtgcgaactgatctgtcaagatgggggtacaagaactgtagaaagaggaaatgatttcggtgaggactgaattgtgccagcgtctctaggcttcctctaggctcttgtggaacctccggcaggctcccatcatcggctcccatcaccg

SEQ ID NO: 239630 - DNA, 105 bp, Homo sapiens
  chr18:9771587-9771692
  hyper
aagggcattcccagcgcggagtgactccttagcctggctcctggcctgtcctcagcaaaccgcgggtagggtgtgcccctggtggccagccgaggaacagcagtc

SEQ ID NO: 239631 - DNA, 100 bp, Homo sapiens; identical to SEQ ID NO: 204889
  chr18:9913711-9913811
  hyper

SEQ ID NO: 239632 - DNA, 287 bp, Homo sapiens
  chr18:10032590-10032877
  hyper
gcaggccccaggaccgctctaggagcccggaaggcctgcgcaggtggggggcaccgtgttccggaagcctggccccgagcgctgtgcggggcgcccggggacgctcagcgagtgtctgtcccagccctgagctcagtgaaagattgcagagtcctgggcccacgagggggtctccgctgtgtccagacgcccttcagagcaaaggagccacaggcgggcgctctcccagtgtctctcgggaagcgtgacctcgacttcatgcccgggagaagcggccaaggccgggc

SEQ ID NO: 239633 - DNA, 854 bp, Homo sapiens
  chr18:10454624-10455478
  hyper
gaaatatgaagagacgctgcagctgcggtggcggtggcggccactgcagctcagagcggcgcacgcggcggccggggcgggacgcggggccgggcgcggagaagtcggggcgggcggcagagaggccgggacgcggaccgggccggggcgcccacagccgcccgacggcgcccagagagcgcgcgccccgcagccccgcgcctagcccgccgggcatggggcgcgcggcagccgcctgaagccccggcctggcccggccgcacccggccggaggcggagggcagagcgcgcgcccagttgcccgggcaccaaatcggagcgcggcgtgcgggaggccccagagcaggactggaaatgtcctggccgcgccgcctcctgctcagatacctgttcccggccctcctgcttcacggtgagttcccgagggccactcgagcgctcccagccggcggaggcagcccgggcgccgcggagcccgcggaggcgtcgggtctggatcgcggcacggcctacactgtccccttggcggggcgggtccgaggggagccccgcgcctgccgtctcagccctgggagagggggctctgcccactttccgaggcttgggaccgctctcccccagggcgcccggagctctttgctgcgggactgttctttttggaagggtggaagctctcccacgcagacaccttttatgtccagaatccgttgcatccagtccgagggaaactttcgtccgctctgctggattttccaactgtacactgccatgaaatcgccggctctgcgagcctttttccaaaatgccagaatgcagcaggctcttgatgtgttccaagcgtttaggagagtgga

SEQ ID NO: 239634 - DNA, 68 bp, Homo sapiens
  chr18:10525828-10525896
  hyper
atcagtatctcaccgcgcctgcgctagatgccctaggtggggccagccttgacgcgctgcgcctgcgc

SEQ ID NO: 239635 - DNA, 1592 bp, Homo sapiens
  chr18:11148407-11149999
  hyper
ctggcctcccgaatcgaaccccagagcaccagagcccttcactttgttaagaagtcccccacccaggcgcccccctcgtcctcctcaagtgccctcggaaagcggaccagactcacctactgccaggcagatgggcagcagcagcctgaagatgagcccgcacaccacttctgaggccatcgcgtcggtccggcgagtcggagcagaggggcgaggctcgagggtccctaggggtggtgggacgcaaggcccatgcccgtctatggcctctcgccgccggcagctcgcagccacccgagcatcgcctcggcgcgggccgcgacgctctccgccccgagggcacgctcccggggctcttggccgcccctcgcccaccgggctctgggtagcccctcaccaggctcttggcggccacctagcccggcgcccggccccctgcggccggcccatttagtgtgaatcctggatccggcagcggcggcggcttcttcaggggtagctgatgccggggccttggagagggacgctttgggagggtcctgggaggcggcgcggcgagcaaagggggcaagaagggcgtgctgtgctcccgcctggctcccggggcgtcgtttgggggcggccggggagttttctacttggaagcccctctgaagccaccgcgtctcctttgcccggcctcgtctccgctgcccacgcaggctgccgcgctctggcctcggccccggctctcggagctgcccggcgggctccgggtctcgccctccagcccccaggcggcccgcggcggatccccgagaggcagcgcagctcagcccctgcgccccccagcttcgggccggagagaccggggtgggagctgccaggcgcgcagaaccatccccgccaccacggggctcgccttgtgggtccggtgcgcgggcggcgctgcgagtccctccctcactcgaaggaacggcgcgagcgtggggagaaatggagaccagagcgcatatcgggtgagtgggtctcccactccctcctccaccgcctcaatttaaaactcaagagaaaaaccagcgccgtcccgtcgcccagcgcgaccaccgcctgccgccttgcagcctcgccctcgcggcgcagccggggctccccggcggcgcgcgcttctccaccttcaatgaaactttcgaagccctcactcggggacgggcgtgtcccccggccaatgggatggcggctccggggcctgcgcgcgcggagcccgcccctgagcggctggggaagtgagagccttgcaccggcgcggagggcaagcccccacccgcggctcccgcgcctgggagagacccggcctggcctgccagtgggctgcgcgccttggctcgccctccgcgggcactcctgccccactggctcccgcagccccgcggctctgcgtggttctgtcattccggtggtgcaccctggcatccagtccacccggccgggccctgagcttgcccaaacccagggaaccgtttaaggtccgagggaaacgcacaggcccggcaggagagaagccaggggcttggagagtcctgtgcgaccccgacttctgctgggtccacagg

SEQ ID NO: 239636 - DNA, 1036 bp, Homo sapiens
  chr18:11689067-11690103
  hyper
tgtccgcagctgcgcgccgggctcagacggcattatttacggtacagaatactcgcccgcgcgacggtatttacggtaacggggaccagcctgggcggcagtatttacggtaacgaaagccagctgtatttacggtagcgagggctggaccggcggcggcatttacggtaacgggggccgggctcgcggaggcccgtcggttcggtccgctctgggcgttagcaagtgatctccagccaaggcggccgccaccccttgcacacagcagaaaatgcaaaatgaccctctggggcagtgaggggctgtggccctcggccccggcctgccgcacccccttcccgcagctggcggccggcagcgccgaacagggtccgggtgcagccccctcccgcccctccgctgaggcgccggcctgaactgggcgcgggaaccaggccgccctcggcgcccagcctgccctagtcccgcgcgccgcccccgctgtgccgcgcccacatgggtctgtgctacagtctgcggccgctgcttttcgggggcccaggggacgacccctgcgcggcctcggagccgccggtggaggacgcgcagcccgccccggccccggccctggccccagtccgggcggccgcaagggacacggcccggaccctgctccctcggggcggcgaagggagcccggcatgcgctcggcccaaagcagacaagccgaaggagaagcggcagcgcaccgagcagctgagtgccgaggagcgcgaggcggccaaggagcgcgaggcggtcaaggaggcgaggaaagtgagccggggcatcgaccgcatgctgcgcgaccagaagcgcgacctgcagcagacgcaccggctcctgctgctcggtaggtcccggccgcgaggtcggctgacgccccggggacagcgcgccgggcccgcgggggcggcgggcaccggggagcggtggcgggcaccggggagcggcggcgggaggggctcctgaatcccgggactggacccggacgggcggcgggcgcggacgggctaca

SEQ ID NO: 239637 - DNA, 1343 bp, Homo sapiens
  chr18:11751501-11752844
  hyper
tgactggtgagcctcggagggatcctcctccctgctagaatatgcatgatcctccgcgagtcttcgcccgccaggagcagggacgcgtccgagccaacacggggcgcgcgcccagacgcactttcccggctcggggtgcaagagagccaggcggccgcggcgcagcggaggggctgcgggcccggaacccaggccggtcagcgtgtaagcgccccagccggccgggctccgtggggggtcagctccctgacccctacagcgcggtagcgcctctccgagagctccgggaccagcggcccggccgcccccaaagccagcctccctctcccttccccgcaccgggatcccagaccagggagggggcgcacgtccgacggctgaggaatagcagggcgcgagccggcccggcaggtgcccatcgtcgccctctgggaccccggtggcgcgctctgtcctccgcgccacgctcagccaccaccccggctgtttgggacccggcacccagccgagcgcgccgccccctcggggacccgctgggcggggctgagcgaggcttggagtgcgggcgaagggacgtggggcgaacccggggcgctgcgccacctcggctgtctccagcggagaccggcgccctcgccccccgtctccgttcattgtgctgtattcatccagcagattttgaaacaattctcgtgtaaaaaggcattttactccgcgcgtcttccttacagccatttagttgggagtttgcggtgggcagggggagggagaagaaacgcctgctctgaatcggaaaacaccgaagagaccagaccatctctttcagcagcaggaaagagaggagccgtcgcaggagccgcacacgtctccaactctctattgctttttgcgcacattcctaacttcctgacgtccatcccagcgggcaggcatggggtgtttgggcggcaacagcaagacgacggaagaccagggcgtcgatgaaaaagaacgacgcgaggccaacaaaaagatcgagaagcagttgcagaaagagcgcctggcttacaaggctacccaccgcctgctgctcctgggtaaggccgaggggcgcgcggcggctcccggccccagcggagcgcacagccaggagcggcgagcgccaggctgggcgggcagggccgggcgagggtcgcgcgcacctctgggccgcggagcccagacggcggccggggcgagctcctccagccaggaacccgcgtgtaggaaatccccgtgctgggggaggaggattgctcagacccggctagtggtgagagatggcagcgatatccggacacagatcacagcgttctttctgtttg

SEQ ID NO: 239638 - DNA, 804 bp, Homo sapiens
  chr18:11947244-11948048
  hyper
cctaaggaggaaccacaaaccgcgtagactcaggccagccgctgggcctgggcctgtgtgtccctcaggcggcgacctttggcccacttcaggccggccgtatttaccagcttagaggcgccgcggcgttggcgagtcctttttcacccaccccttccctccgttctcaggcttgaacttgaacaggcactcatgactcagcaaacggtacttgatagggttctttacacgtcagtcaggctattttttaaaatcactcttcctggagatcttcaaaccagaagcaccgcgggccctccccaacgggcttctgcttacctccactacgtgatgcagtatggcccccgggaggccgcccccagattctagaggggcttaccccagacacacccgaaggaccacctcgtgacctcagaggaacagccctagacccaggagagactgccagacacccccgtggcagcccgccagggcccagctctacttgtcgcctggaggtgctgcctcccttccacgccgccccagggaatggccgcccctctggggctcctcccaatcccccttcccaggactgacaatggcccggcgccctgctttgggccaggatcggcctcgagccttcctcactagcggccaagagccggaaaccttgcgtctcagattccccgggtctgtgcacccccaccccaaccggtcttcccacccaggccccccctgatgccagctgcgggcctggacctagcccggggccctgcccctccgcccctctcgctggacagcccaggccggcgcccgagggatagg

SEQ ID NO: 239639 - DNA, 74 bp, Homo sapiens
  chr18:12254540-12254614
  hyper
cattctcttgcgctccgcgaccccgcgcacacacccatccgccccactggtgcccaagccgtccagccgcgccc

SEQ ID NO: 239640 - DNA, 746 bp, Homo sapiens
  chr18:12287382-12288128
  hyper
accgtgctcccgcccgccctgcgcccagacctccgcctgccctggaggtgaaggacgcgggctccccacgctcccccgagtgatggtgcagaggcgtactccctctcggggtccccactccacattccggcgtcctcggaacagccggcacaggcagggcgggcgtcagctgtccggtcgcacctccctgcaggggcattccttggcctgctgctgcctgccaggctgacccaggcgcaggcgctcaggtaaaggcagtggccagcccaagctgccgacccagccgctcctcccagcagaggccaggtgaggaggcgaggatggtgggggtcgcccagggagaaaaatctcatccgacaaggaaagcctggtgaccccctgtctgcctgggcagaactcccctcccaggaatgagctttggacaacgtggttcctcccgttgaatcaggttctgaccgagtccgctgcagctgcaggcgggggcgccctgccgagcagatacccagcggagctccggggccccgtttctactgtaagcagctgggggccaaatgtgcgcccgggcacgtctcttggcctctcccagactcggcaccctcatctgtaagaacgtgaacgatgtccgccctggacaggactgcggtcgcgagaggtgcccgggccaggcaagggacacagcgcggatctgctggtttcccccttgattccatgcgtgggcgtgaagcgtattcttgggagtcaggcac

SEQ ID NO: 239641 - DNA, 527 bp, Homo sapiens
  chr18:12307275-12307802
  hyper
ggcctgggaggggacgcagaggctaccccggtggtcccagcctgcagcgttcacgtgaggaaacttccgcaaaagccctgatgcatgcacattctgactgcagaggccagagcatcccgcattttggaggctgaaaggctcccctaggataaccttttccgttaacagaggagtccgctgaagcgcagagctaactgaaaacagctagaattaaaatccaagtcacccggccggcatcagcagtcattcctttccaccacacaaaactggccaggaagacggactctggcgcgccctcccaggccgaagcgcatttcttcgctaacgcgcgaggagtaggctgcatagacccggcgcaggaggtgttcattttcggatccagccctgtagtcactttagctaaacccggttccaaaggggtgggagtcgtcggagaggaatggcctctgtatctccggagacggaaacaccaggacgaagaggccctaagaacgtgtgcccggggtgcgaccggggggtggggggca

SEQ ID NO: 239642 - DNA, 54 bp, Homo sapiens
  chr18:12308162-12308216
  hyper
cccgcagccattggcgagcggcggggcgggggcgggggcgcggagggtcggccc

SEQ ID NO: 239643 - DNA, 261 bp, Homo sapiens
  chr18:12656810-12657071
  hyper
tctctttgtatcccgacatcctgtcaacttttcactttacaagcctgtttttcatcacaacaaattttcacatacaggaatgcaatcagtattttctaacgtccaggagccaaaaatcactatttagtctatttttccatttctccccaaagagcagaattctcacggttcagaatcatctttacatttccgaaccgaggaaaggctgtctaatgtggaatactgctagtttcccgtgaggagtgcggtgtttccgacagc

SEQ ID NO: 239644 - DNA, 54 bp, Homo sapiens; identical to SEQ ID NO: 204901
  chr18:12657375-12657429
  hyper

SEQ ID NO: 239645 - DNA, 439 bp, Homo sapiens
  chr18:12658130-12658569
  hyper
cctcgcgccgtccagcgccgcccagcgcccgccccttagggggccgcacgggccgggggatgcacgctctggaggtgaggaccaggcaggagggcctcgcctcgaggcgagatggccgcacggtctctagcccgcagggctctcagagtcgcaggcggtgacgcccggtcggggggcccggtcgcaagggacacacagctgggggcgcaatggtgagggcggcgacgcacggtccggaggggatgcgcggccgggtagggcgtgcagggttgtggggcgtgggggacacgcggggccgggcgcgcggtcggggggcgcaggggcaagagggtgtcgcatttatcagggaagtccccggccgactctggcggggaactgggcgcgccaacccgggtcaccgccctgcacagcgggagaagtcacccgcattgacgttccc

SEQ ID NO: 239646 - DNA, 112 bp, Homo sapiens
  chr18:12702645-12702757
  hyper
aaagcgccgcagccgttcgcctagcgcagctcccgggggacgcaacgccgcgtcaggccgggggctgacctggaaatgaggccccggcggcggcggcgccaactgttttcaa

SEQ ID NO: 239647 - DNA, 345 bp, Homo sapiens
  chr18:12911077-12911422
  hyper
aggttggggcaggccgggtggggcccagcgagtgggcgggggcgcgagcgggagcggaagcgggcccgggccgcactgctgccgcgtctagccgcctcccaggctgcctgcgccgcgtggctcgcccccgggacttgccagcagcgagtggggcctgactagctcttcaccacgctccactgcatcggcaagggctggttctgggagaggcgcaagggcatcgacctccgcaccaatcaggtggtggtcattagggcagtggacccggaggaggccgaggacgcccagcaggagaaccctgcgctcagctgtgctacagccccgagtcaccgctgctcttgctgc

SEQ ID NO: 239648 - DNA, 87 bp, Homo sapiens
  chr18:13217466-13217553
  hyper
ggggtcggcgcagcctgtgagccggggacccctgagcccccgccacggcggccccggtacccgcggcctggccgcgcgccgggtccc

SEQ ID NO: 239649 - DNA, 230 bp, Homo sapiens
  chr18:13217853-13218083
  hyper
cgctgcagccagacaggctgcgggtgcctgggaaagtggaagcagggcggggagcgcgggggaggcccgggggtgaggtcctcagctcttaaagaaccccggcgcgccgcgctccccgccggcccgccgcgcgccccctgccgcgccccgcacagcgcccctccccctggccagcagggccggtggccgcggagccgcactgcgggcagtccccgcctccgctccggggg

SEQ ID NO: 239650 - DNA, 63 bp, Homo sapiens
  chr18:13823935-13823998
  hyper
ccgacccaccgacccgaccgaccaaccaaccaaccaagcaaccatccaaccattcaagagtgt

SEQ ID NO: 239651 - DNA, 748 bp, Homo sapiens
  chr18:13868512-13869260
  hyper
aatgggccctctcagaggcccgggcaaccgcacaagcaagaatgcagcacggagcggagtccaggatgctcagcgtgggcctcggagtctgtgtgcgatcagctggagtccaggatgctcagcgtggacctcggagaccgtgtgggctctgcgctctgcagctgagacacagtcacccgcccgatgggcggagaaaggggcagctttgaaaacaagcgcaaggagatgcatccaaaagacaaccgaacccatcagggtaaggagcgcagcggtggagtgtgagggggaaccagaagggcggccagggccggcggcatgccatgccaggcagccccgcgccaccccggaacactgggacactctcatattcccaaagggacttctccatgcggcgctctgaccaggcatcgccgcaggacgcataacagagagagcgagcgcagggcacccggcccatcagctcttccttcacctgaactgccccggcctcgctgagacgcggattttaaaaccgccctgcacctatgtgctggcagccaggccctgggaacttcctccaaacactcccatgagttcgggatgactagcatcagttttcagctggagagcagacggcaactgaacgctgcgaagtcccacgatggggatgagaggaccagagccccgaggccagtcgcccccctcccgcccatccgcccgcccgcccgccacgcagggctgctctagcgcctgcctcttcctcttccat

SEQ ID NO: 239652 - DNA, 105 bp, Homo sapiens
  chr18:14431303-14431408
  hyper
tgctactccgccgccgccttctcacagccacaacaacactgcagcagcggccacacagagcgcgctcccgacgccgagccgggcgaagagcggggacgcgctcgc

SEQ ID NO: 239653 - DNA, 45 bp, Homo sapiens
  chr18:14450360-14450405
  hyper
cgcgcccgcgcccgcgcccgcgcccgtggccgcgcgggccccagc

SEQ ID NO: 239654 - DNA, 53 bp, Homo sapiens
  chr18:14450817-14450870
  hyper
ggcgattggcttcccgcagcagcagcccgtcactggggcggcggcgggaccgg

SEQ ID NO: 239655 - DNA, 96 bp, Homo sapiens
  chr18:15198164-15198260
  hyper
agcagcggtggcgctgacaaaaagccgcaaaaagcagcggcagcgggggtaaaaagctgcaaaaagccgcggaggcgcgggcgataagccgcggcg

SEQ ID NO: 239656 - DNA, 2090 bp, Homo sapiens
  chr18:18821314-18823404
  hyper
ttaaaaatggagccgcatctctaataacaaaagcctccagctgtgaaaagtggagctaaatctctctaccgggccgcagcatctctcaagaaccttttccccgcagcacccgtcaaggcccagggccagctggacgcggctgccctggggtggagccgtccccgtggtcccgggaggctaccgacgagccggggcccggggccggagggcgtgctcctccgggaggtgcaaaagtcggcttgggcccggagctcccgggtttgtttggttttgtccgcgccctgcccccaccctacccccttcatgcaaaaggccaagggtttccgagccaccactgcccaggccgagttcacgcttggggctcttcagccgccgtccagtgaacagagaaagcaattgcgcagaggcgagagcaggctgaatgaacgcgggctccaggggaaataatttttcctcctggcttcgcgcgtcagcacactggggtgcagccctccctcacagaagaccccccccccgcacgaccccctgtacacccccgcggggctgcgcgttcgtctgtgcggcggggtttgggaatggaggcgtgaggaccgcgcatcgagggctccacaggctgggcggggggcgtcgttggaggggggtaggggagaaatgcgcgcccaccaccctcacagagggcgagggacccccaaaagccactcgcggacgccgaggcagcgggaaggcgcgaggcggggcggggggagggggcgcgggggtccccgctgcggaggccagggcgggcgggaggggcagcacctgaggaatccgcctccggctgcggcggccgccgcctcgctccgccccggggaactgagcgcgcggaccgcgcgcctgccagagagacgccagccgccggcggcgctagcacctcggagtcgggcggccggagcagcggagcgcagcgcggcgcagggaacggcactgggggtggggagaccagcccggccgagccgagggccaccccctggtcctctgccctcgcgccccgctagggccaggtgagcggccgcggggactccggggcgcgggcaggaggtgagaggtcgcgaaccgggcgcgggagctcgcctgtgaccggcaggagctgccctttggcgggctggacgccctggccgcgcggggaagcgccgcagcggacttttccggagggatgggaagctcagcgggggtgtgagcggagcgcgtgcgggtggcgagggagcgccagtgccaacctgggagccgtgcctgccttccctgccgcctcgcgtcgcccaccgaagggacccggccgtgctgtccgcgcccagaggccgaaggcctgtcaccgggctctactcgctgcctttgtggcgggagcgagacggcccgggggtgggacgagggagctgcggcgcgccgagtagcgcggggtcccccggcggaggcggcgagggggcacctggttcgtctccccgagcccaggggcagtgagggggtgccgggcaggcgggcgggcgacaggtagggcgccgcggaggtggcggggagaggatggatggagttcagcctgggaaagttgagaacgtccagaggtggctgggcgctcgctcggcgtctgtgggtttttttcctcaacaccaaatgtcacttcgtcacgagcgggcgcgcgtgtcttccggccagcatgtccatttttctgtgcatggctgaggaccactcttattccgaatgagacacaaagagttgtgttgacagctgaccctgacacaagcagacagcgagtgaggtgcgccctggccggggagggtgagggagactcgttaaaggaaatccattcccgccgtccctcttcccagctccattaagaggaaactccatgtggagattcagtgcgtggggtttctcagttacatgagtccaaggaacgtccccgaacgcgactcgtttgcccggaactgccgctgcctctaaccgaggctgcgggtcctggagaaactcctcagtcttgcccctttctccggtgaacgtgacggttccaaggtccttatcctccccacccactcctctggccccggctgagaggatag

SEQ ID NO: 239657 - DNA, 32 bp, Homo sapiens
  chr18:19321116-19321148
  hyper
taagcttgctccccgccgcccccctcgggcta

SEQ ID NO: 239658 - DNA, 76 bp, Homo sapiens
  chr18:19577705-19577781
  hyper
tgctgacttaacaacgtcctgtttctacttcgtgagatggcactgactcaccactagtggtcgctattattcacac

SEQ ID NO: 239659 - DNA, 307 bp, Homo sapiens
  chr18:19745472-19745779
  hyper
ggccgcccccttatcgcagcccgaacttacccgcggcgcagcgagtacattaagtcacgtaaacagcgcggagaggaatgccaccgcggtgacctttcgtgcgccgccgccgctagcccacctccgcgccgtgctggcggccgccggcggcgcacgggggtcggccgggggctgcgccgggcaaggggcctccgggccgggcctggcctgcgcaacgcgccgggcctcgattccgaccgcccggggaccccggcgctggctccgcgcggtccttccccgaagtggccgccggcgggagccggcgctg

SEQ ID NO: 239660 - DNA, 340 bp, Homo sapiens
  chr18:19748121-19748461
  hyper
aactgggaaaacacgaaaatagaaacaaaacaaaaaaccagagcctaaacgctttctaggagaccgaccttcagaaaatcatttacttggatttacctgggcggggggtagggggtggggtcggggtaaagtataaaaattcattctcacaaaaacaacgcctcttgtcctaaagtctccctcggcagccttctggggtcacgtctgtcggaagaaatcctttctgtaagcgaaagggagcgagacatatatcacggctcctgcagcggacgagcctgcggccgcgcgagttgccgctgacagatcggcgctgataaccccgcgacgttcatttccagtc

SEQ ID NO: 239661 - DNA, 2494 bp, Homo sapiens
  chr18:19748742-19751236
  hyper
ctttccgtacatgacgacccgagttaaagttcccaaaggtcagctggggaatgttgtcttgaggttcccgaaaccaccacgacctgagccgtagcatcccgagatagggtcggagaaagtttaaggtcggtctcacacaacttcagggcaaaaagcgcatttgctgtgaaggggctaggcgggggttggggggcgggggggcgcagagcacgttcccccttccttctgggggcgtgctgacccaaggtctggagcgcccctcccgccgcggcggcggcgcgggactgtgcactgccaactcctcccgtgccaaggctccctccccctccctcgtgtgggtgtgtgtgtgcgactgcgggagcgggagggtgcaccgccgctggatgggtgcgggtcgctagccaggtcaggcgttctgtggcctccgcccctcccccggggtccctgggctcggtgccccccgggtggactcgcccccactccggggacagggcttgcggctcagcccacgcccgcaggcagcgcggctctcattgtctgcctgggcggcgcgctcccctcccccctcgccgtcccctccccaccctcttttctctcctcccctcgatccctcctcctcctcttcacctccagcgcccagctgctcgctgagcgcagttccgacccacagcctggcacccttcggcgagcgctgtttgtttagggctcggtgagtccaatcaggagcccaggctgcagttttccggcagagcagtaagaggcgcctcctctctcctttttattcaccagcagcgcggcgcagaccccggactcgcgctcgcccgctggcgccctcggcttctctccgcgcctgggagcaccctccgccgcggccgttctccatgcgcagcgcccgcccgaggttcggctgcttcctcctcgcgcgatctccccgctttcctcccctccacccctactcgtcgcgggcccctggcctccggctctccggccctctccaggccgcggtcggctccgacggtgtttccctccttccctccgggcgggctgaggcggctcccaggctcccgggacaccgcggaccaacttctagtctctttttctctcctcgaagcgcttatctgcgcgcagccttatctccgagttatctcggcgcaaaggggcgggagccggtagttaggcaggcagagaaacttctttcttgctatctagccaggtctgtgtgtgggcattaattttagtgtggtaatctccgatgagccgaggcgatttggaagagcagcctggaggaggccagcccggctgcatttcacctccctcccccactcgctccgagtctccctgtcattcttcctgctctcccatttggggtcgcctcggctctggggcggtctcacgctcccccctccccagcccgttgcgttccccctccttttctctgctctccgctccaccccgctacgtccgattccggaacggtccggcgtttctgctgctggagatgaccgcggggtgggccgggtggcccggccggcgtgagcgcgcacgctggtggctgcaggcgcgggccgtgtctaaggtgtgcggcgccgcggggacgccggtggggctggcgattcccgccccacaagctctccgcattgcctctgctgggaaggacccagactgctgcccccgccctggcgtcccactttccctgggccgagttgcatttctctctggggctcgcgttcgggctggtcagcgcagtccgggaagctctgggagagccaatataggagaacgcggcggtttcgttttcggggacaggttgccttccttacgcgaagggttttcccgtggggaaccctcaccccgaggcatttcgggagaggggcatccgcagagaggcgggatgcggcggtgccgacacgcacagctacttaaattcttttgtgtgtcatcagcccgggggagacactttagggcggaaggaaagcctcagccagcttctgcagatcacccctgggatctggcgcgcgcacggagaaaggatgcggccgagggggtgggcggggaggacgcggggaccggagcggtgcctttgagggagggctggtatcccagcccttccagggccctgtggcggctgcgcaggctcccttcccctcccttattgatctccacgcccggggcagaaataggatctttgagaagtctcaaatgggatctttgagaagtcagatcccatttgaactagaaaaaggagtggaggcgaggtagcgtgcagcctacgctcttgttaacccgtcgatctcctaccatacccgtctcccccaccccacctcaggagctagacgtcagcttggagcggcgccggaccgtggatggccttgactgacggcggctggtgcttgccgaagcgcttcggggccgcgggtgcggacgccagcgactccagagcctttccagcgcgggagccctccacgccgccttcccccatctcttcctcgtcctc

SEQ ID NO: 239662 - DNA, 494 bp, Homo sapiens
  chr18:19928405-19928899
  hyper
cccccaccaagcgccgtacccacctccctcgctatcaaacaaaagctccaggcattggaaacgtttccccgccgggagcgccagggtccggccgcgctgcggggtcggtctgcgcgcgcggcggggtggtgggcgcgtctggccgcccgggtcttcaggcgcgcagcgacgccggcccgggccgccggtctcagcgcccggctccggctgggcggccccggacgcgccgagccaggctcgcgggggtcaagtccaggttgcggcgcaggaaggcggcgggggaggggcgggccggccgcgccctcaccccctcttctccgcgcccagtgcggaatgatgggccggttccctcggtgtggtatgtctgtataaacatcgttagcctccgggccgacacgtggtgcatttttaatttcgccttacaaattgcggcctcctggcgctggagaagcggtgggggaccttgactccccgcctttcgggtgcattcctgg

SEQ ID NO: 239663 - DNA, 229 bp, Homo sapiens
  chr18:20139428-20139657
  hyper
ggtgtcagggacacgcagctgttttcaaggaaagcctggctccaagaggtcctccccggccgggccgcctggcggctccatcccgggtgggtgtcagcgagcgcgcagcccccgacgcttgtcctctccctgacagggccctggccaatgtcctgctgctgcgggtcgtggtaatttacatcctctctgtgtacattaacttatctgcagccgcgctggctgcgctcct

SEQ ID NO: 239664 - DNA, 46 bp, Homo sapiens
  chr18:20512628-20512674
  hyper
ctagtggtctaaaaacgattcttttacaaatcaggagaaataggaa

SEQ ID NO: 239665 - DNA, 1174 bp, Homo sapiens
  chr18:20512974-20514148
  hyper
ggtacaggtcactctacacatgcttccctgcaaaatgcttaagctagacacagtgtacagataactttcacagaaccgcaagggcttgatgctcccccaacagaacggcttgagctttccccagcgcaattcagaaatgctgtggcggtcgccagactcttcgggtagctcccggcagctccgaggtagcgctcccctccccaaccatcgccctccgggatgggccgcaccgaagagcccgctcctcagctagggcacgaagtgcgccgccgcgatgggcagctggaggaaggggcgtgacgcaagtggaactcccgcgtgacgtcgcgcgggctcccgggcggggcgggtccggccgcctccgagcccggccggcagcccccggccttaaagcgcgggctgtccggaggggtcggctttcccaccgaggatttggcactctggtgagggaaaagggcgaaagagaaaagcgagcagccgtcctttcacagcctcagaaagtgctcgcttcccttcgggggctttcgcgaatcccgaggcaatctcggaggcggtgagtaaaagcaatctctttaccccacccggagctctgggtcggagcgactgcttctggtctggagctgcgtgcttggcgaagggctcccggggtaggggtggctcccggctctggggttgtgtctgatgaaataggccgggcccgggctacactcggtggtggtggaccggcgggaggacgagcgctacctcagtactacttctgggtctcccgcgcgggctgaggaagcgcctttcgccgccaagcccgccccgcgcatgcgccgactgcggctcgcgcgcgcgcttcggaggttttttggccagacccgcacgcggaaccggcgcgggcacctggggagaaatggatggagaagggacctggctggaaagcctttgccccgctgctctgctccgcccataagaggacccctgaaatgtcccgtgcagtttgttcaagtcccctgtgtgatgaaatgtgcctctcgccttacccgtgtgagaatacctgtggtgtggcagcgagtattttggtgagcacctgcagtgtagtggtttatactaaggaatacacacaaattacaggcctttgagcccagaatgcaacttgggaggtaagacgtgacgttctgagagattg

SEQ ID NO: 239666 - DNA, 85 bp, Homo sapiens
  chr18:20715395-20715480
  hyper
cgcgagcgcggggcgcgcgcacctataaatacggacacccggccccggagcccgcgagccagcggccaggcgaccggcgggcggc

SEQ ID NO: 239667 - DNA, 481 bp, Homo sapiens
  chr18:20715851-20716332
  hyper
cgcgccggcccagccgccgcccgaacccccccggaagccgcgcatggacccgcggcgccgccaggctgccctctccttcctcaccaacatctcgctggacggccggctgccgccgcaggacgcggagtggggcggtggcgaggagggcggcgcggccaagccgggcgccggcggcgcctgcggcgcgaggactcggttcagcttgctcgccgctgccgagcggggcggctgcatcgcgctcgccgcgccgggcacgccggctgcggggttagccgctgggtccggcccctgcctcccacagccctcgtcgctgccgcccttgattcctggcggccatgcgaccgtgtccggccccggggtggcgcgggggttcgcgagtcccctgggcgccggccgggcgtcgggggagcagtggcagccgccccggccggcgcctctcgccgcctgtgcccaactgcagctgctcgacgggtccggggcc

SEQ ID NO: 239668 - DNA, 383 bp, Homo sapiens
  chr18:21033058-21033441
  hyper
gccctgccctgcccgacacaggcaacgtgaccccaagcgacagccagctgatgcttgcttctccgagcccggcggtcagcagccggaagtagcccgcccgggggcggggaaaggtgccttaaggaggagctaggggcgtgcggccaattgcaagcgactgtcctagcgaagagggcggaagaggagagatccagttccggacgcggccgccgccgtcgccgccatctgtcacctccactccggcatcagcagccagtcgcccgtgtcccgcctgtctcctcggcggagcctgctgcccgtcctgccacctctctgctctgttcttgtctctgccttcattcccgaatggatctggtaggagtggcatcgcctgagcccgggac

SEQ ID NO: 239669 - DNA, 175 bp, Homo sapiens
  chr18:21083481-21083656
  hyper
cagccgcagccgccgctacagtccgggccgggctccaccgcgcatcctgctccactctggcgaccgcccccggggcccccgccgcgggcgcggcgcccgccatgggcgaggaggactactatctggagctgtgcgagcggccggtgcagttcgagaaggcgaaccctgtcaactg

SEQ ID NO: 239670 - DNA, 186 bp, Homo sapiens
  chr18:21242241-21242427
  hyper
tgctggccacccctccggggaggaggcatccgtgggtgcagctggtactcctgcatgaggacccagagggtcagggtcggggactccttctgctgcaggacagcgctgaccccaggcttcttacccgcccccgacctgttacccggcgacagtccccgccgccccgtcgccgggcacagactcagc

SEQ ID NO: 239671 - DNA, 342 bp, Homo sapiens
  chr18:21242667-21243009
  hyper
gctcaccttgaaggacatcctgcacatgtccgcggccgcccgagcgggagccggcgcgctttgggcccggggcgccttgtcctccccggcccttcactctcccggggctctcggcgttccgcagaggggcggcctccgacgccgcgcgctcccgccgcccggcccggcagcagccgccgcacacagggccgggccgaaggggcggcgcgggggcgcgcgcgcgcgcacactacacatggggtgtcgcgtggacgcgctccaggacctgccacacacgcgcgtgcacaaacaccccaaactccgcacgcactgtgcactttccacacacgtccacacttccac

SEQ ID NO: 239672 - DNA, 1243 bp, Homo sapiens
  chr18:21269066-21270309
  hyper
gttgaggagttgacgactcaacacttggctgggaaatcgaaatgtctttgatgtgagttctgtaggtagtggcagtttcctctgctctcaaccaaattcgtttacaagcctcctttactcttaggtcacaggtggcttttctggctttgacctgagcggtgagtatccagagaggagaacgatctaattaatttctgtcctggcgcctggagggttcgaagatcccaggctcccgttcccgccgcctgggtgggagcccgggaacgcctctcccattccccgcccgcgaagtttgcagcgcgcctcgcgcgggagagacgccgtctgctggcgcgcggctgagcgctgtcagttcctgatccggctggtgcccgctccagccgcggcaggttccagagctgagaggccacccccacgccgcgggcttccagcgcgtggagcaaggggagcggccccggcgccgcccatatccccggctgcgctagtcctggcgctgcaggtccgggaggcgcaggcggagagcggcggtgcccccgagcccctctgcggacggctcaggcgggaggaccccgcgcggctggatggcggcggccgcgcggcctcggggtcgggcactggggccagtactgccgccgacgccgctgctcctgctggtactgcgggtgctgccagcctgcggggcgaccgctcgggatcccggggccgcggccgggctcagccttcacccgacttacttcaacctggccgaggcggcgaggatttgggccaccgccacctgcggggagaggggacccggcgaggggaggccccagcccgagctctactgcaagttggtcgggggccccaccgccccaggcagcggccacaccatccaggtgagggcctcggagagagccggggtgggcgcgccttttccttcccgcgccggccagacacccggagaagggatcgggccctttcctcacgcgcgctagtggctccgggcgactgggaagggcagcccccatccccgcgcgcgagggcccacgacccaggagcgatctcgtggaagcaccgcaccggcaccaccggcccgaggcgaggagggggagcacgcgaggtgacatgaggctgtggtcaggttcgggctggtggaggggaaagtgtgaggctgcgctctaagagatgcaggcgcctcggcccttcccgcctccgtcacccacggagcgtcccgccaggcttgagtcctcgagggttcaggggc

SEQ ID NO: 239673 - DNA, 211 bp, Homo sapiens
  chr18:21594007-21594218
  hyper
tggtaccgggatccgaggggctctgccttgcagtcccgcagcgcggggctccggggagctgcggggcaggtgccagagaccccgcccccgccgcccacctcctcgggaattggctgccctggtcctagggggcggccccagggtcgggatgaagtctggggtcgcgggcgcgggctgcgtggggtttcagttactcgtggagtttcagtta

SEQ ID NO: 239674 - DNA, 880 bp, Homo sapiens
  chr18:21851440-21852320
  hyper
actctgcacacacacgtccaactattcttggatctactcacatccctggatcaagtctggccgccctccccgctccgtcccccggcgtcctccgtggccccaggctgccccgcaaagccaccgagctgcaaatacacccacctacctgggccagatccgaggaccccggctggcgcgctccaccctgcgctcctcgcaagctccagcgcgaatgcgctcggcctgctcctcctcctcccctccagtcgagccgaggcgagccgatccgggaggcgcgacccagggcggcccgcaaggtctccctaagtcacctttgcgcagcctgcccctggctccggccgggcagcagcgccagccttccccagcgaggtcgggcagaggcgttgcccgccagcggcccaggactcccgcgccgcgcccgcccgggccgcagaggtctgcgctgcccctccgccgccgctggctcggccgcagacccgccctccggggctcgcggggagagcgcgggcgggcggcggcaaggcctgcggcgggcggctccctgcgcgcggcgggcagcgtccgggccgctcctccccttccccagcgccgctggcgggcggaggcgcaggtagggaccgccggggaagcctgcacggccctccgaggagaggtcggggactgctccttgggctctacgtgagtgccgcgccgaggcgcctgcgaggtcctagagctgctgtgcgctcggccctctcctggagacaccggccctggcaactttttttttttcttttttctttttttttttttttaaccaacccgccccttgggaaactctggaaagcaaaggaatcttctctccagtcctgcctgtcacttactccggctcacgctgaag

SEQ ID NO: 239675 - DNA, 960 bp, Homo sapiens
  chr18:21977164-21978124
  hyper
tagaaccgaccacgcggtacattgggaaacggtcacatgaacaatgcgtgacttccattgtgcatcaatcctcctcttgttaggaggaaattaaaaagtcacatggacacacgaaagtaccgagaaggcacgcagctgaagatctggtaggggatgcatgcggcaccagcatggtcgtggcacccgagtgggaagtgcaacaaacgccaacatcttgttacttttaacgcctaacttcctgcagcgctggagcagccagcggccgccgggaagccgagctcggctgcagccctgcgtcgccgcgccacgacccgaccatcctctgagacgcccgggacgggagcgcccacccccaaccaggcgcggacagacctcccgagcgcagcccggcgggaacccgtcagcgcgggaaccggcctcgaactccaggcgtggacagccgcgagaaactgacctacgcggtcacccgggctcccagagctcccgaggcggtggccacgaccccaggcttcccgtccgcccgccccacgtcgaggaagtggtcgtcaccaactctggctggcactccccgaggacgctcgagcccgcgtaacgtctgtctccgggacccggcgccgggaccacggcggagcgcgaggtggcgccgcccctccccgcagcccgcccctggaacgcgcatcctcctggcgagctggcatccctcccgacacgtgaccgcagcggggacacgcccgttccccgcccactccccgcccctgcctggcctgcccacgcccccggcccgctcctgtcccgcctgggccaccggcgctggttccaggttttgccagctactagggacgcgtaaagccttcgcgctcctcccaccacaccccgagggaagaagtggcaggccttacccggagactacaaggaaccgcccgtgtgagccagtggaagactcgcgtccccaggcaaaat

SEQ ID NO: 239676 - DNA, 247 bp, Homo sapiens; identical to SEQ ID NO: 204927
  chr18:22006301-22006548
  hyper

SEQ ID NO: 239677 - DNA, 168 bp, Homo sapiens
  chr18:22006775-22006943
  hyper
ctgtctctccaggctcggctccggctcgcctcgccatgccagtcctcctcagccgaggggccctccgcctggggccgccccgggttccgccagcactggccacgccatttgctccaccgcgttccattttcccggcgcttcccgtcggccgagcgctcttaggccggc

SEQ ID NO: 239678 - DNA, 462 bp, Homo sapiens
  chr18:22929097-22929559
  hyper
ggacaggcactaaccgctatcctacttcaactcggaaagttcttctttccaagtgactaggaagaggtttgtcctggtacttcgctcagcgttactttcaagaaagccggggtctcgggcaagtctcgccggcgcgagcctggtccaccgttaccctgacacccgcgcacgcccgtggcgtttcttttttcactgtcgacacttggatctttcaggccctgggtctaggtttcccccagaaaaatgaggggcccatgtgacggaaaccaccagacacactgtgtggagacacatgccaatgattcacctcgttcccgaactaaaacttctgcgctttaggaaaaaagcaagcgttccaatctgcgaggccctcccccaccccgtcccttcccaggagaagaaagaaagggctttgtgtgtgcggtgagggctccgttcatcgagttcaaaaatgcacagcgg

SEQ ID NO: 239679 - DNA, 715 bp, Homo sapiens
  chr18:22930639-22931354
  hyper
ctttctaccgccgccccattcggggatcctcctcccgtcttcgtctccccccaccccgacacctcaccctcactccacctaggggctcagcggggaggggagcgcgcgcgcccccgcactcacactcacactcacgcgcgcacacgcctcgcagccacgcagccctcgctccgctacccacagtgacactcgcggatgggggaaagcggggagcagggggttcctccttacctttgagggatctcggtttcgcttgcttgcggcgagacatcctaaaagcaaacagctgaagttgtttcaattcagccctgaaagaaactatacttcctcgtggccgcgcgcccctcgggccgcggcgcctcgcgccctccgctcggcctccctcgcgccctcgctccgcgctccgctcctcgctccggctccggctcgcgctcgcgcgcggggctcgcggctgcccgagctccgcgctctgcacgacggcggcggcggcggcggcggctgctgcaccaaactttcccagccttcgacccccacccccaatctccaagaaaaaaaaaaaaaaaggaaaaagaaaaaaggaaaggagggaaaaaaagctaaaaaaaaaaccccaaagacaatgtttgaagagccgtcagctacactaaaaagagaaaatccgttactatttccacctcaatcaaaattcacatagttcatgcgaatagaaaaaaac

SEQ ID NO: 239680 - DNA, 39 bp, Homo sapiens
  chr18:22932062-22932101
  hyper
ggggcccctaacccgcagggactcgctctgtacgtaatc

SEQ ID NO: 239681 - DNA, 252 bp, Homo sapiens
  chr18:22932436-22932688
  hyper
gggctcttctgctcgctttttttcctcttcagaaattaaagcagaggagcatctgaaagtggaaaggtcccccttctggtaggatggatgtaaaaggaggcaacaatttgttcttgagggggcaaaaaaaaaaaaaaaaaaaaagaaaaagaaaaagaaaaagaaaggaggggggaaattcattgcttggcttttgcattgtcggactttaaaaaagtgtgtctgctgttgttgcccggactcgggaaatct

SEQ ID NO: 239682 - DNA, 32 bp, Homo sapiens
  chr18:23806175-23806207
  hyper
aaggagaggaacacggatgccgcagttttcca

SEQ ID NO: 239683 - DNA, 46 bp, Homo sapiens
  chr18:24127691-24127737
  hyper
agcttgcggatgaccgcggccagcgtcaggttggcgctgcgcagct

SEQ ID NO: 239684 - DNA, 31 bp, Homo sapiens
  chr18:24128609-24128640
  hyper
ctcttaaaggagccgcgctccaattgtcatt

SEQ ID NO: 239685 - DNA, 268 bp, Homo sapiens
  chr18:24129548-24129816
  hyper
caactccctcgggcgaggcgctccaccaagctggagctgaagtctccctaaggcccatcgggcaggcggaaaaagcgaacttgtgtctcggccgaccctgccgcagccacaattcggcaattcggatccggagcgcactctcactcaaagtttgccaaccgccattcgttcgccctccgggctgcgctgcctcaggcgcgcgggggcgggcacctcggaaactggaaaagcagccaaagagctcgccgggtctcgctttcccatagga

SEQ ID NO: 239686 - DNA, 261 bp, Homo sapiens
  chr18:24130253-24130514
  hyper
gggaagcattttacgcatcaattgaaacccatccatcaatttgcattttttttttttaagaaagaatgaaagaccaggtctcagggcagtgtgggcttctgagtgggagttgacgatgtctttttctgcagcgaacgctgctggtcctccgcgtgcctgcccggccctggacgccacccgagcttcggggaaaccgcgccaggtgtgaaacaagttagagcaagtccctgcctcgcgggccgcctccggctccttagggaa

SEQ ID NO: 239687 - DNA, 620 bp, Homo sapiens
  chr18:24130574-24131194
  hyper
tctcatccgcccggctctccgcggagaaccgtccgggaatcgtccccgaggtgcggcgcgggaggtggccggctttgttcacaatgcactgcccgccgcacccgccctggacacgtgcagaaaggcgtgctcgtttctccgaggctgcggtgagcagctaagttagttgcacactgggacccccacatacgagctggcacacactagtcacacacggctaattccagagggctggccctttgtcctgggacgctcccaggttttcgggccgcggtgcggagaactcaggtgggtgcccggcaagttacctaccaggggctgttcccccgcgaccctcgccataagcgcagggacccgggggccgcgctggctccgggctgcgctcctggcttggcaggggaccaggcccacgctgcagcctgggagcggagccgccccccaggtctccccacctctgcgggcggcggggtccacccccctcccaccagctcccctccctactgggcgagctgctttgaattgctcgcagtttgccggaggcggtgtgctgggttggacgctccgggaaacaaagcaacccaaaacagctcccagttgacgtcaacttatttccagaaaag

SEQ ID NO: 239688 - DNA, 164 bp, Homo sapiens
  chr18:24235704-24235868
  hyper
cagtgcaagtgttcgaaagcacaaaggcagactgtctacccgcgacagttcgcaagttgcggtggcggggcggctgtgcggagcgcgcgtgcaggtaagggattcctgcacccaggtctgctttcctcttcctggatgttttggggctcgacctcacttttaac

SEQ ID NO: 239689 - DNA, 59 bp, Homo sapiens
  chr18:24236254-24236313
  hyper
ctcgcatccttcccccgtcccagcgccgcccccaccccctccccgcctcccaaggagac

SEQ ID NO: 239690 - DNA, 1027 bp, Homo sapiens
  chr18:24764493-24765520
  hyper
gctctggccacgatcgcacctggcctcccggtccccctaacttccctcccacctctcccgcagcctgcgcctgagcctgagccaggtcgcggagtttgagactgacgcaaaggaggcacccccgcagcagagatgctcgtctttctgccacacaccctggaggacccgacagactggcagcagaaactaaagactgttcctgccgtcctctttccaacctctgcatgccccaagaggggtctgaccccggaatcctggagtccagggtgccccgccggggcgcaggaaggaaactcaggtagctgacaagttcaggcggccgtccttctccagcgccccctcaaagtcaggatcccctcctgctcccgccccccacctcccgccatgcgtccactgaagtgaagggaagtgggttggaatactggaggtaggggagatagaaaaaggaagaagcctcccgcatctccagcggcgaagcacctggaaaggtgagggcgcacgtccccgcccaccagagcccgctcccggcgcgggtacccagcagcgcgccatcatctctgcccctccagtgccccccagccccaaccccagccccagcgcggttacctcgcgggccgctgccgggcgcttgcaggtgctgctgttccaggagcgcagcttcggaggaaacttccccgcgctccggggcaaactcccgcgcactcctggcagccgtgaggtggctgagagcggagcgccgcgccgggagcggggacagctcggagtcgggcgctcaccctggccctgaccctcccgcgtccggcccggctggggctgcggcgccgcctccgcgcccgctcccgcccgcgcccccgcccccgcccgcccgggcagctccgcctccctctttttctctccctcgcccccgctgcccgccctgccttctccagctctgcctttgtggctctctggtcccctctttcctctgactttctggcctcgcctccgctggcgactcgccctcccagccccgcgtgccagggctcag

SEQ ID NO: 239691 - DNA, 1295 bp, Homo sapiens
  chr18:25755346-25756641
  hyper
aaagggaaaaggaacgctgggaccctggcctgggaggcaggggtggggagagacaaagtgagagagcacgacccgggaggagagcgtggagccgggcagggacaggcgtgccgcaccatggcgcaccatggacagggctccgcgcggcggcggcccacgaccgtctaggggttgcgggagaaagcgcgagagactgcggaggccagccccgtccagcccctgcccccgccccagcagcactcaccccccggcgggccggagcgcgccaggccctgacccgtgaagaccacggagcggggtaatccacaccacctgtctccacccccggagcaggcacttccgagctgcgtccgcacttttcggggctgccagctggcagtagagcacctctccccttgccccgagggcgacaggcagggggaccctccgtggattttcctgccccgcggcgagggtgggcacgcccctttcccgcaaccttcgagggaccccacggcaggcggagaccgacttgggaccagggcactgcacccgcccagctagagggtcccggccgaggctgtgtgaagtggcctccaggcctgggctggctggtcgggaggagcctgggggcatcctcgggttggaggcggcggaaagttgggctgcccccgggctgggaacccgcagcgtgcagtggcgagggaacctgcgcccggactggagcaggtgcttcctgccgcggaggagcctcttagtagagattaaatgaaaaggctcgctggctctctcccgagggtatgaaaagtacggaaggctccaggcaaaggcgcccccggggcgcatatagggcacaggcagccggacagagaaaggagcagccgcgtaacggaacttctcgcccgggggagatactaggcgtgagaggccagactcgttctacaggcaggcgctgaccggcagagactcctccgggcaagagggccagattttctttccaggtgggacgaacacagaatattgtgagggcaagagaagaagaaaaggaggcaactccagactgggataaagacaataggacagtagagcccttgagcaccgggaggcgcacgggtgcagggtggggtaaggtggaggcaagtcccgtaactaagacaccagagtgagaattcctactgtaaactcgcgacccatccctgcagaaataaacaaaaaaattggagcaaagtactatgcgaggggcgaaaggcacagaaaactgcaaaacctgggagttatcctgcctcaccctcctgctgcctggggacaccccccgc

SEQ ID NO: 239692 - DNA, 824 bp, Homo sapiens
  chr18:25757661-25758485
  hyper
ccggcgagttggagactgttctccggcctcggccgcaagggggtgaggcgaggggccggcgcggtctctcccgccgcggctccgtcccgcgcagctgctgccgcagccgcccctgctgcccgcgcaccggcacccgcccgccggtcctcgccctgcgccgctcactcgcgcgcgccgccctccgtcgccgaccgcgcaccccgctcggcctccgctgcgcgacctgggcgagccgccgccgctctccccgcgctcgccccacgcgctgcctggctgcgcggcccgctcccctctcctattcctcccgccgccgccgccgccctcgcccccgcctccctcctccgccgagcctccccgcccgcgtcgtggccaatcggaggccaccaagctgcggctgtagccggccggatccgcggcagccgcccgcccccgccccgccgaagcgccccgtattttgctgcagcccgcggggggtcgccggagggaagcctagagtgcgccgagcaccgccccggcaggtggaggggctgcgggaaataaaataacttgggcaggaacttgattggtagcaggttcatctttggtccgcggtagggaatctaatggagatgaagaatggtggggaagggggggcggtgtctccttgggagcctaacgtacgcttctttattttgtcattctttggagatgggtaatctttcctggcaggggcagacacagcaaactaaggacgcaggccaagctcatcctagctattgttgtctgaggcgctcgccgggagccacctgcgggcgggggagggcggaggccgcggctcctctctg

SEQ ID NO: 239693 - DNA, 305 bp, Homo sapiens
  chr18:28620900-28621205
  hyper
ttctgtgcactttccggtatttaagtctccagatacagcatttaacctaaactcaacggaattattttaaaaaaaaaaaatcttaaacgagtatgtgctagatcaaagctgaagcttcctccgtttagatttacgcgcaccttcttccttgccacagctcgacacccccacccatgccttgccgggaaagctcctggtcttccatggcctctgggagcctcgagcgaatgcgagaaattctgagagcagcacccgtagtttcgttccccatcctcaatcccttcgcaaaggaaacacaaaacccc

SEQ ID NO: 239694 - DNA, 1594 bp, Homo sapiens
  chr18:28621469-28623063
  hyper
gccaggaagcagtaagaatccgcgagaccagactcggctcactgccgacgcgggtatagacctcgctcccatcggaccccatgcgcatccatggatgcgggtaagtcgcgggtccgcggctcctttctgggcgtgcggaatgaaactctgttgaagcctgaagcttcgcgtgtaaccgcgccgccagagttccgaacacttcaagtctcccgtgttctcagagcatcgtctctaacttcctctcctagaggatttcgtcctgggcggcaggtttccgtagactcgaaaccccaggctgtgctccggccgcgcagtcctccccggagccggagtaagtacgacgcaaccccaccgcatccatcatcccccaccactgtcaccctctacccgcctccacacctcggcagcatccccaaaacacaacacgaccccaacccccattctggcccggtcttcccacactttcgcgcccccggcacatcccgcccccagctgggtggctggcgggggtggaccgcttgggtgagcttctgaataccctttaggggagataccgagaaacccacttctcaggggcagccccaccaagggacccagggacacagccccggctccactcactaacgaaccaatccgggtcaactgcgacccagagctggggagggggcagcccctaaatcccttttcaagtctgtgctttgagctctcagggatcctctccacccaaaggcgccctccaaccaccatcaccaccagctccaccacctggggagaagcgtgaatcccaaccccctgcccaacccgcgacggcgcccgccagagcgcagcgaagcctgagcgcgactcagaattccaacaatcgaacaccttgtctcaaaacaaaaagctcagtccagagtcgacccgcaaacacacgttttctctcctcactcctgcaggcccgaacttggggctgctaccagacccgcagcattgatctgagccgcggttgtcacgtttcggcccgctttgtccccagctccgtgcagcgtccagggcggatccacccccgtccccaccccagccctatccggcgagatctggcttaccacgagggtcagcagcagatgcaggcagacggctccgcgcacggagcgccggggcccagcggcggccatcgggatgccgggcagggccaggagaacgcgggcgccgggagggtgccgagagcgagacctgccgaggtgcagggcgcgggaggtgcttttctcgccgctgcttgtttttaagtgtatttggcctctctcaggcttgcctgcccgggagcaacttcacttctgaaaccggattggacccagaggacgcggagaggccactccttgttatttctcaagttttatcatcgccggcgcggctgaggagctgcccgagcctgcccctctgctccccagcagccacccgggcgttcgcgctcgggaaagcggtctctggcgcaccctctgccagttctcccacgcccctcggctgccccgcggcgctgccgccccgcccggcccgcagagaggccctggcagcccagatcgtcccagggcggccccatcgccggcgctgcgcg

SEQ ID NO: 239695 - DNA, 1472 bp, Homo sapiens
  chr18:28680887-28682359
  hyper
ttcaggctccccaacgagatcccatcggtcaagcctgggaaaggggctgtcccgccccaaataaggccaaccacttaggctcccagctctgggaaggggtagggtcattgctgtagtgctctttaaagaaagaaagaacctggggcaaggggcggtggcgcggggggcgggtggtgagcagaaaaatcgagtcgcctctggggacaagaaatcagaaagacccttccttcctccgaagatttagggaactgaagcctcgcacgttaagaaaccactgaaactgtacaaatgctcacctagggctcgccggtcgacagtcctcaggagcaaagggtcaagatcccctcccccacccgccacttccccccgcccttctctcagagtaaacaattcccagaaaggcgagcagttccctttttcacccaaggacactcgctctccgtcccggccgcccagcggttcccctttccgtggcctgggcaggcgctgaggcacagggagccgcacgttcccgaggcacagggagccgcacgttcccgaggcacagggagccgcacgttcccggggaaggtgccagaggccagctggacggccccggcgcactcccgccccggcgcactcccgccccggcgcactccgaccccggcgcactcccgccccggcgcaccctgctccccggcgcgtacccaggggccacgattttggctgggcgaaagcggcccgctcccgcctctccttgagtgcgctgattacatctaccggagacaccttcccttcccttggggatcccaactctcaggtcgcgatcctcttcctatctgccctcccccacccccgccaactccattttctagccacccagaggccccttcaccccagcttttcccgccacccccacctatccccgttcccctagttttcctctgcaccctaggcgatcgcccccttccccggagcggtggccgcggctacactcaccgcgagggtcagcaggagcagccggcagagggctccgttccaggagccggaggggcgggctgcctccatggagagggctcggggcaggtcgcgggccgagcgtcgggccggggtaggagggctccgcggggcgagggccgcggccggagcgcagtctgggcccgctgctcaggaggagcgcgaggcggaggaggtggggcgcgcggagaggtgcttttcttagcttctctgaagcgcctgcctctcatccaaggggcttttcctttggcggagggaggggctccagacgcgtccaaaagacaccgatcggcccctccttgttgtctatttaagacttaagacttcatttctctaagaaagccacgggtgggaactccctctcgccgccacccttttacctgcgcaaggtgtttctcaccagcggacgccacctataaggcccatctcccccaccacgccccggtgtccgctccgccaggcgagattaacagccg

SEQ ID NO: 239696 - DNA, 900 bp, Homo sapiens
  chr18:29077773-29078673
  hyper
cgcgctacccaggtcgagccccgccaggaggctccctcctcccgccattctccagagagtagggggtcgggaaggagagaacggcggggcggggcctgccacccacagtccccaacccaaggacgtcacggtcccaggtgcgagtgcgagcgggcgggagtccaccccgcgcctccctcctctgctgaactccccacctctgtaaaagcggcccgggccggcccccggctccattttctcgcggcggccacacctggagccgcgcctttgggttgggctgggctgggccgcgcaaccgccacgggaagacagccctcggggcggggagggagagggtggccgggccggggggaggccggggccagggaggagccgagtgcgcgctcggggcaggcggcggcgcggagcggtgcggcggcgggaggcggaggcgagggtgcgatggcgcggagcccgggacgcgcgtacgccctgctgcttctcctggtaagtgccgcaagcgggacaggggagccaccgccggggagggcgtcggtaggcgaggtctagacctcgcgaccagacttgcccgccgcccttgtgcgcgttacctgcccggcgctccttcctgctgcccgaggggggaaaagggccgggcaggctgcggcgagatccgacctggggcttcggaaaatcctcttggctggagccaggagagtaagttgcgacctatcgaagttgtgttttccttcccgcgtcacccaggccccagcgcccttttctgtggtgtgtgggtgtagtgagccctggggcggggaacaccattgctgggggtcggaggctttgttgagagtctctgggacgagaaacgtggaggcaatagggaacaacctcgcgcttcttccacgttccttaaatttc

SEQ ID NO: 239697 - DNA, 211 bp, Homo sapiens
  chr18:29599218-29599429
  hyper
gcgctttcagctcccgaagcccaggtgcggaactccagagaaggggatccaggcacgggtcccgcccagagccagggctcgccaactggggagggtgctcttggctggagaaccagcgctcgcccaggcacggaaaggaaacgagctccagctacaaggcaggggctcccgcaaagcgcagttaccccgctgaacacggtagaacgggctg

SEQ ID NO: 239698 - DNA, 221 bp, Homo sapiens
  chr18:29599655-29599876
  hyper
ctgctagggtggggcttggacgttagccgccaagcccctgaatgtactccttcaaaacccagccacaacgtaacaggaggtggcaggctacctgctttacgcacggtctctccaaaccggcggaaattacagagtaaaataactttctcaaaaccgcatagtacttagctaaaactcacagttggtgcaaagccgtggtcgtttctaagaagaatttaaaa

SEQ ID NO: 239699 - DNA, 118 bp, Homo sapiens
  chr18:30050221-30050339
  hyper
ggagacggctgtcctcgcccgtctgccccgcgccccagctgggactcaccgttgtccaggcgcgcgatctggggcagccggtaagtgctgaccaggaggtcgagcggcacggccaccg

SEQ ID NO: 239700 - DNA, 467 bp, Homo sapiens
  chr18:30051179-30051646
  hyper
caccgtccgcctccactcccatcctggcaatgcggtggctaaatacaaggcacaaaagatacctttagtggcgctccctcttgcttcccggtgacccagactttggtcagaagagtaccacagcccaacggggctgcggacggcaggcgtggagcacgccttggcgtttcccctcaaccctactcctctaccatcggagctggaaatgactcccaacagtctcagctttggctactagataagataaaaagggcaaagcaccgaaaagcggaaaggtggtgggtgatgagtacccacatacaggaaggtggccattcggtctaggaccttcactgagtgaacgagctgctggaggcgacgggagttgatgaggccaccaaacaccgtagacacggagatgggaagggaaaactaggttactgggaggctgctggggtcagctgttctcacccgcttttcccattcag

SEQ ID NO: 239701 - DNA, 1067 bp, Homo sapiens
  chr18:30350603-30351670
  hyper
gacaggggtgggggatgggagggaggggagcagggtggtggagcgggtggggtgtggtcggggtggggaagggtgtggaggggaggggagggcgaagaacaagaatcaaggctcagcttgactccctcctggcgcgctccggaccccgaccctaggaggaaagtccgaagacgctggatccgtgagcgccaccagaagggccctgtctggggtcccggcgccggttctgcgccctgcggctcctctcgccacctcccacacacttcgtccctcactttcctaaaaccaaccacctcagctcggctgttggcagcaacagcagtggcagcagcgacggcaaagtggcggctgaggccgaggcacctcgtgggctcgtgtccatgccgggccagatgaagggaaaggccgggaagtggggagccgggggtgccctgaaagctcagaggcgaccgacggcgaaggttccaggtcaacttgtgcccgaagctttgcttttcgcagttggcccagtttgggggagggggtaggaacaggggcccgaccagcgtgcggggtgtgcgaatcttagctctccaaaagctgggacccccttcgattatccatgctgccccgagaaactcctaggctaatagtctgagggaggagataaagccctttcttctcccgggaaagtgcagcggagcgcggtgaggacccgctcagtggaatcggcagaggcgggagctgtccttatcaattcgagctcatttccctcaacctggccctgcccgcttccccgcttcgcaaactgttggcttccccgtcaccactcagtttggctaattttccagagatggctttaaacctggcaggagaatccttccaccaccgccacccccacccggtggccccctctcccccgtctcgctcatttcaaagcgcggaagttcaggcatcaatctccccttccagcgaggggcggcaccgaggactcagggggaggaagtggggctgcgaggacgcgtttggagagggagccgggaggcctggaggccgggagggattcgtgtgcacggtttcccctcccg

SEQ ID NO: 239702 - DNA, 552 bp, Homo sapiens
  chr18:30351968-30352520
  hyper
aggcgaaatcgatacgccaggtccttaacctgtaattgcaccttccagggctgagcagaaagggaccctctgcttgcatcccgcccgcgcgccggcccgccggcccgccggcccgcccgcccgggggagagccgccgccgccgcccggctcggagggatcccggcggacctgccccttccactgcggctcactctgccctgcctggcgccggtcctggatcgccggcttcctatttataccggactgggctcctttcgactcactttaccatcccgttccaggtggaccctaccctccctcgcgctccctccgccggcagcacccccacgcccgcccccaaagctctggcttgcctgaaacatcttacagagtctctctccctttaagaggacccggtcatacctctctctagctctctccgcttcgttgtctccccccgccccatcttttcctattccccttccttcttgttcttctcccttgcctttcctcctcatctgcttatttcttgcaataggagttttttctttatgagcgtttgccatacaact

SEQ ID NO: 239703 - DNA, 258 bp, Homo sapiens
  chr18:30781559-30781817
  hyper
ctggctctgatgtctttgatgtgggatgtgaaaaaatcagttctgcaagcgttgcaaaagccgtgggttgtattaaggtgaagctgtgggaaggaactgctgctccctaggaagacgctgacaagagccacaaacagacaggaagctaaaggaagcaagcagtaaggaacaagtttcttttttctccttaaattttccagtctccctctagtgccccctattggcaaagcctaacttagagcccggtgacaaaggaga

SEQ ID NO: 239704 - DNA, 627 bp, Homo sapiens
  chr18:31020194-31020821
  hyper
gaagttcctctaggcggccagcggagggagactctgcttcccttcccccggcagtggggactgggggactgggggactgggggactgggggactgggggactgggggactggggacaggggttggaggactgggaaactggaggacggagaacagggggacaaaacgactgggggactggggaattatgggactggggatttggggaattgttttcaaacgcgcggggcaaggactccccaccgcctctggaaggggtgaagaactagtcgactctaactccctcagggtggccagggaattgcatttggttctcccgcgggagtcgcgcaggcgggcggccagggggagtgggcgccgcccggcagcgccccgcgccgaggcacaagcgcccgcgccgaggcacaagcgcccccgactcaccggctccgcgcgtttccccgcgcgtctcccggacccgcgcctgcccacccctccggctctgctgcggtcgaggccccaagtcggttatcccgtgtccaggcaaccgcgggggcggcggcggcggcgtgaggagcgggcggctgctgctccggggcctcctggctcgagcccttagcccccgactcccggcgtttcggcgcccgat

SEQ ID NO: 239705 - DNA, 1517 bp, Homo sapiens
  chr18:31157630-31159147
  hyper
acggtatggcatcgcgtggatccacggtgacggctctttggtcctgcattgtttgagatgctgtaggtggttcaacattgtgttaagttgcacgtacattattagttctgtatccgaagacactggctctgtaccctttcaacaaggctctgggagttcccccagccaagcagagacagggttaaggcagtccaacagaggagagtagtgcggtgtgtgtgtgagtgagtgtgcacgcgtgagcgcacaggacagaggcgtcgaggtgcggggcggactcctacacaagttccaaaggccaccgtgtccgcggctttcggcctgagcgggacagcgggaagcgggtggaacggcctgcacggagtgggcagcgccccaggaatttgggggctgagttggagggagaggggtctcgcgagggtttcagggcgtggctggagtagggggcgcgcggcgagtgtgcacgggtgtgcgcgcgcgagagggcgagtgtgagcgcggcgagtgtgagcgcggtgagtgtgcggccgcgtcgccattccccgtgacgtcagagtgtattgttgtgagcggggccgagcggagcatccccggagctgtcaccgcagcggccgcggcggtggcgcagcgcgagccccgcacgagcgagcccggccggcgccgcccccgcccctggcccgggccccgctgctgccgccgcccccgcccccggcccgcccgccgcgcgccgccgccgccgccgtcgcgcgcccccacccactccaccccaccccctcgctccatccctcccacccgccgccgccgccgccgccgccgccgccgccgccgccgccaccgcccgcgcgcctccccccgcggagcgagtgcgggtcaccgggtcactgggtcattgtctccgcgcccgaaccccgagcaccccgtggaatcccccacgtcatcatcagaaccatcaatgagatgcaaacatgaaagacaagaggaagaagaaggaccgcacctgggccgaggctgcccgcctggtacgtaccgccccccacacgccgcccgcgcctcccgccggccccgccgctcgccccgcgccggtccgcggcggcggagacggccacttccagcccgagccgccgcccgctcgccgggctcctgctctttgttattctgcgggagtgggctcgcccgggggcccctgtgtgtgtgcgtgcgcgcgcggaggggcgcagcgattatctccgggagccccgcgtccgggaccgcccgggacacttctccccgtacttcgctctcggggctctgctgtgccttctccacgggtgaatttccgagcgctcggcgcagctcgacttccctctctgccgctccggagacctttgtgtggcaattaccactccctcccggcccctccaccccccggaatttcatcaataactctgtgcacagtctgtgtgtatgttcggcgtttgtgagttcaaacattttacacgtgcatgcatggtgtgtgtccgacacggacttgtggggcg

SEQ ID NO: 239706 - DNA, 530 bp, Homo sapiens
  chr18:31739005-31739535
  hyper
tgctggggcaaaagagagctcgggttgctgtttctacttcagcggcggcggctggagcagcgggtacaggtgaggttgccctggcggtgtccatagcaacgctggagggggtggcagggagaaaggcgccctccaccctgtcagcctcctcctcgcctcccccgacctgcaggcgcgctaagcgctccgggcgccgcgctccgcgagggggagcagtgctcccaacccgcgaccctccgcctcagacatcacagttgccgcggcaacggccggaggaggaaggccaaggcttttctcccgctgacgtcccccgccaccagtacccagagtgctggggcctggatgagatctgcgtccgcttcacccgagcatgagcttgggtctctcggaggagcaggagacgcgggctcgaagccgcgggcctgaccctgatccgtggatgccgccgccgccttctcctcccctgggtggtgggggacagggcctgggaggcacggtcacgccgagtttgagcacgtgaccttccaaga

SEQ ID NO: 239707 - DNA, 1152 bp, Homo sapiens
  chr18:31802047-31803199
  hyper
catcttcttgtgaagaaaatcgacgctgctgcggctccccagccccactggcttctgcagcgtgaggctgagatgcattgggctctcaatgccagtgcctcgcggcgcctgggctagagctttgtggccatgagactagagccaccccagaaaaaggaacaaatacacacaccattcgatagcgcctaaacccatctttctttgttgttcatcttctagctgcggctttatttgtggaagagggaagtgaggaagggaatgggggggcggggaggaggaatctccaggaccttatctacaatctcaacagtcgcggcaacgatctctgggagtgatcgaggcattcgggctgccccgtgcctcccgggcagcgatctaacgataaaacctgacagtgtcctggggaaaaccccacatccaccgctagcgctacattcgggctttatgccaataaggagacactgtagactatcgatcagactcgtctgctctcagagcgtgcggccgggcttccagcctggcctttaggcgcggtggcggcggtgggacacgcgccaggcgcccagagaaggacatgggacaatggcccagcccgaggacgccagacgccgccgcccgacccggggaaggaagctcctgcagccggtccgggaacccgaggcggggagggaggccagctctggaggtgcgctgccgctttaaaataaaggaccacaaagactgtacagtggggaaaacgcgcctggctaatgcgagtggggacgacttggggagggggttgaggaaggtagggggcacacgagccaacggcggctcacggctccccctctctcccgcctctctccttcctccctccccgccgggctgctccggcagacaaataacagaggaaggcgagtcactcaccgtggtcttgacaggcacgtagagcacttgcttggcgccgccgcctcccccgcggacctcgtccggctggcccagctggaagcccttcgatttgacccagaatttaaatttggcgttgtccgtggagctcgactcggagccattgaggagctggacgatccgttcgtattttttacgggtcaccgtcttggtcttgcctgagtccccgtaagtcctgaggcaccagtcctggaactggcggtacat

SEQ ID NO: 239708 - DNA, 664 bp, Homo sapiens
  chr18:31804502-31805166
  hyper
ctctttattctactctcacccgaggcccgcgcccgtcccggggagcggctctgccaggaaaacggcccgaccagtgcccggcgcctgggctgcgtccgagcccaccttcttccctcgtcgtcgtctcccagactaaatcccggaaagggaaagcgggatgtttgcgcccaccgcgctgtagctggtcctgacacttgcaaaatggtcagtggctcctgctcggccaggctgagtgtgtgcgtgtgtgtgagcaagggagcgagggtgtgcggtgtgcagggggtgcgctgtgtgtgcgcgcgtctccgggaaggtctcgcggcggctggagccgggactgacagcccgggcggagcgcaggcagctccacacgctaaacctctcgcctctcccctcacccccacccctcccactcccctctccttcccccaccctccccggccccttccaagctctctgattggccaatgggacaaaagtttctgtggagacggctgggcgctgacgtcacgggcagaattgtcccatttagggatcccgggggcagtgcgcatgctgcaggctgcaggttagaggcagaaggaggtagcagcgggcccggcggcagccaggtggcagaaaggagcacgcagcatccaggtggggggacgactccagcagggtt

SEQ ID NO: 239709 - DNA, 1341 bp, Homo sapiens
  chr18:32073098-32074439
  hyper
tttttttcaatgacgagcgtgcccactatttccctagaggaatatttcggtccaggaaggaagatagtgcattcagcatgagtgtgtgtgtgagtgtgtgtgtgtgtgctgtgcgtgcgcgcccgcggagagaggggcgggggaggcggatgaggaggatgagatcatagtttcaggatcctcaggaaaccctggtactggcagcagccagcctctgctgtgcccacatgacccacaactctggcagcggacccggcacttccaacattattaaataataagaaagcggctcctactccaggctcaaacctccctgcagaccaatggacaccttctaagagtttggcgagtcagtgactgaagcgcccgtccattccaaggtgtgtgcacggcgttttcttctttgacagctccggagtgggggagggcgcgggggtggagggggtccgtgtgccgggcgaggagtgggcgcgaggccgggctgccgcgctgcccccggccgcccggtgcagaggagcccgccgcggggcgggaggtgcacatgacgcgcagccccggctgcgcagggaccgcagccgcccacggcgccggggcgcggacacaggcggctcggcgctggagcaagggcaggcgccgcgcaccgagcaaagtcaagagtggaagcgggcggagagcgccggcgggggcagggattcgcctcaacgcccactcacggggttcccacctgtgcgccggcgccggccgcggctagcgcgaagcatgtgccgggcgccgcagccaggactgcggcgcggcgcctccccgggcggcgggcggcgcctcaggcccgcggggcggcggtagcggctgctgcaggatgtccggcccgggggcgcggggccgcgcaggtaaatctcccccgccctcgaaggccttcgcagcgccgcagcccctgctgctgccgcggcgccgctcggggggtggctatggcagccggctccttcgcgtcgcgggttgagttgttttcgttgtggtcgctgccctcttggtcatcctctcgggctgagctggtgggaggtggagtgtctacctccattagggatgatactcacgtcggggaacagtctgaggggtactgactgggacatccgcgttgggttcctttgcagccagcggcgtcctttcgtgttgcagtgcactgcggtgcccgggccgatgcctgggtgggagtgggctccgggccccggggacggggggcggcgggggcgggtgggcacgggggtgagtgtcttcggcttttatagcctgttgcccacttcgaagttttctgctggacagagggcaggcgggaggttcgttctg

SEQ ID NO: 239710 - DNA, 239 bp, Homo sapiens
  chr18:32557528-32557767
  hyper
atcaggaagtgcagcgcgctggcgctcgcgcgcttgggagcatcccctggaccccgggcacttccccttcggcagccaccactctcccactccgacgccggccaccatccgcgctcccgggactcaggagccgggtgggtgcaaaaggaagcgggttgttattctgcgcccaagcatctcttctgcagggagccccgggagcgcagggcgagggctactcagcgacttcgcactcggct

SEQ ID NO: 239711 - DNA, 522 bp, Homo sapiens
  chr18:32557947-32558469
  hyper
aatacagtgccaagggcagagccgtaacctcggagaaggggcgctgcagccatttgatcaggagaagcctttgtcttaacccccaagcccctcctgctagtcctcgctgggtcagtagcgctgggagtaattaatattacgaacattagcctttccttcacctccgcaccagccaacactgctgtcccctccctgattgtcttctctatcacttgttcacatctccttttccaaaaaaagaagaacaaaaggaaaatagtgtagacccgctaggcaggaagaggtcactaaaaatactatcgtgctgtcaatgtagaatgaagggttaagcgctcaaacccgcgcccgcgcgcaccgaaacggaagaacttccttgattagcatagtatcgaccctggggccgcgctgcgaggcggaggttcggtcccagctggggtgaagtgtgcagaccggttgcgattgtggtcagacgcagcacctacttctaatctgaggacccgcgatttacacttttgctgaata

SEQ ID NO: 239712 - DNA, 612 bp, Homo sapiens
  chr18:32621210-32621822
  hyper
gctggcgtggtcacgccgcgaccctgtgcgaattgaggcgaggtgatgagttagcgggttgccatggcaacaggctggccacgtgaccagggtgctgctgccggcgctctgacgtcagctgccagagggcggggccgcaggagggcggggcgcgagcgagagctgggagaaggcagtgagcgagcaggcggcaggcacggtccgtgcggagcaggcgagcgagcgggaagacgcagccaccttcctcaccagccagcccacagcggtttgttccccttctcgggagtgcgccaatgcctgggccgacccaaaccctgtccccaaatggcgagaacaacaacgacatcatccaggataataacgggaccatcattcctttccggaagcacacagtgcgcggggagcgttcctacaggtaatggggctggcacgagagcagcgccggggaccgccgtgagggcgcgcggaaatccagcccgttatataatggagcagacactgcctgcgacccctgctgcaggcatgcatttgtgaaggcggttgtgattatttggtatctgtttccatgtgtcatgttgggtttgcattgaggctccgcgactgcagatggaa

SEQ ID NO: 239713 - DNA, 225 bp, Homo sapiens
  chr18:33077287-33077512
  hyper
caggacattacagcgctatgcgcctcaaagacactgggtagatgtctgcagaatggacgaggggaagacacgcaaatttctgaatgactgacactcattagtcctgaacctcatgctaaaggcgacctcgaggggaagaggcagtccttctattaatactaagtcagtaataacctccctacttcttcttctctccttacaacacaaggcgttgtaagcccatgt

SEQ ID NO: 239714 - DNA, 78 bp, Homo sapiens
  chr18:33530497-33530575
  hyper
cagggatccatcggaaacgcaaaactactttttccccctgctggtcactgtgaggaactgcacgtggtggaactaacc

SEQ ID NO: 239715 - DNA, 40 bp, Homo sapiens
  chr18:33709430-33709470
  hyper
cgcgggggcgtggcgcggccctagcgcattgtaagcagtt

SEQ ID NO: 239716 - DNA, 202 bp, Homo sapiens
  chr18:33766769-33766971
  hyper
ttaatagagagggcccggccacacccacgtgcgggaagtgcggggcgggatgcagggttggggaggcaagggcaggaagtagggcccaggacgcggttgggagggcggggaagctcagctcacttggatcccagctgcagggcccgctccgggggaagcccccgagcttcccggttccgaaagtgtgcagccactgagaatt

SEQ ID NO: 239717 - DNA, 849 bp, Homo sapiens
  chr18:33767211-33768060
  hyper
caccggcctctccgcgagacatagctaaacttgaacttggcattccaagggtctggaaacatcttcgtgggacccatcgagaggttgtttaaagactggcacccgctcccgcgcccaggtggggaaagggctggccagaagtgaaagtccggtcggggcgccacacctaggctgcggattccgagagactgggaggctggaggcctgggaggcgtggcgggggcggagtcgccgggggccggcttcgcgcacttcccgggcccggccggcctggatggactagccggggccatggccggcgcggcggcggagtcagggcgggagctgtggaccttcgcgggttcccgggacccgagcgcaccgcggctagcctacggctacggcccgggcagcctgcgcgagctgcgggcgcgcgagttcagccgcctggcaggtgaggcgggcgggcaggcttgggggacacgaggtttctggaaccgacgtggacggatcttttgctcctagtgagagcggcgctacctcattcgggcgcattttgaatcgaaactccaggagggacgtgtccacgcgtcctcctagtagacacggctccctgaggtcccacctgcagccccaaggcttcttgctactcttactcttccgactttccggtgggcaggaccaacctagccgtcttccccttttcccgccctccgcgagcggggcttaggatggttcttgccctctcttgcgggagacccctcactgtaaagggcctgctggggccggggttgcaaaagacagcatgtccagcggccgtgacccttcggatgtcctcccgaggtaggagcggtgcgtggaccgccagcg

SEQ ID NO: 239718 - DNA, 1967 bp, Homo sapiens
  chr18:33876589-33878556
  hyper
cgcgttatagagtcgccttgaaaacactcggatgttaagagagactgggtgttatgagggcgatctatataaggggggaggaaccaggaacttggctgtggcctgggaatagggagaaccgtgaatttttcttgaaaacgaagggggtcgcccgtgagcagcgaggagagcggtgggaggcagcgccgagtcttgccgctcccgcctggcaggggcgggcaggacgcaaaccttccttcccagtccctcggttaccagggcatccccggctctctgcaattcgggaaccttgccagaagggctcccacctccccaagcccccgcggccccacaaggtccaattagggctttcggcggcctaactggggagaggccgtggtgatgcagaggtttaaccagcatccgccgggagccccggggtccaggcccggcgctggagtcccgcagcgaagcctcgcagcccccacgcctctcgactctaggcttgtgccctaaaagcggcctgggttccctggcgcaccctcctctttcttagcttctttgtccctaagggaaacctccccgtacccttaggtggggctcccggtcactgccaccacccctcttgctgccgaagccggctccctggccacctggtgccctgccggggtattccaaatctgggcagcagaagccggccgccgccgccttcatctggaaaggcttaagccttctccgggtggggaagaagtcagaaggccgcctgtctccccgtcccccaaccccccaactccccaactcggtcctccaggctccgaggggtgcagctcggccctgggccgcggggcgcacgtgcagcagagtccggccgcccggcctccccgccccgcctccgccgccggcctttggcgcagggctgcggatgccgcgcgagccgtctcctttgcactttcccggctgcggtccggtcgttcggggcagcccggccgggggtagaggacccggaggaggggaggagccggagggagaggggaaggagggggcccgccggccccgcccccgccccgccccccgcggccggagcccgggctgcagcccggcgcgcctgagcctgcgagtccgcgagccagcgagctgcggctgcggcctcccctgcgcgcagctacccgggcgtcccggcccgcggccccgctaaccccggggcccgcgcccccgcggcagggatgcatcatggccacgctggcttgccgggtgcagttcttggacgacacggaccctttcaacagcaccaacttccccgagcccagccggccgccgctgttcacgttccgcgaggacctcgcgctcggcacccagctggcgggggtccataggctgctgcaggcgccgcacaaggtacgacccggcggggtgggctgggccccctggactcagccccctgccgcggtgcgcgccggggtgggtcccggggcttcgtgggccccctgggctgggctgggcgcggcccggggggaccatcgctcgagggcaaatccccctccccgttagacagaagggctcgaggcacccgctggttggcgcaggaccctccggggcgggcgggaaggaacagctagagccgggggcgggcgtggcagagcaggtgccgagccggtccgaggcgggatggagaaggctcccccgagccgcgccgttagctcggccgggtgggcggggtggggctaggacgcgggcagtcggcctcggcactcgggcgggcaccaagcggggcgcgggaagaagcggagcgccgcgagactcaggtcccttggagaggagagctctgagcgacggccgggacaaaacctccctcaggcctctggggccgctgcgggcggccacgcgaccctcgcgacaaagcacgcttcccggcgacaccgcctcctccttcccccgggggcgccgccggggacgccggccgcacactgcgatagcgctcagggtatccc

SEQ ID NO: 239719 - DNA, 62 bp, Homo sapiens
  chr18:34408854-34408916
  hyper
gatgatgggggcccggggttggtctgacagcagcagctccgtggggcgccggttcccgcggc

SEQ ID NO: 239720 - DNA, 239 bp, Homo sapiens
  chr18:34823758-34823997
  hyper
gttcccagttctcccttgcccggaaagtctctggagcaagcgtggaaggcgagtgaagcggaaggtgagtgaagcgcgcgcagctcccagagggaagcgagaggcgaggatgacggcggcggcggcggcggcgacccgggcgacgcgaccgttcccgaccgacggcgtggcctccaccggcgtcggcagccaggcgcccgcaggtgtggggcgagttcggcctggcccttggggacaac

SEQ ID NO: 239721 - DNA, 394 bp, Homo sapiens
  chr18:34833559-34833953
  hyper
tgacggcagctctgcgcctggcccgaggagcagggcgaggagcaggttgagccgggcgcagcgggtccaaggcaccagtgagggtccggcccacggaggccggaggaggcggcgggtccgtctggttccctcccaacccccgtccccgcgccccggccgcccccggttacctgtgcgagtcctggtctcccccgggggacgctcccgccggcgctcagtacgggcgattggcgtctttgggccgcttcagctgcaccttgagcctcttcatgccgatctggaagccgttcatggcctggatggcggtctgcgcgctggccgggttgtcgaagctcacgaagcctggcgagacacgagggacgagggcctgggtttccacggggccgcccggggc

SEQ ID NO: 239722 - DNA, 33 bp, Homo sapiens
  chr18:34834310-34834343
  hyper
agggggcctggcagcgcgcgggcacagggtgcc

SEQ ID NO: 239723 - DNA, 148 bp, Homo sapiens
  chr18:34855019-34855167
  hyper
gtctccctccgcctcgcccctccctccggggcatccctcccggccccgccccgcgcacccttgctgttgccgtcgggcccgcgcaggatggtgcactcctcgatgttcccaaaggcctcgaaaaggcggcgcacgtcgtcctcggact

SEQ ID NO: 239724 - DNA, 820 bp, Homo sapiens
  chr18:35064995-35065815
  hyper
taaataattctcttctcccccgcacagaagctataaaccagggccgaggcgcgatagtttatcaaagacgagggctggctccttaaataaaccgcggtgatctcacttgcggcgccccctcccacgccggccccctcctcccccactagagcggcccgcgtcgactcgatgggcggactcgatcgcgcacgcggcccgcgggcccggcggaggcagctcccgctccggggacccgggacgcgccgctcccccgccccaggctgcccgcgcaggaacttcacggccacggccaagtggggcccctgtcccggatcccgttgggcccggacggccgagagcccagggatttgggggggcgcgcgggctcccgagctcaggcggggcggcgggcgccctgccgtcctctccccgcgcgccgcgccgccgcccggcctcccgaagtcgccccctgtcggcgcgtcggccgcttgcgccacggcgggcgccacttaccccgggcagagtcttctgctcgtgcagcgcgctctgggccttcagcgctgactcacgctcgcagtaggtgaggaaggcgcagcctggggaggaaagcaagcgccaagaagggtcagtggggcgcccccgggcccgccgacgcgccctgccgcccgccctccaggctcccgcccctccctgccgctcggtccctgtccccacctctctttctctcccgtgcactgttctcggagcttctctgcctctcggtgttcccggctgtctgcctctcgtacctccctttgcttttctattttgctccctccgcggagtctccccaccctgcatc

SEQ ID NO: 239725 - DNA, 47 bp, Homo sapiens
  chr18:35067533-35067580
  hyper
agaggcccccgtgacgtcgtccctcgtgctgccgcctgcttctcccg

SEQ ID NO: 239726 - DNA, 489 bp, Homo sapiens
  chr18:35104466-35104955
  hyper
gtgttgacttgacgcgccctaatccctgactcagctcccacttcttgttaaaccaaaggtaaattttcggccggcggggcagccccggagcgggaagatccacaccgcggagcagccgtaggaaatattgatattagccgacctctggcgccgtccgcccgcggtgaaaataagacgcggggccaatcaattaccgagccattaagggcgggaacgcggagggagcggcccacagcccctgctccccagccgaacatcccccgagccgcaggccgctggggtgcgcagctgcgctctacgccctccgcgccccggccgcggctcccggcagcgaccgcagcgcccagcaggagaatggggcgcagccgggctgggctggggcgcgggggtcgcggcggctgcgccccagtcccgagctcggtttcccgcttcgctctttgagccccgcttcctctccctgaagcgtctcgccctcggccctccctttct

SEQ ID NO: 239727 - DNA, 553 bp, Homo sapiens
  chr18:35144887-35145440
  hyper
ctttagtattttcagcaccacggcgatggacagcaccctcggtcctcggccggccaggagcccgcgagtccgtccgctcagcgtcctgggctcgaccggtgcagccttccccatccccatctttcaggtcgctgtacccaaaaatccaagccccgtctcctcgatcccctctctctttctcttcatcggcgcccgctgctctctccatggcatcgttcctatcagcacctcgcccaaaacccagtcttgccccagcgaacagctccccacgcaccccagctctggtctccgctgcccgagcgcctccctccaccgcgcccgcccgaggcttcctctcgcttagtccgccgctcgtcagtcgccggccggccggtcggcccgccagcccgctcctgctccccggcaaagttgggagggaaaggtgtactcacctttgtgcatgcctgtgaacctgtccttcagaaccgtaagctcgtagattttgccaaactcctcgaagaggggcttgaggtccttctcatccaggttgcgggggatctgcccaatgaacagc

SEQ ID NO: 239728 - DNA, 184 bp, Homo sapiens
  chr18:35145926-35146110
  hyper
ttttttttttttttttttttttttttacattgaacagacaggatctctgtcctttccgtttaaacaggctggaccggttcaagttcccagccagaccaggggtgggggtggcgagtgtgcgcgcgcggaggagggcgcggggggccgggaatgggcgcgctgtgggggcccgcgccacggcggg

SEQ ID NO: 239729 - DNA, 98 bp, Homo sapiens
  chr18:35146290-35146388
  hyper
aggagccgggcagccggcctcctctctttgccttttgggggttctttttgtaatagcagcaggtgcaactttttgtattttaaaaatagtgattttta

SEQ ID NO: 239730 - DNA, 1236 bp, Homo sapiens
  chr18:35146568-35147804
  hyper
agtccgcccggggatccgagcgcgcattcatcagtgtcgagagaaaaaaagctacataaatatatattatgtggataaatctatagacaagagctctctcgcgcgcgctctctccctgtctctctgtgtgtgtctttctctgtttttttttcctcctcgcacccccaacctgccagagcagccccacatcttcctcccgcccggcatctaccgccacccaagccacctgccaggatggggctgggagctgtcgggccgcgccggggggcagagggacggggagtagagactcggggtccgacccccgccccaacccgcttccgaaggcggaaggtgggggtccccgtcccgggcggcctcccccgccccggagagcgcggctggtcccccggtggctggcgggaggaaggtaggagtcgggcgcccctgcccgctcgcccgccggagggggaggaaggcgctgggcgcggtggccggtgagccagcgcgggggatggcttgatttgccctcgtctgctttacgggttcaaatagaatatatttttttaatcaccatcaaaagaataaagcccctgaatcgctatctgggttgccgccggaccgagactcgcgcggcgtgcgctgcccccgcgggtttcgttttcggcacctacagctcccgaggtgcgaggctgagtcgttcctgccgtggggaccgggggtcgagccgcccggtccggaccccgccggactccccgccaggcccactggggctggcatctcggctgcgcgggaaagggagtggcaggcgcggagccgggagcagggtccgagcggccccgcctgtaggggtgaatactggtggtgaacttggctggggtagcagattttcacgttaatgatatttacctgcaccccgtcctctctcatgtttgctttttcagggcagcctcttcgcttcagaagcctggcaaattgaaataacgcgcccgctcccccgcgggctgcggggctggggagctggggcggcggggctgagcggctggcctaacccccgccggccctcggctagccactttcgggtttcagggtttctcttttcttgccctcggattacattacgttactagaggatatgtctgcaattttaattaaagaaatgagaccccagctgcctgcaaacccaggccaaccccatttggtacaagcacaatacggagctctccagcgccggaggaggcccggaggcccgaggtt

SEQ ID NO: 239731 - DNA, 68 bp, Homo sapiens; identical to SEQ ID NO: 204963
  chr18:39172188-39172256
  hyper

SEQ ID NO: 239732 - DNA, 237 bp, Homo sapiens
  chr18:40857242-40857479
  hyper
ccattttttactgcgtgttctgtccgaggtgctgaagggaaaactgcctggctggattcacttgcctggatctcaagcgccggctttcggagcgctgaaaacaacagcgcagagcccagggcaccagctcctggaacagggaggaggcaaagagggaggtccactcgccctcgcacagtgatttgccacctcggttcctgttttggctcttctgagaagctcgtctccgagactcca

SEQ ID NO: 239733 - DNA, 52 bp, Homo sapiens
  chr18:42259870-42259922
  hyper
aaaaagaaaaagcattgatcggagagacggggatatatatatatatatatat

SEQ ID NO: 239734 - DNA, 559 bp, Homo sapiens
  chr18:42260702-42261261
  hyper
taccccccctccgccccccgccttttgcaccctccctcggtcctgcagccggctggcggggctggcgggtttggcgttggtggagtggactcgggagggggagggggtaaggaaaggggtgggaaggcaggattttttttttctctctttgtaacttgcaggttaagtggagctagagagctacattgtaacctagttggatttttttggggggggaatgtatcagaatctaacgtgtcgttaatagaaagaagaacaggcaagaagtggtccagccggcgaaggttggtgtgtgcttgtgttgtgcctgtgtgttagtctttttcttaaaaatcttaatcaatggatttgagtctctttcttgtgctctctggttttgggactctgaaaagataggaattcccttaaaagcagacgaatgcctttttgaaagcacgcattgtgtgcgtttctagaggagccgtgggcttgggaatgaacggcaggcttccccgttcggtggtttccagtgggaaatcactccggaaagggaacccttcggtatcgatttattgttttt

SEQ ID NO: 239735 - DNA, 142 bp, Homo sapiens
  chr18:43547678-43547820
  hyper
aggaagaaaccctgacgcccatcggggtgtgcacttcggcgtcctcttttgtaaaggggaatgatcacacctgccttttcggatgtcatgagaatttaatgggctctcccagaaaggtgcctggtagcggcaggcatgtcgg

SEQ ID NO: 239736 - DNA, 198 bp, Homo sapiens
  chr18:43678499-43678697
  hyper
ccccgggtgaccacgtgggtagctgaatctgctaagcagcagttcccaggccccatctggtgctagaggatgagggcctcacccgtctggggtcgcggctgtcttgaggaccagggcgattaatagtgtcggtagtgttagaccgtggtttagcacgagtagcaacagtgaacagctaaaccccgggactggccacca

SEQ ID NO: 239737 - DNA, 36 bp, Homo sapiens
  chr18:43753517-43753553
  hyper
cagatattggtgccgctgcccgagaagagctcagcc

SEQ ID NO: 239738 - DNA, 186 bp, Homo sapiens
  chr18:43753875-43754061
  hyper
gcgggttccatcgcgccagatggcgctgtctggcttttctcgggcctcgggcgccagtctccagaggtctccggcgcagctgcctctctagccggccgacgcgggctctgtgtttccgggcggaagtgaggcgcccagcggaacggcctctggtgacattttcttgggggcggcgcggacgactga

SEQ ID NO: 239739 - DNA, 65 bp, Homo sapiens
  chr18:43913441-43913506
  hyper
tggcacgcgtcctgcgttaacaaggcgtttggtgtgtgcatgtctgtgtgacagtgcctgggtcc

SEQ ID NO: 239740 - DNA, 37 bp, Homo sapiens
  chr18:43913866-43913903
  hyper
gccgccggcccccttccagccgtcacccctccctccc

SEQ ID NO: 239741 - DNA, 45 bp, Homo sapiens
  chr18:43914083-43914128
  hyper
gccagccgccgccccaccgccgcccgcgccccgcgctccgcctcc

SEQ ID NO: 239742 - DNA, 191 bp, Homo sapiens
  chr18:43914668-43914859
  hyper
gtgtgtgtgtgagagagagagagagcgcgcgcgcgagagcatgcttggttttctgtggtttgctttttttgaggtatatgtgtgttttgtgttatgtgtgttttgtattcattttttgttcattagtaccgatggctggctagctgggacctgggtctctgccctatcccatgccccagcccccaccctct

SEQ ID NO: 239743 - DNA, 253 bp, Homo sapiens
  chr18:43915039-43915292
  hyper
tgtgtgcatgtgtgcgagtgtgcgcgcgcgcctcggagagtcagacctgcgctgctgtgccctccttgggtccggctggagcggggcgtccggcccttgggtgttgtgctgtgtgtgaggatgaggtgggaagctgcccccacgccaggcctttgccccgggcagcggttgacaaagcagcgggccggcgcgggctttgtttttaactgtgataaatggggtgtgtttgcacggtcccctttccccacatccc

SEQ ID NO: 239744 - DNA, 240 bp, Homo sapiens
  chr18:44335941-44336181
  hyper
aacaaacaaacaatcgatacgattttgagccctccgaccccggagtccaaacaaatggccatagaactgtgggtctggaggacaccgctccgatccatgcggtctctccgggtattaaatggatttatcgtcagcctggttgcttggaattctattctgtccttcatttttcacagcggaacaaagttgtctggaccctccagccagcgctgggcagaagcaagcaaggatgctcttgga

SEQ ID NO: 239745 - DNA, 621 bp, Homo sapiens
  chr18:44337463-44338084
  hyper
gaggaaacaacagttgcggagctggacttgatggaagggagcatttgcgtgcggcgcgcagggcactgagtcaccatcgtggccgcgtcctcgcgctctcctagcgatttctccggagaaagcggagcaaggtcagccgggcagcccttcaaggacggcgcgccgctcctgcatgctgatggcctgcggggctgcctgcccgtgccccggcgcccaactcctacaaggaagaaattcaggggctccccgcccccgccacagtcctcttccccctccccagctgcaactcggcagccgttcgtcaaagaccctgttgtcaccgagacactgggaccttgtctcatccttggaaccactcgtaaatcttaggtcaggcagccggcagccttcggggaccacagtccccccaaagctttaggaagccagttactacatccggaaagattcgtgcttcagaacgcaagccagggagaataatcacagaaacgcaatgcgaatgtcgtgcctctcagaaattcttagcctgaaataccgtccccaccccccaacccggccaggcgacagtcctgtcatcctaacaccgcagaggctccaagcgctgggagtcgtgtgcccgcggcg

SEQ ID NO: 239746 - DNA, 273 bp, Homo sapiens
  chr18:44676978-44677251
  hyper
gcaccgccgctgacggaaagctaggcccttctggagacccgctttcccaagggcgcggcctcctgggccgggatgcacgaggaaaaataatcccctgcctttcttcggtagctgttttccagtccacagcaccactgctgaaccgagcgttactgagtagcgttctttgccttcacccctcccttcctctaccacttgtccactctcgaggtttaactaagaagtcatactttactagacaacccaatctcagaagtcgtcatttccccctta

SEQ ID NO: 239747 - DNA, 241 bp, Homo sapiens
  chr18:44702531-44702772
  hyper
agcccgcgccccgcggtcccactcactgttcttgaggaatcgctcctcgtgcagcactgcgatggcgttgacgcagagcagggctgcctgcagcagtgagtacagggtaaaggccatggccgtccgaggccgccccgaagtccaagcgatttctctcccgccgccgcaagggacgtggcgcctccacggccggcgccttcctacggaagccgatggggcccaaaacgaactctccgggaag

SEQ ID NO: 239748 - DNA, 528 bp, Homo sapiens
  chr18:44773070-44773598
  hyper
gtccccgagtttcccgtcttcctgcagcagcctggaggagttcaggccgagcgggaacgcgcccgcgacggccggcgcgcggtcccggctgctccccttctccgacggccctcggccctggaggaaccggccgcccccgactaaggggtcgccgagtaggacctccgtctcctcgtcctcttcctcgtcgtcgtcagggtctcgaccttcctcctcttcctcgccctcggggggcttgtggccctccacgtccacctcctgctcttcttcctcgtcgtcctcgtcctcggagctgtcctcgctggggtagcagcagctggttcccccgggagacagaaggcctcggtggtgcgggtgctgggccagagggggcggcgggggcggcggcggcggcggcggcggggccgggtggtggcgctcggaacccggctcgtcgggctgcgggggcagcagcagaagcggcgacggcggctgcggggggtggtggtggtggtggtggtggtgagggtggtgatggtggtggggatg

SEQ ID NO: 239749 - DNA, 31 bp, Homo sapiens
  chr18:44777319-44777350
  hyper
tccccagcaaggcgcgcggctggccagccgg

SEQ ID NO: 239750 - DNA, 644 bp, Homo sapiens
  chr18:44777662-44778306
  hyper
gcggaaaatcctaccgctggggatctcaaataggtgcccagcaagctgtgtgccggattggggcggccggttccggcaatacctggtaacctctgggtgtctttaggcgtgtggctgccggcccatcttccgagggcgctcggaggcgaagcatccaagcgggtcctcgtatccagcgggcgggactctggcgggctccgcgcgaagatccgggctctggcccgagcgaatggcgctcaaaccccggcctggggagaatgacggcctgaattgcggcggggcgtcccctccaccgcagaaagtgtgggtacgcagaaacccgcggcaggagagccccaagtggagcgcagtctgacagcgtctgtctctgaactcgtgtcggaccgaggggacgccacccagcgggcagggtgacgtcaccgtctccctgacactccacattaaagggctggcatgttacagggagggagggggagagcgaaagccagcgcgagcaacagagagatcctttctcagcaggcacgaaagctaccaacctaaccaactcgcaattgacaacaacctcctcagccccggagtaaactgcagcaatggtgctggagccgcagatctgatttaggagtggaaagcgaacagtctgcctg

SEQ ID NO: 239751 - DNA, 613 bp, Homo sapiens
  chr18:44780644-44781257
  hyper
gagaggaggctggtcgagcccgagttaatcaatgctttcctcttcgagctgacatgcattttacacgtcaggactctcctcagccggctaattgattcaaattgttttattggttaaactggtgtcacccattttcatgatctatcaccacatggaggagagcatttccactcccatctccgttccgggcggctgcggttcacccaggccaaggacaggtaaaggagcccagacgcgggacccagaggaaaaccacaaaccgagctggcctcctcataactggagaggcgacgtctggaagtaagaggaggaggccggcacagcagcgcatatgggcttccagctacaaatttaaactggttgaagagaacccacgctcagccgggcctgggcccagtttcctccacctgggacacagtcggtttccgagccggcgttgaactccgcggtataggaggccacaacaaaacccgggtgggaactgtccgcggtgctgacgagatgcatcgttccaaagcacagcgaatcctactgtgttcaagtcgggaagaagcctcccagcatgtaattgagccctagattcggctctgggcgggctcgagcagagcctcat

SEQ ID NO: 239752 - DNA, 180 bp, Homo sapiens
  chr18:44786784-44786964
  hyper
ggttgggccggagacggggctaggggtgcacccttcgtcccggtcagctcttgcggctgcctacgttccttcacctgccaggaccgggaagttactaggctcgcccgcgggagtcgctgtccgagcttggcagtgctgaaaccgccggcgtgagctagggagctgcgggctgcggaggtt

SEQ ID NO: 239753 - DNA, 1208 bp, Homo sapiens
  chr18:44787333-44788541
  hyper
ctgctgggctgtgccgggggctagaaattcctggagtccctttggtccccgtattctccaaaggaagggaggccgagggcggaggacgaagccacttacctgtccgcgccgcccgcgcggtctccggccccctgcgcgaggtcctccctcctgcctcgcgctccacggctcctccgcgctctgcctcccgcggcgcctgccgcctcccctgcgcggatcagccgccgccgcccgccgcccgccgtcctctgcgttcctgctcgcgatccggcccttcgccgcgaccctgtcctgtcccacccctccccttctcggcggttcctgcagcggctcagctcttcctactctcctcctgggcaagtttgtaagtttagggtgagggtcggtctctcctcgcgccctgcttctcggcttagcttgctcagatccgcacccccccactccccacctcagacctctctgacgccgcctgttggtcaggcagggcagggcgaggagcgcagcgccagccccagccccatcaccccacccttcacccctccatgcccagtggtcgaaggaggacagatatgaggcgagggctggaggcctagtaattgaagtaggaccaggggcaggagggagcaatccgccctgggggcgcgcagcctgggccggcagcttgaactcccttgccagaagggttgtcccaggacgcgcaggtgcgcttctcctgtgccgccctagggcagtccactaggagggggcaccatttccacactttcccggggaacgaccacctgaggtgagatgagaacctattgtgcgtctccaggaggggagctgggaagattggatacggaagactgagcccttctcagcatctccaggaaggaaagctttagggccaaacataggctgctttaaaaaaaaaaaaaaaaaaaaaaagttagtcgaatccgtctcataacgaagtgtcagactgcgtgtcagggagaccgcgggccaggggttccagttggagcccagcgttccaggaggggatgaagaccgagttcggtaaaacagcgtggtattacaaagtttgcctttcaggctccggcctagctccttccttggcaactttgcaagtgccggcaaccctcactggatcatcctacccttggaacttcttgggaagcctcggtttagccttgggtccaccaagacttcggcgaaatggaggcgtt

SEQ ID NO: 239754 - DNA, 303 bp, Homo sapiens
  chr18:44788894-44789197
  hyper
ttgcgacccagtgacgttgttctagtccaacaagactagaacccccgctctgccagacacactgggctttgcaggtccaagctcccgggataacctttcccggcttgagtccctcgggcttgaaacgtggtttagcaaacctgttgggtggggtggcggtggtgtggggccgggccacagttgagaagcaaatccccgggttaaaagagcttctcttgcctaaggccagatccagtcgcccggtgtggcacgtatccaccctccttccctggttcttctttcattttgcgacagtctcatgaa

SEQ ID NO: 239755 - DNA, 1251 bp, Homo sapiens
  chr18:44789528-44790779
  hyper
atcgagggagacagcgcaagcaggtcagactcgaccggttcgcttcctcccacccctaacttggcgggatctgagaagaaagttcccgcatgtttgagcgtcctagggcttggataggacagacctcgtaggtccccaagctccagcttggagttcccaaggagaagggaagcgctagtgctatggagcgaggttttggtgaagaaaagggcctcgcgcccccttagtgccgtcgctctggggaatcttctttcgctgggaggatgaatggggcgctcgccgcggctcatggcgccccctaggagcggcaggaaacttctcctgcagggcagcgcgggccgggctccgcctccggaaggcgggcggggagggtagttgctgggggtccctaggccgggccccaggacatctaggacatgccgggggctgtttgctacggcttcatcccggagctcctgctcggggttgccggctgcctctgctggcgtccctcttcccttcctttgcgtaagcggcaactcctccaggaagccaggggaaggacgggatttcctctccacgtagggtagtagatcgcatagcccagccggatcgcccagcaggagtgcagggcgcgcgtcggggtgtctccggcttgtgggtgtgcggttcgaaaccttagctggggtgggggaagggatgtctttaaccttctgtctaccgtccccctcttccctctctcagcctagaggcaggggatgctgcggaatcagactgggtgcaccaaggcggagggccatgccgggcttcgcccttcctgggtgtcccggagtccgttccggagaaaccctggcattgccagaactgggtccccgcactcactcctccataattcgcggcggatcagcgggaggagggcagagggcgggggcgaggcagcttcctggcgggtgtggcgcaaagtgtgcggggtgtggcgcaaagtgcgcggacccgggtcctggaccgaagatttagcccagggtttcgtgtgtgttgctccctgttgctttctacggggtctgcgctggcctcctcctcgggcgactgggccctgaggcaacagcgccttctcgagccccgaggattgaccgccccgagcctgcttggagcagggcctctctccagcgcggtgtgatgaaagtaagaaaatcgggcccctgccccaggcaataggggaggcctaaaatgaagggggcagcgatggggtcggaaatgcgtgcaagttgagag

SEQ ID NO: 239756 - DNA, 323 bp, Homo sapiens
  chr18:45275509-45275832
  hyper
attagaaaagcaataataatcggtgtaattgctctaaattaccctcctaacagagaacggcgctcggagccgggaacgcagctgccgccgcccagccctgagccccgcgcttcgcgcccgcggccctgagctctgctgacccctggcggccgccgcgcgccgcgccgtctggactgcgaagggcagccgcgcgaaacccgacgctctggcgccccctggtgtccgcgatgccgcactgacccgcggacggacgggaggcctacggatccaggatggctccttcgactctccccacgccccccgccctctgcttctccccaggg

SEQ ID NO: 239757 - DNA, 613 bp, Homo sapiens
  chr18:45534406-45535019
  hyper
atctcggccgggagtcgggtctctgccagcccagcgctcggaatggagctttgtggggctggggaagcaacctttgccaatgggaagggggtgtcacagcgcctcattccctcccagcttgcgctcctcggaataatctccaacagcgtgcctagaagcacagctgcttttgtttcgggcgtcggtgcttcccagaatcccggtgcccggacccagccgccgaaccgaccccgccccgccgcgggctttgttccctgcgctgcgcactgcgagcggcggccacgcgggggcgctgggccgggggcgggggccagggctgggggtggggcgcgcccccgggccacctcccccgcccctcccggctcctccccgctcctcctcccatgccccggcccccgcctcgcagctgggctcggactcaggcttagccgcagtctgtgagcctcctccccgcacctggccggccaggccagcccagcctacttgtctcgctgcgcccggctgctgcctccgctccaggggtcggcgccgggacctcctcctccgccgccggcccgcccgcgtctacaccgcacacccgtggcgcgccctccaggggcggtttttctcccgg

SEQ ID NO: 239758 - DNA, 1179 bp, Homo sapiens
  chr18:45662346-45663525
  hyper
acagccaggacaacggaagccaggaacagaaaggagcgaccctggagccctcaccacagagcacggcgtgggggacccgacgctggatgctccgcgcggggtgggcggcgggcaggggggcgtgggtgctgggttagggggaagctctctccatcgtccttcccaggccagccccgcggccgctgcgcccgcctgcaggaactcaggcgctccagtgggtgacgccggcccgggcgcccgcgggagtggggacgcacggggtcagtccttttgcgccacccacaccgggccgtctccggagctgagagactatagctcgactcgcctgctcgggtgggagtgctccccatccactcacccccaggttggagtccagggaagagccccccacccacccagctcagcgcgcgatttgagcccagggacctgacagggctcccgccgcgcgcctagctggacttctgccaatcgctcctttaatttctgcccgtatcgccggccctcgacttttgccaagttgccatggcttttgtcccccctccctcccgtccccaagttttgcatctgactctcaggaggaccaagcattcttgggggagacaatttaaactaccaaggtacacccgcaactccctctcggagtgcccttacgttccttcggctggcccctcgccccaaaggagcccgctggcgtgggccggcggcaatggggcagtggcgagagttgctctctgcagagttccagatcctctctcctatttcggaagaggtgcgtggccccacgccccgcaggagctccggcgaggctgggggagttgaacgctttgcggacgccgccacccgcgccagccagagccgccccgcggccacccggccacagggtccccgcagcgcgtagcgagaatgcccgcagcgctctcccggccgcccggaagggcttcctcccccaccccctccccacggcccggccgctgggctccccagagccccgatcctagcccagaggcgggccgaggccgccgcagacccacctggccgccccggggacgccgcgctcgtgcccgggccgtgtcctgagcgccgccagggtcccgggctgggaatccacgcggccgcgctgctcgcgggagcctgccgcagccggcgggaggttgtcattgattcgtgctgggcgagtta

SEQ ID NO: 239759 - DNA, 215 bp, Homo sapiens
  chr18:45687757-45687972
  hyper
gacagggtggggccgggatgagaggaaactgtaaaaccaacggggcggattcacgaaaaattcccgagcgtggtgagggtagagggtgctgggcagcaccccagttcgccgggcccacgctcctccagttgcccggcctgttcagactggttcgcccacctttctctccctgccggccccactcgcctgacctctgagaaagcagaatccgggac

SEQ ID NO: 239760 - DNA, 237 bp, Homo sapiens
  chr18:45688332-45688569
  hyper
cggcaccgcccctgcccacggttacccggttaccgcctgagaggccggcgcctgcccgggcgggcgggacccgcactgaccccgcagggggcgaggcggggctgagaggggcgaacgcagagccagaccccccgccgccgcaggccgcccacctccaggcagggcttcgtgccagacccggctgtagttatcagctgggtggagggcagtgccagctgcaggcgtccccgaggcgca

SEQ ID NO: 239761 - DNA, 58 bp, Homo sapiens
  chr18:45934976-45935034
  hyper
cctttccagctcattttccaattttcaagaaaagacagcgcgaagtgagactgcaaaa

SEQ ID NO: 239762 - DNA, 544 bp, Homo sapiens
  chr18:45935214-45935758
  hyper
tcgctccgggccgcggtgccagccaggaggcgcggcgcccgctcgctggctcgctctccgctggctctcccctccctccttccctccctccctcctcccgcctcctccgttgcatggctgccgcacggagcccctgaatagccaccgcagccccccgcctcctgcccaccgcgcggagggcgcccctgctccagccggcgccccaaggcgcgcggaccgccggcctcctagcaacggcccccgcaatcgctttccggcgcagcccaagcaaagccacccgcccgccgccccgcgacctcccgaactgcctcggctgccgaggtgctgtggagatcgcgaccccggcagccggcgcccgagcccggcgcgcgaagccgctcacctccgcgcgccgccggccctgcgcgcctcccgcacttggctccgggacgcagtcctggcgtcctccttcgccgccggtgtccgccggtccctgcgcgcccgagcctcgccggccgcgccgctgtcagagtctcgtggcggggctgcgccggcgggtatggag

SEQ ID NO: 239763 - DNA, 169 bp, Homo sapiens
  chr18:45937018-45937187
  hyper
cggggaaactcgagctggctttgcctcctacctttttgcagtccacccctctgcgctccagacagacataggaaccctcgccctccttggtagtacatcggaggcagcaccctcgcacgtcagcgggtcctctccggggctcctccctcagaagcgggaaagtttgtcg

SEQ ID NO: 239764 - DNA, 64 bp, Homo sapiens
  chr18:45938869-45938933
  hyper
tttggatccaggttcgtgagttcagaagttcacgagcatcctcccctgcgatgctgcctctaga

SEQ ID NO: 239765 - DNA, 273 bp, Homo sapiens; identical to SEQ ID NO: 204981
  chr18:46065116-46065389
  hyper

SEQ ID NO: 239766 - DNA, 179 bp, Homo sapiens
  chr18:46065664-46065843
  hyper
cggccagaggaaccccgaggtgagcatctcctcgcccgtcctcctcttatagtcatctcagcttgctgatcgattcggggacccgggaggagggctgcgtgacgtgggcgtgcttatagataaatccgggaaaaccgccccaaacaatcagcccccttccccccatccctgctcctggg

SEQ ID NO: 239767 - DNA, 671 bp, Homo sapiens
  chr18:46066503-46067174
  hyper
ctcccctttggttattcccaacggttgtggttctgttggctttttttattattcctgtcgctgcggtgcaatcgggcctggggaatagatacgcccggcggagaggggttcacttgacaggctctgaaaagccacctctgggtggcgagtgacccgagaggccgtggggtgggctccggctcgggttcatcaggacgacgagcaggtaactgtcccgggcgccggtcatgggggagggcgggcgggggggcgatggcttgggctgcggcgaaggtctggggcctcggagggccgcgtgccggtgcctggatgtggccggagggggcgtccgggacaccgcgcgcctgagccgagtgtttctctattgatggtaaaagacaatcgggaggggggtggtccgagcccgttatctgggcggcgttggctctgtttggttccgcggagttttcagggttggggctggggggtgtgagcaccgcggggtgtgcggcgtgtagaggggagggctgactggcggcgccgcgtgcgtctccaccccgaggagtgaggcgtcgcctcccccgcccggctgtttgtgtgtacacacggctccggtgtgtgtggggggcggggaccgcagaccgcggcgtagtggggacaagcgtgggccccgatcctccgcgcgacctgtc

SEQ ID NO: 239768 - DNA, 144 bp, Homo sapiens; identical to SEQ ID NO: 204985
  chr18:46476808-46476952
  hyper

SEQ ID NO: 239769 - DNA, 185 bp, Homo sapiens
  chr18:46502487-46502672
  hyper
ctcaggttccagccgccaggcttggccctcagcgggcgctgtcagagggcgggcccgcgggagcggggcggcggcggcggcggcagaggagcgcagggcgggcggagaccgtcggggtcacctctccagccccccgcggtggccgagccacccgcagttgcgctcgaggcgccgaggcggggtgg

SEQ ID NO: 239770 - DNA, 1691 bp, Homo sapiens
  chr18:47087067-47088758
  hyper
taatgaggcgaggtcggaacaggatctgctggctccggctcggtttcctcgcacaggtctctccagctggatcctcgacgctagggaggaaggggcgcgggactgctgtgggggttttccctccccaggcaggggcaggacctgttccgggcgactgcagggttaagggtatcgtcttaaagagccggatcctcccggctggagcgaggctggatggcgggacgcagcctctcagcctctcgtacccgccctgcgtccgcagtggttgttggcgcagccgccccgtcggtgttccgggctcagtccccgctccccagcgccagacgcagactccgggccaagttctccctccgctcgctgctttctgccgcaggacccggatcaataaagggaaggagagccgggaggaaatgatggagaacagagagaaaggagatgcttgatttcactcgccaaggagtgagtgctcatcggcagacactgggctctggccacgcgtcttagactccaaatctcggctcactggtccctttgaggaggtcgcctggtgttcccgtagccctccaccccaccgtaggagagcgcctgccacgagctccgcgcctcgctaagtgctttgctacgtgaactcttagttttcccaacatccctaagccgccgatacattatcacccacgtattgcggacgagagaaccgcctcggagaagctggctggctcgcttggagttttgcagctagtggcggagcgagcattccgagcaggtactgtgcgatcctccagcgccggccgcagctcacagccccttagctccgccgggttattgtgcggccgcgccttctgcacctgttgcggccctcgctaggcgggaagggagggagaagaggaggacaaaggggatgaccaggtggctctcccccgacggactcccggcccagggagcggatagaccactcccagagagagtgtggctttgagccttggagaggatgctctccttctccagggatcgcctccccagcggacgcagagtttcagggaaatgtccgcctccgccacttgggatggcagtggggagaggaggatctgggtgtccggaggagggcagtgggagaaagctggagctgctggagtcgcagctgcctgcggagcgggcccgggaggaagcggggccgagcgtgcggcgtccacgcggtgagtgtgcagcgctttcattcaaactttctccagtctcggttccggcgtcagcaaggtgtgaccaatcagagcccagagacgggaataaattatgcaaatcaccatctggcgatgggtcagatgactcccatacttttaaaaactacctctataggagcgtgacagcagcgagtccttgcctcccggcggctcaggacgagggcagatctcgttctggggcaagccgttgacactcgctccctgccaccgcccgggctccgtgccgccaagttttcattttccaccttctctgcctccagtcccccagcccctggccgagagaagggtcttaccggccgggattgctggaaacaccaagaggtggtttttgttttttaaaacttctgtttcttgggagggggtgtggcggggcaggatgagcaactccgttcctctgctctgtttctggagcctctgctattgctttgctgcggggagccccgtaccttttggtcc

SEQ ID NO: 239771 - DNA, 835 bp, Homo sapiens
  chr18:47339391-47340226
  hyper
atttctgcaggcctctccatcgattcacccggggagccctgaccaccgaggccgagcggcgggctcctgtgcgcagctgccccgcagcaggcgcccgcggcctatggcgccgccccattttttctaatacttggactcgaactagtggggtcactgttaggcgaagaaaggaatgacctccaaggtcacatgcaagcaaactttggtctcaactaaacaggaaattgcaccgaaatcgctgtcgctagcgccttacaagtaagggttttctccttaacccaaacaagcctttcgggctgggtttttatcacgtccgctccaaaaccgaggaggttgagtgaacttcaccccacgaccccgactctccgcggcggccggaagcggaggcctggcctggggagggcaggaccccgaggggcgaggagaggaggagggggctgcgctcacctcggagcagagccatggcggctgctgggtcgtcggcggcgcgggtctgtggtgtgggggacgctgagcggccgctcgcaatcacccagatttcaagagcgtgggtggcgccccgagagccacgcccctgccctttcacctacttcctggggctccttggcggggtcccagcgtaagatggtcctaccccacgcgtagcgctgcccgcctcaccccagcccgagggagcccaggggacggggctcggatagaccacaacgcgccttgagagcggactctttcctcacatcctcatttttagattttctccgtttccaaaccgagagaatttggtttgacacctctcacccatcatatcctagccccgacaggcgatgactcttcccct

SEQ ID NO: 239772 - DNA, 1237 bp, Homo sapiens
  chr18:47719963-47721200
  hyper
ccgggcgggtgtcccgggaatcgcatacccacgcaacgcgcgtggacaccacacgcacacacaactctgcatggaggcgtgtgcataggcactgttaaacgtgttttggccacccaagaagacgaacaggaaaaccaggcattggactatccaaaacttgttttcttaaaggtgcatagggcacatgtgaagaaaaggcctttgcccctctcactactgactccaggttgaaactcgaggggtcccgggcggctgcagcgctgccgcgagctcccctggaagcggtggcttgtccctaactttaaccacagcaactgctgcggaacgcgggcgtctccgcccgggctgcacctgttcccgattcggagcacccagcctcacacatcccttctgaccttgaaggcatcctgaaactcacaccctgctcccggttcgactttactccaaccccctccccgcagtcactgaagccctctttgtaccaaagaggccgcgtcaaaacatccatccccagcaaattcacaatgctcttccctggggtctccggagataacggcgcacccctctacccattgcttaccctcactccatccagccgccgcgccctcacgccaggttgtctcctccctctccaccaagtccagaacccccacctctcccaagtccagggttccctgttgtgggtatgcgggaggaaaggacgcctcggaggcgcgccctcgagagccggcgccgcagagcccctggggtggggtccacggcggggacaggggacagcagcgggagcaccgcgggggcccgtcccgcgcacggcgctcagagctggcagggtcgccctgccgttcggggaactcggttggagccgagcccaggcaacgaaagtgaggggcgcggcggggagggggcgacagccctggcttggtgctgagccgtggcgctgcggaacctctaggagccgggtggccggtcagtgcgggcgttcccggaaccgccaaactttctccgccaaccgaagttagggactccgaggacagtgacgaggaggacaccgcggaggggggtctcccgtcacctcccgcctccagtagccgagggagaaggcgaccctgagtactaggtggccccgagcgcgccaccccggccccggggcgcctccctcgcggccgcgctcacctggctgtagagctcgcccaccgacatggcccgggccgggcggggctcgggccccggctcctgg

SEQ ID NO: 239773 - DNA, 116 bp, Homo sapiens
  chr18:47721620-47721736
  hyper
gcgggccgccccctgctggacgccgcgcgcgcgcaggcacaggtgcgccccggcgcccgcacctgccctgccgcgctccgcttccacccgcaccgggccccgcggagtccggcatg

SEQ ID NO: 239774 - DNA, 96 bp, Homo sapiens
  chr18:47792569-47792665
  hyper
attcaacccactgcatcaggcgacacccgttcccctcgagaaggccccgggtgggggccgaagtgggataggccaggcctggagtgcggagagatg

SEQ ID NO: 239775 - DNA, 74 bp, Homo sapiens
  chr18:47792905-47792979
  hyper
ggtgggcgggtcgggcggaagtcggtctggtcaccatgggggccgcagacgcctgcactcgggacttcctcttc

SEQ ID NO: 239776 - DNA, 69 bp, Homo sapiens
  chr18:48494204-48494273
  hyper
ctggtcctcagggcgatagctaccacctgacacacagcgacctgggaaagagggaaactcaatcactgc

SEQ ID NO: 239777 - DNA, 296 bp, Homo sapiens
  chr18:48723995-48724291
  hyper
aaccagcccccggcgcgcgcggcggcggcggctacgccccacgccgctctccgaatgaagccggcgcgctctgattgggtgcttttaatctctgggagcccgccttctcctcccgcagccttccaactcctttccccagccccaccccccaccctccttcgggccccgcccctcccctccccagagctctctgattgggtgaccgggaccagccagttcccgaagcctactccttccgtcctctccccgcccacctccctctcattcctcccggcacgcgcggagagggactgtga

SEQ ID NO: 239778 - DNA, 755 bp, Homo sapiens
  chr18:49866290-49867045
  hyper
cgctcaggatgttcgcaggctccattgacaaaagtgacttcccacgctttgcccacagagggcatccctgcgcattgatacgcagaccaggcaaatgcagctcctggaagcctcctcggtccgctcttttttccctaagccatagtctgtctgcccccacccccttcccgtggaatctttgcctgatccagttcgtttccctccggtctccacattttcccttccagccctccacttctccggatcaatgtgtagtacggttccaactcccagctcgcacaccgctggcggacaccccagtaacaagtgagagcgctccaccccgcagtcccccccgcctctcctccctgggtcccctcggctctcggaagaaaaaccaacagcatctccagctctcgcgcggaattgtctcttcaactttacccaaccgacgacaaggaaccagcctcaaccttttaatgcacagcccggccacaggattgccttccatctcctcttggtccctcctggatgtggtttattgatgacttgcgagcccctcagagagctgtcttccctcctctggctccctccgtttccttgagttagttttctaaggttttaccggggctcgggatctcttggaccgaatggaactttttgctgcctgcttttgctgctgattctgtcagtggacaaggaaaaaggcttcgaaggcagcagaggcgcaggggaggtggagaaagaggtggaggaagaggacgaggaggaggagg

SEQ ID NO: 239779 - DNA, 274 bp, Homo sapiens
  chr18:49867105-49867379
  hyper
gtgagtgctgccgctgcccgcgacccctggccccgaaggtgttggctgaaatatggagaatagtcttagatgtgtttgggtacccaagctggcttttgtactcttcggagcttccttgttcagcgcgcatcttcaagtaaccggtaagtggctctttcctttcttctcgtcgcacccccttccgtaccccacttcccttctcatttcatttggcgagtagtagaattggggtgggggatagcaagagatttggcgcttgcgctgcccccatttg

SEQ ID NO: 239780 - DNA, 708 bp, Homo sapiens
  chr18:49868095-49868803
  hyper
gctggcggcttcgacggccaaaagaatagaaaagagcaaaatgactcatgataaggtccacttgttttgcgggacctcaccgcaagtgtagatgggcactggggtacagtgagcggtcctggcaaagaaggagaggagagcggctggatgagcattcagagagcccttcggaaacgacctttttccaaatccaaaggaaaaacaggctcaggcagagaccgggcgttgagtaggagctccccagttcgtgcctgggaaattaacagggaatggcacatcaatcgcggccaagcccccagcctccccggagtccgcagctccggctttctcttctctgctaagtgctgcatggccaagggttgcgaacgcgagcagaaaatgcgcctctcactgtcgcgagggattcagacagtcaagcgccaaggcagcccgaggctccccaaagcctcgctcggccgcacgcgggcaggaatctgcgcttgcactcgggctcagctcctcatcttcctttggccagagacagagagagcaggcaggaggggtgtgtgtgtgtgcgtgtgtgtgtgtgtgtgtgtgcacgcgcgctgtcctgtgatgagcgcgtacccgcatccccgcgcttagccgctggtgctccctccctccgtctgtccctcccgggccggtcccctcctcccctggctcttctctcccggagctttgtcctca

SEQ ID NO: 239781 - DNA, 79 bp, Homo sapiens
  chr18:51795698-51795777
  hyper
ctttcaatctctccgcttccggcctccacccggcgggaaaaaactcccgcacgtgggcctccacgattccttggcatgc

SEQ ID NO: 239782 - DNA, 558 bp, Homo sapiens
  chr18:52495527-52496085
  hyper
gagacttcatccccgagaggagtgtgtttctcactgcagcagttgagtcaccagcaagacttgcctgaggtgagctccgcacatccgcgttgggacttgcagacacgccttcttctcacacaaaccttacccagccccgccgccgcggcggactccgagggtggtgccaccagccctgccactcgcagtcctgacgggcaggggctgcggaccgcccggccttggacccatccggagccacaggttggaggagataagtagctgtccccgtgctcatcgccctgtggagcagatcctgtctccttgctgacggtggagcccgggagttccagggcttgggaaggggaaggaaacctctctgaaatctgacacctgctctcccggcaaggaaacttcgcaggctggtgagttgggaaggcgggctgctgctgctggaacgcgttcccacccacccgggtgctgcagcgccggcctgcgccgtgggaagtgaggcctctgtgtgtgtgtgtgtgcatgtgtgagtgcgtgtgcaccttcgatcgcggtttccagcagaaa

SEQ ID NO: 239783 - DNA, 467 bp, Homo sapiens
  chr18:52988831-52989298
  hyper
acctaggatgctcatccctgcgacaataaaacttgtcaaaaatccccctcgcagcccgcattcgcttaccgctttcccattatagtagtacatcaaagagttgccgcccatgcccgggattgtgtatgcgcagtacatggtctcggattcttttttctcctcagtaccactctaacaacttttatttcaaactcgctgtcccttttttcacaacaattccttcagttgcattttcccatatggccgggccaagcgtggtgaatatgcaaagcaggaagagaccattcctggcgggcgggggaggccgcggcgctgctgtcagacgctcaactttgcgcagcggagctggaaggcagcccggccctgatggagctcgaaatcctaatgcatacgcgagatcgattcaacttttccgaggggtttttattagttcctcgaataatgccgattcttacaaatttctgcag

SEQ ID NO: 239784 - DNA, 386 bp, Homo sapiens; identical to SEQ ID NO: 11781
  chr18:52989589-52989975
  hyper

SEQ ID NO: 239785 - DNA, 256 bp, Homo sapiens
  chr18:53254614-53254870
  hyper
tatttccaaagagacgatcaaactggtaacatccactataaaaccaaatcagggaaagaaaaaaaaaaagccgctcttcagcgcatcattttatgcaacaggaggtagagcgagaaatgaatggatcacagagaaaagagaaactactgagaacgatccgatctcaactttccccccaccctgcaccccacccccctcgcacactcacactcgcacacgcacacacactcgcacacaccactcccctccgcttttc

SEQ ID NO: 239786 - DNA, 523 bp, Homo sapiens
  chr18:53255950-53256473
  hyper
caagccacattttcctggggagattttcgtttcggtagttttgcgttgggggcgaaatctgaattgcatactttctttcccctcccttttaagtcacagaatagtataactgcaaacttcgaaaaaaaaaaagggcaatttttgggggtggatgttgttttgtttttgcacttgagttcctaggcacgctaagtccctgttcgccagcactgtaagtttttaattcaacatttaccattataggccctgcatgctcttaaaacatactttttcacatcactttttaggataaaatttaagcttcataattctatcgtttcgtaataacaagcgtgctttatccggtatatgcaacataagctattttaacgtgtgtttgaaaaaaaaaacacacattctacaaatcctggtattgctagatgtgcgagtacatacacaaaatgcatgcacacactttttcccattggcaattatttaataggttgtcccttttgttttaataaaacatcgggatcgacatttt

SEQ ID NO: 239787 - DNA, 1093 bp, Homo sapiens
  chr18:53446769-53447862
  hyper
aagcacccacttcacgacttaacgtttcaggaatatgaattctatgttcagaaaatttccccacactcttcttcgctggcacattcactgatgtagaaaatgccaggagccccgggggtgtgatgtttccggtggataatgtctcccgttccctgccccggggcccagacagttggtgcttaagcgtctacaatgtagagtttcctgcattttcctcgggccgccatttgtctacttgtcccatccaggacatctccctaaataatctctaagtggaaaaatcacggtcctctaggagatttatccgggaacgaacgtgcgtggggcagttcaaattcctgagctcagatttcgtttcccgcggtcagatggtgcggtcggtggggcccgagggatgcgcacagctgtgcctgagaggtgctgctctcccgccaccgaagtcgctgggaaattctgctgcactgagacattttaatgtcggatgttctaatcctgcgggcaaaaaaaaaaaaaaagtttgaaccaggtactgggcttttgtcacggtgaaccccacccgcgccccgcgccgtcccttcattcactcaggcgaggtggcttggatttgcacctcgttgaagaagcctcccatgcgacatctccgccagcaccccgcgcggacttggctgggcggcggcggggagtcagcttgtcaccgcacggcggccgggaccgcagcccctgggtgcgcagtgcgcctctcgctgcgccctcctagagcgcgggtcccgtgcctgtgcccggcgcgacgcgatctccctgctagtcgggctccgcgtgctccccgcgcttcccgcagcctccgcgcagcccgcagcgccctccagccccgcctcgcggccgcgggaacccggcgcctgcagccccgcccggaaccgaccgccaggcgctgttgccgccggccacgcaacgcggggcctctgcctggcaccagccccaggtgccttgtctcgggtcgtgctgtcgcgcgacactggggacccaacaggccgccggctactcagctggccccgcagcttccctgcggctcagcggcctcccacccaggagaaaa

SEQ ID NO: 239788 - DNA, 354 bp, Homo sapiens
  chr18:54318601-54318955
  hyper
gcagtggcggcggcggcggcaccggcaccttgcagtatcactggggagacggcggctgtatagcgcttgccgccccacggattatcccagcaggatctacgcaccccgcatcctccgtagttccgccctatccttgtcctccttggctggggcgcccaccggcggtctgataggctacatcgcggcatgagatgaagctgtgacaggtaagggggctttcaagcttctccatgggaaaccacagggcgggatgttcctgcaccgtggaggtcaggggtcaggggtcaaaggtcacaaacccgctctagccgggggcggtgctagctgtcagatcgctgcggctgcaagcctgca

SEQ ID NO: 239789 - DNA, 326 bp, Homo sapiens
  chr18:54789043-54789369
  hyper
tgtgcgttgctgagcgtggcctgagcccggtcagcggccgggcgccggtggcagcccccggtcccgcggcgaccccggcccaggaaggagcccggtagggggtgcgctttccctggcctcccgaggcgggatcggggccgggctccactcggtgagaggatcctgccagccagctgggtgaaagacccacagaaatcccgaactggctgcaagatgcattggtagctggcgcctttagtcgggttcctacagttttgcagagaagtctatgagtgatcgttttcataaatcccaaagtaggagtggaagcaacctcccttcttcct

SEQ ID NO: 239790 - DNA, 211 bp, Homo sapiens
  chr18:55019745-55019956
  hyper
ggagcctgagccggcggccggggacgcacggcgctgcgcgctccttcgccacgccgccgcgcagcccctccatcttcctgctcggcaccgggccccgcgcgcccctgcctacggggtcccgctgctctccggggctcctgccagccccaacccccggccccggtggcctccccccacccccgcccgggtccccctcctccgccacacgcgc

SEQ ID NO: 239791 - DNA, 1531 bp, Homo sapiens
  chr18:55020016-55021547
  hyper
gagctgctggccgctcaatggaccgatttccccggtttccctgaacccagcccagcccgggatgagaaactgcaaaatggcccgggtcgccagtgtgctggggctggtcatgctcagcgtcgccctgctgattttatcgctcatcagctacgtgtccctgaaaaaggagaacatcttcaccactcccaagtacgccagcccgggggcgccccgaatgtacatgttccacgcgggattccggtgagtgcgggcctctgtgttagtgccctcgggaatttggttgatggggtgtttggggaagggaaggcgtgggggaggggtgttttggcctctccgagactctttgggccagataactgcgcggtccttccactcctctctctaattctcccttccccctccctgttattttttttttaacccaaagcccctagaagccgctgtccaaatcgatgtgattgcatttctcgtattcttcctcagcatcccttccctcatttcagaaatgggggttgggggaggctttcaggagggtgagggtggagggaaagacggtgtgtttgttcgggagggggcggcgagcagagatggacaggcgtgaggggagcgccctccccgcgccctgtccgcagactccgcgggccgggcccggggcggtgctggcggtttaatggcgcaggcgccggactcccctcgcgccctcctcctttactcccccacgcctatcaaaggacacgcgggtttattctcaggaagcccctggggcgttctctctcaaccctttcccccgcagccaccgccccccaccagctttccgggatttctgcaattcccccgccccctgcgggaagcgagcctcggaagggccgcccaccctcgccaggtcggagtcaccgctccgcgctgggccggcctgtgaaggctccaggcgcagcttgacgccgctctgcgagagcccccgccccgctctgtgaccccgggaactctcccagcagggcctcctgacgggcaggtggcaactacaaagtgccacctgtggtccaagctgggaccgaggcgaggaacccagaggagcctcgcctggaccgaggagcggagtaggccggcggcccccgggggtccccagccaagttataggaagtgaaatcggacgtgggtttgggaaggaagaggttaaggcaggaaccacccccagactttccctgggtctccggtttcctctgccctttctccaaaaacaattctatggggctgcaaaggcgtagcgggtcaggctggcggggcggccgctgtccgcggtgctgattccctggtcctcgcagcgccgcgggctccagccctgcgcccggcgtgcgccctgctctccgcatgacggccattttatggtctctccggcacccggagggatggacaatgcagatggggttccctagttttctttttttctctcgggtgtgtgtgggagcagagggtggaccaaatgagaggggctccgggacggaacggagcccgcacgcgtaccagccgccct

SEQ ID NO: 239792 - DNA, 178 bp, Homo sapiens
  chr18:55101491-55101669
  hyper
caggctggccggggcgctggtcttttcagaaacaaggtttgaatatgcaggtgtcagccaggattccttgtcgtctgcccaccgccgtttctctcccgggatttgagagaagcgggagtgtgtgtgtgtgtgtgtgtgtgtgtgtgtgcgcgtgtgtgtgtctcgtgttaggagaaag

SEQ ID NO: 239793 - DNA, 2418 bp, Homo sapiens
  chr18:55101951-55104369
  hyper
cattactgctgcccgcgccgcccgtgggccgccggccggccgcagctcgctggcgacgagggcactacagttgctctgaccgcgtagattatgcatgtcccggcctcgggaatttaccatgcattagaatacattagcgcctgcattttaaaaggctaaactattggctcccagctagggactctcggtaagtggcttgttagtgacgagtgtttgtctatactggcacatagcggagtcttttgctcccggcttactcgcctccaggaaagctttggggtgaggcgaaggcgattgaagcaatgccccttcccccagatcgcagctgctcaggggggacacagcacggcatctttcaccgaatctctctcgctcgctcgcactccagcctccctctccccagcgacccccccaccttctcctccctccctctccttgacgtttgattccagtagcaaaggaggtaaaaaaggcaccgagccgtcagccaaacctgaaaagtgcggccccgccccctccacagccactggtagcttcccgtggaaggcccgcctcccggggcagctgcggcctcggagtggttgcgcttggcgcccgtcgggcgtggccccgccccaggtccgggagggtaggttggctgccccggcgagcggcagagcccttctggacagctcccgctcacccaaacagaagacgtcggcgccggagcgggctcggacatggcgaggctgcgagccggcccgagcggcggggcccggtgatccctccctccctccccgtcccctcccctctcccgcacgcacgccccgtccgcccccaccccgcccccaccccgggcgagcccgcccgcagcccggggcgcacacccgcacgcgcactcctctccactcactcccgcgcccgcccccactcccgcagccgagccccgccacgcgcgccttgcccgcccgccggccgcccccgccgcccccgccgcccccgggccctgatggactgaatgaaggctgcctacaccgcctatcgatgcctcaccaaagacctagaaggctgcgccatgaacccggagctgacaatggaaagtctgggcactttgcacgggccggccggcggcggcagtggcgggggcggcggcgggggcggcgggggcggcggcgggggcccgggccatgagcaggagctgctggccagccccagcccccaccacgcgggccgcggcgccgctggctcgctgcggggccctccgccgcctccaaccgcgcaccaggagctgggcacggcggcagcggcggcagcggcggcgtcgcgctcggccatggtcaccagcatggcctcgatcctggacggcggcgactaccggcccgagctctccatcccgctgcaccacgccatgagcatgtcctgcgactcgtctccgcctggcatgggcatgagcaacacctacaccacgctgacaccgctccagccgctgccacccatctccaccgtgtctgacaagttccaccaccctcacccgcaccaccatccgcaccaccaccaccaccaccaccaccagcgcctgtccggcaacgtcagcggcagcttcaccctcatgcgcgacgagcgcgggctcccggccatgaacaacctctacagtccctacaaggagatgcccggcatgagccagagcctgtccccgctggccgccacgccgctgggcaacgggctaggcggcctccacaacgcgcagcagagtctgcccaactacggtccgccgggccacgacaaaatgctcagccccaacttcgacgcgcaccacactgccatgctgacccgcggtgagcaacacctgtcccgcggcctgggcaccccacctgcggccatgatgtcgcacctgaacggcctgcaccacccgggccacactcagtctcacgggccggtgctggcacccagtcgcgagcggccaccctcgtcctcatcgggctcgcaggtggccacgtcgggccagctggaagaaatcaacaccaaagaggtggcccagcgcatcacagcggagctgaagcgctacagtatcccccaggcgatctttgcgcagagggtgctgtgccggtctcaggggactctctccgacctgctccggaatccaaaaccgtggagtaaactcaaatctggcagggagaccttccgcaggatgtggaagtggcttcaggagcccgagttccagcgcatgtccgccttacgcctggcaggtaaggccggggctagccaggggccaggctgctgggaagagggctccgggtccggtgcttgtggcccaagtctgcgcgccgagtcacttctcttgattctttccttctctttcctatacacgtcctctttcttctcgtttttatttcttcttccattttctctttctcttccgctcttcccctactttccctt

SEQ ID NO: 239794 - DNA, 1422 bp, Homo sapiens
  chr18:55104739-55106161
  hyper
tgaaggcacagccttgcccccgcggggaaccggcggccaggatacaacagcgctcctggagcccatctctggccttggcgttggcgcagggactttctgaccgggcttgaggggctcgggccagctccaatgtcactacctacagcgagggcagggtgtaaggttgagaaggtcacattcaccgctttgggaggacgtgggagaagagactgaggtggaaagcgctttgccttgctcaccggccgtccttgccccggtcccagcgtttgctgggatttgccaggatttgccggggctccgggagaccctgagcactcgcaggaagaggtgctgagaaattaaaaattcaggttagttaatgcatccctgccgccggctgcaggctccgcctttgcattaagcgggcgctgattgtgcgcgcctggcgaccgcggggaggactggcggcccgcgggaggggacgggtagaggcgcgggttacattgttctggagccggctcggctctttgtgcctcctctagcggccaagctgcgaggtacagccctctattgttctaggagcacagaaacctcctgtgtgggcggcgggtgcgcgagctagagggaaagatgcagtagttactgcgactggcacgcagttgcgcgcttttgtgcgcacggaccccgcgcggtgtgcgtggcgactgcgctgcccctaggagcaagccacgggcccagaggggcaaaatgtccaggtcccccgctgggaaggacacactataccctatggcaagccagggtgggcgacttcccatggatcgggtggaggggggtatctttcaggatcggcgggcggtctaggggaacaattcgtggtggcgatgatttgcatagcgcgggtcttgggatgcgcgcggttccgagccagcctcgcacagctcgcttccggagctgcgagctcaggtttccacccccgatcccccgggctttcctcgcaccgctgagcccagcttgtggggtgcactcgaccaacgcccgacagggctggggaatgtgacaggcagcaggttcacccgggcttggggagggggagtttccgctttgacagcattttcctttgccgtctgctggtggattcctattcccagtcggtaatcgccccgcagtgttgatctaagaaggtaaagaaaactaggtttccctgcaaagagcctcccccaaatcggcggactccggatactttgagtggatttagaaatttatgtaatctttctcctttagtttatttttcatcctctcctacagttttctctgatttgctgttggttcggggcaagataaagcagccagtagagagcgataataatagcggcgggaaatgaactggagactggctgacagttcttaacattttgtcatagatccccccgaatgtcccaggct

SEQ ID NO: 239795 - DNA, 78 bp, Homo sapiens
  chr18:55114513-55114591
  hyper
agcaccacgaacagcgccatggaggaacgctgtttgagcgaattggagatggaccctctactgcggttaaatccaggc

SEQ ID NO: 239796 - DNA, 65 bp, Homo sapiens
  chr18:55254078-55254143
  hyper
gtgaaaatgggcccgggggctgagctagaagcccgctccccaccaccatcgcaggtcactgcaaa

SEQ ID NO: 239797 - DNA, 65 bp, Homo sapiens
  chr18:55289330-55289395
  hyper
agctggaggcgtgcgggtcctcttgcaaaccagaccaaggatgtcgccccgatccccagatggtg

SEQ ID NO: 239798 - DNA, 862 bp, Homo sapiens
  chr18:55469472-55470334
  hyper
aagttgcccctcctcgtgcacacagcgaggtgacagcgcagggcaccaaactgctgagggaaggagatgcctgcagccatctcagcggggctggcggacgcgacccgacagtcaccggaaaaacagtggtgtcggtcttccccatcacctcccctccccatcccacaataaagcgcacggaagatgtctgggagtacctggccctgccacaggagctggggaggagagcgatctcaccccctccatccctcccggcaggtgggccgcggtcagatacgtttggcccgcaagtccttttcggacacgttggcatctgctcccaaagagcgccccagcaggacccggtcaccggggtcttccagaggggcggtagccaccgcacaggagccagcggcatcccccaaggagccgcaagccctacctggcttaacccccggacatgtgtgtcgctaccgatcgaagaacccaaacaccccgagatttccctcctctaggcaggtgaaaaccccacggaactctccgcagcgctgcctgcccagccggccgtgtctcgccgtccccgaggcctcgggggctcccagcacctccacccaaatcccacctgtgcgggctcgggagtccgagggcgctgacagctgctgccgccgcatcccggatctccaaagtgcggcgggagcggccagggaacctgcaggacaccgccgggccaaggggcttgggaaggtctgggggcccccggcgccgcacccctgcttacctggcgttcgctgggccccggctggggcatccgcctggtgcgcgccgctcggagcgctcgctgcgcacctggccgctgccgccgcccgcccggccccagccctgg

SEQ ID NO: 239799 - DNA, 611 bp, Homo sapiens
  chr18:55470592-55471203
  hyper
ggctggggctggaggcgggctcggccttctcccctccctttttccctccctagggcggagaggggctggactgcaagccccggggcggcccgaggcggcccaggtccagctcctgccccacgccctccgtgcgtcctggagtcaggtgggcacccctttcagtcttccgagcccagcctacgagcccttgcctcgcccagcctgagacccagttgctgcggctgctcttagctccccgggggccgcactcgccaccacacctctccagcccagcgtcactttcccgctgcccttggctggcttggccgtcaccccgggtcgaggactgagccagcctggaaagctggcggggccgcggcgcgcccgggacctgagctccctcggtaaggggagctgtgtcctcttgatgccaagtcatgtttggggaccggtcaccgaatgcgcgtcaaagttcgccgcgtggagggtgaagaaagaggctgcgcctcaagacttccagaaacgtatcctgtgattgcagccagcaggctttctgccgagtccaaacgctatcgagtttttttgggtttggagtcaaaaggagttaaggtgcggcccgtgaaccacgcggt

SEQ ID NO: 239800 - DNA, 245 bp, Homo sapiens
  chr18:55710765-55711010
  hyper
atatttcacgttgcggctcacaaatgaactgctttttattcaaagaaccatgctgtctgttttcgcgtgggtgggtgtgtaaccggggcgggcgctatgttggttttgttccctgcaaggttgacacaggcaatggcgacttgcggccacactggggcagcctctcctcggctggcagccgggccgggcggctcgctcccgggagctgacaatgtagccaagtcctgctcgtcggggccgcaaag

SEQ ID NO: 239801 - DNA, 235 bp, Homo sapiens
  chr18:56807204-56807439
  hyper
gctcatctccccgcgtccggcttggatatcttcggggacctgaagaagatgaacaagcgccaggtgacggaggagggtggtgagcgcgccgtggccgggaccgcctgtgctagcggggagtcggggcttcccagtcagggctccggctcccagtgaatgcggccgggcggccacccgaagctcccgcgctgggctctcaggccctgggttctacgcctacgtgtgggcatgggtg

SEQ ID NO: 239802 - DNA, 1207 bp, Homo sapiens
  chr18:56887083-56888290
  hyper
gctggaggcgccggcgagcctggagagggaggagttcactaaattgtgttggatggaaggcgtcgaggaccggaggaattaatccgatgtggggaaggcggacggggctacgaggaaaaaagagggggcaatgtacactcagccttttcatcactcggcggggagatggatggttttccggaccgggcgtcccagcgccccggttagctatagggagacgtcagagcgctctggtccgcgatagaagagccccccagcccccccgcccgggcttccatataaagtaggggccctagtggaggccgcagcagtagcaccagcggctgcggcggcggagctcctccgaggtccgggtcaccagtctctgctcttcccagcctctccggcgcgctccaagggcttcccgtcgggaccatgcgcggccgtgagctcccgctggtcctgctggcgctggtcctctgcctggcgccccgggggcgagcggtcccgctgcctgcgggcggagggaccgtgctgaccaagatgtacccgcgcggcaaccactgggcggtgggtgagtgtcctggccgcgggagccgcgcgcttgtcctcctctggatcagccagccggaggggacctgtctccccatttctttgcgtttccctggcccagctttgggagctgggtttgttgtgacctttctatcggcaaacaccttccccgttctcctaaaactccaccccacctttccccattctagggagcccatgagtccctagtcagccgcaggctggtccgctgatcctttcccgctcgcttccagcctgtcttccccagggcacccgagctcccaacagccaaccccggtgcagatcaccttccctctgcgcccatcctacatctccttttgtccgcctagtctcaacctgtctggcacggtactctcctagaataatcttggggagcgttgtcccttgaaagcatctcagaaccctggtccagctcggtggcctcaacagcgactggcatgggctgaaatctaagctgcgcctatgctccccgcaaagccacaggtgtggggacctagggtgcagcgctcccgccccgggtttcacatctgttcagtgcgcagtgccctgaatcccgcctgtctgtgactctctggagtttcctcagtccttctcttcgctttgcagcgatattcttttccctgcccttttgccctcc

SEQ ID NO: 239803 - DNA, 342 bp, Homo sapiens
  chr18:56932078-56932420
  hyper
gaccggtccagggccgcagtgcctaaccccaggacaccgagcgagggcgcctccgcggtcctacgggaacctcaggacactgagcgagggcgcctccgccatcctacagctgttctcttaacgtcgagcctctggagcccagcaatccagagaggccgagccctcagtcccctgcgtccgtgcaggaaagaaattgggctgcgagcatcgccaacagaagccgggagccgtggcgcgcattatggacacgccgccctcgcgcgcagagactgctccagaaagggaaaaacgcaaaacttaaaacgcggtggctcacgcctgtaatcccaacactttgggagt

SEQ ID NO: 239804 - DNA, 341 bp, Homo sapiens
  chr18:56932660-56933001
  hyper
tgtctctaacaaaacaaaacaaaaactgccgtggggctggctgatggtggccacggggtcgcgggggaggtccgctcccggcaggctccagctctctgggtcagcggaggtaccccgaggctcaaagagcggtcagctccccacctccccaaaagtgcctgactccgcccttctctcggcgcggtccaattcgcggcgtccttcccctccccgccttcgctatctgagagccccgcccaggccccgcccaacctggttcgcaagagcagaagaggatcccggtctacagacccgcttgctttcctcctagggcgggtcagagcagacgtcgtcggggtttg

SEQ ID NO: 239805 - DNA, 760 bp, Homo sapiens
  chr18:56934820-56935580
  hyper
catcctgaaagcacgcttagggacgggggttgtggggtggacgccccccccccccccgtgccaggacctgttggcgggcatccaggttctgctggcggtcgcccagcttccagtgtcaacggtggatatcgagcacgctcaggcgggagtccgggactctccttcttcagagagtctcaggagattgtgaagcgggctgagatttcgagattccttcctcgccctagagccggcgccaaagaactgcagatactgtccagggcacgcccgcaagaactagctctcggggcggtggcgtagggcgctccaggacactctccgagcgcggcacctcaccagacgcgccttttaccgaactctgggttggcgagtgtggagcgagttggggaggttagagagtctcgcggctccgaaaaggaaaagcatctctttgcctcagttcttgtaccgctggtgatcaaccttgggtgttagggactggcaccgaaccggagatctgcttggtgaactgagaggagtccttaggagagcggggacgccaggggccgggggacacttcgctctcgccctagggaaggtggtcttgacgctttctattgaagtcaaacttgaaaatatcagctgccgctggactatggggctagcgggggaactgggagcgcgctagcatctgagccttagccccatccactccggaccccaagcgcgcacgccggctccagggaagggcgcctctggtctaggccgccgaagcgttcgg

SEQ ID NO: 239806 - DNA, 2532 bp, Homo sapiens
  chr18:56939499-56942031
  hyper
aatgcatggacacccgtgaattccgagaagcattggctgcaatttgggcctcgggccctcccagatcccagttcctcaacctgggcgctttacctggacccggacctctggtaggttgaccttgccggccagctcctcgcggctgtacacgtccgggtagtgggacttctcgaacgcgcgctccagctcatgcagctggtacgtggtgaaagtcgtgcggttccgccgatgctttttcttgggctgttcctcctctgacagtttcgcttcgccggtggctggcccgacgggcagccctgggctcggccgtgcctccccgggctccttggggcagtagggtcgaggggctggggcgacgaggcccgggagggtcagatgcactccccaaaacacccttgggccgaccccgcctcgctgtgggcactggccagcccgcctgcgggctccgagatggcccggggaggtccgtggtgagggcggcgatgggtcctaagctttctctgaatgcaaattggaagctcccgccatagacggtccccaaccccgcgcccagttgccttaataaaagttaaggaaggggcgctctcgtctggccaactcctaagctcgggcgcccgaacggcctcgcacagccaggggtgcgcactcaccttcgtactcgggggcgggcgccggggctggcggcggggagggctcggagccttcctcgggcgccttggggcaggcgggccgcgcgcccagcctcctatcccgctccttcgcgccccgggcgccccgctccgccgggaaggtgccgaggatcccgtcgtccttggtaaaccccaggatggcctcgatgctgtgaagtcgcgaggtgctcccgcccgggctgcggagcaggtggccggcaagcgagaagctcccgtcggccatggctggcgcgcagcccggcaggtgcatggggagcgccgggaggcgggagggcgctttggagacggagaggagaggctcgaagccgggtcttcccgagtgcggcggtgcaacccgacgggtcccgaccctaggtcaagctccgcgggcgaagcccgcccgggctgcgcacgctgggggtggccgagcgctcagcccgctgccgccttagtcccagaagtcggaagttcgggctcggggtagctggggctctcggcgctaaaggcggggagccaactggccctcggctcctcccctctcgccctggacccagccccttctctcggcccctccctccacagaggggcgtgtcctcacccggcccagccacagggtcctctagtggccacccctgggccggcactaggaatattccccttccacctcttgatccgttttaagctttacaaacacactccggggatccgcggcgggatgcctgatgggctcgggaacctggtcgcggcgcacccctagtcctgcctcagtggggccgacgcccttgggctcatctctccccttgcgtttgtctccctctacttcgggcttaccctctcacttcagactaccccctgggggtcacctccctccttggacgcacccctccccagcttcagactcgcccctctagccccctctggctcacctccgcggggccgccaccctggcctgtgccccctggaagcgccgagacccagccgaaggcttcccagccccgcactcgtcgcagtttgaatttcccctcgctggctcccttttcgggacccactcctttcttggctgggttgtacgaagtcccggacctcgcgtttagtttgtccgtctatatctgttgtaactcctcccagtcccctcggacttgagcgccggcagcctccctccttccccgcagcgcccaccccagggccatttatgtccgcaagtccggtgacctctagcgcccgatcgcccagcaggagactgggagccccgagtcggatgtgctgccgggctcaggtcccgcaggagacccacctggagttcctcgctcccgccccttgtcctgcggggagggcgggctcctttactgatgagcagcggtgtcgcactcccgcctccctccaacactccgggccaaggagatggcccagagctggctggggaaggaccttctcccggggaagaggcctctcgcctccccgagggttcaggagtaattggcttgcagttctttctcctttggaccccctcgaggcttccgtggcccacagtgactgatcggccacttggaaagatgattggatagggtgagtgtgtttcacctccagcagcgcggatggacaatggcgctgtgaacgtctcacccctcaaatctgaggcgagacccgaggcgagcgcttggccttccctgaactggtggcctgaaccgtgaattaaaatgctttcctataaaagctcaaggacctagaggacaatatccctaaaatctccttttcagtaggcgctctgatctccacagcaggggtgtcttctttatcccgcttgcgttcagacaagcgtttgctgcgtccctttagagggcaaggcaaccgtcgagggccacgt

SEQ ID NO: 239807 - DNA, 176 bp, Homo sapiens
  chr18:56976025-56976201
  hyper
cgtgtctgtcccccgcagcctctttttcgccacatgggccatcgaagggtccctgtacccagagcctcgtcagtgcggggacgcgggcgggagggtaacgtgcgacaagtgacagcgcgggaggcagaggaggcgcccaagggtggggctggtttgcaagcgcaaagtgttgcact

SEQ ID NO: 239808 - DNA, 388 bp, Homo sapiens
  chr18:57069712-57070100
  hyper
gcccccaagcggttcggtgttgaagccaaatctcagtctgtgttgtgacactgccattgctgccgcctgcagtaccactgccgcatctgactcacattctagaaggaaggtaggtttgtcccaatgaatgcagcttggggcagctgccttgtggagaggtgactgaggccgctgtgctgaggctccctgggcgattcaactacaccatctgccgtgtcagcttggaactgcaggagacgctagaggggaagacggagaaaggaagggaaacaaagattgatatgaccatatggtctgcatattgagcttgctgtcttttacatttgtgacttagaggaacctgtatcaagaaaatgtcattattcttattccacggttgaggagactg

SEQ ID NO: 239809 - DNA, 269 bp, Homo sapiens
  chr18:57363523-57363792
  hyper
cgaaagcagccacccgtgtttgctatgccccactgtttacacccaaaatccaatccaatctccttcacagacttccacacaagtatttcagggagcggcaaccatcctcaggatctcagggcacacaccctagacgcaaagtcagttgctcagtgttgctctgactccgatccaaccaaccctcaaagattcgcaccgcgcggcacgcacccagcaggttccagcgtaaaagctgctccggtcccaagcgcgtctccaaacccctcctt

SEQ ID NO: 239810 - DNA, 78 bp, Homo sapiens
  chr18:57364932-57365010
  hyper
tctgggagaagcgcgcagggtggggaaagcgggcggttgtttgcattttgcaccagggtctcacgaccgggaggagga

SEQ ID NO: 239811 - DNA, 160 bp, Homo sapiens
  chr18:57365411-57365571
  hyper
tactgtttccacgccgcgcacatcagagctggaaacgcccccccccatcaaatgagacacgtgggggcaaattaattacaggtgctgctacctgctagtgtatgcagccgcgttgataggtaacaagaaaacggaggaggggggccgtaaatcggctccc

SEQ ID NO: 239812 - DNA, 415 bp, Homo sapiens
  chr18:57566993-57567408
  hyper
gccgagcgctctgcgccccccgccgcgggtcggcgccgccgcgggtcgggagcgtgtccgggcaggtcgcgctcagcggggtacttccccgcccgcgtcccgcgtccgctcccataacgccgtctgcggggcggggacaggggcggggacaggggcgggccgggcgtctagtttccctacgtcaccagggaagttctcactggacaaaagcgtggtctctggcgcggggatctcagagtttcccgggcactcaccgtgtgtagttggcatctccgcgcgtccggacacccgatcccagcatccctgcctgcaggactgttcgtgttcagctcgcgtcctgcagctgtccgaggtgctccagttggaggctgaggttcccgggctctgtagctgagtgggcggcggcaccggcgga

SEQ ID NO: 239813 - DNA, 163 bp, Homo sapiens
  chr18:57567942-57568105
  hyper
tcttgtaacatttaaataatcgatattgtgggaggtggggataggagaataggagttagtccgctcctttttttcattcattcattcgcactccccaccccgatacatacagctccatcgtaagttttcaggccagcgccccggccccatgctttttctaaat

SEQ ID NO: 239814 - DNA, 620 bp, Homo sapiens
  chr18:59000631-59001251
  hyper
ggaatgaggacccgcggtacaggcaggcagcagccactcctgctagggaaggcgcgagggaggggaagcggaccgcgcgccacgctcgggggacggtgaccgcgaccagggggctcttctcactggacaggccgaacgcggtggccgcgggagggcagggcagggcatcggcggggttggtgcacttggcagtaccccccaactcctggcaaccgcacggagactttgcgaaacatccgaaggcagaaaagctgtgacacttctgacagagggggtaggggggtggggggcggggacagcgccgcgagcaggggtgaagagacccagcggggcaccagccgcccagtgggggaggcagctacgtgagcagaacgcccgccctggagcagttaggaccgaaggtctccggagagtcgccggcggtgccaggtaacgcagagggctcgggtcgggccccgcttctggggcttgggactccgggcgcgcggagccagccctctggggcgaaatccccgggcggcgtgcgcggtccctctccgcgctgtgctctcccagcaactccctgccacctcgacgagcctaccggccgctccgagttcgacttcctcggacttagtggg

SEQ ID NO: 239815 - DNA, 366 bp, Homo sapiens
  chr18:59001491-59001857
  hyper
gtccctcgcacagagatgtgcgccgggaaggggaccagagagccaggctccggggaggcgcaggcacctacggggccgatccctggtccgtgcctcgcgccgcgcccccgccggagctcggctgtgggaggagaatgtggtgggtactcgagtccccgccacctgccggacttcgccaactccccggatttcctgtcctcgggccctgacactcccaaggaaagctctgaattgcgctcgctgtttggtttttgcttgttgtagttactctgggggaagagccgggggcaagggggtcaaatggggctaaagtttcagatttgcaaagagaacgttaccgaggactctcaacgtgtccttagcaat

SEQ ID NO: 239816 - DNA, 162 bp, Homo sapiens
  chr18:59500717-59500879
  hyper
gatggttttaattgtcgaaactcctctgcgtttccctctaatggaatatcaatgaaaccacagaaccacagacacacacaaacatgatttcctgaggaagtgattctagggctaacataactgaacacgagggccgtctgttagtctcgtctgtttgttttt

SEQ ID NO: 239817 - DNA, 1160 bp, Homo sapiens
  chr18:59560076-59561236
  hyper
gtggaaatggtacacgtttaggaggcaagaggctgacaggcaggaaacacaattgagactgagctttcttcagcctgcagtgaaatacatgcaggaagggttagatacgcgccgcggagaaggaaatccaagcgccctcctgggcagacggggctggagcgggtgcactagggaggtggagcaaggcagatgaggtgtggagggctggcggccgagaagggggcgtcacggctcctaattgtctctacaggataaataaccacctcccccctcctccgcagtctcccccgcccacgagttcccctctggtggcagagcgcctactagcaacagtaagccctaggaaagaaagaaatcggagcaggtggggaataacatcttggggcaaagacacactggcaaaatctaccaggtaacccggtcatatgggaatgcggggcgcctagtcagccgcgcagacaggcacacagcgcggcaatcccgagcatctttctttcgtttgcccctgtccgccacctcatcaagtcaccgccacctcatcaagtcaccgtcacctcatcaagtcaccgtcactctgctttggcgatttctctactctctccagacccaggcagcgctccccaagccatgccccgaccccaggcgggattggggaccgccgcttcccgagcagcgccccacgagtccagctggctttgtcctgccgctgtccttccaggagcaagcgccccaggcgcgtgtgtctgcacaaaagacccccaacatctggcccttcacagcgctctctaatcccgggaggggccctggggcaacttctagggctggagaaggcgcgagacaaggggaccgggagaagatgagccggggtgtgtgcgggccgggggcgcaactggggcgggcgcgcgcgcacgtgcacacccaggggcgcgcgcggcgcgggcacgaggaaagctccctcggaccggagctccagggggcatccgaggactcggccgagcagccgacagcgccgctccccgccgcggccgcccgcccaactccgccagctctcaggagacacgcaactcccgggaccacctcccccgtgccccgccagaccccgcgctcccctccccgggaccctgcggccccgccaccccctccgcggtccagaagatctc

SEQ ID NO: 239818 - DNA, 164 bp, Homo sapiens; identical to SEQ ID NO: 205025
  chr18:59992238-59992402
  hyper

SEQ ID NO: 239819 - DNA, 113 bp, Homo sapiens
  chr18:59992968-59993081
  hyper
tgagcacctactaagcgcttgcgccgggcggtgccgcgggagacagcgccgtgggcacctcacttgcggcagataaccgttcccgatacgatttctcccgggtggcctccgtc

SEQ ID NO: 239820 - DNA, 161 bp, Homo sapiens
  chr18:60173518-60173679
  hyper
tctttcaagtgtaacgtaggaaaatgtacaacatttattggttttacttttgataatactggctcatatatagttacctgctaggtctctgttaagatcgagactttttttttttttaaatagctttgctggctaagtttcagtttcgtttcattttcctc

SEQ ID NO: 239821 - DNA, 49 bp, Homo sapiens
  chr18:60263994-60264043
  hyper
ggccacactcaggacgatggtccgtccccgagagccagcagggctgcgg

SEQ ID NO: 239822 - DNA, 53 bp, Homo sapiens
  chr18:60382505-60382558
  hyper
gccgtcatgccggcgatgaatatttatgaggcacacgcggccctcccgccctg

SEQ ID NO: 239823 - DNA, 150 bp, Homo sapiens
  chr18:60805530-60805680
  hyper
tccccccttatcatcggctcggcaggatttcctccacagccacattgtgctgaatgagtctagagggttccgtctgcagagcagtgtggctttggcagctgcatgcttgcttctgtcccctgtgactcttcctcccgcaccctcccttta

SEQ ID NO: 239824 - DNA, 661 bp, Homo sapiens
  chr18:60985401-60986062
  hyper
catctcccggttgacgctctccacacacatgaccccaccgaactcaaagaaggccacaatcctcccccagttcaccccgtccctgaagagctcctccaccaccgtggcaaagcgtccccgcgcggtgaagggcgtcaggtgcagctggctggacatctcggcgaagtcgcggcggtagcggcgggagaagtcgtcgccggcctggcggagggtcaggtggaccacaggtggcaccgggctgagcgcaggccccgcggcggcgccgggggcagccggggtctgcagcggcgaggtcctggcgaccgggtcccgggatgcggctggatggggcgtgtgcccgggctgggaggagaagatgcccggtgcgggggcggcccccgggggcgcggcgcccacatctcccgcatcccactcgtagcccctctgcgacagcttataatggatgtacttcatcactatctcccggttatcgtaccctgttctcccagcgtgcgccatccttcccagaggaaaagcaacgggggccaacggcacctctcgccccagctcccaccccacggcccccagagaaagaagaggagttataatccagctattttattggatgtgctttgcattcttggacgagggggtgtcttcaatcacgcggaacacttgattc

SEQ ID NO: 239825 - DNA, 286 bp, Homo sapiens
  chr18:60986640-60986926
  hyper
gatctcaagagctcgagaaaaaaaaaaggcagcggcggcggcagatgaattacaattttcagtccggtattcgcagaagtcctgtgatgttttccccttctcggcaatttacacgcgcgcacacacgcgcgggcacaggcatgaatctctatccacgggaccgcttcacgcctccccaggagagagacaggggagaggggacgatgaaggagccggggacggaggcaggaatcctcttctgattaaactccgaacagcaaatgcattttccgaaaagctgctggat

SEQ ID NO: 239826 - DNA, 140 bp, Homo sapiens; identical to SEQ ID NO: 205033
  chr18:60987971-60988111
  hyper

SEQ ID NO: 239827 - DNA, 800 bp, Homo sapiens
  chr18:61603405-61604205
  hyper
agcgcaatgcagcgcgcgttcctcctcctgggcgcccatcctcggctgctgcctcttcctttcgggccccgggacctgaccttccttccgggtccgcacagaaggcctgagcgcgtcgcctctaacactggtccagggcgggggaacgcggtgtgcctcggctgccacctcctggtgactaattctagtggacgtggagagcgaaccacagcctcaacaacacctaattctaattacagctggtgatcggtgaggtgacggaaataaacggggcgctatggcgggaactaatagatggtctccttagggtgtatgaggtgtcccttgacccttctctccccgaagtggacatcaaggtgatcctccccccatgacctcctacccgtggcatcctgcgacccccacccccgctgccagcccagtcctcccaggagccctcgaggggagcacggggttggctgaggggatgggggagcttccgcggacacagtccagccccgcagaatgcaagcggcgcagaatccttgaaagagcttccgagtgaaacccacgcccgcccgtggggcggagccctagcaggggcgggcgagttcccgcaaggccagcgcggaagggaagaacacggtgtggggaggcaggggctcaggagggcgccatcagctggtgctcagagcccggaggaaggaactccccccggagttggggggggtggccctagggatgcctcaccggccccatctctccacggagctacgggtagcatcgcccatcgctcctacaccccacgcgccctggcccag

SEQ ID NO: 239828 - DNA, 46 bp, Homo sapiens
  chr18:63417705-63417751
  hyper
tgggctgcagcccctcctactttcacccctcttctttattttcctg

SEQ ID NO: 239829 - DNA, 1055 bp, Homo sapiens
  chr18:63417931-63418986
  hyper
gacagcgctgacagcaggcgcccgccgcccaccatcgtcgccctcttcccctccctcttcggccccggctccggcgcgctctctcctcctctcctgcgcgccctctcgccctctctctggccgcgcgctcccgctggctccggaccctgcgtctcagctgcccgggcgagccggaggggcccctcgcagtgagcagacgcagcgggcccccggcgcccgaggccggggcagggtccccgcgcaccgcggagtgggctgtgattggaggaggagcccgtgccgggcgggcccgagcgggtgtcgagccggttcctccagtctgccccgcgcgcggagctgcgcgcactgggtccccaagagcccgcgggcgtccggcagccgagcgcacgttctttcggatgcacacgcccgggtccctggcgtctgacgccgtggggagggcagcgaggccccaggtgagtgtgtctgcctgcgcggggctggggaggcgccgctgggcagatgtgcgcccttgctgtgcgcctttggaagcaggactaatcagtgagcggagagcgggcggggatgtccgtgtggagtttcccttggcgtccccaagttactgcgtgttgcagtgagatgtggctctgcaaggcaggacaggcttgtggacggaggcgggggcgtttggcccggaaagccggtgttgacagacaccaggtgcgacacgaggagtagtagttgagggtaagagcaaatcccggcactctccaggtgcagcggcaaacatgggcaggctggagcactctcctcaaagaggaccacaagcaggctcctccctcaacctcggactgatgggggcacaactccgcgccggctgtgccgccgggttctgcagaggtctgaggctggaagggggtatgcgccgctttgggcaggagtcctttgaaccattcgctctggacaccttttacctttcgtgaaggtggagctcacttcagggtgctttgcttttttcccctgtaattagtattctgctgatctggttcatctgcatcctgcgtcccctccgcctg

SEQ ID NO: 239830 - DNA, 115 bp, Homo sapiens
  chr18:67067489-67067604
  hyper
ccactttcagtcctagttaacgaaaacgcatgcataaatcaaccactcgggtcggtcggtcttctccactccttcagcagaggacgtcggcgcccggctgcctcgcccgcctgcc

SEQ ID NO: 239831 - DNA, 54 bp, Homo sapiens
  chr18:67068084-67068138
  hyper
cccgcgccggggagccgcggtggtgcgctccggccagctgtgcgccgccgagcg

SEQ ID NO: 239832 - DNA, 310 bp, Homo sapiens
  chr18:67068678-67068988
  hyper
gcttgttgcttggccaggtgggggcccacacctgccggggggctccgcagacggacctggggactccaggagcgcctgagtccccatcctcgagtgcaccgggctgtcttcgaccgtgcggggaagtcagtagacgaaaggggttgtcagttccaacgaggaacgtgccttggaggaggtttctttgcggtgctatccacgatggtctgttctcaaaagtgtgcgcctttcgggtggaactgctgtgtgtggcgacgctcgcgtgtgtttagaatcaccattttctggtctccgcttcccaagctcaatt

SEQ ID NO: 239833 - DNA, 207 bp, Homo sapiens
  chr18:67069168-67069375
  hyper
gcaaagttgatggagacctttccctattcttgagagatgcgctgcctggcttgggagggaaaccgtgtagaacccaagggttcaaaactattctagtgaccagacgaggcggtaggagggactcacgggaggcagcgggacaggaggggctgtcacctgggcgggagcagcctagacttgggacgcgagagagaggatggagggatg

SEQ ID NO: 239834 - DNA, 408 bp, Homo sapiens
  chr18:67872732-67873140
  hyper
tatcctgacaaagcgggggtgaaagagggagcggtcgcggagcggccggccgcggaaacgtgacacgaccattctcagcaagtggccagagcgcggggggtgccttgggcgaggggcaagctgacagttaccgagtttcctgatgagccctgccaggaccatctcgtcccgtcaatctgcagccgccggagaattaaactgccgcgccactgcgtccagccacaattaatgtacccccggaaacacgtcctgtgggacggtgagttccgcaacgcctgcgctcaccaggagtaggagtcattacgtgagcccttcgcggccccagcgtcgccaggagagcttccagcctctctagaatcactactgcgcacttcctggacagcagtctccgtcgcaagaagcggaggg

SEQ ID NO: 239835 - DNA, 44 bp, Homo sapiens
  chr18:67955797-67955841
  hyper
cagggggacagggaccgcagccgccaaatccgcggggccgggga

SEQ ID NO: 239836 - DNA, 1027 bp, Homo sapiens
  chr18:70208929-70209956
  hyper
gacagagcctgggaactccacgtccaagaagcctgaaccccagcccgcgcgcgcaggtccccgcccctctccccgggctgggggcggggtgggcaggccgacggctgacctggtcgaaatagatggtcatggtgcggttgctcatctcggacggctcgtggttggtgctccgcgtggcggagaaggccaccttggcgctgccggagcgcacggagatgcctagggaggaggtgacggcgccgtccgccgacgggctggagtcgcacaccaccaggcacttgccctccagcacgatgggctccgtgtcgttctgcgcccgcacggggcagcaggcgggcagtagcagcaacagcagggccagcgccacccccaggcaggatccgcagccgcccggctcgcgcagcgccccccggcgcccgggcatcatcagccgcagcccgagtggcccccggccgggcgcctgcatcgggactggtgggaggcggcgcgcgggggtggaggccggcgccggcgcgagcggcgcggaagggcgcgaaggaacgcgcggagctcgcagcagcctccgggggccttcgtccccggctctgacgttcaaggccagggtcgttctcagaagaaaggcgcctgtgaacctgtcagggcacagaacccaaagccttacaccgggaggtggagccaccgggaagaagggggactgggagcaggtgcctgcggctcgggggttctccccgaaggccacccccttggtcccgcgcacagccaacccgctttccgatctggcacaacaggtccggagaaacgcccgggcgcagctggcagcgcatccctgaaggctcccgagcagcgcgcggggctgcgacgagggagggggccgcgcttctgcaggtcctcgtcgctaagacgggccccgagaccctcagaaggcgtcaccgccaccccgcccattcaccagcgcggagggggctaagacgcaggcaaagaaaaacctacgaatgcttgccttctcgccttcatctcacagcatttc

SEQ ID NO: 239837 - DNA, 1543 bp, Homo sapiens
  chr18:70210267-70211810
  hyper
attcctctcttaggcgaaggaccgattccaacgacggaatcccaggcttgggttattctccagctctggtttccagaccacggggattctctctttctcagcggggcggcagcccctgcaggtttctgcgaacttacgcgcccgtctgcacttttgccccgtccccgctcctcccaggaaagcagacaggccatttcaataccagcccagagacacgcagagaagccgccccctcgccgcccacagcctcccattaactcttccagtattctttctaagaacagagaagttggctcttgataaatatccgctgtccgcagccccgatcctacatgatttcccttctctctctccacctcctccacccctcgatctggaccagggagagtcttcgttaaaatccacgcagaaggcgcttgcatgcggaggggagggcaggtcgggggtggttacctggaacatccatgctgggcgagctccgctgtccgcgaagttgctctgcttagagaaaatgaggcgagtgggagctgtcgggaggaggacacggagcgcgaccctgctcccagcgcgtggccaataaccgcgccgccccgccctgccgctttcccgcgccagcctgcgccgcttcaggggtgcaccacgccccgcgcgcccgcttaggcgccgcgcccgggaccgggaaccccgcgtctcgcccggctcagcgccccgcgctgtgcgcccaggtgcctccaacccctgggcttcgcgcccgcaccgctgcctggggcccctcgagctcccgcgctcagcgcgtccgcagcgcggctccctcgcgggtcccctcggccccgcagccccgccagtctccagagggcatagccgagcgctgccgcctccctaggactcggaaccttccctgctcccaagcccgccgcaccctccaacgccccggtcctgctcacccaaacgcccagagcaaaatactcccagacgtctcttttgaaaattagacacccttaaaagcaccggtcgcttctcttcttttagattctttcttttctttccccaattccctccaagtcttaatattgaatggcgtgaccactttcataatgacaggagcgaaaaaaacaataagttaaaaaaaaaaaaaagaagaagaagactgggatggctgggacgaagagagggaaaaaaaaagcttgagaatttgatgatttaggagctgtggttccagagtcccagttggggaactgtccggttcccgcagggctagaagaggggcctccggcccgggtctgtgtgtctgctcctctggacctcggactggtggagcggctggcgcttgcgcttatttattaaattgcggtgtccgcgctcgctcaaaggacccggggagacgcgctgggtttcccagctgcgcctggagctcggctgagggcgcaaacacggacgtggggcgccacctgcgggtgcccgggcctccctgccgcaggctgcggaccggcggactccgacagaagacgggggagtcctggccgcaaggctgaggtttgctgat

SEQ ID NO: 239838 - DNA, 1182 bp, Homo sapiens
  chr18:70534034-70535216
  hyper
gcccttccctccagcgctggcttcaggtgtgccttctgctacctcctgtactgcgaacaggggcccgccgagctccgggagcccctagaagaggaagactcctctggccccactaggtatcatccgcgctctcccgctttccacctgcgccctcgcttgggccaatctctgccgcacgtgtccatccctgaactgcacgctatcctccacccccggggggttcctgcgcactgaaagaccgttctccggcaggttttgggatccggcgacggctgaccgcgcgccgcccccacgcccggttccacgatgctgcaatacagaaagtttacgtcggccccgacccgcgcgggactgcagggtccgccggagcgcggcgcagaggcttttcctgcgcgttcggccccgggaaaggggcgggagggctggctccgggagcgcacgggcgcggcggggagggtactcactgtgaagcacgctgcgcccatggatcatgtctgtgcgttacaccagaggctccgggctccactaattccatttagagacgggaagacttccagtggcggggggaggacagggtcgagaggtgttaaagacgcaaagcaagaaggaaataaaggggggccgagagggagaccgagaggaagggggagctccgagcccacgctgcagccagatccggatgagtccgtcctccgccccgggcgggctctcgctctcgctggccctcagcgccgcgcagccagcagcatccccaccgtgacgctcgcatcacacccgggcgccggccgccaccatccgcgccgccgccgtcaggaccctcctcccgggcatcgtcgccgccgcggggtcgggaggacgcggcgcgcgggaggcggcggtcgcagggcgagccccgggacgccccgagccggggccggggccggggagagggcgcagcgaggtgggggccagtccagaccgacggcagcgacggagcgggcggcggcggcggcgccggcggcggcggggtggctcagtccccagtctcagacgcgccgcgcagcaggtcggagcagcctccccgggaggatgtccagcggcagcgctcctcgctccagcccttggggatcttccgctgaggcattgaaggcaggaagaaggggtccgtcatcggctcgccgggctgcgcgccacctctgctat

SEQ ID NO: 239839 - DNA, 180 bp, Homo sapiens
  chr18:70536300-70536480
  hyper
ccatcccgtccggccacccacacccgcgccgcggctggggcttgggttggggactgtggcggcgaagaagccggggtaggaagagctaatggcaatggcggggtcgccggggggcggggggtcagcagcagacgctgagctgtgaagactagggtggccccgaaaggccgaggaaaggag

SEQ ID NO: 239840 - DNA, 211 bp, Homo sapiens
  chr18:71815059-71815270
  hyper
aacgaagagtgcacgcaccgcccccacgcccgcacgtcgccacaccccttatgcgcatgcgcgcgtgagcaaaagtaacggtatgcccacccttgcgcagacggcaccgcgccagacacccgctcacagagcgggcttctagaaacttccgggcctcggcttccttacccacccctaacattctgccgcctagggcgccaagccaagttcg

SEQ ID NO: 239841 - DNA, 100 bp, Homo sapiens
  chr18:71815684-71815784
  hyper
cgcgcctctttgccgtatcccagttaagagcgaggttttcaaactactattcccaggaagacgggggtttcccaggtgactttgcgaaggcatggcgggg

SEQ ID NO: 239842 - DNA, 117 bp, Homo sapiens
  chr18:71958667-71958784
  hyper
ggtgtgcacgcgcaggtgtgcggactcgaggagagcgcccaggtgtacactagcaggtgtgcggactcggggagcgctcccaggtgtgagcgcgcaggtgtgcggacttggggcggt

SEQ ID NO: 239843 - DNA, 718 bp, Homo sapiens
  chr18:72124009-72124727
  hyper
gggctcaggggtggcgagggtaggacggagaggctgtctggggacaaagggcgaattctggcgaaaaggggagagacacccccagcgcgcccacagagcactgccggctgcgtccccattcgggggaccggggcgtgcgcctctggcactccacgcaggtgtcgggaacccatgtccccggcgggtgccaccgccacccaagtccccgggaaggctggggaccgggagcgggtgtgatcccccctccccggacgcgcggcgcggggcagagcggcggcgggacctaccagcgcggccaggatgcgccggctcttctcgtcggtgcagcgctcggagaggacacccgggtgcgcgcggagcagcagcgcggccgccagcacccagcccgcggtccacgcggcgaaggcgaggagcgtgccccgcccgcagcgcccgcgcctcctgcaccacccggcagggccccgcgcgcccgccgcccgcgccatggccagccctgcccgcgcccgggccccaccgccgcccgcgccccgagttccgcactcgcgtagctgctccgcggctcaggcccgctcggcggggagggggaacgggggaggggccgcgcgagggttggggcaggccccgcgcctggggcggaggtgcggggagggcgtccagcagcagcaacaccccgcgcgccccgagcacccactgggggtccactcgccgcatcccctgc

SEQ ID NO: 239844 - DNA, 78 bp, Homo sapiens
  chr18:72163135-72163213
  hyper
tggactccattgccgcactgcaggcgacttctcggaccccaccgttgaagcaccaggccccccgcccacccaagagca

SEQ ID NO: 239845 - DNA, 85 bp, Homo sapiens
  chr18:72167086-72167171
  hyper
tacaattctgaacacgtgctttctgggcaggtcgcccctcagtctccactagagacaggactgaccagttgctcttccttccaag

SEQ ID NO: 239846 - DNA, 33 bp, Homo sapiens
  chr18:72265004-72265037
  hyper
ttttcggctgtggcgtccggcgctgcatccact

SEQ ID NO: 239847 - DNA, 132 bp, Homo sapiens
  chr18:72921196-72921328
  hyper
cgccggcgcagcccccgcgaacccgggcgcaccaccccgggtgtcccggcctggggaccgctgccgccccggccgctgctcctttaatctttttgttttggtttgaatctgctcggcgcagactggccaagg

SEQ ID NO: 239848 - DNA, 444 bp, Homo sapiens
  chr18:73167490-73167934
  hyper
ggccgcctctgcgccgggacagcctgggaagccgcgcaggcctggccgacttccccttcccagccccgctgcgccctgcggggccctgtcggcggtgggggctgcggacccgggagcgcgcggccgcgctgcacgtgcagggaccggtaggcgccggggtcagcgccagcgtttgatgtgcggcggggagcgggccgagccccgggaggccgcttcgcacctcccagtgtgtccgggttgagcgcgaggtcaggaggggacgcagagttcacggcgaagacggatcgcgggggctcgtcccgcccgggttgcgcgcagcgggggccgcgtgatggatgggccgggccgggcacccgggaacccgcgagcgcggggctgggctctgggctgcgtccgggggccccgacttggttattgatcggcccaagcgcaggagaactgact

SEQ ID NO: 239849 - DNA, 42 bp, Homo sapiens
  chr18:74162764-74162806
  hyper
taataactatgtctctgaatcgacaggaaatcttgccatttt

SEQ ID NO: 239850 - DNA, 157 bp, Homo sapiens
  chr18:74163246-74163403
  hyper
ctctgaccaccttccgggggcggggggggcaccgatgtcagcccgggatggatgtccgcgggtgcaggggggtgacagcccggtcctgcgcacatctccgctgacagggcattcctcaggaggggctggagtgaacgggaggaattggggagggagg

SEQ ID NO: 239851 - DNA, 240 bp, Homo sapiens
  chr18:74202735-74202975
  hyper
gctggttaagtcacacgacgagcggaccggagggtccgagggctccgtcctttgttacgcaggggacacccctggaaggccagcccaacgcccacgggcacatctgggcttttccaggcagtccacagagccatccccggcctctttaccgcggagacactgtgaggtcacacacgcagaacacaaaacccccacgcagcagcccctcgcgaggcgccccaagcccgggtgcccaccgcc

SEQ ID NO: 239852 - DNA, 776 bp, Homo sapiens
  chr18:74203667-74204443
  hyper
cccagcccagagggccgccctgcgctctcgcccccggcccctggccgcgcgtgccccaggtcccccagtagcgccccagcgccgctgctgctcagacacaccgaaataggaatgatttaatccaacgacacctcccagggctgcccagtcccggttccgccggctcctgagattggggaggggcagaattgggtggaactcgggctggggggcggaaatggcccgagtgggagggaaggcgcggagtcggacgctaccttgtaaccgagttagatttctgcagaagaggaggacgaaggtcgcccacggaccctcgggtgacctcggtgcggcctggtggccgggcacacccgcgcatggacgaggtccctcccaggggtctccctgcaggggtctccggggaggtagtgggcacgtgggtccttaacctctccattgcatcatccccatcccggtgggtacagaagcgcagcaaccccgcggtgctcccggaagacaccgcgtctccaacatttacacggagatgctgctcggctcaggtcgggtccgtacgcttcccgaggtgcgtactacgcgagccacacacatcactaccgatattcctgagaaagtcggtgccacagtaagtcagctgcaagcgtggggtggccggtgacgcgctgtgcccgtgaatacgcccattgtgcgggtcagacgcagccagggcgcagcgttcaggaggcgggtgggcagccgaactttcactggccacgagcgcttcaccttctagaatttgc

SEQ ID NO: 239853 - DNA, 219 bp, Homo sapiens
  chr18:74206708-74206927
  hyper
aatggatggagagcgcatccgagctcccctcctcccgcgtcgcctttgacaaagtgtacaaagccagagcctcttccgcgctcccaccccggcccccaccccgcccctccactgcggtaaaaaccacctcccgggcgctcgccccgccgcccgaagttgcatcttcccctatcctggaattgacgagcagagcaactacccaccgggaaagccaagtag

SEQ ID NO: 239854 - DNA, 147 bp, Homo sapiens; identical to SEQ ID NO: 205044
  chr18:74207202-74207349
  hyper

SEQ ID NO: 239855 - DNA, 93 bp, Homo sapiens
  chr18:74208279-74208372
  hyper
tggaggtggattccgtccaagacgcccaacgtggctccgcgtagcaatcagcgctgcaatcctggcggttacctcagcggcggcgtctctctc

SEQ ID NO: 239856 - DNA, 129 bp, Homo sapiens; identical to SEQ ID NO: 205045
  chr18:74843247-74843376
  hyper

SEQ ID NO: 239857 - DNA, 269 bp, Homo sapiens
  chr18:74961321-74961590
  hyper
ttccccttccatgtcagccacgtctatagagaagctcacgcggccctttccctttgcacttctctcctctgtagcaggccgcggggtgagggtgggattaggcggccaattttacaaaactccagggagcgtcgccagcctcgatttcctggggttattcctgggagagaggcgttctcacggacagccaccctggggaggaggaggaggaaaggcactaatggatgaggaggcccgcgcacccctccgcctcccaccccggcgcgccc

SEQ ID NO: 239858 - DNA, 66 bp, Homo sapiens
  chr18:74961830-74961896
  hyper
agcccctggcacccgactctatccaccaccaggaagcctcccaaaagagctctcgccctgtggacg

SEQ ID NO: 239859 - DNA, 1085 bp, Homo sapiens
  chr18:74962676-74963761
  hyper
tggcgcgcagcaagccgggcaagccgcggagcaccaccaacctgttcatcctcaacctgagcatcgccgacctggcctacctgctcttctgcatccccttccaggccaccgtgtacgcgctgcccacctgggtgctgggcgccttcatctgcaagttcatccactacttcttcaccgtgtccatgctggtgagcatcttcaccctggccgcgatgtccgtggaccgctacgtggccatcgtgcactcgcggcgctcctcctccctcagggtgtcccgcaacgcgctgctgggcgtgggctgcatctgggcgctgtccattgccatggcctcgcccgtggcctaccaccagggcctcttccacccgcgcgccagcaaccagaccttctgctgggagcagtggcccgaccctcgccacaagaaggcctacgtggtgtgcaccttcgtcttcggctacctgctgccgctcctgctcatctgcttctgctatgccaaggtgcacgccggtcgcggggccgagacgcgcgagggagggcggagggccggtgggggccctggggtctcagtgtcccgcggccctgccggagccttggcggcagcctggccccggtggtccccactctggcggcgctggtacggatctgtgcagagaggcttcctggccgctgctggagcgtgccattggcttgcgcaagaaagttacttggagtctgagagatgctggggaaagtttgcagttcacttcgcatggtccagtagaaccagtttctcctcccctccccttcctcggccctgcggcccttcaacgcccccaggttgcctgggcggtaggtaggcgggcgctgccgcatccttcccggtacagcaaaccccgctcggttccagcaactcttcaaccagatcagctgcgcggggaggttaccgccgcggcgctgtgggacctgaggagagctctggtggtcaccagagcgcggaccttttgcgagggtgacgggtccccacagctccctcccgggctctcagctggccgtggcgggggggactcgcggggcggcccctctcccccggggtgcgcagtttgccctcg

SEQ ID NO: 239860 - DNA, 256 bp, Homo sapiens
  chr18:75362779-75363035
  hyper
acctttttttgcaaattaaccgccgtactttccttcccaatgtttgtgtggagagcacacggttcctgcgtcaggaccctgcaggacgcgggccgaggctcccagctgccggccatgccctcggctcctctcccgacacgcgccagcactgccccctgctggcctcccgggagcactgcccgctgccgcggcgggaggagacccgggaagaagccgggaccgcgagcagctggacgctttctccctggggctcagc

SEQ ID NO: 239861 - DNA, 70 bp, Homo sapiens
  chr18:75612455-75612525
  hyper
cacaggtgaagcctgtgtttgaatcactgagaggagattcaaatgaggttcctgacggggtagctgctcc

SEQ ID NO: 239862 - DNA, 469 bp, Homo sapiens
  chr18:77153102-77153571
  hyper
aaaagctctcaagtgaccaccgctgtgggccagaatgcaaaactgcaggaacagaacattcgcaggaacagaacacagtcgtattaagtgattttcccgagcaggaagtggcatctggcctgcggttcagtagggggaggaaagggtgggcgcacctgcccctggctggcgcacctgccaggtagccccacgcggcaccgcgtgtgccgagcgcccctgaggatggaaagccccacgcggggcaggtggcacccaccctccgaagacgggacgggatggagcgttgagcttcggggcagctccggcccggcccgcgctggagacgcccgcatctgccaggatggcgtctcatagccctggtgctcacacatgacgccaggaagccccagcaacagtgaccgcccaggctctagaaaatattggacggggtggatgaacacccaagtgcgctccaggagaagggatttgg

SEQ ID NO: 239863 - DNA, 431 bp, Homo sapiens
  chr18:77156454-77156885
  hyper
gagaacgaggtcggccgggtctgtgcgcccagggaggggcgcggcgcggaccgggaacggcgtcccccagctcccagcagcccggttccgagcgcgccttctgccaataggtgtctcctctgccccagcgctgagggcgcgaggcgaggccgccgcgggtcccgccgaggaagcggctcgcaggccggcgatttggggacgggcgaggctgggccgtcaggaccacagagggcacgtgggagggaggaagggaggcttccttgggagtgaaggatgccccgtgtcttcctgagcgaggcagagccaccctctggcgccaagatcgcggtttgggggttctgcgccccccacccccaccccgagctcgtggcggcgtctccctcgcgccgcgcccctgaattccccagggccgagcccgtcacgccggctcc

SEQ ID NO: 239864 - DNA, 580 bp, Homo sapiens
  chr18:77160162-77160742
  hyper
agtttatttaaaaactcgtgtccggggagtttatttaaaactcggaagccggcggccgcgagccggttgtttatgtaaacccggaaacgccccggggggcgggggcggggcggggacggggggaggggcgggggtcacgttacgcggaggacgcgcgggcagcgccgggagaaccgaacccctggcggccgcgaccccggctcccgccccggccccggcccgacccgccatgacggggctggaggaccaggagttcgacttcgagttcctcttcgagtttaaccagcgcgacgagggcgccgccgcggccgccccaggtgggtcagtcccggagggcgcggggggcgcggggccaggtcggggtttgggggcgcccaggccccctccgcgtcctcgtcgctccccggggaccccaggagtccccggcgcgcccgggaccgaggggctacggcgggggacgctgcagtgcggggcgtcctgggctcggatgcggttcctccgagcgctcgcggcggggtcctgggggaagagcgcagcccggacacgggcgtggacgaagtggtcccggacagagggctgg

SEQ ID NO: 239865 - DNA, 80 bp, Homo sapiens; identical to SEQ ID NO: 205050
  chr18:77724414-77724494
  hyper

SEQ ID NO: 239866 - DNA, 305 bp, Homo sapiens
  chr18:77748471-77748776
  hyper
ccccggcccccgccgcccccgggcccacggacgaaatccggtcccgcccgcacacgcaaactccgctgggactgccacccggcagaacgtctgggcgcgcacgcaccgacgccgtgcgtgctgacggcatgcgcgcgcgctagcgccgtgcgtgctgacggcatgtgcgtataggcgccgcgcgaacgtgtagttggccgggtggagcggcggcgacctgggcaccgtggagcgccgttggttccgtcatagcagctgtcggagtgggggttcctccccagcgtccaggcggcctggtggtcctg

SEQ ID NO: 239867 - DNA, 1050 bp, Homo sapiens
  chr18:78004630-78005680
  hyper
tagatgtttggtaccgagcgggtgggggacgccgggctcggagccggcggcaagtctcctcctggcaggtaacaagcctcctttgcagccttgaaggcgccttggccagggccatcccacggcccgggcccccagagcccccccacggccccgaatccgagcagcccctggccctcaactcgccccggaaaggccgccctcccctccaatgtgtggcgcgccccgatcgcctctcactcgtggaacaaaagagcagctcccgcggagcgggtccagagtctgcccggactgtccgatggccctcggccctctgagcgccgcggctgccgggctttgtgtccgcgcggggggcgggaaggacggccggggtccccagtgcgcgtcccgcggagcggcgcgcggcgcccgaactggaaagttgtcgccggcgcctgtcgcctccacgccgccccagtccccctccgcggggcgccccattcattagccaggagactgggcgcagggccgccggggcgggcggggggcttaccttgctcttgacttccactgcgctgcaatcgtagaatcgcaaggtctgagacttgtgaaaacttcggttcatggtttcggccccggtcagcctcgccgtcgccctcgctcctcaggggccgcagaaagactcccgggggcggcgcccccaggccccggccccggccccggcccgcgctcgcttggccggcgggctgctcccggtgctgcgggcccgagctgggctggccgcgcgcctcagggactccaggggccgcgcgcgggaggagcgcgggggacgccggcgcgcgccgccccacctcccggcgcccgcgcccgcgccccgccccgcccccgagccccggaggacccgcccatatccccgcccacagccccgccccgcgctccggaggacccgccacaccacgcccccacgctgcagctccgcgtcggatcgccagtgggtgcgcgccctcctgtccacaatcccagagcctggggaaaggagcatcgcggccagcccaaggcgtctcgttttgattg

SEQ ID NO: 239868 - DNA, 546 bp, Homo sapiens
  chr19:267127-267673
  hyper
agccatcacccgcgccgtcccgatggcgccgctcgcgttgctcctttctcggcgccaggatctctccccaggaaccagcgcagatccggaggccacgctgcgctgcgctgcgctgcgctgcgctgtcaggacgcgcagttcccgccccgctgaagggacaccgttttacaacacgccgcgtagaccgtgacagggaagtaaggcccacggcagcgctccctcctcagcactcgcggccgcggacaggacgccttttcctcctcctctcacctggtgaccgggtgtcccgaaccgcggccgctcccgggcgggtcctgaagagaccgtggctccgtcttcccggtcgacgccccggggcgacgagtgcggatccgccgcggttcccgcgcgtgctccaggttgggcgggagccgggcgccccctcgcggcagtcctggggagtctctgaaaatcagcgttcggatgactgcaggccgtgatttcggaaatgtcaactgaaatcgaggccaccatcccgtgccttgatcggaacggatggagatttta

SEQ ID NO: 239869 - DNA, 812 bp, Homo sapiens
  chr19:290581-291393
  hyper
cagagcaaacactcggcctttgttcccgggaccctgcgggaggggggcctcgggatgcccattccgccagtgtggcccgcaaacccgccggacaggtttggttctcctggcctcccggccccccgccaccccgttcacccgaagcctgggacccagccttcatccccagtgtctcccccgcccgagccagcagggcggctgggcctccccgcacgtgcacgggttcgaatcccgccgacgcaccgggtgccaggaccgagggtcagccctctccgcgcgcagcgggagcgcccaccccaggggcggaggcgcggacgtcctgccggggtaacccgcggccgcccccacctcccgggcccgcgtgactcacctcccaggccaggcggggcgggatggaggcgcgcgcgcggcccctccgcacagacttcctgctgccggggcgggggatgctggccccggctccccgggcctctcgcgacccccatccccctgggcctgggacgcggggacccccgagcctgggagggcgcgcgcagtgcggggcgcggagggaggtctggtcctcacgcgaggtccccgcctccagggtcctcggagggacgagggcgcgcagcctccgcgttcccctgcaaacttgcgcgcagccgggggcgtgtccgtcccgggagggtccccccaacacccgggtccccaaggctcttaccgaccagtaagcacagcacgtcgagcagcacgaagacccacctccgctgcatggtccccgcgacccccgacgccggtcccagcgcgtcccgtcgcgtcccggcccggcc

SEQ ID NO: 239870 - DNA, 118 bp, Homo sapiens
  chr19:294976-295094
  hyper
agaccccaaggacctggttccgactcaaggaagaacaaggacggtggtggcggaggggctccagagaactcgtaatgcctctggtgaggccaccgccgtcctgcatctcttgatgtga

SEQ ID NO: 239871 - DNA, 206 bp, Homo sapiens
  chr19:383974-384180
  hyper
ctcccaaagtgcagaagagaattccaggaagcctcgagagtgagtgacggcccgcggcccccggcgaggaggcagcaataccacaggcgaccaccagctgccgccgcagtcaagggcagttggtctcccctcgccaggattaaccctggaccgagggctcccgaaccgaatcgtccccacagcctgtcctgcgagggcggctttcc

SEQ ID NO: 239872 - DNA, 178 bp, Homo sapiens; identical to SEQ ID NO: 205057
  chr19:460121-460299
  hyper

SEQ ID NO: 239873 - DNA, 1703 bp, Homo sapiens
  chr19:460522-462225
  hyper
actcacccgcacgacgtaggagaccccgggccccaggaccctggcgtcggggtgtagccagccgtgcgcgggtttgtggatgaagctgcccttccggatccactcggcggcggcggcggcgtccccggaccccgccgccccccgcccgccccgcgacccccgcgaccccgcgccccgacagcggctgagcgcgggcaggggacagggcgcggcgcagcggggctcgcaggcgcccaggacggcggccgccagcgccgggacgccccccgggcccgccggctcgggttgggggtccgcgccccccgaggccccagccgcccgcgccgccgccgggccgcggcccaggaagccgcccggggccgcgaacttccactgcggcattcggggcagcaacgcgcagaaggtggtgggcgcctcgggctcggggggcgcggggggcgccgggggcgcgcgcccgcccggaccctgcgtcatggccgcggccgcccgacggagcccgaccgggcgctgcgcctggcgcggaggaagccctcccgctccgcccgctccctcccgccccccggcccggtgatgtcatccgcccggcccagcgcgcagccgcggggggctgcgcccctgggaccccggccctcctcgtcccggagcctggccgcgaggctggggaaactgaggccctccgaggacaccgggcgctggcctggaacccgcagccaaggcgggacggggctttgaacccagaaccccgtcagcgaccctccccgctgcgccccccacccccgcccgccgcccaagttcgcagaaggaccgagctggagaagcttagaaattccacatcccttctttcccctatttcctagtggggaaactgaggccccgggaggcgcggccagggaaaagagaaccccagaccctaaggtcagcccctccctctccgttgttgcagctagaaggtaccttagggtcacccctatttcttagtggggaaactgaggcgcggggaggggaaggggcgcggccgagggctcacagacgaagctcaaacccaggagtgccggctcgggggtggggggggggggcggggctaggagcggagccgggcccctgctctgcggcctgtcccggcctcagtttctccggctgtaactcaggggagcgggctggagggtcgcggcccttcttccctcacttctggggagcccagtcccgcaccagctcatctgagctctgggcctcagcctcccaggccggtcgctccatccccagcctcaacctctccgagaccggccgcaccttccctggcctcaagggtcggttccttctgcaccagaaaacggggtgtcactgtcaccccgggacccagcctcctggcccgacttggctggagctcccctgcacctgccccgccccaagcagggctgattgccgggaacaaagggaggggccgggacgcgctggcaggtggggagggagggaggggcgaggctgcccggagcccgatcgataattcaggggatgagatcacagccggcgccgcccgcggggccggggaggtgggggaggggagcgaggcgcgcggtcgcgatcggccgtctctgccgcggcgcgtgtcggactcagcccctgcgcgtccgcgggaggagcagatcgtgggcgcgattggtcgggctggagccgcggctggacctgcgcgcggtgtgtgtgtt

SEQ ID NO: 239874 - DNA, 32 bp, Homo sapiens
  chr19:590524-590556
  hyper
gagcgcgtcaagtcggcgggggcctggatcat

SEQ ID NO: 239875 - DNA, 64 bp, Homo sapiens
  chr19:591381-591445
  hyper
gtggtggtcgcgggcgtgtgcgcctccggtgggtttattttggtgggacgtgtggtttgtgtgt

SEQ ID NO: 239876 - DNA, 248 bp, Homo sapiens
  chr19:591531-591779
  hyper
cacacgcgaccatggagggatgcgtgtgtgtttgtgtatccacgagtggggtgtgaggtggggtgtggagggtgcaggtggagggtgtaggtggggcccgccgggctagcgaggccgggcgcgcgggacgggcgcggtttcagcaccacggacagcgcgccggacctgggaagcctgcggttttcccgcctgtctctcctcctccaggcctgggcgccccaggacagcccccacggaccctggacccc

SEQ ID NO: 239877 - DNA, 159 bp, Homo sapiens
  chr19:633641-633800
  hyper
gatgcagcggaggcgcgaaggcatgcgccggtggacgctctgattggttcctcctgctgtttttaaagggagggggcgggacagagctgttgccgtggcaactgggaggcactctcaggctgttttcccgaggacctcaaatccggactttttttctgt

SEQ ID NO: 239878 - DNA, 213 bp, Homo sapiens
  chr19:660980-661193
  hyper
aaggaatctaccaacgtccatgattaaatatttgtcaatcactgttccatgctggctccctggccagcctgtaaattctgtgagggcaaagaccacagcggcctgtcaccacagagttcctttcactacaggaaggccctccccaggcccagtgacagtcggaggaggtcaaggtcctccgtgtccaaggccacggggcgaggaagtggctcc

SEQ ID NO: 239879 - DNA, 613 bp, Homo sapiens
  chr19:661417-662030
  hyper
ggaagaggcaagagcgagacccctgggagacagaggagtaaggcaaggctcagtctcagctccccaaccttcgccccacacccgagatttcactttatttgttcctcctgctggggaggggaagccctgtggcttcagtagagaggaaaccacacctctctctttccactcctgggcctggccccgctctcccgccatgccccaactctagcactcgctcctcctctgtgacccagagacaggcggcttctcctgactccctccagccccttcctgggtctctactcccggggaactgcactgcttctggggggcttggacttctcttacgggtcaaagcgtagcaacagccgggcggctacgtacacagcacagtaaatcctcaatgcctgcagcctcttcccctgggcacagggtggggagtccagacccctccacctcctgcggctgctcccctcaagctggccaagcggctcccgactgagccggctctgccactttcccgctgagccaccacgcgcctcagtttccccatctataaagcacgggtggctcgactaaatcaccactttgcacgtcagcctggcgaagggcaacacgggttaaaaatgca

SEQ ID NO: 239880 - DNA, 88 bp, Homo sapiens
  chr19:676322-676410
  hyper
ccccgccccgcgccccgccccgcccgcggcccgcgggacctttatagggagcgccggccgcgcgctgggaagtcggtgccgctgccgt

SEQ ID NO: 239881 - DNA, 141 bp, Homo sapiens
  chr19:797095-797236
  hyper
gcctgactcgccacgtacccactctcaagatggcgtctcccgcaaagccacgcgccagctgactggctcagacgccgtcacgtgatcccattttctccccctcccccgactacacaagccgtttccgccttcggccttgag

SEQ ID NO: 239882 - DNA, 66 bp, Homo sapiens
  chr19:913485-913551
  hyper
gcccctggggggacgaacggggagactgaggcgggaggcggggccggccacgatccctacacccag

SEQ ID NO: 239883 - DNA, 722 bp, Homo sapiens
  chr19:919387-920109
  hyper
gtgcctgagtgttcgcacacgtagggggatcagcagggcgggcggacagggcaggctcccaaccgcgcaggtggccacacgcccggctggcggctcccgcaggtctcggtgcaggccacgtgtgccactctgaccgccatgagtgtggaccgctggtacgtgacggtgttcccgttgcgcgccctgcaccgccgcacgccccgcctggcgctggctgtcagcctcagcatctgggtaggtgagtacagctcaggggcctcacgggagaaggcggacacgtcctagtgccctgggcgcccggagccacctgccgcctcggtccagcatctggaaaatgggcgcaatagctctgcctgcctagggccagcgaggctgcagacggggcgcccgggcctttgcagggtggctgggtgaacgcctcccggggaggcacgtgggggaccgctggttccccgagcggggtcttcatcctggcttgtggcacaggctctgcggcggtgtctgcgccggtgctcgccctgcaccgcctgtcacccgggccgcgcgcctactgcagtgaggccttccccagccgcgccctggagcgcgccttcgcactgtacaacctgctggcgctgtacctgctgccgctgctcgccacctgcgcctgctatgcggccatgctgcgccacctgggccgggtcgccgtgcgccccgcgcccgccgatagcgccctgcaggtg

SEQ ID NO: 239884 - DNA, 83 bp, Homo sapiens
  chr19:982965-983048
  hyper
ccaggagtcgcaccgcctccggggaccgcaccccgcatgcagcctccagcccctgcctcttgctgctcgagggcacacgaccc

SEQ ID NO: 239885 - DNA, 31 bp, Homo sapiens
  chr19:984152-984183
  hyper
tctctaagcaggccgcgcgaccctcgagtct

SEQ ID NO: 239886 - DNA, 90 bp, Homo sapiens
  chr19:1021293-1021383
  hyper
acccacaatccaccgcggctatgaggccagtataaggcggtaaaattacgataagatatgggattttacgtgatcgaagacatcaaagta

SEQ ID NO: 239887 - DNA, 275 bp, Homo sapiens
  chr19:1039817-1040092
  hyper
gccggttatacaacgtggggaggcagcctggctccccaaagacagcgcagcctcgttcccggagggcggcctgcctgggacctgccgggcactccgccaccctacggtgatgcagcaagagccgcgcggtccctttaagaaacccggctaggcgaggcccttctgtgatcccgtctcctcccttggcccgcgcagctccgacggagcaggccagtgagtgacgggcaggtcgcccaatagcagcgtgcagaggcaggggcgtgccccggcgctgc

SEQ ID NO: 239888 - DNA, 36 bp, Homo sapiens
  chr19:1041004-1041040
  hyper
ggtggagcctggtgacgaaagcgttaagcccaaact

SEQ ID NO: 239889 - DNA, 329 bp, Homo sapiens
  chr19:1207330-1207659
  hyper
gcctgtgtcctccgtgccagggagagcgtggttgggggcctgcgttacggactttcactcaggcaaggccagttgtcgcagcggggcgtgcgtttgcatgggctcttggactccagttaaaatgccctggtagcgaaaccctcctgagaagggagcggcccccaatcccctaagactagccccttggctcccccagctgtccaaggagcagaggcgcccagtggaatcagcctgtgtttgtttgggccccgagagtttgtgtgcggccgccaacacgttttctgcgcagtgtgtggccgttaccggggccaggcgaaatgtgatttgtt

SEQ ID NO: 239890 - DNA, 195 bp, Homo sapiens
  chr19:1237439-1237634
  hyper
cacggggcagcaccgcgcccccgagccggccaagggtggggatggcgagccaggggaggcagggacccgacgccagggctgagccgagacgccatcgtcctcgcccgacctcacagggagaaactgaggctggggcggggcctgagcgggggtccctctggaggcagccgggtggggggcgcaaggcccggatct

SEQ ID NO: 239891 - DNA, 97 bp, Homo sapiens
  chr19:1241545-1241642
  hyper
tttcactgaagttcgttttactccacctcccaggacggtttcaccgcccttatctgaccaccccctggttctgccgcagcccgggccggaacaaaac

SEQ ID NO: 239892 - DNA, 67 bp, Homo sapiens; identical to SEQ ID NO: 205073
  chr19:1260499-1260566
  hyper

SEQ ID NO: 239893 - DNA, 204 bp, Homo sapiens
  chr19:1269059-1269263
  hyper
gggagcaggcacgcgtaactgggtcagccccgccccgccccgccgcgcgctggtcacgccccctcgagcgcgggtggaggactgcggactgcaaacgtctcggccaatagtcgagcccgacaccagtccgcgggagggggcggaaccgagatagactcggcccccagctcatgaatataagacgcaggcgcgccctctgattgg

SEQ ID NO: 239894 - DNA, 87 bp, Homo sapiens
  chr19:1270262-1270349
  hyper
gtgagcagaagcacgttctggtccagcaacaagtagatgtcagttggttagggtaggagttggcacccgttcggaaataggagaacc

SEQ ID NO: 239895 - DNA, 174 bp, Homo sapiens
  chr19:1354508-1354682
  hyper
cagaagcttatgacgcctttgcggggatgcctggctttgggatcggttgggatctgctggaattgggtccgtggcgcgcagctcccgggctgggaggtgccgtaggacctggaagattctcgaaagttctggaaggttctctcagggatcgccgcgggcgggggagcctgtttt

SEQ ID NO: 239896 - DNA, 38 bp, Homo sapiens
  chr19:1401758-1401796
  hyper
ggaatccccgccttgccgcttacgcgccatagattcct

SEQ ID NO: 239897 - DNA, 242 bp, Homo sapiens; identical to SEQ ID NO: 205074
  chr19:1438211-1438453
  hyper

SEQ ID NO: 239898 - DNA, 209 bp, Homo sapiens
  chr19:1444964-1445173
  hyper
cgcttctcacatccccgcggcctcccccctggacggcagtttacactgaactcggcgccctcccctgacttctgaaggaggagtcctgggtggccccgaagcctccccggcagccgcacggctccgtccccgctccagggttcagctgaggcacctgctggaggcggcctgtccccgccgccctgctaaagcggcgcccctttctccgg

SEQ ID NO: 239899 - DNA, 547 bp, Homo sapiens
  chr19:1455093-1455640
  hyper
ataaacacacacggcgccgccctctgagcccgcccccgctgacttgctccccaggtgtttcctgctgaatgagattgagaaggaggagaaggagaagctctggtactactctcagctgcagggcctgtccaagcgcctggacgagctgccgcacgtggagacggtgagccggccggggagccagggggcagcgcgcccgccccactcagggtgcgggaagcggcgtgggggaggaacggggcctggcccgggcgcccctcaccgtggcccgcccgcctgcctttgccagcagttctcgatgcagatggacctgatccggcagcagcttgagttcgaggcccagcacatccgctcgctgatggaggagcgcttcggcacctcggacgagatggtgcagcgggcacaggtgcggcggtgggcggggtggcgcggcggtaggcggggccctgcgccagtgggcaaatcagagtgcagatattatgggcggggtctggggtaatgggaggagtcttatgcctcctgggttggggggcgcgggttctggttc

SEQ ID NO: 239900 - DNA, 2647 bp, Homo sapiens
  chr19:1467828-1470475
  hyper
acggcaacgactcggacgaggagcccccggcggccgcgcccacgccaacccaccggcgcacatcggccatccctcgcgcttttacgcgggagcgtccgcagggccggaaggaggcccctgccccgtccaaggctgcaccagctgccccgccgcccgcccggacccagcccagcctcattgctgacgagaccccgccctgctactccctgagctcctccgccagctccctcagcgagcccgagccctcggagccgccggccgtccatccacgaggccgggagcccgcggtcaccaaggacccgggcccaggaggcggacgcgacagctcgcccagcccgcgggccgcggaggagcttctgcagcggtgcatcagctcggccctgcccaggcgccggccccccgtgtctggcctgcggcgccgcaagccccgagccacccggctggatgagcggcccgcagaggggtcccgggaacgcggcgaggaggcagcgggctcggaccgggcctccgacctggatagcgtggagtggcgcgccatccaggagggcgccaattcaattgtcacgtggctgcaccaggcagcagctgccacgcgggaggcctcgtccgagtccgactccatcctgtccttcgtatccgggctgtcagtgggatccaccctacagccccccaagcacaggaagggacgacaggcggagggagaaatgggcagtgcccggcggccagagaaaaggggcgcagcctcagtcaagaccagcgggagcccccgttcccctgcaggccccgagaagccacgtggcacacagaagaccacgcccggggtgccagctgtgctccggggacgaacagtgatctacgtccccagcccggcaccccgtgcccagcccaaagggacccccggcccccgcgccacaccgcggaaggtggcgcccccttgcctggcacagcccgcggctccagccaaagtcccgagccccgggcagcagcggtcgcggagcctacaccggcctgccaagacctcggagctggcgacgctgagccagccccccagaagcgccacaccgcccgcccgcctcgccaagaccccctcctccagctcctcccagacctcgcccgcctcccagcccctgcccagaaagcgccccccggtcacccaggctgctggggccctgcccggccccggagcctccccggtgcccaaaacgccggcgcgcacccttctggcgaagcagcacaagacgcagagatcgcccgtgcggatcccgttcatgcagaggccggcccggcgtgggccgccaccgctggctcgggcagtcccggagccgggccccaggggccgggcggggaccgaggcgggcccgggggcgcgcgggggccgcctgggcctggtgcgtgtggcctcagccctctccagcggcagcgagtcctccgaccgctcgggcttccggcgacagctaaccttcatcaaggagtcgccgggcttgcggcgccgccgctccgagctgtcctcggccgagtccgcggcctctgccccccagggcgcctcgccccgccgcggccggcccgcgctgcccgccgtcttcctctgctcctcgcgctgcgaagagctccgagcggcaccccggcagggcccggccccggcccggcagcggccccccgcggcccgacccagccctggcgagcgccctgcccggcgcaccacctccgagagcccgtcccgcctgcctgtgcgcgcgcccgccgcccggccggagactgtcaagcgctacgcgtcgctgccgcacatcagcgtggcccgcaggcccgacggcgccgtccccgcggcccctgcctcagccgacgccgcgcgccgcagcagcgacggggagccccggccgctccccagggtggccgcgccgggcacgacctggcggcgcatccgagatgaggacgtgccccacatcctgcgcagcacgcttcccgccacggccctgccactgcggggctccacgcccgaggacgccccggccgggcccccgccgcgcaagaccagcgacgccgtggtccagaccgaggaggtcgccgcccccaagaccaactccagcacgtccccgagcctggagaccagggagccccccggggcccccgccggcggccagctctccctcctcggcagcgacgtggacggtcccagcctcgccaaggctcccatctccgcacccttcgtgcacgagggcctgggggtcgccgtggggggcttccccgccagccggcacggctcccccagccgctcggcccgagtaccccccttcaactatgtgcccagccccatggtggtcgcagccaccaccgactcggccgcggagaaagccccggccactgcctccgccaccctcctggaatagtggcctaggccggccttctggaacgttctctcccggccctgcggcgcggtctggctgccccatgggcctgcgctgtagacgtcccccataggtcgccccagggcctctgcccacccgagccccaccactctcagaacccccgcccagcgcacggcgacctcgcgcctcaccggaagaccttgcctctgtgccgcggaggtccaggaggaaacggggcggccgctaggcctcaagtcccgaccgtggagcgctggcaagggcgt

SEQ ID NO: 239901 - DNA, 535 bp, Homo sapiens
  chr19:1470675-1471210
  hyper
gggcctttgcggcgcgcaggggcgaagcctgtaatcactgcagccgccggtaattcgctaatgagggctttgcagggattgttttcattctcagccccagctgtgggagtgcgggtgggggtgtggccgagccccggcaggaagccccgcccagacggtgttcagggaacccggagcccaagcgctccggcggagcccaaaagggtgggggtgggaggggcagaggccaacggatccccctgcctgtcgcaccccttggcgggagacgggaaggcagcgggctgcgtacgatgggaccctggtgcagacgccgggccggctgacatttggaccccatcccagaggagatgctggctaccagctggggcgaccccaagggtcgctggagtcagtatcggcccggcgcagccgcggcgggcgaggccaatggaaaggagactgaggggagtcccggcagtgagcccgaggccctgggacctggagcccgcgctggcctctccccagcggagcctgcacgttacggagaccatcacat

SEQ ID NO: 239902 - DNA, 135 bp, Homo sapiens
  chr19:1490511-1490646
  hyper
agcgggagagggacgcacgcctgcccgtcttccgcagacccacaccctcgggagcctcagttttcccatttgtacaacgacaagactaacccagagaagcgggttcactgttgcgataacgcgtcctaccctttg

SEQ ID NO: 239903 - DNA, 390 bp, Homo sapiens
  chr19:1491335-1491725
  hyper
gggcgctggaggccaagaccggggtggagaagcggtatctggctgcaggtgagccgtcggcgctagcccgtttcgccgacgggcacaccgaggccatgggcctgggggtcgcagaccggactccttccccggctacggggtccggtccggccggtggagcgcgcgaggtgactgggacctcgaggtccgcccgcagcccttcccttgcccgcgccctgcgaccctgctcccgggccacccctctctagcttccgcccctggccgccccccgacgcctccttccgggcgctgggtgcctgccatgccgaagtccggttcttccagttgcccagtggccccagaggggtcgggatgccagtgtcctgcgcgtttcgccgtcccccttccccc

SEQ ID NO: 239904 - DNA, 202 bp, Homo sapiens
  chr19:1507917-1508119
  hyper
cggaaatttgcttccgggccacggctcgttaaagggcccactctgacgtgtgtgcagggagggcggggcaggtagtcaccggcgtcacgaaacacgcgctgcacgaaaaggcacgagtcgttggcgcctccgcagcggccacagcggtcctcgagggcacccgagcccaacaacccatcacagccggcgctctaaagggtga

SEQ ID NO: 239905 - DNA, 504 bp, Homo sapiens
  chr19:1567149-1567653
  hyper
gggtgcccctgcgggcggccgagggcctgggctgcggcgcggctccccggagcctttccgggctggaggcggcccagacaaaggcggcggcggggccggagcgcgcaggggaggagcgcgggctgcgcccaactttctcccgcggcggctgcaggacaaaggcgcaaaggcagcggccgaggccggagcccacgcggggcgtgtccggtgcggggcgtccggcgcgggctgggctgggctcgggcgacccccttccccggggcggacggtgcggggacccccaggacagcaacccccgacgagggccactcaccctggcgacccacgatctcggcgacgtgctcggagctgggcaccgggacgcactcggtcatgttgacgcttttcttgcggctgccgatcacgctcatctggtcggccagcagcgtcgggggccccagggccgcggggtggggcgcgaagcccgcgaacacgtcggggggcgacggccggggcggcggcggc

SEQ ID NO: 239906 - DNA, 89 bp, Homo sapiens
  chr19:1605604-1605693
  hyper
ggtccggagtgggcggcgttagggcggtgctttctggccacgtggtctggcggccgattgtgcttctgggctccgcggggctacctgcc

SEQ ID NO: 239907 - DNA, 37 bp, Homo sapiens
  chr19:1672517-1672554
  hyper
ctccccacgtgcgcgctcacacgtgcatccgcggcta

SEQ ID NO: 239908 - DNA, 182 bp, Homo sapiens
  chr19:1675933-1676115
  hyper
gcctcggggttatcgatcgcagccttggaaacgcgattagattatcccggctgggaacggcagcctggcgggggccgcgcgggggaagcgcgccgcttcttgtaaacggttccccgaagggcgctgggccaggggcctgggagggggctcgttcccggtggggggggcgtcccggtgcggcg

SEQ ID NO: 239909 - DNA, 201 bp, Homo sapiens
  chr19:1718940-1719141
  hyper
aggtcgatgggagcgggggcccaggctgcggtttacactgaatccacaaaaatcaccgaagcttgaaaagtgctcaataagccatcgatcgctctctgctgatcggtgccgccgccgcagcggggctggggggaaaggcggggcgagcagacccaggctccctgcctgtgccccacgcgggaccgcggccctgcatctgcc

SEQ ID NO: 239910 - DNA, 647 bp, Homo sapiens
  chr19:1725427-1726074
  hyper
gcgggtggtgggaacgggattggaatcccgactgtggggcccctgcggccacctccaggatacagcggaccccgatgaagccctggcctgggtgctgggggaggctccgcggcgcggtcccgcaggcgggaggcgatgctgccgacgctattgctgccattactattacggagagatggggcggggcgggagcaccgggcccttcccggaagcccttcctgagcttattcagtgcctggggccgcggcgatcgatgacagctgggcgccggccgagccccctccgggccgcgcgggggcgcatgcgcggggccgcgggatcgatcggccgcgctcgggcctccccgcacccgcccgaccccgcccccccggctcgttgcccggcaacctctgcccggcgcgctcccattggctggcggcggcccgggccccggccgcgcgtggtcacttggtcagcgcgggctcggcgtggccgggggcctggctccgggcgcgggtcgatgccgcctcgcatctgacctttcccggcgcggggagggggcccgagaggatggagagagctggaccatcttggaagaaaactttattgacccgtctcttatcttggggacgcacggttccagcggcggggggcgagggtacggctgg

SEQ ID NO: 239911 - DNA, 90 bp, Homo sapiens
  chr19:1749505-1749595
  hyper
acggaggccaagctgctgagggaggggacgaggacgcggggccccagggaccaacccctccgctccccggccagccgcggccgcccagcc

SEQ ID NO: 239912 - DNA, 452 bp, Homo sapiens
  chr19:1751178-1751630
  hyper
ggccctcttcctctcggagtccctgaccctcgtcttctctttcaaaatggatgctttccctgctagaaaagccacacacgcttgctattaaaatgaacacgatcatcaagctgtaaaaaatatatttaaaaggaagcctgcaaaatcccagctccctaggagctcccccacattggcatttgggggaacttccttccaccttgttatcctcccacccgtagagacccccagcccccacctggtctgcgcttcttgagcctgggatgctagcgttttatggcggctgattgatttttagatctcacgattatttttaattatctgtgattgttggagggtgagaatgaggagcgcaggctggggctctgtgcagccacatcccccccgccgagattcagcatctgcacggggagtggggtacgcgactgttcggacctgcccctctcttccca

SEQ ID NO: 239913 - DNA, 149 bp, Homo sapiens
  chr19:1752192-1752341
  hyper
gcaaagctggggccggggtttgcccagaaggtttgcaccaaaggggaagtgacagcctgactgtgtcctcccctcttccttcagctttgagccctgatgcaaccctctgagatgggggtaactgggggctcccgcgaaccgactgcctg

SEQ ID NO: 239914 - DNA, 1159 bp, Homo sapiens
  chr19:1753203-1754362
  hyper
aatcacacagagacgcgaaatcggagactctgggtcgaggcccccagccccacctgggcagagtctgtcctcggacccccgcccgctgtcccccgggtacggcctgccccagcgggcgcgggcgggcgcagtggccagggacgccgaagccccaagtctggccgacttcggcctgcttggtgctcgagtggggccggggcgggcggagagcgaggctgcgggaggcagcggtggcaggagcgggtgggcgggggcgctgacgtcagacccgggcccgggcgccggcggccgctcccctgccacatcctggtggccgcgctcgcagccgggccgggccgtgcgccgcgcagcctggcagcctcgcgcgcagccaccggggagcgggcgggagtcatgcagcggccttgagcactaggggccggcgctgaggagcgcgcgcggcgggagggcagccgagcatggagctgagcctggagagcctggggggcctgcacagcgtggcccacgcgcaggcgggcgagctgctgagcccgggccacgcgcgctcggcggcggcgcagcaccgcggcctggtggcgcccgggcgcccgggcctggtggccggcatggcgagcctgctggacggcggcggcggcggcggcggtgggggcgccgggggcgcgggcggcgcgggcagcgcgggcggcggcgcggacttccgcggggaactggcgggcccgctgcacccggcaatgggcatggcctgcgaggcgccgggcctgggcggcacctacacgacgctcacgcccctgcagcacctgccgccgctcgcggccgtggccgacaagttccaccagcacgcggcggccgcggccgtggccggggcgcacggcggccatccccacgcgcacccgcacccggcggccgcgccgcccccgccacccccgccgcagcgtctggcggccagcgtgagcggcagcttcaccctcatgcgcgacgagcgggcggcgctcgcctccgtgggccacctctacggaccctacggcaaggagctgcccgccatggggtcgccgctgtcgccgctgcccaacgcgctgccgcccgcgctgcacggcgccccgcagcccccgccgccgccaccacccccgccgctggccgcctacggcccgccaggccacct

SEQ ID NO: 239915 - DNA, 1150 bp, Homo sapiens
  chr19:1757099-1758249
  hyper
cagaagggcaaaccgcaggcgagaagtcccatggggggggggtgggctccccgcagccgggtcagcagcacccagcacccgccctgagtggacaccgcctgcttcgcctgcacctgaccctgcacccaggtgggtgttcgctcctgccgaccccacagccatccaggcctccgccgtcccctttctgccacggggagagttgcagatggggaaacaggctccgtttgtgcctcgccttcctgacttgtgacaatgacaaacagtctcagctctgggagtctgggtttcctgtcgaggaagggagagttagaacagtcgccgtctcaggggtgcgtgggggaaccggaggggtgagcgcagctcctggcaccccgagcctcccgcagggcgctggggcgttgaggatgataaacccggaccacgctgcccgcctgctctctgccgggtccgctgcccacgccgtggccccgccgcgcggccccgcggccgcggggttcacgccgtcaaccttgcgcacctgtcgcgtctcaggtgccctgggggccgcgtctacaccaccggactccgcctggggcgtaagaggtggcgggggcgagggccgcggggtcactaggctccggcccaggcctttagttccggtcgctgcgcaaatgaaaagcggttaagtggcggcaaatcgcggcggttagggggagacggccggatgcgtccccatctccacctaacacggcgacgccccaacgctggtgctcggaaagggaactctgcccccgccccgcccccgcaccatttcaaccccgcagcagaggactcgccgccctttctactccggcatccccattccccgctccgcgagcaccgcgggcctccccaggcctcctccaaggagaactttgcgccccgggtctcccgtcgcgcttgcccggctcggggcgggccacgcgtttccgcaggtgccgagtgtcctgccgggcgccggggccaggacagagacggggacagggagggagaaagacccgcaggtgcagacggagagggagggggagacggggagatggagagagagggaggggtcgcgagacaaaaccagagagtggggagggagagaccgggagcgggagaaacagacggggagaagagaaaaagaagc

SEQ ID NO: 239916 - DNA, 1129 bp, Homo sapiens
  chr19:1761759-1762888
  hyper
gggcagccttgggacacctacggcctcagttttccctctgccaagtaggtgctaatgtgagaggggctgagaaaccggcacccctcctgagtcccgagtgtgggcagatgtggggggcgatgggggacccctccgagctaccaagtcatgacctcagagccacagattcacagaagagagaaacaaagactggaagatgtgcctggcacaggctgctggagaggcgtgcccgggtcacaagtgtagacgcacccggagacacgtgtgtagacgcctccgttcacactgggacgagtgcagactgacccaggacccccatccgccctctggcagtcttgagccagcaactcccctaagtggggtgcggggacatctggaagacgccccatctccccctggacgcagtggctgcgccatctggagaccctcgtgctggctgctgggggtcctgcgtgccttccgcgcgcccccagctgcgcccgccagccctccaaccctcctgccctcctgccctcctgccctcctctctgggagtcgggacagaagctgctgggctctcctccctggagctggggctttgggaaggtcgagtagaccctcagtgagtgggatgcgcgagttggggacgctagttgcggggcagcaggggtccacgcatttccaagcgccctttcccgtccaaggacctgctggggggatgactgtgcctcagtttccatcacccagcaaacgccgtcccgcagcacccgggaagctgcggagtcgggctggggccgccgcgttgcgcacatcggtccttggcgggtgtgtggatcccagagcgcgcccggcccccaacagcctgacaggacctggacgcacgtgccccggcgccaggagacccgggacccgggaccacgcgcccgcggccttggagcctcagggtcactggtgcgggctccgcaggaaagcgcagcccccagcaggcacccaccatcccacccccgcatcccaccccaggggaaaccgcgccgcaccaggcgcgagtgttcttcttccttgtctggcgccccagaaccgcggccgtcctgggtgcgctcagctccagcgcagtgggaggacaagacacgttcctcctcccctcctccac

SEQ ID NO: 239917 - DNA, 548 bp, Homo sapiens
  chr19:1763818-1764366
  hyper
tcatttttgccggccgcctagtactctctgactcggcggtggtttcaggttttcctgaaccacttccccgccccgctgacatttaggctgtttccaatcgttcgcggtcaccatagcggctgcaatgaatacgtccggggcggatcattttacgagtgtgagtttatctgtggattaatttcccaataattgaaacgctgggtcagcctccccagcccctttctgggtggccgcttcagccgcttcttatcactgattcctttcctgtcatctttttcaaatccatttcccactgcaggcgctgtgtctccgtaacattttttttaaaaatcaacgccttgtgcgtgcgtgtgtttgcccactggctttgctcctgtttgagggtgcctgaatggggtgggtctctgtagctgaatgtccgagggtgagaggtgccccctgacacccccatgcccccaccccatggcggcccagcctccagatggagccacgagggagggacagcccgagagtccaagtggaaatgcgtttcccggttaagtctttga

SEQ ID NO: 239918 - DNA, 853 bp, Homo sapiens
  chr19:1765514-1766367
  hyper
tcccaggcagccgccgcttcacgctgtcctgtgactgtgagtggaggccagctcctggagctgcctctctctggcctcacgcagcagctgctccctgaatggtgaatggatgagtcggttgcaggtccgtgcttcggcgttcattccttcgtgactctcgggactgcggcccggtggggacacagggctctgggtcactgcgtccacttgataaaccaggaacctgatgtccagagaggccagggtgcgcgttcaaggccactcggcccgcagagcccacccgcgtccccatggctgcagtggtgaggggagcagggggaggcagagaggagcccaccctggggctgggcggacatggatgcgtaacccacaccgcaggcttctgcggggtgacacccagactcaccccaagaccctgcacaccctacagctctcacgtctcacgtccacaccgcgagccagctgcatcccacacagggatgtcacaccaagatccgttgcctcatccaccgcccgtccaaggccccacaagctgatgccggttttcccgcccagaactggaacagctttcctaacggtcacaggtttcttagcttctcacttgggtggggtttggatgtgcaaggctgccgacccccatcgtggttgagcgcccgtgcaggcgccacccacccacccacagcacctcgctcagacttcgccctccaccccgccgggacatttgggaagcctcaggcagccccacgcgggcacacccgatggtggacggaggctggcaccctcagcccgcacgcggccaacgtcaggcgcgcgcagaggcacccacgggcccgccttcaggggcgaggcggat

SEQ ID NO: 239919 - DNA, 148 bp, Homo sapiens
  chr19:1768343-1768491
  hyper
gtgagtgaggccagcgggggaggccagacagagaggcggctggtggtggatggggagagggaagcggctggaagagctcaggagcccaggaaggactggcctgcaccgggacatgcctgaagggggcgcactgtctttacaaaggaag

SEQ ID NO: 239920 - DNA, 246 bp, Homo sapiens
  chr19:1769649-1769895
  hyper
gcacagagggggcatccaggcggcccccctactccaactcacacctctgtcagcggctgtgggggatgggagcaatgacaaagctgctcgcggtaaacagctccgactggatcgatctgggctgtgaggagctgtaattagattgaacgccgggaaggggggcagcagagcctctttttgctgcaatcgacaaaacgggaagttttttcagactctgcctggcccggcccctcccccagcctctgc

SEQ ID NO: 239921 - DNA, 376 bp, Homo sapiens
  chr19:1775060-1775436
  hyper
ctccgggcggcgtgcgcctcctgcctctccccggccggccacacggtggcgctgtgtcccgctcgcccgcccgcccgccgctcgcccgcagcctgcaagcgcaaggaacaggagcagcagaaggagcgcgccctgcagcccaagaagcagcgcctggtgttcaccgacctgcagcgacgcacgctgatcgccatcttcaaggagaacaagcggccgtccaaggagatgcaggtcaccatctcgcagcagctcggcttggagctcaacaccgtcagcaacttcttcatgaacgcgcggcgccgctgcatgaaccgctgggctgaggagcccagcacggcccccgggggccccgccggcgccacggccactttctcca

SEQ ID NO: 239922 - DNA, 1282 bp, Homo sapiens
  chr19:1775735-1777017
  hyper
tcaggacgcccagagggcctcgagaaaaaccagggctcactgtgttgtcccctaaagcgggtcaagaagcacatactagaaatataaaccgggtatttaaaaatggaattttaaagaataacccctcctccgtcagatcccctgccccaccgagggaggtagtagaaaacttccttcctccccacccgccccggccccctccccagggacctcagccctttccaaagtcgccaaaaacccacatcaagccggatccttacggtcccccaccctctccaaaaccaaccccacccgctggcaggacggcccctgcggccgagaactgagctgcccctctctgcggccaggattcctcgtgccaagaatcgcctgccttaaagtctggggaggggcctgcggcgggcgcccagcacctacgggcgagcacccttcccaccccatcccaggccgcaggggacggggggctcccacgtgcgggtaaattccagacgcccccgccccgccccgtctgttgagttcactttacctttaggcaccttcgtggagcgcaaggaaggacgcagctccggacacgggagaccacgcccaggctcccaggagaaggggacccggccggagaaggcgccgctggggccgcccggaggagcccctctgcacgggcccgtggagacgcttcctgcgtggaaccttctggaatccaccgcccccctttccgcccgcgtcagggtctgaactgggcttgcaggggggcagcggggttgaacgtggtgttggtttccactctcgccaaagagagaagacgccgaggaaggtggattccgcttgctccattttttgccaaaaatatttacaaatgggaagggtcggaaatgaagatgagcgcccccctcccaccccgcgctctcccccgctcctctcatctggtctgggtgacctccgagactggccggccgcgggatcccaggagcccgcctcctccgggggttcaagatccgagtctagaaggaacctcctccctgaaatccccccactcatcggctgcctcccagggaggaggcggcccccctaccccccttgaaaatgcaaaagacatttctagtgaaatgcccctcccctcccccaggtaaaggctacctcactcaagctcatgtctgtgattggaaaatcacgcctgataccaaagatttctcccaaggatttgtgctggatgacaggattccctggcctgggacccggctcggggccccgcctgccgagtgccaccccttcccgaacctgagag

SEQ ID NO: 239923 - DNA, 295 bp, Homo sapiens
  chr19:1812452-1812747
  hyper
caggcctcagggacgcggtcacggccgaagggcggggcctcgcagagcctcgcagaacaggccgggatagaagacgctcgggagcagtgcctgggtctggggaggggccgggactttggggaagggactagaaggaaggcgaggacgagcggggtctcgctgagcaaagtcagagtaggggcggggccaggactcaggggcttggccagagcgggaagcggggttgagcatggccttgcggagcagtgttatggtaggggcggggctgggatccggagccgttacaaaggaggaa

SEQ ID NO: 239924 - DNA, 34 bp, Homo sapiens
  chr19:1848728-1848762
  hyper
ccagggctgtccacggcgcgcctgaccaaaaaag

SEQ ID NO: 239925 - DNA, 346 bp, Homo sapiens
  chr19:1853355-1853701
  hyper
caagacctcaaccacgggccaggacccacctcttccaagcacccaggagaaggaggggaggccagggaagcagggccgggccaggctgcagcccaggcccggaagagcctgcaaccccggcgggcatgggctccacggccccacctgcaggccagggagggcagcgcagcccaacagccgcagtcgtcgttaagggagagttgattgtcacgtgataccgcaacggccaaagtcagcaaggcagggactggaggcccaagcccggtgccagcctcccctgcagcctctctcacccacccacccagagagggcgagctagggcccccacacccgaggacagaggaaa

SEQ ID NO: 239926 - DNA, 631 bp, Homo sapiens
  chr19:1856933-1857564
  hyper
ggaggagcaggttgccggggtggggggggcgaccggggcaggggcgcgcagccgctgggaacacagctgccgcacgtagctcggcggcggcggcggggacatccgcagccccagccggccccgctcacgtggtcccactcccgccggggccagggggcccgggccagggtcgcctctccggcctgggtgcctgccagccccgccccgcgcttggagactgaggcgcgcacatgcgcacgtgggtggcggggcagggggtgcacgggctacccacccacgctgcgctgggcgaagcgcctctgcgaaatgccaggccctgcctcgcacacaatccactcgcagggaggagggtggggtgaacttgtgggggcccagagcgcgctgctcctagccagccgggcccccaggtgcacagccacccagctgctccgcgctacctggccgagacgcagcgccctgaggatgcggtgggtggggacaacgcgggagggcagtgtgggcggggccgcggtggacttgaccctctgactcaggctgggcccgggtgagctcaggacagcctcggaaacaggcaggctcagaaaaatggagtccaggaagtcctggaaacctggcccggccccgtctgagc

SEQ ID NO: 239927 - DNA, 384 bp, Homo sapiens
  chr19:1862236-1862620
  hyper
agccaggcccaccaggctcccggttcccctcgccgccccggggactgcgctaggaggggcgttggtgtagccgaagcgctccaactacgcgcaccttcccgaatcgcccgccaggtaggggtgaacaaacacgccagggaaatacagcagtgtggacccgagcccctcgagggtcctccaatactatgaagttcccccgcccagactcaggccccaacccgcgctcctagcctcgccctccccctcgttaaaatacagagaacgcagagaaaacgtgccgggctccccccatcctggccccacgccaggtgctctgccgacctctggggagaatccgcgcggccaccccggcggcggcgacgcggttcctcctccattttcaca

SEQ ID NO: 239928 - DNA, 76 bp, Homo sapiens
  chr19:1864237-1864313
  hyper
gtgcggaagcggccggccccgcccccaggccacgtgcgcgacccttcccccctcttctcccggcctggggccctgc

SEQ ID NO: 239929 - DNA, 360 bp, Homo sapiens
  chr19:1874693-1875053
  hyper
acttccgggtcagccgagaaatggtattcagcaataaatgtgtcagagtcccaaaaaaaaaaaaaaaaaaaaaaaaaaaaaaacacttctactagacagaaagcgaattttcttaatctgtaaagtgcacctagaaaccaccaccatccacccaacagaaaaatgagccaagaagataaaatacaaatggcttttaaatagtcaaacgtttataataaacatattttccaatctcgaaacgactgtcagtggtaacaatgatcaacgtaacatagatgtaacaggaacatcacgacgttcgactatacttacaggaaacacaagctacagtgaaatactatctcacgcctaccaggtctg

SEQ ID NO: 239930 - DNA, 456 bp, Homo sapiens
  chr19:1941691-1942147
  hyper
ggacacagccccacgctgacctccacactcaggagtctgccgccccagtgaccctcacactccagaccctgcccccgccgctccagtgacccccccactctgcaccccggtgactgtcgtgctccaactctcctgccctccgctgagcctttagtccccaccccacctcccgccttcttcccccacccagtgctcaagcccaccgcccactcacccgcgtccctcacgcctccccgcgttctggtcccgaggcccctgcccacctggccccatcgcctcctcctgtcttggcctggcccctccccacgcagctgtgtccccgtcctcactttgtggtcctaaagctcttgagggggagagcagggggtggtgggggggaggaaggtggtctgatccgcagggacctgttgcggcactgcctgggaactcccggctgggctcgctgccccctccccc

SEQ ID NO: 239931 - DNA, 101 bp, Homo sapiens
  chr19:2163579-2163680
  hyper
atggggggaaattcggatttttggttttactaagccgtgtgtggggaggtgtccggcgtcctcctcctgggacgggattcgaacccgctatccgacgggcc

SEQ ID NO: 239932 - DNA, 87 bp, Homo sapiens
  chr19:2164918-2165005
  hyper
tgggacttctccccgatcttgagtgggcaggattgggctcacccccggagttagtaaattttgtcttcttcatcttggtgaccgttg

SEQ ID NO: 239933 - DNA, 128 bp, Homo sapiens
  chr19:2165545-2165673
  hyper
aggacaaaaactgaaagcagaggccgcgcttcagcgccccgaccggtttcctccctcgaaagttcaaactccagaacccttccagcctccacttctctctgttgggctctcatcgttttaggtggtag

SEQ ID NO: 239934 - DNA, 143 bp, Homo sapiens
  chr19:2168520-2168663
  hyper
gcccaattggcaaacgcaagggggaggaagggagatttttattcttacatgacctgggagttcctggataaccgcttttctcaagccccgcatggcatttcttatttttttgagagggaatctcgtactgttgcctgggctgg

SEQ ID NO: 239935 - DNA, 237 bp, Homo sapiens
  chr19:2169109-2169346
  hyper
gagtgagtacatgttccgcctgacagcctggcctggagcccggctgtgggcggcggtgagtgggcagccagcagtgagtagcagccggggcggggtgagctgtccccaccgtgactcagaaggtattttctgctgctgacctctgagcttgagtgtcctgagtaatcccagctcccccggaggcagattaacctttaggcagctttgtgtgagtaaaggagtcgctttaaataggaa

SEQ ID NO: 239936 - DNA, 187 bp, Homo sapiens
  chr19:2236299-2236486
  hyper
ctcaggctggggccggcgccaaaaatgtctcagggcgcagacacggaagcacccccagggctagtgcgcctgcgcaccttgggccagccatgccgcccgcctccgctgcgtggcgctggcgacccgtggctgctggcgtgggcggggtaccggttggtaggagagacggaccgttgttacataacca

SEQ ID NO: 239937 - DNA, 3189 bp, Homo sapiens
  chr19:2250670-2253859
  hyper
cacccgctacctggtgttagcggtggaccgccctgcgggggcctggcgcggctccgggctggccttgaccctgcagccccgcggagagggtaggtccgcgtggagagggacggggagccgggtcgactgcccccgggcccccagcccctgagccagccgcgtgcccacccaccgcagactcccggctgagtaccgcccggctgcaggcactgctgttcggcgacgaccaccgctgcttcacacggatgaccccggccctgctcctgctgccgcggtccgagcccgcgccgctgcctgcgcacggccagctggacaccgtgcccttcccgccgcccaggtgcgcgcaggcaccgggacacggggcaggagcgggcgggggcggcgtggcctcgtggccgctctcaactcctccaattgcgggttccaggccatccgcggaactcgaggagtcgccacccagcgcagaccccttcctggagacgctcacgcgcctggtgcgggcgctgcgggtccccccggcccgggcctccgcgccgcgcctggccctggatccggacgcgctggccggcttcccgcagggcctagtcaacctgtcggaccccgcggcgctggagcgcctactcgacggcgaggagccgctgctgctgctgctgaggcccactgcggccaccaccggggatcctgcgcccctgcacgaccccacgtcggcgccgtgggccacggccctggcgcgccgcgtggctgctgaactgcaagcggcggctgccgagctgcgaagcctcccgggtctgcctccggccacagccccgctgctggcgcgcctgctcgcgctctgcccaggtggccccggcggcctcggcgatcccctgcgagcgctgctgctcctgaaggcgctgcagggcctgcgcgtggagtggcgcgggcgggatccgcgcgggccgggtcgggcacagcgcagcgcgggggccaccgccgccgacgggccgtgcgcgctgcgcgagctcagcgtagacctccgcgccgagcgctccgtactcatccccgagacctaccaggccaacaattgccagggcgtgtgcggctggcctcagtccgaccgcaacccgcgctacggcaaccacgtggtgctgctgctgaagatgcaggtccgtggggccgccctggcgcgcccaccctgctgcgtgcccaccgcctacgcgggcaagctgctcatcagcctgtcggaggagcgcatcagcgcgcaccacgtgcccaacatggtggccaccgagtgtggctgccggtgacccctgcgccgcgcggactcctgccccgagggtccggacgcgccccagctcgcgccccttcccatatttattcggaccccaagcatcgccccaataaagaccagcaagcaaccggctggggtgtccgtgcgtgttagggggcccgtgggacctcccttgccgtctctcctcgcgcacggcccgggtccgccctgtagcgctcgctgtctctcccctgcctgaagcgccccaccaccgtctttcaggccccggacttggtgccgggtccaggcgtaaaggagcaggtgactctgcggccgcagcactcgctttatttcgccagagtcgcggggcgtccagaaggggcccctggactccggcgcggggccggctcagtcccgccccttgcctgcgcggagcttctggcgactcccaggccgctgctcctcgtcgggacgcctcggggacacccaggcctgcttcttcctgggctcggcgtccctggagtcccgtgcccacggccggtggcccccttcgcgtgactcccagcgctggggtagggcttcccggggctccctggcggcccgtggcctctcctctttccgcggcctctctttcttaggtctctcctccttccgcggcttctccttccgcggcttcccctctctccgaggcctctccttgggtccccggtctgcgagggtcacacggtcctcccggacggcctctccggtggcctcgccgggctcctcttcgtcgttctctgcagcctcccgactcccgggaatcttgggtctgacctctgcctcggcccggggcgcaggcggcgctgatggaggcgcctgggcctcgaacttaggctgcaagacagagtggggtcctggggtaagcgcccaccttccccccggcccgggctccttctttccttggggatgaaggtcccaatgcccgcggtcagtggaaggaagctcttaccaggggcgacgatggctccctcggggctgagcttggcgggacccagggctcgggcacacgtgcttggagtgctgcctccccagggacggcgtctgcagcgacagggtcgggacccgagtcagctgggccgaggcacggtccacactgtccatccctccctcacccctagagcccccctccctggacagttggagtggggctcccccggtacggctgagactaaggatgcccccgagccgtgggaagggactccgggactccgctgccgcggcgccccttctccgaacctcgctctttcaattggtcattcttccccccgaccacgggctgtaggaggcccctagcaagggaggggtcgcaggagtgcccccggggggcgctcacgagctgagcggtccccagagagggcgcaggggaaaggcggcagaacgctacgaggcaggaggggttgcacaaggttcatccggaagccagaacctactcgcggcgaggggaatgggccccgcaaaaggtccacaccgggtgagaggggcgcgcaaggcccgtcacttaaggggagatgcacaaaccaactttgggggcgtgcaagacccagccctggagaggaggctcccagaccccaccctggcggcacagcgcctttccttggaggaataggcgcacaggtggaccccagcctcgccccacctctggggagcctgcgctcaccgcggcacagctggaaagccgagcccagcagcgccaccagcgaggcgagcaccaggcacttgttgagcgacaggtctccccagggcagctcctcgctcagggccgggggcggcggcggcggctgcaggggcggcgcggtctgcgccttcttgcgcgcggggacgctccgagggcctgcgggggcaagtgcgcgctgcgctgtggtcactggctctgtgccgcccccttccccgggcgcagg

SEQ ID NO: 239938 - DNA, 49 bp, Homo sapiens
  chr19:2269132-2269181
  hyper
ctagggagggcgacgtggaccacgacagacaaacgggcactcgaagacc

SEQ ID NO: 239939 - DNA, 315 bp, Homo sapiens
  chr19:2270793-2271108
  hyper
ctgctggcgctgccggctgcgcgattgtgaaaatctcccccggggcgcgaggccgcgtctgcctggatgacgcaaccgggagggcccgggcctggagcgggggcgggggggcgggcggccgggagccggagcggggcgcgtcctccatgaggtcaggctaggcccgcccggtcttcgcggggacaagcaagagtcccagattttggccgtagtgcagggtggaaaggggaagccgcgacagaactgaaaaggggaagcgctggctgtcttggtggccggggggtgaggctctgccccggcggggctgcgtgaggg

SEQ ID NO: 239940 - DNA, 174 bp, Homo sapiens
  chr19:2289763-2289937
  hyper
ccatagcagggacaggaagacgggttgaaatctttagaaaacgcttgagaaactgcaaaaaagacgcatgctgatgaaaaacagtcctgcggttgggcgtctacaaaaaaaggggaagttctgcctggggagcgccgtgcagccgtccccttcccctccgggaaatgcataggt

SEQ ID NO: 239941 - DNA, 603 bp, Homo sapiens
  chr19:2302470-2303073
  hyper
tgacgtcacctcctcggctctgcgccccgccgtccacaggcgcgaagccggagctggggttggcgaccgagaaccttcctgcctcccctccccagcaaggggcacgtcccaccaggcccggactgcccgtctgcccctgcagggcccctcgctctggtggcgggctcggtgagctctgctgcccggtctcgggagtctgggggagcgcggcgtcgacccctgtggagggaggactcgtgtttcaaggacagagcctcattaccatgcacgaccagccgcagctgaggccgcagaggcctttggcaggggggccgggccggcggcagggacggcgttggcggtggtggacgggagtgggggtctgtcctgaacaggtgggggtggtccctgtgctggcccccgccatgcgatcgcaccccaggactctcctcctcttcctaagccccagcatgtgcctggtgccgcgcgggtgctggaggcacagcggcttccacgcagacgcccgcagcaccacagcctgtgcacggcgcatccacgccctgttacaaatgttccattcaacgccttctagcacattcacagatcgtccgcccgcacctctag

SEQ ID NO: 239942 - DNA, 120 bp, Homo sapiens
  chr19:2328966-2329086
  hyper
cctttccccgcctcggaggccctccgccgctgcagcgccactcacttcccaccgggtctgaaatttgtgccccctccatcctccggttctgcttctccgtttcggggtctccagttgccg

SEQ ID NO: 239943 - DNA, 625 bp, Homo sapiens
  chr19:2461978-2462603
  hyper
ccccatacccagcctttgcccgtgctgttccatccgccaggagcgccgtttcctgcctgactgcgcggccctgggcctcagtcttgcgctctgcaaaccggggtctcgaatctaccccagccctcctgtctcggcgctggggaggggcttcgggtgcccagagccatccccgcgggacccccagggactggactccaagtcccagaaagccccgcgcttcccgtgggtggggcccggggctttccccctcccagcgcgcagtttgggaggcgctgggcaattttcaaattttggcgccgaacgggaggggcggtgacagctgagaccgtggtccccccgggggcacccacgcccaggctgctgctggcagctgcgcccagagcccgaggtctggggcatcccgcaaagctgccccgtccattccgaggggcctcccaaggcaccacacgcgccagggggctccgggcccatttccattatggaaaactgaggcacaggaaggttagggaccggtcggggaatccgcaccaggggcgtagcggaggcgggattcgaacgcgggaccctctttcccccgggagctagaaattagtgaccaattggctgggcgcggtggctcacgcct

SEQ ID NO: 239944 - DNA, 52 bp, Homo sapiens; identical to SEQ ID NO: 205102
  chr19:2462945-2462997
  hyper

SEQ ID NO: 239945 - DNA, 84 bp, Homo sapiens
  chr19:2476063-2476147
  hyper
tccactgaggccacgcccaatgttcaagtctataaaagtcggtgccggaggctcccagctcagatcgccgaagcgtcggactac

SEQ ID NO: 239946 - DNA, 142 bp, Homo sapiens
  chr19:2478804-2478946
  hyper
aaaaaaactttttttatttccgcaaactaaaatcaacaagcagaaaaataccccaggaagtcggcctccgggccagccgggcttggcgcagtgctgcgttttgcctgtaaaccgaaactgcgagccctggccagccacctcc

SEQ ID NO: 239947 - DNA, 204 bp, Homo sapiens
  chr19:2488411-2488615
  hyper
tggggtagagtgaggggcctcgtgaagagcgctgcgggccaagaccctcttgcgcatgtgacgagagcgcacgagtgtgggagcttcggcctgcgctcacaggcgtgtgcgtggggaagtgtttgggccgccgtgtacacagcaggcacgccataaacgcttcttggatggctccatgcgagggaagggagggagggcagagtt

SEQ ID NO: 239948 - DNA, 608 bp, Homo sapiens; identical to SEQ ID NO: 205105
  chr19:2579151-2579759
  hyper

SEQ ID NO: 239949 - DNA, 200 bp, Homo sapiens
  chr19:2598981-2599181
  hyper
tttctagcatacagttccaccgagggcccatgatgaagagggggagaggcgggcacgaggcgaagcgggtgccccgcgctcggctggaaaaagccaatgtcaccgggctgtgctatttgcttgtgggagggacgcctggggtgggggcgtgccgctggttgctccgccgcagacaccacgtggtgctttttgaactgatc

SEQ ID NO: 239950 - DNA, 314 bp, Homo sapiens
  chr19:2740072-2740386
  hyper
ccattggcctccccgagacccgctggcagaactttccatactattggctgcgaaacctgccactcatatgcgactccacctctcctaccggcacaggaaaggggtttcctcccgctgagcggcgggcgcagccaccaagcggccccggcgggaaacccggattggcgaggaacggttccggcagggttgggtttccagagctgtccaggggcgcctggtgctgaatcccgcttggaaagaggcttggaggtggatgggaagggatttccaacggaggcggctcctctctcagcgtcctcgctgctgatcccctt

SEQ ID NO: 239951 - DNA, 36 bp, Homo sapiens
  chr19:2776100-2776136
  hyper
accacaaaagctgacgtcatccgccccggccaacag

SEQ ID NO: 239952 - DNA, 292 bp, Homo sapiens
  chr19:2783367-2783659
  hyper
tgatggaggcgggcgtggaaggaagtgacgcaacgtagaggcgggaaccagctggttgttagggcaactgacctctgcgacctaatggaggccggaaatcgggtctggtttgccctctagagcgggaatgaagcggtgcacggtggaacagtggctgactccagccggtcgccgagctgaccacgtggtgctgggccggccacgtggtgcagccgcgtttggacacctggactccagagcgtcacagctgcgcaatgaatgggagtcagtgttacccgcttactatctttgt

SEQ ID NO: 239953 - DNA, 196 bp, Homo sapiens
  chr19:2819627-2819823
  hyper
agccgccgggaaacgacggagctgggatttgaggattggctccgcgaaccccacaacacccggggactccagcgaaccacacggggtggatccaacagccgcaggggcatcgtggtcctgcggagacgccgcccgcccggaggcggcgctgtgacccaggttggagagtcaggagcccagcgccgcgctgcggggc

SEQ ID NO: 239954 - DNA, 131 bp, Homo sapiens
  chr19:2900632-2900763
  hyper
agcgttggctacgcgccggtcactcgggcgacaggaggcggggcggcgcggaagttatcttccaatcaggtgctccgggggcgggtccggaaaactgtccaatcaaggcacggggcggacaccgggaagcg

SEQ ID NO: 239955 - DNA, 138 bp, Homo sapiens
  chr19:2944614-2944752
  hyper
ccagaaactacccctcgagcccctgaccgcttttgctgtcaccccagactgcccccagccctacccctcggccgctgtgaccacgtccccggggcccaggcgctcgtcgtgcgccgccccgcgcgtccctcagctttc

SEQ ID NO: 239956 - DNA, 397 bp, Homo sapiens
  chr19:2945052-2945449
  hyper
gagaattctccagtccgtccccctagcgcccttgattgggcagggctccgcttcggattaacgtctctgattggacagttccctaggccccgcccctgcctgtcctgattggataattctctcctcagtgacgggctcgtcgagaacacgcgtggctgaccctctagccgggcagccgcggatctgggagaactcactccagtccagggagggcgcggcgtcctcctccctgactgcacggcaactccagactcagtttcccctcggagcggcccctcgtgcggggaggagaggaagggcacggagtcccatggggcggagtcctgcgtgggggcgggacccgcgtgcgtgacgtcaccgtgctgtcccgcgtgggcgcggacgcctggggtccaga

SEQ ID NO: 239957 - DNA, 71 bp, Homo sapiens
  chr19:2950979-2951050
  hyper
acaataaacgctaaaataagtaataaatgctcatttcctccagccaacacattcctcgtgataacatactc

SEQ ID NO: 239958 - DNA, 211 bp, Homo sapiens
  chr19:3036207-3036418
  hyper
cagtttccccgagcgtggaagctggaggagagcacgggttttcagaaaaagactacgattcccagaagctcccgcgcggctcccgcccaggctgtcaatcaaagtaacgtgggtacctctccggcccgcgctctcccgcccgtcgcctccctcccgccagctcccgctccctccctgccggctcccggcccggcgcggtataattacagcc

SEQ ID NO: 239959 - DNA, 121 bp, Homo sapiens; identical to SEQ ID NO: 205111
  chr19:3061487-3061608
  hyper

SEQ ID NO: 239960 - DNA, 103 bp, Homo sapiens
  chr19:3094920-3095023
  hyper
ccctgcctgtgccttccctgcctgtccgggtcgcgggaccctcgagtgtcagccctgcctgtgccttcactgcctgtccgggtcggggcggggccctccggga

SEQ ID NO: 239961 - DNA, 217 bp, Homo sapiens
  chr19:3098866-3099083
  hyper
cgggcctgctctcacgtcctttgtgtttacatgtaatcagttatgatgattgtggctgaaagggtctgcttttcccgggcatggtccgggaagctccgttccacagctgtgagctccgtggagcttcctcccgagcctcctgcccggctctgccggtgctgtagtgagagtggaggaagtgctttcctccgagatttaaccacgagaggtttcactt

SEQ ID NO: 239962 - DNA, 185 bp, Homo sapiens
  chr19:3275828-3276013
  hyper
ctgaggtgggtgtcgccgcccacaggggaccggaagctgttcgtggggatgctgaacaagcagcagtcggaggaggacgtgctgcggctgttccagcccttcggggtcattgacgagtgcaccgtgctccgggggcctgacggcagcagcaaaggtgactggcgggggccggggcgggactgcga

SEQ ID NO: 239963 - DNA, 226 bp, Homo sapiens
  chr19:3285956-3286182
  hyper
gccatcacgcccatcgcgcacagcgtcccccagccgccgcccctcctgcagcagcagcagcgagaaggtgaggcggccgcaacctcccctgggcgccagccccgccctctgcccgccctgtccacctgcaggctccgtgtctggcccgggcctctgggacccgcggggctgagagtgcggcctgggggctggacaggccagagttgagtcccggtgcagccgctga

SEQ ID NO: 239964 - DNA, 355 bp, Homo sapiens
  chr19:3360718-3361073
  hyper
ctgggcgactgtgcgcgcgtccctgcgggacggtgttgtgaaactatggctgggctgcgtgtccgcggagccgcgtgtccctgggtgaccgtggggtgtccccgtgtgggtgtgtggcggttggggggggtcgccagggagtggagaactgtcgagtggccgcgttccaggggacagttgggtgccgcttgctgtgtgcgagtgactggcgctgagcctccccctagggaagggtctgccttccactcccggcctcgcctcccccagttccttttttcctgtaactggggactgcctgggcggcggaggaagagcgctccctccaccttttcaaaactctgtccctttatctttc

SEQ ID NO: 239965 - DNA, 38 bp, Homo sapiens
  chr19:3361373-3361411
  hyper
cgtaggggcaccgggactggtcccgcagtcccgcctcc

SEQ ID NO: 239966 - DNA, 38 bp, Homo sapiens
  chr19:3500930-3500968
  hyper
ggctggctagcaacggagcatgcgcagtgtttctaggc

SEQ ID NO: 239967 - DNA, 148 bp, Homo sapiens; identical to SEQ ID NO: 205115
  chr19:3506425-3506573
  hyper

SEQ ID NO: 239968 - DNA, 33 bp, Homo sapiens
  chr19:3572855-3572888
  hyper
cacccaatgggaccgttcgccgaggccttcatt

SEQ ID NO: 239969 - DNA, 326 bp, Homo sapiens
  chr19:3573529-3573855
  hyper
gtcccaccttccccggatactgaccccatcagaccctgcctcctcgggctcatgcactctcgctgcagccccgccgtcgggggtcaaaacgccctggggtgggcttttgggggaggggagattcttgggacggggctgaccgcggtatccttggctccaggccggcgggcggcaaggctccgggccagcatgggggcttcgtggtgactgtcaagcaagagcgcggcgagggtccacgcgcgggcgagaaggggtcccacgaggaggaggtgagagtccctgcgctgagctgggggaggccccgggctcccgccccagcctcgaag

SEQ ID NO: 239970 - DNA, 72 bp, Homo sapiens
  chr19:3700599-3700671
  hyper
tcgagtgccccctcgcgcccaggggtgggagtacagagccaggctcgccattccatcgtattaggtcagtaa

SEQ ID NO: 239971 - DNA, 76 bp, Homo sapiens; identical to SEQ ID NO: 205116
  chr19:3721511-3721587
  hyper

SEQ ID NO: 239972 - DNA, 228 bp, Homo sapiens
  chr19:3761495-3761723
  hyper
ccgactcagactgcgctctgcacctcgaggacactcacttcccaaatcgaggccgcctcagccccgcgcagcctccaggaccccgctccccacggacggccccgacgtagcccgggccgcgtccccagaaggcgcagctcggggattcccggtcccggcgcccgctcctctatccgcgcagagccctggcccattgagcatgcgcggcctcgcgaggcctgctgggaa

SEQ ID NO: 239973 - DNA, 188 bp, Homo sapiens
  chr19:3762567-3762755
  hyper
aagcttgggagaccgcatttcccagacacctccacggggcctacacttccacggggcctacaactcccaaacacccttgggccactgacgtcttccggaaacgtgcacttgcaagctgcccgcaatacgtcatggcgaccaaacgccttttcggggctacccggacgtgggccggctggggggcctgg

SEQ ID NO: 239974 - DNA, 507 bp, Homo sapiens
  chr19:3801382-3801889
  hyper
ggcatcttagcggccgcctctcgctcctgtccgtgaccttgcagatgcaggtgacagcctgcccttccgtttttgtctttccagtcccgcctgccggattgggttccagccctgcccacacgcccggtacatcccgcctacactcaccgatgtcgcctagcaacccggctcgcagctagcatccgcaaccgaggtccccgcgctccagttctctggcggggagggagaggggtgttgcttctccagccccctgcagcctggtgtcttcctgccacccgccggcctgctccgggaaccgcggcctggtgggacgagggttgcggaggacgggtcaggagcgaccgcgtttcaggcccgtggactccgcagcccagacggtccatccatctgcaccgaatcccttcgctaaccaactgcttgattttgctgtcgcgccgcctaaacttggttttttggagttgctaggagggccgacttaactctttgtcagccgggctggttttcacc

SEQ ID NO: 239975 - DNA, 368 bp, Homo sapiens
  chr19:3868744-3869112
  hyper
ctcagccggagccccggagcccgcatcccgcccggtgcctaacctgaggccgccccgcctgcttctcccggcgccgcggcttccctcaggccggggttccaggttggggctgggactggggccgggccgggcgcacgcggcgggagaaggggtaggcggggtcccggccaggctgcaggggccgggactggcgggggctggcgcggcggggcagttacctgtactgcgggccgccgccctgcgcgaagtcgaaatactgactcgtcgccatcttggcgtcttccccgagcctggcggacccgcgacgtcacccgccccgcccccgagccgcgtgccgctcgcgcctggccacgcgccccaagctccgc

SEQ ID NO: 239976 - DNA, 164 bp, Homo sapiens
  chr19:3880521-3880685
  hyper
cctctgcccctggcgtggctttcggagatgcttgtctgtcagccaatggggaggatcggattctggcagggggctgtgcttttccgtcaggccgccaccccccaccccctcctccctgcacacaaaagcagcataaattaaccgtcttcgggaagccgagcctc

SEQ ID NO: 239977 - DNA, 207 bp, Homo sapiens
  chr19:3933460-3933667
  hyper
agctatttccattcggcggcgggaacaggtgccggcgcctccgccccatccccaggggccgcctcccccggggcggcctccaggctgccgagacctataaaggcgccaggttttctcaatgaagccgggacgcactccggagcgcactgcgtggtcgcaccctacccgggctgccttggaagtcgtccccgccgcccctccgcaccg

SEQ ID NO: 239978 - DNA, 178 bp, Homo sapiens; identical to SEQ ID NO: 205118
  chr19:3970722-3970900
  hyper

SEQ ID NO: 239979 - DNA, 262 bp, Homo sapiens
  chr19:3971170-3971432
  hyper
tggccggtgcgcccgccgctcgtgccgcacctcgacgtcccgcccccagctgccttttcggcacccacacccggatgcagcctcaccactggctgaacactcgccatccctgatttcattggctgcagtcgacgctggtcaagcggacggaaaaaaggccgacttccggtcccttcatcgccccgcccgcctctcctctgacccaggtgctgaagctgcgagaagtgaggctgaagccctgcatcccgcttcctgccttcct

SEQ ID NO: 239980 - DNA, 46 bp, Homo sapiens
  chr19:4064373-4064419
  hyper
cagaggccccggccccgccgataggtgctctcggggccccatggcg

SEQ ID NO: 239981 - DNA, 87 bp, Homo sapiens
  chr19:4066804-4066891
  hyper
cgcgcggcggcggcggcgtcactgcccctacagtaactgtacagtacagccaaagccccgtatgatgctcgcgactcccttcctggt

SEQ ID NO: 239982 - DNA, 225 bp, Homo sapiens
  chr19:4182592-4182817
  hyper
aagcggggcggggcggggaagaaggaggaaccgcgttccagtcctgcgcacccggcctcccacggcaaggcgcatgcgcctcttgctgacgccgcaggcgacatgttatctgctgtcagaaggaagcctgcctctttgcatgcaggtgtttgcggggcttgggaaggggctccccgatgacccgggcgggaaattggggcggccgcctacgtgagagttctccag

SEQ ID NO: 239983 - DNA, 307 bp, Homo sapiens
  chr19:4246831-4247138
  hyper
tacaaaattttaacgagccgctgcccgcttctagggggcgcagcgcactatacaaaattctccaattccacatggctcccggaatccttatttcgcgctactcaggttgcaactccggagggaagacgctgggacttccagcttgataggcggggattggaaccaatgaaagaggtctgctgtgtatgctgcagccaataatagcggccgaaggaagtgacgtttgcggaagtaaggcttccgtcggaaaagctcgataattacccagcctaaccatttctcaggtgcttgcgaggtgatcagaagg

SEQ ID NO: 239984 - DNA, 124 bp, Homo sapiens
  chr19:4278961-4279085
  hyper
cccgggcaatttccccctcccctccttctccctctcccctcccctccccagcagtgtcactcccagctgctccccacctcccgcgctccgcgctcgctgcggccagtctcgggcgtcccggtca

SEQ ID NO: 239985 - DNA, 145 bp, Homo sapiens
  chr19:4279880-4280025
  hyper
ttcaccttttccttccctctatccatccagagccccgccaaagggcgcacctgatctttctcatccttccctgctcttcccttcctctccacctcctcctcctccttggggaaaggggcccggagaagggcatgtgggggcccct

SEQ ID NO: 239986 - DNA, 149 bp, Homo sapiens
  chr19:4402295-4402444
  hyper
aagttgtcatctgcgccttgcgtaaaatgttctggtgacgtaagagcctgggcctccctcctcttagggactatcccacgcgatcagccagtcgcagcgcagagcaatgagcttgacacctccttcctccaatcgcagggcagctcctc

SEQ ID NO: 239987 - DNA, 185 bp, Homo sapiens; identical to SEQ ID NO: 205128
  chr19:4471582-4471767
  hyper

SEQ ID NO: 239988 - DNA, 150 bp, Homo sapiens; identical to SEQ ID NO: 205129
  chr19:4472045-4472195
  hyper

SEQ ID NO: 239989 - DNA, 95 bp, Homo sapiens
  chr19:4558485-4558580
  hyper
caggaggaggtgacgcctgcgggcaaggggcggcgaggtgagcggcctgcagtcccgctcgtggccacaagacggcgggcgagagcagcagacgc

SEQ ID NO: 239990 - DNA, 229 bp, Homo sapiens
  chr19:4580881-4581110
  hyper
ccccccaacgccacccccaacccccgaccaacaggccccctgcctgccccgaaccccccacctgggccccaatccagctccccagcggcgcagccgcgagcctcattattgtgtcttctccgggcccccccaggacaaaatctccacccgctgcggtgccgacagaacccccaacctagctgcacatacaggcccccagtcaacaatccaagcgccccccccacgttgc

SEQ ID NO: 239991 - DNA, 166 bp, Homo sapiens
  chr19:4636194-4636360
  hyper
catggcactgggccggggcagaggcccggagaagagggtcgctagctgcaggttgcacagcccggcagggtgcgaggcctggcctgggggtgcgggtgactctggtgggtctaggctccgcggggagacttgggcctggagaccccgccccgcacgcagatcccgc

SEQ ID NO: 239992 - DNA, 177 bp, Homo sapiens; identical to SEQ ID NO: 205130
  chr19:4639830-4640007
  hyper

SEQ ID NO: 239993 - DNA, 179 bp, Homo sapiens
  chr19:4669764-4669943
  hyper
cttcctccctcttcggagctgcagcgactgatttccttcaggcccaggagggcagatgccctttagcctcctgccgctcccatcactgacccctccccacctctgcgtctggagggcaggggtgcctggacactccaggcaggcgacaggtgacaggtgatcacgccccctcaacgccg

SEQ ID NO: 239994 - DNA, 188 bp, Homo sapiens
  chr19:4769517-4769705
  hyper
gaatcggaggaaccgagaacgaagaggggtgggggaacggggaaagagagaggaaaatcaagttttcttcagcacgagggacagctctccaccgaccgaaggaggagaatgctatttatttcagcaccaaatatccggacagcgcctctcgggaggtccgagaagagaaccgcgatctgtttcagcac

SEQ ID NO: 239995 - DNA, 176 bp, Homo sapiens
  chr19:4791538-4791714
  hyper
ttccgatgccatgcgctgcgactggaacgccaattcccaccatgccgcgcgctcacagctctcaggggctgtcctgtggcctttggggaagtgtagtcttgagcccccaagattccttttctgttctatggagtgggcccgcgcaaaggactccatttcccggcgtgctgccatcc

SEQ ID NO: 239996 - DNA, 199 bp, Homo sapiens
  chr19:4815708-4815907
  hyper
actcgggaggcacacggccgttcagaaaggactacatttcccagggttccttgcggcaggagcagggccatgtgattatattctggccaatgggatgagggcaaaggccggtctatgccctccaagaagaggcgtgcacttcccgcttcctgttcccttttgcgggagcgggagccacgtgttttataacaaatagcca

SEQ ID NO: 239997 - DNA, 83 bp, Homo sapiens
  chr19:4831871-4831954
  hyper
ttcccaacccttgcggtcacgttcagcaagtgtgagcacctactgtctgcagggggccagaagaactcgcatctgctctcggg

SEQ ID NO: 239998 - DNA, 623 bp, Homo sapiens
  chr19:4867023-4867646
  hyper
cccaaagcagttaacggataggccttcctacttttaagccacctcgtcgccacgcccacccgagggaagtgggcaggctttgcccaagacctccccagaatcagttgggggcgccaggagctggggcaacccccacccccacccgtggcaaaaccatctgtaggggagggggctttgcggtggcggggggtgtctctgaaaaccccagaagggagggcggagattctgcccgcaggaggaaacttgcctgcaaatggcgtttccaaaagcaaactgttcaaaatttagagaaaacctggtgggcggggggcggtatttagcccacccccttcaatatcaccccttctacggggctctttcgcccctcaaaagtcccaggaagtgagaagagggtttcaaagtctgagcttcgttgcagaagttggatttttctggggggaggggtgaccagcctgggctgaagacccctccccaggccgcagagtccagcaaatcccaccccgagaaaggccctccccgacccctccggcccctggggtgccccaggactccatggacaccgccccccagctcaactgagacgcccccgccactcaccgcggtcaaccggacgtcccaggaac

SEQ ID NO: 239999 - DNA, 132 bp, Homo sapiens
  chr19:4867954-4868086
  hyper
tgggaggtgagtgcgatcgggggcgccgcacaggtgctgggattccccaggtcgcccatttcccctatggccaaactgaggctgcgagaaccctgggagagttgcagggtgaccctcgccagcgcgtcaggg

SEQ ID NO: 240000 - DNA, 1678 bp, Homo sapiens
  chr19:5292640-5294318
  hyper
aggcccgagaggagcggaaacaaatggatggaggtaaacttcctgcgattttcgggggtggctaagagcagggattcctgccatgcaccccccaccgctacctgccccctctgcggtcctgttgcctcctccgccttctgcgaagtccccagtcacagctcccccgggctggcagcgaaggctgccccgcgcctggctccgcccccgggaggtgggggaggagagggggtggggggaggaggtcgggctgggggccaggcgggggaggggaccctgcggagcataacggtctggagttttccaaagtgcaagcgacgggcctgaatgggggggcgccaggcagcagcaggcccaagctggccctggagggcggccggcacggtcaggcccgcgctgggctgtggggacccccgtggtccccagcctcggagcctggagggggcgcgacaagagagacaaagcccggggcggcccgggcctcggggtggaagggggtcccgggcgcactcaccccgcggctcggagatcgggcccaggccccgcgaggcctccacagggcccgccgcagccgctccccgcgtccctcggtccgcccggagcgcggcgcgcagcgaagactcgggagaggcctcggcctggggagctcggcctgggggcggggcaaggggcggggctgtagggggcggggttgcagtgggcggggctgcaggggacgggccccgaggagggggattggggggcagggcggggccccggccggaagtggggcggggggaccagaggggagccccatctggaggcgcggagagcctccgcaggagtccatgaaacactgagcgaaggggcgccccagggagggcacgacccaagacccctccctcccgaagacgtctcacggggagcctctacactgctcctcgcttccccagctctgatcgtagccatggcaacgcatgaggaggctggatgccggacagggcggcggagggctccccaaacacacccaactacaggaggtcggagaaggggcagagttcccctcccagtctgggtgggaccggaggcacggtgatgggggcggggggcgtcccctcttccccctcttagaccagagggtaggggagaggtgcgggcgcagaggcttccctcccgctgggggtccaggggaatgaatggggggacaccgtggcagaggcccccaccctcgccacaagcctgaggagggggcggagagcacagggccagattggaaacagatggggccgccgtgccaggcccgcgacaccggagcagagggagaggaggagggagagggaggggcagacctgtccgggcggccaatccgagccagcgttgcgcccggggtgcgggtttgaaaactccaccggaggggcccggaatgtagaagcccagcgggacctgggggtctggggacgggacaggggcagaggccgggatggagacccaagggctcccgcgtctgctcccatccctggaaaaaacgcctctcttcccagcattcgcgctgaggacgaagcccgaacgccaacgccaacgggatgtcctgggcgctcagctgccatcagctgtgcttcctcaggccaccggccacggctctaggaggcagaccccaccatcacccccattctgcaaagaacggagccgagaaagagagaga

SEQ ID NO: 240001 - DNA, 38 bp, Homo sapiens
  chr19:5313531-5313569
  hyper
tgggcaggcctggccggggccgacggctggcactgagc

SEQ ID NO: 240002 - DNA, 462 bp, Homo sapiens
  chr19:5338674-5339136
  hyper
acagaaggcaggcgcgattggcagggggaggggggcacaaaggaagggaccctgggagggggaggggacttatgcaaatggcagattcgaccaagtccctgggccattaataaacgctccagcagctgccgctggtatcgcaggagcagaggagcgggatggcttccttctcccgggcgaaaggcggcagaaagagggaagaagggcgccccagacaaagaggcgccgtcaccctctgcaccccaaggacagcagcgatagggggccacccagaggaggccagaatcccagcagccaaagtccgggtggtggcggacgggagcccggagcgtgtgggtccctgtccttgggaccctaggggtctcttcctgcctcctccggcttctaggtatcatccctgctgctcagccgggactccgacacctcggacacccgcttcactagccgcggctgccgggatgt

SEQ ID NO: 240003 - DNA, 33 bp, Homo sapiens
  chr19:5339653-5339686
  hyper
aaccctcgcacccacggcgcgggcactctaacc

SEQ ID NO: 240004 - DNA, 1185 bp, Homo sapiens
  chr19:5339889-5341074
  hyper
gtgctgggcgtgcgcgtctgcctgccagagcccctggggctgggggctgaggctcgcccctgggtggggaggctggaagggggcgccgaggccgcagaagggtggggcaatgcccgagtgccggaggggcgacctcccataaggcaacgacagggcccggagtgttccaggggagacggcgtagactagggggtctccaggggagggagacccggagagggaaggcggcgggcgcagcagccctggagccaccccgcctggagccacccgtcccggctcctctccgctccggggcgcccgcatgccccccatcccccggcacagcgccccctgcctccaggacccgcccggggacccgggccgggcgccgccggggccggcaccggctccgcacacacgcgcgcccccctccgcgcctctgccccgcccgcagcccggggtggtgcagccggcggcgctgggcagcttccaatgccgcgctctgggcgcttccagcccagccccctcccacgccgcggacgaagcccccccagcaccccctgccgagcgcccccagcgcggccccggccctgtccctcggggcattgtccgggcgcagctaccggggcgcagcggctgggcgtgcaactggctgcagccgagcatcctccgagcacaatggccgtgcaggcttccccggcacaaagccggcgcgctgcccactcggctgcctccgagaccccccttggagcgcctgcatttttttttcctctaatccatgattttatttttttttttggctttacctggaggctggctgggctgggctcccccggctctgccccgcttcacatcgtggctgttgcatgggatccgagcggagcccgagcgccagcggctcgcggcgtgcgcgcgccggccgggctgccgggcgggcggcgcgaggacactcactgcggctcgcgctcccctagctcccgctcgcgcgcccccccagccggtgacgtcatcccttccgccagcgccgccgccgccgccgccgggtcgggggcagggccggcccgtgcgcgtcactgcgcagccgcgcggccgccacgccccccggccaatgggacggcgcagcgcggtcacgtggctccggggtgtttaaagggccgcgggagcacgtggggcgcggggcttcgcgggacacgtgggcggctgggg

SEQ ID NO: 240005 - DNA, 124 bp, Homo sapiens
  chr19:5436796-5436920
  hyper
gccaatggccgcgccgcttgatgaggtaatgcgccccctctgcgtccccattggccagcctggagcccattcccttgtcccctgcaagcagtggagacccagcggggcgcgggcggggtgttcc

SEQ ID NO: 240006 - DNA, 373 bp, Homo sapiens
  chr19:5536537-5536910
  hyper
ctgctgcgcccgggcgcaaggaggaaggagagccgggagggcgtacctggcagccaaaagcccagccgctaatgagcccggtgcggcgcgagctatttttagcagctgctcctcgggacgcctaatcgctccggccggctcccgccaggctgccatggaaacgctcgcgccaccgccaggagctccctcccggtcccggccggcgctgcccgcccctcagcccggggccaggatgatgcgtgctgccccccgccaggaaggagccctgcctgccttcccagcactgtcactgcacggctgtgcgatcccgggacatctctgcccctctctgggccttagagggcaagagaggtaaaggcgcgcactggaggct

SEQ ID NO: 240007 - DNA, 549 bp, Homo sapiens
  chr19:5567584-5568133
  hyper
gaggccgccttgggcgcccgcctcccccgccgctctccaggggtccccggccgccgcccccgccccaccccaccccgagccccgcggccacctggggtcgctgacgagcagcagcaccgagccgtcctgcaggcgcgcgtcgcgcaccgtctggtggtcgtccagccgccgcgcgttgtagtagaaggcgcgcttccaggagctcacgccctggcccaccagctgggcgcgcaggtcgctgagcgtgtcccgcggccgcacggtcagcggtagcagcagcgcctcgtccgccaggtgcaccttgatgtggtagcgcttccagcgcgacagcccccgccgcagcccctccatggcgcccgcccggctccggctccagctctggccccgggccccgagcgccccgcgcacccgcccgactagcctggccgcccgcccccgccgcgcccgcgctccgcccgcccggacacgcccggcacgcagtgggcaggcccggcccggcggggcggggcgggtgccacggtcccctcaggcgtccgctccccactgctg

SEQ ID NO: 240008 - DNA, 444 bp, Homo sapiens
  chr19:5680742-5681186
  hyper
gtttgcacctggccgcggagcctcctgggaaatgtagttcggcccggccctggcaccgtgaggggaaagaggcgtcaggtgcctggctgaagcctgaaggtgacccgaaaacaagtcagagcccgagagatccacccgcgcccgcgcgggggaccaagggcccggatttaagaagagtgtgcctacaaggcggttgtcacggcaacgagagggcgggattgttcgagcgctgcggccccctcacgtgatcgattcggaggcggggcgtccgcccagtgggcggggccgggcccctgctgggaggcgaagaccaggcgggcactgttgcccggcgacgctccggcgctgggtccccgaggcccggcccctccccgggaggaggtgggcttcgagtcacgtgacccgtgccctacgggagggggtgcggtcggggacccggcagga

SEQ ID NO: 240009 - DNA, 424 bp, Homo sapiens
  chr19:5686659-5687083
  hyper
actgggggcgtgggcggggtggagtctcattgcgtctgggggaagagctctgaacggggcctcgttgaatgggaaccaaaccttgctagatccagggtgtaaggccaaggctgggtgtctttgatcgtagtgggagttacctggggcggagctcgctggaccagcgctctgggtggagctaagctcgggggcggggtttgatcgtttccttggggaggggcctccggggctgaccggcgtttctgggccaggcgggctggactacctcgtgctgaaccacatcggcggcgccccggccggcacgcgagcccgcagcccccaggcaactcgctggctcatgcaggtgctccgctcctccgcggccccggcccgcccctctatctcagggaccggtggtccgttcccttcgcggtccgggttctgc

SEQ ID NO: 240010 - DNA, 103 bp, Homo sapiens; identical to SEQ ID NO: 205136
  chr19:5691108-5691211
  hyper

SEQ ID NO: 240011 - DNA, 639 bp, Homo sapiens
  chr19:5827786-5828425
  hyper
atgcgatggagctgcgcgagctgacgccctgggctgggcggcccccaggtccgcgccgtcgggcggggccccggcggcggcgcgcgcgtgcgcggttgggggcgcggccttgcgggctgcgcgagctggaggtgcgcgtgagcgagctgggcctgggctacgcgtccgacgagacggtgctgttccgctactgcgcaggcgcctgcgaggctgccgcgcgcgtctacgacctcgggctgcgacgactgcgccagcggcggcgcctgcggcgggagcgggtgcgcgcgcagccctgctgccgcccgacggcctacgaggacgaggtgtccttcctggacgcgcacagccgctaccacacggtgcacgagctgtcggcgcgcgagtgcgcctgcgtgtgaccctacctcactcggccggcgcggcggccactccccccgcctcgacggcaccactggccggccccgcgaaagactgcgcgtgcgtagagcacgccggcgcggccccgggactctcgcgataactgtactgagataaagtgtggcaactcgagctggctggtgattcatcctcggcgaggggctcgcgtgtgggccacgtcgccgtctccaccgggaaagcggggaccagtggggggggccc

SEQ ID NO: 240012 - DNA, 154 bp, Homo sapiens
  chr19:5892118-5892272
  hyper
aggcgaggtgggggcgcctggcaggcctgcgccaaccctggcggctagcccggaatgggctgggtgggcggcgagcacagctcctggtctgagccgtcggctcccttgaacacagggaggcacctggggctgggaggtgcgaaggggcgtgcgg

SEQ ID NO: 240013 - DNA, 579 bp, Homo sapiens
  chr19:5961935-5962514
  hyper
cactaccaagagcgcgtggttccccttgttttccatggccagtgcttactcctgcacagacaccatctccttcaggaagctcccactgtgagaggcgtgcctgccctgctgcactccctcccgagcaggccttatatcctgccacggggcacgcggagaccacggccacagcagctgaaacagcctatcacccagcgtacaccgcatcaacaccctgcaatgagtgtttgaactaggccctctctctgtcattcatctacacaacaccagctgctacgtactcacaaatatttactaagccctcattctgtgcagggcgccacaggaagagtggagaacaggaagctgagggcagacgcttcaggagaaaacatctgactgaaagggaggggcgtgtttgcacttggtgaccaggcactgtggagccctggcactcccagaggggtgtgtggtgacagcatctacccctagatgtaagttctagaaagtggggcctcgtctgttccgtttctctctgtattctcagtgccaaacacagagcctcacacttaacaggcactcaaccggcagttagagggt

SEQ ID NO: 240014 - DNA, 399 bp, Homo sapiens
  chr19:6108898-6109297
  hyper
tccaactttcccagcggtgcagcgaggaaaaccaaaaggaacggagccggaggctggtggcgagggagcgcggaggcttctcggagggaggaaaaagaaagaaatgagcatttggggtgtgagtgagtgtgtgtgtgtgagtgtgtgtgtgcgcccgcgagcgcgctggtgggcggtgggggcagggggtggagtttaaatccacaaacacacacacgcactcgcactacctcggagaaaatgcctggagcagtttaggttctttaacaaaataaataaattgaaaaaaaaaaaaagtttcactcgcgttggtgaaacttttctcccttccagatcagtcctaagaggagagctgcggacgtgcggaggggcatcttgggggcacgtggaaagactggc

SEQ ID NO: 240015 - DNA, 131 bp, Homo sapiens
  chr19:6279430-6279561
  hyper
gaggtccctaagccgggctggggtccccaggggcgtcccaggtggatgcaggtcggactggcgttccgaggggtctcccgggggtctccgagccaggctggggggtcaccaggggcgtcccaaggggctcc

SEQ ID NO: 240016 - DNA, 223 bp, Homo sapiens
  chr19:6459946-6460169
  hyper
ccttctgggaagacgggctagggagctcagtggtctcaggtctggtttcagagttccgcctctgcgtgcctcagtttaccctttccccctttgcccaagggggcaaggtagagcgctgtcggggattgggtttcataatccccttccacttgacctccccgccacacccactaatcttcaggaactcaagttctcgcttttcccagacgcacgcaagaaccgt

SEQ ID NO: 240017 - DNA, 200 bp, Homo sapiens
  chr19:6464135-6464335
  hyper
aggtgcgcccacagcgcggccccgcccccttcttgactccgccctctcagcgaggctcaggtgcacaagccggaagtgcgctctcccaggtgagtgactaaactttccgggtcacgtgacagggcggagccggtggggtcggacccacagaacgaccgacggaccgagggttcgagggagggacacggaccaggaacctg

SEQ ID NO: 240018 - DNA, 75 bp, Homo sapiens; identical to SEQ ID NO: 205143
  chr19:6464628-6464703
  hyper

SEQ ID NO: 240019 - DNA, 675 bp, Homo sapiens
  chr19:6530738-6531413
  hyper
caagagacccacagagataccgggaaagagcggcagagagggagaaccagggcgatggagagacagcagggagaaaggaacctggagccgagcttggaaggccggaaacggaaaggagagcgaaaagcggagagagatccgagtggagaaaattccgcagagtcacggggacgaggggaaaggctctgggctgggaaggggcgtggccgcgggcggaggggcgtggccgcgggcggaggggcgtggcctccttttgtagccaagcagctataaaaagcggcgcgctgtgtcttcccgcagtctctcgtcatggaatacgcctctgacgcttcactggaccccgaagccccgtggcctcccgcgccccgcgctcgcgcctgccgcgtactgccttgggccctggtcgcggggctgctgctgctgctgctgctcgctgccgcctgcgccgtcttcctcgcctgcccctgggccgtgtccggggctcgcgcctcgcccggctccgcggccagcccgagactccgcgagggtcccgagctttcgcccgacgatcccgccggcctcttggacctgcggcaggtgagacgtgccccgaccctcggtagctggtctcgcgggagacccctaccgcccctctgggactcccttctccctcccgcacccccagggacacctgtt

SEQ ID NO: 240020 - DNA, 91 bp, Homo sapiens
  chr19:6590245-6590336
  hyper
ccacctctcatcccacggcgcgcactggtgattttatttcattttatttttttttactcttaagacttcttaaagaggaagcaggtctgaa

SEQ ID NO: 240021 - DNA, 86 bp, Homo sapiens
  chr19:6590516-6590602
  hyper
gtcctaggaggccccaggaagcccccacgcccagccttgtgaagcccccagcagcctctgagtcagcctgccgggggaacaccaga

SEQ ID NO: 240022 - DNA, 237 bp, Homo sapiens
  chr19:6737655-6737892
  hyper
gcacggcggggcccggcctttcggagtttccagtccgccaaccaatcagcaattgcctctccgcaagcccgcctgcttgcgtcaccgacggacagcaccggttccgaatgggagagccgataacgcttaacccccagctcactctcaccaatcgctataaagattgtccggatgtgatttaatgagcagtttatctaaccaattgtcatggatctgatatccggcccttaaagcgga

SEQ ID NO: 240023 - DNA, 213 bp, Homo sapiens
  chr19:6739799-6740012
  hyper
agtccaatcggcccgcctctaagttcccctttgctggggtccaggcaccccccttttgtccccaatgtatcttagagggggctccgcgcctttcccttccaccgacccctgggtccccgccctccaccctccgctctctctcgaagtttatctgggagtctcagcacgctcaggggcgaagggcgactttgccggaccggagtggggaaactg

SEQ ID NO: 240024 - DNA, 178 bp, Homo sapiens; identical to SEQ ID NO: 205146
  chr19:6767996-6768174
  hyper

SEQ ID NO: 240025 - DNA, 223 bp, Homo sapiens
  chr19:6862817-6863040
  hyper
gatatagacttcaaacgccgtcagacagacacccactagatcaaacagggacattcctaaacatcacacagacacatcgccaggcagtcccaccgcagacagccacaaattaaagccgcgcttgccccctgatggacagcagcagtagtgcgccacctcgatagcgcaatctcccagagcgctggcattgcaggcgtgagccaacgtccgcagccaaacacgt

SEQ ID NO: 240026 - DNA, 253 bp, Homo sapiens
  chr19:7069469-7069722
  hyper
cctgccacagacccgcgccaggacgaccctgcctccgcggctgtccctagccagggcccaacctggttctattaataactaagcaaactagaacacctcagccggaggctggggtgcgcggctgctgcacctgcagcctgaacccgggggtcctgacacgccgcattttgggctgggaccagctggagccggaagcggaggtgcagtgtggctagccggagaccggaagcggaagcgcgcttgtgtcttgtga

SEQ ID NO: 240027 - DNA, 159 bp, Homo sapiens; identical to SEQ ID NO: 205147
  chr19:7098896-7099055
  hyper

SEQ ID NO: 240028 - DNA, 278 bp, Homo sapiens
  chr19:7197225-7197503
  hyper
tgcgcagctctttggagacatacggcgcatatagaggctagaaagggaacagagtaccagagggccttcccgcttcgggagccgcaggcttcttctcttcggagagagagtgagtgagtgagtaagcgagtgagtgagtgagtggggagggagtgagtccgtccacgggggcgggccctctccatgctgcggatctcttaggagatatactgcgcacgcagaggcccggaaggaggcggggtcccaggggtctcctcgctagagcagccccaggattg

SEQ ID NO: 240029 - DNA, 599 bp, Homo sapiens
  chr19:7294522-7295121
  hyper
gcctccccgcctccctgtgccgggccccgcgcgggaggccctgggcgcgccgggaccgagggcgcgccccagatccgcgcgccctacagccccgagtctcctccagtttcagacccccggaggcgccccacaggcccgacgcagcggcacagatcctttctctaccattttgctattttgttcatagtgggctttggaggattcctgttgattttttaaaaaatactgcattaaaatgtttattttggtgactcgaggtggttttggtttctttctttttttttttttttcactcccttaaattttgcaccccaggcgagtagtgtctcactcgcctttcctcagtccgggcctggccagcgacactcgtcccagagcgcgtgggcgcccccagatgtcccgcccgcgagtgcgccccggcccaggggcgagacccaagccaggcccctggggacagccacgtgcccgcgtgcccagtgcgctccctgtgttcaagttggagaaatgacacctggaaaaatgtgcagacgcttctgaaagggcaaagacgacgccaaagaagacgccggagacctcgaatagggcgcaggtggacatct

SEQ ID NO: 240030 - DNA, 120 bp, Homo sapiens
  chr19:7459975-7460095
  hyper
gggatcgcgcatgcgctgctctcctcgcgcggcttcccgcttccggctcccagctgctagctactgtggatctgggggggccggacggaggcatcggaggcggctgcgagagtggcagag

SEQ ID NO: 240031 - DNA, 137 bp, Homo sapiens
  chr19:7553947-7554084
  hyper
gccaggccggggtaccgggagcgccccaaaggcttgcgcgcaggcgcggccgcaggcctttgtccccctgaccggctttttgtccgctgtaggggagggacagagtttgcagaggtggggccgacacgtgtgtgctc

SEQ ID NO: 240032 - DNA, 541 bp, Homo sapiens
  chr19:7565792-7566333
  hyper
gggcctgacctgcggctgcacgagggcaccatgcgcaccacgtcgcaccgggactttgcctacccggctgccacccgggagccgccgagcctgcagccgccgcccgcgctgcttttcccaatggacccgcgctgggaccgggaagagcgcgtgtcggaggcgcaccgcgcgttcccgccgccatccacgccgccgtgggagctgctgcaagcgcaggcgcgggaacgcacgctcgccatgcaggccggcaacctgcacctgcacgaggacgcgcacgccgggatcggcctctccaacgcgcacgccgcctacggctggcccgagctgccggcgcgcacccgagagcggatccgcggcgcgcgcctcatcttcgaccgcgactccctgcctcctggcgaccgcgacaagttgcgcatcccgcccaccacgcaccaggcgctctttccaccccacgacgcgcgcccgcagcctcgcgcgcccagttgccacctcggtgagcgcgcgcccgggctgagtgggcgatttgcttcacattgtggtt

SEQ ID NO: 240033 - DNA, 60 bp, Homo sapiens
  chr19:7580809-7580869
  hyper
atggggccagggctgcgtgcgggcggggcacggtgcagacaaaggcgcggccgcgcggtc

SEQ ID NO: 240034 - DNA, 186 bp, Homo sapiens
  chr19:7598773-7598959
  hyper
atcggctccctgtcgcgcccgaggagggcctggacctttcgtgtcggacccttgggggcggggagactgggtggggagggtgttgaataaaagggaaaataaatgtgtcgttttcatttttagcgggaggagcagtccttgcgttaagcggtgtgaggccctttaaggcgcggccacactcagcat

SEQ ID NO: 240035 - DNA, 65 bp, Homo sapiens
  chr19:7600088-7600153
  hyper
gtgggtaccaggtcggcctttggccccggggtggggttggacaggcgggcgtctggtaggcccta

SEQ ID NO: 240036 - DNA, 172 bp, Homo sapiens
  chr19:7661305-7661477
  hyper
tccaggtgagccgggcggggtctgcgggccgggtggggtctccccgtgcggacctctcgttcccgcctcccgcacccccaaggccttcccttgcacgccttcttctcttttacacacatcacgcccctgcgaggatctcctctcggtctcttcccccgccacacaccctgga

SEQ ID NO: 240037 - DNA, 128 bp, Homo sapiens; identical to SEQ ID NO: 205154
  chr19:7701788-7701916
  hyper

SEQ ID NO: 240038 - DNA, 314 bp, Homo sapiens
  chr19:7702164-7702478
  hyper
gggagttgggggccgggctgggcgtccgagcacctgaccctcgagggggcgggcggggacgggttcccagctggacgcccctgctctccggtgccagaacagaacaaaattggggggccggactccggggacccaaaggggacgggtagagtgtggcggaggctggggcccggactcctgggcctcctagggtgcctgccgggggaggagggcacagctggatgcccacactctaggatctcttaagccgggcaaagttcaggggctggattcttggggcctcctagggctctggtcagcgaccctaggtgctg

SEQ ID NO: 240039 - DNA, 242 bp, Homo sapiens
  chr19:7745712-7745954
  hyper
ccttttacggcgccgtaaagcagctcggccgagcagactgctgcggttcctggtgagaccctacccacccccctgcccgcgccgggcctcgtccgctccccggccccttccccgcgggcgtgtgggtcccgggctggggtctcggcgtccgcgatcccgagcccgctcgcttcggcccccctcaggaggctgcgaggagggtgggtttctccccagtgtagaggtacggggcgagggtcgcg

SEQ ID NO: 240040 - DNA, 169 bp, Homo sapiens
  chr19:7746642-7746811
  hyper
gctggagcgcagggcggggcaggagcgactgcccatatcccctcgtggtgcctcatctttgtcacctccctgccctagatctgacgcccctccccccatacactagttttctagttactcctgtaggtggcggagcgggcaggaaggcgctttcgcaattgaaccgtct

SEQ ID NO: 240041 - DNA, 459 bp, Homo sapiens
  chr19:7794836-7795295
  hyper
acatctgagcctgcagagtccgccccgccctgccccaccgcctgaccacgccccctccccctgcgcacctgctcatccaggcccccaacgatcaccaggtgcgcgctggcatctgcgcagtgatcctgcgccgccgcccacgtcgtctttggcacagagaaaaagtagcaggagccctcgaaggacagccacgacgtggggcacggctcgcaggagtctgcggggtggcgagggtcagagaggtcgcgtgcttccaggggcaacgcaccgagaggatgcagtgggtaggggttcggccccgcgggctcaggggtggagacacagaaccaggccaaggtccaggagtgacagggtccgcttacgccctcacagcccgcccccgaccccccgtctcgctcactgttctggagcctcacggcctccagcgcccggaacagctcagtgcggacgtcctcacgg

SEQ ID NO: 240042 - DNA, 165 bp, Homo sapiens
  chr19:7795514-7795679
  hyper
aggtcagagtgcagcgtcagggtcaggacggggtgcatgatcggggtcgggggtcagcactcaggacggggtcggggtcgggggacgcggccagggctcagggccggggtcgcgtcgggccctcaccgcgctcacgcagttcccgcagggcgctctcctgctcca

SEQ ID NO: 240043 - DNA, 238 bp, Homo sapiens
  chr19:7852956-7853194
  hyper
tgctcgcgtctgagcgtgagcagagtgtgtgtacatctttgggccgtttgcagtcacgcgtgtgcacatggcgtgcacgtatgtgtgcgagtccccacgcgtttgtctcccatcggcgtgtgtgcacatagtgtgcgctatatgcctgcctgcccgcccgctctgtggtcccgagtcgggggaccccgcaccccccgggcaagggaaggatttccgagtccctggccttgcctgcagg

SEQ ID NO: 240044 - DNA, 801 bp, Homo sapiens
  chr19:7933745-7934546
  hyper
ctgtgggtaggtcccgagcctccgaggccaaaggctcaggctctagggagctaagactaatccacccagcggggctccagggcagtggaggcggggtctaaaacaaacggcgtacccggaggggcggatcctaaggcaggggtggggtgtagcaggcggggctgtggtctggctcagtggaaggtctccacctccaccacggtccagtcaccctgcggggaggccacgtcgtccggagagaagctggtgaccgaggtgatgctggcacgggactcgtccaggggagacagtagttcggcccagcggccgagttcggcgtcgctgagtgcagcccgggcgccccctgtgacgccaccaccctccgcacctcctgggcccccgccgctgccgcccgcggcaccctcggcagccgccagcagcagcgtccggctcagcaggtgctgcacgacgctcgcctgcagcgcccccagtggcagctcgcccaggcgcgcctgcttcgggctccgcgaggacgccccggccccggccccagccgccgccttcccaccgctcgtgccgggactgggccccggatccagtgcgccaggggcgggggtcgccgactcgggcccttcagtctcgtagatggtgcacagaccgtcagcagagcccggtccggtagcgggaggccacggcaggggcgcacctgcggggagagacgccaggtgggccgtgggggtgataagccccgcccctgcctcaaggtcccgcctccttgtctaagctccgccccggacccagctgtcccgcccctgagctgcg

SEQ ID NO: 240045 - DNA, 152 bp, Homo sapiens
  chr19:7937038-7937190
  hyper
caggtaaggctcgacgagtggggcgtggccggcagggtgggcggggcctgactttggagagcggctggcggagggggcgttaccggtggagagggagggagcgtggctggcaggggagtggctgcattgtcgggaggcggtacgggtcttgc

SEQ ID NO: 240046 - DNA, 718 bp, Homo sapiens
  chr19:7938935-7939653
  hyper
cgggctcaggatgtcgcatccctccagacccggagcgcacgcccgggtctccccgccagcccccatcggcctcccctggcctccccgagggatgcctgcacctgccgggaggcagagcggccccgctgcccgcgaacgggctccgggagacaaagagccgcgtcccgggcccgacccctcccccagccgggcctggcccgcgcccagcctctccacctgctcgcgtcgcgctcacctccgcctccggcctccggccgctcctcacagagtcgcctggggtggggcccgggccggagcgacgcggtggccgccagcggcgaggaggcgaggggagggggctgcgggctgcggcgccgggggagccgagccggtcccgcccctcggccgcgggcgggagagccgggggcgcgcgctcgatccggacccgggagcgcggccggcggaagcgcgccgagggggatgggggagaagcgcgctttggagagaagggtggcttctctgcggtccgggggaagcctgtttccccagctgcgcctgaggaacccagatagtcaacggttgggactgggggagcaaatccctggggtcctccactgtccttcccaacacatacacctgccccgacccccaccacaaccacctggcaccaaggaccgcctggacgcggataggctgggccctggcaaccaggaggcgggaccaccgcgcctctggccca

SEQ ID NO: 240047 - DNA, 40 bp, Homo sapiens
  chr19:7953415-7953455
  hyper
actctgcgggagtcgcggcagctccgctcccagagaccca

SEQ ID NO: 240048 - DNA, 194 bp, Homo sapiens
  chr19:7968415-7968609
  hyper
ggttccaggaatgcgcatgcgcaaaagccacgcgggcgaacacggcttcgcctcgctaagcatgcgcgccgttttccccgcccaccgtcctcagaagaatggtgtttcctcgcagcgcctctctcaggagcgatcgggaattggcgcatgcgcactacggtggtggtggcgacgaaggcgggggttgcacgttg

SEQ ID NO: 240049 - DNA, 153 bp, Homo sapiens
  chr19:7982945-7983098
  hyper
ccacgcccctggcccgcccgcgagagcctcgcccagcggtccccagcccaggaggtcccagtgaggaaggtaggtatggaggtggagggagctgggtgaggtaggagatctgacagtgacgcttcctagcgcttagttcgtgccaggcactgt

SEQ ID NO: 240050 - DNA, 114 bp, Homo sapiens
  chr19:8067288-8067402
  hyper
ctctccagagcctagcgggggcccaggacacagcagcggagcagggagagtcgttcagaggagggagcgagcctcacttccctcccacaggctggcttccgttggtcttcccct

SEQ ID NO: 240051 - DNA, 48 bp, Homo sapiens; identical to SEQ ID NO: 205160
  chr19:8273923-8273971
  hyper

SEQ ID NO: 240052 - DNA, 723 bp, Homo sapiens; identical to SEQ ID NO: 205162
  chr19:8372857-8373580
  hyper

SEQ ID NO: 240053 - DNA, 182 bp, Homo sapiens
  chr19:8432388-8432570
  hyper
aggggagatgcctgaggggccggaaagcgtcttcctggtcactctgggcccgcccccacccccaccgtgcagactcatttcgacctttcccctacttttccggctgggctgggggcggttcctcccagtctggagcgtctgagcctccagacgtgctcaacgccatcctcccctcctccctc

SEQ ID NO: 240054 - DNA, 40 bp, Homo sapiens
  chr19:8478144-8478184
  hyper
gtcgctattggtccgcggcgctgtcggctcggcgggcggt

SEQ ID NO: 240055 - DNA, 124 bp, Homo sapiens; identical to SEQ ID NO: 205163
  chr19:8942732-8942856
  hyper

SEQ ID NO: 240056 - DNA, 736 bp, Homo sapiens
  chr19:9419935-9420671
  hyper
tgaaccaccgcgcttggcccaaacactacctaatgcataaagaggggacaggaggggaccgagccgaggcaaatgtcaccccgtgctcacccgacacgccgcgatccacagatcagctcacagagaacgaggctgaagcgcttgtccttgagacacgaatggcagagatgctcttcctttctggaaagagagcaaaggatgctttcggaggctgatgaactacgacattggttctccaactctcgcctgcatcagaatcaccccgatttctgtacccagaccagagttcccgattcagtgagtttgggaccagccgcggccacaggggcagctgacccgggctctctgaggaggcgccgcggcggcgggaggccccgggcgcggggtccggacaaggagtggcggggaggcagcccttagaccgccgattcccaaacccagccctcggtctcccgcggacccgacccggggcaggcagggcggggcggggcagggcaggacaggaagcgggcggaggcaaaaatgttcctcagacgcgggcggaggcgtagggtgacaaggctgtcgactcgcgcatgcgcagaagcacacttctgattcctctttcggcgctgcaaatggcgtatggggcggggcctgggaagcgggacttgaggtgaagggggtggagcaggtaggagcgggatgcaaaggagcgccaaggctggttccagccgcaagtggatgagaaatccta

SEQ ID NO: 240057 - DNA, 569 bp, Homo sapiens
  chr19:9434651-9435220
  hyper
tttgttcaaaacgccagtaacctggacagcttgcagtcaagaccccctaccggtgacacttgcgctcttcggggaggtaaacagcatttcctctcagctctgggttggaaaaagccgcagcagctgatgggcccgggaacccgaggccccgccccctaggtggtcctagcctttgcgcgtgcgcggcgtgtctgcgtgggcgcatgcgcataacggccgccatcttaacagcgcgttcccgttggcgtctgaggtaagtttttgtttctgggcggcgttcggtggtgtcccggtgcagccacgcgagagtagaagggtggaaaggggaggtgcccagtgaaatggagcctgtcccgtgcactttcgggcatttcgagcatcttgtgggctctcccaagtcgcggcccctcctctgagagccacagtcaggtctgtcctcaggggtcgaggcggctgcgctggggcctcggcccgggaggaggcggggggcacggcctttccattttccctgctcccctctgcagaagcctcatagggcccggcgcggcggctcacgcctgtcattccca

SEQ ID NO: 240058 - DNA, 389 bp, Homo sapiens
  chr19:9473619-9474008
  hyper
atccgccaaatgtgcgagctgggcagcccacccctttcagctgctggccggaagcggaagtgggcgtccgtcgcctcgccatctcccatagctgtcgcctgcagctgagaaagggttgctgtcccagcaggccaggtccaggtgcgccccactagtgaggccggcggaatcgggagggaaggggtcaagggcacagtgcgcagccccggctgctccagaccttgcctgcagcttcccgccccagcctccggctatcgcggcgtttcttctcagaggccgccggctttggttcctcccggcactgctgggcttggggctgccattccgggcattggttcccgggaggaggcaagtgggttcatgtggtcagagtgcgtcggcggggcctt

SEQ ID NO: 240059 - DNA, 505 bp, Homo sapiens
  chr19:9517501-9518006
  hyper
ccgcactcccgacccgccttttacctggacccaagcccccagcggcgcaggtgggagtctgggaagaagtgcggtgtcggcaggaagtcccagcgcgacgtccgggaaagccacaggaggaggcgacctgcaggaggctaccctttgaccccaaccctactctccagtcctcctagtctggtgggagcaaccttagactggttgatgtggaaggaggcgggcctgcacgcggagtacggcattcacttccgtttccgggagcgcacttccgtttccaggcatgagggcaacgggggaggggggggaggtgacctggaatgggctgagaaacaggagccacgagagccgcgtggtgacgttagaagggcgctacagccgcgactttccaaagctagtagagagatcccagcgtcccccgggaaaggcagaaggggcggggcgataccaagacggagacaatggggcggggcgatgccctggaggcgggattgcctgtgggagagcc

SEQ ID NO: 240060 - DNA, 446 bp, Homo sapiens
  chr19:9545895-9546341
  hyper
tgctttggaagagtttgaagcggcaatcaccgtgtttgcaaaaatcgtgaggaagcgcccttacgacagatcccgaaacggctcctggcccagggccgtcgcagtgacaactcgagtggctttttgaacctggcggcgccaggaggacccgcgcggccccggcggacgcgagcggagcaggcaaggtctctctaaggaggcccctcggcggcctggggcaaaccggtactttcgccaccccttccaccgctggctcccacccgtcatccgacctcgccaaagctgtattaagcccaaacgccaccaggaagaaaacgggtttggcggcgcggagaaagcgccggaaaacacagcagcgctccgtgacgtcacttccgcctccagcctcaaacctggaggagcgctcgggaactgcaacctcagccgagctgaacaacctcaggcag

SEQ ID NO: 240061 - DNA, 116 bp, Homo sapiens
  chr19:9609321-9609437
  hyper
gcattggaaggggcgtggctcgttgtgtgggcagttggacaggatggaactcttcaggattctagtttccctccgcgtgggtgcggaggtatcaaggggtcggctcagtgcctggg

SEQ ID NO: 240062 - DNA, 59 bp, Homo sapiens
  chr19:9649432-9649491
  hyper
atctgcttggctgcggaggaccttggggtgggctcagcgtgggggctgcaggcagaaat

SEQ ID NO: 240063 - DNA, 36 bp, Homo sapiens
  chr19:9732221-9732257
  hyper
atgagggatgggacgcatccccgggggatgctcctc

SEQ ID NO: 240064 - DNA, 123 bp, Homo sapiens; identical to SEQ ID NO: 205166
  chr19:9879601-9879724
  hyper

SEQ ID NO: 240065 - DNA, 256 bp, Homo sapiens
  chr19:9929306-9929562
  hyper
cgcgcggttagaacgaccccagccccgggccacatcgcatctccaggtgccagctgcgccctccgccctgcccttccccccggaggcggggccgcacctggagatgcggatccggtcccgtaccgggaggtaagagaagatctcgagcaggaccgagtccggcagttcgaccaaagtcgccatgatcccgccgacacgcacttccgcttccggttaaagagacccgaggggtcctgggggcgccgaggcggctgac

SEQ ID NO: 240066 - DNA, 260 bp, Homo sapiens
  chr19:9938402-9938662
  hyper
tctctacccggcgcgcctaccacaggcgcgacacctgtcaagccttgggacaccgaaaccgtacctgggaacagcaaacacaccacagactgcagacccggaagaacttgtcccagtgttgaccacaccccctggctaggggcagggcttccggcctcgaactttaacttccgcttccggttcctagcgttaactgcgaccggggttcagcgctcgggtgaggagctggtggcgtcggcaggttcgaggcgattcgaggt

SEQ ID NO: 240067 - DNA, 515 bp, Homo sapiens
  chr19:10024010-10024525
  hyper
gtcccctacccaggcgtgccgggcagggtcgtgggaagcacaggggtagagggggacaggtgggggccccgggggctgcggcggcggcagcggctgtggcgcgggtaccacgccccccgggagcgccccccgcgcggcggccactcacgattttctcagaggcgcccgcacgggacacggtgccgttgagccccacgagcgagggcagcgtctgcgacatccagttggtgaccatggccatggtgctcagcacggccccgatcttgagcagcggcaccgacatcgcgcctccgcctcatgccccgcggccgcccgccgcgcgtcccttctctggcccgccgcggggcgctcggtccctcgacacccaggcgccccgggggggcgtgggggagggggcacgagcgcgagctgcggggcagggggtccgggacggggtgagggggggctcggggacgcgggctgcggctcggcgcgcctggcgggctcctcttataaagcgccggctcgggcccccg

SEQ ID NO: 240068 - DNA, 155 bp, Homo sapiens
  chr19:10024728-10024883
  hyper
ggcattccccagccccgccccccaacggtattcccggcccccctccccctaggcggtgttcccggaccgcctcccgcacgcagaccctcttcgagcctgagccgcgggaccccgcgcgtaaaggcgccctcggcccaccccggccacccaaagac

SEQ ID NO: 240069 - DNA, 255 bp, Homo sapiens
  chr19:10197582-10197837
  hyper
aacccccctgtctccatcccagctggagaagagcgtccggcgcctccgggagaagtttcatgggaaggtatcctccaagaaggcgggggctctgatgaggaaattcggcagcgaccacacgggagtggggcgctccatcgtgtacggtgaggctgcaggggtcccgggcctggtgcggggaccgcgcgtgggagcgccgagggggcgtggtctagggagaggcgttgagatcacctcccccggaggtcccagcct

SEQ ID NO: 240070 - DNA, 186 bp, Homo sapiens; identical to SEQ ID NO: 205169
  chr19:10207020-10207206
  hyper

SEQ ID NO: 240071 - DNA, 50 bp, Homo sapiens
  chr19:10216840-10216890
  hyper
tttctctgcagcccggagccgcgtagccccgccccggtctccctagaaac

SEQ ID NO: 240072 - DNA, 166 bp, Homo sapiens
  chr19:10305760-10305926
  hyper
tgcccagggaacacgcatgcgcaaggcgggcacacaccccccccacgcggagcagtgggctcgtccaagctccacggtttgctgggaggtgggcacggtgcccgaggcattcattcattcattctttcaggtgtgatggggataaagcagcgagaagcccccaagg

SEQ ID NO: 240073 - DNA, 50 bp, Homo sapiens; identical to SEQ ID NO: 205170
  chr19:10340887-10340937
  hyper

SEQ ID NO: 240074 - DNA, 146 bp, Homo sapiens
  chr19:10342109-10342255
  hyper
cggctggccggggcgcacgcgggggccgacaggagctgcacggagggccctttgtccgccccccccacccgatctctcactctgcccctcccagcccccacccgtgagaaccggccggcgcgaaacgtcacgcagcctggtgacgt

SEQ ID NO: 240075 - DNA, 195 bp, Homo sapiens
  chr19:10346995-10347190
  hyper
aggctgcagacatatgtggccgtctgccaggggaaccgtggctcccagacaaaggtgatgtccccggggacacacagacacaccgacatgcaacttccgcctccctcccacttctgaggcaacacaatgtcttcgccaggtcagccaagggagcgctacagaggactggaaaacgctggaggcctggacttcctg

SEQ ID NO: 240076 - DNA, 113 bp, Homo sapiens
  chr19:10362531-10362644
  hyper
gcccacttatgggcgggggtcactccttcaggcttaacagtcattggctgaattgggccagagaggtctcattggctgaattcctgcaccggctcgtcggaggcgggacccaa

SEQ ID NO: 240077 - DNA, 87 bp, Homo sapiens
  chr19:10380738-10380825
  hyper
agtcttggggtcacacgcacaggcggtggccaagcaaacacccgctcatatttagtgcatgagcctgggttcgagttgccggagcct

SEQ ID NO: 240078 - DNA, 790 bp, Homo sapiens
  chr19:10381273-10382063
  hyper
tccctcagtggagggagcccggggaggattcctgggcccccacccaggcagggggctcatccactcgattaaagaggcctgcgtaagctggagagggaggacttgagttcggaccccctcgcagcctggagtctcagtttaccgctttgtgaaatggacacaataacagtctccactctccggggaagttggcagtatttaaaagtacttaataaaccgcttagcgcggtgtagaccgtgattcaagcttagcctggccgggaaacgggaggcgtggaggccgggagcagcccccggggtcatcgccctgccaccgccgcccgattgctttagcttggaaattccggagctgaagcggccagcgagggaggatgaccctctcggcccgggcaccctgtcagtccggaaataactgcagcatttgttccggaggggaaggcgcgaggtttccgggaaagcagcaccgccccttggcccccaggtggctagcgctataaaggatcacgcgccccagtcgacgctgagctcctctgctactcagagttgcaacctcagcctcgctatggctcccagcagcccccggcccgcgctgcccgcactcctggtcctgctcggggctctgttcccaggtgagtcggggtggggattgccgtcgggccagttctccgaagccccgggaggaccggctcccgggtcaggtcatgcatgcttaggtagctgtttatgggaaggaggggctagagacagcgattgaaaggcaacagccagtaggttcgaatccagaccctgc

SEQ ID NO: 240079 - DNA, 864 bp, Homo sapiens
  chr19:10397588-10398452
  hyper
tctccagggtggagtcgaggaggcggggctgcgggcctccttatctctagagccggccctggctctctggcgcggggccccttagtccgggctttttgccatggggtctctgttccctctgtcgctgctgttttttttggcggccgcctacccgggagttgggagcgcgctgggacgccggactaagcgggcgcaaagccccaagggtagccctctcgcgccctccgggacctcagtgcccttctgggtgcgcatgagcccggagttcgtggctgtgcagccggggaagtcagtgcagctcaattgcagcaacagctgtccccagccgcagaattccagcctccgcaccccgctgcggcaaggcaagacgctcagagggccgggttgggtgtcttaccagctgctcgacgtgagggcctggagctccctcgcgcactgcctcgtgacctgcgcaggaaaaacacgctgggccacctccaggatcaccgcctacagtgagggacaggggctcggtcccggctggggtgaggggagggggctggaagaggtgggggaagggtagttgacagtcgctctatagggagcgcccgcggacctcactcagaggctcccccttgccttagaaccgccccacagcgtgattttggagcctccggtcttaaagggcaggaaatacactttgcgctgccacgtgacgcaggtgttcccggtgggctacttggtggtgaccctgaggcatggaagccgggtcatctattccgaaagcctggagcgcttcaccggcctggatctggccaacgtgaccttgacctacgagtttgctgctggaccccgcgacttctggcagcccgtgatctgccacgc

SEQ ID NO: 240080 - DNA, 170 bp, Homo sapiens
  chr19:10399791-10399961
  hyper
ccagccagatgagcgcatggagttgggggtggggggtgtcaaagcttggggcccggaagcggagtcaaaagcatcaccctcggtcccttgttctcgcgtggatgtcagggcccccacccaccgagcagaaggcggactcaggggcgctccagggtggctcgagctcacac

SEQ ID NO: 240081 - DNA, 154 bp, Homo sapiens
  chr19:10400850-10401004
  hyper
tggacctgagaaacggcctcctgtccctcccagctctgccctcgcctcgctcccacgcctctgcccccacctcgagcctgagtcttctccccttccccctcctccccaacacacacccgagccccagcttcctgactcctcgatagcccctacc

SEQ ID NO: 240082 - DNA, 2284 bp, Homo sapiens
  chr19:10401184-10403468
  hyper
cgctgttcccgctccacccagagccctggcaaccgggtccctcagctgttcccgcggttccttccatgagcccagccttgcgtcccggctccgtgttcttcaccgggtgtagggtccttcctgatccttgacccagcctcgtctctcctttgcccttgccgcaaacgcactctcctcgtatcccggcattctgccaggaccctgagaactggttcatcccccatcccccatcccgggtccccttctctcagccttgctgtgttcatccaagaacccacctttcctctcctctacgccctccccccatgctttcccgccgctccatcggcgctttggagaccatggctctctgctaccacgtcccagagacaccctcgaggtttagactctgggagtgcgcctttaaaccggaggcctgggcaggacgcgggacgcctgggttctttccctggctgcagcctctcctcctcctccccgccctctgagaacccttgactcgacataggggcgctaagatgtcagggagttggctccccaggctcagcccgcgtttccctgggcagcggtctcgcaggagcccttctgggcggacctgcagcctcgcgtggcgttcgtggagcgcgggggctcgctgtggctgaattgcagcaccaactgccctcggccggagcgcggtggcctggagacctcgctgcgccgaaacgggacccagaggggtttgcgttggttggcgcggcagctggtggacattcgcgagccggagactcagcccgtctgcttcttccgctgcgcgcggcgcacactacaggcgcgtgggctcattcgcactttccgtgagttctgggtggccacgcgcgtactccactactctccctccctcccaggccccgccccctgggtcccagggtcctccccttcaggccccaccttctgttccaagtcccggtgttcaaagagctgcggactcttcccccttgcagagcgaccagatcgcgtagagctgatgccgctgcctccctggcagccggtgggcgagaacttcaccctgagctgtagggtccccggcgccgggccccgtgcgagcctcacgctgaccctgctgcggggcgcccaggagctgatccgccgcagcttcgccggtgaaccaccccgagcgcggggcgcggtgctcacagccacggtactggctcggagggaggaccatggagccaatttctcgtgtcgcgccgagctggacctgcggccgcacggactgggactgtttgaaaacagctcggcccccagagagctccgaaccttctgtgagtgggtgtggggaggagatggggacccagtggggtcggtcggtgtttaggaggtttagaggtagatacatctgaatgctgaccccgacttcaaccctcgccggctgagctgtttccccctccgtgccttgaggatgataatacgataagatagtgcatgtcaagtgcttaggacatattgagcgctcggagttagttcaaacttggttcttcgacccctagccctgtctccggatgccccgcgcctcgctgctccccggctcttggaagttggctcggaaaggcccgtgagctgcactctggacggactgtttccagcctcagaggccagggtctacctcgcactgggggaccagaatctgagtcctgatgtcaccctcgaaggggacgcattcgtggccactgccacagccacagctagcgcagagcaggagggtgccaggcagctggtctgcaacgtcaccctggggggcgaaaaccgggagacccgggagaacgtgaccatctacagtaaggaaggaggcggggtctccgcggctccgaggtgggaccagaggaatgcgaaggcggggcgaagagtgggcgggacctcagtaccggaacaggcgtggcccgaggggcggggcaggtgggggcggagacgtaatcgctggggaggaggagcctgtacagcctgagaggcggggcgccgtaccctagttcgttctcagcaccccgaggattcgggcagataaggggcgggccttgaccggagggaggggtatggtcagtatactacgaccaaatgctccgcccccaggcttcccggcaccactcctgaccctgagcgaacccagcgtctccgaggggcagatggtgacagtaacctgcgcagctggggcccaagctctggtcacactggagggagttccagccgcggtcccggggcagcccgcccagcttcagctaaatgccaccgagaacgacgacagacgcagctt

SEQ ID NO: 240083 - DNA, 415 bp, Homo sapiens
  chr19:10406003-10406418
  hyper
accttctgtgcccttcagaccggccagtggtggccgaacttgctgcctcgccccctggaggcgtgcgcccaggaggaaacttcacgttgacctgccgcgcggaggcctggcctccagcccagatcagctggcgcgcgcccccgggggccctcaacatcggcctgtcgagcaacaacagcacactgagcgtggcaggcgccatgggaagccacggcggcgagtacgagtgcgcagccaccaacgcgcacgggcgccacgcgcggcgcatcacggtgcgcgtggccggtaagtggcagctggggagaggcggggcgaggtatctgagagggggcgtgacctgggtcttggggcggccggccccgcctgcctccctctcggtcccggtagactagacggaagtgggacagagtagaag

SEQ ID NO: 240084 - DNA, 170 bp, Homo sapiens
  chr19:10406920-10407090
  hyper
atgaggactgacttcgtgcctgtgggagtgcggggggcggtgggagaagccccccggagcttggccaccctccgcgagggtctccaccccgcaggtccgtggctatgggtcgccgtgggcggcgcggcggggggcgcggcgctgctggccgcgggggccggcctggcctt

SEQ ID NO: 240085 - DNA, 177 bp, Homo sapiens
  chr19:10443527-10443704
  hyper
tgatatggaggggcgtactctccgcagtcctgaaacttctggatgtgaggtcccgccaccctgtggtagagtgggtggagaaaagcatcatccaagcagggggcaactggtggtccaatgtaccagcccattcacaattccccaacaggaccaaagctgtccgcccccttccattcc

SEQ ID NO: 240086 - DNA, 316 bp, Homo sapiens
  chr19:10491159-10491475
  hyper
ccttccgcgcccgcgtccagactcacccttccgggggaacacaagctcgaacccggacccctccccgctcccgcgggtagctactgcttgtcccccgccgagacgcctcctcccattggccgcctgaaacgcacacgcccattggcagctgctctgttctccctgctcgtcaccattggatttttttttttttgccatggtggcggcactctcattggtcctggggctcattcgtcactcagccgcgattggctgagtcggcacccagatgcgctgtcgcttctgctattggctggcactcggtggacggagacgg

SEQ ID NO: 240087 - DNA, 80 bp, Homo sapiens
  chr19:10526988-10527068
  hyper
ctgcagagcgcacccgtcttcgggaacggcgtctgtgtccctgtctgtctgtttctatttccacacgtccctgtctgtct

SEQ ID NO: 240088 - DNA, 55 bp, Homo sapiens
  chr19:10529636-10529691
  hyper
ctgatgggggggccggtttttgctcggcgttcgcccacgccgggagccccctctg

SEQ ID NO: 240089 - DNA, 106 bp, Homo sapiens
  chr19:10530531-10530637
  hyper
aaataggtagcacatgtgcgcacacatccttcacccacagacacacacagttatacacacagccaaatccagagaaacgggcagacaacagcagccaaccacgtgc

SEQ ID NO: 240090 - DNA, 85 bp, Homo sapiens
  chr19:10531057-10531142
  hyper
ccctccttaggtagctgccccccgctggcccggacggaggaggaggggggcggcgctgacagccgcggcgggcggggggcgggga

SEQ ID NO: 240091 - DNA, 433 bp, Homo sapiens
  chr19:10535126-10535559
  hyper
tgtgggttgggagcgggtctccccgcgcgccctctgctggacgacgaggaaggcacagcctgggtgtgcgctccgagcgcggacctgctccagggacgccgccagtcccggagcaaagcaaagtcgccgccaccgtcgcggcgcccggtattattattttatgcttattgagcgtcctggagagcgggcgccaggccggctgaccgcaggctgcgtgtggggtcctcgccctcccgggcttgggaccaggccgctttccccatgcgccagcccctgccacacgctgcggggactgtcgtctggaggacagggaggaacctggccgaaaagttgcagccgtggagttcccgtcccgcctctgcgcgcttgcccggcaggccggtgaaccccagcatccttggctctgcgcttcctgcccgggaaacagagacca

SEQ ID NO: 240092 - DNA, 257 bp, Homo sapiens
  chr19:10624637-10624894
  hyper
gcggcgcaggcccccggaagcctcagccgcgctcgccgactgctgggagccactcgggtctctgccgcaggagtggcgtccgcagcagaccaggcgcaggagcgcgtggcgcaggtcgcggttggtgagcgtgtagatgatggggttcagaagtgagttggccatggccagtcccaggaagggatcggcctgcaggagtacaggacaggtgcgcgccgggcacgccacgtcgagcaacagcagcaggaagagggggc

SEQ ID NO: 240093 - DNA, 152 bp, Homo sapiens
  chr19:10625554-10625706
  hyper
ccaggcacaccacggcgtcggcgcgcaggccggcacccggctggtagcgcgcaccgcggagcttgccggtgtagttgtaatgcaggacgatgacctcgctcaccggcgccggccgcagcagccccgactccatgggccgcgcgccccaaggc

SEQ ID NO: 240094 - DNA, 251 bp, Homo sapiens
  chr19:10654404-10654655
  hyper
ctgaaggggctgtcgcgctcctggcggtgtgataaggagggcggggggaggccgcgggaaggcgtcggggtttgaggtccccgcctggcgacccgggatcggggcaggaaaggcggctgggcggggagagggcggggcggggcgtctggcttggccacgcccaccgtcatccggggtcctggcccgctaagatggcgatggctgcggtagcagcggcggcggctgttgcctggcccggtaccctggggacg

SEQ ID NO: 240095 - DNA, 66 bp, Homo sapiens
  chr19:10676719-10676785
  hyper
gacggggcggggccgccctcagtcccgcccgcatccacttgtaaacgaggcgtaccgctgctaacc

SEQ ID NO: 240096 - DNA, 369 bp, Homo sapiens
  chr19:10679763-10680132
  hyper
tgtagcggcaccgcgttgcccggcgcgcgaccttacggcgttccgcccacagggcctgcataaccagtggctgcgcgtcgccggggaaacttcgggctcggcgtgaaacgcgtcgctcctgattggtcagagtgtggcaaccggtggaccgccggcaatggcggggttttcggttttcaaatgaacccggcaggcgggaaagaaggctggtttaactgacccagggagaaaggtcaggggcagggtcgcgcgggctgctctgggacctcggcgcctcctgagggaagggaggcagggctggagccacccaatccgaggttccactactaatagacattcattggcccttactacgagctgggcgcttta

SEQ ID NO: 240097 - DNA, 38 bp, Homo sapiens
  chr19:10692032-10692070
  hyper
gatttcgctcagaaggacgctgccgttggcattgacct

SEQ ID NO: 240098 - DNA, 125 bp, Homo sapiens
  chr19:10812215-10812340
  hyper
gggcccgggcaggcgagctgtggctgccgcatgggacagtggccactcctgtgttcatgccagtgggcacgcaggccaccatgaagggcatcacgaccgaacagctggacgctctgggttgccgc

SEQ ID NO: 240099 - DNA, 170 bp, Homo sapiens
  chr19:10812677-10812847
  hyper
ctcataatctgctaacggtgagctgaggagagagccgacgttctagggcccttctctggagtgaagggtccccatctccaccccctgacagctttgcggtggggtttcccttaggacagcggcggtttccagatggtgtcgctggtgtctctgtccgaggtgacggagga

SEQ ID NO: 240100 - DNA, 537 bp, Homo sapiens
  chr19:10828651-10829188
  hyper
tgtatccgagtggcggtgcagcaggccagtcgcgtgcggcgcgagtgctttgggcgcagcccccggggccggggcgggaggtcgctcgggtcgggtgtcgcctgagaaccggatgaggcggcgaccgtgaggccgagccgggagcgggcgtcttgccgaggcccgggcgggcggggagcaacggctacagacgccgcggggccaggtcgttgagggtcggcggcgggcgaggagcgcagggcgctcgggccgggggccgccggcgccatgggcaaccgcgggatggaagagctgatcccgctggtcaacaaactgcaggacgccttcagctccatcggccagagctgccacctggacctgccgcagatcgctgtagtgggcggccagagcgccggcaagagctcggtgctggagaacttcgtgggccggtgagcgggcgcggcagggatcgcgggcgggtggcggcctagggcgcggagggcggaccgggaatggcgcgccgtgcgccgccggcgtaactgcggcgcttgcgtgccc

SEQ ID NO: 240101 - DNA, 77 bp, Homo sapiens
  chr19:10946959-10947036
  hyper
tctgtatgttgtccgtaaccagaggtgccaggagtgaaggacccccccactagagggcaggcggcccgaatgaatgc

SEQ ID NO: 240102 - DNA, 139 bp, Homo sapiens
  chr19:11039290-11039429
  hyper
ctctctgcgcctgcgcgtctcgcctacccgtcagactccaaccgactcagacctgacagcaacatccggcgcctgtcctctttctatcctctcccgttgggaagccacttccggtaaagttggcgcttgcgcagaagag

SEQ ID NO: 240103 - DNA, 35 bp, Homo sapiens
  chr19:11199837-11199872
  hyper
aacagttaaacatcgagaaatttcaggaggatctt

SEQ ID NO: 240104 - DNA, 69 bp, Homo sapiens; identical to SEQ ID NO: 205182
  chr19:11253288-11253357
  hyper

SEQ ID NO: 240105 - DNA, 73 bp, Homo sapiens
  chr19:11266486-11266559
  hyper
tgtccgcggggcccgccctcttccagaagaggttgctttccattggattttttgatacgtcagtcataagcaa

SEQ ID NO: 240106 - DNA, 64 bp, Homo sapiens
  chr19:11308368-11308432
  hyper
agactggatctcacctggacagcaggtgtgtgtgcgcgccggggtgtccggcctcgtccttcct

SEQ ID NO: 240107 - DNA, 314 bp, Homo sapiens
  chr19:11456951-11457265
  hyper
caataattcgtcccgcctcccagctgagcccgaagccaatcgggtcgtagatctgcacctttctatcccgccctcctgggtattgactaatcgtagaaacccccctgggatcccgccccctccacgggcttttatccaattacgccgcggctactaagcgcagctgaagcgtgaaggcgccaatgaggccttcggctactccggcaggggcggaactaaaatgccggccacacccctctctgtgactcagtctctgagcgttttaatacgatggtgtccccgcgggatcaaacttcagcgtcacagctgaggac

SEQ ID NO: 240108 - DNA, 69 bp, Homo sapiens
  chr19:11466098-11466167
  hyper
cacctcggagtctgcgcggcgcggccaggcccggccgaccgcgtctcggtcttcgcgtctgccagcctg

SEQ ID NO: 240109 - DNA, 512 bp, Homo sapiens
  chr19:11486038-11486550
  hyper
gctggaaaaacgggcgaatataagaatatttaacagctctgaactggttcatcctggaaccaaggaaagtatgcaaggaggcagggttacttttaaggagtctggcttcctgtgctgaatccggccctttccttctgtttctccttctagaagatccgcttccagtacccaccctcaacccgagagcttttccggctcctgtgctctgcccatgaggccccggggccagccccctcccttctgctgctcgacggcctagaagagtacctagcggaagacccagagccccaggaagccgcctacctcattgccttacttctagacacagctgcccacttcagccaccggcttgggcctggccgggattgtgggctcatggtggccctccagacccaggaggaagcaggtagtggggacgtcctgcacctggcactgctccagcggtattttcctgcccagtgctggctgcagccagatgcaccaggtccaggagagcacggcctccgagcctg

SEQ ID NO: 240110 - DNA, 1202 bp, Homo sapiens
  chr19:11491658-11492860
  hyper
ggaggaggtcagggcggtgggcttgccccgtgattcgccctggctcctcctacacccccgcctggggcctcaccgctaggcgtcagcagcgacacaggctccgaccaggcgctccagaagccgccgaagctcggctcagccatacgcgcgcggacggcgaaggtgtagcgcgtccggccccgcaggttgctcagcacacactcggtgcggccctccaggatctccacctgggggcggaatcagggcgagggacgcgtagcagacaaaaatagatgacgtgggggcgggccctggtggaactgagccaatcaggggaaaggaaaacggtgccctagaattgcaatgggaccaataagagtagggggaggagcccaagaaagctcagggccaatcagagagagagtctctggtacgaaagggcgggacccgggcaatttaatatctgggctagcactcgtagagggacccgggcgctaaaggggtctagggttacgggccggagggagaagaagttggggttcaacaggcttgcgaggacattaggaaagggggtgtgtctgtgggcgtggaacggtcttcagcaccagggtaatgggatgtgggatgttacggaccggccctgaaagcggcaccgggcgcgacctcgagaggcgtggctgggccgtagtcagtggagctttgggggctgggccgtaggggctggcctcaccctctgtacgctccctgcgccgttgccggccgagacgtccacctcgtagcggatgtgagacgtcatgggtgtctcaggcggcgggagccagcgcaacactacgtggccgctctcgtcagccaaccgcgccaccagccccacgggggcgtctaggagcactgcaggcatgggggttggtcaggtgggcgaggactgagaccctctcctccgaccactcctccattcccagagcacttacctacttcattgatgtggatgacacggtgatatcgcggagcgccggaggctgctgtgacgcgcaactctaggggcacgaagctcgacgtgtcggctgtaggcagcgaacaccagaagcgcaccgcaccacgagccgtgggagcctggtgcaggcgacacagcttccatggctcatccctatgcgcccagggaagggagcaggttgggaggggggaccggggagttggcattgcccggcctgtggggggcagtgtgt

SEQ ID NO: 240111 - DNA, 510 bp, Homo sapiens
  chr19:11529238-11529748
  hyper
cctcccttccttccgcccactgcacctggcggcctgtgctcggctctccagctccgccctcaactggtcgcttccggccccgcgccacccaccaaaccccctcctcacctggctgcccccggggccctccgccgggctcctgcgctgactgcgctgccgccgcagggagacactgtacaccgcgccgtcctcggtctcttcaccccagtcctgcagcggtgcctggacgcacaggcggactcagggcaccaaaggggcacaggtcctggggcctcagcctccttggccgctcggactcgggccgagtcctcctgctgcatccccacgccccttcccggccagaagctgcgagactagggctggggtcccaggctagtcccctcctcgctgcgggtcccctcctcccaggtcctgaggacatggggtggcatttggggatgtcccagggcccagtctaatagaacctgtctctagctctttctgccgactgcgctcagagactcgcgcccc

SEQ ID NO: 240112 - DNA, 698 bp, Homo sapiens
  chr19:11531258-11531956
  hyper
tgaatacccagggtcatggtcggtaacatttattgcgcaactctgaggccggggcggacccagctggggagatttactgtgggaacgtctggcccggccccttcctcccctccgggcgccgctggccgcctccgttcccggtccgggccgcgttcagcccctgaaggggccccgtggggcctgcgctagacccggagggatcgggggctccgaagggggccgcctggtgggtgtcaggacgagtctaggacctccgagagcgacggtgcttcttgtgactttcgattaatttctgggaacggatcttgagtgatgcgcgggtcactacctcgttgtcctcctcctcactctcttcgtctaaggggggtggggggatgagcagggagcgatgtgggatccaggtccccatccctggctccccttccctttaccaccccactccacccccaccttggccctgaacagggtatctgacaacctcctgctacccagcttggggccccaaccgcaccccttcatccccccacccatactgaccaaaaaacttgtccttggaagtggcaaggggcagggcgatgcgggtgttgtattcgggcagccttccctctaagctggcgaggaactaagcggggatgggaagcgagagaggaaggtgggcggggccaggggccaccgagaagtcacgttccccctcctcc

SEQ ID NO: 240113 - DNA, 534 bp, Homo sapiens
  chr19:11532160-11532694
  hyper
ctggtttcttccctcgtggctcgggctcacccctggctcgtcaaacctcgcccgttgtccccgagaccccttcctggctgatcagcctgcaatctggtctcccgaagttgcccccggttccctggttttccgacccagccctactcctagatctctggagctctgccccatggctgcagggcacctcgcggttagcgatgtggcacagcatctcctgcacgtcgtggccctggagctgcgcctgcagtttcagcagcttttcctccacgaggcccagcaggtttggcacatagttatctgcctggggatccagctcctttcccgcgaagcggccgtcctcctgcggccagggtagagccgggtcagccgagaggggtggggcctcttggaaggctccacccaggggcggggcttttctttcgggggcggggcctaggaggtaagggcccacctgcagggtcgatcctagccattgggggcggggacttaggtcaaggccacgtctgtgatgggggagcctctgaactctaactc

SEQ ID NO: 240114 - DNA, 915 bp, Homo sapiens
  chr19:11532724-11533639
  hyper
ggaacagtaaggattcgagggaggccattgtgggatggcctcctgaagaaatggccctctgctgcgggcaggataggtcttctgtctcgggctgctccagaactgcagataggtctccgagcttttcggggacagggtgggacttctttcccttggaggcggagcttgagacgggacagggtctctgacgtcttgggcttccttggggagtgagagcttccccagggaggtggggcggggactctgaggaatggggtggggcttcccctgtgggcggggcctctgacgtccgggacagaggatgtggcaggccacgttccctcgggcaagctggtgtggcaggaaccccgcttcgtggctgcgcctctgcggtcccaggagggcctgtcggggcttcccctgggcggggcctaccacagtgatgtggatcagcttgctggccaggtgctccaggctgtccttggccacttgcatcgcccgcaaggcgcgctccagctggtccttggcctcggcgtgccgccgctcctccttcttgagacgctcctgcgcctcggcttgcagtttctgctggctgcagggagccgggaggtcaccccgggggctcagcccgccccgccgccctccccagagccccggtgcctcacctcaccagcgtggcctcccccgagtacttgaggtcttccagctcccgctgcagttgttgcttctcctgcttcagcctcaccaacgtctgctcgttctcgctcttgagcgtctccaactgcgcgaaggtgtcgccctgggccaggaaccgccgcaccaacgactgcgggccacccagccccagtcagagccagggcctagggagcgtaggggcgctccacctcctctcccccaccctgcgaaccctcgcacgcaggacaggtggcctgagct

SEQ ID NO: 240115 - DNA, 179 bp, Homo sapiens
  chr19:11545952-11546131
  hyper
cgctaggtggttgcgctccgcatctctcggttgccaggtaaccgcctccccgtctctctccactgtttccatggagatcacccgcgttccgtggctgacactgcgttctcattggctgaggctgcatagaggggcggtcccaacagtgggcggggtagagccgcgccgcaggacggagg

SEQ ID NO: 240116 - DNA, 104 bp, Homo sapiens
  chr19:11590395-11590499
  hyper
ccccgggatacgcccgggctgccgagtgggaatccgagggctcgggcgaggccgggcccccggggccctgggggcggggcctagatgggcgtgcccgggcgtgg

SEQ ID NO: 240117 - DNA, 358 bp, Homo sapiens
  chr19:11639727-11640085
  hyper
cccagcgcgtccccgcccccactacgaaaggtcatggcgccctggccctgcagctgggtccctccagggctgccctctcgcgctgccgggtcctgaagggcccgcctgcagcccagcagttcgcgttcgcctacccgcgcgcgacctacctactcacgcggccagccgcggactccaggccagctctgtcttgttgctgggcgctgccatattggcccagagagcgtccgggtcagggagctccagggaggtagcaaatcaagaaagctggtgtaataggtcccgcccacaacgcgaggtgggccaataggaaggcggaaggatctgggacccgcctcataacgagccaggcccagcc

SEQ ID NO: 240118 - DNA, 371 bp, Homo sapiens
  chr19:11689316-11689687
  hyper
agctgtctgcaggccctccacgggaccgcagcctgggagggcaggaggccctgcacctgcggccggtctgacctgctcctcacctccctgcctgcctcctccgtgctgggcgccgccgcgacacgtcccgcggacattcaggagtcccttcagtccctgcgagcgcggacccgggagagagctctcattcaacgctgaggccactggctcacagatctccccgggtcaccctgcgaagtgcttggtcccccccattcccagccctgcagcagcaacaaacgggaaggaagtgggtgacgaggacaggcagagacccctcccacggggccgcccgcatctcacctgccgtcgcggggcgggcgttgcggccg

SEQ ID NO: 240119 - DNA, 223 bp, Homo sapiens
  chr19:11750896-11751119
  hyper
cgggcgtcctgtccggtccccgcgcggcaactgcggcccaggttccggagtcctctctgggcagctccgcgtccgcagccccgcgtctccctagattgtgcggggacacgggagggtcatggggggaatcctcctcgggtgtggggttcatgtggaaggagcagcggtctgtggggtccccagttcctcctttgtctccaaggggctcgagtttttactgaga

SEQ ID NO: 240120 - DNA, 746 bp, Homo sapiens
  chr19:11805241-11805987
  hyper
aaagaaggaactggggaccccggaccgtagctccttccacgcatgaaccccgcacacgagtcgggattccccccatgaccctcccgtggcccccgcacaatctggagagacgcggggctgcgggcgcggagctgcccagagaggactcctgcccgggcccgcagtcgccgcgaagggacgggacaggacgcccggggtcccggctgccagcccagccccaccctgcggccgaggggaccgagggccgagctccgccagcggtactccggtccacagagcccggagtcgctggctgggaggccggggacccgccacggccagttccaaccagcccctcctcccgtctcgggatccctggcccctcacgctcaccattttccgaattcctccgtgtcccgggggcctctctgcggctcccacgaccagtgcaggtccctgtgtgacagaggctgccgcagactctccagagtgcctctcagcgacagagacaggagcccagcgaagtggcgtgtagaagacgccgcgggctttttcaatctcgcaccctcttagctgaagtgcgcctgattgacagttcccacgaccccgccccacggccctgattggatagtgcgacagatcccgccccctgacgactgagttacagaagcgatctcacgctggggagtggagactgatgaacgagttcttgacacagcccttggcagggcgggcttcttccctgcgctgtgacctgacccctccca

SEQ ID NO: 240121 - DNA, 132 bp, Homo sapiens
  chr19:11849763-11849895
  hyper
gtggagaagactccgcgggctctttgaacgtcgcaccctcctccctgcagcgtgcctgattgacagttctcacaatccccgccccctcatccctgattggatagtgctccaggtcccgccccttggtggctg

SEQ ID NO: 240122 - DNA, 649 bp, Homo sapiens
  chr19:11877700-11878349
  hyper
ctgtttatcaggttccactccgctgcccgagatcgcttcttccgttactcagtgcccgggggagggacctggcgcactatccaatcagggccgcggggcggggtcgtgagaactgtcaatcaggcgcactgaccggaggagggtgcaaggttcaaagagcccgccgagtcttctccacgcccctgcactgggctccgggttctgtcactgagagacgccctggaacgtctgtggcagcttctgtctcgctgggacccgcactgacagcgggaggcagagggaggaacctggacgccggaagccgggaaatggtgagtgtgtgaggtctggtgtcccgacgcgtgagaggagagactggttggaaccggccggaaccggctgtggtggcaccaggtcttccccgccggcgacaccctggcgcagctcggccctcggttccctcggccgcacgatggggctggggcggcagccgggaccccgggcgtcctgtcccgtccctgcgcggccactgcggccctggccctggaggcctgtctgggcagctccgcgcccgcagtcctgcgtctccccagattgtgcggctgtaaccggcacaggttcgcggcccgagtcactgcaccgagacgccgagggctgcagcagaaacagt

SEQ ID NO: 240123 - DNA, 788 bp, Homo sapiens
  chr19:11909169-11909957
  hyper
ccaacgaccagggcgcagggagtgagcttagccttagaaaggctgtagctaggattaatcagccgggctctgcagggctccgttacccagggcttaccctgtcactcagggctgaggggcggagcctggaaccccatccaatcaggggccctgggacggggccctgccaactgtcaatccggggaagcagaaggccgcactcagagtctctgcactcctttgttgctggggtccgttgcgttctgcatccagtccttgctgctccgagaggccccaggtgcctccgccacggctcctgtgacgctgtcacctgcgctgtgacctgctccggagtcataaagaggacgccgggacaccaagaagcagggaaatggtaaagtgcccggcctagcgtccagatacgtggaagaggggctgggtggaaccaacaggatcctgctgtggcgggacccaggcctccgctcgggcgaccccggcgattgggacccgcgtcccccatggcgtggcttggccctcggtccgctcggccgccaggtggggctgggcccgcagctgggaccccgggcgtcctgtcccgtccctacgcggcgactgcggccccggccccggagtcctctctgggcagctccgcgcccgcagcccggcgtcttcccagattgtgcgggggccacgggagggtcatggggggtcggatgtgtcccgcctttcttctgctaaaaattaaactgaggctctgttaacagttaaagagtttgttggagcaacagcgattccgagtgagaaacacc

SEQ ID NO: 240124 - DNA, 757 bp, Homo sapiens
  chr19:11924845-11925602
  hyper
gggctcaaggaaggcgctcgcttagagaggctgttcgcttagagaggctgctcgcttagagaggctgctcgctcagagacgctgtggccagaacaagtcagacatgatctgcaggacccggttacccagggcttctgctgtcactcagcacggaggaggcggggcctggcgccccatccaatcaggggtgctggggcggggccctgtcaactgtccatccggggaagggggaagggacagtcgccctccgtccattcctttagtgctgcgccgacagcggtcaggatctcggctttcttgcttcgagagggactaggtgcctccaccagagcttctgtcgctctgtaacctgcactgtgacctacactagtcgcgggagccacgcagaggacgccggaacaccctggaagccgagaaatggtgtgtgtgagggggctggcgtccgggcgactgggagaggggctggaatcggccggaaccggctgaggcgggacccgggcctccacgcggcgactccggggtcgtggacgcgagtcccctcggtcgcagggtggggctgggccggcagccgggaccccgggcctcctgtcccgtcccttcacggcgactgcggccccggctccggagcctaatctgggcagctccgcgtctccccacattatgcgggggccacgggagggatatggggggatcccgcctcggatatggggtttgttagaaacaagtgcccggtgccgcaaagaaaaccagcatctag

SEQ ID NO: 240125 - DNA, 128 bp, Homo sapiens
  chr19:11959364-11959492
  hyper
actatccaataacccgagtgcaggaagcagctcgtgtaagcttagagaagctgttgctagaatctgtcagtctggctccgcagggcctgatacccagggcttccgctgtcacttagacgtggggggcg

SEQ ID NO: 240126 - DNA, 1046 bp, Homo sapiens
  chr19:11998436-11999482
  hyper
ccagagtgcaggaaggagctcgcccttggaaaagctgtggtcagaatccgtctgtctggctctgcagggcccgatacccagggcttccgctgtcactcagacatggggggcggggcctagcattccatccaatcagaggcattgtggcgggtccctgcccactgttcctccagacactgagggggtcgcattccttacctcacctttgtccctgcgcgggctgcggctgggatccggtctttccagccccgagagggacctggttcctctgcccaggcttctgtcactctgtcacctacgctatgccctgctgtagtcacaggaggtgtagagaggaccccgggacatctgaaagccaggaaatggtgcgtgtctggggccgggtgtcgtgagacgggggaggggctgcctggaccgaccggaaccgactgtggcgagaccctggctttcctgcgggcgactttgggatctgggaccgagtcctcctggagccgctcggccctcggtcccctcgactgctcggtgtggctgggccggtagccgggacaccaggcgtcctgtctcgtctctgcgcggcgactgcggttccagagccctctatgggcagctccgcgcccgcagccacgcgtctacccagattgtgcgggggccacgggagggtcatgtgggtgatcccgactcgggtgtggggttcgtgcttgggaggagcagcggtctgtggggcccccagtgtccactttttctcctgttaaaaattaaactgaggaacgttaacaaagagttcatttgagcaaacagcgattcacgaatgagacacacccagtcctggcttgtggtttgtcaacggaaaaagccaaactatgtaaaataaagaagtttattcggagccgaataggagagaccttggccgagggaaaaacaaccccaagaagcctggagtaagtggtcccgaggcggctcaagacagtttggttttattcattttagagagacaggaattgcagggaaaatcatgaattagtgcctggaaggtgtaatttccttag

SEQ ID NO: 240127 - DNA, 652 bp, Homo sapiens
  chr19:12075734-12076386
  hyper
atacccaaggcttccgctgtcactcagaagtgaggggcggggcctagcattccatccaatcagaggtgccggggcagggccctgcccattgtttatccaggcacagagtgggtcgcattcctgtcctcacctttgtccttgcgcagccggtggttgatatccgctgtatccatccccgagagggacctggtacctctacccaggtttctatcgctctgtctcctgcgctgtgcccttctgtagtcacaggagctgtagagaggaccccaggacatctgaaagccaggaaatggtgcgtgtgcatagccggttgtcccgagacggggtagaggctgcctggaaccggccggaaccggctgcggcgggacccgggcctccctgcgggcgactccagggtctgggaccgagtcctcctggagctgctcggccctcggtcccctcggccgctggatggggctgggctggcagccgggaccccgggtgtcctgtcctgtccctgcgcggtgactgcggccccgccccggagccctctctgggcagttccgcgcccgcagccccgcgtctccccagattatgcggaagccacgagagggtcatgggggaaatcctgactcgtgtgtagggttcgtgcgtgggaggagcagtggtctgt

SEQ ID NO: 240128 - DNA, 805 bp, Homo sapiens
  chr19:12098301-12099106
  hyper
ggctggaatagcagcgaccggctctgcagcgccctgttacccggggcttctgctgtcactcagggctgagggggcggggtaggatgccctatccaatcggggtgctggggcggggccctgccaactgtttaatccgccggaaggagggcgcagcattgccggtcttctcattgcctggctgctagaggaaacccgaagtcgggattctttctttcctgctctgagagggaccaggtccctcctccgtagcttttgtctctctattgcctgcgccgtgtcctggactgctcacgggagttctgcaggagacgccggaatatctggaagctgaaaaatggtgagtgtgcggagccggaaaccccgaggtgggtttgggggttaggggacggtctagtcagaaccgcggaatcggaacgcgggcctccatgttgcgactcgggggtctgaggcccgagttcccctggcgcagctcagccctgggtccccttggcctcagggtgggtctgggcggcagtcgggaccccaggcgtcctgtcgtccctgctcggcgactgggacccctgccccggagctctctctggggagctctgcgcccgcagccgcgcgtctccccaaattgtgcggaagtcgtggagggaatcccgcctcgtgtgtggggttcccagtcgcacgtttcttctgttaaaaattaaactgagacactgttaacaagtaaagagtattttgggtaaacagccaatcatgaaggagaaacaccgggtcatgacttgttaacggaaaaaaaaaaccaaacagtaaaataact

SEQ ID NO: 240129 - DNA, 88 bp, Homo sapiens
  chr19:12146829-12146917
  hyper
gggctcctatgacagactaatgcctctgctgatctgacaggaagcatatctctggcgataatgcccgctggctcgcccgccagccgct

SEQ ID NO: 240130 - DNA, 1016 bp, Homo sapiens
  chr19:12163011-12164027
  hyper
gtcaggagctgcctcgggattgcttactccagacttcgcggggttgtgtttccctcagccgaggtctctcctattcggctcagaataaacttattctacacgatttgggtttttccgttaccaaaccacaagccaggactgggagtttctcattcattaatcgctgtttgctaaaataaactctcattttttaacagtgcctcagtttaatttttaactggaaaaaaaaaggaactggggaccccacagcccacagctcctcccacacgaaccccacacccgaggcaggatcccccatgacccttccatggtcaccgcacaatctggggagacgcggggctgcgggcgcggagctgctcagagagggagccggggccggggccgcagtcgccgcgcagggaccggacaggacgcccggggtcccggctgccggcccagctccacccagcggccgaggggaccgagggccgagctgcgctagggggactgtgtctggagcccagagtcgctgcaggggggcccgggccccgccacagcgggttcctctcggttccacccagtccctcctttcgccttgggactccccagcaccgcatgctcaccatttcctggcttccaggtattctggcgtcctctctaaaggtcccgtgaacagtgcaggtcacagcgcagtcgacagagcaacagcagctacggcggaagtaactggtccctctcggagcaagaaagccccagaccttaactagcgcgagcagccctaggagtgaagagagcgggaatgcaacctccccttccctggaggacagtggcagggccccgccctagcgcccctgattggataggggtctagactccgcccccttccctgagtgacagcagaagccccgggtaactgggcgctgcagagccgaagcgactggttctggccacactttccaaggtcagctccctccctccctcccacctttacttcgaatatttgccttcggccaaacttgctccgaactgctagaagg

SEQ ID NO: 240131 - DNA, 711 bp, Homo sapiens
  chr19:12175440-12176151
  hyper
gtcactcaggatgcagggggcggggcctggcgctccacccaatcagagtcgccggggtggggcccggccaactgtttatccgcgggtcacattgccgttcgcctcagtctttggcccctcccgccgggtgaggttggcaccccgtttttcctgctctgagagggaccggttgccaccgccatacttctgtcgccctgtcgtctgtgttgtgactgctttggacgtgggagtcacctgaaagccaggaaatggtgagtgtgagcccccgctgggagtcccgagacttgggggagggtaggcggaggctggttggaactggctggaaccggctgtgccgggacccggacctccccgcggcgactcgaggtctggggcccgagccccgctggcgcagctcggccttcggtccattcggccgccgggtgcggctgggccggcagccgggacccctgggcgccctgtctcgtcgccgcgcggcgactgcggccccagcccgggagccctctctggacagctccgcgcccgcagcccggagcctctccatattgtgcggggccacgggagggtcatgggggcaatcccgccttgggtgtggggctcgtgcgggaggagctgcgctgtgaggccctcagtgccccctttctcctgttaaaacttaaacaggcccggtgctgggaatagaggcgtgagccaccgcgcctggcctagcgt

SEQ ID NO: 240132 - DNA, 680 bp, Homo sapiens
  chr19:12203013-12203693
  hyper
tcagggctctgaaggcgaggcggggagcacggtccaatcaggagcgccggggcggggccctgccaacttttttcggggaaggagacggctgcaagcccgcggtctcttgttgctgtgctaacgaccgttggaaccctctttctggctcttggaacgctcggctctgagaggctccaggtttctccgccagagctcctgtcgctctgtcagttgcgctgtgttcctctctagtcacaagagccttggggaagacagttggaagctcagacatggtgagtgtgtggggccaggcgtcctgagacgggggcgaagggcttcttagaacctgctggaaccggctgtggcgggacccgggcctccccgcggcgactccggggtctgtggggctgggccggcagccgggacccggggcatcctgtctcgtcccttcgcagcgaccgcggccccggacccggagccctctttgggcagctccgcgtcttcagccgcgggtctcctcagattgtgctgggccatgaggaggatcatggggggaatcccgtctcgggtgtagggttcttgcgtcagaaaagcggtggtctgtggagtccccagtcgtcttttctcctcttaaaagttaaaatggccgggcgcggtggctcacctgaggtcaggagttcgagaccaacctaacatggaga

SEQ ID NO: 240133 - DNA, 454 bp, Homo sapiens
  chr19:12250827-12251281
  hyper
ccagccgcaccctgcggccgaggggacgcagggacgagctgagacagagggattcgggtcccagatccaggaggcgcggcgaggaggcccagatcccaccacagccgcttccggccggttccacccagcccctcccccgtctggggactccggccccatacactcaccatttcccggcttctgggtgtcccggtgtcctctctagggctcccgtgaatagtgcgggtcacggtgcaggcggcagagcgacagaagttgtggcagagggacccggggcctctcggagtaggaaatctggtatcccgacaacaacctgcatagcaacaaaagtagaagctggaatgggcctcctccttccggacggaccgttggccgggctccgccccggcgcttctgattggacaaggtacaaggccccgccccctcagaactgagtgacggcagaagccctggg

SEQ ID NO: 240134 - DNA, 540 bp, Homo sapiens
  chr19:12305760-12306300
  hyper
aatcagaggcgccacgtggaaggtgggtggggcaatgcggcataaaagaggtgggcgtcgtacgtcgttacgcagcgcggttgctgggcacctcgactatcacctgaccgtagtaatatctcccgctacgcgcgttgtgaccaatgctgcatacaggagatgagggaggacggccagacacctggaagccggaaaatggtgagtgtgcggggccggtgtcccgagacctgaggagggacaggttggaaccggccggaaccggctgtggcgggacccggggctcccctcggcgactctggggtctgggacccgggtccctctggcgcagctgggccctcagtgccctcggccgcagagtggggctgggctggcatccgggaccccgggcatcctgtcccgttcctgcgcgacgcctgcggccccggcctcagcctcggcgccctctctgggcagctgcacgccgcagcctcgtgtctccccagattgcacgggagccccgggagggtcatggggaggattccgactcgtgtgtggggttcg

SEQ ID NO: 240135 - DNA, 592 bp, Homo sapiens
  chr19:12444058-12444650
  hyper
tccgaggccgggaccgcagttgccgcgcagggaccggataggacgcccggggtcccggctgccagctcagcctcactctgtggctgaggggaccgagggtcgagctgcgccagggggactcgggtcccagaccccggagctgacggcgggggaggcccacgttcgccgcggccggttctggacggttccaaccagctctttcccacttttgggacgcctgaccctgcacacgcaccatttcccggcttccgggatgttccagggtcctccctctgcctcccgctgccagtgcgggtcccactgtgacagaggctgccacagacgttccagggcgtctctcagcgactgaggctacacagacgttccagggcgtctctcagcgagcgactgagtctagagctgagcgcaggggcgtgaagacgccgcgggctctttgaacctggcaccctactgccagccgtgcgcctgattgacagttctcacgaccccgccccatagctctgattggatagggctccaggtcccgccccctgggcactgagtgacagaagaagcgatcacacagtgctgagtcgagcgggatgaacgagtt

SEQ ID NO: 240136 - DNA, 1240 bp, Homo sapiens
  chr19:12475620-12476860
  hyper
gccccactgcctcgcgggggccgccttcctgagagtcaggtcacagaagacactgaccgccggcttctgcattgtgcctggggataagatctcggagagctgctcgagttgcccaagttctttctcagatcttgaattccaacggaaaggctggcgccaagcagggtgaaaaccccacgagggaacccactcagcaggagaatgcggtttcttcacctcccgtcccaggattcgcctgtcacttccccaccaaccagcgaccccacacttcagccgcccctgtccagacccctaaacacccccatccccaaacctctcatggaggcggaactggggtcttctctcctctccccctattaaactgtttctgctgcaggccttggagtctcggtgcagtgactcggaccgcgaacctgtgccggttacagccgcacaatctgggaagacgcggagctgtgggcatggagctgccccagagagggcgcgggagccggggccgcagttgctgcgcagaaacgggacaggacgcccggggtcccggctgccggcccagcccccagctcccaccccgcggccgaggggactgaaggccggctgggccaggggaactcgggtccacagaccccgcagtcgccgcggggacgcccgggtcccgccacagccggttctggccggttccaaccagtccttcgccctgccccaggacgccgggccccgcacactcaccatttcccggcttccgcggtgtcccgtgttctccccaaggttccccgctgccagcataggactcagcgtgacagtgcctgccactgacctgccagggcttctctcagctacagagccaggagcgggagctcagaggggtgtagaaagctccaccctcctcccggcagcgcgcctgactggcagttcccaagaactcgcccccaacactgattgggtagagctccaaattccgcccccccagggaactgattgacagaagaaggatcttacacggctgagtggagcgagatgaagcggttccagacacagcccttgatagggtgggcttcctcccttcgctgtgacctgacccctcccaggggacatttgcatttaagcggaatttcctgcctgtactcaatgggctcttcctgctccttcttcctggacggggacccacaagtgtgtgctgggaattcgagactcactgcccagtggagccatcccctggcctcagagcggtaggggaggccca

SEQ ID NO: 240137 - DNA, 704 bp, Homo sapiens
  chr19:12551184-12551888
  hyper
agcagaaaggctggcgccaaccaggttgaagaccccacgagggagccctctcagcagaatgcggtttcttcacctcctgtcccaggattcacccctcacttccccaccaaccaaggacgctacacccagccgcccccgtccagaccccaaatccctcagggaggcggatctggggtgtcctcccctctcctcctgttaaaccgtttctgctgcagccctcggcgtctcggtgcagtgagtcgggccgcgaacctgtgttggttacagccgcacaatctggggagacccggggctgcgggctcggagctgcccagagagggcgccggggccgcagtcgccgcgcaggaacgggacaggacgcccggggtcccggctgcatgcccagccccaccctgcggccgagggccgacctacgccagggggacccgggtccgtagatcccgaagtcgcccttggggaggcccgggtccagccacagccgattacggccggttccacctaacccctcccccgcctcgggacgccggcccagcacacgcaccatttcccgacttccgcggtgtcccaggtcctaccgacagctcccgctgccaatgcgtgttccagccagacaaaggctgcctcagaacttccaggtcgtctctcagctacagaacccagagccgagcgcaggtgggtggagcagacgccgcgggctttttcaa

SEQ ID NO: 240138 - DNA, 754 bp, Homo sapiens
  chr19:12595000-12595754
  hyper
aggctggaggacacggtcgtgggtttgagatctggcttcccatacacttggaaaccttgagaaacgagtcctcccttgggaagaaaagagggactgaggaccccacacaacactgctcctcccacgcacgaaccccacgaccgagacgggattccctccatgaccctcccgtgccccagcacaatctggggagacgcgaggctgcgggctcggagctgcccagagagggctccgggactggggccgcagtcgccgcgcagggacttgacaagacgtccggggtcccggctgccggcccagccccatcctgcggccaaagagaccgagggccgagctgcgccaggaggactcgggtccacagacccgggagacaacggcggggaggcctgggtcccaccacagccagatccggccggtttcaacccgcccctctctcccatctcaagacccccagccccgcacacttaccatttcccagactctgggatgtcctggtgttctgtttacctctcccgcggccagcacaggtcctacctccacctgaggcccttcctccacctgagggccttctggggtgaggagaccccagagcggagcgcagcggctggtagccacgccctcgccgtttgcgcagcgcccctccgcccgccttcccggcggcgcccctgattggacattgcactcttggacccgccttcgttgcctgagtgacagctagtagggaagtcgcgtctctaagcaacctgcattcgtc

SEQ ID NO: 240139 - DNA, 683 bp, Homo sapiens
  chr19:12605963-12606646
  hyper
cacacctatgtccccgttcagaagcttcttcggtaaacgccagtgtccggtctgagggcctttatatctagcatataaagttctggtataatgcaaatgtctctggcaggacagtttcagggacaaaagtggaagctggatcgctcagctacctgacctccgtctgagatgtgactcaggcaacagggggtggaacctcacaaactgtccaattggagacgccgccggagcggtgggtggggccgccctgtacaaaggcgcgtggatacggtggcgcgatttccagtttgtgtctctcctgcctcgaacgtcgctaggtggctctgccgcagcctctgtcgctctgggacccgcactggcagagggagtcgtagttagggggtggggacaccgcggaagcccggaaatggtgactgtgcggggcctggaatcccgagacctgaagagctgctggccggaaccggctgtcgcgggaaccgggcctgcccgcggccactcctgggtctgtgaacccgagtccccctggcgtagctcggccctcggcctcctcccgccgcagagtgaagctgggccggcagccaggatcccgggagtcctgtcctgtccccgcgcggctactgaggcccgggtcccggagccctgtgtgggcagctccatgcccgtagccccgcgtcttccaagat

SEQ ID NO: 240140 - DNA, 248 bp, Homo sapiens
  chr19:12662263-12662511
  hyper
aacccaaacgcagcggacacgaaacaggaagaccccgcggagttgttgaacattgcccctgtcccccttgcagagttcctgattggatggtttgcaggttcccgccccagtgcccctgattgggtgatgattcaagtcctgcccccttggtactgagtgacaggagaagcaatgcggtatgtggctgagtaaagacagattgacagggtcttggccactgcccttcgcgggccgggcttcctccttct

SEQ ID NO: 240141 - DNA, 73 bp, Homo sapiens; identical to SEQ ID NO: 205209
  chr19:12721074-12721147
  hyper

SEQ ID NO: 240142 - DNA, 238 bp, Homo sapiens
  chr19:12721435-12721673
  hyper
tggacttgctcctcgaggggtcgctccatctggaaactgagactggaattcctgcgcatccctgtccccgcatccagaaacactgcaggaagacttccgtgtccgacccgagatccggaacaatttctgcttcaacacaattgtccacggagggcaccagttccgtcccaccggcggaagcgagatctgcctagctactagacctgctgcctagctgtcattcggacaaaaaggggcg

SEQ ID NO: 240143 - DNA, 354 bp, Homo sapiens
  chr19:12750861-12751215
  hyper
caccctactccgctcacctgcgacggcagcagccagtccccacgggcggaggggacctcatgcgacattcagcccgcgagattctcagagactgctcgcccgcaacacgcagtaacgatctcaggagagcccatgatggggcggcgcgtgtcgtagccgagaagactctgtcatcgccggcgacctcctggaactctctcttgcggtttgcagccagatcacttcccatacacgcggcagccaagctcaggggatggcatcagactgaccctaggtggcgctcgaacacccgccggacctcaccagacaggcactttccccagtctacaccgcctggttcgggtcccacatgaa

SEQ ID NO: 240144 - DNA, 267 bp, Homo sapiens
  chr19:12777553-12777820
  hyper
aaggccgggcaaacgccccgcccccagacccggccgggccaatcggggtggggggcggggccagggcgcggtctggaggctcacgggagagaggctgtagccctgggcaatcccgggggtcgttacaggaaggtaggaaaatgccaccctcagggcactggttgggctaaaggtgacactggcgtctcacgggctatgaagacggaatgcctcttaatgccggaattccaagacggaatgcctcttaatgccggtaggagcagaagt

SEQ ID NO: 240145 - DNA, 105 bp, Homo sapiens
  chr19:12806992-12807097
  hyper
ccactgggtagggcgcgcgtacgcggcgtagcgcgcgtagcctccaggtgacatggtcagacacgaggtcgcggagcgcgtggcacacccgcgacaggacgtgga

SEQ ID NO: 240146 - DNA, 261 bp, Homo sapiens
  chr19:12848078-12848339
  hyper
gcctagaccgtaccgatgtgttcattaggtagggggaacccttggaaaattatagaccagaggttgacaaagtgaaccctggaagcaaagaatagtgaaaatataatttatatttctcctaaaaggcaagtaatgaggaaattaactcatgctcctagcttcgctaggaatgtgatagagaatttcccctgtaggttcttcgtatggtgcgctccgctggatcacgtgagccagttccaaaatggcggcaggggtggccgg

SEQ ID NO: 240147 - DNA, 86 bp, Homo sapiens; identical to SEQ ID NO: 205211
  chr19:12885894-12885980
  hyper

SEQ ID NO: 240148 - DNA, 237 bp, Homo sapiens; identical to SEQ ID NO: 205212
  chr19:12899529-12899766
  hyper

SEQ ID NO: 240149 - DNA, 39 bp, Homo sapiens
  chr19:12900322-12900361
  hyper
gggcccctgactcacatgagtgagtggggggtgttgggg

SEQ ID NO: 240150 - DNA, 251 bp, Homo sapiens
  chr19:12902439-12902690
  hyper
gctggctgctacccgcccgcgccagcccccgagaacgcgcgaccaggcacccagtccggtcaccgcagcggagagctcgccgctcgctgcagcgaggcccggagcggccccgcagggaccctccccagaccgcctgggccgcccggatgtgcactaaaatggaacagcccttctaccacgacgactcatacacagctacgggatacggccgggcccctggtggcctctctctacacgactacaaactcctg

SEQ ID NO: 240151 - DNA, 121 bp, Homo sapiens
  chr19:12912810-12912931
  hyper
cgtgggtaatgcgcccgccgcagactccgcgcacgactccgcctgggagcgcgttgggggccgttggagtccagcatggcgcggaccccgggggcgctgctgctggcgcctctgctactcc

SEQ ID NO: 240152 - DNA, 36 bp, Homo sapiens
  chr19:12917228-12917264
  hyper
tgcaaagtgaccccgtccaccgaattccccaagctg

SEQ ID NO: 240153 - DNA, 125 bp, Homo sapiens
  chr19:12943483-12943608
  hyper
ggactcagcgagacggcgacacaaatgtgccgacaaacatatacagagacagacagagataacccaggcaaaggcgcggacttgaggcgacaagctcctggtgaatacccggacccagcctcgcc

SEQ ID NO: 240154 - DNA, 221 bp, Homo sapiens
  chr19:12946214-12946435
  hyper
caggttgggtccgcgccgtcgggtttctgagaaaagggaggaaagaggcggggcctgcacggtgtgtccccgccctccaggccggcgtcaactctcattggctcagcgccacgcgggactttaaactcccgctcgagacaccgcccccaacgcggaatgcttccactcacccacccacccactcaaccccaggcttgctctgggtccggcgatccctgtcg

SEQ ID NO: 240155 - DNA, 519 bp, Homo sapiens
  chr19:12946881-12947400
  hyper
atatgtagacagcatcctgagttcgaatgccctgtctgcagtgtcaactattaatcctgtgcgggagaagcggaatccacttggccgagcggctctgcagctgagattggaggtggcgtctgtttacactgacgccaaagacccgaacttccgccgctccagtttgaccctttcttcgtccctagaatgtttgggggcgctagcgggtggggctgggttccaggtcttcttcgggtggtgcttaaaagccctccaggggcttaccctccaaggccggttacccggatctggacaccctgggctctgtggccagaaaatccaggtcttgatttcgcttgggccattgcagacacgcagccaggtcgactggtcctcattcactccggtcatgcaaagacagagggaaaacctggtttggattatcggtcacccgtggctcgggagggcagggctgccctttggccccgcctatatgtttgtccgttgtacaacggggtgggaggacgctgtggcccatcc

SEQ ID NO: 240156 - DNA, 771 bp, Homo sapiens
  chr19:12951463-12952234
  hyper
gtttggataaggggcggggccatgcttgtgtgggtgtggtcagtcgcagagggacggtcattggggggcggagactcaggtgggcggagactcaggtgggacggacagaaaggaggagtcgtacctgaggggcggggccatcccagatgaagccagaatcgtcttggaaggggccaggctgactcggcaacgaaaaaatttagagaggcggggccacaggcgaaggggcgtggtctccccataataggcgggactagactaaagacaggacatgctgctgtttgcacgccgctttagggaacgagagacctgacaggatttgccccctctttctctcataggcagcagtcccctggacagcccccgaaacttctcccccaacacccccgcccacttctcgtttgcctcctcccgaaggtgagtccctcccctccagggccccagaaccctgggcagaccctccccaaccactgtctgggccgccatctgttctcctcctaattgcacccgagctggggcctgaggggaccagcgagtgccccaaggtctcagcgggaaggagcgcctagccttcggggcggggcctataagaaggcggggtccaatcgccgatctggaacggggaaggcggtggggctccctttgcggcaggtcgaaagcgcgtgcgccctgggcgcggggtcttagtctctccgagccttgctctcctggccaggtgtttccatagcaacaggacggggcagccaagatgacgtgcgcaagcgcagattg

SEQ ID NO: 240157 - DNA, 303 bp, Homo sapiens
  chr19:12978417-12978720
  hyper
gcggcctgaccctgcgtgagaagacctggagagggggctctccggagatgtgagcaggggaatggcggagtttgggggcggggtcgaagggggcgtgtcttccataaccacgccccctccatgcagcaagcgattctccgcgtccgaggccagtttcctggagggagaggccagtccccctttgggcgcccgccgccgtttctcggcgctgctggagcccagccgcttcagcgccccccaagaggacgaggatgaggcccggctgcgcaggcctccccggcccagctccgaccccgcgggatc

SEQ ID NO: 240158 - DNA, 460 bp, Homo sapiens
  chr19:12991904-12992364
  hyper
gcagccctctctgcgccgcctccccggaccctctaagagctggcagcttgtagaccacgaacctggaggtcggagaatgcacagaaataggagagagggaagagaaggcaccccagggttccccgaggaggtagccatcccggttgagtgaccgcagccggaccccggggcgatggtaggccccccgctgcgcactcaccagtctacaggctgcccggagtccccgtagcaggtcagggccccggcggggacgcacagcagcgctgccagcagcagcgggatcatagctgctatggggctgagatccaggaatctgtgtcgggactgcggggcgctgggttacatcagaggccaggactggcacctggcgcctttcacttccctaaacttgcctgggaaccggggcggggacatcacgagggtacagactcctcccccgagacgcgatgctgcgttttgg

SEQ ID NO: 240159 - DNA, 174 bp, Homo sapiens
  chr19:12995812-12995986
  hyper
ctcgtccgagcgcgcgaatctccagccgcagccttcccacgtgcaggcgtatggcttctcccctaggggacaaggaagccataagcgccactgtctgcccagtcatgtccccgggtcccctgcatctggccacacccctttactcagcctgggctgggactaggatgaacaaag

SEQ ID NO: 240160 - DNA, 40 bp, Homo sapiens
  chr19:13002468-13002508
  hyper
aaggcagtgagtgcgctgtgcctgcggggccggagaaaag

SEQ ID NO: 240161 - DNA, 49 bp, Homo sapiens
  chr19:13044624-13044673
  hyper
gggctcaatgtgtcgtcatcttgagtgtggcgacggagccgcaaaaggt

SEQ ID NO: 240162 - DNA, 61 bp, Homo sapiens
  chr19:13067540-13067601
  hyper
gcggccaggtgagcgtatacataaatctacaacatgcagatgctgcgacgtgaccccgaag

SEQ ID NO: 240163 - DNA, 54 bp, Homo sapiens
  chr19:13068137-13068191
  hyper
cgggggagggcggcgaaggggatagtatgggttttatacgtttccaagtataac

SEQ ID NO: 240164 - DNA, 60 bp, Homo sapiens
  chr19:13106112-13106172
  hyper
cggtgtgcgcccccgcgcgcgcgtgtgcgtgtgttcgtgtgtgtgtgtgcatgtgtgtgc

SEQ ID NO: 240165 - DNA, 1374 bp, Homo sapiens
  chr19:13208374-13209748
  hyper
tggactgctccggccgcgggtctccccgggcgcccctccctggggcccagcacccctcctcgccccatccccgtccgggtacgggggcgcggcaggggtccccggcccctcccccgcagaggtcaatgccaacgaacaaacgtcccctccctccctccctctccgccccgagcgcccttctttgagccagacgccaacttgaccctcaccagcattatcaggagcgcgctcagcaagttggtagtttcctcccccctttcccggcgcccctcccgcccccattcaacatctctcatcctatccccgaccccctccggggaacaccgggaaggctcgacgctccaggacaggaccagccacgcagacaggtcgatttgcccaggcccgcgcccgcacgcacgcacgcacacggccccgcacacagccccgccccaccccgcaaccagccctgtcgactgccttatacacccgcccccgcgctggccggccgacctagtgccttgttctcacccccgtgctggcggagcggacgccgcgctctgggtcccagaggggccgggtggctcagacgacccaccactcccccaccctgaccgtgctgaacagacccccccacacgagagaaaataaaggagcaataaagtcacgagaactttcgtcccccaatcgagagcccgaggggcaccccagccccgcctctgctcccccccaccccacccaccctcggggcgcccccctccccccgcaagccagcctgggccagccccgcttcggcccctcccgggagatccgtgcgcccgaccagcaccagcatcgcggaccgcaaaggccgcccgtcccgtcaaacaagtttcttcttaggctaagaaacgcagtatatacgagtatctctatatatagtactaatggatttggtgtgcttcccccttagcgtccccctccctctgctcctcctccttcagcctggtctccccctcttctctgccctccacccccgtctctgcactgagatacataagaaacaagggtagtttactgtctgttttgttttctgggttttcagtgtcctagcggaatgcaagtaggcagccagcccgtctgttccctctccgccccgccccgccccgcccccgtcactgcgcttctgttataccatctttgcctgactctctccggcttctccattgaatggctaatgtgtatgtgaaataaagaaataaagaaaaacaaacgcgagagcgcctgacccttcgctaacgcgaccgtgcgggactgggtcggggtcggtagggtgcgtccccgacttggattctgcgcctctgtccaagcgccgggagcgcagcagacgccgtcgacgagcgtctgcccctgggt

SEQ ID NO: 240166 - DNA, 522 bp, Homo sapiens
  chr19:13209966-13210488
  hyper
gatgatcacccttccggacccccgagaccttgcccctgacgtcttcactggtccttcttcgggggagttcgctcccgaacatgcgcagcacgtccactgccctttccttgacggccctgggccgagtccctggtgccctccggctcagaggtgctgccgcgtgcggtcaccgcacctctgggctcaaagcggtttgctccatcttgatgggccgggccgctccaccggggctgccgtcggggtcggccgggggcgcgggctgcgagcgcgctgccgcctcggccctgcgtccggatccccggcgggcgccgtcgtctgggacccggtgcaccggccgtttgcgaggcccgggaggggtggggcctgcggccagagctgcggcttggtcgcgcagcagccgcaccaggaagccgatgtacttcatggctaggcggagcacctcgttcttgctcagcttccggtcgggcgggtgcgtcggcagcagcttcctcagctcggcgaaggcgccgttaacgttctgct

SEQ ID NO: 240167 - DNA, 156 bp, Homo sapiens
  chr19:13213414-13213570
  hyper
gtgtggtttccagcgtcaggccaggctctgctgtctcgcgagggtccggcctcaatgctccaggccccggcgttgggccgcgcctcctcgtgggcctcggaaggccaggatagccgaggtctccgcgtaggtcccccccagggaaagtgagcggct

SEQ ID NO: 240168 - DNA, 194 bp, Homo sapiens
  chr19:13260761-13260955
  hyper
ctgcctctgcccccgactgcaaacccaaacgcatgggggactccggagacccctatatacccctgcgtgcgcctcccactctgcaccccgacggccttgcccagcccgccgggcacgctggggccggcacccgggcactggctggcttgggtacagagcaccctccgccctcccccgtcgttgtcactcaccct

SEQ ID NO: 240169 - DNA, 167 bp, Homo sapiens
  chr19:13262833-13263000
  hyper
gaatggagccattcgaacaattctgcatcctatttttggaggaagtggaattagtatttcttggagagacggcgcgtagcggagggtagggcggagattttctatctgctctgtctctgcattgctgggtttccagctcccaacctaaccccgcctccccgaacgcg

SEQ ID NO: 240170 - DNA, 157 bp, Homo sapiens
  chr19:13264323-13264480
  hyper
cgcctgctgtgccccgcgccccgccaaagtcagccgcaaacgacgcagcagcagcctgagcgacggcggggacgctggactggtcccgagcaagaaagcccgtctggaagaaaaggaagaagaggagggagcgtcatccgaagtcgccgatcgcctg

SEQ ID NO: 240171 - DNA, 326 bp, Homo sapiens
  chr19:13264660-13264986
  hyper
gtggccttctgaggaccccgagcggcgctgccggagcccagagcgcgcgtcgaaccgtcggcccgagggcgcagacctgaggcgaggccacccccctccatcctgggggaagcgcccgcgaaaaccgtggagagaagccgccgcccgggctgctgagaggcccggagagggactctgtccccggggagccatcgccttcagtgtgcagggacggcaccgaggagtctgagccgggggcgcgggcgccttccgcagagacctgcgcccacaggtgctgtcttagtggactgggacgtgaacctttcgctctccttctggactgggag

SEQ ID NO: 240172 - DNA, 473 bp, Homo sapiens
  chr19:13265775-13266248
  hyper
caggggctggcagccgctcgctggggccccaagaaccggtctgaccggttaccacgtgggcgagagagggttgggcccccttttccttgcccgggcattccctaactggtggagccccgcctcccccagatttgggggttcccttgaaattgtcctacaactccgggacagggagatcggggctttctgagttgagacaatagtgctaaacacactgccccaagcggagctggggatcgattgcacgcactttgaagccttgaaaggtggtagatctcgcccccaccccctagaccaaactgaatcagctgtggccggggccctacagtatcaggtggagctgagcgggtgagctttgaagggctctttagtccccagttcccgtatcttcctcgaggaatcgttgtgtgtctcaggcagggacgtgcagcctcagtttcctcatctgtgaaatgggcctctaagcagcttct

SEQ ID NO: 240173 - DNA, 65 bp, Homo sapiens
  chr19:13266428-13266493
  hyper
caaaggagtcgcaggtgcggggagtggtggcggcggcaggcgccgggaaagcgctcgccccgccc

SEQ ID NO: 240174 - DNA, 169 bp, Homo sapiens
  chr19:13388248-13388417
  hyper
tagtggattagaagcggccccagagaagttcagggctgactgtatccttcttggtgatggatctaatcccccagtacccttgctttcctgggcatcctgggcgagaaatagttgctacgtggtttttttaaacactggggccaacttcctgccacggcatctcttcctg

SEQ ID NO: 240175 - DNA, 922 bp, Homo sapiens
  chr19:13616672-13617594
  hyper
ccagcctggaagaggggaggcggagggaggagggggaggcgcagctgctgctggggttcgggcaaaaggatatggccattcggtgatctttttggcgtattttctcaccacgttgtcttcgctgaagaggaagagagaccggttaaccgtgaggcagttctgtcggacggggatggggttgtagagtgccatggtccgcgctctctgcgccattgactgcttgtacatcctttgcgccccgggctgcccgccctgccggctgcccccggctcctcgcccgcctccgctgcccacgaccaccccggcggctgccccggagcctcctcccccgtagcgggccggcatctcgtctccgaagcgggccattctgcaaagagcaaagggctccgggttacgctgcggcgaacgatgcggaagacgccgccgccgccgccgccgccgctgatgctgaggctgccggggctgggagcgcggcggctggagctacgactgcggagacgctccacggcccagcccatcgggcggcggcggctcggcgcctcgggtcgggggctcagaaggcggctgcccgggccgagccggggatagcagctcgggacatcttcctggctgaccccggagaaggaggggcgggaggagggtgcgggggcggggcgcgggggcccggggaggaggggggaggggagagagaagcgaggcaaaaaataaccgaggaaggaatccaggcaatccccagtccacccactccggaaaaaaaaaaaaagagacagttaaaaaaaaaaaatccacccaacgcacaccccctttaagacgcgaacggtttgcaaaggacgccccccccgggacgcagtggaagcttcaaattcctccgaggtccgggtcaggctggcatcttgcaaaaggagtgcgctcggcccattaa

SEQ ID NO: 240176 - DNA, 80 bp, Homo sapiens
  chr19:13617904-13617984
  hyper
tcctgaatcaccaacggctgcctcttctgctcccggaggaagtgtgagtgtgtatgtgcgcacagcgtttcgctcaatgg

SEQ ID NO: 240177 - DNA, 204 bp, Homo sapiens
  chr19:13618206-13618410
  hyper
gaaaaaaaaatgggcgcaaaggtctgaaccactggccagcaaacggaaaaggggagcaattgatgagtttaacagtagaaggacccacccagagtgtcgacacatgagggcccgcgaccaatcgtggaggctcgtggaggcgcgggggtaccgggctcagcggagtttgtgggggagagaggggagcgtcgcatggttgggagg

SEQ ID NO: 240178 - DNA, 195 bp, Homo sapiens; identical to SEQ ID NO: 205233
  chr19:13954425-13954620
  hyper

SEQ ID NO: 240179 - DNA, 97 bp, Homo sapiens
  chr19:13961611-13961708
  hyper
acttcaaggctccttgcctcagtttacccgtcagtaaaagaagcgacactggagggtgcagtaacccaccactggcatttaaagcagctgagatgat

SEQ ID NO: 240180 - DNA, 690 bp, Homo sapiens
  chr19:13983608-13984298
  hyper
gctgcgagagagggcgccccactccagctccagacagaggggtgggaacgtgaccccgacccggggcgggtgagagggcgggctctggggaaagggctctagaaggtgccgggaggcgggaggggggcttcgggagggcgagttagccgggatcgggcttgaggggccctacgaaattcggtttgggggcgtgcccggtcggggcggaccttagtggggggttgggcttcgtgggggcaggacgcagtcccggggcgtctatagagcaggcttttgtggagggctctaagggggcgggccctaagggagctgggctctttgaggactggcttaggggtttggcggtgggctccgtgggagtctatatgggcgggttttagagggagtgtgttctggggaacaggtcaaaagcgacggggctctaaggggcagggcctgggctggggccttggctggtggctccagactgtgggtggggctctcgggggcggggctctcgggggcgcgtcctcgggggctcggccgggttccgttgccaccaccgtgaggggtgtggtgggggggtggttcacgcagctcggcacacttgggggtccctcatctaccttggggttatgccaggcggttattttgggcctcagtattcccctcggtgaaatgccaggggccaggaaattacttatttttttg

SEQ ID NO: 240181 - DNA, 174 bp, Homo sapiens; identical to SEQ ID NO: 205236
  chr19:14202317-14202491
  hyper

SEQ ID NO: 240182 - DNA, 169 bp, Homo sapiens
  chr19:14358695-14358864
  hyper
tgggagctcccctacggcgaagcaggaaggctgggaagtggggggccttgaaactctcttcgtggttgcccgcggaggatggaggaaaaggcggggaggaggggggctgaggttggtctggggtcactggtggggcgctgggcaggtggagacccgtgttgagttctcg

SEQ ID NO: 240183 - DNA, 214 bp, Homo sapiens
  chr19:14542785-14542999
  hyper
gacgactgaaaccacgcagagccacgggtaaccaaggtacccgcagcccacggcgcttcctcgggtcccaaagggcgccaatgtgcaggcaccgccgccagggagcgctccctgccggagccccggagaccaaggtttggctccctcgcctggtttccgaaggagtgagggtccgacggcggccacgaacaaagctgcacgctctgcagacccc

SEQ ID NO: 240184 - DNA, 254 bp, Homo sapiens
  chr19:14583547-14583801
  hyper
tctggttccaggaggcaaggcgcacggccaggaacagtggccgctgcagggaggtagagctccagccgccgacggccagcgccaccaacacctgcgggggaagccggtgtgagctatagagcaggcgcgggcgcaggggggcgcagggatggtgggggcgtggctggaaggtaaaagcctgggaggaggggcgagccgtcgcagggagggtaaatggggatccagatgagaaacggatgcggaaaaaaaagggg

SEQ ID NO: 240185 - DNA, 749 bp, Homo sapiens
  chr19:14584140-14584889
  hyper
cgagagggagcgggaaggagcgtggctcgaggggccggtgcgcccctcaccagcattgggctccagcagatgcacgacaccaccatgataccgacaagctggcccaccatctccacgtcgtgggcgcgagctctgcgtgccgagccgctgctccgagagccgccaaagaaggtggaggccgaagcgatggacgaggcggacgaggcggaggccgagcggggtccgtgcgccccccagcgacgccggctgtcggggcctgaggccgggggaggccgtcgggagcggcgtcgccagcgggcgcgtagcagggccaggccgctgagcgtgttgcacaccagcgcggcgaggagcgcgaccaggccgaggctggcgaagaggccagcaagcagtgcctggcgccagccgcccgggggacccaggccgatgaagcaccacgtgcccgggtactgcagctcatagcggcccacgcgcgccagcggcagcagcgccacggccaaggccaccgcggccaccgcggccagcgccaggcgcgcgcgggcgaccgagacccgcgcggcgtggagcagcggccgcgtgacgcccacgcagcgctccacggccatgccacagcccagcagcagcgggcacaggccgaagaagaccatgcagccgcccaggaagtggcaggccccgccggccggagcgcgccccgcagtgtacagacgcagcaccagcgcgcccgggatcacgtggcccgccaggtcggtggc

SEQ ID NO: 240186 - DNA, 247 bp, Homo sapiens
  chr19:14586096-14586343
  hyper
tccccatcaccggccgctcagccctgccgcccactgcgccctggctctccggcaagccgcttcctccctccctcttcctggggcggctcctcagctcctcccgccgcccttgctggcctccaggggccgctccaccccgcgcacgcccgctgggggcctggagtggcagagacccccctctctgctcctggcaatgggcgggggccactctgggccccagcggctccctccacgaggagtgaggctc

SEQ ID NO: 240187 - DNA, 117 bp, Homo sapiens
  chr19:14629110-14629227
  hyper
gtccgacgcgccgcgggccaggcccaacgtctggtagtagtctttacccatgaccccctcctgcggcccgccgacccgctgtcgccgtcccccggctccgccgccgaccagtcccgg

SEQ ID NO: 240188 - DNA, 268 bp, Homo sapiens
  chr19:14640086-14640354
  hyper
taccccgcccccgcgtctggcctaaccgtcgcttaccttggtttccacagcgacgccatcagggggcgtggcaaagggacgcgcggggcagagacctcctttggattggtggatggtcaagccccttctctttagcccctcctacaggcgttccgcccccttcgattggtctcgcaagttgattggtcaatcccctggtgctagtcctagtcttggttcggaccggccccaaggagcaggggcgaacgtgggcgcctcgtgccctgat

SEQ ID NO: 240189 - DNA, 140 bp, Homo sapiens
  chr19:14682852-14682992
  hyper
cctagctcctacccggaaccactgacccctcagtcagacacagcttccgggtcatttaggcagctgcggagatcatagagatgaaggactccagaggatcgctccggtccgcctggcgtcacctcgcggacaggcggagg

SEQ ID NO: 240190 - DNA, 48 bp, Homo sapiens
  chr19:14886812-14886860
  hyper
tatttcaccccgggcgcccctcccacaggaaaacgctgtggccgcctg

SEQ ID NO: 240191 - DNA, 79 bp, Homo sapiens
  chr19:15089971-15090050
  hyper
cctctgacagagaaggcaaccgagccctataaatgcacaaggcatcgggctcggtgctggaaacgtgcctgtgtgcgga

SEQ ID NO: 240192 - DNA, 614 bp, Homo sapiens
  chr19:15121588-15122202
  hyper
tccgctccgcctagggttcccggccaggccgagagaccaagcagggaccatgcgcgtgttggtacccccggctgagcgcagccaggacacacgcgttggggccccagcatggcgcgaggcagctcaggccatggcgaggaccgcgcacattctgaccgatcgctgcgggcaggaggcggtgaccatgtggcagcccaaggacagcgtgctggacccgaacgtggcccaccacctcggccgcgccgcctacatccagccctggcgcttccgcgtggagatgatcaaaggcggcggcaccttggagaagccgccgccaggcgagggcgtcacgctgtggaagggcaagatgaagccgcccgcctggtacgcccgcctgccgctacccttgcaccgcaaagcgcgcgccctgcagaccaccgaggtggtgcacgcgcacgcgcgtggagcgcgcctcaccgccgcccgcctcggccgcgcgcagcaccagattaacgggcgggtgcgacagctgctgcgccagcgcgaggtcaccgaccacaggctcagcgaagtgcgcaagggtctgcttattaaccagcagagcgtcaagctgcggggctacaggcccaagtctg

SEQ ID NO: 240193 - DNA, 219 bp, Homo sapiens
  chr19:15218125-15218344
  hyper
cttcctgctggcgcggggcggggggcgggcggggaggcccgggcggggcggggagggcgcggggcggcgcggccggagcccggggcgcgcactcggctcggcccggcccgggccgcagcatggccgagccgctactcaggaaaaccttctcccgcctgcggggccgggagaaacttccccggaaaaagtcggacgccaaggagcgcggtaagcggagat

SEQ ID NO: 240194 - DNA, 63 bp, Homo sapiens
  chr19:15235615-15235678
  hyper
ccctctggactagtcggggctcgctttcccaccctgcacaatgagtgagctggaagcagcacc

SEQ ID NO: 240195 - DNA, 367 bp, Homo sapiens
  chr19:15306318-15306685
  hyper
ggcttgtcccagacgcctgagactgaactcaacaagcggctgactcagtccttagcgtcacccgcaagatcccccccaccccggcccccagcgaaacaggtcggggcacggccgagcaagcaagggtgcgggtggcgttgggaggggagggcacagctcccgtcccctcctccaaggcccgcagggcgaccactgcggccccgaccgcgcgtcgggagggggcgcgctgcgctgggcgccgaggatagctggtcccaccgccaggcagggcgcgacccgcgcgggccccctcccgacgccccgggcgggttcccacgctctgcgtcccgcgcccccgccgaccggtcgggccggttccagccccagc

SEQ ID NO: 240196 - DNA, 836 bp, Homo sapiens
  chr19:15310946-15311782
  hyper
ccccttcccctccccgcgcaggggcggggtcccagggcctccgggtccccgcggccagaggagagaggcgggctgcgggcgggggagggggcgcgcgcgccgccgaggctccggctcggaatccggctccgggtcttgctgcgcgccggcctgggaagttttctccgagttcagagctcccagaacttcgcgccccctccccaccccccgcctggcccagcccgcccggggtgtcgggggcggggtgggggggcttttgtgcgagaggtccccggcctagaagtacctgggcccccaatcataacctacccaggactccaggcgtgagttggatggggacgagtcccgaactctgtacgcacccccccacctcgagtccctgatccccgcacctcgagctcccagtctcggactcctgggtcccttcatcttcagctctaatcgctcaagggtccctgttccttgggcctctggggtcctccccattctgaatctctgggtcctccaggactggcatgaagcccggggctcctgcgccccttccccgaccctggttcctgcctcccatgaacccccgccagccccggccttgggggttcttgcactccccctctgccgccctcgtcccatccgccaggtcccggcccctcacctgcagcccccggccccgctagcagcagcagcaggggcagcgcccgcacgggtggcggtggcggtggcggcgacatcgggcgacggcggcggcggcggccacgggcccccggccccatggcggccggccgcgaccctcccctcctccctccttccctgggctccgggcgcgtcccgggccagcc

SEQ ID NO: 240197 - DNA, 740 bp, Homo sapiens
  chr19:15334102-15334842
  hyper
aggcagggagagggacaggccgatcatgcgaggaatcccagcccaagcccccgaggtccccgctcccgccctaaaagatgcacgcgccaagcccttgggccagaaaaaaaaaaaaaaaacgggccgggattggctcaggctgggggaggcgggtctacgacgagacacgattttctattggcttactcgccaggactctgcccaatcgacgcgatcgtcttccccagaagacccccgcctccctcccgccggcggccgcggaggcggaagaaggcgcctttccgtcgccctagcaaccgtcagcggatctccgtcgcccgggcaactgtcccaggcctcccgtcagcctttgcctgggcccctccggtcactcggacaaccgctacccgttccggtcaaccatcaacccgtcccccgtcaccccggcaaccatcgccggacccacctacccctggacgccgtcctggtcctgtccgcaggcctcctcgccccaaacctccgccgcgggctccgacgtccgcgaccccacgtctcaggggctccctcctcctcctgcccgtcttctcgcctccccggggcggggggcattgctcctcccctggcaggggggccccgggttggacccggctctgggggtccctgctcggtcgggacagtgggaccgccctgtgctgtggccgcgcgcagccccccgcaggcttcggcgctcgcactcttgcgtgggactgtccaaccgccac

SEQ ID NO: 240198 - DNA, 42 bp, Homo sapiens
  chr19:15342707-15342749
  hyper
ctctctcccgaggcttgaaccgtctcgaccccacgcgacccc

SEQ ID NO: 240199 - DNA, 123 bp, Homo sapiens
  chr19:15343289-15343412
  hyper
gaaaggggggaaataaatgggcggggcctagcaggtcctgtgcggggcttagggccggggcggggcccaggaagactcagcagcgggtgggtgagggtctaaaggcggcaattccgggccggg

SEQ ID NO: 240200 - DNA, 256 bp, Homo sapiens
  chr19:15344009-15344265
  hyper
gggacctaatatggcgggtcaggagggtctggaagacgaagaagagggacaggcaatgccaggtctaggactaggagggaggcgcgggcggtattagcggctggaggaggcttcgggaggcccggccgacggccgccgcctggtgctacccacccaggggcgcgcgaccctcccttcggtctggctccaaagacctagcagcactgacttcacccagctgtggttccaacggcgggtccagcggcctcggcccggc

SEQ ID NO: 240201 - DNA, 117 bp, Homo sapiens
  chr19:15490556-15490673
  hyper
ccaccagcagccccgtttactaggcgaccacagcacgcatgcgttcagcgcacctccgccatcgactactggaagaccaggcgcacacgtcactacttccgcgcgcccccattggct

SEQ ID NO: 240202 - DNA, 307 bp, Homo sapiens
  chr19:15529685-15529992
  hyper
cccacgcagagcccgaccccaccctgccaggcccacctgtgtagctcatggtggcgggcaacacaacatccgacgacgccggcttctgctgctctgaacatccgacgctgcgatagctgctgctaaccacagggtcccctccacacacacccgagccccgcctcccgaccgcattggctcataccggcctcggcttcacgtctattggaaggaaccgctgtctatctctatgcctcctcatatcagtggctggaagctgctggcaatctcgtgagagccccgccttgtccccgccttctgttattct

SEQ ID NO: 240203 - DNA, 390 bp, Homo sapiens
  chr19:15619210-15619600
  hyper
ttctagggggcagcgctggagtccccgcccagaaccctgcgggagcccggggcgggatgtccgggggcggacccctcggcacggccgggcggggttaaagggttgggccgtgggacggcgcggtcagatcccaggtagtggcgccggtggatccggatcgagggcaggaggctgagacccgcgggtgagtgcgcgcgtggtgagggctgtaacctgagcgcggccgcggcgctgcgctggaacccgaggctcgcgcggttcggtgctggcggggcaagggcgaaggtctgcgcgcggcggcgggcggggcgcagccggccacggggacccccccaggacccaggacggggctgcatgcccggggcactcgtggggagaggggcacgtggg

SEQ ID NO: 240204 - DNA, 222 bp, Homo sapiens
  chr19:16186794-16187016
  hyper
ctgcacctcggggacgtgaccccccccccaggctgacccgttcctcgctctgtcgtccccaggtggaggaggagctgacgcacctccagaagaaactaaaagggacagaggacgagctggataaatattccgaggacctgaaggacgcgcaggagaagctggagctcacggagaagaaggcctccgacgtacgtgtgcagggatgcgggagcccgcggcggg

SEQ ID NO: 240205 - DNA, 319 bp, Homo sapiens
  chr19:16187976-16188295
  hyper
gggatctggggagggggtcgcactttctcgcctctttcgcggcttcccggcttctgcttgcttccctgaccgttcccaggggcgcggcggcgacgtgtctgctccaggcggcgggggggatggggggtggaggaagttcagccccaagccgcccgcctttctccagctgattcctgcgggaaccggggcggcgggaccctgcctctctccagaaggccccgggaacgctggcgcggggccctgaacccacgatcgtttgagcgcctgctgtgcgcctccgccgcgagtcgcagggcccgagataaacaatgggtctgaa

SEQ ID NO: 240206 - DNA, 326 bp, Homo sapiens
  chr19:16222189-16222515
  hyper
cgagctgtgagggcgggacccagagacacccgccccaactactggcgtgcgccctctgctgtcgcctaacggaactccgggcgcgcgtgcgcacgcaccccaagccacgccccgccaggctgccggcgcgcgagcggttggcgccgctccctgccttccctctcctacagtggggcggggccgggccgcccgagtcgggggtggaaggcgggggccacataatgccacgcccccgcctcgtccccatttgaagccccgcgactcttcactgctggtcaatcagagcccgtgctctccctagtgccggccaatgggaggtgcgctcg

SEQ ID NO: 240207 - DNA, 235 bp, Homo sapiens
  chr19:16296081-16296316
  hyper
tggctctctgtcccgcccactacccggaagtgtggcccgggtccagaaccaagagcgcatgctcaccttgtagctcagccaatcaaagagaagcgaggcggccattcgggcggaaatagtgtttgcaaacaggaagtgtggcactccagctaccgaagcactggagagtgtcatggaggcctacgagcaggtccaaaagggacccctgaagctgaaaggcgtcgcagagctggga

SEQ ID NO: 240208 - DNA, 178 bp, Homo sapiens
  chr19:16308331-16308509
  hyper
ttccaagtaaccacgaccttacctctctcttttgagcttatcacaattggtgactgtacacttgtttcatagacttccccaccagactgtgagctccatagggctgggccccaggtcggtttcaccaccaggctctctcgcctaactcggcccacgggaggccgtttccagctgctct

SEQ ID NO: 240209 - DNA, 88 bp, Homo sapiens
  chr19:16583044-16583132
  hyper
ccgctgtccgagtcgaccatgctgtgtcatccctccagcccatgccgaggcctggttctctgttagggatgccgtccccctgccagtg

SEQ ID NO: 240210 - DNA, 409 bp, Homo sapiens
  chr19:16606941-16607350
  hyper
ggggtgtgcactgcgcttccggtcgccgccaccccttagctcccagctctctctgcggctcttcaggcgcgtcccgaaactacaactcccgtcacaactcgcgattatgacctgagggtcccattggtcgctgcggcgcggggcacgttgggcccgccccggaactaccgctcccatgacaccccgcgattgtgattcggggcgccattggtctgcggggcgcggtgcttcccgggagatgtagtctcttctgctctggctctgttgcccagggcaaccgctccttcaggcgtgaatgtggcggctgcctctgcgaatggacggcgtgggaagaggtcggcagggctggtggggaggtgacctagctgggcgtccgggctcgcgagggggatacggggaaatggggcct

SEQ ID NO: 240211 - DNA, 61 bp, Homo sapiens; identical to SEQ ID NO: 205255
  chr19:16771042-16771103
  hyper

SEQ ID NO: 240212 - DNA, 672 bp, Homo sapiens
  chr19:16772106-16772778
  hyper
ctcagttacttcatcgtctccatcctctacctcaagtatgagccaggtgagccggggcggggggctggaggggaccggcagcgggtggcgcgggccggggcagctcgggggtcgcagagaggggaagcccgtgcgtggtggagggagcgagggacaggttcaaggattgcatcgtgggagtaggcaggcgctagaatcgtggggttctctcacgccggggtgagcccgggggagaagcccccaggacgatgaagctgggggaggggaaggagaggcgtgcgcgggtttagaggagggggaacaggtgcttggggtcggggctcctggttgggtcagagctgcaggaacttgggcaaggggcgccggctgtggcgagggtgcaggtgggggtcggtgcatctgttctggccgcgcgcaggtgtgacctccctccttgaccttggcacgcggattgagagcgccagcggagtgtctataagggccactgcgctgggggctgcggtcaggttcagcgaaagtgacaccggttctcctccccactgcaactgcccagcaccctccactcccctcccttcccccacggtgctgaatctccgagcccccacgggaattcttccagccctggctccagatcctttccacttacggagcagaaccggccccaaggctggg

SEQ ID NO: 240213 - DNA, 736 bp, Homo sapiens
  chr19:17007055-17007791
  hyper
acgtcctgctgtaaaggccccggggccacagaagccaggtcatccccgtaggtggaggacgacgaggccggcagccgctgctctggaaggaagggggcctcggtcgggagggcgtggcggggaggggacccaagggccgaggggaggagatccgtggcccagagcagcagcgatggtgtccccgaggctaggcggggggtagggtcctcaccgagggcgcagcagctgggaggcgcgggctccaggggcgcggcctggcggcaggcggcctcccgcaggcggcaggcgctggcgtagaccaccccgtcggagccgcacaccgggttcccctgggcgccgcagtcgtggtcgcagccgcatcgcgcgatcgccgccccctcctcaggggccacggcagggcccgactcgccggggaaccagcctgggggacgaggcaggctcgacagaccccccaccctgaaccttgcccgcgcccccacagaacctgggggtggggaagatgtccctgggtcccgggcccactaccccctcggtgggtcttggggcgcgacagttaatgggaggtcctgagccctggccttatggaatttcacgcaggtatttgcctaatacttacaaaaacagaaacagacttttaaaaagcggttgtaggagagaaaggagacagggcgtcctgtctgggccgccctgcaacaacagccccgtcccctgccgcgcctcctccgcactgaccaca

SEQ ID NO: 240214 - DNA, 717 bp, Homo sapiens
  chr19:17008134-17008851
  hyper
cacctccccctcgccgctcgaccccgccctcaccacactgaccaccctcaacccattgcgcccagtccccaccacagtgaccacaccctcactggctcggccctgcccccagtatactgaccattccccagccacttcccttccgcacttaccactcccccagccacgcccctccccgctgaccgctcctccagccccgcctcccccgtacaggcagagcgcccgcccacctctatgctgcgttctcctgactttacgttggcccctcctctgccaagcccccaggggagccctccctggcgtccgagggtgggagtcggggtgtggcaggccgcggtggggggcggcagtggctccgcgcactcacccgggccccgggcaggggcgcgctccacttcgttgcacgcgggtccggcgcacagttcccgggcgagtgggctgtgggtgctgacgttgtagaagcgagtggcctcgaaggctacgggacgagggtggcgggtgaccaagtgcaggcgcgacgggtcagggaccgggccgggccgggggtgcgggcgcgcgggcctaccgggttcgtagtagtcgtacacggagactggcagcgccgacgtcctgcccaccacgcactcccggagagcacggaaccgcacgcacgtcaggcaccggctggggatctgtggggcagcggcgggcgcaggctcgacccgggccaggaggccc

SEQ ID NO: 240215 - DNA, 80 bp, Homo sapiens
  chr19:17326050-17326130
  hyper
cggcccagcgccccgtctcaaaacaagatattacttccgctccaaacaaagatgggccagctaacgagcgcgggggaaac

SEQ ID NO: 240216 - DNA, 223 bp, Homo sapiens
  chr19:17356102-17356325
  hyper
cctacgcggcgcgcattcggccccggcgcgcggggggcacgggctgcaccccccaaaaaagttttgcagcaacttcctgcggccggtcctcgcgcccgggcggaactggtcgggccggttccaggccaactttcccacgcgtgcgcggggccgggcccggggccgggaggggcacgctagaggcgcgggccgggggcccagaggactcgcgtcccgccgccct

SEQ ID NO: 240217 - DNA, 146 bp, Homo sapiens
  chr19:17378082-17378228
  hyper
ttccaggtcccgccgcacccagctccaggcagctctcactccaaaccccacccccaacccagtttcagcctatcagtttccaagttctttctagcctcaaccagtttctgtctctgcttgttctgcagcccgctgaactacatttc

SEQ ID NO: 240218 - DNA, 63 bp, Homo sapiens
  chr19:17392735-17392798
  hyper
tcggaggcccgcctggctcgcaggttgcgggatgcgctgcgggaggaggagccgtggtgaggg

SEQ ID NO: 240219 - DNA, 92 bp, Homo sapiens
  chr19:17393038-17393130
  hyper
ggggcggggtctccccaagccgaagtctgggaatccgggaaggggcgccccatcatcccgggccaggcctcggggctcgagggtggggttta

SEQ ID NO: 240220 - DNA, 139 bp, Homo sapiens; identical to SEQ ID NO: 205262
  chr19:17420265-17420404
  hyper

SEQ ID NO: 240221 - DNA, 512 bp, Homo sapiens
  chr19:17448123-17448635
  hyper
cttattcctattgtcagcctcgctgcgctaggaccctaaaaatttggtctcatgttgcccggggaacaacatttcgctacacctacctccataccgcctcccgctcccgctctcccttgcaccagccaatggaagcgagtatcttcagacggtgggcaggacgtatcctaagatacccaatggtggtcgagaatagttgagcactttactagtcaagccgcggagtgggcggggccccctgcccagacttgaagccacacaggcaggtcgggcaggcgggtcgcaggttgtaaatccatgtggcgggggctttggaccctggcggcccaagcggcacgtgggcctcgcaggtggggctacaggggaaggggtgcgacagcttggggtgctgcttggaccccagacccactccctgggttttaggggcccaattccctgcggcagagcaatcattcgcgttcttccgtgcctcaatcgttcatgacccttgcggcagagcccatatctgggtc

SEQ ID NO: 240222 - DNA, 31 bp, Homo sapiens
  chr19:17501528-17501559
  hyper
ccctcatccgccagagcgtccctttgctggg

SEQ ID NO: 240223 - DNA, 231 bp, Homo sapiens
  chr19:17531154-17531385
  hyper
tttggcaagagcttcgcgcagaaatctggctacttcctgtgccttagttctctgggcagcctagaggtaagaggtgcccaccttcggaaccaccagggtctgcccacctcccctgcccattcacggtgccctatgccaggtgcgctgtccccgctgctagccaccctcgccgtgtcccccttccacccccagaacccgcaggagaacgtggtggccgatatccagatcgtg

SEQ ID NO: 240224 - DNA, 160 bp, Homo sapiens
  chr19:17581046-17581206
  hyper
cagggtccgggggcggagcctggccaggacctggccaatcccaggcctggggccctggtctggttcctagttagcgggcgggtgtaaaagcctggaaaggggcgatgcctggcctgaggagttgaccaatcccaggcctgggggcggagtctgactcgga

SEQ ID NO: 240225 - DNA, 186 bp, Homo sapiens
  chr19:17607095-17607281
  hyper
catctgtaaagtggcggggggggagtcattccgaagcccaactggagatgagaactcttaaaggcaccgtggggcacctggtggatgaccccaggaagctcttgcggggcttgagaatgtgtggcagggagggaagatgtcctgcagggggagcccatgagcaggtggctccgtgggcacctgggg

SEQ ID NO: 240226 - DNA, 232 bp, Homo sapiens
  chr19:17622145-17622377
  hyper
actcaccaaaatacgccctccttcagaaaatccctgccacctcgataggacgtcctcttcttgagctcccctctccggccctccctgatacagcaaggttgagcattcgggcactggcttcccgaactcacttcgactcaggcacagcaggcaaagattcaatgggtagggccggaccgactgcccgaccttcgcggtgcttcacttgcctcactgcgcatgtgccaaagac

SEQ ID NO: 240227 - DNA, 101 bp, Homo sapiens
  chr19:17666360-17666461
  hyper
gggccttgggactcggagagcgtctggaggcggggcctggacttcacgcccggcgcgctcctcccctttaaggcgcgcggccgggcggggcccctatgacc

SEQ ID NO: 240228 - DNA, 214 bp, Homo sapiens
  chr19:17716509-17716723
  hyper
tgaggtggtgcctcccggtaccagagccccgggatgtggcctcctccatagggacgaggtttcccccatcccagctcaaaatgccccctaggtgctgggggcgtggcctcaagttggggatgtggctccttccttcgtcgcgcccttgggcgtggcctcccgagagggcggggcatcctccattcctaattccccaaaagggaaagctgagtca

SEQ ID NO: 240229 - DNA, 224 bp, Homo sapiens
  chr19:17717143-17717367
  hyper
ccgcgtcggcgctcagcgtgctgcgtggggaggggcggaacgtgagacaggccacacctactgtgatgccccgcccacggccccgtccccaccgcatttgcgggccacgcccacaccggggtgcccacacctgtcacctcccacgctacgctagccccgcccctgccccgttacttgacctacaaccctgtgcttggccgcgcccacagcagctgaccccgagc

SEQ ID NO: 240230 - DNA, 478 bp, Homo sapiens
  chr19:17790867-17791345
  hyper
gacaggaaagggggccgagagtggcgagggggttctcaggagggaagggtgttcgcggtgagggaggggattcgggaagggggatgggcgcagaggggagggtggtatcgggggagaggcttggaggaggaagggggctcagagaaggaacccagtctctctccctgtcttccccggtcagtaaatggtccctgagtcaccgtcttcgtcgtcacatcccgccacctccccgcctgcgccgggttgctgtatcagggtcagcggggcggaagcgccacccttccccagcgggcttcgggtcacacgcatgaggctatttatagcgtgggcgcgcggagggcgtgggaggcgcgccggcggacaggggggcggggatgaggggggtgcccactgctgtccccagcgacgagcgggtgaagacaccgcgtcatgcggcctcaaaggtctttggggcccccagaagcgctgactgatgaat

SEQ ID NO: 240231 - DNA, 52 bp, Homo sapiens; identical to SEQ ID NO: 205268
  chr19:17792549-17792601
  hyper

SEQ ID NO: 240232 - DNA, 229 bp, Homo sapiens
  chr19:17797519-17797748
  hyper
ttaagaacacccgcgtccacgccggcccagcccggccggatttgcactcggaagctgccgcggcggggagcgggcgggcggggcagggtttgtgaatgaatcggccgagggggaggggagggaggaggaggggcggcgggggcggttcccggctccccggcctgcccaccctgtgtccaggcagcaggagttcagcacacgcacgcttcctgtcgcccgaggtctcccg

SEQ ID NO: 240233 - DNA, 232 bp, Homo sapiens
  chr19:17830034-17830266
  hyper
catgcagcaggcacgcaatcaaagcttgttcaatgaaaaaaaaaatgaatgaatggtcacttgggagaggcggctcccaagcggacacccaggagtcggccaacccctttaacgcccgcatcccctgctctccacgacctcaaagggcctgtaagtggtcgacaaaaaggggcggggatgcggtggttccgggcggggtcttcagcccttccggtgcggcccctttaagagg

SEQ ID NO: 240234 - DNA, 560 bp, Homo sapiens
  chr19:17958346-17958906
  hyper
catcccctgtttataatcctcaacgttctgcatcctggtatggtcgggtaccctgtgtctggaccgggaaggcctggagggtaggggctgggaactccgccccccaatccctccttcccaatccctcctccccacccccaaccccgcagcccccgtcgcgcatgcgcaatgactcctccaggtccgcaaggcaggcatctcccggccttagtcaaagccgaagcccagagaagcgagcgatcggaggatgcgagtctcggctcacgtctgcctcgcagctttcctccgaggcctggaaggcgagctagcctttgccctggcagcaccctgccccagcccagccatcccccgccaccaccatcctcccccagtgtctgggccgagccctgcggcatcgccagctcttacctagcgggcagggaccctggactttcgaagggcgggcagagccgggaggcagcgagaggaaagtcccactcggctccttcctgtgtgggccccttggtttcctgagccactgtcatttaccgaaagtcagggccctgcgggagctgggggcg

SEQ ID NO: 240235 - DNA, 171 bp, Homo sapiens
  chr19:17970699-17970870
  hyper
tggtgaacggctgcgcgacagaggacacttccttttgcgggtggcggcgaacgcggagagcacgccatgaaggcctcgggcacggtaaggcgggcgcggcgcggcagggggccaagggatggggcacgggccccatcaggggcctgcataagtggcgtgggccgggttggt

SEQ ID NO: 240236 - DNA, 1180 bp, Homo sapiens
  chr19:17982693-17983873
  hyper
tggaggcggagtcgcggtgacccgggagcccaataaatctgcaacccacaatcacgagctgctcccgtaagccccaaggcgacctccagctgtcagcgctgagcacagcgcccagggagagggacagacagccggctgcatgggacagcggaacccagagtgagaggggaggtggcaggacagacagacagcaggggcggacgcagagacagacagcggggacagggaggccgacacggacatcgacagcccatagattcctaacccagggagccccggcccctctcgccgcttcccaccccagacggagcggggacaggctgccgagcatcctcccacccgccctccccgtcctgcctcctcggcccctgccagcttcccccgcttgagcacgcagggcgtccgaggacgcgctgggcctccgcacccgccctcatggaggccgtggagaccggggaacggcccaccttcggagcctgggactacggggtctttgccctcatgctcctggtgtccactggcatcgggctgtgggtcgggctggctcggggcgggcagcgcagcgctgaggacttcttcaccgggggccggcgcctggcggccctgcccgtgggcctgtcgctgtctgccagcttcatgtcggccgtgcaggtgctgggcgtgccgtcggaggcctatcgctatggcctcaagttcctctggatgtgcctgggccagcttctgaactcggtcctcaccgccctgctcttcatgcccgtcttctaccgcctgggcctcaccagcacctacgaggtaccggacagaggcccgggggtaggacctgccccactggcagtgctgggaccccgtgtgggggaggcgctggggctttgggccgctgtacaggaggacgcggatggcacctcggtgctttaacggaaggggcccctaggcagacacgtggggagggttctaggaagaggccccaggcgcccggcgaggggcaggaaggaggaagagagagcctggcgtcctgctccttcggtggaagcgcgcgcggggcggggcccggctcgaccaggtgtgtcctcacgggtggacacacacctgccccccacctgcccgggcgtgcagacccacgtgtgcgcgctagaggggactgctgacggctccggggttcgaaacctggcttcactgcttt

SEQ ID NO: 240237 - DNA, 342 bp, Homo sapiens
  chr19:17984734-17985076
  hyper
ggaccagtcctccaggtccacggggtacgcacaggcacgggatggcacctgtgcacgggtgtgtgcgtgcggcggggcccccacgtgcaagaatctggcgggcgcggttggcttccggagggaggggcccacctagagagcagaccagggacccgagaggcctcggctcctgggtaaggactgtccaggtgacctcgagtccctccttgcagtacctggagatgcgcttcagccgcgcagtgcggctctgcgggactttgcagtacattgtagccacggtgagtggcctcggccccgccctccgctcagggccccgagagcgtcagccttcactagcccggc

SEQ ID NO: 240238 - DNA, 303 bp, Homo sapiens
  chr19:18043467-18043770
  hyper
tcccctcatggaccgcgggcgcgctctggcggccgggccgctccaggctgaagccgccggaccacgtgtgtagtcgcagctgccatctttcatccgggcatcggccatcttggtaaaggcaatgttctagattttcgcctctgcccgcccctcctggttcatcaacatattaaatgagcgtagggaatgagggcgtattaagtgtcctctttttgaagagacaaagaagtggctgactaccctggcttgggtccgaggcccagccatctttttctttaccaaaatggcggcggtactgaggcg

SEQ ID NO: 240239 - DNA, 121 bp, Homo sapiens
  chr19:18059918-18060039
  hyper
tgtggggtgtacccccgggccccgtcatcccctcccccagccatctgccgtcctcctggccttgaacaacagcctgaagtcgagtccgggctaggcaggggaaagcgcaaaggtgcagcac

SEQ ID NO: 240240 - DNA, 40 bp, Homo sapiens
  chr19:18062522-18062562
  hyper
tgggaccttccagcccggtcaacgtcgccagctgcccgaa

SEQ ID NO: 240241 - DNA, 89 bp, Homo sapiens; identical to SEQ ID NO: 205272
  chr19:18062904-18062993
  hyper

SEQ ID NO: 240242 - DNA, 72 bp, Homo sapiens
  chr19:18077777-18077849
  hyper
ttgcagggggcgccggggaatgtgggatctttaaatatgggcggggcttgcggggtcgtcgaaggcggtgcc

SEQ ID NO: 240243 - DNA, 176 bp, Homo sapiens
  chr19:18117802-18117978
  hyper
tccgatccccatcacgggctgagggtgaccgtgtttgtttatgaccgccccctccacccacacacctcactgaggtggtggaagtctcctgagccaggctcagaggcggacagtcacggcaggggatgggttcagcggcagcgcattacgctgccacgagagggcgccagcgtccc

SEQ ID NO: 240244 - DNA, 155 bp, Homo sapiens
  chr19:18118158-18118313
  hyper
aggcacaagggctgcggggaaggtagggtttgccagaggctgaaaattgggaagggaacatcatttcgtaggtaccgctcctgggcgaatgcgccgaggcgcgaccgagtgacggtatgtcaagagcaggttgatgacccgggagcgaggctctt

SEQ ID NO: 240245 - DNA, 425 bp, Homo sapiens
  chr19:18118700-18119125
  hyper
ctgggccctgcctctgcacctctttttttcctctttacccccggggtccgcgagagaccagctctggcagcctaagggcttcagtttctccccggggtccgcgagggaagggggcagccggcggtgagcaggggcgtttgttattttgctccacgcctgggcagagccacgccccttgtcgcgctattggtggagtcccttcccggggcggggaagagacggtgaccccacccccccccgccctgccgtataaaagcggcgccgacgcacggcgcggggattttctgctccggttggtgagcgcgcctgcgcgttgacggcgattttgcgttctgaggctgcagcgtcggcatcttgagctgccggttcgcgagttcgaggccaggttccgcctgtcgtgggttcgcaccccggacgcgatgcta

SEQ ID NO: 240246 - DNA, 38 bp, Homo sapiens
  chr19:18272061-18272099
  hyper
caccctgccctggccatctgtccgcagaggccgcgggg

SEQ ID NO: 240247 - DNA, 447 bp, Homo sapiens
  chr19:18303610-18304057
  hyper
tgaccaaccctaacgcgggaggcgggacgacggtcactgatttgccagcgtgacgccggtctgcgactggccagtgccgtcctgggcgtgtcggtaggacggggctgcgacggtttcccataggctggcacagaaaggggcggggaaacaagagtgcaacgttaccaatcggcatgcgggacgtaacgcaattcttttttccgattggtccgtgaagctcgggaggtcgttgggggctcgaccttgggatagaacgcctgccttttattggtcaatactcttcgggccgggcaatgtggctccccgaggctgcctgcgattggtgaacgcgtcgcggctcggggcggacctgcggactgaagatccttatgcgattggccggggagccggaggggcgggcaatttgggatcgacagtgactcgcgactggtcggcgcggcgaaagca

SEQ ID NO: 240248 - DNA, 198 bp, Homo sapiens
  chr19:18313919-18314117
  hyper
ccccacgtgcaccgcgtgcatggtccctcgaggacgcgcatctgcagcccccgctccccgcaaacctccaggccggagagctccggccaaggccgctgcatcacatgatacaggaggggcatgcacacgctcacgtgcacacagcctcaaacacgctcatccgtacatacaggagtgtgtgaacgcactgaggtgcac

SEQ ID NO: 240249 - DNA, 104 bp, Homo sapiens
  chr19:18314978-18315082
  hyper
cgtgcaaatggggcggggcctagcgtgtgcatccagtaggggcgggagcggcgcgggggccgactccgcctctcgtccgcctcctgtccgcctcggggaggcgg

SEQ ID NO: 240250 - DNA, 263 bp, Homo sapiens
  chr19:18335415-18335678
  hyper
gctcggtctgcttcgaacaagtccgggtgacgctcgggccgggtcgggcatgttcggtcacgtccggctacatgagggctagttcgggcatctccgactaagaccggccgcgctcggcctgttccgtccgactccagcgggtttagcagcaccgggatgaaccccacggccagccgaaggggcggggcttcttaacccttccctggcccgtctggggtgcgccgtgggcgctgtggtgcaatgggagacgctcttaggggcgg

SEQ ID NO: 240251 - DNA, 209 bp, Homo sapiens
  chr19:18335915-18336124
  hyper
aacttagccgggagcggcggggtcaggctgtggttccatgacgcgggcggtgcgggggtagagccccccggctgtgggaacggcgcggctgcccattggccaggggggtaaactgagccagggaggctcggacttgggttcgggtctggcctgcgcggggccggccctcgttcatcctcacttctgagtacccgcgacgcgccctcgac

SEQ ID NO: 240252 - DNA, 1008 bp, Homo sapiens
  chr19:18336350-18337358
  hyper
tcggcgcggaccaagcgcaggatgccagccacagtcggcgcccacaagccccactccgaaccccagccttgcccccatccctccccacgaggtcacagtcgtttctggaaaggcagggattcgaacccagaggggtggaccgagtgcttagaggatgcagcgcaagcagctgccgggcgcaggcgcgcgctcagcctgggactcccgaacgccctgcctcgaaaaccccctcaattcaggtcttcctccgtggacacccagagttcattgtgaggcccccagggcatctctttgctggcactgggacaggatgctggtgggagggggcaccaagggaaggagtgccccttccccctcctcccactgccaggacgcacagcctgcctgccccaggccggcgagggtcaggaggagacgtgagcctcagcccgtcccactctgggcctcacagctggaaggagacagacggctggtcccctgggcctatatccaggcggcgggtggagacagacggagacagagagagacagagtcaccaactgcgagacaaaagtagggtaaggtagggtagagggagagagatacagagaaagcgagggagaggcagagcgtccaagcccggactccggccccggccccagctgtccctggccttgtccctgtccctgcccttcccacctccacaccgggcgtcccggtgaccccgccaggccctctgtccagcctcaccacagcggatgggccaccgtgaagcgccgctgcaggcggatgctctgattcaccaaaagcttcctgaagagcccgggggagccgcgcggggatccccgaggggagccgggcccggggaccggggcgggcgcgggggggccctgcatcgccaggactgcgtggaggctggaccgagcgccggctgcgcgggaccttttctggacagctgcgggggcggggcccagcggggagggggcaaagggcgcatcggccccgcctcgaggccggcggctccctgac

SEQ ID NO: 240253 - DNA, 112 bp, Homo sapiens
  chr19:18343303-18343415
  hyper
gacattccacaaccccgaaaaccttcggacccccagctatgttagcacaaggacagtcacactcagccacatacctacaggcaccacaaggggagacacacaggcacaccca

SEQ ID NO: 240254 - DNA, 204 bp, Homo sapiens
  chr19:18343595-18343799
  hyper
cagctccacccctacgtagaaatagctttttccttccaggcgccagcctcaaccaagcagcagagacccccgccccctggagaagcaaggaccctcccccactcccgccaggccccgcgcgcccctcccccgcgctgcaggaggcccctgccccggccacctaccgcctgcaggaggaaacgggccaggagagccgcgacttcc

SEQ ID NO: 240255 - DNA, 226 bp, Homo sapiens
  chr19:18434128-18434354
  hyper
gaggaaatgcgtgcgcaggtgaaaccttcgtcggtctcctgggctccacgctgtgggcaaagccagttaatgcctttcgtttgcagtagagagagagaaatcgaggcttcgtggtgattgggccgtgcctgatgttgcccttccgactcctagttttctgattctgtaattatccagggaacatcatttaataggttggaatcctgaccacgaccctcggggcctc

SEQ ID NO: 240256 - DNA, 125 bp, Homo sapiens
  chr19:18451214-18451339
  hyper
cagtgcgtgcaagcggctacacactacggcataagatgttcccattttgcagacggggaaacggaggctggggaataccgggcctagccgacgggggcggggcgcagggcgcgcacgctgcgtct

SEQ ID NO: 240257 - DNA, 545 bp, Homo sapiens
  chr19:18528685-18529230
  hyper
gtgggggcggggggttctcacgtactggggggcggcctctatcggggaggcatctgcggggtcagctggcagcgagagacatccagacattcacacacaaacacacacacgaaacgtgagcacagagccacacacaggtcctagggagctggcggcccacccacgcgcggagacacacacgtgcacattcggcacacacttgtgcacgcaacctcactgagcgactcggcccgactcggacccacaactgccaccgcgcagccagggacagtcgccgagacagcgataatttattgggtgtttgcccgccccccacgcacaaggatgcacacgtgcactcacacgggagccgcgtgtttgcacacacgcgggcttgcctaggaaaaaagaggaatagccgtggcaaacacagaaacatctagacccagagtcaaccgcaccgccttcccctaccctgcccatccacacacgacccactggtacccgggcatccctgccctgcgggggtccctgactcagtatccgcccccaccctctctgaacac

SEQ ID NO: 240258 - DNA, 40 bp, Homo sapiens; identical to SEQ ID NO: 205280
  chr19:18547990-18548030
  hyper

SEQ ID NO: 240259 - DNA, 238 bp, Homo sapiens
  chr19:18632770-18633008
  hyper
tcggtgagcttcacgtggaacaccgacaccttgctgccgtcgctaacccgcccgcacgacagcccgtagctcctatcctccttcagcgccgccatcttgcgaccatctctcccccgcgcccccttcccggctccagcgccgccacgccggccacgccccgccccgccgcccgctgacgcgctgcattattcatgagacgcggctggccacgccccccgagtccgaccaaaccaacagt

SEQ ID NO: 240260 - DNA, 63 bp, Homo sapiens
  chr19:18682793-18682856
  hyper
gagctggctcatgcgggccagtctcggcagggtggctgggcagggctcgcgaggccacggctc

SEQ ID NO: 240261 - DNA, 150 bp, Homo sapiens
  chr19:18705872-18706022
  hyper
caggtgggaggcctgcctgtcggtccagctgccggctgcagccagcccccagcaggccggcggataaggacatcggcctcacgtcataaataaagccggggacccgctgacaggccctggcacggccccggcccccgccgcccctgctgg

SEQ ID NO: 240262 - DNA, 754 bp, Homo sapiens
  chr19:18714351-18715105
  hyper
aaggactccccaggcggctggaagaagggactgcaggaggcaggggcagcccagcttcgcagagatggcagccaaggacagggtgatcctggcccccagggaggccccctgaatgccagcgctgccctgcacttgccctcactgccccagatgggcgaggtggggtggacacggttcttgggccggccctgatgattttccggggcaaacttggctcgagggctctgtctcgctggagcctggaatcgcagttgcgcttggggcttggcccagggctcgccggaggtctccgcgtccgtgcgaaggagccggctgagcgggccagagccgaggaggcgggggcggccgaggggggcggggggctgggggccaggggaccgccctggaggtcccaggcagccagccgcccgctaattcggaattccttttgcatgaactcgggtgtgccagcgtctctgccccggcccacccaccgcttcctgcctgggcccccccaacagagtgggaggcacggccaggcctgcccagaccccaggcccctctcagcccttctagagtgggtctcactcctcctgcccccaccacccgccagcttggcctgggcaggaaggggctctctggggggtcctggctggggggcgctgcccctctgccacacccgcctggcctgggccggcgtggctcacttgccagcagctgcagctgccctcccggggctgggcgggggacaccgggcggcgacgggttgtagggg

SEQ ID NO: 240263 - DNA, 89 bp, Homo sapiens; identical to SEQ ID NO: 205284
  chr19:18715135-18715224
  hyper

SEQ ID NO: 240264 - DNA, 1412 bp, Homo sapiens
  chr19:18715790-18717202
  hyper
gggtccccatctcccgtcccgctggtacctgcagacactttacgacccacccgcctgctggtcaggtgctaagacacaccgtaagtagaaacatattgccgaggtgtgagaatcttttatttaatttcttccccccttaaaggaaaaaacacacttacagtgcccccccaccccctacaccttcgcctgctgctctactggctgaaaacaaagcttggcgctcacagtggcactcacaggcgctgcccaccgcctggcagagccgtcaggggccctgggagggcccgaggtagcccctcacctgaaagccaggggagagccaggctttcagcaagtgcccctagaagatgcccggaccctgccccttcccggaggagccctacaggcagcccgcaaacagcccagcacagggtggatgagcctgggagcagtgtgtgcccggcgacccccggggtggcccgtgcgcctggatggggtgcgtggagtgactgaacatctggggcgagtggtgcctgcctctgtgcccctgggtcgcctcccctgtgggatgtgtgtgaccgtgaatgtgtgtgtcggggatggaatgtgtgtgcgtccgcgatggtgcgcgaatgtgcacctgggatgcagtgtgcgcgagtttgagggcgagggtgacgggccacaagccagtgtgattctttgtgtgtctctgggtgtgtcccagagcgggtctgcatacggagacgtatccttgcgggggtgttccttggatggggggccccagagtgcctgaggccagaagtccctccagggcaggggtcttggcccgtagggcagcgggttcccagtgggccccctcaaagtttgggcccgctggtgcccggactcactggctcccgctccctctccctctcacccactcgctcacaaagattcctctcgctggaggctctccgcccgacgcagcctggctgaaaacggttctaagcgccgccggtggcggggactccgcggacccccgtgcgccgggtcccgcagggggagggcggtggcgccggcccgtggagacacaagtcccccgggaccccgggctgcgcgccaggcggccagagcggcccccctgcagccccgccctccccgtggggctcatccctccgcctgggggggcccgctgggggcccgcacccagcgcgccaaccgcgtgcgcccccgcctgggagcggtgccctgcagtcccaggggcccagagtccaccgaagcagacgcgtgcgcccgccacgtcctggcatgcagagggtctcaggccgcgatccccccagcccccgggggcctggcctggcgccctcggcccagctgcccaggtaacagggcctcgggcgcggaagcaggactctctggacagtggactgcggcgccgtgtgccccgcagg

SEQ ID NO: 240265 - DNA, 374 bp, Homo sapiens
  chr19:18717411-18717785
  hyper
acggcggcggccgccgcgcggattgggcggcggggccccggcggccggcgggcatggggccggcgctgccgggggcgcgcggcgggctgcggctcggcggcggtggcgcagggcgcgggacgcaggccgggcgcgggagggcgcgggccaggccgcccgcacgtcgctgggcgcggacgcggaggccggagcaagtctgagcagccgaattgacaaggcgctaatgcgccgctggccccgcccggccccgcccccggcccggcccggccccgggggggcggcgggccccgcaccggcctccccgccgcccgcccgcccgcgggcaccgcgcgccccgcccgtcccgcctccgccccaccgagaaccgcgcgcgc

SEQ ID NO: 240266 - DNA, 615 bp, Homo sapiens
  chr19:18721516-18722131
  hyper
gcttgtccgctgcccgccttgacctcggctgctgtggcttcccggacgcctggcctgccgctgattcacgcccaggccggcctcagcgccccccgcctgccgcccccagccaggccgccccggggggtaggaagtgggggggggggcgagggcggcgccgagtcaactttccctcttaagccccgaaggaatgtcggcggatttcctgaaacccgaccctggccgcccgccggccctcccgcccctcacctggaccggctcccccgggaacagcaggaggggcgcgggggctcaccttgggggccggggtcaagtcctctttccgctcacccccccagcggcctagtgcagcggaaagggggctgggtgtgcggcaatcagcctctttcccttctcccctcaggcgacctgggtgatcgacccactcctccagcctcagtttctccttctgcaaaagggcgcggggtgtccctcctccctgatgcgttttaagcaatgcccaaaggtcacctcccatcattggcagggctctgccggcttttctttgcttctctccctgtcacctggacagaaccactttgcagtctgagcatcagtttcctcacccatataaaa

SEQ ID NO: 240267 - DNA, 36 bp, Homo sapiens
  chr19:18722431-18722467
  hyper
cctcgccgccgggtcgcagcggcctagcatgggagg

SEQ ID NO: 240268 - DNA, 150 bp, Homo sapiens
  chr19:18722827-18722977
  hyper
gtccccactcccttatctggcggagaggaagctgggggtaccctctaaccgagattcggctcctggggctacagtccatcgccctggggtgtgatggttatggaagtcagaagtgtcgctatttgccccgttttcccatgagaattagac

SEQ ID NO: 240269 - DNA, 47 bp, Homo sapiens
  chr19:18723383-18723430
  hyper
gtcggctcacacgtcgcctcctccgccaagctctccgctctcctcga

SEQ ID NO: 240270 - DNA, 233 bp, Homo sapiens
  chr19:18811449-18811682
  hyper
gtgcatgccagctggtcattcgcccggaaatctctgggaggaagtatcagcacagcctagcagggcgcctgggactggctctgtgggctggccgtccctctggctggggacacggggaggccgagcgtgtccgcaaagacacgcgagctgtccacctttctgggctgcaggggtctgcagaacctcggaacctcggaggggctctctgtctgcttcagcgtctctttctcaag

SEQ ID NO: 240271 - DNA, 542 bp, Homo sapiens
  chr19:18899186-18899728
  hyper
gcccaagcccgccccgctccgcccccacccaccttacggcactggcgctccgggcagcgcagcttctcgtccgggaagccgtctaggtcagtgtcgcgaccacagaggatcccgttgccggcccagccaacggcacactgtgggagagtgtaagtgggtgccctggagtggccgccacccaaccccgcctcaagcccagcccgcccgcactcaccacgcacgaccgcgagccatcgcgctctaggacgcagtctgcatgctcgtggcactcgctgggcgagccgtcggggcagaagcgctgtgcgcgccgctggcagccggacgcctggtcgcccacgaagccgggctggcacgggccgcactggaaggagccctgcgccggagccgccggaggtcagcgcaggccgcccgccgctcgccccacctcccgcgatcctttcttcctccccagcgggccttacccgggtgttgatgcacacggagttggggacgcagttatgttgcccggtctcacactcgttgatgtccgtgcaaacctaggg

SEQ ID NO: 240272 - DNA, 963 bp, Homo sapiens
  chr19:18901246-18902209
  hyper
cctctccgtcagcctccatctccttccgtctcttttcctccccagctttccctggctctctgtctctgtctctgtgtctctgtctcccgtctcttctctctcccgaccgccccgccgcgctcaccgcacgcgtcacactccatcaccgtgtttttcaggaacgtgatctccctgacctgcaggggtgggatggaatcagcggggtcccaacctctcctcatccctcgggtctcccctctctctaccccggggtccctttctacagcctcttttcgccaaggactccctacccgccgacccccttccctccccatctcctctccaccttctcgggtacttcctctctcctcgctgggaactgagacccccttccgttccctggcactccctgccccgcacccgggccccgcacctgctgccgcagcagctcccgcacgtcctgcagcgccgcgttggtttcctgcagttcccgaagcatctgcgggcccaggtctgagcctgcggcggcaggggacctggtgaggcgtcatggggccggggaatcccaccaccaactcccaccgttgcagcgaacccggacctccgaggccccactgcgctcctctagtctcggtcccgccacctgctttctgcgcccggcacgtcccctacgaacagtccgtgagccccaaacagcctggatcccgggcctctcacgggtcctacagtccgttgtggggccgtgggcacggcgcgggtgctaacgcggcttacccaacgggctctggccctgtccggacgcgccgagggcagccagggtgagcagaagaacgcaggcggtgtcggggaccatggcggtggcggggagctgggtggctgctcgctttctaccgcccacgaggcccgcggggcctatttatccccaaggcacggccggccccagggacggcccaccacagccctgcccaacgtccagcctcaagg

SEQ ID NO: 240273 - DNA, 619 bp, Homo sapiens
  chr19:18980807-18981426
  hyper
gcgcacgatgtttccggcgacccccagctcctccacgtggcacggttgcagggtgacccctggggacgtccgccgcgagccagacctggtctcctgggggtcccggcgtcgaaacaggcgccacatgaccgggggaaccggccggagcctgggggcaccctggggctcatcgcgcagtcctagagcctggagcagggcggcggctgggcctgggggcacgggggcgcgggtcaggggcagcgagggcagcagcagggccaggaggaggaggaggtggtggccgcagggaccttgctgcggcggtggcatcttcctcccaggcgatgaccagagagtgcgcagggtccgcggcggcccgggaccagtgggctgagggcggggccggtgtccccggaggggcaggggtcctggggggcgtggccgggaactggaggcaggatgagggggcggggtcccaggggaggtggcggcggccctagaggagcagagttggagggggtggaggggcggccaaggacggggagcgtggccggggtattcggggtggggccgggtccacgggggcggggccgaggggttcagaagcgcttgtccttcaccaggccgttcctcagtggct

SEQ ID NO: 240274 - DNA, 1081 bp, Homo sapiens
  chr19:19005838-19006919
  hyper
ctctctcgcaggggcgatggtctccgcagaaactggggaattctgctgtcgcctcttggaggcagcacagtccaaccctgaagccccgggccatgtcacctccaagggagcgaccactggcgtggccagagcacccaggcccttgccatccctggtcggagggtggcgctgaccccagataggcacaaggcagcgaccgggcagctcctgcctcttcccgattacagcgggcaagccggccccgccgccgcacggacccagcagaaaacgggcagcggacctcgctccgggccggggcgcagcccgcatggcagggaggcgcatggcgcaggccgcggtgcgccgagccctcccgttcccggtcctgggcttctcagtgtctggctcggccctgccggaaagagcgcgcggtggccggagccatccaccgcgcggggccccctggtcccaaactgaccggaaagggccgtgcctcggtcccccacgtctcaaacatcccacctgtctcgggccccccatgtcccagactcaccccagcccggccacacccccgcatctacccggttcccccacgcagcactgtctgaagggggcgcgcggcggcccgagagaccttatcctggggctccaacgtcctgggcctctccagcccgaggcccccacccacgttccggcgaccccttcatccgcagcagccagcgctggaagaaaggaacgcgccggcggccccaggtccccggtcccggcttcccccagtccggggtcccctcgtcccggcccccggccacactgacccgaaagaggcgcgcagtggccgcggagcgcagggcggtccagcccagcgcgccgagcgccagcagcagcagctcgggcggcgccaggtgcgcgtgctcagccaggccgcgacgcgccagcccccagccgcagtccgtgcagccccgcgccgccgccagcgcgctgccccagccgcgctgcactagctgcgcgtagctcggcatgggctcgggccccgtcggccccgccgcgggccccgccgccgccataccgcccgctcgcccgccgtgcccgtcgcctgcgcccg

SEQ ID NO: 240275 - DNA, 326 bp, Homo sapiens
  chr19:19030080-19030406
  hyper
aaggcgttctttacgtcgaacagctcgtctacctccccggagccgccggaggccgggccgggggccggaggcgccatttcgctgtcttctcaccagctcctcttcctgaaagacacgtcagccggaagcaagacacgggcacgctaggaaatgtagtttactttttccgagcggcggcgaagtaagccaatgggaagctccacaataatatgcaagggggcggaaggcgtaagtgcgtcacggagagcatctcgggaattgtagtgtgtttctgcaagccaatgggatccggggaaacatgataaggatgcggtcgaggctgggaa

SEQ ID NO: 240276 - DNA, 182 bp, Homo sapiens
  chr19:19144430-19144612
  hyper
caagcgcgctgtccgcttcttctgggcggacgctctggaggcaaaacatttccctgctgggggcggcgaccaccgtgagcgtcccggaaggggcggcaaagacgcctccgtcgcgcacgaggtggcctcgttggctttaccttggttcgcggtcgtccttggttatcgtgagcgtccgcgag

SEQ ID NO: 240277 - DNA, 111 bp, Homo sapiens
  chr19:19174943-19175054
  hyper
atggatcccggggcgaggggcggatgaggcggggcatgacagtagcgtcgcgagggcaggaagaggttaaagaccccccccaaccccacactccacgtctactgccccctg

SEQ ID NO: 240278 - DNA, 222 bp, Homo sapiens
  chr19:19314201-19314423
  hyper
aaatcttgggacccggaaccgcgtgggcttggcgcatgcgtgttgtaattcaggcgccgaccgcggacgctccagaggtggggtttggttcgaccccgccccttcatgctcgcttcttaaagggcccgggttcgatgattgaatttaccttggttcccttgaagctgtagggaaaaggctggctgcgcgcacggggcgctgtccctcggcgcccgaaggtgt

SEQ ID NO: 240279 - DNA, 291 bp, Homo sapiens
  chr19:19322626-19322917
  hyper
tccaaaaaatgggcggggtggggattttaggcaggggagccccctccctcgcgcagccagaggcctcgggctggcgggggcgcatgcgcagagagccctcgcggcccctttataagcactgaggcggcgctggggccagcggagcgcagggcgcaggggctggacccggcgcggagctggctgagtcggagcgcagcgtcctttgtgcccggcggccgccccgggatgcgtccgagctaggagccaggtgggggatccgtgagggggccgtgttgcgggagaagacttcgg

SEQ ID NO: 240280 - DNA, 119 bp, Homo sapiens; identical to SEQ ID NO: 205287
  chr19:19336136-19336255
  hyper

SEQ ID NO: 240281 - DNA, 352 bp, Homo sapiens
  chr19:19431245-19431597
  hyper
gcctgagaggaggcgggggctgttacctgcaacatcccggttgtccatcttgagactcatccaatcccacaatgctccggcgccccttaaggggccctgttatagtgtgcatcgcctgatgggagatgtagtccgcctcggtcagactcgccctattactgcgtgaacgactgggtttttttttttttaacctccagaaacggaagcctcagcctatcagcgatgcctaagtcccagtcacgataaccaaacggcgtcgcccttttacaccttcccggagcggcagtcatcccaaatacaaactacatgttccaggatgctttgggcggcagatctcgcggaagccgcgagg

SEQ ID NO: 240282 - DNA, 31 bp, Homo sapiens
  chr19:19626942-19626973
  hyper
ttcctagccgtgccgcggaccatctcaagtg

SEQ ID NO: 240283 - DNA, 430 bp, Homo sapiens
  chr19:19648966-19649396
  hyper
ggcgacccagaggggttgctcgagcgccgtcacccagggccagggggcgtggcctgaatggggcgtggccagggcgggatctgcggtcgcatcccgcccccactctcagtcccagcggccgccagacccgccggagttggacccgagcacgccgcggagcccggaccctccctcggacgctctgccccggccatggcgtcgctgctgccactgctctgtctctgtgtcgtcgctgcgcacctggcgggggcccgaggtgaggcgcctccagcccccgcgcccagcccctgaggctcccgagggcctggcagccggccttgggtgaagccgcactcggggagagaacccagggacccacgcgcttccccggggactgggtccccttcaccagtcggatccccgcgaccacctggggcgcggagcgggcctc

SEQ ID NO: 240284 - DNA, 131 bp, Homo sapiens
  chr19:19650980-19651111
  hyper
cgccctggtcccagcgcgtgcggtgcccgcagaggccagcgagtggacgtcctggttcaacgtggaccaccccggaggcgacggcgacttcgagagcctggctgccatccgcttctactacgggccagcgc

SEQ ID NO: 240285 - DNA, 77 bp, Homo sapiens
  chr19:19651141-19651218
  hyper
cgcgcaccacggactgggccctgccgtccgccgtcggcgagcgcgtgcacttgaaccccacgcgcggcttctggtgc

SEQ ID NO: 240286 - DNA, 74 bp, Homo sapiens
  chr19:19651468-19651542
  hyper
cttttgaagagaggcgctgggaacagcgcggggcccaagtgcaccgtcaggaggcccagcgggtcaggacccat

SEQ ID NO: 240287 - DNA, 216 bp, Homo sapiens
  chr19:19651834-19652050
  hyper
aggttacccggaggcgcagttcctggggagggcggccacctgatctccgtccctgccttccgcagaagcctcgtggggcgcgtggggcccgtggggtccctgctcggggagctgtgggccaggccgtcgcttgcgccgccgccactgcccaagccccgctggggatgcgtgtcccgggcgtcctctggaggcgcagaagtgcgtgcggcctcggtg

SEQ ID NO: 240288 - DNA, 34 bp, Homo sapiens
  chr19:19729152-19729186
  hyper
tatccagcccgttccgtttgaaccccatacatcc

SEQ ID NO: 240289 - DNA, 259 bp, Homo sapiens; identical to SEQ ID NO: 205298
  chr19:19887242-19887501
  hyper

SEQ ID NO: 240290 - DNA, 300 bp, Homo sapiens
  chr19:19932101-19932401
  hyper
cctgacgaccttcccgtggcccctgaacaatctgggaaagacctgtgggtgcagagctgcccggagagggttccacgccagggcacagtcactgcgcagggaaaagacaggacaccccggggacccgctgtcaacgcagccgccatgttatggctggggcggagctgggcaatgagaacttggagcgcagattgtggagctgactgccgggaggcctgagttctgccactgccacagccacagccacttcctccccagttccaaccagcccctctccctctctcgggatgtcgaactggc

SEQ ID NO: 240291 - DNA, 300 bp, Homo sapiens
  chr19:19932461-19932761
  hyper
cctgcaggtcacagggccacagaggctgggcctctaggagctgacggcacagagcagtgaagacgatagctggatctctggcgtcagcgagagacaatgggcccgccaaagccggaagccggaaaccgtcctgttcgctacagctgcgtggctgattggacggtttccagcccagcgtccctgattggataatgcttgaggccccgccccctcaggtcctgagttacagaagacgtgatccgatgctggactgagtgaagaaagagagacagtctaagctgcagccttttctttttttaa

SEQ ID NO: 240292 - DNA, 800 bp, Homo sapiens
  chr19:19976554-19977354
  hyper
agcggctggggaggcggggccttaggcattatccaatgagggacgctgggccggaaaccgtccaatcaggcacgcagctggagcgaaccacatggtttctgggggcctttgtttctcgctgcagcgggagctccaggtttatcctcagtgttctgtgtcctgtgcttatagaggcccgtcctctgtggccgtgtgacctgcaagtattgggagagccacagctaaaccccgggacccctggaagcctagaaatggtgagtgccgggtccaacgtcccgagagaggggagaggctgtttggaacggtgggaagtggctctggcgggactctgcttcctcacagtcagctccacaatctgccgccggagttctccctgcccagctcggcctcagtccccttcagccataagatggcggctgcggtgacatccggggcccggcacagtgattgtgccctggcctggagccctctttcagcagctctgcacccgcagcaccgcgtctctcccagatcatgcaaggaccacgggagggtcgtcaggggagaatcctgactcggttccctgcgggttcatgaatgggaagagctttggtccgtgaggttgttagaaacaagcgcttggtgccgcaaaacaacacaaaacaaaaaactacccagcacttagaaaatttcacaggaaggcatatttacttctgaagaagagtgctgctcgcgtccgacctgatcgcaagagcacacagaagaaaggaaggaaggttttttttttttttgaggcggagttttgctcttgtggcccaggc

SEQ ID NO: 240293 - DNA, 139 bp, Homo sapiens
  chr19:19977534-19977673
  hyper
gaactcagttgatccgcccgcctcggcctcccagtttgaaaggggtttttaaccctaaacgccgttattgcctctgtgtccttcccccattggccggggtctgacctcacaatctaggctgacccgattggctactttc

SEQ ID NO: 240294 - DNA, 323 bp, Homo sapiens; identical to SEQ ID NO: 205305
  chr19:20011267-20011590
  hyper

SEQ ID NO: 240295 - DNA, 180 bp, Homo sapiens
  chr19:20011650-20011830
  hyper
ggcgggaccttaagaattatccaatcagggacgctgggctggaaacgtccaatcaggcaagcagccggaccgaacagggcggcttctggtttggcgggtcctttgtctctcggtgcagccggagctccaggtctcctcttcactactctgtgtcctgtgctcctacaggcccagcctctg

SEQ ID NO: 240296 - DNA, 120 bp, Homo sapiens
  chr19:20011890-20012010
  hyper
cctagaaatggtgagagtgccggtccgacatcccaagcgacggggaggggctggttggaaccggtggaaagtgacggtggcgggactcaggtatccccttagtcagctccacaatctgcg

SEQ ID NO: 240297 - DNA, 120 bp, Homo sapiens
  chr19:20012070-20012190
  hyper
atagcgcagcccccaggcgtcctgtctcttcactgtgcggtgactgtgccctggcttggagccctcgctgggcagctgcgcacccgcagagccgcttctctcccagattgtgcagagacc

SEQ ID NO: 240298 - DNA, 180 bp, Homo sapiens
  chr19:20012430-20012610
  hyper
aaattgtaaatcaaccctaccccttctttttccccattctccttttctcaaaacatcgcgcgtttaccctatatggaaaaagtttgtgtctagcccaaccaggatcagcttagattgtgcggtgggacctcagccaatatgggaaggacacaaaaaccggaactgcgttagggttaaatc

SEQ ID NO: 240299 - DNA, 874 bp, Homo sapiens
  chr19:20149646-20150520
  hyper
tccttcaagctcttcggctggacccccaaccacaaaccgtggctgggtgctctctgagcataaatcactgttaacttcaataagttttcaacattttaaaggtgactcccatagtttttaaacaggagaaggaaaagactgaggacccccgggatcacagcacttcccacgcacaaaccacacacggggtctggactctgccctgaggacgcttccattgtccccgcagtcggggcagacgcaagaacgcgcgcggctcttcccagggtgggctccgggcgggaagcgggagaacggaacgggatgcccgcccagggtcccggctgctggcccacctcgcatcctgtgcccggaggtgatcgacggccgagctgtgcctgccggggactccagtccgcagactccggagctgacagctgggaggccccagtcccgtcactgccggttccggccggtttcaaccagccctgcccccacctcgggatgcgcggcctggcacactcaccatttttcggcttccgggatgtcgtggagtcttagctctggatctcacagcatctgcaagtcagagggcaacagaggctgcgacagtcaccgggaactactagagcagaggatactaagcaatgaagatggaccctgagctctggctggagcgagacaaaggccccgccagctccaggacaccgccccctctaccttggctgcgcacctgattggacagttcccactctagcgcccatgattggatacagttccatgccccgccccctcaggtcatgagtgacaggaggcgtgatctgagaatgtgttgaataaggcaagagttacaggtttttcctgaacccttttctggcgcgcttccttcctgaat

SEQ ID NO: 240300 - DNA, 75 bp, Homo sapiens
  chr19:20162772-20162847
  hyper
cgcagggcggaactgctctgaaggcatggaggagcgacgctgaaggtggaggcttcgcccaccatgccgggagct

SEQ ID NO: 240301 - DNA, 169 bp, Homo sapiens
  chr19:20163387-20163556
  hyper
tggttcggcctcctctcattggccctatgcagctgggttgcctctctcacccgcacccaagggtctttccagagtgttgcgtcatttccagcccagggagctgccttctttcctaaactgcaatggaaactgtcctgatgtctgagacaatgtccgttgtgccgcagcc

SEQ ID NO: 240302 - DNA, 300 bp, Homo sapiens
  chr19:20188717-20189017
  hyper
aagcattatccaatcagggacgctgggttggaaaccgtccaatcatgcaggcagctggagcgaagaggaaggctttcgggtttggcgcggccatttgtctcttgctgcagctggtgctccaaatctggtcttagctgcttcgtgtcttcttctccagcctctgtggccctgtgacctgcaggtattgggagatccacagctgagggacccccggaagcctagaaatggtgagagtgcctttccagcattccgagagaggggagggactggttggaaccgatgggaagtggctgtggcggg

SEQ ID NO: 240303 - DNA, 120 bp, Homo sapiens; identical to SEQ ID NO: 205310
  chr19:20189077-20189197
  hyper

SEQ ID NO: 240304 - DNA, 180 bp, Homo sapiens
  chr19:20189377-20189557
  hyper
aggtcgaggcgagcggatcacttgaggtaaagggttgttagtacaacgtagttcttcttcaaagacgcaacttcctggtcataagttggaaaagttgtaaatcacccctaccccttcttctcccttctccttttctcacaaatcgcgcattacccgatttggaaaaagcttgagtgtaag

SEQ ID NO: 240305 - DNA, 142 bp, Homo sapiens
  chr19:21512074-21512216
  hyper
cagagccacagagtctgggcctctaggagcagaggacaaacagcagtgaagacgagaccggagctccggctgcagcaagagacaaaggccgcgccaaacccggaagccgccctgtccggtccagctgcgtgtctgagtgaac

SEQ ID NO: 240306 - DNA, 120 bp, Homo sapiens; identical to SEQ ID NO: 205311
  chr19:21541709-21541829
  hyper

SEQ ID NO: 240307 - DNA, 180 bp, Homo sapiens; identical to SEQ ID NO: 205312
  chr19:21542069-21542249
  hyper

SEQ ID NO: 240308 - DNA, 120 bp, Homo sapiens; identical to SEQ ID NO: 205313
  chr19:21542309-21542429
  hyper

SEQ ID NO: 240309 - DNA, 335 bp, Homo sapiens; identical to SEQ ID NO: 205314
  chr19:21579819-21580154
  hyper

SEQ ID NO: 240310 - DNA, 120 bp, Homo sapiens
  chr19:21580214-21580334
  hyper
tccttcagccgtaagttggcggctgcgccaacagccggggccccgggcgtcctgtctcttccctgcactgtgactgtgccctgcctggagtcctctctggcagttctgcacccgcagcgc

SEQ ID NO: 240311 - DNA, 379 bp, Homo sapiens
  chr19:21646195-21646574
  hyper
ggtgcttcagtttatttttgaacagggtaaagtaggaactggggaccccacagaccgcagctccttccacgcaggagacccgcacaaccagtcggagtctttccctgatgacctcacaacctggggaagatgacgggctgcgggcgcagagctgcgcaaagagggctacaggctggggctaaagccgctgtgctgaaacggtaaaggacgccccggggtccctgcaccggaggagagtgagggctgagctgcggggcactcaggctcacaagaccgtcccgccaccgccatttctggcgcgtcccaaagaggcctcccccgtctccaaacgccctgccccgcacactcaccttttctcggcttcaggaatgtcctggag

SEQ ID NO: 240312 - DNA, 255 bp, Homo sapiens
  chr19:21657508-21657763
  hyper
tgcactaatgctggggaagccgcgctgggaggtgggtcctgaagctttatccaatcagtggcgctggcgcgggaaccgcccaatcaggcgcggagttggagaggagggcgtggcctccggcatttggcgggccctttgtctcgctcctgccagagttttagttgcctgtctctgctattctgcgtcctccacctcgggagccccaggtgactttgtcacagccggtgggtgtgcgggttgagcatcccgagatgg

SEQ ID NO: 240313 - DNA, 211 bp, Homo sapiens; identical to SEQ ID NO: 205318
  chr19:21688290-21688501
  hyper

SEQ ID NO: 240314 - DNA, 180 bp, Homo sapiens
  chr19:21688741-21688921
  hyper
ctgtgctgacagccgggccccgggcgtcctgtcttccctccgcagtgactgtgcctgacgtgtagccctgtctggggagctctgcacgcgcaattccgcagtctctcccagattgtgcaagaaccatgggaggggcgtcaggtgagaatagtgactcgggatgcgggttcatgagcggga

SEQ ID NO: 240315 - DNA, 564 bp, Homo sapiens
  chr19:21769119-21769683
  hyper
tcccccagcccgcccgagagggtttgctggggcagggtggcccctgggacgggttccagacagttctaggcgctcaggtccgcagctgtgctacccccgccgcccgggacgcccggtccccgccagggccctctcactgtagctttaaggagggctggggccgggtgcagcggcacctggagtctcggtggaacccggcagcggtgggcgcggaccccggagaggctgccccgagcccgagcaccccctgaccgggcgctcaccacgggtgttgggacaagcagcggagcctgcgggctggagccaggctcggaccctccgcgccggggcgggcggccgagcggacgcagctggcagtggcggcgggagagcgccccggatccgcccggagcccaaccccgtggcacttcggctggctgggcagcggcgctggggacaacgcggggccttctgcaacgagcgcctgcgtgggactccaggggccggcgccccgctccgctccccccaggcctcaaccccgctggctacccgcgctgaaacctcacctgccgccggctgcaaacg

SEQ ID NO: 240316 - DNA, 240 bp, Homo sapiens
  chr19:22018454-22018694
  hyper
ccgactctcctgtttctaatagaccaaaagagggactagaaatgccacggaccaaagctcttcctattcatgaaactgcatcacgagtcaggattctctcctgacgaccctcctgtggcccctgcacaatttgggagagacgccgcgttgcggctgcagagctgcccacagagggctgcaggccgggacacagtcactgcgcagagaagagacaggacgcccggggctgcctcccagagc

SEQ ID NO: 240317 - DNA, 271 bp, Homo sapiens
  chr19:22018874-22019145
  hyper
gtggatcccccaatacccgcaggtcacagagccacagaggctggacctctagcagcagaggacacagaagaacgaagacgagacgcagagctccaactgcagccagagacaaaggccccgccacatcccggaagccgccctgtcctctcctgccccgtgcctgattggacggtttccagcccagcgtccctgattggataacttctaaggtcctgcccccgcaaaccctgaatgaaagatgtgatcagacgctgggctgaaagaagaaaga

SEQ ID NO: 240318 - DNA, 693 bp, Homo sapiens
  chr19:22034352-22035045
  hyper
aaaaaaaaaaaaattaacaacagaaactgaagaccccagggccgcagctcctcctgcgcacacaccgagtcgggattctgccccgatcatccgccgggcatccctgaacaatctgggaaatactcggggctgctggtgcagagctgaccagagagctccagacagggtaccgcgcaggaatggggcgggacgcgggaggctcggctgcgggcccagccgccatcttgcggccagaggggcctggggcggagctgcgccagcgaccaggactcaggagcggactgtgaggaggccggtcccgccactttcacagcctgctctcccctctcgggatgcctaaccccgcacactcaccatttcccagcttccaggatgtccgggcatcttagctgtgcgtctcccaggacttgcagatcacagggtaacggaggctgcgacaaagtcaccggggattcccgagttggagaacgcggaaaagcagaggcgggtcccaaggtctagcgggagctggagacaaaggccccgccaaaagccggaagccacggccccctctccaactgcgcgtctgattgggtggttcccacgccagcgccactgattggataaagctccaggacccaccctccctagcgtttgcgcattttatggacagggaaacaggctcaagtaggcggggcacatgcccagggaatt

SEQ ID NO: 240319 - DNA, 896 bp, Homo sapiens
  chr19:22610387-22611283
  hyper
ataattcaggcccgcggggccaccagccctccctcaagcccccccacactcatcaggtgacgacctccctgtgtgtggctgccaggctgggggtgggggtgtctgtgcttccctcgcccaatctgagagtggcctgttccagggggcgggcttcctctttgtttggcagccaggagtctggagcgcaggtgccgggcaggcagcactgggagcgctcggcgacttggctggaggccgaaggtgccgcccctggggaaccagagcgcctttgcaaggtgggctcggcgtacactcccctatccttctgtggcccccgggcccctcctagaagaccgtcctcatctccgaggaccttgaccgccagcagccccacacccgctccctctgcctggcgttgggtgcgcacttctaggggcagacggatctaaggagcccagcgggcttgacaggcagtggggcctccagagactgtcaccgcgttatgctggccactgccgggcaggggctggtcttagctgacaccctcacctccgccctccagattccagcctctgactctggccaatctggccaggacctggggtctggggccgggacagtggacgcccctgggccgggctaccagctggggcctcgcacttggatggggaccttaaggctccaggcgccacacacaccagtgcgccctctctggccgtgaatttcagggaggggcggcagcagagcccgcgggctggcctggtggggacgatcaccttttcccacctagtcgcccttgccagtccccgcgtcgcctgcagggccgcccctcctccgcccgctggtccctccccacccgcagctctccagtcccgcgcggctcggtggccagggctccaaggcggggccgcccacga

SEQ ID NO: 240320 - DNA, 199 bp, Homo sapiens
  chr19:22817003-22817202
  hyper
cagggcctgagggcggggggggggggggtcttaaacgttatccattcagcgacgctggcctgggaactgtccaatcaggcacgcagctggagcggaaagggcggcttccgggatgtggcggggtctttgtctctcgctgcagtcggagtatggtctagtgttcgctgttctgcgtcctctggtcctagaggcccatcct

SEQ ID NO: 240321 - DNA, 120 bp, Homo sapiens
  chr19:22817382-22817502
  hyper
ctgcgccccaagttcgccttgcccagcccagcctcagtccccttcagccatcagattggcggctgcgctggcagccggacccccgggcgtcctgtctcttccctgcgcagtgacggtgcc

SEQ ID NO: 240322 - DNA, 432 bp, Homo sapiens
  chr19:23257806-23258238
  hyper
ctcatttgttaattagcagtaattgcccgggtcagtgacacctcctacttgagcctctttccctgtccataaaatgcactaatactggggtgggtgggattgggaggtgggtcctggagctccatccaatcagtggcactggtgtaggaaccgcccgatcaggcgcgcagttggagaggagggcgtggcttccggcatttggcggggtctttgtctctcgctcccgccagagcttgggatcggtcttcactgttccgcgtcctctacctgggaaccaccgacccccgcccggcgactttgtcacagactctgttgccctgtgatctgcaggtcctgggagacgcacagccaagatgccagggcaccctggaagctgtgaagtggtgcgtatgcggggttgggcatcccttgaggcgagagcgggctgtgaaa

SEQ ID NO: 240323 - DNA, 32 bp, Homo sapiens
  chr19:23258706-23258738
  hyper
gaaatgcattcgagttgggttttagatttttt

SEQ ID NO: 240324 - DNA, 204 bp, Homo sapiens
  chr19:23299707-23299911
  hyper
tcactcagggcctgagggggcggggccttaaacgttatccaatcggggacactgggcggggggccgtccaatcaggcccgcagctggagcagacagggcggcttccgggatttggcgcggcctttgtttctcgctgccgccgaagctccaattttcgtctgtctgctttgtgtcctctgcacgtagaagcccagcctgtgtggc

SEQ ID NO: 240325 - DNA, 238 bp, Homo sapiens
  chr19:23386684-23386922
  hyper
gaggcgccgccctgcgctaggccggagtctgcccggcccagcccctcctcactcccttggactcttcacggtgtctccgggcccctgcacaatcctgagcgtccctcacatggaagccgaggtggtagcaggaagctggtggaaggaactggctccgcaggcagggaggtctcgcccaggaaatgctctgttggcctcggcttcctgcgcacgcagctgggcccggacccagggttgg

SEQ ID NO: 240326 - DNA, 120 bp, Homo sapiens; identical to SEQ ID NO: 205323
  chr19:23432613-23432733
  hyper

SEQ ID NO: 240327 - DNA, 635 bp, Homo sapiens
  chr19:23432793-23433428
  hyper
ctgcccagagagggctccaggtcagggcacagtcactgggcggggaagagacaagacgcccgggggccggctgtcagcgaagccgccatcttatggctgaaggggactgaggcccagctgggcaaggagaactcagggcgcagtttgtggagatgactgcggggaggcccgagtccgccacagccacttcccacaggtttcaaccagcccctccctctctctccggatgtcggagccgccactctcaccatttctaggcttccaggggaggccctggcgtcttagctgtggatctcccaatgcttgcaggtcagagggccacagaggctgggcctctaagagcaggggacacaaagcagggaagacgagaccaagcgctccagctgcagcgagagacaaaggccccgccaaatcccggaagccgccctgtccgctccagttgcgtgcctgattggacggtccccagctcagggtccctgattggaaaacgtctaaggcccagccccttcaggccttaagtgacagaagacctgaccaaacgctggactgaatgaagaaagagtgacagcctaagctgcagcgttttcaggcagggcttcctccctgagcttagcccaccccggagggtatttgca

SEQ ID NO: 240328 - DNA, 627 bp, Homo sapiens
  chr19:23456491-23457118
  hyper
gggcaacaaagcaagactccgtctcaaacaaacaaacatgtttaacaagagactgggagtctcacctgccacagctccttctacgcacacacgagtcggaattctgccctaatgacccgcctggcatccctgaacaatccgggaaatactcggcgctgcgtgcagagctgcccagggagctccagacacggcgccgcagggtccgggcgggacgccggggtcccggctgcgggcccagccgccatcttacggcgagaggggtctggggcggagctccgccagcggagactcaggttggcgacccgggagcggactgtggggaggccggtcccgccggtttcacagctcgctctcccctctcgggatgcccagccccgcacactcaccttttcccagcttccaggatgtcctggcatcttagctgtgcgtctcccagaacctgcagatcacagggcaagaggctgtgacagtcaccgggggctcccgaggtggaggacgtaaaacagcagagaccgatcccaagctgtggcgggagtgagatacaaaggccccaccaaatgccggaagccacgccctcctctccaactgggcggttcctgcgctagcgccactgattggataaagcac

SEQ ID NO: 240329 - DNA, 144 bp, Homo sapiens
  chr19:23577691-23577835
  hyper
attaaattatttaatcttttcgcggtgacgcccataaatttttaatagaaaaaaagaggccctgggaaccccacggactaaagtgcttcctattcatgagccagcacctccagtcaggattctcccctgacgaccctcccgtga

SEQ ID NO: 240330 - DNA, 120 bp, Homo sapiens
  chr19:23578015-23578135
  hyper
cacggattgtggagctgactgaaggaaggcctgaggctcgccacagccgcatcccaccggtttcaacgagccccgttccctctctcgggacgtcgcacctggcagtctcaccatttctag

SEQ ID NO: 240331 - DNA, 120 bp, Homo sapiens; identical to SEQ ID NO: 205330
  chr19:23578195-23578315
  hyper

SEQ ID NO: 240332 - DNA, 82 bp, Homo sapiens; identical to SEQ ID NO: 205331
  chr19:23598013-23598095
  hyper

SEQ ID NO: 240333 - DNA, 622 bp, Homo sapiens
  chr19:23598335-23598957
  hyper
acaaaccaacaaaatgtttaacaaaagagactgggagccccaccggccacagctcctcctacgcacacacgagtcgggattctgccctgatgacccgcctggcatccctgaacaatctgggaaacactcggggctgcgtgcagagctgcccagggagctccagatagggcgccgcagggactgggcgggacgcgcgggtcattgctgcgggcccagccaccatcttgcggccagagggacctgggacggagctgcgccagcagggactcaggtcggcaacccaggagcggtgaggaggccagtcccgtcggtttctcagccagctctcccctctcgggatgctcaacccctcacactcaccctttcccaccttctggaatgtcctggcatcttagctgtctgtgcacgtcccaggacctgcagatcacagggcaacagcctgtcaccggctggggcgagaggggggcagaggtggaggacgttgaatagcagaaagcgatcccaagctctggctgcagcgagagacaaaagccccgccaaatgccggatgccacgccctcctctccaactgtgccactgattcgataaagcaccagcactcgcccagtaccactccctccac

SEQ ID NO: 240334 - DNA, 429 bp, Homo sapiens
  chr19:23653859-23654288
  hyper
gagcttctcccgctcgaacaatttgcagctagttccggggcttcccttcctcctcccacaccggcccgcatcctagtgttgctttctctgcccccagcaccagcctcttcttgggctccctcctccccttcccactcgcgtctcttaggaaactgcgaccctagtgtttgctaaggagcaggggaggtccttcccgtcgccgacgccccccgcccggaaagcggcgcgttttctgggccgagggcgcatcgaggatgtgacccattccctggccaagggtgtgggtggggaacggcaaccgatctcactgcctggcggggcagcttcctttccaggcaaggcggagacctgcagggcgtggagaccccgcccggcgcagaacgcgctggccagtgggcagcttgacagggtccccgtgtgcctagcgac

SEQ ID NO: 240335 - DNA, 180 bp, Homo sapiens; identical to SEQ ID NO: 205333
  chr19:23869522-23869702
  hyper

SEQ ID NO: 240336 - DNA, 283 bp, Homo sapiens; identical to SEQ ID NO: 205334
  chr19:23869882-23870165
  hyper

SEQ ID NO: 240337 - DNA, 205 bp, Homo sapiens
  chr19:24154500-24154705
  hyper
cccactggccagcgcgtttctgcgccgggccgggtccccgagctctgcagttctccgccctgcctggaaaggaagcggccccgccaggtagtgggatcggccgccgcgtcccgtcctcacccttggccccgagggggtgacatcctcgatgtgccctcggcccagaaaacgcgccgcttcccatggagggcgtcggcgacaggaa

SEQ ID NO: 240338 - DNA, 700 bp, Homo sapiens; identical to SEQ ID NO: 205335
  chr19:24216104-24216804
  hyper

SEQ ID NO: 240339 - DNA, 99 bp, Homo sapiens
  chr19:24216924-24217023
  hyper
agttttgtatttctagtagagaagtggttttgccatggtggaagctggtctggaactcaagtgatccgcccgcctcggcctgaccgggaaatagaagcc

SEQ ID NO: 240340 - DNA, 75 bp, Homo sapiens; identical to SEQ ID NO: 205336
  chr19:28284060-28284135
  hyper

SEQ ID NO: 240341 - DNA, 811 bp, Homo sapiens; identical to SEQ ID NO: 205337
  chr19:28284338-28285149
  hyper

SEQ ID NO: 240342 - DNA, 543 bp, Homo sapiens
  chr19:29284391-29284934
  hyper
aacgtacctgagcccggccagccgctgtcgctgtcgccgccgcactcgcctgtccggacgcaccttcctcctcctccgcggcccccgagaagctgggcgcgcaggcaagggaggcgcggcggcccctgcggctggtcagttcaccaggtgcctgctcccgagcgagttgccaccgaccccgccgcgcccggccgagccccgcgctccgcagcgtgggaaggagccgagcagagacccttgctccgagagcccggggtcggcgcctgctcattcctcgcgcagccgtggggcagcgggtggccccgggcgcgcgcgagcagcctcttctctggcacgcagaggccggctccgtgtcctcggccagccgccgtgggggcctcctccgcgctgcctcgcgtggtgcccggctcggcctagatgcggctgctgagagatggcgcccacgcgcggggctgcggcccagcctctgcctccccagtactggtgggcgccgaacagctgcggggcgacacgcgctgggcgcacgcacgtaggagccggagg

SEQ ID NO: 240343 - DNA, 128 bp, Homo sapiens
  chr19:30015761-30015889
  hyper
gctcccagggaatcctctggcggtgcctccgggaggctggtagccggggaagcaggcacgtgaatccaccgggctgccccaccccaacctgaggtcagagctgaggcgtaggggccggggtaggggca

SEQ ID NO: 240344 - DNA, 106 bp, Homo sapiens
  chr19:30016729-30016835
  hyper
aagacggtggtccctccgagcgacccccgaggagagagggggagcgctctggggcgggggcggggcgggctgtggcaggagaggggagggcgggggcgatgcagcg

SEQ ID NO: 240345 - DNA, 292 bp, Homo sapiens
  chr19:30018455-30018747
  hyper
aagtcagcagtggttacccccaaacctgtcaattattttgacagcatcgctgttcccaccacctcccagaactccattcacgcccagcccctaaagagccacacctcagcctggtcgcttgctcgtgctcgctggctgcggccctctgatgggtgctgggtagtgaaggaagcccccttggtcccatcaggctctccccgccctctgccactttgaggaccccagggctcccacggctgcgttccagaggccaccagaaaaccgagtaccggaaagccggcaggacctccag

SEQ ID NO: 240346 - DNA, 59 bp, Homo sapiens
  chr19:30019081-30019140
  hyper
tccagtctccccagttcagccggcaggtgtgcaccagggcagccacccgttggtcaggc

SEQ ID NO: 240347 - DNA, 250 bp, Homo sapiens
  chr19:30020100-30020350
  hyper
ggagatcccgcggaaaggcgggttggtagcaggtggccagggagccaggcagcagcctcagcgttgcttgccttcttaagaaagcacagtgttagctgtaaagggcggggtccggtgacagggtggctttccttaggaagcgattcgggcaggccctccgtgctccgggaggtgaggagggccggctggggcgggactgtcggttggagcgcgtcggggcgggaaagacgtggggaagttaaggaacaag

SEQ ID NO: 240348 - DNA, 575 bp, Homo sapiens
  chr19:30020559-30021134
  hyper
tgccactgggtagacgcgggtgaaagggaagccggatcgtgatggtgggcaaaccaggatccgggaagtgttggggtgcgcggatgagggggcgcgacggccagggtggccagaagagtaggtttgggagctgcccagcccggcctctaaccctgctctcttgcagaccgtacgcgtccagggcaatgacatctcacaccggcttcggctgtctgccgtgcggctgcaggacgagggcgtgtacgagtgccgcgtgtcggactacagcgacgacgacacgcaggagcacaaggcccaggcgatgctgcgcgtgctctcgcgcttcgcgccgcccaacatgcaggccgccgaggccgtgtcccacatccagagcagcggcccgcgtcgccacggcccagccagcgccgccaacgccaacaacgcgggcgccgcgagccgtaccacctccgagcccggccgcggcgacaagagcccgccgcccgggagccctcccgccgccatcgatcccgcagtccccgaggccgcggcagcctcggcggcccacacgcccaccaccacagtcgcggcagctgctg

SEQ ID NO: 240349 - DNA, 235 bp, Homo sapiens
  chr19:30096855-30097090
  hyper
gacctcaccccaccgtccccgtcccatttccgccctcccagatccccaacctccttcgagtcctctccaagtcgcctcgcctcgctccactccaggccttagcaagcattccacatgcctttaccccaaccctactgcctgtcccccaaaagatgcaggcggaaaagaccccaggaagcgagcccactcctccccactgctcagcaacaccgcctacgacgttctcagtagccga

SEQ ID NO: 240350 - DNA, 99 bp, Homo sapiens; identical to SEQ ID NO: 205339
  chr19:30155980-30156079
  hyper

SEQ ID NO: 240351 - DNA, 87 bp, Homo sapiens; identical to SEQ ID NO: 205340
  chr19:30156299-30156386
  hyper

SEQ ID NO: 240352 - DNA, 55 bp, Homo sapiens
  chr19:30206577-30206632
  hyper
gtcaagggtgctgcgtcagtatttggtgaatgtgtgggccggagccagatttcct

SEQ ID NO: 240353 - DNA, 540 bp, Homo sapiens
  chr19:30713399-30713939
  hyper
aacaagggccgcgccgggaggtctccccggggacccccactcagcttgctcaggtcctggaggcatgcagagggcgtcggcgccgacagggggagccggagagccccctgcccggccgtctgcggggctcaggcggggcttggcctccgatgagcgcgctgtctctgcccggtgggtcccaccccgcccggccacgcaaagccgtggcagccccctcgcggcagcgcgccccaggcgaagcaccccgggccaccgggagcgcggccctcccgagacgcacgggctccgaggccgcagaagccttgggcctccaggcctggaaggggctcccctggcctggaggccatgggcccggcccagaccggccagacaccgccagggacccccagaacgacgccaggacgcgcgccgggctccgtgcctcccacggcccaggcgaggccggcggctcgagggttaaaaggcgacccccattctgtaggggagaaagtgccttttctccaagtccatatggtcacttcctttcgacctgctcggccc

SEQ ID NO: 240354 - DNA, 125 bp, Homo sapiens
  chr19:30714452-30714577
  hyper
gcagcggcaaggcccggtgcccgccgacggcgcgcctggggagaggaccaccggcggtgagggcccaggcccagcgcccagggcagctgcgacgcgtccgtctccaacgccggcacgctaaccca

SEQ ID NO: 240355 - DNA, 206 bp, Homo sapiens
  chr19:30715560-30715766
  hyper
gcaggcgcgggaggcgaggctgaggacctctccgcgtttgtatcgcggcgattggcaacataactgccttatttacattaaatacgccacaaggttacagcgcggatcaacgtcatttgatcgctgatgactcccttaaacgcccgggctgtgactgattcttcgcgtcccgctgtccaccgagattcacccgggagttttttttt

SEQ ID NO: 240356 - DNA, 374 bp, Homo sapiens
  chr19:30716161-30716535
  hyper
ggctcatcaaagctaaatgccgcaagacctatctagttgctgtgaattatgccagggcgacaatggagagcgtttttaatggtacaatgcatttcacctaccagatagggggaggccgagccggggatggggatgtctgctggggctgggtgatgagtatcaatgaacggggcgattctgaaaagaggctgatgaaaatcgagcccgccctgccccggctgggctgggaacagttcgcagggctctgccgagtgggcgagtgaggcgcgcgagcagggcgcccgtcccccctcagccccggaaaatgatcaagtcaatcgtgtgggcatgtttcattattcattgaacacaatcttttacaacgctccgtttac

SEQ ID NO: 240357 - DNA, 385 bp, Homo sapiens
  chr19:30717255-30717640
  hyper
ctgcggggttccggcccctccgcccgtggagagagggtaatttgcaaccttttttttttttcaattaaagttagctgatgcttacaatgtgtcaaacttgcgggcgccgagagccgctgagatctgccattttgtgattgcatcggcctcctgtgccccgggagcctggccaggctgaggccggagagttggtttcagggctgaggtgccagggtccgaacccgcgaccccaggaaaggccgtggcgcctgcaagcgcaggcggcgcccgcagcacctgccccagccgggcctcggcctgggggcccagccgggggccaaagaggaaataaataaataaataagtaacaggttatggagggaaaagagccggccagtcccaggct

SEQ ID NO: 240358 - DNA, 189 bp, Homo sapiens
  chr19:30719080-30719269
  hyper
ttgggagggggggcgatcttttcccatcactcacatctttgttcattgttcactgagtggaaggcaggcgacttaaagagacgaaagagaggaaaaaggggtgagagacggagagaggaaaaagaggggggcggccagaagagggaaggagaggcgtggggacagggcccccgcccccgccggggtcgg

SEQ ID NO: 240359 - DNA, 86 bp, Homo sapiens
  chr19:30719449-30719535
  hyper
ccgcgcctcccagtccggagtccatttgcataattggattttttttttttgcctccttctttctccctgaaacttgtttgaaaacc

SEQ ID NO: 240360 - DNA, 817 bp, Homo sapiens
  chr19:30865606-30866423
  hyper
ctttccctcctgcaacttctcggaccgtctctgccctctctcctccagagagggcgagtttcatcctggagggaggccgggggagctgcgaggccacccccagccggcgcccgggcggattgcgagcccccgcgggtccggccgggggagcggagactggccccccgcccgggctggggcgcctgccgcccgcgagccggaagagcgccccattcacgagcaggcagccctggcagagggttaattgaggatcattgttgttggttccaggaggagcgaagcgcctggagatcgggcgcgcgggcgcggctctgggagcgggggaaggtgaggggaaatgggacatgatggcattaataatcgttaccaaagacggtgggagtaacaaaggaatgcgtctccgagacgccgcccagccccggggtgttttctggcgcggtcgcggtgcaggaacgcgagccccgccgccgagcctcccgccgcctgcgttcgttggcgcggcgcccggcggtagtgccaccccgaggccgagcgctgcccccgccggcccgcggctgccagccggccctgcccgcgcccgggccccgcgagcggccgcacttcaccttacggaggggagataatgagatcaattagaggcgccgtcaccgcgccggagacagctgccgccgcatagtaatcacccgcgggctgggtgcgcgggggctccccgctacctgcgcgcctgctgctcccaccacgcggcaccgacccgggcgcgcccccggcccctgtccgcagcccacagccacaccgcgcaccctacaccctccttgcg

SEQ ID NO: 240361 - DNA, 70 bp, Homo sapiens
  chr19:31839494-31839564
  hyper
aggggagaaggaaacgccagcatctaacatggacttgacagtcatctgacaatacccagaccctgtgcgc

SEQ ID NO: 240362 - DNA, 108 bp, Homo sapiens
  chr19:31840404-31840512
  hyper
aggaggtggaggaggaggaggaggaccgcgctgccggcggaatgggaagtttgacaaatcgctccagaggccagaggaggagggggcggggaggagcggcggccctgc

SEQ ID NO: 240363 - DNA, 81 bp, Homo sapiens
  chr19:31840992-31841073
  hyper
agctgccccacccggctcgcactcctctccacccgccgactccggagcccccagcgtggtccccgggccggggctggcgtc

SEQ ID NO: 240364 - DNA, 101 bp, Homo sapiens
  chr19:31841253-31841354
  hyper
ggtgtgggagggggttccttcaagtttcctctcctgactttgggatgatcagggtccctccaccccgcccctcgcccccgggagccgggccgcgcccccca

SEQ ID NO: 240365 - DNA, 1042 bp, Homo sapiens
  chr19:31841834-31842876
  hyper
gagcgcgggggcggcctccgggcccactatccccgaggcggccctgcgcccgggcgcgccggctggggctctggcgctctcgcaggccccgaggccgacagtcccggcgagggcgggcgccccgcgctccagcaccggctgcctgagcgctcctggagcagcaaaccccagacttcttcctccttctctccttccttccttccccctccccttatctttttctttttttagtctctttctccctctttttctgccctgtgtcctttttattttttctctacgactgtttttgcaagtttgtttcaaaagttcacagcatgctttcttttcttttagaccgggagacagtgatctcacccacacggtaagatcaaaagtctccgctcgcccagcctgcgggcttgggctgggtccagacgtctcccaggatgcagatgcgccgccgctggcctccccggctataaagccgcctccagcgcctttccgcgcgcaggagcgctcggagttgtggggtacggaccccaggcggggcagggagtccgaggcgggctgcggcggggctctcgggctggcggactcgggggctgaggcgccgtgcgcgttgggtgcccgcggccgcagaggccagaaccgctactcctccaggccggggagacgcggccgtggagcgtgaaacgcttcttgcaagcgaggaaacggtgagttggccgacaccgccggcggcctcaccattctggtggccgcgctgagctcctgtcgcctggaggcgggttgcgccgcacggggtcagctcccgccggctcccagctcaccttcgaagctcccacttaggcgcgcccggtgcggcgtgtgcacagcgcggggcgccgcacacggaagcgtgtagttctccctggtcgcgcttttctcctcctttccatcccctcgctgttcttgcaaacctctgttccttcggccccctcccactgcgggccgcggcctgaactcgggtctccgcgtagccggccgccgccgctgggtcgctgcctggccctcccccgct

SEQ ID NO: 240366 - DNA, 356 bp, Homo sapiens
  chr19:31847940-31848296
  hyper
aaatgccgctgtctcggccaccaatcgggcgccgctttcctgcgcgggcgatggctcctctctggcgcggagggcacccacatttgcatgataaattgaccagactggcggcagccaatgaaatattcaaattaggctgggtggcggtagtaggggtggagtccctggggctgccccttggcgcggcggcgggagcgggcgctaccacctctccgtcagcgccctctggaggcgggacagcgcgggcggccgctctggcccaaaagacgagatggggggttgggggtttgggatgcaagggggtttgggaggggtgatggtggggtctgggtggtgcttcgcggccccaggaggct

SEQ ID NO: 240367 - DNA, 171 bp, Homo sapiens
  chr19:32532872-32533043
  hyper
tgctgcgagatcctgcagcacggcgagcggcaaagcgttgctcaaaagcgccacccaaaggcgggaggagtgtaacggcattcagggaggatcgtttttgttaatttcagcaatccgaatgtaaaaaatgacagcgccacgcaagttgacggaggcttttgattgaattga

SEQ ID NO: 240368 - DNA, 470 bp, Homo sapiens
  chr19:32715371-32715841
  hyper
tgccaccaaaacccgctccgagggccccgccgggccgccctggcagctggaaaagcgcattcctgctcgcccgaggatgcagaaggcaaccgagtccccgggcggcggcggggcaactgcggaaatcacgcagccagatgaagctcataaatttcccctatgaacaattgttttcatttccctcccatgccactagatattataagtggaaagcaaaacacaagtaaatatgttcattccgctcttgcgatcggtgataaaccggaggcggccgaggccgacagaggtcagcaggccgctcgccacgggtctgcgagcggacactgccaccctccggccgcgcgcgggactgcaccggccccaccgcccggctctcccgcccgctcgctgcccgccaatgttcgctttgcgcccttcgctcaatgtgcgtgcaaattacagggacattcgaaaggacagagagctcccat

SEQ ID NO: 240369 - DNA, 113 bp, Homo sapiens
  chr19:33166109-33166222
  hyper
tggggcggagccgcgccacagctgacccaatgagaaaccgtcgtttcccagagtgacgtgtacgcagagcaatcatggagtccagcccagccgggggcggggctcaggcggct

SEQ ID NO: 240370 - DNA, 120 bp, Homo sapiens
  chr19:33166794-33166914
  hyper
gctctgcagcctgcttgccccggagttggcacccacggaggatggggaccgcaccctcagcttcgcagggagccaccgtggaggccagggcggtgcagagacacgacgtgtgactcggag

SEQ ID NO: 240371 - DNA, 80 bp, Homo sapiens
  chr19:33167934-33168014
  hyper
tgggtgtggggtctggcctgtgcaaggggagtggtcctaaaaccccgtgtgtgcatgggtacacgcgcgtttccagtgca

SEQ ID NO: 240372 - DNA, 144 bp, Homo sapiens; identical to SEQ ID NO: 205349
  chr19:33182512-33182656
  hyper

SEQ ID NO: 240373 - DNA, 53 bp, Homo sapiens
  chr19:33462904-33462957
  hyper
gcagcaaccacgtcggccattggctcagctcggccctcgaccaatcagagcta

SEQ ID NO: 240374 - DNA, 39 bp, Homo sapiens; identical to SEQ ID NO: 205350
  chr19:33555231-33555270
  hyper

SEQ ID NO: 240375 - DNA, 998 bp, Homo sapiens
  chr19:33685159-33686157
  hyper
cggcgggcgcgtcacgtggctggcgcagcgcggcctccaggctccgggcgcgggcgaggggccgggcgggaggactgacagacccacggacgctctaccggcggcacccggccgggcgggctgggcgcagcgcggggcggcccggggacgccggggccgggcgggctgcgcgccgcggggcatgggcgcgccgggggtccccgggcccaggccggccgcggcggggctcccggggcgcgggggcagcggcgggcgggggtcttccctggcggccgccgctgagcccccgcagggcccgtgacgccgcggccgatgtggccgcgcgcgccctacgggcctgcaccgccaccgcacaaagacgcctcgggagccgccgcctgcacccgggccgcagcagccacgccagccggagcccgagccctagcccgagcccgagcccgagccgcagccagagccagagccggagccgcagccggaaccggagccggagccgcggggcaggaggcggcgcccgcgggcggccgggcccggcatggagaagcgcgcggccgcggggctggagggcgcgccgggcgcccgggcgcagctggccgtcgtctgtctgggtgagtgggccgcgcgggccgggcaggtccgggtcccccgcatggcagtccgcgccgcgccctgaccgacctcctctccggccgcggcatcccgagccccccaccgcggtggctcccgcgcggagacccagagaggggccagcaccgcttgcccgcctggccccgggcctgggagggcgactctggtggcgcagccccggctcccgccccgctcggagtagcgcccggagcccgggctgagcgctggcaggaggcccttcgtgcaggcggcagccttcaacccggcccgcccgcgctgagcctggagacgagggggccccgggagctggggacaaaggccaggccggctgtcccctgaagaagaaactgtttccggcccggagttggggtggg

SEQ ID NO: 240376 - DNA, 55 bp, Homo sapiens
  chr19:33717598-33717653
  hyper
acggagaaggaggctgtggtcgcgggagagggtcgggagtgcggggatccgaggg

SEQ ID NO: 240377 - DNA, 221 bp, Homo sapiens
  chr19:33717833-33718054
  hyper
ggatgaggcctcgccgggcgccccgtccttccccccagtggcggcctccgggtttgctggggccctgccaggggtccgacggctgcagggtggaccggggtgggacggggcgggggcgggtccctggcaggggcgggtccctggcagcggcagggcctggaggtgggagcggggcggggccggcgtttgcaggcacacaggagcttcgaagttgggggcgg

SEQ ID NO: 240378 - DNA, 834 bp, Homo sapiens
  chr19:33793871-33794705
  hyper
aaccaggcctgtcccggacccgcgtcccggggaggctgcagcgcagagcagcggggctggggccggtggggggccgtttgggacgcgcggagaggtcctgagcgcggtggctctgcgtctcctagctctgatctccaggctacccctgtgattccgcgcagaggtacctctcggaggacgccggggtcccatgggcggcgccgcgcagggcgctaggaccccgcggggagcggaggcggcctcggcccgggagcctggaggacctggccggtcgatccgcccgggctggaaaactttctttataattacttctccaggtcggagcgcgcggcttgctaggcgcgcggggccggcgctgttacccggcgtggagtcgccgattttttttcctgcgggaccgcggggccccccagactagcggagctggacgccggggcgagcacggggaggggcgcaccgagggaggagacaaacttaactctggggccgggattccgaggcgggggccgcagccctcgaggcccgaagccaccgcttcctcccccgcctccccattcaggtgggcgccaacggcgggagcgagggtgtccaggccgccgggctgccaggtccgagcacgcacagggagaactctgcccagtggttcgccgggcgctgtagtccccgggatcctagggaccgaggcggccaggccctggggccccttgagtgcggcagctaatgctctcaccgcggcgggggaaggagcttgccaccgagacccccagccacgtgcgtccctcgcattctttaccggggccggggtggcggctacggaccgtcagctgggcccag

SEQ ID NO: 240379 - DNA, 49 bp, Homo sapiens
  chr19:34113209-34113258
  hyper
gctgcgcccctgccccacccctgttcccgccctgcgcaggctcctggcc

SEQ ID NO: 240380 - DNA, 46 bp, Homo sapiens
  chr19:34113798-34113844
  hyper
gcgtgcgtgtgtcgggagtgcgggagtcggagcctggggcggctcc

SEQ ID NO: 240381 - DNA, 215 bp, Homo sapiens
  chr19:34175219-34175434
  hyper
aaattgccttccccgggagtagcgtgccgcccggcaggggcctgggtgtgccaaggcccggctctggggatttcaggacccaggccagcgctccccagcagcagggcaggaggcagcctgagagtcggcagccccgccttggagtctgagcactcgcgcccatccgtcaaccttgcagagcattgcaactttatgcctacgcataaaaactggag

SEQ ID NO: 240382 - DNA, 39 bp, Homo sapiens
  chr19:34287966-34288005
  hyper
cgcccggccagggtctggacctgggcgggggcggccgct

SEQ ID NO: 240383 - DNA, 477 bp, Homo sapiens
  chr19:34288305-34288782
  hyper
ttcgggatgcacaagtcccggcttggcgcccaaaatcagagaaagtctccagtgggacagatgtgcgtcctctgacgcccaccccacgagtccgaaacctggcaggaggggctgtcgcgctggtggtggtcccgggcgcgcagggtttggggctgggagaggggccgcgatgggagggatcgccgcctgcagatccggttccccgctgcccgcccgcaccccctgacctggacgcgcgcacccggcacacactcgcaaacacacccgggggcggacccccgcctctgcagcgcctttctgtcttccggcggcccccacccgcgactgcagaaagataagcttcaagttttcgctccgtatctcaaatgtgcatgaaggaatttaactgcacgagtgaataacagcattagtttcaattaatttttttttaatcccggcaacaataaactttgagaacaaaagcgcttttacgtcctt

SEQ ID NO: 240384 - DNA, 686 bp, Homo sapiens
  chr19:34310890-34311576
  hyper
ccttttctgtgtcctggacccggttcagggcccccgaggaagctgcggtttggggcgagccgattgcaccagcagggccgggctgctgctcccggggctgacgcgggccacgccctcctggacgcggacacacccccatttccccgggcccacagagccacgcctggccctgcagccaaacagcgggaaggcagattggtacgagtaggtacaaggccctggaattctcgcccggttgccacacactgcacggagcataattgggggaggttgtgcaactgcccgggaagccggggctcgcaacgagggctctctccaagtccccatcacaggcctccggggagcctcgggacagagcctgacgccaccttcgggtgacatcgatggcctcgctctggcagaggagtagtgtggctctgccgagaactggggagcccgggtccccgcagggccaaggggagggagggctggcggaaggggccgcgcccacagccccaggtggcagcagcggcggtggcggtcccgactggcagagcctaacgagaacagggcctatccccaggggccccgggctggacgcagaccagatctcgcgggggtgggctgggaggcgcccgccagaggccggaggctgacagtgcctttcctatcctatgggtctattgtgggcccgcggagcccccatg

SEQ ID NO: 240385 - DNA, 190 bp, Homo sapiens
  chr19:34895108-34895298
  hyper
cttcctatcacagcgcattaaggggcacataatgcctgggactccgggatttcgagcccctgacgccagcggcgcctctgtggctctgggacctgagcgcacgcgccttaaagccacgcctccgcatcggatcctagtaagggagcggggttatcattttagcgtagcgttgcgcgtgcgcagagaggcc

SEQ ID NO: 240386 - DNA, 85 bp, Homo sapiens
  chr19:34919058-34919143
  hyper
ccaggctagaaggcgacccttagactttttaggtctgatggcgggcctatgctggtgtgggaataacaccgccggtctcagctgg

SEQ ID NO: 240387 - DNA, 1738 bp, Homo sapiens
  chr19:34972055-34973793
  hyper
gaagcgacccagcgcgaggaccagtccccaaccaacccgctcctagttctgggcgccttccccagcagtcagatgggggcttcagaggccggtgcgcggccacatggccccgggccaggcagggggtcgtggggacgcatctgcgctaggcgcacagtattcctgggcgcgggacgggcgaagcgccgtgggttccaagctgagctgggtcggccctgcagcgccggagagcaaggcggcgcagggaagggagatggggcgggatgtggggaaagctgtcgactgcttggatctctccggcccggatggcgccagctgcctccagctcagcctgcggaaatccgagctcttcccagcggcccgacggcccgggcgccccgcagaccctgggctctccccgcggtgcctccgccgcccgcccctgcgtcctggcccggcctccacgcccctccgaggtcccggcgcagcgcggccgccgccactccccccacattccagaggccgcagcgccgtctccttcctcgcattcctgcccccgcaaaggagtccctccgccccgcgcgaggccgcggcgaggagggggcgcggcccggcgcctgggagcttacattcctccgccgcgcgcgccgccgagcagggcgccgcgtcccccggcccgcgcgtggccgccggaacgaccccggcccggcgccggccccgccccgccccgcgcccaggggtcccggggcgggctccgggcttcgggcggacgatgcggcggcccggccggagcggcggcgggaagcggaggcggaggtgacgcgccagggccggcgggccgggccatgcagcgctccagggcgggcgcggacgaggcggccctactcctggccgggctggccctgcgggagctggagcccgggtgcggctctcccggtcgggggcggcgggggccgcggcctgggcctggagacgaggcggcgcccgcgctgggccgcagagggaagggcagcggcggccccgaggccggggcggacggactgagccgcggggagcggggtccccggcgcgcggcggttccggagctcagcgcgcagcctgcgggcagcccacgggccagcctggcggggtccgacggcggcggcggtggcggcagcgcccgatccagcggcatcagcctgggctacgaccagcgccacggcagcccgcgctccggtcgctcggacccgcgtcccggtcccgggccgccttcggtgggcagcgcccgctccagcgtttccagcctcggctcccggggctcggccggcgcctacgctgacttcctcccgcccggcgcctgccccgcgcccgctcgctccccggagcctgcggggccggctcccttcccgctgcctgcactcccgctgccccctggccgggagggcggcccaagcgcggccgagcggcggctggaggcgctcacccgggagctggagcgggcgctcgaggcgcgcacggcgcgggactacttcggtgagctcgctcggcccggcagttccctgcgcgcatggctggggtccggggttccgagactgcctcgggtaggcggccggatcagcggaggagagcacggggctggctgggggtgcagcagtgcacggggttgggacgaggaaggtgcatcccctggggactggggagcgcaaagggtgagtgagtgcgcctggatccccagcagcggcttcacccctgcctctgggtcccccgacacacgaggggt

SEQ ID NO: 240388 - DNA, 475 bp, Homo sapiens
  chr19:35068405-35068880
  hyper
ccggggctgcagcgcggcccgggcttccctggcggggcctacctgcgagcagcggcagcagcaggagacccagcagcgccagggctcgggcggacgccacgcggttcggggtcggggccggtaggtatgcgggtcacactggggcagtgcggacgcaggtccctctggcatctcgggagacgcggtccttaaactccgtgtcctgggggcgggcccgggtggcgtggcttggctggacagggagggtaggggcggtagtggggtttgtggcactccagcgtagcaggttgcatctgcgggtccccgcccctgccccgcccccagcccctcccatggtgctggatccaggcagctgatgtgcaggcggggacccctggctgggcgcggtcctgggcgcgtccctgcgcggttcaggcttccatgcgcgctgagactccgctggctctgtggcctgccccgtcgtgtgtgcgtcacg

SEQ ID NO: 240389 - DNA, 149 bp, Homo sapiens; identical to SEQ ID NO: 205364
  chr19:35168260-35168409
  hyper

SEQ ID NO: 240390 - DNA, 535 bp, Homo sapiens
  chr19:35263668-35264203
  hyper
cggatgggtgcatgcgggcggtgacccgagctcgcgcgggctgcggaaccctccactcaccaacgccggcgccgccatgggcccagggggctgggtgaggccgtgagagtcggcgaggaagccggtcctgcgggctcggccgaccccgggctccggctctgggctgcgagggacctcagtccccgccgtcgtgtaaaatgcacacaaggttcgcggcgccgcctctgcgcgccgtgaggacacagggctgtcgccaaggccccaggaagggttttgcagacgcttgtgggggtgggatcgcggctgacataaaagcgtgtaagtgggtcctatcctcctcactgtccgtctctactcggtctcgaaaagtggcccctgtctggcgttctacccagtgtagcgttggcaaccacagcagccgcaacctaacggcggacgaagactggacgccggaagtcccgcccacgccgctacgggaacgcccctctgcgccttccgtctatggcttggggtcggcttccgtcccttgtagcac

SEQ ID NO: 240391 - DNA, 481 bp, Homo sapiens
  chr19:35395937-35396418
  hyper
ccggcgcacccacgcgcactggttgccaaatctcccgctttcaggccaggtgcggagcgcgcctcgacagtcctgaacattctccacttaacggctgagagccgctgggagcctaacgcctgcaaccgagtgagctcgagtccggctggggtcggaccgttggacctccccgttggccctttgttgtacttcttcgcgccctgggctcgcgcaagctttctctgccacgcgttccaacggccgctcaccggcatcgggctgaacacggtgcgcttcacctcggagttcccactccactccaaggatccaacagcgcacaagctgctcttcacgggcaactacctctgcaagcttcacccccggccccgccacgccccgcagggttccctgtctggtctggatcacctcgctctccctgcgcctctctccttggcctagctagacaagtgcttctcacgatccagcgcgtttaccgctcggt

SEQ ID NO: 240392 - DNA, 542 bp, Homo sapiens
  chr19:35417688-35418230
  hyper
ctcaggtgtcagacgccccagcttcgaggtctatggctcccagcaactcgagcgcctgcgcctgcgcattctcagccggacgggagcgcccagaagtctccgggcgccggtgggcggccttgtggactgcgccgggcatgctcggcggtgtgacggctcaggactgcatttcccagaggctgcagctatccggccaatgtagcctgaaactacatttctcagcggccactggaacgacctcaatctctgcctcctcgccagttcattgtggtcgttgacccggcagcgagctttggagttcatcgagggagaagtcagcgcccagctccgaggttggagcagccccgccgggcaacttgaatttctgcaaacgaacacagcaccgggagctctgcagacctgtgtcggcgcggaacccggactgagacatgcgtgagcgttgggtggaccgggcgaggatcccgggccggcgagtgcgggagcggcagggcagggagggtgcgtcggccggggccggtgtgcatccgcgaagactgggtgca

SEQ ID NO: 240393 - DNA, 158 bp, Homo sapiens
  chr19:35454864-35455022
  hyper
gaaagccggcggggcagcttcacgggcgtagccccagccgccccgcccccaactcggggtccccagctcctggggactcagcctccccgccgggaaatgacctgcgaggctgcagtgcaggaagttccggcccccaccgtggcggccgggagagttgc

SEQ ID NO: 240394 - DNA, 343 bp, Homo sapiens
  chr19:35490295-35490638
  hyper
cgtaccctggagagcgctggggagccacagccccggagctgtgaggtgggactcgcatttctgtgtggttgggccaggagtccaggacaccacctgactctgacctcttgcagacggggcgggggaggggggacgcaggttatggcgtcagagcaggatcgaatccaactctgccgcctacctaccaggtgaccccaacaagtcacttcccatcttagaggccgggcttctccttccgtaaaaggactgattttgcccgttcctgcgctgtccccgggaaaagcccttaccaccgagttagtgggactcccagcactggggtgatgagcgcaaggtctcagca

SEQ ID NO: 240395 - DNA, 380 bp, Homo sapiens
  chr19:35531732-35532112
  hyper
ctgagtggaggaaatgggtgcggtggaggtgggtttggctgggcacagcgggcacgtgtgggtaagcgggtggggccggttgtgcgggtggcctatctggggcaagcagccgaggccgactgtgtccggcgtgtggttgagcacgggcaggtgtctggcggtgaccctgcacgtctggtgtttacctggccctgggtctgacgtgggccgcgcctggctgctggcgggacagtgtgttatctgcctgcggacgcttccggccacttggcctgggcctctgcccttagcgctgtgttttcccggccaagccccccatcccccctatctagtgctaggactttctggctccagaggtcaccgcggccgggcggaggctgcca

SEQ ID NO: 240396 - DNA, 314 bp, Homo sapiens
  chr19:35581614-35581928
  hyper
cccagggtgccaggcgctgtcccaaccacttaatttattttaacttgcttaaccctcaaagtcagtttgaggtcagtactcttttcggagagatgggtacggagtcctggagaggttaagcaccacgacagagccgagattttaagcactcggtcagggagttgggcaaatgtggcctgcagatcatgtttccttacccgcgctttttctcctccctgcatagccgccacgtgtcctaagcacagcagctaccagcaacgcttggacccgcgccgggtgcagctctgcgtccccgcggccgccctgcctgctcc

SEQ ID NO: 240397 - DNA, 121 bp, Homo sapiens
  chr19:35738724-35738845
  hyper
gtagaacaaagcacgcctgggtaccgaaaccagccactggccagttggcaacctgggggagtctaacgcgaggaagcgcccagggttcccccaggatgcgctttccctcgccgccacctgg

SEQ ID NO: 240398 - DNA, 383 bp, Homo sapiens
  chr19:35758213-35758596
  hyper
ggacgacctcaccccgccgagcaccgccgagtcagggagcaggtctcccacgagtaatggtgggagaagccgggcctacatgcccccgcggagccgcagccgggacgacctctatgaccaagacgactcgagggacttcccacgctcccgggacccccactacgacgacttcaggtctcgggagcgccctcctgccgaccccaggtcccaccaccaccgtacccgggaccctcgggacaacggctccaggtccggggacctcccctatgatgggcggctactggaggaggctgtgaggaagaaggggtcggaggagaggaggagaccccacaaggaggaggaggaagaggcctactacccgcccgcgccgcccccgtactcgg

SEQ ID NO: 240399 - DNA, 381 bp, Homo sapiens
  chr19:36024723-36025104
  hyper
tcgcgccgctatcacgcggtagaaagagcagaaacgagggccatcggaggctgcagcctgaaagtggcgggaagtgggcgggcttaggaggggcttagggagaacccaggggtgctgggcttccatgtaaaagtgatgttcatggcgcttcgcgtgaggtgagctttgccctccctgtgatgcacaaaacaaggacacttggaaccttgccggggacgtgctgaccacttcgcaggcgagagctcagggaagcctcaccaccacctgagaaggccagagtgtgcccgcagtttacagagcggccaacagaggttaagagagggcaaactacttccttagtctctcaacaagggcggcgcgcccgcgcgcgcgcacacacac

SEQ ID NO: 240400 - DNA, 49 bp, Homo sapiens
  chr19:36048550-36048599
  hyper
tctcaccgagcacgcgttcgcccaggcctcccaggctgaggtaggcggt

SEQ ID NO: 240401 - DNA, 147 bp, Homo sapiens
  chr19:36048779-36048926
  hyper
gacgggggaacggggcggggctgtggacgagggaacggggcggggctgaggagaggggcggggccgagagctcggtgcgggctctgagagctgcggggaagggtgaaggtggaagatggaggccttgtgtggaggggtccttggtag

SEQ ID NO: 240402 - DNA, 173 bp, Homo sapiens
  chr19:36049106-36049279
  hyper
tggacggggccataggcggagcgggagatggggtggggtttggctgcggagagaaggggcaaggagcgaagcccctcgtggcccgctgatgtgggtgtggcctggggcggggcccgaggtgggcgggcccaggccgtgggcggggccggctgcgcacctggaacttgttggtg

SEQ ID NO: 240403 - DNA, 72 bp, Homo sapiens
  chr19:36049459-36049531
  hyper
gaggccccctggctctcaccttgggcacaggcactgcatcctggccggacttgaaggcggcgcggttgcaca

SEQ ID NO: 240404 - DNA, 405 bp, Homo sapiens
  chr19:36164097-36164502
  hyper
tctgcccgacgggccgtcctccctctgtctccccagtacctggtgctcatgctcatcgtctacatcttcgagtgcgcctcctgcatcacgtcctacacccaccgtgactacgtgagcccggcgaggcctggggaggggcctgacctgcatgggaggggcgagggtcccggcgcggcggggcggaggtcgtcctctctccccacccagccctgccggcccttgttcttccctgttctcctcagatggtgtccaacccatccctgatcaccaagcagatgctgaccttctacagcgcggacaccgaccagggccaggagctgacccgcctctgggaccgcgtcatgattgaggtgggcggggtggaccgggtgctgggagggccctgggctccgtccacagaggccg

SEQ ID NO: 240405 - DNA, 194 bp, Homo sapiens; identical to SEQ ID NO: 205372
  chr19:36236368-36236562
  hyper

SEQ ID NO: 240406 - DNA, 419 bp, Homo sapiens
  chr19:36239184-36239603
  hyper
acactacaagtcccgggaagcctcgcgatgccctaatcctttgtttcccaccgtgccccgcgcggcgcaggcgctgttactcagggtgagtctgggaagctggaactacacctcccaggaagctagggggtagatggtttgtttccggaagcaaagccccaggtgggtgggacctaaagctgggagactacggaggcagctctcaattggtcaggatgcgagattgacggctgcaataactaataggaacaagctactgccgaaggggcccgcccacagaagggtggtggccacggtccaggctggacacaaccaaaggcggaggacccgtggcccacgaagctcatctttgaactgtccccgccttctcccgccttgacttgtgaccctaggccctttggggcgcctctgacccagct

SEQ ID NO: 240407 - DNA, 197 bp, Homo sapiens
  chr19:36248725-36248922
  hyper
gttagaccggggtcgggacaggacttctgcagcaagaaggcgcttaaaaagcgggacttttaagcgagggtactttagatcacctcctaaccgcaagcccagcctcagatccttcccattggtgcacggtcttgccaattactgctacactcggcaggttctccaatcaaacacgccctgtcgggcaggcagtcgtc

SEQ ID NO: 240408 - DNA, 191 bp, Homo sapiens
  chr19:36334974-36335165
  hyper
ggtgtggtttccatggtgggcggggctcacagtgcacgtccagccgcagccgcgcttccgcggtgccctcagagttctggcagtgcagctgatagaggccgtcgtccgcgcgggtcacattccacagatgcagagccccgctggacaggatgcgatgccgggggccgcccgctggggaaggccagaataag

SEQ ID NO: 240409 - DNA, 230 bp, Homo sapiens
  chr19:36336291-36336521
  hyper
ggagctcacggtttcgcggagctcggcgctgtgggcgcggcaggtcacgcgctggccatgatcgcgggatgacacttgcagaaggacgctcctggcggcggcggagcctttgaatggggctctccggggtggggcggccacgccctccagcctgtggaaccggggtcaagccagggctgcgagcggagccagaggctggagaggcactaggcgggggcgggacatgcgtg

SEQ ID NO: 240410 - DNA, 118 bp, Homo sapiens
  chr19:36336881-36336999
  hyper
cccgggcctcagcagtgcgagccctcacactgcaccgccagctgcgtggacgcgctgagctgtccagccttgcacgtgaacttggcctggttgtccgacggccctgtgaccagcacca

SEQ ID NO: 240411 - DNA, 87 bp, Homo sapiens
  chr19:36347684-36347771
  hyper
ggatcccgccctgcgtcccccattcatccgcgtctcagccgcgggagtttctcaacgggaagagggcggagctcccggggggcggac

SEQ ID NO: 240412 - DNA, 62 bp, Homo sapiens
  chr19:36351460-36351522
  hyper
ccaaggttagaggtcgtggcagacgcctcgttcctgactgagcccgtgtcctgcgaggtcag

SEQ ID NO: 240413 - DNA, 838 bp, Homo sapiens
  chr19:36351559-36352397
  hyper
gatgtgctgtgtgagctggggccggcctgtgggtgtggtcaaaggtggccgtggctttcagggctgttgagggtcggggcctggaggggcggggccgggagagcgagcgtggggtattaggaggaggagagtgtggagctggggcatattcttgcgccctagagggtgtggtgtttctgtggggctggctgatcccaggtcagtggctgcattccgccccggccatgtgacccctagtctctttcgtccagttgggccgattctgcaggcaaagccggagcccgtgtccgtggacgtgggggaagacgcttccttcagctgcgcctggcgcgggaacccgcttccacgggtaacctggacccgccgcggtggcgcgcaggtacagccctaaatctgaggcggtggctggagggggaccaggcttccttacaaatccggcttctgacgccccttccctgtcgcaggtgctgggctctggagccacactgcgtcttccgtcggtggggcccgaggacgcaggcgactatgtgtgcagagctgaggctgggctatcgggcctgcggggcggcgccgcggaggctcggctgactgtgaacggtgagaaggcggggcttcctaggggacctggcccgtcctgggatagggagcggacagagggggcaagggctaatgcagtgggagtggcctggaaggagctttacacccagcgggggctggagaccggacctattgaaggcgaggcttttaggagaatcggagtttggaggcggcgtggcctgattgattgaggttagcggagagtgcgctggacagacccggctttgttacagcctttggg

SEQ ID NO: 240414 - DNA, 145 bp, Homo sapiens
  chr19:36360475-36360620
  hyper
gtgctgggggtctcggtcctagggagcaaagaaccaggggaccctcatgccaacgccccccgagccctcactgtcctttccacttccatccaggccccggggtcggcccaggtggctggactatgcgggcgcctaacccttcacc

SEQ ID NO: 240415 - DNA, 255 bp, Homo sapiens
  chr19:36361156-36361411
  hyper
gacctttggggagacgaatctgactgcggggaggggtgaccagagaggtgggcttagagggaccttcagaaagaaacagcacaggaaaagagatagggcttaaagatgacgggacttttaagggaaaactgctagtgggcgtggccaatgagcacaaggagcttggatatctaaggctggtgctagggagaagcagggcctagggaagcgatgtcctcatgaatactagagccttgaaaacggacctggccgggc

SEQ ID NO: 240416 - DNA, 113 bp, Homo sapiens
  chr19:36391019-36391132
  hyper
ggggtaggagtctcggttgccagcaacccctagcacctccaaggacccagagatccagcctcccaagcctcccagcccttgcaccctcggggccctgcgatcctggatcccca

SEQ ID NO: 240417 - DNA, 67 bp, Homo sapiens
  chr19:36422567-36422634
  hyper
aggcagagggtgtcgcgtggtcttctgggaaatgtagttcgtctgccaggccggaaccaccgctcaa

SEQ ID NO: 240418 - DNA, 174 bp, Homo sapiens; identical to SEQ ID NO: 205375
  chr19:36427160-36427334
  hyper

SEQ ID NO: 240419 - DNA, 68 bp, Homo sapiens
  chr19:36427554-36427622
  hyper
ctcccagtcagcctccgccgcagcccaggaagccagccgggacgccgccgccccggaccccgcgccct

SEQ ID NO: 240420 - DNA, 609 bp, Homo sapiens
  chr19:36449980-36450589
  hyper
cacagggcccccgacggcgatgctggtgacagcgctccctgcgtgggcgccactctccccgtgctccccgcgcctgcagccaggcacgacggtgtgggtgtgcccgcccggggcagaggagctgcagggctcgcggcaggcggcgctgtgcaagcagcgacgtcgcggcccgaggaagtggaggcggtgaacgcgcgtgggcgcgcctcccgggacacggcgctggctctgcggcgctacctgctgggcactccctaatcgatggtgacgccgtcgctgccgcccggcgaccggcacaaggagtttgcggtggtggcgggcgctgggcccacgctcttgaggcgcctcaagccccctaagcctgttctgctggaccgcgtaggccaccctgcccgctggccccatccattgagccttgaaggcttccagaggcgctgcagttgcagagagcaggagacctatccggcacccgcgtcgtggccgcccatcctgtcgcgctgctggctggcctcagttgtctgcaagcgagaagcaaggcctgtggccacgcgtttggacgaccgccgccccagggtcgctggagtggtctccacacggtgccccactttg

SEQ ID NO: 240421 - DNA, 188 bp, Homo sapiens
  chr19:36485952-36486140
  hyper
aggccgcgaccagcgactccgcccacttctcccagccggctgttacgtaactgcaacgacagccagtcagacgcggcagcgccggatggcgggaggcgggagttggaggccaagggaagcgctgggcggaagtggctgtggctttgccctttggcctttgctggctgtgtggcggctccgcggttcgc

SEQ ID NO: 240422 - DNA, 789 bp, Homo sapiens
  chr19:36523212-36524001
  hyper
tctcctcggggtggcggggccatcggggcaggatctgtcttagtcatggtcctcggtggccctcggggggcgggtgcagagttgggggcagccttcaggcaaatcctggaggcagaggtcagctggagagggtgcccggcaggctccagggtccaagcccctaggagcttccagggccccgggtggcctccgcgcaactggatcttgggcaaccatagggacccccgttacccatagagggccccggtgtgtgcgcccagcgcctgccacctcccccaggcccagccccccattcttctcctcccgcgtcaggcccctcagtcgcggctgccccctccccgggtttgtttatctcgggattcaggatgcttcgcccctccccttctccgcgggccgccccctccccatcttacctcgggcagacagcgctggggaccaaagtggagactggggagactgtgggagcaatggggtgtcggtgtcaggggacgtgatgggggaggcaagggagacagagagaaggggacgaggcccagacgccgacagggggtgggggcggagagggaggggcgcgactgcgcatgcgcctgctgcccccctaccggcggcgggggaggagggaccaggaggagggaccgggaggcgctcgcattgatggaggggccagaggcggcgactgaaaggggagagcctccgggcactgggagaggaagagatggctacggaaaggagcgagatgagcagatacaacggcaaaagagagggctgagagagcggacacagatcttc

SEQ ID NO: 240423 - DNA, 214 bp, Homo sapiens
  chr19:36705178-36705392
  hyper
catgaatcacaaccgcacacccgcagtggtcacacagtcacaactgtactcacaccccaggaacagggcgaacaggccacatatacaacggggacacacgcagtatcacccccggtcacaaggaccctgcaccccgatactctctatcacacatggttacacaaaaaccaccagacaccctggagacaggcggttacacgtgcacagttgcaga

SEQ ID NO: 240424 - DNA, 102 bp, Homo sapiens
  chr19:36705646-36705748
  hyper
acggacagaatggcgttctcttatctctgagtcggggcctggctcgttttgacatttttgcgcccacgagtcttcggagagggcgtcgccactccagacctt

SEQ ID NO: 240425 - DNA, 758 bp, Homo sapiens
  chr19:36736074-36736832
  hyper
ggggtctgttgctacgggtcccctgggctcctttgaatcgctttggcagctccctcggtttagagctacagggttttctccctcccctgagactctaacgcgtgcaccaactcgcgcctagagggcgtgtatgaccccagctcagttctaagccgaggggctgctgccggacattctagggtctgatctggcgggctcgaagggaggacagtcactgcgacccggaaagctccgcgcttacgacgcccacccagaaaatccggatcacatttcccgtggtccaccgcgcatctaggaggttacctgcgtccaggcggtgacttgcgagggaccacctttcccagggtccacggcgcatttaggtggtggcttgctctggactacatttcccagggtccaccgcggatctaggaggaggcttgagatgcagcctcccagcttcgaggctaccacctgcccgaattggtgctttggcagagtctctggtgcccgggtgaatgggttcagggtctcttaaggaccctccgttgacgatgcctcgagctatgacccaccctggctccgtccacggttgtcggggtcccgggctgcttttcttggagggctcggtgccggaggctactcttgagtcccggttccttcgcccagctgcgggcctcgggctactggatccgctgtctcggtttgggtgcggggccttggctcaggcggaacccgaccgggatcgccccgcgagatgcagtcgttgagggagtcag

SEQ ID NO: 240426 - DNA, 828 bp, Homo sapiens
  chr19:36822237-36823065
  hyper
ttttaataaacctcaacctgcgggtcactccctcccaggcgtgcaacaaaacacctgcctagaaatcaaaaggcgttttacccgagtgggctgaaaaagccccgtttttacctttaatctggagacaatacgggtcagaggtcaggaaactacatcagcgccagtgcgagcgcccacgagtccggtggacggatgagaaacggccggggggcagcctgagtcccagttcccgccgtggcaatggccaatttcccacccgtggacgcaaaaggccaggactccacgctgctgaccctccagcgtcccatgtccggcaggcacgtggccgaatagcccaagactgaggactcacacttcccactttgcacctggaggccacctgcagaccaaccttgcgccaggcttccggaaatgggagggcgggcttccggaaacggcggccaatgggaaacgtgatcagatgttactaggcagacagtccgtttccaggcaacacagaagaaaggaacgcgctcagtcagcctcaaatagacggagatttcagccaatggatgtgcaggttccctccacattagccaataagaagtgcttggggcctacctgcctacaagcacagcaaaagctttcctgcgcatttttgcgctggaatggctacctgccgcgccaaatcaaaatttacaatcacccttggtgctgtttcctgcactttcttggagatttgcaccaggcgctggagaccctcccacctggcccatgcctgccacccggtgaacaccaagacccaaccttctgcaccaccagtcttgttgtcagcgaacaggctagtaa

SEQ ID NO: 240427 - DNA, 508 bp, Homo sapiens
  chr19:36912304-36912812
  hyper
ttctgggactgctcagccaccggccgctcccggcaccaggggacgccggacgccctctggacaatcggcgcacttgccacgatcttggacgggcctcgggcctcgaccttaagattccccgctccagctccgagatgtcagcaacgctgatcctggagcccgcgggccgcggctgccgagacaagccggtgcgcatcaccatgcgcggcctggcttcggagccgctggacacgctgcgcgcgcgtccctgcgcgacgagaaggctgggctcttccgctactgcgccgacgcccgcggcgagctggacctggagcgcgcgcccgtgctgggcggcagctttagggggctagagtccatggggctgctctgggccctggaatccaagaaacctttttggcgctttctgaagcgggacgtacagattccctttatcgtggagttggaggtgctggacggccacgaccccgagcctggacggctgttgtgacaggcgcggcacgagcgcgac

SEQ ID NO: 240428 - DNA, 31 bp, Homo sapiens
  chr19:36980445-36980476
  hyper
agggtcccgccagcgcgtgagttggaagctg

SEQ ID NO: 240429 - DNA, 214 bp, Homo sapiens
  chr19:36980718-36980932
  hyper
tagttcccggacccgtcctactgcccccaggcgctggacagcctcagaaagaggacaagtctgcatggaaagataatcgcacaactgagccttctgggagatgtagttcggagctgggaaggcggttggaccctccgaaagtcatcttaattgctctcacagataagccggtgctgggctgccggcctgagtactgtgcgcccagagtgcgcag

SEQ ID NO: 240430 - DNA, 977 bp, Homo sapiens
  chr19:37063785-37064762
  hyper
ctcctacaggctcacggaaaaaaacgaacaaacaaacaaacaaaaaaaaacaaaaaaacacttctaccccgttcacacttatagttggtcacaacagtgctgtcacacgatcacgtcaccgtagaccagggtcacacgatagaccccgcccctactcaccgtcctgagtccgatcaaacagcacccacggcacacactagggtctccgtctctcacacacacacaccacaatgacgtcgtaaacaatagcactaaccaccatcgtccgcagctcccgcgtacagaggcctcaggctcccggctccacgtggaccgacctcgcccggcagcgcggggccacctcaccgcgagctcctcccgcagcccggcccgggtcacctcgactcgccaggcttaactcaataaccacaacaccggaaaaggaagcaaaggtcgaagttcatccgcggccctgaggcctgtgggaaacgtagtccaacaacgaaagagccctgaagctcaagcggagcccgctggccgcaggggccgcaccacgccccagaccctggagtttccgggtgcgcagacccttgccatcagcagaggctgccgctgcgcgtcccctaggcgcggaagaggcggctggtggtccctgacggcaaggtgaagtcgaggcagtaatcgggaacccaggttgggaggacagaatggggaacaggaagctggggcgagggtggtcttgggggaggtggggggccgcggaattctaggtggcccctgcctcacctctggaaagaaccggaagcccgggccggggagggtgaagggagtcgcggacccggctgctcagccgaggaggaaacccggaccccaggctgagggaggccgaagaaggaactggagggccgggctgggaaggcctgaagcgggtacagcctttaggctggggagggtcgaggggagaactcggagcctgagtcgggcgaggttttgctcca

SEQ ID NO: 240431 - DNA, 1083 bp, Homo sapiens
  chr19:37095614-37096697
  hyper
tctccagtgggtcacaacagcgctgtcacaggatcactgataacagcatgacacattcatagtcaccgctcagcgccgtcacacaaacggccccgcccccactcagtcccgcgggcccaatcggggacagtcagggctgtcccgggctgtgcacctgctgtgcacacacaccccctgctgtgcacaccccccgcccccccgggaccatcacaggcgcgcccactcacaccaccacacacggacgcagccacagaacggcacacacaaacacaatcacacagtctccctccccagcaggtgacttgcacacaggcctggggcttctgcctccacaaaccctctccgcgtcccatgaacccaggtcccctgccgtgagctcttctcgcatccagacccgggtcacctcaactcaccacatggaaaacgaacaccaggtcaacggaaaagggagccggggtcctggcagaagcgtagtgccagccgcaatagggcggccgtgggtgcaaacggaggggagcgccggcagctagcaccgcgcggcgactaacgggccgccccggagactcctgggagctcaggcccacgcgcgagtgcgcaggcgcagacgactcaccctgggccgggggtgaggcttggtgggtgccaggggtgctgaggaggccaaggagggcactgggagctccgttccgggagagctgtctaaggacgcggaaccgggtggggaggccagggaggtaaccaagagtccgagccgggcctggaaattctgaggaggaaaccgggaccgcggtatccagacgctccgatctgtacgagccgggcctcgggcgtggtccatgggcgtgaccttgagggtgacccggagcgagctccgcgaagggggattttgcccgttctgatcccgcggaagcgccatcgctggcggcgggtccccgcgcggagcgggcgctgtgtgttcgcgcgcgcgggcgcgcgctgaataggggtggcctcctgcgcccaacctgctgcattttaggtgcttgcctctctttgggatgttgtggccgattgtgtgtgaaaagtgaacggagtagtgttgct

SEQ ID NO: 240432 - DNA, 765 bp, Homo sapiens
  chr19:37157429-37158194
  hyper
cccacgcaccaggtcgctgtcccaacagtaacacacagcccaaagagaaaccctacttcctcacgcattcaaaacacacccacctaagggctgatcccgcactcagaggcctaaaactatagacattcccttccgcggcactggtgagccaggatttcttaccttcagcattctcagggaaggctctggtccaagctctgattcggattccaagcgaagccacacgcccagctcttccttctccaccggcccgggacatccttacctgcctctacccggagaccattcctgcgaggctcctaccggaagtagctgtggacagcagtgtcctctgggaaatgcagtccgaggggagagcgcctggggtggagcgggtgtgttccgccgggctccgggatgcacttgcgcagtttcacccgaggctggagtgacgccaacctgttaatgttcgttttcggattctggacttcgggttccgctgaggacggatttcggaataggcacagtggctgccccgaacccctcaaggcggcctccgcgggctgtggctgaagataattttcggcgggcgcggactaacccggcttccctttgtggagttgtggtgagaaaggtgttttgttgtgcgcgtgtccgaaggtgactccggaggagaaggtggatatgaactgacggtgagggtgtagcgcgtgagatttgtatgtgaaacgatttaaaaaaaaattttttttttggccgggcgcggtggctcacgccaaggcgggc

SEQ ID NO: 240433 - DNA, 49 bp, Homo sapiens
  chr19:37262838-37262887
  hyper
ccccagcctggaagcggcagtgggctctggcatttagttggtccccgcc

SEQ ID NO: 240434 - DNA, 393 bp, Homo sapiens
  chr19:37264035-37264428
  hyper
gggaaatgtagtccagggcagaaaagcggtcaacccagccacgatgcgagccaaaggattcttggctccaagcctggtcctggctgttagtttggaactcatgcacccagatgctaactcgccctcagaatgcagaggggatgaaacactgaccggacaattcaatctgtatatgggtgagtccagggctcagtctgcattgcgcggaaaatgaaggtgaaggtggaggtgggacctgatggtctcgtcccggatagggttgaagaagtgggagaaaaggaatcaaaatcgtggatgggataagattgtgcgcgaatgctctctgggagcggatcgtggccgacgagggcccgaagatgctgccttgtgatcgcaggtgtgagtggaagctgt

SEQ ID NO: 240435 - DNA, 95 bp, Homo sapiens
  chr19:37287861-37287956
  hyper
ggtaggcgttccagcgcagaaatgcgcaggaaagtttctgctgtgcttgtaggaaggtcggccacaagcacttcttttgttttttgaaaccgagt

SEQ ID NO: 240436 - DNA, 635 bp, Homo sapiens
  chr19:37288196-37288831
  hyper
ggattacaggcgtgagccgccgcgctcggccggccccaaacacttcttattggctaatctggagcaaacctgcatatccattggctgaaagctccgtctattttagggtgactgagagcgtctcttccttctgtgttgcctggaaacggactgttcgcctagtaacatctgatcacgtttcccattggtcaccgtttccggaagcccgctctcccgtttccggaatccccgcaggcgctgggtctgcagatggcgtccaggtacacagtggcgagtgtgattccgcagtcttgggctgtttggccaagcgcccgccggacatggtacgccgaagggtcatcggcgtggagtcctcgctttcagcgtccgcggctgggaaatcggccatcgctacggcgggaactgggactcgggctgcgtcccggcccttccacatcggtccaccgcactcgtgggcgcccgcattggtgctgacataatttcctgacctctgacccgtattgtctcgcgattaaaggtaaaaaacggggctttttcatcccactggggtaaaacgcccttttatttctagccaggtgttctgttgcagaacgcctcgaagggagggagtgaccggcaggttgaggtttattaaa

SEQ ID NO: 240437 - DNA, 146 bp, Homo sapiens
  chr19:37328861-37329007
  hyper
ttttggccccatagcggctgctatcaccacctttacgaacgtggtcacgcacaacgcgacgcagtcataatcacgtacatacagtcacatttaaatagtccattagggtcacacacagcgcctgtcaacgtcgtgtgcgcgtgcgc

SEQ ID NO: 240438 - DNA, 565 bp, Homo sapiens
  chr19:37329067-37329632
  hyper
gctcctgcatcaatttcactctcgcatccactgctcccatcgcgatcgctcgcccccacgctccctcgccggcaaagccaccaactccaaagacattagcacctcactcccctcagccccggcctcgggccctccggagtcattcggcttctgtgtctcggaatcactcacccggccctgcggtcccttgatggtggaaggttccgcgatctttctattaaccctaaagggacagagggctgacaggaagttgcccggggaacggtgcactctgggaaatgtagtccggagcctgggccgtctttaactgccccggacaccgcggtcaccattaacggaccctgcatttgagccccatcccctcgctgggcaaagaccatcgcccacacaccgctcacatctgctgccgagagcttccagaattccaggccgcgtttaggaagcttcagcggaggcatgcaggctgccctacctctgcaaaaggctcccagccctgggaacaggacagtaagcccaggccatcttaggctggaagtaaccttggtcccgacggccctgggaaatg

SEQ ID NO: 240439 - DNA, 497 bp, Homo sapiens
  chr19:37340785-37341282
  hyper
caatctgacccgcacgcggtttctttcactcaactacccagacacccctcatcccaccagcacaagcaggcccaccgcggtctcacacacactcgagccttcctttgcccagtctcacatgcatgactgggatcgcggatttgtccccttccgactccccatgctggttcggtcccagacgctcaggtgccacattggggtgcgctctcccggctcctccacacgctacgcagctgcccgcctcaagagcgtctgcgtgcttccagcgttaagtggaattccaagcagcctccggggcacagttagtctggtcactgcggccagactgccgcctcaggacccagagaacgcagcacactttagttgggcccatctatccccggcgaggcttggactacgtttcccaggagaccctgcggtccagtatgtctcccgaggaggggcggaagcccgggagccgccctctgaggctgggcggggtgaaagaaagcttgccc

SEQ ID NO: 240440 - DNA, 773 bp, Homo sapiens
  chr19:37341572-37342345
  hyper
ctcccggaaggctccgatgggcagctcacctcaaagagatagttttgttggtgccagagtccgcgccaggggaatcgggatggctgggctgtagctttcggcaacctgtcgctttctggactacacttcccagaagcctctaggcccagggcactctcccgcgataactagattgtctcttgaggagtgggcgggatcttcccgcggatttgggcaagcggccttggggctttgtgagatagctagggtcgacttgtgtggattctagtagaacggagctgaccctatccgaacaggcgtaagtgaggcggctcggagcctggcgcgacaggaactcccgacctgtgtgggctgcgtggggaacaggctaaggagcgattgtgaggagtgtgtacggttgtgactgggggcgtgtgtctgtgcgaccgtgtatggaactgtgagggcggggaggaggactttttgtttatgtttgtgcgggtgtgagtagagtttaattgtgaccgggttgggcactgtgtttgcgagtgtgaggttcctggaccgcggttgtgactgtatgtccccttggggtgtgtgtgtgtgtgtttactaccatttgccgaactgtgtgtagtatgccttaattttgaggtttgtggctgcttccgtgtgtgtgtgtgcgcgcgcgttggtgatattgttgatggagggtgcgtgtgaatttgttgtcattgtgaccccaaggtgtatgtcactgggaatttgagagatgcccacggactctgtggttg

SEQ ID NO: 240441 - DNA, 1052 bp, Homo sapiens
  chr19:37406729-37407781
  hyper
ctcgtgatcctcctgcctcggcctcccaaacacaacctccacctttcaggccgctccgcccgcaggggcccaaggcgccagctccccatcggtcttcggtatcctcacctaagccctttccagtcatcccggatgggaacttgcagacctgagccagttctcctggggaccaaaatatctcacctcccagatctaagggtcccgccaggagtgacgaaacgttcgaattcctgcgagaaaagtggcaggccaccaggccctctgggaaatgtagtccagagcgggacccacgccgattcctgtcagctcctcgcctgggcccacccgaaacggctgctccctcaactctcaacatccagccgagcctcggagttgcgggtcgccgtagcgctgcgcaatggagatgagcctcccggggaacccggcccaagcctcaccctcacacaggaaagcagatgtgttctggccggaagttgagtggggccgcggggcctgctgggaggtgttgtcctcggaaacgtcgctggcgcggagggatggttcggcgctttaggcgtctgtcacagacctatctgcgggtcgccttcacccagcatctcagaaactgcgcgcgggatgaacattcgggtgtttccggcaggtgacgctgccgagtccccgcagcagggggcgagcaagggactcgcggttgacgggacacggatcctctaaggcccagagtgtcccgagtagcggcagtggggagtgctcagggtacgctaatggtgagtggttgcagttgatgggacaaaaaactgtgatgggagttagtgtgggtgtgtggttgtgtgtgtgagtgtgacggcacgaataatctgatggggtgattgtgatatttggttgcgcgggattatgatgaaatgtgtgatatgtgtgtgattatgattaaggctgtagcgagtgtgaacgtggcgaagtgtgcgtgattgtaatatgtctagtagttcttgtcttgagctggcttttctgtagcatttggcacagttggtaacggcttgaaaaacacttatttg

SEQ ID NO: 240442 - DNA, 813 bp, Homo sapiens
  chr19:37463932-37464745
  hyper
gcagctgggcagtctggcctcggcttcactggaggcggggaactggacatgactgtgagcgccagtgaccgtggtgcggtccaggccccgggtggcgcacccacctctggactacatttcccagggggccccgcggccaaccttttccggccgaagaaggctagtcacctttccttggcgggtgttggaaagcaaagggctggaacgtcccgggctgcggagctcgctgggttgggatggactcgttcagacctgagtgctaggacgccgaagggggcggtgaggcgtcccggcgaggagctggggtcgtctggagtttaaaagacaggtggctctcggagatgtgcgggctgcatgcccacgcttcaccgctaggggaggtcagggctgtgcgatggggaaggaagagagtgtcggggcggtgcagtcgggatgggagaagggtgtcagggccactggcccccagctcggcagagggcagtgtcgggccgcgcgcaggcagggagtgggtgtggtgtgaggctggcgctggagcggtctgggaatgttaggaggtctagggtatcgcggccctgcgtcctcttgtctggactaaaagtccgggcagttctccccggacctggattgtgggcccagcgacaggtgcttggcgatctgtgcccgctgtgcctgcggggctgtggtgggagtcctgtctgcacggtattctgtgtggctgtgcatgtaagtgtgagcgtgtgccgggtcatcgaccccatctttgggaggcctgggagggggcgggacaccctcgctgtacattctggggatacg

SEQ ID NO: 240443 - DNA, 49 bp, Homo sapiens
  chr19:37569401-37569450
  hyper
gctggcgaacccgaaattgggcttggaacccgggagccagatcttggac

SEQ ID NO: 240444 - DNA, 121 bp, Homo sapiens
  chr19:37569630-37569751
  hyper
tgtatgagcatttgtatgagtgtgagttgtgactctgagggtgtttgtgactgtttgcttacctggctgggatatacttatgtgactgtgattttatgtgtgccgcgtgtataattggggt

SEQ ID NO: 240445 - DNA, 503 bp, Homo sapiens
  chr19:37663374-37663877
  hyper
catcaatgacctgagaaatccgtcacaatcaacaacggacgccacagaaccccatcaccgaagcctgaaaccgcaatcactaactccacaggcaacctcgacaccccctattactggctccacagaaaccccaatcgtgatcaaccaaaatcacctcaaagatttatcggtattggaatatgaaaatactcctgacaccagcggcaaaaaagccttggaagaccacttccacttccggtccgacttctagcacctcccctttgtaggctgttgatatggcgcatgctctgaataaacttggaagccagtttcctcgaacagtcaacagggcgcagacacagcgcacaggttccgtaatgtggcgctgtccggcagagaacatggccgcgcccttatggtgtttattcgcgtgggccgccattttgaaagcatatccattccgtagagcagaggaattggccgctggcagggtttcctagagcgaggcaggtatagttacatag

SEQ ID NO: 240446 - DNA, 497 bp, Homo sapiens
  chr19:37701189-37701686
  hyper
aaagagccccatcaatgacccgagaaatccctgtcacagacaaccatcaacggacgtcacagacccccatcaccatgccccgaaaccaccatcactaattccacagacaactcctctattactgacttcacagaatccctaattgcaaccaaccaaaatcgtcacagagacctctcggcattaaaacgtgaaaatagtcctgacgccagcggcgaaatagccttcggggaccacttccacttccggtccgacttctagcacctccccttatggactgttgatattgcgcatgctctaaattaacttggaagccaatttcagcccacagtcaacagggagcacacacatatttagagacatcgtgcagtttccgtaatcggcgctcacgggcagagaatataaccgcgcccttatggtgtttatttgtgtgggtcgccatctttgatgcgtatcgattccgtacagtggaggagtccgcctcctggagtgttgactag

SEQ ID NO: 240447 - DNA, 215 bp, Homo sapiens
  chr19:37708870-37709085
  hyper
agattgtcttcagcgtgcagggccagcgtcctacggcagtttcactctgagcctgtgtctggatcacggagacgcggggtagcggttcggagtgcggagcagggatgtccccgagctgtgcagctgcaagaacccgaaaaaacaggcgccatcttctcggcgcggtcctactccggactgtatttcccagaggcccccgcgagtccagggcagcc

SEQ ID NO: 240448 - DNA, 989 bp, Homo sapiens
  chr19:37957586-37958575
  hyper
agcgctggcacaaacgccaagtctcacacatctacacccacaagcacaccctaccttgtatccacagtttttcattcattcaagatcccactgtcatgcacgtttgcacgcaggttcatactgaaagataaaagggaaagcgcctccacgaaatccgcttacggacacgatcccggggccacactcagccagacgaatgtctggcaaatgacagtcacttcacgccagactctcacagtccttcacacgccactcccactgcctcagggaaccacaagcacaggcatcgccccgcccggcgtcctcctccaaagattggggcaccaggaccgcgggcccccactcccacccagcacaaagagtccggcgctcagagctagcggtttcccgaggactcaccaccaagcccgcggacacaggccccgattccacacttaacgctgccaaagtggcagagccggcgcgggctgggacagaggcggcactgaggccggcgctgtcggtggctgagagcgccacaagtctcggtccgttacaccaggggcgacgcttcccagaggcccccgcggctcacccgggcgggactggcttcactgtttgcgcgtcctgagaagcagaccacggtgttccagggctcacagctccgcgcaggggagctcagcctaggttttgcacgagcggcctcccgcgagcccagctctgagagattgggagcgcaacttggtgctgagaagaatcgaatcgttccgctgcttcctgcgccgaactacatttcccagaggccttcgcggccctacttccccgaccccacctgcaaaaaggcacttccttcttacagtcggctggagctgcaggttcgcaaggtccgtgaaggaagcccggctcagtgtgtttagttccgtctttttgggtctctacctgaggctagaatacagcggggtgaaggtggtgagagctccagggccagtgaaggccgggtcagctggagc

SEQ ID NO: 240449 - DNA, 297 bp, Homo sapiens
  chr19:37959760-37960057
  hyper
accctgcatcccccccaccccgctcccctcccaatttttttcgggtatccagcacaattctaggaattcgcctcccacccattttgagtagacgcgccactagcgcgttcccacgcacaaaccttttccctgcggccaacctgcgattctcaactccccgccctggttgctaagggaggcgcgcagagcgcttgtgcctgcgcacttccacaccagcccgtgtagtgtgacgctgggccccgtccctgtgaccgggccaggctcggagctgcagggaatccggactttcgggctctc

SEQ ID NO: 240450 - DNA, 52 bp, Homo sapiens
  chr19:37960717-37960769
  hyper
ccatggcctctgactgtggcgtgggtaagacggtggttggcactgtagtttt

SEQ ID NO: 240451 - DNA, 1025 bp, Homo sapiens
  chr19:37997167-37998192
  hyper
ttctttcctcaggtcggcttctcgggcaagcctccttaggtaaaaaccttgctttcaacatttcctttccattatgcgctaagaactctgatctcttcccgctgcggcagccccgccctttccttgcggctccgccctttccgtgaagtcacgcccgtccttaggctgtctctgtctccctaagagcgagtctcttcgctgctctctaactcctagagctggctcagaaagagtttcacattgccataggggagctcctaggagaggctgcacccattgcacgtaagaagcggtaaaaatgtacgcggccatcttaccaggctgccggagacaaagaaagctcagctttgatgtctgggcgccaccatgttggccacaggaggttttggcatctgagatgctgagttaagagcagagacgacatctctgtttagggatccagggacacttccttctccttgtcctaaaatagccttatcttttggtctagcaaagggcttaatcatccgttttacggcacagttttaaacatggccgccccaggtaggagtcaagtgggcgtcgccatcatacctccaattacagctttgagaaacccagaatcctgttcactggaaggttgccgggtggcggctgacagcctcaaagtcgcaattgagtctgcgcaccggccattcaggatgggacgaccttataccgcggtgaggcggcgtggcaggacgaccaatttcagattcagggcgcggatgcagcataaatgggaaggcacggtttgagaaacggtcaaacctgggactagtggaggatagtgagctgccgactacggtggccgactgggtcagctatgggtgcccgtgagggtcaatgacaagggaactgaagggttaagagattcggcgtctgagcctcgcggggcctcagtggtggcggacagaggtttgcgggagtcagtggcacggtctctgaagaagatggattgggagtgtgtgggaatcaataaatgcgagttctgtgaaatgtcttga

SEQ ID NO: 240452 - DNA, 671 bp, Homo sapiens
  chr19:38042128-38042799
  hyper
cttcttccccgggccgcagccagcacggcctccaccgttttcctatgggccctgagagccctgacgttgcggcagcgccagccgggcacgcgaatgcgcatgcgccaggcgcgcgtcaccaggcgcgacggctgagccggggctcgcgtcacagtgacagccaccgttgcctggggacgggccctagcggcttggcggagctggagccctccctggcagtgcgtcggcgctgggctatggccccctcctctccgggggatcgtcgccttggtcccccgaccctaggagtcgggcagggcagaaccaggctaaagaaacgtccagcgtagcttcaaggatgcaccgcgtgatccctatcggatctccccgacgcgtcaggcctgcctagacggtgctgggagcgcgtctccttgaacgttgtcccgcctgggattgcgaggtaggtaccgcctgcctgtgtgtaccggggctgctgtctccggggaggggcttctggcggacaggagaaccaagcagcctcaggagctgcctgggtgtgtgtgtttctgtgcgagtgttgcatatctctgtgtgtgtttctgtgcaagtgttgcatgtctgtgtgtgtggggggggtggtgtctggtgaaaagaatgtgtctcgtgcggtggagcgccgtttctctgtagtc

SEQ ID NO: 240453 - DNA, 1086 bp, Homo sapiens
  chr19:38085128-38086214
  hyper
gaaactgcagcagctgtaaccgcacgattctcagctggcttaatgatgtccgtgtcacacgaggagtactgcggcccgggaggggccaagcgctaggagcattaacaggcggcaggtgagcccaccccgcggccgcacaagcgcacacgcacacgtccagggcggaggaacactactagtaacacccgcctccttctagcctccctatcccaaagttatggtgccgattttgtccgcggcaggggctccaggggcacactcataaattcggtgcggaggaacacaactagcagcaccacacccccgccactgccagaaccaaagtgacggtgccgacacccctccgcaagcgcaaggccgacttccataagtaattagccagagcaccgtcccgttcctgtcagcaccgagccccagccaggacaccggtattcccagcaccatacaagaactactttttcgatgaagcaacccaaaagctgcgagcggttcccggtgaggccgcccactcacctggccggcgcagacaagctccgtgcgtcaagacataacagcgtaagtgtacgacgttgcgcagcgacgcgggggccttcgggaaatgtagtctacaactggaaaccggccggatcgtgtctgcgcaggcccagcagctaagatcgggtccggcgctccagaacagaacgatccctgaggctcccttgctcgaactgtgggacttaccctactatggtccgagcctaccctatttcattatactcaagtaacgccccagaaattccagagaatctcacacaaagaggttgagtcttgccgtggtgccttcaggggaatgtcatcccgggctagaagagctgcaaaaggctgtcaggtaaggtctggatttctctctgacagctctggccgtgacgcagtggccacgataccgggttgctgctcaacggggttcggaagtgtgacgcattctttgcggccatgtgtgtgtgtgtgcgtgtgtgtgtgggtctgtgcgcgcgcgtgtccgagtgtcctctgtgggtgcagagtgggtagtggccatgcctgtgtgatgtgcgtcagattatgctt

SEQ ID NO: 240454 - DNA, 1784 bp, Homo sapiens
  chr19:38145546-38147330
  hyper
agcaggattttaaacggaaggaactcgaatgcatttcacagaaacaaagcagcagcacgaactcacagggaaccggcttttagaagagcagcagcgattcgtttctccttctcaagcgccttctctggaaactggcagggctggggaagcaggcagagttcaggacaccccaggcttttcttgactcgattggaacccaccctccacgcttccctggccccaactaaccgccacctgcatgcacaaatggaaacgacagggcagagggtcagcagtcacccgcgtctgggttcgcagctccgggtacgctgtagttccgcacccggttgcccacgcccgggaccacccactgtgtcttttcggaactgtccagcgtgtcctcctagaccccagacacccaccccaaatctaggtcccagcgttttgcaggggaccttcatcctggggcgttcacctctgacttccctcttgggccttttcgctacggccgagcctaagtggctgaagcgcggacgaggatgcgcggggcctcggtctccaactgcaccacaggccgcacccacgaacctggtccggcacagttactaccgcccgggcctccaggcctcagggctgcagaagctcagtcccgggaaaaaaagcacaccggcctgaggctccacaggaaccttttctccaccttggcccggcctgcaaaacctggcccactccgcgctcttttccctcagaaaagcagcggccacagtggcgcccggctcccagccccagcctcacccgactcagaggatagcccagccctgggagtcagcggcgccagaatacgggagagcgcctgtctccgtcgcgaatgcgctagcgcgcgggggggcggaggcaagtcccgcagctgctccgggccgggaggggcgcgtggggccgggtctcggcggggatagtcgggccggggagacggagccagaggggccgcagtgtccctcgcctcaggcctctacctgtaatggccgccccgtgactgaccagtgccattaaagataatccaggcctgctcccctgtggacactgcggtccaaaatttaaaaaaacaatattccgcctttttatttttcatttggttctcggctcggagacaggcggaggctgcgagccccgccccgcccccagcgacgcctcaccggaacctttggaaatcggcttctgcctcgagtgcgcaagcgcgcggggggcgaacgctggggcccttcagggagcaagggagaagtgtggggccgcacctgccgaggggtcgggaggtttggaggagggtggaggttggctacaggatcccgatggggatggagtgttcaaatctaggcctgtagccgtgaccctggcgtgagttggatggaggaaaccccagtatcgcgagcctggaccaaggcgcggcgcgtgctgcctgtggtgtttgctgagtgacggccgccgcgcccccgcgtacctggaccgagtgcctggccgctggcggagtagtgtttccgtgcacggggctgctgcgtgcgcgtgtgccgttctctagcgggggattaggatggtgccgcagagaaggctgcgcggtggtgcctgactctgacgctggctgtagcgggtctctggggtctttgcggtttgtgtctgcgtttgtgacgtacctgacatcggatctgtgactgtggctctgcctcatccagcgttatttccagaatccttctgatagggcagcgcttctggttctggttttccatggagacggtttgtgggtccctatgaaa

SEQ ID NO: 240455 - DNA, 231 bp, Homo sapiens
  chr19:38182700-38182931
  hyper
tttagccttttccaaattttcgagtaaactgacgtcctggaagaagcacccttattttcaccattttacagtcgaagaagggaagataagaggcggtgaatccgagactttcattcaggtgacgatccctcgcgggcactcactctcgctcacactacaatcagatcctccatgcggctttcatatactctgtcacactcgcagccagaatcccctcggatggactcttgc

SEQ ID NO: 240456 - DNA, 130 bp, Homo sapiens
  chr19:38183351-38183481
  hyper
gggctgcccgaggggcttagtcccagagccagtgctgtcaggggctgagcatgtgaatagggcagtcggaagaccatgtgtgtctgtggcttttaaatacaccccgaacgtctatctcttttaactggag

SEQ ID NO: 240457 - DNA, 570 bp, Homo sapiens
  chr19:38210376-38210946
  hyper
gccacgcagggtaccacgcgggcggcgggctggggctgcagaggctcccgcagtgacctgcgccgccttcttcaggtggaaccaaaaggtcccggaaccggagccaggggtccaagttttctccgttgcctttgtaatatgtagtccaagccagaacagtcaggaccgcaggtaccggtgagaaatggagtccagaatcctaaaaacctacgagaaatacggcagcgaccacttggaccgcgcctcccacccaccgctcgagccccggagacttctgggagtggccgccttgcctcgagtgcgcatgcgcagatcggccactactgggcccctggcctgaggcttagggtggagttagtgcgttcttagggccagtaggaggcgagtctgagtagaaactgatccaggtagcctcggaagggatcacctgctggatgggtgtgagctcctcagggtggggcgccgaaaccctcatggctcctgaggtagagccggcctccttggtaacacatgggactgggacttttaataccacccgacaggcccagcttgtctcgtcaagcgctaagt

SEQ ID NO: 240458 - DNA, 120 bp, Homo sapiens
  chr19:38270325-38270445
  hyper
agattgcaggcaccgccggacgctggctcccggaggttttagttttccctctaccaggagtgtgaagacacagagacttattgcgctggcgaagatggctgaggcgaaggcgtgtccgac

SEQ ID NO: 240459 - DNA, 658 bp, Homo sapiens
  chr19:38307858-38308516
  hyper
ccctaagaacacaggaacaccgcccttgacctagcgtcagaaacgttccctcacgggttggccgctctgcgcatgcgcactcctagcccaggctgcaactccccgaagcctccgggactcggcggtgggcgtggcgggcggtcgccgtggtcaccacggcttttctcagaggttttaacgcccctagacttcatttcccgacagggactgcgggtctggatattccgtcgtggactacgtttcccactgacgacggagaaaacttggtcctttggctccgcgctgcgcgtgacctgcagtcacctgagcaagagggcggcgtgggtcgctgcgggagcccctacagccccagcccgcagcccacgtggcaccctacagggctgtgagagtggggctgctggaggcgttcagagcgcggaggccccaggcgcgggccgggctctctcccgcctcctcaggcccgggggtgctggagctgccgaggtgggggctcatctttgggagacaggtggggagtgtgagagaccgcgcagcggcgacagggccgggcgtgcctgtgtgacgtgggtgcagctgtgggactgtgaggggtgcgtggtcgaccttgcgtaacctggatgtgcagtgcgtgtcctttgcaaagcgtgcgttgctgtgg

SEQ ID NO: 240460 - DNA, 269 bp, Homo sapiens
  chr19:38700328-38700597
  hyper
gtctccgccctcctcctcctcgaggccccgtcctcaacccgcactgccctccccccgccaccgggcgaagggggcgggaagcctgggaacaggctgttctcacatcctctcctggcgccggagccacgccagctgcttccagcaccccacaactcgcgcgcacgccagcccctggtcgcgcccaaactgtgctttgaggcccggcccttcccttcgtgtcccagtttccagcttcctctgcccgtctcggacatccctgtctctcctcc

SEQ ID NO: 240461 - DNA, 1153 bp, Homo sapiens
  chr19:38701093-38702246
  hyper
gttccctcactcctcactcccgccccccacccgtcgcccacatctcagtctctctcccagtgcccgtgtctagataccctcctgccctcccttagcgcctctctttccaccttatcgccaccgctgatttgccccacatccaggacacggagccccctggagatgtctgggtctgggatgacacctcctgacacccccgttccccaccccagcctcaggaggggccaacccaccgtcctcttcccagcccttcccttcccccggcccggctcccgcctccctcccggctgcgcccgctgcagctgcagcagcccgttgccagggcaaccacagctggctgggcgggagcccctccaccccatcccccttctcctcctttctggcaaagcagggcggagctgggacaaagccggggagaggcagggtgcaggcaggggaagaaggaggtggatggaggtaggggctggctggtcgcctcacccccaacaaggcccgtcgacccccggtcctccttcttggtgatgccccaaaccagacgggagaacgaggcagtcgtgggcagaggggtcaggcccagtttaatacacagaacaagttaattcacagcagaggcaggcaatagaggagactcggtgacaagtgagggggcactcctggattaggggacatccccccaaaacccaccacctcccccacctgcagtctcagtttcccttttttaaaacccgaacaacaaacacacacaaccacaagaaacaaccacgccccctcactcccccaaaatggccagcgaggggggcgggggccgccaggcctggcggggcgggaggagggagagaaaaggagtccgtggcggagtctgtgcttctcattccagcaggcgctgggcgggggcccacccggccccaccaccgccacccaccagccacggcaggcacggggcgggcacaggctggggcggtcggggaggggcaggaacagagttcaaaaccaaggttcacatcatgcagtatccaccgtgggcaccaggaggggcgggtggacaccacgcccaccgccctgggcacaagaggggaaggcgcccaccttgggtggggcgcgggacggctgcagctccagaaattggggttggggcgcccggcggggggccggc

SEQ ID NO: 240462 - DNA, 163 bp, Homo sapiens; identical to SEQ ID NO: 205394
  chr19:38715050-38715213
  hyper

SEQ ID NO: 240463 - DNA, 363 bp, Homo sapiens
  chr19:38719834-38720197
  hyper
cgagctttcagccccggccggggcaggcccggcacctccggagaccctgagggagagatggaggagagggaaacccctacccccactctgggtggggaaacggcctccgccacccccagcccgcgccgcattccttcactgacagcgacaaagaagaggcgcccccgcgaccctggaggggctcccgcccccaaccccagggggcgacagggggtggggacccccggggcaagggttcgcgctgggggcccccattcaactacggtccgcgcgctgcgtccccctcctcagccccagggcgggcgggggaagggctcctggtgggggggtctggacagggggcggggacggcagggacactca

SEQ ID NO: 240464 - DNA, 491 bp, Homo sapiens
  chr19:38746816-38747307
  hyper
acttctccacgtccagccgccgctgcagctcccgccggtcatacttgacggtgacgcgcgcgtgccgcttctgcagccccccgggactgccccctggcccgcgggcccgcgatggagactgcagcttgctcagcacgcgcttgcccagccgctgagctgccatcgcgctgctggacccagcctggccccgcgctgtgcgccttcgcctcgcgccccgggtgcttcttacgggccagggcggggctagccgggggcgggggctcgggctcgccgggaggtctgccccaccccggccgcctcaggcctcagtttccccgtctgcagtgcgagagtaggccgctgcgtcggcttgaggcacgcagtcgtgcgaagttgaggtatgggcggggacccagagtcccgggcgggtccctgcatcgggggctcccgggccgggatcctgtggggcgggggcctgggacagacactcgggacccggcctgtctgcgccc

SEQ ID NO: 240465 - DNA, 236 bp, Homo sapiens
  chr19:38754871-38755107
  hyper
gcttccaagaaacgcgtgtctgccgccccctcctcccaccctgaggccagtcctagagcgaaggccctcctccgacgtcgtcaccaagcccaagggaagggtggcaggtgctcagcgggcagacgccccgccccgccccgccaggttctgttgggggcgaggcccgcgcaagccccgcctcttccccggcaccaggggcgggcccaggtgcgcccagggccggggagcggccgcgc

SEQ ID NO: 240466 - DNA, 41 bp, Homo sapiens
  chr19:38806820-38806861
  hyper
tcccaggaggaggcggtgtctgccacgacagaaaatgagtg

SEQ ID NO: 240467 - DNA, 34 bp, Homo sapiens
  chr19:38852095-38852129
  hyper
ctcagggatcaagggagggacgtccgaggggatg

SEQ ID NO: 240468 - DNA, 427 bp, Homo sapiens
  chr19:38865006-38865433
  hyper
atggcacgacacccgctaccttttggcttggagacgctgccccgaaggcggaacctccaggacagctacgtagcgtcccgagcactcagactgaagccagggcagccatgttcattattggaaccgtgaggtgggtagggggggtggtgttgagacagctgtcattttcagttagggcaaaagccaacttccggtcaccatcttgagtgacgacagaggcggagctccaactgacatgttcattaagggcagggctccgagggcgccacctcgagagcgacggcgggctacccggggcgggctgaggcaggttgtagccccgccccgggccttgggctccacctctcggccccacttccgccgggcaagcgtttgtaggcggcgctgccgtaaatcaggcggtctgcttgccgcatcacgcaagatg

SEQ ID NO: 240469 - DNA, 438 bp, Homo sapiens
  chr19:38877578-38878016
  hyper
gggccgggcagcagagtccccgcgggggccgggggtggtgcagagaccgcggccgcctcttcaggagggggcatcactggagagggccgttctaaggtgaggggcagggtcgagggtgaggcctggggctcccggggtaccatgagtcccgggggtgtggcgctgccagggaaccagacacccagcccacgagtcaggcgcatggcctgggaggtcatctcgggctccaccagggacgtccggcgggagtcgggggcgcggtccgagggctgcacttttcgggagcccccgcccgcggatggctccgactgcaagttccccatttctgacggagctcggagactagtcagaaaaatttactccagtcagcctgccagggccgtggggaccctacgaggctggctgtacttgatctaatgcgtccgcaccggccccgcc

SEQ ID NO: 240470 - DNA, 41 bp, Homo sapiens
  chr19:38878539-38878580
  hyper
gagatgtaggccccgcccccggagctcgaggccccgccctc

SEQ ID NO: 240471 - DNA, 158 bp, Homo sapiens
  chr19:38879530-38879688
  hyper
ctgcccacccaggcgcccccaaggccccggctaggaggactagagagtggggaccccccaaactgcgcggcagccattcagggtaccagtcttcatttgtggggtctggactttctccgaggatgccccattcacaaaattccgtcctggaccctcac

SEQ ID NO: 240472 - DNA, 265 bp, Homo sapiens
  chr19:39109442-39109707
  hyper
ctgcgtgcattcccgcagagctccgtggcctcatggccgcgcgcaatacaacgcgcgcgcacgccgccagagctccgggtgcttcccggtgagttcgcgcgcgcacgctcccgcgctaccggcactggaactgggtctgtgaggcccgggaaaagcttagccccgccccctcgccacgagaggcgcctgcgcactgggatccagtaagatttttctcacgctgtctgtccagcttgagtggcgcgaatgcgcacgcgccaattgc

SEQ ID NO: 240473 - DNA, 507 bp, Homo sapiens; identical to SEQ ID NO: 205402
  chr19:39139398-39139905
  hyper

SEQ ID NO: 240474 - DNA, 63 bp, Homo sapiens; identical to SEQ ID NO: 205403
  chr19:39140557-39140620
  hyper

SEQ ID NO: 240475 - DNA, 676 bp, Homo sapiens
  chr19:39322018-39322694
  hyper
gcgcagacgtcacacgaagggactcatagctgtggtctggggcttcaccgagggctactccggaagcctcctcttgtgcagaggagccagtgaggcgaaggctaatactgagtcccgggtagttggagcctgtcagtcctggggagaaaggaacagcctttgatgaccccagactgcaagacacaggcctatcgaattagggagtccttcaaaagggagcacacgcacccctgaatttaggggactcgggcccttcgtgaccccggatagccctccccgtcctacatctgctataacagcacgacagcgcgacgcacccccataaggcaagaggtgactcacgccgggtcagtaggtcgcggagtctgcgagaagccactatccccgccgccatcgccgccgccttcgtctactgcgttcggacggagtaacgtgcccgttagcggagggggcgggcacagaaggccgccatgttgagcgagggcaccgatgccgcaacctgacaggcaatgacgccgttctttccgccatctttactaagggcagtcgatttccggttgccttacatagagccaggctcagaaatggaccctttgccccagtgggaacctggccaaagaaaatagctcctgcaatggcgtgaacctgggaggcggagtttgcagtgagccgagat

SEQ ID NO: 240476 - DNA, 447 bp, Homo sapiens
  chr19:39341808-39342255
  hyper
agccccctgcacaggggaggcgttcttgtgatctgtgcctgcgtcgggcctttcttcctcaagggcggggtaagaccacccgcactgcaccaagagaatgtcggagggtatctccagactccggcgaagcccaactggcggagcctggggggtggagaggagcgcgccccagttatcacgcgcaggcagcggggtcaaacggggattaacccgggatcccgtcctacggcatttaacattatggggctgcccgcgcagggtgtgggggggaacaccttagcgaagctattggcaagtgacgatatcgccaaaggggggaaaagaaataaaagcgaagctagcgtcgtgagaaacgcggcggacgccccaaaagtgctccaggacctttctgcccggctgatgggggatttcgagttgaggtccgggtggaaactaagtttgaaatgg

SEQ ID NO: 240477 - DNA, 183 bp, Homo sapiens
  chr19:39390792-39390975
  hyper
ggcccggggctgtcgtgggctcccctcgtcttcggctacgtcactgaggatggggacacgtgagtgaaccttaggctgccaaacggagccctaggacccggcgtcacattcctcattaatctctgatccctgaggcttcctaacctcatactcctaaatctgacttccgatgctgaacttcct

SEQ ID NO: 240478 - DNA, 215 bp, Homo sapiens
  chr19:39421219-39421434
  hyper
tgtagccctcgcgcgcatactcgtacaggaggttccggtttcgtttctctgtagtgaaacttctccttggactatcgttggagatgcagcctccccggggccggaacccccgacgagtcagcaaaggccacaagcgccgcgccatggacgcagccatcttggaccgggaacaaggcggcacttcgtcccgcccactccgcgtttagaccaattgc

SEQ ID NO: 240479 - DNA, 226 bp, Homo sapiens
  chr19:39522733-39522959
  hyper
gtgcgcggggggacgtggctcagcaccaccagaagcagctctgggggtagttggctcaggtccagcgcctcttcgggttccggctccggcgcggggacccgggcggcccggcccctggagaccgaggcgcccatggtccccccgccaggcccggctgtggctgcgggagaggaagggtcaaggcgtcagggaccagcagcctccgcggcgcgcagcctctgcctgc

SEQ ID NO: 240480 - DNA, 468 bp, Homo sapiens
  chr19:39574108-39574576
  hyper
tcaggaaggggaaacgactggaaatccgggcccccccagttcttccctgcttctctttttgtggcagccgctcctcacgttcaaacagattgcaaaggtttacaggggagaaccctaacttgttccctagacgtcagtttctggagttcctgcattaatacgattaaaaagaacagctgattcttatccagcccttactctgggccgggccctgttatcggcatgaaatttcatgcagcaactcgtttactcctcacaacagcccacggggtatatacgagcatcacctcctttttacaggtgaaaaaacccaaggtccagcgaggttgaataactcacctaggtcgcacagctcagaaagcccactgcaattccgggattctggttttgttttgaggttgccccgggcttctgaggaggggtcagtgggctcagcatggaaaggaaggaagccggaaggctggagga

SEQ ID NO: 240481 - DNA, 174 bp, Homo sapiens
  chr19:39589709-39589883
  hyper
gacaacccgaaggccgtcccccggctgcgcagggacacccagcagggcatgtatgacgccgttctccatgtgggtgaggcatccgcaggggcgcgcgcagggacggtggggggcgcgcgcagggatggtggggggcgcgcgggtcgggggcgcgcgggtcgggggcggtgctag

SEQ ID NO: 240482 - DNA, 218 bp, Homo sapiens
  chr19:39616203-39616421
  hyper
gacctcagtgggccgggagccagccttcccgcaccttttccaaaatttccaatccccgcttggcattttctgcccgaaggtctccgattggacgctctgtaccaatcggaggctggagcgggccctgagaggcgcccgactccgcccccgcactggccctgcccactgcccggtcagcctcgttgctatggggactggtgggcggtgaggggggaaag

SEQ ID NO: 240483 - DNA, 475 bp, Homo sapiens
  chr19:39687547-39688022
  hyper
cagggtgccctgccccttcccgctcccagttaaccccagccctgtgaaaccgggacagtcgcgcagcctcgagggatggaggaggtgcgtgagggacacgcgctcggtggcgggatggaagccgatgggcccgcgagcctccaggagctgcctccctcgccacggtcgccttcaccgccgccgtcgccgccaccactgccctcgccgccgtcgctgccatcgcccgcagccccggaggcccccgagctccccgagccggcgcagccgtccgaggctcacgcccggcagctgctgctggaggagtgggggccgctgagcgggggcctggagctgccccagcgcctcacctggaagctgctcctgttgcggcggccgctctaccgcaacctgctgcgctcgcccaaccccgaaggtgcgcaagggcccagagcagccaggaggcaccaccctgaccgtctgtctcttcctctttccc

SEQ ID NO: 240484 - DNA, 119 bp, Homo sapiens
  chr19:39754806-39754925
  hyper
caggggacagtggccggcagcacctgctgcagcacgaggcacagagggtgcactgcagggagaagtgagggcagaggccaaggcgaggagggggccggctcccgctctctctccctctg

SEQ ID NO: 240485 - DNA, 277 bp, Homo sapiens
  chr19:39755405-39755682
  hyper
cgcagggctatgccgggggagagcgggatgcaattcaaccctggttcacgccttcggggagctccctggttcagtacacgacaggcacgaccgtacgctgccagtacccatccacgtccaggaatcccagactgtgcagaggttaggggccctggcgagggggcccagtcgtatgcgataagcgccgcttgtcccgcaggcggaagaggcgctgagttggaggtcgcgcaactgctccgtccgccccaggagggatcctccgcggccatcggtgagg

SEQ ID NO: 240486 - DNA, 117 bp, Homo sapiens
  chr19:39818898-39819015
  hyper
tcctctaggtcagcccgccccctgctggcccaagcctcgtactgcaggaaccgtcggctagagcccagaagaggcagaaactgagtccaaactgaggatctccgagtttttgcattt

SEQ ID NO: 240487 - DNA, 258 bp, Homo sapiens
  chr19:39881951-39882209
  hyper
attgcctagggggcgggactaactagcaaacggggactagaaatagggatgctgaaaagcaacggggagagacgcagtcgtaacgcacttccggcggtctacgcgaggaagatggctgcatcccagcagcaagcttcagcggcttcctcagctgctggtgtatcgggtcctagttcggctggcggcccgggtccccagcagcagccgcaaccgccagcacaactggtgggccctgcccagagcggcctcctgcagcaa

SEQ ID NO: 240488 - DNA, 604 bp, Homo sapiens
  chr19:39898001-39898605
  hyper
aaccgaagcaatccggacttccaggtcaactttgcccggtttctccagttgtgaaactggagatcccgacgcgtgggtcatatccggggaggacaagagacccaaaattgggaaacagtggtgcgccctgacttcggggtccccctcttggtccagccggggaagccgggattcctgggtccctcgggataaggcctcggtggtgggtaaactcagaacctccaactctgggttcctggcatccggaacccaggggtttctgcgggcgggtggggctcaggcggggagcccacaaaccggcctggcaagctctagttccctgcagctggggtggggcgtcgccctgcattttcaggtgccttaaccgacccatttccgcagagcctcctgtcgctgagccctgacgtgcccgtgccatccgaccatggagggactgagtccagcccaggctggggctcctcgggaccctggagcctgagcccctccgactccagcccgtctggggtcacctcccgcctgcctggccgctccaccagcctagtggagggccgcagctgtggctgggtgcccccaccccctggcttcgcaccgctggctccccgcc

SEQ ID NO: 240489 - DNA, 107 bp, Homo sapiens
  chr19:39902955-39903062
  hyper
caccggagggccccgccttgtgttatatatgcaaattaaacattttgcattgaccaataggagacagtgcattgccagttccggattctcacgcctcgcggcccttg

SEQ ID NO: 240490 - DNA, 71 bp, Homo sapiens
  chr19:39926848-39926919
  hyper
tgtagtcgactaccgcagctcttctttgcattctggctctttaataatctcccttcgccctttctttaaat

SEQ ID NO: 240491 - DNA, 209 bp, Homo sapiens
  chr19:39936018-39936227
  hyper
gtttcagcctggtcgccgagccggcgggtagaaaaaacctttcccctcctaaccctccgcagatgtcggccccgcactccgcccaggccagccctgcctctctcaagatggcgacctggaagtgcgtcgcccgtgccagccccggaaatctcgtgttaggcgaggtcaacgggtaggttctcgcgagaggacccgtcagccccagtcag

SEQ ID NO: 240492 - DNA, 710 bp, Homo sapiens
  chr19:39988486-39989196
  hyper
taaagggtttctgaagggcccgggatgtccccccccccagttcttctggggtgggggagcgggtccctgtatgtgaagacggaatttcctgcccatttgctcctcacaccttccggaggccaaacgggcagcccagctgcggcccgaagggggaggggctcggccgcccggcagatggcggcatttacatacagctgggagccccctcttgaggccgagctcctcgccctggcgtctggtgcgtccgcgatgcggggtttgggagggtggctttgtcttgcggagggggaacacacacacgcctgcacacaggggtccacaaagagccctggatcttcatcgtatccacacacagctacacccgtggatctcccaaacccagtctcattcacacaaaccagcgcacacaggggtctacaaagaactccggatcttcatcgtattcacacgcggctgcatccgtggacctctcaaacccagtctcattcacacacaggcgccctcagccattcaccaccttgcacagcctctaccacacccgcacagagcacaaagtcacaggtttatacgcctatacaggatctcccataaacacacacgcacagagaagcagccacacagccacacaatctcaaagcgtcacacaatcacgaagtcgtgtacacttctagtgtcccactcgggtgtgcgtgcagaatcagaattgttta

SEQ ID NO: 240493 - DNA, 658 bp, Homo sapiens
  chr19:39989528-39990186
  hyper
ctgcctgaaggggcggggccattctctcagatataaggcttggaagccagcagctgcgactcccgagacccccccaccagaaggccatggtctccccacggatgtccgggctcctctcccagactgtgatcctagcgctcattttcctcccccaggtcagagccaggtgggaggtggcgtggaaagggatgaatgcggaggggaggggtgagtgcgacctgaaggtcctggggaaggagcgtggggcggacgggaagcctgggtcctcccggccgcctcaccctgcgcccgtctccgtcccagacacggcccgctggcgtcttcgagctgcagatccactctttcgggccgggtccaggccctggggccccgcggtccccctgcagcgcccggctcccctgccgcctcttcttcagagtctgcctgaagcctgggctctcagaggaggccgccgagtccccgtgcgccctgggcgcggcgctgagtgcgcgcggaccggtctacaccgagcagcccggagcgcccgcgcctgatctcccactgcccgacggcctcttgcaggtgcccttccgggacgcctggcctgtaagtgctgcccccgggggactcccggtgctggaggcctaaccctgccagcgaaacctccacctcctctccc

SEQ ID NO: 240494 - DNA, 133 bp, Homo sapiens
  chr19:39993613-39993746
  hyper
tctgccgtccgcgcagcgccccctcgcggtgcggtccgggactgcgcccctgcgcaccgctcgaggacgaatgtgaggcgccgcgtgagtcctgcgttcgaccccaccccgtcccagccggggaccccggccc

SEQ ID NO: 240495 - DNA, 118 bp, Homo sapiens
  chr19:39998040-39998158
  hyper
ggggaccctcagcgctaccttttgcctccggctctgggactgctcgtggccgcgggcgtggccggcgctgcgctcttgctggtccacgtgcgccgccgtggccactcccaggatgctg

SEQ ID NO: 240496 - DNA, 467 bp, Homo sapiens
  chr19:40005581-40006048
  hyper
gctgaacacctgagtgtcaccgacagctgcggaggcactggggcaatctgtgtgtttctcagcctggcgtcgggggttaagggggcgggaattactcggcgaggtcgggaggtcgcgcggtggaacccgggggccaggtggaactcggtgtaacagagcccccagtggtcgcgccgcgtctcagaacccggtgcgggagacgctctccccgcccaaagagggaaggcgggcgggactccccaaccggcttgccccggtccccctgggccccatgaataaccaggcgcggaccccagccccctcctcggcgcggacttcaacctcagtccgggcttctaccccgacccggacaccgactccactccggaccccgactccggtccggactcggacccccatccggaccctgactccagtcctgactccgtctccagccgggacttcccctctggtcctgactcctgctc

SEQ ID NO: 240497 - DNA, 39 bp, Homo sapiens; identical to SEQ ID NO: 205410
  chr19:40022937-40022976
  hyper

SEQ ID NO: 240498 - DNA, 1067 bp, Homo sapiens
  chr19:40324000-40325067
  hyper
gctgaaaaggcgaccgcctgtctctggcccggccggccccgcggcggggagggcaagcgggacaggaggcccggtgggtgacaacagcagccgccactgccaccgggggcggggagaggaggggacaagggtcagcccagggcacgcgggggaagagtagagcaggtggacgggggaggggcgacacgccccaccctgagtgaccaccagcccctagggacccggcgtcccgccccccacccaggaggccctcctgggcctgctgagaccggaaggcggggcccgactgagcttggcaatcggcacctgccatggcaacaactgtaccattggtcgctggtgccaagagctcagccaatcacagcctagggcagctgttgctaggcgacgaagaagcggcccgcggagctgagcccaaacaaagggcgggagtggggcccggctaccccctcccagcctccctcctgcaactgcttcctcgggcttggccggttccaggaattcaactatgaatagccaggcagggcccgcacctgcctgccacccccctcctctcctcccttggcctcgtgctaagtctcacggcgacgggagcagggcggatcccgtcctgcccacctccctgcgaccgcttgccgccccacccgtccccgcgccgttacctgaaggagcgggcaaggggactcaaactgctcggggagcccgagctcagacctgcccactggctgagggtatccggcggacgcggcaagccagggccccgattacccagtaatgcaaccagcaaaatggcgaccacaacaaaccggcccccccacgccctggactccgcccccatccctccctctccgctcccctcacgtgacccacactgacactccgcctgcgcgagatggccgcttacctgcacgcatgcgcagcgagctaccaatcccacccaagaaccgaaatccaggctgccgctgcgcaaaggcagctagaaacggagcatgcgctctgtgaccgagtgagaatttacccaaccccgcaaaattgaccaagggtgcgtgctccctgtgtcagcaggt

SEQ ID NO: 240499 - DNA, 227 bp, Homo sapiens
  chr19:40336895-40337122
  hyper
ccgtccctgaccccggaccctcaccccagcctgacctggcttcatggcgagccctggtttgtgcggctccggagtccgcggcgttcacaactccacgagtccggggctttcgcacgtggaaaagagcgcaggcgcgcggcgacgtgcgctgcgtgacgccaccccgtagtcccgcccccgggccccttccccgcccggagctcggcgcacgcgcagtgagcctggat

SEQ ID NO: 240500 - DNA, 1030 bp, Homo sapiens; identical to SEQ ID NO: 205413
  chr19:40561466-40562496
  hyper

SEQ ID NO: 240501 - DNA, 596 bp, Homo sapiens
  chr19:40722968-40723564
  hyper
tagaagcagctccgcgggaggagggctctgctattctgccctgatcttcctgcctgttccctccgctgcagcccctttccccgccctgggcccagccctcacctctgccccgccccgccactcacctgtgggttcccggctgcgggcctcctgcaggtagcgcagcgcgcgtgcgtagtcgcccaggtggtagaaggcaatgccggcacggtaggtggccttgaagttgccctgctgcttctccagtaccttgagacagtactcgcgcacgcgctcgtagtttaccagctccgactgcagcaggcaagctgcgagggccccgcggccggcactctcagagcctgctggcacccccagaacccacctgactgcgaggagccgaggctccaggcggcagggaaccaggcctaagggattgctccggcaaccaggggcgccaatccgctcgcctatcgaaacaggcgcaactgcgccgctgctagggggcgccaaaacacggacaggcgccactgggcgatccacccagagctgtcggtgggcaagagcactaaggccccgcgcgggggcgagggccgggacctcgagagcctggctca

SEQ ID NO: 240502 - DNA, 66 bp, Homo sapiens
  chr19:40732062-40732128
  hyper
actgcaaagagcccggggacggtgggaaagggcattcccagcggtagaaacggcgctgtgtgaaaa

SEQ ID NO: 240503 - DNA, 409 bp, Homo sapiens
  chr19:40791307-40791716
  hyper
tggacggaaataccgccctctcgcgccacaaacaggaagtgacgtacaaagagccagagacgaactctgagagagcgagagcgcaagagcagggcagagaaggaggcgggctcacagcagggcgcctgcgcacattagacaactttgggcctgtgtgggttagagatgggcctcgctaggccgtggggcggaaaggcgagatggggctacgcaggcgcactaggactccgacgtctgctttccctagggcctagccgtagtgattatttcccggcagcccctagtccgtatttacatacgctttgatcttgttttactcagttctgggttctgacgctcttaaaggaccccggagcgggagttagttaggaggggtttccttttcagtgtgctcgtcatggttgagctc

SEQ ID NO: 240504 - DNA, 373 bp, Homo sapiens
  chr19:40854360-40854733
  hyper
actcgtccgcggccgctctaccccaacaggccgccaccagcgagagtgcggccataaccatcacgtgaccgcccaccgacaccagcgagagtgcagtcgtaaccgtcacgtgaccgcccaccgtcggcccggcgctcccctccgcccgaagctagcaagcggcgcggccaatgagaaaggcgcatgcctggcccccgccggcctgcagtctagccgtagtgcgcctgcgcgcggctaggaggggccgtcaggcggggatacagcctggaaggtgcgtgtggggctgggtctcggagtgggagacgtggagtgcaggtactgtgcgatctgggggcgcggcgcctcggctaccctcctcgtgttgtcttccacg

SEQ ID NO: 240505 - DNA, 75 bp, Homo sapiens
  chr19:40910078-40910153
  hyper
acacccactccggcgtctcccctttaagcaagcctgagggcagctggctttctaggacccgcggaacggttaaac

SEQ ID NO: 240506 - DNA, 186 bp, Homo sapiens; identical to SEQ ID NO: 205416
  chr19:40932005-40932191
  hyper

SEQ ID NO: 240507 - DNA, 439 bp, Homo sapiens
  chr19:40948767-40949206
  hyper
tcgatcaagagttaattgccagttattcgctcaacagatttactgagtgcctactatattcgaaatctcctggagccctgttggggaacctatgttgagattcttcttcaacagtcgggatatttctatgtcctcttccttaaccgactgggagcgctcccaagagtaggaaaggggcctgtctcattccctctgcccacgctttcagattcccccaaagcgcgccccataggaaaacttgctagaactcagctcagaccaagccccgccccctcggaggtcccactcaatcagaccgcgacactgtaaggccccgcccccccatgggtccttacagagcatccaggaacgccccaatttggcccaggggcttctgggaaacgggggccaacagccgccaggtacacgaattgacgtcgagcacgcactacaatcccca

SEQ ID NO: 240508 - DNA, 121 bp, Homo sapiens
  chr19:40971818-40971939
  hyper
cgccctctctgcgcgccacttagactggaaggcggggccacagaaggccacgcctccacatagcaacaaatagagtggacggagccgagataacttgtcactcagcgccctgcctccgcgc

SEQ ID NO: 240509 - DNA, 596 bp, Homo sapiens
  chr19:41018505-41019101
  hyper
ggctcaggctaccagccctgcgacccgcaggtcatctgcaaccgcgtgaaccacgtgcacggctgcctggcggagctgcaggagcaggcagcgcggcgacgcgcggagctggaggcttcgcggagcctgtgggcgctgctgcaggagctggaggaggccgagagctgggcgcgcgacaaggagcgtctcctggaggctgcgggcggcggcggtgcggcgggcgcagcgggcgcagcgggaacagcgggcggcgcgcatgacctgtccagcacagcgcgcctcctggcccagcacaagatcctgcagggcgagctgggcgggcggcgagcgttgctgcagcaggccctgcggtgtggcgaggagctggttgcggccggcggtgccgtcggcccgggagcagacaccgtgcacctggtaggcctggcggagcgcgcggcgagcgcccggcgccgctggcagaggctggaagaggcggcggcgcggcgagagcggcggctgcaggaggcgcgggcgctgcaccagttcggcgctgacctcgacgggctgctggactggcttcgcgacgcttaccgcctggcagccgccggtgacttcgg

SEQ ID NO: 240510 - DNA, 301 bp, Homo sapiens
  chr19:41025621-41025922
  hyper
tagctagcgcggctcaggcctgcggcgaggcggtggcggcagcagggcgcctgcagcgcttcctacatgacctcgacgctttcctggactggctcgtgcgcgcccaggaggcggcgggcggcagcgaggggcccctgcccaacagcctagaagaggcggacgcgctgctggcgcgccacgctgcgctcaaggaggaggtggaccagcgcgaggaagactatgctcgcatcgtggcggccagcgaggcgctgctggccgccgacggcgcagagctgggcccgggcctggcactagacgagtg

SEQ ID NO: 240511 - DNA, 79 bp, Homo sapiens
  chr19:41036239-41036318
  hyper
gaagccccccacccgaagccttggggcgagtggtggttcctcctgcacccccacctggggccccgcaaagaggcgggca

SEQ ID NO: 240512 - DNA, 386 bp, Homo sapiens
  chr19:41055084-41055470
  hyper
gtccccacagtccatggagtcgcaggtggaggagtggtaccgcgaggtgggagagctgcaggcgcagacggcggcgctgccgctggagccggcgagcaaggagctggtgggtgagcggcagaacgcggtgggcgagcgcctggtgcgcctgctcgagccgttgcaggagcgccgccgcttgctgctggcttccaaggagttgcaccaggtggcgcacgacctggacgacgagctggtgaggccagcgcaggggcctggggcggggcggggcggggcggtggggcggagaaggtgggcatggggcggggctgaagatggagacggctgagaccctcccactcatacgctgaaagacgcattcagccgttcactcattcattcattca

SEQ ID NO: 240513 - DNA, 584 bp, Homo sapiens
  chr19:41059940-41060524
  hyper
ggggtgcttgttaattgccccgtgggccgtgccagtagcagaggagcgtgtggtcttgcagggcctcggaacgccccctctccacccacatccccttacctcctgcccccagggcctgcggcgggagatccaggcgcatgggccgcgcctggaggaggtgctggagcgcgcgggcgcgctggcgtcgctgcgcagcccggaggcagaggcagtgcgccggggcctggagcagctgcagagcgcctgggccggactgcgggaggctgccgagcgacggcagcaggtgctggacgccgccttccaggtggagcagtactacttcgacgtggctgaggtggaggcgtggctgggcgagcaggagctgctcatgatgagtgaggacaagggcaaggtgcgcccgagctgggggtgcggagggcctgggggcgctggagccgggggccgccgctgccgcctcatcgtgggcgctttgtgcccccaggacgaacagagcaccctgcagctgctcaagaaacacctgcagctggagcaaggcgtggagaactacgaggaaagcatcgcgcagctgtcgcgccagtgccggg

SEQ ID NO: 240514 - DNA, 594 bp, Homo sapiens
  chr19:41073589-41074183
  hyper
cagagcaagcagccgcctaccccactgctggggcgcaagttctttggggaccccacggaactggcggccaaggcggcgcccctgctgcggccagggggctatgaaaggggcttggagcccctggcccgccgagcctcggacacgctctcggccgaggtgcggactcgggtggggtatgtgcgccaggagctcaagcccgagcgcctccagccgcgcattgaccggctgccggagatcccggggagggtggagcccgcggccctgccggccgcaccagaggacgcggcggagacccccgcgacccccgcggcggcggagcaggtgcggccacgaccggagcgccaggagtcagctgatcgcgcggaggagctgcccaggaggcggcggcctgagcggcaagagtcagtcgatcaatccgaggaggctgcgcggaggcggcggccggagcggcaggagtcagcggagcacgaggcggcacacagccttaccctgggccgctatgagcagatggagcggcggcgcgagcggcgtgagcggcgcttggagcggcaggagtccagcgaacaggagatgcccatcagaggagacctggtc

SEQ ID NO: 240515 - DNA, 34 bp, Homo sapiens; identical to SEQ ID NO: 205422
  chr19:41074213-41074247
  hyper

SEQ ID NO: 240516 - DNA, 104 bp, Homo sapiens; identical to SEQ ID NO: 205423
  chr19:41082277-41082381
  hyper

SEQ ID NO: 240517 - DNA, 36 bp, Homo sapiens
  chr19:41082735-41082771
  hyper
cagcctatggaggcggggtccgggtgcacacccgga

SEQ ID NO: 240518 - DNA, 97 bp, Homo sapiens
  chr19:41105082-41105179
  hyper
ttccactccactatttatagcgttgctgtttgtcgctgctgcccgggccagacgtctaggaggagccgctgcatccgaggtgggttctggaagatgg

SEQ ID NO: 240519 - DNA, 77 bp, Homo sapiens
  chr19:41105406-41105483
  hyper
agtcccagccccagcgtgaggaagagacaggtgtccctcaactggcagccactgacgtgagtgggcagtccctcccc

SEQ ID NO: 240520 - DNA, 585 bp, Homo sapiens
  chr19:41105942-41106527
  hyper
gacagcagcttttccgtcctctcccacccaggctccaggaggccagagctctactgaagcggcggcggccccgggggccagggggccggggactactgagaaggaggcccccacagcgtgcccccgctggcaaggccccgggtaagcacatccgcctttcctccgcctggggcgaggggggttccgggccagataaagccgtctggttcccacggtccagccgccgcctacccgccccccgttgtagctcagcacccacccccaggacgaggccccctctagggaccccagcgtccggccgtgcgaggtgagcccgggacaggaccagacacaggccagaggcactgacccgcgggggtggggccgggaagccaggcgtccgggctccccgcggccgaagagggagggcgctggcccgttagaaagctccgccgaaccagcccagacaacaaaagcgattgtgcgggttggcgcctgcctgggcaccaaatgctcaagattgtggggcggctgggggccaaaggcctcctcctgtttcccgaatcttccccctgccctcctcccgctccagctcttgacccctag

SEQ ID NO: 240521 - DNA, 698 bp, Homo sapiens; identical to SEQ ID NO: 205426
  chr19:41111117-41111815
  hyper

SEQ ID NO: 240522 - DNA, 378 bp, Homo sapiens
  chr19:41115509-41115887
  hyper
tacacctgcgcttgcgactctggcttccggctcagcccccagggcacccgatgcattggtgagcaagacggagggcgcggaaggaggcggggcggggggctttgcctggtcaccttgtcaccagccccctccgtgtcctcagatgtggacgaatgtcgccgcgtgcccccgccctgtgctcccgggcgctgcgagaactcaccaggcagcttccgctgcgtgtgcggcccgggcttccgagccggcccacgggctgcggaatgcctgggtgagaaatttgccccacccggctccaggcccaccccagggtctcgctcctgctctcactccagagcctctccagccctcccacgcttcccctctcgggtcccgccccag

SEQ ID NO: 240523 - DNA, 863 bp, Homo sapiens
  chr19:41119112-41119975
  hyper
tagggacccgccagagagtctgggagtagggcctgggttccagggcaaagccggctggaaaggtggaggcgggaccaaggcgctgtgggaggagcttagaaacctggcattggtgggggcggggttactgcgatgtgggcggagcttgtctgggaggccgggtcccgtgactccgcccaatctcccgcgtaccctagacgtgaacgagtgcctggagggcgatttctgcttccctcacggcgagtgcctcaacactgacggctcctttgcctgtacttgtgcccctggctaccgacccggaccccgcggagcctcttgcctcggttcgtacccgggctgatcctggccccggaaagggtgggcttagggcaggaaaaggcgggacggggagaagagggcgaaaaggggaaaacgagtttttagccggggtattccagcaggatcagggggcagctggtgggagtctcgaggcagtgagggggggcggggcgtggagatgaaagggccgagtctgggtatttggaccgtgattgtaaagaagctgttctaaacccgtcggggggcggtgtttgcagggagggaagtagcgtgaggcaggttggggaaggcgtgagaggcctaggagagccgaggggcggtggaggggtgtggcctagaatgttaggcggagcgggaggtgggccgggccttcggacgccctgtcccgcagacgttgacgagtgcagcgaggaggacctttgccagagcggcatctgtaccaacaccgacggctccttcgagtgcatctgtcctccgggacaccgcgctggcccggacctcgcctcctgcctcggtgagaggccccgccccggcctgatccctcc

SEQ ID NO: 240524 - DNA, 46 bp, Homo sapiens
  chr19:41120296-41120342
  hyper
ctgtgtccgggactgcgatcctgggtaccacgcgggccccgagggc

SEQ ID NO: 240525 - DNA, 34 bp, Homo sapiens
  chr19:41196715-41196749
  hyper
gcggccaccgccccgccacgcccattggccagtc

SEQ ID NO: 240526 - DNA, 73 bp, Homo sapiens; identical to SEQ ID NO: 205430
  chr19:41222270-41222343
  hyper

SEQ ID NO: 240527 - DNA, 106 bp, Homo sapiens; identical to SEQ ID NO: 205431
  chr19:41223422-41223528
  hyper

SEQ ID NO: 240528 - DNA, 101 bp, Homo sapiens
  chr19:41641728-41641829
  hyper
agcccagcaaaggcggggccaatgtgtggatagggcacttggaggtctggtaaggcagcaaaacgaacgaagccggccgcaggagtcggaggccccgaaag

SEQ ID NO: 240529 - DNA, 589 bp, Homo sapiens
  chr19:41698790-41699379
  hyper
tggggagagtggcgcggggtcaccgccagatgcggggtgtggcaacctccaggcggccaaagtctctgacttccaggttcttctgtttgcttactccctatccgggggcccaaggcgctgtctccgccgcccaagccccgcgtaaacctgggtgacctcggagacatccgttggagcatgagttcccgacatcaggcggcggcggtggtccgggagaaacccggcggcggggagataagcctgcccaggaggcagggggctgggctagctgccccgccccgcgcctgacttcgttggggagggagacgcccggctcccgcccctaactagcccagccgcgcggagcgcctgggagaggagaaggagccgacctgccgagatggaggcgaccggcacctgggcgctgctgctggcgctggcgctgctcctgctgctgacgctggcgctgtccgggaccagggcccgaggccacctgccccccgggcccacgccgctaccactgctgggaaacctcctgcagctacggcccggggcgctgtattcagggctcatgcgggtaaggggctctggggacgtcctggctaggggt

SEQ ID NO: 240530 - DNA, 537 bp, Homo sapiens
  chr19:41732021-41732558
  hyper
gggaagggggatcccggctctggctccgcgcccccgaagccggccggaagcgctggggtggggaggtgcccccggtgactcacgcgggggcaggaatgctgcggtcggaacgggacccggctccagaacccacctccagccccagggcttctccggccggcggcgccagctcccgcgcgctgaccctggcggggccccacgtgccaggtggctggacccgacccaggctccccgcccccactcgggccgcccgcccgggactgtactgtttctcctccgggcggcgcgggggctgcgggcgcggggccttcagggcgcggaggctgcgggagcgggcacctgaccttgtctgggaacggccacctaggaagccgcgactgaggagctcccctaccctcccctttccggcctctgcagactttgcaccattccactccctccgctgacggagaaaaggaaactttgtgtctgcggatggagagcctcccttgccaacgcggtgggaacagaggcgtacacgcacggagcaaacacgag

SEQ ID NO: 240531 - DNA, 101 bp, Homo sapiens
  chr19:41815855-41815956
  hyper
cggctccaggctccgggggaaagtcctttagccatccatcccaaaattaagcacgctgggagctggagtcacagcagtgataaaacgaacaatgattctgg

SEQ ID NO: 240532 - DNA, 326 bp, Homo sapiens
  chr19:41831045-41831371
  hyper
ccctcccagttctcccggggtcggggtaggtggaaaggctgagtcagggagggcgggccccgctgggagacaacccctaggtgggcatccggcccccacccccgtgtctcctgtccgtcctggccctggcctggctcgctggcctggccgccaccccgccccccacgtctgacacctccatgcgtcctgccaaagcaagctgcctccctgcactcttccccctccagctccagtcactctgtccctctgtcccccgtcccttctccctgcttctgtgcgtttctttccagccctctgccttcctccctcaccgccactgctctgtc

SEQ ID NO: 240533 - DNA, 333 bp, Homo sapiens
  chr19:41831742-41832075
  hyper
cagaatgaggggtcatcgcctctcgcccacccagaaagggcgcaggagggggcagcaaggttgcggggcctgtctggccagaaggaaatgtctgtgctgtggcctggtcacccccgcccccaggacctgctgggctgctgccgcccccggccggggctgaggccgagtaaacacagcaaacacagccgccggcagcctgggatatttataccgaggctgggcgtgggtccagtgcccaccacagcccctgccctgccctgccttgcctgctgccacagccagctccgagccagcgtggcaccagccggcaaggggacgcgccgcagacacagc

SEQ ID NO: 240534 - DNA, 594 bp, Homo sapiens
  chr19:41857122-41857716
  hyper
gggtgcggagtgcgcgtcattgggctggagctgtaaactggcgcagaaatgggcagggaacccgcaagcccacaccgcccaagagtcagtgaaacctgagggatcttccccaaggctctgaaccacgcgggacgcctgggtcctcgcatggatgccgacggggccggctgagtgggagccccgcccgtagctggggtgaggagggcgggaggcgccgcagccaggagggcggggaccagacctgccccgtctcgccccgggctccgcgagcgatccccgcctccgccgggggcatgggaaggaaagggaagggagggggatgaggccgccggacgctggggtttccccagccaccctgagaggaactgggactttggggtccagactgccagcgtttagcgcagcggggtcctcctgccccttggtggaagcgcaggctcctccccccgcgcgtggcacccacgtggggctttctcactcctcccagcttggttttctcacctcggtcttgtagagtcaccccccacccagcacttcccctgcggctggactccgctcagcccattcccctgcatcctgcggggaatgcagcgt

SEQ ID NO: 240535 - DNA, 249 bp, Homo sapiens
  chr19:41859957-41860206
  hyper
tgggcgggctccgaggggggtcccttcagccctgggggaaagggggcgggcaccccggctccgccccgcaaacagggtgctgcctcctggcggccaagcgccaccaaagcgggtgatccagatgcgctgtggctttgcgggcggtgtgggtcaccagagaaagaggaccaggcggagaaggcttaatccgggggatgagacacaggggagccgaccagaggagggggacccagaacggaaggagagtca

SEQ ID NO: 240536 - DNA, 221 bp, Homo sapiens; identical to SEQ ID NO: 205438
  chr19:41870211-41870432
  hyper

SEQ ID NO: 240537 - DNA, 33 bp, Homo sapiens
  chr19:41882553-41882586
  hyper
ggatccctcgccggacgccgcggagggacagag

SEQ ID NO: 240538 - DNA, 337 bp, Homo sapiens
  chr19:41945338-41945675
  hyper
ttctgtaaaaattcgtcaatctcccactaactttccttacattcatccttcggtcttctaagaccaaatcccacatcctcgaacaatcccttccaagctctcttatcctacaggccccacccttgcctgtccattagctccttgtgtcatccctccctctgattggttagtcgcgtcgctcttcggcagccactccctcatccccattggatactctcagccaagtccctgcctcctctcgctcgctaaagcgtctcctccgcctgcgaccctcacagatccttcctggcccccactagccacaggtttgcactcccagtacggggcttgccaggct

SEQ ID NO: 240539 - DNA, 48 bp, Homo sapiens
  chr19:42257256-42257304
  hyper
gaactggggaaagctcgctgcgccgccagggggcgccatcacaaacca

SEQ ID NO: 240540 - DNA, 181 bp, Homo sapiens; identical to SEQ ID NO: 205439
  chr19:42297160-42297341
  hyper

SEQ ID NO: 240541 - DNA, 35 bp, Homo sapiens
  chr19:42364647-42364682
  hyper
gatccagagaggccgtgggcgtcggtgagctcctt

SEQ ID NO: 240542 - DNA, 187 bp, Homo sapiens; identical to SEQ ID NO: 205440
  chr19:42444456-42444643
  hyper

SEQ ID NO: 240543 - DNA, 117 bp, Homo sapiens; identical to SEQ ID NO: 205441
  chr19:42498159-42498276
  hyper

SEQ ID NO: 240544 - DNA, 106 bp, Homo sapiens; identical to SEQ ID NO: 205442
  chr19:42498571-42498677
  hyper

SEQ ID NO: 240545 - DNA, 332 bp, Homo sapiens
  chr19:42501286-42501618
  hyper
gacgcagaaggggacgggtggcgacggggggcgctgtgtgcggggaggggtctcccagggtgtggccggcctgccaggactgcgctgggcaggcgggccctggagggaagtcgggcgctctgggctcaggctggccaactgggtgctgaacggacagctcccaagccccgggccgccgcccaggaacgggcgcagcctcgctctctctgggacctttccagtcaggctttcctttccgttccagtcccctccaggttccatttagttttttatggcttcctgtctctcaccccaactccgggtgtatcttaccctcccgcttcacctctggt

SEQ ID NO: 240546 - DNA, 463 bp, Homo sapiens
  chr19:42636369-42636832
  hyper
gctgtgggggttagcggggacccggcatgggagagagggagttgctagagtacagaggagaaggacaatggagacagctgaggaggaggggcaggcagggcccgcagagcaaacctaaatgtgctgcctgtcctctgagcagtggcacaggcaccagcccccttacctggagcccccatgctggagtgaaccatgctgcccgccccgccagggctgggggaacaactgtgtcatctccccaccctctctgggggccgagccctccctgccggaagtcactcagggaggaaaccacagggccggtccgcccccttcagaagggaaaataccctggcccacagacccgccccggcagcccggcccaccccaaatcatgtgtgtgtgctggggggtgggggctagtggggcagaggataagcaggctggaagagccgactcctacggctgcgatccaagaggtgcc

SEQ ID NO: 240547 - DNA, 415 bp, Homo sapiens
  chr19:42680242-42680657
  hyper
aaaacaggcggaaccgccaccagccctgaccccctctcgcctcattttctccacagtcgccccttcctcaaatgcagggtcaaaatgggggtcccgcccagcccggggagcctctccgaagcgccgcagccagccgggagcagatgccacctcgcctctcttctctgtcctcgctcctttttgtgttcagtggccctggttgcgatgtgttttattttcatcgtctttttattggtattgttttttttctctttttcttttctttattttttggcccgggggcagcagcggcgaagcgcccactgcctgcctctttcctcagctctgcggccgtcaggctctttctctagtctgcgctcttgactccctcctttctcttctgcctcggctctcgctcctccgctcctccgctcct

SEQ ID NO: 240548 - DNA, 347 bp, Homo sapiens
  chr19:42724177-42724524
  hyper
tgtcaaggtctcccgccgcccagttcactccatgggcccaacgctcaccaaaggttgcccgagtttctctacagaacttgccgacgcttagcccgggagcgacccagagaaatgcgcaggcgcatctcctcgccctgagccccgcccacagggcgaagatgtgtgcgtggataactcccagagccccgcctgtgtggcaacacgcaggcgcaaggtcgcgtgccctgcgctgcaggctctgattggtcgccacgggtaagggcaccgcccaatgggaggtgtggatagtgaggggtcccacacgcctggagccgagggtctgtgtcaagagcggcaggggctgcagg

SEQ ID NO: 240549 - DNA, 39 bp, Homo sapiens; identical to SEQ ID NO: 205447
  chr19:42754954-42754993
  hyper

SEQ ID NO: 240550 - DNA, 88 bp, Homo sapiens
  chr19:42758962-42759050
  hyper
gcaaccccgctcgcgccacgagaagcaacaggtctccagtgcttgaggggtcccccagaactggggatcactcgggctcccccggacc

SEQ ID NO: 240551 - DNA, 243 bp, Homo sapiens
  chr19:42774659-42774902
  hyper
agctcgaaagggggcgggcagtaatgactgttcaggaagtgggtgaggttggcctgttgggcttgtcctgctttctttgaccttatcccacctatccccacttggagttggagggcatatttgggggcctgcggggggctagccgactcagccaccctgccagagccagcccagccagggcggggatgcatgcaggcaagaagaggggggctgggcttgcgggtatcacgctgggtgctgtgg

SEQ ID NO: 240552 - DNA, 129 bp, Homo sapiens
  chr19:42784479-42784608
  hyper
cttgcgaagtagtcggggaaaccgggtgctccgggggctgtgtagaagcggactggcacccagcgagggccgcgcccagcccccgctggcacctaggggtgtgggttcccgcgcgcccctgggtgcaga

SEQ ID NO: 240553 - DNA, 194 bp, Homo sapiens
  chr19:42806829-42807023
  hyper
tcacggggaggggcgaactacctgaagagtcgagagtgggcggggaaaatctagccctctgtctagcaaatgggaagaaaccatttgctgtacagagtgaaatgtgcggaagggaccacctactgttgcgggggggggggtgacccattcacgtggtggggggaggggagcgagtggacgagtccattcttata

SEQ ID NO: 240554 - DNA, 344 bp, Homo sapiens
  chr19:42830248-42830592
  hyper
gactgccgggtctccgggacctcttcgatctacaaggtcatgttatgcctatagaggtcgcatttgcagggcctcaccccgggtagagggtcctctccaggtttttacggcctgtccccgctctaagggtcagtgcaggaggcggcgatggccctgggcaaggttctggccatggcactggttttggccttggccgtgctggggtcgctgtcccctggggcccgggcgggggactgcaaggggcagcggcaggtgctgcgggaggcgccaggcttcgtgacggatggtgcgggcaactacagcgtcaatggcaactgcgagtggctcatcgagggtgagtgggg

SEQ ID NO: 240555 - DNA, 597 bp, Homo sapiens
  chr19:42901074-42901671
  hyper
gcgggtccgacacgcgaggcgcttctttggagtctggcggcgaaagctatccatgacgtcagtcactatcttccagccaatggacactcggccttctacctccctgggccactcaggaccctttgcctggtaggcggggcccacagcccaactcgggcagcgataggctttcggagacgccagtctctgccaggcccagtcagtcggccaatagacccggaacctgagggatcggaatcctggtccactccgcagaggcccgagcgggctcgcgagggaacgggttctccgagtctggccgggtaagccctttccagcacgcctagtattaggattctgcacatagctcgggtggaaaaccgtgaggcttagtgaggcttgaggcggaggggggaggagctcagtcccggcgaacccatcttgctttcttggagaaactgagaccgggatactggatctgttattcatccatccgttcctcccaccctaagcctgattctcgtctgctcctgccttcctgttccttcatccgttctgcccttcctgccctcaattctctcactcacggattccctcgtctagccactcactcacaca

SEQ ID NO: 240556 - DNA, 660 bp, Homo sapiens
  chr19:42905710-42906370
  hyper
gagggccagtccccgtccctgcggcggtcgccgcagcagcagcagcaaaaggcagcggtggcgtgcaggtccagccgtctcggtgaccggtgtgtgtgcgcgtccccctccccgtggcgagggtctcagctttcgggcccccgccccgcccccttgccacccccgacttaagtaaggcacagcccgcgtccccttccgcccggcccggaaggcattcatgacggaggccggcgcagatgggaacaacaggcttttagtgtcgccccccgcagcccccgtctacccccgcagcccccgtctccccgctcggcccggctccggcgggaggagtgaggacgaggcggatgcgctccacgcacagctctgcggcctggcgcgtctcgcggcacagcgccgctagggtcaggaagccgtgcggcaggtcctccaccacgcgcagcgtcaccggctggcccaggttgcgcagtcgccgcgcgagcatgaccgagtcgtccagcatggggtccagcgcgcacgcctacgggacagcggggagggacgtggagagagggtgggggacagacagaccggggtcgggtagagcgaggaggggtttgatgaacaaagggagcgggaaatacggatacagacggagtggacggaggcaggagacatggtggg

SEQ ID NO: 240557 - DNA, 177 bp, Homo sapiens
  chr19:42928223-42928400
  hyper
gctgtgcctgagagccgttggaggagggagccccgctttccctctcctgtctcctagttctcctattgcgcttttcctgggggatctttctccctctgtctccgccccctaatccatgctcccgataatgagggtgggggatggtggtaggagaacgctcggcgcctgcgcactagc

SEQ ID NO: 240558 - DNA, 45 bp, Homo sapiens
  chr19:42942663-42942708
  hyper
tggaccactgttggcgggtaactgaaactgcgattaagtggggac

SEQ ID NO: 240559 - DNA, 330 bp, Homo sapiens
  chr19:43967845-43968175
  hyper
agatccaggccgcggtcattcttgccggggagtcccgaaccgcaaccccgcactgccagcgagaattgtccgtggactagggagagggacaagggcgggattagctgtgggcgtggtctcagatggggcgtggcccagagttgggtagggtctgggaggggcggggcctcaaataggccaacaccacaggaccgacaggcaggaattggcggatggacgcccccaaagagccgctcagagcggaaagaacgaccgaagcagggaggagcggggtcacggaacgggggcggaacctcaaagagctgagtcggaggagacagcctggttgac

SEQ ID NO: 240560 - DNA, 359 bp, Homo sapiens
  chr19:44008462-44008821
  hyper
ctccaaggcgacacgccaccggagacgggaccggaatttgagtccgggtcgtagcacgccccctactgacctcttcgaccccgcctcccctccctcatctctaggtgtcaggccttgtaccctcccagcagccccctacaatctcttggattcgcttagagcgacccatcttctccctccgagactcagcagttcggctcccgccccatccttcccggagccccgtagtcttagtcccgaccccactgtgcagggcaaccgtgcccacgccgcctcacccagggatccaggagtcggggctctccttctctgaacaagccaggagtcggagtccttgagattccgaagtccaactgcca

SEQ ID NO: 240561 - DNA, 309 bp, Homo sapiens
  chr19:44029702-44030011
  hyper
gttgcaattctggccggaaacccgctggtgcctgtggcaaataaagtgaggaaggcaggaacctttagacttcccagtgtgaggcaacggcagggctaggactagggtgaggctgttggtgcaagatttaaggaggcgctcactcacaggtgcggaccctgcacttacaggaccctgagagcgagtgcctccttaaatgttgcactccagggtcctcaccgtccttttcctagtcctgggctccgggttctaagcacccagatgctccttcctcaaacggaggtttccgcaagacaggactgggtctct

SEQ ID NO: 240562 - DNA, 520 bp, Homo sapiens
  chr19:44030438-44030958
  hyper
cagggaggagggaacggagcagccccgagcctgtaatgtggtccgcgtggcagtgggtattcactgggagagagaggagggacaggtccggagggtacagaaaggacctgggagtcccagcccagatccttctccctcagactcaggagttctgggccccagcttcccattccactgacgctgcagcccagccccgctgggatccatgagtttggtccccggactgaccagcatagagcagccgcagccccagctccttgatcagctgggcatcccgaggcgctgtttccaggactgggtcgatcagaacggcctcccgggactctctgtcacccagcaggtacgtgaaggtgcagctcacaggctcgaacatctgggaacgggggacccaggtgagggcgcagaaccggacttccacccactggaggccaagtagtccagactgaccctatcctcttcctaagatccagaagcagaaaccccagcccactctttccccgggagtcgggagtccggagcc

SEQ ID NO: 240563 - DNA, 233 bp, Homo sapiens
  chr19:44031371-44031604
  hyper
tgcaggagccgggcgctacggcactgaccccgggaagggcggggcgggggcggagcacgccttaaaggggccacggacgcctggggcagagggcgggggaccgccgagcgggactggggcgagggcgagaccgaggaaagccagagtgcaatgcctggacgctttgagacccagaaaaaacagagaacagggagacactcaaagtgcgagggacagacgctcagagacacaca

SEQ ID NO: 240564 - DNA, 398 bp, Homo sapiens
  chr19:44099001-44099399
  hyper
gcgctctagctcctcgcagccgtcgctgctgccgcagttcgccggtagcacaaacagatccgcagctcctaaccccgcgctgttcagcagagctgctgtctgatcacgggcctgggcggcagtctgtgaatccccaggacggaggttccgcacagccagtagcggggtccctcgggccagggcggccagcgctgcctctcccagggctggagccaacggttccccgttcccctcgggtccgggcagcaccagtaccagcacgttggcttccgccgcccagggccccggcgctgcgggtgggcagctcagctcgcccagaaaaaggcctgggcccgcagctcttaggctgggaaccccggagtccggccgtccctcgggggcctcgagcgtctccacat

SEQ ID NO: 240565 - DNA, 222 bp, Homo sapiens
  chr19:44100424-44100646
  hyper
caacgcgcctgcgcgccacgagagcctacccacgcatgcgcaaaaggcttagctagctaagccgcgggaggctgaacgtcatcaaacgcgccatagggcagagaaggacccctcccgttattttgaggaccgggctggtgcgactatactactgccggatggcaaatccgggatctcggctccgagaggctcatctggcaaaagggcgcggaaaccacgggg

SEQ ID NO: 240566 - DNA, 366 bp, Homo sapiens
  chr19:44143630-44143996
  hyper
ggccctttgtccccgccgggatccagcctgcgcgggtgggggggctgcggcacggcggccgggccccgcgccccctcccccgctcgtcgctcccggctcccggcccgcgctgcgctttgtcccggggagggggcccggcccggccccgcgcgcattgttcggcctctgcggccccgaggctgccgggctgtcaccacagcgcgccccccgccccagcccggccggccgaccccggcccccgaccctacctggccccgccgcggccgcccacagcagcagcagcggccactggaagcgccgggcccggcccatggtgccgccgccgccgccgccgccgctcgctcccggcccggcacctgcaccgcc

SEQ ID NO: 240567 - DNA, 172 bp, Homo sapiens
  chr19:44144236-44144408
  hyper
gagcgcgggaaatggagggtgttgggtgagggtgctgcgtgcgggcccaggtgctgcgcgcgagggtgcggagttgctggcatgcagggtgcttgcgctgcgcggaggggagggtggcagggtgttgctggaggctgtgcgagggtgggggcgcgggcgtcgtggggtgcgg

SEQ ID NO: 240568 - DNA, 362 bp, Homo sapiens
  chr19:44174057-44174419
  hyper
ctgcgccgcgtggcgttgcacaaagcacgagaattactattatttgattagggaggatgctgaggactgaaccgcattcctccaactcatcctctgacaacccccaaccccctcaattagaccctgttccaggcgcaggcgttcgggacccagcccctacctgggacgcaggtgtggagcagcagcagcagcggcagcagcggcgggtgacccatgtcgcgagggcagctcctgtgcgcggggtccctgcacgtcttctctccttctggcctcaggaaggaggcagttttgtggccccagggactcctcccagacgttttgcgaaagagcgagtcagccccagatgcgtgggcgcctccccc

SEQ ID NO: 240569 - DNA, 477 bp, Homo sapiens
  chr19:44302745-44303222
  hyper
gtcgggtgctggcaagagagcgtagatgcacactcaggcagtggtaccctggcacagtcgtgcgggctgcgcactgcgccagagcccgcgcctagcacgtctcgggggttgggatcctagcgcgccaagagcaggcgcccagcggaggccacgccttccccgaggctgccaggcctctcatcgtccctcccggagcccagccccgctctcccgcgcaccttggctcaggttggggagggcgtcatgagtcatgaggtgggcgttgcatttgtcagttgtgcagccgcgcaccaccgagtagtctggcggcagcgcgtccgcgttcgattgcgtctggcccgcaggaggcccggtccagcagcccttccgcaccagggtcaccggcgcgcgataccctgggggcgggatcggggctcgtgctctgcttcccgaaacccttctccctccagtctcagcgttcttcctcctccctctatc

SEQ ID NO: 240570 - DNA, 380 bp, Homo sapiens
  chr19:44405797-44406177
  hyper
ctgaaactccagggatgacacgccccgttcacgccctgggtcttctggtcttcagcgcctctcatcctcaccgccggttccattccaaccagggactgtggaagcctccgctgatttctgtggagacgatctactcaccacgtaggggctacagcagctcggacaccggaaaaagatctagagctcgagggtgaccctagcgcggtgacttctgggaaatgtagtccacccggaataaccatgtccacggcgcccgccattctgtagcctatgctcggagggcacatgagcaagagcttgaccatctgtaccgttggttgacttgctctattaagggctatgatttcaggtcgtcctgcgtgtttagaggaggcgagtgg

SEQ ID NO: 240571 - DNA, 129 bp, Homo sapiens
  chr19:44439732-44439861
  hyper
agggctgagcttcccgccagcctgcaattttccttttgaattagcggggggagtctaagtcattgcttgtagagctcagcctgctttttccttttgccattgttcccttttatacgtgacagaagttgc

SEQ ID NO: 240572 - DNA, 504 bp, Homo sapiens
  chr19:44455256-44455760
  hyper
ctggagggtaaaactgtgaacgtttactccttgggcattctgggaagtgtcccaacggtcggtggggttgcgggcacttccggtcaggcaggcggatccggggaattctgggaaatgtagtccagacgctctgtggagtcgcgggagctacggctgcgggagttaccctttattctgtgatattttgagctgttctgcgtctcgcaggcccttctgaatttcctggacctactctcggaaccctcaacgagctagcgatagatttagaggaaaggaagcaccgtcggaaagcaaaggtttggaagggtgagggcggcggtttgcgatccccgcggcagagccttcttgcgtttagggctgtcctagcatcccgagggactcggtcctgtcacgtttcgccctatttgggggtttctggggctctcagctcgcccaatccgcatccctccactactggcgcggggccgattcccccggtacaacgttggggtgttacttaatctc

SEQ ID NO: 240573 - DNA, 322 bp, Homo sapiens
  chr19:44488113-44488435
  hyper
agcgaaacgcctgcgggagtctaattgcccggtcgatgcgcaggaaatttggctcccgcaggcgtttcgcgagtagcttgggaggcgtgggaattttggcccaggcaggaggacctgtgaattctgggaagtggagtccatttgctctgtggagtcgtgggaactttggctcaggcaggcggattcgggggattctgggaagtgtagtccagacgcctgtggcatcatcgacacttccggtctccgagcaggacactgctacttaacaaggtggtttgagccaagtatgtgtcttgcgggtctttgcgaaagtgaaccagtt

SEQ ID NO: 240574 - DNA, 212 bp, Homo sapiens; identical to SEQ ID NO: 205457
  chr19:44506686-44506898
  hyper

SEQ ID NO: 240575 - DNA, 72 bp, Homo sapiens; identical to SEQ ID NO: 205458
  chr19:44507929-44508001
  hyper

SEQ ID NO: 240576 - DNA, 400 bp, Homo sapiens
  chr19:44529437-44529837
  hyper
aagtggagtccacacgctctgtggaggctcgagcacttccggtccccaactgtgacgttgctatttcatttaccacagtagtttgagtcatttccacatcttgcgagtccttccgaacgagtctcctttccttggggctcgcaaccacccaatgatcgattcaggagaaaagaagcctgggcggagagcagaggtttggaggggcgcgggcggggattgccgttccagtcagctgagccttctggcgtcggggggctctgctagggtctcagggagtgggattggcgcggcccggtgtgccctactttgacctcgcttagtccgcctccctcctccctacgtgtgcagcccctttcagtgtggtgtggagtgtcacttaatgtccgtttatcttccattg

SEQ ID NO: 240577 - DNA, 590 bp, Homo sapiens
  chr19:44576036-44576626
  hyper
agtccatattccaaaccaggcgcttgggtctatgggattcattcctcgtgggcattgcaggaagtgtagtcaaagagcaccgcggagtcccacgcttcccgccggaaggtgatactatagaacgtctcctttgagattcaaggaagtgtagcgcaggagatctgttgaatgacgagcaagtaggctcaggacggcgtatccggggaattctgggaaatgtagttcacacgctgcgcggggtaggggcacttccgctcccggggggcgaggttgctgcagtgcattcggtggtagtttggtgtcagtcctgtgtcttgtcggtccttctaaacgtgtccccttacgatgctggctcgcaaccacctggaagttgactaaggggagaaggagtctcgttggaaaacggaggtttggagggacaacggcctctcttttcgttcttgtcagcggagccttcttggtcttggggctgtcctcgcgtccccgggcatgaggctgggggttgggacttggtcgggacgcgtctcgcctggtttgagggtttttggggctctcagctcgctcagtccgcctccctccatcccacctgt

SEQ ID NO: 240578 - DNA, 250 bp, Homo sapiens; identical to SEQ ID NO: 205461
  chr19:44617149-44617399
  hyper

SEQ ID NO: 240579 - DNA, 364 bp, Homo sapiens
  chr19:44617607-44617971
  hyper
ctggtagtttgggtcagttccgcgagacccttctgaatttcctggacctacgcattggatccttaacgaactggtgatcgaattaggggaaaagaaacctcgtcggagagcagaggtttggcggagcggggccgctgttttcgttctcgtcagtggagccttcttgggcttggggctctcctcgcgtccccggggtgtttgggacttggtcgggtcgcgtctcgcctggttttagggtctccggggctctgagctcgcccactcggcctccctgcaccccacgcgcgtggccacttcctcgcgataaaacgctgggatgttacttaatctccttgggtctcccgttacagttctttaagatggg

SEQ ID NO: 240580 - DNA, 851 bp, Homo sapiens
  chr19:44645331-44646182
  hyper
ccttgaagattgtatctcctcgcttgttctctttccaataatcctccgtagtcctgggaggcgtttagacttcaggaattgctgtctattcaatattttcgctcaaggactcaggcagagggaaggacgactctcagggtcacagtccacattccctaccaagcgctcagcgatataggattcgttccccatgggcagtgcgggaatcgtaggcaaggagcaccgcggagtcccatcgcttttccctgaagggtgagattctgaacgtttttccctcagcattctgagtgtaatccaaacgctcagtggagtcgtggtccatttgacccacgcagggggatccggggaattctgggaaatgtagtcccgccaatcagtggagtcgcgggcacttccgctccagggaagagggggcgattgtcacggcacattccacggtagtttcttccagttccgcgactcgcgggcccctcctaatgtcagggacttaagattggggctcgctgggacctggtggtccggttatgggaaaagaagcctcgtgggagagcagaggtttggtggggcgagggcggcggcttttgttgtgtcagcggagccttcttgggctggggctcccctcgtgtcccgcggcgggaggcggggggcattgggacttggttgggtcgcgtctcgcctggtttgagggtttccggggctctgagctcgcccactccgcctccctgcactccaggcgcgcagtcacttttttacagtgcaaggttggcgtgttaatctccctgggcctctccttgctgttctttaaaatggggacgttaggaccatctttgtagaatcgttttggtaactgg

SEQ ID NO: 240581 - DNA, 195 bp, Homo sapiens
  chr19:44669064-44669259
  hyper
ttccgtgtagtcgcgcatagctcagctgcagtaaggctgtaaatgtttcccctgcggaatcctgggaactgtaggtccaatcgttctaggtagttgtaggcacttccggctcgaggaaggcagtgctgtggaattctgggaagcgtagtccaggtcctcctgatactcgcaggcacttccgcccaggaagacgac

SEQ ID NO: 240582 - DNA, 542 bp, Homo sapiens
  chr19:44711510-44712052
  hyper
ctctggctttctaggatacccggaagctcaggttactcggaagtatttccgctccaaggagcggaactatggccggtttcccctggggcattctgggaagtgtagtcaggggcccgcgtagcctggggcacttccgcttttggatggcggagctagggaattgtgggaagtgatccggggtttctctttagttgctgggaagttttttcgctctaggagggcgaaaacaagtgtttggatccgctgggaccctccaagttttctcagcctcgtcagggagcaagcggggccctggccctcgtctggaggaaggctagagaagctgtggccagctgggaggctggagttgggagcagtttgtgttctttcctctcggctgagcctcacgtttggagcagttcttgcgtccccgggttgggagcgtcctggatcggttgtcgcttggttagagggtctcctggcgttccgcagccagcctctcccacctacttgccagctctgccacttactagtgttataacgttttgtgagttaatcttaat

SEQ ID NO: 240583 - DNA, 380 bp, Homo sapiens; identical to SEQ ID NO: 205464
  chr19:44763972-44764352
  hyper

SEQ ID NO: 240584 - DNA, 327 bp, Homo sapiens
  chr19:44808916-44809243
  hyper
gcagaccctcaacctcgaaggacgacgcgagcccgcctcccacgcaagaggttctgccgaggggacgcaaactcccgcagcctcccaaccccgccctccagcgctggccgcggcttctcttccccaagccaaggacgggttcattgctggccccacgcctaggcaaagagggctcggagaagtcttggagacccggagctgactcacctccctgggagatatctcagatccgacctcgccttcctggagcggaagtgcctccgagtgcccacggttcgtggactccacttcccagaattcctaagcggaagcgtctcagagttctct

SEQ ID NO: 240585 - DNA, 493 bp, Homo sapiens
  chr19:44905508-44906001
  hyper
ccaaaccgagcccacgctcgagcccacgctcttcccatcctatcccgggtaggtcgggccgctgaacttccctagtctaccccacctacgaggccttatcattggttaccagtcccctcttccactcctcctacttcagtccacagggacgggtcacagctgcacatcctacacccctactcctggctacgcctccaagaggggcgcggtacagacgggactcaccccagcgtcccaaacaatgtcgcccgcagcgtgcgtccagtaccacggcgcatgcgcaaggaggcctatggcctacaatccccagaaagccccgcgcgcagcagtggccattcgcaaggctaccctggtgaaggtggcctttgacttccgtgcatttggaagtcctttgacttccgtgcattcgtctaaaataacgacaatcataataacgataaaataatgaaatgttaaataaatcactatcaacgatgaaaagaagtttcaatat

SEQ ID NO: 240586 - DNA, 433 bp, Homo sapiens
  chr19:44952396-44952829
  hyper
gcttttccaagcctggactgcgagggctgccgacccgggcccaccccgcacaggcgctcagaatgttcgatacgtgcgcctccttacacccctgcctcaccaggccgagctcatggaaatccgtgggcttcgaccctccgccgcacgttgtcccttcacactggtcctatagagccgatcctaattcccatggcctgacagtacaaccgcatggagatgcacgtctctaagacgcctcaccactgcctaagaagcaatcaaggtgacgcgcccaccggaaacggaagtagtcgactcgaggtgtgggactacctttcccagaaccctccgcagcgcagtccgatcctaggggcgatggtgtcgtaaatgcgcgtccacctcgagtcacgcccactgcgaggcggcgggaggcggcatgcaaggtgtttctgag

SEQ ID NO: 240587 - DNA, 882 bp, Homo sapiens
  chr19:45146961-45147843
  hyper
ccactcggcaaccgcgagccgttagtaagttgctgaatctctccgtgtgcctccgtttcctcacctggaatgtgggcgacctcacacaggaagccgcctcttctagtgggcaccgacggagcgagcgcgcgtctgcagcgggactgagcgccgggagagacctgcgcaggcgcaggcgcgcgggaagggccagcctgggtggcccaccccgcgcctggcgggactggccgccaactcccctccgctccagtcacttgtctggagcttgaagaagtgggtattccccttcccaccccaggcactggaggagcggccccccggggattccaggacctgagctccgggagctggactcgcagcgaccgcggcagagcgagcgggcgccgggaagcgaggagacgcccgcgggaggcccagctgctcggagcaactggcatggcccgagccatggccgccgcgtggccgctgctgctggtggcgctactggtgctgtcctggccacccccaggaaccggtgagtgacccccgcgcagtccggtggcccctgtctggctcccgctccgcatccaggccgggtacttgcccccttgggttcccgaagatgacggccccgccgcggcgccacccaccccccatctctgccccggggttggaaggaacacggtgcgagggtgcgagggcaggaccctcctcttggccacccggagagcggtcggagttgggtacagaaattcctcgaaattggcagcaacacgggtcgggcacaagaccctcctctgggcccctcggaaaggggatggagttgggtgaggaaatttcccaaaaaggcaagtgaatcccggaaaatcagcagatggtgacgcatgccggattaccttaccc

SEQ ID NO: 240588 - DNA, 306 bp, Homo sapiens
  chr19:45195331-45195637
  hyper
cttgagaccagtgtccttgacgggaactaagacgccccccacgcccatccccggctcccaggctctctccacccaagttctgcccaccagggcacactgcttccctctgccacctcctcttcccacgagccctggtacaccctagattctcagggctgtggctccttgctttacaaatgagtaagttggtggcagggaaggaagtgggctgggccatgaccaagagtcactatgattcacggggaaaaccctgccctcccgattcaactctgtgtgcaaaaaggttttgtgcgggttcctagggtc

SEQ ID NO: 240589 - DNA, 161 bp, Homo sapiens
  chr19:45257690-45257851
  hyper
cagggtagatccccggcgggacaggcttccctcccccgggagcaggaagcagagccccgcccagcagacctgttactggaagtccgagggctgggtcgcccctcccgtccccacttcctccagccccgccccaccccctgcggcccgcgcgtttatgggaa

SEQ ID NO: 240590 - DNA, 60 bp, Homo sapiens; identical to SEQ ID NO: 205471
  chr19:45281278-45281338
  hyper

SEQ ID NO: 240591 - DNA, 204 bp, Homo sapiens
  chr19:45347906-45348110
  hyper
ccggcctcccgcttcgcgccctcatcccgccccccggcgcggcctcaccagctccccctgggcagcccaaagaatgcgaagaggtaggtgggggtagggaggagggcgagccgctgggagagacaaagggcccgagtctgagcgagagacacaaagacgcgaggaggctggggagataggggaagtgggacaaggacgcgggga

SEQ ID NO: 240592 - DNA, 55 bp, Homo sapiens
  chr19:45348808-45348863
  hyper
agaccagaaacagagcgacaccgaagcatgaggacggaaagacccagagaggcag

SEQ ID NO: 240593 - DNA, 381 bp, Homo sapiens
  chr19:45350137-45350518
  hyper
cctccccatttctcggattcccgcgccgaaagggttaaatcccaggaaggcctggtgccccctccccaccccgcgccgagtagttcacccggatctgggtctctgtctcctctacccctctcaggaatgtggggaatgttccccccacctaccgcagtaaggtctcgaggaagaggcgagaccacctccctcccctatttttccttcttcccggcttgggcgtctgaggcccggagagaactgaggacaagcggacctgattcgggtcccttggagggctaaggataagagttctggcgacttagggggaagggcctgagctcggagctccaaccccgaacctcagggagttgggggttctgactccgtggactccagaaa

SEQ ID NO: 240594 - DNA, 238 bp, Homo sapiens; identical to SEQ ID NO: 205475
  chr19:45418006-45418244
  hyper

SEQ ID NO: 240595 - DNA, 571 bp, Homo sapiens
  chr19:45579319-45579890
  hyper
cccggggtgctcaccgggatagttcggggtcaacggcgtccacagggtccacgggttccgcgggccgagggcgaggagggcggccccggcgggcatggggccaggggagtggtggggttcgccgccgaaccgccccgccgaggacacctccttcggggagaagggccccagccttggggcctgttggggctgcgcgtctggctcgggcttgagttcgatgacgaggtcctgcatttccatctcgtcgtctgggttggcggcgggcgcgggctctactcggcggggcgcgctgccggccttgcggcgggacatgagtcgcgggccgggcgagcgagcgggcgggcaggcaggcaggcgggcgggcggaggacgcacgagcggaggacgcgcggaccgtgcgcgctcaggtgagtgactgcggcgacccgccgcgaactcttacacgtgctggccgggcccgtggctccgcctaccagggcggggctcatgggaggggaccgagccgccctgctggggccctgacggcggcctaactcaatctaggcagtgtcccgtgcgtttggcttagtga

SEQ ID NO: 240596 - DNA, 1977 bp, Homo sapiens
  chr19:45655335-45657312
  hyper
aggcgctgttggcccggtgggcagcgtggggggtatcgcgggtaggggacttgggcgggctgggcggcttgagcgcgctgacggctcggatgagacccatgcgccggcggatggagtggtccaggttgaccgtgcagcgcagcaggctctgcgcctcggccacggtgaaggggaagtcggcgcccaggaagcgctcgaagagctcggggtcgccgtccaggtcgagcacgttctgcaacgccttggtcatggtgtgcagctcgcggctgttgtcgcggaaaacgtcccagaggcgcgcgcggccctcgggcgcgcccccggtctgctgccggtcctccaggcactgcagcgcccagctcaggcggcacggccactggttggcgagcaccacccacgccaccgcctggcgcggcgtggggcccccaaagtccccctgctgctgctgctgctgcagcaggcgcacggtgatgggcacggtgttgacgatgcgccgcatggacaccacgttgtcgggcacgtactcgtagaggcagtcgcgctcgtcgtgaaggcagaagagcgcctcctggattcgccgcgccgcctcgtcgtcgatgcggccctgcccgcgctccgtccccgcctgcgcctgcaccgccagcagctgcgcgctctcgcccccggcgtcccccggcagccacggcttgcgcgtcatctcgcggtacaacaggtcgtcgcggctctgcaccgcatcgtgcaggaactgcagcttggtgcggcggcccataatgggcacagagaagggcagcgtgacagtgcggttgaggaagaggtagccgttatcggccgtgcccttcatgttgcccgcgctctctaggcacgcggccaggatgctggggtccacgaccaggatgaagatgaagggcgcgtggctgtcggacagcagcgtgttgatggcgttgagcacgcccaccacgcgctccgggtagcacgtgtccagcccggtgacctccagcaccacgcgcagcctgcgccgctggtagatctccaggaagcacaggaagtcggtgagcagctccacctccttcttcacctcgcacatgaaacccagctggctgccgaacttttcacgcgacaccagccgctcgatcttcttgcgctggcttacgaacaggtgcttgcccaccgagtacacggccatgagcagccccgagcccgacagtgtggtggccgcgccgccaaacaccttgagcaggctgccgctcgggctgccgtggcccagcgcgtggccgcccagtgacaagtagagcagccccacacccaggcccagcgccgccagcagcgccagcagccccaggcacacgcggcgccgacaatgccactcgctctggcagcagtcctgcctggtggccggcttgttgcccagcaccgagtacacgctgaagggcagtgcgccatagtggcggcggatgccctcgcacaacgtggtcaccaggccggcccacagcttgtcggtgcccgcgtactgccaggcgctaaagcggatgaaaaggaactgcacgttcctgcgccgcaggtgcacctcggtgatgatgggctgcaggaacaccaggtaccacagtagctgcgggacgccccagccgctcacggcacgcggccgccactgcacgtgctgcagctcctcgctctcgcgctgcgcggcctcctgctgcatcagcgctgcgggaagggagcccgggagccgcgtgagccgcagacccgccggggtgggcggggcctagtacgggcagggcggagcgctcctggagaggcgaggggcgcccagcagaggcgaggggctggaagcgagccgcggccgctccttaaagagctggaagccggtgcagaagcgggggcgtggagaggcctggagccgggcttggaccggaagcggtctgaaggccaggctgtggggtcgggatgggcagaggtagagccggcagaggagagatgggagga

SEQ ID NO: 240597 - DNA, 132 bp, Homo sapiens
  chr19:45681393-45681525
  hyper
cccgggccggggtcggggtcgtgagcccacagctcagccaccatctccgtgtgaagaaactcaaacaacacagtatccgccatgccccctcctcgcacgcctaaagatgcgcccagcgcttccagctctcat

SEQ ID NO: 240598 - DNA, 62 bp, Homo sapiens; identical to SEQ ID NO: 205478
  chr19:45755078-45755140
  hyper

SEQ ID NO: 240599 - DNA, 46 bp, Homo sapiens
  chr19:45843863-45843909
  hyper
ccagttccgcgtgcgaagttctgccattcccgcggggctggagccc

SEQ ID NO: 240600 - DNA, 61 bp, Homo sapiens
  chr19:45844196-45844257
  hyper
gggccttggggctcccggatgccccctgccccgtcctggggctctccgggatctggaggcc

SEQ ID NO: 240601 - DNA, 465 bp, Homo sapiens
  chr19:45873582-45874047
  hyper
ggcccggcgcccccggtaaccctcaggtcctcaggagcctcggggccccctcagtgtctcctcgctatcactgctgctccctgcggctgcccccgtcccaccccttcaccctcccctcgcccccttggggacccaggcgcgcccaccgatgaccccatcttcaagaccccccgcgcccgctagcgagcgcgacccccagcccccttctcacttcatggcgccggccggactgtgcagcggggtcgacccgcctccctcatgaatattcagcgagaggccgggtcgtggacatcctcgagggctcgctccacctatattacgagaccattggctaacctgcccgtcaatccgctagggcagagccaatcgggatactgcgcgtgcgcacggaaaagcgagggcggctgactctcgggtgaggcggtgcgggaggcgtcactgaggatcgtcgagggccaatcaaaa

SEQ ID NO: 240602 - DNA, 541 bp, Homo sapiens
  chr19:45888865-45889406
  hyper
gcacttctcgaaggcggtggcgccgtcgctgagcgtggtggcgaagattgcagcgccgtgctgcaccagcgccatgcagatgactgtgtcgttgcacgacgccgcgcagtgcaagggtgtcctaggcgtgggggtggggggttgcggggaacgatgcgtgagaggctgcgcgtccgcccacgggggacccagcccaccgcgcgggtcggggctcaccagccgtggctgtcgggggagttgacattggcacccgcggtgatgaggaaatccacgatagagtagttggcgccgcagatggcgttgtgcaaggcagtgatgccctcctcgttgggctggctcgggtcgttcatctgagtgcaccgggggagggggaagactcagtcccgcggctggcatctgcgatgcccccgccgtgcccacctcccgctcagcagcgctcacctccttcaccgcctgctgcaccacctccagctccccggtcagcgccgcgtccaggaggagcaccagagggttgaggcgcgcgcggcgggccttgcgcggg

SEQ ID NO: 240603 - DNA, 90 bp, Homo sapiens
  chr19:45907691-45907781
  hyper
tttctctcctaccccgcccccatccccgagccgaaaagtcgggggagagccgggacacagcctccggagggaccccgggtacctgtcctg

SEQ ID NO: 240604 - DNA, 34 bp, Homo sapiens
  chr19:45908310-45908344
  hyper
ggggagcggagaacggggcggggcaggagctggg

SEQ ID NO: 240605 - DNA, 38 bp, Homo sapiens
  chr19:45927243-45927281
  hyper
ggttctggaggaccgcggaggtcgtgggaggagagaga

SEQ ID NO: 240606 - DNA, 186 bp, Homo sapiens
  chr19:45931061-45931247
  hyper
aagtgttggggagccggggcctctctgctccgccagaacccagcgggggcaggaccccctagaaggcggcccattccccgctcccgattcatttccttgaagcagaagtgcggtaaagggcccgccgcctgcgatcagtggaattctgaatcggttaacgttagttaagagcgaggggaaaaaatt

SEQ ID NO: 240607 - DNA, 344 bp, Homo sapiens
  chr19:45931579-45931923
  hyper
ctcctgggctcaagcgatcctcccttctcgccctcccaaagtgtcgggattactgtagtgagccactgctcccagcctaagctgtttcaaaactaaactttggaatcccggattcgaatctccccggctcccagagttgcgcgttcgaatcccccagccgtatccaagctccgattccgcctctttcttccaaacgccccaagttccagaattcagccgcaactccagtttgggccactccccagctacggcccctgctcccatcccaaaccttcccctcctctcaacttcgagccctttgttcgccccggaacgggtggggtggggacggagactgtaaggac

SEQ ID NO: 240608 - DNA, 219 bp, Homo sapiens
  chr19:45971036-45971255
  hyper
ccgccgagtggcccggaacgcaacccccgagacccccagggccccgagggtcatgcaagtgaccagatcgagtctagaacagacctcttgctggacagtgcgggactcgatttggcggggccggagatttggggaagtttgtccagcaaggggcgggtgacgtaagcaggggggcgggtcccgggcatataaatacaggctggcgggtctgtgcttcat

SEQ ID NO: 240609 - DNA, 561 bp, Homo sapiens
  chr19:45996037-45996598
  hyper
ctcctagtggccggcgccggtggatgggggaggggccaggtcgcctgaggcgggggctaagtttaggcacgctggggggagggggcctccccgcagctgttctggcccgtctggcccctgagtgacagcgctgcctggggccgaggctgggggagggggtcctccctgctcctgggccccaaagtgctggctcgaaggagaagggaccccatgctccctctgggtcctccctatactgcccctcggccccctagccccagcctgcagcgctgcggaagcagatcagtaataaaaatgctccggatgtgcaggagataagggcgagtttggaccccgttccgccgacctcagcccccgtccagcccgttccgcaagcccacctttactccccatatcggctccgagtgagaggctggggacaccgctgcttctcggggattttgcccacttcagtagaacccggaggacaggagtagggggggtggggcccctttggacccagccaatggctgtccacagaggtggggacaattccaaaattggaaccgtcttgtaaacagc

SEQ ID NO: 240610 - DNA, 106 bp, Homo sapiens
  chr19:46000728-46000834
  hyper
cttttggggcacgcggaggagctcaaacgtgggcagggctaaagcaacagggaattattcaaatataactgggtggggtcggattccaggcgattccaggtctgcg

SEQ ID NO: 240611 - DNA, 264 bp, Homo sapiens
  chr19:46002442-46002706
  hyper
acaaggaggctccggggaggccccccgagctacagctcgtttctgcggagccagaggtggccgcactggcacgccaggctgaggacgagttcatgctcctggcctctgatggcgtctgggacactgtgtctggtgctgccctggcgggactggtggcttcacgcctccgcttgggcctggccccagagcttctctgcgcgcagctgttggacacgtgtctgtgcaaggtcctgggggcgtggcgtggtacctttggggcttggt

SEQ ID NO: 240612 - DNA, 90 bp, Homo sapiens
  chr19:46088261-46088351
  hyper
ggatgctggaaggcgtgtggattcccacgcccgccttggccaacgtcactgtactccttcgtgatgtcacgttccgagttggcgtcccca

SEQ ID NO: 240613 - DNA, 239 bp, Homo sapiens; identical to SEQ ID NO: 205482
  chr19:46142560-46142799
  hyper

SEQ ID NO: 240614 - DNA, 1002 bp, Homo sapiens
  chr19:46144643-46145645
  hyper
cctcacccagtagacctgaccgtccagcttctaaaaactctggccacgcccctcaatattgactccgccctcccagaccttccactgttaccgtgccacctcaagattggtccctccaaggctctggcaccgtccccgcttttgaactagctggccccactctaggttacgacctcgtggcctggggcatgactacatttctcgaccatttcctccctatctctttctgcggcttgacgccgccccagtccttacccttcctttttggcgctacagttgctgctggaggatgtggtccggctgcgggggtcctcacggcgcaccgaggcgaggcgctctggtgacaagtagcggcggacactgctaaaagagagcacacaggtgggggcagagccttctaggccagcaggcgagtgccgtgagcaagcgagattctccctgcaccctctgctgctggagctcaggcaaacaaaccacctctgtctcccacgaggtcttggaagaggctgggggtcccggccttgtgccttacctgcgcccggaggtcgcctccttcttgggagaggatggggacgtggcatagccacccacgcgccgcgggggtcccgagccattaaggggcgtcctggtgggaaggcctttcaagagctgacacactggagggatggggttaggggacagaagagggtgagtataaggaccaggccccggtcctccccatcccacccctccagtctaacggggatacccgaggcagtggtgcctaagcgcggaggcgcccggcccttgggggtgccccgcgcgcgtagcgccgctccctgttcttcgcatgcccgcaggcgacgcagagcatccgccagcgccgcctttaggaccgccagctcgtcttcctgtaactgcagccgctgctccagcgccgacacgcggtcgtccacttccataccgctcgtgcccgacaaattgtcatctggaagacgggggagtgccggctgcagggccacc

SEQ ID NO: 240615 - DNA, 224 bp, Homo sapiens
  chr19:46148670-46148894
  hyper
cgttgccatagcaacgcccttcgttccagcatccccagctcagctcgcctggcatcaggcggccggcgccgggcccggcgctggggtcatccccaggatgcccagaaaggggggtcgggacaccgcctgccaagccccccaacacaatcctagggccaggattggctgcgcccggatccccctaggtaccgtctggtcccgcccacaaccggagtatagtctct

SEQ ID NO: 240616 - DNA, 461 bp, Homo sapiens
  chr19:46180191-46180652
  hyper
ctggcccctccctaggccctcgctgcctgccgcacggcccagatcgtgacccagtactgcgtgggtgccaactacacgtggctgctggtggagggcgtctacctgcacagtctcctggtgctcgtgggaggctccgaggagggccacttccgctactacctgctcctcggctggggtgagctccgatcccgtcccccgcccaacccagcgcgcctctcctcggctcccccaactgccctgctggttggcctctgcgggtctcctcccgtctctaggcttctgccttccccaccccgacagaggaattccgcgggtcttgggcctggcggggcccgtgagcgcgctgacagctgcggcggggtgggggggcggggtcggggtctgcacaggggcccccgcgcttttcgtcattccctgggtgatcgtcaggtacctgtacgagaacacgcagtgagttgcag

SEQ ID NO: 240617 - DNA, 540 bp, Homo sapiens
  chr19:46180865-46181405
  hyper
tgtggtctcaagtgcggtgggcggggcctagcgagcaaatgagcttggtgatcggtgagtctagagtttttctatctcttagctctactccgccttccccaggtgctgggagcgcaacgaagtcaaggccatttggtggattatacggacccccatcctcatgaccatcttggtaggatcggtcccgcctccaccaggccgccctcagggatttcccattctgggaagtgggctgccacctcctcctgccccttcagaatgggatcgcggctggctcagcccttatctctccccacagattaatttcctcatttttatccgcattcttggcattctcctgtccaagctgaggacacggcaaatgcgctgccgggattaccggctgaggtgagggcatgcgttggggaccgaggggaaggggccgggtgcgagatggggaaccagggctgcgggatcactgctgccgccctctctccccaggctggctcgctccacgctgacgctggtgcccctgctgggtgtccacgaggtggtgtttgc

SEQ ID NO: 240618 - DNA, 151 bp, Homo sapiens
  chr19:46271267-46271418
  hyper
gagctggacttgcgccgcccgaggcccctcacctcttgcagggcgcgccgcctccggccccggtccggtcgcgctgtcgccggttcttgaaccagttgctgacctgcgtgagcgacaggccggtgagtgtggccaggcggcgcttctcgtc

SEQ ID NO: 240619 - DNA, 221 bp, Homo sapiens
  chr19:46272454-46272675
  hyper
gaagcctccgccccgagactgagcttctgcacgcctccgtctccagggtcctctgcaggcccccacattccccatctcggcctgcgctccgcccctcggaattcccggctccgcagggggggcgggtctggccgggaggaggggcggggaacgggctagaaagtttgcagcaacttttctcgagcttgcgtcccaggagcggatgcgcgtggcgtgcgcag

SEQ ID NO: 240620 - DNA, 35 bp, Homo sapiens
  chr19:46295860-46295895
  hyper
tctgggcggaagccggacccgacctgcgagcggcg

SEQ ID NO: 240621 - DNA, 55 bp, Homo sapiens
  chr19:46357489-46357544
  hyper
atccaccacctggaaggagggggagtggcaggggatagtgccagcccagtccagc

SEQ ID NO: 240622 - DNA, 47 bp, Homo sapiens
  chr19:46357574-46357621
  hyper
tctgccacctaaacagggattgccaaagccaggggctatgcttcctc

SEQ ID NO: 240623 - DNA, 622 bp, Homo sapiens
  chr19:46379820-46380442
  hyper
ctcccagctctctgggtttccgcctctacctgccacctcgcaggccaggccctctattcctgtcgctgcgccccgccttgccggctgcgtgtcacccccgccccctgccgcgctggctccccgtccgtcccaccagccttgctgtcctgggcaggccggggaattcctcccggttcctggaaaaaacaactggggccgagagaaaggccctcagtctccccaggcacccgcccccctccctcgggcctgggggtctctcccggagtcggccagcccgaggcaggaagccctgcggtttctggcttctcccaggcggcctccggatctggcccccgccccccggccaacagcccaaatattattccgcgggaggagtcggtggtggcgggaggaggcccaggctgaaagaggctttcagggcggccaggcctggggcttcctgtccccaggctcgggcctcaggccgccccagtggggacctcaggtggccggaggggcggggtgttgttgtagggtcctcgggggagggtggggccatccgtcggggtgtctggtggccaccagctctgctggcgtgggcaggtgtgacccccaccccagggacagccggctgatgtccagc

SEQ ID NO: 240624 - DNA, 222 bp, Homo sapiens
  chr19:46389400-46389622
  hyper
ccagaggccgcttcgcagggaaagttacataacacgcctgcaaagccttctgggaaacgtagtcccgccggggccggctcttaaagggaacggcgggcagacgcgggctgggggggttgtcgcctctgccggcgcaaaccttacaaccttctccgtggggccggagttcagcgcgccgcaagatgctgggacacaaaggtggtaggcgaggatgcaatacaa

SEQ ID NO: 240625 - DNA, 136 bp, Homo sapiens
  chr19:46405055-46405191
  hyper
gccgtctggcgcatggggggcgccggcgctgcgggcaaagggcgcacggggctggctggggttcggggtccccccgccgccgcctctcccagaccgccgggccgagagctccttagtccccgggggcaggagtggg

SEQ ID NO: 240626 - DNA, 147 bp, Homo sapiens; identical to SEQ ID NO: 205490
  chr19:46476433-46476580
  hyper

SEQ ID NO: 240627 - DNA, 94 bp, Homo sapiens
  chr19:46477259-46477353
  hyper
agcatcttcttcccggaggctcccacagcgcctggcccctcccacccaacgaggtcacgcccatgccgggtagggccacgcccttcggcgcccc

SEQ ID NO: 240628 - DNA, 66 bp, Homo sapiens
  chr19:46519147-46519213
  hyper
aggtctgggggggaagatatcgagagggtcatgggcccaggagtgcacgtctaggagttgatgggg

SEQ ID NO: 240629 - DNA, 309 bp, Homo sapiens
  chr19:46519693-46520002
  hyper
gtgcccgctcccgggctctcatctctccacgccaccatcagtctccatcccctgccacctgctcgcttctcgccggataccccgcctgctctcccttccgtccgtcctacctcctcgtctgtgtttctgcgtgctttccgctcgtaggcctgtcacctcaggctttcgctggcgtggctgtgacctttaggggcgcagtgacccccttgcctgcaggagttgggcgtacagaccggcgtctcctttcttttttcccaggcagcagcagcggaaccgcttaggcagtgggggaagcggggacggtccgtc

SEQ ID NO: 240630 - DNA, 395 bp, Homo sapiens
  chr19:46580427-46580822
  hyper
gtgggcgttcacccgggtgccggtgtttctaaatcgcgggctgcgacctgcatactcaggtgccagctgggagcagaggcggatttgcgaggccaaaacctgggtgtgacttggaatctcagtcgcgctatgggggtgcacgctggctcaaatccccgtggaagatgcacctgtgacctgcccaggctgcaaaaccaggtgcgctgccatgggcacgactcactgggctccattttcaccacagggaacttggaccgcctgacattgaaaaagactgaggtagctcgggggcagccaaaagaaaccagaggcggggatcctagtatcattcaggaagtggacccagccgcaaactcaggagcgttccaagtgtccagagcgtctggtagtcgcaa

SEQ ID NO: 240631 - DNA, 41 bp, Homo sapiens
  chr19:46800453-46800494
  hyper
tgcgagccaagaacgccccggggcgcgcagttggaggcaca

SEQ ID NO: 240632 - DNA, 324 bp, Homo sapiens
  chr19:46850468-46850792
  hyper
tcaaaggtgcgcccgcctggcagggagggtggacagtggcccaggctgaggggtgccgggcccgcgcggaaccatagcaacgcggagctgcagcctgggcgcggggcagacactaccaagtgaccgggcgtggggaggcccaggatggcgctgccaaggagcgacatagggggcttcggagagtgatacctaggagtggcgtgcggagcgggtgctactcagtggagagactgaggagggcgccaccaattgtggggcgagagggggactggaatgagggcgctaccaaacgtgaggcctgtagagggcgctaccaggcagtga

SEQ ID NO: 240633 - DNA, 1018 bp, Homo sapiens
  chr19:46907104-46908122
  hyper
gggagctgctgtctcgtgaggattggaggagccacgtggaaaatgctgctgcccggagcccaggtggctgcgctggccagggagaagcccctggttggcggcggtggccgtcactgctgctgctgcttctgcagccaccacggcccaagcatcccccagatggcgtccccttcctctggcttcctctcccgtagcaacagcagtccctgcagaggactctggagtggtggttgcggggtcctaccccgcagggggcaggtgggcgtggcggggagaggcagtagagtcgctcagggtcagctctgacctgtccccgcggtgttcccggccccagcagctgctcagttatttgtcgagtgctgacggtcggtcggaagaaaccacccggactgaggaaggctgaccccagatgcgcctagttgggaatgtgctggaaagatacgccccctggagggagtgcgcccaggaagtggggaggagcgtttgagatcgaaggagtggccgcgtaaaggccctgaggtctcgcaaggaagggtcccggggcgtcccaggccctgttctaggtgcaagaaacaggaacctcctggagcgagcatgcggtggggaggcagggggtacgcctcctacatgaggaggagatccacgcattaggaagtgaggcctgctggggacaaaagtctggcaggcagggccccaggagggccggggcaggagagggtttgcagtcatcgtaaacggggcggcatggaaagccctcactgagaaggtgccaaagaccccaaggaggtgaggggttgcggccggcagatgcctggggaaagcgcatgaccggaagcgcaggaagagccaggttaaaagccccaagccagagtgtgataatatggggctgttaatgtgtgactactgcccctcccgtgccaggctcggtgctggcgtaggggaggcagtggggccaaagaaggccacctgcctccatggtggtcgctgtcgggttggatttccacgtgcctggagttta

SEQ ID NO: 240634 - DNA, 462 bp, Homo sapiens
  chr19:46916541-46917003
  hyper
ggcccactccaagctggaaacgtggtgtcccagctccaagttggggcgcgcgggctgccagcgactcttcctgccccaggccccagggacgcggctggaacttgggacaggacttcgcagacaaagacggtccagtcgaagctattcaatatggccgaggcgctgggaggccccagcccgggcctccagtagggtcccccgcccccaggcaggccgccacccagctccaggctgaccttgacgcgccgcagcctgccagcccgcgcgcttagagctctgcaccgtggagcgcgcgggcaggaagttcctcctcgccctccgccagaatgaggcccaccttcccccgtctcatcttacactcccagactctggaagactgacaggggggctgtccactcccttcggggcggcctccttcccctcccccacaggggtgtggccgcgccccgggcctagctgggc

SEQ ID NO: 240635 - DNA, 258 bp, Homo sapiens
  chr19:46929942-46930200
  hyper
tcctcctgggtctgcgtgagttttcttcaactccagtaagagatctgcaaaaccttggaatccaggaccgtttccacctcctccattttctgcaaagggcgcaggcgcctggggtcagcctgtggtctccatagcaacggtcggacgcgctgctaggttctggctctgactgcgcctgcgcggctggtcccgcggggtctcccgagtagcggaagatatttgtgggtctttgagacccttcctcgcttagaaattact

SEQ ID NO: 240636 - DNA, 77 bp, Homo sapiens
  chr19:46932014-46932091
  hyper
gtctctccggatctgggactgctgatctccctgggacaactgccaacagagtgtcgtaggcgcggccctggcaggca

SEQ ID NO: 240637 - DNA, 471 bp, Homo sapiens
  chr19:46974557-46975028
  hyper
cgggcctgacgctccgcctgcccagccgggacttacttggcagatcagcctccgaccgcccagccaggccaaggagacgcagtggaatgcagccgtttcccagtcgctggctccggctaccccggcgccgctgctagaggcagaaagggccaagaaggcgccgtccgcccccgctccggcccaggcgggtcacggggcgtccagactcgatgccgttagcggcgagaagccgaggttggcgtcgcagcgcgcgcctgcgcactggctcccgcaccgccgctcgggggtcttgggctgcgcaggtgccgacgtctccatggcaaccgggcgtgggttgctagggctgagcccggccggcgcgccggcgctgcaattggacctagggagccgggtgcaagagtggcctgttcaggtcgcagagcaagcgggtctggatacactccggtggcgcctccacggaggccctctttc

SEQ ID NO: 240638 - DNA, 192 bp, Homo sapiens
  chr19:46991213-46991405
  hyper
tgtccctttaaagcgctggggaaagcgccgtggccccacgattttaaacggcggaactggggtgcctcctggtggaatcagcgggcatcgcaactcgcgcggattcttcccctgctctggagtcgtaggttgcgggggcaaagggaagggtcgtcgtctgcggcgcagttctaggacgtggccacattccca

SEQ ID NO: 240639 - DNA, 912 bp, Homo sapiens
  chr19:46992620-46993532
  hyper
gccccggccctcctcgggccccctgcttgccggacttttgtcccccagcaggtctcaccccctaatgcatggatttcgtcctcatctagggagcgtaaccccagcctccccaccgcatgctccctgcgggagggtcctgtttcctgcaccaagaacagggcctgggacgcgccagccctggataaatctcatggactgcgcggatggcgctgagggctcctcccagacagtcgccttctctcccaggagggggcaaccgcgctccgctccacccgtcgccagaggctccacgcgcgggacagacccggctgctgcagcctgtgctggtctctgtgcaccgggacccttccctgcaggatctcaaggcctttacgcggctgctccttcgaccccaaacactcctccccatccccgccggagcactccctccaggaatgagggaatgaaaacaatgtttctttccagcacattccccaccaggcctatctgggatctgactcacccagtccgcgtggttcattccgaccgtcagtcattcaacaaataacagccgccgccgcgtgccaggcacggtgttggggctggggacacgaaggggaaaggccaagccacactttttccctacggagctggccctaagccgctctgccgcgcctctccccgccacgcccacctgcccccatgccgcataggtccccacagccaccgctcagggccctctgcaggggctgctgctgctgcaagcccacggggcgctggggggagtttgaaagcaggaggaaagggacgccatttgggggaatgctcaggccgtggtggcagcagcagctggcggtcactgcggtgaaccaggggctcccgggtctctcctcaagcaagccggccccgtgcgtggaacttggcagtcctaca

SEQ ID NO: 240640 - DNA, 846 bp, Homo sapiens
  chr19:46996431-46997277
  hyper
gcaggccccgagagcgccacgaagagccctgctcgcctctgcaggtgcccggcgtccacacacacaccccctccgggggcaacccgggcccccaatcctggtccacttggcgcgtccccatctcggccctgcgctgctgcctcgggcgcccacttctctttcctcctcccatccgggcttcctccgtcgggatcgctggcgcccccggcctgcgagggcccgagaggggaacgtgacgctggcaaaacgcggcccgggcgcgctgtgaagcgaggagattgcgtctgcggaggacaggaagaggggaggggagggcgggggccacaggcgggcgggtgccctgcggggcctgctcgcagcctgggcggcttcttggggggccactagcggcatttagggggcagcctccggccccgacgggccttcttcccgcgcgcggccttggatccagtgggcgcctggcccttggcctcgcctgccctggcatgggccccggcgcccgcgctccccttcttcttcctgcttcctgcggcgtcgtcctgggccgagccccggctcccggctttcttctcgggagtgacgccccggcctcggcctcggccgcccgcgcgggttttgcgggccccggaagcggtgggaggcgcgccggccggagtcaggcccctgggggccgtgcgcgccctcttggcccggggcttcctggatgccctgtcctccggctccgacgcctcgctctcggtgtcctccgactcctcctcggactgttcgtccgaagcctcctccgacccctcgttggaccccatgttctcccgggcggccaggagcgccaatacctcccccagtttg

SEQ ID NO: 240641 - DNA, 83 bp, Homo sapiens
  chr19:47040895-47040978
  hyper
ctgtgggaatcctgcgtgtgttgatgactgcgtgtggagcgcccctgctggacaatcacagaacagcacgactgccctgaccg

SEQ ID NO: 240642 - DNA, 155 bp, Homo sapiens
  chr19:47104723-47104878
  hyper
gcgggctctgaggcgggcttaacggggcaggacccctgagggggcgacagagcccagagtggggggcgtccgggcccggcgagagcctcgggacccttttctacccgcgttgtcgggggctgttgaacccagagcgggacgtctggatcaccaga

SEQ ID NO: 240643 - DNA, 229 bp, Homo sapiens; identical to SEQ ID NO: 205500
  chr19:47137304-47137533
  hyper

SEQ ID NO: 240644 - DNA, 595 bp, Homo sapiens
  chr19:47137787-47138382
  hyper
ggccgacacagccccggacagaccgcaggcccagaacccccgccctattccccaccccgacccagcaccttcatgcggtcgatgttcacctccagcttcagctgttccaccgtcttgcgggcctcggcaatcttggccatgttgttggacatggttgcggcggggaaggggttaaaagacgcgcgggagtgggggctgtgggggtaggttaggatacgtctgggtcccgaggtgggggcgagagggcgggccccggtaacaggtgcgagggtggaagggcgcgtgaatggggtggccaggggctggtggagggagggacagatgaaggggacaggaacaagaggagcgatggaggggtgcacggatggaggtagctaaggcaggtggggagagagcagggaggggcgagggagggaaggaggggcgcacagatgggaggctgagacagaaggacagggccacaggtgctggatcagaatccaggtgtcctcacccccgggggcagagcgagagccaggaggggggcccctcccccaggccaattagcagtggctccagggagaactgggaattaagatcgcggcgggaggggcac

SEQ ID NO: 240645 - DNA, 364 bp, Homo sapiens
  chr19:47217682-47218046
  hyper
cactggggtggggcgagctggaaggaggacttttcggggctcctgggaaagtgggggggggggccgggggacttggactcgagggcgctggagataaggagggcgcctgccacccaatgctcaaaggacccaggtgtctgggtcctcagctttgggggcctgggggcaggaaatgaaacctagtagaacagaaagtgaaactgccccggtggggcctcgggaaggaaggtaagcggccctaacacacctggacctggcagaaaaataaaactggggtgaagcctgagcggggcaggctggggacttgagcactggacaaagaagttcacccaagggacaatctgcccccgtacccccactgcca

SEQ ID NO: 240646 - DNA, 71 bp, Homo sapiens
  chr19:47290660-47290731
  hyper
caagatccaggaacgaatcgagcacctccttgctgggggcattttcggcactgcccgcggctcccacggag

SEQ ID NO: 240647 - DNA, 139 bp, Homo sapiens
  chr19:47292036-47292175
  hyper
ccgggcccagagacgacggggcggggccaggaaggggcggggccttgggagggtgctgtttcccgccaaaggaactgggttgtgggttggagcccttaaaccacaggggttcgttccctggtgcgagggtcgctagaaa

SEQ ID NO: 240648 - DNA, 42 bp, Homo sapiens
  chr19:47363286-47363328
  hyper
cacacaggaccaggccgtcttccctctcctggggatcagtcg

SEQ ID NO: 240649 - DNA, 43 bp, Homo sapiens; identical to SEQ ID NO: 205504
  chr19:47494573-47494616
  hyper

SEQ ID NO: 240650 - DNA, 112 bp, Homo sapiens
  chr19:47523772-47523884
  hyper
ccccctgcctccttagcccagccgggaaaacagggtgcagatccggggagtcagacaccggggatgggcttggggggcgggtcctcggggcagagggctccgggggctgggg

SEQ ID NO: 240651 - DNA, 46 bp, Homo sapiens
  chr19:47524452-47524498
  hyper
gcgggcccccccccgggtccaattcacacccgatgttctgtccccg

SEQ ID NO: 240652 - DNA, 34 bp, Homo sapiens
  chr19:47551879-47551913
  hyper
actacggccgccgcgcgccgtaccgccccaccgg

SEQ ID NO: 240653 - DNA, 323 bp, Homo sapiens
  chr19:47729541-47729864
  hyper
ccgcgggccacgggcgcgcagctccactcctcggcggcctagtccctggccctggccctggccctggctcgggctccggctatgccagccgcggcgcggagtccttgggcggctctgcgggcgcgcgattcccccccacccacttaccccccacctgcctgtccgcggagcgacccagccgcgcagggcagcagctgccgcacatctggcgggggccgcctgccgccccctcctccggcggaagtcccacctgccgtctaccccacccccagcactcacccgccgctcgtactgtgcgttgaggtcgtccgccatccgccgca

SEQ ID NO: 240654 - DNA, 499 bp, Homo sapiens
  chr19:47730044-47730543
  hyper
ccacccctccaggcctcgaggtgtctcggcctgctcccctctttcccagccactgctccccgcctcatttctagtgatcccatcgctagtgagtcaatttctcagcttctcctccacaggcaccagaaagcaagaagtacctggggacgccgctctggggtcacctgtctggccagctacgtccccacggcccttgtcagtgtggaaggtagacggccagagaggtgaccccgggggtggtcaggcttaacgacctctattttccaaaggggccacattttgccttttccatgtgacaggcagggaaactgaggcccgcccttagggagtatcccaaggtcacacagggatacagtgactgaccccacccagatcacaagcctcaggtctcctgccctctcgtgtccaaccacagggaagccacacctccggatgtggcagaggcctagagaccagaaggccagagactgtggcagcttcagagcgcgggcctgggggg

SEQ ID NO: 240655 - DNA, 123 bp, Homo sapiens
  chr19:47731468-47731591
  hyper
cccccagggcggcggtgacggcgggtggggcggtgggggcgcagaggtaggcagcgggcagcagggtgggggcggcgggggcggcagccaggccgggctcgcagaggccgcaggacactgccg

SEQ ID NO: 240656 - DNA, 86 bp, Homo sapiens
  chr19:47750797-47750883
  hyper
gtctcaagcggcagggagtgcgccgcaccgccccctggtggagagtgggaaacgtgtccgccggcgtgattatcaaatttcctggg

SEQ ID NO: 240657 - DNA, 663 bp, Homo sapiens
  chr19:47776507-47777170
  hyper
ggctcgaactggatgagagacgtggctagacgggggaggggtgctgggccgggggggaggtgggaagactgctcccctccgctgactcagccccttctctcctcagaggcaggccccgaaggccaggagacggcggagatcaccgacttccagagggtgcgtttctgcaaggtggtggcggcccctccgctgccgggggccgctcgctgaccgcgcccgccggaccgcggcctccgcgctctgcactaacctcccaccgcctcgctcctctgtcctctgcttctgccacactccagccaggagagggttaaatctaaggggggaggagccagggtctgcgagccgggcggggccagggcagtagtcgggtgcaggccccaccaacgggggacgtcacggcactgggacggctgggacgcttccgcgttagtctcccatggaggccctgggcggctcgagccagtcttcaggccgaatctcccgcctccaggattgcatccgaggcctggcagccggtgacacttccgaagggcttgaattactcgggcgccagccctgtcgtattaaacgcagtgcttccgctcacccttgaactgtgtttctggagggggcaggctgggtcgctgtgcttggcgggcttttctgtggcggaagaggcggaag

SEQ ID NO: 240658 - DNA, 244 bp, Homo sapiens
  chr19:47910163-47910407
  hyper
gtgtggctgcgtctcggtatagcccccgatgggctggccctctgggctgaaggctgcaccctgccctgcgaagggggttcagaggtgcaggctgagccccaggaagcccgggacccggctttgacgccctcctaagaaccccaggctctccgtccccgccttccccctgtacctgtgcggttggattgatcgatcataggttgcacgatgcgtctccgggcgttaatgaacctgggaggcggtc

SEQ ID NO: 240659 - DNA, 556 bp, Homo sapiens
  chr19:47922894-47923450
  hyper
cttccggtgggagtcggggaggggcaggctgtggggggaggagaggaagagaccgcggccctggtgcccccaggcccctcctctcctacccagggctggggttcctgctccgggtttctcagtctccctctttcccagtctctctctccttgtctctctctgtctccgcttctcccgtcctttctctcctctggctctctgttctccgagccccctggacacaccacggaccccctccctggccatctccaggggtcacgtgggaatctggagtctggtcccaccgtaggctctcccctctctgaggctcgattccccctctgcaggatgggcagtgcgctgggggcggcgggggtgggctgtggataacggagaaacagttaagctagagggtgccaggactcagggtcttggctgagtctgggggtccccatgccggcgggctctgcccccgtggctgtcctgcggtgaggctggccgtttaaggcagtccgaggggaagggtctggaggccttgcctttcctcaaggccggcgcaccccagataggggttttg

SEQ ID NO: 240660 - DNA, 114 bp, Homo sapiens
  chr19:47923668-47923782
  hyper
ccagtggtggggggcgtggacagagcaggaagggagggagggggcacctgggatggggatggggcctaactggagtggggagggaggtaactccagtgacggtgtgattcagag

SEQ ID NO: 240661 - DNA, 222 bp, Homo sapiens
  chr19:47925411-47925633
  hyper
ccccttcccctcccgccccaccaagcaatcataccattagccacggctcagcggtggcgggaaggacccggcctgacccgggcggggggcggggcacaggctgcggctcccaccgagacccctctctccctcttttccttccctttctatctctcctcgccctctccgtcttttttgttggaatctgctttcctctgccagtttctcgctgtgcctctgggt

SEQ ID NO: 240662 - DNA, 313 bp, Homo sapiens
  chr19:47931515-47931828
  hyper
ggttagtggaaacccgtaattgacggatgcgggcgtagcaagtggaggagcttggctgatgaatgggggcgtggttagtggaaacccacgactgacgaatgggggcatggagagtggaggtgcgtggcttgtggaagcccatgactgatggatgggggtgtggctagtggaagagctaggctgacggatgggggcgtggctagtggaagctcattactgatgggggcgtggcgagtggaagagcttggcggctggaccccggcgctgctgctatatgtgggtgtgtcccgcagacgaccgcgggccgcaaaaa

SEQ ID NO: 240663 - DNA, 572 bp, Homo sapiens
  chr19:47933275-47933847
  hyper
ggtccaagagcaggtgcagccgagtccctagccccgggcgggcggtggggacgagtctctgcgcgaggccctagaagccccggatgtggcagtacgcctccaggctggcgaagaggatgtacaggagccagaggcccaggaagagcgcggtggtggcgagcttgggtccgcgcgggccgcccagctcgccgccgatgtgcggccggcgccggtacagcagcacggcaatgcccacgaaggcgaagacggtgaagagcgtgacggagaaggccagcgtgccagtgcgcacctcgaaggggcggccctgcaccgcccagtacacggcggccacagaccaggcgacgcccaggccaaggaacacgttcaccgcgttggagccggtcacgttgccgatggacgcgtcggcgcactggtcctgcagcgccgccaccttgctggcgaacgtgtctgcgaggcagagacatacaggtcggaggggctttgcgccgccacccacaggggcgggcatccgcctgccccctcccagcctttcccggtcgcctgctttctgcgggcagtgtgggctcaagacc

SEQ ID NO: 240664 - DNA, 118 bp, Homo sapiens
  chr19:47947697-47947815
  hyper
tgtgggtggaaagaaagggccgcccccgacctcggcgtgggctgtgagctgtccgcggtgctgaaatgctggggccggcgaggagggagggtctcccgagacatgctcctcacacacc

SEQ ID NO: 240665 - DNA, 96 bp, Homo sapiens
  chr19:47951397-47951493
  hyper
atgctcgtcctcctcgaagatgtcgtcgtcgatgatgccgatgcgcagctccttctgcgtctcgcctggtttgaacaccagcgtgccctcgctgcg

SEQ ID NO: 240666 - DNA, 343 bp, Homo sapiens
  chr19:47960606-47960949
  hyper
tcgcgcgcctcggcggggcccgggcccaggccgcccagctcacctggggcctcggcgcccacgaacgtgccgtccagctcgatgctcttcggggggtcgccctcggcgcctatgatgatgccgctgcgtgggtcggtgcggtagcgcttgtacacgtacttgtagaagagcagccgcttgtcggccatccaggcgaataccacgcacaccgggaagaagaccagggtcagcagcgcctcccacacctgcgggcggcgggcgtcagggcgaggccgggcgggccgccttctccctccccgcctctctgtctcagtctctgtccgcctctgccactcctcatctc

SEQ ID NO: 240667 - DNA, 188 bp, Homo sapiens
  chr19:47987534-47987722
  hyper
cggaagctgccggcgttgccctctcccaagatggcggccaggtcgcctgctcgggcctcccaggcgactttgccccactgcgcccgcgctctcttctcctttccatttctggaccaaggggctgccataaggagtctgtgactagagatgggaggtggtggccacggcctctcgctgtatgctgtgtg

SEQ ID NO: 240668 - DNA, 300 bp, Homo sapiens
  chr19:48018496-48018796
  hyper
actctctccccagcgctctgtacctcacctcccacgtgaccctgtggaaggcaatggcagtaccccccgccgaggccccgccccacggtgttgctgctggatcctcctccaccaatcagcaggagccctcggctcgcgctggggcggggggtcccccactcgccctccccgcggaactctggcacagtcagctgaccgcagacactcacgtgacagctcggggcccacgcccgggtttgacagttctgcgcagaacttagtcccgcccccgcggctggtctcgccggtttcttcacttgg

SEQ ID NO: 240669 - DNA, 141 bp, Homo sapiens
  chr19:48103693-48103834
  hyper
caaacccaggccccgcctcccgacgaataatcccccgaccggcgagaggcccatttaacccgatggggtttggggttgggacggtgatggagtcgtggctccgcccccagacctgggccaataggcggctgggctccgccc

SEQ ID NO: 240670 - DNA, 202 bp, Homo sapiens
  chr19:48104041-48104243
  hyper
actttatttccaccgcctagctgctaaaatccggacccggaaacgtctccaatgggaacttgttcccctcgcccctatttaacagaacctggaggggacgcaggggtgtttttggattgggcaaggctttcatttctttcccctggttcttacatgcatacgggaaaatgcacgtatcttgtgcgccgctctacagaaaact

SEQ ID NO: 240671 - DNA, 81 bp, Homo sapiens
  chr19:48216436-48216517
  hyper
ctgttgtgattcccgtgttaagaagagagacagactggggagcagcccaacgctggaggtggaggcggaattcgaacccca

SEQ ID NO: 240672 - DNA, 263 bp, Homo sapiens
  chr19:48281435-48281698
  hyper
ctgcaggtctttataaggcaactgtgggccctggaccgctccctgaaaacctccccctcaactccctgtctcctccctcacctggtctaccccgaatccttcccctctcgccccctcgccctctccaggggaggtgagggactcaagaatcgcgccctgcttctgtccccaccgcgccgtccccaagcccacgcagtgaaaagaccacccttgaggctgattccgggtccagctgggagcggccagccgtaaatcaccgcccc

SEQ ID NO: 240673 - DNA, 169 bp, Homo sapiens; identical to SEQ ID NO: 205511
  chr19:48613936-48614105
  hyper

SEQ ID NO: 240674 - DNA, 317 bp, Homo sapiens
  chr19:48774331-48774648
  hyper
agaaaagaaaggaaggaaggaagaaaaaaatcatttcaagggtaggcgacgggagccttgcggtttagccgctagtcaacggatgggggggagtggtagcaaaaacataaaaatggggacaagagagaaactggagactccccaacctgtctgtttccgcccttttacagtactgaggggaaaaaaaagccttctttccttgggaaatgcaggaagccagcaagcggccggagtctccggagcccgcaaggaggcgcgttggctgcgcagagagcgcgcttcccagctggagagcctaggaacggtggcgcgggcgg

SEQ ID NO: 240675 - DNA, 383 bp, Homo sapiens
  chr19:48833439-48833822
  hyper
ctcccagcaggcagcggcgctgcccacgggccctccggcgcttctttgcccccatgggatattgggaaatgtagtcttgagggggcactgcatgacgtgtggttttcatcttccgcaggcgtggcggtgtttactggcgccttgatctatgccattcacgccgaggagatcctggagaagcacccgcgagggggcagcttcggatactgcttcgccctggcctgggtggccttccccctcgccctggtcagcggcatcatctacatccacctacggaagcgggagtgagcgccccgcctcgctcggctgcccccgccccttcccggcccccctcgccgcgcgtcctccaaaaaataaaaccttaaccgcgggctctgccttga

SEQ ID NO: 240676 - DNA, 454 bp, Homo sapiens
  chr19:48867042-48867496
  hyper
ggggtctagacagcgaggtagatcttaggagagcaggaaatgctcgtaaaggttacctagggggtgcagggccgccctccctggccatgcaatcccccgatttctccctcaccttagccaaagctcgactgtcattgagcctcctgcgcatgtgcaggagggcgtcctgggctcccgaggttcggcttcacccagcagtaaaacgcatgcgcaaagcttcggtcaatgcgggctgtccatttctcaccgccgactccctacatcaactacgcatgcgttgcctgcctttctccaccgccggcctcgtttgggcgcgacgcatgcgccgcaggagtgtctccttgtcagcttgctacaaagggaaggggcggtgtggacgcgagactccctagagggatggggcggggtagggctcccgcgcgcagtccgccaacggcgcgcagtccaacgttcg

SEQ ID NO: 240677 - DNA, 140 bp, Homo sapiens
  chr19:48894905-48895045
  hyper
tttgccgtggcggcgctaaacgcacccccaaagctgccccataggaacttgggagggtcgcagggttcggaaagtgccaaatccagcaccggttcgcccaggcagtctgtgtctctggaagagacgcagtccagtacacc

SEQ ID NO: 240678 - DNA, 217 bp, Homo sapiens
  chr19:48918114-48918331
  hyper
ccgcagccctccaccggatgccccccgcccggaaaagcgctgctgcaagggtttctgcatcgacattctgaagcggctggcgcataccatcggcttcagctacgacctctacctggtcaccaatggcaagcacggaaagaagatcgatggcgtctggaacggcatgatcggggaggtgagggggcggacgggaggcggggaatcttcggggcggagt

SEQ ID NO: 240679 - DNA, 96 bp, Homo sapiens
  chr19:48918631-48918727
  hyper
ataataataaaaaaaaagaggtcggcaccctggggcaggggcgcggccaaattgaggaaacacctgattggggcctggggcggggtcgcgggaggg

SEQ ID NO: 240680 - DNA, 1285 bp, Homo sapiens
  chr19:48946261-48947546
  hyper
ttcccgtcgccgcccgcgccccccgccgccgcggccaccgccgtcgggccgccactctgccgcttggccttcgaggacgagagcccgccggcgcccgcgcggtggccgcgctcggaccccgagagccaacccctgctggggccaggcgcgggcggcgcggggggcacggggggcgcaggcggaggagccccggccgctccgcccccgtgccgcgccgcgccgcccccgtgcccttacctcgatctcgagccgtcgccgtcggactcggaggactcggagagcctgggcggcgcgtcgctgggcggcctggagccctggtggttcgccgacttcccttacccgtatgccgagcgcctcgggccgccgcccggccgctactggtcggtcgacaagctcgggggctggcgcgccgggagctgggactacctgcccccgcgcagcggtccggccgcctggcactgtcggcactgcgccagcctggagctgctgccgccgccgcgccatctcagctgctcgcacgatggcctggacggcggctggtgggcgccaccgcctccaccctgggccgccgggcccctgccccgacgccgggcccgctgcgggtgcccgcggtcgcacccgcaccgcccgcgggcctcgcaccgcacgcccgccgccgccgcgccccaccaccacaggcaccggcgcgccgctgggggctgggacctcccgccgcccgcgcccacctcgcgctcgctcgaggacctcagctcgtgccctcgcgccgcccctgcgcgcaggcttaccgggccctcccgccacgctcgcaggtgtccgcacgccgcgcactgggggccgccgctgcccacagcttcccaccggagacaccggggcggggacctgggcacccgcaggggctcggcgcacttctctagcctcgagtccgaggtatgacgcggccccgggggccccaccgcccccttggtcagcgcaggccacggcccgagggggcgcccgcagtggacaggacccgcgtgggttgggaaggaaagcagtggaactggccggaccccgcctggagcagcgtcctgcgccccctggttctggaggaaccgcaagccggagaggatttggtccctcaactatcacccagcctgagaacgagggggcgggggccttggagcccaccggacttttttttaaacccgacaagggctttttaacgtcaccagatggggcgggaggtggggggttcacgccactcccgcgtcccacctccacgcccggggccgtggcccccacatca

SEQ ID NO: 240681 - DNA, 95 bp, Homo sapiens
  chr19:48947820-48947915
  hyper
tcctcttccaccctcggtcgcttttccctactctgacctaggacacgtccccaacggaagccccgccttcccttgcaccgcgatgaacccaacct

SEQ ID NO: 240682 - DNA, 51 bp, Homo sapiens
  chr19:48949427-48949478
  hyper
ctctaccaccgagcgcagactggtagggctgagtccggactccagggtcct

SEQ ID NO: 240683 - DNA, 179 bp, Homo sapiens
  chr19:48972233-48972412
  hyper
agcaacgtattatcggaggcggggctcggtttacctagactccaagtgtccagggcctttgagcaggcgcagaggtggctgtaccgcgtggctccgcctccgcgcgacacttttccggggcttctcattggagagcaagcctgtcaagtgctttctgttgtttcggaggcggggcctgc

SEQ ID NO: 240684 - DNA, 78 bp, Homo sapiens
  chr19:48994398-48994476
  hyper
ccccggggtctccagcgcaggcgagacggagaagcgggagaagcacagcggggggcctggaggggggaggagggggaa

SEQ ID NO: 240685 - DNA, 197 bp, Homo sapiens
  chr19:48996833-48997030
  hyper
cctccctccaggccccgcccaactctaagctcggcctcccgccaggcccttcccggctctaggctcctgctccctccaggccgcgaccccgaaaccgcgccctctcgggttccgcacctggtcgaagaggtagacggtcacgtccccgtggaaggagaccatcttgcgcttcctctccagctcgctgtcctctggct

SEQ ID NO: 240686 - DNA, 474 bp, Homo sapiens
  chr19:49127266-49127740
  hyper
ctgggcctttgttacgcgtgttagagtctctgtctttgcagctaaagacctcctccctcacgccccttttcttttgtgaattcaatggatgagacaggcccactctcccttaacaaagatggcgacaacggcgctgtctatggggccgcgacgtcgtctccgctgcgcgtcggccctcacccacgatggcggccagtctcccgaagcgcgaggccccgcccagctctcggcctctcccgcggccggtccctgcaccaagctcgcgagctgactggctccaccccccgcgccctcgtattggtgcggcccaggccggctgcacggccattggctgagcggatgcacaccctccccccacccctaggtctgatgggggctgttggtgctgacttgcgggaccgcctggaggaggacccggcgtgtgaggagggtgcgggggtcggggcagggaccggagtctaggggactgaggga

SEQ ID NO: 240687 - DNA, 216 bp, Homo sapiens; identical to SEQ ID NO: 205516
  chr19:49141163-49141379
  hyper

SEQ ID NO: 240688 - DNA, 53 bp, Homo sapiens
  chr19:49149535-49149588
  hyper
ggcaaacactcctcgggttggcttggggtgggatgtgcgaaagggcaggattc

SEQ ID NO: 240689 - DNA, 508 bp, Homo sapiens; identical to SEQ ID NO: 205517
  chr19:49199689-49200197
  hyper

SEQ ID NO: 240690 - DNA, 592 bp, Homo sapiens
  chr19:49216985-49217577
  hyper
ctgatcctccaggatgtcatcgatgccccggttaggaagcaactgcggatggagaaatttggcgtgaactcgggactgcgacctggacctgactggagaaccctagccggattcaacccacaccctcttacctgcgccctccggatcgcttcctgcagctcctcctccagagtcagagccgctgagcccggccctgaggaaggggtcagggctggagctgcagcaggagccggagtgggagttggagccggagccgtccccggggtatccgcggcacgtggaagaggtggcctgtgagatgctgcgctgggcttgacctagagcagccaagagggcgagcgcccataagccatgcccacagggcgcaaccccacccactcgcaacgtgtggctccaccccttgatcctctcgcgacccctcgctcatcaacccctttggcctcgccccctattctttcattggctcctcttctctaaagatccgccccctgttagtctgaaccacgtcccctcgccttcaaggcttcctaccgctggtcctcgcccccacacttcattggctagttttttcgacaccccgccccggcccact

SEQ ID NO: 240691 - DNA, 97 bp, Homo sapiens
  chr19:49217819-49217916
  hyper
ggggaggggcggggcgtgggaagaggcagtgctgggcgggctcccgggcgcaggcaggagctggacaggatatttggaaaccgagaaaggaggcact

SEQ ID NO: 240692 - DNA, 120 bp, Homo sapiens
  chr19:49244870-49244990
  hyper
ggaacccctgtcctcggggccagaggccacgcccccggcaggaagccacaccccgtgccccgaaaccacacccaacaggaagtcacgcccccatcgccaaggccacgcccccgccgcgga

SEQ ID NO: 240693 - DNA, 701 bp, Homo sapiens
  chr19:49255764-49256465
  hyper
gcagatccacagtccgcttttcgtggccggagcgcaccctccgcaaaggcaggccacatccggccgcccctggaacgccaggcgtccggctatccggcccggcagccctcccctccgcgcagcctgtccggactggcagcgagggcttggggaggagaggaaggagagggcgcggccgggagtctcgcagcgtccgccctcccgggccgggcggatggctggaaggtggagccccgcccgtcacttggcgccgagccccagcgccaggggctaaggcgatggcccctgggcccaccgctccccagatcggggatgcaggggaccgcgccctgcccctccgccccgtcattgacctgcgcgaaggcttcacccagggcaggctacctggcttctgagcagccgcagcatcattgcgtggaccaggagacggagcgcccagttgcaatgctggagccgggaggtccaatccgccgccctctctcttccggtgccagggcttagagtcggcccccgacacctgggtgcttcgagcctggccacgccccagcggctgggcagggcccccgcacctggtcccggcgagtggagcgatcgtccgccctctgccgcgtcctcctgggggatggagaacctgtttgccaggctgccgccggagcgcgcgagggcctccagcctgcaggtgctcccgcgcccaccagggt

SEQ ID NO: 240694 - DNA, 556 bp, Homo sapiens
  chr19:49298357-49298913
  hyper
gacagagaaaaaaaaatcaacggcagcaccaggggtctggcctgagaacggagagatccggaatcggggccaaggtgtatccttgaccgcacgacaaggagtaatgggcggacctgaacccgcgacgaggggctgggggccaagatgcctgggtcggcccttacggctttgggagtgtcgcaaccacatgggggcgccagagacccagacgccgcccgctggccttttatttcgtattgcacttcaggtgagtcattggtagggaggcgagtgctggcgtgacgagatgctacgggtcggtggatctggagcacagcctgcagcttcacaccgggaacatccactcgtgggctctgattccgtactgcggaacaacggaggcagtgcgtgaggtggaagctgcactacaactcccagtaggccctggggtgttccaggccgagtgcctacggagctgtgccccagcggctcacgggaaatgtagtccacttcccagagggccccaacaatgatgggaacggggaatcaaggctaaggcggcgcagaggcttccggg

SEQ ID NO: 240695 - DNA, 153 bp, Homo sapiens; identical to SEQ ID NO: 205522
  chr19:49314168-49314321
  hyper

SEQ ID NO: 240696 - DNA, 210 bp, Homo sapiens; identical to SEQ ID NO: 205523
  chr19:49436772-49436982
  hyper

SEQ ID NO: 240697 - DNA, 537 bp, Homo sapiens
  chr19:49467098-49467635
  hyper
tcccaccaaaaaagtcggggagtgccaaggggatgaggtcagcgagtggccccacccccatccgtccccgcgggggccccttcccgcgctgagctcagcatgactcagcagtcgctgcctgcaacaaggaccccagataccggcctggcggggcatctgcagatcccctcggtcaggggctgccccgcctgggctgttcggagcagctcctctgtagggcagggcctgacctcaccccacaccccagtggcttcagctccctgcccagcgcacgggctgcctccatcagggcacttaagtagagtcaaggtttgcgccgactccgtctcccagaaatcaacgtggaccaggcccacttaaaaaatatgcattagtcgaagacagacgtctcgtccataggtccccagactgtttgtccacaacgcagggcttctctttgtgggcctgaaggagcacacgtcaggcaagacacgagggcaacttcagagacactgttcagggccacggagaattctcgaagtctgtgagttgtctcca

SEQ ID NO: 240698 - DNA, 205 bp, Homo sapiens
  chr19:49474212-49474417
  hyper
ctccatgaagcagccgaagccggagagattggtggagatactggggattcccataaccgtgcactcagctgcgggaaggcaggagagagacccacttagcttccctcatcgcctaccgtcttaatcgcaatagacgcctcaacaccgccctctactggcgcctgtaccaagtgccaggcgctgtgcggagcgtcgctgagccccc

SEQ ID NO: 240699 - DNA, 170 bp, Homo sapiens
  chr19:49496546-49496716
  hyper
aaggaggccgcagcgtcactgagcccactggcgcccctgcagtgaaacctcgcagccgccaggaggcggtggccgccccccccagccagcgccattggcccacgcccgggggcggggatttccgcgtgtcctcattggtggaacgggttggagtcgctgtgtcccggccc

SEQ ID NO: 240700 - DNA, 852 bp, Homo sapiens
  chr19:49575272-49576124
  hyper
cgccccgcctctcaccgggccggctgcggctgcagcagcaagccccgtgccgtcgcggtcgtcgcggaagtcaggcagcgtctcgaggcagaagacgacgatggagacgaggatgaccagcacggagactacggcgagcacgcgcgcggcctgagagctctcgggaaactcgaaaagcagccacagctggcgggcgaaggcgcggcggggcagggggcgctcgggcggcaccgggcagccctcgtcctcgcgcaggcgtgccagggccgccgcgcccagcccgtagaaggccacctcttccaggaagacgtcgagcggcacgtgcgccggccgccgcagccgcccaccggactggtagtagtagagcacggcgtcgaagctgggccggtgccggtcgaagaaatactcgcggcgcgcgtcgtcgtagaagcggccgcggcgcgctgggtcccctagcagagtgtccgggaagcggcccagcgtgcgcgcccgcgtctcgaagcgcagcccggccacgttgagcaccagccgctcgcagcagccgcacggcggcgggcaccgcggctccatggcgcgcgcagccccggcgacccgcgaaccgacgtgtggccccgacgcccggccccggtgcggccccgcctcggccgcctcggccgccgccgccgccgccccagcccggtgtccggtgtccggtgtccgcgcgtaaaaatagcccggcagggcggctagggcgcgagggagggggcactgtgaccccggcggggcggagggcgacagggcgaccgcgcgccctctgccgggacgcccgccctgccctgccccgccgccgccgccgcccgcgcctgctctgcg

SEQ ID NO: 240701 - DNA, 193 bp, Homo sapiens; identical to SEQ ID NO: 205525
  chr19:49577262-49577455
  hyper

SEQ ID NO: 240702 - DNA, 32 bp, Homo sapiens
  chr19:49588345-49588377
  hyper
actctttgctaggcggcggagaggtacgttac

SEQ ID NO: 240703 - DNA, 296 bp, Homo sapiens
  chr19:49646032-49646328
  hyper
cctctgtccctctgtccctccgctgcagctgtgggtgggcatgcctgcctggtatgtggccgcctgccgggccaatgtcaagagcggtgccatcatggccaacctgtcagacacggagatccagcgcgagatcggcatcagcaacccgctgcaccgactcaagctacgcctcgccatccaggagatggtctcgctcacctcgccctcagcccccgcctcctcccgcactgtgagtgtccggcggccaattccagccttcgcttcctcagagccccgcctcttgccctcagtctagc

SEQ ID NO: 240704 - DNA, 825 bp, Homo sapiens
  chr19:49652236-49653061
  hyper
cttccgtccccagacgtgatggtgtggtccaatgagcgggtcatgggttgggtgtccgggctgggcctgaaggaatttgccacgaacctcacggagagcggggtacacggggcactgctcgccctggacgagaccttcgactactccgacctggccttgctcctgcagatccccacgcagaatgcacaggtgagctgccgctgggcccggagcatgctgggcgtccccacctcgcagactgcacgctccaaccgccccctccacctcctctttccaggcccggcagcttctggagaaggaattcagcaaccttatctccttaggcacagacaggcggctggacgaggtgggcgcggcaacagctcagagggctctgctcccagcggctcctcgagaggctgagctgagggggcggggcctgactattaatggtcacggttggaggcggggccaggagaggggcggggttaaaggagaggtgagacccggagaggggtggagtcaaaggaaggggcggagtcagacaaggcaggagtccctcaccggctgtccggctcctatacctaggacagcgccaagtctttcagccgctccccatcctggcggaagatgttccgggagaaggacctccgaggcgtaactcccgactcagctgagatgttgccccccaactttcgttcggctgcagcgggagccctgggctctccggggctccctctccgcaagctgcagccagaaggtggggggctcccaaatgcgacagcccttcctcgcttccctagggtggggcatggaccacctcagtagtccgggttctggaatggc

SEQ ID NO: 240705 - DNA, 222 bp, Homo sapiens
  chr19:49654220-49654442
  hyper
cggtcggcctccccgccccaggcgtcactcagtgatcacgggtaaagagaactgtttcaaaaagcttccttgttgactgattttttttttgcggggggggggggggctgttcaaccaaccacctcgagccaggagtccaggcccctcatccctcaagtctaggtccaggtctctagaccctacccgcattccccgatgccctgagattcccagaccccacgt

SEQ ID NO: 240706 - DNA, 145 bp, Homo sapiens
  chr19:49654472-49654617
  hyper
ttcggagaaataaatatagctcgtggaaaggggttggaaggcagggggaggtacacctgcgtcgcagtcgagcgactgggtcagggttccggcgtttccagcatgtctgccagggccctggagacgagaacgccagaagttagac

SEQ ID NO: 240707 - DNA, 164 bp, Homo sapiens
  chr19:49655173-49655337
  hyper
accgggccaggctccgcccccaccaggattcaccacgctgggcccggcaccttcctcaggtttttccagggccccgcccatgctcacctggagcgcagaccgtttcgcagaccagcgggcagagatagcagaactgacagtgctggaggcggggacggggagag

SEQ ID NO: 240708 - DNA, 250 bp, Homo sapiens
  chr19:49661124-49661374
  hyper
tggtggtgccggagaaggagcaggtgagcgccggaccagggtctgcgggagcgcggagctggggacctcgcctccaggctcccagagaggagggcgctggacacccagattcctgggtcagacggaggagggggatgggagggtccaggttccagggtccagggcatgggggtcgagactcctgagtctggagcgggagggcgctgggggcccggactcctgtgtccgtggggagcgcacggggtgggtg

SEQ ID NO: 240709 - DNA, 36 bp, Homo sapiens
  chr19:49926479-49926515
  hyper
gaccgggggcagggcgactcccgaggcagtgcggac

SEQ ID NO: 240710 - DNA, 108 bp, Homo sapiens; identical to SEQ ID NO: 205530
  chr19:49926734-49926842
  hyper

SEQ ID NO: 240711 - DNA, 232 bp, Homo sapiens
  chr19:49929636-49929868
  hyper
taaccccttccttcccgctctcccccgcagctataggtatctgccagagctatgaaatcattcagccggatcctcttcctcgtcttcctcctcgccggcctgaggtccaaggccgctccctcagcccctctgcctttgggctgtggctttccggacatggcccacccctctgagacttcccctctgaagggtgcttctgaaaattccaaacgagatcgccttaacccagaat

SEQ ID NO: 240712 - DNA, 382 bp, Homo sapiens
  chr19:49935879-49936261
  hyper
aggtggggcagcgcggacaccaggcctacctgcgggaacaggtgtacagggacactagggttcggggccgccggctcggcgtctctgcccggtccgtgcaccaccggctcctccctgcctcgggatcgccgccagttccctcccgccgacccctccgcgcccccctgccctctcctcctgggctctaccttgctgatctcgaagccgaacacttcttcgaagtaggcgggctgggagatgagcagcaggtagaacgtccagctgcggcagaagttggccacgatgatggcatagactggcatagacgtgaagaagcgccgccagggagtgctaaacttctgtgggggcgaggggagggccgctaagacggggagcggggctg

SEQ ID NO: 240713 - DNA, 154 bp, Homo sapiens
  chr19:49936813-49936967
  hyper
aatctcgtcctccgcgggttgcaacccgcctcctaggttctagcccctctctttgcgttccagtcccgtctcctctagagtctgcaggaaccgtccctgatctacacgctgtgcaggttcgtggcttgctatctctccccgccccttccccgaa

SEQ ID NO: 240714 - DNA, 192 bp, Homo sapiens
  chr19:49954990-49955182
  hyper
gaccgaacaccatcgtcaaatccgtggggaatatgtgtctctagacgcactaccctccgtcctacgtgccgaactgtaaacgaagccacacttccggtctatcggtaaacacaggactggagtatgccacacttccgagtaccccagtgttcattcacaagctggtatcgcgttatcgacaagccacgcccc

SEQ ID NO: 240715 - DNA, 108 bp, Homo sapiens; identical to SEQ ID NO: 205532
  chr19:49956760-49956868
  hyper

SEQ ID NO: 240716 - DNA, 82 bp, Homo sapiens
  chr19:49999403-49999485
  hyper
cgtacgactctcgcgataatacgggcgggctgaaggctggtcacatcttccctgcctaaataatcgcgcccggcgttgtggg

SEQ ID NO: 240717 - DNA, 324 bp, Homo sapiens
  chr19:50016229-50016553
  hyper
ggggttgggggcccggactcctgggtccgagggtagagcggttgggggcccggactcctgggtccgagggtagagcggttgggggcccggactcctgggtccgagggaagagcggttgggggcctggactccggggtctgagggaggaggggctggggcctgaggggggcggaaggggcgtggcggagctcggggccgggactctcagcctatcaagtgtctgtaattaattaaccaactgagatccagttcaggggtgaaagttcttcaggtacgaggagggcattgttgtcagtctggaccgagcccgcagagcccctcctc

SEQ ID NO: 240718 - DNA, 49 bp, Homo sapiens
  chr19:50016836-50016885
  hyper
gcgctgccttctccgctcaattaactttctcaacgtctcctgctgggcc

SEQ ID NO: 240719 - DNA, 96 bp, Homo sapiens
  chr19:50083836-50083932
  hyper
tattttccccctccgctccgcccacttccgcccagcagaaggcaccggaagtagagctgcccctagttgcggaagtgcctcgcctggcttgctcaa

SEQ ID NO: 240720 - DNA, 83 bp, Homo sapiens
  chr19:50143412-50143495
  hyper
ggggggcgggctacgctaatgaggctactgcataatcatgagctctggcaaggagggctcgcgtctccggacacttaaggagg

SEQ ID NO: 240721 - DNA, 104 bp, Homo sapiens
  chr19:50169139-50169243
  hyper
ggcatgctgggagcgtcacatgcaaattgagcgtgcacccagcgttccgccctttctacgctgggccggttatcgacccggcccagtgcgcaggcgcgggaaag

SEQ ID NO: 240722 - DNA, 386 bp, Homo sapiens
  chr19:50194291-50194677
  hyper
aggggattggacgccgtggctcgaagggggcggggatagaacgcggggattggaaggaggcggggataaaacccgggacctgaatacccggctagggacacgagagagaggaatcggggtttctgggtgacggtgatctcggggtgggcaggactccaaaggcccgtcgacccggtggtggactccttgcactgggattggacatatgcaagcgggagatttggggccggcgctcaaaatcggggggcgggggtggactcgggtttggaccccaggatccgatcagcggacccttgattcaacgtggtaagtactggaccccaggggctcgggctccggcggggcctggagtcctgtgtctagggttgggcgtgcaagcctctcca

SEQ ID NO: 240723 - DNA, 819 bp, Homo sapiens
  chr19:50316249-50317068
  hyper
cacctgctgacgggcgggggcgccgccgcgactgctcctgcagaatagggggaccccgctggaggccgcgaggcacagcagatgcacagtgccgcccgtcccctcctcccccatttaggactcccaccgcggtccctcacgtggggactgtcagtgcgggtcttggagcatggcggtaatcagagtaactcggcctgtggtccggagccgccagagggcgagatggggagctgattggaagaggattaacttcccgccttcttcacccaactcaaacagaccctcaaaccctattcaggcacctcccccaaacccattaggttctcttccgccctagccggaagtcacggtacccctaacaaagatggcggcaaattgaatttgcaaagctttctagtttctccgaggaggtaaagagaaccaagaagccggattgaagatgatgactgcgccaaggcgttgcctagccaccatcctgtaggctttgatgatttacattctaaacggaaaaaacagctgtgcccggatcaaagattgcgatggtcccaaagcattgcctagcaaccacattccctgtaggtttccagtatatagtagtaaacaatgtgccctactcaaagatggcgaccgtggcggggcgttgccaagcaaccaccattcagcctgatatccattccaaggctgtaaacagctgtgccctgctcaaagatggcggcacgtcgaagtccgagcaccctccttggggcgaaatcgagaaaaacaccatctcccctacaaccttcgagggtggttgagtccagcgatcgttgcctagtaacc

SEQ ID NO: 240724 - DNA, 194 bp, Homo sapiens; identical to SEQ ID NO: 205534
  chr19:50321281-50321475
  hyper

SEQ ID NO: 240725 - DNA, 213 bp, Homo sapiens
  chr19:50380586-50380799
  hyper
taggccatgccctcgagcaaaatggtacctccttggcttcaattccagtatacaatatggagaaggaagtgggcgtttcaaggcgtgcttgccccaggtggtgcagctctcagaccctcccacttgtttacttcgtggcgagagggcgaacactgcgcctgcgcactctccgtagccggatccaccttcagcgtctgcgccacgtgactccga

SEQ ID NO: 240726 - DNA, 543 bp, Homo sapiens
  chr19:50393346-50393889
  hyper
cccgtgcaatgccgccacgtcgtcgagcgccaagcgcaacgcctcttcccggctcaagccggcgaacgctgccgccgcgtccgaccacgtgtacgaggccagcagcagcgcgccctcgcgcggcggcgggtagaaaatcatgcgcgacgggcgatcggtgtttgagtggccgccttcaatgtgctcctcgcgccagaagggcctgcggaagcttaggaacaccttggtggccggcacgtagtgcagcctccgcagcgcctcctgcatgtggcggggcagcggcggcgagaaggtgatgcgcttcaccgccggtccgctcgccgtcagcagcaccacgtcggccttcagcaccttcagattccgcgccgggggagaggtctcgatctgcacgtgcacatcgtgcggtccctgggtcatcgccaccacgggcgcgttcaacagcacaagcccggacagcgagctcagcagcgcgcgcggcagcaggtcccagccacccacgatgcggctgtacctgcaggcggggcggggcggggtgggggcgtg

SEQ ID NO: 240727 - DNA, 251 bp, Homo sapiens
  chr19:50529274-50529525
  hyper
gcgcacaggaagtcgctgcgaggaggcgcgtgtgcggggagttgaatctcccgctcccttgaggctggggttgcgtctgttgacgcggccgactacaatcccgaggtacggagacgctggggctgagggacttgcgggctcggtccttcctgagaggtgacggaatgcaagtgggggcgacttcggcaaagggtgcgtcgccttgggcggcggttgtcagggtgaaggtgtgaaccgtctttcacagtctg

SEQ ID NO: 240728 - DNA, 555 bp, Homo sapiens
  chr19:50553945-50554500
  hyper
agggcaagtgatgaatgtcactagacagtggggccctcaaggacctggcaaatgggggcttggacctcggatcggcctcccacgcgaagcttgctccccaccagcatccccacgttggtggcgacgctgccccggccccacggatacttccgcgcctgtcagactccctgatgaactacccttcccagagtaccgcgggagctcgggctcctgagggcgacggtcctctgatggcagatgcgggagaaactctggcgtcaggcggccctcgcgtggagcacacgaagtcgtggcttattctggcttcagtatgtggggtggagaaggcgatccacgcagctgcgtctatttcctgtggatcaatcgcaaaatacgttctgtaagccccgcccccactgcgtgcgggcggcttttgtctccacggcaaccgtcaactctggaaacgcctgtctttctccatggcaactgtctacgccgcaggctggagctgcccattaccggagcccgtaagcagtatgggtgctggacaaacagcgtgatcgggtcgtaaaactt

SEQ ID NO: 240729 - DNA, 511 bp, Homo sapiens
  chr19:50651037-50651548
  hyper
tgcagtgctgctttcgggttctggggtcagaatctgggttgcagctctgccagcctgagagaaatcgcggagtctccccgactctcagtttcttcaactgcaaagtgaggaaaggtaggttccccttcctagggatcgcagcagtcccacgctccgccggactcctggcaaacagcagacgcccaattcctgcgcgccgagtcgtctgagccgcactgatactaggtgggactcagggaatgacaagagggggcggggcgtcacccacagcgccctccccactcccaaccagacccaacttgggcccgcccccggagcttctgctagcctgtctggcccggcctgcacccacctgctccggtcgggtccgcgagttccgtgcgtccaggcggattccgctggacagccaggccttcccttcctccgccgggtcccggaacgcgcctgagcagtccctgtctcggaactgtaagtcccggtaccttaaacgcggcatcgcagctggactaca

SEQ ID NO: 240730 - DNA, 668 bp, Homo sapiens
  chr19:50706518-50707186
  hyper
ggtcggcccccccacgccggcccttacaaaggcccccattcatgccttgcgcacaaagcggcccattcaccctggccccttgggcctcccgcccccggccgccccccgcgcctcgctattggtggcgccccgtgcccatcaggcctcggcttccacccccgaccgcgccgcctagctccgcgcccgggccgcgttcttttcccacggctggcacccttcgacaacttctgattggcccagcccgccagccgctctttttgattggcggctcccgtcccccaggggcggggccgtagcttgccgcagcgggcgccgattggcctctgctgctctcttgggggcggggctgtcctggcggacacgcccctctttctccccaggccgaagcctcgggacggccctggaagccggtgagtgcccggggccggcagccctccgggggcggcggaacgggactgagccaggggaagctggagcctgggggctgcgatcggggcccgggagcccgggcaggcggccggggacggcggggaggtgacgcggacactcaccttgggcgcgcagcgggacggcggcgagggaggtgggggggcgggacgtctacactcccccaactccagttgccgccgtgtgcgaggcccggtcggggtcctcgttgtcagccccgg

SEQ ID NO: 240731 - DNA, 380 bp, Homo sapiens; identical to SEQ ID NO: 205537
  chr19:50708476-50708856
  hyper

SEQ ID NO: 240732 - DNA, 1138 bp, Homo sapiens
  chr19:50815346-50816484
  hyper
ggaaggggccacgccgacccctccctccctgccctgcgggtgggctgagaagacccgccattagcaccagagttggacgatttgcagacctcccctccccacactgtctccgaaccccgcccccatccctgagagcgccccctcaccactccccccaccagcgacaggctaggcccgccccgcccacatttgagtgagagaaacttattgctctgtgtgtgtgtgtgtgtgtgttggggagggtgagccgcggagctcaggaagaccccccgccattcattcctccccaatcgccccgccccctggcccgtgtccgtgcgttcccggagcgcaggaggggtgcgacatgcgtgtggggggcgcgtcatgcagcgcatgcgtgtaggtgcaggcaccctggcggccggggggaaaagggggagccggacttggaaagagtccctttagctcgctctctccctccccgaatcccacactattgacttgggggatggggtgggaggggaggagaatcacgttttgtagaagtttatcatgattgtggttattttgaaaagctgaactcaaaagctgggtacgtgtggcggactggcgagcagggggagacgttgggaagaggtcagtaccctttggaaaagaccctcaccccctttccccgcctccttcggctttcgtgaaggtcaggggaaacgggggggcttgttaaagaagttgaaccctttggcaatataatcagtccccaccccgtaccctggtgtctggagcccctagccctttgccccgcccccaccaaaacccgccccacccctcacccctgcttcaccagggtttagggtccgagggaaggatgggggggactcaaaatgccccttgcataggaatcgttgcatcgagaatcgtgctcagtgacgccccccatccaccctcgggtggggggttcctgaggccgtgggagcagagggagggaggtggctaattccgtgggaccccggctccaaaaggggggtccgctaaagagtctgggaccggtgtggtctctgggcttgggggaggtagcgcatccttgagccaggataggaggtgggaaatgattttccacccgcgagcgtgacgcggtgaggaccgctggggaaggggg

SEQ ID NO: 240733 - DNA, 31 bp, Homo sapiens
  chr19:50817682-50817713
  hyper
ctgcccctcaaacccgcgcatgcggcccctg

SEQ ID NO: 240734 - DNA, 303 bp, Homo sapiens
  chr19:50817943-50818246
  hyper
gggggtgaggggcccgggggtgtctgctggcatcgtcatctcggttgcatattattaatgactttttgattttttttaaaaaaacccttttccccaccccccacccccagctcctttgaccttcttcccggtcacccccgagtccccccacaggggggaggggagcgctaaaggatggagggcagggtcgggggagcgcggcgggcggcccggggagagccagggggggtggcaaggggcgcgaggcgcagggacaccccgctcaggcccgcgatgctgctgaggctgcgggatttctcgtaa

SEQ ID NO: 240735 - DNA, 683 bp, Homo sapiens
  chr19:50818506-50819189
  hyper
gagtcagtcaacatcgatgagaaagggggagacatcggggaggggggagagactccggattaggaggcaggttggtgcccaccgagcctcccccgccccattcccaccacagtccaccgcccttccccccctccactggtcccctcacctgaggcaaaaggtggggggcagcaaggcgggatggtgggcggcaggggcgtggggaggggctgggtggaatgcatgtgggagcagccagcggagagggcagggaacggtgcggccgccgtagcggggctgggggctgacctagttgtagggaaagagagcaggcagggggtggggtctgcaagggggctgagtggagcgaagctggcagtgcccttggggaatccgatgagaactccaggagcagtgggggggggtggggggggagggaggctcctccagaagattctaaggacggggtcgggggtggggggcggtgaggcggagggctggggagagggacatctttaaagggtccaagaaggctctgagcttctgacgggtgcgggaaggctctcacaggcatctcacagctaatgggactcaagatccagcaacagtgtgtgtggtttctgcaaagcctggggctgcctgcagggttctgcacccccgcagggagctctgtggcttttccaggcaacgctaagggagctgtc

SEQ ID NO: 240736 - DNA, 94 bp, Homo sapiens
  chr19:50819426-50819520
  hyper
ggggggatggagaaacgccgccgggatcatttcctcctctctggtgttttccgcgggaggggagcagtgaaatggggggcggctgagacatcaa

SEQ ID NO: 240737 - DNA, 100 bp, Homo sapiens
  chr19:50828891-50828991
  hyper
ggccttcgcagagcgcatgcctagttccccgccccctccgagccgggcgcgcggcgctagctgcggcaccgcagtgggggcgggccagccgggccggggg

SEQ ID NO: 240738 - DNA, 71 bp, Homo sapiens
  chr19:50829171-50829242
  hyper
cacagggaaaggtgggcacccgccgcagtgcgcagctgcagaggctggacggcgtcgggctggtttaaccc

SEQ ID NO: 240739 - DNA, 703 bp, Homo sapiens
  chr19:50832538-50833241
  hyper
gacgagtcggggccgccaatgagacggagcgattggctctttctaagagagcagggaggaggggcggggcggggcgtcaagggaggcgggaccggttactactaattgtgttcggcagcactggtagccaggggaaggcggggctagatacgatagagagagaccttactgaactgaaaaaagtgcgggcggggtagagggaggaggggacacatccaagctatttaaagacgcccgactggcctggaggggcggggccaccatgagagaggccgtcctgattgggctgagaaaggggcggagagaaacaaaacagatcgcacgccctcacctaaaacaccgctaggcaggacctggtggggaggagcattgcttggaagagacagggccgcagaaagtagaaacggtccagatgagactgcatggggcgggaactagagatggaggactttcccgcgcaagggggacaggctggactgaaagaggacacgggaagaacaaagacttagactcggtgagaaggtgttgaaacttgagagagtcctggaaacccgagagggtctggataggcctaagggagggagcggggctgaggctccaaggcgggcctggttagtcggggctgggcccggagaatgagtgtccggatggatgagtggtactgaggaaggtgagtggggtcgacaaatagaaaacgtcttga

SEQ ID NO: 240740 - DNA, 1327 bp, Homo sapiens
  chr19:50836199-50837526
  hyper
cacccggttccattcggagccttggtctctggacaccaaaggtgaaaatgtgaggactctctgcctacgatccttcgtcccctaaaaccctccaagtaccttggccccgaaagctcagagtcgaggggaatctccccgctataatctttgggtccctggatcccaagtcccccgtctccaaaactaggattcgggctgtcttaccgcccccggaccctgagccttcgccccctcccccgtactcaccccaagtcgaggcgaggtggggatgggggaatccggggctcgagatggggggaggggtgacccagccccggcagctctgggcagcaagaggctgcagaggggggagtgacatcaccgccggaggaggggcagcaccgctcccccaacccaggggcttcaagctccgcctttatggcggaccccggggtcctggaatgccaaggcagagaggagaaacaggagacgaggtccgagggaacggtatccccgccccttagaacaggaactggtaaacccttaccaattacagccacccccgactgccacctgtggctgccgtcgcgacctgtcgcctcccacgcatgttgtggctgcgcccgcccccgtcagggcgtgaccacggcgtggactacaacgaccgtgatgctccacggagccaggagcctttgacgaaaggcagcgtaggcgagggccttcatgggactcgtagtacaaggcccatcacaagggtgcgccgtggagaaaaggggtgatacccttcgcctccctctcttcctcaactccgtgggtccatgcacaaagctttctcttcaaaaagtacgctctgaaaagaagcaacctaggcaggttcgttcaatggaaatattggatttttactgagtagcgctagctctgctacccggtgcgcatgcgcatcacctgggcggcacccgcggtactgcgcctgcgcggtctcgcgccttcccaggtccgctccgcgagggcgagcgcgcgccagtcccactcgtgcgccgctcttcatgtccccgcggtcgaagacggtcacatacgcccccaagaaaacgtcgccgaggatccacacaggtactggaggcgaagcgatgtccaaggcccggaagccggacaagcagaggcggacgtcaccctgagcaaactgcaaggcgacaaggcggcaactgggtgtccaggccgcaggaaccaccatttccctgggagtccgtgctctctccgcccccaaccccggggacaagaaatgtttctgtggccccttccggccctagtgatgtccaactaccagctccaccctctcaactccagtcat

SEQ ID NO: 240741 - DNA, 240 bp, Homo sapiens; identical to SEQ ID NO: 205544
  chr19:50871938-50872178
  hyper

SEQ ID NO: 240742 - DNA, 212 bp, Homo sapiens
  chr19:50887230-50887442
  hyper
ggctgctgggcagcgacggggcagcgctccctacacggccccgggcgagaggcgggcggggggacgcggaggatgcgcgcgcaacacccgagggtgggaggagagagaacagaaccgcggcgcgcccagaccgcacgaggtcgtgaaggtagccgcgcggaggggcgtggcttcgggcagacaggtcatggggaggcggagttaagggaatt

SEQ ID NO: 240743 - DNA, 32 bp, Homo sapiens
  chr19:51142309-51142341
  hyper
ggcagccgaggcggcggcgggcggcagcccat

SEQ ID NO: 240744 - DNA, 656 bp, Homo sapiens
  chr19:51142566-51143222
  hyper
tcccggcaggtctcgcgctcgcgctgctgcggcttcatagacccggcgctgcaggatctgctgggagttgaagtccttaatgcctccgggctgcagagaggatgggattttttttttttttttaaggttttggggggttaagatgctggggtcccaagacgcttcaggggaggggaacgatgtccgggacttcgaaaagccacggagccctaagtccttaggggccacggaatgaggaaacgatccccccgcgctggggatcggtgggcgaggggtgggatacacccaggtgtttcgggacccccttccagggccacgtgcccctcccccggggtggccagagagcgctgcagcgctcccactccccggcccgagatccacgcgcctctgcatctaccccgcccccatgcgccggggccgaccccagggatttgactggggctggggctgtggcaggaggagggggaggagcggactcacccggagccgccgctgccgccgctgccgccgccgccgccgccgcagccccgcgcgccagccgcggtgccggctcggctcctcccctcgccactgtcgcaggtccgcggctcctccccctgcaccccctccttcccccactccgaacccgcggcaagaaagccgaaatcacttggcct

SEQ ID NO: 240745 - DNA, 1519 bp, Homo sapiens
  chr19:51161302-51162821
  hyper
ggggccatggagagcgggcgcgtgagcagcatccgctttgagaacatgaacgtcatctgtgggactgctgggcgccggaaccggtgagtaagcggcgggggcggggcctggagcgagcgggaggggcggggcccggggcgaccgggtaagagcgtggttggttttagagcgctgagggacgtggccaagagtgaaagcatgaatgggcggggcccggggcgactagataagagcgtggttggtgtaagggtgctgaggggcgggccccggagccactagataagagcgtggttggtgtaagggtgttgtgaggcggggcgacagtggagtgacagcttgggggggcggggccaggagggactagataagagcgagattggtgcagagccactgaggggcggggccaagagtgagcgcggttggaggtaaggtccggtgagatcagagagaaggagggatctcgagtgagtaggggcccgagtttgagtgacccagtagtgaccgggatagaggtctgagcctggaaaggcagctgtgagggggtggaagagactgagcacatagtaggtgtggggccaggggtgatagggtggggacaggcctggagtgcctagggtagagcgcagcctgcagtcgccagtggagggtcgggcctttgggcggtttgagatggagcctcgacagacagtgattaggacgcagaaccaggctaagagagcgtaaggagcctagagcgacccaggcgagagggcagggctggaggggagtttagggacggagcgatggtccgctggaccagggcctgtaaacgactccagggaccaggcagggactcttcgacgatcaaagccagggctgaaacgacctgcgagttccttttccgtccccaccccccttacaggtggctcatcgcggtcacggacttccagacgcgctcgcgcttgctgcgctccgggctcagtccccgcgggcttgcgcaccagatcgtgcgccacgacgacctcctgctgggcgactaccgcctgcacctgcgccgctccctggtccggcggcgcatgctcgaggccctgggggcggagccgaacgaggaggcctgacgcccgggcgggccccggcagcgcttgcgcaccgccccgcgggctggggccacccacccggagccccggaggacagggggcgttgccttcccaggaaggaggcggggccggctcgagggggtggatactgtgagtttaattataaagaatgacctggtacaaaagccatttctctctgcaaaatcttggtggggagtcaggggaagggaggtgatggggggtaggaatgaacccccatgttataatcccgcgtccctaatcttcctccagtccctgtacgtggacgcctgggtcccaatcccttgagggatgaactgaagcccgcgaaagggaagacctgggcaccggggctttcagcgcgtgccgagccctgtctcagcgagaatcagacgtcctcatccgcccccctcctcttcccctcc

SEQ ID NO: 240746 - DNA, 212 bp, Homo sapiens
  chr19:51171779-51171991
  hyper
gcggccacggcgggcggcggctgcggggaggccggggacgtgggcgacggcgcgggcgggaggccgccgcccttctggggctcgccttccaccttggtctgcttgaccagcgggcccttgcggccgcggcccgagcgggcgggcacgtacatggctgcgctggccgcccgcgggggcagctggaaatagcgtagagccgggccctgggagga

SEQ ID NO: 240747 - DNA, 36 bp, Homo sapiens
  chr19:51197476-51197512
  hyper
ggcagtcacacacacgcacatcgacacagccacact

SEQ ID NO: 240748 - DNA, 228 bp, Homo sapiens
  chr19:51198091-51198319
  hyper
gagggtcgccaccgcgggccggggcctgccggccggcccgcaaagcaggaggcggcgcgctccgttacctgtagatgtaccagacgctgcgccgccggggccccagggctggccagctggaggacagcgcggggggcggctgcggcagggagctcccaccggggccgcccccgagacccccgccgccgaccgcagacaaagccatcgccgccgcggccccagccccgg

SEQ ID NO: 240749 - DNA, 406 bp, Homo sapiens
  chr19:51198874-51199280
  hyper
ccgcgtgcacggacgcgcggacggagccccgcttccccggcagggacaccgcgggtgagagaggccccaggcggggacacgcagcccaccaccacagaccaacacgcaacgcacctcgacacagtcggcaagaaaggccaggacattcagactgggccccaaggccatgagcaacacccctcccccaccagagaagcccaggcggaggggcgaacacaccaccacagctccccgagagagcgtggaccccgagccagcgcggggagggggcggcacacgccaggaggggagacacacggaaggaccgcccagctccggcagggaggctggggttgggccctggctgccgggcgcacggcacagcacaggccaggccagcgcagacagggtccgggaagagcgggga

SEQ ID NO: 240750 - DNA, 31 bp, Homo sapiens
  chr19:51221589-51221620
  hyper
gcacagcccacctcgcgatctggggcccgca

SEQ ID NO: 240751 - DNA, 36 bp, Homo sapiens
  chr19:51227641-51227677
  hyper
cagcatgatccctgtctgtccgcagtgggccgcctg

SEQ ID NO: 240752 - DNA, 135 bp, Homo sapiens
  chr19:51228097-51228232
  hyper
ccgcccctggcggaccagactctccacctcctggctcccgcggttctgaccacgcctcctcccagccctccccatgagttcctggccccgcctccctccacccccggatgttttgtcctcgcccccttccagact

SEQ ID NO: 240753 - DNA, 71 bp, Homo sapiens
  chr19:51228832-51228903
  hyper
tcctccccgacccccagtctgggcgcttctgggagggctcttgcggtgccggcactcctccttgttagtgt

SEQ ID NO: 240754 - DNA, 42 bp, Homo sapiens
  chr19:51307923-51307965
  hyper
gctccgcccgaggcgtccaatacacacgcctgtttgggaaac

SEQ ID NO: 240755 - DNA, 216 bp, Homo sapiens; identical to SEQ ID NO: 205546
  chr19:51324264-51324480
  hyper

SEQ ID NO: 240756 - DNA, 330 bp, Homo sapiens
  chr19:51412503-51412833
  hyper
tcacttctggaaacagtgtgcggctgacagcacccactgcggatgcaccaggacgcccgagcagaacaattcgttttccatgaccagtgccgcctgccagggctgcgagtgcgggctgcagtcctcgccgtttatgatttggctgcagctaccagagacgagcgatcctgagggcggagtcagggatgggatcgggaccaggaggcgggcccagggttcctgggggtgggcttaccgagcaggggcgtggtcagaggttcaggagcagtcagggctcctcggggcggagtcagggctgggaacgggctcaggaggcgggcccagggctct

SEQ ID NO: 240757 - DNA, 360 bp, Homo sapiens
  chr19:51415995-51416355
  hyper
tggcttgcgctctacggatcttgtggagacgcataggtgcgggaaggggggtggggggtgagagggtgccgtagaccgcggagggtgcacggaggggcaggccgaggtcaggactgccgagaaacagcggggactcatcaggggagaggtggtgtttacagccacgaggccgggtgagatcatccaaggagtgggtgggtgtagaccgcggagccggcgcgggtgagggatagtgcccgcaggtgaccgcgacgaggcaggaatgtctctgtgtctctctgtctctcctgggtctctaacactctttccttctccttccttacttctttcccccacagcccaccccgtgtgtctgtctct

SEQ ID NO: 240758 - DNA, 841 bp, Homo sapiens
  chr19:51520079-51520920
  hyper
ttcctgaccacaccggaccctggcttctatccgttgcaggcaaccacctcctcctagagctcaaggagaatcagcgggagaggagtgacgggcccagaaatgcggaaaaggaccacaccgccccctggcggccacagcgcaagcccggtctctcctcctgctggaaggacaccggggaccgcacctccagctgtgggagttccgagagaccccgccctgcccgctcctccctggaggccgcctccacagccccccgtggcgtcctcggggatggatctcctcctacttgtttccgcagtgcgcggccgtcagcacccaactctggtccaccaggacacccgcgcagtggaacgagaggccgttgaagagcgagacctgccagggctgcgagccgcgcgcgcacggggagccataggcttcggggtccaagcgcgtgtcgttttgggggagcagcgccgcctctgcggctggagaaagaaaggggacggaatcaaagcacggagggcagggtctgggtttggggttggagctgggctgtggcactggactgcgttcggggacgggggacgcagccagaacgcgagggtggtagggaaatattgggggtttcgcgtgcaccgaagggaatgggaggagaagaagcgcgtgaaagtggaaggaagctgggatagggtagcgtggagtaatgagacagaatagggtgggtctggagggcagggactgaacgcagcgcgcctggagagctggctagaacgtcgctggtcgatagaggggcggggattgaacgcggcggggaggtaagggtgcggggatagaactcggggatcggggagaggaaggg

SEQ ID NO: 240759 - DNA, 1277 bp, Homo sapiens
  chr19:51521990-51523267
  hyper
agtgtaaaatggagcggggccgggatggggcggcgtaagaggaggagaaagaacgcggcgaagagtccacggaagagcgaggatccgggtggcagaaatcggacagggcctgagtggggcgggtcacccaggggccgagccagaagaagggcccagctgacttgggggcgggccgtgctccggagcgctgggtgggtgctggggtctcgggggaggagaggtgcgcggggcttggtgacgggaacacattctcctcccgcccgtgcctcccaccggcgcctctccccgccccctgcccccgaccttaccccagagttgcgccatcagcagcggcagcagcttcgccagagcccgggcgccagaggcggcggagaggtggaggtgcggagctctcatggccaggatctgctggggtgtgtgcaggggcgggttaaaacagatgctccgttagagacccccacctcgccgcgctcatccgcccagcctgggccaccccagcccgcaagcacccttttgacctgcagccgataaccccaggggctggcagacgggagattcgggctggaacagcggtaatgggcacaattaccctaatgacgcccctcgcggcatcttcccgtcctccctgtgcccgagtggagcgctctccgcgccccagctaccctggctgcagccacgccgcgcccgaggtttccccctccttcacgcgcggggtggggatccgaggctcggagccagtgggagcctctttctcaacctcacagcggggggacttccgcgtcccgcaggtggagaaaccgaggctctaagccggctcctgcctgtggcccgggggtccccacccatcctctcgcaatccaccccaacccgggtggggtgcaggtagcttcacctgggagtcgccgataggaaggagggaggggacccagacgtgcctctgccctgcctgtggtctgccgctggtatcctctgcccagggacccctggcgggaccttcccttttaaccccaaggagtccggaagcttctccaccctcccctacccccacccccgggctccctccctttccctctgtctaattgtaccgtgggtgaggctggcactcctgggtcccagattcctgctctgggaggggccctggaatacaggcttctcccagtgcccgaaacgcccccttttcatcccttttggaactggcttccgtggggattctccgggtcccggtgccaagaaggcttcccaggcgcggggagagggttcacgtccccagcaaggct

SEQ ID NO: 240760 - DNA, 609 bp, Homo sapiens
  chr19:51568030-51568639
  hyper
gggaggggctgctgcgagggtattttgggaggtgaagggtctggggtcggagggccaacctcagccgggaaaccaggtcacccagggacaagcaggaagagctctgagctgtccccactggacccggccccgagtgggcggggggcggagctcgcggctcccacgccccctccccctccggcctgacccctcctaccattgtcccgaatggccgccgcgcctccacccccgcgcattcttacctcctgacaaggccaaggtcagggaggcgatcactagggccaggggccacatggctccgggatcgggaggggagggcagggcgggcggggcctgaggagaaggtgaagggggtgttgagggcgtgcccggaacctccgcgtctgaaacctctctgctcctgaatgtctcctcgcctcattcactcttgacagccctgaccctggaatctgccccccgcctccaattccatccttggtgggggtgcagtggcgaggtgggaggaacagtgtgcaacctcctggggctccggcgtgcagcccctcaccccaggaagccgtccctcctcccctgccctctggcgagctgggtggtcggtgcactctcgcc

SEQ ID NO: 240761 - DNA, 216 bp, Homo sapiens; identical to SEQ ID NO: 205553
  chr19:51842632-51842848
  hyper

SEQ ID NO: 240762 - DNA, 419 bp, Homo sapiens; identical to SEQ ID NO: 205554
  chr19:51869575-51869994
  hyper

SEQ ID NO: 240763 - DNA, 58 bp, Homo sapiens
  chr19:51870568-51870626
  hyper
tctgccgggtctgcgggagtcgttagtgtgttggggagtccccgagaggtccccgggg

SEQ ID NO: 240764 - DNA, 164 bp, Homo sapiens
  chr19:51897346-51897510
  hyper
ctgctcaagtctagcgtcatgggattgttctagcttgttcttttattgcttctcctattactaagatcaggatctgacgccatttggaaaccagggtctgaccgcttaccacgtacctcgccctttaaggctttttctgtcccgtcccccgtgcccctgcggcg

SEQ ID NO: 240765 - DNA, 260 bp, Homo sapiens
  chr19:51925114-51925374
  hyper
ggcgcaggtgcggcgtgaggaccgcgtcctgaggagggaggggcgagggccagggtcctggagaggatggagagcccacgagtggctgcagctgagaccccgagggagcccaggaggttttgtcggaagaagggcgatctggaccttccctgaccagcgtctttgtgtcctttgagctccggacctggtcctgggttcctcccacctcgggctgtgctgcagttcaggacgccgcccccagggggcgctccaccttcaga

SEQ ID NO: 240766 - DNA, 479 bp, Homo sapiens
  chr19:52074272-52074751
  hyper
tccatttgtccttggctgtacggaataaaagccctttgacgatggcggcctccaatatcataatccgtatgggtgcggccatgccgtcctccctaccaagtttctgaagttgaatgaaccgcggaataaaggtacgccgttatacgccatgataactgttggcggagcgtagcttcaaaagtgttagtgggcatgcgcgcggttcaacagcgcctacggaaatcctaacgggaatgtaacccaaaccggaagtggcctagagcgaccatttagcttctgttgttaagtggatctaagcctatgtcgcttactggacgctgaagtgattgggaatattagcagtgggggttctgtagggtcaggaaggggcggctggctttgggggagtgatgaggggcttgttgggggtgggggtgcgtgataaagggatttctcggctgaagacgaggctgtgaggtgagtgacgggcttgttttggc

SEQ ID NO: 240767 - DNA, 653 bp, Homo sapiens
  chr19:52097285-52097938
  hyper
ccgagagttgcgcacgcgtggagatctgcaaaacgctccctttcagctccgcgcatgcacagagaccccaccccgcaagtccttgcccttcggcctgggcaggcgtccactcccatggctgcagggcgcgccgaagagcccactctgcatccccgagacgcggcccaatcctaggaatgtgcttagcgcaggtgctatcttcccttttcacattcccaatctctttctccgccccctcaaactcttgccatactcccacaacagcagaaaatctgaaaaaaaagtccatcccatctttgcactgacagcagtgcacagcagctggcagagaattctggcacggctattgtgcttgcgcaggcgcagacgggaagcgggccggaccggcctagtacactctgggaggcgtgcgcagaatgcgcagcgctgccgcgaggatctctgggaactgtaggcccagtttgtccgagagccgcaagtgtttcgggacgacgcaacgcaggggcacctgggagtcgtaggcggatgggcccaaagccttccgggagtcgtagtccttccgcccgctcctcgtttctttggaggttggcccttccagctccagttctgcccaggtgagcgcccatcccgcggccggccggtcctggcccttt

SEQ ID NO: 240768 - DNA, 34 bp, Homo sapiens
  chr19:52207058-52207092
  hyper
aaaaaatacataaataaaagcagtttctaggggt

SEQ ID NO: 240769 - DNA, 133 bp, Homo sapiens
  chr19:52222918-52223051
  hyper
acccgccggtgctccaggtacgcgaagaggctctgcgccaccaggtgcgctgaaaggaaggccccgtagaggccgaaggccaggaggccgtagcgatcggaggccagcggcaccccggcggcgtaggcccagg

SEQ ID NO: 240770 - DNA, 251 bp, Homo sapiens
  chr19:52390958-52391209
  hyper
aaacgaactccgagcgaggactccccgagagctccccgcaacacggacctcacgcgctagcgaacaacagaaaaaaaaaagcgcgctctccctgcccctgaaacattcccagaagcccacgcagaccagaccgatgacctgtctccactgctggaggcgagtcagggacccgaagtctctaaacactcgcctctacccgccgccccgcgaaccccacacactgcagacgcgacactcgcaagtttcgggga

SEQ ID NO: 240771 - DNA, 742 bp, Homo sapiens
  chr19:52407644-52408386
  hyper
agccggcaagggtgggcggttatagtttcacaactcaaccccagccaggggcctgggcttgtaaaataccagattttacaagcctctgagccccacatgcctgggcctccccgaaacacttaacacacatccccgattcaccccaaaacctacaccacacaccctcgtacgctgcccagcaccccggcttcatcaccgactttaaactgcagcatttggagtgataataatggcgtcggtgataaagccggcgtgctgggcagcgtccccctagagttctccatccagtgatccagaggcctactaacagagtgaccctcagagaccccaaactctgacgccgagtctcagtcgctgaactcgacagacctttaacgcccgaccacaagaactctcccacgccggaccgcaaaggcaccccaacccaaaggctccaccgcccaggccgccagctctccccacaggctcctcagaagctccctacccctttaacctactccacggagagacccaaacactcacctgattttcttctggctacacctaaattccctgaatgcttcctttcctggcccttaaaccccggcactggcctatggcggcggacgagggcgcgagtcaattctgccgcgctaggacgatgggacatgggcttctcttcgaggaggtaacatgtccgcgccctgagccacggctctctgggcgcggccatcttggtagatctgccgtacagaagggaaac

SEQ ID NO: 240772 - DNA, 482 bp, Homo sapiens
  chr19:52430243-52430725
  hyper
cctccacatgtagctagatgcgttttcgcggtatatgactcagggtgcgattgctctttttcctctgtggagaaagcgttttcacttgtacggacacctaagtgttaagatggccgcgcccattgtgtcattcccgtcattctttgtgcaaagcggatgacttttctccccagcccgctaaggtgcacgtagccataccatgtttgtcttggctaagctcgaccctctgaaaataaatgaaacttgggcgcaggatttaggtgccaaaatatggagttcttcaccgtcccgcgctatccctgaatacttgggcagaaaaggtccactttaccttccgtacgtgcaggattcaaagatggctgcctccagtatccgtgacgagaggacgcgaacttactacctcccagtcgtccgtgctccgtacacctgcaacttcagaccttcctcggccgccgtaggccggcttggaggctgggggaggg

SEQ ID NO: 240773 - DNA, 923 bp, Homo sapiens
  chr19:52489406-52490329
  hyper
tgaacttgaccccccgatctgtaaatagccaccccaaggatcagaagagtagatatatggtttcgaactaatgctgggggctgtgtcgccttttgccccagtaaccgaggttcgaacctcaacccaggacccagggctccaaagtctcgaaagcttcagccctcacaagcctttgtaccacagacactggccccatgcctcttactcatccgaaccacggaccagacactctacagcgatggacatcctcccagactccaacatcactgagttccaaattaaatcctgaacccgaagcagacgccgcatcgatcctaatcgccacctccatcctttacaagcagagtgatccataccttgacagttaggacacggccgttgatcactacagacccttagtcactgtactcacaccaaaggcacgcggaccacagacagggggatcacagactcccaccaggtacctcccaaatgcctataccccggcgctccccagtcttcctgccaaaaactatgtggtccagggtacaccacgtcctcagatctcccaaaccttccactgagacaaaacctgaactaggacaaaaaactttcagggacaaaaccacacactgacctctattttctccagatacacaagaagggcctcaacgttacacttccgtaaactgctcctacttctggagtcctcgcacgggtttatggtccacctacggcggccgaggagaacctaaaatgtttaaaagagcaaggacaagcgcatttacggcatttcctactctgtaaaatggccgcgcccatagccgtggctcctgacggcagccatgtttgaaaattggacgcacagaaggcagtggcaggtttttgagccaggagccagggaagaagagaagtcactgaaatcgcctcgtttcctggcactt

SEQ ID NO: 240774 - DNA, 568 bp, Homo sapiens
  chr19:52511224-52511792
  hyper
cctgcgataggaatcggacccacgctaagctcctgaaagaattccactggcgtcgccaaacgctggcgccgacagataccagtccatcaccactgtccacgaacacgcccagccacggacagaatttcctcccccgtcaccacagcgaccacccagtgactgaacttacttcccagaacttggtgggctccggcctcatctctcggcctcctcagtgcctgacggcgactatccagggtcggaggcgttcccagcgtttgcgcagatgcaagatggccgcgccctcgtcgccttggctccatgggggccgccatctttgagtatctgacgtacacaaggcaaagggcgcgttttggcgctggtgaccgggggtgaccgggggtgaccggggatggccgggaagatgaaagagcactgaaactgtcccatttcctggcacctcaacccttcataaatacgggtccatatacagaggctccagtttacacaagacaaaaatggcgtggaggtaaatccctttcagcagctgaatagaaggctaagatggccgcgacgtttacactttgta

SEQ ID NO: 240775 - DNA, 908 bp, Homo sapiens
  chr19:52551811-52552719
  hyper
cccctccaaaaggaaacacccgcccccgcctcccccaacccccgcgctacctccaccatatagcgccaccaacaacgcagacgccctcagaaagctccctcccaccacgtttccacgccctgacccacacactgacctgactctccttggaatcgccgcgacctcttaaaagctgaacttacttccctaaacttcttccacttctgggcccctcgcccaactccctccccctctaaacctccagagacggtcagccgcgtttccatggagagcggaatgcggccttccggcttttcctcaggaggagacgcgtccgcgccggcgtcgcctcgccgctctgggggcggccatctttgagtacgtgacgtacagaaggcacagcggccgggagacgcggtggacggaggcctcttaaactgtccgatttccagacacctcagccctggcagaaaatggagagcttatcagaggcttgagttcacacaggcagacacggcgtgggggtaaagtcctctgaacagacacggaacagaaataagttagtcttctcctcgcaggggacagtgaacggcgcaaacttctcaaaggccagaacccattattaccacaaaggcgcggcatcccttcttagcggttatgatggctgtgacgtctcagctcaatggaaaattaaagtcacctctgggcacctcagtcactattgtaaatgcgaagcgttttagaagccgtataaaaactgaagcaagagagactagaacaaaaaataagcgagcggtgcgttgcaggtaacggagccagagcccttaggggagagcatcatgggggcggccatcttaggggacgttcggtgtccgtacggcagaacatattctctctgagaagcttgcggtggaactggcccatggaaa

SEQ ID NO: 240776 - DNA, 190 bp, Homo sapiens
  chr19:52642997-52643187
  hyper
cctgttgcaggggcgaaggggctatgggtattttaaggtccgtagcgatccccagatcactggtacggagaagtgaggactgcaaagtgcacgtttaatccaggcagacggagcgaagtaatgtttaatccacgtagactgaaacacacacacagcgataaggcctttccctggcgcaatctgcttccgg

SEQ ID NO: 240777 - DNA, 47 bp, Homo sapiens
  chr19:52674935-52674982
  hyper
caggtgggctaagcgggacgggcggtgtgggcgggacctgtttggtg

SEQ ID NO: 240778 - DNA, 58 bp, Homo sapiens
  chr19:52693145-52693203
  hyper
aatcggaagtgggcgggacttcacaagtccggaccaaagaaacgcgagcttagccctg

SEQ ID NO: 240779 - DNA, 219 bp, Homo sapiens
  chr19:52800101-52800320
  hyper
ccgaccgcacggtcggcttaagattaactttaatagcaggaattttcctggatctaatcattagccgactttgctcagtcccggcaagagtacagttccgagacagctgagttgctccagtctccttgacaggtctccccggcaaaacccggaaaacagaggcactggaagcgaggcggagggaagcgcaagccccactccgccccgcccccgcccccg

SEQ ID NO: 240780 - DNA, 638 bp, Homo sapiens
  chr19:52800380-52801018
  hyper
cccccgcccccgccccgctcggacccctccgctgcgcgcgcagtttcccacaaacccggaagcggatcgcgtggagtgaaggtcacgccgcggcgcgtgagtttccctttgtgtaaattaatctgcgcttcccaactcccccgcgcttctgtacccgggatctgaggggccacacagaccttgaaatcctcgcaccgctccctctaccccgaccaaattcaggcgtctccgtgagagtcaggcggtcgcttccctgtgtgtttaaatcgctcggcggcgggtcctgtcccccgtccttctgccacagggccatgtagtcacctcctgtcgcggagttttcctgtttcaagtccttcagtgatgcttacatccgccccgcacagcgtaaagtcctcccccgctaggcggattccggtctatgcggtcccccaagcctcgcctttgttggccctggagcacagcgctccaatctcaatccaggagaagccgcgtcttctgcccagtgctgggattctgcagacgccacccatctcttgatccagaccctacctttaccctccttgatacggggccccgctactccccaggcctcctcttcccagacaccgcttctcctaaccctgcgtgtggggaggtga

SEQ ID NO: 240781 - DNA, 697 bp, Homo sapiens
  chr19:52839384-52840081
  hyper
gcctcactgccagcaaaacccggaaaacagaggcactggaggcgtggcctagggaagccccgccccgtcccgtcccggtccgctctctatgctgcgcgcgcgcagttttttgcagacccggaagcggatcgcgtgggtagaaggtcacaccgcagcgcgtcagtttccctttgtttagattcaatctgggcttcccagctcccccgcgcttctgtacccgggatctgagagtcaacacagaccttgaaatccccgcaccgctccctccaccccgtgtaaattcaggcgtctccgtgagagtccggcgctcgcttccctgtgtgttaaaatcgctcggcgacgggtcctgtccccgctcgttctgccttgggccaggtaaacacggattttcgagactcctttccgcttaaaactctttactgacccaacgtcctgccccgcgcttttaaaagtccttaccgcaaggtggattcccgcccggggagcctcccaacctcgcccccggcccctgaagcgcagcgccgcagccccagtcccggcgggggaggccgcgtcctgtactgggtcctgggacccttgagaccccacacttctaataattcagccccacccttttcctccttgatccgggccttcctactccccaggcctccccttcgcagccatcgctactcccgacccccgggtgtggggacgt

SEQ ID NO: 240782 - DNA, 148 bp, Homo sapiens
  chr19:52872917-52873065
  hyper
ggtagctaggaccacatgcgagcgcccctacagccgatttaaaattaattttaatagcaggaattttcctggatctaatcatcaacaaactttccctctgccgggacacaatctatttccagatagctgagttcttccagtctccacg

SEQ ID NO: 240783 - DNA, 287 bp, Homo sapiens
  chr19:52873305-52873592
  hyper
cacacagaccttgaaatccccgcatcgctccctccaccccgactaaactcagacgttctaatgagagtctggcggtcgcttccctgagtgttaaaatcgctcggaggctggtcctgtccccggtctttcaccacagggccatgtagacagctcctgtcgcggagtttgcctgcttcaaatccttcagtgacccctagacacggcccgcgctgcgtaaagttctcacccgcgagatggatccacgtctttccggtcccccaagcctcgccctcttttcacaggcctgc

SEQ ID NO: 240784 - DNA, 503 bp, Homo sapiens
  chr19:52900861-52901364
  hyper
attttaatagaaggaattttcgtggatataatctacaaccgattttgctctgcgcaggtaagatccgttttcagaccaaaaccctgaaaacaagcgcagccagtcaagcgaacggaagcgcaggcccggcccaggctttgtcccggcccgccctggtcccagccagtccggcctctaggatgcgcgcgcaatttcgtgcaaacccggaagcggaccgcggggggcgaacgcctagagcgcagtttccggtagacccggaagccgattgcagggagaaactgttttcgcagcagtgcgtgagtttccctttgtctatgttaagtctaggctagccagttcttctctgcttctatacccgggagctgaggggcatgcagaccttgaaatcccggcaccgctccctccaccccgagtaaattcagacatcctttgagagtctgggagtcgctttctgcgtgttaaaatcgcttggaggctggtcgtgtgcccggtctttttgtcat

SEQ ID NO: 240785 - DNA, 420 bp, Homo sapiens
  chr19:52956715-52957135
  hyper
ttctctcgggtctcgcccatccctggcctcagctgcgcgcggtttcctggaaacccggaagtgaatcatggggcgtgaactcgcaagcgcagtttcctgaagacccggaagccgatcgcgtggggagccggtcttggagcagcgggtgagtttccctttgtctagattagatccgcttccagcgcttctgtacctggtgttggcggaggggttcttacggatcttaaaatcctcccgccgttccctccatcctaggtatattaatacgtcgccaagaaattcggaggttaaaatcgcttggaggctgctggtcctttccctgagctctctgccttcgggccacgtagacgcttttcgtcccgtttacctgcttaaaaccctttactgaccactccttcggtcccgcgtcatgtaaaagcc

SEQ ID NO: 240786 - DNA, 424 bp, Homo sapiens
  chr19:53031101-53031525
  hyper
gagaggccgggtgtcgcttcctttcgggtttaaagtcgtctggaggctggtcccgtcccgggtctgtctgctatagggcaatgtatacactttctattgcgtagtttttctgctcaaaaccttcttctgactcttccctcctcgcgctatttaaagtcttcacccacgaggtggattcttgcccggggcgcacctcccagccacccctcgtcggcccctggagcgtcgcgccgcagccccagtcccagggaggccgcgtcctctgcctggtcctgggatcttgcagaccccatccttctcccaaggcgccgtcccccctcctcccacctccctactcgtgccagagcctgcggctccccaggtctctcctccgcagtcaccgcttccattgaacccacactgggaaggacgcagggccctgtcc

SEQ ID NO: 240787 - DNA, 817 bp, Homo sapiens
  chr19:53073242-53074059
  hyper
gcccaggcagggctttgcattttacattcttgtttgcatccccgttccagacaattccagggctttcgaatcgtgcttcagccttcctgaccgctctcgcctccaaagcccgaaaaatagagtcgctgggagcgaggctgagagacgcacaggtcccgccccggccccgccctctgccggttctaaagggcaaggtctctccgcctggggccccgcctctacctcgatcaggccccgcccaccttctcgttggctccacccaggcctggctttagtcctgtgcgcacacatccgcgcagaccaggaagcggatcccgtggagtgaaggtcgcaccgcggcggtgagttttgctctgtgttgtattaagtctgcactccccatatccccggcacttccgtacctgggacgtggggtcaccacagacctgtaaattctcgcccatcttccttcaaccagagcaaatgcagacgttcccctgggaatccggaagtcgcttccttttgtgtttaaagtcgccctgaggctgttcccgtctccagtctttctgctacagggcgctgtatacacttcctatcgcgtagtttctgtgctcaaaaccgttttttaactcctccctccccgcgcttttcaaagtcctcacccgagatgtgtatttccgcctgggcgcctcccagtctcaacctttaggcgcctgaagcgcaaacgtcgcgatcccagtctcagggaggccgagttctctgcctggtgctgggatcttgtggaccccaccgaaggcgtcgtcgcaccccacctcccgcctcatgctgggccttgctg

SEQ ID NO: 240788 - DNA, 1093 bp, Homo sapiens
  chr19:53104069-53105162
  hyper
gcaggtggtgacttcgctcctccctggcctgagcactccgtcccgcatcccaggcggtggccctagggaagtctctgaagctgagcacagggtggactctgcccccaccgccgacccgccctccccgaccccgagtgaatggagaatagaaagggagaggatttctgttctgtcctgtgggccctcagtatgaaatcgtagttctgcccaggcaggactttgcatttcacattctagtttgcatccccgttccagacaattccagggcttttgactcatgcctcagccttcccggccagtctcccttccaaaacccgaaaaacggaggcgctgggctcaagactgactctgtcccgccccggccccgccctctgccggttctaaagggcaaagtctctccgcctcgcgccccgcttccgcctgcccaggccccgcccacctcctcctggaccccgcccaggcctggcttctgtcctgcgcgagcagatcagcgcgaacctggaagcggagagcgtggagtgaaggtcccacggcagcgcgtgagtttctctctgttttatattaagtctgtgcgtcccaggtccccggcgcgtctgtacctgggacgtggggtccccacagacctggaaattctcgcccgtcttcacccagagcaaattgagacttccctttgagagtccggggttcacttccttttgggtttaaaatcgccttgaagctggtgcggtctctggtcttgctgctatagggcaatgtatacactttgtattgggtagttttcctgctcaaaacctttttctaactcctcccgccccgcgctttttaaagtccttacaggtgaggtggattcccgccctgggcgcctcccaccctcgccttcgacggcccctcgagtgcagcgccgtgcccccagtcccgcggaggctgcgtcctctgcctggtcctgagatccttcagaccccaccattgtcttaaggcgccgtcgtcccccacctcccttctcgtgccgggccctgctgctccccaggtctcctctccgccgtcaccgcttcccctgagcccgcgttgggaaggtgtccggggcctgtcctgt

SEQ ID NO: 240789 - DNA, 889 bp, Homo sapiens
  chr19:53140894-53141783
  hyper
tgtctcccaatgcctttggccgacacaatcacaggagggtttggataagacgcctgcatcccggaggagctcgttttccgggggctggagctgggcaggcaagaacaccccgtgtcacaggacaggccccgggtacctccccaacgcgggttcaggggaagaggtgactgtggaggagagacctgtggagcagcagggcccgccacgaggagggaggtgggggggagacggcgccttaagacaaggttggggtctgcaggattccaggaccaggcaaagtacgcggcctccctgggactggggccctggcgctgcgctccagtggcctacgaaggcgagggtgggaggcgcccagggcgggaatccagctctcgggtgaggactttaaaaagcgaggggcgggaggagtcagaaaacagttttgagcaggaaaactacgcgacaggaagtgtatacatcgccctacagcagaaagaccggggacagcccagcctcagggcgactttaaacccaaaaggaagcgatatccggactctcatggggacgtctcaatttgtcctgggtgaaggaagaagggagagaatttccaggtctgtggggaccccacgtctcaggtacagcagcgccggggacctggtaagcgcagacttaatagaagagcgaaactcaccgccacggtgtaactttcactccacataatccgcttccgggtttgcgcgcatgtgcgcgcgcagtacagaagccaggtctgggcggggcccgcgaggtgggcggggcctggatgaggtaggggcggggtgggaagccgagagactttcccctttagaaccagcagtgggcggggccagggcgggacctgtgagtctctcagcatcgttcccagcgcaga

SEQ ID NO: 240790 - DNA, 814 bp, Homo sapiens
  chr19:53193125-53193939
  hyper
cacaggacaggccccgggcacctccccaacgcgggctcaggagaagcggtgactgcggaggagagacctggggagcagcagggcccggcacgaggagggaggtggggggcgacggcgcctgaggacaagggtggggtctgcaggatcccaggactaggcagaggacacggcctccccgggacaggggccgcggcgctgcgcttcagaggccgacaagggcaaggctgggaggtgcccacggcgggaatccacttcgcgggtgaggacgttaaaaagcgcggggcgggaggagtctgaaaatgattttgagaaaaaaaaaaaaaaaacaacaacaactacgcgataggaagtgtatacattgccctagagcagaaagacaggggatgggaccaacctcagggcgactttagacccaaaaggaagcgacttccagactctcacggggatgtctctatttgctctgggtgaagacgggagagaagttccagatctgtggggaccctaggtccgagggacagaaacgctgaggacctgggaaatgcagacttaatacaaaacagcgaaactcaccgccgcggtgtgaccgtcactccacgcgatccgcttccagatttgcgagaatctgcgcgcgcaggacagaagccaggcctcggcgggccccgcgaggtggtgggcggggcctgggccgggtggcggcggggcgcgaagcagagagactttgcggtttagaaccggcagagggcggggccggggcgggacctgtgtgtctcacatcctggctcccagcgcctctgtttttcgggtttgggaggcg

SEQ ID NO: 240791 - DNA, 378 bp, Homo sapiens
  chr19:53237619-53237997
  hyper
gcatcccggaggagcgcattttccacgccctggagctccgcaggcaagaataccccgtgccgcaggacaggcccctgggacctccccagtgcaggttcaatgaaagcggtgactgcggaggggagacctggggagcagcaggccccggcatgaggaggaaggtgcggggcggggggggggggcgcgacggcgccttaggaccaggatggggtctgcaggatcccaggacctggcagaggactcggcctccccgggactggggctgcggcgcggcgctcccggggctgaggagggggaggctgggaggcgccctgggcaagaatccacatcgcgggtgaagactttaaaaagcgcggggcgcgaggagtcagaacaagg

SEQ ID NO: 240792 - DNA, 159 bp, Homo sapiens
  chr19:53360444-53360603
  hyper
gactggggtcgccgcgctgtgctccaggaacccaggagagtaaggctgggaggcgcacagggtgggaatacacctctagggtgaggactttaaaaagagccgtgcggaaggagtcaaaaaacggttttgagcaggaaaactacgcgataggaaacgtat

SEQ ID NO: 240793 - DNA, 34 bp, Homo sapiens
  chr19:53360913-53360947
  hyper
gagccaacgaggaggcgagcggggcccgggtgag

SEQ ID NO: 240794 - DNA, 695 bp, Homo sapiens
  chr19:53400384-53401079
  hyper
ctttcttgattgcatatattcgttttccaggagttggaactaggtagcaacaccgcacaaggagggaggtggggagcgacggagccttcggacaggggtggcgtctgcaggatcttaggaccaggcagaggacgcggcctcccgggaaccggggttgaggcgcggcgctcctgaagccgccgagagcgacggtgggaggcgcctagggctggaatccagctcgcgggtgaggacttgaaacagcgcgaggcgggaggacaggtcaggaagggttttgagaaggaaaattccgcgataggaggtgtctgcacgaccccactgcagaaagaccgaggacgggacctgcctcagggccactttaaactcgaagggactcacggactctcacccggacgtctcaatttgctctgggttgagaaagaggggccgcaatttccaggtctgtggggactcaacgtccccggtatagcagcaccacaggactgggaagcacacataaaacagagcgaaactcacgcgctgtggtgtgaccttcagtccctgccatccgcttccgggtctatgccaatcagcgcaggacagaggccaggcctgggcgggacccccgagaaggtaggcggggcctggactaggccgggatgagacgcgaagaggtgggcggggcctgaacaaggccggggcggggttgagaaaca

SEQ ID NO: 240795 - DNA, 754 bp, Homo sapiens
  chr19:53426105-53426859
  hyper
gaaagcggtgactgcggaggggagacttggggagcaacagggcccggcatgaggagggaggtgggggggagatgacgccttcggacaagggtggggtccgcaggatcccaccaccgggcagagaacgcggcctccctgggactgtggtgtcagcgctgggctccaggggccgacgagggtgaggctgggaagcgccagagcagggatccacctctcgggtgaggactttaaaaagcgcggggtgggaggagtcaacaaacggttgtgaacgggaaaactacgcgatacaaactgtatacattgccctatagcaaaaagaccgaggacagggcagcctcagggcgactttaaacccaaaaggaagtgacttccggactcctaggggaatgtctccatttgctcttgttgaaggaagaagggcgagaatttccaggtctgtggagaccccacatcccaggtacagaattgccggggacctggaggcacagcctcaatacaacacagagcaaaactcaccgccgcagtgtgacttccagtccacgcgatccgcttcctggtccgggcgaatctacaagcacaggacagaagccaggcctccgtggagccaacgaggtgggcggggcctgggcgaggtaggggcggggcctgggcgaggtaggggcggggcgccaggcggagagacctgccctgtagaaccggcagacgcggggcgggggcggatctgtgcttctctcagccgcgtacctagccgctg

SEQ ID NO: 240796 - DNA, 71 bp, Homo sapiens
  chr19:53445892-53445963
  hyper
gtaggcggggcctgagcgaggtaggggcggggcgcgaggcggagagaccttgcccttcagaacagacagag

SEQ ID NO: 240797 - DNA, 1088 bp, Homo sapiens
  chr19:53465693-53466781
  hyper
caggagtggccacaaagcaccggccaccctggggctgcggggctgcaacgctgcgctccaggggccgactagagcgaggctgggaagcgctcttgcccagggcaagaatccagctccgggtgaggacttgaaacagcgcgaggcgggaggacgcgtcagaaagggttttgctaaggaaagtttcgcgacaggaggtgtctgcacggccccactgcagaaagaccggggacgggaccagcctcagggcaactttaaactcaaaaggaagcgactcacggactctcacccggacgtttcaatttgctctgggttgagaaaagaggggccggaacctgcaggtctgtggggaccccacgtcccctatatagcagcaccagacaactaggaaacgcacacgccgccgtgcaactttcagtccacgccatccgcttccgggtctgtgccaatcggcgcaggacagaagcgggacctgggccagatccccgagaggtgggcggggcctgggcgaggccggggcggggtgcaaaggacaaggggcccggcgcggaagagaagagtcttgggctgggaggagtccgcgggggcgggaaaggggcggggcctgagcttttctccatctcgctctccgcgcctctgttttcaaggttttagaggtgaaacccgccagtgaggctggagcagctcagcagtcagggaaatagtacctccctgagaagtcgccgtgtggcggtaattggatccgggaaagttccttgctattgaaatttattttagcaatttaattccaaagcctggaagttgtctacggcaggaatgcaaactagaatgcgaaatgcaaagccttgcctgagcgaaaggtacaatttcatgctgacggtccacagaacagaatagaaatcctctccctttcaattctccattcactggagtgggagagtccacactgtgctcagctcctgagacttccctagggccaccgtctggggtgcggagcagaggagtgtgcttaaacacagcagggatgcgggcggggtggcaggagtctggggtccccgctactcaggaagcaggggcgagaggatcgctga

SEQ ID NO: 240798 - DNA, 387 bp, Homo sapiens
  chr19:53496055-53496442
  hyper
cgagcagcagggcccggcacgaggagggagttagggggcgacggctccttaagacaagggtggggtctgcaggatcccaggaccaggcagaggatgcggcctcctcgggacgggggaggcggcgctgcgctccagggaccgacgagggtgagggtgggaggcgcccagggtgggaatccacctctcgggtgaggactttaaaaagcacggggtggagggagtcagaaaatagttacaaacaggaaaactacgagatacgaagtgtatacgttgccctatagcagaaagaccggggacgggtctagcctcagggcgactttaaacccaaaaggaagcgacttctggactctcaccgggacgtcaaattttgctctggggattagccgg

SEQ ID NO: 240799 - DNA, 780 bp, Homo sapiens
  chr19:53496622-53497402
  hyper
aaggaagaatggtagaaatttccaggtatgtggggaccccacgtcccctgggacagaagtcccagggacctgcggagcgcagacataacacaacacagagcaaaactcaccgctgcggtgactttcactccacgcgatccgcttcccggtttacgctaaactgggcgctcgggacagaagccaggtctcggcgggacatggcagggggtgggcggggcctgggcgaggtgggggcggggcgcgaggcggagagaccttcccctatagaaccggcagggggcggggcgcgaggcggagagaccttcccctatagaaccggcagggggcggggcgcgaggcggagagaccttcccctatagaaccggcagagggcggggcgggatctgtgagtctctcagcctcggcgtgtttttgggttttggagacgagacctgccaggaaagctgaggcatgattcaaaagccctggaactgtctggaaggggaatgcaaaccagaatgtgaaatgcaaagccctgcctgggcggaacgtattatttcatgctgacgaccacagaacagaatagaaatcctctccctttctattctccactcactcaagagggagagtccaccctgtgtcagcttcagagacttccctagagccaccgcctgggatgcgggatggagtgctcaggccagggaggagtgaggtcaccacctgctggttaaacacagcagagatgcgggcgcacaagggggcgtgggagggcgcggggtgggatcctgagttcccagctac

SEQ ID NO: 240800 - DNA, 769 bp, Homo sapiens
  chr19:53561218-53561987
  hyper
gcacctccccaacgcgggcgcaggggaagcggtgactgcgaaggggaggcctggggagcagcagggcccggcacgaggaggagggaggtggggggcgacggcgccttaggacagggtagggtctgcaggagcctaggaccaggcggaggacgcggtctgcggcgctgcgctccagggccgacgacggagaggctgggaggcgctcaggacgggaatccacctcgcaggtgaggactttaaaaagcgcggggcgggaggaggggtcaggaaagggttttatgcgggaagaagacgcgaatggcaggggacagggactggtctcagagcgagttttacccacatggcgaggtccgtatttacctcgggtgaagggcgcgatgcggggattttaaggtcagcagagcgggtgtggaaaagcgggacggcgaatcgaaggcttaatctacacctaggcacactcttgctcggcggtgtcaccttcacacaccgcgatccgcttccgggactccaagaaactgcacgtgcgcgcagagcccgggtagcctggggcggagcccggggagaggcggggtctgcagagggaccgcgggggcggggcctgtgcagttgtaaggtaaaaagcatagagttgtgtgggccccttctgttggaaagcaaaatgttttcttcccaccaagatgaaaacggtttatctcaaaactatttttgccagcaggttggacccgatcctgctagggagtctcctgcagctcagcggtctgggaactgc

SEQ ID NO: 240801 - DNA, 734 bp, Homo sapiens
  chr19:53606502-53607236
  hyper
gcaaggcctatttacctgaggtggagggtgcggtgcggagattttaagtccgtagcgacccccgggcatcgggtgtgcgaatgggggacggcgaggcgcaggttgagtctacacagaggaacactcatacgccatggtgtgatgcttgctccgcacgatccacttccgggtctgtgggcaactgcgcgaaggaaagcgaccgagcggcccggggcggggtccgagatgggcggaaccggaaaagggcggggcgttgagagagccgggctgaagcaggggccgccaggcagggaccccagggaaggaacggggaggagccaccggggaggggtggggagtgaccaagtggagggacccgggggcgggccggggaggagccgccggggaagggcggggaggaaccgcgggaagggaccgcgggggaggaaggcgaagggaccgcgggggagggaggcagagggaccgccaggaagggacccgggggagaggcggggctggacgggacacgttagggtctgcgatttcgtgtgatgcccacagcccagcgcccagagccatctgtagtgtcttgtggaacggcgtagatgtttcaaacggtttcaagttaaaagcacagttgtgtaggttattttggaaaccaaactgctttcctcttagaatggaggcggtttatgttgaaagcattttttgctagcgcgtttacccagtaatgttattgacgctgaagcagccca

SEQ ID NO: 240802 - DNA, 733 bp, Homo sapiens
  chr19:53635517-53636250
  hyper
ggtttggggtaagacgcctgcatcctggaggagcgcattttccacggggtggaggagggcaggcaagaacatcgggtgtcacaggacaggccctgagcacctccccagcgcgggctcaggggaggcctggggagcagcggggcccggcacgaggaggagggaggtggggcgcgacagcgccttcagacaggggtggggtctgcaggatcccaggaccaggcagaggacgcaaggctccccgggactgcggctgcagctgcggcgctgcgctccaggggccgacgagggcaaggctgggaggcacccaggacgggaatacacctcttgggtgaagactttaaaaagcccggggatgggggagggggtcaggaaaaggttttaagcgggaggaagaagcaaaaggccggggacggggagcagcctcaaagcgacttcaacccaaagggaagcgactccggacccacactgcgaggcctgtattcacctggggtggagtgtacggggattttaagggccgtatcgaccctggacatcggctgtggaaatgggaaacagggagcgcaggtttaatctacacagagggtcactcacgctcgacgccgtcaccttcacccaacgcgatccgtttccgggcctgtaggaaactgcgcatgcgcggagagaagagcccgggcagcctgaaggaatggctggagtgggcggggtctgcgccgctttaaggtaaaaaaatcag

SEQ ID NO: 240803 - DNA, 456 bp, Homo sapiens
  chr19:53661431-53661887
  hyper
gggcacctccccagcgcgggctcaggagaagcggggactgcgaaggggaggcctggggagcagcagggcccggcacgaggaggagggaggtggcggggcgacggcgccttagaagaggggtggggtctgcaggatgccaggaccaggcagaggacgcggcctcgccggtaccggggctgaggagctgcgctccaggggccgacgagggcgaggctgggaggcacccagggcgggaatccacctcgcgggcgaggactttaaaaagcccggggcgggaggaggggtcaggaaagggttttaagcgggaggaagacgcgaaaggccggggacagggagaagcctcagagctacttcaacccaaagagaagcgactccgaacccacaccgcgagtcagctggggtggagggcgcggtgcggggatcttaaggtctgtagctgccgggcgcagtggctca

SEQ ID NO: 240804 - DNA, 516 bp, Homo sapiens
  chr19:53662187-53662703
  hyper
agcgagcccgggaactggctgcggaaacggggcacggcggttcgcaagtttaatccatactgagggacactcacgctcggcggcgtcacccgcacccaacacgatccgcttccggaactgcagaaaactgcgcgtgcgcggaaaagagcccgggcactctgggggcggggcctggggagaggcggggtctgcggacgaaacgctggggcggagctggggcggggtctgcgcttccctcagcctgcctagcccgcagtctcatttttcccggtttagaaacgctggagtgttcactatgtccccgggagcaccgttccaatttgaagcagttttaaggtgaaagaatagacttacgtggaccacttatgatagaaaccaaaatgatttcctcttaccaagttgaaaacggtttatgttaaaattgtttgccggcgggttggacccagtcctgctagggagtctgctgcagctcaggaacggggatctgggaatcggggatctcggtctgggaactgg

SEQ ID NO: 240805 - DNA, 518 bp, Homo sapiens
  chr19:53696015-53696533
  hyper
cacaggacaaggcccgggcacctccccaacgcgggctcaggggaaacggtgactgcgaaggggaggcctagggagcagcagggcccggcacgaggaggagggaggtggggggcgacggcgccttaggagaggggtggggtatgcaggatcccaggaccaggcagaggcgcggcctccccgggactggggctgcggcgctaacgctccagtagctgactagggcgaggttaggggacggtaaaatcctgcacccacttcgcagatgaggacttcacagggcgcaggtcagtaaagggttttaagcaggaaacggcgcaggaaaggaggtgtctgcatggtctgaaggccgaaagaccgcgggcaggaccagcctgtgtgattttaacccaaagcgatgcgacccccagagtctcgcggcaaagtctgaatttacatggaatggagggagccgtgcggggactttaagggctatacgaacccccggacatcgggtacggaggagcaggggactccgaaac

SEQ ID NO: 240806 - DNA, 621 bp, Homo sapiens
  chr19:53700096-53700717
  hyper
caggtggctggaaacgcaggctcccacccgccttccttaggtccctcccggccccgccccctgcctgtccaggccccgccccacccttcgcgttttctccccagcccactccctgtgccggtcacgccccgcctaggccccgcccctaggccacctcagtcccctccggccccgccccctgccggtctctccctggccaggccccgccccttccccgcccccagaccgcccagtctccgctgcgagcggttttctgtagacccggaagcggatcgcggggagtgaaggctgcgccgccgagcctgagtttcgctctctctagattaaatctgcgcttcgcagtcccccttcttccatcccccgggtctggaggggtccctacagatcttaaaatgaccacaccgcgccctccaccccaggtaaattctgacgttgctgtgagaatgcggagatcgctttccctttgggttaaagtcgctctaagcctacttcctgaatctggtctttctgctttgcgctaggtaaacatggcctttcgtgtcttttgctgcctaaaatcctttaccgatttttcttcccgccacgcgggagggcacttttttttttaagacggagtctcgc

SEQ ID NO: 240807 - DNA, 235 bp, Homo sapiens
  chr19:53811771-53812006
  hyper
ctgctctggaagcgcgggtctgcttagatgtcctaagcaacttcttgcaccaggcgccgccaatgaggagttcggtggatttctaaccaagtcccatttcaccgagagcggagtcccgcggggaccaggaggttccttctcgctccgggagagggcgctcctgcccggcgtttgtagcggcggcttcctggctgcttcccagcgtggatttgcacccggtcgatttcctgcgggt

SEQ ID NO: 240808 - DNA, 548 bp, Homo sapiens
  chr19:53836986-53837534
  hyper
cgcgcagattcgcgcaaacccggaagcggatcgcatggagtgatggtcccaccgcagcggtgagttttgctctgtgttgtgttaagtctgcgcttcccaagtccccggcgcttctgtacctgggacgtggggtccccatagacctggaaattctcacccgtgttccttcacctagagcaaatttagacgtcctcgtcagagtccaggggtcgcttccttttgggtttaaagtcgccctgaggatggtcccttcccgaatctttctgctatagggcaatgtatacacttcccatcgcgtagtttccctgctcaaaacctttttctgactcctcccgacccgcactttttaaagtccttaccgcgaggcggattcccgcccttggcgcctcccagtcttgtcttaaggcgccgtcgccccccacctccctcctcgttccaggcccttatgctccccaggtctccccaccgcagtcaccgcttaccctgagcccgcgttggggaggtgcccggggctgtcctatgacaccgggtgttcttgcctgccctgc

SEQ ID NO: 240809 - DNA, 1214 bp, Homo sapiens
  chr19:53868340-53869554
  hyper
ggaagggagccctgcgggagggggtgttactttgtcgcccaggctggcctggacccccaggttcagcgatcctcccgccctgcttcctgagtagatgggacctcaggctcccgcgcccgcgtccgcatccttgctgtgtttatccggcaggtggtgacctcactcctcgctggcctgagcactccgtccagcatcccaggcggtggctttagggaagtctctgcagctgagcacagggtggactctccctccggagtgaatggagaatagaaagggagaggatttctattctattctctgggccgtcagcatgacattgtaagttctgcccaagcagggctttgcatttcacattctactttgcatccgcgtttcagacaattccagggcttttgaatcatggatcggccttcctggccatctcgcctccaaaacccaaaaacagaggcggtgggagggaggctgagagacgcacagatcccgccccagcccagccccgccccgccctctgccggtactaaagggcaaggtctctccgcctctacccctacctggcccaggccccgcccacctcctcgcaggccccgcccaggcctggcttctgtccttccccgctcagacgcgcgcaaacccggaagcagatcgcgtggagtgaaggtccctcagcggcgcgtgagtttcgctccatcttgtatgaagtctgctcttcccaggtccccggcgcttctgtccctgggacgtggggtccctacagacctggaaattctcacccgtcttccttcgcccagagcaaattgagacgtccccgtgagagcccgggggtcacttccttttgggtttaaagtctccctgaggctggtcccgttccggatctttctgctatagggcaatatatacactttctatcgcgtagttttcctgctctaaacctttttctgactcctcccgccccgcgctttttaaagtcctcacccgagaggtgaattcccgccctgggcgcctcccagcctcgccctcgtcggcccctagagcgcagcgtcgcagctccggtcccggggaggccgagttctctgcctgtcctgggatcctacaaaccccacccttgtcttaaggcgccgtcgccccccacgtccctcctcatgccgggccctgctgctccccaggtctcccatccgcagtcacagcttgccctgagcctgcgttaggggaggtgc

SEQ ID NO: 240810 - DNA, 164 bp, Homo sapiens
  chr19:53934720-53934884
  hyper
ggaactcaggctcccgcccccgcgcctgaatccttgctgtgtttatccagcaggtcgcccctggctggcctgagcattccgtcccgcatcccagggggaggccctagggaagtctctgcagctgagcacggggtggactctccctcctgagtgagtggagaata

SEQ ID NO: 240811 - DNA, 104 bp, Homo sapiens
  chr19:53934944-53935048
  hyper
ccaggcagggccttgcattttacattctagtttgtatcccgttccagacaattccagggcttttgagtccatgcgtcagccttcctgggcggtctcaccttcac

SEQ ID NO: 240812 - DNA, 310 bp, Homo sapiens
  chr19:53935266-53935576
  hyper
gtgccaccgcggcgcgtgagtttcgccctgtcttgtattaagtctgctcttccaggttcctggcgcttctgtacctgggacttgggatccccacaaacctggaaattctcagccgtcttccttcactcagagcaaattgagacgacctcgtgagaggccgtgggtcggttccttttgggtttaaggtccccctgaggctggtcccgtcccgggtgtttctgctacagggcaatgtatacactttctaacctgtagttttcctgctgtaaacctttttctgactcctcccgccccgcgctttttaaagtcc

SEQ ID NO: 240813 - DNA, 1105 bp, Homo sapiens
  chr19:53970483-53971588
  hyper
gctcctgcccccgcgcgcgcatccctcccaccccggcgccccatccagcaggtggtcacctcactcctccctggcctgagcactccgtcccgcatccatggcggtggctttagggaaatctctgaagttgagcacggggtggacttgccctcctgagtgaatggagaatagaaagggggaggatttctattttgttttgtgggccgtcagcatgaaatcgtaccttccgcccaggcagggctttgcatttcacattctagtttgcatccccgttccagacaattccagggcttttgaatagtgcctcaaccttactggccggtctcgactccaaaaccctaaaacaggcgctggagcgagggtgacggactcacaggtcccaccccggccccgccctctgcgccttccaaagggcaaagtctctccgcctctcgccccgcccctgcttcgtcaggccccgcccacctcccaggtcccgcccaggcctggcttctgtcctgcgcgcagattcgcgaaaacccggaagcggatcgcgtggagtgacggtcccacggcagcgcgtgagtttggctctgtgttgtattaggtctgcacttcccaggtccctggcgcttctgtacctggggcgtggggtccccacaaacctggaaattctcagccgtcttccttcacccagagcaaattgagacgaccccgtgagagtccgggggtcgcttccttttgtgtttaaggtcgccctgaggctggtcccgtcccgggtctttctgctatagggcaatgtatacactttctatcgcgcatttttcctgctctaaacctttctctgactcctcccaccccgcgctttttgaagtcctcacccaaggggtggattctcgcccacttcggccggtggagcgcagaaccgcggccccagtcccgggaaggccgcgtcctctgtctggtcccgggatcctgcagaccccacccttgtcttaaggcgccctcgcgcccccccccccccacctccctcctcctgccgggccctgctgcttcctaggtctcccctccgcagtcacggcttcccctgagcccacgttggggaggtgcccggggcttgtcctgt

SEQ ID NO: 240814 - DNA, 683 bp, Homo sapiens
  chr19:54023878-54024561
  hyper
cattctgacggccgcgcttccagcgctaaggattcccgcgtagtgagcatttcccagaggtctctggggcatggctccattagggccgtgtgcagttgcctgcagggaaacactgatgggcgcccttccagatacgtcgattcccgggttatgagctacatttcccagaagccctcaaggcaggacgcccttagggtcgcgtagagttgcatgctgggaaatcctgacagccgcttccaactctgtggatttccgggttatggactacatttcccagaggcctctgggtcacggctccatttgcgccgtgtagagttgcatgctgggaaacactgacgggcgcccttccagctgcgtcgaagcttctctggtttcgcattacatttcccagagggccttggggcacagtccaatgaggagcgagccgggtggccggctgaggggcgtgcttcatgctcgcgggatttttaaaaatggtttctcctggatcttatcccaactgcgcctgagaccttgtttcacctcctgatgtgctgggtgtggttaggcctcgagccgggagctatttgcctcccaggaggaagccagggcagggttccgcggggaatggcggtgagggagccactcgggacgcggaggccctaaaatgaagaagcttcggcctgaggcttcgggagcggcga

SEQ ID NO: 240815 - DNA, 322 bp, Homo sapiens
  chr19:54024621-54024943
  hyper
gccagaggctgcctggtggggccccgccgtggcccagtgactgagataattgtcttcgtctgtggggtaatgcgaacaagccccgttcccctaagccgtgatgcatgcggggttgacgcggccgggctctgtccccataaactgtgacacaggtgtgtgtagacgtctatgagggccatagcgccgggctgtaagggcatctgtaggggtgacgcagccgggctgtgtctctgcacctccgttctgtgcgaggtcaatgctggtggggtctgcagaggtggcacggccaggacgggtctccgtgtctctgaaatgtgccttt

SEQ ID NO: 240816 - DNA, 157 bp, Homo sapiens
  chr19:54371622-54371779
  hyper
gctggaatctggtacgtggaggtcctttaggaggggaagcgcttagggttaggtgtcctgggtttgggaatgagaatggaaggaattcagaattactgacccctccccatccaggggacagacagaatcggaactttgggctcctgaaaggccgagg

SEQ ID NO: 240817 - DNA, 279 bp, Homo sapiens
  chr19:54410016-54410295
  hyper
gacccctccagaccgcctagtcctggccagcatcgaccaggccgatttccagggcttcacctacgtgaaccccgacttcgtgcacccggatgcccgcagccccaccagcccagtgcctgtgcccgtcatgtaatctcacccgccgccactaggtgtccccaacgtcccctccgccgtgccggcggcagccccacttcacccccaacttcaccaccccctgtcccattctagatcctgcaccccagcattccagctctgcccccgcgggttctagacgcc

SEQ ID NO: 240818 - DNA, 51 bp, Homo sapiens
  chr19:54411521-54411572
  hyper
tcccccaagtgcggctccttgccgccagggctgatgggaaatgtagtctcc

SEQ ID NO: 240819 - DNA, 701 bp, Homo sapiens
  chr19:54445421-54446122
  hyper
gaggcgtggcgccgcggccggagcccctccgacatctccagcgacgtgtccatccaaatgacgcagaactaccctcccgccatcaagtacccggaccacctgcacatctccacctcgccctgctgaggcccgcccctcggagctccccctgcctcctcctcctcctcgtcttaggggggtctccctgcaatgcagcgcccccttccgtcctcgggactcctcgctcccacccggaggaggctgcgccagctttaggccccgccctcctcccaatggctccgcccacagactcccttatttcaatggccgcgccctcttttcccgacctctccttttcattggtccctctcactcccaaatgactcctccccttcgttggcccgcccctttcctctggcccctcctctccaagaaaattagctcctccctcgttctccacctgctctgagctgggagcagccagaggcggtgcaagcgcccagctccccagagctccccaacctcggacctcaccgcaggggcgctgggctggagagcaggttcgggcagccgtcgggaataccgaccatcctcttctcccttctaacctgggcttcctttttccctgcctaatctcacctcctgacctgctgggtcctccggtgcagtgggagggccggcttgctccacccgcagccccggggtggcgtagggaagggggc

SEQ ID NO: 240820 - DNA, 213 bp, Homo sapiens
  chr19:54461001-54461214
  hyper
tttttacgaggatcgggtcttgagtaaacggcttgcctagagccacgtgcaatcccacttcccatccgcgttctcacttggttggaggcagcttctgtgccctttataaccaagagcaactgagtatagaggagaagaagtgttttgtccaaggtcacacgaagccttgggagcatccgtgaaatttggacccaagaccgaactttcagactc

SEQ ID NO: 240821 - DNA, 318 bp, Homo sapiens
  chr19:54465293-54465611
  hyper
ggaggttactcccacggaagtggtgctactcgggcttcttaagttgtggagacgctcagggaaaagttgggctgacagggaagggttctagcgggtggagaggtggggcttgcaggggaagagtggggagagctggtgggcgccgcatggtgatggggcgggggtcgctaaggaaggaagaacgcgacgggggctcctggggaggaggcggcggcgtggggcttggcatcatggcggggggtggcttcccatgcgatgaggatcgtggagccccctggggcggaggcggcgcgggctaggggcgagggctgtgagtgt

SEQ ID NO: 240822 - DNA, 481 bp, Homo sapiens
  chr19:54466173-54466654
  hyper
taatgcgagatctcgctccttgccctccaccagccgccgaccatggccgcgctctgaccccctccccggccgcagcctcctcctcgccgcccccctccccagccccgccggccccgggccccccgcttctgcctgcgctgtgaacccccccccagccgccggcacggccccgcccccgctgccccggtggtggcccacggccccccggctgcccgtggtcaaactggagtcgctgaagcgctggaacgaagagcggggcctctggtgcgagaagggggtgcaggtgctgctgacgacggtgggcgccttcgccgccttcggcctcatgaccatcgccatcagcactgactactggctctacacgcgcgccctcatctgcaacaccaccaacctcacggccggcggcgacgacgggaccccccaccgcgggggcggcggcgcctcggagaagaaggaccccggcggcctcacgcactcgggc

SEQ ID NO: 240823 - DNA, 670 bp, Homo sapiens
  chr19:54481305-54481975
  hyper
ggtttggggaagggaagggtcggttgtcagtggggttgccccgcccccaaccctgaagtatccgcccccaccactgccctccccgctcctccagggttgaaaagaggcgtctgcgtgaagatcaatcatttcccggaggacacggactacgaccacgacagcgcggagtatctactccgtacgtgggggtccgggacagacgtggggagtgggtcaaatcgcggggcctggaaggcgtcggggtgggtgccgggaaaaggcactgggactccggcacttggatcgacacgccgaggttagcctcccagccaatccgagtccagatagtgagatcctctggtccccgattggctgactgatctcgttcccgccccctcctctcaccttggggcgggctgagggaggatcctgggcgctaattggccgctttgctctctttggccctcgcggcgactctgcgccgtgactggttgtggaatcccggactgggattggccaccgcgccgcagagctgtggggcaatctgcggcggtgacgggccactactgggagccggctgggaaagcctgtattgccattggtagctaccccgagaacgcggcaaatcctaaatgatgattggctgcggcctcagccaggttccgaaatcgcaaaatctagttgcctgggg

SEQ ID NO: 240824 - DNA, 390 bp, Homo sapiens
  chr19:54482914-54483304
  hyper
agagaaaatcagaccgagaaatagagaaattttaaaaacaggagagagaatgaggcaacagtaaaataaaccagaacacagccggagagagagaatcacagaactgtcgggaggcgccgcgagatggggggccgggaagggggcgcaggcggccgcgtctgaccgccctcgctctccctccttttcctttccttcctcccccgcaggagttgtccgggcctccagcatcttccccatccttagcgccatcctgctgctgctcgggggtgtgtgcgtggcggcctcccgcgtctacaagtccaagaggaacatcattctgggcgcagggatcctgttcgtggcagcaggtgagaggcagagggagggggcgaccggggcggcccacctggg

SEQ ID NO: 240825 - DNA, 210 bp, Homo sapiens
  chr19:54483364-54483574
  hyper
cgcgttcgtgtgtctgcaaagccaccttgccccgagcacccccgggggcccggagccttcctaggcggtccccaagctccatcgccacccgctgggtaaggtgggtgtagttctcgcgtcgccttcggaggagtaaaccgacacaggcaggtgtctggcgcgtaagacgccgggcgcttaggatcccaagcccgccgtcctggagacgga

SEQ ID NO: 240826 - DNA, 962 bp, Homo sapiens
  chr19:54485373-54486335
  hyper
caacgcgggcgagccgggcccgaagcgggacgaggagaagaaaaaccactactcgtacggctggtccttctacttcggcgggctgtcgttcatcctggccgaggtgataggcgtgctggccgtcaacatctacatcgagcgcagccgcgaggcgcactgccagtctcgctcggacctgctcaaggccggcgggggcgcgggcggcagtggcgggagcggcccctcggccatcctccgtctgcccagttaccgcttccgctaccgccgccgctcccgctctagctcccgctccagcgagccgtcgccgtcgcgggacgcgtctcccggcggccccgggggcccgggctttgcctccacggacatctccatgtacacgctcagccgcgacccctccaagggcagcgtggccgcggggctggcgggggccggcggcggcggcggcggcgccgtgggggcgttcggcggcgcggccgggggcgccgggggcggcggcggaggcggcggcggggcgggtgccgagcgggaccgcgggggggcgtccggcttcctcacgctgcacaacgccttccccaaggaggcgggcggcggcgtcacggtcacggtcaccgggccgcccgccccgcccgcgcccgcgccacccgcgccctctgcgcccgcccccgggaccctggccaaggaggccgccgcctccaacaccaacacgctcaacaggaaaaccacgcctgtgtaggggcgcggcgggggagccgaggggcgtgtccggggcgcgtgcgcgggcgcgcgtgcatcgaggctgccggggtcgggggcgcccccgctttcccccgtgagcgcgctggagactgctgggcccgccccacgcccaccctccccgcccccctccccctccgaagcagggaccccgagggagggggcaggggagggagggggccgctgtgagggagcgtcgtgttttatttttt

SEQ ID NO: 240827 - DNA, 921 bp, Homo sapiens
  chr19:55597886-55598807
  hyper
gtgagtggtggggacgccggctgcggggagcggtccttatccttgctttccaggcagagaaacgggggctcagaaagagcaaagggactcccgtcccattctggggacgctggagcgcccccccgccccgccctctggccccaggacccctcgccctgagcccgcactccctacctcccggtttcccgcctgcagagaaattctcccagatgctcatcgtcaacgaggaactgcaggcgcgcctggcccagggccgctcgggaccgagccgcgcagtcccagggccccgcgccccggaaccgcagctcagcccgggctcggacgcctccgaggtccgcgcctggctgcaggccaagggctttagctccgggtgagtggggccggggccctctcggcgcgggttgatacggacgctgggagcggagcgttccgatcggccgggagtcggggggcggcagtcgtggagaccacagggagccgggattagcccgaagtgagggtctgtctggtagcaacacccaatggcaggctgtgattgccatgttttttcagactccgactggattccttagggaaatcccgtaccctttgaaagcaggatgcggccacgccccccgggtggcaacattgtgattggtgggtggggttcaggaggtgtcgggcctgcccccgctagagctagaatgctgttctgattggaccatcgccgggtgggcgtgacatgattgtccgggctggggcatccgccgaccggcctgaccgcgcccgggctgccctcgctcaggaccgtggacgcgctgggtgtgctgaccggggcgcagcttttctcgctgcagaaggaggagctgcgggcggtgagccccgaggagggggcacgtgtgtacagccaggtcaccgtgcagcgctcgctgctggaggtga

SEQ ID NO: 240828 - DNA, 581 bp, Homo sapiens
  chr19:55677500-55678081
  hyper
cctctgagtattctgggattcgcagtccgcagacaggacctcggggctgcccctgggagcgcgccctctgccgctggagcgttggagaacgttagcgccccccttgccaccgacgctgggactacgagctctaaaaggccgtctgctcaggctgggaaggcagacggtgtatcagaccttgcgtgctgggactcactttcagcctgcaggtccagcgccggggacaggccccaccaggacacggagccgaagccgctgccggagccggcaggtgtggtcatcaccctgcggaaaagacattctgggaatcgcacacattgcccgccccgctcccctctcaccgcccctcacttctcgcccctttgcctccacatgataccttgcccacacctttatcctccaaatatcccgggacgccccttcctctctgctcagtgcagcactgtggacccgcggcactccacaaccgctgcccagagtccccgcccttttcgaggaatcaagcaatggaagcatgtgggatgggaccacagcgagcaactgaccaatgagagtgagcgaggcccgccctctacaaactt

SEQ ID NO: 240829 - DNA, 86 bp, Homo sapiens
  chr19:55684868-55684954
  hyper
gcctcactcggtccgggggccgcagcgagtgccactgggcaatgggccgccgcgggttggccagcatgtccgcccagtgccgcagg

SEQ ID NO: 240830 - DNA, 1157 bp, Homo sapiens
  chr19:55690197-55691354
  hyper
ccaggatgacgacccgggatcccagccggattttccagcccgcctgcccgagtacacccgtccgaatcccgcccctcggaatcctggccaggctttctctctgctcggccccccacccccgggtcttgctcacctgggccgtggctgatgcgactggagtcgggaggcgtgtcgggcgatggaggccccggggttgggggctccgggaacatggtggcggggtcctggagtcttttctgcagagacactcaagcaccctagtcccccattcccaccccagacgtcctttgagccccacgcacaacaaagaactccaactcccatgaggcctttgcgcgaacagccgcgcagaaaccggacagccaccgcgagtcatgctgggagttgtagtatcagcctccccgcacttgagagggggtgtccaggacctagttccatcctaaagggataccctcttcctccacggccccacaggcatcccgctgacttctgcctcgtcctcgcccctccgcagggtctgaaccggaagcgggcgaaggcagacgtgggaaccagcagaccgcgttgcccagagcaacagccgggctcctctcaagcggggtgagagcaaagctggttgcccgggcaacgggttgttgccaggacaacgggcggggctgacgcacagacgcggagtcccggcggggcaggctcgctccggggcccaccggtgcctgggaaccccccaatagcccgactgggatcctgaggtcccgcgaggtggggagcgggcagcctgtggtccgagcgcccacagccgactgctccctccgcacctggtcctgggagctgagacgcaggttccctcttccctctccccaattttgctggagggcgggtcgggggctgcccggtgcctgtgctgagccccctcatccttcttggcctgttggtctctccacgcatccgtgctgctctcgtgaccgcctcggtctccacgctgcctcttgaccccacataggcgtcttccctgtgtctgcctccccaacccgcctgtctctcttccctatcgcctggcctctgtctccagggtctctccctctcccctccgcctgcgccccactccccgccctcggctctttgtcttctccatacctgtctcgcgtccccagatccct

SEQ ID NO: 240831 - DNA, 96 bp, Homo sapiens; identical to SEQ ID NO: 205601
  chr19:55691680-55691776
  hyper

SEQ ID NO: 240832 - DNA, 676 bp, Homo sapiens
  chr19:55727966-55728642
  hyper
tcttcctggccttgcgggcagccaggattgaaagatccaggaagtgacaggggcctgactcatcaacttgtaagagagctggggttctcctagatccatgctcgcactgaggtgagaaatgagaagccagggccgggagcctcctgggggttggctgccaacgccaggcaggcggggaatggtgattttcgcttgtatcgtggaggatgccacgcacagacgtgaatagaaagagcctggaccgtgtcctgaggtcagcgactgaggtcctgggtggggccagccaggacctgcccgggggctactgccctctgaatcaatacctccagggaccctacgttgacacccatggcctcccactctccacccctcagtcctgcgtgcggcacgtagtgctcactgggcgtctgtgtagggggttgaaggctgaggctggaacaagggcgtggcggtcgcaggctccagggcacgacggtccttcctcttccccttctcagccacatctggggctccgtccctgcagccaaggctccctggcgctgtccttggtgctgacgcggttctggaagtgcggtgccagggtggctggtgcggctcccgatggaaaagccccaccaaccccacaaagcagactcgggagagaacacgccaccgtctttagcgaatcttaccaacc

SEQ ID NO: 240833 - DNA, 189 bp, Homo sapiens
  chr19:55770718-55770907
  hyper
ttggctccagggtcgggctcttgcgaaatccagacctggttttcgctccagccaaagccaggcgccttcgttccgtccggctctcgcgcttagccgcctccgagcctcagaggccctcagtcgtttccgtctgctggcgatagtcccggccgggtcgctggtgttgccagttccgcccaaagcagcttc

SEQ ID NO: 240834 - DNA, 249 bp, Homo sapiens
  chr19:55851026-55851275
  hyper
actgacaacagttcgcggcgtttgacggcggcgggggcgtggcggggttttatctgtgtattgacgagagccgggcgcggagggaaagagtggggcttggccaatgggagcgccgtgagcttcgtagcaacggaggagtggcggtggctgtggccaatagaaagcctcagtggccttggcggggctggcccggagagcagatgggaggtgcggcgacagtgtttgacgagagccgaaggaggctgtggg

SEQ ID NO: 240835 - DNA, 352 bp, Homo sapiens
  chr19:55864914-55865266
  hyper
caccaccaccacgacgcatcgctggctgggcattaagaagaaacatcagcaacagcataccattattcgtggcttagacactgggaggtaggggtggataaccgagacccggggctccgcgagacaaaaagatgcaggatcactgcatcttcagaggaagccgcgctggggcagtcagattttgccggcgaaaatcccgttcttgatctgctcgttccagctctccacctgggaagcagaaaggcagggagcgggacgccggctcagcctcggccgagccctgcacacgcctggcccggcgccccctctgccgactcacccagctgatggggcacagcgagtggtacacgcg

SEQ ID NO: 240836 - DNA, 54 bp, Homo sapiens
  chr19:55866405-55866459
  hyper
cccaagcggctttcaacattccgcttcctacagtcggtgcgcacagaaccctcg

SEQ ID NO: 240837 - DNA, 204 bp, Homo sapiens
  chr19:55919626-55919830
  hyper
gactggtgggtcacgagactcgcatgggccaatgactgatagagaccggtcagagggcgacccagtttcgtgcagatcaaaccgctgccagccaacgaaatccgttgatttttgtatatgcaaatgaagtgtgcgctgccgcccgcgccccctcctttgagccgtggtggaggtgggcgctggaactccgactacatttttcta

SEQ ID NO: 240838 - DNA, 202 bp, Homo sapiens
  chr19:55951859-55952061
  hyper
gtagggggtgagggcgggtcctgggcgatgggggtggagccgccatggagggcggggctacatgatgaaggggcgtggccagagacggaggctgcgccggatcccacgttccactcaccgaggttgggggtcttcacggtgttgtagaggttcttgggcgtcctggggggcatgctgtcgggaccgccgatccccggggtca

SEQ ID NO: 240839 - DNA, 433 bp, Homo sapiens
  chr19:55952677-55953110
  hyper
tctcacgcgcagcccgcataatttaaaaaatggacagatggcatcacgcccgagctcaggaccctgcagtggccccatcacacttaggataaacccgggcccgcctacttctcctcacctcctgctgcccaccgccgccagctgcacgggcgcttccctgccctgcaggccaccgagggcctttgcacgcggttcccctgcccaaaacctctcgcccacagatctctgcgtggttcgctccctcccttcgggtctccgttcagaggccttttcggatcacttcctctaatccagcgccctctctctcaacactttccgctgattttcttcacagcagtcatctaaaattacactgcacatgcttacggactgggccactgatagttaatgagcccttaccgtgtgccaggaccctgcacgaatcaactcagtt

SEQ ID NO: 240840 - DNA, 35 bp, Homo sapiens
  chr19:55953688-55953723
  hyper
gggccctcgcccccgcggcccccggcacccccagt

SEQ ID NO: 240841 - DNA, 64 bp, Homo sapiens
  chr19:55954023-55954087
  hyper
cgccccgcccgcggggccggtcctggtgccgttggcgcctgggctcgccgcgcccccgccgccc

SEQ ID NO: 240842 - DNA, 63 bp, Homo sapiens
  chr19:55962684-55962747
  hyper
gcgttcaagaggaggcgggcccgggcgggtggggaaagcccagagggaaggggcgggctcttg

SEQ ID NO: 240843 - DNA, 105 bp, Homo sapiens
  chr19:55963227-55963332
  hyper
cgcttgtctctccttcctggctccacgtctctttctctgtcccaggtttgctgtcgtctgatctctgtctgagtgtctgtgtctccactcgcccccgacccggcc

SEQ ID NO: 240844 - DNA, 38 bp, Homo sapiens
  chr19:55987549-55987587
  hyper
ggatgagcgtgcacgaagcacacgcccgaaaatcctga

SEQ ID NO: 240845 - DNA, 200 bp, Homo sapiens
  chr19:56015147-56015347
  hyper
cccgcaggagagtctcgccgcaagcgtcctttcccgccttttttttttctggcgctcagcacgcatgcgcaggcgcggtgggcccgggaatggagggacgggatggggcaggcgttcatctgcctcgcacctcgtgacgtcacaggcgcgctgcgcctcctgattggccagccggcgcatcgcccgcagtaataatagct

SEQ ID NO: 240846 - DNA, 67 bp, Homo sapiens; identical to SEQ ID NO: 205605
  chr19:56098517-56098584
  hyper

SEQ ID NO: 240847 - DNA, 276 bp, Homo sapiens
  chr19:56111238-56111514
  hyper
aaaaaaaagaaagcgaagtgcgccaactgcaatacagagctggaaaagaccggcaccatcttatccacttagcactccatgggcttcgaagcctgtccggtgccatgttaattacgggcactgggcagccattttcccgctcctcatcattcggtatctgtctttgggtcacccgactgtgggctttgtgagaggaaaggcgtttcgaggtggttggggatgtggtgctgggttatttcccactggggacacaccagggccgccggtgcgcaggcg

SEQ ID NO: 240848 - DNA, 413 bp, Homo sapiens
  chr19:56151956-56152369
  hyper
ctgggtggagaatcacggcccggccacatcggagccaatggctggtctctggacctcggtctccacatttgctcagccggcaggaacatcccttctcccgccctctacctcggtgggtggccacggccgagcaggcagcgacggcccagtggaaagaggacaaacccttgtgggccttagggcgaagacgtaactttgcttagtctcggtttattggccgatctcttgtcaagcggcggaatcgttccgttcgggaggtgggaggggagcggggccgccgggggcgggcgtcttcagtggaccccacgcctccggtcccctccccgcagggcgctccgcagaggcgaggggtgggagcgccggctccaggcggcggaacctccgcactgggctcgcgcgcttccggccggcgc

SEQ ID NO: 240849 - DNA, 61 bp, Homo sapiens
  chr19:56159700-56159761
  hyper
tggtggccgcgtttgcacccccgccctagtgcatgttcccgctggaatcgttccacgaccg

SEQ ID NO: 240850 - DNA, 85 bp, Homo sapiens
  chr19:56633034-56633119
  hyper
tggtggagagggacgctcgtgccaccccgggtcctcctaccgtctctatcatggtaaccccttctctgccgctgcacctcccagt

SEQ ID NO: 240851 - DNA, 56 bp, Homo sapiens
  chr19:56728568-56728624
  hyper
gttccttggctctttttgcccgtatgccgaagagccgggcattgggacgggccatg

SEQ ID NO: 240852 - DNA, 33 bp, Homo sapiens
  chr19:56729044-56729077
  hyper
cctgcggatcttctgggccggctggttgaaccg

SEQ ID NO: 240853 - DNA, 95 bp, Homo sapiens
  chr19:56988112-56988207
  hyper
cacagtcacacactcataaccgcaaagccactgacgctaagtggcagacagacgcccaggcaagtcacacagtaacccaaggctacaataaacgc

SEQ ID NO: 240854 - DNA, 1365 bp, Homo sapiens
  chr19:56988507-56989872
  hyper
gcaagcacccgcgcagacgcccacgccatcgtggatgcgcaaacccacgcgcgccttggcaggaacgtccacgcagtggcgggcgcgccgcccacgccctcagacacacccacactctcgccagcccccttacctcggtcttcccgggctcagaccccggcggcgaccaccgagacagccgagcagggactcagcgcctgcgcactcccctccgggaccccgggaccgcgcgctgcaccccccttcacacacgcaccacgcatgcgggcgcgtggccccgcccccaaacaaggccacgcggcgtgcgctcacccgcctctcggggacagtaccaccagccccggcctgaggccccgacccctcagcgccacacgcacaagcgcgttcgcacgattggtgcaggcggacgcgcgaggtcccgcgcctgcgcacacccccgaggctggcacgcacaccggtctcctaggggactggcgcctggccctgcttttcatcctctcaggagatcacgtgtggacactgaggcccttcctcgagctctttaaccaaacccaacctccccaattcgccgccttccccgctcccacaaccacacgttcccgtgtgagggcttattgcctccagccagccagcgtccttcgcccccacattcacgaggtttggagccggcctcacccgcggaggcggacaccgcccacccgcgcgtgcgcactacgcagtcatcctgcgacctccagaatccaccggggtgcagcgaggctgtggaaagtcccacccagaacgtgaggtgaagaaggcttgggctgcgctggttctgctctgtccgggtcggagatgaactgacccgggagagcagcggagggatgtttcttttggccaacagtggggactcacctgcacgttttgcgaagaggcccacagtcctttgcgtggcgctcggactacatttcccaacggcccctgcacgccctgggggctgttccatgcggtgttgcgcctgcgtagccggcgggctggcagtgagactgactgcgtcggggttgagactgggtggatgaggctcaccccggcggggagaagggacgaggaggggcggacagcggaaggtccgggagtgtccgccataaagtcgtttgaggtgaccgttgcgtaattgtgagtctgtgagagaagatgtgaagtatggcctcgtcccggtcatctgggcgtgcgggtcccgggttttgatcgcgcgtttgtgtaggtgagacccacattgtgttaccctgaacatgtgtgaggacgaacctttgtgttttcttatacgtgtgtctctgaggcgatttttgtggttttgtacgtggcggggggcactgattttgaata

SEQ ID NO: 240855 - DNA, 1136 bp, Homo sapiens
  chr19:57018807-57019943
  hyper
gaaagataatgacactcccacggactggcacagaaggccgcgctccgaatgacatcgcgatcacagaggcacagacagcgtcacaaagccccacgcgtactcacaccgaaggctcagccgtcgcgcgtttccctcccaggccccaggaactagtaactagggacgcttctggtctctaggcgaggagagggggagagcgcaatctttgcgcctgcgcacactcctgctcttacccgccggaaccctgggccacgcccggctcgcgtaatcacgcactgcgcaggcaccgcccgctctgctctaaggtccctctcactccttcagcagcccgaggacaatcccctcaacactaggccacgccttgtctccgcccctctcgtccgacccctggagagaggctggcgcctgcgcgatggggggttccagcgtcgactcacggagtccttcggatgagagcgtctgggtgccagacgaggccgggggtttgttttgggtggtttgggagtccgagctcgagggctgggccaggaagggcaggcgaggcgggcggctccgacgcgggtcgcgaaggcccagccgcgtcctctgtccccaggacgactacatttcccagaggccagcggggcgcgcgtactcgagtctgcggggcggaggccgcggctcggggctgctgggcgttcggggcggcttggggcggcgggaccactggagtgagctgtgggagagatgggggtgtgcctgtgtgtaaaagatctgtcagagtgtgaggctccgtgagagggtgtggtttctgtgtgtgtgtgtgtgtgtgtgtgacagaccgagagtccagtgtgagaccagggtatgttcgtgtgtgacagagcgagacgggccagtgtgagagaccagtgagtgtgagagagatagggatgtgcctgcatttgaaagagagcgtgtgaagctcagtgagaggttgcgaggtgtgtgggtgtgtaagtgtgtaacagaccaggtgtccagagcgtgagaccaggatgtattcgtgtgagagagtgagacgggctggatggagtgtgagagaccagtgagtgtgagagatgggcgtgtgcctgtgtgtgaaaggccggtcggtcggtgggtgaggctcaatgaga

SEQ ID NO: 240856 - DNA, 508 bp, Homo sapiens
  chr19:57049618-57050126
  hyper
cacccatcagagtgatcctccggactccggaggcccccaagattgcctttcccttcccggtcggcagtgacgctcccgcaaggagctgacgcccaggcccttagcacctgtcacagccaagcacccttttactccggccctgcggtcccacccctcgccgcaagccccgcctcacccggtctgccgctgcgcctgcgcgactcccagaagcctttggggggtgggtgtgtagtcagagcggcctctgcttccggccacacccaggcccagcgttggccaccacttatgcggcggctgcggtccagggacaagtgagagcgacccgcagagggcaggacggacgggcgttgcataggcccggggccaaaccgtatcttgcaacctgagctccgagggccgccgcatccgtccctgcttgggactacgcttcccagcgggcattgcgccgaggccacgcccggttccggcggcgctgcctgcgcactggaagtgggaagcgccgggcttc

SEQ ID NO: 240857 - DNA, 448 bp, Homo sapiens
  chr19:57050186-57050634
  hyper
ggggcggggcggggcagcggggaggggtggggaggggcggggcgcggccgggggcggggcggctccgcggcgcggcccagtggatgccgggccatgggggagcgcgcgcggggctgttcgctgggcgtggcgggcgggtgtggccaggggtgtgggtctgtgagggaccggtcggaagggcgtcgcgcggcctcgggtgacatgcggggggcggcgagcgcgagtgtccgcgagccgacgccgctcccgggtagaggcgccccccgcacaaagccccgggcgggccgaggcccgactgtagggactccagccaccttggccctccctgcccggggaaggccgcgctcaaggaatggcctcgcatccaaaggccagcgaggagcggcccctacggggcctgggcacagaggtgagagtgacaggtgtttggggccgagcggacagggac

SEQ ID NO: 240858 - DNA, 963 bp, Homo sapiens
  chr19:57078351-57079314
  hyper
cctcacttttctatcgcgtaggccccgcccgcgccccaagccccgccctgtcatggttttcctctccagagggtagccgctacgccttaccgactgcgtttcagtgctgtcccactgctcctgcacaccccacgcctgcgaccctacccaccacggacaggcgctcctgcgagctggaagccagttctctgcgtcctgagcctggcagctgcatctgaacactcggagcctggcgatggcttccagaaacccctgcgccgtgggtcgcttcagtgaaggggcctgtacttcggcgacccagactccgggctgagaggcctcctaatccaaccaggaggaccaggagaggcccaaaaggggacacagggcagtgaccgccaggcttggagaggagccgctcctggcaaagccagcgccctatttctgaacgccgcctccgttccggactacacttcccaggggctattgcagcggaggacacgcccacttccggaaaggacccaaagccgggcgagtgcacgtcccgccggttgctgaggagaagggaggtctgggcggggcagcggccgaggctggactggggcgcggcgggggcggtgtcctggttcctgtgtgggcggcgggcgtgagcgtgcgcgtgtggcctggtggctgtgagtgcccatacgtggtgagcgtgcggtgctgtgctgaggaggggcgagcgcgcgcggggatggcggcccggtgtgtgactgtccggtgcgtggccgcgaatctgcgcctgcgtgcatggcccggcggcgtgcggaaggcggtgtgtgttggaatgagtgaagcactttaagtggccaagagcaggaaacccggccggaggaggcttaccccgttctcccctgtatcgactgcgtagagcccagtgtgggcaaagtcctagagcccggggaagttgcccgggcggggcagcctcggctgaagcatttc

SEQ ID NO: 240859 - DNA, 476 bp, Homo sapiens
  chr19:57106524-57107000
  hyper
gctcagttggctccgctcggctccactcggctgggctcggctgaaaaaagccggggggaggtggcgcgcgcgggtttctgggaagcgtagtccggcgcagtccgcgcaggcgcactgccgtcgggcgggcctagcgggcgcggtcattgtcctggcagagcggcgagccggtgagtgtggctgcggggtcgcgcccaccctctacctgtgccgggggccggaacctggccccggggagggcgcggcctcggggagacggcgtgcaggcccaggtacggggagtgcagggctgggtgctggtccagggcgtgcgggcgcaggagagggcgtgcaggccgggaccgaggtgcgcctggagaggctgagcggccgaggagaggctgaggggaagctgaggggctaaggagaggctgactggaggctgaggggctgaggagaggccggggccagggagggagaggcgtgagtgggttgga

SEQ ID NO: 240860 - DNA, 248 bp, Homo sapiens
  chr19:57149403-57149651
  hyper
tccagctattctgtgtagagcgtcagcaccaccgaacgctaatgcttgaatggtttagaactgcggacagctcacgccagacagattcagcaccacggacagcccccaaggcagctcgtgatgtgaatggttcagcaccgcagacagctcaagcctcgccggacagccctgctggaagtggttcagcaccacggatagccccgctaatatccatcagaaccccgggcggctcaggccagaatggttca

SEQ ID NO: 240861 - DNA, 555 bp, Homo sapiens
  chr19:57182840-57183395
  hyper
atacgggctgacaccgctaagtgaacaggtgcagacacaatggcactcggggacgggctcacacgcggtcacacacctgcaggaacacgcgcacactacacaccgttgctctcgcctcccggtatcaccttcgaacgcgctggccggccccctcctagcctggtgcagtcggctccgcttctactcagtctcgggtcctcctgggccaacgcagaccctggtgcctccttccttagacgagctaaggtcaagacttctgctgctgcggaggagcccgcgcaccaggccggggtggactgcgcctgcgcatcgggcccgcctggttcttaggaactacgactcccagggggcgctgcgcgctcgccggcaccgcgactaaagcttgcaaagcctgggtcatcgaaactacaactcccagaaggctaagcgtctgcacacgctaggtccgcagggcgctgacccctgggggcccgaggagcgccgggctgctgccccgagccccgcccactacagcctcagtgcatggcggtgggcgcttccagtaactcaggggtg

SEQ ID NO: 240862 - DNA, 395 bp, Homo sapiens
  chr19:57276594-57276989
  hyper
atgcctgggaaaaggcaggccgggtgccgggatgtagtgcgcctgcacgccgtctccagactacaactcccagaatgcgcggcgccccgagcgtatttccgcttccggtggcgttttagcgggagatccgagcgtctcggctggtggaaggggcgaggagctttgcagttgtgtgcgagtgtgtacaggtgagtttgtccgtacgcgtgattaagtgtgtgcgtgtgatcaagtgtgggggcgagtgttgcgtgagcaaacctgtgagagggtgagagtccgtccgtgtaggtgagggagctagcaagagtgtgagcgagtgcgaatgtccctacaagtgtgggcgcgtgatgtgtttgaaggtgtgtttgttcgagagggtgtgtgttggggtc

SEQ ID NO: 240863 - DNA, 281 bp, Homo sapiens
  chr19:57610676-57610957
  hyper
gcacagtcagatcgcaggaacgcggcctagctgcttcagccacgttctcgcggcgccacctggtggccatggaccgccatcgccgctggacgtcagggccgccaggcccagcgagatgtcacctcctctgaggagccttccaggatcgcacccggcacgcgctccacgcctcgttgtctgttcttcggagcaccgaccatgatcacaaatcagctcgctcgctgtgtttcctgccgggtcgctaccgccatgatccgcacgtagtggtcaaggctgaggtt

SEQ ID NO: 240864 - DNA, 144 bp, Homo sapiens
  chr19:57617622-57617766
  hyper
tgacctgccagggccggcccccgcttgggtcttggagggcgctgcgcaagcctgcgccccgcactcgcccgggaagggaagggcagggaaggggcgcgcacagcctggcacctgctgtgcaccaggggagacgcgcggcgctcc

SEQ ID NO: 240865 - DNA, 297 bp, Homo sapiens
  chr19:57618126-57618423
  hyper
ctgggggttcggcccaccccgcgaaccgagctcccggccctgtgcgccctcagctctgccgcgggcgttggcctgggcgggcgcaggactgcctggtcgccctggagctcagggtcggggccccgcgtttaaccaccaggcggaggcgcaggcggagcccggagaggacgcgacccctctgggcggccttgggcccctggacgtgccagactctggacccctgcgggggctgccgtggagagcagaggcaccgcgtcctgcccagagctccgataggcgggccgcgttgggggattg

SEQ ID NO: 240866 - DNA, 819 bp, Homo sapiens
  chr19:57683198-57684017
  hyper
ggggcctgcaacctgctgggcgcaggcgccttgagctgccacgtctgcccttttaccggcttgggtgcaggcaagggaaatgcgtccccgggccggggggcgcgagcgggggtccggggccgcgagctggggtccggggagcgcgagcgggggtccggggggcgggggccgcgggccgcgaggggggcgggggccgcgagggggcggggcgtgcgagggggcgggggcgtgcgagggggcgggggcgcgcgagggggcggggcgcgcgagggggcggggcgcgcgagggggcggggcgcgcgagggggcggggcgcgcgagggggcggggcgcgcgagggggcggggcgcgcgagggggcggggcgcgcgagggggcggggcgcgcgagggggcggggcgcgccgggctcgtcctctccgcggcgctcagtggcagcagggagggccggtgagatgccagagcaaggtagggtcctgtatttggggaccgctgacgtttgggtccccctcccgcggctgttagcgctgcgtggcccgagacctgcggtcgggcggggattaaggctgctttccggagggccccggccgcgtggtcgccctgccagagcggttgatgtcaggcagtgctgggaggcgttgctctccgggttcgcttctctcctgttgtcctaactctgcatctctcccgggtgaatcacagagctgtaaactaaaaatcaaattctaagctcccagccaactgaatggacccctcctctcagctaagagcatggcaaacttaaccggaaacactagttcggccgcgataggaaggagatg

SEQ ID NO: 240867 - DNA, 752 bp, Homo sapiens
  chr19:57702682-57703434
  hyper
gggaggaaaacttgcgccgtgaagcgttcctcccgttgttgaacacatgaggaaaactacactacttagaaggctgtgcattatgcgtacggcgggagctgggccaacgacggcctaggacggggacgtttccgacggctcacgccggtgggggcgggacttccgggttgctcgctgcggacgccattttcttctgcacttctgtctggagaggtctgtagccactgagggccccggtcggggccgctttgcaggtccctagtcaggaccgagcaggggagtaggataggaatccccgccgcacctttgtacgagcctgaccccttccgtgggtttgttcctgggtcgccgtcaagctgcggtctctcctcccccgcccttcagccccgcggtctccaggggcggcgccctgggtctggaacgcggttgccaccgaggaggcggcggccctgcgtctggaacgccgttgccaccgaggaggcggcggccccgagcgcgcctggaagccccgggcaaccggccagggtcgggcacaggtggggtccgtcaggccgcccggggctcctctgtcccagctctgcggcccagggggtgacgtgatggcggcagcggtgctgacggaccgggcccaggtgagtggacggtggcttcgcggttgccgcttccttgccagcgctgaggcggtttccgaagtgggtgggagcccaggtatcccctggatttgtcttcgcagtcgtcgttcgctttggtgt

SEQ ID NO: 240868 - DNA, 550 bp, Homo sapiens
  chr19:57751576-57752126
  hyper
tgtataagaggatccggaggggaaataatgcaaggtggaagtcagagtccggagcctggtccagggtctctgcactggccctgaccctggcaaatgtccctgactcctggggctcgatttcctccggccaagaatggacggtctcgcgcttggtccctggcctccgagttgtgcccccaggacagaggcaggtctgagccgggctgtaggcccgctgcgacttttacaccgaggcctgccggctcaggatctgtcccctttgcaggtggtttgtagagaaaaactacattaactacaaggcattgccaggtgcgacggcgggccctggggccaatgatggtccaggacaggggcgtttcctgtgggttgcgaagcttggggcgggacttccggcatttggatgggacgtaatttgggagcgacggttccgtccacgccggctctagggagggggcggtgttccgtggccgcctccctggcggcgctggggaaatgagcaggtaggaggccgacagcgacctccgcgtctcggagcgaaccgtgagcctcc

SEQ ID NO: 240869 - DNA, 177 bp, Homo sapiens; identical to SEQ ID NO: 205618
  chr19:57791725-57791902
  hyper

SEQ ID NO: 240870 - DNA, 359 bp, Homo sapiens
  chr19:57831523-57831882
  hyper
gcccagcccatgatctcaatcggggcgaatatccccgcctcctgacctcaattttcctaagctagaaaggacctttcgaccctccgacttgtgcccatagtaaagcggcggccctaagacgacgcgggggtccttgtgcgcacttaaatggagtcggctgcgcttggtgagttcccacacccggtagatgtgagggaaaaactgccttactcagaaggcaccaccccttgcgtcggccgcggactctaggccaatgacgggccaggacacgggcgatttctgcgggccagggcggcggaggtgggacttccgcttcgtcgcgtgacgtcatctccgtgagcaggattggccctggaaca

SEQ ID NO: 240871 - DNA, 311 bp, Homo sapiens
  chr19:57832122-57832433
  hyper
cgaaagtcagccgaggtcgccccgcccaggacagagaagggctgggggtcggctgagccgcggcattcccgggccccgctagggctgcagggtctcaggatggcagcctcggcgcaggtgagtggacgaggttttggccttgctgctgctctgctacttctggaggcctcgtgggcaggcagaagccaagacagccacaggatgtttctttgtcgccgtcgtttatttaagagaagtggccgtagcttgtcatttcctttatccgcagtcctgcaatagtgttggcctccgacaggtgctcagtccttggt

SEQ ID NO: 240872 - DNA, 875 bp, Homo sapiens
  chr19:57862381-57863256
  hyper
ttaaaagcagctgtggcctccgagatatcgttttcccagtcttttctccccctccctgcacgacgcctcttggcagacatccgggagaacccgaaaggcgctcgttgcctggttggatgcagggtacaaactacgttacccagaaatctgtgcccagctcattgttagccggcgtgcagccaatgacagcccagaaactgggcgtttcctgctgctctgggctgcaggggcgagacttctggcgtcgccgtcgtgacgtatttttcctatgcccggtccgtgcattctggttgtgaaggctgagttctagagatcgggtcggctttctacgcggctctcgtggaacctagcaaagaaagacagtgaagactgcaggaccttccttcgcgcttttgttacaatccatgacccctgtcgtgggacgggcggcctctcgcggaggtgtctgccggggctgggctcttaccgaggcctccacacacgtcctcttgtccttgtctcccccagaagcagccgccttagtcttgtgagcgtttttacaccgggtagattgagacttggagtgctacactcagcccgagggcgtccagcgcggtggaggcgtggggtttcggctgagcccacagggcacagactgttcatccgcttctcatggcagcggcggtgctgatggaccgggttcaggtgagtgggggcatccctcaagcgcaccccggcctggttggtgtgtcctgggatgttcgctctcatcgcgcacttcagggtgctcactccgtcgcattatgtggaggggttccgctcccctcatcagtggcataaggtgtggaacggactcgaaggcgcaggggcagttcgtacaaatgcatgcatggaga

SEQ ID NO: 240873 - DNA, 913 bp, Homo sapiens
  chr19:57874397-57875310
  hyper
agtgtgtccctttggcggtgtagccgttgagaacttgctgtgcttcacaatccgatatcataggtccctcacatttctgtgagtatcctagaccttacttcaagaaaatctggttatgtcgcctttaagagcaacccaagccccgtcctgtccgtggagtccggcactctgtttaccagctcccctgacggtgccactgagcctctatccgccatataaggactgaccaacgctctaaggcaagtccagaagcggtgtcgaaacttcataacccagaagacactgcggttctcggcagcgcgactgacccaatgaatgtgcaggaaggaacctttgcgtgcgtgcgtgcgtgcgtgcgtccgtcctcgtgctcgcgcatcgtaggagggcgggacttccggcgtcctcttgccgtggttgatttgattttctctggtgttttcactagttccggcctttggcgctctatgacgtcaccgaagtgacggagcggaaaagcgcgagaagcggcttggttccttgtacgcagaggcggtagtgacacaggcacaactgacagtggcagaagctcagctgacaaggactggggacggcggtgtccttgtcttgcctttgtcgcccccgcccctctcttccctggctggacttgcggagtccccgccgaagaacccgaggtgggtgccccgtcccaggcccccccccacctccgcccgacccctccttccagtgctgaagcccatagaaggggccctgcaggtcaggccccttgtctcgaagagaggggcgttcctgtgtggggtccccgtatcagctggtttgatgcagcctcagagctcccttcggggatctcaggttcagagcatggaggtgctgccaagtgggccgcgtcggggagcccggagtgtgggttgtt

SEQ ID NO: 240874 - DNA, 83 bp, Homo sapiens; identical to SEQ ID NO: 205625
  chr19:57901385-57901468
  hyper

SEQ ID NO: 240875 - DNA, 540 bp, Homo sapiens
  chr19:57988571-57989111
  hyper
aggaatcgttcattcgaagctttgggattcagagatgggggtcagcgcgcagactcgcagacgcagcacccacctgtgccgggcccatcggctcagccgccgccatcaggcctgtggactacggaagggtggcgacaagtgcaggaacctgggatcagctgtccagggcccagcccagcggctaggtcactcaggcagcgccactgtcaagcctcaggcccacctctcttcagggaagaagacactctctcacgttttcccttttctgtcacctcaggtctgacattgcgttctggaaactaaaccagtggattaatggaaaagcaaacaaaatgtccacccgaggatggtagaggaagtcccgccctgacgttggtgaggaccaacggaaacgcctatttcctgggttttcattggcccagagccgccaagtttcctgggtaatgtagttcccacggcaccaacactagtaagcggcgtctcgcttcacctccaggttaaaagcccagagaagaccgccaggggcgcgtggaaatggtg

SEQ ID NO: 240876 - DNA, 495 bp, Homo sapiens
  chr19:57998876-57999371
  hyper
tccatctcctattccgttatctccatctccatcatcatctccatctccgtctccatctccatcatcatctatcatctccaatctccatctccgaagttatgcccacttcctggaagtttggaggcacgggaactacattgcccaaaaggcgcagcgccgcgaggcggcgatccctgaccaatgaaaagaggtctgcccgagcgtgcgacacgcaatgggcgggacttccggcgtctcgtttggtattcactttcgcgactcaggtgaactaacctgcgagaagctggttgtgcgctgaggcgaccagcgccggaaggcacggtggcgactcacgctgttctcgccgctcagaggcgggtctgaggctcggtggcggcgcccagggtggcccgggccctttcctcggtcattgtctcccctccagctctactcacaggctccgatggcggcggccgccctgagggaccccgctcaggtgagcgccgcgtcctcctg

SEQ ID NO: 240877 - DNA, 431 bp, Homo sapiens
  chr19:58011065-58011496
  hyper
tctccatctccatcatctaccgtctccaatctccatctccgaagttatgcccacttcctcgaagtttggagccacgcgaactacactgcccagaaggcgccgcgccgtgagccgcgatgcttggccaatgaaaagaggtctacccgagagtgcgacgcgcaatgggcgggacttccggcgtctcccctcggcggttgctttcgctgccctcaagagaactcagcttgccggaagctggttgttcgctgcggcgaccagctccggaaagcgcggtggggacgcgctgtgttctcgcagctcagaggcgggtctgaggctcggtggcggcgcccagggtggcccgggccctttcctcggtcgttgtctcaccgccacaggctccgatggcggcggccacgctgagggaccccgctcaggtgagcgccgcgtcc

SEQ ID NO: 240878 - DNA, 497 bp, Homo sapiens
  chr19:58070515-58071012
  hyper
acaggcccagggagcagctccggaaacaacatcctgagcgacgtccccggaccgtgctgtgcactgagacggacacacacacatcacccagggagccgttcaagcttcctcaaccccgggggggggaagagtaaatatttctactttgcgcgcgcaaaaatgaaggacgaggacagtaacgggacttgttcaaggtcgcaggcccgagaaaggacatggttggaagagccacgaggaggactgcggtcgctcctctcacctgtgaggggttccgggaccctaaaagccctatttcataccacaacgccgcgcaccccagaaacggggacgctccccacgccaccgcgggcctgcattccggacccgggaccgcgcgacccccttctaggcctctaagaagcaacggcagggactgcactgaggacgaccctgaaacgccgtccttccgctcgtcgggcccgggacactgaggccgggtggccgcggggagccgagcc

SEQ ID NO: 240879 - DNA, 97 bp, Homo sapiens
  chr19:58090383-58090480
  hyper
aagcccagggttccggtgccctccctgagattcacccggaacaagggctaagcggcccgcggagggcgctaggaaaaggcgcgacaccaagagcgag

SEQ ID NO: 240880 - DNA, 880 bp, Homo sapiens
  chr19:58094904-58095784
  hyper
cccatgggacgtctcggccccgcctcccgcctctgggtacagtcaaagggctcaggtcagagcaggagcagccgggggcgcggcccccacgtggcctcccgggacacgtgcccacagcgcgacacctaagtcgctcctttcacagaatagccttggccccggcacggcctcgaacgccttgaccccgcaagggaggggcacgaggctcctttgctcccgcaggagcgtcgaatacgtatggaatacgcgtcggtgtggatctggcctcagcttcctgagcctgaatcaatgcttctaatcacgtgggcgctcagccgcgacgggaccacagaaatcgaccagcggcctgtttaaggagcgacaaggcccagccctctcctgcattgtggcgacgccatttccctgcgcccccagcgcggccgcttggcttttgtttgaggtgacgctgggcggcagcatccttccctcagccctggggaccagcggggactacagaacccagaaggttttgtctccagccgcagggatgctgagccaatccgcgctgagaaaagggtcgtttccgctttgggaccaatgggtcggggagggacttccggtatcacttcagtggcggtcatttttgcagcgcttgggtgcatccagaccgtcagagctttgggagcgctttgtttggcgacagtcggaaggcgcgaggggaggggtcctcccgctgaacagtgggggttctaagggtcggcggcggcggggttgacggctttgcctaggtccctccgcccgtagctgtcgggtcccggccccgctctgcccacagactccgatggctgcggccgcgctgagggccccgactcaggtgagcgctgcctctactgggcctcac

SEQ ID NO: 240881 - DNA, 717 bp, Homo sapiens
  chr19:58111073-58111790
  hyper
tccacctttctccatagcaacggggtcattcctccctgaggtccaggagaagggcgacctctgccagcccaagaagcggtgagaactacattacccagaggcccgtgagccaggttcttggcgtggagccaatgaggctcaggggagggacatttccgctctgtccaacttgtcggagcggaacttccggcgtcctccctgtggcgggcactttggcttgtgtcagttccatccgcgggtgccggatctggacctaggtgctgacagcgagaaggcgcgaggagagtcgttttctcagctgcacagccggggcctgacggtcgccggcggtggtgacagctttgctcttgtctccgcccggatcgtccaccgctcccggcccgctccgcccagagtccgatggcggcggcactgagggccccgacccaggtgagcgctgcgtcctcccggcctcctctgccctccccacccgaaactgagggacgcgtgaagggttttctgcagcccggaccgcactgtccggcacagtgaggcgctggtgctggatctcgtttctggtagtgtggcagggagcgggagagcgacacggtcagggggctgcgcgggcaacagcttggagctgcgcctgagccgggaggctggggagacccaggccggcctcacgcgtgcaggtagcagagggtggggcagcgccgcgctgcattggccccactgagt

SEQ ID NO: 240882 - DNA, 838 bp, Homo sapiens
  chr19:58144181-58145019
  hyper
ctgtctctggggcaagaggtcggggagctggaagaggcaggaaaaggagcacactcgaagtaacgtttattggggaaaaaaaacgcctacgtgtaaatggacccgcacagctcaaacctgtgttgttcaagtgtcaacctacttaagacctcaaacaccgaagcccctcagtcgccctggaaggcagcagacgcagcttcctagcgctcccagctgtctgcacacaaggcgccctccgtcgcagcctgggggagactacattacccagaaagccttgcgtcgagcggcagtactttgatccaatgaaaatccaagacaggggcatttccgtgtgggtctacccccgccccccccagggcgggacttgtggcgtcttcgcagcggtcattttggctgccctcccggaggtccgttctgtctgtcagccgctttggtacgctgcatcgggatcgaagtgacggaccgtgaaggcgcgagagtcaggtctgagggtcgggggcagagccgcccgcgaggccggcctggggatagcgatgctcgggttccccccgggtcgcccgcagctcccggtccagctccgcccacagactcggatggcgaccgcactgagggacccggcttcggtgagcgctgcgatctccgggcctcccccggccgagattcttaagtcccaagtgagaggcaccagctcacgtctctgtagcacagggtcggggacactgaggctcgtgggtggggcccctatttctgacatccgatgtggtgggcagggggacaagggacaggaccggcgcgtgcagggcttggacgggcaaccgagaagggggcattcaggaac

SEQ ID NO: 240883 - DNA, 575 bp, Homo sapiens
  chr19:58175631-58176206
  hyper
ggggtcgggcgcggcgatgccgcagctgcggggctcggtggactcggcgagcaagagccccaggacgctgctggcggcgggcgaggagctggggcgcggcgcggggcggctctaggcgctgtggccgctcagcgtctgggacccagcgccgcccaggtcagggaatccttggtgttcccgccccgcagcacccggggcgggggaggagtcggcgcggtcgtgcggccgtggaggacagcgagacccggggctgcggctgcaggccgaggggcccctgggacagtgagaagcagcggcgggagctagtcacggggcagggagcgctcagcggtaaagacggcttcatctgactccagggctggcaggcggcccggatggcatgccgtctcctgcggagaattccaatttccccctaaatcgctcaacaagcgagaaggttttgggattcgaattcagtggggcaagcgaagtcgcctttccttcttaaacagatggaatccctggtccacaaacgtaccctgtgccaatttcatacaacacgctatggctgctgcggatgagaacacagcaactct

SEQ ID NO: 240884 - DNA, 828 bp, Homo sapiens
  chr19:58193123-58193951
  hyper
cctccttctcccctagaggccgaagtcgccatttccctgcacggggcacagcacctcagaatacaagttcgcagaggtcaaagcagtggacacactccgaagagctccgtggagttttggaaactacattatccagagtgcagagcgcaaaacggcggcggagttgagccaatgacagcccaggatagcaacacttccgcgcacgcgcagcgcgacgggccggaacttccggcgtcctcctcgtggcggtcattttggcctctgtcctgtttgtccagcccgccagtttctgcagtggaggtcgcgactgagggacgggacagagaagtcgcgaaagtgggccagaggttctgcgacaccacctcgggtgagctgcgccaggcccgggatagggactgttgtgttcgaatgcccgccccggtcggccgccgctccccgcctagtccacggagctcaatggcggcagtcgcgctgagggactcggctcaggtgagttgtgcgtcctccgggtctcgcctacctcccccagcagaagccttaaggcccagtgagggatgcctgctcacagccctgcagcccaggccccagtaccctggacaagaaggcgcttgtggattggacccgtttgtgacgcccagtgtgtacggaaatgtgacgggcagttgactggcgcgtgcagaacttggagctgcgactaagctgggggggattcaggagcctggggtccgtctcgggtctgcaggaacatagagtgaggcagagttgcacctgacgaatttgacgattctgaggacactggcagccttcgagatttgtgaacagataggg

SEQ ID NO: 240885 - DNA, 815 bp, Homo sapiens
  chr19:58219952-58220767
  hyper
aactaacataaatggcgtccctcctttgttcagaactctccgtggcttctagcatcctcacaatgacagtacaaccctaggagtaactccgcctcatattcttcgttccctgcagaaaacagctttccgaattctcctggctcagtcgcgcctcaacctttgcacgcgccggttcctccgcctgtcacgctctcccacacctcgtcacacgcagtgtcaaaaaaagggccccacccacgaacgcctcagtgtccccgaccctgggcagcggggactcgagcaggcgcccctcactgatggctttagaacgtgggtgggggaaggtgtgtgaggacgggaagacgccgcactcacctgagttggcgtcctcagagtggccgctgccatcagactctgcgggtagagctgggccgggagcgacgggcgacattggtagggacccggggacagcggtccctatcccaggcctgacgtgggtcccccagggcggcgtcgccaaggcttagacgctttcgtgcaggagggacgacgactcccctcacgccttcgtggccccaactcggcgctctgctatctctgatccggtgaacacacctcagagaagctaaaatggccgccacgaagaggcccccccaaaagtcccgtcctttctttttgtgactctcaaggaaagtcggttttctgagctcttactggcttagtagcgtggcgttcaacgcagagcattctaggtaatgtagttttcatagatcccgaggtgggtgccggggaccctttgcaccaacctcttggagtaaaagcgaagctccagggcg

SEQ ID NO: 240886 - DNA, 290 bp, Homo sapiens
  chr19:58238326-58238616
  hyper
cagtagcctccttaccggtctcctcgtatccatcctcgcagtccccaccccaaactaatgttctcccctgagcaaatttcgagacacttaaaatcccagctaagatcacgtccttctattcaaaaccctcagttaatctcaacgccctcagaatgaagcgacaacttctcagcctgccattccagtcacagttcctcaaactctgctctgtgttgatgagaaccctgtctcccaaatgtttgggggtcagcagcacccccgagcctttacctgcgccgtcccctccgccc

SEQ ID NO: 240887 - DNA, 200 bp, Homo sapiens
  chr19:58239036-58239236
  hyper
gaaacacccctctcctgggccctcattgggtatgcaacgtataggtttgtgggtagagtgtggttcccactgagctatccttcaaggcaggggattctcggcctgggctcttgggaaaactcgaagtaggagggccaagttgtttgggaaaagtaacccgagtttcaaagggctgacaggacttccgtcctctttttttt

SEQ ID NO: 240888 - DNA, 668 bp, Homo sapiens; identical to SEQ ID NO: 205639
  chr19:58258068-58258736
  hyper

SEQ ID NO: 240889 - DNA, 807 bp, Homo sapiens
  chr19:58280746-58281553
  hyper
acagtacccccagaaatgtgcgtatggcctcttctaagatgggagaccctcctccgcatctggacctggagtcgccatttcctagcgcccctcgcagtggagcttgcccctttcttcggaaagtcggaagaaagccaccttaagcgctgcccatgtctgggaactacattacccagaatccgccctgcgaaatggtaacgtggctgagccaatgaagcttcagagaagccgtgccattgccggggcacgtaaagtcaagccaggacttccggcgtcctagccgtggcagccattttggcctgtcaggtccatccggcgatgctgggtctggacgagctcgggaggagtggttgtggccattgcacacaggcggatctgaggttcggcgacgccgctggtcgcgacccgggacaggacaacgacaggaacaccgccgagcccgcgttccccccccgcccagagtcatggcggcagcagccgctctgagggcgcctgctcaggtgagcgctgcgacctccgggccttacccaccctacccacccagaccctgaggcccctgatcgtgagggccgcctcctcgcgtccctgcagcccaggcctctgtcagggacggagaggcgccggcgggtgggatccctgtttccgacacccagttgatgcggtcggcagagcgagactggcggagggcaaaggcctgcaggcgcgactgaggcaggaggatgcggaacacggggacatcgtgtgtctactgggaaagaagtgtgatacggagttatttctttttttttttttttttgagacggagtc

SEQ ID NO: 240890 - DNA, 77 bp, Homo sapiens; identical to SEQ ID NO: 205642
  chr19:58331143-58331220
  hyper

SEQ ID NO: 240891 - DNA, 545 bp, Homo sapiens
  chr19:58361166-58361711
  hyper
tcggaaagaaggcatttccacgtgtgcacgtaacgtaaggccgagacttccggggtctctagtagcggctgtgtatcggcgatgcgggtgtttccccagtttgtggcccctgagtgctgggtgggaccgcggtgactgaacctagaaggtggagaggaatcgtcctcggtgcccagaggcggctctgcagccccgtgacggcgaccactgctcccgggccgtgcttccccaagtagtccgatggcagcggctgtgccgaggcgcccaactcaggtaattgtggtgccttctgtgccctcaggtcaccccatcgtcacccaggtcctaaaccagcgagggagcggctcctgctcgtgggtctgtagccggtacccggcgtaggaacactgaggcgctcacaggaggcctctccttgtaaccgtccagtgggttcacgttgccagctgcctagacagagccgatttatgaagactggggaattgcgatggagaaatagtaattcacgcagagccgtcctgctgttcgggagacaggagttttattat

SEQ ID NO: 240892 - DNA, 438 bp, Homo sapiens
  chr19:58400080-58400518
  hyper
ctgcttttgggtgacgatgaggtgacctgaggacacagaaggccccacaattacctgagcggagagcctcagcgtagccgcggcagccatcgaaccacgtggttttaagcagagtcgggaggatagggcgaccagccaggagatatgggcacgacggtccgtatcctggcccaggagtgggtcacgctgggcgccgtcacagagctccagagtagcctctgtgcagcggaggacaactgctccccgacttctgggttcagtcaccacagtgcggacctagcgctcaggagcctctcctacaaataaatccaacaccaatcaaaatggccgccaccagagggcgccggaagtccggacccattgtcacgtgcacacaggaaacgcctttattctgagccctcagaggtcttctacgctatcattcgaggctgagttttc

SEQ ID NO: 240893 - DNA, 548 bp, Homo sapiens
  chr19:58446253-58446801
  hyper
agcttcgcctcacacgttgttccctacaggcgcctgtggaccccaggttccatcctcccgggtctgtcctccaggccatagcccgcgccggtccctgtgcctgtcgctctccccaccgcatcccacaggtgtcagaaacaaggacctctcccgcgaacgcctcagtgtcccgacgccgggtccgggctgcagacctgtgaacagtcgccgctctctcgctgcttcaggattcgggttaggatgaggtgacctgagggcagggaaggcacaattacctgagccgggagcctcagcgcggccgccgccatcccgagtacgcggggaaagcactgccgggagcggcgggcgccgttacggggcctaagatctgcctctgtgcagcaagaaggactcttcaccttctgggttcagacaccgcggttcggacccatagctccagcgcctctcacctcacaaaccgcagaaacacacccaacattaaccaaaatggtcgctaccagagaacgctgagaatcccgccactacgttacgtgcgcacacagaaacgc

SEQ ID NO: 240894 - DNA, 945 bp, Homo sapiens
  chr19:58458427-58459372
  hyper
ggaaaccctccccttcctggcgtagatttcataaccctttacagccaagggaaacgtagaaagagccaggcctcagagaagagcatctatggcggtattagatgggctcaagccaccccgtagccccatgcctggccttggagccgggtgccctcgcaatggctgtgtcacctctgtgccccagggctcagtggcgcctctcatcaggggctccttgccagtcgcgccctcccttccctagcacaccaggtgttggaaacgggagcccctccggcgagcccccgtgtcctgtcctgggcagcagggccgcgagcaagcgccctcgggggtgctaggactagcgtggggagggcggggaaggcccagaggacgcggcacatacctgggccggggccgtcagctcggccgccgccatctgactctgtgagcggagcggggccagagaggatgtccttattccgggccgggcctgggtaccctgggcgccgccgagcctcagccacgcctctgtgcagcggggaagactcctctcgcgccttctcagtcagtcacggatgatgctgacccagcgctccggggctttctaccaagtaatcagtccagacaaatgccaaaacgaccgccacaaggaggacaacggaagtcccgccgcgaccgcgcgtgcgcttacggaaacaccacctttcggaggcctcattggctgaaggtcgccgtcgcccaacgcaggccattctgggtaatgttcccacaggcgcacggcgggagagtgagggtcgcctccacctccttccggaagtaaaggccaaacccctgtagggggcgctgggaaatggacactccaggttggggcggaggcgaggcttcgttctttcttaaaggagacgtacccaggtttctaccgattgctgtctgccagtgtttgtttggagacgtgtcatttcatgt

SEQ ID NO: 240895 - DNA, 1147 bp, Homo sapiens
  chr19:58513564-58514711
  hyper
caacccaggtctgacgtccttcacagtgctttgtgtgaactggcagggggagaaacgacggctggggaacgaacggggttattcgtcccatcaatggcctcagaagcatccttatcacctgcttccagagctcccgacccaaatttcctcctcaagaccgacgcggccgcgacgctgcaaaagctcgtcccggcctcacctggctcgcggccggcggtcccccttgaaggcggcgcagcaggatcggggtctgcccgcctggggcgtttggcttttgtcccgcgccgaggtccggcccaggagtgcgcttgggagctcccggcgcggcctcggggacaaaggcccgcggagccgacgtgcagcagagttcacccaggcccgtccgaccagaaaacgaagaacgcccggaggcgggaggccggaggcaggctgctggctggagaaccgacggcaacgacggcgcaaagccggcgcggaaagggcaggcgcaggacccaccctgacgccgcctctcccagccggctctcctgaccccccaagccccgcagctacggcggccccacagcctgagcaaaggcctcacctcagccgcggacaatggcggctgcttccccggcgtcgaccggagcgcgccgcggggtctgctgggagctgtagttccaggcgggcacttccggcgtcgggcagcggcgccgccatgacaggttcctgggccgcgccgcctcgccctgcctgggcggggttgggacctttctggcacctgcgtcgaagccggcggcaggatggactttgttgtcccggtcccagaccaccctcctccaccgtcgcctcccactgcaaaaaggcctgggtaagtcgcggccccgcgggcctcggtttgcccatccgcaaaatggcgcctcgtggtaccgggtttcccgggaggagctcggcgagttctcagcgctctcgagggatccttccatttggcgttcgcaagattgtgagaaagtgactgctgttattctctttaagataaggaacctaattcgagctacccttctctgtgaagctcgacggctgagaacgtcagggctcgttcccaagtctctttccagaggccaggctttatgggagcatgggttaccagcgacgcaccctgtgagtt

SEQ ID NO: 240896 - DNA, 623 bp, Homo sapiens
  chr19:58520708-58521331
  hyper
ttccacacccatgctcctctcggcacctttcacccagcccaagcagcggcggcccagtggtggaaaaggtgccacggccaaacggattggagactcaccccgcattctaggccggagaagcgggcgggcttgggatgccggcaggaggcaatgactctccccaggcgctgcatcctggctccggggcacaagcgcctctccgccctgacgctgatgctcgtctggctgcccgttctttggcatcaaaataccagacgatggtggcgcaccctgtggcctgggctgcctcacctcattcggtcccgcctagaaagaccagaggaccagaaaaccagaagcctgtcagagcgactagaggctggctccagccaacagccgcgcgcctcagcgtccacgagggttacctgggtaacgcgccgcttgggctcggcgcccagccgatgacgtaacccgcgcttgcgtagtggcgccgccctgatgtgtagtctccaggccgccccgaacaccagcccagcgggtcctggacccctaggtcatgtggctacagtggaatccaggcttggccgaatccaggacgaccaggccagacccaccggcagtaccttgcccgcccgctttagtca

SEQ ID NO: 240897 - DNA, 783 bp, Homo sapiens
  chr19:58545121-58545904
  hyper
cgtgtctggaatgccgtcgttttgccccgcggccccatcgtacatgcgcatccccgcagccgccaccgtctccactttccgcagcagcgtccctgacgctgcgcgacccgttgccaaggcgactggaaccgcggcccgaggtaactggagggcacggcgggggcggggcgctcatcccaggcggcttctgattggcctcggccgcctcgtgcgtcacagccccgcccctgcccgggagtcccgcagcggtgacttgtcaccgacgcccggcgtgatccagcggaccaatggcggccgcccgcggcgcgcagggtgcggggatggggtccgcccgcggcgttgggcgcgctcgccagcccaggggtcgccatgaccgagtggcccaggcccgagcgaagcccgcgcgcggtgagtccgccgcggcccatccgtccctccgcccgccagagcgtccatcgggacgcccacccgggagggtctcggcgccgcgtcggcgggagctggcccgggatcgcggtccaggggcgcgcgtcgggggaggcgggcccgggcccgggagggggcgggccgggccggggttccagagcccatcgggagtcctgaggtcgccgtaggggagggaaggggaaggctagaggccacgcggggcggggactgggggggctggggccgccccttccgcagggaccccgacccctgttggcatccgcctgtccgtttgaggccgaagcccctctacgtacccccattgcccgcccaaacaccgctcggccgcgtccaagt

SEQ ID NO: 240898 - DNA, 649 bp, Homo sapiens
  chr19:58570427-58571076
  hyper
gcgccgggagctcacggcgttccaagcggcacttatcccgcgttgatgcccaggcaccccgcgcgccctgtttcaccaggcccagtcactccagctccagcagcactgagagctcacgaacgccaagggcgagagcgaggtgggggagggcggccggaaatgcgcgcgcggctctctgggaaatggagttaggctcgcgccggcgcagtgtcggctgccggtgccgcggcctttgtctcgcagtcaggagggtgagctaggccggcgaggagggggaggggaggccaggccgggccgggccgggccgggtgcggggggtccggggatcttcctgaggccctggcggggcgagtttccagcagcgcgcgtctgtgtggagtccgttttgctgcccggggcctggggaaggccgtttcggggctggcgggggcaggctttgcggggcatccctagtctgagaggagggcggggcccaacgcccagctggacaggagctgctccgacggcccctgagggaacgcgcgccccgcccctggccccacctctgccccacaccgggcactgggccgccacctttgttgatggaagagagaaactgaggcatagtgcccagggccaggggaccgcaaccacccggcccttgtcactg

SEQ ID NO: 240899 - DNA, 57 bp, Homo sapiens
  chr19:58609244-58609301
  hyper
gcgcctcccctccacgagcctacacggggtgggggttgcactagttccctacctgcc

SEQ ID NO: 240900 - DNA, 245 bp, Homo sapiens
  chr19:58609901-58610146
  hyper
gagagaagcatgaaggcccacagacgctcgggggcagaccaagacgccctggggtccccgaaacagagatgtacagagtcggacacggaaagggagagaccagctcacggttaagaaaggagggagaccagcccaggatcaagaaagggaaagaccagcatgggctcaagaaaagaaagagaccagctcaggctcaggaaaagagagagacccagagaaaaggagcactcgaggctgagacagat

SEQ ID NO: 240901 - DNA, 106 bp, Homo sapiens
  chr19:58666851-58666957
  hyper
aagctcactttcggatcctgggcgttcttgccaggttttttttattaatacagagaaaaccagtggctttgtgacagttagttttgaaactccctgaggagggccg

SEQ ID NO: 240902 - DNA, 186 bp, Homo sapiens
  chr19:58694197-58694383
  hyper
ccccactccccccgcgacttccgtcttccagtccccctccttccccaaaagttgcgtggactctagccccgcctcctacattctccccgccctccctgtccccgcccctccacccagatggacggccagttaggcccgccccctgcacttccggccctacccgcccttcctcttcccaagggacgt

SEQ ID NO: 240903 - DNA, 919 bp, Homo sapiens
  chr19:58739674-58740593
  hyper
cacagaaagccaaataggctcgactgagcgatcacctaggacgaatcgcctccagttagcgtgcttccaccttccactcggaatgctccaagcagggcactcccggggctttgtttctatcactaggacgcgtccccacgcccaggctgtccctgagtccctgccacaggcgcagatgttggcgggcgcccttgcccctgagctcccggttaacggccttggactgttctcatggctcagtcttggtctctctccccagcagggcaaggcgccgggaaggcacccgagatgacagcgccgagccccataggcgctagtcccgccctggacgccgaccgccgcctccacagtctcggcttcggttgctggatgagaaccagcgtggcccgtttaagggggaggggacaggcgctgcaaggagcagagccgcgggaagcaactccctaagccacaatgctagtcgcgaacacaggaaaaagctcatcccgccgccgcggggccccatgctcccgccggcaatgactatgcctgtgggagcaacggctaccggcgcgcggccttctgggagttgtttgttgcgcggagcgcgggcacgtccgccggccaccggaagcaccgccattggccggtgcgtgcaggtgagtctggcggcctcaaggttggctcggaggtttcactgttagccgggtgcggccggagcgcaggaccaggccagagccgccccaagtgatctgggcgtgccggagaaacgagcagggcctgcgggggtccctcatgcggcgaggccgagcaagggcaggggcctgatgggatcgggatctctccggcctcagggacggggaaggccggtccagtcaggtttcccctgcaggagcgcccggctgggtctgagcttgtcgggaggctctcctgctgcaga

SEQ ID NO: 240904 - DNA, 34 bp, Homo sapiens
  chr19:58789724-58789758
  hyper
cttgcttttactttgcactgcggactcgccctga

SEQ ID NO: 240905 - DNA, 1174 bp, Homo sapiens
  chr19:58789818-58790992
  hyper
gtaacacaaccaccgctcccagcctccccgcttccagccgctaagcccaaagtcttttatatgaacaaacctctaactcgtcctgtgactttgatgcgtgtgcgttttaggcaccggggagcagagggtaaagcggcgcagctccgggcctcctcccgcgcaagttcccgagaagagcaggtccggcccgcgcagacgtgcacggtccccagccattaggaggagcagacggtccccacccccacaatcagtcatctctcggggtccgcccttgcttcctgcccacgagtgaggcctctggttgcccgcaacctaaggggcatcgcagccccgagcaacaccgcccccaccagccttagctgagtgctcccattggccagaggccagcgggtgggggctcccattggccatcggccataatgcttccattggtcgaaggccagaccagcggagactcccattggccgagggctgtggttcgccgcacggcctactgggagttgtagtcgccgcgtcgccggtgcggccgccattgtccggcgttcggcgagtcgggtggtccctttggctggagtgcctctctggtctggggatcacctcaggcgctgtccttcactgggcgatccagcatggaccccgaggacgaaggggtagcgggagtgatgtctgtggggccgccggcggcccggcttcaggtaacaataacaacaataacgacggcggcgggctccgggcaagcgtctcccgcgcagactgaccctttcacctcgcggcgcgatgagagcggcaccgctgttaatgcccttgacacgtggggaaactcagacgcgggtcggggcgtggtgaccgtcctggctggtcagagagggggccgggattccaaccaggcgcctggcccccgaatgcgcatgctccacgcggctctgtcctccccagggctggggtcggtcattcccgagagaatcgagcaggcccatctcctgcgttctgctccgccccgccgacacccttgcccattccaggaaggtctgtcctcgtgttgactgataacagtaattgtagcgttggccgggtgcccagatggcaagaatcatcgaatagagatgctttaacgcgtggagtcagcggacacccaccgggaccccagcaccgcggagcccctgccctggggctt

SEQ ID NO: 240906 - DNA, 89 bp, Homo sapiens
  chr19:58838428-58838517
  hyper
tggctagtctctgcggccacctccggaagggtccgccggctgtgctggtgaggtgggtttcgggggtgttctccgtcctgatccaggct

SEQ ID NO: 240907 - DNA, 69 bp, Homo sapiens
  chr19:58874447-58874516
  hyper
cacccctggaaccttgctgagttgacgccactgagctgcgtctcacacccacgcgctgtggaacaccca

SEQ ID NO: 240908 - DNA, 113 bp, Homo sapiens
  chr19:58892481-58892594
  hyper
gctgcggagaaagcggtgtagggagaggcttgggcttcggttatcatagaaacagaggccggctacacctaaaaggcggggcgtggacctaagtcgtcgccaaagaaacggcg

SEQ ID NO: 240909 - DNA, 398 bp, Homo sapiens
  chr19:58898386-58898784
  hyper
gcgcttttgcaggcgcccacaagacagggcaactacggggtagcggacatccgccaggcacgcttctagggccgcttctgcaactgcgcatgcgcttgggctgcacccattccgtctagcccaaaaggttcctctacaaccttcctccggattggtctatagggacacgatggccttttacgcaagcgtcacccgtgctgacccggaagttttcttcccagttaaaagtgttggcccgcggcgcgcggcctcttcctgtctgtaccagggcggcgcgtggtctacgccgagtgacagagacgctcaggctgtgttctcaggtgagaccgccgcggggccggggatcctagggacggttcatggtctttcggggatagtgccccgcggcctgggccttt

SEQ ID NO: 240910 - DNA, 436 bp, Homo sapiens
  chr19:58919418-58919854
  hyper
tgctgaccttccccctaagccgcctctaaacgaggtccctcggcccctggtcccagccgctctttgaagacttgcctgatgacaggcatgtaccatgtttttggctgggacatttttctgagccttgctccgggctccgtaaagcggacacggtgccagggagagaatttcggggcggttgcgggcacaggcgggcttctgcggaggccctggcgaacgcccccgcgcggcgcggtccgatggccccatggggccgcccctccactgtgaggtcaccggggttcagcaacattcactgcggctaggacgcgtacaggtcactgaggcagaacttcccgattctcgcgccttcgttcgtttctgcggaccagcggagactcctccacaccgcccaccgcccaatgatcccactgccgcaaaccgccccaaagccagc

SEQ ID NO: 240911 - DNA, 97 bp, Homo sapiens
  chr19:58962923-58963020
  hyper
gcaagcgtctgcgcgcgtattggggcaatgtgagctctgggggctggacttccggcgttgggactgtcacttggctgctcgcgtcaggccacaccgg

SEQ ID NO: 240912 - DNA, 284 bp, Homo sapiens
  chr19:58987608-58987892
  hyper
gagggcttggggtcgccctctggggcctgaacggctcctgctgtcggcgccctggagggcccgcccacttcccgacaggccgcgcgcgtcacctcagccttcgctcaggcctttcctaccctcaacgccgttccggggggccgggcctggcaagtcctcttggaacgcctccctcttgccttccccttttggggacagatcccgaagttcgagcatccctcggataggccgggtgtcaggcctggtctctcaggcccgtccaggtgggcgtctttcactgcaga

SEQ ID NO: 240913 - DNA, 588 bp, Homo sapiens
  chr19:59049736-59050324
  hyper
gccaggggccagggcgtcttcagggtggtgggctggagggggcgggccggctagcgaggcgtggccctatgaaggggcaggctgggcgtggaggcggtgactatgccgcggatggggtgggcccagatctggggggccgcgcgcccgggctggaacaaaggcagaggcggggacaaagccccgcggcccccagtccccatcaggaacaaaggccacacccggcccagcggtcgacgcgcccgtgctgcagccacgtgcggacacctgggagcggggcccggggaggcagtgccccgttaccctcacgccccgcccggctagccacctttacctgtgcgcgccttgggagtggcgaatgggtttcatggttgttcgcgccagtcctcgcggcctccaaacatcctccggaagctgccacctaccccgcccccagccgttgtcacctggaccggagacctcacgaccccaggggcaccgcacagggggctgaggcccacccccccggggccagcctcaatgcacccacccaccacgttttcaacgcgctgatagtccctaggcgggttcgcctctacctacagaccctgc

SEQ ID NO: 240914 - DNA, 206 bp, Homo sapiens
  chr19:59055682-59055888
  hyper
gactaggagttggcgcgtgcgtactggcggcctctcccgcaccgaccggcctgggccccgcccccgggcgtgaggcgcccaatgcgcgtgcgcggcggcgtcggcgccagttatttctgtcccgccccccggcctcggctctttctgcgagcgggcgcgcgggcgagcggttgtgcttgtgcttgtggcgcgtggtgcgggtttcg

SEQ ID NO: 240915 - DNA, 308 bp, Homo sapiens; identical to SEQ ID NO: 205651
  chr19:59066308-59066616
  hyper

SEQ ID NO: 240916 - DNA, 149 bp, Homo sapiens
  chr19:59070407-59070556
  hyper
actcgggcatttccgttcatggagatgacgcttcggcggccttgcaggtcacttccggcgactttcgcggggccgggcaggaagcggagttagtcgccatctttgagtggggcagacgtgggccgcttttgctcgcggtcacttcatct

SEQ ID NO: 240917 - DNA, 64 bp, Homo sapiens
  chr19:59084981-59085045
  hyper
ggcgggccctgaacgtctccatggtaacctggggacacgactcgacatcgcctgggtaacccgg

SEQ ID NO: 240918 - DNA, 333 bp, Homo sapiens
  chr20:291047-291380
  hyper
gccggcccccaaatccaggccgccctgccccctccggaaaggggagttgggggcgagcgccgaaatctgagtggctctttcaagcctccgttgccatagaaaccggccgcacaggccgatgctgtccattacaccatcctctagcctcgcagccaatggactccgagctccatcgccagaggccccgccccccagctctggggagtccaccaatcagcaggtcccgtgacttagagccctgccctcggcccagggacaccaccaatgcgcttcgaccctgccctccttctcttcggtgtaacaagaagactcgatattttttttttttttttt

SEQ ID NO: 240919 - DNA, 501 bp, Homo sapiens
  chr20:327661-328162
  hyper
ctgcaggcggccgccgtctgcagagccaggccctgaggcgggccggcgccccctcccccgccccgaactgcggcgcaggcgcgaaccggacccgcctttgctcggcggagacagcaggcagagaggtgagcttagccctgccccacgcgcggccaggccccagccccagcccctggagaacccccgcgctctgcccgcatcctcagcccgggccgtgtcccgccagggccgggacctttgcgcctgagcctcggctttgggaggtgggggtcccagggaagcagcaggggcgggagacagaaacagccccatcgcccctcgacgcctcagggttgataggctgggtagaggcttcaaaggacacccccacccccgccaacacttcaaaaacccattcctacccctctctgcctcagtttctctctagggaaaaggacgcagttggtgtggagcagggcatcggtggtcctgtcaggaagagtggcgcgggtgccggtgggg

SEQ ID NO: 240920 - DNA, 41 bp, Homo sapiens; identical to SEQ ID NO: 205653
  chr20:362798-362839
  hyper

SEQ ID NO: 240921 - DNA, 112 bp, Homo sapiens
  chr20:388459-388571
  hyper
ttgggtgagcaggcgccgggctcgcagggcgcgctcctaacccgtccccagcggctcgacgctgtggatcccgccgccctccagccccggctccggcgccgactcctgctca

SEQ ID NO: 240922 - DNA, 426 bp, Homo sapiens
  chr20:524229-524655
  hyper
gaagcgtgagggtcggccgcgctccgctgccctatcctgggcccaccccacccgccaacgacctcgcctggctgctccctaggtacctgtggtggaagcggcagcggcggcggccgctctcccctctgctcacacagacaatatggcggcgatggaggaggagacacacggctcggccgccagccgcagggaccagagcgaggctgcagccgctgctgccggaagcggaaaccccctcctaccaggaggcggggcgagacagcttccgactccgcccccagaggaatctctctgaatgcggccatgctgggatgtcctattgtaaccttagggattcagttctggcctagggtgcaaaatggaaggaatccccaacgcaaagcagaataaggagacttgcaatagttaagcgcattttatttcaat

SEQ ID NO: 240923 - DNA, 552 bp, Homo sapiens
  chr20:644634-645186
  hyper
cgagcgcgggcatggacacgtaggccttgccgcacgtcgggcatttgcgcgccagctggctgtccaggctgcggtgcgtctgcttgtggcggctcaggttcgacgacgtggcgtaggtcttgccgcactcggcgcacgcgtgccggtgcccgccgcccgcctgcgcccccgcgcgccccgcgcgccccccggcgccccccgcgtctcccgagccccccgcgtccccgccgcccccgccccgccgccgccgcgagcgcccgtccgagatgaagaaggcgtccatggagtagctgtcggtcactgccgcctcccctcggaagtagcgcgccgacaggctcgactgcgggctttcggggtcgctgtactcctccggcgccgccggcgggtacgcgggctcggccggggccagctccaggcccggcttctggtccgcatcgtagctgctcgggggcaggcggtgcggggcgtaccctggagggggcgagaagtggaggggcggtgagaggaggcgccgaagagggtttcccgctttgagcgcgtcaccctttgcgc

SEQ ID NO: 240924 - DNA, 215 bp, Homo sapiens
  chr20:656432-656647
  hyper
atcgcgggagctgcgctcagcactccggctgccggctttatatgggacgcaggctggagatcaggtggtcccctagcaatggaaccgctcggcgctctaatccatcaaatgtcccccaggacaatcgctccgcacacgttcccctgaaccggcggcggtgggggcaggcccggagcaggcaggaggggagaaagtgagggcgagaaaggcgcaga

SEQ ID NO: 240925 - DNA, 417 bp, Homo sapiens
  chr20:656932-657349
  hyper
tgcaaaagagagggggaagccgaggggaacggagggaaagcggtcccgagcaggcggggttcaggcacatggggccgcagggaaggggatgcagaggaaagagtgcgcactggccagcggccaccctcccgcctccagtcctctccctctcccccagttctgaagtggccagggtggacgctcagctttcactagagtaagtctcccctcccccctgctcgggctcccactggagccccctgttgggtttggggttcaactttcttcttccagaactggtggggggagcaagtcccccacgccgatgcctggccttgctcggttggtcctgttccggtgcctagctcaggcgggcgctgcaagaggaagtgaaaatcgtccagtaattaattttcctgctgccggggggtggtggtt

SEQ ID NO: 240926 - DNA, 319 bp, Homo sapiens
  chr20:865713-866032
  hyper
cactcacccggggccgaggcgttagccctttcttgcaccaggtgccgcaacaacaccagcagctggcgcaggctgtgctgctggtcctgcaggaggctggagttgtgcctgacaccgcgcaggccgcgctcgatgttggtgagggcggcgctctggcggctcagcgtgttcagcagcttcgccttcttgctgaggatgctggccagctcctcctgctgcttggtctccagggcctgcaaccgcttctcgagcgcgctgcggggtagggggcgcacagaggtgagcctggcatcctcgcgaagcacgcacccccgcgcgc

SEQ ID NO: 240927 - DNA, 521 bp, Homo sapiens
  chr20:982677-983198
  hyper
ggtctgccccgcagcgcctgcccggccgccctgcccagccaccccttgtaccttgcttcttccttcggttcagggcgagcatgtccacggcgtgggcgacgagcaggagcaggcagagtggcgcccgcatctgggcagccggatccgggctggcgctccccaggcggcccgacggcccaagggccccacgtcccggcggcggcacggcgggcgcgggggctgctgtgggcgcgccgggcgcatccgccaggcgcgggtcggtccggccgccaggtctagtgagggcgttggcggagccggggcactgccctggcggggaggagccggcgcggcgggggcggcgcgttaaccagctcggggcccgggagcgcgcgcggggagggggcgggggtcacccgggtcggggccctcgagttcgatctgtcccgcagccggcggtcttgcgtctttcccgcccccagcactgcccccgagcacgtgcacgtgcccaccgccagccacaggtacgcacgcgcgcgcag

SEQ ID NO: 240928 - DNA, 229 bp, Homo sapiens
  chr20:1099000-1099229
  hyper
ccagccccttccccggcctagcataccccattttgtggatgggaagtctgcctctcagcaaggtggcctcttggaggacgctgtgcccgcgtcaggcgatcctgtcgactgccgccaagacccggcttccggctttgaggggccacgccccgctcgcactccctggcggaacctttcagtgctgcgctcgcgttgccaacccggcgcgcctcacgcagttgcgcccgct

SEQ ID NO: 240929 - DNA, 286 bp, Homo sapiens
  chr20:1165689-1165975
  hyper
gcgaggtcaggctcgccgtccttcgccgccactccccgcccccggccctcggcctcctgccgcccccagcggtcccctctccgcgtgcgtacctgtgccgggcctccctccccgcctcaccacgctggggcgaagggcgcccggccgccggcgggcgagggtgcgtcctctccggtgcccgtccgccttcctgcagccggcgtacgcctgcgggggtctcgcctgcgggggtctctctcctgcggcgcagcccggagggcgcgggcccggccgccaccgcctcgcc

SEQ ID NO: 240930 - DNA, 132 bp, Homo sapiens
  chr20:1206201-1206333
  hyper
ccaccaacgccctgcgccctcgtccctctcagtcccggtcctctccactctagcgcactgccctactctgtccgtacccccagccgccgccgccgccgccgcgcccagtccctcggtcgctggcccgccctt

SEQ ID NO: 240931 - DNA, 721 bp, Homo sapiens
  chr20:1206688-1207409
  hyper
cagacgcccagcggcgccaagaacccggccaagctgacttggcgactcctcgcagcccctgctctggcacgccacacctcagacgaggctttgaaagtagggcgcagcctgagaggccggccggaccccgagtgctgtaggcgggctgggagatgggggccgccgccacccacattcccacacgcacccggcgccggcgcctcacgccgtgttagctcgcggcgccaagcccggagggtcccgcctgaggaagaaaggtcgtcgcccgcagcccagctggggctggaggcgcgacccggggtctcctcgcccgcacgcggaagaaaatgggcgctgtggcctcagtttccctctgtgagcacccggcccggaactctgaggagtcgtctgtggaggagcctttggcgtccccctgcccctgagcgtggccgtcagctcttcccagcccctgcactttgctttcccctccctcacgcccggaagggtctcgccctgcccggctcagccctctctccccacgcccctctcccagggtccccgcccggtccccttccgaccccttcctccctcccttcgctccctccccgccaccgccgccaccctgccctttgcgggccggtttccacggagtggccccatcccggtggcttcacgttgcacgaagtcagttcaatctggagactgaaaaagcctccgggacgtggggcgggagggtgcgggg

SEQ ID NO: 240932 - DNA, 104 bp, Homo sapiens
  chr20:1294287-1294391
  hyper
gggcgagaggagacgtggctccacgcggccactagggggcgtcaaagtccatgcccttaaaaagccaggaaaacggggagggaaggggcgaggatacaggaaga

SEQ ID NO: 240933 - DNA, 328 bp, Homo sapiens
  chr20:1372854-1373182
  hyper
caaaagtaaaaagacggaagaaggccgtgcagctctacttcccccaaggccaggaagggccaaagcaatgacttaggaagtgggatgtttccccaccctaggcaaaggggcgaattccgagttccccggaggaagcagcagctctgcagactcggaattacctcgtcctcatctccagtgaagggagggatggaagtgggggcaggggcacagaaatggtacaaatccttcctaatggtccctggccagagctctgcccattcctgaaagtgtgaccttgggaaagtgagaccttgggaaagtgacttcgcctcgccaagcctcagtt

SEQ ID NO: 240934 - DNA, 628 bp, Homo sapiens
  chr20:1783321-1783949
  hyper
tccaggcagtaggttcgccagccattgcttgtgcgtcttcgcggagagagaggggggagatgccccggcgctccttacccggctggataagaccctttggggaacttgctgcttcgcaagtcttacttgtgaggacccggagggtttgcctttgaccccgcctgtgaccttaagaaaacccctttctaccctgcgcctgtcccacagctggaagtgataattttaagaatgaattaagcactcggtgtgtgacactgcggcactaagcactttctggactgtgttaggccccattttacagacggggaagctgaggcctccagaggcggagtaacctgctcatggttacaaagctggtcagcggcgggcaggatttgaatccagggttcccggttcctaatcctctgcttttaccacttaatttatcctgcctccaagggctgctgggaaaaaggcggatttcaaaggagaagcagctaaggaaaagctctggaaagggccaacggagcggatattcccggagcccctctgcgagccacgcgcccctctgggaagcccgcttccccctgcagacaggcgctgtgacacgcttgcgccccggtcgaacaggcgaagaggccgaggccca

SEQ ID NO: 240935 - DNA, 1250 bp, Homo sapiens
  chr20:1874960-1876210
  hyper
aagcggggagcagccgcgcggccggagtccggaggcgaggggaggtcggccgcaacttccccggtccaccttaagaggacgatgtagccagctcgcagcgctgaccttagaaaaacaagtttgcgcaaagtggagcggggacccggcctctgggcagccccggcggcgcttccagtgccttccagccctcgcgggcggcgcaggtccgggcccggcagggacggggaggggcagagcgggaccggtcggggctggggaccagccgcgcgggcttctgaacgggcacgctgtcggagccggaggctcgtctagtcccgagccccagcgggccgcggcggctcgcggggccgccttcccgggacagcagccggggcccgggcgccggcgcgggggaggacgctgccctccccggccgggcgcgcagctcgcagccctcgctccctcccccggggcgcgcaggcgggcgctcgctcgcagagaaggtgccggcggggccggagccccgaagcctccccgggcggcgggaagacgggaggaggggaaagggaaggagggagggggtcgggctgccgggagggcgggggcagcggccgggactgcgggccgggagcgagcccagccgcccgcgccgtgtggagcccgggcggggcaggtgggcagcggcgggggcggctccgcgcggccgggctcggccgtgctgcccctcgcccctgctcgcgcggtcctctctcccgcgcggtctgtcggtctgcgcgccgcctcgctcctcgctcctcgctctccccctctttctccccctctcgcctctccgtgtctctggctctctgcctggctcccttgggtctgtttctctctcctgccgcctctctctggccgcccctggctttatttctcgcgcgcttggggtctctcccagtctccgtctctccatttctcctggggggcggggagggggggtctccaaaaaccgcggcggcggcggcggccgctccaggcgcccgttccggagtcggggggaggcccagccgggaggggggaagggggggagccttagtcatttccccgctccagcctgctcccgcccgagcgcgcactcacggccgctctccctcctcgctccgcagccgcggcccatggagcccgccggcccggcccccggccgcctcgggccgctgctctgcctgctgctcgccgcgtcctgcgcctggtcaggtaagcacccccccgctccccaccgctgcactccccaa

SEQ ID NO: 240936 - DNA, 291 bp, Homo sapiens
  chr20:2082271-2082562
  hyper
agtatttattaggcgcctactgcggacggttggtcttcacgcagatcaggcgagaagggatagtgatgcgcgggccgctgcggagacccggagcccgccgcggatcacgggaatttcgcgcctattttttgttggctgggtgttctcgccagtgattgggtcccggcaaggcgtgccggtgcgctcggctgcggctgctccgtcgacctttgcaggaccgggcggtgcagggctcactcggctggcgtcccgggggatgggccaccaggagtctccgctggcccgggcgcc

SEQ ID NO: 240937 - DNA, 171 bp, Homo sapiens
  chr20:2187674-2187845
  hyper
ctctggtgtatctcttttgacgtctgctacccacagcctggggcaggagagtggcgacggcgaggagcaactgcacgcgacttgggaccttgccctgccccgcggcccgcgtcaccatggcaactgcaggcagccagcaccgacggcgggaaaacgaggaccggagccgcg

SEQ ID NO: 240938 - DNA, 88 bp, Homo sapiens
  chr20:2502471-2502559
  hyper
gacgtgggtggtcgcggtcaaaatcaatttctcaaaagcggcctttatgccaggccggaggggctccccctagcgagtgagggaagca

SEQ ID NO: 240939 - DNA, 494 bp, Homo sapiens
  chr20:2539184-2539678
  hyper
cagaaggagcgcgccgggggcagcccaagcccggggtctccccggaggaagcaaacagggcgcaggagacacagagaagagctgggggagcaggagcggggcgaggcagagaggacctgcgagggcaggagaaagcgcgacgagagggcctccttccaggagcggacagcagccccaaagagggaaaaggagattccgaggagggaggagaagtcgaagcggcagaagaaacccaggtgtgttgtggctccgattctgggcattcgctccgcgcgctcccgctccttcgcggcccttccccttcccccgtgagggactgatgcccccctccccggggagaggcagcccgtgccctcgctctggcttccgtgcctcccagcccttaccactgccccactctgcggtgggttcttcatcccagaaccgggatgaagatcgcgggtccgcgcgggggagtggccgcgggctctccactccagcgcctcgtggcaccc

SEQ ID NO: 240940 - DNA, 345 bp, Homo sapiens
  chr20:2632928-2633273
  hyper
ggacctcccgccccgacttcacccagctctgctgcccgtaactcatatgacaagaacatcaggaaccggactattaccccgaaagggccttcccaagtcgtttcgccgcctgcagtgcccgaccgggggccgcgcgtccccggcaaccacgcccgcccgcgcagctgcagaggccggaaaaggcccgctcgcccgcgctcggcaccacccagcccgcgctccgggcgataccaccctgggcggcccctccaaaggccggagatggtgtcgtccccggcctccgattggtcgggggggcgggggcgtggcctctggagcctggttccgcgcgccggagcgcgctag

SEQ ID NO: 240941 - DNA, 113 bp, Homo sapiens
  chr20:2633591-2633704
  hyper
tgggctcctttggcggccccgcagaccctcatcgcgcgggtcccagcatgcacagcgcgctcccacgtggccggccgagcggttcggggcggggggacgggcctggaaagctc

SEQ ID NO: 240942 - DNA, 201 bp, Homo sapiens
  chr20:2668734-2668935
  hyper
cctttcattttaattaccatcggggatctgacaggaagtggatccaagtgccggcatcacactctggggcctccggggggcgctatggcccaacacacagcgtggccaagcgcgcctcagcctaactcaccacttcctatctgttttatacggtttgcacccgcttaaggcggcggaggcgtgggggagttctgctgatgt

SEQ ID NO: 240943 - DNA, 165 bp, Homo sapiens
  chr20:2723863-2724028
  hyper
gttgttctcacgttcgcccttccagcctctgcggtgtgtctgtctccccctggtgggcaaggagaggaccaggcagcggcacccggagggtcggcagtctctctaggtccaggggagagcccgggcactgctcctggttctagaccccaacggaagtcctctaat

SEQ ID NO: 240944 - DNA, 1330 bp, Homo sapiens
  chr20:2731110-2732440
  hyper
gagcagtgaacacacgtggagaggcagtgtagaaccccccagcctggctctatttggccgctggccgagtcttctccatttccatcctcccgccccgccccagctgagccacccacttctcctctccaccccaccgcagtccccaccatcgcgcagccccccgcaccgatgctcatcgagcccttcgagggacactcggtagtgaccctacttagcctccccggagctccagtctaacgcggaaaggctgagcagagaaccgcatggggtgggtggggtcacgcggtcaaggggctgacaatcaaggaaaacctttggtagggagtgcctgctgagcccggctcaaccgaaacccgagggctgagtggggaggttgacctggggaaggaagggtggttgcagaaggaatgataaggaccgatccccagaagtgagtgctttctctttgccgggaaactaaaggaaatccactaagtcaggatcagaggtgaaggtagggctctgagactggtggattaggtcggggccaggctatctgaaaagggcggtgcggggatcaggaaaaggggaaggaggaggagaagggcgtggggagctgggtcagacgcgcatacacacacacaccccttgcacaacgccagggtaagcagtgaacacaacacacgtggagatgcaatgtagaatctggccgctggccggatcttctctacttccatcctcccgccccagcccaagccacccacttctccagttgcttccctggggtgcatgcaaacctctagccttcagatgctgcagagagtccacttgagccgtgataaatggagattgttaagttttttcttttttataataaactcctgatttgaccagatgaaaagagaaaactctccatcgagtcctgcccttaggactataactcatatgtgtatacggtttcccttttttctaatcacaaatgggtgcatgtgtgttcataccaagcgcctagggccgaggacagaggctggctcagtaaatatttgttgagtaaacaaacgaaagaactgaaacttccctgaatctcgctgccgggggtgcctggagttttccgggggacttgggctgggcctggtggagggggctgcagcgaggctctcggactgggcgctggcctgcttttggcgccctgcgtctcaccctgggagtggggggctgcgggggagacgtcctccaaacgccgcccccttccccagctctgaacgagcccaccattgactacggattccagaggctacagaaagtcattcccagacaccccggagaccccgagaggctgcccaaggtactc

SEQ ID NO: 240945 - DNA, 621 bp, Homo sapiens
  chr20:2780884-2781505
  hyper
gtgtgtgcgcgtgagtgcgagtgtgcgtgcggggtgagtgtgcatgactgtgagtgtgcgtgggtgtgcgtgtgcccgcgtgttagggagggatcgccccacggggcaggagagccgggcagtcggcttgcgggggagcggaccgtcggtcggggaactcaccgttagctgtctccgccggcggctgtgccgggctgctatgcagggccggggtcgagcctgggaccttggtggtcccgggctgcgcgaggcccagcaccgagttcctgggcgcccccagagccgggccgacggccggcgcgaaggcggccagggcgagcaggagcccccacatggcggggattgagtgccaggggcgcgcgggctacggcgggtggcgggtcggtctcttcctgccgagtgcgccgagccccccgccccttcctgccccccgcccctccgcagcctcctgcccgcccacagcccgctgcccgcctcggacctcggagaggaggagagggccgggaggagcgagcggggctgacctccaaggggccgccccaagtctcaggaccgccgactctgcccttcctctccgccgtctggggccaacccgcctcgttggcgcgctgcgcctttata

SEQ ID NO: 240946 - DNA, 376 bp, Homo sapiens
  chr20:2785585-2785961
  hyper
aagaggcggcacggcggcgcttcccaccaccaccatcaccaagcccggccctgcccctcctctcctttcccttccctcccctactccttcgctcactcacccggctgccacgtcccgtcccggggttacataacccggagagagaagcctgagcgatagcctgcgggctggggctgcggtggaggagccaagggttgatgcactgcctgacctgccctccggctcctcgcccccagcccgtattctcctcggggagccggcagccctgggtctgcccagatccggagatgcccttcccgccctccctccaagaccccctttggatcctgcattcctggtcatctctccagaaggaaggaaacgcgtccagcggtgt

SEQ ID NO: 240947 - DNA, 146 bp, Homo sapiens
  chr20:2801696-2801842
  hyper
cgtggtcacagacgcgccgggagggagggggccacgtcgggcggcatgcgttgaggcgacaggagcgcctggtcagacagcagctgctctgaggcgggggaaggcgtggtggggggtcccctgcggtgggaaccctgcgaggacac

SEQ ID NO: 240948 - DNA, 241 bp, Homo sapiens
  chr20:2801877-2802118
  hyper
agctggagggcgtcgaggccggagcgatgaccctcgggcagagggggacaggccagggtctgaggctgggagagaaatcccaagcccggcccggttgggaggccgtgggcatccacacggggcatgtgctggcggccctgaagcgccgatgtccccggactcgccgcacgcggactggggaccgacagcgcgcaaggagagccctctggctctggcaacgaaggggcgggcttggcggggg

SEQ ID NO: 240949 - DNA, 152 bp, Homo sapiens
  chr20:2821253-2821405
  hyper
cgggctggggtctcggggcggcagccaagtgaggctgcccacagtggtgatggccgcggcggcggcctcgccacgtgacccggacgggcggaagcggaagtgccggcctggagcccgctctaggtgggtgtcccctcggtgcttcccagctg

SEQ ID NO: 240950 - DNA, 35 bp, Homo sapiens
  chr20:2853882-2853917
  hyper
gcactggtgcactcgcagccggtccttccggggtc

SEQ ID NO: 240951 - DNA, 232 bp, Homo sapiens
  chr20:3026336-3026568
  hyper
agcccgagagccccgccccgccccgccatcctccaataaagtgtgaggttctccgaagctgttgcgtcgagttctgtccttcgtcccctccctgtcttccccgctgagacccttccctgcgtgggggctggagggacgcgggtccggccccgcgggcgggagtaactaagggatggccccgggccctggcgggaaggccgggccagagcctgggggcgggatgcggacgtcc

SEQ ID NO: 240952 - DNA, 582 bp, Homo sapiens
  chr20:3052454-3053036
  hyper
gggagggagggacccgcagccacaggggcgcgccccgctccggcctcgcctgagaactccaggagctgagcggattttgacgccccgcccttgaccgcggtcgaggcccccacggcgccccagcgcgtctcagccccgctgtcccgcccgaactccgaaccccggaccccagcatccttgcccggcgcaccccggccggcctcgcagggtcctccgagcgagtccccagcgccgccccggctcccgctcaccccgcccgtccccgcagtgcctcccctgcggccccgggggcaaaggccgctgcttcgggcccaatatctgctgcgcggaagagctgggctgcttcgtgggcaccgccgaagcgctgcgctgccaggaggagaactacctgccgtcgccctgccagtccggccagaaggcgtgcgggagcgggggccgctgcgcggtcttgggcctctgctgcagcccgggtgagcggggcaaggcgctccggggccagggggaggcgggcgggggtgcggccgggattcccctgactccacctcttcctccagacggctgccacgccgaccctgcctgcga

SEQ ID NO: 240953 - DNA, 99 bp, Homo sapiens; identical to SEQ ID NO: 205672
  chr20:3140538-3140637
  hyper

SEQ ID NO: 240954 - DNA, 130 bp, Homo sapiens
  chr20:3154826-3154956
  hyper
cgtctggaaggtgcgacggggaaaaaatacacattacactccagcaggattgaacgctttcaccctgtgccccgcgcctggcgtaacgcgtggccccagaccacacgctgtaacccggggtgagagggag

SEQ ID NO: 240955 - DNA, 48 bp, Homo sapiens
  chr20:3185344-3185392
  hyper
ccaatctagactccgcccactactcggagccccgcccagcggcacatc

SEQ ID NO: 240956 - DNA, 207 bp, Homo sapiens
  chr20:3218713-3218920
  hyper
aggcgcagttcccccgacccccgtcacgcgccccgggtcacacgggggccgacaggcaacggtctccagtcctgggaccgcgtcccggccgcctggaagccagagccgttggtccaaaagggagaacaattgggggtgggaggagtatctgagggacacatgggtcgggggaggctgcgccctccctgggccggtccccggatggtc

SEQ ID NO: 240957 - DNA, 125 bp, Homo sapiens
  chr20:3220010-3220135
  hyper
agccgggctgggctgctccccgccgcccgcagctgctgggccaaaccgagtagacccggctccttcgagcctgtgcgcgccggacccagcagacccagcgtcgcgagtttaggggctggacgggg

SEQ ID NO: 240958 - DNA, 35 bp, Homo sapiens
  chr20:3220915-3220950
  hyper
agggcttctggcgcgttggggaagcctcatgcata

SEQ ID NO: 240959 - DNA, 1165 bp, Homo sapiens
  chr20:3387902-3389067
  hyper
cattgtggggaaaccgttgcggggttgtccaaaggggagccattgtggggcctctacagagggcgccgttcctgggaaaaattcctccctgagccgttcagcaaagaaccgtcccgaggaagccatgtcggaccacgccctgcggcgggaggcgtcgccggaccccgacagcccgcatcccccgcccggccgcccctcggctgcctctgccccgcgtacctgacggagggtgacccgcggctggagccgccaggggaccgagcgcggggcagcccctgccggcgcggggggtacacgtccatggcggcggacgactggcggcggaggaggacggtgcagctgcgagggtctcagttgcccgcagggcggctccacgctagctgcggccgggcggggcggcagggcgtgccgggtgggagggggcgcggcgcgcgggcccggcgggggcgggggcgggggcgtggagggggcgcgcgcaccgagagcggatgggggcgttgggagcggctggagttgggggtcggcgcacggccacagggaccccacttcttaagctgcgaggccgccggaccggatgttgggagcgcgtgtccgcagggtgagggttgccacagcgccgcccggcctcgtcctcaagcccggcatcatagagcggggctctgcgcggcgccccccggccacgcacacggacgcgcccgggggcggagcctctcccagcccggccccgcccctccgcctctgcccgccccgccccgcccgaccagccccggcctccagcgaagtcttccgctccggcgtcaggatccagcgcacctccccagtacccagcgcacctccccagtacccggctcgcttccctgttctccggaacggtgtcttcccgcttcctggtcatcaattccgcacccacccttcaaacatccaatagattcctagccggcctcgggttagcgcagcagtgcgcacccagccctgcgcagggcatgagcgttagaggcgcacaggatcccagaagacccctaacctttactgttaagatcctagctctaccggtttctgcagggacatgtacaagaaacttgggaaatactgcactgatagttgccaggagtcctgtatatacaggacgtatttaatgattattggcctgcgtccttcgttgacc

SEQ ID NO: 240960 - DNA, 230 bp, Homo sapiens
  chr20:3451349-3451579
  hyper
gttagggcagagtgccgggtctctaggagggcaacactcaacgcagtcggctcctaggcatccagtggggctgcaaccccgccgccggggacgaaaggcgaagggggaaaactagagctttcgccggccgggacagcgcagccgggtttcagctcgttctacggtccacgtcagaagatcgcctccggcgccgcggacgccggagaccactgtctgcgcccccgcacgca

SEQ ID NO: 240961 - DNA, 166 bp, Homo sapiens; identical to SEQ ID NO: 205680
  chr20:3452159-3452325
  hyper

SEQ ID NO: 240962 - DNA, 36 bp, Homo sapiens
  chr20:3641287-3641323
  hyper
gttaggggtgacggcggtgcctgcggggaccctgag

SEQ ID NO: 240963 - DNA, 769 bp, Homo sapiens
  chr20:3653211-3653980
  hyper
gcgcactgggcccccgggcgcagcgagcagttgtgagcaaagcagcagaggtcgcggcactcctgggaccagaaaggcaagaagggcccaggtgagggcgcagcgccccagacctgagcggagagggcaagtgggggccgggcgagccgacttaacctggccagggccgcagtcacactcctcgcccgcttccacgaagccgttcccgcagagcgccggcggcaccgggagtccggggtccggggcattggagaggcaagcgccgccccccttgcggaagaaggcgcgcagctggcggcggctgcaggcgctgaacacgcgcggaaacgggtgcctaccggcacggggagggcattgggcatggagggacagtcccccaacccccgcgcttctctgatccccacccctgggcttggctacagccgccagacgcgcagagcccagagaggggaagtaacccgcgcaaagtcacacaacaagcgggacaggggacgatgcggccccaatagtgagcagcccgggacccaaggtggaatcgcgacccgacggtgctcctcccggtgtaggagtaacctcgccaggttactcggaaaataatcttcataccgttgagaatccactttgcctgagcttcttccctttaagcctcataaaccaccctgaagcggacactatgatcattatccccattttacagaagaggaaactgagggacgaccaaagaaacgcagcggaggaagtccccaggactagccgccccgccgcagcc

SEQ ID NO: 240964 - DNA, 583 bp, Homo sapiens
  chr20:3662532-3663115
  hyper
cgcaccccgcccgcgtcctcaccttgaagcaccccggcgcctggcactggccagagcagcagcagtagtagcagcagcagcaacggggtcccccgagctctccggggcctccagcccatagctgtgagctcctcggcctctaggcagcggctcgcaactccggctccgcccaggctggattgcggccgacccgtgcccggtgcagcctcaggccgccgccttcggaccttcccgcccccacctcccaccgcccgccctcgctcccgcctcccctccccgccaaccccgctcggagcctggccaggggccccgacggcgcgcgccatgggggagccgggtcgccactcccggaccgccgcccctcgagggggtggagctgggcggaggagggaatccgtgcggcccctcggatgaccggcccgagccgtccctccccgtcggtctcagagggcctctactcctgagaggaggagagaaccgctgggaaggttcttggaggaccgcggcgtggtgggatgaggcggtgggcaaaggccgcctctcgctgctgaagttggccccaggagcgcgatcttccgtggtc

SEQ ID NO: 240965 - DNA, 1036 bp, Homo sapiens
  chr20:3758243-3759279
  hyper
tgctacgggcacatcgtcgatgtcctccctactcctggcgatcccacgcctcaccccttcctctccagctgctgcggtctccgtcgccgaggtgggtcccaggtaagctcccaggaggggcaggggagcccctcagcggcccgggacagattcccccatggctgagggcatggggaactagcctggatggagacgccgccgtcctcggagctgggcggggacctgattctgggggtgtggacagagccaagggaccgccccccaaggcccagcgccgggagatgcaaggccgggcccaaggtgttggacactgctttgggggacaggctaggtctctgcacgtggcttctgggctctggaaagcggtccattctcctgacccggatctccggagtggtaggaggcggctcagtcccgggcctgcgctcctagagttcctgtcccatctcctcccacgctcacccatcccaaggaaggagggcactcgggccccagcaggctcgtgagagcagcgggctccgccctcccaatggtctatccatcggtgggtgggtccggcgcggcgtcggggctctggcgggtacccgggcgtccccgcgcggcccgggccgccgctcaccgctgcttacgctccgcctgctggagccgccgggagaggtcttcgatccgcacattcttgagctggagcaggtgctccaggcgccttaccttcatctgcaggacctaagccgcaccgcgcaggcgtcaagcctggcggtctgctccctcctgcccggcctctgctggccgcgagcccccacccgcagccttcctagacccctcacctgcacggtctcttgagaggccaacagctcctgctccttttcagcgatctggaggacgaagctggggtcgccctgcaacgcccggttatacgctggaggccgaggcgccggcggccggtcccagctggggtgggaagcagcttagcggaggcttggacctcgggccctacactcacccttccagggccctcgaccaggccttcccttctccc

SEQ ID NO: 240966 - DNA, 57 bp, Homo sapiens; identical to SEQ ID NO: 205681
  chr20:3766679-3766736
  hyper

SEQ ID NO: 240967 - DNA, 32 bp, Homo sapiens
  chr20:3767611-3767643
  hyper
tcgctactgcgcccggcggacagcgacttgct

SEQ ID NO: 240968 - DNA, 294 bp, Homo sapiens
  chr20:3801039-3801333
  hyper
caaggccagcccacgccgagggtccaagcatcgggatatgccgccagcacctggctgctgcagcaccgcgctggacatgagcgctccgcccaacccgacggcgtcagctggcgcgcgcgcccgcgaccgacgtgcgcaggcgcccacgggccgcgcagccgccattgctctcctgccacggaggggagcgcttggtggcagtccgcgggcccggacggaaggctgaggcgacgcctcgacgacagcggaccggagctgcaggggcaacacattcagggcggggtgccccattta

SEQ ID NO: 240969 - DNA, 253 bp, Homo sapiens
  chr20:3869440-3869693
  hyper
cctctctctccaacgcaggcggaaaggaggcggcttagcccaaacatgctgggggaggggctggcggcctcgacggcagctgcggaactaggccgagggacaaaggctaaggtcagccgcggttcaagccctttcgtctgccgacgaccagcggccagacgctgcgggagcactgctgggctggaggagggctcgagctgcgaggacggcacggagcagcggggtgggactcggggtcgccccaggagagttc

SEQ ID NO: 240970 - DNA, 237 bp, Homo sapiens
  chr20:4130007-4130244
  hyper
cagacaaagccgggcgcggacgccccgcgacgactcgggctgccgggagggtgggcaccggggagaggacagaaggctcccgggtgatggcccgaacgccaggagaggctgtgctgacttccccctctgggctccgggcgtccgggtggtccccttggggccccgggcagggtgaggagcagctttctcttaagggccaactaggggctcacgggttgtcccgggcttggcgggagc

SEQ ID NO: 240971 - DNA, 1046 bp, Homo sapiens
  chr20:4229349-4230395
  hyper
cgccgtgccattcacgtcgccgcccgcgcccgcgctccccggctcccccgcggagctccggttgtcctcgccgctgcctgcgcccaccacgccgccgccgccgcccgcgccccccggcacgccgcccaccgccgggccctccgagggggccgcgccgcccgcgctgcccccgccgccgcccgcgctggagccccctgcgctgctgtccgggcggggtccctcgaaactgacgctcaggagatcgcggaaagtcatctcaacgcgcggccgtcggtggccgggccggggcacagaacgagcggccggcagggaggggagcacagggcatagccgcggggctccagatgcagctccgcgcacgggtcccgtcggggtcctgcccaagttcctgtgacgcggagcgcggctgtccgagagcggagctgcctggcccgggcggcggccgggctccccgaggccggccgtggagtagcaccgaagagccggggcccgctacgcgcgcggcgctctgagcgtgcccggcaagcgggcaaagcggcggctccggggccgggcggtgcaggcagcggccactgcggcgctcccaactcggcgcggggggcgggaccgaggaggggcagcgccaggaaggaggagggggcgacccgggccgagagacgggcgccacactccagggtagaagggacccttcgctcaggacaagcgattgtgtcggggtccggggggctgcggcgctggcgcgcgctcgggtcccgcagcagccacccacgcctctccgcaggtgcccaagcccgcgctctcccctagcggtgccctttgcgttccttcccgctcctctcccggaccccctcccccttggccctcagcggcgtccctcttcctcccgccctctcccccgagtctctcggtcactcgctggtgcccttgggcgcgcggtgcgttgaaggcgtgagtcccgggtcttcgggatcccggctttggccgccagagagcagcaagcgcctgggatctgcggactgcggaccggacggcgcagtgccgctgcg

SEQ ID NO: 240972 - DNA, 294 bp, Homo sapiens
  chr20:4804127-4804421
  hyper
gggcgccccgccctcctcgctcccctcctccttcctctccctccctccagccccttggcctttttcagcccctaccggatctgctcgtccgctgtcctctcttttctctcgctcttcatatcactctccaccccttcgccttgccttcgcctttcttcctccccttgtctcctgccccctcctcttctcccctcccctctaggggcggagcttctcccctccctcccagacaatgctgtggctgcgtccccttccccgccagctcgtccaggctcccgccgccagcgattcttc

SEQ ID NO: 240973 - DNA, 1172 bp, Homo sapiens
  chr20:4981355-4982527
  hyper
catctaggaccaaacgaaggagaaaatcctgcgccttaaagtagtcacactcgaaatgtcattttttccccccgaaaggtggcaaggagggggactcgcgaccccccagggaacaggccagaaaggccccggggtcggaggagctgcttctaaaattacttcgcgcagtctttgtagaagggaagaaagcaagaatgtaaaaggcaccctcttgccgcccctcctgatgcccctgaattccagggggcgagacgatgcccgtgcgcaccaccgggggaggggcgagggaagcgaccccaggacgcgcgggcgcagagcccgggaggaggcggcggcagccagtggggttctgggggcgccccatttgcctccccgctgcgcggcctgagggcccgagcgcgctgtggctcccgtggcgggaaggggtgggtaccccgggggcccggcccggccggcagaacggcaggagctgagggccgccgggcatcttgggccccggggccagggtggccggcgggcgcggggtcccgggagatgggtcggggtgggggcgcgcaggccgcgccgcggggccggtgggtgacagcgcgcgggggccgtgccaggccggcctcgtgggcgcggcgagcacctcgcggccccgccggcaggtgcggcccgcaggccgggcagggggcgcggcggccgggctctcacctggctgcagctcgcgtggttcccgtcctgccgccgcgcctcggcgccgcagtgcccgctgcagcctccgcctccggtccccgcgacagccgcctgcaaaatggcgccgcggaggggcgggccgggggcggggtgcagcggagccgcccgcccccgcgccggtctggggcccacctccctccccgcccccgacccctgccctcgggcctccccccggggaggggctgctccctggcacccggcagcgctccccggaacatcccgggcctcgcacccagccgtccccttcccgttcctttcatttccctcccctgcgcagaaagatcgccccccttcgcgacccttcccaccagtcacacctgttcctggggacccacctggcaagcagagcgctggtccctgagtgtcctggtccaggtcccccctttttaccccgcctgccaccgagccctgtcattgctcgagcgtgataagca

SEQ ID NO: 240974 - DNA, 33 bp, Homo sapiens
  chr20:5093918-5093951
  hyper
acctccgctgtggcgggcgagcacctagggtcc

SEQ ID NO: 240975 - DNA, 363 bp, Homo sapiens
  chr20:5100559-5100922
  hyper
cctagaaagacaacgaccactctgctacgcctgcaaccgtttaatgccgccgcgtccgcaagcgcgcgctctcaccctgcgccgcgttgcgacgtcaccacgctgtccagcccacggccttgcggggaagactttagggccaatcgtgtccatgctccccgcgaggcccgccccctagagcatacattggaggaagcgggcgcagggcggggcagcgtcgcgcaggtctccccgcctctttgactcctgaacccggccgcagaacaagtccgggcatatgtggagatcgggtcccggtcccggctcgtcaagccccagctttatggtggctcctcagcctcccactacgtgggtagaaagttt

SEQ ID NO: 240976 - DNA, 390 bp, Homo sapiens
  chr20:5107246-5107636
  hyper
agggcgccagctccggccatccgcggttaagcgggagctcccattggctaatcgcacactgaaacgcacgccttttcccgcccctgacgctgccgtccaatgcgcgcctctcgactctgctccgccccgccccgcccccgtcgccctgcctccctggcgtatttgcgccattggtggatattccggaccgtgatggtggcgctgcgcgtgcgcactcgctccgagccctgctcccgggagagggagctctcgggtcggggctagggaaggctgaccccgctcggcccgggtgaaagggcggtgacggcactgggtggggccgagctccagggctggctgctgggctgctaagggaactgtgagccgctcagagccgcgcgcctcccgggc

SEQ ID NO: 240977 - DNA, 267 bp, Homo sapiens
  chr20:5296192-5296459
  hyper
ccacatgtgggcgccgcgggatgctgggtagcaaggagatgacccagctgaacaatgcatttggtccactcctgcgaggggaggagaacgccgagggacaggaactgcgcgccagcaaaagacaccctaacctggggtgcgcccgccagctgctttcccaaggtgaaaacctccaagaggcgagatgcaaatcccagtggcgtccacacccggaggtgtcttctctccaggtcgcccctccgtctcatgcgacaccccaatccccgc

SEQ ID NO: 240978 - DNA, 37 bp, Homo sapiens
  chr20:5296639-5296676
  hyper
cgcggccgcactgtcggcgtctagaggcgacatcctg

SEQ ID NO: 240979 - DNA, 75 bp, Homo sapiens
  chr20:5297516-5297591
  hyper
accgtagctccggccgcgctgacgcgagtccccggcagcgggggcagcctctcgcacggatttcagcgccttcgc

SEQ ID NO: 240980 - DNA, 69 bp, Homo sapiens
  chr20:5297771-5297840
  hyper
aaggaaagcccggctccgacgagtgcggtgtgggcctttggagatggcggtgaaggaggaggcccccag

SEQ ID NO: 240981 - DNA, 136 bp, Homo sapiens
  chr20:5591804-5591940
  hyper
acgcggccgagggcggccgggcatcccccgtgtccccgctgcccttctcagccgaccccggcgcccgcacgttggagagctgccctggggtcataggcttgtactgtggtccaccaaagccgccttagaaataacc

SEQ ID NO: 240982 - DNA, 65 bp, Homo sapiens
  chr20:5891858-5891923
  hyper
ggggagcaggctgaggcactcgaagcgggacctcccgcctcccctaccatctcagatctgcacta

SEQ ID NO: 240983 - DNA, 151 bp, Homo sapiens
  chr20:5892463-5892614
  hyper
ttctcctccctgggtgttttccttcagctcctcccacccgtttgacttggaaaaagctagagggcttcctagcccaaccaggggagcctcagtctttctgtatctgagttttcctctagataggaaggaagaaaacgtgccatacctgcaa

SEQ ID NO: 240984 - DNA, 42 bp, Homo sapiens
  chr20:5931595-5931637
  hyper
ggacagatctgcgcgtatcctggagccggcccagttgtgaac

SEQ ID NO: 240985 - DNA, 177 bp, Homo sapiens
  chr20:5986817-5986994
  hyper
tggagaagcggctcgccagtgtcccaggctgctgagctctcgccgcccgagaccccgcggcgcggccgcagggccatgctagccttgcgcgtggcgcgcggctcgtggggggccctgcgcggcgccgcttgggctccgggaacgcggccgagtaagcgacgcgcctgctgggccctg

SEQ ID NO: 240986 - DNA, 786 bp, Homo sapiens
  chr20:6032595-6033381
  hyper
agaaagtgactcctgtgtggcgcttcaaactgggcccgcttgctcgaaaaatgtagctggtgtctttttgaaccctcctacgagctgggcacccgggtcacccctcgaggaagaacgcagccctgccccccggagcgcacgcgcagcctggctctgcgctcaggccggctgaaaacgcggggcgcccggactcaccccgttcaaggaacgtgccgctgagatccaggacttcgagcgtgaccaggggcgcgccatcctctccagcgaacgccgcctcggcgatgcccccctgggctccgcgacccagcgcggtgcaggagaggttgaggagctgcagcgcggggaagcaggcgaaggcccggggctgcagcgcccgcagcggattcccggcgagcgccagggcgcggaggctgctcagcgcgggcccggtgcacggcggcagagcggccagctggttgtagctgaggtccagggtgtgcagccccgccggcccacccgggccccagcgcagcgcggcgatgcggttgtggcgcagggtcagcacctgcagctgctccaggtggccgagctcggaagtgctcagggcgcgcagcaggttgtggctggcgtcgaggctgcgcagtgtgcgcggtaggcagccgggcaggcgctccaggttgcggttcgccagggtcaaggccgtcgcatccgcggcgggcagcccctcgcagggcgagtcggtggcgttgctgccactgctcccccaggggccctgctgagtgacccggaagagcgggaccttctcct

SEQ ID NO: 240987 - DNA, 645 bp, Homo sapiens
  chr20:6103388-6104033
  hyper
tagctccccagccctagctccggagcacccacctcctttccaggagcccgtagcgtccagcctcgcagtcgcgcacgtggagagctgcgtccctacaaactaccccgggccgagccgaggagcgggcgctggcgaagtggggagcggggggcgcccagtggcggcggctgctcagctaaggctgcggcaggtgagggctggagccagggcgagcaggcgaagctgcctcgggacctcccacggaggctcggtgcctgcccccagcctggcgcggcgtgcccggtgcactgcacggccccagcggcccggctgagggcagcgcgcagcgtggcaggcgagggcacgcccagccccgggcctgctaggtctcgctcccgcggagaggaggcgcagtctgcagatttttaagggcaaagggtggccgaagggctgctcggcggagagaaggcggcgagaacccggggcgcacgctcagtatctgcagctcctcttgcgatgtctcatcctgacgctttaaggccgcctccagtttccctgttcccccaggcccgccggggactagcccagatgattaaagccgcgccacttcccctcctttcaggcatacccatcactcacaccccggggtgcgtccaggcccaggag

SEQ ID NO: 240988 - DNA, 252 bp, Homo sapiens
  chr20:6747982-6748234
  hyper
tgaaagttgaataacgggcccagcggggaaataagaggccagaccctgaccctgcatttgtcctggatttcgcctccagagtccccgcgagggtccggcgcgccagctgatctctcctttgagagcagggagtggaggcgcgagcgccccccttggcggccgcgcgcccccgccctccgccccaccccgccgcggctgcccgggcgcgccgtccacacccctgcgcgcagctcccgcccgctcggggatccc

SEQ ID NO: 240989 - DNA, 290 bp, Homo sapiens
  chr20:6749374-6749664
  hyper
gccggcacccgggagaaggaggaggcaaagaaaaggaacggacattcggtccttgcgccaggtcctttgaccagagtttttccatgtggacgctctttcaatggacgtgtccccgcgtgcttcttagacggactgcggtctcctaaaggtagaggacgcgggccagggcccggggtgggtggtgggtgggagggggatttgggcagccactgcggtagagcccttccttacgtccaggccagaagtaaacagacccctctccagtccacgtgcaacggagccctgcaggg

SEQ ID NO: 240990 - DNA, 1595 bp, Homo sapiens
  chr20:8112347-8113942
  hyper
tctcgaaagcacaacgtaaccgtttgcccgggtttcaagatcagcgcgctgcaaactctcaggcgcggccaggtttcctcaaagagcctctcaactgcgctcttctctgctgataaatgataattctcttcaaaaagctggtttgtggctggcgctggagagctccagctagagccaaaagccaggggttgcctctttggttcctcccgatgggccccttttcccagccagttgggatccaaagacgctccggagctcgagcccaaattcccaagaaaaccccaaagagcgtaaggctcctggggacccctagcacctctgcaaccagggcacggggcatgctcagagcgaatgcgggaggcaggcgttggctgcaatggggctcgggagccaggaggtgccgctgcgtccccgcttcctggcgcctgacccagcgtgcaaagttgggctgggagccgcggggggaaggaaggacccagcgagcgagggtggcggggaaggggggcgggggggaggaggagggaggagggaaaagagcggttagggggggcgccgggcgtgtgtcactcgctctctccctctgtgtatagaggatgtgctgaatggtgcgctttgaggcggcggcggcggaggagcagaatccgccgcgactggcagcctcggctgaccggctcggcttctcttcgccttccgaggctcctcatccaccgcgggctccagacctcgcgtcccgcccggggcatggccgggcgctgcgcccccgcgcgctctgcctgctgagcggcgccggagggaggtgcggaggccgggaggccggggaggccggcggggagcagagtcgagcgcctccggagcagagaaaggagcccgcgccccgcgccccgcgccccgcgcacggtccccagtccctgccgcgctcgcccgggccgcccggagcccagatgagcccagatggccggggctcaacccggagtgcacgccttgcaactcaagcccgtgtgcgtgtccgacagcctcaagaagggcaccaaattcgtcaagtgggatgatgtaagtattggggcggcccgagtcggggcgctggctcgggcaccgggcagggcgggcgtcgtgggggtggggcaaggggcgcgttatgcaatgggcgcactgggagcgggcaggggcagcctcgggcgcacaggttggcatctgccaaagcggatgtccaagggcagaagctttgcgcgcgctcctgtttcatcgggcttcagtagttgccatcctttctgggtctggcaggcgccccctgagggtcttacatcttttgggccagtggagagggaggggcaagctttgcctggtgacaggtcctgagagttcggaaagtagggagtgtgaagttgggaccaactggaaagcgcctggtgtgaacaaatcgcgtccctctccgcctgcggacgcaccccctattacctcttttgcccgatttcaagaaggaaggacctgaagttcaaaacactttagtgattgcgaaccctcttggcgcttttgtgggagccaaggcggcggaggacacaacggtccagccaacaggtggtcgttgatgccaaact

SEQ ID NO: 240991 - DNA, 273 bp, Homo sapiens
  chr20:9048610-9048883
  hyper
ggccgttgtagggccgggaaaagccaggaactggctggagcagcaccccagcatcccagggaccaaagtctgggggatttgcatgtctgaggttgcacttgtgggaagactttttggaaccacttaatctctgtggctctgtgtaagacccgcgaaataaaaagaggcagtagtactctttggaagattgttttagggattaaatgaataaaaagcgtttagaacactgcaggacgcattgtaggcgctgtatgggtttatgaaaccgaatat

SEQ ID NO: 240992 - DNA, 493 bp, Homo sapiens
  chr20:9049363-9049856
  hyper
gctctggagccgggaggcgagaacgaggagggaggctcgggggcaggggaggaggaagcggctggccgctgaggggcggcggggcccggagcgggggacgcgcagggcccggcggtgggcgggcgggtcggcgctgccccgtgggctcgctggggagccacggcggagacccccgccctcaactgaggtaaggaccgcgcggcgcggagacggggaggcggggaggccagggagggggtgcggaggcaggcgggagggcgggactggggtgcgccgggagggggcttggcggcggctctttatggcgaggagggggtggtggcgccgcgccgggagcagtaagtgagctgcaccgccaacaagatctctcacacacagacacacacacgcacacgcacacacgggcgcgcacacacacgcgcgtacacactgggtctccaggcagcggccgtcgccgcatccccggcagcagctccaggcaaagtgacaggta

SEQ ID NO: 240993 - DNA, 140 bp, Homo sapiens
  chr20:9487140-9487280
  hyper
agtgcccggaggttcggagcgagcactggaccagagcccaagttcccaagttcccattccacggggagatgcggactttaggtggacccggaatggaaggagggtttttgctgcccgcatgcccccagggctctttccgg

SEQ ID NO: 240994 - DNA, 198 bp, Homo sapiens
  chr20:9487460-9487658
  hyper
atcataacctcgcgttaaggggaaattcaggtttttttctctgagaaatgtatccttccctaaccaaaatccagcacctagggccacccatccctcggtccctgagcccaccctctccctgcaggcacagctatcccaggttccggcccatcaagttgggaaatgagacgatccatcagtgccaggctcccgggagct

SEQ ID NO: 240995 - DNA, 159 bp, Homo sapiens
  chr20:9487838-9487997
  hyper
ttgggttgagactcccgaggctgcaggcgaggcggtgggtacaaacttccgtagatcctgctgtttctctgaagaagaagaaaaacattggccccggagaattagataatcctggggaagaaatagatttgggcctggggcctgcgggggtaggtgccc

SEQ ID NO: 240996 - DNA, 1590 bp, Homo sapiens
  chr20:9488206-9489796
  hyper
gtgtggggcctcccagagttcgtatatggccctcactggaccaggggagagaggccggggacaggccacccttgagcgcagccagacacgggatcttacatcccgcctgcggcgtcgggcagcgcacctggcgggctggaccgggacagggggcggtgcgcaccggggctcccaagcagccttagcggtggagaccttccgaggggaggcgagcctgcggtttgtctcccgttaaggtggaagactggatttttcctccagttccgatctagggtgaagtcccttctcccgcgccctcatgcccagattggggaatgaggggacagcagaaaaaaagccctgacatagcccagagcctccagcagctttgggcgccctgaggcgttggaggtaggaggaggtgtgaatttcattcccgcctctctgggcatggagcttagcttagcgaatagggaccctacagagggaacaccaatgaatgagtccaccttctctcctggtcctagggcccgaacccacttgtctccagggctggcgccagccccgcgcacaaacaccgcttcctctgggtaaccgcctggactgcctgcgcgccctcggagcccgcctggttggcagtctctgcttcgatctcctctaagcagaatctattttctgtttggaaaatctcttacaggtcctggggttgtcccaggaccaaactgcagcgaggccgcgcgcccctggccctggaacgcagcatcctccccattttacctggaggctagatcgttggggctcttcgggggaatttccctgggcacggatactgtgctggcggtttagaaaagaaaaagaaaaagaagcgaagcctctgtaacctggtctcctccctctcctcggtttaataccctgcctcccctactagtctccaggcttttctctggacaggggagggacccgagaagcccgcggccagtgatcgccagggtctgtctcgtcgcccatcctccccgccccagagcaaggtcggcagaggcttcccggggcataagaacttcaaagaaagtctcagaggagccacgctaccaggaactttcgtcgccctttaaaattgtcagatagacaagtaaaaacagtaactaactaagggaacaatggactcttgtgacatgtgtaactcttccaggtaccccaacactaaagaccccgtggttcctgtcgccatggcctgaacgtactcaactccagccccggggctgacctctctccctgagctttggagcgggtttggacctagccgttgcaagtaggcatgacttttatcacccatcgctatacccagagcagctgctcgaatgtgccaaggagcccaactcgggtgcaaagcgccgacgtctttcccaggttgaggacatcgcgagccagaggtgcaggcagcgaggcgcccaacagtagaatgcatcttccttcccgcgggcagaagccgtcaagtctggagtccgcagcgggcgcgcgggccagcccagggatactgagccatgagcaaccaggcccacctaccgccgcgccatccaaaggtaacaccacagaccacgggccatgtgtcct

SEQ ID NO: 240997 - DNA, 757 bp, Homo sapiens
  chr20:9494983-9495740
  hyper
caccgttttctttcgggaaccagatgcgttttcagaagacagtactccagtgataaggtatctacaccacttaataactgtacctggtaaggagatttaataaggctgagggtggtattaagtttctcagaacagactcatctttgcggatgcagttgcagaacaggaaacagacccagggagaagtttagtccccccagatctcattggccctccgcacaagccaagccacagccactcctgccacacaatcggattgctttcagcactcgcagccgtggaccgccgtgcggtcctttcctccgcagtgagccgatttgctctgccagcagctgtcggtgccgcgctcgacaccgagtcctagctaggcgctcacagaatacgcgctccctccctcccccttctctgtcccccgcctctcgctcaccccggcccactccagcggcgactttgagggattccctctctggcggcctctgcagcagcacagccggcctcattcggggcactgcgagtatggatctccaaggaagaggggtccccagcatcgacagacttcgagttctcctgatgttgttccgtgagtagcgatttggcgactgggagagaggacgggcactctttgcagagaacagagccggcaaagtaaagtcaattagcttgagataaaaaatatggcccttaatgttttgcggtgttttttctttttttcttttaggggaggagggagggccttcctcgccggtggcagggaatt

SEQ ID NO: 240998 - DNA, 98 bp, Homo sapiens
  chr20:9495962-9496060
  hyper
aacggctcgtagagcgcacagctgctggcagagaactttgtcactccaaagcctgcagagcactgtctccccaccctagcgcccgagacgcgtgggct

SEQ ID NO: 240999 - DNA, 1179 bp, Homo sapiens
  chr20:9496331-9497510
  hyper
tcctcaaggctcttcgaagacctgggttgcccgccttctttcccacaccccggcaggctgctcccgaatgctgcatggggattccagcttgtaatgccttctgttcccctgcctgctttgaaagtaaacccccttctctccgcttccctatcggggctgcacgtagagcatctaaccgcatgttcccggaacctgggatgcgcgcgcgcaaaggagcgcccaagcgtgcaacccagagtttggacgcgccgccctttacagcccccgccccggggccgggcgagctgagggggcgcggggcgtctgtgttcccagctgatcacagaacaggccgatatcgcattgacccggggagctgaggtgaagggccgctgtggccacagccagtcggagctgcaagtgttctgggtggatcgcgcatatgcactcaaaatgctctttgtaaaggtaactccgagcccagcgggcagaggggccgcaggctccgcgtgggtgtgggaagtggcggcccctaggtttaagaacccagacgctgcggggacgattgaagcgcacctccccggctcaacaggaaagccacaacatgtccaagggacctgaggcgacttggaggctgagcaaagtgcagtttgtctacgactcctcggagaaaacccacttcaaagacgcagtcagtggtgagtggaggctggcatggctggggagggagcctgggaactcgcagaacaggcttggagagagaattcctcaaggttttggaaaccgtcccacgctttgaggtcccaggccaagtcttccctcggcttgctctttagggcggaagaggcgggagcgcccatgagtcttctgggtctcaggccttgtagatccgccaggaaccgcaggcgtggggacccaaacgtcacccgtggcctgatcctagataagaagtcccttgaaggcctgtcgttccctggtgcttcaaaacgacctcttatgatttggcctttgaaggaccacggagaagggcaaagctgcattttaattttcttccgcatcctggttttgtttcttatgcgctaaaactgcaagggggcagtgcgactttccttttcagtcaggatgtgatggccttcagtgtctttttgcgcatggcagcatggctcgcacgggatattcagtcatcgactgcagctacct

SEQ ID NO: 241000 - DNA, 1020 bp, Homo sapiens
  chr20:9818837-9819857
  hyper
cacacacacacgcgcgcacacacacacacacacaaataacaaaggaaaacacagcctcataaaggctcagctattgcatcctccagtccacacctgccaaaagacaaaaaccatgcgggaatcctgctctggcaatatgtccaacacttctcgggaaaagcagcgccgtggcacccccagggcgtgcgctgctgtatacacacaaagaactggtgctgggcttgcgagcagttcggggtaccagcacgctctcagggctggaatccggggttctcctccacgccctcccgcccagcaaaatggaaccatcctttatttggttggtagagagcccaggctggatagtagcgcatgggttgagggtgggcggtcccctatccctaccctccaggcagcaggtccctagcctttgcatctcctaggagatgcaggatcgcgctgtcacagtggtcctcttcgcatcctctcccggcaaagagagatgctccggttaccagcggcgcgcatccccgcaggcgcctctcctctcgccgatacccacccaggcagtcccgacaggcgcgcctgcctacctggtggccggctgtcagcgaagcggcggtgcctcagccccttctcagctgctacagcgctcccagcgccatgttcccggtctccccgggcgcacgctggggaactactactggctgggtaggggcaaggggggcgggggccagcgggagggggtgagaggcagagccacagctttctactctccacccaaacctcccccagctactgagcatgcccagctgcccggcttcgcccctcggaggactgtccatgagcgtacgcagctgctccgggttttcgtggcagccggcgggaggcaggctgtagcggcggccgggggtggaggtgagggggagggtcggggggcgtgtctacactcagggtgcaggagccaggagccgggagctggagcaggcgaccaatccaatcacgtttactcccagtcgtccccggcgggggcagctcctg

SEQ ID NO: 241001 - DNA, 511 bp, Homo sapiens; identical to SEQ ID NO: 205698
  chr20:10015468-10015979
  hyper

SEQ ID NO: 241002 - DNA, 865 bp, Homo sapiens
  chr20:10198139-10199004
  hyper
gcacgacttctaatcgcatccttcccggaaaagtacaaacagttcctcagacgaggtcccccacctcccacgcgctccccagccctccctccctgcggagagccccgcgacagcctccccaacacctgtgaatcatccgggaggctgccaccgccgagcgatccgcgcaccacccccttcccgggcccgggcacggccagggaggacagttagggttgttgctttataattatcacttttaatctctaatacgaccagcacaagtagcctttgtctccccgccctgatttgagcatccgagggccccccgaggcagcctgcacgggtaccccggggtttgcgcactgagtgaacccccagattcggccgtgtcccagccgtccttgctctgaatcccccacctcctcccggccgtttggacggttccctcggggcgtctgtgcctccgtggggtacccctaagacacccagcatgaaaccccagcaccgactgcaaattccaccgaaagcagagtcatccgtttttgccctcggcaaacaactcaacttcaagcctcgagtccttgcaaacccacgctggctgggctaactccgcttcccttctccttcccccgactcctgcaacagctcagagagcctggctctgacgtagttcaaaataacgtgcgccagcctcgctgcccggctgaccacagcaacgagagccacaagccctcgacgctgcttcgataacatgaagcaatcactcataaaaatagcaacccacgtagcctggccatatatggagctggcgagggtggacggggatgcccctacggaccctcttcggagaaaacaaatcgccgctgaaatttcccccacccct

SEQ ID NO: 241003 - DNA, 1206 bp, Homo sapiens
  chr20:10199241-10200447
  hyper
ttgcgggatgaacgcgtttgcccaagaccgagtgttaaaatggagtcataagagtcgccccgtgcgggtgtttatagaaggtgaaaacacgcaggtttgcaggccagcgcactgggaaccgagtcaagcgcgccgcagcccgggccccgcccccgcccccgccgtgccccgcccccacttcctcccgcccctcgctgggcggctattaaaagctgctgacgtcaaaacggacggccatctttgatgagggcagagctcacgttgcattgaagacgaaacctcggggaggtcaggcgctgtctttccttccctccctgctcggcggctccaccacagttgcaacctgcagaggcccggagaacacaaccctcccgagaagcccaggtaagaacccccctccccaggtcgtggctctggctcgggatggctgcatacccagaagggacagcagctgggcagtccgagtgggcttgggtaaatacaagtattggtgcacttagggtgcggtattccgtgtgtgcacgtctggtgggggctttataaagtgttttcgaggtgagctgctggggaaaagggaaacgggagccctgcaaatggagcgacggggaggaagagcgagggtacgtaccgaataataacttactcttttgaaacagtagtgggaccccctctttcttccattttgcgatgcagttttcagagatatttaggctgttgagttttcctcccctgtcgttctaaccctattattatgactgttgtcgttagggtgctattatccagggaagaattaagggggagacagggtgtgggtgctggggaggcgaaaggagaaagggggagttcccgccccgggcaagctgagctgctgcagcgacagcagcctccatgccccgcggacttgatttatgccgcctgctccacgtcaactgcaggctggcgggaggcgggcgggtcgtgccgggtgggagggctctgcggagggctggcgcgggtgggctggcttcggggactgcggcggcccgcgctcagcaccctggatagcaacaccgagggctcgcgcgggcgccctcgacctttcagcaccggggacagcggtccggccgcagcgcctcatctgcctgcggcagaaatgcctggccggggctggatgtgccagggctggagaccaaattgtctccctgagaccccggtcttacggagacc

SEQ ID NO: 241004 - DNA, 756 bp, Homo sapiens
  chr20:10415353-10416109
  hyper
ggagtttcgcagctcgtactcttcacagattagataattcacccggcatttccccatcctgcttctgggttccaggacaaaacttttattctcttttaacattaaaaaacatataggaagttatgttcaaacatggctatttttattaaaatttatccggcactgtgaaagctacctttcctttctcacaatctttcgcaccgaatatatgttccattcttgagctagtcattttccaatgttaagaaaacacaccacagaaaagcgtttttttttctctcggtcagttcaactgcctagcaccgtgagttaccatgatacgttatttgctaatgagagtcattggggtcccagcctttaaaaatagcctgcgtccggcgccatttttgttttgggcccactttgaaagccgcgatattctgaacagaggccatttttcttttgggcagattccacgggccatcgaagtgtttcgctgccatcttaaatcctggctgtggcctcaatcctgcagcgaagctgcccagatcattttgtgtttgggcggcggctgagttcccaaacgcgcgcggagaccctgggaaggaggaagtaagcgcgaaagtgcttcccttaagcttctgaaggttggctgcagttccggctacctgtgtagtccgagtttccacagccaggtactactccgccagtgaccctggacagtaacaaaacatataaagcccgagcccaaaccccgccaccatcataggtaagcac

SEQ ID NO: 241005 - DNA, 256 bp, Homo sapiens
  chr20:10653624-10653880
  hyper
caactcgaactgacccgaggccccacacacctgccggcgagggaaggaggtaggtcagcgcgggagaaagctgttttcttcgagtatagaggtggcgactccctcccactccccgccccgacgagccctcctcgccgagtgaaaataattttgcgaaactacgttcaaggactcaacatgattccggggcaaaaaaaaaaaaaaatgcacgagtgcggaagaaatccgacgacttcccggggggcaacagcggagc

SEQ ID NO: 241006 - DNA, 85 bp, Homo sapiens
  chr20:10655603-10655688
  hyper
cagccgcggaacttgccttctctggggtggcagtggaaaccgatactgttttccaccttgaggcaagcctcgcaattaacagcta

SEQ ID NO: 241007 - DNA, 232 bp, Homo sapiens
  chr20:11871115-11871347
  hyper
aaagccaaatgcaatcggccctctattaccggaggatgccctgtatcccgcacatccactctgccagtgcaagtgttcaataaatgcttaatacattcattgatgaatgacccagagagaaaaactgcagttcgtgggacaaggacgaagtggcctctcagagatgcgggagtgctggctctcctccaccctccccgccttctccaagcccgggttcccgcccacccctcac

SEQ ID NO: 241008 - DNA, 563 bp, Homo sapiens
  chr20:11872261-11872824
  hyper
gtttgctctaaaaatagacgtacaagtttggtgttcgggaagaaggatgtttgctctcttgggaagaaaaggcttttacctcctggccttttcaaagaaagtattgttcgggcctgctggggatccctatttatcaagcaacccattgtcctgtgtgtgcctggtgaaagcgagctaattctattattagtcctcaaaagaccaagggagatcacggtgctttttcttttttaaatattccccgccacctcgccaaatcctgtaatacagtttccccaaacttggctgcacagaggagtcgctggggagttttaaaactcttaaagcccaatcgcacaccagaccaattaacacagtgtattttttaaagatccccaggtgatcgcgcagccgagtttggaaacactggtttaatataagaaagtcaaggctttagtttcacatagtagtagcattcagtttgtaattggtgagatgaaactcaaattcattttcctagacaggaactcacaaagagcggtttgtttcccaccagggagggagggaagcgtctctaacggttc

SEQ ID NO: 241009 - DNA, 2187 bp, Homo sapiens
  chr20:13200600-13202787
  hyper
gggggaaagggaggcgtgccgtcaagaaagagttgattatttatttaatttcattcaccaagggagaattcggaggctccatcccggaggcactggggtccgggacgcgggaaaggcttggaaatgtgcgacgcggctgtgtgcgaacgcgtggactaggtcttggctcgctgggagggaagggctgggccggcgctggggaggaggaagggagggaacgggtaggaggaggggaagcgcagtataaaagtcccggccggactgagcgtccgctactccgagtcacttcggtaaggcgggagcccgagcaaggtcaaggagggaagtgcgcggtgccacggaccgacacagttcgctctagcatctgacgctcggactccgcgccctcagccggatcccagagcccttccattcgccaaccgcccactgcaaggcatgagccgcacgcgggagcccgaggctgcagcgcggtcatgaggcggtggcccgggatcgacagctgcgcgacgccagcccccaaatcccctctgggcgcggcacccccgggatgagccccccacagaggcaagcccactagagctgagattcactccgagttcctgagcgcctgagccgcgggcactgcgtctctgcagcttccagccaacacctgcgcccgtgaccagacgaacgcctagagagtcggactcccctcccttcccaggctctacggggcgccgcggatccgcgaacagccgtgcccggctagcgggcggcccagcaagtgtcaagacccttcggaacgacactttggcactcctcctctcccccgactgcttcaggcaggggtcgcaggcagacgcatggcttgtccggcgccccctccgttttccatcactgcaactccagctccagtttgccaataaaggtttctaaagcagcccaggcaccaccccacccacccacagccccgagcctcagtgtgcacaagggctctacccgcgcccgtcacagcgacctcggcagcgggcacttggtacagcccggcaggctgacgctgccgccgagggcgccccggctaccgccaaaccgtgacaacctcggtgtgcccggggcccccatctggaaccggccctccccgggactccgagtgcggggcggcgcggcaggcggccccgaggagcgcggagagtagtggaggtggcttgccgggtgagtggctcggggcggcgagggcgggggcgccaagcgtggaggtaactcccggccgcagctgaagccctcctactcctcctcctcctcctcctcctcctcctcctcctcctcctccttctccttctcctcctcctcctccccgcgcttctctggcggccgctcccgctccagctgcggcgccgcggccacatctggggcgcccatgtgcgctcgggggctcggctgcgcccgccccgccgccgaccccgcagccccctgccagcagggtggcctccggcccggcccgggtcccgggctgtcccgggacccagtctccgtctccgccgccgccgccgccaggcagcgccggggcttgctccgcagccggcttggacacccccggcctcgcggtggctccgccgtggtgcggcggcggcggcggcggcggcgccggcagctcctgctcccccggccccgcacaccccgccgcgcccagcgccagccccgcgggcccgggaagcggagccctggcgggagccgaggcgggagccgcgctgccgggctcccgggctcctactcctcctcccccggcgtcaccgccgccgccgccggccgccgcgccgggtcctaaagccgcgcgtctcaaaaggatggtgcgcctggcggccgagctgctgctgctgctggggctgctgctgctcacgctgcacatcaccgtgctgcgcggctcgggagccgccgacgggcccgacgcggccgcgggcaacgccagccaagcccagctgcaggtgagtgcgccgccggagagggccgtgcgcggctgcggggacggtttgtggggcgggggtgctgagctagtgccgggtggatgcagggaggcaggtcccctgccccacctaagagcaactgttttggcagtagttttgcccgggccacttgacttaggcagaggcggagcgggggcacgtgcctggaggctgcacccggcttccaggtctgcgggctgcgctcctt

SEQ ID NO: 241010 - DNA, 270 bp, Homo sapiens
  chr20:13619539-13619809
  hyper
cccgcttcagccccgagccttcactgcaccggaagtagtcacccgcccgttgccagggtgaggaagcggggctgacatcaagtctccccattggtcattcggggtaccacgtggtcggaagcagcctcccacaagcggctctgactccgccctccgcttcggagcggctcacctggcctcagaggtgcagcgctaactccacctggggcttcgttctgagctgcgcatgcgctattgcttatctctacccaccccgcccctgaataagcc

SEQ ID NO: 241011 - DNA, 130 bp, Homo sapiens
  chr20:13765649-13765779
  hyper
tagacacaaaagccgcgctggcgcatgcgcacaaaaagcgccggcaattggggtcgcagctggagatgctgcggccggcagggctctggcgcttatgtcggcgaccttgggcggcgagggtcccagcgga

SEQ ID NO: 241012 - DNA, 969 bp, Homo sapiens
  chr20:13976113-13977082
  hyper
aggcggtgcctgcgcgggtgttaggttagcgcgaggcgtgacctagttgacaggctctgaggtgctgctgtggcggcgtccgcggggctgaggcgggtgggagccggagccgagcgcgggctgagggaggagggcggcgactggagagcggcgagcggcgagcagcgcaggacgcagagcctctttcactttttccctgctgagtgccccctcccacccctcccactccacacacaccctgtttgcccgtgagcctggggaacttgcagcttaaagccagccacccccacggcaacatgtaccccagcaacaagaagaaaaaggtgtggagagaggagaaaggtaaccggcccgtcgagtcctgggggtgcgggcggtgggggttagggtgggggcgggggtcaggctgtgtgtgccgcggcgccctccgcccgagctcccgcctcgcgccctcccggccggtgccgcctccctccggtgtccgtgtgtacacacgcgcacactcgcgcgcactccggcgtgcacgcgccgcccctgggcacctgcagctcgcgcacgtgtgggcgcacgcccctctctgttgccctcggcaccccgtcaccttctcccgaggcggtgctgcgttcgcctcgcttgcggcggggacccccaggcggcagccccgggcgcggcacaagttcctctgcaccgcagctgggacttgggcactgccggcctgggtgtcccgcggacaggtgcccgtcggcgggcgctcaggctgcagctgccgctgtgcctccgcgctccgtgcaccctcatttctttccttctcgcccctgtccccccagcccccgaatggcaaagcgtacccaccatcgggtgtttaccccttgtctaggtttccttccttcgctgccgcagcgtgacttttgaaacctggaactctaggggagccctaaaacgagcgtgttgtccgtgaggataagtgcc

SEQ ID NO: 241013 - DNA, 506 bp, Homo sapiens
  chr20:16553758-16554264
  hyper
gccagggaccagccggtgacacttttaagtccaggctggctttgggggagctggaaacaggcttcctctgggtgggggcgcgacgagggggcggggcgcgggcggccccactcacctgcgattcatgggccggaccctcacggccaccttgaccgatgccatcgctcatcccgaaccagcccgcgcggggtcccactagcccagaactccgcggtcgccggcgacgctggctactcagatcgcggctcccgcccacttccctctcgcccccgcccctctgctcccggccggacctggagttccgcggcagccccacctgccaggccactgagcatgcccagaacggctccggcccgcgtgatccatgcgccacggtttggcggcggccgggcggtgcagaggggcggggccgcggggcctggaagcagcctccgggatctgcaagtctggaaaggccacgttgtggaccttggcgcagaggttatgggggcgacccggagcggatg

SEQ ID NO: 241014 - DNA, 453 bp, Homo sapiens
  chr20:17206508-17206961
  hyper
ttgagtagctttgaaacagtcgtcctcatttcgttacatacagaacgttcgtgcttcctccctctcaggcaagaagcggagtccgtcgtcagcagttagcagagtccagtgcgagtgcacgtttcttaaccggataacttagttgcccctgccccccgtcgctgcgcccgaattcgcctccagtagaagacgttcagcgggcgacttggcccggcgcctgggatcggtggctatgcgttccccaactagcaccctcgctgtccttgtgcagtggaacgtccccaggtctgagaatgcacctcccgccgtgtccaccccggccgcgtctctcctgaaggcagatcttggaggtgcagccaggactcctagaggagcctcctccagtcaccatcgcgggtggggcgagccgggtctcctgctgggcttcccagccgcttcgctccggacctgcct

SEQ ID NO: 241015 - DNA, 955 bp, Homo sapiens
  chr20:17207232-17208187
  hyper
gcacagaggccggcgcccctgctcccctcggggcctctgagagcggcacacaccgtaattcccttcccagagcctacagattcccacaaacaatgacatcactccgccgccgctggcctgattacagctggggggattttcctgggcgcgcggcgggccaggctgagatgggggagctctccggtgctgaaaggggcgggggcgcgggctcgctgcgctgcgctgcgctgcgctgcgcccccagaaggcggaggcggccgggccgggccgggccgggggtgggcgggggcgggcccggggcggcccagggcggggcccgccgcttcccccgccctcattggccgctggcggactcacgtcacccgagctggtgctctcccccagcccctagggaattggagctgaggaggagctgaaaatgcagatttagcatcaagcacagacctacactcgctctttctctccggtacacacagctccccacattcgcacccctgcccgcgcgccgggccgcctgactgcacggcttcccctccagccagatgctggagaacacacactgattcgctgctttccaagaccctgttcagtctctttctctatacaaagatttttttaaaaactatatataagaattctttatttgcaccctccctccgagtcccctgctccgccagcctgcgcgcctcctagcaccacttttcactcccaaagaaggatgaagggtggttgtgtctcccagtggaaggcggccgccgggttcctcttctgtgtcatggtttttgcatctgctgagcgaccggtcttcacgaatcattttcttgtggagttgcataaagggggagaggacaaagctcgccaagttgcagcagaacacggctttggagtccgaaaggtaagctctcccatgcatttcgcatgttgtttcaaaacggggggacgggggggcagccct

SEQ ID NO: 241016 - DNA, 437 bp, Homo sapiens
  chr20:17208419-17208856
  hyper
aggtaccaagttctcgaggctgcctggggatggagggatgaagccctgaacagctaagcctggcgttggctacttggccagggaagtctcccccacccccatcccccggagaaagaatagtttcctacagacgaggctggacgtttggacactgcaattcacctcggtgtttctcccaccccgcgccgggaggacttccctcccagggacttcggtccctgctcctctccgggaacaacggcttcctgactctagatttggaaagaaactggtctctaaaatcggggcggaacttctgcgccctcacccccgcccacgaccgcccacccctggagcgcacttctggttggctccctagttctcaactcccggctacaggagctggagaggtggattttgagggggattccctacggagaagtcgaggtgtcctctcc

SEQ ID NO: 241017 - DNA, 387 bp, Homo sapiens
  chr20:17209340-17209727
  hyper
cttcccaagcctcccgcctctctcccagccaccgccagggctcctccaggtgtgggggcctctccctcctcctaagggcgtaggcagtaccggaatttcgaccccagaagggtctggcgacgagtttgacagaggtctgggaagaggctctgggtccgccggtggcgcgcgggcgggtcttgcggaaaggaacttgttgctctggaaagcgtgggtggagcaggggaaagaaggcgccggcggagggagcaccccgctgtggttttggcccgtggcctgccggctgttttgagagacaccaacacaataaagaagccgaccttccttcttcactcccccccaccccaaacttggcaagacccaggacccaaacgccattataaaata

SEQ ID NO: 241018 - DNA, 160 bp, Homo sapiens
  chr20:17919824-17919984
  hyper
ggcaggtggctgtgctgggtcgcccctgccgcctacaggcagaaagcggatggtgcaaggtttccttccaaacggaaatcgcccttcacagagctgagcctgggaattaccacaaagaaacctcacaaagaaaaggtgcgcaaggcaaatgttcagaaaa

SEQ ID NO: 241019 - DNA, 295 bp, Homo sapiens
  chr20:17949251-17949546
  hyper
gagcagggcgccacgtgctcccccagagcagcctcccagtccccgctgccgtccatcttggagccgggcaaagacgccacgtggggcctacccttgctccgctccacgaggaggccgccaaccgcagggccgcgacacggacgggaagcaacggacactctcccagcaagacgcgtctagagaaagaccgcgtttcggtgcggggggaatttattactcagcccgagtccaagatggcagcgagcgctgacgtcaccagatctcgtgagagcagaagggcgcgatttggaggctc

SEQ ID NO: 241020 - DNA, 134 bp, Homo sapiens
  chr20:17976773-17976907
  hyper
atttcctgatttctcgcatattctctaacacaagagttgtgagcccctcttctgacggtatgaaaaccattttttttttggaacagcattaacgcgtgaataaaatctgctttaaaacgcgactgtcatctagt

SEQ ID NO: 241021 - DNA, 1186 bp, Homo sapiens
  chr20:18037456-18038642
  hyper
gctgctgctgccgccgtcgctgcggcagtcctcgggggggtcgtggagcaggcggcctaggcccactgtggagggaggggccgcgccccgacacacacactcggcgtcaacccgcacgcccgcggcagtttgacctgcgggcggtgctgccgccgccccgccccggacctgggcacctcgccaagtgggcaacgtcgcgggggaggccagtaagccccgaatcggcccacagagctagcttggggtgctcggagcctctttccggtcccagccaaggcgcccacgaggaaccgggcggccacgagcggcggaggaccccgcgcgccaagtttcctctcagggcgggggaggcggatctgacctctccccagctagccccagaagggttggcgagcctttgtgcacccccatgaggacgtgagattgggggtagcctctgctggctttcaatccctttcctgggccaccttggcccgcgctgcagccaacggtcccgccgccgggcaattagaggctcccactacggggaagggggcgcctagagtctggggcatcccagtccctcattgcctgccctaacccgcctagaagacccccgcgtgccccccggaagagggggatgaggtggggagcccgcccctgccgatgagcagagaagacccgccaccccttcccccaccccgggagcccagcgcccaggcccggcccccgcgcgcgctcacctgggatgtaggtgtctgcccttttctcatccgggagctcatcccagctgcggaccgagacccccaggctcctcctcttcaccaggaagactttgggcatggtggggtcccctctcccgactgcggccccctcctcccggctgctccccgctaggggcaacggcggcggctccgtccccggctcccggcggccagagcccaccttcccgcctcgcctgccctcttcctccaccccccgccgcggcgcggcccaggcctctcccccgcacgcctggcgactcccagcctcccggctcggcgacacctatgccttaaatcgcgagtgagaccacgccggggaaaaagtttcataaggtggaatagaaaaggcaccaggaaacttgggactgagcatgcgccctgcaacataacggtgtcaacaagctcgctacctgtccgaccggttccggcggccggggctgcct

SEQ ID NO: 241022 - DNA, 44 bp, Homo sapiens
  chr20:18038850-18038894
  hyper
ccccctcccccgcccggtggatttgtcttcgacgagccagaaaa

SEQ ID NO: 241023 - DNA, 167 bp, Homo sapiens
  chr20:18039164-18039331
  hyper
cttctcctcacaagacgttgcaccccccgagagccccctcaccccaagtaaacacacaatagaaacaaaagccaggagcatattatgcaaatgcagcttcaaaacaagcccccaatcctcgcccactcccaccgttgcctctcctaaccacccgatccccaaattct

SEQ ID NO: 241024 - DNA, 105 bp, Homo sapiens
  chr20:18118330-18118435
  hyper
ctagaatttgaatcgggggtggtctaacgctgtcgcctgcggggtgtgcaggaggcccctagtgaagccaagagttcgtagagcctgggcgccgctctatgctcg

SEQ ID NO: 241025 - DNA, 35 bp, Homo sapiens
  chr20:18118692-18118727
  hyper
caggtcggtgtcacgtgaccgtctcttccgggccc

SEQ ID NO: 241026 - DNA, 295 bp, Homo sapiens
  chr20:18268964-18269259
  hyper
tcgggagctcctacgtgttttatgcacgtggttaagaaaaaagagggagaattcaggtgccacagtggccattctccggtgaccggagcgtgttactcagaaacggatccgtcagaggccaatgggagctgccggccttcagggcgcgcctggtggcgccgagcatcctgggaggtgtggtccgggcgctgtgccgaggattcggggtagtgtagtcctggcgccccgctggaggagctccccagctggtggctggagcgaccccttgttctttggtggcgctggtgagtgaggc

SEQ ID NO: 241027 - DNA, 91 bp, Homo sapiens
  chr20:18447681-18447772
  hyper
acgcggcgagccgcgccccgcccactgggtgctgggcagatgattggtggagactcagcttcttagcaactagaccggcccctgccgctcc

SEQ ID NO: 241028 - DNA, 60 bp, Homo sapiens
  chr20:18448016-18448076
  hyper
accggctgcgacacgaggaagaaggcccctcggcctcagcagagcgctatcctccactgg

SEQ ID NO: 241029 - DNA, 157 bp, Homo sapiens
  chr20:18477825-18477982
  hyper
cagagttccccagcgcgggtccagcggagctgagcccagcctgctcccgcagggagcctgcgccgcggcatcctgggagttgtagttgcggggacctgggaggccgggctctttcctccttggcctgccttccgctggctgcgtggggcagccaaga

SEQ ID NO: 241030 - DNA, 83 bp, Homo sapiens
  chr20:18488298-18488381
  hyper
tgcgcttaggcaacggtgcggcaggcgccggggttttctgaaacagaaacgtttaggggtggggaaacgtgttccgaggaact

SEQ ID NO: 241031 - DNA, 107 bp, Homo sapiens
  chr20:18547799-18547906
  hyper
gaagtaaccttttcggataccgtctggagcccacgaaggcattacaattttgcaagtgagaagcttctcctctaagttgtcatttagtcctcgtcacgtggtaaaaa

SEQ ID NO: 241032 - DNA, 142 bp, Homo sapiens
  chr20:19186754-19186896
  hyper
ctgccaccagggggcgcaccgccacagcgatcctaggaagagcatctggacccaatcattctgcagttctggggctggaaacctgggcgatgaactgagatgaggagatggacacagcactgtataacgtgagaccatccca

SEQ ID NO: 241033 - DNA, 353 bp, Homo sapiens
  chr20:19192501-19192854
  hyper
aaacccgggaggcccgcgagaagaggcgaggccagaggctgggcgcgggcagccaagcgcactcgcggcgccccgactccaggtagcacgtagagaggaggctgaagagcccctcggttttccgaaagtttccagcgaatccttcttggtgaagatcggcctctgggaggcagcgtgtgtgcttcccgagagggggccccctgcgccgtccctcttcccctggcacagaagggttgaaggactgcacacagggatccctccccagcccagtctcctcccagcgcgccccctccccgccatgccggccagcgccgggctgtgtcccaggcactgccccccgccaaccctggccc

SEQ ID NO: 241034 - DNA, 244 bp, Homo sapiens
  chr20:19193034-19193278
  hyper
gccaaccggcggagttggccagcggcgggccctcctaccgtcggtccttccccgctcctcctcctctgccccctccgcccccgcctcccggccgcccccgccgcccccgccgcgccgccgccccaggccgagcgcgggcgcggagcgtgggagccatggcgcgcgaggaggagcgggaccccgagcgccgggaggcggcggcgcgggcgagcggcgaggaggaggaggagggaggggaggaggg

SEQ ID NO: 241035 - DNA, 119 bp, Homo sapiens; identical to SEQ ID NO: 205723
  chr20:19673387-19673506
  hyper

SEQ ID NO: 241036 - DNA, 736 bp, Homo sapiens
  chr20:19739200-19739936
  hyper
gacattccggagcgcgaggtggccgctggtcccggcagggtcaccgggtgtcctcagctgacctgtgcggggctggggtgagggacagctggagggtgcaggcactatggctcgaggtgcggaggtgcgggtgtgcgtgcgtgtgcaccggacggagtttggtagggacctttgaggagttctacctgcagggctgcctgtggggtgtcaagtgctccctgcgcctgagcgcgcgggtcagacccggtgtcgcacagctttgatccccagcgcggaccccactggtgagtccagccagtgtgcagggcagatgctccgaccggagatttcctcccccgggtggaaaagcaggagggttgttgtgtccgggcagggggcacttgggctgtcgcggtgattgatggctgcgcagcgggcggaggaggagccccggattcctgccgggaagggacggggccactttcccactttgaggcctccccgcccccttctgggcttggcctccacccttggcctgggctcccaccagctcggcgtccacccaccggcggtggcgcgcccctcgaccgcgcggggacagcaggatttgcagaagttcagcttgaaagcctatgatatgttgccaagaaatacagggcaagatcggtcccctgggccctgagaggcgcctgtcttctcagagctcttaaatccctggggctttcctaattccgcagtgtagcggcacttccttgcg

SEQ ID NO: 241037 - DNA, 72 bp, Homo sapiens
  chr20:19997708-19997780
  hyper
tggctgcgaactccgctcttctgcttgggtttccgcatcaccagcagcttctttccttcccaggtgtcgccg

SEQ ID NO: 241038 - DNA, 40 bp, Homo sapiens
  chr20:19998405-19998445
  hyper
tggggtgatggggcgagctggagacgcggcctggagccca

SEQ ID NO: 241039 - DNA, 188 bp, Homo sapiens
  chr20:20033011-20033199
  hyper
cctgtccccggcacggacgctagaaatcggctctgagagctcaccgaaaccacaaagctttcagaaaacaaacaggatctcggaaccggaagcggaacttgcaggactgacctttgacctctcgcttgagccgtgacggaggcggcaccgtttccatggtgaccaggctgcgcgtcctccttgcggca

SEQ ID NO: 241040 - DNA, 176 bp, Homo sapiens
  chr20:20343529-20343705
  hyper
cagggagcagggctcgaaagtcgctgagcgccgagtgcgaggagctgttgattgttttctggttgaaagaagaagtgatgataaggctgggataaagtgagcgccggcaggggcgcagagcccgcagctgtatgctaatgctcacagaaaccaagcctccgcgtcccccattaaag

SEQ ID NO: 241041 - DNA, 1830 bp, Homo sapiens
  chr20:20344271-20346101
  hyper
agaagagggaaaggcggaggagagaggaacggcggtggggggggaggagcacccgccaaccccatagcaagaacgctcgccagggtagaaagtatgcccttgtggaccccaggagtctggctgcctcttcgtcctcctgcggcaggcgaggcggggtgcaggtgtgagtggggtgggaggaaggggaaaggatcggggtcgccgcagcctttctggtcagtttcgctgggttttgtcagttccgtttgagaccgaggcgcacggactagcggccgccagcacctcacaggtggaggacacctcttgcgccccaaggtcaatgtcatcccgatgggtcccgtgccgtcctgactctccctgacctaattctttggttatgactttctcaccttctgggcttcgcctctgccagctttcgccgacgtcgcccttcccgccgcccgcccgggccttcctacccgctctcctccctccctggcccgacggtcccactgaggcaaaaacaaacagccctgagggcacttcaaggagcgtgcagtggccccgacggtactctcggggggataaaagaggtggccagccacgccgtcggcccccggccgaataatgggcgcgcagcagattgccagggggcacttgaaactcgaggggagggaaatacttgagcgcggtccctccccgcgaggacgcacgacgcagcctcgcggatcgtcccttgttcgctctctttcatgcactctccttttgtgtggaattatctaaacgggagatccctggcagctttatgctaatgcgccgaacaaaggcaacggcccgcgggcgggaggcccggaaggtgcctggggccgggccgggcggggtggcggccaggcgggctgcgcgtgtctctcgcgtgcccctgggactgacacaacaacccctcattcctgcaaatacaaagcctctcaccggctcgggtcgggcgcacccggcgcagggaggcgctggtccctccgggcggcgggcactgcagcggtaacgcacggttcctgccggttgtggctcgggggactgagggccgggagtgggggcttctgtgaagccagaagagaagtctgcagcagagtggtgatgaggggcgctgacacctcacccccaacgccgacgtctccaaacgcgataccctctgcggggtgagaatgcgggcccgcccggctcctcccgtgaggccagggcctcctgttctcctagacaccccaaggagccaactcctccgcagaagttccccgcttctgctcttatttccaagcttcgcgctttctacaaactccctgttgccttgactttgatttccagccgtggtgagggtcagagtgaaccccggcgcgctccccgacggcatccccgcacaccaggataggagaaattggagggcctggggcctcgggctccgcagtcgtcggaggaagaacccaccgcggggtccgcaagggaaagtgaagaggcccgggatttttccaaagcgctggccaggaccccgaaggaaggggaggagtcacctgaagccggggaaggccccttgggtgctctgccttggatccttatgttcactgactttcgcgaagcccccctggaggggggcaaatccgcgctgtttcccccaacttaacttcacgcggcccattctccgaatcgcgtgcgccaaggccggcgtcgggggcgcactgtgatggcgctttgctcttcccaggcgaagacaaatatctcgacccgatgtccccatgcatgcgggtgcacaggttctgagaaaatcacgcagaaggcggctgcgatccacggcccgggctgggc

SEQ ID NO: 241042 - DNA, 238 bp, Homo sapiens
  chr20:20347221-20347459
  hyper
tctgccctgtcccccgaagattctgccttttgtgtttcctcggggctgggctggacagaggatggaggcaggcggcccagtctgggtccaaacggaacggcagcggaggtgggggtgggggtgggggcggggggaatcttcgctgttgtctcttcctggtggcacaggggaggcggcttgtcctctcggaggcctcagcctgcctcagagtacagattgccccccctccccccgtcca

SEQ ID NO: 241043 - DNA, 384 bp, Homo sapiens
  chr20:20350459-20350843
  hyper
ccggcccccgaactgtgccttcgcttggagacccacaaagagagtgcgccctgcactccccgaacccgagtccgcgctgggggagcctcgcccccgcccccaccgggtgaaagtgtcgtctccgcttctctcggtgtggcgtgacggtaaccccatactctccttttgactccttttggaacccccacttttacgttgtgtccctccgcctcccccatggcgcaacaggagtcagtctctttctgtacaagggagaaaagctgtacgcgtttgtctcgtggttggaagcctccccttggcggggagaagctttttttcttgctagtattcgctgtgttcatggtctagaaatgcggtctggtctcgcctcgcctaccaatctct

SEQ ID NO: 241044 - DNA, 120 bp, Homo sapiens; identical to SEQ ID NO: 205729
  chr20:20693388-20693508
  hyper

SEQ ID NO: 241045 - DNA, 2574 bp, Homo sapiens
  chr20:21080343-21082917
  hyper
ttacttattttacacgttgtcgtctgctgatgtttaaaagataagaagacatttgtcagggcgggtgcttgaggctctcagaggactccgggagacactgccaaaacgtttccaaactgaatagtcattgggctgccagataattcagaaactatctgtatgagctgtttatcaaattattaaccgcacagatgttgtttggctgaagagcagctgaatcccctctctggcagccgcggagacaaaggtctccaggaataattggagatgtgcatggaatattaaattaatttactgctcttaattcttatgcaaattctgacctccgatggcgcctatcaattaccccgcccgcagtgaaagcgaaagcgacagtttcttctcttcgcttttttttcttttttaagaactcgaaaaaggaaatatttgcaataagcaggcggtagtagcacttcgtagctggaattatttaattgaatcttcaagtttttagggatgcccgtagaggataaaaccccagtgctcagcggagagggtgggaggggtacagggggcggaggaatctgttggtttgactgtacacctgcgggcggcggcaaaatacagccacgagccgggaccagtaatgtcaaataaaacattggcttgtagacggacgcgggccttgggaatcgcgcgagcccagcgttagcccggggtttcaccgaagccggcgattcgaagggagtggcgtttccgcaaactgcatcgctaggggcccggcgtggaagcgcctctgcgcaactttcctccaccgctgcctacaagggaggctctggcttccgtttacttattttttaggagttttaacctttggttcctgcttttacaaccgctaaccccaaaaacattttttttttctttttgttctttgtaaaaccaaaccactatgctgtgcgttcatgttcaactctgttgaaatcccgggtgggccgaaataagatttaattgtctcctgcgtggagaagtgacacccactttttcccctgaattgagcaaacaccagggctttgtctgagcttgtggcttaaacgccgggcggtttctgcacccagttggtgggttgtaagacaggaggtttccaagtctttcatcatgtttctaacaaggaaaaccaaatcgggcccataatgtcatcagccccggcccgacctcgccgggacctcggcagcccgatgatgtcgctagcggccccggcgcagccacgacgcgccgcctttcagctcctcgcagtccccacaaaagccagacaacaatatcaattaatcatgcagcgggcaaacaaggagatttatcccgcgacaaacagccccaccgagagccgctgaatgggcgtgattagcatgtgaaaaggcgagcaaaactccgcggttcaacagctaaagagcaatttgatggggctgggatggggaaattacttgattagcgtccatcggaggagaacacggttacagcccctcggccgggaatccgacaggggaacaaaacgcgctggtaaacgcggcgacgtacagggagcgcgagcgagggagggagcgccggcgagggagggagcgcgggggccgacatcgagaggcaatcggggtgggggcagaaataggggctgacccgctagcccccgccaaaccgcgaccaccctcacctagggctcccgggcggactcaagacttcacccagcgctggaggtcgaccttaatttagagcgctgccccggctctggcccggaaagagagtgacagaggcgcgtgcgggggaaaggcccacccacgctgtccctggagtcccctccagtgtccccagggacgcagtccgcggccgccagctccaggggctcgggccccaggttggagtagccacgctagcggctaggccgttccaccgggtagctccgcccttccttttgctcaggcagctaactttggagccgggcaagacgtgttttcccgctccttcgaatttaaccgcccagtgcctgcctcctggaaaagctgtcacgattgggcttgggcttgggcttggccttggtcaagaaaggtttcctcggctgcgccaccgtggggatggaggtgggagttggaacacagccccctagctgagtgcaggggccagaggctggcgggggcacgcgggggtggttgggggcggagtgcggcgaggggtgagggcgcgaccgccttggggcaggggcggcgatggagtagctccgggctctccacggactcgattggacagccccaggccggctttggatccttggaggcggatacgcaaggccagacctggtggcgtggccagttgggcatcgcggtatcttccccaggcctggagggcagtgctgaaggcccgcggccgaggttttgctttaagtatacttgggcctcgcaactcagctgtttgcgaacagagacctggcgaatcgccgaggagcggcgcggctccgcgtccccacttcaaggccaagtggagagtgaggacacgctgaggccccctgctacctatcatgccatcttaagcgggcaccgactccttacccag

SEQ ID NO: 241046 - DNA, 52 bp, Homo sapiens
  chr20:21083205-21083257
  hyper
ctgaagtacattcacgcaaatgtgagaaagacttcaacgcacagaatcgcca

SEQ ID NO: 241047 - DNA, 1128 bp, Homo sapiens
  chr20:21083481-21084609
  hyper
ctgtggtgatgggtgtgcagcgaaccccagctcgccggtggccgctcaccccgctcgcctctctctccctctggactcggtgctgaagccccagtgcagctcgctcctccttctgtcagcagctggacccggaagccctgactcccggcttggcgcctgtgctgagagcggagaaggacgtcgcgaccggcaggcctggagggcgcattggtgtgcagagtgtagcggctggtctggccctgggaaccccagacccgcgaagctggagggcgcactccccggcctcagagccccaaaccggaggcgctgtccaaacgcgccaacgctgcaagcaatgtggcagggcacaccgaaatgcgtgtctcgcacacctgcccatctttccctgctcaacacgaaagcgccttgtggctctaagcgcttccttggggtggctggggctgtgcattttaattccaaagtcaagaggttgaaccatctcaaagttggcgggtggagggggcggtggcagggaactagatggctggatgcctttgcctgcggggtggcagggctgtccctaccaatagccacggctcggggctggctttgtagttatttttccaagttctgcccggtgcccatcatattgccctgaaaagcaaaagaggccgatgcaatttattccaatgggcggtttttaagaagctggcaatttgaaccggctgggtgttatttagtgcaatatgaaatcaaatgatcctatttctcaaataacagtgtctgtgaggagaagtgaatcctctgaaagggtaattgtctgctgatggtgtttcccattatacccgatcttggcctaaatggtgttcggcagcggggcggagagcgaggggtgaaatcaatgtgcgccaactcgcgctctggagacaggaaaaggtagcaccgctggcgtcctggcacgtcgagcgaacaatgccaccccacgcgtcactgatcgactcatcttgcaggtgtccgaaatcattagacttgagtgatcttgtggacgggggtataagactaactgtttttcctttcgcaactttgggaattgttagtctcctggcatcagtcacgcagcagactgacgataatctgggaaatacaacc

SEQ ID NO: 241048 - DNA, 1210 bp, Homo sapiens
  chr20:21085663-21086873
  hyper
ctttgtctaggaggaaggttcggccactgcacctggagcccgaagcaccggacaccaggcgcgccgttctggcgctctgcagggcctctctgggtgaaggaaagcgggcagcctgggttcagcccaccgggtcccctttcgaatgccatttcccagctgaaaatccagccagcacagcctggacgccgagccctctggagccctggtcaggacgctttaattttcaccctcccgctctgggtctgaacaacccccccgtcccccgccccccaccccaaggtgttgtttcctagggtcttctggggacatccctacctgtcgagggcctgccctcctcgggctaaaagttcagcccttcgacagagccatggaataagaggcgactctccctgtgtcccgcaagtggtttctcgaggtacccctctgaggctgcagcccccggagcagacctggctctgcatagcagcaaaagcaaccgcctacctgggccggggcaggactgtgccgcggcggcagggacagtgtgagcgccgccggccccctcacccggcgagggccctgcgctcacacttcttccaggggaaggagtggccacgcctgagcccccctaaacgacctcttcaggagaaaagagtgccggccaggagtccctccagtaacctcagtttagatcgggttttcgcgcctcccctaggaatccggctggaaaccccggagactctgcgcctagagttttgcgggcgtctctctgcctccccgcagcttccggctctcgcaggcttcatccactccctcttcccccggacctgcctgaaccccgccgagcactaggcaaggccgggctctgcgggctggggaaaagaaggggcttggggtggcccaacccgaccgccacctcggcccggcctgcggggaaaccccacaaagtcaaggcgcggggcggggtcggggggatgggatccagagagagactcagaggggcgccccttccccccaggggtctccgaatcctagggactctctaagcccccgtggcagagaaaagaggaatttttaaaaacaaatcttcccttgcctgaggccattttccagccttccacgcgcctttgccggggaaagagtcgatgactcgccctgctcatcggctcagaccagagctaccctgagcccacacctctcctcctctctgcaagacatcccttccgccacc

SEQ ID NO: 241049 - DNA, 245 bp, Homo sapiens
  chr20:21087053-21087298
  hyper
gccttataatttaatcacacgcgatattaaattatcaagctgctcattaatcatcacgcgagttattgggactgaacacgccgccgcgtgttttgacagcccagaaccattcgcgggggtcggggtgtgtctgggtttgggggctgggggatgtctagccactctagagaaacactgcgagccccacgcgggctggtggagcctcttgcctggaaaaagatgtggaaacgcgcaggctgggcgtc

SEQ ID NO: 241050 - DNA, 232 bp, Homo sapiens
  chr20:21106749-21106981
  hyper
cagcagcatgagccggaccctcgcatcggccgtgcccctgtcgagtcccgactactacgagaggctgggccaactccagcacgggctgcgggacaggtaagggcactggggcgggggtggggagtcggcccgcgccgggggtcttccgcgtgccctgccccattttccttcccgctcccccgtccgaggttccccggggcccaggcccgcgcgcaacgccccccaggctccc

SEQ ID NO: 241051 - DNA, 504 bp, Homo sapiens
  chr20:21372186-21372690
  hyper
cggcgcccgggccccgcgtgctactcagagctcaggtcctaggtgcttggctcaactttctcccagcggggtcgggaagcgccaggccctcggtgcacgtggggcacgcgcccggcgcctgggtctcccctgcggctcgctagtcgcccggcccagcccgcagaccccgcggctggccctcccgggagccccgcgagccggccgcacgcacaggatgggcgcggaaagccccttcctctaccctcgggcgcaccctccttcctcgtccgcggcgccgcagcttctcaacctgccgctgcatctcaactccctgcaagcagcagagctgtagaataccagaaatggtcttccttccgaggctgccgttttaagttccaagtgtgaaagtaaccgaattttgctatgcttagaaatctaaaatctggacattccctgaagagtcaacttagagtccccagtttctcgatctggctccgtcccactgactgacgcctcctgcccacc

SEQ ID NO: 241052 - DNA, 2256 bp, Homo sapiens
  chr20:21376322-21378578
  hyper
ccacctcaaagcctcgtggcataatgttacactactcggtttccgggctgtcgctgtcccccgcccccagcaagaggttcacagcctgctcctctctgagaccggttcgttttgaatcgcagtttacacgcgcgagtcggttttcgcatgcctcccccatccgttctagcagtttcttgcagacccttcgggtgcaccaggacctagccccggggcgccctcgctgtcaccacgtcctgccatagagcaggttggcgcccaggacgccgccgctgtactccccggcggccgcgtccagggccgccaggccgccccccgggccgtgcagcgcgggtgggctgggcgacagctcctccagctcaggtgctggcgtcggggccggcggctgcggaccggcctggccgggggtgggcgtgctggcgccgttctggcacggcttgccgtccttgaccagcacaggcaccgccacgcggcgcggggacggcggcggaggcggcggcgggcccaggccgccctcctgctgcagctgctgcgccgccttgtccttggcctgccgtttcatcttgtaccggtggttctggaaccagatcttgacctgcgtgggcgtcaggtggatcatgctggccaggtgctcgcgctcgggcgccgacaggtacttctgctgcttgaagcgccgctccagctcgtagacctgcgcctgcgagaagagcacgcggcgcttccttcgcggagcggctgccgccgccgccgcgtgcagcgggcccagcgacttggcggcgtccgcgatgccggtcagcgaccccatgccggccacattcacgcccgccgacggccccatgaacctggagactggggaagagtcccaagggggaaggcgagtgagctccaggcccgccgggagccggtccagccgccgctctcttcacgccgcggccgcgacgccgccgggccctcgctgaatcccaagaccccctgaccgccgcggcctccggccccagcacgccccgcgcgccctcggcgggtcccagagcaccacgccctcaacgggtcccaggacgccgcgcgcgttcccggtcaggtcccaggaccccccgcgcgcccagggtccccagaaaccccgcgcgtcccgggccgcgtcccaggacgccccgcgcgcccgctcggccccaggacctcctaagccgcgcgcaccccgtcccgcgcccccgcgcccctcggctgtggcgggaaacgcctgagccgcccgcagccccgcgctcctggcccctctcacttgacgagtagcgtgggtccgggttggcgccgtaccagccggtggccgcgccgccccgcatgccgtccgtgtaggcgggcagctcgcccatgttgcccaggccgccgttgcagtagctgcccatggcgccgtgcgggaactgcgagacgccgggcggcatgtggtaggtggcggccgccgccgccgcagctgctgccgccgccgccgcggccgccgcgttgtgacccgccatggcgtgagaaggctgcatgcccgccacggtcgccgcctgcgaggagggcccaggtggcggcgcgcggtaggcggccgcggcccccaggggcgcccccaggccgggtggcgcgccgtccatggcgccgctgaacttcttgtaggtctcctcgatggggctcaggatgtcggacacggagaagggcgtcgtgtgctttgggctcaacgacatggctcggcgggcagccaggtaggggggcctggggcgcgcgccggcaggacgcggcggccgctcgtcgccgccacctcggccgcggcagctgagcctgtgacgaggagtcggcggctcggcgagccccccgggctgcgggatctggggtttattttagtccggcgccaggtttacgacagactcggggggcggagcaacatcccaaacgagcaaacaatggtcattgacatctttttctctcgcccccccaacccccgccccataatggaggcaaaaaaaggtaaaaggggcagttgggtgtttcttggaaagatcactccccgttgcttttcccatctttgcttttcccatcctttgcttttcccatccttcgctcctccatccgcggccgttaccccagccctcgagcaccagaaatagaaactcggaggctggcgtcgaggctagacatggactccgcgcctggccccttccagatcccagttttctaaagtgacttcgcaccaaagtccggtataattgcggaatggggaacgtgctg

SEQ ID NO: 241053 - DNA, 1762 bp, Homo sapiens
  chr20:21485912-21487674
  hyper
ccctggtgtagaggacacctcgcggagacatctcgagtcccgcaggtgtctgagctgcgctgcgcgccccagccgggaagccttttcttatccaaccgcgccgccccgcggaaagcctgggtactgcagacgccctcaccggcccaccgacagctggttttgaagcgggggcttagaaaagtaaaggggacagtgtttggagccacgatgcctttgatgtgaggcggttccacccaacaatcaacgaatcaagctggaactgcaggccctacttttgttggggggaggaccttaaggaatgtcacccccttgtcccctaccctctgccccacgcccagcctctcagaaggcaccaggcgtgagtagagtgcgaggcgtccacaccctcgtgtcccttccattcccggacacctttgcaccctagccgaggcctcagcacggagtgagggttgcctggggtgccctgctgtgtgtggggcgttcttgcctcccgggccctgaccccacggtctgggtcggcgaggcgtctctccctggcgtctggactgtgcgcctgccccgcttccaggcgacgaacggcaggagccgggggtccggcgggacccggatccagggcgggcggaaggcgagggtctctccttcccggaacccccgccccggaaacctgcaaccaaaccgggtccctcctccgcatcgctcccgcgctcccgggccgcctccccacgcgggcacccactctccgggccctcgcagcaccgccctctccgcgtccacccgcgcggccgacgccgccaggggccctgagatcgcggagacagcgcgccctggcgcctggtggggccctcccagtggccagagcgctcctggaccagtcggctgtggtctgtgcccaaacacgatggaaaccggggctgggacgggcggtggtacgcacgtggaggagaagaggcatggcgggaaaaccacagccgaacacaggtcgactcgcacctcccaggcacccgccgccgtctgactcgcggctctccccaaggttccgactcgccgccacctcttggcaccactcaccgggctccgacccgggccgcgagtccgctgatgcgcagctgcctccggcggctcccgggctctgcccggacccgcgcgcagagacgctcgggaacgctgggctcgggcgcctcctggcggcggcagcacgcggcacacgctcggttctccggcccgagggggcgcgtggagcgtacgcgggatccgcgcgcgggcctgggctgctggcccacatttccccgcttgctcggatggcggcgctgaggcctattcgcctctttattaataacgatgcctcgggagggaaaaaatagagcctttaaaaatcagagtgcgagagaggagtgtgtgtgtgtgtgtgtgtgtgtgtgtgtgtgtgtgtctcggggcgttggtgaaagcaataaaactcagatcgcttccttggcgagatagcggcggctataatgcgccggggggatcaggggtttatttgcagatcctggataaaagatgatatatcgacacggtttagagtgtcactgcgcttggcctctcagggagccacaagtacatatttcctgaaataccgcccagcacagtatctaatccgcccgccacttaacaccgggaggggaacttcagcagcgcacaagcgcgctcccggtttcctggttctgggtggggagagcccaaatgagaaggatctggtatgcctagacgccccctcccctgg

SEQ ID NO: 241054 - DNA, 351 bp, Homo sapiens
  chr20:21488261-21488612
  hyper
attttgtaagcacgcgatacaggagacattgaaaattaaagaggaagtatctccctcctccaacatggggagagacgctgttggaagaagtttctgaagtggtttcccatcgcaccaagaggccagtgggatggatccccgcgcataattcaaaggaacgcgcgcgtctttagctcttcggggttggtaaccaagtggtccggccgggcgcaagtcgccttggaaccggctgcagcccaagtctagctgggcccgggactgagcggcacccttggcctctcagaacctttctcgcggtgagtggaagggcggctccgcgcgcgggcgcttcggggccggtcggttgcgaaa

SEQ ID NO: 241055 - DNA, 798 bp, Homo sapiens
  chr20:21489087-21489885
  hyper
cctccccaatagatatagcacgaatttttaatgcgtcttcctttcacagacaacaatacagggtttgaaagccggacacaatttaggttttgtgcgggtccctcctcgcgctccctcggcccagctggccatatggaatccagcatggagcccgtggatgacaaagggacccagtgacaggcccaacaaaaccccaaggagacttctgcctgactccgggattcactgccggcgataagcgcgctgaatggtgcggggtggggcggggggtggggggcgggccccttctccttcttcccctctctctgtccccgcgatcctttctctgtccctttttaatatgcacgcctctaacatctccggctcccagctttcccattgtgcggttttgtaccgcccgctgtagattgggcgaagatagactgctgaagcggaccccgcgccgggtgcgctcccagggcgctggggttagggccacacagggctccgcaggcgcttttattgactccatggggacccgaggacagagagaggcgggcgccgggtccacctcccgggctcccggccggccacaggagcgcacacccagattgcaggcccgcggtcctggccacagctccaaatttgtcctcaatgagcaagtggtggaagcctgccagggtgaggaccttccacgcttcccccttcctctctggaaacctgagggtctcttgtgatcattctcaccctggaagccctggggcctggaaaagtcaaaatggcctcaggccttctgacagctccgctccaagagacttg

SEQ ID NO: 241056 - DNA, 1500 bp, Homo sapiens
  chr20:21490148-21491648
  hyper
tggggtattagaaagacttccgagccctcaattatccaggggcggtgtggaacgcgggaataaagtgtcatcgcgtccctgggctgctgcgcagagtgctatcgacgcacagatttggtcgcacggataatcatgtttgctttagatattgaattaaacctgatcatcaactacagggagcgagaaagtcagctgggaccgctccttttgcccggcctcctcactgccacccaaccccccagccttgatggtgcagcttcggagagaacagagatacaatttccaaatgcgccgacgttcagtccctcagcgtctgcagcacccgctgggctctgagctagagtcccaagtatttttagaaacccgcgagatagaggagaaaggctcatcctccagttggccaggcttcctaagacgctcccccgcgtggccaagtgtgcgccagcatctgccaaggagatcttcctccagcaacaagggtgggacggaatccgttccccgccggaaagatggatgcgcccttcccgggcgtgcccggggctgtgtgcccacttcccatccggggagctcaccccacccccaaacctctacttcctagcaatccacccagttccacgctcaagggctgacctggggggaccgcacaccctggttcggaccgccgaacgctggagggaaggaggcccgggatccagtccccggagagaggcctggaagcccggaaaggatgggagcgtaagggaagggagaggcatggtttgctgggattgccaaagattctcgctccctggcttcctggggccaaagatcctagggagggctgcagtatcccctccctcccccgagcccagaaccccgcgtacttcccccaagccccctaagccaaagcctcgcgcgccctgaccgttcccacccccagccttagcggtctcctaggtcagcaccagcccgcagattttgaaaaggagtggggagtggggagaaggcagccagtcttaacctcagacccccacccacccactttcttagcgtgaggtaagtcaaatgtaacaaagtgaaagtcatcgagtgtagtggcttcaacagcttctcaggctgaaggagccactcatagatttgggccagcgaggggggtttgctctcctcgcctttgcggctcccgaagtcacttttcctcccgtagccggacgctgccgcccggggttcagacagcgcgcgagaccaggggagatgcgggggagggtgggcggccctgggcttccggccgaccgctcgcaggccggaggccgagcgttctcctccccgccccaatcctaggcgcggggtgcagcctgtggtcggaggggcctgcaccgggagccccgcccgccccagggccccggtacccccggcctccccgcccgagaggaaccgcctgtgggagccccgcgggcggccgggcccggctcccaggcccaggcctccggcccggcgcagtaggacaaacgggagggcagggat

SEQ ID NO: 241057 - DNA, 1722 bp, Homo sapiens
  chr20:21492297-21494019
  hyper
ttctgtaaacacggcgtagagttcagccctctcccaaggttcagaaggagaggcatgggcagagctgggtgggtggaatctgccactccaaggagacgcaggcaacctcccggcgcctccctagtggagccgagagtcaactcgactccataataataattataataataataataaccaccataaggaccgaggcctcctcgccgccaccgccgccggggtggggcctgggcctggggccgcgagtctcgttggggcggcgctcaccaagtccactgctgggcctggaccagggggtgtgctgtcgggtactggggggtgctggccgagctgtactgggcgttgtactgcatgtgctgcagcgactgcgcgctgtaggcagaaaagggaatgcccgcctggaaggtggcggctgccaggtcctgggctttgagcgcgtgacatggtttgccgtccctgaccaagacgggcacggccacccggcgcggcgagggcaggggcgtcacctccatacctttctcggcccgggcgcgcttcatcttgtagcggtggttctggaaccagatcttgacctgcgtgggcgtgaggcggatgaggctggccaggtgttcgcgctcgggcgccgacaggtaccgctgctgccgaaagcgccgctccagctcgtaggtctgcgccttggagaaaagcactcgccgctttcgcttcttgccggcgtcccccccgccgcccggggtctccttgtcattgtccggtgactcgtcggccgagggctccggggacttggagcttgagtcctgagggggcgccccggcagccagaccgtgcactggggggagggggagagagaagcgcgtcaggcgtctggaggccgcgcgcagcctgcaccagactcggagcaccctggatcctccgtgcgaccctggacctccgcgcctggcagcccagccccgctgcctttgccatgacccctgccttcctctacgcctgacgaagacgtcgggacctcccagggtaaagagggaaatccgtaggagtgggggctaggggctcgcctttcaaggggctcacatagtgtgggtgagaatttggggggggaagtggcactgaagatcatcgcgggttaagggctccggcgcccttaagcggtttcctctccggcgagacgtgggcagatttttaaaagaaataccccacaatcccagcattgatcggctcggccatttaaggcaggtttttgggggctttcgtttctgctttcgggccttctagacaccccctgcactgcacaaagcgtcctctatgatcgcgcagggggcagggtgagctatttatacccgggccacccgaagcctccccaccctccacccgtacccggacgaggctcgctggctacctccagggcgccaggccagtccctcccagcggccggagtccgggggctgcggctggagccatcggtccgggttgacatcatataccagcccctgggaggtatagcccttctccctctttctccttaacttctcgcattgaaaaaaattttggagaccaagttctttcccggaactaaggaggcttgaagaggagggcagaggacatcctatacaggtgttaaaaatctttctacggatccgagtgagggggtccgggcttacatggccccttcccctttcactcccagcgtccaacccgggctgcggctgcaggaatggaggggaccac

SEQ ID NO: 241058 - DNA, 278 bp, Homo sapiens
  chr20:21494199-21494477
  hyper
gttctcttcctccggaccttcggccacagagccctcctcatcgttggtgtccggcaggtctaagatgtccttgaccgaaaaccccgtctttgtgttggtcagcgacatggttcgagaccccaaaatttatgtcgcaaagttgtagcttcacttggtcaattcgtggcgctcccctgccccggcgggcgggggaggggggagttggggggagggactgggggaggggaggggggaattggctttaattattgggataattattatttttaaaaagagaa

SEQ ID NO: 241059 - DNA, 97 bp, Homo sapiens
  chr20:21494777-21494874
  hyper
aagagagggagggagggaaagaaagagggagggagggggagcgagagagggagcgggagaagggtggaaaaaagggggaagagacattaaaaacgca

SEQ ID NO: 241060 - DNA, 126 bp, Homo sapiens
  chr20:21495054-21495180
  hyper
cagtatttacatacaaagggccaccgcgtcgctcgcgagtccacacacttgaaagggccgttttaacaaattgcatcttaaaaaaggtgggggtggggaggaggaggggagaaaacaaaacagaaa

SEQ ID NO: 241061 - DNA, 378 bp, Homo sapiens
  chr20:21495360-21495738
  hyper
tccggttcaaatggcaagagcccaacttctgtaagcctcctaggtcaatattttggttgaggcttaaggatgagtgctagaaatgacaaggcaagtaattgattccagttaaccgcgagagagcccaaaacccaggagagagctccgctccgggccggccagagccaccaccaagcgacccgcccccttccagccgccctttatttgctaaagactcatttatttccttcactccgcctccccccacctcccacccccaaccccccgcctccacctctctgcggccaaggaggacgcgcagttcactttctgctttgcgggcggtcccggggagggcggggtaagagtgaggagctccaacttcgtctggggtcggac

SEQ ID NO: 241062 - DNA, 834 bp, Homo sapiens
  chr20:21495943-21496777
  hyper
gacccagaaagctgcgggggaggggggtcgctgggtggcccgacgatgcctcgttttctccccagttttcttctcccacgcgagttctttagtgtggtctctttttggacgccttgggtgcgttcggagtacgcgctccacgtttccaggttaagtcaggttagtgtgaagtttccagccactctcggctctgggaactgaactttcccgggacttgcacttcctcctcggcgctggggttggaaaagaccacgccgcatttgccaccccttcttctagttaaaacttttttggggggggggtgcaggggtgtagattggctacctgatgctcgttcgccccagaggagtgtcaggaaggagctttgtctgggggcggggaggggcacagaaggccacccctgcggggtccaggtctagtcttcccacaacctgggctcctccgcgcgggccaagctgagcgcgcgggcaccgggtcctcctcgcgcgcagctgcagcggacgccgccgcgccccagctgcccccgggttgccagcgctgggtgagggcacctctccccgagccgctcggcggctttctgcagccctagctgcctcgcccccagtatgtgacgtgggtgacaatggcccaggttagagcaagcccctcgtcggcgcgtcctgggtggtcggacccgggcaaacacaaatacaaaccgattgctaagctgcggacaatgagcgaaatgtagacaaatgtcccgctcccgttggaagcctttgtcccggctcggtttttgcatttatttcagtggcgaaataatacatgattgacgctctctttcaatgtgtccta

SEQ ID NO: 241063 - DNA, 202 bp, Homo sapiens
  chr20:21496993-21497195
  hyper
tgaatcgtcttcctcgaacccattacttttcgtgctttttttttttttttgctcgctttccgtctctgtctttctcagcgccccccctcctccgccctttcacgtgggagctcgtcgctctgccccgtcggaggagggaagttggttctccaggagtcggggaagcgtcgagtttggatccaggggcgggagtgggcctgcc

SEQ ID NO: 241064 - DNA, 455 bp, Homo sapiens
  chr20:21497415-21497870
  hyper
tggcagcaagtgtcgtttctcgcatatccccagagccctcttaggtgggggagtgcccgcagaggcctcccaaagcgtgttcatttcttcagctgggaaccacctcgctgaagttccatgtagttcccaacttctctcccccttccccagcatagtgaccctttcttctcaggatctaaatcagcaccgctgctattgatcaagtcccctcccctcacccgtgggagcctgcaaggtccgcagagcgcctgagagaggattgctttcctaggggaatcctggctcctggaattaatcacggggagggagtgctgccataggcgcctagagaaggaggccctcagcccagttctcaaaggtcgggtttgcctttgcgcctgccccttagcctcaatgaccagccgaatccttctgggtctcagcttgcggtgtcctcttgtcggagcacctgaggc

SEQ ID NO: 241065 - DNA, 228 bp, Homo sapiens
  chr20:21498081-21498309
  hyper
tccccatcacttctcgtccgtgtggttcccgcgtccatttccagagcgttaacatttgcaattgaaaaggcgctgggagaccgctgggaggtccgtaattgaaggggagaaactgggcttgttagtggaagatcataaaatgcaagtcccccaggagcggcctgtggacgccgggaggcctgcgcaggcccagctggcggccagggcaagtccggtgcccagagcaca

SEQ ID NO: 241066 - DNA, 1042 bp, Homo sapiens
  chr20:21498563-21499605
  hyper
caccactcccaccctgtcagcgtctgcctgcaccagtttcagctcctggtctcccccactcggcattctttagtaaattctttccaggtaccgtcttgcacccaagcgagttcaatgtcctccgttccgtcaagtttgggtttgagctttgggctcagctgccgtggtctggagacctcgtaggcactctgcaagatgcctcgttctgctgcatgcttggggaggaagttgagctgggtgctggaagttctgaacccagcatgccccgggccggaggagatttgcttggtgtctccttagcgtcccgaacaccgcgcgcccctgctggggtaacctgaacagctggacccctcaactcgatctttattatcagcattggggctccagattccgtacacatctctagctctattcattcttcctaggttgagaacggacgcattgggagtcctacgcccgggggaaaggcaggagaggggaggaagagaacctgtgcccctggaagctagaggagagcctcgctctctctgctgctctgggttccgcaacgaattgagttcgggttcaggcggctggagcgggcgcggggaggctgaacaatcgccggaggcccaggaggggaggcgaatgtacacaggctaagtggccccactccaggacaagtggccctctaagtcggctcagtgtttacctgtttactttcccaggtagctcaaacacgagcgccttttctgcgctccagggcacgggggccgcccagaggcaccctgctttcccggcttctgccctcccacgcctcagctttacgccccctgttgtgggggtgcgctctaaacaacagcaaaccaggcaagaaaggaagatacaggagagcaggcgaggcctcggcacaccctacggaggggagcctttcttgtgcctgtggaagaagtgggctccgtggacggcatccgaccctccccccatccctgttctgggcacctctttggagacggcgctcgcatccttccccgttcaagccggtggtgaaagcttgcagtgc

SEQ ID NO: 241067 - DNA, 396 bp, Homo sapiens
  chr20:21499956-21500352
  hyper
ttagtttattgtctggttagcgccaaggtgcaagcgtttgtcttcattcactccggaaacaaagcgcgttgcaccttcctgctccagcaaggattaacggcgcggacacaaaggttttgtcggagggggaaggtttattttatcttgggttggagactcagagcgtggcatgcacttgaaatcaatggggaaggaaaatgtcacccaatctggtccctgagtgtggcgataaagacgttcaccttaaggatggcatctccaaaacagccccactttggcttcgacttccaatgcgggagcaggggctgcaggaagcagaggtgtcagctctcacgtcctggatgaaagaaataggggaatgcaccccaggagtactaccccgtgctgggacctttg

SEQ ID NO: 241068 - DNA, 1079 bp, Homo sapiens
  chr20:21501158-21502237
  hyper
gcatccaataaaataaaaggcgaggaaagccgtttaactttcatggatgttaaattgaacacgaactgtggctccgggcacgctacaaaatggaaccggcctctctccaatattttctttaaaaacctagctttaagcccccctcgggccaaacgagcctgtcccagccaatccattatcaccggtttattggggaaccaaacgccacgtccccctgggcgaactccttggctttattcgttcgcgctgctctaatgactaaatatgttacaatgagattacgcatcgtcagtgttgccttcaggaacgttctttcagccaagcccgaccttccccggatgagggcgatttcaatacgggagatctgggtttctccaggaaacacgcgctgaaagcactctcttatctgaatttacttcttaacacgtgacaaaatcattaccacaagactttggaaaacaagcggctctcctaacgggttgcattcagcacttaaagctgggtcgggcaggctgatgtgaaaagtagttgtcggtggcgcggagaaggcacgctcttagctggagctaagggctggttccgggaaggacagggaatgcacccttgggccctcgggcacagagagggggttcctagggctctgtctctctctctccaatgtgagccccagaggttcacaaccttcccctagacgcaacgtcccctttccacccccaagagccactaaagtcgagaaggcgccagaggagctccaaagggcctcctggtagtgtgtgcgtgtgtgttgtgggaggaggttggggcggagggggcgcccctcggagacaaggaccccaccgaggttcatttctgatcctctggcgatctctactgacacaaacgagaactgtccggcgccgggcgcggcccaggcgacactcgcctcccaaactccagtcttcagtcgcctctccagagacctcagtccactgcgcgggccctcagccccggctcctcctgtctgcgactcccaccacttgccctcgtgctcatcaccaccgtcccctcacgtcccagttccgtctgaggagaagcccctg

SEQ ID NO: 241069 - DNA, 74 bp, Homo sapiens
  chr20:21502417-21502491
  hyper
ggagctagccaggcgctccgcgcgcccgctccgccttctactcccggagctgcggcgacagccccgccgcattt

SEQ ID NO: 241070 - DNA, 303 bp, Homo sapiens
  chr20:21503511-21503814
  hyper
cagcggtaataaattgggtatgagcgcaaacacacttgggcttcgatggctctttcagctgccacatggtaggctttgcggggagggggcttccaccccgcctcggccccctgcccccaaacgcgcgggtagattccctccctcctgcgcccctctgagcaggagatctgggaccccaggtttctcctgaccctcgcccctcctccgtccccagcagtgccttggactccgcagctcctggcgagcccggactgctggttaacaaggtcgccatctataaattgctcggtcgctaagacgcca

SEQ ID NO: 241071 - DNA, 611 bp, Homo sapiens
  chr20:21681908-21682519
  hyper
gtggccagtgtcagcggaaacggtgctccatccaccacagctgacccgactcattttcgataataaacatttccagggtagcgaacatcatggaggcctaggcaaagaaccaactttacgaccgccttggtcagcagcaggccaaaggaaaataagccgcgggaatgggtccgcgaagccaaggacgttatttctcgctcttgggggctctgttttaatgccagttggcagggtcctcaacaccttccatttggggtctggagagtctgtgtgtcctagtcaggagaggcaggttctgtgcaaaacgcactccccacctcgtccttgaggatccactctgttgggaggacgctctgaccttgcgctccgaggcggcgctcacaggcgccaattcagaatctagtcttcctctccccttcctcgctccctccttccaccgccgcagtcattccccgcggagtttcgttgtgttgttacacaagccagcttttggtttgttagttgttcgcattcccccagggtttgcagctccccgatctggctcagctcttcttcccatagtttctttgcagctagcagctcctcatttctcttttcgtcaattttcttct

SEQ ID NO: 241072 - DNA, 1203 bp, Homo sapiens
  chr20:21683255-21684458
  hyper
gtaaccccccttgccgccaacccccagtccccagaagggcaggcaccccttcgcgcctcctttttgactcccgctttcggcaaagagtttacctctctttcttttcctgccttgggaaaactgggcgagggcccgaagcctctggggtaccctcagatccatcctctgccctgctaggagtccagccccaggcggaggagttttgccccaggtttctgagtgcgccctcagctaacaggctcccgcgaccctggaagcggaactttgttgcactccgcttccagaggacgctgaaatacggtgccaaacccagccaagcaaaaacgcagaatccgcgagctctttacctctgtgcgctcagcgctgactagtagctgtccccgggccatggagagggctaagctgcctccttgggaggtgggagagacgtttcttttccttctgcaatctcatcttagggccatctctcaccaagcctagcctgcagctcgggaacccgcgatacccggccgggggacgacagggggcgacaaactgtaaggttttccctatgcccgaccgtgcagaaggctgcagcgagggctgtgtgctcccgatcgcgcacagctggctgcgggaaaggggccaggattgagacgaaggctcgcggactctgctaccggggagaaccaccccctctcatcgtgcgcaatccccagactcacccctctacagtagcccccagccacgggcggccttcacggggacgggggcggagttttgtcctggactgcgactccttgccacttttccaagctcggcagcagaggtggggtggacgttcccctgaaagggtagttgggcgaaccagctctcacggtgtcacgaccggctttatttcctcgtctttagagtgtgcctgttgactcctcacctactggggggaagaagcggctttagctgcttttccggatcacgagtatccactggactgaggcagggatgtggcgttcctttatctcagagactccaaggtctggaaatcaacctttcttggtatctcgcgcccgacgaagctagcagattccgcaatggagagcactgggcagggtgcgtccccactccccgcacccccggagccccgagcatactgtgcgtgcttagtcctctcttcgctgccttcgcggaactcctggcttaggcgtgcccactttaatccaaacc

SEQ ID NO: 241073 - DNA, 99 bp, Homo sapiens
  chr20:21685758-21685857
  hyper
ggagccctgcaccgcgctggacgctcaccttgacactcccagccagctggggtactgatcccacccttccccggccgctgccccgggagtggggaggta

SEQ ID NO: 241074 - DNA, 1002 bp, Homo sapiens
  chr20:21686798-21687800
  hyper
gtctgggaagggagtgttccaagtagacgcgctaaaagtcgcgaaagggcacggagggctacaatgcgccgcgctccactccgcggctcctctgcgcccttgcccactccaagccagacccaggcggtttgcccttggactccgagctgtctggggacccacaggtcacctttggaagtgcgcctgggtgcagtccctcgctccgcgtggggacccttggctaacccgccgggtgttttctccccctccggctcactcttgtctggcgcatccgcagagcagacgtatggcgaggtgaaccagctgggcggtgtgttcgtcaacggccgccccctgcccaacgccatccgcttgcgcattgtggagctggcgcagctgggcatccgaccctgtgacatcagtcggcagctccgcgtatcccacggctgcgtgagcaagatcctggcgcgctacaacgagaccggctccattctgcccggggccatcggggggagcaagccccgcgtcaccactcccaacgtggtcaagcacatccgggactacaagcaaggagaccctggcatctttgcctgggagatccgcgaccggctgctggccgacggcgtctgtgacaagtacaatgtgccttcggtgagctccatcagccgcatcctgcgcaacaagatcggcagcctggcgcagcccggaccgtacgaggcaagtaagcagccgccgtcgcagcctacgctgccctacaaccacatctaccagtacccctaccccagtcccgtgtcgcccacgggcgccaagatgggcagccaccccggggtcccgggcacggcgggccacgtcagcatcccgcgctcatggccctcggcacactcggtcagcaacatcctgggcatccggacgtttatggagcaaacaggtcagttgtggcggcctccgtagccttctattaaggggcagaacctggggcgggcaggcttgcaggagaggactcacactcgctctcctcccggg

SEQ ID NO: 241075 - DNA, 42 bp, Homo sapiens
  chr20:21689629-21689671
  hyper
ataccatgaccccttcacatcgttatttgtaacagtttgagt

SEQ ID NO: 241076 - DNA, 346 bp, Homo sapiens
  chr20:21693262-21693608
  hyper
aatctataagatactgcatacgcacaaagaaaatgtattgcttttatttgttaaagataacttgcagcttcgctccagttacctctgcctcgggattggttcttggaagatcctaaaagtaaactttgtcaaagagcactaggtcgctggcattgtcgcacccggacgctggcaaccccggcctccgtttgacccagccccggggatcccttcccagacccgtgcctcccctcagcggtggtctcagagtgccctgcaattgcagttgaatatttaaaaaatgcctctccccattcttagcccctgaattaaatgagcctgacctaggccccggcctccgagggcc

SEQ ID NO: 241077 - DNA, 239 bp, Homo sapiens; identical to SEQ ID NO: 205737
  chr20:21694603-21694842
  hyper

SEQ ID NO: 241078 - DNA, 138 bp, Homo sapiens
  chr20:21748378-21748516
  hyper
tccctcggagaggccgcacccgggagaaagcgctgacgcctccgacccagctccgcgcacagcggcgcccccttctggccctcgtcccgccggagctgcgcttgcgtgaacagccctcaaatgcgtgtttgccctgct

SEQ ID NO: 241079 - DNA, 851 bp, Homo sapiens
  chr20:22557158-22558009
  hyper
gcacattccagatctcatctcggccacccctccctccaagccagggccacctccagacccccggatgtgtagaagcatgcactgccccgaagaaaacgcgttgcccccaggtaacttcaggtacctcctagggctaacgcctccttctatgccatattgagccttatctcttgcttcttcccgcccccctcccacattaaaaggcccccaaagcattgaggagcggcttctctttatgaagctggggagaaggcgggcgataaagattgggcgtttaaattggccatttggaagattacatctcttcagcgagggtctttctttcaaaactcgcactgaattaagggtcatggctactccgtacccggctctcaaaggcacggcacctttgaattaggttgcggagtggcctgggcgaggggacccggggccatcaaaggcccgagggaaggccgtggggcgacacccgtctaatgacaagtaattgaaggattcgacgccgcgcattaccagcggaacgggaggcattaattatttaaaaacgattagccttgccgtgtgtcctgcaggcgtcccatcatgttcagcgaagataaccagccacccgaggcgagccggggctcggagggcggcgggcgcgctccccagcaggcttcgggtgcggtggacacgggcgcacagcccaaggcaccagggaaggagaggaggggccaccaagggtccccacacaggaaggtgactacataacactgaccctgctgaacaacgaaacagatttctgcccacttgggttcgaagtctggtgactgcggcgcagatgggaaaagctttccggtcgggggtggtgggca

SEQ ID NO: 241080 - DNA, 1965 bp, Homo sapiens
  chr20:22558241-22560206
  hyper
cgcctttccgcaggcggcggaaagacgcggctggttctgttgggtcctacaaactcgcgtcctccggaattcccgagggcaagcccggcacgcgcgagcgtgctcctgcccgtggaaggggggaaatcggcgactgggttgcagggagaatgcgatgataaatggccctgcgtctgctttctgactttctctcctggacccagctcgtaaccccagaggctccccaacctgcctgccgccaagcacggctgtgcgcaaaaggccaccagccgcttcctgcagccagagctaaggttcactcgcctcttagaaaggcgcggcccctcccctgctgctgcttgatgacgatccccatcgtctcctcggcctgcctgtgtccgagaaagagttgagactggactcgaacccctgcgcgccaaggggagggcgtcaccatgctccggcctcagcctcttcaaactcccatgcaccacgcacatcattttctgctgacccccacactagattctggggccaagggggttccccacaccccaccctccactgttctctggaaacatgctgctctcagatcgaatccccagacccgagccgctcgaggggcctgtgtggcttcctcggggccctaccaaactcctctaactgagctcagagcctaagcggtctgagtttgcaactctacgacccctcatccttccaagtcatgcactttccgaaccccctgcaaaaaaacccaacgccttgagtctcagttggctgagcttaccaccagccaagcccgcccgggcgtccgagccctggaagggagaaggactggctgggggaggggcggtgagcggacaggagtggggtgcggacgctgaggaggggagccgggcgcggtccccgggtgggcgcgctccctacctgcggcggccggcgggccggctggcgggcgggctgcggagcgtccagctcgcggagggaggaggccgactgctccgagccgaggcatccccgcatttatttgagctcaaaccaagcgactgttgactttagcacacaaagcaaagatttcactgcccgctagtttaaaaatgaatattttaccaagatatcgatcagcgttataaaattcagttaagtacaatgggatcctggcaaaaaaaaaaaaaaaagaataataaaggaggggggaggcaatataatatctgtgcaaatttgctgaagtgtgacgtggcatggaaagtttaccctcctggaattcggatctagaatgtttttttcggttgtttacagactttgtttattcacagatcatggttgcttaaaccggcgcgcggaaagcgtggggaaaaaaggaaaaaaaggaggggggagagtctctgcaccccacaatgagtagagttggggaaagcgcgcagtggcgatttgtgagctcgttatctcggaacccgggctaggggagggatttaagcgggaggggggcgtgaaagacacaagaagcacagaaaagcctccgaaagcgcctgctccccgacatcctttttatgtattcggacagaactatatcttatcggccgggatcagtgaaggggggcgcgctaagtagtttaaaacgaccctcgcacaatgggcgtgccatacgaaacatagcaggttagggcagcgctttcagcctccattgtcccccactcggcccccggccctgcctctcggctccttcgccacgggagccttttatgtgataatgaaacacatttcaggccgggctcacgacgtgtgtgtccttgctaggaggagagacggcctgattgctggctgtggcctccggatccccccctccccaatttctcttccttgtgttcttcgggacaatgtggcatgttaagaaagggatttggtggcgggaggggggcagtggcgggtgggaggcggaggcgatgccaaacccccctcaagcgcgtgggaaggccaggcttgttg

SEQ ID NO: 241081 - DNA, 618 bp, Homo sapiens
  chr20:22562393-22563011
  hyper
acaccgtctccccaaagtctcgacccccacttgctctctcacttgtcctcgatccggggtgccagagttagccgggcctgaagccgtcgtcttcttaagaggagttcataatgggccgggagtacaccccctggtagtaggaggtatctgcggccaggggcgaggcgtccaggcccgttttgttcgtgaccgggcccatggccaagctgccaggcatgggggaaccgtagccggggtagtgcatcacctgttcgtaggccttgaggtccattttgtggggttggtggtggtggtggctgtggtggtgctgctgctccgaggacatgaggttgttgatggagaacgggtggttgaaggcgtagtggtgttccggcttcaggtgggcctcaggcggcaggcccgggtggtggggcgggcccagcaggtgggccgcggcctgctgctgctgcccgggagagggcgccggctctggggggctcagcgccgcagccggcgtccccttcagctctcccaggccccctcgcttgtgctcctggcacggggaggcgctcgagtgaggcgactcggtgcccgccggagtctcggaggccggcccggcggcctccccgagttgagcct

SEQ ID NO: 241082 - DNA, 141 bp, Homo sapiens
  chr20:22563191-22563332
  hyper
gcgagcggggcaccttcaggaaacagtcgttgaaggagagcgagtggcggatggagttctgccagcgctgctggttctgccggtagaaggggaagaggtccatgatccactggtagatctcgctcagcgtcagcatcttgt

SEQ ID NO: 241083 - DNA, 773 bp, Homo sapiens
  chr20:22563932-22564705
  hyper
gactccgagtctgtttcattcagggagagtcatgatcgatcgcccttgggaaggtggcgagcggattgctgcttgggcatgtggcccgttcctagcccttctccacctcgcccagattctagaacaggggtcccatggagtactcccaagccagcaccccaaatacattcccctaccccagagtctccccaaactctcccaccagcatactgagctggcgccgaggcccgaagtccccggacgccacctccggtcgcagcaagcaacctgcgggacaacgcgcggggcgcctcgggctgcctccagcgaagactgtcccgggccccctctgtccggtctccctccagggaccccctcccttgtcccagggaaactgcaaggcagtgcctgtgcggagtgcgggggcggctggaggcactgaacggggcaatagggaaagaaccgagacctgaaccacacgcggctgagctttgcaggcaaaaactttctttctctttgtccactagtctttgactctgcctccacttcagcccccaactcctacccatcttctcctcctcagctccccaccccctcgccggccgacctcccacccctccccagccgcgcgctgccaaacataactctgttaggatagtgcgtggctcggccacgaagaggatttggaggcgccgcaagtcaatatttgatcacaaagttaatattatctcaaggctaacagtgtgtcgtataaaaaagagacccatttgattccaaggagggcggaaaaggcg

SEQ ID NO: 241084 - DNA, 193 bp, Homo sapiens
  chr20:22564885-22565078
  hyper
ccgctcccagcatactggaagccgagtgcatggcagtttaaaatttaacagccacaacaaacgaccagcaatcaccccccacccccaccctcttttaaaaaaaagtcagccaaagcaccgtcccctcctccctccctctctcgcgctccctctccctgggctccactccctctctctccctgggcaggccgga

SEQ ID NO: 241085 - DNA, 35 bp, Homo sapiens
  chr20:22565258-22565293
  hyper
ggggggtggggaggaggaggaggaaggaggaggag

SEQ ID NO: 241086 - DNA, 860 bp, Homo sapiens
  chr20:22565353-22566213
  hyper
gtgtggaccgcggagcggacaagtgccgcagtgacgtgggaggctggtgatatagcgcggcgcgctggcgcgggcctccaatccccagacccggggcagcccatttgaataatcagctcacacctaggtgagaggtagccgcagccggcgctccgcacctgcccctcagcgcctgccgtccgccccaccgccgcggcgccccgcactcctgggcgggccaggggagcgggctgggcgggcgatcgggcacgcgggatccctggtcgagccccctttcctcccgggtccacagcgagtcccctgaggaaggagggacctgggaggaaaccaccctctggggcggctccggcctccagcccccgccccgtctcatcgcgccgggcgcccggtgcgcctgtcggagggcgcgtccagcctcagtgcccggcagatccctatgaaagccggatttatttatgccgggtttcttcgctctcagtgctcattctctgtcaaaacagcaagtccatgacagccaatttgcaaagcgctgtcctatttagaaaaactacgtacacacctttaactcgcccgctgctgctcctgcgaggcccctccctgttacagttcagacccggaacggcctcgggagaagcgcggggcgcacggtctggccgcctcggctctccgactcctcagacaccggccgccagggacccgcagtggggcggccggcgcctggcgcaagcagcccctctagcagcggccgacggttgggaggctgagatttgtctctgatattcaggccggcgtgtttcaaggttacttttcagtcacaaccgaggtgcccacagcatttcgtaactaaaacaaacagggca

SEQ ID NO: 241087 - DNA, 438 bp, Homo sapiens
  chr20:22567411-22567849
  hyper
accacagcactattggtggccggggtcagggacaccagagagcgctcggcgggggcttccacagtgacagggcgccccctgtcggccgccaggcccgcgggaccgacccgagtcctcatttacccccgcgatcccaaccccgcagctccggcaccggagcaccttctcccccgctctcccagtctctccgaaaacgccttcggggggactcggcctttttggagccccaacccctaggttctgcgcgaacccaaaacggcctcctgcaccctggcgaggttctgggagctccggtagggtagggctggatgacgcctcctagagtctcggagcagccgctcccgcaccctcccggcacgcctgcccatgggaatgcgagcggggtctacggttagctttaggtagctgggagcgggacaccaacgggctgcgaaggaa

SEQ ID NO: 241088 - DNA, 2594 bp, Homo sapiens
  chr20:23029116-23031710
  hyper
ttgacacagcgctgcggacacggactgggctccagtatgcagtcatccacgtcctcgcaccggtgttggtcggccgccagccggtagccggtctcgcacatgcacgagtaggagcccggctggtcggggttgggaacgcagaagtgctcgcagaggtcgttgcaggactgcgtcgcggatgcggtgcaggagcgcccgtctgcctgcagggcggcgccggctgggcactggcagcggggagccccagggatcgcattgcacgcgtgctcgcagccgccgttctccacgctgcagtcccaagcgcccggcgcctccctggcccagtgcccctggaccgctccgggcggcgcggtgcacattagctgtaagccgaggggagccaccgcggcggagctgcccaccggcagcgcctggaagtccgctccgcgggccgcgaacggggtgccgtaggtgatcgagacggcggcagccgcggcgccgggctccacagccagtggcctgcaggtggctgggaagtggaactcgcagaggaagccatcggccttcacttcgcactgctgctcctcccagatcggctcgctgggcacagtggcctcagcagcggagacagcgacgcacaacgggccgcagaggggagccccattgaggtcgagccgtgcccacctgctatagctggtgttgttgtctcccgtaacccactggaagccgcgcaggggcccgaggcgcttggggtcgccgcagccgggtggcagctgcaggccgatccagaggcgccggcggccaacgccgccgtcgccgttcagtagcaaggaaatgacatcggcagccaccgaggagcgcactgtcattaggtggccccgcagtccgtcgcagatctgactggcattgaggaaggtcgcggggcccgggtagagcgcgaagcagtcgtgctcgacgcactggctgccacccggctgcggctctgcgggtgcggggaaccccaggccggccagggccagcgcgccaaggaccaggaccccaagcatgttacccaggcgcgccgcgtgcaggcgccggggaaagcgcgggcactgcgacagggccgtgccggagcagaggggcacaggacgccgatggcgacagcctctcctgtccgtcccagcccagacacttcttgccgctgcgcgcagcccctgcgaggcagcctctgacatgcggatcggccagggctcgagtttataagtgcccggccctccctccctggacgttcgggaaaaggaaggaagtgcctggtgggaagggctgatgccgcatactcggattgctgggttctctggccgcccttgcgcccgccctcgcgcatgggatcacctcgccgggatgagtaaaccctgccctggcgcagggaggttctcgggcggggccgacaggggcaggcgccagggaaggccagcacccctgtaacaagacgactgtccccgcccaccactcgggcccccacgcgtgcagccctctttcatctcttggtcctcctttctttcttttcatacatgttacagccacttccaaggaaagcctggattgcaagagctctgggaaccggagacttcagagaagagggctttgaatggggagtgggggaggtggtgcacaggacctgcaagacgctgggaggggtgatcggcaccaagggcactttgggaggacctgcctaggacgtggacttccccgaagacaggatcgcaaggagagacagctggatcctgtccgcggccaaggtgcctggctcaggaaaccagcggagcgcgcttggcctcacaggacagtgggtgtggctggggtgacggggcagggtggggaagactggcctaacaccagcgccctctgccccatggctggccagggacccgcgagtccctggacacgcactggccaacgccagaccccatctcatcgggtggggaagtcgcggggacactgtcagggcgccgaagtccggacccggctcagaggcggtggcaggtgaattgctgcggcgccgggtaggggcgggcgcgtgggagcgagtcagcctggccagtttcggcccagcttccgaaggatggtgcttcttgcaccccaacagagtggctggcaaccccccaggggagcgcgcaggatcccagctgatcccacccgggtcggctaaggaggtttccatttcgtccagagtccgaattgatacccacgtgcatagaaacgccacttgctcggcaaagggcactgaagagccaccgtcctgtggatgggcagggtggggggggggctggaggaggacatgggaatccgtcactttcgacctcttccggtggttcacttaccgggaatgcggaagagtgggtctccccctcgggtcgcccccataatggtgagaggcaaactgtttaaaaacacccttgcctctctcctctactgtcctcacaacgagcgccagggggcggcgctgtcgagctctaaacaaagccaaggaagttggagaagtttcgggctaaaaagggttaaggtgtaggagcacagagtcctccttctggggttggaagctccgttcccgggcagctcagcgtggattccgctgc

SEQ ID NO: 241089 - DNA, 326 bp, Homo sapiens
  chr20:23331168-23331494
  hyper
cccgctctaggtgcgggacctaagaggtttggcccaatcaggcatcccacctaaccagacgggccggagtctgtggcccggttggaccaacgaaaactctagggcggatttgccgggatttctgggaaagtgacactcccggaagctaccgcctcttataagccacacatgggcggagttagccttccggcccgcagtcccactggctgacttcgctgcccgtcacgggaatgcgggagagggcggcgccggggcgctcgcgtctgcgtggagaccggctggccgcgcgcgggaagccgcggaactgcgccggaaagtcccccggc

SEQ ID NO: 241090 - DNA, 2436 bp, Homo sapiens
  chr20:24449746-24452182
  hyper
cccttcctctagtcgggcagcaaattcctgtcctcctagtcccccgcagctatcccccgcccccagcctctgtggccctcacattgtcagacactggccgcgggccaccatctggacgcgatcccccgctagggcctccctggtctgggccaaagttggtggccaccttcgcgcgggctgcgccctccttctcttccctgccctcctcccccggggcccgcgcccgctgcctccagcacgcgcgtcggcaggctcggcaagcgaagaggagcggctcgccccagggcgcccctcgcccagcctgccggccaggcgagcgcgacgagagtctccccgcaccccttcctctcccgggggccgagagggttgggctccgccccggcgccgcagctcccgactccccgccgctcgggctgccgccgctgccccgcgcccggcgctcggggcagccgggggcgcaggcggagagcgcagggcggggagaggcgtggggagcagagcggcgctgaggggagggcagaggaggagagagcctggcagcggaggagcagaggcgggcgccgcaccgccccgcacgctcgctcgctcgggagagtcgcgggcggccgcttgggcgcacttgccgggtcaccttgtcccggaggtaagtccagacctcccggccgcgggggcgggcggaggggcccgcagtgggcggggtcgcggcaggggccgcgagctggcggcgggagctggaggctgccctgcgctggcgggtgtcctagtcctggctccgcctcggagcgcgcagacccggcggcggcgtggcgcccgcggtaagtccgggtggtcgccgcgacgagacttgggagacacggggtcgcagggcgggagggggagctgagccggcagagaaaatgcccaggaaggggtcgatgctggcctgggctgcaccttggtgccttgccaccccgggagacgcgaaggggctgctgtgcgaattcgatgggagctggtgagaccgagaactgagagcgtagcggagccaggctgcccagcagggccatgagggcgcgcggcgggccaaggctctgcgggttcgggctgcccctcggagtgacccgaaggagaccagccagggctggtgagccgggcggccacggagctggggacctaggtctgtttgggagtaggaagggaaacagactaattctccgagcggagcggcaggcaaggtgcaagcgcgcttgggatggggaatcccgacgggcgaccgtggcggaagcagagactcctggagcctctttcctctagccaggacaagacctgccttcaaaagctgtctggcccctggcagccgcgacagcctgcagccctgggagccacagccctggcgccgagatgggagcgagcacatacgcttttttggttccaatttgaatctcgctttttcctagtcgtgatttctgcctcttcatgtgcactctctgggcagtgaggaggaaggaatggctcactggatgagttgggcacttttcttagggaaggggctttgtccctatgcgctttttgcaagaccctactagagtggctctggcagccgagctttgaggaggcggccagaggggccgcttggcgtttctgaaagacgagaggaaggggtcttctggtagtcctgttttcctttgggggtttcgttgcacgcagaggcttgggcgcttggcacccagacttcaggtgcgcacagtcctcctgcgacgtcagatgcgctggcgccgcggcgctcctggctcggaccgatgcctgcgccttccctggccacgtcctggtgtttagtgcagcagacaccggccgaaggcttggctgattgggggtgtcgaggggaggggggctgggcgttacacagtggctccgttttctggttggaatcagttggtgaggcgtgcgcgcgcgagtccgtgtatctgtccgtctccctcctacagcccagcgtgtttggtctgagtccaaagaaggaggtggtgtgtgtgctgcgtagacctgcgcctgtggggtgagcagcctcatagcccccagagccggccaacttctccgtgctaggctgcgacctcaagggctgccgcgtcggggatcggaagtggtcttcaaagaggggtctaggtcgcgaaatcctggcagcagccgaagtgaaaaggagctgctaggaggcgggcggggggcagtctgatgtccgttctggcgcggacaggaagaaactgaagtcgaatttttagttgaattgcgtgctctgtgtttggcggtggtgtggcccgttcttttggaggtccacaccacaggtatgaggcctgtgggccctgaggaagcgcgatccccttaattcctccctcccctctctctccaccgcccgcccctttgcaaggagcaagcctgacagtagctgatcggcgccctctctca

SEQ ID NO: 241091 - DNA, 501 bp, Homo sapiens
  chr20:25058268-25058769
  hyper
ccccacctcctacaacacctcgagccgtgcgatcccgggggcccttccttacccaggagccagggcgcgcaggagcccagcaggccgccctcggcggagttgagcacggagtctggcagcgggatgcagtggcgcaccatggccccgtacagcccgtactcggccatcacgctgctgccgccccagcgcttctcccgcttgcgccatttggccctgcggttttgaaaccagacctggttggaggcaggagaagcagaaggcacacagaagagacagtgaagaggggcgcctggaggagcggaggcggcgtcccagggctcggatcttctctcccgagcatgatcccatgctatttctgaaggaaatagctcccgagggccaaccagccgccctcagggagagcgcccaggagcccccagcagcgcccacgtgcggtccggactcacgggcattcaacgcagtagggacacttgtgaccacgtccactgaagtttccataga

SEQ ID NO: 241092 - DNA, 1112 bp, Homo sapiens
  chr20:25061768-25062880
  hyper
ccggcagaggagcgcggtacccgggactcccttttcagcaccccaaggggcggacagttccagggctcgaggccccgtactcttccaggacccgtcaatcattcgatcatttccgcccgcgtttccacctggtaccttgttcggtgctgctggtgaccaccacaggcccgggccttcccgacccacgcagctgccagaggcggagactggcgcctggcgctggggggaaaaatggccctctggagatggttgttgaagaccccagggtctcatcaaaaggttccacccggaaccaggtggtggcggtctcacatcgctgagggaacaggaccccggatgagaggcagggatttaggatgcagcaaggggcaggcggcgcagctccgcgaatgcccctcccgcgacggggcctcgctctgggctccccgcctagatctgggccgctggggccaggggtgcggtggggcgatggtctgtgacccctgcgcggctcagagcctaggggacaggggcaggagcggaaagcgcgggcctgattaccggacgtggagacgctgtcgctgcgcttctggcggccgagcgcaggcggcggacggctgggagccagcggggcagcgggctcggggcccctgggcggcaggaacggcacgtccgctaggagcaggcagggtgctcgagcggccgccggcggctgcgtgccgaagccacagaggaggccgagtcccagcggtagggccccacgcgccaggctggagccgtcaagccccgggcccgggcacggcgcgactgccggaccctcgcagccagatccctgtcctgggccagcgggcgccggcagctcggcctccaagcccagcaggtccgtgatggcgaagccccgggggcgcgagcccctaggggaaccgccaggcaccagcgccctgctgctagtgcgcccgtcggaaagcgagtcccggccggtcatggttccttagcaagcaaggcgcgagcctctctggatcccgtttgcggagggcccagcttagaggaagctttataggattgggctgccggtcgggcgcgggaggcctgaagggctccaatcagctgggcgcgggcgcgtcgccgttccg

SEQ ID NO: 241093 - DNA, 898 bp, Homo sapiens
  chr20:25063851-25064749
  hyper
caaccagccctcatcgctcggagccctgcgtcccccgcttcccaatcccagaaccccggaagcagatctcctcagtcccactccctgagggtcctacagtccgaggtcccgcagcgagggaggagcaaacgcctgagctccgcgggaacccggcgcggctgcctgcgcgcacgcagggaccggagcccgagcctgggccctgcaaagtgggtctcccactcgctgcgcgttcgagtggggcctccgctaaacatgcagattaaacaaggggcttccgataaggataattacaggaggctgcgcattgactttccgttactaaaggaagacccaaatctcccccttgcaagctgttcccgggattaccaaaacaatcactttcttttgagatcattgtcttttgaaccactccagctcggggcagaacgctttagacgctggcgttgttttccgctccgcgaggaattttcccccagatttatctctgggtttagggaaggcgttgggcattcgggactgcgtagtcgtttgtaaatccgaatttggggtagcagttaagtgagatacctacgcttccacacagtttgtagcccgagaccagtcaggcaggcagggtagtcgattctaaggtggcccgaccggggtcgcccgcgaatggaaagcctaaggggcgagggcggacgcgggcgccgtgcctgcagccccgggtgccgaccaagtggcctcacctgggacaggtcttggggtctccctcccctaggtctccctggaaggtaggcgatcacgggagtgacagaccccgagtagatagccagtgatccaaagacaccaaaaggccaggcggtaggagcccagcctcagacactctctatagtgaccgcggcgcctcgggaaggat

SEQ ID NO: 241094 - DNA, 710 bp, Homo sapiens
  chr20:25065019-25065729
  hyper
cttgtgtttcgcagcgtggcggtggcaggagcccagcgcgggaggacattttcatagcctcctacagtgagaaacgccccccacccgacgctgcgctcatctgtgtccccgctgttgccggggctctggtatccacttgcgcgccctatgtggtggggatccacccagagcccagcgtcaagttatacgggcgcttcactcagcgtcagccaagaccagggaagcgcttcttgccgtttaggagacgtctgcaagagataaaaagctagcccacgatccacccacaatcctcgtgtccccggggtgccctcgcagttgccaaacctacgggccgcgtttaggggaagcctccgcgtcctggcggccaaaagaatgggctccttccagcttccccctaccggataccacctgcaaatctattgccagaggcgcagctcccgcgaacgttcccgccccgggcggcccccaggagtcgttttgggtccctaaatccgttgagggttccgaatctgtcttcatcagccaggattacccgggatttaactaatgaataaaggttcctcagctcattattttctaaggaagatttccagcccctctgtcgccgaccgcgaatgtgccttggcagcgccaggctgaggttggacctgctgtgagtggctcagcaggcacccctcttgggcttctcagagccgcggctggccaggctg

SEQ ID NO: 241095 - DNA, 586 bp, Homo sapiens
  chr20:25129044-25129630
  hyper
ttcagaacatcatgcgggtgcgccggctggccctgggtgtctgggccggggcccctccaagcccacctgggagagcactcccgcctccccccaccccggggcgcccaccaccccggcctccgccgccgccctgcgacagcgcccccagggcccggcgtcctgggcctctgactctgcccggtttgctaacccggaccctcgccgcgtcttccggctccagtatcctcgggaacctcctccctttcatcactcgcctcgacaagaccttctgaggccacacatctcgaggcaacagctctgtgccccgcctttgtttggctctcaaaattgtgctgtgccctctcatctccaacagcgttacgctgattttcgagcttttcctggctccccctggctctttgctgtcgtcactcggttctccgcccatccccgtgcgcacgtgttcgctgtgctagccccgtgcgagctgagctgccgttagagtcggtagattacagcgaagctgcagtcagcagctcgtctgcctggccctgcacaccgtgagactcgaggcagtgcccgggacgggaccacctggggaagagag

SEQ ID NO: 241096 - DNA, 317 bp, Homo sapiens
  chr20:25176135-25176452
  hyper
ctctctgggccgacgccagcccggctgtggactggagaaaaccgcaaggccacctgcagaaagaaaagaaggccatcgcgcctacgcagctgagcacccatactccgcccgcgcctgcgcaactgggtcccccgacccccacctcctctcccgcctgcgcatgcgcggctgggtgcgcccccccgcccagcctgtgacgccacgtgcatggggcggagcccaggccctagggaatcgtggggtcgtatcccgcgggtggaggccggggtggcgccggccggggcgggggagcccaaaagaccggctgccgcctgctc

SEQ ID NO: 241097 - DNA, 83 bp, Homo sapiens; identical to SEQ ID NO: 205753
  chr20:25228118-25228201
  hyper

SEQ ID NO: 241098 - DNA, 40 bp, Homo sapiens
  chr20:25228555-25228595
  hyper
ggcgtggacaggtcgctgccgcctcggactacaccagaga

SEQ ID NO: 241099 - DNA, 877 bp, Homo sapiens
  chr20:25565600-25566477
  hyper
cgcgggtcccgctccgtggggggccgcagccacactggcaggagggaatcctgggcctcgaccagacgccggcggcgtcaggagaaacggcccgcgctgggcaggcggcgggcaccgcgtagctcattaccacggggggccccggccaaggccgcccgcctcaggccgagccttggggctgtgctggacccgggccctcgttcgcacggcgcccgcgccgccgccgtcgggaaaccgggttttcaagcgttcggcccagcgggcgctgtattttagggcgtgacccccgccccgccctcgagggcgaccggaagagcaggcaccacagcagatgcgccgagtctgcgccccgcaccgcgaggagcacccgaggccgcgctcccggagccgggtctggtgactaaggcgcgggtcgcgacgcaggggcggccccggactctcgaccccaccagccgcctgaatgtcccgccggacgcccgggccggctcacctgggaggcgcctccgccgtccgcccgcgcggggccaggagcgcggcaccacccccgtaccgccggccgctctttgtgtctggaggccgcgacgcaacactcctcccggcctcgaggcaccgccccctcggtgtcccggcgcagtgggcgaacagggggcggggcgagcgaacgggagagggggcgggtcgggtccgggattgcggggcggggtgggggcaaggcggcctccgcaaatctcagggcggctctggccagtttggagcctggggtgacccttggagctgacctcgctggtccctgtcggagccctgcgcgctgcggagcttggcggttcgcagctctcggggtagcatcttctggaaacaagcccggaggccggccagg

SEQ ID NO: 241100 - DNA, 48 bp, Homo sapiens
  chr20:25604726-25604774
  hyper
ttccctgcgccgccgagaaaagtgagatcccgcgagactcccagggta

SEQ ID NO: 241101 - DNA, 156 bp, Homo sapiens
  chr20:25677482-25677638
  hyper
gctctgcgccgcccgggactacactacccagaatcctcagcgcggccgggactacgctacccagcatcctcggcgcggcccggaggctatgcgaccctgcgcgtcgcatcccctcggtggactacactccccagagtcctcgggagtcgtccaggt

SEQ ID NO: 241102 - DNA, 1347 bp, Homo sapiens
  chr20:26188699-26190046
  hyper
ggaggagagaggatcggcgggcggcgggcggggaagggggcgcagacaggcaagggccggggaccgcgagggcaagggcacctgggagcccgcagaggggcggctgagggagaaacctcaggcatggccgggccaccaggaaaacacggccgcgggatcccaccgccacagacacgagggcggtcccgcggcgccccgcctgggacgccggaaggccctcggcacccaccaagacctgcctcacgagcccctggtcccgccaccggggccccgaagcgaccacagccacaaactcaacgccagggccacatcgctcgtgattctcgtccatcctccgacccggtcccgctccgggagaccggcgcgcccccaccgtgggacgctttcccagggccaggcggcccgaccacgtgccacgcaaacgccgtcgtccgcaccggtcgcgactcggcaagggagcgggcggagagctgactcgcggcggaggggggtcactcgccggacggaacgctgcgcgcagccatcgctcgctgtcagccgcgtcccaacccgctaggacgctgggccctgccggcgggatcctccccttactcggaaaggggaggcgccggccacagtaggcgacgagccgcgctcggccaccaccgcggtggccggcggaaccctcgctctccccccgtcaccccgtcgagggggaagctgaggagggttcctctgcaagcgagtcgctactgcagcgctaccataacggagagagagacagaggcggcaggccgggggatcccgtaccccaaggcacacctcttggatcgctagagaaggctttctcaccgaggatgggtcacactccccacccgccagccgcccctcgtggggcccgaggggcccgcagaggcgctcagggaggcctggggaagggagggggcctgtggtaccaggaaaaacctgcgtgcggcaaccttgagcgttcgcggtcagggcggggaccggcaggtgcgagcgtgagcgcaactccacaagcccccgcctcccacccccccccccaccccgtccacccgcctcttttcttcagaggcaaagcacctccgagtaaacccacacacgaccggtcggaggcagaacggtagcccctcggcggccggccggcgcacgcgtcaccagcccaagcccaccgcgatcgctcacagggcccgtgcgcacccgccagaggggagcaccggacgtgcgctcgccggaccaggcgggcgcccttccccgcgtgggaggggcgcgtctcgtctcactcaaccgcctcgaaccccacaccgacgagctccctcaggacccacgcgcggacaccgaggcgcc

SEQ ID NO: 241103 - DNA, 308 bp, Homo sapiens
  chr20:30062956-30063264
  hyper
aaaagtcactgagcggccagggccttggggcggggaccccggggctgccctaatggggcggggctggatggggcggggtcgcggctcctcccccggccgaggcggcgaggggaggggaactggcctgaggggctgctcactgaggcgggtggtacagcctggagcatccagccgctggagctgcgagggaccctggacccctcccacgccgaggtaaagccctgcgctacgcgccgccaacttgctcaagttggagcagagttcgccaggcgattgaagggggattcggcagcgttggcaggaatagg

SEQ ID NO: 241104 - DNA, 664 bp, Homo sapiens
  chr20:30192834-30193498
  hyper
ccttccagaggagcccagtgcggccctcgcctctacccgctgccctgcccggtgccctgccaccgacccacccttgctgttctgaaacccgggtcgtctttccacactgcgagcaggcactagacgagcaggaggctggacctaggagcgcgggtcacgcccccatgccgcccattggctgcttttgaacgttctgagcccgcccctccgggggccgtggcgtgtttataaaagacaagctgtggctccgcactctcattccacgttcttaactgttccattttccgtatctgcttcgggcttccacctcatttttttcgctttgcccattctgtttcagccagtcgccaagaatcatgaaagtcgccagtggcagcaccgccaccgccgccgcgggccccagctgcgcgctgaaggccggcaagacagcgagcggtgcgggcgaggtggtgcgctgtctgtctgagcagagcgtggccatctcgcgctgcgccgggggcgccggggcgcgcctgcctgccctgctggacgagcagcaggtaaacgtgctgctctacgacatgaacggctgttactcacgcctcaaggagctggtgcccaccctgccccagaaccgcaaggtgagcaaggtggagattctccagcacgtcatcgactacatcag

SEQ ID NO: 241105 - DNA, 97 bp, Homo sapiens
  chr20:30194098-30194195
  hyper
ctagtcaccagagactttagggggtgggattccactcgtgtgtttctattttttgaaaagcagacattttaaaaaatggtcacgtttggtgcttctc

SEQ ID NO: 241106 - DNA, 303 bp, Homo sapiens; identical to SEQ ID NO: 205757
  chr20:30196329-30196632
  hyper

SEQ ID NO: 241107 - DNA, 247 bp, Homo sapiens
  chr20:30310626-30310873
  hyper
gaaccagccccctcgcttgcttcctcctccatcgcccggatcgagggcggccgctccgcagccgcggcctcctgccacccgggagcccagccccctctctcttgcacgccccttggctctccgcctcctactgggagccaggagtactctcccggaggtggctggtatggatttagttggtttttgtttttcttttttctatttaagcaccagcccagggtgaggtggaggcgtccgaaaccctaaa

SEQ ID NO: 241108 - DNA, 447 bp, Homo sapiens
  chr20:30448991-30449438
  hyper
accaggtggctgcagcaggccggcccggacacagagacgcacaggttggggacgctgactgcagacgcggacgagcagggcgggcgcgggaggcagggttcaggccgccgcggggctcccccagcctctgggcccgtcctggggggcgtggaaggcgcagacagcccccgaagggagccagtcggaagtggggagccacggctggactgcatcctcacttgccgcccttgcgggacagacaccgggggaggcaagagaaagtctgcttgacgcgcgccagcagcggcagcggccggtgggcttcccggggcgtgcgcggcaccaggcgctgcacggttccctcggaggctgctgagtgcggcccggcggaggaggccgaggtcgcggagccctgccggcagcgcttgcacagcggcagcagcgcgcgcaactcctcctcgtcgcgga

SEQ ID NO: 241109 - DNA, 304 bp, Homo sapiens; identical to SEQ ID NO: 205758
  chr20:30457820-30458124
  hyper

SEQ ID NO: 241110 - DNA, 150 bp, Homo sapiens
  chr20:30458610-30458760
  hyper
ccggctctgcctggacgtccctgcgggccccgggggaaagcacccaacttctcccgcctcggcttctagcagaaacgtgacggggctggactttgatcgccgagggctctctgctcttcagagtctgcttggaacgggataagtgggtaa

SEQ ID NO: 241111 - DNA, 173 bp, Homo sapiens
  chr20:30555391-30555564
  hyper
ctcagcttcaaaacgaagacaataagaaaaggggacccctcaagatcaaaggaggggatggaacaatatgtgagcactcaggaaactggaaatgagcgttagcatggagtgactgctaaagggttactggggggcccgcccaagtcccccagctcctttcttccaagtccccc

SEQ ID NO: 241112 - DNA, 792 bp, Homo sapiens
  chr20:30639046-30639838
  hyper
actcctcccctcccccgaccacctcccccagcttgggagtcctctgagctgccaggaagccagggtggttccttcgggcagggaactttgcatggccatggtggttccttcgagagaggaactttgcatggtgtctgaatggagcaggcctgcggaagagaaaccgctgaccacagacctgcctggaagtctcgggccgcggagttggggagggccgggccagaagggaggggtcggagtggtggggaaaagagatcacgatgcttccggggtagggtaaggcctttccagggtgggttggaatctttgaagactgtggcaggaatcccttgataggtggggttaggatctctgaagggcagggttggaatctttggaccggcggtatagacccctgggtattaaaactcttaggcggcgggaggttagatcgcgcaggagcaggagcggtattggaaccctggggtttgtgttctaaatcttagggcagggttagaatccactgaagtgagagttcggatccttccactgggcagattagaatctttgggggcaagttgagtttaaaaatccttcagaggtgggattaaaaatcctttggcggggcggggttagtatcttgggagccttggagcgggtgctggggttcttagacgggcgggttcgaatccctaggagtgggatttgggatcctttggagactggggtaggacgctgggcggtgggatggggaggtgttagggaaagtggagcggaagggatgggggttcgcatccttggtggacgcgttag

SEQ ID NO: 241113 - DNA, 298 bp, Homo sapiens
  chr20:30697227-30697525
  hyper
gtagtaaagatggcgctgagagcacgagcgcactttcgcacacccccattacccacaatgcagcgggaataagggaggctcagtttctgccaggagctaatatggcttccttagttacaccgttctctctcttcacctaatcagcgaccttactttcccagaccagactgtcgagcaggagctaagactccttttcccctctgctgaccgccactacaggagcggttgaagccagacgaccaccttgtggagttaaactccgtaaccagggagcaccacttccgctgacgtcattacg

SEQ ID NO: 241114 - DNA, 509 bp, Homo sapiens
  chr20:30777840-30778349
  hyper
cttcgtcccggacccggccattttccaggctcggagtagtcgccgtggaggccgcttccccgcgcccaggggaagggaaggcggtcccggggcccgctgcggggtggagggacccgcgccccccagcttctcgggcccgggccgcggggaccgtgcgcgcgtccccctcccgggcaaggccgggcggcgggcgcgccgcggcttctggggtccccgccctcttgtccgccatcgcctgcgggagcctctggcctggaggggctcggggcgcgctggcgactgcgggctcggcgacaggggcggctggtggcgggaggacagtgggaggaaggctccgccccacgcgcccccctctcggatgtgattcgccggggtctcccgcagccggggcgagcggcttggaagcccggaggaggggtacggaactgcccgatggggatgcgaccgcgggcgccagacgaactgtccccacattcgttggcgctggcggtggaggtggggagaagtgt

SEQ ID NO: 241115 - DNA, 98 bp, Homo sapiens
  chr20:30795269-30795367
  hyper
gcctatctggggccgggttggcgcagaccgggccccgggtcgggggtgtgggcgaccgcgctgaggggcccgagatgaggcgcgccgccgctccgggt

SEQ ID NO: 241116 - DNA, 116 bp, Homo sapiens
  chr20:31072615-31072731
  hyper
ggcaggactggcatcgcggggtgggagccctggacctccgagcaacctcggactcggcccgaaaagcaacactctcatcaccaaaccgcagaattagaccccgatggagaaaatgg

SEQ ID NO: 241117 - DNA, 74 bp, Homo sapiens; identical to SEQ ID NO: 205776
  chr20:31172328-31172402
  hyper

SEQ ID NO: 241118 - DNA, 71 bp, Homo sapiens; identical to SEQ ID NO: 205777
  chr20:31172882-31172953
  hyper

SEQ ID NO: 241119 - DNA, 86 bp, Homo sapiens
  chr20:31173451-31173537
  hyper
ccgcggggagtagggcgcagaccccagcccagacgccgacctcccggccgccccgccccacttagccaggccgggaaggtgtaggg

SEQ ID NO: 241120 - DNA, 140 bp, Homo sapiens
  chr20:31797662-31797802
  hyper
aaacaatgagaaaacgttatccagagagaggcagtggatgggtgtcccgacaggaatagatttcagcaccacggacagcagtcacgccagtgcggagggggagggcagaagcgggaaaggctgtccgttctgaccggaag

SEQ ID NO: 241121 - DNA, 179 bp, Homo sapiens; identical to SEQ ID NO: 205780
  chr20:32031787-32031966
  hyper

SEQ ID NO: 241122 - DNA, 349 bp, Homo sapiens
  chr20:32262417-32262766
  hyper
aacctaggggctgcgggcctacccagagggacaggatgaccaagccagtgccgaggtcagggtgacacaagtgggtaaaacccaccaggacttcaccttttggggcgtctgtatcctcatctacaaaaatggtactggcagacaccctatgcaattgttgggactcattcaatgtcaagtgcttacaacgggggctggcgcagaggaagcccacaggtccgtgcggccgaatcccaggcatcccgacgcccgccctctctggcactaagcgcagccctttcccctcccctccgtgactctggccctcccttcaacccgttctccacacagcagccggggggagctttta

SEQ ID NO: 241123 - DNA, 363 bp, Homo sapiens
  chr20:32307859-32308222
  hyper
gacatccctcagccccagcccggcccgacggccccactcacacagccccgttccggaagcccttaagcacggccaacgcagcgtggtagcggcgcttgcgcagcagtgcgttgacgactacgagcagagcccttagctgcggcggggctgccatagtgcgggctgcgcgcagggtcggggttaggaactgtaagcgcactgacagccggaggttccagctgcgcgcccacagcccctcggtagcgccgccgactcgtggcgtctataggctgtttctgcgtcactcatgcatggaagaccaatcagagagcgtacttgtctcatgggacaatagcactcatcgaaatagttgtctgactggaa

SEQ ID NO: 241124 - DNA, 240 bp, Homo sapiens
  chr20:32398868-32399108
  hyper
cactcctacagagcgcaggccaaggagactacatttcccagaatgccacacgccctttgaccccagctacagcaaaagacgcgccggggagcgcctgaagccggaagactatagcttcccggcatgcagcacgcttccccctattagatttgaggcgcggccggcgcgttgcccactgggagttgtagtcagtggcgcgttgccctgacgcctgccgggccgggcgtgggggcctgtggg

SEQ ID NO: 241125 - DNA, 104 bp, Homo sapiens; identical to SEQ ID NO: 205782
  chr20:32700168-32700272
  hyper

SEQ ID NO: 241126 - DNA, 88 bp, Homo sapiens
  chr20:32891251-32891339
  hyper
ccggaggggatttcgatccctgaaaagaagcctcagaatttcacaaggcgtggccccaggagtctcactcaccggtccggaagggagc

SEQ ID NO: 241127 - DNA, 520 bp, Homo sapiens
  chr20:32899334-32899854
  hyper
gggcggagagggggcggagggcgcacaagcctgccctttggccgcggggctttagcctgccctagcttcagcatccccgctcgcctcccggcggtcctgcgtctcactctggattaactggaggcttcgagatgggatagagaggggtgcaggcgctgagaaagcccgctgatggggatggagccggattaagcagttctgtggagttcctcccttcttgtccaccccgctaggggtctctcctttcccgctgtatccacgcccctccctccaggccccctgggcccacctcgaagtcaccgctgggctggggagtacagaggtgggggacttcttagagaccctgggacagggcccccctctctccctcaatccttctcatcccacgcggctccgctgtgagtcgggcgtcccaggagctgccggcccacccatccgcgggtttcttccgttgggggagccctccagactcgtagaatataagagagcgcccctccctagccgcgggccatctctaagc

SEQ ID NO: 241128 - DNA, 633 bp, Homo sapiens
  chr20:33103991-33104624
  hyper
gtccagccagaaccagcatcttttctgcacggctggagttgggaattttccacagcttagcgcactgctccttagcttttcgctttgccacagtggaaagcagattttccaagaatcctggcggagccaagatcggctcgcccgcccccgcctcacgctggctcctgataggcagctagagctgtccgttttgacagaaacctttgcgcaggcgcagaaaggcacaggactcgctaagtgttcgctacgcggggctaccggatcggtcggaaatggtgagcgtgcgccggggtcttgtggctggcggccgcccaccaccccacgccaggccttcagtcttccgaggatgaggggatctcagagctccggacagggaatcggtggtggctgggcgtggccgggcccgggccccagccgacttgagggtggaacccggcggcggaggcctctaaagcctgaccgaggcggggccgccggatcccgctgccccttgaccggaagcgggagcccagcctcggccaggaagagatgatgggcgaggggtgggcggcggccctgcagcctagagttttggggccttggtgcgcgatggcaaccctggcaacgtttcccgggagctcagtttgtggcagg

SEQ ID NO: 241129 - DNA, 33 bp, Homo sapiens
  chr20:33292057-33292090
  hyper
cggtgacgcgaggcgggcgggcccctttgtgac

SEQ ID NO: 241130 - DNA, 68 bp, Homo sapiens; identical to SEQ ID NO: 205786
  chr20:33297165-33297233
  hyper

SEQ ID NO: 241131 - DNA, 398 bp, Homo sapiens
  chr20:33460460-33460858
  hyper
tctcccagaaaggcgtcctcgtccttgcggcccctcagcggggccgcgggcgccggctcgtcctcgggcagccgcgggaagctggtgatgctcatgtagtccactggcgagtaggcgcccagggcgctctcctggctggcctcgttctccgccgccatcctcgcccgcgccccccagcagcgcagcgcctgccggaagtggctgcggcgggggagtgggagggcggagggcggggcctgatcttcgcgacagccgggagggggcgcctctcccagccctcggccgtgtcccggtctgactcgcccccgtctgctcagcgctatcagcctgcagctggcacacaggtgcgtgtagatggacagccaggaaggcagcgcagggtcgaggggagagcgcgg

SEQ ID NO: 241132 - DNA, 131 bp, Homo sapiens; identical to SEQ ID NO: 205788
  chr20:33680634-33680765
  hyper

SEQ ID NO: 241133 - DNA, 66 bp, Homo sapiens
  chr20:33999825-33999891
  hyper
ctccttttgccggcgaaagactggcaaggggggcgcaggcgcaaagaggtcgctacgcgcacgcgc

SEQ ID NO: 241134 - DNA, 300 bp, Homo sapiens
  chr20:34129687-34129987
  hyper
cgttgggcggggccgcctgtaagagaacgcggctaaaggtggggccaagcgtgcggtttgctgcgcctgcgtgaggaaaaagaggggggcgtggctccaggccggaagagggagtctgtaggggcgggccggctggcgtcccctttccggccggtccccatggaggcgctggggaagctgaagcagttcgatgcctaccccaagactttggaggacttccgggtcaagacctgcgggggcgccaccggtaggccgcagcggggccggggtcgcgtggaggggggcgtcctagagcttagc

SEQ ID NO: 241135 - DNA, 1525 bp, Homo sapiens
  chr20:34188626-34190151
  hyper
gtgagccgggacaacgtggacccctgctgggcctggggaggctcaggttcagctctcccttccaacacctgcatggacacagccagcagaaggcggccgcggaaccaaatgccttggccaacgccttcgttgagaccttgaagactatcccggagccccgcgccggggggcgagccatagaggggcacccaggccgggccgaaggtagggttaaaccccgctgtggggaacaagagaagcgtgttggaggggagcgtggggagggcgagtgctggtaaatctctgcacctcaccctgatctcctccaagtattcgggggtgagggcaggggaggggggctaagccgctctgaaacggaagaagttggccagcagctgcggacgcgccgctgtggaacacgacctggggcgcctccaaaacagctcagcgccccaaggagctggaaatcgcgggagcccggcctcgggggacgcagcctgagccctgggggcggggtcgggattggggcggagctacgggcgatcggccaggcctgggggtcggggaaaggagtggaccggcagtgtcagcgtgtgcacagctgtagaagggtgggactgggctggttactggacaggcggttgtggtcagaattttgccaacggagccaaaccgatggtggggttcacagtctgggggcggcttgaagcagtttgttttgcgggcggaccagccctcctaggcggagcggggtcgcgaggatggggcttgcggttgggaatgggccctatggagccctatggaccgaggcgagtgaggccagatttgccgcggccagaagcgctcacccgcgcggcccggatgggagatccgcctcaggtccggcacgtgcgtagcgagtgccgcgtcgaccaggggcgcgtcgtcccgcagctgcaggcggaggctgcgcgtcagcggcgggaagagctccacgaagctcagctgctcgttccattcgggcgccgccgcctcggcgctcaccgacgtctcgccctgaaggtggcgttaaagacaggagaagggagatcagcgcggagtcggggccggagccgcggcgccgtgggccccggagggacttacctcctgccccaggaaagacacccgcacatagggctccaccaggacgcgctggtcgtgcagggcgcggaccaggctgcccagcagccccaggcgcagcgcgggaagcccctcggcgcggtacaggcgcacgcggagccgcgcccatggcctctcggcgggcaccccgcgcggcaggagcaggttcctaggggagggggcaccgagcggggggggagaaactgggatctcggcccctccccttatccgcgccccacggccacccccggatccatgtcctcctccccacctcaccccggctcacttctcgatgtccgaacagtgccctggggccgggggtagcattggagggggcaggtccccgcgcgccctcacggacaaggtgaccttaatgaaacccttggtcccggcgcgggtgtctcgggga

SEQ ID NO: 241136 - DNA, 495 bp, Homo sapiens
  chr20:34252602-34253097
  hyper
gaaggccccgccccgggccaccaaggggcaccacgagccccgcacagccccacccgttcaggggctgcgggagtcttaccggggaaagctgcgcggcaccagaacccagaccccgaattaccccccgcgcgagtgcctccgccccgcggccgacagccccagcccgaacggcttcccggagcccaacgcagccaccacctccttcgccgcttcacaaaatggccgtcggcccgctcagcggctccgcgttccagaagggggaggaacggcgtggttgacgtcaaggggccgcgcaagcgcgctgacggtctcgggcgatctcccggaagttactgggttttgtgctaagagggggatattcagtccctgcttgcgactgttggcgcacaggaccgaccttgggctagtggccctggcgggtgggctgggtatgagtgtctagcttggcccttcactgcaagactgtgcaaattgcttcacgtcttccagtttccg

SEQ ID NO: 241137 - DNA, 137 bp, Homo sapiens
  chr20:34329369-34329506
  hyper
caggtttggcttacgtaagtaaatccaaaacgcctcttacacgaaacacacgaaaatgaagacttcaatatccaatatttaaaactctgctgtcaactccaaaaacagaaactgggagacccgaacgagagcgcctc

SEQ ID NO: 241138 - DNA, 256 bp, Homo sapiens
  chr20:34330350-34330606
  hyper
ccattcagtgaggcgcctttcactccccctccgcgtaagcacccaaatctcgcgagacagagcgggtctctagggcaaagacagttggtaggctgcctgtcaatctttcagagagctcttcgctgagtggagctcagcggtcacctccccctcgtggcgcctcctcacggccatctgaagattcctccggcacagccgatcgcccccgctccggcctcccacacagatggctgtcaaggtcgccataaggcaacct

SEQ ID NO: 241139 - DNA, 422 bp, Homo sapiens
  chr20:34359789-34360211
  hyper
cgtggcctgcgcaggccgttgccacagtgatcgggcagacggggcagggggcggggcagctgggaccttacgtcactcggtggtggcgatgatgcgtgtgtgtggggggcggggcatacgctgggcgcgtcccgggggtcacgtggtgcagagcacgcagagtccttctgtcggttggtcctggagcggcgcagccggagtggggccgtgaggtgagctcgcggccaggcgaagccggccggccgggccgggttgggccgggcccgcgctgcgcgcgcgccgtgcgggcggggacggcgacggacgccaccgctgcttcggtcccctgcccggccccgctccccgcctggccccgctcgcccagcctggagggaggccctgggactgctgctgagagcgtggcgggcgtgcgagcggtgccc

SEQ ID NO: 241140 - DNA, 74 bp, Homo sapiens
  chr20:34680127-34680201
  hyper
gggcgcggggccgcggggttaccccggggcaccgggcacagagccgagaagtctaagctagggaaaatcgaggt

SEQ ID NO: 241141 - DNA, 749 bp, Homo sapiens
  chr20:34680811-34681560
  hyper
ccgccgagggcggcgggctcgattcccgatctttgggcactgacaggccggcgggccggctccaggagccgcgggcttcggttcgtgtgtgtggggactgtcgcgggtttgtgtgtcggggctccagtctctgggtgtgtgttaggtgtgagcgcgcgtgtgcccgtggatccgtgcgagcggctgctcggtgtgcgcgcgcgtgcgtgtgtgcgccgggtgtgcatctgtgtgtgcgtgtgtgagggtgtgtgccttgcgtgtcttcgcgagtggtgcgtgcgtatctgggtgagggtgcgtgtgtctgcgtgtgtctgtcggtgaatgtatctgtgagagggtgtgtccgaatgtgtagcagtgtgtacacctctgggtgagggcgtgtgccagtggcttcgcttgtggctgcagcctgtggcgggtgtgggtgtgtgtgtgcgcgcgcgtcgctgtgtgcgcgccagtgtaactcccgtgtgtgcgcgtgtgagtgcgggtgtgctcccgcgtagcccccgtgtgcgtgtgcgcggctttgtcttcgcactgccgggaggaagcggtgggggcggcggtccaggcgccgccgccgctgggagctgggcacctggcctgggcggtgggtggcggcggcgggggtgtcccttccccgtcgggcagagactccctgctggcaggtgggcggccacaccccgggggtcgggggaactgggctgacagcagagcccgcgttctgacctgag

SEQ ID NO: 241142 - DNA, 210 bp, Homo sapiens
  chr20:34824292-34824502
  hyper
gaacctgcaggcacgggccattcttcccgcgacccagggctctgccggaccgcttcccccgtcgctccagtcagacgccaaagctggagaacttccggtgcgtttccgctgtaccggaacgtggggcgaggcggtgagtgtggcctcctggcctctttttcctttcctgattccttgtgtatgtgtggctgggccgcccctcttctcggc

SEQ ID NO: 241143 - DNA, 469 bp, Homo sapiens
  chr20:35201303-35201772
  hyper
acaacacataccctatcacccgaggatgagacgggatgacacacacgaagtgccccgcacagcgtcgttgtaaagcgttggctgttttcacctctggccgccccctgtgagcccgatcatgtgctttttgggcttaggtcggaggcggcctcccagattctacaggccattgaggtcgtaacaagcgtctccatcagagcctagtccttaactagctgcgggtaagtgcccggactaagtggcctcagtttcccctcgaagcaacgggaccaatcgcaccgccggcaggacatcttgtgcggggcgcgaagtgacaaaagtcaggatttgcagaagttcccactcggtaacgacccccaccccggcaaggagcacagtaggcgctccggaaacgccctccacgaggagggccgggccacttcctgcccccgagcgggctctccccggcggaggctcccaccgccgctat

SEQ ID NO: 241144 - DNA, 34 bp, Homo sapiens
  chr20:35234212-35234246
  hyper
ggttgtgaggaaccgcagcgcgccgcaggaccgg

SEQ ID NO: 241145 - DNA, 101 bp, Homo sapiens
  chr20:35374567-35374668
  hyper
gacgccagggcggcgcatgagtgctgtgcccgtccacctcgggaactaccgagaagatggtggctgagccaggagaggccggcggcgccatctttgatgta

SEQ ID NO: 241146 - DNA, 81 bp, Homo sapiens
  chr20:35402109-35402190
  hyper
cctggacgccttgcgcacccgcagccgatactccctgatcagggtgaagcggtctccaccttctacgtcacggtcaccgcc

SEQ ID NO: 241147 - DNA, 183 bp, Homo sapiens
  chr20:35492269-35492452
  hyper
ggtcaggctggcgcgggcagccgcggcccgggctccctcctcctccgctccgccgcctcctcccctgcccgctcggggaaggcacccggcggaggcgcccctgcgcccggcgtccgggcagggcctgcgagagcggcgggagccgggactcccgggccgaggccgggcggacctcagttcgca

SEQ ID NO: 241148 - DNA, 138 bp, Homo sapiens; identical to SEQ ID NO: 205797
  chr20:35579324-35579462
  hyper

SEQ ID NO: 241149 - DNA, 251 bp, Homo sapiens
  chr20:35724155-35724406
  hyper
ccccacctgctgccgctcacctctaggctgtagttgcctcggatggcagtaaagtcgtccagggcttcggccgcgctcccctcgtccaggttcagctcctggcacagggcctgtagcgcctccccggctgcggcgaccaccgccgccccctcagcgtggggcttgtcctcgaacatcccttcaggccccgcgggctgcgcgccacggcccccgacttctttctccctcccaggcgcgctacccacaaccac

SEQ ID NO: 241150 - DNA, 399 bp, Homo sapiens
  chr20:36012907-36013306
  hyper
tctcgccaggggtagcgcccctgggtgacttgggtgtccggggggtgggggggcggccgtacacactgtgaagcgtccgcgccgccgccgctggctttggggtggagcaagcgcaaaagacacggggtgtggttaatgggttctaattggacgcttaagcccaagaagaagaagggcggcgcgggaccgggcctgttgctgccttggcgcccagtcctttttcgttgcctgggtccgcccagagatgagtcgggacgcgcggcccacgtgcggcggaggggcagctgggtcgctcggggaacggggcaccggatggccccggttgggcccgcgccaggatgcgcccctgcgccctctgctggcgctctgcggtcaccgcagccccggagagggccgttt

SEQ ID NO: 241151 - DNA, 451 bp, Homo sapiens
  chr20:36156391-36156842
  hyper
tcgccccatttcccgtaaatatcagccacagaccacctttgaggactttgtatgcacttttacaaaactctgggagccccgagatcttcaagcccgaataatttttatcaggcgcagtgtggacagccccgaagcgcggccgggtcccctcatgcatatgcagcagattgtgatccttactccgtgagcgctgggcgggccgggttgtgttcatgttggtgaacccgcttcgttcttgcccgcgtggatggtccgtggactccgggaaaaccttctcgtggctcaaagtccaccccctccctagcgtttcatcatgcagccaaggctcaggagctgaaaggtccgggctcagaacttgggactgccttgggtcaggcctcggctcccccacttgccccgtaccttgggccagcgagcccctcgcccaccccgacccggcttctgttgaaat

SEQ ID NO: 241152 - DNA, 147 bp, Homo sapiens
  chr20:36529851-36529998
  hyper
ttgggacctgtcctcggtactgaagggagcgcgggggctgtggacggtgctagaacacagtgcttgtaagtgcgggacatcgtggaggaggtgtccttagtttggaaggagctggattgttgctggctaccacgggccccatccggt

SEQ ID NO: 241153 - DNA, 158 bp, Homo sapiens
  chr20:36530201-36530359
  hyper
tgagggtctgtccacggtgtgaaccctagcatcaaagggccagttgagacgctgtccacggtgcccaaaggatgggcccgggtggggcggggggcggggggcggggggggggctggcgctgtcctcctccgtggtgctgaaaccgggaggaccaggct

SEQ ID NO: 241154 - DNA, 244 bp, Homo sapiens
  chr20:36531041-36531285
  hyper
cgagccgaggtcggcggcagagctatcaccaggtcccctgggtctcagcccaggctcccaccctacctcgccctcacccccagccccactggcccctgaccccggccccgccctgccggtaaagttaggagcctctgagtgcgctggcctggcggcgggtgccctggcttttctccctctccccgctggacggcatttctgtggctgaagcccgttgggtcgtgctttgcgggaaccgcgtccc

SEQ ID NO: 241155 - DNA, 490 bp, Homo sapiens
  chr20:36531525-36532015
  hyper
cccgcagtcggaggcggccggctgggcgtgcgctcgctccccgaagccggggctgggccggagccgggcgagggctgggagctgggccgggtccggggacagcgggcgaggggcagctgccggagccgggcagccaggccgctcagggcaggggacagctggcgccggttctgcggtctccggggcccagatgtgaggcggcggcgcccccggcccgagagcgcacgatgggggccccgctcgccgtagcgctgggcgccctccactacctggcacttttcctgcaactcggcggcgccacgcggcccgccggccacgcgccctgggacaaccacgtctccggccacggtgagttcggtcgccgcccccgcggacttccccaccaaaccccaacccgggccgcgccactccaacttggccgccccggggctcgaaccggcgccagtcgtggcgggcatcccggggcgccccctgccggcgcggtggaccc

SEQ ID NO: 241156 - DNA, 307 bp, Homo sapiens
  chr20:36781072-36781379
  hyper
tcccattttccaggcagacccggccctttcccacccatcagactgatttcctcccgcagcgcccctgcgctcaccccagcccaacttcctgcctctgcatcaccagctccacagttcccgccccgggatgtgggtcactttagtcactgtgccgcttggctgaccgccactccaacccgccgccgggtgaggccaagcaggaggaagggggccatcccccagaaccacgcttcccattccctgaactctgaaaccttgtggtgtggacgagggtggggacaccggcgtgttcctgtcctgttggcag

SEQ ID NO: 241157 - DNA, 35 bp, Homo sapiens
  chr20:36793594-36793629
  hyper
ggccatggtcgggcgggggcggtggctccttccac

SEQ ID NO: 241158 - DNA, 44 bp, Homo sapiens; identical to SEQ ID NO: 205799
  chr20:36793837-36793881
  hyper

SEQ ID NO: 241159 - DNA, 284 bp, Homo sapiens
  chr20:36888952-36889236
  hyper
gtctgtgggtccgcgggtccgtctgtctggggcagccctcggtcccgcctagccctggagccaggggatagggcaggcccggggcaccgaccccggcgtcatctcggaggagcggccggggaggacagggagagagactgagagagagacagagagggactgaggctggagacggcgagagacataagggagccgcgggcggcgcgggtcgggccaccagacggggggcggcagcagaggcggggcggggcggggcgcggcgggacagcggcccctttgtgcct

SEQ ID NO: 241160 - DNA, 117 bp, Homo sapiens
  chr20:37063992-37064109
  hyper
tacgctcgtttcgcgccggcggaaatacagacgagagcgcgagctgcggcctagagcggtaggaaccgacgcgagcagtcctgcagcgtcccctggcggagcggaggctcaacgcca

SEQ ID NO: 241161 - DNA, 115 bp, Homo sapiens; identical to SEQ ID NO: 205800
  chr20:37075186-37075301
  hyper

SEQ ID NO: 241162 - DNA, 126 bp, Homo sapiens
  chr20:37101359-37101485
  hyper
cggctctgtgtctcgggaattatttgacgccaccggttcagccccgtagaaagctctgattaggcgcaccgcgcacgcgcagtggcccacttggctggggagttatttgacgccgccgcccctggc

SEQ ID NO: 241163 - DNA, 68 bp, Homo sapiens
  chr20:37275209-37275277
  hyper
aggggtcctgaacacggttccttattaaagtcccgattagagaaattgatgagcgttgaggctgcacc

SEQ ID NO: 241164 - DNA, 234 bp, Homo sapiens
  chr20:37302482-37302716
  hyper
ggcagagggaatcaggaaagcgatgggcttgtctgaggaacagaaaggacaacgaacgtgtgagtcacactaaggggcgccgtggtgcggcatgaggctggagcctgatcactcggggtcttactggccacggtgaggagtcagggtttcatgcgcccctgcagtcagaaagcatggcccaaccccagtgccctaagtccggaaacattcaaagctggacccagggtagcggga

SEQ ID NO: 241165 - DNA, 402 bp, Homo sapiens
  chr20:37352531-37352933
  hyper
aggatgggtgccagggaaactgacttatagacgacccgctccgcgagagactgacaactcagtcctgcgggctttcggggcgcccagaccagtccttagccagaggatctggggctgcacagctcccggaccctggagggggtggtccgggggtgggagactgcgagcatcagcccacgccggccccctcccaccctgcggcggcgaggtgggaagggccaggatgcgagcttagcacctcccctagaaatgcagcacttcgcccccccacctcccctgccctcggcgctccctctttcacgcgctccctcccgcctccttcccaagggcgcccttcttctgcccccagctcacgtctgaatccctcggcgccccctttctcttctcctagccccttcctca

SEQ ID NO: 241166 - DNA, 191 bp, Homo sapiens
  chr20:37353353-37353544
  hyper
tccccaccgccgccatggccaccttgctccgcagcaagctgtccaacgtggccacgtccgtgtccaacaagtcccaggccaagatgagcggcatgttcgccaggatgggttttcaggcggccacggatgaggaggcggtgggcttcgcgcattgcgacgacctcgactttgagcaccgccagggcctgcag

SEQ ID NO: 241167 - DNA, 545 bp, Homo sapiens
  chr20:37353724-37354269
  hyper
gaggcaggctggaacgtgaccaacgccatccaggtaagcgcgggattcccagttctgcctgtcctcccccctcccagctcagcgtgccgggctctgcccccgacagtcgcccggtgatctcggcctggagaccccctcctgtacccaggaatctccctttctccatccctcccagccctgcgcggggacctacgcccccaggcggtgttttccgccctaacccacgctccctcccaacggcaccagctgcaagaccgctaggctgaagttcggtctgagacacctgtccggagacactgcaaaagtgaaggaaatggggggagggagcaggaagcgatgagaaagaaagaaaatcaggattggagggcacggtttggtcttggactctggaacggattcacagctgcatttttgggaggaaagaagaaggggaaatcgctgaggtcggagtctcctccccccgcacacacgcatagacacgcacacgtatataggcaggcacaccacatgcccacagccccccttcccacgaacaaaggcgcagg

SEQ ID NO: 241168 - DNA, 550 bp, Homo sapiens
  chr20:37354550-37355100
  hyper
cctgtgcacagactcgcccctctcgcccgaaatcccggctgcaccgcaaagaggcggccagctcctccccgtgtgaccctggcgaagccctctccagaggctaagaatggcccctgctctctaggccctctccccttattcctaaccccccactccccaccaggcggcgcaggactcctacatagggagcaggtttggagtcttggcaacgacctccgagctagcaggggctggcaggccgcagctttctgggccgaaggagacttcagctctaggcaaccccggtcccttacagcttggccccgcggcgtccctggagcgcactatcactggggccacggaaggcaggttttctgggagcagaggcctcccaggggttgttccatgtatcggggtaagcaggactccaccgggccccgaacaccagatggcccgacccaaggcgctttccgctccggggcccggcgagacggccttgctggatcacggacccggggctgctcccgccttcgctgtgccccgcgacttcccggggcgtctttcaaggctc

SEQ ID NO: 241169 - DNA, 553 bp, Homo sapiens
  chr20:37355881-37356434
  hyper
ctccatctctggctcgacacccgggctcactattagttcccctacatccaccccgcagcctgctcttaacctctcctccccggcggctcagacccaattctcagtgtccttagcgcccccttcgggccacagcgttaagccacgccccccgggcccctcatccgttgccaagttcgctgagcgtccgcgtctggttgcctctccgccccacagggcatgttcgtgctgggcctaccctacgccatcctgcacggcggctacctggggttgtttctcatcatcttcgccgccgttgtgtgctgctacaccggcaagatcctcatcgcgtgcctgtacgaggagaatgaagacggcgaggtggtgcgcgtgcgggactcgtacgtggccatagccaacgcctgctgcgccccgcgcttcccaacgctgggcggccgagtggtgaacgtagcgcagatcatcgagctggtgatgacgtgcatcctgtacgtggtggtgagtggcaacctcatgtacaacagcttcccggggctgcccgtgtcgcagaagtcctggt

SEQ ID NO: 241170 - DNA, 1499 bp, Homo sapiens
  chr20:37356801-37358300
  hyper
caaggaggtcatcacggataacctgcccggctccatccgcgccgtggtcaacatctttctggtggccaaggcgctgttgtcctatcctctgccattctttgccgctgtcgaggtgctggagaagtcgctcttccaggaaggcagccgcgcctttttcccggcctgctacagcggcgacgggcgcctgaagtcctgggggctgacgctgcgctgcgcgctcgtcgtcttcacgctgctcatggccatttatgtgccgcacttcgcgctgctcatgggcctcaccggcagcctcacgggcgccggcctctgtttcttgctgcccagcctctttcacctgcgcctgctctggcgcaagctgctgtggcaccaagtcttcttcgacgtcgccatcttcgtcatcggcggcatctgcagcgtgtccggcttcgtgcactccctcgagggcctcatcgaagcctaccgaaccaacgcggaggactagggcgcaagggcgagcccccgccgcgcttctgcgctctctcccttctcccctcaccccgcccccaccagcccagtgcgccctgccgccgcgcttgggaggccaagctttaaacatctctggttcctagtttctgattattcggggatgggggggatgggaggggacagggattcacgatccatcgcgtctgcgtttctgttgtcctttcttttccacaacaccctggttttggggggaggcggggtgcatttgcgggcagggttctctgtccttccaagtggggccccgacactttggttccagtcatcgagggggttgggaagggagggagagggggcgcagctcgcaggcgtggcaacttgaccttgggggaatatttcacatccatccagagctcggaatctacagcgtccagccatttccagcaagagcgcttcccattccggagacgtttcaaccctgcagcgggaaaggctgactgggaaatccattttgggtgggcaatttccttcaacgaagccggaaggcgagaagccgcggcggggccagcttgcctgccggttttcaggaatctaaactctcatcttgtgcaatttatcaggtgtggaactgttctactgtgcgtgtggtgtgctcgtggtgaataagatgaaatgtatatcagaaaaaaatctatctctaatttagagtgcggtacataattatatccgcaaataaagaagagacaaaggcttgcgcggcccggtgtcgggtttgtgtgttcgtaccagccgggatcccctggcgctgggaggcgtgggaactggctcccgccggctgaaaccggagatggtgagcagctgtggttaaagggtccggggagggctctagggagtacaaagattagttggcggcgaggaggctcctcaggtgtgaggaggaagctgaagacggagagtgctgtagcggccccctcagctgccaggtcgaggtttgttcgaatctctcccctgggggcgggtccatctgagaatttggt

SEQ ID NO: 241171 - DNA, 126 bp, Homo sapiens
  chr20:37433814-37433940
  hyper
gcaggccacagcccccatgtctcggccccagcagctgggggacctggccccacagatctgtccccagcgcaaggccagggccggcccctggacctcctgggaagccttcagactcaggccgcgcag

SEQ ID NO: 241172 - DNA, 78 bp, Homo sapiens
  chr20:37435320-37435398
  hyper
ctcctccttcccccatgtagactcccttcctccgctcccccaccccggcccggcctccagcttcactggagatgctga

SEQ ID NO: 241173 - DNA, 338 bp, Homo sapiens
  chr20:37435578-37435916
  hyper
gagctgcctgcgcgcccatgtgattgcatttcacataaagggcccctgttttcactgtcagaagagccccccagctctccgcggctctggacaccaggtgccgcctctgaatcaccctctgtggaggacccggggcccggaggtacaggcgccctttcccgcagggctctccctggaaagggcctgccgatggcggcctcagtccgcaggggtacttccctgtgtaccctgccatttcctgcggctggtgaagcaccggagaaaaaccgtccatctaggaggcctcctccaaggctggtaataaagcttcttagcccagccagcgactagctgtctac

SEQ ID NO: 241174 - DNA, 667 bp, Homo sapiens
  chr20:39316042-39316709
  hyper
tcagcctcgcctctcgcctgccgggacgccagagtccctctcctttcctcgttgctctcttcctggcgcggactactctccgggcagcaaagcagctgtcccggcttaacgcgcaaagttcagaaagccaggagtctccagatggccttggtgacttctcgggactatgcctcgccgcccttcagcctggagagaagttactccgggacctcccaccctctcgtctctctctccggctctgctcgagtctaggaggcggcgctggcgtgcgctactctcgccttagccaaggtcccctgcccgcccgcgcacccgcccgtcgcccgcggcccgcgcgcccttcctccctctcgctcaagtcaaacaggtcaaggctggggccgcggcagggacagggtccggggtagtctgggactagggacgtgggacagggagtccgggccggggcaagggcgggggccaggaccggccacgactcacagaaagaactcgggagaggaggggctgtcgctggtggagcccgcctccctgaagccggagttggcgagtttctcgcacttgaccttgtaggcgtctctctcgcgggccagccgggacacctcctgcttaagctgctccacctgctgaatgagctgcgtcttctcattctccaggtggtgcttctgct

SEQ ID NO: 241175 - DNA, 62 bp, Homo sapiens
  chr20:39317669-39317731
  hyper
tcccgaggctgcctgcaccgccccagagctctgggctgtgcccgcgcagggaccgggccggg

SEQ ID NO: 241176 - DNA, 1663 bp, Homo sapiens
  chr20:39317971-39319634
  hyper
gcctccgcggcccagcggcgcagggcggggcgcgcctgacagctcccccgccccccgcgtcagctgactggcggcccgagcggccccggagcggcggaggcctggcggagcgctggagcggagtgggacggccagcctgggcccacccccgtaccctgcaggtcccggcccacgcacgctcgcctggagtgcgcgccccacctctaggccaaatcaccgctttcccctcctcgcgcactctcctccctcagttccctttgcaccccacccccatcccgtgtcacccccaaggaggctcagaatgagcgccgggacaacgcctcctgggccctttgttcccaagcggcccccgcccagtgggcgacgctctgtgtgtcctcgcggcttctggccgtgtgtgtcgtgcgttcctgtttctggagatctgcgcgtatttgtatgttggggagggcgggctcgaggctccgagagttgtgttcagacccaactcttaacctcaggggacctttctcaggccaagcgagggcccctcctggcgggtgcagtcgcagagccctgaggttcgactccactggccccgccgctccccgcgttcaccccaccgcacaatgttcacagtgaaggcgacgggaaaagcagcagcccaaaggctctgaattcctcttccccgccacacgcacggaatcctgagcccccggagcctcggggccgaggccggcccgggacggtgctccgagtagctctccactgctggggagccggccctgtttttgtttgaacgttttgtaacgattaagcagatcccggcgtcagcccgccgcggagaggctcaaacaggcataaagtgcgaccccaagtggccactgtgcgcaaaggcgccgcgaccgcccggcccacggccggaaggcttggacggcgcctcgtacccagccaggtctcccctacctggcccaacccaagccagcccagaacgcatactatgtgtgcaccagagcccaggacaggttcccctcgagcgatgtacaggtcctcgggtcccgtcttcgtactcagccgcgagcctcgagccgcgagctccgctctggtcgccccgttgaaattccgtgccccagcgttcgggggtgcccgtcggctgctccctgggccggaaggtcctgggcggaggaaggccggtagccaaaagtggaagcgccacagtgaagcggcccagggccaccgggtgagaaacctccccggagggcagacggggagaccgaagcacaccgcactaggcatccagactgggcttgggagccgcgcaccctccctacccagatccaggatggctagaattaacgggttctttctgagacctcggctcaggcgccgaaaccggatagatcgcgaattcgctggacccggagacccgacccgcctcccgcgtcaccttcttctttctagctttgggcgcgcgcagcgaaaggcaggagaggcgcgcactgggtgagtgagtcccggccgctgtctgcgctggaccagcccgactgacctcgcgcgtaggggtcgcgtgagccacaccggtgcagacgcgcctagattatttttaaatgttagaaggtaaaatatttgcctccaattaatctgaaaactctctattctcttgcgccctcggagaggctggggt

SEQ ID NO: 241177 - DNA, 145 bp, Homo sapiens
  chr20:39657943-39658088
  hyper
ctgtggccacccccgggtccccgtcctccccgggggcgcagggtgagccagaccccggccgcgcgcgctcgccgccggaggggttaaagtggctgttgtttgatattctctccttttctttttccagatcgaagcggatttccga

SEQ ID NO: 241178 - DNA, 475 bp, Homo sapiens
  chr20:39765949-39766424
  hyper
accgggaacggcgcgcgctcccgccgccatcgcgcctccgtccccgcctgcggcctgtctgggggtcgcggggcgcaggcgcggcgggccgacgggcgggggtcctccccacgggtgcgcgggcgcctttgttcccggcgccgaagcggggtggggcctcagggcagccccgccccgccgcgctgaggccccgccccgtgtccgcctgcaggagccgccgccgggtcccgctcgtctgccgcctcagcctcagccccaacctcagccgccgccgttgcgcttgctcccgggcggtcctggcctgtgccgccgccgcccccagcgtcggagccatggcgggcgccgcgtccccttgcgccaacggctgcgggcccggcgcgccctcggacgccgaggtgctgcacctctgccgcagcctcgaggtgggcaccgtcatgactttgttctactccaagaagtcgcagcgacccgagcg

SEQ ID NO: 241179 - DNA, 200 bp, Homo sapiens
  chr20:39945802-39946002
  hyper
ccacccccttttgcgccttctacgatggtggcacgcggggctaccctgacccctaggacccctggacgcccgctcctggagcccggggggtgatgacagatggcggagggcggggctccggggggaaggggcggagcctctcagcatgggggtgctggcggctgacagaaagaccaggggcagccggcgggagggggctg

SEQ ID NO: 241180 - DNA, 170 bp, Homo sapiens; identical to SEQ ID NO: 205809
  chr20:39968625-39968795
  hyper

SEQ ID NO: 241181 - DNA, 35 bp, Homo sapiens
  chr20:39969365-39969400
  hyper
tgaagtctggccccgcccccgcctccgaggccaaa

SEQ ID NO: 241182 - DNA, 204 bp, Homo sapiens; identical to SEQ ID NO: 205810
  chr20:40247056-40247260
  hyper

SEQ ID NO: 241183 - DNA, 546 bp, Homo sapiens
  chr20:41816997-41817543
  hyper
ccttcacagaagtcgcctattccgcttccattttagtaccaagcaaggaaggctctaaagcatttccaacggaatgtccttccagcggcccttaacctcagacgcagcttgtgcaaagacgctgtacctccccacaggttcgttcttttgctctttctttcttcctttccttctttcggtgaaataataaatgggcacagctgttgcttagcgatccgaaaccagcctgttcctgcgtcccacgggctgatctcagcctgtccccgcaatcccagccacctcaggccggcgtggttacaccaaaagcaatcggtgctaagaaactttaaggtgattttgaacttggaagtacacctgcagcactcccttctcttccctccgccgctactcttgggggggggggggctcgggggtggaagctgcctgcggtggggcttggtgatgtgtaagaccctggactgtggtgccctccagcacccgccaacgtgcctttaggagcacggcaggcaccacccccccgcccccgctccccctactctggggaac

SEQ ID NO: 241184 - DNA, 228 bp, Homo sapiens
  chr20:42086252-42086480
  hyper
cccgaagagatcgcgcacagttttataaaaggtacaaattagaaagcagttctgcggctggattagagacattgtgttttcaaagacggtggggagggctagagaaaaatcctagaagctagcaagaccgcactacaccgaaacgtcgcgggcaacggactcgccagtcaccatctagcccagggacgacgcgggacggacgtgccgctgcgcgctgacatcacgctc

SEQ ID NO: 241185 - DNA, 88 bp, Homo sapiens
  chr20:42136656-42136744
  hyper
agggtggaggctgcgtgtttggagatacgcaatcaattaagagtttttttattaatggaaaggtgtggagggcggggttttggttttc

SEQ ID NO: 241186 - DNA, 159 bp, Homo sapiens
  chr20:42219373-42219532
  hyper
attagtctttactcgtaattgatactaaagaacaaaattaaatgggtttatttttggtgaaaagttaattctccttatgtttggatttgcccctcatgcaccaaatggtacagccccacatcagtcaggctgcctacccctgacgcctgcgacggagag

SEQ ID NO: 241187 - DNA, 163 bp, Homo sapiens; identical to SEQ ID NO: 205812
  chr20:42296100-42296263
  hyper

SEQ ID NO: 241188 - DNA, 1945 bp, Homo sapiens
  chr20:42543091-42545036
  hyper
tccccccgcacccacgccgcggggcggggactagcgccgcctcaaatatttagggcaagggagtgtcccacttctggggaggggtgccgttcgggcttctctcctcaccgtgggtggcgaaaggcgggacggaaaagcgccgtctggacaggcgcgcccccctcagggatgcagggccgggcgggggacccggcggcggcccagcccggaggaaggacctccacgccccggcccgggcccccgggcccccggccctaggcagcgcccgaggccggaacaatagcgcgcgcgggcggggcgggggcgggggcggggcgctcctctgggcaccgcccccggcccgccccccgcgctcgcagtcccgctcgcacactggctcccacccgccgcccgcccaggcactgcccgcgggagccgccgccgccgccgccgcgcccgccatggacgtccgcctgtacccctcggcgcccgcggtgggcgcgcggcccggggccgagccggccggcctggcgcacctggactattaccacggcggcaaggtaggcgggggcgggcgggggtccccggcgggcggggccggagtcacctggcagctcgggactcaggcgctcccggggtcacacggggccgcgcacatcagccccgccgacgggcacgggcggctcacatcgatcccctcgcggccacgctcacgccctgagttgttgggatcgcgggcagaagtcatcccgacagccacccgtgcgacgacacagtggcccctcactcgcgtccccctgacagcctcgcagtcattcacaagccgtcacagtgacccacagccacacgcaggcggccaggcactgcttacacggtcccgccgtcccacgcaagtcaccctgacagtcacttatacacaacgacacgcaaccactcacccgcaaacagcctcaccgccacagacgagtcacccacagacgctccgatgccccacacaccgtgacatgcccccacccgctgtcacacccaggcacaacgggggacagtcacacaaagaagtcgcccgacagtcacactctcgcagccacaacgcctcacccaggcgcacgctgtcacacacagccacccccctggacggtgagcctcagacacagatcgtcctgacggccacacagtcacacgcggtcacacccagggacggccacacctcggtcatccacactcgcgcgtcgaggtttaacttctcagcgccgcagcacactaattgggcagtttactaattggccgtcactgcctggcggggcctcggattccgagtaggctgcggccaatcgaggcctgtgtcctcccgggagcggtgagccggcgtccctccaggctggggctgtagtgccggacaccctccctcctccatgtttccaggatctatccccccaccccagccaggtcccagctgcgctgcgccgggcgcattcccagtgatggaggcttgcgtgcctggaaccccgaacccgaggcgtcaggtcccactgccgggtctggcccagcctggatgggttgggtgcctctaagcagtccgcgtccccttcggtcgccggagagggaactttcaaacttagttaggaagccagactgtccgcgcgtccgccagtcggtgcgtcggtcccgggccggctggagccaagcgcgggttttcgtcactcggagcccggattgaacagcgcgcgtgggtttcccgcagccctggcgcagacgcgtgggctccgtggcgatgcggggtgagtgcgcgtccagtggctggatcggcgccccccagggtctctccccaacctcgcaggcttttcgtcaggcccctggtagtggggatgaggcaggagagaggcgtcccggcgcggatcccggggcctcccgggctgggcctccctgagtgcgccctcaggccccaggggagcggcttctggcaaag

SEQ ID NO: 241189 - DNA, 56 bp, Homo sapiens
  chr20:42588193-42588249
  hyper
agatcgaacgctgtcgttgacatatttcccttccgacaacacgagccttttgtggc

SEQ ID NO: 241190 - DNA, 395 bp, Homo sapiens
  chr20:42839351-42839746
  hyper
cgctccggtgatgcggggcagtcagttcagagcgtctctcccaaatctcggcacccgactgacccggatccaaaccagccaagggggcggcccgcgcctcgggagtcgcgttgcgcctgcgcactccggcatgcacccctccccctgcttatgctcctcccaccccagtgactcggcagcgcggcagccgacgactgcgcagacgcagggcggcggccgcgcctctccaacgccccgcacccgcccccctcagaagcacgtgcgccttacgtaatttcctgttattcttcggtttgcctcctcccagtggcgtggatttgctcccgacccgcttttggggcgtgcctgcttcctcctctctgttaggtgagtgagtaggcgtcattcttcacagt

SEQ ID NO: 241191 - DNA, 960 bp, Homo sapiens
  chr20:42875744-42876704
  hyper
agcctgacactgagggctggcggcttttctggcgcgggccagggggaggaggagaaaggagctcccgggatcccctcgccccctcccccaactgcccggtgagtaatgacattcacggagcggggagggagggaggagaggggcaggctcggcgaggccatgtgatgctgggcgagagagagccgccgcgccggagcctccttctttcctgcctctgattccgggctgtcatggcgacccccaacaatctgacccccaccaactgcagctggtggcccatctccgcgctggagagcgatgcggccaagccagcggaggcccccgacgctcccgaggcggccagccccgcccattggcccagggagagcctggttctgtaccactggacccagtccttcagctcgcagaaggtagagccgggccgggagccgcctgcgccggtggccaggaagcttggggaggggagccccagggcttgagggatctgagggcggcgaaagactggaggggggaacctggggtttgggggtcccggaggtcgggggacgcaagggttccttccaggactgctcacctgggaagcgacaggccctgtctgggccccaggagcacagttctcaattttaggagcatccattctgcctctttccctcccagaaacagccggtctgttggggtgcggggcgggttgggggggctgagaaaagagacaaaggcgaggggaagggaatgggcactgctgggaaggcggcttggtggggtgggaggtgctgctgctgcggggagggagaagaagcgctacttggggtccagcctcggtagccccctctcagtcgctccctgcacgctgccgtcccggacactgcaggcccccaggtcacagctcctctgcccctctgtctgcgggccgccttctggctagggcttggagggtctgtccccagtcgtcgcccacccccc

SEQ ID NO: 241192 - DNA, 364 bp, Homo sapiens
  chr20:43017166-43017530
  hyper
ttttaggtaactaaatccaacgagctgtgattggtgatcgaaccgagcaggcctcctctggatttggagagacatagtgcgtctgggcctgtgattggcgggattgctgtgattggtgaagtccctaaggctatctaagtttctgaacaccagttcctgcgttggccacgaggaggagcccaggaagcgcaaagcgcagcactgcggagagtcttggccgcctcctccgggacgccctccggcccagcgcggtgcctgccctgccctgcgccctggggcaaccgcgggatgaggtggggcggcaaagggtgtcagggctcccagctgcggcccgggtggccacgcttctctgcacagttccttt

SEQ ID NO: 241193 - DNA, 140 bp, Homo sapiens
  chr20:43104449-43104589
  hyper
cgccgcggggaggcgtcgcacatgcgcgctcctaggcggagccccgcctcccacgccctggatcgtcacttccggcgcgagaggccgggcaggccgggcagggagtgcgggtcggttctgcgtgcgctgccggacgaggc

SEQ ID NO: 241194 - DNA, 80 bp, Homo sapiens
  chr20:43150903-43150983
  hyper
gagaggcacagtacgctcagaatttattctctagttaataggagatctgacaacataaatgcaccgtgccccaatgtaat

SEQ ID NO: 241195 - DNA, 292 bp, Homo sapiens
  chr20:43271169-43271461
  hyper
aatcaggaagcaggcggggagttggccagagtgcagagtgaggttagtggtgagaaatgaggccagggcaaagtggagagggggcagggagattgcagaggccgaagcaaagggttttccacccaagtgtgttaaatcggagagtcccctttaaaaaaacctttcccggctgctgtgtggaggacaggatggcaggaagccagaacagaagaccagctactgcgggagggaagatctgattgggatttgaataacatgcgggaagtactcaaggcagcgtcagagacagtgg

SEQ ID NO: 241196 - DNA, 48 bp, Homo sapiens
  chr20:43280693-43280741
  hyper
gcgtgccttccaccggatagacggacgctcgtcgcagaaacacacacc

SEQ ID NO: 241197 - DNA, 72 bp, Homo sapiens
  chr20:43374344-43374416
  hyper
aaccccgggcaggcgagtgggaggcggacaggggagcggttcttccggcccccacccgtggcgatcccagcc

SEQ ID NO: 241198 - DNA, 422 bp, Homo sapiens
  chr20:43438270-43438692
  hyper
gtctggagccccagcccatgagggaaggagaggagagataaatgggggcgctcaaggcctggggcgccgggcaggggtcttgggcagggatcctctggatgtggccaagacaaagatggagaggtaaggtctgcgcgccacctccaatggcggggggcgcgtcggagccccaggggtgggacggccaaagcccagggcttgaagagtgggcacattcaggagactcagggagggtggcaggtcggctccagggacgaggcaaggggcctccaataggcgcgggtgaggagggagatgggtcctggcgacccaaagggcccacctgcgggaaaggtgaatgcagacaatctcggggtccctgggggagaaggccagaaggtagcgcatcctggagaccctggggtcccgtgggtgcggaagga

SEQ ID NO: 241199 - DNA, 46 bp, Homo sapiens
  chr20:43514296-43514342
  hyper
gtttggggcggggcgcggccaggaccggagcggaagtggcgatcgg

SEQ ID NO: 241200 - DNA, 119 bp, Homo sapiens
  chr20:43538513-43538632
  hyper
tgaaggctttttccgcctcccagggcggggtcagaggtgtccccacctgtagcttttagatccccaagtgctcgcaggtggggggtgggcccaggagggatcccgggggaggggcgtcc

SEQ ID NO: 241201 - DNA, 131 bp, Homo sapiens
  chr20:43589113-43589244
  hyper
tggaggcccggagcgtcccgccctctgcgcgtgctcggtttggaacttaggctcccttgcacgcggggcggcagcatgctctgggctccctgagttgctagaacgccgtggatgacgcagggaaggaggct

SEQ ID NO: 241202 - DNA, 81 bp, Homo sapiens
  chr20:43594829-43594910
  hyper
cttctaaaggaggcgcttcacgcatctcagtctgtgaaatgggacccaggacccaggtagaggtgcgttctcggcctgggg

SEQ ID NO: 241203 - DNA, 261 bp, Homo sapiens
  chr20:43729513-43729774
  hyper
cccgggaccgtcccggagccacgtccctccccaaaggaggccccttacctgtggtggcacctcccgggcgcctcgcgtgtctgtcccaaagccaccgaggctgggagccgctggctatactcggtctcgcctctgccccgccggccccgccgagcctcctgctgcaggcggccccgctgccctctccttccttcttccttgcctagtcccccgcggctgaaggccgcatcgatcgctgccggaggagggagtgaggccgct

SEQ ID NO: 241204 - DNA, 518 bp, Homo sapiens
  chr20:43922022-43922540
  hyper
gccacagcacgctccgtctggcttcccctcccccaggcggcgcagcaagacccaaaaacggaccccgtggaaatcagttttttttatttttttaagaacacaaacaagaaatccaacaaagaactgagcgcagcacgcggcgagggcgtgccggtctagcacgtgccccttccctcaccacccgctatccccctgacgccgcagtccgcctaatggtccgggcgaggccaactcagctcaatgccggaagcccgccagcgcctccgccccgacagcccaagccggacgggcccaggttctgcctggccccggcgcaccgatggcgcgcaaggggcaccgtccgtggtgccgcgccccagcccgggtctgggccgtccgtggccctcacttctggttggccagctggttctccagatcctccaggcgcgccgtcagctgggccagtgagcggttaaggaggccgttggggttcgccgaggtcccttcactttccctccagcccgcgccaccagccccaa

SEQ ID NO: 241205 - DNA, 196 bp, Homo sapiens
  chr20:43991507-43991703
  hyper
cagtttatcacctcgttaattcccaaacatcattaccgcgtcctaagccaccccacttgcctctcccctagccgccttcctttaaaaaaagaattcccctctagagggcgcgcaagctctgcggccttcgttcctctcttccgtttgccttcactcttccttctgcgcatgtgctcagttcgctatccggctgctt

SEQ ID NO: 241206 - DNA, 287 bp, Homo sapiens; identical to SEQ ID NO: 205818
  chr20:44034866-44035153
  hyper

SEQ ID NO: 241207 - DNA, 318 bp, Homo sapiens
  chr20:44044572-44044890
  hyper
caagctggttactcgccctgcctactccctctcgtgtcctcccagtacccccttagacccaccagctctgagggaatcttcgcgacctgcgcaggcggtcgctctgataaccgcatcccggtttccgggacgacagcggaagtcacttctcacacgcctttcttattggataccggcttttcatggggccgagcgccgctgggtaggcggaagtagccgcaggcatggcggcggctatgccgcttgctctgctcgtcctgttgctcctggggcccggcggctggtgccttgcagaacccccacgcgacagcctgcggg

SEQ ID NO: 241208 - DNA, 666 bp, Homo sapiens
  chr20:44098345-44099011
  hyper
ccccctcccgcgcgcgcggttaaatccccgcacctgagcatcggctcacacctgcaccccgcccgggcatagcaccatgcctgcttgtcgcctaggcccgctagccgccgccctcctcctcagcctgctgctgttcggcttcaccctagtctcaggtgagtggggcggggagaggcccggcgcctagaggggccgagccacgagcgccaggatggagccaggcggaggcgtagcctctggaggctggggaagtgggaattccgggggcggaagtggcggggacccttggagcctagggtgtggggtccaatgtgctggaggtggagagaccactgatggctgcaatttgggaggattctgtgctgaacgcggacactccgtggctgcagtgggctgggggtgggggctgctctgcctcgacctcggaagctccgagacgctcagctgtgcggcgtcccctagggctgagatctgagggccccgacgccaagggttagggagctctcgtactcccaggggtcagggactcctggtctggaagaaggagtctctgggggctgtaaggggactcctagggccagagactgagaattccttggggttaaggtttggagcaggaggtgggcatcctctggggctggcgctacgccccaccctcgactgtcc

SEQ ID NO: 241209 - DNA, 51 bp, Homo sapiens
  chr20:44099191-44099242
  hyper
gcgggaacggggcggggccgcgctgggctgggaggaggtgggagggcccgg

SEQ ID NO: 241210 - DNA, 117 bp, Homo sapiens
  chr20:44099602-44099719
  hyper
ctggcctggcaagattttccccaattcctctgtccaggcggaaaggaactttacagatttaggaaaatgccccgctcatcttaaagatgtgtaagggagcatcggtgagaaaaaaat

SEQ ID NO: 241211 - DNA, 87 bp, Homo sapiens
  chr20:44441534-44441621
  hyper
agcgggagatctgcgggtgcaggagaacacaccaggagctcggggcctggcattcccctgggcatgggtgtcgagggcggagacttc

SEQ ID NO: 241212 - DNA, 492 bp, Homo sapiens
  chr20:44452645-44453137
  hyper
gccgtcgttgttcttgtcgccgtctttcatcagagattcgatctcctcgtccgtcacgtgctccccggaggccctgaaaatctcagccagctcctccgggtcgatgtagccgtctgcattccttcaggtccgagggacagggcagggctcagggccggggcgagctgccctggccaccacactcgacgccccgcttccgcactcccaacacggggaagcttccagcgctgccggccgggttctgactgctaagcccctccctcggctcccgggcccccagcgcacctgtcgaagatgcggaagcactcggccagctcctcctcgctcttccctttcgcgtcctctttcatctggcgcaccatcatgaccaagaactcctcgaagtcgatggtgccgctgcctgcgggcagcaggtggcagactgagcctgagcccagccgctgccgcctctccccaccatcccctgcctccgagggacacccgctcaccgtc

SEQ ID NO: 241213 - DNA, 159 bp, Homo sapiens
  chr20:44462158-44462317
  hyper
cttcgttttctctcgggagacatggcctccctactattgcataattactttgtgaagttaaagagcgttgggtggaaatgagtgggacagattggagatgacgtgggtggggtgggaggattcaaggagggtacgcgcctggccggactgggatgactc

SEQ ID NO: 241214 - DNA, 308 bp, Homo sapiens
  chr20:44509708-44510016
  hyper
aaccctggcaacacggcccgcccgcgaatcgtcacgctacgattggtccgtggtgctaaagcctgaaagcgaattcctcagacattggtccgagtcactgcgatgctgacgctgtggttggtgagtttggatgtcagtcagagtcggaggcagggtcaaatagggagaaatggcgacggagcctggctgtgggtgagtgcttcctgaaggggtgaaagtgtgagacagcggatcaccgcagttagccgtcacacagctcccaaagggatgggagggaggttttcttctcatccggctccagctggact

SEQ ID NO: 241215 - DNA, 76 bp, Homo sapiens
  chr20:44540766-44540842
  hyper
tcaggggatccgggcgacggggtctggcgggcagggttgttccagccgcctttataaagccggcctccccgacccc

SEQ ID NO: 241216 - DNA, 149 bp, Homo sapiens
  chr20:44600903-44601052
  hyper
tgttccggaaggtcgctccgaggcctcaaaaccataatcgggtctcaacagactctgggactttatacgtcgcccggtgtttggcactgagcccactatggtttggggactactttatctcggcggagtgttacgtaggaagtggttgt

SEQ ID NO: 241217 - DNA, 768 bp, Homo sapiens
  chr20:44639093-44639861
  hyper
cctccttcctctggctcttacgctacaggatccaaaactactcggaagacttgccgcgggcggtgattgacgacgcctttgcccgcgccttcgcactgtggagcgcggtgacgccgctcaccttcactcgcgtgtacagccgggacgcagacatcgtcatccagtttggtgtcgcgggtgagaacgtgaggagggaaaatccaagagacctgggcggggtcagggaagggaggaccacggagagcgtggaggcagcagtggccccggcttcctcttgcctgcccgcgctgccctggcttatacggcccctcctgccagacagtgcacagggccagggcgccaggctgggagagcttcgcgcaggcgggatttcagcccgcacttatttcggagcccttgccttgggcagcgcacaatctgcgcagcagtactcggctaaccctcttcctctcgacctgtttcttcagagcacggagacgggtatcccttcgacgggaaggacgggctcctggcacacgcctttcctcctggccccggcattcagggagacgcccatttcgacgatgacgagttgtggtccctgggcaagggcgtcggtgagattctgagtcctcctggcccctgattcccttcattctctcccactcatcacccgccgccctaactccggtcccccctcctcctgcagtggttccaactcggtttggaaacgcagatggcgcggcctgccacttccccttcatcttcgagggccgctcctactctgcc

SEQ ID NO: 241218 - DNA, 195 bp, Homo sapiens
  chr20:44642199-44642394
  hyper
gggagggggctttgcggaggggctgcccgtcccttcccgcccactggccctgtgtccaaggcttagagcccgtcctttccctcctcgctttctcaggaagtactggcgattctctgagggcagggggagccggccgcagggccccttccttatcgccgacaagtggcccgcgctgccccgcaagctggactcggt

SEQ ID NO: 241219 - DNA, 232 bp, Homo sapiens
  chr20:44650232-44650464
  hyper
ttcaggaacccttcgcacagcgggcactaggaccctgcgcggcgccgcgtctcgcggggggcgggcgggcggagggggttgggggatccgctctttctccctcctagagcctggttgcagccacttgtgcgatcccggaccttgccgcggccgcctggctcctttccgcgccatgagccgcaggttcacggtcacctcgctgccccccgcagggcccgccagaagccctgac

SEQ ID NO: 241220 - DNA, 189 bp, Homo sapiens
  chr20:44650688-44650877
  hyper
ccggggccgcggaacgcaaagtgtggagggggaggggccaaacgcgaggtgggcgtggccacgagggaaaggggtggggccagggaaggggtttggacggaggcgaagggggcgggtctggtgatggaaaggccggggtcaaggtggagagtaggccgtagggcactaaaggggcggggacatctcgag

SEQ ID NO: 241221 - DNA, 169 bp, Homo sapiens
  chr20:44651084-44651253
  hyper
tgagtcagggttgccgaggcaggtgccaggtcagcgggtcctcggtgcctggcggatcctccaatcctctagctccctggaggcttagcggacagcgactggggatcccgggaaggagacgggaggcagggaagttagtatggatcctgggcagcgagattcagggagg

SEQ ID NO: 241222 - DNA, 679 bp, Homo sapiens
  chr20:44657694-44658373
  hyper
cttctcttctctctccctcccgctctccccccaaaaccccgccagtggctcacgcctcctgcatacgggatgaggtgagcagcgccgctgctgagagggggcgcgcgcgggtgtgagcgtgtgtccgtgtgcgagtgtgtgtgcgccgggcgggcgggcactgcagcttcttcctccgtggagcggagagcgagacagagctacagcgaacgagagagcggcgaaggcgggtagaggggcgcgggcgaggcggcgcagccatccccggaccaggggccgcgccgccaccatgctaaacaacctgacggactgcgaggacggcgatgggggagccaacccgggtaagctgtggtccgggggcggcgggggagggggcagcgaggagaggaggcagctctggggttagaggcggagcgggggccacctccttcagagaggaggctgggactgacccgggcggtgggcgccagttgcagcctggagctcagctccattggaatgctccgggcgctgtccaaggtgctggaatgcgccgcgcccgggggcagagctgcgggccgggggattatcgctgcccacggcttcgggctgacttgggttagctaaaccgaggaggcggtgggaaggggatagaagacctagaatgggctgatgtggagctcgacggcgggaggagggc

SEQ ID NO: 241223 - DNA, 244 bp, Homo sapiens
  chr20:44658973-44659217
  hyper
tgggtgcggagactcgcaaggagccgaggggcttgggacaagtcctttcgctgctcccgctctcccccgccctcctccgcggcttccttgctccgaggtcttggggccagccaccccctcaggctcccaggccccccgccgcccccgagcggtctcagccatccatcacggctgtcagccacccccaccccccactctccagcggcgctgcgtcccctgcgcactagcgcgcctcccgcgcctg

SEQ ID NO: 241224 - DNA, 322 bp, Homo sapiens
  chr20:44660335-44660657
  hyper
tagcctgcgccgctcgcctgtttcctccccgggagctctggccgccgcagcttaattgaaagccgattcgggttgagagctcccagggggcgggggcggggagggctcagcctcagtctggccctgcctctcgcgcgcgcgccgctcggcgctcccgccatcacccttactccttggctccggggaatcagggcgagtttccccttagctgttctggtcctttgagaactcggaagctcattccccatccccctcaaccagtgcgcctggcgttcagggaggggacgaaatcagccctggctgacaagtcccgggagcctgg

SEQ ID NO: 241225 - DNA, 191 bp, Homo sapiens; identical to SEQ ID NO: 205823
  chr20:44669700-44669891
  hyper

SEQ ID NO: 241226 - DNA, 390 bp, Homo sapiens
  chr20:44686017-44686407
  hyper
agctgagctgttcctgcctccggatcagcacctcggacagggacacgggcgcgagaggtcccctggcagccgagcgcgaccccaatttcgtcgggagggaaggagaccgggtctttctccttgaccggctctcagacatggagtttctcgaggtcctcacagagcacctggaccgggtgatgctggtccgcggcggcggccgcgaggtcatcaccatctactcctgagaaccaggacctgccacccgggcccgagcgcgcccggcccgcggctccggagccctcgccgcgccccccgccgctgtcaccgtttacatacagaccctgtgcccgtgtcctggccccttaccccgctgcctgaagcccggaggccacgcctgttggggctgat

SEQ ID NO: 241227 - DNA, 428 bp, Homo sapiens
  chr20:44686437-44686865
  hyper
agagctcctcagtgccagtttggcccctgggtcttcgctgccctttttctaagcccggcctcgtctcgccggaggagacgctgcaataaaggttgggagaaggcgcggaaaggagaggagctggggccttggggacccccaggtagtccatgcggcccattcctccccttcccactcccgccgcggtcctcgctctgcgctcctccggcgctgctccctggctcccggcggcccggaggcccgcggggtgggaaggccgcgcttgccgtctccgccgccccttctcgccgagccgtggggcgcgggcggccgagcctatacatagtgtacaggagacatcgcgtgtatttttaacgtccccatatttatgtgactagaagcgcaacagacttctcgccatagtcgagctctcccgctgggggcactgc

SEQ ID NO: 241228 - DNA, 319 bp, Homo sapiens
  chr20:44718496-44718815
  hyper
ggcccgccgctgccgcctccgcgtcggcccacctgcccgccgtaggacaaaggcgccaccaaccgaccggcgcgggcacgaggcaatggcggccgggcggagagtggagatgggggcagagggcgcgcacgtagcggcaggcgcggcactgtcgcaagaccgcgcgtgtttacggcagggctgagttggggcgtcgatctccttggcaatgagggcccgggaagtggctctcgggcgggagttgagaacgcagggagttgcctagcaacagcgtcctaggctgaggatgggccccacggtggtcgcctcagcccccgcc

SEQ ID NO: 241229 - DNA, 91 bp, Homo sapiens
  chr20:44746474-44746565
  hyper
cagctgtggccttcccgttttctgcgtggtggtgtggggggaacttcctcaggcctctccgcagtggagcctctttcggttctgccaggat

SEQ ID NO: 241230 - DNA, 43 bp, Homo sapiens
  chr20:44802976-44803019
  hyper
ggaggaggaatggaagagtccgctcctagcaagtcccccctcc

SEQ ID NO: 241231 - DNA, 86 bp, Homo sapiens
  chr20:44803379-44803465
  hyper
atgaagtccctgaacactgagaagtctggctcggggctcggcggcccctgcggcagcgagtggcgctcggagggcaggtgggcctg

SEQ ID NO: 241232 - DNA, 292 bp, Homo sapiens
  chr20:44875182-44875474
  hyper
gttgctttgagggtgggtgtcgtgagaaggttcggggagaggtgggccagggttgccaatgggggcagggccgcggaaggagctgtttgtgtggggccttggcgacaaccgcggggcccagcggttcctgtgggtgctgacaggagcctggcggtgagtgatggaggaggcggttgtaaaataggttaccgtcgggcgcccggggttcactctgcggatggtgctgttgctaagctacctttagaattcgacaaggacggatgctccgagcggctccctggggtggggggaa

SEQ ID NO: 241233 - DNA, 629 bp, Homo sapiens
  chr20:44879679-44880308
  hyper
ttgcccacatacaggggctccgtgcccgtgtactcctctaccacgaagaactggttccacacccagccgcgtttgacgcggccggctcccagcgcgccgtcctgccgagctccgggcgccgacggcgagggtgtgcccgctgcccacaggcgccccagcagcgtcggcggcggcggcagcagcagcagcagcagtagcgcgggggacagcgcgactcccgcccggagccccctaccttcgggcctcggcctcatccttggcctgcgcggggctggggcccaggagcatggacgagaggcaccagggcgccgctgcttggtcgcacaacgatgcggcgccgtgtcacatggtggcctcagcgcggccgccgggatgtcgcccccgacggggcacccggacgggcccgcggccctgaacgccgcccagccgcgggggtacccggctggagggggagggggcgcggccgcatccggggcatggacagcccccggggtgcccgcccgcgcccccgtcgccgcgtcgcgtgcggatcaccaggcagcacctggacagctccagagtcggggaagcgccatggttcctgcgcagaaaggatgcgggttggggccggcagatcctgccaggactag

SEQ ID NO: 241234 - DNA, 44 bp, Homo sapiens
  chr20:44935840-44935884
  hyper
caaacagcagcttctctgcccgccacaagggggtgccctgcacc

SEQ ID NO: 241235 - DNA, 40 bp, Homo sapiens
  chr20:44937684-44937724
  hyper
gtcactgtgcattgaggtggacaccgaccaggtgcccagg

SEQ ID NO: 241236 - DNA, 71 bp, Homo sapiens
  chr20:45035361-45035432
  hyper
actcaagaaggggcgggcacagctgccggtagaggggaaaaacgccggccgtccccgcccccctagtggag

SEQ ID NO: 241237 - DNA, 409 bp, Homo sapiens
  chr20:45141942-45142351
  hyper
tgccctggctgcctcgcctcccgaccacaggaaaccctccctccaaagacagggagagcgcgcgtccaccctccgcagacccgaggcccgctccgcccggccccaccgttccctccgacgcccgagtgctcagagctcgccgccagcccttcctataggttgtgggtgcacccgcttcgcctccagttcgcaccaggtccaagtctcggcgggaccagggattcacgggctgcaggaccctcacccggaagagcctggcgaaccggaagggcgtccaggtaaaaaacaggaacagcacatgcgcagaaaggcccccgggccgcctttcccggggctctcccgggccccccgccggctttccggaccacagtccccagaaggcgtcgcggccaccgccctaccctgaggg

SEQ ID NO: 241238 - DNA, 304 bp, Homo sapiens
  chr20:45279920-45280224
  hyper
cgggggcgcacaggcggaggaggcgttaccttgggcgggagggcgaagaccaccggcagcagcgcgagcggcgtgaacagcagcaccagcagccgccgcgcgctccacaccttcttggccgctgctgccagcgccgccatcagcgcgatcgcctggcggtacgggccggcccgggactgccccgcctggccccggcgccggcttaaagcctgggggagggtcggggaggggactgcgctggggaacccgccctctccctgctcctcctggaggaaaagggtggtgcctgcgcccctgggaccgg

SEQ ID NO: 241239 - DNA, 142 bp, Homo sapiens
  chr20:45440169-45440311
  hyper
gggctcgcgggggccacaatcggcccagtgttcgcagcccccaggttggacagggggccgggcacacctgcgcggcgcagatggcgccggggggcggacagcaggcaccaaagtctcctccggggactgggaggcgggaaga

SEQ ID NO: 241240 - DNA, 32 bp, Homo sapiens
  chr20:45523120-45523152
  hyper
gtcctctccgagccgtcgttcctttcacaggg

SEQ ID NO: 241241 - DNA, 56 bp, Homo sapiens
  chr20:45524052-45524108
  hyper
taaccaagaagcagagccaaccgctggaatcccggcttggggctggaacggcccgc

SEQ ID NO: 241242 - DNA, 447 bp, Homo sapiens
  chr20:45524288-45524735
  hyper
gttgtaatgggagaaagtgggaaatggaattgttttttagtcatgaagtctggaggttaaacggccgtgctggcccaggctccttcaatatattcctgcctgcctcccccccagcaataaatagtttataagctcaaggaatactaggaaagcgtgactggtgaacgtactcctatcgcaaaagactcagtgcgcttttctcagctgttgaactggaagcgccttttgcagtgcgaggttcctgcttccccgaagccgaggctgagagttgacagcgtgcaccctgccgcggtctgaattctttttaaaaagcaagaccgatgctgcgtttttatggatacccttttcttttctttccccttccccgaaatgctatgtaatcttcaattactttttaaaatataacgtggaggtataaatcaccccggtaagaggtaccttttaatt

SEQ ID NO: 241243 - DNA, 186 bp, Homo sapiens
  chr20:45825083-45825269
  hyper
attcgcgttaaaaacgatggaccatttttccctaatattttgagccccatgatgcaagctcagcgcccgagaagctgtgctcatctgcaaccaccagggggcagtgcggccccacagctgacccagccgcccgcaggtgccacttgaagtgggacccggaaagagcaataacgcaagccttccgag

SEQ ID NO: 241244 - DNA, 149 bp, Homo sapiens; identical to SEQ ID NO: 205829
  chr20:45985481-45985630
  hyper

SEQ ID NO: 241245 - DNA, 473 bp, Homo sapiens
  chr20:46130570-46131043
  hyper
cggtagtgctgggcgtggcctcgggactacatatcccagtggcccccgtgcggcgactttagctgctgctgtctcagccgctccacagcgacggcagcggctgcggcttagtcggtggcggccggcggcggctgcgggctgagcggcgagtttccgatttaaagctgagctgcgaggaaaatggcggcgggaggtgagtggagataaaggaggaggcggtggcgggcgagggggtggagtgcgaggcggagggaagaggggcgagttccccaggctgcgagagccagcggcttcagatctgccaaggcactgaggggcgcgccggccgggggacgcgctgaggtagtttcggggtgtcggggccgcgccgcttcccctcagcccggggggcggcccgcggcggtaggagctgagacgaagctgggtggcagtccgcttggggatccgagggggtccccgcgcggaggggtcac

SEQ ID NO: 241246 - DNA, 921 bp, Homo sapiens
  chr20:46413279-46414200
  hyper
cttccaccccgagacggcatctctctaccctgctgccctcccagtgaaccggcagcttctggcgcgcaggagccagatcctgttcagccgcgtttccctggaacagaacgcggtgcccggcacgagggggtgctccagaaatgcttgtagaacgaatgaacgaactactataaggaatgtttggaaaagtgcactcctagaattcaccgctagacttttgaaaccccgaggagccggggaggggagcatccctccgccaggcgatggaaactcgttctgccctggcctgggaggaagtctgccttttcgatcctgtttgtcctttcggtgtctgcgagtttccaaccactctgaagatccggcccactgcttccccgagtcctgcccggacaagccccacgtgggctggcatctaccggtcccttgggtctaaaccctaagggtcaacaaggccatgcccctgcggatggccggcccaggcgcgctcccctacccggggccgcctgtgctcggtgtgccgtgtccgcgggtcaggggcgcggcgggaagtcctcgcccgcccgccagccagcggggtcaaacaggtcatccctctgcggacggccggcgccggagcctccctcccgcccgcccggacccacctccgcaagcagcgctggggctggagccgggcggtccggaccagccccggctcacctgggcggcgctcgcggccgggctcacgccggggaaggctccggccgccgcgagcccccgcccgagccccgcgtcccccagccacccacctgccccccacgccccactcaccagcgcgcacggccccggcaacctcacccggagcggggcgccgccgccgcctctgccgcagcccggccgggccgctgggcgcaggggactccgcgccgccgctgccgctgccgc

SEQ ID NO: 241247 - DNA, 1189 bp, Homo sapiens
  chr20:46414405-46415594
  hyper
tggcacggcgctaccgccccccgctcgcctgcccgccggcctccacgcaggggaggcgggcgcgctccggggcggggagcgtcgggccgggagccgcggacggctggggcccggggcgcggggggcccagccgcggtgccctcctcgagccctccgcgcgctagcgcttttacctccggcctgggggacgcgcggcccgcgacccggccctgcctgtccccggcgcacggccccggccccggccccgaagtccagctccggacggggcagtgaacgcagagctggggtcccggcggctctcgacctcccgatgcctccggactcggctggccgcgctcccggcgccgagcgcgcaccctcgccgggacacacagacgcacactcactcgacacactctcgctcctgctcgccctcggcggagagttgaaacagatgtgggattcgcccaggagctggaaacgagggagggaagcgagccagagccttgtgtgcacgtgtgtgtgcgtaacacacaaaccagggggcatcgctaataaatcaaatatcgtgataaattcaggagggccatcgatcaggtccacttggctggaaacgacgtgaatctgcctcttttccgctttcttcttctcctctctcggagctggagggagccaaatgttccgcggggagtgcgacagccccggccgggcgctcccctcgtaatgacacgttaataaatgttttcttttatctgctttcacaggactcgccccggtctgcaaacactcgactgcctttgccgaaagcctcgcgctcgcctccagccacacacatttgccattggagaggccggcgccggccgcgacccgcagctcaatcgcagggcaaaccgagctgcctgtgcgcgcccgagaactccccgagaaattaacttcggctcaagtgaaaatagcagctgttgtccagaaatggcccgggagtagcatagaaaggagaaaccggcttcctccgaaaggggaggaattggactcaagggggtgctgtctaccgtggtttccgctgtccctcgcgccacagaagaggccggagggggaccggcctgacgcgggtgggcaaagagcgggcagagaactcaccagcagctgcagaaaacacagccgagttgctagctaaggggaaacagacgccgctgtgggaaagcacttgtaa

SEQ ID NO: 241248 - DNA, 165 bp, Homo sapiens
  chr20:47662583-47662748
  hyper
tgaacacctcctacgtgccaagccctgacatcaaaatgggtcagaagccagcagccgctcgctgaatctgtgttcctctttggaaaacgagaaccgtgaagcctgctggcatggtcagagccaaagagcattgtcacttgtgagatcagcgcagaaacagagcgg

SEQ ID NO: 241249 - DNA, 31 bp, Homo sapiens
  chr20:47805122-47805153
  hyper
ctggtgggagtttcgcgctgcctgctggact

SEQ ID NO: 241250 - DNA, 353 bp, Homo sapiens
  chr20:47835790-47836143
  hyper
tgatggcgtcacacgaaaccaaccacgccccatattgccgcatgcgcactcttaagaggtcgaacggggagggcggcaggggctctggaacggaagtgacgcatggtacttgcgcaaagacgacgaggaggctgcgaaaagttaagggccggaccgcaggctgtgctcgcttccggaagtggcttctgcgacaacatgcttgcggacctcggcttaatcggaaccataggcgaggatgacgaggtgccggtggagcccgagtctgactccggggacgaggaagaggaggtatgagcacggttctggtctttgggtttccttgactgcttcccttcctcgcgattcctcaggtc

SEQ ID NO: 241251 - DNA, 424 bp, Homo sapiens
  chr20:47895001-47895425
  hyper
gggcggggctagacgcggcctggacaactactagagcgcctcgggctgtgctgctcgagactacatttcccagagcgacgcgcgcggagcgggcgggaaagagagcgtttcgggtccagtgcgcaggtgcgaaagccatctttggttatataagggaggttcaggaagccattcgttctttcgcgtctgcggtgcccggagtgtggtacttctcctagttgcagtcaggcttcatacgctattgtcctgcccgtaagttcccgttttgtgtgtggtgagtggaaactccatgttcttcgttggagacctctggtcctcccttcccttctttgtgccgtcgtctctgcggccagccctaatctccttctcgtggcttctccgtctctgaccccaaataggccttaagggcgtgggagaaatgagt

SEQ ID NO: 241252 - DNA, 83 bp, Homo sapiens
  chr20:47935775-47935858
  hyper
aaaatatgtcctaaatatcgcatgggatatacttatactaaaaaattatttgttgtttttctgaaattgaaatctaactcgga

SEQ ID NO: 241253 - DNA, 905 bp, Homo sapiens
  chr20:48099000-48099905
  hyper
gtcatgcccgccggcatcgctgatccggccgcccccgccccccctgcccccccaggccgctgtcactcgacggcaaggcccgctgctgcgggggaggggggcagggagcgctgtgggctgctgggggtgcagggggccccgcgggcgcgcgtcacggccgtcttctcacctccatcccgacggctgcgaggcagaaagcgaaagcggacgcgggtcagcaaacggggagctgggcatgctgtccccccgccccccacctctccaccaggctcccagccggccttgaccttcccccgcgcttaagcggctcagtggggtaggacggatggtcgctgtccctcccgccggtgctgaagtccgccgcaccccatggatggagggaggggccgcccctcggggcggggagagggccccaagagatgcccctggagcccgggaggccccaccctgggcttctgcggcccaggcgcgacccagccgcccggggcgctgtccgccccttagagtgctgaaactctcttcattatgggtctcccgatcgagtcccgaacctggccccgccatggggagagagggggagctgcatgaaaactttctttctttatctttttctttctttcttcttcttctttccttcttttttttttttttaacgagttctcttcttttccttccccttctcgagataatcaagattttgggggtgggggaatggcagcgggcttttttccaaatcttaaaagatttgggggaattccgggggttccaggtgcccacctgtccgaggtcacaacagacggggtgtgcacaacagcccctctgtcctggagcgacccctcttcccaaacactggagcatctcctgagattgctccagcgacaaggtgagccgcgaggaggaaaagc

SEQ ID NO: 241254 - DNA, 347 bp, Homo sapiens
  chr20:48184307-48184654
  hyper
actcggacttgtcgcggtgggcgattcgccccgggggacctaccggaccccgcaccttcccaccttgcaccttcttggcagggggagcacggcctggccccctcacccacgtgcggggccccgggactcccacctccgagggtctcgccttgcccgggatactggagcgggactcgggccgggccggccgcgggctccgagacccttgggctgcagcccgggcgggagccgccccctttgtctggcggggccgagcggagcaggacactcaccgcgtgcggcggcggctcagtagcagcagcagcaacagtgcggccaggaggccgaggagcgcggcccaagccatc

SEQ ID NO: 241255 - DNA, 164 bp, Homo sapiens; identical to SEQ ID NO: 205838
  chr20:48330532-48330696
  hyper

SEQ ID NO: 241256 - DNA, 64 bp, Homo sapiens
  chr20:48599639-48599703
  hyper
ggaagcctaactacagcgagctgcaggactctaatccaggtgcgttggaggggttctgggctcc

SEQ ID NO: 241257 - DNA, 131 bp, Homo sapiens; identical to SEQ ID NO: 205840
  chr20:48729833-48729964
  hyper

SEQ ID NO: 241258 - DNA, 433 bp, Homo sapiens
  chr20:48788887-48789320
  hyper
gagggtctgtcgggcgggggcgggggctctttgccttccgatccaagctccgccctctgcagctctgctctgtgtatcccagagctgaccctgcggcgcctttcccaggctcgcgtccggtgagttcctattggccaacgggaggccccggtcggggagcgccccgggacaggcccctgtgcctcccgctttgcggagtgacgcaggccctgggctacagcaaccttaccagcccctccagcttagaggtggcagtggctctctgcggctgcgatttctttctcggagcgtcctccccatcccgttcggcctctgcctccaccgtcgtctctgtaacccgttccctgtgggagagtctctgttgcggtgttcaggggtttcggttttctggctgaacagtgattaacgcgagggaaggcgctgacggcaaggt

SEQ ID NO: 241259 - DNA, 176 bp, Homo sapiens
  chr20:49410874-49411050
  hyper
aggaagacgaggaccgtcacactcggccttccctaaattccaggaccctccgcccgatgcaaactagatgctttagtaggatgggaacgggtggggggcgggcggctttgggcttcctctaagctagcgcctctctaacccggacgcccgttagaatcacccggggagttttagaa

SEQ ID NO: 241260 - DNA, 130 bp, Homo sapiens
  chr20:49435016-49435146
  hyper
agtgcttcctgaggcggccatcttgatctcgtccttccctcgagatggtttttattccgcagaggagccaggagtggaccacaaggtggcactctcgggcaccgatgcagggagccgttcagcggggacg

SEQ ID NO: 241261 - DNA, 139 bp, Homo sapiens
  chr20:49575067-49575206
  hyper
ctgagccagatgccggaagcggaattacgtaatgtggcgcggaaaaggacgggtcggaccgtaccaaattcggaagcgggggatgacctgtgtgattgatcgctagttcttctagggccattgcgtggttcaattagaa

SEQ ID NO: 241262 - DNA, 292 bp, Homo sapiens
  chr20:49575790-49576082
  hyper
gccttttcggccgccgcctcgctgcgccgcctcaattcggcagtggaatgcgtgccgtacactcaggcccttacgccagccactgccctagacctggtccgccgatatgatgtggtggctgactgctcggacaacgtgcccactcgctacctggttaatgacgcatgtgtgctggcgggtcggcccctcgtgtctgccagtgccttgcgcttcgagggccaaatcacagtctaccattatgacggtggcccttgctatcgctgcatattcccccaaccacccccagcggaga

SEQ ID NO: 241263 - DNA, 79 bp, Homo sapiens
  chr20:49639681-49639760
  hyper
cgaggcaggaggcgggacggagggaggggactgagcgcggggcggggagaaggggcgggcagccgaaagcgcagcgcct

SEQ ID NO: 241264 - DNA, 109 bp, Homo sapiens
  chr20:49708569-49708678
  hyper
ctcattggagcttttgcttccgctcgttttcccctttgcctcctttcagctgccccttcccgaagccgaatatcacctgattttaggcgctggggataaaggagctgtg

SEQ ID NO: 241265 - DNA, 59 bp, Homo sapiens
  chr20:49836919-49836978
  hyper
cgtcctgcaggtggcgcgcctgagcccgtgcacggcagcctctccggaaggtgaagcac

SEQ ID NO: 241266 - DNA, 746 bp, Homo sapiens
  chr20:50157673-50158419
  hyper
gacaccgatggaagcgaaaacttcattatctgcctaacacagtgtttgtgggaaacatcaggccaccaagcctccttgacaggcttcctccacgagccagtcagcacaagcccttcctacacactagatggaggcaagcccagagtgcgtctggaagctactaacaggcctgccactgagccttcaacaagcattggctgggctgggctgggctgtcaaaatcaggaagcctggttgggttttttgttttttccaagacaacctgctaaccagaaatacacagtgaggttgggcgtgtggccgcttccccctcctcctcctcctccctctaacgaatgctcctgttaaacacgtgaagtgacagataagcattgggcccagcccggggaagtccccagcccccagcaactgagggcagttggaggcacagagtgacaaagttcaggcagaaagagcctgtgtccttctgaatccatgctgcagctgcccctcaccctaccccatcccaccacatccattaggactaagcgtagaagatcacttaatatagctcagaccaatcctcttgtgagtggtaagtgatgggttcagcagcagaacccagggaggaaatgggccggccttataataccaaaggttttaaccctctccagcatcagacagacaacctcttcctcagtttcaacacaaagtccccgtcaaccactgctcacaggaggtgatgggagctgcgtggcctcacttca

SEQ ID NO: 241267 - DNA, 976 bp, Homo sapiens
  chr20:50158713-50159689
  hyper
aagagggagccgaccgccccctaagggtggcaggggccactgacgcctcccctccctggcacctgggtaggggcaccctccctccaggccccttaggaagggggacggctggagccaagaggactcctgtgcccagtccccaggcctgagcccctggcgggctcaggggccaggccaggggtagcctccaccgaccttcgttcggattcaaatactcatagtcgaagaggatggagaagtcaagctcgtcttgggggctgcccccaggctcgtggcctggggcgtccccgccgtcgggttggggctgccgctcgggggcgttcatggcgcgcagggcgggaaggctgcggggccgggggcgagggcgggcgcggctggctctgggacccctcgcagtggggctggcggaggcggctcgagcggcggggtccctttcctcgtagggacgcacgccgggtccggggacggcgcgcctggcgcagcgggtcctggacgcgcccggggaagctgagcggcggcggcgacggcggcgcgagcttcctgctccggaggcacctgttgcagcccggggaggcggggggggggggggcgtggaggcggggacagggcggccaggccggcgggggcggggccgccaccaggggaccggaggggaggggcgcgcggcctgggctggccggtgccgggaggaaggaggctgtccgcggacctgaccacactgtcccgggccaccgctgggcgctggggcggccgctgtctcccaccctccacgggtgagtgcgacacgcgctgcgcgaaccagggtctagacaagaaagctgccgccactaggacttttgccctaagggacccactggccccacactttttcctgcttttcttctccatggggtggaagggggtatccacccccttctattgcagacccgtgtctccaggcgtctccgtgtgcccacgggggcggcatgattttcac

SEQ ID NO: 241268 - DNA, 382 bp, Homo sapiens
  chr20:50179176-50179558
  hyper
cacggggacttggcgcgtgtttggaaagggggatctgtttgtatcgaccagcagccgaggggacgccgtcttctctaccgcgtgcccgcggggctgccctggccgaggagcctcggagcgacccgggagctgcgcgcctcccggctcccggctcggcggagtcggcgcggctccgcgatccggcttactccagaggcaacgcgacttccttccccgcgctccgtgtttataggctttcaatgcagtaaaataacgggattccctcactgtttcctcctgtttatccagcgccatggaaaccactggatcccgtccatctccaaaactaagggctttcctgcaaacttcacactcaggaatccatgacgtcgcctcctccgcg

SEQ ID NO: 241269 - DNA, 852 bp, Homo sapiens
  chr20:50384030-50384882
  hyper
gaacaggaagacggcgaggcgcaaaataccaacccgtcccctcttcccaaatgcagaaaaacccttgcctgttccgcgcctaagctgccctcggggtctcctactgcgggaagggcacagcaggtggcagcccctgtcccagccgtgggattccttccccgaaattgtggggggagaacacaaggggtagtgtcaccaagcggccagtaggagaccctcccaccctcctgcgactgctggttcgggtccaccccgggcggagggggaaggggccaccggagcgcaggtggtctcggcgcagcctcctggggctgggacccaggggcgctgatggggtaccccgaggcgtaggccgcgcccccctaaaagctgagcatatctgggctcccgagtaatgctccaagcgcagagctcggtgtgacactgaccaaattgttacctcagatattaattacggacagatattaattacggaacaataaaacggtgagaaagcacggctgatccgaattccgcgagtgtgtaaacagcactggggcgggcccggcttctcggggtttctaaaggaaggtgggcaaggaggcccaggcaaccgggcgctcgaaccccaaagggccggcatcaggctaggtgccgcccggggctgaagcgcagggaccccctccccacctccccgcctccccagccctgccccaggctcatggcgccgggcgcggcgcgcggccaacctgtcaggcccggccaggctggcccgagcgccgggctccgggaggcgcggacaaaggaaaacacgggcccaggcccactcacccggcgcggggcctgctgtccatccgcttcttctggcgcacc

SEQ ID NO: 241270 - DNA, 196 bp, Homo sapiens
  chr20:50385122-50385318
  hyper
ccatgggcccgagctccgcgctgcgcccgctcgctccgcgccgcgccgcgcctgccacggggggcggccgggccgtgtccgcgccgccgcgaccgctgcagtgtccccgcccccggcccgcgcccgcgccccccacgcgcgcccacccggccacgcgccccccgcccacgcccgccgtgcgcgcaccctgccaccg

SEQ ID NO: 241271 - DNA, 1158 bp, Homo sapiens
  chr20:50417183-50418341
  hyper
ccggaggaagcaggcgggctgagggttaacccttttgttccaggtgggccaggccacgaagccttcacgctcccctcaacccccaccccaccccgcccccaaccaaggcacaaagagagtccctccaggcgcctgggacctcgggtgcgcgctgcgctgaccacccggcgccccgaaaacgcccagccatcccctccgtcaagccgatccttttaatttgccctggaaaaatgttaaacggggaattctattgacgtattataaacttgggaaatgtattacattcagtctccgacaaaaaggcggggatacggaagccaaaaagtggcgaccgtcttctcgggaaaccccgggtatcagagatggtctctgagagtcctccggggttgccgcgcacacccgtctgctgcagggaaattagaaagcaggcggggagcggagcgacgaacaaggccggagaggaggctacaaatcccccctccccccacgcgcacgctaaaaacttatcaggcgacaatttggcgggccgggatggagacgagatagtggaaaaccgcctcgctcctaaaacctccgcggtgaagtgatgaagtgggaacagagttggccccgccgttcctggcgcggctggggtcccgaactcccctcgatctgggaaacgctggccgcggaagcgtgggccaggtcagccgcgggagttcgctctggccccccacctctcccctttcacacccaagcgcaaatgtggaaagccgagcgctccagaaaagccacgcaaaacgggaggccggtgcaccccagtggggctgccgcgcgcccgccaccccggccactgggggctcgcaccctcgggcttgccgcggttatttttaggaagtcggaaatcaaagatggctggaggtcaggccccgaaaggttagggcgaagatcggcaggcggcgcagcccgggcagaaaaggcgaaatccagaaaagaaaaaaattttaaagggaaacattgagccctcctcccccacctctctgggccctccaatcccctgcgcagcgcgggtggcccgcaccccagctcctgagggtggggagaggtcgcgccccctccccccacttggcccgggaggggcgcgtgcaacagatcgtcctcctccggggggtcttccag

SEQ ID NO: 241272 - DNA, 1598 bp, Homo sapiens
  chr20:50720432-50722030
  hyper
actcccctccaccaccacctcgggaagttgtggtcaaaacccaccagaccgactgtggtggaagttgatgcggaagctggagagcccgcggctctggaggggtgagccgccccggagaggggacccatcctcctttccgcgcccggaaagagcgggggagaagaggaagtccagttacaactcctttcctcagccccttaaaggaaaggtatcagctaaccacggggagctggcagcctaagagaaagtaggaacctacaatctcttaatctaagcacaagataagcaaaaagggaagcgccttagaaatgcagattccccaaccccacccctgagattccagtggaggcgggggatggggggatccctaacttgcaggaagaatttggcgagcgagaaaaggtcccctcccgcaggctcttctgaagcggaggatcccgggacgagaaatgctgcccggggggcttaaggtagccgacgatctccttgctacatcctgtgtccacgtggcagccgaggagggggtgtgggggccgcctgttaagtgcgacagcatcactgctctatccccaccacggctcccacttcgctcagataaaatgcagagctcttaccaaggctcacggccgtcccccgccccccaccgtctgcccccatcacctctcgggcctccggtgacctctcgggctacagcagcgctgacgccctgggtccctgcgcttctgttccctcggcctggaatgctcttcccccgggtacctgcacagctcgctccctcccatccttcgggtcttcgctcgaacgtccgctcctcggtgaggccttccctggacaacgcatttgaaacgtaaccccaaggcaagaagccaccttccaggcgcgcagccgaagcccagtgccaaggaggccggagactcgggtgcccgcgcatcccgaaaacagcctctgaggggtcctctgagcatccttccagcgtgtttgggaggcaaactcgttgactagctcttgagaggagtggctagaggaatccaggcggggaaggggacggtggactccaggagagtgtaatttacaaaggcggggggcggggacgcccaggtccgagtcccaggactctgcgccggacgcttcgcccgccctttcaggtcccctgcccggtcctcgtacccgcgcgggtccggagaacctctgagcaccggcccccagcccccgggcggggctccagcggcgctactcacccggctcccccgccacctgcggggccacctccgcacactcccggcgcgcaggccgcggctcctcggagttgaggtgctggggcttggcctgcttgcgccgcgacatggcgcgaggaccgggctccccgcgcgtccctaggagtggcctacttcacacaacgaattcccggagttcggaaattaccccccttcggccggaacgcgcatgtcccggcaattctgctcatcagccgagcagggcgatttatcaagagtcctgacggctgattggcctggagccaagaccccaggagtcccgcggacttgcggtccgctcccgggcagcccgcgccacctgggagctcgttagaaatgcagact

SEQ ID NO: 241273 - DNA, 120 bp, Homo sapiens
  chr20:50722090-50722210
  hyper
attcgcatgcacattaaagtttgagaaaccgtgtctgcattttaacgagatccccaggtgattcgtttgcccattaaaatttcagaagcgcagctctcctccaactttaatgtgcgcacg

SEQ ID NO: 241274 - DNA, 517 bp, Homo sapiens
  chr20:50722270-50722787
  hyper
agctcctgtatttctaacgagctcccaggtggcgctgtggctgctgcgctgcacaggctgcgcttttagattcggacttaattggtctgggctgggacctgggcactgggatgtttttttaaaaaagccgtctccctccctcaccacccccatcacacacacaggtcattctgatgtgcatccaagctgagaagcacgacctccactcctggttctcaaccctgctgcatacccaaatttaaattttaaatgaggagtgtctccaactgcagggagaaatgcagattccgaaagttctggattcaggtggccgaggccagaaatgtgtgtttttatatagcacgcgcccgctcccgccccgtgactcgggcgcaccggctcttggaccacacaggagtgcttttggggccaacccggcgccggccccgcccagcaggtgacggaggcgtggtcctcggggggttgagctaattagcgttcatgctcagactggctgggacctcgatgagacccgagg

SEQ ID NO: 241275 - DNA, 119 bp, Homo sapiens
  chr20:50808101-50808220
  hyper
cgcgcactgctcccggaaaagcacttactttgcaccgagcccgcgaagctctcgccctcgctgctcgcgttcatggccgcagactgggaggtccccggccggccgggatgccaaagtgg

SEQ ID NO: 241276 - DNA, 98 bp, Homo sapiens
  chr20:50808683-50808781
  hyper
cggggtgggtgcgcggggcgcggcgagctccggagaaacccaggttgggcgtgagcgctgggcaaatcagcaaagcgctgggcgggtcccttgccccg

SEQ ID NO: 241277 - DNA, 266 bp, Homo sapiens
  chr20:51588707-51588973
  hyper
cccggcggagagggcgcacagaggggcctgggccggcgcgccggggcccccgcccccagcccctctcccctgcgggacgctgtccctttaataggctcccgctgcctggcgctctgcggctggggagtaaatttctccctgtcatcaggtcgcggggagaggaggaggaggaggagtttgttaatgttcagtttgttcagcgggatcgatgtttgctggcatcgcctcgccctgtcttgtgtgtgtgtgcgagggtgtgtgtgtgt

SEQ ID NO: 241278 - DNA, 706 bp, Homo sapiens
  chr20:51589093-51589799
  hyper
agtgaattccagattttctgtctttccaaaacccgctcctgtcctctcgcatatcactcacagacggggatctgacagcagccacaaacctacagtgagtgatcgctctccccccggcacgaatccgccatagagatcggcgaggaggaggaggaggaggaggaagaaaagaaggaggaggtggaggaggaggtggaggaggaggaggaggagggaaagaggagaaggaagaagaagaaaaagaagaaacccactaccttcccaggattgccttttttttttccttatctttacgcgcgagtgtgcctgtggcgcgtgtgcgcccctcgtcccttccatccgaacccgggcttggatgtttaataaagaaatcaagtgtctcaacagtcaccaaaaaaaaaaaaaaccgcaaaaacaaaaccaaaaaaattccaaaagcaaaaacaaaaaagagagaggaaaaaaaattcaaaataaacaaacaaacaaacaaggcagaaccaacctctacttcaaagcagccggcacaagccacccgtgtctgccacccagagaggggggtctctggcccgtggtggaggagttgcaggggggatcgtcagggggacagaggccgagtgacgtcctaggagccaccgggcaagaggcggaggagacccagagaggccagagagacagcgggccccagcgcgcggctcggggctgg

SEQ ID NO: 241279 - DNA, 100 bp, Homo sapiens
  chr20:51589979-51590079
  hyper
gtttgcgccgggtgcccttctaataaccccgtcctctctcgccttctctggtctcccaaatcctccccttccaagctccggttgggttggggtgagctat

SEQ ID NO: 241280 - DNA, 407 bp, Homo sapiens
  chr20:52259563-52259970
  hyper
gtcttcaaaaggaacgtcactgttataaattagacaagggaagaaaaacctcatttctttgatgatttttttaaagagctttgttttcccacgcataattgttcttcctattcattatgcctttatgtagactttgctttttcctttaaagaatacacttcttatgtaatttgttttgcatttctggaatgaggaacttttctgctcatattgttgttaaaatctagacaacacgcccgtgtgatagatcaccctgagccttggaaggaaatgattcaccacaatactgtaactgaaagtcgtctaacaccagggctggaaggcaggctatgaaccgctgcattacctgcgtgcagcagcaatgggaggcagccagaggttccctcggcctgcctagctcacttcag

SEQ ID NO: 241281 - DNA, 1417 bp, Homo sapiens
  chr20:52789210-52790627
  hyper
tgccctgttgccagagagaacgcaggtgctgggtgcacagcacggcttttccgtggaccgactctaatctgtacaagagctcagggttgcgatggcacgggagaggggctttggtatccgccctacgtaagaagcttccaaccccagggaactctaactccgcctcttcacaatttccaggcgccgtcaggctcatcaggtctggccgcatgcccaggtccctcggattggactcacaggatcagcagcccgtagccttctttgcggtagtcgcgataggccttccacggtttgatctccagccgctgcgggtacgcgctctcggtgcggtacagcgcttccagcaggcatggcgagcccaggtgcaccgactcaaaggaacccaacttcatgcggaaaatcttgccatacttcttgtggtactccacctgcagccggccgggcacagcgcggtgtcagcgcgcatcctccgccgtgcccgaagcgctttccctcctcccgcctccttcctcctaggggaccggggaccctccctgcccagacgccgaagcgcaccatgcgcccgaggcgcgcatgtcggggagggtttggagcgccactgggagggcggaagagggaggagagagtcaggggcgcgaaaaggggtttaccagggtgtcgtgctgtttcttgagaccccctttccagagaatctgcagcaggctgcccagcagtggccagctggtggggcccggcagggcggccgcgttctgagtctcgccaccagctgtcagcgggcagactggcacctctcgcggctgaggggacgtgtacgccgtagatgtcaccagtctcgggggctgcctcggactgcgcagctgctgcaggaaggcggcaagcgagcggctcttgctgatgggggagctcatggcagcgggggacaccggagcgcgggaaggcaggaggatggggtggggcgaggttggtacgaggtgctagtgggagtcggggcttaacgattctgggaaaaggaagcaaagagggccagctggtgtgatggagcggggtgaggcgggacaggcagcagaaaggacctcggcgaggatgctcgacgctgcaccacgcgacagcctcagagcattggtgcctccttgcactggccgcaggggctggaagagggtggccggtgtctggggacctcttgaaaagggaaagctgggagtcctcctgttggtccgcaaggctgacctctagggtctggctggagccacggggaggtgtcaaggagggtagatgagatgctgctggcgctgcgtttcctcctgtccctctccatgttcctatgcccagggaccatgcatttatggagacagagcatgccctgggtggccaatgagcacgcagaggagggcggagtggcccccggctggccagactc

SEQ ID NO: 241282 - DNA, 1414 bp, Homo sapiens
  chr20:53091753-53093167
  hyper
tccccagacacacacgcaaaatcggcccttctcggggaaagggcaggggctgaagggggaggcggggtgggcggcggctggaaaaaagtgaaatttcctctcctcctaaaataagtcattggagcgaggagagcgagcgctatctcagtaggctgtgggcgaggtgcgggggtggcgggggcacgctccgggtccgccaggaggggagggatcggaaggggaagcggggagggaaaggtgggtgggaggcgcggggagcgttccagggcggctgctcacgggtggccgcagcccagtgctgggactcgcgcggctcctcctcttagccccccaccccttcctcctctttcctcctcctccttcctcctcctcctcctccttcttctcctccttctcggccgggaggaggcagggctggatccctcagccgccgccgctcctcctcctggcaggccggccgcggagtcagctgacgccggcgctccagcctcgcctccccgcgccgcgctctgcgctccccgaaagtggctgcaagccggccgcccactgtcagggttggggggacagagaaagtgatgtgcgccttctaaagcctcgcccagcgccgccgaagcagcttcacctctccaactttctcccaccgactgcttgtcttgaccctgccctccaccctccccagagccacttcgggtgcgcgctcttgggtaaagggggggtcaccggctgtctgggatggcttccaattttaatgacatagtgaagcaagggtacgtgaggatccggagcagacgcctcggggtgagtatcgatcctctccgtgttgctgttcgccggttcgattgtctctctcttgagccagcatccctggagggtggacggagagtccccggccgcgcgccggagaattgcgcggtggctttctcagccgaaacccgcgtctccggggctgtcactgtaaggccagcgtctaggtatgtaatggatctatctttatctcttggatgacttggctttctgatggtggccgcgtgttgggcttcagtagcccctggagcccatctactcgaaataaatatttctcggtagccatggaagttggagctgagaagcccgggcgggggtgcctgccggatgcccccggttcccctcttttcccactcgccgccaacttaacttttccgggggatggatcggctggttgagaaagaggacacgcatactcggtgtgaacgaggtcacgaaccctctgaccccagggagagatttctgccaagcgtaaggtgtctttggatccccccacctctgtcccaggtgtcgtgtcaaaggcggtgcgggctggcctctggtcggggccaacttgggtagatacttgaatctggattttccgtggttcgaagccggggtggtggatttc

SEQ ID NO: 241283 - DNA, 971 bp, Homo sapiens
  chr20:54578319-54579290
  hyper
cttgctgcctactccgaggcagcggcagtgccagcggtgcctggcacacgaacagtggaacctgcaggcgagatctgacccccggctctgcccccgccctccgcggccacctgcccgatctctgaagagtgtggaagcccggggctctcttgggagagaagcttctctacctgggagaaacaaatcaaacatttatcctgttccgcaaaggtacccagggagcagcctcagcggcacccgcagaggagtctgagcaagggcaccaagatctggccaagagataacgacgtccagggaccaggtgcccttcggctcccgccgacctgttgctcgaaacttgccctgagctctcgctgccgggctctgggctcccaagcctctcccccgccgccgcagcagcctcttttaggggcccggaagaaatgggagccggggctggtgagaggggtaggaagagggacggtagaagtttcagacccaggcatatttgggaaggcgagtgctttacatgattccccatttcccaatcggaccagcttagcctgggcaggcagcctcgtgctgaggtgcctggagaccgcccaccccctaggtgctcgcttccccccgggtctgacctgatcgaagtaaatgatgcgcgtcttgttgctcatctcggatggctcgtggttggtgctccgcaccgccgagaaggcgaccttggagttggccgcccggaccgatatccccagcggggaggaagaggagcccttggagtccgtggccgggttcgagtcgcacaccaccagacacttgccctccagcacgatgggctccgtgtcgttctgtgcccagacgggcagccccggcagcgtgaggaccagcagcacggccggcaccgcggacagcgcccggcgcccggagcccatggtgagccgtgtgggcagccgcagccggctggcgctggtgctcgcccgcgtcgcctcctaccc

SEQ ID NO: 241284 - DNA, 849 bp, Homo sapiens
  chr20:54579755-54580604
  hyper
caggctgagaagaacgcgaggctgtgttcatggccaggacgccagcgactcccactttcgcctggtcaaaaaaatcccccaaacctggtgtcacccagaggtagggagggaggcagcggctagccaggtccctcgcaccgaaagcgcggattcgcaggatcaggtccagggcgccgggcgcagcgttcagggcggctggtccggcggggtcctctcctgcctggccgcccgcccccagtccctgcgcacaactttctcgtccctcgtgcagcccggagagcgcgaagcgggcacacgcgctctatttataggagcgcagcgtccggctgggttggcttatcgcgcaacccgcgggctccgagaaaagggggagaaggcgtctggtgaccccatctgagcagctctctcctgacgtttaacgcaccccaaagcaagcggggcgcacagcactggtgattggcaaggttcgaggcccctcagcccctgaaagcccgtggcgtaaaggatgcgtgcccagagaggagcccacggccctgcgctggccccagctccgcgcccactctctcctgctcgatctgagtccgcagaggaggcggctggtcccctcacccctcccagcgcggaactctgccgccgagtgccctccaagcggagcgcggcgctgccaggccgggtcgcgaaaaaggataagccgccgcggacccgcgctgcgcgctgccccgaacctggggaccggcgggcgtcccgaccgcgcctggccgggagcccgccccacacagccctggggcctggcgagctcagggaagccttggggcggaccagagcccgtgggggcggctgggaggaggt

SEQ ID NO: 241285 - DNA, 387 bp, Homo sapiens
  chr20:54919047-54919434
  hyper
gaagtcttgggctgcgcctccccttgcgcggtcggagccttggcagagcctgcggcgccacctcgtgggcgaggccgcctggtgcaaggtcatccggtgccgggacccgctcctcgccccgccaggacccccgctcacctccaagctggacgcccgcggagccctgatcccctaacgcccgcttccgaggccgagctctgcagccccctgcaaccatcagatccagattgccttcctgcacgagcgcgcaactctcagcctcggagcgtgctggaaatgctgatgggaaccgtttgaatgaccgggcacgggtctgcaagaaactcagctcccaggccagccgtggctcaggaagcctcccacgtcgggtagaatcccaggaatcca

SEQ ID NO: 241286 - DNA, 196 bp, Homo sapiens
  chr20:54934323-54934519
  hyper
gccgcctccgccaaggacgcctttgcacttgtagctgcccgggaccgagctcttccagggtccccgaaaccccaaatccctgcaagccaaggaagcgatcctcctagttgacagccagagaaactgaggctcgggaaggtgtggcgctctgcccaaggtcgcgcagtcttcggccgagccccgggtctgcagagcc

SEQ ID NO: 241287 - DNA, 871 bp, Homo sapiens
  chr20:54966815-54967686
  hyper
caccccagctgcaagttctccgtacgcttaccgtctgtctccccacccactagaacgtgaactccaacacagcagagaccttctgtgcttttcttacccaggtgatctcggaggacaaaatccaatctgaagcccacccacccctcccgcgcatgtcaacaccactcaacaaaccccttgtacctctagctgtaataagtaacaagcagtatcctacagggcgcctcggtgcccaggagcggatgcaaaggcgctgggcgggcacaaggcagcgccaaggacactcagggacggaggaaccgacaggggacttgacgctccgccactccgaccagccgccccttgtccccgccgtcctcgtccgccactgagatatcccccacggtctacccacccgtcggctcccacctgcgacccaaggacccaagtcttccaagagctcagccgttagaattcaaaggttcttctttttaaataggagttaaaccctctagctagaaagccgattggcctgcgctcgagcgaggctgccttgtgattggttgacaacaaacccgacgccttgagtcgcgtttaagggcgcacaccgcgcgcaggcgcacttgctccctaagaacccggaagtggtggagccaacggccagccagacctgtggcagtcccagccccagggtgctctccgcggtcggccatttatcggtgaagcaacagccccttgacgtcaagcttgacgcattggagataaagtccaaggaggtgaactaacctttgaacgtgccagtaagtaagatggcgagaaaagcaagagagagtgggaccgatcgatagcgcagcggtcggcttggcgccctttcagcgtgcgcagtgaacgt

SEQ ID NO: 241288 - DNA, 6473 bp, Homo sapiens
  chr20:55199900-55206373
  hyper
tgaagaagtcctacgtaccgcttgtcatatacatatgtaaagataatttaaaaccctagggtatacccttttcaaatgcagagtttatagtttccaaggggaggagggcaggggaggagtaaccaggacctttcctgccagtcttccaatcgcgatagctcgttttggctgtgaatttccccccttcccctccccctcccgttaattaaataaacgctggaagcgtgtgtttaccgcacacgactcggccctcggggaactctttttctacgtctctcctactcttaaactcctcaactcacagagggttggagagctggcaccatgagcttccagttcctacgggtgagaaaagaggtgtctgtgtggagggcaggtgcgaccccgggggctagcagagaggagaggctgcgggaggactcgctgcgaagggcgaggggtggcgctgggtgggacgggcgcctggggccgtgcagggtggctcctgggtgctgcccgggctgcctgtcgcccagtactggcgcaggaagacgggtccgcgcagcgtctggcaacagtggcctgctccacgcctggaggcgaccaagttctgagttaaaggcgccgggcttagccgggaagtgtatggcgacccagaacacggagcggagaaggcctcaggggacacgaggctaccgccttagtcctcgggcctgcgctccgagcggttagggtgcgtacggatgggctccgggatgttagtggagaggtgacaggagtctaccatcccacggccaagcgtgtgaggcctccggcgggcgggggtcccccccggggcagggcagggggagagtcaggcatgtctctaacgggctccctagtagaaccgctaggaaagtggccttcaaccctaggcacctttgtggctttcaggtagttgggcgactaaaaattcacttttgcctgctgtgaaatgggacaggtggttgtcaggttagagactgtgcccacgaagtctcgtttggcgggccgggactgacgtggacccgggccctcctcggaagcttgggaacctgtgagcccctcagctcctcgcctcactttgcctgtttgaaaaaaggagttgtttgagaggaagagttaaggctcaaaaggttctaaacgaagagcatgcggcctgacgcggagcgcaaagaagcgagcagtgaactgaatctggtgggactgagaccagaggcgtctgtatgcggcggccgcttcgcgccctattaaagcaatctgttatttacgataatcatttttgtaattattttggagtggctgtgacttgatgtctgtggtgccccagggcatgcccttactggacatagatacttcagggtgccctttgacgccagtgtcggtccagtgggtgccagtgccgcgaagggagggtggcgggcgtgaatgccccctcctcctgggtttgccgcaggccccggcctttccaccttgcttgatcctggcgggtctgccacttactgaggtccctaccggcgctcacgttgtcccgagaggcgggacaaacgtccggcgcgtggcgcggagtctgcgaaagcgctcgggggcctccatcttctgctcgggagtcccctccctggggcgggaagaggagtcgcagatctgcccgaatcttgctctacccgcctggccgccttcttccgtctggggtgggggcaggggtggcggatgactcaggcctggggccgggagccctgtttccaaaggcaccacctcgcgcctctttggaagtggcgcgctgttggggcgctcccgctgttgcagaggcctggtttgcggtttcataggggcgtgggtccagggcttccagggagtaagtgagtttaggctccctagggggcggtagaggggaacccccgacaaccttccatcctcttctccaggcggctgcgaggcctccggggttccagaggggtccccttctgccggtgccggctgtcttgagcgcggccacgcagtccgcgtcttcacgtgggcaaggggcggggacgttggagggaggctgtcttggatgctggagccttcggttcccggctctgctgagcagaaaagttgaagtcaaggaagggttgaggcttcctcacaagggcgcgcgcgtgcctgggtgccggcccagaagccgagaatgtgcgtattggggaagggtctcccgtgccgagaagacagaggatttgttctagctgccttccgtacagagggcgcggaggttgcgctccagttcgaacgcttacccattggaaagagggcagcgccggggtccagggaagctccttgggaatgaatggcctttgccaagcggttccggatcctctgggtcctttgggcccacggcacggtgctgcgcgagccctcagtgcccatcggctcccttcgcctcctgcgtagacgctcccaggcggggaggcatatcggttcctccgggcagctttggctagtgttgctgtgggaaaggagagccagggcctgggatgggggatgagcaccttcttgcccattccgggccccagcgtgcaggaggtaaacttgccagcacagacaagacagcttgttcaagctgcacctcaggccgggtcagagaataaaaccgagggctagaaggcccagaatgtcggacagcccagcggcacccgtcagggagtcccaggcgcccgaaagaggcgccgcacctctggcgagtctaggacccatcttcctggacctgtgctctggagtgcctgcgggcctgggtctaatttctgcttctggcaggtgtccccctcccccgccgctaataccaggagcgctgcttctgcggtaacttattttacccccagaagcctgttttgggaccgaagtgtcagggtcctgtgtgtctttttatgcactgttctccttagtgcaaagccctgcagatatgcttggccgaaaagtctcagtggtttcaacttccagattttgttcccgcgtccggtcggaaaatcacctgggatttggctgctgtctaaggccgggggaaagtttcccttggaggacgcctattattattattttcttttaggcccacctgggtctaaataaatgctaaagttcaaacgaacccgagaaggaacagcgaggcagtggatgccgccattccgtggatgggagagtcatgtctactgcaggtgcggacaccgtactgataggcattgattattgcaaaatcgtattcagtatcaaatagaaatagtcttgtcctctaatccccacagaatgtttaaatccagcccagggagccagttggggcgtcccaacaaatacgccctcgagaattagcgatgttccccttacaatgaaagtcaattgctgcataataactgggccaaagaatttcgttagtttaaattttaaaaattagtattgcactttgctttcaagtttgggtggcaagtaccgaaggggagagggaagcagcgtttgtgtggaaggaagtttcgttttctgtctaaacatgtgggacctgggtgtctacctctccagtcgagagctctctgcaggctctctcccaacttcctgcacctcctcaccctcaccttacccgtggcgctcgggttttattcctgcccggcgcttctttcccagggcgagtagaggcttctgagtgaccggcccgccagaggcagctgcagagccggcgttccgcagggcagggcagggccgggccgctgggctggtccagtgcgcgcgggttccccctggcctcagccagccgcgggagatgccacttcgggcgacagcggcgagacgccgctgtccgcaactcctgggcgggtaggaccgtctgctgcctctgcggcccttggggcagactccccaggagtcccttcctctctcctcccgcccgggggccgggaccgcgctgtgcccacggagggaactgggcgtctctggcgcactggggctccagctgcatgatcccagctcagaccttaagcctcagtggggtgtaggtgggatgggatgtgtttttaggagatgaggagaccccggttgttgagtcgctccccaaatgcgcagtttcttaactccaggtgacatccgtcttttggaggaacgagtgaaggccgtttaggcgaaagaggggtgggtttcagtatttggatcccttcccccagctctgccaatctcaggtgtgtttacggtggaggtgacagaaggaaggcgcgtcgggggacccaggcctcgcaggtcttcggctgtcaacgaggcaccgcccactgactccgcgcttcgtccctcacagcgtggggctcggcgctgcgccaggcccgggtgcggggcggagctaggctgggactggctgggggccgccccgcccggcgcctgggcctccgcgccggcccccggggaggagttatgataatttccttctcattaaggcgctcgggtcccccggctatcgccaggacacactgttcgggcgcggctttccccgtccgcggagcggtcttgacactcgcggcggcagcatctacgctcgcagagccgccgatgcgtgtccagtgacccggacagcaaggcccgcgcgcggcgggggcggcggcagacgcctggtcaccgtgaccccgattttggatttaccgcttgggggctggggggatcctggatttaactggcgactgttttgggggacgccggacgccatgttgtggaaaataaccgataatgtcaagtacgaagaggactgcgaggtgagctggggctccggggtgcagccccgccccgccgaggacagtccgggaggcaggggccactggaccgaggtcggggacgagggcataggagccctggcctctcggtgggacgggatccacttctccggacaccccttagtccatttctgcggggcccctttcctgtatagggccttttcctaaatagcctcccctcgggaacgaggcctggaaagagaatggcaaatcccacccacacagcttaccgggcgctttcctaagcggcaaacagccctgcttcccgttttctcggaaaagtgccccgtctgcaaccctcagacgtggcttttacgcacgaagtctctgtccaaaggggtcagatgaggctacctgctagcgacaccttggcggacactcctccaaggccggcttgtcacctgccccgctacctcctcggggaagcacgaaaacaaccgaagtttggctttcaaaagaagtgggggctggggagtggtggtgggggtgcccgaggccagatggggccgtaagagctcgcgagtgctccagcctgtcggacaggttgagctagagtttcggagagtgggagggaagaaggaggcggcgagcgggaagaggaagaagacgcaggcagcgctaggcgagctcaggggcgccgggagcgcggagctcgggctacggactcgcgggagttcactgcgcctccgggccctggagggctgcccctgcccgcaggcccgggcgcttccgccaggaggcgacagcgccatgttcctccaggttcccggcgccccgagacccctgggcagatggggacgcatcctttagaaactgagtcgggccgcccaggggcgagggaacgtgcgcgggcaaggctgcccaatttccagggttcttcatgccccctctgcgccccgacgtgcgagaacactgcccttggcagtgcagggcgcccccacttattactcccctcggctgggcccggccagcagggagggccgccctgtgcgcgcgctccctcttcacttcccagggcggcgcagggtggcgggccctgctttccgagcgccgcccgctcggaggtctttgtcccgagggcgtggaagggagggtcccgggggcgggggaggtgcgcatttcccgcgccgcgcactctatccgcgcctgccgcgctgccacctccagcagtccctgcgtcatgggcgggctccacgagatagctctgcaccgggcgtccggctccttcgccccgggctctggctccttcgccccgggctccggccacggacttttctggcccaagacccagggttcggacttggcgcctccaagcgcctcgggcttgggagcagcgcctagaccttcgccgccgggctttgagaactcgttcccccaggtctttcaccagactctcctccctccccgcactctttgcttacaacgaaatcctcggggcgcattgcccccgggtaccttccgaccctgggcaagccccgccgggcggggtgcggttggtcccccggggccctctgcgtagcccggcgatgccggccagttcgcagtagcggggtttcgcactaacggggtctcctgtttttttttttccctccaggatcgccacgacgggagcagcaatgggaatccgcgggtcccccacctctcctccgccgggcagcacctctacagccccgcgccacccctctcccacactggagtcgccgaata

SEQ ID NO: 241289 - DNA, 329 bp, Homo sapiens
  chr20:55499422-55499751
  hyper
aaggagagtatcacgtttatactttaaaaagcccaactgctctgtttaaagtggatctttcataaacttgcagtcaggagcaacaatgacgtccttcagggagtcaaacactttggaaagaaacgcgaactgaaaatgctattggaggacgcaagaaaaccgaaaacgctcggtcgagtttttctgtcaagccacgtttgaaattaaggaattcgtgtaaattgccatctttcgcatccgaagcaagaaacgtacacagtttccctgctatacggagttgttgtgacataagaaaacagaatctttttaaacctcgagtttaattaatt

SEQ ID NO: 241290 - DNA, 1131 bp, Homo sapiens
  chr20:55499991-55501122
  hyper
gtgattagcggatccgtgcacctagataatgaagcctggtcgcggttattggcagaagggcccgggcgcgctgtgagaacgctgcaggctcactttgtagtgcggggcctacgcctattagattccaatcagtttcgcctaaaaaggggaggagggcggagtgggaggggggcccagagttaaacacaggaaacaagcgttgagtgtgtgccaataaaaatggtcacaaatcagggctgctgatgtcataaccctgggggtcgggggtcagggggagtgaatgcgcctgaaagggaccgcctgtctgcggccggagcggcggcgggcgcggggggcgacggcgcgcacaatgggcccggagcgcctcattagagacgcgtttgatgcgctcccgtgccccacgggggccctgggcgatgtcaatgggataattacgatgatctaatggccggctcttttgcatgcaggcccgcctgaatggggcgcctggaggctgcattgaggccgggctgtgtaaactgtagggtgcctcgccgactcggagccgcagagactggcggcgggtcaacttggaccactttgcattcacgctttgaataggcggagcgggaggcgtcctttcccgcggccgcctttcagccgagagagtgacagattggaggtcagcggctggcgggacggaagccctcgccgggcagatggacccgctccgggccgcgccggggacccccgccccgcgcacaggcgtgtctacgcggacgggctccgagcgcacccgcgtgtgcgaggcgatgggcagccgcccgtctcccgatgcagccaagagaacggtggttttgcattttttccaaacctcttcttgtcttaatgacaagagtcaaaccgtctcgcgcttggctcccctcccggcacctgtgcgtttccccagaagccgacttggccccggccaagggcacccgcagagcagcccctaccctccaatattttgcaggaggggagaagaggaaaaagagaactggatatttgatatgtcgaaagaatgatcgatgatgaggctgcaccgtaggagcttgccggtctccgaccgctgctggcctgcgaagccggcacgtttacaaggctcagccctgg

SEQ ID NO: 241291 - DNA, 124 bp, Homo sapiens
  chr20:55503342-55503466
  hyper
tttgcctggcgtcaccctgccgccgacagtcactttaccccaagggccaagggtcccctggggacccagcagcagggacaccacctggctgctttgagaggtcaaaccccggacaggacctgtc

SEQ ID NO: 241292 - DNA, 206 bp, Homo sapiens
  chr20:55532710-55532916
  hyper
agtaggggcaggggcgggtgtttactgggtcatttaaccgggtttctattttttaaagtttccttttctacgactatttgttgaccctaattgtttccatgcccatgagatgcgtccctgaacttcctcctgcggcctgtcggtggggccgggtggctccctctaattgcctgtgttcctgccttttccctcgagtctccagggca

SEQ ID NO: 241293 - DNA, 150 bp, Homo sapiens
  chr20:55588947-55589097
  hyper
ccggggctacagagcgctcaagacctttccctcgggtgctgagggaaggatcccctatcagagatctccaaggaaggccccgcctccacctgcccctcccgcaggagagcgctgctgcagaatctgccgcctggccggtgttcacccagc

SEQ ID NO: 241294 - DNA, 495 bp, Homo sapiens
  chr20:55839321-55839816
  hyper
ccccaggtgcccagcgtggggcttcagtatcattatttccatgttgacacagcgcccgtgggcgtgagtttgctgtcttgacttggttcgggttttcgcagcaagttacacaagtagaatgaaagcggctcaggaaacagcgctatcggggtgtgttatctcggaaaccaaatatttgatcatcagtcccgcagcgcgctggcgctgccggggggttagtttgagcaagtctggagaatgtgcgcgcacatatggagggggagctccccggccctcgctgcagccccaggctcgcgtcgccggggtcgtcgcggctccagtcggaaaccgggacccccagccgcccccgcggcgtcagctctgagatcccgcgcaacccaatcgccaaaacctgtggtttgcgcgccacacgtggtaaatgctgaaaatagattctgccggcccgggacctaccactaaatacttaaaatagaagactagcggcagggcacagtg

SEQ ID NO: 241295 - DNA, 1413 bp, Homo sapiens
  chr20:55840239-55841652
  hyper
aggcgctcggagcgcgcggtacgctaaggcgggcgcaccacgaggggacaggtagggcttgacagggagggtaagggggtgcgacggccgcgatgccagagccaggcagggctgagaggggcccaggaagggcggcaaggcagcctcgccgggaagggccctttacatccaggtagcgcgagccgcgccggcccgggacagctcacatgaccgagccccgcgctttgaacggcccttgcctccagccccagagatgcggccggcggcgtaacatggaggggacttcggaggatccctccttcccagtaacccctacaggctcaccgaacccagcgcgcccgacctgggggcgcacacagcttgggagtcatagggctgtgggtgggagaccctcgggcaggcactgcgatttcagccaggagcggaaagctgggcgggctgcatagaagaagcggctccctccctcccagtctcaaagtgcccccgaaaggagacgcgtaccctcgcctgcccttactcaccgaggttgacgaagctcatgaccatgtcggcgtcggtgaggaaatggctatcttgcaggctggccagaggggggccctgggtactgaagacggccttgtaggggtaggagaagccctggccgccgggcccgccgccctcctccaccgccatggcgttgtacaggtccagcatgaacatgggtgccgagttgtgcttgccctggaggtgcgggcgcgggcggtggggcaagcccaaaatggagaggatctcgcgctgcatctcccgccgctcctggctgcggaggcgccggtggatgaagctcgagtgcacctcgttgtccaggctgaagtcggccagggcggagcgcagcaggaacaggggtgcccagagcgccacgaagctgtgcggcgccgcagctcgcagtgagcgcacgtgcatcgcgccggctctacgcgctacccgggctccgggctccgggcccgcaccgccccaggtggcagagggggcaggcggccgtccgcgccgctcggtcacttgctgcagacgggccccgctgcgcccgcgccagacatggcccctccccggccggccgcgctctgcccggacccccgccccctgctcggtgctggccccgggcccctcgccccgcactcgcccgggcgcaccgcagggcttggaaagcagccccggcgaacgaaaaggcgagtgaggaggcgggcgcgggtgggaggagcagccagcaagcctaggagtccagagagccaacgccggggaggcagcgaggaggcaggcgggcgggcgagcgctccttcttcccgctcctctggcgctctcgccctcgggcggcggcaacccaccctcttccaacctccggcgcggatagcaggggccccggggcgctctcccagcctt

SEQ ID NO: 241296 - DNA, 316 bp, Homo sapiens
  chr20:55841873-55842189
  hyper
tgcctagagcctggcgggacgtcgcggggatgcggctggaggaatcggagccggccctgccctctcggcactcgcggtccggaccaggaaggcggcccgagcaggacgggtgggctgcggaccgcggtgggaaaagttgggggagcgcggaggtggcgcggaaatagaaggcttcctggaagcggtgacccttgagccggtcttgcccctcagtccctgtatccttttaagccagccacgctgacccctccgcgcctccctgaagccgttgccagcctgtctctgcgctcgccattccctccgcctggacctctcc

SEQ ID NO: 241297 - DNA, 457 bp, Homo sapiens
  chr20:55926142-55926599
  hyper
aaagcagtcgcttagtaacttgcagcggctacatcaactttggaccaattcgcaaactgctggtgtaaagcgtttttgcgcatgtgctgtcgccttgcgggaaaaggagcctttttcttcgacgatttccgggcgacgcaggaagtggctccagggcgcacgcgcgttgtttccgcggtagtcagggcagtttctaccgcaggcttaaggaggcttcgggctcctgggatttctgtccgcgctcctggccctcgtccttcgcgccagagcaggttcgcaaactcctcagacccttctgctcccggccgccgctttccgccggggcgagacccccaggtaggccccgtgccgcgcgcgtcccgtcgttaaccgccgccatggctcccgcagaggccgagttgcctcccgggagcgcgcttctgcgggatgctggggcgcgagcgggactgttgactaa

SEQ ID NO: 241298 - DNA, 536 bp, Homo sapiens
  chr20:55964189-55964725
  hyper
tggagacatggggccgccggagggggggagggattggtgatccagatacccaagggggcccgggggcggggggcgaaggagtgcgactggacccgcacctgggcaaccgcgtctccagcctccacggccctgtcccgcccccttccgggcaggcagaggccccggggctgccctgccgcctgggcccggcccccgcggcagcagccgagcggccgcacccctttgtggggctgtcgtgccgggaggggcgcgggcgaggcgggcccgggcggcgctgggacttgtaggccgggagcccgggcgcctccgggctgaagcccgtggccacgccaccgacgcggctccagcctgcccaggcaacgcgacggctggggacagccttggaaaaactgaaggggaaaccgaggcctggtgaagggatccagctggcgcaaaagcacgcggccgcgcagtggccgcctcccccggcctctagggggcaagtgaaggtcacacttaaatgaaagttttcaaagtcgcttcgaagggcctccggc

SEQ ID NO: 241299 - DNA, 191 bp, Homo sapiens
  chr20:55964955-55965146
  hyper
acgggggccgcaagcgggggcaggagcgccaggaacgaggaacgaagggggaagggaggaaaggacgcccaggcttccggaagactcgggggtcccatccccactgtgcagagggctagagcgggagctgggggagggagaggtcagaggtcaaggctgccgcgtggagcgtgggccgtggagtgggggag

SEQ ID NO: 241300 - DNA, 431 bp, Homo sapiens
  chr20:56073581-56074012
  hyper
gtgaacacgcaacccgaatccctctcacttatccatcgtgttgaggagcatttcacaggtcacgccttcatccacttcctctttgactctggctgtggtttctctgcaggcgacaggaaacatctctcctgggaactgttctcccttcgtggtggaagcctcctcagcagcagcttcttgagaaaaagtccaggatgagcaaatttatcagaaagctaaggaattggaatttataaactgtgcaaatatattttggaaaccatcacttaaatttgaacacggcagcaagcatgttagaaaacaatctaattgataagatggtactattctgatctcaactactgccttcagtcagggcttcttagcctcagcgctacagacgtttggggccagagagctgtctgctgggggcagggcgctgttctgggcac

SEQ ID NO: 241301 - DNA, 847 bp, Homo sapiens
  chr20:56284038-56284885
  hyper
cgcacggacatccactcagagcccgagacacagcgccgcgaacactccagacacacgcccggagccccagacacctcgcagaccagacagtgtctcacacgcccctccacccccgcccaaagttgataaagagccggcctaaatgctccatcgcgactgccctcagggaaataaaatggaaacttcacggatccgcccgccccaaccctcccgcgccgtgcgccgccgctgagccccgggtccgagtccgggcgggcggggcgcggacagcgggggccgtgccaggctcgcagcgccgcgggacaaagccgggccggccgccagctgccgcgagccgggagggcgcgcccggggcgcggcgggcgctgcccgggcgcagggcgttcggtccgagggggcgcgcagggcccggacccccgctcgcagctgtgccccgacatagggtccgagcccgatggagtctccggggaggggggcgtggggtcactcactgatctccatgctctggaacaaagagcgtttgcagttgcacgtgcaggagacattgggctgcccggcggcggcggcggcggtgctgttgacccccatcaagcggtgcatggacggcgcggcggcgcggcgcggggcgcggggggctcgggggcggccggggggggctccggccggcgcccggagctggggccccgcatgcaggaggcgcgcggcgggggaggcgcgccccggctcgccgggctcgggtcgccgccaagttcccggggcgccgcggggctcagtgcgcgggaccgcgctccgctgcgcccccccggcctcccctcggcagccccgggggcgtcggcagtgcccgcgg

SEQ ID NO: 241302 - DNA, 545 bp, Homo sapiens
  chr20:56285253-56285798
  hyper
gcaacggaggaggggcgctgtgccctctccccaacggcggtcagcttggaacgcctgcccggcgcacgcccggggccggggagccgaactcggtgccagccgcacccgggcgggttgctggtgcgccctcccctcgcccccgtccctggggtccttgacccaggctcttggggctagcctatcttctgaggagcacaaggtccctgggggctcagggaagagaaattggagaaagggggaggaagcccccaagatggatcacccattgcctggtttcgcaggagactgtccgccttcagttctccagcagctcggggatcatggcccactgaacccccaagcgctttcacccgaacccaaggaggacgaccaggaaagacgggaactcgcgtagacacgcccggaagcccttgtcatgtaaatagctgtcggggactggtgtattgtcgccgccccagccggcgggacctggggcgaatccacacccattgtctgctgcccaaggggcctccggctggggggcgcggctgcggagttcaaaaggg

SEQ ID NO: 241303 - DNA, 205 bp, Homo sapiens
  chr20:56725858-56726063
  hyper
ggacccaagcgacgcggcgaaagcacagcgaccccaccctcgccaggtgcagagccatttccgcctccgagtcctgcgttgcctggcaaccggtctcccaggagacgcgagacgctgagcccagggccagagcttgcggggcgcacagagcccccaggcctcatggcgcagaaacctctcagcaccgcggcggctgaacgcatga

SEQ ID NO: 241304 - DNA, 78 bp, Homo sapiens
  chr20:56785113-56785191
  hyper
caggcccggagaggattttcttcgtgaatccaagacagaggggtggaaagtgctcaggacctctggggtgtgtcctgt

SEQ ID NO: 241305 - DNA, 746 bp, Homo sapiens
  chr20:56803386-56804132
  hyper
cggaacatctcccccgtctcctccagccgcacccgcaggacgaagacgtcaggggccaagtcgggcaaggcactcgcggccttcgggtcacagacgagccgctggctccggccgcgggcacaggccaggggctgcgcggggagggcccgcgagtccgccgagcccaccctgggcccgccgcacccctgagccccggcccgcgcaccgctcctgcgtcccgcattggggtgcaggcgagaggcgcccccagttggccccgccgcccgcgctccgcccgcccccgccgccgcccgccgcatcccccaggcgcggccgcgcgtcatccgcggctcgagtgcggtggccacgcgtcatcgccgcccccgccctgacgccccaaggcgggcccatgcgccccccgccccactgtgacgcccaggccccgccaggaccgccccctccagacgcaaggcgaggcccctccctgcctgccgcccgagcctccagggagaccgatgggcgggcggccccccaaggtcccgcagtcctttcccgctccgcgatgaacaaagccgcagtttcacgcggccgcgggagacggttcttaaataatggaacaggacataagtgcttcccagagcaaccgggagatttattgataaatacagagacatcgccgggcagccacgctccgacaacccgcactgggcccccgtcccgagctcaggccacgtccccacctcctcgaagcctccaagctgctgtta

SEQ ID NO: 241306 - DNA, 61 bp, Homo sapiens
  chr20:56964019-56964080
  hyper
ccttaatagtttccgcggtggctgtcgtagctggactacagaccccgcctcctgagcggcc

SEQ ID NO: 241307 - DNA, 57 bp, Homo sapiens
  chr20:56964789-56964846
  hyper
tgcgcctcctccccgacccccagcctcctgggacttgccttcgaggcacttgtcact

SEQ ID NO: 241308 - DNA, 115 bp, Homo sapiens
  chr20:57056686-57056801
  hyper
ggcacaccactcaccgagctgttcttgggagcttccacaagggggccctcttgagctttggttggggcgattgggagccagtggcgaaccctcaccccgccggctccagcttcgg

SEQ ID NO: 241309 - DNA, 908 bp, Homo sapiens
  chr20:57089453-57090361
  hyper
caggccccgactggcgcagagagtgcagcggctctcatattgcgaggtgacgcgactccctcccgcaggccccaggaagctcctggaggcgcgcaggtgccggccaggtgagactggagaaaggcgcgcagggcgcagcatagcagccgcgtgggccgacccagggccgtagtccccaagggcccttaggggacattagacggcgagctccctcccttccgagctcagccagtttgccgggtgggggagggtggcacctacctcccaaaagcaccaggacgcaagcgtaggggagcatggctgcgggcatcccgtcggggctggcaggaccgcccgccgggcgctgccacggtgcgcaaggggaggcgcgggcgcagggctctcggacggctgcgggcgccggcggccaggctggagtcctgcgaagaagttgcgagggtcctgcgcccccctcggcgctcacacgcgctcagccttcccggctgttgatagttgtaagcggagctgcgcactcataggtccaacttgccagaagaggtggagacagcccccggcgaggcgcgcacacccgcgcagcgcgcacagccccctggtgcagctcctgccattcagacccccagccctcccccagatgtccgtcccctggccgtcgccttccccaaagtcttcgcagtgggcaaggaggcctcccccaagctctggtcccggccaaggcagagcgatgcgctccttgcgtcaaagcgcacccctagccaggccgttccctggaagggcaagcggggcggggagttcctctaagccccgccagtcctgggacccctgaagtttctattcaggtcttccagctactcctggaaaagtcgcgtcaacttggatcccagcaaacccagaagcgcagtgaaagtggc

SEQ ID NO: 241310 - DNA, 83 bp, Homo sapiens
  chr20:57224588-57224671
  hyper
aatatttcccggggcgctacgctaagcacacgggctccccgaatttccctccccagggcctctctgtctttggatggcctgtc

SEQ ID NO: 241311 - DNA, 102 bp, Homo sapiens
  chr20:57226047-57226149
  hyper
agcctgggggccacgctccccaggctcaggcctgctcgttggcctgctcctagtgcctggacccagttgggggaggcgaaacagggcgcccgaggagcaccc

SEQ ID NO: 241312 - DNA, 324 bp, Homo sapiens
  chr20:57227598-57227922
  hyper
ctgggtcgccggatcgtagacccaaatccttgcaaaatgaacgactccctcccctcaaagaggagggagttgtgttgttgttttgttttgttttgtttttccgcccgttttcttttaacggccccgcagccctctgtgtggccttgttccctgtgaataattgcctcactgttcttcctgggggcttgcgtttgtgagactcaaggtgctagcctcttcactttccatttcccagacaggaaattaagctttcctctccattcgaactttttaaaaaaagcctgaggaggtatatgtgaaaattaaccccgtaaaatagcactt

SEQ ID NO: 241313 - DNA, 86 bp, Homo sapiens
  chr20:57465844-57465930
  hyper
gtgggtttttattcgtgttcgtgtgtgtgtgtggacacattttccttttcggttgctctgtcctttggttcgtgctcgcctcgctt

SEQ ID NO: 241314 - DNA, 100 bp, Homo sapiens; identical to SEQ ID NO: 205878
  chr20:57466877-57466977
  hyper

SEQ ID NO: 241315 - DNA, 63 bp, Homo sapiens
  chr20:57556038-57556101
  hyper
ggaaactggggctcgcagagccggcgccgcaggggaggggctgtgcacgaatccagtgggaaa

SEQ ID NO: 241316 - DNA, 228 bp, Homo sapiens
  chr20:57579614-57579842
  hyper
gggcggggtggggccgggggctttgtgttccttttttccaggtgggagagcttccctgagtgggaagggacgggctcagtgaggggacaagacagttgatcctgggggagaggagggaagacaaatggaggacctgctgccttggctggcaaatggccagggccccgtggaagtccccttctggtggcttctattcctcagtgaaagaggaagcgagtgcctgggcct

SEQ ID NO: 241317 - DNA, 674 bp, Homo sapiens
  chr20:57581889-57582563
  hyper
ggaagagaaggagcgacccccaaaacgaagcggctggatctgaccttccaaggcctgttggcgacgcagggcccccaggaggcagagcgcgcgcctggcccgggcgatgggcctcccgtccccccagggctgcctccccgccggtgcccacctgcgccccagcggagccagcccgtccccccgcagaggccggtagcaggtctgtccccggcggaagtagaggccgccctgcgccgcgcccgccagcagcacgagcagcagaagcggccgccaccctggcccgcgcctcgccatggccccgcgccggctcctgggtcccgctccggatcccgctccgagtcccagatcccgcgccggctcccgctctggatcccgccccggcctcggcctcggcccagcacccggccgaccccgcactttgggcccctgccccgcccggcccttaaggctgcggcggccaggccgggacactcccccggggcggggctgtcccatcgctgctcctgccccgcccggtgacccctgccctccccgcccggctccgcgccccgctccctccctggctccggggcacctgaactcgcgggccaggcgcgaggtcgccgggcagaccccagcctgaccccgccgccggccgccgccctgagcgcgggactgtccggctggactcattt

SEQ ID NO: 241318 - DNA, 79 bp, Homo sapiens
  chr20:57798203-57798282
  hyper
gacattatttcagtttcccaggaccagggtgagagatgggggtgaaagaagaaaaaggacaaaacgaggtgccgaaggc

SEQ ID NO: 241319 - DNA, 118 bp, Homo sapiens
  chr20:57875456-57875574
  hyper
gccacgccacgccgcccccgcccctcgctgtcctgggtgcgcctcgggccgctgcgctcctggccagctccccccagcgcctgggaggcgacccccagtgcgcccgggttcaaaggcc

SEQ ID NO: 241320 - DNA, 178 bp, Homo sapiens
  chr20:57875934-57876112
  hyper
ggcgcgcctctcctggcgcgagcgcacacaaaaggacccagggcgggggacccgaggcgcggagaagatgtgcgtcgcggggagcaaactcttgcctgggctctgcactcgtgaagacgcctgggggagggctggggagcagaagcggcgcgcaacgactacccgcacgggctccggg

SEQ ID NO: 241321 - DNA, 135 bp, Homo sapiens; identical to SEQ ID NO: 205888
  chr20:58090760-58090895
  hyper

SEQ ID NO: 241322 - DNA, 485 bp, Homo sapiens
  chr20:58152276-58152761
  hyper
acagcgcggggaaccggcggctacacctcccgcccggctgtccctttaacgtttctagggcatccctggaaggcccgggcacggcgctgaggtctccgctcccgctcccgctcgcccgggcgaggctgcggctccgggcgggtcaaggtcgcagcggagcccctcggagcccccgcccggcggagaggccggcctcgcgtggcggcgccgcccccggccctggtcccggtcccgccccgccggcgcctccccgcggccccggctccgctccgcggccctccggcgggatgcgtggccgtggcggggggcgcgcccgctgtcctgcgcccctgcgctcgctgctgggcgccttcggggcccgggacgctgccgccgccgcccgagatcctgcgcaaggtaagcgcgcgctgcggggaggggacgcgggacgtggggcccggggtgcccgccgggcacgaggcgctgggggacgactcctcctgaat

SEQ ID NO: 241323 - DNA, 141 bp, Homo sapiens
  chr20:58179412-58179553
  hyper
gcggctcctaacccggggtccagcccctcctcccccaccccggcgcgcggtccaggtatgtgcgacccctcccagtggccacgcgccttctcacgcccctctcccgtgacgtcatgctcctctcgcgcggcatgatgggag

SEQ ID NO: 241324 - DNA, 104 bp, Homo sapiens
  chr20:58509170-58509274
  hyper
ccgggggaccagggcgccgggccgacgactcctgggtgaggcctggctcctgccggcagggggcgcagggccgcctgggctcctgggtgcgggtgccggagggc

SEQ ID NO: 241325 - DNA, 523 bp, Homo sapiens
  chr20:59828688-59829211
  hyper
gggtgcgatttggagcttcgtggccgatgaagaaagccgcggtttagagcttttcgtaaggaatgaccctgcgtcccgctctcctccctcggtgctgggggtagaggggcgccctccgcggtgccggcgtcgggaagcctggagctccgggctgggggcggcctccggagtcgaagcatgggcgggcgacggcagcgcgcggagctggaggaggcggcgggcgggaggcgccactgcccggtgcgggctgcacccgaggcttcctgcgctcgccggggagccaagcaccgctgtgctcctgctccttcagcggggctggcttcccgcttgcacacactgcctctccctccaccacctcctcctgcctgtcacgccccctcccagaagcttggtcggagggccctgtcgtccaccccatccttccctggccctgtgccatgggctctagacttccccactgagcaggaaaggcgagcgagctccggaggacaggaggagaccccctttccggtcagttagggga
